United States Patent Application Publication US 2005/0244851 A1 - sequence listing, part 62

SEQ ID NO: 2409180 - DNA, 25 bp, Homo sapien
aatggtttcagcctgttaggtgatg

SEQ ID NO: 2409181 - DNA, 25 bp, Homo sapien
tttcagcctgttaggtgatgtggtt

SEQ ID NO: 2409182 - DNA, 25 bp, Homo sapien
tcagcctgttaggtgatgtggttac

SEQ ID NO: 2409183 - DNA, 25 bp, Homo sapien
tgtatttgcagatagtagtgaaacc

SEQ ID NO: 2409184 - DNA, 25 bp, Homo sapien
gatcaacaatgtggtcaaaactctt

SEQ ID NO: 2409185 - DNA, 25 bp, Homo sapien
tctccttcagagactttaccactag

SEQ ID NO: 2409186 - DNA, 25 bp, Homo sapien
tatagttccggctccacaaagcctt

SEQ ID NO: 2409187 - DNA, 25 bp, Homo sapien
ataaagttaagtctgtcagccctgt

SEQ ID NO: 2409188 - DNA, 25 bp, Homo sapien
tctaccagatgttccaggtttcgag

SEQ ID NO: 2409189 - DNA, 25 bp, Homo sapien
ttcctctaccagatgttccaggttt

SEQ ID NO: 2409190 - DNA, 25 bp, Homo sapien
gatgttccaggtttcgagaatatag

SEQ ID NO: 2409191 - DNA, 25 bp, Homo sapien
tgtagacgtcggatcaaggtatcca

SEQ ID NO: 2409192 - DNA, 25 bp, Homo sapien
gtagacgtcggatcaaggtatccat

SEQ ID NO: 2409193 - DNA, 25 bp, Homo sapien
ctgtagacgtcggatcaaggtatcc

SEQ ID NO: 2409194 - DNA, 25 bp, Homo sapien
aatatcttggcaagtgtagtctcaa

SEQ ID NO: 2409195 - DNA, 25 bp, Homo sapien
tatcttggcaagtgtagtctcaatt

SEQ ID NO: 2409196 - DNA, 25 bp, Homo sapien
atatcttggcaagtgtagtctcaat

SEQ ID NO: 2409197 - DNA, 25 bp, Homo sapien
gctgtttccaagaataaatctgggc

SEQ ID NO: 2409198 - DNA, 25 bp, Homo sapien
atctgggcggaagggtttcattcca

SEQ ID NO: 2409199 - DNA, 25 bp, Homo sapien
ctgggcggaagggtttcattccatt

SEQ ID NO: 2409200 - DNA, 25 bp, Homo sapien
caagaataaatctgggcggaagggt

SEQ ID NO: 2409201 - DNA, 25 bp, Homo sapien
cccagaggggacacatgaatgggtt

SEQ ID NO: 2409202 - DNA, 25 bp, Homo sapien
tagaaggtttctttccgcaggatga

SEQ ID NO: 2409203 - DNA, 25 bp, Homo sapien
gatcccatagctgtacacatctcct

SEQ ID NO: 2409204 - DNA, 25 bp, Homo sapien
gatctcctgtgcgatgatcccatag

SEQ ID NO: 2409205 - DNA, 25 bp, Homo sapien
ccgacagctcaaagtgtagaaggtt

SEQ ID NO: 2409206 - DNA, 25 bp, Homo sapien
tcttactggagtgcagatatgacat

SEQ ID NO: 2409207 - DNA, 25 bp, Homo sapien
tagatttcagacgaccatggacttc

SEQ ID NO: 2409208 - DNA, 25 bp, Homo sapien
attctactgtccactacgcagttgg

SEQ ID NO: 2409209 - DNA, 25 bp, Homo sapien
tggaattgcagccaaaatcagtgat

SEQ ID NO: 2409210 - DNA, 25 bp, Homo sapien
gagatcttaaactcccaatccatga

SEQ ID NO: 2409211 - DNA, 25 bp, Homo sapien
gacagagatcttaaactcccaatcc

SEQ ID NO: 2409212 - DNA, 25 bp, Homo sapien
atgtcatacaagacagagatcttaa

SEQ ID NO: 2409213 - DNA, 25 bp, Homo sapien
tcttaaactcccaatccatgaatgt

SEQ ID NO: 2409214 - DNA, 25 bp, Homo sapien
tcactgtgccgtagaacttggtcag

SEQ ID NO: 2409215 - DNA, 25 bp, Homo sapien
acttggtcaggttgtaatagtcaat

SEQ ID NO: 2409216 - DNA, 25 bp, Homo sapien
tctcacagtattctatcaccccgaa

SEQ ID NO: 2409217 - DNA, 25 bp, Homo sapien
cgaagatcatggtatcaagtttcac

SEQ ID NO: 2409218 - DNA, 25 bp, Homo sapien
ccagcaacctcagtgattagaggaa

SEQ ID NO: 2409219 - DNA, 25 bp, Homo sapien
atgaagtgaagttatttctcaaggg

SEQ ID NO: 2409220 - DNA, 25 bp, Homo sapien
tcaagggtttgaagtaagggctaca

SEQ ID NO: 2409221 - DNA, 25 bp, Homo sapien
ccaccagcaacctcagtgattagag

SEQ ID NO: 2409222 - DNA, 25 bp, Homo sapien
gtttttcagtgaaattaccatcatt

SEQ ID NO: 2409223 - DNA, 25 bp, Homo sapien
ccatcattgtgcttgagatctttga

SEQ ID NO: 2409224 - DNA, 25 bp, Homo sapien
cattgtgcttgagatctttgagaat

SEQ ID NO: 2409225 - DNA, 25 bp, Homo sapien
gaaattaccatcattgtgcttgaga

SEQ ID NO: 2409226 - DNA, 25 bp, Homo sapien
gtatttgcactgtcgtagtctctgg

SEQ ID NO: 2409227 - DNA, 25 bp, Homo sapien
ctttttgtcgtatttgcactgtcgt

SEQ ID NO: 2409228 - DNA, 25 bp, Homo sapien
gattgtatctcgtcttttgtcatca

SEQ ID NO: 2409229 - DNA, 25 bp, Homo sapien
cgtagtctctggattgtatctcgtc

SEQ ID NO: 2409230 - DNA, 25 bp, Homo sapien
tccagaggaaagatattttcaggag

SEQ ID NO: 2409231 - DNA, 25 bp, Homo sapien
ttctgacgaagttcataatcttttc

SEQ ID NO: 2409232 - DNA, 25 bp, Homo sapien
tttcaggaggaatgtgggaccattt

SEQ ID NO: 2409233 - DNA, 25 bp, Homo sapien
atgattggtctcattggtctccaga

SEQ ID NO: 2409234 - DNA, 25 bp, Homo sapien
tgagcatcaggagagcgacgagcag

SEQ ID NO: 2409235 - DNA, 25 bp, Homo sapien
catcaggagagcgacgagcaggagc

SEQ ID NO: 2409236 - DNA, 25 bp, Homo sapien
ctgagcatcaggagagcgacgagca

SEQ ID NO: 2409237 - DNA, 25 bp, Homo sapien
agcatcaggagagcgacgagcagga

SEQ ID NO: 2409238 - DNA, 25 bp, Homo sapien
cccggcctgtaatatcattaggaag

SEQ ID NO: 2409239 - DNA, 25 bp, Homo sapien
cgtgggtatcataggtcaaaagaac

SEQ ID NO: 2409240 - DNA, 25 bp, Homo sapien
ggaagtttagagttcttccaagtga

SEQ ID NO: 2409241 - DNA, 25 bp, Homo sapien
caggataggtcttatttacgtgggt

SEQ ID NO: 2409242 - DNA, 25 bp, Homo sapien
agtcacagcaccctgaattttctga

SEQ ID NO: 2409243 - DNA, 25 bp, Homo sapien
ccctgaattttctgataagcagtga

SEQ ID NO: 2409244 - DNA, 25 bp, Homo sapien
agcaccctgaattttctgataagca

SEQ ID NO: 2409245 - DNA, 25 bp, Homo sapien
gaattttctgataagcagtgagaca

SEQ ID NO: 2409246 - DNA, 25 bp, Homo sapien
acagaggtatacagaagcaccatgg

SEQ ID NO: 2409247 - DNA, 25 bp, Homo sapien
agcaccatggtactgtcaacatccc

SEQ ID NO: 2409248 - DNA, 25 bp, Homo sapien
agaagcaccatggtactgtcaacat

SEQ ID NO: 2409249 - DNA, 25 bp, Homo sapien
gtccacagaggtatacagaagcacc

SEQ ID NO: 2409250 - DNA, 25 bp, Homo sapien
gatcagagtatgttagaggccattc

SEQ ID NO: 2409251 - DNA, 25 bp, Homo sapien
ctagggcaagatcagagtatgttag

SEQ ID NO: 2409252 - DNA, 25 bp, Homo sapien
cagagtatgttagaggccattcttg

SEQ ID NO: 2409253 - DNA, 25 bp, Homo sapien
ggcaagatcagagtatgttagaggc

SEQ ID NO: 2409254 - DNA, 25 bp, Homo sapien
tcctcttgttagtctccaagcacag

SEQ ID NO: 2409255 - DNA, 25 bp, Homo sapien
tagaaaaggagatatggaaggaccc

SEQ ID NO: 2409256 - DNA, 25 bp, Homo sapien
gcaacattgatccatgcagctcagg

SEQ ID NO: 2409257 - DNA, 25 bp, Homo sapien
caagcacagtcaggacattactgct

SEQ ID NO: 2409258 - DNA, 25 bp, Homo sapien
ttatttgctcttagtagaccagtac

SEQ ID NO: 2409259 - DNA, 25 bp, Homo sapien
tggggttatttgctcttagtagacc

SEQ ID NO: 2409260 - DNA, 25 bp, Homo sapien
ggttatttgctcttagtagaccagt

SEQ ID NO: 2409261 - DNA, 25 bp, Homo sapien
gggttatttgctcttagtagaccag

SEQ ID NO: 2409262 - DNA, 25 bp, Homo sapien
tcaaataggcaagagcaaagtctcg

SEQ ID NO: 2409263 - DNA, 25 bp, Homo sapien
taggcaagagcaaagtctcgttttg

SEQ ID NO: 2409264 - DNA, 25 bp, Homo sapien
ccaaagagcaggattccattcaaat

SEQ ID NO: 2409265 - DNA, 25 bp, Homo sapien
gattccattcaaataggcaagagca

SEQ ID NO: 2409266 - DNA, 25 bp, Homo sapien
gaatcgtatttttgctagaaccatg

SEQ ID NO: 2409267 - DNA, 25 bp, Homo sapien
ttggcacggtcgtaaatgagaggac

SEQ ID NO: 2409268 - DNA, 25 bp, Homo sapien
gatgcagtccctaattttggcacgg

SEQ ID NO: 2409269 - DNA, 25 bp, Homo sapien
agttaagacccagctccaaaagagg

SEQ ID NO: 2409270 - DNA, 25 bp, Homo sapien
ctttttgggcctggcccttgacttg

SEQ ID NO: 2409271 - DNA, 25 bp, Homo sapien
tttgcagctttttgggcctggccct

SEQ ID NO: 2409272 - DNA, 25 bp, Homo sapien
tgggcctggcccttgacttgccatc

SEQ ID NO: 2409273 - DNA, 25 bp, Homo sapien
agctttttgggcctggcccttgact

SEQ ID NO: 2409274 - DNA, 25 bp, Homo sapien
gagacagcgtcagaacaaggacatt

SEQ ID NO: 2409275 - DNA, 25 bp, Homo sapien
acatttttcatatagtcaggggctg

SEQ ID NO: 2409276 - DNA, 25 bp, Homo sapien
tcccaggagacagcgtcagaacaag

SEQ ID NO: 2409277 - DNA, 25 bp, Homo sapien
gacattgtcctcaaagtactggtca

SEQ ID NO: 2409278 - DNA, 25 bp, Homo sapien
aggaactctggaccaccacacataa

SEQ ID NO: 2409279 - DNA, 25 bp, Homo sapien
cccttcagcttgtagaggaactctg

SEQ ID NO: 2409280 - DNA, 25 bp, Homo sapien
actgctcggtcacccttcagcttgt

SEQ ID NO: 2409281 - DNA, 25 bp, Homo sapien
tgtagaggaactctggaccaccaca

SEQ ID NO: 2409282 - DNA, 25 bp, Homo sapien
taaagccgagttcgtgggagaaata

SEQ ID NO: 2409283 - DNA, 25 bp, Homo sapien
tccttatcttgtcttaacaccacct

SEQ ID NO: 2409284 - DNA, 25 bp, Homo sapien
taagatatcctgaaactccttatct

SEQ ID NO: 2409285 - DNA, 25 bp, Homo sapien
aaataggaaacgctagcctccagag

SEQ ID NO: 2409286 - DNA, 25 bp, Homo sapien
aaacagtcctcagtttctgtaccat

SEQ ID NO: 2409287 - DNA, 25 bp, Homo sapien
gaaacagtcctcagtttctgtacca

SEQ ID NO: 2409288 - DNA, 25 bp, Homo sapien
cagaaacagtcctcagtttctgtac

SEQ ID NO: 2409289 - DNA, 25 bp, Homo sapien
aacagtcctcagtttctgtaccatt

SEQ ID NO: 2409290 - DNA, 25 bp, Homo sapien
gaagggcagatcgttggttttccaa

SEQ ID NO: 2409291 - DNA, 25 bp, Homo sapien
gagacatcagcctggttaaggtttc

SEQ ID NO: 2409292 - DNA, 25 bp, Homo sapien
taaacatacgaagtgctccaggaat

SEQ ID NO: 2409293 - DNA, 25 bp, Homo sapien
tcaactttctagctggagacatcag

SEQ ID NO: 2409294 - DNA, 25 bp, Homo sapien
tacatgagggccctatgaggacaca

SEQ ID NO: 2409295 - DNA, 25 bp, Homo sapien
aaggtggagtatgtacatgagggcc

SEQ ID NO: 2409296 - DNA, 25 bp, Homo sapien
gtggagtatgtacatgagggcccta

SEQ ID NO: 2409297 - DNA, 25 bp, Homo sapien
gtatgtacatgagggccctatgagg

SEQ ID NO: 2409298 - DNA, 25 bp, Homo sapien
tgagttatgaatcagaccatccgaa

SEQ ID NO: 2409299 - DNA, 25 bp, Homo sapien
aattttcctgagtaggtcgaggcct

SEQ ID NO: 2409300 - DNA, 25 bp, Homo sapien
acaggtgctactccggcagtcgcct

SEQ ID NO: 2409301 - DNA, 25 bp, Homo sapien
ccatccgaatacatgaaagtagcgt

SEQ ID NO: 2409302 - DNA, 25 bp, Homo sapien
gtacagaaggaaacataatgccttc

SEQ ID NO: 2409303 - DNA, 25 bp, Homo sapien
gagtacagaaggaaacataatgcct

SEQ ID NO: 2409304 - DNA, 25 bp, Homo sapien
ctgagtacagaaggaaacataatgc

SEQ ID NO: 2409305 - DNA, 25 bp, Homo sapien
ctctgagtacagaaggaaacataat

SEQ ID NO: 2409306 - DNA, 25 bp, Homo sapien
gcagtgaccacaaagccaagtccaa

SEQ ID NO: 2409307 - DNA, 25 bp, Homo sapien
aactaaaggacagccacccgggctg

SEQ ID NO: 2409308 - DNA, 25 bp, Homo sapien
tctgactcacctgggaactaaagga

SEQ ID NO: 2409309 - DNA, 25 bp, Homo sapien
caaaggctgagttgcccatcatcag

SEQ ID NO: 2409310 - DNA, 25 bp, Homo sapien
gaccccaatcacgttagaaccatac

SEQ ID NO: 2409311 - DNA, 25 bp, Homo sapien
ccaatcacgttagaaccatactcct

SEQ ID NO: 2409312 - DNA, 25 bp, Homo sapien
acgttagaaccatactccttgtgcc

SEQ ID NO: 2409313 - DNA, 25 bp, Homo sapien
gaaccatactccttgtgcccacttg

SEQ ID NO: 2409314 - DNA, 25 bp, Homo sapien
atccagatggacagcctctagtgga

SEQ ID NO: 2409315 - DNA, 25 bp, Homo sapien
cagcctgcttgccagtaattagcag

SEQ ID NO: 2409316 - DNA, 25 bp, Homo sapien
caactggtcacatgggccgtggaac

SEQ ID NO: 2409317 - DNA, 25 bp, Homo sapien
gtcatgcccaactggtcacatgggc

SEQ ID NO: 2409318 - DNA, 25 bp, Homo sapien
acatgggccgtggaacacagcctgc

SEQ ID NO: 2409319 - DNA, 25 bp, Homo sapien
aaatgcaataatttgtgatgcatca

SEQ ID NO: 2409320 - DNA, 25 bp, Homo sapien
taaaaatgcaataatttgtgatgca

SEQ ID NO: 2409321 - DNA, 25 bp, Homo sapien
ccaataaaaatgcaataatttgtga

SEQ ID NO: 2409322 - DNA, 25 bp, Homo sapien
ataaaaatgcaataatttgtgatgc

SEQ ID NO: 2409323 - DNA, 25 bp, Homo sapien
ggtcgcaaggtgctcagtgggggtg

SEQ ID NO: 2409324 - DNA, 25 bp, Homo sapien
atctgggcgtatacgtgcaagtcac

SEQ ID NO: 2409325 - DNA, 25 bp, Homo sapien
aaggtgctcagtgggcaggagtggg

SEQ ID NO: 2409326 - DNA, 25 bp, Homo sapien
ggcaaggcatattcacttcttttgt

SEQ ID NO: 2409327 - DNA, 25 bp, Homo sapien
tatgactaataaaggctcgtctgtt

SEQ ID NO: 2409328 - DNA, 25 bp, Homo sapien
gaacagaagaaatgactgcggtggc

SEQ ID NO: 2409329 - DNA, 25 bp, Homo sapien
acagaacagaagaaatgactgcggt

SEQ ID NO: 2409330 - DNA, 25 bp, Homo sapien
aacagaagaaatgactgcggtggcc

SEQ ID NO: 2409331 - DNA, 25 bp, Homo sapien
gtaatgtggagtgagtagcctccgt

SEQ ID NO: 2409332 - DNA, 25 bp, Homo sapien
tgtggagtgagtagcctccgtattg

SEQ ID NO: 2409333 - DNA, 25 bp, Homo sapien
gagtgagtagcctccgtattgatta

SEQ ID NO: 2409334 - DNA, 25 bp, Homo sapien
gggacgggcttaccttccactgtga

SEQ ID NO: 2409335 - DNA, 25 bp, Homo sapien
gtaggcggatgtttctcacagagca

SEQ ID NO: 2409336 - DNA, 25 bp, Homo sapien
tcgtaggcggatgtttctcacagag

SEQ ID NO: 2409337 - DNA, 25 bp, Homo sapien
aggtcgtaggcggatgtttctcaca

SEQ ID NO: 2409338 - DNA, 25 bp, Homo sapien
ggtcgtaggcggatgtttctcacag

SEQ ID NO: 2409339 - DNA, 25 bp, Homo sapien
cttgtcaaggatagatgaaaaatct

SEQ ID NO: 2409340 - DNA, 25 bp, Homo sapien
agcaggtgattgttacacttgtcaa

SEQ ID NO: 2409341 - DNA, 25 bp, Homo sapien
cttttaaataccgtgttctctgtgc

SEQ ID NO: 2409342 - DNA, 25 bp, Homo sapien
aaataccgtgttctctgtgctccag

SEQ ID NO: 2409343 - DNA, 25 bp, Homo sapien
gcaccacctgatgaatgctcatgct

SEQ ID NO: 2409344 - DNA, 25 bp, Homo sapien
ctgatgaatgctcatgctcagcggg

SEQ ID NO: 2409345 - DNA, 25 bp, Homo sapien
cctgagcaccacctgatgaatgctc

SEQ ID NO: 2409346 - DNA, 25 bp, Homo sapien
caggctccatcacataaaggggagg

SEQ ID NO: 2409347 - DNA, 25 bp, Homo sapien
gacaacttcagacttaggtacctaa

SEQ ID NO: 2409348 - DNA, 25 bp, Homo sapien
cattaggcatgtgatactcagtaga

SEQ ID NO: 2409349 - DNA, 25 bp, Homo sapien
catatcaaagaggattcattaggca

SEQ ID NO: 2409350 - DNA, 25 bp, Homo sapien
ccagtagatgcatacataggaagaa

SEQ ID NO: 2409351 - DNA, 25 bp, Homo sapien
tatgacgtaccttagaaaatattcc

SEQ ID NO: 2409352 - DNA, 25 bp, Homo sapien
ggcttatgacgtaccttagaaaata

SEQ ID NO: 2409353 - DNA, 25 bp, Homo sapien
tggaaaaggtggcttatgacgtacc

SEQ ID NO: 2409354 - DNA, 25 bp, Homo sapien
aaaggtggcttatgacgtaccttag

SEQ ID NO: 2409355 - DNA, 25 bp, Homo sapien
taacgcatctctgatcactattctc

SEQ ID NO: 2409356 - DNA, 25 bp, Homo sapien
ctgctttaacgcatctctgatcact

SEQ ID NO: 2409357 - DNA, 25 bp, Homo sapien
gctttaacgcatctctgatcactat

SEQ ID NO: 2409358 - DNA, 25 bp, Homo sapien
tttaacgcatctctgatcactattc

SEQ ID NO: 2409359 - DNA, 25 bp, Homo sapien
cacttccttgatgatctcgtagagc

SEQ ID NO: 2409360 - DNA, 25 bp, Homo sapien
cattgctattgctaccactctggtt

SEQ ID NO: 2409361 - DNA, 25 bp, Homo sapien
aattttatgtacaactgcctacctg

SEQ ID NO: 2409362 - DNA, 25 bp, Homo sapien
tacgatctatatgctggtgacactg

SEQ ID NO: 2409363 - DNA, 25 bp, Homo sapien
caaaacttggattcgtacctgggat

SEQ ID NO: 2409364 - DNA, 25 bp, Homo sapien
cagcagctataggagccattgcagt

SEQ ID NO: 2409365 - DNA, 25 bp, Homo sapien
tacatttgccatggcgtttagctgc

SEQ ID NO: 2409366 - DNA, 25 bp, Homo sapien
gaaaaaacgtctaccatgtggctag

SEQ ID NO: 2409367 - DNA, 25 bp, Homo sapien
gcctaggtgggtaatatggcccaaa

SEQ ID NO: 2409368 - DNA, 25 bp, Homo sapien
tgcccctaaggaaaaatacatcgtg

SEQ ID NO: 2409369 - DNA, 25 bp, Homo sapien
tggaatgcacacatgtcgaaactcg

SEQ ID NO: 2409370 - DNA, 25 bp, Homo sapien
tctcttgctgaagtgccccactgca

SEQ ID NO: 2409371 - DNA, 25 bp, Homo sapien
taaacatgttgaggagtaggtgacc

SEQ ID NO: 2409372 - DNA, 25 bp, Homo sapien
gacaagaataggaaaactcccaggc

SEQ ID NO: 2409373 - DNA, 25 bp, Homo sapien
tacccagggaatgtgttgagacaca

SEQ ID NO: 2409374 - DNA, 25 bp, Homo sapien
tgagaaagacaatcaggacaccctg

SEQ ID NO: 2409375 - DNA, 25 bp, Homo sapien
taaggaacatgagtcagtagcgggc

SEQ ID NO: 2409376 - DNA, 25 bp, Homo sapien
tacacagtgcaatggaagggcaatg

SEQ ID NO: 2409377 - DNA, 25 bp, Homo sapien
aatatgtactcaaggcagcaagagc

SEQ ID NO: 2409378 - DNA, 25 bp, Homo sapien
aacagctgaccagagatggcaagaa

SEQ ID NO: 2409379 - DNA, 25 bp, Homo sapien
taagcagccccaaagatatgagata

SEQ ID NO: 2409380 - DNA, 25 bp, Homo sapien
gtccctgactttccgcaacaatgaa

SEQ ID NO: 2409381 - DNA, 25 bp, Homo sapien
gactttccgcaacaatgaagcattg

SEQ ID NO: 2409382 - DNA, 25 bp, Homo sapien
cctcagtttacgagatgacaggatt

SEQ ID NO: 2409383 - DNA, 25 bp, Homo sapien
tccttcgtggtaggaagtttataga

SEQ ID NO: 2409384 - DNA, 25 bp, Homo sapien
ttggaaaagttcatgagtaggtaga

SEQ ID NO: 2409385 - DNA, 25 bp, Homo sapien
tagggataggtgcagcatttttgtc

SEQ ID NO: 2409386 - DNA, 25 bp, Homo sapien
agaaaaagctggttgatatctggag

SEQ ID NO: 2409387 - DNA, 25 bp, Homo sapien
gaaataatagaggtactcggcaaga

SEQ ID NO: 2409388 - DNA, 25 bp, Homo sapien
tagtttgactatgcatgccgcgaaa

SEQ ID NO: 2409389 - DNA, 25 bp, Homo sapien
tgtggctggatgtacaataactggt

SEQ ID NO: 2409390 - DNA, 25 bp, Homo sapien
ggaagtctctactttctgaggtggg

SEQ ID NO: 2409391 - DNA, 25 bp, Homo sapien
taaaagataaagaccaccagattaa

SEQ ID NO: 2409392 - DNA, 25 bp, Homo sapien
tacaaaaccacttaagttgcttaga

SEQ ID NO: 2409393 - DNA, 25 bp, Homo sapien
cttcaaagggtaaacaagagttcag

SEQ ID NO: 2409394 - DNA, 25 bp, Homo sapien
cttttcatatatctagagcagctaa

SEQ ID NO: 2409395 - DNA, 25 bp, Homo sapien
taaagagaggtttaagtggtctgcc

SEQ ID NO: 2409396 - DNA, 25 bp, Homo sapien
gcagattttctaacaccaggtccag

SEQ ID NO: 2409397 - DNA, 25 bp, Homo sapien
tcatcagtgtatttggctgcaggag

SEQ ID NO: 2409398 - DNA, 25 bp, Homo sapien
ggtccaacctctaaagaaggcatgg

SEQ ID NO: 2409399 - DNA, 25 bp, Homo sapien
cacgccaggccaatggtgttatttt

SEQ ID NO: 2409400 - DNA, 25 bp, Homo sapien
gccaggccaatggtgttattttaaa

SEQ ID NO: 2409401 - DNA, 25 bp, Homo sapien
acgccaggccaatggtgttatttta

SEQ ID NO: 2409402 - DNA, 25 bp, Homo sapien
cgccaggccaatggtgttattttaa

SEQ ID NO: 2409403 - DNA, 25 bp, Homo sapien
aaatgagcaaggtgggccgggcgtg

SEQ ID NO: 2409404 - DNA, 25 bp, Homo sapien
tattcatccactctcgtcaatgggc

SEQ ID NO: 2409405 - DNA, 25 bp, Homo sapien
tgaaatacacttccagcagtctggc

SEQ ID NO: 2409406 - DNA, 25 bp, Homo sapien
cattagctcagaacagatggcacct

SEQ ID NO: 2409407 - DNA, 25 bp, Homo sapien
tgtactctggtgacaaaactgctag

SEQ ID NO: 2409408 - DNA, 25 bp, Homo sapien
tatcgagggcacgaaagtatgccag

SEQ ID NO: 2409409 - DNA, 25 bp, Homo sapien
tattgaaccgtgtgacccagttttg

SEQ ID NO: 2409410 - DNA, 25 bp, Homo sapien
tactataccataggactcagagtca

SEQ ID NO: 2409411 - DNA, 25 bp, Homo sapien
gaaaattgaacttctccgagtgtct

SEQ ID NO: 2409412 - DNA, 25 bp, Homo sapien
aatgacacgtcagcaaaaaggaaca

SEQ ID NO: 2409413 - DNA, 25 bp, Homo sapien
actcccttagagtgacttcagccca

SEQ ID NO: 2409414 - DNA, 25 bp, Homo sapien
tgcggaatccttcgccagctgggtt

SEQ ID NO: 2409415 - DNA, 25 bp, Homo sapien
caaatgtcaagatctagcggtgcgg

SEQ ID NO: 2409416 - DNA, 25 bp, Homo sapien
gggtgccaagcctaatgagaagtta

SEQ ID NO: 2409417 - DNA, 25 bp, Homo sapien
ccaggagtagagcgaggctgttata

SEQ ID NO: 2409418 - DNA, 25 bp, Homo sapien
ggcagattagttaacgcggcatgga

SEQ ID NO: 2409419 - DNA, 25 bp, Homo sapien
ggcatggatcacaccgcatcctggg

SEQ ID NO: 2409420 - DNA, 25 bp, Homo sapien
aacagggcctttactcggaagccag

SEQ ID NO: 2409421 - DNA, 25 bp, Homo sapien
ctgaacagggcctttactcggaagc

SEQ ID NO: 2409422 - DNA, 25 bp, Homo sapien
cagggcctttactcggaagccaggg

SEQ ID NO: 2409423 - DNA, 25 bp, Homo sapien
gaacagggcctttactcggaagcca

SEQ ID NO: 2409424 - DNA, 25 bp, Homo sapien
cgcagctggctaagagggaatcgca

SEQ ID NO: 2409425 - DNA, 25 bp, Homo sapien
tgatgggcatgacactgctcggagc

SEQ ID NO: 2409426 - DNA, 25 bp, Homo sapien
tcagctttcgggcttgcaggtagcg

SEQ ID NO: 2409427 - DNA, 25 bp, Homo sapien
gatctggcctttcatgccggcgtga

SEQ ID NO: 2409428 - DNA, 25 bp, Homo sapien
gaatatcccatttccggtatccgga

SEQ ID NO: 2409429 - DNA, 25 bp, Homo sapien
cgccaagtctaatcccgagcagatg

SEQ ID NO: 2409430 - DNA, 25 bp, Homo sapien
cgagcagatgctcgggccgcgaata

SEQ ID NO: 2409431 - DNA, 25 bp, Homo sapien
tccagggtcgtacctaagcacaggc

SEQ ID NO: 2409432 - DNA, 25 bp, Homo sapien
ccttttggagtctgtagagaagctg

SEQ ID NO: 2409433 - DNA, 25 bp, Homo sapien
ttatctaggaagtgttaacagctct

SEQ ID NO: 2409434 - DNA, 25 bp, Homo sapien
gagtctgtagagaagctgtggggac

SEQ ID NO: 2409435 - DNA, 25 bp, Homo sapien
ccgttatctaggaagtgttaacagc

SEQ ID NO: 2409436 - DNA, 25 bp, Homo sapien
taatgccttggatattgtcccgcag

SEQ ID NO: 2409437 - DNA, 25 bp, Homo sapien
gaatcgccggctttgtaatgccttg

SEQ ID NO: 2409438 - DNA, 25 bp, Homo sapien
gtaagtcaccgcgtcacggatcacg

SEQ ID NO: 2409439 - DNA, 25 bp, Homo sapien
cgaaaccataaagggtgcgaccctg

SEQ ID NO: 2409440 - DNA, 25 bp, Homo sapien
tcagcagaaaatcgggctgcccact

SEQ ID NO: 2409441 - DNA, 25 bp, Homo sapien
cagggcttatagtctctcgatgcgg

SEQ ID NO: 2409442 - DNA, 25 bp, Homo sapien
tgcccactgtgattgccagtcgcag

SEQ ID NO: 2409443 - DNA, 25 bp, Homo sapien
aatcacagcgcctactcagcagaaa

SEQ ID NO: 2409444 - DNA, 25 bp, Homo sapien
agtgggcggagctctaggccccacc

SEQ ID NO: 2409445 - DNA, 25 bp, Homo sapien
gtgggcggagctctaggccccacct

SEQ ID NO: 2409446 - DNA, 25 bp, Homo sapien
caaaaaagtgggcggagctctaggc

SEQ ID NO: 2409447 - DNA, 25 bp, Homo sapien
gcccttttcatggtcgtcccgcaat

SEQ ID NO: 2409448 - DNA, 25 bp, Homo sapien
tcagaagacgaagagcaaatgaccc

SEQ ID NO: 2409449 - DNA, 25 bp, Homo sapien
caagaagaccaggataattccccgc

SEQ ID NO: 2409450 - DNA, 25 bp, Homo sapien
taccttacggcggagatcctggagc

SEQ ID NO: 2409451 - DNA, 25 bp, Homo sapien
tgcagcaccagtagacccacagtgt

SEQ ID NO: 2409452 - DNA, 25 bp, Homo sapien
tgaatttccctaaggtccatgaggg

SEQ ID NO: 2409453 - DNA, 25 bp, Homo sapien
tgtccccagatcctcaagtacgtca

SEQ ID NO: 2409454 - DNA, 25 bp, Homo sapien
cctagctcagttgttggacagtaac

SEQ ID NO: 2409455 - DNA, 25 bp, Homo sapien
agtgtacccagaatcagaactgcta

SEQ ID NO: 2409456 - DNA, 25 bp, Homo sapien
tccatgacatggcagagtattattg

SEQ ID NO: 2409457 - DNA, 25 bp, Homo sapien
gggcaactgctgtccctaaagtgac

SEQ ID NO: 2409458 - DNA, 25 bp, Homo sapien
ggtggcacgtatctgaagttccaac

SEQ ID NO: 2409459 - DNA, 25 bp, Homo sapien
ccgtaagttatcaaggatggtgtca

SEQ ID NO: 2409460 - DNA, 25 bp, Homo sapien
tgtggacccgtattaatattacact

SEQ ID NO: 2409461 - DNA, 25 bp, Homo sapien
cagactcaattcacctgtggacccg

SEQ ID NO: 2409462 - DNA, 25 bp, Homo sapien
ggtttgatccttgatatccgtaagt

SEQ ID NO: 2409463 - DNA, 25 bp, Homo sapien
taacgtatgcctaaacaatgcacgc

SEQ ID NO: 2409464 - DNA, 25 bp, Homo sapien
cagtttctctaaagccagtatgaca

SEQ ID NO: 2409465 - DNA, 25 bp, Homo sapien
gtaaccactgaaggtaagacatctt

SEQ ID NO: 2409466 - DNA, 25 bp, Homo sapien
gaagctctggaataagtaaccactg

SEQ ID NO: 2409467 - DNA, 25 bp, Homo sapien
tatttttcccacaaatcactgaaag

SEQ ID NO: 2409468 - DNA, 25 bp, Homo sapien
tttatttttcccacaaatcactgaa

SEQ ID NO: 2409469 - DNA, 25 bp, Homo sapien
tatttatttttcccacaaatcactg

SEQ ID NO: 2409470 - DNA, 25 bp, Homo sapien
atttttcccacaaatcactgaaagt

SEQ ID NO: 2409471 - DNA, 25 bp, Homo sapien
tgaaatacccttttttatgtgcagt

SEQ ID NO: 2409472 - DNA, 25 bp, Homo sapien
tctggatgaaatacccttttttatg

SEQ ID NO: 2409473 - DNA, 25 bp, Homo sapien
ggatgaaatacccttttttatgtgc

SEQ ID NO: 2409474 - DNA, 25 bp, Homo sapien
gaaatacccttttttatgtgcagta

SEQ ID NO: 2409475 - DNA, 25 bp, Homo sapien
tgcacttgtatcatccgccttgggt

SEQ ID NO: 2409476 - DNA, 25 bp, Homo sapien
tggctgcacttgtatcatccgcctt

SEQ ID NO: 2409477 - DNA, 25 bp, Homo sapien
gtatcatccgccttgggtcgctgaa

SEQ ID NO: 2409478 - DNA, 25 bp, Homo sapien
cacttgtatcatccgccttgggtcg

SEQ ID NO: 2409479 - DNA, 25 bp, Homo sapien
gaggcaccaaaggtgggcgcatcat

SEQ ID NO: 2409480 - DNA, 25 bp, Homo sapien
caggtccaaggggaggcaccaaagg

SEQ ID NO: 2409481 - DNA, 25 bp, Homo sapien
gcatcatgccaggacgaggtggagg

SEQ ID NO: 2409482 - DNA, 25 bp, Homo sapien
aaaggtgggcgcatcatgccaggac

SEQ ID NO: 2409483 - DNA, 25 bp, Homo sapien
ttcccctgcacaaaaaggtcaatgg

SEQ ID NO: 2409484 - DNA, 25 bp, Homo sapien
tcatcaaatgcatacggaggccgag

SEQ ID NO: 2409485 - DNA, 25 bp, Homo sapien
tataaagggacatcaactggtttca

SEQ ID NO: 2409486 - DNA, 25 bp, Homo sapien
tcaggagactgatccccatgcatta

SEQ ID NO: 2409487 - DNA, 25 bp, Homo sapien
agccttggtgggggtccacgaggag

SEQ ID NO: 2409488 - DNA, 25 bp, Homo sapien
ggtaagggccctcggagtcctggca

SEQ ID NO: 2409489 - DNA, 25 bp, Homo sapien
aagggccctcggagtcctggcattc

SEQ ID NO: 2409490 - DNA, 25 bp, Homo sapien
tagccttggtgggggtccacgagga

SEQ ID NO: 2409491 - DNA, 25 bp, Homo sapien
aggccgtaatggtggagcaggtggt

SEQ ID NO: 2409492 - DNA, 25 bp, Homo sapien
ccatcagaatgggattcctctttat

SEQ ID NO: 2409493 - DNA, 25 bp, Homo sapien
agaatgggattcctctttatgctgc

SEQ ID NO: 2409494 - DNA, 25 bp, Homo sapien
tcagaatgggattcctctttatgct

SEQ ID NO: 2409495 - DNA, 25 bp, Homo sapien
gcatatctgcaaaccgtacactcag

SEQ ID NO: 2409496 - DNA, 25 bp, Homo sapien
catatctgcaaaccgtacactcaga

SEQ ID NO: 2409497 - DNA, 25 bp, Homo sapien
taaacatccactgagtacttactgt

SEQ ID NO: 2409498 - DNA, 25 bp, Homo sapien
taagatgaacacagctatgatcccg

SEQ ID NO: 2409499 - DNA, 25 bp, Homo sapien
caaagatttcagagtactctcacag

SEQ ID NO: 2409500 - DNA, 25 bp, Homo sapien
tatgatcccgacttccaaagatttc

SEQ ID NO: 2409501 - DNA, 25 bp, Homo sapien
ctccatctgatttgtcggtgtcact

SEQ ID NO: 2409502 - DNA, 25 bp, Homo sapien
ccatctgatttgtcggtgtcactgt

SEQ ID NO: 2409503 - DNA, 25 bp, Homo sapien
tccatctgatttgtcggtgtcactg

SEQ ID NO: 2409504 - DNA, 25 bp, Homo sapien
caagttcaggactatataacatgtc

SEQ ID NO: 2409505 - DNA, 25 bp, Homo sapien
ccatgtccaagaagaggaaggatag

SEQ ID NO: 2409506 - DNA, 25 bp, Homo sapien
gcaaaacccactttacggccataca

SEQ ID NO: 2409507 - DNA, 25 bp, Homo sapien
acatgtcttcatctcgcctacgagg

SEQ ID NO: 2409508 - DNA, 25 bp, Homo sapien
ttttctttaggatagagggtggctg

SEQ ID NO: 2409509 - DNA, 25 bp, Homo sapien
cataaatttcatgcttagactaggg

SEQ ID NO: 2409510 - DNA, 25 bp, Homo sapien
acataaatttcatgcttagactagg

SEQ ID NO: 2409511 - DNA, 25 bp, Homo sapien
aaatttcatgcttagactagggttc

SEQ ID NO: 2409512 - DNA, 25 bp, Homo sapien
aacataaatttcatgcttagactag

SEQ ID NO: 2409513 - DNA, 25 bp, Homo sapien
ataatattttagtttatctctcaaa

SEQ ID NO: 2409514 - DNA, 25 bp, Homo sapien
gcactttgcataagggatactcaat

SEQ ID NO: 2409515 - DNA, 25 bp, Homo sapien
gatactcaatctgtataatatttta

SEQ ID NO: 2409516 - DNA, 25 bp, Homo sapien
cactttgcataagggatactcaatc

SEQ ID NO: 2409517 - DNA, 25 bp, Homo sapien
gacagcatcaaaatattggctaagt

SEQ ID NO: 2409518 - DNA, 25 bp, Homo sapien
tgttcatattctacttctagctttc

SEQ ID NO: 2409519 - DNA, 25 bp, Homo sapien
tattggctaagttgagccctcttct

SEQ ID NO: 2409520 - DNA, 25 bp, Homo sapien
aagttgagccctcttctgttcatat

SEQ ID NO: 2409521 - DNA, 25 bp, Homo sapien
gtttcacgcagctttttacgcttgt

SEQ ID NO: 2409522 - DNA, 25 bp, Homo sapien
aaggtttcacgcagctttttacgct

SEQ ID NO: 2409523 - DNA, 25 bp, Homo sapien
ttcacgcagctttttacgcttgtct

SEQ ID NO: 2409524 - DNA, 25 bp, Homo sapien
aggtttcacgcagctttttacgctt

SEQ ID NO: 2409525 - DNA, 25 bp, Homo sapien
caattaggtatcaataggttacatg

SEQ ID NO: 2409526 - DNA, 25 bp, Homo sapien
gccacttcaattaggtatcaatagg

SEQ ID NO: 2409527 - DNA, 25 bp, Homo sapien
aatataagaggccacttcaattagg

SEQ ID NO: 2409528 - DNA, 25 bp, Homo sapien
tatggaattaaatataagaggccac

SEQ ID NO: 2409529 - DNA, 25 bp, Homo sapien
ttaaaactgcagctcgaaccatcat

SEQ ID NO: 2409530 - DNA, 25 bp, Homo sapien
ttctccatgtctcggattatctgtt

SEQ ID NO: 2409531 - DNA, 25 bp, Homo sapien
catgtctcggattatctgttttgga

SEQ ID NO: 2409532 - DNA, 25 bp, Homo sapien
cggattatctgttttggatccttca

SEQ ID NO: 2409533 - DNA, 25 bp, Homo sapien
tctttaattctctcttccgggcttc

SEQ ID NO: 2409534 - DNA, 25 bp, Homo sapien
cttctttaattctctcttccgggct

SEQ ID NO: 2409535 - DNA, 25 bp, Homo sapien
tggatgatgtagatctccgtcccat

SEQ ID NO: 2409536 - DNA, 25 bp, Homo sapien
ggcttggtctgtggggttcataaat

SEQ ID NO: 2409537 - DNA, 25 bp, Homo sapien
tgtggggttcataaattttccactc

SEQ ID NO: 2409538 - DNA, 25 bp, Homo sapien
cttggtggatgatgtagatctccgt

SEQ ID NO: 2409539 - DNA, 25 bp, Homo sapien
caatttgtatggtttacttgttcat

SEQ ID NO: 2409540 - DNA, 25 bp, Homo sapien
tgacaatttgtatggtttacttgtt

SEQ ID NO: 2409541 - DNA, 25 bp, Homo sapien
gttgacaatttgtatggtttacttg

SEQ ID NO: 2409542 - DNA, 25 bp, Homo sapien
gacaatttgtatggtttacttgttc

SEQ ID NO: 2409543 - DNA, 25 bp, Homo sapien
tcaagacagcggtatcaaaggctct

SEQ ID NO: 2409544 - DNA, 25 bp, Homo sapien
cagctgttctggtggcaattacttc

SEQ ID NO: 2409545 - DNA, 25 bp, Homo sapien
tcagaaagccagatgtttcacagct

SEQ ID NO: 2409546 - DNA, 25 bp, Homo sapien
caactgccccgaaagccagatgttt

SEQ ID NO: 2409547 - DNA, 25 bp, Homo sapien
ggaaaatcaagccaaataagcgttg

SEQ ID NO: 2409548 - DNA, 25 bp, Homo sapien
caagcggaggcgactggaaaatcaa

SEQ ID NO: 2409549 - DNA, 25 bp, Homo sapien
cagagaattttacggaagacactgg

SEQ ID NO: 2409550 - DNA, 25 bp, Homo sapien
gaaacacaacggatacgaattacag

SEQ ID NO: 2409551 - DNA, 25 bp, Homo sapien
tgtgctcccaggactacgagaagcg

SEQ ID NO: 2409552 - DNA, 25 bp, Homo sapien
tcgtaaaggccttcaactgggtctc

SEQ ID NO: 2409553 - DNA, 25 bp, Homo sapien
gactcccggcctctttcacttcgta

SEQ ID NO: 2409554 - DNA, 25 bp, Homo sapien
ttcaactgggtctctcggtcaaccc

SEQ ID NO: 2409555 - DNA, 25 bp, Homo sapien
cctctgtcccgccttctcttagcgc

SEQ ID NO: 2409556 - DNA, 25 bp, Homo sapien
tgtcccgccttctcttagcgccgct

SEQ ID NO: 2409557 - DNA, 25 bp, Homo sapien
ccgccttctcttagcgccgcttgac

SEQ ID NO: 2409558 - DNA, 25 bp, Homo sapien
tctgtcccgccttctcttagcgccg

SEQ ID NO: 2409559 - DNA, 25 bp, Homo sapien
gcatcaggttatcccatgtgagcgc

SEQ ID NO: 2409560 - DNA, 25 bp, Homo sapien
tgtctccgtgtgtaaacgaataccc

SEQ ID NO: 2409561 - DNA, 25 bp, Homo sapien
cactgagtttaatccgctttgtaag

SEQ ID NO: 2409562 - DNA, 25 bp, Homo sapien
tgtttcttatgacccaagcaggtgc

SEQ ID NO: 2409563 - DNA, 25 bp, Homo sapien
tctgcagagattcagcggaaccatt

SEQ ID NO: 2409564 - DNA, 25 bp, Homo sapien
taatgcgtcatgtagcaaaggcagc

SEQ ID NO: 2409565 - DNA, 25 bp, Homo sapien
caggtaattagtgaaatggcccacc

SEQ ID NO: 2409566 - DNA, 25 bp, Homo sapien
tcacagggtctagcatcagctgatc

SEQ ID NO: 2409567 - DNA, 25 bp, Homo sapien
tcatttcatttggtgtttcactgta

SEQ ID NO: 2409568 - DNA, 25 bp, Homo sapien
atttggtgtttcactgtattgatga

SEQ ID NO: 2409569 - DNA, 25 bp, Homo sapien
tcatttggtgtttcactgtattgat

SEQ ID NO: 2409570 - DNA, 25 bp, Homo sapien
tttcatttggtgtttcactgtattg

SEQ ID NO: 2409571 - DNA, 25 bp, Homo sapien
gtaatggcatgattatatttttctg

SEQ ID NO: 2409572 - DNA, 25 bp, Homo sapien
tatttttctgaggctgatttgaact

SEQ ID NO: 2409573 - DNA, 25 bp, Homo sapien
tttctgaggctgatttgaactccac

SEQ ID NO: 2409574 - DNA, 25 bp, Homo sapien
ctcagtaatggcatgattatatttt

SEQ ID NO: 2409575 - DNA, 25 bp, Homo sapien
tgagcccacaagtttaacagcgact

SEQ ID NO: 2409576 - DNA, 25 bp, Homo sapien
ccaatttgagctaacacagtgacca

SEQ ID NO: 2409577 - DNA, 25 bp, Homo sapien
tatgccagttgtgacatttgagccc

SEQ ID NO: 2409578 - DNA, 25 bp, Homo sapien
cccaggatggcacggacaatcatat

SEQ ID NO: 2409579 - DNA, 25 bp, Homo sapien
gaacctcagtcagcttattggtgac

SEQ ID NO: 2409580 - DNA, 25 bp, Homo sapien
catctcaatggaggccagcctgcac

SEQ ID NO: 2409581 - DNA, 25 bp, Homo sapien
cttttcatctcaatggaggccagcc

SEQ ID NO: 2409582 - DNA, 25 bp, Homo sapien
ctgcaccccaagtgcatatttagaa

SEQ ID NO: 2409583 - DNA, 25 bp, Homo sapien
gtgaagacgatttacttcttcccgc

SEQ ID NO: 2409584 - DNA, 25 bp, Homo sapien
gctgtcagataagcaatcaagaagc

SEQ ID NO: 2409585 - DNA, 25 bp, Homo sapien
ctgctggtgaagacgatttacttct

SEQ ID NO: 2409586 - DNA, 25 bp, Homo sapien
atcgaagctgtcagataagcaatca

SEQ ID NO: 2409587 - DNA, 25 bp, Homo sapien
taaaaaatgtctgctaactgtgtag

SEQ ID NO: 2409588 - DNA, 25 bp, Homo sapien
caagatgctgtctaaggataattcc

SEQ ID NO: 2409589 - DNA, 25 bp, Homo sapien
aaaagagggagtatcgctgtgtcac

SEQ ID NO: 2409590 - DNA, 25 bp, Homo sapien
tgtgtagaagggactaggaaatctt

SEQ ID NO: 2409591 - DNA, 25 bp, Homo sapien
ttctcttgctctacacatttgggct

SEQ ID NO: 2409592 - DNA, 25 bp, Homo sapien
ttcacctgggcctttgctggactgg

SEQ ID NO: 2409593 - DNA, 25 bp, Homo sapien
cttggtctctgggtctcccattttt

SEQ ID NO: 2409594 - DNA, 25 bp, Homo sapien
gctggactggagcagctgtgctttc

SEQ ID NO: 2409595 - DNA, 25 bp, Homo sapien
atttgaaaacgacaatgttccttgc

SEQ ID NO: 2409596 - DNA, 25 bp, Homo sapien
ggcatttgaaaacgacaatgttcct

SEQ ID NO: 2409597 - DNA, 25 bp, Homo sapien
ctactgtgtcccttgaggcatttga

SEQ ID NO: 2409598 - DNA, 25 bp, Homo sapien
tcccttgaggcatttgaaaacgaca

SEQ ID NO: 2409599 - DNA, 25 bp, Homo sapien
gagttccgtggtcctagcagttgtt

SEQ ID NO: 2409600 - DNA, 25 bp, Homo sapien
gcagttgtttaggagtattgttaaa

SEQ ID NO: 2409601 - DNA, 25 bp, Homo sapien
ctagcagttgtttaggagtattgtt

SEQ ID NO: 2409602 - DNA, 25 bp, Homo sapien
gtgtttctgagttccgtggtcctag

SEQ ID NO: 2409603 - DNA, 25 bp, Homo sapien
cagatggagtgtgcttagtctacct

SEQ ID NO: 2409604 - DNA, 25 bp, Homo sapien
cattgaatagttaagggtagtatcc

SEQ ID NO: 2409605 - DNA, 25 bp, Homo sapien
gagcccctctatgtaatttgtaatg

SEQ ID NO: 2409606 - DNA, 25 bp, Homo sapien
tagtctaccttaactggaaccagag

SEQ ID NO: 2409607 - DNA, 25 bp, Homo sapien
tcaaaagtgcccatacgccagtcat

SEQ ID NO: 2409608 - DNA, 25 bp, Homo sapien
cacactgactgaattgtttagccgc

SEQ ID NO: 2409609 - DNA, 25 bp, Homo sapien
gctctgtggttcagaagagtaccaa

SEQ ID NO: 2409610 - DNA, 25 bp, Homo sapien
gaggagttgcatcagtcagctaaag

SEQ ID NO: 2409611 - DNA, 25 bp, Homo sapien
tgttttgggcactacgcacttggca

SEQ ID NO: 2409612 - DNA, 25 bp, Homo sapien
tagaggctactgcaactaggtgaca

SEQ ID NO: 2409613 - DNA, 25 bp, Homo sapien
tagtctgtagtctgggatcaggccc

SEQ ID NO: 2409614 - DNA, 25 bp, Homo sapien
gactcatcgatgctcactggaaaag

SEQ ID NO: 2409615 - DNA, 25 bp, Homo sapien
tcctctcctggtggcgggatctttg

SEQ ID NO: 2409616 - DNA, 25 bp, Homo sapien
cagaggcttatacattctcatcagg

SEQ ID NO: 2409617 - DNA, 25 bp, Homo sapien
cgttggaacttcaactgcttgatgc

SEQ ID NO: 2409618 - DNA, 25 bp, Homo sapien
tttaggcaaagttggatccagaggc

SEQ ID NO: 2409619 - DNA, 25 bp, Homo sapien
aaataaaaggagccacaagatttct

SEQ ID NO: 2409620 - DNA, 25 bp, Homo sapien
taaataaaaggagccacaagatttc

SEQ ID NO: 2409621 - DNA, 25 bp, Homo sapien
gatcagggatgcatttcttgctgga

SEQ ID NO: 2409622 - DNA, 25 bp, Homo sapien
tgacactggtcaaaaaggagagaga

SEQ ID NO: 2409623 - DNA, 25 bp, Homo sapien
ggagagagatgcaatagctatagga

SEQ ID NO: 2409624 - DNA, 25 bp, Homo sapien
ggaaaagatgatgacactggtcaaa

SEQ ID NO: 2409625 - DNA, 25 bp, Homo sapien
tctccatcttctttgtacttgacct

SEQ ID NO: 2409626 - DNA, 25 bp, Homo sapien
ccatcttctttgtacttgacctttt

SEQ ID NO: 2409627 - DNA, 25 bp, Homo sapien
cactgcaacatcagctcaagtgatt

SEQ ID NO: 2409628 - DNA, 25 bp, Homo sapien
ctcactgcaacatcagctcaagtga

SEQ ID NO: 2409629 - DNA, 25 bp, Homo sapien
cactcattcaacaaaataggctggg

SEQ ID NO: 2409630 - DNA, 25 bp, Homo sapien
ataggctgggcacttctatgtgcca

SEQ ID NO: 2409631 - DNA, 25 bp, Homo sapien
tcattaagaccaaccgaactgtcag

SEQ ID NO: 2409632 - DNA, 25 bp, Homo sapien
cccagggagcttatagagcgacaca

SEQ ID NO: 2409633 - DNA, 25 bp, Homo sapien
tcaaatactagtcgagttcctgccc

SEQ ID NO: 2409634 - DNA, 25 bp, Homo sapien
tagtgatctatgtggctaccccagc

SEQ ID NO: 2409635 - DNA, 25 bp, Homo sapien
tagagcccatttcataccactgttg

SEQ ID NO: 2409636 - DNA, 25 bp, Homo sapien
gagggcctttatgctataccatagc

SEQ ID NO: 2409637 - DNA, 25 bp, Homo sapien
cattctcacgacaagttccatatgg

SEQ ID NO: 2409638 - DNA, 25 bp, Homo sapien
gagattaagcttccaacacaggaac

SEQ ID NO: 2409639 - DNA, 25 bp, Homo sapien
actccttatccatgtaatgacaatg

SEQ ID NO: 2409640 - DNA, 25 bp, Homo sapien
tatcagttccatcattaccgaaggc

SEQ ID NO: 2409641 - DNA, 25 bp, Homo sapien
gcagaacttattgtcctggaggtaa

SEQ ID NO: 2409642 - DNA, 25 bp, Homo sapien
gtcaagctttactctgtctgtctgc

SEQ ID NO: 2409643 - DNA, 25 bp, Homo sapien
caaaagaacctggtgcgaagtcgaa

SEQ ID NO: 2409644 - DNA, 25 bp, Homo sapien
caaatcgaatggtggcccctgtgta

SEQ ID NO: 2409645 - DNA, 25 bp, Homo sapien
agaagtactgtacaggtgcacccag

SEQ ID NO: 2409646 - DNA, 25 bp, Homo sapien
cagttatatgtgctcaggttcccag

SEQ ID NO: 2409647 - DNA, 25 bp, Homo sapien
tagttgggagaagaatcttcttgca

SEQ ID NO: 2409648 - DNA, 25 bp, Homo sapien
aggaatggcagcaggcctccaagga

SEQ ID NO: 2409649 - DNA, 25 bp, Homo sapien
tgcatctgttgatcaatggacccat

SEQ ID NO: 2409650 - DNA, 25 bp, Homo sapien
gagccagattctcatcgttgcagga

SEQ ID NO: 2409651 - DNA, 25 bp, Homo sapien
ttttcccctgtctatgctgagcaac

SEQ ID NO: 2409652 - DNA, 25 bp, Homo sapien
ccaacaaccaatagcttgtctgagg

SEQ ID NO: 2409653 - DNA, 25 bp, Homo sapien
ctttcagtctcatccgtaaccgttt

SEQ ID NO: 2409654 - DNA, 25 bp, Homo sapien
tctctgatctagtctgtattcaggg

SEQ ID NO: 2409655 - DNA, 25 bp, Homo sapien
tcactaccctgacctggttgatgag

SEQ ID NO: 2409656 - DNA, 25 bp, Homo sapien
gtcctcactaccctgacctggttga

SEQ ID NO: 2409657 - DNA, 25 bp, Homo sapien
ctcactaccctgacctggttgatga

SEQ ID NO: 2409658 - DNA, 25 bp, Homo sapien
ttgtcctcactaccctgacctggtt

SEQ ID NO: 2409659 - DNA, 25 bp, Homo sapien
tgactttgttcccacacctcttgac

SEQ ID NO: 2409660 - DNA, 25 bp, Homo sapien
gactgcagacaatactgttcctact

SEQ ID NO: 2409661 - DNA, 25 bp, Homo sapien
ccacacctcttgactgcagacaata

SEQ ID NO: 2409662 - DNA, 25 bp, Homo sapien
tcttgactgcagacaatactgttcc

SEQ ID NO: 2409663 - DNA, 25 bp, Homo sapien
tactttataatatgatttgaaaggt

SEQ ID NO: 2409664 - DNA, 25 bp, Homo sapien
ctttataatatgatttgaaaggtac

SEQ ID NO: 2409665 - DNA, 25 bp, Homo sapien
ctactttataatatgatttgaaagg

SEQ ID NO: 2409666 - DNA, 25 bp, Homo sapien
actttataatatgatttgaaaggta

SEQ ID NO: 2409667 - DNA, 25 bp, Homo sapien
tctttgggtcaacatggttctctcc

SEQ ID NO: 2409668 - DNA, 25 bp, Homo sapien
gctttagggtcactatttgatgcca

SEQ ID NO: 2409669 - DNA, 25 bp, Homo sapien
aatcttgttccagagcttgttgggc

SEQ ID NO: 2409670 - DNA, 25 bp, Homo sapien
ttgatgccagtttctttgggtcaac

SEQ ID NO: 2409671 - DNA, 25 bp, Homo sapien
ttaacggaatcccagagcagagctc

SEQ ID NO: 2409672 - DNA, 25 bp, Homo sapien
gcatcaaatgatgtctggcgtcaaa

SEQ ID NO: 2409673 - DNA, 25 bp, Homo sapien
gcagagctcaggaacacatacagaa

SEQ ID NO: 2409674 - DNA, 25 bp, Homo sapien
tattgtcatgggacattgggcgcag

SEQ ID NO: 2409675 - DNA, 25 bp, Homo sapien
aaatgtgcatgtcattggaccctct

SEQ ID NO: 2409676 - DNA, 25 bp, Homo sapien
atgtgcatgtcattggaccctctaa

SEQ ID NO: 2409677 - DNA, 25 bp, Homo sapien
aatgtgcatgtcattggaccctcta

SEQ ID NO: 2409678 - DNA, 25 bp, Homo sapien
tgcaatccaagaaggtcaataagcc

SEQ ID NO: 2409679 - DNA, 25 bp, Homo sapien
aacttaaagaatcctgcagacctga

SEQ ID NO: 2409680 - DNA, 25 bp, Homo sapien
taaaggaagtcgtcaggcagaaagg

SEQ ID NO: 2409681 - DNA, 25 bp, Homo sapien
tcacggattccaaggtagagagggt

SEQ ID NO: 2409682 - DNA, 25 bp, Homo sapien
cacaccagaagtttattatggaaca

SEQ ID NO: 2409683 - DNA, 25 bp, Homo sapien
tattatggaacaatcacatatgttg

SEQ ID NO: 2409684 - DNA, 25 bp, Homo sapien
ggaacaatcacatatgttgactctc

SEQ ID NO: 2409685 - DNA, 25 bp, Homo sapien
tcacaccagaagtttattatggaac

SEQ ID NO: 2409686 - DNA, 25 bp, Homo sapien
caggaaagaagcattgtatataagc

SEQ ID NO: 2409687 - DNA, 25 bp, Homo sapien
agcctatgtatttctgtaatgctgc

SEQ ID NO: 2409688 - DNA, 25 bp, Homo sapien
cattacttatcaatctgggggcggg

SEQ ID NO: 2409689 - DNA, 25 bp, Homo sapien
gggtgcagccagacaagagaatata

SEQ ID NO: 2409690 - DNA, 25 bp, Homo sapien
gacaggcttagagcgttctcggatc

SEQ ID NO: 2409691 - DNA, 25 bp, Homo sapien
tcctgaagtagcgattataggcagc

SEQ ID NO: 2409692 - DNA, 25 bp, Homo sapien
tccctattgagctcgtggacaggct

SEQ ID NO: 2409693 - DNA, 25 bp, Homo sapien
gtagcgttcgcaaagtctgtagtca

SEQ ID NO: 2409694 - DNA, 25 bp, Homo sapien
tgcccccctatattaagagatattt

SEQ ID NO: 2409695 - DNA, 25 bp, Homo sapien
tccatgcccccctatattaagagat

SEQ ID NO: 2409696 - DNA, 25 bp, Homo sapien
catgcccccctatattaagagatat

SEQ ID NO: 2409697 - DNA, 25 bp, Homo sapien
gcccccctatattaagagatattta

SEQ ID NO: 2409698 - DNA, 25 bp, Homo sapien
tcagatctgtgatctacactgggaa

SEQ ID NO: 2409699 - DNA, 25 bp, Homo sapien
cagatctgtgatctacactgggaaa

SEQ ID NO: 2409700 - DNA, 25 bp, Homo sapien
cttggactttagctctccatctctg

SEQ ID NO: 2409701 - DNA, 25 bp, Homo sapien
tctcttggactttagctctccatct

SEQ ID NO: 2409702 - DNA, 25 bp, Homo sapien
ctctcttggactttagctctccatc

SEQ ID NO: 2409703 - DNA, 25 bp, Homo sapien
tcttggactttagctctccatctct

SEQ ID NO: 2409704 - DNA, 25 bp, Homo sapien
gtatttgcatttctcctgttaatga

SEQ ID NO: 2409705 - DNA, 25 bp, Homo sapien
ctgaggggatatgaaggtatttgca

SEQ ID NO: 2409706 - DNA, 25 bp, Homo sapien
tttgcatttctcctgttaatgaagg

SEQ ID NO: 2409707 - DNA, 25 bp, Homo sapien
tgcatttctcctgttaatgaaggga

SEQ ID NO: 2409708 - DNA, 25 bp, Homo sapien
tcagcttaacgtggcgcctgtggtc

SEQ ID NO: 2409709 - DNA, 25 bp, Homo sapien
tatgtcgcctgtagcttaaatccca

SEQ ID NO: 2409710 - DNA, 25 bp, Homo sapien
gcagttttagcgacacatagctgga

SEQ ID NO: 2409711 - DNA, 25 bp, Homo sapien
tactcctcgttttccatctgtgcag

SEQ ID NO: 2409712 - DNA, 25 bp, Homo sapien
cataagattccatgctttcatgtga

SEQ ID NO: 2409713 - DNA, 25 bp, Homo sapien
gttcataagattccatgctttcatg

SEQ ID NO: 2409714 - DNA, 25 bp, Homo sapien
taagattccatgctttcatgtgatt

SEQ ID NO: 2409715 - DNA, 25 bp, Homo sapien
aagttcataagattccatgctttca

SEQ ID NO: 2409716 - DNA, 25 bp, Homo sapien
agccacagaaaccactagctccagc

SEQ ID NO: 2409717 - DNA, 25 bp, Homo sapien
agaaaccactagctccagctgacag

SEQ ID NO: 2409718 - DNA, 25 bp, Homo sapien
cagaaaccactagctccagctgaca

SEQ ID NO: 2409719 - DNA, 25 bp, Homo sapien
gaactgaaacgatatcaaagccgaa

SEQ ID NO: 2409720 - DNA, 25 bp, Homo sapien
cctgggcacgatgccagttcagaga

SEQ ID NO: 2409721 - DNA, 25 bp, Homo sapien
ggcacgatgccagttcagagagaga

SEQ ID NO: 2409722 - DNA, 25 bp, Homo sapien
gatatcaaagccgaagttttcttct

SEQ ID NO: 2409723 - DNA, 25 bp, Homo sapien
cacaaagttactaccgctaaggcgg

SEQ ID NO: 2409724 - DNA, 25 bp, Homo sapien
acacaaagttactaccgctaaggcg

SEQ ID NO: 2409725 - DNA, 25 bp, Homo sapien
cataacacaaagttactaccgctaa

SEQ ID NO: 2409726 - DNA, 25 bp, Homo sapien
agttactaccgctaaggcggccagg

SEQ ID NO: 2409727 - DNA, 25 bp, Homo sapien
ctgcaggtcagtctcagggtcttgt

SEQ ID NO: 2409728 - DNA, 25 bp, Homo sapien
gtcagtctcagggtcttgtgtagca

SEQ ID NO: 2409729 - DNA, 25 bp, Homo sapien
gtctcagggtcttgtgtagcagcag

SEQ ID NO: 2409730 - DNA, 25 bp, Homo sapien
caggtcagtctcagggtcttgtgta

SEQ ID NO: 2409731 - DNA, 25 bp, Homo sapien
gggatgttagtggaaggctgtgagg

SEQ ID NO: 2409732 - DNA, 25 bp, Homo sapien
ctacgggatgttagtggaaggctgt

SEQ ID NO: 2409733 - DNA, 25 bp, Homo sapien
acgggatgttagtggaaggctgtga

SEQ ID NO: 2409734 - DNA, 25 bp, Homo sapien
tacgggatgttagtggaaggctgtg

SEQ ID NO: 2409735 - DNA, 25 bp, Homo sapien
ggtgctagtgaccagctcagataat

SEQ ID NO: 2409736 - DNA, 25 bp, Homo sapien
tcaagaaaggtgctagtgaccagct

SEQ ID NO: 2409737 - DNA, 25 bp, Homo sapien
caaagcatcaagaaaggtgctagtg

SEQ ID NO: 2409738 - DNA, 25 bp, Homo sapien
cattcttatgggcactcaggagcat

SEQ ID NO: 2409739 - DNA, 25 bp, Homo sapien
tagggtttctgcgatcatccccaga

SEQ ID NO: 2409740 - DNA, 25 bp, Homo sapien
gtttctgcgatcatccccagagcca

SEQ ID NO: 2409741 - DNA, 25 bp, Homo sapien
ctcttagggtttctgcgatcatccc

SEQ ID NO: 2409742 - DNA, 25 bp, Homo sapien
gggtttctgcgatcatccccagagc

SEQ ID NO: 2409743 - DNA, 25 bp, Homo sapien
gaacttcctgtatcctcggcttcaa

SEQ ID NO: 2409744 - DNA, 25 bp, Homo sapien
ttaagaacttcctgtatcctcggct

SEQ ID NO: 2409745 - DNA, 25 bp, Homo sapien
cagaaagtggtcaggtgtagtacag

SEQ ID NO: 2409746 - DNA, 25 bp, Homo sapien
aatcattgcatgttggagtcccgga

SEQ ID NO: 2409747 - DNA, 25 bp, Homo sapien
ttctctaggtctcgccatgtaaggt

SEQ ID NO: 2409748 - DNA, 25 bp, Homo sapien
gttcaacactcaaaaggtgttcgtg

SEQ ID NO: 2409749 - DNA, 25 bp, Homo sapien
tttccaattctctaggtctcgccat

SEQ ID NO: 2409750 - DNA, 25 bp, Homo sapien
caaaagttcaacactcaaaaggtgt

SEQ ID NO: 2409751 - DNA, 25 bp, Homo sapien
ccctgtttggctgctttctgtccgt

SEQ ID NO: 2409752 - DNA, 25 bp, Homo sapien
cctgtttggctgctttctgtccgtg

SEQ ID NO: 2409753 - DNA, 25 bp, Homo sapien
tccctgtttggctgctttctgtccg

SEQ ID NO: 2409754 - DNA, 25 bp, Homo sapien
tttattatgcaggttgttgatttac

SEQ ID NO: 2409755 - DNA, 25 bp, Homo sapien
caggttgttgatttacatagggagt

SEQ ID NO: 2409756 - DNA, 25 bp, Homo sapien
ttgatttacatagggagttggagat

SEQ ID NO: 2409757 - DNA, 25 bp, Homo sapien
tatgcaggttgttgatttacatagg

SEQ ID NO: 2409758 - DNA, 25 bp, Homo sapien
agggacttggagacagcctttaact

SEQ ID NO: 2409759 - DNA, 25 bp, Homo sapien
ctaaccaagcatggagttttcacat

SEQ ID NO: 2409760 - DNA, 25 bp, Homo sapien
tcacatggtctatttctgctgagtt

SEQ ID NO: 2409761 - DNA, 25 bp, Homo sapien
ggagttttcacatggtctatttctg

SEQ ID NO: 2409762 - DNA, 25 bp, Homo sapien
gcttacagagtatgaatgcacgata

SEQ ID NO: 2409763 - DNA, 25 bp, Homo sapien
tcatagaggcatcacagtgagtctc

SEQ ID NO: 2409764 - DNA, 25 bp, Homo sapien
ctgagtcagagacggacatgtgctt

SEQ ID NO: 2409765 - DNA, 25 bp, Homo sapien
taggtgtgttacagatgggcttaca

SEQ ID NO: 2409766 - DNA, 25 bp, Homo sapien
gtctttccttctgattcacgatttt

SEQ ID NO: 2409767 - DNA, 25 bp, Homo sapien
tttccttctgattcacgattttctt

SEQ ID NO: 2409768 - DNA, 25 bp, Homo sapien
tggagtctttccttctgattcacga

SEQ ID NO: 2409769 - DNA, 25 bp, Homo sapien
tcagagttccacctttggagtcttt

SEQ ID NO: 2409770 - DNA, 25 bp, Homo sapien
gccaaagctggcagttgagactcct

SEQ ID NO: 2409771 - DNA, 25 bp, Homo sapien
tagagtctggtaaattgccaaagct

SEQ ID NO: 2409772 - DNA, 25 bp, Homo sapien
caaaagttttgcacatgctctacgg

SEQ ID NO: 2409773 - DNA, 25 bp, Homo sapien
tgctctacggaaacttctgctgtgg

SEQ ID NO: 2409774 - DNA, 25 bp, Homo sapien
aaaagttctatctgaggtgacgtcc

SEQ ID NO: 2409775 - DNA, 25 bp, Homo sapien
tggtctgcaccatgaaattgaaatc

SEQ ID NO: 2409776 - DNA, 25 bp, Homo sapien
tgtaattgttgcagctcacactgat

SEQ ID NO: 2409777 - DNA, 25 bp, Homo sapien
cactgattgaatttatggtctgcac

SEQ ID NO: 2409778 - DNA, 25 bp, Homo sapien
cccctggaagagcttggctgccttc

SEQ ID NO: 2409779 - DNA, 25 bp, Homo sapien
catactctggggaggccttgttcat

SEQ ID NO: 2409780 - DNA, 25 bp, Homo sapien
tgtgcatgttctcttcatactctgg

SEQ ID NO: 2409781 - DNA, 25 bp, Homo sapien
gcttggctgccttctggtatctgtg

SEQ ID NO: 2409782 - DNA, 25 bp, Homo sapien
atctgaattacgctgttgaataacc

SEQ ID NO: 2409783 - DNA, 25 bp, Homo sapien
gatgaatctgaattacgctgttgaa

SEQ ID NO: 2409784 - DNA, 25 bp, Homo sapien
aggagatgaatctgaattacgctgt

SEQ ID NO: 2409785 - DNA, 25 bp, Homo sapien
gaatctgaattacgctgttgaataa

SEQ ID NO: 2409786 - DNA, 25 bp, Homo sapien
caatttggtggcatcaatgctttca

SEQ ID NO: 2409787 - DNA, 25 bp, Homo sapien
gatctcaatgaaacggctcaatttg

SEQ ID NO: 2409788 - DNA, 25 bp, Homo sapien
tgctttcaatgtcttcgtcctctaa

SEQ ID NO: 2409789 - DNA, 25 bp, Homo sapien
gtcttcgtcctctaaattcagttgt

SEQ ID NO: 2409790 - DNA, 25 bp, Homo sapien
ccagctggcaagtctccttcatact

SEQ ID NO: 2409791 - DNA, 25 bp, Homo sapien
caggactcgtttaacatttgatgtg

SEQ ID NO: 2409792 - DNA, 25 bp, Homo sapien
catacttaaggctttgctattgcaa

SEQ ID NO: 2409793 - DNA, 25 bp, Homo sapien
ttatcatcataatcaggactcgttt

SEQ ID NO: 2409794 - DNA, 25 bp, Homo sapien
gctgttgagcgacaaagcagtacca

SEQ ID NO: 2409795 - DNA, 25 bp, Homo sapien
tacagtacctgtttgggaagcttga

SEQ ID NO: 2409796 - DNA, 25 bp, Homo sapien
aagtttatgagtccacaacccagtg

SEQ ID NO: 2409797 - DNA, 25 bp, Homo sapien
tattatcggtatcttgcatagggca

SEQ ID NO: 2409798 - DNA, 25 bp, Homo sapien
aaagaggcagatggtgttcccagtg

SEQ ID NO: 2409799 - DNA, 25 bp, Homo sapien
tgctgatcccaaatgacacgcctgg

SEQ ID NO: 2409800 - DNA, 25 bp, Homo sapien
ttttgcaccatgctatggagtatgg

SEQ ID NO: 2409801 - DNA, 25 bp, Homo sapien
cagaacctcagaatcagtgctgatc

SEQ ID NO: 2409802 - DNA, 25 bp, Homo sapien
gaagcctatgacagccacctcagtg

SEQ ID NO: 2409803 - DNA, 25 bp, Homo sapien
agaagcctatgacagccacctcagt

SEQ ID NO: 2409804 - DNA, 25 bp, Homo sapien
tgtgagccacgtgggttcctgggca

SEQ ID NO: 2409805 - DNA, 25 bp, Homo sapien
ctgtgagccacgtgggttcctgggc

SEQ ID NO: 2409806 - DNA, 25 bp, Homo sapien
gtgggttcctgggcagcaccaggac

SEQ ID NO: 2409807 - DNA, 25 bp, Homo sapien
ggttcctgggcagcaccaggaccat

SEQ ID NO: 2409808 - DNA, 25 bp, Homo sapien
tctgcagcaacttctgcagccagct

SEQ ID NO: 2409809 - DNA, 25 bp, Homo sapien
gcagcaacttctgcagccagctcac

SEQ ID NO: 2409810 - DNA, 25 bp, Homo sapien
tgaggatttctcaacttctgcagca

SEQ ID NO: 2409811 - DNA, 25 bp, Homo sapien
ctgaggatttctcaacttctgcagc

SEQ ID NO: 2409812 - DNA, 25 bp, Homo sapien
aggagaaataagaggaacatgaacc

SEQ ID NO: 2409813 - DNA, 25 bp, Homo sapien
cgtgaggagaaataagaggaacatg

SEQ ID NO: 2409814 - DNA, 25 bp, Homo sapien
acgtgaggagaaataagaggaacat

SEQ ID NO: 2409815 - DNA, 25 bp, Homo sapien
tgaggagaaataagaggaacatgaa

SEQ ID NO: 2409816 - DNA, 25 bp, Homo sapien
ccaggcattgatcctagcgctaaga

SEQ ID NO: 2409817 - DNA, 25 bp, Homo sapien
gggacaatgctagggttcaatgaaa

SEQ ID NO: 2409818 - DNA, 25 bp, Homo sapien
ttcttcctgcggaggatgccggagc

SEQ ID NO: 2409819 - DNA, 25 bp, Homo sapien
ttttgccaggcaacacaaggtagaa

SEQ ID NO: 2409820 - DNA, 25 bp, Homo sapien
ttcaaagcaagaaagcagggaaatg

SEQ ID NO: 2409821 - DNA, 25 bp, Homo sapien
ttatcatatttgttcaaagcaagaa

SEQ ID NO: 2409822 - DNA, 25 bp, Homo sapien
gttatcatatttgttcaaagcaaga

SEQ ID NO: 2409823 - DNA, 25 bp, Homo sapien
ttgttcaaagcaagaaagcagggaa

SEQ ID NO: 2409824 - DNA, 25 bp, Homo sapien
ttattcttgttctcttgtgtcgttt

SEQ ID NO: 2409825 - DNA, 25 bp, Homo sapien
attcttgttctcttgtgtcgtttac

SEQ ID NO: 2409826 - DNA, 25 bp, Homo sapien
tattcttgttctcttgtgtcgttta

SEQ ID NO: 2409827 - DNA, 25 bp, Homo sapien
tttattcttgttctcttgtgtcgtt

SEQ ID NO: 2409828 - DNA, 25 bp, Homo sapien
ctcacaaaagaagaactccctctgg

SEQ ID NO: 2409829 - DNA, 25 bp, Homo sapien
aaaagaagaactccctctggcaggg

SEQ ID NO: 2409830 - DNA, 25 bp, Homo sapien
acaaaagaagaactccctctggcag

SEQ ID NO: 2409831 - DNA, 25 bp, Homo sapien
tcacaaaagaagaactccctctggc

SEQ ID NO: 2409832 - DNA, 25 bp, Homo sapien
agacgtggaagatctggccctgatg

SEQ ID NO: 2409833 - DNA, 25 bp, Homo sapien
tactggaacctgagtcaaagacctg

SEQ ID NO: 2409834 - DNA, 25 bp, Homo sapien
tgttctagggaccacgttgagtgac

SEQ ID NO: 2409835 - DNA, 25 bp, Homo sapien
tctggcctctagttgcttgaatagg

SEQ ID NO: 2409836 - DNA, 25 bp, Homo sapien
tcttaatcgacaggttccactccca

SEQ ID NO: 2409837 - DNA, 25 bp, Homo sapien
catagctgccaaccataaatgttgc

SEQ ID NO: 2409838 - DNA, 25 bp, Homo sapien
caactggagtgaggaactcatactc

SEQ ID NO: 2409839 - DNA, 25 bp, Homo sapien
gacttgttgtggtacgtgcctcgcg

SEQ ID NO: 2409840 - DNA, 25 bp, Homo sapien
aaagaagagttcattagggtaagag

SEQ ID NO: 2409841 - DNA, 25 bp, Homo sapien
agaagaaagaagagttcattagggt

SEQ ID NO: 2409842 - DNA, 25 bp, Homo sapien
agaaagaagagttcattagggtaag

SEQ ID NO: 2409843 - DNA, 25 bp, Homo sapien
aagaagagttcattagggtaagagc

SEQ ID NO: 2409844 - DNA, 25 bp, Homo sapien
taagttggagtgccttttaataata

SEQ ID NO: 2409845 - DNA, 25 bp, Homo sapien
atggttcagtaaccttctgtgggtc

SEQ ID NO: 2409846 - DNA, 25 bp, Homo sapien
tatggttcagtaaccttctgtgggt

SEQ ID NO: 2409847 - DNA, 25 bp, Homo sapien
gctatggttcagtaaccttctgtgg

SEQ ID NO: 2409848 - DNA, 25 bp, Homo sapien
cagataggtggcatatagttggcta

SEQ ID NO: 2409849 - DNA, 25 bp, Homo sapien
gatctcagtcctgcaatggcctaag

SEQ ID NO: 2409850 - DNA, 25 bp, Homo sapien
gaataactggatggaacaacaacag

SEQ ID NO: 2409851 - DNA, 25 bp, Homo sapien
gaaaaaacagttgcagacatgtcac

SEQ ID NO: 2409852 - DNA, 25 bp, Homo sapien
tgatgcagtctaaacgaggtcccct

SEQ ID NO: 2409853 - DNA, 25 bp, Homo sapien
tccaaaaagctgactgctgaacgtt

SEQ ID NO: 2409854 - DNA, 25 bp, Homo sapien
atttgtgccttttcctagagccggc

SEQ ID NO: 2409855 - DNA, 25 bp, Homo sapien
ggtcccctgagcattggccttgtca

SEQ ID NO: 2409856 - DNA, 25 bp, Homo sapien
ctgtaggtgtgctgaacgtatttca

SEQ ID NO: 2409857 - DNA, 25 bp, Homo sapien
tgaacgtatttcaggcctgacacaa

SEQ ID NO: 2409858 - DNA, 25 bp, Homo sapien
tcaggcctgacacaatatccctgtt

SEQ ID NO: 2409859 - DNA, 25 bp, Homo sapien
ggcctgacacaatatccctgttcac

SEQ ID NO: 2409860 - DNA, 25 bp, Homo sapien
tagagagtactcaaaagcccctttc

SEQ ID NO: 2409861 - DNA, 25 bp, Homo sapien
gaaactgatgtgcaacccattctag

SEQ ID NO: 2409862 - DNA, 25 bp, Homo sapien
tcttagtcacgtcaaaatttacctg

SEQ ID NO: 2409863 - DNA, 25 bp, Homo sapien
tttacgtaggttacccagagagcca

SEQ ID NO: 2409864 - DNA, 25 bp, Homo sapien
gggtctcaacaggtagccctcaggg

SEQ ID NO: 2409865 - DNA, 25 bp, Homo sapien
cttgagcaattagagctgaggccct

SEQ ID NO: 2409866 - DNA, 25 bp, Homo sapien
tgtttggagttcacagagggatccc

SEQ ID NO: 2409867 - DNA, 25 bp, Homo sapien
gaagtcctggctaggaaaagacagg

SEQ ID NO: 2409868 - DNA, 25 bp, Homo sapien
ttgactctatattcagaaccttcct

SEQ ID NO: 2409869 - DNA, 25 bp, Homo sapien
gactctatattcagaaccttccttt

SEQ ID NO: 2409870 - DNA, 25 bp, Homo sapien
tttgactctatattcagaaccttcc

SEQ ID NO: 2409871 - DNA, 25 bp, Homo sapien
attttgactctatattcagaacctt

SEQ ID NO: 2409872 - DNA, 25 bp, Homo sapien
ctgagttctggtgagagagcgtgag

SEQ ID NO: 2409873 - DNA, 25 bp, Homo sapien
agttctggtgagagagcgtgagttt

SEQ ID NO: 2409874 - DNA, 25 bp, Homo sapien
aggaagactctgagttctggtgaga

SEQ ID NO: 2409875 - DNA, 25 bp, Homo sapien
taggaagactctgagttctggtgag

SEQ ID NO: 2409876 - DNA, 25 bp, Homo sapien
tgagccgggtgacaacgacattggg

SEQ ID NO: 2409877 - DNA, 25 bp, Homo sapien
catggtgattggtcccggggcactc

SEQ ID NO: 2409878 - DNA, 25 bp, Homo sapien
tctcacaaaccagggtgagccgggt

SEQ ID NO: 2409879 - DNA, 25 bp, Homo sapien
cggggcactctcacaaaccagggtg

SEQ ID NO: 2409880 - DNA, 25 bp, Homo sapien
ggacttctgtggtggaggcttataa

SEQ ID NO: 2409881 - DNA, 25 bp, Homo sapien
gtcaccacaggaccatctcccagca

SEQ ID NO: 2409882 - DNA, 25 bp, Homo sapien
tataattgagcttgctgtccagctc

SEQ ID NO: 2409883 - DNA, 25 bp, Homo sapien
tcttgtacttaattagactctcatc

SEQ ID NO: 2409884 - DNA, 25 bp, Homo sapien
aaatgaagcaaaagcccagtcaaaa

SEQ ID NO: 2409885 - DNA, 25 bp, Homo sapien
agtgaagcaacatggcacaaagact

SEQ ID NO: 2409886 - DNA, 25 bp, Homo sapien
aagcaacatggcacaaagactcctg

SEQ ID NO: 2409887 - DNA, 25 bp, Homo sapien
caaatgaagcaaaagcccagtcaaa

SEQ ID NO: 2409888 - DNA, 25 bp, Homo sapien
caagcagaggtaaatgcttctttgc

SEQ ID NO: 2409889 - DNA, 25 bp, Homo sapien
gaggtgcacaagcagaggtaaatgc

SEQ ID NO: 2409890 - DNA, 25 bp, Homo sapien
gcgcaactcggttcctgcgttacct

SEQ ID NO: 2409891 - DNA, 25 bp, Homo sapien
gggaagtgtcagataacgatgtttc

SEQ ID NO: 2409892 - DNA, 25 bp, Homo sapien
ctactttgcaggaaacccctccagg

SEQ ID NO: 2409893 - DNA, 25 bp, Homo sapien
ttccaagcctggccaggtgcctgct

SEQ ID NO: 2409894 - DNA, 25 bp, Homo sapien
cgtatcattttggatctacagtctt

SEQ ID NO: 2409895 - DNA, 25 bp, Homo sapien
gccaggtgcctgctcctactttgca

SEQ ID NO: 2409896 - DNA, 25 bp, Homo sapien
ctcctcccctgagtcactgctaccc

SEQ ID NO: 2409897 - DNA, 25 bp, Homo sapien
tcctcccctgagtcactgctaccct

SEQ ID NO: 2409898 - DNA, 25 bp, Homo sapien
tactggcagttagaacaggaaggaa

SEQ ID NO: 2409899 - DNA, 25 bp, Homo sapien
agacctacttgaagaggaaaccctg

SEQ ID NO: 2409900 - DNA, 25 bp, Homo sapien
tttgcactgcctatctcttgatcag

SEQ ID NO: 2409901 - DNA, 25 bp, Homo sapien
cttgatcagccaacttgagcagcat

SEQ ID NO: 2409902 - DNA, 25 bp, Homo sapien
cagttactactaagagttctcttac

SEQ ID NO: 2409903 - DNA, 25 bp, Homo sapien
cttgcagtacagctcaaaatagtgg

SEQ ID NO: 2409904 - DNA, 25 bp, Homo sapien
caaggtcattccctatcagttacta

SEQ ID NO: 2409905 - DNA, 25 bp, Homo sapien
cctaccagctagttagaagtcatca

SEQ ID NO: 2409906 - DNA, 25 bp, Homo sapien
caggagttacatacattgactgctt

SEQ ID NO: 2409907 - DNA, 25 bp, Homo sapien
tgtacatctgtagtaaatctaatct

SEQ ID NO: 2409908 - DNA, 25 bp, Homo sapien
tatgcaaaggataggcagttgaccc

SEQ ID NO: 2409909 - DNA, 25 bp, Homo sapien
taaggtttagactcatatgcaaagg

SEQ ID NO: 2409910 - DNA, 25 bp, Homo sapien
gagagattggcatcaaaagaagtga

SEQ ID NO: 2409911 - DNA, 25 bp, Homo sapien
caaaagaagtgaattggttgccttt

SEQ ID NO: 2409912 - DNA, 25 bp, Homo sapien
aggagagattggcatcaaaagaagt

SEQ ID NO: 2409913 - DNA, 25 bp, Homo sapien
atcaaaagaagtgaattggttgcct

SEQ ID NO: 2409914 - DNA, 25 bp, Homo sapien
tgcctgtgcgtgtctttggatcttt

SEQ ID NO: 2409915 - DNA, 25 bp, Homo sapien
aaatgcctgtgcgtgtctttggatc

SEQ ID NO: 2409916 - DNA, 25 bp, Homo sapien
tgcaaaatgcctgtgcgtgtctttg

SEQ ID NO: 2409917 - DNA, 25 bp, Homo sapien
caaaatgcctgtgcgtgtctttgga

SEQ ID NO: 2409918 - DNA, 25 bp, Homo sapien
cttcttgaatcagttgccctccttt

SEQ ID NO: 2409919 - DNA, 25 bp, Homo sapien
actgcactagatttggctcagcctt

SEQ ID NO: 2409920 - DNA, 25 bp, Homo sapien
ctgcactagatttggctcagccttg

SEQ ID NO: 2409921 - DNA, 25 bp, Homo sapien
cacagtcaccctgctttctggatca

SEQ ID NO: 2409922 - DNA, 25 bp, Homo sapien
gcagcatttgtcattagtaacaatc

SEQ ID NO: 2409923 - DNA, 25 bp, Homo sapien
gcttgacctgtgcagcatttgtcat

SEQ ID NO: 2409924 - DNA, 25 bp, Homo sapien
tgacctgtgcagcatttgtcattag

SEQ ID NO: 2409925 - DNA, 25 bp, Homo sapien
cctgtgcagcatttgtcattagtaa

SEQ ID NO: 2409926 - DNA, 25 bp, Homo sapien
tagaggccagaaacaatgggaagcc

SEQ ID NO: 2409927 - DNA, 25 bp, Homo sapien
caaagtctagacttcccaatggagg

SEQ ID NO: 2409928 - DNA, 25 bp, Homo sapien
aacttcccaacctattagaggccag

SEQ ID NO: 2409929 - DNA, 25 bp, Homo sapien
tggtgaattaatgccgctaacgctt

SEQ ID NO: 2409930 - DNA, 25 bp, Homo sapien
gtttccaattagttggtccacctca

SEQ ID NO: 2409931 - DNA, 25 bp, Homo sapien
tttccaattagttggtccacctcag

SEQ ID NO: 2409932 - DNA, 25 bp, Homo sapien
gagtgtttccaattagttggtccac

SEQ ID NO: 2409933 - DNA, 25 bp, Homo sapien
tgtttccaattagttggtccacctc

SEQ ID NO: 2409934 - DNA, 25 bp, Homo sapien
tggtggagctgcgtcgcctcgtctt

SEQ ID NO: 2409935 - DNA, 25 bp, Homo sapien
ttttggtgagcatcttgttaatggc

SEQ ID NO: 2409936 - DNA, 25 bp, Homo sapien
taatggcttgcttgacatgcgtggt

SEQ ID NO: 2409937 - DNA, 25 bp, Homo sapien
ctaactactgattttggtgagcatc

SEQ ID NO: 2409938 - DNA, 25 bp, Homo sapien
tcggtcagtaatgtcgtagaccagc

SEQ ID NO: 2409939 - DNA, 25 bp, Homo sapien
ctaggatgttcttaagtggcagcac

SEQ ID NO: 2409940 - DNA, 25 bp, Homo sapien
gcagagcactcgtaaaaagcacaag

SEQ ID NO: 2409941 - DNA, 25 bp, Homo sapien
gtgctaacctgcctggagtggtcca

SEQ ID NO: 2409942 - DNA, 25 bp, Homo sapien
ttggcaaagaaaaatggccgtcaag

SEQ ID NO: 2409943 - DNA, 25 bp, Homo sapien
ctgttggcaaagaaaaatggccgtc

SEQ ID NO: 2409944 - DNA, 25 bp, Homo sapien
tgttggcaaagaaaaatggccgtca

SEQ ID NO: 2409945 - DNA, 25 bp, Homo sapien
gcaaagaaaaatggccgtcaagaga

SEQ ID NO: 2409946 - DNA, 25 bp, Homo sapien
ccttcatagcaaagtggcaagcatg

SEQ ID NO: 2409947 - DNA, 25 bp, Homo sapien
gagaatccaactctatgctaaagga

SEQ ID NO: 2409948 - DNA, 25 bp, Homo sapien
tttctaacagacaagtagcccctat

SEQ ID NO: 2409949 - DNA, 25 bp, Homo sapien
cccaaaatgtcgtgtagtaccaatg

SEQ ID NO: 2409950 - DNA, 25 bp, Homo sapien
gctgcctctcttcggaatcagtgct

SEQ ID NO: 2409951 - DNA, 25 bp, Homo sapien
ctgctgcctctcttcggaatcagtg

SEQ ID NO: 2409952 - DNA, 25 bp, Homo sapien
cctgctgcctctcttcggaatcagt

SEQ ID NO: 2409953 - DNA, 25 bp, Homo sapien
tgctgcctctcttcggaatcagtgc

SEQ ID NO: 2409954 - DNA, 25 bp, Homo sapien
ccccttgaaacactgggcagtttat

SEQ ID NO: 2409955 - DNA, 25 bp, Homo sapien
caaaacacatttgaccatgaaaact

SEQ ID NO: 2409956 - DNA, 25 bp, Homo sapien
gagagtctaacctagatgatatgtg

SEQ ID NO: 2409957 - DNA, 25 bp, Homo sapien
gacacctgtttaacttcatttgagc

SEQ ID NO: 2409958 - DNA, 25 bp, Homo sapien
catcgatggttgcttggtgtcggta

SEQ ID NO: 2409959 - DNA, 25 bp, Homo sapien
tcatcatcgatggttgcttggtgtc

SEQ ID NO: 2409960 - DNA, 25 bp, Homo sapien
acaacttcatcatcgatggttgctt

SEQ ID NO: 2409961 - DNA, 25 bp, Homo sapien
ccagcagtgtctagtatctccatgg

SEQ ID NO: 2409962 - DNA, 25 bp, Homo sapien
agcataaggaactgtgtagtctagg

SEQ ID NO: 2409963 - DNA, 25 bp, Homo sapien
ctggacataccaagttctaacatgg

SEQ ID NO: 2409964 - DNA, 25 bp, Homo sapien
aactgtgtagtctaggaaagagagg

SEQ ID NO: 2409965 - DNA, 25 bp, Homo sapien
tgcaagatttaatttgatccttaaa

SEQ ID NO: 2409966 - DNA, 25 bp, Homo sapien
caacaatgtaaattgagaaggtgat

SEQ ID NO: 2409967 - DNA, 25 bp, Homo sapien
acaatgtaaattgagaaggtgattt

SEQ ID NO: 2409968 - DNA, 25 bp, Homo sapien
cttctataatgagacctcaacaatg

SEQ ID NO: 2409969 - DNA, 25 bp, Homo sapien
tcaacaatgtaaattgagaaggtga

SEQ ID NO: 2409970 - DNA, 25 bp, Homo sapien
caaatgatgtaaaactacgagaaac

SEQ ID NO: 2409971 - DNA, 25 bp, Homo sapien
aagagatattaccaggaagtgaatg

SEQ ID NO: 2409972 - DNA, 25 bp, Homo sapien
ccaggaagtgaatggttcttgccaa

SEQ ID NO: 2409973 - DNA, 25 bp, Homo sapien
gccaaatgatgtaaaactacgagaa

SEQ ID NO: 2409974 - DNA, 25 bp, Homo sapien
aaaaggtggtcagaccccagtactg

SEQ ID NO: 2409975 - DNA, 25 bp, Homo sapien
aaaggtggtcagaccccagtactgg

SEQ ID NO: 2409976 - DNA, 25 bp, Homo sapien
tggtggatcaacagcagagtggtca

SEQ ID NO: 2409977 - DNA, 25 bp, Homo sapien
aaatggcagatgctcagtaccagct

SEQ ID NO: 2409978 - DNA, 25 bp, Homo sapien
tggaggttggtggatcaacagcaga

SEQ ID NO: 2409979 - DNA, 25 bp, Homo sapien
agaaaaatggcagatgctcagtacc

SEQ ID NO: 2409980 - DNA, 25 bp, Homo sapien
gaagagcaattcactagtgttcggt

SEQ ID NO: 2409981 - DNA, 25 bp, Homo sapien
tagactgtggtacatcattttgaag

SEQ ID NO: 2409982 - DNA, 25 bp, Homo sapien
taatgcctgactaggttacaggcag

SEQ ID NO: 2409983 - DNA, 25 bp, Homo sapien
caggcagcttctctacaccgacaat

SEQ ID NO: 2409984 - DNA, 25 bp, Homo sapien
ttcgtatgaacgattccaagcagca

SEQ ID NO: 2409985 - DNA, 25 bp, Homo sapien
gaactagtgggtctaacgtctcctc

SEQ ID NO: 2409986 - DNA, 25 bp, Homo sapien
tactcctagtctaaccacaactgga

SEQ ID NO: 2409987 - DNA, 25 bp, Homo sapien
gacaatctctaagctccttgcagtg

SEQ ID NO: 2409988 - DNA, 25 bp, Homo sapien
cattactcctgaagtctgatgaaag

SEQ ID NO: 2409989 - DNA, 25 bp, Homo sapien
tgggaatgagtcatgtatccattac

SEQ ID NO: 2409990 - DNA, 25 bp, Homo sapien
agtgcttgttgcttagcagctgcca

SEQ ID NO: 2409991 - DNA, 25 bp, Homo sapien
gaagtctgatgaaagtgcttgttgc

SEQ ID NO: 2409992 - DNA, 25 bp, Homo sapien
cccagatgaaccgtttggtcagaaa

SEQ ID NO: 2409993 - DNA, 25 bp, Homo sapien
ttggtcagaaatctcactacaagag

SEQ ID NO: 2409994 - DNA, 25 bp, Homo sapien
ggatcatattcccagatgaaccgtt

SEQ ID NO: 2409995 - DNA, 25 bp, Homo sapien
cgagggtgggatcatattcccagat

SEQ ID NO: 2409996 - DNA, 25 bp, Homo sapien
aatttgttaatttgcttagcacacc

SEQ ID NO: 2409997 - DNA, 25 bp, Homo sapien
gggtttattgtgcattagtcaacaa

SEQ ID NO: 2409998 - DNA, 25 bp, Homo sapien
tctttttaaggaaagcgaaatgctc

SEQ ID NO: 2409999 - DNA, 25 bp, Homo sapien
tgctccacacaaccctataaatgct

SEQ ID NO: 2410000 - DNA, 25 bp, Homo sapien
cctggatgtcagttaagaaccttgg

SEQ ID NO: 2410001 - DNA, 25 bp, Homo sapien
tttacatgagcgaagtttacagttc

SEQ ID NO: 2410002 - DNA, 25 bp, Homo sapien
tttaacactaaaggctgcaacctag

SEQ ID NO: 2410003 - DNA, 25 bp, Homo sapien
gacagtccatcagctttcaaaacca

SEQ ID NO: 2410004 - DNA, 25 bp, Homo sapien
tgttcctgggtcttctatcaccaac

SEQ ID NO: 2410005 - DNA, 25 bp, Homo sapien
tgtgaagtatgagatcccaggaccg

SEQ ID NO: 2410006 - DNA, 25 bp, Homo sapien
gaaatatgggtcattgtgcctcaga

SEQ ID NO: 2410007 - DNA, 25 bp, Homo sapien
actctcttttctgtgaccgttctgg

SEQ ID NO: 2410008 - DNA, 25 bp, Homo sapien
catgaataccatgctgtcctacagc

SEQ ID NO: 2410009 - DNA, 25 bp, Homo sapien
tttgtgtaggtctacctctgagctc

SEQ ID NO: 2410010 - DNA, 25 bp, Homo sapien
tgttagtgatggaactcattcttcc

SEQ ID NO: 2410011 - DNA, 25 bp, Homo sapien
tattctgtttcatcgaactatctgt

SEQ ID NO: 2410012 - DNA, 25 bp, Homo sapien
gaggtggagcctttcggagacaata

SEQ ID NO: 2410013 - DNA, 25 bp, Homo sapien
acagctacccggaaaccaggaagag

SEQ ID NO: 2410014 - DNA, 25 bp, Homo sapien
gaggatgaaaccctcatgactggga

SEQ ID NO: 2410015 - DNA, 25 bp, Homo sapien
ttccttatccatatgctataatcac

SEQ ID NO: 2410016 - DNA, 25 bp, Homo sapien
tcaagttactcatattcgcttaact

SEQ ID NO: 2410017 - DNA, 25 bp, Homo sapien
gtttctaacttcttcaagttactca

SEQ ID NO: 2410018 - DNA, 25 bp, Homo sapien
ttcttcaagttactcatattcgctt

SEQ ID NO: 2410019 - DNA, 25 bp, Homo sapien
ctcatattcgcttaactttaaagaa

SEQ ID NO: 2410020 - DNA, 25 bp, Homo sapien
tactgagggttaatctgacttggcc

SEQ ID NO: 2410021 - DNA, 25 bp, Homo sapien
aatgtgactatctgctgggttgccc

SEQ ID NO: 2410022 - DNA, 25 bp, Homo sapien
gacactagacttggcctgggttgaa

SEQ ID NO: 2410023 - DNA, 25 bp, Homo sapien
taagccgacaatgcataggcaagcc

SEQ ID NO: 2410024 - DNA, 25 bp, Homo sapien
ttaaacctacaagatcgaggaggtg

SEQ ID NO: 2410025 - DNA, 25 bp, Homo sapien
taacttaactggatcacaggatgcc

SEQ ID NO: 2410026 - DNA, 25 bp, Homo sapien
tagtaagttctataagagccaacct

SEQ ID NO: 2410027 - DNA, 25 bp, Homo sapien
taaaacacgttctcattggtttgcc

SEQ ID NO: 2410028 - DNA, 25 bp, Homo sapien
tatggaaatgcattctacatccctg

SEQ ID NO: 2410029 - DNA, 25 bp, Homo sapien
cagtagtgacaggtagtaattccaa

SEQ ID NO: 2410030 - DNA, 25 bp, Homo sapien
cctttgtatatgagagcagtcttgc

SEQ ID NO: 2410031 - DNA, 25 bp, Homo sapien
tggtgaacgcaaatcagataaggga

SEQ ID NO: 2410032 - DNA, 25 bp, Homo sapien
taggtgcaatttccacaaccacgtc

SEQ ID NO: 2410033 - DNA, 25 bp, Homo sapien
tgtctgaccactgagaacttaatga

SEQ ID NO: 2410034 - DNA, 25 bp, Homo sapien
tggttaacaacagcaggatctcttg

SEQ ID NO: 2410035 - DNA, 25 bp, Homo sapien
gggcaatgggttctctaggtgcaat

SEQ ID NO: 2410036 - DNA, 25 bp, Homo sapien
tctatctaccattgcataagtttta

SEQ ID NO: 2410037 - DNA, 25 bp, Homo sapien
caggaaatgcatcattgaggaaaag

SEQ ID NO: 2410038 - DNA, 25 bp, Homo sapien
catcattgaggaaaagacgttatct

SEQ ID NO: 2410039 - DNA, 25 bp, Homo sapien
tcttaaattactgtccaatggcaca

SEQ ID NO: 2410040 - DNA, 25 bp, Homo sapien
gtttgacctccgcacttttagccat

SEQ ID NO: 2410041 - DNA, 25 bp, Homo sapien
caaatattgccagtttgacctccgc

SEQ ID NO: 2410042 - DNA, 25 bp, Homo sapien
ttgcccacgcctgctctcccaaata

SEQ ID NO: 2410043 - DNA, 25 bp, Homo sapien
gccagtttgacctccgcacttttag

SEQ ID NO: 2410044 - DNA, 25 bp, Homo sapien
ggtgttggtagacaatttactgttg

SEQ ID NO: 2410045 - DNA, 25 bp, Homo sapien
caccatatcattgtgaatcttggaa

SEQ ID NO: 2410046 - DNA, 25 bp, Homo sapien
cactgagtaaatctttttggttcca

SEQ ID NO: 2410047 - DNA, 25 bp, Homo sapien
tttggttccagtctttggattcacc

SEQ ID NO: 2410048 - DNA, 25 bp, Homo sapien
tcacttttgggcctcttcatgtctc

SEQ ID NO: 2410049 - DNA, 25 bp, Homo sapien
aacacatgcagtggggcaatggaga

SEQ ID NO: 2410050 - DNA, 25 bp, Homo sapien
gcattcagtgtacaaacacatgcag

SEQ ID NO: 2410051 - DNA, 25 bp, Homo sapien
gcaatggagagagtcacttttgggc

SEQ ID NO: 2410052 - DNA, 25 bp, Homo sapien
gaatgggtcccccaagatcgcgaag

SEQ ID NO: 2410053 - DNA, 25 bp, Homo sapien
agcccaggcttcaggttgcgtttgc

SEQ ID NO: 2410054 - DNA, 25 bp, Homo sapien
cttcaggttgcgtttgcgagttgct

SEQ ID NO: 2410055 - DNA, 25 bp, Homo sapien
gccaggagagctacggtcctctgca

SEQ ID NO: 2410056 - DNA, 25 bp, Homo sapien
caagataccaaacggcttccagaaa

SEQ ID NO: 2410057 - DNA, 25 bp, Homo sapien
caacaactcctgcttaatatgctgc

SEQ ID NO: 2410058 - DNA, 25 bp, Homo sapien
tcatttatatgtcctgggtccaccc

SEQ ID NO: 2410059 - DNA, 25 bp, Homo sapien
ccactggtcatggttggtgacatgg

SEQ ID NO: 2410060 - DNA, 25 bp, Homo sapien
gagaaggtgaatccatccaacaact

SEQ ID NO: 2410061 - DNA, 25 bp, Homo sapien
gcccaggtgactcttgtagttcaca

SEQ ID NO: 2410062 - DNA, 25 bp, Homo sapien
agatcttttccgcatctgctctgcc

SEQ ID NO: 2410063 - DNA, 25 bp, Homo sapien
tcacatggccctgaacagaagggct

SEQ ID NO: 2410064 - DNA, 25 bp, Homo sapien
tcttattggctctaacctttctaga

SEQ ID NO: 2410065 - DNA, 25 bp, Homo sapien
cgggttagcccatttgtttctcctg

SEQ ID NO: 2410066 - DNA, 25 bp, Homo sapien
taactcgtaagtggcaatcaaccgg

SEQ ID NO: 2410067 - DNA, 25 bp, Homo sapien
taaaacgaagctgactcttatatct

SEQ ID NO: 2410068 - DNA, 25 bp, Homo sapien
ttgaacccacactcggtgcattttt

SEQ ID NO: 2410069 - DNA, 25 bp, Homo sapien
aagctgactcttatatcttccatag

SEQ ID NO: 2410070 - DNA, 25 bp, Homo sapien
ttgcatcctgttaggatgaatagaa

SEQ ID NO: 2410071 - DNA, 25 bp, Homo sapien
gaaaagggtaaggtaagccatcatc

SEQ ID NO: 2410072 - DNA, 25 bp, Homo sapien
atcacatacatcatgaacaaaggca

SEQ ID NO: 2410073 - DNA, 25 bp, Homo sapien
aagggtaaggtaagccatcatcaca

SEQ ID NO: 2410074 - DNA, 25 bp, Homo sapien
tcacatacatcatgaacaaaggcaa

SEQ ID NO: 2410075 - DNA, 25 bp, Homo sapien
ggaaagctctgcgaagtgttcaaaa

SEQ ID NO: 2410076 - DNA, 25 bp, Homo sapien
aagctctgcgaagtgttcaaaattg

SEQ ID NO: 2410077 - DNA, 25 bp, Homo sapien
tctggaaagctctgcgaagtgttca

SEQ ID NO: 2410078 - DNA, 25 bp, Homo sapien
ctggaaagctctgcgaagtgttcaa

SEQ ID NO: 2410079 - DNA, 25 bp, Homo sapien
gctatttaagagaagccctccacag

SEQ ID NO: 2410080 - DNA, 25 bp, Homo sapien
tagtgatctcagacagtttcagagt

SEQ ID NO: 2410081 - DNA, 25 bp, Homo sapien
cggattgctccattaagttagacta

SEQ ID NO: 2410082 - DNA, 25 bp, Homo sapien
ccatctgtttctagagagcctactg

SEQ ID NO: 2410083 - DNA, 25 bp, Homo sapien
tagcctcactaaagttttgttaata

SEQ ID NO: 2410084 - DNA, 25 bp, Homo sapien
tgtctctttttacttagcctcacta

SEQ ID NO: 2410085 - DNA, 25 bp, Homo sapien
atgtaggcacctataaacttccctc

SEQ ID NO: 2410086 - DNA, 25 bp, Homo sapien
ctgcctttcctgtatcacataggtt

SEQ ID NO: 2410087 - DNA, 25 bp, Homo sapien
tcattttatgggtcggcagccagag

SEQ ID NO: 2410088 - DNA, 25 bp, Homo sapien
tgctcaagagaggtcagggaaaccc

SEQ ID NO: 2410089 - DNA, 25 bp, Homo sapien
gatctggcgcctggattgctcaaga

SEQ ID NO: 2410090 - DNA, 25 bp, Homo sapien
tgcagccccagttcgccattgtgag

SEQ ID NO: 2410091 - DNA, 25 bp, Homo sapien
agaagacgcaaatcagcctgttctg

SEQ ID NO: 2410092 - DNA, 25 bp, Homo sapien
aacacttccgagagtgaagggatcc

SEQ ID NO: 2410093 - DNA, 25 bp, Homo sapien
cctgttctgggaaaaccgtgatgga

SEQ ID NO: 2410094 - DNA, 25 bp, Homo sapien
gaagggatccttatgccaggacaga

SEQ ID NO: 2410095 - DNA, 25 bp, Homo sapien
cagtctctagaatctgggaacagtc

SEQ ID NO: 2410096 - DNA, 25 bp, Homo sapien
tggcgacctcaatccttgtaacagg

SEQ ID NO: 2410097 - DNA, 25 bp, Homo sapien
ggaacagtcctcaggtgactaccag

SEQ ID NO: 2410098 - DNA, 25 bp, Homo sapien
tgactaccagcaaggaaatggcgac

SEQ ID NO: 2410099 - DNA, 25 bp, Homo sapien
tcccgtggaagacctactatgtcat

SEQ ID NO: 2410100 - DNA, 25 bp, Homo sapien
tgctggcaaaatggcaaactgacag

SEQ ID NO: 2410101 - DNA, 25 bp, Homo sapien
caccaacgctgactaccagactggg

SEQ ID NO: 2410102 - DNA, 25 bp, Homo sapien
gaggtcagaaccttgttcccgtgga

SEQ ID NO: 2410103 - DNA, 25 bp, Homo sapien
tctcctccacatgacgtttaatcat

SEQ ID NO: 2410104 - DNA, 25 bp, Homo sapien
ctctcctccacatgacgtttaatca

SEQ ID NO: 2410105 - DNA, 25 bp, Homo sapien
tctcccatatttggccagtccacat

SEQ ID NO: 2410106 - DNA, 25 bp, Homo sapien
aaataaacagaaggattgatctgct

SEQ ID NO: 2410107 - DNA, 25 bp, Homo sapien
cagaaggattgatctgctagttccc

SEQ ID NO: 2410108 - DNA, 25 bp, Homo sapien
aaggattgatctgctagttcccatc

SEQ ID NO: 2410109 - DNA, 25 bp, Homo sapien
tgcatctcagggcaatccatttggg

SEQ ID NO: 2410110 - DNA, 25 bp, Homo sapien
ccctggaatctgacatctcaatacc

SEQ ID NO: 2410111 - DNA, 25 bp, Homo sapien
cgagggacattaacttccccacact

SEQ ID NO: 2410112 - DNA, 25 bp, Homo sapien
ctcgagggacattaacttccccaca

SEQ ID NO: 2410113 - DNA, 25 bp, Homo sapien
acatctcaataccaacagggaggcc

SEQ ID NO: 2410114 - DNA, 25 bp, Homo sapien
caacactgtatggacttttatgatt

SEQ ID NO: 2410115 - DNA, 25 bp, Homo sapien
tcatctaacataggctcgctcttca

SEQ ID NO: 2410116 - DNA, 25 bp, Homo sapien
tctaacataggctcgctcttcaaca

SEQ ID NO: 2410117 - DNA, 25 bp, Homo sapien
aggctcgctcttcaacactgtatgg

SEQ ID NO: 2410118 - DNA, 25 bp, Homo sapien
ccctaagaggtatgtactggtggta

SEQ ID NO: 2410119 - DNA, 25 bp, Homo sapien
gctctgaagcccactagcatgcagt

SEQ ID NO: 2410120 - DNA, 25 bp, Homo sapien
taatctagaagcactttgaaggcag

SEQ ID NO: 2410121 - DNA, 25 bp, Homo sapien
tggcttctcatagatccagactttg

SEQ ID NO: 2410122 - DNA, 25 bp, Homo sapien
cttcctagcaatttcaaagttgact

SEQ ID NO: 2410123 - DNA, 25 bp, Homo sapien
cctagcaatttcaaagttgactgct

SEQ ID NO: 2410124 - DNA, 25 bp, Homo sapien
tcctagcaatttcaaagttgactgc

SEQ ID NO: 2410125 - DNA, 25 bp, Homo sapien
ctagcaatttcaaagttgactgctc

SEQ ID NO: 2410126 - DNA, 25 bp, Homo sapien
tctgaatgcatctcacctgcgtgca

SEQ ID NO: 2410127 - DNA, 25 bp, Homo sapien
caccattgctaccgccagtgtctga

SEQ ID NO: 2410128 - DNA, 25 bp, Homo sapien
taatcctccaccattgctaccgcca

SEQ ID NO: 2410129 - DNA, 25 bp, Homo sapien
ccagtgtctgaatgcatctcacctg

SEQ ID NO: 2410130 - DNA, 25 bp, Homo sapien
cagttcctcaggcaatccctggaaa

SEQ ID NO: 2410131 - DNA, 25 bp, Homo sapien
tcatggactggcctcaaacaaaaga

SEQ ID NO: 2410132 - DNA, 25 bp, Homo sapien
tcaaatctgtatgctaggcaaaacc

SEQ ID NO: 2410133 - DNA, 25 bp, Homo sapien
tatgttcttagtagctcccagatgt

SEQ ID NO: 2410134 - DNA, 25 bp, Homo sapien
ctttaaacttctcagcacagtaggc

SEQ ID NO: 2410135 - DNA, 25 bp, Homo sapien
ggtaaccttccatcaaacaggcgag

SEQ ID NO: 2410136 - DNA, 25 bp, Homo sapien
gcacagtaggccctaaaactgttcc

SEQ ID NO: 2410137 - DNA, 25 bp, Homo sapien
atggtaaccttccatcaaacaggcg

SEQ ID NO: 2410138 - DNA, 25 bp, Homo sapien
tcctccgttgatctaaacactctag

SEQ ID NO: 2410139 - DNA, 25 bp, Homo sapien
ttaacaagtgccttttctgaaccag

SEQ ID NO: 2410140 - DNA, 25 bp, Homo sapien
gcactctattctgatcatcctccgt

SEQ ID NO: 2410141 - DNA, 25 bp, Homo sapien
ctggatgctcttcccgcttaacaag

SEQ ID NO: 2410142 - DNA, 25 bp, Homo sapien
gcaagtcatgtcttatacagatggc

SEQ ID NO: 2410143 - DNA, 25 bp, Homo sapien
tcatgtcttatacagatggcagcaa

SEQ ID NO: 2410144 - DNA, 25 bp, Homo sapien
caattgtagtgtcaccagctttagc

SEQ ID NO: 2410145 - DNA, 25 bp, Homo sapien
tacaattgtagtgtcaccagcttta

SEQ ID NO: 2410146 - DNA, 25 bp, Homo sapien
tctgaaaccccaggaaccagttgct

SEQ ID NO: 2410147 - DNA, 25 bp, Homo sapien
gtttcttcccatgtcgtgaccatct

SEQ ID NO: 2410148 - DNA, 25 bp, Homo sapien
gagtacatgaaaaggacgtgacccc

SEQ ID NO: 2410149 - DNA, 25 bp, Homo sapien
tactcataaactggagccaagctgg

SEQ ID NO: 2410150 - DNA, 25 bp, Homo sapien
tatggccacggatcatcagaatgtc

SEQ ID NO: 2410151 - DNA, 25 bp, Homo sapien
tgtaagtgccacaggagacaagtct

SEQ ID NO: 2410152 - DNA, 25 bp, Homo sapien
caggcacgcaccactaggcctagtt

SEQ ID NO: 2410153 - DNA, 25 bp, Homo sapien
gcacgcaccactaggcctagttaat

SEQ ID NO: 2410154 - DNA, 25 bp, Homo sapien
gaccttaagtaatctgcccacctca

SEQ ID NO: 2410155 - DNA, 25 bp, Homo sapien
tgaccttaagtaatctgcccacctc

SEQ ID NO: 2410156 - DNA, 25 bp, Homo sapien
caggtgctgtccctatgctgacacc

SEQ ID NO: 2410157 - DNA, 25 bp, Homo sapien
gacacttccggatcaactatgtaag

SEQ ID NO: 2410158 - DNA, 25 bp, Homo sapien
cacaaaaatatcgagtgtggagtgg

SEQ ID NO: 2410159 - DNA, 25 bp, Homo sapien
taaggcataggttgctcatgctatt

SEQ ID NO: 2410160 - DNA, 25 bp, Homo sapien
tgtagttgctttataatacctgtga

SEQ ID NO: 2410161 - DNA, 25 bp, Homo sapien
tataggtgagagtttgaccctgtca

SEQ ID NO: 2410162 - DNA, 25 bp, Homo sapien
aactccccaggcctaaaggatatct

SEQ ID NO: 2410163 - DNA, 25 bp, Homo sapien
gatatcttgtaagactgttttaggg

SEQ ID NO: 2410164 - DNA, 25 bp, Homo sapien
accacacccagcctgttcacttttt

SEQ ID NO: 2410165 - DNA, 25 bp, Homo sapien
cacacccagcctgttcactttttaa

SEQ ID NO: 2410166 - DNA, 25 bp, Homo sapien
ccacacccagcctgttcacttttta

SEQ ID NO: 2410167 - DNA, 25 bp, Homo sapien
catgggtcccagtccaagctttcta

SEQ ID NO: 2410168 - DNA, 25 bp, Homo sapien
tcaccagttgagtccagtagcagca

SEQ ID NO: 2410169 - DNA, 25 bp, Homo sapien
tagccctagataggagctgcttcct

SEQ ID NO: 2410170 - DNA, 25 bp, Homo sapien
cagaggtgccggcatcaaatggcca

SEQ ID NO: 2410171 - DNA, 25 bp, Homo sapien
cagacagcaaatactgtttattgca

SEQ ID NO: 2410172 - DNA, 25 bp, Homo sapien
gacagcaaatactgtttattgcaga

SEQ ID NO: 2410173 - DNA, 25 bp, Homo sapien
agacagcaaatactgtttattgcag

SEQ ID NO: 2410174 - DNA, 25 bp, Homo sapien
cttaagtaagcagaggctagcctac

SEQ ID NO: 2410175 - DNA, 25 bp, Homo sapien
gacagacaccatattcacaggcaaa

SEQ ID NO: 2410176 - DNA, 25 bp, Homo sapien
gtgagctatgccctgaatgacagac

SEQ ID NO: 2410177 - DNA, 25 bp, Homo sapien
caagctatacaaggagttgcaatca

SEQ ID NO: 2410178 - DNA, 25 bp, Homo sapien
tgccaaaaacaatggagtttaaata

SEQ ID NO: 2410179 - DNA, 25 bp, Homo sapien
tgtgctcactcaggtttgcatgggt

SEQ ID NO: 2410180 - DNA, 25 bp, Homo sapien
taatgggcctagaagcaaatcctgt

SEQ ID NO: 2410181 - DNA, 25 bp, Homo sapien
tcactcaggtttgcatgggtttttt

SEQ ID NO: 2410182 - DNA, 25 bp, Homo sapien
cctgaatcactagcggcagcactga

SEQ ID NO: 2410183 - DNA, 25 bp, Homo sapien
tctcataatttcttgtaactcggag

SEQ ID NO: 2410184 - DNA, 25 bp, Homo sapien
tttcttgtaactcggagctgccact

SEQ ID NO: 2410185 - DNA, 25 bp, Homo sapien
gcttccttcatcaaaagattccact

SEQ ID NO: 2410186 - DNA, 25 bp, Homo sapien
actttttaagtgaagcttctgcact

SEQ ID NO: 2410187 - DNA, 25 bp, Homo sapien
tatagtactctaggtttgctgagag

SEQ ID NO: 2410188 - DNA, 25 bp, Homo sapien
caagatactgatctgcctttagaag

SEQ ID NO: 2410189 - DNA, 25 bp, Homo sapien
gtctgttaaggcaattcactcacca

SEQ ID NO: 2410190 - DNA, 25 bp, Homo sapien
cagttcatccttattgagagagaaa

SEQ ID NO: 2410191 - DNA, 25 bp, Homo sapien
tccaatgcagctttttgtacagtga

SEQ ID NO: 2410192 - DNA, 25 bp, Homo sapien
ggctatagactctcgccccttcagg

SEQ ID NO: 2410193 - DNA, 25 bp, Homo sapien
tgtgcaccatttaatactccaagac

SEQ ID NO: 2410194 - DNA, 25 bp, Homo sapien
catcctctggtgtggagtcgtaagt

SEQ ID NO: 2410195 - DNA, 25 bp, Homo sapien
gatattgataactggcacgttctgc

SEQ ID NO: 2410196 - DNA, 25 bp, Homo sapien
gaatttcttctgagcggcactccga

SEQ ID NO: 2410197 - DNA, 25 bp, Homo sapien
tgtaaccacgtcttcacatcctctg

SEQ ID NO: 2410198 - DNA, 25 bp, Homo sapien
tttatgtggaaaacgaaggcagaac

SEQ ID NO: 2410199 - DNA, 25 bp, Homo sapien
ggcaataacttactgacgtgagaaa

SEQ ID NO: 2410200 - DNA, 25 bp, Homo sapien
gaaccctaagagaggcccacattga

SEQ ID NO: 2410201 - DNA, 25 bp, Homo sapien
cacattgagggaaagatagatatcc

SEQ ID NO: 2410202 - DNA, 25 bp, Homo sapien
agaagacattttttgcctccctggg

SEQ ID NO: 2410203 - DNA, 25 bp, Homo sapien
cagaagacattttttgcctccctgg

SEQ ID NO: 2410204 - DNA, 25 bp, Homo sapien
agctgctgttttgacgtgttatatt

SEQ ID NO: 2410205 - DNA, 25 bp, Homo sapien
tttgacgtgttatatttgctgggac

SEQ ID NO: 2410206 - DNA, 25 bp, Homo sapien
ctctggctgtctcgcacgatactgc

SEQ ID NO: 2410207 - DNA, 25 bp, Homo sapien
cggaagttgtttgtgtctctggctg

SEQ ID NO: 2410208 - DNA, 25 bp, Homo sapien
gtatcagctggtcttgggccatact

SEQ ID NO: 2410209 - DNA, 25 bp, Homo sapien
ttgacacaggaacaggtgctggagt

SEQ ID NO: 2410210 - DNA, 25 bp, Homo sapien
ctttgacacaggaacaggtgctgga

SEQ ID NO: 2410211 - DNA, 25 bp, Homo sapien
ggagtatcagctggtcttgggccat

SEQ ID NO: 2410212 - DNA, 25 bp, Homo sapien
aacgaatactagaaagggacctgtg

SEQ ID NO: 2410213 - DNA, 25 bp, Homo sapien
tgcactggaagtctaaatgtcaaca

SEQ ID NO: 2410214 - DNA, 25 bp, Homo sapien
taaggagtcacaaggctacgtcaat

SEQ ID NO: 2410215 - DNA, 25 bp, Homo sapien
tatactttgataggacattgttggc

SEQ ID NO: 2410216 - DNA, 25 bp, Homo sapien
ctcaaactccttctttggcatcaac

SEQ ID NO: 2410217 - DNA, 25 bp, Homo sapien
actcaaactccttctttggcatcaa

SEQ ID NO: 2410218 - DNA, 25 bp, Homo sapien
cagatgttagggtgaatgagctgac

SEQ ID NO: 2410219 - DNA, 25 bp, Homo sapien
gcatgggccataagaatggaccttc

SEQ ID NO: 2410220 - DNA, 25 bp, Homo sapien
gaccagggtcactgaaatcctgaaa

SEQ ID NO: 2410221 - DNA, 25 bp, Homo sapien
ggccataagaatggaccttcatggg

SEQ ID NO: 2410222 - DNA, 25 bp, Homo sapien
gtataaggtggatcagcacgcccca

SEQ ID NO: 2410223 - DNA, 25 bp, Homo sapien
tccagattctggaggtctcacaata

SEQ ID NO: 2410224 - DNA, 25 bp, Homo sapien
tccaccattgcttccgatcatcaag

SEQ ID NO: 2410225 - DNA, 25 bp, Homo sapien
tatttggcacaaatccagagtctcc

SEQ ID NO: 2410226 - DNA, 25 bp, Homo sapien
tacaaagtcatacttggatttggca

SEQ ID NO: 2410227 - DNA, 25 bp, Homo sapien
ttccttgctacaaagtcatacttgg

SEQ ID NO: 2410228 - DNA, 25 bp, Homo sapien
tatcatcctttagaaccgagagctc

SEQ ID NO: 2410229 - DNA, 25 bp, Homo sapien
gagagctcactgttgttccttgcta

SEQ ID NO: 2410230 - DNA, 25 bp, Homo sapien
taaatgttgctactgaacgcatagc

SEQ ID NO: 2410231 - DNA, 25 bp, Homo sapien
tagccatcggctggatgatactctg

SEQ ID NO: 2410232 - DNA, 25 bp, Homo sapien
tccaggtgggatcctcttgtgtaaa

SEQ ID NO: 2410233 - DNA, 25 bp, Homo sapien
tctatatggcgattagaagttggct

SEQ ID NO: 2410234 - DNA, 25 bp, Homo sapien
ggctcccagccattgcggaatcgtg

SEQ ID NO: 2410235 - DNA, 25 bp, Homo sapien
tcctgtttgcgctgatgttctgcta

SEQ ID NO: 2410236 - DNA, 25 bp, Homo sapien
catttgccacagattctgccagttg

SEQ ID NO: 2410237 - DNA, 25 bp, Homo sapien
gccagttgataaagatcttgttcca

SEQ ID NO: 2410238 - DNA, 25 bp, Homo sapien
cagctgccgttcatcaccattgaca

SEQ ID NO: 2410239 - DNA, 25 bp, Homo sapien
ctggctttcatccaagttcctccca

SEQ ID NO: 2410240 - DNA, 25 bp, Homo sapien
tcaattgtgtccttattcaataggg

SEQ ID NO: 2410241 - DNA, 25 bp, Homo sapien
gaactggctagttcaggacctcctg

SEQ ID NO: 2410242 - DNA, 25 bp, Homo sapien
caagaagattactattctttgtgta

SEQ ID NO: 2410243 - DNA, 25 bp, Homo sapien
gcaagaagattactattctttgtgt

SEQ ID NO: 2410244 - DNA, 25 bp, Homo sapien
agcaagaagattactattctttgtg

SEQ ID NO: 2410245 - DNA, 25 bp, Homo sapien
aaatgtgtggacaaaaacccatggc

SEQ ID NO: 2410246 - DNA, 25 bp, Homo sapien
tagcaggccctgaatagatgttcct

SEQ ID NO: 2410247 - DNA, 25 bp, Homo sapien
ccaatttgtatatgtcagggaaacc

SEQ ID NO: 2410248 - DNA, 25 bp, Homo sapien
gagcaactcgcaggtgtaaagccac

SEQ ID NO: 2410249 - DNA, 25 bp, Homo sapien
gctacgctcgtgtgtacatgtccat

SEQ ID NO: 2410250 - DNA, 25 bp, Homo sapien
aaatatactaagaacgattctttct

SEQ ID NO: 2410251 - DNA, 25 bp, Homo sapien
attcttgatgtttacacaaatggca

SEQ ID NO: 2410252 - DNA, 25 bp, Homo sapien
gtacccacgcaaggtaatgaagaaa

SEQ ID NO: 2410253 - DNA, 25 bp, Homo sapien
gaaaagcagtctagataatccagac

SEQ ID NO: 2410254 - DNA, 25 bp, Homo sapien
ctgcagcactaggattctgaatatg

SEQ ID NO: 2410255 - DNA, 25 bp, Homo sapien
aagtgaaccaaatctgcagcactag

SEQ ID NO: 2410256 - DNA, 25 bp, Homo sapien
tctgaatatgagacttcagtttggc

SEQ ID NO: 2410257 - DNA, 25 bp, Homo sapien
catatttaatggagtaaacaaaaag

SEQ ID NO: 2410258 - DNA, 25 bp, Homo sapien
gtggaggttttgcccgcagcgttaa

SEQ ID NO: 2410259 - DNA, 25 bp, Homo sapien
aggtggaggttttgcccgcagcgtt

SEQ ID NO: 2410260 - DNA, 25 bp, Homo sapien
agtcaagaaattcatcaggaggtgg

SEQ ID NO: 2410261 - DNA, 25 bp, Homo sapien
tggaggttttgcccgcagcgttaaa

SEQ ID NO: 2410262 - DNA, 25 bp, Homo sapien
catccaaaatgtggtttaagatttg

SEQ ID NO: 2410263 - DNA, 25 bp, Homo sapien
gtcatccaaaatgtggtttaagatt

SEQ ID NO: 2410264 - DNA, 25 bp, Homo sapien
atgtcatccaaaatgtggtttaaga

SEQ ID NO: 2410265 - DNA, 25 bp, Homo sapien
tgtcatccaaaatgtggtttaagat

SEQ ID NO: 2410266 - DNA, 25 bp, Homo sapien
cacatctctgtcaatgcgggctgcc

SEQ ID NO: 2410267 - DNA, 25 bp, Homo sapien
catctctgtcaatgcgggctgccat

SEQ ID NO: 2410268 - DNA, 25 bp, Homo sapien
ttcctgctcatgatactgccttggt

SEQ ID NO: 2410269 - DNA, 25 bp, Homo sapien
cctgctcatgatactgccttggttt

SEQ ID NO: 2410270 - DNA, 25 bp, Homo sapien
tgtagaaccaaccttaacttagcac

SEQ ID NO: 2410271 - DNA, 25 bp, Homo sapien
tcttccctgagtcagctacctgtag

SEQ ID NO: 2410272 - DNA, 25 bp, Homo sapien
tagcaccctttaattcctacacaag

SEQ ID NO: 2410273 - DNA, 25 bp, Homo sapien
cagctacctgtagaaccaaccttaa

SEQ ID NO: 2410274 - DNA, 25 bp, Homo sapien
cactgccagcagccaaccactgtcc

SEQ ID NO: 2410275 - DNA, 25 bp, Homo sapien
acctttccatgaatatgacaaactt

SEQ ID NO: 2410276 - DNA, 25 bp, Homo sapien
tttccatgaatatgacaaacttgtc

SEQ ID NO: 2410277 - DNA, 25 bp, Homo sapien
ccactgccagcagccaaccactgtc

SEQ ID NO: 2410278 - DNA, 25 bp, Homo sapien
ttcaataagtattaattctaggaag

SEQ ID NO: 2410279 - DNA, 25 bp, Homo sapien
tgtcccaacccaaagtaagtgttca

SEQ ID NO: 2410280 - DNA, 25 bp, Homo sapien
actaacctcaagcttcagttctgaa

SEQ ID NO: 2410281 - DNA, 25 bp, Homo sapien
tgtctcaaccatcccagtagctagg

SEQ ID NO: 2410282 - DNA, 25 bp, Homo sapien
caggctgccactcgacttctaacat

SEQ ID NO: 2410283 - DNA, 25 bp, Homo sapien
tactagggtctgcattggaaatcat

SEQ ID NO: 2410284 - DNA, 25 bp, Homo sapien
gctctgggtggaggcggtatactag

SEQ ID NO: 2410285 - DNA, 25 bp, Homo sapien
catccacctgggtgacggtcccagg

SEQ ID NO: 2410286 - DNA, 25 bp, Homo sapien
tccctcctttactgtcactgattgc

SEQ ID NO: 2410287 - DNA, 25 bp, Homo sapien
gcgtcgggccgcctcttctgtttcc

SEQ ID NO: 2410288 - DNA, 25 bp, Homo sapien
tcagggcgtcgggccgcctcttctg

SEQ ID NO: 2410289 - DNA, 25 bp, Homo sapien
tttcaatatcttcactaattaggtt

SEQ ID NO: 2410290 - DNA, 25 bp, Homo sapien
ttctgggttggctctttgcacacca

SEQ ID NO: 2410291 - DNA, 25 bp, Homo sapien
gagatgaagatctggcttgttctgg

SEQ ID NO: 2410292 - DNA, 25 bp, Homo sapien
tgcacaccagtgcaagaactgaatc

SEQ ID NO: 2410293 - DNA, 25 bp, Homo sapien
cagtgctggattgtgtttaaaggaa

SEQ ID NO: 2410294 - DNA, 25 bp, Homo sapien
tttgattctaaatcaatcaggctca

SEQ ID NO: 2410295 - DNA, 25 bp, Homo sapien
ttgattctaaatcaatcaggctcac

SEQ ID NO: 2410296 - DNA, 25 bp, Homo sapien
ctttgattctaaatcaatcaggctc

SEQ ID NO: 2410297 - DNA, 25 bp, Homo sapien
tccatcatcaacagtgatcatagca

SEQ ID NO: 2410298 - DNA, 25 bp, Homo sapien
catagcatctttccgatccaggaca

SEQ ID NO: 2410299 - DNA, 25 bp, Homo sapien
gatccaggacaaaggtagtcaagtg

SEQ ID NO: 2410300 - DNA, 25 bp, Homo sapien
gctctgtcatccacttgaagaatca

SEQ ID NO: 2410301 - DNA, 25 bp, Homo sapien
ggtattgagatatatctgacacact

SEQ ID NO: 2410302 - DNA, 25 bp, Homo sapien
acactgctgacactgtcccgtgcat

SEQ ID NO: 2410303 - DNA, 25 bp, Homo sapien
cactgtcccgtgcataattcttcct

SEQ ID NO: 2410304 - DNA, 25 bp, Homo sapien
ttcaacacggtattgagatatatct

SEQ ID NO: 2410305 - DNA, 25 bp, Homo sapien
gtcccctaatagactgaagttcata

SEQ ID NO: 2410306 - DNA, 25 bp, Homo sapien
tgatttgtcccctaatagactgaag

SEQ ID NO: 2410307 - DNA, 25 bp, Homo sapien
gccatgatttgtcccctaatagact

SEQ ID NO: 2410308 - DNA, 25 bp, Homo sapien
aaattgaaaaagccatgatttgtcc

SEQ ID NO: 2410309 - DNA, 25 bp, Homo sapien
tgaatttgagtgccatctctgcaca

SEQ ID NO: 2410310 - DNA, 25 bp, Homo sapien
agtgccatctctgcacaggggtcat

SEQ ID NO: 2410311 - DNA, 25 bp, Homo sapien
tcatgaatttgagtgccatctctgc

SEQ ID NO: 2410312 - DNA, 25 bp, Homo sapien
atttgagtgccatctctgcacaggg

SEQ ID NO: 2410313 - DNA, 25 bp, Homo sapien
aaaggtaggtgatgatccgtagcca

SEQ ID NO: 2410314 - DNA, 25 bp, Homo sapien
ttgtttttgaaccatgttctctgtc

SEQ ID NO: 2410315 - DNA, 25 bp, Homo sapien
aaaaggtaggtgatgatccgtagcc

SEQ ID NO: 2410316 - DNA, 25 bp, Homo sapien
tactgggatgattagaaatatgacc

SEQ ID NO: 2410317 - DNA, 25 bp, Homo sapien
caaaactactgggatgattagaaat

SEQ ID NO: 2410318 - DNA, 25 bp, Homo sapien
aactactgggatgattagaaatatg

SEQ ID NO: 2410319 - DNA, 25 bp, Homo sapien
ttccaaaactactgggatgattaga

SEQ ID NO: 2410320 - DNA, 25 bp, Homo sapien
tccttcacaggctgtgatgcaggag

SEQ ID NO: 2410321 - DNA, 25 bp, Homo sapien
gcgggagacattcggttcataactg

SEQ ID NO: 2410322 - DNA, 25 bp, Homo sapien
ctggaagcgggagacattcggttca

SEQ ID NO: 2410323 - DNA, 25 bp, Homo sapien
gacattcggttcataactgccttcc

SEQ ID NO: 2410324 - DNA, 25 bp, Homo sapien
gagtaggacctcctggtctaagtct

SEQ ID NO: 2410325 - DNA, 25 bp, Homo sapien
tggaaacacaataggccttttcaaa

SEQ ID NO: 2410326 - DNA, 25 bp, Homo sapien
tcaatgacccctgctgaatgttagg

SEQ ID NO: 2410327 - DNA, 25 bp, Homo sapien
gccactctgactcccaattttttgt

SEQ ID NO: 2410328 - DNA, 25 bp, Homo sapien
tatcaacattattcacgagagccaa

SEQ ID NO: 2410329 - DNA, 25 bp, Homo sapien
tgcaacccaagtgttgtccattcac

SEQ ID NO: 2410330 - DNA, 25 bp, Homo sapien
cacttacctctaaggacagagacca

SEQ ID NO: 2410331 - DNA, 25 bp, Homo sapien
ctgtaagaatagagggttttcctgc

SEQ ID NO: 2410332 - DNA, 25 bp, Homo sapien
gaagcactgcagcattgacaatgcc

SEQ ID NO: 2410333 - DNA, 25 bp, Homo sapien
ttcaaaaggcaaggcgggaagcact

SEQ ID NO: 2410334 - DNA, 25 bp, Homo sapien
tgtatctcagcttaaatggcccctt

SEQ ID NO: 2410335 - DNA, 25 bp, Homo sapien
tcctcgaggcctatcacacttgtct

SEQ ID NO: 2410336 - DNA, 25 bp, Homo sapien
tgttccccaacttccaacacaatca

SEQ ID NO: 2410337 - DNA, 25 bp, Homo sapien
gttccccaacttccaacacaatcat

SEQ ID NO: 2410338 - DNA, 25 bp, Homo sapien
ttgttccccaacttccaacacaatc

SEQ ID NO: 2410339 - DNA, 25 bp, Homo sapien
taagcgtcagtttcggcattgtact

SEQ ID NO: 2410340 - DNA, 25 bp, Homo sapien
ggaaatactcctctaagcaatcgtc

SEQ ID NO: 2410341 - DNA, 25 bp, Homo sapien
gagaggccattccactcagtttact

SEQ ID NO: 2410342 - DNA, 25 bp, Homo sapien
tttggcacaacgtcagaaagggtgg

SEQ ID NO: 2410343 - DNA, 25 bp, Homo sapien
ccaactgagctcatgaagacttccc

SEQ ID NO: 2410344 - DNA, 25 bp, Homo sapien
ccaggtacagaaatatggccaactg

SEQ ID NO: 2410345 - DNA, 25 bp, Homo sapien
tgagctcatgaagacttcccactac

SEQ ID NO: 2410346 - DNA, 25 bp, Homo sapien
tcatgaagacttcccactacagaca

SEQ ID NO: 2410347 - DNA, 25 bp, Homo sapien
ccttgagccttgagtagtacattgc

SEQ ID NO: 2410348 - DNA, 25 bp, Homo sapien
caaagtatcctgagaagtcacaaca

SEQ ID NO: 2410349 - DNA, 25 bp, Homo sapien
acgatagctgatgaggtacaaaaaa

SEQ ID NO: 2410350 - DNA, 25 bp, Homo sapien
ccattgcactatgaatgatttctca

SEQ ID NO: 2410351 - DNA, 25 bp, Homo sapien
ggtaagtctaaagtgaaactacgca

SEQ ID NO: 2410352 - DNA, 25 bp, Homo sapien
cattttgtcttcgtgtaagggtcaa

SEQ ID NO: 2410353 - DNA, 25 bp, Homo sapien
tagctaacccctacagcttgtgcag

SEQ ID NO: 2410354 - DNA, 25 bp, Homo sapien
taaataactgcctactcctgagagt

SEQ ID NO: 2410355 - DNA, 25 bp, Homo sapien
gaaaacacctcagcccagagataag

SEQ ID NO: 2410356 - DNA, 25 bp, Homo sapien
gcatcataccacatatatcaaggca

SEQ ID NO: 2410357 - DNA, 25 bp, Homo sapien
ttctagagaagggactaggcttttc

SEQ ID NO: 2410358 - DNA, 25 bp, Homo sapien
ccacatgttcttggtggatggaaga

SEQ ID NO: 2410359 - DNA, 25 bp, Homo sapien
catacgattatatcatcaggccagt

SEQ ID NO: 2410360 - DNA, 25 bp, Homo sapien
ccttatgagggttgaagagttacac

SEQ ID NO: 2410361 - DNA, 25 bp, Homo sapien
tgaggtgagtttgcctataccagtt

SEQ ID NO: 2410362 - DNA, 25 bp, Homo sapien
tcagtcagtgatgcatctaatagag

SEQ ID NO: 2410363 - DNA, 25 bp, Homo sapien
actttaatgtgaaagcagcaaaatc

SEQ ID NO: 2410364 - DNA, 25 bp, Homo sapien
caatcagttgcatatggcaggtaaa

SEQ ID NO: 2410365 - DNA, 25 bp, Homo sapien
ttctccgtaggattgcactgcactc

SEQ ID NO: 2410366 - DNA, 25 bp, Homo sapien
tcatggatgtgttcttctaatgggc

SEQ ID NO: 2410367 - DNA, 25 bp, Homo sapien
catataatcacttgagtatcacagg

SEQ ID NO: 2410368 - DNA, 25 bp, Homo sapien
catttagaaggccatgtgactagaa

SEQ ID NO: 2410369 - DNA, 25 bp, Homo sapien
caggcttaaacaggactagatctgg

SEQ ID NO: 2410370 - DNA, 25 bp, Homo sapien
gaaacaggacctccaatttcaccca

SEQ ID NO: 2410371 - DNA, 25 bp, Homo sapien
taaccgctgcactattgaagggtca

SEQ ID NO: 2410372 - DNA, 25 bp, Homo sapien
gaactgacagatgttactctatact

SEQ ID NO: 2410373 - DNA, 25 bp, Homo sapien
aagtcacttgtagcaggaagaatag

SEQ ID NO: 2410374 - DNA, 25 bp, Homo sapien
gcatgggaaaagattcaagaccaca

SEQ ID NO: 2410375 - DNA, 25 bp, Homo sapien
tataaagaagattgcccggaatcct

SEQ ID NO: 2410376 - DNA, 25 bp, Homo sapien
ctatactaggtgagacaggatgaca

SEQ ID NO: 2410377 - DNA, 25 bp, Homo sapien
taccacatgacgtccattactagtg

SEQ ID NO: 2410378 - DNA, 25 bp, Homo sapien
taagtaaaagtgtgaattcgtgacc

SEQ ID NO: 2410379 - DNA, 25 bp, Homo sapien
taccatgaatatcactgggccacgg

SEQ ID NO: 2410380 - DNA, 25 bp, Homo sapien
taaaatcgagaaagtcaaagccgcc

SEQ ID NO: 2410381 - DNA, 25 bp, Homo sapien
tgtatctgcggaagctcaggttacc

SEQ ID NO: 2410382 - DNA, 25 bp, Homo sapien
gatcgggatactcggtctgcagtcg

SEQ ID NO: 2410383 - DNA, 25 bp, Homo sapien
atctccgaggcgagcacagcgccgg

SEQ ID NO: 2410384 - DNA, 25 bp, Homo sapien
tgcacccagctaaagagcagcgatc

SEQ ID NO: 2410385 - DNA, 25 bp, Homo sapien
cggctttccccggagacgccgcgag

SEQ ID NO: 2410386 - DNA, 25 bp, Homo sapien
cccaatctgattcgcgcccagccag

SEQ ID NO: 2410387 - DNA, 25 bp, Homo sapien
gggaacaggcaaccattgaacacaa

SEQ ID NO: 2410388 - DNA, 25 bp, Homo sapien
ctgcaggggaacaggcaaccattga

SEQ ID NO: 2410389 - DNA, 25 bp, Homo sapien
caggggaacaggcaaccattgaaca

SEQ ID NO: 2410390 - DNA, 25 bp, Homo sapien
aacaggcaaccattgaacacaaccc

SEQ ID NO: 2410391 - DNA, 25 bp, Homo sapien
catgcacaagatggtcaaggccaac

SEQ ID NO: 2410392 - DNA, 25 bp, Homo sapien
ccagagaagctgtcgcatgggctgc

SEQ ID NO: 2410393 - DNA, 25 bp, Homo sapien
tactgctggcggtagagattccaga

SEQ ID NO: 2410394 - DNA, 25 bp, Homo sapien
ccccgtgatcaagaggaagcatgac

SEQ ID NO: 2410395 - DNA, 25 bp, Homo sapien
gagccactgccacttcaaaaaatag

SEQ ID NO: 2410396 - DNA, 25 bp, Homo sapien
tgcaagaaatactgtgagccactgc

SEQ ID NO: 2410397 - DNA, 25 bp, Homo sapien
aatactgtgagccactgccacttca

SEQ ID NO: 2410398 - DNA, 25 bp, Homo sapien
ctgcaagaaatactgtgagccactg

SEQ ID NO: 2410399 - DNA, 25 bp, Homo sapien
tgaacttacattaggctgaacagaa

SEQ ID NO: 2410400 - DNA, 25 bp, Homo sapien
tttcctaagaagaagcctagctgaa

SEQ ID NO: 2410401 - DNA, 25 bp, Homo sapien
aaggacagcaccttggcaggatcct

SEQ ID NO: 2410402 - DNA, 25 bp, Homo sapien
ttcactgcactaggctgacctctat

SEQ ID NO: 2410403 - DNA, 25 bp, Homo sapien
gacagtgtggtgatcccttgaagac

SEQ ID NO: 2410404 - DNA, 25 bp, Homo sapien
agacagtgtggtgatcccttgaaga

SEQ ID NO: 2410405 - DNA, 25 bp, Homo sapien
tcctagattgtacgggagggtccaa

SEQ ID NO: 2410406 - DNA, 25 bp, Homo sapien
taaaaatgtatcctagattgtacgg

SEQ ID NO: 2410407 - DNA, 25 bp, Homo sapien
tccaatgtaatcaccaggatccttt

SEQ ID NO: 2410408 - DNA, 25 bp, Homo sapien
tacgggagggtccaatgtaatcacc

SEQ ID NO: 2410409 - DNA, 25 bp, Homo sapien
agcgttcgctggtttgggccgtcac

SEQ ID NO: 2410410 - DNA, 25 bp, Homo sapien
tgtccgtctagatattcagaggccg

SEQ ID NO: 2410411 - DNA, 25 bp, Homo sapien
tgggaacaactttcaactcggccgc

SEQ ID NO: 2410412 - DNA, 25 bp, Homo sapien
gaaggcgttctgacccgctagagct

SEQ ID NO: 2410413 - DNA, 25 bp, Homo sapien
ggctggagccagatgacctgaattt

SEQ ID NO: 2410414 - DNA, 25 bp, Homo sapien
cctgaatttgaattggtggcctcat

SEQ ID NO: 2410415 - DNA, 25 bp, Homo sapien
tgactgtggtggcagatacgtgact

SEQ ID NO: 2410416 - DNA, 25 bp, Homo sapien
gcctgaagtctattacacctatgaa

SEQ ID NO: 2410417 - DNA, 25 bp, Homo sapien
aattctcagttgtgtgcacatattg

SEQ ID NO: 2410418 - DNA, 25 bp, Homo sapien
gctattgtataaccttcttccaaac

SEQ ID NO: 2410419 - DNA, 25 bp, Homo sapien
tgcacatattgcttagatttttgaa

SEQ ID NO: 2410420 - DNA, 25 bp, Homo sapien
tattagctattcgaaagaattttaa

SEQ ID NO: 2410421 - DNA, 25 bp, Homo sapien
cttaagataactaagcaaaagtaga

SEQ ID NO: 2410422 - DNA, 25 bp, Homo sapien
gaattggtgggacaaagaggagtgg

SEQ ID NO: 2410423 - DNA, 25 bp, Homo sapien
tccttaagataactaagcaaaagta

SEQ ID NO: 2410424 - DNA, 25 bp, Homo sapien
ccttaagataactaagcaaaagtag

SEQ ID NO: 2410425 - DNA, 25 bp, Homo sapien
gatttctcgttcattgtacactgcc

SEQ ID NO: 2410426 - DNA, 25 bp, Homo sapien
taaggcctgagcgtcaatcatatgt

SEQ ID NO: 2410427 - DNA, 25 bp, Homo sapien
tcctcttatagtacagtggcctgtt

SEQ ID NO: 2410428 - DNA, 25 bp, Homo sapien
tgctggaacaactaactaacttggt

SEQ ID NO: 2410429 - DNA, 25 bp, Homo sapien
gagcagcgagatttccttgcggagc

SEQ ID NO: 2410430 - DNA, 25 bp, Homo sapien
agcgagatttccttgcggagcaata

SEQ ID NO: 2410431 - DNA, 25 bp, Homo sapien
gggagcagcgagatttccttgcgga

SEQ ID NO: 2410432 - DNA, 25 bp, Homo sapien
gcagcgagatttccttgcggagcaa

SEQ ID NO: 2410433 - DNA, 25 bp, Homo sapien
tgcccgcgccatgtccgcgcacaat

SEQ ID NO: 2410434 - DNA, 25 bp, Homo sapien
acaatcggggcaccgagctcggtaa

SEQ ID NO: 2410435 - DNA, 25 bp, Homo sapien
tccctcgcgttcagcgccgccggga

SEQ ID NO: 2410436 - DNA, 25 bp, Homo sapien
gccgccgggactagcgcggggcctg

SEQ ID NO: 2410437 - DNA, 25 bp, Homo sapien
ctgcttgcgcttccactccctatgt

SEQ ID NO: 2410438 - DNA, 25 bp, Homo sapien
agatcccctccttgttctgattgga

SEQ ID NO: 2410439 - DNA, 25 bp, Homo sapien
ctatgtcttgctcccgctttgtgca

SEQ ID NO: 2410440 - DNA, 25 bp, Homo sapien
tctgattggactctgggctacccca

SEQ ID NO: 2410441 - DNA, 25 bp, Homo sapien
ttatcgggcgtctgtatcacttatg

SEQ ID NO: 2410442 - DNA, 25 bp, Homo sapien
tatgtcaccttgaacagtacttttc

SEQ ID NO: 2410443 - DNA, 25 bp, Homo sapien
tactgcctggtgtaccaagcccaga

SEQ ID NO: 2410444 - DNA, 25 bp, Homo sapien
ccttttactgcctggtgtaccaagc

SEQ ID NO: 2410445 - DNA, 25 bp, Homo sapien
gatctgtagctgttaaatcctgtcc

SEQ ID NO: 2410446 - DNA, 25 bp, Homo sapien
gaaaactggacaggagtcagctcct

SEQ ID NO: 2410447 - DNA, 25 bp, Homo sapien
tcctgcagacgggagcagcgttctc

SEQ ID NO: 2410448 - DNA, 25 bp, Homo sapien
ttagagcactggctcagccacgtga

SEQ ID NO: 2410449 - DNA, 25 bp, Homo sapien
gaacagaaacagggcattctgacat

SEQ ID NO: 2410450 - DNA, 25 bp, Homo sapien
ggtgaagattttggtgatcttttct

SEQ ID NO: 2410451 - DNA, 25 bp, Homo sapien
gaaacagggcattctgacatcatca

SEQ ID NO: 2410452 - DNA, 25 bp, Homo sapien
tgtggtgaagattttggtgatcttt

SEQ ID NO: 2410453 - DNA, 25 bp, Homo sapien
tatagcacatctggtctcataggaa

SEQ ID NO: 2410454 - DNA, 25 bp, Homo sapien
taggaagacagcacctcgtgtagct

SEQ ID NO: 2410455 - DNA, 25 bp, Homo sapien
cgtgtagcttcctgcgatctgacca

SEQ ID NO: 2410456 - DNA, 25 bp, Homo sapien
tgaaaatagccataggatcccaccg

SEQ ID NO: 2410457 - DNA, 25 bp, Homo sapien
ctcccagaactgtggggtgaactga

SEQ ID NO: 2410458 - DNA, 25 bp, Homo sapien
cacagttcaccctttagagacactg

SEQ ID NO: 2410459 - DNA, 25 bp, Homo sapien
aatggcctcgcggcccttcttgttg

SEQ ID NO: 2410460 - DNA, 25 bp, Homo sapien
gatcaccccacagttcaccctttag

SEQ ID NO: 2410461 - DNA, 25 bp, Homo sapien
aatgtgctcctggatgcagttgtcc

SEQ ID NO: 2410462 - DNA, 25 bp, Homo sapien
gcagggcccccttgcaatgcagctg

SEQ ID NO: 2410463 - DNA, 25 bp, Homo sapien
gcagctgtttaatgtgctcctggat

SEQ ID NO: 2410464 - DNA, 25 bp, Homo sapien
agggcccccttgcaatgcagctgtt

SEQ ID NO: 2410465 - DNA, 25 bp, Homo sapien
cgcatgatgtactctagggaaattt

SEQ ID NO: 2410466 - DNA, 25 bp, Homo sapien
ccgcagacagcgcatgatgtactct

SEQ ID NO: 2410467 - DNA, 25 bp, Homo sapien
gcagaagctgacttcccgcagacag

SEQ ID NO: 2410468 - DNA, 25 bp, Homo sapien
aagttttgcgggtagcagaagctga

SEQ ID NO: 2410469 - DNA, 25 bp, Homo sapien
gtgtggccatggtcccgagccaccg

SEQ ID NO: 2410470 - DNA, 25 bp, Homo sapien
ttcacgcatagtgcagaagtcgggg

SEQ ID NO: 2410471 - DNA, 25 bp, Homo sapien
gagggaacgatgtatgtgatgtgaa

SEQ ID NO: 2410472 - DNA, 25 bp, Homo sapien
agtcggggacctccagcgtgcaccc

SEQ ID NO: 2410473 - DNA, 25 bp, Homo sapien
gggaaagttgctcacaactctcagg

SEQ ID NO: 2410474 - DNA, 25 bp, Homo sapien
gggacaggggaaagttgctcacaac

SEQ ID NO: 2410475 - DNA, 25 bp, Homo sapien
gctcacaactctcaggagaagggat

SEQ ID NO: 2410476 - DNA, 25 bp, Homo sapien
gttgctcacaactctcaggagaagg

SEQ ID NO: 2410477 - DNA, 25 bp, Homo sapien
gagtggtgcgggactccacgatcta

SEQ ID NO: 2410478 - DNA, 25 bp, Homo sapien
ctgcgttcagggatcagtgggagtg

SEQ ID NO: 2410479 - DNA, 25 bp, Homo sapien
tcagtgggagtggtgcgggactcca

SEQ ID NO: 2410480 - DNA, 25 bp, Homo sapien
cgggactccacgatctagtgctgga

SEQ ID NO: 2410481 - DNA, 25 bp, Homo sapien
ttggatccacactctgatgcacaca

SEQ ID NO: 2410482 - DNA, 25 bp, Homo sapien
ccttggatccacactctgatgcaca

SEQ ID NO: 2410483 - DNA, 25 bp, Homo sapien
gatttggatgctgtttcaaacatgc

SEQ ID NO: 2410484 - DNA, 25 bp, Homo sapien
caaacatgcagtctgacccctttcc

SEQ ID NO: 2410485 - DNA, 25 bp, Homo sapien
gtggttgagagctcccaaagataga

SEQ ID NO: 2410486 - DNA, 25 bp, Homo sapien
gttgccatgatgtagcaacatgcag

SEQ ID NO: 2410487 - DNA, 25 bp, Homo sapien
tgtggttgagagctcccaaagatag

SEQ ID NO: 2410488 - DNA, 25 bp, Homo sapien
catgatgtagcaacatgcaggccaa

SEQ ID NO: 2410489 - DNA, 25 bp, Homo sapien
taagtgtagcttcagtttattttgg

SEQ ID NO: 2410490 - DNA, 25 bp, Homo sapien
cctttgtccattggatgtgatgact

SEQ ID NO: 2410491 - DNA, 25 bp, Homo sapien
gactttatatgtaagtgtagcttca

SEQ ID NO: 2410492 - DNA, 25 bp, Homo sapien
ttgatttgtgccaaatagaaaccca

SEQ ID NO: 2410493 - DNA, 25 bp, Homo sapien
tattaaaccgcccaagcagtgtgcc

SEQ ID NO: 2410494 - DNA, 25 bp, Homo sapien
gaaaatgcaacatctcgcaagcgct

SEQ ID NO: 2410495 - DNA, 25 bp, Homo sapien
tcatttttgccgtggataggcgctt

SEQ ID NO: 2410496 - DNA, 25 bp, Homo sapien
aagcgctgctgtaacgacttcagga

SEQ ID NO: 2410497 - DNA, 25 bp, Homo sapien
tactctagtggttacattaccctcc

SEQ ID NO: 2410498 - DNA, 25 bp, Homo sapien
ggacctatgttcttgctgggcttca

SEQ ID NO: 2410499 - DNA, 25 bp, Homo sapien
tgcaatcaggcttcacaggcaagaa

SEQ ID NO: 2410500 - DNA, 25 bp, Homo sapien
ctgaaacaggccctacagcagtagt

SEQ ID NO: 2410501 - DNA, 25 bp, Homo sapien
ttcttgttgtcctgattgtaccctg

SEQ ID NO: 2410502 - DNA, 25 bp, Homo sapien
tcttgttgtcctgattgtaccctga

SEQ ID NO: 2410503 - DNA, 25 bp, Homo sapien
tgttgtcctgattgtaccctgaaat

SEQ ID NO: 2410504 - DNA, 25 bp, Homo sapien
cttgttgtcctgattgtaccctgaa

SEQ ID NO: 2410505 - DNA, 25 bp, Homo sapien
gcaaccaagagggtgagctaagacc

SEQ ID NO: 2410506 - DNA, 25 bp, Homo sapien
aaccaagagggtgagctaagaccat

SEQ ID NO: 2410507 - DNA, 25 bp, Homo sapien
caaccaagagggtgagctaagacca

SEQ ID NO: 2410508 - DNA, 25 bp, Homo sapien
taatttctctttcatgctcttcaga

SEQ ID NO: 2410509 - DNA, 25 bp, Homo sapien
gaaatgtccgtaaaaaatgaatgtc

SEQ ID NO: 2410510 - DNA, 25 bp, Homo sapien
cttaattggtcctgattggaagtca

SEQ ID NO: 2410511 - DNA, 25 bp, Homo sapien
tctcttaattggtcctgattggaag

SEQ ID NO: 2410512 - DNA, 25 bp, Homo sapien
tgaaatatgtacagggtcagggaaa

SEQ ID NO: 2410513 - DNA, 25 bp, Homo sapien
gaaatatgtacagggtcagggaaaa

SEQ ID NO: 2410514 - DNA, 25 bp, Homo sapien
caacagggtcgcagagcaaagcagt

SEQ ID NO: 2410515 - DNA, 25 bp, Homo sapien
caggtagatctcaggaagaccagct

SEQ ID NO: 2410516 - DNA, 25 bp, Homo sapien
cttgtaggtccagcatgtctcttat

SEQ ID NO: 2410517 - DNA, 25 bp, Homo sapien
ctgggcaacagggtcgcagagcaaa

SEQ ID NO: 2410518 - DNA, 25 bp, Homo sapien
ctgttgacagtgtttgcatctttca

SEQ ID NO: 2410519 - DNA, 25 bp, Homo sapien
ttcaatccatcatctgcaggacttc

SEQ ID NO: 2410520 - DNA, 25 bp, Homo sapien
gcaggacttccactcacatattcat

SEQ ID NO: 2410521 - DNA, 25 bp, Homo sapien
catattcattcaagccacattttac

SEQ ID NO: 2410522 - DNA, 25 bp, Homo sapien
taaccaatatgtcgtggcagacctc

SEQ ID NO: 2410523 - DNA, 25 bp, Homo sapien
catgttgcctgcaactgcaaccatg

SEQ ID NO: 2410524 - DNA, 25 bp, Homo sapien
gatcccttgatgtatcccataacca

SEQ ID NO: 2410525 - DNA, 25 bp, Homo sapien
tttctcacatccatgccgctattag

SEQ ID NO: 2410526 - DNA, 25 bp, Homo sapien
tgggaaaacagtatcctcgcaatgt

SEQ ID NO: 2410527 - DNA, 25 bp, Homo sapien
accatgcaaggttctgcatgcagga

SEQ ID NO: 2410528 - DNA, 25 bp, Homo sapien
ggagcagtccggcactcagttcctg

SEQ ID NO: 2410529 - DNA, 25 bp, Homo sapien
ctaaggagcagtccggcactcagtt

SEQ ID NO: 2410530 - DNA, 25 bp, Homo sapien
catcagcagaagtccaactgaatac

SEQ ID NO: 2410531 - DNA, 25 bp, Homo sapien
ggtaacatcagcagaagtccaactg

SEQ ID NO: 2410532 - DNA, 25 bp, Homo sapien
agaggtaacatcagcagaagtccaa

SEQ ID NO: 2410533 - DNA, 25 bp, Homo sapien
agcagaagtccaactgaatactggg

SEQ ID NO: 2410534 - DNA, 25 bp, Homo sapien
gaatggacaaataatcagcataagt

SEQ ID NO: 2410535 - DNA, 25 bp, Homo sapien
gacaaataatcagcataagttccat

SEQ ID NO: 2410536 - DNA, 25 bp, Homo sapien
tctctcctgagatacacaattcttc

SEQ ID NO: 2410537 - DNA, 25 bp, Homo sapien
atctctcctgagatacacaattctt

SEQ ID NO: 2410538 - DNA, 25 bp, Homo sapien
gatctctcctgagatacacaattct

SEQ ID NO: 2410539 - DNA, 25 bp, Homo sapien
tctcctctctcttttagagctaact

SEQ ID NO: 2410540 - DNA, 25 bp, Homo sapien
ctcctctctcttttagagctaactt

SEQ ID NO: 2410541 - DNA, 25 bp, Homo sapien
cccatttggggtcacttgttctctc

SEQ ID NO: 2410542 - DNA, 25 bp, Homo sapien
gactacaagcccatttggggtcact

SEQ ID NO: 2410543 - DNA, 25 bp, Homo sapien
cacagaatgtgggctacattctgtt

SEQ ID NO: 2410544 - DNA, 25 bp, Homo sapien
tcacagaatgtgggctacattctgt

SEQ ID NO: 2410545 - DNA, 25 bp, Homo sapien
aataaggcagaagtgaacaagttgc

SEQ ID NO: 2410546 - DNA, 25 bp, Homo sapien
ataaggcagaagtgaacaagttgca

SEQ ID NO: 2410547 - DNA, 25 bp, Homo sapien
gaaataaggcagaagtgaacaagtt

SEQ ID NO: 2410548 - DNA, 25 bp, Homo sapien
tgaaataaggcagaagtgaacaagt

SEQ ID NO: 2410549 - DNA, 25 bp, Homo sapien
ccgatttttgccaaatctctgcctc

SEQ ID NO: 2410550 - DNA, 25 bp, Homo sapien
tctctgcctcccattgatctcattc

SEQ ID NO: 2410551 - DNA, 25 bp, Homo sapien
ccccgatttttgccaaatctctgcc

SEQ ID NO: 2410552 - DNA, 25 bp, Homo sapien
ccccccgatttttgccaaatctctg

SEQ ID NO: 2410553 - DNA, 25 bp, Homo sapien
gtcacaatgtaataaggtcacgtgt

SEQ ID NO: 2410554 - DNA, 25 bp, Homo sapien
tcacgtgtaataagggatcactaag

SEQ ID NO: 2410555 - DNA, 25 bp, Homo sapien
ccattgtagaaagctgtaaggtatt

SEQ ID NO: 2410556 - DNA, 25 bp, Homo sapien
aaggtcatacgctttcaatggctga

SEQ ID NO: 2410557 - DNA, 25 bp, Homo sapien
tactgttctcataagacaggtagac

SEQ ID NO: 2410558 - DNA, 25 bp, Homo sapien
tcataagacaggtagactcaaacac

SEQ ID NO: 2410559 - DNA, 25 bp, Homo sapien
tgttctcataagacaggtagactca

SEQ ID NO: 2410560 - DNA, 25 bp, Homo sapien
taagacaggtagactcaaacacagt

SEQ ID NO: 2410561 - DNA, 25 bp, Homo sapien
atttcagagatttttcgtggaggag

SEQ ID NO: 2410562 - DNA, 25 bp, Homo sapien
ctcccaaagatcaatacttgaagaa

SEQ ID NO: 2410563 - DNA, 25 bp, Homo sapien
tctcccaaagatcaatacttgaaga

SEQ ID NO: 2410564 - DNA, 25 bp, Homo sapien
cattaaaatgatttagattacaata

SEQ ID NO: 2410565 - DNA, 25 bp, Homo sapien
ctgaactctgtgcatgactgcggtc

SEQ ID NO: 2410566 - DNA, 25 bp, Homo sapien
tgaactctgtgcatgactgcggtca

SEQ ID NO: 2410567 - DNA, 25 bp, Homo sapien
gaactctgtgcatgactgcggtcat

SEQ ID NO: 2410568 - DNA, 25 bp, Homo sapien
ctttgtgaaacactgcagaatccca

SEQ ID NO: 2410569 - DNA, 25 bp, Homo sapien
tttgtgaaacactgcagaatcccag

SEQ ID NO: 2410570 - DNA, 25 bp, Homo sapien
ctgcagaatcccaggacgttcaaca

SEQ ID NO: 2410571 - DNA, 25 bp, Homo sapien
caatcgggtatactaacactctcac

SEQ ID NO: 2410572 - DNA, 25 bp, Homo sapien
gaatttaccgcattcacaccattct

SEQ ID NO: 2410573 - DNA, 25 bp, Homo sapien
gactaatgcagcttggagactggaa

SEQ ID NO: 2410574 - DNA, 25 bp, Homo sapien
aaatcttttgaatttaccgcattca

SEQ ID NO: 2410575 - DNA, 25 bp, Homo sapien
gcagtgcccctgtgaaacagccaaa

SEQ ID NO: 2410576 - DNA, 25 bp, Homo sapien
ggaacaaatctgtatgatattacag

SEQ ID NO: 2410577 - DNA, 25 bp, Homo sapien
tgagatgagatataccaacttcacc

SEQ ID NO: 2410578 - DNA, 25 bp, Homo sapien
tgcttggaacaaatctgtatgatat

SEQ ID NO: 2410579 - DNA, 25 bp, Homo sapien
tgtagataatatcaataagtctgtc

SEQ ID NO: 2410580 - DNA, 25 bp, Homo sapien
aataagtctgtcactattgtaaagt

SEQ ID NO: 2410581 - DNA, 25 bp, Homo sapien
gataatatcaataagtctgtcacta

SEQ ID NO: 2410582 - DNA, 25 bp, Homo sapien
tcaataagtctgtcactattgtaaa

SEQ ID NO: 2410583 - DNA, 25 bp, Homo sapien
tttccgccactccaagtaaaacata

SEQ ID NO: 2410584 - DNA, 25 bp, Homo sapien
tgtttccgccactccaagtaaaaca

SEQ ID NO: 2410585 - DNA, 25 bp, Homo sapien
gaagccagctatcatcacagacaat

SEQ ID NO: 2410586 - DNA, 25 bp, Homo sapien
ttcaaagaagccagctatcatcaca

SEQ ID NO: 2410587 - DNA, 25 bp, Homo sapien
atcacagacaatgcagcaaaaagat

SEQ ID NO: 2410588 - DNA, 25 bp, Homo sapien
tgcagggaaatgttttcggtgtatt

SEQ ID NO: 2410589 - DNA, 25 bp, Homo sapien
gaattagtaatggtaggctgctgat

SEQ ID NO: 2410590 - DNA, 25 bp, Homo sapien
tggcattcattactgcaatcggcag

SEQ ID NO: 2410591 - DNA, 25 bp, Homo sapien
aaacaggcaggtgctgaaatactcc

SEQ ID NO: 2410592 - DNA, 25 bp, Homo sapien
tccaactctcttagagggaaacagg

SEQ ID NO: 2410593 - DNA, 25 bp, Homo sapien
gcataatgcacattctgtataggag

SEQ ID NO: 2410594 - DNA, 25 bp, Homo sapien
ctgcataatgcacattctgtatagg

SEQ ID NO: 2410595 - DNA, 25 bp, Homo sapien
tgcataatgcacattctgtatagga

SEQ ID NO: 2410596 - DNA, 25 bp, Homo sapien
tgcgggtggcatgttttcagtgcac

SEQ ID NO: 2410597 - DNA, 25 bp, Homo sapien
tgtcttctacatggagctcactgta

SEQ ID NO: 2410598 - DNA, 25 bp, Homo sapien
ttctttggcatggtctaactggctt

SEQ ID NO: 2410599 - DNA, 25 bp, Homo sapien
gcttgtcacgtctctgccaagatgg

SEQ ID NO: 2410600 - DNA, 25 bp, Homo sapien
taagagacccccgtttaggcagcag

SEQ ID NO: 2410601 - DNA, 25 bp, Homo sapien
tgacagataagagacccccgtttag

SEQ ID NO: 2410602 - DNA, 25 bp, Homo sapien
ctccattaggatttcctgatacaat

SEQ ID NO: 2410603 - DNA, 25 bp, Homo sapien
gagacccccgtttaggcagcagttc

SEQ ID NO: 2410604 - DNA, 25 bp, Homo sapien
gccataagcatagacataaaaggaa

SEQ ID NO: 2410605 - DNA, 25 bp, Homo sapien
gagtgctggatgtaagatattccca

SEQ ID NO: 2410606 - DNA, 25 bp, Homo sapien
tgcatttaggttcatgagccaataa

SEQ ID NO: 2410607 - DNA, 25 bp, Homo sapien
tatcatatgaagagttatcacagcc

SEQ ID NO: 2410608 - DNA, 25 bp, Homo sapien
actcctgaaggccaaaagcacccag

SEQ ID NO: 2410609 - DNA, 25 bp, Homo sapien
cgttttttgtgatccatactcctga

SEQ ID NO: 2410610 - DNA, 25 bp, Homo sapien
aaaagacatcgttttttgtgatcca

SEQ ID NO: 2410611 - DNA, 25 bp, Homo sapien
gatccatactcctgaaggccaaaag

SEQ ID NO: 2410612 - DNA, 25 bp, Homo sapien
tggctcttacgcctccaatgccaag

SEQ ID NO: 2410613 - DNA, 25 bp, Homo sapien
gatggctcttacgcctccaatgcca

SEQ ID NO: 2410614 - DNA, 25 bp, Homo sapien
atggctcttacgcctccaatgccaa

SEQ ID NO: 2410615 - DNA, 25 bp, Homo sapien
ctgcatggtaagtgcccagatagaa

SEQ ID NO: 2410616 - DNA, 25 bp, Homo sapien
gttaactgcatggtaagtgcccaga

SEQ ID NO: 2410617 - DNA, 25 bp, Homo sapien
tagaaatcttccaagggaaaagcca

SEQ ID NO: 2410618 - DNA, 25 bp, Homo sapien
gatagaaatcttccaagggaaaagc

SEQ ID NO: 2410619 - DNA, 25 bp, Homo sapien
aaatgtagcatagaacaagtggatc

SEQ ID NO: 2410620 - DNA, 25 bp, Homo sapien
taaatgtagcatagaacaagtggat

SEQ ID NO: 2410621 - DNA, 25 bp, Homo sapien
gctggatggagccttctttgccaca

SEQ ID NO: 2410622 - DNA, 25 bp, Homo sapien
agctggatggagccttctttgccac

SEQ ID NO: 2410623 - DNA, 25 bp, Homo sapien
ttgtgatagccaagcttgatagtgc

SEQ ID NO: 2410624 - DNA, 25 bp, Homo sapien
catcagtgagccatctgacaaacac

SEQ ID NO: 2410625 - DNA, 25 bp, Homo sapien
gacttcaaagaacgtgaacctctca

SEQ ID NO: 2410626 - DNA, 25 bp, Homo sapien
gggatcatgttgcagacgacttcaa

SEQ ID NO: 2410627 - DNA, 25 bp, Homo sapien
tctcaatgctgtgatataagtgtac

SEQ ID NO: 2410628 - DNA, 25 bp, Homo sapien
tgaggaacacaaatcgccaatatgt

SEQ ID NO: 2410629 - DNA, 25 bp, Homo sapien
tcagttatggtaaagcctgtaacag

SEQ ID NO: 2410630 - DNA, 25 bp, Homo sapien
aagtgtactttctcatcagttatgg

SEQ ID NO: 2410631 - DNA, 25 bp, Homo sapien
ccgttgtgcctcattatttagaaga

SEQ ID NO: 2410632 - DNA, 25 bp, Homo sapien
tgccttatgtacttagtggtttgaa

SEQ ID NO: 2410633 - DNA, 25 bp, Homo sapien
gctgattcatagcagaattgtgctt

SEQ ID NO: 2410634 - DNA, 25 bp, Homo sapien
gattgagtcagagattccaaatagc

SEQ ID NO: 2410635 - DNA, 25 bp, Homo sapien
gttcctcctctatcttgtgaactgg

SEQ ID NO: 2410636 - DNA, 25 bp, Homo sapien
cctcctctatcttgtgaactggtac

SEQ ID NO: 2410637 - DNA, 25 bp, Homo sapien
tcatgttcctcctctatcttgtgaa

SEQ ID NO: 2410638 - DNA, 25 bp, Homo sapien
ctctatcttgtgaactggtactgac

SEQ ID NO: 2410639 - DNA, 25 bp, Homo sapien
gtttggcaaggtttgtcacttggca

SEQ ID NO: 2410640 - DNA, 25 bp, Homo sapien
gcaaggtttgtcacttggcagagaa

SEQ ID NO: 2410641 - DNA, 25 bp, Homo sapien
ttgggccacgtcctgtggtagtaaa

SEQ ID NO: 2410642 - DNA, 25 bp, Homo sapien
cgtcctgtggtagtaaatttcagct

SEQ ID NO: 2410643 - DNA, 25 bp, Homo sapien
gcagacggaacaatggactgtacca

SEQ ID NO: 2410644 - DNA, 25 bp, Homo sapien
tgccaggagtgccaataaagtagcc

SEQ ID NO: 2410645 - DNA, 25 bp, Homo sapien
tatttgtaccagtgtctacagaggt

SEQ ID NO: 2410646 - DNA, 25 bp, Homo sapien
tacagaggttacattagcagacgga

SEQ ID NO: 2410647 - DNA, 25 bp, Homo sapien
tgaaatgttcgagaattcagagttc

SEQ ID NO: 2410648 - DNA, 25 bp, Homo sapien
tctaagggcgccaaatagaagggct

SEQ ID NO: 2410649 - DNA, 25 bp, Homo sapien
gaattcagagttcctagacaatggc

SEQ ID NO: 2410650 - DNA, 25 bp, Homo sapien
ccaaaactctgctgatcctgaaatg

SEQ ID NO: 2410651 - DNA, 25 bp, Homo sapien
cgtgggagggctaattaacaggaga

SEQ ID NO: 2410652 - DNA, 25 bp, Homo sapien
gcgcggccacagtccctgcattgcg

SEQ ID NO: 2410653 - DNA, 25 bp, Homo sapien
ctgtgggcgggtaaatcaggtgatt

SEQ ID NO: 2410654 - DNA, 25 bp, Homo sapien
attaacaggagattaactggagagg

SEQ ID NO: 2410655 - DNA, 25 bp, Homo sapien
aggaggaaaaggcacgtgtagtaat

SEQ ID NO: 2410656 - DNA, 25 bp, Homo sapien
tccccaagagtgcaaaagcctgcga

SEQ ID NO: 2410657 - DNA, 25 bp, Homo sapien
aagcctgcgatgtctcaggtttcat

SEQ ID NO: 2410658 - DNA, 25 bp, Homo sapien
gaggaaatgcctgtagtttgaacga

SEQ ID NO: 2410659 - DNA, 25 bp, Homo sapien
agtgagtgctgagtgggtgcccgca

SEQ ID NO: 2410660 - DNA, 25 bp, Homo sapien
tgagtgctgagtgggtgcccgcaag

SEQ ID NO: 2410661 - DNA, 25 bp, Homo sapien
ccagtgagtgctgagtgggtgcccg

SEQ ID NO: 2410662 - DNA, 25 bp, Homo sapien
gtgctgagtgggtgcccgcaagcat

SEQ ID NO: 2410663 - DNA, 25 bp, Homo sapien
tactgtttcgattttaagaatgaag

SEQ ID NO: 2410664 - DNA, 25 bp, Homo sapien
caattggttatgctggatgttaatc

SEQ ID NO: 2410665 - DNA, 25 bp, Homo sapien
tctccaggttaactctggatctggg

SEQ ID NO: 2410666 - DNA, 25 bp, Homo sapien
ggacacctaggttgcattagccctt

SEQ ID NO: 2410667 - DNA, 25 bp, Homo sapien
tctgcagattcccttatggcatatc

SEQ ID NO: 2410668 - DNA, 25 bp, Homo sapien
cccattttgaatattagcattgcca

SEQ ID NO: 2410669 - DNA, 25 bp, Homo sapien
cacaacacctcacttttgaatctat

SEQ ID NO: 2410670 - DNA, 25 bp, Homo sapien
cagcatccagttggctttttaagaa

SEQ ID NO: 2410671 - DNA, 25 bp, Homo sapien
gaaaatcatacaactcagcatccag

SEQ ID NO: 2410672 - DNA, 25 bp, Homo sapien
taatagatttagcacccatggtttc

SEQ ID NO: 2410673 - DNA, 25 bp, Homo sapien
gacaagttgttttacagaatgaccc

SEQ ID NO: 2410674 - DNA, 25 bp, Homo sapien
taaggtagtgtcaaccaaatctgtc

SEQ ID NO: 2410675 - DNA, 25 bp, Homo sapien
taagtggcagatatcatgacatgtc

SEQ ID NO: 2410676 - DNA, 25 bp, Homo sapien
ggaaattcttgagctcttttggaga

SEQ ID NO: 2410677 - DNA, 25 bp, Homo sapien
tttggacatcagtgctgtacacgcg

SEQ ID NO: 2410678 - DNA, 25 bp, Homo sapien
gagaagatcggtgatttcccattgc

SEQ ID NO: 2410679 - DNA, 25 bp, Homo sapien
tcccattgccactagatgtccctgt

SEQ ID NO: 2410680 - DNA, 25 bp, Homo sapien
cataatgtacatcattccatggtgt

SEQ ID NO: 2410681 - DNA, 25 bp, Homo sapien
tgttccaataaaagacacaatcttg

SEQ ID NO: 2410682 - DNA, 25 bp, Homo sapien
tccctgtcattgctattgtaaagag

SEQ ID NO: 2410683 - DNA, 25 bp, Homo sapien
caccaagagtgcataagtgttcgct

SEQ ID NO: 2410684 - DNA, 25 bp, Homo sapien
agaggctgtgttgtagatatggcct

SEQ ID NO: 2410685 - DNA, 25 bp, Homo sapien
tgtgttgtagatatggcctcccttc

SEQ ID NO: 2410686 - DNA, 25 bp, Homo sapien
gctgtgttgtagatatggcctccct

SEQ ID NO: 2410687 - DNA, 25 bp, Homo sapien
tgttgtagatatggcctcccttcct

SEQ ID NO: 2410688 - DNA, 25 bp, Homo sapien
cttctgaaggattaaaagtctcatc

SEQ ID NO: 2410689 - DNA, 25 bp, Homo sapien
ttctgaaggattaaaagtctcatct

SEQ ID NO: 2410690 - DNA, 25 bp, Homo sapien
tctgaaggattaaaagtctcatctt

SEQ ID NO: 2410691 - DNA, 25 bp, Homo sapien
catcgtcaggctccagaaaagacca

SEQ ID NO: 2410692 - DNA, 25 bp, Homo sapien
gtcaggctccagaaaagaccagaca

SEQ ID NO: 2410693 - DNA, 25 bp, Homo sapien
tcgtcaggctccagaaaagaccaga

SEQ ID NO: 2410694 - DNA, 25 bp, Homo sapien
ccctcatcgtcaggctccagaaaag

SEQ ID NO: 2410695 - DNA, 25 bp, Homo sapien
ctgtgtacttcaggttgcaggaatt

SEQ ID NO: 2410696 - DNA, 25 bp, Homo sapien
aaaggtggccattccatagcattta

SEQ ID NO: 2410697 - DNA, 25 bp, Homo sapien
ctcaaagtaaatcagctctacttca

SEQ ID NO: 2410698 - DNA, 25 bp, Homo sapien
agtaaatcagctctacttcatccaa

SEQ ID NO: 2410699 - DNA, 25 bp, Homo sapien
gaaactggaccgctcaaagtaaatc

SEQ ID NO: 2410700 - DNA, 25 bp, Homo sapien
ctgtagggagctctgttaaatccca

SEQ ID NO: 2410701 - DNA, 25 bp, Homo sapien
gtagggagctctgttaaatcccaag

SEQ ID NO: 2410702 - DNA, 25 bp, Homo sapien
tagggagctctgttaaatcccaagt

SEQ ID NO: 2410703 - DNA, 25 bp, Homo sapien
agggagctctgttaaatcccaagtc

SEQ ID NO: 2410704 - DNA, 25 bp, Homo sapien
agctggaatgaagcatgcttaatat

SEQ ID NO: 2410705 - DNA, 25 bp, Homo sapien
ctcgaacagatatgaagcggaagcc

SEQ ID NO: 2410706 - DNA, 25 bp, Homo sapien
cgaacagatatgaagcggaagccat

SEQ ID NO: 2410707 - DNA, 25 bp, Homo sapien
aacagatatgaagcggaagccattg

SEQ ID NO: 2410708 - DNA, 25 bp, Homo sapien
cagatatgaagcggaagccattgac

SEQ ID NO: 2410709 - DNA, 25 bp, Homo sapien
gcaatatttgggcgaatgtatagat

SEQ ID NO: 2410710 - DNA, 25 bp, Homo sapien
ggcaatatttgggcgaatgtataga

SEQ ID NO: 2410711 - DNA, 25 bp, Homo sapien
tgggcaatatttgggcgaatgtata

SEQ ID NO: 2410712 - DNA, 25 bp, Homo sapien
tttgggcaatatttgggcgaatgta

SEQ ID NO: 2410713 - DNA, 25 bp, Homo sapien
tactccagtttagattgatcaccag

SEQ ID NO: 2410714 - DNA, 25 bp, Homo sapien
tttggaattactccagtttagattg

SEQ ID NO: 2410715 - DNA, 25 bp, Homo sapien
cagtttagattgatcaccagtgagt

SEQ ID NO: 2410716 - DNA, 25 bp, Homo sapien
ggaattactccagtttagattgatc

SEQ ID NO: 2410717 - DNA, 25 bp, Homo sapien
ttaataattcggaaagcattctgaa

SEQ ID NO: 2410718 - DNA, 25 bp, Homo sapien
aattcggaaagcattctgaaggttc

SEQ ID NO: 2410719 - DNA, 25 bp, Homo sapien
tcggaaagcattctgaaggttcaag

SEQ ID NO: 2410720 - DNA, 25 bp, Homo sapien
aaagcattctgaaggttcaaggctg

SEQ ID NO: 2410721 - DNA, 25 bp, Homo sapien
cgtatgacgcttggtatgtaatttc

SEQ ID NO: 2410722 - DNA, 25 bp, Homo sapien
tatgacgcttggtatgtaatttctt

SEQ ID NO: 2410723 - DNA, 25 bp, Homo sapien
atgacgcttggtatgtaatttcttt

SEQ ID NO: 2410724 - DNA, 25 bp, Homo sapien
gtatgacgcttggtatgtaatttct

SEQ ID NO: 2410725 - DNA, 25 bp, Homo sapien
gcttcagggttaggaaagatgttgc

SEQ ID NO: 2410726 - DNA, 25 bp, Homo sapien
cttcagggttaggaaagatgttgcc

SEQ ID NO: 2410727 - DNA, 25 bp, Homo sapien
cgcttcagggttaggaaagatgttg

SEQ ID NO: 2410728 - DNA, 25 bp, Homo sapien
ttcagggttaggaaagatgttgcct

SEQ ID NO: 2410729 - DNA, 25 bp, Homo sapien
agttgatttgcaagtaagtataatc

SEQ ID NO: 2410730 - DNA, 25 bp, Homo sapien
tgatttgcaagtaagtataatctcc

SEQ ID NO: 2410731 - DNA, 25 bp, Homo sapien
ctgggcaataaaagttgatttgcaa

SEQ ID NO: 2410732 - DNA, 25 bp, Homo sapien
gtataatctccttccacggacatac

SEQ ID NO: 2410733 - DNA, 25 bp, Homo sapien
ggcattattacagtctcatatttct

SEQ ID NO: 2410734 - DNA, 25 bp, Homo sapien
gtctcatatttcttatcgatgtaga

SEQ ID NO: 2410735 - DNA, 25 bp, Homo sapien
catatttcttatcgatgtagatctt

SEQ ID NO: 2410736 - DNA, 25 bp, Homo sapien
ctcatatttcttatcgatgtagatc

SEQ ID NO: 2410737 - DNA, 25 bp, Homo sapien
ttcccctccttgttagtcaggtctg

SEQ ID NO: 2410738 - DNA, 25 bp, Homo sapien
tcctgtcttcagtttgtattgattt

SEQ ID NO: 2410739 - DNA, 25 bp, Homo sapien
ctgtcttcagtttgtattgattttt

SEQ ID NO: 2410740 - DNA, 25 bp, Homo sapien
gtcttcagtttgtattgatttttac

SEQ ID NO: 2410741 - DNA, 25 bp, Homo sapien
cctgtcttcagtttgtattgatttt

SEQ ID NO: 2410742 - DNA, 25 bp, Homo sapien
taggaagctttcatggaattcaatt

SEQ ID NO: 2410743 - DNA, 25 bp, Homo sapien
cacgtccatgacagcattatataca

SEQ ID NO: 2410744 - DNA, 25 bp, Homo sapien
gacagcattatatacatcacatatc

SEQ ID NO: 2410745 - DNA, 25 bp, Homo sapien
tattgattactaggaagctttcatg

SEQ ID NO: 2410746 - DNA, 25 bp, Homo sapien
gaacttgagattatagttgccacca

SEQ ID NO: 2410747 - DNA, 25 bp, Homo sapien
aacacatttccacagtagaagggtc

SEQ ID NO: 2410748 - DNA, 25 bp, Homo sapien
tagttgccaccactctgaatgatag

SEQ ID NO: 2410749 - DNA, 25 bp, Homo sapien
tgataggagggtaacacatttccac

SEQ ID NO: 2410750 - DNA, 25 bp, Homo sapien
catctgcatcaactatttccatgac

SEQ ID NO: 2410751 - DNA, 25 bp, Homo sapien
tcatctgcatcaactatttccatga

SEQ ID NO: 2410752 - DNA, 25 bp, Homo sapien
ctcatctgcatcaactatttccatg

SEQ ID NO: 2410753 - DNA, 25 bp, Homo sapien
ttgaggcagtcattccagctcttca

SEQ ID NO: 2410754 - DNA, 25 bp, Homo sapien
gtatatgccacaactgcactgatat

SEQ ID NO: 2410755 - DNA, 25 bp, Homo sapien
agctcttcatgaactctccagggaa

SEQ ID NO: 2410756 - DNA, 25 bp, Homo sapien
tcttcatgaactctccagggaattt

SEQ ID NO: 2410757 - DNA, 25 bp, Homo sapien
tttgtcaaagctattcttactactt

SEQ ID NO: 2410758 - DNA, 25 bp, Homo sapien
agctattcttactactttcattctt

SEQ ID NO: 2410759 - DNA, 25 bp, Homo sapien
gtcaaagctattcttactactttca

SEQ ID NO: 2410760 - DNA, 25 bp, Homo sapien
caaagctattcttactactttcatt

SEQ ID NO: 2410761 - DNA, 25 bp, Homo sapien
ctgatgcaacaatggctcaacgttg

SEQ ID NO: 2410762 - DNA, 25 bp, Homo sapien
gatgcaacaatggctcaacgttggc

SEQ ID NO: 2410763 - DNA, 25 bp, Homo sapien
tgatgcaacaatggctcaacgttgg

SEQ ID NO: 2410764 - DNA, 25 bp, Homo sapien
ttctgagaatcacgcgatgtcccgg

SEQ ID NO: 2410765 - DNA, 25 bp, Homo sapien
acgccgcttctcctcgggttctgag

SEQ ID NO: 2410766 - DNA, 25 bp, Homo sapien
gcgatgtcccggctctgccacctgc

SEQ ID NO: 2410767 - DNA, 25 bp, Homo sapien
caccgataataagcgtctttgtcca

SEQ ID NO: 2410768 - DNA, 25 bp, Homo sapien
ggtagtgtagcgcagatttaactct

SEQ ID NO: 2410769 - DNA, 25 bp, Homo sapien
gataaatccctcctccctcgtgagt

SEQ ID NO: 2410770 - DNA, 25 bp, Homo sapien
gatttaactctgagctttctctttg

SEQ ID NO: 2410771 - DNA, 25 bp, Homo sapien
tgagttctcagcgccaaagtaaatt

SEQ ID NO: 2410772 - DNA, 25 bp, Homo sapien
gtgctggcgcaagttgcttttcaag

SEQ ID NO: 2410773 - DNA, 25 bp, Homo sapien
cctcctggccattcaccaagacaca

SEQ ID NO: 2410774 - DNA, 25 bp, Homo sapien
tcttctcagcccgaggaaaacagct

SEQ ID NO: 2410775 - DNA, 25 bp, Homo sapien
tggcgcaagttgcttttcaagttct

SEQ ID NO: 2410776 - DNA, 25 bp, Homo sapien
ttgtgcattttcaaaagaaaatgaa

SEQ ID NO: 2410777 - DNA, 25 bp, Homo sapien
cattttcaaaagaaaatgaagacat

SEQ ID NO: 2410778 - DNA, 25 bp, Homo sapien
ggtcacttccaaagtttgtgcattt

SEQ ID NO: 2410779 - DNA, 25 bp, Homo sapien
tgcattttcaaaagaaaatgaagac

SEQ ID NO: 2410780 - DNA, 25 bp, Homo sapien
ccttccatgctgttgcaaacatgcc

SEQ ID NO: 2410781 - DNA, 25 bp, Homo sapien
aagaaatcacaaaggctctttggaa

SEQ ID NO: 2410782 - DNA, 25 bp, Homo sapien
ggcaagaaatcacaaaggctctttg

SEQ ID NO: 2410783 - DNA, 25 bp, Homo sapien
gcaagaaatcacaaaggctctttgg

SEQ ID NO: 2410784 - DNA, 25 bp, Homo sapien
caagaaatcacaaaggctctttgga

SEQ ID NO: 2410785 - DNA, 25 bp, Homo sapien
tgggcctcccctttttcatgggctg

SEQ ID NO: 2410786 - DNA, 25 bp, Homo sapien
tctagttgcttatggtaagaactta

SEQ ID NO: 2410787 - DNA, 25 bp, Homo sapien
taggcctcagttgctgtctaaagcc

SEQ ID NO: 2410788 - DNA, 25 bp, Homo sapien
tgtctaaagcctacaaagagttcct

SEQ ID NO: 2410789 - DNA, 25 bp, Homo sapien
aaagaggtttacatgtactcagctc

SEQ ID NO: 2410790 - DNA, 25 bp, Homo sapien
gaggtttacatgtactcagctcttt

SEQ ID NO: 2410791 - DNA, 25 bp, Homo sapien
tttacatgtactcagctctttggct

SEQ ID NO: 2410792 - DNA, 25 bp, Homo sapien
ggtttacatgtactcagctctttgg

SEQ ID NO: 2410793 - DNA, 25 bp, Homo sapien
atttgaagttgtgattaccataagc

SEQ ID NO: 2410794 - DNA, 25 bp, Homo sapien
agtttcaatttaggagcttggctgg

SEQ ID NO: 2410795 - DNA, 25 bp, Homo sapien
cagcagattgcttatgctgatcgca

SEQ ID NO: 2410796 - DNA, 25 bp, Homo sapien
ggacccaaactaaatgaccactcat

SEQ ID NO: 2410797 - DNA, 25 bp, Homo sapien
tccttctgaaagttgtaattgagca

SEQ ID NO: 2410798 - DNA, 25 bp, Homo sapien
ctccaaactaaattgtactctgaag

SEQ ID NO: 2410799 - DNA, 25 bp, Homo sapien
tgaaagttgtaattgagcatagatg

SEQ ID NO: 2410800 - DNA, 25 bp, Homo sapien
aactaaattgtactctgaagccctt

SEQ ID NO: 2410801 - DNA, 25 bp, Homo sapien
tggttccccttcgaatggtctctgt

SEQ ID NO: 2410802 - DNA, 25 bp, Homo sapien
ttggttccccttcgaatggtctctg

SEQ ID NO: 2410803 - DNA, 25 bp, Homo sapien
ggcatttagctcgagctgcttttgg

SEQ ID NO: 2410804 - DNA, 25 bp, Homo sapien
ggctaatgcaccatgtgaacaggca

SEQ ID NO: 2410805 - DNA, 25 bp, Homo sapien
atttgtaactcagggaagcttggca

SEQ ID NO: 2410806 - DNA, 25 bp, Homo sapien
taatcaaccggtgcagtaggctaat

SEQ ID NO: 2410807 - DNA, 25 bp, Homo sapien
ggacttacagtaccctttgccagca

SEQ ID NO: 2410808 - DNA, 25 bp, Homo sapien
tatcccgagtgtaaagtatgaatag

SEQ ID NO: 2410809 - DNA, 25 bp, Homo sapien
gctgctgctatgtgcttttatcccc

SEQ ID NO: 2410810 - DNA, 25 bp, Homo sapien
tgccagcagtggtttgaagattctt

SEQ ID NO: 2410811 - DNA, 25 bp, Homo sapien
gctccagctgcgtcgtctccgggat

SEQ ID NO: 2410812 - DNA, 25 bp, Homo sapien
agctgcgtcgtctccgggatcgccg

SEQ ID NO: 2410813 - DNA, 25 bp, Homo sapien
ccagctgcgtcgtctccgggatcgc

SEQ ID NO: 2410814 - DNA, 25 bp, Homo sapien
tccagctgcgtcgtctccgggatcg

SEQ ID NO: 2410815 - DNA, 25 bp, Homo sapien
aaggtgaagcgctcgtacataggtt

SEQ ID NO: 2410816 - DNA, 25 bp, Homo sapien
tcacaggagattgtaatcagggtct

SEQ ID NO: 2410817 - DNA, 25 bp, Homo sapien
taatcagggtctagcctgaaggtga

SEQ ID NO: 2410818 - DNA, 25 bp, Homo sapien
gcctgaaggtgaagcgctcgtacat

SEQ ID NO: 2410819 - DNA, 25 bp, Homo sapien
tagggaaatcattacttgccatcat

SEQ ID NO: 2410820 - DNA, 25 bp, Homo sapien
ctctagggaaatcattacttgccat

SEQ ID NO: 2410821 - DNA, 25 bp, Homo sapien
ggaaatcattacttgccatcattat

SEQ ID NO: 2410822 - DNA, 25 bp, Homo sapien
tctagggaaatcattacttgccatc

SEQ ID NO: 2410823 - DNA, 25 bp, Homo sapien
taaatagcggtaaacgacctagcgc

SEQ ID NO: 2410824 - DNA, 25 bp, Homo sapien
tgctttctagagatcatcttaaatt

SEQ ID NO: 2410825 - DNA, 25 bp, Homo sapien
gacttagctttagaaagtaaatgtc

SEQ ID NO: 2410826 - DNA, 25 bp, Homo sapien
tcttttcatggacttaacatatgct

SEQ ID NO: 2410827 - DNA, 25 bp, Homo sapien
tattaaaaacataaatccaaatgta

SEQ ID NO: 2410828 - DNA, 25 bp, Homo sapien
gaaaatatggttaacggtgccgtgc

SEQ ID NO: 2410829 - DNA, 25 bp, Homo sapien
gaggtgcacggtccttcatcatagg

SEQ ID NO: 2410830 - DNA, 25 bp, Homo sapien
tggaggcatcagacaacaagctaaa

SEQ ID NO: 2410831 - DNA, 25 bp, Homo sapien
catcggaggtgtcctactggaggca

SEQ ID NO: 2410832 - DNA, 25 bp, Homo sapien
ccaaaggcactagttcacataaggg

SEQ ID NO: 2410833 - DNA, 25 bp, Homo sapien
tagcggcaataagtagtggatgtca

SEQ ID NO: 2410834 - DNA, 25 bp, Homo sapien
tgatagactctaactcatagcggca

SEQ ID NO: 2410835 - DNA, 25 bp, Homo sapien
gaaaccctcagctcttgtggagaga

SEQ ID NO: 2410836 - DNA, 25 bp, Homo sapien
taggaaaaatttgtctccaacacaa

SEQ ID NO: 2410837 - DNA, 25 bp, Homo sapien
aaccttcctcgtagtccgtctggca

SEQ ID NO: 2410838 - DNA, 25 bp, Homo sapien
cgtctggcaaaggatcatgttattc

SEQ ID NO: 2410839 - DNA, 25 bp, Homo sapien
ttaggaaaaatttgtctccaacaca

SEQ ID NO: 2410840 - DNA, 25 bp, Homo sapien
tgtgaacaaatttactgtctttccc

SEQ ID NO: 2410841 - DNA, 25 bp, Homo sapien
ctgtgaacaaatttactgtctttcc

SEQ ID NO: 2410842 - DNA, 25 bp, Homo sapien
cccactgacagtccggttgtcatta

SEQ ID NO: 2410843 - DNA, 25 bp, Homo sapien
tgacagtccggttgtcattatacat

SEQ ID NO: 2410844 - DNA, 25 bp, Homo sapien
taagtgctaattgtgcataaccggc

SEQ ID NO: 2410845 - DNA, 25 bp, Homo sapien
taaccggcactaaagatatgcagtc

SEQ ID NO: 2410846 - DNA, 25 bp, Homo sapien
ggagaatctcctatatgaaaacctt

SEQ ID NO: 2410847 - DNA, 25 bp, Homo sapien
gatgaagattagctgacttcccgca

SEQ ID NO: 2410848 - DNA, 25 bp, Homo sapien
gcagtttcccgttacaccaaagagc

SEQ ID NO: 2410849 - DNA, 25 bp, Homo sapien
tgagcttactacaggcagcgcagtt

SEQ ID NO: 2410850 - DNA, 25 bp, Homo sapien
ggtaaacattgtccttggcacgcat

SEQ ID NO: 2410851 - DNA, 25 bp, Homo sapien
cttggcacgcatcaccatctcaaag

SEQ ID NO: 2410852 - DNA, 25 bp, Homo sapien
ggagatctgcttaggagatcactta

SEQ ID NO: 2410853 - DNA, 25 bp, Homo sapien
gtacttaacatgatctgcttaggag

SEQ ID NO: 2410854 - DNA, 25 bp, Homo sapien
ccaactaaagctttcatcctattca

SEQ ID NO: 2410855 - DNA, 25 bp, Homo sapien
tgaaaccatcaccaactaaagcttt

SEQ ID NO: 2410856 - DNA, 25 bp, Homo sapien
ccaggcccaggaaaatctatggcaa

SEQ ID NO: 2410857 - DNA, 25 bp, Homo sapien
tggtccgagtctctgatggctgccc

SEQ ID NO: 2410858 - DNA, 25 bp, Homo sapien
gctctgggttaataacagacaaatg

SEQ ID NO: 2410859 - DNA, 25 bp, Homo sapien
tatggcaatctgcataattacaagc

SEQ ID NO: 2410860 - DNA, 25 bp, Homo sapien
tgtgcacaaaacagttctctgacgt

SEQ ID NO: 2410861 - DNA, 25 bp, Homo sapien
cgttatagccttccaatttgttgcc

SEQ ID NO: 2410862 - DNA, 25 bp, Homo sapien
aatttgttgccctccaatttatgga

SEQ ID NO: 2410863 - DNA, 25 bp, Homo sapien
agttctctgacgttatagccttcca

SEQ ID NO: 2410864 - DNA, 25 bp, Homo sapien
gactctgatatcctaatgatgaatt

SEQ ID NO: 2410865 - DNA, 25 bp, Homo sapien
ggactctgatatcctaatgatgaat

SEQ ID NO: 2410866 - DNA, 25 bp, Homo sapien
tggactctgatatcctaatgatgaa

SEQ ID NO: 2410867 - DNA, 25 bp, Homo sapien
ctaagagggcgaatcttacaaggga

SEQ ID NO: 2410868 - DNA, 25 bp, Homo sapien
tatgcccggtctagtatttgttaaa

SEQ ID NO: 2410869 - DNA, 25 bp, Homo sapien
cacaaatatgtcactgcagtaaacc

SEQ ID NO: 2410870 - DNA, 25 bp, Homo sapien
agtgcatatcaacagacttggctaa

SEQ ID NO: 2410871 - DNA, 25 bp, Homo sapien
tcagatcagtagtcaagcaatcctc

SEQ ID NO: 2410872 - DNA, 25 bp, Homo sapien
gggtacagccatatgttgacagtca

SEQ ID NO: 2410873 - DNA, 25 bp, Homo sapien
tgaaaattgagctagcacaggcatg

SEQ ID NO: 2410874 - DNA, 25 bp, Homo sapien
catggcaatttgttagactggagca

SEQ ID NO: 2410875 - DNA, 25 bp, Homo sapien
tagcaatgcttaaccacactgtagg

SEQ ID NO: 2410876 - DNA, 25 bp, Homo sapien
cacagtgagggtcccagaaaatatc

SEQ ID NO: 2410877 - DNA, 25 bp, Homo sapien
tcttttatcaggacgggctgcttct

SEQ ID NO: 2410878 - DNA, 25 bp, Homo sapien
caaacatattgcaatggctgccatg

SEQ ID NO: 2410879 - DNA, 25 bp, Homo sapien
tgttaggctgaaagctcccaggaga

SEQ ID NO: 2410880 - DNA, 25 bp, Homo sapien
tgatccactcatgttaccaacttta

SEQ ID NO: 2410881 - DNA, 25 bp, Homo sapien
tgcaaataacctgctcatggaaact

SEQ ID NO: 2410882 - DNA, 25 bp, Homo sapien
aatacttgcatgaagttacaactgc

SEQ ID NO: 2410883 - DNA, 25 bp, Homo sapien
cacccaggtaaaggaacaggtactg

SEQ ID NO: 2410884 - DNA, 25 bp, Homo sapien
actggtgtgcaaggataattcctac

SEQ ID NO: 2410885 - DNA, 25 bp, Homo sapien
tcactggtgtgcaaggataattcct

SEQ ID NO: 2410886 - DNA, 25 bp, Homo sapien
cactggtgtgcaaggataattccta

SEQ ID NO: 2410887 - DNA, 25 bp, Homo sapien
agattagctttagtgtacagggtgg

SEQ ID NO: 2410888 - DNA, 25 bp, Homo sapien
aagattagctttagtgtacagggtg

SEQ ID NO: 2410889 - DNA, 25 bp, Homo sapien
tcagatagtctctgcgacaaaggat

SEQ ID NO: 2410890 - DNA, 25 bp, Homo sapien
tagtctctgcgacaaaggataagat

SEQ ID NO: 2410891 - DNA, 25 bp, Homo sapien
ccggtccttgatctttcggttgcag

SEQ ID NO: 2410892 - DNA, 25 bp, Homo sapien
agtcttcatgccagtatttgtccag

SEQ ID NO: 2410893 - DNA, 25 bp, Homo sapien
tctcccaagcgacagtcacagcagg

SEQ ID NO: 2410894 - DNA, 25 bp, Homo sapien
tgtccagtgcctttagaagataccg

SEQ ID NO: 2410895 - DNA, 25 bp, Homo sapien
caaattaatctatgcacagtcccta

SEQ ID NO: 2410896 - DNA, 25 bp, Homo sapien
tatcttcattctccccatagagcag

SEQ ID NO: 2410897 - DNA, 25 bp, Homo sapien
ccccatagagcagttcctttagaaa

SEQ ID NO: 2410898 - DNA, 25 bp, Homo sapien
gaaaatgtgagtaaataacaatctg

SEQ ID NO: 2410899 - DNA, 25 bp, Homo sapien
aaggagtttgatatttcacactcca

SEQ ID NO: 2410900 - DNA, 25 bp, Homo sapien
attctgtttggccttgggcataaaa

SEQ ID NO: 2410901 - DNA, 25 bp, Homo sapien
cataaaaggagtttgatatttcaca

SEQ ID NO: 2410902 - DNA, 25 bp, Homo sapien
ctgtttggccttgggcataaaagga

SEQ ID NO: 2410903 - DNA, 25 bp, Homo sapien
tgattgcctccattatgttcccttg

SEQ ID NO: 2410904 - DNA, 25 bp, Homo sapien
ggttgattgcctccattatgttccc

SEQ ID NO: 2410905 - DNA, 25 bp, Homo sapien
tgttcccttgttctgtaccattcat

SEQ ID NO: 2410906 - DNA, 25 bp, Homo sapien
ctccattatgttcccttgttctgta

SEQ ID NO: 2410907 - DNA, 25 bp, Homo sapien
tttctccaatgcagctgcaaggctc

SEQ ID NO: 2410908 - DNA, 25 bp, Homo sapien
tctccaatgcagctgcaaggctcag

SEQ ID NO: 2410909 - DNA, 25 bp, Homo sapien
cctcccctttttgagcaatggagct

SEQ ID NO: 2410910 - DNA, 25 bp, Homo sapien
ctcccctttttgagcaatggagctg

SEQ ID NO: 2410911 - DNA, 25 bp, Homo sapien
caaataagccgacgcgtgtgtacac

SEQ ID NO: 2410912 - DNA, 25 bp, Homo sapien
aagccgacgcgtgtgtacacagttg

SEQ ID NO: 2410913 - DNA, 25 bp, Homo sapien
caccacaaataagccgacgcgtgtg

SEQ ID NO: 2410914 - DNA, 25 bp, Homo sapien
acacaccacaaataagccgacgcgt

SEQ ID NO: 2410915 - DNA, 25 bp, Homo sapien
ggaggccgttcagtaagcacagtgg

SEQ ID NO: 2410916 - DNA, 25 bp, Homo sapien
cttctcaattaagcgatacaggggg

SEQ ID NO: 2410917 - DNA, 25 bp, Homo sapien
tctcaattaagcgatacagggggag

SEQ ID NO: 2410918 - DNA, 25 bp, Homo sapien
cagtggctgctttgtagcgcttctc

SEQ ID NO: 2410919 - DNA, 25 bp, Homo sapien
cagttattagtgagccggcggagcc

SEQ ID NO: 2410920 - DNA, 25 bp, Homo sapien
tgttgaccgcatctgagccacaggt

SEQ ID NO: 2410921 - DNA, 25 bp, Homo sapien
ggcagcgcttgtcaagaccacagag

SEQ ID NO: 2410922 - DNA, 25 bp, Homo sapien
ggtcctcaaggatacgccaagcaat

SEQ ID NO: 2410923 - DNA, 25 bp, Homo sapien
gctggggacaaacccgcacacaaaa

SEQ ID NO: 2410924 - DNA, 25 bp, Homo sapien
gggacaaacccgcacacaaaatgtg

SEQ ID NO: 2410925 - DNA, 25 bp, Homo sapien
tggggacaaacccgcacacaaaatg

SEQ ID NO: 2410926 - DNA, 25 bp, Homo sapien
ggacaaacccgcacacaaaatgtga

SEQ ID NO: 2410927 - DNA, 25 bp, Homo sapien
atgaactctctgaagtcgctgctcc

SEQ ID NO: 2410928 - DNA, 25 bp, Homo sapien
aagtccgccacacaagcctggttca

SEQ ID NO: 2410929 - DNA, 25 bp, Homo sapien
taccagaataccctggaaaaagcac

SEQ ID NO: 2410930 - DNA, 25 bp, Homo sapien
taatggcccaagacccaaactgtga

SEQ ID NO: 2410931 - DNA, 25 bp, Homo sapien
taatgagaaccccttagttgacttg

SEQ ID NO: 2410932 - DNA, 25 bp, Homo sapien
tcacagacggtagattaatgagaac

SEQ ID NO: 2410933 - DNA, 25 bp, Homo sapien
tttggcttttctggcccgtctaggc

SEQ ID NO: 2410934 - DNA, 25 bp, Homo sapien
cgtctaggcaggcatacatgcactt

SEQ ID NO: 2410935 - DNA, 25 bp, Homo sapien
tactgaataaaagccccaggccata

SEQ ID NO: 2410936 - DNA, 25 bp, Homo sapien
ggagaaattctccaatggctctaag

SEQ ID NO: 2410937 - DNA, 25 bp, Homo sapien
aactgaacactttgaacctggcagc

SEQ ID NO: 2410938 - DNA, 25 bp, Homo sapien
tgtgtctagcttgcccctggtcgct

SEQ ID NO: 2410939 - DNA, 25 bp, Homo sapien
ggggtagggatgtcaaagcttcata

SEQ ID NO: 2410940 - DNA, 25 bp, Homo sapien
tgtagttctgcatgaagtgtgctca

SEQ ID NO: 2410941 - DNA, 25 bp, Homo sapien
tctctaggtttaagtagtgatcttc

SEQ ID NO: 2410942 - DNA, 25 bp, Homo sapien
tgatcttctgatagtaagtcttcca

SEQ ID NO: 2410943 - DNA, 25 bp, Homo sapien
gatgccatcccatattccagtgata

SEQ ID NO: 2410944 - DNA, 25 bp, Homo sapien
gtgctgatgccatcccatattccag

SEQ ID NO: 2410945 - DNA, 25 bp, Homo sapien
ccattgacatctggcaggatgcctt

SEQ ID NO: 2410946 - DNA, 25 bp, Homo sapien
ccagtgatattagcacctccattga

SEQ ID NO: 2410947 - DNA, 25 bp, Homo sapien
ttccaagtcagaagtggttttcact

SEQ ID NO: 2410948 - DNA, 25 bp, Homo sapien
cagcatctagatgacacatgtaccc

SEQ ID NO: 2410949 - DNA, 25 bp, Homo sapien
caacagctgtagtcaatctcttgga

SEQ ID NO: 2410950 - DNA, 25 bp, Homo sapien
tcttggattctgatgtcacctggtg

SEQ ID NO: 2410951 - DNA, 25 bp, Homo sapien
ggaaaagtgttctcgacacataata

SEQ ID NO: 2410952 - DNA, 25 bp, Homo sapien
tgggaaaagtgttctcgacacataa

SEQ ID NO: 2410953 - DNA, 25 bp, Homo sapien
tatattataaaggatgtgaaagtga

SEQ ID NO: 2410954 - DNA, 25 bp, Homo sapien
gtgttctcgacacataatattgtta

SEQ ID NO: 2410955 - DNA, 25 bp, Homo sapien
cacaaaaaccttctctagggtccag

SEQ ID NO: 2410956 - DNA, 25 bp, Homo sapien
gctttgccagacatctcattgttcc

SEQ ID NO: 2410957 - DNA, 25 bp, Homo sapien
cagaatacagtaaagcccatcggtc

SEQ ID NO: 2410958 - DNA, 25 bp, Homo sapien
tcctgctggctcaagagaacaaagc

SEQ ID NO: 2410959 - DNA, 25 bp, Homo sapien
tgcacgccccagcttcagaatacag

SEQ ID NO: 2410960 - DNA, 25 bp, Homo sapien
cggatatacctgtaagcaagcagtc

SEQ ID NO: 2410961 - DNA, 25 bp, Homo sapien
tttctccatcagcatttctactcac

SEQ ID NO: 2410962 - DNA, 25 bp, Homo sapien
tcagctcaaaattaaggtttctcca

SEQ ID NO: 2410963 - DNA, 25 bp, Homo sapien
aaggtttctccatcagcatttctac

SEQ ID NO: 2410964 - DNA, 25 bp, Homo sapien
ggtttctccatcagcatttctactc

SEQ ID NO: 2410965 - DNA, 25 bp, Homo sapien
tctgatacaaagctttggtctctcc

SEQ ID NO: 2410966 - DNA, 25 bp, Homo sapien
tgatacaaagctttggtctctcctt

SEQ ID NO: 2410967 - DNA, 25 bp, Homo sapien
gatacaaagctttggtctctccttt

SEQ ID NO: 2410968 - DNA, 25 bp, Homo sapien
ttttctgatacaaagctttggtctc

SEQ ID NO: 2410969 - DNA, 25 bp, Homo sapien
ccagagattgaataatcatccagaa

SEQ ID NO: 2410970 - DNA, 25 bp, Homo sapien
ggaaggtataatggccagagattga

SEQ ID NO: 2410971 - DNA, 25 bp, Homo sapien
attataggaaggtataatggccaga

SEQ ID NO: 2410972 - DNA, 25 bp, Homo sapien
gagattgaataatcatccagaaaac

SEQ ID NO: 2410973 - DNA, 25 bp, Homo sapien
taatgcaaatcatggcccacgagcc

SEQ ID NO: 2410974 - DNA, 25 bp, Homo sapien
ggtaagtacagattaggcttgtcct

SEQ ID NO: 2410975 - DNA, 25 bp, Homo sapien
tcatatcagatagagatcaacatgc

SEQ ID NO: 2410976 - DNA, 25 bp, Homo sapien
tggagcatgttccaccacatttgac

SEQ ID NO: 2410977 - DNA, 25 bp, Homo sapien
tgcaaatcactaaagaccatgtacg

SEQ ID NO: 2410978 - DNA, 25 bp, Homo sapien
actaaagaccatgtacgaccaggaa

SEQ ID NO: 2410979 - DNA, 25 bp, Homo sapien
ttatgcagttacacgggcaccaact

SEQ ID NO: 2410980 - DNA, 25 bp, Homo sapien
acacgggcaccaactggcagtgaag

SEQ ID NO: 2410981 - DNA, 25 bp, Homo sapien
aacatctttatcgaatgccaaacct

SEQ ID NO: 2410982 - DNA, 25 bp, Homo sapien
catctttatcgaatgccaaaccttg

SEQ ID NO: 2410983 - DNA, 25 bp, Homo sapien
ttatcgaatgccaaaccttgagcat

SEQ ID NO: 2410984 - DNA, 25 bp, Homo sapien
tctttatcgaatgccaaaccttgag

SEQ ID NO: 2410985 - DNA, 25 bp, Homo sapien
ggaagtcagcttgtatgcttaaatc

SEQ ID NO: 2410986 - DNA, 25 bp, Homo sapien
aaatctgttacagagacttctcctg

SEQ ID NO: 2410987 - DNA, 25 bp, Homo sapien
cataaggtttacatgggaagtcagc

SEQ ID NO: 2410988 - DNA, 25 bp, Homo sapien
tgctagatcataaggtttacatggg

SEQ ID NO: 2410989 - DNA, 25 bp, Homo sapien
tcattggcatccattgggatttgtt

SEQ ID NO: 2410990 - DNA, 25 bp, Homo sapien
gtctgtccccggagtgcttgccgtc

SEQ ID NO: 2410991 - DNA, 25 bp, Homo sapien
ttctcttgtctgtccccggagtgct

SEQ ID NO: 2410992 - DNA, 25 bp, Homo sapien
cattggcatccattgggatttgttc

SEQ ID NO: 2410993 - DNA, 25 bp, Homo sapien
tatgaggatcacactgggaagtaag

SEQ ID NO: 2410994 - DNA, 25 bp, Homo sapien
ccactgttgatatgaggatcacact

SEQ ID NO: 2410995 - DNA, 25 bp, Homo sapien
ttgatatgaggatcacactgggaag

SEQ ID NO: 2410996 - DNA, 25 bp, Homo sapien
cactgggaagtaagatgtttacatc

SEQ ID NO: 2410997 - DNA, 25 bp, Homo sapien
actgatttatcaatgcaatcattcc

SEQ ID NO: 2410998 - DNA, 25 bp, Homo sapien
tagggtagtattccatatgaaactg

SEQ ID NO: 2410999 - DNA, 25 bp, Homo sapien
gaccccagtagggtagtattccata

SEQ ID NO: 2411000 - DNA, 25 bp, Homo sapien
agcttctgagtgctgaccccagtag

SEQ ID NO: 2411001 - DNA, 25 bp, Homo sapien
ctcctaccatttcgttgaggggaag

SEQ ID NO: 2411002 - DNA, 25 bp, Homo sapien
tcagttgattatagaagtcatttca

SEQ ID NO: 2411003 - DNA, 25 bp, Homo sapien
gctccaaaataactccggcaatcag

SEQ ID NO: 2411004 - DNA, 25 bp, Homo sapien
caatcagccagcaataacacaataa

SEQ ID NO: 2411005 - DNA, 25 bp, Homo sapien
atggaaagcctttgcctacagccat

SEQ ID NO: 2411006 - DNA, 25 bp, Homo sapien
gatggaaagcctttgcctacagcca

SEQ ID NO: 2411007 - DNA, 25 bp, Homo sapien
tgatggaaagcctttgcctacagcc

SEQ ID NO: 2411008 - DNA, 25 bp, Homo sapien
tggaatatttacttggcctttgttg

SEQ ID NO: 2411009 - DNA, 25 bp, Homo sapien
gcaattgcaatattggcattggaat

SEQ ID NO: 2411010 - DNA, 25 bp, Homo sapien
tggcctttgttgattaccggaagta

SEQ ID NO: 2411011 - DNA, 25 bp, Homo sapien
attggcattggaatatttacttggc

SEQ ID NO: 2411012 - DNA, 25 bp, Homo sapien
aatgggtaggacctgaggatcccag

SEQ ID NO: 2411013 - DNA, 25 bp, Homo sapien
acctgaggatcccagggttactgtt

SEQ ID NO: 2411014 - DNA, 25 bp, Homo sapien
ggatcccagggttactgtttcacac

SEQ ID NO: 2411015 - DNA, 25 bp, Homo sapien
tgttcctggcaatgggtaggacctg

SEQ ID NO: 2411016 - DNA, 25 bp, Homo sapien
cccatttcaagtctatgatatcctg

SEQ ID NO: 2411017 - DNA, 25 bp, Homo sapien
tcttatcaagaaatcgggcagatca

SEQ ID NO: 2411018 - DNA, 25 bp, Homo sapien
catttcttatcaagaaatcgggcag

SEQ ID NO: 2411019 - DNA, 25 bp, Homo sapien
gaaggacaacggctcatttcatttc

SEQ ID NO: 2411020 - DNA, 25 bp, Homo sapien
agcttcagcaactttaacgatctca

SEQ ID NO: 2411021 - DNA, 25 bp, Homo sapien
cagcaactttaacgatctcatccaa

SEQ ID NO: 2411022 - DNA, 25 bp, Homo sapien
tcatccaaagtgagataacctaatt

SEQ ID NO: 2411023 - DNA, 25 bp, Homo sapien
tactggggaatgagagcttcagcaa

SEQ ID NO: 2411024 - DNA, 25 bp, Homo sapien
attgaccattctgaaccgccttact

SEQ ID NO: 2411025 - DNA, 25 bp, Homo sapien
tttcatcacatctgctctaaaagct

SEQ ID NO: 2411026 - DNA, 25 bp, Homo sapien
ctgaaccgccttacttttcatcaca

SEQ ID NO: 2411027 - DNA, 25 bp, Homo sapien
gctctcaaacttgaatcattccaac

SEQ ID NO: 2411028 - DNA, 25 bp, Homo sapien
ctactgagcagttttcttccccttt

SEQ ID NO: 2411029 - DNA, 25 bp, Homo sapien
cttctactgagcagttttcttcccc

SEQ ID NO: 2411030 - DNA, 25 bp, Homo sapien
tttcctttctcctttctatattcat

SEQ ID NO: 2411031 - DNA, 25 bp, Homo sapien
ttttcctttctcctttctatattca

SEQ ID NO: 2411032 - DNA, 25 bp, Homo sapien
cacacttggtctaagatggtcagaa

SEQ ID NO: 2411033 - DNA, 25 bp, Homo sapien
taaacgacattgcacgtagctcagg

SEQ ID NO: 2411034 - DNA, 25 bp, Homo sapien
gacaagttatcctgtgtagaggccc

SEQ ID NO: 2411035 - DNA, 25 bp, Homo sapien
tagacgctagatcatgggtctcttc

SEQ ID NO: 2411036 - DNA, 25 bp, Homo sapien
ccttgaggaggagccgaactaatct

SEQ ID NO: 2411037 - DNA, 25 bp, Homo sapien
tgtatagcaatatcacataattgca

SEQ ID NO: 2411038 - DNA, 25 bp, Homo sapien
ctatgtatacccctgaagtgaacac

SEQ ID NO: 2411039 - DNA, 25 bp, Homo sapien
tatcacataattgcatgccatcctt

SEQ ID NO: 2411040 - DNA, 25 bp, Homo sapien
tgagatgtacagtcacatctttctc

SEQ ID NO: 2411041 - DNA, 25 bp, Homo sapien
ctggtgtttgagatgtgggtatgcc

SEQ ID NO: 2411042 - DNA, 25 bp, Homo sapien
gctgcttcttgtagctgagatgtac

SEQ ID NO: 2411043 - DNA, 25 bp, Homo sapien
cagtgcagtcgcagatctggcatct

SEQ ID NO: 2411044 - DNA, 25 bp, Homo sapien
ctggagtttcccagtgggaatggat

SEQ ID NO: 2411045 - DNA, 25 bp, Homo sapien
cccagtgggaatggatgttgattac

SEQ ID NO: 2411046 - DNA, 25 bp, Homo sapien
ttcccagtgggaatggatgttgatt

SEQ ID NO: 2411047 - DNA, 25 bp, Homo sapien
gtttcccagtgggaatggatgttga

SEQ ID NO: 2411048 - DNA, 25 bp, Homo sapien
gcttcttaaatggacctggtggaaa

SEQ ID NO: 2411049 - DNA, 25 bp, Homo sapien
ttgctgtagcttcttaaatggacct

SEQ ID NO: 2411050 - DNA, 25 bp, Homo sapien
gctgtagcttcttaaatggacctgg

SEQ ID NO: 2411051 - DNA, 25 bp, Homo sapien
gtagcttcttaaatggacctggtgg

SEQ ID NO: 2411052 - DNA, 25 bp, Homo sapien
ttaatggttaaagatctgtgggctc

SEQ ID NO: 2411053 - DNA, 25 bp, Homo sapien
caggagctctgtcagcgatgacaca

SEQ ID NO: 2411054 - DNA, 25 bp, Homo sapien
caaaggaagcaagcaatttctactg

SEQ ID NO: 2411055 - DNA, 25 bp, Homo sapien
gtcagcgatgacacatgacaaagga

SEQ ID NO: 2411056 - DNA, 25 bp, Homo sapien
gattcagtgtgaagacaggagctct

SEQ ID NO: 2411057 - DNA, 25 bp, Homo sapien
tggagtacacggtgctatctagcta

SEQ ID NO: 2411058 - DNA, 25 bp, Homo sapien
ggagtacacggtgctatctagctat

SEQ ID NO: 2411059 - DNA, 25 bp, Homo sapien
gagtacacggtgctatctagctatc

SEQ ID NO: 2411060 - DNA, 25 bp, Homo sapien
gctggagtacacggtgctatctagc

SEQ ID NO: 2411061 - DNA, 25 bp, Homo sapien
gcagtccacctgtcacatcattagg

SEQ ID NO: 2411062 - DNA, 25 bp, Homo sapien
gaatcaacttttccgaggctgctgt

SEQ ID NO: 2411063 - DNA, 25 bp, Homo sapien
tctgcgggtctaataagaatcaact

SEQ ID NO: 2411064 - DNA, 25 bp, Homo sapien
catcattaggtgcagcatgtgcctt

SEQ ID NO: 2411065 - DNA, 25 bp, Homo sapien
cattttactcagtgtcttgggagac

SEQ ID NO: 2411066 - DNA, 25 bp, Homo sapien
tactcagtgtcttgggagacgccat

SEQ ID NO: 2411067 - DNA, 25 bp, Homo sapien
caatccataggagagtttgaaatgg

SEQ ID NO: 2411068 - DNA, 25 bp, Homo sapien
gcaacattttactcagtgtcttggg

SEQ ID NO: 2411069 - DNA, 25 bp, Homo sapien
attgttgaaaacctggatcttaata

SEQ ID NO: 2411070 - DNA, 25 bp, Homo sapien
acctggatcttaatatcacccctgt

SEQ ID NO: 2411071 - DNA, 25 bp, Homo sapien
ttgaaaacctggatcttaatatcac

SEQ ID NO: 2411072 - DNA, 25 bp, Homo sapien
gaaaacctggatcttaatatcaccc

SEQ ID NO: 2411073 - DNA, 25 bp, Homo sapien
taactcctgaggagcatccaaatcc

SEQ ID NO: 2411074 - DNA, 25 bp, Homo sapien
cctgaggagcatccaaatccaacac

SEQ ID NO: 2411075 - DNA, 25 bp, Homo sapien
tatgagtgtgttgtaactcctgagg

SEQ ID NO: 2411076 - DNA, 25 bp, Homo sapien
tgttgtaactcctgaggagcatcca

SEQ ID NO: 2411077 - DNA, 25 bp, Homo sapien
tgcagactcttggtagggttaaggc

SEQ ID NO: 2411078 - DNA, 25 bp, Homo sapien
taaggctgcatgcttgacacttagc

SEQ ID NO: 2411079 - DNA, 25 bp, Homo sapien
cacgttgccatatgagtcgcatcta

SEQ ID NO: 2411080 - DNA, 25 bp, Homo sapien
tgctccaggtttacgtgtactttca

SEQ ID NO: 2411081 - DNA, 25 bp, Homo sapien
gtctggaattctcatgaaggctttg

SEQ ID NO: 2411082 - DNA, 25 bp, Homo sapien
taattggtgtctggaattctcatga

SEQ ID NO: 2411083 - DNA, 25 bp, Homo sapien
gaaggctttggattgcatattgttt

SEQ ID NO: 2411084 - DNA, 25 bp, Homo sapien
tctcatgaaggctttggattgcata

SEQ ID NO: 2411085 - DNA, 25 bp, Homo sapien
ttgtacatatcgacattggccatac

SEQ ID NO: 2411086 - DNA, 25 bp, Homo sapien
agccactttcaaccaaactacttct

SEQ ID NO: 2411087 - DNA, 25 bp, Homo sapien
ctttgtacatatcgacattggccat

SEQ ID NO: 2411088 - DNA, 25 bp, Homo sapien
tgtacatatcgacattggccatact

SEQ ID NO: 2411089 - DNA, 25 bp, Homo sapien
ttctacacaggtcgtgttattgttt

SEQ ID NO: 2411090 - DNA, 25 bp, Homo sapien
gatttttgttacaagtagagaggca

SEQ ID NO: 2411091 - DNA, 25 bp, Homo sapien
aattaaatgaatttagtagctgttt

SEQ ID NO: 2411092 - DNA, 25 bp, Homo sapien
tcttctacacaggtcgtgttattgt

SEQ ID NO: 2411093 - DNA, 25 bp, Homo sapien
cttggccagcttgtttacagtgttt

SEQ ID NO: 2411094 - DNA, 25 bp, Homo sapien
tctcagtgccaagtaatggttcagc

SEQ ID NO: 2411095 - DNA, 25 bp, Homo sapien
ttaatacaataggtgctctgcagcc

SEQ ID NO: 2411096 - DNA, 25 bp, Homo sapien
cagccagcgtggttgcacattgatc

SEQ ID NO: 2411097 - DNA, 25 bp, Homo sapien
ttgcactctgttgggaatgtgtgca

SEQ ID NO: 2411098 - DNA, 25 bp, Homo sapien
cttgagtttggtttggcatctggat

SEQ ID NO: 2411099 - DNA, 25 bp, Homo sapien
tgagtttggtttggcatctggatga

SEQ ID NO: 2411100 - DNA, 25 bp, Homo sapien
gagtttggtttggcatctggatgaa

SEQ ID NO: 2411101 - DNA, 25 bp, Homo sapien
tcttgagtttggtttggcatctgga

SEQ ID NO: 2411102 - DNA, 25 bp, Homo sapien
catccctctcaggggacgggaaatc

SEQ ID NO: 2411103 - DNA, 25 bp, Homo sapien
ctcatccctctcaggggacgggaaa

SEQ ID NO: 2411104 - DNA, 25 bp, Homo sapien
tcatccctctcaggggacgggaaat

SEQ ID NO: 2411105 - DNA, 25 bp, Homo sapien
tccctctcaggggacgggaaatctc

SEQ ID NO: 2411106 - DNA, 25 bp, Homo sapien
tagaaatagatccccttcctgtttc

SEQ ID NO: 2411107 - DNA, 25 bp, Homo sapien
ccctcatcctgctagtgtgaatctg

SEQ ID NO: 2411108 - DNA, 25 bp, Homo sapien
aggcaggaggacctcgatcttcctg

SEQ ID NO: 2411109 - DNA, 25 bp, Homo sapien
agggttacatcatcggccaccctca

SEQ ID NO: 2411110 - DNA, 25 bp, Homo sapien
ggaggacctcgatcttcctgtcaat

SEQ ID NO: 2411111 - DNA, 25 bp, Homo sapien
tccaactggttcaacagtttcaaca

SEQ ID NO: 2411112 - DNA, 25 bp, Homo sapien
catccaactggttcaacagtttcaa

SEQ ID NO: 2411113 - DNA, 25 bp, Homo sapien
atccatccaactggttcaacagttt

SEQ ID NO: 2411114 - DNA, 25 bp, Homo sapien
ccaactggttcaacagtttcaacat

SEQ ID NO: 2411115 - DNA, 25 bp, Homo sapien
tcgaaacaattccagcatgggtttg

SEQ ID NO: 2411116 - DNA, 25 bp, Homo sapien
cgaaacaattccagcatgggtttga

SEQ ID NO: 2411117 - DNA, 25 bp, Homo sapien
tctttttgaaccaatggcatcaatt

SEQ ID NO: 2411118 - DNA, 25 bp, Homo sapien
actcgaaacaattccagcatgggtt

SEQ ID NO: 2411119 - DNA, 25 bp, Homo sapien
tttggtttgctgctgctttgactaa

SEQ ID NO: 2411120 - DNA, 25 bp, Homo sapien
gctgctttgactaacaaggttttac

SEQ ID NO: 2411121 - DNA, 25 bp, Homo sapien
gctgctgctttgactaacaaggttt

SEQ ID NO: 2411122 - DNA, 25 bp, Homo sapien
tttgctgctgctttgactaacaagg

SEQ ID NO: 2411123 - DNA, 25 bp, Homo sapien
ccagtggaccatagagaacgacccc

SEQ ID NO: 2411124 - DNA, 25 bp, Homo sapien
ctgtgcccagtggaccatagagaac

SEQ ID NO: 2411125 - DNA, 25 bp, Homo sapien
tgtgcccagtggaccatagagaacg

SEQ ID NO: 2411126 - DNA, 25 bp, Homo sapien
tgcccagtggaccatagagaacgac

SEQ ID NO: 2411127 - DNA, 25 bp, Homo sapien
ttccaatcctccagtattggcatag

SEQ ID NO: 2411128 - DNA, 25 bp, Homo sapien
accagcgcccctatcatggcatgca

SEQ ID NO: 2411129 - DNA, 25 bp, Homo sapien
catccaccagcgcccctatcatggc

SEQ ID NO: 2411130 - DNA, 25 bp, Homo sapien
tgtcatccaccagcgcccctatcat

SEQ ID NO: 2411131 - DNA, 25 bp, Homo sapien
ccaccagcgcccctatcatggcatg

SEQ ID NO: 2411132 - DNA, 25 bp, Homo sapien
caaatgaaagaatgctgatgttgtg

SEQ ID NO: 2411133 - DNA, 25 bp, Homo sapien
aatgaaagaatgctgatgttgtgtt

SEQ ID NO: 2411134 - DNA, 25 bp, Homo sapien
tacaaatgaaagaatgctgatgttg

SEQ ID NO: 2411135 - DNA, 25 bp, Homo sapien
ctacaaatgaaagaatgctgatgtt

SEQ ID NO: 2411136 - DNA, 25 bp, Homo sapien
ggcatggttgtcatgggtgatctct

SEQ ID NO: 2411137 - DNA, 25 bp, Homo sapien
cacagatatggacacgatggcatgg

SEQ ID NO: 2411138 - DNA, 25 bp, Homo sapien
tatggacacgatggcatggttgtca

SEQ ID NO: 2411139 - DNA, 25 bp, Homo sapien
tggttgtcatgggtgatctcttcca

SEQ ID NO: 2411140 - DNA, 25 bp, Homo sapien
tctagtcggtacaggaggttcgtat

SEQ ID NO: 2411141 - DNA, 25 bp, Homo sapien
cttcttttgccccactctagtcggt

SEQ ID NO: 2411142 - DNA, 25 bp, Homo sapien
tgtccttatcatccttcttgacctc

SEQ ID NO: 2411143 - DNA, 25 bp, Homo sapien
tttgccccactctagtcggtacagg

SEQ ID NO: 2411144 - DNA, 25 bp, Homo sapien
gacccatcttgccttggcaccagac

SEQ ID NO: 2411145 - DNA, 25 bp, Homo sapien
gactttgacccatcttgccttggca

SEQ ID NO: 2411146 - DNA, 25 bp, Homo sapien
cccatcttgccttggcaccagacat

SEQ ID NO: 2411147 - DNA, 25 bp, Homo sapien
tttgacccatcttgccttggcacca

SEQ ID NO: 2411148 - DNA, 25 bp, Homo sapien
cctgttggccctcattgagggcgtt

SEQ ID NO: 2411149 - DNA, 25 bp, Homo sapien
cattgagggcgttggcatcctcctc

SEQ ID NO: 2411150 - DNA, 25 bp, Homo sapien
gtgctggtagcctgcagtggcccac

SEQ ID NO: 2411151 - DNA, 25 bp, Homo sapien
ccatggtgggctcagcgatgatggg

SEQ ID NO: 2411152 - DNA, 25 bp, Homo sapien
catttccaataaaccactggtttgg

SEQ ID NO: 2411153 - DNA, 25 bp, Homo sapien
ccatttccaataaaccactggtttg

SEQ ID NO: 2411154 - DNA, 25 bp, Homo sapien
tctcttctcccttcgtcctacagaa

SEQ ID NO: 2411155 - DNA, 25 bp, Homo sapien
tcgtcctacagaacaaccatcattt

SEQ ID NO: 2411156 - DNA, 25 bp, Homo sapien
gcgcccagccggctcaagtggttct

SEQ ID NO: 2411157 - DNA, 25 bp, Homo sapien
agccggctcaagtggttcttaaatc

SEQ ID NO: 2411158 - DNA, 25 bp, Homo sapien
gcccagccggctcaagtggttctta

SEQ ID NO: 2411159 - DNA, 25 bp, Homo sapien
ccagccggctcaagtggttcttaaa

SEQ ID NO: 2411160 - DNA, 25 bp, Homo sapien
caaccattcatcagctttggcttaa

SEQ ID NO: 2411161 - DNA, 25 bp, Homo sapien
accattcatcagctttggcttaaaa

SEQ ID NO: 2411162 - DNA, 25 bp, Homo sapien
ttcacaaccattcatcagctttggc

SEQ ID NO: 2411163 - DNA, 25 bp, Homo sapien
accttcacaaccattcatcagcttt

SEQ ID NO: 2411164 - DNA, 25 bp, Homo sapien
gtagcatgagtcaaaatgatcctgc

SEQ ID NO: 2411165 - DNA, 25 bp, Homo sapien
gtgtcatagagggaaacaaaaagta

SEQ ID NO: 2411166 - DNA, 25 bp, Homo sapien
gttgaaagctagcatccttaacggg

SEQ ID NO: 2411167 - DNA, 25 bp, Homo sapien
gtaactgagttgaaagctagcatcc

SEQ ID NO: 2411168 - DNA, 25 bp, Homo sapien
cacagaaagtccaaagcatctggac

SEQ ID NO: 2411169 - DNA, 25 bp, Homo sapien
gcatctggacattttcttggaggca

SEQ ID NO: 2411170 - DNA, 25 bp, Homo sapien
cctttgccttgaggccacagaaagt

SEQ ID NO: 2411171 - DNA, 25 bp, Homo sapien
tgaggccacagaaagtccaaagcat

SEQ ID NO: 2411172 - DNA, 25 bp, Homo sapien
atcccaaagacagtggaaagccact

SEQ ID NO: 2411173 - DNA, 25 bp, Homo sapien
gcttctgcaaaaatcgcagggagaa

SEQ ID NO: 2411174 - DNA, 25 bp, Homo sapien
agagtttgattttgatagaagacac

SEQ ID NO: 2411175 - DNA, 25 bp, Homo sapien
gtctatgtgaaataactcagtgaca

SEQ ID NO: 2411176 - DNA, 25 bp, Homo sapien
tgttgtctttagacagcaaatatgt

SEQ ID NO: 2411177 - DNA, 25 bp, Homo sapien
aggctgaaaatgcttaaggactttc

SEQ ID NO: 2411178 - DNA, 25 bp, Homo sapien
ctttctgaagtatatgattatctcc

SEQ ID NO: 2411179 - DNA, 25 bp, Homo sapien
taactgttaatacacagaaccaaac

SEQ ID NO: 2411180 - DNA, 25 bp, Homo sapien
caagcagatcattccatgaggatgt

SEQ ID NO: 2411181 - DNA, 25 bp, Homo sapien
cttgcagagactgattgaagaggtc

SEQ ID NO: 2411182 - DNA, 25 bp, Homo sapien
gatcacaatcttaacaaaatcttgc

SEQ ID NO: 2411183 - DNA, 25 bp, Homo sapien
cataacaaagaagatcacaatctta

SEQ ID NO: 2411184 - DNA, 25 bp, Homo sapien
tgaatggccatcttcgggggttccc

SEQ ID NO: 2411185 - DNA, 25 bp, Homo sapien
taattgctaccatgcagatccgatt

SEQ ID NO: 2411186 - DNA, 25 bp, Homo sapien
gatccgattcagaagtaactgaacc

SEQ ID NO: 2411187 - DNA, 25 bp, Homo sapien
accaccatttcccattgaatggcca

SEQ ID NO: 2411188 - DNA, 25 bp, Homo sapien
tgtctatactgacattcataacgcc

SEQ ID NO: 2411189 - DNA, 25 bp, Homo sapien
cattcataacgccaagagggctttg

SEQ ID NO: 2411190 - DNA, 25 bp, Homo sapien
cctgcaattctgttgtgtctatact

SEQ ID NO: 2411191 - DNA, 25 bp, Homo sapien
gaagttcctgcaattctgttgtgtc

SEQ ID NO: 2411192 - DNA, 25 bp, Homo sapien
ttttgtgcttttcttggtggacaga

SEQ ID NO: 2411193 - DNA, 25 bp, Homo sapien
tatatctatcttcagtttatagctt

SEQ ID NO: 2411194 - DNA, 25 bp, Homo sapien
gcttttcttggtggacagatgtctt

SEQ ID NO: 2411195 - DNA, 25 bp, Homo sapien
cagttttctcgtgatttccctccaa

SEQ ID NO: 2411196 - DNA, 25 bp, Homo sapien
gttcctgtctcctgtatagcctact

SEQ ID NO: 2411197 - DNA, 25 bp, Homo sapien
gatcctgtagtagagagtgttcaaa

SEQ ID NO: 2411198 - DNA, 25 bp, Homo sapien
tagcctactcacatattgaatcatg

SEQ ID NO: 2411199 - DNA, 25 bp, Homo sapien
tgccattgttgcattgatgtactgt

SEQ ID NO: 2411200 - DNA, 25 bp, Homo sapien
gaaggtcaagcagcccagtagagag

SEQ ID NO: 2411201 - DNA, 25 bp, Homo sapien
gccatgtcatgaggaaggtcaagca

SEQ ID NO: 2411202 - DNA, 25 bp, Homo sapien
ggaaaaaccaactgccatgtcatga

SEQ ID NO: 2411203 - DNA, 25 bp, Homo sapien
gtcatgaggaaggtcaagcagccca

SEQ ID NO: 2411204 - DNA, 25 bp, Homo sapien
cggtcatgttaaggtggagaatgaa

SEQ ID NO: 2411205 - DNA, 25 bp, Homo sapien
tagtagatgcggtcatgttaaggtg

SEQ ID NO: 2411206 - DNA, 25 bp, Homo sapien
ttattggctattagtagatgcggtc

SEQ ID NO: 2411207 - DNA, 25 bp, Homo sapien
ggctattagtagatgcggtcatgtt

SEQ ID NO: 2411208 - DNA, 25 bp, Homo sapien
gaagacaaatcgctgaagtcagata

SEQ ID NO: 2411209 - DNA, 25 bp, Homo sapien
cattcaggcttaactttaatccttt

SEQ ID NO: 2411210 - DNA, 25 bp, Homo sapien
acaagaagacaaatcgctgaagtca

SEQ ID NO: 2411211 - DNA, 25 bp, Homo sapien
cacttcttacacttattgagacaag

SEQ ID NO: 2411212 - DNA, 25 bp, Homo sapien
aatgacaacgggcattagaagaaga

SEQ ID NO: 2411213 - DNA, 25 bp, Homo sapien
gacaacgggcattagaagaagaaaa

SEQ ID NO: 2411214 - DNA, 25 bp, Homo sapien
ttagaagaagaaaaacgctccctca

SEQ ID NO: 2411215 - DNA, 25 bp, Homo sapien
tagaagaagaaaaacgctccctcat

SEQ ID NO: 2411216 - DNA, 25 bp, Homo sapien
caacaacaggtcaataaacgaaact

SEQ ID NO: 2411217 - DNA, 25 bp, Homo sapien
ggcaggaattacatagtccttacca

SEQ ID NO: 2411218 - DNA, 25 bp, Homo sapien
gagttctagagagatggaccaacaa

SEQ ID NO: 2411219 - DNA, 25 bp, Homo sapien
gtatttccacctcatggcaggaatt

SEQ ID NO: 2411220 - DNA, 25 bp, Homo sapien
cccatatttgtgtactctggttcat

SEQ ID NO: 2411221 - DNA, 25 bp, Homo sapien
catcaaataggcattgtttaacttc

SEQ ID NO: 2411222 - DNA, 25 bp, Homo sapien
cacttatacctttaaggccacccat

SEQ ID NO: 2411223 - DNA, 25 bp, Homo sapien
agaatgtatgttgggttgatattga

SEQ ID NO: 2411224 - DNA, 25 bp, Homo sapien
actatccttcaatagacgcacattg

SEQ ID NO: 2411225 - DNA, 25 bp, Homo sapien
taattgtgagacattctaggcaatg

SEQ ID NO: 2411226 - DNA, 25 bp, Homo sapien
cccatgcagatgcctgacagggcat

SEQ ID NO: 2411227 - DNA, 25 bp, Homo sapien
taggcaatgttcaatagcccatgca

SEQ ID NO: 2411228 - DNA, 25 bp, Homo sapien
caaaatatcaattaggctttcatcc

SEQ ID NO: 2411229 - DNA, 25 bp, Homo sapien
caattaggctttcatccgaactgat

SEQ ID NO: 2411230 - DNA, 25 bp, Homo sapien
catccgaactgatgacagcacgcag

SEQ ID NO: 2411231 - DNA, 25 bp, Homo sapien
ggctttcatccgaactgatgacagc

SEQ ID NO: 2411232 - DNA, 25 bp, Homo sapien
cttggcaatagagaaccgcttaact

SEQ ID NO: 2411233 - DNA, 25 bp, Homo sapien
ttaactttgcacatcataactgcct

SEQ ID NO: 2411234 - DNA, 25 bp, Homo sapien
gaaccgcttaactttgcacatcata

SEQ ID NO: 2411235 - DNA, 25 bp, Homo sapien
tagagaaccgcttaactttgcacat

SEQ ID NO: 2411236 - DNA, 25 bp, Homo sapien
tattaaattgttatagtatagtcca

SEQ ID NO: 2411237 - DNA, 25 bp, Homo sapien
tatagtatagtccaaaggttgttct

SEQ ID NO: 2411238 - DNA, 25 bp, Homo sapien
tctttttggtgaatgttcatgatag

SEQ ID NO: 2411239 - DNA, 25 bp, Homo sapien
ttttggtgaatgttcatgataggtg

SEQ ID NO: 2411240 - DNA, 25 bp, Homo sapien
ctttgaatgagagaaacttctgctg

SEQ ID NO: 2411241 - DNA, 25 bp, Homo sapien
tttgaatgagagaaacttctgctga

SEQ ID NO: 2411242 - DNA, 25 bp, Homo sapien
tgaatgagagaaacttctgctgatg

SEQ ID NO: 2411243 - DNA, 25 bp, Homo sapien
ttgaatgagagaaacttctgctgat

SEQ ID NO: 2411244 - DNA, 25 bp, Homo sapien
caaacagctccgacaaaggtcggaa

SEQ ID NO: 2411245 - DNA, 25 bp, Homo sapien
ggcggctttcttcactactgccact

SEQ ID NO: 2411246 - DNA, 25 bp, Homo sapien
gacttggagcctgtcggccgctgtt

SEQ ID NO: 2411247 - DNA, 25 bp, Homo sapien
tactgccactgaccttgcaaacagc

SEQ ID NO: 2411248 - DNA, 25 bp, Homo sapien
tgtgcactagtgagcagttgagatt

SEQ ID NO: 2411249 - DNA, 25 bp, Homo sapien
gaagaaaagttactgatgaaagcca

SEQ ID NO: 2411250 - DNA, 25 bp, Homo sapien
acaaacctgaactccctctgctcct

SEQ ID NO: 2411251 - DNA, 25 bp, Homo sapien
ggggagcaggccacaaacctgaact

SEQ ID NO: 2411252 - DNA, 25 bp, Homo sapien
cttttacataagctatggcccatgt

SEQ ID NO: 2411253 - DNA, 25 bp, Homo sapien
tgtatttagaaattttgactgtcat

SEQ ID NO: 2411254 - DNA, 25 bp, Homo sapien
agctatggcccatgttctgtattta

SEQ ID NO: 2411255 - DNA, 25 bp, Homo sapien
tacataagctatggcccatgttctg

SEQ ID NO: 2411256 - DNA, 25 bp, Homo sapien
tcaccatgcacccattacaggagca

SEQ ID NO: 2411257 - DNA, 25 bp, Homo sapien
ttttgtcaccatgcacccattacag

SEQ ID NO: 2411258 - DNA, 25 bp, Homo sapien
acacccaccggtcagtattagaaag

SEQ ID NO: 2411259 - DNA, 25 bp, Homo sapien
ccaccggtcagtattagaaagatca

SEQ ID NO: 2411260 - DNA, 25 bp, Homo sapien
aatattttaaccacaggatctgtgg

SEQ ID NO: 2411261 - DNA, 25 bp, Homo sapien
aaatattttaaccacaggatctgtg

SEQ ID NO: 2411262 - DNA, 25 bp, Homo sapien
tctgtggcagtagttaattgattat

SEQ ID NO: 2411263 - DNA, 25 bp, Homo sapien
caggatctgtggcagtagttaattg

SEQ ID NO: 2411264 - DNA, 25 bp, Homo sapien
aacctctggagagagtgtggccctg

SEQ ID NO: 2411265 - DNA, 25 bp, Homo sapien
gagaccttgagtgtaagctagtgaa

SEQ ID NO: 2411266 - DNA, 25 bp, Homo sapien
tctacattacttaggtaggccccaa

SEQ ID NO: 2411267 - DNA, 25 bp, Homo sapien
ggaaagtttgatgcctataacaggc

SEQ ID NO: 2411268 - DNA, 25 bp, Homo sapien
cacattcatagacacattgaagtgt

SEQ ID NO: 2411269 - DNA, 25 bp, Homo sapien
cattcatagacacattgaagtgttt

SEQ ID NO: 2411270 - DNA, 25 bp, Homo sapien
ttctaggagcacattcatagacaca

SEQ ID NO: 2411271 - DNA, 25 bp, Homo sapien
catagacacattgaagtgtttggat

SEQ ID NO: 2411272 - DNA, 25 bp, Homo sapien
ttatcatgctaaattactgagctcc

SEQ ID NO: 2411273 - DNA, 25 bp, Homo sapien
atgcccactcaagtaattatcatgc

SEQ ID NO: 2411274 - DNA, 25 bp, Homo sapien
tattcactcacatgtttcggtcatg

SEQ ID NO: 2411275 - DNA, 25 bp, Homo sapien
ccaagtttatgattttgaatgtaac

SEQ ID NO: 2411276 - DNA, 25 bp, Homo sapien
taggaaatctcccaggattacctgt

SEQ ID NO: 2411277 - DNA, 25 bp, Homo sapien
aatgtttgaaactctctgatatagg

SEQ ID NO: 2411278 - DNA, 25 bp, Homo sapien
tgggatcgctgtccgccagtaggtt

SEQ ID NO: 2411279 - DNA, 25 bp, Homo sapien
cagagtttatttggcaaggcaaact

SEQ ID NO: 2411280 - DNA, 25 bp, Homo sapien
tcggttttccagtgccagcttttgc

SEQ ID NO: 2411281 - DNA, 25 bp, Homo sapien
aaagatctcgtttgttgccaaccaa

SEQ ID NO: 2411282 - DNA, 25 bp, Homo sapien
aatacattattgatcaatttggcca

SEQ ID NO: 2411283 - DNA, 25 bp, Homo sapien
cattgatttagatccactgggacgt

SEQ ID NO: 2411284 - DNA, 25 bp, Homo sapien
tagtttgtggctcccggattctgta

SEQ ID NO: 2411285 - DNA, 25 bp, Homo sapien
ttgtggctcccggattctgtagatc

SEQ ID NO: 2411286 - DNA, 25 bp, Homo sapien
ggctcccggattctgtagatcagcg

SEQ ID NO: 2411287 - DNA, 25 bp, Homo sapien
atgactagtttgtggctcccggatt

SEQ ID NO: 2411288 - DNA, 25 bp, Homo sapien
cacttgtgagggagaattttgcttt

SEQ ID NO: 2411289 - DNA, 25 bp, Homo sapien
tgcccagtgaagctcacttgtgagg

SEQ ID NO: 2411290 - DNA, 25 bp, Homo sapien
tgaagacctatcactgatgtcatac

SEQ ID NO: 2411291 - DNA, 25 bp, Homo sapien
aataacaaacccatctgcccagtga

SEQ ID NO: 2411292 - DNA, 25 bp, Homo sapien
gagaacaagggtcatatatttctag

SEQ ID NO: 2411293 - DNA, 25 bp, Homo sapien
gaacaagggtcatatatttctagat

SEQ ID NO: 2411294 - DNA, 25 bp, Homo sapien
tatatttctagatttagttgtttcc

SEQ ID NO: 2411295 - DNA, 25 bp, Homo sapien
ttgagaacaagggtcatatatttct

SEQ ID NO: 2411296 - DNA, 25 bp, Homo sapien
cttagtaagaaacctcactgtaagg

SEQ ID NO: 2411297 - DNA, 25 bp, Homo sapien
catattctccaatgaatcgcttagt

SEQ ID NO: 2411298 - DNA, 25 bp, Homo sapien
gaatcgcttagtaagaaacctcact

SEQ ID NO: 2411299 - DNA, 25 bp, Homo sapien
ccaatgaatcgcttagtaagaaacc

SEQ ID NO: 2411300 - DNA, 25 bp, Homo sapien
atttgagatgcaagaagtttgacat

SEQ ID NO: 2411301 - DNA, 25 bp, Homo sapien
aaacagatttctcattatatttgag

SEQ ID NO: 2411302 - DNA, 25 bp, Homo sapien
tttctcattatatttgagatgcaag

SEQ ID NO: 2411303 - DNA, 25 bp, Homo sapien
tatttgagatgcaagaagtttgaca

SEQ ID NO: 2411304 - DNA, 25 bp, Homo sapien
aaagacactaccaagtatttgcagt

SEQ ID NO: 2411305 - DNA, 25 bp, Homo sapien
tgcagttatttaaggatgtagggac

SEQ ID NO: 2411306 - DNA, 25 bp, Homo sapien
tcaaggtactatgtgtaatagtcac

SEQ ID NO: 2411307 - DNA, 25 bp, Homo sapien
tctggcttcaaggtactatgtgtaa

SEQ ID NO: 2411308 - DNA, 25 bp, Homo sapien
tcctaatgaaagataatgtgcctat

SEQ ID NO: 2411309 - DNA, 25 bp, Homo sapien
tgcctatcatcccagtgagataatg

SEQ ID NO: 2411310 - DNA, 25 bp, Homo sapien
tatatatgaaatacgtggttaatgg

SEQ ID NO: 2411311 - DNA, 25 bp, Homo sapien
agatatttatcttgctatgcctgcc

SEQ ID NO: 2411312 - DNA, 25 bp, Homo sapien
gcctgttccttcaccacccaagaca

SEQ ID NO: 2411313 - DNA, 25 bp, Homo sapien
ctgcttcttggtcagtcctattttc

SEQ ID NO: 2411314 - DNA, 25 bp, Homo sapien
gcttttctgcttcttggtcagtcct

SEQ ID NO: 2411315 - DNA, 25 bp, Homo sapien
cttggtcagtcctattttctggaac

SEQ ID NO: 2411316 - DNA, 25 bp, Homo sapien
tttctgcttcttggtcagtcctatt

SEQ ID NO: 2411317 - DNA, 25 bp, Homo sapien
tcaaaatctgacaatgggaggatct

SEQ ID NO: 2411318 - DNA, 25 bp, Homo sapien
caaaatctgacaatgggaggatctc

SEQ ID NO: 2411319 - DNA, 25 bp, Homo sapien
atctgacaatgggaggatctcagtt

SEQ ID NO: 2411320 - DNA, 25 bp, Homo sapien
aaatctgacaatgggaggatctcag

SEQ ID NO: 2411321 - DNA, 25 bp, Homo sapien
attttgctgttaatttagattactg

SEQ ID NO: 2411322 - DNA, 25 bp, Homo sapien
aatttagattactgatcttcaggtt

SEQ ID NO: 2411323 - DNA, 25 bp, Homo sapien
tagattactgatcttcaggttttcc

SEQ ID NO: 2411324 - DNA, 25 bp, Homo sapien
tgctgttaatttagattactgatct

SEQ ID NO: 2411325 - DNA, 25 bp, Homo sapien
aatgtttgcgttattagagtactct

SEQ ID NO: 2411326 - DNA, 25 bp, Homo sapien
taatgtaataatctgtagatgaagc

SEQ ID NO: 2411327 - DNA, 25 bp, Homo sapien
atgtttgcgttattagagtactctc

SEQ ID NO: 2411328 - DNA, 25 bp, Homo sapien
taatctgtagatgaagcatttgcaa

SEQ ID NO: 2411329 - DNA, 25 bp, Homo sapien
tgttctgatgataacattgatgcgg

SEQ ID NO: 2411330 - DNA, 25 bp, Homo sapien
ctttaggccaaactgttttgccact

SEQ ID NO: 2411331 - DNA, 25 bp, Homo sapien
gataacattgatgcggctccaaggg

SEQ ID NO: 2411332 - DNA, 25 bp, Homo sapien
ctctttaggccaaactgttttgcca

SEQ ID NO: 2411333 - DNA, 25 bp, Homo sapien
tcaattgatgtaggaagaattaaag

SEQ ID NO: 2411334 - DNA, 25 bp, Homo sapien
acctataaaagtccaaatagaccat

SEQ ID NO: 2411335 - DNA, 25 bp, Homo sapien
tacttggctaccttccccttgctcg

SEQ ID NO: 2411336 - DNA, 25 bp, Homo sapien
tatttcactccatacttggctacct

SEQ ID NO: 2411337 - DNA, 25 bp, Homo sapien
cctgtatttcactccatacttggct

SEQ ID NO: 2411338 - DNA, 25 bp, Homo sapien
tgtatttcactccatacttggctac

SEQ ID NO: 2411339 - DNA, 25 bp, Homo sapien
ggttgacatgcatccaactgcctct

SEQ ID NO: 2411340 - DNA, 25 bp, Homo sapien
cggtgtatccgagtgcttggtgtct

SEQ ID NO: 2411341 - DNA, 25 bp, Homo sapien
catttgctgtctaggagaggacaaa

SEQ ID NO: 2411342 - DNA, 25 bp, Homo sapien
gaaatgtgattacggtgtatccgag

SEQ ID NO: 2411343 - DNA, 25 bp, Homo sapien
tattctgtcctgattctcacgttca

SEQ ID NO: 2411344 - DNA, 25 bp, Homo sapien
ttctgtcctgattctcacgttcata

SEQ ID NO: 2411345 - DNA, 25 bp, Homo sapien
attctgtcctgattctcacgttcat

SEQ ID NO: 2411346 - DNA, 25 bp, Homo sapien
ctgtcctgattctcacgttcatatt

SEQ ID NO: 2411347 - DNA, 25 bp, Homo sapien
tgctttctgggtctcaaaactacat

SEQ ID NO: 2411348 - DNA, 25 bp, Homo sapien
tacatttatccaggagatccacaaa

SEQ ID NO: 2411349 - DNA, 25 bp, Homo sapien
gctttctgggtctcaaaactacatt

SEQ ID NO: 2411350 - DNA, 25 bp, Homo sapien
caaaactacatttatccaggagatc

SEQ ID NO: 2411351 - DNA, 25 bp, Homo sapien
caggagagcgcacagataattcttt

SEQ ID NO: 2411352 - DNA, 25 bp, Homo sapien
ggtttcctcactatctcccaactgg

SEQ ID NO: 2411353 - DNA, 25 bp, Homo sapien
gaataatcaggcatcgttcctctcc

SEQ ID NO: 2411354 - DNA, 25 bp, Homo sapien
tcagcgcaaggtttcctcactatct

SEQ ID NO: 2411355 - DNA, 25 bp, Homo sapien
tggtagaaccaactctcatcctgac

SEQ ID NO: 2411356 - DNA, 25 bp, Homo sapien
tacaacttcttggtagaaccaactc

SEQ ID NO: 2411357 - DNA, 25 bp, Homo sapien
ttcttggtagaaccaactctcatcc

SEQ ID NO: 2411358 - DNA, 25 bp, Homo sapien
atacaacttcttggtagaaccaact

SEQ ID NO: 2411359 - DNA, 25 bp, Homo sapien
gaaagaaattagtcagctagcaggc

SEQ ID NO: 2411360 - DNA, 25 bp, Homo sapien
gctagcaggcacatgagaaatgcca

SEQ ID NO: 2411361 - DNA, 25 bp, Homo sapien
tagtcagctagcaggcacatgagaa

SEQ ID NO: 2411362 - DNA, 25 bp, Homo sapien
gcacatgagaaatgccaaattaaat

SEQ ID NO: 2411363 - DNA, 25 bp, Homo sapien
ctttgacattgggccatatgaaggt

SEQ ID NO: 2411364 - DNA, 25 bp, Homo sapien
ttgacattgggccatatgaaggttt

SEQ ID NO: 2411365 - DNA, 25 bp, Homo sapien
tttgacattgggccatatgaaggtt

SEQ ID NO: 2411366 - DNA, 25 bp, Homo sapien
tgagatcatttcaaccccaagatgt

SEQ ID NO: 2411367 - DNA, 25 bp, Homo sapien
gaagtagtccactaggcacttgcat

SEQ ID NO: 2411368 - DNA, 25 bp, Homo sapien
cagttctgcttaccggaagtagtcc

SEQ ID NO: 2411369 - DNA, 25 bp, Homo sapien
cacacttggctttatgccagcaagc

SEQ ID NO: 2411370 - DNA, 25 bp, Homo sapien
cataaagatgctcggtcactcttca

SEQ ID NO: 2411371 - DNA, 25 bp, Homo sapien
cccataaagatgctcggtcactctt

SEQ ID NO: 2411372 - DNA, 25 bp, Homo sapien
ccataaagatgctcggtcactcttc

SEQ ID NO: 2411373 - DNA, 25 bp, Homo sapien
gctgggagacatagaaattctgacc

SEQ ID NO: 2411374 - DNA, 25 bp, Homo sapien
gaaaatgtctagcatacagtcagta

SEQ ID NO: 2411375 - DNA, 25 bp, Homo sapien
aaaaatgagatctgacccctgaaaa

SEQ ID NO: 2411376 - DNA, 25 bp, Homo sapien
tctagccctagattaaagactgtag

SEQ ID NO: 2411377 - DNA, 25 bp, Homo sapien
tcaaccaaatccagctgagttagtt

SEQ ID NO: 2411378 - DNA, 25 bp, Homo sapien
aaagaagtacatcaagctggaagaa

SEQ ID NO: 2411379 - DNA, 25 bp, Homo sapien
catggttggctgtaatatgcttaaa

SEQ ID NO: 2411380 - DNA, 25 bp, Homo sapien
gctggaagaaaatcatactagatgg

SEQ ID NO: 2411381 - DNA, 25 bp, Homo sapien
ttccagagactcaattgttagctca

SEQ ID NO: 2411382 - DNA, 25 bp, Homo sapien
caattgttagctcaacttggaggcc

SEQ ID NO: 2411383 - DNA, 25 bp, Homo sapien
tatatttatcttagcgatgagatct

SEQ ID NO: 2411384 - DNA, 25 bp, Homo sapien
tacagagttatatttatcttagcga

SEQ ID NO: 2411385 - DNA, 25 bp, Homo sapien
atgtccaacgttcagggtgtctata

SEQ ID NO: 2411386 - DNA, 25 bp, Homo sapien
ttctccaattccatatggcatgtcc

SEQ ID NO: 2411387 - DNA, 25 bp, Homo sapien
tctatagtatgattggaaatgggtc

SEQ ID NO: 2411388 - DNA, 25 bp, Homo sapien
ttccatatggcatgtccaacgttca

SEQ ID NO: 2411389 - DNA, 25 bp, Homo sapien
tgactgctaacaaaatacggcccct

SEQ ID NO: 2411390 - DNA, 25 bp, Homo sapien
gaaattgggcactgtcaaaggcact

SEQ ID NO: 2411391 - DNA, 25 bp, Homo sapien
aattccatggtactcagggaatatg

SEQ ID NO: 2411392 - DNA, 25 bp, Homo sapien
actgctgtgcgcctctacctggctg

SEQ ID NO: 2411393 - DNA, 25 bp, Homo sapien
aagccaatgttgtctctggtacagg

SEQ ID NO: 2411394 - DNA, 25 bp, Homo sapien
tctgtaccagttgagaaaaccacga

SEQ ID NO: 2411395 - DNA, 25 bp, Homo sapien
gattgacctgatcagaaacgaggca

SEQ ID NO: 2411396 - DNA, 25 bp, Homo sapien
ttcagaggtcaactaagagctggcc

SEQ ID NO: 2411397 - DNA, 25 bp, Homo sapien
tgacgttctgaataagggtttttga

SEQ ID NO: 2411398 - DNA, 25 bp, Homo sapien
aataatctgacgttctgaataaggg

SEQ ID NO: 2411399 - DNA, 25 bp, Homo sapien
tttttgaaacagtatcaagtgttac

SEQ ID NO: 2411400 - DNA, 25 bp, Homo sapien
caagtgttacattgatcccgttcat

SEQ ID NO: 2411401 - DNA, 25 bp, Homo sapien
tcaagaaatttcaagaactgaattg

SEQ ID NO: 2411402 - DNA, 25 bp, Homo sapien
gaaatttcaagaactgaattggtga

SEQ ID NO: 2411403 - DNA, 25 bp, Homo sapien
caagaaatttcaagaactgaattgg

SEQ ID NO: 2411404 - DNA, 25 bp, Homo sapien
agaaatttcaagaactgaattggtg

SEQ ID NO: 2411405 - DNA, 25 bp, Homo sapien
cagacggtgacttggataatcttct

SEQ ID NO: 2411406 - DNA, 25 bp, Homo sapien
tcagacggtgacttggataatcttc

SEQ ID NO: 2411407 - DNA, 25 bp, Homo sapien
agacggtgacttggataatcttctg

SEQ ID NO: 2411408 - DNA, 25 bp, Homo sapien
taatgcatacctgcccaagcctgaa

SEQ ID NO: 2411409 - DNA, 25 bp, Homo sapien
gaagcatcatttcagatacagagga

SEQ ID NO: 2411410 - DNA, 25 bp, Homo sapien
aaagtacttcatccttacacgggtg

SEQ ID NO: 2411411 - DNA, 25 bp, Homo sapien
tgtcaataagaacaacgaatagagg

SEQ ID NO: 2411412 - DNA, 25 bp, Homo sapien
tgctggcctgccgaatctgtggcta

SEQ ID NO: 2411413 - DNA, 25 bp, Homo sapien
gggagcaggactcgtttaacgaagc

SEQ ID NO: 2411414 - DNA, 25 bp, Homo sapien
caattcttcagaactagcaggagga

SEQ ID NO: 2411415 - DNA, 25 bp, Homo sapien
gggtatacctcttgagaccaagctt

SEQ ID NO: 2411416 - DNA, 25 bp, Homo sapien
tcaatggaagcctctgatagctgct

SEQ ID NO: 2411417 - DNA, 25 bp, Homo sapien
tgctttacacaccacccttagagtg

SEQ ID NO: 2411418 - DNA, 25 bp, Homo sapien
tggataccttaattgccagtgcagg

SEQ ID NO: 2411419 - DNA, 25 bp, Homo sapien
tatgcatcacttataccattgagcc

SEQ ID NO: 2411420 - DNA, 25 bp, Homo sapien
cccagtcccaagtccaattacagtt

SEQ ID NO: 2411421 - DNA, 25 bp, Homo sapien
caagtccaattacagttaacagcac

SEQ ID NO: 2411422 - DNA, 25 bp, Homo sapien
tgttttgtctgacccgttaagtctg

SEQ ID NO: 2411423 - DNA, 25 bp, Homo sapien
tcacagaggcctgaaaccgactaca

SEQ ID NO: 2411424 - DNA, 25 bp, Homo sapien
aggactgcaaccctagtgccctttg

SEQ ID NO: 2411425 - DNA, 25 bp, Homo sapien
ttcttcaaggagatcatgcatgctg

SEQ ID NO: 2411426 - DNA, 25 bp, Homo sapien
gcacactgaagataggaccaacacc

SEQ ID NO: 2411427 - DNA, 25 bp, Homo sapien
gatcatgcatgctggaccatcatct

SEQ ID NO: 2411428 - DNA, 25 bp, Homo sapien
tattgcgatgcatagctaatgatat

SEQ ID NO: 2411429 - DNA, 25 bp, Homo sapien
gcgatgcatagctaatgatatgtca

SEQ ID NO: 2411430 - DNA, 25 bp, Homo sapien
gttttattgcgatgcatagctaatg

SEQ ID NO: 2411431 - DNA, 25 bp, Homo sapien
tttggctgttttattgcgatgcata

SEQ ID NO: 2411432 - DNA, 25 bp, Homo sapien
cataaacaaacagtgaagcaggctc

SEQ ID NO: 2411433 - DNA, 25 bp, Homo sapien
aacaaacagtgaagcaggctcaagg

SEQ ID NO: 2411434 - DNA, 25 bp, Homo sapien
taaacaaacagtgaagcaggctcaa

SEQ ID NO: 2411435 - DNA, 25 bp, Homo sapien
aacataaacaaacagtgaagcaggc

SEQ ID NO: 2411436 - DNA, 25 bp, Homo sapien
tgacttcctaactgcccaaaactga

SEQ ID NO: 2411437 - DNA, 25 bp, Homo sapien
caggaagacctgtttcctaggcaca

SEQ ID NO: 2411438 - DNA, 25 bp, Homo sapien
gaaacaagagctctttactaagcct

SEQ ID NO: 2411439 - DNA, 25 bp, Homo sapien
tccgcaaagcgctgcatgatccaaa

SEQ ID NO: 2411440 - DNA, 25 bp, Homo sapien
aaaacgtatcaatgccaattctggg

SEQ ID NO: 2411441 - DNA, 25 bp, Homo sapien
tgttcatgcatagaagtggcaaagt

SEQ ID NO: 2411442 - DNA, 25 bp, Homo sapien
tcctgctattaaaccttgaccttca

SEQ ID NO: 2411443 - DNA, 25 bp, Homo sapien
ttgaccttcaacaacaaaacgtatc

SEQ ID NO: 2411444 - DNA, 25 bp, Homo sapien
ctaattggctcatgctggaataatg

SEQ ID NO: 2411445 - DNA, 25 bp, Homo sapien
tctatggttcacctgtggtcacaag

SEQ ID NO: 2411446 - DNA, 25 bp, Homo sapien
tctatgcccacagaaatagtaaact

SEQ ID NO: 2411447 - DNA, 25 bp, Homo sapien
caatctagggtgcagtctatgccca

SEQ ID NO: 2411448 - DNA, 25 bp, Homo sapien
tcatttgatcatttggaacaccaaa

SEQ ID NO: 2411449 - DNA, 25 bp, Homo sapien
ttttttaattacacgagtctgctgc

SEQ ID NO: 2411450 - DNA, 25 bp, Homo sapien
taattacacgagtctgctgcttcat

SEQ ID NO: 2411451 - DNA, 25 bp, Homo sapien
catttgatcatttggaacaccaaaa

SEQ ID NO: 2411452 - DNA, 25 bp, Homo sapien
agaggcaactggataccactgatga

SEQ ID NO: 2411453 - DNA, 25 bp, Homo sapien
gaggcaactggataccactgatgag

SEQ ID NO: 2411454 - DNA, 25 bp, Homo sapien
gatgatgaatgagtaagaggcaact

SEQ ID NO: 2411455 - DNA, 25 bp, Homo sapien
tttgttagatgatgaatgagtaaga

SEQ ID NO: 2411456 - DNA, 25 bp, Homo sapien
tcaggatcattctagtcctggtcat

SEQ ID NO: 2411457 - DNA, 25 bp, Homo sapien
tggtcaggatcattctagtcctggt

SEQ ID NO: 2411458 - DNA, 25 bp, Homo sapien
caatggtcaggatcattctagtcct

SEQ ID NO: 2411459 - DNA, 25 bp, Homo sapien
cctgcaatggtcaggatcattctag

SEQ ID NO: 2411460 - DNA, 25 bp, Homo sapien
tcggtcaggctcaaccacaaggtgc

SEQ ID NO: 2411461 - DNA, 25 bp, Homo sapien
catgccatcgtgtctacatctgtgg

SEQ ID NO: 2411462 - DNA, 25 bp, Homo sapien
ccaagagacctatgcagatactggg

SEQ ID NO: 2411463 - DNA, 25 bp, Homo sapien
tgatggatgacatggatcccctggt

SEQ ID NO: 2411464 - DNA, 25 bp, Homo sapien
attgtgtttattgatgaaattgacg

SEQ ID NO: 2411465 - DNA, 25 bp, Homo sapien
cgtccattgtgtttattgatgaaat

SEQ ID NO: 2411466 - DNA, 25 bp, Homo sapien
tgtttattgatgaaattgacgccat

SEQ ID NO: 2411467 - DNA, 25 bp, Homo sapien
tgtgtttattgatgaaattgacgcc

SEQ ID NO: 2411468 - DNA, 25 bp, Homo sapien
ccttattgtaagtgtaattggcata

SEQ ID NO: 2411469 - DNA, 25 bp, Homo sapien
cttattgtaagtgtaattggcatac

SEQ ID NO: 2411470 - DNA, 25 bp, Homo sapien
cattttgcagatccatgggcagacc

SEQ ID NO: 2411471 - DNA, 25 bp, Homo sapien
ttgcagatccatgggcagaccaggg

SEQ ID NO: 2411472 - DNA, 25 bp, Homo sapien
tatgttacttgggttaaagtatgat

SEQ ID NO: 2411473 - DNA, 25 bp, Homo sapien
cccattttgcagatccatgggcaga

SEQ ID NO: 2411474 - DNA, 25 bp, Homo sapien
catttgacaacctatattccaaaat

SEQ ID NO: 2411475 - DNA, 25 bp, Homo sapien
atttgacaacctatattccaaaatt

SEQ ID NO: 2411476 - DNA, 25 bp, Homo sapien
ccatttgacaacctatattccaaaa

SEQ ID NO: 2411477 - DNA, 25 bp, Homo sapien
tttgacaacctatattccaaaattc

SEQ ID NO: 2411478 - DNA, 25 bp, Homo sapien
tcaatgcctattaaatccacaaagt

SEQ ID NO: 2411479 - DNA, 25 bp, Homo sapien
gtctgattaaccctaccctcttcaa

SEQ ID NO: 2411480 - DNA, 25 bp, Homo sapien
acagccatctggtagtccagcctgg

SEQ ID NO: 2411481 - DNA, 25 bp, Homo sapien
cataggcatagagcctccaagtctg

SEQ ID NO: 2411482 - DNA, 25 bp, Homo sapien
gaatttctcagctttcgtataaatg

SEQ ID NO: 2411483 - DNA, 25 bp, Homo sapien
gggcttgtgtctccccaatagaatt

SEQ ID NO: 2411484 - DNA, 25 bp, Homo sapien
tgaaagttttcgggcttgtgtctcc

SEQ ID NO: 2411485 - DNA, 25 bp, Homo sapien
tctcagctttcgtataaatgacaag

SEQ ID NO: 2411486 - DNA, 25 bp, Homo sapien
tgaaaagcattactccaggtaactt

SEQ ID NO: 2411487 - DNA, 25 bp, Homo sapien
tacccctgtttccttgtcttgattg

SEQ ID NO: 2411488 - DNA, 25 bp, Homo sapien
tttcttgaaaagcattactccaggt

SEQ ID NO: 2411489 - DNA, 25 bp, Homo sapien
ccctgtttccttgtcttgattgtct

SEQ ID NO: 2411490 - DNA, 25 bp, Homo sapien
taaaacagattccaatacttctgat

SEQ ID NO: 2411491 - DNA, 25 bp, Homo sapien
ccatctgccacttcttcttcccatt

SEQ ID NO: 2411492 - DNA, 25 bp, Homo sapien
gattccaatacttctgattctttga

SEQ ID NO: 2411493 - DNA, 25 bp, Homo sapien
tccaatacttctgattctttgaatt

SEQ ID NO: 2411494 - DNA, 25 bp, Homo sapien
atcagaaccttttctttcatgggtt

SEQ ID NO: 2411495 - DNA, 25 bp, Homo sapien
ttatcagaaccttttctttcatggg

SEQ ID NO: 2411496 - DNA, 25 bp, Homo sapien
gcttatcagaaccttttctttcatg

SEQ ID NO: 2411497 - DNA, 25 bp, Homo sapien
cacgcttatcagaaccttttctttc

SEQ ID NO: 2411498 - DNA, 25 bp, Homo sapien
ctgagtttctcagaaaaaaatgtta

SEQ ID NO: 2411499 - DNA, 25 bp, Homo sapien
tgagtttctcagaaaaaaatgttac

SEQ ID NO: 2411500 - DNA, 25 bp, Homo sapien
ccattacttcttgttgggcagtgga

SEQ ID NO: 2411501 - DNA, 25 bp, Homo sapien
ctctggtgatggtagagtatcagga

SEQ ID NO: 2411502 - DNA, 25 bp, Homo sapien
aaagtagcctgcaaattgtctgcca

SEQ ID NO: 2411503 - DNA, 25 bp, Homo sapien
ggtgatggtagagtatcaggaaaat

SEQ ID NO: 2411504 - DNA, 25 bp, Homo sapien
aaagagagcaccactgggtagtcag

SEQ ID NO: 2411505 - DNA, 25 bp, Homo sapien
aagagagcaccactgggtagtcaga

SEQ ID NO: 2411506 - DNA, 25 bp, Homo sapien
agagcaccactgggtagtcagatgt

SEQ ID NO: 2411507 - DNA, 25 bp, Homo sapien
ctaaagagagcaccactgggtagtc

SEQ ID NO: 2411508 - DNA, 25 bp, Homo sapien
gaagtttgcttgtgagtgtgtagcc

SEQ ID NO: 2411509 - DNA, 25 bp, Homo sapien
tgtgtatagcttggataacagtttt

SEQ ID NO: 2411510 - DNA, 25 bp, Homo sapien
cagcagtcaatctccaaacaacggc

SEQ ID NO: 2411511 - DNA, 25 bp, Homo sapien
gccatgatatacaacaggttcattt

SEQ ID NO: 2411512 - DNA, 25 bp, Homo sapien
ttctgctgatatctaaaactgggcc

SEQ ID NO: 2411513 - DNA, 25 bp, Homo sapien
tctgctgatatctaaaactgggcct

SEQ ID NO: 2411514 - DNA, 25 bp, Homo sapien
tggttttccactgggacgactttgc

SEQ ID NO: 2411515 - DNA, 25 bp, Homo sapien
cccatgtctacaggctactggtttt

SEQ ID NO: 2411516 - DNA, 25 bp, Homo sapien
cactgggacgactttgcctcacagg

SEQ ID NO: 2411517 - DNA, 25 bp, Homo sapien
tcggctgccacaactggagataggg

SEQ ID NO: 2411518 - DNA, 25 bp, Homo sapien
catactaagcatgtgtcttccaaag

SEQ ID NO: 2411519 - DNA, 25 bp, Homo sapien
tatgccactagtcacaaggaaaaat

SEQ ID NO: 2411520 - DNA, 25 bp, Homo sapien
aatatgagcactagaaacttaaaca

SEQ ID NO: 2411521 - DNA, 25 bp, Homo sapien
tgaggaaatcgagatacacaatggt

SEQ ID NO: 2411522 - DNA, 25 bp, Homo sapien
ccaaatatgtgttatgtgaagatga

SEQ ID NO: 2411523 - DNA, 25 bp, Homo sapien
taaacagtagacattcacgtgaatc

SEQ ID NO: 2411524 - DNA, 25 bp, Homo sapien
tggatgagtcatatcttgataaact

SEQ ID NO: 2411525 - DNA, 25 bp, Homo sapien
tggtcccaataattgatcagatacc

SEQ ID NO: 2411526 - DNA, 25 bp, Homo sapien
ctaatgacatttggtgtgctttcct

SEQ ID NO: 2411527 - DNA, 25 bp, Homo sapien
aatgacatttggtgtgctttcctaa

SEQ ID NO: 2411528 - DNA, 25 bp, Homo sapien
taatgacatttggtgtgctttccta

SEQ ID NO: 2411529 - DNA, 25 bp, Homo sapien
tgaatgatctcaaaagcaatagctt

SEQ ID NO: 2411530 - DNA, 25 bp, Homo sapien
tctgaatgatctcaaaagcaatagc

SEQ ID NO: 2411531 - DNA, 25 bp, Homo sapien
ttcttcgataggctcgtatttctga

SEQ ID NO: 2411532 - DNA, 25 bp, Homo sapien
cgataggctcgtatttctgaatgat

SEQ ID NO: 2411533 - DNA, 25 bp, Homo sapien
ctcagctgcatattgttcttgtgtc

SEQ ID NO: 2411534 - DNA, 25 bp, Homo sapien
tcttctctgtgcgtgataattcgat

SEQ ID NO: 2411535 - DNA, 25 bp, Homo sapien
tgtgtcagaaattgagccagattac

SEQ ID NO: 2411536 - DNA, 25 bp, Homo sapien
gagccagattacttgctaaaagaat

SEQ ID NO: 2411537 - DNA, 25 bp, Homo sapien
taaaaaaatgactggtgggctcaca

SEQ ID NO: 2411538 - DNA, 25 bp, Homo sapien
ctaaaaaaatgactggtgggctcac

SEQ ID NO: 2411539 - DNA, 25 bp, Homo sapien
ccccaactgtattgtgtagcatcca

SEQ ID NO: 2411540 - DNA, 25 bp, Homo sapien
aaaccccaactgtattgtgtagcat

SEQ ID NO: 2411541 - DNA, 25 bp, Homo sapien
aaccccaactgtattgtgtagcatc

SEQ ID NO: 2411542 - DNA, 25 bp, Homo sapien
aaaaccccaactgtattgtgtagca

SEQ ID NO: 2411543 - DNA, 25 bp, Homo sapien
gacattggattaagttccacctagg

SEQ ID NO: 2411544 - DNA, 25 bp, Homo sapien
tacagttaccattatcagtctgata

SEQ ID NO: 2411545 - DNA, 25 bp, Homo sapien
tataattagacatccaatcctaggt

SEQ ID NO: 2411546 - DNA, 25 bp, Homo sapien
tattctaaactgatatcctggtatt

SEQ ID NO: 2411547 - DNA, 25 bp, Homo sapien
tgaatataactgcaccgaatatcta

SEQ ID NO: 2411548 - DNA, 25 bp, Homo sapien
aactgcaccgaatatctaatttttc

SEQ ID NO: 2411549 - DNA, 25 bp, Homo sapien
tcaagtaacctctgagttttttcta

SEQ ID NO: 2411550 - DNA, 25 bp, Homo sapien
tttttccacctctgaagtcatcctg

SEQ ID NO: 2411551 - DNA, 25 bp, Homo sapien
cacttagaagtctttccccagtagg

SEQ ID NO: 2411552 - DNA, 25 bp, Homo sapien
tacaattaactctgcccctttgcag

SEQ ID NO: 2411553 - DNA, 25 bp, Homo sapien
tccaaatacaattaactctgcccct

SEQ ID NO: 2411554 - DNA, 25 bp, Homo sapien
agccgtttctcctcacttagaagtc

SEQ ID NO: 2411555 - DNA, 25 bp, Homo sapien
tgaccacctccaaacccacaatatt

SEQ ID NO: 2411556 - DNA, 25 bp, Homo sapien
ttctgaccacctccaaacccacaat

SEQ ID NO: 2411557 - DNA, 25 bp, Homo sapien
aaacacagctttccctgatgtctgg

SEQ ID NO: 2411558 - DNA, 25 bp, Homo sapien
ttccctgatgtctggcatttttcca

SEQ ID NO: 2411559 - DNA, 25 bp, Homo sapien
ggtatagctggttggctgggcacca

SEQ ID NO: 2411560 - DNA, 25 bp, Homo sapien
aaagaggtatagctggttggctggg

SEQ ID NO: 2411561 - DNA, 25 bp, Homo sapien
aggtatagctggttggctgggcacc

SEQ ID NO: 2411562 - DNA, 25 bp, Homo sapien
agaggtatagctggttggctgggca

SEQ ID NO: 2411563 - DNA, 25 bp, Homo sapien
ggcactggcctttgtaatgaaggta

SEQ ID NO: 2411564 - DNA, 25 bp, Homo sapien
cttcccaagtaggagattgtttctc

SEQ ID NO: 2411565 - DNA, 25 bp, Homo sapien
aatccacgaatgtgatatagctctc

SEQ ID NO: 2411566 - DNA, 25 bp, Homo sapien
tctcatttcactgttaggctggctg

SEQ ID NO: 2411567 - DNA, 25 bp, Homo sapien
ctgacactcaccagtccagataggg

SEQ ID NO: 2411568 - DNA, 25 bp, Homo sapien
tcccttgccatggagcactgcgtgt

SEQ ID NO: 2411569 - DNA, 25 bp, Homo sapien
tgcgtgtttccaaagaccctcacct

SEQ ID NO: 2411570 - DNA, 25 bp, Homo sapien
ccatggagcactgcgtgtttccaaa

SEQ ID NO: 2411571 - DNA, 25 bp, Homo sapien
tgtggagacgcggtggctgctctcg

SEQ ID NO: 2411572 - DNA, 25 bp, Homo sapien
gcctttacatggatacagactactg

SEQ ID NO: 2411573 - DNA, 25 bp, Homo sapien
tctttcaactggtccacgtagcctt

SEQ ID NO: 2411574 - DNA, 25 bp, Homo sapien
cagactactgattccataaatagag

SEQ ID NO: 2411575 - DNA, 25 bp, Homo sapien
ggccaaatcagcaccagaatgagtc

SEQ ID NO: 2411576 - DNA, 25 bp, Homo sapien
gacctcggatatcttgttgcttgcc

SEQ ID NO: 2411577 - DNA, 25 bp, Homo sapien
tgaagagtgactgagagtgacctcg

SEQ ID NO: 2411578 - DNA, 25 bp, Homo sapien
gacacagctgccttcgggttcttag

SEQ ID NO: 2411579 - DNA, 25 bp, Homo sapien
aaagatgtctttcccatatgtccca

SEQ ID NO: 2411580 - DNA, 25 bp, Homo sapien
gtgagccctgaagtagatgctgaag

SEQ ID NO: 2411581 - DNA, 25 bp, Homo sapien
tgtcccatgacggttcttcttttct

SEQ ID NO: 2411582 - DNA, 25 bp, Homo sapien
gaagaacatctttgctatacgctca

SEQ ID NO: 2411583 - DNA, 25 bp, Homo sapien
caggttcttgtaccacataagggag

SEQ ID NO: 2411584 - DNA, 25 bp, Homo sapien
taagtagcaactcatgtaggaaagg

SEQ ID NO: 2411585 - DNA, 25 bp, Homo sapien
gacggtccccatctatagtcaagct

SEQ ID NO: 2411586 - DNA, 25 bp, Homo sapien
gatggccactatgaagtctgacggt

SEQ ID NO: 2411587 - DNA, 25 bp, Homo sapien
gctcactataccagtaatgcctttg

SEQ ID NO: 2411588 - DNA, 25 bp, Homo sapien
tctgcacacagcgtcatgaaggctc

SEQ ID NO: 2411589 - DNA, 25 bp, Homo sapien
gagacacagggtgcctcactcttgg

SEQ ID NO: 2411590 - DNA, 25 bp, Homo sapien
cctctgctctctgacgaatgcttgc

SEQ ID NO: 2411591 - DNA, 25 bp, Homo sapien
tctgctgttgcagggagcagacctg

SEQ ID NO: 2411592 - DNA, 25 bp, Homo sapien
tgggtcgttttttcaggatactcta

SEQ ID NO: 2411593 - DNA, 25 bp, Homo sapien
aggatactctatgtggactctgctg

SEQ ID NO: 2411594 - DNA, 25 bp, Homo sapien
atttttaaaggatttgcctctggat

SEQ ID NO: 2411595 - DNA, 25 bp, Homo sapien
tttactacctgaatcttcccacagt

SEQ ID NO: 2411596 - DNA, 25 bp, Homo sapien
cctgttgcctagtaaaagacttata

SEQ ID NO: 2411597 - DNA, 25 bp, Homo sapien
cagttttcaaaacgtggcatttgca

SEQ ID NO: 2411598 - DNA, 25 bp, Homo sapien
cctgaaactttgtcttgcagttttc

SEQ ID NO: 2411599 - DNA, 25 bp, Homo sapien
tcacttctaataaacttctctcctt

SEQ ID NO: 2411600 - DNA, 25 bp, Homo sapien
caatcacttctaataaacttctctc

SEQ ID NO: 2411601 - DNA, 25 bp, Homo sapien
aatcacttctaataaacttctctcc

SEQ ID NO: 2411602 - DNA, 25 bp, Homo sapien
tcaatcacttctaataaacttctct

SEQ ID NO: 2411603 - DNA, 25 bp, Homo sapien
aggccccgagagatgtagcagaaga

SEQ ID NO: 2411604 - DNA, 25 bp, Homo sapien
ttgtccccaacatagaggccccgag

SEQ ID NO: 2411605 - DNA, 25 bp, Homo sapien
tgagaagcaaagagatatgaggaat

SEQ ID NO: 2411606 - DNA, 25 bp, Homo sapien
aatgatgtactgcaagactttctcc

SEQ ID NO: 2411607 - DNA, 25 bp, Homo sapien
tctatagctacagagcagtgggaat

SEQ ID NO: 2411608 - DNA, 25 bp, Homo sapien
catcttccacattggaatattatta

SEQ ID NO: 2411609 - DNA, 25 bp, Homo sapien
gacaggaaacctattgaaacacacc

SEQ ID NO: 2411610 - DNA, 25 bp, Homo sapien
tagaatttttcatacactcagcttc

SEQ ID NO: 2411611 - DNA, 25 bp, Homo sapien
tgttctccgatagctccctttccat

SEQ ID NO: 2411612 - DNA, 25 bp, Homo sapien
ctatctccttttgtgcttgcatgac

SEQ ID NO: 2411613 - DNA, 25 bp, Homo sapien
tcctacttcctcagcacgggggaat

SEQ ID NO: 2411614 - DNA, 25 bp, Homo sapien
gcatgacaactgcattcctacttcc

SEQ ID NO: 2411615 - DNA, 25 bp, Homo sapien
tcagcacgggggaattctgtcccca

SEQ ID NO: 2411616 - DNA, 25 bp, Homo sapien
ctgctttcaagtttgatccaacaaa

SEQ ID NO: 2411617 - DNA, 25 bp, Homo sapien
gctgtgccggaccactttttggcat

SEQ ID NO: 2411618 - DNA, 25 bp, Homo sapien
agtttgatccaacaaacagctggca

SEQ ID NO: 2411619 - DNA, 25 bp, Homo sapien
gctggcaagctagggcttttgagaa

SEQ ID NO: 2411620 - DNA, 25 bp, Homo sapien
tcacttattctgtttgagtcctcga

SEQ ID NO: 2411621 - DNA, 25 bp, Homo sapien
tgagctggcttaaagctccgacttc

SEQ ID NO: 2411622 - DNA, 25 bp, Homo sapien
gctggcttaaagctccgacttctct

SEQ ID NO: 2411623 - DNA, 25 bp, Homo sapien
ttgagtcctcgatcctgctccatct

SEQ ID NO: 2411624 - DNA, 25 bp, Homo sapien
tggcaaaggaaatttcagaagaccc

SEQ ID NO: 2411625 - DNA, 25 bp, Homo sapien
ttggcaaaggaaatttcagaagacc

SEQ ID NO: 2411626 - DNA, 25 bp, Homo sapien
ctttggcaaaggaaatttcagaaga

SEQ ID NO: 2411627 - DNA, 25 bp, Homo sapien
gcaaaggaaatttcagaagacccat

SEQ ID NO: 2411628 - DNA, 25 bp, Homo sapien
tacccttgatagagattgtgactca

SEQ ID NO: 2411629 - DNA, 25 bp, Homo sapien
taatagcttaccttgttgtctcaga

SEQ ID NO: 2411630 - DNA, 25 bp, Homo sapien
acaaatgccctgtctaagcacaaag

SEQ ID NO: 2411631 - DNA, 25 bp, Homo sapien
gaatattattagagaccccaaggta

SEQ ID NO: 2411632 - DNA, 25 bp, Homo sapien
tctgtcttagagttaacaggtgtaa

SEQ ID NO: 2411633 - DNA, 25 bp, Homo sapien
ccatttgtaatgactcacttggctc

SEQ ID NO: 2411634 - DNA, 25 bp, Homo sapien
taaagatatccctagtcagagatta

SEQ ID NO: 2411635 - DNA, 25 bp, Homo sapien
gaagcacaaccatgtcaaagctaaa

SEQ ID NO: 2411636 - DNA, 25 bp, Homo sapien
atttgtcgtcagaatcagaggtgtc

SEQ ID NO: 2411637 - DNA, 25 bp, Homo sapien
acaggtctcccatcgtttgtgagga

SEQ ID NO: 2411638 - DNA, 25 bp, Homo sapien
gaaaggagctttcagcggtagagaa

SEQ ID NO: 2411639 - DNA, 25 bp, Homo sapien
tttctctaaatagggaggcttaaga

SEQ ID NO: 2411640 - DNA, 25 bp, Homo sapien
aatcaccacagataaaaccaatatg

SEQ ID NO: 2411641 - DNA, 25 bp, Homo sapien
tgatggcccgtttgagcagaccttc

SEQ ID NO: 2411642 - DNA, 25 bp, Homo sapien
gaccttccacgctgcagaagtagac

SEQ ID NO: 2411643 - DNA, 25 bp, Homo sapien
aagtagacgctgctgtccaccaggt

SEQ ID NO: 2411644 - DNA, 25 bp, Homo sapien
ctatggtctcggatgctgatggccc

SEQ ID NO: 2411645 - DNA, 25 bp, Homo sapien
ggcgcggcaggcgtactccacggtg

SEQ ID NO: 2411646 - DNA, 25 bp, Homo sapien
acggcgcggcaggcgtactccacgg

SEQ ID NO: 2411647 - DNA, 25 bp, Homo sapien
gcggcaggcgtactccacggtgtag

SEQ ID NO: 2411648 - DNA, 25 bp, Homo sapien
cgcggcaggcgtactccacggtgta

SEQ ID NO: 2411649 - DNA, 25 bp, Homo sapien
gctccggggagggagtggcgcatgt

SEQ ID NO: 2411650 - DNA, 25 bp, Homo sapien
ccagctccggggagggagtggcgca

SEQ ID NO: 2411651 - DNA, 25 bp, Homo sapien
cggggagggagtggcgcatgtgctc

SEQ ID NO: 2411652 - DNA, 25 bp, Homo sapien
tccggggagggagtggcgcatgtgc

SEQ ID NO: 2411653 - DNA, 25 bp, Homo sapien
tgcagccggtacggggccacagaca

SEQ ID NO: 2411654 - DNA, 25 bp, Homo sapien
gcagccggtacggggccacagacag

SEQ ID NO: 2411655 - DNA, 25 bp, Homo sapien
cagtgaatttgtccgtgactttttt

SEQ ID NO: 2411656 - DNA, 25 bp, Homo sapien
taaacaatgacggtcagggagtaaa

SEQ ID NO: 2411657 - DNA, 25 bp, Homo sapien
ccagggctgtttataggtagcaaaa

SEQ ID NO: 2411658 - DNA, 25 bp, Homo sapien
tatttcatgagcatatattggagca

SEQ ID NO: 2411659 - DNA, 25 bp, Homo sapien
gcaaaagtgatgtaaagctaggcac

SEQ ID NO: 2411660 - DNA, 25 bp, Homo sapien
gatacttagataaaacgtcaagggc

SEQ ID NO: 2411661 - DNA, 25 bp, Homo sapien
ttttataagtattaggaatgcttgc

SEQ ID NO: 2411662 - DNA, 25 bp, Homo sapien
cagatacctagctaaagttaccttt

SEQ ID NO: 2411663 - DNA, 25 bp, Homo sapien
taagatcatgttatacttccagtaa

SEQ ID NO: 2411664 - DNA, 25 bp, Homo sapien
cctgctcagagtggtttagaaatgt

SEQ ID NO: 2411665 - DNA, 25 bp, Homo sapien
atggcctgctcagagtggtttagaa

SEQ ID NO: 2411666 - DNA, 25 bp, Homo sapien
tatatagattttacacctcttgaaa

SEQ ID NO: 2411667 - DNA, 25 bp, Homo sapien
ttacacctcttgaaagtaggaactg

SEQ ID NO: 2411668 - DNA, 25 bp, Homo sapien
aaggcagtcacaaggtcagttcaga

SEQ ID NO: 2411669 - DNA, 25 bp, Homo sapien
tcaaagatctaagcctggaacctgg

SEQ ID NO: 2411670 - DNA, 25 bp, Homo sapien
ttacagaggccgtgactcatttggc

SEQ ID NO: 2411671 - DNA, 25 bp, Homo sapien
tgtggacatgtgtgggatgaccctc

SEQ ID NO: 2411672 - DNA, 25 bp, Homo sapien
tatggcctcatcgtgcatgtatttg

SEQ ID NO: 2411673 - DNA, 25 bp, Homo sapien
aaatgcatgcatttaggttaagcat

SEQ ID NO: 2411674 - DNA, 25 bp, Homo sapien
catgtatttggtatgaactctgata

SEQ ID NO: 2411675 - DNA, 25 bp, Homo sapien
tctacttgtcacatctgagactgtt

SEQ ID NO: 2411676 - DNA, 25 bp, Homo sapien
cagttttaaattggcagtgataggc

SEQ ID NO: 2411677 - DNA, 25 bp, Homo sapien
tcagttttaaattggcagtgatagg

SEQ ID NO: 2411678 - DNA, 25 bp, Homo sapien
atcagttttaaattggcagtgatag

SEQ ID NO: 2411679 - DNA, 25 bp, Homo sapien
taatcagttttaaattggcagtgat

SEQ ID NO: 2411680 - DNA, 25 bp, Homo sapien
ccctggcacctatgcaaagatcagt

SEQ ID NO: 2411681 - DNA, 25 bp, Homo sapien
tggcacctatgcaaagatcagtggc

SEQ ID NO: 2411682 - DNA, 25 bp, Homo sapien
cctggcacctatgcaaagatcagtg

SEQ ID NO: 2411683 - DNA, 25 bp, Homo sapien
gcacctatgcaaagatcagtggctg

SEQ ID NO: 2411684 - DNA, 25 bp, Homo sapien
tgggccacagtctcttggacttgga

SEQ ID NO: 2411685 - DNA, 25 bp, Homo sapien
tctgggccattaccgataacttgca

SEQ ID NO: 2411686 - DNA, 25 bp, Homo sapien
tctgattcccgactcaatggtgtgc

SEQ ID NO: 2411687 - DNA, 25 bp, Homo sapien
ccaggtcaagatttaattgggccac

SEQ ID NO: 2411688 - DNA, 25 bp, Homo sapien
ggaggatgactgtgccacagaccct

SEQ ID NO: 2411689 - DNA, 25 bp, Homo sapien
ttgggaggatgactgtgccacagac

SEQ ID NO: 2411690 - DNA, 25 bp, Homo sapien
aggatgactgtgccacagaccctac

SEQ ID NO: 2411691 - DNA, 25 bp, Homo sapien
tgggaggatgactgtgccacagacc

SEQ ID NO: 2411692 - DNA, 25 bp, Homo sapien
ccacagttgtaaaactcttgtttat

SEQ ID NO: 2411693 - DNA, 25 bp, Homo sapien
acagttgtaaaactcttgtttatag

SEQ ID NO: 2411694 - DNA, 25 bp, Homo sapien
gtttatagttgtagtctgttaccat

SEQ ID NO: 2411695 - DNA, 25 bp, Homo sapien
ctcttgtttatagttgtagtctgtt

SEQ ID NO: 2411696 - DNA, 25 bp, Homo sapien
tagcatgctgcagcccggaactttt

SEQ ID NO: 2411697 - DNA, 25 bp, Homo sapien
gggcacaatccctctagtgatcaga

SEQ ID NO: 2411698 - DNA, 25 bp, Homo sapien
agtgtagtgctgttcgcgggcacaa

SEQ ID NO: 2411699 - DNA, 25 bp, Homo sapien
gccttattatatgccgaggctggag

SEQ ID NO: 2411700 - DNA, 25 bp, Homo sapien
tggcaaccaaatattcagagtcttc

SEQ ID NO: 2411701 - DNA, 25 bp, Homo sapien
tactctgctagagataaaccattat

SEQ ID NO: 2411702 - DNA, 25 bp, Homo sapien
gaatttgaggctataaggtgcttta

SEQ ID NO: 2411703 - DNA, 25 bp, Homo sapien
tttataataggtgaacttggcaacc

SEQ ID NO: 2411704 - DNA, 25 bp, Homo sapien
gtgggttttgctcttacatggtata

SEQ ID NO: 2411705 - DNA, 25 bp, Homo sapien
acatggtataaaccagttttctgca

SEQ ID NO: 2411706 - DNA, 25 bp, Homo sapien
tggtataaaccagttttctgcattt

SEQ ID NO: 2411707 - DNA, 25 bp, Homo sapien
gttttgctcttacatggtataaacc

SEQ ID NO: 2411708 - DNA, 25 bp, Homo sapien
tttgtagactaatgttacaataaat

SEQ ID NO: 2411709 - DNA, 25 bp, Homo sapien
cctttgtagactaatgttacaataa

SEQ ID NO: 2411710 - DNA, 25 bp, Homo sapien
tttcctttgtagactaatgttacaa

SEQ ID NO: 2411711 - DNA, 25 bp, Homo sapien
tcctttgtagactaatgttacaata

SEQ ID NO: 2411712 - DNA, 25 bp, Homo sapien
gggtcaagtgtcttcatgtctgtgc

SEQ ID NO: 2411713 - DNA, 25 bp, Homo sapien
gaacatgtcagaatgctaataattg

SEQ ID NO: 2411714 - DNA, 25 bp, Homo sapien
caaatggttctagataaaatgaaca

SEQ ID NO: 2411715 - DNA, 25 bp, Homo sapien
aatataattatggatgtcctggtga

SEQ ID NO: 2411716 - DNA, 25 bp, Homo sapien
gattctgtaatctagtaaagctgtt

SEQ ID NO: 2411717 - DNA, 25 bp, Homo sapien
catcttagtagcttatgacttttca

SEQ ID NO: 2411718 - DNA, 25 bp, Homo sapien
ttaagcaaactacggctgggcgtgg

SEQ ID NO: 2411719 - DNA, 25 bp, Homo sapien
tggaattttggcattgtcttacttt

SEQ ID NO: 2411720 - DNA, 25 bp, Homo sapien
atggagtctcgctctctcgcctggg

SEQ ID NO: 2411721 - DNA, 25 bp, Homo sapien
ctctcgcctgggctggagtgcagtg

SEQ ID NO: 2411722 - DNA, 25 bp, Homo sapien
ctgcctcccgggttcacaccatcct

SEQ ID NO: 2411723 - DNA, 25 bp, Homo sapien
gcgtgatttcagctcactgcaaact

SEQ ID NO: 2411724 - DNA, 25 bp, Homo sapien
gttggttccatacccttggagttgc

SEQ ID NO: 2411725 - DNA, 25 bp, Homo sapien
tccatacccttggagttgcaaattg

SEQ ID NO: 2411726 - DNA, 25 bp, Homo sapien
ccttggttggtggactcttaggttg

SEQ ID NO: 2411727 - DNA, 25 bp, Homo sapien
tggttccatacccttggagttgcaa

SEQ ID NO: 2411728 - DNA, 25 bp, Homo sapien
gattgcaatgtcagcagttactgcc

SEQ ID NO: 2411729 - DNA, 25 bp, Homo sapien
ccagcttgctgctatgatttcagag

SEQ ID NO: 2411730 - DNA, 25 bp, Homo sapien
tcttcccattttagctactgcagtg

SEQ ID NO: 2411731 - DNA, 25 bp, Homo sapien
ttaatggcccatatgtacacttcgt

SEQ ID NO: 2411732 - DNA, 25 bp, Homo sapien
aatggggtcacccacaacttcatca

SEQ ID NO: 2411733 - DNA, 25 bp, Homo sapien
gttgtgcagcaatgatccctccact

SEQ ID NO: 2411734 - DNA, 25 bp, Homo sapien
ccagttgtgcagcaatgatccctcc

SEQ ID NO: 2411735 - DNA, 25 bp, Homo sapien
tgcagcaatgatccctccacttcta

SEQ ID NO: 2411736 - DNA, 25 bp, Homo sapien
ttcaaatacaggcaacatttcttcc

SEQ ID NO: 2411737 - DNA, 25 bp, Homo sapien
atacaggcaacatttcttccatcat

SEQ ID NO: 2411738 - DNA, 25 bp, Homo sapien
aaatacaggcaacatttcttccatc

SEQ ID NO: 2411739 - DNA, 25 bp, Homo sapien
cggggggccaggagattcaaataca

SEQ ID NO: 2411740 - DNA, 25 bp, Homo sapien
gggatgtccttcttacaggttgact

SEQ ID NO: 2411741 - DNA, 25 bp, Homo sapien
ttaagggtgatattgttggtcagat

SEQ ID NO: 2411742 - DNA, 25 bp, Homo sapien
ggaagctaaaccagacatcgccagt

SEQ ID NO: 2411743 - DNA, 25 bp, Homo sapien
tggaggagggtcccatacccagcca

SEQ ID NO: 2411744 - DNA, 25 bp, Homo sapien
aaatgtggcagctatgctattcacc

SEQ ID NO: 2411745 - DNA, 25 bp, Homo sapien
actaactggtattgtgacttgtatg

SEQ ID NO: 2411746 - DNA, 25 bp, Homo sapien
aataatcgagagagttttgaacatc

SEQ ID NO: 2411747 - DNA, 25 bp, Homo sapien
accttcccagggatttgatggataa

SEQ ID NO: 2411748 - DNA, 25 bp, Homo sapien
gcagcgacgagacccgctcgttgag

SEQ ID NO: 2411749 - DNA, 25 bp, Homo sapien
ggagcagcagcgacgagacccgctc

SEQ ID NO: 2411750 - DNA, 25 bp, Homo sapien
gcagcagcgacgagacccgctcgtt

SEQ ID NO: 2411751 - DNA, 25 bp, Homo sapien
gcgggagcagcagcgacgagacccg

SEQ ID NO: 2411752 - DNA, 25 bp, Homo sapien
gtcagtgctctgaagcgtttcccct

SEQ ID NO: 2411753 - DNA, 25 bp, Homo sapien
ccctgagccgcatggactcggagga

SEQ ID NO: 2411754 - DNA, 25 bp, Homo sapien
gaccaaggcgacgttttgccgcgat

SEQ ID NO: 2411755 - DNA, 25 bp, Homo sapien
tagcagcagcgtagtctccagcggc

SEQ ID NO: 2411756 - DNA, 25 bp, Homo sapien
tttctgttaaagagcgctgtgaact

SEQ ID NO: 2411757 - DNA, 25 bp, Homo sapien
ccagacctggcgcaaatcttaatat

SEQ ID NO: 2411758 - DNA, 25 bp, Homo sapien
tatatgaaagtactcttggccaggc

SEQ ID NO: 2411759 - DNA, 25 bp, Homo sapien
catccacgttgcttgaatgcgtgca

SEQ ID NO: 2411760 - DNA, 25 bp, Homo sapien
caagtttatcatatatgttgctgaa

SEQ ID NO: 2411761 - DNA, 25 bp, Homo sapien
tctgtattgttccaagtttatcata

SEQ ID NO: 2411762 - DNA, 25 bp, Homo sapien
ttccaagtttatcatatatgttgct

SEQ ID NO: 2411763 - DNA, 25 bp, Homo sapien
tgtattgttccaagtttatcatata

SEQ ID NO: 2411764 - DNA, 25 bp, Homo sapien
gctctcaaaattccttgacaaattt

SEQ ID NO: 2411765 - DNA, 25 bp, Homo sapien
gcagcgcgacccagaggtgggtagt

SEQ ID NO: 2411766 - DNA, 25 bp, Homo sapien
cagcgcgacccagaggtgggtagtc

SEQ ID NO: 2411767 - DNA, 25 bp, Homo sapien
gcgcgacccagaggtgggtagtctg

SEQ ID NO: 2411768 - DNA, 25 bp, Homo sapien
cagcagcgcgacccagaggtgggta

SEQ ID NO: 2411769 - DNA, 25 bp, Homo sapien
tcaccagagttcaagaagttagggc

SEQ ID NO: 2411770 - DNA, 25 bp, Homo sapien
cagagttcaagaagttagggccatc

SEQ ID NO: 2411771 - DNA, 25 bp, Homo sapien
aacgttggcagcatcaccagagttc

SEQ ID NO: 2411772 - DNA, 25 bp, Homo sapien
gcagcatcaccagagttcaagaagt

SEQ ID NO: 2411773 - DNA, 25 bp, Homo sapien
ccagcacttatttggcctggaaggt

SEQ ID NO: 2411774 - DNA, 25 bp, Homo sapien
gtacaggggcatagccagcacttat

SEQ ID NO: 2411775 - DNA, 25 bp, Homo sapien
caacatggcgatccatcttttcctt

SEQ ID NO: 2411776 - DNA, 25 bp, Homo sapien
tagccagcacttatttggcctggaa

SEQ ID NO: 2411777 - DNA, 25 bp, Homo sapien
gcatcattgccatgacgaacatcct

SEQ ID NO: 2411778 - DNA, 25 bp, Homo sapien
cagcatcattgccatgacgaacatc

SEQ ID NO: 2411779 - DNA, 25 bp, Homo sapien
tcattgccatgacgaacatccttga

SEQ ID NO: 2411780 - DNA, 25 bp, Homo sapien
atcattgccatgacgaacatccttg

SEQ ID NO: 2411781 - DNA, 25 bp, Homo sapien
aggcaggcaaaggggcttgttagtt

SEQ ID NO: 2411782 - DNA, 25 bp, Homo sapien
ttacaggaggattttcgtcccttga

SEQ ID NO: 2411783 - DNA, 25 bp, Homo sapien
cttacaggaggattttcgtcccttg

SEQ ID NO: 2411784 - DNA, 25 bp, Homo sapien
ttccttaacaatttcctcatatctc

SEQ ID NO: 2411785 - DNA, 25 bp, Homo sapien
ccttaacaatttcctcatatctctt

SEQ ID NO: 2411786 - DNA, 25 bp, Homo sapien
ttaacaatttcctcatatctcttct

SEQ ID NO: 2411787 - DNA, 25 bp, Homo sapien
taacaatttcctcatatctcttctg

SEQ ID NO: 2411788 - DNA, 25 bp, Homo sapien
tttcacacccagtgtgtaagccaaa

SEQ ID NO: 2411789 - DNA, 25 bp, Homo sapien
caccgacaattagttgtttcacacc

SEQ ID NO: 2411790 - DNA, 25 bp, Homo sapien
acacccagtgtgtaagccaaaaggg

SEQ ID NO: 2411791 - DNA, 25 bp, Homo sapien
acccagtgtgtaagccaaaagggca

SEQ ID NO: 2411792 - DNA, 25 bp, Homo sapien
ctaggtttgtccattcttggagata

SEQ ID NO: 2411793 - DNA, 25 bp, Homo sapien
taggtttgtccattcttggagatac

SEQ ID NO: 2411794 - DNA, 25 bp, Homo sapien
attcaccaacactggcagcaacaat

SEQ ID NO: 2411795 - DNA, 25 bp, Homo sapien
aaattcaccaacactggcagcaaca

SEQ ID NO: 2411796 - DNA, 25 bp, Homo sapien
accaacactggcagcaacaatcagg

SEQ ID NO: 2411797 - DNA, 25 bp, Homo sapien
tcaccaacactggcagcaacaatca

SEQ ID NO: 2411798 - DNA, 25 bp, Homo sapien
gtttttgatgaagtctctgtggtta

SEQ ID NO: 2411799 - DNA, 25 bp, Homo sapien
gatgaagtctctgtggttaagtctc

SEQ ID NO: 2411800 - DNA, 25 bp, Homo sapien
tttgatgaagtctctgtggttaagt

SEQ ID NO: 2411801 - DNA, 25 bp, Homo sapien
tgaagtctctgtggttaagtctctg

SEQ ID NO: 2411802 - DNA, 25 bp, Homo sapien
atgatagtcacgtagcacttgctgt

SEQ ID NO: 2411803 - DNA, 25 bp, Homo sapien
agtcacgtagcacttgctgttctca

SEQ ID NO: 2411804 - DNA, 25 bp, Homo sapien
gatagtcacgtagcacttgctgttc

SEQ ID NO: 2411805 - DNA, 25 bp, Homo sapien
tagtcacgtagcacttgctgttctc

SEQ ID NO: 2411806 - DNA, 25 bp, Homo sapien
ttgatgctaccacatttgtagttca

SEQ ID NO: 2411807 - DNA, 25 bp, Homo sapien
ttgttgatgctaccacatttgtagt

SEQ ID NO: 2411808 - DNA, 25 bp, Homo sapien
ggttcttttgttgatgctaccacat

SEQ ID NO: 2411809 - DNA, 25 bp, Homo sapien
ggacttgtacgaatctacgtgtcca

SEQ ID NO: 2411810 - DNA, 25 bp, Homo sapien
tgttcatgtggacttctttggaggc

SEQ ID NO: 2411811 - DNA, 25 bp, Homo sapien
gaagtcaagtggagtttagattttc

SEQ ID NO: 2411812 - DNA, 25 bp, Homo sapien
ccattatatatccacttagcattgt

SEQ ID NO: 2411813 - DNA, 25 bp, Homo sapien
ctggagcagtaagttagcaagatct

SEQ ID NO: 2411814 - DNA, 25 bp, Homo sapien
gcaagggaggaatatggtacagtat

SEQ ID NO: 2411815 - DNA, 25 bp, Homo sapien
ccagttaactatagcactcaggagg

SEQ ID NO: 2411816 - DNA, 25 bp, Homo sapien
ggaagacttgaatgagtccagttaa

SEQ ID NO: 2411817 - DNA, 25 bp, Homo sapien
caaagcgaggagattgtgggcaagg

SEQ ID NO: 2411818 - DNA, 25 bp, Homo sapien
gtcttgtttttgtcatggagtctca

SEQ ID NO: 2411819 - DNA, 25 bp, Homo sapien
ttgtcttgtttttgtcatggagtct

SEQ ID NO: 2411820 - DNA, 25 bp, Homo sapien
ttatgctttaaggagattctttttg

SEQ ID NO: 2411821 - DNA, 25 bp, Homo sapien
tgctttaaggagattctttttgtct

SEQ ID NO: 2411822 - DNA, 25 bp, Homo sapien
agtacgtatgcttttgaaagagaaa

SEQ ID NO: 2411823 - DNA, 25 bp, Homo sapien
cactcgtctgggtgagagagcgaga

SEQ ID NO: 2411824 - DNA, 25 bp, Homo sapien
tgcactcgtctgggtgagagagcga

SEQ ID NO: 2411825 - DNA, 25 bp, Homo sapien
tgagagagcgagaccccaccttaaa

SEQ ID NO: 2411826 - DNA, 25 bp, Homo sapien
tccaaaagctatgaactccagtttt

SEQ ID NO: 2411827 - DNA, 25 bp, Homo sapien
gaaatgacctttagtaagccttcca

SEQ ID NO: 2411828 - DNA, 25 bp, Homo sapien
caaaagctatgaactccagttttca

SEQ ID NO: 2411829 - DNA, 25 bp, Homo sapien
aggcgtgagctactgaggaaatgac

SEQ ID NO: 2411830 - DNA, 25 bp, Homo sapien
cctgaagtgctcgaaggtgttcact

SEQ ID NO: 2411831 - DNA, 25 bp, Homo sapien
cacaaacatccttggccacagagct

SEQ ID NO: 2411832 - DNA, 25 bp, Homo sapien
taggtggtatgacacaaaggttcac

SEQ ID NO: 2411833 - DNA, 25 bp, Homo sapien
gacaaaggtttgagtgctacaagac

SEQ ID NO: 2411834 - DNA, 25 bp, Homo sapien
gctatgtagaagcatagttttccct

SEQ ID NO: 2411835 - DNA, 25 bp, Homo sapien
caggtcgctgaagtctaggagttcg

SEQ ID NO: 2411836 - DNA, 25 bp, Homo sapien
ttccaacataatgggcattgctatg

SEQ ID NO: 2411837 - DNA, 25 bp, Homo sapien
gacattattctgtgagtgaaattcc

SEQ ID NO: 2411838 - DNA, 25 bp, Homo sapien
tggtggctcccttttcaggactagg

SEQ ID NO: 2411839 - DNA, 25 bp, Homo sapien
gactagggctttctcatggagtaca

SEQ ID NO: 2411840 - DNA, 25 bp, Homo sapien
tatttaagcaaacagtgaacgacgt

SEQ ID NO: 2411841 - DNA, 25 bp, Homo sapien
tcgtctatcgaattagggctgaaaa

SEQ ID NO: 2411842 - DNA, 25 bp, Homo sapien
cacattgaacatccttccagaaagt

SEQ ID NO: 2411843 - DNA, 25 bp, Homo sapien
tctttcacagacttaagggactatg

SEQ ID NO: 2411844 - DNA, 25 bp, Homo sapien
gagggaggacctatacccataatag

SEQ ID NO: 2411845 - DNA, 25 bp, Homo sapien
ctagtgctgccagaggaattgttaa

SEQ ID NO: 2411846 - DNA, 25 bp, Homo sapien
ggaaaggttccacgatacataaatc

SEQ ID NO: 2411847 - DNA, 25 bp, Homo sapien
gagagactttattcgttaacaatgg

SEQ ID NO: 2411848 - DNA, 25 bp, Homo sapien
tctgtatctgcgaagtaatctgcaa

SEQ ID NO: 2411849 - DNA, 25 bp, Homo sapien
agcactgctactataagacattctg

SEQ ID NO: 2411850 - DNA, 25 bp, Homo sapien
tgttcagcatcaagcaaactacagc

SEQ ID NO: 2411851 - DNA, 25 bp, Homo sapien
tgagaccttaggtcctgcaagcccc

SEQ ID NO: 2411852 - DNA, 25 bp, Homo sapien
ggcagaattgagtggtgagacctta

SEQ ID NO: 2411853 - DNA, 25 bp, Homo sapien
tgagtgctgacatcatgctgcaagt

SEQ ID NO: 2411854 - DNA, 25 bp, Homo sapien
gaaccgtaaggcacatctgctttat

SEQ ID NO: 2411855 - DNA, 25 bp, Homo sapien
atgttacctaaagtggacacatgtt

SEQ ID NO: 2411856 - DNA, 25 bp, Homo sapien
gaatcttaaggtggaaatagtgtaa

SEQ ID NO: 2411857 - DNA, 25 bp, Homo sapien
aagattttgtacatcagattgtgtt

SEQ ID NO: 2411858 - DNA, 25 bp, Homo sapien
tcttcaactcatggtattacaggtg

SEQ ID NO: 2411859 - DNA, 25 bp, Homo sapien
tcaagtgaccctgtcgcgttggcct

SEQ ID NO: 2411860 - DNA, 25 bp, Homo sapien
cagcttcaaaacgccttgggctcaa

SEQ ID NO: 2411861 - DNA, 25 bp, Homo sapien
gcgggattgtagctcgctgcagctt

SEQ ID NO: 2411862 - DNA, 25 bp, Homo sapien
ctttccgggcaatgtggaggacgat

SEQ ID NO: 2411863 - DNA, 25 bp, Homo sapien
ctgggcagaaatgtacaaccatggc

SEQ ID NO: 2411864 - DNA, 25 bp, Homo sapien
caaccatggctctttccgggcaatg

SEQ ID NO: 2411865 - DNA, 25 bp, Homo sapien
gtacaaccatggctctttccgggca

SEQ ID NO: 2411866 - DNA, 25 bp, Homo sapien
tattccagagtattgggacatgcat

SEQ ID NO: 2411867 - DNA, 25 bp, Homo sapien
ccagagtattgggacatgcatgttt

SEQ ID NO: 2411868 - DNA, 25 bp, Homo sapien
gatttctattccagagtattgggac

SEQ ID NO: 2411869 - DNA, 25 bp, Homo sapien
tctattccagagtattgggacatgc

SEQ ID NO: 2411870 - DNA, 25 bp, Homo sapien
ctaatcgttttaaagctaaagctga

SEQ ID NO: 2411871 - DNA, 25 bp, Homo sapien
tgattctaatcgttttaaagctaaa

SEQ ID NO: 2411872 - DNA, 25 bp, Homo sapien
tctaatcgttttaaagctaaagctg

SEQ ID NO: 2411873 - DNA, 25 bp, Homo sapien
tcggttgcacgagcttgctttctgt

SEQ ID NO: 2411874 - DNA, 25 bp, Homo sapien
cctgttgaagaaatgcggcacacaa

SEQ ID NO: 2411875 - DNA, 25 bp, Homo sapien
gaaggagaacttgcctgttgaagaa

SEQ ID NO: 2411876 - DNA, 25 bp, Homo sapien
tagctttaggattgccatcggttgc

SEQ ID NO: 2411877 - DNA, 25 bp, Homo sapien
caggaaaggaaggctttttgtgcca

SEQ ID NO: 2411878 - DNA, 25 bp, Homo sapien
ggctttttgtgccaagaaatcactc

SEQ ID NO: 2411879 - DNA, 25 bp, Homo sapien
ctgtaatataacaggaaaggaaggc

SEQ ID NO: 2411880 - DNA, 25 bp, Homo sapien
ctttttgtgccaagaaatcactcac

SEQ ID NO: 2411881 - DNA, 25 bp, Homo sapien
gccgttcagcttttgtgcagccaaa

SEQ ID NO: 2411882 - DNA, 25 bp, Homo sapien
aaaatgagccatcggtacttctggg

SEQ ID NO: 2411883 - DNA, 25 bp, Homo sapien
ccaaatggtgcacaaagacggcttc

SEQ ID NO: 2411884 - DNA, 25 bp, Homo sapien
ggtggagttaaccaaccagtgcctc

SEQ ID NO: 2411885 - DNA, 25 bp, Homo sapien
gccttgacctcactggagtgtagtg

SEQ ID NO: 2411886 - DNA, 25 bp, Homo sapien
cagccttgacctcactggagtgtag

SEQ ID NO: 2411887 - DNA, 25 bp, Homo sapien
agccttgacctcactggagtgtagt

SEQ ID NO: 2411888 - DNA, 25 bp, Homo sapien
caaccagggagattccaagcctctc

SEQ ID NO: 2411889 - DNA, 25 bp, Homo sapien
gaaggcagcactccaattgctagcc

SEQ ID NO: 2411890 - DNA, 25 bp, Homo sapien
tttgccaatatgcatctggggagag

SEQ ID NO: 2411891 - DNA, 25 bp, Homo sapien
gacagagagacttgtggaaaggtcc

SEQ ID NO: 2411892 - DNA, 25 bp, Homo sapien
gaatctgcaggtaatgcagacctgg

SEQ ID NO: 2411893 - DNA, 25 bp, Homo sapien
gcctgagatatttcaacagaattat

SEQ ID NO: 2411894 - DNA, 25 bp, Homo sapien
ttataaaaagctgacgccagtgcgg

SEQ ID NO: 2411895 - DNA, 25 bp, Homo sapien
ccagtgcggcttcacgggagaatct

SEQ ID NO: 2411896 - DNA, 25 bp, Homo sapien
tgaattgcgccaagaggtgccagag

SEQ ID NO: 2411897 - DNA, 25 bp, Homo sapien
acgggtccgactgaattgcgccaag

SEQ ID NO: 2411898 - DNA, 25 bp, Homo sapien
ttgcgccaagaggtgccagagcttc

SEQ ID NO: 2411899 - DNA, 25 bp, Homo sapien
tccgactgaattgcgccaagaggtg

SEQ ID NO: 2411900 - DNA, 25 bp, Homo sapien
ctcgtatattggatccagaattttt

SEQ ID NO: 2411901 - DNA, 25 bp, Homo sapien
cgtatattggatccagaatttttgg

SEQ ID NO: 2411902 - DNA, 25 bp, Homo sapien
gaactcgtatattggatccagaatt

SEQ ID NO: 2411903 - DNA, 25 bp, Homo sapien
ctagaactcgtatattggatccaga

SEQ ID NO: 2411904 - DNA, 25 bp, Homo sapien
ggcagaggacaccacacccttcgac

SEQ ID NO: 2411905 - DNA, 25 bp, Homo sapien
agaggacaccacacccttcgacaac

SEQ ID NO: 2411906 - DNA, 25 bp, Homo sapien
tcagggtgacgggcagaggacacca

SEQ ID NO: 2411907 - DNA, 25 bp, Homo sapien
cagggtgacgggcagaggacaccac

SEQ ID NO: 2411908 - DNA, 25 bp, Homo sapien
caacaagttgaggtaggagaatctc

SEQ ID NO: 2411909 - DNA, 25 bp, Homo sapien
cacaacaagttgaggtaggagaatc

SEQ ID NO: 2411910 - DNA, 25 bp, Homo sapien
acaagttgaggtaggagaatctcac

SEQ ID NO: 2411911 - DNA, 25 bp, Homo sapien
tcacaacaagttgaggtaggagaat

SEQ ID NO: 2411912 - DNA, 25 bp, Homo sapien
ctgcagaggtggtcacggcacaggc

SEQ ID NO: 2411913 - DNA, 25 bp, Homo sapien
agcaaagtgccccttggtgctacat

SEQ ID NO: 2411914 - DNA, 25 bp, Homo sapien
gctacattagcgagtctgcagaggt

SEQ ID NO: 2411915 - DNA, 25 bp, Homo sapien
agcataagctgtgctgggtcaacag

SEQ ID NO: 2411916 - DNA, 25 bp, Homo sapien
actacctctaatgatatactgtgtg

SEQ ID NO: 2411917 - DNA, 25 bp, Homo sapien
atcagaaatcgccttgccaatgatt

SEQ ID NO: 2411918 - DNA, 25 bp, Homo sapien
ccattgtactgcattactacctcta

SEQ ID NO: 2411919 - DNA, 25 bp, Homo sapien
aaaaagttagctgccccatgggatt

SEQ ID NO: 2411920 - DNA, 25 bp, Homo sapien
gtaactgttagcacagaagcctcct

SEQ ID NO: 2411921 - DNA, 25 bp, Homo sapien
tctgcccattggagtagacaaccag

SEQ ID NO: 2411922 - DNA, 25 bp, Homo sapien
tgggaacagcatattgtctctctgc

SEQ ID NO: 2411923 - DNA, 25 bp, Homo sapien
tgagggaagtttgggaacagcatat

SEQ ID NO: 2411924 - DNA, 25 bp, Homo sapien
aggagttaatcggttaactatcagc

SEQ ID NO: 2411925 - DNA, 25 bp, Homo sapien
ggttaactatcagcaggactccact

SEQ ID NO: 2411926 - DNA, 25 bp, Homo sapien
tcggttaactatcagcaggactcca

SEQ ID NO: 2411927 - DNA, 25 bp, Homo sapien
ttaatcggttaactatcagcaggac

SEQ ID NO: 2411928 - DNA, 25 bp, Homo sapien
cttgctttcgtctgttgagtcttaa

SEQ ID NO: 2411929 - DNA, 25 bp, Homo sapien
agacaagaaaatgctctgaaggcag

SEQ ID NO: 2411930 - DNA, 25 bp, Homo sapien
tgagtcttaatgaagtatctgcggg

SEQ ID NO: 2411931 - DNA, 25 bp, Homo sapien
tttttagggccagacaagaaaatgc

SEQ ID NO: 2411932 - DNA, 25 bp, Homo sapien
cccaggagacctgtacacatcttca

SEQ ID NO: 2411933 - DNA, 25 bp, Homo sapien
aaaatggctccaagtccaccttctc

SEQ ID NO: 2411934 - DNA, 25 bp, Homo sapien
caggagacctgtacacatcttcacc

SEQ ID NO: 2411935 - DNA, 25 bp, Homo sapien
ttaaaatggctccaagtccaccttc

SEQ ID NO: 2411936 - DNA, 25 bp, Homo sapien
tctccctcagtgttatgtcgggaag

SEQ ID NO: 2411937 - DNA, 25 bp, Homo sapien
tgtcgggaagagtcacttttcttct

SEQ ID NO: 2411938 - DNA, 25 bp, Homo sapien
acctctctccctcagtgttatgtcg

SEQ ID NO: 2411939 - DNA, 25 bp, Homo sapien
tcagtgttatgtcgggaagagtcac

SEQ ID NO: 2411940 - DNA, 25 bp, Homo sapien
cacaaattctcaaatgaattgttcc

SEQ ID NO: 2411941 - DNA, 25 bp, Homo sapien
ccgttagaatgtaactgtgctcctc

SEQ ID NO: 2411942 - DNA, 25 bp, Homo sapien
gttgctcattattcatgggctccgt

SEQ ID NO: 2411943 - DNA, 25 bp, Homo sapien
cacacttgtaacactctaggaagtc

SEQ ID NO: 2411944 - DNA, 25 bp, Homo sapien
ttccatacttgacgaagattgacca

SEQ ID NO: 2411945 - DNA, 25 bp, Homo sapien
gttttccatacttgacgaagattga

SEQ ID NO: 2411946 - DNA, 25 bp, Homo sapien
tttccatacttgacgaagattgacc

SEQ ID NO: 2411947 - DNA, 25 bp, Homo sapien
tccatacttgacgaagattgaccat

SEQ ID NO: 2411948 - DNA, 25 bp, Homo sapien
gggattcacattcacaaggtagtgc

SEQ ID NO: 2411949 - DNA, 25 bp, Homo sapien
tacccacttcctggggattcacatt

SEQ ID NO: 2411950 - DNA, 25 bp, Homo sapien
gattcacattcacaaggtagtgcat

SEQ ID NO: 2411951 - DNA, 25 bp, Homo sapien
tttgtacccacttcctggggattca

SEQ ID NO: 2411952 - DNA, 25 bp, Homo sapien
tggccatcttcttcccggatgtctc

SEQ ID NO: 2411953 - DNA, 25 bp, Homo sapien
tcttcccggatgtctctttgtccaa

SEQ ID NO: 2411954 - DNA, 25 bp, Homo sapien
ggtgggttcccttcgatctttagca

SEQ ID NO: 2411955 - DNA, 25 bp, Homo sapien
tgtatcttccagcttggtgggttcc

SEQ ID NO: 2411956 - DNA, 25 bp, Homo sapien
tttcacttttagcacagcttgaagt

SEQ ID NO: 2411957 - DNA, 25 bp, Homo sapien
taatatgatgactctcctaagtgtg

SEQ ID NO: 2411958 - DNA, 25 bp, Homo sapien
gactctcctaagtgtggtgaaggat

SEQ ID NO: 2411959 - DNA, 25 bp, Homo sapien
cacttttagcacagcttgaagtcca

SEQ ID NO: 2411960 - DNA, 25 bp, Homo sapien
ttcagagagttggttagcgccactt

SEQ ID NO: 2411961 - DNA, 25 bp, Homo sapien
caaagggaatcatgagagcaaagct

SEQ ID NO: 2411962 - DNA, 25 bp, Homo sapien
cttaggcagaaaatcgacattgcac

SEQ ID NO: 2411963 - DNA, 25 bp, Homo sapien
aacattgttgatgtggcaaagggaa

SEQ ID NO: 2411964 - DNA, 25 bp, Homo sapien
ctctctttatctttcaccagtaata

SEQ ID NO: 2411965 - DNA, 25 bp, Homo sapien
tggtgccagtgtcagaataaagaca

SEQ ID NO: 2411966 - DNA, 25 bp, Homo sapien
gtgccagtgtcagaataaagacaac

SEQ ID NO: 2411967 - DNA, 25 bp, Homo sapien
ttatggtgccagtgtcagaataaag

SEQ ID NO: 2411968 - DNA, 25 bp, Homo sapien
tatggtgccagtgtcagaataaaga

SEQ ID NO: 2411969 - DNA, 25 bp, Homo sapien
ggatcccacatctttagccaaaatt

SEQ ID NO: 2411970 - DNA, 25 bp, Homo sapien
gatcccacatctttagccaaaattt

SEQ ID NO: 2411971 - DNA, 25 bp, Homo sapien
ataaatacttgccagactctcctac

SEQ ID NO: 2411972 - DNA, 25 bp, Homo sapien
agactctcctactttctgttcctgg

SEQ ID NO: 2411973 - DNA, 25 bp, Homo sapien
tctcctactttctgttcctggaaaa

SEQ ID NO: 2411974 - DNA, 25 bp, Homo sapien
actctcctactttctgttcctggaa

SEQ ID NO: 2411975 - DNA, 25 bp, Homo sapien
gttcaaaaggcatgcagagtcaggg

SEQ ID NO: 2411976 - DNA, 25 bp, Homo sapien
aggactctcttcagagccgtctcag

SEQ ID NO: 2411977 - DNA, 25 bp, Homo sapien
gggcacttggtatggaaacacaacc

SEQ ID NO: 2411978 - DNA, 25 bp, Homo sapien
cctccaaatgcaaaggagtactcag

SEQ ID NO: 2411979 - DNA, 25 bp, Homo sapien
gcatatgctttcctcttagtttaga

SEQ ID NO: 2411980 - DNA, 25 bp, Homo sapien
ttgcatttttgcatatgctttcctc

SEQ ID NO: 2411981 - DNA, 25 bp, Homo sapien
atgctttcctcttagtttagaacac

SEQ ID NO: 2411982 - DNA, 25 bp, Homo sapien
catatgctttcctcttagtttagaa

SEQ ID NO: 2411983 - DNA, 25 bp, Homo sapien
ctttcttgactctaacagtcacttc

SEQ ID NO: 2411984 - DNA, 25 bp, Homo sapien
tttcttgactctaacagtcacttcc

SEQ ID NO: 2411985 - DNA, 25 bp, Homo sapien
tgactctaacagtcacttcctccat

SEQ ID NO: 2411986 - DNA, 25 bp, Homo sapien
cttgactctaacagtcacttcctcc

SEQ ID NO: 2411987 - DNA, 25 bp, Homo sapien
cgattgccaatattgtaaaaagtgc

SEQ ID NO: 2411988 - DNA, 25 bp, Homo sapien
gaattcggtatgtaccgccgccagg

SEQ ID NO: 2411989 - DNA, 25 bp, Homo sapien
taaaaagtgctcttggtccgttgtc

SEQ ID NO: 2411990 - DNA, 25 bp, Homo sapien
gccacgataactggttgcccgcagt

SEQ ID NO: 2411991 - DNA, 25 bp, Homo sapien
gtcaaaatccatggttccaggcggg

SEQ ID NO: 2411992 - DNA, 25 bp, Homo sapien
atctgcatcgattatcttacgtggg

SEQ ID NO: 2411993 - DNA, 25 bp, Homo sapien
tgagatggagcgctctttacatgat

SEQ ID NO: 2411994 - DNA, 25 bp, Homo sapien
gaagagagttttggagtcaaaatcc

SEQ ID NO: 2411995 - DNA, 25 bp, Homo sapien
tttgtgagtctccagctttttcaca

SEQ ID NO: 2411996 - DNA, 25 bp, Homo sapien
tgtgagtctccagctttttcacaac

SEQ ID NO: 2411997 - DNA, 25 bp, Homo sapien
ttgtgagtctccagctttttcacaa

SEQ ID NO: 2411998 - DNA, 25 bp, Homo sapien
atttgtgagtctccagctttttcac

SEQ ID NO: 2411999 - DNA, 25 bp, Homo sapien
actgtcagaccctgctgttctacta

SEQ ID NO: 2412000 - DNA, 25 bp, Homo sapien
tcctgtccttgtcccttatgtaact

SEQ ID NO: 2412001 - DNA, 25 bp, Homo sapien
ccttgtcccttatgtaactcctgaa

SEQ ID NO: 2412002 - DNA, 25 bp, Homo sapien
ttagcctttcaaaacctggctccca

SEQ ID NO: 2412003 - DNA, 25 bp, Homo sapien
agacagcagcatatgcccaactgtg

SEQ ID NO: 2412004 - DNA, 25 bp, Homo sapien
ccggagattagaatcagcagacagc

SEQ ID NO: 2412005 - DNA, 25 bp, Homo sapien
cagcagacagcagcatatgcccaac

SEQ ID NO: 2412006 - DNA, 25 bp, Homo sapien
ccagaaaggatttcccggagattag

SEQ ID NO: 2412007 - DNA, 25 bp, Homo sapien
gaaaaaatattgaatgatttgggcc

SEQ ID NO: 2412008 - DNA, 25 bp, Homo sapien
aaaatattgaatgatttgggcctga

SEQ ID NO: 2412009 - DNA, 25 bp, Homo sapien
ctgaaaaaatattgaatgatttggg

SEQ ID NO: 2412010 - DNA, 25 bp, Homo sapien
aaaaatattgaatgatttgggcctg

SEQ ID NO: 2412011 - DNA, 25 bp, Homo sapien
cttgatgtcatctggccgcagaggc

SEQ ID NO: 2412012 - DNA, 25 bp, Homo sapien
taaaaaggcataaagggctttctgc

SEQ ID NO: 2412013 - DNA, 25 bp, Homo sapien
cattgacgtggctttcttagacatg

SEQ ID NO: 2412014 - DNA, 25 bp, Homo sapien
tctctcccctatctggttcttgatg

SEQ ID NO: 2412015 - DNA, 25 bp, Homo sapien
ctgtctgtatgtcctagccacgtcc

SEQ ID NO: 2412016 - DNA, 25 bp, Homo sapien
ctgtatgtcctagccacgtcccacc

SEQ ID NO: 2412017 - DNA, 25 bp, Homo sapien
ggcacagaatccctgtctgtatgtc

SEQ ID NO: 2412018 - DNA, 25 bp, Homo sapien
gcacagaatccctgtctgtatgtcc

SEQ ID NO: 2412019 - DNA, 25 bp, Homo sapien
ccctcatactttatgctgagttgta

SEQ ID NO: 2412020 - DNA, 25 bp, Homo sapien
tcaggtggtcaattcaggaatcccc

SEQ ID NO: 2412021 - DNA, 25 bp, Homo sapien
taacaccagggcatctcatgggtgg

SEQ ID NO: 2412022 - DNA, 25 bp, Homo sapien
ggtcagagagagctaagtaacacca

SEQ ID NO: 2412023 - DNA, 25 bp, Homo sapien
acctccatgagtccactccatgtgc

SEQ ID NO: 2412024 - DNA, 25 bp, Homo sapien
cacctccatgagtccactccatgtg

SEQ ID NO: 2412025 - DNA, 25 bp, Homo sapien
ccacctccatgagtccactccatgt

SEQ ID NO: 2412026 - DNA, 25 bp, Homo sapien
tccacctccatgagtccactccatg

SEQ ID NO: 2412027 - DNA, 25 bp, Homo sapien
ggacaccctgccacaaatctttctg

SEQ ID NO: 2412028 - DNA, 25 bp, Homo sapien
tcaatactaccatgcaataccctcc

SEQ ID NO: 2412029 - DNA, 25 bp, Homo sapien
tctgattgaggcaaatggatccatc

SEQ ID NO: 2412030 - DNA, 25 bp, Homo sapien
caggcacactgcctctgattgaggc

SEQ ID NO: 2412031 - DNA, 25 bp, Homo sapien
ttgaggaaagacactgtggataagt

SEQ ID NO: 2412032 - DNA, 25 bp, Homo sapien
tgctggtatggaaagtggaagtgtg

SEQ ID NO: 2412033 - DNA, 25 bp, Homo sapien
ctgtggataagtgtcaaagaaggag

SEQ ID NO: 2412034 - DNA, 25 bp, Homo sapien
gtgtcaaagaaggagaaatctgctg

SEQ ID NO: 2412035 - DNA, 25 bp, Homo sapien
gatagactgttacttctactccatt

SEQ ID NO: 2412036 - DNA, 25 bp, Homo sapien
gaaagattcttcttctagatagact

SEQ ID NO: 2412037 - DNA, 25 bp, Homo sapien
tattttccgtcccagacagaaagat

SEQ ID NO: 2412038 - DNA, 25 bp, Homo sapien
tttccgtcccagacagaaagattct

SEQ ID NO: 2412039 - DNA, 25 bp, Homo sapien
cattgaaacatacaaagatagattg

SEQ ID NO: 2412040 - DNA, 25 bp, Homo sapien
tgtgacacattgaaacatacaaaga

SEQ ID NO: 2412041 - DNA, 25 bp, Homo sapien
aacatacaaagatagattggcacat

SEQ ID NO: 2412042 - DNA, 25 bp, Homo sapien
gacacattgaaacatacaaagatag

SEQ ID NO: 2412043 - DNA, 25 bp, Homo sapien
ctccgcaacgtctgttccatctgta

SEQ ID NO: 2412044 - DNA, 25 bp, Homo sapien
gttccatctgtaagatccctttcct

SEQ ID NO: 2412045 - DNA, 25 bp, Homo sapien
tccgcaacgtctgttccatctgtaa

SEQ ID NO: 2412046 - DNA, 25 bp, Homo sapien
tgtaagatccctttcctttccacca

SEQ ID NO: 2412047 - DNA, 25 bp, Homo sapien
ctctgcttggcagttttaggctgct

SEQ ID NO: 2412048 - DNA, 25 bp, Homo sapien
cacggagtactgttctcaagatgaa

SEQ ID NO: 2412049 - DNA, 25 bp, Homo sapien
aggcagagcccacggagtactgttc

SEQ ID NO: 2412050 - DNA, 25 bp, Homo sapien
tggaagctgcacctgtggatcctgt

SEQ ID NO: 2412051 - DNA, 25 bp, Homo sapien
ttccaggtacagctctggtcagctc

SEQ ID NO: 2412052 - DNA, 25 bp, Homo sapien
tccaggtacagctctggtcagctcc

SEQ ID NO: 2412053 - DNA, 25 bp, Homo sapien
attccaggtacagctctggtcagct

SEQ ID NO: 2412054 - DNA, 25 bp, Homo sapien
ctccctggagattttgaactgtaat

SEQ ID NO: 2412055 - DNA, 25 bp, Homo sapien
cctggagattttgaactgtaattct

SEQ ID NO: 2412056 - DNA, 25 bp, Homo sapien
ggagattttgaactgtaattctttc

SEQ ID NO: 2412057 - DNA, 25 bp, Homo sapien
ccctggagattttgaactgtaattc

SEQ ID NO: 2412058 - DNA, 25 bp, Homo sapien
ttaggttattgcaccactagtggac

SEQ ID NO: 2412059 - DNA, 25 bp, Homo sapien
taggttattgcaccactagtggact

SEQ ID NO: 2412060 - DNA, 25 bp, Homo sapien
tgttcgtaaacgagaaagcttcttc

SEQ ID NO: 2412061 - DNA, 25 bp, Homo sapien
gaaatatcagtgtgttcgtaaacga

SEQ ID NO: 2412062 - DNA, 25 bp, Homo sapien
tctggatagtttctgggacactgat

SEQ ID NO: 2412063 - DNA, 25 bp, Homo sapien
catgatgagatggttttactagggc

SEQ ID NO: 2412064 - DNA, 25 bp, Homo sapien
agtgtcttgcaaactcagaatgagc

SEQ ID NO: 2412065 - DNA, 25 bp, Homo sapien
taactacacagctggatgtctctag

SEQ ID NO: 2412066 - DNA, 25 bp, Homo sapien
cacaggatggtaagggagatgtaca

SEQ ID NO: 2412067 - DNA, 25 bp, Homo sapien
ttgcacaggatagtaagggacatgc

SEQ ID NO: 2412068 - DNA, 25 bp, Homo sapien
tttgcacagtatagtaagggacgta

SEQ ID NO: 2412069 - DNA, 25 bp, Homo sapien
caggatagtaaaggacgtacaggtt

SEQ ID NO: 2412070 - DNA, 25 bp, Homo sapien
acatcatagtaagggacgttatctc

SEQ ID NO: 2412071 - DNA, 25 bp, Homo sapien
tgcacatcatagtaagggacgttat

SEQ ID NO: 2412072 - DNA, 25 bp, Homo sapien
tatgcacatcatagtaagggacgtt

SEQ ID NO: 2412073 - DNA, 25 bp, Homo sapien
gcacatcatagtaagggacgttatc

SEQ ID NO: 2412074 - DNA, 25 bp, Homo sapien
aagtagatattgaagaccgacatgt

SEQ ID NO: 2412075 - DNA, 25 bp, Homo sapien
gtagatattgaagaccgacatgtag

SEQ ID NO: 2412076 - DNA, 25 bp, Homo sapien
gatattgaagaccgacatgtagcac

SEQ ID NO: 2412077 - DNA, 25 bp, Homo sapien
tagatattgaagaccgacatgtagc

SEQ ID NO: 2412078 - DNA, 25 bp, Homo sapien
aagaagtttcgtattacgatcttca

SEQ ID NO: 2412079 - DNA, 25 bp, Homo sapien
tgtgtagtactattaagaagtttcg

SEQ ID NO: 2412080 - DNA, 25 bp, Homo sapien
ttttgctgctttgtactcaatgtgt

SEQ ID NO: 2412081 - DNA, 25 bp, Homo sapien
ctcaatgtgtagtactattaagaag

SEQ ID NO: 2412082 - DNA, 25 bp, Homo sapien
tctggtttgtaagatgtagagcagt

SEQ ID NO: 2412083 - DNA, 25 bp, Homo sapien
agatacaacgtgtaagtttctggtt

SEQ ID NO: 2412084 - DNA, 25 bp, Homo sapien
gaacagtcttattgctcatgccttg

SEQ ID NO: 2412085 - DNA, 25 bp, Homo sapien
gccttgtgtattcccatttcactca

SEQ ID NO: 2412086 - DNA, 25 bp, Homo sapien
aaaggaaggccaatattccacactt

SEQ ID NO: 2412087 - DNA, 25 bp, Homo sapien
aggaaggccaatattccacactttc

SEQ ID NO: 2412088 - DNA, 25 bp, Homo sapien
gaaggccaatattccacactttctg

SEQ ID NO: 2412089 - DNA, 25 bp, Homo sapien
tgaaaaggaaggccaatattccaca

SEQ ID NO: 2412090 - DNA, 25 bp, Homo sapien
agaacactggtggatgaagacaaag

SEQ ID NO: 2412091 - DNA, 25 bp, Homo sapien
gaacactggtggatgaagacaaagg

SEQ ID NO: 2412092 - DNA, 25 bp, Homo sapien
caagaacactggtggatgaagacaa

SEQ ID NO: 2412093 - DNA, 25 bp, Homo sapien
aaaggaaagatgttactaatccagc

SEQ ID NO: 2412094 - DNA, 25 bp, Homo sapien
ccaaatgccttcgatcttggtgctg

SEQ ID NO: 2412095 - DNA, 25 bp, Homo sapien
tccaaatgccttcgatcttggtgct

SEQ ID NO: 2412096 - DNA, 25 bp, Homo sapien
ggatccaaatgccttcgatcttggt

SEQ ID NO: 2412097 - DNA, 25 bp, Homo sapien
gatccaaatgccttcgatcttggtg

SEQ ID NO: 2412098 - DNA, 25 bp, Homo sapien
tgctgatgttttggcccattcttat

SEQ ID NO: 2412099 - DNA, 25 bp, Homo sapien
gacgaattcctacattttgctgatg

SEQ ID NO: 2412100 - DNA, 25 bp, Homo sapien
tttggcccattcttataaactccac

SEQ ID NO: 2412101 - DNA, 25 bp, Homo sapien
ccactttcttgtagacgaattccta

SEQ ID NO: 2412102 - DNA, 25 bp, Homo sapien
tggaatccctttgttgttcactgtg

SEQ ID NO: 2412103 - DNA, 25 bp, Homo sapien
ggaatccctttgttgttcactgtgt

SEQ ID NO: 2412104 - DNA, 25 bp, Homo sapien
ttggaatccctttgttgttcactgt

SEQ ID NO: 2412105 - DNA, 25 bp, Homo sapien
gaatccctttgttgttcactgtgtt

SEQ ID NO: 2412106 - DNA, 25 bp, Homo sapien
gccttattgcagttagcttcaatct

SEQ ID NO: 2412107 - DNA, 25 bp, Homo sapien
tccacagccttattgcagttagctt

SEQ ID NO: 2412108 - DNA, 25 bp, Homo sapien
ggtggttcttctcactaaaccttca

SEQ ID NO: 2412109 - DNA, 25 bp, Homo sapien
tggtggttcttctcactaaaccttc

SEQ ID NO: 2412110 - DNA, 25 bp, Homo sapien
gcttgttgggccattgctagtacca

SEQ ID NO: 2412111 - DNA, 25 bp, Homo sapien
cagagtgtcccatgtttgggccaaa

SEQ ID NO: 2412112 - DNA, 25 bp, Homo sapien
gaggaagtctctttcgctgcgtcca

SEQ ID NO: 2412113 - DNA, 25 bp, Homo sapien
aaaatagcgggcctttctactcctg

SEQ ID NO: 2412114 - DNA, 25 bp, Homo sapien
tctcttttcctatctccaaggccat

SEQ ID NO: 2412115 - DNA, 25 bp, Homo sapien
caaaccatcttctgatctctctttt

SEQ ID NO: 2412116 - DNA, 25 bp, Homo sapien
tctctcttttcctatctccaaggcc

SEQ ID NO: 2412117 - DNA, 25 bp, Homo sapien
cttcaaaccatcttctgatctctct

SEQ ID NO: 2412118 - DNA, 25 bp, Homo sapien
tctttcagatttaaattagtgcata

SEQ ID NO: 2412119 - DNA, 25 bp, Homo sapien
ccttctttcagatttaaattagtgc

SEQ ID NO: 2412120 - DNA, 25 bp, Homo sapien
cttctttcagatttaaattagtgca

SEQ ID NO: 2412121 - DNA, 25 bp, Homo sapien
ctttcagatttaaattagtgcatac

SEQ ID NO: 2412122 - DNA, 25 bp, Homo sapien
cactgacatcagtcttggaatatgt

SEQ ID NO: 2412123 - DNA, 25 bp, Homo sapien
gaatatgtcccaacacttctgtttg

SEQ ID NO: 2412124 - DNA, 25 bp, Homo sapien
tctgttctccactgacatcagtctt

SEQ ID NO: 2412125 - DNA, 25 bp, Homo sapien
cttggaatatgtcccaacacttctg

SEQ ID NO: 2412126 - DNA, 25 bp, Homo sapien
cttcagaggacagaacattatgtgg

SEQ ID NO: 2412127 - DNA, 25 bp, Homo sapien
gaaaagcgatgacatgtcctctgct

SEQ ID NO: 2412128 - DNA, 25 bp, Homo sapien
ttatgtggagggagagttaagactt

SEQ ID NO: 2412129 - DNA, 25 bp, Homo sapien
acttggtaggaaaagcgatgacatg

SEQ ID NO: 2412130 - DNA, 25 bp, Homo sapien
acatagcgtagtgtgaggacagccg

SEQ ID NO: 2412131 - DNA, 25 bp, Homo sapien
agccggccaactcctcaaagagggt

SEQ ID NO: 2412132 - DNA, 25 bp, Homo sapien
ctaggctagtttggctacagcacat

SEQ ID NO: 2412133 - DNA, 25 bp, Homo sapien
ggacagccggccaactcctcaaaga

SEQ ID NO: 2412134 - DNA, 25 bp, Homo sapien
aagccagaggaacaacacagttgcc

SEQ ID NO: 2412135 - DNA, 25 bp, Homo sapien
attgacagctgggacaaagtcacat

SEQ ID NO: 2412136 - DNA, 25 bp, Homo sapien
cataaagactgatgtcaggaatgac

SEQ ID NO: 2412137 - DNA, 25 bp, Homo sapien
gccagaggaacaacacagttgccaa

SEQ ID NO: 2412138 - DNA, 25 bp, Homo sapien
cttttatcttgaattgattccaggt

SEQ ID NO: 2412139 - DNA, 25 bp, Homo sapien
gatttcactcattggcagtgattct

SEQ ID NO: 2412140 - DNA, 25 bp, Homo sapien
ttgattccaggtaattgtatctgca

SEQ ID NO: 2412141 - DNA, 25 bp, Homo sapien
tctgacccatttcaaaagctgactc

SEQ ID NO: 2412142 - DNA, 25 bp, Homo sapien
caataatcaggaactgtctgagacg

SEQ ID NO: 2412143 - DNA, 25 bp, Homo sapien
tcttgctaagagagacatccggtgt

SEQ ID NO: 2412144 - DNA, 25 bp, Homo sapien
ggaacagtcgtttggaaccagtgct

SEQ ID NO: 2412145 - DNA, 25 bp, Homo sapien
tccagtagctaccacatgacaagag

SEQ ID NO: 2412146 - DNA, 25 bp, Homo sapien
ctttcaaaaggaagctggttttcat

SEQ ID NO: 2412147 - DNA, 25 bp, Homo sapien
tgatgaatgctgtcatcatttgttg

SEQ ID NO: 2412148 - DNA, 25 bp, Homo sapien
cttgatgaatgctgtcatcatttgt

SEQ ID NO: 2412149 - DNA, 25 bp, Homo sapien
tgaatgctgtcatcatttgttgtca

SEQ ID NO: 2412150 - DNA, 25 bp, Homo sapien
atgaatgctgtcatcatttgttgtc

SEQ ID NO: 2412151 - DNA, 25 bp, Homo sapien
agagaccccggaggatataagtcgg

SEQ ID NO: 2412152 - DNA, 25 bp, Homo sapien
tctccaggagttattcgaaagctga

SEQ ID NO: 2412153 - DNA, 25 bp, Homo sapien
ggaatcctgatcgtttctgcccgtg

SEQ ID NO: 2412154 - DNA, 25 bp, Homo sapien
tgttttcaacttgagcgtgctagcc

SEQ ID NO: 2412155 - DNA, 25 bp, Homo sapien
gaaactttcagtggattgtgggcct

SEQ ID NO: 2412156 - DNA, 25 bp, Homo sapien
actgggaattcagtgaagagggcac

SEQ ID NO: 2412157 - DNA, 25 bp, Homo sapien
aagagggcaccctataccatggcag

SEQ ID NO: 2412158 - DNA, 25 bp, Homo sapien
acgctgcacgagtcagggacaagcc

SEQ ID NO: 2412159 - DNA, 25 bp, Homo sapien
tggatgggcttgtacctcctgcgcg

SEQ ID NO: 2412160 - DNA, 25 bp, Homo sapien
tcagtgcttcttgtttttagtggga

SEQ ID NO: 2412161 - DNA, 25 bp, Homo sapien
tagtcagtgcttcttgtttttagtg

SEQ ID NO: 2412162 - DNA, 25 bp, Homo sapien
ttagtgggaaagtcacctttagcat

SEQ ID NO: 2412163 - DNA, 25 bp, Homo sapien
tttagtgggaaagtcacctttagca

SEQ ID NO: 2412164 - DNA, 25 bp, Homo sapien
ctttaatctcgttaaccttgccaat

SEQ ID NO: 2412165 - DNA, 25 bp, Homo sapien
tttaatctcgttaaccttgccaata

SEQ ID NO: 2412166 - DNA, 25 bp, Homo sapien
gcatgtccgactgagctctattttt

SEQ ID NO: 2412167 - DNA, 25 bp, Homo sapien
aaagtacggagctgcttgctacctg

SEQ ID NO: 2412168 - DNA, 25 bp, Homo sapien
tgaaagacctcgagagtcctgctgt

SEQ ID NO: 2412169 - DNA, 25 bp, Homo sapien
gttctggtgcatgtccgactgagct

SEQ ID NO: 2412170 - DNA, 25 bp, Homo sapien
tcatccccgttggaagctctttctc

SEQ ID NO: 2412171 - DNA, 25 bp, Homo sapien
ctgcttcacgatgtgttttctgatc

SEQ ID NO: 2412172 - DNA, 25 bp, Homo sapien
tgcttcacgatgtgttttctgatca

SEQ ID NO: 2412173 - DNA, 25 bp, Homo sapien
tttctgatcatccccgttggaagct

SEQ ID NO: 2412174 - DNA, 25 bp, Homo sapien
cctttccaggcatgattcatattcc

SEQ ID NO: 2412175 - DNA, 25 bp, Homo sapien
tggtactggcaattctagctttgtt

SEQ ID NO: 2412176 - DNA, 25 bp, Homo sapien
tcagaccaccttatttatatatgtc

SEQ ID NO: 2412177 - DNA, 25 bp, Homo sapien
cagatctggctttatctaagaatat

SEQ ID NO: 2412178 - DNA, 25 bp, Homo sapien
caggaactagcatgtaaatcctttc

SEQ ID NO: 2412179 - DNA, 25 bp, Homo sapien
actggctgatacctgacaaaggagt

SEQ ID NO: 2412180 - DNA, 25 bp, Homo sapien
tgatacctgacaaaggagtgataat

SEQ ID NO: 2412181 - DNA, 25 bp, Homo sapien
ttttttgagcaggaactagcatgta

SEQ ID NO: 2412182 - DNA, 25 bp, Homo sapien
acgctctccttactccagtcgctac

SEQ ID NO: 2412183 - DNA, 25 bp, Homo sapien
gtgcacacgctctccttactccagt

SEQ ID NO: 2412184 - DNA, 25 bp, Homo sapien
acacgctctccttactccagtcgct

SEQ ID NO: 2412185 - DNA, 25 bp, Homo sapien
gcacacgctctccttactccagtcg

SEQ ID NO: 2412186 - DNA, 25 bp, Homo sapien
ccttgggatgacctaaattctcttc

SEQ ID NO: 2412187 - DNA, 25 bp, Homo sapien
tttgagcctgccagattccttccca

SEQ ID NO: 2412188 - DNA, 25 bp, Homo sapien
tctgtgcttactagaatcctgttca

SEQ ID NO: 2412189 - DNA, 25 bp, Homo sapien
tccagtccttgggatgacctaaatt

SEQ ID NO: 2412190 - DNA, 25 bp, Homo sapien
caaaccgtatcgaatatcattaaaa

SEQ ID NO: 2412191 - DNA, 25 bp, Homo sapien
gccaaaccgtatcgaatatcattaa

SEQ ID NO: 2412192 - DNA, 25 bp, Homo sapien
agaatattttgttgacttgtcatca

SEQ ID NO: 2412193 - DNA, 25 bp, Homo sapien
gagccaaaccgtatcgaatatcatt

SEQ ID NO: 2412194 - DNA, 25 bp, Homo sapien
ggcttgggtatcacatggagccagg

SEQ ID NO: 2412195 - DNA, 25 bp, Homo sapien
caaagggcttgggtatcacatggag

SEQ ID NO: 2412196 - DNA, 25 bp, Homo sapien
agggcttgggtatcacatggagcca

SEQ ID NO: 2412197 - DNA, 25 bp, Homo sapien
aaagggcttgggtatcacatggagc

SEQ ID NO: 2412198 - DNA, 25 bp, Homo sapien
aaaaccatgttccttgagtctggaa

SEQ ID NO: 2412199 - DNA, 25 bp, Homo sapien
taaggcaccgtaacatattgtggca

SEQ ID NO: 2412200 - DNA, 25 bp, Homo sapien
tattgtggcactgacttttaggcac

SEQ ID NO: 2412201 - DNA, 25 bp, Homo sapien
tcaagactgtgactatgctattggc

SEQ ID NO: 2412202 - DNA, 25 bp, Homo sapien
ttcctcagactcagtgtttctgatg

SEQ ID NO: 2412203 - DNA, 25 bp, Homo sapien
gaatttgatttgttcttcctcagac

SEQ ID NO: 2412204 - DNA, 25 bp, Homo sapien
agtgtttctgatgcaggtggtgtta

SEQ ID NO: 2412205 - DNA, 25 bp, Homo sapien
tgcaggtggtgttaggctcccacat

SEQ ID NO: 2412206 - DNA, 25 bp, Homo sapien
gcagctgcgagatgttttagcacca

SEQ ID NO: 2412207 - DNA, 25 bp, Homo sapien
cagctgcgagatgttttagcaccac

SEQ ID NO: 2412208 - DNA, 25 bp, Homo sapien
atagtgcatgtgcttatgatcctcc

SEQ ID NO: 2412209 - DNA, 25 bp, Homo sapien
ctgcttttccttaggttagtgcctc

SEQ ID NO: 2412210 - DNA, 25 bp, Homo sapien
tgtgcaaggccttgccaatctctat

SEQ ID NO: 2412211 - DNA, 25 bp, Homo sapien
cccatggtgtgcaaggccttgccaa

SEQ ID NO: 2412212 - DNA, 25 bp, Homo sapien
tctcactgatgacataaatgccgcc

SEQ ID NO: 2412213 - DNA, 25 bp, Homo sapien
taaatgccgccctcactgtgttgtt

SEQ ID NO: 2412214 - DNA, 25 bp, Homo sapien
gatgacataaatgccgccctcactg

SEQ ID NO: 2412215 - DNA, 25 bp, Homo sapien
ataaatgccgccctcactgtgttgt

SEQ ID NO: 2412216 - DNA, 25 bp, Homo sapien
cactaatttactggcagagagacct

SEQ ID NO: 2412217 - DNA, 25 bp, Homo sapien
agagacctgccccttttagtggaca

SEQ ID NO: 2412218 - DNA, 25 bp, Homo sapien
ccatctacctggaagttacggaagt

SEQ ID NO: 2412219 - DNA, 25 bp, Homo sapien
gacatttgggtgacagatctttaag

SEQ ID NO: 2412220 - DNA, 25 bp, Homo sapien
tcccagaatgcatcgcagcccaaca

SEQ ID NO: 2412221 - DNA, 25 bp, Homo sapien
gaatgcatcgcagcccaacattgcc

SEQ ID NO: 2412222 - DNA, 25 bp, Homo sapien
gatgctttgcattagtttgtttact

SEQ ID NO: 2412223 - DNA, 25 bp, Homo sapien
gtcttggatttgatgctgctccttt

SEQ ID NO: 2412224 - DNA, 25 bp, Homo sapien
ttccagttgctgatcggcaataatg

SEQ ID NO: 2412225 - DNA, 25 bp, Homo sapien
aataatgaacccctgctctgttgtt

SEQ ID NO: 2412226 - DNA, 25 bp, Homo sapien
gaagaaggggctctagctttccagt

SEQ ID NO: 2412227 - DNA, 25 bp, Homo sapien
aattatcctgagaattatcatgcag

SEQ ID NO: 2412228 - DNA, 25 bp, Homo sapien
gccacggaagctgatggagtaatat

SEQ ID NO: 2412229 - DNA, 25 bp, Homo sapien
tgtcaaatgcccctttgtagaggcc

SEQ ID NO: 2412230 - DNA, 25 bp, Homo sapien
gagatgaagacaaatccgataagta

SEQ ID NO: 2412231 - DNA, 25 bp, Homo sapien
gaagacaaatccgataagtactatt

SEQ ID NO: 2412232 - DNA, 25 bp, Homo sapien
cttctgagaatattatcttgggcat

SEQ ID NO: 2412233 - DNA, 25 bp, Homo sapien
tccagtttagctatgcccttgaagt

SEQ ID NO: 2412234 - DNA, 25 bp, Homo sapien
tcaagcggagaattccagtttagct

SEQ ID NO: 2412235 - DNA, 25 bp, Homo sapien
cttgaagttgttattatactttgca

SEQ ID NO: 2412236 - DNA, 25 bp, Homo sapien
tcaggggagacatacagttcaggct

SEQ ID NO: 2412237 - DNA, 25 bp, Homo sapien
gtcaggggagacatacagttcaggc

SEQ ID NO: 2412238 - DNA, 25 bp, Homo sapien
ggggagacatacagttcaggctcat

SEQ ID NO: 2412239 - DNA, 25 bp, Homo sapien
aggggagacatacagttcaggctca

SEQ ID NO: 2412240 - DNA, 25 bp, Homo sapien
cgttcttagttggtggagcgatttg

SEQ ID NO: 2412241 - DNA, 25 bp, Homo sapien
ggtgcatggccgttcttagttggtg

SEQ ID NO: 2412242 - DNA, 25 bp, Homo sapien
catggccgttcttagttggtggagc

SEQ ID NO: 2412243 - DNA, 25 bp, Homo sapien
ggccgttcttagttggtggagcgat

SEQ ID NO: 2412244 - DNA, 25 bp, Homo sapien
ggagggctcgttcatcggcactgat

SEQ ID NO: 2412245 - DNA, 25 bp, Homo sapien
caatggccggtgatctccaagcact

SEQ ID NO: 2412246 - DNA, 25 bp, Homo sapien
tggacagatcctttcgggcacaggt

SEQ ID NO: 2412247 - DNA, 25 bp, Homo sapien
gattctagaaactgcggtcatccag

SEQ ID NO: 2412248 - DNA, 25 bp, Homo sapien
taagtcttctttaccagtagcactg

SEQ ID NO: 2412249 - DNA, 25 bp, Homo sapien
aagtctacttaggagtcattgctgc

SEQ ID NO: 2412250 - DNA, 25 bp, Homo sapien
catattctgcgttgtatcgctacac

SEQ ID NO: 2412251 - DNA, 25 bp, Homo sapien
gcacactgtataacatcatgaggta

SEQ ID NO: 2412252 - DNA, 25 bp, Homo sapien
aaccagcacgaggtccatgggggta

SEQ ID NO: 2412253 - DNA, 25 bp, Homo sapien
cagcacgaggtccatgggggtaaaa

SEQ ID NO: 2412254 - DNA, 25 bp, Homo sapien
tcatttaaccagcacgaggtccatg

SEQ ID NO: 2412255 - DNA, 25 bp, Homo sapien
catttaaccagcacgaggtccatgg

SEQ ID NO: 2412256 - DNA, 25 bp, Homo sapien
tggtagagctacaagtccattaggt

SEQ ID NO: 2412257 - DNA, 25 bp, Homo sapien
tgcagacagcagtgttaccatatgc

SEQ ID NO: 2412258 - DNA, 25 bp, Homo sapien
aagtccattaggtccttcatctacc

SEQ ID NO: 2412259 - DNA, 25 bp, Homo sapien
ctaccttcgaaatattgcagacagc

SEQ ID NO: 2412260 - DNA, 25 bp, Homo sapien
caggagccttttattacagctgtca

SEQ ID NO: 2412261 - DNA, 25 bp, Homo sapien
gcattcccagaagtggtctaaagct

SEQ ID NO: 2412262 - DNA, 25 bp, Homo sapien
tctgtgcctgctgacgtcaacgaaa

SEQ ID NO: 2412263 - DNA, 25 bp, Homo sapien
tctgtaccttcagagacccagaggg

SEQ ID NO: 2412264 - DNA, 25 bp, Homo sapien
tacattgtagttctctccaagccca

SEQ ID NO: 2412265 - DNA, 25 bp, Homo sapien
tcatttgcatggaggtcgatggaca

SEQ ID NO: 2412266 - DNA, 25 bp, Homo sapien
aatgaattctgggtccatatctccc

SEQ ID NO: 2412267 - DNA, 25 bp, Homo sapien
gccagttaaatgaggatgctgcaaa

SEQ ID NO: 2412268 - DNA, 25 bp, Homo sapien
tatgttgatgctccctttttgccag

SEQ ID NO: 2412269 - DNA, 25 bp, Homo sapien
tagtatcatcccatcacaagtattg

SEQ ID NO: 2412270 - DNA, 25 bp, Homo sapien
tattgttaggcgacttagtggcgga

SEQ ID NO: 2412271 - DNA, 25 bp, Homo sapien
tgtaattcttaccactctcgacaga

SEQ ID NO: 2412272 - DNA, 25 bp, Homo sapien
gaaaacaccattgcttcattgcaag

SEQ ID NO: 2412273 - DNA, 25 bp, Homo sapien
gaattgtggactttctcagtgcaag

SEQ ID NO: 2412274 - DNA, 25 bp, Homo sapien
tgataccttccgctcatttgcaatg

SEQ ID NO: 2412275 - DNA, 25 bp, Homo sapien
tacaaaggaagaagttgagactcag

SEQ ID NO: 2412276 - DNA, 25 bp, Homo sapien
aggaaagagaagagatcgctcaggg

SEQ ID NO: 2412277 - DNA, 25 bp, Homo sapien
gccagcgtggccaattctctgctga

SEQ ID NO: 2412278 - DNA, 25 bp, Homo sapien
cgtgtggccttaaacttgcagcaaa

SEQ ID NO: 2412279 - DNA, 25 bp, Homo sapien
agatgcacgtcagtggccttgccag

SEQ ID NO: 2412280 - DNA, 25 bp, Homo sapien
agaaccttgtttatctaacgcaggg

SEQ ID NO: 2412281 - DNA, 25 bp, Homo sapien
tgagccctaagagagactgcatgag

SEQ ID NO: 2412282 - DNA, 25 bp, Homo sapien
gataatataggctcataggtcattg

SEQ ID NO: 2412283 - DNA, 25 bp, Homo sapien
ctgtgacagtccctgggattagagg

SEQ ID NO: 2412284 - DNA, 25 bp, Homo sapien
tgttgactgtgaagtaagtatgatc

SEQ ID NO: 2412285 - DNA, 25 bp, Homo sapien
acaggaggtaccacatttatcttgt

SEQ ID NO: 2412286 - DNA, 25 bp, Homo sapien
caggaggtaccacatttatcttgtt

SEQ ID NO: 2412287 - DNA, 25 bp, Homo sapien
tttgttctctgcaacaggaggtacc

SEQ ID NO: 2412288 - DNA, 25 bp, Homo sapien
atgataaccatgcacgagcgtgtgc

SEQ ID NO: 2412289 - DNA, 25 bp, Homo sapien
ggcaagaagtagtgtgagtgtgcat

SEQ ID NO: 2412290 - DNA, 25 bp, Homo sapien
atgtgagtatgagcaggcaagaagt

SEQ ID NO: 2412291 - DNA, 25 bp, Homo sapien
cacatcagtgaggatgtgagtatga

SEQ ID NO: 2412292 - DNA, 25 bp, Homo sapien
gaatctccccgaagcaataatcacc

SEQ ID NO: 2412293 - DNA, 25 bp, Homo sapien
tttaaggacaactggcaagatgctc

SEQ ID NO: 2412294 - DNA, 25 bp, Homo sapien
taatcaccaagtccaagcattagca

SEQ ID NO: 2412295 - DNA, 25 bp, Homo sapien
tcaggatccacagtttacatcaggt

SEQ ID NO: 2412296 - DNA, 25 bp, Homo sapien
tatagagattttgattgggcttgca

SEQ ID NO: 2412297 - DNA, 25 bp, Homo sapien
tctgcctatgccttttgtatatatt

SEQ ID NO: 2412298 - DNA, 25 bp, Homo sapien
gagtcttacgatactgtacatgaac

SEQ ID NO: 2412299 - DNA, 25 bp, Homo sapien
gtgtatcaagttgggacaaactgac

SEQ ID NO: 2412300 - DNA, 25 bp, Homo sapien
cactttggatgtattacttaggcca

SEQ ID NO: 2412301 - DNA, 25 bp, Homo sapien
gaccaatggataagtctatgcatct

SEQ ID NO: 2412302 - DNA, 25 bp, Homo sapien
tctttacttacagtggaccaatgga

SEQ ID NO: 2412303 - DNA, 25 bp, Homo sapien
cccatggttaggatatagctatgcc

SEQ ID NO: 2412304 - DNA, 25 bp, Homo sapien
taagtgctgccttgggtaacaaccc

SEQ ID NO: 2412305 - DNA, 25 bp, Homo sapien
gttgcaaggtggctactgctcccca

SEQ ID NO: 2412306 - DNA, 25 bp, Homo sapien
cagggctaatatccacagttcagaa

SEQ ID NO: 2412307 - DNA, 25 bp, Homo sapien
gccagtagcaaaggagacattctta

SEQ ID NO: 2412308 - DNA, 25 bp, Homo sapien
tatctaatgaaaatctttagaggcc

SEQ ID NO: 2412309 - DNA, 25 bp, Homo sapien
catctctcaataactatttccgggc

SEQ ID NO: 2412310 - DNA, 25 bp, Homo sapien
ggcctatagagaacaagatctttca

SEQ ID NO: 2412311 - DNA, 25 bp, Homo sapien
cgggcctgtcttgctgtactctaaa

SEQ ID NO: 2412312 - DNA, 25 bp, Homo sapien
ctgtcaccttgtctagcaggatgca

SEQ ID NO: 2412313 - DNA, 25 bp, Homo sapien
gtcaccttgtctagcaggatgcaaa

SEQ ID NO: 2412314 - DNA, 25 bp, Homo sapien
tgtcaccttgtctagcaggatgcaa

SEQ ID NO: 2412315 - DNA, 25 bp, Homo sapien
caccttgtctagcaggatgcaaatc

SEQ ID NO: 2412316 - DNA, 25 bp, Homo sapien
tccaatcttttcattaatataaggt

SEQ ID NO: 2412317 - DNA, 25 bp, Homo sapien
caatcttttcattaatataaggtct

SEQ ID NO: 2412318 - DNA, 25 bp, Homo sapien
tcttttcattaatataaggtctcta

SEQ ID NO: 2412319 - DNA, 25 bp, Homo sapien
cttttcattaatataaggtctctaa

SEQ ID NO: 2412320 - DNA, 25 bp, Homo sapien
ttcaataattgacttcagcagtaat

SEQ ID NO: 2412321 - DNA, 25 bp, Homo sapien
tattcaataattgacttcagcagta

SEQ ID NO: 2412322 - DNA, 25 bp, Homo sapien
ttattcaataattgacttcagcagt

SEQ ID NO: 2412323 - DNA, 25 bp, Homo sapien
caataattgacttcagcagtaatga

SEQ ID NO: 2412324 - DNA, 25 bp, Homo sapien
aataacagccgcctcaccacgtgga

SEQ ID NO: 2412325 - DNA, 25 bp, Homo sapien
ttgggatacgaaataacagccgcct

SEQ ID NO: 2412326 - DNA, 25 bp, Homo sapien
tggaccatttctgtaattggtgccc

SEQ ID NO: 2412327 - DNA, 25 bp, Homo sapien
ctctgaggtctttcgttgggatacg

SEQ ID NO: 2412328 - DNA, 25 bp, Homo sapien
cttttacttgttgttctgtaattct

SEQ ID NO: 2412329 - DNA, 25 bp, Homo sapien
cataggatttgaaattaactagtac

SEQ ID NO: 2412330 - DNA, 25 bp, Homo sapien
actagtacttttacttgttgttctg

SEQ ID NO: 2412331 - DNA, 25 bp, Homo sapien
tttccataggatttgaaattaacta

SEQ ID NO: 2412332 - DNA, 25 bp, Homo sapien
ccttcatgagggtagtgccagtgct

SEQ ID NO: 2412333 - DNA, 25 bp, Homo sapien
tgctcagaataagaactgaactccc

SEQ ID NO: 2412334 - DNA, 25 bp, Homo sapien
gtgctcagaataagaactgaactcc

SEQ ID NO: 2412335 - DNA, 25 bp, Homo sapien
gtacttcctcagtatccttggagca

SEQ ID NO: 2412336 - DNA, 25 bp, Homo sapien
gagcacttcagatcccccagtgtag

SEQ ID NO: 2412337 - DNA, 25 bp, Homo sapien
cacctgagtacttcctcagtatcct

SEQ ID NO: 2412338 - DNA, 25 bp, Homo sapien
tgtagctactgcctgaaccagaggg

SEQ ID NO: 2412339 - DNA, 25 bp, Homo sapien
tctgcctaagggagctccatggctc

SEQ ID NO: 2412340 - DNA, 25 bp, Homo sapien
tgagaggggtgagatgcacgggttc

SEQ ID NO: 2412341 - DNA, 25 bp, Homo sapien
tgcctctgcctaagggagctccatg

SEQ ID NO: 2412342 - DNA, 25 bp, Homo sapien
gaggggtgagatgcacgggttcatg

SEQ ID NO: 2412343 - DNA, 25 bp, Homo sapien
ctaaaatgacagacaggcaattcgg

SEQ ID NO: 2412344 - DNA, 25 bp, Homo sapien
ttccagtagaatgatccaaaagctg

SEQ ID NO: 2412345 - DNA, 25 bp, Homo sapien
tgggtgcatttgagctctccagcga

SEQ ID NO: 2412346 - DNA, 25 bp, Homo sapien
tgtaccttaaccttcaaatgggtgc

SEQ ID NO: 2412347 - DNA, 25 bp, Homo sapien
taatagattcaacgtgaggttccct

SEQ ID NO: 2412348 - DNA, 25 bp, Homo sapien
ggatggttggataagaatgacccag

SEQ ID NO: 2412349 - DNA, 25 bp, Homo sapien
cctaaaaagaattgtgtctaccaca

SEQ ID NO: 2412350 - DNA, 25 bp, Homo sapien
tctttgcacactagcgaaggcctga

SEQ ID NO: 2412351 - DNA, 25 bp, Homo sapien
gaaaaacacaggcttatgatactgt

SEQ ID NO: 2412352 - DNA, 25 bp, Homo sapien
actgttaagtaatcatgcacctagg

SEQ ID NO: 2412353 - DNA, 25 bp, Homo sapien
gaaagaaggcagtctaaagaagctt

SEQ ID NO: 2412354 - DNA, 25 bp, Homo sapien
taggtgaatggatagccaaactggg

SEQ ID NO: 2412355 - DNA, 25 bp, Homo sapien
gatgaagcaaacttagaatccttaa

SEQ ID NO: 2412356 - DNA, 25 bp, Homo sapien
aacagcattgcattgattcagtaag

SEQ ID NO: 2412357 - DNA, 25 bp, Homo sapien
ctgctggggcagatagtgaaacaca

SEQ ID NO: 2412358 - DNA, 25 bp, Homo sapien
taagcctatgaacttataataaaac

SEQ ID NO: 2412359 - DNA, 25 bp, Homo sapien
ggttgccccttctggatttcatgac

SEQ ID NO: 2412360 - DNA, 25 bp, Homo sapien
ccccttctggatttcatgacctttc

SEQ ID NO: 2412361 - DNA, 25 bp, Homo sapien
gaaaggttgccccttctggatttca

SEQ ID NO: 2412362 - DNA, 25 bp, Homo sapien
tctcctggaaaggttgccccttctg

SEQ ID NO: 2412363 - DNA, 25 bp, Homo sapien
taactgtgcaggaatatttacaaca

SEQ ID NO: 2412364 - DNA, 25 bp, Homo sapien
ccaaagaggcctctgaccacaggat

SEQ ID NO: 2412365 - DNA, 25 bp, Homo sapien
taagggtaagaagacactgccaaag

SEQ ID NO: 2412366 - DNA, 25 bp, Homo sapien
tcatttgatcattactaactgtgca

SEQ ID NO: 2412367 - DNA, 25 bp, Homo sapien
tcttctcttggctaagggctcagga

SEQ ID NO: 2412368 - DNA, 25 bp, Homo sapien
taaggccagaaagtagaaggtgctc

SEQ ID NO: 2412369 - DNA, 25 bp, Homo sapien
tctccaggcccagtaaataagaacc

SEQ ID NO: 2412370 - DNA, 25 bp, Homo sapien
gttccttggcaagcaaacaacagct

SEQ ID NO: 2412371 - DNA, 25 bp, Homo sapien
tatacacaatgatcgcccttctggg

SEQ ID NO: 2412372 - DNA, 25 bp, Homo sapien
gaggtcttcgagcatctccccaata

SEQ ID NO: 2412373 - DNA, 25 bp, Homo sapien
aagttccttatggagagctcaaccc

SEQ ID NO: 2412374 - DNA, 25 bp, Homo sapien
taagggtctttaccacttcgtgtgc

SEQ ID NO: 2412375 - DNA, 25 bp, Homo sapien
ctgttctcttgtttctcttctccat

SEQ ID NO: 2412376 - DNA, 25 bp, Homo sapien
cctccatgaggggataaaagtgatg

SEQ ID NO: 2412377 - DNA, 25 bp, Homo sapien
tttctcccaccaagaagtgtcaaag

SEQ ID NO: 2412378 - DNA, 25 bp, Homo sapien
tttcagagtaaaatgccatctcctc

SEQ ID NO: 2412379 - DNA, 25 bp, Homo sapien
tgtcaaaggagaaccctatgttttc

SEQ ID NO: 2412380 - DNA, 25 bp, Homo sapien
ggagatgtaggaagtacacccttac

SEQ ID NO: 2412381 - DNA, 25 bp, Homo sapien
gctgttattgatgtccctcctagga

SEQ ID NO: 2412382 - DNA, 25 bp, Homo sapien
tctattatataggagtcatgcctag

SEQ ID NO: 2412383 - DNA, 25 bp, Homo sapien
caattaagttgtacagcatgttctc

SEQ ID NO: 2412384 - DNA, 25 bp, Homo sapien
ttaaggctggaacaaagcttgatcc

SEQ ID NO: 2412385 - DNA, 25 bp, Homo sapien
tagtgctgccggcaatccgaggtag

SEQ ID NO: 2412386 - DNA, 25 bp, Homo sapien
gaagaggcattttcaccaggtagat

SEQ ID NO: 2412387 - DNA, 25 bp, Homo sapien
gtctctataagctctgttcctgaag

SEQ ID NO: 2412388 - DNA, 25 bp, Homo sapien
taagtaatatctctggttaacccta

SEQ ID NO: 2412389 - DNA, 25 bp, Homo sapien
catttgtgggacaagtatattgaaa

SEQ ID NO: 2412390 - DNA, 25 bp, Homo sapien
tacagaagttgatttagtatgtgtc

SEQ ID NO: 2412391 - DNA, 25 bp, Homo sapien
caattactcttgtacaatttgaagt

SEQ ID NO: 2412392 - DNA, 25 bp, Homo sapien
aaaagttacgtgtgaatggtgctgc

SEQ ID NO: 2412393 - DNA, 25 bp, Homo sapien
agtatctctgctggaaataaccaca

SEQ ID NO: 2412394 - DNA, 25 bp, Homo sapien
tgaggcttcagactcgtgagatgat

SEQ ID NO: 2412395 - DNA, 25 bp, Homo sapien
tgctgcgttatgcacagtctatgct

SEQ ID NO: 2412396 - DNA, 25 bp, Homo sapien
atatatcctgcatgcccctgactca

SEQ ID NO: 2412397 - DNA, 25 bp, Homo sapien
ctgaaggtggtggaatcatatatcc

SEQ ID NO: 2412398 - DNA, 25 bp, Homo sapien
tggtggaatcatatatcctgcatgc

SEQ ID NO: 2412399 - DNA, 25 bp, Homo sapien
gaatcatatatcctgcatgcccctg

SEQ ID NO: 2412400 - DNA, 25 bp, Homo sapien
catgtggaatccattaaagcgccaa

SEQ ID NO: 2412401 - DNA, 25 bp, Homo sapien
gaatccattaaagcgccaaaatata

SEQ ID NO: 2412402 - DNA, 25 bp, Homo sapien
aaacatgtggaatccattaaagcgc

SEQ ID NO: 2412403 - DNA, 25 bp, Homo sapien
tgtggaatccattaaagcgccaaaa

SEQ ID NO: 2412404 - DNA, 25 bp, Homo sapien
tgtgtgctgcattctcatatttata

SEQ ID NO: 2412405 - DNA, 25 bp, Homo sapien
aacgtgctttttacatacagaaggg

SEQ ID NO: 2412406 - DNA, 25 bp, Homo sapien
gaagggacatttgctagactgcttt

SEQ ID NO: 2412407 - DNA, 25 bp, Homo sapien
agtgtaattaaggtcagacagggcc

SEQ ID NO: 2412408 - DNA, 25 bp, Homo sapien
tattgttctgataggatgtgggaaa

SEQ ID NO: 2412409 - DNA, 25 bp, Homo sapien
ttctgataggatgtgggaaaaaata

SEQ ID NO: 2412410 - DNA, 25 bp, Homo sapien
tgttctgataggatgtgggaaaaaa

SEQ ID NO: 2412411 - DNA, 25 bp, Homo sapien
taatattgttctgataggatgtggg

SEQ ID NO: 2412412 - DNA, 25 bp, Homo sapien
gcaaaatgtatgtaatcccacacca

SEQ ID NO: 2412413 - DNA, 25 bp, Homo sapien
ccacaccaagggacttctcttcaga

SEQ ID NO: 2412414 - DNA, 25 bp, Homo sapien
gggacttctcttcagatttcataca

SEQ ID NO: 2412415 - DNA, 25 bp, Homo sapien
gtgcaaaatgtatgtaatcccacac

SEQ ID NO: 2412416 - DNA, 25 bp, Homo sapien
aatgaaactgctcatcgctgacaag

SEQ ID NO: 2412417 - DNA, 25 bp, Homo sapien
tatatccaggtatggcagccaaaga

SEQ ID NO: 2412418 - DNA, 25 bp, Homo sapien
gaacagtcaggtcctttgtcgcaca

SEQ ID NO: 2412419 - DNA, 25 bp, Homo sapien
ttaggaagtactggagcatcaagga

SEQ ID NO: 2412420 - DNA, 25 bp, Homo sapien
gcaatccacattgcaatcagcaaag

SEQ ID NO: 2412421 - DNA, 25 bp, Homo sapien
atgtttattcccgttccaatggatg

SEQ ID NO: 2412422 - DNA, 25 bp, Homo sapien
ttttagatggacagttgcaatccac

SEQ ID NO: 2412423 - DNA, 25 bp, Homo sapien
tgtttccacacacaggatcccatat

SEQ ID NO: 2412424 - DNA, 25 bp, Homo sapien
tccattaggtagcaaatagcaagac

SEQ ID NO: 2412425 - DNA, 25 bp, Homo sapien
cattcagactagatcacagtgcgac

SEQ ID NO: 2412426 - DNA, 25 bp, Homo sapien
tgattgtcaaaatacgccctacagg

SEQ ID NO: 2412427 - DNA, 25 bp, Homo sapien
tctgggaatcagcatcattggagat

SEQ ID NO: 2412428 - DNA, 25 bp, Homo sapien
tgaacttcttcataattaaaccacc

SEQ ID NO: 2412429 - DNA, 25 bp, Homo sapien
tgggcagcttgtttgacagtaatct

SEQ ID NO: 2412430 - DNA, 25 bp, Homo sapien
taaccaacatcctatgtgggcagct

SEQ ID NO: 2412431 - DNA, 25 bp, Homo sapien
ccaatacatattggaggtaagttat

SEQ ID NO: 2412432 - DNA, 25 bp, Homo sapien
tagtgtggttgcaggaaaagccgaa

SEQ ID NO: 2412433 - DNA, 25 bp, Homo sapien
tacaatgtgagcatctggctccccg

SEQ ID NO: 2412434 - DNA, 25 bp, Homo sapien
gcagagacacctaaaaccactaggg

SEQ ID NO: 2412435 - DNA, 25 bp, Homo sapien
gaaccccaggtatttgaagctttca

SEQ ID NO: 2412436 - DNA, 25 bp, Homo sapien
aaagtgtgctagtaaggcagagaaa

SEQ ID NO: 2412437 - DNA, 25 bp, Homo sapien
cacactgttcgtgggggggaaagtg

SEQ ID NO: 2412438 - DNA, 25 bp, Homo sapien
tcgtgggggggaaagtgtgctagta

SEQ ID NO: 2412439 - DNA, 25 bp, Homo sapien
ggggggaaagtgtgctagtaaggca

SEQ ID NO: 2412440 - DNA, 25 bp, Homo sapien
aacgaatgcattgaactgtatcaca

SEQ ID NO: 2412441 - DNA, 25 bp, Homo sapien
tataaattggattgcaggaaagact

SEQ ID NO: 2412442 - DNA, 25 bp, Homo sapien
taggtatttaggcatgaaggagatc

SEQ ID NO: 2412443 - DNA, 25 bp, Homo sapien
gaaggagatcatgttaacgaatgca

SEQ ID NO: 2412444 - DNA, 25 bp, Homo sapien
caactgtgtcaaacgaacttggctt

SEQ ID NO: 2412445 - DNA, 25 bp, Homo sapien
gaatgacaactgtgtcaaacgaact

SEQ ID NO: 2412446 - DNA, 25 bp, Homo sapien
tgacaactgtgtcaaacgaacttgg

SEQ ID NO: 2412447 - DNA, 25 bp, Homo sapien
ctgtgtcaaacgaacttggctttgc

SEQ ID NO: 2412448 - DNA, 25 bp, Homo sapien
gtcactgttgagtcttaaagatcag

SEQ ID NO: 2412449 - DNA, 25 bp, Homo sapien
tagctgactgggtagggatcagaac

SEQ ID NO: 2412450 - DNA, 25 bp, Homo sapien
tccacctcctcaacaaattatgttt

SEQ ID NO: 2412451 - DNA, 25 bp, Homo sapien
cagaacacaacagttttgccctcaa

SEQ ID NO: 2412452 - DNA, 25 bp, Homo sapien
tttcttatgcacaatcttggtttgc

SEQ ID NO: 2412453 - DNA, 25 bp, Homo sapien
ttatgcacaatcttggtttgcttaa

SEQ ID NO: 2412454 - DNA, 25 bp, Homo sapien
tcttatgcacaatcttggtttgctt

SEQ ID NO: 2412455 - DNA, 25 bp, Homo sapien
ttcttatgcacaatcttggtttgct

SEQ ID NO: 2412456 - DNA, 25 bp, Homo sapien
cagcatagcatatcatagtgttaga

SEQ ID NO: 2412457 - DNA, 25 bp, Homo sapien
gactggtgactgttgatgacaaatt

SEQ ID NO: 2412458 - DNA, 25 bp, Homo sapien
cggactagttaggtattcttgactg

SEQ ID NO: 2412459 - DNA, 25 bp, Homo sapien
caaattgtctcaacacagcatagca

SEQ ID NO: 2412460 - DNA, 25 bp, Homo sapien
aaggtcaatttcatagtatttagaa

SEQ ID NO: 2412461 - DNA, 25 bp, Homo sapien
tgaaataaaaggtcaatttcatagt

SEQ ID NO: 2412462 - DNA, 25 bp, Homo sapien
aaaaggtcaatttcatagtatttag

SEQ ID NO: 2412463 - DNA, 25 bp, Homo sapien
ctatatgaaataaaaggtcaatttc

SEQ ID NO: 2412464 - DNA, 25 bp, Homo sapien
tgattccatatttttccttcttgac

SEQ ID NO: 2412465 - DNA, 25 bp, Homo sapien
ctttagtgattccatatttttcctt

SEQ ID NO: 2412466 - DNA, 25 bp, Homo sapien
agtgattccatatttttccttcttg

SEQ ID NO: 2412467 - DNA, 25 bp, Homo sapien
ttagtgattccatatttttccttct

SEQ ID NO: 2412468 - DNA, 25 bp, Homo sapien
tctttttgtttgtcttcattttcat

SEQ ID NO: 2412469 - DNA, 25 bp, Homo sapien
ctcttctttttgtttgtcttcattt

SEQ ID NO: 2412470 - DNA, 25 bp, Homo sapien
ttctttttgtttgtcttcattttca

SEQ ID NO: 2412471 - DNA, 25 bp, Homo sapien
aaggaatggcagtgagcacgttaac

SEQ ID NO: 2412472 - DNA, 25 bp, Homo sapien
tcctttggaagtgtgttgggcaaaa

SEQ ID NO: 2412473 - DNA, 25 bp, Homo sapien
ctctagtccttcctttggaagtgtg

SEQ ID NO: 2412474 - DNA, 25 bp, Homo sapien
aaaaggaatggcagtgagcacgtta

SEQ ID NO: 2412475 - DNA, 25 bp, Homo sapien
ccgacccaacgagtgtcagtgggag

SEQ ID NO: 2412476 - DNA, 25 bp, Homo sapien
gcaccgacccaacgagtgtcagtgg

SEQ ID NO: 2412477 - DNA, 25 bp, Homo sapien
atgcaccgacccaacgagtgtcagt

SEQ ID NO: 2412478 - DNA, 25 bp, Homo sapien
accgacccaacgagtgtcagtggga

SEQ ID NO: 2412479 - DNA, 25 bp, Homo sapien
gatgccaacaaaagtccaatcaaag

SEQ ID NO: 2412480 - DNA, 25 bp, Homo sapien
aaaggaccaataatagctcctgttt

SEQ ID NO: 2412481 - DNA, 25 bp, Homo sapien
caaaagtccaatcaaaggaccaata

SEQ ID NO: 2412482 - DNA, 25 bp, Homo sapien
gaatgatgccaacaaaagtccaatc

SEQ ID NO: 2412483 - DNA, 25 bp, Homo sapien
ggacgtacacccacattaatgattt

SEQ ID NO: 2412484 - DNA, 25 bp, Homo sapien
cacgtacaatattgcctactaggac

SEQ ID NO: 2412485 - DNA, 25 bp, Homo sapien
ggagtttcacccattccacgtacaa

SEQ ID NO: 2412486 - DNA, 25 bp, Homo sapien
ctatataggaaatacccaaaggcag

SEQ ID NO: 2412487 - DNA, 25 bp, Homo sapien
catgacattagtgctttgacgataa

SEQ ID NO: 2412488 - DNA, 25 bp, Homo sapien
tagtgctttgacgataaagtgtcag

SEQ ID NO: 2412489 - DNA, 25 bp, Homo sapien
gctttgacgataaagtgtcagtaat

SEQ ID NO: 2412490 - DNA, 25 bp, Homo sapien
aaaagacatgacattagtgctttga

SEQ ID NO: 2412491 - DNA, 25 bp, Homo sapien
gtaggcatttcacagttatatgacc

SEQ ID NO: 2412492 - DNA, 25 bp, Homo sapien
tttcacagttatatgaccatggccc

SEQ ID NO: 2412493 - DNA, 25 bp, Homo sapien
ggcatttcacagttatatgaccatg

SEQ ID NO: 2412494 - DNA, 25 bp, Homo sapien
catttcacagttatatgaccatggc

SEQ ID NO: 2412495 - DNA, 25 bp, Homo sapien
acacaagaaactgtttgaggacaag

SEQ ID NO: 2412496 - DNA, 25 bp, Homo sapien
caagaaactgtttgaggacaagttg

SEQ ID NO: 2412497 - DNA, 25 bp, Homo sapien
agaaactgtttgaggacaagttgcc

SEQ ID NO: 2412498 - DNA, 25 bp, Homo sapien
gaaactgtttgaggacaagttgcct

SEQ ID NO: 2412499 - DNA, 25 bp, Homo sapien
taggtctatgcagtttggttccaaa

SEQ ID NO: 2412500 - DNA, 25 bp, Homo sapien
gaggtagtgattttaagaaacagcc

SEQ ID NO: 2412501 - DNA, 25 bp, Homo sapien
catccaatgccaatcattataggtc

SEQ ID NO: 2412502 - DNA, 25 bp, Homo sapien
taagcccataaccacacatccaatg

SEQ ID NO: 2412503 - DNA, 25 bp, Homo sapien
gagtcaattcgtgggctatacatgg

SEQ ID NO: 2412504 - DNA, 25 bp, Homo sapien
cttccgttagattatgagctgagtc

SEQ ID NO: 2412505 - DNA, 25 bp, Homo sapien
gttagttctaactctctcactggga

SEQ ID NO: 2412506 - DNA, 25 bp, Homo sapien
ggtgatacaggctaagatctaaagg

SEQ ID NO: 2412507 - DNA, 25 bp, Homo sapien
caaatgcacatgttattgccaacag

SEQ ID NO: 2412508 - DNA, 25 bp, Homo sapien
catggaattcatataagatccagac

SEQ ID NO: 2412509 - DNA, 25 bp, Homo sapien
ccagacagtgttttggatacaaatg

SEQ ID NO: 2412510 - DNA, 25 bp, Homo sapien
gcttccattaatgaatccaactaga

SEQ ID NO: 2412511 - DNA, 25 bp, Homo sapien
cttgcttgcaattcttggtcagaaa

SEQ ID NO: 2412512 - DNA, 25 bp, Homo sapien
cctgttcttgcttgcaattcttggt

SEQ ID NO: 2412513 - DNA, 25 bp, Homo sapien
tgttcttgcttgcaattcttggtca

SEQ ID NO: 2412514 - DNA, 25 bp, Homo sapien
ttcttgcttgcaattcttggtcaga

SEQ ID NO: 2412515 - DNA, 25 bp, Homo sapien
tgagggaaatatccagaacaatctg

SEQ ID NO: 2412516 - DNA, 25 bp, Homo sapien
tgtctaaggcatataagcccaggac

SEQ ID NO: 2412517 - DNA, 25 bp, Homo sapien
taggatgctctgcaacccttgagct

SEQ ID NO: 2412518 - DNA, 25 bp, Homo sapien
gcccaggacagagtattttcagggt

SEQ ID NO: 2412519 - DNA, 25 bp, Homo sapien
cctccaatcttgctcttgaatccat

SEQ ID NO: 2412520 - DNA, 25 bp, Homo sapien
ctaatttgcctatgtctttagaaag

SEQ ID NO: 2412521 - DNA, 25 bp, Homo sapien
gaaagattggtgtccctttcctgta

SEQ ID NO: 2412522 - DNA, 25 bp, Homo sapien
aaatccctccaatcttgctcttgaa

SEQ ID NO: 2412523 - DNA, 25 bp, Homo sapien
gaaattgactgaccatataggctct

SEQ ID NO: 2412524 - DNA, 25 bp, Homo sapien
gaagctatctcattagggattcaac

SEQ ID NO: 2412525 - DNA, 25 bp, Homo sapien
tgtgtgtcagaatggaaaatggaag

SEQ ID NO: 2412526 - DNA, 25 bp, Homo sapien
tataatccgctatctctttagagga

SEQ ID NO: 2412527 - DNA, 25 bp, Homo sapien
atcagccttccaaacaacatgtcct

SEQ ID NO: 2412528 - DNA, 25 bp, Homo sapien
tcacccaattgctctaaagaataaa

SEQ ID NO: 2412529 - DNA, 25 bp, Homo sapien
cacatgctaagcagttcttgttata

SEQ ID NO: 2412530 - DNA, 25 bp, Homo sapien
cctttgttcaccttgaattgccatt

SEQ ID NO: 2412531 - DNA, 25 bp, Homo sapien
catggccaccctggagtcaaggttt

SEQ ID NO: 2412532 - DNA, 25 bp, Homo sapien
agctgcatctccctaccataggtaa

SEQ ID NO: 2412533 - DNA, 25 bp, Homo sapien
ttagagagctaactcctcgggagca

SEQ ID NO: 2412534 - DNA, 25 bp, Homo sapien
tgtaattgaatgtagctcagctgca

SEQ ID NO: 2412535 - DNA, 25 bp, Homo sapien
cttggaaagacatcttattctatgg

SEQ ID NO: 2412536 - DNA, 25 bp, Homo sapien
gaaagacatcttattctatgggttt

SEQ ID NO: 2412537 - DNA, 25 bp, Homo sapien
ttcaacttggaaagacatcttattc

SEQ ID NO: 2412538 - DNA, 25 bp, Homo sapien
caacttggaaagacatcttattcta

SEQ ID NO: 2412539 - DNA, 25 bp, Homo sapien
tttaaatcttgatatgtcttacttc

SEQ ID NO: 2412540 - DNA, 25 bp, Homo sapien
gttttaaatcttgatatgtcttact

SEQ ID NO: 2412541 - DNA, 25 bp, Homo sapien
aatcttgatatgtcttacttctacc

SEQ ID NO: 2412542 - DNA, 25 bp, Homo sapien
taaatcttgatatgtcttacttcta

SEQ ID NO: 2412543 - DNA, 25 bp, Homo sapien
tttgaagtaagtgctgaaaatgaac

SEQ ID NO: 2412544 - DNA, 25 bp, Homo sapien
gaacaacataattgaaatccattgc

SEQ ID NO: 2412545 - DNA, 25 bp, Homo sapien
tccattgcattacaaaaatacctgg

SEQ ID NO: 2412546 - DNA, 25 bp, Homo sapien
cctggaacgctttaatacagattag

SEQ ID NO: 2412547 - DNA, 25 bp, Homo sapien
tcagctgaataccgtttgtcagcat

SEQ ID NO: 2412548 - DNA, 25 bp, Homo sapien
ccactcagctgaataccgtttgtca

SEQ ID NO: 2412549 - DNA, 25 bp, Homo sapien
gccactcagctgaataccgtttgtc

SEQ ID NO: 2412550 - DNA, 25 bp, Homo sapien
actcagctgaataccgtttgtcagc

SEQ ID NO: 2412551 - DNA, 25 bp, Homo sapien
gcaaacacggatatatttttactga

SEQ ID NO: 2412552 - DNA, 25 bp, Homo sapien
agagctgtgctgaagagcaaacacg

SEQ ID NO: 2412553 - DNA, 25 bp, Homo sapien
cacttctgcagaactgtcggtgaga

SEQ ID NO: 2412554 - DNA, 25 bp, Homo sapien
tactgagcacgggatacagatccat

SEQ ID NO: 2412555 - DNA, 25 bp, Homo sapien
gtccatgagttctactgtttcgatt

SEQ ID NO: 2412556 - DNA, 25 bp, Homo sapien
catttatcaaccacaaggaatcaaa

SEQ ID NO: 2412557 - DNA, 25 bp, Homo sapien
tttatcaaccacaaggaatcaaagc

SEQ ID NO: 2412558 - DNA, 25 bp, Homo sapien
tatcaaccacaaggaatcaaagcca

SEQ ID NO: 2412559 - DNA, 25 bp, Homo sapien
cattttccattgcactttgagccat

SEQ ID NO: 2412560 - DNA, 25 bp, Homo sapien
tctgtaagtgccactttaggaggct

SEQ ID NO: 2412561 - DNA, 25 bp, Homo sapien
tcccaacattcagtgactggaacag

SEQ ID NO: 2412562 - DNA, 25 bp, Homo sapien
gaaacttgatctgccttgctcacct

SEQ ID NO: 2412563 - DNA, 25 bp, Homo sapien
taatctaacaccctgaacctggaac

SEQ ID NO: 2412564 - DNA, 25 bp, Homo sapien
tctgcggacactgtgccgacaatta

SEQ ID NO: 2412565 - DNA, 25 bp, Homo sapien
agtacctctcagtcctctgcggaca

SEQ ID NO: 2412566 - DNA, 25 bp, Homo sapien
taatgtctccactacactcatgatc

SEQ ID NO: 2412567 - DNA, 25 bp, Homo sapien
actcatgatcccagtacctctcagt

SEQ ID NO: 2412568 - DNA, 25 bp, Homo sapien
ctgaaagcagtgtagctatggtcgt

SEQ ID NO: 2412569 - DNA, 25 bp, Homo sapien
gcagtgtagctatggtcgtagggaa

SEQ ID NO: 2412570 - DNA, 25 bp, Homo sapien
cagtgtagctatggtcgtagggaaa

SEQ ID NO: 2412571 - DNA, 25 bp, Homo sapien
aaagcagtgtagctatggtcgtagg

SEQ ID NO: 2412572 - DNA, 25 bp, Homo sapien
tagatgggataatggtttcagagct

SEQ ID NO: 2412573 - DNA, 25 bp, Homo sapien
tgagcaagatagatcatttgttgat

SEQ ID NO: 2412574 - DNA, 25 bp, Homo sapien
aggtaggaatatagagtgagcaaga

SEQ ID NO: 2412575 - DNA, 25 bp, Homo sapien
aattatgtgatctctaggatttgtt

SEQ ID NO: 2412576 - DNA, 25 bp, Homo sapien
tatgactgtgcctgacatatgatag

SEQ ID NO: 2412577 - DNA, 25 bp, Homo sapien
caaagatgaagtgggatatcgcata

SEQ ID NO: 2412578 - DNA, 25 bp, Homo sapien
aaatatcctggatcagacagataag

SEQ ID NO: 2412579 - DNA, 25 bp, Homo sapien
taaccaccgaagaggtgcaaagatg

SEQ ID NO: 2412580 - DNA, 25 bp, Homo sapien
tagaataatccctaccacagagtag

SEQ ID NO: 2412581 - DNA, 25 bp, Homo sapien
ggtttagatataccaaaagtctgtg

SEQ ID NO: 2412582 - DNA, 25 bp, Homo sapien
tacctatggatctctatctaagtgc

SEQ ID NO: 2412583 - DNA, 25 bp, Homo sapien
gaagcttcatgggattcagccattg

SEQ ID NO: 2412584 - DNA, 25 bp, Homo sapien
cattagaatgatcgtcatcttgtct

SEQ ID NO: 2412585 - DNA, 25 bp, Homo sapien
gagtgtgcatgtcatattataattc

SEQ ID NO: 2412586 - DNA, 25 bp, Homo sapien
tcttctcattagaatgatcgtcatc

SEQ ID NO: 2412587 - DNA, 25 bp, Homo sapien
tctcattagaatgatcgtcatcttg

SEQ ID NO: 2412588 - DNA, 25 bp, Homo sapien
tgtgcttgctggtactaagaggcta

SEQ ID NO: 2412589 - DNA, 25 bp, Homo sapien
taaaactgctttgtatccatgaggg

SEQ ID NO: 2412590 - DNA, 25 bp, Homo sapien
taattgtaagtacccctgataagca

SEQ ID NO: 2412591 - DNA, 25 bp, Homo sapien
aataaaatcctgctcctgactcggt

SEQ ID NO: 2412592 - DNA, 25 bp, Homo sapien
taacatagcaggcacttcacaaagc

SEQ ID NO: 2412593 - DNA, 25 bp, Homo sapien
taagtgtgctgtgaaataaccaagg

SEQ ID NO: 2412594 - DNA, 25 bp, Homo sapien
caggaagatgatgatagtaacatag

SEQ ID NO: 2412595 - DNA, 25 bp, Homo sapien
ccaaggtagtcccattaaaatcagg

SEQ ID NO: 2412596 - DNA, 25 bp, Homo sapien
aaaaaattacatattgagtagccag

SEQ ID NO: 2412597 - DNA, 25 bp, Homo sapien
tccatactgtaagaccaacagattt

SEQ ID NO: 2412598 - DNA, 25 bp, Homo sapien
gagtagccagtatgaataaggcacc

SEQ ID NO: 2412599 - DNA, 25 bp, Homo sapien
cctcaaacgtgtaagctgcagcttc

SEQ ID NO: 2412600 - DNA, 25 bp, Homo sapien
ctcatgacatcggacaggctaaagg

SEQ ID NO: 2412601 - DNA, 25 bp, Homo sapien
ggtctcatgacatcggacaggctaa

SEQ ID NO: 2412602 - DNA, 25 bp, Homo sapien
tgacatcggacaggctaaagggcac

SEQ ID NO: 2412603 - DNA, 25 bp, Homo sapien
gacagggtctcatgacatcggacag

SEQ ID NO: 2412604 - DNA, 25 bp, Homo sapien
cattaatcctactaagaggcacgca

SEQ ID NO: 2412605 - DNA, 25 bp, Homo sapien
ggcacaggcaggcaacttaaccatt

SEQ ID NO: 2412606 - DNA, 25 bp, Homo sapien
tttcgagtgcaagatgaatccaggc

SEQ ID NO: 2412607 - DNA, 25 bp, Homo sapien
tacttacagcgaattggcaaaaacc

SEQ ID NO: 2412608 - DNA, 25 bp, Homo sapien
gatgagtagtgtgagctcccgagca

SEQ ID NO: 2412609 - DNA, 25 bp, Homo sapien
cagtaaaccactgggagtccggcag

SEQ ID NO: 2412610 - DNA, 25 bp, Homo sapien
tgctccgccgcgatattcagtaaac

SEQ ID NO: 2412611 - DNA, 25 bp, Homo sapien
tctggtaaggcaccggaagtgaccg

SEQ ID NO: 2412612 - DNA, 25 bp, Homo sapien
gcccagtatgggccgtagaacctgg

SEQ ID NO: 2412613 - DNA, 25 bp, Homo sapien
tctgagatgtaggtgggcccagtat

SEQ ID NO: 2412614 - DNA, 25 bp, Homo sapien
tagaacctgggtctgaggtgtaggc

SEQ ID NO: 2412615 - DNA, 25 bp, Homo sapien
ggtgtctgagatgtaggtgggccca

SEQ ID NO: 2412616 - DNA, 25 bp, Homo sapien
tgccaaagcatcttgacattggcca

SEQ ID NO: 2412617 - DNA, 25 bp, Homo sapien
gccaaagcatcttgacattggccac

SEQ ID NO: 2412618 - DNA, 25 bp, Homo sapien
ccaaagcatcttgacattggccact

SEQ ID NO: 2412619 - DNA, 25 bp, Homo sapien
cctcacagtagcaagggatgccagt

SEQ ID NO: 2412620 - DNA, 25 bp, Homo sapien
aatggttgttggtcccctcacagta

SEQ ID NO: 2412621 - DNA, 25 bp, Homo sapien
acagtagcaagggatgccagtttcc

SEQ ID NO: 2412622 - DNA, 25 bp, Homo sapien
tcccactctagggttccctggcagg

SEQ ID NO: 2412623 - DNA, 25 bp, Homo sapien
aatttaaagccaatacatgctagga

SEQ ID NO: 2412624 - DNA, 25 bp, Homo sapien
tttaaagccaatacatgctaggatt

SEQ ID NO: 2412625 - DNA, 25 bp, Homo sapien
agccaatacatgctaggattaaaga

SEQ ID NO: 2412626 - DNA, 25 bp, Homo sapien
taaagccaatacatgctaggattaa

SEQ ID NO: 2412627 - DNA, 25 bp, Homo sapien
tatccattggtgactgcttctgtgg

SEQ ID NO: 2412628 - DNA, 25 bp, Homo sapien
gaaagactgtcaaacattgaactcc

SEQ ID NO: 2412629 - DNA, 25 bp, Homo sapien
aatcagtctgattagttatccattg

SEQ ID NO: 2412630 - DNA, 25 bp, Homo sapien
ttagaggcagtaatttagatagaat

SEQ ID NO: 2412631 - DNA, 25 bp, Homo sapien
tctagatctgttacttgttggtgca

SEQ ID NO: 2412632 - DNA, 25 bp, Homo sapien
tcatttcttacaaaccaatacctgg

SEQ ID NO: 2412633 - DNA, 25 bp, Homo sapien
gggaactaactgctgttgtactcaa

SEQ ID NO: 2412634 - DNA, 25 bp, Homo sapien
gctagtcttaatccctaatcatctg

SEQ ID NO: 2412635 - DNA, 25 bp, Homo sapien
caaaatggacgaatgatgggagctg

SEQ ID NO: 2412636 - DNA, 25 bp, Homo sapien
taccaaaggacgagaatacatcaaa

SEQ ID NO: 2412637 - DNA, 25 bp, Homo sapien
cacagggcttaggttcagatcatga

SEQ ID NO: 2412638 - DNA, 25 bp, Homo sapien
gagctgtcttaattggtgaaaccga

SEQ ID NO: 2412639 - DNA, 25 bp, Homo sapien
atctttccaatacaacactgaccgc

SEQ ID NO: 2412640 - DNA, 25 bp, Homo sapien
tttccaatacaacactgaccgctta

SEQ ID NO: 2412641 - DNA, 25 bp, Homo sapien
tccaatacaacactgaccgcttaga

SEQ ID NO: 2412642 - DNA, 25 bp, Homo sapien
ttgaaatcagttcaaagtttattta

SEQ ID NO: 2412643 - DNA, 25 bp, Homo sapien
tatggctatggtttcaggaacttta

SEQ ID NO: 2412644 - DNA, 25 bp, Homo sapien
ccacgggtctaatgcagcccagaac

SEQ ID NO: 2412645 - DNA, 25 bp, Homo sapien
ggttttataacctgaaatcatctac

SEQ ID NO: 2412646 - DNA, 25 bp, Homo sapien
ctttaaatagagatgtagcaatatc

SEQ ID NO: 2412647 - DNA, 25 bp, Homo sapien
agacgattgtatgaacttattctca

SEQ ID NO: 2412648 - DNA, 25 bp, Homo sapien
aaaacttaagacgattgtatgaact

SEQ ID NO: 2412649 - DNA, 25 bp, Homo sapien
taaaaaacttaagacgattgtatga

SEQ ID NO: 2412650 - DNA, 25 bp, Homo sapien
ttaagacgattgtatgaacttattc

SEQ ID NO: 2412651 - DNA, 25 bp, Homo sapien
aattagaaaatttagtaacattcat

SEQ ID NO: 2412652 - DNA, 25 bp, Homo sapien
attagaaaatttagtaacattcata

SEQ ID NO: 2412653 - DNA, 25 bp, Homo sapien
taattagaaaatttagtaacattca

SEQ ID NO: 2412654 - DNA, 25 bp, Homo sapien
aatgacaagtttgagacgattcagc

SEQ ID NO: 2412655 - DNA, 25 bp, Homo sapien
tttatcaccttgttcagaatgacaa

SEQ ID NO: 2412656 - DNA, 25 bp, Homo sapien
accagattgctgaagcatgtttgca

SEQ ID NO: 2412657 - DNA, 25 bp, Homo sapien
cctgtattcttagaaccagattgct

SEQ ID NO: 2412658 - DNA, 25 bp, Homo sapien
atggtagcataagctgtaaaactgt

SEQ ID NO: 2412659 - DNA, 25 bp, Homo sapien
tggtagcataagctgtaaaactgta

SEQ ID NO: 2412660 - DNA, 25 bp, Homo sapien
agcatgtgcctcattgttcagaaga

SEQ ID NO: 2412661 - DNA, 25 bp, Homo sapien
cagaagattagctttaggtcctatt

SEQ ID NO: 2412662 - DNA, 25 bp, Homo sapien
ctttcccatccaagaatcaatcagt

SEQ ID NO: 2412663 - DNA, 25 bp, Homo sapien
tcaatcagtttcaatggagtgagtt

SEQ ID NO: 2412664 - DNA, 25 bp, Homo sapien
tcagttttgctgcaccctttcccat

SEQ ID NO: 2412665 - DNA, 25 bp, Homo sapien
tcttgattagatctctgcagtactc

SEQ ID NO: 2412666 - DNA, 25 bp, Homo sapien
tgtctgttctagtataggctcctga

SEQ ID NO: 2412667 - DNA, 25 bp, Homo sapien
tgtgagccaccctaaacattgattt

SEQ ID NO: 2412668 - DNA, 25 bp, Homo sapien
tacagtggcttccacctaacaaggc

SEQ ID NO: 2412669 - DNA, 25 bp, Homo sapien
aaaaattggttatcagaagccctgc

SEQ ID NO: 2412670 - DNA, 25 bp, Homo sapien
aatgttgagccatcaacacacgacg

SEQ ID NO: 2412671 - DNA, 25 bp, Homo sapien
ttacagcagttatcgcacattttgt

SEQ ID NO: 2412672 - DNA, 25 bp, Homo sapien
ccatacttcatcaaaatgttgagcc

SEQ ID NO: 2412673 - DNA, 25 bp, Homo sapien
cattttgttacatgcttctgagttc

SEQ ID NO: 2412674 - DNA, 25 bp, Homo sapien
gacagtatgataccatctcataaag

SEQ ID NO: 2412675 - DNA, 25 bp, Homo sapien
tctcataaagcttctgctgtcccac

SEQ ID NO: 2412676 - DNA, 25 bp, Homo sapien
tatatctccaaagccgtagtacaaa

SEQ ID NO: 2412677 - DNA, 25 bp, Homo sapien
gcttatgttttgacagtatgatacc

SEQ ID NO: 2412678 - DNA, 25 bp, Homo sapien
tctggcttatcaattcccataccaa

SEQ ID NO: 2412679 - DNA, 25 bp, Homo sapien
gatggataacaaacctcacatctgg

SEQ ID NO: 2412680 - DNA, 25 bp, Homo sapien
tcccataccaaatgcaacagttgcc

SEQ ID NO: 2412681 - DNA, 25 bp, Homo sapien
ccatggatttactcattgaatgatg

SEQ ID NO: 2412682 - DNA, 25 bp, Homo sapien
tctatgaactgtggtcttatcttct

SEQ ID NO: 2412683 - DNA, 25 bp, Homo sapien
ttggcatggtaagcacctgcatgaa

SEQ ID NO: 2412684 - DNA, 25 bp, Homo sapien
caaactaaccgtaacttgttcagag

SEQ ID NO: 2412685 - DNA, 25 bp, Homo sapien
gcatgaattcccagattctgcaaac

SEQ ID NO: 2412686 - DNA, 25 bp, Homo sapien
ttcagtgtttgagggcttctgccga

SEQ ID NO: 2412687 - DNA, 25 bp, Homo sapien
tcttcagtgtttgagggcttctgcc

SEQ ID NO: 2412688 - DNA, 25 bp, Homo sapien
cattaatgagctttacaatatcctc

SEQ ID NO: 2412689 - DNA, 25 bp, Homo sapien
aatcttcagtgtttgagggcttctg

SEQ ID NO: 2412690 - DNA, 25 bp, Homo sapien
tattagggtccttagtatcactcca

SEQ ID NO: 2412691 - DNA, 25 bp, Homo sapien
gaaaagacagctgttaggttatttg

SEQ ID NO: 2412692 - DNA, 25 bp, Homo sapien
gaattggcaaatctttaatggcata

SEQ ID NO: 2412693 - DNA, 25 bp, Homo sapien
gcacatgagcagtgaataacttgca

SEQ ID NO: 2412694 - DNA, 25 bp, Homo sapien
ggaactgccgctttaagataccaag

SEQ ID NO: 2412695 - DNA, 25 bp, Homo sapien
ccaattagtgatgcgttagggaact

SEQ ID NO: 2412696 - DNA, 25 bp, Homo sapien
gcagttgcagtcagcccaattagtg

SEQ ID NO: 2412697 - DNA, 25 bp, Homo sapien
ttctgagcatccgtcaaaacgtgat

SEQ ID NO: 2412698 - DNA, 25 bp, Homo sapien
gcaccgagcccatcatgtaattttt

SEQ ID NO: 2412699 - DNA, 25 bp, Homo sapien
ccgcaccgagcccatcatgtaattt

SEQ ID NO: 2412700 - DNA, 25 bp, Homo sapien
ggaatagacaaaacactgaaggaaa

SEQ ID NO: 2412701 - DNA, 25 bp, Homo sapien
tttaaagacctatgcttcataaatc

SEQ ID NO: 2412702 - DNA, 25 bp, Homo sapien
taagtgctcataatgataagcccag

SEQ ID NO: 2412703 - DNA, 25 bp, Homo sapien
catattaccctatgggccccagtta

SEQ ID NO: 2412704 - DNA, 25 bp, Homo sapien
cacagtagctactgggtagtttagg

SEQ ID NO: 2412705 - DNA, 25 bp, Homo sapien
tatgccattagagagtggtaagtgc

SEQ ID NO: 2412706 - DNA, 25 bp, Homo sapien
gagaaccagctttatcacagacgta

SEQ ID NO: 2412707 - DNA, 25 bp, Homo sapien
tgggcttgcttgtgttcctgtgact

SEQ ID NO: 2412708 - DNA, 25 bp, Homo sapien
gttggcacttttctcagcctttgga

SEQ ID NO: 2412709 - DNA, 25 bp, Homo sapien
aaggactctgcacactacgcatcag

SEQ ID NO: 2412710 - DNA, 25 bp, Homo sapien
tcagcatgaacccatttaacatgct

SEQ ID NO: 2412711 - DNA, 25 bp, Homo sapien
atgtccccactgactacagcagtga

SEQ ID NO: 2412712 - DNA, 25 bp, Homo sapien
tctctggagtcacataaatcagctt

SEQ ID NO: 2412713 - DNA, 25 bp, Homo sapien
tcatccacagcaattcgagtaaatc

SEQ ID NO: 2412714 - DNA, 25 bp, Homo sapien
cataagagagatcaatgggcaaatg

SEQ ID NO: 2412715 - DNA, 25 bp, Homo sapien
gaagcatttaacatggttgctgaaa

SEQ ID NO: 2412716 - DNA, 25 bp, Homo sapien
aatgggcaaatgacgagtgtaaaac

SEQ ID NO: 2412717 - DNA, 25 bp, Homo sapien
gagatcaatgggcaaatgacgagtg

SEQ ID NO: 2412718 - DNA, 25 bp, Homo sapien
catttaaacatggtcaagtccctct

SEQ ID NO: 2412719 - DNA, 25 bp, Homo sapien
gttggtatccccacagaagtgatta

SEQ ID NO: 2412720 - DNA, 25 bp, Homo sapien
tttgccgccatgtgagggtgtagca

SEQ ID NO: 2412721 - DNA, 25 bp, Homo sapien
gaatgaagttatagtaatatgcccc

SEQ ID NO: 2412722 - DNA, 25 bp, Homo sapien
tctgaacataatgctggtaactggt

SEQ ID NO: 2412723 - DNA, 25 bp, Homo sapien
gaacataatgctggtaactggtaac

SEQ ID NO: 2412724 - DNA, 25 bp, Homo sapien
aacataatgctggtaactggtaaca

SEQ ID NO: 2412725 - DNA, 25 bp, Homo sapien
cataatgctggtaactggtaacata

SEQ ID NO: 2412726 - DNA, 25 bp, Homo sapien
ctttccagccattgttacgttaata

SEQ ID NO: 2412727 - DNA, 25 bp, Homo sapien
cagccattgttacgttaatagtttc

SEQ ID NO: 2412728 - DNA, 25 bp, Homo sapien
tgttacgttaatagtttcaagctga

SEQ ID NO: 2412729 - DNA, 25 bp, Homo sapien
tctttaactttaccagaccatggaa

SEQ ID NO: 2412730 - DNA, 25 bp, Homo sapien
tctttattccaagcggcaggtgaag

SEQ ID NO: 2412731 - DNA, 25 bp, Homo sapien
cttctttattccaagcggcaggtga

SEQ ID NO: 2412732 - DNA, 25 bp, Homo sapien
ttctttattccaagcggcaggtgaa

SEQ ID NO: 2412733 - DNA, 25 bp, Homo sapien
gctcttgttgcctttccgtaagttc

SEQ ID NO: 2412734 - DNA, 25 bp, Homo sapien
ctcttgttgcctttccgtaagttct

SEQ ID NO: 2412735 - DNA, 25 bp, Homo sapien
tgttgcctttccgtaagttcttgaa

SEQ ID NO: 2412736 - DNA, 25 bp, Homo sapien
ctggttatagaatccagttcctcag

SEQ ID NO: 2412737 - DNA, 25 bp, Homo sapien
tgacctcagacaagatactcacctg

SEQ ID NO: 2412738 - DNA, 25 bp, Homo sapien
tgttgcccgccatatcaattacaga

SEQ ID NO: 2412739 - DNA, 25 bp, Homo sapien
cagattgatttctgggtgttgcccg

SEQ ID NO: 2412740 - DNA, 25 bp, Homo sapien
gaggcagcgcggatacaatgattag

SEQ ID NO: 2412741 - DNA, 25 bp, Homo sapien
actttttcaaatatcatacaaacag

SEQ ID NO: 2412742 - DNA, 25 bp, Homo sapien
tcaaatatcatacaaacagaaatag

SEQ ID NO: 2412743 - DNA, 25 bp, Homo sapien
agaaaatgtaatcattgctactaac

SEQ ID NO: 2412744 - DNA, 25 bp, Homo sapien
acaaacagaaatagaacagaaggaa

SEQ ID NO: 2412745 - DNA, 25 bp, Homo sapien
tgagataccataggctaaatcctct

SEQ ID NO: 2412746 - DNA, 25 bp, Homo sapien
gaggaaacgccactgagataccata

SEQ ID NO: 2412747 - DNA, 25 bp, Homo sapien
taccataggctaaatcctctctctc

SEQ ID NO: 2412748 - DNA, 25 bp, Homo sapien
gataccataggctaaatcctctctc

SEQ ID NO: 2412749 - DNA, 25 bp, Homo sapien
taaacaggctttggtggccaatcct

SEQ ID NO: 2412750 - DNA, 25 bp, Homo sapien
aacaaatggcagctgctaataaaca

SEQ ID NO: 2412751 - DNA, 25 bp, Homo sapien
caaatggcagctgctaataaacagg

SEQ ID NO: 2412752 - DNA, 25 bp, Homo sapien
tggcagctgctaataaacaggcttt

SEQ ID NO: 2412753 - DNA, 25 bp, Homo sapien
gcccgagttctcagagcagggcagt

SEQ ID NO: 2412754 - DNA, 25 bp, Homo sapien
tcctccgccaatgtgtgggcgaaag

SEQ ID NO: 2412755 - DNA, 25 bp, Homo sapien
gcagggcagtgattaactttccggt

SEQ ID NO: 2412756 - DNA, 25 bp, Homo sapien
tgggcgaaaggaagtgatccgctac

SEQ ID NO: 2412757 - DNA, 25 bp, Homo sapien
agggaaggatgaaacaaaaagcgca

SEQ ID NO: 2412758 - DNA, 25 bp, Homo sapien
gaaggatgaaacaaaaagcgcacac

SEQ ID NO: 2412759 - DNA, 25 bp, Homo sapien
gggaaggatgaaacaaaaagcgcac

SEQ ID NO: 2412760 - DNA, 25 bp, Homo sapien
ggaaggatgaaacaaaaagcgcaca

SEQ ID NO: 2412761 - DNA, 25 bp, Homo sapien
ccttgacccttcaaagctgtaacag

SEQ ID NO: 2412762 - DNA, 25 bp, Homo sapien
cttgacccttcaaagctgtaacagt

SEQ ID NO: 2412763 - DNA, 25 bp, Homo sapien
tgacccttcaaagctgtaacagtag

SEQ ID NO: 2412764 - DNA, 25 bp, Homo sapien
ttgacccttcaaagctgtaacagta

SEQ ID NO: 2412765 - DNA, 25 bp, Homo sapien
ggtgtttgactgtccggtgtccgac

SEQ ID NO: 2412766 - DNA, 25 bp, Homo sapien
gagcagatctttccgctactcggga

SEQ ID NO: 2412767 - DNA, 25 bp, Homo sapien
ggtgtccgactgtcctgtgtccgac

SEQ ID NO: 2412768 - DNA, 25 bp, Homo sapien
cgagaagcccggtctaactctccgg

SEQ ID NO: 2412769 - DNA, 25 bp, Homo sapien
taactcccttctctaattggtcaag

SEQ ID NO: 2412770 - DNA, 25 bp, Homo sapien
tcacagataactcccttctctaatt

SEQ ID NO: 2412771 - DNA, 25 bp, Homo sapien
gggtcggtccgttcagccaatcaca

SEQ ID NO: 2412772 - DNA, 25 bp, Homo sapien
ccgggtcggtccgttcagccaatca

SEQ ID NO: 2412773 - DNA, 25 bp, Homo sapien
gaagcgctcttaaagcggcagtgag

SEQ ID NO: 2412774 - DNA, 25 bp, Homo sapien
tgtttcccggcttcatttctcccga

SEQ ID NO: 2412775 - DNA, 25 bp, Homo sapien
ggctttccgaggtgctgtcgccgct

SEQ ID NO: 2412776 - DNA, 25 bp, Homo sapien
caggtttcgccaataggaagcgctc

SEQ ID NO: 2412777 - DNA, 25 bp, Homo sapien
aatgtctcccgctggactgtactgg

SEQ ID NO: 2412778 - DNA, 25 bp, Homo sapien
tgagaagactggttgaatgctgact

SEQ ID NO: 2412779 - DNA, 25 bp, Homo sapien
caaagatgttttgggcaatgtctcc

SEQ ID NO: 2412780 - DNA, 25 bp, Homo sapien
tcccatgttgtagttgtaggaccat

SEQ ID NO: 2412781 - DNA, 25 bp, Homo sapien
aggtgccctgtagaactctgttaca

SEQ ID NO: 2412782 - DNA, 25 bp, Homo sapien
tatctgctaatgtaagggacatctg

SEQ ID NO: 2412783 - DNA, 25 bp, Homo sapien
gattgactttatataaggtgccctg

SEQ ID NO: 2412784 - DNA, 25 bp, Homo sapien
tggagactcctacctcaatagttaa

SEQ ID NO: 2412785 - DNA, 25 bp, Homo sapien
cgtattggaagaagggaacaagcca

SEQ ID NO: 2412786 - DNA, 25 bp, Homo sapien
tgactctctatagctcatccaggag

SEQ ID NO: 2412787 - DNA, 25 bp, Homo sapien
tatcccatccccaagaatgtggaag

SEQ ID NO: 2412788 - DNA, 25 bp, Homo sapien
tgtgctctttgggaattaccttgca

SEQ ID NO: 2412789 - DNA, 25 bp, Homo sapien
ctcaaaaatgtcatactaaccattg

SEQ ID NO: 2412790 - DNA, 25 bp, Homo sapien
aataattcttcctacaactaaccag

SEQ ID NO: 2412791 - DNA, 25 bp, Homo sapien
tacaactaaccagaacaatctcaaa

SEQ ID NO: 2412792 - DNA, 25 bp, Homo sapien
tcaatgatcaatagctgttaaaata

SEQ ID NO: 2412793 - DNA, 25 bp, Homo sapien
ttctgcctttaatgagtgctcctcc

SEQ ID NO: 2412794 - DNA, 25 bp, Homo sapien
taggatagctattcactcatggatt

SEQ ID NO: 2412795 - DNA, 25 bp, Homo sapien
catgggtaagatcaaggttttcggg

SEQ ID NO: 2412796 - DNA, 25 bp, Homo sapien
taagatggtggtaccatgtacatgg

SEQ ID NO: 2412797 - DNA, 25 bp, Homo sapien
catcactgctctgaggactggaggc

SEQ ID NO: 2412798 - DNA, 25 bp, Homo sapien
cagtgaaaatggtgacttgatattt

SEQ ID NO: 2412799 - DNA, 25 bp, Homo sapien
tatttaaccgatccctttcagcctc

SEQ ID NO: 2412800 - DNA, 25 bp, Homo sapien
tgaggaacgtggctcagtgaaaatg

SEQ ID NO: 2412801 - DNA, 25 bp, Homo sapien
tggaatttatctggaaaagctctgc

SEQ ID NO: 2412802 - DNA, 25 bp, Homo sapien
aaagctctgcttaatgtcaggtgtc

SEQ ID NO: 2412803 - DNA, 25 bp, Homo sapien
cgttggtggtgatgttagttccaca

SEQ ID NO: 2412804 - DNA, 25 bp, Homo sapien
tcaggtgtctggcatgctggtaata

SEQ ID NO: 2412805 - DNA, 25 bp, Homo sapien
gaatcatctggagaacggaaccgcc

SEQ ID NO: 2412806 - DNA, 25 bp, Homo sapien
gcggcgtgactgtttgcaaaatcca

SEQ ID NO: 2412807 - DNA, 25 bp, Homo sapien
cggaaccgcctgtcaacgatgtaaa

SEQ ID NO: 2412808 - DNA, 25 bp, Homo sapien
ctggataatcctttggcggcgtgac

SEQ ID NO: 2412809 - DNA, 25 bp, Homo sapien
ccggagagattcgtggtcacactgg

SEQ ID NO: 2412810 - DNA, 25 bp, Homo sapien
cgtaagcagtaggatcagccacgtg

SEQ ID NO: 2412811 - DNA, 25 bp, Homo sapien
catgaaacagccaaacccggagaga

SEQ ID NO: 2412812 - DNA, 25 bp, Homo sapien
gggatacccatcacagtgcattcag

SEQ ID NO: 2412813 - DNA, 25 bp, Homo sapien
tcagaccagcgcctatatccttgta

SEQ ID NO: 2412814 - DNA, 25 bp, Homo sapien
ctgccaggggaaatagaccaaagct

SEQ ID NO: 2412815 - DNA, 25 bp, Homo sapien
atagaccaaagcttggcttcagacc

SEQ ID NO: 2412816 - DNA, 25 bp, Homo sapien
ttggcttcagaccagcgcctatatc

SEQ ID NO: 2412817 - DNA, 25 bp, Homo sapien
taaccccagggttcatagtatgatg

SEQ ID NO: 2412818 - DNA, 25 bp, Homo sapien
atagtccatgggtagtaagggactg

SEQ ID NO: 2412819 - DNA, 25 bp, Homo sapien
gaaatactccaagatgacaacctct

SEQ ID NO: 2412820 - DNA, 25 bp, Homo sapien
gatagaaactctgggtgcaaaatca

SEQ ID NO: 2412821 - DNA, 25 bp, Homo sapien
taactaatctttctccatacactcc

SEQ ID NO: 2412822 - DNA, 25 bp, Homo sapien
taatttgctacatattgggtcaatc

SEQ ID NO: 2412823 - DNA, 25 bp, Homo sapien
gctcctctttgtgtagacatttctc

SEQ ID NO: 2412824 - DNA, 25 bp, Homo sapien
tctgacactgctttaggctgctcct

SEQ ID NO: 2412825 - DNA, 25 bp, Homo sapien
gttgcccaccaaatggctttagaac

SEQ ID NO: 2412826 - DNA, 25 bp, Homo sapien
cccaccaaatggctttagaactgaa

SEQ ID NO: 2412827 - DNA, 25 bp, Homo sapien
tatgttgcccaccaaatggctttag

SEQ ID NO: 2412828 - DNA, 25 bp, Homo sapien
cttatgttgcccaccaaatggcttt

SEQ ID NO: 2412829 - DNA, 25 bp, Homo sapien
tatctgtgcggttgttgaaaagtcc

SEQ ID NO: 2412830 - DNA, 25 bp, Homo sapien
caatcatgttgtgcgtggtcactgg

SEQ ID NO: 2412831 - DNA, 25 bp, Homo sapien
ccaatccgtctaatggtgctgagga

SEQ ID NO: 2412832 - DNA, 25 bp, Homo sapien
gggtcggtggagtcatcaatcatgt

SEQ ID NO: 2412833 - DNA, 25 bp, Homo sapien
tcataattgttagatcatctcgatc

SEQ ID NO: 2412834 - DNA, 25 bp, Homo sapien
tctcgatctaaaatatcgttcaggt

SEQ ID NO: 2412835 - DNA, 25 bp, Homo sapien
gatcatctcgatctaaaatatcgtt

SEQ ID NO: 2412836 - DNA, 25 bp, Homo sapien
aaatatcgttcaggtcaggaatttc

SEQ ID NO: 2412837 - DNA, 25 bp, Homo sapien
ttaataatgcatcatagagtttttt

SEQ ID NO: 2412838 - DNA, 25 bp, Homo sapien
gctgttttcgcactgcttgtccttt

SEQ ID NO: 2412839 - DNA, 25 bp, Homo sapien
tgttttcgcactgcttgtcctttca

SEQ ID NO: 2412840 - DNA, 25 bp, Homo sapien
aaattatttgtcttggcaggcataa

SEQ ID NO: 2412841 - DNA, 25 bp, Homo sapien
tttgtcttggcaggcataatgaaaa

SEQ ID NO: 2412842 - DNA, 25 bp, Homo sapien
tataccatgtcctagagctttctta

SEQ ID NO: 2412843 - DNA, 25 bp, Homo sapien
gagtgttataccatgtcctagagct

SEQ ID NO: 2412844 - DNA, 25 bp, Homo sapien
cctacaagagtgttataccatgtcc

SEQ ID NO: 2412845 - DNA, 25 bp, Homo sapien
agttctccctacaagagtgttatac

SEQ ID NO: 2412846 - DNA, 25 bp, Homo sapien
tcagcaggaaatttagcctggataa

SEQ ID NO: 2412847 - DNA, 25 bp, Homo sapien
tcttttcaagatcaaagtcgagatg

SEQ ID NO: 2412848 - DNA, 25 bp, Homo sapien
gattctaggaagatgtcagctcctt

SEQ ID NO: 2412849 - DNA, 25 bp, Homo sapien
tgtttgaaaactcatacctcccagc

SEQ ID NO: 2412850 - DNA, 25 bp, Homo sapien
aatcttggattctggccttgtacat

SEQ ID NO: 2412851 - DNA, 25 bp, Homo sapien
tgaaaatttcttaacattcaagccg

SEQ ID NO: 2412852 - DNA, 25 bp, Homo sapien
aatgacctcgaacaaaatcttggat

SEQ ID NO: 2412853 - DNA, 25 bp, Homo sapien
cattcaagccgtttggagtaactac

SEQ ID NO: 2412854 - DNA, 25 bp, Homo sapien
cgcaatgaacggaagctcgctccat

SEQ ID NO: 2412855 - DNA, 25 bp, Homo sapien
ttctcttcagcatatgttcagcttc

SEQ ID NO: 2412856 - DNA, 25 bp, Homo sapien
tggtgaacacgtgagcgcaatgaac

SEQ ID NO: 2412857 - DNA, 25 bp, Homo sapien
gctgttatttcagaaaccgtggtga

SEQ ID NO: 2412858 - DNA, 25 bp, Homo sapien
cagcctgccattcatggaattgggc

SEQ ID NO: 2412859 - DNA, 25 bp, Homo sapien
gaattgggcaacgacatatttacca

SEQ ID NO: 2412860 - DNA, 25 bp, Homo sapien
tcctggctcgagaaaggatcagtcc

SEQ ID NO: 2412861 - DNA, 25 bp, Homo sapien
gagatacctcccaagtagtgtagcg

SEQ ID NO: 2412862 - DNA, 25 bp, Homo sapien
cagcatatcattggcttctcggtca

SEQ ID NO: 2412863 - DNA, 25 bp, Homo sapien
gaatagcctatgtcaaaaagtacca

SEQ ID NO: 2412864 - DNA, 25 bp, Homo sapien
tgtccagattccaagctgaatagcc

SEQ ID NO: 2412865 - DNA, 25 bp, Homo sapien
catgataaggaatgccgacactgca

SEQ ID NO: 2412866 - DNA, 25 bp, Homo sapien
ttgttttggcctttgtctgaatcac

SEQ ID NO: 2412867 - DNA, 25 bp, Homo sapien
ggttcacactgttccacctgagtct

SEQ ID NO: 2412868 - DNA, 25 bp, Homo sapien
gaaaatagttctctccccattcatc

SEQ ID NO: 2412869 - DNA, 25 bp, Homo sapien
cattgcgtccactgctcttctgaca

SEQ ID NO: 2412870 - DNA, 25 bp, Homo sapien
aggaagttcttcgacttcccactgg

SEQ ID NO: 2412871 - DNA, 25 bp, Homo sapien
cagagagggatcggcctcgaagcat

SEQ ID NO: 2412872 - DNA, 25 bp, Homo sapien
cacaggaagttcttcgacttcccac

SEQ ID NO: 2412873 - DNA, 25 bp, Homo sapien
cttcccaagcaacttcaaagagcag

SEQ ID NO: 2412874 - DNA, 25 bp, Homo sapien
gaagagaacttacaggcacaaaagt

SEQ ID NO: 2412875 - DNA, 25 bp, Homo sapien
ggtagagttaccaggctttggtagc

SEQ ID NO: 2412876 - DNA, 25 bp, Homo sapien
tttcaattagttgtaatcccaggag

SEQ ID NO: 2412877 - DNA, 25 bp, Homo sapien
tacagtcctccgagactcctttgaa

SEQ ID NO: 2412878 - DNA, 25 bp, Homo sapien
gctcagattgcaagcattaaaccaa

SEQ ID NO: 2412879 - DNA, 25 bp, Homo sapien
tctgtgagcccaaattcacatattg

SEQ ID NO: 2412880 - DNA, 25 bp, Homo sapien
gctttgattctgtgagcccaaattc

SEQ ID NO: 2412881 - DNA, 25 bp, Homo sapien
cattaaaccaagcataggctttgat

SEQ ID NO: 2412882 - DNA, 25 bp, Homo sapien
aagcaaactgtgatccatgtacatg

SEQ ID NO: 2412883 - DNA, 25 bp, Homo sapien
aaagcaaactgtgatccatgtacat

SEQ ID NO: 2412884 - DNA, 25 bp, Homo sapien
agcaaactgtgatccatgtacatgg

SEQ ID NO: 2412885 - DNA, 25 bp, Homo sapien
tcctttagcttctggttgataacgc

SEQ ID NO: 2412886 - DNA, 25 bp, Homo sapien
aacgctggttaatccccgggcattg

SEQ ID NO: 2412887 - DNA, 25 bp, Homo sapien
tggttgataacgctggttaatcccc

SEQ ID NO: 2412888 - DNA, 25 bp, Homo sapien
gcttctggttgataacgctggttaa

SEQ ID NO: 2412889 - DNA, 25 bp, Homo sapien
caacaaagcatcgagattaagacat

SEQ ID NO: 2412890 - DNA, 25 bp, Homo sapien
acaaagcatcgagattaagacatga

SEQ ID NO: 2412891 - DNA, 25 bp, Homo sapien
gaacaacaaagcatcgagattaaga

SEQ ID NO: 2412892 - DNA, 25 bp, Homo sapien
agaacaacaaagcatcgagattaag

SEQ ID NO: 2412893 - DNA, 25 bp, Homo sapien
tgcccttgctgtccaagacttctgt

SEQ ID NO: 2412894 - DNA, 25 bp, Homo sapien
tatgattttatctggtctgagcctc

SEQ ID NO: 2412895 - DNA, 25 bp, Homo sapien
taaatgaatctttttgtagaataca

SEQ ID NO: 2412896 - DNA, 25 bp, Homo sapien
tgtagaatacaatgcgagaaatcat

SEQ ID NO: 2412897 - DNA, 25 bp, Homo sapien
caatagcccagttggtatatccttt

SEQ ID NO: 2412898 - DNA, 25 bp, Homo sapien
ccaatagcccagttggtatatcctt

SEQ ID NO: 2412899 - DNA, 25 bp, Homo sapien
tccaatagcccagttggtatatcct

SEQ ID NO: 2412900 - DNA, 25 bp, Homo sapien
gacatcactgaaataagactcaatc

SEQ ID NO: 2412901 - DNA, 25 bp, Homo sapien
cagacctgactttgactactgctct

SEQ ID NO: 2412902 - DNA, 25 bp, Homo sapien
aagactcaatcattattgaaaccag

SEQ ID NO: 2412903 - DNA, 25 bp, Homo sapien
tactgctctgtctctaactataatc

SEQ ID NO: 2412904 - DNA, 25 bp, Homo sapien
ggataagagtatcttgcctgacagt

SEQ ID NO: 2412905 - DNA, 25 bp, Homo sapien
gacacccaatcattagaagaccttg

SEQ ID NO: 2412906 - DNA, 25 bp, Homo sapien
gagaagcagcaggaataactctagc

SEQ ID NO: 2412907 - DNA, 25 bp, Homo sapien
cccataaaggccctggcacttgaga

SEQ ID NO: 2412908 - DNA, 25 bp, Homo sapien
tggattcaattcctggagagaaaca

SEQ ID NO: 2412909 - DNA, 25 bp, Homo sapien
tttcactatcattgtcagttcccat

SEQ ID NO: 2412910 - DNA, 25 bp, Homo sapien
gtcagttcccatttctggattcaat

SEQ ID NO: 2412911 - DNA, 25 bp, Homo sapien
catcttatgcacttccttccaattt

SEQ ID NO: 2412912 - DNA, 25 bp, Homo sapien
cacattcacaccactccacacagcc

SEQ ID NO: 2412913 - DNA, 25 bp, Homo sapien
ctgccacattcacaccactccacac

SEQ ID NO: 2412914 - DNA, 25 bp, Homo sapien
gccacattcacaccactccacacag

SEQ ID NO: 2412915 - DNA, 25 bp, Homo sapien
acattcacaccactccacacagcca

SEQ ID NO: 2412916 - DNA, 25 bp, Homo sapien
aaaaaaagacattgcagttatttct

SEQ ID NO: 2412917 - DNA, 25 bp, Homo sapien
agacattgcagttatttcttacatt

SEQ ID NO: 2412918 - DNA, 25 bp, Homo sapien
aaagacattgcagttatttcttaca

SEQ ID NO: 2412919 - DNA, 25 bp, Homo sapien
aaaagacattgcagttatttcttac

SEQ ID NO: 2412920 - DNA, 25 bp, Homo sapien
gaaaatagtcctttacacaggtggc

SEQ ID NO: 2412921 - DNA, 25 bp, Homo sapien
taaattgtctgaacacgaagcacta

SEQ ID NO: 2412922 - DNA, 25 bp, Homo sapien
tccctggaggtaaacaattcttgaa

SEQ ID NO: 2412923 - DNA, 25 bp, Homo sapien
gaactagaggacatgtaatatcact

SEQ ID NO: 2412924 - DNA, 25 bp, Homo sapien
gatataccagtagcacaagcacacc

SEQ ID NO: 2412925 - DNA, 25 bp, Homo sapien
ggctcattagggaaacagctgattc

SEQ ID NO: 2412926 - DNA, 25 bp, Homo sapien
gaaaagcctgggacaacttgagcat

SEQ ID NO: 2412927 - DNA, 25 bp, Homo sapien
tccgaggccacattgatatcaacaa

SEQ ID NO: 2412928 - DNA, 25 bp, Homo sapien
atgccaagtttttcagccataaggt

SEQ ID NO: 2412929 - DNA, 25 bp, Homo sapien
tccaatcacgcggtgtttgggtaat

SEQ ID NO: 2412930 - DNA, 25 bp, Homo sapien
aatcacgcggtgtttgggtaatcca

SEQ ID NO: 2412931 - DNA, 25 bp, Homo sapien
cacgcggtgtttgggtaatccactt

SEQ ID NO: 2412932 - DNA, 25 bp, Homo sapien
aagccttatatgaagattgcaagac

SEQ ID NO: 2412933 - DNA, 25 bp, Homo sapien
caaaaccaacttcaactgttaggca

SEQ ID NO: 2412934 - DNA, 25 bp, Homo sapien
aacttcaactgttaggcagcttggg

SEQ ID NO: 2412935 - DNA, 25 bp, Homo sapien
ccccaaatgagatgtggccagaaag

SEQ ID NO: 2412936 - DNA, 25 bp, Homo sapien
gcaaacaccactatttagggccaat

SEQ ID NO: 2412937 - DNA, 25 bp, Homo sapien
gaaactatgttcgaatgcttcattc

SEQ ID NO: 2412938 - DNA, 25 bp, Homo sapien
tcagaatctataaccaagccagatg

SEQ ID NO: 2412939 - DNA, 25 bp, Homo sapien
caaaacactgaacttaacagaacag

SEQ ID NO: 2412940 - DNA, 25 bp, Homo sapien
actgtacttgacgatctgaggaata

SEQ ID NO: 2412941 - DNA, 25 bp, Homo sapien
caggactgtacttgacgatctgagg

SEQ ID NO: 2412942 - DNA, 25 bp, Homo sapien
gcaatcaggactgtacttgacgatc

SEQ ID NO: 2412943 - DNA, 25 bp, Homo sapien
gatgcaatcaggactgtacttgacg

SEQ ID NO: 2412944 - DNA, 25 bp, Homo sapien
cttcttgctgacggactcctgcagt

SEQ ID NO: 2412945 - DNA, 25 bp, Homo sapien
ctctgcaccagattgagccgactct

SEQ ID NO: 2412946 - DNA, 25 bp, Homo sapien
gattgagccgactctccccttcttg

SEQ ID NO: 2412947 - DNA, 25 bp, Homo sapien
ttcttgctgacggactcctgcagtt

SEQ ID NO: 2412948 - DNA, 25 bp, Homo sapien
aggtgtctgaagaaataagctccca

SEQ ID NO: 2412949 - DNA, 25 bp, Homo sapien
taggtgtctgaagaaataagctccc

SEQ ID NO: 2412950 - DNA, 25 bp, Homo sapien
tgctaaaatctaagtggctgcctgg

SEQ ID NO: 2412951 - DNA, 25 bp, Homo sapien
agactgaagcttcccgatgactgaa

SEQ ID NO: 2412952 - DNA, 25 bp, Homo sapien
aataaggtggagtagcccaggcagc

SEQ ID NO: 2412953 - DNA, 25 bp, Homo sapien
taagaaaagttgacctactcagctt

SEQ ID NO: 2412954 - DNA, 25 bp, Homo sapien
tttcagtgggtgtagagaattgcct

SEQ ID NO: 2412955 - DNA, 25 bp, Homo sapien
tctattaaggtactgagcactggga

SEQ ID NO: 2412956 - DNA, 25 bp, Homo sapien
aacactgaatttagctgcatccgca

SEQ ID NO: 2412957 - DNA, 25 bp, Homo sapien
cctgagaagtgcatattcggctgaa

SEQ ID NO: 2412958 - DNA, 25 bp, Homo sapien
gcagttgtgtgctccattgctctgc

SEQ ID NO: 2412959 - DNA, 25 bp, Homo sapien
cagttgtgtgctccattgctctgct

SEQ ID NO: 2412960 - DNA, 25 bp, Homo sapien
ctgcagttgtgtgctccattgctct

SEQ ID NO: 2412961 - DNA, 25 bp, Homo sapien
tgcagttgtgtgctccattgctctg

SEQ ID NO: 2412962 - DNA, 25 bp, Homo sapien
tacatatgaggtaaggcaaaaagcc

SEQ ID NO: 2412963 - DNA, 25 bp, Homo sapien
caggcagcctttacatatgatacaa

SEQ ID NO: 2412964 - DNA, 25 bp, Homo sapien
ggtcacgagccagtactgaatctag

SEQ ID NO: 2412965 - DNA, 25 bp, Homo sapien
gggcttctttcctcaagtcttcgag

SEQ ID NO: 2412966 - DNA, 25 bp, Homo sapien
cagaatgctgatagcacacgccata

SEQ ID NO: 2412967 - DNA, 25 bp, Homo sapien
gatagcacacgccataccaacttgt

SEQ ID NO: 2412968 - DNA, 25 bp, Homo sapien
tcccagaatgctgatagcacacgcc

SEQ ID NO: 2412969 - DNA, 25 bp, Homo sapien
aatgctgatagcacacgccatacca

SEQ ID NO: 2412970 - DNA, 25 bp, Homo sapien
gcaactggtgcaatgagtttttcct

SEQ ID NO: 2412971 - DNA, 25 bp, Homo sapien
aactggtgcaatgagtttttcctta

SEQ ID NO: 2412972 - DNA, 25 bp, Homo sapien
ttcttccgcaactggtgcaatgagt

SEQ ID NO: 2412973 - DNA, 25 bp, Homo sapien
ctcttcttccgcaactggtgcaatg

SEQ ID NO: 2412974 - DNA, 25 bp, Homo sapien
gcaggaaagaactggcgcatggctc

SEQ ID NO: 2412975 - DNA, 25 bp, Homo sapien
gagatctccccgagtaaggtctgtg

SEQ ID NO: 2412976 - DNA, 25 bp, Homo sapien
tcggagcacccaaggctggtaaagt

SEQ ID NO: 2412977 - DNA, 25 bp, Homo sapien
gcaaagaacagcagatcacgagggc

SEQ ID NO: 2412978 - DNA, 25 bp, Homo sapien
actcgggcacgtgtcccgactcccg

SEQ ID NO: 2412979 - DNA, 25 bp, Homo sapien
tcgggcacgtgtcccgactcccgcc

SEQ ID NO: 2412980 - DNA, 25 bp, Homo sapien
agctactcgggcacgtgtcccgact

SEQ ID NO: 2412981 - DNA, 25 bp, Homo sapien
ccagctactcgggcacgtgtcccga

SEQ ID NO: 2412982 - DNA, 25 bp, Homo sapien
aagtctctccgctgagccgcagctg

SEQ ID NO: 2412983 - DNA, 25 bp, Homo sapien
aaatgcaacaagtctctccgctgag

SEQ ID NO: 2412984 - DNA, 25 bp, Homo sapien
agggcctggttttagctgcaaatgc

SEQ ID NO: 2412985 - DNA, 25 bp, Homo sapien
ttagctgcaaatgcaacaagtctct

SEQ ID NO: 2412986 - DNA, 25 bp, Homo sapien
aaactgagcggcaaagtcagggccc

SEQ ID NO: 2412987 - DNA, 25 bp, Homo sapien
ccgcgtctccccatacaagtactac

SEQ ID NO: 2412988 - DNA, 25 bp, Homo sapien
atgctcagagctaaaggccgcggag

SEQ ID NO: 2412989 - DNA, 25 bp, Homo sapien
gccgcggaggacagatgtgcttctt

SEQ ID NO: 2412990 - DNA, 25 bp, Homo sapien
gattcagggtcctgagccgaaacct

SEQ ID NO: 2412991 - DNA, 25 bp, Homo sapien
ttcagggtcctgagccgaaacctac

SEQ ID NO: 2412992 - DNA, 25 bp, Homo sapien
ccaggattcagggtcctgagccgaa

SEQ ID NO: 2412993 - DNA, 25 bp, Homo sapien
caggattcagggtcctgagccgaaa

SEQ ID NO: 2412994 - DNA, 25 bp, Homo sapien
acaaagtcagctgcgtgcgtctcct

SEQ ID NO: 2412995 - DNA, 25 bp, Homo sapien
acaaccaccgcagcctcttaggttt

SEQ ID NO: 2412996 - DNA, 25 bp, Homo sapien
cagtcgtgcggagaagacaaagtca

SEQ ID NO: 2412997 - DNA, 25 bp, Homo sapien
ctctgtaacagtcgtgcggagaaga

SEQ ID NO: 2412998 - DNA, 25 bp, Homo sapien
catctctattctttccgtgaaatca

SEQ ID NO: 2412999 - DNA, 25 bp, Homo sapien
tcagtccgaacgtattcatctctat

SEQ ID NO: 2413000 - DNA, 25 bp, Homo sapien
tcatctctattctttccgtgaaatc

SEQ ID NO: 2413001 - DNA, 25 bp, Homo sapien
ctatttcagtccgaacgtattcatc

SEQ ID NO: 2413002 - DNA, 25 bp, Homo sapien
caggagtatttgactagcctgaccc

SEQ ID NO: 2413003 - DNA, 25 bp, Homo sapien
ggagtatttgactagcctgacccat

SEQ ID NO: 2413004 - DNA, 25 bp, Homo sapien
ctgggatattctgctcccagatatg

SEQ ID NO: 2413005 - DNA, 25 bp, Homo sapien
cagatatgttctgggaacctcagga

SEQ ID NO: 2413006 - DNA, 25 bp, Homo sapien
caggcatgaaccatgaagactggtt

SEQ ID NO: 2413007 - DNA, 25 bp, Homo sapien
aggcatgaaccatgaagactggttc

SEQ ID NO: 2413008 - DNA, 25 bp, Homo sapien
tcactgacggatgcaaagactgttc

SEQ ID NO: 2413009 - DNA, 25 bp, Homo sapien
cactgacggatgcaaagactgttca

SEQ ID NO: 2413010 - DNA, 25 bp, Homo sapien
actgacggatgcaaagactgttcat

SEQ ID NO: 2413011 - DNA, 25 bp, Homo sapien
taacatttgtccttcgcaaggagtt

SEQ ID NO: 2413012 - DNA, 25 bp, Homo sapien
tttgtgattgtcttgtcgggagcat

SEQ ID NO: 2413013 - DNA, 25 bp, Homo sapien
ggagttacgtgcaattgacatttgt

SEQ ID NO: 2413014 - DNA, 25 bp, Homo sapien
gtcgggagcatgtagccagagactc

SEQ ID NO: 2413015 - DNA, 25 bp, Homo sapien
aatctctctagtgtgtaacaatggg

SEQ ID NO: 2413016 - DNA, 25 bp, Homo sapien
caacatttttgggagcggctccata

SEQ ID NO: 2413017 - DNA, 25 bp, Homo sapien
gaacaagccatttctgtagcacact

SEQ ID NO: 2413018 - DNA, 25 bp, Homo sapien
tattaaaaggctcagggagaacaag

SEQ ID NO: 2413019 - DNA, 25 bp, Homo sapien
ggcccacttgaggttaatggtcata

SEQ ID NO: 2413020 - DNA, 25 bp, Homo sapien
cccagtgagcatggttgagtgcatt

SEQ ID NO: 2413021 - DNA, 25 bp, Homo sapien
gtgaagaatcaccactctgaaagtg

SEQ ID NO: 2413022 - DNA, 25 bp, Homo sapien
taatctaggtcatcaactcagagtg

SEQ ID NO: 2413023 - DNA, 25 bp, Homo sapien
tcacaatgtagagtgagtcagacat

SEQ ID NO: 2413024 - DNA, 25 bp, Homo sapien
atcacaatgtagagtgagtcagaca

SEQ ID NO: 2413025 - DNA, 25 bp, Homo sapien
tgtactgttgcatgattaaaatcac

SEQ ID NO: 2413026 - DNA, 25 bp, Homo sapien
ctgtactgttgcatgattaaaatca

SEQ ID NO: 2413027 - DNA, 25 bp, Homo sapien
tccgtatttccacctatgtcttcct

SEQ ID NO: 2413028 - DNA, 25 bp, Homo sapien
gctttccgtatttccacctatgtct

SEQ ID NO: 2413029 - DNA, 25 bp, Homo sapien
tatttccacctatgtcttcctcaca

SEQ ID NO: 2413030 - DNA, 25 bp, Homo sapien
ctgctttccgtatttccacctatgt

SEQ ID NO: 2413031 - DNA, 25 bp, Homo sapien
gaccagtacagatctactacagctc

SEQ ID NO: 2413032 - DNA, 25 bp, Homo sapien
tgcagaccagtacagatctactaca

SEQ ID NO: 2413033 - DNA, 25 bp, Homo sapien
cagatctactacagctctgcaatgt

SEQ ID NO: 2413034 - DNA, 25 bp, Homo sapien
cagtacagatctactacagctctgc

SEQ ID NO: 2413035 - DNA, 25 bp, Homo sapien
cacctggttggaatcatgagtctta

SEQ ID NO: 2413036 - DNA, 25 bp, Homo sapien
tcaatgacgtgataaacagtttctg

SEQ ID NO: 2413037 - DNA, 25 bp, Homo sapien
tcagaggaacagttagaaccctttc

SEQ ID NO: 2413038 - DNA, 25 bp, Homo sapien
agtggagcctcaggtgcctgtttga

SEQ ID NO: 2413039 - DNA, 25 bp, Homo sapien
gaaaccttcaggagtcaccgacaga

SEQ ID NO: 2413040 - DNA, 25 bp, Homo sapien
caaatgcagttatcatggagacagg

SEQ ID NO: 2413041 - DNA, 25 bp, Homo sapien
tcaaattgagagaaacgagcatacc

SEQ ID NO: 2413042 - DNA, 25 bp, Homo sapien
aacaggccgcaatgagatggaccag

SEQ ID NO: 2413043 - DNA, 25 bp, Homo sapien
ctttttattactacagaaagtgctg

SEQ ID NO: 2413044 - DNA, 25 bp, Homo sapien
gtgcccagcataaaccgtcaaaact

SEQ ID NO: 2413045 - DNA, 25 bp, Homo sapien
aatgtagaaggacacattattgtgt

SEQ ID NO: 2413046 - DNA, 25 bp, Homo sapien
gctctggttcagtctggcagtgccc

SEQ ID NO: 2413047 - DNA, 25 bp, Homo sapien
tctggagaatcaaaaccgtgatggc

SEQ ID NO: 2413048 - DNA, 25 bp, Homo sapien
catggagttgcgcttcctcagagaa

SEQ ID NO: 2413049 - DNA, 25 bp, Homo sapien
tcacaatggacacaaagcggtggcc

SEQ ID NO: 2413050 - DNA, 25 bp, Homo sapien
tttcggacggcaatcacagcatggc

SEQ ID NO: 2413051 - DNA, 25 bp, Homo sapien
tctctactgttttcaacccctgcct

SEQ ID NO: 2413052 - DNA, 25 bp, Homo sapien
attaaataacagaatgataagagaa

SEQ ID NO: 2413053 - DNA, 25 bp, Homo sapien
tttctctactgttttcaacccctgc

SEQ ID NO: 2413054 - DNA, 25 bp, Homo sapien
taacagaatgataagagaaagggca

SEQ ID NO: 2413055 - DNA, 25 bp, Homo sapien
ttcttatgcgccaggttgcaggccc

SEQ ID NO: 2413056 - DNA, 25 bp, Homo sapien
tagatgtccccatgggcaaaggcca

SEQ ID NO: 2413057 - DNA, 25 bp, Homo sapien
tagaaagcgtccttgctcacggatg

SEQ ID NO: 2413058 - DNA, 25 bp, Homo sapien
caccacatgatagcgaagagcagcc

SEQ ID NO: 2413059 - DNA, 25 bp, Homo sapien
ctccctctcacctgcctctccgtcc

SEQ ID NO: 2413060 - DNA, 25 bp, Homo sapien
agccagcttagccacctccctctca

SEQ ID NO: 2413061 - DNA, 25 bp, Homo sapien
cgtcctgtcaccatagccagcttag

SEQ ID NO: 2413062 - DNA, 25 bp, Homo sapien
ctctccgtccctggacacccgtcct

SEQ ID NO: 2413063 - DNA, 25 bp, Homo sapien
ctctcccatgctggcgcgcgggacc

SEQ ID NO: 2413064 - DNA, 25 bp, Homo sapien
ggctggacctccttgcacacgccgg

SEQ ID NO: 2413065 - DNA, 25 bp, Homo sapien
aatctaaacgcagggagggctagag

SEQ ID NO: 2413066 - DNA, 25 bp, Homo sapien
taaaaggtgcaactgaatctaaacg

SEQ ID NO: 2413067 - DNA, 25 bp, Homo sapien
cagtcccggttgctgctcagtggaa

SEQ ID NO: 2413068 - DNA, 25 bp, Homo sapien
gcagggccaggtattgtctctaaat

SEQ ID NO: 2413069 - DNA, 25 bp, Homo sapien
taaggaagtgcatgactctggcaaa

SEQ ID NO: 2413070 - DNA, 25 bp, Homo sapien
taaagtacaggatacatccccttgg

SEQ ID NO: 2413071 - DNA, 25 bp, Homo sapien
gggcacaatggcaaacaagacatgg

SEQ ID NO: 2413072 - DNA, 25 bp, Homo sapien
tgtcaatgacataagtaaccctggt

SEQ ID NO: 2413073 - DNA, 25 bp, Homo sapien
gagggtcttctggtatctaatctag

SEQ ID NO: 2413074 - DNA, 25 bp, Homo sapien
tatagttataggcacatggcagtaa

SEQ ID NO: 2413075 - DNA, 25 bp, Homo sapien
gatattgacactggatgggcacaga

SEQ ID NO: 2413076 - DNA, 25 bp, Homo sapien
tttacagaggtcaagctgatgatcc

SEQ ID NO: 2413077 - DNA, 25 bp, Homo sapien
tatagaaagtttagctggcctgcca

SEQ ID NO: 2413078 - DNA, 25 bp, Homo sapien
tgctaacgtgacaaagaaggtgact

SEQ ID NO: 2413079 - DNA, 25 bp, Homo sapien
catgtctgcgcgaacaaaagaagca

SEQ ID NO: 2413080 - DNA, 25 bp, Homo sapien
gaggctttctggagtgtcatattct

SEQ ID NO: 2413081 - DNA, 25 bp, Homo sapien
taaaatatttcctcgcttcatcaca

SEQ ID NO: 2413082 - DNA, 25 bp, Homo sapien
tcacaataaccaggtctgccgtcag

SEQ ID NO: 2413083 - DNA, 25 bp, Homo sapien
gacttggtgcaatagatcatgatgg

SEQ ID NO: 2413084 - DNA, 25 bp, Homo sapien
gacagacttggtgcaatagatcatg

SEQ ID NO: 2413085 - DNA, 25 bp, Homo sapien
cggagaatgacagacttggtgcaat

SEQ ID NO: 2413086 - DNA, 25 bp, Homo sapien
aatgacagacttggtgcaatagatc

SEQ ID NO: 2413087 - DNA, 25 bp, Homo sapien
aaaagactaaaacaaggcctgcatc

SEQ ID NO: 2413088 - DNA, 25 bp, Homo sapien
aagaggccattcttgtgggcgagca

SEQ ID NO: 2413089 - DNA, 25 bp, Homo sapien
ctccactaaaataccctcagaaaag

SEQ ID NO: 2413090 - DNA, 25 bp, Homo sapien
tgggacagtatcacactccactaaa

SEQ ID NO: 2413091 - DNA, 25 bp, Homo sapien
aaggctgtcattactactttttgca

SEQ ID NO: 2413092 - DNA, 25 bp, Homo sapien
ctgcaaaggctgtcattactacttt

SEQ ID NO: 2413093 - DNA, 25 bp, Homo sapien
tcaccacggtccggtctgcaaaggc

SEQ ID NO: 2413094 - DNA, 25 bp, Homo sapien
accacggtccggtctgcaaaggctg

SEQ ID NO: 2413095 - DNA, 25 bp, Homo sapien
aagaatgctgcttttgcggacaaag

SEQ ID NO: 2413096 - DNA, 25 bp, Homo sapien
tgtctctgtccaacgctaaaattct

SEQ ID NO: 2413097 - DNA, 25 bp, Homo sapien
ggccctggcaaggcaaaatagctgt

SEQ ID NO: 2413098 - DNA, 25 bp, Homo sapien
gcttttgcggacaaaggccctggca

SEQ ID NO: 2413099 - DNA, 25 bp, Homo sapien
caggtagagatttgaccatattctt

SEQ ID NO: 2413100 - DNA, 25 bp, Homo sapien
tttgcactctggatctaaattaaat

SEQ ID NO: 2413101 - DNA, 25 bp, Homo sapien
cctccaggtagagatttgaccatat

SEQ ID NO: 2413102 - DNA, 25 bp, Homo sapien
tccaggtagagatttgaccatattc

SEQ ID NO: 2413103 - DNA, 25 bp, Homo sapien
tgcagaatgattgaaagtctagaac

SEQ ID NO: 2413104 - DNA, 25 bp, Homo sapien
ggatcctgcagaatgattgaaagtc

SEQ ID NO: 2413105 - DNA, 25 bp, Homo sapien
gattgaaagtctagaacgtagtgtg

SEQ ID NO: 2413106 - DNA, 25 bp, Homo sapien
gaatgattgaaagtctagaacgtag

SEQ ID NO: 2413107 - DNA, 25 bp, Homo sapien
agagataacgatgatttcccactgc

SEQ ID NO: 2413108 - DNA, 25 bp, Homo sapien
tatatcaaccattctgaagaaagcc

SEQ ID NO: 2413109 - DNA, 25 bp, Homo sapien
ctgccagtgcgaccacatatgccca

SEQ ID NO: 2413110 - DNA, 25 bp, Homo sapien
gataacgatgatttcccactgccag

SEQ ID NO: 2413111 - DNA, 25 bp, Homo sapien
cttgacgtgcttaagaacaggtttc

SEQ ID NO: 2413112 - DNA, 25 bp, Homo sapien
atgtatcttgatctccccttcttgt

SEQ ID NO: 2413113 - DNA, 25 bp, Homo sapien
cttcttgtggccaatgttctggaac

SEQ ID NO: 2413114 - DNA, 25 bp, Homo sapien
aggtttgatgtaagccttgacgtgc

SEQ ID NO: 2413115 - DNA, 25 bp, Homo sapien
caattctattcaaagtggacagaga

SEQ ID NO: 2413116 - DNA, 25 bp, Homo sapien
acagctcaaggtgctttctgtgtcc

SEQ ID NO: 2413117 - DNA, 25 bp, Homo sapien
ggaattgtccagtaggtcagcacct

SEQ ID NO: 2413118 - DNA, 25 bp, Homo sapien
gaatatggagacgaaagacacagct

SEQ ID NO: 2413119 - DNA, 25 bp, Homo sapien
catggtcttagctaagttttctgga

SEQ ID NO: 2413120 - DNA, 25 bp, Homo sapien
tggtgctaaccttggaggtccagga

SEQ ID NO: 2413121 - DNA, 25 bp, Homo sapien
cagtgcctgagatgaattttaaagg

SEQ ID NO: 2413122 - DNA, 25 bp, Homo sapien
aagcctagcatgttagtgtggccag

SEQ ID NO: 2413123 - DNA, 25 bp, Homo sapien
tgtgcccaacaaacactaatatttg

SEQ ID NO: 2413124 - DNA, 25 bp, Homo sapien
aatagtcacatcttttccggtgtac

SEQ ID NO: 2413125 - DNA, 25 bp, Homo sapien
tctggatactgaagtggaaagcaaa

SEQ ID NO: 2413126 - DNA, 25 bp, Homo sapien
tgagacaaacaatatttagagcaat

SEQ ID NO: 2413127 - DNA, 25 bp, Homo sapien
ccattgtgccttcatagttctctga

SEQ ID NO: 2413128 - DNA, 25 bp, Homo sapien
tccatagtcaggaaactgttcacct

SEQ ID NO: 2413129 - DNA, 25 bp, Homo sapien
catagtcaggaaactgttcaccttc

SEQ ID NO: 2413130 - DNA, 25 bp, Homo sapien
tgtgccttcatagttctctgactcc

SEQ ID NO: 2413131 - DNA, 25 bp, Homo sapien
tccaggtcagccaagttcctcacaa

SEQ ID NO: 2413132 - DNA, 25 bp, Homo sapien
caacccaattcaaataattggttat

SEQ ID NO: 2413133 - DNA, 25 bp, Homo sapien
gccaagttcctcacaacccaattca

SEQ ID NO: 2413134 - DNA, 25 bp, Homo sapien
gacctccaggtcagccaagttcctc

SEQ ID NO: 2413135 - DNA, 25 bp, Homo sapien
gaccattagtgtacatgtgtgatac

SEQ ID NO: 2413136 - DNA, 25 bp, Homo sapien
gtgtgatacaactcataagtgctac

SEQ ID NO: 2413137 - DNA, 25 bp, Homo sapien
gaacgagataacttggaccattagt

SEQ ID NO: 2413138 - DNA, 25 bp, Homo sapien
tcaccggaaattttggaacgagata

SEQ ID NO: 2413139 - DNA, 25 bp, Homo sapien
caagggtccataactgtcactattt

SEQ ID NO: 2413140 - DNA, 25 bp, Homo sapien
gaatgtcatgcgatatatcagcaaa

SEQ ID NO: 2413141 - DNA, 25 bp, Homo sapien
caaggagaatgtcatgcgatatatc

SEQ ID NO: 2413142 - DNA, 25 bp, Homo sapien
gtctggttccttcaagggtccataa

SEQ ID NO: 2413143 - DNA, 25 bp, Homo sapien
atggatagtggtatactcttctgtt

SEQ ID NO: 2413144 - DNA, 25 bp, Homo sapien
gatggatagtggtatactcttctgt

SEQ ID NO: 2413145 - DNA, 25 bp, Homo sapien
tggatagtggtatactcttctgttt

SEQ ID NO: 2413146 - DNA, 25 bp, Homo sapien
gaagacccaagcctaccaatccaga

SEQ ID NO: 2413147 - DNA, 25 bp, Homo sapien
cccactaatggatgctatagatgca

SEQ ID NO: 2413148 - DNA, 25 bp, Homo sapien
caagcctaccaatccagaattcgaa

SEQ ID NO: 2413149 - DNA, 25 bp, Homo sapien
cagaattcgaagacccactaatgga

SEQ ID NO: 2413150 - DNA, 25 bp, Homo sapien
gactagataaattcaccccttcata

SEQ ID NO: 2413151 - DNA, 25 bp, Homo sapien
ttagaatctacgttccatgaggaca

SEQ ID NO: 2413152 - DNA, 25 bp, Homo sapien
ctgagtttttctatgagctgactat

SEQ ID NO: 2413153 - DNA, 25 bp, Homo sapien
catggttattgtctatctactctca

SEQ ID NO: 2413154 - DNA, 25 bp, Homo sapien
tctgtgtgatgccaaagcttgtgct

SEQ ID NO: 2413155 - DNA, 25 bp, Homo sapien
tgcccatacaaggtacaaggtacac

SEQ ID NO: 2413156 - DNA, 25 bp, Homo sapien
taacttgctagaccaagtctgtgtg

SEQ ID NO: 2413157 - DNA, 25 bp, Homo sapien
caagacagaaggcaacagatgatta

SEQ ID NO: 2413158 - DNA, 25 bp, Homo sapien
atttggtttccatttcgaaatcatg

SEQ ID NO: 2413159 - DNA, 25 bp, Homo sapien
tttcgaaatcatgaaatgaacgtac

SEQ ID NO: 2413160 - DNA, 25 bp, Homo sapien
catttcgaaatcatgaaatgaacgt

SEQ ID NO: 2413161 - DNA, 25 bp, Homo sapien
ttggtttccatttcgaaatcatgaa

SEQ ID NO: 2413162 - DNA, 25 bp, Homo sapien
tgttgtttgtatccgtcagttccag

SEQ ID NO: 2413163 - DNA, 25 bp, Homo sapien
gagaaataagtaggcaatgttgttt

SEQ ID NO: 2413164 - DNA, 25 bp, Homo sapien
acgttgtttaaatctggtttcatgc

SEQ ID NO: 2413165 - DNA, 25 bp, Homo sapien
tatccgtcagttccagcatacgttg

SEQ ID NO: 2413166 - DNA, 25 bp, Homo sapien
ttgagtatccatgacccaaatgcca

SEQ ID NO: 2413167 - DNA, 25 bp, Homo sapien
cattgagttgagtatccatgaccca

SEQ ID NO: 2413168 - DNA, 25 bp, Homo sapien
gagttgagtatccatgacccaaatg

SEQ ID NO: 2413169 - DNA, 25 bp, Homo sapien
ctcacattgagttgagtatccatga

SEQ ID NO: 2413170 - DNA, 25 bp, Homo sapien
gtagatcctcctcccataaacaagg

SEQ ID NO: 2413171 - DNA, 25 bp, Homo sapien
aacatcaaggttgccaagacgtaga

SEQ ID NO: 2413172 - DNA, 25 bp, Homo sapien
tggtttggatttgacggcatcaggc

SEQ ID NO: 2413173 - DNA, 25 bp, Homo sapien
taaactagcagtcacaacatcaagg

SEQ ID NO: 2413174 - DNA, 25 bp, Homo sapien
gtactatcgtcaagttcctggaggt

SEQ ID NO: 2413175 - DNA, 25 bp, Homo sapien
tgggtactatcgtcaagttcctgga

SEQ ID NO: 2413176 - DNA, 25 bp, Homo sapien
agggagctgggtactatcgtcaagt

SEQ ID NO: 2413177 - DNA, 25 bp, Homo sapien
ggagctgggtactatcgtcaagttc

SEQ ID NO: 2413178 - DNA, 25 bp, Homo sapien
ggcaacccgaaagtatttctggata

SEQ ID NO: 2413179 - DNA, 25 bp, Homo sapien
aatcatcccaatggcagacaggcag

SEQ ID NO: 2413180 - DNA, 25 bp, Homo sapien
gagattccaaggttggagggatgtg

SEQ ID NO: 2413181 - DNA, 25 bp, Homo sapien
cacaggagtagcataagaaatcatc

SEQ ID NO: 2413182 - DNA, 25 bp, Homo sapien
aagcgattgagaatcagtcccaggg

SEQ ID NO: 2413183 - DNA, 25 bp, Homo sapien
tcaatgatattagtatcagctgaaa

SEQ ID NO: 2413184 - DNA, 25 bp, Homo sapien
gtatcagctgaaaagcgattgagaa

SEQ ID NO: 2413185 - DNA, 25 bp, Homo sapien
cagtcccaggggtgtggtatcaaaa

SEQ ID NO: 2413186 - DNA, 25 bp, Homo sapien
gtccaaggattatcttattgagaag

SEQ ID NO: 2413187 - DNA, 25 bp, Homo sapien
agctgtgagacccatccattctaca

SEQ ID NO: 2413188 - DNA, 25 bp, Homo sapien
cattctacagtgagggatgtaacaa

SEQ ID NO: 2413189 - DNA, 25 bp, Homo sapien
ttggtccaaggattatcttattgag

SEQ ID NO: 2413190 - DNA, 25 bp, Homo sapien
tagtcctgagcctcattacagtgga

SEQ ID NO: 2413191 - DNA, 25 bp, Homo sapien
cagccaatagtctatagctacaatg

SEQ ID NO: 2413192 - DNA, 25 bp, Homo sapien
gaccgaatgcttcaaaagcttagag

SEQ ID NO: 2413193 - DNA, 25 bp, Homo sapien
tactccgatgtccatgtggccagcc

SEQ ID NO: 2413194 - DNA, 25 bp, Homo sapien
gttatcatcctcatcttcctcctct

SEQ ID NO: 2413195 - DNA, 25 bp, Homo sapien
tgttatcatcctcatcttcctcctc

SEQ ID NO: 2413196 - DNA, 25 bp, Homo sapien
tcatcctcatcttcctcctcttctt

SEQ ID NO: 2413197 - DNA, 25 bp, Homo sapien
tatcatcctcatcttcctcctcttc

SEQ ID NO: 2413198 - DNA, 25 bp, Homo sapien
catctgggctttggcttctcttgaa

SEQ ID NO: 2413199 - DNA, 25 bp, Homo sapien
cttcgtcttcgtcctccatctgggc

SEQ ID NO: 2413200 - DNA, 25 bp, Homo sapien
ttcgtcttcgtcctccatctgggct

SEQ ID NO: 2413201 - DNA, 25 bp, Homo sapien
ctgggctttggcttctcttgaatac

SEQ ID NO: 2413202 - DNA, 25 bp, Homo sapien
ttcctctctaaagtagtttggtcag

SEQ ID NO: 2413203 - DNA, 25 bp, Homo sapien
atggcccgtcggagagttttcctct

SEQ ID NO: 2413204 - DNA, 25 bp, Homo sapien
aagtagtttggtcagcttccatatc

SEQ ID NO: 2413205 - DNA, 25 bp, Homo sapien
gcccgtcggagagttttcctctcta

SEQ ID NO: 2413206 - DNA, 25 bp, Homo sapien
gccgattcataagtgttttccagtg

SEQ ID NO: 2413207 - DNA, 25 bp, Homo sapien
cttttctaattcttgatcttgccga

SEQ ID NO: 2413208 - DNA, 25 bp, Homo sapien
ttttccagtgttcataaagctcaac

SEQ ID NO: 2413209 - DNA, 25 bp, Homo sapien
tgttcataaagctcaacatctttgg

SEQ ID NO: 2413210 - DNA, 25 bp, Homo sapien
cagatactgtaatttgtgagtcaca

SEQ ID NO: 2413211 - DNA, 25 bp, Homo sapien
caagaacgagtgtccttttgtcatc

SEQ ID NO: 2413212 - DNA, 25 bp, Homo sapien
ttgtgagtcacaagaacgagtgtcc

SEQ ID NO: 2413213 - DNA, 25 bp, Homo sapien
cagtcagcatgcgtcagatactgta

SEQ ID NO: 2413214 - DNA, 25 bp, Homo sapien
tgtccagggctgagaatggatcatc

SEQ ID NO: 2413215 - DNA, 25 bp, Homo sapien
tgatcactcaagtgaatgtccaggg

SEQ ID NO: 2413216 - DNA, 25 bp, Homo sapien
caatgttggtgttttgatacagcgc

SEQ ID NO: 2413217 - DNA, 25 bp, Homo sapien
tttgatacagcgctcgtgccacaca

SEQ ID NO: 2413218 - DNA, 25 bp, Homo sapien
ggtgttttgatacagcgctcgtgcc

SEQ ID NO: 2413219 - DNA, 25 bp, Homo sapien
atacagcgctcgtgccacacagatt

SEQ ID NO: 2413220 - DNA, 25 bp, Homo sapien
taattgacctcttagtatgtgccag

SEQ ID NO: 2413221 - DNA, 25 bp, Homo sapien
ccagacttgtgcaaatggctttaca

SEQ ID NO: 2413222 - DNA, 25 bp, Homo sapien
caaaacacttgctaggaaatgcgag

SEQ ID NO: 2413223 - DNA, 25 bp, Homo sapien
tgaggctcacagaacttaagtccat

SEQ ID NO: 2413224 - DNA, 25 bp, Homo sapien
tatctggctgaagagaacaggcatc

SEQ ID NO: 2413225 - DNA, 25 bp, Homo sapien
gtcaatatctggctgaagagaacag

SEQ ID NO: 2413226 - DNA, 25 bp, Homo sapien
tggctgaagagaacaggcatctgtg

SEQ ID NO: 2413227 - DNA, 25 bp, Homo sapien
tttcagtttgatctccaaatggtaa

SEQ ID NO: 2413228 - DNA, 25 bp, Homo sapien
tcttctactgtagcatttaatagcc

SEQ ID NO: 2413229 - DNA, 25 bp, Homo sapien
tgtagcatttaatagccaaggcttt

SEQ ID NO: 2413230 - DNA, 25 bp, Homo sapien
tttgagctgcatatgccacagagta

SEQ ID NO: 2413231 - DNA, 25 bp, Homo sapien
tgcatatgccacagagtacctgttc

SEQ ID NO: 2413232 - DNA, 25 bp, Homo sapien
cttctggttgcttcaaaagaaggct

SEQ ID NO: 2413233 - DNA, 25 bp, Homo sapien
catctcaccgaggatggcaaggaga

SEQ ID NO: 2413234 - DNA, 25 bp, Homo sapien
tggcccacaatcatggttaactgac

SEQ ID NO: 2413235 - DNA, 25 bp, Homo sapien
ggagaagagaggacttcccacatcc

SEQ ID NO: 2413236 - DNA, 25 bp, Homo sapien
ccaatgtctgcatctcaccgaggat

SEQ ID NO: 2413237 - DNA, 25 bp, Homo sapien
ctgttggaattcgaatatctatatt

SEQ ID NO: 2413238 - DNA, 25 bp, Homo sapien
ggaattcgaatatctatattggata

SEQ ID NO: 2413239 - DNA, 25 bp, Homo sapien
attggataatgtagctaaaccactg

SEQ ID NO: 2413240 - DNA, 25 bp, Homo sapien
gataatgtagctaaaccactgcccc

SEQ ID NO: 2413241 - DNA, 25 bp, Homo sapien
tgttgattgctcatagctgtccagg

SEQ ID NO: 2413242 - DNA, 25 bp, Homo sapien
cgtagacgccgtgttgattgctcat

SEQ ID NO: 2413243 - DNA, 25 bp, Homo sapien
gctgtccaggtgatatcttccaggc

SEQ ID NO: 2413244 - DNA, 25 bp, Homo sapien
tcctctgtttctgcgggacgtagac

SEQ ID NO: 2413245 - DNA, 25 bp, Homo sapien
cagttcgccaactgtcgtcaccaat

SEQ ID NO: 2413246 - DNA, 25 bp, Homo sapien
agtgtgcttcttacaggactcaaaa

SEQ ID NO: 2413247 - DNA, 25 bp, Homo sapien
ccagtgtgcttcttacaggactcaa

SEQ ID NO: 2413248 - DNA, 25 bp, Homo sapien
ggactcaaaaggaagcgaactttca

SEQ ID NO: 2413249 - DNA, 25 bp, Homo sapien
tgtaggacctgcaattcaaccactg

SEQ ID NO: 2413250 - DNA, 25 bp, Homo sapien
ggcctatggcttgggaaatctggaa

SEQ ID NO: 2413251 - DNA, 25 bp, Homo sapien
aagcagattctgtttggcctatggc

SEQ ID NO: 2413252 - DNA, 25 bp, Homo sapien
ctcatttgagagaatcaggctttta

SEQ ID NO: 2413253 - DNA, 25 bp, Homo sapien
gactggtctttatcaaactggcaaa

SEQ ID NO: 2413254 - DNA, 25 bp, Homo sapien
gaaagactggtctttatcaaactgg

SEQ ID NO: 2413255 - DNA, 25 bp, Homo sapien
ggtctttatcaaactggcaaatgtc

SEQ ID NO: 2413256 - DNA, 25 bp, Homo sapien
tctttatcaaactggcaaatgtctt

SEQ ID NO: 2413257 - DNA, 25 bp, Homo sapien
gaaggcttgagctctagacactaac

SEQ ID NO: 2413258 - DNA, 25 bp, Homo sapien
taaaagtgtaaccatgaaagggaca

SEQ ID NO: 2413259 - DNA, 25 bp, Homo sapien
tttgaagtagcttcccttccagagc

SEQ ID NO: 2413260 - DNA, 25 bp, Homo sapien
tcagtgatccggacaagtgtttcag

SEQ ID NO: 2413261 - DNA, 25 bp, Homo sapien
ttcaaatactcctattagcacacgt

SEQ ID NO: 2413262 - DNA, 25 bp, Homo sapien
tattagcacacgtcatttctattat

SEQ ID NO: 2413263 - DNA, 25 bp, Homo sapien
caaatactcctattagcacacgtca

SEQ ID NO: 2413264 - DNA, 25 bp, Homo sapien
tactcctattagcacacgtcatttc

SEQ ID NO: 2413265 - DNA, 25 bp, Homo sapien
ctgaccaccgtggagagcaggaaca

SEQ ID NO: 2413266 - DNA, 25 bp, Homo sapien
caaatctgaccaccgtggagagcag

SEQ ID NO: 2413267 - DNA, 25 bp, Homo sapien
actgcaaatctgaccaccgtggaga

SEQ ID NO: 2413268 - DNA, 25 bp, Homo sapien
accaccgtggagagcaggaacagtg

SEQ ID NO: 2413269 - DNA, 25 bp, Homo sapien
tggcatacgcatgggtcacaaatgt

SEQ ID NO: 2413270 - DNA, 25 bp, Homo sapien
tggaaaaagtgtcacacatgcgtac

SEQ ID NO: 2413271 - DNA, 25 bp, Homo sapien
aatacttgcttttggtaagtcctga

SEQ ID NO: 2413272 - DNA, 25 bp, Homo sapien
taagtcctgaaaggcttacctgcaa

SEQ ID NO: 2413273 - DNA, 25 bp, Homo sapien
catgcgtacattcagtcctagaaac

SEQ ID NO: 2413274 - DNA, 25 bp, Homo sapien
gcaagaacagctgctatgggaattg

SEQ ID NO: 2413275 - DNA, 25 bp, Homo sapien
agcaagaacagctgctatgggaatt

SEQ ID NO: 2413276 - DNA, 25 bp, Homo sapien
gctgctatgggaattgctgcattca

SEQ ID NO: 2413277 - DNA, 25 bp, Homo sapien
gctatgggaattgctgcattcatga

SEQ ID NO: 2413278 - DNA, 25 bp, Homo sapien
gtctgcagctaccagtgtgaacgat

SEQ ID NO: 2413279 - DNA, 25 bp, Homo sapien
ctatgatttcgagggggttgcaaga

SEQ ID NO: 2413280 - DNA, 25 bp, Homo sapien
ggaaaaaaccgaattcatcaaatga

SEQ ID NO: 2413281 - DNA, 25 bp, Homo sapien
gagaatcgttgcaatcatctgaatc

SEQ ID NO: 2413282 - DNA, 25 bp, Homo sapien
ttgagactagatagttctttcattc

SEQ ID NO: 2413283 - DNA, 25 bp, Homo sapien
gcaaaggttttgagactagatagtt

SEQ ID NO: 2413284 - DNA, 25 bp, Homo sapien
ggttttgagactagatagttctttc

SEQ ID NO: 2413285 - DNA, 25 bp, Homo sapien
gactagatagttctttcattcttgt

SEQ ID NO: 2413286 - DNA, 25 bp, Homo sapien
aagtttgatgcctttcaatatttca

SEQ ID NO: 2413287 - DNA, 25 bp, Homo sapien
agtttgatgcctttcaatatttcat

SEQ ID NO: 2413288 - DNA, 25 bp, Homo sapien
gaagtttgatgcctttcaatatttc

SEQ ID NO: 2413289 - DNA, 25 bp, Homo sapien
ctttctgtatttgtgtgctggagta

SEQ ID NO: 2413290 - DNA, 25 bp, Homo sapien
taaaaaggatagctggctcagacag

SEQ ID NO: 2413291 - DNA, 25 bp, Homo sapien
tgctggagtaaaaaggatagctggc

SEQ ID NO: 2413292 - DNA, 25 bp, Homo sapien
cagacagaaataatgagtaacctac

SEQ ID NO: 2413293 - DNA, 25 bp, Homo sapien
taaagtactgaattggcgcaaggag

SEQ ID NO: 2413294 - DNA, 25 bp, Homo sapien
aatgacagctgcaccgaccaatgca

SEQ ID NO: 2413295 - DNA, 25 bp, Homo sapien
gcctctgccaactttgtagcaataa

SEQ ID NO: 2413296 - DNA, 25 bp, Homo sapien
taaattatagagcagaatcacgccc

SEQ ID NO: 2413297 - DNA, 25 bp, Homo sapien
ccacatgagttgattagtttcaatg

SEQ ID NO: 2413298 - DNA, 25 bp, Homo sapien
gcgactaagttgttgatctgcccca

SEQ ID NO: 2413299 - DNA, 25 bp, Homo sapien
ccccatggataagttagacgtagag

SEQ ID NO: 2413300 - DNA, 25 bp, Homo sapien
ctgaacaggcatagcccatagatta

SEQ ID NO: 2413301 - DNA, 25 bp, Homo sapien
ctccacggaggttaatgccagtctc

SEQ ID NO: 2413302 - DNA, 25 bp, Homo sapien
ggttacatagtaggaagcctgcaaa

SEQ ID NO: 2413303 - DNA, 25 bp, Homo sapien
aagagaagaactgctagaacgtaag

SEQ ID NO: 2413304 - DNA, 25 bp, Homo sapien
gctagaacgtaagcgttttcaagaa

SEQ ID NO: 2413305 - DNA, 25 bp, Homo sapien
tccagttgtgttatttgtcccattc

SEQ ID NO: 2413306 - DNA, 25 bp, Homo sapien
ttgtgttatttgtcccattctgggt

SEQ ID NO: 2413307 - DNA, 25 bp, Homo sapien
tatttgtcccattctgggtttcatt

SEQ ID NO: 2413308 - DNA, 25 bp, Homo sapien
gttatttgtcccattctgggtttca

SEQ ID NO: 2413309 - DNA, 25 bp, Homo sapien
cagtaaatcagccagatagcggaat

SEQ ID NO: 2413310 - DNA, 25 bp, Homo sapien
agtaaatcagccagatagcggaatg

SEQ ID NO: 2413311 - DNA, 25 bp, Homo sapien
taaatcagccagatagcggaatgtg

SEQ ID NO: 2413312 - DNA, 25 bp, Homo sapien
gtaaatcagccagatagcggaatgt

SEQ ID NO: 2413313 - DNA, 25 bp, Homo sapien
ctactaagtagaattggtcgcccaa

SEQ ID NO: 2413314 - DNA, 25 bp, Homo sapien
aattggtcgcccaaaagctctgtac

SEQ ID NO: 2413315 - DNA, 25 bp, Homo sapien
agtagaattggtcgcccaaaagctc

SEQ ID NO: 2413316 - DNA, 25 bp, Homo sapien
taagtagaattggtcgcccaaaagc

SEQ ID NO: 2413317 - DNA, 25 bp, Homo sapien
tagatggagtccgatttggatgatc

SEQ ID NO: 2413318 - DNA, 25 bp, Homo sapien
attgcaagccatatagatggagtcc

SEQ ID NO: 2413319 - DNA, 25 bp, Homo sapien
ccatatagatggagtccgatttgga

SEQ ID NO: 2413320 - DNA, 25 bp, Homo sapien
ccgatttggatgatctgcaactttt

SEQ ID NO: 2413321 - DNA, 25 bp, Homo sapien
caccagtatgttgcttttgacagca

SEQ ID NO: 2413322 - DNA, 25 bp, Homo sapien
tcaggcaaacataatttgttactgc

SEQ ID NO: 2413323 - DNA, 25 bp, Homo sapien
tccaattgccttcagatcaataggc

SEQ ID NO: 2413324 - DNA, 25 bp, Homo sapien
tgttactgctctcattgctattggc

SEQ ID NO: 2413325 - DNA, 25 bp, Homo sapien
tctgaggattcatgaaaaatacata

SEQ ID NO: 2413326 - DNA, 25 bp, Homo sapien
ttactttctgaggattcatgaaaaa

SEQ ID NO: 2413327 - DNA, 25 bp, Homo sapien
ctttactttctgaggattcatgaaa

SEQ ID NO: 2413328 - DNA, 25 bp, Homo sapien
ctttctgaggattcatgaaaaatac

SEQ ID NO: 2413329 - DNA, 25 bp, Homo sapien
ccatcaagagcccattcaagatgac

SEQ ID NO: 2413330 - DNA, 25 bp, Homo sapien
ctgactcgaatgacattgatctcca

SEQ ID NO: 2413331 - DNA, 25 bp, Homo sapien
tcaagagcccattcaagatgaccat

SEQ ID NO: 2413332 - DNA, 25 bp, Homo sapien
cacagccatcaagagcccattcaag

SEQ ID NO: 2413333 - DNA, 25 bp, Homo sapien
cagactgacagtacttaaccaattt

SEQ ID NO: 2413334 - DNA, 25 bp, Homo sapien
gaaacgcaggtttgatatgtccaag

SEQ ID NO: 2413335 - DNA, 25 bp, Homo sapien
tccaagccagactgacagtacttaa

SEQ ID NO: 2413336 - DNA, 25 bp, Homo sapien
catgcctgtgatgcagaaacgcagg

SEQ ID NO: 2413337 - DNA, 25 bp, Homo sapien
ggaactcttacaccttgttagtgag

SEQ ID NO: 2413338 - DNA, 25 bp, Homo sapien
tacccacttattgtatgacccagag

SEQ ID NO: 2413339 - DNA, 25 bp, Homo sapien
tatgtatgccacagactagaaggaa

SEQ ID NO: 2413340 - DNA, 25 bp, Homo sapien
gaacacattgatatccacttggaaa

SEQ ID NO: 2413341 - DNA, 25 bp, Homo sapien
cttttactctcatgatggctaaaac

SEQ ID NO: 2413342 - DNA, 25 bp, Homo sapien
gttgatagcagcttttactctcatg

SEQ ID NO: 2413343 - DNA, 25 bp, Homo sapien
agcttttactctcatgatggctaaa

SEQ ID NO: 2413344 - DNA, 25 bp, Homo sapien
gcagcttttactctcatgatggcta

SEQ ID NO: 2413345 - DNA, 25 bp, Homo sapien
caggaggttcatagcccatctgtga

SEQ ID NO: 2413346 - DNA, 25 bp, Homo sapien
cacaatgcaggtgcgaaaggccgtg

SEQ ID NO: 2413347 - DNA, 25 bp, Homo sapien
cagcatcagtgaaaggcttgaacct

SEQ ID NO: 2413348 - DNA, 25 bp, Homo sapien
gatctatgctacattacggatgagc

SEQ ID NO: 2413349 - DNA, 25 bp, Homo sapien
tcgatattatgataatacactatcg

SEQ ID NO: 2413350 - DNA, 25 bp, Homo sapien
cgatgttgtagtggcaacgaatccc

SEQ ID NO: 2413351 - DNA, 25 bp, Homo sapien
gaaaatttgatgtttcgatattatg

SEQ ID NO: 2413352 - DNA, 25 bp, Homo sapien
tgataatacactatcgatgttgtag

SEQ ID NO: 2413353 - DNA, 25 bp, Homo sapien
aagaggtggaggtgccttgattccc

SEQ ID NO: 2413354 - DNA, 25 bp, Homo sapien
cacggctggcataaagaggtggagg

SEQ ID NO: 2413355 - DNA, 25 bp, Homo sapien
gctggcataaagaggtggaggtgcc

SEQ ID NO: 2413356 - DNA, 25 bp, Homo sapien
cataaagaggtggaggtgccttgat

SEQ ID NO: 2413357 - DNA, 25 bp, Homo sapien
gatgatgtttcgaaaagcctgaata

SEQ ID NO: 2413358 - DNA, 25 bp, Homo sapien
agaagatgatgtttcgaaaagcctg

SEQ ID NO: 2413359 - DNA, 25 bp, Homo sapien
aagatgatgtttcgaaaagcctgaa

SEQ ID NO: 2413360 - DNA, 25 bp, Homo sapien
atgatgtttcgaaaagcctgaataa

SEQ ID NO: 2413361 - DNA, 25 bp, Homo sapien
gtattatttaacttagatcacttac

SEQ ID NO: 2413362 - DNA, 25 bp, Homo sapien
agtggtattatttaacttagatcac

SEQ ID NO: 2413363 - DNA, 25 bp, Homo sapien
tggtattatttaacttagatcactt

SEQ ID NO: 2413364 - DNA, 25 bp, Homo sapien
cagtggtattatttaacttagatca

SEQ ID NO: 2413365 - DNA, 25 bp, Homo sapien
cggaaaatgaagccatgtgttgtgg

SEQ ID NO: 2413366 - DNA, 25 bp, Homo sapien
catgcacaaacaggagagcgaatgt

SEQ ID NO: 2413367 - DNA, 25 bp, Homo sapien
gaatgtaagaatccatctcaggtta

SEQ ID NO: 2413368 - DNA, 25 bp, Homo sapien
tctcaggttatgtcccggaaaatga

SEQ ID NO: 2413369 - DNA, 25 bp, Homo sapien
acttgcttgttcgtttctcacagcc

SEQ ID NO: 2413370 - DNA, 25 bp, Homo sapien
acaaaatacttgcttgttcgtttct

SEQ ID NO: 2413371 - DNA, 25 bp, Homo sapien
aaatacttgcttgttcgtttctcac

SEQ ID NO: 2413372 - DNA, 25 bp, Homo sapien
tacttgcttgttcgtttctcacagc

SEQ ID NO: 2413373 - DNA, 25 bp, Homo sapien
tgagggaccaggttgagggcatcca

SEQ ID NO: 2413374 - DNA, 25 bp, Homo sapien
aggaattttgtagtacaccatcgtt

SEQ ID NO: 2413375 - DNA, 25 bp, Homo sapien
aaagacatgagggaccaggttgagg

SEQ ID NO: 2413376 - DNA, 25 bp, Homo sapien
tgtagtacaccatcgttgatattat

SEQ ID NO: 2413377 - DNA, 25 bp, Homo sapien
tcctttcattgataattgatttagc

SEQ ID NO: 2413378 - DNA, 25 bp, Homo sapien
aattgatttagcaatggtcacaaac

SEQ ID NO: 2413379 - DNA, 25 bp, Homo sapien
gatttagcaatggtcacaaacaata

SEQ ID NO: 2413380 - DNA, 25 bp, Homo sapien
tgataattgatttagcaatggtcac

SEQ ID NO: 2413381 - DNA, 25 bp, Homo sapien
gcttcacgctgcttcaaacccctgc

SEQ ID NO: 2413382 - DNA, 25 bp, Homo sapien
tgtaaatttcaaacccggacgcaga

SEQ ID NO: 2413383 - DNA, 25 bp, Homo sapien
ttcaaaacaccgacttcctacactg

SEQ ID NO: 2413384 - DNA, 25 bp, Homo sapien
cctgccggtgcacttgagctacctt

SEQ ID NO: 2413385 - DNA, 25 bp, Homo sapien
tcatgtaaaagacacggattcactt

SEQ ID NO: 2413386 - DNA, 25 bp, Homo sapien
gcagtgcgccggaacggattatttt

SEQ ID NO: 2413387 - DNA, 25 bp, Homo sapien
cctaggcgaagcacgcagtgcgccg

SEQ ID NO: 2413388 - DNA, 25 bp, Homo sapien
tttctaaattgcacagactgctctg

SEQ ID NO: 2413389 - DNA, 25 bp, Homo sapien
cagctgctgcctcctatcgagtttc

SEQ ID NO: 2413390 - DNA, 25 bp, Homo sapien
tggactgcgtaaacagtcaccctct

SEQ ID NO: 2413391 - DNA, 25 bp, Homo sapien
cgcgctatcgaagggcgacccttgc

SEQ ID NO: 2413392 - DNA, 25 bp, Homo sapien
tcccctaaagtgagacgctgattcc

SEQ ID NO: 2413393 - DNA, 25 bp, Homo sapien
cagccgccgcgctatcgaagggcga

SEQ ID NO: 2413394 - DNA, 25 bp, Homo sapien
gcctgtgcgatgcaggccgactcca

SEQ ID NO: 2413395 - DNA, 25 bp, Homo sapien
agatctgaaccctaaacaccggtgg

SEQ ID NO: 2413396 - DNA, 25 bp, Homo sapien
ctgcgcttccgggtgagtgcctgac

SEQ ID NO: 2413397 - DNA, 25 bp, Homo sapien
cactcttgggaaggtcgctgcgctt

SEQ ID NO: 2413398 - DNA, 25 bp, Homo sapien
gaacgcttgacaactttaccctgga

SEQ ID NO: 2413399 - DNA, 25 bp, Homo sapien
tgcgtcagcggctgggacttgaacc

SEQ ID NO: 2413400 - DNA, 25 bp, Homo sapien
ggtccgaagactccgttcctgtggc

SEQ ID NO: 2413401 - DNA, 25 bp, Homo sapien
cgcagggaaataagagagcgtttca

SEQ ID NO: 2413402 - DNA, 25 bp, Homo sapien
tgtacagaggagatcaaggagcccc

SEQ ID NO: 2413403 - DNA, 25 bp, Homo sapien
gggtgccaataatcccaagatgaaa

SEQ ID NO: 2413404 - DNA, 25 bp, Homo sapien
gaaaactcttgagtgtgactacaca

SEQ ID NO: 2413405 - DNA, 25 bp, Homo sapien
gaatattacaattcattaaggtcat

SEQ ID NO: 2413406 - DNA, 25 bp, Homo sapien
taccttgactttccagaaatacgat

SEQ ID NO: 2413407 - DNA, 25 bp, Homo sapien
tattaaatttatacaggtctgtgca

SEQ ID NO: 2413408 - DNA, 25 bp, Homo sapien
taagacttctcagtaatcccagagc

SEQ ID NO: 2413409 - DNA, 25 bp, Homo sapien
agagctatttcaccctgttaccttg

SEQ ID NO: 2413410 - DNA, 25 bp, Homo sapien
cagtctaactgtctctcacttaggg

SEQ ID NO: 2413411 - DNA, 25 bp, Homo sapien
gatgaatgaagtttcggtgaaccgt

SEQ ID NO: 2413412 - DNA, 25 bp, Homo sapien
tccctccagaaaagtatggcacttg

SEQ ID NO: 2413413 - DNA, 25 bp, Homo sapien
tgacctgaagtctatcactggagat

SEQ ID NO: 2413414 - DNA, 25 bp, Homo sapien
tcagcagattgtttcagcaatttct

SEQ ID NO: 2413415 - DNA, 25 bp, Homo sapien
tgtttcagcaatttctttgtccaga

SEQ ID NO: 2413416 - DNA, 25 bp, Homo sapien
attgtttcagcaatttctttgtcca

SEQ ID NO: 2413417 - DNA, 25 bp, Homo sapien
tttcagcaatttctttgtccagatt

SEQ ID NO: 2413418 - DNA, 25 bp, Homo sapien
gtttcctccatgtgacttgatgtga

SEQ ID NO: 2413419 - DNA, 25 bp, Homo sapien
tccatgtgacttgatgtgactctcc

SEQ ID NO: 2413420 - DNA, 25 bp, Homo sapien
gctgggtttcctccatgtgacttga

SEQ ID NO: 2413421 - DNA, 25 bp, Homo sapien
tgtgacttgatgtgactctcctcca

SEQ ID NO: 2413422 - DNA, 25 bp, Homo sapien
atgtcaacatgagttaacaatgcaa

SEQ ID NO: 2413423 - DNA, 25 bp, Homo sapien
actgcctggtaggtgcctggtatca

SEQ ID NO: 2413424 - DNA, 25 bp, Homo sapien
tgtgtgactgctccgaagtctccca

SEQ ID NO: 2413425 - DNA, 25 bp, Homo sapien
taggtgcctggtatcactgagctct

SEQ ID NO: 2413426 - DNA, 25 bp, Homo sapien
tacctgtagtaccagatccttagga

SEQ ID NO: 2413427 - DNA, 25 bp, Homo sapien
cacgaatacgtattacttatatgac

SEQ ID NO: 2413428 - DNA, 25 bp, Homo sapien
taccacgaatacgtattacttatat

SEQ ID NO: 2413429 - DNA, 25 bp, Homo sapien
ttctaccacgaatacgtattactta

SEQ ID NO: 2413430 - DNA, 25 bp, Homo sapien
ccacgaatacgtattacttatatga

SEQ ID NO: 2413431 - DNA, 25 bp, Homo sapien
tggagaagagcatttacatttttat

SEQ ID NO: 2413432 - DNA, 25 bp, Homo sapien
ttttatttaaaactcacagcaggcc

SEQ ID NO: 2413433 - DNA, 25 bp, Homo sapien
catttttatttaaaactcacagcag

SEQ ID NO: 2413434 - DNA, 25 bp, Homo sapien
ggagaagagcatttacatttttatt

SEQ ID NO: 2413435 - DNA, 25 bp, Homo sapien
ggaaaaggttaataattcatgccaa

SEQ ID NO: 2413436 - DNA, 25 bp, Homo sapien
ttgtattgtaccctgtaaaactgtg

SEQ ID NO: 2413437 - DNA, 25 bp, Homo sapien
gagactgattacagtctttctcaga

SEQ ID NO: 2413438 - DNA, 25 bp, Homo sapien
gcacatttgcctactaatggaaaag

SEQ ID NO: 2413439 - DNA, 25 bp, Homo sapien
ctgaaggatgttgccttgaacagtg

SEQ ID NO: 2413440 - DNA, 25 bp, Homo sapien
gctgctgaaggatgttgccttgaac

SEQ ID NO: 2413441 - DNA, 25 bp, Homo sapien
tgagcctacagcgagtcaatctttc

SEQ ID NO: 2413442 - DNA, 25 bp, Homo sapien
cctacagcgagtcaatctttctgct

SEQ ID NO: 2413443 - DNA, 25 bp, Homo sapien
actctgacaagaagttgaccttcca

SEQ ID NO: 2413444 - DNA, 25 bp, Homo sapien
gaccttccaggtcaactatacagga

SEQ ID NO: 2413445 - DNA, 25 bp, Homo sapien
gatttgcgtactccagagtatgccc

SEQ ID NO: 2413446 - DNA, 25 bp, Homo sapien
ctctgtcaggactgttggatttgcg

SEQ ID NO: 2413447 - DNA, 25 bp, Homo sapien
gctaggagaactctgaactctgctc

SEQ ID NO: 2413448 - DNA, 25 bp, Homo sapien
ctagctaggagaactctgaactctg

SEQ ID NO: 2413449 - DNA, 25 bp, Homo sapien
actccagcccactttcccgtctcac

SEQ ID NO: 2413450 - DNA, 25 bp, Homo sapien
tcaactccagcccactttcccgtct

SEQ ID NO: 2413451 - DNA, 25 bp, Homo sapien
actgggcagctttggaccataaaga

SEQ ID NO: 2413452 - DNA, 25 bp, Homo sapien
aagttcagccatagtctctctgctc

SEQ ID NO: 2413453 - DNA, 25 bp, Homo sapien
gagggatctgtcaaggagccgtcaa

SEQ ID NO: 2413454 - DNA, 25 bp, Homo sapien
ccataaagagggtgagggatctgtc

SEQ ID NO: 2413455 - DNA, 25 bp, Homo sapien
aatttcttattacactcagaatgga

SEQ ID NO: 2413456 - DNA, 25 bp, Homo sapien
aaatttcttattacactcagaatgg

SEQ ID NO: 2413457 - DNA, 25 bp, Homo sapien
atttcttattacactcagaatggat

SEQ ID NO: 2413458 - DNA, 25 bp, Homo sapien
ggcattctcactagaatctagatac

SEQ ID NO: 2413459 - DNA, 25 bp, Homo sapien
cagtgactgggtaccttgtacctga

SEQ ID NO: 2413460 - DNA, 25 bp, Homo sapien
tgtacattctcggaccttgctctgc

SEQ ID NO: 2413461 - DNA, 25 bp, Homo sapien
ccaagtctatttgtacattctcgga

SEQ ID NO: 2413462 - DNA, 25 bp, Homo sapien
ttagcagtggttgtagccgatggtc

SEQ ID NO: 2413463 - DNA, 25 bp, Homo sapien
cttgctcagttgtgtggttcccctg

SEQ ID NO: 2413464 - DNA, 25 bp, Homo sapien
tccacttgagcgctggctgtaaatt

SEQ ID NO: 2413465 - DNA, 25 bp, Homo sapien
tgctctgaaatcaagggcccctctt

SEQ ID NO: 2413466 - DNA, 25 bp, Homo sapien
cttctgctctgaagtagtttatcca

SEQ ID NO: 2413467 - DNA, 25 bp, Homo sapien
tcttctgctctgaagtagtttatcc

SEQ ID NO: 2413468 - DNA, 25 bp, Homo sapien
gctgttcatgtgtaatcctgcagaa

SEQ ID NO: 2413469 - DNA, 25 bp, Homo sapien
ggtctacctgtactggagccagtga

SEQ ID NO: 2413470 - DNA, 25 bp, Homo sapien
caaccctggatcttgcctacaatgg

SEQ ID NO: 2413471 - DNA, 25 bp, Homo sapien
gagccagtgatacgttttatccatc

SEQ ID NO: 2413472 - DNA, 25 bp, Homo sapien
taaatcgtgctacaatcagatgtgc

SEQ ID NO: 2413473 - DNA, 25 bp, Homo sapien
gtagcttccacttagacagacagag

SEQ ID NO: 2413474 - DNA, 25 bp, Homo sapien
ccaacaggaggctatttcgtctaca

SEQ ID NO: 2413475 - DNA, 25 bp, Homo sapien
cacaggcagagtcgatttacccaaa

SEQ ID NO: 2413476 - DNA, 25 bp, Homo sapien
cacagatggtatgatttggatcaca

SEQ ID NO: 2413477 - DNA, 25 bp, Homo sapien
tttcctaaataccaggttcctgcta

SEQ ID NO: 2413478 - DNA, 25 bp, Homo sapien
ttttctttggctgcgtcatttctca

SEQ ID NO: 2413479 - DNA, 25 bp, Homo sapien
ggttcctgctagatgtgaggcacag

SEQ ID NO: 2413480 - DNA, 25 bp, Homo sapien
tagggttatctctatagtagtggca

SEQ ID NO: 2413481 - DNA, 25 bp, Homo sapien
ggaatggctctaaaattgtagccca

SEQ ID NO: 2413482 - DNA, 25 bp, Homo sapien
tgtagcccatgttttaatgcaggtg

SEQ ID NO: 2413483 - DNA, 25 bp, Homo sapien
tagtggcataaagaaagagctgtgt

SEQ ID NO: 2413484 - DNA, 25 bp, Homo sapien
gggacaaaggcaaactctctgacat

SEQ ID NO: 2413485 - DNA, 25 bp, Homo sapien
aactctctgacatttcgcctctggt

SEQ ID NO: 2413486 - DNA, 25 bp, Homo sapien
gcctctggttgattgtgtttacttt

SEQ ID NO: 2413487 - DNA, 25 bp, Homo sapien
tctctgacatttcgcctctggttga

SEQ ID NO: 2413488 - DNA, 25 bp, Homo sapien
caagagtagatggtgtgggcagagg

SEQ ID NO: 2413489 - DNA, 25 bp, Homo sapien
ctttggggcacaagagtagatggtg

SEQ ID NO: 2413490 - DNA, 25 bp, Homo sapien
agagtagatggtgtgggcagaggca

SEQ ID NO: 2413491 - DNA, 25 bp, Homo sapien
gggcacaagagtagatggtgtgggc

SEQ ID NO: 2413492 - DNA, 25 bp, Homo sapien
gttcgcaatgacgtctgcatcccag

SEQ ID NO: 2413493 - DNA, 25 bp, Homo sapien
aaacctgcggaaacacttgagctgc

SEQ ID NO: 2413494 - DNA, 25 bp, Homo sapien
tgaaaaggtatggaaaccgcatgct

SEQ ID NO: 2413495 - DNA, 25 bp, Homo sapien
tattattacctcctgaaacccgtca

SEQ ID NO: 2413496 - DNA, 25 bp, Homo sapien
tagagaaattgagacttaccgaacc

SEQ ID NO: 2413497 - DNA, 25 bp, Homo sapien
taatcacaccgtagaaagtaccaat

SEQ ID NO: 2413498 - DNA, 25 bp, Homo sapien
tctacaaaaagaattgagcacactg

SEQ ID NO: 2413499 - DNA, 25 bp, Homo sapien
tagattcggtggaaagaagcaagtc

SEQ ID NO: 2413500 - DNA, 25 bp, Homo sapien
tcgcaggggccagcacatcaggtgt

SEQ ID NO: 2413501 - DNA, 25 bp, Homo sapien
cacccagagaaaactattcattatt

SEQ ID NO: 2413502 - DNA, 25 bp, Homo sapien
cttcacccagagaaaactattcatt

SEQ ID NO: 2413503 - DNA, 25 bp, Homo sapien
caaattatgcaggcaacattccaac

SEQ ID NO: 2413504 - DNA, 25 bp, Homo sapien
caatggaactgtgatgtatgggctc

SEQ ID NO: 2413505 - DNA, 25 bp, Homo sapien
ttatgtgcggcaaccagtgagctcg

SEQ ID NO: 2413506 - DNA, 25 bp, Homo sapien
caattctgctcattccgggtaagca

SEQ ID NO: 2413507 - DNA, 25 bp, Homo sapien
caaactataccttgtgtgaccacgc

SEQ ID NO: 2413508 - DNA, 25 bp, Homo sapien
tacataatgcagacctaaaattggg

SEQ ID NO: 2413509 - DNA, 25 bp, Homo sapien
ggaaagtggctcctgttatccagac

SEQ ID NO: 2413510 - DNA, 25 bp, Homo sapien
gagactaagcttttcatcaacgtgc

SEQ ID NO: 2413511 - DNA, 25 bp, Homo sapien
taatatagacgtggctcaacaaatc

SEQ ID NO: 2413512 - DNA, 25 bp, Homo sapien
tgtcctccaagccaacgctgaaagt

SEQ ID NO: 2413513 - DNA, 25 bp, Homo sapien
ttgaaccatgtgctttaccaacagc

SEQ ID NO: 2413514 - DNA, 25 bp, Homo sapien
caaatctgccatgtgctataaagta

SEQ ID NO: 2413515 - DNA, 25 bp, Homo sapien
ggttcctcagccctaacaactcgag

SEQ ID NO: 2413516 - DNA, 25 bp, Homo sapien
tggagaaattcctcgggcatggcat

SEQ ID NO: 2413517 - DNA, 25 bp, Homo sapien
aacagcactgtttgattggcaccaa

SEQ ID NO: 2413518 - DNA, 25 bp, Homo sapien
tataataaaccctcaaagatggctc

SEQ ID NO: 2413519 - DNA, 25 bp, Homo sapien
caggcgcttggcatggattcctcta

SEQ ID NO: 2413520 - DNA, 25 bp, Homo sapien
ccacaaatgtctttctggaccacag

SEQ ID NO: 2413521 - DNA, 25 bp, Homo sapien
gttgtccacaaatgtctttctggac

SEQ ID NO: 2413522 - DNA, 25 bp, Homo sapien
aaatgtctttctggaccacagaagg

SEQ ID NO: 2413523 - DNA, 25 bp, Homo sapien
gtctttctggaccacagaaggttct

SEQ ID NO: 2413524 - DNA, 25 bp, Homo sapien
tgctgtctccaatgtggtgaagttg

SEQ ID NO: 2413525 - DNA, 25 bp, Homo sapien
gagcttgtccttgggacctggcact

SEQ ID NO: 2413526 - DNA, 25 bp, Homo sapien
ggaaatagtagatccttatgctgtc

SEQ ID NO: 2413527 - DNA, 25 bp, Homo sapien
tggtgaagttgatctgagcttgtcc

SEQ ID NO: 2413528 - DNA, 25 bp, Homo sapien
cagacttctttatagccgggattcc

SEQ ID NO: 2413529 - DNA, 25 bp, Homo sapien
tgtggcttctcaacgtggcagggat

SEQ ID NO: 2413530 - DNA, 25 bp, Homo sapien
gagtcctgacttctgaactgggtta

SEQ ID NO: 2413531 - DNA, 25 bp, Homo sapien
caatgtcatgtacctgtgtgagtcc

SEQ ID NO: 2413532 - DNA, 25 bp, Homo sapien
gctgcactgttctaagggctcttct

SEQ ID NO: 2413533 - DNA, 25 bp, Homo sapien
gatcttctactccaactgacaggtt

SEQ ID NO: 2413534 - DNA, 25 bp, Homo sapien
ggttagggagtcatacgcagaattt

SEQ ID NO: 2413535 - DNA, 25 bp, Homo sapien
gagataaaaattgcacctccagctg

SEQ ID NO: 2413536 - DNA, 25 bp, Homo sapien
ccctggagagtgacaagtgatactg

SEQ ID NO: 2413537 - DNA, 25 bp, Homo sapien
ggatttgcatctgaacatccctagg

SEQ ID NO: 2413538 - DNA, 25 bp, Homo sapien
tgccttggctgtaatgaaatagctt

SEQ ID NO: 2413539 - DNA, 25 bp, Homo sapien
aactgctaaagtggcgtttcccagg

SEQ ID NO: 2413540 - DNA, 25 bp, Homo sapien
tccctaggagggttatattctccag

SEQ ID NO: 2413541 - DNA, 25 bp, Homo sapien
ttactcagattccactcccgaaaca

SEQ ID NO: 2413542 - DNA, 25 bp, Homo sapien
cgaaacaacacaggcccttgagttt

SEQ ID NO: 2413543 - DNA, 25 bp, Homo sapien
tcccgaaacaacacaggcccttgag

SEQ ID NO: 2413544 - DNA, 25 bp, Homo sapien
tactcagattccactcccgaaacaa

SEQ ID NO: 2413545 - DNA, 25 bp, Homo sapien
gaaaatactaacaagtctcatcgca

SEQ ID NO: 2413546 - DNA, 25 bp, Homo sapien
ggtaacaagcagtcttatccattat

SEQ ID NO: 2413547 - DNA, 25 bp, Homo sapien
caaaacaagtagtgccacgttgtga

SEQ ID NO: 2413548 - DNA, 25 bp, Homo sapien
ttttaaagcaagtcgaaagtaggca

SEQ ID NO: 2413549 - DNA, 25 bp, Homo sapien
caaactgaattatgctcactgcctt

SEQ ID NO: 2413550 - DNA, 25 bp, Homo sapien
tcgttcgtcacaaacagaagtcata

SEQ ID NO: 2413551 - DNA, 25 bp, Homo sapien
cctttgaaatgctaagtacttgaga

SEQ ID NO: 2413552 - DNA, 25 bp, Homo sapien
gaagacttcatcttcgttcgtcaca

SEQ ID NO: 2413553 - DNA, 25 bp, Homo sapien
tatgctgggattagctgtcactaac

SEQ ID NO: 2413554 - DNA, 25 bp, Homo sapien
tcactaactgacttttggatccaac

SEQ ID NO: 2413555 - DNA, 25 bp, Homo sapien
tagctgtcactaactgacttttgga

SEQ ID NO: 2413556 - DNA, 25 bp, Homo sapien
ctttgccgaattatgctgggattag

SEQ ID NO: 2413557 - DNA, 25 bp, Homo sapien
acttgacaaaggagggagattgcat

SEQ ID NO: 2413558 - DNA, 25 bp, Homo sapien
tcacttgacaaaggagggagattgc

SEQ ID NO: 2413559 - DNA, 25 bp, Homo sapien
cacttgacaaaggagggagattgca

SEQ ID NO: 2413560 - DNA, 25 bp, Homo sapien
tgatacactagaggacatgggacct

SEQ ID NO: 2413561 - DNA, 25 bp, Homo sapien
taagaaagataatgtcagccaaagg

SEQ ID NO: 2413562 - DNA, 25 bp, Homo sapien
atatttttgagagggtaggacagac

SEQ ID NO: 2413563 - DNA, 25 bp, Homo sapien
catgggacctacagtacctctgcac

SEQ ID NO: 2413564 - DNA, 25 bp, Homo sapien
cctgtgagtatcaacacatcaaggc

SEQ ID NO: 2413565 - DNA, 25 bp, Homo sapien
tgtgagtatcaacacatcaaggcat

SEQ ID NO: 2413566 - DNA, 25 bp, Homo sapien
acacatcaaggcatcctaggcagaa

SEQ ID NO: 2413567 - DNA, 25 bp, Homo sapien
tatcaacacatcaaggcatcctagg

SEQ ID NO: 2413568 - DNA, 25 bp, Homo sapien
ttatctgctcttcggtgataagata

SEQ ID NO: 2413569 - DNA, 25 bp, Homo sapien
tgctcttcggtgataagatactggt

SEQ ID NO: 2413570 - DNA, 25 bp, Homo sapien
tctggtagctaccaacaggtcagtt

SEQ ID NO: 2413571 - DNA, 25 bp, Homo sapien
ggtcagttaaccagtcagtggcttt

SEQ ID NO: 2413572 - DNA, 25 bp, Homo sapien
gctggagagtactgtcaacatgttt

SEQ ID NO: 2413573 - DNA, 25 bp, Homo sapien
cctgtgtgttccatggctcatgtgt

SEQ ID NO: 2413574 - DNA, 25 bp, Homo sapien
gcacaccaataattttagttcctca

SEQ ID NO: 2413575 - DNA, 25 bp, Homo sapien
acattttggtgtaagttcttctggg

SEQ ID NO: 2413576 - DNA, 25 bp, Homo sapien
cagagccagctcaaggcccatatgt

SEQ ID NO: 2413577 - DNA, 25 bp, Homo sapien
ggtgttgcattgactggaactaaaa

SEQ ID NO: 2413578 - DNA, 25 bp, Homo sapien
gagccagctcaaggcccatatgtca

SEQ ID NO: 2413579 - DNA, 25 bp, Homo sapien
tgttgcattgactggaactaaaaga

SEQ ID NO: 2413580 - DNA, 25 bp, Homo sapien
cgcatgacaaaatttgcttcatcta

SEQ ID NO: 2413581 - DNA, 25 bp, Homo sapien
gccactcttcttcagaatcccacca

SEQ ID NO: 2413582 - DNA, 25 bp, Homo sapien
tttcttcaatggcagctggaatggg

SEQ ID NO: 2413583 - DNA, 25 bp, Homo sapien
cttcatctatttgacggccacagcc

SEQ ID NO: 2413584 - DNA, 25 bp, Homo sapien
aggtaggctgtcaaacccctctgta

SEQ ID NO: 2413585 - DNA, 25 bp, Homo sapien
tctgtcaggaatctggccgcaaaac

SEQ ID NO: 2413586 - DNA, 25 bp, Homo sapien
gtcaagcatctaaccaagccactgg

SEQ ID NO: 2413587 - DNA, 25 bp, Homo sapien
gagcctattaggctggcaattccag

SEQ ID NO: 2413588 - DNA, 25 bp, Homo sapien
ctcaatttctcagtttggcaatggt

SEQ ID NO: 2413589 - DNA, 25 bp, Homo sapien
cctcctcaatttctcagtttggcaa

SEQ ID NO: 2413590 - DNA, 25 bp, Homo sapien
agaatacctcctcaatttctcagtt

SEQ ID NO: 2413591 - DNA, 25 bp, Homo sapien
atttctcagtttggcaatggtccat

SEQ ID NO: 2413592 - DNA, 25 bp, Homo sapien
cagaatccccgaagcaaccagctca

SEQ ID NO: 2413593 - DNA, 25 bp, Homo sapien
taaaaacttcagaatccccgaagca

SEQ ID NO: 2413594 - DNA, 25 bp, Homo sapien
ttcagaatccccgaagcaaccagct

SEQ ID NO: 2413595 - DNA, 25 bp, Homo sapien
aacttcagaatccccgaagcaacca

SEQ ID NO: 2413596 - DNA, 25 bp, Homo sapien
gactagctactgttgtgtacaccca

SEQ ID NO: 2413597 - DNA, 25 bp, Homo sapien
aacagcgaataagcccctcaagggt

SEQ ID NO: 2413598 - DNA, 25 bp, Homo sapien
gcactgggtaacacttgactagcta

SEQ ID NO: 2413599 - DNA, 25 bp, Homo sapien
cattctaggcccttagcactgggta

SEQ ID NO: 2413600 - DNA, 25 bp, Homo sapien
caaacacatcctttctcacgtggca

SEQ ID NO: 2413601 - DNA, 25 bp, Homo sapien
aagcaaacacatcctttctcacgtg

SEQ ID NO: 2413602 - DNA, 25 bp, Homo sapien
agcaaacacatcctttctcacgtgg

SEQ ID NO: 2413603 - DNA, 25 bp, Homo sapien
aacacatcctttctcacgtggcagc

SEQ ID NO: 2413604 - DNA, 25 bp, Homo sapien
cctgcagccttcctattccagtact

SEQ ID NO: 2413605 - DNA, 25 bp, Homo sapien
ctgcagccttcctattccagtactg

SEQ ID NO: 2413606 - DNA, 25 bp, Homo sapien
ctttgccataaagacccatgtaact

SEQ ID NO: 2413607 - DNA, 25 bp, Homo sapien
tattcaaagcagctaaacgtcctct

SEQ ID NO: 2413608 - DNA, 25 bp, Homo sapien
ttgccataaagacccatgtaactaa

SEQ ID NO: 2413609 - DNA, 25 bp, Homo sapien
aatattcaaagcagctaaacgtcct

SEQ ID NO: 2413610 - DNA, 25 bp, Homo sapien
tgaacactcgggatttttctcctct

SEQ ID NO: 2413611 - DNA, 25 bp, Homo sapien
gtcccgaggttgtcgtctgctttct

SEQ ID NO: 2413612 - DNA, 25 bp, Homo sapien
tgtgtgaacactcgggatttttctc

SEQ ID NO: 2413613 - DNA, 25 bp, Homo sapien
tttctcctctgtcccgaggttgtcg

SEQ ID NO: 2413614 - DNA, 25 bp, Homo sapien
gctgctccagctgacttagtctgcc

SEQ ID NO: 2413615 - DNA, 25 bp, Homo sapien
caacagcatatctactagctgctcc

SEQ ID NO: 2413616 - DNA, 25 bp, Homo sapien
agtctgccgtttagccacttgctca

SEQ ID NO: 2413617 - DNA, 25 bp, Homo sapien
ttaataataaaacgcaacagcatat

SEQ ID NO: 2413618 - DNA, 25 bp, Homo sapien
tttacaatcagcagatgttgaccca

SEQ ID NO: 2413619 - DNA, 25 bp, Homo sapien
cctttacaatcagcagatgttgacc

SEQ ID NO: 2413620 - DNA, 25 bp, Homo sapien
ttacaatcagcagatgttgacccat

SEQ ID NO: 2413621 - DNA, 25 bp, Homo sapien
ttcctttacaatcagcagatgttga

SEQ ID NO: 2413622 - DNA, 25 bp, Homo sapien
cagtccctagaccacagttacagta

SEQ ID NO: 2413623 - DNA, 25 bp, Homo sapien
tcctggacttcttcgcaactagtgt

SEQ ID NO: 2413624 - DNA, 25 bp, Homo sapien
caactagtgttctggatgcaaatca

SEQ ID NO: 2413625 - DNA, 25 bp, Homo sapien
tactcagtaattctaggaaccaccc

SEQ ID NO: 2413626 - DNA, 25 bp, Homo sapien
cattttagtcatagcaaagagatgg

SEQ ID NO: 2413627 - DNA, 25 bp, Homo sapien
gaagagagagtaagttgaattgtca

SEQ ID NO: 2413628 - DNA, 25 bp, Homo sapien
ggcagggtcgcagcagtcttccatt

SEQ ID NO: 2413629 - DNA, 25 bp, Homo sapien
taaaaactccccgtcataccacatg

SEQ ID NO: 2413630 - DNA, 25 bp, Homo sapien
tctgagatcttcgttggctttgcct

SEQ ID NO: 2413631 - DNA, 25 bp, Homo sapien
gagctcgggaagaaagctttcatct

SEQ ID NO: 2413632 - DNA, 25 bp, Homo sapien
gcggtgtgggcaagcttcctcagcc

SEQ ID NO: 2413633 - DNA, 25 bp, Homo sapien
tatcaaacttggtagaccgagtgtc

SEQ ID NO: 2413634 - DNA, 25 bp, Homo sapien
ccacccaaaaggtggcttccagaga

SEQ ID NO: 2413635 - DNA, 25 bp, Homo sapien
gccacccaaaaggtggcttccagag

SEQ ID NO: 2413636 - DNA, 25 bp, Homo sapien
tgccacccaaaaggtggcttccaga

SEQ ID NO: 2413637 - DNA, 25 bp, Homo sapien
ctatttgcaatatgagtggtttttc

SEQ ID NO: 2413638 - DNA, 25 bp, Homo sapien
actatttgcaatatgagtggttttt

SEQ ID NO: 2413639 - DNA, 25 bp, Homo sapien
cccttccaagagatgactgaatttg

SEQ ID NO: 2413640 - DNA, 25 bp, Homo sapien
agatgactgaatttgagacaggagg

SEQ ID NO: 2413641 - DNA, 25 bp, Homo sapien
gtcccttccaagagatgactgaatt

SEQ ID NO: 2413642 - DNA, 25 bp, Homo sapien
tgtgtcccttccaagagatgactga

SEQ ID NO: 2413643 - DNA, 25 bp, Homo sapien
acatccaaatcaatgccagtgctgg

SEQ ID NO: 2413644 - DNA, 25 bp, Homo sapien
tggaaggttaaatagtcagatatac

SEQ ID NO: 2413645 - DNA, 25 bp, Homo sapien
actgttacactgtagctatttagac

SEQ ID NO: 2413646 - DNA, 25 bp, Homo sapien
gctatttagacttagcttttggaag

SEQ ID NO: 2413647 - DNA, 25 bp, Homo sapien
actacctaggagagtaaattgtcag

SEQ ID NO: 2413648 - DNA, 25 bp, Homo sapien
gcgtgtctggaatataaccttagga

SEQ ID NO: 2413649 - DNA, 25 bp, Homo sapien
ctaatcagggtatcaatgtgagcag

SEQ ID NO: 2413650 - DNA, 25 bp, Homo sapien
gcacaaacagggagtgtcatcagag

SEQ ID NO: 2413651 - DNA, 25 bp, Homo sapien
tgttccatagctaagggttctgcca

SEQ ID NO: 2413652 - DNA, 25 bp, Homo sapien
caatggctgtcgtctcacgctgctg

SEQ ID NO: 2413653 - DNA, 25 bp, Homo sapien
ctttttgctagtcaggccaaccaaa

SEQ ID NO: 2413654 - DNA, 25 bp, Homo sapien
tccagctgaactacggtcataagat

SEQ ID NO: 2413655 - DNA, 25 bp, Homo sapien
ggtctcctcttacagtcctatggta

SEQ ID NO: 2413656 - DNA, 25 bp, Homo sapien
gcataaacagaccagttcatctcaa

SEQ ID NO: 2413657 - DNA, 25 bp, Homo sapien
tgcaacagaggctactctcaggttt

SEQ ID NO: 2413658 - DNA, 25 bp, Homo sapien
tatggaatcccaagagcataaacag

SEQ ID NO: 2413659 - DNA, 25 bp, Homo sapien
actgaaactgccctcttaaaggtct

SEQ ID NO: 2413660 - DNA, 25 bp, Homo sapien
gatatccacggcagtctcacatcct

SEQ ID NO: 2413661 - DNA, 25 bp, Homo sapien
cctgatcgctgaagcatttgacaca

SEQ ID NO: 2413662 - DNA, 25 bp, Homo sapien
aaatcaaatcaaatggccgttcctc

SEQ ID NO: 2413663 - DNA, 25 bp, Homo sapien
cacctttggccaggatactgcctac

SEQ ID NO: 2413664 - DNA, 25 bp, Homo sapien
cctttggccaggatactgcctacca

SEQ ID NO: 2413665 - DNA, 25 bp, Homo sapien
tggccaggatactgcctaccagggt

SEQ ID NO: 2413666 - DNA, 25 bp, Homo sapien
tttggccaggatactgcctaccagg

SEQ ID NO: 2413667 - DNA, 25 bp, Homo sapien
tggctccaggcgtacttctcccaga

SEQ ID NO: 2413668 - DNA, 25 bp, Homo sapien
ccaggcgtacttctcccagattcat

SEQ ID NO: 2413669 - DNA, 25 bp, Homo sapien
tctcccagattcatgctcctaatca

SEQ ID NO: 2413670 - DNA, 25 bp, Homo sapien
gctccaggcgtacttctcccagatt

SEQ ID NO: 2413671 - DNA, 25 bp, Homo sapien
tcctggcacctaattagagcgacac

SEQ ID NO: 2413672 - DNA, 25 bp, Homo sapien
tacaataagtacttccgagtgaggg

SEQ ID NO: 2413673 - DNA, 25 bp, Homo sapien
aagatgtagtgggacgaaaggccct

SEQ ID NO: 2413674 - DNA, 25 bp, Homo sapien
taaagattttgcatcccaggcaaga

SEQ ID NO: 2413675 - DNA, 25 bp, Homo sapien
actaggaatctcctcttatctgtgg

SEQ ID NO: 2413676 - DNA, 25 bp, Homo sapien
aacagtcaaactgtaagccttggaa

SEQ ID NO: 2413677 - DNA, 25 bp, Homo sapien
agatggtaccaagccctatataccg

SEQ ID NO: 2413678 - DNA, 25 bp, Homo sapien
tgtaagccttggaaccccatgttac

SEQ ID NO: 2413679 - DNA, 25 bp, Homo sapien
atgggcagcaagtgtcaacagtgtg

SEQ ID NO: 2413680 - DNA, 25 bp, Homo sapien
ttgaacacaagcacggtgatcccac

SEQ ID NO: 2413681 - DNA, 25 bp, Homo sapien
accaccaagatggatattaagtgac

SEQ ID NO: 2413682 - DNA, 25 bp, Homo sapien
tcccaccaccaagatggatattaag

SEQ ID NO: 2413683 - DNA, 25 bp, Homo sapien
aattttgccggccatagtacagcac

SEQ ID NO: 2413684 - DNA, 25 bp, Homo sapien
tcatcactgtattgccagcacctaa

SEQ ID NO: 2413685 - DNA, 25 bp, Homo sapien
cagcacctaactggtacatggtaga

SEQ ID NO: 2413686 - DNA, 25 bp, Homo sapien
cagggaccacgttcttgtattcatc

SEQ ID NO: 2413687 - DNA, 25 bp, Homo sapien
taggcacagaatttgtccaaagaca

SEQ ID NO: 2413688 - DNA, 25 bp, Homo sapien
tgaaaaaagagcgtgtgtcacaagg

SEQ ID NO: 2413689 - DNA, 25 bp, Homo sapien
taatcctctcaaggtaactattgcc

SEQ ID NO: 2413690 - DNA, 25 bp, Homo sapien
taataattagcacttatccagcaac

SEQ ID NO: 2413691 - DNA, 25 bp, Homo sapien
gcaagaccaagtaaatttttcaatg

SEQ ID NO: 2413692 - DNA, 25 bp, Homo sapien
ctgcggctaaggctcagcaagacca

SEQ ID NO: 2413693 - DNA, 25 bp, Homo sapien
ttcaatgtcacaaagttgataaatg

SEQ ID NO: 2413694 - DNA, 25 bp, Homo sapien
caatgtcacaaagttgataaatgac

SEQ ID NO: 2413695 - DNA, 25 bp, Homo sapien
tattcagttcacagctacagaccca

SEQ ID NO: 2413696 - DNA, 25 bp, Homo sapien
taagaatgaggcacagttcctgtct

SEQ ID NO: 2413697 - DNA, 25 bp, Homo sapien
gggaagccaccttgaggcgaactaa

SEQ ID NO: 2413698 - DNA, 25 bp, Homo sapien
ccaattgggtggctatctggttcca

SEQ ID NO: 2413699 - DNA, 25 bp, Homo sapien
caaaactcttacagctttcttactt

SEQ ID NO: 2413700 - DNA, 25 bp, Homo sapien
tctgagaattcagtacatatcaagt

SEQ ID NO: 2413701 - DNA, 25 bp, Homo sapien
ccatctccttcgcagtttgacaagg

SEQ ID NO: 2413702 - DNA, 25 bp, Homo sapien
ctttctatcaccacataaacattag

SEQ ID NO: 2413703 - DNA, 25 bp, Homo sapien
ttcaaaatgtcttgtccctgttcat

SEQ ID NO: 2413704 - DNA, 25 bp, Homo sapien
ccctgttcattagcgttaagtgtac

SEQ ID NO: 2413705 - DNA, 25 bp, Homo sapien
tcttgtccctgttcattagcgttaa

SEQ ID NO: 2413706 - DNA, 25 bp, Homo sapien
aatgtcttgtccctgttcattagcg

SEQ ID NO: 2413707 - DNA, 25 bp, Homo sapien
tacatgcgcaaagcaggtgtctgca

SEQ ID NO: 2413708 - DNA, 25 bp, Homo sapien
acatgcgcaaagcaggtgtctgcac

SEQ ID NO: 2413709 - DNA, 25 bp, Homo sapien
ttacatgcgcaaagcaggtgtctgc

SEQ ID NO: 2413710 - DNA, 25 bp, Homo sapien
agggaaaggacatggaagagcggat

SEQ ID NO: 2413711 - DNA, 25 bp, Homo sapien
gaaaggacatggaagagcggatgaa

SEQ ID NO: 2413712 - DNA, 25 bp, Homo sapien
ctctgcgagacggtgcaaggcggtc

SEQ ID NO: 2413713 - DNA, 25 bp, Homo sapien
gtcctcgccggtgaccctgtcctct

SEQ ID NO: 2413714 - DNA, 25 bp, Homo sapien
gaggggaggagccgcgagggcagga

SEQ ID NO: 2413715 - DNA, 25 bp, Homo sapien
ggaggagccgcgagggcaggagtac

SEQ ID NO: 2413716 - DNA, 25 bp, Homo sapien
ctagaggggaggagccgcgagggca

SEQ ID NO: 2413717 - DNA, 25 bp, Homo sapien
gggaggagccgcgagggcaggagta

SEQ ID NO: 2413718 - DNA, 25 bp, Homo sapien
gcgggaacttccacgccagtacagc

SEQ ID NO: 2413719 - DNA, 25 bp, Homo sapien
aagatgtagagccaacagaggacca

SEQ ID NO: 2413720 - DNA, 25 bp, Homo sapien
atctctttctcgttgggcagccggt

SEQ ID NO: 2413721 - DNA, 25 bp, Homo sapien
gaccacgacacagagggcactggct

SEQ ID NO: 2413722 - DNA, 25 bp, Homo sapien
tcgccgggcccgcccgcaggggctc

SEQ ID NO: 2413723 - DNA, 25 bp, Homo sapien
tgtcgccgggcccgcccgcaggggc

SEQ ID NO: 2413724 - DNA, 25 bp, Homo sapien
cgtttgtcgccgggcccgcccgcag

SEQ ID NO: 2413725 - DNA, 25 bp, Homo sapien
gccgggcccgcccgcaggggctcat

SEQ ID NO: 2413726 - DNA, 25 bp, Homo sapien
gcctcagcacaaagctaggcgaagt

SEQ ID NO: 2413727 - DNA, 25 bp, Homo sapien
tcagcacaaagctaggcgaagtggc

SEQ ID NO: 2413728 - DNA, 25 bp, Homo sapien
gggcctcagcacaaagctaggcgaa

SEQ ID NO: 2413729 - DNA, 25 bp, Homo sapien
agcacaaagctaggcgaagtggcag

SEQ ID NO: 2413730 - DNA, 25 bp, Homo sapien
tgcaaacgcacgcacgcttcttcgg

SEQ ID NO: 2413731 - DNA, 25 bp, Homo sapien
tctcttacttgcaaacgcacgcacg

SEQ ID NO: 2413732 - DNA, 25 bp, Homo sapien
tcaaatgcaacttttccaaggattt

SEQ ID NO: 2413733 - DNA, 25 bp, Homo sapien
gccccaaaggtcagcgcaaggattt

SEQ ID NO: 2413734 - DNA, 25 bp, Homo sapien
tgaagtcacgatctatggccatggt

SEQ ID NO: 2413735 - DNA, 25 bp, Homo sapien
gctcggctccctcctaaacatgtgg

SEQ ID NO: 2413736 - DNA, 25 bp, Homo sapien
tctcatcagttaattcagcggcgcg

SEQ ID NO: 2413737 - DNA, 25 bp, Homo sapien
ctcccggagaagaaaagaactcgct

SEQ ID NO: 2413738 - DNA, 25 bp, Homo sapien
tacagttctgagtaagtcataacat

SEQ ID NO: 2413739 - DNA, 25 bp, Homo sapien
ctatgcaactcttagatacagttct

SEQ ID NO: 2413740 - DNA, 25 bp, Homo sapien
tcttagatacagttctgagtaagtc

SEQ ID NO: 2413741 - DNA, 25 bp, Homo sapien
tgcaactcttagatacagttctgag

SEQ ID NO: 2413742 - DNA, 25 bp, Homo sapien
caatgtatcctccagttcaaagaaa

SEQ ID NO: 2413743 - DNA, 25 bp, Homo sapien
aaggcaggcagcaatgcgcaagtca

SEQ ID NO: 2413744 - DNA, 25 bp, Homo sapien
catggcaatgcagagtatcagctac

SEQ ID NO: 2413745 - DNA, 25 bp, Homo sapien
acaggctgtcatcttggttcatggc

SEQ ID NO: 2413746 - DNA, 25 bp, Homo sapien
gggtgggagtttctgcccaatcata

SEQ ID NO: 2413747 - DNA, 25 bp, Homo sapien
ggagtttctgcccaatcataaggca

SEQ ID NO: 2413748 - DNA, 25 bp, Homo sapien
catgggtgggagtttctgcccaatc

SEQ ID NO: 2413749 - DNA, 25 bp, Homo sapien
ttctgcccaatcataaggcaggtag

SEQ ID NO: 2413750 - DNA, 25 bp, Homo sapien
aactggtcctcagcatcgttgtgag

SEQ ID NO: 2413751 - DNA, 25 bp, Homo sapien
tggctcaaactggtcctcagcatcg

SEQ ID NO: 2413752 - DNA, 25 bp, Homo sapien
tcaaactggtcctcagcatcgttgt

SEQ ID NO: 2413753 - DNA, 25 bp, Homo sapien
gatggctcaaactggtcctcagcat

SEQ ID NO: 2413754 - DNA, 25 bp, Homo sapien
cagtttcagttgtagccaatgccag

SEQ ID NO: 2413755 - DNA, 25 bp, Homo sapien
gctgggttgatactgttgctaactg

SEQ ID NO: 2413756 - DNA, 25 bp, Homo sapien
tcagtttcagttgtagccaatgcca

SEQ ID NO: 2413757 - DNA, 25 bp, Homo sapien
tactgttgctaactgatgcttcagt

SEQ ID NO: 2413758 - DNA, 25 bp, Homo sapien
agaagactttacgttcggaatcttg

SEQ ID NO: 2413759 - DNA, 25 bp, Homo sapien
ggctgaagaagactttacgttcgga

SEQ ID NO: 2413760 - DNA, 25 bp, Homo sapien
ctttacgttcggaatcttgggtcat

SEQ ID NO: 2413761 - DNA, 25 bp, Homo sapien
tgaagaagactttacgttcggaatc

SEQ ID NO: 2413762 - DNA, 25 bp, Homo sapien
gtgtaaactgtattcacaatattgc

SEQ ID NO: 2413763 - DNA, 25 bp, Homo sapien
gatactaactccctatcacatatat

SEQ ID NO: 2413764 - DNA, 25 bp, Homo sapien
tacagtccagtagtgtaaactgtat

SEQ ID NO: 2413765 - DNA, 25 bp, Homo sapien
tactaactccctatcacatatatga

SEQ ID NO: 2413766 - DNA, 25 bp, Homo sapien
gtagccttcctacgttacagcctgt

SEQ ID NO: 2413767 - DNA, 25 bp, Homo sapien
cctgtgatctctagagtaactgaag

SEQ ID NO: 2413768 - DNA, 25 bp, Homo sapien
caagagtcctaaatgcatttgtgca

SEQ ID NO: 2413769 - DNA, 25 bp, Homo sapien
gaccttcaatcttttaggagcttga

SEQ ID NO: 2413770 - DNA, 25 bp, Homo sapien
ctgttggttacaaactagaatcttg

SEQ ID NO: 2413771 - DNA, 25 bp, Homo sapien
ggttacaaactagaatcttgatagg

SEQ ID NO: 2413772 - DNA, 25 bp, Homo sapien
tacaaactagaatcttgataggctc

SEQ ID NO: 2413773 - DNA, 25 bp, Homo sapien
gacatctgttggttacaaactagaa

SEQ ID NO: 2413774 - DNA, 25 bp, Homo sapien
aagaggtagccatcccgatattctg

SEQ ID NO: 2413775 - DNA, 25 bp, Homo sapien
ccatcccgatattctgtgacacact

SEQ ID NO: 2413776 - DNA, 25 bp, Homo sapien
ggtagccatcccgatattctgtgac

SEQ ID NO: 2413777 - DNA, 25 bp, Homo sapien
ggcttggtaataaggccttgattca

SEQ ID NO: 2413778 - DNA, 25 bp, Homo sapien
gagacacattattgctaccgtacag

SEQ ID NO: 2413779 - DNA, 25 bp, Homo sapien
cagttaaaacatgagggatatccaa

SEQ ID NO: 2413780 - DNA, 25 bp, Homo sapien
aaccaaataccaatctaggtgttgc

SEQ ID NO: 2413781 - DNA, 25 bp, Homo sapien
tattttgtagatgtgcagtgatgaa

SEQ ID NO: 2413782 - DNA, 25 bp, Homo sapien
tcagccacttttggagatataggac

SEQ ID NO: 2413783 - DNA, 25 bp, Homo sapien
aggtttttcaacatctgcccgttgg

SEQ ID NO: 2413784 - DNA, 25 bp, Homo sapien
acagatagatcctagttggcaaaca

SEQ ID NO: 2413785 - DNA, 25 bp, Homo sapien
tggctgagcacagatagatcctagt

SEQ ID NO: 2413786 - DNA, 25 bp, Homo sapien
acaaggtttttcaacatctgcccgt

SEQ ID NO: 2413787 - DNA, 25 bp, Homo sapien
ggcctgctttctaattggagcctct

SEQ ID NO: 2413788 - DNA, 25 bp, Homo sapien
aaccagaggcctgctttctaattgg

SEQ ID NO: 2413789 - DNA, 25 bp, Homo sapien
agaggcctgctttctaattggagcc

SEQ ID NO: 2413790 - DNA, 25 bp, Homo sapien
cctgctttctaattggagcctctca

SEQ ID NO: 2413791 - DNA, 25 bp, Homo sapien
cttggcaaagagtccagaggttatc

SEQ ID NO: 2413792 - DNA, 25 bp, Homo sapien
caaagagtccagaggttatcctttc

SEQ ID NO: 2413793 - DNA, 25 bp, Homo sapien
tggcaaagagtccagaggttatcct

SEQ ID NO: 2413794 - DNA, 25 bp, Homo sapien
ggcaaagagtccagaggttatcctt

SEQ ID NO: 2413795 - DNA, 25 bp, Homo sapien
cactactctgcatgtttccaaggga

SEQ ID NO: 2413796 - DNA, 25 bp, Homo sapien
tgaaaatagtactaccatacgatcc

SEQ ID NO: 2413797 - DNA, 25 bp, Homo sapien
tacacaatgggatgctcttcagtct

SEQ ID NO: 2413798 - DNA, 25 bp, Homo sapien
tctttgttggagagtacgtggagaa

SEQ ID NO: 2413799 - DNA, 25 bp, Homo sapien
catttggcgtcgacagaaaaagtct

SEQ ID NO: 2413800 - DNA, 25 bp, Homo sapien
ggttcatttacaacgggcatttggc

SEQ ID NO: 2413801 - DNA, 25 bp, Homo sapien
tctcatgcctccaaaagactccagg

SEQ ID NO: 2413802 - DNA, 25 bp, Homo sapien
tgaagggtcaagaccccacagggcc

SEQ ID NO: 2413803 - DNA, 25 bp, Homo sapien
cacttctaagtcagattcacgaaca

SEQ ID NO: 2413804 - DNA, 25 bp, Homo sapien
catgatgactggcagttggtagtag

SEQ ID NO: 2413805 - DNA, 25 bp, Homo sapien
gattcacgaacaaaaaccactgcat

SEQ ID NO: 2413806 - DNA, 25 bp, Homo sapien
tcaggttgtaacttcgccttcagta

SEQ ID NO: 2413807 - DNA, 25 bp, Homo sapien
ttatgtaggagacaacagcattccc

SEQ ID NO: 2413808 - DNA, 25 bp, Homo sapien
gacacactgcttcattatgtaggag

SEQ ID NO: 2413809 - DNA, 25 bp, Homo sapien
ttccctcctaatgcagcaacatgag

SEQ ID NO: 2413810 - DNA, 25 bp, Homo sapien
caacatgagctctcaccattgcaaa

SEQ ID NO: 2413811 - DNA, 25 bp, Homo sapien
taacaaccccaactgtggaatttgc

SEQ ID NO: 2413812 - DNA, 25 bp, Homo sapien
aaacatgttaattatcccaagatac

SEQ ID NO: 2413813 - DNA, 25 bp, Homo sapien
caaggtggagcagaacgattccgga

SEQ ID NO: 2413814 - DNA, 25 bp, Homo sapien
gaagtagtctctcgaataaaaaaca

SEQ ID NO: 2413815 - DNA, 25 bp, Homo sapien
ttcagctgtctgtgaggctaagcca

SEQ ID NO: 2413816 - DNA, 25 bp, Homo sapien
taaaagcttaacgacctctgctagc

SEQ ID NO: 2413817 - DNA, 25 bp, Homo sapien
tggtaacacaattattccctgaggt

SEQ ID NO: 2413818 - DNA, 25 bp, Homo sapien
aacattcagaacagacgctggtaac

SEQ ID NO: 2413819 - DNA, 25 bp, Homo sapien
aaggaactgtaatcaactgacgttg

SEQ ID NO: 2413820 - DNA, 25 bp, Homo sapien
cacgccttatggtctgagctttcag

SEQ ID NO: 2413821 - DNA, 25 bp, Homo sapien
ctgcaaaggaactgtaatcaactga

SEQ ID NO: 2413822 - DNA, 25 bp, Homo sapien
tgtcttaattgatccacgccttatg

SEQ ID NO: 2413823 - DNA, 25 bp, Homo sapien
ggatgatgtctcttactcgtcttaa

SEQ ID NO: 2413824 - DNA, 25 bp, Homo sapien
catagttgtgtggtctcctagggag

SEQ ID NO: 2413825 - DNA, 25 bp, Homo sapien
aaccaagttctcagttagcaggctg

SEQ ID NO: 2413826 - DNA, 25 bp, Homo sapien
tggtccttttcaagtcagataagag

SEQ ID NO: 2413827 - DNA, 25 bp, Homo sapien
gctggtatacctgagttagaacttg

SEQ ID NO: 2413828 - DNA, 25 bp, Homo sapien
ggtatacctgagttagaacttgcac

SEQ ID NO: 2413829 - DNA, 25 bp, Homo sapien
ctgagttagaacttgcactctccag

SEQ ID NO: 2413830 - DNA, 25 bp, Homo sapien
ctctgtgcagctggtatacctgagt

SEQ ID NO: 2413831 - DNA, 25 bp, Homo sapien
cagtaacctgacagtagcatccaga

SEQ ID NO: 2413832 - DNA, 25 bp, Homo sapien
tgcttcacagatcagcataagctgc

SEQ ID NO: 2413833 - DNA, 25 bp, Homo sapien
tgagtgatcacagaggtaaccagga

SEQ ID NO: 2413834 - DNA, 25 bp, Homo sapien
acagctccctctggtggtatcaaga

SEQ ID NO: 2413835 - DNA, 25 bp, Homo sapien
tgaataaaagggatcaccaggtggg

SEQ ID NO: 2413836 - DNA, 25 bp, Homo sapien
gcctatgaggataccacactgtgga

SEQ ID NO: 2413837 - DNA, 25 bp, Homo sapien
gaccatcatgctcactgactggaga

SEQ ID NO: 2413838 - DNA, 25 bp, Homo sapien
acatctgtagggacactcagcacag

SEQ ID NO: 2413839 - DNA, 25 bp, Homo sapien
acatttaaggcctgattaggccagg

SEQ ID NO: 2413840 - DNA, 25 bp, Homo sapien
ggccaggtctccacccttatgggtg

SEQ ID NO: 2413841 - DNA, 25 bp, Homo sapien
cacggtctcaagtgttttgtcacag

SEQ ID NO: 2413842 - DNA, 25 bp, Homo sapien
acccttatgggtgggattggtgcca

SEQ ID NO: 2413843 - DNA, 25 bp, Homo sapien
caactaatagctcaagatgtaagcc

SEQ ID NO: 2413844 - DNA, 25 bp, Homo sapien
aactcaggtttggatatcaatgatg

SEQ ID NO: 2413845 - DNA, 25 bp, Homo sapien
taagccctacaatacagcaactaat

SEQ ID NO: 2413846 - DNA, 25 bp, Homo sapien
aaatctatgagaagaatctcgctga

SEQ ID NO: 2413847 - DNA, 25 bp, Homo sapien
gaagtgatttggaactaaccctgaa

SEQ ID NO: 2413848 - DNA, 25 bp, Homo sapien
tggaactaaccctgaataaatacaa

SEQ ID NO: 2413849 - DNA, 25 bp, Homo sapien
aaaaacttgctgtatagtgaattca

SEQ ID NO: 2413850 - DNA, 25 bp, Homo sapien
tacaaatttctgtataaagtagatg

SEQ ID NO: 2413851 - DNA, 25 bp, Homo sapien
gtatcaaataacaagtaggaatcat

SEQ ID NO: 2413852 - DNA, 25 bp, Homo sapien
tgaaggtttaattgttgctggaaaa

SEQ ID NO: 2413853 - DNA, 25 bp, Homo sapien
caaagacaggaagctcatcgctttc

SEQ ID NO: 2413854 - DNA, 25 bp, Homo sapien
tctatgtgtgaatagttacagtggg

SEQ ID NO: 2413855 - DNA, 25 bp, Homo sapien
aacacagttccagtggaaattgtaa

SEQ ID NO: 2413856 - DNA, 25 bp, Homo sapien
ggtttgtaaagcctgatttttgtca

SEQ ID NO: 2413857 - DNA, 25 bp, Homo sapien
tcaaaagtgattgcgactgccgtga

SEQ ID NO: 2413858 - DNA, 25 bp, Homo sapien
tttttgtcaaaagtgattgcgactg

SEQ ID NO: 2413859 - DNA, 25 bp, Homo sapien
gtgattgcgactgccgtgactgtaa

SEQ ID NO: 2413860 - DNA, 25 bp, Homo sapien
atcatagatcgtagtttaaagtaca

SEQ ID NO: 2413861 - DNA, 25 bp, Homo sapien
gcagcaggggatcatagatcgtagt

SEQ ID NO: 2413862 - DNA, 25 bp, Homo sapien
gggatcatagatcgtagtttaaagt

SEQ ID NO: 2413863 - DNA, 25 bp, Homo sapien
caggggatcatagatcgtagtttaa

SEQ ID NO: 2413864 - DNA, 25 bp, Homo sapien
cattaaagttcttattgagagcttg

SEQ ID NO: 2413865 - DNA, 25 bp, Homo sapien
ctgattactcttactgaagtgaaca

SEQ ID NO: 2413866 - DNA, 25 bp, Homo sapien
ggttgaggctgcttaatctgattac

SEQ ID NO: 2413867 - DNA, 25 bp, Homo sapien
gcttgattagtcaggttgaggctgc

SEQ ID NO: 2413868 - DNA, 25 bp, Homo sapien
tatttataccgggcataatttctgt

SEQ ID NO: 2413869 - DNA, 25 bp, Homo sapien
ttataccgggcataatttctgtatt

SEQ ID NO: 2413870 - DNA, 25 bp, Homo sapien
gtccaattatttataccgggcataa

SEQ ID NO: 2413871 - DNA, 25 bp, Homo sapien
tccaattatttataccgggcataat

SEQ ID NO: 2413872 - DNA, 25 bp, Homo sapien
ttttgtgttaaatgacatttttcaa

SEQ ID NO: 2413873 - DNA, 25 bp, Homo sapien
tcattgatttttgtgttaaatgaca

SEQ ID NO: 2413874 - DNA, 25 bp, Homo sapien
taaattgtaatcaaaatatatgata

SEQ ID NO: 2413875 - DNA, 25 bp, Homo sapien
ctgtcaaaataaattgtaatcaaaa

SEQ ID NO: 2413876 - DNA, 25 bp, Homo sapien
acttccacctaagttctaacataag

SEQ ID NO: 2413877 - DNA, 25 bp, Homo sapien
taaaattagtactgtaacaattatg

SEQ ID NO: 2413878 - DNA, 25 bp, Homo sapien
gtaacaattatgagctaaaacattt

SEQ ID NO: 2413879 - DNA, 25 bp, Homo sapien
ctgtgacactgtgataagtccttct

SEQ ID NO: 2413880 - DNA, 25 bp, Homo sapien
catcagtaagtagagaatggacatc

SEQ ID NO: 2413881 - DNA, 25 bp, Homo sapien
acatcagtaagtagagaatggacat

SEQ ID NO: 2413882 - DNA, 25 bp, Homo sapien
atcagtaagtagagaatggacatct

SEQ ID NO: 2413883 - DNA, 25 bp, Homo sapien
taaagtgtaatgagatcctttcact

SEQ ID NO: 2413884 - DNA, 25 bp, Homo sapien
ccacaaatacttccaagtgaaatat

SEQ ID NO: 2413885 - DNA, 25 bp, Homo sapien
gtagtaaatgcataattatttcacg

SEQ ID NO: 2413886 - DNA, 25 bp, Homo sapien
acaaagacatcataagcaatcatta

SEQ ID NO: 2413887 - DNA, 25 bp, Homo sapien
gcattgctgtaaatagtaccctgga

SEQ ID NO: 2413888 - DNA, 25 bp, Homo sapien
gagcattctccaactacagtcctgt

SEQ ID NO: 2413889 - DNA, 25 bp, Homo sapien
aaaacgttccacacccaggatctcg

SEQ ID NO: 2413890 - DNA, 25 bp, Homo sapien
tggacaggcgctgacattcatctgc

SEQ ID NO: 2413891 - DNA, 25 bp, Homo sapien
acagccactggcaccgttcctgact

SEQ ID NO: 2413892 - DNA, 25 bp, Homo sapien
cttggttaggcctgtgcgtctctca

SEQ ID NO: 2413893 - DNA, 25 bp, Homo sapien
gcgtctctcatagatccttgttaca

SEQ ID NO: 2413894 - DNA, 25 bp, Homo sapien
tgactctttaaacctccaatcccat

SEQ ID NO: 2413895 - DNA, 25 bp, Homo sapien
atctctttgggagctaaccattcta

SEQ ID NO: 2413896 - DNA, 25 bp, Homo sapien
tctatctctttgggagctaaccatt

SEQ ID NO: 2413897 - DNA, 25 bp, Homo sapien
ctctctcaacttacatcttaatcat

SEQ ID NO: 2413898 - DNA, 25 bp, Homo sapien
tctcaacttacatcttaatcattta

SEQ ID NO: 2413899 - DNA, 25 bp, Homo sapien
tctgtaacttcatccgagctttctg

SEQ ID NO: 2413900 - DNA, 25 bp, Homo sapien
tgggtgatcctataatctcttcaga

SEQ ID NO: 2413901 - DNA, 25 bp, Homo sapien
aagtcttgagcgttgcctaggttct

SEQ ID NO: 2413902 - DNA, 25 bp, Homo sapien
cccatgtgaaaggtctaattctgta

SEQ ID NO: 2413903 - DNA, 25 bp, Homo sapien
ggaggcagcattgtgatacttattg

SEQ ID NO: 2413904 - DNA, 25 bp, Homo sapien
taagagactaccaccaataggaact

SEQ ID NO: 2413905 - DNA, 25 bp, Homo sapien
taccagtactaacaggcaaaagacc

SEQ ID NO: 2413906 - DNA, 25 bp, Homo sapien
gactgattaaaggaaatgactggga

SEQ ID NO: 2413907 - DNA, 25 bp, Homo sapien
caatctgaataccaccaggagttgg

SEQ ID NO: 2413908 - DNA, 25 bp, Homo sapien
gccatcattaggagtcttcccagca

SEQ ID NO: 2413909 - DNA, 25 bp, Homo sapien
taaagctgctaaatacacacctgtg

SEQ ID NO: 2413910 - DNA, 25 bp, Homo sapien
tctgcatatgagagatgtgttgttc

SEQ ID NO: 2413911 - DNA, 25 bp, Homo sapien
tcattagctgagtatgcacttcata

SEQ ID NO: 2413912 - DNA, 25 bp, Homo sapien
tagtccaaacaaagcattcattcct

SEQ ID NO: 2413913 - DNA, 25 bp, Homo sapien
aagagattactgatagctgtagcat

SEQ ID NO: 2413914 - DNA, 25 bp, Homo sapien
tactgatagctgtagcatttgcttc

SEQ ID NO: 2413915 - DNA, 25 bp, Homo sapien
acttagtcacatccctagcctttgg

SEQ ID NO: 2413916 - DNA, 25 bp, Homo sapien
actttttcagggacaccgagtgttg

SEQ ID NO: 2413917 - DNA, 25 bp, Homo sapien
ggaactcttaccagctaattaaagc

SEQ ID NO: 2413918 - DNA, 25 bp, Homo sapien
gcctttggcaggttaataattccca

SEQ ID NO: 2413919 - DNA, 25 bp, Homo sapien
ttccaataactgttgcatctgttgg

SEQ ID NO: 2413920 - DNA, 25 bp, Homo sapien
gcttgaataagacaaccttttccaa

SEQ ID NO: 2413921 - DNA, 25 bp, Homo sapien
taactgttgcatctgttgggaggtc

SEQ ID NO: 2413922 - DNA, 25 bp, Homo sapien
tgttgggaggtctatagttgtaaac

SEQ ID NO: 2413923 - DNA, 25 bp, Homo sapien
cagttatagcaatatgtgagatgag

SEQ ID NO: 2413924 - DNA, 25 bp, Homo sapien
ctgcagttatagcaatatgtgagat

SEQ ID NO: 2413925 - DNA, 25 bp, Homo sapien
tgcagttatagcaatatgtgagatg

SEQ ID NO: 2413926 - DNA, 25 bp, Homo sapien
gcagttatagcaatatgtgagatga

SEQ ID NO: 2413927 - DNA, 25 bp, Homo sapien
aaatccacaacgtgtaggcaaattt

SEQ ID NO: 2413928 - DNA, 25 bp, Homo sapien
atccacaacgtgtaggcaaattttc

SEQ ID NO: 2413929 - DNA, 25 bp, Homo sapien
gcatattcagttcatcatatggtat

SEQ ID NO: 2413930 - DNA, 25 bp, Homo sapien
ggcatattcagttcatcatatggta

SEQ ID NO: 2413931 - DNA, 25 bp, Homo sapien
tgctgtaggctacaaaagtaccact

SEQ ID NO: 2413932 - DNA, 25 bp, Homo sapien
taagcactaagtagcaggcctcatg

SEQ ID NO: 2413933 - DNA, 25 bp, Homo sapien
tttccccatatcagtgccagagcat

SEQ ID NO: 2413934 - DNA, 25 bp, Homo sapien
caaatttctctatgggatgggttac

SEQ ID NO: 2413935 - DNA, 25 bp, Homo sapien
gatttctacactgtacccctgtaag

SEQ ID NO: 2413936 - DNA, 25 bp, Homo sapien
tatagtgcagaatccaatactcctc

SEQ ID NO: 2413937 - DNA, 25 bp, Homo sapien
atactcctctgttactacgggttag

SEQ ID NO: 2413938 - DNA, 25 bp, Homo sapien
tccctatggacacggaaggaccata

SEQ ID NO: 2413939 - DNA, 25 bp, Homo sapien
tctcagaaaaaaagtcgacctctcc

SEQ ID NO: 2413940 - DNA, 25 bp, Homo sapien
ggagaagaattatcccaactctcag

SEQ ID NO: 2413941 - DNA, 25 bp, Homo sapien
ctgcccttatagaaaataagccagg

SEQ ID NO: 2413942 - DNA, 25 bp, Homo sapien
aaaaagtcgacctctcccttctctg

SEQ ID NO: 2413943 - DNA, 25 bp, Homo sapien
cagaaatctaggattcagtacagcc

SEQ ID NO: 2413944 - DNA, 25 bp, Homo sapien
atcctgcagaaatctaggattcagt

SEQ ID NO: 2413945 - DNA, 25 bp, Homo sapien
aatctaggattcagtacagccgctg

SEQ ID NO: 2413946 - DNA, 25 bp, Homo sapien
ctgttccaaacagccttccacggtg

SEQ ID NO: 2413947 - DNA, 25 bp, Homo sapien
catttttcagaccgtataactttgg

SEQ ID NO: 2413948 - DNA, 25 bp, Homo sapien
acatttttcagaccgtataactttg

SEQ ID NO: 2413949 - DNA, 25 bp, Homo sapien
tgtagcccactacagcatgacagcc

SEQ ID NO: 2413950 - DNA, 25 bp, Homo sapien
gacagcctaatgctttagcatgtga

SEQ ID NO: 2413951 - DNA, 25 bp, Homo sapien
gatgctagttgattcactgtagccc

SEQ ID NO: 2413952 - DNA, 25 bp, Homo sapien
ccatgcatctcgagtttctggttca

SEQ ID NO: 2413953 - DNA, 25 bp, Homo sapien
ggaccaatctgaacatccatttaac

SEQ ID NO: 2413954 - DNA, 25 bp, Homo sapien
gaccaatctgaacatccatttaaca

SEQ ID NO: 2413955 - DNA, 25 bp, Homo sapien
tgtgttacccataattccgacaaag

SEQ ID NO: 2413956 - DNA, 25 bp, Homo sapien
cagtttgtaagatcttgtgttaccc

SEQ ID NO: 2413957 - DNA, 25 bp, Homo sapien
ccagtctagcagtttgtaagatctt

SEQ ID NO: 2413958 - DNA, 25 bp, Homo sapien
attgaaactattccagtctagcagt

SEQ ID NO: 2413959 - DNA, 25 bp, Homo sapien
taaaacaatccgaagaatgtgacat

SEQ ID NO: 2413960 - DNA, 25 bp, Homo sapien
aggcctggagatcagtaaatgttct

SEQ ID NO: 2413961 - DNA, 25 bp, Homo sapien
tccatctctagggtccaagtgatcc

SEQ ID NO: 2413962 - DNA, 25 bp, Homo sapien
tgtaagcaaccgtgcccagtcagaa

SEQ ID NO: 2413963 - DNA, 25 bp, Homo sapien
ccaggaggaaatgccgtcaaggtaa

SEQ ID NO: 2413964 - DNA, 25 bp, Homo sapien
caggattgtggatacgatccaaaag

SEQ ID NO: 2413965 - DNA, 25 bp, Homo sapien
aaaagcttcacagaacgtgcactaa

SEQ ID NO: 2413966 - DNA, 25 bp, Homo sapien
cccaacgtgtacaaggaatccagga

SEQ ID NO: 2413967 - DNA, 25 bp, Homo sapien
tattgttaggcacagcacacacggg

SEQ ID NO: 2413968 - DNA, 25 bp, Homo sapien
taggtatagcccagcagaaaggtag

SEQ ID NO: 2413969 - DNA, 25 bp, Homo sapien
tgtgcacctcagtaacccatgaagg

SEQ ID NO: 2413970 - DNA, 25 bp, Homo sapien
tgatcacaaagcacggcaacttgga

SEQ ID NO: 2413971 - DNA, 25 bp, Homo sapien
gctttgacataagccaagggcaggc

SEQ ID NO: 2413972 - DNA, 25 bp, Homo sapien
tccctgtggtacctagataaagtta

SEQ ID NO: 2413973 - DNA, 25 bp, Homo sapien
ttaagatcagcacaagcacatcccg

SEQ ID NO: 2413974 - DNA, 25 bp, Homo sapien
aaaagaatagcttctgccgggcaca

SEQ ID NO: 2413975 - DNA, 25 bp, Homo sapien
ccttctacagaacctatgaggcgat

SEQ ID NO: 2413976 - DNA, 25 bp, Homo sapien
tctacagaacctatgaggcgatcct

SEQ ID NO: 2413977 - DNA, 25 bp, Homo sapien
tacagaacctatgaggcgatcctcc

SEQ ID NO: 2413978 - DNA, 25 bp, Homo sapien
ccgccttctacagaacctatgaggc

SEQ ID NO: 2413979 - DNA, 25 bp, Homo sapien
tctgttccaacgctgattgagtctg

SEQ ID NO: 2413980 - DNA, 25 bp, Homo sapien
ctgttccaacgctgattgagtctgt

SEQ ID NO: 2413981 - DNA, 25 bp, Homo sapien
tgttccaacgctgattgagtctgtt

SEQ ID NO: 2413982 - DNA, 25 bp, Homo sapien
gttccaacgctgattgagtctgttg

SEQ ID NO: 2413983 - DNA, 25 bp, Homo sapien
tgacacaggtccaatgtgaatggag

SEQ ID NO: 2413984 - DNA, 25 bp, Homo sapien
gaaatacccagatctatgtccttat

SEQ ID NO: 2413985 - DNA, 25 bp, Homo sapien
gcagaatattcatgattagccatca

SEQ ID NO: 2413986 - DNA, 25 bp, Homo sapien
ggtttagcaacatgatgacacaggt

SEQ ID NO: 2413987 - DNA, 25 bp, Homo sapien
gacacaggtaaatcctaggtccctg

SEQ ID NO: 2413988 - DNA, 25 bp, Homo sapien
agaactgggctgacaaggctagaat

SEQ ID NO: 2413989 - DNA, 25 bp, Homo sapien
gacaggactttttaagatgaaggga

SEQ ID NO: 2413990 - DNA, 25 bp, Homo sapien
cacttttcctcagaactgggctgac

SEQ ID NO: 2413991 - DNA, 25 bp, Homo sapien
gacaaattacactaagcaaatgaga

SEQ ID NO: 2413992 - DNA, 25 bp, Homo sapien
tcaaatttttagagccagacttgct

SEQ ID NO: 2413993 - DNA, 25 bp, Homo sapien
tgagaagtcactagcaagaccatct

SEQ ID NO: 2413994 - DNA, 25 bp, Homo sapien
gaccatctatcccacgtaatgaaaa

SEQ ID NO: 2413995 - DNA, 25 bp, Homo sapien
cagaaatacagataatgtagcttta

SEQ ID NO: 2413996 - DNA, 25 bp, Homo sapien
aagaagaggactgtcgactgtagga

SEQ ID NO: 2413997 - DNA, 25 bp, Homo sapien
ttgagggtcctgatgagtgagtatt

SEQ ID NO: 2413998 - DNA, 25 bp, Homo sapien
tattgggattgggatcttcattgaa

SEQ ID NO: 2413999 - DNA, 25 bp, Homo sapien
gactgtcgactgtaggacttggaag

SEQ ID NO: 2414000 - DNA, 25 bp, Homo sapien
tctgcagccactctgcccgtggcct

SEQ ID NO: 2414001 - DNA, 25 bp, Homo sapien
ctctggagtctgagcagtctcgtac

SEQ ID NO: 2414002 - DNA, 25 bp, Homo sapien
tgcagccactctgcccgtggcctgc

SEQ ID NO: 2414003 - DNA, 25 bp, Homo sapien
agctctggagtctgagcagtctcgt

SEQ ID NO: 2414004 - DNA, 25 bp, Homo sapien
taagtcgtgagccagtagcagtgtg

SEQ ID NO: 2414005 - DNA, 25 bp, Homo sapien
tgttgtgagtcgagcggcatccatg

SEQ ID NO: 2414006 - DNA, 25 bp, Homo sapien
gcttggaggatgaaccagcggagac

SEQ ID NO: 2414007 - DNA, 25 bp, Homo sapien
cacagagaagttctgagtaagtcgt

SEQ ID NO: 2414008 - DNA, 25 bp, Homo sapien
tcgccctccagatcgaaacactgta

SEQ ID NO: 2414009 - DNA, 25 bp, Homo sapien
gggaattacatgcaggaaggaatgc

SEQ ID NO: 2414010 - DNA, 25 bp, Homo sapien
aatttatccagagtacacgccgttc

SEQ ID NO: 2414011 - DNA, 25 bp, Homo sapien
aaacactgtaagtaccccacaactg

SEQ ID NO: 2414012 - DNA, 25 bp, Homo sapien
catgaattatcacagctctatagca

SEQ ID NO: 2414013 - DNA, 25 bp, Homo sapien
catttgatgcccttggtgtgcgaat

SEQ ID NO: 2414014 - DNA, 25 bp, Homo sapien
ttaacgaaatgagtctctgtctggc

SEQ ID NO: 2414015 - DNA, 25 bp, Homo sapien
gggtcttcattgaccacaagttctt

SEQ ID NO: 2414016 - DNA, 25 bp, Homo sapien
tgatgactgcctaaatcgatttaaa

SEQ ID NO: 2414017 - DNA, 25 bp, Homo sapien
gaagaggtctactttgacaactaca

SEQ ID NO: 2414018 - DNA, 25 bp, Homo sapien
tcgatttaaatcattgaagaggtct

SEQ ID NO: 2414019 - DNA, 25 bp, Homo sapien
aaagaatttgactccacatgatgac

SEQ ID NO: 2414020 - DNA, 25 bp, Homo sapien
gcactgtaagtatcatggtcaagaa

SEQ ID NO: 2414021 - DNA, 25 bp, Homo sapien
caatgtacactttaccaatggcatc

SEQ ID NO: 2414022 - DNA, 25 bp, Homo sapien
ttgcagcttcactatacagtaaagg

SEQ ID NO: 2414023 - DNA, 25 bp, Homo sapien
aattggaaaccatcctgagatgact

SEQ ID NO: 2414024 - DNA, 25 bp, Homo sapien
gaagttattggttagtgagtacaca

SEQ ID NO: 2414025 - DNA, 25 bp, Homo sapien
ttagactcaatattcctaggtaagc

SEQ ID NO: 2414026 - DNA, 25 bp, Homo sapien
gaaatagcggtgatggtagcaaaac

SEQ ID NO: 2414027 - DNA, 25 bp, Homo sapien
gattagaggtcaccagagtctaggg

SEQ ID NO: 2414028 - DNA, 25 bp, Homo sapien
aaggtacacatctgttttaaaggtg

SEQ ID NO: 2414029 - DNA, 25 bp, Homo sapien
cactgagggttgagtgacttaaggt

SEQ ID NO: 2414030 - DNA, 25 bp, Homo sapien
atttaaaccactccgagttccactg

SEQ ID NO: 2414031 - DNA, 25 bp, Homo sapien
accactccgagttccactgagggtt

SEQ ID NO: 2414032 - DNA, 25 bp, Homo sapien
tagcacggtccatcactggcaaatg

SEQ ID NO: 2414033 - DNA, 25 bp, Homo sapien
gcccggccacgattttcaccttcag

SEQ ID NO: 2414034 - DNA, 25 bp, Homo sapien
gcatcagtcaggtcactagcacggt

SEQ ID NO: 2414035 - DNA, 25 bp, Homo sapien
atcactggcaaatggcgcccggcca

SEQ ID NO: 2414036 - DNA, 25 bp, Homo sapien
ctcggtttcggcctcttcttgggct

SEQ ID NO: 2414037 - DNA, 25 bp, Homo sapien
tcggtttcggcctcttcttgggctc

SEQ ID NO: 2414038 - DNA, 25 bp, Homo sapien
tctcggtttcggcctcttcttgggc

SEQ ID NO: 2414039 - DNA, 25 bp, Homo sapien
cgggtgctgagacctcattccggag

SEQ ID NO: 2414040 - DNA, 25 bp, Homo sapien
tgtcccgcgcgggtgctgagacctc

SEQ ID NO: 2414041 - DNA, 25 bp, Homo sapien
aggaggaagggtgctgtcccgcgcg

SEQ ID NO: 2414042 - DNA, 25 bp, Homo sapien
ctgagacctcattccggagaggcgg

SEQ ID NO: 2414043 - DNA, 25 bp, Homo sapien
acccagtcagcatcccgttgagcct

SEQ ID NO: 2414044 - DNA, 25 bp, Homo sapien
cccgctctcaaaaatggcggctctc

SEQ ID NO: 2414045 - DNA, 25 bp, Homo sapien
tctcctcccccgctctcaaaaatgg

SEQ ID NO: 2414046 - DNA, 25 bp, Homo sapien
cagtcagcatcccgttgagcctctg

SEQ ID NO: 2414047 - DNA, 25 bp, Homo sapien
ggctgtggataggtgcggcgctgct

SEQ ID NO: 2414048 - DNA, 25 bp, Homo sapien
tcctgcatcatccaccgagtggggg

SEQ ID NO: 2414049 - DNA, 25 bp, Homo sapien
cgaagcgcgagtgctgctctgtgac

SEQ ID NO: 2414050 - DNA, 25 bp, Homo sapien
acgctccatcttgcgggccgaagcg

SEQ ID NO: 2414051 - DNA, 25 bp, Homo sapien
gtatacccagtatcaacaaaatcag

SEQ ID NO: 2414052 - DNA, 25 bp, Homo sapien
gcattgacagtatacccagtatcaa

SEQ ID NO: 2414053 - DNA, 25 bp, Homo sapien
gacagtatacccagtatcaacaaaa

SEQ ID NO: 2414054 - DNA, 25 bp, Homo sapien
aaatcagcattgacagtatacccag

SEQ ID NO: 2414055 - DNA, 25 bp, Homo sapien
tttctcattatcgtcaaggtaactg

SEQ ID NO: 2414056 - DNA, 25 bp, Homo sapien
ttatcgtcaaggtaactgcttcccc

SEQ ID NO: 2414057 - DNA, 25 bp, Homo sapien
aggtttctcattatcgtcaaggtaa

SEQ ID NO: 2414058 - DNA, 25 bp, Homo sapien
ctcattatcgtcaaggtaactgctt

SEQ ID NO: 2414059 - DNA, 25 bp, Homo sapien
gttggacagactaaggaaacctatg

SEQ ID NO: 2414060 - DNA, 25 bp, Homo sapien
ccctgggtatgaagatagttggaca

SEQ ID NO: 2414061 - DNA, 25 bp, Homo sapien
ccaagtcagagatgatgagagccta

SEQ ID NO: 2414062 - DNA, 25 bp, Homo sapien
tttgtgcacaccttaaggaggcacc

SEQ ID NO: 2414063 - DNA, 25 bp, Homo sapien
taaagtgacccgtcttttcagccat

SEQ ID NO: 2414064 - DNA, 25 bp, Homo sapien
tcagataacactaaagtgacccgtc

SEQ ID NO: 2414065 - DNA, 25 bp, Homo sapien
tgtgccgatatcctcactttccatg

SEQ ID NO: 2414066 - DNA, 25 bp, Homo sapien
gctgtatccgaaacaaccatcattt

SEQ ID NO: 2414067 - DNA, 25 bp, Homo sapien
tagcattgaatggtggcacagctgc

SEQ ID NO: 2414068 - DNA, 25 bp, Homo sapien
ttagcattgaatggtggcacagctg

SEQ ID NO: 2414069 - DNA, 25 bp, Homo sapien
agcagctggtaggatgctgcctctg

SEQ ID NO: 2414070 - DNA, 25 bp, Homo sapien
ccattctggccacagctctggcatt

SEQ ID NO: 2414071 - DNA, 25 bp, Homo sapien
ctctgccctggctggttcatcccct

SEQ ID NO: 2414072 - DNA, 25 bp, Homo sapien
ctggcattggccccagtgggcgtaa

SEQ ID NO: 2414073 - DNA, 25 bp, Homo sapien
ctttatctggatgttcatttgtacc

SEQ ID NO: 2414074 - DNA, 25 bp, Homo sapien
agaagttcaggacctctttatctgg

SEQ ID NO: 2414075 - DNA, 25 bp, Homo sapien
ttggcagaagttcaggacctcttta

SEQ ID NO: 2414076 - DNA, 25 bp, Homo sapien
agtattggcagaagttcaggacctc

SEQ ID NO: 2414077 - DNA, 25 bp, Homo sapien
gtttgtatccttgggaaccgcatgg

SEQ ID NO: 2414078 - DNA, 25 bp, Homo sapien
ggtcgaccaataacagctctaagat

SEQ ID NO: 2414079 - DNA, 25 bp, Homo sapien
aaccgcatggttgctaggtcgacca

SEQ ID NO: 2414080 - DNA, 25 bp, Homo sapien
tctaagattcgcatgctgttgtcca

SEQ ID NO: 2414081 - DNA, 25 bp, Homo sapien
taattggtacagtaggctttattct

SEQ ID NO: 2414082 - DNA, 25 bp, Homo sapien
aatggtctaacactatcataaaagt

SEQ ID NO: 2414083 - DNA, 25 bp, Homo sapien
actaatggtctaacactatcataaa

SEQ ID NO: 2414084 - DNA, 25 bp, Homo sapien
actaattggtacagtaggctttatt

SEQ ID NO: 2414085 - DNA, 25 bp, Homo sapien
tgtactttaaactcttgtggatggt

SEQ ID NO: 2414086 - DNA, 25 bp, Homo sapien
ttcttgacaatctgtcgtctagtgg

SEQ ID NO: 2414087 - DNA, 25 bp, Homo sapien
actcttgtggatggttattactgga

SEQ ID NO: 2414088 - DNA, 25 bp, Homo sapien
tctgtcgtctagtggttactggcat

SEQ ID NO: 2414089 - DNA, 25 bp, Homo sapien
caattaatagggctacattctgcct

SEQ ID NO: 2414090 - DNA, 25 bp, Homo sapien
ttccagatcgtgttactcatagcag

SEQ ID NO: 2414091 - DNA, 25 bp, Homo sapien
gcagacattatctcttagcctccag

SEQ ID NO: 2414092 - DNA, 25 bp, Homo sapien
tagcaatcgtcagagtcttcacaac

SEQ ID NO: 2414093 - DNA, 25 bp, Homo sapien
gccttggcttcaatactacactgtc

SEQ ID NO: 2414094 - DNA, 25 bp, Homo sapien
actcgccttggcttcaatactacac

SEQ ID NO: 2414095 - DNA, 25 bp, Homo sapien
tcttgattattggaacatatactat

SEQ ID NO: 2414096 - DNA, 25 bp, Homo sapien
tgtcttgattattggaacatatact

SEQ ID NO: 2414097 - DNA, 25 bp, Homo sapien
gaagtgttgcagttgtcttacccaa

SEQ ID NO: 2414098 - DNA, 25 bp, Homo sapien
tgtaaggcactgagacgcaagattt

SEQ ID NO: 2414099 - DNA, 25 bp, Homo sapien
gtattcaccgtgtgctaagtgctgc

SEQ ID NO: 2414100 - DNA, 25 bp, Homo sapien
gacatcgagtcgttctagcgctgag

SEQ ID NO: 2414101 - DNA, 25 bp, Homo sapien
gtatgaggtccccagtacacagcag

SEQ ID NO: 2414102 - DNA, 25 bp, Homo sapien
tcaggccaagttcggagagtgatcc

SEQ ID NO: 2414103 - DNA, 25 bp, Homo sapien
tgcgatcccgcgtactgctaatggg

SEQ ID NO: 2414104 - DNA, 25 bp, Homo sapien
caagatcaaggcgaccgagtaacac

SEQ ID NO: 2414105 - DNA, 25 bp, Homo sapien
taactcaagtccagatgcccaatga

SEQ ID NO: 2414106 - DNA, 25 bp, Homo sapien
tgtgctaatcgcaggccaacaagcc

SEQ ID NO: 2414107 - DNA, 25 bp, Homo sapien
tgcccaatgaccattcggataaggt

SEQ ID NO: 2414108 - DNA, 25 bp, Homo sapien
gctttccagactagcagttcccagg

SEQ ID NO: 2414109 - DNA, 25 bp, Homo sapien
tgggccatggccaattacatccacg

SEQ ID NO: 2414110 - DNA, 25 bp, Homo sapien
ggaaggatccaccagtctgtcggcg

SEQ ID NO: 2414111 - DNA, 25 bp, Homo sapien
tcaccgttcaggatcaggaggagca

SEQ ID NO: 2414112 - DNA, 25 bp, Homo sapien
cgccgtcgtcgtggtggtagtctcc

SEQ ID NO: 2414113 - DNA, 25 bp, Homo sapien
cagcatgtgtgaattgatagtggca

SEQ ID NO: 2414114 - DNA, 25 bp, Homo sapien
gacattaatgttggtagctatacga

SEQ ID NO: 2414115 - DNA, 25 bp, Homo sapien
tgaataaaggtaacagctaagccct

SEQ ID NO: 2414116 - DNA, 25 bp, Homo sapien
taggtggaaggcaacactagtatgc

SEQ ID NO: 2414117 - DNA, 25 bp, Homo sapien
tatgagcaccctgcaatttgtaggc

SEQ ID NO: 2414118 - DNA, 25 bp, Homo sapien
gatatgacatgacgattcagttcac

SEQ ID NO: 2414119 - DNA, 25 bp, Homo sapien
tacacaaggcacacatactatgagc

SEQ ID NO: 2414120 - DNA, 25 bp, Homo sapien
caagcatctaactagtagatatagg

SEQ ID NO: 2414121 - DNA, 25 bp, Homo sapien
catgtaacagttaatatgagctcta

SEQ ID NO: 2414122 - DNA, 25 bp, Homo sapien
tattaaaactgttaggttagctcag

SEQ ID NO: 2414123 - DNA, 25 bp, Homo sapien
tttaaggagctaaagctatcaacag

SEQ ID NO: 2414124 - DNA, 25 bp, Homo sapien
aattgtatttactctacaagcaggg

SEQ ID NO: 2414125 - DNA, 25 bp, Homo sapien
tgagtattttatcatgatggttgtc

SEQ ID NO: 2414126 - DNA, 25 bp, Homo sapien
taatttggatcacagtttactactt

SEQ ID NO: 2414127 - DNA, 25 bp, Homo sapien
tatcatgatggttgtcttcactctc

SEQ ID NO: 2414128 - DNA, 25 bp, Homo sapien
gaattcaagtatacaaggcaggagg

SEQ ID NO: 2414129 - DNA, 25 bp, Homo sapien
gatagactgtgcatagctactagct

SEQ ID NO: 2414130 - DNA, 25 bp, Homo sapien
gactatgcagtggatcttgggaaca

SEQ ID NO: 2414131 - DNA, 25 bp, Homo sapien
cactgagccattgctgatagactgt

SEQ ID NO: 2414132 - DNA, 25 bp, Homo sapien
tttgggatcatggtgcaggctagta

SEQ ID NO: 2414133 - DNA, 25 bp, Homo sapien
gaaattttagatatcccaatgtgaa

SEQ ID NO: 2414134 - DNA, 25 bp, Homo sapien
taagtctttagttcaacttaagcat

SEQ ID NO: 2414135 - DNA, 25 bp, Homo sapien
caacttaagcatatctcaaatgact

SEQ ID NO: 2414136 - DNA, 25 bp, Homo sapien
taagtaatcttgtaatgacaattat

SEQ ID NO: 2414137 - DNA, 25 bp, Homo sapien
cttaattataggtagtgacacactg

SEQ ID NO: 2414138 - DNA, 25 bp, Homo sapien
tgaaacccagtggtatccctgtaaa

SEQ ID NO: 2414139 - DNA, 25 bp, Homo sapien
tgtaaattagctcctgtgactggaa

SEQ ID NO: 2414140 - DNA, 25 bp, Homo sapien
tgtacagcttggtcaaatttccatg

SEQ ID NO: 2414141 - DNA, 25 bp, Homo sapien
tctccagactttggaccgcattcat

SEQ ID NO: 2414142 - DNA, 25 bp, Homo sapien
aaatctccagactttggaccgcatt

SEQ ID NO: 2414143 - DNA, 25 bp, Homo sapien
atctccagactttggaccgcattca

SEQ ID NO: 2414144 - DNA, 25 bp, Homo sapien
tcttttacctcgtaaaatctccaga

SEQ ID NO: 2414145 - DNA, 25 bp, Homo sapien
ctatgaagtgatgccaatggttcct

SEQ ID NO: 2414146 - DNA, 25 bp, Homo sapien
gaagtgatgccaatggttccttcat

SEQ ID NO: 2414147 - DNA, 25 bp, Homo sapien
gatgccaatggttccttcattcctt

SEQ ID NO: 2414148 - DNA, 25 bp, Homo sapien
atgaagtgatgccaatggttccttc

SEQ ID NO: 2414149 - DNA, 25 bp, Homo sapien
tggaatccacttgccctttttggcc

SEQ ID NO: 2414150 - DNA, 25 bp, Homo sapien
gctggaatccacttgccctttttgg

SEQ ID NO: 2414151 - DNA, 25 bp, Homo sapien
gagctggaatccacttgcccttttt

SEQ ID NO: 2414152 - DNA, 25 bp, Homo sapien
cctttttggccttcctgcattctgc

SEQ ID NO: 2414153 - DNA, 25 bp, Homo sapien
cctggagctgtcactgacaatctga

SEQ ID NO: 2414154 - DNA, 25 bp, Homo sapien
tggagctgtcactgacaatctgagc

SEQ ID NO: 2414155 - DNA, 25 bp, Homo sapien
ccctggagctgtcactgacaatctg

SEQ ID NO: 2414156 - DNA, 25 bp, Homo sapien
gagctgtcactgacaatctgagcta

SEQ ID NO: 2414157 - DNA, 25 bp, Homo sapien
atctatttgacagcatcttgagctt

SEQ ID NO: 2414158 - DNA, 25 bp, Homo sapien
gaatagattcagtcactctgaccct

SEQ ID NO: 2414159 - DNA, 25 bp, Homo sapien
tctgggccagtagcctacttgaata

SEQ ID NO: 2414160 - DNA, 25 bp, Homo sapien
cttgagcttcattggtatgacggcc

SEQ ID NO: 2414161 - DNA, 25 bp, Homo sapien
tagagttttagctggcaccgtgctg

SEQ ID NO: 2414162 - DNA, 25 bp, Homo sapien
ttggagcaaagtgcaatggcttctg

SEQ ID NO: 2414163 - DNA, 25 bp, Homo sapien
tttatggcatctcccctagtctcga

SEQ ID NO: 2414164 - DNA, 25 bp, Homo sapien
tagtctcgagatcacttcctagcat

SEQ ID NO: 2414165 - DNA, 25 bp, Homo sapien
tggtactcgtgagctttggtgtctg

SEQ ID NO: 2414166 - DNA, 25 bp, Homo sapien
ctatcctggtactcgtgagctttgg

SEQ ID NO: 2414167 - DNA, 25 bp, Homo sapien
ttctgtttgaacaaagaggctttgt

SEQ ID NO: 2414168 - DNA, 25 bp, Homo sapien
gctttgtggcccattttccatctct

SEQ ID NO: 2414169 - DNA, 25 bp, Homo sapien
tctttgtttggatgagttaaaacaa

SEQ ID NO: 2414170 - DNA, 25 bp, Homo sapien
ctctctcctggacaacaccaggata

SEQ ID NO: 2414171 - DNA, 25 bp, Homo sapien
acttgctacctccttcaggtgactt

SEQ ID NO: 2414172 - DNA, 25 bp, Homo sapien
aggataaactgccagcctttgcctc

SEQ ID NO: 2414173 - DNA, 25 bp, Homo sapien
ggctagttctggtgtcggcaataga

SEQ ID NO: 2414174 - DNA, 25 bp, Homo sapien
tagttctggtgtcggcaatagacat

SEQ ID NO: 2414175 - DNA, 25 bp, Homo sapien
gggctagttctggtgtcggcaatag

SEQ ID NO: 2414176 - DNA, 25 bp, Homo sapien
gctagttctggtgtcggcaatagac

SEQ ID NO: 2414177 - DNA, 25 bp, Homo sapien
tagagacagtccagttattagcgtg

SEQ ID NO: 2414178 - DNA, 25 bp, Homo sapien
ccccaattctggtgagcaatttaaa

SEQ ID NO: 2414179 - DNA, 25 bp, Homo sapien
caactggtggtcagatccagtatct

SEQ ID NO: 2414180 - DNA, 25 bp, Homo sapien
tccagtatcttgaggaaagcctgag

SEQ ID NO: 2414181 - DNA, 25 bp, Homo sapien
tctttaatctaccttctactaatcg

SEQ ID NO: 2414182 - DNA, 25 bp, Homo sapien
taatctaccttctactaatcgtcca

SEQ ID NO: 2414183 - DNA, 25 bp, Homo sapien
ctactaatcgtccacttatagcagc

SEQ ID NO: 2414184 - DNA, 25 bp, Homo sapien
taccttctactaatcgtccacttat

SEQ ID NO: 2414185 - DNA, 25 bp, Homo sapien
taacatggaaatagcagtgagcaca

SEQ ID NO: 2414186 - DNA, 25 bp, Homo sapien
gacaagtccctagattagatgccgt

SEQ ID NO: 2414187 - DNA, 25 bp, Homo sapien
cagcgtatcctatcaacccgatggg

SEQ ID NO: 2414188 - DNA, 25 bp, Homo sapien
tgggctccagcagaacgattctatg

SEQ ID NO: 2414189 - DNA, 25 bp, Homo sapien
agaagaaaatcctgtccagtccaat

SEQ ID NO: 2414190 - DNA, 25 bp, Homo sapien
atagtacttaatgagtaactcttgt

SEQ ID NO: 2414191 - DNA, 25 bp, Homo sapien
gtacttaatgagtaactcttgtgcc

SEQ ID NO: 2414192 - DNA, 25 bp, Homo sapien
gaagaaaatcctgtccagtccaatc

SEQ ID NO: 2414193 - DNA, 25 bp, Homo sapien
tgcggggattcctgccgacatcggc

SEQ ID NO: 2414194 - DNA, 25 bp, Homo sapien
cactgtatgattgaatctgccaggc

SEQ ID NO: 2414195 - DNA, 25 bp, Homo sapien
gagttgcagggactgttccacccac

SEQ ID NO: 2414196 - DNA, 25 bp, Homo sapien
acttctctcagttccgcatgtggag

SEQ ID NO: 2414197 - DNA, 25 bp, Homo sapien
acgtcctcagaaaatgcagacaatt

SEQ ID NO: 2414198 - DNA, 25 bp, Homo sapien
cagaaagccacgtcctcagaaaatg

SEQ ID NO: 2414199 - DNA, 25 bp, Homo sapien
gtcctcagaaaatgcagacaatttc

SEQ ID NO: 2414200 - DNA, 25 bp, Homo sapien
cctcagaaaatgcagacaatttcat

SEQ ID NO: 2414201 - DNA, 25 bp, Homo sapien
ctaatgaggcttagagtctttccag

SEQ ID NO: 2414202 - DNA, 25 bp, Homo sapien
ttataattcctctcgttgttatcat

SEQ ID NO: 2414203 - DNA, 25 bp, Homo sapien
ttttataattcctctcgttgttatc

SEQ ID NO: 2414204 - DNA, 25 bp, Homo sapien
aatgaggcttagagtctttccagac

SEQ ID NO: 2414205 - DNA, 25 bp, Homo sapien
cagaagctggaacggttgagtttca

SEQ ID NO: 2414206 - DNA, 25 bp, Homo sapien
ttcagatatagattggagagcttcc

SEQ ID NO: 2414207 - DNA, 25 bp, Homo sapien
tactatgcagatggcgctgaacccc

SEQ ID NO: 2414208 - DNA, 25 bp, Homo sapien
caaactggcggcaacttgatttcct

SEQ ID NO: 2414209 - DNA, 25 bp, Homo sapien
tgccacgtcccatattctgtcagct

SEQ ID NO: 2414210 - DNA, 25 bp, Homo sapien
tgggagtaattttgccccgacctgc

SEQ ID NO: 2414211 - DNA, 25 bp, Homo sapien
agtttatcccgtaatcatagccaag

SEQ ID NO: 2414212 - DNA, 25 bp, Homo sapien
catagccaagaatcttattccaggc

SEQ ID NO: 2414213 - DNA, 25 bp, Homo sapien
tgctgttgaaagcatgtccagccat

SEQ ID NO: 2414214 - DNA, 25 bp, Homo sapien
ggaccacatttgttgacgtggctgg

SEQ ID NO: 2414215 - DNA, 25 bp, Homo sapien
catgtggaccacatttgttgacgtg

SEQ ID NO: 2414216 - DNA, 25 bp, Homo sapien
ctgttgaaagcatgtccagccatgt

SEQ ID NO: 2414217 - DNA, 25 bp, Homo sapien
gcgaattctctgagcgcagaggctt

SEQ ID NO: 2414218 - DNA, 25 bp, Homo sapien
cagcctgcgaattctctgagcgcag

SEQ ID NO: 2414219 - DNA, 25 bp, Homo sapien
tgcgaattctctgagcgcagaggct

SEQ ID NO: 2414220 - DNA, 25 bp, Homo sapien
cctgcgaattctctgagcgcagagg

SEQ ID NO: 2414221 - DNA, 25 bp, Homo sapien
gtaataatacgcaggaaacaaatgg

SEQ ID NO: 2414222 - DNA, 25 bp, Homo sapien
agatggttagttacttaaaatgaag

SEQ ID NO: 2414223 - DNA, 25 bp, Homo sapien
tcagcaccaatcattgcaaatatgc

SEQ ID NO: 2414224 - DNA, 25 bp, Homo sapien
taatcacttagcatattagaagagc

SEQ ID NO: 2414225 - DNA, 25 bp, Homo sapien
tctgtgaaggagttgctgacatctg

SEQ ID NO: 2414226 - DNA, 25 bp, Homo sapien
cctgtgtagcaagctccttgcactg

SEQ ID NO: 2414227 - DNA, 25 bp, Homo sapien
ttgtcactctattcagccaggcagg

SEQ ID NO: 2414228 - DNA, 25 bp, Homo sapien
ctaaggctgcaatctttctgcattt

SEQ ID NO: 2414229 - DNA, 25 bp, Homo sapien
tccataggacattgcccacaggtcc

SEQ ID NO: 2414230 - DNA, 25 bp, Homo sapien
ttgggagtgccaactgagctttcct

SEQ ID NO: 2414231 - DNA, 25 bp, Homo sapien
ccttggagccttgcagatttggtga

SEQ ID NO: 2414232 - DNA, 25 bp, Homo sapien
tagtgcccagagattttgagctgaa

SEQ ID NO: 2414233 - DNA, 25 bp, Homo sapien
ctgaaggcatttgctaaacacaagg

SEQ ID NO: 2414234 - DNA, 25 bp, Homo sapien
ggcatttgctaaacacaaggtgatg

SEQ ID NO: 2414235 - DNA, 25 bp, Homo sapien
ctaaacacaaggtgatgtagctgaa

SEQ ID NO: 2414236 - DNA, 25 bp, Homo sapien
caaggtgatgtagctgaaataccat

SEQ ID NO: 2414237 - DNA, 25 bp, Homo sapien
tccagttgttattgcatctctcaga

SEQ ID NO: 2414238 - DNA, 25 bp, Homo sapien
tctctcagataatgttgggtggaat

SEQ ID NO: 2414239 - DNA, 25 bp, Homo sapien
tattgcatctctcagataatgttgg

SEQ ID NO: 2414240 - DNA, 25 bp, Homo sapien
agataatgttgggtggaatttaagt

SEQ ID NO: 2414241 - DNA, 25 bp, Homo sapien
ttttctcgtccacatctctcccctg

SEQ ID NO: 2414242 - DNA, 25 bp, Homo sapien
gtattttgaaggcactccttcattt

SEQ ID NO: 2414243 - DNA, 25 bp, Homo sapien
aacaatggccctcagatctccacca

SEQ ID NO: 2414244 - DNA, 25 bp, Homo sapien
atgaacacgctctacaacaatggcc

SEQ ID NO: 2414245 - DNA, 25 bp, Homo sapien
ggccctcagatctccaccatctgca

SEQ ID NO: 2414246 - DNA, 25 bp, Homo sapien
tgcaggggaccgcatgcaggtcata

SEQ ID NO: 2414247 - DNA, 25 bp, Homo sapien
cctgaagtcgggacttgaagctgga

SEQ ID NO: 2414248 - DNA, 25 bp, Homo sapien
tgtagccacccaaaccttcaaatct

SEQ ID NO: 2414249 - DNA, 25 bp, Homo sapien
ggcagatttctttgcgggcctcaaa

SEQ ID NO: 2414250 - DNA, 25 bp, Homo sapien
tcttggcagagcctaattgcctgct

SEQ ID NO: 2414251 - DNA, 25 bp, Homo sapien
atgtacatgcccagggagcaacttc

SEQ ID NO: 2414252 - DNA, 25 bp, Homo sapien
actgttgacactgttgctgccacaa

SEQ ID NO: 2414253 - DNA, 25 bp, Homo sapien
cccttttttgctatgtaggccaatg

SEQ ID NO: 2414254 - DNA, 25 bp, Homo sapien
tatgtaggccaatgtacatgcccag

SEQ ID NO: 2414255 - DNA, 25 bp, Homo sapien
gaaacaagtcttgttgctgtaaccc

SEQ ID NO: 2414256 - DNA, 25 bp, Homo sapien
cagaggcaatgaattcgtgcagaaa

SEQ ID NO: 2414257 - DNA, 25 bp, Homo sapien
caatgaattcgtgcagaaacaagtc

SEQ ID NO: 2414258 - DNA, 25 bp, Homo sapien
tgaattcgtgcagaaacaagtcttg

SEQ ID NO: 2414259 - DNA, 25 bp, Homo sapien
caggctgcaacaaagtctgacttgg

SEQ ID NO: 2414260 - DNA, 25 bp, Homo sapien
ttagtgtaggaaagtcctgggctcc

SEQ ID NO: 2414261 - DNA, 25 bp, Homo sapien
catcacacactggagtggaaaatat

SEQ ID NO: 2414262 - DNA, 25 bp, Homo sapien
actggctgggagacaattagtgtag

SEQ ID NO: 2414263 - DNA, 25 bp, Homo sapien
cctctgtataggcaaacctgtcatt

SEQ ID NO: 2414264 - DNA, 25 bp, Homo sapien
tgtataggcaaacctgtcattgaag

SEQ ID NO: 2414265 - DNA, 25 bp, Homo sapien
ataggcaaacctgtcattgaagtcc

SEQ ID NO: 2414266 - DNA, 25 bp, Homo sapien
ggtcctctgtataggcaaacctgtc

SEQ ID NO: 2414267 - DNA, 25 bp, Homo sapien
tagggctgcaggatttcatccagaa

SEQ ID NO: 2414268 - DNA, 25 bp, Homo sapien
gctgcaggatttcatccagaaaagc

SEQ ID NO: 2414269 - DNA, 25 bp, Homo sapien
ttagggctgcaggatttcatccaga

SEQ ID NO: 2414270 - DNA, 25 bp, Homo sapien
gggctgcaggatttcatccagaaaa

SEQ ID NO: 2414271 - DNA, 25 bp, Homo sapien
actggaacctgacccgcagcttgga

SEQ ID NO: 2414272 - DNA, 25 bp, Homo sapien
gaacctgacccgcagcttggatcca

SEQ ID NO: 2414273 - DNA, 25 bp, Homo sapien
cctgacccgcagcttggatccaagt

SEQ ID NO: 2414274 - DNA, 25 bp, Homo sapien
gacccgcagcttggatccaagttca

SEQ ID NO: 2414275 - DNA, 25 bp, Homo sapien
cccagcagagccccagccaataagc

SEQ ID NO: 2414276 - DNA, 25 bp, Homo sapien
gcagagccccagccaataagcaaac

SEQ ID NO: 2414277 - DNA, 25 bp, Homo sapien
tcctgttgagcccagcagagcccca

SEQ ID NO: 2414278 - DNA, 25 bp, Homo sapien
cagcagagccccagccaataagcaa

SEQ ID NO: 2414279 - DNA, 25 bp, Homo sapien
tggcagtatcattgccaattctagc

SEQ ID NO: 2414280 - DNA, 25 bp, Homo sapien
agtatcattgccaattctagcattt

SEQ ID NO: 2414281 - DNA, 25 bp, Homo sapien
ggcagtatcattgccaattctagca

SEQ ID NO: 2414282 - DNA, 25 bp, Homo sapien
cagtatcattgccaattctagcatt

SEQ ID NO: 2414283 - DNA, 25 bp, Homo sapien
gccagcaggtcagctgcgttgccac

SEQ ID NO: 2414284 - DNA, 25 bp, Homo sapien
cagctgcgttgccactaagggaaga

SEQ ID NO: 2414285 - DNA, 25 bp, Homo sapien
taagggaagatttgtcatccgggag

SEQ ID NO: 2414286 - DNA, 25 bp, Homo sapien
tagtctgcggatctactagtttact

SEQ ID NO: 2414287 - DNA, 25 bp, Homo sapien
tgtccccactcagttttctgatttc

SEQ ID NO: 2414288 - DNA, 25 bp, Homo sapien
ttccttgtcctgctgtttgattctg

SEQ ID NO: 2414289 - DNA, 25 bp, Homo sapien
ctgatttccttgtcctgctgtttga

SEQ ID NO: 2414290 - DNA, 25 bp, Homo sapien
gtcctcctccttttagtgcttctct

SEQ ID NO: 2414291 - DNA, 25 bp, Homo sapien
ccacgtgtagtctttgctctaacca

SEQ ID NO: 2414292 - DNA, 25 bp, Homo sapien
gttacacagctaatagcaggaggac

SEQ ID NO: 2414293 - DNA, 25 bp, Homo sapien
taacaacctgtcacaagcacctaac

SEQ ID NO: 2414294 - DNA, 25 bp, Homo sapien
gagcaaccattttcctcacgtaagt

SEQ ID NO: 2414295 - DNA, 25 bp, Homo sapien
tcccagattctatggtgatgaatag

SEQ ID NO: 2414296 - DNA, 25 bp, Homo sapien
ggaattgtaacttttcactatggtc

SEQ ID NO: 2414297 - DNA, 25 bp, Homo sapien
aaccatgccataaactggaattgta

SEQ ID NO: 2414298 - DNA, 25 bp, Homo sapien
cactatggtcatcgtttggatcatc

SEQ ID NO: 2414299 - DNA, 25 bp, Homo sapien
taatgagcttttcattcaagcctga

SEQ ID NO: 2414300 - DNA, 25 bp, Homo sapien
caagcctgatatattgaccctattt

SEQ ID NO: 2414301 - DNA, 25 bp, Homo sapien
taaatctgctaaaaacttaatgagc

SEQ ID NO: 2414302 - DNA, 25 bp, Homo sapien
tctcaaggtaaccttggtgatattg

SEQ ID NO: 2414303 - DNA, 25 bp, Homo sapien
taatgacctgccgacatcatacagt

SEQ ID NO: 2414304 - DNA, 25 bp, Homo sapien
gacctgccgacatcatacagttcat

SEQ ID NO: 2414305 - DNA, 25 bp, Homo sapien
gacatcatacagttcatgaaatgct

SEQ ID NO: 2414306 - DNA, 25 bp, Homo sapien
tttattaatgacctgccgacatcat

SEQ ID NO: 2414307 - DNA, 25 bp, Homo sapien
aagtcagcactgtccatagggtaag

SEQ ID NO: 2414308 - DNA, 25 bp, Homo sapien
cagccaagttgggtatagatcacat

SEQ ID NO: 2414309 - DNA, 25 bp, Homo sapien
aactgactagtagggatgttgccca

SEQ ID NO: 2414310 - DNA, 25 bp, Homo sapien
tatgtttaggagacgctttggtgcc

SEQ ID NO: 2414311 - DNA, 25 bp, Homo sapien
gctgctgatcgagaatgagctacag

SEQ ID NO: 2414312 - DNA, 25 bp, Homo sapien
gatcagagctagaagaatctgcaga

SEQ ID NO: 2414313 - DNA, 25 bp, Homo sapien
taggatctgatcagagctagaagaa

SEQ ID NO: 2414314 - DNA, 25 bp, Homo sapien
gaatgagctacagcaaccatgtgtt

SEQ ID NO: 2414315 - DNA, 25 bp, Homo sapien
tgttcgtgcccagaatgatgtcaca

SEQ ID NO: 2414316 - DNA, 25 bp, Homo sapien
tgcggaaggtcccatctgagcaacg

SEQ ID NO: 2414317 - DNA, 25 bp, Homo sapien
agttttctccttaccaagagcacag

SEQ ID NO: 2414318 - DNA, 25 bp, Homo sapien
tccagccgccgcagttcagttttct

SEQ ID NO: 2414319 - DNA, 25 bp, Homo sapien
gaagaggtgactggctttatcccta

SEQ ID NO: 2414320 - DNA, 25 bp, Homo sapien
tgcagcaccataacacgtgggactg

SEQ ID NO: 2414321 - DNA, 25 bp, Homo sapien
gcctgaagaaaaaagcgccaccagt

SEQ ID NO: 2414322 - DNA, 25 bp, Homo sapien
caaaagtagccttaacagttcaggg

SEQ ID NO: 2414323 - DNA, 25 bp, Homo sapien
tgcaggtgggattgccaggtgccag

SEQ ID NO: 2414324 - DNA, 25 bp, Homo sapien
gggttgccgtagtgcaggtgggatt

SEQ ID NO: 2414325 - DNA, 25 bp, Homo sapien
cagcctgcacggaggggaccgtcat

SEQ ID NO: 2414326 - DNA, 25 bp, Homo sapien
gccgtagtgcaggtgggattgccag

SEQ ID NO: 2414327 - DNA, 25 bp, Homo sapien
caatgtcaggtaataattgactcat

SEQ ID NO: 2414328 - DNA, 25 bp, Homo sapien
tgtccttttagcaggacttcaatgt

SEQ ID NO: 2414329 - DNA, 25 bp, Homo sapien
actgtccttttagcaggacttcaat

SEQ ID NO: 2414330 - DNA, 25 bp, Homo sapien
ttcaatgtcaggtaataattgactc

SEQ ID NO: 2414331 - DNA, 25 bp, Homo sapien
gaagtcgctttcctcacattgtaag

SEQ ID NO: 2414332 - DNA, 25 bp, Homo sapien
gggctctctgttgttgacccagaca

SEQ ID NO: 2414333 - DNA, 25 bp, Homo sapien
gactgttctgtatttgctatagccg

SEQ ID NO: 2414334 - DNA, 25 bp, Homo sapien
cattgtaagcgtctccatcgggctc

SEQ ID NO: 2414335 - DNA, 25 bp, Homo sapien
ggtcattgcaagtgaaacccggagg

SEQ ID NO: 2414336 - DNA, 25 bp, Homo sapien
tcattgcaagtgaaacccggaggat

SEQ ID NO: 2414337 - DNA, 25 bp, Homo sapien
aaggtcattgcaagtgaaacccgga

SEQ ID NO: 2414338 - DNA, 25 bp, Homo sapien
ttgcaagtgaaacccggaggatggt

SEQ ID NO: 2414339 - DNA, 25 bp, Homo sapien
tctctgccaagttttctgtcctttt

SEQ ID NO: 2414340 - DNA, 25 bp, Homo sapien
ttctctgccaagttttctgtccttt

SEQ ID NO: 2414341 - DNA, 25 bp, Homo sapien
tactccttaatgctcccacagttcc

SEQ ID NO: 2414342 - DNA, 25 bp, Homo sapien
attgctgactggcaattcctaagcc

SEQ ID NO: 2414343 - DNA, 25 bp, Homo sapien
ctggcaattcctaagccctgctggc

SEQ ID NO: 2414344 - DNA, 25 bp, Homo sapien
gctgactggcaattcctaagccctg

SEQ ID NO: 2414345 - DNA, 25 bp, Homo sapien
tcagcatgtagtaattgtccctcac

SEQ ID NO: 2414346 - DNA, 25 bp, Homo sapien
tttctcagcatgtagtaattgtccc

SEQ ID NO: 2414347 - DNA, 25 bp, Homo sapien
ctcagcatgtagtaattgtccctca

SEQ ID NO: 2414348 - DNA, 25 bp, Homo sapien
tctcagcatgtagtaattgtccctc

SEQ ID NO: 2414349 - DNA, 25 bp, Homo sapien
taggacatcaggaatatctgctagc

SEQ ID NO: 2414350 - DNA, 25 bp, Homo sapien
caagtatagctgatgtgataaaccc

SEQ ID NO: 2414351 - DNA, 25 bp, Homo sapien
gactgtgcttgccaacgtggtaaac

SEQ ID NO: 2414352 - DNA, 25 bp, Homo sapien
tgataaacccaaagcatatctggag

SEQ ID NO: 2414353 - DNA, 25 bp, Homo sapien
caaaggagtcaagcaaaagtggttt

SEQ ID NO: 2414354 - DNA, 25 bp, Homo sapien
ctgcaaaggagtcaagcaaaagtgg

SEQ ID NO: 2414355 - DNA, 25 bp, Homo sapien
tgcaaaggagtcaagcaaaagtggt

SEQ ID NO: 2414356 - DNA, 25 bp, Homo sapien
gcaaaggagtcaagcaaaagtggtt

SEQ ID NO: 2414357 - DNA, 25 bp, Homo sapien
ggccataatccaatcttcgaatgtt

SEQ ID NO: 2414358 - DNA, 25 bp, Homo sapien
tcaagtacgacaggccataatccaa

SEQ ID NO: 2414359 - DNA, 25 bp, Homo sapien
aaaataatcaagtacgacaggccat

SEQ ID NO: 2414360 - DNA, 25 bp, Homo sapien
gacaggccataatccaatcttcgaa

SEQ ID NO: 2414361 - DNA, 25 bp, Homo sapien
ctgcctgcaaactcccaactctgtg

SEQ ID NO: 2414362 - DNA, 25 bp, Homo sapien
tgcctgcaaactcccaactctgtga

SEQ ID NO: 2414363 - DNA, 25 bp, Homo sapien
ctgcaaactcccaactctgtgatcc

SEQ ID NO: 2414364 - DNA, 25 bp, Homo sapien
caaactcccaactctgtgatcccag

SEQ ID NO: 2414365 - DNA, 25 bp, Homo sapien
tgaaaatgtgttgtgtggcttggct

SEQ ID NO: 2414366 - DNA, 25 bp, Homo sapien
gccctgctgattctgtatctcctgg

SEQ ID NO: 2414367 - DNA, 25 bp, Homo sapien
caaaggccctgctgattctgtatct

SEQ ID NO: 2414368 - DNA, 25 bp, Homo sapien
ttggctgatgccaaaggccctgctg

SEQ ID NO: 2414369 - DNA, 25 bp, Homo sapien
tctgtgctgaggtccaaaatgtgag

SEQ ID NO: 2414370 - DNA, 25 bp, Homo sapien
tatgcaatgtaaatgtcccttggac

SEQ ID NO: 2414371 - DNA, 25 bp, Homo sapien
ggaaggtcaccttaacagcttatat

SEQ ID NO: 2414372 - DNA, 25 bp, Homo sapien
gcttatatcactaggtgtccctgat

SEQ ID NO: 2414373 - DNA, 25 bp, Homo sapien
cttgttccacaatgatgtcaccagc

SEQ ID NO: 2414374 - DNA, 25 bp, Homo sapien
ttccacaatgatgtcaccagcaaac

SEQ ID NO: 2414375 - DNA, 25 bp, Homo sapien
tctctgtaatatcttgtagctttgt

SEQ ID NO: 2414376 - DNA, 25 bp, Homo sapien
tatcttgtagctttgttattaccaa

SEQ ID NO: 2414377 - DNA, 25 bp, Homo sapien
taactgatttggtaaagagtcccca

SEQ ID NO: 2414378 - DNA, 25 bp, Homo sapien
taaattatggtccttgcgctgtggc

SEQ ID NO: 2414379 - DNA, 25 bp, Homo sapien
tgggacttccgaacacaggcttaag

SEQ ID NO: 2414380 - DNA, 25 bp, Homo sapien
taaatgcttagagttcacgtgggca

SEQ ID NO: 2414381 - DNA, 25 bp, Homo sapien
tcgcacccgtgaaaaattgctccat

SEQ ID NO: 2414382 - DNA, 25 bp, Homo sapien
taacacagatcgcacccgtgaaaaa

SEQ ID NO: 2414383 - DNA, 25 bp, Homo sapien
tttggccataacacagatcgcaccc

SEQ ID NO: 2414384 - DNA, 25 bp, Homo sapien
cagatcgcacccgtgaaaaattgct

SEQ ID NO: 2414385 - DNA, 25 bp, Homo sapien
gggaagttaccctgcattctatgga

SEQ ID NO: 2414386 - DNA, 25 bp, Homo sapien
tcttactgagtactagagattgtcc

SEQ ID NO: 2414387 - DNA, 25 bp, Homo sapien
tggtagactgaataatggacctcaa

SEQ ID NO: 2414388 - DNA, 25 bp, Homo sapien
gagatgaagaatctaagccctatcg

SEQ ID NO: 2414389 - DNA, 25 bp, Homo sapien
tattcatatccattgtctatccaca

SEQ ID NO: 2414390 - DNA, 25 bp, Homo sapien
tgccctgagccatctatattcatat

SEQ ID NO: 2414391 - DNA, 25 bp, Homo sapien
catagaactcatatctgccctgagc

SEQ ID NO: 2414392 - DNA, 25 bp, Homo sapien
tcaaaattcttattctctggagcat

SEQ ID NO: 2414393 - DNA, 25 bp, Homo sapien
cgagaatgttaagggttggctgcaa

SEQ ID NO: 2414394 - DNA, 25 bp, Homo sapien
cactcctggatcatcaccgaacaga

SEQ ID NO: 2414395 - DNA, 25 bp, Homo sapien
gtctgaaggtcgttggcttcctctt

SEQ ID NO: 2414396 - DNA, 25 bp, Homo sapien
gctgcaatgattcgtcctccctgga

SEQ ID NO: 2414397 - DNA, 25 bp, Homo sapien
ctccaaatatagttttcgtttgtag

SEQ ID NO: 2414398 - DNA, 25 bp, Homo sapien
ttcgtttgtagaaacttgttctcaa

SEQ ID NO: 2414399 - DNA, 25 bp, Homo sapien
tcttccaacttacctttttggctga

SEQ ID NO: 2414400 - DNA, 25 bp, Homo sapien
ctcttccaacttacctttttggctg

SEQ ID NO: 2414401 - DNA, 25 bp, Homo sapien
tctttcccgatatgtgcgtggctcc

SEQ ID NO: 2414402 - DNA, 25 bp, Homo sapien
tgattggcggtttcaggtcactctg

SEQ ID NO: 2414403 - DNA, 25 bp, Homo sapien
gatagcagctgccagataccacttg

SEQ ID NO: 2414404 - DNA, 25 bp, Homo sapien
tttttgttcaaagggagtcatccca

SEQ ID NO: 2414405 - DNA, 25 bp, Homo sapien
ctgctattgctttgtgctgccacgt

SEQ ID NO: 2414406 - DNA, 25 bp, Homo sapien
ccacgtggtatctgtcacatttgac

SEQ ID NO: 2414407 - DNA, 25 bp, Homo sapien
cactaggccacccaccaatgatgtt

SEQ ID NO: 2414408 - DNA, 25 bp, Homo sapien
tttggtccacatatctggccctcct

SEQ ID NO: 2414409 - DNA, 25 bp, Homo sapien
taaaagccccatggcttcatcaagg

SEQ ID NO: 2414410 - DNA, 25 bp, Homo sapien
ctaaaagccccatggcttcatcaag

SEQ ID NO: 2414411 - DNA, 25 bp, Homo sapien
cttcatcaaggcttgatagtctctt

SEQ ID NO: 2414412 - DNA, 25 bp, Homo sapien
tctttgccaatgcacttgccttttg

SEQ ID NO: 2414413 - DNA, 25 bp, Homo sapien
tattgatagacttgctctgtgtgtt

SEQ ID NO: 2414414 - DNA, 25 bp, Homo sapien
tatattacagccattgaggtagtga

SEQ ID NO: 2414415 - DNA, 25 bp, Homo sapien
gcctcttcagaaaggttatttcact

SEQ ID NO: 2414416 - DNA, 25 bp, Homo sapien
tgctaagcccttctctgctccgtgg

SEQ ID NO: 2414417 - DNA, 25 bp, Homo sapien
tctgctccgtggcgatggtcccact

SEQ ID NO: 2414418 - DNA, 25 bp, Homo sapien
tgggatgatgggtgccctgctaagc

SEQ ID NO: 2414419 - DNA, 25 bp, Homo sapien
gatgggtgccctgctaagcccttct

SEQ ID NO: 2414420 - DNA, 25 bp, Homo sapien
tggagccaccataagctccactaga

SEQ ID NO: 2414421 - DNA, 25 bp, Homo sapien
ggtgtgcccagatagctcctacggg

SEQ ID NO: 2414422 - DNA, 25 bp, Homo sapien
cctacggggatattctggagccacc

SEQ ID NO: 2414423 - DNA, 25 bp, Homo sapien
gccacttctcctcaataggtgtgcc

SEQ ID NO: 2414424 - DNA, 25 bp, Homo sapien
ttcaaagaagcgtttggcttttcat

SEQ ID NO: 2414425 - DNA, 25 bp, Homo sapien
tttcaaagaagcgtttggcttttca

SEQ ID NO: 2414426 - DNA, 25 bp, Homo sapien
tcaaagaagcgtttggcttttcatc

SEQ ID NO: 2414427 - DNA, 25 bp, Homo sapien
gctgctgattgtccccagaggtttg

SEQ ID NO: 2414428 - DNA, 25 bp, Homo sapien
tttgattccaatcttgtaggcgtga

SEQ ID NO: 2414429 - DNA, 25 bp, Homo sapien
tcactttcttcacctaaccatgaga

SEQ ID NO: 2414430 - DNA, 25 bp, Homo sapien
taggcgtgagtttctgacatcgtgc

SEQ ID NO: 2414431 - DNA, 25 bp, Homo sapien
ataaccttcacactgaaccatacac

SEQ ID NO: 2414432 - DNA, 25 bp, Homo sapien
gaaacaataataatggtgaaccaga

SEQ ID NO: 2414433 - DNA, 25 bp, Homo sapien
taataatggtgaaccagaataacct

SEQ ID NO: 2414434 - DNA, 25 bp, Homo sapien
tggtgaaccagaataaccttcacac

SEQ ID NO: 2414435 - DNA, 25 bp, Homo sapien
tccacagtaggcgatggagccaaag

SEQ ID NO: 2414436 - DNA, 25 bp, Homo sapien
aatttccacagtaggcgatggagcc

SEQ ID NO: 2414437 - DNA, 25 bp, Homo sapien
gtaggcgatggagccaaagaagcca

SEQ ID NO: 2414438 - DNA, 25 bp, Homo sapien
ctggatcaatttccacagtaggcga

SEQ ID NO: 2414439 - DNA, 25 bp, Homo sapien
ctggcagtccataagtctactatat

SEQ ID NO: 2414440 - DNA, 25 bp, Homo sapien
cataagtctactatatctaaattca

SEQ ID NO: 2414441 - DNA, 25 bp, Homo sapien
tcctccatcctagccttctggcagt

SEQ ID NO: 2414442 - DNA, 25 bp, Homo sapien
catcctagccttctggcagtccata

SEQ ID NO: 2414443 - DNA, 25 bp, Homo sapien
cgcgcccggcctcaacattcttaaa

SEQ ID NO: 2414444 - DNA, 25 bp, Homo sapien
gcgcccggcctcaacattcttaaag

SEQ ID NO: 2414445 - DNA, 25 bp, Homo sapien
agaaaagaattttcaagccagagtt

SEQ ID NO: 2414446 - DNA, 25 bp, Homo sapien
tcaagccagagtttcatatccagcc

SEQ ID NO: 2414447 - DNA, 25 bp, Homo sapien
ccaggctgagtcgttttatttttgc

SEQ ID NO: 2414448 - DNA, 25 bp, Homo sapien
ccttagttgccccaggctgagtcgt

SEQ ID NO: 2414449 - DNA, 25 bp, Homo sapien
tgctgatccttcgttttccttacca

SEQ ID NO: 2414450 - DNA, 25 bp, Homo sapien
ttttcttctactggcctgccttagt

SEQ ID NO: 2414451 - DNA, 25 bp, Homo sapien
tgttatccaataactcatctatcat

SEQ ID NO: 2414452 - DNA, 25 bp, Homo sapien
tactgttatccaataactcatctat

SEQ ID NO: 2414453 - DNA, 25 bp, Homo sapien
actgttatccaataactcatctatc

SEQ ID NO: 2414454 - DNA, 25 bp, Homo sapien
gtactgttatccaataactcatcta

SEQ ID NO: 2414455 - DNA, 25 bp, Homo sapien
cactggatgggatgaagacagctca

SEQ ID NO: 2414456 - DNA, 25 bp, Homo sapien
tgtttgccaacggaccactggatgg

SEQ ID NO: 2414457 - DNA, 25 bp, Homo sapien
agaacacctaaccatattgtgctgg

SEQ ID NO: 2414458 - DNA, 25 bp, Homo sapien
tattccacttcgatctctggcctgt

SEQ ID NO: 2414459 - DNA, 25 bp, Homo sapien
ctcaatcagggattcagctggacct

SEQ ID NO: 2414460 - DNA, 25 bp, Homo sapien
atcagggattcagctggacctggca

SEQ ID NO: 2414461 - DNA, 25 bp, Homo sapien
caatcagggattcagctggacctgg

SEQ ID NO: 2414462 - DNA, 25 bp, Homo sapien
ttcagctggacctggcagcattgcc

SEQ ID NO: 2414463 - DNA, 25 bp, Homo sapien
tttggtaaaactgaatctatcttgg

SEQ ID NO: 2414464 - DNA, 25 bp, Homo sapien
ggtaaaactgaatctatcttgggtg

SEQ ID NO: 2414465 - DNA, 25 bp, Homo sapien
aatctatcttgggtgtccccctgtt

SEQ ID NO: 2414466 - DNA, 25 bp, Homo sapien
aactgaatctatcttgggtgtcccc

SEQ ID NO: 2414467 - DNA, 25 bp, Homo sapien
cttgggcttttgatttagaggatga

SEQ ID NO: 2414468 - DNA, 25 bp, Homo sapien
ttagaggatgatggacctttatctc

SEQ ID NO: 2414469 - DNA, 25 bp, Homo sapien
tcttgggcttttgatttagaggatg

SEQ ID NO: 2414470 - DNA, 25 bp, Homo sapien
ggatgatggacctttatctcattca

SEQ ID NO: 2414471 - DNA, 25 bp, Homo sapien
ctccaacagtggcacttatccactt

SEQ ID NO: 2414472 - DNA, 25 bp, Homo sapien
tgtaatcacttgattatctccaaca

SEQ ID NO: 2414473 - DNA, 25 bp, Homo sapien
tggcacttatccacttgggttctag

SEQ ID NO: 2414474 - DNA, 25 bp, Homo sapien
tatccacttgggttctagaaaattc

SEQ ID NO: 2414475 - DNA, 25 bp, Homo sapien
ttgaaaattttgctgccacaggtac

SEQ ID NO: 2414476 - DNA, 25 bp, Homo sapien
aaattttgctgccacaggtacaaac

SEQ ID NO: 2414477 - DNA, 25 bp, Homo sapien
gctgggggagtttatactgattgaa

SEQ ID NO: 2414478 - DNA, 25 bp, Homo sapien
ttgctgccacaggtacaaacaggag

SEQ ID NO: 2414479 - DNA, 25 bp, Homo sapien
tgtggatgcataagacagccatggg

SEQ ID NO: 2414480 - DNA, 25 bp, Homo sapien
ccagcaccgggtaatgcaggtagag

SEQ ID NO: 2414481 - DNA, 25 bp, Homo sapien
gacgggcgggcactgactgcctcta

SEQ ID NO: 2414482 - DNA, 25 bp, Homo sapien
atgggaaggagcacccgagacgaca

SEQ ID NO: 2414483 - DNA, 25 bp, Homo sapien
acggttttgctcatttccttgctca

SEQ ID NO: 2414484 - DNA, 25 bp, Homo sapien
cacggttttgctcatttccttgctc

SEQ ID NO: 2414485 - DNA, 25 bp, Homo sapien
cggttttgctcatttccttgctcac

SEQ ID NO: 2414486 - DNA, 25 bp, Homo sapien
ttccttcttcaacctccttgttcat

SEQ ID NO: 2414487 - DNA, 25 bp, Homo sapien
gattccttcttcaacctccttgttc

SEQ ID NO: 2414488 - DNA, 25 bp, Homo sapien
tggattccttcttcaacctccttgt

SEQ ID NO: 2414489 - DNA, 25 bp, Homo sapien
ctggattccttcttcaacctccttg

SEQ ID NO: 2414490 - DNA, 25 bp, Homo sapien
gagtaaaagctcatgtatctggacc

SEQ ID NO: 2414491 - DNA, 25 bp, Homo sapien
gtggtgtttacttaggcctactgaa

SEQ ID NO: 2414492 - DNA, 25 bp, Homo sapien
taaaacaggtcttctcagctagcta

SEQ ID NO: 2414493 - DNA, 25 bp, Homo sapien
attgtaggacagatgtttagcctcc

SEQ ID NO: 2414494 - DNA, 25 bp, Homo sapien
gacaggtaaacaaggagtggcaacc

SEQ ID NO: 2414495 - DNA, 25 bp, Homo sapien
aaacaatagagggattgggagctcc

SEQ ID NO: 2414496 - DNA, 25 bp, Homo sapien
catgacgggcaacgtaagacaggta

SEQ ID NO: 2414497 - DNA, 25 bp, Homo sapien
tcatgaccattgtagccataggtgg

SEQ ID NO: 2414498 - DNA, 25 bp, Homo sapien
tgtttttattggtgccttgcatggc

SEQ ID NO: 2414499 - DNA, 25 bp, Homo sapien
aaaacaggttggtggcaacccacat

SEQ ID NO: 2414500 - DNA, 25 bp, Homo sapien
acaggttggtggcaacccacatctt

SEQ ID NO: 2414501 - DNA, 25 bp, Homo sapien
gccttgcatggcagtaatactgaaa

SEQ ID NO: 2414502 - DNA, 25 bp, Homo sapien
aaaattggctctagatgactgtggc

SEQ ID NO: 2414503 - DNA, 25 bp, Homo sapien
taagtatccagcaaacgtgagaggt

SEQ ID NO: 2414504 - DNA, 25 bp, Homo sapien
tgacatgcaggatatgatcagctcc

SEQ ID NO: 2414505 - DNA, 25 bp, Homo sapien
caactgaccagggagaaaggacatc

SEQ ID NO: 2414506 - DNA, 25 bp, Homo sapien
ggtcaacacttcagtacaaatttgg

SEQ ID NO: 2414507 - DNA, 25 bp, Homo sapien
aaaagtcaaatctcaccagctgctg

SEQ ID NO: 2414508 - DNA, 25 bp, Homo sapien
tggtgtgcaatagataaagtcctct

SEQ ID NO: 2414509 - DNA, 25 bp, Homo sapien
tgttggcactgtgtacctgagtgag

SEQ ID NO: 2414510 - DNA, 25 bp, Homo sapien
taaggatgaaccagttagggcttct

SEQ ID NO: 2414511 - DNA, 25 bp, Homo sapien
tatgagaaagttaatgtgcttggcc

SEQ ID NO: 2414512 - DNA, 25 bp, Homo sapien
ggtctattagtcagctgatgtccca

SEQ ID NO: 2414513 - DNA, 25 bp, Homo sapien
gacttcagtgcttggatgtagcagc

SEQ ID NO: 2414514 - DNA, 25 bp, Homo sapien
acacgcttgagtgctccgagggcag

SEQ ID NO: 2414515 - DNA, 25 bp, Homo sapien
gctctgggctgctagacacgcttga

SEQ ID NO: 2414516 - DNA, 25 bp, Homo sapien
cccagccatggcgatggctccaggg

SEQ ID NO: 2414517 - DNA, 25 bp, Homo sapien
tgcaatatggttttcactgtcactc

SEQ ID NO: 2414518 - DNA, 25 bp, Homo sapien
tttcctgccgcctgttgcgcatgat

SEQ ID NO: 2414519 - DNA, 25 bp, Homo sapien
caccaggcaggtgcgctttggcctg

SEQ ID NO: 2414520 - DNA, 25 bp, Homo sapien
gccttgtattcaccaatgcgcagct

SEQ ID NO: 2414521 - DNA, 25 bp, Homo sapien
tggcctgggcttgtacttatagtca

SEQ ID NO: 2414522 - DNA, 25 bp, Homo sapien
cataaacctgtttttgattagtgag

SEQ ID NO: 2414523 - DNA, 25 bp, Homo sapien
ttaggattccaatttgcacagcttc

SEQ ID NO: 2414524 - DNA, 25 bp, Homo sapien
agttgagatgttagccaaaacccag

SEQ ID NO: 2414525 - DNA, 25 bp, Homo sapien
catgcattttgaatctgagactaat

SEQ ID NO: 2414526 - DNA, 25 bp, Homo sapien
gagttcctcaatatgggctgttaca

SEQ ID NO: 2414527 - DNA, 25 bp, Homo sapien
tagtcatctcaactcaacgcgaatg

SEQ ID NO: 2414528 - DNA, 25 bp, Homo sapien
gaatgcacaaagaccgataaactgg

SEQ ID NO: 2414529 - DNA, 25 bp, Homo sapien
catacagtgaaagaggcaatatctc

SEQ ID NO: 2414530 - DNA, 25 bp, Homo sapien
ccaatatcttgctgatgttggagtt

SEQ ID NO: 2414531 - DNA, 25 bp, Homo sapien
atcttgctgatgttggagttgtgca

SEQ ID NO: 2414532 - DNA, 25 bp, Homo sapien
cttgctgatgttggagttgtgcatg

SEQ ID NO: 2414533 - DNA, 25 bp, Homo sapien
atatcttgctgatgttggagttgtg

SEQ ID NO: 2414534 - DNA, 25 bp, Homo sapien
tctccgttcatctttagcccacacc

SEQ ID NO: 2414535 - DNA, 25 bp, Homo sapien
tttctccgttcatctttagcccaca

SEQ ID NO: 2414536 - DNA, 25 bp, Homo sapien
tccgttcatctttagcccacaccat

SEQ ID NO: 2414537 - DNA, 25 bp, Homo sapien
ttctccgttcatctttagcccacac

SEQ ID NO: 2414538 - DNA, 25 bp, Homo sapien
attgctaccacgccctcgggattcc

SEQ ID NO: 2414539 - DNA, 25 bp, Homo sapien
attcattggacgctttatgtggggt

SEQ ID NO: 2414540 - DNA, 25 bp, Homo sapien
aaggcattcattggacgctttatgt

SEQ ID NO: 2414541 - DNA, 25 bp, Homo sapien
gcattcattggacgctttatgtggg

SEQ ID NO: 2414542 - DNA, 25 bp, Homo sapien
cagtagagagatgttcccggtcagg

SEQ ID NO: 2414543 - DNA, 25 bp, Homo sapien
tctgaaggcctatgagaagggagca

SEQ ID NO: 2414544 - DNA, 25 bp, Homo sapien
tgggcccgacacttgactatgtagt

SEQ ID NO: 2414545 - DNA, 25 bp, Homo sapien
ttaggttatagagagtgggcccgac

SEQ ID NO: 2414546 - DNA, 25 bp, Homo sapien
gcctctgacacttagagccctgtga

SEQ ID NO: 2414547 - DNA, 25 bp, Homo sapien
gagacgatttctgcaaagcactcag

SEQ ID NO: 2414548 - DNA, 25 bp, Homo sapien
ttggcactacctagacactttcttg

SEQ ID NO: 2414549 - DNA, 25 bp, Homo sapien
tctctgcaatgggacttatcctagg

SEQ ID NO: 2414550 - DNA, 25 bp, Homo sapien
tcagattgaaatccatcattgcatg

SEQ ID NO: 2414551 - DNA, 25 bp, Homo sapien
ctcagattgaaatccatcattgcat

SEQ ID NO: 2414552 - DNA, 25 bp, Homo sapien
cagattgaaatccatcattgcatgg

SEQ ID NO: 2414553 - DNA, 25 bp, Homo sapien
ccacaaggcctgctttgcaagtata

SEQ ID NO: 2414554 - DNA, 25 bp, Homo sapien
tggtcggttgtcacttgacaattcc

SEQ ID NO: 2414555 - DNA, 25 bp, Homo sapien
ctgtccaaaaggatttggtcggttg

SEQ ID NO: 2414556 - DNA, 25 bp, Homo sapien
aagtacttttaatgggctccctgat

SEQ ID NO: 2414557 - DNA, 25 bp, Homo sapien
gttgtaacactgcaagggatgtata

SEQ ID NO: 2414558 - DNA, 25 bp, Homo sapien
tatactgagctatcctttgctctct

SEQ ID NO: 2414559 - DNA, 25 bp, Homo sapien
gatgtatactgagctatcctttgct

SEQ ID NO: 2414560 - DNA, 25 bp, Homo sapien
tgcaagggatgtatactgagctatc

SEQ ID NO: 2414561 - DNA, 25 bp, Homo sapien
tcggcagttattgagacccagacta

SEQ ID NO: 2414562 - DNA, 25 bp, Homo sapien
tgttcggcagttattgagacccaga

SEQ ID NO: 2414563 - DNA, 25 bp, Homo sapien
ttctgttcggcagttattgagaccc

SEQ ID NO: 2414564 - DNA, 25 bp, Homo sapien
ggcagttattgagacccagactatt

SEQ ID NO: 2414565 - DNA, 25 bp, Homo sapien
ctgttgttcccgtcggagttgctcc

SEQ ID NO: 2414566 - DNA, 25 bp, Homo sapien
tgttgttcccgtcggagttgctcct

SEQ ID NO: 2414567 - DNA, 25 bp, Homo sapien
ttgttcccgtcggagttgctccttc

SEQ ID NO: 2414568 - DNA, 25 bp, Homo sapien
tgaaggactagctaacgctgctggg

SEQ ID NO: 2414569 - DNA, 25 bp, Homo sapien
gactagctaacgctgctgggacaga

SEQ ID NO: 2414570 - DNA, 25 bp, Homo sapien
aggactagctaacgctgctgggaca

SEQ ID NO: 2414571 - DNA, 25 bp, Homo sapien
gaaggactagctaacgctgctggga

SEQ ID NO: 2414572 - DNA, 25 bp, Homo sapien
tgtgggtgatttgccatcagaggtc

SEQ ID NO: 2414573 - DNA, 25 bp, Homo sapien
gtgatttgccatcagaggtcttggg

SEQ ID NO: 2414574 - DNA, 25 bp, Homo sapien
tgggtgatttgccatcagaggtctt

SEQ ID NO: 2414575 - DNA, 25 bp, Homo sapien
ggtgatttgccatcagaggtcttgg

SEQ ID NO: 2414576 - DNA, 25 bp, Homo sapien
tctgtgtgaaactgacttctgtcat

SEQ ID NO: 2414577 - DNA, 25 bp, Homo sapien
ttctgtgtgaaactgacttctgtca

SEQ ID NO: 2414578 - DNA, 25 bp, Homo sapien
cttctgtgtgaaactgacttctgtc

SEQ ID NO: 2414579 - DNA, 25 bp, Homo sapien
tgcctttagaacttctttttgacat

SEQ ID NO: 2414580 - DNA, 25 bp, Homo sapien
cctttagaacttctttttgacatca

SEQ ID NO: 2414581 - DNA, 25 bp, Homo sapien
gatgcctttagaacttctttttgac

SEQ ID NO: 2414582 - DNA, 25 bp, Homo sapien
gcctttagaacttctttttgacatc

SEQ ID NO: 2414583 - DNA, 25 bp, Homo sapien
gcacagctcctatggcacaaatctc

SEQ ID NO: 2414584 - DNA, 25 bp, Homo sapien
ggcacaaatctccaacagtctggtg

SEQ ID NO: 2414585 - DNA, 25 bp, Homo sapien
tcctatggcacaaatctccaacagt

SEQ ID NO: 2414586 - DNA, 25 bp, Homo sapien
acaaatctccaacagtctggtgaac

SEQ ID NO: 2414587 - DNA, 25 bp, Homo sapien
ttatcctttctctctcgcgcacaca

SEQ ID NO: 2414588 - DNA, 25 bp, Homo sapien
atcctttctctctcgcgcacacact

SEQ ID NO: 2414589 - DNA, 25 bp, Homo sapien
cagcattatcctttctctctcgcgc

SEQ ID NO: 2414590 - DNA, 25 bp, Homo sapien
gaaaacagcatgcatcagaggactc

SEQ ID NO: 2414591 - DNA, 25 bp, Homo sapien
taagctagctgctggcatacaatag

SEQ ID NO: 2414592 - DNA, 25 bp, Homo sapien
catgataatctcattgggcgggtga

SEQ ID NO: 2414593 - DNA, 25 bp, Homo sapien
ttgtacacccagagtttaagctagc

SEQ ID NO: 2414594 - DNA, 25 bp, Homo sapien
gcagataagttgacatgcacacctg

SEQ ID NO: 2414595 - DNA, 25 bp, Homo sapien
tgtgtgaatgctggtaggagataca

SEQ ID NO: 2414596 - DNA, 25 bp, Homo sapien
ttccctcctggagatacctgcattg

SEQ ID NO: 2414597 - DNA, 25 bp, Homo sapien
gaatgctggtaggagatacagcagc

SEQ ID NO: 2414598 - DNA, 25 bp, Homo sapien
gatacctgcattgcagctagctggg

SEQ ID NO: 2414599 - DNA, 25 bp, Homo sapien
cagtatgtccaaggactcaaagcaa

SEQ ID NO: 2414600 - DNA, 25 bp, Homo sapien
tgtccaaggactcaaagcaaataag

SEQ ID NO: 2414601 - DNA, 25 bp, Homo sapien
cttcagtatgtccaaggactcaaag

SEQ ID NO: 2414602 - DNA, 25 bp, Homo sapien
aggactcaaagcaaataagagccat

SEQ ID NO: 2414603 - DNA, 25 bp, Homo sapien
aaaaatgattgtcttcaattacata

SEQ ID NO: 2414604 - DNA, 25 bp, Homo sapien
cacttctgaggcaggttgagactag

SEQ ID NO: 2414605 - DNA, 25 bp, Homo sapien
gcattccaataacggaacaccgggc

SEQ ID NO: 2414606 - DNA, 25 bp, Homo sapien
agacactggcaatgaccttaagcag

SEQ ID NO: 2414607 - DNA, 25 bp, Homo sapien
tggatcatcataggtaggccagcta

SEQ ID NO: 2414608 - DNA, 25 bp, Homo sapien
aaacccagctcgaaattgtcatgtg

SEQ ID NO: 2414609 - DNA, 25 bp, Homo sapien
cagagcacaatcactgaactcagca

SEQ ID NO: 2414610 - DNA, 25 bp, Homo sapien
tgtgaagacacttgccaaccaaacc

SEQ ID NO: 2414611 - DNA, 25 bp, Homo sapien
caaatagatatgaaacagcacgctt

SEQ ID NO: 2414612 - DNA, 25 bp, Homo sapien
tcttgcagctgtgctgtattaatca

SEQ ID NO: 2414613 - DNA, 25 bp, Homo sapien
gcagctgtgctgtattaatcatatg

SEQ ID NO: 2414614 - DNA, 25 bp, Homo sapien
tgcagctgtgctgtattaatcatat

SEQ ID NO: 2414615 - DNA, 25 bp, Homo sapien
cttgcagctgtgctgtattaatcat

SEQ ID NO: 2414616 - DNA, 25 bp, Homo sapien
cttcctataggtagaacaggtggca

SEQ ID NO: 2414617 - DNA, 25 bp, Homo sapien
tataggtagaacaggtggcaaccat

SEQ ID NO: 2414618 - DNA, 25 bp, Homo sapien
tcctataggtagaacaggtggcaac

SEQ ID NO: 2414619 - DNA, 25 bp, Homo sapien
cctataggtagaacaggtggcaacc

SEQ ID NO: 2414620 - DNA, 25 bp, Homo sapien
ttggcaaggctatttcagctgttcc

SEQ ID NO: 2414621 - DNA, 25 bp, Homo sapien
gttacctcaacccatcttactgctg

SEQ ID NO: 2414622 - DNA, 25 bp, Homo sapien
tactgctgccttatcgagtatagct

SEQ ID NO: 2414623 - DNA, 25 bp, Homo sapien
aactggtcttcctactgttacctca

SEQ ID NO: 2414624 - DNA, 25 bp, Homo sapien
tgtttccacggtatctcacggcaga

SEQ ID NO: 2414625 - DNA, 25 bp, Homo sapien
actgtttccacggtatctcacggca

SEQ ID NO: 2414626 - DNA, 25 bp, Homo sapien
ggcagacataacttcctaagcccac

SEQ ID NO: 2414627 - DNA, 25 bp, Homo sapien
cacggtatctcacggcagacataac

SEQ ID NO: 2414628 - DNA, 25 bp, Homo sapien
tgtctgaatatcttttgcagggttt

SEQ ID NO: 2414629 - DNA, 25 bp, Homo sapien
ttaagtcgccttgctcctcaagtgt

SEQ ID NO: 2414630 - DNA, 25 bp, Homo sapien
gcatttttgttaagtcgccttgctc

SEQ ID NO: 2414631 - DNA, 25 bp, Homo sapien
caagtgtctgaatatcttttgcagg

SEQ ID NO: 2414632 - DNA, 25 bp, Homo sapien
gcagttggagtgggcctaagcctgg

SEQ ID NO: 2414633 - DNA, 25 bp, Homo sapien
tggagtgggcctaagcctggtgttg

SEQ ID NO: 2414634 - DNA, 25 bp, Homo sapien
gttggagtgggcctaagcctggtgt

SEQ ID NO: 2414635 - DNA, 25 bp, Homo sapien
cagttggagtgggcctaagcctggt

SEQ ID NO: 2414636 - DNA, 25 bp, Homo sapien
atcagctgaacagggtaagggtcac

SEQ ID NO: 2414637 - DNA, 25 bp, Homo sapien
tgggatcagctgaacagggtaaggg

SEQ ID NO: 2414638 - DNA, 25 bp, Homo sapien
gttgggatcagctgaacagggtaag

SEQ ID NO: 2414639 - DNA, 25 bp, Homo sapien
ggatcagctgaacagggtaagggtc

SEQ ID NO: 2414640 - DNA, 25 bp, Homo sapien
tctacaggctgcaaagagtggtatc

SEQ ID NO: 2414641 - DNA, 25 bp, Homo sapien
atctacaggctgcaaagagtggtat

SEQ ID NO: 2414642 - DNA, 25 bp, Homo sapien
gcttttggcagacatcgtatacctc

SEQ ID NO: 2414643 - DNA, 25 bp, Homo sapien
ggcagacatcgtatacctcctgagt

SEQ ID NO: 2414644 - DNA, 25 bp, Homo sapien
gtatacctcctgagtgtatccaggg

SEQ ID NO: 2414645 - DNA, 25 bp, Homo sapien
tctctcttatctgggcttttggcag

SEQ ID NO: 2414646 - DNA, 25 bp, Homo sapien
ggaatcattaatggcggcagctgac

SEQ ID NO: 2414647 - DNA, 25 bp, Homo sapien
gatcaggagggaatacgggaatcat

SEQ ID NO: 2414648 - DNA, 25 bp, Homo sapien
tacatccagccttatagctgaagcc

SEQ ID NO: 2414649 - DNA, 25 bp, Homo sapien
ccagtgtccgttgatcaggagggaa

SEQ ID NO: 2414650 - DNA, 25 bp, Homo sapien
aagagaagaagtttcgatgctccat

SEQ ID NO: 2414651 - DNA, 25 bp, Homo sapien
tagagcgaatcaaagagaagaagtt

SEQ ID NO: 2414652 - DNA, 25 bp, Homo sapien
ctgaacgtgatagagcgaatcaaag

SEQ ID NO: 2414653 - DNA, 25 bp, Homo sapien
tcaaagagaagaagtttcgatgctc

SEQ ID NO: 2414654 - DNA, 25 bp, Homo sapien
cacataagaggctacttcctatatt

SEQ ID NO: 2414655 - DNA, 25 bp, Homo sapien
gggcatgttattcgcaggttaaata

SEQ ID NO: 2414656 - DNA, 25 bp, Homo sapien
tagtctctaagatgttatgaatcca

SEQ ID NO: 2414657 - DNA, 25 bp, Homo sapien
gtgtctacctcaagatactacatag

SEQ ID NO: 2414658 - DNA, 25 bp, Homo sapien
gcaaatgtagactattcttcagagg

SEQ ID NO: 2414659 - DNA, 25 bp, Homo sapien
aatcatattgcaaaagggtgaggac

SEQ ID NO: 2414660 - DNA, 25 bp, Homo sapien
tgaatgacaggcaacgaaaaggaga

SEQ ID NO: 2414661 - DNA, 25 bp, Homo sapien
ccattagaacagagggtagaaatca

SEQ ID NO: 2414662 - DNA, 25 bp, Homo sapien
ccaagggtcgcatttttactgattt

SEQ ID NO: 2414663 - DNA, 25 bp, Homo sapien
tataccaagggtcgcatttttactg

SEQ ID NO: 2414664 - DNA, 25 bp, Homo sapien
taccaagggtcgcatttttactgat

SEQ ID NO: 2414665 - DNA, 25 bp, Homo sapien
gctaaaattctattatgtcttaaga

SEQ ID NO: 2414666 - DNA, 25 bp, Homo sapien
taaatgagtgaaacaatagctgcca

SEQ ID NO: 2414667 - DNA, 25 bp, Homo sapien
tgctccctgagctagaatctgttaa

SEQ ID NO: 2414668 - DNA, 25 bp, Homo sapien
catctgactatgtggaagataacat

SEQ ID NO: 2414669 - DNA, 25 bp, Homo sapien
tagctgccagcactgacaatatggc

SEQ ID NO: 2414670 - DNA, 25 bp, Homo sapien
acagaaatctcaggtctgcattccc

SEQ ID NO: 2414671 - DNA, 25 bp, Homo sapien
caccagtaagacatattaatccaac

SEQ ID NO: 2414672 - DNA, 25 bp, Homo sapien
aatccaactgacagaaatctcaggt

SEQ ID NO: 2414673 - DNA, 25 bp, Homo sapien
catattaatccaactgacagaaatc

SEQ ID NO: 2414674 - DNA, 25 bp, Homo sapien
tgcgtcatgacatggatgagcacag

SEQ ID NO: 2414675 - DNA, 25 bp, Homo sapien
aattatcggataccatgcgtcatga

SEQ ID NO: 2414676 - DNA, 25 bp, Homo sapien
tgctaccagggtactaatgtttctt

SEQ ID NO: 2414677 - DNA, 25 bp, Homo sapien
gattcacaaggtttctaagctctcc

SEQ ID NO: 2414678 - DNA, 25 bp, Homo sapien
tctcttaaaaacgtgtcatttacaa

SEQ ID NO: 2414679 - DNA, 25 bp, Homo sapien
ctcttaaaaacgtgtcatttacaat

SEQ ID NO: 2414680 - DNA, 25 bp, Homo sapien
ccaggtgttagttaggtattatatt

SEQ ID NO: 2414681 - DNA, 25 bp, Homo sapien
taatcttcagagaaccaggtgttag

SEQ ID NO: 2414682 - DNA, 25 bp, Homo sapien
cagagaaccaggtgttagttaggta

SEQ ID NO: 2414683 - DNA, 25 bp, Homo sapien
ctttggcaaaaatgtttagcccatg

SEQ ID NO: 2414684 - DNA, 25 bp, Homo sapien
ataaaacgctacagtctactactcc

SEQ ID NO: 2414685 - DNA, 25 bp, Homo sapien
tataaaacgctacagtctactactc

SEQ ID NO: 2414686 - DNA, 25 bp, Homo sapien
ctataaaacgctacagtctactact

SEQ ID NO: 2414687 - DNA, 25 bp, Homo sapien
taaaacgctacagtctactactcca

SEQ ID NO: 2414688 - DNA, 25 bp, Homo sapien
tcaatatacgcgttgttttctaagg

SEQ ID NO: 2414689 - DNA, 25 bp, Homo sapien
caatatacgcgttgttttctaaggt

SEQ ID NO: 2414690 - DNA, 25 bp, Homo sapien
tggaacaacaacaatggtataaaac

SEQ ID NO: 2414691 - DNA, 25 bp, Homo sapien
ctggaacaacaacaatggtataaaa

SEQ ID NO: 2414692 - DNA, 25 bp, Homo sapien
tgtaagtatattgaaattatgattt

SEQ ID NO: 2414693 - DNA, 25 bp, Homo sapien
aattgtaagtatattgaaattatga

SEQ ID NO: 2414694 - DNA, 25 bp, Homo sapien
gttgctggagcaaattgattttgtg

SEQ ID NO: 2414695 - DNA, 25 bp, Homo sapien
gatctgttgctggagcaaattgatt

SEQ ID NO: 2414696 - DNA, 25 bp, Homo sapien
ttgtgttgttgctgtagaagctgct

SEQ ID NO: 2414697 - DNA, 25 bp, Homo sapien
ttttgtgttgttgctgtagaagctg

SEQ ID NO: 2414698 - DNA, 25 bp, Homo sapien
gctctcggaggctggtcagctggtt

SEQ ID NO: 2414699 - DNA, 25 bp, Homo sapien
cagctccatttgctgacgctgtttc

SEQ ID NO: 2414700 - DNA, 25 bp, Homo sapien
ggccagctccatttgctgacgctgt

SEQ ID NO: 2414701 - DNA, 25 bp, Homo sapien
ctctcggaggctggtcagctggttg

SEQ ID NO: 2414702 - DNA, 25 bp, Homo sapien
ttctttctcagctaagctctcggga

SEQ ID NO: 2414703 - DNA, 25 bp, Homo sapien
agttgcctttctttctcagctaagc

SEQ ID NO: 2414704 - DNA, 25 bp, Homo sapien
ttctcagctaagctctcgggagtcc

SEQ ID NO: 2414705 - DNA, 25 bp, Homo sapien
gagttgcctttctttctcagctaag

SEQ ID NO: 2414706 - DNA, 25 bp, Homo sapien
gaccagggtcagaagaatccatcag

SEQ ID NO: 2414707 - DNA, 25 bp, Homo sapien
gccttgcaaaagaaccagttgttga

SEQ ID NO: 2414708 - DNA, 25 bp, Homo sapien
ctgaattaatgcaccgtgaccaggg

SEQ ID NO: 2414709 - DNA, 25 bp, Homo sapien
aatgcccctggcacttttgctaaaa

SEQ ID NO: 2414710 - DNA, 25 bp, Homo sapien
gccaaagttccccgatcccattgca

SEQ ID NO: 2414711 - DNA, 25 bp, Homo sapien
tcgccaaagttccccgatcccattg

SEQ ID NO: 2414712 - DNA, 25 bp, Homo sapien
caaagttccccgatcccattgcaag

SEQ ID NO: 2414713 - DNA, 25 bp, Homo sapien
aagttccccgatcccattgcaagaa

SEQ ID NO: 2414714 - DNA, 25 bp, Homo sapien
gcactaacaataggcccctgaacct

SEQ ID NO: 2414715 - DNA, 25 bp, Homo sapien
aatccattgtgcactaacaataggc

SEQ ID NO: 2414716 - DNA, 25 bp, Homo sapien
cctccaggcaccaaaagcagaccat

SEQ ID NO: 2414717 - DNA, 25 bp, Homo sapien
cattgtgcactaacaataggcccct

SEQ ID NO: 2414718 - DNA, 25 bp, Homo sapien
tttacttttaaggctattgtctgca

SEQ ID NO: 2414719 - DNA, 25 bp, Homo sapien
tttaaggctattgtctgcaaagtcc

SEQ ID NO: 2414720 - DNA, 25 bp, Homo sapien
cttttaaggctattgtctgcaaagt

SEQ ID NO: 2414721 - DNA, 25 bp, Homo sapien
tacttttaaggctattgtctgcaaa

SEQ ID NO: 2414722 - DNA, 25 bp, Homo sapien
tatatgtgattgtcctgaagtgaat

SEQ ID NO: 2414723 - DNA, 25 bp, Homo sapien
tatgtgattgtcctgaagtgaatta

SEQ ID NO: 2414724 - DNA, 25 bp, Homo sapien
tttttatatgtgattgtcctgaagt

SEQ ID NO: 2414725 - DNA, 25 bp, Homo sapien
acgtttagtattgccaaaatacttg

SEQ ID NO: 2414726 - DNA, 25 bp, Homo sapien
ccccggccgagtacagtcactatat

SEQ ID NO: 2414727 - DNA, 25 bp, Homo sapien
tattcactcaaattggcaacaggtc

SEQ ID NO: 2414728 - DNA, 25 bp, Homo sapien
aaaaggcctggctccaatgttaggc

SEQ ID NO: 2414729 - DNA, 25 bp, Homo sapien
taaccaattatacaaccgctgactg

SEQ ID NO: 2414730 - DNA, 25 bp, Homo sapien
cttcaacgtacttgcactgagtaag

SEQ ID NO: 2414731 - DNA, 25 bp, Homo sapien
tcaacgtacttgcactgagtaagct

SEQ ID NO: 2414732 - DNA, 25 bp, Homo sapien
aacgtacttgcactgagtaagctga

SEQ ID NO: 2414733 - DNA, 25 bp, Homo sapien
cgtacttgcactgagtaagctgaca

SEQ ID NO: 2414734 - DNA, 25 bp, Homo sapien
ggacaatgagaatacgtgtgatctg

SEQ ID NO: 2414735 - DNA, 25 bp, Homo sapien
ctaggtaaacatgtggacaatgaga

SEQ ID NO: 2414736 - DNA, 25 bp, Homo sapien
aacatgtggacaatgagaatacgtg

SEQ ID NO: 2414737 - DNA, 25 bp, Homo sapien
ttcaactaggtaaacatgtggacaa

SEQ ID NO: 2414738 - DNA, 25 bp, Homo sapien
tctgatccgattagtaactgcctac

SEQ ID NO: 2414739 - DNA, 25 bp, Homo sapien
tatttaagcatctcagtatggccca

SEQ ID NO: 2414740 - DNA, 25 bp, Homo sapien
tgtgtccgtagtcttgcagtctggc

SEQ ID NO: 2414741 - DNA, 25 bp, Homo sapien
tcctccgaatgtgccagaattagct

SEQ ID NO: 2414742 - DNA, 25 bp, Homo sapien
tggtgtcctcccctgatggaactac

SEQ ID NO: 2414743 - DNA, 25 bp, Homo sapien
tcccctgatggaactactgactgac

SEQ ID NO: 2414744 - DNA, 25 bp, Homo sapien
tgtcctcccctgatggaactactga

SEQ ID NO: 2414745 - DNA, 25 bp, Homo sapien
cctggtgtcctcccctgatggaact

SEQ ID NO: 2414746 - DNA, 25 bp, Homo sapien
tcgatgactaatttgaataccgttt

SEQ ID NO: 2414747 - DNA, 25 bp, Homo sapien
caccttcgatgactaatttgaatac

SEQ ID NO: 2414748 - DNA, 25 bp, Homo sapien
ccttcgatgactaatttgaataccg

SEQ ID NO: 2414749 - DNA, 25 bp, Homo sapien
tgactaatttgaataccgttttctc

SEQ ID NO: 2414750 - DNA, 25 bp, Homo sapien
gcaggctcagatcttggcaacctgt

SEQ ID NO: 2414751 - DNA, 25 bp, Homo sapien
gtgaaagtgcccagtcgaaaattac

SEQ ID NO: 2414752 - DNA, 25 bp, Homo sapien
aattactaacagctggagatgacag

SEQ ID NO: 2414753 - DNA, 25 bp, Homo sapien
caggctcagatcttggcaacctgtg

SEQ ID NO: 2414754 - DNA, 25 bp, Homo sapien
cattcctcatccgtgtaccattttg

SEQ ID NO: 2414755 - DNA, 25 bp, Homo sapien
tcattcctcatccgtgtaccatttt

SEQ ID NO: 2414756 - DNA, 25 bp, Homo sapien
tttaagtaccatgtcctgccagagc

SEQ ID NO: 2414757 - DNA, 25 bp, Homo sapien
tacctctttcaatttgggaaggagc

SEQ ID NO: 2414758 - DNA, 25 bp, Homo sapien
taaccagcagcaactaagtgaacag

SEQ ID NO: 2414759 - DNA, 25 bp, Homo sapien
gccagagcaatatttcaccagatta

SEQ ID NO: 2414760 - DNA, 25 bp, Homo sapien
caaggagcacaatctggcattcaaa

SEQ ID NO: 2414761 - DNA, 25 bp, Homo sapien
tccaaaatgcccaggtcatatgctc

SEQ ID NO: 2414762 - DNA, 25 bp, Homo sapien
gatgggctatcttaatcatccaaaa

SEQ ID NO: 2414763 - DNA, 25 bp, Homo sapien
cacacatgaattgggaataaactgc

SEQ ID NO: 2414764 - DNA, 25 bp, Homo sapien
gtacactgggagtccttgaggtgtc

SEQ ID NO: 2414765 - DNA, 25 bp, Homo sapien
tacactgggagtccttgaggtgtca

SEQ ID NO: 2414766 - DNA, 25 bp, Homo sapien
tggccatatttgtcctcaacatcaa

SEQ ID NO: 2414767 - DNA, 25 bp, Homo sapien
tgctccttcacgatgctggccatat

SEQ ID NO: 2414768 - DNA, 25 bp, Homo sapien
cactgactctagtgctgtccatgcc

SEQ ID NO: 2414769 - DNA, 25 bp, Homo sapien
tgactctagtgctgtccatgccttt

SEQ ID NO: 2414770 - DNA, 25 bp, Homo sapien
actgactctagtgctgtccatgcct

SEQ ID NO: 2414771 - DNA, 25 bp, Homo sapien
ctccactgactctagtgctgtccat

SEQ ID NO: 2414772 - DNA, 25 bp, Homo sapien
actttgtcaaaaggacagtgagtaa

SEQ ID NO: 2414773 - DNA, 25 bp, Homo sapien
atgtactttgtcaaaaggacagtga

SEQ ID NO: 2414774 - DNA, 25 bp, Homo sapien
aaagcctcttcaacatgtactttgt

SEQ ID NO: 2414775 - DNA, 25 bp, Homo sapien
agcctcttcaacatgtactttgtca

SEQ ID NO: 2414776 - DNA, 25 bp, Homo sapien
tccaggatctataaagcctctgaag

SEQ ID NO: 2414777 - DNA, 25 bp, Homo sapien
cctctgaagaaactcatgaatcctg

SEQ ID NO: 2414778 - DNA, 25 bp, Homo sapien
ttttgcaaacaatttccaggatcta

SEQ ID NO: 2414779 - DNA, 25 bp, Homo sapien
tctggaaactctgctacctctgagg

SEQ ID NO: 2414780 - DNA, 25 bp, Homo sapien
tatgttgttagtccaccacagggca

SEQ ID NO: 2414781 - DNA, 25 bp, Homo sapien
catctggcaacacaacgtactgtgg

SEQ ID NO: 2414782 - DNA, 25 bp, Homo sapien
gagagagtatcctactgcatacagg

SEQ ID NO: 2414783 - DNA, 25 bp, Homo sapien
tattacttggcagaagacacactca

SEQ ID NO: 2414784 - DNA, 25 bp, Homo sapien
caaatgaagacataactttattgcc

SEQ ID NO: 2414785 - DNA, 25 bp, Homo sapien
ccttgcgccgttcaggagttcccag

SEQ ID NO: 2414786 - DNA, 25 bp, Homo sapien
tgtactagacaaggactcgccactc

SEQ ID NO: 2414787 - DNA, 25 bp, Homo sapien
cttccggctcgtttttgatgagctc

SEQ ID NO: 2414788 - DNA, 25 bp, Homo sapien
gtgagcaaagaccaaccataagagg

SEQ ID NO: 2414789 - DNA, 25 bp, Homo sapien
gaatcacacttgctaataatctcag

SEQ ID NO: 2414790 - DNA, 25 bp, Homo sapien
cctcttaataagcaaaagtggcatt

SEQ ID NO: 2414791 - DNA, 25 bp, Homo sapien
ccataagaggtgtctaaacaaaagt

SEQ ID NO: 2414792 - DNA, 25 bp, Homo sapien
aagtgggccaccatactccttggtt

SEQ ID NO: 2414793 - DNA, 25 bp, Homo sapien
gtgggccaccatactccttggttgt

SEQ ID NO: 2414794 - DNA, 25 bp, Homo sapien
agtgggccaccatactccttggttg

SEQ ID NO: 2414795 - DNA, 25 bp, Homo sapien
ccttctccgaggcattgccagtttt

SEQ ID NO: 2414796 - DNA, 25 bp, Homo sapien
catccttctccgaggcattgccagt

SEQ ID NO: 2414797 - DNA, 25 bp, Homo sapien
cttctccgaggcattgccagttttc

SEQ ID NO: 2414798 - DNA, 25 bp, Homo sapien
atccttctccgaggcattgccagtt

SEQ ID NO: 2414799 - DNA, 25 bp, Homo sapien
tgctttatcacgtgatgtcagtgtc

SEQ ID NO: 2414800 - DNA, 25 bp, Homo sapien
aggctgctctccttatatcacacct

SEQ ID NO: 2414801 - DNA, 25 bp, Homo sapien
ctcatctgcttacatggatcattcc

SEQ ID NO: 2414802 - DNA, 25 bp, Homo sapien
gcttacatggatcattcctaaaaat

SEQ ID NO: 2414803 - DNA, 25 bp, Homo sapien
ctgactggaaatagtgacacatgct

SEQ ID NO: 2414804 - DNA, 25 bp, Homo sapien
gtaataggcacataaagaacaccag

SEQ ID NO: 2414805 - DNA, 25 bp, Homo sapien
gaacaccagtatctgctaaagcata

SEQ ID NO: 2414806 - DNA, 25 bp, Homo sapien
tgtttagctaagtacgggcactgaa

SEQ ID NO: 2414807 - DNA, 25 bp, Homo sapien
tcaagaattcacgtaagtctccggc

SEQ ID NO: 2414808 - DNA, 25 bp, Homo sapien
taaagatgaccacctatccatgcca

SEQ ID NO: 2414809 - DNA, 25 bp, Homo sapien
cattgcttcttagtgtcctggctat

SEQ ID NO: 2414810 - DNA, 25 bp, Homo sapien
tggctatttccagtatcccagccaa

SEQ ID NO: 2414811 - DNA, 25 bp, Homo sapien
tccctattaacatgaggtgcatatt

SEQ ID NO: 2414812 - DNA, 25 bp, Homo sapien
tatccctattaacatgaggtgcata

SEQ ID NO: 2414813 - DNA, 25 bp, Homo sapien
ccctattaacatgaggtgcatattt

SEQ ID NO: 2414814 - DNA, 25 bp, Homo sapien
atccctattaacatgaggtgcatat

SEQ ID NO: 2414815 - DNA, 25 bp, Homo sapien
tcgattgcacaacttatccagtggc

SEQ ID NO: 2414816 - DNA, 25 bp, Homo sapien
tgcagcactccctattaaatgaaag

SEQ ID NO: 2414817 - DNA, 25 bp, Homo sapien
ggctttgatggaccccaactgattg

SEQ ID NO: 2414818 - DNA, 25 bp, Homo sapien
tatggcaacaggacaaaatgatcga

SEQ ID NO: 2414819 - DNA, 25 bp, Homo sapien
tagtagattctactttagttctaaa

SEQ ID NO: 2414820 - DNA, 25 bp, Homo sapien
aatttgaatatatcatgactttctg

SEQ ID NO: 2414821 - DNA, 25 bp, Homo sapien
tcaataattttgatacatgagtaaa

SEQ ID NO: 2414822 - DNA, 25 bp, Homo sapien
tgaatatgacaatggcctggtagcc

SEQ ID NO: 2414823 - DNA, 25 bp, Homo sapien
agccagagatgttatgctggcttct

SEQ ID NO: 2414824 - DNA, 25 bp, Homo sapien
gccagagatgttatgctggcttctt

SEQ ID NO: 2414825 - DNA, 25 bp, Homo sapien
gcagccagagatgttatgctggctt

SEQ ID NO: 2414826 - DNA, 25 bp, Homo sapien
cagccagagatgttatgctggcttc

SEQ ID NO: 2414827 - DNA, 25 bp, Homo sapien
tcaaaaagtgagtgtaggcacaata

SEQ ID NO: 2414828 - DNA, 25 bp, Homo sapien
tgggagtcctatggccacaagtctc

SEQ ID NO: 2414829 - DNA, 25 bp, Homo sapien
tgaaattcctcagagtgaggcttgt

SEQ ID NO: 2414830 - DNA, 25 bp, Homo sapien
caagtctcttgcgtcagcagagaaa

SEQ ID NO: 2414831 - DNA, 25 bp, Homo sapien
tcagagtgaggcttgttgggaaaac

SEQ ID NO: 2414832 - DNA, 25 bp, Homo sapien
gtgaaaggctgggagcccgtcactc

SEQ ID NO: 2414833 - DNA, 25 bp, Homo sapien
ttccccatacggagaggctggtcgc

SEQ ID NO: 2414834 - DNA, 25 bp, Homo sapien
gaaaggctgggagcccgtcactctc

SEQ ID NO: 2414835 - DNA, 25 bp, Homo sapien
catctgcttccccatacggagaggc

SEQ ID NO: 2414836 - DNA, 25 bp, Homo sapien
cactctgatagaccttattgaagac

SEQ ID NO: 2414837 - DNA, 25 bp, Homo sapien
ctagttttacactctgatagacctt

SEQ ID NO: 2414838 - DNA, 25 bp, Homo sapien
tacactctgatagaccttattgaag

SEQ ID NO: 2414839 - DNA, 25 bp, Homo sapien
gttttacactctgatagaccttatt

SEQ ID NO: 2414840 - DNA, 25 bp, Homo sapien
cttgccatcagtttctgatatagaa

SEQ ID NO: 2414841 - DNA, 25 bp, Homo sapien
gatatagaacatgccaatctccata

SEQ ID NO: 2414842 - DNA, 25 bp, Homo sapien
catcagtttctgatatagaacatgc

SEQ ID NO: 2414843 - DNA, 25 bp, Homo sapien
gaacatgccaatctccatacttctc

SEQ ID NO: 2414844 - DNA, 25 bp, Homo sapien
gatgttctctgcattgagatcaagt

SEQ ID NO: 2414845 - DNA, 25 bp, Homo sapien
gagatcaagtacttcgttacacctt

SEQ ID NO: 2414846 - DNA, 25 bp, Homo sapien
catgtttagtttctgagatgttctc

SEQ ID NO: 2414847 - DNA, 25 bp, Homo sapien
cttgccacatgtttagtttctgaga

SEQ ID NO: 2414848 - DNA, 25 bp, Homo sapien
atcatcaataattttggccatcagc

SEQ ID NO: 2414849 - DNA, 25 bp, Homo sapien
actatcatcaataattttggccatc

SEQ ID NO: 2414850 - DNA, 25 bp, Homo sapien
taattttggccatcagcattcccaa

SEQ ID NO: 2414851 - DNA, 25 bp, Homo sapien
atcaataattttggccatcagcatt

SEQ ID NO: 2414852 - DNA, 25 bp, Homo sapien
tatctctactttacggccaaggaag

SEQ ID NO: 2414853 - DNA, 25 bp, Homo sapien
tagcaactaagatatcacactgagc

SEQ ID NO: 2414854 - DNA, 25 bp, Homo sapien
tataggaatcacaacttttgggcag

SEQ ID NO: 2414855 - DNA, 25 bp, Homo sapien
taatcagcgctattgcctaaaagtc

SEQ ID NO: 2414856 - DNA, 25 bp, Homo sapien
acaacaaaaacgagcctccccagct

SEQ ID NO: 2414857 - DNA, 25 bp, Homo sapien
caacaacaaaaacgagcctccccag

SEQ ID NO: 2414858 - DNA, 25 bp, Homo sapien
caacaaaaacgagcctccccagctc

SEQ ID NO: 2414859 - DNA, 25 bp, Homo sapien
agttctggcaatacccatcactgca

SEQ ID NO: 2414860 - DNA, 25 bp, Homo sapien
tctggcaatacccatcactgcaggc

SEQ ID NO: 2414861 - DNA, 25 bp, Homo sapien
cctaagttctggcaatacccatcac

SEQ ID NO: 2414862 - DNA, 25 bp, Homo sapien
gcaatacccatcactgcaggcaagg

SEQ ID NO: 2414863 - DNA, 25 bp, Homo sapien
tagtagagggcaagtagtacatcag

SEQ ID NO: 2414864 - DNA, 25 bp, Homo sapien
agagtggttcatagctggtccgtga

SEQ ID NO: 2414865 - DNA, 25 bp, Homo sapien
tcactaatatccaatttataggaga

SEQ ID NO: 2414866 - DNA, 25 bp, Homo sapien
gcaagtagtacatcagtgtgatttt

SEQ ID NO: 2414867 - DNA, 25 bp, Homo sapien
ggtacttgagcagatccaaaagtgt

SEQ ID NO: 2414868 - DNA, 25 bp, Homo sapien
caggatgctcttcaggtacttgagc

SEQ ID NO: 2414869 - DNA, 25 bp, Homo sapien
ttgctttgtctctgtatactcttaa

SEQ ID NO: 2414870 - DNA, 25 bp, Homo sapien
tcttcaggtacttgagcagatccaa

SEQ ID NO: 2414871 - DNA, 25 bp, Homo sapien
caagatggaatactattatatgttc

SEQ ID NO: 2414872 - DNA, 25 bp, Homo sapien
tgtagcacatgccacaggattctga

SEQ ID NO: 2414873 - DNA, 25 bp, Homo sapien
gttcctgtagcacatgccacaggat

SEQ ID NO: 2414874 - DNA, 25 bp, Homo sapien
tatgcaccacaataccaccttcaat

SEQ ID NO: 2414875 - DNA, 25 bp, Homo sapien
tcaatgcatctgatccttaggttgg

SEQ ID NO: 2414876 - DNA, 25 bp, Homo sapien
tgaaaccccatgcatctccacaatg

SEQ ID NO: 2414877 - DNA, 25 bp, Homo sapien
ggcaggtagccctaattcgttagta

SEQ ID NO: 2414878 - DNA, 25 bp, Homo sapien
tgaaagtttcaacggatttgctgcc

SEQ ID NO: 2414879 - DNA, 25 bp, Homo sapien
aaggttcagtggttccaaactggca

SEQ ID NO: 2414880 - DNA, 25 bp, Homo sapien
caaactggcagcattcaaattgggt

SEQ ID NO: 2414881 - DNA, 25 bp, Homo sapien
aaccacctgtcctaaaacgacattg

SEQ ID NO: 2414882 - DNA, 25 bp, Homo sapien
taaaataccatatccctataaacag

SEQ ID NO: 2414883 - DNA, 25 bp, Homo sapien
gcagctctacaatgaaggcgcaaga

SEQ ID NO: 2414884 - DNA, 25 bp, Homo sapien
caagagctgggaacaactttgagtc

SEQ ID NO: 2414885 - DNA, 25 bp, Homo sapien
tctaaatcttgtttcggtctggtcc

SEQ ID NO: 2414886 - DNA, 25 bp, Homo sapien
gcccactgagcagaatgcagctcta

SEQ ID NO: 2414887 - DNA, 25 bp, Homo sapien
agtactgctgaggttttactcccag

SEQ ID NO: 2414888 - DNA, 25 bp, Homo sapien
caaagggagggagtactgctgaggt

SEQ ID NO: 2414889 - DNA, 25 bp, Homo sapien
ctcccaggatccaagggaaaaggat

SEQ ID NO: 2414890 - DNA, 25 bp, Homo sapien
tgaatgtggagaaatgcaacacccc

SEQ ID NO: 2414891 - DNA, 25 bp, Homo sapien
gatgtgtgaactctcaattagtaag

SEQ ID NO: 2414892 - DNA, 25 bp, Homo sapien
tattggacaagcaaaaccatacgcc

SEQ ID NO: 2414893 - DNA, 25 bp, Homo sapien
tacgccacaatatctccagagaaga

SEQ ID NO: 2414894 - DNA, 25 bp, Homo sapien
gaactctcaattagtaagtaaagaa

SEQ ID NO: 2414895 - DNA, 25 bp, Homo sapien
ggaatatgtggcattctcctaaagc

SEQ ID NO: 2414896 - DNA, 25 bp, Homo sapien
cataatgaaggaatatgtggcattc

SEQ ID NO: 2414897 - DNA, 25 bp, Homo sapien
gaatatgtggcattctcctaaagca

SEQ ID NO: 2414898 - DNA, 25 bp, Homo sapien
cctgatcataatgaaggaatatgtg

SEQ ID NO: 2414899 - DNA, 25 bp, Homo sapien
gcgttactttatcctcaatactctt

SEQ ID NO: 2414900 - DNA, 25 bp, Homo sapien
ggcttttctaatatgtgaccacatt

SEQ ID NO: 2414901 - DNA, 25 bp, Homo sapien
tgaccacattcaagcgttactttat

SEQ ID NO: 2414902 - DNA, 25 bp, Homo sapien
tccattgcttcacttctagaatgtt

SEQ ID NO: 2414903 - DNA, 25 bp, Homo sapien
gaggtaaatcagggtcagtaagcat

SEQ ID NO: 2414904 - DNA, 25 bp, Homo sapien
tgaggtaaatcagggtcagtaagca

SEQ ID NO: 2414905 - DNA, 25 bp, Homo sapien
ctgaggtaaatcagggtcagtaagc

SEQ ID NO: 2414906 - DNA, 25 bp, Homo sapien
gaaaagcacaatttccctttgtcac

SEQ ID NO: 2414907 - DNA, 25 bp, Homo sapien
aaagcacaatttccctttgtcacag

SEQ ID NO: 2414908 - DNA, 25 bp, Homo sapien
caatttccctttgtcacagcagcca

SEQ ID NO: 2414909 - DNA, 25 bp, Homo sapien
gctggaaaagcacaatttccctttg

SEQ ID NO: 2414910 - DNA, 25 bp, Homo sapien
tgtcaagtgagtccaaaccttctaa

SEQ ID NO: 2414911 - DNA, 25 bp, Homo sapien
gtcaagtgagtccaaaccttctaaa

SEQ ID NO: 2414912 - DNA, 25 bp, Homo sapien
tcaagtgagtccaaaccttctaaac

SEQ ID NO: 2414913 - DNA, 25 bp, Homo sapien
ctgtcaagtgagtccaaaccttcta

SEQ ID NO: 2414914 - DNA, 25 bp, Homo sapien
caaagtggtgcgaacgtcctggcaa

SEQ ID NO: 2414915 - DNA, 25 bp, Homo sapien
tacagattctaagctggctggcaag

SEQ ID NO: 2414916 - DNA, 25 bp, Homo sapien
cctttgacacgaaatgacagaggca

SEQ ID NO: 2414917 - DNA, 25 bp, Homo sapien
taaactccataaaacacgatgtgcg

SEQ ID NO: 2414918 - DNA, 25 bp, Homo sapien
caacaggagatagtgtgcattcttc

SEQ ID NO: 2414919 - DNA, 25 bp, Homo sapien
gatagtgtgcattcttcacacacgc

SEQ ID NO: 2414920 - DNA, 25 bp, Homo sapien
tgtgcattcttcacacacgcatgca

SEQ ID NO: 2414921 - DNA, 25 bp, Homo sapien
caggagatagtgtgcattcttcaca

SEQ ID NO: 2414922 - DNA, 25 bp, Homo sapien
cattgtccggaacaggtggtcaagg

SEQ ID NO: 2414923 - DNA, 25 bp, Homo sapien
aaacctgtccacattcattgtccgg

SEQ ID NO: 2414924 - DNA, 25 bp, Homo sapien
cttctggtggaacctgtaaaacctg

SEQ ID NO: 2414925 - DNA, 25 bp, Homo sapien
tggtcaagggcatatgtagtggcct

SEQ ID NO: 2414926 - DNA, 25 bp, Homo sapien
tcaaaactgtctgatcctgcctcct

SEQ ID NO: 2414927 - DNA, 25 bp, Homo sapien
gggcactcctgggtggcctgcacta

SEQ ID NO: 2414928 - DNA, 25 bp, Homo sapien
cactacgtttgaggcgaaggcttac

SEQ ID NO: 2414929 - DNA, 25 bp, Homo sapien
gaaggcttaccttcctatcagcttg

SEQ ID NO: 2414930 - DNA, 25 bp, Homo sapien
gactgattgtccagagcacaatgat

SEQ ID NO: 2414931 - DNA, 25 bp, Homo sapien
gattgtccagagcacaatgatcttc

SEQ ID NO: 2414932 - DNA, 25 bp, Homo sapien
ttgagactgattgtccagagcacaa

SEQ ID NO: 2414933 - DNA, 25 bp, Homo sapien
tgtccagagcacaatgatcttcaac

SEQ ID NO: 2414934 - DNA, 25 bp, Homo sapien
ccagacaattaagtgtttaggaatc

SEQ ID NO: 2414935 - DNA, 25 bp, Homo sapien
gaaactttaagactggtcaacacta

SEQ ID NO: 2414936 - DNA, 25 bp, Homo sapien
gattcatcacctttagacactatcc

SEQ ID NO: 2414937 - DNA, 25 bp, Homo sapien
taggaatcttgcactatctatcata

SEQ ID NO: 2414938 - DNA, 25 bp, Homo sapien
agattacacatatgcacttatgaag

SEQ ID NO: 2414939 - DNA, 25 bp, Homo sapien
taaatttgaaaccaatgttgacatt

SEQ ID NO: 2414940 - DNA, 25 bp, Homo sapien
ggtggtgatgtggtaattaatagta

SEQ ID NO: 2414941 - DNA, 25 bp, Homo sapien
ccaggaataatgagcagagatgaat

SEQ ID NO: 2414942 - DNA, 25 bp, Homo sapien
gaattgggcacgaacgaacatttga

SEQ ID NO: 2414943 - DNA, 25 bp, Homo sapien
gagatatatacacggaatgatctcc

SEQ ID NO: 2414944 - DNA, 25 bp, Homo sapien
attttctatatgtgatcaacatcca

SEQ ID NO: 2414945 - DNA, 25 bp, Homo sapien
tatgattgatggagatatatacacg

SEQ ID NO: 2414946 - DNA, 25 bp, Homo sapien
tgtatttggaagaaagtctcttgaa

SEQ ID NO: 2414947 - DNA, 25 bp, Homo sapien
tgaactccgattcaaagcgtcagga

SEQ ID NO: 2414948 - DNA, 25 bp, Homo sapien
tttcaccctcaccagaatagatgcc

SEQ ID NO: 2414949 - DNA, 25 bp, Homo sapien
actatctgcttatcataaaagccca

SEQ ID NO: 2414950 - DNA, 25 bp, Homo sapien
tggagcttttatgttacctacccta

SEQ ID NO: 2414951 - DNA, 25 bp, Homo sapien
ctaactaactcttaaagtagaattg

SEQ ID NO: 2414952 - DNA, 25 bp, Homo sapien
agtagaattgtccagtagaaataga

SEQ ID NO: 2414953 - DNA, 25 bp, Homo sapien
ctggagcttttatgttacctaccct

SEQ ID NO: 2414954 - DNA, 25 bp, Homo sapien
tcacaggaggtctcatgagcagtta

SEQ ID NO: 2414955 - DNA, 25 bp, Homo sapien
gggtagtgccaagctcaaatcatgc

SEQ ID NO: 2414956 - DNA, 25 bp, Homo sapien
ggaagactggcctttgaagctcaca

SEQ ID NO: 2414957 - DNA, 25 bp, Homo sapien
gccctgatacccatgtcctaagaga

SEQ ID NO: 2414958 - DNA, 25 bp, Homo sapien
ggctacagatctcagacagttgaca

SEQ ID NO: 2414959 - DNA, 25 bp, Homo sapien
tacactctggtctataggctacaga

SEQ ID NO: 2414960 - DNA, 25 bp, Homo sapien
ttgaggagctttggtctggcaacac

SEQ ID NO: 2414961 - DNA, 25 bp, Homo sapien
ccttgtaccagatagaagcagtgac

SEQ ID NO: 2414962 - DNA, 25 bp, Homo sapien
gattctggttgacccaagatctgcc

SEQ ID NO: 2414963 - DNA, 25 bp, Homo sapien
tagtaatagggatgagcacagtgac

SEQ ID NO: 2414964 - DNA, 25 bp, Homo sapien
gaacaattggatcacaaagcgacat

SEQ ID NO: 2414965 - DNA, 25 bp, Homo sapien
tggtctaacgtgagaaatcaagctg

SEQ ID NO: 2414966 - DNA, 25 bp, Homo sapien
ctactcattatgcatgacggcatac

SEQ ID NO: 2414967 - DNA, 25 bp, Homo sapien
tactcattatgcatgacggcatacc

SEQ ID NO: 2414968 - DNA, 25 bp, Homo sapien
actcattatgcatgacggcatacca

SEQ ID NO: 2414969 - DNA, 25 bp, Homo sapien
tcattatgcatgacggcataccaac

SEQ ID NO: 2414970 - DNA, 25 bp, Homo sapien
ccgtcactttcagatgacctcactt

SEQ ID NO: 2414971 - DNA, 25 bp, Homo sapien
tttcagatgacctcacttcccacag

SEQ ID NO: 2414972 - DNA, 25 bp, Homo sapien
gtcactttcagatgacctcacttcc

SEQ ID NO: 2414973 - DNA, 25 bp, Homo sapien
caccgtcactttcagatgacctcac

SEQ ID NO: 2414974 - DNA, 25 bp, Homo sapien
tcactttctgcaaccctccttaaaa

SEQ ID NO: 2414975 - DNA, 25 bp, Homo sapien
ctgcaggaaagatgcgttgtcaggg

SEQ ID NO: 2414976 - DNA, 25 bp, Homo sapien
aagatgcgttgtcaggggactaggc

SEQ ID NO: 2414977 - DNA, 25 bp, Homo sapien
gatgcgttgtcaggggactaggcat

SEQ ID NO: 2414978 - DNA, 25 bp, Homo sapien
gaaagatgcgttgtcaggggactag

SEQ ID NO: 2414979 - DNA, 25 bp, Homo sapien
tattcaacgtatctgatgcattggt

SEQ ID NO: 2414980 - DNA, 25 bp, Homo sapien
tggtttcaaagtcctaattgtgatg

SEQ ID NO: 2414981 - DNA, 25 bp, Homo sapien
gagacttcaacactttaggtcatat

SEQ ID NO: 2414982 - DNA, 25 bp, Homo sapien
ttacagaaaatcaggctttgaagga

SEQ ID NO: 2414983 - DNA, 25 bp, Homo sapien
tgtgactcgagtaatccctttgatc

SEQ ID NO: 2414984 - DNA, 25 bp, Homo sapien
ctgaggttactaacacaaacctggg

SEQ ID NO: 2414985 - DNA, 25 bp, Homo sapien
agttctttgacttgggccccaacat

SEQ ID NO: 2414986 - DNA, 25 bp, Homo sapien
ctttgatcgttacacctgaggttac

SEQ ID NO: 2414987 - DNA, 25 bp, Homo sapien
gtcttcaccagcagcgacagagtca

SEQ ID NO: 2414988 - DNA, 25 bp, Homo sapien
tggcaaaaagcctgcagactttgct

SEQ ID NO: 2414989 - DNA, 25 bp, Homo sapien
ggagtaagttggacactgttggcaa

SEQ ID NO: 2414990 - DNA, 25 bp, Homo sapien
caccacaggagcgagtgacatcatt

SEQ ID NO: 2414991 - DNA, 25 bp, Homo sapien
agtacgctttgtcagagagatgctc

SEQ ID NO: 2414992 - DNA, 25 bp, Homo sapien
ccgaatgtaatccttctatgagatg

SEQ ID NO: 2414993 - DNA, 25 bp, Homo sapien
cactggagtgcttaacgaagtacgc

SEQ ID NO: 2414994 - DNA, 25 bp, Homo sapien
gataatgatgccgaatgtaatcctt

SEQ ID NO: 2414995 - DNA, 25 bp, Homo sapien
ggattatcagaattcgtatcatcca

SEQ ID NO: 2414996 - DNA, 25 bp, Homo sapien
gatgtggcaaaattttcagcctctg

SEQ ID NO: 2414997 - DNA, 25 bp, Homo sapien
attcgtatcatccaatgtgatgtgg

SEQ ID NO: 2414998 - DNA, 25 bp, Homo sapien
tgtgatgtggcaaaattttcagcct

SEQ ID NO: 2414999 - DNA, 25 bp, Homo sapien
gaggactttgccatgatcgtgaata

SEQ ID NO: 2415000 - DNA, 25 bp, Homo sapien
tgccatcgaagactcacaccaggct

SEQ ID NO: 2415001 - DNA, 25 bp, Homo sapien
ttgtgcactgccatcgaagactcac

SEQ ID NO: 2415002 - DNA, 25 bp, Homo sapien
gactttgccatgatcgtgaatataa

SEQ ID NO: 2415003 - DNA, 25 bp, Homo sapien
cacaagtccacgaaaaacatcttta

SEQ ID NO: 2415004 - DNA, 25 bp, Homo sapien
tctttaacaagttagcagggccttc

SEQ ID NO: 2415005 - DNA, 25 bp, Homo sapien
cagggccttctccaatcgggttcct

SEQ ID NO: 2415006 - DNA, 25 bp, Homo sapien
gggttcctcctaactgcgttgatca

SEQ ID NO: 2415007 - DNA, 25 bp, Homo sapien
gcctacgtattatacttacctaaca

SEQ ID NO: 2415008 - DNA, 25 bp, Homo sapien
attgaatgcaacaggcaggcaacag

SEQ ID NO: 2415009 - DNA, 25 bp, Homo sapien
gattgaatgcaacaggcaggcaaca

SEQ ID NO: 2415010 - DNA, 25 bp, Homo sapien
aatagatgctattcccccttcatgg

SEQ ID NO: 2415011 - DNA, 25 bp, Homo sapien
atgacaacccagtgagccattgccc

SEQ ID NO: 2415012 - DNA, 25 bp, Homo sapien
ccaggagaaccctagagaatgggaa

SEQ ID NO: 2415013 - DNA, 25 bp, Homo sapien
tagatactgcgaaggtatacagggt

SEQ ID NO: 2415014 - DNA, 25 bp, Homo sapien
ttctcttgagaaccgaattggtctg

SEQ ID NO: 2415015 - DNA, 25 bp, Homo sapien
cactttcttggtttttcagatacct

SEQ ID NO: 2415016 - DNA, 25 bp, Homo sapien
taacactttcttggtttttcagata

SEQ ID NO: 2415017 - DNA, 25 bp, Homo sapien
ataacactttcttggtttttcagat

SEQ ID NO: 2415018 - DNA, 25 bp, Homo sapien
tggaggtacgaataacactttcttg

SEQ ID NO: 2415019 - DNA, 25 bp, Homo sapien
cagtgatttgagagttgtgtagaca

SEQ ID NO: 2415020 - DNA, 25 bp, Homo sapien
agagttgtgtagacagccacaaaga

SEQ ID NO: 2415021 - DNA, 25 bp, Homo sapien
tttgagagttgtgtagacagccaca

SEQ ID NO: 2415022 - DNA, 25 bp, Homo sapien
tgatttgagagttgtgtagacagcc

SEQ ID NO: 2415023 - DNA, 25 bp, Homo sapien
taccagagcacagaatagcagattt

SEQ ID NO: 2415024 - DNA, 25 bp, Homo sapien
tatgaaggaccagttctctggagat

SEQ ID NO: 2415025 - DNA, 25 bp, Homo sapien
tggagataatgtcacatttatccca

SEQ ID NO: 2415026 - DNA, 25 bp, Homo sapien
tctgttgtgattgtcggagggaagt

SEQ ID NO: 2415027 - DNA, 25 bp, Homo sapien
tgctggataactaaggagatcacca

SEQ ID NO: 2415028 - DNA, 25 bp, Homo sapien
tctgctggataactaaggagatcac

SEQ ID NO: 2415029 - DNA, 25 bp, Homo sapien
ctgctggataactaaggagatcacc

SEQ ID NO: 2415030 - DNA, 25 bp, Homo sapien
atctgctggataactaaggagatca

SEQ ID NO: 2415031 - DNA, 25 bp, Homo sapien
cacatgctgtgggcgcagaggcaaa

SEQ ID NO: 2415032 - DNA, 25 bp, Homo sapien
tgtttatgagtttaagattcttatt

SEQ ID NO: 2415033 - DNA, 25 bp, Homo sapien
taagcaggtatgtttatgagtttaa

SEQ ID NO: 2415034 - DNA, 25 bp, Homo sapien
tcacatgctgtgggcgcagaggcaa

SEQ ID NO: 2415035 - DNA, 25 bp, Homo sapien
tactcagaggatcataagcttcgtc

SEQ ID NO: 2415036 - DNA, 25 bp, Homo sapien
tatacctgttcatggtgactgggct

SEQ ID NO: 2415037 - DNA, 25 bp, Homo sapien
gaggatcataagcttcgtcagcaaa

SEQ ID NO: 2415038 - DNA, 25 bp, Homo sapien
cagcaaacacggtgagtgtatacct

SEQ ID NO: 2415039 - DNA, 25 bp, Homo sapien
tcaatggtgcacaagtgatttcatc

SEQ ID NO: 2415040 - DNA, 25 bp, Homo sapien
tgtcaatggtgcacaagtgatttca

SEQ ID NO: 2415041 - DNA, 25 bp, Homo sapien
aattgtcaatggtgcacaagtgatt

SEQ ID NO: 2415042 - DNA, 25 bp, Homo sapien
caatggtgcacaagtgatttcatcc

SEQ ID NO: 2415043 - DNA, 25 bp, Homo sapien
cagcaccatttatggtcaccatatt

SEQ ID NO: 2415044 - DNA, 25 bp, Homo sapien
caaaatctattcttcctggtttgcc

SEQ ID NO: 2415045 - DNA, 25 bp, Homo sapien
tggtcaccatatttgcacatgacaa

SEQ ID NO: 2415046 - DNA, 25 bp, Homo sapien
tatttgcacatgacaaaatctattc

SEQ ID NO: 2415047 - DNA, 25 bp, Homo sapien
tgttgttgttagagggctgatgcat

SEQ ID NO: 2415048 - DNA, 25 bp, Homo sapien
tgcattccctaatcaaacggctgat

SEQ ID NO: 2415049 - DNA, 25 bp, Homo sapien
gagattttagtcaggtgtcctctta

SEQ ID NO: 2415050 - DNA, 25 bp, Homo sapien
tcagttatgttggtcacgcttagct

SEQ ID NO: 2415051 - DNA, 25 bp, Homo sapien
cgcttagctgccctaacattacaaa

SEQ ID NO: 2415052 - DNA, 25 bp, Homo sapien
cggagaaggaatgagagtctggtgt

SEQ ID NO: 2415053 - DNA, 25 bp, Homo sapien
gagaaggaatgagagtctggtgttt

SEQ ID NO: 2415054 - DNA, 25 bp, Homo sapien
ggagaaggaatgagagtctggtgtt

SEQ ID NO: 2415055 - DNA, 25 bp, Homo sapien
tagtaactatattctttctatggag

SEQ ID NO: 2415056 - DNA, 25 bp, Homo sapien
ttgttcacttctagtaactatattc

SEQ ID NO: 2415057 - DNA, 25 bp, Homo sapien
cacttctagtaactatattctttct

SEQ ID NO: 2415058 - DNA, 25 bp, Homo sapien
tctagtaactatattctttctatgg

SEQ ID NO: 2415059 - DNA, 25 bp, Homo sapien
agaagcctgcagactctttgactgg

SEQ ID NO: 2415060 - DNA, 25 bp, Homo sapien
ctggaagaaactggttagacctaag

SEQ ID NO: 2415061 - DNA, 25 bp, Homo sapien
cctaagtcttgggtagtaaattgag

SEQ ID NO: 2415062 - DNA, 25 bp, Homo sapien
taaatgccgcctcaatatagatgct

SEQ ID NO: 2415063 - DNA, 25 bp, Homo sapien
ctttttggttatgattagtgctgtt

SEQ ID NO: 2415064 - DNA, 25 bp, Homo sapien
tttggttatgattagtgctgttata

SEQ ID NO: 2415065 - DNA, 25 bp, Homo sapien
ttttggttatgattagtgctgttat

SEQ ID NO: 2415066 - DNA, 25 bp, Homo sapien
tttttggttatgattagtgctgtta

SEQ ID NO: 2415067 - DNA, 25 bp, Homo sapien
tgtcatatctacgaaacaactgcac

SEQ ID NO: 2415068 - DNA, 25 bp, Homo sapien
tgtgaatagccatttgtcccaacat

SEQ ID NO: 2415069 - DNA, 25 bp, Homo sapien
cccactctgtgggttatgtttatac

SEQ ID NO: 2415070 - DNA, 25 bp, Homo sapien
gcatctttataggtacgtggtggct

SEQ ID NO: 2415071 - DNA, 25 bp, Homo sapien
tgtatcaaaatcatgttctgactca

SEQ ID NO: 2415072 - DNA, 25 bp, Homo sapien
tgtttaacctatgaaagaattgtac

SEQ ID NO: 2415073 - DNA, 25 bp, Homo sapien
aattgtacatggagctttatataac

SEQ ID NO: 2415074 - DNA, 25 bp, Homo sapien
catcatatgaacaaaccaatctttt

SEQ ID NO: 2415075 - DNA, 25 bp, Homo sapien
tataatacaattacataacatatgt

SEQ ID NO: 2415076 - DNA, 25 bp, Homo sapien
tataaaccagtaactaaatatattg

SEQ ID NO: 2415077 - DNA, 25 bp, Homo sapien
caggacatttcaatgaaaccattcc

SEQ ID NO: 2415078 - DNA, 25 bp, Homo sapien
caaacaaacccattttgcttttcag

SEQ ID NO: 2415079 - DNA, 25 bp, Homo sapien
cacattgttagaataatgatgaggt

SEQ ID NO: 2415080 - DNA, 25 bp, Homo sapien
cacttaccagtggtccctcaacagt

SEQ ID NO: 2415081 - DNA, 25 bp, Homo sapien
tactgcatccctttgcctataagag

SEQ ID NO: 2415082 - DNA, 25 bp, Homo sapien
cagatcatagcaatgatgttcacac

SEQ ID NO: 2415083 - DNA, 25 bp, Homo sapien
tacactggttcccaaccatatcaga

SEQ ID NO: 2415084 - DNA, 25 bp, Homo sapien
gctgttcaggtgcttatttagacaa

SEQ ID NO: 2415085 - DNA, 25 bp, Homo sapien
gccaccatgactgccctaaggtatt

SEQ ID NO: 2415086 - DNA, 25 bp, Homo sapien
gcatcaatggaaataacggtcttta

SEQ ID NO: 2415087 - DNA, 25 bp, Homo sapien
gagacaccatactacaataataaat

SEQ ID NO: 2415088 - DNA, 25 bp, Homo sapien
tatgctgtgatacccaaggcttctg

SEQ ID NO: 2415089 - DNA, 25 bp, Homo sapien
tatgggatgtaattatcagtggata

SEQ ID NO: 2415090 - DNA, 25 bp, Homo sapien
tagaaaactgcaacctgcaagagcc

SEQ ID NO: 2415091 - DNA, 25 bp, Homo sapien
gaattgttagctaatggaggccaca

SEQ ID NO: 2415092 - DNA, 25 bp, Homo sapien
aattgttagctaatggaggccacaa

SEQ ID NO: 2415093 - DNA, 25 bp, Homo sapien
ttgttagctaatggaggccacaaag

SEQ ID NO: 2415094 - DNA, 25 bp, Homo sapien
attgttagctaatggaggccacaaa

SEQ ID NO: 2415095 - DNA, 25 bp, Homo sapien
tttcagattcaaccaggagtcgact

SEQ ID NO: 2415096 - DNA, 25 bp, Homo sapien
tgtgtgtaccaaagcaaactgcata

SEQ ID NO: 2415097 - DNA, 25 bp, Homo sapien
taccatcaggcatattccaaaacag

SEQ ID NO: 2415098 - DNA, 25 bp, Homo sapien
cagagaagttgcatatgctgcagta

SEQ ID NO: 2415099 - DNA, 25 bp, Homo sapien
ggagcaaatcattcttattggttga

SEQ ID NO: 2415100 - DNA, 25 bp, Homo sapien
gatgctatgcatacaacaggtctct

SEQ ID NO: 2415101 - DNA, 25 bp, Homo sapien
gaaaaattttgctgtataccatctg

SEQ ID NO: 2415102 - DNA, 25 bp, Homo sapien
cacggagaagttcacacaagagggt

SEQ ID NO: 2415103 - DNA, 25 bp, Homo sapien
tctctgtgaaagtaagatggagcca

SEQ ID NO: 2415104 - DNA, 25 bp, Homo sapien
tctaagcacaaagagaatctctgtg

SEQ ID NO: 2415105 - DNA, 25 bp, Homo sapien
gactggcttttaatcctaggtcaaa

SEQ ID NO: 2415106 - DNA, 25 bp, Homo sapien
gatacattcgtgtgtaaaacagggt

SEQ ID NO: 2415107 - DNA, 25 bp, Homo sapien
gcgaaaaccaggatagcacccttat

SEQ ID NO: 2415108 - DNA, 25 bp, Homo sapien
aattcgtgtgctcaaaacaggaccc

SEQ ID NO: 2415109 - DNA, 25 bp, Homo sapien
tatccttatagcatgtcccaacgcc

SEQ ID NO: 2415110 - DNA, 25 bp, Homo sapien
ttatttcagtaaggccaccacgaag

SEQ ID NO: 2415111 - DNA, 25 bp, Homo sapien
gctgccctcgggactctagtatgct

SEQ ID NO: 2415112 - DNA, 25 bp, Homo sapien
ggatgcttcacaatcgagctgcagg

SEQ ID NO: 2415113 - DNA, 25 bp, Homo sapien
tcactgggcatgtttggtctctgct

SEQ ID NO: 2415114 - DNA, 25 bp, Homo sapien
caaatcctgcaaatgtttacgggat

SEQ ID NO: 2415115 - DNA, 25 bp, Homo sapien
tgctggctgcttccctgtggccatt

SEQ ID NO: 2415116 - DNA, 25 bp, Homo sapien
gtggccatttctctttttcctctat

SEQ ID NO: 2415117 - DNA, 25 bp, Homo sapien
tttgctggctgcttccctgtggcca

SEQ ID NO: 2415118 - DNA, 25 bp, Homo sapien
cttttgctggctgcttccctgtggc

SEQ ID NO: 2415119 - DNA, 25 bp, Homo sapien
tacaatttgcccttcagttcagaga

SEQ ID NO: 2415120 - DNA, 25 bp, Homo sapien
tcttgatgtgatagcagtgtccgca

SEQ ID NO: 2415121 - DNA, 25 bp, Homo sapien
gatgccagactaattgctgccctaa

SEQ ID NO: 2415122 - DNA, 25 bp, Homo sapien
taaagtgttctcacgccctatgtgg

SEQ ID NO: 2415123 - DNA, 25 bp, Homo sapien
gagtcactgcctggtgggtcatcca

SEQ ID NO: 2415124 - DNA, 25 bp, Homo sapien
tcaaagagctaaggagtcactgcct

SEQ ID NO: 2415125 - DNA, 25 bp, Homo sapien
tggtgggtcatccacttccgacaga

SEQ ID NO: 2415126 - DNA, 25 bp, Homo sapien
gggtcatccacttccgacagagaag

SEQ ID NO: 2415127 - DNA, 25 bp, Homo sapien
tagcagcagccaatcaaatgataaa

SEQ ID NO: 2415128 - DNA, 25 bp, Homo sapien
tctcttctgaaaagttagcagcagc

SEQ ID NO: 2415129 - DNA, 25 bp, Homo sapien
aaaaagtatatgtatgggtctctct

SEQ ID NO: 2415130 - DNA, 25 bp, Homo sapien
ggattctatcagtctaaatggcttt

SEQ ID NO: 2415131 - DNA, 25 bp, Homo sapien
tctgtgtaatacgacaaggaccaaa

SEQ ID NO: 2415132 - DNA, 25 bp, Homo sapien
caaatgacattctatctttaggagg

SEQ ID NO: 2415133 - DNA, 25 bp, Homo sapien
gaacctcttccaaacacacctatta

SEQ ID NO: 2415134 - DNA, 25 bp, Homo sapien
ttatagaactagtggcctgtggagc

SEQ ID NO: 2415135 - DNA, 25 bp, Homo sapien
tttctactggcccttctggacttgc

SEQ ID NO: 2415136 - DNA, 25 bp, Homo sapien
gatgttaatgtgtccccttccactc

SEQ ID NO: 2415137 - DNA, 25 bp, Homo sapien
cactgctgagctgataaaaccttca

SEQ ID NO: 2415138 - DNA, 25 bp, Homo sapien
tggacttgcccctggtaatgtgatg

SEQ ID NO: 2415139 - DNA, 25 bp, Homo sapien
ttgtttcgatctagtccagctattg

SEQ ID NO: 2415140 - DNA, 25 bp, Homo sapien
tctagtccagctattgagctcttta

SEQ ID NO: 2415141 - DNA, 25 bp, Homo sapien
ttattttgtttcgatctagtccagc

SEQ ID NO: 2415142 - DNA, 25 bp, Homo sapien
aaacagcaacgtattattctaaaca

SEQ ID NO: 2415143 - DNA, 25 bp, Homo sapien
gagttaaacagtccctccatggtga

SEQ ID NO: 2415144 - DNA, 25 bp, Homo sapien
ggaaaactagttgacctgacaagaa

SEQ ID NO: 2415145 - DNA, 25 bp, Homo sapien
cattgtataaaccaaacgcccacgg

SEQ ID NO: 2415146 - DNA, 25 bp, Homo sapien
cacagcaggccactttaatgagaca

SEQ ID NO: 2415147 - DNA, 25 bp, Homo sapien
tacttgtccagctatttggagggct

SEQ ID NO: 2415148 - DNA, 25 bp, Homo sapien
ttatacttgtccagctatttggagg

SEQ ID NO: 2415149 - DNA, 25 bp, Homo sapien
tgttgcctgaaccacaaagggcgtc

SEQ ID NO: 2415150 - DNA, 25 bp, Homo sapien
ctggcggaatgaattcgttaggtgt

SEQ ID NO: 2415151 - DNA, 25 bp, Homo sapien
cacagcaacaggcaagggattccct

SEQ ID NO: 2415152 - DNA, 25 bp, Homo sapien
gcagaaagttactgtccccactgtg

SEQ ID NO: 2415153 - DNA, 25 bp, Homo sapien
gggagtcatagagtaacacttcctt

SEQ ID NO: 2415154 - DNA, 25 bp, Homo sapien
tgcatttaaataaaccctggagagt

SEQ ID NO: 2415155 - DNA, 25 bp, Homo sapien
tacgatggatatttggggtgacagt

SEQ ID NO: 2415156 - DNA, 25 bp, Homo sapien
agctctgtttccacaagggtggaga

SEQ ID NO: 2415157 - DNA, 25 bp, Homo sapien
gctctgtttccacaagggtggagaa

SEQ ID NO: 2415158 - DNA, 25 bp, Homo sapien
caaaaaagtacgatggatatttggg

SEQ ID NO: 2415159 - DNA, 25 bp, Homo sapien
ctgtgcagtaagcacagtgcatgca

SEQ ID NO: 2415160 - DNA, 25 bp, Homo sapien
gtgcagtaagcacagtgcatgcacg

SEQ ID NO: 2415161 - DNA, 25 bp, Homo sapien
tgtgcagtaagcacagtgcatgcac

SEQ ID NO: 2415162 - DNA, 25 bp, Homo sapien
acaaagacacaagatttgtggagcc

SEQ ID NO: 2415163 - DNA, 25 bp, Homo sapien
tctccagtgggctctacacaaagac

SEQ ID NO: 2415164 - DNA, 25 bp, Homo sapien
gagccaacacgagaggggccaactg

SEQ ID NO: 2415165 - DNA, 25 bp, Homo sapien
aaagacacaagatttgtggagccaa

SEQ ID NO: 2415166 - DNA, 25 bp, Homo sapien
agggacccgaacagccaactgggca

SEQ ID NO: 2415167 - DNA, 25 bp, Homo sapien
gggacccgaacagccaactgggcaa

SEQ ID NO: 2415168 - DNA, 25 bp, Homo sapien
ccaactgggcaatgactcctctatc

SEQ ID NO: 2415169 - DNA, 25 bp, Homo sapien
ggcaatgactcctctatcatgaagt

SEQ ID NO: 2415170 - DNA, 25 bp, Homo sapien
taattagggaggtgctattactacc

SEQ ID NO: 2415171 - DNA, 25 bp, Homo sapien
tagctggcttatacatgtcagagcc

SEQ ID NO: 2415172 - DNA, 25 bp, Homo sapien
caaaataacagcattgcttgggcct

SEQ ID NO: 2415173 - DNA, 25 bp, Homo sapien
ggaataatcacaggtcacttcttta

SEQ ID NO: 2415174 - DNA, 25 bp, Homo sapien
agaataataccaatcctgaatagct

SEQ ID NO: 2415175 - DNA, 25 bp, Homo sapien
gaataataccaatcctgaatagctt

SEQ ID NO: 2415176 - DNA, 25 bp, Homo sapien
cagaataataccaatcctgaatagc

SEQ ID NO: 2415177 - DNA, 25 bp, Homo sapien
gaaagctaagttgtctggcacctgc

SEQ ID NO: 2415178 - DNA, 25 bp, Homo sapien
gctctgtgccagaaaatacactttt

SEQ ID NO: 2415179 - DNA, 25 bp, Homo sapien
gcaaatgctgtgtccaaagcagcag

SEQ ID NO: 2415180 - DNA, 25 bp, Homo sapien
catagtgaagaagttccaggtgcag

SEQ ID NO: 2415181 - DNA, 25 bp, Homo sapien
caaacaacctatggcataagcacag

SEQ ID NO: 2415182 - DNA, 25 bp, Homo sapien
gaaaggtgtctgacacagagtaacc

SEQ ID NO: 2415183 - DNA, 25 bp, Homo sapien
taacatctggcagtcattgacaacc

SEQ ID NO: 2415184 - DNA, 25 bp, Homo sapien
tggacaattagatagccttacagct

SEQ ID NO: 2415185 - DNA, 25 bp, Homo sapien
tgggacaacagcaagaagagttgcg

SEQ ID NO: 2415186 - DNA, 25 bp, Homo sapien
gttgcgttccaacccactgaagtcc

SEQ ID NO: 2415187 - DNA, 25 bp, Homo sapien
caacagcaagaagagttgcgttcca

SEQ ID NO: 2415188 - DNA, 25 bp, Homo sapien
gaagagttgcgttccaacccactga

SEQ ID NO: 2415189 - DNA, 25 bp, Homo sapien
tgtctgaccagatacgttcctacag

SEQ ID NO: 2415190 - DNA, 25 bp, Homo sapien
ggcagacctcatagttctagcagcc

SEQ ID NO: 2415191 - DNA, 25 bp, Homo sapien
gaagacgacagtgatttgagctgct

SEQ ID NO: 2415192 - DNA, 25 bp, Homo sapien
ggacacctgctaaggccaacagcta

SEQ ID NO: 2415193 - DNA, 25 bp, Homo sapien
gaaatggtcatggtaaaagttccaa

SEQ ID NO: 2415194 - DNA, 25 bp, Homo sapien
gagctggcattcaggactccattag

SEQ ID NO: 2415195 - DNA, 25 bp, Homo sapien
ccttatgctcaacccagaaattgga

SEQ ID NO: 2415196 - DNA, 25 bp, Homo sapien
ccaatattgtgtttgagggattaca

SEQ ID NO: 2415197 - DNA, 25 bp, Homo sapien
ggatcttctctaatgccccagagta

SEQ ID NO: 2415198 - DNA, 25 bp, Homo sapien
aatcagaatgctcaccctaaggcct

SEQ ID NO: 2415199 - DNA, 25 bp, Homo sapien
tacaatatctctggacagaaggatc

SEQ ID NO: 2415200 - DNA, 25 bp, Homo sapien
catatatagggacaacatttgggtg

SEQ ID NO: 2415201 - DNA, 25 bp, Homo sapien
aattgcccttatgctcaaaatgcta

SEQ ID NO: 2415202 - DNA, 25 bp, Homo sapien
aatgctaattgatgtctcagcagag

SEQ ID NO: 2415203 - DNA, 25 bp, Homo sapien
ctttggatctgacgtcctccactgg

SEQ ID NO: 2415204 - DNA, 25 bp, Homo sapien
gctgctcaaggttcctttggatctg

SEQ ID NO: 2415205 - DNA, 25 bp, Homo sapien
ggttcaaggactcaaatgaataccc

SEQ ID NO: 2415206 - DNA, 25 bp, Homo sapien
tgaataccctggtctacagtgcaag

SEQ ID NO: 2415207 - DNA, 25 bp, Homo sapien
gcacctgcatagtcttatacacaaa

SEQ ID NO: 2415208 - DNA, 25 bp, Homo sapien
tttcctgatgctaaaaggttcaagg

SEQ ID NO: 2415209 - DNA, 25 bp, Homo sapien
ctcccggtgtcctgatgtccttgat

SEQ ID NO: 2415210 - DNA, 25 bp, Homo sapien
tccaatctctcccactcccggtgtc

SEQ ID NO: 2415211 - DNA, 25 bp, Homo sapien
gtcctgatgtccttgatattatcta

SEQ ID NO: 2415212 - DNA, 25 bp, Homo sapien
gagtctcccagtccaatctctccca

SEQ ID NO: 2415213 - DNA, 25 bp, Homo sapien
taccatgtaaaagcgatatatctag

SEQ ID NO: 2415214 - DNA, 25 bp, Homo sapien
cgcaaaatgagggaatgggaactag

SEQ ID NO: 2415215 - DNA, 25 bp, Homo sapien
ttaaaacgagcaaatagaaggatgg

SEQ ID NO: 2415216 - DNA, 25 bp, Homo sapien
caggcgttcatcaaggcacgttaca

SEQ ID NO: 2415217 - DNA, 25 bp, Homo sapien
gcactaatcgaagcacctcatttaa

SEQ ID NO: 2415218 - DNA, 25 bp, Homo sapien
cggtatccttcgatgagtactgtca

SEQ ID NO: 2415219 - DNA, 25 bp, Homo sapien
cagatgattcagcacggtatccttc

SEQ ID NO: 2415220 - DNA, 25 bp, Homo sapien
ctttgctaagggcagatgattcagc

SEQ ID NO: 2415221 - DNA, 25 bp, Homo sapien
tgcacggtagggatcaaacactgga

SEQ ID NO: 2415222 - DNA, 25 bp, Homo sapien
ggaaaagtgcaacccactggagaaa

SEQ ID NO: 2415223 - DNA, 25 bp, Homo sapien
taagttcaaactgccctcactggtc

SEQ ID NO: 2415224 - DNA, 25 bp, Homo sapien
taaagacttcccgtcattagctgag

SEQ ID NO: 2415225 - DNA, 25 bp, Homo sapien
tgaaaggcacttaacagaggcaggc

SEQ ID NO: 2415226 - DNA, 25 bp, Homo sapien
gaaggttcccctgtgcaatcactgg

SEQ ID NO: 2415227 - DNA, 25 bp, Homo sapien
gaaccattgcagctggaaaccacct

SEQ ID NO: 2415228 - DNA, 25 bp, Homo sapien
tacatggaaacacgctggagagcct

SEQ ID NO: 2415229 - DNA, 25 bp, Homo sapien
tgggctatcatgcagaaggaatgtg

SEQ ID NO: 2415230 - DNA, 25 bp, Homo sapien
gaaaggaggcaagcgtattcctgcc

SEQ ID NO: 2415231 - DNA, 25 bp, Homo sapien
tgggagtcccctcaagtcatttata

SEQ ID NO: 2415232 - DNA, 25 bp, Homo sapien
tcatcagagaagcacgtgcacatct

SEQ ID NO: 2415233 - DNA, 25 bp, Homo sapien
ttgcactgtgttggtccacccactt

SEQ ID NO: 2415234 - DNA, 25 bp, Homo sapien
tcagcttctagtgtctccatcattc

SEQ ID NO: 2415235 - DNA, 25 bp, Homo sapien
gtctccatcattcataattgcactg

SEQ ID NO: 2415236 - DNA, 25 bp, Homo sapien
ctgtgttggtccacccactttactc

SEQ ID NO: 2415237 - DNA, 25 bp, Homo sapien
tctccttctagttgcccaacaggaa

SEQ ID NO: 2415238 - DNA, 25 bp, Homo sapien
aaaggcttgccctttgatatggaaa

SEQ ID NO: 2415239 - DNA, 25 bp, Homo sapien
gcccaacaggaattttaagcagctt

SEQ ID NO: 2415240 - DNA, 25 bp, Homo sapien
tatggaaatcccacttctgcgaccg

SEQ ID NO: 2415241 - DNA, 25 bp, Homo sapien
cataaaccgacgaaaactgccatgt

SEQ ID NO: 2415242 - DNA, 25 bp, Homo sapien
aaaccgacgaaaactgccatgtaca

SEQ ID NO: 2415243 - DNA, 25 bp, Homo sapien
gagcataaaccgacgaaaactgcca

SEQ ID NO: 2415244 - DNA, 25 bp, Homo sapien
gacgaaaactgccatgtacagttac

SEQ ID NO: 2415245 - DNA, 25 bp, Homo sapien
cgttattgtcatctgcctgctgcat

SEQ ID NO: 2415246 - DNA, 25 bp, Homo sapien
ccgttattgtcatctgcctgctgca

SEQ ID NO: 2415247 - DNA, 25 bp, Homo sapien
cccgttattgtcatctgcctgctgc

SEQ ID NO: 2415248 - DNA, 25 bp, Homo sapien
tcaaataccatcgtcttagctttgc

SEQ ID NO: 2415249 - DNA, 25 bp, Homo sapien
tggattcccgcttctactccataac

SEQ ID NO: 2415250 - DNA, 25 bp, Homo sapien
cattcaaggctccactcaaatacca

SEQ ID NO: 2415251 - DNA, 25 bp, Homo sapien
tcccaagcctgtgaaacctcttctg

SEQ ID NO: 2415252 - DNA, 25 bp, Homo sapien
tcacctttggtgtaatgctttaaaa

SEQ ID NO: 2415253 - DNA, 25 bp, Homo sapien
gatttgacatgtctaggataacact

SEQ ID NO: 2415254 - DNA, 25 bp, Homo sapien
tctagaattcatattggtaatggta

SEQ ID NO: 2415255 - DNA, 25 bp, Homo sapien
ccatgtctgtcacaaagatttgaca

SEQ ID NO: 2415256 - DNA, 25 bp, Homo sapien
tactcaagtggcaatacctagttcc

SEQ ID NO: 2415257 - DNA, 25 bp, Homo sapien
tattcgtccaggctagggtttgagg

SEQ ID NO: 2415258 - DNA, 25 bp, Homo sapien
cctcaagtggatcagtattggctac

SEQ ID NO: 2415259 - DNA, 25 bp, Homo sapien
ccataattcaaaagtgtgctagtaa

SEQ ID NO: 2415260 - DNA, 25 bp, Homo sapien
gaatactggacagaataaatgctta

SEQ ID NO: 2415261 - DNA, 25 bp, Homo sapien
tactggacagaataaatgcttattt

SEQ ID NO: 2415262 - DNA, 25 bp, Homo sapien
atactggacagaataaatgcttatt

SEQ ID NO: 2415263 - DNA, 25 bp, Homo sapien
aatactggacagaataaatgcttat

SEQ ID NO: 2415264 - DNA, 25 bp, Homo sapien
gaactattcaagttctctacttcac

SEQ ID NO: 2415265 - DNA, 25 bp, Homo sapien
ttcctttatagttatagaactattc

SEQ ID NO: 2415266 - DNA, 25 bp, Homo sapien
cacttcagcaaattttggcattata

SEQ ID NO: 2415267 - DNA, 25 bp, Homo sapien
tatagaactattcaagttctctact

SEQ ID NO: 2415268 - DNA, 25 bp, Homo sapien
agcacggtaccttgaactgccctaa

SEQ ID NO: 2415269 - DNA, 25 bp, Homo sapien
tcatgtgtttatccaatgccactga

SEQ ID NO: 2415270 - DNA, 25 bp, Homo sapien
agccttcatgtgtttatccaatgcc

SEQ ID NO: 2415271 - DNA, 25 bp, Homo sapien
tgccactgaactgtagcacggtacc

SEQ ID NO: 2415272 - DNA, 25 bp, Homo sapien
tggtgacaaacttctcctgaacaac

SEQ ID NO: 2415273 - DNA, 25 bp, Homo sapien
gtgacaaacttctcctgaacaacag

SEQ ID NO: 2415274 - DNA, 25 bp, Homo sapien
ggtgacaaacttctcctgaacaaca

SEQ ID NO: 2415275 - DNA, 25 bp, Homo sapien
agaatagttatcaatttttcaaaag

SEQ ID NO: 2415276 - DNA, 25 bp, Homo sapien
tgaaatagaatagttatcaattttt

SEQ ID NO: 2415277 - DNA, 25 bp, Homo sapien
tagaatagttatcaatttttcaaaa

SEQ ID NO: 2415278 - DNA, 25 bp, Homo sapien
aatagaatagttatcaatttttcaa

SEQ ID NO: 2415279 - DNA, 25 bp, Homo sapien
gctttcagaatcttgtcaacagatt

SEQ ID NO: 2415280 - DNA, 25 bp, Homo sapien
tcaacagattcaaacaggaatcatg

SEQ ID NO: 2415281 - DNA, 25 bp, Homo sapien
cagtgccagaattctctgttcagct

SEQ ID NO: 2415282 - DNA, 25 bp, Homo sapien
tcttgtcaacagattcaaacaggaa

SEQ ID NO: 2415283 - DNA, 25 bp, Homo sapien
aatatgaacatatgactcttgaaaa

SEQ ID NO: 2415284 - DNA, 25 bp, Homo sapien
agtagaccattaacagtgcattgtt

SEQ ID NO: 2415285 - DNA, 25 bp, Homo sapien
aaatatgaacatatgactcttgaaa

SEQ ID NO: 2415286 - DNA, 25 bp, Homo sapien
aataaaagtagaccattaacagtgc

SEQ ID NO: 2415287 - DNA, 25 bp, Homo sapien
tatggtaggtatgacagggctgatc

SEQ ID NO: 2415288 - DNA, 25 bp, Homo sapien
tcagaaaaattcttacgagacccca

SEQ ID NO: 2415289 - DNA, 25 bp, Homo sapien
tactctataacagatcacacccagg

SEQ ID NO: 2415290 - DNA, 25 bp, Homo sapien
gggctgatccctctcttacaaagaa

SEQ ID NO: 2415291 - DNA, 25 bp, Homo sapien
tggtttggcctaagactatcagctc

SEQ ID NO: 2415292 - DNA, 25 bp, Homo sapien
aacagtggttcaagtgacagaggtc

SEQ ID NO: 2415293 - DNA, 25 bp, Homo sapien
taaagcgatgcaaatggagaaagtc

SEQ ID NO: 2415294 - DNA, 25 bp, Homo sapien
cagaggtcaccgttactgagataaa

SEQ ID NO: 2415295 - DNA, 25 bp, Homo sapien
gctgccaaccacaataggtaaactg

SEQ ID NO: 2415296 - DNA, 25 bp, Homo sapien
catgagtaaatgaaggtcaccgatt

SEQ ID NO: 2415297 - DNA, 25 bp, Homo sapien
ttctggcagtgctcagtaacacatc

SEQ ID NO: 2415298 - DNA, 25 bp, Homo sapien
cacaaaggtgtgaatgccaggaggt

SEQ ID NO: 2415299 - DNA, 25 bp, Homo sapien
ctaaaataatttgggtagttgacat

SEQ ID NO: 2415300 - DNA, 25 bp, Homo sapien
tctatggaaatctgccagatttgac

SEQ ID NO: 2415301 - DNA, 25 bp, Homo sapien
attttctatggaaatctgccagatt

SEQ ID NO: 2415302 - DNA, 25 bp, Homo sapien
gttgacattcaatccaaattttcta

SEQ ID NO: 2415303 - DNA, 25 bp, Homo sapien
caagcttccacactggcgatgaaca

SEQ ID NO: 2415304 - DNA, 25 bp, Homo sapien
gccagtttgcgatttggtatctgac

SEQ ID NO: 2415305 - DNA, 25 bp, Homo sapien
cctttccatggagtgctctcattgc

SEQ ID NO: 2415306 - DNA, 25 bp, Homo sapien
tgacacagatgggaacaacgtcggg

SEQ ID NO: 2415307 - DNA, 25 bp, Homo sapien
caaaacttgcatttgccatgcacca

SEQ ID NO: 2415308 - DNA, 25 bp, Homo sapien
gggaggacgtgcaatactataccat

SEQ ID NO: 2415309 - DNA, 25 bp, Homo sapien
cattgtatttgctagtatatgttaa

SEQ ID NO: 2415310 - DNA, 25 bp, Homo sapien
tggattcagcaatctaggatagaaa

SEQ ID NO: 2415311 - DNA, 25 bp, Homo sapien
caaattcttgtatgtctactggtcc

SEQ ID NO: 2415312 - DNA, 25 bp, Homo sapien
gaatcatggcattaagaagtgtgcc

SEQ ID NO: 2415313 - DNA, 25 bp, Homo sapien
tgcgatctcctaagacacagagtct

SEQ ID NO: 2415314 - DNA, 25 bp, Homo sapien
cacatgcctctatgttgcagctcta

SEQ ID NO: 2415315 - DNA, 25 bp, Homo sapien
taactatctttgatttctcacctgt

SEQ ID NO: 2415316 - DNA, 25 bp, Homo sapien
tatgagagcatacaccaggtagacc

SEQ ID NO: 2415317 - DNA, 25 bp, Homo sapien
gaacaaattaattgagatccctacc

SEQ ID NO: 2415318 - DNA, 25 bp, Homo sapien
cttatagattagattaaaactagcc

SEQ ID NO: 2415319 - DNA, 25 bp, Homo sapien
cattgaataatgaggaaatcagtgg

SEQ ID NO: 2415320 - DNA, 25 bp, Homo sapien
tggtctctaacacaacaggatgtct

SEQ ID NO: 2415321 - DNA, 25 bp, Homo sapien
cagtttggccgcagataatctaaag

SEQ ID NO: 2415322 - DNA, 25 bp, Homo sapien
tatcatgaaataagaggcccaatca

SEQ ID NO: 2415323 - DNA, 25 bp, Homo sapien
tctaaagggcggagcagtacatttt

SEQ ID NO: 2415324 - DNA, 25 bp, Homo sapien
ataaacattatcaataaaagtggaa

SEQ ID NO: 2415325 - DNA, 25 bp, Homo sapien
gttgctaataaacattatcaataaa

SEQ ID NO: 2415326 - DNA, 25 bp, Homo sapien
aaacattatcaataaaagtggaagg

SEQ ID NO: 2415327 - DNA, 25 bp, Homo sapien
acattatcaataaaagtggaaggtt

SEQ ID NO: 2415328 - DNA, 25 bp, Homo sapien
ccagatcaattgtgtagacattaat

SEQ ID NO: 2415329 - DNA, 25 bp, Homo sapien
taaccagatcaattgtgtagacatt

SEQ ID NO: 2415330 - DNA, 25 bp, Homo sapien
ttcacgggtaaccagatcaattgtg

SEQ ID NO: 2415331 - DNA, 25 bp, Homo sapien
cgggtaaccagatcaattgtgtaga

SEQ ID NO: 2415332 - DNA, 25 bp, Homo sapien
taggtcgctaactccttgtgggcag

SEQ ID NO: 2415333 - DNA, 25 bp, Homo sapien
ttgtgggcaggaacatatttttcat

SEQ ID NO: 2415334 - DNA, 25 bp, Homo sapien
aggtcgctaactccttgtgggcagg

SEQ ID NO: 2415335 - DNA, 25 bp, Homo sapien
agtaggtcgctaactccttgtgggc

SEQ ID NO: 2415336 - DNA, 25 bp, Homo sapien
atgcagatcataaacagccagtgtg

SEQ ID NO: 2415337 - DNA, 25 bp, Homo sapien
cagccagtgtgggagctctcacaca

SEQ ID NO: 2415338 - DNA, 25 bp, Homo sapien
agccagtgtgggagctctcacacac

SEQ ID NO: 2415339 - DNA, 25 bp, Homo sapien
cagatcataaacagccagtgtggga

SEQ ID NO: 2415340 - DNA, 25 bp, Homo sapien
tcctctgccctaaacgtctatcttt

SEQ ID NO: 2415341 - DNA, 25 bp, Homo sapien
tgttccgcatcattcatctgactga

SEQ ID NO: 2415342 - DNA, 25 bp, Homo sapien
caggcataatctcgacatggcccca

SEQ ID NO: 2415343 - DNA, 25 bp, Homo sapien
gccctaaacgtctatctttgatgca

SEQ ID NO: 2415344 - DNA, 25 bp, Homo sapien
tggtacccagtaagcccctaatgag

SEQ ID NO: 2415345 - DNA, 25 bp, Homo sapien
tactgcatgtggttgttgggatcct

SEQ ID NO: 2415346 - DNA, 25 bp, Homo sapien
tactcgcctaagcacaccatggaaa

SEQ ID NO: 2415347 - DNA, 25 bp, Homo sapien
ggtcaaaaggtcaagagccactcaa

SEQ ID NO: 2415348 - DNA, 25 bp, Homo sapien
gatgaatctccttccgcttgactcc

SEQ ID NO: 2415349 - DNA, 25 bp, Homo sapien
tttaatagggctatgatgaatctcc

SEQ ID NO: 2415350 - DNA, 25 bp, Homo sapien
tagggctatgatgaatctccttccg

SEQ ID NO: 2415351 - DNA, 25 bp, Homo sapien
cgcttgactcctattttgagctgtg

SEQ ID NO: 2415352 - DNA, 25 bp, Homo sapien
gatttgtcatgttccgcatcattca

SEQ ID NO: 2415353 - DNA, 25 bp, Homo sapien
caattacaggccaatcagggtcgga

SEQ ID NO: 2415354 - DNA, 25 bp, Homo sapien
caagggcttggaggataatcagctt

SEQ ID NO: 2415355 - DNA, 25 bp, Homo sapien
ccagtatgacagaaaagggttttgc

SEQ ID NO: 2415356 - DNA, 25 bp, Homo sapien
ggttgtggtcttgccattgggacac

SEQ ID NO: 2415357 - DNA, 25 bp, Homo sapien
ggatcctcctgaagtatggctctac

SEQ ID NO: 2415358 - DNA, 25 bp, Homo sapien
tggctctacaccttggaccgtttaa

SEQ ID NO: 2415359 - DNA, 25 bp, Homo sapien
cctgaagtatggctctacaccttgg

SEQ ID NO: 2415360 - DNA, 25 bp, Homo sapien
aagtatggctctacaccttggaccg

SEQ ID NO: 2415361 - DNA, 25 bp, Homo sapien
ccagccttgaatcccttgaaataaa

SEQ ID NO: 2415362 - DNA, 25 bp, Homo sapien
ttttgcactggccagaaattctagc

SEQ ID NO: 2415363 - DNA, 25 bp, Homo sapien
catgagaagacatcccttgaccttg

SEQ ID NO: 2415364 - DNA, 25 bp, Homo sapien
cctgatctaagaggaaacactcatg

SEQ ID NO: 2415365 - DNA, 25 bp, Homo sapien
ggcttcatagaagtaatcattgagc

SEQ ID NO: 2415366 - DNA, 25 bp, Homo sapien
ttcatagaagtaatcattgagctgg

SEQ ID NO: 2415367 - DNA, 25 bp, Homo sapien
gaagggcttcatagaagtaatcatt

SEQ ID NO: 2415368 - DNA, 25 bp, Homo sapien
tcattgagctgggtttttaggagca

SEQ ID NO: 2415369 - DNA, 25 bp, Homo sapien
taggtactcatgtaattcatactca

SEQ ID NO: 2415370 - DNA, 25 bp, Homo sapien
gggttgacactaggtactcatgtaa

SEQ ID NO: 2415371 - DNA, 25 bp, Homo sapien
ttagaggtataaagggttgacacta

SEQ ID NO: 2415372 - DNA, 25 bp, Homo sapien
tataaagggttgacactaggtactc

SEQ ID NO: 2415373 - DNA, 25 bp, Homo sapien
atctgcatccaattcaagaatattg

SEQ ID NO: 2415374 - DNA, 25 bp, Homo sapien
ctgtggtcatcagacctggaactgc

SEQ ID NO: 2415375 - DNA, 25 bp, Homo sapien
gctatctgcatccaattcaagaata

SEQ ID NO: 2415376 - DNA, 25 bp, Homo sapien
ctctgtggtcatcagacctggaact

SEQ ID NO: 2415377 - DNA, 25 bp, Homo sapien
ttacagtttcaattacaagataatc

SEQ ID NO: 2415378 - DNA, 25 bp, Homo sapien
tttacagtttcaattacaagataat

SEQ ID NO: 2415379 - DNA, 25 bp, Homo sapien
tacacagaaagcgtccaggacaagg

SEQ ID NO: 2415380 - DNA, 25 bp, Homo sapien
tcttagtcttcgctgaatactccag

SEQ ID NO: 2415381 - DNA, 25 bp, Homo sapien
gcgtactgccccatagtacacagaa

SEQ ID NO: 2415382 - DNA, 25 bp, Homo sapien
gaatttcatatcttagtcttcgctg

SEQ ID NO: 2415383 - DNA, 25 bp, Homo sapien
tgcttaggtcgggtaccagactctg

SEQ ID NO: 2415384 - DNA, 25 bp, Homo sapien
ctttgcatgcttaggtcgggtacca

SEQ ID NO: 2415385 - DNA, 25 bp, Homo sapien
taccagactctgcaacccctaggag

SEQ ID NO: 2415386 - DNA, 25 bp, Homo sapien
taggtcgggtaccagactctgcaac

SEQ ID NO: 2415387 - DNA, 25 bp, Homo sapien
gctgcattgaacacccaggatttgt

SEQ ID NO: 2415388 - DNA, 25 bp, Homo sapien
tttatccactggaacggctgcattg

SEQ ID NO: 2415389 - DNA, 25 bp, Homo sapien
gaattcttattgtaggactttcaca

SEQ ID NO: 2415390 - DNA, 25 bp, Homo sapien
tattgtaggactttcacattcactt

SEQ ID NO: 2415391 - DNA, 25 bp, Homo sapien
ggaatcaggtcttcactttcacatc

SEQ ID NO: 2415392 - DNA, 25 bp, Homo sapien
cagcagatatcatacaaagagactt

SEQ ID NO: 2415393 - DNA, 25 bp, Homo sapien
ttgggcagaatatggcccaaacaca

SEQ ID NO: 2415394 - DNA, 25 bp, Homo sapien
actgaatgttttgggcagaatatgg

SEQ ID NO: 2415395 - DNA, 25 bp, Homo sapien
gcaagatccagcagatatcatacaa

SEQ ID NO: 2415396 - DNA, 25 bp, Homo sapien
ttattaatttcccaccaaaaatgca

SEQ ID NO: 2415397 - DNA, 25 bp, Homo sapien
cattcgttctcttgttttattaatt

SEQ ID NO: 2415398 - DNA, 25 bp, Homo sapien
tcattcgttctcttgttttattaat

SEQ ID NO: 2415399 - DNA, 25 bp, Homo sapien
tattaatttcccaccaaaaatgcac

SEQ ID NO: 2415400 - DNA, 25 bp, Homo sapien
gaactattgaaaaagcgtgctctgt

SEQ ID NO: 2415401 - DNA, 25 bp, Homo sapien
tattgaaaaagcgtgctctgtctac

SEQ ID NO: 2415402 - DNA, 25 bp, Homo sapien
aaacctgaactattgaaaaagcgtg

SEQ ID NO: 2415403 - DNA, 25 bp, Homo sapien
gctctgtctaccggcatttggaaaa

SEQ ID NO: 2415404 - DNA, 25 bp, Homo sapien
gaatgagaatttggctgagcatcgt

SEQ ID NO: 2415405 - DNA, 25 bp, Homo sapien
atttggctgagcatcgtggttcaca

SEQ ID NO: 2415406 - DNA, 25 bp, Homo sapien
agtgatactgaagaactagtctgtg

SEQ ID NO: 2415407 - DNA, 25 bp, Homo sapien
tgtgattcagtgatttataagaatg

SEQ ID NO: 2415408 - DNA, 25 bp, Homo sapien
cacatcctgttgcactcttgacaat

SEQ ID NO: 2415409 - DNA, 25 bp, Homo sapien
tccacatcctgttgcactcttgaca

SEQ ID NO: 2415410 - DNA, 25 bp, Homo sapien
catcctgttgcactcttgacaattc

SEQ ID NO: 2415411 - DNA, 25 bp, Homo sapien
atcctgttgcactcttgacaattct

SEQ ID NO: 2415412 - DNA, 25 bp, Homo sapien
caccgacttgctgcctgacatagag

SEQ ID NO: 2415413 - DNA, 25 bp, Homo sapien
gaaaatcaagcagattagtggcctg

SEQ ID NO: 2415414 - DNA, 25 bp, Homo sapien
tattatatcaaaccacccaatgtga

SEQ ID NO: 2415415 - DNA, 25 bp, Homo sapien
caaagtaacgaatctctgactagga

SEQ ID NO: 2415416 - DNA, 25 bp, Homo sapien
acactttccacttcaaattcatgcc

SEQ ID NO: 2415417 - DNA, 25 bp, Homo sapien
cacactttccacttcaaattcatgc

SEQ ID NO: 2415418 - DNA, 25 bp, Homo sapien
acacactttccacttcaaattcatg

SEQ ID NO: 2415419 - DNA, 25 bp, Homo sapien
ttacacactttccacttcaaattca

SEQ ID NO: 2415420 - DNA, 25 bp, Homo sapien
caaagatgcccacttggttgtcagg

SEQ ID NO: 2415421 - DNA, 25 bp, Homo sapien
ctaaacacagcttgccacatgaggg

SEQ ID NO: 2415422 - DNA, 25 bp, Homo sapien
caagatatgtgcgtttgggtagtac

SEQ ID NO: 2415423 - DNA, 25 bp, Homo sapien
taaattagcctaccagacaaacact

SEQ ID NO: 2415424 - DNA, 25 bp, Homo sapien
cattggccaaaattgaggcacctga

SEQ ID NO: 2415425 - DNA, 25 bp, Homo sapien
taaagataagtagcagcgtgatggc

SEQ ID NO: 2415426 - DNA, 25 bp, Homo sapien
tcaacagtgtcaaatacagggaatg

SEQ ID NO: 2415427 - DNA, 25 bp, Homo sapien
cacctgatgatcttagcctttacac

SEQ ID NO: 2415428 - DNA, 25 bp, Homo sapien
gaaagtgatgaagcttctatgaaca

SEQ ID NO: 2415429 - DNA, 25 bp, Homo sapien
gggtgaaagtgatgaagcttctatg

SEQ ID NO: 2415430 - DNA, 25 bp, Homo sapien
tccatagtagtctcccagttgcttt

SEQ ID NO: 2415431 - DNA, 25 bp, Homo sapien
ttttttcctccatagtagtctccca

SEQ ID NO: 2415432 - DNA, 25 bp, Homo sapien
ttcccagagtgccagaattccaggt

SEQ ID NO: 2415433 - DNA, 25 bp, Homo sapien
cagagtgccagaattccaggtgtga

SEQ ID NO: 2415434 - DNA, 25 bp, Homo sapien
tcccgggtacttaggactacaagca

SEQ ID NO: 2415435 - DNA, 25 bp, Homo sapien
ccatagcttcccagagtgccagaat

SEQ ID NO: 2415436 - DNA, 25 bp, Homo sapien
ccagctgaaatggttgcaatatgca

SEQ ID NO: 2415437 - DNA, 25 bp, Homo sapien
catcctttgtgagctatatttcttc

SEQ ID NO: 2415438 - DNA, 25 bp, Homo sapien
tcaggcagcattcatggttaattag

SEQ ID NO: 2415439 - DNA, 25 bp, Homo sapien
cagcttcaaaacatttaggttccta

SEQ ID NO: 2415440 - DNA, 25 bp, Homo sapien
cctaatacaggaggggcaacacttg

SEQ ID NO: 2415441 - DNA, 25 bp, Homo sapien
ccaagcagcccctaatacaggaggg

SEQ ID NO: 2415442 - DNA, 25 bp, Homo sapien
aaccaagcagcccctaatacaggag

SEQ ID NO: 2415443 - DNA, 25 bp, Homo sapien
acaaccaagcagcccctaatacagg

SEQ ID NO: 2415444 - DNA, 25 bp, Homo sapien
gagtcaaaaagcacgggaaacacag

SEQ ID NO: 2415445 - DNA, 25 bp, Homo sapien
gtcaaaaagcacgggaaacacagtg

SEQ ID NO: 2415446 - DNA, 25 bp, Homo sapien
agagtcaaaaagcacgggaaacaca

SEQ ID NO: 2415447 - DNA, 25 bp, Homo sapien
caaaaagcacgggaaacacagtgaa

SEQ ID NO: 2415448 - DNA, 25 bp, Homo sapien
aatcctcccaggtttacaactcagc

SEQ ID NO: 2415449 - DNA, 25 bp, Homo sapien
tgaggatatcaagagatcacagctt

SEQ ID NO: 2415450 - DNA, 25 bp, Homo sapien
agtagacaacttccatcccattgaa

SEQ ID NO: 2415451 - DNA, 25 bp, Homo sapien
taatggatgtttaaccctgaccaaa

SEQ ID NO: 2415452 - DNA, 25 bp, Homo sapien
tagtactacattcagcttctatgtc

SEQ ID NO: 2415453 - DNA, 25 bp, Homo sapien
tgcatagtactacattcagcttcta

SEQ ID NO: 2415454 - DNA, 25 bp, Homo sapien
gaagctcagagtcacactgcatagt

SEQ ID NO: 2415455 - DNA, 25 bp, Homo sapien
tcagagtcacactgcatagtactac

SEQ ID NO: 2415456 - DNA, 25 bp, Homo sapien
tcttcatggtgctcccaggagtggg

SEQ ID NO: 2415457 - DNA, 25 bp, Homo sapien
tgtttaacgtgttcactgagccaaa

SEQ ID NO: 2415458 - DNA, 25 bp, Homo sapien
caaattaagtatgtgacagaagtct

SEQ ID NO: 2415459 - DNA, 25 bp, Homo sapien
gagcaagctgtgcttgagatgcaca

SEQ ID NO: 2415460 - DNA, 25 bp, Homo sapien
agccaaggcaaaggcccaaactgga

SEQ ID NO: 2415461 - DNA, 25 bp, Homo sapien
cagtccatcccctgggaagttgctt

SEQ ID NO: 2415462 - DNA, 25 bp, Homo sapien
agttgcttttgccatagcttcctct

SEQ ID NO: 2415463 - DNA, 25 bp, Homo sapien
gaagttgcttttgccatagcttcct

SEQ ID NO: 2415464 - DNA, 25 bp, Homo sapien
gttgcttttgccatagcttcctctt

SEQ ID NO: 2415465 - DNA, 25 bp, Homo sapien
ccatggcctacacgacagaatctag

SEQ ID NO: 2415466 - DNA, 25 bp, Homo sapien
aataataagtgggtgctctgttggc

SEQ ID NO: 2415467 - DNA, 25 bp, Homo sapien
gaactcacagtcttagcaaggacag

SEQ ID NO: 2415468 - DNA, 25 bp, Homo sapien
ggaacacactaccactctctcagag

SEQ ID NO: 2415469 - DNA, 25 bp, Homo sapien
catacccagtaaaccatggctcagg

SEQ ID NO: 2415470 - DNA, 25 bp, Homo sapien
gagccaaatagtgagaagtcaactg

SEQ ID NO: 2415471 - DNA, 25 bp, Homo sapien
gacataggccattattagctccagg

SEQ ID NO: 2415472 - DNA, 25 bp, Homo sapien
gaagacacacgcaacatttacatag

SEQ ID NO: 2415473 - DNA, 25 bp, Homo sapien
ctctgatgacccttttagagacctc

SEQ ID NO: 2415474 - DNA, 25 bp, Homo sapien
ctgatgacccttttagagacctcat

SEQ ID NO: 2415475 - DNA, 25 bp, Homo sapien
atctctgatgacccttttagagacc

SEQ ID NO: 2415476 - DNA, 25 bp, Homo sapien
tctgatgacccttttagagacctca

SEQ ID NO: 2415477 - DNA, 25 bp, Homo sapien
gaatgaactactgcaatgccaccag

SEQ ID NO: 2415478 - DNA, 25 bp, Homo sapien
gacaatcgaaggactgctcatggca

SEQ ID NO: 2415479 - DNA, 25 bp, Homo sapien
taaggcaacaaagtgctggtggctc

SEQ ID NO: 2415480 - DNA, 25 bp, Homo sapien
tgcgactcatcacagcaggagctcg

SEQ ID NO: 2415481 - DNA, 25 bp, Homo sapien
tacccggtctcgttaatgcctcctc

SEQ ID NO: 2415482 - DNA, 25 bp, Homo sapien
tcgttaatgcctcctccggcgtggg

SEQ ID NO: 2415483 - DNA, 25 bp, Homo sapien
ttaatgcctcctccggcgtgggatg

SEQ ID NO: 2415484 - DNA, 25 bp, Homo sapien
ggtctcgttaatgcctcctccggcg

SEQ ID NO: 2415485 - DNA, 25 bp, Homo sapien
gaatttattcggtcatatacattaa

SEQ ID NO: 2415486 - DNA, 25 bp, Homo sapien
aatagcagagacaagttacttggga

SEQ ID NO: 2415487 - DNA, 25 bp, Homo sapien
gaaagagggatcttaataagtatga

SEQ ID NO: 2415488 - DNA, 25 bp, Homo sapien
atgaaatcctgtgacggctgggcgc

SEQ ID NO: 2415489 - DNA, 25 bp, Homo sapien
ttgaaagtgagcttctcaaaaccag

SEQ ID NO: 2415490 - DNA, 25 bp, Homo sapien
accagccagtgttgaaaaagtattt

SEQ ID NO: 2415491 - DNA, 25 bp, Homo sapien
cgtcaaatgcaatgtccatatcaaa

SEQ ID NO: 2415492 - DNA, 25 bp, Homo sapien
ctgtctcgtcaaatgcaatgtccat

SEQ ID NO: 2415493 - DNA, 25 bp, Homo sapien
ctactgcaggccttagctgaggtgg

SEQ ID NO: 2415494 - DNA, 25 bp, Homo sapien
tgcaggccttagctgaggtggcagg

SEQ ID NO: 2415495 - DNA, 25 bp, Homo sapien
tgccagacggacagagaagtcatcc

SEQ ID NO: 2415496 - DNA, 25 bp, Homo sapien
cctctaagagtgtggtccacgggca

SEQ ID NO: 2415497 - DNA, 25 bp, Homo sapien
acgtagaacctgagaccacgctgcg

SEQ ID NO: 2415498 - DNA, 25 bp, Homo sapien
gcgtgcaacccgaaagtggacttcc

SEQ ID NO: 2415499 - DNA, 25 bp, Homo sapien
gagccggctctgcaaaggaagaaaa

SEQ ID NO: 2415500 - DNA, 25 bp, Homo sapien
gaatacatccccataggagatggcc

SEQ ID NO: 2415501 - DNA, 25 bp, Homo sapien
gagagctgccctaggaaacgaagta

SEQ ID NO: 2415502 - DNA, 25 bp, Homo sapien
aggaaacagacacggacttggaggt

SEQ ID NO: 2415503 - DNA, 25 bp, Homo sapien
gactaggcgcacatagaccaggggc

SEQ ID NO: 2415504 - DNA, 25 bp, Homo sapien
tagaccaggggcgaaaggccttgca

SEQ ID NO: 2415505 - DNA, 25 bp, Homo sapien
gcacatagaccaggggcgaaaggcc

SEQ ID NO: 2415506 - DNA, 25 bp, Homo sapien
ccaggggcgaaaggccttgcaagaa

SEQ ID NO: 2415507 - DNA, 25 bp, Homo sapien
ctaagccttcttcatagcttctgta

SEQ ID NO: 2415508 - DNA, 25 bp, Homo sapien
agccttcttcatagcttctgtatca

SEQ ID NO: 2415509 - DNA, 25 bp, Homo sapien
ccttcttcatagcttctgtatcacg

SEQ ID NO: 2415510 - DNA, 25 bp, Homo sapien
taagccttcttcatagcttctgtat

SEQ ID NO: 2415511 - DNA, 25 bp, Homo sapien
tgcttcctctccgtagccctgtctg

SEQ ID NO: 2415512 - DNA, 25 bp, Homo sapien
ttcctctccgtagccctgtctgctt

SEQ ID NO: 2415513 - DNA, 25 bp, Homo sapien
ctctccgtagccctgtctgcttccc

SEQ ID NO: 2415514 - DNA, 25 bp, Homo sapien
gcttcctctccgtagccctgtctgc

SEQ ID NO: 2415515 - DNA, 25 bp, Homo sapien
gatttgatgcttcttttgctgtaat

SEQ ID NO: 2415516 - DNA, 25 bp, Homo sapien
ttgctgtaattgttggccagctctg

SEQ ID NO: 2415517 - DNA, 25 bp, Homo sapien
gaagagcaggtgaatccttatctgt

SEQ ID NO: 2415518 - DNA, 25 bp, Homo sapien
cagggtgactggtgacatctgcacc

SEQ ID NO: 2415519 - DNA, 25 bp, Homo sapien
tcttgggggagatctcccctcttta

SEQ ID NO: 2415520 - DNA, 25 bp, Homo sapien
tacctcttgggggagatctcccctc

SEQ ID NO: 2415521 - DNA, 25 bp, Homo sapien
cacatacctcttgggggagatctcc

SEQ ID NO: 2415522 - DNA, 25 bp, Homo sapien
tgacacatacctcttgggggagatc

SEQ ID NO: 2415523 - DNA, 25 bp, Homo sapien
ttcaaggcagcttttgcatacttca

SEQ ID NO: 2415524 - DNA, 25 bp, Homo sapien
gcatacttcaccagttgtggttggg

SEQ ID NO: 2415525 - DNA, 25 bp, Homo sapien
tgtggggaccaccattgccagtttt

SEQ ID NO: 2415526 - DNA, 25 bp, Homo sapien
tagagaatcctgtatttccgaagtc

SEQ ID NO: 2415527 - DNA, 25 bp, Homo sapien
gtactactaccagcttggtattctg

SEQ ID NO: 2415528 - DNA, 25 bp, Homo sapien
cctgtgcctctttccctgctttggg

SEQ ID NO: 2415529 - DNA, 25 bp, Homo sapien
agcagagtcggatttggcaaatgtc

SEQ ID NO: 2415530 - DNA, 25 bp, Homo sapien
tgaagtagcagagtcggatttggca

SEQ ID NO: 2415531 - DNA, 25 bp, Homo sapien
tttataatctgcgttctgacataag

SEQ ID NO: 2415532 - DNA, 25 bp, Homo sapien
gaggagttcatgaatccatagtggg

SEQ ID NO: 2415533 - DNA, 25 bp, Homo sapien
ctgtcccaactttggttgctacagc

SEQ ID NO: 2415534 - DNA, 25 bp, Homo sapien
tgcgttctgacataaggaggagttc

SEQ ID NO: 2415535 - DNA, 25 bp, Homo sapien
ttggtgaggtgagagccatgatcac

SEQ ID NO: 2415536 - DNA, 25 bp, Homo sapien
caggcagtttctcttggtgaggtga

SEQ ID NO: 2415537 - DNA, 25 bp, Homo sapien
tctcttggtgaggtgagagccatga

SEQ ID NO: 2415538 - DNA, 25 bp, Homo sapien
tcaggcagtttctcttggtgaggtg

SEQ ID NO: 2415539 - DNA, 25 bp, Homo sapien
cagtaggagtaggagatttctgtcc

SEQ ID NO: 2415540 - DNA, 25 bp, Homo sapien
tgggagtgcagatatagctttgatt

SEQ ID NO: 2415541 - DNA, 25 bp, Homo sapien
ctaactggggctgggatctcattct

SEQ ID NO: 2415542 - DNA, 25 bp, Homo sapien
ttcttagcagtagggttactatcat

SEQ ID NO: 2415543 - DNA, 25 bp, Homo sapien
gatatattcttagcagtagggttac

SEQ ID NO: 2415544 - DNA, 25 bp, Homo sapien
gaaagcagaggcacgtgattcattg

SEQ ID NO: 2415545 - DNA, 25 bp, Homo sapien
caaggctctccacagcaaagatcca

SEQ ID NO: 2415546 - DNA, 25 bp, Homo sapien
cagtagggttcaattgggaaagcag

SEQ ID NO: 2415547 - DNA, 25 bp, Homo sapien
cccagaggccgaagagactcagtag

SEQ ID NO: 2415548 - DNA, 25 bp, Homo sapien
tgaagcaatggtgggaagcagctcc

SEQ ID NO: 2415549 - DNA, 25 bp, Homo sapien
aagttgatttccaccattgtgacag

SEQ ID NO: 2415550 - DNA, 25 bp, Homo sapien
cctctggaatttgtcacgtagcact

SEQ ID NO: 2415551 - DNA, 25 bp, Homo sapien
caagacaaatatgcaggaattcggc

SEQ ID NO: 2415552 - DNA, 25 bp, Homo sapien
gctggcagtttttccgatagctctt

SEQ ID NO: 2415553 - DNA, 25 bp, Homo sapien
agaaaatgctaattgctaggctggc

SEQ ID NO: 2415554 - DNA, 25 bp, Homo sapien
caaaacactgaatatggccaggagt

SEQ ID NO: 2415555 - DNA, 25 bp, Homo sapien
tatggccaggagtttccttaggatc

SEQ ID NO: 2415556 - DNA, 25 bp, Homo sapien
tatgttaggaacttgacagtgcctg

SEQ ID NO: 2415557 - DNA, 25 bp, Homo sapien
gaaatgaagcatgtcctaagccaga

SEQ ID NO: 2415558 - DNA, 25 bp, Homo sapien
ccaggtaagcgaggtgttgtgacaa

SEQ ID NO: 2415559 - DNA, 25 bp, Homo sapien
tagagaaacgtgagaccaggtaagc

SEQ ID NO: 2415560 - DNA, 25 bp, Homo sapien
ttgtacttgctctctctcagagccc

SEQ ID NO: 2415561 - DNA, 25 bp, Homo sapien
gcaatggatttgtacttgctctctc

SEQ ID NO: 2415562 - DNA, 25 bp, Homo sapien
ctgcaatggatttgtacttgctctc

SEQ ID NO: 2415563 - DNA, 25 bp, Homo sapien
ggatttgtacttgctctctctcaga

SEQ ID NO: 2415564 - DNA, 25 bp, Homo sapien
agaaggatgaagtgcatgcttttgg

SEQ ID NO: 2415565 - DNA, 25 bp, Homo sapien
ggatgaagtgcatgcttttggtgtt

SEQ ID NO: 2415566 - DNA, 25 bp, Homo sapien
cctctcaattcaccttgggttgtac

SEQ ID NO: 2415567 - DNA, 25 bp, Homo sapien
tttggtgttccacagtgtctcctct

SEQ ID NO: 2415568 - DNA, 25 bp, Homo sapien
ctccatgtccttcagaggaacaatt

SEQ ID NO: 2415569 - DNA, 25 bp, Homo sapien
ggaacaattctgagaagcaatgtac

SEQ ID NO: 2415570 - DNA, 25 bp, Homo sapien
ccatgtccttcagaggaacaattct

SEQ ID NO: 2415571 - DNA, 25 bp, Homo sapien
aacaattctgagaagcaatgtacat

SEQ ID NO: 2415572 - DNA, 25 bp, Homo sapien
gattttgagaattgtatttccagag

SEQ ID NO: 2415573 - DNA, 25 bp, Homo sapien
tcaatcaaaggtctgtcactgggca

SEQ ID NO: 2415574 - DNA, 25 bp, Homo sapien
tgggcatcaatcaaaggtctgtcac

SEQ ID NO: 2415575 - DNA, 25 bp, Homo sapien
cactggagagtaatggctcttccat

SEQ ID NO: 2415576 - DNA, 25 bp, Homo sapien
ttttcctctgcccacaccaacaccc

SEQ ID NO: 2415577 - DNA, 25 bp, Homo sapien
tcattttttcctctgcccacaccaa

SEQ ID NO: 2415578 - DNA, 25 bp, Homo sapien
ctcttcattgccaaggctttcattt

SEQ ID NO: 2415579 - DNA, 25 bp, Homo sapien
tcttcattgccaaggctttcatttt

SEQ ID NO: 2415580 - DNA, 25 bp, Homo sapien
cagtccagcccgatgtacgaattac

SEQ ID NO: 2415581 - DNA, 25 bp, Homo sapien
gacaaattctatactgagctgccag

SEQ ID NO: 2415582 - DNA, 25 bp, Homo sapien
ggcatgagcctcaaagtctggtctg

SEQ ID NO: 2415583 - DNA, 25 bp, Homo sapien
taggaaacctgctgataacagtggg

SEQ ID NO: 2415584 - DNA, 25 bp, Homo sapien
catagctagagaacaagcccagtga

SEQ ID NO: 2415585 - DNA, 25 bp, Homo sapien
caaactctgcgcgtaacttcttgag

SEQ ID NO: 2415586 - DNA, 25 bp, Homo sapien
ccctagtggcttagtgacaaagacc

SEQ ID NO: 2415587 - DNA, 25 bp, Homo sapien
taggaagcatctacacctcagctgt

SEQ ID NO: 2415588 - DNA, 25 bp, Homo sapien
tattgataacagaaactgtgcataa

SEQ ID NO: 2415589 - DNA, 25 bp, Homo sapien
ttgataacagaaactgtgcataatt

SEQ ID NO: 2415590 - DNA, 25 bp, Homo sapien
tttattgataacagaaactgtgcat

SEQ ID NO: 2415591 - DNA, 25 bp, Homo sapien
ttttattgataacagaaactgtgca

SEQ ID NO: 2415592 - DNA, 25 bp, Homo sapien
tatagagttcttcacaccagatggc

SEQ ID NO: 2415593 - DNA, 25 bp, Homo sapien
tatctgagacttgcaatggctggag

SEQ ID NO: 2415594 - DNA, 25 bp, Homo sapien
ttttcctcagccacaagtaagcgca

SEQ ID NO: 2415595 - DNA, 25 bp, Homo sapien
taaaaacagtgggttgagccccagc

SEQ ID NO: 2415596 - DNA, 25 bp, Homo sapien
ttaactcacagctcctaaacaagga

SEQ ID NO: 2415597 - DNA, 25 bp, Homo sapien
aagttatgaggactgagggaaacca

SEQ ID NO: 2415598 - DNA, 25 bp, Homo sapien
gatttgactttccttagataaacca

SEQ ID NO: 2415599 - DNA, 25 bp, Homo sapien
tgagagttgaccttccaaggaaaaa

SEQ ID NO: 2415600 - DNA, 25 bp, Homo sapien
gaaatgcactcaggtcttcctaatg

SEQ ID NO: 2415601 - DNA, 25 bp, Homo sapien
taatgcacagagtatgctcaggctg

SEQ ID NO: 2415602 - DNA, 25 bp, Homo sapien
gccagccagctacaacataatgtgg

SEQ ID NO: 2415603 - DNA, 25 bp, Homo sapien
cagtcttgtagtcgcctgacagcca

SEQ ID NO: 2415604 - DNA, 25 bp, Homo sapien
aagataggctgcaggaaatgtaacc

SEQ ID NO: 2415605 - DNA, 25 bp, Homo sapien
aaaattgcatttgtttgaggagcag

SEQ ID NO: 2415606 - DNA, 25 bp, Homo sapien
taacacggacttggaggaccttcaa

SEQ ID NO: 2415607 - DNA, 25 bp, Homo sapien
tctgagtgaagtacaaaaggaggca

SEQ ID NO: 2415608 - DNA, 25 bp, Homo sapien
aacagtctgtcccagtagcatacag

SEQ ID NO: 2415609 - DNA, 25 bp, Homo sapien
gaagaaacaatcactcttgtaacac

SEQ ID NO: 2415610 - DNA, 25 bp, Homo sapien
gtaacacattgatactacaaactac

SEQ ID NO: 2415611 - DNA, 25 bp, Homo sapien
aaagaaatctatcacaattcaaatg

SEQ ID NO: 2415612 - DNA, 25 bp, Homo sapien
aattgtccagtcgctctcttctctt

SEQ ID NO: 2415613 - DNA, 25 bp, Homo sapien
caattgtccagtcgctctcttctct

SEQ ID NO: 2415614 - DNA, 25 bp, Homo sapien
agcacaattgtccagtcgctctctt

SEQ ID NO: 2415615 - DNA, 25 bp, Homo sapien
cacaattgtccagtcgctctcttct

SEQ ID NO: 2415616 - DNA, 25 bp, Homo sapien
ggttacacaaaaggttcgcttctgc

SEQ ID NO: 2415617 - DNA, 25 bp, Homo sapien
tcatagctggtataggtcctttatc

SEQ ID NO: 2415618 - DNA, 25 bp, Homo sapien
gcaagaaaacgtgtttcagtacaga

SEQ ID NO: 2415619 - DNA, 25 bp, Homo sapien
tcagtacagaagctaacagggcaga

SEQ ID NO: 2415620 - DNA, 25 bp, Homo sapien
caaaaggcttctgaacgagatgagt

SEQ ID NO: 2415621 - DNA, 25 bp, Homo sapien
ttctgaacgagatgagtcataaagg

SEQ ID NO: 2415622 - DNA, 25 bp, Homo sapien
cagccaaggccttatccaggtgagc

SEQ ID NO: 2415623 - DNA, 25 bp, Homo sapien
cttatccaggtgagcaatttctaga

SEQ ID NO: 2415624 - DNA, 25 bp, Homo sapien
taggctcgtcttgaagtactagcct

SEQ ID NO: 2415625 - DNA, 25 bp, Homo sapien
tagcctcaagtattgttcctgcatc

SEQ ID NO: 2415626 - DNA, 25 bp, Homo sapien
tatttggtgtattaactgctacaga

SEQ ID NO: 2415627 - DNA, 25 bp, Homo sapien
tcttatcactatgggcacacttctc

SEQ ID NO: 2415628 - DNA, 25 bp, Homo sapien
tgtgtagtatagtcattttaacaaa

SEQ ID NO: 2415629 - DNA, 25 bp, Homo sapien
gtaaattgctttgtgtagtatagtc

SEQ ID NO: 2415630 - DNA, 25 bp, Homo sapien
aatatctttccacctttgtgtgttt

SEQ ID NO: 2415631 - DNA, 25 bp, Homo sapien
gaaagtcatcagtattttaataggg

SEQ ID NO: 2415632 - DNA, 25 bp, Homo sapien
tcatgtaatctagccagttatgtat

SEQ ID NO: 2415633 - DNA, 25 bp, Homo sapien
ttctaggtgtaagataatgtcatct

SEQ ID NO: 2415634 - DNA, 25 bp, Homo sapien
tctaggtgtaagataatgtcatctg

SEQ ID NO: 2415635 - DNA, 25 bp, Homo sapien
gaaaaaggctttcatgtaatctagc

SEQ ID NO: 2415636 - DNA, 25 bp, Homo sapien
tactaattgacaaggatagtaactg

SEQ ID NO: 2415637 - DNA, 25 bp, Homo sapien
aatgcttgcaaattacaggataatc

SEQ ID NO: 2415638 - DNA, 25 bp, Homo sapien
caaggatagtaactggcttcaacaa

SEQ ID NO: 2415639 - DNA, 25 bp, Homo sapien
tcaacaaagtcttctaacttgtgaa

SEQ ID NO: 2415640 - DNA, 25 bp, Homo sapien
tggatatcagttaatttgctcaaga

SEQ ID NO: 2415641 - DNA, 25 bp, Homo sapien
ctggatatcagttaatttgctcaag

SEQ ID NO: 2415642 - DNA, 25 bp, Homo sapien
ttaggaccattctccatagttggaa

SEQ ID NO: 2415643 - DNA, 25 bp, Homo sapien
gaccattctccatagttggaatgtg

SEQ ID NO: 2415644 - DNA, 25 bp, Homo sapien
tctccatagttggaatgtgtattgt

SEQ ID NO: 2415645 - DNA, 25 bp, Homo sapien
cattctccatagttggaatgtgtat

SEQ ID NO: 2415646 - DNA, 25 bp, Homo sapien
acacaggctgtaccagagccaaaca

SEQ ID NO: 2415647 - DNA, 25 bp, Homo sapien
tcgcctttgtacagtatatcagaaa

SEQ ID NO: 2415648 - DNA, 25 bp, Homo sapien
gcaaacaacacaggctgtaccagag

SEQ ID NO: 2415649 - DNA, 25 bp, Homo sapien
tgtacagtatatcagaaactgggca

SEQ ID NO: 2415650 - DNA, 25 bp, Homo sapien
ggtatctctctgacaccttaaattc

SEQ ID NO: 2415651 - DNA, 25 bp, Homo sapien
tatctctctgacaccttaaattcac

SEQ ID NO: 2415652 - DNA, 25 bp, Homo sapien
gaggtatctctctgacaccttaaat

SEQ ID NO: 2415653 - DNA, 25 bp, Homo sapien
ggtgaggtatctctctgacacctta

SEQ ID NO: 2415654 - DNA, 25 bp, Homo sapien
gtatgctgccatgcccaactaggtt

SEQ ID NO: 2415655 - DNA, 25 bp, Homo sapien
tcatcatggaattagtggtataacc

SEQ ID NO: 2415656 - DNA, 25 bp, Homo sapien
gactaacagttgactttacagtgac

SEQ ID NO: 2415657 - DNA, 25 bp, Homo sapien
cactgtgcacggcttacctatatct

SEQ ID NO: 2415658 - DNA, 25 bp, Homo sapien
caaattaattgaaaacaagctgagt

SEQ ID NO: 2415659 - DNA, 25 bp, Homo sapien
gaactgcagaaaatcaggcaaatta

SEQ ID NO: 2415660 - DNA, 25 bp, Homo sapien
taattgaaaacaagctgagttctgt

SEQ ID NO: 2415661 - DNA, 25 bp, Homo sapien
taaatgaactgcagaaaatcaggca

SEQ ID NO: 2415662 - DNA, 25 bp, Homo sapien
agttgttcatatcaaaggcacccac

SEQ ID NO: 2415663 - DNA, 25 bp, Homo sapien
aaaagttgttcatatcaaaggcacc

SEQ ID NO: 2415664 - DNA, 25 bp, Homo sapien
aagttgttcatatcaaaggcaccca

SEQ ID NO: 2415665 - DNA, 25 bp, Homo sapien
aaagttgttcatatcaaaggcaccc

SEQ ID NO: 2415666 - DNA, 25 bp, Homo sapien
cactgatgtgccaggtccagaatgc

SEQ ID NO: 2415667 - DNA, 25 bp, Homo sapien
gaatgatgccatctagtggaggagt

SEQ ID NO: 2415668 - DNA, 25 bp, Homo sapien
tagtggaggagttgccagttcttct

SEQ ID NO: 2415669 - DNA, 25 bp, Homo sapien
agaatgcaccgccttgtcactcctg

SEQ ID NO: 2415670 - DNA, 25 bp, Homo sapien
aatgactgagaaatgcacacagtga

SEQ ID NO: 2415671 - DNA, 25 bp, Homo sapien
tggtcctgttgaaaatgactgagaa

SEQ ID NO: 2415672 - DNA, 25 bp, Homo sapien
gactgagaaatgcacacagtgaaat

SEQ ID NO: 2415673 - DNA, 25 bp, Homo sapien
aaaatgactgagaaatgcacacagt

SEQ ID NO: 2415674 - DNA, 25 bp, Homo sapien
gacacccattatctactgcttcaca

SEQ ID NO: 2415675 - DNA, 25 bp, Homo sapien
tctgatggtcctctccatagagcca

SEQ ID NO: 2415676 - DNA, 25 bp, Homo sapien
cacaggacctgctgacacccattat

SEQ ID NO: 2415677 - DNA, 25 bp, Homo sapien
aagattcatagttcccacttcagtg

SEQ ID NO: 2415678 - DNA, 25 bp, Homo sapien
tcccgcagccagttggcagcaggtg

SEQ ID NO: 2415679 - DNA, 25 bp, Homo sapien
cacttcagtgaagcgggcaccttcc

SEQ ID NO: 2415680 - DNA, 25 bp, Homo sapien
gtgtggccacaatctgtggcaatga

SEQ ID NO: 2415681 - DNA, 25 bp, Homo sapien
agcaggtgtggccacaatctgtggc

SEQ ID NO: 2415682 - DNA, 25 bp, Homo sapien
cagttccacctttccaggctcttac

SEQ ID NO: 2415683 - DNA, 25 bp, Homo sapien
cttgcagtccccagttccacctttc

SEQ ID NO: 2415684 - DNA, 25 bp, Homo sapien
cccagttccacctttccaggctctt

SEQ ID NO: 2415685 - DNA, 25 bp, Homo sapien
ctcccatcttgcagtccccagttcc

SEQ ID NO: 2415686 - DNA, 25 bp, Homo sapien
tgaaaaataaggtcccactgggctc

SEQ ID NO: 2415687 - DNA, 25 bp, Homo sapien
caaagagcagggctttggtaggctt

SEQ ID NO: 2415688 - DNA, 25 bp, Homo sapien
atacttgggattggcccacagggac

SEQ ID NO: 2415689 - DNA, 25 bp, Homo sapien
cagggacactggattaaaggttcca

SEQ ID NO: 2415690 - DNA, 25 bp, Homo sapien
cctctgatcagtcagaaattacttt

SEQ ID NO: 2415691 - DNA, 25 bp, Homo sapien
ctcagtgagctgagaagagtactat

SEQ ID NO: 2415692 - DNA, 25 bp, Homo sapien
tttgaatgacggcaggaaagagctc

SEQ ID NO: 2415693 - DNA, 25 bp, Homo sapien
tatgttttggcctagaagccagaga

SEQ ID NO: 2415694 - DNA, 25 bp, Homo sapien
tgtgttgattgatgcctttgcctgt

SEQ ID NO: 2415695 - DNA, 25 bp, Homo sapien
tggatttacctgtaacctgtaagcc

SEQ ID NO: 2415696 - DNA, 25 bp, Homo sapien
taacctctgcaccttacatgtaagc

SEQ ID NO: 2415697 - DNA, 25 bp, Homo sapien
cactgtggagttcaggtcttaagca

SEQ ID NO: 2415698 - DNA, 25 bp, Homo sapien
caggaaatatgctttaagggaaggc

SEQ ID NO: 2415699 - DNA, 25 bp, Homo sapien
gagagcttttaaccttggtgtgtaa

SEQ ID NO: 2415700 - DNA, 25 bp, Homo sapien
gaattgaaggcaagcaaatccctct

SEQ ID NO: 2415701 - DNA, 25 bp, Homo sapien
cccacattgagaggacctaagatca

SEQ ID NO: 2415702 - DNA, 25 bp, Homo sapien
tcaacaatataacggttgatcaaca

SEQ ID NO: 2415703 - DNA, 25 bp, Homo sapien
tataaccgttgttatcaacaatcta

SEQ ID NO: 2415704 - DNA, 25 bp, Homo sapien
gttgattaacaagaaactgagagtg

SEQ ID NO: 2415705 - DNA, 25 bp, Homo sapien
taatggttgatcagtaagagaccaa

SEQ ID NO: 2415706 - DNA, 25 bp, Homo sapien
tagatccttacacggctttcgaaag

SEQ ID NO: 2415707 - DNA, 25 bp, Homo sapien
tcagagagactgcaattcacgaaat

SEQ ID NO: 2415708 - DNA, 25 bp, Homo sapien
tcatacagcctagtagaaaacctgg

SEQ ID NO: 2415709 - DNA, 25 bp, Homo sapien
tggtaaccccgcaacacttagtaga

SEQ ID NO: 2415710 - DNA, 25 bp, Homo sapien
ttgaatatgggacccattcttgatc

SEQ ID NO: 2415711 - DNA, 25 bp, Homo sapien
gaatatacagactagcagatgttga

SEQ ID NO: 2415712 - DNA, 25 bp, Homo sapien
ctcagttccaatgaatgtaggacga

SEQ ID NO: 2415713 - DNA, 25 bp, Homo sapien
gctgttgaatacactctaagagctc

SEQ ID NO: 2415714 - DNA, 25 bp, Homo sapien
gtttggctgaaacagtcgaatttta

SEQ ID NO: 2415715 - DNA, 25 bp, Homo sapien
agagttgccctcacagcagagcgat

SEQ ID NO: 2415716 - DNA, 25 bp, Homo sapien
gcgatacattctatccatgttgagg

SEQ ID NO: 2415717 - DNA, 25 bp, Homo sapien
tattatctactcctcgaaatgcctt

SEQ ID NO: 2415718 - DNA, 25 bp, Homo sapien
ctgccactgatctgagatgagatgg

SEQ ID NO: 2415719 - DNA, 25 bp, Homo sapien
ggagtcttgcagagtgcaatcattc

SEQ ID NO: 2415720 - DNA, 25 bp, Homo sapien
gattcctgcaatgcacagttcacaa

SEQ ID NO: 2415721 - DNA, 25 bp, Homo sapien
gtatatatccaaaagcagcagtccc

SEQ ID NO: 2415722 - DNA, 25 bp, Homo sapien
gactaagttgaatttatcccagaaa

SEQ ID NO: 2415723 - DNA, 25 bp, Homo sapien
cccagaaatggagattggtttaaca

SEQ ID NO: 2415724 - DNA, 25 bp, Homo sapien
tctcattagatgtagcagatgtatc

SEQ ID NO: 2415725 - DNA, 25 bp, Homo sapien
tatgcacttaatgacatggcttcaa

SEQ ID NO: 2415726 - DNA, 25 bp, Homo sapien
tccactgcatagtgcaaagctgatg

SEQ ID NO: 2415727 - DNA, 25 bp, Homo sapien
tgagccagggtgcaatgacaggttc

SEQ ID NO: 2415728 - DNA, 25 bp, Homo sapien
catatgatccgtgaacacagttcca

SEQ ID NO: 2415729 - DNA, 25 bp, Homo sapien
gaccactccaccgtcagcatatgat

SEQ ID NO: 2415730 - DNA, 25 bp, Homo sapien
ttggaagaaatagatggctgacctc

SEQ ID NO: 2415731 - DNA, 25 bp, Homo sapien
gaagaggatcctagagtccacagaa

SEQ ID NO: 2415732 - DNA, 25 bp, Homo sapien
catttggaaagccttaggcactatg

SEQ ID NO: 2415733 - DNA, 25 bp, Homo sapien
tgctcaccatcgtatagcacatttg

SEQ ID NO: 2415734 - DNA, 25 bp, Homo sapien
actaagcctctggcaagcaacttac

SEQ ID NO: 2415735 - DNA, 25 bp, Homo sapien
tccggtacactctgcggagcatccg

SEQ ID NO: 2415736 - DNA, 25 bp, Homo sapien
gatcctccttctccggtacactctg

SEQ ID NO: 2415737 - DNA, 25 bp, Homo sapien
tctgcggagcatccgttactgcaat

SEQ ID NO: 2415738 - DNA, 25 bp, Homo sapien
tccttctccggtacactctgcggag

SEQ ID NO: 2415739 - DNA, 25 bp, Homo sapien
cacaaaaaaggaggctcagacaacc

SEQ ID NO: 2415740 - DNA, 25 bp, Homo sapien
aggcccgaacctccaacaagcgtgt

SEQ ID NO: 2415741 - DNA, 25 bp, Homo sapien
gtcttgggagcgctgccctgcactt

SEQ ID NO: 2415742 - DNA, 25 bp, Homo sapien
aaaggaggctcagacaaccaagcac

SEQ ID NO: 2415743 - DNA, 25 bp, Homo sapien
tatccgagcaaatagtctagactgg

SEQ ID NO: 2415744 - DNA, 25 bp, Homo sapien
caatcacagacgcacaatagcaagc

SEQ ID NO: 2415745 - DNA, 25 bp, Homo sapien
gcgctcagcctcgtggtcttgtcaa

SEQ ID NO: 2415746 - DNA, 25 bp, Homo sapien
agagccagggttcgccggcaaagaa

SEQ ID NO: 2415747 - DNA, 25 bp, Homo sapien
gcagggtcctccgatgccgcagcat

SEQ ID NO: 2415748 - DNA, 25 bp, Homo sapien
ggacgggcgtgaaccatttcctcca

SEQ ID NO: 2415749 - DNA, 25 bp, Homo sapien
gggtcctccgatgccgcagcatcca

SEQ ID NO: 2415750 - DNA, 25 bp, Homo sapien
gtgaaccatttcctccaccagcagg

SEQ ID NO: 2415751 - DNA, 25 bp, Homo sapien
cgtggcggtcctcgccacgctccgg

SEQ ID NO: 2415752 - DNA, 25 bp, Homo sapien
gcgggttacccatgagggtgctaga

SEQ ID NO: 2415753 - DNA, 25 bp, Homo sapien
tcctcgccacgctccggagcgggtt

SEQ ID NO: 2415754 - DNA, 25 bp, Homo sapien
cacgctccggagcgggttacccatg

SEQ ID NO: 2415755 - DNA, 25 bp, Homo sapien
ctgggcagcgggaacctcgaagagg

SEQ ID NO: 2415756 - DNA, 25 bp, Homo sapien
tccagatttcgggcagggatgcggg

SEQ ID NO: 2415757 - DNA, 25 bp, Homo sapien
cgggaacctcgaagaggtggagatt

SEQ ID NO: 2415758 - DNA, 25 bp, Homo sapien
cagcgggaacctcgaagaggtggag

SEQ ID NO: 2415759 - DNA, 25 bp, Homo sapien
tggaggcggaatggagggcaaggcg

SEQ ID NO: 2415760 - DNA, 25 bp, Homo sapien
aggaggatggtgcaggaaacggcga

SEQ ID NO: 2415761 - DNA, 25 bp, Homo sapien
atggtgcaggaaacggcgacaaggc

SEQ ID NO: 2415762 - DNA, 25 bp, Homo sapien
gggcaaggcgaaggaggatggtgca

SEQ ID NO: 2415763 - DNA, 25 bp, Homo sapien
gcaagggccgcagcggagcgaagcg

SEQ ID NO: 2415764 - DNA, 25 bp, Homo sapien
ccgcagcggagcgaagcgggctggc

SEQ ID NO: 2415765 - DNA, 25 bp, Homo sapien
agggccgcagcggagcgaagcgggc

SEQ ID NO: 2415766 - DNA, 25 bp, Homo sapien
gggcaagggccgcagcggagcgaag

SEQ ID NO: 2415767 - DNA, 25 bp, Homo sapien
agcgcgcggctggaagcgaaagcag

SEQ ID NO: 2415768 - DNA, 25 bp, Homo sapien
aaagcaggcggtgtggccaagcccc

SEQ ID NO: 2415769 - DNA, 25 bp, Homo sapien
gcacggcccatagggcgctgggtac

SEQ ID NO: 2415770 - DNA, 25 bp, Homo sapien
cagagagcggcagtggcacggagcg

SEQ ID NO: 2415771 - DNA, 25 bp, Homo sapien
gcatcccttggggaggagcctccaa

SEQ ID NO: 2415772 - DNA, 25 bp, Homo sapien
gggtacgacgcaacccctccagcat

SEQ ID NO: 2415773 - DNA, 25 bp, Homo sapien
aggcgcagggtacgacgcaacccct

SEQ ID NO: 2415774 - DNA, 25 bp, Homo sapien
cagggccaggcgcagggtacgacgc

SEQ ID NO: 2415775 - DNA, 25 bp, Homo sapien
tccaagcgcagatatttcgcgagca

SEQ ID NO: 2415776 - DNA, 25 bp, Homo sapien
tgcagtcgctaaaaccgaagcggtt

SEQ ID NO: 2415777 - DNA, 25 bp, Homo sapien
gaatgcgcgccacgaacgagcgcct

SEQ ID NO: 2415778 - DNA, 25 bp, Homo sapien
gaggcccgagaatgcgcgccacgaa

SEQ ID NO: 2415779 - DNA, 25 bp, Homo sapien
tggccgggaagcgcccctcggtcaa

SEQ ID NO: 2415780 - DNA, 25 bp, Homo sapien
aggtgaatggccgggaagcgcccct

SEQ ID NO: 2415781 - DNA, 25 bp, Homo sapien
ctaggtgaatggccgggaagcgccc

SEQ ID NO: 2415782 - DNA, 25 bp, Homo sapien
tgaatggccgggaagcgcccctcgg

SEQ ID NO: 2415783 - DNA, 25 bp, Homo sapien
cagtttatacagcaggtatatatcc

SEQ ID NO: 2415784 - DNA, 25 bp, Homo sapien
cactgcagagtagagctaagtactc

SEQ ID NO: 2415785 - DNA, 25 bp, Homo sapien
ggtccccatgagaagacagtaagta

SEQ ID NO: 2415786 - DNA, 25 bp, Homo sapien
gcagcgccctagtcagcagtttata

SEQ ID NO: 2415787 - DNA, 25 bp, Homo sapien
tcttattaagccatgagttctgagc

SEQ ID NO: 2415788 - DNA, 25 bp, Homo sapien
cctcgcatttctggatagacagtga

SEQ ID NO: 2415789 - DNA, 25 bp, Homo sapien
tatctgtctatgagatactttgcct

SEQ ID NO: 2415790 - DNA, 25 bp, Homo sapien
tagacagtgaaatgtccgcaggact

SEQ ID NO: 2415791 - DNA, 25 bp, Homo sapien
cagaactgaggaagacacttacatc

SEQ ID NO: 2415792 - DNA, 25 bp, Homo sapien
tgcagtggacacaagctaggtgtcc

SEQ ID NO: 2415793 - DNA, 25 bp, Homo sapien
ttccaaccagtcataagttcaggtc

SEQ ID NO: 2415794 - DNA, 25 bp, Homo sapien
catcagatccacaagttgagggctc

SEQ ID NO: 2415795 - DNA, 25 bp, Homo sapien
tccaagtctggaagggttctgagca

SEQ ID NO: 2415796 - DNA, 25 bp, Homo sapien
ggatctttgatacacatacctagga

SEQ ID NO: 2415797 - DNA, 25 bp, Homo sapien
tcagatcgctagagcagcatacagg

SEQ ID NO: 2415798 - DNA, 25 bp, Homo sapien
tgaagagatacaaggtccaagtctg

SEQ ID NO: 2415799 - DNA, 25 bp, Homo sapien
gacatgctatgctgtattcataagg

SEQ ID NO: 2415800 - DNA, 25 bp, Homo sapien
aactgatacctgaacctggtgttcc

SEQ ID NO: 2415801 - DNA, 25 bp, Homo sapien
caccattgacattgtgagtcactga

SEQ ID NO: 2415802 - DNA, 25 bp, Homo sapien
acagattctcctttgcgttcaccat

SEQ ID NO: 2415803 - DNA, 25 bp, Homo sapien
tcaggaaaggccaacagtaggaaca

SEQ ID NO: 2415804 - DNA, 25 bp, Homo sapien
tgagtagagatcactctgcggcact

SEQ ID NO: 2415805 - DNA, 25 bp, Homo sapien
gaaatgtatagaccagttggacagc

SEQ ID NO: 2415806 - DNA, 25 bp, Homo sapien
caaaaagaatgatagcacatgcctg

SEQ ID NO: 2415807 - DNA, 25 bp, Homo sapien
tcctgcgagtggaggttaaaccgaa

SEQ ID NO: 2415808 - DNA, 25 bp, Homo sapien
cgaatgtgaaaaagtccgagaaggc

SEQ ID NO: 2415809 - DNA, 25 bp, Homo sapien
ggtccccgcaaactacgattgataa

SEQ ID NO: 2415810 - DNA, 25 bp, Homo sapien
gagggagctgtagcagactttcacc

SEQ ID NO: 2415811 - DNA, 25 bp, Homo sapien
gctggattgcagaccggccctctcg

SEQ ID NO: 2415812 - DNA, 25 bp, Homo sapien
agatcccaagggtcgtagcccctgg

SEQ ID NO: 2415813 - DNA, 25 bp, Homo sapien
gcgagtacacgtggcgggctggatt

SEQ ID NO: 2415814 - DNA, 25 bp, Homo sapien
tgttccgtcggccacgagggaagct

SEQ ID NO: 2415815 - DNA, 25 bp, Homo sapien
cagaggtgccagtgttgcaagcaaa

SEQ ID NO: 2415816 - DNA, 25 bp, Homo sapien
tagcggattgcatcagcaggaagac

SEQ ID NO: 2415817 - DNA, 25 bp, Homo sapien
cagccactgtgggtgcgtatccgag

SEQ ID NO: 2415818 - DNA, 25 bp, Homo sapien
tgcaagcaaatgacacggttacccc

SEQ ID NO: 2415819 - DNA, 25 bp, Homo sapien
ctttagtgttgatagaagggcccca

SEQ ID NO: 2415820 - DNA, 25 bp, Homo sapien
gatgaggctcatgatcaacgaaggt

SEQ ID NO: 2415821 - DNA, 25 bp, Homo sapien
taagaacaatctagctatgtctctc

SEQ ID NO: 2415822 - DNA, 25 bp, Homo sapien
tgtcaactgtaaactcccaaagctt

SEQ ID NO: 2415823 - DNA, 25 bp, Homo sapien
tggacggactccaggttgtaggcca

SEQ ID NO: 2415824 - DNA, 25 bp, Homo sapien
ttgtaggccagaggccgcttctgca

SEQ ID NO: 2415825 - DNA, 25 bp, Homo sapien
ggacagcttcccatgaccatgatgg

SEQ ID NO: 2415826 - DNA, 25 bp, Homo sapien
gcatgcatagttgacctggacggac

SEQ ID NO: 2415827 - DNA, 25 bp, Homo sapien
cctcaggttctcgtatacatagcgg

SEQ ID NO: 2415828 - DNA, 25 bp, Homo sapien
cgggtgcctgatgaccagtctggta

SEQ ID NO: 2415829 - DNA, 25 bp, Homo sapien
tagtgcattacacacaacttccttg

SEQ ID NO: 2415830 - DNA, 25 bp, Homo sapien
tcagaacccagagagcctcaggttc

SEQ ID NO: 2415831 - DNA, 25 bp, Homo sapien
ccaacatattgtgttcgtgagggtg

SEQ ID NO: 2415832 - DNA, 25 bp, Homo sapien
gagatgctatatttcacctatcaga

SEQ ID NO: 2415833 - DNA, 25 bp, Homo sapien
tggcatcagctagcaaacttttaaa

SEQ ID NO: 2415834 - DNA, 25 bp, Homo sapien
aactagccaggtttagtggctcaca

SEQ ID NO: 2415835 - DNA, 25 bp, Homo sapien
tgtatatcactcacggtcctttagg

SEQ ID NO: 2415836 - DNA, 25 bp, Homo sapien
caaaggagccagactgatgctgtca

SEQ ID NO: 2415837 - DNA, 25 bp, Homo sapien
gatgctgtcaatagaggcctgtctc

SEQ ID NO: 2415838 - DNA, 25 bp, Homo sapien
cacgggatagatccggaagggcaac

SEQ ID NO: 2415839 - DNA, 25 bp, Homo sapien
tataagcacattaaagagtatatta

SEQ ID NO: 2415840 - DNA, 25 bp, Homo sapien
cacattaaagagtatattatgagaa

SEQ ID NO: 2415841 - DNA, 25 bp, Homo sapien
aaagcaacttaaaggcaatgatacc

SEQ ID NO: 2415842 - DNA, 25 bp, Homo sapien
aaggcaatgatacctagaatataag

SEQ ID NO: 2415843 - DNA, 25 bp, Homo sapien
tcaaccagggattaatcctggagct

SEQ ID NO: 2415844 - DNA, 25 bp, Homo sapien
tatttggttagacaaagtgactccc

SEQ ID NO: 2415845 - DNA, 25 bp, Homo sapien
taatagtgcctctcaaccatacacc

SEQ ID NO: 2415846 - DNA, 25 bp, Homo sapien
gcttgatagtctaacaacattgtag

SEQ ID NO: 2415847 - DNA, 25 bp, Homo sapien
ggttctctaattagttgctttcaga

SEQ ID NO: 2415848 - DNA, 25 bp, Homo sapien
tacttggcaagtaaaggactatgtt

SEQ ID NO: 2415849 - DNA, 25 bp, Homo sapien
gaagcagatacgttatttaaacgga

SEQ ID NO: 2415850 - DNA, 25 bp, Homo sapien
gattggcatcccttacaggttctct

SEQ ID NO: 2415851 - DNA, 25 bp, Homo sapien
tggcatatttctggtggcattcggg

SEQ ID NO: 2415852 - DNA, 25 bp, Homo sapien
tccgtgttcataaacgtgctcaggg

SEQ ID NO: 2415853 - DNA, 25 bp, Homo sapien
ccggcattgtgggtaccttattaga

SEQ ID NO: 2415854 - DNA, 25 bp, Homo sapien
ggcatccatcgtatgctgtccagcg

SEQ ID NO: 2415855 - DNA, 25 bp, Homo sapien
caggatgtaagcgtataatttgtca

SEQ ID NO: 2415856 - DNA, 25 bp, Homo sapien
tgctgctggcttcctttatgactag

SEQ ID NO: 2415857 - DNA, 25 bp, Homo sapien
tatggtctagtggatccagaatttg

SEQ ID NO: 2415858 - DNA, 25 bp, Homo sapien
taatttgtcagacgggcaatatggt

SEQ ID NO: 2415859 - DNA, 25 bp, Homo sapien
tgataatgaccaggctgagcgcaat

SEQ ID NO: 2415860 - DNA, 25 bp, Homo sapien
aatgataatgaccaggctgagcgca

SEQ ID NO: 2415861 - DNA, 25 bp, Homo sapien
tagaaatgataatgaccaggctgag

SEQ ID NO: 2415862 - DNA, 25 bp, Homo sapien
gaaatgataatgaccaggctgagcg

SEQ ID NO: 2415863 - DNA, 25 bp, Homo sapien
gggagcacaccaaaatagtgcctgt

SEQ ID NO: 2415864 - DNA, 25 bp, Homo sapien
acaccaaaatagtgcctgtcatcct

SEQ ID NO: 2415865 - DNA, 25 bp, Homo sapien
ttctgttattgctgtggtggggagc

SEQ ID NO: 2415866 - DNA, 25 bp, Homo sapien
ggggagcacaccaaaatagtgcctg

SEQ ID NO: 2415867 - DNA, 25 bp, Homo sapien
tgcagtgcatcagcggctctcttct

SEQ ID NO: 2415868 - DNA, 25 bp, Homo sapien
aggtgcagtgcatcagcggctctct

SEQ ID NO: 2415869 - DNA, 25 bp, Homo sapien
gtgcagtgcatcagcggctctcttc

SEQ ID NO: 2415870 - DNA, 25 bp, Homo sapien
ggtgcagtgcatcagcggctctctt

SEQ ID NO: 2415871 - DNA, 25 bp, Homo sapien
catgtcatctgacctgtaggtctcc

SEQ ID NO: 2415872 - DNA, 25 bp, Homo sapien
tcccagttctcagatggttcttgga

SEQ ID NO: 2415873 - DNA, 25 bp, Homo sapien
tgtagaaatgggctccacccatgtc

SEQ ID NO: 2415874 - DNA, 25 bp, Homo sapien
gagcactggcgaagtcaagcgaaaa

SEQ ID NO: 2415875 - DNA, 25 bp, Homo sapien
tcatcattcagtgacaggaggggac

SEQ ID NO: 2415876 - DNA, 25 bp, Homo sapien
atcattcagtgacaggaggggacag

SEQ ID NO: 2415877 - DNA, 25 bp, Homo sapien
acatcatcattcagtgacaggaggg

SEQ ID NO: 2415878 - DNA, 25 bp, Homo sapien
catcatcattcagtgacaggagggg

SEQ ID NO: 2415879 - DNA, 25 bp, Homo sapien
tgttctgactcccttatgctatatt

SEQ ID NO: 2415880 - DNA, 25 bp, Homo sapien
tctcggggataaagatgttctgact

SEQ ID NO: 2415881 - DNA, 25 bp, Homo sapien
ggtagacccagtactttataacatg

SEQ ID NO: 2415882 - DNA, 25 bp, Homo sapien
cgatagatatgtcagaatgttctcc

SEQ ID NO: 2415883 - DNA, 25 bp, Homo sapien
tatgtcctcaattttactgcctgga

SEQ ID NO: 2415884 - DNA, 25 bp, Homo sapien
tgtataaggattgaggaaggggacc

SEQ ID NO: 2415885 - DNA, 25 bp, Homo sapien
gtcctcaattttactgcctggattt

SEQ ID NO: 2415886 - DNA, 25 bp, Homo sapien
cctatgtcctcaattttactgcctg

SEQ ID NO: 2415887 - DNA, 25 bp, Homo sapien
tagaggaagcaatttcggaacaacg

SEQ ID NO: 2415888 - DNA, 25 bp, Homo sapien
taaggatcgagatcgagaagcccac

SEQ ID NO: 2415889 - DNA, 25 bp, Homo sapien
aaatagcaatggtttgccggacaca

SEQ ID NO: 2415890 - DNA, 25 bp, Homo sapien
gcactaactatccatgtccagggta

SEQ ID NO: 2415891 - DNA, 25 bp, Homo sapien
ctcaagcagaggcttattggagata

SEQ ID NO: 2415892 - DNA, 25 bp, Homo sapien
gatcctagggctgtaatttgagggc

SEQ ID NO: 2415893 - DNA, 25 bp, Homo sapien
taggaggtcagactgaatgacctct

SEQ ID NO: 2415894 - DNA, 25 bp, Homo sapien
catgatctgagatctacttgtagga

SEQ ID NO: 2415895 - DNA, 25 bp, Homo sapien
gaatctgcatgacggatataccagg

SEQ ID NO: 2415896 - DNA, 25 bp, Homo sapien
taatttggagccctgtttgggacat

SEQ ID NO: 2415897 - DNA, 25 bp, Homo sapien
tagcataggctgtagaatgaagcac

SEQ ID NO: 2415898 - DNA, 25 bp, Homo sapien
gaagcacatctagattgaagactgg

SEQ ID NO: 2415899 - DNA, 25 bp, Homo sapien
caactagattggaagcgcccttgca

SEQ ID NO: 2415900 - DNA, 25 bp, Homo sapien
tttccttcctattaagagcacttgt

SEQ ID NO: 2415901 - DNA, 25 bp, Homo sapien
tgcattgttgtaattcacatcatgt

SEQ ID NO: 2415902 - DNA, 25 bp, Homo sapien
tgtatttacgccctttttgcttcaa

SEQ ID NO: 2415903 - DNA, 25 bp, Homo sapien
tgttgggagccatcaatcaggtaac

SEQ ID NO: 2415904 - DNA, 25 bp, Homo sapien
cagtgtgcagcacgagtggccagta

SEQ ID NO: 2415905 - DNA, 25 bp, Homo sapien
gaagagtataaagtttcttagccag

SEQ ID NO: 2415906 - DNA, 25 bp, Homo sapien
gtgtgaagatgacaaccaggcacag

SEQ ID NO: 2415907 - DNA, 25 bp, Homo sapien
tgtattcaatcatttcaggatgttt

SEQ ID NO: 2415908 - DNA, 25 bp, Homo sapien
ttataaacaatgctccagtaaatat

SEQ ID NO: 2415909 - DNA, 25 bp, Homo sapien
ggtattctactggttgagtagatat

SEQ ID NO: 2415910 - DNA, 25 bp, Homo sapien
taaacaatgctccagtaaatatcct

SEQ ID NO: 2415911 - DNA, 25 bp, Homo sapien
ggtgcagtgtaggttgcttctaggc

SEQ ID NO: 2415912 - DNA, 25 bp, Homo sapien
tgcagtgtaggttgcttctaggctt

SEQ ID NO: 2415913 - DNA, 25 bp, Homo sapien
gaggtgcagtgtaggttgcttctag

SEQ ID NO: 2415914 - DNA, 25 bp, Homo sapien
gcagtgtaggttgcttctaggcttt

SEQ ID NO: 2415915 - DNA, 25 bp, Homo sapien
tatagacaaaggtggtaaacaggtg

SEQ ID NO: 2415916 - DNA, 25 bp, Homo sapien
tacatgtaggtgcatatttatctcc

SEQ ID NO: 2415917 - DNA, 25 bp, Homo sapien
gacaatttggccacaagaggatcct

SEQ ID NO: 2415918 - DNA, 25 bp, Homo sapien
tcagctgtggtcaagtacacggata

SEQ ID NO: 2415919 - DNA, 25 bp, Homo sapien
tcatatctgttaaagtgaaggatct

SEQ ID NO: 2415920 - DNA, 25 bp, Homo sapien
tattttatacattttcgtgagtgcc

SEQ ID NO: 2415921 - DNA, 25 bp, Homo sapien
tgcctaccatgggatggacactctg

SEQ ID NO: 2415922 - DNA, 25 bp, Homo sapien
taaagtgaaggatcttaaggagatg

SEQ ID NO: 2415923 - DNA, 25 bp, Homo sapien
gcatattatccttagtttcaaatat

SEQ ID NO: 2415924 - DNA, 25 bp, Homo sapien
gagttacagtaagattcagcaatat

SEQ ID NO: 2415925 - DNA, 25 bp, Homo sapien
gaacaaatatttgtgagcctcttga

SEQ ID NO: 2415926 - DNA, 25 bp, Homo sapien
tacagaactaaagatgactcagagc

SEQ ID NO: 2415927 - DNA, 25 bp, Homo sapien
taatccatcaaagtgggatgtctct

SEQ ID NO: 2415928 - DNA, 25 bp, Homo sapien
aaggaagccaagtctttctgaaaag

SEQ ID NO: 2415929 - DNA, 25 bp, Homo sapien
aacagtagaaaggacaaggaagcca

SEQ ID NO: 2415930 - DNA, 25 bp, Homo sapien
cagtgtaagttatctacttgataaa

SEQ ID NO: 2415931 - DNA, 25 bp, Homo sapien
ttaccagactccgacacaatgggcc

SEQ ID NO: 2415932 - DNA, 25 bp, Homo sapien
tccagaagtctgtggatgccgctcc

SEQ ID NO: 2415933 - DNA, 25 bp, Homo sapien
cagcaagaggactcatggacgtctc

SEQ ID NO: 2415934 - DNA, 25 bp, Homo sapien
gaaaggctaataaggccctctggct

SEQ ID NO: 2415935 - DNA, 25 bp, Homo sapien
cttaacaggccaagtattcaaagga

SEQ ID NO: 2415936 - DNA, 25 bp, Homo sapien
tttaaatcttcatagagtgaaagct

SEQ ID NO: 2415937 - DNA, 25 bp, Homo sapien
ttaacaggccaagtattcaaaggaa

SEQ ID NO: 2415938 - DNA, 25 bp, Homo sapien
aaatcttcatagagtgaaagctgaa

SEQ ID NO: 2415939 - DNA, 25 bp, Homo sapien
cattacattgtgttgcagaaatacc

SEQ ID NO: 2415940 - DNA, 25 bp, Homo sapien
cattgtgttgcagaaatacctgtct

SEQ ID NO: 2415941 - DNA, 25 bp, Homo sapien
ttgtgttgcagaaatacctgtcttt

SEQ ID NO: 2415942 - DNA, 25 bp, Homo sapien
tgtgttgcagaaatacctgtctttc

SEQ ID NO: 2415943 - DNA, 25 bp, Homo sapien
cacagagttgacaaactgacagttg

SEQ ID NO: 2415944 - DNA, 25 bp, Homo sapien
gagttgacaaactgacagttggaac

SEQ ID NO: 2415945 - DNA, 25 bp, Homo sapien
tagctgagcaatctggtagagagca

SEQ ID NO: 2415946 - DNA, 25 bp, Homo sapien
cagagttgacaaactgacagttgga

SEQ ID NO: 2415947 - DNA, 25 bp, Homo sapien
cttcctcagaagcaaaatccttcac

SEQ ID NO: 2415948 - DNA, 25 bp, Homo sapien
cattgcttcctcagaagcaaaatcc

SEQ ID NO: 2415949 - DNA, 25 bp, Homo sapien
ctccattgcttcctcagaagcaaaa

SEQ ID NO: 2415950 - DNA, 25 bp, Homo sapien
tttctccattgcttcctcagaagca

SEQ ID NO: 2415951 - DNA, 25 bp, Homo sapien
ccttgatcttcagtctttgtgctct

SEQ ID NO: 2415952 - DNA, 25 bp, Homo sapien
taaagtagaatgaaactcagtttct

SEQ ID NO: 2415953 - DNA, 25 bp, Homo sapien
tctttaagtgcttcagaaaatgcct

SEQ ID NO: 2415954 - DNA, 25 bp, Homo sapien
catgtgatataaagtagaatgaaac

SEQ ID NO: 2415955 - DNA, 25 bp, Homo sapien
agggcccaattaggattctcagtac

SEQ ID NO: 2415956 - DNA, 25 bp, Homo sapien
gtacatgcttcagtaaggtgttccc

SEQ ID NO: 2415957 - DNA, 25 bp, Homo sapien
ggattctcagtacatgcttcagtaa

SEQ ID NO: 2415958 - DNA, 25 bp, Homo sapien
taaaagggcccaattaggattctca

SEQ ID NO: 2415959 - DNA, 25 bp, Homo sapien
aaagcagaacttagtagggccatct

SEQ ID NO: 2415960 - DNA, 25 bp, Homo sapien
tagtagggccatctgtcgataagct

SEQ ID NO: 2415961 - DNA, 25 bp, Homo sapien
ctgtcgataagctttcacttctacc

SEQ ID NO: 2415962 - DNA, 25 bp, Homo sapien
aatgcaaaagcagaacttagtaggg

SEQ ID NO: 2415963 - DNA, 25 bp, Homo sapien
attaaatttggaaagattcattctt

SEQ ID NO: 2415964 - DNA, 25 bp, Homo sapien
ttaaatttggaaagattcattcttg

SEQ ID NO: 2415965 - DNA, 25 bp, Homo sapien
taaatttggaaagattcattcttgc

SEQ ID NO: 2415966 - DNA, 25 bp, Homo sapien
tcagtccagcttctttcaaagcaat

SEQ ID NO: 2415967 - DNA, 25 bp, Homo sapien
tttagtttgattgaagataacatgc

SEQ ID NO: 2415968 - DNA, 25 bp, Homo sapien
aaaggaataggagtcatccaggttc

SEQ ID NO: 2415969 - DNA, 25 bp, Homo sapien
ttgaagataacatgcagaggttttc

SEQ ID NO: 2415970 - DNA, 25 bp, Homo sapien
aatgcagggcaagtatatcttaagc

SEQ ID NO: 2415971 - DNA, 25 bp, Homo sapien
attacttcagtatcactccaggtgc

SEQ ID NO: 2415972 - DNA, 25 bp, Homo sapien
caaagaatggactatagcatctctc

SEQ ID NO: 2415973 - DNA, 25 bp, Homo sapien
caaagtccccatgttatgttaagca

SEQ ID NO: 2415974 - DNA, 25 bp, Homo sapien
aatttctgactgatgagcaataggg

SEQ ID NO: 2415975 - DNA, 25 bp, Homo sapien
tgcgctcggcccaggctatgtaatt

SEQ ID NO: 2415976 - DNA, 25 bp, Homo sapien
gatgataaacatcacgtagcccctt

SEQ ID NO: 2415977 - DNA, 25 bp, Homo sapien
gatttcaaatggctggatgataaac

SEQ ID NO: 2415978 - DNA, 25 bp, Homo sapien
aaatggtttacctctgatacgatag

SEQ ID NO: 2415979 - DNA, 25 bp, Homo sapien
gagccttgctatttacatgttattg

SEQ ID NO: 2415980 - DNA, 25 bp, Homo sapien
cataacagctacaagagtaactcac

SEQ ID NO: 2415981 - DNA, 25 bp, Homo sapien
caaactagtattccatcaaaatggt

SEQ ID NO: 2415982 - DNA, 25 bp, Homo sapien
tcttgaatcaaggtaacagggccaa

SEQ ID NO: 2415983 - DNA, 25 bp, Homo sapien
cttagttcccatgactggtacggca

SEQ ID NO: 2415984 - DNA, 25 bp, Homo sapien
ggtacggcatgttaatatgagcatc

SEQ ID NO: 2415985 - DNA, 25 bp, Homo sapien
gtgtccaggctgaatgttacaagtc

SEQ ID NO: 2415986 - DNA, 25 bp, Homo sapien
taattgatgaagaaagtgacactag

SEQ ID NO: 2415987 - DNA, 25 bp, Homo sapien
aagaaagtgacactagtttcatttt

SEQ ID NO: 2415988 - DNA, 25 bp, Homo sapien
ctttataattgatgaagaaagtgac

SEQ ID NO: 2415989 - DNA, 25 bp, Homo sapien
tataattgatgaagaaagtgacact

SEQ ID NO: 2415990 - DNA, 25 bp, Homo sapien
cagccccaggcaacgattaatgtac

SEQ ID NO: 2415991 - DNA, 25 bp, Homo sapien
acctcatatagtgctggcagacatg

SEQ ID NO: 2415992 - DNA, 25 bp, Homo sapien
tgggcctcagcacatacagttcttt

SEQ ID NO: 2415993 - DNA, 25 bp, Homo sapien
cagcatggtaagaccttcagaatga

SEQ ID NO: 2415994 - DNA, 25 bp, Homo sapien
ttctcatgaacctcaagtgtgacct

SEQ ID NO: 2415995 - DNA, 25 bp, Homo sapien
attctcatgaacctcaagtgtgacc

SEQ ID NO: 2415996 - DNA, 25 bp, Homo sapien
tagtttccggaggatatgtgtattt

SEQ ID NO: 2415997 - DNA, 25 bp, Homo sapien
ctgtagtttccggaggatatgtgta

SEQ ID NO: 2415998 - DNA, 25 bp, Homo sapien
cttctgtagtttccggaggatatgt

SEQ ID NO: 2415999 - DNA, 25 bp, Homo sapien
aactcttctgtagtttccggaggat

SEQ ID NO: 2416000 - DNA, 25 bp, Homo sapien
tatccaagtggtatactccacccag

SEQ ID NO: 2416001 - DNA, 25 bp, Homo sapien
tccacccagagttgtgaactggcat

SEQ ID NO: 2416002 - DNA, 25 bp, Homo sapien
tggtttacactgtggaggaagctcc

SEQ ID NO: 2416003 - DNA, 25 bp, Homo sapien
gaactggcataaatccaccacattg

SEQ ID NO: 2416004 - DNA, 25 bp, Homo sapien
tcatctctcgttcacattttatggc

SEQ ID NO: 2416005 - DNA, 25 bp, Homo sapien
gctgaaacagtttcacttaatactt

SEQ ID NO: 2416006 - DNA, 25 bp, Homo sapien
acttaatactttcatctctcgttca

SEQ ID NO: 2416007 - DNA, 25 bp, Homo sapien
ctcgttcacattttatggcttcaga

SEQ ID NO: 2416008 - DNA, 25 bp, Homo sapien
gatgcttccaggtttgttgaactaa

SEQ ID NO: 2416009 - DNA, 25 bp, Homo sapien
tgcaattgcgtttggtgcctttttc

SEQ ID NO: 2416010 - DNA, 25 bp, Homo sapien
tgcccatcctatgtccaggattgta

SEQ ID NO: 2416011 - DNA, 25 bp, Homo sapien
cagtataagaaagaggtacagtttc

SEQ ID NO: 2416012 - DNA, 25 bp, Homo sapien
cctcctgaattaagtgagaccctct

SEQ ID NO: 2416013 - DNA, 25 bp, Homo sapien
gacaagctcagttactgcagaagtg

SEQ ID NO: 2416014 - DNA, 25 bp, Homo sapien
tgggtatgcaggagtcgtacagcaa

SEQ ID NO: 2416015 - DNA, 25 bp, Homo sapien
tgcagaaacatgatcatagtgggta

SEQ ID NO: 2416016 - DNA, 25 bp, Homo sapien
ggattcttcttgaggtttgcccaca

SEQ ID NO: 2416017 - DNA, 25 bp, Homo sapien
ttcttgaggtttgcccacacataca

SEQ ID NO: 2416018 - DNA, 25 bp, Homo sapien
gaggtttgcccacacatacagagta

SEQ ID NO: 2416019 - DNA, 25 bp, Homo sapien
gtttgcccacacatacagagtaaca

SEQ ID NO: 2416020 - DNA, 25 bp, Homo sapien
cactgtccagatctgccaaagtact

SEQ ID NO: 2416021 - DNA, 25 bp, Homo sapien
ccagatctgccaaagtactagcttg

SEQ ID NO: 2416022 - DNA, 25 bp, Homo sapien
atttccactgtccagatctgccaaa

SEQ ID NO: 2416023 - DNA, 25 bp, Homo sapien
gtccagatctgccaaagtactagct

SEQ ID NO: 2416024 - DNA, 25 bp, Homo sapien
gtatttctgtggctacaccgaattt

SEQ ID NO: 2416025 - DNA, 25 bp, Homo sapien
ctcctgcagttgtagtattgattct

SEQ ID NO: 2416026 - DNA, 25 bp, Homo sapien
gctacaccgaatttaagatgaagga

SEQ ID NO: 2416027 - DNA, 25 bp, Homo sapien
tgtggctacaccgaatttaagatga

SEQ ID NO: 2416028 - DNA, 25 bp, Homo sapien
cttgcaaatcacatggtggagtttc

SEQ ID NO: 2416029 - DNA, 25 bp, Homo sapien
tttttatcttgcaaatcacatggtg

SEQ ID NO: 2416030 - DNA, 25 bp, Homo sapien
ttatcttgcaaatcacatggtggag

SEQ ID NO: 2416031 - DNA, 25 bp, Homo sapien
tgcaaatcacatggtggagtttcca

SEQ ID NO: 2416032 - DNA, 25 bp, Homo sapien
ataaacgtgttcatttcttgggcta

SEQ ID NO: 2416033 - DNA, 25 bp, Homo sapien
cacaaactaataaacgtgttcattt

SEQ ID NO: 2416034 - DNA, 25 bp, Homo sapien
taataaacgtgttcatttcttgggc

SEQ ID NO: 2416035 - DNA, 25 bp, Homo sapien
aataaacgtgttcatttcttgggct

SEQ ID NO: 2416036 - DNA, 25 bp, Homo sapien
ctgagaaagcaatttagtttcctgt

SEQ ID NO: 2416037 - DNA, 25 bp, Homo sapien
ggacagatacattgatcagctcttt

SEQ ID NO: 2416038 - DNA, 25 bp, Homo sapien
caaggacagatacattgatcagctc

SEQ ID NO: 2416039 - DNA, 25 bp, Homo sapien
tgcacaaggacagatacattgatca

SEQ ID NO: 2416040 - DNA, 25 bp, Homo sapien
cagatacattgatcagctctttaat

SEQ ID NO: 2416041 - DNA, 25 bp, Homo sapien
tttctcaattcgctgtatttcaagc

SEQ ID NO: 2416042 - DNA, 25 bp, Homo sapien
tctcaattcgctgtatttcaagcct

SEQ ID NO: 2416043 - DNA, 25 bp, Homo sapien
ctcaattcgctgtatttcaagcctt

SEQ ID NO: 2416044 - DNA, 25 bp, Homo sapien
ttctcaattcgctgtatttcaagcc

SEQ ID NO: 2416045 - DNA, 25 bp, Homo sapien
ctttctcatatttcaaacgggcttc

SEQ ID NO: 2416046 - DNA, 25 bp, Homo sapien
ttctcatatttcaaacgggcttcct

SEQ ID NO: 2416047 - DNA, 25 bp, Homo sapien
tcttctttctcatatttcaaacggg

SEQ ID NO: 2416048 - DNA, 25 bp, Homo sapien
ttctttctcatatttcaaacgggct

SEQ ID NO: 2416049 - DNA, 25 bp, Homo sapien
tctcagtgaatagatcactgtattt

SEQ ID NO: 2416050 - DNA, 25 bp, Homo sapien
tattacatggtagatatgagaaaag

SEQ ID NO: 2416051 - DNA, 25 bp, Homo sapien
gtctttattacatggtagatatgag

SEQ ID NO: 2416052 - DNA, 25 bp, Homo sapien
tttctcagtgaatagatcactgtat

SEQ ID NO: 2416053 - DNA, 25 bp, Homo sapien
ttgtagcagcttcaatcgttcagct

SEQ ID NO: 2416054 - DNA, 25 bp, Homo sapien
gcagcttcaatcgttcagctttggt

SEQ ID NO: 2416055 - DNA, 25 bp, Homo sapien
ttcctctttcagtcgtctctcctcc

SEQ ID NO: 2416056 - DNA, 25 bp, Homo sapien
cttcaatcgttcagctttggtgact

SEQ ID NO: 2416057 - DNA, 25 bp, Homo sapien
aaaggctattaacatgcaagttact

SEQ ID NO: 2416058 - DNA, 25 bp, Homo sapien
aggccacatcataaaaaaggctatt

SEQ ID NO: 2416059 - DNA, 25 bp, Homo sapien
gctattaacatgcaagttacttgaa

SEQ ID NO: 2416060 - DNA, 25 bp, Homo sapien
aggctattaacatgcaagttacttg

SEQ ID NO: 2416061 - DNA, 25 bp, Homo sapien
acaaatgctcaagatcactaatcag

SEQ ID NO: 2416062 - DNA, 25 bp, Homo sapien
ctcaagatcactaatcagataaatt

SEQ ID NO: 2416063 - DNA, 25 bp, Homo sapien
caaatgctcaagatcactaatcaga

SEQ ID NO: 2416064 - DNA, 25 bp, Homo sapien
gatcactaatcagataaatttcaat

SEQ ID NO: 2416065 - DNA, 25 bp, Homo sapien
tttcaaagagacacctgtaggctgg

SEQ ID NO: 2416066 - DNA, 25 bp, Homo sapien
tcaaagagacacctgtaggctgggc

SEQ ID NO: 2416067 - DNA, 25 bp, Homo sapien
aaagagacacctgtaggctgggcgc

SEQ ID NO: 2416068 - DNA, 25 bp, Homo sapien
ttttcaaagagacacctgtaggctg

SEQ ID NO: 2416069 - DNA, 25 bp, Homo sapien
gaagcctgtttgtgatgacagtgtt

SEQ ID NO: 2416070 - DNA, 25 bp, Homo sapien
gtatgtgttaccatgcaacccattt

SEQ ID NO: 2416071 - DNA, 25 bp, Homo sapien
catacactgtaagtgattatacaac

SEQ ID NO: 2416072 - DNA, 25 bp, Homo sapien
gaaatgcgtcctactgttgtaaagg

SEQ ID NO: 2416073 - DNA, 25 bp, Homo sapien
gccccaaatctagacataagtaaaa

SEQ ID NO: 2416074 - DNA, 25 bp, Homo sapien
actaagttcacctactgaaccattt

SEQ ID NO: 2416075 - DNA, 25 bp, Homo sapien
taaaaagagttcagacaaaactaca

SEQ ID NO: 2416076 - DNA, 25 bp, Homo sapien
aaactaagttcacctactgaaccat

SEQ ID NO: 2416077 - DNA, 25 bp, Homo sapien
caaaagtatcatgattatgtaagat

SEQ ID NO: 2416078 - DNA, 25 bp, Homo sapien
acctttccgtaaagttagattgatg

SEQ ID NO: 2416079 - DNA, 25 bp, Homo sapien
gggttcaaaggacaataaatcattg

SEQ ID NO: 2416080 - DNA, 25 bp, Homo sapien
gggaatcagttatttaaagcacgca

SEQ ID NO: 2416081 - DNA, 25 bp, Homo sapien
taaacagagtactagtcaagaaggc

SEQ ID NO: 2416082 - DNA, 25 bp, Homo sapien
aggcagatctattcttttctggaaa

SEQ ID NO: 2416083 - DNA, 25 bp, Homo sapien
gaagattctattcagcaatgtgttt

SEQ ID NO: 2416084 - DNA, 25 bp, Homo sapien
agactcacagttacaataatatcac

SEQ ID NO: 2416085 - DNA, 25 bp, Homo sapien
gtgttttaaggcagatctattcttt

SEQ ID NO: 2416086 - DNA, 25 bp, Homo sapien
atactttcctgattaggctcatgtg

SEQ ID NO: 2416087 - DNA, 25 bp, Homo sapien
tatactttcctgattaggctcatgt

SEQ ID NO: 2416088 - DNA, 25 bp, Homo sapien
ctttcctgattaggctcatgtgttt

SEQ ID NO: 2416089 - DNA, 25 bp, Homo sapien
tactttcctgattaggctcatgtgt

SEQ ID NO: 2416090 - DNA, 25 bp, Homo sapien
catatttgaagagttatacatggga

SEQ ID NO: 2416091 - DNA, 25 bp, Homo sapien
tcttcttgaagagtgcatatattac

SEQ ID NO: 2416092 - DNA, 25 bp, Homo sapien
tattacactaattcactcggcagat

SEQ ID NO: 2416093 - DNA, 25 bp, Homo sapien
ggaatttataggagatcatgtgaac

SEQ ID NO: 2416094 - DNA, 25 bp, Homo sapien
tatggactaaacgtgtgtatgctca

SEQ ID NO: 2416095 - DNA, 25 bp, Homo sapien
aagtagagactttgctgccatataa

SEQ ID NO: 2416096 - DNA, 25 bp, Homo sapien
tcaaagttcagagggcataagaatc

SEQ ID NO: 2416097 - DNA, 25 bp, Homo sapien
ccactatgtagtgaagtagttctca

SEQ ID NO: 2416098 - DNA, 25 bp, Homo sapien
cttacttggcagacttaggaaacta

SEQ ID NO: 2416099 - DNA, 25 bp, Homo sapien
ttaacaagtactccgggtgcattag

SEQ ID NO: 2416100 - DNA, 25 bp, Homo sapien
taaggtccatttgcattccgccagg

SEQ ID NO: 2416101 - DNA, 25 bp, Homo sapien
ggccctcagaggtatcacagacctg

SEQ ID NO: 2416102 - DNA, 25 bp, Homo sapien
tgtatcctataagcagagttgtcgt

SEQ ID NO: 2416103 - DNA, 25 bp, Homo sapien
tatgtggaaaactcgtatttatact

SEQ ID NO: 2416104 - DNA, 25 bp, Homo sapien
tgtgtgttaccccattttagatgct

SEQ ID NO: 2416105 - DNA, 25 bp, Homo sapien
gccaagtacaaagaatgcactccac

SEQ ID NO: 2416106 - DNA, 25 bp, Homo sapien
gacagctttgaccatctcccgtttg

SEQ ID NO: 2416107 - DNA, 25 bp, Homo sapien
gagaagtactaaaacatttccgcca

SEQ ID NO: 2416108 - DNA, 25 bp, Homo sapien
gagatcaggataccgtgtgacagct

SEQ ID NO: 2416109 - DNA, 25 bp, Homo sapien
aagcttagcaacattcgagatcagg

SEQ ID NO: 2416110 - DNA, 25 bp, Homo sapien
cattgctgagaagagggccgaccca

SEQ ID NO: 2416111 - DNA, 25 bp, Homo sapien
gacccgcttcgctgtaaaatatgac

SEQ ID NO: 2416112 - DNA, 25 bp, Homo sapien
actggtgaagcagaatcagtggtcg

SEQ ID NO: 2416113 - DNA, 25 bp, Homo sapien
tgaagcagaatcagtggtcgcccct

SEQ ID NO: 2416114 - DNA, 25 bp, Homo sapien
tgtgtggacaaacgctcccgggttg

SEQ ID NO: 2416115 - DNA, 25 bp, Homo sapien
tccgcagagtcggagcagaaattgt

SEQ ID NO: 2416116 - DNA, 25 bp, Homo sapien
tgagctccaggaaaagagcgcagcc

SEQ ID NO: 2416117 - DNA, 25 bp, Homo sapien
gagtcaagctccactgcagtagtcc

SEQ ID NO: 2416118 - DNA, 25 bp, Homo sapien
gaagagggttctgagcgtctcctga

SEQ ID NO: 2416119 - DNA, 25 bp, Homo sapien
tagcggtcgaggcttttgcggctcc

SEQ ID NO: 2416120 - DNA, 25 bp, Homo sapien
gaaatatgctctgggcgaggaccac

SEQ ID NO: 2416121 - DNA, 25 bp, Homo sapien
cgcttcgcagtagacggacagagga

SEQ ID NO: 2416122 - DNA, 25 bp, Homo sapien
gcagcgtacgcgtcctttttcctaa

SEQ ID NO: 2416123 - DNA, 25 bp, Homo sapien
tacgcgtcctttttcctaagagcgc

SEQ ID NO: 2416124 - DNA, 25 bp, Homo sapien
ttgtttactttctgtgcagcgtacg

SEQ ID NO: 2416125 - DNA, 25 bp, Homo sapien
tactttctgtgcagcgtacgcgtcc

SEQ ID NO: 2416126 - DNA, 25 bp, Homo sapien
catgtggtgatgaaattcctgctct

SEQ ID NO: 2416127 - DNA, 25 bp, Homo sapien
gtggtgatgaaattcctgctctctt

SEQ ID NO: 2416128 - DNA, 25 bp, Homo sapien
tgtggtgatgaaattcctgctctct

SEQ ID NO: 2416129 - DNA, 25 bp, Homo sapien
atgtggtgatgaaattcctgctctc

SEQ ID NO: 2416130 - DNA, 25 bp, Homo sapien
actggagcccaaatgcagtgaggag

SEQ ID NO: 2416131 - DNA, 25 bp, Homo sapien
ggggtagggacttgtgcacagcagc

SEQ ID NO: 2416132 - DNA, 25 bp, Homo sapien
atactggagcccaaatgcagtgagg

SEQ ID NO: 2416133 - DNA, 25 bp, Homo sapien
aggggatactggagcccaaatgcag

SEQ ID NO: 2416134 - DNA, 25 bp, Homo sapien
tctgaccttgaaatagcctgctggt

SEQ ID NO: 2416135 - DNA, 25 bp, Homo sapien
gctgctacctttgggcctaaaacca

SEQ ID NO: 2416136 - DNA, 25 bp, Homo sapien
caagctgcataaaagattcactggt

SEQ ID NO: 2416137 - DNA, 25 bp, Homo sapien
gctggtgactggcattaacatacat

SEQ ID NO: 2416138 - DNA, 25 bp, Homo sapien
aattaggagtagtacagttcatgac

SEQ ID NO: 2416139 - DNA, 25 bp, Homo sapien
ggagtagtacagttcatgacaaaaa

SEQ ID NO: 2416140 - DNA, 25 bp, Homo sapien
caataattaggagtagtacagttca

SEQ ID NO: 2416141 - DNA, 25 bp, Homo sapien
tacaataattaggagtagtacagtt

SEQ ID NO: 2416142 - DNA, 25 bp, Homo sapien
gagatgggccctcaacatatctgca

SEQ ID NO: 2416143 - DNA, 25 bp, Homo sapien
taggtcagcgcaaccaaatgatgga

SEQ ID NO: 2416144 - DNA, 25 bp, Homo sapien
tagagcctagaatgcctacttggga

SEQ ID NO: 2416145 - DNA, 25 bp, Homo sapien
tggaaaacaactggatcacactgca

SEQ ID NO: 2416146 - DNA, 25 bp, Homo sapien
cactagcactacctaaggaccggga

SEQ ID NO: 2416147 - DNA, 25 bp, Homo sapien
caattatagagctggcacagagacc

SEQ ID NO: 2416148 - DNA, 25 bp, Homo sapien
gggataccatatacccagtgccttg

SEQ ID NO: 2416149 - DNA, 25 bp, Homo sapien
tatctctgggtcgtataccaaaggc

SEQ ID NO: 2416150 - DNA, 25 bp, Homo sapien
aattagttgagtgtagtggcacacg

SEQ ID NO: 2416151 - DNA, 25 bp, Homo sapien
ccgaggcacgagaatcgcttgaacc

SEQ ID NO: 2416152 - DNA, 25 bp, Homo sapien
cctgtaatcccagctactcaggagg

SEQ ID NO: 2416153 - DNA, 25 bp, Homo sapien
cctgggagatggaggttgcagtgag

SEQ ID NO: 2416154 - DNA, 25 bp, Homo sapien
tgtattactgttaccaggagtagtc

SEQ ID NO: 2416155 - DNA, 25 bp, Homo sapien
ttactgttaccaggagtagtcctag

SEQ ID NO: 2416156 - DNA, 25 bp, Homo sapien
taccaggagtagtcctagttataga

SEQ ID NO: 2416157 - DNA, 25 bp, Homo sapien
gatttctggttactaaaacaatgga

SEQ ID NO: 2416158 - DNA, 25 bp, Homo sapien
tggatagggttctgtctattcatac

SEQ ID NO: 2416159 - DNA, 25 bp, Homo sapien
tgaaaaatcctactgtcgctaatgg

SEQ ID NO: 2416160 - DNA, 25 bp, Homo sapien
gaaaattagtgattaggtcaaatcc

SEQ ID NO: 2416161 - DNA, 25 bp, Homo sapien
taatggattgggcagcaaagagatg

SEQ ID NO: 2416162 - DNA, 25 bp, Homo sapien
tcctactgtcgctaatggattgggc

SEQ ID NO: 2416163 - DNA, 25 bp, Homo sapien
gaggcaagatgacactaatatggaa

SEQ ID NO: 2416164 - DNA, 25 bp, Homo sapien
tctgatgtgactcagtgggaaaact

SEQ ID NO: 2416165 - DNA, 25 bp, Homo sapien
tattaaaactgcatcaagtcatggg

SEQ ID NO: 2416166 - DNA, 25 bp, Homo sapien
ttgcccaagactggcactgaagatg

SEQ ID NO: 2416167 - DNA, 25 bp, Homo sapien
tgttgagctatccaaactgccctag

SEQ ID NO: 2416168 - DNA, 25 bp, Homo sapien
gaaagagcagtctgacacagggaga

SEQ ID NO: 2416169 - DNA, 25 bp, Homo sapien
tcttgatttgtcagcaggaccacca

SEQ ID NO: 2416170 - DNA, 25 bp, Homo sapien
catgacaacactggatgaccgtggg

SEQ ID NO: 2416171 - DNA, 25 bp, Homo sapien
ctcgaactaatgtatagaaggcatc

SEQ ID NO: 2416172 - DNA, 25 bp, Homo sapien
tctttatgttttcgaatttctcgaa

SEQ ID NO: 2416173 - DNA, 25 bp, Homo sapien
tgttttcgaatttctcgaactaatg

SEQ ID NO: 2416174 - DNA, 25 bp, Homo sapien
tcgaatttctcgaactaatgtatag

SEQ ID NO: 2416175 - DNA, 25 bp, Homo sapien
taacagttagtcattgtgaccacca

SEQ ID NO: 2416176 - DNA, 25 bp, Homo sapien
gccactttaggaacaatgaaaactg

SEQ ID NO: 2416177 - DNA, 25 bp, Homo sapien
gaaaaatggcactctcaaactggta

SEQ ID NO: 2416178 - DNA, 25 bp, Homo sapien
tccaaacctagacagcagagggagt

SEQ ID NO: 2416179 - DNA, 25 bp, Homo sapien
tatctctccggtttcacaatgaatg

SEQ ID NO: 2416180 - DNA, 25 bp, Homo sapien
aaagtgtatctctccggtttcacaa

SEQ ID NO: 2416181 - DNA, 25 bp, Homo sapien
tttaaagtgtatctctccggtttca

SEQ ID NO: 2416182 - DNA, 25 bp, Homo sapien
tccggtttcacaatgaatgatggca

SEQ ID NO: 2416183 - DNA, 25 bp, Homo sapien
tttcaatctgtattgtcggatctcc

SEQ ID NO: 2416184 - DNA, 25 bp, Homo sapien
tctgtattgtcggatctccctcacc

SEQ ID NO: 2416185 - DNA, 25 bp, Homo sapien
aatctgtattgtcggatctccctca

SEQ ID NO: 2416186 - DNA, 25 bp, Homo sapien
caccaatgtataaaaagcatcctcc

SEQ ID NO: 2416187 - DNA, 25 bp, Homo sapien
ctgcattgtaaaacacaacttcttt

SEQ ID NO: 2416188 - DNA, 25 bp, Homo sapien
gcattgtaaaacacaacttctttaa

SEQ ID NO: 2416189 - DNA, 25 bp, Homo sapien
tgcattgtaaaacacaacttcttta

SEQ ID NO: 2416190 - DNA, 25 bp, Homo sapien
caataaaaggaattccataacttct

SEQ ID NO: 2416191 - DNA, 25 bp, Homo sapien
tcctactaggaccataggtacatct

SEQ ID NO: 2416192 - DNA, 25 bp, Homo sapien
gcctgttttgtgtctactgttctag

SEQ ID NO: 2416193 - DNA, 25 bp, Homo sapien
cttgctaagtcctgagcctgttttg

SEQ ID NO: 2416194 - DNA, 25 bp, Homo sapien
tgtactggtccctcattgcactgta

SEQ ID NO: 2416195 - DNA, 25 bp, Homo sapien
tactggtccctcattgcactgtact

SEQ ID NO: 2416196 - DNA, 25 bp, Homo sapien
tggtccctcattgcactgtactcct

SEQ ID NO: 2416197 - DNA, 25 bp, Homo sapien
actggtccctcattgcactgtactc

SEQ ID NO: 2416198 - DNA, 25 bp, Homo sapien
cacagtctggattattacagtgcac

SEQ ID NO: 2416199 - DNA, 25 bp, Homo sapien
aacacagtctggattattacagtgc

SEQ ID NO: 2416200 - DNA, 25 bp, Homo sapien
acacagtctggattattacagtgca

SEQ ID NO: 2416201 - DNA, 25 bp, Homo sapien
gaaacacagtctggattattacagt

SEQ ID NO: 2416202 - DNA, 25 bp, Homo sapien
gagacacattccgtttcaaagtaat

SEQ ID NO: 2416203 - DNA, 25 bp, Homo sapien
tgaatacaccagtgcgaccgagaaa

SEQ ID NO: 2416204 - DNA, 25 bp, Homo sapien
cgagaaactgggaaagcagtcccct

SEQ ID NO: 2416205 - DNA, 25 bp, Homo sapien
cttaccaatgtaggctgagtatccc

SEQ ID NO: 2416206 - DNA, 25 bp, Homo sapien
gaagtgcaattagtcactgagctat

SEQ ID NO: 2416207 - DNA, 25 bp, Homo sapien
ctgagctattttcagtgcaacttgg

SEQ ID NO: 2416208 - DNA, 25 bp, Homo sapien
tttaactagggtcctcactcttaga

SEQ ID NO: 2416209 - DNA, 25 bp, Homo sapien
tagggtcctcactcttagaagtgca

SEQ ID NO: 2416210 - DNA, 25 bp, Homo sapien
gaaatgtactatactggcaagactg

SEQ ID NO: 2416211 - DNA, 25 bp, Homo sapien
catggcatcctaaaatgtcttacaa

SEQ ID NO: 2416212 - DNA, 25 bp, Homo sapien
tgttcatagcctttgacatagtaat

SEQ ID NO: 2416213 - DNA, 25 bp, Homo sapien
tgaaggaaagttattccccatagtc

SEQ ID NO: 2416214 - DNA, 25 bp, Homo sapien
tatgggttttccaactcaggcagtg

SEQ ID NO: 2416215 - DNA, 25 bp, Homo sapien
gaatgttcacgacaaatgccccact

SEQ ID NO: 2416216 - DNA, 25 bp, Homo sapien
ctggttggtacacacatgaggttca

SEQ ID NO: 2416217 - DNA, 25 bp, Homo sapien
catatttatcgccaacgtgtgtcct

SEQ ID NO: 2416218 - DNA, 25 bp, Homo sapien
attctgaattagctgtatcgtcaag

SEQ ID NO: 2416219 - DNA, 25 bp, Homo sapien
tgattctgaattagctgtatcgtca

SEQ ID NO: 2416220 - DNA, 25 bp, Homo sapien
aatgattctgaattagctgtatcgt

SEQ ID NO: 2416221 - DNA, 25 bp, Homo sapien
gattctgaattagctgtatcgtcaa

SEQ ID NO: 2416222 - DNA, 25 bp, Homo sapien
ccgagtgctggaaagggaggcaaga

SEQ ID NO: 2416223 - DNA, 25 bp, Homo sapien
ctggaccgaggcagccgagtgctgg

SEQ ID NO: 2416224 - DNA, 25 bp, Homo sapien
gaggcaagaggtgcgggagcgggga

SEQ ID NO: 2416225 - DNA, 25 bp, Homo sapien
gccgcgggagtaacctccaccgcac

SEQ ID NO: 2416226 - DNA, 25 bp, Homo sapien
gggagtactggccgagccgccgcca

SEQ ID NO: 2416227 - DNA, 25 bp, Homo sapien
agtactggccgagccgccgccacct

SEQ ID NO: 2416228 - DNA, 25 bp, Homo sapien
ttcagtgcctgcgccgcgctcgctc

SEQ ID NO: 2416229 - DNA, 25 bp, Homo sapien
cgccgcgctcgctcccagtccgaaa

SEQ ID NO: 2416230 - DNA, 25 bp, Homo sapien
cacatcaagaccagtggaacagcca

SEQ ID NO: 2416231 - DNA, 25 bp, Homo sapien
gctgagtaagcatttgaacgtgaaa

SEQ ID NO: 2416232 - DNA, 25 bp, Homo sapien
gatctgctggttcttagcgctctgc

SEQ ID NO: 2416233 - DNA, 25 bp, Homo sapien
gggccatgacccatcatcgatctgc

SEQ ID NO: 2416234 - DNA, 25 bp, Homo sapien
ggacacctacattctttacagttta

SEQ ID NO: 2416235 - DNA, 25 bp, Homo sapien
cctgcatccacctgaaaaaggatat

SEQ ID NO: 2416236 - DNA, 25 bp, Homo sapien
tagagactttcatcctatatggcac

SEQ ID NO: 2416237 - DNA, 25 bp, Homo sapien
tatatggcactttgaatgctggcct

SEQ ID NO: 2416238 - DNA, 25 bp, Homo sapien
ttttccagagatatgcttagtgtcg

SEQ ID NO: 2416239 - DNA, 25 bp, Homo sapien
tgggcatgctcagggattttcctgg

SEQ ID NO: 2416240 - DNA, 25 bp, Homo sapien
gatatgcttagtgtcgtgggcatgc

SEQ ID NO: 2416241 - DNA, 25 bp, Homo sapien
tggtgtgtagctgctctggttcagt

SEQ ID NO: 2416242 - DNA, 25 bp, Homo sapien
aaagggctgaatccagcagctgtct

SEQ ID NO: 2416243 - DNA, 25 bp, Homo sapien
aaaagggctgaatccagcagctgtc

SEQ ID NO: 2416244 - DNA, 25 bp, Homo sapien
gggctgaatccagcagctgtcttag

SEQ ID NO: 2416245 - DNA, 25 bp, Homo sapien
cagaaaagggctgaatccagcagct

SEQ ID NO: 2416246 - DNA, 25 bp, Homo sapien
catctagccaacttctccccatcac

SEQ ID NO: 2416247 - DNA, 25 bp, Homo sapien
ttcacagtcgctgctctgaactcca

SEQ ID NO: 2416248 - DNA, 25 bp, Homo sapien
aactccaccagtcttactctaagcc

SEQ ID NO: 2416249 - DNA, 25 bp, Homo sapien
gtcttactctaagccatctagccaa

SEQ ID NO: 2416250 - DNA, 25 bp, Homo sapien
ttctctggatggcttctattccatc

SEQ ID NO: 2416251 - DNA, 25 bp, Homo sapien
tctggatatcttccagtactggcat

SEQ ID NO: 2416252 - DNA, 25 bp, Homo sapien
tccttgaggagcagtgttttgtcta

SEQ ID NO: 2416253 - DNA, 25 bp, Homo sapien
tactggcatatcttaggactgagca

SEQ ID NO: 2416254 - DNA, 25 bp, Homo sapien
ggttctcggaggtgaggaacttgat

SEQ ID NO: 2416255 - DNA, 25 bp, Homo sapien
ctgggttctcggaggtgaggaactt

SEQ ID NO: 2416256 - DNA, 25 bp, Homo sapien
gttctcggaggtgaggaacttgata

SEQ ID NO: 2416257 - DNA, 25 bp, Homo sapien
gggttctcggaggtgaggaacttga

SEQ ID NO: 2416258 - DNA, 25 bp, Homo sapien
ctagcctgttgaggtagttttggaa

SEQ ID NO: 2416259 - DNA, 25 bp, Homo sapien
tagcctgttgaggtagttttggaaa

SEQ ID NO: 2416260 - DNA, 25 bp, Homo sapien
gatacgaaattctgccttgaaggga

SEQ ID NO: 2416261 - DNA, 25 bp, Homo sapien
tccattagctccaccgagttcacca

SEQ ID NO: 2416262 - DNA, 25 bp, Homo sapien
ggagagattccttagctccattagc

SEQ ID NO: 2416263 - DNA, 25 bp, Homo sapien
gaactccttggagagattccttagc

SEQ ID NO: 2416264 - DNA, 25 bp, Homo sapien
attatatggtgatgcgtagcctgaa

SEQ ID NO: 2416265 - DNA, 25 bp, Homo sapien
ggagggatattccatgtagcaacca

SEQ ID NO: 2416266 - DNA, 25 bp, Homo sapien
gaggaaccatcaaacaagcccacgt

SEQ ID NO: 2416267 - DNA, 25 bp, Homo sapien
actgtgctcactacgtgggtgatga

SEQ ID NO: 2416268 - DNA, 25 bp, Homo sapien
tactgagtgatctgaggaaaagact

SEQ ID NO: 2416269 - DNA, 25 bp, Homo sapien
aacaatgttacctctagacgttggc

SEQ ID NO: 2416270 - DNA, 25 bp, Homo sapien
cgttggcttactttactatagggca

SEQ ID NO: 2416271 - DNA, 25 bp, Homo sapien
gcatttgcatagtatcctgtaccac

SEQ ID NO: 2416272 - DNA, 25 bp, Homo sapien
ttgatgacaatcatttactgtatcc

SEQ ID NO: 2416273 - DNA, 25 bp, Homo sapien
ttcatcactcacttgatgacaatca

SEQ ID NO: 2416274 - DNA, 25 bp, Homo sapien
tgacaatcatttactgtatcctctt

SEQ ID NO: 2416275 - DNA, 25 bp, Homo sapien
tttcatcactcacttgatgacaatc

SEQ ID NO: 2416276 - DNA, 25 bp, Homo sapien
gaaaccataaagtgcaatgtagggt

SEQ ID NO: 2416277 - DNA, 25 bp, Homo sapien
tgaaaccataaagtgcaatgtaggg

SEQ ID NO: 2416278 - DNA, 25 bp, Homo sapien
ttggacacaaagtacgacagggttg

SEQ ID NO: 2416279 - DNA, 25 bp, Homo sapien
caaagtacgacagggttgaaaccat

SEQ ID NO: 2416280 - DNA, 25 bp, Homo sapien
tgtgtcatccttctgagcatcagcc

SEQ ID NO: 2416281 - DNA, 25 bp, Homo sapien
tgagcatcagcctcttgaaggcagt

SEQ ID NO: 2416282 - DNA, 25 bp, Homo sapien
ctgtgtcatccttctgagcatcagc

SEQ ID NO: 2416283 - DNA, 25 bp, Homo sapien
ttctgagcatcagcctcttgaaggc

SEQ ID NO: 2416284 - DNA, 25 bp, Homo sapien
tttggaaagctatccaagctcggcg

SEQ ID NO: 2416285 - DNA, 25 bp, Homo sapien
cgtgagctcgcgctaaactaaggac

SEQ ID NO: 2416286 - DNA, 25 bp, Homo sapien
tcctaactagcttgccgaggagagc

SEQ ID NO: 2416287 - DNA, 25 bp, Homo sapien
aagctcggcgctatctttaaaagga

SEQ ID NO: 2416288 - DNA, 25 bp, Homo sapien
gctgacaaagcacccagtgccagag

SEQ ID NO: 2416289 - DNA, 25 bp, Homo sapien
agttcccgagtcacgccagtgctcg

SEQ ID NO: 2416290 - DNA, 25 bp, Homo sapien
taaaatcctgcgatgcctcgctgac

SEQ ID NO: 2416291 - DNA, 25 bp, Homo sapien
ttggcctttgcctaaaatcctgcga

SEQ ID NO: 2416292 - DNA, 25 bp, Homo sapien
cagccagccctgcagatgcaaccgt

SEQ ID NO: 2416293 - DNA, 25 bp, Homo sapien
gccagccagccctgcagatgcaacc

SEQ ID NO: 2416294 - DNA, 25 bp, Homo sapien
tttaggtttaggagaggaagccagc

SEQ ID NO: 2416295 - DNA, 25 bp, Homo sapien
gccagccctgcagatgcaaccgttg

SEQ ID NO: 2416296 - DNA, 25 bp, Homo sapien
tacaagtcttcatggcaggatattg

SEQ ID NO: 2416297 - DNA, 25 bp, Homo sapien
ctaatgccaactatattacaagtct

SEQ ID NO: 2416298 - DNA, 25 bp, Homo sapien
catggcaggatattgggaaatgttt

SEQ ID NO: 2416299 - DNA, 25 bp, Homo sapien
tcttcatggcaggatattgggaaat

SEQ ID NO: 2416300 - DNA, 25 bp, Homo sapien
ccattgtctccttttggagttgtac

SEQ ID NO: 2416301 - DNA, 25 bp, Homo sapien
agccccagcttggttcttctccatt

SEQ ID NO: 2416302 - DNA, 25 bp, Homo sapien
ccccagcttggttcttctccattgt

SEQ ID NO: 2416303 - DNA, 25 bp, Homo sapien
tctccattgtctccttttggagttg

SEQ ID NO: 2416304 - DNA, 25 bp, Homo sapien
tttcttggccaggaaatgcttaatc

SEQ ID NO: 2416305 - DNA, 25 bp, Homo sapien
ggccaggaaatgcttaatcctgaaa

SEQ ID NO: 2416306 - DNA, 25 bp, Homo sapien
ccaggaaatgcttaatcctgaaagt

SEQ ID NO: 2416307 - DNA, 25 bp, Homo sapien
cttggccaggaaatgcttaatcctg

SEQ ID NO: 2416308 - DNA, 25 bp, Homo sapien
gagaagactataatttccctattga

SEQ ID NO: 2416309 - DNA, 25 bp, Homo sapien
gacttgtaaagtgctaaactaattg

SEQ ID NO: 2416310 - DNA, 25 bp, Homo sapien
taatgcaaaagaggagtctaacttc

SEQ ID NO: 2416311 - DNA, 25 bp, Homo sapien
tctaactgtgaatatctagtcccag

SEQ ID NO: 2416312 - DNA, 25 bp, Homo sapien
cttccttattgtctttctatcctta

SEQ ID NO: 2416313 - DNA, 25 bp, Homo sapien
ccttattgtctttctatccttactg

SEQ ID NO: 2416314 - DNA, 25 bp, Homo sapien
ttattgtctttctatccttactgtc

SEQ ID NO: 2416315 - DNA, 25 bp, Homo sapien
tattgtctttctatccttactgtct

SEQ ID NO: 2416316 - DNA, 25 bp, Homo sapien
tcttcccagataggccttggttgac

SEQ ID NO: 2416317 - DNA, 25 bp, Homo sapien
tggccattgctgttggattcacata

SEQ ID NO: 2416318 - DNA, 25 bp, Homo sapien
cttggttgacggagagaatcctgga

SEQ ID NO: 2416319 - DNA, 25 bp, Homo sapien
tcaaattcatacaaagccttggcgc

SEQ ID NO: 2416320 - DNA, 25 bp, Homo sapien
tgtctgggtactcttcctgcatctt

SEQ ID NO: 2416321 - DNA, 25 bp, Homo sapien
ccagtcccccgatccaaagagtgag

SEQ ID NO: 2416322 - DNA, 25 bp, Homo sapien
gatgaggaaagtacccatcccagac

SEQ ID NO: 2416323 - DNA, 25 bp, Homo sapien
ggcgagggcaccacactaaacgtgt

SEQ ID NO: 2416324 - DNA, 25 bp, Homo sapien
ggattccaatatatcagtcatgcta

SEQ ID NO: 2416325 - DNA, 25 bp, Homo sapien
cagtcatgctaatttggctattaga

SEQ ID NO: 2416326 - DNA, 25 bp, Homo sapien
gggatcctctggattccaatatatc

SEQ ID NO: 2416327 - DNA, 25 bp, Homo sapien
actggtgtggaggactggatatgct

SEQ ID NO: 2416328 - DNA, 25 bp, Homo sapien
aggaaaaggctcttccgtatctgga

SEQ ID NO: 2416329 - DNA, 25 bp, Homo sapien
cccaaactcggcaaatgtcaccaga

SEQ ID NO: 2416330 - DNA, 25 bp, Homo sapien
agaggaaaaggctcttccgtatctg

SEQ ID NO: 2416331 - DNA, 25 bp, Homo sapien
ggaaaaggctcttccgtatctggaa

SEQ ID NO: 2416332 - DNA, 25 bp, Homo sapien
ctctgtcagtgcaaatgactccata

SEQ ID NO: 2416333 - DNA, 25 bp, Homo sapien
tgtcagtgcaaatgactccatatgc

SEQ ID NO: 2416334 - DNA, 25 bp, Homo sapien
tgtttttaaaaggagcctgttgcat

SEQ ID NO: 2416335 - DNA, 25 bp, Homo sapien
gtgcaaatgactccatatgcatttc

SEQ ID NO: 2416336 - DNA, 25 bp, Homo sapien
tagctcctcaaatcagggagactgc

SEQ ID NO: 2416337 - DNA, 25 bp, Homo sapien
tagatggattgacctcccctgatgc

SEQ ID NO: 2416338 - DNA, 25 bp, Homo sapien
cattttgactggtgggaacacaacc

SEQ ID NO: 2416339 - DNA, 25 bp, Homo sapien
tcttctctaagggatcactgttctc

SEQ ID NO: 2416340 - DNA, 25 bp, Homo sapien
ttagggtacacgtgagcaatgtgca

SEQ ID NO: 2416341 - DNA, 25 bp, Homo sapien
agttttagggtacacgtgagcaatg

SEQ ID NO: 2416342 - DNA, 25 bp, Homo sapien
aagttttagggtacacgtgagcaat

SEQ ID NO: 2416343 - DNA, 25 bp, Homo sapien
ttttagggtacacgtgagcaatgtg

SEQ ID NO: 2416344 - DNA, 25 bp, Homo sapien
cagctgctgactgggatgaaagtac

SEQ ID NO: 2416345 - DNA, 25 bp, Homo sapien
ggcatgtcttcttgtttagggcagc

SEQ ID NO: 2416346 - DNA, 25 bp, Homo sapien
tagaatatgttctgctaaagccagc

SEQ ID NO: 2416347 - DNA, 25 bp, Homo sapien
caaaatcctggtactggctgtaggg

SEQ ID NO: 2416348 - DNA, 25 bp, Homo sapien
cttttctagtagctggttgagggtg

SEQ ID NO: 2416349 - DNA, 25 bp, Homo sapien
tctacagcaatacaaattttggatc

SEQ ID NO: 2416350 - DNA, 25 bp, Homo sapien
aatggttaaacaattgcacgtgctc

SEQ ID NO: 2416351 - DNA, 25 bp, Homo sapien
tctcatggaatagcagggaggttgc

SEQ ID NO: 2416352 - DNA, 25 bp, Homo sapien
ggatccaggaaacctctgttcatag

SEQ ID NO: 2416353 - DNA, 25 bp, Homo sapien
gaaaaccctttgagctgaaacatgt

SEQ ID NO: 2416354 - DNA, 25 bp, Homo sapien
ggcttattggccatagtcaccagag

SEQ ID NO: 2416355 - DNA, 25 bp, Homo sapien
gtatgtttatactcccaatgtgaac

SEQ ID NO: 2416356 - DNA, 25 bp, Homo sapien
gagcaatggatatcttctcagaggc

SEQ ID NO: 2416357 - DNA, 25 bp, Homo sapien
gaaataatgtcaacggtgtggccca

SEQ ID NO: 2416358 - DNA, 25 bp, Homo sapien
gaacagtctacacgatttggccaac

SEQ ID NO: 2416359 - DNA, 25 bp, Homo sapien
tgctccggagtgtccaaaaatgagg

SEQ ID NO: 2416360 - DNA, 25 bp, Homo sapien
aagggcacagtgaagggcacattga

SEQ ID NO: 2416361 - DNA, 25 bp, Homo sapien
cattgatgatcaactctgaagatac

SEQ ID NO: 2416362 - DNA, 25 bp, Homo sapien
cagtgaagggcacattgatgatcaa

SEQ ID NO: 2416363 - DNA, 25 bp, Homo sapien
caactctgaagataccaccagaggg

SEQ ID NO: 2416364 - DNA, 25 bp, Homo sapien
gcaaatttgcaatacagttacttac

SEQ ID NO: 2416365 - DNA, 25 bp, Homo sapien
agcaaatttgcaatacagttactta

SEQ ID NO: 2416366 - DNA, 25 bp, Homo sapien
tttgtgactcagatgtcttcttttt

SEQ ID NO: 2416367 - DNA, 25 bp, Homo sapien
gcttttgtgactcagatgtcttctt

SEQ ID NO: 2416368 - DNA, 25 bp, Homo sapien
tattgcttttgtgactcagatgtct

SEQ ID NO: 2416369 - DNA, 25 bp, Homo sapien
ttattgcttttgtgactcagatgtc

SEQ ID NO: 2416370 - DNA, 25 bp, Homo sapien
tatttgtgaagtcgaaataatagtg

SEQ ID NO: 2416371 - DNA, 25 bp, Homo sapien
tgtgaagtcgaaataatagtggaat

SEQ ID NO: 2416372 - DNA, 25 bp, Homo sapien
tcttatttgtgaagtcgaaataata

SEQ ID NO: 2416373 - DNA, 25 bp, Homo sapien
gaagtcgaaataatagtggaattta

SEQ ID NO: 2416374 - DNA, 25 bp, Homo sapien
tatggtgactcctgaagctatggga

SEQ ID NO: 2416375 - DNA, 25 bp, Homo sapien
gactcctgaagctatgggagtgaga

SEQ ID NO: 2416376 - DNA, 25 bp, Homo sapien
tagaaggtatggtgactcctgaagc

SEQ ID NO: 2416377 - DNA, 25 bp, Homo sapien
tttggtagaaggtatggtgactcct

SEQ ID NO: 2416378 - DNA, 25 bp, Homo sapien
tggttcaatcagaggacagtaagga

SEQ ID NO: 2416379 - DNA, 25 bp, Homo sapien
cctccagcggtggatgtattgtgtg

SEQ ID NO: 2416380 - DNA, 25 bp, Homo sapien
tgaggctcgattaggtctggttgac

SEQ ID NO: 2416381 - DNA, 25 bp, Homo sapien
ccgagtcctgggctgtctatccaat

SEQ ID NO: 2416382 - DNA, 25 bp, Homo sapien
ctgcgattagggaaaacggttggtg

SEQ ID NO: 2416383 - DNA, 25 bp, Homo sapien
gaaacacacgctttcggaatgttgg

SEQ ID NO: 2416384 - DNA, 25 bp, Homo sapien
gatatctttcttaggttgatcttgt

SEQ ID NO: 2416385 - DNA, 25 bp, Homo sapien
cttgagcttgttccacctgataatt

SEQ ID NO: 2416386 - DNA, 25 bp, Homo sapien
agttattgtagctgtagatgctgtc

SEQ ID NO: 2416387 - DNA, 25 bp, Homo sapien
ctgaacatctgttaaattcaacgtc

SEQ ID NO: 2416388 - DNA, 25 bp, Homo sapien
acatctgttaaattcaacgtcagca

SEQ ID NO: 2416389 - DNA, 25 bp, Homo sapien
gaacatctgttaaattcaacgtcag

SEQ ID NO: 2416390 - DNA, 25 bp, Homo sapien
tactgaacatctgttaaattcaacg

SEQ ID NO: 2416391 - DNA, 25 bp, Homo sapien
ggataggggtgtaccacgcaatggc

SEQ ID NO: 2416392 - DNA, 25 bp, Homo sapien
cttccagtggataggggtgtaccac

SEQ ID NO: 2416393 - DNA, 25 bp, Homo sapien
cagtggataggggtgtaccacgcaa

SEQ ID NO: 2416394 - DNA, 25 bp, Homo sapien
ttccagtggataggggtgtaccacg

SEQ ID NO: 2416395 - DNA, 25 bp, Homo sapien
gaaaatctgatggaggttgatgctt

SEQ ID NO: 2416396 - DNA, 25 bp, Homo sapien
gaggttgatgctttgcttcagatgc

SEQ ID NO: 2416397 - DNA, 25 bp, Homo sapien
tgcacaggattgttatacaatcagg

SEQ ID NO: 2416398 - DNA, 25 bp, Homo sapien
gacttgctctaaacttgtcttgttc

SEQ ID NO: 2416399 - DNA, 25 bp, Homo sapien
tgagcttcacgaacaaacccttgac

SEQ ID NO: 2416400 - DNA, 25 bp, Homo sapien
tggaaggaatcggtacaaagaaatg

SEQ ID NO: 2416401 - DNA, 25 bp, Homo sapien
caagggaagagttaatgagcttcac

SEQ ID NO: 2416402 - DNA, 25 bp, Homo sapien
tactgtggaatttgcctgcattacg

SEQ ID NO: 2416403 - DNA, 25 bp, Homo sapien
ctggaggtaaattggccaacttctt

SEQ ID NO: 2416404 - DNA, 25 bp, Homo sapien
ctgagtgtagtttgagtgtgctgta

SEQ ID NO: 2416405 - DNA, 25 bp, Homo sapien
gagtgtagtttgagtgtgctgtaag

SEQ ID NO: 2416406 - DNA, 25 bp, Homo sapien
tgagtgtagtttgagtgtgctgtaa

SEQ ID NO: 2416407 - DNA, 25 bp, Homo sapien
cctgtttcttcggaactgagaaggg

SEQ ID NO: 2416408 - DNA, 25 bp, Homo sapien
tacaaagacgcgtcgtgatgaagtg

SEQ ID NO: 2416409 - DNA, 25 bp, Homo sapien
actaagccacgtgatgtaagttttc

SEQ ID NO: 2416410 - DNA, 25 bp, Homo sapien
agtggaaagaacaacgtgtcttgca

SEQ ID NO: 2416411 - DNA, 25 bp, Homo sapien
tcttgcatttagacagacttgtaat

SEQ ID NO: 2416412 - DNA, 25 bp, Homo sapien
gaatttgaagatgacaatggcagtg

SEQ ID NO: 2416413 - DNA, 25 bp, Homo sapien
tctgaggactagacagatagtaacc

SEQ ID NO: 2416414 - DNA, 25 bp, Homo sapien
tagctttagaagtcaattgtccagt

SEQ ID NO: 2416415 - DNA, 25 bp, Homo sapien
gtggcaactgaacccaacatctttg

SEQ ID NO: 2416416 - DNA, 25 bp, Homo sapien
tcttatcttcctgctcatggacttt

SEQ ID NO: 2416417 - DNA, 25 bp, Homo sapien
attctgcattgccttcgaagcttcc

SEQ ID NO: 2416418 - DNA, 25 bp, Homo sapien
gctcatggactttattctgcattgc

SEQ ID NO: 2416419 - DNA, 25 bp, Homo sapien
gcttcctgaatgtcttgtgtatctt

SEQ ID NO: 2416420 - DNA, 25 bp, Homo sapien
tggctagaaaagaagtctcttttct

SEQ ID NO: 2416421 - DNA, 25 bp, Homo sapien
ttggctagaaaagaagtctcttttc

SEQ ID NO: 2416422 - DNA, 25 bp, Homo sapien
ctgttaatccaactaccttcaagca

SEQ ID NO: 2416423 - DNA, 25 bp, Homo sapien
tgttaatccaactaccttcaagcat

SEQ ID NO: 2416424 - DNA, 25 bp, Homo sapien
taccagaaccacaattctcatgagg

SEQ ID NO: 2416425 - DNA, 25 bp, Homo sapien
aattctcatgaggatatgtaagtac

SEQ ID NO: 2416426 - DNA, 25 bp, Homo sapien
ttaccaaactagtaccagaaccaca

SEQ ID NO: 2416427 - DNA, 25 bp, Homo sapien
gaaccacaattctcatgaggatatg

SEQ ID NO: 2416428 - DNA, 25 bp, Homo sapien
ggacaaaccatggtgcaggtgtgta

SEQ ID NO: 2416429 - DNA, 25 bp, Homo sapien
cttggctaaggatgtcggacaaacc

SEQ ID NO: 2416430 - DNA, 25 bp, Homo sapien
caggtgtgtagcattcactggaagc

SEQ ID NO: 2416431 - DNA, 25 bp, Homo sapien
gccaatcctgatcttggctaaggat

SEQ ID NO: 2416432 - DNA, 25 bp, Homo sapien
agaggctagaggacatgtattggaa

SEQ ID NO: 2416433 - DNA, 25 bp, Homo sapien
catggagcttcccaatcacaaaatc

SEQ ID NO: 2416434 - DNA, 25 bp, Homo sapien
gagtcacattaagctcctacgaggg

SEQ ID NO: 2416435 - DNA, 25 bp, Homo sapien
caaagtaatcttcatggagcttccc

SEQ ID NO: 2416436 - DNA, 25 bp, Homo sapien
gattccattgttaaggcaaaactga

SEQ ID NO: 2416437 - DNA, 25 bp, Homo sapien
aactgatacgcaatcatttgcactg

SEQ ID NO: 2416438 - DNA, 25 bp, Homo sapien
taccagctgtatatagtcagtctcc

SEQ ID NO: 2416439 - DNA, 25 bp, Homo sapien
gccatccataccagctgtatatagt

SEQ ID NO: 2416440 - DNA, 25 bp, Homo sapien
agcctggtatcatgggtcccacagc

SEQ ID NO: 2416441 - DNA, 25 bp, Homo sapien
acagccaacaggtctgaaatgtttc

SEQ ID NO: 2416442 - DNA, 25 bp, Homo sapien
caaaagcctggtatcatgggtccca

SEQ ID NO: 2416443 - DNA, 25 bp, Homo sapien
gggcaaaagcctggtatcatgggtc

SEQ ID NO: 2416444 - DNA, 25 bp, Homo sapien
gataagtctgtctccaaatggtgat

SEQ ID NO: 2416445 - DNA, 25 bp, Homo sapien
tagataagtctgtctccaaatggtg

SEQ ID NO: 2416446 - DNA, 25 bp, Homo sapien
tttagataagtctgtctccaaatgg

SEQ ID NO: 2416447 - DNA, 25 bp, Homo sapien
taagtctgtctccaaatggtgatct

SEQ ID NO: 2416448 - DNA, 25 bp, Homo sapien
ccaggccggagcacagtcattattc

SEQ ID NO: 2416449 - DNA, 25 bp, Homo sapien
gccggagcacagtcattattcacag

SEQ ID NO: 2416450 - DNA, 25 bp, Homo sapien
aggccggagcacagtcattattcac

SEQ ID NO: 2416451 - DNA, 25 bp, Homo sapien
cggagcacagtcattattcacaggt

SEQ ID NO: 2416452 - DNA, 25 bp, Homo sapien
ccacagctagagagcctgatggtgt

SEQ ID NO: 2416453 - DNA, 25 bp, Homo sapien
gccacagctagagagcctgatggtg

SEQ ID NO: 2416454 - DNA, 25 bp, Homo sapien
agcctgatggtgtggatttatatga

SEQ ID NO: 2416455 - DNA, 25 bp, Homo sapien
tgtggatttatatgaacagcccaca

SEQ ID NO: 2416456 - DNA, 25 bp, Homo sapien
caataagcttgaccatcacttgaga

SEQ ID NO: 2416457 - DNA, 25 bp, Homo sapien
ggcagttgatagaactttcagcaga

SEQ ID NO: 2416458 - DNA, 25 bp, Homo sapien
gatgctgtgtctagacccaggtgct

SEQ ID NO: 2416459 - DNA, 25 bp, Homo sapien
ctttgggtctctctaaactgtctaa

SEQ ID NO: 2416460 - DNA, 25 bp, Homo sapien
tggactctggaaacaccgatgtctc

SEQ ID NO: 2416461 - DNA, 25 bp, Homo sapien
ggactctggaaacaccgatgtctcc

SEQ ID NO: 2416462 - DNA, 25 bp, Homo sapien
tactattccgttggacagtgttggt

SEQ ID NO: 2416463 - DNA, 25 bp, Homo sapien
tgtctaggcaggtctccaaaggtcc

SEQ ID NO: 2416464 - DNA, 25 bp, Homo sapien
tatgagtgtaaagttagaatccgga

SEQ ID NO: 2416465 - DNA, 25 bp, Homo sapien
gaatctcagtccaactacttgtcat

SEQ ID NO: 2416466 - DNA, 25 bp, Homo sapien
gagggccgcaattcagtccataaga

SEQ ID NO: 2416467 - DNA, 25 bp, Homo sapien
tagacctgcaagactaattccgagc

SEQ ID NO: 2416468 - DNA, 25 bp, Homo sapien
gaagtccaaggcataaacacagtcg

SEQ ID NO: 2416469 - DNA, 25 bp, Homo sapien
taaggaacctaggagtggacagaag

SEQ ID NO: 2416470 - DNA, 25 bp, Homo sapien
ttcaacttttgcctttgtggatttg

SEQ ID NO: 2416471 - DNA, 25 bp, Homo sapien
actggaaccggcttcaactccttca

SEQ ID NO: 2416472 - DNA, 25 bp, Homo sapien
acactggaaccggcttcaactcctt

SEQ ID NO: 2416473 - DNA, 25 bp, Homo sapien
ccttcaggggctgcggagtttcttg

SEQ ID NO: 2416474 - DNA, 25 bp, Homo sapien
ctggaggccgttgtattgctctgac

SEQ ID NO: 2416475 - DNA, 25 bp, Homo sapien
gaggccgttgtattgctctgacttc

SEQ ID NO: 2416476 - DNA, 25 bp, Homo sapien
ggccgttgtattgctctgacttcac

SEQ ID NO: 2416477 - DNA, 25 bp, Homo sapien
tggaggccgttgtattgctctgact

SEQ ID NO: 2416478 - DNA, 25 bp, Homo sapien
taaaaatccagtcatgctggctgac

SEQ ID NO: 2416479 - DNA, 25 bp, Homo sapien
tcaaggcacgagcaatgatttatgt

SEQ ID NO: 2416480 - DNA, 25 bp, Homo sapien
tgttctaagaaactgtcggttgtcg

SEQ ID NO: 2416481 - DNA, 25 bp, Homo sapien
tcggttgtcgtctttcgtaatagca

SEQ ID NO: 2416482 - DNA, 25 bp, Homo sapien
aagctgattgatgggtctcatgttg

SEQ ID NO: 2416483 - DNA, 25 bp, Homo sapien
ctggaattgtctgttaaaagctgat

SEQ ID NO: 2416484 - DNA, 25 bp, Homo sapien
gcatgccaaaatactcatctctgca

SEQ ID NO: 2416485 - DNA, 25 bp, Homo sapien
accagagcatgccaaaatactcatc

SEQ ID NO: 2416486 - DNA, 25 bp, Homo sapien
cacacaaatggtctagtcacgataa

SEQ ID NO: 2416487 - DNA, 25 bp, Homo sapien
ttctcccatcaagcaagttcacagg

SEQ ID NO: 2416488 - DNA, 25 bp, Homo sapien
tcatttacaacaacgcagattctct

SEQ ID NO: 2416489 - DNA, 25 bp, Homo sapien
ttgctgtagacaaggaatctctctg

SEQ ID NO: 2416490 - DNA, 25 bp, Homo sapien
tcccttcggctgctttgtgaggcag

SEQ ID NO: 2416491 - DNA, 25 bp, Homo sapien
tagtcactgtggaggtaagtagcat

SEQ ID NO: 2416492 - DNA, 25 bp, Homo sapien
cactgtggaggtaagtagcatggct

SEQ ID NO: 2416493 - DNA, 25 bp, Homo sapien
agcatggctcccacacctatgcgag

SEQ ID NO: 2416494 - DNA, 25 bp, Homo sapien
atcttgttgggaggtcctagccgga

SEQ ID NO: 2416495 - DNA, 25 bp, Homo sapien
ctctatcagggaaggccatcctttt

SEQ ID NO: 2416496 - DNA, 25 bp, Homo sapien
tgggaggtcctagccggagagcaca

SEQ ID NO: 2416497 - DNA, 25 bp, Homo sapien
tgttgggaggtcctagccggagagc

SEQ ID NO: 2416498 - DNA, 25 bp, Homo sapien
cagagatgtcgacagcagaatgggc

SEQ ID NO: 2416499 - DNA, 25 bp, Homo sapien
taatggacatagctcttaacctgca

SEQ ID NO: 2416500 - DNA, 25 bp, Homo sapien
gggccactagcgtgagcatctgaaa

SEQ ID NO: 2416501 - DNA, 25 bp, Homo sapien
cagaatgggctggtctagaaaacac

SEQ ID NO: 2416502 - DNA, 25 bp, Homo sapien
tgtgtctggagaactggaaaggtgt

SEQ ID NO: 2416503 - DNA, 25 bp, Homo sapien
tgtatggaagttcccctcgctccct

SEQ ID NO: 2416504 - DNA, 25 bp, Homo sapien
tcccttatagatgtagaacaactgt

SEQ ID NO: 2416505 - DNA, 25 bp, Homo sapien
tctagaaactctgcatgtatggaag

SEQ ID NO: 2416506 - DNA, 25 bp, Homo sapien
gcctggccgagtgcaatttccaaat

SEQ ID NO: 2416507 - DNA, 25 bp, Homo sapien
gaagtgccgaactgcattgacaggg

SEQ ID NO: 2416508 - DNA, 25 bp, Homo sapien
cattaccaagccatctgtcttgaga

SEQ ID NO: 2416509 - DNA, 25 bp, Homo sapien
gcttggcagccaaaagaggtgaaaa

SEQ ID NO: 2416510 - DNA, 25 bp, Homo sapien
tactcattctctgggctaaagagtt

SEQ ID NO: 2416511 - DNA, 25 bp, Homo sapien
ttgcaattgcttcagaaatggaagc

SEQ ID NO: 2416512 - DNA, 25 bp, Homo sapien
tcattcccttgataagtaggagagc

SEQ ID NO: 2416513 - DNA, 25 bp, Homo sapien
caaaggtgctgcaacacagcgggac

SEQ ID NO: 2416514 - DNA, 25 bp, Homo sapien
tgacttgatcattattgaagtgcat

SEQ ID NO: 2416515 - DNA, 25 bp, Homo sapien
agcagtttcttgttgcagttgtttc

SEQ ID NO: 2416516 - DNA, 25 bp, Homo sapien
agtttcttgttgcagttgtttcttt

SEQ ID NO: 2416517 - DNA, 25 bp, Homo sapien
atgacttgatcattattgaagtgca

SEQ ID NO: 2416518 - DNA, 25 bp, Homo sapien
gtgaaggccgccatctttcgggagc

SEQ ID NO: 2416519 - DNA, 25 bp, Homo sapien
caccaacacgtaacatattatttct

SEQ ID NO: 2416520 - DNA, 25 bp, Homo sapien
ctggtgaaggccgccatctttcggg

SEQ ID NO: 2416521 - DNA, 25 bp, Homo sapien
tctttcgggagccaccaacacgtaa

SEQ ID NO: 2416522 - DNA, 25 bp, Homo sapien
gtattcattatactcctgagcccgc

SEQ ID NO: 2416523 - DNA, 25 bp, Homo sapien
ggttctatttactgaggagcctcca

SEQ ID NO: 2416524 - DNA, 25 bp, Homo sapien
agggcagttcccattaccgcagctt

SEQ ID NO: 2416525 - DNA, 25 bp, Homo sapien
cagatgaagggctgtgcttgctcct

SEQ ID NO: 2416526 - DNA, 25 bp, Homo sapien
cttctggaaagtagcctcgccccat

SEQ ID NO: 2416527 - DNA, 25 bp, Homo sapien
gcagcctttttgtgcagggaactct

SEQ ID NO: 2416528 - DNA, 25 bp, Homo sapien
agcctttttgtgcagggaactcttc

SEQ ID NO: 2416529 - DNA, 25 bp, Homo sapien
actcttctggaaagtagcctcgccc

SEQ ID NO: 2416530 - DNA, 25 bp, Homo sapien
ctgctccctcaacctgcctctttgc

SEQ ID NO: 2416531 - DNA, 25 bp, Homo sapien
gctccctcaacctgcctctttgctg

SEQ ID NO: 2416532 - DNA, 25 bp, Homo sapien
tgctccctcaacctgcctctttgct

SEQ ID NO: 2416533 - DNA, 25 bp, Homo sapien
agcactcagcaggtccatgggtcat

SEQ ID NO: 2416534 - DNA, 25 bp, Homo sapien
cagcaatgagcactcagcaggtcca

SEQ ID NO: 2416535 - DNA, 25 bp, Homo sapien
caatgagcactcagcaggtccatgg

SEQ ID NO: 2416536 - DNA, 25 bp, Homo sapien
cccagcagcaatgagcactcagcag

SEQ ID NO: 2416537 - DNA, 25 bp, Homo sapien
gaaacaatccgctcccaagtgcatt

SEQ ID NO: 2416538 - DNA, 25 bp, Homo sapien
cttagcagcttatggcaacgtggat

SEQ ID NO: 2416539 - DNA, 25 bp, Homo sapien
gaatccaggtccttgttacagtaga

SEQ ID NO: 2416540 - DNA, 25 bp, Homo sapien
tatctggaggatctaggaaacaatc

SEQ ID NO: 2416541 - DNA, 25 bp, Homo sapien
tgttccccagttagtgagcctttag

SEQ ID NO: 2416542 - DNA, 25 bp, Homo sapien
cataagcaacctgtgaggaggtcca

SEQ ID NO: 2416543 - DNA, 25 bp, Homo sapien
tctatccccgacaggcttttccagg

SEQ ID NO: 2416544 - DNA, 25 bp, Homo sapien
gattaactgcagtggttcttcccca

SEQ ID NO: 2416545 - DNA, 25 bp, Homo sapien
ccaggatcatcacaatcaactcggg

SEQ ID NO: 2416546 - DNA, 25 bp, Homo sapien
tgtcattaggtacattatctttgat

SEQ ID NO: 2416547 - DNA, 25 bp, Homo sapien
ttatctttgattccagataacaaaa

SEQ ID NO: 2416548 - DNA, 25 bp, Homo sapien
aagcagtacgacagtgagggaatca

SEQ ID NO: 2416549 - DNA, 25 bp, Homo sapien
tgtctgcctagattcacatccttca

SEQ ID NO: 2416550 - DNA, 25 bp, Homo sapien
aaacagttatgagttgtctgcctag

SEQ ID NO: 2416551 - DNA, 25 bp, Homo sapien
gttatgagttgtctgcctagattca

SEQ ID NO: 2416552 - DNA, 25 bp, Homo sapien
gagttgtctgcctagattcacatcc

SEQ ID NO: 2416553 - DNA, 25 bp, Homo sapien
tttttgattgaaggcatcttccctt

SEQ ID NO: 2416554 - DNA, 25 bp, Homo sapien
tgttgtgtgtaattgctatgatcct

SEQ ID NO: 2416555 - DNA, 25 bp, Homo sapien
tgttgttgtgtgtaattgctatgat

SEQ ID NO: 2416556 - DNA, 25 bp, Homo sapien
ggatccagatcacctctgcagcact

SEQ ID NO: 2416557 - DNA, 25 bp, Homo sapien
gacatgccaagtttccactgtgctg

SEQ ID NO: 2416558 - DNA, 25 bp, Homo sapien
cactcaggtaccaggaaggttcagc

SEQ ID NO: 2416559 - DNA, 25 bp, Homo sapien
gaaatattctcccaacgaggtgagg

SEQ ID NO: 2416560 - DNA, 25 bp, Homo sapien
cttgtatgctggtatttaactgggc

SEQ ID NO: 2416561 - DNA, 25 bp, Homo sapien
gcagaacgaacccagcggacccaag

SEQ ID NO: 2416562 - DNA, 25 bp, Homo sapien
gctgagtgggcagaacgaacccagc

SEQ ID NO: 2416563 - DNA, 25 bp, Homo sapien
cggtagcgtgggctgagtgcagcct

SEQ ID NO: 2416564 - DNA, 25 bp, Homo sapien
catgggatccaggccggtagcgtgg

SEQ ID NO: 2416565 - DNA, 25 bp, Homo sapien
tcaatttaagattcctggcaaaggc

SEQ ID NO: 2416566 - DNA, 25 bp, Homo sapien
cattgacaacagcagacatcgcctg

SEQ ID NO: 2416567 - DNA, 25 bp, Homo sapien
acatcgcctgtctgttctctatttg

SEQ ID NO: 2416568 - DNA, 25 bp, Homo sapien
ctttgtgatttattgccattgacaa

SEQ ID NO: 2416569 - DNA, 25 bp, Homo sapien
cactgtcttcgtgaagcctcattcc

SEQ ID NO: 2416570 - DNA, 25 bp, Homo sapien
tcaacactgtcttcgtgaagcctca

SEQ ID NO: 2416571 - DNA, 25 bp, Homo sapien
ctgtcttcgtgaagcctcattccaa

SEQ ID NO: 2416572 - DNA, 25 bp, Homo sapien
aacactgtcttcgtgaagcctcatt

SEQ ID NO: 2416573 - DNA, 25 bp, Homo sapien
aggttacgaacgtatttcaaatgct

SEQ ID NO: 2416574 - DNA, 25 bp, Homo sapien
ctaagcatccagattttagggaaag

SEQ ID NO: 2416575 - DNA, 25 bp, Homo sapien
cacctaagcatccagattttaggga

SEQ ID NO: 2416576 - DNA, 25 bp, Homo sapien
ctccacacctaagcatccagatttt

SEQ ID NO: 2416577 - DNA, 25 bp, Homo sapien
tggcttttgggagcctatcacgctc

SEQ ID NO: 2416578 - DNA, 25 bp, Homo sapien
tttgggagcctatcacgctcttcct

SEQ ID NO: 2416579 - DNA, 25 bp, Homo sapien
gggagcctatcacgctcttcctgtg

SEQ ID NO: 2416580 - DNA, 25 bp, Homo sapien
tggtttggcttttgggagcctatca

SEQ ID NO: 2416581 - DNA, 25 bp, Homo sapien
ggacagcaaagctcaccaacggatg

SEQ ID NO: 2416582 - DNA, 25 bp, Homo sapien
aaaatggcaatttggagcagctcga

SEQ ID NO: 2416583 - DNA, 25 bp, Homo sapien
gaggaccctggtgaataggcccagc

SEQ ID NO: 2416584 - DNA, 25 bp, Homo sapien
taaatacagtggagggctgttccct

SEQ ID NO: 2416585 - DNA, 25 bp, Homo sapien
taatagctgacacgaactgaggcct

SEQ ID NO: 2416586 - DNA, 25 bp, Homo sapien
cagaatcaccagcagaacatcgagt

SEQ ID NO: 2416587 - DNA, 25 bp, Homo sapien
tggatgatagcagctctcggacccc

SEQ ID NO: 2416588 - DNA, 25 bp, Homo sapien
cagcttaagttgtgccatgacagga

SEQ ID NO: 2416589 - DNA, 25 bp, Homo sapien
tatcttgccactcttgccccacacc

SEQ ID NO: 2416590 - DNA, 25 bp, Homo sapien
ttatcttgccactcttgccccacac

SEQ ID NO: 2416591 - DNA, 25 bp, Homo sapien
atcttgccactcttgccccacaccc

SEQ ID NO: 2416592 - DNA, 25 bp, Homo sapien
cttgccactcttgccccacacccac

SEQ ID NO: 2416593 - DNA, 25 bp, Homo sapien
gttgtcaatgtctgaaatggtgtct

SEQ ID NO: 2416594 - DNA, 25 bp, Homo sapien
aaatggtgtcttcagcagaaggtct

SEQ ID NO: 2416595 - DNA, 25 bp, Homo sapien
tgaaatggtgtcttcagcagaaggt

SEQ ID NO: 2416596 - DNA, 25 bp, Homo sapien
ccatcctgttgtcaatgtctgaaat

SEQ ID NO: 2416597 - DNA, 25 bp, Homo sapien
tcagtcccagaagccaccaccagct

SEQ ID NO: 2416598 - DNA, 25 bp, Homo sapien
cctccaatattcttatcctagcata

SEQ ID NO: 2416599 - DNA, 25 bp, Homo sapien
tagcataggttcttgtagagtcccc

SEQ ID NO: 2416600 - DNA, 25 bp, Homo sapien
tcttatcctagcataggttcttgta

SEQ ID NO: 2416601 - DNA, 25 bp, Homo sapien
tccaatattcttatcctagcatagg

SEQ ID NO: 2416602 - DNA, 25 bp, Homo sapien
tcataccacggaaaaagacccaaca

SEQ ID NO: 2416603 - DNA, 25 bp, Homo sapien
cagtaacagtggctaaatggcaaga

SEQ ID NO: 2416604 - DNA, 25 bp, Homo sapien
tgcttctggagaaaaacgtctctct

SEQ ID NO: 2416605 - DNA, 25 bp, Homo sapien
tataccctatgggtgcacgcgggac

SEQ ID NO: 2416606 - DNA, 25 bp, Homo sapien
gcatgaaccactgcccctggccagc

SEQ ID NO: 2416607 - DNA, 25 bp, Homo sapien
gctcacagtaaaatgtgtgcaaggc

SEQ ID NO: 2416608 - DNA, 25 bp, Homo sapien
ccatgaggctcaagattgcagtaag

SEQ ID NO: 2416609 - DNA, 25 bp, Homo sapien
tattacagaatcaaggccaggaatg

SEQ ID NO: 2416610 - DNA, 25 bp, Homo sapien
agcactctgaagatctcgaggtcac

SEQ ID NO: 2416611 - DNA, 25 bp, Homo sapien
catggatagctctaacaaagaagca

SEQ ID NO: 2416612 - DNA, 25 bp, Homo sapien
gagctcattactgaactgtgcaaag

SEQ ID NO: 2416613 - DNA, 25 bp, Homo sapien
caacttagttcaataggcggtcttc

SEQ ID NO: 2416614 - DNA, 25 bp, Homo sapien
agcaagcttactttacctaagggct

SEQ ID NO: 2416615 - DNA, 25 bp, Homo sapien
ggtcctctatcttctataaatactt

SEQ ID NO: 2416616 - DNA, 25 bp, Homo sapien
caccacaggtcctctatcttctata

SEQ ID NO: 2416617 - DNA, 25 bp, Homo sapien
ccacaggtcctctatcttctataaa

SEQ ID NO: 2416618 - DNA, 25 bp, Homo sapien
gagccaccacaggtcctctatcttc

SEQ ID NO: 2416619 - DNA, 25 bp, Homo sapien
cacgcctagcccaaggattccattt

SEQ ID NO: 2416620 - DNA, 25 bp, Homo sapien
ggtagagcactcagttccgcagaaa

SEQ ID NO: 2416621 - DNA, 25 bp, Homo sapien
taggtgtagccagaaggtagagcac

SEQ ID NO: 2416622 - DNA, 25 bp, Homo sapien
gcttccagggcctatacctcataca

SEQ ID NO: 2416623 - DNA, 25 bp, Homo sapien
taaccgaggcatctaactggatcca

SEQ ID NO: 2416624 - DNA, 25 bp, Homo sapien
ggatcactgggagctctactttggg

SEQ ID NO: 2416625 - DNA, 25 bp, Homo sapien
ccaggatagctttggagtgactcca

SEQ ID NO: 2416626 - DNA, 25 bp, Homo sapien
gacttgtgaatcagacagacccctg

SEQ ID NO: 2416627 - DNA, 25 bp, Homo sapien
tgatacacagagtcgggcaagaagg

SEQ ID NO: 2416628 - DNA, 25 bp, Homo sapien
cagaggtggaaagacgggtgagacc

SEQ ID NO: 2416629 - DNA, 25 bp, Homo sapien
gaagctgtaagtagtttattatggg

SEQ ID NO: 2416630 - DNA, 25 bp, Homo sapien
tttattatgggtgatacacagagtc

SEQ ID NO: 2416631 - DNA, 25 bp, Homo sapien
ggctggcctagaatatagtcacaac

SEQ ID NO: 2416632 - DNA, 25 bp, Homo sapien
gaccactcctttctgagtacaagca

SEQ ID NO: 2416633 - DNA, 25 bp, Homo sapien
tgttccacggactttactgaaggtg

SEQ ID NO: 2416634 - DNA, 25 bp, Homo sapien
gaaggtggaaacaactgtcttccca

SEQ ID NO: 2416635 - DNA, 25 bp, Homo sapien
cttataggaagcatgggacgagcat

SEQ ID NO: 2416636 - DNA, 25 bp, Homo sapien
tataggaagcatgggacgagcatct

SEQ ID NO: 2416637 - DNA, 25 bp, Homo sapien
ggcttataggaagcatgggacgagc

SEQ ID NO: 2416638 - DNA, 25 bp, Homo sapien
caggcttataggaagcatgggacga

SEQ ID NO: 2416639 - DNA, 25 bp, Homo sapien
taaacatccagatctttcatgaact

SEQ ID NO: 2416640 - DNA, 25 bp, Homo sapien
tcttttaaacatccagatctttcat

SEQ ID NO: 2416641 - DNA, 25 bp, Homo sapien
aggaggaagatcacagactctttta

SEQ ID NO: 2416642 - DNA, 25 bp, Homo sapien
aggaagatcacagactcttttaaac

SEQ ID NO: 2416643 - DNA, 25 bp, Homo sapien
gacaagtaatgaggtcacctgccat

SEQ ID NO: 2416644 - DNA, 25 bp, Homo sapien
tcttggtttcagttacacgggtcac

SEQ ID NO: 2416645 - DNA, 25 bp, Homo sapien
tgactccactggacattaaaaaggg

SEQ ID NO: 2416646 - DNA, 25 bp, Homo sapien
taggtccaactccaacatggcggtc

SEQ ID NO: 2416647 - DNA, 25 bp, Homo sapien
agttaggctcctttcctggaatatc

SEQ ID NO: 2416648 - DNA, 25 bp, Homo sapien
tgactctagttaggctcctttcctg

SEQ ID NO: 2416649 - DNA, 25 bp, Homo sapien
tacaattcccatcaaggacatttgg

SEQ ID NO: 2416650 - DNA, 25 bp, Homo sapien
ggtgtgatctcaggaaggcttaaca

SEQ ID NO: 2416651 - DNA, 25 bp, Homo sapien
gagtcagctactcagtcagatcctg

SEQ ID NO: 2416652 - DNA, 25 bp, Homo sapien
tctagatgtggtaatactgaggtcc

SEQ ID NO: 2416653 - DNA, 25 bp, Homo sapien
tcctcctggtgatcaacacaaactg

SEQ ID NO: 2416654 - DNA, 25 bp, Homo sapien
cacaaactggattaagagtcagcta

SEQ ID NO: 2416655 - DNA, 25 bp, Homo sapien
gtcaaggaactaatgaggtgtggag

SEQ ID NO: 2416656 - DNA, 25 bp, Homo sapien
gaactaatgaggtgtggagtaacta

SEQ ID NO: 2416657 - DNA, 25 bp, Homo sapien
aggaactaatgaggtgtggagtaac

SEQ ID NO: 2416658 - DNA, 25 bp, Homo sapien
caaggaactaatgaggtgtggagta

SEQ ID NO: 2416659 - DNA, 25 bp, Homo sapien
tgaaagcacccgtttcctttcttga

SEQ ID NO: 2416660 - DNA, 25 bp, Homo sapien
gggatgaggcgttttttctgaatac

SEQ ID NO: 2416661 - DNA, 25 bp, Homo sapien
gcgttttttctgaatacgagcccag

SEQ ID NO: 2416662 - DNA, 25 bp, Homo sapien
gaggcgttttttctgaatacgagcc

SEQ ID NO: 2416663 - DNA, 25 bp, Homo sapien
tcagccccgggcgatggaagatttt

SEQ ID NO: 2416664 - DNA, 25 bp, Homo sapien
gattttgcccgtgggaccgtcacga

SEQ ID NO: 2416665 - DNA, 25 bp, Homo sapien
cagttccgttacgaggtctctcccg

SEQ ID NO: 2416666 - DNA, 25 bp, Homo sapien
taagagggacgctgaatcacagcca

SEQ ID NO: 2416667 - DNA, 25 bp, Homo sapien
aggtgcgcggagagggaacgccggg

SEQ ID NO: 2416668 - DNA, 25 bp, Homo sapien
ctagcgcgggccgggaggtgcgcgg

SEQ ID NO: 2416669 - DNA, 25 bp, Homo sapien
cgggaggtgcgcggagagggaacgc

SEQ ID NO: 2416670 - DNA, 25 bp, Homo sapien
gcgcgggccgggaggtgcgcggaga

SEQ ID NO: 2416671 - DNA, 25 bp, Homo sapien
cccctctgggcggcctgcgggggcg

SEQ ID NO: 2416672 - DNA, 25 bp, Homo sapien
gcccctctgggcggcctgcgggggc

SEQ ID NO: 2416673 - DNA, 25 bp, Homo sapien
ctggtgtgtcaccctttgcgcctct

SEQ ID NO: 2416674 - DNA, 25 bp, Homo sapien
acacaagccgcggactgaaaagtac

SEQ ID NO: 2416675 - DNA, 25 bp, Homo sapien
tctcctcgcggcacacaagccgcgg

SEQ ID NO: 2416676 - DNA, 25 bp, Homo sapien
tggtgtgtcaccctttgcgcctctc

SEQ ID NO: 2416677 - DNA, 25 bp, Homo sapien
cacagacaggctcttttgccaagtc

SEQ ID NO: 2416678 - DNA, 25 bp, Homo sapien
ttggatggcaccgtccacagacagg

SEQ ID NO: 2416679 - DNA, 25 bp, Homo sapien
gttttcaatttgctatccagtcgtc

SEQ ID NO: 2416680 - DNA, 25 bp, Homo sapien
tcgcagcagggttgacccttcattg

SEQ ID NO: 2416681 - DNA, 25 bp, Homo sapien
acctgtgtggtgctgtccttcctca

SEQ ID NO: 2416682 - DNA, 25 bp, Homo sapien
catcctagaatacctgtgtggtgct

SEQ ID NO: 2416683 - DNA, 25 bp, Homo sapien
ggtgctgtccttcctcaagactacc

SEQ ID NO: 2416684 - DNA, 25 bp, Homo sapien
gtgcctgtgtagatcatcctagaat

SEQ ID NO: 2416685 - DNA, 25 bp, Homo sapien
gtagaccctggtatgttgcttacag

SEQ ID NO: 2416686 - DNA, 25 bp, Homo sapien
ggtatgttgcttacagcattagcaa

SEQ ID NO: 2416687 - DNA, 25 bp, Homo sapien
ttgcttacagcattagcaaaaacca

SEQ ID NO: 2416688 - DNA, 25 bp, Homo sapien
tcagttgcccttttgtagaccctgg

SEQ ID NO: 2416689 - DNA, 25 bp, Homo sapien
tctgtaatttaagttgtcatagtaa

SEQ ID NO: 2416690 - DNA, 25 bp, Homo sapien
ttttctgtaatttaagttgtcatag

SEQ ID NO: 2416691 - DNA, 25 bp, Homo sapien
taggaggggggtgacattttctgta

SEQ ID NO: 2416692 - DNA, 25 bp, Homo sapien
gacattttctgtaatttaagttgtc

SEQ ID NO: 2416693 - DNA, 25 bp, Homo sapien
cctgaagaatttcagtgacaataaa

SEQ ID NO: 2416694 - DNA, 25 bp, Homo sapien
tgcatcaagacgcatacttggaatc

SEQ ID NO: 2416695 - DNA, 25 bp, Homo sapien
gaatttcagtgacaataaacattcc

SEQ ID NO: 2416696 - DNA, 25 bp, Homo sapien
atcaagacgcatacttggaatccag

SEQ ID NO: 2416697 - DNA, 25 bp, Homo sapien
aagaaaggagccatccattgtgacc

SEQ ID NO: 2416698 - DNA, 25 bp, Homo sapien
caagaaaggagccatccattgtgac

SEQ ID NO: 2416699 - DNA, 25 bp, Homo sapien
gagccatccattgtgacctaattat

SEQ ID NO: 2416700 - DNA, 25 bp, Homo sapien
aaggagccatccattgtgacctaat

SEQ ID NO: 2416701 - DNA, 25 bp, Homo sapien
gactacaagtgcatttcaccacacc

SEQ ID NO: 2416702 - DNA, 25 bp, Homo sapien
ctcccgcttcagcctatcgagtagc

SEQ ID NO: 2416703 - DNA, 25 bp, Homo sapien
gggactacaagtgcatttcaccaca

SEQ ID NO: 2416704 - DNA, 25 bp, Homo sapien
ctacaagtgcatttcaccacaccca

SEQ ID NO: 2416705 - DNA, 25 bp, Homo sapien
ttcaatgtgtagtcttcggttttgc

SEQ ID NO: 2416706 - DNA, 25 bp, Homo sapien
aatgtgtagtcttcggttttgccct

SEQ ID NO: 2416707 - DNA, 25 bp, Homo sapien
caatgtgtagtcttcggttttgccc

SEQ ID NO: 2416708 - DNA, 25 bp, Homo sapien
atgtgtagtcttcggttttgccctt

SEQ ID NO: 2416709 - DNA, 25 bp, Homo sapien
caggtaggtagtaagtggtaatagt

SEQ ID NO: 2416710 - DNA, 25 bp, Homo sapien
gtaggtagtaagtggtaatagtcat

SEQ ID NO: 2416711 - DNA, 25 bp, Homo sapien
tggaaggacaggtaggtagtaagtg

SEQ ID NO: 2416712 - DNA, 25 bp, Homo sapien
gacaggtaggtagtaagtggtaata

SEQ ID NO: 2416713 - DNA, 25 bp, Homo sapien
ggcctttgcacaactgagggacaac

SEQ ID NO: 2416714 - DNA, 25 bp, Homo sapien
tgtatacctaagatgcaggcgaggg

SEQ ID NO: 2416715 - DNA, 25 bp, Homo sapien
tgagggacaacgtgagagacttctg

SEQ ID NO: 2416716 - DNA, 25 bp, Homo sapien
ggaatgattgattctgggcctttgc

SEQ ID NO: 2416717 - DNA, 25 bp, Homo sapien
tatgattaaccagccagttaccagt

SEQ ID NO: 2416718 - DNA, 25 bp, Homo sapien
taagagacttctgctgtgtggttgt

SEQ ID NO: 2416719 - DNA, 25 bp, Homo sapien
cactgctttaacctgcttttatgat

SEQ ID NO: 2416720 - DNA, 25 bp, Homo sapien
gtgctaagagacttctgctgtgtgg

SEQ ID NO: 2416721 - DNA, 25 bp, Homo sapien
tcaacatgtagtttcagttgttgaa

SEQ ID NO: 2416722 - DNA, 25 bp, Homo sapien
acatgtagtttcagttgttgaagcc

SEQ ID NO: 2416723 - DNA, 25 bp, Homo sapien
gttgaagccatgagtgttactttgg

SEQ ID NO: 2416724 - DNA, 25 bp, Homo sapien
aacatgtagtttcagttgttgaagc

SEQ ID NO: 2416725 - DNA, 25 bp, Homo sapien
ctacatgttccttggccacgtacat

SEQ ID NO: 2416726 - DNA, 25 bp, Homo sapien
tctacatgttccttggccacgtaca

SEQ ID NO: 2416727 - DNA, 25 bp, Homo sapien
tgtgctttggaaggttgtaatttct

SEQ ID NO: 2416728 - DNA, 25 bp, Homo sapien
tactgtgctttggaaggttgtaatt

SEQ ID NO: 2416729 - DNA, 25 bp, Homo sapien
caggtcaggttcagaaggtgaattc

SEQ ID NO: 2416730 - DNA, 25 bp, Homo sapien
tcacagcattgccagaagaattagc

SEQ ID NO: 2416731 - DNA, 25 bp, Homo sapien
gctaagtagatacgacagtcttcat

SEQ ID NO: 2416732 - DNA, 25 bp, Homo sapien
tgctgctcatagttcccttgtgaga

SEQ ID NO: 2416733 - DNA, 25 bp, Homo sapien
cagatagatacctcttgactctgaa

SEQ ID NO: 2416734 - DNA, 25 bp, Homo sapien
ttctgacgggcttgtgccacaaagt

SEQ ID NO: 2416735 - DNA, 25 bp, Homo sapien
tgagaaccaggtcagtagaacctgc

SEQ ID NO: 2416736 - DNA, 25 bp, Homo sapien
cagttgaatagttacagatagatac

SEQ ID NO: 2416737 - DNA, 25 bp, Homo sapien
cattttaatagcaaggtaactgctg

SEQ ID NO: 2416738 - DNA, 25 bp, Homo sapien
ttagtccttgaatccttgcttccca

SEQ ID NO: 2416739 - DNA, 25 bp, Homo sapien
gaatccttgcttcccattttaatag

SEQ ID NO: 2416740 - DNA, 25 bp, Homo sapien
tgaccctttcttgaactgtggcttt

SEQ ID NO: 2416741 - DNA, 25 bp, Homo sapien
tgaatatattcatataggactaaca

SEQ ID NO: 2416742 - DNA, 25 bp, Homo sapien
gaatatattcatataggactaacat

SEQ ID NO: 2416743 - DNA, 25 bp, Homo sapien
gatgtgcagctcattctacgacgaa

SEQ ID NO: 2416744 - DNA, 25 bp, Homo sapien
aactgggccgtctctcagtgagcga

SEQ ID NO: 2416745 - DNA, 25 bp, Homo sapien
tatttggcacagatccggactatgg

SEQ ID NO: 2416746 - DNA, 25 bp, Homo sapien
gacagtgtggctcgaattcctgaaa

SEQ ID NO: 2416747 - DNA, 25 bp, Homo sapien
taattctcccagtcatcaatgaggt

SEQ ID NO: 2416748 - DNA, 25 bp, Homo sapien
tcagttggtattaataggagttacc

SEQ ID NO: 2416749 - DNA, 25 bp, Homo sapien
caagagctacagcaagactgataga

SEQ ID NO: 2416750 - DNA, 25 bp, Homo sapien
caaattagtcataaacaagagctac

SEQ ID NO: 2416751 - DNA, 25 bp, Homo sapien
tttatataacgatgctgtgttcaca

SEQ ID NO: 2416752 - DNA, 25 bp, Homo sapien
tcactatttattcagtattgctgct

SEQ ID NO: 2416753 - DNA, 25 bp, Homo sapien
acatctccagaataagctttcgatg

SEQ ID NO: 2416754 - DNA, 25 bp, Homo sapien
ggacagttcccattgtgcattgcct

SEQ ID NO: 2416755 - DNA, 25 bp, Homo sapien
cctcttctgtctcctagacttcggt

SEQ ID NO: 2416756 - DNA, 25 bp, Homo sapien
agacttcggtctcctggcaacagca

SEQ ID NO: 2416757 - DNA, 25 bp, Homo sapien
tctcctggcaacagcactggtgcta

SEQ ID NO: 2416758 - DNA, 25 bp, Homo sapien
actggctccgcagcctatccattct

SEQ ID NO: 2416759 - DNA, 25 bp, Homo sapien
gcaattccatctctgtcccagatac

SEQ ID NO: 2416760 - DNA, 25 bp, Homo sapien
tcattcctaaggcagcaattccatc

SEQ ID NO: 2416761 - DNA, 25 bp, Homo sapien
attccatctctgtcccagatacttg

SEQ ID NO: 2416762 - DNA, 25 bp, Homo sapien
cattcctaaggcagcaattccatct

SEQ ID NO: 2416763 - DNA, 25 bp, Homo sapien
ccagcctttgatccgcccatgtgaa

SEQ ID NO: 2416764 - DNA, 25 bp, Homo sapien
aagctgcaggtccatttccaaagcc

SEQ ID NO: 2416765 - DNA, 25 bp, Homo sapien
aaagcccaggtgtcctttgcctcca

SEQ ID NO: 2416766 - DNA, 25 bp, Homo sapien
gcaggtccatttccaaagcccaggt

SEQ ID NO: 2416767 - DNA, 25 bp, Homo sapien
acattcctcaacacgcacactccat

SEQ ID NO: 2416768 - DNA, 25 bp, Homo sapien
tacattcctcaacacgcacactcca

SEQ ID NO: 2416769 - DNA, 25 bp, Homo sapien
gctacattcctcaacacgcacactc

SEQ ID NO: 2416770 - DNA, 25 bp, Homo sapien
ctacattcctcaacacgcacactcc

SEQ ID NO: 2416771 - DNA, 25 bp, Homo sapien
ctccaaagctgcgccttaggtgaat

SEQ ID NO: 2416772 - DNA, 25 bp, Homo sapien
ccttaggtgaatccttacttgaaga

SEQ ID NO: 2416773 - DNA, 25 bp, Homo sapien
aggtgaatccttacttgaagagatc

SEQ ID NO: 2416774 - DNA, 25 bp, Homo sapien
gcgccttaggtgaatccttacttga

SEQ ID NO: 2416775 - DNA, 25 bp, Homo sapien
cacagcaagccacctcatcaggtct

SEQ ID NO: 2416776 - DNA, 25 bp, Homo sapien
gccacagcaagccacctcatcaggt

SEQ ID NO: 2416777 - DNA, 25 bp, Homo sapien
ccacagcaagccacctcatcaggtc

SEQ ID NO: 2416778 - DNA, 25 bp, Homo sapien
cctcatcaggtctgataaccatgtc

SEQ ID NO: 2416779 - DNA, 25 bp, Homo sapien
ccctgcttatcctagtgaggtggac

SEQ ID NO: 2416780 - DNA, 25 bp, Homo sapien
gacccagtcttgcaggcagaagaag

SEQ ID NO: 2416781 - DNA, 25 bp, Homo sapien
ttctggtaaagaatcaagcctgtcc

SEQ ID NO: 2416782 - DNA, 25 bp, Homo sapien
tatacattgcctatgggttgctcgg

SEQ ID NO: 2416783 - DNA, 25 bp, Homo sapien
tgtagtgcagcttagcacgggagca

SEQ ID NO: 2416784 - DNA, 25 bp, Homo sapien
tggatgtaattagtagctcccaccc

SEQ ID NO: 2416785 - DNA, 25 bp, Homo sapien
tattgtgctgccgttccttctgtaa

SEQ ID NO: 2416786 - DNA, 25 bp, Homo sapien
gagatggcctcatgcccttattgtg

SEQ ID NO: 2416787 - DNA, 25 bp, Homo sapien
taatcgatgaggagtctgaaacctc

SEQ ID NO: 2416788 - DNA, 25 bp, Homo sapien
catggcacctcacatacagcaagca

SEQ ID NO: 2416789 - DNA, 25 bp, Homo sapien
catgggtgtgtctaaattcagaggc

SEQ ID NO: 2416790 - DNA, 25 bp, Homo sapien
gaaaaggaatatgctgtaatcgatg

SEQ ID NO: 2416791 - DNA, 25 bp, Homo sapien
taagaagcatcgctgagaatctgga

SEQ ID NO: 2416792 - DNA, 25 bp, Homo sapien
ctgtcggacaaactaggcatcactg

SEQ ID NO: 2416793 - DNA, 25 bp, Homo sapien
caggctagctgtgcgtaaagagact

SEQ ID NO: 2416794 - DNA, 25 bp, Homo sapien
cccacagtaagtcagaggtagcaaa

SEQ ID NO: 2416795 - DNA, 25 bp, Homo sapien
catagaaaggagtaggctgagcctc

SEQ ID NO: 2416796 - DNA, 25 bp, Homo sapien
caaatctcgggtggtgggcaataac

SEQ ID NO: 2416797 - DNA, 25 bp, Homo sapien
taaccaaagtcatcgcctggatggc

SEQ ID NO: 2416798 - DNA, 25 bp, Homo sapien
taaaagtccttcgtgtgtttgccca

SEQ ID NO: 2416799 - DNA, 25 bp, Homo sapien
catgttaccatatgggcacttggac

SEQ ID NO: 2416800 - DNA, 25 bp, Homo sapien
tacttggtccaagatactgcaatgg

SEQ ID NO: 2416801 - DNA, 25 bp, Homo sapien
taactgacttgtaaaatctggccca

SEQ ID NO: 2416802 - DNA, 25 bp, Homo sapien
tgagggatataatagagctggccac

SEQ ID NO: 2416803 - DNA, 25 bp, Homo sapien
tacattgggaacgagcaggtagaca

SEQ ID NO: 2416804 - DNA, 25 bp, Homo sapien
tgtgatgtcacagacgaaaactgaa

SEQ ID NO: 2416805 - DNA, 25 bp, Homo sapien
caagagattggaaatgtgtgacatc

SEQ ID NO: 2416806 - DNA, 25 bp, Homo sapien
gacccagtgaaagaggaacacctga

SEQ ID NO: 2416807 - DNA, 25 bp, Homo sapien
aaatcacaaaatagtgtggcaatat

SEQ ID NO: 2416808 - DNA, 25 bp, Homo sapien
tagtgtggcaatatttaggtaatag

SEQ ID NO: 2416809 - DNA, 25 bp, Homo sapien
aatttctagtttatcgtcacatact

SEQ ID NO: 2416810 - DNA, 25 bp, Homo sapien
tatcgtcacatactaaacttttcta

SEQ ID NO: 2416811 - DNA, 25 bp, Homo sapien
gacttagttctgacgatggcccagc

SEQ ID NO: 2416812 - DNA, 25 bp, Homo sapien
caatctgtttgtggaacgcctccta

SEQ ID NO: 2416813 - DNA, 25 bp, Homo sapien
cgcataggatcttttacagctggtg

SEQ ID NO: 2416814 - DNA, 25 bp, Homo sapien
taagagccaccttgtaggctaagag

SEQ ID NO: 2416815 - DNA, 25 bp, Homo sapien
tcagggagcttcctttcctggctgc

SEQ ID NO: 2416816 - DNA, 25 bp, Homo sapien
cctttcctggctgcgagggatcttc

SEQ ID NO: 2416817 - DNA, 25 bp, Homo sapien
gagcttcctttcctggctgcgaggg

SEQ ID NO: 2416818 - DNA, 25 bp, Homo sapien
ttcctttcctggctgcgagggatct

SEQ ID NO: 2416819 - DNA, 25 bp, Homo sapien
ctgagcagagctctccgggttcccc

SEQ ID NO: 2416820 - DNA, 25 bp, Homo sapien
ggctcgcggggcccggcgaagggca

SEQ ID NO: 2416821 - DNA, 25 bp, Homo sapien
cggcgaagggcaggtgggtgcggcc

SEQ ID NO: 2416822 - DNA, 25 bp, Homo sapien
gagcagagctctccgggttccccgg

SEQ ID NO: 2416823 - DNA, 25 bp, Homo sapien
ccaaggggcgccacctcgtgcggca

SEQ ID NO: 2416824 - DNA, 25 bp, Homo sapien
gggcgccacctcgtgcggcaggagg

SEQ ID NO: 2416825 - DNA, 25 bp, Homo sapien
gcgccccaaggggcgccacctcgtg

SEQ ID NO: 2416826 - DNA, 25 bp, Homo sapien
gcgccacctcgtgcggcaggagggt

SEQ ID NO: 2416827 - DNA, 25 bp, Homo sapien
tgccggggtatagcagcgggaacgg

SEQ ID NO: 2416828 - DNA, 25 bp, Homo sapien
ggcgacaacaccgaggacaggcagg

SEQ ID NO: 2416829 - DNA, 25 bp, Homo sapien
ggagggggcgacaacaccgaggaca

SEQ ID NO: 2416830 - DNA, 25 bp, Homo sapien
gggatgccggggtatagcagcggga

SEQ ID NO: 2416831 - DNA, 25 bp, Homo sapien
ttctccaggccgctcttgtccagga

SEQ ID NO: 2416832 - DNA, 25 bp, Homo sapien
gaagggctgcacgtaggcggcagct

SEQ ID NO: 2416833 - DNA, 25 bp, Homo sapien
gggctgcgggaagggcgcgcctccg

SEQ ID NO: 2416834 - DNA, 25 bp, Homo sapien
ccgaacgccaccagcgagctgagca

SEQ ID NO: 2416835 - DNA, 25 bp, Homo sapien
cgtgcaagtggttgatcagctggac

SEQ ID NO: 2416836 - DNA, 25 bp, Homo sapien
gacctgttgagtcaacagctgcggg

SEQ ID NO: 2416837 - DNA, 25 bp, Homo sapien
tgtcggtgtccgtgtcgttctcggc

SEQ ID NO: 2416838 - DNA, 25 bp, Homo sapien
ggctgagtccgctggatgacgggca

SEQ ID NO: 2416839 - DNA, 25 bp, Homo sapien
catgtttgaaatcccgagtggaacg

SEQ ID NO: 2416840 - DNA, 25 bp, Homo sapien
caaaccgggagaggtattgcaagac

SEQ ID NO: 2416841 - DNA, 25 bp, Homo sapien
tgggtgtccagctctcaaaccggga

SEQ ID NO: 2416842 - DNA, 25 bp, Homo sapien
gagtggaacgcatccaagtcggact

SEQ ID NO: 2416843 - DNA, 25 bp, Homo sapien
tccaccagttgacgagagaagcggg

SEQ ID NO: 2416844 - DNA, 25 bp, Homo sapien
gaaatgggctcgttccaatgaaggg

SEQ ID NO: 2416845 - DNA, 25 bp, Homo sapien
aaaacatctgcttatcacgtgggcc

SEQ ID NO: 2416846 - DNA, 25 bp, Homo sapien
gtgggccctgcatcgactaaagtga

SEQ ID NO: 2416847 - DNA, 25 bp, Homo sapien
gctgttgctcggttaaggcggttaa

SEQ ID NO: 2416848 - DNA, 25 bp, Homo sapien
gatgctgttgctcggttaaggcggt

SEQ ID NO: 2416849 - DNA, 25 bp, Homo sapien
ctgatgctgttgctcggttaaggcg

SEQ ID NO: 2416850 - DNA, 25 bp, Homo sapien
tgctgttgctcggttaaggcggtta

SEQ ID NO: 2416851 - DNA, 25 bp, Homo sapien
tgcgggaaactctgtacggtatagc

SEQ ID NO: 2416852 - DNA, 25 bp, Homo sapien
gagcacctactccagtttgcgggaa

SEQ ID NO: 2416853 - DNA, 25 bp, Homo sapien
gcaaacactttgaaagaagtactgt

SEQ ID NO: 2416854 - DNA, 25 bp, Homo sapien
gatttcttgccttcagctgggagca

SEQ ID NO: 2416855 - DNA, 25 bp, Homo sapien
agactattaacacgcccttggagag

SEQ ID NO: 2416856 - DNA, 25 bp, Homo sapien
cagactattaacacgcccttggaga

SEQ ID NO: 2416857 - DNA, 25 bp, Homo sapien
gactattaacacgcccttggagagc

SEQ ID NO: 2416858 - DNA, 25 bp, Homo sapien
actattaacacgcccttggagagca

SEQ ID NO: 2416859 - DNA, 25 bp, Homo sapien
gcattcattaattcggtctcttctt

SEQ ID NO: 2416860 - DNA, 25 bp, Homo sapien
gagcaatgcattcattaattcggtc

SEQ ID NO: 2416861 - DNA, 25 bp, Homo sapien
gatgttcaggcagtaaatctttcag

SEQ ID NO: 2416862 - DNA, 25 bp, Homo sapien
aatctttcagctgagcaatgcattc

SEQ ID NO: 2416863 - DNA, 25 bp, Homo sapien
tgataaactacacccaagaaacctc

SEQ ID NO: 2416864 - DNA, 25 bp, Homo sapien
taactacccatgcaggttatgagga

SEQ ID NO: 2416865 - DNA, 25 bp, Homo sapien
tatttgcgggcagagcttcactgtg

SEQ ID NO: 2416866 - DNA, 25 bp, Homo sapien
tattggatattaccctcgtctgccc

SEQ ID NO: 2416867 - DNA, 25 bp, Homo sapien
ggtgtcgtctcgtttcatgctcctt

SEQ ID NO: 2416868 - DNA, 25 bp, Homo sapien
catatacaaagaggaatagtccagt

SEQ ID NO: 2416869 - DNA, 25 bp, Homo sapien
acacatatacaaagaggaatagtcc

SEQ ID NO: 2416870 - DNA, 25 bp, Homo sapien
cttggtgtcgtctcgtttcatgctc

SEQ ID NO: 2416871 - DNA, 25 bp, Homo sapien
tcgccagctccataccactttctgg

SEQ ID NO: 2416872 - DNA, 25 bp, Homo sapien
tcaaaccaaagcctagacagatatt

SEQ ID NO: 2416873 - DNA, 25 bp, Homo sapien
tattcgcaagggtgcgtgcacctta

SEQ ID NO: 2416874 - DNA, 25 bp, Homo sapien
cacccattcggggaggggctctgcc

SEQ ID NO: 2416875 - DNA, 25 bp, Homo sapien
tctctatgttccagtaactgtctct

SEQ ID NO: 2416876 - DNA, 25 bp, Homo sapien
tatgttccagtaactgtctctcttg

SEQ ID NO: 2416877 - DNA, 25 bp, Homo sapien
tgtctctcttgcaaatgaggaattc

SEQ ID NO: 2416878 - DNA, 25 bp, Homo sapien
tctctcttgcaaatgaggaattcct

SEQ ID NO: 2416879 - DNA, 25 bp, Homo sapien
gtttcgatttttggggctctgtaca

SEQ ID NO: 2416880 - DNA, 25 bp, Homo sapien
tctgtttcgatttttggggctctgt

SEQ ID NO: 2416881 - DNA, 25 bp, Homo sapien
cgatttttggggctctgtacaataa

SEQ ID NO: 2416882 - DNA, 25 bp, Homo sapien
tcgatttttggggctctgtacaata

SEQ ID NO: 2416883 - DNA, 25 bp, Homo sapien
ctgtgggacggtaggcttgggagac

SEQ ID NO: 2416884 - DNA, 25 bp, Homo sapien
tgtgggacggtaggcttgggagacc

SEQ ID NO: 2416885 - DNA, 25 bp, Homo sapien
ttggggggatctgtgcgtctccagt

SEQ ID NO: 2416886 - DNA, 25 bp, Homo sapien
ttgggagaccttggggggatctgtg

SEQ ID NO: 2416887 - DNA, 25 bp, Homo sapien
tgtgaagcagttggtcccccccctc

SEQ ID NO: 2416888 - DNA, 25 bp, Homo sapien
tgaaagtgtgaagcagttggtcccc

SEQ ID NO: 2416889 - DNA, 25 bp, Homo sapien
tgttgaaagtgtgaagcagttggtc

SEQ ID NO: 2416890 - DNA, 25 bp, Homo sapien
cagtgcagtgttgaaagtgtgaagc

SEQ ID NO: 2416891 - DNA, 25 bp, Homo sapien
acacgcacactcgcgccggccccac

SEQ ID NO: 2416892 - DNA, 25 bp, Homo sapien
acacacacgcacactcgcgccggcc

SEQ ID NO: 2416893 - DNA, 25 bp, Homo sapien
acacacgcacactcgcgccggcccc

SEQ ID NO: 2416894 - DNA, 25 bp, Homo sapien
cacacacacgcacactcgcgccggc

SEQ ID NO: 2416895 - DNA, 25 bp, Homo sapien
gtttgctctcactccaggcagtgtt

SEQ ID NO: 2416896 - DNA, 25 bp, Homo sapien
agctcacgtgcggaacgtaccatcc

SEQ ID NO: 2416897 - DNA, 25 bp, Homo sapien
tgcgctggtagtttgctctcactcc

SEQ ID NO: 2416898 - DNA, 25 bp, Homo sapien
tgtttggccacagggcacgcgcgtc

SEQ ID NO: 2416899 - DNA, 25 bp, Homo sapien
caggaatgtgaacgtggctttttgc

SEQ ID NO: 2416900 - DNA, 25 bp, Homo sapien
gctccaaaatgcgactccctgggtt

SEQ ID NO: 2416901 - DNA, 25 bp, Homo sapien
ttcccaaaggcgatgcagtcggcag

SEQ ID NO: 2416902 - DNA, 25 bp, Homo sapien
ctgatcagggccaccggaaaggaaa

SEQ ID NO: 2416903 - DNA, 25 bp, Homo sapien
tcgcggtgggtaaacttgagtccca

SEQ ID NO: 2416904 - DNA, 25 bp, Homo sapien
gtgaaaagagaattcgcggtgggta

SEQ ID NO: 2416905 - DNA, 25 bp, Homo sapien
agagaattcgcggtgggtaaacttg

SEQ ID NO: 2416906 - DNA, 25 bp, Homo sapien
agaattcgcggtgggtaaacttgag

SEQ ID NO: 2416907 - DNA, 25 bp, Homo sapien
ggttgcctcgagaagaagcaacttg

SEQ ID NO: 2416908 - DNA, 25 bp, Homo sapien
ggtggagaggttgcctcgagaagaa

SEQ ID NO: 2416909 - DNA, 25 bp, Homo sapien
gagggactccttggcgctgggtgga

SEQ ID NO: 2416910 - DNA, 25 bp, Homo sapien
gactccttggcgctgggtggagagg

SEQ ID NO: 2416911 - DNA, 25 bp, Homo sapien
aacttccccgcagcagccggaattg

SEQ ID NO: 2416912 - DNA, 25 bp, Homo sapien
tccgaatgtcgcaatccaagtgtct

SEQ ID NO: 2416913 - DNA, 25 bp, Homo sapien
gtctttcggtgacacggcgtccctg

SEQ ID NO: 2416914 - DNA, 25 bp, Homo sapien
gccggaattgcggtgccactaatca

SEQ ID NO: 2416915 - DNA, 25 bp, Homo sapien
tggcacgagaggggctaccacagaa

SEQ ID NO: 2416916 - DNA, 25 bp, Homo sapien
cacgagagggggtggcacgagaggg

SEQ ID NO: 2416917 - DNA, 25 bp, Homo sapien
cacgagaggggctaccacagaaaag

SEQ ID NO: 2416918 - DNA, 25 bp, Homo sapien
gtggcacgagagggggtggcacgag

SEQ ID NO: 2416919 - DNA, 25 bp, Homo sapien
gcctccctccttaatccggtctcaa

SEQ ID NO: 2416920 - DNA, 25 bp, Homo sapien
tcaaacgggtaccagcacagggcca

SEQ ID NO: 2416921 - DNA, 25 bp, Homo sapien
atccggtctcaaacgggtaccagca

SEQ ID NO: 2416922 - DNA, 25 bp, Homo sapien
gtttactaccgctggcacctccaaa

SEQ ID NO: 2416923 - DNA, 25 bp, Homo sapien
gctgccacatcactgctcggggaac

SEQ ID NO: 2416924 - DNA, 25 bp, Homo sapien
cacatcactgctcggggaacccgtg

SEQ ID NO: 2416925 - DNA, 25 bp, Homo sapien
tcactgctcggggaacccgtgcgcg

SEQ ID NO: 2416926 - DNA, 25 bp, Homo sapien
tgccacatcactgctcggggaaccc

SEQ ID NO: 2416927 - DNA, 25 bp, Homo sapien
gggacggatctgggtcgcgggaagc

SEQ ID NO: 2416928 - DNA, 25 bp, Homo sapien
ggacggatctgggtcgcgggaagcg

SEQ ID NO: 2416929 - DNA, 25 bp, Homo sapien
gtgtctgcgggagtcgcgtctcctc

SEQ ID NO: 2416930 - DNA, 25 bp, Homo sapien
tgtctgcgggagtcgcgtctcctcc

SEQ ID NO: 2416931 - DNA, 25 bp, Homo sapien
tctggcagttggcttgaagagagca

SEQ ID NO: 2416932 - DNA, 25 bp, Homo sapien
ctggcagttggcttgaagagagcag

SEQ ID NO: 2416933 - DNA, 25 bp, Homo sapien
ggcagttggcttgaagagagcagct

SEQ ID NO: 2416934 - DNA, 25 bp, Homo sapien
tggcagttggcttgaagagagcagc

SEQ ID NO: 2416935 - DNA, 25 bp, Homo sapien
ggctgtggaattgctgtttgtcatt

SEQ ID NO: 2416936 - DNA, 25 bp, Homo sapien
gtggaattgctgtttgtcattgtac

SEQ ID NO: 2416937 - DNA, 25 bp, Homo sapien
tgtggaattgctgtttgtcattgta

SEQ ID NO: 2416938 - DNA, 25 bp, Homo sapien
gctgtggaattgctgtttgtcattg

SEQ ID NO: 2416939 - DNA, 25 bp, Homo sapien
ggcagtaagctctgctccctagcag

SEQ ID NO: 2416940 - DNA, 25 bp, Homo sapien
cagccttggtaagttgagtttctca

SEQ ID NO: 2416941 - DNA, 25 bp, Homo sapien
tgcccagaaggcagtaagctctgct

SEQ ID NO: 2416942 - DNA, 25 bp, Homo sapien
gcagccttggtaagttgagtttctc

SEQ ID NO: 2416943 - DNA, 25 bp, Homo sapien
tcctttcgcagtgtgcattagcaaa

SEQ ID NO: 2416944 - DNA, 25 bp, Homo sapien
cagaacttttacttcctttcgcagt

SEQ ID NO: 2416945 - DNA, 25 bp, Homo sapien
cttttacttcctttcgcagtgtgca

SEQ ID NO: 2416946 - DNA, 25 bp, Homo sapien
acttcctttcgcagtgtgcattagc

SEQ ID NO: 2416947 - DNA, 25 bp, Homo sapien
gtccagtcgaattccacaggtgctc

SEQ ID NO: 2416948 - DNA, 25 bp, Homo sapien
gctggagccagtccagtcgaattcc

SEQ ID NO: 2416949 - DNA, 25 bp, Homo sapien
ggtgctccagagaccgtgggttggt

SEQ ID NO: 2416950 - DNA, 25 bp, Homo sapien
tcagagagactgtaaaagctggagc

SEQ ID NO: 2416951 - DNA, 25 bp, Homo sapien
ccaggatgtaggagtcaagcctcag

SEQ ID NO: 2416952 - DNA, 25 bp, Homo sapien
gtttggcctggcaagctgtgtttac

SEQ ID NO: 2416953 - DNA, 25 bp, Homo sapien
aagcctcagactccggaacaaagtg

SEQ ID NO: 2416954 - DNA, 25 bp, Homo sapien
agtgaagccagtccatcagaatgcc

SEQ ID NO: 2416955 - DNA, 25 bp, Homo sapien
tcaggagagcccatagtgtcctgga

SEQ ID NO: 2416956 - DNA, 25 bp, Homo sapien
tagaacagtgcaagggggatgcccc

SEQ ID NO: 2416957 - DNA, 25 bp, Homo sapien
tgcaagggggatgccccactgagcc

SEQ ID NO: 2416958 - DNA, 25 bp, Homo sapien
tgtgcactcagatgaagatcccaca

SEQ ID NO: 2416959 - DNA, 25 bp, Homo sapien
ctgcctcttgatgagcatttgtaga

SEQ ID NO: 2416960 - DNA, 25 bp, Homo sapien
tctgtaagagtctggaccatgaagg

SEQ ID NO: 2416961 - DNA, 25 bp, Homo sapien
cccttgttagagaagggatcctctc

SEQ ID NO: 2416962 - DNA, 25 bp, Homo sapien
ccttgaagcactatcagccactgag

SEQ ID NO: 2416963 - DNA, 25 bp, Homo sapien
agctgcctttggttctgcgtggaca

SEQ ID NO: 2416964 - DNA, 25 bp, Homo sapien
agagccataagccttctaagggagc

SEQ ID NO: 2416965 - DNA, 25 bp, Homo sapien
gctgcctttggttctgcgtggacac

SEQ ID NO: 2416966 - DNA, 25 bp, Homo sapien
gaagcattgtttccagggactagga

SEQ ID NO: 2416967 - DNA, 25 bp, Homo sapien
gacaggcatgggattcctaaactct

SEQ ID NO: 2416968 - DNA, 25 bp, Homo sapien
gataatgacctgaccgaaccagtag

SEQ ID NO: 2416969 - DNA, 25 bp, Homo sapien
cacagactgtgcctgagattgacat

SEQ ID NO: 2416970 - DNA, 25 bp, Homo sapien
aagtgggcagcagtcccacagacca

SEQ ID NO: 2416971 - DNA, 25 bp, Homo sapien
catgaagtgggcagcagtcccacag

SEQ ID NO: 2416972 - DNA, 25 bp, Homo sapien
ggtcatgaagtgggcagcagtccca

SEQ ID NO: 2416973 - DNA, 25 bp, Homo sapien
agtgggcagcagtcccacagaccat

SEQ ID NO: 2416974 - DNA, 25 bp, Homo sapien
caaatgtttttgatccgtggttgat

SEQ ID NO: 2416975 - DNA, 25 bp, Homo sapien
gggctgactgtagttgtatattcaa

SEQ ID NO: 2416976 - DNA, 25 bp, Homo sapien
cagttgacacactatattattgagg

SEQ ID NO: 2416977 - DNA, 25 bp, Homo sapien
gattggtactgggactcctgatacc

SEQ ID NO: 2416978 - DNA, 25 bp, Homo sapien
caagtctaggtttatcacgatgagt

SEQ ID NO: 2416979 - DNA, 25 bp, Homo sapien
ggcaaactaaggaagtactggtcaa

SEQ ID NO: 2416980 - DNA, 25 bp, Homo sapien
tctttctgtcttagtcggctcaggc

SEQ ID NO: 2416981 - DNA, 25 bp, Homo sapien
cagatgctttggatgcagtctcaga

SEQ ID NO: 2416982 - DNA, 25 bp, Homo sapien
acctcaagacctccctgaagctttg

SEQ ID NO: 2416983 - DNA, 25 bp, Homo sapien
taaatgcacatagggtgaccgtaac

SEQ ID NO: 2416984 - DNA, 25 bp, Homo sapien
cagtcaccaaatcgtgtgcgtcaca

SEQ ID NO: 2416985 - DNA, 25 bp, Homo sapien
tgtgttatagaaccctcaagaaaga

SEQ ID NO: 2416986 - DNA, 25 bp, Homo sapien
aaagagtagtaccattacactgggt

SEQ ID NO: 2416987 - DNA, 25 bp, Homo sapien
tgggaatagctgagcaggatttgac

SEQ ID NO: 2416988 - DNA, 25 bp, Homo sapien
catgtcctatgactgttcagcccag

SEQ ID NO: 2416989 - DNA, 25 bp, Homo sapien
cattttaggtcaaaggaacaagtca

SEQ ID NO: 2416990 - DNA, 25 bp, Homo sapien
gctgctggtcacaagttccaactca

SEQ ID NO: 2416991 - DNA, 25 bp, Homo sapien
taagtcatacactgggatagctgtc

SEQ ID NO: 2416992 - DNA, 25 bp, Homo sapien
gaaaatgagacccaaaccaaagtga

SEQ ID NO: 2416993 - DNA, 25 bp, Homo sapien
gaaacactcagccttgggttcactg

SEQ ID NO: 2416994 - DNA, 25 bp, Homo sapien
tctcactttatccaattagggaaag

SEQ ID NO: 2416995 - DNA, 25 bp, Homo sapien
ctttctcactttatccaattaggga

SEQ ID NO: 2416996 - DNA, 25 bp, Homo sapien
tttatccaattagggaaagagtaca

SEQ ID NO: 2416997 - DNA, 25 bp, Homo sapien
cactttatccaattagggaaagagt

SEQ ID NO: 2416998 - DNA, 25 bp, Homo sapien
tgaacctggaaatgactggaactaa

SEQ ID NO: 2416999 - DNA, 25 bp, Homo sapien
tacctagagtctcagcaggtggacc

SEQ ID NO: 2417000 - DNA, 25 bp, Homo sapien
tttcacaggcgatgaagctgacgtt

SEQ ID NO: 2417001 - DNA, 25 bp, Homo sapien
tatgtgtactagtctcaaaagctgg

SEQ ID NO: 2417002 - DNA, 25 bp, Homo sapien
ctatgtgggtgtcaggatatgctcc

SEQ ID NO: 2417003 - DNA, 25 bp, Homo sapien
taccgggatgtgacggactgtacca

SEQ ID NO: 2417004 - DNA, 25 bp, Homo sapien
caaagttgcgagagaaagtagcaca

SEQ ID NO: 2417005 - DNA, 25 bp, Homo sapien
gattcttaatttggtctgcggcctt

SEQ ID NO: 2417006 - DNA, 25 bp, Homo sapien
ctgtcggtgttaagagaaattactc

SEQ ID NO: 2417007 - DNA, 25 bp, Homo sapien
gaaattactctcacaagagcagagg

SEQ ID NO: 2417008 - DNA, 25 bp, Homo sapien
gctgcactgtcggtgttaagagaaa

SEQ ID NO: 2417009 - DNA, 25 bp, Homo sapien
gagaaattactctcacaagagcaga

SEQ ID NO: 2417010 - DNA, 25 bp, Homo sapien
ttatgtcctctagataaaacacccg

SEQ ID NO: 2417011 - DNA, 25 bp, Homo sapien
aattgagttcaattcgcctctccgc

SEQ ID NO: 2417012 - DNA, 25 bp, Homo sapien
cagtataaaggaaagcgttaagtcg

SEQ ID NO: 2417013 - DNA, 25 bp, Homo sapien
cgttaagtcggtaagctagaggatt

SEQ ID NO: 2417014 - DNA, 25 bp, Homo sapien
gaatctggaatgttgtagtccatcc

SEQ ID NO: 2417015 - DNA, 25 bp, Homo sapien
taaatcattcttaagtccccaagga

SEQ ID NO: 2417016 - DNA, 25 bp, Homo sapien
tatgctttaccagtaattcacaggg

SEQ ID NO: 2417017 - DNA, 25 bp, Homo sapien
gctagtaaccgtgaattaggcacca

SEQ ID NO: 2417018 - DNA, 25 bp, Homo sapien
gattcttactttatatctaccaata

SEQ ID NO: 2417019 - DNA, 25 bp, Homo sapien
tgtaaaacgtacctggaatgctgat

SEQ ID NO: 2417020 - DNA, 25 bp, Homo sapien
tccatcgtagaagtcaaggttgtaa

SEQ ID NO: 2417021 - DNA, 25 bp, Homo sapien
tactctgtatccatcgtagaagtca

SEQ ID NO: 2417022 - DNA, 25 bp, Homo sapien
tcacttttgtgggacaagggctggt

SEQ ID NO: 2417023 - DNA, 25 bp, Homo sapien
tccttcctctcccacaggaaagcct

SEQ ID NO: 2417024 - DNA, 25 bp, Homo sapien
ccttcctctcccacaggaaagcctg

SEQ ID NO: 2417025 - DNA, 25 bp, Homo sapien
tgggacaagggctggtccttcctct

SEQ ID NO: 2417026 - DNA, 25 bp, Homo sapien
gacttagacaatacccaacgaggca

SEQ ID NO: 2417027 - DNA, 25 bp, Homo sapien
tgtggaggagacttagacaataccc

SEQ ID NO: 2417028 - DNA, 25 bp, Homo sapien
ctgccaggaattgtggaggagactt

SEQ ID NO: 2417029 - DNA, 25 bp, Homo sapien
caggaattgtggaggagacttagac

SEQ ID NO: 2417030 - DNA, 25 bp, Homo sapien
tcagatactggctgggcttcacagt

SEQ ID NO: 2417031 - DNA, 25 bp, Homo sapien
gacccctgagcttctctattcattc

SEQ ID NO: 2417032 - DNA, 25 bp, Homo sapien
cacagaacaccctcagatactggct

SEQ ID NO: 2417033 - DNA, 25 bp, Homo sapien
gactggctttgctcagacccctgag

SEQ ID NO: 2417034 - DNA, 25 bp, Homo sapien
tttccatctggttctgctgccagag

SEQ ID NO: 2417035 - DNA, 25 bp, Homo sapien
tgacatttccatctggttctgctgc

SEQ ID NO: 2417036 - DNA, 25 bp, Homo sapien
ctaggtgacatttccatctggttct

SEQ ID NO: 2417037 - DNA, 25 bp, Homo sapien
tccatctggttctgctgccagagca

SEQ ID NO: 2417038 - DNA, 25 bp, Homo sapien
catgtgagtcctcgacaagctttca

SEQ ID NO: 2417039 - DNA, 25 bp, Homo sapien
ctttcagaagggattcctgaacttg

SEQ ID NO: 2417040 - DNA, 25 bp, Homo sapien
tcagtgacatgtgagtcctcgacaa

SEQ ID NO: 2417041 - DNA, 25 bp, Homo sapien
gagtcctcgacaagctttcagaagg

SEQ ID NO: 2417042 - DNA, 25 bp, Homo sapien
ttcactgcgtgcatctttggacagc

SEQ ID NO: 2417043 - DNA, 25 bp, Homo sapien
cagcagttgcaaaactgagagttcc

SEQ ID NO: 2417044 - DNA, 25 bp, Homo sapien
ttaaagcctccacgtcaggcgccag

SEQ ID NO: 2417045 - DNA, 25 bp, Homo sapien
gctacactcagttttgtgtatacat

SEQ ID NO: 2417046 - DNA, 25 bp, Homo sapien
cttcagctcatcacatttcaaaatg

SEQ ID NO: 2417047 - DNA, 25 bp, Homo sapien
ggaagtctcaggagatatcacataa

SEQ ID NO: 2417048 - DNA, 25 bp, Homo sapien
tcagtccttccggttccgtgtcagt

SEQ ID NO: 2417049 - DNA, 25 bp, Homo sapien
agtctcaggagatatcacataatta

SEQ ID NO: 2417050 - DNA, 25 bp, Homo sapien
cggttccgtgtcagtgcttttgcct

SEQ ID NO: 2417051 - DNA, 25 bp, Homo sapien
ttggacgtgggagtccgtaggtaca

SEQ ID NO: 2417052 - DNA, 25 bp, Homo sapien
agaaataagcaccatcatcggccat

SEQ ID NO: 2417053 - DNA, 25 bp, Homo sapien
cgtaggtacaacagaaataagcacc

SEQ ID NO: 2417054 - DNA, 25 bp, Homo sapien
tgggagtccgtaggtacaacagaaa

SEQ ID NO: 2417055 - DNA, 25 bp, Homo sapien
cagttagaaacattcttcacctgct

SEQ ID NO: 2417056 - DNA, 25 bp, Homo sapien
gttagaaacattcttcacctgctca

SEQ ID NO: 2417057 - DNA, 25 bp, Homo sapien
tagaaacattcttcacctgctcaac

SEQ ID NO: 2417058 - DNA, 25 bp, Homo sapien
gccgccggaacagttagaaacattc

SEQ ID NO: 2417059 - DNA, 25 bp, Homo sapien
ctttgctgatacagctgtttcaatc

SEQ ID NO: 2417060 - DNA, 25 bp, Homo sapien
ccaacaactgcatcctttgctgata

SEQ ID NO: 2417061 - DNA, 25 bp, Homo sapien
ctgttgtgctcttgcttatatgtca

SEQ ID NO: 2417062 - DNA, 25 bp, Homo sapien
gctgatacagctgtttcaatcttgc

SEQ ID NO: 2417063 - DNA, 25 bp, Homo sapien
gctgagacgctggttgtgctgtttc

SEQ ID NO: 2417064 - DNA, 25 bp, Homo sapien
tgaattgccgcatgtgctgagacgc

SEQ ID NO: 2417065 - DNA, 25 bp, Homo sapien
taagtgttgcctcgaaaggaatgat

SEQ ID NO: 2417066 - DNA, 25 bp, Homo sapien
gaatgatgaggcgagaagcttgtct

SEQ ID NO: 2417067 - DNA, 25 bp, Homo sapien
atccatgctcagggattgtagtggg

SEQ ID NO: 2417068 - DNA, 25 bp, Homo sapien
tcacagaactgaggatcccagccct

SEQ ID NO: 2417069 - DNA, 25 bp, Homo sapien
gaagaaggacctccctttctgcgtg

SEQ ID NO: 2417070 - DNA, 25 bp, Homo sapien
gaaggacctccctttctgcgtgtcc

SEQ ID NO: 2417071 - DNA, 25 bp, Homo sapien
tgtgtagtgctgtaactcaaatctc

SEQ ID NO: 2417072 - DNA, 25 bp, Homo sapien
accaatcgccttggattagggacca

SEQ ID NO: 2417073 - DNA, 25 bp, Homo sapien
cagcattgccaaggtggaggccaat

SEQ ID NO: 2417074 - DNA, 25 bp, Homo sapien
tctgtgactttcaagaaggctggga

SEQ ID NO: 2417075 - DNA, 25 bp, Homo sapien
ctagtggccctgtcccgggagcgct

SEQ ID NO: 2417076 - DNA, 25 bp, Homo sapien
gttgggagagactgcaaccattgct

SEQ ID NO: 2417077 - DNA, 25 bp, Homo sapien
aaccattgctgacaggccggaagag

SEQ ID NO: 2417078 - DNA, 25 bp, Homo sapien
cccgggagcgctcacaggcagtgtt

SEQ ID NO: 2417079 - DNA, 25 bp, Homo sapien
tctttcgcaccatctggcagtgtgg

SEQ ID NO: 2417080 - DNA, 25 bp, Homo sapien
attggccgcgagttaggaacaagcc

SEQ ID NO: 2417081 - DNA, 25 bp, Homo sapien
cagtgtggtgattggccgcgagtta

SEQ ID NO: 2417082 - DNA, 25 bp, Homo sapien
aattccggtaaatctttcgcaccat

SEQ ID NO: 2417083 - DNA, 25 bp, Homo sapien
tcagccaggttagccagaagatctg

SEQ ID NO: 2417084 - DNA, 25 bp, Homo sapien
cagtttctaatacatggtcccgcac

SEQ ID NO: 2417085 - DNA, 25 bp, Homo sapien
tcaaggcttggatccagccaggtac

SEQ ID NO: 2417086 - DNA, 25 bp, Homo sapien
tgaaacagctcataaacagggtgac

SEQ ID NO: 2417087 - DNA, 25 bp, Homo sapien
tagtcaaagagaggtaggactgtga

SEQ ID NO: 2417088 - DNA, 25 bp, Homo sapien
taggactgtgaggaaaaggtactgc

SEQ ID NO: 2417089 - DNA, 25 bp, Homo sapien
atggcagccccggtacccgtgtagt

SEQ ID NO: 2417090 - DNA, 25 bp, Homo sapien
ggtactgcgagccaggaacgacatg

SEQ ID NO: 2417091 - DNA, 25 bp, Homo sapien
tcagaagggttcaggttgcatttgg

SEQ ID NO: 2417092 - DNA, 25 bp, Homo sapien
tggattgaggcaaaaccgaaagtag

SEQ ID NO: 2417093 - DNA, 25 bp, Homo sapien
tcaggattctcaggcatacttgata

SEQ ID NO: 2417094 - DNA, 25 bp, Homo sapien
cgaaagtagattcactgtacttctc

SEQ ID NO: 2417095 - DNA, 25 bp, Homo sapien
cttcatgtgatgtgagagtcactgg

SEQ ID NO: 2417096 - DNA, 25 bp, Homo sapien
gcttcatgtgatgtgagagtcactg

SEQ ID NO: 2417097 - DNA, 25 bp, Homo sapien
ggtttcagagcatggcctaatattt

SEQ ID NO: 2417098 - DNA, 25 bp, Homo sapien
gagcatggcctaatatttcccgtac

SEQ ID NO: 2417099 - DNA, 25 bp, Homo sapien
gtctcaggtttcagagcatggccta

SEQ ID NO: 2417100 - DNA, 25 bp, Homo sapien
tcagagcatggcctaatatttcccg

SEQ ID NO: 2417101 - DNA, 25 bp, Homo sapien
ggttggcacgtaggccatcagcaat

SEQ ID NO: 2417102 - DNA, 25 bp, Homo sapien
tggcagtgctcaagcttgccttgcg

SEQ ID NO: 2417103 - DNA, 25 bp, Homo sapien
ctcgctggggtttggaacggcacct

SEQ ID NO: 2417104 - DNA, 25 bp, Homo sapien
cactgtgcactgtagcgacgtgcaa

SEQ ID NO: 2417105 - DNA, 25 bp, Homo sapien
gtatcaacctgccaagctgaggccg

SEQ ID NO: 2417106 - DNA, 25 bp, Homo sapien
ctgagtatcaacctgccaagctgag

SEQ ID NO: 2417107 - DNA, 25 bp, Homo sapien
atcaacctgccaagctgaggccgtc

SEQ ID NO: 2417108 - DNA, 25 bp, Homo sapien
gagtatcaacctgccaagctgaggc

SEQ ID NO: 2417109 - DNA, 25 bp, Homo sapien
taactgcaaatctgacagcacagcc

SEQ ID NO: 2417110 - DNA, 25 bp, Homo sapien
atcttaactgcaaatctgacagcac

SEQ ID NO: 2417111 - DNA, 25 bp, Homo sapien
ctgcaaatctgacagcacagcccat

SEQ ID NO: 2417112 - DNA, 25 bp, Homo sapien
tgcctttacttgttctgggccccaa

SEQ ID NO: 2417113 - DNA, 25 bp, Homo sapien
tttgcaacttgaagcattagctaca

SEQ ID NO: 2417114 - DNA, 25 bp, Homo sapien
ctgtttcttcgaccacttcgtgctc

SEQ ID NO: 2417115 - DNA, 25 bp, Homo sapien
gaccacttcgtgctccagctttgca

SEQ ID NO: 2417116 - DNA, 25 bp, Homo sapien
cagctttgcaacttgaagcattagc

SEQ ID NO: 2417117 - DNA, 25 bp, Homo sapien
cagtaattattatctgcccacgcat

SEQ ID NO: 2417118 - DNA, 25 bp, Homo sapien
tctgcccacgcatttggcaattggt

SEQ ID NO: 2417119 - DNA, 25 bp, Homo sapien
actctagcctgatgtgaactcttct

SEQ ID NO: 2417120 - DNA, 25 bp, Homo sapien
cactctagcctgatgtgaactcttc

SEQ ID NO: 2417121 - DNA, 25 bp, Homo sapien
gaccttaacctatcaactggagtgt

SEQ ID NO: 2417122 - DNA, 25 bp, Homo sapien
ctgtggacacttgctattttgggga

SEQ ID NO: 2417123 - DNA, 25 bp, Homo sapien
gtcactgggttcagaccttaaccta

SEQ ID NO: 2417124 - DNA, 25 bp, Homo sapien
actggagtgtctgctctagagctaa

SEQ ID NO: 2417125 - DNA, 25 bp, Homo sapien
tagtacattcccagaggatcctggc

SEQ ID NO: 2417126 - DNA, 25 bp, Homo sapien
taaggtactaacagcctgtggtagc

SEQ ID NO: 2417127 - DNA, 25 bp, Homo sapien
caacataacagggttagaaggtcac

SEQ ID NO: 2417128 - DNA, 25 bp, Homo sapien
aacataggtcctctaacacccaggg

SEQ ID NO: 2417129 - DNA, 25 bp, Homo sapien
actggcagaacctatcacgagcatc

SEQ ID NO: 2417130 - DNA, 25 bp, Homo sapien
tatcacgagcatcgccggcatccat

SEQ ID NO: 2417131 - DNA, 25 bp, Homo sapien
aacaccttctgaaggagcctcagtc

SEQ ID NO: 2417132 - DNA, 25 bp, Homo sapien
cacctgcaaggctttcaactctgct

SEQ ID NO: 2417133 - DNA, 25 bp, Homo sapien
tacagggatagtaaaccactggaag

SEQ ID NO: 2417134 - DNA, 25 bp, Homo sapien
tggaagcaaagactccctgtggaat

SEQ ID NO: 2417135 - DNA, 25 bp, Homo sapien
ctccattccagagagtaatacaggg

SEQ ID NO: 2417136 - DNA, 25 bp, Homo sapien
ctgtggaatagctgcagtcatcccc

SEQ ID NO: 2417137 - DNA, 25 bp, Homo sapien
gctgaggcttgagcaattccagccc

SEQ ID NO: 2417138 - DNA, 25 bp, Homo sapien
ctgaggcttgagcaattccagccca

SEQ ID NO: 2417139 - DNA, 25 bp, Homo sapien
gagctgaggcttgagcaattccagc

SEQ ID NO: 2417140 - DNA, 25 bp, Homo sapien
agctgaggcttgagcaattccagcc

SEQ ID NO: 2417141 - DNA, 25 bp, Homo sapien
aaaatttgtgtaggtacatagtagg

SEQ ID NO: 2417142 - DNA, 25 bp, Homo sapien
catcatgaagaatgaggtgtccatc

SEQ ID NO: 2417143 - DNA, 25 bp, Homo sapien
atgaagaatgaggtgtccatctcct

SEQ ID NO: 2417144 - DNA, 25 bp, Homo sapien
aaaaatttgtgtaggtacatagtag

SEQ ID NO: 2417145 - DNA, 25 bp, Homo sapien
cagtttgagtgatgcccatgaagtc

SEQ ID NO: 2417146 - DNA, 25 bp, Homo sapien
gaagtcagggttattgccaatacct

SEQ ID NO: 2417147 - DNA, 25 bp, Homo sapien
tttgccctcaaagacaagctagaga

SEQ ID NO: 2417148 - DNA, 25 bp, Homo sapien
gagcaatttattcccctgacatctg

SEQ ID NO: 2417149 - DNA, 25 bp, Homo sapien
tcagctgatacggttcctggtgaag

SEQ ID NO: 2417150 - DNA, 25 bp, Homo sapien
gatacggttcctggtgaaggtcctc

SEQ ID NO: 2417151 - DNA, 25 bp, Homo sapien
tccaagatcacggtgtcagctgata

SEQ ID NO: 2417152 - DNA, 25 bp, Homo sapien
cacggtgtcagctgatacggttcct

SEQ ID NO: 2417153 - DNA, 25 bp, Homo sapien
agctctttgccagatgagtagattg

SEQ ID NO: 2417154 - DNA, 25 bp, Homo sapien
attagctctttgccagatgagtaga

SEQ ID NO: 2417155 - DNA, 25 bp, Homo sapien
gtttgtcaaagatcagatagtttgc

SEQ ID NO: 2417156 - DNA, 25 bp, Homo sapien
tttgtcaaagatcagatagtttgca

SEQ ID NO: 2417157 - DNA, 25 bp, Homo sapien
ggtgtgcacctcacaatttcatgca

SEQ ID NO: 2417158 - DNA, 25 bp, Homo sapien
cacatgcacgttaggctatctggtt

SEQ ID NO: 2417159 - DNA, 25 bp, Homo sapien
agctttctcgattttcacatgcacg

SEQ ID NO: 2417160 - DNA, 25 bp, Homo sapien
gcagtgagtgactagagggcctcta

SEQ ID NO: 2417161 - DNA, 25 bp, Homo sapien
ttgtgctgaagatgtctgtctcctc

SEQ ID NO: 2417162 - DNA, 25 bp, Homo sapien
gcaccgtgtcgtgtatcacagcata

SEQ ID NO: 2417163 - DNA, 25 bp, Homo sapien
gtctcctctgcggtgcaccgtgtcg

SEQ ID NO: 2417164 - DNA, 25 bp, Homo sapien
tgtatcacagcatattggaatgggt

SEQ ID NO: 2417165 - DNA, 25 bp, Homo sapien
gaaattgtgtcctctttaccaacag

SEQ ID NO: 2417166 - DNA, 25 bp, Homo sapien
gagcagccaaaacagggagttatga

SEQ ID NO: 2417167 - DNA, 25 bp, Homo sapien
ttaacagccgctggaaggaacacac

SEQ ID NO: 2417168 - DNA, 25 bp, Homo sapien
acttgcttacgtccaatctactggg

SEQ ID NO: 2417169 - DNA, 25 bp, Homo sapien
cagaaactgatacttttgaaccaat

SEQ ID NO: 2417170 - DNA, 25 bp, Homo sapien
tatttatattatagccctgtatgat

SEQ ID NO: 2417171 - DNA, 25 bp, Homo sapien
gcagaaactgatacttttgaaccaa

SEQ ID NO: 2417172 - DNA, 25 bp, Homo sapien
cctgtatgatacaagcattttctca

SEQ ID NO: 2417173 - DNA, 25 bp, Homo sapien
atacaaggatgttaactgatactca

SEQ ID NO: 2417174 - DNA, 25 bp, Homo sapien
ttttgatgtcactatataaatacaa

SEQ ID NO: 2417175 - DNA, 25 bp, Homo sapien
tgatgtcactatataaatacaagga

SEQ ID NO: 2417176 - DNA, 25 bp, Homo sapien
catttattttgatgtcactatataa

SEQ ID NO: 2417177 - DNA, 25 bp, Homo sapien
ggagtaccagtagcttcagttcaaa

SEQ ID NO: 2417178 - DNA, 25 bp, Homo sapien
cctcctaggttcaaagttctgtgct

SEQ ID NO: 2417179 - DNA, 25 bp, Homo sapien
tcagagcaaaccctatagcaaaccc

SEQ ID NO: 2417180 - DNA, 25 bp, Homo sapien
gacctctagttcagatgtcagaaat

SEQ ID NO: 2417181 - DNA, 25 bp, Homo sapien
aaccttggcgttgataactgagaat

SEQ ID NO: 2417182 - DNA, 25 bp, Homo sapien
taaaccttggcgttgataactgaga

SEQ ID NO: 2417183 - DNA, 25 bp, Homo sapien
ccttggcgttgataactgagaattt

SEQ ID NO: 2417184 - DNA, 25 bp, Homo sapien
ttaaaccttggcgttgataactgag

SEQ ID NO: 2417185 - DNA, 25 bp, Homo sapien
gcatacataaaaacgctcgggtcct

SEQ ID NO: 2417186 - DNA, 25 bp, Homo sapien
gagaggccaggtcaacttgcagagt

SEQ ID NO: 2417187 - DNA, 25 bp, Homo sapien
cagagtctggtatcaagtgtcttca

SEQ ID NO: 2417188 - DNA, 25 bp, Homo sapien
tttaagcacagcaaacgttgagtca

SEQ ID NO: 2417189 - DNA, 25 bp, Homo sapien
gatgaaaggctagtcacggcttccc

SEQ ID NO: 2417190 - DNA, 25 bp, Homo sapien
tgtcagtgtgagaggcaaaagctcc

SEQ ID NO: 2417191 - DNA, 25 bp, Homo sapien
catttgaggttaggtcttcgcaacc

SEQ ID NO: 2417192 - DNA, 25 bp, Homo sapien
gaaattccagccaaccatgtcagtg

SEQ ID NO: 2417193 - DNA, 25 bp, Homo sapien
catgtgatgattcacatggggtgtg

SEQ ID NO: 2417194 - DNA, 25 bp, Homo sapien
gggtgtgtttgatccgaggaagccc

SEQ ID NO: 2417195 - DNA, 25 bp, Homo sapien
gtttgatccgaggaagcccagtctc

SEQ ID NO: 2417196 - DNA, 25 bp, Homo sapien
catggggtgtgtttgatccgaggaa

SEQ ID NO: 2417197 - DNA, 25 bp, Homo sapien
tgtcgccttcattgctaacgaggga

SEQ ID NO: 2417198 - DNA, 25 bp, Homo sapien
taacgagggacatggctcgcatccg

SEQ ID NO: 2417199 - DNA, 25 bp, Homo sapien
tgacccgacagctgtttgaccagac

SEQ ID NO: 2417200 - DNA, 25 bp, Homo sapien
gactcatggtcgattccaacttctc

SEQ ID NO: 2417201 - DNA, 25 bp, Homo sapien
agtatggaaggggagaatgtctata

SEQ ID NO: 2417202 - DNA, 25 bp, Homo sapien
aaataaatgtgtgcgaacaagggaa

SEQ ID NO: 2417203 - DNA, 25 bp, Homo sapien
cgaacaagggaataagtatggaagg

SEQ ID NO: 2417204 - DNA, 25 bp, Homo sapien
tgtgtgcgaacaagggaataagtat

SEQ ID NO: 2417205 - DNA, 25 bp, Homo sapien
tcctctgtaaaggctccccaccagc

SEQ ID NO: 2417206 - DNA, 25 bp, Homo sapien
ttcctctgtaaaggctccccaccag

SEQ ID NO: 2417207 - DNA, 25 bp, Homo sapien
cctctgtaaaggctccccaccagct

SEQ ID NO: 2417208 - DNA, 25 bp, Homo sapien
cttcctctgtaaaggctccccacca

SEQ ID NO: 2417209 - DNA, 25 bp, Homo sapien
taaactgcatttaaacagctgtagc

SEQ ID NO: 2417210 - DNA, 25 bp, Homo sapien
ggatccctagaatgagagtcactgg

SEQ ID NO: 2417211 - DNA, 25 bp, Homo sapien
tccctaagtgacagtggcaaggccc

SEQ ID NO: 2417212 - DNA, 25 bp, Homo sapien
tagcagtgagcatcatgcttgaaac

SEQ ID NO: 2417213 - DNA, 25 bp, Homo sapien
gatgtgcagatgaggcagaaagctg

SEQ ID NO: 2417214 - DNA, 25 bp, Homo sapien
cacagcccaagtggatgtgcagatg

SEQ ID NO: 2417215 - DNA, 25 bp, Homo sapien
tgtctctctgggatgagcatcagga

SEQ ID NO: 2417216 - DNA, 25 bp, Homo sapien
gactgacacagcatgctgtgtctct

SEQ ID NO: 2417217 - DNA, 25 bp, Homo sapien
ctgaagtgcaatggcacaatctcag

SEQ ID NO: 2417218 - DNA, 25 bp, Homo sapien
actcttgttgttgtccaggctgaag

SEQ ID NO: 2417219 - DNA, 25 bp, Homo sapien
tcttgttgttgtccaggctgaagtg

SEQ ID NO: 2417220 - DNA, 25 bp, Homo sapien
ttgttgttgtccaggctgaagtgca

SEQ ID NO: 2417221 - DNA, 25 bp, Homo sapien
aatgggagtataacggaaagagcac

SEQ ID NO: 2417222 - DNA, 25 bp, Homo sapien
aaaatcagaatgttaccctaggtgg

SEQ ID NO: 2417223 - DNA, 25 bp, Homo sapien
tatgagtcaggacaccccggttctt

SEQ ID NO: 2417224 - DNA, 25 bp, Homo sapien
gaaagagcaccaatctatgagtcag

SEQ ID NO: 2417225 - DNA, 25 bp, Homo sapien
ggtggcctgaaatagcaccaagtct

SEQ ID NO: 2417226 - DNA, 25 bp, Homo sapien
gtggataccaagtgtgatgaggacc

SEQ ID NO: 2417227 - DNA, 25 bp, Homo sapien
tgaggacccttgagcttagctttgt

SEQ ID NO: 2417228 - DNA, 25 bp, Homo sapien
aaaacaggtgtggataccaagtgtg

SEQ ID NO: 2417229 - DNA, 25 bp, Homo sapien
gtggcaagtggtgggtctcaccccc

SEQ ID NO: 2417230 - DNA, 25 bp, Homo sapien
gcctggactatgaatagagaccaca

SEQ ID NO: 2417231 - DNA, 25 bp, Homo sapien
tggactatgaatagagaccacagcc

SEQ ID NO: 2417232 - DNA, 25 bp, Homo sapien
gtggtgggtctcaccccccagacaa

SEQ ID NO: 2417233 - DNA, 25 bp, Homo sapien
tttaatctgagttatcatctcctgt

SEQ ID NO: 2417234 - DNA, 25 bp, Homo sapien
taatctgagttatcatctcctgtcc

SEQ ID NO: 2417235 - DNA, 25 bp, Homo sapien
ttaatctgagttatcatctcctgtc

SEQ ID NO: 2417236 - DNA, 25 bp, Homo sapien
tcacctccacctttacttggcagcc

SEQ ID NO: 2417237 - DNA, 25 bp, Homo sapien
cctccacctttacttggcagccata

SEQ ID NO: 2417238 - DNA, 25 bp, Homo sapien
ttcacctccacctttacttggcagc

SEQ ID NO: 2417239 - DNA, 25 bp, Homo sapien
cacctccacctttacttggcagcca

SEQ ID NO: 2417240 - DNA, 25 bp, Homo sapien
aagggtgaccttggtggcaaaggtg

SEQ ID NO: 2417241 - DNA, 25 bp, Homo sapien
gctagctcgggttgctgggtttaca

SEQ ID NO: 2417242 - DNA, 25 bp, Homo sapien
gtttacatttgctaactgttgctgc

SEQ ID NO: 2417243 - DNA, 25 bp, Homo sapien
cacctctggttgtggcccatgtggc

SEQ ID NO: 2417244 - DNA, 25 bp, Homo sapien
tgacatccccagagttaacacattt

SEQ ID NO: 2417245 - DNA, 25 bp, Homo sapien
tgatgtagagaaactagtgcaatgc

SEQ ID NO: 2417246 - DNA, 25 bp, Homo sapien
tgatctgtgattggcctcatgggat

SEQ ID NO: 2417247 - DNA, 25 bp, Homo sapien
cgtaggtgtgtcatgagggaacata

SEQ ID NO: 2417248 - DNA, 25 bp, Homo sapien
tttactaaacacaccacgaatcctc

SEQ ID NO: 2417249 - DNA, 25 bp, Homo sapien
tgatgcctacacagtcagagctgac

SEQ ID NO: 2417250 - DNA, 25 bp, Homo sapien
tgtgtatctggactgctacttggaa

SEQ ID NO: 2417251 - DNA, 25 bp, Homo sapien
cagcgtatctgtagcccttccttgt

SEQ ID NO: 2417252 - DNA, 25 bp, Homo sapien
tgtttcccgtcttcgaggtccgctg

SEQ ID NO: 2417253 - DNA, 25 bp, Homo sapien
gccttgccctgagagccgtttttgg

SEQ ID NO: 2417254 - DNA, 25 bp, Homo sapien
accacttcgagagggaagttcatct

SEQ ID NO: 2417255 - DNA, 25 bp, Homo sapien
tggtcatgaattgagcccaggaagc

SEQ ID NO: 2417256 - DNA, 25 bp, Homo sapien
ttccacatactgccagtgaatacat

SEQ ID NO: 2417257 - DNA, 25 bp, Homo sapien
aattagattacaggaggtgtctaca

SEQ ID NO: 2417258 - DNA, 25 bp, Homo sapien
aaaattagattacaggaggtgtcta

SEQ ID NO: 2417259 - DNA, 25 bp, Homo sapien
ggaggtgtctacagcttggcccagt

SEQ ID NO: 2417260 - DNA, 25 bp, Homo sapien
cagtttagtggcacctgtcatggtc

SEQ ID NO: 2417261 - DNA, 25 bp, Homo sapien
tcatggtctaggtgacagttgaagg

SEQ ID NO: 2417262 - DNA, 25 bp, Homo sapien
gaatgtacatcgtgtataagaggga

SEQ ID NO: 2417263 - DNA, 25 bp, Homo sapien
gagaagggctaactttcagttaaga

SEQ ID NO: 2417264 - DNA, 25 bp, Homo sapien
tttgaggactatgccctggaacttg

SEQ ID NO: 2417265 - DNA, 25 bp, Homo sapien
cactgcataagatgggatggacctg

SEQ ID NO: 2417266 - DNA, 25 bp, Homo sapien
ggttagcccgggaattatactgcag

SEQ ID NO: 2417267 - DNA, 25 bp, Homo sapien
cacagccaggtcctaatgagaaggg

SEQ ID NO: 2417268 - DNA, 25 bp, Homo sapien
ctctggatggcccattgacaccata

SEQ ID NO: 2417269 - DNA, 25 bp, Homo sapien
tcccagttttgttgtctccagggac

SEQ ID NO: 2417270 - DNA, 25 bp, Homo sapien
tgtatgatttccaaaactcccatct

SEQ ID NO: 2417271 - DNA, 25 bp, Homo sapien
catacatggaatgagctggcaacca

SEQ ID NO: 2417272 - DNA, 25 bp, Homo sapien
agaggagatcggttgcattcagagt

SEQ ID NO: 2417273 - DNA, 25 bp, Homo sapien
cagaggagatcggttgcattcagag

SEQ ID NO: 2417274 - DNA, 25 bp, Homo sapien
ggagatcggttgcattcagagtggt

SEQ ID NO: 2417275 - DNA, 25 bp, Homo sapien
gaggagatcggttgcattcagagtg

SEQ ID NO: 2417276 - DNA, 25 bp, Homo sapien
gagaattgaacaagatcttaccgta

SEQ ID NO: 2417277 - DNA, 25 bp, Homo sapien
gaaagccaactgagaattgaacaag

SEQ ID NO: 2417278 - DNA, 25 bp, Homo sapien
caagatcttaccgtaatgactagaa

SEQ ID NO: 2417279 - DNA, 25 bp, Homo sapien
ccagaaagccaactgagaattgaac

SEQ ID NO: 2417280 - DNA, 25 bp, Homo sapien
ttcatttacccgatcagcctcaagc

SEQ ID NO: 2417281 - DNA, 25 bp, Homo sapien
tccctctacgtgttccatcttcatt

SEQ ID NO: 2417282 - DNA, 25 bp, Homo sapien
catcttcatttacccgatcagcctc

SEQ ID NO: 2417283 - DNA, 25 bp, Homo sapien
tcttcatttacccgatcagcctcaa

SEQ ID NO: 2417284 - DNA, 25 bp, Homo sapien
gaaactgtccttagtgccttcgacc

SEQ ID NO: 2417285 - DNA, 25 bp, Homo sapien
ccagaggaccatgactgcaaagagc

SEQ ID NO: 2417286 - DNA, 25 bp, Homo sapien
tacagagcacctgggatgactaaca

SEQ ID NO: 2417287 - DNA, 25 bp, Homo sapien
taaaatcatagacatcggtcccagg

SEQ ID NO: 2417288 - DNA, 25 bp, Homo sapien
gtgctatggcttggatatggtttgt

SEQ ID NO: 2417289 - DNA, 25 bp, Homo sapien
tctcttgcatgtgacacacctactc

SEQ ID NO: 2417290 - DNA, 25 bp, Homo sapien
cactctggacttagttgttaaagac

SEQ ID NO: 2417291 - DNA, 25 bp, Homo sapien
tatgaattgtttggtaccctcccta

SEQ ID NO: 2417292 - DNA, 25 bp, Homo sapien
gaaaatgaaacgtttcatgttggaa

SEQ ID NO: 2417293 - DNA, 25 bp, Homo sapien
gagttcttatccctcttgtcatggc

SEQ ID NO: 2417294 - DNA, 25 bp, Homo sapien
catgttggaataagcttgggagttc

SEQ ID NO: 2417295 - DNA, 25 bp, Homo sapien
caggaatggagcttgttctcttgga

SEQ ID NO: 2417296 - DNA, 25 bp, Homo sapien
gcctaaaagatacaatatagtcaca

SEQ ID NO: 2417297 - DNA, 25 bp, Homo sapien
ggatggtagggtagagaagatgaaa

SEQ ID NO: 2417298 - DNA, 25 bp, Homo sapien
tacaatatagtcacaaattaaaacc

SEQ ID NO: 2417299 - DNA, 25 bp, Homo sapien
tgggaggatggtagggtagagaaga

SEQ ID NO: 2417300 - DNA, 25 bp, Homo sapien
gccacatattgtgttctgacttaat

SEQ ID NO: 2417301 - DNA, 25 bp, Homo sapien
tgacttaatgtgctcctcaaatgaa

SEQ ID NO: 2417302 - DNA, 25 bp, Homo sapien
tgagccacataactttcaggtccag

SEQ ID NO: 2417303 - DNA, 25 bp, Homo sapien
tctgttgggtctttaactttcacca

SEQ ID NO: 2417304 - DNA, 25 bp, Homo sapien
atcgatgataacaccaaaaatcaag

SEQ ID NO: 2417305 - DNA, 25 bp, Homo sapien
aaatcaagttcagaacaataatgat

SEQ ID NO: 2417306 - DNA, 25 bp, Homo sapien
ttttctgtttttcgcttctgagatc

SEQ ID NO: 2417307 - DNA, 25 bp, Homo sapien
tgagatcagcaaaagtatcgatgat

SEQ ID NO: 2417308 - DNA, 25 bp, Homo sapien
gagtgtcacacgtcctttcaattcc

SEQ ID NO: 2417309 - DNA, 25 bp, Homo sapien
cggtgacaatgcacataaggagagt

SEQ ID NO: 2417310 - DNA, 25 bp, Homo sapien
ccgccattcctgaggccctggttca

SEQ ID NO: 2417311 - DNA, 25 bp, Homo sapien
tctttcgatggccttcttagcacat

SEQ ID NO: 2417312 - DNA, 25 bp, Homo sapien
gctatttctaattgtgccgtgacac

SEQ ID NO: 2417313 - DNA, 25 bp, Homo sapien
agccacatatgtaatgtcctcaaat

SEQ ID NO: 2417314 - DNA, 25 bp, Homo sapien
aattgtgccgtgacacaacttttgg

SEQ ID NO: 2417315 - DNA, 25 bp, Homo sapien
gccacatatgtaatgtcctcaaata

SEQ ID NO: 2417316 - DNA, 25 bp, Homo sapien
taagctttctcgaggaccaacctgg

SEQ ID NO: 2417317 - DNA, 25 bp, Homo sapien
ccaacctggagctcttgataagaag

SEQ ID NO: 2417318 - DNA, 25 bp, Homo sapien
cattactgcggttaagtgtctaagc

SEQ ID NO: 2417319 - DNA, 25 bp, Homo sapien
gcccgtcaaggcatgcgtataaaaa

SEQ ID NO: 2417320 - DNA, 25 bp, Homo sapien
caaggcacattctgatttaaaaagt

SEQ ID NO: 2417321 - DNA, 25 bp, Homo sapien
cttagcgctgagtccaaggcacatt

SEQ ID NO: 2417322 - DNA, 25 bp, Homo sapien
ttagcgctgagtccaaggcacattc

SEQ ID NO: 2417323 - DNA, 25 bp, Homo sapien
ccaaggcacattctgatttaaaaag

SEQ ID NO: 2417324 - DNA, 25 bp, Homo sapien
tggaggaaggagaaatagggaagag

SEQ ID NO: 2417325 - DNA, 25 bp, Homo sapien
ttggaggaaggagaaatagggaaga

SEQ ID NO: 2417326 - DNA, 25 bp, Homo sapien
tctagcgtcacgatctgcattcatt

SEQ ID NO: 2417327 - DNA, 25 bp, Homo sapien
tcaggtcatgtggagcatgtctaca

SEQ ID NO: 2417328 - DNA, 25 bp, Homo sapien
tactttgccacaactggacttccca

SEQ ID NO: 2417329 - DNA, 25 bp, Homo sapien
catcactaccgtctatctagcgtca

SEQ ID NO: 2417330 - DNA, 25 bp, Homo sapien
gagggcttctacctctctccgagaa

SEQ ID NO: 2417331 - DNA, 25 bp, Homo sapien
tcatctagtaaatgccaccttgtgg

SEQ ID NO: 2417332 - DNA, 25 bp, Homo sapien
tcagcacataaacgctacaggagag

SEQ ID NO: 2417333 - DNA, 25 bp, Homo sapien
gttctaccttcgtgagatgcagcca

SEQ ID NO: 2417334 - DNA, 25 bp, Homo sapien
ccaaaatgtcagtactgctggaaaa

SEQ ID NO: 2417335 - DNA, 25 bp, Homo sapien
aaacctcttgcctgtcagtcttaag

SEQ ID NO: 2417336 - DNA, 25 bp, Homo sapien
gaaatagttccctctaatctgaggt

SEQ ID NO: 2417337 - DNA, 25 bp, Homo sapien
tgtcactgagacacgtttgaaagta

SEQ ID NO: 2417338 - DNA, 25 bp, Homo sapien
cagttggttgccagttactgcgtga

SEQ ID NO: 2417339 - DNA, 25 bp, Homo sapien
taccttttgtaacatggacctgctg

SEQ ID NO: 2417340 - DNA, 25 bp, Homo sapien
cacaaggtaacaaactaaggctgtc

SEQ ID NO: 2417341 - DNA, 25 bp, Homo sapien
ttctggcgctgggacaatgaccttc

SEQ ID NO: 2417342 - DNA, 25 bp, Homo sapien
taggactaacccacactatcagtgc

SEQ ID NO: 2417343 - DNA, 25 bp, Homo sapien
cagaatcaggatccatacggacacc

SEQ ID NO: 2417344 - DNA, 25 bp, Homo sapien
aaaaagatagagcaacatgggcgga

SEQ ID NO: 2417345 - DNA, 25 bp, Homo sapien
gaaaatgagggacacctgtagacct

SEQ ID NO: 2417346 - DNA, 25 bp, Homo sapien
cacagggtaaatgtgctaaatcctc

SEQ ID NO: 2417347 - DNA, 25 bp, Homo sapien
ctgtatttgaagctggaattgtggg

SEQ ID NO: 2417348 - DNA, 25 bp, Homo sapien
catgcttccatcatggtagttaaag

SEQ ID NO: 2417349 - DNA, 25 bp, Homo sapien
acagttctccttggcacatgcttcc

SEQ ID NO: 2417350 - DNA, 25 bp, Homo sapien
tagttaaagtcatagtaggcacttg

SEQ ID NO: 2417351 - DNA, 25 bp, Homo sapien
cccaataatggaaaacaggtagacg

SEQ ID NO: 2417352 - DNA, 25 bp, Homo sapien
gagttcggtttttcagcctatcaac

SEQ ID NO: 2417353 - DNA, 25 bp, Homo sapien
gccaggactgcagttagaataatag

SEQ ID NO: 2417354 - DNA, 25 bp, Homo sapien
gcctatcaacttccatagtgaagtc

SEQ ID NO: 2417355 - DNA, 25 bp, Homo sapien
catacgccacgtgatagagaaaggc

SEQ ID NO: 2417356 - DNA, 25 bp, Homo sapien
ttcatggacaaaaaggcccagcatg

SEQ ID NO: 2417357 - DNA, 25 bp, Homo sapien
gaaaggccatatccaggatgactgc

SEQ ID NO: 2417358 - DNA, 25 bp, Homo sapien
cccacgggtgaacgtgccacgattt

SEQ ID NO: 2417359 - DNA, 25 bp, Homo sapien
tcatcaaccatgtaagttaaacttc

SEQ ID NO: 2417360 - DNA, 25 bp, Homo sapien
attttcatcaaccatgtaagttaaa

SEQ ID NO: 2417361 - DNA, 25 bp, Homo sapien
ttttcatcaaccatgtaagttaaac

SEQ ID NO: 2417362 - DNA, 25 bp, Homo sapien
tttcatcaaccatgtaagttaaact

SEQ ID NO: 2417363 - DNA, 25 bp, Homo sapien
aaaatctccatttcaggggcattac

SEQ ID NO: 2417364 - DNA, 25 bp, Homo sapien
tcaggggcattacatctacagcagg

SEQ ID NO: 2417365 - DNA, 25 bp, Homo sapien
gatcaatgtgtaaggcaaaatttgc

SEQ ID NO: 2417366 - DNA, 25 bp, Homo sapien
gacaaggttctaagatcaatgtgta

SEQ ID NO: 2417367 - DNA, 25 bp, Homo sapien
gaaggtagatgatattcgctaaaat

SEQ ID NO: 2417368 - DNA, 25 bp, Homo sapien
ccagcagtgaacttgttatgttaaa

SEQ ID NO: 2417369 - DNA, 25 bp, Homo sapien
tgcacccagcagtgaacttgttatg

SEQ ID NO: 2417370 - DNA, 25 bp, Homo sapien
aaatgaaggtagatgatattcgcta

SEQ ID NO: 2417371 - DNA, 25 bp, Homo sapien
aaacggccgaatacccacaggcttg

SEQ ID NO: 2417372 - DNA, 25 bp, Homo sapien
gcaactgctatccaaagaagaaccg

SEQ ID NO: 2417373 - DNA, 25 bp, Homo sapien
cattattgatacaagaaacggccga

SEQ ID NO: 2417374 - DNA, 25 bp, Homo sapien
gaagtattaatgtaggcccaagacc

SEQ ID NO: 2417375 - DNA, 25 bp, Homo sapien
tgtaaaatgtggaagaaatttattg

SEQ ID NO: 2417376 - DNA, 25 bp, Homo sapien
ctgtaaaatgtggaagaaatttatt

SEQ ID NO: 2417377 - DNA, 25 bp, Homo sapien
aatcctgggtagggatatctggcgt

SEQ ID NO: 2417378 - DNA, 25 bp, Homo sapien
ggtagggatatctggcgtggcagct

SEQ ID NO: 2417379 - DNA, 25 bp, Homo sapien
ctgcttcagccgcaaccagtgtagc

SEQ ID NO: 2417380 - DNA, 25 bp, Homo sapien
aaccagtgtagcctcattcctcaac

SEQ ID NO: 2417381 - DNA, 25 bp, Homo sapien
ccaaatgggtagaagagagcaacag

SEQ ID NO: 2417382 - DNA, 25 bp, Homo sapien
tccatcatccccaaatgggtagaag

SEQ ID NO: 2417383 - DNA, 25 bp, Homo sapien
gcaacagctaaattgatgaacacag

SEQ ID NO: 2417384 - DNA, 25 bp, Homo sapien
tgaaggaaatgctcccccagagaga

SEQ ID NO: 2417385 - DNA, 25 bp, Homo sapien
gagaaccagaacagtgcagggttat

SEQ ID NO: 2417386 - DNA, 25 bp, Homo sapien
ctcgagaaccagaacagtgcagggt

SEQ ID NO: 2417387 - DNA, 25 bp, Homo sapien
tcgagaaccagaacagtgcagggtt

SEQ ID NO: 2417388 - DNA, 25 bp, Homo sapien
cgagaaccagaacagtgcagggtta

SEQ ID NO: 2417389 - DNA, 25 bp, Homo sapien
ttccataaggctctacatggtaaaa

SEQ ID NO: 2417390 - DNA, 25 bp, Homo sapien
gaattccataaggctctacatggta

SEQ ID NO: 2417391 - DNA, 25 bp, Homo sapien
attccataaggctctacatggtaaa

SEQ ID NO: 2417392 - DNA, 25 bp, Homo sapien
aattccataaggctctacatggtaa

SEQ ID NO: 2417393 - DNA, 25 bp, Homo sapien
aacacacggcacttggattctcgag

SEQ ID NO: 2417394 - DNA, 25 bp, Homo sapien
gattctcgagtgaggtattcacata

SEQ ID NO: 2417395 - DNA, 25 bp, Homo sapien
catccctttcagttgtattgaacac

SEQ ID NO: 2417396 - DNA, 25 bp, Homo sapien
gagtgaggtattcacatatattggg

SEQ ID NO: 2417397 - DNA, 25 bp, Homo sapien
tccttcatctggatccgatcctggt

SEQ ID NO: 2417398 - DNA, 25 bp, Homo sapien
tggcataatactttaaggcttcatc

SEQ ID NO: 2417399 - DNA, 25 bp, Homo sapien
cagtgtggttggcataatactttaa

SEQ ID NO: 2417400 - DNA, 25 bp, Homo sapien
tctggatccgatcctggtttgagca

SEQ ID NO: 2417401 - DNA, 25 bp, Homo sapien
gcaacagtttattgtggcgggccaa

SEQ ID NO: 2417402 - DNA, 25 bp, Homo sapien
tgcaacagtttattgtggcgggcca

SEQ ID NO: 2417403 - DNA, 25 bp, Homo sapien
tgctgcaacagtttattgtggcggg

SEQ ID NO: 2417404 - DNA, 25 bp, Homo sapien
ctgcaacagtttattgtggcgggcc

SEQ ID NO: 2417405 - DNA, 25 bp, Homo sapien
caaagaggagatagttgtttccaga

SEQ ID NO: 2417406 - DNA, 25 bp, Homo sapien
ataagtctcaagctaaacaatccag

SEQ ID NO: 2417407 - DNA, 25 bp, Homo sapien
tgaagggctgtacgcactcttttct

SEQ ID NO: 2417408 - DNA, 25 bp, Homo sapien
ccagaagacacgtgaagggctgtac

SEQ ID NO: 2417409 - DNA, 25 bp, Homo sapien
atggacaaccagaccaaaggaccac

SEQ ID NO: 2417410 - DNA, 25 bp, Homo sapien
gggaagagacaacacagactcttga

SEQ ID NO: 2417411 - DNA, 25 bp, Homo sapien
acaaccagaccaaaggaccacagac

SEQ ID NO: 2417412 - DNA, 25 bp, Homo sapien
cttgagtaccctgcaagacagctct

SEQ ID NO: 2417413 - DNA, 25 bp, Homo sapien
tctttttgagatgttggaccatgtt

SEQ ID NO: 2417414 - DNA, 25 bp, Homo sapien
gatgttggaccatgttaaaatagta

SEQ ID NO: 2417415 - DNA, 25 bp, Homo sapien
tttgagatgttggaccatgttaaaa

SEQ ID NO: 2417416 - DNA, 25 bp, Homo sapien
gagatgttggaccatgttaaaatag

SEQ ID NO: 2417417 - DNA, 25 bp, Homo sapien
ctgggaaaacttagagagctcttgt

SEQ ID NO: 2417418 - DNA, 25 bp, Homo sapien
aaaacttagagagctcttgttctca

SEQ ID NO: 2417419 - DNA, 25 bp, Homo sapien
ctgtggttgactgggaaaacttaga

SEQ ID NO: 2417420 - DNA, 25 bp, Homo sapien
ggttgactgggaaaacttagagagc

SEQ ID NO: 2417421 - DNA, 25 bp, Homo sapien
acatctgcaataatataccaaagag

SEQ ID NO: 2417422 - DNA, 25 bp, Homo sapien
ggtggcttatgatggacactgagaa

SEQ ID NO: 2417423 - DNA, 25 bp, Homo sapien
tatcactgaccttttatggtagcac

SEQ ID NO: 2417424 - DNA, 25 bp, Homo sapien
tagcacgttcaagtcgtttgacctt

SEQ ID NO: 2417425 - DNA, 25 bp, Homo sapien
aaaacaagataaacacgagacactt

SEQ ID NO: 2417426 - DNA, 25 bp, Homo sapien
tgttaaacacgagggcgtcatcaac

SEQ ID NO: 2417427 - DNA, 25 bp, Homo sapien
tttgtgtcaatgttaaacacgaggg

SEQ ID NO: 2417428 - DNA, 25 bp, Homo sapien
gcgtcatcaacgataaaaacaagat

SEQ ID NO: 2417429 - DNA, 25 bp, Homo sapien
gctgtgatcccatagcgggccttcc

SEQ ID NO: 2417430 - DNA, 25 bp, Homo sapien
agctgagcgtgaaggcctcgccaca

SEQ ID NO: 2417431 - DNA, 25 bp, Homo sapien
ccccactgacatttaattagcacag

SEQ ID NO: 2417432 - DNA, 25 bp, Homo sapien
ttcaggaaggctgatgtgcctctcc

SEQ ID NO: 2417433 - DNA, 25 bp, Homo sapien
acagcacgctaaatattgcccccat

SEQ ID NO: 2417434 - DNA, 25 bp, Homo sapien
ctcccacagttgcaacacagggctt

SEQ ID NO: 2417435 - DNA, 25 bp, Homo sapien
cagttgcaacacagggctttctctc

SEQ ID NO: 2417436 - DNA, 25 bp, Homo sapien
tcttgatgtaaggtcccagagaagc

SEQ ID NO: 2417437 - DNA, 25 bp, Homo sapien
cctaggatggtaagtgctgaataaa

SEQ ID NO: 2417438 - DNA, 25 bp, Homo sapien
tagcccaaacctaggatggtaagtg

SEQ ID NO: 2417439 - DNA, 25 bp, Homo sapien
gaaaatatgacaagccatggataca

SEQ ID NO: 2417440 - DNA, 25 bp, Homo sapien
cacgattgataggatgagcaaaata

SEQ ID NO: 2417441 - DNA, 25 bp, Homo sapien
caatccttggttataggcattcttc

SEQ ID NO: 2417442 - DNA, 25 bp, Homo sapien
ggttataggcattcttcatcacatc

SEQ ID NO: 2417443 - DNA, 25 bp, Homo sapien
gaatatagatattgtgtccaacatc

SEQ ID NO: 2417444 - DNA, 25 bp, Homo sapien
tgatgggccagaatatagatattgt

SEQ ID NO: 2417445 - DNA, 25 bp, Homo sapien
tatgtttctgaggaagcgcagagca

SEQ ID NO: 2417446 - DNA, 25 bp, Homo sapien
catggaacttactctccagtgggag

SEQ ID NO: 2417447 - DNA, 25 bp, Homo sapien
tgggagagagtaccctcatggaact

SEQ ID NO: 2417448 - DNA, 25 bp, Homo sapien
ggtgccatcggtcctaatccagggc

SEQ ID NO: 2417449 - DNA, 25 bp, Homo sapien
ccttgaggccaagcattgtacaaca

SEQ ID NO: 2417450 - DNA, 25 bp, Homo sapien
cataatgtgcatgccacgagtgaga

SEQ ID NO: 2417451 - DNA, 25 bp, Homo sapien
ggcttaatcatcagggcactgagct

SEQ ID NO: 2417452 - DNA, 25 bp, Homo sapien
ccaacaatggccctgatgtgagtgg

SEQ ID NO: 2417453 - DNA, 25 bp, Homo sapien
gttctctgggtctcatgttaaaaag

SEQ ID NO: 2417454 - DNA, 25 bp, Homo sapien
cattgttcttatattggccaatgtg

SEQ ID NO: 2417455 - DNA, 25 bp, Homo sapien
aatgtgtacaaaccctcaaagattg

SEQ ID NO: 2417456 - DNA, 25 bp, Homo sapien
agtaccctatgcaaggaagtccctt

SEQ ID NO: 2417457 - DNA, 25 bp, Homo sapien
atttaaagtaccctatgcaaggaag

SEQ ID NO: 2417458 - DNA, 25 bp, Homo sapien
caataatgtggtctttactagctca

SEQ ID NO: 2417459 - DNA, 25 bp, Homo sapien
tgtgctgttaagtgatgccctctca

SEQ ID NO: 2417460 - DNA, 25 bp, Homo sapien
gagcagaagcttatacacattacaa

SEQ ID NO: 2417461 - DNA, 25 bp, Homo sapien
tgactatcttacaggcctaggctgg

SEQ ID NO: 2417462 - DNA, 25 bp, Homo sapien
caggtccattcggtatttaccaaga

SEQ ID NO: 2417463 - DNA, 25 bp, Homo sapien
tagactcatgtgtagcgatacaggt

SEQ ID NO: 2417464 - DNA, 25 bp, Homo sapien
aagcaatgatgatatcaatcccatt

SEQ ID NO: 2417465 - DNA, 25 bp, Homo sapien
taccaagagggtttatgtcattcag

SEQ ID NO: 2417466 - DNA, 25 bp, Homo sapien
ggcaatactcagtcaagctctccag

SEQ ID NO: 2417467 - DNA, 25 bp, Homo sapien
aatactcagtcaagctctccaggtt

SEQ ID NO: 2417468 - DNA, 25 bp, Homo sapien
cctggcaatactcagtcaagctctc

SEQ ID NO: 2417469 - DNA, 25 bp, Homo sapien
tgattttcatggcaagggccctggc

SEQ ID NO: 2417470 - DNA, 25 bp, Homo sapien
tctcattgatgtagagacccaacag

SEQ ID NO: 2417471 - DNA, 25 bp, Homo sapien
gaaactgaagggtctcacagactag

SEQ ID NO: 2417472 - DNA, 25 bp, Homo sapien
caggccaccggttgtacttccacaa

SEQ ID NO: 2417473 - DNA, 25 bp, Homo sapien
tctcacagactaggttgtaatttgt

SEQ ID NO: 2417474 - DNA, 25 bp, Homo sapien
agtgtttcccgcttctggtcctgtg

SEQ ID NO: 2417475 - DNA, 25 bp, Homo sapien
caattgcgggactcattgttacttc

SEQ ID NO: 2417476 - DNA, 25 bp, Homo sapien
gaagaaatctcagtattggctgcat

SEQ ID NO: 2417477 - DNA, 25 bp, Homo sapien
gcaattcccggttgtgattctcaca

SEQ ID NO: 2417478 - DNA, 25 bp, Homo sapien
catttaagtttagtcctgcagagcc

SEQ ID NO: 2417479 - DNA, 25 bp, Homo sapien
tgcactgattatgtctcatttaagt

SEQ ID NO: 2417480 - DNA, 25 bp, Homo sapien
catgcatgccacaatgaaatcaaac

SEQ ID NO: 2417481 - DNA, 25 bp, Homo sapien
aacatctttcatgccgttggttgct

SEQ ID NO: 2417482 - DNA, 25 bp, Homo sapien
ccttcattcgatcatagagaacttt

SEQ ID NO: 2417483 - DNA, 25 bp, Homo sapien
tttctgagcagccttcattcgatca

SEQ ID NO: 2417484 - DNA, 25 bp, Homo sapien
caattcattgtcatcgtcccttttt

SEQ ID NO: 2417485 - DNA, 25 bp, Homo sapien
tctcattcgtggaccagatgtcatc

SEQ ID NO: 2417486 - DNA, 25 bp, Homo sapien
ccaataataaatgtaatccccatga

SEQ ID NO: 2417487 - DNA, 25 bp, Homo sapien
tctgtgacaagtaaacaagaaatac

SEQ ID NO: 2417488 - DNA, 25 bp, Homo sapien
gtttctgtgacaagtaaacaagaaa

SEQ ID NO: 2417489 - DNA, 25 bp, Homo sapien
aataaatgtaatccccatgattgat

SEQ ID NO: 2417490 - DNA, 25 bp, Homo sapien
gaatgtctgacattgatatccccat

SEQ ID NO: 2417491 - DNA, 25 bp, Homo sapien
tcgatgacaagttctgatgcacctt

SEQ ID NO: 2417492 - DNA, 25 bp, Homo sapien
gcaatgccgaggaaaatgccttctg

SEQ ID NO: 2417493 - DNA, 25 bp, Homo sapien
tggtgttcactataacatcgatgac

SEQ ID NO: 2417494 - DNA, 25 bp, Homo sapien
ggagtaggctcctgataggtgtcca

SEQ ID NO: 2417495 - DNA, 25 bp, Homo sapien
tcccacctgtgcagttttggagtag

SEQ ID NO: 2417496 - DNA, 25 bp, Homo sapien
tcacctttaaagtatcgattcagaa

SEQ ID NO: 2417497 - DNA, 25 bp, Homo sapien
ttcacaccaatactataatcacctt

SEQ ID NO: 2417498 - DNA, 25 bp, Homo sapien
ttcagaacagaatattccttctctt

SEQ ID NO: 2417499 - DNA, 25 bp, Homo sapien
tgtgtcttgaggttccactggcatc

SEQ ID NO: 2417500 - DNA, 25 bp, Homo sapien
tctcaaactcaatttttcagaacag

SEQ ID NO: 2417501 - DNA, 25 bp, Homo sapien
tttcttttaagaagatcacacccat

SEQ ID NO: 2417502 - DNA, 25 bp, Homo sapien
ggcgttacataatcacatgctgttg

SEQ ID NO: 2417503 - DNA, 25 bp, Homo sapien
ccaagagcattgcacaacacgtgac

SEQ ID NO: 2417504 - DNA, 25 bp, Homo sapien
caacacgtgacgtgtctccagtgga

SEQ ID NO: 2417505 - DNA, 25 bp, Homo sapien
gacactgcaggcgttacataatcac

SEQ ID NO: 2417506 - DNA, 25 bp, Homo sapien
actgccagcattcctgctaggctcc

SEQ ID NO: 2417507 - DNA, 25 bp, Homo sapien
tgcttaatatgatacttctcctgtt

SEQ ID NO: 2417508 - DNA, 25 bp, Homo sapien
ggtgttgctccctacaatactatgc

SEQ ID NO: 2417509 - DNA, 25 bp, Homo sapien
tatctacccattagactgtctcact

SEQ ID NO: 2417510 - DNA, 25 bp, Homo sapien
gtttgtgttgccaacagtcatcatc

SEQ ID NO: 2417511 - DNA, 25 bp, Homo sapien
attgtttgtgttgccaacagtcatc

SEQ ID NO: 2417512 - DNA, 25 bp, Homo sapien
gatgatactgttcactgaggatcat

SEQ ID NO: 2417513 - DNA, 25 bp, Homo sapien
tgtttgtgttgccaacagtcatcat

SEQ ID NO: 2417514 - DNA, 25 bp, Homo sapien
gaatgtttccctgattactatactc

SEQ ID NO: 2417515 - DNA, 25 bp, Homo sapien
ctggtgaatgtttccctgattacta

SEQ ID NO: 2417516 - DNA, 25 bp, Homo sapien
cttctggtgaatgtttccctgatta

SEQ ID NO: 2417517 - DNA, 25 bp, Homo sapien
tttccctgattactatactctggca

SEQ ID NO: 2417518 - DNA, 25 bp, Homo sapien
tcccagtgccttctgcgagacgtct

SEQ ID NO: 2417519 - DNA, 25 bp, Homo sapien
tgtgcacagtgtctgggatcctctt

SEQ ID NO: 2417520 - DNA, 25 bp, Homo sapien
gctttctaagccacacagtgagcaa

SEQ ID NO: 2417521 - DNA, 25 bp, Homo sapien
tgcccacccaagtttgcagggatgt

SEQ ID NO: 2417522 - DNA, 25 bp, Homo sapien
tactaaagagtacaagatgcgggaa

SEQ ID NO: 2417523 - DNA, 25 bp, Homo sapien
gagtgcagtccttatttcctgctcc

SEQ ID NO: 2417524 - DNA, 25 bp, Homo sapien
tatccaatccacgtaagctctttct

SEQ ID NO: 2417525 - DNA, 25 bp, Homo sapien
aataacttgtaatgctctataaatc

SEQ ID NO: 2417526 - DNA, 25 bp, Homo sapien
tctaacatttctcgtaatgtctgaa

SEQ ID NO: 2417527 - DNA, 25 bp, Homo sapien
tctctaacatttctcgtaatgtctg

SEQ ID NO: 2417528 - DNA, 25 bp, Homo sapien
aacatttctcgtaatgtctgaagaa

SEQ ID NO: 2417529 - DNA, 25 bp, Homo sapien
ttcttctctaacatttctcgtaatg

SEQ ID NO: 2417530 - DNA, 25 bp, Homo sapien
gaaatgagaagcatgacaactgccc

SEQ ID NO: 2417531 - DNA, 25 bp, Homo sapien
gagaagcatgacaactgcccgctga

SEQ ID NO: 2417532 - DNA, 25 bp, Homo sapien
caactgcccgctgacacttaaagac

SEQ ID NO: 2417533 - DNA, 25 bp, Homo sapien
tggcaaggaaggctcgggagagaag

SEQ ID NO: 2417534 - DNA, 25 bp, Homo sapien
tcaggttacctaatgatgccacagg

SEQ ID NO: 2417535 - DNA, 25 bp, Homo sapien
tctccaagttctagaccagtgctgt

SEQ ID NO: 2417536 - DNA, 25 bp, Homo sapien
gaggctctggctgtaatataattgc

SEQ ID NO: 2417537 - DNA, 25 bp, Homo sapien
gacccctggcaaagctattcataaa

SEQ ID NO: 2417538 - DNA, 25 bp, Homo sapien
tcttgcatcgcttccctcagggaac

SEQ ID NO: 2417539 - DNA, 25 bp, Homo sapien
acatcttattcttgcatcgcttccc

SEQ ID NO: 2417540 - DNA, 25 bp, Homo sapien
gtacaatacatcaaccaacactgag

SEQ ID NO: 2417541 - DNA, 25 bp, Homo sapien
cagcagttctggactgtacaataca

SEQ ID NO: 2417542 - DNA, 25 bp, Homo sapien
gagcgagctgatagtctccaaccca

SEQ ID NO: 2417543 - DNA, 25 bp, Homo sapien
ttccttaaagcgtggcccagagcga

SEQ ID NO: 2417544 - DNA, 25 bp, Homo sapien
aagagtattaacttggctgtccaaa

SEQ ID NO: 2417545 - DNA, 25 bp, Homo sapien
ccaaatccactggaatggcaattcc

SEQ ID NO: 2417546 - DNA, 25 bp, Homo sapien
cgatataattcttccactccattca

SEQ ID NO: 2417547 - DNA, 25 bp, Homo sapien
gaaagcagacataaaacacacgata

SEQ ID NO: 2417548 - DNA, 25 bp, Homo sapien
cacaaaattgtatgtgatgaaacat

SEQ ID NO: 2417549 - DNA, 25 bp, Homo sapien
tgtgcacacaaaattgtatgtgatg

SEQ ID NO: 2417550 - DNA, 25 bp, Homo sapien
tttgaaggttcttggtctgacttaa

SEQ ID NO: 2417551 - DNA, 25 bp, Homo sapien
tggggctttgaaggttcttggtctg

SEQ ID NO: 2417552 - DNA, 25 bp, Homo sapien
gctttgaaggttcttggtctgactt

SEQ ID NO: 2417553 - DNA, 25 bp, Homo sapien
gggctttgaaggttcttggtctgac

SEQ ID NO: 2417554 - DNA, 25 bp, Homo sapien
agatgtgcaaaagagccatggcgct

SEQ ID NO: 2417555 - DNA, 25 bp, Homo sapien
atctttaggaggagcgcagcgcagt

SEQ ID NO: 2417556 - DNA, 25 bp, Homo sapien
attcagttctaaaatctttaggagg

SEQ ID NO: 2417557 - DNA, 25 bp, Homo sapien
taagtgtccgtgctgggtaagatgt

SEQ ID NO: 2417558 - DNA, 25 bp, Homo sapien
gaaggcagattgcagtagctgaata

SEQ ID NO: 2417559 - DNA, 25 bp, Homo sapien
gccaaagttctgatacaggattcca

SEQ ID NO: 2417560 - DNA, 25 bp, Homo sapien
tctgaaggcagattgcagtagctga

SEQ ID NO: 2417561 - DNA, 25 bp, Homo sapien
ccacttcagccaaagttctgataca

SEQ ID NO: 2417562 - DNA, 25 bp, Homo sapien
gtttggtaaactcagaaagaggcat

SEQ ID NO: 2417563 - DNA, 25 bp, Homo sapien
aatttctcctactcaaataagagaa

SEQ ID NO: 2417564 - DNA, 25 bp, Homo sapien
tgcaacagaatgctttgcaattgtt

SEQ ID NO: 2417565 - DNA, 25 bp, Homo sapien
catctgaagtgtaggagatgacttc

SEQ ID NO: 2417566 - DNA, 25 bp, Homo sapien
ctggaggctggtactattgtctgaa

SEQ ID NO: 2417567 - DNA, 25 bp, Homo sapien
ggagaattaaagaagccgctcacaa

SEQ ID NO: 2417568 - DNA, 25 bp, Homo sapien
cattattgactcagtaacacacttt

SEQ ID NO: 2417569 - DNA, 25 bp, Homo sapien
gaagccgctcacaatattcattatt

SEQ ID NO: 2417570 - DNA, 25 bp, Homo sapien
tggaaccacctaaaaattgtcctga

SEQ ID NO: 2417571 - DNA, 25 bp, Homo sapien
taagagaccaaagacgaaacagtca

SEQ ID NO: 2417572 - DNA, 25 bp, Homo sapien
aattgtatcaatcttcagtagctgc

SEQ ID NO: 2417573 - DNA, 25 bp, Homo sapien
cagtagctgctccatcaagttagcc

SEQ ID NO: 2417574 - DNA, 25 bp, Homo sapien
ccacttcagtgtcaacataacagtg

SEQ ID NO: 2417575 - DNA, 25 bp, Homo sapien
caaagttcacataagcaattttaac

SEQ ID NO: 2417576 - DNA, 25 bp, Homo sapien
cataacagtgattaacaaagttcac

SEQ ID NO: 2417577 - DNA, 25 bp, Homo sapien
tccaaatgtggttacttgtatagat

SEQ ID NO: 2417578 - DNA, 25 bp, Homo sapien
gatgcagtcgtcatgggtcaccacc

SEQ ID NO: 2417579 - DNA, 25 bp, Homo sapien
cactatgtcgtccagcgggagaagg

SEQ ID NO: 2417580 - DNA, 25 bp, Homo sapien
ctctctgaacacatcatatggagaa

SEQ ID NO: 2417581 - DNA, 25 bp, Homo sapien
gaaggattggaaatgatgctctatc

SEQ ID NO: 2417582 - DNA, 25 bp, Homo sapien
agatgtgccgcatggtttctgcttc

SEQ ID NO: 2417583 - DNA, 25 bp, Homo sapien
aaaacctcaggtactccacgtggcg

SEQ ID NO: 2417584 - DNA, 25 bp, Homo sapien
tctcgctaatttcgttgcacagatg

SEQ ID NO: 2417585 - DNA, 25 bp, Homo sapien
tctcaatgcagtgcacaaagtgttg

SEQ ID NO: 2417586 - DNA, 25 bp, Homo sapien
gaaatgtatgggctagattcattac

SEQ ID NO: 2417587 - DNA, 25 bp, Homo sapien
ttcctcgacagaaattctgcagaaa

SEQ ID NO: 2417588 - DNA, 25 bp, Homo sapien
aaatgtatgggctagattcattact

SEQ ID NO: 2417589 - DNA, 25 bp, Homo sapien
cccatatttttcagtaatcgttgat

SEQ ID NO: 2417590 - DNA, 25 bp, Homo sapien
gttgattccgacactttttattctg

SEQ ID NO: 2417591 - DNA, 25 bp, Homo sapien
catagggtatctgcagaagatccaa

SEQ ID NO: 2417592 - DNA, 25 bp, Homo sapien
tattctgcacacagagtttacttag

SEQ ID NO: 2417593 - DNA, 25 bp, Homo sapien
cctgcactggacttaaaatgtttga

SEQ ID NO: 2417594 - DNA, 25 bp, Homo sapien
gctgtcaatctgaggtttctttgtt

SEQ ID NO: 2417595 - DNA, 25 bp, Homo sapien
tttgttccatcctgcactggactta

SEQ ID NO: 2417596 - DNA, 25 bp, Homo sapien
tccggtagttattgctcttgttgct

SEQ ID NO: 2417597 - DNA, 25 bp, Homo sapien
caatagtgttcaggattatgtcaca

SEQ ID NO: 2417598 - DNA, 25 bp, Homo sapien
catcgctcagcatggataatgaagg

SEQ ID NO: 2417599 - DNA, 25 bp, Homo sapien
ccatgtgccatgcaatagtgttcag

SEQ ID NO: 2417600 - DNA, 25 bp, Homo sapien
ggattatgtcacagcatcgctcagc

SEQ ID NO: 2417601 - DNA, 25 bp, Homo sapien
aaactgttccggcaccaggcagtgc

SEQ ID NO: 2417602 - DNA, 25 bp, Homo sapien
catggcccatagaaattggactgtc

SEQ ID NO: 2417603 - DNA, 25 bp, Homo sapien
tacaggaatctttcgaacactagcc

SEQ ID NO: 2417604 - DNA, 25 bp, Homo sapien
caggcagtgcctgttgtttacagga

SEQ ID NO: 2417605 - DNA, 25 bp, Homo sapien
tgacttaaaagacatcattgggagt

SEQ ID NO: 2417606 - DNA, 25 bp, Homo sapien
gacatcattgggagtatttcgaaat

SEQ ID NO: 2417607 - DNA, 25 bp, Homo sapien
cattgggagtatttcgaaatagatc

SEQ ID NO: 2417608 - DNA, 25 bp, Homo sapien
tttcgaaatagatcttgaaacgaac

SEQ ID NO: 2417609 - DNA, 25 bp, Homo sapien
cagtcgaagctggtctagatctgcc

SEQ ID NO: 2417610 - DNA, 25 bp, Homo sapien
cagacttttctactgtcagtcgaag

SEQ ID NO: 2417611 - DNA, 25 bp, Homo sapien
tcaattggctcttcaccacctttca

SEQ ID NO: 2417612 - DNA, 25 bp, Homo sapien
tagatctgccttgatttgcttgtag

SEQ ID NO: 2417613 - DNA, 25 bp, Homo sapien
ctgcagccatgaagtcaggttggat

SEQ ID NO: 2417614 - DNA, 25 bp, Homo sapien
tgcattgagggctcttcaatcttac

SEQ ID NO: 2417615 - DNA, 25 bp, Homo sapien
agccatgaagtcaggttggatgtta

SEQ ID NO: 2417616 - DNA, 25 bp, Homo sapien
cttttgctgtggatgcattgagggc

SEQ ID NO: 2417617 - DNA, 25 bp, Homo sapien
ccttcatcgtcaagttgaactggat

SEQ ID NO: 2417618 - DNA, 25 bp, Homo sapien
cgtaaaaacgtcctgcctccttcat

SEQ ID NO: 2417619 - DNA, 25 bp, Homo sapien
ccagacagcaaaggcgggtagtcgt

SEQ ID NO: 2417620 - DNA, 25 bp, Homo sapien
tcgtgcatgatcagatgaatgagga

SEQ ID NO: 2417621 - DNA, 25 bp, Homo sapien
aacaataaacggcaggattcctgat

SEQ ID NO: 2417622 - DNA, 25 bp, Homo sapien
caaaggaggctagtcatgtcaaagg

SEQ ID NO: 2417623 - DNA, 25 bp, Homo sapien
aaagggcattcttgggctgtcatta

SEQ ID NO: 2417624 - DNA, 25 bp, Homo sapien
tcctccagagtaaattagcagcttc

SEQ ID NO: 2417625 - DNA, 25 bp, Homo sapien
cctgagctgcaatttcatctatatc

SEQ ID NO: 2417626 - DNA, 25 bp, Homo sapien
ctgcaaagataaatggtaaaatctc

SEQ ID NO: 2417627 - DNA, 25 bp, Homo sapien
tgcaaagataaatggtaaaatctct

SEQ ID NO: 2417628 - DNA, 25 bp, Homo sapien
caaagataaatggtaaaatctcttc

SEQ ID NO: 2417629 - DNA, 25 bp, Homo sapien
agataaatggtaaaatctcttcttt

SEQ ID NO: 2417630 - DNA, 25 bp, Homo sapien
tattgacagcatatatgagatccta

SEQ ID NO: 2417631 - DNA, 25 bp, Homo sapien
tggagatccactggcagatgtctcc

SEQ ID NO: 2417632 - DNA, 25 bp, Homo sapien
tataatccagtctgacactcaggat

SEQ ID NO: 2417633 - DNA, 25 bp, Homo sapien
gatgtctccgcattgtcattgtcct

SEQ ID NO: 2417634 - DNA, 25 bp, Homo sapien
caccaaggagtagggctacaaagaa

SEQ ID NO: 2417635 - DNA, 25 bp, Homo sapien
caaggagtagggctacaaagaaatt

SEQ ID NO: 2417636 - DNA, 25 bp, Homo sapien
tagcaccaaggagtagggctacaaa

SEQ ID NO: 2417637 - DNA, 25 bp, Homo sapien
cttgtagcaccaaggagtagggcta

SEQ ID NO: 2417638 - DNA, 25 bp, Homo sapien
tcaatgatcttcagcttggtgtcca

SEQ ID NO: 2417639 - DNA, 25 bp, Homo sapien
caatgatcttcagcttggtgtccat

SEQ ID NO: 2417640 - DNA, 25 bp, Homo sapien
ctcaatgatcttcagcttggtgtcc

SEQ ID NO: 2417641 - DNA, 25 bp, Homo sapien
ctcccttgcttgctcgggtggatgc

SEQ ID NO: 2417642 - DNA, 25 bp, Homo sapien
ctgggtggcacatccggcacgctca

SEQ ID NO: 2417643 - DNA, 25 bp, Homo sapien
gcacatccggcacgctcatggggaa

SEQ ID NO: 2417644 - DNA, 25 bp, Homo sapien
cccttgcttgctcgggtggatgctg

SEQ ID NO: 2417645 - DNA, 25 bp, Homo sapien
ccaccccatgaatggttctcatcac

SEQ ID NO: 2417646 - DNA, 25 bp, Homo sapien
tcccaccccatgaatggttctcatc

SEQ ID NO: 2417647 - DNA, 25 bp, Homo sapien
ctctcccaccccatgaatggttctc

SEQ ID NO: 2417648 - DNA, 25 bp, Homo sapien
tctcccaccccatgaatggttctca

SEQ ID NO: 2417649 - DNA, 25 bp, Homo sapien
cacaggaagcaataaggatgcaaaa

SEQ ID NO: 2417650 - DNA, 25 bp, Homo sapien
tggtctttgcttcgtgggtgttcat

SEQ ID NO: 2417651 - DNA, 25 bp, Homo sapien
aacagtggtctttgcttcgtgggtg

SEQ ID NO: 2417652 - DNA, 25 bp, Homo sapien
ggatgcaaaagaatggctgtctcca

SEQ ID NO: 2417653 - DNA, 25 bp, Homo sapien
gaaatcccttgcctgatgtgtagcc

SEQ ID NO: 2417654 - DNA, 25 bp, Homo sapien
ggaccataatatccgacacgctgga

SEQ ID NO: 2417655 - DNA, 25 bp, Homo sapien
tatttcctggacacaatcaggacca

SEQ ID NO: 2417656 - DNA, 25 bp, Homo sapien
gtagcctggcatccgttacatagtt

SEQ ID NO: 2417657 - DNA, 25 bp, Homo sapien
cagaaagggcttagaggcacagcca

SEQ ID NO: 2417658 - DNA, 25 bp, Homo sapien
cattacacattaagccagaaagggc

SEQ ID NO: 2417659 - DNA, 25 bp, Homo sapien
cctcaggacttcaaaatggcacaga

SEQ ID NO: 2417660 - DNA, 25 bp, Homo sapien
ggaacagcatcctgcaaaaggcttg

SEQ ID NO: 2417661 - DNA, 25 bp, Homo sapien
gataatgtgcagtccctataaaggc

SEQ ID NO: 2417662 - DNA, 25 bp, Homo sapien
caagcaagtggctctttgccaggag

SEQ ID NO: 2417663 - DNA, 25 bp, Homo sapien
ggtactcctggacatagatagattc

SEQ ID NO: 2417664 - DNA, 25 bp, Homo sapien
tatatccagtggactagggcttctg

SEQ ID NO: 2417665 - DNA, 25 bp, Homo sapien
ggagatccaaagttgaaccccagtc

SEQ ID NO: 2417666 - DNA, 25 bp, Homo sapien
cagtgcttagctatggaaactccca

SEQ ID NO: 2417667 - DNA, 25 bp, Homo sapien
gaaattgtagtggtgtcctagacac

SEQ ID NO: 2417668 - DNA, 25 bp, Homo sapien
tcctgactgggaataggcccacatt

SEQ ID NO: 2417669 - DNA, 25 bp, Homo sapien
tattcacatggagatgatactcgaa

SEQ ID NO: 2417670 - DNA, 25 bp, Homo sapien
ccagttcatcagcttgtatgtgcat

SEQ ID NO: 2417671 - DNA, 25 bp, Homo sapien
aattacactgaatggtgcctgtgca

SEQ ID NO: 2417672 - DNA, 25 bp, Homo sapien
caaatcgtaagtattaggcaaagca

SEQ ID NO: 2417673 - DNA, 25 bp, Homo sapien
tcaatcattttctgaacggaccacc

SEQ ID NO: 2417674 - DNA, 25 bp, Homo sapien
tgccaactataagccattgtgacag

SEQ ID NO: 2417675 - DNA, 25 bp, Homo sapien
acagcctggaagctagacgcagacc

SEQ ID NO: 2417676 - DNA, 25 bp, Homo sapien
gcaatttctgctgagcgtgccaact

SEQ ID NO: 2417677 - DNA, 25 bp, Homo sapien
ttacaatgacactgaggtgggctgc

SEQ ID NO: 2417678 - DNA, 25 bp, Homo sapien
taggatgaggacaacttacaatgac

SEQ ID NO: 2417679 - DNA, 25 bp, Homo sapien
ctaggatgaggacaacttacaatga

SEQ ID NO: 2417680 - DNA, 25 bp, Homo sapien
aacttacaatgacactgaggtgggc

SEQ ID NO: 2417681 - DNA, 25 bp, Homo sapien
ttttcccatgcttgacaatcctatc

SEQ ID NO: 2417682 - DNA, 25 bp, Homo sapien
cacaggaatttttcccatgcttgac

SEQ ID NO: 2417683 - DNA, 25 bp, Homo sapien
gaatttttcccatgcttgacaatcc

SEQ ID NO: 2417684 - DNA, 25 bp, Homo sapien
ttcccatgcttgacaatcctatctc

SEQ ID NO: 2417685 - DNA, 25 bp, Homo sapien
ggcagattgtaagcagtgagatcaa

SEQ ID NO: 2417686 - DNA, 25 bp, Homo sapien
gagtgaaccccaatgtcaacgatga

SEQ ID NO: 2417687 - DNA, 25 bp, Homo sapien
gtaataaatgtacccctctagtgga

SEQ ID NO: 2417688 - DNA, 25 bp, Homo sapien
tttgagggcagatataaacaggacg

SEQ ID NO: 2417689 - DNA, 25 bp, Homo sapien
gtggcttggctataatgttagttgc

SEQ ID NO: 2417690 - DNA, 25 bp, Homo sapien
taaatccaccttattatcactcagc

SEQ ID NO: 2417691 - DNA, 25 bp, Homo sapien
tccttgcatccgtctaagctctgct

SEQ ID NO: 2417692 - DNA, 25 bp, Homo sapien
tattagcaggtacacaatagcaacc

SEQ ID NO: 2417693 - DNA, 25 bp, Homo sapien
gggcctgtacaatgtctaaaatagc

SEQ ID NO: 2417694 - DNA, 25 bp, Homo sapien
tccaaagtatataagattccgagcc

SEQ ID NO: 2417695 - DNA, 25 bp, Homo sapien
tgttagccttaataactcactgaaa

SEQ ID NO: 2417696 - DNA, 25 bp, Homo sapien
catcttgaaatttgcttaatctttc

SEQ ID NO: 2417697 - DNA, 25 bp, Homo sapien
tccattgtcagggcaaatttcctct

SEQ ID NO: 2417698 - DNA, 25 bp, Homo sapien
ccattgtcagggcaaatttcctctt

SEQ ID NO: 2417699 - DNA, 25 bp, Homo sapien
ggaagagtctgttatagaatcatat

SEQ ID NO: 2417700 - DNA, 25 bp, Homo sapien
gatactggcgatccaagcacatcct

SEQ ID NO: 2417701 - DNA, 25 bp, Homo sapien
gacacacaccgcaggatcaggtcta

SEQ ID NO: 2417702 - DNA, 25 bp, Homo sapien
tcccggtcaacgtgcatgtggagca

SEQ ID NO: 2417703 - DNA, 25 bp, Homo sapien
tccagagcctggcatagcgaacagg

SEQ ID NO: 2417704 - DNA, 25 bp, Homo sapien
aattccaagctagtgagaaaccagg

SEQ ID NO: 2417705 - DNA, 25 bp, Homo sapien
gctaccctagttctgacatgacttt

SEQ ID NO: 2417706 - DNA, 25 bp, Homo sapien
tagatacctaactagtggctacaga

SEQ ID NO: 2417707 - DNA, 25 bp, Homo sapien
gcctttggctgcacaataattccaa

SEQ ID NO: 2417708 - DNA, 25 bp, Homo sapien
gcaaggtgcctgatagctttgccat

SEQ ID NO: 2417709 - DNA, 25 bp, Homo sapien
ggttccttgttgctgtcaatccaat

SEQ ID NO: 2417710 - DNA, 25 bp, Homo sapien
tgtcatctgaaaggatggagctctc

SEQ ID NO: 2417711 - DNA, 25 bp, Homo sapien
gaacttctaagtcagctttggtgcc

SEQ ID NO: 2417712 - DNA, 25 bp, Homo sapien
atagcagtggtattagacacacaca

SEQ ID NO: 2417713 - DNA, 25 bp, Homo sapien
acacacagatctgacaaataatcca

SEQ ID NO: 2417714 - DNA, 25 bp, Homo sapien
gaatgtctgcattgcctggactcaa

SEQ ID NO: 2417715 - DNA, 25 bp, Homo sapien
tcttgagttacagggatagcagtgg

SEQ ID NO: 2417716 - DNA, 25 bp, Homo sapien
gaataccgcatgaatcatttcaaac

SEQ ID NO: 2417717 - DNA, 25 bp, Homo sapien
aaagccgcaatctccactagaaaag

SEQ ID NO: 2417718 - DNA, 25 bp, Homo sapien
aacataaagccgcaatctccactag

SEQ ID NO: 2417719 - DNA, 25 bp, Homo sapien
tccactagaaaagaataccgcatga

SEQ ID NO: 2417720 - DNA, 25 bp, Homo sapien
tgtgcaacaaagctgtgatagtatc

SEQ ID NO: 2417721 - DNA, 25 bp, Homo sapien
tcctgagtaaactgacaaatgtttc

SEQ ID NO: 2417722 - DNA, 25 bp, Homo sapien
ttggctcccgatttctcctgagtaa

SEQ ID NO: 2417723 - DNA, 25 bp, Homo sapien
caaaatatcatagccaatctgggac

SEQ ID NO: 2417724 - DNA, 25 bp, Homo sapien
tgcgagtgtctcaggacgcggtaac

SEQ ID NO: 2417725 - DNA, 25 bp, Homo sapien
cttgtagggtgcatatctttgatcc

SEQ ID NO: 2417726 - DNA, 25 bp, Homo sapien
gatttttccggtaatcctgctgcga

SEQ ID NO: 2417727 - DNA, 25 bp, Homo sapien
cagagccgcagcatgtacttgtagg

SEQ ID NO: 2417728 - DNA, 25 bp, Homo sapien
tgataaccacatccagaacttcttg

SEQ ID NO: 2417729 - DNA, 25 bp, Homo sapien
cgctctcggtttggcttagtgataa

SEQ ID NO: 2417730 - DNA, 25 bp, Homo sapien
caaagaatatgagatcttccaataa

SEQ ID NO: 2417731 - DNA, 25 bp, Homo sapien
tgtccattattaggcacatcagcaa

SEQ ID NO: 2417732 - DNA, 25 bp, Homo sapien
agtctgtttcttttggaaaattgtg

SEQ ID NO: 2417733 - DNA, 25 bp, Homo sapien
tgtttcttttggaaaattgtgtcta

SEQ ID NO: 2417734 - DNA, 25 bp, Homo sapien
ccagtctgtttcttttggaaaattg

SEQ ID NO: 2417735 - DNA, 25 bp, Homo sapien
tctgtttcttttggaaaattgtgtc

SEQ ID NO: 2417736 - DNA, 25 bp, Homo sapien
aatgtggtgtgaacttcttttgaaa

SEQ ID NO: 2417737 - DNA, 25 bp, Homo sapien
gacaggattcactgacatagttacg

SEQ ID NO: 2417738 - DNA, 25 bp, Homo sapien
catagttacgtgtaatctctgaagg

SEQ ID NO: 2417739 - DNA, 25 bp, Homo sapien
gtttcatgtgcatcaaaatgtggtg

SEQ ID NO: 2417740 - DNA, 25 bp, Homo sapien
agcaaagcaggacaacattcagatt

SEQ ID NO: 2417741 - DNA, 25 bp, Homo sapien
caaagcaggacaacattcagattca

SEQ ID NO: 2417742 - DNA, 25 bp, Homo sapien
tctagcaaagcaggacaacattcag

SEQ ID NO: 2417743 - DNA, 25 bp, Homo sapien
agcaggacaacattcagattcagga

SEQ ID NO: 2417744 - DNA, 25 bp, Homo sapien
cacattaataatgggagatgttaac

SEQ ID NO: 2417745 - DNA, 25 bp, Homo sapien
gatcaatgacacagaaagttaacaa

SEQ ID NO: 2417746 - DNA, 25 bp, Homo sapien
ccacacattaataatgggagatgtt

SEQ ID NO: 2417747 - DNA, 25 bp, Homo sapien
caatgacacagaaagttaacaagga

SEQ ID NO: 2417748 - DNA, 25 bp, Homo sapien
gaataacaagtctattgacagcaga

SEQ ID NO: 2417749 - DNA, 25 bp, Homo sapien
tctaacatctctataaagtatcact

SEQ ID NO: 2417750 - DNA, 25 bp, Homo sapien
taacagcaacaagagatgctagaaa

SEQ ID NO: 2417751 - DNA, 25 bp, Homo sapien
gaaagtaattatcaatctaacatct

SEQ ID NO: 2417752 - DNA, 25 bp, Homo sapien
taaaatagactatcagattggattg

SEQ ID NO: 2417753 - DNA, 25 bp, Homo sapien
taaataaaatagactatcagattgg

SEQ ID NO: 2417754 - DNA, 25 bp, Homo sapien
cagattggattgttacaatcaacct

SEQ ID NO: 2417755 - DNA, 25 bp, Homo sapien
gactatcagattggattgttacaat

SEQ ID NO: 2417756 - DNA, 25 bp, Homo sapien
cagccagcaatggtggagagaccat

SEQ ID NO: 2417757 - DNA, 25 bp, Homo sapien
aaaatgcatgctctctagtcagtcc

SEQ ID NO: 2417758 - DNA, 25 bp, Homo sapien
ttaagataatctccagctgtgactg

SEQ ID NO: 2417759 - DNA, 25 bp, Homo sapien
aagagtgactcgcacaggattccag

SEQ ID NO: 2417760 - DNA, 25 bp, Homo sapien
tatttatatgtgcacttgtgtccac

SEQ ID NO: 2417761 - DNA, 25 bp, Homo sapien
cagtaggcacacaacctaattatga

SEQ ID NO: 2417762 - DNA, 25 bp, Homo sapien
ggatgatgatttctacatactctcc

SEQ ID NO: 2417763 - DNA, 25 bp, Homo sapien
gttcaggctatagtccccaacatta

SEQ ID NO: 2417764 - DNA, 25 bp, Homo sapien
gattgcgaacgcttctttatcttct

SEQ ID NO: 2417765 - DNA, 25 bp, Homo sapien
cagacagtggaacagacacgattgc

SEQ ID NO: 2417766 - DNA, 25 bp, Homo sapien
ggtcgctagtactttattggcatca

SEQ ID NO: 2417767 - DNA, 25 bp, Homo sapien
ctgagttattgtgccgttttctagc

SEQ ID NO: 2417768 - DNA, 25 bp, Homo sapien
taaacaactatacaatattctttga

SEQ ID NO: 2417769 - DNA, 25 bp, Homo sapien
aaacaactatacaatattctttgaa

SEQ ID NO: 2417770 - DNA, 25 bp, Homo sapien
aacaactatacaatattctttgaag

SEQ ID NO: 2417771 - DNA, 25 bp, Homo sapien
acaactatacaatattctttgaaga

SEQ ID NO: 2417772 - DNA, 25 bp, Homo sapien
tgttggtgcataaatgccttaaccg

SEQ ID NO: 2417773 - DNA, 25 bp, Homo sapien
aatgccttaaccgaacatatgagtt

SEQ ID NO: 2417774 - DNA, 25 bp, Homo sapien
gggatactagtactggttacccatg

SEQ ID NO: 2417775 - DNA, 25 bp, Homo sapien
tactggttacccatgtgttggtgca

SEQ ID NO: 2417776 - DNA, 25 bp, Homo sapien
caaagtatacatgatcttctcccct

SEQ ID NO: 2417777 - DNA, 25 bp, Homo sapien
gcatctagttcaaaaagggatgcaa

SEQ ID NO: 2417778 - DNA, 25 bp, Homo sapien
tgcgggactgaaaccaaagtataca

SEQ ID NO: 2417779 - DNA, 25 bp, Homo sapien
caatgtcattgccatgcgggactga

SEQ ID NO: 2417780 - DNA, 25 bp, Homo sapien
gatccaattaatcgaataaacctac

SEQ ID NO: 2417781 - DNA, 25 bp, Homo sapien
aataggagatccaattaatcgaata

SEQ ID NO: 2417782 - DNA, 25 bp, Homo sapien
tataaataggagatccaattaatcg

SEQ ID NO: 2417783 - DNA, 25 bp, Homo sapien
ggagatccaattaatcgaataaacc

SEQ ID NO: 2417784 - DNA, 25 bp, Homo sapien
tatgttaaaggtttcattgggccaa

SEQ ID NO: 2417785 - DNA, 25 bp, Homo sapien
cattttgatatgttaaaggtttcat

SEQ ID NO: 2417786 - DNA, 25 bp, Homo sapien
ctctacgtttagagacattttgata

SEQ ID NO: 2417787 - DNA, 25 bp, Homo sapien
ctacgtttagagacattttgatatg

SEQ ID NO: 2417788 - DNA, 25 bp, Homo sapien
tcacagctttatttctatcgtaagc

SEQ ID NO: 2417789 - DNA, 25 bp, Homo sapien
acttcacagctttatttctatcgta

SEQ ID NO: 2417790 - DNA, 25 bp, Homo sapien
tacttcacagctttatttctatcgt

SEQ ID NO: 2417791 - DNA, 25 bp, Homo sapien
ctgatacttcacagctttatttcta

SEQ ID NO: 2417792 - DNA, 25 bp, Homo sapien
tttgggcatctcgataatcaggatt

SEQ ID NO: 2417793 - DNA, 25 bp, Homo sapien
gggcatctcgataatcaggattaag

SEQ ID NO: 2417794 - DNA, 25 bp, Homo sapien
ttttgggcatctcgataatcaggat

SEQ ID NO: 2417795 - DNA, 25 bp, Homo sapien
ttttccttcattttgggcatctcga

SEQ ID NO: 2417796 - DNA, 25 bp, Homo sapien
aaacatcataaatacctgggcagtg

SEQ ID NO: 2417797 - DNA, 25 bp, Homo sapien
tgcagccatggcagtgagtaacaga

SEQ ID NO: 2417798 - DNA, 25 bp, Homo sapien
aagatcaaaggcagggtccactgca

SEQ ID NO: 2417799 - DNA, 25 bp, Homo sapien
gaaagtcatgcttgtaccgcaatca

SEQ ID NO: 2417800 - DNA, 25 bp, Homo sapien
caggacaaatctattattgtgattg

SEQ ID NO: 2417801 - DNA, 25 bp, Homo sapien
gacaaatctattattgtgattgata

SEQ ID NO: 2417802 - DNA, 25 bp, Homo sapien
tttcaggacaaatctattattgtga

SEQ ID NO: 2417803 - DNA, 25 bp, Homo sapien
tcaggacaaatctattattgtgatt

SEQ ID NO: 2417804 - DNA, 25 bp, Homo sapien
cacggcatgggtcatgatgaaccac

SEQ ID NO: 2417805 - DNA, 25 bp, Homo sapien
ctgcagctaaatagtttccagttgc

SEQ ID NO: 2417806 - DNA, 25 bp, Homo sapien
gcacccccacggcatgggtcatgat

SEQ ID NO: 2417807 - DNA, 25 bp, Homo sapien
ctctgcagctaaatagtttccagtt

SEQ ID NO: 2417808 - DNA, 25 bp, Homo sapien
gctgattggcgcaaggtcgtacgaa

SEQ ID NO: 2417809 - DNA, 25 bp, Homo sapien
ggtcgtacgaaggaaaatgtgctgt

SEQ ID NO: 2417810 - DNA, 25 bp, Homo sapien
ttagaactagtagcagaagtagctg

SEQ ID NO: 2417811 - DNA, 25 bp, Homo sapien
catgaaataatctaacaacgtcccc

SEQ ID NO: 2417812 - DNA, 25 bp, Homo sapien
tgggcccttctactagctatttgac

SEQ ID NO: 2417813 - DNA, 25 bp, Homo sapien
tgcatctagaatttcagtaagacta

SEQ ID NO: 2417814 - DNA, 25 bp, Homo sapien
cattctaaattatgaacaccagtga

SEQ ID NO: 2417815 - DNA, 25 bp, Homo sapien
ccagtgaatacataggttttgcatc

SEQ ID NO: 2417816 - DNA, 25 bp, Homo sapien
ttctcccagcaaatgtcctgtgtag

SEQ ID NO: 2417817 - DNA, 25 bp, Homo sapien
tttctcccagcaaatgtcctgtgta

SEQ ID NO: 2417818 - DNA, 25 bp, Homo sapien
catcctctcgataggaactatattt

SEQ ID NO: 2417819 - DNA, 25 bp, Homo sapien
gaataaagtgattttccagctggtg

SEQ ID NO: 2417820 - DNA, 25 bp, Homo sapien
ctggtgttgcaattgacagcattca

SEQ ID NO: 2417821 - DNA, 25 bp, Homo sapien
ccttttaatacatcctctcgatagg

SEQ ID NO: 2417822 - DNA, 25 bp, Homo sapien
tttacaccctgggttatcaagaagc

SEQ ID NO: 2417823 - DNA, 25 bp, Homo sapien
ggttatcaagaagctctatgttgct

SEQ ID NO: 2417824 - DNA, 25 bp, Homo sapien
caaaacaactttatctcctacaaca

SEQ ID NO: 2417825 - DNA, 25 bp, Homo sapien
gctctatgttgctggcatgtagtgg

SEQ ID NO: 2417826 - DNA, 25 bp, Homo sapien
atgcttctaccaaaccttaccaaag

SEQ ID NO: 2417827 - DNA, 25 bp, Homo sapien
aaggaagatatcaccagataattta

SEQ ID NO: 2417828 - DNA, 25 bp, Homo sapien
tgcatgccatgcttctaccaaacct

SEQ ID NO: 2417829 - DNA, 25 bp, Homo sapien
caaaccttaccaaaggaagatatca

SEQ ID NO: 2417830 - DNA, 25 bp, Homo sapien
ttagattcacgataaagacattcct

SEQ ID NO: 2417831 - DNA, 25 bp, Homo sapien
tatgaaacttattcagcgctcagtg

SEQ ID NO: 2417832 - DNA, 25 bp, Homo sapien
cgctcagtgtctagcagcatttcct

SEQ ID NO: 2417833 - DNA, 25 bp, Homo sapien
tgatcccctgatgcaatacttgcag

SEQ ID NO: 2417834 - DNA, 25 bp, Homo sapien
ggcattcttctccagtaaagcaggt

SEQ ID NO: 2417835 - DNA, 25 bp, Homo sapien
tctcagtttccagaacggatgaata

SEQ ID NO: 2417836 - DNA, 25 bp, Homo sapien
catccaaggacacacgcatggcatt

SEQ ID NO: 2417837 - DNA, 25 bp, Homo sapien
cggatgaatataaaaccaagaccct

SEQ ID NO: 2417838 - DNA, 25 bp, Homo sapien
atctttcctacttgactttctttgg

SEQ ID NO: 2417839 - DNA, 25 bp, Homo sapien
catctttcctacttgactttctttg

SEQ ID NO: 2417840 - DNA, 25 bp, Homo sapien
tattctccgattcattttgtttttg

SEQ ID NO: 2417841 - DNA, 25 bp, Homo sapien
ttgctttatgtttccatcatatcat

SEQ ID NO: 2417842 - DNA, 25 bp, Homo sapien
tgtttccatcatatcatattgtctt

SEQ ID NO: 2417843 - DNA, 25 bp, Homo sapien
tccatcatatcatattgtctttcag

SEQ ID NO: 2417844 - DNA, 25 bp, Homo sapien
tgttttgctttatgtttccatcata

SEQ ID NO: 2417845 - DNA, 25 bp, Homo sapien
cagtaatgtgctacctacatgccag

SEQ ID NO: 2417846 - DNA, 25 bp, Homo sapien
tctggcacaccctaaaaaacagcag

SEQ ID NO: 2417847 - DNA, 25 bp, Homo sapien
caggaaatagatggtcacaccctat

SEQ ID NO: 2417848 - DNA, 25 bp, Homo sapien
tagcctaagccagacaattggaatc

SEQ ID NO: 2417849 - DNA, 25 bp, Homo sapien
gctgcctcggtgtggttcccttgtt

SEQ ID NO: 2417850 - DNA, 25 bp, Homo sapien
tgcctcggtgtggttcccttgtttg

SEQ ID NO: 2417851 - DNA, 25 bp, Homo sapien
tcttcagcaaggctgcctcggtgtg

SEQ ID NO: 2417852 - DNA, 25 bp, Homo sapien
aaggctgcctcggtgtggttccctt

SEQ ID NO: 2417853 - DNA, 25 bp, Homo sapien
acactgtaactaaggctactagcat

SEQ ID NO: 2417854 - DNA, 25 bp, Homo sapien
gtaactaaggctactagcatttctt

SEQ ID NO: 2417855 - DNA, 25 bp, Homo sapien
ttcccttatagctcagcttttgaat

SEQ ID NO: 2417856 - DNA, 25 bp, Homo sapien
cccttatagctcagcttttgaatct

SEQ ID NO: 2417857 - DNA, 25 bp, Homo sapien
gaatgacgaacaacagacctcctgt

SEQ ID NO: 2417858 - DNA, 25 bp, Homo sapien
gaactatttcccaggtagcagcatt

SEQ ID NO: 2417859 - DNA, 25 bp, Homo sapien
tagcaacggctttgccagaacgggc

SEQ ID NO: 2417860 - DNA, 25 bp, Homo sapien
tcctgcccacagattagcaacggct

SEQ ID NO: 2417861 - DNA, 25 bp, Homo sapien
aattgcagtatctttgcaattcttg

SEQ ID NO: 2417862 - DNA, 25 bp, Homo sapien
cagtatctttgcaattcttggttct

SEQ ID NO: 2417863 - DNA, 25 bp, Homo sapien
gcagtatctttgcaattcttggttc

SEQ ID NO: 2417864 - DNA, 25 bp, Homo sapien
ttgcagtatctttgcaattcttggt

SEQ ID NO: 2417865 - DNA, 25 bp, Homo sapien
tcatccccatccccttttctcttac

SEQ ID NO: 2417866 - DNA, 25 bp, Homo sapien
agagtcagtgtcatccccatcccct

SEQ ID NO: 2417867 - DNA, 25 bp, Homo sapien
gtgtcatccccatccccttttctct

SEQ ID NO: 2417868 - DNA, 25 bp, Homo sapien
cagagtcagtgtcatccccatcccc

SEQ ID NO: 2417869 - DNA, 25 bp, Homo sapien
cacaggatgttcaagtcttcacaga

SEQ ID NO: 2417870 - DNA, 25 bp, Homo sapien
ttaataagtgtccatctccagcaag

SEQ ID NO: 2417871 - DNA, 25 bp, Homo sapien
taaggcctcttattagaacacagga

SEQ ID NO: 2417872 - DNA, 25 bp, Homo sapien
tctgtggctgcctacatagaacgag

SEQ ID NO: 2417873 - DNA, 25 bp, Homo sapien
gatttcctatattctaaagagagaa

SEQ ID NO: 2417874 - DNA, 25 bp, Homo sapien
gttcttacgctgaggtctatgatcc

SEQ ID NO: 2417875 - DNA, 25 bp, Homo sapien
aggtaaaattgaggcaatataggac

SEQ ID NO: 2417876 - DNA, 25 bp, Homo sapien
atataggacaatttgtgttctacag

SEQ ID NO: 2417877 - DNA, 25 bp, Homo sapien
gacaaacatcctgctttataagctg

SEQ ID NO: 2417878 - DNA, 25 bp, Homo sapien
gctgaactaagcttatggataccta

SEQ ID NO: 2417879 - DNA, 25 bp, Homo sapien
tggtatacccgctgacttcctgatt

SEQ ID NO: 2417880 - DNA, 25 bp, Homo sapien
tttcatgccgcctccttggtatacc

SEQ ID NO: 2417881 - DNA, 25 bp, Homo sapien
ggctgcccaagatcttacagtgttg

SEQ ID NO: 2417882 - DNA, 25 bp, Homo sapien
tacagtgttgaaaaacaagcctacc

SEQ ID NO: 2417883 - DNA, 25 bp, Homo sapien
cacccatcgagaggccccagtatgt

SEQ ID NO: 2417884 - DNA, 25 bp, Homo sapien
tgcgcctattgacccatcatctaca

SEQ ID NO: 2417885 - DNA, 25 bp, Homo sapien
tacatgctcggtagtggtaagacac

SEQ ID NO: 2417886 - DNA, 25 bp, Homo sapien
ttagaatccatactgacacctgtga

SEQ ID NO: 2417887 - DNA, 25 bp, Homo sapien
tgaacttctttgagtagcagcgaat

SEQ ID NO: 2417888 - DNA, 25 bp, Homo sapien
caaactaataggtctacaggttgct

SEQ ID NO: 2417889 - DNA, 25 bp, Homo sapien
aagacaagctatgcaaaaggatgag

SEQ ID NO: 2417890 - DNA, 25 bp, Homo sapien
caagctatgcaaaaggatgaggcac

SEQ ID NO: 2417891 - DNA, 25 bp, Homo sapien
aaggcaagagccgtaaagacaagct

SEQ ID NO: 2417892 - DNA, 25 bp, Homo sapien
gccgtaaagacaagctatgcaaaag

SEQ ID NO: 2417893 - DNA, 25 bp, Homo sapien
cacaggcagcaagcagtacagtcaa

SEQ ID NO: 2417894 - DNA, 25 bp, Homo sapien
gaattcagttagacactgcgggacc

SEQ ID NO: 2417895 - DNA, 25 bp, Homo sapien
caagaagacctcacttgcccagggt

SEQ ID NO: 2417896 - DNA, 25 bp, Homo sapien
tcagggctcacaaaacctcgtgtgg

SEQ ID NO: 2417897 - DNA, 25 bp, Homo sapien
ctctgaacttcttgggagggttggc

SEQ ID NO: 2417898 - DNA, 25 bp, Homo sapien
tgaacttcttgggagggttggcaag

SEQ ID NO: 2417899 - DNA, 25 bp, Homo sapien
tgggtgcaccacacatctgtcatcc

SEQ ID NO: 2417900 - DNA, 25 bp, Homo sapien
ccggcctctgggtgcaccacacatc

SEQ ID NO: 2417901 - DNA, 25 bp, Homo sapien
cactaagtaactttttaacaatcat

SEQ ID NO: 2417902 - DNA, 25 bp, Homo sapien
tcactaagtaactttttaacaatca

SEQ ID NO: 2417903 - DNA, 25 bp, Homo sapien
aatacagacttttatgaatgtcact

SEQ ID NO: 2417904 - DNA, 25 bp, Homo sapien
cactagcgccctctgacatgtatca

SEQ ID NO: 2417905 - DNA, 25 bp, Homo sapien
ttcactagcgccctctgacatgtat

SEQ ID NO: 2417906 - DNA, 25 bp, Homo sapien
ttgtcatccttcactagcgccctct

SEQ ID NO: 2417907 - DNA, 25 bp, Homo sapien
gcgccctctgacatgtatcataatt

SEQ ID NO: 2417908 - DNA, 25 bp, Homo sapien
cttcacaggctgacgactgagtggg

SEQ ID NO: 2417909 - DNA, 25 bp, Homo sapien
gattgagagaccactcgagggctcc

SEQ ID NO: 2417910 - DNA, 25 bp, Homo sapien
caagtggcagcttcctcgaaagtca

SEQ ID NO: 2417911 - DNA, 25 bp, Homo sapien
tagttagcatccatagccattgtgg

SEQ ID NO: 2417912 - DNA, 25 bp, Homo sapien
ttctagttgaatcccttcactacgt

SEQ ID NO: 2417913 - DNA, 25 bp, Homo sapien
cttctagttgaatcccttcactacg

SEQ ID NO: 2417914 - DNA, 25 bp, Homo sapien
catgttagcacaagtactcccaagc

SEQ ID NO: 2417915 - DNA, 25 bp, Homo sapien
tgttgattatgaaccacgcactgtt

SEQ ID NO: 2417916 - DNA, 25 bp, Homo sapien
taaaggcacctatgaccccagaaaa

SEQ ID NO: 2417917 - DNA, 25 bp, Homo sapien
tgggtccaagggatagccttcaagg

SEQ ID NO: 2417918 - DNA, 25 bp, Homo sapien
caaagtatagaaacctagggcctgg

SEQ ID NO: 2417919 - DNA, 25 bp, Homo sapien
aatgactgcctaaaacaagatgttt

SEQ ID NO: 2417920 - DNA, 25 bp, Homo sapien
agaaagatactctaatgacactcca

SEQ ID NO: 2417921 - DNA, 25 bp, Homo sapien
cactgctgaagaggaaacgttgttc

SEQ ID NO: 2417922 - DNA, 25 bp, Homo sapien
caacagagccctacatgaagaatgg

SEQ ID NO: 2417923 - DNA, 25 bp, Homo sapien
tgatgacgtcacctttgccatcaga

SEQ ID NO: 2417924 - DNA, 25 bp, Homo sapien
tggaccatcatcgagccagccattg

SEQ ID NO: 2417925 - DNA, 25 bp, Homo sapien
aactgctcttctcctactcgtgatg

SEQ ID NO: 2417926 - DNA, 25 bp, Homo sapien
tgttttcacttatacatggtaccta

SEQ ID NO: 2417927 - DNA, 25 bp, Homo sapien
gttttcacttatacatggtacctag

SEQ ID NO: 2417928 - DNA, 25 bp, Homo sapien
taaaatctgactattaagatgccta

SEQ ID NO: 2417929 - DNA, 25 bp, Homo sapien
gcattgccacttgccgtcatggata

SEQ ID NO: 2417930 - DNA, 25 bp, Homo sapien
tgatttccccggtagccagatctgg

SEQ ID NO: 2417931 - DNA, 25 bp, Homo sapien
agcagcaggcagaaattggagccct

SEQ ID NO: 2417932 - DNA, 25 bp, Homo sapien
gggccaaattccatcacctcataat

SEQ ID NO: 2417933 - DNA, 25 bp, Homo sapien
ctgaagtttaacaagagggacactg

SEQ ID NO: 2417934 - DNA, 25 bp, Homo sapien
gggtggttgtttacttgactgagct

SEQ ID NO: 2417935 - DNA, 25 bp, Homo sapien
tctcattgccagagggggctgaaaa

SEQ ID NO: 2417936 - DNA, 25 bp, Homo sapien
tctgacttctatcaaagccaagcca

SEQ ID NO: 2417937 - DNA, 25 bp, Homo sapien
gccaagccatcagggctcttgagga

SEQ ID NO: 2417938 - DNA, 25 bp, Homo sapien
gatgaagccgttgaccgagccctcc

SEQ ID NO: 2417939 - DNA, 25 bp, Homo sapien
cgcgtacagggacacgatgtcccct

SEQ ID NO: 2417940 - DNA, 25 bp, Homo sapien
gttgaccgagccctccgcgtacagg

SEQ ID NO: 2417941 - DNA, 25 bp, Homo sapien
tcccctatgtagaggaagctggaca

SEQ ID NO: 2417942 - DNA, 25 bp, Homo sapien
gagccactgagcgtcgcggctcagc

SEQ ID NO: 2417943 - DNA, 25 bp, Homo sapien
atcgcgggactacagcggccaagag

SEQ ID NO: 2417944 - DNA, 25 bp, Homo sapien
gctgcttcatgttccacagtggacg

SEQ ID NO: 2417945 - DNA, 25 bp, Homo sapien
ccgccgcggcagaagcggatcggat

SEQ ID NO: 2417946 - DNA, 25 bp, Homo sapien
gctgctctggttgtttctcttgcct

SEQ ID NO: 2417947 - DNA, 25 bp, Homo sapien
tcagcccattacaaaggccttatct

SEQ ID NO: 2417948 - DNA, 25 bp, Homo sapien
tgctgctctggttgtttctcttgcc

SEQ ID NO: 2417949 - DNA, 25 bp, Homo sapien
acaaaggccttatctgctgcctggc

SEQ ID NO: 2417950 - DNA, 25 bp, Homo sapien
acacttgctagtttgtgatctttct

SEQ ID NO: 2417951 - DNA, 25 bp, Homo sapien
tccaacacttgctagtttgtgatct

SEQ ID NO: 2417952 - DNA, 25 bp, Homo sapien
caacacttgctagtttgtgatcttt

SEQ ID NO: 2417953 - DNA, 25 bp, Homo sapien
ccaacacttgctagtttgtgatctt

SEQ ID NO: 2417954 - DNA, 25 bp, Homo sapien
caggcaatacagtacttaacttgga

SEQ ID NO: 2417955 - DNA, 25 bp, Homo sapien
tattaacagcaagatacaggactat

SEQ ID NO: 2417956 - DNA, 25 bp, Homo sapien
aaccgtgtgatgaaattacatgtgc

SEQ ID NO: 2417957 - DNA, 25 bp, Homo sapien
gagtaacctagtggtaaccgtgtga

SEQ ID NO: 2417958 - DNA, 25 bp, Homo sapien
gatgcctttgaccattgaactgaag

SEQ ID NO: 2417959 - DNA, 25 bp, Homo sapien
tcgtattaattaccctgagaccagg

SEQ ID NO: 2417960 - DNA, 25 bp, Homo sapien
tatcatatcctggtataatagggcc

SEQ ID NO: 2417961 - DNA, 25 bp, Homo sapien
taaatgagtatccttcgggcccaga

SEQ ID NO: 2417962 - DNA, 25 bp, Homo sapien
tatcttctaaagtaattctccaatg

SEQ ID NO: 2417963 - DNA, 25 bp, Homo sapien
tgcaaatcttaaactctcatcaaat

SEQ ID NO: 2417964 - DNA, 25 bp, Homo sapien
gtcattaagtaactaaagtatcttc

SEQ ID NO: 2417965 - DNA, 25 bp, Homo sapien
aattcctataggttgttttcagtca

SEQ ID NO: 2417966 - DNA, 25 bp, Homo sapien
tttgggaggacaaatcatctcaaat

SEQ ID NO: 2417967 - DNA, 25 bp, Homo sapien
aatagttttatttcgcaaagagaag

SEQ ID NO: 2417968 - DNA, 25 bp, Homo sapien
tcgcaaagagaagcctaagaatttt

SEQ ID NO: 2417969 - DNA, 25 bp, Homo sapien
taatttgggaggacaaatcatctca

SEQ ID NO: 2417970 - DNA, 25 bp, Homo sapien
agtacttatatcgaattccgcacaa

SEQ ID NO: 2417971 - DNA, 25 bp, Homo sapien
tgtaaaagtacttatatcgaattcc

SEQ ID NO: 2417972 - DNA, 25 bp, Homo sapien
tcgaattccgcacaaaatatttttg

SEQ ID NO: 2417973 - DNA, 25 bp, Homo sapien
taccatcttgctgtaaaagtactta

SEQ ID NO: 2417974 - DNA, 25 bp, Homo sapien
tcactgccggctggcttttccattt

SEQ ID NO: 2417975 - DNA, 25 bp, Homo sapien
tggcttttccattttctgttgtctc

SEQ ID NO: 2417976 - DNA, 25 bp, Homo sapien
ttttccattttctgttgtctccatc

SEQ ID NO: 2417977 - DNA, 25 bp, Homo sapien
gcttttccattttctgttgtctcca

SEQ ID NO: 2417978 - DNA, 25 bp, Homo sapien
ttttgtctccttatctacctttcac

SEQ ID NO: 2417979 - DNA, 25 bp, Homo sapien
catcagggttcctctagctaggcca

SEQ ID NO: 2417980 - DNA, 25 bp, Homo sapien
gaacatcagcattttaggaaaggac

SEQ ID NO: 2417981 - DNA, 25 bp, Homo sapien
gaaaattgaggccttgagagactaa

SEQ ID NO: 2417982 - DNA, 25 bp, Homo sapien
ccaccaacaaattaagaggatttct

SEQ ID NO: 2417983 - DNA, 25 bp, Homo sapien
tatttccaccaacaaattaagagga

SEQ ID NO: 2417984 - DNA, 25 bp, Homo sapien
tccaccaacaaattaagaggatttc

SEQ ID NO: 2417985 - DNA, 25 bp, Homo sapien
aaaataatcagatctgagatttatt

SEQ ID NO: 2417986 - DNA, 25 bp, Homo sapien
tatcctaagtggtatgatttttccc

SEQ ID NO: 2417987 - DNA, 25 bp, Homo sapien
tacagagactggcattatatcctaa

SEQ ID NO: 2417988 - DNA, 25 bp, Homo sapien
gggttacaatcaatataactaagcc

SEQ ID NO: 2417989 - DNA, 25 bp, Homo sapien
taaggtactatacaggcaattgaca

SEQ ID NO: 2417990 - DNA, 25 bp, Homo sapien
ttaagatgttgatatagttcagctc

SEQ ID NO: 2417991 - DNA, 25 bp, Homo sapien
gttttctggaattggcagtattgat

SEQ ID NO: 2417992 - DNA, 25 bp, Homo sapien
ctattactccacaaggataataacg

SEQ ID NO: 2417993 - DNA, 25 bp, Homo sapien
gagttcaaacgtccagcaaattcct

SEQ ID NO: 2417994 - DNA, 25 bp, Homo sapien
acttacctttaattctgttgttcat

SEQ ID NO: 2417995 - DNA, 25 bp, Homo sapien
tttaattctgttgttcattttacac

SEQ ID NO: 2417996 - DNA, 25 bp, Homo sapien
ctagtgttatatttaaaaggagaga

SEQ ID NO: 2417997 - DNA, 25 bp, Homo sapien
gatagaataatttattatttccaaa

SEQ ID NO: 2417998 - DNA, 25 bp, Homo sapien
gaccctgggttagatttctaacatg

SEQ ID NO: 2417999 - DNA, 25 bp, Homo sapien
ctgtccaacacagaacttgtatcca

SEQ ID NO: 2418000 - DNA, 25 bp, Homo sapien
aagcaaaaatggatgtacttgactt

SEQ ID NO: 2418001 - DNA, 25 bp, Homo sapien
tgtccaacacagaacttgtatccag

SEQ ID NO: 2418002 - DNA, 25 bp, Homo sapien
tggaatagcctagccttaagtacag

SEQ ID NO: 2418003 - DNA, 25 bp, Homo sapien
taaaaggcccagatcagttgctgat

SEQ ID NO: 2418004 - DNA, 25 bp, Homo sapien
taagtacagtgtatacagcaggcac

SEQ ID NO: 2418005 - DNA, 25 bp, Homo sapien
aagagagttgaatagacgtttgcca

SEQ ID NO: 2418006 - DNA, 25 bp, Homo sapien
taccaagcaatgctgaaacactgtt

SEQ ID NO: 2418007 - DNA, 25 bp, Homo sapien
cacctcaagggtgatctctggcttc

SEQ ID NO: 2418008 - DNA, 25 bp, Homo sapien
taatatggcttttaggtgcttgcaa

SEQ ID NO: 2418009 - DNA, 25 bp, Homo sapien
tctgggccctctagcaaatgcctga

SEQ ID NO: 2418010 - DNA, 25 bp, Homo sapien
gggaatcaggcgaatcttttataat

SEQ ID NO: 2418011 - DNA, 25 bp, Homo sapien
tttccacgctctaagattcctttta

SEQ ID NO: 2418012 - DNA, 25 bp, Homo sapien
cacttgtggagtttcatccatttca

SEQ ID NO: 2418013 - DNA, 25 bp, Homo sapien
aattcttcttttccacgctctaaga

SEQ ID NO: 2418014 - DNA, 25 bp, Homo sapien
ccaagacttttcctgttcataatct

SEQ ID NO: 2418015 - DNA, 25 bp, Homo sapien
gtcttgccaagacttttcctgttca

SEQ ID NO: 2418016 - DNA, 25 bp, Homo sapien
cttgccaagacttttcctgttcata

SEQ ID NO: 2418017 - DNA, 25 bp, Homo sapien
ctctgagtcttgccaagacttttcc

SEQ ID NO: 2418018 - DNA, 25 bp, Homo sapien
attcattccacatgatacggtattg

SEQ ID NO: 2418019 - DNA, 25 bp, Homo sapien
tcctgcatgccatcagacattccaa

SEQ ID NO: 2418020 - DNA, 25 bp, Homo sapien
tcagacattccaagactctttgatg

SEQ ID NO: 2418021 - DNA, 25 bp, Homo sapien
tgatatgggctctgacaagggtttc

SEQ ID NO: 2418022 - DNA, 25 bp, Homo sapien
gaaataggtagaggatcattttttc

SEQ ID NO: 2418023 - DNA, 25 bp, Homo sapien
tgtaccaactgtggaaataggtaga

SEQ ID NO: 2418024 - DNA, 25 bp, Homo sapien
tcttgtaccaactgtggaaataggt

SEQ ID NO: 2418025 - DNA, 25 bp, Homo sapien
taccaactgtggaaataggtagagg

SEQ ID NO: 2418026 - DNA, 25 bp, Homo sapien
acaataacactggctaatggaacta

SEQ ID NO: 2418027 - DNA, 25 bp, Homo sapien
caataacactggctaatggaactac

SEQ ID NO: 2418028 - DNA, 25 bp, Homo sapien
tctaactgatcttttgctcgttcca

SEQ ID NO: 2418029 - DNA, 25 bp, Homo sapien
gatcttttgctcgttccaaagggac

SEQ ID NO: 2418030 - DNA, 25 bp, Homo sapien
gaaatgatcataggccagtaacggg

SEQ ID NO: 2418031 - DNA, 25 bp, Homo sapien
gacttccatcgattttatatctggg

SEQ ID NO: 2418032 - DNA, 25 bp, Homo sapien
aggagttaatctgttttccctcata

SEQ ID NO: 2418033 - DNA, 25 bp, Homo sapien
agttaatctgttttccctcataaat

SEQ ID NO: 2418034 - DNA, 25 bp, Homo sapien
ggagttaatctgttttccctcataa

SEQ ID NO: 2418035 - DNA, 25 bp, Homo sapien
gagttaatctgttttccctcataaa

SEQ ID NO: 2418036 - DNA, 25 bp, Homo sapien
taatccggtagtctgtaactcttcc

SEQ ID NO: 2418037 - DNA, 25 bp, Homo sapien
tcttctagaatggatcgagaactgc

SEQ ID NO: 2418038 - DNA, 25 bp, Homo sapien
cgagaactgctaaggacgtgcaaaa

SEQ ID NO: 2418039 - DNA, 25 bp, Homo sapien
aaatctctcctccatggctactaag

SEQ ID NO: 2418040 - DNA, 25 bp, Homo sapien
gataagctccagtacaatagtgtaa

SEQ ID NO: 2418041 - DNA, 25 bp, Homo sapien
tccgataagctccagtacaatagtg

SEQ ID NO: 2418042 - DNA, 25 bp, Homo sapien
tatttacatctacaggtgaaatccg

SEQ ID NO: 2418043 - DNA, 25 bp, Homo sapien
tacaggtgaaatccgataagctcca

SEQ ID NO: 2418044 - DNA, 25 bp, Homo sapien
gttatttgtccttggtgtacaccac

SEQ ID NO: 2418045 - DNA, 25 bp, Homo sapien
tgtacaccactttaatgttattgtt

SEQ ID NO: 2418046 - DNA, 25 bp, Homo sapien
tttaaacgagccttctcgactgccg

SEQ ID NO: 2418047 - DNA, 25 bp, Homo sapien
actgccgccacctagatgcgaatca

SEQ ID NO: 2418048 - DNA, 25 bp, Homo sapien
cataattggcagatgtgttagcatg

SEQ ID NO: 2418049 - DNA, 25 bp, Homo sapien
tgtgcatctttgtgatgaagtagct

SEQ ID NO: 2418050 - DNA, 25 bp, Homo sapien
catctttgtgatgaagtagctccac

SEQ ID NO: 2418051 - DNA, 25 bp, Homo sapien
tggcagatgtgttagcatgctgttc

SEQ ID NO: 2418052 - DNA, 25 bp, Homo sapien
gccaagtcaaaatgttgctgtacta

SEQ ID NO: 2418053 - DNA, 25 bp, Homo sapien
ttcaatttggtagcaagatgccgtc

SEQ ID NO: 2418054 - DNA, 25 bp, Homo sapien
tgccgtcctgcacgaacactatgaa

SEQ ID NO: 2418055 - DNA, 25 bp, Homo sapien
tgtaatagtagttgaagccaagtca

SEQ ID NO: 2418056 - DNA, 25 bp, Homo sapien
aaaaagaggcttatgctggaaacca

SEQ ID NO: 2418057 - DNA, 25 bp, Homo sapien
acacaaaatcttactcattccaggg

SEQ ID NO: 2418058 - DNA, 25 bp, Homo sapien
gatgtggatctatttgacaatcaac

SEQ ID NO: 2418059 - DNA, 25 bp, Homo sapien
gcagctagaagtagtgtacaacaag

SEQ ID NO: 2418060 - DNA, 25 bp, Homo sapien
caagaccaactcacatttttgaatc

SEQ ID NO: 2418061 - DNA, 25 bp, Homo sapien
gatcagatacaaggctgtcttcacc

SEQ ID NO: 2418062 - DNA, 25 bp, Homo sapien
ctcttttttagaacgatcagataca

SEQ ID NO: 2418063 - DNA, 25 bp, Homo sapien
tgggtaggtgtggatcaagaccaac

SEQ ID NO: 2418064 - DNA, 25 bp, Homo sapien
aatttgcagcaagcttgttatgttc

SEQ ID NO: 2418065 - DNA, 25 bp, Homo sapien
catgaatcgtttcctggacacagtc

SEQ ID NO: 2418066 - DNA, 25 bp, Homo sapien
gtcttcaagcattcgcacatgacta

SEQ ID NO: 2418067 - DNA, 25 bp, Homo sapien
tgttatgttcatgaatcgtttcctg

SEQ ID NO: 2418068 - DNA, 25 bp, Homo sapien
gagtagagtacgagcctcatgttgg

SEQ ID NO: 2418069 - DNA, 25 bp, Homo sapien
tgcaacaaggccatgcagaatactg

SEQ ID NO: 2418070 - DNA, 25 bp, Homo sapien
gcagcactctggatctgcccgagga

SEQ ID NO: 2418071 - DNA, 25 bp, Homo sapien
caacacgttctgcattctccatgag

SEQ ID NO: 2418072 - DNA, 25 bp, Homo sapien
agggaaaacaattatgttgacaaga

SEQ ID NO: 2418073 - DNA, 25 bp, Homo sapien
gacaagagtatgtgcaattcagata

SEQ ID NO: 2418074 - DNA, 25 bp, Homo sapien
atgttgacaagagtatgtgcaattc

SEQ ID NO: 2418075 - DNA, 25 bp, Homo sapien
actacacaccaatgtatcttacata

SEQ ID NO: 2418076 - DNA, 25 bp, Homo sapien
cagagtcactcacaataaaattcac

SEQ ID NO: 2418077 - DNA, 25 bp, Homo sapien
gaatttaaaacatgtgctccagagt

SEQ ID NO: 2418078 - DNA, 25 bp, Homo sapien
ctcctgtaaattttggtcttcttga

SEQ ID NO: 2418079 - DNA, 25 bp, Homo sapien
tgtaaattttggtcttcttgagtcc

SEQ ID NO: 2418080 - DNA, 25 bp, Homo sapien
ccatataagggcagtgatccacaac

SEQ ID NO: 2418081 - DNA, 25 bp, Homo sapien
caaaggaatgattccttgggttcta

SEQ ID NO: 2418082 - DNA, 25 bp, Homo sapien
gaagattctactgagcaagtccaca

SEQ ID NO: 2418083 - DNA, 25 bp, Homo sapien
caaactcgacatgctgcctgcaaga

SEQ ID NO: 2418084 - DNA, 25 bp, Homo sapien
tttcaagacgcatctccccttcatg

SEQ ID NO: 2418085 - DNA, 25 bp, Homo sapien
tggaaaatacaaggtgagtggatag

SEQ ID NO: 2418086 - DNA, 25 bp, Homo sapien
agtggatagggaagacctcaggatc

SEQ ID NO: 2418087 - DNA, 25 bp, Homo sapien
ccttctagacccactttgctggagg

SEQ ID NO: 2418088 - DNA, 25 bp, Homo sapien
tgaaaacgaacagaggctatggacc

SEQ ID NO: 2418089 - DNA, 25 bp, Homo sapien
tcgggagtgtctggtgccacagaca

SEQ ID NO: 2418090 - DNA, 25 bp, Homo sapien
gggactatgctttccccgatcatct

SEQ ID NO: 2418091 - DNA, 25 bp, Homo sapien
agtcagcgcacagtcgggagtgtct

SEQ ID NO: 2418092 - DNA, 25 bp, Homo sapien
cgggctcgcgcgtgcgcacagcgct

SEQ ID NO: 2418093 - DNA, 25 bp, Homo sapien
tcgggctcgcgcgtgcgcacagcgc

SEQ ID NO: 2418094 - DNA, 25 bp, Homo sapien
cctcgagattttccacccgctaatt

SEQ ID NO: 2418095 - DNA, 25 bp, Homo sapien
tgaaagcctccccaacagcgaagta

SEQ ID NO: 2418096 - DNA, 25 bp, Homo sapien
cccgctaattttcccagtcacccat

SEQ ID NO: 2418097 - DNA, 25 bp, Homo sapien
ctcgtagggccaggcgtcccagtcg

SEQ ID NO: 2418098 - DNA, 25 bp, Homo sapien
ccttctctgtctctccacccaggcc

SEQ ID NO: 2418099 - DNA, 25 bp, Homo sapien
ccccttctctgtctctccacccagg

SEQ ID NO: 2418100 - DNA, 25 bp, Homo sapien
ctccccttctctgtctctccaccca

SEQ ID NO: 2418101 - DNA, 25 bp, Homo sapien
ccggtctccccttctctgtctctcc

SEQ ID NO: 2418102 - DNA, 25 bp, Homo sapien
tggcttcccggccttccgtccgctg

SEQ ID NO: 2418103 - DNA, 25 bp, Homo sapien
ctgcctccgtccgattctgcgtctg

SEQ ID NO: 2418104 - DNA, 25 bp, Homo sapien
cttgagtgcataggtcccggttggt

SEQ ID NO: 2418105 - DNA, 25 bp, Homo sapien
cccgccggtgatggcgttgaacgcc

SEQ ID NO: 2418106 - DNA, 25 bp, Homo sapien
gacaaatcagagagttgcaacaaga

SEQ ID NO: 2418107 - DNA, 25 bp, Homo sapien
taatgaagtcgcgagacatcggcca

SEQ ID NO: 2418108 - DNA, 25 bp, Homo sapien
cacgttagttatgggaatccagcaa

SEQ ID NO: 2418109 - DNA, 25 bp, Homo sapien
tccagttagcactgctgttgttagc

SEQ ID NO: 2418110 - DNA, 25 bp, Homo sapien
cagctgcaatgatctgtacttaacc

SEQ ID NO: 2418111 - DNA, 25 bp, Homo sapien
ccaaatcataaattgaggatgctgt

SEQ ID NO: 2418112 - DNA, 25 bp, Homo sapien
taatggttaacttgcagaatatgac

SEQ ID NO: 2418113 - DNA, 25 bp, Homo sapien
ccttgacaatgggaggaattttaat

SEQ ID NO: 2418114 - DNA, 25 bp, Homo sapien
ggttgaatcatgtcccctagaaggt

SEQ ID NO: 2418115 - DNA, 25 bp, Homo sapien
tgaggacagaggcaatgagttacgc

SEQ ID NO: 2418116 - DNA, 25 bp, Homo sapien
gagttacgcaaggactgctagccac

SEQ ID NO: 2418117 - DNA, 25 bp, Homo sapien
tcctaacttgatacacctgggaagg

SEQ ID NO: 2418118 - DNA, 25 bp, Homo sapien
tattcatctgtttcagggtaggcag

SEQ ID NO: 2418119 - DNA, 25 bp, Homo sapien
gaaaaaacgcaagccacatgagcat

SEQ ID NO: 2418120 - DNA, 25 bp, Homo sapien
gccaaagtttaaagacatgccagag

SEQ ID NO: 2418121 - DNA, 25 bp, Homo sapien
gtctcatccttattctgtacctggg

SEQ ID NO: 2418122 - DNA, 25 bp, Homo sapien
ggtccttgcaaatacaatggccaaa

SEQ ID NO: 2418123 - DNA, 25 bp, Homo sapien
aatttcataaagagtggtccttgca

SEQ ID NO: 2418124 - DNA, 25 bp, Homo sapien
tcttaagcttgatccagacctgcca

SEQ ID NO: 2418125 - DNA, 25 bp, Homo sapien
tagtccctgggtaagtccagagttc

SEQ ID NO: 2418126 - DNA, 25 bp, Homo sapien
tatacctagtatggtttggcaacct

SEQ ID NO: 2418127 - DNA, 25 bp, Homo sapien
taaagcacatttggatagggagtca

SEQ ID NO: 2418128 - DNA, 25 bp, Homo sapien
tcagtgaacatgacctctgaagtcc

SEQ ID NO: 2418129 - DNA, 25 bp, Homo sapien
caactggcctgtggtacaatatacc

SEQ ID NO: 2418130 - DNA, 25 bp, Homo sapien
tagtaagtatgcaacccagggtgtc

SEQ ID NO: 2418131 - DNA, 25 bp, Homo sapien
tccaaggtcctaatgaaaagcagct

SEQ ID NO: 2418132 - DNA, 25 bp, Homo sapien
gcacctggtcggcaatatagattaa

SEQ ID NO: 2418133 - DNA, 25 bp, Homo sapien
cagaataagcagtaaatggtcacct

SEQ ID NO: 2418134 - DNA, 25 bp, Homo sapien
gactgttgaaccactccaggcatga

SEQ ID NO: 2418135 - DNA, 25 bp, Homo sapien
tagacttgcaccagagactgttgaa

SEQ ID NO: 2418136 - DNA, 25 bp, Homo sapien
tatgcctgatctcttattagacttg

SEQ ID NO: 2418137 - DNA, 25 bp, Homo sapien
tgaactccaaagctgaggcacactg

SEQ ID NO: 2418138 - DNA, 25 bp, Homo sapien
gaatgtttgtcactcggcgctctct

SEQ ID NO: 2418139 - DNA, 25 bp, Homo sapien
cagcatgccccatactgccaggata

SEQ ID NO: 2418140 - DNA, 25 bp, Homo sapien
ggttaatcggccatagagcctctct

SEQ ID NO: 2418141 - DNA, 25 bp, Homo sapien
tctggaagagccctttaatctgggt

SEQ ID NO: 2418142 - DNA, 25 bp, Homo sapien
cagtagaaaaagtacagtttgaact

SEQ ID NO: 2418143 - DNA, 25 bp, Homo sapien
agaaaaagtacagtttgaactctag

SEQ ID NO: 2418144 - DNA, 25 bp, Homo sapien
tagaaaaagtacagtttgaactcta

SEQ ID NO: 2418145 - DNA, 25 bp, Homo sapien
aataacttaacattaaatcaggttg

SEQ ID NO: 2418146 - DNA, 25 bp, Homo sapien
atgaccaggtaaacctaaataatct

SEQ ID NO: 2418147 - DNA, 25 bp, Homo sapien
cattaaatcaggttgtcattctcat

SEQ ID NO: 2418148 - DNA, 25 bp, Homo sapien
caaacatctttactgtcagtatttt

SEQ ID NO: 2418149 - DNA, 25 bp, Homo sapien
gactcctactgtgctgtcacactgg

SEQ ID NO: 2418150 - DNA, 25 bp, Homo sapien
cactggtttttggatttaagagtct

SEQ ID NO: 2418151 - DNA, 25 bp, Homo sapien
gcataggtgggtcaagactcctact

SEQ ID NO: 2418152 - DNA, 25 bp, Homo sapien
taaatttagtttccaagtgctctgg

SEQ ID NO: 2418153 - DNA, 25 bp, Homo sapien
gaaagctctgtggaaatccttgttg

SEQ ID NO: 2418154 - DNA, 25 bp, Homo sapien
tgagtacgttcaaagtgatgtagga

SEQ ID NO: 2418155 - DNA, 25 bp, Homo sapien
tgttgagcgctctcttgagtacgtt

SEQ ID NO: 2418156 - DNA, 25 bp, Homo sapien
ctgtggaaatccttgttgagcgctc

SEQ ID NO: 2418157 - DNA, 25 bp, Homo sapien
gaataggagccaatgactccacaag

SEQ ID NO: 2418158 - DNA, 25 bp, Homo sapien
taggagccaatgactccacaagtca

SEQ ID NO: 2418159 - DNA, 25 bp, Homo sapien
taaaaccaccgaataggagccaatg

SEQ ID NO: 2418160 - DNA, 25 bp, Homo sapien
gtcaatggctaaaaccaccgaatag

SEQ ID NO: 2418161 - DNA, 25 bp, Homo sapien
aagagtggaagagtttaggcatcat

SEQ ID NO: 2418162 - DNA, 25 bp, Homo sapien
tgctccctcaggcatgaaaaaggac

SEQ ID NO: 2418163 - DNA, 25 bp, Homo sapien
aaatagtttataactctccactggc

SEQ ID NO: 2418164 - DNA, 25 bp, Homo sapien
cactggcttcaatcacaggcaatca

SEQ ID NO: 2418165 - DNA, 25 bp, Homo sapien
tggtgtactagagtaagcactacct

SEQ ID NO: 2418166 - DNA, 25 bp, Homo sapien
ctaatgacccatcaggttggtgtac

SEQ ID NO: 2418167 - DNA, 25 bp, Homo sapien
tgaagccagttgaaactaatgaccc

SEQ ID NO: 2418168 - DNA, 25 bp, Homo sapien
agccctccccagtgaataaaacatg

SEQ ID NO: 2418169 - DNA, 25 bp, Homo sapien
gaatgaggatagctatgcaagagaa

SEQ ID NO: 2418170 - DNA, 25 bp, Homo sapien
ggcagcccatgaaaactactggaat

SEQ ID NO: 2418171 - DNA, 25 bp, Homo sapien
tgaaaactactggaatgaggatagc

SEQ ID NO: 2418172 - DNA, 25 bp, Homo sapien
ggaatgaggatagctatgcaagaga

SEQ ID NO: 2418173 - DNA, 25 bp, Homo sapien
gactgggagtccctaggctacagga

SEQ ID NO: 2418174 - DNA, 25 bp, Homo sapien
catgtatcaggaaagaggaaccaac

SEQ ID NO: 2418175 - DNA, 25 bp, Homo sapien
taggccgacccagaacaaatatatg

SEQ ID NO: 2418176 - DNA, 25 bp, Homo sapien
taaaaatatgggtaggcctcttggc

SEQ ID NO: 2418177 - DNA, 25 bp, Homo sapien
atgatagtgtcactgcagtccagca

SEQ ID NO: 2418178 - DNA, 25 bp, Homo sapien
gcatgggtgacagaaagagatcctg

SEQ ID NO: 2418179 - DNA, 25 bp, Homo sapien
tggcttgagccttagagtttgaggt

SEQ ID NO: 2418180 - DNA, 25 bp, Homo sapien
tgggaggctgatgtaagaggatggc

SEQ ID NO: 2418181 - DNA, 25 bp, Homo sapien
taaaaatatgggtttgcacccacta

SEQ ID NO: 2418182 - DNA, 25 bp, Homo sapien
cacccactagcattgaggagatgat

SEQ ID NO: 2418183 - DNA, 25 bp, Homo sapien
gagatgatcactctaacggtccttg

SEQ ID NO: 2418184 - DNA, 25 bp, Homo sapien
tatgagatagttcataaacaaacat

SEQ ID NO: 2418185 - DNA, 25 bp, Homo sapien
tgtgaatctgtcatttcgccaagcc

SEQ ID NO: 2418186 - DNA, 25 bp, Homo sapien
tgcttttcatcagactatccagtag

SEQ ID NO: 2418187 - DNA, 25 bp, Homo sapien
accatgctcagccattaggaagtat

SEQ ID NO: 2418188 - DNA, 25 bp, Homo sapien
tatttagcacatgtagggtagagcc

SEQ ID NO: 2418189 - DNA, 25 bp, Homo sapien
taaaaactgatagcaattgaattac

SEQ ID NO: 2418190 - DNA, 25 bp, Homo sapien
cagtcccatcaactttattctagta

SEQ ID NO: 2418191 - DNA, 25 bp, Homo sapien
gaatacttttgagtacagatgctgt

SEQ ID NO: 2418192 - DNA, 25 bp, Homo sapien
attctagtattttaagaacattgtc

SEQ ID NO: 2418193 - DNA, 25 bp, Homo sapien
cctggggtttggcagcggatgggag

SEQ ID NO: 2418194 - DNA, 25 bp, Homo sapien
aagtaccaggttccccgactcagct

SEQ ID NO: 2418195 - DNA, 25 bp, Homo sapien
tgggagtggaggttgagggtacaac

SEQ ID NO: 2418196 - DNA, 25 bp, Homo sapien
ttgagggtacaacagaagaccagaa

SEQ ID NO: 2418197 - DNA, 25 bp, Homo sapien
caacaaatagatacaaagctacctc

SEQ ID NO: 2418198 - DNA, 25 bp, Homo sapien
caaatagatacaaagctacctctaa

SEQ ID NO: 2418199 - DNA, 25 bp, Homo sapien
tagatacaaagctacctctaaagac

SEQ ID NO: 2418200 - DNA, 25 bp, Homo sapien
aatagatacaaagctacctctaaag

SEQ ID NO: 2418201 - DNA, 25 bp, Homo sapien
cacagagcatgcagatcgagaggat

SEQ ID NO: 2418202 - DNA, 25 bp, Homo sapien
tcactgacgagatgaggaaccccag

SEQ ID NO: 2418203 - DNA, 25 bp, Homo sapien
taccaagaacattccaccgacgctt

SEQ ID NO: 2418204 - DNA, 25 bp, Homo sapien
gagaggattccaaatcgccaccaca

SEQ ID NO: 2418205 - DNA, 25 bp, Homo sapien
gaactgctggataaccggcagtact

SEQ ID NO: 2418206 - DNA, 25 bp, Homo sapien
gcagtacttccaaccgcgtgcctta

SEQ ID NO: 2418207 - DNA, 25 bp, Homo sapien
tgtaggtcaggcactgagggctctt

SEQ ID NO: 2418208 - DNA, 25 bp, Homo sapien
tacaataccgttaccagtgccagct

SEQ ID NO: 2418209 - DNA, 25 bp, Homo sapien
tatcacatagccagaacacaggtct

SEQ ID NO: 2418210 - DNA, 25 bp, Homo sapien
ggtctataatcaatatggcccctcc

SEQ ID NO: 2418211 - DNA, 25 bp, Homo sapien
gtcacacacaatataggccaaactg

SEQ ID NO: 2418212 - DNA, 25 bp, Homo sapien
ggtgttcagagactagatggaccat

SEQ ID NO: 2418213 - DNA, 25 bp, Homo sapien
catcatacttgataggtgtcagtct

SEQ ID NO: 2418214 - DNA, 25 bp, Homo sapien
ggtgtcagtcttgtaatcagtatat

SEQ ID NO: 2418215 - DNA, 25 bp, Homo sapien
catacttgataggtgtcagtcttgt

SEQ ID NO: 2418216 - DNA, 25 bp, Homo sapien
gataggtgtcagtcttgtaatcagt

SEQ ID NO: 2418217 - DNA, 25 bp, Homo sapien
aacaaaagctatggttaagcaccct

SEQ ID NO: 2418218 - DNA, 25 bp, Homo sapien
caaaagctatggttaagcacccttt

SEQ ID NO: 2418219 - DNA, 25 bp, Homo sapien
aacaacaaaagctatggttaagcac

SEQ ID NO: 2418220 - DNA, 25 bp, Homo sapien
caacaaaagctatggttaagcaccc

SEQ ID NO: 2418221 - DNA, 25 bp, Homo sapien
gcaaaaagagtgaagaacactttgg

SEQ ID NO: 2418222 - DNA, 25 bp, Homo sapien
caaaaagagtgaagaacactttgga

SEQ ID NO: 2418223 - DNA, 25 bp, Homo sapien
ggcaaaaagagtgaagaacactttg

SEQ ID NO: 2418224 - DNA, 25 bp, Homo sapien
tgagtaacatgatgaccagggattt

SEQ ID NO: 2418225 - DNA, 25 bp, Homo sapien
aacatgatgaccagggatttgcttt

SEQ ID NO: 2418226 - DNA, 25 bp, Homo sapien
tgtgagtaacatgatgaccagggat

SEQ ID NO: 2418227 - DNA, 25 bp, Homo sapien
gtaacatgatgaccagggatttgct

SEQ ID NO: 2418228 - DNA, 25 bp, Homo sapien
gacagcaaggtcttccaacccaata

SEQ ID NO: 2418229 - DNA, 25 bp, Homo sapien
tttcagcaagtataatcaccaagac

SEQ ID NO: 2418230 - DNA, 25 bp, Homo sapien
aaaccattaaatttgctgggatgat

SEQ ID NO: 2418231 - DNA, 25 bp, Homo sapien
tataatcaccaagacagcaaggtct

SEQ ID NO: 2418232 - DNA, 25 bp, Homo sapien
tgctcaatagggttctcaaactgaa

SEQ ID NO: 2418233 - DNA, 25 bp, Homo sapien
tgaatatgctccagtcaggcgccta

SEQ ID NO: 2418234 - DNA, 25 bp, Homo sapien
gataacaccatttagcatgaggcct

SEQ ID NO: 2418235 - DNA, 25 bp, Homo sapien
tcagcccattggtaggatcttcaat

SEQ ID NO: 2418236 - DNA, 25 bp, Homo sapien
tatcattagctgttagggtaaccac

SEQ ID NO: 2418237 - DNA, 25 bp, Homo sapien
cagatgtatttagaaacgggtccca

SEQ ID NO: 2418238 - DNA, 25 bp, Homo sapien
tgcctcaaagctgcaagcgtatgtg

SEQ ID NO: 2418239 - DNA, 25 bp, Homo sapien
aggaaacacttgtcttatcattagc

SEQ ID NO: 2418240 - DNA, 25 bp, Homo sapien
ggccaatctcagtaatccagagcag

SEQ ID NO: 2418241 - DNA, 25 bp, Homo sapien
tgaaactagctttgcccacctggaa

SEQ ID NO: 2418242 - DNA, 25 bp, Homo sapien
tgtcagactgcactacataagcacg

SEQ ID NO: 2418243 - DNA, 25 bp, Homo sapien
gttccatgcatggtgtttacggcca

SEQ ID NO: 2418244 - DNA, 25 bp, Homo sapien
gcacttttcaagacataaagataaa

SEQ ID NO: 2418245 - DNA, 25 bp, Homo sapien
cccatcaaccattagactgaaggat

SEQ ID NO: 2418246 - DNA, 25 bp, Homo sapien
aatgatctattgcagtgagtctcaa

SEQ ID NO: 2418247 - DNA, 25 bp, Homo sapien
gactgaaggatgacctcatatatta

SEQ ID NO: 2418248 - DNA, 25 bp, Homo sapien
ctggtctgtcccagcgtcacatggt

SEQ ID NO: 2418249 - DNA, 25 bp, Homo sapien
tggtctgtcccagcgtcacatggtg

SEQ ID NO: 2418250 - DNA, 25 bp, Homo sapien
tcctggtctgtcccagcgtcacatg

SEQ ID NO: 2418251 - DNA, 25 bp, Homo sapien
cagaaaatactgatagacatcatac

SEQ ID NO: 2418252 - DNA, 25 bp, Homo sapien
taaatcgaactccaaattacagcct

SEQ ID NO: 2418253 - DNA, 25 bp, Homo sapien
tcaaagaaattatactccaagtaaa

SEQ ID NO: 2418254 - DNA, 25 bp, Homo sapien
ggcaaacttgatagtcgtttcaaag

SEQ ID NO: 2418255 - DNA, 25 bp, Homo sapien
catagcctaggtttgctggggcaaa

SEQ ID NO: 2418256 - DNA, 25 bp, Homo sapien
tctgagtaggagagtaggatagcca

SEQ ID NO: 2418257 - DNA, 25 bp, Homo sapien
gctgtatgcctgaagtccccaagta

SEQ ID NO: 2418258 - DNA, 25 bp, Homo sapien
gcatgtactctgctctggtctaagg

SEQ ID NO: 2418259 - DNA, 25 bp, Homo sapien
ccatattctggacaggctgtatgcc

SEQ ID NO: 2418260 - DNA, 25 bp, Homo sapien
aagtcgaccaaaacataaattactg

SEQ ID NO: 2418261 - DNA, 25 bp, Homo sapien
gctgatccagtgtgcatgtcctatt

SEQ ID NO: 2418262 - DNA, 25 bp, Homo sapien
tactgagctgatccagtgtgcatgt

SEQ ID NO: 2418263 - DNA, 25 bp, Homo sapien
gtccagaagaaacattgtcatgaat

SEQ ID NO: 2418264 - DNA, 25 bp, Homo sapien
gcttcctctggaaagggcctattga

SEQ ID NO: 2418265 - DNA, 25 bp, Homo sapien
cagttgtattctgatactgtgagtg

SEQ ID NO: 2418266 - DNA, 25 bp, Homo sapien
tgaaatatcatgcaaaatagcttcc

SEQ ID NO: 2418267 - DNA, 25 bp, Homo sapien
gagctcgaagtatctaaatttcccc

SEQ ID NO: 2418268 - DNA, 25 bp, Homo sapien
gatatatcttttagggcttaggcag

SEQ ID NO: 2418269 - DNA, 25 bp, Homo sapien
gatattgcccatttaacaggtctta

SEQ ID NO: 2418270 - DNA, 25 bp, Homo sapien
tccagaaagcgtatgtgtcaggcaa

SEQ ID NO: 2418271 - DNA, 25 bp, Homo sapien
gacagtgtaacagatgacctttgac

SEQ ID NO: 2418272 - DNA, 25 bp, Homo sapien
tacagaaagtttacacacccatgaa

SEQ ID NO: 2418273 - DNA, 25 bp, Homo sapien
tgggaccctctccagatgagttaaa

SEQ ID NO: 2418274 - DNA, 25 bp, Homo sapien
gcattctagcatcttagtggtcccc

SEQ ID NO: 2418275 - DNA, 25 bp, Homo sapien
taatacagtgattatacaccctggc

SEQ ID NO: 2418276 - DNA, 25 bp, Homo sapien
ggtttgagaactcctaacatagtgt

SEQ ID NO: 2418277 - DNA, 25 bp, Homo sapien
aatactttggcagtgtaaccctggc

SEQ ID NO: 2418278 - DNA, 25 bp, Homo sapien
tgtttgataaacaagcaaaggataa

SEQ ID NO: 2418279 - DNA, 25 bp, Homo sapien
cctggcaatctaacatccattgtac

SEQ ID NO: 2418280 - DNA, 25 bp, Homo sapien
gattaagtacaaagcaccatgccat

SEQ ID NO: 2418281 - DNA, 25 bp, Homo sapien
tctgacaagggaggaagatcattac

SEQ ID NO: 2418282 - DNA, 25 bp, Homo sapien
gggctggcctcgatcaactaaaaac

SEQ ID NO: 2418283 - DNA, 25 bp, Homo sapien
gaaaaagttctggacgcctgctctc

SEQ ID NO: 2418284 - DNA, 25 bp, Homo sapien
acccgggtgtcggaggttgcagtca

SEQ ID NO: 2418285 - DNA, 25 bp, Homo sapien
cagccaagatcatgccactgcactc

SEQ ID NO: 2418286 - DNA, 25 bp, Homo sapien
ggaattcccgaagacctcggctgca

SEQ ID NO: 2418287 - DNA, 25 bp, Homo sapien
ctcgctggaattcccgaagacctcg

SEQ ID NO: 2418288 - DNA, 25 bp, Homo sapien
cagccacccggtgttcggatgccag

SEQ ID NO: 2418289 - DNA, 25 bp, Homo sapien
agcaccgctacgaccagcagctgca

SEQ ID NO: 2418290 - DNA, 25 bp, Homo sapien
agcctcgcccacgctatcccggggc

SEQ ID NO: 2418291 - DNA, 25 bp, Homo sapien
gcctcgcccacgctatcccggggcg

SEQ ID NO: 2418292 - DNA, 25 bp, Homo sapien
cagcctcgcccacgctatcccgggg

SEQ ID NO: 2418293 - DNA, 25 bp, Homo sapien
cctcgcccacgctatcccggggcgc

SEQ ID NO: 2418294 - DNA, 25 bp, Homo sapien
cccgccaggtgcagacgcttcgcac

SEQ ID NO: 2418295 - DNA, 25 bp, Homo sapien
gccatcgcccgccaggtgcagacgc

SEQ ID NO: 2418296 - DNA, 25 bp, Homo sapien
tcgcccgccaggtgcagacgcttcg

SEQ ID NO: 2418297 - DNA, 25 bp, Homo sapien
cgggcgccatcgcccgccaggtgca

SEQ ID NO: 2418298 - DNA, 25 bp, Homo sapien
actcctagccccagcgagaggtttc

SEQ ID NO: 2418299 - DNA, 25 bp, Homo sapien
gaggtttcctcttccggcacctgac

SEQ ID NO: 2418300 - DNA, 25 bp, Homo sapien
cagcgagaggtttcctcttccggca

SEQ ID NO: 2418301 - DNA, 25 bp, Homo sapien
tagccccagcgagaggtttcctctt

SEQ ID NO: 2418302 - DNA, 25 bp, Homo sapien
tgctgtattctagtcagaccagaac

SEQ ID NO: 2418303 - DNA, 25 bp, Homo sapien
gataatctccactggaaaggtggaa

SEQ ID NO: 2418304 - DNA, 25 bp, Homo sapien
aacccttggatctctttgagtctac

SEQ ID NO: 2418305 - DNA, 25 bp, Homo sapien
gaacaatagaacactctgcctgtta

SEQ ID NO: 2418306 - DNA, 25 bp, Homo sapien
aacatgtcagtgtgaggtagagtca

SEQ ID NO: 2418307 - DNA, 25 bp, Homo sapien
caaggaagggtattctggcatttca

SEQ ID NO: 2418308 - DNA, 25 bp, Homo sapien
tagtgccagttaagtccaggtcagc

SEQ ID NO: 2418309 - DNA, 25 bp, Homo sapien
gctttttaatccagtcagatcagag

SEQ ID NO: 2418310 - DNA, 25 bp, Homo sapien
gacccatcatcattcgtatgttagg

SEQ ID NO: 2418311 - DNA, 25 bp, Homo sapien
tattgcaatagttcctctctccctg

SEQ ID NO: 2418312 - DNA, 25 bp, Homo sapien
gcctctttagaggtactaatcccac

SEQ ID NO: 2418313 - DNA, 25 bp, Homo sapien
cccacagttctgaagcccgggaagt

SEQ ID NO: 2418314 - DNA, 25 bp, Homo sapien
tgtacaccagtctctcaatagggag

SEQ ID NO: 2418315 - DNA, 25 bp, Homo sapien
tcatgaggaaggataacagaatggc

SEQ ID NO: 2418316 - DNA, 25 bp, Homo sapien
ccatctttatggaacagagtcagta

SEQ ID NO: 2418317 - DNA, 25 bp, Homo sapien
gagttagggccaaaagtaatcaaga

SEQ ID NO: 2418318 - DNA, 25 bp, Homo sapien
gccagtggtccttgagttcatggat

SEQ ID NO: 2418319 - DNA, 25 bp, Homo sapien
gagtgcaggcaacaccctagtctct

SEQ ID NO: 2418320 - DNA, 25 bp, Homo sapien
ttcatggatgatagtggtgaatgct

SEQ ID NO: 2418321 - DNA, 25 bp, Homo sapien
ggtgaatgctgtctggttataccac

SEQ ID NO: 2418322 - DNA, 25 bp, Homo sapien
tgaaggcccacccaaagttcaggca

SEQ ID NO: 2418323 - DNA, 25 bp, Homo sapien
tgggatgtcctaattcaagggtttc

SEQ ID NO: 2418324 - DNA, 25 bp, Homo sapien
gagtcttttcgttggtgctgaccga

SEQ ID NO: 2418325 - DNA, 25 bp, Homo sapien
gcattcacagggtgatccctcctca

SEQ ID NO: 2418326 - DNA, 25 bp, Homo sapien
ttgggcaggtcttgacaagcatcat

SEQ ID NO: 2418327 - DNA, 25 bp, Homo sapien
tcttcccaggaggttgtgtcctcac

SEQ ID NO: 2418328 - DNA, 25 bp, Homo sapien
tcttgagtctgtgttatcggagcca

SEQ ID NO: 2418329 - DNA, 25 bp, Homo sapien
gattattcagtttgccaacagacag

SEQ ID NO: 2418330 - DNA, 25 bp, Homo sapien
cagtttcaggaaatacagcgtcatc

SEQ ID NO: 2418331 - DNA, 25 bp, Homo sapien
gatgaatatgccatggagttcaaag

SEQ ID NO: 2418332 - DNA, 25 bp, Homo sapien
ctgttagaggatgaatatgccatgg

SEQ ID NO: 2418333 - DNA, 25 bp, Homo sapien
ttagaggatgaatatgccatggagt

SEQ ID NO: 2418334 - DNA, 25 bp, Homo sapien
gaggatgaatatgccatggagttca

SEQ ID NO: 2418335 - DNA, 25 bp, Homo sapien
ccatccgagaactgcgatcttatat

SEQ ID NO: 2418336 - DNA, 25 bp, Homo sapien
tgggctttgtttcgctttgtaggag

SEQ ID NO: 2418337 - DNA, 25 bp, Homo sapien
gacccttcagctgagctaaccttcc

SEQ ID NO: 2418338 - DNA, 25 bp, Homo sapien
gagaactgcgatcttatattcagca

SEQ ID NO: 2418339 - DNA, 25 bp, Homo sapien
ccagtgctttggattgaatgtttat

SEQ ID NO: 2418340 - DNA, 25 bp, Homo sapien
ggatgccatcagaggtgcaggttct

SEQ ID NO: 2418341 - DNA, 25 bp, Homo sapien
tcttgaagcaccttttatactatct

SEQ ID NO: 2418342 - DNA, 25 bp, Homo sapien
agcaggtcattctgatgttgtccag

SEQ ID NO: 2418343 - DNA, 25 bp, Homo sapien
gcatgtcacgtgctaatgtgactgg

SEQ ID NO: 2418344 - DNA, 25 bp, Homo sapien
gactggtatgtaccctcttagcttc

SEQ ID NO: 2418345 - DNA, 25 bp, Homo sapien
tgaaatacaacccatattttgttcc

SEQ ID NO: 2418346 - DNA, 25 bp, Homo sapien
tccctgttcccgaagcatgtcacgt

SEQ ID NO: 2418347 - DNA, 25 bp, Homo sapien
agactctccctgattgccatgcctg

SEQ ID NO: 2418348 - DNA, 25 bp, Homo sapien
gcagttagactctccctgattgcca

SEQ ID NO: 2418349 - DNA, 25 bp, Homo sapien
cttcataaactgcagttagactctc

SEQ ID NO: 2418350 - DNA, 25 bp, Homo sapien
taaactgcagttagactctccctga

SEQ ID NO: 2418351 - DNA, 25 bp, Homo sapien
aacagccgaaaactggtgattctgg

SEQ ID NO: 2418352 - DNA, 25 bp, Homo sapien
cagccgaaaactggtgattctggcc

SEQ ID NO: 2418353 - DNA, 25 bp, Homo sapien
tccaacagccgaaaactggtgattc

SEQ ID NO: 2418354 - DNA, 25 bp, Homo sapien
cttctccaacagccgaaaactggtg

SEQ ID NO: 2418355 - DNA, 25 bp, Homo sapien
gctccctgtgttgcacctttttaca

SEQ ID NO: 2418356 - DNA, 25 bp, Homo sapien
ctggaccatactccccatttgttgg

SEQ ID NO: 2418357 - DNA, 25 bp, Homo sapien
tgtgttgcacctttttacagctgtg

SEQ ID NO: 2418358 - DNA, 25 bp, Homo sapien
tgttggggttttcttgctccctgtg

SEQ ID NO: 2418359 - DNA, 25 bp, Homo sapien
gtactctgccttataatcctctgtg

SEQ ID NO: 2418360 - DNA, 25 bp, Homo sapien
taatacgccctcttttgtactctgc

SEQ ID NO: 2418361 - DNA, 25 bp, Homo sapien
agtaacttttactaatgtattgtca

SEQ ID NO: 2418362 - DNA, 25 bp, Homo sapien
tgtagtgaacaagagaagtaacttt

SEQ ID NO: 2418363 - DNA, 25 bp, Homo sapien
taacatctggcgacactaaggtaaa

SEQ ID NO: 2418364 - DNA, 25 bp, Homo sapien
agaacatgtgaaggataggctagca

SEQ ID NO: 2418365 - DNA, 25 bp, Homo sapien
tgatgaagtcagcagaactagacag

SEQ ID NO: 2418366 - DNA, 25 bp, Homo sapien
tgatgactggcactatgagatacca

SEQ ID NO: 2418367 - DNA, 25 bp, Homo sapien
ggtcatggtgtggtttgagtctcca

SEQ ID NO: 2418368 - DNA, 25 bp, Homo sapien
gatgtattccctcgttatcactgaa

SEQ ID NO: 2418369 - DNA, 25 bp, Homo sapien
tggaacctccctatgctgctaacgg

SEQ ID NO: 2418370 - DNA, 25 bp, Homo sapien
cactgaagaggaccattctggaacc

SEQ ID NO: 2418371 - DNA, 25 bp, Homo sapien
ctgtaagtggcctcaaaacgagaaa

SEQ ID NO: 2418372 - DNA, 25 bp, Homo sapien
agtggcctcaaaacgagaaaactca

SEQ ID NO: 2418373 - DNA, 25 bp, Homo sapien
gcctcaaaacgagaaaactcagtct

SEQ ID NO: 2418374 - DNA, 25 bp, Homo sapien
tcaaaacgagaaaactcagtctgag

SEQ ID NO: 2418375 - DNA, 25 bp, Homo sapien
gaactgaacacctttgaccagtggg

SEQ ID NO: 2418376 - DNA, 25 bp, Homo sapien
gccttcttagcccttctgtcaaatg

SEQ ID NO: 2418377 - DNA, 25 bp, Homo sapien
gcaaatctggaaataggaggaactg

SEQ ID NO: 2418378 - DNA, 25 bp, Homo sapien
gcttctctgatgtagtcagtgggac

SEQ ID NO: 2418379 - DNA, 25 bp, Homo sapien
taggtccttgccaatgtcctgcagt

SEQ ID NO: 2418380 - DNA, 25 bp, Homo sapien
ttgacatccatagtagttgccattg

SEQ ID NO: 2418381 - DNA, 25 bp, Homo sapien
tagtagttgccattgacccataggt

SEQ ID NO: 2418382 - DNA, 25 bp, Homo sapien
ctcaaacccatcttggcgaatgctt

SEQ ID NO: 2418383 - DNA, 25 bp, Homo sapien
tgtgagtggactttctggaagctct

SEQ ID NO: 2418384 - DNA, 25 bp, Homo sapien
ttcctgttggataagattttgttct

SEQ ID NO: 2418385 - DNA, 25 bp, Homo sapien
tttctgcaaacagtctgcgttcttt

SEQ ID NO: 2418386 - DNA, 25 bp, Homo sapien
tgttctactgaaattccatttgcaa

SEQ ID NO: 2418387 - DNA, 25 bp, Homo sapien
tgcaaacagtctgcgttctttggta

SEQ ID NO: 2418388 - DNA, 25 bp, Homo sapien
agctccttcggttcaccctcagtcc

SEQ ID NO: 2418389 - DNA, 25 bp, Homo sapien
ctggaccacagagtttccagagctc

SEQ ID NO: 2418390 - DNA, 25 bp, Homo sapien
tggaccacagagtttccagagctcc

SEQ ID NO: 2418391 - DNA, 25 bp, Homo sapien
gtttccagagctccttcggttcacc

SEQ ID NO: 2418392 - DNA, 25 bp, Homo sapien
ctggtttttccctctcctctttcat

SEQ ID NO: 2418393 - DNA, 25 bp, Homo sapien
tgtgacccaacagcaaagtttgtgg

SEQ ID NO: 2418394 - DNA, 25 bp, Homo sapien
tgggcttgttggcaactgaatagct

SEQ ID NO: 2418395 - DNA, 25 bp, Homo sapien
gtttgtggctaagtctgagagtgac

SEQ ID NO: 2418396 - DNA, 25 bp, Homo sapien
gcttgttggcaactgaatagctatt

SEQ ID NO: 2418397 - DNA, 25 bp, Homo sapien
tcagtccttgctgatgggaagccat

SEQ ID NO: 2418398 - DNA, 25 bp, Homo sapien
tgggaagccattggccactcattga

SEQ ID NO: 2418399 - DNA, 25 bp, Homo sapien
ccactcattgactgtacatcaaaca

SEQ ID NO: 2418400 - DNA, 25 bp, Homo sapien
gactgtacatcaaacaaatgtgaac

SEQ ID NO: 2418401 - DNA, 25 bp, Homo sapien
ccagaagcttaagaatttgtttgta

SEQ ID NO: 2418402 - DNA, 25 bp, Homo sapien
gtttgtaaataggatagcccacacc

SEQ ID NO: 2418403 - DNA, 25 bp, Homo sapien
ggctcttcattagccctctttcttg

SEQ ID NO: 2418404 - DNA, 25 bp, Homo sapien
ccctttggctgagaggcatctgtca

SEQ ID NO: 2418405 - DNA, 25 bp, Homo sapien
ggagaagcaatggtttcctgctcca

SEQ ID NO: 2418406 - DNA, 25 bp, Homo sapien
gaaacatggtatattgacttcctac

SEQ ID NO: 2418407 - DNA, 25 bp, Homo sapien
tgataacacggtttgcttctccaca

SEQ ID NO: 2418408 - DNA, 25 bp, Homo sapien
tcctactgcaatggatgataacacg

SEQ ID NO: 2418409 - DNA, 25 bp, Homo sapien
gcttggacagctacccatgcatgaa

SEQ ID NO: 2418410 - DNA, 25 bp, Homo sapien
ctagctatgctccatttcacttgcc

SEQ ID NO: 2418411 - DNA, 25 bp, Homo sapien
caactaacccactctttgttggatt

SEQ ID NO: 2418412 - DNA, 25 bp, Homo sapien
ttgttggattgcttggacagctacc

SEQ ID NO: 2418413 - DNA, 25 bp, Homo sapien
tggatctagaatccttgccttggac

SEQ ID NO: 2418414 - DNA, 25 bp, Homo sapien
tccccagctcatgggtactctggat

SEQ ID NO: 2418415 - DNA, 25 bp, Homo sapien
tccttgccttggacccacagtagaa

SEQ ID NO: 2418416 - DNA, 25 bp, Homo sapien
tcatgggtactctggatctagaatc

SEQ ID NO: 2418417 - DNA, 25 bp, Homo sapien
catgtgtccagagagggagcctcgc

SEQ ID NO: 2418418 - DNA, 25 bp, Homo sapien
tgtgtccagagagggagcctcgcac

SEQ ID NO: 2418419 - DNA, 25 bp, Homo sapien
gggtgatactggccccatgtgtcca

SEQ ID NO: 2418420 - DNA, 25 bp, Homo sapien
tccccggggtgatactggccccatg

SEQ ID NO: 2418421 - DNA, 25 bp, Homo sapien
gtcccgtgccctccagccgatgtca

SEQ ID NO: 2418422 - DNA, 25 bp, Homo sapien
cccgcctgggcttcacaaacaataa

SEQ ID NO: 2418423 - DNA, 25 bp, Homo sapien
atcctctccgggtagccccagcgct

SEQ ID NO: 2418424 - DNA, 25 bp, Homo sapien
aataacaaatgtcgcggatcctctc

SEQ ID NO: 2418425 - DNA, 25 bp, Homo sapien
cagtgcctgcagttgaccgtactca

SEQ ID NO: 2418426 - DNA, 25 bp, Homo sapien
gagtcatagtctctgtgaacgaata

SEQ ID NO: 2418427 - DNA, 25 bp, Homo sapien
tcctaactgtccagcaggatccaga

SEQ ID NO: 2418428 - DNA, 25 bp, Homo sapien
tagtttaagtacagctccagagtca

SEQ ID NO: 2418429 - DNA, 25 bp, Homo sapien
gagattttattcctcgttttcctga

SEQ ID NO: 2418430 - DNA, 25 bp, Homo sapien
tgattcaggagattttattcctcgt

SEQ ID NO: 2418431 - DNA, 25 bp, Homo sapien
attcaggagattttattcctcgttt

SEQ ID NO: 2418432 - DNA, 25 bp, Homo sapien
tcaggagattttattcctcgttttc

SEQ ID NO: 2418433 - DNA, 25 bp, Homo sapien
cattgatattcttgatactggcaaa

SEQ ID NO: 2418434 - DNA, 25 bp, Homo sapien
tactgaattgcatgtatatgaccca

SEQ ID NO: 2418435 - DNA, 25 bp, Homo sapien
gaggatgttctccatatgtcgactc

SEQ ID NO: 2418436 - DNA, 25 bp, Homo sapien
tgtcgactcttatctagacaaacag

SEQ ID NO: 2418437 - DNA, 25 bp, Homo sapien
taactatcctctccattattttgag

SEQ ID NO: 2418438 - DNA, 25 bp, Homo sapien
gatggtgaggatcattgctgatatg

SEQ ID NO: 2418439 - DNA, 25 bp, Homo sapien
gagaaatgatggtgaggatcattgc

SEQ ID NO: 2418440 - DNA, 25 bp, Homo sapien
tattttgagaaatgatggtgaggat

SEQ ID NO: 2418441 - DNA, 25 bp, Homo sapien
caggaaactgggtggagtttttatg

SEQ ID NO: 2418442 - DNA, 25 bp, Homo sapien
gggacttttcaggtcatgtataagg

SEQ ID NO: 2418443 - DNA, 25 bp, Homo sapien
actagtaaatttccgtgatgtcagg

SEQ ID NO: 2418444 - DNA, 25 bp, Homo sapien
tttatggatgcaagtccagtggagg

SEQ ID NO: 2418445 - DNA, 25 bp, Homo sapien
tttctaactgcactgcctacatgcg

SEQ ID NO: 2418446 - DNA, 25 bp, Homo sapien
tgctgtggctttgaactgtaacacc

SEQ ID NO: 2418447 - DNA, 25 bp, Homo sapien
gaacattgccctattggtttggaca

SEQ ID NO: 2418448 - DNA, 25 bp, Homo sapien
catgcgtattaaggtccattctgcc

SEQ ID NO: 2418449 - DNA, 25 bp, Homo sapien
tgtgtctgccctttagaagctaaga

SEQ ID NO: 2418450 - DNA, 25 bp, Homo sapien
gacaaaaccctatctagtcaactgg

SEQ ID NO: 2418451 - DNA, 25 bp, Homo sapien
gataatttgcaaagtacccttgaga

SEQ ID NO: 2418452 - DNA, 25 bp, Homo sapien
ccctggagttaatagagtgattcac

SEQ ID NO: 2418453 - DNA, 25 bp, Homo sapien
gacacgtgtgtattctggctcaaga

SEQ ID NO: 2418454 - DNA, 25 bp, Homo sapien
tctccacgctggaaggacacgtgtg

SEQ ID NO: 2418455 - DNA, 25 bp, Homo sapien
cacttcagggtttactgtacaatca

SEQ ID NO: 2418456 - DNA, 25 bp, Homo sapien
cgaaagctggtttgcaagttcacag

SEQ ID NO: 2418457 - DNA, 25 bp, Homo sapien
atcacatctttcgaatttatcaggt

SEQ ID NO: 2418458 - DNA, 25 bp, Homo sapien
tcgaatttatcaggtaattacatat

SEQ ID NO: 2418459 - DNA, 25 bp, Homo sapien
tggtgttattgaaattgtagtttgg

SEQ ID NO: 2418460 - DNA, 25 bp, Homo sapien
taatggtgttattgaaattgtagtt

SEQ ID NO: 2418461 - DNA, 25 bp, Homo sapien
tcccacacgagaatgagagctgcat

SEQ ID NO: 2418462 - DNA, 25 bp, Homo sapien
gtttctggcccatagtagacattca

SEQ ID NO: 2418463 - DNA, 25 bp, Homo sapien
gggtgactgcccatataaccactct

SEQ ID NO: 2418464 - DNA, 25 bp, Homo sapien
ttcctgaaggcataagtgacaatcc

SEQ ID NO: 2418465 - DNA, 25 bp, Homo sapien
gggattctaatccacaggacttggg

SEQ ID NO: 2418466 - DNA, 25 bp, Homo sapien
agggtggaacctagaactgtgctgt

SEQ ID NO: 2418467 - DNA, 25 bp, Homo sapien
aagagtgcctggaatcagaagaccc

SEQ ID NO: 2418468 - DNA, 25 bp, Homo sapien
tggctagtacaaagtgagatgtgct

SEQ ID NO: 2418469 - DNA, 25 bp, Homo sapien
ggagactcatacttgcccagcacaa

SEQ ID NO: 2418470 - DNA, 25 bp, Homo sapien
cagcacaatgttacgggcagacagg

SEQ ID NO: 2418471 - DNA, 25 bp, Homo sapien
ggcagacaggccgacatctatgatt

SEQ ID NO: 2418472 - DNA, 25 bp, Homo sapien
tcatgctgccaagaggtatctcccc

SEQ ID NO: 2418473 - DNA, 25 bp, Homo sapien
acaacacaaaggttgctttgtctgt

SEQ ID NO: 2418474 - DNA, 25 bp, Homo sapien
aacaacacaaaggttgctttgtctg

SEQ ID NO: 2418475 - DNA, 25 bp, Homo sapien
taacaacacaaaggttgctttgtct

SEQ ID NO: 2418476 - DNA, 25 bp, Homo sapien
ttaacaacacaaaggttgctttgtc

SEQ ID NO: 2418477 - DNA, 25 bp, Homo sapien
gacaaaacgtcactgatcaacttcc

SEQ ID NO: 2418478 - DNA, 25 bp, Homo sapien
gtttataaattggatcaatccctga

SEQ ID NO: 2418479 - DNA, 25 bp, Homo sapien
tactccatgactaaccagcatccta

SEQ ID NO: 2418480 - DNA, 25 bp, Homo sapien
cactttgagacactatgggactcta

SEQ ID NO: 2418481 - DNA, 25 bp, Homo sapien
tcctctcagggtagaggtctgtgga

SEQ ID NO: 2418482 - DNA, 25 bp, Homo sapien
ccattcatcggccagttttagctca

SEQ ID NO: 2418483 - DNA, 25 bp, Homo sapien
caatcttatcaaatgctgtgcggaa

SEQ ID NO: 2418484 - DNA, 25 bp, Homo sapien
tgacccctactccaatcataattgt

SEQ ID NO: 2418485 - DNA, 25 bp, Homo sapien
gactggtaaatcagcacgaggagga

SEQ ID NO: 2418486 - DNA, 25 bp, Homo sapien
gaagccatacttcaggactggtaaa

SEQ ID NO: 2418487 - DNA, 25 bp, Homo sapien
gagggagcagtgctgccaatcttta

SEQ ID NO: 2418488 - DNA, 25 bp, Homo sapien
caacccaaagtgctcacagagggag

SEQ ID NO: 2418489 - DNA, 25 bp, Homo sapien
tccttgtggcttgggtacactccct

SEQ ID NO: 2418490 - DNA, 25 bp, Homo sapien
ctgagataaaagctgctgccccatc

SEQ ID NO: 2418491 - DNA, 25 bp, Homo sapien
tctccaggaattggctaggtgggaa

SEQ ID NO: 2418492 - DNA, 25 bp, Homo sapien
ctccaaatgtggtcaagagtcttcc

SEQ ID NO: 2418493 - DNA, 25 bp, Homo sapien
gtaacctattaggacctgggccgca

SEQ ID NO: 2418494 - DNA, 25 bp, Homo sapien
ccctgttaggtaccagttaggactg

SEQ ID NO: 2418495 - DNA, 25 bp, Homo sapien
caggcaggtgagcattgctactgag

SEQ ID NO: 2418496 - DNA, 25 bp, Homo sapien
ctcagtctcctgtcagagccgcaga

SEQ ID NO: 2418497 - DNA, 25 bp, Homo sapien
caggcaacgtgtgggctcaagtctt

SEQ ID NO: 2418498 - DNA, 25 bp, Homo sapien
aaggtttcaggcaacgtgtgggctc

SEQ ID NO: 2418499 - DNA, 25 bp, Homo sapien
tcaatgctagacacatcagtggcac

SEQ ID NO: 2418500 - DNA, 25 bp, Homo sapien
agcatgtcaatgctagacacatcag

SEQ ID NO: 2418501 - DNA, 25 bp, Homo sapien
gtgaatcataaaggtgagtcataaa

SEQ ID NO: 2418502 - DNA, 25 bp, Homo sapien
ggtcttcatccttgtgatcgtcagg

SEQ ID NO: 2418503 - DNA, 25 bp, Homo sapien
ggaagtgaatcataaaggtgagtca

SEQ ID NO: 2418504 - DNA, 25 bp, Homo sapien
tgatcgtcaggttgagtagactgag

SEQ ID NO: 2418505 - DNA, 25 bp, Homo sapien
ataaaccattatttgcagtcagcat

SEQ ID NO: 2418506 - DNA, 25 bp, Homo sapien
ccaagatgcgactatgaggatgccc

SEQ ID NO: 2418507 - DNA, 25 bp, Homo sapien
tttgtgattcttcccgtaggctggg

SEQ ID NO: 2418508 - DNA, 25 bp, Homo sapien
tcaaggtcacgagatccaagatgcg

SEQ ID NO: 2418509 - DNA, 25 bp, Homo sapien
taggctgggaacttcacttaggttc

SEQ ID NO: 2418510 - DNA, 25 bp, Homo sapien
ctagtttaacaaaccacagtactga

SEQ ID NO: 2418511 - DNA, 25 bp, Homo sapien
tggtgtaactaaagagtcagcttgt

SEQ ID NO: 2418512 - DNA, 25 bp, Homo sapien
gattcaattttacttgcccgagaag

SEQ ID NO: 2418513 - DNA, 25 bp, Homo sapien
tcctccacccttttcagtgtgtgca

SEQ ID NO: 2418514 - DNA, 25 bp, Homo sapien
cattgaaacagcagccttaaggtct

SEQ ID NO: 2418515 - DNA, 25 bp, Homo sapien
tacaattggttccattctacagtaa

SEQ ID NO: 2418516 - DNA, 25 bp, Homo sapien
ttttggaactagtgccggcggctct

SEQ ID NO: 2418517 - DNA, 25 bp, Homo sapien
ccaggtaagggcgttttgctccact

SEQ ID NO: 2418518 - DNA, 25 bp, Homo sapien
tccccgggtcgatttccttgtgcaa

SEQ ID NO: 2418519 - DNA, 25 bp, Homo sapien
tggaccgagcttgtacgtgaagaat

SEQ ID NO: 2418520 - DNA, 25 bp, Homo sapien
cttggctgatagtgttccaactgca

SEQ ID NO: 2418521 - DNA, 25 bp, Homo sapien
gttccttggctgatagtgttccaac

SEQ ID NO: 2418522 - DNA, 25 bp, Homo sapien
gctgatagtgttccaactgcatttg

SEQ ID NO: 2418523 - DNA, 25 bp, Homo sapien
gatagtgttccaactgcatttgtaa

SEQ ID NO: 2418524 - DNA, 25 bp, Homo sapien
tcaaaacgatgaaggagtgaattaa

SEQ ID NO: 2418525 - DNA, 25 bp, Homo sapien
accttttcaaaacgatgaaggagtg

SEQ ID NO: 2418526 - DNA, 25 bp, Homo sapien
tctctggcctagtttgaattacctt

SEQ ID NO: 2418527 - DNA, 25 bp, Homo sapien
gtgtctctggcctagtttgaattac

SEQ ID NO: 2418528 - DNA, 25 bp, Homo sapien
aggagacacactggttgaacctgtg

SEQ ID NO: 2418529 - DNA, 25 bp, Homo sapien
tgaagtcacctgaatctcggtgttt

SEQ ID NO: 2418530 - DNA, 25 bp, Homo sapien
acactggttgaacctgtgatcttgc

SEQ ID NO: 2418531 - DNA, 25 bp, Homo sapien
gacacactggttgaacctgtgatct

SEQ ID NO: 2418532 - DNA, 25 bp, Homo sapien
catgaatttactcttcatcttttta

SEQ ID NO: 2418533 - DNA, 25 bp, Homo sapien
tattatacaatgttgtttttgttgt

SEQ ID NO: 2418534 - DNA, 25 bp, Homo sapien
gcatgaatttactcttcatcttttt

SEQ ID NO: 2418535 - DNA, 25 bp, Homo sapien
ttcatctttttattatacaatgttg

SEQ ID NO: 2418536 - DNA, 25 bp, Homo sapien
taaatgcagttgaatgggtcgccgt

SEQ ID NO: 2418537 - DNA, 25 bp, Homo sapien
aacaagtgggtagcgccaaatgccc

SEQ ID NO: 2418538 - DNA, 25 bp, Homo sapien
taaaaaggacgtctgggtggagcaa

SEQ ID NO: 2418539 - DNA, 25 bp, Homo sapien
gattacggtgtaacagggcttagcc

SEQ ID NO: 2418540 - DNA, 25 bp, Homo sapien
cctggaagctccgtaatgtcaagtc

SEQ ID NO: 2418541 - DNA, 25 bp, Homo sapien
gaagcctgatgacttcgtcgtggca

SEQ ID NO: 2418542 - DNA, 25 bp, Homo sapien
tgtgtgttcagaccatggacttcgc

SEQ ID NO: 2418543 - DNA, 25 bp, Homo sapien
cgtcgtggcatagagcaaaggtgat

SEQ ID NO: 2418544 - DNA, 25 bp, Homo sapien
gccatggtgacaggttctgtataaa

SEQ ID NO: 2418545 - DNA, 25 bp, Homo sapien
ccattatgggtgtagtagaaatata

SEQ ID NO: 2418546 - DNA, 25 bp, Homo sapien
ctggaagatattactaacctgtttc

SEQ ID NO: 2418547 - DNA, 25 bp, Homo sapien
cactgttcctaattcagaaactgaa

SEQ ID NO: 2418548 - DNA, 25 bp, Homo sapien
tggagagatgtgatgatttggtcat

SEQ ID NO: 2418549 - DNA, 25 bp, Homo sapien
gatttggtcattggatgtgaagggg

SEQ ID NO: 2418550 - DNA, 25 bp, Homo sapien
tggatgtgaaggggataatctgcca

SEQ ID NO: 2418551 - DNA, 25 bp, Homo sapien
aattaatgtagcatagtgattctgc

SEQ ID NO: 2418552 - DNA, 25 bp, Homo sapien
attaatgtagcatagtgattctgct

SEQ ID NO: 2418553 - DNA, 25 bp, Homo sapien
cagagcgatttaactttgtgcacat

SEQ ID NO: 2418554 - DNA, 25 bp, Homo sapien
tggtgatgatctgatagtagaaagg

SEQ ID NO: 2418555 - DNA, 25 bp, Homo sapien
agtgtgatcccacgagtgtttggtg

SEQ ID NO: 2418556 - DNA, 25 bp, Homo sapien
gcagctcttgacttggatgatcctt

SEQ ID NO: 2418557 - DNA, 25 bp, Homo sapien
tttctaacatgcctgtacgtgtgcc

SEQ ID NO: 2418558 - DNA, 25 bp, Homo sapien
tcattggcattctggagttagggac

SEQ ID NO: 2418559 - DNA, 25 bp, Homo sapien
gaggaatctccaactatgacttttc

SEQ ID NO: 2418560 - DNA, 25 bp, Homo sapien
gacatgaccttttctacagtccgga

SEQ ID NO: 2418561 - DNA, 25 bp, Homo sapien
ggttcaagaccatctgacaactcgg

SEQ ID NO: 2418562 - DNA, 25 bp, Homo sapien
taccagaggtggaattctagttgtg

SEQ ID NO: 2418563 - DNA, 25 bp, Homo sapien
tgtgattccaaatcgatgtttctca

SEQ ID NO: 2418564 - DNA, 25 bp, Homo sapien
gcatggaacaaaggatcattgctac

SEQ ID NO: 2418565 - DNA, 25 bp, Homo sapien
tcctgtctcacatgtccagttgttt

SEQ ID NO: 2418566 - DNA, 25 bp, Homo sapien
atttctctatattcatttgccagca

SEQ ID NO: 2418567 - DNA, 25 bp, Homo sapien
acataactaatgactcctccttctg

SEQ ID NO: 2418568 - DNA, 25 bp, Homo sapien
cccttcctaagcacataactaatga

SEQ ID NO: 2418569 - DNA, 25 bp, Homo sapien
tcagtcctcatggaagtgtaggtgc

SEQ ID NO: 2418570 - DNA, 25 bp, Homo sapien
tgctcattacgttccagagcaggag

SEQ ID NO: 2418571 - DNA, 25 bp, Homo sapien
tctgctcattacgttccagagcagg

SEQ ID NO: 2418572 - DNA, 25 bp, Homo sapien
ccttctgctcattacgttccagagc

SEQ ID NO: 2418573 - DNA, 25 bp, Homo sapien
atttgatggggtgttgagaaattcc

SEQ ID NO: 2418574 - DNA, 25 bp, Homo sapien
cacgatgaaaatccacacccccatt

SEQ ID NO: 2418575 - DNA, 25 bp, Homo sapien
ctgatgtgatttgatggggtgttga

SEQ ID NO: 2418576 - DNA, 25 bp, Homo sapien
gggtgttgagaaattccacgatgaa

SEQ ID NO: 2418577 - DNA, 25 bp, Homo sapien
tcagatcaagaacctggaaaagtaa

SEQ ID NO: 2418578 - DNA, 25 bp, Homo sapien
gactcagcttgtgagacccgatgtg

SEQ ID NO: 2418579 - DNA, 25 bp, Homo sapien
aagtaagagccccagggaagactca

SEQ ID NO: 2418580 - DNA, 25 bp, Homo sapien
gggaagactcagcttgtgagacccg

SEQ ID NO: 2418581 - DNA, 25 bp, Homo sapien
tcaaaaagagaccagtggagctgag

SEQ ID NO: 2418582 - DNA, 25 bp, Homo sapien
cagggtgagtcagtgaagacactct

SEQ ID NO: 2418583 - DNA, 25 bp, Homo sapien
gaagacactcttggttgtctgaact

SEQ ID NO: 2418584 - DNA, 25 bp, Homo sapien
tctgaactggtttacttgttcaaaa

SEQ ID NO: 2418585 - DNA, 25 bp, Homo sapien
tcttaggaaattggcagccaatgac

SEQ ID NO: 2418586 - DNA, 25 bp, Homo sapien
ctttatgagacagatatgctagtgt

SEQ ID NO: 2418587 - DNA, 25 bp, Homo sapien
tatgagacagatatgctagtgtgta

SEQ ID NO: 2418588 - DNA, 25 bp, Homo sapien
ctcttaggaaattggcagccaatga

SEQ ID NO: 2418589 - DNA, 25 bp, Homo sapien
tccggctgctctgacaggattgaga

SEQ ID NO: 2418590 - DNA, 25 bp, Homo sapien
gcacttgtcctttggctggcagttg

SEQ ID NO: 2418591 - DNA, 25 bp, Homo sapien
atccttctccggctgctctgacagg

SEQ ID NO: 2418592 - DNA, 25 bp, Homo sapien
attgagatctctggagcacttgtcc

SEQ ID NO: 2418593 - DNA, 25 bp, Homo sapien
ttgggcaggtcttgacaagcatcat

SEQ ID NO: 2418594 - DNA, 25 bp, Homo sapien
catttctggaggggagctgccgtac

SEQ ID NO: 2418595 - DNA, 25 bp, Homo sapien
ctgaaccatttctggaggggagctg

SEQ ID NO: 2418596 - DNA, 25 bp, Homo sapien
aaccatttctggaggggagctgccg

SEQ ID NO: 2418597 - DNA, 25 bp, Homo sapien
tgaaccatttctggaggggagctgc

SEQ ID NO: 2418598 - DNA, 25 bp, Homo sapien
attagctattgagtctgtgttgtca

SEQ ID NO: 2418599 - DNA, 25 bp, Homo sapien
gaacttgtttatccacaggttggct

SEQ ID NO: 2418600 - DNA, 25 bp, Homo sapien
ttgagtctgtgttgtcagagccaac

SEQ ID NO: 2418601 - DNA, 25 bp, Homo sapien
ggaacttgtttatccacaggttggc

SEQ ID NO: 2418602 - DNA, 25 bp, Homo sapien
ttgcaaaactgtctggttcgtcctg

SEQ ID NO: 2418603 - DNA, 25 bp, Homo sapien
tgcaaaactgtctggttcgtcctga

SEQ ID NO: 2418604 - DNA, 25 bp, Homo sapien
gcaaaactgtctggttcgtcctgaa

SEQ ID NO: 2418605 - DNA, 25 bp, Homo sapien
gacagggacaccgataaaacatagt

SEQ ID NO: 2418606 - DNA, 25 bp, Homo sapien
caccgataaaacatagtgtatgata

SEQ ID NO: 2418607 - DNA, 25 bp, Homo sapien
gggacaccgataaaacatagtgtat

SEQ ID NO: 2418608 - DNA, 25 bp, Homo sapien
gagacagggacaccgataaaacata

SEQ ID NO: 2418609 - DNA, 25 bp, Homo sapien
tcagtcagacttagtgtctttctct

SEQ ID NO: 2418610 - DNA, 25 bp, Homo sapien
agtcagacttagtgtctttctctgt

SEQ ID NO: 2418611 - DNA, 25 bp, Homo sapien
cagtcagacttagtgtctttctctg

SEQ ID NO: 2418612 - DNA, 25 bp, Homo sapien
ctgtggcttcatccgaggctggact

SEQ ID NO: 2418613 - DNA, 25 bp, Homo sapien
ggctgtggtgcaccgagagccttcc

SEQ ID NO: 2418614 - DNA, 25 bp, Homo sapien
tgtcagtcctgtgagctagctctcc

SEQ ID NO: 2418615 - DNA, 25 bp, Homo sapien
caatagttcagtagttctttggccc

SEQ ID NO: 2418616 - DNA, 25 bp, Homo sapien
tagctctccagcacgagggactttc

SEQ ID NO: 2418617 - DNA, 25 bp, Homo sapien
ccatttccatcgtttgggaagacaa

SEQ ID NO: 2418618 - DNA, 25 bp, Homo sapien
tcaggtcctaaccccatagtcgcag

SEQ ID NO: 2418619 - DNA, 25 bp, Homo sapien
catagtcgcagggtaaagtaatagt

SEQ ID NO: 2418620 - DNA, 25 bp, Homo sapien
aggtcctaaccccatagtcgcaggg

SEQ ID NO: 2418621 - DNA, 25 bp, Homo sapien
ctaaccccatagtcgcagggtaaag

SEQ ID NO: 2418622 - DNA, 25 bp, Homo sapien
tatgagatgttaaccaaatgttggg

SEQ ID NO: 2418623 - DNA, 25 bp, Homo sapien
atttatatcccttgagtttggctgc

SEQ ID NO: 2418624 - DNA, 25 bp, Homo sapien
tacttattgttgtaagcgcctaggg

SEQ ID NO: 2418625 - DNA, 25 bp, Homo sapien
tctacattgcgtccacaaagtcaag

SEQ ID NO: 2418626 - DNA, 25 bp, Homo sapien
ggcattcgtggataattttgtcctg

SEQ ID NO: 2418627 - DNA, 25 bp, Homo sapien
aacttgaatcattacacttggaagc

SEQ ID NO: 2418628 - DNA, 25 bp, Homo sapien
tgtgatgcaggaatacatgcatgtc

SEQ ID NO: 2418629 - DNA, 25 bp, Homo sapien
ttgtagcatcccttctcttagcctt

SEQ ID NO: 2418630 - DNA, 25 bp, Homo sapien
gaaaatcgctgcagcaaaaactgtt

SEQ ID NO: 2418631 - DNA, 25 bp, Homo sapien
cagtgctgcgtaattacccatggta

SEQ ID NO: 2418632 - DNA, 25 bp, Homo sapien
ttctcaggctatcaatgaatggagg

SEQ ID NO: 2418633 - DNA, 25 bp, Homo sapien
taagttgtcagcaagttaccaaggt

SEQ ID NO: 2418634 - DNA, 25 bp, Homo sapien
cagaaagcatcgcaacagttggctc

SEQ ID NO: 2418635 - DNA, 25 bp, Homo sapien
catgaaccattaacagatgtggcct

SEQ ID NO: 2418636 - DNA, 25 bp, Homo sapien
gatgtggcctccctgcagaactttt

SEQ ID NO: 2418637 - DNA, 25 bp, Homo sapien
taaagcttcagctcgcagtacagac

SEQ ID NO: 2418638 - DNA, 25 bp, Homo sapien
tatgccaggaaagcctaaagacatc

SEQ ID NO: 2418639 - DNA, 25 bp, Homo sapien
cctggacagtgtcaaaagtcagatg

SEQ ID NO: 2418640 - DNA, 25 bp, Homo sapien
taacttaataggagaggattgcctg

SEQ ID NO: 2418641 - DNA, 25 bp, Homo sapien
agaggtgggcaaggtttatatcagc

SEQ ID NO: 2418642 - DNA, 25 bp, Homo sapien
acatttgtaatgccagtttcaagcc

SEQ ID NO: 2418643 - DNA, 25 bp, Homo sapien
acagaatgggggttgtaattggcac

SEQ ID NO: 2418644 - DNA, 25 bp, Homo sapien
cgatatagttgttgttctgctgagt

SEQ ID NO: 2418645 - DNA, 25 bp, Homo sapien
ttatacgatatagttgttgttctgc

SEQ ID NO: 2418646 - DNA, 25 bp, Homo sapien
atagttgttgttctgctgagtacca

SEQ ID NO: 2418647 - DNA, 25 bp, Homo sapien
aacaaatggggcttgcaggactgga

SEQ ID NO: 2418648 - DNA, 25 bp, Homo sapien
atgcttggtgtaaaaattcaagtac

SEQ ID NO: 2418649 - DNA, 25 bp, Homo sapien
tacagaaatggagaaagtgaagtct

SEQ ID NO: 2418650 - DNA, 25 bp, Homo sapien
ttcaggagtgtctcctctatcctca

SEQ ID NO: 2418651 - DNA, 25 bp, Homo sapien
tttcaagctgtatgcttggtgtaaa

SEQ ID NO: 2418652 - DNA, 25 bp, Homo sapien
cctgcacatttgactcggctctgag

SEQ ID NO: 2418653 - DNA, 25 bp, Homo sapien
gaactgattcactcgatttttaagg

SEQ ID NO: 2418654 - DNA, 25 bp, Homo sapien
ctgcaattctctacgaactgattca

SEQ ID NO: 2418655 - DNA, 25 bp, Homo sapien
gaatcttcctgcacatttgactcgg

SEQ ID NO: 2418656 - DNA, 25 bp, Homo sapien
agggagcctgcgcttagcggcccca

SEQ ID NO: 2418657 - DNA, 25 bp, Homo sapien
gcccctgacactgaacgccgcttgt

SEQ ID NO: 2418658 - DNA, 25 bp, Homo sapien
tccggcttgccgtcctcgcagccat

SEQ ID NO: 2418659 - DNA, 25 bp, Homo sapien
ccgcttgtcccctccggcttgccgt

SEQ ID NO: 2418660 - DNA, 25 bp, Homo sapien
tgggaaaccctgcattcaatgtagc

SEQ ID NO: 2418661 - DNA, 25 bp, Homo sapien
gcagttccgggctgtgttcacatga

SEQ ID NO: 2418662 - DNA, 25 bp, Homo sapien
tctgggtgccccagttagagctgcc

SEQ ID NO: 2418663 - DNA, 25 bp, Homo sapien
tttgccagggccaagctaccagaaa

SEQ ID NO: 2418664 - DNA, 25 bp, Homo sapien
tcctggtttatactggccctgctgc

SEQ ID NO: 2418665 - DNA, 25 bp, Homo sapien
gcatccagatgccaggatgactata

SEQ ID NO: 2418666 - DNA, 25 bp, Homo sapien
tatccttgaaagcatataatcttgc

SEQ ID NO: 2418667 - DNA, 25 bp, Homo sapien
agtttttactatgaagagttctcct

SEQ ID NO: 2418668 - DNA, 25 bp, Homo sapien
gctgatgaaatcagtacttggtgac

SEQ ID NO: 2418669 - DNA, 25 bp, Homo sapien
gagcctctgtggatggcagcatacc

SEQ ID NO: 2418670 - DNA, 25 bp, Homo sapien
tcattcagggaagtaaatcttgccc

SEQ ID NO: 2418671 - DNA, 25 bp, Homo sapien
tttacaaccaaatcttgatgcgtgg

SEQ ID NO: 2418672 - DNA, 25 bp, Homo sapien
gggagattgttcaaaaaccagcaaa

SEQ ID NO: 2418673 - DNA, 25 bp, Homo sapien
gatatgtgggagattgttcaaaaac

SEQ ID NO: 2418674 - DNA, 25 bp, Homo sapien
gaacgagtatttagatatgtgggag

SEQ ID NO: 2418675 - DNA, 25 bp, Homo sapien
catctattggatgaagaacgagtat

SEQ ID NO: 2418676 - DNA, 25 bp, Homo sapien
caatagcgagtgttactttgagagc

SEQ ID NO: 2418677 - DNA, 25 bp, Homo sapien
gttatcgaacgaagctaaattcacg

SEQ ID NO: 2418678 - DNA, 25 bp, Homo sapien
ggcttttgccgctatgagttatcga

SEQ ID NO: 2418679 - DNA, 25 bp, Homo sapien
aatttgactacacccaaggagaagg

SEQ ID NO: 2418680 - DNA, 25 bp, Homo sapien
tatgttgtacaaaatggcactggtt

SEQ ID NO: 2418681 - DNA, 25 bp, Homo sapien
actggttccaggctctaatatgcag

SEQ ID NO: 2418682 - DNA, 25 bp, Homo sapien
caggctctaatatgcagctctccag

SEQ ID NO: 2418683 - DNA, 25 bp, Homo sapien
tagaagacagccaggttacaggaaa

SEQ ID NO: 2418684 - DNA, 25 bp, Homo sapien
agtatccccgacagtccaaaggcca

SEQ ID NO: 2418685 - DNA, 25 bp, Homo sapien
cctcagtgaggacttacgggagtta

SEQ ID NO: 2418686 - DNA, 25 bp, Homo sapien
tggagtcaggtaaattcatgctacg

SEQ ID NO: 2418687 - DNA, 25 bp, Homo sapien
aaattcaagaaagcgtcctgcccct

SEQ ID NO: 2418688 - DNA, 25 bp, Homo sapien
aatccagattggctatcttttcaaa

SEQ ID NO: 2418689 - DNA, 25 bp, Homo sapien
cttccgaagacagcagctcctactg

SEQ ID NO: 2418690 - DNA, 25 bp, Homo sapien
tgagactcctccagattgattagaa

SEQ ID NO: 2418691 - DNA, 25 bp, Homo sapien
attagaagacctgggaagcgacgga

SEQ ID NO: 2418692 - DNA, 25 bp, Homo sapien
tgggaagcgacggatccagcagtct

SEQ ID NO: 2418693 - DNA, 25 bp, Homo sapien
tgagcagagagagtctgatgtccac

SEQ ID NO: 2418694 - DNA, 25 bp, Homo sapien
gtaaaaaattgtgggtgagcagaga

SEQ ID NO: 2418695 - DNA, 25 bp, Homo sapien
gtgagcagagagagtctgatgtcca

SEQ ID NO: 2418696 - DNA, 25 bp, Homo sapien
tgtaaaaaattgtgggtgagcagag

SEQ ID NO: 2418697 - DNA, 25 bp, Homo sapien
ataggtttacataaagggaatcata

SEQ ID NO: 2418698 - DNA, 25 bp, Homo sapien
tataggtttacataaagggaatcat

SEQ ID NO: 2418699 - DNA, 25 bp, Homo sapien
aaatgtaagaattaaccgggcatag

SEQ ID NO: 2418700 - DNA, 25 bp, Homo sapien
tgtaagaattaaccgggcatagtgg

SEQ ID NO: 2418701 - DNA, 25 bp, Homo sapien
tccccacagaaaatgtaagaattaa

SEQ ID NO: 2418702 - DNA, 25 bp, Homo sapien
ccgtccccacagaaaatgtaagaat

SEQ ID NO: 2418703 - DNA, 25 bp, Homo sapien
cattgttgccggttgaggcatagaa

SEQ ID NO: 2418704 - DNA, 25 bp, Homo sapien
tgaggcatagaaaaatcgtaggtcc

SEQ ID NO: 2418705 - DNA, 25 bp, Homo sapien
cgtaggtccaagtctctttgataca

SEQ ID NO: 2418706 - DNA, 25 bp, Homo sapien
tctggcattgttgccggttgaggca

SEQ ID NO: 2418707 - DNA, 25 bp, Homo sapien
tttgaggtctgtcttgggcaaggta

SEQ ID NO: 2418708 - DNA, 25 bp, Homo sapien
caggcacagtagtgctttgagagac

SEQ ID NO: 2418709 - DNA, 25 bp, Homo sapien
ccagggaggccagaatctactagaa

SEQ ID NO: 2418710 - DNA, 25 bp, Homo sapien
agttccttattcctagcattattat

SEQ ID NO: 2418711 - DNA, 25 bp, Homo sapien
tcagccaaaccgcacgtgtggtctc

SEQ ID NO: 2418712 - DNA, 25 bp, Homo sapien
tacttcttgcagacatttatgagcc

SEQ ID NO: 2418713 - DNA, 25 bp, Homo sapien
taacattccgtaatggactggactg

SEQ ID NO: 2418714 - DNA, 25 bp, Homo sapien
tcttttgcgccaggataacattccg

SEQ ID NO: 2418715 - DNA, 25 bp, Homo sapien
gcctcccgcagctgcgcgtccgcag

SEQ ID NO: 2418716 - DNA, 25 bp, Homo sapien
gctgcgcgtccgcagccgaggcgcc

SEQ ID NO: 2418717 - DNA, 25 bp, Homo sapien
ctgcgcgtccgcagccgaggcgccc

SEQ ID NO: 2418718 - DNA, 25 bp, Homo sapien
ccgcagctgcgcgtccgcagccgag

SEQ ID NO: 2418719 - DNA, 25 bp, Homo sapien
tcccaggtgcggctcaataactgcc

SEQ ID NO: 2418720 - DNA, 25 bp, Homo sapien
catgctcaggtacgaggagatgact

SEQ ID NO: 2418721 - DNA, 25 bp, Homo sapien
gatgtaccgcctggcgcaggtgtac

SEQ ID NO: 2418722 - DNA, 25 bp, Homo sapien
gatgactgagcgttggttcccgctg

SEQ ID NO: 2418723 - DNA, 25 bp, Homo sapien
tacacatcatttggtgctcaccagg

SEQ ID NO: 2418724 - DNA, 25 bp, Homo sapien
aaaagatgattattcctacccgctc

SEQ ID NO: 2418725 - DNA, 25 bp, Homo sapien
taaccaggttggcatatttcctgcc

SEQ ID NO: 2418726 - DNA, 25 bp, Homo sapien
tgtttatttgactcgagggtcctcc

SEQ ID NO: 2418727 - DNA, 25 bp, Homo sapien
gaaacccagctttaggacactgttc

SEQ ID NO: 2418728 - DNA, 25 bp, Homo sapien
acactgttcacatatcacaggagga

SEQ ID NO: 2418729 - DNA, 25 bp, Homo sapien
ctctctgaggttgggtagctctttg

SEQ ID NO: 2418730 - DNA, 25 bp, Homo sapien
tagtaccagagcatccttgcagatt

SEQ ID NO: 2418731 - DNA, 25 bp, Homo sapien
gattccctgagccaaatacccatga

SEQ ID NO: 2418732 - DNA, 25 bp, Homo sapien
tgttcaacactgacaggcggcactg

SEQ ID NO: 2418733 - DNA, 25 bp, Homo sapien
taggttgagtaacacagactgcatc

SEQ ID NO: 2418734 - DNA, 25 bp, Homo sapien
tcttgtgggctgacataacgcacat

SEQ ID NO: 2418735 - DNA, 25 bp, Homo sapien
caggccaccttgttgagtgaagaga

SEQ ID NO: 2418736 - DNA, 25 bp, Homo sapien
tggaaagaccttcgggcctggagct

SEQ ID NO: 2418737 - DNA, 25 bp, Homo sapien
tctttagcagcactgaagaaattca

SEQ ID NO: 2418738 - DNA, 25 bp, Homo sapien
gctgagaaatacgtggaagcctcac

SEQ ID NO: 2418739 - DNA, 25 bp, Homo sapien
cattgctaactatgagtgggtccct

SEQ ID NO: 2418740 - DNA, 25 bp, Homo sapien
gacagtttcctaatgccgtggctta

SEQ ID NO: 2418741 - DNA, 25 bp, Homo sapien
gacagccaggttactaaggagcact

SEQ ID NO: 2418742 - DNA, 25 bp, Homo sapien
tctttattggttcggtggacagcca

SEQ ID NO: 2418743 - DNA, 25 bp, Homo sapien
tagtggtgttagtggaggcggtgtc

SEQ ID NO: 2418744 - DNA, 25 bp, Homo sapien
ttctttctttcagaccggaacatga

SEQ ID NO: 2418745 - DNA, 25 bp, Homo sapien
ctttctttcagaccggaacatgaac

SEQ ID NO: 2418746 - DNA, 25 bp, Homo sapien
gaggcggtgtcatcacttgtctttc

SEQ ID NO: 2418747 - DNA, 25 bp, Homo sapien
gttaacttttcgttgctgaagagct

SEQ ID NO: 2418748 - DNA, 25 bp, Homo sapien
caaatacaatattccagccaaccag

SEQ ID NO: 2418749 - DNA, 25 bp, Homo sapien
gaattagtactggacaaacagttgg

SEQ ID NO: 2418750 - DNA, 25 bp, Homo sapien
tcttggaccaagtgagggtgtactc

SEQ ID NO: 2418751 - DNA, 25 bp, Homo sapien
gacataaataagtcacggcccatga

SEQ ID NO: 2418752 - DNA, 25 bp, Homo sapien
taatgcagatcactcaagaggcagc

SEQ ID NO: 2418753 - DNA, 25 bp, Homo sapien
tgaaagctacacaccattgagatgg

SEQ ID NO: 2418754 - DNA, 25 bp, Homo sapien
tagcagtctgaatggtagagagtcc

SEQ ID NO: 2418755 - DNA, 25 bp, Homo sapien
acttgtacggttggctggtgctttc

SEQ ID NO: 2418756 - DNA, 25 bp, Homo sapien
gctgacgtctgtacttgacataacc

SEQ ID NO: 2418757 - DNA, 25 bp, Homo sapien
catttgaatacaagaatgcctatga

SEQ ID NO: 2418758 - DNA, 25 bp, Homo sapien
caaagggtgctgaaatgacttgtac

SEQ ID NO: 2418759 - DNA, 25 bp, Homo sapien
cctcttcgactgagcgtggagtttc

SEQ ID NO: 2418760 - DNA, 25 bp, Homo sapien
ctcttcgactgagcgtggagtttcg

SEQ ID NO: 2418761 - DNA, 25 bp, Homo sapien
ctgagcgtggagtttcgggagggac

SEQ ID NO: 2418762 - DNA, 25 bp, Homo sapien
tcgactgagcgtggagtttcgggag

SEQ ID NO: 2418763 - DNA, 25 bp, Homo sapien
caggctactttcagccctggtggat

SEQ ID NO: 2418764 - DNA, 25 bp, Homo sapien
tcaggctactttcagccctggtgga

SEQ ID NO: 2418765 - DNA, 25 bp, Homo sapien
aggctactttcagccctggtggatt

SEQ ID NO: 2418766 - DNA, 25 bp, Homo sapien
ggctactttcagccctggtggattt

SEQ ID NO: 2418767 - DNA, 25 bp, Homo sapien
cttccccacctccccacatccccat

SEQ ID NO: 2418768 - DNA, 25 bp, Homo sapien
catgacttttgtgggccctcggcat

SEQ ID NO: 2418769 - DNA, 25 bp, Homo sapien
aaaatcatattttacgactctgtat

SEQ ID NO: 2418770 - DNA, 25 bp, Homo sapien
tttgtgggccctcggcatttttgcc

SEQ ID NO: 2418771 - DNA, 25 bp, Homo sapien
tataatgaccagtataatccaggct

SEQ ID NO: 2418772 - DNA, 25 bp, Homo sapien
atttgggtgtggccaccaagctgtc

SEQ ID NO: 2418773 - DNA, 25 bp, Homo sapien
ctggatttgggtgtggccaccaagc

SEQ ID NO: 2418774 - DNA, 25 bp, Homo sapien
tggatttgggtgtggccaccaagct

SEQ ID NO: 2418775 - DNA, 25 bp, Homo sapien
tgggtgtggccaccaagctgtcctg

SEQ ID NO: 2418776 - DNA, 25 bp, Homo sapien
gattcatgcagggtgattcggagcc

SEQ ID NO: 2418777 - DNA, 25 bp, Homo sapien
tgtgaatgcctgtgatggagaggga

SEQ ID NO: 2418778 - DNA, 25 bp, Homo sapien
tgtgcctccgggctggtgggaaaac

SEQ ID NO: 2418779 - DNA, 25 bp, Homo sapien
gagagggaatgctgtattctggctc

SEQ ID NO: 2418780 - DNA, 25 bp, Homo sapien
ttgtactgggcttgaaaactctttc

SEQ ID NO: 2418781 - DNA, 25 bp, Homo sapien
aactttggttcacagaattcactct

SEQ ID NO: 2418782 - DNA, 25 bp, Homo sapien
tcaatatcgtggaaactttggttca

SEQ ID NO: 2418783 - DNA, 25 bp, Homo sapien
agccctctgtctctgccgtcccggt

SEQ ID NO: 2418784 - DNA, 25 bp, Homo sapien
ttccaaacggtgtctgtattttgat

SEQ ID NO: 2418785 - DNA, 25 bp, Homo sapien
caggccaaatctggttaagaagggc

SEQ ID NO: 2418786 - DNA, 25 bp, Homo sapien
acaggccaaatctggttaagaaggg

SEQ ID NO: 2418787 - DNA, 25 bp, Homo sapien
tcctgaacaaggctgtctgccagca

SEQ ID NO: 2418788 - DNA, 25 bp, Homo sapien
tcaagtcgtttatccagcgctggct

SEQ ID NO: 2418789 - DNA, 25 bp, Homo sapien
tgctttcgttcttggcttggagact

SEQ ID NO: 2418790 - DNA, 25 bp, Homo sapien
agcgctggctgctttcgttcttggc

SEQ ID NO: 2418791 - DNA, 25 bp, Homo sapien
tggagaaagcacttcaagtcgttta

SEQ ID NO: 2418792 - DNA, 25 bp, Homo sapien
taaagcagatgttattagtgggcat

SEQ ID NO: 2418793 - DNA, 25 bp, Homo sapien
atggctataaagcagatgttattag

SEQ ID NO: 2418794 - DNA, 25 bp, Homo sapien
gctataaagcagatgttattagtgg

SEQ ID NO: 2418795 - DNA, 25 bp, Homo sapien
tataaagcagatgttattagtgggc

SEQ ID NO: 2418796 - DNA, 25 bp, Homo sapien
agactttccttatgtagactttcag

SEQ ID NO: 2418797 - DNA, 25 bp, Homo sapien
agagttcctgacagtgtagcatggg

SEQ ID NO: 2418798 - DNA, 25 bp, Homo sapien
gcctagggtctgagatagactttcc

SEQ ID NO: 2418799 - DNA, 25 bp, Homo sapien
agaaaacccttgtatcttgtggtgg

SEQ ID NO: 2418800 - DNA, 25 bp, Homo sapien
gatttgcttctcaaaccatagcttg

SEQ ID NO: 2418801 - DNA, 25 bp, Homo sapien
gaattctgagttttcctggatttgc

SEQ ID NO: 2418802 - DNA, 25 bp, Homo sapien
tgcatcccaccatttcagcactggt

SEQ ID NO: 2418803 - DNA, 25 bp, Homo sapien
ttcctccatcagttaagcaatccac

SEQ ID NO: 2418804 - DNA, 25 bp, Homo sapien
gaggcaagccagtcttaaaagtttg

SEQ ID NO: 2418805 - DNA, 25 bp, Homo sapien
ggtaatctttgcagccaagcaccca

SEQ ID NO: 2418806 - DNA, 25 bp, Homo sapien
gaaatgctgccaaagttagggcctg

SEQ ID NO: 2418807 - DNA, 25 bp, Homo sapien
taaaccaagactctggcatggcaca

SEQ ID NO: 2418808 - DNA, 25 bp, Homo sapien
tgttgcagaagcttcgcatcccaac

SEQ ID NO: 2418809 - DNA, 25 bp, Homo sapien
gagatgcagctgaatcacatgtggc

SEQ ID NO: 2418810 - DNA, 25 bp, Homo sapien
acatgtggcagcccttgttgcagaa

SEQ ID NO: 2418811 - DNA, 25 bp, Homo sapien
cttgtctgtgtacacacgagcataa

SEQ ID NO: 2418812 - DNA, 25 bp, Homo sapien
agctgccagatgaagtgaacgtctc

SEQ ID NO: 2418813 - DNA, 25 bp, Homo sapien
tctccaggtgatcgctctatgtgat

SEQ ID NO: 2418814 - DNA, 25 bp, Homo sapien
tctcttcccagtctgaaggcttctc

SEQ ID NO: 2418815 - DNA, 25 bp, Homo sapien
tgatcgctctatgtgatccttctgt

SEQ ID NO: 2418816 - DNA, 25 bp, Homo sapien
aagataacttgaaggtaggatacag

SEQ ID NO: 2418817 - DNA, 25 bp, Homo sapien
taacttgaaggtaggatacaggaag

SEQ ID NO: 2418818 - DNA, 25 bp, Homo sapien
aaggtaggatacaggaagttgttgc

SEQ ID NO: 2418819 - DNA, 25 bp, Homo sapien
taggatacaggaagttgttgcttca

SEQ ID NO: 2418820 - DNA, 25 bp, Homo sapien
tgccaagtgtgcttcgaatacaact

SEQ ID NO: 2418821 - DNA, 25 bp, Homo sapien
tttgccaagtgtgcttcgaatacaa

SEQ ID NO: 2418822 - DNA, 25 bp, Homo sapien
agtgtgcttcgaatacaacttctct

SEQ ID NO: 2418823 - DNA, 25 bp, Homo sapien
ctttttgccaagtgtgcttcgaata

SEQ ID NO: 2418824 - DNA, 25 bp, Homo sapien
agcaagccgaggctgcgtctccagt

SEQ ID NO: 2418825 - DNA, 25 bp, Homo sapien
tactgggagcagtgttgacaggcct

SEQ ID NO: 2418826 - DNA, 25 bp, Homo sapien
cgggtgtggagataccatatggctt

SEQ ID NO: 2418827 - DNA, 25 bp, Homo sapien
gaggagataataaggttggccccaa

SEQ ID NO: 2418828 - DNA, 25 bp, Homo sapien
gagaggcccacgtctctggaaagtc

SEQ ID NO: 2418829 - DNA, 25 bp, Homo sapien
ggcccacgtctctggaaagtctgca

SEQ ID NO: 2418830 - DNA, 25 bp, Homo sapien
gaggcccacgtctctggaaagtctg

SEQ ID NO: 2418831 - DNA, 25 bp, Homo sapien
aggcccacgtctctggaaagtctgc

SEQ ID NO: 2418832 - DNA, 25 bp, Homo sapien
cttaggatgaccgtaggcagaagga

SEQ ID NO: 2418833 - DNA, 25 bp, Homo sapien
aagaaagtggctcttaggatgaccg

SEQ ID NO: 2418834 - DNA, 25 bp, Homo sapien
gaggttagaagcctgcccttctgat

SEQ ID NO: 2418835 - DNA, 25 bp, Homo sapien
cagaaggaggttagaagcctgccct

SEQ ID NO: 2418836 - DNA, 25 bp, Homo sapien
taagagtaaggaggtttgtgtagca

SEQ ID NO: 2418837 - DNA, 25 bp, Homo sapien
ccaggtagctgagaatgggagcaca

SEQ ID NO: 2418838 - DNA, 25 bp, Homo sapien
tgttatctagggcagcaatggcact

SEQ ID NO: 2418839 - DNA, 25 bp, Homo sapien
cccactgccatgttagtaagagtaa

SEQ ID NO: 2418840 - DNA, 25 bp, Homo sapien
cagcggttccattgagttggagtgc

SEQ ID NO: 2418841 - DNA, 25 bp, Homo sapien
aagcagcggttccattgagttggag

SEQ ID NO: 2418842 - DNA, 25 bp, Homo sapien
ggttccattgagttggagtgcttca

SEQ ID NO: 2418843 - DNA, 25 bp, Homo sapien
gcggttccattgagttggagtgctt

SEQ ID NO: 2418844 - DNA, 25 bp, Homo sapien
ggtctctcccatcatacactgtggc

SEQ ID NO: 2418845 - DNA, 25 bp, Homo sapien
agaggtctctcccatcatacactgt

SEQ ID NO: 2418846 - DNA, 25 bp, Homo sapien
gttttggattcttatcttgatttcc

SEQ ID NO: 2418847 - DNA, 25 bp, Homo sapien
tggctccttgcttttgccaccctct

SEQ ID NO: 2418848 - DNA, 25 bp, Homo sapien
catacttgatatgtatatctaaagt

SEQ ID NO: 2418849 - DNA, 25 bp, Homo sapien
aataataattggattagccttggca

SEQ ID NO: 2418850 - DNA, 25 bp, Homo sapien
caacatacttgatatgtatatctaa

SEQ ID NO: 2418851 - DNA, 25 bp, Homo sapien
gtcatttatcaacatacttgatatg

SEQ ID NO: 2418852 - DNA, 25 bp, Homo sapien
tctaatactttccatatgttcacta

SEQ ID NO: 2418853 - DNA, 25 bp, Homo sapien
caatgggggagacagttttattcca

SEQ ID NO: 2418854 - DNA, 25 bp, Homo sapien
tcctgcaatatgtccttggaaggtc

SEQ ID NO: 2418855 - DNA, 25 bp, Homo sapien
cactattacagaatcctgcaatatg

SEQ ID NO: 2418856 - DNA, 25 bp, Homo sapien
gggcctgcgtttccaatcatgctgt

SEQ ID NO: 2418857 - DNA, 25 bp, Homo sapien
tggaagtttattccccagtgacacc

SEQ ID NO: 2418858 - DNA, 25 bp, Homo sapien
cctgacttagcccatatgtgcggaa

SEQ ID NO: 2418859 - DNA, 25 bp, Homo sapien
gaaatgaggttacgttggaccatcc

SEQ ID NO: 2418860 - DNA, 25 bp, Homo sapien
tgttagcattgggaaagtctactgt

SEQ ID NO: 2418861 - DNA, 25 bp, Homo sapien
tgtaaatgcgggaataattaagaat

SEQ ID NO: 2418862 - DNA, 25 bp, Homo sapien
ggaaagtctactgtaaatgcgggaa

SEQ ID NO: 2418863 - DNA, 25 bp, Homo sapien
tggatttttctgttagcattgggaa

SEQ ID NO: 2418864 - DNA, 25 bp, Homo sapien
caaggtcccctttgaagcatcatcc

SEQ ID NO: 2418865 - DNA, 25 bp, Homo sapien
tgccactgcccattgattactgaag

SEQ ID NO: 2418866 - DNA, 25 bp, Homo sapien
cattagatgtttgcaggataggtca

SEQ ID NO: 2418867 - DNA, 25 bp, Homo sapien
taatggtgaataggttcaaggtccc

SEQ ID NO: 2418868 - DNA, 25 bp, Homo sapien
tctagcgcctctctatggtgctgga

SEQ ID NO: 2418869 - DNA, 25 bp, Homo sapien
gaagatggtcactagcttctgaagc

SEQ ID NO: 2418870 - DNA, 25 bp, Homo sapien
gaaaattctaggtttgtccaagcca

SEQ ID NO: 2418871 - DNA, 25 bp, Homo sapien
tctgtgagctaaggataaacaagcc

SEQ ID NO: 2418872 - DNA, 25 bp, Homo sapien
tcttcccaggtgtcttgagcggctg

SEQ ID NO: 2418873 - DNA, 25 bp, Homo sapien
taaccaggcagagcgagttcgccgt

SEQ ID NO: 2418874 - DNA, 25 bp, Homo sapien
cagtcactccagagtctaaccaggc

SEQ ID NO: 2418875 - DNA, 25 bp, Homo sapien
cgtgaatcgagctccagcgacgttg

SEQ ID NO: 2418876 - DNA, 25 bp, Homo sapien
tttcctgagttaggtatctgccctc

SEQ ID NO: 2418877 - DNA, 25 bp, Homo sapien
tatctgccctcatcatcagacccaa

SEQ ID NO: 2418878 - DNA, 25 bp, Homo sapien
catcatcagacccaaatcggacggg

SEQ ID NO: 2418879 - DNA, 25 bp, Homo sapien
gttagtttcctgagttaggtatctg

SEQ ID NO: 2418880 - DNA, 25 bp, Homo sapien
taggggacacctccgaggtagctct

SEQ ID NO: 2418881 - DNA, 25 bp, Homo sapien
ttaggggacacctccgaggtagctc

SEQ ID NO: 2418882 - DNA, 25 bp, Homo sapien
cttggagttaggggacacctccgag

SEQ ID NO: 2418883 - DNA, 25 bp, Homo sapien
gaaggaagaatcgtcgccgtaaatc

SEQ ID NO: 2418884 - DNA, 25 bp, Homo sapien
agctgtgtggatttctgcgatcaga

SEQ ID NO: 2418885 - DNA, 25 bp, Homo sapien
gccgtaaatcttggatggacttccc

SEQ ID NO: 2418886 - DNA, 25 bp, Homo sapien
tttctgcgatcagatggtgaaggaa

SEQ ID NO: 2418887 - DNA, 25 bp, Homo sapien
ttgttcatctgcacaagaacatcca

SEQ ID NO: 2418888 - DNA, 25 bp, Homo sapien
ttcatctgcacaagaacatccatag

SEQ ID NO: 2418889 - DNA, 25 bp, Homo sapien
gcacaagaacatccataggcctcac

SEQ ID NO: 2418890 - DNA, 25 bp, Homo sapien
tctgcacaagaacatccataggcct

SEQ ID NO: 2418891 - DNA, 25 bp, Homo sapien
ttcctttgcatggtttaggaagtct

SEQ ID NO: 2418892 - DNA, 25 bp, Homo sapien
gcttcctttgcatggtttaggaagt

SEQ ID NO: 2418893 - DNA, 25 bp, Homo sapien
taggaagtcttattgttatagtaat

SEQ ID NO: 2418894 - DNA, 25 bp, Homo sapien
cctttgcatggtttaggaagtctta

SEQ ID NO: 2418895 - DNA, 25 bp, Homo sapien
agtatgtatacaagcgcgcaggcca

SEQ ID NO: 2418896 - DNA, 25 bp, Homo sapien
tgcctgtctcccgttgaagatcaac

SEQ ID NO: 2418897 - DNA, 25 bp, Homo sapien
gaagcttcccgggtcctgacagtaa

SEQ ID NO: 2418898 - DNA, 25 bp, Homo sapien
gaagagattctgtgaaacgctccct

SEQ ID NO: 2418899 - DNA, 25 bp, Homo sapien
cgcgacgctccactgctgaaccagt

SEQ ID NO: 2418900 - DNA, 25 bp, Homo sapien
actgctgaaccagtctccgctgcat

SEQ ID NO: 2418901 - DNA, 25 bp, Homo sapien
ccgcaggagggcaccgcgtagctca

SEQ ID NO: 2418902 - DNA, 25 bp, Homo sapien
agctcagcaggaacaccgcgacgct

SEQ ID NO: 2418903 - DNA, 25 bp, Homo sapien
ttatttagcaaccggctactccaac

SEQ ID NO: 2418904 - DNA, 25 bp, Homo sapien
atttagcaaccggctactccaactg

SEQ ID NO: 2418905 - DNA, 25 bp, Homo sapien
tatttagcaaccggctactccaact

SEQ ID NO: 2418906 - DNA, 25 bp, Homo sapien
tttagcaaccggctactccaactgt

SEQ ID NO: 2418907 - DNA, 25 bp, Homo sapien
aaaaagaaacaaatcagaggcgctt

SEQ ID NO: 2418908 - DNA, 25 bp, Homo sapien
gaaaaaagaaacaaatcagaggcgc

SEQ ID NO: 2418909 - DNA, 25 bp, Homo sapien
aaaaaagaaacaaatcagaggcgct

SEQ ID NO: 2418910 - DNA, 25 bp, Homo sapien
tgtttacacgtctcccatagcaatg

SEQ ID NO: 2418911 - DNA, 25 bp, Homo sapien
caatgataagtagtgtgtttacacg

SEQ ID NO: 2418912 - DNA, 25 bp, Homo sapien
catagcaatgtctaattaatctggc

SEQ ID NO: 2418913 - DNA, 25 bp, Homo sapien
gtctaattaatctggccagcagttc

SEQ ID NO: 2418914 - DNA, 25 bp, Homo sapien
agtcagcttctttgcgaaccaggcc

SEQ ID NO: 2418915 - DNA, 25 bp, Homo sapien
gcgaaccaggccctttcgttccaga

SEQ ID NO: 2418916 - DNA, 25 bp, Homo sapien
aagtcagcttctttgcgaaccaggc

SEQ ID NO: 2418917 - DNA, 25 bp, Homo sapien
aggccctttcgttccagagccactt

SEQ ID NO: 2418918 - DNA, 25 bp, Homo sapien
tgcttccggaaagttgattccacac

SEQ ID NO: 2418919 - DNA, 25 bp, Homo sapien
ggctggttgcttccggaaagttgat

SEQ ID NO: 2418920 - DNA, 25 bp, Homo sapien
tggttgcttccggaaagttgattcc

SEQ ID NO: 2418921 - DNA, 25 bp, Homo sapien
tgggctggttgcttccggaaagttg

SEQ ID NO: 2418922 - DNA, 25 bp, Homo sapien
cggcgagggcgggtcgttagtggca

SEQ ID NO: 2418923 - DNA, 25 bp, Homo sapien
gtcgtcgatcaggagggccaggtgg

SEQ ID NO: 2418924 - DNA, 25 bp, Homo sapien
tcaagtgcgtgtgtcgtcgatcagg

SEQ ID NO: 2418925 - DNA, 25 bp, Homo sapien
ggcgggtcgttagtggcagccggag

SEQ ID NO: 2418926 - DNA, 25 bp, Homo sapien
agttgaaaaccgagcggaggaatgt

SEQ ID NO: 2418927 - DNA, 25 bp, Homo sapien
caggttggaggcgagttgaaaaccg

SEQ ID NO: 2418928 - DNA, 25 bp, Homo sapien
aatgttcacacgctccgaggcaaac

SEQ ID NO: 2418929 - DNA, 25 bp, Homo sapien
aaccgagcggaggaatgttcacacg

SEQ ID NO: 2418930 - DNA, 25 bp, Homo sapien
acgagcgggcgccaagaccaccagg

SEQ ID NO: 2418931 - DNA, 25 bp, Homo sapien
ccgagccgggaatgagcggcgagcg

SEQ ID NO: 2418932 - DNA, 25 bp, Homo sapien
agctagtcgcaaagaggtggcgccc

SEQ ID NO: 2418933 - DNA, 25 bp, Homo sapien
gaccccggagctgtcaggagctctg

SEQ ID NO: 2418934 - DNA, 25 bp, Homo sapien
cctgtgaatttaaggagcccgaagc

SEQ ID NO: 2418935 - DNA, 25 bp, Homo sapien
acgcgggctgttggcctgtgaattt

SEQ ID NO: 2418936 - DNA, 25 bp, Homo sapien
tttaaggagcccgaagctcgcctgg

SEQ ID NO: 2418937 - DNA, 25 bp, Homo sapien
gctcggggcgatgcatgagaacctt

SEQ ID NO: 2418938 - DNA, 25 bp, Homo sapien
gtggggagcatcggctagagagagg

SEQ ID NO: 2418939 - DNA, 25 bp, Homo sapien
gggagcatcggctagagagagggag

SEQ ID NO: 2418940 - DNA, 25 bp, Homo sapien
ggggagcatcggctagagagaggga

SEQ ID NO: 2418941 - DNA, 25 bp, Homo sapien
gagtggggagcatcggctagagaga

SEQ ID NO: 2418942 - DNA, 25 bp, Homo sapien
ctttgaacctcgaacactttctgat

SEQ ID NO: 2418943 - DNA, 25 bp, Homo sapien
caaaaagatgcaggagccctaatgt

SEQ ID NO: 2418944 - DNA, 25 bp, Homo sapien
ccttccaaaaagatgcaggagccct

SEQ ID NO: 2418945 - DNA, 25 bp, Homo sapien
gccctaatgtaatcgttagatctga

SEQ ID NO: 2418946 - DNA, 25 bp, Homo sapien
ctgaaagagggaaatcttctcagca

SEQ ID NO: 2418947 - DNA, 25 bp, Homo sapien
gctgaaagagggaaatcttctcagc

SEQ ID NO: 2418948 - DNA, 25 bp, Homo sapien
tgaaagagggaaatcttctcagcag

SEQ ID NO: 2418949 - DNA, 25 bp, Homo sapien
gaaagagggaaatcttctcagcagt

SEQ ID NO: 2418950 - DNA, 25 bp, Homo sapien
gagttgtactggctgctcattgaac

SEQ ID NO: 2418951 - DNA, 25 bp, Homo sapien
cattgaacacaatctcttgaatttc

SEQ ID NO: 2418952 - DNA, 25 bp, Homo sapien
tcaaaaaagaaatcgagttgtactg

SEQ ID NO: 2418953 - DNA, 25 bp, Homo sapien
gctcattgaacacaatctcttgaat

SEQ ID NO: 2418954 - DNA, 25 bp, Homo sapien
taaacacaggtttgagcactacaag

SEQ ID NO: 2418955 - DNA, 25 bp, Homo sapien
agctgcatgcaggcaattagagcaa

SEQ ID NO: 2418956 - DNA, 25 bp, Homo sapien
gacttatctgtatccgagggttatc

SEQ ID NO: 2418957 - DNA, 25 bp, Homo sapien
gagggttatcctcaagaatctcttg

SEQ ID NO: 2418958 - DNA, 25 bp, Homo sapien
tgcttcaagggacggatgacaaacc

SEQ ID NO: 2418959 - DNA, 25 bp, Homo sapien
tgacaaaccgagaggaccaaggctc

SEQ ID NO: 2418960 - DNA, 25 bp, Homo sapien
ctataataactgcttcaagggacgg

SEQ ID NO: 2418961 - DNA, 25 bp, Homo sapien
gacggatgacaaaccgagaggacca

SEQ ID NO: 2418962 - DNA, 25 bp, Homo sapien
gattccaacatccaaagaatatttt

SEQ ID NO: 2418963 - DNA, 25 bp, Homo sapien
tggacagagattccaacatccaaag

SEQ ID NO: 2418964 - DNA, 25 bp, Homo sapien
agagattccaacatccaaagaatat

SEQ ID NO: 2418965 - DNA, 25 bp, Homo sapien
gacagagattccaacatccaaagaa

SEQ ID NO: 2418966 - DNA, 25 bp, Homo sapien
caggtgcaggaacactaaggtggcc

SEQ ID NO: 2418967 - DNA, 25 bp, Homo sapien
tcacacaggacaacgcaatgccatt

SEQ ID NO: 2418968 - DNA, 25 bp, Homo sapien
ttggacaggccaaaagatcacacag

SEQ ID NO: 2418969 - DNA, 25 bp, Homo sapien
tatttttacaccagatcgtgagccc

SEQ ID NO: 2418970 - DNA, 25 bp, Homo sapien
taaaagatgcctctgccactaacta

SEQ ID NO: 2418971 - DNA, 25 bp, Homo sapien
taagctacaattttctcagcggcaa

SEQ ID NO: 2418972 - DNA, 25 bp, Homo sapien
tcagcggcaagactagaataacaat

SEQ ID NO: 2418973 - DNA, 25 bp, Homo sapien
ccttggagtcccatttaaaagatgc

SEQ ID NO: 2418974 - DNA, 25 bp, Homo sapien
caataaatgagagttcaatgttgcg

SEQ ID NO: 2418975 - DNA, 25 bp, Homo sapien
taagacacaatagatctgcagcttg

SEQ ID NO: 2418976 - DNA, 25 bp, Homo sapien
tttctacaataaaagctactgcctc

SEQ ID NO: 2418977 - DNA, 25 bp, Homo sapien
caatgttgcgagtgttttctttccg

SEQ ID NO: 2418978 - DNA, 25 bp, Homo sapien
gttgtatacatctggttgtaaccat

SEQ ID NO: 2418979 - DNA, 25 bp, Homo sapien
tgtggttgtatacatctggttgtaa

SEQ ID NO: 2418980 - DNA, 25 bp, Homo sapien
ctgacatagcatgtggttgtataca

SEQ ID NO: 2418981 - DNA, 25 bp, Homo sapien
cttttctgacatagcatgtggttgt

SEQ ID NO: 2418982 - DNA, 25 bp, Homo sapien
ttgttcaccgactgtggatactgcc

SEQ ID NO: 2418983 - DNA, 25 bp, Homo sapien
gaacattcttgttcaccgactgtgg

SEQ ID NO: 2418984 - DNA, 25 bp, Homo sapien
caccgactgtggatactgcctcggg

SEQ ID NO: 2418985 - DNA, 25 bp, Homo sapien
atataaagatagaacattcttgttc

SEQ ID NO: 2418986 - DNA, 25 bp, Homo sapien
caaaccacagattgtttcatactct

SEQ ID NO: 2418987 - DNA, 25 bp, Homo sapien
aaatcaaaccacagattgtttcata

SEQ ID NO: 2418988 - DNA, 25 bp, Homo sapien
ttagtcctctgatatgtcaaatgca

SEQ ID NO: 2418989 - DNA, 25 bp, Homo sapien
tgtcaaatgcagaaccaatgtaatt

SEQ ID NO: 2418990 - DNA, 25 bp, Homo sapien
tactggaaactgttggccctggcaa

SEQ ID NO: 2418991 - DNA, 25 bp, Homo sapien
tgcaatagtactctaagtgagagac

SEQ ID NO: 2418992 - DNA, 25 bp, Homo sapien
gcatagtaaccttttgcctacacca

SEQ ID NO: 2418993 - DNA, 25 bp, Homo sapien
tgctgtgccaaaggagctaatgggc

SEQ ID NO: 2418994 - DNA, 25 bp, Homo sapien
cctgctagtagttcagggataatat

SEQ ID NO: 2418995 - DNA, 25 bp, Homo sapien
ctgacactaaccctgctagtagttc

SEQ ID NO: 2418996 - DNA, 25 bp, Homo sapien
tcactaggatgaactgctcttgaac

SEQ ID NO: 2418997 - DNA, 25 bp, Homo sapien
gggataatattttcactaggatgaa

SEQ ID NO: 2418998 - DNA, 25 bp, Homo sapien
tgccaatatctgcatactctaggag

SEQ ID NO: 2418999 - DNA, 25 bp, Homo sapien
ggtgtagcatttttcttgccaatat

SEQ ID NO: 2419000 - DNA, 25 bp, Homo sapien
tgcatactctaggagaaagtaaatt

SEQ ID NO: 2419001 - DNA, 25 bp, Homo sapien
aactggtatgtagcggccaggcgtg

SEQ ID NO: 2419002 - DNA, 25 bp, Homo sapien
acagattccatctgacagtccagtg

SEQ ID NO: 2419003 - DNA, 25 bp, Homo sapien
tcctttttcagccaagcttcgtcag

SEQ ID NO: 2419004 - DNA, 25 bp, Homo sapien
tgtgatggctctagtccctttgatg

SEQ ID NO: 2419005 - DNA, 25 bp, Homo sapien
tggctttcgtgatgccgcactctca

SEQ ID NO: 2419006 - DNA, 25 bp, Homo sapien
gacttccctttaggataccagccaa

SEQ ID NO: 2419007 - DNA, 25 bp, Homo sapien
tactgtcagaagtcttggcccaaga

SEQ ID NO: 2419008 - DNA, 25 bp, Homo sapien
tagacactgtccttcgcctcagatg

SEQ ID NO: 2419009 - DNA, 25 bp, Homo sapien
tctaaagggttcaggcattcagaca

SEQ ID NO: 2419010 - DNA, 25 bp, Homo sapien
ccaagtgagattgtcagagggcctc

SEQ ID NO: 2419011 - DNA, 25 bp, Homo sapien
taggagaggccattacagaacctga

SEQ ID NO: 2419012 - DNA, 25 bp, Homo sapien
gtagtgatgctcctctttaggccag

SEQ ID NO: 2419013 - DNA, 25 bp, Homo sapien
caaaggatacacagtttaccaaggc

SEQ ID NO: 2419014 - DNA, 25 bp, Homo sapien
taggtgtactatgcacaatgtggga

SEQ ID NO: 2419015 - DNA, 25 bp, Homo sapien
tgttgggattgcaactacagtgtcc

SEQ ID NO: 2419016 - DNA, 25 bp, Homo sapien
gctaaagtcctgtaattggtgccaa

SEQ ID NO: 2419017 - DNA, 25 bp, Homo sapien
tcttggttacaagatgactgccctc

SEQ ID NO: 2419018 - DNA, 25 bp, Homo sapien
gcacaatagagaaattagagccctc

SEQ ID NO: 2419019 - DNA, 25 bp, Homo sapien
aagggcaggcaccatgtttttcatc

SEQ ID NO: 2419020 - DNA, 25 bp, Homo sapien
tgggcttgcagatacatgtacaaca

SEQ ID NO: 2419021 - DNA, 25 bp, Homo sapien
gaaaagtaagagaggcacatgttct

SEQ ID NO: 2419022 - DNA, 25 bp, Homo sapien
gattcggcgggatcttcttaggacc

SEQ ID NO: 2419023 - DNA, 25 bp, Homo sapien
catcttactggttggcggaggctct

SEQ ID NO: 2419024 - DNA, 25 bp, Homo sapien
tatgctcaaagtccccaggttagtg

SEQ ID NO: 2419025 - DNA, 25 bp, Homo sapien
tcaacagatgagaaacccagtgtcc

SEQ ID NO: 2419026 - DNA, 25 bp, Homo sapien
gcagaggtgttcgaagccgggtggt

SEQ ID NO: 2419027 - DNA, 25 bp, Homo sapien
tgggctaccccaacctgtgtggctg

SEQ ID NO: 2419028 - DNA, 25 bp, Homo sapien
tgacgggcgctgtgttgggcgggcc

SEQ ID NO: 2419029 - DNA, 25 bp, Homo sapien
ccgtgcctcgggtgtacgcgtaggg

SEQ ID NO: 2419030 - DNA, 25 bp, Homo sapien
aggagcgcggacgagcttccgccgc

SEQ ID NO: 2419031 - DNA, 25 bp, Homo sapien
ggagcaggtaagtgaacgctcgcct

SEQ ID NO: 2419032 - DNA, 25 bp, Homo sapien
caggtaagtgaacgctcgccttccg

SEQ ID NO: 2419033 - DNA, 25 bp, Homo sapien
cgggcagcgtgggtgagcggcgcag

SEQ ID NO: 2419034 - DNA, 25 bp, Homo sapien
ctgtcgcagcgaccaggagtcaggg

SEQ ID NO: 2419035 - DNA, 25 bp, Homo sapien
agcgaccaggagtcagggggcgtga

SEQ ID NO: 2419036 - DNA, 25 bp, Homo sapien
gaccaggagtcagggggcgtgacca

SEQ ID NO: 2419037 - DNA, 25 bp, Homo sapien
gcagcgaccaggagtcagggggcgt

SEQ ID NO: 2419038 - DNA, 25 bp, Homo sapien
tcgccggtgggtaccggtatctgca

SEQ ID NO: 2419039 - DNA, 25 bp, Homo sapien
tgggagtgcccactcgttcctgcgc

SEQ ID NO: 2419040 - DNA, 25 bp, Homo sapien
ggtatctgcacgtcccagaatcgag

SEQ ID NO: 2419041 - DNA, 25 bp, Homo sapien
cccagaatcgagtgttttcgaaagt

SEQ ID NO: 2419042 - DNA, 25 bp, Homo sapien
aggggattggttatactgtctgtac

SEQ ID NO: 2419043 - DNA, 25 bp, Homo sapien
gatcacctgattgccctctgctaca

SEQ ID NO: 2419044 - DNA, 25 bp, Homo sapien
tacaatttctattgcgttgagggga

SEQ ID NO: 2419045 - DNA, 25 bp, Homo sapien
tgctgtcggagagttctacacttaa

SEQ ID NO: 2419046 - DNA, 25 bp, Homo sapien
ggtaaatgtagtaagggtcatgcca

SEQ ID NO: 2419047 - DNA, 25 bp, Homo sapien
ctgctgtggcttcaatatatttggt

SEQ ID NO: 2419048 - DNA, 25 bp, Homo sapien
gctgtggcttcaatatatttggtaa

SEQ ID NO: 2419049 - DNA, 25 bp, Homo sapien
tggtaattctcaggaattgatacat

SEQ ID NO: 2419050 - DNA, 25 bp, Homo sapien
tatatttggtaattctcaggaattg

SEQ ID NO: 2419051 - DNA, 25 bp, Homo sapien
ttaggtgtataaacaattaaaatca

SEQ ID NO: 2419052 - DNA, 25 bp, Homo sapien
gcatagaggctgtgataaaagtctc

SEQ ID NO: 2419053 - DNA, 25 bp, Homo sapien
taaaagtctctaatagaaagctcgt

SEQ ID NO: 2419054 - DNA, 25 bp, Homo sapien
ttagcactagtgacaagcatagagg

SEQ ID NO: 2419055 - DNA, 25 bp, Homo sapien
tccagttacacatgttttagaccac

SEQ ID NO: 2419056 - DNA, 25 bp, Homo sapien
tttttaacttcatgatcttccacag

SEQ ID NO: 2419057 - DNA, 25 bp, Homo sapien
ctgtaattagattatgatgcgcatt

SEQ ID NO: 2419058 - DNA, 25 bp, Homo sapien
ttctttagcttcttgggtctctggt

SEQ ID NO: 2419059 - DNA, 25 bp, Homo sapien
tactggcgagccacaatttaggacc

SEQ ID NO: 2419060 - DNA, 25 bp, Homo sapien
tgttaccttcaaattagccacttgg

SEQ ID NO: 2419061 - DNA, 25 bp, Homo sapien
gagtgatgcgtagtcattgttacct

SEQ ID NO: 2419062 - DNA, 25 bp, Homo sapien
tagtcgctagactatgtttgaaagc

SEQ ID NO: 2419063 - DNA, 25 bp, Homo sapien
tccttaggcacagtcttaatatggg

SEQ ID NO: 2419064 - DNA, 25 bp, Homo sapien
gccactggccaagtttcactggtag

SEQ ID NO: 2419065 - DNA, 25 bp, Homo sapien
tgtttcaatgctagcaactgggtct

SEQ ID NO: 2419066 - DNA, 25 bp, Homo sapien
gacttgtaataatctgccactggcc

SEQ ID NO: 2419067 - DNA, 25 bp, Homo sapien
tctctatttcatctaaaactggttt

SEQ ID NO: 2419068 - DNA, 25 bp, Homo sapien
ctatttcatctaaaactggtttttg

SEQ ID NO: 2419069 - DNA, 25 bp, Homo sapien
tttctctatttcatctaaaactggt

SEQ ID NO: 2419070 - DNA, 25 bp, Homo sapien
ttttctctatttcatctaaaactgg

SEQ ID NO: 2419071 - DNA, 25 bp, Homo sapien
ttgctttttaaggactgtggtgtgc

SEQ ID NO: 2419072 - DNA, 25 bp, Homo sapien
atttgctttttaaggactgtggtgt

SEQ ID NO: 2419073 - DNA, 25 bp, Homo sapien
tgctttttaaggactgtggtgtgca

SEQ ID NO: 2419074 - DNA, 25 bp, Homo sapien
tttgctttttaaggactgtggtgtg

SEQ ID NO: 2419075 - DNA, 25 bp, Homo sapien
acttttaagtctgaggtgagatgat

SEQ ID NO: 2419076 - DNA, 25 bp, Homo sapien
tggtcttaatgctatttagtcttaa

SEQ ID NO: 2419077 - DNA, 25 bp, Homo sapien
tttggcagtagtctatttggtctta

SEQ ID NO: 2419078 - DNA, 25 bp, Homo sapien
aagcattgatatttggcagtagtct

SEQ ID NO: 2419079 - DNA, 25 bp, Homo sapien
gcattgatatttggcagtagtctat

SEQ ID NO: 2419080 - DNA, 25 bp, Homo sapien
gcaatttgtcctcagtgtcgggctt

SEQ ID NO: 2419081 - DNA, 25 bp, Homo sapien
tcttccacttttatcttgaccctct

SEQ ID NO: 2419082 - DNA, 25 bp, Homo sapien
cttccacttttatcttgaccctctc

SEQ ID NO: 2419083 - DNA, 25 bp, Homo sapien
ttggattttcccagcaatttgtcct

SEQ ID NO: 2419084 - DNA, 25 bp, Homo sapien
ccttattgaagactgcttgtactta

SEQ ID NO: 2419085 - DNA, 25 bp, Homo sapien
cttattgaagactgcttgtacttac

SEQ ID NO: 2419086 - DNA, 25 bp, Homo sapien
cagtgagtttctgttagccatttca

SEQ ID NO: 2419087 - DNA, 25 bp, Homo sapien
tccagtgagtttctgttagccattt

SEQ ID NO: 2419088 - DNA, 25 bp, Homo sapien
ccagtgagtttctgttagccatttc

SEQ ID NO: 2419089 - DNA, 25 bp, Homo sapien
atgaatattgtagactgggtatttg

SEQ ID NO: 2419090 - DNA, 25 bp, Homo sapien
gaatattgtagactgggtatttgca

SEQ ID NO: 2419091 - DNA, 25 bp, Homo sapien
atattgtagactgggtatttgcagc

SEQ ID NO: 2419092 - DNA, 25 bp, Homo sapien
attgtagactgggtatttgcagcca

SEQ ID NO: 2419093 - DNA, 25 bp, Homo sapien
aagtgtaactcagtgtaatggcaaa

SEQ ID NO: 2419094 - DNA, 25 bp, Homo sapien
aggaagtgtaactcagtgtaatggc

SEQ ID NO: 2419095 - DNA, 25 bp, Homo sapien
ccaaacataacagtaacaatcctca

SEQ ID NO: 2419096 - DNA, 25 bp, Homo sapien
gcacttgggcaccaaaccaaccaaa

SEQ ID NO: 2419097 - DNA, 25 bp, Homo sapien
gaatctcagcagtctgacagtcatt

SEQ ID NO: 2419098 - DNA, 25 bp, Homo sapien
tatctccttcattctaggcttgctg

SEQ ID NO: 2419099 - DNA, 25 bp, Homo sapien
catcctaggcttgctgtatatctcc

SEQ ID NO: 2419100 - DNA, 25 bp, Homo sapien
ttatagcttcctagtctaatgagcc

SEQ ID NO: 2419101 - DNA, 25 bp, Homo sapien
ggtaatgctggcctcttagaataca

SEQ ID NO: 2419102 - DNA, 25 bp, Homo sapien
caacattagcaatttgtgccgtctc

SEQ ID NO: 2419103 - DNA, 25 bp, Homo sapien
tagcctggctagagacttactgatt

SEQ ID NO: 2419104 - DNA, 25 bp, Homo sapien
tctttaataagtataggcctgtcca

SEQ ID NO: 2419105 - DNA, 25 bp, Homo sapien
tgaaatctgctactccaccctaagg

SEQ ID NO: 2419106 - DNA, 25 bp, Homo sapien
ggttaaccaagtctgttactcaaga

SEQ ID NO: 2419107 - DNA, 25 bp, Homo sapien
gggatctttagaccatatagtttga

SEQ ID NO: 2419108 - DNA, 25 bp, Homo sapien
ccctaaggcctgatttctttgaaga

SEQ ID NO: 2419109 - DNA, 25 bp, Homo sapien
gcagatctcttaggatagcatgact

SEQ ID NO: 2419110 - DNA, 25 bp, Homo sapien
gaattaattggatcctcagagagga

SEQ ID NO: 2419111 - DNA, 25 bp, Homo sapien
tagtggcatcccagttgcagtgtgc

SEQ ID NO: 2419112 - DNA, 25 bp, Homo sapien
ggacactgcagcaaagagcagatct

SEQ ID NO: 2419113 - DNA, 25 bp, Homo sapien
tttcctcctcatacagtatcggttc

SEQ ID NO: 2419114 - DNA, 25 bp, Homo sapien
atcggttcgccttgttgcttcttaa

SEQ ID NO: 2419115 - DNA, 25 bp, Homo sapien
taaaggattcttactttcagagtgc

SEQ ID NO: 2419116 - DNA, 25 bp, Homo sapien
tgtgatggcccaatctctgttttcc

SEQ ID NO: 2419117 - DNA, 25 bp, Homo sapien
aacagctctgccatatctccaaaga

SEQ ID NO: 2419118 - DNA, 25 bp, Homo sapien
ttctgaatccacaggctccttactt

SEQ ID NO: 2419119 - DNA, 25 bp, Homo sapien
gttctgaatccacaggctccttact

SEQ ID NO: 2419120 - DNA, 25 bp, Homo sapien
tctgaatccacaggctccttacttg

SEQ ID NO: 2419121 - DNA, 25 bp, Homo sapien
ggccttgatagcctcagcacgtgca

SEQ ID NO: 2419122 - DNA, 25 bp, Homo sapien
atggccttggcattgttagcctgca

SEQ ID NO: 2419123 - DNA, 25 bp, Homo sapien
actcatggccttggcattgttagcc

SEQ ID NO: 2419124 - DNA, 25 bp, Homo sapien
aagggccttgatagcctcagcacgt

SEQ ID NO: 2419125 - DNA, 25 bp, Homo sapien
ggcaaagtgtatgctcctcaggaac

SEQ ID NO: 2419126 - DNA, 25 bp, Homo sapien
caaagtgtatgctcctcaggaactt

SEQ ID NO: 2419127 - DNA, 25 bp, Homo sapien
ttggcaaagtgtatgctcctcagga

SEQ ID NO: 2419128 - DNA, 25 bp, Homo sapien
aagtgtatgctcctcaggaacttgg

SEQ ID NO: 2419129 - DNA, 25 bp, Homo sapien
tttagagattagtgattggggttcc

SEQ ID NO: 2419130 - DNA, 25 bp, Homo sapien
tgattggggttcctttgtgattgga

SEQ ID NO: 2419131 - DNA, 25 bp, Homo sapien
gcgatgtttgcaccataagccacag

SEQ ID NO: 2419132 - DNA, 25 bp, Homo sapien
gccacagctcccatagctgactatt

SEQ ID NO: 2419133 - DNA, 25 bp, Homo sapien
tactgcacgagcaatgaatcatagc

SEQ ID NO: 2419134 - DNA, 25 bp, Homo sapien
tacattcagcgagtgatctagggca

SEQ ID NO: 2419135 - DNA, 25 bp, Homo sapien
taaaagggcatatattactgcacga

SEQ ID NO: 2419136 - DNA, 25 bp, Homo sapien
tcatagcttctgcagttaatggtgg

SEQ ID NO: 2419137 - DNA, 25 bp, Homo sapien
ggcctctattatggtgtctttttct

SEQ ID NO: 2419138 - DNA, 25 bp, Homo sapien
tgaaggtcactctgtggaacttgca

SEQ ID NO: 2419139 - DNA, 25 bp, Homo sapien
ttgcaatcaggtggctgctttgagg

SEQ ID NO: 2419140 - DNA, 25 bp, Homo sapien
tggaacttgcatagaaccactggct

SEQ ID NO: 2419141 - DNA, 25 bp, Homo sapien
ccaacggacatcctctgtgaaggtc

SEQ ID NO: 2419142 - DNA, 25 bp, Homo sapien
ctttgaccagtttgggacatgagct

SEQ ID NO: 2419143 - DNA, 25 bp, Homo sapien
gagaatcctgcaagactgaactcag

SEQ ID NO: 2419144 - DNA, 25 bp, Homo sapien
tctttccctgggcaatccatccaga

SEQ ID NO: 2419145 - DNA, 25 bp, Homo sapien
gattcaatcccaacggagctatctt

SEQ ID NO: 2419146 - DNA, 25 bp, Homo sapien
aaaagagggaatagaatcaagtctt

SEQ ID NO: 2419147 - DNA, 25 bp, Homo sapien
actgaaccataactcagggctgcag

SEQ ID NO: 2419148 - DNA, 25 bp, Homo sapien
tgagggcgggcagataactgaacca

SEQ ID NO: 2419149 - DNA, 25 bp, Homo sapien
tactctaagaatgtgtcccgcactg

SEQ ID NO: 2419150 - DNA, 25 bp, Homo sapien
tctggactgctaagtactcctggct

SEQ ID NO: 2419151 - DNA, 25 bp, Homo sapien
ggactgctaagtactcctggctggc

SEQ ID NO: 2419152 - DNA, 25 bp, Homo sapien
cattttccattcgtttttgcccctg

SEQ ID NO: 2419153 - DNA, 25 bp, Homo sapien
attctggactgctaagtactcctgg

SEQ ID NO: 2419154 - DNA, 25 bp, Homo sapien
acatcccttctgttcgcttctatgg

SEQ ID NO: 2419155 - DNA, 25 bp, Homo sapien
gttaaggctaagagtgctgaaagga

SEQ ID NO: 2419156 - DNA, 25 bp, Homo sapien
taatgttcaaggaacctggtccttc

SEQ ID NO: 2419157 - DNA, 25 bp, Homo sapien
tggtccttcacaatccatggagaag

SEQ ID NO: 2419158 - DNA, 25 bp, Homo sapien
taggtgactacagggtaaagggtca

SEQ ID NO: 2419159 - DNA, 25 bp, Homo sapien
ggatttccatgagtgtatgtttctc

SEQ ID NO: 2419160 - DNA, 25 bp, Homo sapien
tatgtttctctaatgtaaggttttc

SEQ ID NO: 2419161 - DNA, 25 bp, Homo sapien
caaaatgactcagtttagactgata

SEQ ID NO: 2419162 - DNA, 25 bp, Homo sapien
cacctgcctgagataatgcttgtca

SEQ ID NO: 2419163 - DNA, 25 bp, Homo sapien
catgaccttaggctgtttttggcta

SEQ ID NO: 2419164 - DNA, 25 bp, Homo sapien
cactatgcatagtccatgtgtaagg

SEQ ID NO: 2419165 - DNA, 25 bp, Homo sapien
caaggatacctattactgacatgat

SEQ ID NO: 2419166 - DNA, 25 bp, Homo sapien
tggccttacatgagtgctgggtact

SEQ ID NO: 2419167 - DNA, 25 bp, Homo sapien
gagtgttcttaccaatgccatgtga

SEQ ID NO: 2419168 - DNA, 25 bp, Homo sapien
ccagagtgttgcattgtctatgcca

SEQ ID NO: 2419169 - DNA, 25 bp, Homo sapien
aacaagcaatgttcctggccttaca

SEQ ID NO: 2419170 - DNA, 25 bp, Homo sapien
cctcagcagatgggcattcagtcac

SEQ ID NO: 2419171 - DNA, 25 bp, Homo sapien
ctcagcagatgggcattcagtcacc

SEQ ID NO: 2419172 - DNA, 25 bp, Homo sapien
agatgatggatgcctctctttgccc

SEQ ID NO: 2419173 - DNA, 25 bp, Homo sapien
gcgaagcaccagattcaataatgtg

SEQ ID NO: 2419174 - DNA, 25 bp, Homo sapien
cagaagaagagcaatagcgaagcac

SEQ ID NO: 2419175 - DNA, 25 bp, Homo sapien
cacaatctggcgtaactcatggaac

SEQ ID NO: 2419176 - DNA, 25 bp, Homo sapien
ggtcccagacactggacctatagct

SEQ ID NO: 2419177 - DNA, 25 bp, Homo sapien
tatagctcttaatcgataacacagt

SEQ ID NO: 2419178 - DNA, 25 bp, Homo sapien
cagacactggacctatagctcttaa

SEQ ID NO: 2419179 - DNA, 25 bp, Homo sapien
tcaacatattcatgggtcccagaca

SEQ ID NO: 2419180 - DNA, 25 bp, Homo sapien
taaagaatgctttttctggttcaca

SEQ ID NO: 2419181 - DNA, 25 bp, Homo sapien
agaatgctttttctggttcacatag

SEQ ID NO: 2419182 - DNA, 25 bp, Homo sapien
ctggttcacatagcttgcttctgtg

SEQ ID NO: 2419183 - DNA, 25 bp, Homo sapien
tttttctggttcacatagcttgctt

SEQ ID NO: 2419184 - DNA, 25 bp, Homo sapien
ccattatagtttggtgaaccagtgc

SEQ ID NO: 2419185 - DNA, 25 bp, Homo sapien
tagtttggtgaaccagtgcttatac

SEQ ID NO: 2419186 - DNA, 25 bp, Homo sapien
actctgtaagaaggccaggaacctc

SEQ ID NO: 2419187 - DNA, 25 bp, Homo sapien
catgatctggagttgtgttgtcaca

SEQ ID NO: 2419188 - DNA, 25 bp, Homo sapien
atgatagggatgatattggagtcga

SEQ ID NO: 2419189 - DNA, 25 bp, Homo sapien
gctacatatgggctgccaaatggga

SEQ ID NO: 2419190 - DNA, 25 bp, Homo sapien
actggacccagtatcaccacggtca

SEQ ID NO: 2419191 - DNA, 25 bp, Homo sapien
ttgcctagaggtacagtgaactgta

SEQ ID NO: 2419192 - DNA, 25 bp, Homo sapien
ctgtgctccagaaattgcctagagg

SEQ ID NO: 2419193 - DNA, 25 bp, Homo sapien
agtatcaccacggtcagctcctaca

SEQ ID NO: 2419194 - DNA, 25 bp, Homo sapien
tgttcagccacaggcaagttataaa

SEQ ID NO: 2419195 - DNA, 25 bp, Homo sapien
ttggctgggcttccttgatactgac

SEQ ID NO: 2419196 - DNA, 25 bp, Homo sapien
gggctccctcctcttgtgtggataa

SEQ ID NO: 2419197 - DNA, 25 bp, Homo sapien
ccttttgaggacatcggttggctgg

SEQ ID NO: 2419198 - DNA, 25 bp, Homo sapien
cctctccctccttttccagacacat

SEQ ID NO: 2419199 - DNA, 25 bp, Homo sapien
acctctccctccttttccagacaca

SEQ ID NO: 2419200 - DNA, 25 bp, Homo sapien
ccttgtcaggatggaaaagtcactg

SEQ ID NO: 2419201 - DNA, 25 bp, Homo sapien
gaataatggttgaacctcagccaag

SEQ ID NO: 2419202 - DNA, 25 bp, Homo sapien
cactggatccattgattaagcgagc

SEQ ID NO: 2419203 - DNA, 25 bp, Homo sapien
aaagccttcgttggagaccccagct

SEQ ID NO: 2419204 - DNA, 25 bp, Homo sapien
cactagccagagtgattttggccca

SEQ ID NO: 2419205 - DNA, 25 bp, Homo sapien
gcaggcatctggcatttaagacaag

SEQ ID NO: 2419206 - DNA, 25 bp, Homo sapien
tggcccatacccgtcctttctgaat

SEQ ID NO: 2419207 - DNA, 25 bp, Homo sapien
agcttggtaaccatggacactagcc

SEQ ID NO: 2419208 - DNA, 25 bp, Homo sapien
tgtttagattcttgacggcagccgc

SEQ ID NO: 2419209 - DNA, 25 bp, Homo sapien
tcctcagagaattccaagccgtgtt

SEQ ID NO: 2419210 - DNA, 25 bp, Homo sapien
ggcaccttccttctattggcaataa

SEQ ID NO: 2419211 - DNA, 25 bp, Homo sapien
cagccgccatggagcactgctgtgt

SEQ ID NO: 2419212 - DNA, 25 bp, Homo sapien
caaagataatctgctaatgcctgtg

SEQ ID NO: 2419213 - DNA, 25 bp, Homo sapien
gctgccaaagataatctgctaatgc

SEQ ID NO: 2419214 - DNA, 25 bp, Homo sapien
tgccaaagataatctgctaatgcct

SEQ ID NO: 2419215 - DNA, 25 bp, Homo sapien
cctagctgccaaagataatctgcta

SEQ ID NO: 2419216 - DNA, 25 bp, Homo sapien
gatctttcttattatctactctctt

SEQ ID NO: 2419217 - DNA, 25 bp, Homo sapien
ttttcctgaacaaacatcattcata

SEQ ID NO: 2419218 - DNA, 25 bp, Homo sapien
agacatctctccttcaaaaactata

SEQ ID NO: 2419219 - DNA, 25 bp, Homo sapien
ttgtctccttaagtacttttcctga

SEQ ID NO: 2419220 - DNA, 25 bp, Homo sapien
gacatctctccttcaaaaactatat

SEQ ID NO: 2419221 - DNA, 25 bp, Homo sapien
taaagtagtcggcacaaagattggc

SEQ ID NO: 2419222 - DNA, 25 bp, Homo sapien
tatctattccacagggttgccgtga

SEQ ID NO: 2419223 - DNA, 25 bp, Homo sapien
gcagcgccagctaaactatgatcat

SEQ ID NO: 2419224 - DNA, 25 bp, Homo sapien
gggcaatagaggtaacttccccaca

SEQ ID NO: 2419225 - DNA, 25 bp, Homo sapien
catgctcataactgacaatacacat

SEQ ID NO: 2419226 - DNA, 25 bp, Homo sapien
gaggagaggtaagacatgctcataa

SEQ ID NO: 2419227 - DNA, 25 bp, Homo sapien
gagaggtaagacatgctcataactg

SEQ ID NO: 2419228 - DNA, 25 bp, Homo sapien
ggtaagacatgctcataactgacaa

SEQ ID NO: 2419229 - DNA, 25 bp, Homo sapien
ccaagttgtaaagccggagaccagg

SEQ ID NO: 2419230 - DNA, 25 bp, Homo sapien
gagaaccggagaagccagtagtgtg

SEQ ID NO: 2419231 - DNA, 25 bp, Homo sapien
gtcccatataactttctgcaagctg

SEQ ID NO: 2419232 - DNA, 25 bp, Homo sapien
tggctcagtccaagttgtaaagccg

SEQ ID NO: 2419233 - DNA, 25 bp, Homo sapien
gccagaactaaatccgcctccatag

SEQ ID NO: 2419234 - DNA, 25 bp, Homo sapien
gatccatccaaatacagggccagaa

SEQ ID NO: 2419235 - DNA, 25 bp, Homo sapien
gattacccattctcagaggttcgtg

SEQ ID NO: 2419236 - DNA, 25 bp, Homo sapien
gatttagccaactcctgattaccca

SEQ ID NO: 2419237 - DNA, 25 bp, Homo sapien
cactctaccgggaatcatgctgttt

SEQ ID NO: 2419238 - DNA, 25 bp, Homo sapien
tacacccactctaccgggaatcatg

SEQ ID NO: 2419239 - DNA, 25 bp, Homo sapien
ctctaccgggaatcatgctgtttcc

SEQ ID NO: 2419240 - DNA, 25 bp, Homo sapien
cccactctaccgggaatcatgctgt

SEQ ID NO: 2419241 - DNA, 25 bp, Homo sapien
tgaggaataacatgaagaactggtt

SEQ ID NO: 2419242 - DNA, 25 bp, Homo sapien
gaataacatgaagaactggttgagg

SEQ ID NO: 2419243 - DNA, 25 bp, Homo sapien
tgaccaactctgaccgactctgcct

SEQ ID NO: 2419244 - DNA, 25 bp, Homo sapien
cctgagagcaagggaaaagacttca

SEQ ID NO: 2419245 - DNA, 25 bp, Homo sapien
tctggggctgcccagtagccttgtt

SEQ ID NO: 2419246 - DNA, 25 bp, Homo sapien
gggctgcccagtagccttgttctgc

SEQ ID NO: 2419247 - DNA, 25 bp, Homo sapien
ggctgcccagtagccttgttctgct

SEQ ID NO: 2419248 - DNA, 25 bp, Homo sapien
tggggctgcccagtagccttgttct

SEQ ID NO: 2419249 - DNA, 25 bp, Homo sapien
ttactgagctttgtcttggccagac

SEQ ID NO: 2419250 - DNA, 25 bp, Homo sapien
tcattactgagctttgtcttggcca

SEQ ID NO: 2419251 - DNA, 25 bp, Homo sapien
actgagctttgtcttggccagacag

SEQ ID NO: 2419252 - DNA, 25 bp, Homo sapien
tgagctttgtcttggccagacagga

SEQ ID NO: 2419253 - DNA, 25 bp, Homo sapien
gcctggcccagtagtgaagacttag

SEQ ID NO: 2419254 - DNA, 25 bp, Homo sapien
cagacagtgtagcacaagagagcac

SEQ ID NO: 2419255 - DNA, 25 bp, Homo sapien
cattgggcatctctgaactaagtac

SEQ ID NO: 2419256 - DNA, 25 bp, Homo sapien
ggctttgctatgagttccccagtga

SEQ ID NO: 2419257 - DNA, 25 bp, Homo sapien
ctgcccaaagaaaggacacattctt

SEQ ID NO: 2419258 - DNA, 25 bp, Homo sapien
atctgcctgcccaaagaaaggacac

SEQ ID NO: 2419259 - DNA, 25 bp, Homo sapien
tgtgcctcgtttcccgctttagtcc

SEQ ID NO: 2419260 - DNA, 25 bp, Homo sapien
caaagacacgtctgagaacctgtgc

SEQ ID NO: 2419261 - DNA, 25 bp, Homo sapien
tcagaccaagataattaggtcttgg

SEQ ID NO: 2419262 - DNA, 25 bp, Homo sapien
ttggtcttgatccaaagctgcctcc

SEQ ID NO: 2419263 - DNA, 25 bp, Homo sapien
agcaggggagaggtcatagtcacca

SEQ ID NO: 2419264 - DNA, 25 bp, Homo sapien
gcaggggagaggtcatagtcaccaa

SEQ ID NO: 2419265 - DNA, 25 bp, Homo sapien
gagctgtcccagtggtgaggtaaaa

SEQ ID NO: 2419266 - DNA, 25 bp, Homo sapien
tgtcccagtggtgaggtaaaaggga

SEQ ID NO: 2419267 - DNA, 25 bp, Homo sapien
gctgtcccagtggtgaggtaaaagg

SEQ ID NO: 2419268 - DNA, 25 bp, Homo sapien
ctataaagtgttcagagctgtccca

SEQ ID NO: 2419269 - DNA, 25 bp, Homo sapien
ttatggcatccgctccttggctgag

SEQ ID NO: 2419270 - DNA, 25 bp, Homo sapien
tatggcatccgctccttggctgagg

SEQ ID NO: 2419271 - DNA, 25 bp, Homo sapien
ctctccagaaaaggctgcccggtcc

SEQ ID NO: 2419272 - DNA, 25 bp, Homo sapien
tgctctccagaaaaggctgcccggt

SEQ ID NO: 2419273 - DNA, 25 bp, Homo sapien
ctgacttttgaggctttagactgta

SEQ ID NO: 2419274 - DNA, 25 bp, Homo sapien
gctgaaatctgcttgtggggaaaca

SEQ ID NO: 2419275 - DNA, 25 bp, Homo sapien
tgtcgttgactttctagcgctgact

SEQ ID NO: 2419276 - DNA, 25 bp, Homo sapien
caaatctggagcattaactggggtc

SEQ ID NO: 2419277 - DNA, 25 bp, Homo sapien
ttttccactgaggacgtccagagcc

SEQ ID NO: 2419278 - DNA, 25 bp, Homo sapien
tgccccacagatttcactcctgaga

SEQ ID NO: 2419279 - DNA, 25 bp, Homo sapien
caaaccccggtggtctgttctgcag

SEQ ID NO: 2419280 - DNA, 25 bp, Homo sapien
tcactcctgagaacgctgcactgtt

SEQ ID NO: 2419281 - DNA, 25 bp, Homo sapien
ctgccccccattgcctgcactcacc

SEQ ID NO: 2419282 - DNA, 25 bp, Homo sapien
ctgatcctgccccccattgcctgca

SEQ ID NO: 2419283 - DNA, 25 bp, Homo sapien
cactcaccactgtgcttgcacccat

SEQ ID NO: 2419284 - DNA, 25 bp, Homo sapien
cccattgcctgcactcaccactgtg

SEQ ID NO: 2419285 - DNA, 25 bp, Homo sapien
tcatgaatcctagctgtctgagctg

SEQ ID NO: 2419286 - DNA, 25 bp, Homo sapien
ggagaagctactgaggtccccaaca

SEQ ID NO: 2419287 - DNA, 25 bp, Homo sapien
caacaatcctagctgccaccatgaa

SEQ ID NO: 2419288 - DNA, 25 bp, Homo sapien
acagctattgctgcctaggatcaca

SEQ ID NO: 2419289 - DNA, 25 bp, Homo sapien
tctgcaattcctgagacattaccaa

SEQ ID NO: 2419290 - DNA, 25 bp, Homo sapien
ggtgcttttggtttgctaccaagaa

SEQ ID NO: 2419291 - DNA, 25 bp, Homo sapien
aagagggaagcgcagtggctccact

SEQ ID NO: 2419292 - DNA, 25 bp, Homo sapien
cctgagcctagtttgaggtctgcaa

SEQ ID NO: 2419293 - DNA, 25 bp, Homo sapien
gatctcaatacaacaggcttcctgt

SEQ ID NO: 2419294 - DNA, 25 bp, Homo sapien
aagacatagatctcaatacaacagg

SEQ ID NO: 2419295 - DNA, 25 bp, Homo sapien
tagatctcaatacaacaggcttcct

SEQ ID NO: 2419296 - DNA, 25 bp, Homo sapien
catagatctcaatacaacaggcttc

SEQ ID NO: 2419297 - DNA, 25 bp, Homo sapien
attaggaagatggtattctgaagcc

SEQ ID NO: 2419298 - DNA, 25 bp, Homo sapien
caaatgaagatgtgtattaggaaga

SEQ ID NO: 2419299 - DNA, 25 bp, Homo sapien
tgtattaggaagatggtattctgaa

SEQ ID NO: 2419300 - DNA, 25 bp, Homo sapien
ttgcaaatgaagatgtgtattagga

SEQ ID NO: 2419301 - DNA, 25 bp, Homo sapien
cacagttgaatataagagcttttac

SEQ ID NO: 2419302 - DNA, 25 bp, Homo sapien
tctcagcaaaaagagggatcctgaa

SEQ ID NO: 2419303 - DNA, 25 bp, Homo sapien
cccagtgcgcatgtgggcatgttta

SEQ ID NO: 2419304 - DNA, 25 bp, Homo sapien
tacaagctgatggaactggattcct

SEQ ID NO: 2419305 - DNA, 25 bp, Homo sapien
tccgagccggatatatagagtgtca

SEQ ID NO: 2419306 - DNA, 25 bp, Homo sapien
tctccgagccggatatatagagtgt

SEQ ID NO: 2419307 - DNA, 25 bp, Homo sapien
cagtctccgagccggatatatagag

SEQ ID NO: 2419308 - DNA, 25 bp, Homo sapien
ccgagccggatatatagagtgtcac

SEQ ID NO: 2419309 - DNA, 25 bp, Homo sapien
gttggaccccatcctcgtgctggag

SEQ ID NO: 2419310 - DNA, 25 bp, Homo sapien
tttccttgtggctggagcgcttccc

SEQ ID NO: 2419311 - DNA, 25 bp, Homo sapien
gagccgaaagactggagccgtttcc

SEQ ID NO: 2419312 - DNA, 25 bp, Homo sapien
ggagcaggatttagaggaccactag

SEQ ID NO: 2419313 - DNA, 25 bp, Homo sapien
cagggcgggctttgcccctgtagga

SEQ ID NO: 2419314 - DNA, 25 bp, Homo sapien
tcgccggggtcgtggctgacgcgcg

SEQ ID NO: 2419315 - DNA, 25 bp, Homo sapien
cgcgctggggcgactggtgaggcca

SEQ ID NO: 2419316 - DNA, 25 bp, Homo sapien
ggtcgtggctgacgcgcgctggggc

SEQ ID NO: 2419317 - DNA, 25 bp, Homo sapien
agtgttaagaattccttgattttgc

SEQ ID NO: 2419318 - DNA, 25 bp, Homo sapien
tgtttctggcaacgtctcatcagtg

SEQ ID NO: 2419319 - DNA, 25 bp, Homo sapien
gcattcttgagtgcatttgtttctg

SEQ ID NO: 2419320 - DNA, 25 bp, Homo sapien
ctgaggaagaagcattcttgagtgc

SEQ ID NO: 2419321 - DNA, 25 bp, Homo sapien
gacatactggtcatccaacatctga

SEQ ID NO: 2419322 - DNA, 25 bp, Homo sapien
aacatctgaaggcccttggtattct

SEQ ID NO: 2419323 - DNA, 25 bp, Homo sapien
tgaaggcccttggtattctggacac

SEQ ID NO: 2419324 - DNA, 25 bp, Homo sapien
tctgaaggcccttggtattctggac

SEQ ID NO: 2419325 - DNA, 25 bp, Homo sapien
gaaaaggagaagggcatatctaagg

SEQ ID NO: 2419326 - DNA, 25 bp, Homo sapien
acgggaaaaggagaagggcatatct

SEQ ID NO: 2419327 - DNA, 25 bp, Homo sapien
ctgcagagacgggaaaaggagaagg

SEQ ID NO: 2419328 - DNA, 25 bp, Homo sapien
cgggaaaaggagaagggcatatcta

SEQ ID NO: 2419329 - DNA, 25 bp, Homo sapien
ccttgccaactgcttctattcctac

SEQ ID NO: 2419330 - DNA, 25 bp, Homo sapien
cagtcaggcgttgctggagaaaaac

SEQ ID NO: 2419331 - DNA, 25 bp, Homo sapien
tatccccattggatactctgctgct

SEQ ID NO: 2419332 - DNA, 25 bp, Homo sapien
ggtacaaatccatcgctatccccat

SEQ ID NO: 2419333 - DNA, 25 bp, Homo sapien
aataatcgatttttcctgctccaac

SEQ ID NO: 2419334 - DNA, 25 bp, Homo sapien
tgtatagactgctcatcccatctcc

SEQ ID NO: 2419335 - DNA, 25 bp, Homo sapien
gactgtatagactgctcatcccatc

SEQ ID NO: 2419336 - DNA, 25 bp, Homo sapien
atgactgtatagactgctcatccca

SEQ ID NO: 2419337 - DNA, 25 bp, Homo sapien
actgtatagactgctcatcccatct

SEQ ID NO: 2419338 - DNA, 25 bp, Homo sapien
gacaagtcaaatgagcgggcacacc

SEQ ID NO: 2419339 - DNA, 25 bp, Homo sapien
gaagagtctggtcaggtaccctgta

SEQ ID NO: 2419340 - DNA, 25 bp, Homo sapien
gaatactagggaaggcgcagctttg

SEQ ID NO: 2419341 - DNA, 25 bp, Homo sapien
gataggtagccacatgccattactg

SEQ ID NO: 2419342 - DNA, 25 bp, Homo sapien
cacataaaactgggaggtaggtagg

SEQ ID NO: 2419343 - DNA, 25 bp, Homo sapien
aagtccatatactgtgtcatattct

SEQ ID NO: 2419344 - DNA, 25 bp, Homo sapien
caaacacataaaactgggaggtagg

SEQ ID NO: 2419345 - DNA, 25 bp, Homo sapien
gaagtccatatactgtgtcatattc

SEQ ID NO: 2419346 - DNA, 25 bp, Homo sapien
gctcagctcgtattctggtcataga

SEQ ID NO: 2419347 - DNA, 25 bp, Homo sapien
tctgctcagctcgtattctggtcat

SEQ ID NO: 2419348 - DNA, 25 bp, Homo sapien
ttgtctgctcagctcgtattctggt

SEQ ID NO: 2419349 - DNA, 25 bp, Homo sapien
gctcgtattctggtcatagaggaac

SEQ ID NO: 2419350 - DNA, 25 bp, Homo sapien
gcacccttggccaatatccaaatta

SEQ ID NO: 2419351 - DNA, 25 bp, Homo sapien
atcctttgcacccttggccaatatc

SEQ ID NO: 2419352 - DNA, 25 bp, Homo sapien
cctgaaacagctttatcctggttct

SEQ ID NO: 2419353 - DNA, 25 bp, Homo sapien
aacttctttagtcatctgtccttcc

SEQ ID NO: 2419354 - DNA, 25 bp, Homo sapien
aattatctgccggaaaaggactcca

SEQ ID NO: 2419355 - DNA, 25 bp, Homo sapien
ggaattggcctcacagatcttaaag

SEQ ID NO: 2419356 - DNA, 25 bp, Homo sapien
tctttcaggtagatgcctaggctct

SEQ ID NO: 2419357 - DNA, 25 bp, Homo sapien
aaataaaacaggcatggaattggcc

SEQ ID NO: 2419358 - DNA, 25 bp, Homo sapien
ggagtacagttcacaatcagctcac

SEQ ID NO: 2419359 - DNA, 25 bp, Homo sapien
gagtacagttcacaatcagctcact

SEQ ID NO: 2419360 - DNA, 25 bp, Homo sapien
aaatggagactcctaagcactcagg

SEQ ID NO: 2419361 - DNA, 25 bp, Homo sapien
gagaacacttgcctcggactgccta

SEQ ID NO: 2419362 - DNA, 25 bp, Homo sapien
gaaagctagctttgtgtgctggact

SEQ ID NO: 2419363 - DNA, 25 bp, Homo sapien
cataccaagttgatccagaccaggc

SEQ ID NO: 2419364 - DNA, 25 bp, Homo sapien
tcaaggatgtatatattcctgcatt

SEQ ID NO: 2419365 - DNA, 25 bp, Homo sapien
tattttgttcgttatccctaggcaa

SEQ ID NO: 2419366 - DNA, 25 bp, Homo sapien
agaccctctagattgcctgtaacag

SEQ ID NO: 2419367 - DNA, 25 bp, Homo sapien
tctcatttcttttacccaggtatgt

SEQ ID NO: 2419368 - DNA, 25 bp, Homo sapien
ggcaagcagcagtccctagaatata

SEQ ID NO: 2419369 - DNA, 25 bp, Homo sapien
gatccatgctaagggaaggttgcca

SEQ ID NO: 2419370 - DNA, 25 bp, Homo sapien
tgagaagcttcctacactgggagtg

SEQ ID NO: 2419371 - DNA, 25 bp, Homo sapien
tgggcatctaaccacaaggatggct

SEQ ID NO: 2419372 - DNA, 25 bp, Homo sapien
acactgtcttcatgtcactcgagac

SEQ ID NO: 2419373 - DNA, 25 bp, Homo sapien
gtcactcgagactttaatttcagcc

SEQ ID NO: 2419374 - DNA, 25 bp, Homo sapien
tacttctaaaaccaacctcttatgc

SEQ ID NO: 2419375 - DNA, 25 bp, Homo sapien
caacctcttatgcaatgatcctgtc

SEQ ID NO: 2419376 - DNA, 25 bp, Homo sapien
caggccaaagtgaaagagtccacag

SEQ ID NO: 2419377 - DNA, 25 bp, Homo sapien
catatgtaaggaaccccatcgtgag

SEQ ID NO: 2419378 - DNA, 25 bp, Homo sapien
gctgaaaccatctcctacttcttgc

SEQ ID NO: 2419379 - DNA, 25 bp, Homo sapien
ttccagtagtcagaagtcttcacag

SEQ ID NO: 2419380 - DNA, 25 bp, Homo sapien
agctatttatgcagatctcaatcag

SEQ ID NO: 2419381 - DNA, 25 bp, Homo sapien
gcagccactgtacgctttgacgaca

SEQ ID NO: 2419382 - DNA, 25 bp, Homo sapien
tgcatgagaagatcagagctattta

SEQ ID NO: 2419383 - DNA, 25 bp, Homo sapien
gcttctctcctgtacaaacataata

SEQ ID NO: 2419384 - DNA, 25 bp, Homo sapien
gctcaaaatggctaagtaactcctt

SEQ ID NO: 2419385 - DNA, 25 bp, Homo sapien
agtctactcacgtacttggcagtgg

SEQ ID NO: 2419386 - DNA, 25 bp, Homo sapien
taaaaggtgctttctcgctgcgtgc

SEQ ID NO: 2419387 - DNA, 25 bp, Homo sapien
gacacaatttttatccatggccact

SEQ ID NO: 2419388 - DNA, 25 bp, Homo sapien
caccaagctttataaggcccctatc

SEQ ID NO: 2419389 - DNA, 25 bp, Homo sapien
gcatgcgtgctgtcagaaatctacg

SEQ ID NO: 2419390 - DNA, 25 bp, Homo sapien
taaaacagtggaatacaggtgtagc

SEQ ID NO: 2419391 - DNA, 25 bp, Homo sapien
tagcagaggcaagtcatctatagaa

SEQ ID NO: 2419392 - DNA, 25 bp, Homo sapien
ctcctcaggatttatagctaagtgc

SEQ ID NO: 2419393 - DNA, 25 bp, Homo sapien
taagtgcagccaatcgaatatgaac

SEQ ID NO: 2419394 - DNA, 25 bp, Homo sapien
gaatatgaacccattatactagggc

SEQ ID NO: 2419395 - DNA, 25 bp, Homo sapien
gctcctctggcagttatcttgactg

SEQ ID NO: 2419396 - DNA, 25 bp, Homo sapien
ttagtgcgcatctgcccgaagtcca

SEQ ID NO: 2419397 - DNA, 25 bp, Homo sapien
agcagcccttagtgcgcatctgccc

SEQ ID NO: 2419398 - DNA, 25 bp, Homo sapien
acactgaagcatttagggtctaaac

SEQ ID NO: 2419399 - DNA, 25 bp, Homo sapien
cactgaagcatttagggtctaaacc

SEQ ID NO: 2419400 - DNA, 25 bp, Homo sapien
tcttcgggccataaaagctactcca

SEQ ID NO: 2419401 - DNA, 25 bp, Homo sapien
tcgtcaatctcatgctagctgtagg

SEQ ID NO: 2419402 - DNA, 25 bp, Homo sapien
caatggctgtggcagacgtaattcc

SEQ ID NO: 2419403 - DNA, 25 bp, Homo sapien
tcatgaaaatgctggagacgcatgc

SEQ ID NO: 2419404 - DNA, 25 bp, Homo sapien
gggaaataaggtctctcgcctctgt

SEQ ID NO: 2419405 - DNA, 25 bp, Homo sapien
gttctgaaagtaatggtccagccag

SEQ ID NO: 2419406 - DNA, 25 bp, Homo sapien
gaaattgattcttgactctacacag

SEQ ID NO: 2419407 - DNA, 25 bp, Homo sapien
agtttgcagataaccatttgcccag

SEQ ID NO: 2419408 - DNA, 25 bp, Homo sapien
taaaggagacaactgaatcttaccc

SEQ ID NO: 2419409 - DNA, 25 bp, Homo sapien
tcaggctctgtgtatatggctaagt

SEQ ID NO: 2419410 - DNA, 25 bp, Homo sapien
tcactgcatgggagattaaggcccc

SEQ ID NO: 2419411 - DNA, 25 bp, Homo sapien
tatgtaagattaccttcaggctctg

SEQ ID NO: 2419412 - DNA, 25 bp, Homo sapien
gggctaaggctgatgcatgatgatc

SEQ ID NO: 2419413 - DNA, 25 bp, Homo sapien
cactcgtggggctaaggctgatgca

SEQ ID NO: 2419414 - DNA, 25 bp, Homo sapien
attgtcacagctacccaaggaagat

SEQ ID NO: 2419415 - DNA, 25 bp, Homo sapien
ctaaggctgatgcatgatgatccca

SEQ ID NO: 2419416 - DNA, 25 bp, Homo sapien
taacaaatggcacaccatgtgcggg

SEQ ID NO: 2419417 - DNA, 25 bp, Homo sapien
tgttcctattcgctcttccaacggg

SEQ ID NO: 2419418 - DNA, 25 bp, Homo sapien
tattttgtacctgacagcatgtaga

SEQ ID NO: 2419419 - DNA, 25 bp, Homo sapien
gaagaaaccaagtcacactggggag

SEQ ID NO: 2419420 - DNA, 25 bp, Homo sapien
ctggaaaccatcattctcagcaaac

SEQ ID NO: 2419421 - DNA, 25 bp, Homo sapien
ctatgcaaccataaaaaatgagttc

SEQ ID NO: 2419422 - DNA, 25 bp, Homo sapien
gtcctttgtagggacatggatgaag

SEQ ID NO: 2419423 - DNA, 25 bp, Homo sapien
tatcgcaaggacaaaaaaccaaaca

SEQ ID NO: 2419424 - DNA, 25 bp, Homo sapien
gattcaaatccaagccctagaatta

SEQ ID NO: 2419425 - DNA, 25 bp, Homo sapien
ttctacataccaaacttactgagtg

SEQ ID NO: 2419426 - DNA, 25 bp, Homo sapien
gccagctaagggtttcacttctaca

SEQ ID NO: 2419427 - DNA, 25 bp, Homo sapien
aatcattgctccctctcaaagtgac

SEQ ID NO: 2419428 - DNA, 25 bp, Homo sapien
gagattctcagaaaatcgtgtagcc

SEQ ID NO: 2419429 - DNA, 25 bp, Homo sapien
ccatgcaagttgagaggataaagca

SEQ ID NO: 2419430 - DNA, 25 bp, Homo sapien
gagaaagaatcgagtagccttagag

SEQ ID NO: 2419431 - DNA, 25 bp, Homo sapien
gtatcacgatattggtcaggcgggt

SEQ ID NO: 2419432 - DNA, 25 bp, Homo sapien
gaagagtgcccaattggaaggacaa

SEQ ID NO: 2419433 - DNA, 25 bp, Homo sapien
tccagggatgaatagacaaaaagtg

SEQ ID NO: 2419434 - DNA, 25 bp, Homo sapien
atgctagcacaagtccattttccag

SEQ ID NO: 2419435 - DNA, 25 bp, Homo sapien
caccctccacttgctaagatttata

SEQ ID NO: 2419436 - DNA, 25 bp, Homo sapien
cctggatggctcaagaatgacctat

SEQ ID NO: 2419437 - DNA, 25 bp, Homo sapien
ttgataacagggtcataccaaactc

SEQ ID NO: 2419438 - DNA, 25 bp, Homo sapien
tccaattaggccctttatatggaga

SEQ ID NO: 2419439 - DNA, 25 bp, Homo sapien
gggccacctcctgatcctgtgtcag

SEQ ID NO: 2419440 - DNA, 25 bp, Homo sapien
cctgagggacaaggaattctagcac

SEQ ID NO: 2419441 - DNA, 25 bp, Homo sapien
tatgtagaagaaacctcaagtggac

SEQ ID NO: 2419442 - DNA, 25 bp, Homo sapien
ggtattcaactttgacgtgcgccag

SEQ ID NO: 2419443 - DNA, 25 bp, Homo sapien
catttactacattacaggtcctgca

SEQ ID NO: 2419444 - DNA, 25 bp, Homo sapien
gaaagtaacaaggaatatgcccaaa

SEQ ID NO: 2419445 - DNA, 25 bp, Homo sapien
gcatccagcacgctcaaagtttaag

SEQ ID NO: 2419446 - DNA, 25 bp, Homo sapien
tcagatggctcggaatgtctggttc

SEQ ID NO: 2419447 - DNA, 25 bp, Homo sapien
ggcgccttctcattgcaagatctca

SEQ ID NO: 2419448 - DNA, 25 bp, Homo sapien
cggcctgaggcaactaatactagaa

SEQ ID NO: 2419449 - DNA, 25 bp, Homo sapien
aaggcaaatgggcacacaattcaga

SEQ ID NO: 2419450 - DNA, 25 bp, Homo sapien
tagagactggtctaataatgcccaa

SEQ ID NO: 2419451 - DNA, 25 bp, Homo sapien
cagagttgaagagtcacggcctgag

SEQ ID NO: 2419452 - DNA, 25 bp, Homo sapien
cgtgcaaaacggagatactactgtg

SEQ ID NO: 2419453 - DNA, 25 bp, Homo sapien
tgaaatactgattccaacctggaac

SEQ ID NO: 2419454 - DNA, 25 bp, Homo sapien
gataggagatgtgattgatacggca

SEQ ID NO: 2419455 - DNA, 25 bp, Homo sapien
gagagacagtagtaccgtgcaaaac

SEQ ID NO: 2419456 - DNA, 25 bp, Homo sapien
ggatacatggatcttgatccgggca

SEQ ID NO: 2419457 - DNA, 25 bp, Homo sapien
ccataaggtagtaaacaactggtga

SEQ ID NO: 2419458 - DNA, 25 bp, Homo sapien
aactcaggacatagatggaatgcac

SEQ ID NO: 2419459 - DNA, 25 bp, Homo sapien
gcttgctgaaggtttgctagagctc

SEQ ID NO: 2419460 - DNA, 25 bp, Homo sapien
gcttttcctaagaggtagtctgaag

SEQ ID NO: 2419461 - DNA, 25 bp, Homo sapien
tagaagtaatttgggtgccaggtgc

SEQ ID NO: 2419462 - DNA, 25 bp, Homo sapien
cctacctactcagcagatggaagca

SEQ ID NO: 2419463 - DNA, 25 bp, Homo sapien
gtctgaagtgtacaaatactgcagc

SEQ ID NO: 2419464 - DNA, 25 bp, Homo sapien
tagaaaagaatcacttggtgaggcc

SEQ ID NO: 2419465 - DNA, 25 bp, Homo sapien
taatagtacctgtgtgatagctccc

SEQ ID NO: 2419466 - DNA, 25 bp, Homo sapien
tagagaaggctcattcacgattcag

SEQ ID NO: 2419467 - DNA, 25 bp, Homo sapien
taaacttcatcgtccaaagggctga

SEQ ID NO: 2419468 - DNA, 25 bp, Homo sapien
catttgtgaatgacaccctagttac

SEQ ID NO: 2419469 - DNA, 25 bp, Homo sapien
caatgtttaacatggcacctctcaa

SEQ ID NO: 2419470 - DNA, 25 bp, Homo sapien
tagcggatctttttataactcaccc

SEQ ID NO: 2419471 - DNA, 25 bp, Homo sapien
ggataactggtcttgtcaatatggc

SEQ ID NO: 2419472 - DNA, 25 bp, Homo sapien
ttttattaacaatgtgacctgatca

SEQ ID NO: 2419473 - DNA, 25 bp, Homo sapien
ttttttattaacaatgtgacctgat

SEQ ID NO: 2419474 - DNA, 25 bp, Homo sapien
caatgtgacctgatcacaattcttt

SEQ ID NO: 2419475 - DNA, 25 bp, Homo sapien
ttaacaatgtgacctgatcacaatt

SEQ ID NO: 2419476 - DNA, 25 bp, Homo sapien
ccagttgggcttcttcatcgtttag

SEQ ID NO: 2419477 - DNA, 25 bp, Homo sapien
tcttcaaagcaacactccagttggg

SEQ ID NO: 2419478 - DNA, 25 bp, Homo sapien
aaggatgcgaacatttgcacttctc

SEQ ID NO: 2419479 - DNA, 25 bp, Homo sapien
caatgtctgattttgataccaccca

SEQ ID NO: 2419480 - DNA, 25 bp, Homo sapien
ttatgtctcaggcaaaaagtttttc

SEQ ID NO: 2419481 - DNA, 25 bp, Homo sapien
tatgtctcaggcaaaaagtttttct

SEQ ID NO: 2419482 - DNA, 25 bp, Homo sapien
atgtctcaggcaaaaagtttttctc

SEQ ID NO: 2419483 - DNA, 25 bp, Homo sapien
tgtctcaggcaaaaagtttttctcc

SEQ ID NO: 2419484 - DNA, 25 bp, Homo sapien
ctaaaagaggtaagtggttgtctgt

SEQ ID NO: 2419485 - DNA, 25 bp, Homo sapien
aaaagaggtaagtggttgtctgtgt

SEQ ID NO: 2419486 - DNA, 25 bp, Homo sapien
aaagaggtaagtggttgtctgtgtg

SEQ ID NO: 2419487 - DNA, 25 bp, Homo sapien
taaaagaggtaagtggttgtctgtg

SEQ ID NO: 2419488 - DNA, 25 bp, Homo sapien
acaggtttataggatccaagtctga

SEQ ID NO: 2419489 - DNA, 25 bp, Homo sapien
gaaacgacagcaaattatttcaact

SEQ ID NO: 2419490 - DNA, 25 bp, Homo sapien
aattttccaattccatgtaacatgc

SEQ ID NO: 2419491 - DNA, 25 bp, Homo sapien
tataaattttccaattccatgtaac

SEQ ID NO: 2419492 - DNA, 25 bp, Homo sapien
ttcacttccatggttaaaaataatc

SEQ ID NO: 2419493 - DNA, 25 bp, Homo sapien
agtcacaaggccacataattcacga

SEQ ID NO: 2419494 - DNA, 25 bp, Homo sapien
tcacgatctcagcacaatctttttt

SEQ ID NO: 2419495 - DNA, 25 bp, Homo sapien
tggaatagattacggaagaaaacaa

SEQ ID NO: 2419496 - DNA, 25 bp, Homo sapien
tgaaaagattcctccaacaatacca

SEQ ID NO: 2419497 - DNA, 25 bp, Homo sapien
ttcctccaacaataccacagagtct

SEQ ID NO: 2419498 - DNA, 25 bp, Homo sapien
gattcctccaacaataccacagagt

SEQ ID NO: 2419499 - DNA, 25 bp, Homo sapien
aaagattcctccaacaataccacag

SEQ ID NO: 2419500 - DNA, 25 bp, Homo sapien
tatttcataaatatcccagagactc

SEQ ID NO: 2419501 - DNA, 25 bp, Homo sapien
cctcagtaactgtcaccataagaga

SEQ ID NO: 2419502 - DNA, 25 bp, Homo sapien
gaatggcatgtgctcctcagtaact

SEQ ID NO: 2419503 - DNA, 25 bp, Homo sapien
ctgcagcatggttaatgatacgttc

SEQ ID NO: 2419504 - DNA, 25 bp, Homo sapien
gataacaatgcaacgaatagcctga

SEQ ID NO: 2419505 - DNA, 25 bp, Homo sapien
ctttggaatagctttctcgaagtgc

SEQ ID NO: 2419506 - DNA, 25 bp, Homo sapien
ttaacaattgcatcttcctccagtg

SEQ ID NO: 2419507 - DNA, 25 bp, Homo sapien
tatttttgcccaccgtatctttgga

SEQ ID NO: 2419508 - DNA, 25 bp, Homo sapien
gttttgttggcacaactgtaataaa

SEQ ID NO: 2419509 - DNA, 25 bp, Homo sapien
gtcacagaaaactgatgggtgtctg

SEQ ID NO: 2419510 - DNA, 25 bp, Homo sapien
tgtatgtagttttgttggcacaact

SEQ ID NO: 2419511 - DNA, 25 bp, Homo sapien
cacagaaaactgatgggtgtctgct

SEQ ID NO: 2419512 - DNA, 25 bp, Homo sapien
gattaataattgctggaacaagctc

SEQ ID NO: 2419513 - DNA, 25 bp, Homo sapien
gatctatagcaattttttcagttcc

SEQ ID NO: 2419514 - DNA, 25 bp, Homo sapien
ttgctggaacaagctctccaaaaga

SEQ ID NO: 2419515 - DNA, 25 bp, Homo sapien
tcagttccatctaaaggattaataa

SEQ ID NO: 2419516 - DNA, 25 bp, Homo sapien
aaatgtgcatgaccacgaggatgtg

SEQ ID NO: 2419517 - DNA, 25 bp, Homo sapien
tgtgcatgaccacgaggatgtggaa

SEQ ID NO: 2419518 - DNA, 25 bp, Homo sapien
atgaccacgaggatgtggaattgcc

SEQ ID NO: 2419519 - DNA, 25 bp, Homo sapien
gacaagtgctgccaaatgtgcatga

SEQ ID NO: 2419520 - DNA, 25 bp, Homo sapien
tgacagcaaacgctatcaaggcatg

SEQ ID NO: 2419521 - DNA, 25 bp, Homo sapien
ggaactatagtttgaaaggtcagaa

SEQ ID NO: 2419522 - DNA, 25 bp, Homo sapien
taatccacgagtatgtgttgagcat

SEQ ID NO: 2419523 - DNA, 25 bp, Homo sapien
tatgagaatgagtccagatccttgc

SEQ ID NO: 2419524 - DNA, 25 bp, Homo sapien
taggagtgggtttacaggatatccc

SEQ ID NO: 2419525 - DNA, 25 bp, Homo sapien
gggatttactggacaacagccacag

SEQ ID NO: 2419526 - DNA, 25 bp, Homo sapien
cagacaagaatctagcctgaatgac

SEQ ID NO: 2419527 - DNA, 25 bp, Homo sapien
taatctgagtctagaactgaacccc

SEQ ID NO: 2419528 - DNA, 25 bp, Homo sapien
ggcgcgagccatcggccagaattta

SEQ ID NO: 2419529 - DNA, 25 bp, Homo sapien
tcaacatgttgggaaggcagttctt

SEQ ID NO: 2419530 - DNA, 25 bp, Homo sapien
aaccaagctccaactttgtctaaag

SEQ ID NO: 2419531 - DNA, 25 bp, Homo sapien
taagcaagcctttagtagttagctg

SEQ ID NO: 2419532 - DNA, 25 bp, Homo sapien
tatagatggccatgaattctgcatg

SEQ ID NO: 2419533 - DNA, 25 bp, Homo sapien
ttggagactgtgatgaatcatcttc

SEQ ID NO: 2419534 - DNA, 25 bp, Homo sapien
catatagatggccatgaattctgca

SEQ ID NO: 2419535 - DNA, 25 bp, Homo sapien
tgcatttggagactgtgatgaatca

SEQ ID NO: 2419536 - DNA, 25 bp, Homo sapien
aatacagttaccattttatgatgag

SEQ ID NO: 2419537 - DNA, 25 bp, Homo sapien
tcctgaagtctagacatttataaaa

SEQ ID NO: 2419538 - DNA, 25 bp, Homo sapien
tcaatacagttaccattttatgatg

SEQ ID NO: 2419539 - DNA, 25 bp, Homo sapien
cctgaagtctagacatttataaaaa

SEQ ID NO: 2419540 - DNA, 25 bp, Homo sapien
tgtagcctactctgaatcagctgca

SEQ ID NO: 2419541 - DNA, 25 bp, Homo sapien
ttggtggaagagctgttgatgtact

SEQ ID NO: 2419542 - DNA, 25 bp, Homo sapien
gaatgctcttcttgtagcctactct

SEQ ID NO: 2419543 - DNA, 25 bp, Homo sapien
atcacatcttgaagtgaatgctctt

SEQ ID NO: 2419544 - DNA, 25 bp, Homo sapien
caaatgttatacacagtgggaaggg

SEQ ID NO: 2419545 - DNA, 25 bp, Homo sapien
agagcacagataatttttacagcag

SEQ ID NO: 2419546 - DNA, 25 bp, Homo sapien
tcaacaccaagaacgaactctaatg

SEQ ID NO: 2419547 - DNA, 25 bp, Homo sapien
ctcacagaatgtacgttcaacacca

SEQ ID NO: 2419548 - DNA, 25 bp, Homo sapien
tgctgtggtgaaagatcaaatactg

SEQ ID NO: 2419549 - DNA, 25 bp, Homo sapien
ccactctttctgctgtggtgaaaga

SEQ ID NO: 2419550 - DNA, 25 bp, Homo sapien
ctctttctgctgtggtgaaagatca

SEQ ID NO: 2419551 - DNA, 25 bp, Homo sapien
tctgccactctttctgctgtggtga

SEQ ID NO: 2419552 - DNA, 25 bp, Homo sapien
tacaggcagtcatgctagaatccat

SEQ ID NO: 2419553 - DNA, 25 bp, Homo sapien
ggattttcccagttcagagcaacag

SEQ ID NO: 2419554 - DNA, 25 bp, Homo sapien
ttcataggatagaaaaacccatgtg

SEQ ID NO: 2419555 - DNA, 25 bp, Homo sapien
ccctcaacagaatggagaatccaga

SEQ ID NO: 2419556 - DNA, 25 bp, Homo sapien
aaaccatctgcagatgcaaccattg

SEQ ID NO: 2419557 - DNA, 25 bp, Homo sapien
gcaaccattgtttctgctaaatcca

SEQ ID NO: 2419558 - DNA, 25 bp, Homo sapien
taaatccaatacatccgctccaaca

SEQ ID NO: 2419559 - DNA, 25 bp, Homo sapien
gttcataaactaaaccatctgcaga

SEQ ID NO: 2419560 - DNA, 25 bp, Homo sapien
ttgacacttcatggcaacagtaata

SEQ ID NO: 2419561 - DNA, 25 bp, Homo sapien
cacttcatggcaacagtaatatcta

SEQ ID NO: 2419562 - DNA, 25 bp, Homo sapien
gacacttcatggcaacagtaatatc

SEQ ID NO: 2419563 - DNA, 25 bp, Homo sapien
attgacacttcatggcaacagtaat

SEQ ID NO: 2419564 - DNA, 25 bp, Homo sapien
acttcatccatgtatcttgatatac

SEQ ID NO: 2419565 - DNA, 25 bp, Homo sapien
ttcatccatgtatcttgatatactg

SEQ ID NO: 2419566 - DNA, 25 bp, Homo sapien
gtctacttcgtattcatacttcatc

SEQ ID NO: 2419567 - DNA, 25 bp, Homo sapien
aaaatccttgtctacttcgtattca

SEQ ID NO: 2419568 - DNA, 25 bp, Homo sapien
tacagaacttttaatgttaactgat

SEQ ID NO: 2419569 - DNA, 25 bp, Homo sapien
aacttttaatgttaactgatactca

SEQ ID NO: 2419570 - DNA, 25 bp, Homo sapien
gaacttttaatgttaactgatactc

SEQ ID NO: 2419571 - DNA, 25 bp, Homo sapien
cagaacttttaatgttaactgatac

SEQ ID NO: 2419572 - DNA, 25 bp, Homo sapien
gctgaagtctctacatagctctcag

SEQ ID NO: 2419573 - DNA, 25 bp, Homo sapien
gctctcaggaaccttcggaaaggca

SEQ ID NO: 2419574 - DNA, 25 bp, Homo sapien
gaaccttcggaaaggcatccaactc

SEQ ID NO: 2419575 - DNA, 25 bp, Homo sapien
gtttttttccgattcagtcgcctca

SEQ ID NO: 2419576 - DNA, 25 bp, Homo sapien
tcttctaagtaaatgcccattgagg

SEQ ID NO: 2419577 - DNA, 25 bp, Homo sapien
tcctcttctaagtaaatgcccattg

SEQ ID NO: 2419578 - DNA, 25 bp, Homo sapien
ttgaggaatttatcctatgacaata

SEQ ID NO: 2419579 - DNA, 25 bp, Homo sapien
taagtaaatgcccattgaggaattt

SEQ ID NO: 2419580 - DNA, 25 bp, Homo sapien
tactttccgactaacactgagactg

SEQ ID NO: 2419581 - DNA, 25 bp, Homo sapien
cattactaataagagccttgggcgc

SEQ ID NO: 2419582 - DNA, 25 bp, Homo sapien
ccatgtttcacagaagcccgggtcg

SEQ ID NO: 2419583 - DNA, 25 bp, Homo sapien
gttttaggtgtaatcgcgccgccag

SEQ ID NO: 2419584 - DNA, 25 bp, Homo sapien
cgcggagagacgcagaacgcagcca

SEQ ID NO: 2419585 - DNA, 25 bp, Homo sapien
cagttccggtctggcagagagcgcg

SEQ ID NO: 2419586 - DNA, 25 bp, Homo sapien
agagacgcagaacgcagccagctcc

SEQ ID NO: 2419587 - DNA, 25 bp, Homo sapien
tcagttccggtctggcagagagcgc

SEQ ID NO: 2419588 - DNA, 25 bp, Homo sapien
cgcagagtcgctgggacgcagcgcc

SEQ ID NO: 2419589 - DNA, 25 bp, Homo sapien
cagagtcgctgggacgcagcgcctt

SEQ ID NO: 2419590 - DNA, 25 bp, Homo sapien
gcagagtcgctgggacgcagcgcct

SEQ ID NO: 2419591 - DNA, 25 bp, Homo sapien
cgcgcagatccggttcccgggtgac

SEQ ID NO: 2419592 - DNA, 25 bp, Homo sapien
ccgcgcagatccggttcccgggtga

SEQ ID NO: 2419593 - DNA, 25 bp, Homo sapien
gcgcagatccggttcccgggtgacc

SEQ ID NO: 2419594 - DNA, 25 bp, Homo sapien
cgagaccgacctagtcctgacgaca

SEQ ID NO: 2419595 - DNA, 25 bp, Homo sapien
ggcgagaccgacctagtcctgacga

SEQ ID NO: 2419596 - DNA, 25 bp, Homo sapien
tgggcgagaccgacctagtcctgac

SEQ ID NO: 2419597 - DNA, 25 bp, Homo sapien
tgacgacaacggacaaaggccttca

SEQ ID NO: 2419598 - DNA, 25 bp, Homo sapien
gtctcccaaagcgctgagattacag

SEQ ID NO: 2419599 - DNA, 25 bp, Homo sapien
ggactacaggggcccacaaccactc

SEQ ID NO: 2419600 - DNA, 25 bp, Homo sapien
ctcccaaagcgctgagattacaggt

SEQ ID NO: 2419601 - DNA, 25 bp, Homo sapien
ctacaggggcccacaaccactcccg

SEQ ID NO: 2419602 - DNA, 25 bp, Homo sapien
attttgtgctcatatttgacttcca

SEQ ID NO: 2419603 - DNA, 25 bp, Homo sapien
tcagttacctccagccttaaataca

SEQ ID NO: 2419604 - DNA, 25 bp, Homo sapien
tttgttcgagagttaaggattccta

SEQ ID NO: 2419605 - DNA, 25 bp, Homo sapien
taaatcaaggttcattagacaaaga

SEQ ID NO: 2419606 - DNA, 25 bp, Homo sapien
ccaccattattcgtattaaaaatag

SEQ ID NO: 2419607 - DNA, 25 bp, Homo sapien
ccattattcgtattaaaaatagaga

SEQ ID NO: 2419608 - DNA, 25 bp, Homo sapien
cattattcgtattaaaaatagagaa

SEQ ID NO: 2419609 - DNA, 25 bp, Homo sapien
agacttttcccaccattattcgtat

SEQ ID NO: 2419610 - DNA, 25 bp, Homo sapien
catccagcagtcatacatgtaaagt

SEQ ID NO: 2419611 - DNA, 25 bp, Homo sapien
caccagattagtagtgaaaactctc

SEQ ID NO: 2419612 - DNA, 25 bp, Homo sapien
tcctctggcaccagattagtagtga

SEQ ID NO: 2419613 - DNA, 25 bp, Homo sapien
ccccatccagcagtcatacatgtaa

SEQ ID NO: 2419614 - DNA, 25 bp, Homo sapien
taagggcactaaatatcaccactgg

SEQ ID NO: 2419615 - DNA, 25 bp, Homo sapien
taccactgctaggttcaggaaggac

SEQ ID NO: 2419616 - DNA, 25 bp, Homo sapien
caggcatacacccaaggattgctaa

SEQ ID NO: 2419617 - DNA, 25 bp, Homo sapien
gaagacagaatcatgcaggcataca

SEQ ID NO: 2419618 - DNA, 25 bp, Homo sapien
tgggttggccaacttcctgtattgt

SEQ ID NO: 2419619 - DNA, 25 bp, Homo sapien
caacagctggaatgctacgtttgtc

SEQ ID NO: 2419620 - DNA, 25 bp, Homo sapien
cattcgaaattggtcaacagctgga

SEQ ID NO: 2419621 - DNA, 25 bp, Homo sapien
tttgtatttctgtccgaattttcca

SEQ ID NO: 2419622 - DNA, 25 bp, Homo sapien
ctgataggaaattgggtctcaatat

SEQ ID NO: 2419623 - DNA, 25 bp, Homo sapien
gataggaaattgggtctcaatattg

SEQ ID NO: 2419624 - DNA, 25 bp, Homo sapien
cactgataggaaattgggtctcaat

SEQ ID NO: 2419625 - DNA, 25 bp, Homo sapien
actgataggaaattgggtctcaata

SEQ ID NO: 2419626 - DNA, 25 bp, Homo sapien
actctttcttggagccatgtaaatg

SEQ ID NO: 2419627 - DNA, 25 bp, Homo sapien
tctcagactcatcagtcttaaaatg

SEQ ID NO: 2419628 - DNA, 25 bp, Homo sapien
gcagcactggatatcaagataaact

SEQ ID NO: 2419629 - DNA, 25 bp, Homo sapien
cttaaaatgcacagtcaggtaagca

SEQ ID NO: 2419630 - DNA, 25 bp, Homo sapien
gcaatgaaagacatattcgataatt

SEQ ID NO: 2419631 - DNA, 25 bp, Homo sapien
gacatattcgataattaaagtactt

SEQ ID NO: 2419632 - DNA, 25 bp, Homo sapien
tgaaagacatattcgataattaaag

SEQ ID NO: 2419633 - DNA, 25 bp, Homo sapien
tgcaatgaaagacatattcgataat

SEQ ID NO: 2419634 - DNA, 25 bp, Homo sapien
taagaaccagaaagtgagcccttag

SEQ ID NO: 2419635 - DNA, 25 bp, Homo sapien
accagaaagtgagcccttagcaggc

SEQ ID NO: 2419636 - DNA, 25 bp, Homo sapien
gaaccagaaagtgagcccttagcag

SEQ ID NO: 2419637 - DNA, 25 bp, Homo sapien
gtgagcccttagcaggcaccaaatc

SEQ ID NO: 2419638 - DNA, 25 bp, Homo sapien
tctggaactatcataggaggggtca

SEQ ID NO: 2419639 - DNA, 25 bp, Homo sapien
aaatctggaactatcataggagggg

SEQ ID NO: 2419640 - DNA, 25 bp, Homo sapien
actatcataggaggggtcaaggtcc

SEQ ID NO: 2419641 - DNA, 25 bp, Homo sapien
taatggtgttataaatctggaacta

SEQ ID NO: 2419642 - DNA, 25 bp, Homo sapien
aaaaagaaagcatcaaaatcctcct

SEQ ID NO: 2419643 - DNA, 25 bp, Homo sapien
agaaagcatcaaaatcctcctcttg

SEQ ID NO: 2419644 - DNA, 25 bp, Homo sapien
gaaagcatcaaaatcctcctcttga

SEQ ID NO: 2419645 - DNA, 25 bp, Homo sapien
aaagaaagcatcaaaatcctcctct

SEQ ID NO: 2419646 - DNA, 25 bp, Homo sapien
tttccaacacttcttacattatcat

SEQ ID NO: 2419647 - DNA, 25 bp, Homo sapien
ttccaacacttcttacattatcata

SEQ ID NO: 2419648 - DNA, 25 bp, Homo sapien
ttttccaacacttcttacattatca

SEQ ID NO: 2419649 - DNA, 25 bp, Homo sapien
tcttttgtcagtatcattgccagag

SEQ ID NO: 2419650 - DNA, 25 bp, Homo sapien
tttgtcagtatcattgccagagttc

SEQ ID NO: 2419651 - DNA, 25 bp, Homo sapien
gtcagtatcattgccagagttccag

SEQ ID NO: 2419652 - DNA, 25 bp, Homo sapien
tgtcttttgtcagtatcattgccag

SEQ ID NO: 2419653 - DNA, 25 bp, Homo sapien
aggcagtgcatggtaacaggtgttc

SEQ ID NO: 2419654 - DNA, 25 bp, Homo sapien
gcttaggaaccaagaaagctcagtg

SEQ ID NO: 2419655 - DNA, 25 bp, Homo sapien
tcaaaacaacctcatgaggcagtgc

SEQ ID NO: 2419656 - DNA, 25 bp, Homo sapien
ttttcatagatactgcagtctcccc

SEQ ID NO: 2419657 - DNA, 25 bp, Homo sapien
aaggcaaaggccagcaaaaagccat

SEQ ID NO: 2419658 - DNA, 25 bp, Homo sapien
gcaaaaagccatacatcctctttct

SEQ ID NO: 2419659 - DNA, 25 bp, Homo sapien
ggcttttacttcattacgcattggt

SEQ ID NO: 2419660 - DNA, 25 bp, Homo sapien
gacacttgtatctgggcccttctta

SEQ ID NO: 2419661 - DNA, 25 bp, Homo sapien
taatgtcagctaaagtatgagataa

SEQ ID NO: 2419662 - DNA, 25 bp, Homo sapien
gtaaccaggcttctaactcctacca

SEQ ID NO: 2419663 - DNA, 25 bp, Homo sapien
actcctaccaattgataaactcatg

SEQ ID NO: 2419664 - DNA, 25 bp, Homo sapien
gaatagatccatatacaactaagta

SEQ ID NO: 2419665 - DNA, 25 bp, Homo sapien
ggcttcatcgggaagttaataatat

SEQ ID NO: 2419666 - DNA, 25 bp, Homo sapien
tcgtaaacacgcagatgaccatgac

SEQ ID NO: 2419667 - DNA, 25 bp, Homo sapien
cagacaaaagttgttggcttcatcg

SEQ ID NO: 2419668 - DNA, 25 bp, Homo sapien
ttaaaggggctactaatctccattg

SEQ ID NO: 2419669 - DNA, 25 bp, Homo sapien
aacatcctcacaagggaccaagtgc

SEQ ID NO: 2419670 - DNA, 25 bp, Homo sapien
cttgggatctgcatgatcccttctg

SEQ ID NO: 2419671 - DNA, 25 bp, Homo sapien
tctggttattttactgtcctttgga

SEQ ID NO: 2419672 - DNA, 25 bp, Homo sapien
agaagaacatcctcacaagggacca

SEQ ID NO: 2419673 - DNA, 25 bp, Homo sapien
tatagcttataccaaatgcacctcg

SEQ ID NO: 2419674 - DNA, 25 bp, Homo sapien
taggactttcaagacaatatagctt

SEQ ID NO: 2419675 - DNA, 25 bp, Homo sapien
tcaccagcggtccaggactcatgaa

SEQ ID NO: 2419676 - DNA, 25 bp, Homo sapien
catgaaagtcattgagtaaagtctt

SEQ ID NO: 2419677 - DNA, 25 bp, Homo sapien
taggcttttctagctctgcttcaga

SEQ ID NO: 2419678 - DNA, 25 bp, Homo sapien
tgagtcttgacacacaggagacccc

SEQ ID NO: 2419679 - DNA, 25 bp, Homo sapien
taatccagtagataccgtggtgtgg

SEQ ID NO: 2419680 - DNA, 25 bp, Homo sapien
tgagcacccaagaacattccagtct

SEQ ID NO: 2419681 - DNA, 25 bp, Homo sapien
gggcaacaaaagaaagactgaccat

SEQ ID NO: 2419682 - DNA, 25 bp, Homo sapien
gaagccatcagaagagaaattccac

SEQ ID NO: 2419683 - DNA, 25 bp, Homo sapien
tgtactttgctcctaagaccatcgc

SEQ ID NO: 2419684 - DNA, 25 bp, Homo sapien
ggtgcctcaagatcctgccttccat

SEQ ID NO: 2419685 - DNA, 25 bp, Homo sapien
tggccaagatgcactgtctggtgaa

SEQ ID NO: 2419686 - DNA, 25 bp, Homo sapien
caattgttgttttaaggttttgcat

SEQ ID NO: 2419687 - DNA, 25 bp, Homo sapien
tattatttgtctgaagtgaagcagg

SEQ ID NO: 2419688 - DNA, 25 bp, Homo sapien
ggtgtgggtggtggcaattgttgtt

SEQ ID NO: 2419689 - DNA, 25 bp, Homo sapien
agctccccagctgacaatgccatag

SEQ ID NO: 2419690 - DNA, 25 bp, Homo sapien
tgtctacatactagtggcccaccag

SEQ ID NO: 2419691 - DNA, 25 bp, Homo sapien
tgccatagaggacaaagggaccatt

SEQ ID NO: 2419692 - DNA, 25 bp, Homo sapien
aaatacacccggcttccatggctgg

SEQ ID NO: 2419693 - DNA, 25 bp, Homo sapien
ctgtataaaaccagaatcctctcac

SEQ ID NO: 2419694 - DNA, 25 bp, Homo sapien
ttccaccttcctgtataaaaccaga

SEQ ID NO: 2419695 - DNA, 25 bp, Homo sapien
tcctgtataaaaccagaatcctctc

SEQ ID NO: 2419696 - DNA, 25 bp, Homo sapien
ccttcctgtataaaaccagaatcct

SEQ ID NO: 2419697 - DNA, 25 bp, Homo sapien
tggcagaaatctttctctccagatg

SEQ ID NO: 2419698 - DNA, 25 bp, Homo sapien
ctggcagaaatctttctctccagat

SEQ ID NO: 2419699 - DNA, 25 bp, Homo sapien
ggcagaatagtaagtgtgttcacag

SEQ ID NO: 2419700 - DNA, 25 bp, Homo sapien
cctctctttctaacacatgcacttg

SEQ ID NO: 2419701 - DNA, 25 bp, Homo sapien
gtgttcacagacctctctttctaac

SEQ ID NO: 2419702 - DNA, 25 bp, Homo sapien
tgctgtaggcgacttgctaggccac

SEQ ID NO: 2419703 - DNA, 25 bp, Homo sapien
tgtaccaacatagctgaagtcattc

SEQ ID NO: 2419704 - DNA, 25 bp, Homo sapien
agtttggcctgagctgatgtagaat

SEQ ID NO: 2419705 - DNA, 25 bp, Homo sapien
gatgaagtaagcagaaagtgttgtt

SEQ ID NO: 2419706 - DNA, 25 bp, Homo sapien
cattcagagagagctcgatgatgaa

SEQ ID NO: 2419707 - DNA, 25 bp, Homo sapien
tctccgaggaaaatagaggctctgc

SEQ ID NO: 2419708 - DNA, 25 bp, Homo sapien
tgcactgatgcttccccatccggtc

SEQ ID NO: 2419709 - DNA, 25 bp, Homo sapien
ggtcacagcacagatctccgaggaa

SEQ ID NO: 2419710 - DNA, 25 bp, Homo sapien
gctctgcgctgtgtgggagacatac

SEQ ID NO: 2419711 - DNA, 25 bp, Homo sapien
gcttagttgtattagggcaatgtca

SEQ ID NO: 2419712 - DNA, 25 bp, Homo sapien
gcaatgtcagagtcataacttagtg

SEQ ID NO: 2419713 - DNA, 25 bp, Homo sapien
caccgagttgtactccagaggagag

SEQ ID NO: 2419714 - DNA, 25 bp, Homo sapien
ttagtgtgttaaagtcttcatgcac

SEQ ID NO: 2419715 - DNA, 25 bp, Homo sapien
caggtttctgtcatggtccccagca

SEQ ID NO: 2419716 - DNA, 25 bp, Homo sapien
tgtcatggtccccagcaataatagt

SEQ ID NO: 2419717 - DNA, 25 bp, Homo sapien
cccagcaataatagtccaggagagt

SEQ ID NO: 2419718 - DNA, 25 bp, Homo sapien
cttcaggtttctgtcatggtcccca

SEQ ID NO: 2419719 - DNA, 25 bp, Homo sapien
agtgggctgcggtcagaatccacac

SEQ ID NO: 2419720 - DNA, 25 bp, Homo sapien
tgatgatggcacctccacattggta

SEQ ID NO: 2419721 - DNA, 25 bp, Homo sapien
gtaatcgcctagaaacctcagaccc

SEQ ID NO: 2419722 - DNA, 25 bp, Homo sapien
gggctgcggtcagaatccacactgg

SEQ ID NO: 2419723 - DNA, 25 bp, Homo sapien
ctgcgattcttctggaaagccactg

SEQ ID NO: 2419724 - DNA, 25 bp, Homo sapien
ttcccctcctgcgattcttctggaa

SEQ ID NO: 2419725 - DNA, 25 bp, Homo sapien
ctcctgcgattcttctggaaagcca

SEQ ID NO: 2419726 - DNA, 25 bp, Homo sapien
ttcttcccctcctgcgattcttctg

SEQ ID NO: 2419727 - DNA, 25 bp, Homo sapien
ctaaatggagggatgccacagacat

SEQ ID NO: 2419728 - DNA, 25 bp, Homo sapien
tagcttttacggtagatacaggatt

SEQ ID NO: 2419729 - DNA, 25 bp, Homo sapien
tgcagaatagcttttacggtagata

SEQ ID NO: 2419730 - DNA, 25 bp, Homo sapien
cttttacggtagatacaggattgtt

SEQ ID NO: 2419731 - DNA, 25 bp, Homo sapien
gaatagcttttacggtagatacagg

SEQ ID NO: 2419732 - DNA, 25 bp, Homo sapien
tatcaccgtcatgttactagaactg

SEQ ID NO: 2419733 - DNA, 25 bp, Homo sapien
ggtaaatctggccttgaagccttgt

SEQ ID NO: 2419734 - DNA, 25 bp, Homo sapien
gatggtcaacattccacaaagttta

SEQ ID NO: 2419735 - DNA, 25 bp, Homo sapien
ctagaactgaatattgaagtgatgg

SEQ ID NO: 2419736 - DNA, 25 bp, Homo sapien
tcttcagaatcaccgtaaatcacaa

SEQ ID NO: 2419737 - DNA, 25 bp, Homo sapien
cagaatcaccgtaaatcacaacagc

SEQ ID NO: 2419738 - DNA, 25 bp, Homo sapien
ttcagaatcaccgtaaatcacaaca

SEQ ID NO: 2419739 - DNA, 25 bp, Homo sapien
tttcttcagaatcaccgtaaatcac

SEQ ID NO: 2419740 - DNA, 25 bp, Homo sapien
caccttgtgttactgggatacaaat

SEQ ID NO: 2419741 - DNA, 25 bp, Homo sapien
cttctctggagcacaaatgaaccaa

SEQ ID NO: 2419742 - DNA, 25 bp, Homo sapien
tggcagagtgatttgtcccttcttc

SEQ ID NO: 2419743 - DNA, 25 bp, Homo sapien
gatacaaatcaggatacttggcaga

SEQ ID NO: 2419744 - DNA, 25 bp, Homo sapien
aaatggaaccatggcctcactggtc

SEQ ID NO: 2419745 - DNA, 25 bp, Homo sapien
tcactggtctctgccagcaatggtg

SEQ ID NO: 2419746 - DNA, 25 bp, Homo sapien
cagcagtaacggtaagctcaaagcc

SEQ ID NO: 2419747 - DNA, 25 bp, Homo sapien
atggtgaaggcaatatttttccaca

SEQ ID NO: 2419748 - DNA, 25 bp, Homo sapien
atcgtcttccatgagagatctctga

SEQ ID NO: 2419749 - DNA, 25 bp, Homo sapien
ttgttttccatcgtcttccatgaga

SEQ ID NO: 2419750 - DNA, 25 bp, Homo sapien
tccatcgtcttccatgagagatctc

SEQ ID NO: 2419751 - DNA, 25 bp, Homo sapien
tttccatcgtcttccatgagagatc

SEQ ID NO: 2419752 - DNA, 25 bp, Homo sapien
tgatcgtaaagatacatagtcatga

SEQ ID NO: 2419753 - DNA, 25 bp, Homo sapien
gatcacatccaacttgcttttccat

SEQ ID NO: 2419754 - DNA, 25 bp, Homo sapien
taaaaagcactccactgcttgatcg

SEQ ID NO: 2419755 - DNA, 25 bp, Homo sapien
gatacatagtcatgatcacatccaa

SEQ ID NO: 2419756 - DNA, 25 bp, Homo sapien
ccattggttgtagcataaggtctaa

SEQ ID NO: 2419757 - DNA, 25 bp, Homo sapien
tctgcaattaagtcccgatcatcct

SEQ ID NO: 2419758 - DNA, 25 bp, Homo sapien
aatctctctgcatggaactcaaggt

SEQ ID NO: 2419759 - DNA, 25 bp, Homo sapien
ctttctattctcatcatccactgct

SEQ ID NO: 2419760 - DNA, 25 bp, Homo sapien
gcctttgttatataccttgagccca

SEQ ID NO: 2419761 - DNA, 25 bp, Homo sapien
tatataccttgagcccacttttgag

SEQ ID NO: 2419762 - DNA, 25 bp, Homo sapien
aactcagggcctttgttatatacct

SEQ ID NO: 2419763 - DNA, 25 bp, Homo sapien
tcacttcttggacagaactcagggc

SEQ ID NO: 2419764 - DNA, 25 bp, Homo sapien
attgctaccagaagagaactgctcc

SEQ ID NO: 2419765 - DNA, 25 bp, Homo sapien
ggtgatcaaaatggaacacaattgc

SEQ ID NO: 2419766 - DNA, 25 bp, Homo sapien
tttcccttccaggtgatcaaaatgg

SEQ ID NO: 2419767 - DNA, 25 bp, Homo sapien
caaaatggaacacaattgctaccag

SEQ ID NO: 2419768 - DNA, 25 bp, Homo sapien
ggagcagtgaagaggccttttacat

SEQ ID NO: 2419769 - DNA, 25 bp, Homo sapien
ctgcagtggagcagtgaagaggcct

SEQ ID NO: 2419770 - DNA, 25 bp, Homo sapien
gtggagcagtgaagaggccttttac

SEQ ID NO: 2419771 - DNA, 25 bp, Homo sapien
cagtggagcagtgaagaggcctttt

SEQ ID NO: 2419772 - DNA, 25 bp, Homo sapien
ggaagttatcccagcaagaatccag

SEQ ID NO: 2419773 - DNA, 25 bp, Homo sapien
ttcttacgggaactgaacctccagc

SEQ ID NO: 2419774 - DNA, 25 bp, Homo sapien
gggaactgaacctccagcacaacca

SEQ ID NO: 2419775 - DNA, 25 bp, Homo sapien
aggaagttatcccagcaagaatcca

SEQ ID NO: 2419776 - DNA, 25 bp, Homo sapien
tcaaaaggtgtagagggcttcatcc

SEQ ID NO: 2419777 - DNA, 25 bp, Homo sapien
caaaaggtgtagagggcttcatcca

SEQ ID NO: 2419778 - DNA, 25 bp, Homo sapien
aaaggtgtagagggcttcatccaaa

SEQ ID NO: 2419779 - DNA, 25 bp, Homo sapien
tgtagagggcttcatccaaaaaagg

SEQ ID NO: 2419780 - DNA, 25 bp, Homo sapien
caggcgtccattccccaatcaggga

SEQ ID NO: 2419781 - DNA, 25 bp, Homo sapien
ggaggttcatgctcttgagcacagt

SEQ ID NO: 2419782 - DNA, 25 bp, Homo sapien
tgtcatccatgatgggaagttccat

SEQ ID NO: 2419783 - DNA, 25 bp, Homo sapien
gcacagtattacacgctctgtcatc

SEQ ID NO: 2419784 - DNA, 25 bp, Homo sapien
tggaagaagtattaagtcattttgg

SEQ ID NO: 2419785 - DNA, 25 bp, Homo sapien
ctttatcatcgctgtcaggaagaca

SEQ ID NO: 2419786 - DNA, 25 bp, Homo sapien
gaaatcttgccccatccactggata

SEQ ID NO: 2419787 - DNA, 25 bp, Homo sapien
gcaaagaattcctggttcaacttta

SEQ ID NO: 2419788 - DNA, 25 bp, Homo sapien
ggaagacagattggctgaacagcat

SEQ ID NO: 2419789 - DNA, 25 bp, Homo sapien
tgagacaggaatattctgttcttgc

SEQ ID NO: 2419790 - DNA, 25 bp, Homo sapien
tacagcagtgcaatatcaggactca

SEQ ID NO: 2419791 - DNA, 25 bp, Homo sapien
tgactttgtgttttagatacagcag

SEQ ID NO: 2419792 - DNA, 25 bp, Homo sapien
tattcacggctgttgtattcaggat

SEQ ID NO: 2419793 - DNA, 25 bp, Homo sapien
ggtgctcatctgattttagggagac

SEQ ID NO: 2419794 - DNA, 25 bp, Homo sapien
gctgctgtaacaacccgatcttctt

SEQ ID NO: 2419795 - DNA, 25 bp, Homo sapien
gatcttcttgaatcaagcttcctcc

SEQ ID NO: 2419796 - DNA, 25 bp, Homo sapien
tcctccacagaagtggtgctcatct

SEQ ID NO: 2419797 - DNA, 25 bp, Homo sapien
gaagaatctagatcccacggcaggt

SEQ ID NO: 2419798 - DNA, 25 bp, Homo sapien
gagaagaatctagatcccacggcag

SEQ ID NO: 2419799 - DNA, 25 bp, Homo sapien
tagatcccacggcaggttccttact

SEQ ID NO: 2419800 - DNA, 25 bp, Homo sapien
gaatctagatcccacggcaggttcc

SEQ ID NO: 2419801 - DNA, 25 bp, Homo sapien
gacttcctgaggcaaggagtaatga

SEQ ID NO: 2419802 - DNA, 25 bp, Homo sapien
ctggggtggccgatgaccagcaaca

SEQ ID NO: 2419803 - DNA, 25 bp, Homo sapien
ggggtggccgatgaccagcaacagc

SEQ ID NO: 2419804 - DNA, 25 bp, Homo sapien
ggccgatgaccagcaacagcaacaa

SEQ ID NO: 2419805 - DNA, 25 bp, Homo sapien
gtggccgatgaccagcaacagcaac

SEQ ID NO: 2419806 - DNA, 25 bp, Homo sapien
cccctgacaaaaggagggatctgcg

SEQ ID NO: 2419807 - DNA, 25 bp, Homo sapien
ttggaaagacctaggcaaagtatac

SEQ ID NO: 2419808 - DNA, 25 bp, Homo sapien
gataaattctaacgggcacagccaa

SEQ ID NO: 2419809 - DNA, 25 bp, Homo sapien
catacaactgatccaaacaggaagt

SEQ ID NO: 2419810 - DNA, 25 bp, Homo sapien
taatcgttgatgttctaagcccaga

SEQ ID NO: 2419811 - DNA, 25 bp, Homo sapien
tgcagcccgtgttgagagccactac

SEQ ID NO: 2419812 - DNA, 25 bp, Homo sapien
ggacagccaggatgattcaaccgaa

SEQ ID NO: 2419813 - DNA, 25 bp, Homo sapien
gagacaatggctaacttgccccagg

SEQ ID NO: 2419814 - DNA, 25 bp, Homo sapien
gatatccatgtacaattccaggagc

SEQ ID NO: 2419815 - DNA, 25 bp, Homo sapien
caatatatttgcaggcgggaacatg

SEQ ID NO: 2419816 - DNA, 25 bp, Homo sapien
aatggcttaccacagaggatttatc

SEQ ID NO: 2419817 - DNA, 25 bp, Homo sapien
gaaatcttagagtagaaccaccact

SEQ ID NO: 2419818 - DNA, 25 bp, Homo sapien
gaggcaccacattatcctatgaggt

SEQ ID NO: 2419819 - DNA, 25 bp, Homo sapien
tgtcaccctgaactcggaatgagag

SEQ ID NO: 2419820 - DNA, 25 bp, Homo sapien
tgaaagcaaggcttccatcactccc

SEQ ID NO: 2419821 - DNA, 25 bp, Homo sapien
aatctcattagttgtgcccctgctg

SEQ ID NO: 2419822 - DNA, 25 bp, Homo sapien
cagcagtttgctgtctggaaccagc

SEQ ID NO: 2419823 - DNA, 25 bp, Homo sapien
gctgtaaggctctctcataataagc

SEQ ID NO: 2419824 - DNA, 25 bp, Homo sapien
cataataagctcttgcagacacata

SEQ ID NO: 2419825 - DNA, 25 bp, Homo sapien
tctaggcgatccaatttggcaagat

SEQ ID NO: 2419826 - DNA, 25 bp, Homo sapien
ttagttgcacagccactctatagct

SEQ ID NO: 2419827 - DNA, 25 bp, Homo sapien
tgtgcttggtctgggtttagttgca

SEQ ID NO: 2419828 - DNA, 25 bp, Homo sapien
ggtttagttgcacagccactctata

SEQ ID NO: 2419829 - DNA, 25 bp, Homo sapien
gtgcttggtctgggtttagttgcac

SEQ ID NO: 2419830 - DNA, 25 bp, Homo sapien
tatgcaaggatttgtgcgtgcctgc

SEQ ID NO: 2419831 - DNA, 25 bp, Homo sapien
tgcagtccctctctacaaggaaagt

SEQ ID NO: 2419832 - DNA, 25 bp, Homo sapien
aaacgactggtaccttcatgagaca

SEQ ID NO: 2419833 - DNA, 25 bp, Homo sapien
gggacggacctaataatacaatgta

SEQ ID NO: 2419834 - DNA, 25 bp, Homo sapien
gtcgagaaggttctgctctcttaat

SEQ ID NO: 2419835 - DNA, 25 bp, Homo sapien
gtttcagctggagagccttgtctat

SEQ ID NO: 2419836 - DNA, 25 bp, Homo sapien
ctggagagccttgtctatagcatca

SEQ ID NO: 2419837 - DNA, 25 bp, Homo sapien
ctcaaaagctttgtcgagaaggttc

SEQ ID NO: 2419838 - DNA, 25 bp, Homo sapien
tggctgacaagaggcgatagcattc

SEQ ID NO: 2419839 - DNA, 25 bp, Homo sapien
gtctcctctgacacaatgtgattgg

SEQ ID NO: 2419840 - DNA, 25 bp, Homo sapien
cctgcttgctatagatggctgacaa

SEQ ID NO: 2419841 - DNA, 25 bp, Homo sapien
cattcaaggcatccggtctcctctg

SEQ ID NO: 2419842 - DNA, 25 bp, Homo sapien
gtgccaagcggagctccctctgaga

SEQ ID NO: 2419843 - DNA, 25 bp, Homo sapien
ccagtgttgtaatacagtgctccca

SEQ ID NO: 2419844 - DNA, 25 bp, Homo sapien
gcaaagcctcttcgtatcggccagt

SEQ ID NO: 2419845 - DNA, 25 bp, Homo sapien
tcccaaaggtgacaatatctcagct

SEQ ID NO: 2419846 - DNA, 25 bp, Homo sapien
ttcttcagccatgctgttctctccc

SEQ ID NO: 2419847 - DNA, 25 bp, Homo sapien
acctgtagagtcttcccaagttcac

SEQ ID NO: 2419848 - DNA, 25 bp, Homo sapien
cctgtagagtcttcccaagttcacc

SEQ ID NO: 2419849 - DNA, 25 bp, Homo sapien
tgtagagtcttcccaagttcaccat

SEQ ID NO: 2419850 - DNA, 25 bp, Homo sapien
acgtgatgactggggctaagtttga

SEQ ID NO: 2419851 - DNA, 25 bp, Homo sapien
ctggtaatgggccactgccttttct

SEQ ID NO: 2419852 - DNA, 25 bp, Homo sapien
gtaatgggccactgccttttctggt

SEQ ID NO: 2419853 - DNA, 25 bp, Homo sapien
gatgactggggctaagtttgatggc

SEQ ID NO: 2419854 - DNA, 25 bp, Homo sapien
caagtgagagtaaggccagaagcag

SEQ ID NO: 2419855 - DNA, 25 bp, Homo sapien
gataaagatcccaaggcaagtgaga

SEQ ID NO: 2419856 - DNA, 25 bp, Homo sapien
tttacagatatagacactaaagtgc

SEQ ID NO: 2419857 - DNA, 25 bp, Homo sapien
gaagcagaatgaaggccctctactc

SEQ ID NO: 2419858 - DNA, 25 bp, Homo sapien
cccatagttgttgtgtaaatctgag

SEQ ID NO: 2419859 - DNA, 25 bp, Homo sapien
ctaagaaaaccccatagttgttgtg

SEQ ID NO: 2419860 - DNA, 25 bp, Homo sapien
cagtatcaactaagaaaaccccata

SEQ ID NO: 2419861 - DNA, 25 bp, Homo sapien
aaccccatagttgttgtgtaaatct

SEQ ID NO: 2419862 - DNA, 25 bp, Homo sapien
gacagttctttattccagtttggta

SEQ ID NO: 2419863 - DNA, 25 bp, Homo sapien
tggacagttctttattccagtttgg

SEQ ID NO: 2419864 - DNA, 25 bp, Homo sapien
tctggacagttctttattccagttt

SEQ ID NO: 2419865 - DNA, 25 bp, Homo sapien
cagttctttattccagtttggtata

SEQ ID NO: 2419866 - DNA, 25 bp, Homo sapien
tcagcaaagggcagtctttttctga

SEQ ID NO: 2419867 - DNA, 25 bp, Homo sapien
ctcagcaaagggcagtctttttctg

SEQ ID NO: 2419868 - DNA, 25 bp, Homo sapien
cagcaaagggcagtctttttctgat

SEQ ID NO: 2419869 - DNA, 25 bp, Homo sapien
tgctcagcaaagggcagtctttttc

SEQ ID NO: 2419870 - DNA, 25 bp, Homo sapien
gacaatctagttgaatcagttacct

SEQ ID NO: 2419871 - DNA, 25 bp, Homo sapien
agctactattacagccatcagattt

SEQ ID NO: 2419872 - DNA, 25 bp, Homo sapien
cagtgaatcaagtgccttttattgc

SEQ ID NO: 2419873 - DNA, 25 bp, Homo sapien
tattagggatatgggccctctaccg

SEQ ID NO: 2419874 - DNA, 25 bp, Homo sapien
tgtgatctttaagttatcagaaacc

SEQ ID NO: 2419875 - DNA, 25 bp, Homo sapien
ttgggaattcttaatccaaataatg

SEQ ID NO: 2419876 - DNA, 25 bp, Homo sapien
cctccttgaagatacgccattctag

SEQ ID NO: 2419877 - DNA, 25 bp, Homo sapien
aatgtatcataattaagcaattaac

SEQ ID NO: 2419878 - DNA, 25 bp, Homo sapien
acccagggaatggttgtgacatatt

SEQ ID NO: 2419879 - DNA, 25 bp, Homo sapien
tatttgtgacccagggaatggttgt

SEQ ID NO: 2419880 - DNA, 25 bp, Homo sapien
ttgtgacccagggaatggttgtgac

SEQ ID NO: 2419881 - DNA, 25 bp, Homo sapien
tgacccagggaatggttgtgacata

SEQ ID NO: 2419882 - DNA, 25 bp, Homo sapien
tcctgcgaaattggccttcgagggc

SEQ ID NO: 2419883 - DNA, 25 bp, Homo sapien
tccccagccatcctgcgaaattggc

SEQ ID NO: 2419884 - DNA, 25 bp, Homo sapien
ccatcctgcgaaattggccttcgag

SEQ ID NO: 2419885 - DNA, 25 bp, Homo sapien
cagccatcctgcgaaattggccttc

SEQ ID NO: 2419886 - DNA, 25 bp, Homo sapien
caataactcaaatgacaaatggaca

SEQ ID NO: 2419887 - DNA, 25 bp, Homo sapien
tcctgaaaaaggacccttgactgta

SEQ ID NO: 2419888 - DNA, 25 bp, Homo sapien
caaatggacattggcttaatgcaga

SEQ ID NO: 2419889 - DNA, 25 bp, Homo sapien
tcttgagccaaatcgtgtgtttgga

SEQ ID NO: 2419890 - DNA, 25 bp, Homo sapien
ctttaaactcatgtcaacgacttct

SEQ ID NO: 2419891 - DNA, 25 bp, Homo sapien
gacacagcagcccaaaagataaaga

SEQ ID NO: 2419892 - DNA, 25 bp, Homo sapien
cgacttctccaagaaactattcaag

SEQ ID NO: 2419893 - DNA, 25 bp, Homo sapien
taaggactaacagatctttaaactc

SEQ ID NO: 2419894 - DNA, 25 bp, Homo sapien
tatgtcatcagtatgagcatttatg

SEQ ID NO: 2419895 - DNA, 25 bp, Homo sapien
ccatatgtcatcagtatgagcattt

SEQ ID NO: 2419896 - DNA, 25 bp, Homo sapien
tgttttctttacgagacagttcctc

SEQ ID NO: 2419897 - DNA, 25 bp, Homo sapien
catatgtcatcagtatgagcattta

SEQ ID NO: 2419898 - DNA, 25 bp, Homo sapien
gagtgacaaaagtgagcaactacag

SEQ ID NO: 2419899 - DNA, 25 bp, Homo sapien
tttacacaaacaagaagtgaccact

SEQ ID NO: 2419900 - DNA, 25 bp, Homo sapien
gaatcaattaatctggcattcttcc

SEQ ID NO: 2419901 - DNA, 25 bp, Homo sapien
gaatgtgatcaacactactctgaca

SEQ ID NO: 2419902 - DNA, 25 bp, Homo sapien
tcctaagagttgaacagaaactagc

SEQ ID NO: 2419903 - DNA, 25 bp, Homo sapien
tgcatttaaacgttgtgtctccacc

SEQ ID NO: 2419904 - DNA, 25 bp, Homo sapien
gagactgtgcatagggtgcctctgc

SEQ ID NO: 2419905 - DNA, 25 bp, Homo sapien
ggtctcaacgcaactgaccagcatt

SEQ ID NO: 2419906 - DNA, 25 bp, Homo sapien
tgctgacagtccctatgtaccatgg

SEQ ID NO: 2419907 - DNA, 25 bp, Homo sapien
cccctcaggttacaacagagtaagg

SEQ ID NO: 2419908 - DNA, 25 bp, Homo sapien
aaatcccctactttgcgcgaacaga

SEQ ID NO: 2419909 - DNA, 25 bp, Homo sapien
tctggcttatccacgtctatcagtg

SEQ ID NO: 2419910 - DNA, 25 bp, Homo sapien
aaggttctacagatatgctgcaggg

SEQ ID NO: 2419911 - DNA, 25 bp, Homo sapien
tggcataagataaaggtcaacctgg

SEQ ID NO: 2419912 - DNA, 25 bp, Homo sapien
taagtttacccaaagagtctggcat

SEQ ID NO: 2419913 - DNA, 25 bp, Homo sapien
gaaaaactgcctgcaaaatggctga

SEQ ID NO: 2419914 - DNA, 25 bp, Homo sapien
tttttggcatgacactgacccacaa

SEQ ID NO: 2419915 - DNA, 25 bp, Homo sapien
tgacccacaaccacagtccgcgtgg

SEQ ID NO: 2419916 - DNA, 25 bp, Homo sapien
ctgtgcatgtggacggatggtggca

SEQ ID NO: 2419917 - DNA, 25 bp, Homo sapien
tccgcgtgggctgtgcatgtggacg

SEQ ID NO: 2419918 - DNA, 25 bp, Homo sapien
gaggactgccagtgtatagcacaga

SEQ ID NO: 2419919 - DNA, 25 bp, Homo sapien
acatgatgggctgcggaaggttcct

SEQ ID NO: 2419920 - DNA, 25 bp, Homo sapien
taacggtggcagaaagtccataaac

SEQ ID NO: 2419921 - DNA, 25 bp, Homo sapien
tatttacaaagggtcatctcagaag

SEQ ID NO: 2419922 - DNA, 25 bp, Homo sapien
gaatctactgtctatcaagggcact

SEQ ID NO: 2419923 - DNA, 25 bp, Homo sapien
tctaaaagcgacctgtgatacacag

SEQ ID NO: 2419924 - DNA, 25 bp, Homo sapien
gttgagttcagcgatcttagaccac

SEQ ID NO: 2419925 - DNA, 25 bp, Homo sapien
gatgcaaatcgctccctacaaaact

SEQ ID NO: 2419926 - DNA, 25 bp, Homo sapien
gaccatatttgatggaatccttcag

SEQ ID NO: 2419927 - DNA, 25 bp, Homo sapien
tgctcagccaataacgaagctaagc

SEQ ID NO: 2419928 - DNA, 25 bp, Homo sapien
gaagctaagcttgaatatgcatctg

SEQ ID NO: 2419929 - DNA, 25 bp, Homo sapien
cttcagtaaggtgatagcttcttcc

SEQ ID NO: 2419930 - DNA, 25 bp, Homo sapien
ctgttaaatccaatgaggagacatt

SEQ ID NO: 2419931 - DNA, 25 bp, Homo sapien
tcctgttaaatccaatgaggagaca

SEQ ID NO: 2419932 - DNA, 25 bp, Homo sapien
cctgttaaatccaatgaggagacat

SEQ ID NO: 2419933 - DNA, 25 bp, Homo sapien
ttccaaggttgttgagcgcacttgc

SEQ ID NO: 2419934 - DNA, 25 bp, Homo sapien
gcgcacttgcatggcgtggatacaa

SEQ ID NO: 2419935 - DNA, 25 bp, Homo sapien
ggagagccctctgatagtacatctt

SEQ ID NO: 2419936 - DNA, 25 bp, Homo sapien
gaaaagagcccggttatgctgtgga

SEQ ID NO: 2419937 - DNA, 25 bp, Homo sapien
tgttgctgatagctttcaacttgct

SEQ ID NO: 2419938 - DNA, 25 bp, Homo sapien
gttgctgatagctttcaacttgctc

SEQ ID NO: 2419939 - DNA, 25 bp, Homo sapien
gagctctggaggtctatggcagatc

SEQ ID NO: 2419940 - DNA, 25 bp, Homo sapien
ctgaatctccagcatagataatccc

SEQ ID NO: 2419941 - DNA, 25 bp, Homo sapien
cttctccagggtaaccgaacagtcg

SEQ ID NO: 2419942 - DNA, 25 bp, Homo sapien
tactcccatcacacaaggtagaatg

SEQ ID NO: 2419943 - DNA, 25 bp, Homo sapien
gagctgttctgtagtggtagatcgc

SEQ ID NO: 2419944 - DNA, 25 bp, Homo sapien
gaaattggcatagttgtagtgaacc

SEQ ID NO: 2419945 - DNA, 25 bp, Homo sapien
cttgttccgaccttggtccttcagg

SEQ ID NO: 2419946 - DNA, 25 bp, Homo sapien
gatcgcttccttgttccgaccttgg

SEQ ID NO: 2419947 - DNA, 25 bp, Homo sapien
aaaggatcactatagactggcctcc

SEQ ID NO: 2419948 - DNA, 25 bp, Homo sapien
cactgtactggtcatctcaggctgc

SEQ ID NO: 2419949 - DNA, 25 bp, Homo sapien
tttccctatactaagcctgggccag

SEQ ID NO: 2419950 - DNA, 25 bp, Homo sapien
gcattcctcggagtgtgcacacaga

SEQ ID NO: 2419951 - DNA, 25 bp, Homo sapien
caaagttgctctgattaagcagtca

SEQ ID NO: 2419952 - DNA, 25 bp, Homo sapien
tactcctgtgtttaccgaatgacct

SEQ ID NO: 2419953 - DNA, 25 bp, Homo sapien
tcgtaaaagctctgactagtgaaag

SEQ ID NO: 2419954 - DNA, 25 bp, Homo sapien
aactatgccaacagagactcggagg

SEQ ID NO: 2419955 - DNA, 25 bp, Homo sapien
cacatcgattcagccaagtgcagag

SEQ ID NO: 2419956 - DNA, 25 bp, Homo sapien
cacagtggacacaatcagggtggtg

SEQ ID NO: 2419957 - DNA, 25 bp, Homo sapien
gcagagcttgctcagtccatgcaca

SEQ ID NO: 2419958 - DNA, 25 bp, Homo sapien
tggtggccccacatcgattcagcca

SEQ ID NO: 2419959 - DNA, 25 bp, Homo sapien
atttcttcagtgtagggaatgagag

SEQ ID NO: 2419960 - DNA, 25 bp, Homo sapien
gagagagtcatcttgtaggcttaaa

SEQ ID NO: 2419961 - DNA, 25 bp, Homo sapien
gctcttgggtcctgaatggctcctc

SEQ ID NO: 2419962 - DNA, 25 bp, Homo sapien
gtgctgcactagcaggtttgctatt

SEQ ID NO: 2419963 - DNA, 25 bp, Homo sapien
tcggagtttatgctgcagcaggtca

SEQ ID NO: 2419964 - DNA, 25 bp, Homo sapien
tcattgtatgactctattggcacta

SEQ ID NO: 2419965 - DNA, 25 bp, Homo sapien
ctaaattcggagtttatgctgcagc

SEQ ID NO: 2419966 - DNA, 25 bp, Homo sapien
tattggcactatgcgcctaaattcg

SEQ ID NO: 2419967 - DNA, 25 bp, Homo sapien
cagtagttgggacttaggtgttcac

SEQ ID NO: 2419968 - DNA, 25 bp, Homo sapien
tcagaagtattaatacagccccaag

SEQ ID NO: 2419969 - DNA, 25 bp, Homo sapien
ggctggcaatatcctaggcactaaa

SEQ ID NO: 2419970 - DNA, 25 bp, Homo sapien
gccatcctatattggagactattac

SEQ ID NO: 2419971 - DNA, 25 bp, Homo sapien
taaagccccgatttactgagcgtga

SEQ ID NO: 2419972 - DNA, 25 bp, Homo sapien
gagcaaagatataaacccaggaatt

SEQ ID NO: 2419973 - DNA, 25 bp, Homo sapien
tgattcagacatggctcagatactt

SEQ ID NO: 2419974 - DNA, 25 bp, Homo sapien
gatttgacttgaccagctgattcct

SEQ ID NO: 2419975 - DNA, 25 bp, Homo sapien
gggaactgggaattcactggaaatg

SEQ ID NO: 2419976 - DNA, 25 bp, Homo sapien
cccttctctggttgagctgggctct

SEQ ID NO: 2419977 - DNA, 25 bp, Homo sapien
agggaactgggaattcactggaaat

SEQ ID NO: 2419978 - DNA, 25 bp, Homo sapien
ccaaactttggattttgccacagat

SEQ ID NO: 2419979 - DNA, 25 bp, Homo sapien
tgtcttcagatcacatggtgatccc

SEQ ID NO: 2419980 - DNA, 25 bp, Homo sapien
gatcccacgtcattgttccctagtg

SEQ ID NO: 2419981 - DNA, 25 bp, Homo sapien
gccacagattcccttccaatggtat

SEQ ID NO: 2419982 - DNA, 25 bp, Homo sapien
gacatttcttgtgtggccctctcag

SEQ ID NO: 2419983 - DNA, 25 bp, Homo sapien
gcaagccatccgcagtatcatctct

SEQ ID NO: 2419984 - DNA, 25 bp, Homo sapien
catttcctcctgacgttcctagtgg

SEQ ID NO: 2419985 - DNA, 25 bp, Homo sapien
tctcttgaagacagccatctgacat

SEQ ID NO: 2419986 - DNA, 25 bp, Homo sapien
tgcctggccagtccatgtgaacgtc

SEQ ID NO: 2419987 - DNA, 25 bp, Homo sapien
ggcagacacgccataaaatgtgaaa

SEQ ID NO: 2419988 - DNA, 25 bp, Homo sapien
tgaatctgaccagacacaggcagac

SEQ ID NO: 2419989 - DNA, 25 bp, Homo sapien
gaccacttttgtagggccactgtcg

SEQ ID NO: 2419990 - DNA, 25 bp, Homo sapien
ctgaccctttcgtcagcccccagac

SEQ ID NO: 2419991 - DNA, 25 bp, Homo sapien
gaccctttcgtcagcccccagacca

SEQ ID NO: 2419992 - DNA, 25 bp, Homo sapien
tgaccctttcgtcagcccccagacc

SEQ ID NO: 2419993 - DNA, 25 bp, Homo sapien
gagatggcatctccggagggggaaa

SEQ ID NO: 2419994 - DNA, 25 bp, Homo sapien
tccaccctctgctccggtggctctg

SEQ ID NO: 2419995 - DNA, 25 bp, Homo sapien
gctctggcatctgctgagatggcat

SEQ ID NO: 2419996 - DNA, 25 bp, Homo sapien
atctgctgagatggcatctccggag

SEQ ID NO: 2419997 - DNA, 25 bp, Homo sapien
gattcacttacttgtgtagcactag

SEQ ID NO: 2419998 - DNA, 25 bp, Homo sapien
gacacagtaaacaattaagggctgc

SEQ ID NO: 2419999 - DNA, 25 bp, Homo sapien
tattggcaagccttcacaagactct

SEQ ID NO: 2420000 - DNA, 25 bp, Homo sapien
tattcaactggtctaagcaaaaaca

SEQ ID NO: 2420001 - DNA, 25 bp, Homo sapien
atgtaaaggactctctccgccacca

SEQ ID NO: 2420002 - DNA, 25 bp, Homo sapien
gtaaaggactctctccgccaccaca

SEQ ID NO: 2420003 - DNA, 25 bp, Homo sapien
aaaggactctctccgccaccacaaa

SEQ ID NO: 2420004 - DNA, 25 bp, Homo sapien
ggcatgtaaaggactctctccgcca

SEQ ID NO: 2420005 - DNA, 25 bp, Homo sapien
aacaccaggaacaacaagccgacta

SEQ ID NO: 2420006 - DNA, 25 bp, Homo sapien
caccaggaacaacaagccgactaaa

SEQ ID NO: 2420007 - DNA, 25 bp, Homo sapien
acaccaggaacaacaagccgactaa

SEQ ID NO: 2420008 - DNA, 25 bp, Homo sapien
caacaagccgactaaaacctccttg

SEQ ID NO: 2420009 - DNA, 25 bp, Homo sapien
ggacacccgtagtgagcaggatgcc

SEQ ID NO: 2420010 - DNA, 25 bp, Homo sapien
agtgagcaggatgcccatggcactg

SEQ ID NO: 2420011 - DNA, 25 bp, Homo sapien
agcaggatgcccatggcactgattg

SEQ ID NO: 2420012 - DNA, 25 bp, Homo sapien
ccgtagtgagcaggatgcccatggc

SEQ ID NO: 2420013 - DNA, 25 bp, Homo sapien
aagccacagggctgcgtgttcatct

SEQ ID NO: 2420014 - DNA, 25 bp, Homo sapien
cagaaatctgatgtgcacatggaaa

SEQ ID NO: 2420015 - DNA, 25 bp, Homo sapien
acagggctgcgtgttcatctgttcc

SEQ ID NO: 2420016 - DNA, 25 bp, Homo sapien
gagagtcaaggagcgatcagcctcc

SEQ ID NO: 2420017 - DNA, 25 bp, Homo sapien
gtgatagattcgctattataggtgt

SEQ ID NO: 2420018 - DNA, 25 bp, Homo sapien
aatgtgtgatagattcgctattata

SEQ ID NO: 2420019 - DNA, 25 bp, Homo sapien
cgctattataggtgttaggtttgat

SEQ ID NO: 2420020 - DNA, 25 bp, Homo sapien
tagattcgctattataggtgttagg

SEQ ID NO: 2420021 - DNA, 25 bp, Homo sapien
tcatttaagttttaacagcctctcc

SEQ ID NO: 2420022 - DNA, 25 bp, Homo sapien
ggtctcgcctatctacaggcacagc

SEQ ID NO: 2420023 - DNA, 25 bp, Homo sapien
tccaactctggcagtagccggtctc

SEQ ID NO: 2420024 - DNA, 25 bp, Homo sapien
tggcagtagccggtctcgcctatct

SEQ ID NO: 2420025 - DNA, 25 bp, Homo sapien
agtagccggtctcgcctatctacag

SEQ ID NO: 2420026 - DNA, 25 bp, Homo sapien
tccagccaatgtcagggaagctgcc

SEQ ID NO: 2420027 - DNA, 25 bp, Homo sapien
cagggaagctgccattcctaaatgt

SEQ ID NO: 2420028 - DNA, 25 bp, Homo sapien
gaaggaactgtggtggactggaatg

SEQ ID NO: 2420029 - DNA, 25 bp, Homo sapien
tggccgaagtcacccaaatcagaag

SEQ ID NO: 2420030 - DNA, 25 bp, Homo sapien
ttaacacacttgaccgagatgacag

SEQ ID NO: 2420031 - DNA, 25 bp, Homo sapien
taacacacttgaccgagatgacagc

SEQ ID NO: 2420032 - DNA, 25 bp, Homo sapien
gtttaacacacttgaccgagatgac

SEQ ID NO: 2420033 - DNA, 25 bp, Homo sapien
atgtttaacacacttgaccgagatg

SEQ ID NO: 2420034 - DNA, 25 bp, Homo sapien
ctgtggggaatcaccagtcccctta

SEQ ID NO: 2420035 - DNA, 25 bp, Homo sapien
tgtggggaatcaccagtccccttaa

SEQ ID NO: 2420036 - DNA, 25 bp, Homo sapien
ccagtcatagcacagggtcacgggt

SEQ ID NO: 2420037 - DNA, 25 bp, Homo sapien
cagaaagatggtggctaagttccgc

SEQ ID NO: 2420038 - DNA, 25 bp, Homo sapien
cagtgcaggctcaataaggccatca

SEQ ID NO: 2420039 - DNA, 25 bp, Homo sapien
taagttccgcatgtcccatatggtc

SEQ ID NO: 2420040 - DNA, 25 bp, Homo sapien
tgtaagcgttcagtcaccatatttt

SEQ ID NO: 2420041 - DNA, 25 bp, Homo sapien
tcactgaaacactgctcaagaacca

SEQ ID NO: 2420042 - DNA, 25 bp, Homo sapien
caagaaccatgacattctgtaagcg

SEQ ID NO: 2420043 - DNA, 25 bp, Homo sapien
gacattctgtaagcgttcagtcacc

SEQ ID NO: 2420044 - DNA, 25 bp, Homo sapien
agtgacctaggaatctcactcccag

SEQ ID NO: 2420045 - DNA, 25 bp, Homo sapien
ggcagccgtaatcctcctacataca

SEQ ID NO: 2420046 - DNA, 25 bp, Homo sapien
cagacagcctcatatcgcttacggt

SEQ ID NO: 2420047 - DNA, 25 bp, Homo sapien
gggtctgagctcagatatgcccagc

SEQ ID NO: 2420048 - DNA, 25 bp, Homo sapien
gaggctgagtgtagttagcagttct

SEQ ID NO: 2420049 - DNA, 25 bp, Homo sapien
tgagtgtagttagcagttctgtccc

SEQ ID NO: 2420050 - DNA, 25 bp, Homo sapien
cataatggaggctgagtgtagttag

SEQ ID NO: 2420051 - DNA, 25 bp, Homo sapien
tagttagcagttctgtccccagcct

SEQ ID NO: 2420052 - DNA, 25 bp, Homo sapien
gagagtgctgcatctacggcacaca

SEQ ID NO: 2420053 - DNA, 25 bp, Homo sapien
ggcgcaattctaagtcagagtgcaa

SEQ ID NO: 2420054 - DNA, 25 bp, Homo sapien
cagtgcttgttctagtccagtgcca

SEQ ID NO: 2420055 - DNA, 25 bp, Homo sapien
cacaacacagcagattggaagaggc

SEQ ID NO: 2420056 - DNA, 25 bp, Homo sapien
ccaatggtcaagaataaaaggtcaa

SEQ ID NO: 2420057 - DNA, 25 bp, Homo sapien
tacatcttgatatacccaatggtca

SEQ ID NO: 2420058 - DNA, 25 bp, Homo sapien
gatccaactctgtaaggaatctacc

SEQ ID NO: 2420059 - DNA, 25 bp, Homo sapien
gatacttgaccaagagagttcagaa

SEQ ID NO: 2420060 - DNA, 25 bp, Homo sapien
agagtgcttaatacgcacattaaat

SEQ ID NO: 2420061 - DNA, 25 bp, Homo sapien
cttagagtgcttaatacgcacatta

SEQ ID NO: 2420062 - DNA, 25 bp, Homo sapien
ccttcttctcctgatcattttcttt

SEQ ID NO: 2420063 - DNA, 25 bp, Homo sapien
agagtgtgcttctctgccttccttc

SEQ ID NO: 2420064 - DNA, 25 bp, Homo sapien
cctccagttttgccacggaaacatt

SEQ ID NO: 2420065 - DNA, 25 bp, Homo sapien
tttcgaacaggaaccattcccttga

SEQ ID NO: 2420066 - DNA, 25 bp, Homo sapien
ttgccacggaaacatttgtggggcc

SEQ ID NO: 2420067 - DNA, 25 bp, Homo sapien
ttataacaacaccaacagcagctgg

SEQ ID NO: 2420068 - DNA, 25 bp, Homo sapien
gaccccaatcctcaatatgcaaagt

SEQ ID NO: 2420069 - DNA, 25 bp, Homo sapien
tccccacatggaggatagaccccaa

SEQ ID NO: 2420070 - DNA, 25 bp, Homo sapien
caatatgcaaagtcagcctgtaatt

SEQ ID NO: 2420071 - DNA, 25 bp, Homo sapien
catggaggatagaccccaatcctca

SEQ ID NO: 2420072 - DNA, 25 bp, Homo sapien
atgaagctggattatcctgctctga

SEQ ID NO: 2420073 - DNA, 25 bp, Homo sapien
ccattatccacagacggaagtacaa

SEQ ID NO: 2420074 - DNA, 25 bp, Homo sapien
ctcgtaagaatgtaaggcgaaaatg

SEQ ID NO: 2420075 - DNA, 25 bp, Homo sapien
ccacagacggaagtacaaaatgaca

SEQ ID NO: 2420076 - DNA, 25 bp, Homo sapien
ggtctcatggtaagcaggaaatttc

SEQ ID NO: 2420077 - DNA, 25 bp, Homo sapien
taaaaatggtctcatggtaagcagg

SEQ ID NO: 2420078 - DNA, 25 bp, Homo sapien
tcatggtaagcaggaaatttctatt

SEQ ID NO: 2420079 - DNA, 25 bp, Homo sapien
aatggtctcatggtaagcaggaaat

SEQ ID NO: 2420080 - DNA, 25 bp, Homo sapien
gtagctgggactaccaccatgcctg

SEQ ID NO: 2420081 - DNA, 25 bp, Homo sapien
gtgagccaccacacccggcctaccc

SEQ ID NO: 2420082 - DNA, 25 bp, Homo sapien
catgcctggctaattttttttttgt

SEQ ID NO: 2420083 - DNA, 25 bp, Homo sapien
tgttgttgttgttgtatttttagta

SEQ ID NO: 2420084 - DNA, 25 bp, Homo sapien
tggtgccatccctgtctttagggct

SEQ ID NO: 2420085 - DNA, 25 bp, Homo sapien
ctggtgccatccctgtctttagggc

SEQ ID NO: 2420086 - DNA, 25 bp, Homo sapien
tgccatccctgtctttagggctcat

SEQ ID NO: 2420087 - DNA, 25 bp, Homo sapien
ggtgccatccctgtctttagggctc

SEQ ID NO: 2420088 - DNA, 25 bp, Homo sapien
tcacactcaaatccgaaatgcacag

SEQ ID NO: 2420089 - DNA, 25 bp, Homo sapien
aatatgttaggccagctcagaaacc

SEQ ID NO: 2420090 - DNA, 25 bp, Homo sapien
caacaacagattagtgagctatgca

SEQ ID NO: 2420091 - DNA, 25 bp, Homo sapien
taatatactgctatggagtgatcgc

SEQ ID NO: 2420092 - DNA, 25 bp, Homo sapien
gtcaatattgcctatggtaatatta

SEQ ID NO: 2420093 - DNA, 25 bp, Homo sapien
agatagaatgccaactacgttacag

SEQ ID NO: 2420094 - DNA, 25 bp, Homo sapien
gccaactacgttacagtcaatattg

SEQ ID NO: 2420095 - DNA, 25 bp, Homo sapien
gaatgccaactacgttacagtcaat

SEQ ID NO: 2420096 - DNA, 25 bp, Homo sapien
tttataagttacatagatgagaagg

SEQ ID NO: 2420097 - DNA, 25 bp, Homo sapien
gcggaggcacaaagatttttaatac

SEQ ID NO: 2420098 - DNA, 25 bp, Homo sapien
tgagaaggcggaggcacaaagattt

SEQ ID NO: 2420099 - DNA, 25 bp, Homo sapien
tgatctgtccgtctcaggccctggg

SEQ ID NO: 2420100 - DNA, 25 bp, Homo sapien
tccactcaaagagaacagggtgacc

SEQ ID NO: 2420101 - DNA, 25 bp, Homo sapien
gtcgtttgaaacaccagcccacaag

SEQ ID NO: 2420102 - DNA, 25 bp, Homo sapien
cctgctgcgggagtaagattgactt

SEQ ID NO: 2420103 - DNA, 25 bp, Homo sapien
tgccttaggctacactcacgagggt

SEQ ID NO: 2420104 - DNA, 25 bp, Homo sapien
tactgaacagcgttctttaatcaag

SEQ ID NO: 2420105 - DNA, 25 bp, Homo sapien
tcagtacgtagagtctatttctgtt

SEQ ID NO: 2420106 - DNA, 25 bp, Homo sapien
gaacagcgttctttaatcaagcagc

SEQ ID NO: 2420107 - DNA, 25 bp, Homo sapien
ttttctactgaacagcgttctttaa

SEQ ID NO: 2420108 - DNA, 25 bp, Homo sapien
ctgaaccactttgccggggtctgca

SEQ ID NO: 2420109 - DNA, 25 bp, Homo sapien
gactgagctactccaaacacagcct

SEQ ID NO: 2420110 - DNA, 25 bp, Homo sapien
ccaaacacagcctgaaccactttgc

SEQ ID NO: 2420111 - DNA, 25 bp, Homo sapien
tggctttcagactgagctactccaa

SEQ ID NO: 2420112 - DNA, 25 bp, Homo sapien
ggaccacagtataagaaccacagca

SEQ ID NO: 2420113 - DNA, 25 bp, Homo sapien
tggagtacatgcatcagggccacac

SEQ ID NO: 2420114 - DNA, 25 bp, Homo sapien
ccattgcttgtgcactgtcagggca

SEQ ID NO: 2420115 - DNA, 25 bp, Homo sapien
ggccccagtggtcatgatcttaaca

SEQ ID NO: 2420116 - DNA, 25 bp, Homo sapien
tccaagagataaaagacgagcttat

SEQ ID NO: 2420117 - DNA, 25 bp, Homo sapien
cttacggagtaagtggaccaaaatg

SEQ ID NO: 2420118 - DNA, 25 bp, Homo sapien
attatcaacatcaacaacatatggg

SEQ ID NO: 2420119 - DNA, 25 bp, Homo sapien
gagaaggcgttcacgggatttcaaa

SEQ ID NO: 2420120 - DNA, 25 bp, Homo sapien
gatggagccactacaagccagggaa

SEQ ID NO: 2420121 - DNA, 25 bp, Homo sapien
tgatatatcagcgttggcaggagcc

SEQ ID NO: 2420122 - DNA, 25 bp, Homo sapien
tcatgaacacgcaaactctgctgag

SEQ ID NO: 2420123 - DNA, 25 bp, Homo sapien
gagacttgaaaaggcgcttcgcagg

SEQ ID NO: 2420124 - DNA, 25 bp, Homo sapien
gagtacatcctgtcagtccagaggc

SEQ ID NO: 2420125 - DNA, 25 bp, Homo sapien
tccgttgttaaagccagcaccctaa

SEQ ID NO: 2420126 - DNA, 25 bp, Homo sapien
gatgagcagcatttggtagaaacgc

SEQ ID NO: 2420127 - DNA, 25 bp, Homo sapien
cagggttgtacaagctcgaacagac

SEQ ID NO: 2420128 - DNA, 25 bp, Homo sapien
gaacatgagatgtcaagccctgggc

SEQ ID NO: 2420129 - DNA, 25 bp, Homo sapien
cagtacagtgaacgtggacttggct

SEQ ID NO: 2420130 - DNA, 25 bp, Homo sapien
tatatactgagcttcccagtacagt

SEQ ID NO: 2420131 - DNA, 25 bp, Homo sapien
ggacttggctcaagaaagacctgga

SEQ ID NO: 2420132 - DNA, 25 bp, Homo sapien
gacaaaatttgcagtcaggttggct

SEQ ID NO: 2420133 - DNA, 25 bp, Homo sapien
cctgtttcaatatcgctctgctcat

SEQ ID NO: 2420134 - DNA, 25 bp, Homo sapien
tgtcactctcctagctgcaacctga

SEQ ID NO: 2420135 - DNA, 25 bp, Homo sapien
gctttgacaatgcaaggccattatt

SEQ ID NO: 2420136 - DNA, 25 bp, Homo sapien
gacgatcataagttattttgacagt

SEQ ID NO: 2420137 - DNA, 25 bp, Homo sapien
gtgtccataagccagacgatcataa

SEQ ID NO: 2420138 - DNA, 25 bp, Homo sapien
taagccagacgatcataagttattt

SEQ ID NO: 2420139 - DNA, 25 bp, Homo sapien
tccataagccagacgatcataagtt

SEQ ID NO: 2420140 - DNA, 25 bp, Homo sapien
ttttctttttagaggcagagtcctg

SEQ ID NO: 2420141 - DNA, 25 bp, Homo sapien
ctttttagaggcagagtcctgcttt

SEQ ID NO: 2420142 - DNA, 25 bp, Homo sapien
tttagaggcagagtcctgctttgtc

SEQ ID NO: 2420143 - DNA, 25 bp, Homo sapien
tttctttttagaggcagagtcctgc

SEQ ID NO: 2420144 - DNA, 25 bp, Homo sapien
gaatccggcccaattccagctgtgc

SEQ ID NO: 2420145 - DNA, 25 bp, Homo sapien
ttagtgagaatccggcccaattcca

SEQ ID NO: 2420146 - DNA, 25 bp, Homo sapien
cactctttctaaaatagcctgctac

SEQ ID NO: 2420147 - DNA, 25 bp, Homo sapien
caatcatcactctttctaaaatagc

SEQ ID NO: 2420148 - DNA, 25 bp, Homo sapien
ccacacagctcgtggggacactggg

SEQ ID NO: 2420149 - DNA, 25 bp, Homo sapien
cactgggaatccactgctcttgggt

SEQ ID NO: 2420150 - DNA, 25 bp, Homo sapien
tcatcatggaccacacagctcgtgg

SEQ ID NO: 2420151 - DNA, 25 bp, Homo sapien
ggacactgggaatccactgctcttg

SEQ ID NO: 2420152 - DNA, 25 bp, Homo sapien
tttgtgagggaaccgctgctgcttc

SEQ ID NO: 2420153 - DNA, 25 bp, Homo sapien
tgcgtggacagagggccccattgct

SEQ ID NO: 2420154 - DNA, 25 bp, Homo sapien
agccaccccaagctcctttgtgagg

SEQ ID NO: 2420155 - DNA, 25 bp, Homo sapien
tgcttcccattctcccggtgaggat

SEQ ID NO: 2420156 - DNA, 25 bp, Homo sapien
tctgcccatgacatgccatttgata

SEQ ID NO: 2420157 - DNA, 25 bp, Homo sapien
ctgcccatgacatgccatttgatat

SEQ ID NO: 2420158 - DNA, 25 bp, Homo sapien
tgcccatgacatgccatttgatatc

SEQ ID NO: 2420159 - DNA, 25 bp, Homo sapien
acttgtcttgcttgttggaaaggga

SEQ ID NO: 2420160 - DNA, 25 bp, Homo sapien
gacttgtcttgcttgttggaaaggg

SEQ ID NO: 2420161 - DNA, 25 bp, Homo sapien
agaagaagggagacaccgtggaagg

SEQ ID NO: 2420162 - DNA, 25 bp, Homo sapien
ctgaaaaacaagttggagattcttt

SEQ ID NO: 2420163 - DNA, 25 bp, Homo sapien
aagaatatggtctgctaagaaatgc

SEQ ID NO: 2420164 - DNA, 25 bp, Homo sapien
aatatggtctgctaagaaatgccac

SEQ ID NO: 2420165 - DNA, 25 bp, Homo sapien
tatggtctgctaagaaatgccacct

SEQ ID NO: 2420166 - DNA, 25 bp, Homo sapien
gaatatggtctgctaagaaatgcca

SEQ ID NO: 2420167 - DNA, 25 bp, Homo sapien
ccagtctacacacacggcacagttg

SEQ ID NO: 2420168 - DNA, 25 bp, Homo sapien
ctcaggcacatgctcccagtctaca

SEQ ID NO: 2420169 - DNA, 25 bp, Homo sapien
cacagttgcgatcacagagaagggc

SEQ ID NO: 2420170 - DNA, 25 bp, Homo sapien
cagagaagggcattcttagctacac

SEQ ID NO: 2420171 - DNA, 25 bp, Homo sapien
aacagcagacacgctaacacgtccg

SEQ ID NO: 2420172 - DNA, 25 bp, Homo sapien
aaaggccaatagaaacagcagacac

SEQ ID NO: 2420173 - DNA, 25 bp, Homo sapien
taacacgtccgctctgccaacgatc

SEQ ID NO: 2420174 - DNA, 25 bp, Homo sapien
ctgttgtacgagagaaaggccaata

SEQ ID NO: 2420175 - DNA, 25 bp, Homo sapien
cctcagtatgaataggatgtacagc

SEQ ID NO: 2420176 - DNA, 25 bp, Homo sapien
gcaatgccgttacaaaagcaagtcc

SEQ ID NO: 2420177 - DNA, 25 bp, Homo sapien
caagtccacgattcttgaagacagt

SEQ ID NO: 2420178 - DNA, 25 bp, Homo sapien
gatgtacagcaaaaagcaatgccgt

SEQ ID NO: 2420179 - DNA, 25 bp, Homo sapien
cagcagacagtcagaggacttttta

SEQ ID NO: 2420180 - DNA, 25 bp, Homo sapien
cagtcagaggactttttaaacacag

SEQ ID NO: 2420181 - DNA, 25 bp, Homo sapien
gagaggcaagataggtggtatccaa

SEQ ID NO: 2420182 - DNA, 25 bp, Homo sapien
caagataggtggtatccaaagtggg

SEQ ID NO: 2420183 - DNA, 25 bp, Homo sapien
gagttctcagataagctggtttgca

SEQ ID NO: 2420184 - DNA, 25 bp, Homo sapien
gataagctggtttgcagcatgccat

SEQ ID NO: 2420185 - DNA, 25 bp, Homo sapien
cagaaatgtaaggccgtgagttctc

SEQ ID NO: 2420186 - DNA, 25 bp, Homo sapien
ggccgtgagttctcagataagctgg

SEQ ID NO: 2420187 - DNA, 25 bp, Homo sapien
tgggtttccacagcccaatgctaag

SEQ ID NO: 2420188 - DNA, 25 bp, Homo sapien
tttttcccaacctcttgccatcatt

SEQ ID NO: 2420189 - DNA, 25 bp, Homo sapien
gggttctccaacactttcagcatgg

SEQ ID NO: 2420190 - DNA, 25 bp, Homo sapien
caatgctaagcacacagcacattct

SEQ ID NO: 2420191 - DNA, 25 bp, Homo sapien
ctattacacccgttgcaaaaaggct

SEQ ID NO: 2420192 - DNA, 25 bp, Homo sapien
gcttaaaacgccgataatagcgcac

SEQ ID NO: 2420193 - DNA, 25 bp, Homo sapien
gaccggcgcgttaaaatgaacttca

SEQ ID NO: 2420194 - DNA, 25 bp, Homo sapien
tagcgcaccaatattatttcaacag

SEQ ID NO: 2420195 - DNA, 25 bp, Homo sapien
accttctaaagtctagatccagaga

SEQ ID NO: 2420196 - DNA, 25 bp, Homo sapien
tctgcaccttctaaagtctagatcc

SEQ ID NO: 2420197 - DNA, 25 bp, Homo sapien
ctctctctgcaccttctaaagtcta

SEQ ID NO: 2420198 - DNA, 25 bp, Homo sapien
gcaccttctaaagtctagatccaga

SEQ ID NO: 2420199 - DNA, 25 bp, Homo sapien
ggctcgggagagttttctgctccct

SEQ ID NO: 2420200 - DNA, 25 bp, Homo sapien
ccacgcagccctgtcagctcaaggc

SEQ ID NO: 2420201 - DNA, 25 bp, Homo sapien
ctcatctgaacgaaacccttaaggg

SEQ ID NO: 2420202 - DNA, 25 bp, Homo sapien
aaggctcccgcctcgtctcatctga

SEQ ID NO: 2420203 - DNA, 25 bp, Homo sapien
gaaattctctacttggaagcatcgc

SEQ ID NO: 2420204 - DNA, 25 bp, Homo sapien
tctctacttggaagcatcgccacca

SEQ ID NO: 2420205 - DNA, 25 bp, Homo sapien
agctgcccaacagcctccgagaaat

SEQ ID NO: 2420206 - DNA, 25 bp, Homo sapien
caacagcctccgagaaattctctac

SEQ ID NO: 2420207 - DNA, 25 bp, Homo sapien
cgagagcccagattagccgggcagt

SEQ ID NO: 2420208 - DNA, 25 bp, Homo sapien
tggatcccggagcaaagtgccatgc

SEQ ID NO: 2420209 - DNA, 25 bp, Homo sapien
tgggtccgcgctagtcccacttggt

SEQ ID NO: 2420210 - DNA, 25 bp, Homo sapien
acttggtcacgatccggcaggcgaa

SEQ ID NO: 2420211 - DNA, 25 bp, Homo sapien
cttgtggctggtgttctcggccatg

SEQ ID NO: 2420212 - DNA, 25 bp, Homo sapien
tggctggtgttctcggccatgccct

SEQ ID NO: 2420213 - DNA, 25 bp, Homo sapien
ttgaaggtgaggacgcagagcggcc

SEQ ID NO: 2420214 - DNA, 25 bp, Homo sapien
gacgcagagcggccggtaggacttg

SEQ ID NO: 2420215 - DNA, 25 bp, Homo sapien
cgtcggggttgttcacgatcgccca

SEQ ID NO: 2420216 - DNA, 25 bp, Homo sapien
gttggtgaagatgccccagcggagc

SEQ ID NO: 2420217 - DNA, 25 bp, Homo sapien
ccgcacgtcggggttgttcacgatc

SEQ ID NO: 2420218 - DNA, 25 bp, Homo sapien
cacgtcggggttgttcacgatcgcc

SEQ ID NO: 2420219 - DNA, 25 bp, Homo sapien
tgcagggagcggccgtagcacaggc

SEQ ID NO: 2420220 - DNA, 25 bp, Homo sapien
gcagggagcggccgtagcacaggca

SEQ ID NO: 2420221 - DNA, 25 bp, Homo sapien
ctgcagggagcggccgtagcacagg

SEQ ID NO: 2420222 - DNA, 25 bp, Homo sapien
cagggagcggccgtagcacaggcag

SEQ ID NO: 2420223 - DNA, 25 bp, Homo sapien
aggtggtcaccaccatcgcgccgcc

SEQ ID NO: 2420224 - DNA, 25 bp, Homo sapien
cctcgggcagaggtggtcaccacca

SEQ ID NO: 2420225 - DNA, 25 bp, Homo sapien
tcgggcagaggtggtcaccaccatc

SEQ ID NO: 2420226 - DNA, 25 bp, Homo sapien
ggcagaggtggtcaccaccatcgcg

SEQ ID NO: 2420227 - DNA, 25 bp, Homo sapien
gcgtctggcatcctcccctaccggg

SEQ ID NO: 2420228 - DNA, 25 bp, Homo sapien
ctcccgggcgtctggcatcctcccc

SEQ ID NO: 2420229 - DNA, 25 bp, Homo sapien
ccgggcgtctggcatcctcccctac

SEQ ID NO: 2420230 - DNA, 25 bp, Homo sapien
cggaggggggctcgggcatggtgct

SEQ ID NO: 2420231 - DNA, 25 bp, Homo sapien
ttggcccagctgcaaataaacagca

SEQ ID NO: 2420232 - DNA, 25 bp, Homo sapien
ggcccagctgcaaataaacagcagt

SEQ ID NO: 2420233 - DNA, 25 bp, Homo sapien
cctgcgccgcggagttggcccagct

SEQ ID NO: 2420234 - DNA, 25 bp, Homo sapien
tggcccagctgcaaataaacagcag

SEQ ID NO: 2420235 - DNA, 25 bp, Homo sapien
tccagggagaaaagtgccgctgctt

SEQ ID NO: 2420236 - DNA, 25 bp, Homo sapien
ttccagggagaaaagtgccgctgct

SEQ ID NO: 2420237 - DNA, 25 bp, Homo sapien
ggggatagggagcaccttcctcaaa

SEQ ID NO: 2420238 - DNA, 25 bp, Homo sapien
gcggggatagggagcaccttcctca

SEQ ID NO: 2420239 - DNA, 25 bp, Homo sapien
ccgcggggatagggagcaccttcct

SEQ ID NO: 2420240 - DNA, 25 bp, Homo sapien
gaggaacccgcggggatagggagca

SEQ ID NO: 2420241 - DNA, 25 bp, Homo sapien
gcgccaccggctctttaactttaca

SEQ ID NO: 2420242 - DNA, 25 bp, Homo sapien
gggagatgccaagcaaactactttt

SEQ ID NO: 2420243 - DNA, 25 bp, Homo sapien
tcttggcccgcacttacaaaaagta

SEQ ID NO: 2420244 - DNA, 25 bp, Homo sapien
gggcctgggagccgaattgtcttct

SEQ ID NO: 2420245 - DNA, 25 bp, Homo sapien
tgtagatgacgaagctcaatactga

SEQ ID NO: 2420246 - DNA, 25 bp, Homo sapien
ctagtttgtagatgacgaagctcaa

SEQ ID NO: 2420247 - DNA, 25 bp, Homo sapien
agatgacgaagctcaatactgatgg

SEQ ID NO: 2420248 - DNA, 25 bp, Homo sapien
attgctagtttgtagatgacgaagc

SEQ ID NO: 2420249 - DNA, 25 bp, Homo sapien
ggctgaaaatcgtcaggtctgtcat

SEQ ID NO: 2420250 - DNA, 25 bp, Homo sapien
tggaggctgaaaatcgtcaggtctg

SEQ ID NO: 2420251 - DNA, 25 bp, Homo sapien
ttgtgttcctgagagttttgcgagg

SEQ ID NO: 2420252 - DNA, 25 bp, Homo sapien
agagttttgcgaggcgaaatttcca

SEQ ID NO: 2420253 - DNA, 25 bp, Homo sapien
gctcagtgcctggaaacaataaagc

SEQ ID NO: 2420254 - DNA, 25 bp, Homo sapien
cagtgcctggaaacaataaagcagc

SEQ ID NO: 2420255 - DNA, 25 bp, Homo sapien
agtgcctggaaacaataaagcagca

SEQ ID NO: 2420256 - DNA, 25 bp, Homo sapien
tcagtgcctggaaacaataaagcag

SEQ ID NO: 2420257 - DNA, 25 bp, Homo sapien
gccagacctagaggagggacttgca

SEQ ID NO: 2420258 - DNA, 25 bp, Homo sapien
ccagacctagaggagggacttgcat

SEQ ID NO: 2420259 - DNA, 25 bp, Homo sapien
agagggagacgttcagccagaccta

SEQ ID NO: 2420260 - DNA, 25 bp, Homo sapien
gggttgagagggagacgttcagcca

SEQ ID NO: 2420261 - DNA, 25 bp, Homo sapien
ctgctggcagtggtgctttccggac

SEQ ID NO: 2420262 - DNA, 25 bp, Homo sapien
ggcctctgctggcagtggtgctttc

SEQ ID NO: 2420263 - DNA, 25 bp, Homo sapien
cttcctggcatcatctccaggcctc

SEQ ID NO: 2420264 - DNA, 25 bp, Homo sapien
ttcctggcatcatctccaggcctct

SEQ ID NO: 2420265 - DNA, 25 bp, Homo sapien
gtgattttctgtttcgaggatgagt

SEQ ID NO: 2420266 - DNA, 25 bp, Homo sapien
ttctgtttcgaggatgagtgaacat

SEQ ID NO: 2420267 - DNA, 25 bp, Homo sapien
gattttctgtttcgaggatgagtga

SEQ ID NO: 2420268 - DNA, 25 bp, Homo sapien
ttttctgtttcgaggatgagtgaac

SEQ ID NO: 2420269 - DNA, 25 bp, Homo sapien
agtgctattgtaccccttctcttgt

SEQ ID NO: 2420270 - DNA, 25 bp, Homo sapien
cagtgctattgtaccccttctcttg

SEQ ID NO: 2420271 - DNA, 25 bp, Homo sapien
taacagtgctattgtaccccttctc

SEQ ID NO: 2420272 - DNA, 25 bp, Homo sapien
cataacagtgctattgtaccccttc

SEQ ID NO: 2420273 - DNA, 25 bp, Homo sapien
taaaagctggctatggagatgtcac

SEQ ID NO: 2420274 - DNA, 25 bp, Homo sapien
ttaaaagctggctatggagatgtca

SEQ ID NO: 2420275 - DNA, 25 bp, Homo sapien
accagtgtgcgtttaggtgcaaagc

SEQ ID NO: 2420276 - DNA, 25 bp, Homo sapien
tctgcattaccagtgtgcgtttagg

SEQ ID NO: 2420277 - DNA, 25 bp, Homo sapien
ttcctttctgcattaccagtgtgcg

SEQ ID NO: 2420278 - DNA, 25 bp, Homo sapien
tgtgcgtttaggtgcaaagcttcct

SEQ ID NO: 2420279 - DNA, 25 bp, Homo sapien
cttgtcttccagctgtctattgatc

SEQ ID NO: 2420280 - DNA, 25 bp, Homo sapien
ttgtcttccagctgtctattgatca

SEQ ID NO: 2420281 - DNA, 25 bp, Homo sapien
gagttagaactttatcaggatccga

SEQ ID NO: 2420282 - DNA, 25 bp, Homo sapien
ctgactgcaaaagggtgtaacaagt

SEQ ID NO: 2420283 - DNA, 25 bp, Homo sapien
acttttctcttatctaggctttgga

SEQ ID NO: 2420284 - DNA, 25 bp, Homo sapien
ctgctgtgagaagagtacttttctc

SEQ ID NO: 2420285 - DNA, 25 bp, Homo sapien
catgttggcaggttctctgttgccc

SEQ ID NO: 2420286 - DNA, 25 bp, Homo sapien
acatcacatgttggcaggttctctg

SEQ ID NO: 2420287 - DNA, 25 bp, Homo sapien
ggttctctgttgccccctgagccgc

SEQ ID NO: 2420288 - DNA, 25 bp, Homo sapien
aaaccagcaagcttttattagcaat

SEQ ID NO: 2420289 - DNA, 25 bp, Homo sapien
tgtcatcgggtgtccctggcagcac

SEQ ID NO: 2420290 - DNA, 25 bp, Homo sapien
ctgaaactgtgtcatcgggtgtccc

SEQ ID NO: 2420291 - DNA, 25 bp, Homo sapien
tgctgccgtgaataatttctaactc

SEQ ID NO: 2420292 - DNA, 25 bp, Homo sapien
cctgatgctgctgccgtgaataatt

SEQ ID NO: 2420293 - DNA, 25 bp, Homo sapien
cctgcagcagtcaatcaaagaatac

SEQ ID NO: 2420294 - DNA, 25 bp, Homo sapien
gcagcagtcaatcaaagaatacctg

SEQ ID NO: 2420295 - DNA, 25 bp, Homo sapien
tgcagcagtcaatcaaagaatacct

SEQ ID NO: 2420296 - DNA, 25 bp, Homo sapien
gcagtcaatcaaagaatacctgcca

SEQ ID NO: 2420297 - DNA, 25 bp, Homo sapien
tctctattcgatcaaggcttgccag

SEQ ID NO: 2420298 - DNA, 25 bp, Homo sapien
tgccagccgcaggttaatgcctaca

SEQ ID NO: 2420299 - DNA, 25 bp, Homo sapien
tgagtggcccagcttctgtacaatg

SEQ ID NO: 2420300 - DNA, 25 bp, Homo sapien
gcgtctgatgaaggttctgctcaca

SEQ ID NO: 2420301 - DNA, 25 bp, Homo sapien
caggggaacactgtgttcatcacag

SEQ ID NO: 2420302 - DNA, 25 bp, Homo sapien
ctgtcagcaggggaacactgtgttc

SEQ ID NO: 2420303 - DNA, 25 bp, Homo sapien
tgtcagcaggggaacactgtgttca

SEQ ID NO: 2420304 - DNA, 25 bp, Homo sapien
cagcaggggaacactgtgttcatca

SEQ ID NO: 2420305 - DNA, 25 bp, Homo sapien
ttcatgccgtgatgtgttggagccc

SEQ ID NO: 2420306 - DNA, 25 bp, Homo sapien
caagcctgtggttgatcttatttcc

SEQ ID NO: 2420307 - DNA, 25 bp, Homo sapien
ttttcatgccgtgatgtgttggagc

SEQ ID NO: 2420308 - DNA, 25 bp, Homo sapien
cacccatgatcatccaagcctgtgg

SEQ ID NO: 2420309 - DNA, 25 bp, Homo sapien
aatttcacagaagagagttccaagg

SEQ ID NO: 2420310 - DNA, 25 bp, Homo sapien
cacagaagagagttccaaggatgta

SEQ ID NO: 2420311 - DNA, 25 bp, Homo sapien
ctgcaaactaaggaacatgtcatgt

SEQ ID NO: 2420312 - DNA, 25 bp, Homo sapien
ttccaaggatgtagtctctggtgag

SEQ ID NO: 2420313 - DNA, 25 bp, Homo sapien
gcaggctgtactccaagggtgcaaa

SEQ ID NO: 2420314 - DNA, 25 bp, Homo sapien
tcttccaggggcaataccggtgtcc

SEQ ID NO: 2420315 - DNA, 25 bp, Homo sapien
tgctctggaagatggttgggaccct

SEQ ID NO: 2420316 - DNA, 25 bp, Homo sapien
ttgggaccctaaggccgtaatcaca

SEQ ID NO: 2420317 - DNA, 25 bp, Homo sapien
gaacctggcccaagtcctagaagtg

SEQ ID NO: 2420318 - DNA, 25 bp, Homo sapien
aacctggcccaagtcctagaagtga

SEQ ID NO: 2420319 - DNA, 25 bp, Homo sapien
gtcctagaagtgaccactttcttga

SEQ ID NO: 2420320 - DNA, 25 bp, Homo sapien
gaagtgaccactttcttgatgaaga

SEQ ID NO: 2420321 - DNA, 25 bp, Homo sapien
ggagtccacctcatgaccttgtatg

SEQ ID NO: 2420322 - DNA, 25 bp, Homo sapien
tcagaaggctcagtcttgtacagtt

SEQ ID NO: 2420323 - DNA, 25 bp, Homo sapien
actctcttgtgcagtctgaccctgg

SEQ ID NO: 2420324 - DNA, 25 bp, Homo sapien
tagttattaggcattaggcttcagc

SEQ ID NO: 2420325 - DNA, 25 bp, Homo sapien
tcacctcagaggaagcatcggattc

SEQ ID NO: 2420326 - DNA, 25 bp, Homo sapien
cacctgtactgtcctctctagaaga

SEQ ID NO: 2420327 - DNA, 25 bp, Homo sapien
ctgctgcttatagggacaccccata

SEQ ID NO: 2420328 - DNA, 25 bp, Homo sapien
tgtattgtcctcctcagtggccaaa

SEQ ID NO: 2420329 - DNA, 25 bp, Homo sapien
gggcgcaccgatttctagttcaacg

SEQ ID NO: 2420330 - DNA, 25 bp, Homo sapien
aggtctcaccagaagaggtcttgca

SEQ ID NO: 2420331 - DNA, 25 bp, Homo sapien
ccattttggtggtgatatcagcaac

SEQ ID NO: 2420332 - DNA, 25 bp, Homo sapien
tgtgacttcaacagtaacatccctg

SEQ ID NO: 2420333 - DNA, 25 bp, Homo sapien
tgcttacttagactccccactggat

SEQ ID NO: 2420334 - DNA, 25 bp, Homo sapien
tcaggccctggattaagacacttgc

SEQ ID NO: 2420335 - DNA, 25 bp, Homo sapien
tgacaaccagtacggcgagtctctg

SEQ ID NO: 2420336 - DNA, 25 bp, Homo sapien
aatttatccatcttcccgtgagctg

SEQ ID NO: 2420337 - DNA, 25 bp, Homo sapien
aggattttcaggcactagtgtggct

SEQ ID NO: 2420338 - DNA, 25 bp, Homo sapien
tcaggcactagtgtggctctctgga

SEQ ID NO: 2420339 - DNA, 25 bp, Homo sapien
tggaacttctcactaaggttctctt

SEQ ID NO: 2420340 - DNA, 25 bp, Homo sapien
aacttctcactaaggttctcttcca

SEQ ID NO: 2420341 - DNA, 25 bp, Homo sapien
gatctgacggagaagtatggaataa

SEQ ID NO: 2420342 - DNA, 25 bp, Homo sapien
tgaattcagtcttagtgcatgtaga

SEQ ID NO: 2420343 - DNA, 25 bp, Homo sapien
tctcattgttattcccgctaaaggg

SEQ ID NO: 2420344 - DNA, 25 bp, Homo sapien
aaattctgtacccaaattctcattg

SEQ ID NO: 2420345 - DNA, 25 bp, Homo sapien
tcaatcacaaggaggcggagattgg

SEQ ID NO: 2420346 - DNA, 25 bp, Homo sapien
tccctcaatcacaaggaggcggaga

SEQ ID NO: 2420347 - DNA, 25 bp, Homo sapien
caatcacaaggaggcggagattggc

SEQ ID NO: 2420348 - DNA, 25 bp, Homo sapien
cctcaatcacaaggaggcggagatt

SEQ ID NO: 2420349 - DNA, 25 bp, Homo sapien
tgtgtggagccttcagctatccgca

SEQ ID NO: 2420350 - DNA, 25 bp, Homo sapien
tcacagtgtacaggacattacaggt

SEQ ID NO: 2420351 - DNA, 25 bp, Homo sapien
gctatccgcagtctaaaccgctatt

SEQ ID NO: 2420352 - DNA, 25 bp, Homo sapien
gaacacttcctttagaccagtcaca

SEQ ID NO: 2420353 - DNA, 25 bp, Homo sapien
ttcagtccacctcccttttgctgtc

SEQ ID NO: 2420354 - DNA, 25 bp, Homo sapien
aagtctgcaaccatttcagtccacc

SEQ ID NO: 2420355 - DNA, 25 bp, Homo sapien
caaccatttcagtccacctcccttt

SEQ ID NO: 2420356 - DNA, 25 bp, Homo sapien
tgcaaccatttcagtccacctccct

SEQ ID NO: 2420357 - DNA, 25 bp, Homo sapien
gagccttagcttccttgagaccaca

SEQ ID NO: 2420358 - DNA, 25 bp, Homo sapien
gctcctcctcccatagattccctca

SEQ ID NO: 2420359 - DNA, 25 bp, Homo sapien
ttagcttccttgagaccacagctcc

SEQ ID NO: 2420360 - DNA, 25 bp, Homo sapien
gaagatcttctggagccttagcttc

SEQ ID NO: 2420361 - DNA, 25 bp, Homo sapien
tatggtgcccagataatgccaccag

SEQ ID NO: 2420362 - DNA, 25 bp, Homo sapien
ttatggtgcccagataatgccacca

SEQ ID NO: 2420363 - DNA, 25 bp, Homo sapien
ggtgcccagataatgccaccagctt

SEQ ID NO: 2420364 - DNA, 25 bp, Homo sapien
agctttcagaggaagatgcatctgg

SEQ ID NO: 2420365 - DNA, 25 bp, Homo sapien
ggaataggttaggtgtgaggcgagt

SEQ ID NO: 2420366 - DNA, 25 bp, Homo sapien
ggttaggtgtgaggcgagtgtgcat

SEQ ID NO: 2420367 - DNA, 25 bp, Homo sapien
gaagggaataggttaggtgtgaggc

SEQ ID NO: 2420368 - DNA, 25 bp, Homo sapien
ctgcaagaagggaataggttaggtg

SEQ ID NO: 2420369 - DNA, 25 bp, Homo sapien
tctctgcgtcttgtggtcttcctct

SEQ ID NO: 2420370 - DNA, 25 bp, Homo sapien
tgaacttgagatgttctctccccag

SEQ ID NO: 2420371 - DNA, 25 bp, Homo sapien
tatgttatccttggattggtctctg

SEQ ID NO: 2420372 - DNA, 25 bp, Homo sapien
aactgaacttgagatgttctctccc

SEQ ID NO: 2420373 - DNA, 25 bp, Homo sapien
ggaagtagcgatttgatattccctt

SEQ ID NO: 2420374 - DNA, 25 bp, Homo sapien
gaagtagcgatttgatattcccttt

SEQ ID NO: 2420375 - DNA, 25 bp, Homo sapien
caagtctcctctgcactgagaagcc

SEQ ID NO: 2420376 - DNA, 25 bp, Homo sapien
gaattcaacccccagatggcaatag

SEQ ID NO: 2420377 - DNA, 25 bp, Homo sapien
cttctttcagaattcaacccccaga

SEQ ID NO: 2420378 - DNA, 25 bp, Homo sapien
ttcagaattcaacccccagatggca

SEQ ID NO: 2420379 - DNA, 25 bp, Homo sapien
aattcaacccccagatggcaataga

SEQ ID NO: 2420380 - DNA, 25 bp, Homo sapien
ttatttgtgcatgagaatgtaactc

SEQ ID NO: 2420381 - DNA, 25 bp, Homo sapien
tatttgtgcatgagaatgtaactcc

SEQ ID NO: 2420382 - DNA, 25 bp, Homo sapien
tgcatgagaatgtaactccttgacc

SEQ ID NO: 2420383 - DNA, 25 bp, Homo sapien
ttgtgcatgagaatgtaactccttg

SEQ ID NO: 2420384 - DNA, 25 bp, Homo sapien
aagtacccagtccagggtagttatg

SEQ ID NO: 2420385 - DNA, 25 bp, Homo sapien
cccagtccagggtagttatggtggc

SEQ ID NO: 2420386 - DNA, 25 bp, Homo sapien
tccagggtagttatggtggccaccg

SEQ ID NO: 2420387 - DNA, 25 bp, Homo sapien
cagtccagggtagttatggtggcca

SEQ ID NO: 2420388 - DNA, 25 bp, Homo sapien
tgaagcactaagaaagtacacctcc

SEQ ID NO: 2420389 - DNA, 25 bp, Homo sapien
ccactgggagagtggtcggacactt

SEQ ID NO: 2420390 - DNA, 25 bp, Homo sapien
cattcatagagagcagactacggct

SEQ ID NO: 2420391 - DNA, 25 bp, Homo sapien
ggctagcagcaaaagccacctgcag

SEQ ID NO: 2420392 - DNA, 25 bp, Homo sapien
gcttgttgccattcaatagagctgc

SEQ ID NO: 2420393 - DNA, 25 bp, Homo sapien
tcccagcttgttgccattcaataga

SEQ ID NO: 2420394 - DNA, 25 bp, Homo sapien
ccagcttgttgccattcaatagagc

SEQ ID NO: 2420395 - DNA, 25 bp, Homo sapien
atatcccagcttgttgccattcaat

SEQ ID NO: 2420396 - DNA, 25 bp, Homo sapien
ttgaaggtgagggtgcagagtggcc

SEQ ID NO: 2420397 - DNA, 25 bp, Homo sapien
agggtgcagagtggccggtgggact

SEQ ID NO: 2420398 - DNA, 25 bp, Homo sapien
acttgtggctggtgttctcggccat

SEQ ID NO: 2420399 - DNA, 25 bp, Homo sapien
tgcagagtggccggtgggacttgtg

SEQ ID NO: 2420400 - DNA, 25 bp, Homo sapien
cacaggcagctcgcgcctgccagca

SEQ ID NO: 2420401 - DNA, 25 bp, Homo sapien
ttagcacaggcagctcgcgcctgcc

SEQ ID NO: 2420402 - DNA, 25 bp, Homo sapien
agcacaggcagctcgcgcctgccag

SEQ ID NO: 2420403 - DNA, 25 bp, Homo sapien
tagcacaggcagctcgcgcctgcca

SEQ ID NO: 2420404 - DNA, 25 bp, Homo sapien
aatgccccgatcgtgctccccaaaa

SEQ ID NO: 2420405 - DNA, 25 bp, Homo sapien
ctccccactgcgaatgccccgatcg

SEQ ID NO: 2420406 - DNA, 25 bp, Homo sapien
tgcgaatgccccgatcgtgctcccc

SEQ ID NO: 2420407 - DNA, 25 bp, Homo sapien
atacatccacgcccccaaaaaactg

SEQ ID NO: 2420408 - DNA, 25 bp, Homo sapien
tatgacgagcaaattattcttatgc

SEQ ID NO: 2420409 - DNA, 25 bp, Homo sapien
ttcttatgcaaggcagtcacttggg

SEQ ID NO: 2420410 - DNA, 25 bp, Homo sapien
tctttgggcaatccgggatatgacg

SEQ ID NO: 2420411 - DNA, 25 bp, Homo sapien
gtttgggcctaggagctgaactggc

SEQ ID NO: 2420412 - DNA, 25 bp, Homo sapien
ctgtagggatgaaataaggcccagt

SEQ ID NO: 2420413 - DNA, 25 bp, Homo sapien
tgatcagaccggttgctgtcaaacc

SEQ ID NO: 2420414 - DNA, 25 bp, Homo sapien
aattttgatcagaccggttgctgtc

SEQ ID NO: 2420415 - DNA, 25 bp, Homo sapien
ttctatggtggagactgtagggatg

SEQ ID NO: 2420416 - DNA, 25 bp, Homo sapien
catgacgtttggccagtgttcatga

SEQ ID NO: 2420417 - DNA, 25 bp, Homo sapien
catcatgacgtttggccagtgttca

SEQ ID NO: 2420418 - DNA, 25 bp, Homo sapien
aacatcatgacgtttggccagtgtt

SEQ ID NO: 2420419 - DNA, 25 bp, Homo sapien
atcatgacgtttggccagtgttcat

SEQ ID NO: 2420420 - DNA, 25 bp, Homo sapien
cttgtttcatagcccgtgatggagc

SEQ ID NO: 2420421 - DNA, 25 bp, Homo sapien
gtttcatagcccgtgatggagccag

SEQ ID NO: 2420422 - DNA, 25 bp, Homo sapien
tcatagcccgtgatggagccagaaa

SEQ ID NO: 2420423 - DNA, 25 bp, Homo sapien
tagcccgtgatggagccagaaacat

SEQ ID NO: 2420424 - DNA, 25 bp, Homo sapien
tctgggacttgcctctggatcacca

SEQ ID NO: 2420425 - DNA, 25 bp, Homo sapien
tgatcataagggagatcatctctag

SEQ ID NO: 2420426 - DNA, 25 bp, Homo sapien
tcccaactgtggatatgatcataag

SEQ ID NO: 2420427 - DNA, 25 bp, Homo sapien
tcaccatttgttcaggaaagagccc

SEQ ID NO: 2420428 - DNA, 25 bp, Homo sapien
actggagaattaggattgttgattg

SEQ ID NO: 2420429 - DNA, 25 bp, Homo sapien
cattctttgatgagtaggcttctca

SEQ ID NO: 2420430 - DNA, 25 bp, Homo sapien
gggtccctcagatcagttgagtcag

SEQ ID NO: 2420431 - DNA, 25 bp, Homo sapien
caaggggggtgaactcatcaggatt

SEQ ID NO: 2420432 - DNA, 25 bp, Homo sapien
gtagtagtttcatagtatgcagaac

SEQ ID NO: 2420433 - DNA, 25 bp, Homo sapien
ctgatgtagtagtttcatagtatgc

SEQ ID NO: 2420434 - DNA, 25 bp, Homo sapien
tgtagtagtttcatagtatgcagaa

SEQ ID NO: 2420435 - DNA, 25 bp, Homo sapien
gatgtagtagtttcatagtatgcag

SEQ ID NO: 2420436 - DNA, 25 bp, Homo sapien
tggcatctttagctgctgtggccat

SEQ ID NO: 2420437 - DNA, 25 bp, Homo sapien
gcatcccaactggttctgacaaact

SEQ ID NO: 2420438 - DNA, 25 bp, Homo sapien
catcccaactggttctgacaaactg

SEQ ID NO: 2420439 - DNA, 25 bp, Homo sapien
cccaactggttctgacaaactgaag

SEQ ID NO: 2420440 - DNA, 25 bp, Homo sapien
tcccaactggttctgacaaactgaa

SEQ ID NO: 2420441 - DNA, 25 bp, Homo sapien
cttggtatggatatccatcatgctt

SEQ ID NO: 2420442 - DNA, 25 bp, Homo sapien
tatggatatccatcatgctttgctg

SEQ ID NO: 2420443 - DNA, 25 bp, Homo sapien
ggtatggatatccatcatgctttgc

SEQ ID NO: 2420444 - DNA, 25 bp, Homo sapien
tggtatggatatccatcatgctttg

SEQ ID NO: 2420445 - DNA, 25 bp, Homo sapien
agaacccgtggtgaacaccagaatg

SEQ ID NO: 2420446 - DNA, 25 bp, Homo sapien
aattcatgagaacccgtggtgaaca

SEQ ID NO: 2420447 - DNA, 25 bp, Homo sapien
accaaattcatgagaacccgtggtg

SEQ ID NO: 2420448 - DNA, 25 bp, Homo sapien
tcatgagaacccgtggtgaacacca

SEQ ID NO: 2420449 - DNA, 25 bp, Homo sapien
ccctgagtgtcagaatcaggaagtc

SEQ ID NO: 2420450 - DNA, 25 bp, Homo sapien
tccctgagtgtcagaatcaggaagt

SEQ ID NO: 2420451 - DNA, 25 bp, Homo sapien
cctgagtgtcagaatcaggaagtca

SEQ ID NO: 2420452 - DNA, 25 bp, Homo sapien
ctccctgagtgtcagaatcaggaag

SEQ ID NO: 2420453 - DNA, 25 bp, Homo sapien
caaaatgacctagaaaggatctgct

SEQ ID NO: 2420454 - DNA, 25 bp, Homo sapien
tgtctggagctcaatatgaaaacca

SEQ ID NO: 2420455 - DNA, 25 bp, Homo sapien
gactaactggcatgcagcttgggcc

SEQ ID NO: 2420456 - DNA, 25 bp, Homo sapien
tgaaaaccagttagattgtggcagc

SEQ ID NO: 2420457 - DNA, 25 bp, Homo sapien
cattgactggggctacacggctttt

SEQ ID NO: 2420458 - DNA, 25 bp, Homo sapien
tttcatgggtcccattttgactgtc

SEQ ID NO: 2420459 - DNA, 25 bp, Homo sapien
ttcatgggtcccattttgactgtct

SEQ ID NO: 2420460 - DNA, 25 bp, Homo sapien
gggctacacggcttttcatgggtcc

SEQ ID NO: 2420461 - DNA, 25 bp, Homo sapien
ctgttaggagggacttagtgatgat

SEQ ID NO: 2420462 - DNA, 25 bp, Homo sapien
agttccatatctccactcattttta

SEQ ID NO: 2420463 - DNA, 25 bp, Homo sapien
tgttaggagggacttagtgatgatt

SEQ ID NO: 2420464 - DNA, 25 bp, Homo sapien
aaactttgtgcgaacaagttccata

SEQ ID NO: 2420465 - DNA, 25 bp, Homo sapien
cagcccttcctctggttattctctc

SEQ ID NO: 2420466 - DNA, 25 bp, Homo sapien
ttctccaggattttcagcccttcct

SEQ ID NO: 2420467 - DNA, 25 bp, Homo sapien
gtgttctccaggattttcagccctt

SEQ ID NO: 2420468 - DNA, 25 bp, Homo sapien
cttgttaatgttggtgttctccagg

SEQ ID NO: 2420469 - DNA, 25 bp, Homo sapien
gaggcaataactaatcgcctactaa

SEQ ID NO: 2420470 - DNA, 25 bp, Homo sapien
ggaccagacagattcgcaccgaatt

SEQ ID NO: 2420471 - DNA, 25 bp, Homo sapien
cagattcgcaccgaattctaccaga

SEQ ID NO: 2420472 - DNA, 25 bp, Homo sapien
gcaataactaatcgcctactaacca

SEQ ID NO: 2420473 - DNA, 25 bp, Homo sapien
ggcatcacgctacctgacttcaaac

SEQ ID NO: 2420474 - DNA, 25 bp, Homo sapien
cctaagcaaaaagaacaaagctgga

SEQ ID NO: 2420475 - DNA, 25 bp, Homo sapien
caaaaaagagcccgcgttgccaaga

SEQ ID NO: 2420476 - DNA, 25 bp, Homo sapien
aaagagcccgcgttgccaagacaat

SEQ ID NO: 2420477 - DNA, 25 bp, Homo sapien
tcaggaagtaaccaaacagatacat

SEQ ID NO: 2420478 - DNA, 25 bp, Homo sapien
ttcttctggccacggatatggggcg

SEQ ID NO: 2420479 - DNA, 25 bp, Homo sapien
gggagtcaggaagtaaccaaacaga

SEQ ID NO: 2420480 - DNA, 25 bp, Homo sapien
ggaagtaaccaaacagatacatcaa

SEQ ID NO: 2420481 - DNA, 25 bp, Homo sapien
tgagcagtagccttgtcaaagcctc

SEQ ID NO: 2420482 - DNA, 25 bp, Homo sapien
ccttgtcaaagcctctggatcaaag

SEQ ID NO: 2420483 - DNA, 25 bp, Homo sapien
tagccttgtcaaagcctctggatca

SEQ ID NO: 2420484 - DNA, 25 bp, Homo sapien
ctgagttggatgagcagtagccttg

SEQ ID NO: 2420485 - DNA, 25 bp, Homo sapien
gggtgaacatgaacaatgctcctcc

SEQ ID NO: 2420486 - DNA, 25 bp, Homo sapien
tgcaccactggcacaataggagggt

SEQ ID NO: 2420487 - DNA, 25 bp, Homo sapien
cacaataggagggtgaacatgaaca

SEQ ID NO: 2420488 - DNA, 25 bp, Homo sapien
ccactggcacaataggagggtgaac

SEQ ID NO: 2420489 - DNA, 25 bp, Homo sapien
tcccaactgctgaaggtaacgctgt

SEQ ID NO: 2420490 - DNA, 25 bp, Homo sapien
aaggtaacgctgtgagagggtctct

SEQ ID NO: 2420491 - DNA, 25 bp, Homo sapien
caactgctgaaggtaacgctgtgag

SEQ ID NO: 2420492 - DNA, 25 bp, Homo sapien
gataaatcccaactgctgaaggtaa

SEQ ID NO: 2420493 - DNA, 25 bp, Homo sapien
cagaagccgtggtttgtgacggcac

SEQ ID NO: 2420494 - DNA, 25 bp, Homo sapien
acagaagccgtggtttgtgacggca

SEQ ID NO: 2420495 - DNA, 25 bp, Homo sapien
cacagaagccgtggtttgtgacggc

SEQ ID NO: 2420496 - DNA, 25 bp, Homo sapien
catttcacaatggttgctcccttta

SEQ ID NO: 2420497 - DNA, 25 bp, Homo sapien
gctccctttacaactgtctcatggc

SEQ ID NO: 2420498 - DNA, 25 bp, Homo sapien
catgccagcaacaggttcacagcag

SEQ ID NO: 2420499 - DNA, 25 bp, Homo sapien
aactccagcggacagattcatgcca

SEQ ID NO: 2420500 - DNA, 25 bp, Homo sapien
gaacagctggcccttcgattgtaag

SEQ ID NO: 2420501 - DNA, 25 bp, Homo sapien
ttccattaattccactgggacaggc

SEQ ID NO: 2420502 - DNA, 25 bp, Homo sapien
tgggacaggcaagcatcaactggca

SEQ ID NO: 2420503 - DNA, 25 bp, Homo sapien
cacagttatatccagtgaggtcggg

SEQ ID NO: 2420504 - DNA, 25 bp, Homo sapien
ttcccaactccgcaaaggtagaggc

SEQ ID NO: 2420505 - DNA, 25 bp, Homo sapien
gaggctcctgttggtaaagcgacag

SEQ ID NO: 2420506 - DNA, 25 bp, Homo sapien
aaggtagaggctcctgttggtaaag

SEQ ID NO: 2420507 - DNA, 25 bp, Homo sapien
cccaactccgcaaaggtagaggctc

SEQ ID NO: 2420508 - DNA, 25 bp, Homo sapien
aagaggagtttcctggaaatctggc

SEQ ID NO: 2420509 - DNA, 25 bp, Homo sapien
tgcaaaaggtctccctttgccaatt

SEQ ID NO: 2420510 - DNA, 25 bp, Homo sapien
ctgcaaaaggtctccctttgccaat

SEQ ID NO: 2420511 - DNA, 25 bp, Homo sapien
tgccaatttttgtcacaaatttttg

SEQ ID NO: 2420512 - DNA, 25 bp, Homo sapien
caatttttgtcacaaatttttgcat

SEQ ID NO: 2420513 - DNA, 25 bp, Homo sapien
atcagatgagacccggcacgttcag

SEQ ID NO: 2420514 - DNA, 25 bp, Homo sapien
tgtagacggacatctgcttccccat

SEQ ID NO: 2420515 - DNA, 25 bp, Homo sapien
tgaaaggcctgttaacaggtaatgg

SEQ ID NO: 2420516 - DNA, 25 bp, Homo sapien
caggtaatggtagatactgtacatg

SEQ ID NO: 2420517 - DNA, 25 bp, Homo sapien
cagaagaggattgtcacacaggaca

SEQ ID NO: 2420518 - DNA, 25 bp, Homo sapien
gataggggctagggaagccatgggt

SEQ ID NO: 2420519 - DNA, 25 bp, Homo sapien
ataggggctagggaagccatgggtg

SEQ ID NO: 2420520 - DNA, 25 bp, Homo sapien
taggggctagggaagccatgggtgc

SEQ ID NO: 2420521 - DNA, 25 bp, Homo sapien
catctgaaagttcaggatggatttc

SEQ ID NO: 2420522 - DNA, 25 bp, Homo sapien
tcttcggaaaagtgatgtgttcctg

SEQ ID NO: 2420523 - DNA, 25 bp, Homo sapien
tgcaggaggaagtaaaggaggtaca

SEQ ID NO: 2420524 - DNA, 25 bp, Homo sapien
gaaggaacagaaacacccaccagct

SEQ ID NO: 2420525 - DNA, 25 bp, Homo sapien
gagatctgcctagattcaggattcc

SEQ ID NO: 2420526 - DNA, 25 bp, Homo sapien
cagccttttgcaaaaccaaagtctc

SEQ ID NO: 2420527 - DNA, 25 bp, Homo sapien
cttttgcaaaaccaaagtctccagg

SEQ ID NO: 2420528 - DNA, 25 bp, Homo sapien
tctccaggtggagatctgcctagat

SEQ ID NO: 2420529 - DNA, 25 bp, Homo sapien
gatgaagaatacatcagagtctcac

SEQ ID NO: 2420530 - DNA, 25 bp, Homo sapien
tcctgctgacataagatgaagaata

SEQ ID NO: 2420531 - DNA, 25 bp, Homo sapien
ttatttcctgctgacataagatgaa

SEQ ID NO: 2420532 - DNA, 25 bp, Homo sapien
gctgacataagatgaagaatacatc

SEQ ID NO: 2420533 - DNA, 25 bp, Homo sapien
catccctgctgtagtatcatttgca

SEQ ID NO: 2420534 - DNA, 25 bp, Homo sapien
gggcctccaggtataattgattgac

SEQ ID NO: 2420535 - DNA, 25 bp, Homo sapien
ttgcccattggcatccaaaccaagg

SEQ ID NO: 2420536 - DNA, 25 bp, Homo sapien
gaaggagttcctccattgtttcctg

SEQ ID NO: 2420537 - DNA, 25 bp, Homo sapien
aagagccagggggtagctgtttctc

SEQ ID NO: 2420538 - DNA, 25 bp, Homo sapien
ttctccatgggctctggatcaggtg

SEQ ID NO: 2420539 - DNA, 25 bp, Homo sapien
catgggctctggatcaggtgtctaa

SEQ ID NO: 2420540 - DNA, 25 bp, Homo sapien
ggctctggatcaggtgtctaagcat

SEQ ID NO: 2420541 - DNA, 25 bp, Homo sapien
gttcacaggttaggcaatcagtcat

SEQ ID NO: 2420542 - DNA, 25 bp, Homo sapien
cagttcacaggttaggcaatcagtc

SEQ ID NO: 2420543 - DNA, 25 bp, Homo sapien
aacagttcacaggttaggcaatcag

SEQ ID NO: 2420544 - DNA, 25 bp, Homo sapien
cctgcagaacagttcacaggttagg

SEQ ID NO: 2420545 - DNA, 25 bp, Homo sapien
ctcctttcctactagacccttggct

SEQ ID NO: 2420546 - DNA, 25 bp, Homo sapien
cagatattttttcttgatggggcca

SEQ ID NO: 2420547 - DNA, 25 bp, Homo sapien
gaatgtttccacaagtgttccttag

SEQ ID NO: 2420548 - DNA, 25 bp, Homo sapien
agtcacctcaagtcttctggacaca

SEQ ID NO: 2420549 - DNA, 25 bp, Homo sapien
tgttccttagtcacctcaagtcttc

SEQ ID NO: 2420550 - DNA, 25 bp, Homo sapien
ttaggaaagtgtcagcgaatgtttc

SEQ ID NO: 2420551 - DNA, 25 bp, Homo sapien
cccagagtgacaaagtggatttctc

SEQ ID NO: 2420552 - DNA, 25 bp, Homo sapien
atcccctgtcagatccccagagtga

SEQ ID NO: 2420553 - DNA, 25 bp, Homo sapien
gtcagatccccagagtgacaaagtg

SEQ ID NO: 2420554 - DNA, 25 bp, Homo sapien
tcatgacaggcatcccctgtcagat

SEQ ID NO: 2420555 - DNA, 25 bp, Homo sapien
tgtgcatgtggagttgagctgcgtg

SEQ ID NO: 2420556 - DNA, 25 bp, Homo sapien
gcgtggattccagtgcaagactccc

SEQ ID NO: 2420557 - DNA, 25 bp, Homo sapien
agttgagctgcgtggattccagtgc

SEQ ID NO: 2420558 - DNA, 25 bp, Homo sapien
tgagctgcgtggattccagtgcaag

SEQ ID NO: 2420559 - DNA, 25 bp, Homo sapien
gatgtgtgagccctctcaccgagcc

SEQ ID NO: 2420560 - DNA, 25 bp, Homo sapien
gagtctgaggacaggctctgccgct

SEQ ID NO: 2420561 - DNA, 25 bp, Homo sapien
ggctctgccgctgcccagatgtgtg

SEQ ID NO: 2420562 - DNA, 25 bp, Homo sapien
tgccgctgcccagatgtgtgagccc

SEQ ID NO: 2420563 - DNA, 25 bp, Homo sapien
tggagagctaggcatgatcagaatc

SEQ ID NO: 2420564 - DNA, 25 bp, Homo sapien
aactgaagcatagtttgggaagtca

SEQ ID NO: 2420565 - DNA, 25 bp, Homo sapien
ggcaggaaataggaatgaatcatca

SEQ ID NO: 2420566 - DNA, 25 bp, Homo sapien
tcaacagcaaagtcggagagcaaac

SEQ ID NO: 2420567 - DNA, 25 bp, Homo sapien
ctttatgactcccagcaagatttca

SEQ ID NO: 2420568 - DNA, 25 bp, Homo sapien
ggacctattattacttagtctcgcc

SEQ ID NO: 2420569 - DNA, 25 bp, Homo sapien
gaattagatcattggattatgaaga

SEQ ID NO: 2420570 - DNA, 25 bp, Homo sapien
gacttactagagttgcctcctcata

SEQ ID NO: 2420571 - DNA, 25 bp, Homo sapien
cagatgagtagattgcagaaatgtt

SEQ ID NO: 2420572 - DNA, 25 bp, Homo sapien
gatgagtagattgcagaaatgttct

SEQ ID NO: 2420573 - DNA, 25 bp, Homo sapien
tcagatgagtagattgcagaaatgt

SEQ ID NO: 2420574 - DNA, 25 bp, Homo sapien
tgagtagattgcagaaatgttctcc

SEQ ID NO: 2420575 - DNA, 25 bp, Homo sapien
catctgcctatacctgtgtgtgcta

SEQ ID NO: 2420576 - DNA, 25 bp, Homo sapien
ctgcctatacctgtgtgtgctatct

SEQ ID NO: 2420577 - DNA, 25 bp, Homo sapien
cctgtgtgtgctatctttgtgcttt

SEQ ID NO: 2420578 - DNA, 25 bp, Homo sapien
tgtgtgtgctatctttgtgctttct

SEQ ID NO: 2420579 - DNA, 25 bp, Homo sapien
tacctggcacttgtttggattaaaa

SEQ ID NO: 2420580 - DNA, 25 bp, Homo sapien
tggtgtcacagcccacactacctgg

SEQ ID NO: 2420581 - DNA, 25 bp, Homo sapien
ggattaaaaccattactgaagtgac

SEQ ID NO: 2420582 - DNA, 25 bp, Homo sapien
actgaagtgacataatttgattgat

SEQ ID NO: 2420583 - DNA, 25 bp, Homo sapien
ttttccttccttgcgtgccccttga

SEQ ID NO: 2420584 - DNA, 25 bp, Homo sapien
tcattgttgactaggacaaacgtaa

SEQ ID NO: 2420585 - DNA, 25 bp, Homo sapien
caagcgcaatattactgtccaccaa

SEQ ID NO: 2420586 - DNA, 25 bp, Homo sapien
taactaaggaactttgcaagtctcc

SEQ ID NO: 2420587 - DNA, 25 bp, Homo sapien
gggcattttgttcatacacagtaca

SEQ ID NO: 2420588 - DNA, 25 bp, Homo sapien
tgttcggatgcacatctgtcttttt

SEQ ID NO: 2420589 - DNA, 25 bp, Homo sapien
acagtacatttgttcggatgcacat

SEQ ID NO: 2420590 - DNA, 25 bp, Homo sapien
tgctgagggcattttgttcatacac

SEQ ID NO: 2420591 - DNA, 25 bp, Homo sapien
gatgagtagattgcagaaatgttct

SEQ ID NO: 2420592 - DNA, 25 bp, Homo sapien
cagatgagtagattgcagaaatgtt

SEQ ID NO: 2420593 - DNA, 25 bp, Homo sapien
tcagatgagtagattgcagaaatgt

SEQ ID NO: 2420594 - DNA, 25 bp, Homo sapien
tgagtagattgcagaaatgttctcc

SEQ ID NO: 2420595 - DNA, 25 bp, Homo sapien
cagagctgcagtaattgttaatgtc

SEQ ID NO: 2420596 - DNA, 25 bp, Homo sapien
cagctccaggatggtactgaggcct

SEQ ID NO: 2420597 - DNA, 25 bp, Homo sapien
aagagcctcgtttgatcatattacc

SEQ ID NO: 2420598 - DNA, 25 bp, Homo sapien
tattgatgtgacttcctgtgagcag

SEQ ID NO: 2420599 - DNA, 25 bp, Homo sapien
cacaagctaataagtgacacagtca

SEQ ID NO: 2420600 - DNA, 25 bp, Homo sapien
ggatcaaatagtcttacatggagga

SEQ ID NO: 2420601 - DNA, 25 bp, Homo sapien
gaagattaagtaacaggcccaacat

SEQ ID NO: 2420602 - DNA, 25 bp, Homo sapien
ttgggtacttactacgtgacaggca

SEQ ID NO: 2420603 - DNA, 25 bp, Homo sapien
ggccagcaggaaaagatgcactata

SEQ ID NO: 2420604 - DNA, 25 bp, Homo sapien
cagatgtcttcagtcgcttcgagtc

SEQ ID NO: 2420605 - DNA, 25 bp, Homo sapien
tcgcttcgagtccacaagattagct

SEQ ID NO: 2420606 - DNA, 25 bp, Homo sapien
cactataatagaaatcccctggatt

SEQ ID NO: 2420607 - DNA, 25 bp, Homo sapien
tcacttttgtcccatgccatgggat

SEQ ID NO: 2420608 - DNA, 25 bp, Homo sapien
gaagggttgagtcagcaaatatgtg

SEQ ID NO: 2420609 - DNA, 25 bp, Homo sapien
cccatgccatgggatgactggatgg

SEQ ID NO: 2420610 - DNA, 25 bp, Homo sapien
ttacattcgtggttggagtctggct

SEQ ID NO: 2420611 - DNA, 25 bp, Homo sapien
ggagaacttcctatgttccttgcag

SEQ ID NO: 2420612 - DNA, 25 bp, Homo sapien
tcaacaggatcacttggagaacttc

SEQ ID NO: 2420613 - DNA, 25 bp, Homo sapien
tcagctcaaacctagggctaaaagc

SEQ ID NO: 2420614 - DNA, 25 bp, Homo sapien
ggaggaatgcgtgctcttccctcag

SEQ ID NO: 2420615 - DNA, 25 bp, Homo sapien
ctggagtcactttgactactgccta

SEQ ID NO: 2420616 - DNA, 25 bp, Homo sapien
gactactgcctaagaggacaatggg

SEQ ID NO: 2420617 - DNA, 25 bp, Homo sapien
gaggacaatgggaatccgacagtga

SEQ ID NO: 2420618 - DNA, 25 bp, Homo sapien
cctaagaggacaatgggaatccgac

SEQ ID NO: 2420619 - DNA, 25 bp, Homo sapien
tttgcttgatacaccgaacttgaca

SEQ ID NO: 2420620 - DNA, 25 bp, Homo sapien
ccaaactttgccaagtagtgaagag

SEQ ID NO: 2420621 - DNA, 25 bp, Homo sapien
gacatcctaatctatgaatcttcag

SEQ ID NO: 2420622 - DNA, 25 bp, Homo sapien
gaagaaatgcacaatgaagtcccgg

SEQ ID NO: 2420623 - DNA, 25 bp, Homo sapien
gatgaggacagaccatggaacaagt

SEQ ID NO: 2420624 - DNA, 25 bp, Homo sapien
ctagacagaaggatgaggacagacc

SEQ ID NO: 2420625 - DNA, 25 bp, Homo sapien
ggatgaggacagaccatggaacaag

SEQ ID NO: 2420626 - DNA, 25 bp, Homo sapien
gaaggatgaggacagaccatggaac

SEQ ID NO: 2420627 - DNA, 25 bp, Homo sapien
tctccatcaagtccttcaataaacc

SEQ ID NO: 2420628 - DNA, 25 bp, Homo sapien
aataaacccccattgattgaggtca

SEQ ID NO: 2420629 - DNA, 25 bp, Homo sapien
cattctgaatggtagtaaatgaggc

SEQ ID NO: 2420630 - DNA, 25 bp, Homo sapien
gcttctattgtccttaggtgcagga

SEQ ID NO: 2420631 - DNA, 25 bp, Homo sapien
gggactgcccctatccagttcttca

SEQ ID NO: 2420632 - DNA, 25 bp, Homo sapien
tggggactgcccctatccagttctt

SEQ ID NO: 2420633 - DNA, 25 bp, Homo sapien
ggggactgcccctatccagttcttc

SEQ ID NO: 2420634 - DNA, 25 bp, Homo sapien
ggactgcccctatccagttcttcat

SEQ ID NO: 2420635 - DNA, 25 bp, Homo sapien
gatgccaaggcaaagccatagacac

SEQ ID NO: 2420636 - DNA, 25 bp, Homo sapien
aggggatgccaaggcaaagccatag

SEQ ID NO: 2420637 - DNA, 25 bp, Homo sapien
agaaggggatgccaaggcaaagcca

SEQ ID NO: 2420638 - DNA, 25 bp, Homo sapien
ttaagaaggggatgccaaggcaaag

SEQ ID NO: 2420639 - DNA, 25 bp, Homo sapien
tccccagcacgaagtctttaagggc

SEQ ID NO: 2420640 - DNA, 25 bp, Homo sapien
aataggaacataatacatacttgct

SEQ ID NO: 2420641 - DNA, 25 bp, Homo sapien
ggcagggctgtagtttactcctttc

SEQ ID NO: 2420642 - DNA, 25 bp, Homo sapien
gaaccagcttcccaataggaacata

SEQ ID NO: 2420643 - DNA, 25 bp, Homo sapien
ctaagtcttgagaactccaaagtct

SEQ ID NO: 2420644 - DNA, 25 bp, Homo sapien
ttgttcgttctgcaatttcttctct

SEQ ID NO: 2420645 - DNA, 25 bp, Homo sapien
ctgttttctttgttcgttctgcaat

SEQ ID NO: 2420646 - DNA, 25 bp, Homo sapien
agtcttgagaactccaaagtctgtt

SEQ ID NO: 2420647 - DNA, 25 bp, Homo sapien
gccaggtcttcctctacaaatccct

SEQ ID NO: 2420648 - DNA, 25 bp, Homo sapien
caggtcttcctctacaaatccctgt

SEQ ID NO: 2420649 - DNA, 25 bp, Homo sapien
ccaggtcttcctctacaaatccctg

SEQ ID NO: 2420650 - DNA, 25 bp, Homo sapien
aggtcttcctctacaaatccctgtt

SEQ ID NO: 2420651 - DNA, 25 bp, Homo sapien
ttttcacgaaaatcaaaacatagaa

SEQ ID NO: 2420652 - DNA, 25 bp, Homo sapien
tttggttctgattttcacgaaaatc

SEQ ID NO: 2420653 - DNA, 25 bp, Homo sapien
tggggagaagcgcaaaggaaaaata

SEQ ID NO: 2420654 - DNA, 25 bp, Homo sapien
tagcaacacaaaagcatatgaaagt

SEQ ID NO: 2420655 - DNA, 25 bp, Homo sapien
taaggagggttatgcaagcttcaca

SEQ ID NO: 2420656 - DNA, 25 bp, Homo sapien
tagactggtacaattctaaggaggg

SEQ ID NO: 2420657 - DNA, 25 bp, Homo sapien
tctcactgctaagggtaaatacata

SEQ ID NO: 2420658 - DNA, 25 bp, Homo sapien
tttaaggacacacgtaggctgaaag

SEQ ID NO: 2420659 - DNA, 25 bp, Homo sapien
taaggacacacgtaggctgaaagtg

SEQ ID NO: 2420660 - DNA, 25 bp, Homo sapien
caaaacagagcgtaagcagcttttc

SEQ ID NO: 2420661 - DNA, 25 bp, Homo sapien
tcaacaggaagacgtaacaattata

SEQ ID NO: 2420662 - DNA, 25 bp, Homo sapien
tgaataaaaaccctatgacccatgt

SEQ ID NO: 2420663 - DNA, 25 bp, Homo sapien
cagcttcaatgccttgggaagggag

SEQ ID NO: 2420664 - DNA, 25 bp, Homo sapien
gcatttccaaggtaaccaggtcaca

SEQ ID NO: 2420665 - DNA, 25 bp, Homo sapien
tgccagttggcacattcagcttcaa

SEQ ID NO: 2420666 - DNA, 25 bp, Homo sapien
cagatggtaactggcacagcaggag

SEQ ID NO: 2420667 - DNA, 25 bp, Homo sapien
caaccttgggcattcagcctttgga

SEQ ID NO: 2420668 - DNA, 25 bp, Homo sapien
ggcaaaaacctgagacgtgcaagtc

SEQ ID NO: 2420669 - DNA, 25 bp, Homo sapien
ggagccgtgaagattttgaaaccag

SEQ ID NO: 2420670 - DNA, 25 bp, Homo sapien
ccctgttgttcaatcttcttctttg

SEQ ID NO: 2420671 - DNA, 25 bp, Homo sapien
caaaggtgaagcctccctgttgttc

SEQ ID NO: 2420672 - DNA, 25 bp, Homo sapien
gcggagaggactcctttgttttcaa

SEQ ID NO: 2420673 - DNA, 25 bp, Homo sapien
cccaaaattaaatgcggagaggact

SEQ ID NO: 2420674 - DNA, 25 bp, Homo sapien
aaaaagaatgcttaaggtgacaaag

SEQ ID NO: 2420675 - DNA, 25 bp, Homo sapien
ggtgacaaagttggagatgactcaa

SEQ ID NO: 2420676 - DNA, 25 bp, Homo sapien
gatgactcaaaggagccagattctt

SEQ ID NO: 2420677 - DNA, 25 bp, Homo sapien
ggtagtattagttatcctgccaaag

SEQ ID NO: 2420678 - DNA, 25 bp, Homo sapien
gtggtatgttcactaccatcggaaa

SEQ ID NO: 2420679 - DNA, 25 bp, Homo sapien
ggtggtatgttcactaccatcggaa

SEQ ID NO: 2420680 - DNA, 25 bp, Homo sapien
tcaataaggtggtatgttcactacc

SEQ ID NO: 2420681 - DNA, 25 bp, Homo sapien
taaggtggtatgttcactaccatcg

SEQ ID NO: 2420682 - DNA, 25 bp, Homo sapien
caagaattcgtcaagtccctttggc

SEQ ID NO: 2420683 - DNA, 25 bp, Homo sapien
cgtctcagaggtggattctacttca

SEQ ID NO: 2420684 - DNA, 25 bp, Homo sapien
aactgattaagtctccctcggcaag

SEQ ID NO: 2420685 - DNA, 25 bp, Homo sapien
gggcccagacttctcatatcaggaa

SEQ ID NO: 2420686 - DNA, 25 bp, Homo sapien
accgtccgtcggtgctctgccagtg

SEQ ID NO: 2420687 - DNA, 25 bp, Homo sapien
ccagtgtgtacacctcctgcagtgc

SEQ ID NO: 2420688 - DNA, 25 bp, Homo sapien
gagtggtgccatcagcagctggtac

SEQ ID NO: 2420689 - DNA, 25 bp, Homo sapien
ctctgatcctcgctgagtggtgcca

SEQ ID NO: 2420690 - DNA, 25 bp, Homo sapien
aactttcaacgctattccaatgggc

SEQ ID NO: 2420691 - DNA, 25 bp, Homo sapien
tgcacatcatccatcaccgggtaac

SEQ ID NO: 2420692 - DNA, 25 bp, Homo sapien
aatgggcaatgggatggaccacctc

SEQ ID NO: 2420693 - DNA, 25 bp, Homo sapien
aattcaaggccactatagcccagcc

SEQ ID NO: 2420694 - DNA, 25 bp, Homo sapien
ccatctccacgtttatgctgttacg

SEQ ID NO: 2420695 - DNA, 25 bp, Homo sapien
tacactaggccacatcctccatatt

SEQ ID NO: 2420696 - DNA, 25 bp, Homo sapien
ccatgtctggaactacactaggcca

SEQ ID NO: 2420697 - DNA, 25 bp, Homo sapien
gctgttacgtttcccatgctttgga

SEQ ID NO: 2420698 - DNA, 25 bp, Homo sapien
gtaactatggaaatactatctaacc

SEQ ID NO: 2420699 - DNA, 25 bp, Homo sapien
tctactaggttactggtcttatgta

SEQ ID NO: 2420700 - DNA, 25 bp, Homo sapien
aggatggcctctgtacactgtgtac

SEQ ID NO: 2420701 - DNA, 25 bp, Homo sapien
cccacagtggaactaaattacaatg

SEQ ID NO: 2420702 - DNA, 25 bp, Homo sapien
gatattcatccacactattgtcaag

SEQ ID NO: 2420703 - DNA, 25 bp, Homo sapien
caaggtcaagtggagtactgaaccc

SEQ ID NO: 2420704 - DNA, 25 bp, Homo sapien
tactgaacccctcaagcgcggtttc

SEQ ID NO: 2420705 - DNA, 25 bp, Homo sapien
ccattatttgactgcattgcttgag

SEQ ID NO: 2420706 - DNA, 25 bp, Homo sapien
tagtagcacagacctgctttaggcc

SEQ ID NO: 2420707 - DNA, 25 bp, Homo sapien
tatacacatcttccggtcatgatgc

SEQ ID NO: 2420708 - DNA, 25 bp, Homo sapien
caggaggtcgattttgcaattccaa

SEQ ID NO: 2420709 - DNA, 25 bp, Homo sapien
ccggtttaccagttgtctagtagca

SEQ ID NO: 2420710 - DNA, 25 bp, Homo sapien
gaagctcactagttttgacccctcg

SEQ ID NO: 2420711 - DNA, 25 bp, Homo sapien
tccaaaacaagttgaacgaagagtg

SEQ ID NO: 2420712 - DNA, 25 bp, Homo sapien
tgtagtacaaggcagcaattgcaac

SEQ ID NO: 2420713 - DNA, 25 bp, Homo sapien
gaagacacatagtacgaagctcact

SEQ ID NO: 2420714 - DNA, 25 bp, Homo sapien
cactgaagaatgatgacttccagaa

SEQ ID NO: 2420715 - DNA, 25 bp, Homo sapien
tgatcaattccccttcctttgcact

SEQ ID NO: 2420716 - DNA, 25 bp, Homo sapien
gacttccagaagtttagctgcatga

SEQ ID NO: 2420717 - DNA, 25 bp, Homo sapien
tccagaagtttagctgcatgacact

SEQ ID NO: 2420718 - DNA, 25 bp, Homo sapien
tctattgtcacataattatgcagga

SEQ ID NO: 2420719 - DNA, 25 bp, Homo sapien
cacataattatgcaggagaggcatc

SEQ ID NO: 2420720 - DNA, 25 bp, Homo sapien
atgttttgcatttgatagtaaggta

SEQ ID NO: 2420721 - DNA, 25 bp, Homo sapien
taaggtatctgtatctattgtcaca

SEQ ID NO: 2420722 - DNA, 25 bp, Homo sapien
gaaatactgtggcaggttaaactgt

SEQ ID NO: 2420723 - DNA, 25 bp, Homo sapien
taaactgtatgccagggaaagaatt

SEQ ID NO: 2420724 - DNA, 25 bp, Homo sapien
tatagtatacctagaagctgccaca

SEQ ID NO: 2420725 - DNA, 25 bp, Homo sapien
cctgctgaaacacttcatatagtat

SEQ ID NO: 2420726 - DNA, 25 bp, Homo sapien
caatgatccgtagacagatattctc

SEQ ID NO: 2420727 - DNA, 25 bp, Homo sapien
cagatattctctaactgctgggtaa

SEQ ID NO: 2420728 - DNA, 25 bp, Homo sapien
gacagatattctctaactgctgggt

SEQ ID NO: 2420729 - DNA, 25 bp, Homo sapien
cagaacaagatcaatgatccgtaga

SEQ ID NO: 2420730 - DNA, 25 bp, Homo sapien
cattacctaacacttgccactgtga

SEQ ID NO: 2420731 - DNA, 25 bp, Homo sapien
cactgtgattgaactgctgtctgtc

SEQ ID NO: 2420732 - DNA, 25 bp, Homo sapien
gaattctagattgttggttcccaga

SEQ ID NO: 2420733 - DNA, 25 bp, Homo sapien
tgtcactctctaccaagaattctag

SEQ ID NO: 2420734 - DNA, 25 bp, Homo sapien
caactgttaagatagtatcaatggt

SEQ ID NO: 2420735 - DNA, 25 bp, Homo sapien
aactgttaagatagtatcaatggta

SEQ ID NO: 2420736 - DNA, 25 bp, Homo sapien
ctgttaagatagtatcaatggtatg

SEQ ID NO: 2420737 - DNA, 25 bp, Homo sapien
ttaagatagtatcaatggtatgtaa

SEQ ID NO: 2420738 - DNA, 25 bp, Homo sapien
agccattactgttttgtcttcaact

SEQ ID NO: 2420739 - DNA, 25 bp, Homo sapien
tctggatgacattagtaacatcatc

SEQ ID NO: 2420740 - DNA, 25 bp, Homo sapien
tgtctctctaacaatgtgcaacagt

SEQ ID NO: 2420741 - DNA, 25 bp, Homo sapien
caagtgttgggtcatatcaacagca

SEQ ID NO: 2420742 - DNA, 25 bp, Homo sapien
agcaattgaggctacctcttgactg

SEQ ID NO: 2420743 - DNA, 25 bp, Homo sapien
cacatgtggcttcatatattcctta

SEQ ID NO: 2420744 - DNA, 25 bp, Homo sapien
cctcacatgtggcttcatatattcc

SEQ ID NO: 2420745 - DNA, 25 bp, Homo sapien
tcacatgtggcttcatatattcctt

SEQ ID NO: 2420746 - DNA, 25 bp, Homo sapien
ggcctcacatgtggcttcatatatt

SEQ ID NO: 2420747 - DNA, 25 bp, Homo sapien
gaaattaaagactgaagagcaaggg

SEQ ID NO: 2420748 - DNA, 25 bp, Homo sapien
cttcaatcaggctcttcttcgctaa

SEQ ID NO: 2420749 - DNA, 25 bp, Homo sapien
caacggcatttcttagattgagctc

SEQ ID NO: 2420750 - DNA, 25 bp, Homo sapien
gcatttcttagattgagctcattat

SEQ ID NO: 2420751 - DNA, 25 bp, Homo sapien
tcttcgctaattcaacggcatttct

SEQ ID NO: 2420752 - DNA, 25 bp, Homo sapien
caaagaactaaatgcatgaagtacc

SEQ ID NO: 2420753 - DNA, 25 bp, Homo sapien
gaactaaatgcatgaagtacccagc

SEQ ID NO: 2420754 - DNA, 25 bp, Homo sapien
cttcaaagaactaaatgcatgaagt

SEQ ID NO: 2420755 - DNA, 25 bp, Homo sapien
agaactaaatgcatgaagtacccag

SEQ ID NO: 2420756 - DNA, 25 bp, Homo sapien
tgtggcaaaaggtcaatttatccaa

SEQ ID NO: 2420757 - DNA, 25 bp, Homo sapien
tatgtggcaaaaggtcaatttatcc

SEQ ID NO: 2420758 - DNA, 25 bp, Homo sapien
ttcagctgatgtgaccataggcaga

SEQ ID NO: 2420759 - DNA, 25 bp, Homo sapien
ggcagacattctaattgactctatt

SEQ ID NO: 2420760 - DNA, 25 bp, Homo sapien
taatggaaatacatgattttgtaga

SEQ ID NO: 2420761 - DNA, 25 bp, Homo sapien
gaaacagctccatttggtccttgaa

SEQ ID NO: 2420762 - DNA, 25 bp, Homo sapien
cccaggttagacaataataatggaa

SEQ ID NO: 2420763 - DNA, 25 bp, Homo sapien
tctagctcgaagatatcccaggtta

SEQ ID NO: 2420764 - DNA, 25 bp, Homo sapien
cagaatgccatcatttttggcaaca

SEQ ID NO: 2420765 - DNA, 25 bp, Homo sapien
tagggaaccaatcacatgcagggct

SEQ ID NO: 2420766 - DNA, 25 bp, Homo sapien
ctagggtcaaagttcgggtctgtca

SEQ ID NO: 2420767 - DNA, 25 bp, Homo sapien
caggatttgataacagaatgccatc

SEQ ID NO: 2420768 - DNA, 25 bp, Homo sapien
cagcagtatataagagagtctgggc

SEQ ID NO: 2420769 - DNA, 25 bp, Homo sapien
ccttatatactcatatggatcttct

SEQ ID NO: 2420770 - DNA, 25 bp, Homo sapien
atttcatccttatatactcatatgg

SEQ ID NO: 2420771 - DNA, 25 bp, Homo sapien
tcatatggatcttcttgccacagct

SEQ ID NO: 2420772 - DNA, 25 bp, Homo sapien
tactcatatggatcttcttgccaca

SEQ ID NO: 2420773 - DNA, 25 bp, Homo sapien
ttgagatagttgaatgcttgctgaa

SEQ ID NO: 2420774 - DNA, 25 bp, Homo sapien
tctttctgtctatattgatctaaaa

SEQ ID NO: 2420775 - DNA, 25 bp, Homo sapien
gaatgaaccaccccttggttgagat

SEQ ID NO: 2420776 - DNA, 25 bp, Homo sapien
cttgctgaagaacacggggagctac

SEQ ID NO: 2420777 - DNA, 25 bp, Homo sapien
tgtgacatttcctgggcttccatat

SEQ ID NO: 2420778 - DNA, 25 bp, Homo sapien
tttgtgacatttcctgggcttccat

SEQ ID NO: 2420779 - DNA, 25 bp, Homo sapien
tgaatgcccactgcataggttttca

SEQ ID NO: 2420780 - DNA, 25 bp, Homo sapien
aatgcccactgcataggttttcaaa

SEQ ID NO: 2420781 - DNA, 25 bp, Homo sapien
gagctacaatatgcagtgcccactt

SEQ ID NO: 2420782 - DNA, 25 bp, Homo sapien
ttcttacacttccaccataccagtt

SEQ ID NO: 2420783 - DNA, 25 bp, Homo sapien
gttcaaagagccgagctacaatatg

SEQ ID NO: 2420784 - DNA, 25 bp, Homo sapien
ccagttctggtctatcatcctcatc

SEQ ID NO: 2420785 - DNA, 25 bp, Homo sapien
catggtttggttattcactagctga

SEQ ID NO: 2420786 - DNA, 25 bp, Homo sapien
tggttattcactagctgaagaggca

SEQ ID NO: 2420787 - DNA, 25 bp, Homo sapien
tagttcggaagatctccatccatgt

SEQ ID NO: 2420788 - DNA, 25 bp, Homo sapien
ggaggaacggtcctgtcgataatag

SEQ ID NO: 2420789 - DNA, 25 bp, Homo sapien
ataataagtgacacttattgagcac

SEQ ID NO: 2420790 - DNA, 25 bp, Homo sapien
tgtgtcaggcagaaatacaggactc

SEQ ID NO: 2420791 - DNA, 25 bp, Homo sapien
tttccatgtgtcaggcagaaataca

SEQ ID NO: 2420792 - DNA, 25 bp, Homo sapien
tcaggcagaaatacaggactccatg

SEQ ID NO: 2420793 - DNA, 25 bp, Homo sapien
gttgctgaatacgaggcaggaatat

SEQ ID NO: 2420794 - DNA, 25 bp, Homo sapien
caatttgttgctgaatacgaggcag

SEQ ID NO: 2420795 - DNA, 25 bp, Homo sapien
gattttcagaatttgtttctgcagt

SEQ ID NO: 2420796 - DNA, 25 bp, Homo sapien
tttgttgctgaatacgaggcaggaa

SEQ ID NO: 2420797 - DNA, 25 bp, Homo sapien
taataaactgccaagccagcttgca

SEQ ID NO: 2420798 - DNA, 25 bp, Homo sapien
tagtctatcttgtcgaccactcctg

SEQ ID NO: 2420799 - DNA, 25 bp, Homo sapien
tcatgttttatgatggcacggagac

SEQ ID NO: 2420800 - DNA, 25 bp, Homo sapien
tatgtcttcaccagttgatacaggc

SEQ ID NO: 2420801 - DNA, 25 bp, Homo sapien
atttcatgctttctagtaatcacaa

SEQ ID NO: 2420802 - DNA, 25 bp, Homo sapien
gcacccaccctcagatctaaccatt

SEQ ID NO: 2420803 - DNA, 25 bp, Homo sapien
aggattagatccaacagcacccacc

SEQ ID NO: 2420804 - DNA, 25 bp, Homo sapien
taatcacaaatatatagcaccacat

SEQ ID NO: 2420805 - DNA, 25 bp, Homo sapien
cgatctggccagtattgtgtcacca

SEQ ID NO: 2420806 - DNA, 25 bp, Homo sapien
gaccgaattattccttccacaatgt

SEQ ID NO: 2420807 - DNA, 25 bp, Homo sapien
caatgttatcacgtatttgctggcg

SEQ ID NO: 2420808 - DNA, 25 bp, Homo sapien
cctggtggaggttctcgatctggcc

SEQ ID NO: 2420809 - DNA, 25 bp, Homo sapien
gaaaaaatgctaatgtagcagtacc

SEQ ID NO: 2420810 - DNA, 25 bp, Homo sapien
aaaaaggatggctttaattcagcct

SEQ ID NO: 2420811 - DNA, 25 bp, Homo sapien
aaaaggatggctttaattcagcctt

SEQ ID NO: 2420812 - DNA, 25 bp, Homo sapien
gctaatgtagcagtaccaaaaagga

SEQ ID NO: 2420813 - DNA, 25 bp, Homo sapien
tgggaattccacatggtcagagact

SEQ ID NO: 2420814 - DNA, 25 bp, Homo sapien
catggtcagagactataatccgaag

SEQ ID NO: 2420815 - DNA, 25 bp, Homo sapien
ggtcagagactataatccgaagtaa

SEQ ID NO: 2420816 - DNA, 25 bp, Homo sapien
ttccacatggtcagagactataatc

SEQ ID NO: 2420817 - DNA, 25 bp, Homo sapien
gggcaaaattgataatcttgtagga

SEQ ID NO: 2420818 - DNA, 25 bp, Homo sapien
ctgggggcaaaattgataatcttgt

SEQ ID NO: 2420819 - DNA, 25 bp, Homo sapien
tgggggcaaaattgataatcttgta

SEQ ID NO: 2420820 - DNA, 25 bp, Homo sapien
ggggcaaaattgataatcttgtagg

SEQ ID NO: 2420821 - DNA, 25 bp, Homo sapien
cagatccatcagtataccgcagaag

SEQ ID NO: 2420822 - DNA, 25 bp, Homo sapien
ttctaaacggcaattgacagatcca

SEQ ID NO: 2420823 - DNA, 25 bp, Homo sapien
gctcccattccctatgcagaacata

SEQ ID NO: 2420824 - DNA, 25 bp, Homo sapien
tataccgcagaagctgctcccattc

SEQ ID NO: 2420825 - DNA, 25 bp, Homo sapien
actgcccagcgctccgcaaaactcg

SEQ ID NO: 2420826 - DNA, 25 bp, Homo sapien
ttagataaagcagtatcaccatgaa

SEQ ID NO: 2420827 - DNA, 25 bp, Homo sapien
caaaactcggccaatcggtgtcaaa

SEQ ID NO: 2420828 - DNA, 25 bp, Homo sapien
agtatcaccatgaaaactgcctatt

SEQ ID NO: 2420829 - DNA, 25 bp, Homo sapien
tagcacaggttgcaaaaactgcttc

SEQ ID NO: 2420830 - DNA, 25 bp, Homo sapien
caggttgcaaaaactgcttcttgcg

SEQ ID NO: 2420831 - DNA, 25 bp, Homo sapien
ctagcacaggttgcaaaaactgctt

SEQ ID NO: 2420832 - DNA, 25 bp, Homo sapien
gttgcaaaaactgcttcttgcggac

SEQ ID NO: 2420833 - DNA, 25 bp, Homo sapien
aactgccctggagaagggagacgac

SEQ ID NO: 2420834 - DNA, 25 bp, Homo sapien
caagtaggcagaacaaactgccctg

SEQ ID NO: 2420835 - DNA, 25 bp, Homo sapien
tgcgcgagctgttcggcaaagatcc

SEQ ID NO: 2420836 - DNA, 25 bp, Homo sapien
cgaaaaggtgcaaaggtggccaaca

SEQ ID NO: 2420837 - DNA, 25 bp, Homo sapien
cgatggtgcccttcagcgcctggat

SEQ ID NO: 2420838 - DNA, 25 bp, Homo sapien
cgcctggatgatccggttgaggtcc

SEQ ID NO: 2420839 - DNA, 25 bp, Homo sapien
ctggttgagctcgttctcggctgca

SEQ ID NO: 2420840 - DNA, 25 bp, Homo sapien
tgcaatccgcaacttcgggtcgatg

SEQ ID NO: 2420841 - DNA, 25 bp, Homo sapien
tgcggccacttgctgcgccactctg

SEQ ID NO: 2420842 - DNA, 25 bp, Homo sapien
ggccggactgcagctttagttttct

SEQ ID NO: 2420843 - DNA, 25 bp, Homo sapien
cccggaacagtaggccggactgcag

SEQ ID NO: 2420844 - DNA, 25 bp, Homo sapien
cttccgcgacccctggattacctca

SEQ ID NO: 2420845 - DNA, 25 bp, Homo sapien
cttttttattgaggcacaacaaggc

SEQ ID NO: 2420846 - DNA, 25 bp, Homo sapien
gaggcacaacaaggcattgtaactt

SEQ ID NO: 2420847 - DNA, 25 bp, Homo sapien
tttattgaggcacaacaaggcattg

SEQ ID NO: 2420848 - DNA, 25 bp, Homo sapien
tattgaggcacaacaaggcattgta

SEQ ID NO: 2420849 - DNA, 25 bp, Homo sapien
tcctaaaccaatcagtcatgagggc

SEQ ID NO: 2420850 - DNA, 25 bp, Homo sapien
cattcacagcttgactagcgaggct

SEQ ID NO: 2420851 - DNA, 25 bp, Homo sapien
tataaagtgccagattagtgctaat

SEQ ID NO: 2420852 - DNA, 25 bp, Homo sapien
tagcgaggctacatcacaatttata

SEQ ID NO: 2420853 - DNA, 25 bp, Homo sapien
tggcataggctgataccaagacctc

SEQ ID NO: 2420854 - DNA, 25 bp, Homo sapien
tagcagtttcatggtctggagcacc

SEQ ID NO: 2420855 - DNA, 25 bp, Homo sapien
catgaggttgacatacagtggcaca

SEQ ID NO: 2420856 - DNA, 25 bp, Homo sapien
gagaaggcaactcgcatctgctgag

SEQ ID NO: 2420857 - DNA, 25 bp, Homo sapien
ccagagtcaccactgttaaaggttt

SEQ ID NO: 2420858 - DNA, 25 bp, Homo sapien
agagtcaccactgttaaaggtttcg

SEQ ID NO: 2420859 - DNA, 25 bp, Homo sapien
ggagtctccttgtccagagtcacca

SEQ ID NO: 2420860 - DNA, 25 bp, Homo sapien
cactgttaaaggtttcgttgtctct

SEQ ID NO: 2420861 - DNA, 25 bp, Homo sapien
tgttttattagcaacagtgagtttc

SEQ ID NO: 2420862 - DNA, 25 bp, Homo sapien
tttattagcaacagtgagtttctca

SEQ ID NO: 2420863 - DNA, 25 bp, Homo sapien
ttttattagcaacagtgagtttctc

SEQ ID NO: 2420864 - DNA, 25 bp, Homo sapien
gttttattagcaacagtgagtttct

SEQ ID NO: 2420865 - DNA, 25 bp, Homo sapien
acacaatatttaacattagtcggct

SEQ ID NO: 2420866 - DNA, 25 bp, Homo sapien
tatttaacattagtcggctactgaa

SEQ ID NO: 2420867 - DNA, 25 bp, Homo sapien
aacattagtcggctactgaaacaga

SEQ ID NO: 2420868 - DNA, 25 bp, Homo sapien
ttagtcggctactgaaacagacaaa

SEQ ID NO: 2420869 - DNA, 25 bp, Homo sapien
gacactacagtaagaagtacccatt

SEQ ID NO: 2420870 - DNA, 25 bp, Homo sapien
tgctattgtctcaagtcacggtgtc

SEQ ID NO: 2420871 - DNA, 25 bp, Homo sapien
cactgctcacactaaggcaaaggca

SEQ ID NO: 2420872 - DNA, 25 bp, Homo sapien
tctcagaggtcattctacaaagcac

SEQ ID NO: 2420873 - DNA, 25 bp, Homo sapien
accagatgtccctcctcgcttataa

SEQ ID NO: 2420874 - DNA, 25 bp, Homo sapien
ctctcgaatttgctcgtggaccacc

SEQ ID NO: 2420875 - DNA, 25 bp, Homo sapien
cctcgcttataacactgctggaaat

SEQ ID NO: 2420876 - DNA, 25 bp, Homo sapien
atttgctcgtggaccaccagatgtc

SEQ ID NO: 2420877 - DNA, 25 bp, Homo sapien
gcaaccaaagaggctcagatgtttc

SEQ ID NO: 2420878 - DNA, 25 bp, Homo sapien
cagcaaccaaagaggctcagatgtt

SEQ ID NO: 2420879 - DNA, 25 bp, Homo sapien
agcaaccaaagaggctcagatgttt

SEQ ID NO: 2420880 - DNA, 25 bp, Homo sapien
cctgttaattaacctgaccaatcag

SEQ ID NO: 2420881 - DNA, 25 bp, Homo sapien
tgcccctttgcaatagcaactagca

SEQ ID NO: 2420882 - DNA, 25 bp, Homo sapien
caacagtggcattacttgcttcacc

SEQ ID NO: 2420883 - DNA, 25 bp, Homo sapien
gggaagaccaataccaactgtgttg

SEQ ID NO: 2420884 - DNA, 25 bp, Homo sapien
tttcaccctgttggtggtcaggctg

SEQ ID NO: 2420885 - DNA, 25 bp, Homo sapien
attacaggcgtgagtcaccacgcct

SEQ ID NO: 2420886 - DNA, 25 bp, Homo sapien
acaggcgtgagtcaccacgcctggc

SEQ ID NO: 2420887 - DNA, 25 bp, Homo sapien
gtttcaccctgttggtggtcaggct

SEQ ID NO: 2420888 - DNA, 25 bp, Homo sapien
gaatactctctagcttggaactgca

SEQ ID NO: 2420889 - DNA, 25 bp, Homo sapien
gcagctggctataatttccattgga

SEQ ID NO: 2420890 - DNA, 25 bp, Homo sapien
ccattggaaattgaagggagtcctc

SEQ ID NO: 2420891 - DNA, 25 bp, Homo sapien
cctttgggaataaggtgctccagaa

SEQ ID NO: 2420892 - DNA, 25 bp, Homo sapien
ataattcaattttattcagggcata

SEQ ID NO: 2420893 - DNA, 25 bp, Homo sapien
taattcaattttattcagggcatac

SEQ ID NO: 2420894 - DNA, 25 bp, Homo sapien
ttcagtataattcaattttattcag

SEQ ID NO: 2420895 - DNA, 25 bp, Homo sapien
agtataattcaattttattcagggc

SEQ ID NO: 2420896 - DNA, 25 bp, Homo sapien
caccaggggaccgataggaattggt

SEQ ID NO: 2420897 - DNA, 25 bp, Homo sapien
agatccccggctattgacaaatggc

SEQ ID NO: 2420898 - DNA, 25 bp, Homo sapien
ggttattaatctcccaccacgagta

SEQ ID NO: 2420899 - DNA, 25 bp, Homo sapien
caccacgagtacatcctctaacaga

SEQ ID NO: 2420900 - DNA, 25 bp, Homo sapien
cttgaatagttccatcaggatgata

SEQ ID NO: 2420901 - DNA, 25 bp, Homo sapien
ggcaaggctaccattgcttacttga

SEQ ID NO: 2420902 - DNA, 25 bp, Homo sapien
tgcttacttgaatagttccatcagg

SEQ ID NO: 2420903 - DNA, 25 bp, Homo sapien
aaaaggcaaggctaccattgcttac

SEQ ID NO: 2420904 - DNA, 25 bp, Homo sapien
tacatgactcaaatacgtaattcat

SEQ ID NO: 2420905 - DNA, 25 bp, Homo sapien
gaacccttaagacatgccaagtaaa

SEQ ID NO: 2420906 - DNA, 25 bp, Homo sapien
aaatcattaatacaatttgctgcct

SEQ ID NO: 2420907 - DNA, 25 bp, Homo sapien
ggaagaaaattttgacccatgctac

SEQ ID NO: 2420908 - DNA, 25 bp, Homo sapien
gtcattttcagaatcagaaagtaga

SEQ ID NO: 2420909 - DNA, 25 bp, Homo sapien
cattttcagaatcagaaagtagaat

SEQ ID NO: 2420910 - DNA, 25 bp, Homo sapien
ttttcagaatcagaaagtagaatgg

SEQ ID NO: 2420911 - DNA, 25 bp, Homo sapien
agagcagtcattttcagaatcagaa

SEQ ID NO: 2420912 - DNA, 25 bp, Homo sapien
cttcatataagcagccagatagtgc

SEQ ID NO: 2420913 - DNA, 25 bp, Homo sapien
ggtcatctatgcctaggtcccagaa

SEQ ID NO: 2420914 - DNA, 25 bp, Homo sapien
gagaaggcacctgacaaaaatatcc

SEQ ID NO: 2420915 - DNA, 25 bp, Homo sapien
aaaagcaggctaaatactccagatg

SEQ ID NO: 2420916 - DNA, 25 bp, Homo sapien
gaggcagaggtgcattaacgttaaa

SEQ ID NO: 2420917 - DNA, 25 bp, Homo sapien
tttgttctacatgtatagatggcag

SEQ ID NO: 2420918 - DNA, 25 bp, Homo sapien
ctgtggtaaaactttgattgtagcc

SEQ ID NO: 2420919 - DNA, 25 bp, Homo sapien
tcttgttcttttcgtggaggcagag

SEQ ID NO: 2420920 - DNA, 25 bp, Homo sapien
tactacttgctggaggtgactggaa

SEQ ID NO: 2420921 - DNA, 25 bp, Homo sapien
tgtctgcatggcttgaaagggtgct

SEQ ID NO: 2420922 - DNA, 25 bp, Homo sapien
aagctagtgaagacggttgcttgcc

SEQ ID NO: 2420923 - DNA, 25 bp, Homo sapien
ccctgttcagagccctttgccatgg

SEQ ID NO: 2420924 - DNA, 25 bp, Homo sapien
gaaatgcagcatcagccaatcacct

SEQ ID NO: 2420925 - DNA, 25 bp, Homo sapien
ctagattgtgaagcagacagctgtg

SEQ ID NO: 2420926 - DNA, 25 bp, Homo sapien
caataatcagtctaacagatgaggg

SEQ ID NO: 2420927 - DNA, 25 bp, Homo sapien
caattgctgaggatgcataccagta

SEQ ID NO: 2420928 - DNA, 25 bp, Homo sapien
tcggtagtaaccaagcaagcatttg

SEQ ID NO: 2420929 - DNA, 25 bp, Homo sapien
catttgagctacaagtaactggaga

SEQ ID NO: 2420930 - DNA, 25 bp, Homo sapien
cataaactctgtttcagatccagaa

SEQ ID NO: 2420931 - DNA, 25 bp, Homo sapien
gaagaagcctgatcggtagtaacca

SEQ ID NO: 2420932 - DNA, 25 bp, Homo sapien
gctctgccagagatcatagtataac

SEQ ID NO: 2420933 - DNA, 25 bp, Homo sapien
tgctatcagcatcctaaagaggcag

SEQ ID NO: 2420934 - DNA, 25 bp, Homo sapien
ggccctgtagtagatagcattcacg

SEQ ID NO: 2420935 - DNA, 25 bp, Homo sapien
tgagctccgggtacgtttaacactg

SEQ ID NO: 2420936 - DNA, 25 bp, Homo sapien
ctgtaacggctcttgaagaaaatca

SEQ ID NO: 2420937 - DNA, 25 bp, Homo sapien
aatcactttgactggacagattttg

SEQ ID NO: 2420938 - DNA, 25 bp, Homo sapien
aaaatcactttgactggacagattt

SEQ ID NO: 2420939 - DNA, 25 bp, Homo sapien
taacggctcttgaagaaaatcactt

SEQ ID NO: 2420940 - DNA, 25 bp, Homo sapien
gtgacgttggaattgcacttgaagg

SEQ ID NO: 2420941 - DNA, 25 bp, Homo sapien
ctggagtagctgaaggcggttgtga

SEQ ID NO: 2420942 - DNA, 25 bp, Homo sapien
gcacttgaaggtttgtcaaagtcaa

SEQ ID NO: 2420943 - DNA, 25 bp, Homo sapien
gctgaaggcggttgtgacgttggaa

SEQ ID NO: 2420944 - DNA, 25 bp, Homo sapien
ttgcataaagttacaagttccttga

SEQ ID NO: 2420945 - DNA, 25 bp, Homo sapien
cataaagttacaagttccttgaatc

SEQ ID NO: 2420946 - DNA, 25 bp, Homo sapien
gcataaagttacaagttccttgaat

SEQ ID NO: 2420947 - DNA, 25 bp, Homo sapien
tgcataaagttacaagttccttgaa

SEQ ID NO: 2420948 - DNA, 25 bp, Homo sapien
tctttcctcaatactggatccttcg

SEQ ID NO: 2420949 - DNA, 25 bp, Homo sapien
tcaatactggatccttcggaagggt

SEQ ID NO: 2420950 - DNA, 25 bp, Homo sapien
agggtagaggaagaacctacaggct

SEQ ID NO: 2420951 - DNA, 25 bp, Homo sapien
tacaggctgatgcacaggcttaggc

SEQ ID NO: 2420952 - DNA, 25 bp, Homo sapien
aaaagtcattaccacgacaccttat

SEQ ID NO: 2420953 - DNA, 25 bp, Homo sapien
tatgcctacacttacagaagcagaa

SEQ ID NO: 2420954 - DNA, 25 bp, Homo sapien
taccacgacaccttatttatgccta

SEQ ID NO: 2420955 - DNA, 25 bp, Homo sapien
ttatttatgcctacacttacagaag

SEQ ID NO: 2420956 - DNA, 25 bp, Homo sapien
ggcttgctgtagctactccccagga

SEQ ID NO: 2420957 - DNA, 25 bp, Homo sapien
tcttccggcagagtagacctgagtt

SEQ ID NO: 2420958 - DNA, 25 bp, Homo sapien
taaggaaactgcaggcttggatacc

SEQ ID NO: 2420959 - DNA, 25 bp, Homo sapien
tgttcttcacacatgggagtggtcc

SEQ ID NO: 2420960 - DNA, 25 bp, Homo sapien
ggttgtatctctggctgggcaaatt

SEQ ID NO: 2420961 - DNA, 25 bp, Homo sapien
ttgtatctctggctgggcaaattcc

SEQ ID NO: 2420962 - DNA, 25 bp, Homo sapien
ctcttgtggttgtatctctggctgg

SEQ ID NO: 2420963 - DNA, 25 bp, Homo sapien
tgtggttgtatctctggctgggcaa

SEQ ID NO: 2420964 - DNA, 25 bp, Homo sapien
tgacagattcagtcttcgataattg

SEQ ID NO: 2420965 - DNA, 25 bp, Homo sapien
ctgactctttgacagattcagtctt

SEQ ID NO: 2420966 - DNA, 25 bp, Homo sapien
gattcagtcttcgataattgtgttt

SEQ ID NO: 2420967 - DNA, 25 bp, Homo sapien
tctttgacagattcagtcttcgata

SEQ ID NO: 2420968 - DNA, 25 bp, Homo sapien
ttcaaaatagcctgagttcagcaat

SEQ ID NO: 2420969 - DNA, 25 bp, Homo sapien
actttcaaaatagcctgagttcagc

SEQ ID NO: 2420970 - DNA, 25 bp, Homo sapien
gatactttcaaaatagcctgagttc

SEQ ID NO: 2420971 - DNA, 25 bp, Homo sapien
tactttcaaaatagcctgagttcag

SEQ ID NO: 2420972 - DNA, 25 bp, Homo sapien
gacagtagatccttcaagtgtttgt

SEQ ID NO: 2420973 - DNA, 25 bp, Homo sapien
ttagacagtagatccttcaagtgtt

SEQ ID NO: 2420974 - DNA, 25 bp, Homo sapien
tagacagtagatccttcaagtgttt

SEQ ID NO: 2420975 - DNA, 25 bp, Homo sapien
tgctttctcactaccttccaaaagg

SEQ ID NO: 2420976 - DNA, 25 bp, Homo sapien
ggtcccaaaagtacaaggatgactg

SEQ ID NO: 2420977 - DNA, 25 bp, Homo sapien
tacaaggatgactgctccatctggt

SEQ ID NO: 2420978 - DNA, 25 bp, Homo sapien
gatgactgctccatctggtcttcaa

SEQ ID NO: 2420979 - DNA, 25 bp, Homo sapien
aggaaaagcagcagcagaacaaagt

SEQ ID NO: 2420980 - DNA, 25 bp, Homo sapien
gaaaagcagcagcagaacaaagtgg

SEQ ID NO: 2420981 - DNA, 25 bp, Homo sapien
ctgacaaggaaaagcagcagcagaa

SEQ ID NO: 2420982 - DNA, 25 bp, Homo sapien
caaggaaaagcagcagcagaacaaa

SEQ ID NO: 2420983 - DNA, 25 bp, Homo sapien
tcatttctttcagggcaggtcagtt

SEQ ID NO: 2420984 - DNA, 25 bp, Homo sapien
ttttgaaggcaaatacactgcacca

SEQ ID NO: 2420985 - DNA, 25 bp, Homo sapien
tgggccttcttttgcgcttttagta

SEQ ID NO: 2420986 - DNA, 25 bp, Homo sapien
aagtctttttgtacgtgctcctgtg

SEQ ID NO: 2420987 - DNA, 25 bp, Homo sapien
tttttgaagctccttggcaaattcc

SEQ ID NO: 2420988 - DNA, 25 bp, Homo sapien
atctaggctcaacccagaaaaggtt

SEQ ID NO: 2420989 - DNA, 25 bp, Homo sapien
tggcaaattccaaattatgtagcac

SEQ ID NO: 2420990 - DNA, 25 bp, Homo sapien
ccaaattatgtagcacttcttcata

SEQ ID NO: 2420991 - DNA, 25 bp, Homo sapien
ggattaagatgctctccacttttca

SEQ ID NO: 2420992 - DNA, 25 bp, Homo sapien
ctctccacttttcaggcgatcctta

SEQ ID NO: 2420993 - DNA, 25 bp, Homo sapien
caactggtctggattaagatgctct

SEQ ID NO: 2420994 - DNA, 25 bp, Homo sapien
tttcaggcgatccttataatcctcc

SEQ ID NO: 2420995 - DNA, 25 bp, Homo sapien
cacacttgtgatcaactgcatacgt

SEQ ID NO: 2420996 - DNA, 25 bp, Homo sapien
gagaagctactagcaacttgccctt

SEQ ID NO: 2420997 - DNA, 25 bp, Homo sapien
gagggaggctccgtcaatagatcct

SEQ ID NO: 2420998 - DNA, 25 bp, Homo sapien
catatatgtagttcctccacctgag

SEQ ID NO: 2420999 - DNA, 25 bp, Homo sapien
tataggtctcatacgcttgggaagg

SEQ ID NO: 2421000 - DNA, 25 bp, Homo sapien
gcagaactcagagtagactgcaggg

SEQ ID NO: 2421001 - DNA, 25 bp, Homo sapien
gctggctttccccatgctgactgtg

SEQ ID NO: 2421002 - DNA, 25 bp, Homo sapien
cctcctctgaatggcctgaaggtga

SEQ ID NO: 2421003 - DNA, 25 bp, Homo sapien
ccaaaaggggatgaaaagagttgca

SEQ ID NO: 2421004 - DNA, 25 bp, Homo sapien
aaggggatgaaaagagttgcaccat

SEQ ID NO: 2421005 - DNA, 25 bp, Homo sapien
agttgcaccattgaaacagatgagg

SEQ ID NO: 2421006 - DNA, 25 bp, Homo sapien
aaaagagttgcaccattgaaacaga

SEQ ID NO: 2421007 - DNA, 25 bp, Homo sapien
gagctcgaaacccaatgatgcttga

SEQ ID NO: 2421008 - DNA, 25 bp, Homo sapien
gacacagccaggcaataacttccct

SEQ ID NO: 2421009 - DNA, 25 bp, Homo sapien
tggaaagtctagaccactcccttaa

SEQ ID NO: 2421010 - DNA, 25 bp, Homo sapien
gatgcttgagatacttgtacttcca

SEQ ID NO: 2421011 - DNA, 25 bp, Homo sapien
taggcaaaatctcccaatacggagg

SEQ ID NO: 2421012 - DNA, 25 bp, Homo sapien
tttccacaccgggacctaaggctga

SEQ ID NO: 2421013 - DNA, 25 bp, Homo sapien
gaggaagaactgcaacggcttcaga

SEQ ID NO: 2421014 - DNA, 25 bp, Homo sapien
taaagtaattagtgccgctagccaa

SEQ ID NO: 2421015 - DNA, 25 bp, Homo sapien
gctctggggcctacaaggcaatcca

SEQ ID NO: 2421016 - DNA, 25 bp, Homo sapien
ttatagctctaagtgaaccagcagc

SEQ ID NO: 2421017 - DNA, 25 bp, Homo sapien
cattcttttatagctctaagtgaac

SEQ ID NO: 2421018 - DNA, 25 bp, Homo sapien
ttgaacaagaatgctaacttccccg

SEQ ID NO: 2421019 - DNA, 25 bp, Homo sapien
atttgcagacaggtactctctcaac

SEQ ID NO: 2421020 - DNA, 25 bp, Homo sapien
tttaagagctcattctagcgagccc

SEQ ID NO: 2421021 - DNA, 25 bp, Homo sapien
tagactagcccaaaaccgcttacac

SEQ ID NO: 2421022 - DNA, 25 bp, Homo sapien
caggaaccccgcgtttattctcagt

SEQ ID NO: 2421023 - DNA, 25 bp, Homo sapien
cctaatcagtggcccttgcgcactt

SEQ ID NO: 2421024 - DNA, 25 bp, Homo sapien
caagcacccgaggtatccctttctc

SEQ ID NO: 2421025 - DNA, 25 bp, Homo sapien
gtatccgtctctcgacctccaagca

SEQ ID NO: 2421026 - DNA, 25 bp, Homo sapien
ttctccccccttaggagcatcccca

SEQ ID NO: 2421027 - DNA, 25 bp, Homo sapien
tctcgacctccaagcacccgaggta

SEQ ID NO: 2421028 - DNA, 25 bp, Homo sapien
gcacctctcccgagcggccacggag

SEQ ID NO: 2421029 - DNA, 25 bp, Homo sapien
gagcggccacggagagccctgcagg

SEQ ID NO: 2421030 - DNA, 25 bp, Homo sapien
gggggagcctgagcgaagagcacct

SEQ ID NO: 2421031 - DNA, 25 bp, Homo sapien
agaagccgcttctgcaaggccccgg

SEQ ID NO: 2421032 - DNA, 25 bp, Homo sapien
tgcggaaaacgcaccgaccgcggcc

SEQ ID NO: 2421033 - DNA, 25 bp, Homo sapien
ctgcggaaaacgcaccgaccgcggc

SEQ ID NO: 2421034 - DNA, 25 bp, Homo sapien
cggcctctgcggcgccagagaccca

SEQ ID NO: 2421035 - DNA, 25 bp, Homo sapien
gtggaccggcgccaccccgcactcg

SEQ ID NO: 2421036 - DNA, 25 bp, Homo sapien
cggtcctcgcccgcggcctctgcgg

SEQ ID NO: 2421037 - DNA, 25 bp, Homo sapien
aggagcgctgcggaggtggaccggc

SEQ ID NO: 2421038 - DNA, 25 bp, Homo sapien
taaaaacggagtaggtgacttcgca

SEQ ID NO: 2421039 - DNA, 25 bp, Homo sapien
atcagcctgtaagagcagaatgccc

SEQ ID NO: 2421040 - DNA, 25 bp, Homo sapien
gggaatcagcctgtaagagcagaat

SEQ ID NO: 2421041 - DNA, 25 bp, Homo sapien
aatgccccaaatcagcatcgccata

SEQ ID NO: 2421042 - DNA, 25 bp, Homo sapien
gtgctccaccattaagtacctttga

SEQ ID NO: 2421043 - DNA, 25 bp, Homo sapien
aaaagcatctgactagagactaggc

SEQ ID NO: 2421044 - DNA, 25 bp, Homo sapien
tcctgccccttactagctgaatgat

SEQ ID NO: 2421045 - DNA, 25 bp, Homo sapien
gcttttgccataatacgaagcccag

SEQ ID NO: 2421046 - DNA, 25 bp, Homo sapien
ggtatcattatagcaacgccccact

SEQ ID NO: 2421047 - DNA, 25 bp, Homo sapien
gagcaagggcacaatgcagtcagtt

SEQ ID NO: 2421048 - DNA, 25 bp, Homo sapien
agcctggacttcattatcagcattt

SEQ ID NO: 2421049 - DNA, 25 bp, Homo sapien
gaccacatcttgaacatttcgctgc

SEQ ID NO: 2421050 - DNA, 25 bp, Homo sapien
cttgggcatggaaaggtctgcttct

SEQ ID NO: 2421051 - DNA, 25 bp, Homo sapien
tggccagtgttgacattagacaaga

SEQ ID NO: 2421052 - DNA, 25 bp, Homo sapien
tgggcaaggtgtccttgtcacagct

SEQ ID NO: 2421053 - DNA, 25 bp, Homo sapien
tgacatcttccttgtagggtgcagg

SEQ ID NO: 2421054 - DNA, 25 bp, Homo sapien
tgcagggaggaaggctactctggcc

SEQ ID NO: 2421055 - DNA, 25 bp, Homo sapien
cttttggtgagcgccgcaggaagcc

SEQ ID NO: 2421056 - DNA, 25 bp, Homo sapien
aggcggccgcaggttcgcggcgcag

SEQ ID NO: 2421057 - DNA, 25 bp, Homo sapien
gaggcggccgcaggttcgcggcgca

SEQ ID NO: 2421058 - DNA, 25 bp, Homo sapien
ggtccttttggtgagcgccgcagga

SEQ ID NO: 2421059 - DNA, 25 bp, Homo sapien
tcccaggcttttctgcgctggcccc

SEQ ID NO: 2421060 - DNA, 25 bp, Homo sapien
actcgcggccctggacgcgcatctc

SEQ ID NO: 2421061 - DNA, 25 bp, Homo sapien
gcattggccaggtccccgcagttca

SEQ ID NO: 2421062 - DNA, 25 bp, Homo sapien
gagcggactctgcggtcccgcagct

SEQ ID NO: 2421063 - DNA, 25 bp, Homo sapien
aactccgggtcttcagcaaattgcc

SEQ ID NO: 2421064 - DNA, 25 bp, Homo sapien
tgtcacaggcggaggccagcttctg

SEQ ID NO: 2421065 - DNA, 25 bp, Homo sapien
ggttgagacctctgtgaactccggg

SEQ ID NO: 2421066 - DNA, 25 bp, Homo sapien
tcagcaaattgccccagtcctgaaa

SEQ ID NO: 2421067 - DNA, 25 bp, Homo sapien
gcctttcgtattattcctcccaaga

SEQ ID NO: 2421068 - DNA, 25 bp, Homo sapien
tctctgatgcctttcgtattattcc

SEQ ID NO: 2421069 - DNA, 25 bp, Homo sapien
tgctgaaactgtagccccgagccca

SEQ ID NO: 2421070 - DNA, 25 bp, Homo sapien
tccctgctgaaactgtagccccgag

SEQ ID NO: 2421071 - DNA, 25 bp, Homo sapien
cagtttggaaagagccaggttctcc

SEQ ID NO: 2421072 - DNA, 25 bp, Homo sapien
gctccgcatgccaagtccccttgct

SEQ ID NO: 2421073 - DNA, 25 bp, Homo sapien
tcccttctcagctccgcatgccaag

SEQ ID NO: 2421074 - DNA, 25 bp, Homo sapien
catcagtttggaaagagccaggttc

SEQ ID NO: 2421075 - DNA, 25 bp, Homo sapien
tcatgtaccacttcaccaggctgct

SEQ ID NO: 2421076 - DNA, 25 bp, Homo sapien
gggagtcatgtaccacttcaccagg

SEQ ID NO: 2421077 - DNA, 25 bp, Homo sapien
tggggagtcatgtaccacttcacca

SEQ ID NO: 2421078 - DNA, 25 bp, Homo sapien
gagtcatgtaccacttcaccaggct

SEQ ID NO: 2421079 - DNA, 25 bp, Homo sapien
ccaggctgagagggattccatccag

SEQ ID NO: 2421080 - DNA, 25 bp, Homo sapien
tgagagggattccatccagggaatc

SEQ ID NO: 2421081 - DNA, 25 bp, Homo sapien
gctgagagggattccatccagggaa

SEQ ID NO: 2421082 - DNA, 25 bp, Homo sapien
gagggattccatccagggaatctcc

SEQ ID NO: 2421083 - DNA, 25 bp, Homo sapien
ggtgccccacagcttaagcctgttt

SEQ ID NO: 2421084 - DNA, 25 bp, Homo sapien
cgttgctggcgggttcttggaccat

SEQ ID NO: 2421085 - DNA, 25 bp, Homo sapien
tggaccatttctctatgtcggtgga

SEQ ID NO: 2421086 - DNA, 25 bp, Homo sapien
gttcaaactccatctgcacgggtgc

SEQ ID NO: 2421087 - DNA, 25 bp, Homo sapien
gggattgccagatgtctctcttgtc

SEQ ID NO: 2421088 - DNA, 25 bp, Homo sapien
ccacatctggagagcaatgtgtgtg

SEQ ID NO: 2421089 - DNA, 25 bp, Homo sapien
tgtgtttaatagtgaggcagagcag

SEQ ID NO: 2421090 - DNA, 25 bp, Homo sapien
gcccgtcttcagggattgccagatg

SEQ ID NO: 2421091 - DNA, 25 bp, Homo sapien
aactcttggggctcgttcctggagg

SEQ ID NO: 2421092 - DNA, 25 bp, Homo sapien
agaactcttggggctcgttcctgga

SEQ ID NO: 2421093 - DNA, 25 bp, Homo sapien
gaactcttggggctcgttcctggag

SEQ ID NO: 2421094 - DNA, 25 bp, Homo sapien
cctgtctgagggttctcatccactt

SEQ ID NO: 2421095 - DNA, 25 bp, Homo sapien
gctggaaggcaccttccctcacctc

SEQ ID NO: 2421096 - DNA, 25 bp, Homo sapien
ttctgtcctgtctgagggttctcat

SEQ ID NO: 2421097 - DNA, 25 bp, Homo sapien
aacggggtgttcatgaacctaatgc

SEQ ID NO: 2421098 - DNA, 25 bp, Homo sapien
ggaggaaatcctgtcagcagagcac

SEQ ID NO: 2421099 - DNA, 25 bp, Homo sapien
ggaaatcctgtcagcagagcactac

SEQ ID NO: 2421100 - DNA, 25 bp, Homo sapien
tcctgtcagcagagcactacttggt

SEQ ID NO: 2421101 - DNA, 25 bp, Homo sapien
gtcagcagagcactacttggtccag

SEQ ID NO: 2421102 - DNA, 25 bp, Homo sapien
cgcagggctccacagtaccccgctt

SEQ ID NO: 2421103 - DNA, 25 bp, Homo sapien
tgcttgtctgagctccgggccgggt

SEQ ID NO: 2421104 - DNA, 25 bp, Homo sapien
gattctcagggaaccgacatgcttg

SEQ ID NO: 2421105 - DNA, 25 bp, Homo sapien
gggcagcctttagccaagggattct

SEQ ID NO: 2421106 - DNA, 25 bp, Homo sapien
gatgagcccattccattgagactag

SEQ ID NO: 2421107 - DNA, 25 bp, Homo sapien
gacagctctcaagctttcacaaggt

SEQ ID NO: 2421108 - DNA, 25 bp, Homo sapien
ttgagactagcactacccaggagag

SEQ ID NO: 2421109 - DNA, 25 bp, Homo sapien
caaggtgtaataggacggatgagcc

SEQ ID NO: 2421110 - DNA, 25 bp, Homo sapien
taggataagcaggacccctcaaggt

SEQ ID NO: 2421111 - DNA, 25 bp, Homo sapien
cacatgtcagagtgtagggcgcctg

SEQ ID NO: 2421112 - DNA, 25 bp, Homo sapien
tatgaagaacgccatgccttggagg

SEQ ID NO: 2421113 - DNA, 25 bp, Homo sapien
gaggctaacaggacaaggcacttga

SEQ ID NO: 2421114 - DNA, 25 bp, Homo sapien
caggtattgtagactttggagcagc

SEQ ID NO: 2421115 - DNA, 25 bp, Homo sapien
gcctttgtctgcaggtattgtagac

SEQ ID NO: 2421116 - DNA, 25 bp, Homo sapien
ctgcaggtattgtagactttggagc

SEQ ID NO: 2421117 - DNA, 25 bp, Homo sapien
tgtctgcaggtattgtagactttgg

SEQ ID NO: 2421118 - DNA, 25 bp, Homo sapien
gtcctataagagtcctattcttcaa

SEQ ID NO: 2421119 - DNA, 25 bp, Homo sapien
tcctataagagtcctattcttcaat

SEQ ID NO: 2421120 - DNA, 25 bp, Homo sapien
taaggcccaaactcaacttggaaga

SEQ ID NO: 2421121 - DNA, 25 bp, Homo sapien
caagtaaggcccaaactcaacttgg

SEQ ID NO: 2421122 - DNA, 25 bp, Homo sapien
ccaaactcaacttggaagatgtcct

SEQ ID NO: 2421123 - DNA, 25 bp, Homo sapien
ccatggctagcaggattgtctttct

SEQ ID NO: 2421124 - DNA, 25 bp, Homo sapien
atgacacgtcaccatttctgcacac

SEQ ID NO: 2421125 - DNA, 25 bp, Homo sapien
aatgacacgtcaccatttctgcaca

SEQ ID NO: 2421126 - DNA, 25 bp, Homo sapien
ttaaatgacacgtcaccatttctgc

SEQ ID NO: 2421127 - DNA, 25 bp, Homo sapien
taaatgacacgtcaccatttctgca

SEQ ID NO: 2421128 - DNA, 25 bp, Homo sapien
tcctcttgaagcaaccagcccagcc

SEQ ID NO: 2421129 - DNA, 25 bp, Homo sapien
ccagccccacccacgctttctccag

SEQ ID NO: 2421130 - DNA, 25 bp, Homo sapien
tttcctcttgaagcaaccagcccag

SEQ ID NO: 2421131 - DNA, 25 bp, Homo sapien
ttcctcttgaagcaaccagcccagc

SEQ ID NO: 2421132 - DNA, 25 bp, Homo sapien
atacacggcagctttgaaggcacag

SEQ ID NO: 2421133 - DNA, 25 bp, Homo sapien
gccacaggatgccaactgcggcatc

SEQ ID NO: 2421134 - DNA, 25 bp, Homo sapien
caggatgccaactgcggcatccatt

SEQ ID NO: 2421135 - DNA, 25 bp, Homo sapien
aactgcggcatccattttaagactt

SEQ ID NO: 2421136 - DNA, 25 bp, Homo sapien
tcaagaaccaacaggagcctgctgt

SEQ ID NO: 2421137 - DNA, 25 bp, Homo sapien
caagaaccaacaggagcctgctgtg

SEQ ID NO: 2421138 - DNA, 25 bp, Homo sapien
ggaattaagctcactacccaatatt

SEQ ID NO: 2421139 - DNA, 25 bp, Homo sapien
tcaagaagaccccagtgtcgttgtt

SEQ ID NO: 2421140 - DNA, 25 bp, Homo sapien
gaaggtgtgttacatatataaactc

SEQ ID NO: 2421141 - DNA, 25 bp, Homo sapien
ggtgtgttacatatataaactcatg

SEQ ID NO: 2421142 - DNA, 25 bp, Homo sapien
atgtgactttgggtccagagaacct

SEQ ID NO: 2421143 - DNA, 25 bp, Homo sapien
tatgtgactttgggtccagagaacc

SEQ ID NO: 2421144 - DNA, 25 bp, Homo sapien
ggtccagagaaccttacagaagcag

SEQ ID NO: 2421145 - DNA, 25 bp, Homo sapien
ctcttccatccggcttttgaaaatc

SEQ ID NO: 2421146 - DNA, 25 bp, Homo sapien
caggctctttccttcacaccacctt

SEQ ID NO: 2421147 - DNA, 25 bp, Homo sapien
tcctcgggcctactccactcttctc

SEQ ID NO: 2421148 - DNA, 25 bp, Homo sapien
tacgaataagcttcctcttcgctcc

SEQ ID NO: 2421149 - DNA, 25 bp, Homo sapien
tatctcttgggttacagtgccttca

SEQ ID NO: 2421150 - DNA, 25 bp, Homo sapien
aatgaagcagtaaggagcacccttc

SEQ ID NO: 2421151 - DNA, 25 bp, Homo sapien
tcacagtttgtagccagggagatag

SEQ ID NO: 2421152 - DNA, 25 bp, Homo sapien
ggagatgaagaagctttcccagcca

SEQ ID NO: 2421153 - DNA, 25 bp, Homo sapien
ccatagggggagcattaatgaccgt

SEQ ID NO: 2421154 - DNA, 25 bp, Homo sapien
tgaccgtgcccatgatagaggaggt

SEQ ID NO: 2421155 - DNA, 25 bp, Homo sapien
ggagcattaatgaccgtgcccatga

SEQ ID NO: 2421156 - DNA, 25 bp, Homo sapien
ttttctaagccccatagggggagca

SEQ ID NO: 2421157 - DNA, 25 bp, Homo sapien
gagttgataattcaggacttgtctg

SEQ ID NO: 2421158 - DNA, 25 bp, Homo sapien
tgtgctgggcatatggtccttctct

SEQ ID NO: 2421159 - DNA, 25 bp, Homo sapien
gttgataattcaggacttgtctgtg

SEQ ID NO: 2421160 - DNA, 25 bp, Homo sapien
tggtccttctctcgagagttgataa

SEQ ID NO: 2421161 - DNA, 25 bp, Homo sapien
tcaggtcaagcaaacagtggttgca

SEQ ID NO: 2421162 - DNA, 25 bp, Homo sapien
ggctgcagctgtggacctaggaggg

SEQ ID NO: 2421163 - DNA, 25 bp, Homo sapien
aaacagtggttgcagctctagtggc

SEQ ID NO: 2421164 - DNA, 25 bp, Homo sapien
caagcaaacagtggttgcagctcta

SEQ ID NO: 2421165 - DNA, 25 bp, Homo sapien
catgattacccaactctctagcctt

SEQ ID NO: 2421166 - DNA, 25 bp, Homo sapien
gcctatgggcctctagctccagtct

SEQ ID NO: 2421167 - DNA, 25 bp, Homo sapien
cataagtagagatgcctatgggcct

SEQ ID NO: 2421168 - DNA, 25 bp, Homo sapien
caaatttctgcaaggcactaacccc

SEQ ID NO: 2421169 - DNA, 25 bp, Homo sapien
ccttgttgtggtcacatggactcag

SEQ ID NO: 2421170 - DNA, 25 bp, Homo sapien
gtcacatggactcagatcccagggc

SEQ ID NO: 2421171 - DNA, 25 bp, Homo sapien
tggatacaggctccaaaaagtccat

SEQ ID NO: 2421172 - DNA, 25 bp, Homo sapien
cagggcctggatacaggctccaaaa

SEQ ID NO: 2421173 - DNA, 25 bp, Homo sapien
ctgtgtgccattgcctttataaaca

SEQ ID NO: 2421174 - DNA, 25 bp, Homo sapien
acagctgtcagcagatgtcccttgc

SEQ ID NO: 2421175 - DNA, 25 bp, Homo sapien
aacacagctgtcagcagatgtccct

SEQ ID NO: 2421176 - DNA, 25 bp, Homo sapien
tgcctttataaacacaacacagctg

SEQ ID NO: 2421177 - DNA, 25 bp, Homo sapien
tcttccttcaaaacccttgcccaca

SEQ ID NO: 2421178 - DNA, 25 bp, Homo sapien
tctgtcaccttctttgcttaattcc

SEQ ID NO: 2421179 - DNA, 25 bp, Homo sapien
ctgtcaccttctttgcttaattcct

SEQ ID NO: 2421180 - DNA, 25 bp, Homo sapien
tcagtctccaatagcgctggcttta

SEQ ID NO: 2421181 - DNA, 25 bp, Homo sapien
gatcttgtcccatgtaagatataca

SEQ ID NO: 2421182 - DNA, 25 bp, Homo sapien
tccaatagcgctggctttaagactt

SEQ ID NO: 2421183 - DNA, 25 bp, Homo sapien
ttttgggatcttgtcccatgtaaga

SEQ ID NO: 2421184 - DNA, 25 bp, Homo sapien
ttcaggtggcaatccttccccatca

SEQ ID NO: 2421185 - DNA, 25 bp, Homo sapien
cccctgccacctagaatttcagtta

SEQ ID NO: 2421186 - DNA, 25 bp, Homo sapien
tccacctgaacgagggcagacttca

SEQ ID NO: 2421187 - DNA, 25 bp, Homo sapien
cagttaagctgatgtcgattggatg

SEQ ID NO: 2421188 - DNA, 25 bp, Homo sapien
gcccttgagcattagctgaggcctt

SEQ ID NO: 2421189 - DNA, 25 bp, Homo sapien
cttgagcattagctgaggccttggt

SEQ ID NO: 2421190 - DNA, 25 bp, Homo sapien
cccttgagcattagctgaggccttg

SEQ ID NO: 2421191 - DNA, 25 bp, Homo sapien
ccttgagcattagctgaggccttgg

SEQ ID NO: 2421192 - DNA, 25 bp, Homo sapien
cctgcatgtgggtatagggctcagc

SEQ ID NO: 2421193 - DNA, 25 bp, Homo sapien
tcctggagagctcggcattttgggc

SEQ ID NO: 2421194 - DNA, 25 bp, Homo sapien
ctcggggctgcagtctaaggttcag

SEQ ID NO: 2421195 - DNA, 25 bp, Homo sapien
gcagcacctgatgcacgctttcatg

SEQ ID NO: 2421196 - DNA, 25 bp, Homo sapien
cggctcccgggtaccaggccgtgtg

SEQ ID NO: 2421197 - DNA, 25 bp, Homo sapien
ggctcccgggtaccaggccgtgtgc

SEQ ID NO: 2421198 - DNA, 25 bp, Homo sapien
gctcccgggtaccaggccgtgtgct

SEQ ID NO: 2421199 - DNA, 25 bp, Homo sapien
ccccaagtgtcaagggctgctgtga

SEQ ID NO: 2421200 - DNA, 25 bp, Homo sapien
gccccaagtgtcaagggctgctgtg

SEQ ID NO: 2421201 - DNA, 25 bp, Homo sapien
ccttattgggattcaagtgttcctg

SEQ ID NO: 2421202 - DNA, 25 bp, Homo sapien
cctccgcagaggatccttccttatt

SEQ ID NO: 2421203 - DNA, 25 bp, Homo sapien
gagggtggagaactcccctccgcag

SEQ ID NO: 2421204 - DNA, 25 bp, Homo sapien
tgcatttcccgcatcctgagccatg

SEQ ID NO: 2421205 - DNA, 25 bp, Homo sapien
agggaagtgcggacagagggaagaa

SEQ ID NO: 2421206 - DNA, 25 bp, Homo sapien
tgcaggtcgggggagcagccgtcct

SEQ ID NO: 2421207 - DNA, 25 bp, Homo sapien
agcagccgtcctggctgtgggcatc

SEQ ID NO: 2421208 - DNA, 25 bp, Homo sapien
gaccctggtggagaagagtggctac

SEQ ID NO: 2421209 - DNA, 25 bp, Homo sapien
tgggcatctggaccctggtggagaa

SEQ ID NO: 2421210 - DNA, 25 bp, Homo sapien
ggctgcctctccacggtcagtgccc

SEQ ID NO: 2421211 - DNA, 25 bp, Homo sapien
tgcgggcgtacttgtcatggtgacc

SEQ ID NO: 2421212 - DNA, 25 bp, Homo sapien
tgggcttcggtgccatcctctggga

SEQ ID NO: 2421213 - DNA, 25 bp, Homo sapien
gcctacatcctcatctttgcgggcg

SEQ ID NO: 2421214 - DNA, 25 bp, Homo sapien
taaaaccaggcatgtagcgcagccc

SEQ ID NO: 2421215 - DNA, 25 bp, Homo sapien
gatgcaggtcggtcaactgaggtcc

SEQ ID NO: 2421216 - DNA, 25 bp, Homo sapien
tgaggtccttgagagccacgtagca

SEQ ID NO: 2421217 - DNA, 25 bp, Homo sapien
catagctggatgaaggcacgtgacg

SEQ ID NO: 2421218 - DNA, 25 bp, Homo sapien
ctgcctccttccttccgtcgggtca

SEQ ID NO: 2421219 - DNA, 25 bp, Homo sapien
tgcctccttccttccgtcgggtcat

SEQ ID NO: 2421220 - DNA, 25 bp, Homo sapien
aagaatacagaagcccccaccgagc

SEQ ID NO: 2421221 - DNA, 25 bp, Homo sapien
agcgccttcctctgacccagagcca

SEQ ID NO: 2421222 - DNA, 25 bp, Homo sapien
gcccaagaaagaatacagaagcccc

SEQ ID NO: 2421223 - DNA, 25 bp, Homo sapien
ctctggacagcccaagaaagaatac

SEQ ID NO: 2421224 - DNA, 25 bp, Homo sapien
gatcagacaccctgtcctagacaga

SEQ ID NO: 2421225 - DNA, 25 bp, Homo sapien
acacgggcggagagccaaagactag

SEQ ID NO: 2421226 - DNA, 25 bp, Homo sapien
ggtgcatttgaatgtcactaggtca

SEQ ID NO: 2421227 - DNA, 25 bp, Homo sapien
agattcactgcacacaacaacagga

SEQ ID NO: 2421228 - DNA, 25 bp, Homo sapien
tgatgatcagcttggcattggaaat

SEQ ID NO: 2421229 - DNA, 25 bp, Homo sapien
agaaatagcacatctctgctggtgc

SEQ ID NO: 2421230 - DNA, 25 bp, Homo sapien
tggccgtcggggacagaaatagcac

SEQ ID NO: 2421231 - DNA, 25 bp, Homo sapien
cactttcccaagaaggacgtggccg

SEQ ID NO: 2421232 - DNA, 25 bp, Homo sapien
tctgagcctatggtcaatgaccaga

SEQ ID NO: 2421233 - DNA, 25 bp, Homo sapien
tgagcctatggtcaatgaccagaac

SEQ ID NO: 2421234 - DNA, 25 bp, Homo sapien
ggccatctgagcctatggtcaatga

SEQ ID NO: 2421235 - DNA, 25 bp, Homo sapien
catctgagcctatggtcaatgacca

SEQ ID NO: 2421236 - DNA, 25 bp, Homo sapien
tcatccagcgtggcttatgcagtgc

SEQ ID NO: 2421237 - DNA, 25 bp, Homo sapien
cagcgtggcttatgcagtgcaggca

SEQ ID NO: 2421238 - DNA, 25 bp, Homo sapien
tccagcgtggcttatgcagtgcagg

SEQ ID NO: 2421239 - DNA, 25 bp, Homo sapien
catccagcgtggcttatgcagtgca

SEQ ID NO: 2421240 - DNA, 25 bp, Homo sapien
gagactcatagggtttgtgttgaca

SEQ ID NO: 2421241 - DNA, 25 bp, Homo sapien
tcatagggtttgtgttgacatccat

SEQ ID NO: 2421242 - DNA, 25 bp, Homo sapien
actcatagggtttgtgttgacatcc

SEQ ID NO: 2421243 - DNA, 25 bp, Homo sapien
tcaagagactcatagggtttgtgtt

SEQ ID NO: 2421244 - DNA, 25 bp, Homo sapien
cagcgggtgtacctgatcaccacaa

SEQ ID NO: 2421245 - DNA, 25 bp, Homo sapien
atgcagcgggtgtacctgatcacca

SEQ ID NO: 2421246 - DNA, 25 bp, Homo sapien
gtacctgatcaccacaatccagcag

SEQ ID NO: 2421247 - DNA, 25 bp, Homo sapien
ggtgtacctgatcaccacaatccag

SEQ ID NO: 2421248 - DNA, 25 bp, Homo sapien
ccaatgggtgaggttcagtatctct

SEQ ID NO: 2421249 - DNA, 25 bp, Homo sapien
ccgagaagtggcgtgacactgccag

SEQ ID NO: 2421250 - DNA, 25 bp, Homo sapien
cactccgcaggtcagatagcctgtt

SEQ ID NO: 2421251 - DNA, 25 bp, Homo sapien
caccccgtcttcaatagtaactggg

SEQ ID NO: 2421252 - DNA, 25 bp, Homo sapien
gaaatgctctgtctatcctgggcac

SEQ ID NO: 2421253 - DNA, 25 bp, Homo sapien
ggcaaggcccatgggcccatggatt

SEQ ID NO: 2421254 - DNA, 25 bp, Homo sapien
ccaggctccctgctgagtcgtgcag

SEQ ID NO: 2421255 - DNA, 25 bp, Homo sapien
ccatggattagcattgcctctgaaa

SEQ ID NO: 2421256 - DNA, 25 bp, Homo sapien
catattggatgggtacatgccgtac

SEQ ID NO: 2421257 - DNA, 25 bp, Homo sapien
gtaagtgacgtttcctcctcctgca

SEQ ID NO: 2421258 - DNA, 25 bp, Homo sapien
gaattgtcagcagaccaaagaggga

SEQ ID NO: 2421259 - DNA, 25 bp, Homo sapien
cagtgtcctgaagaagcaatgtggg

SEQ ID NO: 2421260 - DNA, 25 bp, Homo sapien
tgaccccaggtcttagcactcatga

SEQ ID NO: 2421261 - DNA, 25 bp, Homo sapien
tctgagacttcaaagcctgaatggg

SEQ ID NO: 2421262 - DNA, 25 bp, Homo sapien
tctcccagtgccatgggcgggtctg

SEQ ID NO: 2421263 - DNA, 25 bp, Homo sapien
tcatgacagcccctctggttgacac

SEQ ID NO: 2421264 - DNA, 25 bp, Homo sapien
gcacagagcagttgaactctccaga

SEQ ID NO: 2421265 - DNA, 25 bp, Homo sapien
acagagcagttgaactctccagaaa

SEQ ID NO: 2421266 - DNA, 25 bp, Homo sapien
agcagcacagagcagttgaactctc

SEQ ID NO: 2421267 - DNA, 25 bp, Homo sapien
cagcacagagcagttgaactctcca

SEQ ID NO: 2421268 - DNA, 25 bp, Homo sapien
gcctgctctgtatggacacagacca

SEQ ID NO: 2421269 - DNA, 25 bp, Homo sapien
ctgctctgtatggacacagaccagg

SEQ ID NO: 2421270 - DNA, 25 bp, Homo sapien
cctgctctgtatggacacagaccag

SEQ ID NO: 2421271 - DNA, 25 bp, Homo sapien
tgctctgtatggacacagaccaggc

SEQ ID NO: 2421272 - DNA, 25 bp, Homo sapien
gagccgacggtcaaggtaaaccgca

SEQ ID NO: 2421273 - DNA, 25 bp, Homo sapien
gcggatgcccagagccgacggtcaa

SEQ ID NO: 2421274 - DNA, 25 bp, Homo sapien
gacggtcaaggtaaaccgcacagct

SEQ ID NO: 2421275 - DNA, 25 bp, Homo sapien
aaggtaaaccgcacagctgcataag

SEQ ID NO: 2421276 - DNA, 25 bp, Homo sapien
tgccagctgacgctgggcactacac

SEQ ID NO: 2421277 - DNA, 25 bp, Homo sapien
ttggtggctctcaacctcttgccca

SEQ ID NO: 2421278 - DNA, 25 bp, Homo sapien
ccttcgccgttgctatggaatggct

SEQ ID NO: 2421279 - DNA, 25 bp, Homo sapien
ccaggagcggccaagcctcgggtta

SEQ ID NO: 2421280 - DNA, 25 bp, Homo sapien
gtctcttccccagggtcatagttta

SEQ ID NO: 2421281 - DNA, 25 bp, Homo sapien
ttgagaaagggctcataccagtctc

SEQ ID NO: 2421282 - DNA, 25 bp, Homo sapien
aaagggctcataccagtctcttccc

SEQ ID NO: 2421283 - DNA, 25 bp, Homo sapien
ctaagctttgagaaagggctcatac

SEQ ID NO: 2421284 - DNA, 25 bp, Homo sapien
cttagcgaaaagtctccaggagcgg

SEQ ID NO: 2421285 - DNA, 25 bp, Homo sapien
gagttacatgatagggtgctgccca

SEQ ID NO: 2421286 - DNA, 25 bp, Homo sapien
ttggtgatctcaacgaagacccagg

SEQ ID NO: 2421287 - DNA, 25 bp, Homo sapien
taccttgtggacgtgtggaccaggc

SEQ ID NO: 2421288 - DNA, 25 bp, Homo sapien
ctcagtcatggaacagcacaccaga

SEQ ID NO: 2421289 - DNA, 25 bp, Homo sapien
catggaacagcacaccagaggcagt

SEQ ID NO: 2421290 - DNA, 25 bp, Homo sapien
cagcacaccagaggcagtttcagac

SEQ ID NO: 2421291 - DNA, 25 bp, Homo sapien
cagtcatggaacagcacaccagagg

SEQ ID NO: 2421292 - DNA, 25 bp, Homo sapien
acagtcatggggctgctttagccca

SEQ ID NO: 2421293 - DNA, 25 bp, Homo sapien
catggggctgctttagcccagtgcc

SEQ ID NO: 2421294 - DNA, 25 bp, Homo sapien
cttcaccccaggtatcacgggacag

SEQ ID NO: 2421295 - DNA, 25 bp, Homo sapien
ccccaggtatcacgggacagtcatg

SEQ ID NO: 2421296 - DNA, 25 bp, Homo sapien
tttgctctagagtctaaggacagca

SEQ ID NO: 2421297 - DNA, 25 bp, Homo sapien
tctagagtctaaggacagcaaaaca

SEQ ID NO: 2421298 - DNA, 25 bp, Homo sapien
gcatcgaagatggacctgagttttg

SEQ ID NO: 2421299 - DNA, 25 bp, Homo sapien
gatggacctgagttttgctctagag

SEQ ID NO: 2421300 - DNA, 25 bp, Homo sapien
cagaatgtggttcccccaggcacac

SEQ ID NO: 2421301 - DNA, 25 bp, Homo sapien
gcagaatgtggttcccccaggcaca

SEQ ID NO: 2421302 - DNA, 25 bp, Homo sapien
tttgtgcctagctcctgcgaatcca

SEQ ID NO: 2421303 - DNA, 25 bp, Homo sapien
tgcaaggcctgcagagttagcacca

SEQ ID NO: 2421304 - DNA, 25 bp, Homo sapien
ggctccagcggcatttttactaatg

SEQ ID NO: 2421305 - DNA, 25 bp, Homo sapien
gaatccaccgagtgcctgagaccat

SEQ ID NO: 2421306 - DNA, 25 bp, Homo sapien
caggcagagaccctcggccccctct

SEQ ID NO: 2421307 - DNA, 25 bp, Homo sapien
cccctctcctccatttctgagcccc

SEQ ID NO: 2421308 - DNA, 25 bp, Homo sapien
atttctgagcccccatggccagatc

SEQ ID NO: 2421309 - DNA, 25 bp, Homo sapien
cggccccctctcctccatttctgag

SEQ ID NO: 2421310 - DNA, 25 bp, Homo sapien
ggtggcggttgggttctctgctccc

SEQ ID NO: 2421311 - DNA, 25 bp, Homo sapien
tggaacaatcggcagaaaacccagg

SEQ ID NO: 2421312 - DNA, 25 bp, Homo sapien
gctcctgaacctggaacaatcggca

SEQ ID NO: 2421313 - DNA, 25 bp, Homo sapien
ggcactcctgcattcagcacgggat

SEQ ID NO: 2421314 - DNA, 25 bp, Homo sapien
ctctccttgaccccgtagccaccac

SEQ ID NO: 2421315 - DNA, 25 bp, Homo sapien
cttgaccccgtagccaccaccacac

SEQ ID NO: 2421316 - DNA, 25 bp, Homo sapien
acactgcttccagggggtccagctc

SEQ ID NO: 2421317 - DNA, 25 bp, Homo sapien
cacactgcttccagggggtccagct

SEQ ID NO: 2421318 - DNA, 25 bp, Homo sapien
cttgcatcactaagttcagcaggga

SEQ ID NO: 2421319 - DNA, 25 bp, Homo sapien
tttccttgggttctctcttgcatca

SEQ ID NO: 2421320 - DNA, 25 bp, Homo sapien
tcctagagtggacagagctttttcc

SEQ ID NO: 2421321 - DNA, 25 bp, Homo sapien
cagcagggaatttgcggaattttca

SEQ ID NO: 2421322 - DNA, 25 bp, Homo sapien
ccagccccatgggatggttggtcca

SEQ ID NO: 2421323 - DNA, 25 bp, Homo sapien
tggcttgtccaagcggcagacagtg

SEQ ID NO: 2421324 - DNA, 25 bp, Homo sapien
caattcctgccctgtgtgtcgtcca

SEQ ID NO: 2421325 - DNA, 25 bp, Homo sapien
cagtggtagaacaacccagggcttg

SEQ ID NO: 2421326 - DNA, 25 bp, Homo sapien
cttcagtcccgtgcaggcaaaaggc

SEQ ID NO: 2421327 - DNA, 25 bp, Homo sapien
acaccaagagaagggcgcgtccccg

SEQ ID NO: 2421328 - DNA, 25 bp, Homo sapien
gggcagacaccaagagaagggcgcg

SEQ ID NO: 2421329 - DNA, 25 bp, Homo sapien
ttcagtcccgtgcaggcaaaaggcc

SEQ ID NO: 2421330 - DNA, 25 bp, Homo sapien
ctcaggctgtccagctgagctccac

SEQ ID NO: 2421331 - DNA, 25 bp, Homo sapien
caggaaagcctctctgctgtgcgtc

SEQ ID NO: 2421332 - DNA, 25 bp, Homo sapien
tgcagcagccgagattcccgactcg

SEQ ID NO: 2421333 - DNA, 25 bp, Homo sapien
gaagcgtgtcaccatggtcagctca

SEQ ID NO: 2421334 - DNA, 25 bp, Homo sapien
tcttggatcgcctgtgatcttggcc

SEQ ID NO: 2421335 - DNA, 25 bp, Homo sapien
ttccaggcagcccaatgttgttgag

SEQ ID NO: 2421336 - DNA, 25 bp, Homo sapien
gcagctggcccatggatgtgagtca

SEQ ID NO: 2421337 - DNA, 25 bp, Homo sapien
caagtgccagccgttattccaggca

SEQ ID NO: 2421338 - DNA, 25 bp, Homo sapien
tgttgaggccagatggattcctgga

SEQ ID NO: 2421339 - DNA, 25 bp, Homo sapien
tgtaccatgacccacggctacatcg

SEQ ID NO: 2421340 - DNA, 25 bp, Homo sapien
catgacccacggctacatcgtgaag

SEQ ID NO: 2421341 - DNA, 25 bp, Homo sapien
cacggctacatcgtgaagctgctgt

SEQ ID NO: 2421342 - DNA, 25 bp, Homo sapien
ttaaatgtaccatgacccacggcta

SEQ ID NO: 2421343 - DNA, 25 bp, Homo sapien
tccaacacgaatgtaccaagaaggg

SEQ ID NO: 2421344 - DNA, 25 bp, Homo sapien
taccaagaagggacaggtgccctcc

SEQ ID NO: 2421345 - DNA, 25 bp, Homo sapien
tgtgtgcaaatcatccaacacgaat

SEQ ID NO: 2421346 - DNA, 25 bp, Homo sapien
cacgaatgtaccaagaagggacagg

SEQ ID NO: 2421347 - DNA, 25 bp, Homo sapien
aacagccaacaagagccttgtcagc

SEQ ID NO: 2421348 - DNA, 25 bp, Homo sapien
agagccttgtcagccaggcaggcag

SEQ ID NO: 2421349 - DNA, 25 bp, Homo sapien
aggcagcatgatgccattgctgaag

SEQ ID NO: 2421350 - DNA, 25 bp, Homo sapien
tgctgatgcctcatgtcagccccaa

SEQ ID NO: 2421351 - DNA, 25 bp, Homo sapien
gggctacatcttgataaatacatcg

SEQ ID NO: 2421352 - DNA, 25 bp, Homo sapien
ggggccagaggtcaaattcaacatc

SEQ ID NO: 2421353 - DNA, 25 bp, Homo sapien
tgtagttcacgaagcccaaattcta

SEQ ID NO: 2421354 - DNA, 25 bp, Homo sapien
cttttaaaacacactgtagttcacg

SEQ ID NO: 2421355 - DNA, 25 bp, Homo sapien
ttttttagggactcatgtctgaccg

SEQ ID NO: 2421356 - DNA, 25 bp, Homo sapien
tgccaagctcctatcctggtctagg

SEQ ID NO: 2421357 - DNA, 25 bp, Homo sapien
tggtctaggaacaagctggacgcct

SEQ ID NO: 2421358 - DNA, 25 bp, Homo sapien
tgtctgaccgatttcttgccaagct

SEQ ID NO: 2421359 - DNA, 25 bp, Homo sapien
agtgtctccagatagtcccgcttca

SEQ ID NO: 2421360 - DNA, 25 bp, Homo sapien
tagctgcggccagctttctaaaggc

SEQ ID NO: 2421361 - DNA, 25 bp, Homo sapien
tcaaggttgtgatctggcagtgtct

SEQ ID NO: 2421362 - DNA, 25 bp, Homo sapien
tcacctaaatcactgcagcgcctgt

SEQ ID NO: 2421363 - DNA, 25 bp, Homo sapien
tgtgagccacaagcacacaggtggg

SEQ ID NO: 2421364 - DNA, 25 bp, Homo sapien
agatccatcccagaaggctctagca

SEQ ID NO: 2421365 - DNA, 25 bp, Homo sapien
gaagatgaccctctcatatacagcc

SEQ ID NO: 2421366 - DNA, 25 bp, Homo sapien
ccatggactgaagagcccagatcca

SEQ ID NO: 2421367 - DNA, 25 bp, Homo sapien
cctgtgtcagagggtcccttcagac

SEQ ID NO: 2421368 - DNA, 25 bp, Homo sapien
gggaggctctcagggaccttgctcc

SEQ ID NO: 2421369 - DNA, 25 bp, Homo sapien
gggaccttgctccagtgggacctgt

SEQ ID NO: 2421370 - DNA, 25 bp, Homo sapien
agtctgtctcggtaaatctcctggg

SEQ ID NO: 2421371 - DNA, 25 bp, Homo sapien
tgttcatctcacacgtccggttgtg

SEQ ID NO: 2421372 - DNA, 25 bp, Homo sapien
agaggatgtgattgccacccaccca

SEQ ID NO: 2421373 - DNA, 25 bp, Homo sapien
gtgcatgccatgactccagctcttt

SEQ ID NO: 2421374 - DNA, 25 bp, Homo sapien
tagtctagggccagtctgatctctc

SEQ ID NO: 2421375 - DNA, 25 bp, Homo sapien
catagtgatttgtcctgactgagac

SEQ ID NO: 2421376 - DNA, 25 bp, Homo sapien
tgtgtcctctccacgcattctgagc

SEQ ID NO: 2421377 - DNA, 25 bp, Homo sapien
gggttgcatagtgatttgtcctgac

SEQ ID NO: 2421378 - DNA, 25 bp, Homo sapien
gagcgaaggctggtgagtctcatct

SEQ ID NO: 2421379 - DNA, 25 bp, Homo sapien
ggtgatggttatggagaaggccaag

SEQ ID NO: 2421380 - DNA, 25 bp, Homo sapien
tgggtgatggttatggagaaggcca

SEQ ID NO: 2421381 - DNA, 25 bp, Homo sapien
gtgctgggtgatggttatggagaag

SEQ ID NO: 2421382 - DNA, 25 bp, Homo sapien
gctgggtgatggttatggagaaggc

SEQ ID NO: 2421383 - DNA, 25 bp, Homo sapien
tcctttgggttgtcctcctaggatg

SEQ ID NO: 2421384 - DNA, 25 bp, Homo sapien
ctcctaggatgatcctgtctgggcc

SEQ ID NO: 2421385 - DNA, 25 bp, Homo sapien
gggttgtcctcctaggatgatcctg

SEQ ID NO: 2421386 - DNA, 25 bp, Homo sapien
tgtcctcctaggatgatcctgtctg

SEQ ID NO: 2421387 - DNA, 25 bp, Homo sapien
gcttaggacccatggacagccactg

SEQ ID NO: 2421388 - DNA, 25 bp, Homo sapien
cacagcagaacattaggaaccctcc

SEQ ID NO: 2421389 - DNA, 25 bp, Homo sapien
taggcttctgtgtagactcgctgtc

SEQ ID NO: 2421390 - DNA, 25 bp, Homo sapien
tagccgttcatagctgccaccagtc

SEQ ID NO: 2421391 - DNA, 25 bp, Homo sapien
tgctttgactttcagtgccccttgc

SEQ ID NO: 2421392 - DNA, 25 bp, Homo sapien
ttggtcaaagctacccagtaggcag

SEQ ID NO: 2421393 - DNA, 25 bp, Homo sapien
tgtcagttccaggagtgcccctgct

SEQ ID NO: 2421394 - DNA, 25 bp, Homo sapien
ccaagaacttcgtctcggggagcag

SEQ ID NO: 2421395 - DNA, 25 bp, Homo sapien
cactcgcctcctgcggggaaccaga

SEQ ID NO: 2421396 - DNA, 25 bp, Homo sapien
ctgcggggaaccagacacctcccat

SEQ ID NO: 2421397 - DNA, 25 bp, Homo sapien
caccaggcctatggccttgccctca

SEQ ID NO: 2421398 - DNA, 25 bp, Homo sapien
ccatcacagcgcatgccagccacca

SEQ ID NO: 2421399 - DNA, 25 bp, Homo sapien
tataccagcttacaaaggccacaaa

SEQ ID NO: 2421400 - DNA, 25 bp, Homo sapien
tctcaggtgtatggcggcaaaggct

SEQ ID NO: 2421401 - DNA, 25 bp, Homo sapien
gtggcacagggacaatctcaggtgt

SEQ ID NO: 2421402 - DNA, 25 bp, Homo sapien
cattggtgattccatgaaactaaca

SEQ ID NO: 2421403 - DNA, 25 bp, Homo sapien
cctgcaccatcagccctccagccca

SEQ ID NO: 2421404 - DNA, 25 bp, Homo sapien
ctttataaaaagcccgaagctggcg

SEQ ID NO: 2421405 - DNA, 25 bp, Homo sapien
ctaacacagcctctttataaaaagc

SEQ ID NO: 2421406 - DNA, 25 bp, Homo sapien
aaggctgactgtccctgcaccatca

SEQ ID NO: 2421407 - DNA, 25 bp, Homo sapien
ctggctgtgcaccgctattttggcc

SEQ ID NO: 2421408 - DNA, 25 bp, Homo sapien
tggctgtgcaccgctattttggcct

SEQ ID NO: 2421409 - DNA, 25 bp, Homo sapien
gcctctccctgagttacagacctca

SEQ ID NO: 2421410 - DNA, 25 bp, Homo sapien
tccctgagttacagacctcactgtg

SEQ ID NO: 2421411 - DNA, 25 bp, Homo sapien
cagcgcctctccctgagttacagac

SEQ ID NO: 2421412 - DNA, 25 bp, Homo sapien
gctccagcgcctctccctgagttac

SEQ ID NO: 2421413 - DNA, 25 bp, Homo sapien
cccagcaggaaatccgggacacgca

SEQ ID NO: 2421414 - DNA, 25 bp, Homo sapien
ggaaatccgggacacgcaggagcct

SEQ ID NO: 2421415 - DNA, 25 bp, Homo sapien
cttctcccatagaagcaggtgtggg

SEQ ID NO: 2421416 - DNA, 25 bp, Homo sapien
cttgcttctcccatagaagcaggtg

SEQ ID NO: 2421417 - DNA, 25 bp, Homo sapien
tctctgagaggtggtaaagcacagc

SEQ ID NO: 2421418 - DNA, 25 bp, Homo sapien
tttggtactagactgcctggactgg

SEQ ID NO: 2421419 - DNA, 25 bp, Homo sapien
aagcacagcgattacaaggaaggcc

SEQ ID NO: 2421420 - DNA, 25 bp, Homo sapien
tgacctgccctgagttagaacttac

SEQ ID NO: 2421421 - DNA, 25 bp, Homo sapien
gagcttctccagactaagcacgaga

SEQ ID NO: 2421422 - DNA, 25 bp, Homo sapien
tgaaaacaacgtcctccacagtagc

SEQ ID NO: 2421423 - DNA, 25 bp, Homo sapien
tacacggtgactatcaggagctgtg

SEQ ID NO: 2421424 - DNA, 25 bp, Homo sapien
gaaggtgccctagatattggacaag

SEQ ID NO: 2421425 - DNA, 25 bp, Homo sapien
tcagactgataacttgctccacgga

SEQ ID NO: 2421426 - DNA, 25 bp, Homo sapien
tggaaactagcaactgaatatagca

SEQ ID NO: 2421427 - DNA, 25 bp, Homo sapien
ttgctccacggataacttgtttgtt

SEQ ID NO: 2421428 - DNA, 25 bp, Homo sapien
tcacacatcatcatatggaatggaa

SEQ ID NO: 2421429 - DNA, 25 bp, Homo sapien
tgttctccgccttgttacccagtgg

SEQ ID NO: 2421430 - DNA, 25 bp, Homo sapien
ggtggctacgtctggcagccctatg

SEQ ID NO: 2421431 - DNA, 25 bp, Homo sapien
tgagtaatacaccacctcttgaagc

SEQ ID NO: 2421432 - DNA, 25 bp, Homo sapien
aatcccagtggtaggtttgcaggag

SEQ ID NO: 2421433 - DNA, 25 bp, Homo sapien
tctggccagctttatgtcctactcc

SEQ ID NO: 2421434 - DNA, 25 bp, Homo sapien
tgctgcccgtaagtcctgtggtctc

SEQ ID NO: 2421435 - DNA, 25 bp, Homo sapien
tagacgggtatgagctcctggcctc

SEQ ID NO: 2421436 - DNA, 25 bp, Homo sapien
atggctatgacagaccctcgccggt

SEQ ID NO: 2421437 - DNA, 25 bp, Homo sapien
accagaagacctctggccagttgcc

SEQ ID NO: 2421438 - DNA, 25 bp, Homo sapien
ggccagttgccatccagggacctgg

SEQ ID NO: 2421439 - DNA, 25 bp, Homo sapien
tccagggacctggcatgacctcccc

SEQ ID NO: 2421440 - DNA, 25 bp, Homo sapien
gaggcctgatgctcctgccctcttc

SEQ ID NO: 2421441 - DNA, 25 bp, Homo sapien
tacatgcatgtggtcgctgagcgtg

SEQ ID NO: 2421442 - DNA, 25 bp, Homo sapien
tttcctccaggacctacatgcatgt

SEQ ID NO: 2421443 - DNA, 25 bp, Homo sapien
tgaggaccagccaatcatgtcagcc

SEQ ID NO: 2421444 - DNA, 25 bp, Homo sapien
ctgagcgtggcacgcagcaatggct

SEQ ID NO: 2421445 - DNA, 25 bp, Homo sapien
tttcctgaatgctgagcaccaatga

SEQ ID NO: 2421446 - DNA, 25 bp, Homo sapien
cctgaatgctgagcaccaatgatat

SEQ ID NO: 2421447 - DNA, 25 bp, Homo sapien
ccaggcttacatgtttttagttgct

SEQ ID NO: 2421448 - DNA, 25 bp, Homo sapien
cctccaggcttacatgtttttagtt

SEQ ID NO: 2421449 - DNA, 25 bp, Homo sapien
gccaggaagcgcaaagtggagatga

SEQ ID NO: 2421450 - DNA, 25 bp, Homo sapien
caggaagcgcaaagtggagatgaga

SEQ ID NO: 2421451 - DNA, 25 bp, Homo sapien
ctgccaggaagcgcaaagtggagat

SEQ ID NO: 2421452 - DNA, 25 bp, Homo sapien
ctggcctggcttccgtccttccaca

SEQ ID NO: 2421453 - DNA, 25 bp, Homo sapien
gactcgaaggatcttattctgcaga

SEQ ID NO: 2421454 - DNA, 25 bp, Homo sapien
ataagaaaccaactgactgatatga

SEQ ID NO: 2421455 - DNA, 25 bp, Homo sapien
ccaaataagaaaccaactgactgat

SEQ ID NO: 2421456 - DNA, 25 bp, Homo sapien
aagatggttctgactcgaaggatct

SEQ ID NO: 2421457 - DNA, 25 bp, Homo sapien
gaggatatgcagctgatatgggatg

SEQ ID NO: 2421458 - DNA, 25 bp, Homo sapien
ggccttgcacctgggttctgggtga

SEQ ID NO: 2421459 - DNA, 25 bp, Homo sapien
gatggtgagtctgggccttgcacct

SEQ ID NO: 2421460 - DNA, 25 bp, Homo sapien
tgatatgggatggtgagtctgggcc

SEQ ID NO: 2421461 - DNA, 25 bp, Homo sapien
tctctgtggagagcagactgggctc

SEQ ID NO: 2421462 - DNA, 25 bp, Homo sapien
atctctgtggagagcagactgggct

SEQ ID NO: 2421463 - DNA, 25 bp, Homo sapien
ctctgtggagagcagactgggctca

SEQ ID NO: 2421464 - DNA, 25 bp, Homo sapien
tcctgtttgtgctcagctcagtgcc

SEQ ID NO: 2421465 - DNA, 25 bp, Homo sapien
tttcctgtttgtgctcagctcagtg

SEQ ID NO: 2421466 - DNA, 25 bp, Homo sapien
tccttttcctgtttgtgctcagctc

SEQ ID NO: 2421467 - DNA, 25 bp, Homo sapien
gggtcctgtcttcttcagctctgag

SEQ ID NO: 2421468 - DNA, 25 bp, Homo sapien
agatcaggaaattgggactgcatac

SEQ ID NO: 2421469 - DNA, 25 bp, Homo sapien
gagatcaggaaattgggactgcata

SEQ ID NO: 2421470 - DNA, 25 bp, Homo sapien
tgctggctgatggtgcaaacaggac

SEQ ID NO: 2421471 - DNA, 25 bp, Homo sapien
caggaccatatcaggtaaaatctcc

SEQ ID NO: 2421472 - DNA, 25 bp, Homo sapien
ggtacataataagcacgcttcccag

SEQ ID NO: 2421473 - DNA, 25 bp, Homo sapien
tatattcaagcttttatgttggtac

SEQ ID NO: 2421474 - DNA, 25 bp, Homo sapien
taatcttgtcaactataaaccctcc

SEQ ID NO: 2421475 - DNA, 25 bp, Homo sapien
tgaggctttgcaggtgcctgtccca

SEQ ID NO: 2421476 - DNA, 25 bp, Homo sapien
ggataatcttgtcaactataaaccc

SEQ ID NO: 2421477 - DNA, 25 bp, Homo sapien
gataatcttgtcaactataaaccct

SEQ ID NO: 2421478 - DNA, 25 bp, Homo sapien
cccagggcctcacgttaggagtaca

SEQ ID NO: 2421479 - DNA, 25 bp, Homo sapien
tatttagccctgagatcactagcag

SEQ ID NO: 2421480 - DNA, 25 bp, Homo sapien
taaatataagcctccagggcagaag

SEQ ID NO: 2421481 - DNA, 25 bp, Homo sapien
gatttacagcctggtgggtacggcc

SEQ ID NO: 2421482 - DNA, 25 bp, Homo sapien
cgaccgaccttcacgtcctattgag

SEQ ID NO: 2421483 - DNA, 25 bp, Homo sapien
cccgaccgaccttcacgtcctattg

SEQ ID NO: 2421484 - DNA, 25 bp, Homo sapien
tattagcttgttgtttaaagccttc

SEQ ID NO: 2421485 - DNA, 25 bp, Homo sapien
gaccgaccttcacgtcctattgaga

SEQ ID NO: 2421486 - DNA, 25 bp, Homo sapien
ggctatttaagtactctgcccatta

SEQ ID NO: 2421487 - DNA, 25 bp, Homo sapien
gtgacaaaaaagctgaccctggaat

SEQ ID NO: 2421488 - DNA, 25 bp, Homo sapien
tccaaactgccgaagtcggaagcag

SEQ ID NO: 2421489 - DNA, 25 bp, Homo sapien
ggtattacttactcgccctctccaa

SEQ ID NO: 2421490 - DNA, 25 bp, Homo sapien
tctagacggcctttgactgacacca

SEQ ID NO: 2421491 - DNA, 25 bp, Homo sapien
cggcacgggccaggaacaatttcat

SEQ ID NO: 2421492 - DNA, 25 bp, Homo sapien
tcagcgtagcaattctgccggcgaa

SEQ ID NO: 2421493 - DNA, 25 bp, Homo sapien
gtcagggaaccatccagcgcttagt

SEQ ID NO: 2421494 - DNA, 25 bp, Homo sapien
gccaaatatacctctgtgaagacag

SEQ ID NO: 2421495 - DNA, 25 bp, Homo sapien
tctcttcttgtgcaaatccataaac

SEQ ID NO: 2421496 - DNA, 25 bp, Homo sapien
tgtctaacaaaacagccaaatatac

SEQ ID NO: 2421497 - DNA, 25 bp, Homo sapien
tgaagacagagggtaaaataatgct

SEQ ID NO: 2421498 - DNA, 25 bp, Homo sapien
cagattctggcagggttctggttct

SEQ ID NO: 2421499 - DNA, 25 bp, Homo sapien
gctggaaagttgaagatccagattc

SEQ ID NO: 2421500 - DNA, 25 bp, Homo sapien
ctggaaagttgaagatccagattct

SEQ ID NO: 2421501 - DNA, 25 bp, Homo sapien
ccagattctggcagggttctggttc

SEQ ID NO: 2421502 - DNA, 25 bp, Homo sapien
tggctggcaagatccaagattactg

SEQ ID NO: 2421503 - DNA, 25 bp, Homo sapien
aggccagatctgtagtagagtcaca

SEQ ID NO: 2421504 - DNA, 25 bp, Homo sapien
tgacctcctttacccttgaaggcca

SEQ ID NO: 2421505 - DNA, 25 bp, Homo sapien
ttgtttgttaagatgggcagtctca

SEQ ID NO: 2421506 - DNA, 25 bp, Homo sapien
ggtacagacgctgaagcccaatagc

SEQ ID NO: 2421507 - DNA, 25 bp, Homo sapien
cacatcagggtatacgtccgtttgg

SEQ ID NO: 2421508 - DNA, 25 bp, Homo sapien
gaattagttgctcctcagactgact

SEQ ID NO: 2421509 - DNA, 25 bp, Homo sapien
gaggctttcctcaaacgtctggcag

SEQ ID NO: 2421510 - DNA, 25 bp, Homo sapien
cctgagaaccagcattgtgacctat

SEQ ID NO: 2421511 - DNA, 25 bp, Homo sapien
gccacttccgagcttaaccctggga

SEQ ID NO: 2421512 - DNA, 25 bp, Homo sapien
gcttagggtgaagctcccaaggccc

SEQ ID NO: 2421513 - DNA, 25 bp, Homo sapien
gcaaaatcccaatacacagagtctg

SEQ ID NO: 2421514 - DNA, 25 bp, Homo sapien
cgcatgattacagggaaaggtccgg

SEQ ID NO: 2421515 - DNA, 25 bp, Homo sapien
taccctctggataggcaggcgcatg

SEQ ID NO: 2421516 - DNA, 25 bp, Homo sapien
tcctctagtgggctgcgtggttctc

SEQ ID NO: 2421517 - DNA, 25 bp, Homo sapien
gacagatgtagggagcttatccaac

SEQ ID NO: 2421518 - DNA, 25 bp, Homo sapien
ttgtctgacatacgggctctctcct

SEQ ID NO: 2421519 - DNA, 25 bp, Homo sapien
gtttgttgtctgacatacgggctct

SEQ ID NO: 2421520 - DNA, 25 bp, Homo sapien
ggttagcagagacggtttgttgtct

SEQ ID NO: 2421521 - DNA, 25 bp, Homo sapien
ttagcagagacggtttgttgtctga

SEQ ID NO: 2421522 - DNA, 25 bp, Homo sapien
tccctgccttggcttacggctctca

SEQ ID NO: 2421523 - DNA, 25 bp, Homo sapien
aagagatcccacatcagttccctgc

SEQ ID NO: 2421524 - DNA, 25 bp, Homo sapien
tgaagagatcccacatcagttccct

SEQ ID NO: 2421525 - DNA, 25 bp, Homo sapien
ttgttgaagagatcccacatcagtt

SEQ ID NO: 2421526 - DNA, 25 bp, Homo sapien
gtggcctcagagagctccctcctga

SEQ ID NO: 2421527 - DNA, 25 bp, Homo sapien
gatccagaaatgagactgaggtggc

SEQ ID NO: 2421528 - DNA, 25 bp, Homo sapien
agctaacaaccccacagaaaatccg

SEQ ID NO: 2421529 - DNA, 25 bp, Homo sapien
tcctgcccggcgccttggactgcag

SEQ ID NO: 2421530 - DNA, 25 bp, Homo sapien
caggtaggatggcacatcgaccttg

SEQ ID NO: 2421531 - DNA, 25 bp, Homo sapien
ggtcaggtaggatggcacatcgacc

SEQ ID NO: 2421532 - DNA, 25 bp, Homo sapien
ggtaggatggcacatcgaccttggg

SEQ ID NO: 2421533 - DNA, 25 bp, Homo sapien
gtcaggtaggatggcacatcgacct

SEQ ID NO: 2421534 - DNA, 25 bp, Homo sapien
gtttatctgtctctacccccagcat

SEQ ID NO: 2421535 - DNA, 25 bp, Homo sapien
tctcactgatggacaaggggcactg

SEQ ID NO: 2421536 - DNA, 25 bp, Homo sapien
accagccagtccgtctgggaagaca

SEQ ID NO: 2421537 - DNA, 25 bp, Homo sapien
aacagtttatctgtctctaccccca

SEQ ID NO: 2421538 - DNA, 25 bp, Homo sapien
tgttgacgagcagcatggagacctg

SEQ ID NO: 2421539 - DNA, 25 bp, Homo sapien
gatgttgacgagcagcatggagacc

SEQ ID NO: 2421540 - DNA, 25 bp, Homo sapien
ttgacgagcagcatggagacctggg

SEQ ID NO: 2421541 - DNA, 25 bp, Homo sapien
agaccccccaagcgcctcctccatg

SEQ ID NO: 2421542 - DNA, 25 bp, Homo sapien
ttttttcagagatagtacaaatgca

SEQ ID NO: 2421543 - DNA, 25 bp, Homo sapien
tcagcatacagatcttatatagact

SEQ ID NO: 2421544 - DNA, 25 bp, Homo sapien
tggaatacaccataaccaagtgggt

SEQ ID NO: 2421545 - DNA, 25 bp, Homo sapien
tttcctgggaatgcaagactgcttc

SEQ ID NO: 2421546 - DNA, 25 bp, Homo sapien
tgagaccgctccacaacagataagg

SEQ ID NO: 2421547 - DNA, 25 bp, Homo sapien
gaaagcctcttgtgccatagccatg

SEQ ID NO: 2421548 - DNA, 25 bp, Homo sapien
ctgtccctcgtggatgacatactga

SEQ ID NO: 2421549 - DNA, 25 bp, Homo sapien
gggtgaagaacaagtccccagagcc

SEQ ID NO: 2421550 - DNA, 25 bp, Homo sapien
ccccgggggtgacaactggctacat

SEQ ID NO: 2421551 - DNA, 25 bp, Homo sapien
cagtatcccccgggggtgacaactg

SEQ ID NO: 2421552 - DNA, 25 bp, Homo sapien
tggaagatacattcaagtctacgtg

SEQ ID NO: 2421553 - DNA, 25 bp, Homo sapien
ttggaagatacattcaagtctacgt

SEQ ID NO: 2421554 - DNA, 25 bp, Homo sapien
ttcacgatgtcagatggttcatgat

SEQ ID NO: 2421555 - DNA, 25 bp, Homo sapien
gttcacgatgtcagatggttcatga

SEQ ID NO: 2421556 - DNA, 25 bp, Homo sapien
actgttcacgatgtcagatggttca

SEQ ID NO: 2421557 - DNA, 25 bp, Homo sapien
tgttcacgatgtcagatggttcatg

SEQ ID NO: 2421558 - DNA, 25 bp, Homo sapien
gcctaaatttttactgacctgtcaa

SEQ ID NO: 2421559 - DNA, 25 bp, Homo sapien
aatgattatcagattactcatgcag

SEQ ID NO: 2421560 - DNA, 25 bp, Homo sapien
cacagctacacaagtctaatgaagt

SEQ ID NO: 2421561 - DNA, 25 bp, Homo sapien
catgcatatataggcacatagacat

SEQ ID NO: 2421562 - DNA, 25 bp, Homo sapien
tttcaatggtttatgacgtaataaa

SEQ ID NO: 2421563 - DNA, 25 bp, Homo sapien
gttttcaatggtttatgacgtaata

SEQ ID NO: 2421564 - DNA, 25 bp, Homo sapien
tcaatggtttatgacgtaataaaat

SEQ ID NO: 2421565 - DNA, 25 bp, Homo sapien
gtgttttcaatggtttatgacgtaa

SEQ ID NO: 2421566 - DNA, 25 bp, Homo sapien
tactgttgatgtggtaaaaagctag

SEQ ID NO: 2421567 - DNA, 25 bp, Homo sapien
tcactcggaaactgaactactgttg

SEQ ID NO: 2421568 - DNA, 25 bp, Homo sapien
tggtaaaaagctagggcatattctt

SEQ ID NO: 2421569 - DNA, 25 bp, Homo sapien
tgaactactgttgatgtggtaaaaa

SEQ ID NO: 2421570 - DNA, 25 bp, Homo sapien
gatataagcacattagatctaatcc

SEQ ID NO: 2421571 - DNA, 25 bp, Homo sapien
gcacattagatctaatccttccaat

SEQ ID NO: 2421572 - DNA, 25 bp, Homo sapien
gatctaatccttccaataattttga

SEQ ID NO: 2421573 - DNA, 25 bp, Homo sapien
aatagatgatataagcacattagat

SEQ ID NO: 2421574 - DNA, 25 bp, Homo sapien
accagaacacaaagtaatgccattt

SEQ ID NO: 2421575 - DNA, 25 bp, Homo sapien
aatgttagatataaacaccacattc

SEQ ID NO: 2421576 - DNA, 25 bp, Homo sapien
gaatgttagatataaacaccacatt

SEQ ID NO: 2421577 - DNA, 25 bp, Homo sapien
gctggctgaatgttgaacacaaggt

SEQ ID NO: 2421578 - DNA, 25 bp, Homo sapien
tggctgaatgttgaacacaaggttg

SEQ ID NO: 2421579 - DNA, 25 bp, Homo sapien
ctggctgaatgttgaacacaaggtt

SEQ ID NO: 2421580 - DNA, 25 bp, Homo sapien
gaacatggtcattcttgacttcagt

SEQ ID NO: 2421581 - DNA, 25 bp, Homo sapien
tttccaagtagaaaagaacatggtc

SEQ ID NO: 2421582 - DNA, 25 bp, Homo sapien
gtagaaaagaacatggtcattcttg

SEQ ID NO: 2421583 - DNA, 25 bp, Homo sapien
gaaaagaacatggtcattcttgact

SEQ ID NO: 2421584 - DNA, 25 bp, Homo sapien
ttcatcacttggcccttgttttcaa

SEQ ID NO: 2421585 - DNA, 25 bp, Homo sapien
tcatcacttggcccttgttttcaag

SEQ ID NO: 2421586 - DNA, 25 bp, Homo sapien
cttcatcacttggcccttgttttca

SEQ ID NO: 2421587 - DNA, 25 bp, Homo sapien
tatactctatgtagctgtctttgtg

SEQ ID NO: 2421588 - DNA, 25 bp, Homo sapien
tctttatactctatgtagctgtctt

SEQ ID NO: 2421589 - DNA, 25 bp, Homo sapien
ttatactctatgtagctgtctttgt

SEQ ID NO: 2421590 - DNA, 25 bp, Homo sapien
tttatactctatgtagctgtctttg

SEQ ID NO: 2421591 - DNA, 25 bp, Homo sapien
tggttggagtaaatcctgatagcat

SEQ ID NO: 2421592 - DNA, 25 bp, Homo sapien
ggttggagtaaatcctgatagcatt

SEQ ID NO: 2421593 - DNA, 25 bp, Homo sapien
catggttggagtaaatcctgatagc

SEQ ID NO: 2421594 - DNA, 25 bp, Homo sapien
gttggagtaaatcctgatagcattt

SEQ ID NO: 2421595 - DNA, 25 bp, Homo sapien
tggatttattgcgaattccagtgta

SEQ ID NO: 2421596 - DNA, 25 bp, Homo sapien
actggatttattgcgaattccagtg

SEQ ID NO: 2421597 - DNA, 25 bp, Homo sapien
ggatttattgcgaattccagtgtat

SEQ ID NO: 2421598 - DNA, 25 bp, Homo sapien
ctggatttattgcgaattccagtgt

SEQ ID NO: 2421599 - DNA, 25 bp, Homo sapien
tagagttgcgtaacacttagaggac

SEQ ID NO: 2421600 - DNA, 25 bp, Homo sapien
taagagttccatagttcatcagggc

SEQ ID NO: 2421601 - DNA, 25 bp, Homo sapien
tagagtagatgtgtccccaggagaa

SEQ ID NO: 2421602 - DNA, 25 bp, Homo sapien
ggctgagccgtaagaatcctttgaa

SEQ ID NO: 2421603 - DNA, 25 bp, Homo sapien
ttaggtaggagaacattgtacttaa

SEQ ID NO: 2421604 - DNA, 25 bp, Homo sapien
ggagaacattgtacttaagggtggc

SEQ ID NO: 2421605 - DNA, 25 bp, Homo sapien
cagatgccttcttaggtaggagaac

SEQ ID NO: 2421606 - DNA, 25 bp, Homo sapien
ttatgaccgttaaactggatctcac

SEQ ID NO: 2421607 - DNA, 25 bp, Homo sapien
atgaccgttaaactggatctcactg

SEQ ID NO: 2421608 - DNA, 25 bp, Homo sapien
tgaccgttaaactggatctcactgg

SEQ ID NO: 2421609 - DNA, 25 bp, Homo sapien
ggttatgaccgttaaactggatctc

SEQ ID NO: 2421610 - DNA, 25 bp, Homo sapien
gacagtgttttgattcttagagaag

SEQ ID NO: 2421611 - DNA, 25 bp, Homo sapien
tgacagtgttttgattcttagagaa

SEQ ID NO: 2421612 - DNA, 25 bp, Homo sapien
tgttttgattcttagagaagagccc

SEQ ID NO: 2421613 - DNA, 25 bp, Homo sapien
tttgattcttagagaagagcccctc

SEQ ID NO: 2421614 - DNA, 25 bp, Homo sapien
agaaagctcagatctgcccacggca

SEQ ID NO: 2421615 - DNA, 25 bp, Homo sapien
aagaaagctcagatctgcccacggc

SEQ ID NO: 2421616 - DNA, 25 bp, Homo sapien
aagctcagatctgcccacggcaggt

SEQ ID NO: 2421617 - DNA, 25 bp, Homo sapien
agaagaaagctcagatctgcccacg

SEQ ID NO: 2421618 - DNA, 25 bp, Homo sapien
gcagcccgggaaaagaaagaaagca

SEQ ID NO: 2421619 - DNA, 25 bp, Homo sapien
cttgggatttacaatcgacaggggt

SEQ ID NO: 2421620 - DNA, 25 bp, Homo sapien
cgacaggggtccgaacgcagcccgg

SEQ ID NO: 2421621 - DNA, 25 bp, Homo sapien
cagcccgggaaaagaaagaaagcag

SEQ ID NO: 2421622 - DNA, 25 bp, Homo sapien
atcgcagggacggaggcacccgcag

SEQ ID NO: 2421623 - DNA, 25 bp, Homo sapien
agggacggaggcacccgcagcgagg

SEQ ID NO: 2421624 - DNA, 25 bp, Homo sapien
gccagcccgtcttcccctcgcttgc

SEQ ID NO: 2421625 - DNA, 25 bp, Homo sapien
gtcttcccctcgcttgctcttaggt

SEQ ID NO: 2421626 - DNA, 25 bp, Homo sapien
gcactcctcacgaggcggtgactga

SEQ ID NO: 2421627 - DNA, 25 bp, Homo sapien
gtcttagaacttccatcgcagcggg

SEQ ID NO: 2421628 - DNA, 25 bp, Homo sapien
taggacccacatcgtagtggcggga

SEQ ID NO: 2421629 - DNA, 25 bp, Homo sapien
caccgcggattctaagatccttagc

SEQ ID NO: 2421630 - DNA, 25 bp, Homo sapien
aagctcagacctgccgaccgcaggt

SEQ ID NO: 2421631 - DNA, 25 bp, Homo sapien
aagaaagctcagacctgccgaccgc

SEQ ID NO: 2421632 - DNA, 25 bp, Homo sapien
agaagaaagctcagacctgccgacc

SEQ ID NO: 2421633 - DNA, 25 bp, Homo sapien
aaagctcagacctgccgaccgcagg

SEQ ID NO: 2421634 - DNA, 25 bp, Homo sapien
taggacctccatcgcagcggggcag

SEQ ID NO: 2421635 - DNA, 25 bp, Homo sapien
tcttaggactcacattgcaagtggg

SEQ ID NO: 2421636 - DNA, 25 bp, Homo sapien
acccggcgaggcgaggattgagagc

SEQ ID NO: 2421637 - DNA, 25 bp, Homo sapien
gtggaggcaccccacgcgattcggg

SEQ ID NO: 2421638 - DNA, 25 bp, Homo sapien
gcagagtggggaggcaccacatgcg

SEQ ID NO: 2421639 - DNA, 25 bp, Homo sapien
agagtggggaggcaccacatgcgag

SEQ ID NO: 2421640 - DNA, 25 bp, Homo sapien
atcgcagagtggggaggcaccacat

SEQ ID NO: 2421641 - DNA, 25 bp, Homo sapien
agtggggaggcaccacatgcgaggc

SEQ ID NO: 2421642 - DNA, 25 bp, Homo sapien
gtggaggcaccccacgcgatgcggg

SEQ ID NO: 2421643 - DNA, 25 bp, Homo sapien
tggaggcaccccacgcgatgcgggg

SEQ ID NO: 2421644 - DNA, 25 bp, Homo sapien
ggtggaggcaccccacgcgatgcgg

SEQ ID NO: 2421645 - DNA, 25 bp, Homo sapien
tcagatctgccgacgttacttggga

SEQ ID NO: 2421646 - DNA, 25 bp, Homo sapien
tcttatgacccccatagcaaggggg

SEQ ID NO: 2421647 - DNA, 25 bp, Homo sapien
tctgccgacgttacttgggatttac

SEQ ID NO: 2421648 - DNA, 25 bp, Homo sapien
gatctgccgacgttacttgggattt

SEQ ID NO: 2421649 - DNA, 25 bp, Homo sapien
atcccaacaacaggaaggctttcag

SEQ ID NO: 2421650 - DNA, 25 bp, Homo sapien
tcaggaagaaagcaggtcgtttgca

SEQ ID NO: 2421651 - DNA, 25 bp, Homo sapien
cccaacaacaggaaggctttcagga

SEQ ID NO: 2421652 - DNA, 25 bp, Homo sapien
cgaacgcagcccgggatcaggaaga

SEQ ID NO: 2421653 - DNA, 25 bp, Homo sapien
tggcaagaagacaaactgcagtttc

SEQ ID NO: 2421654 - DNA, 25 bp, Homo sapien
gttatgtagcgggttatggcaagaa

SEQ ID NO: 2421655 - DNA, 25 bp, Homo sapien
ggttatggcaagaagacaaactgca

SEQ ID NO: 2421656 - DNA, 25 bp, Homo sapien
gggttatgtagcgggttatggcaag

SEQ ID NO: 2421657 - DNA, 25 bp, Homo sapien
gcttttcccagtgtatagcccacag

SEQ ID NO: 2421658 - DNA, 25 bp, Homo sapien
cagaactagagcgaaagctttcttt

SEQ ID NO: 2421659 - DNA, 25 bp, Homo sapien
aatttgaacagagtatcatcaggtg

SEQ ID NO: 2421660 - DNA, 25 bp, Homo sapien
tctttttggcccgtatataatttga

SEQ ID NO: 2421661 - DNA, 25 bp, Homo sapien
gctattaatatcaggcctacattaa

SEQ ID NO: 2421662 - DNA, 25 bp, Homo sapien
tgctattaatatcaggcctacatta

SEQ ID NO: 2421663 - DNA, 25 bp, Homo sapien
cactgcacaatcttactagcatagg

SEQ ID NO: 2421664 - DNA, 25 bp, Homo sapien
cagaaggtgcccagggaataaagga

SEQ ID NO: 2421665 - DNA, 25 bp, Homo sapien
ttccgggaaatgacagccaacagca

SEQ ID NO: 2421666 - DNA, 25 bp, Homo sapien
cataggtgaggtcaggaattttccg

SEQ ID NO: 2421667 - DNA, 25 bp, Homo sapien
tagcaacaatgaataataacgctta

SEQ ID NO: 2421668 - DNA, 25 bp, Homo sapien
agcaacaatgaataataacgcttac

SEQ ID NO: 2421669 - DNA, 25 bp, Homo sapien
ttagcaacaatgaataataacgctt

SEQ ID NO: 2421670 - DNA, 25 bp, Homo sapien
gcagattgatccagggtttggagta

SEQ ID NO: 2421671 - DNA, 25 bp, Homo sapien
ggagtaaagattccacttgcttctc

SEQ ID NO: 2421672 - DNA, 25 bp, Homo sapien
ttagtgacaccactgtccaatgccg

SEQ ID NO: 2421673 - DNA, 25 bp, Homo sapien
caaaagcataagctagaattgcatg

SEQ ID NO: 2421674 - DNA, 25 bp, Homo sapien
cttcaaggcaaaagagtgcgtttcg

SEQ ID NO: 2421675 - DNA, 25 bp, Homo sapien
tcaaggcaaaagagtgcgtttcgta

SEQ ID NO: 2421676 - DNA, 25 bp, Homo sapien
caaaagagtgcgtttcgtagagcag

SEQ ID NO: 2421677 - DNA, 25 bp, Homo sapien
aggcaaaagagtgcgtttcgtagag

SEQ ID NO: 2421678 - DNA, 25 bp, Homo sapien
ggtcaggaagaagaatcatatattg

SEQ ID NO: 2421679 - DNA, 25 bp, Homo sapien
caggaagaagaatcatatattgtaa

SEQ ID NO: 2421680 - DNA, 25 bp, Homo sapien
ttggtcaggaagaagaatcatatat

SEQ ID NO: 2421681 - DNA, 25 bp, Homo sapien
ctgttggtcaggaagaagaatcata

SEQ ID NO: 2421682 - DNA, 25 bp, Homo sapien
taatgtcattattagtacctaagca

SEQ ID NO: 2421683 - DNA, 25 bp, Homo sapien
tataatgtcattattagtacctaag

SEQ ID NO: 2421684 - DNA, 25 bp, Homo sapien
gtcattattagtacctaagcaataa

SEQ ID NO: 2421685 - DNA, 25 bp, Homo sapien
gaacatttaaactaatcattgttta

SEQ ID NO: 2421686 - DNA, 25 bp, Homo sapien
gaatgtgcattcagctgcctgaaat

SEQ ID NO: 2421687 - DNA, 25 bp, Homo sapien
aatgtgcattcagctgcctgaaatc

SEQ ID NO: 2421688 - DNA, 25 bp, Homo sapien
gtggaattgagcccagcttcaaaga

SEQ ID NO: 2421689 - DNA, 25 bp, Homo sapien
ggaattgagcccagcttcaaagaac

SEQ ID NO: 2421690 - DNA, 25 bp, Homo sapien
tggaattgagcccagcttcaaagaa

SEQ ID NO: 2421691 - DNA, 25 bp, Homo sapien
agtggaattgagcccagcttcaaag

SEQ ID NO: 2421692 - DNA, 25 bp, Homo sapien
atatgcagtgagtgaaatgtcctct

SEQ ID NO: 2421693 - DNA, 25 bp, Homo sapien
caacatatgcagtgagtgaaatgtc

SEQ ID NO: 2421694 - DNA, 25 bp, Homo sapien
atcccaacaacatatgcagtgagtg

SEQ ID NO: 2421695 - DNA, 25 bp, Homo sapien
ccaacaacatatgcagtgagtgaaa

SEQ ID NO: 2421696 - DNA, 25 bp, Homo sapien
attcttaaagcagccgcttgttttc

SEQ ID NO: 2421697 - DNA, 25 bp, Homo sapien
ctcccaggcgtggttgaaaagctgg

SEQ ID NO: 2421698 - DNA, 25 bp, Homo sapien
gtggttgaaaagctggccatcattc

SEQ ID NO: 2421699 - DNA, 25 bp, Homo sapien
caggcgtggttgaaaagctggccat

SEQ ID NO: 2421700 - DNA, 25 bp, Homo sapien
ccagattaaggtctgtttttgaaca

SEQ ID NO: 2421701 - DNA, 25 bp, Homo sapien
tctctccaatgtcttaaaagtaaga

SEQ ID NO: 2421702 - DNA, 25 bp, Homo sapien
tgaacattttcatcaatgaatacaa

SEQ ID NO: 2421703 - DNA, 25 bp, Homo sapien
caatgtcttaaaagtaagagcactg

SEQ ID NO: 2421704 - DNA, 25 bp, Homo sapien
cactataggaaccatcagagttttt

SEQ ID NO: 2421705 - DNA, 25 bp, Homo sapien
ctataggaaccatcagagtttttga

SEQ ID NO: 2421706 - DNA, 25 bp, Homo sapien
acacactataggaaccatcagagtt

SEQ ID NO: 2421707 - DNA, 25 bp, Homo sapien
cacactataggaaccatcagagttt

SEQ ID NO: 2421708 - DNA, 25 bp, Homo sapien
tccatagggcatttggagaacaacc

SEQ ID NO: 2421709 - DNA, 25 bp, Homo sapien
tgtcagttgctcagtagatttcaga

SEQ ID NO: 2421710 - DNA, 25 bp, Homo sapien
aagtatcagatgctagtagggcagc

SEQ ID NO: 2421711 - DNA, 25 bp, Homo sapien
gatttcagatagtccagaacataag

SEQ ID NO: 2421712 - DNA, 25 bp, Homo sapien
ctctggctgacccttctactacatc

SEQ ID NO: 2421713 - DNA, 25 bp, Homo sapien
gcaagtccaaaactccctgcttgga

SEQ ID NO: 2421714 - DNA, 25 bp, Homo sapien
aacagtgaaaaagcctctggctgac

SEQ ID NO: 2421715 - DNA, 25 bp, Homo sapien
ccacaacagtgaaaaagcctctggc

SEQ ID NO: 2421716 - DNA, 25 bp, Homo sapien
acagataaggaaactctgggtcctt

SEQ ID NO: 2421717 - DNA, 25 bp, Homo sapien
cagataaggaaactctgggtccttt

SEQ ID NO: 2421718 - DNA, 25 bp, Homo sapien
tgctttgtttggactcagcaactac

SEQ ID NO: 2421719 - DNA, 25 bp, Homo sapien
ccattccttcatttgggcaagcact

SEQ ID NO: 2421720 - DNA, 25 bp, Homo sapien
tgtttggactcagcaactacagtga

SEQ ID NO: 2421721 - DNA, 25 bp, Homo sapien
ggactcagcaactacagtgatattc

SEQ ID NO: 2421722 - DNA, 25 bp, Homo sapien
gaataacctcactgccattgatttt

SEQ ID NO: 2421723 - DNA, 25 bp, Homo sapien
tttgcttcataattctgagactcct

SEQ ID NO: 2421724 - DNA, 25 bp, Homo sapien
gagactcctccacttgaacagaaat

SEQ ID NO: 2421725 - DNA, 25 bp, Homo sapien
tccagcttgaataacctcactgcca

SEQ ID NO: 2421726 - DNA, 25 bp, Homo sapien
caggaatgaggaacgaaagattggc

SEQ ID NO: 2421727 - DNA, 25 bp, Homo sapien
cacttgcctcccattgggttatcgt

SEQ ID NO: 2421728 - DNA, 25 bp, Homo sapien
aatgaggaacgaaagattggcagag

SEQ ID NO: 2421729 - DNA, 25 bp, Homo sapien
tgggttatcgtatcaggaatgagga

SEQ ID NO: 2421730 - DNA, 25 bp, Homo sapien
tgacgaggtcccacatccatgtctc

SEQ ID NO: 2421731 - DNA, 25 bp, Homo sapien
gacactgacgaggtcccacatccat

SEQ ID NO: 2421732 - DNA, 25 bp, Homo sapien
ttgaattatagcctgttctacatag

SEQ ID NO: 2421733 - DNA, 25 bp, Homo sapien
tgttctacatagtcagcattctccc

SEQ ID NO: 2421734 - DNA, 25 bp, Homo sapien
agataaagcggcttagggagtggca

SEQ ID NO: 2421735 - DNA, 25 bp, Homo sapien
agcggcttagggagtggcagccttc

SEQ ID NO: 2421736 - DNA, 25 bp, Homo sapien
taaagcggcttagggagtggcagcc

SEQ ID NO: 2421737 - DNA, 25 bp, Homo sapien
ggcttagggagtggcagccttctct

SEQ ID NO: 2421738 - DNA, 25 bp, Homo sapien
ctggttttcggtaatggagattggt

SEQ ID NO: 2421739 - DNA, 25 bp, Homo sapien
ttctggttttcggtaatggagattg

SEQ ID NO: 2421740 - DNA, 25 bp, Homo sapien
tctggttttcggtaatggagattgg

SEQ ID NO: 2421741 - DNA, 25 bp, Homo sapien
tggttttcggtaatggagattggta

SEQ ID NO: 2421742 - DNA, 25 bp, Homo sapien
aacaaacaacaaaaatattgttcat

SEQ ID NO: 2421743 - DNA, 25 bp, Homo sapien
acaaacaacaaaaatattgttcatt

SEQ ID NO: 2421744 - DNA, 25 bp, Homo sapien
tcatcaagattgaggccatggtaga

SEQ ID NO: 2421745 - DNA, 25 bp, Homo sapien
tacggctctatacttggaaccatgt

SEQ ID NO: 2421746 - DNA, 25 bp, Homo sapien
ccccatagttgcttacaggtgtgta

SEQ ID NO: 2421747 - DNA, 25 bp, Homo sapien
aacatatccctctgaggaatgcaag

SEQ ID NO: 2421748 - DNA, 25 bp, Homo sapien
tcatctgaaggataagacttctggt

SEQ ID NO: 2421749 - DNA, 25 bp, Homo sapien
atgaaaaacgaggaagtcagagagc

SEQ ID NO: 2421750 - DNA, 25 bp, Homo sapien
catctgaaggataagacttctggta

SEQ ID NO: 2421751 - DNA, 25 bp, Homo sapien
catgaaaaacgaggaagtcagagag

SEQ ID NO: 2421752 - DNA, 25 bp, Homo sapien
gctcgttagagaactttatgttaac

SEQ ID NO: 2421753 - DNA, 25 bp, Homo sapien
gagactagcattggaaccaggtaag

SEQ ID NO: 2421754 - DNA, 25 bp, Homo sapien
gccctgctcgttagagaactttatg

SEQ ID NO: 2421755 - DNA, 25 bp, Homo sapien
accaggtaagccctgctcgttagag

SEQ ID NO: 2421756 - DNA, 25 bp, Homo sapien
gaatctgacactgtcagccacaatt

SEQ ID NO: 2421757 - DNA, 25 bp, Homo sapien
gtgtttaaagcacttgtcaacctgg

SEQ ID NO: 2421758 - DNA, 25 bp, Homo sapien
tctgacactgtcagccacaatttcc

SEQ ID NO: 2421759 - DNA, 25 bp, Homo sapien
aaagcacttgtcaacctggaatctg

SEQ ID NO: 2421760 - DNA, 25 bp, Homo sapien
gaagagatacgatgctgaaagtttc

SEQ ID NO: 2421761 - DNA, 25 bp, Homo sapien
gacgaagagatacgatgctgaaagt

SEQ ID NO: 2421762 - DNA, 25 bp, Homo sapien
aaataggagacgaagagatacgatg

SEQ ID NO: 2421763 - DNA, 25 bp, Homo sapien
taggagacgaagagatacgatgctg

SEQ ID NO: 2421764 - DNA, 25 bp, Homo sapien
tgtccactgagtaagatagctcctt

SEQ ID NO: 2421765 - DNA, 25 bp, Homo sapien
gtccactgagtaagatagctccttt

SEQ ID NO: 2421766 - DNA, 25 bp, Homo sapien
ttgtccactgagtaagatagctcct

SEQ ID NO: 2421767 - DNA, 25 bp, Homo sapien
aaagcgtgagactaagaagtgagca

SEQ ID NO: 2421768 - DNA, 25 bp, Homo sapien
catatgcttcactgtttagggagta

SEQ ID NO: 2421769 - DNA, 25 bp, Homo sapien
gggagtaatgcacagtaacaacctt

SEQ ID NO: 2421770 - DNA, 25 bp, Homo sapien
gcatccaagtactgaggcgtcaacc

SEQ ID NO: 2421771 - DNA, 25 bp, Homo sapien
tcaaatatgtctgaagtgtcaatgg

SEQ ID NO: 2421772 - DNA, 25 bp, Homo sapien
ttgagctccagttgcaacaacttgt

SEQ ID NO: 2421773 - DNA, 25 bp, Homo sapien
tggaaaattgagcttcgccattctc

SEQ ID NO: 2421774 - DNA, 25 bp, Homo sapien
tgttcaccataggtacattattggg

SEQ ID NO: 2421775 - DNA, 25 bp, Homo sapien
cagttccaagcaattgagtgataaa

SEQ ID NO: 2421776 - DNA, 25 bp, Homo sapien
tccatgttctcaaagtttacagttc

SEQ ID NO: 2421777 - DNA, 25 bp, Homo sapien
aagtttacagttccaagcaattgag

SEQ ID NO: 2421778 - DNA, 25 bp, Homo sapien
tctcaaagtttacagttccaagcaa

SEQ ID NO: 2421779 - DNA, 25 bp, Homo sapien
aaatgtcatgaacaatcccgaacgg

SEQ ID NO: 2421780 - DNA, 25 bp, Homo sapien
tctgtaacaattacagcgacatgaa

SEQ ID NO: 2421781 - DNA, 25 bp, Homo sapien
caattacagcgacatgaaatgtcat

SEQ ID NO: 2421782 - DNA, 25 bp, Homo sapien
cggtagagttggaagacttttgtat

SEQ ID NO: 2421783 - DNA, 25 bp, Homo sapien
tactctctgcacacccggatttggg

SEQ ID NO: 2421784 - DNA, 25 bp, Homo sapien
aaaaatactctctgcacacccggat

SEQ ID NO: 2421785 - DNA, 25 bp, Homo sapien
aaaatactctctgcacacccggatt

SEQ ID NO: 2421786 - DNA, 25 bp, Homo sapien
aatactctctgcacacccggatttg

SEQ ID NO: 2421787 - DNA, 25 bp, Homo sapien
atagttactgtttgtggtgcattga

SEQ ID NO: 2421788 - DNA, 25 bp, Homo sapien
tagttactgtttgtggtgcattgac

SEQ ID NO: 2421789 - DNA, 25 bp, Homo sapien
aatagttactgtttgtggtgcattg

SEQ ID NO: 2421790 - DNA, 25 bp, Homo sapien
aaatagttactgtttgtggtgcatt

SEQ ID NO: 2421791 - DNA, 25 bp, Homo sapien
ggtaatatttcggaaagaagtcaca

SEQ ID NO: 2421792 - DNA, 25 bp, Homo sapien
tgggtaatatttcggaaagaagtca

SEQ ID NO: 2421793 - DNA, 25 bp, Homo sapien
aaatcagttggaacgagagttgggt

SEQ ID NO: 2421794 - DNA, 25 bp, Homo sapien
tggaacgagagttgggtaatatttc

SEQ ID NO: 2421795 - DNA, 25 bp, Homo sapien
catcttcaagacacggcactttaag

SEQ ID NO: 2421796 - DNA, 25 bp, Homo sapien
gccatcttctaagttaagtcctctg

SEQ ID NO: 2421797 - DNA, 25 bp, Homo sapien
aagacacggcactttaaggccatct

SEQ ID NO: 2421798 - DNA, 25 bp, Homo sapien
aataaattccattgtaaaggatatg

SEQ ID NO: 2421799 - DNA, 25 bp, Homo sapien
aaagagagtttgaagcagccgagac

SEQ ID NO: 2421800 - DNA, 25 bp, Homo sapien
gagagtttgaagcagccgagacttg

SEQ ID NO: 2421801 - DNA, 25 bp, Homo sapien
tgaccataattccttagtagcaata

SEQ ID NO: 2421802 - DNA, 25 bp, Homo sapien
gagtttgaagcagccgagacttgaa

SEQ ID NO: 2421803 - DNA, 25 bp, Homo sapien
catctcttggacaatctttaggaag

SEQ ID NO: 2421804 - DNA, 25 bp, Homo sapien
tctgctggttgcatctcagttcttc

SEQ ID NO: 2421805 - DNA, 25 bp, Homo sapien
gagaatgcagtgcactagcaccctc

SEQ ID NO: 2421806 - DNA, 25 bp, Homo sapien
agtgcactagcaccctcttctgctg

SEQ ID NO: 2421807 - DNA, 25 bp, Homo sapien
gcaattttcattggccttgtaggct

SEQ ID NO: 2421808 - DNA, 25 bp, Homo sapien
tggcaattttcattggccttgtagg

SEQ ID NO: 2421809 - DNA, 25 bp, Homo sapien
cctggcaattttcattggccttgta

SEQ ID NO: 2421810 - DNA, 25 bp, Homo sapien
tgagggtattgaggcaacacccagc

SEQ ID NO: 2421811 - DNA, 25 bp, Homo sapien
gtatatgtgtccaagaaaaactgag

SEQ ID NO: 2421812 - DNA, 25 bp, Homo sapien
gaaaaactgagcgatgccatttaca

SEQ ID NO: 2421813 - DNA, 25 bp, Homo sapien
agtgatatttgggtatgtaaacgta

SEQ ID NO: 2421814 - DNA, 25 bp, Homo sapien
tatgtaaacgtatatgtgtccaaga

SEQ ID NO: 2421815 - DNA, 25 bp, Homo sapien
ctgtggtgtagtttcccacgatttt

SEQ ID NO: 2421816 - DNA, 25 bp, Homo sapien
tggtgtagtttcccacgattttgtc

SEQ ID NO: 2421817 - DNA, 25 bp, Homo sapien
tgtggtgtagtttcccacgattttg

SEQ ID NO: 2421818 - DNA, 25 bp, Homo sapien
acatctaaggccacaacaaccagaa

SEQ ID NO: 2421819 - DNA, 25 bp, Homo sapien
catctaaggccacaacaaccagaag

SEQ ID NO: 2421820 - DNA, 25 bp, Homo sapien
atctaaggccacaacaaccagaaga

SEQ ID NO: 2421821 - DNA, 25 bp, Homo sapien
caccactgatgagtctatgtatacg

SEQ ID NO: 2421822 - DNA, 25 bp, Homo sapien
ctggccaaaataagggagtccctgt

SEQ ID NO: 2421823 - DNA, 25 bp, Homo sapien
tatgtatacgtacttggagcctgta

SEQ ID NO: 2421824 - DNA, 25 bp, Homo sapien
ccctgtttgtaggacatatccatat

SEQ ID NO: 2421825 - DNA, 25 bp, Homo sapien
acaagagcatgcactttgaggaaac

SEQ ID NO: 2421826 - DNA, 25 bp, Homo sapien
ctgttccgtcctctgtaacaagagc

SEQ ID NO: 2421827 - DNA, 25 bp, Homo sapien
tgcactttgaggaaactccagtatc

SEQ ID NO: 2421828 - DNA, 25 bp, Homo sapien
taacaagagcatgcactttgaggaa

SEQ ID NO: 2421829 - DNA, 25 bp, Homo sapien
aaagcatctgtgttaataaacttgg

SEQ ID NO: 2421830 - DNA, 25 bp, Homo sapien
tctgtgttaataaacttggagacac

SEQ ID NO: 2421831 - DNA, 25 bp, Homo sapien
gcatctgtgttaataaacttggaga

SEQ ID NO: 2421832 - DNA, 25 bp, Homo sapien
gtgttaataaacttggagacacagc

SEQ ID NO: 2421833 - DNA, 25 bp, Homo sapien
ttacagagtgaactgataagatgag

SEQ ID NO: 2421834 - DNA, 25 bp, Homo sapien
catgaatgataagccgtagattctc

SEQ ID NO: 2421835 - DNA, 25 bp, Homo sapien
gataagccgtagattctctgcacac

SEQ ID NO: 2421836 - DNA, 25 bp, Homo sapien
cgtccacaggttcaccataggtata

SEQ ID NO: 2421837 - DNA, 25 bp, Homo sapien
cagacattcactttgaattcagagt

SEQ ID NO: 2421838 - DNA, 25 bp, Homo sapien
gagtccacaactaagatattttctg

SEQ ID NO: 2421839 - DNA, 25 bp, Homo sapien
tttctggtgcatccacagtcatttg

SEQ ID NO: 2421840 - DNA, 25 bp, Homo sapien
cacagtcatttgaaatttgggtaac

SEQ ID NO: 2421841 - DNA, 25 bp, Homo sapien
tggaaggagagttgtagaatccctc

SEQ ID NO: 2421842 - DNA, 25 bp, Homo sapien
acagagaaggagtgatatgttttct

SEQ ID NO: 2421843 - DNA, 25 bp, Homo sapien
ggtgatttcataccatccgaggatg

SEQ ID NO: 2421844 - DNA, 25 bp, Homo sapien
tgggctctgagattaactggaagga

SEQ ID NO: 2421845 - DNA, 25 bp, Homo sapien
ctggatcctgagaataagaaagtgt

SEQ ID NO: 2421846 - DNA, 25 bp, Homo sapien
gaataagaaagtgtatttttgcatg

SEQ ID NO: 2421847 - DNA, 25 bp, Homo sapien
tggatcctgagaataagaaagtgta

SEQ ID NO: 2421848 - DNA, 25 bp, Homo sapien
tgagaataagaaagtgtatttttgc

SEQ ID NO: 2421849 - DNA, 25 bp, Homo sapien
ttgagagtggctcctttagcagaaa

SEQ ID NO: 2421850 - DNA, 25 bp, Homo sapien
caggcttgtaggtgggtttatcagt

SEQ ID NO: 2421851 - DNA, 25 bp, Homo sapien
tctggatctgattgccacagatctc

SEQ ID NO: 2421852 - DNA, 25 bp, Homo sapien
aaatgccagtgggtcagatctggcc

SEQ ID NO: 2421853 - DNA, 25 bp, Homo sapien
tgggcacaagctttatccaaagagc

SEQ ID NO: 2421854 - DNA, 25 bp, Homo sapien
caccatagttgagggagaccgtcaa

SEQ ID NO: 2421855 - DNA, 25 bp, Homo sapien
caaagagccttcttgtagaacagaa

SEQ ID NO: 2421856 - DNA, 25 bp, Homo sapien
aacagaaggaatcagcagaacatac

SEQ ID NO: 2421857 - DNA, 25 bp, Homo sapien
aacaccagcaatgtgccacaccctt

SEQ ID NO: 2421858 - DNA, 25 bp, Homo sapien
gcttgcccacagacgttctgctttc

SEQ ID NO: 2421859 - DNA, 25 bp, Homo sapien
actgcttgcccacagacgttctgct

SEQ ID NO: 2421860 - DNA, 25 bp, Homo sapien
ccactgcttgcccacagacgttctg

SEQ ID NO: 2421861 - DNA, 25 bp, Homo sapien
gaatctcagagatacagcctgcatg

SEQ ID NO: 2421862 - DNA, 25 bp, Homo sapien
tacaggatgtcatgtcacactacaa

SEQ ID NO: 2421863 - DNA, 25 bp, Homo sapien
tagtcagtctcaggttttccataga

SEQ ID NO: 2421864 - DNA, 25 bp, Homo sapien
agaatattaaccctcccaggaggag

SEQ ID NO: 2421865 - DNA, 25 bp, Homo sapien
catgagtcatgggacaaatgggaac

SEQ ID NO: 2421866 - DNA, 25 bp, Homo sapien
tgagtcatgggacaaatgggaaccc

SEQ ID NO: 2421867 - DNA, 25 bp, Homo sapien
catgggacaaatgggaacccgtcat

SEQ ID NO: 2421868 - DNA, 25 bp, Homo sapien
gtcatgggacaaatgggaacccgtc

SEQ ID NO: 2421869 - DNA, 25 bp, Homo sapien
ggctgacacagctaggtcctcagca

SEQ ID NO: 2421870 - DNA, 25 bp, Homo sapien
tggctgacacagctaggtcctcagc

SEQ ID NO: 2421871 - DNA, 25 bp, Homo sapien
ctggctgacacagctaggtcctcag

SEQ ID NO: 2421872 - DNA, 25 bp, Homo sapien
cctggctgacacagctaggtcctca

SEQ ID NO: 2421873 - DNA, 25 bp, Homo sapien
taagagggtccttcctaatgcagag

SEQ ID NO: 2421874 - DNA, 25 bp, Homo sapien
cgtcgagtacgctttacagagggcc

SEQ ID NO: 2421875 - DNA, 25 bp, Homo sapien
caaaagtgtgcctgtcagaccgagt

SEQ ID NO: 2421876 - DNA, 25 bp, Homo sapien
taaagggctgagtatgcagagctcc

SEQ ID NO: 2421877 - DNA, 25 bp, Homo sapien
gaggaattaacagtctttattgggc

SEQ ID NO: 2421878 - DNA, 25 bp, Homo sapien
tgaggaattaacagtctttattggg

SEQ ID NO: 2421879 - DNA, 25 bp, Homo sapien
gaggacctctgtgtatttgtcaatt

SEQ ID NO: 2421880 - DNA, 25 bp, Homo sapien
ttgaggacctctgtgtatttgtcaa

SEQ ID NO: 2421881 - DNA, 25 bp, Homo sapien
aggaggccgtgggtcttgaggacct

SEQ ID NO: 2421882 - DNA, 25 bp, Homo sapien
gtcaattttcttctccacgttcttc

SEQ ID NO: 2421883 - DNA, 25 bp, Homo sapien
catgagctgtttcttcttcccgtag

SEQ ID NO: 2421884 - DNA, 25 bp, Homo sapien
tttcttcttcccgtagtggatcttg

SEQ ID NO: 2421885 - DNA, 25 bp, Homo sapien
cttcttcccgtagtggatcttggct

SEQ ID NO: 2421886 - DNA, 25 bp, Homo sapien
ctgtttcttcttcccgtagtggatc

SEQ ID NO: 2421887 - DNA, 25 bp, Homo sapien
tggggcagcatacctcgcacggtcc

SEQ ID NO: 2421888 - DNA, 25 bp, Homo sapien
gcagcatacctcgcacggtccgcca

SEQ ID NO: 2421889 - DNA, 25 bp, Homo sapien
agcatacctcgcacggtccgccaga

SEQ ID NO: 2421890 - DNA, 25 bp, Homo sapien
tacctcgcacggtccgccagaagat

SEQ ID NO: 2421891 - DNA, 25 bp, Homo sapien
gtacctgtttaccacgatggccgcc

SEQ ID NO: 2421892 - DNA, 25 bp, Homo sapien
ctcggtaagagttggtgttcatccg

SEQ ID NO: 2421893 - DNA, 25 bp, Homo sapien
gaggaaagcgaggtacttcaacttg

SEQ ID NO: 2421894 - DNA, 25 bp, Homo sapien
gcccagcagtacctgtttaccacga

SEQ ID NO: 2421895 - DNA, 25 bp, Homo sapien
tgccgtcttcgccagccgcttggga

SEQ ID NO: 2421896 - DNA, 25 bp, Homo sapien
ctctgccgtcttcgccagccgcttg

SEQ ID NO: 2421897 - DNA, 25 bp, Homo sapien
acctctgccgtcttcgccagccgct

SEQ ID NO: 2421898 - DNA, 25 bp, Homo sapien
tgcacctctgccgtcttcgccagcc

SEQ ID NO: 2421899 - DNA, 25 bp, Homo sapien
catctatacttccaaataatcctaa

SEQ ID NO: 2421900 - DNA, 25 bp, Homo sapien
tcaaagtgatgccttgacaccctct

SEQ ID NO: 2421901 - DNA, 25 bp, Homo sapien
tcccttctgggcagtactgcttgtc

SEQ ID NO: 2421902 - DNA, 25 bp, Homo sapien
gacaccctctgaggttctacaggct

SEQ ID NO: 2421903 - DNA, 25 bp, Homo sapien
tctacatgtaattgttcaactttgg

SEQ ID NO: 2421904 - DNA, 25 bp, Homo sapien
tgttcaactttggttgactgtcgag

SEQ ID NO: 2421905 - DNA, 25 bp, Homo sapien
gaagaattcccattctgccactgag

SEQ ID NO: 2421906 - DNA, 25 bp, Homo sapien
ctgtcgagtcctcatggaagaattc

SEQ ID NO: 2421907 - DNA, 25 bp, Homo sapien
ctgttagggacttgaaaatggaagg

SEQ ID NO: 2421908 - DNA, 25 bp, Homo sapien
tgccaggcaaggagccccgggcttc

SEQ ID NO: 2421909 - DNA, 25 bp, Homo sapien
aaatggcataaaactcggattttca

SEQ ID NO: 2421910 - DNA, 25 bp, Homo sapien
cattcagagttaaatggcataaaac

SEQ ID NO: 2421911 - DNA, 25 bp, Homo sapien
cggattttcaaagccagttgattta

SEQ ID NO: 2421912 - DNA, 25 bp, Homo sapien
gatcttgggagagtgttaccaaaat

SEQ ID NO: 2421913 - DNA, 25 bp, Homo sapien
cttgggagagtgttaccaaaattat

SEQ ID NO: 2421914 - DNA, 25 bp, Homo sapien
tgatcttgggagagtgttaccaaaa

SEQ ID NO: 2421915 - DNA, 25 bp, Homo sapien
tcttgggagagtgttaccaaaatta

SEQ ID NO: 2421916 - DNA, 25 bp, Homo sapien
aggcttgcttgtgtccgggtgttca

SEQ ID NO: 2421917 - DNA, 25 bp, Homo sapien
taagggtgaaacaagccagaatcgc

SEQ ID NO: 2421918 - DNA, 25 bp, Homo sapien
gtgggcttcatccaaccaggtttaa

SEQ ID NO: 2421919 - DNA, 25 bp, Homo sapien
ccatagatatggttaacagctacac

SEQ ID NO: 2421920 - DNA, 25 bp, Homo sapien
gggaaattcttcagaccgtgctgca

SEQ ID NO: 2421921 - DNA, 25 bp, Homo sapien
aagccgatcagtcacataatgccag

SEQ ID NO: 2421922 - DNA, 25 bp, Homo sapien
cacctaagtgtgtcagttgggtcct

SEQ ID NO: 2421923 - DNA, 25 bp, Homo sapien
tacaagaggttaaccgtgggacagc

SEQ ID NO: 2421924 - DNA, 25 bp, Homo sapien
cacattagtgtatggacttccactc

SEQ ID NO: 2421925 - DNA, 25 bp, Homo sapien
ccctaacacattagtgtatggactt

SEQ ID NO: 2421926 - DNA, 25 bp, Homo sapien
tttcttcacttgatatcataaacat

SEQ ID NO: 2421927 - DNA, 25 bp, Homo sapien
tcttcacttgatatcataaacatct

SEQ ID NO: 2421928 - DNA, 25 bp, Homo sapien
gatgtgggcatatgtcttcagttct

SEQ ID NO: 2421929 - DNA, 25 bp, Homo sapien
tcttcaataactaatgaaggtgagc

SEQ ID NO: 2421930 - DNA, 25 bp, Homo sapien
tgcaggttcaatctacgtttaacat

SEQ ID NO: 2421931 - DNA, 25 bp, Homo sapien
ctaccagcaatgcattagggttcta

SEQ ID NO: 2421932 - DNA, 25 bp, Homo sapien
tactgcactgctaagttatggaatc

SEQ ID NO: 2421933 - DNA, 25 bp, Homo sapien
tgaggtcttctagtacttggcaaca

SEQ ID NO: 2421934 - DNA, 25 bp, Homo sapien
catgttagggcagctgtggagcttc

SEQ ID NO: 2421935 - DNA, 25 bp, Homo sapien
gaggaggacctagatgctgagccct

SEQ ID NO: 2421936 - DNA, 25 bp, Homo sapien
caacgatagactgcattcagaaaat

SEQ ID NO: 2421937 - DNA, 25 bp, Homo sapien
ccaacaacgatagactgcattcaga

SEQ ID NO: 2421938 - DNA, 25 bp, Homo sapien
aacaacgatagactgcattcagaaa

SEQ ID NO: 2421939 - DNA, 25 bp, Homo sapien
tccaacaacgatagactgcattcag

SEQ ID NO: 2421940 - DNA, 25 bp, Homo sapien
cattattcttactgaagacctgtca

SEQ ID NO: 2421941 - DNA, 25 bp, Homo sapien
gcttgttattaatactaagcactta

SEQ ID NO: 2421942 - DNA, 25 bp, Homo sapien
tccaaagtctatgtctcagtgaaga

SEQ ID NO: 2421943 - DNA, 25 bp, Homo sapien
taaactgagtatatgtgaaagccaa

SEQ ID NO: 2421944 - DNA, 25 bp, Homo sapien
tattaatatgaagggaggcacagga

SEQ ID NO: 2421945 - DNA, 25 bp, Homo sapien
gaatcatcagaagcttggcaagacc

SEQ ID NO: 2421946 - DNA, 25 bp, Homo sapien
gagtgtgttctctaccatgcggtaa

SEQ ID NO: 2421947 - DNA, 25 bp, Homo sapien
tctaagaaatgtgccccaagaagca

SEQ ID NO: 2421948 - DNA, 25 bp, Homo sapien
agatgtgtgtcaatgaggacttccc

SEQ ID NO: 2421949 - DNA, 25 bp, Homo sapien
tattgctgcagcaaggcttgaagag

SEQ ID NO: 2421950 - DNA, 25 bp, Homo sapien
caaaacggcctttatagatgatccc

SEQ ID NO: 2421951 - DNA, 25 bp, Homo sapien
gatgatcccacaacatatcttctgt

SEQ ID NO: 2421952 - DNA, 25 bp, Homo sapien
tggtgttctgttagaaccagaagcc

SEQ ID NO: 2421953 - DNA, 25 bp, Homo sapien
ccagtaagtgagatctaaaaaggaa

SEQ ID NO: 2421954 - DNA, 25 bp, Homo sapien
aaactggtgttctgttagaaccaga

SEQ ID NO: 2421955 - DNA, 25 bp, Homo sapien
cttttccagtaagtgagatctaaaa

SEQ ID NO: 2421956 - DNA, 25 bp, Homo sapien
tgtatctgagccgtcatctgactgg

SEQ ID NO: 2421957 - DNA, 25 bp, Homo sapien
tctgtatctgagccgtcatctgact

SEQ ID NO: 2421958 - DNA, 25 bp, Homo sapien
tatctgagccgtcatctgactggtt

SEQ ID NO: 2421959 - DNA, 25 bp, Homo sapien
ctctgtatctgagccgtcatctgac

SEQ ID NO: 2421960 - DNA, 25 bp, Homo sapien
tggtttcaatgtagtctttagactg

SEQ ID NO: 2421961 - DNA, 25 bp, Homo sapien
caatgtagtctttagactgggtcca

SEQ ID NO: 2421962 - DNA, 25 bp, Homo sapien
ttcaatgtagtctttagactgggtc

SEQ ID NO: 2421963 - DNA, 25 bp, Homo sapien
tttggtttcaatgtagtctttagac

SEQ ID NO: 2421964 - DNA, 25 bp, Homo sapien
catcttttcacaagcaggacacagg

SEQ ID NO: 2421965 - DNA, 25 bp, Homo sapien
gtctcctgaacgagtctcatgcaat

SEQ ID NO: 2421966 - DNA, 25 bp, Homo sapien
ttttgatcctgctggcaacttcttc

SEQ ID NO: 2421967 - DNA, 25 bp, Homo sapien
ggcattgcagatgtctcctgaacga

SEQ ID NO: 2421968 - DNA, 25 bp, Homo sapien
caattctatgtacggcaatttggtt

SEQ ID NO: 2421969 - DNA, 25 bp, Homo sapien
tctagattcaacaaaccaattctat

SEQ ID NO: 2421970 - DNA, 25 bp, Homo sapien
ccagcacatcggaagaccaaggtgg

SEQ ID NO: 2421971 - DNA, 25 bp, Homo sapien
tatcagtctcccttaccttaaagaa

SEQ ID NO: 2421972 - DNA, 25 bp, Homo sapien
caaaagggtttgtctagctacaact

SEQ ID NO: 2421973 - DNA, 25 bp, Homo sapien
gcaggagacttacacagcctaaatt

SEQ ID NO: 2421974 - DNA, 25 bp, Homo sapien
gcttcacgattaatgtggtagctcc

SEQ ID NO: 2421975 - DNA, 25 bp, Homo sapien
gcatgtaccgccacgtctggtgagt

SEQ ID NO: 2421976 - DNA, 25 bp, Homo sapien
cagcagccctctatacttcggtaca

SEQ ID NO: 2421977 - DNA, 25 bp, Homo sapien
aatacagcagccctctatacttcgg

SEQ ID NO: 2421978 - DNA, 25 bp, Homo sapien
tacagcagccctctatacttcggta

SEQ ID NO: 2421979 - DNA, 25 bp, Homo sapien
ggaggacttagctctgcaaatacag

SEQ ID NO: 2421980 - DNA, 25 bp, Homo sapien
taaagccaagggaattgacatatct

SEQ ID NO: 2421981 - DNA, 25 bp, Homo sapien
gccaagggaattgacatatctttgt

SEQ ID NO: 2421982 - DNA, 25 bp, Homo sapien
gggaattgacatatctttgttgagg

SEQ ID NO: 2421983 - DNA, 25 bp, Homo sapien
ctgtaaagccaagggaattgacata

SEQ ID NO: 2421984 - DNA, 25 bp, Homo sapien
tatttaaggaggactctactacctc

SEQ ID NO: 2421985 - DNA, 25 bp, Homo sapien
taactcgcctaacaaacatgcaatc

SEQ ID NO: 2421986 - DNA, 25 bp, Homo sapien
ccaagcaacttggtgttatatgacc

SEQ ID NO: 2421987 - DNA, 25 bp, Homo sapien
tggcactatcaaggcaagcgtataa

SEQ ID NO: 2421988 - DNA, 25 bp, Homo sapien
caaaacaaccggactaagagaggtg

SEQ ID NO: 2421989 - DNA, 25 bp, Homo sapien
tgtagctggcagtaaatctgtacct

SEQ ID NO: 2421990 - DNA, 25 bp, Homo sapien
taaactccaatggacaagtcagagg

SEQ ID NO: 2421991 - DNA, 25 bp, Homo sapien
tgtcccagagacgtagagtgaaata

SEQ ID NO: 2421992 - DNA, 25 bp, Homo sapien
ctaccttcactgaggttggatttga

SEQ ID NO: 2421993 - DNA, 25 bp, Homo sapien
ctaggatgtgaactaccttcactga

SEQ ID NO: 2421994 - DNA, 25 bp, Homo sapien
accaagacgccatagtttgtgccag

SEQ ID NO: 2421995 - DNA, 25 bp, Homo sapien
tgaccaagacgccatagtttgtgcc

SEQ ID NO: 2421996 - DNA, 25 bp, Homo sapien
tcagtgagaaatgcaatgaggtggc

SEQ ID NO: 2421997 - DNA, 25 bp, Homo sapien
tagggcttaccctctcctaggcaat

SEQ ID NO: 2421998 - DNA, 25 bp, Homo sapien
ttatgcaacacacaaggagcatgtg

SEQ ID NO: 2421999 - DNA, 25 bp, Homo sapien
gagggatctaaatcctagggcttac

SEQ ID NO: 2422000 - DNA, 25 bp, Homo sapien
taagcagtggttggtgtttaaccat

SEQ ID NO: 2422001 - DNA, 25 bp, Homo sapien
tcatttcgggctttgtttacaacaa

SEQ ID NO: 2422002 - DNA, 25 bp, Homo sapien
cacaggggtttcatttcgggctttg

SEQ ID NO: 2422003 - DNA, 25 bp, Homo sapien
gcacctgggaatctgcagcaaatac

SEQ ID NO: 2422004 - DNA, 25 bp, Homo sapien
tctggtggttctttagaatactgct

SEQ ID NO: 2422005 - DNA, 25 bp, Homo sapien
gaaactatctgtgaattttgcctct

SEQ ID NO: 2422006 - DNA, 25 bp, Homo sapien
caaatgacaccatcagctatgaaac

SEQ ID NO: 2422007 - DNA, 25 bp, Homo sapien
cataggcatcatatcactcagcact

SEQ ID NO: 2422008 - DNA, 25 bp, Homo sapien
taacaaatgagacgtgctggcacaa

SEQ ID NO: 2422009 - DNA, 25 bp, Homo sapien
ttatgacagtaacggtgggaggcca

SEQ ID NO: 2422010 - DNA, 25 bp, Homo sapien
cccgaggtgtcgatgtaagtgcaac

SEQ ID NO: 2422011 - DNA, 25 bp, Homo sapien
caaaccttgttatgacgtcggcact

SEQ ID NO: 2422012 - DNA, 25 bp, Homo sapien
gatgttgtcaacttctcgtcctggt

SEQ ID NO: 2422013 - DNA, 25 bp, Homo sapien
tgaagctgtttggtgaatcagagac

SEQ ID NO: 2422014 - DNA, 25 bp, Homo sapien
cctggtttcagggttgaagctgttt

SEQ ID NO: 2422015 - DNA, 25 bp, Homo sapien
gaagtcttaggtcaattagctgtcc

SEQ ID NO: 2422016 - DNA, 25 bp, Homo sapien
cacaagtgccactcaaggtgggcag

SEQ ID NO: 2422017 - DNA, 25 bp, Homo sapien
tatccctgtaacatcacagtccaag

SEQ ID NO: 2422018 - DNA, 25 bp, Homo sapien
aagtataccgtcattctctccaggt

SEQ ID NO: 2422019 - DNA, 25 bp, Homo sapien
tgtatagggatgcttaaaaaggcac

SEQ ID NO: 2422020 - DNA, 25 bp, Homo sapien
gaagctgctcatacccacgcgtctt

SEQ ID NO: 2422021 - DNA, 25 bp, Homo sapien
ctcccaaagtgtccggccgtaatct

SEQ ID NO: 2422022 - DNA, 25 bp, Homo sapien
cggccgtaatctatgatcttttgaa

SEQ ID NO: 2422023 - DNA, 25 bp, Homo sapien
aaacaagggaatggcatttaacaga

SEQ ID NO: 2422024 - DNA, 25 bp, Homo sapien
gccaaagatcaagaataacgtctaa

SEQ ID NO: 2422025 - DNA, 25 bp, Homo sapien
aagaaagggatgagataaccacaat

SEQ ID NO: 2422026 - DNA, 25 bp, Homo sapien
gaatctaaccttggtgctgatgagt

SEQ ID NO: 2422027 - DNA, 25 bp, Homo sapien
ccatctaatgaaattgggaagccaa

SEQ ID NO: 2422028 - DNA, 25 bp, Homo sapien
catggtgcatgaactcctgtcagaa

SEQ ID NO: 2422029 - DNA, 25 bp, Homo sapien
aacaacttggaagccaactgagctc

SEQ ID NO: 2422030 - DNA, 25 bp, Homo sapien
tagctctaggataaatatggccaac

SEQ ID NO: 2422031 - DNA, 25 bp, Homo sapien
ccaaggtaccaacactggcttcatg

SEQ ID NO: 2422032 - DNA, 25 bp, Homo sapien
tcctagttgcagattcaataaaaaa

SEQ ID NO: 2422033 - DNA, 25 bp, Homo sapien
atcctagttgcagattcaataaaaa

SEQ ID NO: 2422034 - DNA, 25 bp, Homo sapien
aatcctagttgcagattcaataaaa

SEQ ID NO: 2422035 - DNA, 25 bp, Homo sapien
cacaattcgcccacagtcctcactt

SEQ ID NO: 2422036 - DNA, 25 bp, Homo sapien
gcacaattcgcccacagtcctcact

SEQ ID NO: 2422037 - DNA, 25 bp, Homo sapien
acaattcgcccacagtcctcacttc

SEQ ID NO: 2422038 - DNA, 25 bp, Homo sapien
tcccctggacttgcgggccacagct

SEQ ID NO: 2422039 - DNA, 25 bp, Homo sapien
gggtcccctggacttgcgggccaca

SEQ ID NO: 2422040 - DNA, 25 bp, Homo sapien
ggccacagctcggctggggaggagg

SEQ ID NO: 2422041 - DNA, 25 bp, Homo sapien
ggtcccctggacttgcgggccacag

SEQ ID NO: 2422042 - DNA, 25 bp, Homo sapien
tgaaagcagtaaaatgcctccccgc

SEQ ID NO: 2422043 - DNA, 25 bp, Homo sapien
aaagcagtaaaatgcctccccgctc

SEQ ID NO: 2422044 - DNA, 25 bp, Homo sapien
agcagtaaaatgcctccccgctcct

SEQ ID NO: 2422045 - DNA, 25 bp, Homo sapien
cagtaaaatgcctccccgctcctcc

SEQ ID NO: 2422046 - DNA, 25 bp, Homo sapien
gtaaatcgtgcttccccctcgggca

SEQ ID NO: 2422047 - DNA, 25 bp, Homo sapien
atcgtgcttccccctcgggcactcc

SEQ ID NO: 2422048 - DNA, 25 bp, Homo sapien
gcttccccctcgggcactccggtga

SEQ ID NO: 2422049 - DNA, 25 bp, Homo sapien
cgtgcttccccctcgggcactccgg

SEQ ID NO: 2422050 - DNA, 25 bp, Homo sapien
ccgagccagcaagtaagaatgctcc

SEQ ID NO: 2422051 - DNA, 25 bp, Homo sapien
gacgccgagccagcaagtaagaatg

SEQ ID NO: 2422052 - DNA, 25 bp, Homo sapien
gagacgccgagccagcaagtaagaa

SEQ ID NO: 2422053 - DNA, 25 bp, Homo sapien
gagagagacgccgagccagcaagta

SEQ ID NO: 2422054 - DNA, 25 bp, Homo sapien
ttggtaaataagacatctcgcgtcg

SEQ ID NO: 2422055 - DNA, 25 bp, Homo sapien
tttgttggtaaataagacatctcgc

SEQ ID NO: 2422056 - DNA, 25 bp, Homo sapien
tgttggtaaataagacatctcgcgt

SEQ ID NO: 2422057 - DNA, 25 bp, Homo sapien
ggtaaataagacatctcgcgtcggg

SEQ ID NO: 2422058 - DNA, 25 bp, Homo sapien
tgcgccggaacaacgggccccgcgc

SEQ ID NO: 2422059 - DNA, 25 bp, Homo sapien
tccctcacctgcgccggaacaacgg

SEQ ID NO: 2422060 - DNA, 25 bp, Homo sapien
gctgccggggcttgttcctcctcat

SEQ ID NO: 2422061 - DNA, 25 bp, Homo sapien
tcacctgcgccggaacaacgggccc

SEQ ID NO: 2422062 - DNA, 25 bp, Homo sapien
aggggccggacactggacgatcacc

SEQ ID NO: 2422063 - DNA, 25 bp, Homo sapien
tttcgcaggggccggacactggacg

SEQ ID NO: 2422064 - DNA, 25 bp, Homo sapien
catcagggatgtcggagcgtttcgc

SEQ ID NO: 2422065 - DNA, 25 bp, Homo sapien
gcaggggccggacactggacgatca

SEQ ID NO: 2422066 - DNA, 25 bp, Homo sapien
gcagcccgaagcacgtggtctgtca

SEQ ID NO: 2422067 - DNA, 25 bp, Homo sapien
acattcggacaaggaccagggtcgc

SEQ ID NO: 2422068 - DNA, 25 bp, Homo sapien
agtgccctgcggagttcactgactc

SEQ ID NO: 2422069 - DNA, 25 bp, Homo sapien
tagagcacaaaaagcagtgccctgc

SEQ ID NO: 2422070 - DNA, 25 bp, Homo sapien
cgggaagccctcgcggtgtcgccca

SEQ ID NO: 2422071 - DNA, 25 bp, Homo sapien
ttacagcgcggacggccgcccataa

SEQ ID NO: 2422072 - DNA, 25 bp, Homo sapien
cttacagcgcggacggccgcccata

SEQ ID NO: 2422073 - DNA, 25 bp, Homo sapien
gccctcgcggtgtcgcccacaccta

SEQ ID NO: 2422074 - DNA, 25 bp, Homo sapien
taagcgaccgcgtgttgctctcatt

SEQ ID NO: 2422075 - DNA, 25 bp, Homo sapien
ggagttgagcaaacaacgccacgcc

SEQ ID NO: 2422076 - DNA, 25 bp, Homo sapien
gcatccgcatccctccggagttgag

SEQ ID NO: 2422077 - DNA, 25 bp, Homo sapien
tggaagacgggctgtttttaagcga

SEQ ID NO: 2422078 - DNA, 25 bp, Homo sapien
agtcgctttcctctcgggcctttcg

SEQ ID NO: 2422079 - DNA, 25 bp, Homo sapien
ggccgctgcgcggtggccaacgagt

SEQ ID NO: 2422080 - DNA, 25 bp, Homo sapien
gcggtggccaacgagtcgctttcct

SEQ ID NO: 2422081 - DNA, 25 bp, Homo sapien
ctgcgcggtggccaacgagtcgctt

SEQ ID NO: 2422082 - DNA, 25 bp, Homo sapien
ggggtctgaagatcacgaaaacagc

SEQ ID NO: 2422083 - DNA, 25 bp, Homo sapien
acgaaaacagcgctcccaacaatgc

SEQ ID NO: 2422084 - DNA, 25 bp, Homo sapien
cgaaaacagcgctcccaacaatgcc

SEQ ID NO: 2422085 - DNA, 25 bp, Homo sapien
gtctgaagatcacgaaaacagcgct

SEQ ID NO: 2422086 - DNA, 25 bp, Homo sapien
agaaagatagtctcctgcagttctg

SEQ ID NO: 2422087 - DNA, 25 bp, Homo sapien
ctgcagttgctaccgctggccggga

SEQ ID NO: 2422088 - DNA, 25 bp, Homo sapien
gcagttctgcagttgctaccgctgg

SEQ ID NO: 2422089 - DNA, 25 bp, Homo sapien
agttctgcagttgctaccgctggcc

SEQ ID NO: 2422090 - DNA, 25 bp, Homo sapien
gaacatgttcataggcttggacgta

SEQ ID NO: 2422091 - DNA, 25 bp, Homo sapien
taggcttggacgtagggttgtattc

SEQ ID NO: 2422092 - DNA, 25 bp, Homo sapien
tggacgtagggttgtattctattct

SEQ ID NO: 2422093 - DNA, 25 bp, Homo sapien
tattgtgtgaataacttgaacatgt

SEQ ID NO: 2422094 - DNA, 25 bp, Homo sapien
gccaacagaaacttaaagaagcact

SEQ ID NO: 2422095 - DNA, 25 bp, Homo sapien
tgttttctccagacaagccaacagc

SEQ ID NO: 2422096 - DNA, 25 bp, Homo sapien
cactggcattagtctttagtctcga

SEQ ID NO: 2422097 - DNA, 25 bp, Homo sapien
tagtctttagtctcgatgaactggt

SEQ ID NO: 2422098 - DNA, 25 bp, Homo sapien
ggtctctaacccactttcctacatg

SEQ ID NO: 2422099 - DNA, 25 bp, Homo sapien
ctgcagacctacagctaaggtggga

SEQ ID NO: 2422100 - DNA, 25 bp, Homo sapien
gatccagattggtggcacttcatcc

SEQ ID NO: 2422101 - DNA, 25 bp, Homo sapien
ccactttcctacatgcagctgcaga

SEQ ID NO: 2422102 - DNA, 25 bp, Homo sapien
actgaggaagctcttgaatggccat

SEQ ID NO: 2422103 - DNA, 25 bp, Homo sapien
ggagatggtggtaccccctccactc

SEQ ID NO: 2422104 - DNA, 25 bp, Homo sapien
ttggagatggtggtaccccctccac

SEQ ID NO: 2422105 - DNA, 25 bp, Homo sapien
ctccactccactgaggaagctcttg

SEQ ID NO: 2422106 - DNA, 25 bp, Homo sapien
tcagacctcagggtttcggcaggga

SEQ ID NO: 2422107 - DNA, 25 bp, Homo sapien
gtttcggcagggatagtgggtgacc

SEQ ID NO: 2422108 - DNA, 25 bp, Homo sapien
aagtgcatggggggctcccggaagc

SEQ ID NO: 2422109 - DNA, 25 bp, Homo sapien
acctcagggtttcggcagggatagt

SEQ ID NO: 2422110 - DNA, 25 bp, Homo sapien
gggcacttcgtgacatggcagctga

SEQ ID NO: 2422111 - DNA, 25 bp, Homo sapien
ggctgtcatttagaggcctccctcc

SEQ ID NO: 2422112 - DNA, 25 bp, Homo sapien
cggagtccaagctccctcacatggt

SEQ ID NO: 2422113 - DNA, 25 bp, Homo sapien
gacgttacagtcatgccaccagctg

SEQ ID NO: 2422114 - DNA, 25 bp, Homo sapien
tggggaccatccaagtgagaaagag

SEQ ID NO: 2422115 - DNA, 25 bp, Homo sapien
ggggaccatccaagtgagaaagagc

SEQ ID NO: 2422116 - DNA, 25 bp, Homo sapien
gggaccatccaagtgagaaagagcc

SEQ ID NO: 2422117 - DNA, 25 bp, Homo sapien
tgtccctggcagttcactttgattc

SEQ ID NO: 2422118 - DNA, 25 bp, Homo sapien
gtttgtccctggcagttcactttga

SEQ ID NO: 2422119 - DNA, 25 bp, Homo sapien
ccatttcctcgccactcttgtttgt

SEQ ID NO: 2422120 - DNA, 25 bp, Homo sapien
atttcctcgccactcttgtttgtcc

SEQ ID NO: 2422121 - DNA, 25 bp, Homo sapien
tggccatgtaagctctgccaccaac

SEQ ID NO: 2422122 - DNA, 25 bp, Homo sapien
ctccgggatccctggccatgtaagc

SEQ ID NO: 2422123 - DNA, 25 bp, Homo sapien
cctttctagtacaaagtctctagag

SEQ ID NO: 2422124 - DNA, 25 bp, Homo sapien
tttctagtacaaagtctctagagct

SEQ ID NO: 2422125 - DNA, 25 bp, Homo sapien
taaagataagtccacaggtttttca

SEQ ID NO: 2422126 - DNA, 25 bp, Homo sapien
ataaacatagggaagctgataagtc

SEQ ID NO: 2422127 - DNA, 25 bp, Homo sapien
catttgtttataagatttactctcc

SEQ ID NO: 2422128 - DNA, 25 bp, Homo sapien
gcctttccacgactttgagttgcaa

SEQ ID NO: 2422129 - DNA, 25 bp, Homo sapien
taagcctgataatagcctgtttggg

SEQ ID NO: 2422130 - DNA, 25 bp, Homo sapien
gataatcaagatgtgcagtcaagaa

SEQ ID NO: 2422131 - DNA, 25 bp, Homo sapien
caaagagatgcaaaccaaacgagat

SEQ ID NO: 2422132 - DNA, 25 bp, Homo sapien
gatctaattagtccccaaagagatg

SEQ ID NO: 2422133 - DNA, 25 bp, Homo sapien
gccagctttagcaagcaggcccgtc

SEQ ID NO: 2422134 - DNA, 25 bp, Homo sapien
cagctttagcaagcaggcccgtcat

SEQ ID NO: 2422135 - DNA, 25 bp, Homo sapien
ccagctttagcaagcaggcccgtca

SEQ ID NO: 2422136 - DNA, 25 bp, Homo sapien
agccagctttagcaagcaggcccgt

SEQ ID NO: 2422137 - DNA, 25 bp, Homo sapien
gggccccacatgtttatagcacagg

SEQ ID NO: 2422138 - DNA, 25 bp, Homo sapien
gataccctggatcccttcgaatgag

SEQ ID NO: 2422139 - DNA, 25 bp, Homo sapien
tcacaaggtgactgaaggacccatc

SEQ ID NO: 2422140 - DNA, 25 bp, Homo sapien
ttaaggcatatgactcccgaccagg

SEQ ID NO: 2422141 - DNA, 25 bp, Homo sapien
cgattgcacaaggatactgatgcca

SEQ ID NO: 2422142 - DNA, 25 bp, Homo sapien
gaatgccggaaggtcagtctcatgc

SEQ ID NO: 2422143 - DNA, 25 bp, Homo sapien
tgtagacacactttagcttcaggca

SEQ ID NO: 2422144 - DNA, 25 bp, Homo sapien
taggagcccagtgtaaaacaggttc

SEQ ID NO: 2422145 - DNA, 25 bp, Homo sapien
ccgactgggttgcactatatttaca

SEQ ID NO: 2422146 - DNA, 25 bp, Homo sapien
tatccttaagaggtagaccactgca

SEQ ID NO: 2422147 - DNA, 25 bp, Homo sapien
ggaacgtaaagcttgccctgaaaca

SEQ ID NO: 2422148 - DNA, 25 bp, Homo sapien
gattagaccctaacaaagacagggc

SEQ ID NO: 2422149 - DNA, 25 bp, Homo sapien
gagttgacagtcatgcggtctcgca

SEQ ID NO: 2422150 - DNA, 25 bp, Homo sapien
cggtctcgcaggagagcgctctctt

SEQ ID NO: 2422151 - DNA, 25 bp, Homo sapien
tgaagtcctgaatggtctgcagaat

SEQ ID NO: 2422152 - DNA, 25 bp, Homo sapien
cagaattcggataagggagttgaca

SEQ ID NO: 2422153 - DNA, 25 bp, Homo sapien
caattcctgagcattgctggcctcg

SEQ ID NO: 2422154 - DNA, 25 bp, Homo sapien
gcaggatgatttctgaataaggaca

SEQ ID NO: 2422155 - DNA, 25 bp, Homo sapien
tacgtagtggcagaaggttttgcag

SEQ ID NO: 2422156 - DNA, 25 bp, Homo sapien
cagtattaatagcatttacgtagtg

SEQ ID NO: 2422157 - DNA, 25 bp, Homo sapien
tcattatctagaatctggtcagttg

SEQ ID NO: 2422158 - DNA, 25 bp, Homo sapien
agatttgaacccatggtggaaaact

SEQ ID NO: 2422159 - DNA, 25 bp, Homo sapien
aagatgcgggcagatttgaacccat

SEQ ID NO: 2422160 - DNA, 25 bp, Homo sapien
gaaagatgcgggcagatttgaaccc

SEQ ID NO: 2422161 - DNA, 25 bp, Homo sapien
tcttgtgaaagatgcgggcagattt

SEQ ID NO: 2422162 - DNA, 25 bp, Homo sapien
ctctttttcaggtttatgaaaatgt

SEQ ID NO: 2422163 - DNA, 25 bp, Homo sapien
tctccaattccttcttgtatctgcc

SEQ ID NO: 2422164 - DNA, 25 bp, Homo sapien
aattccttcttgtatctgcccagca

SEQ ID NO: 2422165 - DNA, 25 bp, Homo sapien
ccttcttgtatctgcccagcattgg

SEQ ID NO: 2422166 - DNA, 25 bp, Homo sapien
aataagagacactggggcgggcgtg

SEQ ID NO: 2422167 - DNA, 25 bp, Homo sapien
gtcagtgaagtgatgctcaatctcc

SEQ ID NO: 2422168 - DNA, 25 bp, Homo sapien
tcctagccgtggtgggtgacttctg

SEQ ID NO: 2422169 - DNA, 25 bp, Homo sapien
gatgctcaatctcctagccgtggtg

SEQ ID NO: 2422170 - DNA, 25 bp, Homo sapien
ttttttcctgtcagtgaagtgatgc

SEQ ID NO: 2422171 - DNA, 25 bp, Homo sapien
aagaattctctccaggctcccatca

SEQ ID NO: 2422172 - DNA, 25 bp, Homo sapien
aataagaattctctccaggctccca

SEQ ID NO: 2422173 - DNA, 25 bp, Homo sapien
tctccaataagaattctctccaggc

SEQ ID NO: 2422174 - DNA, 25 bp, Homo sapien
actgctttactagatcttcatctga

SEQ ID NO: 2422175 - DNA, 25 bp, Homo sapien
catagagtagtgttggctgtgacta

SEQ ID NO: 2422176 - DNA, 25 bp, Homo sapien
aattaatttgggagttcaggcacag

SEQ ID NO: 2422177 - DNA, 25 bp, Homo sapien
tgcacccggtcagaatattttcaaa

SEQ ID NO: 2422178 - DNA, 25 bp, Homo sapien
aatccaagagatcttttcctcccac

SEQ ID NO: 2422179 - DNA, 25 bp, Homo sapien
ttctgaccatgacacaatccactag

SEQ ID NO: 2422180 - DNA, 25 bp, Homo sapien
taacagtcctgagttatcgtgacca

SEQ ID NO: 2422181 - DNA, 25 bp, Homo sapien
tagccatttggctaacagtcctgag

SEQ ID NO: 2422182 - DNA, 25 bp, Homo sapien
tatcgtgaccaatctgaacagtggt

SEQ ID NO: 2422183 - DNA, 25 bp, Homo sapien
tgttccaataagatactaaggcaga

SEQ ID NO: 2422184 - DNA, 25 bp, Homo sapien
taaggcagaactgacctcagacctc

SEQ ID NO: 2422185 - DNA, 25 bp, Homo sapien
tttctgttccaataagatactaagg

SEQ ID NO: 2422186 - DNA, 25 bp, Homo sapien
tcatatactagaagtctttgaagct

SEQ ID NO: 2422187 - DNA, 25 bp, Homo sapien
actacacgtgatacattcttctagg

SEQ ID NO: 2422188 - DNA, 25 bp, Homo sapien
taggaaaggtattagctgaacctac

SEQ ID NO: 2422189 - DNA, 25 bp, Homo sapien
cgtgatacattcttctaggaaaggt

SEQ ID NO: 2422190 - DNA, 25 bp, Homo sapien
catctgtaaaactacacgtgataca

SEQ ID NO: 2422191 - DNA, 25 bp, Homo sapien
cctgatacacagatccaagggtttg

SEQ ID NO: 2422192 - DNA, 25 bp, Homo sapien
tgggaatctgcattactcctgtgtc

SEQ ID NO: 2422193 - DNA, 25 bp, Homo sapien
ctcaaaggtcatttcgaggaggttt

SEQ ID NO: 2422194 - DNA, 25 bp, Homo sapien
gggatgatcactgacctatacggaa

SEQ ID NO: 2422195 - DNA, 25 bp, Homo sapien
gatagtggtgaacacactggtgaag

SEQ ID NO: 2422196 - DNA, 25 bp, Homo sapien
actggtgaagcagaaatagtccaca

SEQ ID NO: 2422197 - DNA, 25 bp, Homo sapien
gaaggtggtaaagaaactgctctct

SEQ ID NO: 2422198 - DNA, 25 bp, Homo sapien
ttcttcttcgcaacgtagaaaagca

SEQ ID NO: 2422199 - DNA, 25 bp, Homo sapien
caacatcagtcttgatctcactcat

SEQ ID NO: 2422200 - DNA, 25 bp, Homo sapien
gaaagcaactgcttaagatgctggg

SEQ ID NO: 2422201 - DNA, 25 bp, Homo sapien
acagtcttatccacgcccgagctcg

SEQ ID NO: 2422202 - DNA, 25 bp, Homo sapien
tagaaagcaactgcttaagatgctg

SEQ ID NO: 2422203 - DNA, 25 bp, Homo sapien
aacagcaaagatgtagattttaagg

SEQ ID NO: 2422204 - DNA, 25 bp, Homo sapien
gcaaagatgtagattttaaggataa

SEQ ID NO: 2422205 - DNA, 25 bp, Homo sapien
atgtagattttaaggataaccctga

SEQ ID NO: 2422206 - DNA, 25 bp, Homo sapien
ctaaagaatagtggcaacagcaaag

SEQ ID NO: 2422207 - DNA, 25 bp, Homo sapien
ctcatgtcctgaataagagagaccc

SEQ ID NO: 2422208 - DNA, 25 bp, Homo sapien
agagagaccctgagcgttggcaaca

SEQ ID NO: 2422209 - DNA, 25 bp, Homo sapien
tttcttctttctggtccgagggcaa

SEQ ID NO: 2422210 - DNA, 25 bp, Homo sapien
ctgagcgttggcaacataactcctg

SEQ ID NO: 2422211 - DNA, 25 bp, Homo sapien
ccaaatagtattgagtcttctcaga

SEQ ID NO: 2422212 - DNA, 25 bp, Homo sapien
tagttctttaccaatgatgtcatac

SEQ ID NO: 2422213 - DNA, 25 bp, Homo sapien
ctagttctttaccaatgatgtcata

SEQ ID NO: 2422214 - DNA, 25 bp, Homo sapien
cttctctgtcctgaaattgaattaa

SEQ ID NO: 2422215 - DNA, 25 bp, Homo sapien
ctcttctctgtcctgaaattgaatt

SEQ ID NO: 2422216 - DNA, 25 bp, Homo sapien
ttctctgtcctgaaattgaattaaa

SEQ ID NO: 2422217 - DNA, 25 bp, Homo sapien
tcttctctgtcctgaaattgaatta

SEQ ID NO: 2422218 - DNA, 25 bp, Homo sapien
gcttgacctgcaagccatggctcca

SEQ ID NO: 2422219 - DNA, 25 bp, Homo sapien
cagcaggtcacaaaggctggcgatc

SEQ ID NO: 2422220 - DNA, 25 bp, Homo sapien
ggcgatcaaggtgttctcctccagg

SEQ ID NO: 2422221 - DNA, 25 bp, Homo sapien
tccaggccggtgatgtttgcttctc

SEQ ID NO: 2422222 - DNA, 25 bp, Homo sapien
cttcattctacattcttttaataag

SEQ ID NO: 2422223 - DNA, 25 bp, Homo sapien
tcattctacattcttttaataagcc

SEQ ID NO: 2422224 - DNA, 25 bp, Homo sapien
attctacattcttttaataagcctt

SEQ ID NO: 2422225 - DNA, 25 bp, Homo sapien
cattctacattcttttaataagcct

SEQ ID NO: 2422226 - DNA, 25 bp, Homo sapien
tggtctgtgcaataactgcaggaga

SEQ ID NO: 2422227 - DNA, 25 bp, Homo sapien
ttttcctaaacttcgtgcctcttgc

SEQ ID NO: 2422228 - DNA, 25 bp, Homo sapien
tgacagtttgggttgcctcaggttt

SEQ ID NO: 2422229 - DNA, 25 bp, Homo sapien
tacgaatttacagttggtctgtgca

SEQ ID NO: 2422230 - DNA, 25 bp, Homo sapien
ttttttaggaagtcgtgcaggagga

SEQ ID NO: 2422231 - DNA, 25 bp, Homo sapien
tctgacagaccaaaagttccccgga

SEQ ID NO: 2422232 - DNA, 25 bp, Homo sapien
gattttttaggaagtcgtgcaggag

SEQ ID NO: 2422233 - DNA, 25 bp, Homo sapien
ttaggaagtcgtgcaggaggaggtg

SEQ ID NO: 2422234 - DNA, 25 bp, Homo sapien
tctcctataggagacatagtaacta

SEQ ID NO: 2422235 - DNA, 25 bp, Homo sapien
tctgctatatgtccgtacaaaagga

SEQ ID NO: 2422236 - DNA, 25 bp, Homo sapien
caaagcataggcaagtacatcacac

SEQ ID NO: 2422237 - DNA, 25 bp, Homo sapien
gaaatgtctaggcttctcatgcaga

SEQ ID NO: 2422238 - DNA, 25 bp, Homo sapien
aggcaccccaggaaggtagaccaca

SEQ ID NO: 2422239 - DNA, 25 bp, Homo sapien
gctcagaatgctggcgaaggcgttc

SEQ ID NO: 2422240 - DNA, 25 bp, Homo sapien
ctcaagtcgttgtccagcccaacat

SEQ ID NO: 2422241 - DNA, 25 bp, Homo sapien
gctggcgaaggcgttctttcctgcg

SEQ ID NO: 2422242 - DNA, 25 bp, Homo sapien
gttgtccagcccaacatgctcagaa

SEQ ID NO: 2422243 - DNA, 25 bp, Homo sapien
tctaagggttgtactcaaagaccac

SEQ ID NO: 2422244 - DNA, 25 bp, Homo sapien
aaattagcctccttagctacttggg

SEQ ID NO: 2422245 - DNA, 25 bp, Homo sapien
gatgacagtgatatcccatctcaag

SEQ ID NO: 2422246 - DNA, 25 bp, Homo sapien
gggccgcagtgtgccacgactgcac

SEQ ID NO: 2422247 - DNA, 25 bp, Homo sapien
gttgccaagacatcggactgtaact

SEQ ID NO: 2422248 - DNA, 25 bp, Homo sapien
gacatcggactgtaactttggaaag

SEQ ID NO: 2422249 - DNA, 25 bp, Homo sapien
caagacatcggactgtaactttgga

SEQ ID NO: 2422250 - DNA, 25 bp, Homo sapien
catcggactgtaactttggaaagaa

SEQ ID NO: 2422251 - DNA, 25 bp, Homo sapien
atcaagtagatgtgggtggattgca

SEQ ID NO: 2422252 - DNA, 25 bp, Homo sapien
atgtgggtggattgcagtgtgatcc

SEQ ID NO: 2422253 - DNA, 25 bp, Homo sapien
agtagatgtgggtggattgcagtgt

SEQ ID NO: 2422254 - DNA, 25 bp, Homo sapien
gtgggtggattgcagtgtgatccat

SEQ ID NO: 2422255 - DNA, 25 bp, Homo sapien
tgttggaagatgtctcaaagtcccc

SEQ ID NO: 2422256 - DNA, 25 bp, Homo sapien
cagtgatctatttctcaggtaaaca

SEQ ID NO: 2422257 - DNA, 25 bp, Homo sapien
gaagcaagcctaggtctctgatcct

SEQ ID NO: 2422258 - DNA, 25 bp, Homo sapien
gcaaaaagtcatataagcaggcatt

SEQ ID NO: 2422259 - DNA, 25 bp, Homo sapien
cacatggctattaaggcactggaag

SEQ ID NO: 2422260 - DNA, 25 bp, Homo sapien
gaaataaaatttgtgcaacaaggca

SEQ ID NO: 2422261 - DNA, 25 bp, Homo sapien
ggagtaccaaactctctgagaggct

SEQ ID NO: 2422262 - DNA, 25 bp, Homo sapien
caaggcattatgctattcacatggc

SEQ ID NO: 2422263 - DNA, 25 bp, Homo sapien
ggatagacaatttcattaattctac

SEQ ID NO: 2422264 - DNA, 25 bp, Homo sapien
tcattttattctctgaacaaggata

SEQ ID NO: 2422265 - DNA, 25 bp, Homo sapien
aacaaggatagacaatttcattaat

SEQ ID NO: 2422266 - DNA, 25 bp, Homo sapien
ttttattctctgaacaaggatagac

SEQ ID NO: 2422267 - DNA, 25 bp, Homo sapien
acagggtgatgtttctatggttaca

SEQ ID NO: 2422268 - DNA, 25 bp, Homo sapien
gattcgtgggaatacaacagggtga

SEQ ID NO: 2422269 - DNA, 25 bp, Homo sapien
tacatacgctaaagcttcagcatca

SEQ ID NO: 2422270 - DNA, 25 bp, Homo sapien
gggatctaccctgattcgtgggaat

SEQ ID NO: 2422271 - DNA, 25 bp, Homo sapien
aaaccatggctcgaccaatcactag

SEQ ID NO: 2422272 - DNA, 25 bp, Homo sapien
tcaaggaagctccacatttgctgcc

SEQ ID NO: 2422273 - DNA, 25 bp, Homo sapien
ggcaggcaagcaatcaagagagaca

SEQ ID NO: 2422274 - DNA, 25 bp, Homo sapien
caaagaacaggttaaggaccaggca

SEQ ID NO: 2422275 - DNA, 25 bp, Homo sapien
aatttaaaaggcatggcaaatgtac

SEQ ID NO: 2422276 - DNA, 25 bp, Homo sapien
atttaatttaaaaggcatggcaaat

SEQ ID NO: 2422277 - DNA, 25 bp, Homo sapien
ttaatttaaaaggcatggcaaatgt

SEQ ID NO: 2422278 - DNA, 25 bp, Homo sapien
ttaatttaatttaaaaggcatggca

SEQ ID NO: 2422279 - DNA, 25 bp, Homo sapien
gatgtccgcaaggtgggtgccctta

SEQ ID NO: 2422280 - DNA, 25 bp, Homo sapien
tttctgatatatagatgtccgcaag

SEQ ID NO: 2422281 - DNA, 25 bp, Homo sapien
tatagatgtccgcaaggtgggtgcc

SEQ ID NO: 2422282 - DNA, 25 bp, Homo sapien
gatatatagatgtccgcaaggtggg

SEQ ID NO: 2422283 - DNA, 25 bp, Homo sapien
ccgagtgtcaaagacccgaagcaaa

SEQ ID NO: 2422284 - DNA, 25 bp, Homo sapien
gagtgtcaaagacccgaagcaaagg

SEQ ID NO: 2422285 - DNA, 25 bp, Homo sapien
tatacagccttatcttatcaatccg

SEQ ID NO: 2422286 - DNA, 25 bp, Homo sapien
tatcttatcaatccgagtgtcaaag

SEQ ID NO: 2422287 - DNA, 25 bp, Homo sapien
caaacatctgtgtttcaatgaagcg

SEQ ID NO: 2422288 - DNA, 25 bp, Homo sapien
caatgaagcgtgaaagaaatggcag

SEQ ID NO: 2422289 - DNA, 25 bp, Homo sapien
ttatcaataaaggtggcaaacatct

SEQ ID NO: 2422290 - DNA, 25 bp, Homo sapien
attatcaataaaggtggcaaacatc

SEQ ID NO: 2422291 - DNA, 25 bp, Homo sapien
gtgcccggcctgagtttctataatt

SEQ ID NO: 2422292 - DNA, 25 bp, Homo sapien
cctgagtttctataatttaagcatc

SEQ ID NO: 2422293 - DNA, 25 bp, Homo sapien
gcccggcctgagtttctataattta

SEQ ID NO: 2422294 - DNA, 25 bp, Homo sapien
cggcctgagtttctataatttaagc

SEQ ID NO: 2422295 - DNA, 25 bp, Homo sapien
aatgagctggtttatttgcttgtaa

SEQ ID NO: 2422296 - DNA, 25 bp, Homo sapien
caatgagctggtttatttgcttgta

SEQ ID NO: 2422297 - DNA, 25 bp, Homo sapien
ataatatatgggtaagcataggcac

SEQ ID NO: 2422298 - DNA, 25 bp, Homo sapien
taacaaaatcaataatatatgggta

SEQ ID NO: 2422299 - DNA, 25 bp, Homo sapien
tcaataatatatgggtaagcatagg

SEQ ID NO: 2422300 - DNA, 25 bp, Homo sapien
caaaatcaataatatatgggtaagc

SEQ ID NO: 2422301 - DNA, 25 bp, Homo sapien
ggattccatgtcctgggcagtctga

SEQ ID NO: 2422302 - DNA, 25 bp, Homo sapien
tctgttcccggttggtcagccagga

SEQ ID NO: 2422303 - DNA, 25 bp, Homo sapien
ggcagtctgaatgacaaatgcttcg

SEQ ID NO: 2422304 - DNA, 25 bp, Homo sapien
gacaaatgcttcgtaatctgcaaac

SEQ ID NO: 2422305 - DNA, 25 bp, Homo sapien
gcaaagacctctcggagctgtacat

SEQ ID NO: 2422306 - DNA, 25 bp, Homo sapien
aaagacctctcggagctgtacattg

SEQ ID NO: 2422307 - DNA, 25 bp, Homo sapien
agcaaagacctctcggagctgtaca

SEQ ID NO: 2422308 - DNA, 25 bp, Homo sapien
agacctctcggagctgtacattgag

SEQ ID NO: 2422309 - DNA, 25 bp, Homo sapien
gtcccttagttctgcctcttcacaa

SEQ ID NO: 2422310 - DNA, 25 bp, Homo sapien
gtagtcccttagttctgcctcttca

SEQ ID NO: 2422311 - DNA, 25 bp, Homo sapien
tggtagtcccttagttctgcctctt

SEQ ID NO: 2422312 - DNA, 25 bp, Homo sapien
ctggtagtcccttagttctgcctct

SEQ ID NO: 2422313 - DNA, 25 bp, Homo sapien
cagagcctgcaagcgggctatggtt

SEQ ID NO: 2422314 - DNA, 25 bp, Homo sapien
cctgcaagcgggctatggtttcatt

SEQ ID NO: 2422315 - DNA, 25 bp, Homo sapien
ccagagcctgcaagcgggctatggt

SEQ ID NO: 2422316 - DNA, 25 bp, Homo sapien
caagcgggctatggtttcattgccc

SEQ ID NO: 2422317 - DNA, 25 bp, Homo sapien
tacatgctgatgttattagtacaga

SEQ ID NO: 2422318 - DNA, 25 bp, Homo sapien
catacatgctgatgttattagtaca

SEQ ID NO: 2422319 - DNA, 25 bp, Homo sapien
ctcatacatgctgatgttattagta

SEQ ID NO: 2422320 - DNA, 25 bp, Homo sapien
tgttattagtacagacattgccgtt

SEQ ID NO: 2422321 - DNA, 25 bp, Homo sapien
cattgaccaagtctttcagaaccat

SEQ ID NO: 2422322 - DNA, 25 bp, Homo sapien
gtcattgaccaagtctttcagaacc

SEQ ID NO: 2422323 - DNA, 25 bp, Homo sapien
tcagaaccatattcttcagtttgct

SEQ ID NO: 2422324 - DNA, 25 bp, Homo sapien
tttcagaaccatattcttcagtttg

SEQ ID NO: 2422325 - DNA, 25 bp, Homo sapien
tcttcaggcaactcaataaaatggt

SEQ ID NO: 2422326 - DNA, 25 bp, Homo sapien
tcagagagttcttggataaaatcca

SEQ ID NO: 2422327 - DNA, 25 bp, Homo sapien
cctcaggagggatcccaaattgaac

SEQ ID NO: 2422328 - DNA, 25 bp, Homo sapien
gatcccaaattgaacaagaacctca

SEQ ID NO: 2422329 - DNA, 25 bp, Homo sapien
gatgctggtaatctttggaaagcca

SEQ ID NO: 2422330 - DNA, 25 bp, Homo sapien
ggccggagcaggaagtatccacaaa

SEQ ID NO: 2422331 - DNA, 25 bp, Homo sapien
taagccagcttgagggtaagccaga

SEQ ID NO: 2422332 - DNA, 25 bp, Homo sapien
tccacaaatgagagactaatgcagc

SEQ ID NO: 2422333 - DNA, 25 bp, Homo sapien
ggctacttgtgggtatcactcttaa

SEQ ID NO: 2422334 - DNA, 25 bp, Homo sapien
aatcatgaggatagctaattggtga

SEQ ID NO: 2422335 - DNA, 25 bp, Homo sapien
gttagctagcaactaaaatcatacc

SEQ ID NO: 2422336 - DNA, 25 bp, Homo sapien
tagaaagtgaggtacattccatgca

SEQ ID NO: 2422337 - DNA, 25 bp, Homo sapien
tttcacagctaattcaggttatttc

SEQ ID NO: 2422338 - DNA, 25 bp, Homo sapien
acgcccagccgaagcactgctattt

SEQ ID NO: 2422339 - DNA, 25 bp, Homo sapien
cgtatttattaagcagtgttgatct

SEQ ID NO: 2422340 - DNA, 25 bp, Homo sapien
gacattactgtaggagctttcagaa

SEQ ID NO: 2422341 - DNA, 25 bp, Homo sapien
gccacagtcatcaggcgttgataat

SEQ ID NO: 2422342 - DNA, 25 bp, Homo sapien
tcttttgactgaaggcccatcagat

SEQ ID NO: 2422343 - DNA, 25 bp, Homo sapien
gagaagcaggtagaatgggcacata

SEQ ID NO: 2422344 - DNA, 25 bp, Homo sapien
caaaagtgtggtgatgccttctgcc

SEQ ID NO: 2422345 - DNA, 25 bp, Homo sapien
catatctgggtattctcgagttaac

SEQ ID NO: 2422346 - DNA, 25 bp, Homo sapien
gcaaaccatatatgtcccagtagga

SEQ ID NO: 2422347 - DNA, 25 bp, Homo sapien
aaagcagtatggtgcatataccaca

SEQ ID NO: 2422348 - DNA, 25 bp, Homo sapien
tatgaactatctagggcagtatcct

SEQ ID NO: 2422349 - DNA, 25 bp, Homo sapien
acagctggtactctctgtgcaggtg

SEQ ID NO: 2422350 - DNA, 25 bp, Homo sapien
agttcctaccactctgctaggataa

SEQ ID NO: 2422351 - DNA, 25 bp, Homo sapien
ctggtactctctgtgcaggtgaggc

SEQ ID NO: 2422352 - DNA, 25 bp, Homo sapien
aggcgggtagtagaggagatcagaa

SEQ ID NO: 2422353 - DNA, 25 bp, Homo sapien
atgctgtccaccagcatcactgtgg

SEQ ID NO: 2422354 - DNA, 25 bp, Homo sapien
aacagaggggtctaggtctggacct

SEQ ID NO: 2422355 - DNA, 25 bp, Homo sapien
agtgatggctctggcacagatccca

SEQ ID NO: 2422356 - DNA, 25 bp, Homo sapien
gtggagaataaggtcagcccctcaa

SEQ ID NO: 2422357 - DNA, 25 bp, Homo sapien
tgtcagtagctcaagaggcaaaatg

SEQ ID NO: 2422358 - DNA, 25 bp, Homo sapien
cttatggcagggactttgctgtcag

SEQ ID NO: 2422359 - DNA, 25 bp, Homo sapien
gaattccatataaagcgtttcagcc

SEQ ID NO: 2422360 - DNA, 25 bp, Homo sapien
tgaaaaatatgacggagatccacag

SEQ ID NO: 2422361 - DNA, 25 bp, Homo sapien
ttgccacaaggatttccaactgagg

SEQ ID NO: 2422362 - DNA, 25 bp, Homo sapien
taacagtcagtaagaatcaagcccc

SEQ ID NO: 2422363 - DNA, 25 bp, Homo sapien
ctggggaattagtgcagtggcatct

SEQ ID NO: 2422364 - DNA, 25 bp, Homo sapien
tcaagcccctgaagttgccacaagg

SEQ ID NO: 2422365 - DNA, 25 bp, Homo sapien
tagcaaaatgctaaccccagttggg

SEQ ID NO: 2422366 - DNA, 25 bp, Homo sapien
gagagtccagggcaagacagtgaca

SEQ ID NO: 2422367 - DNA, 25 bp, Homo sapien
gcaccagtcgggattgcactacaat

SEQ ID NO: 2422368 - DNA, 25 bp, Homo sapien
taaaataagcttgacggcaccagtc

SEQ ID NO: 2422369 - DNA, 25 bp, Homo sapien
tctggcagaactgttagacctggga

SEQ ID NO: 2422370 - DNA, 25 bp, Homo sapien
tctaggctcagcattagtcttcaca

SEQ ID NO: 2422371 - DNA, 25 bp, Homo sapien
aaagtcatctgtctcatgcctgctc

SEQ ID NO: 2422372 - DNA, 25 bp, Homo sapien
tccaaagttgattgcctcaggaagc

SEQ ID NO: 2422373 - DNA, 25 bp, Homo sapien
aaatatacccaaatcagccaagtta

SEQ ID NO: 2422374 - DNA, 25 bp, Homo sapien
gcagtcactgactgccacctcaaag

SEQ ID NO: 2422375 - DNA, 25 bp, Homo sapien
cagtcactgactgccacctcaaaga

SEQ ID NO: 2422376 - DNA, 25 bp, Homo sapien
acccaaatcagccaagttaacactt

SEQ ID NO: 2422377 - DNA, 25 bp, Homo sapien
agccgctggtcccaccatacctgct

SEQ ID NO: 2422378 - DNA, 25 bp, Homo sapien
tcagccgctggtcccaccatacctg

SEQ ID NO: 2422379 - DNA, 25 bp, Homo sapien
ccgctggtcccaccatacctgctcc

SEQ ID NO: 2422380 - DNA, 25 bp, Homo sapien
gccgctggtcccaccatacctgctc

SEQ ID NO: 2422381 - DNA, 25 bp, Homo sapien
tataccccatggaaacacagtagtt

SEQ ID NO: 2422382 - DNA, 25 bp, Homo sapien
agaaaagactgtgatcattattcgg

SEQ ID NO: 2422383 - DNA, 25 bp, Homo sapien
gactgtgatcattattcggttctaa

SEQ ID NO: 2422384 - DNA, 25 bp, Homo sapien
tctaataatataccccatggaaaca

SEQ ID NO: 2422385 - DNA, 25 bp, Homo sapien
taaaatttcagtgacctccctggag

SEQ ID NO: 2422386 - DNA, 25 bp, Homo sapien
tgcaccaggttctctaatcccagga

SEQ ID NO: 2422387 - DNA, 25 bp, Homo sapien
tgcaggcctgcatgaatggtaacgg

SEQ ID NO: 2422388 - DNA, 25 bp, Homo sapien
gaaacatacagggtgtctctgctaa

SEQ ID NO: 2422389 - DNA, 25 bp, Homo sapien
gaagttgtatctccttcatcaagac

SEQ ID NO: 2422390 - DNA, 25 bp, Homo sapien
actgctgtaatgctcagcgttgtgc

SEQ ID NO: 2422391 - DNA, 25 bp, Homo sapien
ccaatgagtccatactgcaggaaga

SEQ ID NO: 2422392 - DNA, 25 bp, Homo sapien
gaagatgaagcatacacactgctgt

SEQ ID NO: 2422393 - DNA, 25 bp, Homo sapien
tcctgaaagatagccctttaggcat

SEQ ID NO: 2422394 - DNA, 25 bp, Homo sapien
aagtgagaacaaaaccataggtgcg

SEQ ID NO: 2422395 - DNA, 25 bp, Homo sapien
tctttattgtccgtttgtgtcctga

SEQ ID NO: 2422396 - DNA, 25 bp, Homo sapien
taggtgcgagaaccatcttccctgg

SEQ ID NO: 2422397 - DNA, 25 bp, Homo sapien
tgtaagctacccgacccggcctcga

SEQ ID NO: 2422398 - DNA, 25 bp, Homo sapien
cggcctcgagcaattttcttattca

SEQ ID NO: 2422399 - DNA, 25 bp, Homo sapien
ttggcccagggactgctaactaacg

SEQ ID NO: 2422400 - DNA, 25 bp, Homo sapien
gacaaccacaacatcgacaatgcat

SEQ ID NO: 2422401 - DNA, 25 bp, Homo sapien
aaccaagaagaagctctaaagtact

SEQ ID NO: 2422402 - DNA, 25 bp, Homo sapien
gagccctgaggcaacatataaaaag

SEQ ID NO: 2422403 - DNA, 25 bp, Homo sapien
gagccctagctatatgcctggtcca

SEQ ID NO: 2422404 - DNA, 25 bp, Homo sapien
tggtaacctggtaacacactctggg

SEQ ID NO: 2422405 - DNA, 25 bp, Homo sapien
caagtagaatacaggcgcagccaac

SEQ ID NO: 2422406 - DNA, 25 bp, Homo sapien
cgcatcttgatcaaaagggttccat

SEQ ID NO: 2422407 - DNA, 25 bp, Homo sapien
ccattctatattctgaggatagtgg

SEQ ID NO: 2422408 - DNA, 25 bp, Homo sapien
caaaggactctggtcaaaattttcg

SEQ ID NO: 2422409 - DNA, 25 bp, Homo sapien
tctgaggatagtgggcgagaacttt

SEQ ID NO: 2422410 - DNA, 25 bp, Homo sapien
agtgcaaaatactagctgttacagc

SEQ ID NO: 2422411 - DNA, 25 bp, Homo sapien
ggaactagaagatcttgcaacaatt

SEQ ID NO: 2422412 - DNA, 25 bp, Homo sapien
gatcgcagaaggacgaaaaagtcac

SEQ ID NO: 2422413 - DNA, 25 bp, Homo sapien
ccttggaatgcaaaacagatcgcag

SEQ ID NO: 2422414 - DNA, 25 bp, Homo sapien
ctagaagagaaattgtcagacatcc

SEQ ID NO: 2422415 - DNA, 25 bp, Homo sapien
gaagagaaattgtcagacatcctta

SEQ ID NO: 2422416 - DNA, 25 bp, Homo sapien
gagcattcatttctagaagagaaat

SEQ ID NO: 2422417 - DNA, 25 bp, Homo sapien
agagaaattgtcagacatccttaag

SEQ ID NO: 2422418 - DNA, 25 bp, Homo sapien
tttgcagcaccttggctcttgccat

SEQ ID NO: 2422419 - DNA, 25 bp, Homo sapien
ctgaagtcgtatttgcagcaccttg

SEQ ID NO: 2422420 - DNA, 25 bp, Homo sapien
aagtcgtatttgcagcaccttggct

SEQ ID NO: 2422421 - DNA, 25 bp, Homo sapien
tatttgcagcaccttggctcttgcc

SEQ ID NO: 2422422 - DNA, 25 bp, Homo sapien
gacgatctgcttctagccattggta

SEQ ID NO: 2422423 - DNA, 25 bp, Homo sapien
cgatctgcttctagccattggtaca

SEQ ID NO: 2422424 - DNA, 25 bp, Homo sapien
tctgcttctagccattggtacaaaa

SEQ ID NO: 2422425 - DNA, 25 bp, Homo sapien
gatctgcttctagccattggtacaa

SEQ ID NO: 2422426 - DNA, 25 bp, Homo sapien
gagaattactggaacccaagaggtg

SEQ ID NO: 2422427 - DNA, 25 bp, Homo sapien
tgagatcatgccactgcacttcagc

SEQ ID NO: 2422428 - DNA, 25 bp, Homo sapien
cagttactcaggaaggccaggcagg

SEQ ID NO: 2422429 - DNA, 25 bp, Homo sapien
gaggttgtagtgatctgagatcatg

SEQ ID NO: 2422430 - DNA, 25 bp, Homo sapien
tatgaagaccacaggttctagccca

SEQ ID NO: 2422431 - DNA, 25 bp, Homo sapien
caggctagagtgtgacgttgagatc

SEQ ID NO: 2422432 - DNA, 25 bp, Homo sapien
cagcaaacttgaaggtctagggtga

SEQ ID NO: 2422433 - DNA, 25 bp, Homo sapien
tgcaaattcatcgactccattaagg

SEQ ID NO: 2422434 - DNA, 25 bp, Homo sapien
catcaatccagtaagctttgagttt

SEQ ID NO: 2422435 - DNA, 25 bp, Homo sapien
ccaccttgcctagacttagttaaga

SEQ ID NO: 2422436 - DNA, 25 bp, Homo sapien
tacatcaacatcaatccagtaagct

SEQ ID NO: 2422437 - DNA, 25 bp, Homo sapien
agccaccttgcctagacttagttaa

SEQ ID NO: 2422438 - DNA, 25 bp, Homo sapien
tgtaatgaattagttatcaacacca

SEQ ID NO: 2422439 - DNA, 25 bp, Homo sapien
gtaatgaattagttatcaacaccac

SEQ ID NO: 2422440 - DNA, 25 bp, Homo sapien
taatgaattagttatcaacaccact

SEQ ID NO: 2422441 - DNA, 25 bp, Homo sapien
gaattcaagatctagagttctctga

SEQ ID NO: 2422442 - DNA, 25 bp, Homo sapien
acgacagttttaggtgctgtgcagc

SEQ ID NO: 2422443 - DNA, 25 bp, Homo sapien
agtttttgatcctagcccatgtttg

SEQ ID NO: 2422444 - DNA, 25 bp, Homo sapien
tgtgcagcttaccaccaatcaaaga

SEQ ID NO: 2422445 - DNA, 25 bp, Homo sapien
tgttagaaacgagactcactgggaa

SEQ ID NO: 2422446 - DNA, 25 bp, Homo sapien
gagtctctctgcgttagtgtgtggc

SEQ ID NO: 2422447 - DNA, 25 bp, Homo sapien
aagaatctccacttgctgtctcaga

SEQ ID NO: 2422448 - DNA, 25 bp, Homo sapien
tataagatgactaagaccctcccag

SEQ ID NO: 2422449 - DNA, 25 bp, Homo sapien
ttcaaacatagggatattattattg

SEQ ID NO: 2422450 - DNA, 25 bp, Homo sapien
caaacatagggatattattattgta

SEQ ID NO: 2422451 - DNA, 25 bp, Homo sapien
atttcaaacatagggatattattat

SEQ ID NO: 2422452 - DNA, 25 bp, Homo sapien
cttatttcaaacatagggatattat

SEQ ID NO: 2422453 - DNA, 25 bp, Homo sapien
tacgtatctacctctatcatttgga

SEQ ID NO: 2422454 - DNA, 25 bp, Homo sapien
cctcttgagggtaaagtacgtatct

SEQ ID NO: 2422455 - DNA, 25 bp, Homo sapien
tgtgttcaagaatctcacccaaaat

SEQ ID NO: 2422456 - DNA, 25 bp, Homo sapien
taccacattagagcagtcaagcctc

SEQ ID NO: 2422457 - DNA, 25 bp, Homo sapien
agcacaatcattgttcatggtaacc

SEQ ID NO: 2422458 - DNA, 25 bp, Homo sapien
aatcattgttcatggtaaccttgaa

SEQ ID NO: 2422459 - DNA, 25 bp, Homo sapien
cacaatcattgttcatggtaacctt

SEQ ID NO: 2422460 - DNA, 25 bp, Homo sapien
cagtagcacaatcattgttcatggt

SEQ ID NO: 2422461 - DNA, 25 bp, Homo sapien
tgagagactacagtatgtcaattcc

SEQ ID NO: 2422462 - DNA, 25 bp, Homo sapien
tgtacttctgtaagaccattccaca

SEQ ID NO: 2422463 - DNA, 25 bp, Homo sapien
cttcccattttgtatgaaggaatga

SEQ ID NO: 2422464 - DNA, 25 bp, Homo sapien
tttgcagatatacttacatggtggg

SEQ ID NO: 2422465 - DNA, 25 bp, Homo sapien
taaacctgcgtcagaaatgttgctg

SEQ ID NO: 2422466 - DNA, 25 bp, Homo sapien
gatacggaagacaaacgatgcacca

SEQ ID NO: 2422467 - DNA, 25 bp, Homo sapien
ggagccctgccctagaattgtttta

SEQ ID NO: 2422468 - DNA, 25 bp, Homo sapien
tgacagactctagctgcagcaactg

SEQ ID NO: 2422469 - DNA, 25 bp, Homo sapien
tatttttgtagactgaactgtacag

SEQ ID NO: 2422470 - DNA, 25 bp, Homo sapien
tatctagcgtcaacaaagaccacca

SEQ ID NO: 2422471 - DNA, 25 bp, Homo sapien
tagaattccactgtacattctgtgg

SEQ ID NO: 2422472 - DNA, 25 bp, Homo sapien
gttagtctgtcctatacaagatgcc

SEQ ID NO: 2422473 - DNA, 25 bp, Homo sapien
tctgatcattataatcccctgcata

SEQ ID NO: 2422474 - DNA, 25 bp, Homo sapien
tgttttccctcagtttaagacatcc

SEQ ID NO: 2422475 - DNA, 25 bp, Homo sapien
accagactccatactattgccaaaa

SEQ ID NO: 2422476 - DNA, 25 bp, Homo sapien
tcatggtgcagagttacattctcag

SEQ ID NO: 2422477 - DNA, 25 bp, Homo sapien
tggtggcacaatccaagtggtgacg

SEQ ID NO: 2422478 - DNA, 25 bp, Homo sapien
ggttcagcccttaagagagtcctgg

SEQ ID NO: 2422479 - DNA, 25 bp, Homo sapien
gacacatcagcttagagacccagtt

SEQ ID NO: 2422480 - DNA, 25 bp, Homo sapien
ttgggcttgccttgtgaccagcaga

SEQ ID NO: 2422481 - DNA, 25 bp, Homo sapien
acatttattgtggaatggttgcaca

SEQ ID NO: 2422482 - DNA, 25 bp, Homo sapien
aaattctatgaggtcaggcacggtg

SEQ ID NO: 2422483 - DNA, 25 bp, Homo sapien
taggaatgtagtactgatgagtgct

SEQ ID NO: 2422484 - DNA, 25 bp, Homo sapien
aaaaacatgtctgtccatgcaaaaa

SEQ ID NO: 2422485 - DNA, 25 bp, Homo sapien
gactctactgtgaattaaggcaaag

SEQ ID NO: 2422486 - DNA, 25 bp, Homo sapien
taagttacacggtatgagagagggt

SEQ ID NO: 2422487 - DNA, 25 bp, Homo sapien
aacattctgggatgactctgggaac

SEQ ID NO: 2422488 - DNA, 25 bp, Homo sapien
tatagttcagtagggaaaacaggca

SEQ ID NO: 2422489 - DNA, 25 bp, Homo sapien
ggtagatttgagacctatacaggag

SEQ ID NO: 2422490 - DNA, 25 bp, Homo sapien
gcagggcttgctaacatatttaggc

SEQ ID NO: 2422491 - DNA, 25 bp, Homo sapien
tgagtgacagatgcctgacctagga

SEQ ID NO: 2422492 - DNA, 25 bp, Homo sapien
gatgtcagagacttccctgagtgac

SEQ ID NO: 2422493 - DNA, 25 bp, Homo sapien
actagaaccattaagactgaggtga

SEQ ID NO: 2422494 - DNA, 25 bp, Homo sapien
ggagccactggtacttagacaccta

SEQ ID NO: 2422495 - DNA, 25 bp, Homo sapien
tatatcttgcacgaaggagccactg

SEQ ID NO: 2422496 - DNA, 25 bp, Homo sapien
gtatagccttccaccattacaaaga

SEQ ID NO: 2422497 - DNA, 25 bp, Homo sapien
ggcaatatcaaatgccgtttctttg

SEQ ID NO: 2422498 - DNA, 25 bp, Homo sapien
caaatgccgtttctttgaagttgtt

SEQ ID NO: 2422499 - DNA, 25 bp, Homo sapien
tatcaaatgccgtttctttgaagtt

SEQ ID NO: 2422500 - DNA, 25 bp, Homo sapien
gcaatatcaaatgccgtttctttga

SEQ ID NO: 2422501 - DNA, 25 bp, Homo sapien
aggaaacattcaactgataccacag

SEQ ID NO: 2422502 - DNA, 25 bp, Homo sapien
ggataaattcctagatactacaacc

SEQ ID NO: 2422503 - DNA, 25 bp, Homo sapien
gatggcttcactacagaagtctacc

SEQ ID NO: 2422504 - DNA, 25 bp, Homo sapien
gacacaactaagtaaaaccagagat

SEQ ID NO: 2422505 - DNA, 25 bp, Homo sapien
tgacccatataataacaaatctagg

SEQ ID NO: 2422506 - DNA, 25 bp, Homo sapien
taggtaagttggctttatgttacag

SEQ ID NO: 2422507 - DNA, 25 bp, Homo sapien
ggctttatgttacagcatatttgtt

SEQ ID NO: 2422508 - DNA, 25 bp, Homo sapien
tatttattaagcacggtgtcgttct

SEQ ID NO: 2422509 - DNA, 25 bp, Homo sapien
tgaccctggggccatgttttttcac

SEQ ID NO: 2422510 - DNA, 25 bp, Homo sapien
ctaggtttctgggaagcactgaccc

SEQ ID NO: 2422511 - DNA, 25 bp, Homo sapien
aggtttctgggaagcactgaccctg

SEQ ID NO: 2422512 - DNA, 25 bp, Homo sapien
cactgaccctggggccatgtttttt

SEQ ID NO: 2422513 - DNA, 25 bp, Homo sapien
gccaaagcagacaatggagtcaaag

SEQ ID NO: 2422514 - DNA, 25 bp, Homo sapien
agccaaagcagacaatggagtcaaa

SEQ ID NO: 2422515 - DNA, 25 bp, Homo sapien
gattccattcctgtgtaaagcagag

SEQ ID NO: 2422516 - DNA, 25 bp, Homo sapien
cagtgcaaaaagcagtcttacgaac

SEQ ID NO: 2422517 - DNA, 25 bp, Homo sapien
tacgaactttgagtttgtaagacca

SEQ ID NO: 2422518 - DNA, 25 bp, Homo sapien
gaagcaggaacacctaagtgaactc

SEQ ID NO: 2422519 - DNA, 25 bp, Homo sapien
tctccgcattctcggctgcaagtgc

SEQ ID NO: 2422520 - DNA, 25 bp, Homo sapien
gggaaactgcaagcattctccgcat

SEQ ID NO: 2422521 - DNA, 25 bp, Homo sapien
tgaaactcacaggtaggttttggca

SEQ ID NO: 2422522 - DNA, 25 bp, Homo sapien
tcttaggttatctcaaggtctttgg

SEQ ID NO: 2422523 - DNA, 25 bp, Homo sapien
tgagattcaaagctactctttcttt

SEQ ID NO: 2422524 - DNA, 25 bp, Homo sapien
gagattcaaagctactctttctttt

SEQ ID NO: 2422525 - DNA, 25 bp, Homo sapien
gaactacggatttaatttctatctc

SEQ ID NO: 2422526 - DNA, 25 bp, Homo sapien
aagttgcaagaactacggatttaat

SEQ ID NO: 2422527 - DNA, 25 bp, Homo sapien
tgatatagtctacccaacatggcag

SEQ ID NO: 2422528 - DNA, 25 bp, Homo sapien
tcttctgcgtgcaatgctgtgcccc

SEQ ID NO: 2422529 - DNA, 25 bp, Homo sapien
cacaacagtcattttagaaggcaca

SEQ ID NO: 2422530 - DNA, 25 bp, Homo sapien
taaaaactgcatgaggccctataca

SEQ ID NO: 2422531 - DNA, 25 bp, Homo sapien
tgccagctcccagacgcggccaaat

SEQ ID NO: 2422532 - DNA, 25 bp, Homo sapien
tgctgggtcccgagcgtccaaaggt

SEQ ID NO: 2422533 - DNA, 25 bp, Homo sapien
acttggccggcaccgcagagcggca

SEQ ID NO: 2422534 - DNA, 25 bp, Homo sapien
gcgcagagggcagagtccgaccggt

SEQ ID NO: 2422535 - DNA, 25 bp, Homo sapien
ggccgcctccgagtgcggctgcaag

SEQ ID NO: 2422536 - DNA, 25 bp, Homo sapien
tccgagtgcggctgcaagcgaaggg

SEQ ID NO: 2422537 - DNA, 25 bp, Homo sapien
cgcctccgagtgcggctgcaagcga

SEQ ID NO: 2422538 - DNA, 25 bp, Homo sapien
gctgcaagcgaaggggccggcgcgc

SEQ ID NO: 2422539 - DNA, 25 bp, Homo sapien
acagcacgaagtagtgcgcgaagcg

SEQ ID NO: 2422540 - DNA, 25 bp, Homo sapien
gctccagcccgctgtccgcgtcgat

SEQ ID NO: 2422541 - DNA, 25 bp, Homo sapien
gcgtcgatcccgcacagcacgaagt

SEQ ID NO: 2422542 - DNA, 25 bp, Homo sapien
gctcgtcaggctccagcccgctgtc

SEQ ID NO: 2422543 - DNA, 25 bp, Homo sapien
accaccgctccggctgtggtctgtg

SEQ ID NO: 2422544 - DNA, 25 bp, Homo sapien
ctagggcgacactggcgcgcccatg

SEQ ID NO: 2422545 - DNA, 25 bp, Homo sapien
cgggaaggctttctgcggaggctgc

SEQ ID NO: 2422546 - DNA, 25 bp, Homo sapien
ggctgtggtctgtgcgcccgcccta

SEQ ID NO: 2422547 - DNA, 25 bp, Homo sapien
aagacaaaagacgtatacgatctga

SEQ ID NO: 2422548 - DNA, 25 bp, Homo sapien
cagaattgttcccttccacggaaat

SEQ ID NO: 2422549 - DNA, 25 bp, Homo sapien
taaaagacaaaagacgtatacgatc

SEQ ID NO: 2422550 - DNA, 25 bp, Homo sapien
gacaaaagacgtatacgatctgaag

SEQ ID NO: 2422551 - DNA, 25 bp, Homo sapien
aaagcatagggatgccatatgggac

SEQ ID NO: 2422552 - DNA, 25 bp, Homo sapien
tgaaagcatagggatgccatatggg

SEQ ID NO: 2422553 - DNA, 25 bp, Homo sapien
atttttgaaagcatagggatgccat

SEQ ID NO: 2422554 - DNA, 25 bp, Homo sapien
tttgaaagcatagggatgccatatg

SEQ ID NO: 2422555 - DNA, 25 bp, Homo sapien
tcttgaaaccaactccatgaatgcg

SEQ ID NO: 2422556 - DNA, 25 bp, Homo sapien
tccagatctcgctgagtgcccgagg

SEQ ID NO: 2422557 - DNA, 25 bp, Homo sapien
tcagtgtgcacatccgtagttccca

SEQ ID NO: 2422558 - DNA, 25 bp, Homo sapien
gcagaactgtaattcttctcaccac

SEQ ID NO: 2422559 - DNA, 25 bp, Homo sapien
ggcataactactctaaattgtgcaa

SEQ ID NO: 2422560 - DNA, 25 bp, Homo sapien
gtttgtggaaattttctctacggca

SEQ ID NO: 2422561 - DNA, 25 bp, Homo sapien
tctacatttcctagtttgtggaaat

SEQ ID NO: 2422562 - DNA, 25 bp, Homo sapien
gaaattttctctacggcataactac

SEQ ID NO: 2422563 - DNA, 25 bp, Homo sapien
tccaggcacagctagtacaacattc

SEQ ID NO: 2422564 - DNA, 25 bp, Homo sapien
ggccaccccataggatgaatctttg

SEQ ID NO: 2422565 - DNA, 25 bp, Homo sapien
aatatgtttgggtcactcataggag

SEQ ID NO: 2422566 - DNA, 25 bp, Homo sapien
cactcataggagtgaaacactgtca

SEQ ID NO: 2422567 - DNA, 25 bp, Homo sapien
agagccctcaggattcattctcagg

SEQ ID NO: 2422568 - DNA, 25 bp, Homo sapien
gcttgagacatgtgcagagacacct

SEQ ID NO: 2422569 - DNA, 25 bp, Homo sapien
gaaaagatgctgcaagctacctcag

SEQ ID NO: 2422570 - DNA, 25 bp, Homo sapien
ggagaaccagagactatcaccatca

SEQ ID NO: 2422571 - DNA, 25 bp, Homo sapien
tatgcttctttggactgaataggtg

SEQ ID NO: 2422572 - DNA, 25 bp, Homo sapien
cagattttgttcgtctccgttccgg

SEQ ID NO: 2422573 - DNA, 25 bp, Homo sapien
aaagtgtgtaaacgtagggccagat

SEQ ID NO: 2422574 - DNA, 25 bp, Homo sapien
gaaaattggtggagcactcctcggc

SEQ ID NO: 2422575 - DNA, 25 bp, Homo sapien
cagtgacgtcatcaataccatgtac

SEQ ID NO: 2422576 - DNA, 25 bp, Homo sapien
ggttcaccagtgacgtcatcaatac

SEQ ID NO: 2422577 - DNA, 25 bp, Homo sapien
taatggttcaccagtgacgtcatca

SEQ ID NO: 2422578 - DNA, 25 bp, Homo sapien
ctggactaatggttcaccagtgacg

SEQ ID NO: 2422579 - DNA, 25 bp, Homo sapien
tcaaactgatcactagatccacttc

SEQ ID NO: 2422580 - DNA, 25 bp, Homo sapien
caaactgatcactagatccacttca

SEQ ID NO: 2422581 - DNA, 25 bp, Homo sapien
ttcaaactgatcactagatccactt

SEQ ID NO: 2422582 - DNA, 25 bp, Homo sapien
ccgggcggcccgaggatgaccgcgc

SEQ ID NO: 2422583 - DNA, 25 bp, Homo sapien
cgggcggcccgaggatgaccgcgcg

SEQ ID NO: 2422584 - DNA, 25 bp, Homo sapien
ggaggggggcggtcaaacgcgcagc

SEQ ID NO: 2422585 - DNA, 25 bp, Homo sapien
accctccgctctcactgggactcgc

SEQ ID NO: 2422586 - DNA, 25 bp, Homo sapien
tttctcggccccctacctctggcac

SEQ ID NO: 2422587 - DNA, 25 bp, Homo sapien
ggggcggtcaaacgcgcagccccga

SEQ ID NO: 2422588 - DNA, 25 bp, Homo sapien
tgtgatgctgcccattttaacacca

SEQ ID NO: 2422589 - DNA, 25 bp, Homo sapien
caagagtcacgataatgagtttccc

SEQ ID NO: 2422590 - DNA, 25 bp, Homo sapien
ggtcaaatcctgctctctgttgggt

SEQ ID NO: 2422591 - DNA, 25 bp, Homo sapien
cttatcagtccccagtttatggagc

SEQ ID NO: 2422592 - DNA, 25 bp, Homo sapien
cgcgcccggccgtcgtgggagcttt

SEQ ID NO: 2422593 - DNA, 25 bp, Homo sapien
tctcagcaatattgaaagactaata

SEQ ID NO: 2422594 - DNA, 25 bp, Homo sapien
cagtcttatgaatagtctcagcaat

SEQ ID NO: 2422595 - DNA, 25 bp, Homo sapien
ttcagtcttatgaatagtctcagca

SEQ ID NO: 2422596 - DNA, 25 bp, Homo sapien
tgaggaaagacaccacctgggaagt

SEQ ID NO: 2422597 - DNA, 25 bp, Homo sapien
gaagtgcaactattctgagagcccc

SEQ ID NO: 2422598 - DNA, 25 bp, Homo sapien
gtaacatctacttcccacttcggcg

SEQ ID NO: 2422599 - DNA, 25 bp, Homo sapien
tcattacccgacagaaagccaggca

SEQ ID NO: 2422600 - DNA, 25 bp, Homo sapien
tcccagttttagttgtcaggcggct

SEQ ID NO: 2422601 - DNA, 25 bp, Homo sapien
taaatcaaagcttgtctgcccagaa

SEQ ID NO: 2422602 - DNA, 25 bp, Homo sapien
gactgtgagacaaataacacccatt

SEQ ID NO: 2422603 - DNA, 25 bp, Homo sapien
aaatcatcaactcgtacttggtagc

SEQ ID NO: 2422604 - DNA, 25 bp, Homo sapien
ccaggcattgtaggtccctgtggct

SEQ ID NO: 2422605 - DNA, 25 bp, Homo sapien
caggcattgtaggtccctgtggctt

SEQ ID NO: 2422606 - DNA, 25 bp, Homo sapien
agcccaggcattgtaggtccctgtg

SEQ ID NO: 2422607 - DNA, 25 bp, Homo sapien
tcaagcccaggcattgtaggtccct

SEQ ID NO: 2422608 - DNA, 25 bp, Homo sapien
acttgaggtaccctctttgtcctgg

SEQ ID NO: 2422609 - DNA, 25 bp, Homo sapien
accctgcaacccgtaatggtccttg

SEQ ID NO: 2422610 - DNA, 25 bp, Homo sapien
ccttggcttgatcaaagagcacctt

SEQ ID NO: 2422611 - DNA, 25 bp, Homo sapien
gagcaccttgtacttgaggtaccct

SEQ ID NO: 2422612 - DNA, 25 bp, Homo sapien
catccaggatggagttgctttgccc

SEQ ID NO: 2422613 - DNA, 25 bp, Homo sapien
aaacctgcggccaaggaagctgaga

SEQ ID NO: 2422614 - DNA, 25 bp, Homo sapien
cagggcttatataccccaggagagg

SEQ ID NO: 2422615 - DNA, 25 bp, Homo sapien
tgaaagagttaaggacgtgccaccc

SEQ ID NO: 2422616 - DNA, 25 bp, Homo sapien
gagaagcagctattatcaacagaac

SEQ ID NO: 2422617 - DNA, 25 bp, Homo sapien
tgaaatccagttgcggcttttgacc

SEQ ID NO: 2422618 - DNA, 25 bp, Homo sapien
ggagctggaagctttttggaccctg

SEQ ID NO: 2422619 - DNA, 25 bp, Homo sapien
tgcaggctctgcgaagcagtggtct

SEQ ID NO: 2422620 - DNA, 25 bp, Homo sapien
tattgccatgctcaatcaagcccaa

SEQ ID NO: 2422621 - DNA, 25 bp, Homo sapien
tattttataaaggagtctcagttct

SEQ ID NO: 2422622 - DNA, 25 bp, Homo sapien
tcaagcccaagtctcgtttccctgt

SEQ ID NO: 2422623 - DNA, 25 bp, Homo sapien
ttttcaggatatccagtcatgtatt

SEQ ID NO: 2422624 - DNA, 25 bp, Homo sapien
gaatttggaacaagataagtgggac

SEQ ID NO: 2422625 - DNA, 25 bp, Homo sapien
ccttgttgttcttggcgatatgttt

SEQ ID NO: 2422626 - DNA, 25 bp, Homo sapien
gaacagactgaatccttttcctatt

SEQ ID NO: 2422627 - DNA, 25 bp, Homo sapien
ggcgatatgttttatgatgaagacc

SEQ ID NO: 2422628 - DNA, 25 bp, Homo sapien
tagtcgaggacaactgtgatgtaac

SEQ ID NO: 2422629 - DNA, 25 bp, Homo sapien
gccatactcaatggtggcagcattt

SEQ ID NO: 2422630 - DNA, 25 bp, Homo sapien
ccagcctgacgatgttttttacttc

SEQ ID NO: 2422631 - DNA, 25 bp, Homo sapien
gaggcttaatcattgggcactgcag

SEQ ID NO: 2422632 - DNA, 25 bp, Homo sapien
tctgctccctgtaagctatggttct

SEQ ID NO: 2422633 - DNA, 25 bp, Homo sapien
gattcttaagtccatccacatggag

SEQ ID NO: 2422634 - DNA, 25 bp, Homo sapien
aaatgttcctattggtactggctcc

SEQ ID NO: 2422635 - DNA, 25 bp, Homo sapien
tccagcaactcaggaattacagcat

SEQ ID NO: 2422636 - DNA, 25 bp, Homo sapien
gagttcagcaatgcgaccgtgctca

SEQ ID NO: 2422637 - DNA, 25 bp, Homo sapien
agcaatgcgaccgtgctcactgcag

SEQ ID NO: 2422638 - DNA, 25 bp, Homo sapien
tcagcaatgcgaccgtgctcactgc

SEQ ID NO: 2422639 - DNA, 25 bp, Homo sapien
tggagttcagcaatgcgaccgtgct

SEQ ID NO: 2422640 - DNA, 25 bp, Homo sapien
aaatctcaagactggctcatggcaa

SEQ ID NO: 2422641 - DNA, 25 bp, Homo sapien
tacatatgcaccacctttgcagtgg

SEQ ID NO: 2422642 - DNA, 25 bp, Homo sapien
taaatactccaagaaggtaagagcc

SEQ ID NO: 2422643 - DNA, 25 bp, Homo sapien
tcatagttagaacaggccttaccca

SEQ ID NO: 2422644 - DNA, 25 bp, Homo sapien
tactaattgctccaacacttctcgg

SEQ ID NO: 2422645 - DNA, 25 bp, Homo sapien
tgctttagtttgtttgggcctacta

SEQ ID NO: 2422646 - DNA, 25 bp, Homo sapien
tttgtttgggcctactaattgctcc

SEQ ID NO: 2422647 - DNA, 25 bp, Homo sapien
tgctccaacacttctcgggaatgat

SEQ ID NO: 2422648 - DNA, 25 bp, Homo sapien
cctcatgtctaactggaggtgatgt

SEQ ID NO: 2422649 - DNA, 25 bp, Homo sapien
ggattaaaggaggtgatctataaag

SEQ ID NO: 2422650 - DNA, 25 bp, Homo sapien
gcacaatatacaactaactcactaa

SEQ ID NO: 2422651 - DNA, 25 bp, Homo sapien
ttcctcatgtctaactggaggtgat

SEQ ID NO: 2422652 - DNA, 25 bp, Homo sapien
tactgtgttaatgtcctattgctgc

SEQ ID NO: 2422653 - DNA, 25 bp, Homo sapien
cagccactagaagaaaggattacat

SEQ ID NO: 2422654 - DNA, 25 bp, Homo sapien
caggtctgcgttactttttagagga

SEQ ID NO: 2422655 - DNA, 25 bp, Homo sapien
tacataccatgaccaactgagattt

SEQ ID NO: 2422656 - DNA, 25 bp, Homo sapien
ccagaatttggcccccccagctaat

SEQ ID NO: 2422657 - DNA, 25 bp, Homo sapien
agccagaatttggcccccccagcta

SEQ ID NO: 2422658 - DNA, 25 bp, Homo sapien
cagaatttggcccccccagctaatt

SEQ ID NO: 2422659 - DNA, 25 bp, Homo sapien
gccagaatttggcccccccagctaa

SEQ ID NO: 2422660 - DNA, 25 bp, Homo sapien
tggttcccaaagtgtagtctgcata

SEQ ID NO: 2422661 - DNA, 25 bp, Homo sapien
ggaagcctcgtagctgccactgtga

SEQ ID NO: 2422662 - DNA, 25 bp, Homo sapien
tgcatattctgtagtctgagaccct

SEQ ID NO: 2422663 - DNA, 25 bp, Homo sapien
tgatcctcatgcgtcagccatcaga

SEQ ID NO: 2422664 - DNA, 25 bp, Homo sapien
gaaaatctgattaaccactccagta

SEQ ID NO: 2422665 - DNA, 25 bp, Homo sapien
tttagtgtgattaagctcattgcac

SEQ ID NO: 2422666 - DNA, 25 bp, Homo sapien
taatttatctcaaaagactccttgg

SEQ ID NO: 2422667 - DNA, 25 bp, Homo sapien
ggttactagtgatctccataatgac

SEQ ID NO: 2422668 - DNA, 25 bp, Homo sapien
cagatgtcactgatacccagataca

SEQ ID NO: 2422669 - DNA, 25 bp, Homo sapien
atacccagatacaatctatggttac

SEQ ID NO: 2422670 - DNA, 25 bp, Homo sapien
tacccagatacaatctatggttaca

SEQ ID NO: 2422671 - DNA, 25 bp, Homo sapien
gcttcgacagccccatcagtcagat

SEQ ID NO: 2422672 - DNA, 25 bp, Homo sapien
ggcatccatggaagagtaatatacg

SEQ ID NO: 2422673 - DNA, 25 bp, Homo sapien
tttgaggacagtaagtaaggacagc

SEQ ID NO: 2422674 - DNA, 25 bp, Homo sapien
gagtaatatacgtatttgaggacag

SEQ ID NO: 2422675 - DNA, 25 bp, Homo sapien
ctctaatttcttcgcacaaggtcca

SEQ ID NO: 2422676 - DNA, 25 bp, Homo sapien
ggtccactaacaagtgcaatcacac

SEQ ID NO: 2422677 - DNA, 25 bp, Homo sapien
ttcgcacaaggtccactaacaagtg

SEQ ID NO: 2422678 - DNA, 25 bp, Homo sapien
taatttcttcgcacaaggtccacta

SEQ ID NO: 2422679 - DNA, 25 bp, Homo sapien
ccttcgtcagtgagattgcagcatc

SEQ ID NO: 2422680 - DNA, 25 bp, Homo sapien
taagcagccacctaaatcgatgatc

SEQ ID NO: 2422681 - DNA, 25 bp, Homo sapien
gagtgcaagagcaacgactccttcg

SEQ ID NO: 2422682 - DNA, 25 bp, Homo sapien
gagtagctgaaaagtcgacacactg

SEQ ID NO: 2422683 - DNA, 25 bp, Homo sapien
tctgaagttacagaaactcggttcc

SEQ ID NO: 2422684 - DNA, 25 bp, Homo sapien
tacagttagacaggtgcaggagagc

SEQ ID NO: 2422685 - DNA, 25 bp, Homo sapien
agagcagcatctgatatatcgcagc

SEQ ID NO: 2422686 - DNA, 25 bp, Homo sapien
cagctccgtagatctagagtttgga

SEQ ID NO: 2422687 - DNA, 25 bp, Homo sapien
gaagcatatccatgtgcagacagac

SEQ ID NO: 2422688 - DNA, 25 bp, Homo sapien
agtccttcttgggacacaaagcact

SEQ ID NO: 2422689 - DNA, 25 bp, Homo sapien
cagacaagtggctgatgtaaaatac

SEQ ID NO: 2422690 - DNA, 25 bp, Homo sapien
aatacagaagcatatccatgtgcag

SEQ ID NO: 2422691 - DNA, 25 bp, Homo sapien
gggagagtacccagaaaaatcatgt

SEQ ID NO: 2422692 - DNA, 25 bp, Homo sapien
catgctctagcatgtaggctgggca

SEQ ID NO: 2422693 - DNA, 25 bp, Homo sapien
gagccaagcaaactacaccactaag

SEQ ID NO: 2422694 - DNA, 25 bp, Homo sapien
taaagtcacagggttagtcacatgc

SEQ ID NO: 2422695 - DNA, 25 bp, Homo sapien
gtctgtcctatgggagtgtctgtcc

SEQ ID NO: 2422696 - DNA, 25 bp, Homo sapien
agcaaggaatattaagaccctaggg

SEQ ID NO: 2422697 - DNA, 25 bp, Homo sapien
ctctcgaaccgttttctgttaagat

SEQ ID NO: 2422698 - DNA, 25 bp, Homo sapien
gctctcgaaccgttttctgttaaga

SEQ ID NO: 2422699 - DNA, 25 bp, Homo sapien
ggtggtgtacacctatagtcccaac

SEQ ID NO: 2422700 - DNA, 25 bp, Homo sapien
ggtgtacacctatagtcccaactac

SEQ ID NO: 2422701 - DNA, 25 bp, Homo sapien
actcaggaggctgaagagggatcac

SEQ ID NO: 2422702 - DNA, 25 bp, Homo sapien
tgtacacctatagtcccaactactc

SEQ ID NO: 2422703 - DNA, 25 bp, Homo sapien
ctaagtccaggcagcggaggttgca

SEQ ID NO: 2422704 - DNA, 25 bp, Homo sapien
actccagcctgggcaacggagcatg

SEQ ID NO: 2422705 - DNA, 25 bp, Homo sapien
ccagcctgggcaacggagcatgacc

SEQ ID NO: 2422706 - DNA, 25 bp, Homo sapien
gtgagctgagattgcaccactgtac

SEQ ID NO: 2422707 - DNA, 25 bp, Homo sapien
ttgaatctgttatctgtccctgcat

SEQ ID NO: 2422708 - DNA, 25 bp, Homo sapien
gtctgtcttttatgttgggaggcaa

SEQ ID NO: 2422709 - DNA, 25 bp, Homo sapien
ttgggaggcaaaggcttaatgtctg

SEQ ID NO: 2422710 - DNA, 25 bp, Homo sapien
cttttatgttgggaggcaaaggctt

SEQ ID NO: 2422711 - DNA, 25 bp, Homo sapien
ggcttaatgtctgtgagatatctgg

SEQ ID NO: 2422712 - DNA, 25 bp, Homo sapien
catgagccttgtgctcggccttaat

SEQ ID NO: 2422713 - DNA, 25 bp, Homo sapien
gcatgagccttgtgctcggccttaa

SEQ ID NO: 2422714 - DNA, 25 bp, Homo sapien
aggcatgagccttgtgctcggcctt

SEQ ID NO: 2422715 - DNA, 25 bp, Homo sapien
ggcatgagccttgtgctcggcctta

SEQ ID NO: 2422716 - DNA, 25 bp, Homo sapien
caccaacaacattgtgcaattttat

SEQ ID NO: 2422717 - DNA, 25 bp, Homo sapien
accaacaacattgtgcaattttatt

SEQ ID NO: 2422718 - DNA, 25 bp, Homo sapien
cttcaacgtgcttatctttctctgc

SEQ ID NO: 2422719 - DNA, 25 bp, Homo sapien
ccgcatttcttcaacgtgcttatct

SEQ ID NO: 2422720 - DNA, 25 bp, Homo sapien
tggtagtcatttgcgccttcctgtt

SEQ ID NO: 2422721 - DNA, 25 bp, Homo sapien
ccagtgtggtagtcatttgcgcctt

SEQ ID NO: 2422722 - DNA, 25 bp, Homo sapien
tgaagcttctgatttattctgaatt

SEQ ID NO: 2422723 - DNA, 25 bp, Homo sapien
gaagcttctgatttattctgaattt

SEQ ID NO: 2422724 - DNA, 25 bp, Homo sapien
ggaaataaggaactctgggatggat

SEQ ID NO: 2422725 - DNA, 25 bp, Homo sapien
aaataaggaactctgggatggattc

SEQ ID NO: 2422726 - DNA, 25 bp, Homo sapien
aataaggaactctgggatggattct

SEQ ID NO: 2422727 - DNA, 25 bp, Homo sapien
aggggaaataaggaactctgggatg

SEQ ID NO: 2422728 - DNA, 25 bp, Homo sapien
tcgcccatcttctgcgtcaatcttg

SEQ ID NO: 2422729 - DNA, 25 bp, Homo sapien
cttggaagtgacctcccaatttctt

SEQ ID NO: 2422730 - DNA, 25 bp, Homo sapien
gttcccatttagccatcttggaagt

SEQ ID NO: 2422731 - DNA, 25 bp, Homo sapien
catcttggaagtgacctcccaattt

SEQ ID NO: 2422732 - DNA, 25 bp, Homo sapien
gaaaaccttgcacttttgagtcaga

SEQ ID NO: 2422733 - DNA, 25 bp, Homo sapien
tttattcaagtggttgcatgcggcc

SEQ ID NO: 2422734 - DNA, 25 bp, Homo sapien
gcatgcggccacagttcatttcgtt

SEQ ID NO: 2422735 - DNA, 25 bp, Homo sapien
caattccagttggaggtatcaaccc

SEQ ID NO: 2422736 - DNA, 25 bp, Homo sapien
gtggagtaaaatgtagcggtttcca

SEQ ID NO: 2422737 - DNA, 25 bp, Homo sapien
ctgggcatatgggtggccgaaatta

SEQ ID NO: 2422738 - DNA, 25 bp, Homo sapien
ccgaaattatcaaggaccgtggagt

SEQ ID NO: 2422739 - DNA, 25 bp, Homo sapien
tatatctggctcctgcgacagtctg

SEQ ID NO: 2422740 - DNA, 25 bp, Homo sapien
aggcttttagctgctaagagagagg

SEQ ID NO: 2422741 - DNA, 25 bp, Homo sapien
agctgtcaaggctgacggaggaatg

SEQ ID NO: 2422742 - DNA, 25 bp, Homo sapien
ggctgacggaggaatggacgctcat

SEQ ID NO: 2422743 - DNA, 25 bp, Homo sapien
ggcttttagctgctaagagagaggc

SEQ ID NO: 2422744 - DNA, 25 bp, Homo sapien
cgccgtgggcgaggcatcgctgcag

SEQ ID NO: 2422745 - DNA, 25 bp, Homo sapien
catcgctgcagcgtctgaagcctct

SEQ ID NO: 2422746 - DNA, 25 bp, Homo sapien
tgaagcctcttccgcggtcccaggg

SEQ ID NO: 2422747 - DNA, 25 bp, Homo sapien
cagccagggaccgtccgccaactcc

SEQ ID NO: 2422748 - DNA, 25 bp, Homo sapien
cgcgcgacgcgtaggtttttgtgac

SEQ ID NO: 2422749 - DNA, 25 bp, Homo sapien
gcgcgacgcgtaggtttttgtgacg

SEQ ID NO: 2422750 - DNA, 25 bp, Homo sapien
cgcgacgcgtaggtttttgtgacgt

SEQ ID NO: 2422751 - DNA, 25 bp, Homo sapien
ccacgcttcggactccacaaggaaa

SEQ ID NO: 2422752 - DNA, 25 bp, Homo sapien
gtggccacgcttcggactccacaag

SEQ ID NO: 2422753 - DNA, 25 bp, Homo sapien
caaggaaagaagagagccccctttg

SEQ ID NO: 2422754 - DNA, 25 bp, Homo sapien
ccctttggggcggagccactgaggg

SEQ ID NO: 2422755 - DNA, 25 bp, Homo sapien
cattgcatctgcaggacctttgggc

SEQ ID NO: 2422756 - DNA, 25 bp, Homo sapien
cttcagggaccgagaaggaggtgat

SEQ ID NO: 2422757 - DNA, 25 bp, Homo sapien
agcccttcagggaccgagaaggagg

SEQ ID NO: 2422758 - DNA, 25 bp, Homo sapien
tgcaggacctttgggcctggatctg

SEQ ID NO: 2422759 - DNA, 25 bp, Homo sapien
tgaaatacgcatgtgacagctggaa

SEQ ID NO: 2422760 - DNA, 25 bp, Homo sapien
atacgcatgtgacagctggaattgg

SEQ ID NO: 2422761 - DNA, 25 bp, Homo sapien
tttacttgtgaaatacgcatgtgac

SEQ ID NO: 2422762 - DNA, 25 bp, Homo sapien
acttgtgaaatacgcatgtgacagc

SEQ ID NO: 2422763 - DNA, 25 bp, Homo sapien
agtgttgtcttgagcatgtcactta

SEQ ID NO: 2422764 - DNA, 25 bp, Homo sapien
gtgttgtcttgagcatgtcacttaa

SEQ ID NO: 2422765 - DNA, 25 bp, Homo sapien
gttgtcttgagcatgtcacttaacc

SEQ ID NO: 2422766 - DNA, 25 bp, Homo sapien
tgttgtcttgagcatgtcacttaac

SEQ ID NO: 2422767 - DNA, 25 bp, Homo sapien
ggcaaagactggagatctaccttct

SEQ ID NO: 2422768 - DNA, 25 bp, Homo sapien
taataagataggcacaactgtctga

SEQ ID NO: 2422769 - DNA, 25 bp, Homo sapien
ctgatccaggtaggcacgagttggc

SEQ ID NO: 2422770 - DNA, 25 bp, Homo sapien
tggagatctaccttctgctttgatg

SEQ ID NO: 2422771 - DNA, 25 bp, Homo sapien
agtcacggtcactgttcaagctggt

SEQ ID NO: 2422772 - DNA, 25 bp, Homo sapien
tcagaggaccggttgagtcagttcc

SEQ ID NO: 2422773 - DNA, 25 bp, Homo sapien
tgtcagttgattcacctgaaggcaa

SEQ ID NO: 2422774 - DNA, 25 bp, Homo sapien
gcaggtagggcattaggaaacagat

SEQ ID NO: 2422775 - DNA, 25 bp, Homo sapien
ggactcccacagattatgatgaagc

SEQ ID NO: 2422776 - DNA, 25 bp, Homo sapien
cccacagattatgatgaagccatca

SEQ ID NO: 2422777 - DNA, 25 bp, Homo sapien
caagtttggtacagaggactcccac

SEQ ID NO: 2422778 - DNA, 25 bp, Homo sapien
tcacaaactggattaccaaacacac

SEQ ID NO: 2422779 - DNA, 25 bp, Homo sapien
ttgtatgcagtcaaactgttgctta

SEQ ID NO: 2422780 - DNA, 25 bp, Homo sapien
gatgtgacccaggaattttgtatgc

SEQ ID NO: 2422781 - DNA, 25 bp, Homo sapien
gtatgcagtcaaactgttgcttaaa

SEQ ID NO: 2422782 - DNA, 25 bp, Homo sapien
acccaggaattttgtatgcagtcaa

SEQ ID NO: 2422783 - DNA, 25 bp, Homo sapien
cagacaaaaatcgatttactgagac

SEQ ID NO: 2422784 - DNA, 25 bp, Homo sapien
gagacctcagcattgcagtagagaa

SEQ ID NO: 2422785 - DNA, 25 bp, Homo sapien
aaaatcgatttactgagacctcagc

SEQ ID NO: 2422786 - DNA, 25 bp, Homo sapien
tgcacagacaaaaatcgatttactg

SEQ ID NO: 2422787 - DNA, 25 bp, Homo sapien
gtaagccaggggcaatctgacctgc

SEQ ID NO: 2422788 - DNA, 25 bp, Homo sapien
gggcaatctgacctgctaacattcc

SEQ ID NO: 2422789 - DNA, 25 bp, Homo sapien
caatctgacctgctaacattccaag

SEQ ID NO: 2422790 - DNA, 25 bp, Homo sapien
ctgacctgctaacattccaagttta

SEQ ID NO: 2422791 - DNA, 25 bp, Homo sapien
aagtcaactggaagatgtggccaag

SEQ ID NO: 2422792 - DNA, 25 bp, Homo sapien
tcaactggaagatgtggccaagtgg

SEQ ID NO: 2422793 - DNA, 25 bp, Homo sapien
aataaagtcaactggaagatgtggc

SEQ ID NO: 2422794 - DNA, 25 bp, Homo sapien
taaagtcaactggaagatgtggcca

SEQ ID NO: 2422795 - DNA, 25 bp, Homo sapien
ccgctgtaccacattgatagcctga

SEQ ID NO: 2422796 - DNA, 25 bp, Homo sapien
tggacaaaggtggtgagttgatgaa

SEQ ID NO: 2422797 - DNA, 25 bp, Homo sapien
tagcctgaggtttgaccaggtcatg

SEQ ID NO: 2422798 - DNA, 25 bp, Homo sapien
gtactggagccgctgtaccacattg

SEQ ID NO: 2422799 - DNA, 25 bp, Homo sapien
agttcacaccattctactgccttgg

SEQ ID NO: 2422800 - DNA, 25 bp, Homo sapien
catgatctgcctgcctcggcctccc

SEQ ID NO: 2422801 - DNA, 25 bp, Homo sapien
gtgcgatcttggctcactacaagct

SEQ ID NO: 2422802 - DNA, 25 bp, Homo sapien
ccgcctcatgagttcacaccattct

SEQ ID NO: 2422803 - DNA, 25 bp, Homo sapien
cctaacaccatcttaaccggcagag

SEQ ID NO: 2422804 - DNA, 25 bp, Homo sapien
gaatattagttaacagatgatgctg

SEQ ID NO: 2422805 - DNA, 25 bp, Homo sapien
cacgcatccgttttgcatattaaca

SEQ ID NO: 2422806 - DNA, 25 bp, Homo sapien
gaagcaagaaatatcacgcatccgt

SEQ ID NO: 2422807 - DNA, 25 bp, Homo sapien
gggcatgatggtgactctcttagcg

SEQ ID NO: 2422808 - DNA, 25 bp, Homo sapien
gactctcttagcgtggatggcacac

SEQ ID NO: 2422809 - DNA, 25 bp, Homo sapien
atgatggtgactctcttagcgtgga

SEQ ID NO: 2422810 - DNA, 25 bp, Homo sapien
tctctccccgtatccggcgagccaa

SEQ ID NO: 2422811 - DNA, 25 bp, Homo sapien
tcggtcgacttctgataacgacgaa

SEQ ID NO: 2422812 - DNA, 25 bp, Homo sapien
tcaggtcagtgttgaaatcctgcgc

SEQ ID NO: 2422813 - DNA, 25 bp, Homo sapien
ggctgcgctctgaaacctcaggtca

SEQ ID NO: 2422814 - DNA, 25 bp, Homo sapien
cgacggctgcgctctgaaacctcag

SEQ ID NO: 2422815 - DNA, 25 bp, Homo sapien
gcgccacggtcccaggcctgtagcg

SEQ ID NO: 2422816 - DNA, 25 bp, Homo sapien
caggcctgtagcgatgaggcttcac

SEQ ID NO: 2422817 - DNA, 25 bp, Homo sapien
ctcgaagcgccacggtcccaggcct

SEQ ID NO: 2422818 - DNA, 25 bp, Homo sapien
cggtcccaggcctgtagcgatgagg

SEQ ID NO: 2422819 - DNA, 25 bp, Homo sapien
caggtagagggggtgcttttcctgg

SEQ ID NO: 2422820 - DNA, 25 bp, Homo sapien
caccggtggatttacgagcagtctg

SEQ ID NO: 2422821 - DNA, 25 bp, Homo sapien
tttcctggcagctttcgtggccagc

SEQ ID NO: 2422822 - DNA, 25 bp, Homo sapien
ggcagctttcgtggccagctgtttg

SEQ ID NO: 2422823 - DNA, 25 bp, Homo sapien
gtcgcgagcgaagaaccgacactgg

SEQ ID NO: 2422824 - DNA, 25 bp, Homo sapien
cgaagaaccgacactggtccaacga

SEQ ID NO: 2422825 - DNA, 25 bp, Homo sapien
gagcgaagaaccgacactggtccaa

SEQ ID NO: 2422826 - DNA, 25 bp, Homo sapien
agccgcagtcgcgagcgaagaaccg

SEQ ID NO: 2422827 - DNA, 25 bp, Homo sapien
catgctaatcttcttcgtaacatcc

SEQ ID NO: 2422828 - DNA, 25 bp, Homo sapien
gctaatcttcttcgtaacatccaat

SEQ ID NO: 2422829 - DNA, 25 bp, Homo sapien
ggagcacgaatttccacgtcagcat

SEQ ID NO: 2422830 - DNA, 25 bp, Homo sapien
aaatatggagcacgaatttccacgt

SEQ ID NO: 2422831 - DNA, 25 bp, Homo sapien
tttttttcaagagtaccaatgtgtc

SEQ ID NO: 2422832 - DNA, 25 bp, Homo sapien
ttttttcaagagtaccaatgtgtcc

SEQ ID NO: 2422833 - DNA, 25 bp, Homo sapien
cattcgccttgggtacacattctca

SEQ ID NO: 2422834 - DNA, 25 bp, Homo sapien
ttttaaatctacctgcaacctggca

SEQ ID NO: 2422835 - DNA, 25 bp, Homo sapien
ctccggcattaatatcaacacagaa

SEQ ID NO: 2422836 - DNA, 25 bp, Homo sapien
tcctctgcacatcagaactttggtc

SEQ ID NO: 2422837 - DNA, 25 bp, Homo sapien
ttttaaactgtcaacatcatgaaag

SEQ ID NO: 2422838 - DNA, 25 bp, Homo sapien
caactaaatgtactgtgtgaaccta

SEQ ID NO: 2422839 - DNA, 25 bp, Homo sapien
tgggactattgtgaatcggtgttac

SEQ ID NO: 2422840 - DNA, 25 bp, Homo sapien
gttacagattgagaccaaagagaca

SEQ ID NO: 2422841 - DNA, 25 bp, Homo sapien
tagaacacatcatgcattggccctg

SEQ ID NO: 2422842 - DNA, 25 bp, Homo sapien
tcagaaactagggtcaaggctcagg

SEQ ID NO: 2422843 - DNA, 25 bp, Homo sapien
caagggtacacatcgcaatttgacc

SEQ ID NO: 2422844 - DNA, 25 bp, Homo sapien
tcttaggctacactcaacacggaaa

SEQ ID NO: 2422845 - DNA, 25 bp, Homo sapien
gcctccgaaggtgctaatagctgac

SEQ ID NO: 2422846 - DNA, 25 bp, Homo sapien
cctccgaaggtgctaatagctgact

SEQ ID NO: 2422847 - DNA, 25 bp, Homo sapien
ctccgaaggtgctaatagctgactt

SEQ ID NO: 2422848 - DNA, 25 bp, Homo sapien
tccgaaggtgctaatagctgacttt

SEQ ID NO: 2422849 - DNA, 25 bp, Homo sapien
tcctatgggcccctgaactctgctt

SEQ ID NO: 2422850 - DNA, 25 bp, Homo sapien
tctcctgggagtcggctaatcacat

SEQ ID NO: 2422851 - DNA, 25 bp, Homo sapien
agagtgctctccctatttgatatgg

SEQ ID NO: 2422852 - DNA, 25 bp, Homo sapien
gaagtagaacttgccctttatcagc

SEQ ID NO: 2422853 - DNA, 25 bp, Homo sapien
ctggatctgagcctgaaatctggcc

SEQ ID NO: 2422854 - DNA, 25 bp, Homo sapien
tctgtaagggaaggtacccttatca

SEQ ID NO: 2422855 - DNA, 25 bp, Homo sapien
tgtcccctgtccgtatcagaagcag

SEQ ID NO: 2422856 - DNA, 25 bp, Homo sapien
tgaggtctttgccagggatccaccc

SEQ ID NO: 2422857 - DNA, 25 bp, Homo sapien
tgttccaccgtccatctgctggtat

SEQ ID NO: 2422858 - DNA, 25 bp, Homo sapien
tgtggagggacaaaaggcaacctct

SEQ ID NO: 2422859 - DNA, 25 bp, Homo sapien
tccaagctcctctaaatcttccagg

SEQ ID NO: 2422860 - DNA, 25 bp, Homo sapien
ggcactagaataccaggtactgggt

SEQ ID NO: 2422861 - DNA, 25 bp, Homo sapien
gaaaggcaggcactagaataccagg

SEQ ID NO: 2422862 - DNA, 25 bp, Homo sapien
gttggaaaggcaggcactagaatac

SEQ ID NO: 2422863 - DNA, 25 bp, Homo sapien
tcttgaagtcaagtggctcctcccc

SEQ ID NO: 2422864 - DNA, 25 bp, Homo sapien
caccagatgccaagagggtctgttg

SEQ ID NO: 2422865 - DNA, 25 bp, Homo sapien
ggagacaccaaagttgagtttgctt

SEQ ID NO: 2422866 - DNA, 25 bp, Homo sapien
gctttataagtgacattgcaggctg

SEQ ID NO: 2422867 - DNA, 25 bp, Homo sapien
taagtcggattaagctgtgagcggc

SEQ ID NO: 2422868 - DNA, 25 bp, Homo sapien
ccatcagaggcggagtcggtttcct

SEQ ID NO: 2422869 - DNA, 25 bp, Homo sapien
tcagatttcgttgacccgagacggg

SEQ ID NO: 2422870 - DNA, 25 bp, Homo sapien
tagccactgtggtagatggtccaga

SEQ ID NO: 2422871 - DNA, 25 bp, Homo sapien
atctctgctagatctgggaaaagcc

SEQ ID NO: 2422872 - DNA, 25 bp, Homo sapien
tatagatgaagcctcagatagcagg

SEQ ID NO: 2422873 - DNA, 25 bp, Homo sapien
gggaaaagcctagctgcattaataa

SEQ ID NO: 2422874 - DNA, 25 bp, Homo sapien
tataatgaggtacgtccaacccttc

SEQ ID NO: 2422875 - DNA, 25 bp, Homo sapien
aataaaatggttggaccaggtgagg

SEQ ID NO: 2422876 - DNA, 25 bp, Homo sapien
ccttgtgctgaggtatttgcctgca

SEQ ID NO: 2422877 - DNA, 25 bp, Homo sapien
ttcactgagtatccttgtgctgagg

SEQ ID NO: 2422878 - DNA, 25 bp, Homo sapien
tctacctcgttcctttaatttgctg

SEQ ID NO: 2422879 - DNA, 25 bp, Homo sapien
gaatattctcttgtacatcctgcat

SEQ ID NO: 2422880 - DNA, 25 bp, Homo sapien
tagacaaagactagccctttgggtc

SEQ ID NO: 2422881 - DNA, 25 bp, Homo sapien
ctttattctcccaggttaaaagctg

SEQ ID NO: 2422882 - DNA, 25 bp, Homo sapien
caaacgagtgtcagtagaatgccaa

SEQ ID NO: 2422883 - DNA, 25 bp, Homo sapien
agcaataaggccaatggcaaccagt

SEQ ID NO: 2422884 - DNA, 25 bp, Homo sapien
aatggcaaccagtgcagcaagatca

SEQ ID NO: 2422885 - DNA, 25 bp, Homo sapien
gacgtcaagaagatcctgtacaata

SEQ ID NO: 2422886 - DNA, 25 bp, Homo sapien
agcaccaaggacgtcaagaagatcc

SEQ ID NO: 2422887 - DNA, 25 bp, Homo sapien
cagggtattggcaagttgccattgt

SEQ ID NO: 2422888 - DNA, 25 bp, Homo sapien
aaacattaaaggtgtcattgcccag

SEQ ID NO: 2422889 - DNA, 25 bp, Homo sapien
aagttgccattgtgctctcccacaa

SEQ ID NO: 2422890 - DNA, 25 bp, Homo sapien
tattggcaagttgccattgtgctct

SEQ ID NO: 2422891 - DNA, 25 bp, Homo sapien
ctcctgaggagacaactgtgctgaa

SEQ ID NO: 2422892 - DNA, 25 bp, Homo sapien
gaactatttacaccaggtctaatca

SEQ ID NO: 2422893 - DNA, 25 bp, Homo sapien
gacaactgtgctgaattaagctcat

SEQ ID NO: 2422894 - DNA, 25 bp, Homo sapien
tttacaccaggtctaatcaccaacc

SEQ ID NO: 2422895 - DNA, 25 bp, Homo sapien
tgatccacagcgttggttttatttc

SEQ ID NO: 2422896 - DNA, 25 bp, Homo sapien
gatccacagcgttggttttatttct

SEQ ID NO: 2422897 - DNA, 25 bp, Homo sapien
tcttattagtttatattacgtggtg

SEQ ID NO: 2422898 - DNA, 25 bp, Homo sapien
tttatattacgtggtgtcagaagtg

SEQ ID NO: 2422899 - DNA, 25 bp, Homo sapien
tacactgggcctgatcacaaatctc

SEQ ID NO: 2422900 - DNA, 25 bp, Homo sapien
taggtcgttcatcaccaagagacat

SEQ ID NO: 2422901 - DNA, 25 bp, Homo sapien
cagctgtgccaaattaggtcgttca

SEQ ID NO: 2422902 - DNA, 25 bp, Homo sapien
tgaatttgatgtgaactgtttacac

SEQ ID NO: 2422903 - DNA, 25 bp, Homo sapien
ccaggggtcataaccagtaccctca

SEQ ID NO: 2422904 - DNA, 25 bp, Homo sapien
agtgccaggggtcataaccagtacc

SEQ ID NO: 2422905 - DNA, 25 bp, Homo sapien
caggggtcataaccagtaccctcac

SEQ ID NO: 2422906 - DNA, 25 bp, Homo sapien
tgccaggggtcataaccagtaccct

SEQ ID NO: 2422907 - DNA, 25 bp, Homo sapien
ccttgctggcattatccttatggct

SEQ ID NO: 2422908 - DNA, 25 bp, Homo sapien
caagggcctggcatatgcttagtac

SEQ ID NO: 2422909 - DNA, 25 bp, Homo sapien
ctttggacactctttgggcattcac

SEQ ID NO: 2422910 - DNA, 25 bp, Homo sapien
tagtacaattctttgcacaatgccc

SEQ ID NO: 2422911 - DNA, 25 bp, Homo sapien
tagggtcctgagttcagcagcaaac

SEQ ID NO: 2422912 - DNA, 25 bp, Homo sapien
ccatcttaggtgttctcgagggaca

SEQ ID NO: 2422913 - DNA, 25 bp, Homo sapien
gccggcgatggtttctgttcctcag

SEQ ID NO: 2422914 - DNA, 25 bp, Homo sapien
catctatctccaagtggtccgcgaa

SEQ ID NO: 2422915 - DNA, 25 bp, Homo sapien
aggatgcttcccgtgcagccaaagt

SEQ ID NO: 2422916 - DNA, 25 bp, Homo sapien
ttattactgttggtggcacataggg

SEQ ID NO: 2422917 - DNA, 25 bp, Homo sapien
gcagccaaagtgatcatgtccaggg

SEQ ID NO: 2422918 - DNA, 25 bp, Homo sapien
gcgcagagcaccactctgggaggat

SEQ ID NO: 2422919 - DNA, 25 bp, Homo sapien
cagaattctcgtagggtaactggct

SEQ ID NO: 2422920 - DNA, 25 bp, Homo sapien
attctcgtagggtaactggcttccg

SEQ ID NO: 2422921 - DNA, 25 bp, Homo sapien
ctcgtagggtaactggcttccgctt

SEQ ID NO: 2422922 - DNA, 25 bp, Homo sapien
ttggcagaattctcgtagggtaact

SEQ ID NO: 2422923 - DNA, 25 bp, Homo sapien
ggtatgtcctccacaataggtgtga

SEQ ID NO: 2422924 - DNA, 25 bp, Homo sapien
cgtttggtatgtcctccacaatagg

SEQ ID NO: 2422925 - DNA, 25 bp, Homo sapien
gggaacgtttggtatgtcctccaca

SEQ ID NO: 2422926 - DNA, 25 bp, Homo sapien
tgcatggggaacgtttggtatgtcc

SEQ ID NO: 2422927 - DNA, 25 bp, Homo sapien
tttgcaattcacaacttcaagaata

SEQ ID NO: 2422928 - DNA, 25 bp, Homo sapien
tatgaaagtccacatccataattat

SEQ ID NO: 2422929 - DNA, 25 bp, Homo sapien
cacaacttcaagaatacttggacta

SEQ ID NO: 2422930 - DNA, 25 bp, Homo sapien
aagtccacatccataattatcttta

SEQ ID NO: 2422931 - DNA, 25 bp, Homo sapien
cacacccagccaagactttttatag

SEQ ID NO: 2422932 - DNA, 25 bp, Homo sapien
acacccagccaagactttttataga

SEQ ID NO: 2422933 - DNA, 25 bp, Homo sapien
cacccagccaagactttttatagag

SEQ ID NO: 2422934 - DNA, 25 bp, Homo sapien
cccagccaagactttttatagagtc

SEQ ID NO: 2422935 - DNA, 25 bp, Homo sapien
tcagtaattaggatggacagtcagc

SEQ ID NO: 2422936 - DNA, 25 bp, Homo sapien
gacagtcagctactaattttcttag

SEQ ID NO: 2422937 - DNA, 25 bp, Homo sapien
aatgcagttagcatggattacttag

SEQ ID NO: 2422938 - DNA, 25 bp, Homo sapien
aaaagctagctgtcattgtgtggaa

SEQ ID NO: 2422939 - DNA, 25 bp, Homo sapien
tgtgggccagcaaactacataccag

SEQ ID NO: 2422940 - DNA, 25 bp, Homo sapien
catggtttacgaaggagtaccccag

SEQ ID NO: 2422941 - DNA, 25 bp, Homo sapien
gagcccatcacagaagtagttagcc

SEQ ID NO: 2422942 - DNA, 25 bp, Homo sapien
tatgtgatcagtcaaagtcagagcc

SEQ ID NO: 2422943 - DNA, 25 bp, Homo sapien
gactggaagttgcttgcaagtcagt

SEQ ID NO: 2422944 - DNA, 25 bp, Homo sapien
tgaatgatgtacctgtattgggcac

SEQ ID NO: 2422945 - DNA, 25 bp, Homo sapien
tatgaaccatgaatagcgcttgcag

SEQ ID NO: 2422946 - DNA, 25 bp, Homo sapien
caagtcagtgaattggtctgagcaa

SEQ ID NO: 2422947 - DNA, 25 bp, Homo sapien
tgtccactgtttaccagaggaatat

SEQ ID NO: 2422948 - DNA, 25 bp, Homo sapien
ctcttgttcttgatgtatactgatc

SEQ ID NO: 2422949 - DNA, 25 bp, Homo sapien
ctgtttaccagaggaatatcagact

SEQ ID NO: 2422950 - DNA, 25 bp, Homo sapien
tactgatcaccaggtgatgtccact

SEQ ID NO: 2422951 - DNA, 25 bp, Homo sapien
ggagttggcctcagtgcccggaagc

SEQ ID NO: 2422952 - DNA, 25 bp, Homo sapien
cccagtggagttggcctcagtgccc

SEQ ID NO: 2422953 - DNA, 25 bp, Homo sapien
ccagtggagttggcctcagtgcccg

SEQ ID NO: 2422954 - DNA, 25 bp, Homo sapien
gttggcctcagtgcccggaagccac

SEQ ID NO: 2422955 - DNA, 25 bp, Homo sapien
actggcagggagtctccgagtggca

SEQ ID NO: 2422956 - DNA, 25 bp, Homo sapien
cagaaaccaaataccagagtgaagt

SEQ ID NO: 2422957 - DNA, 25 bp, Homo sapien
ccgagtggcagacggaaggtttcct

SEQ ID NO: 2422958 - DNA, 25 bp, Homo sapien
cagcacagaatgtcaatccactggc

SEQ ID NO: 2422959 - DNA, 25 bp, Homo sapien
tcccagataataccctggaggtggc

SEQ ID NO: 2422960 - DNA, 25 bp, Homo sapien
cataactgaagagctaagagcagaa

SEQ ID NO: 2422961 - DNA, 25 bp, Homo sapien
ccttcttaagctggtgcggaatact

SEQ ID NO: 2422962 - DNA, 25 bp, Homo sapien
ctcttcaagtttggaaggaacggag

SEQ ID NO: 2422963 - DNA, 25 bp, Homo sapien
tctacccgacaggtgtagctggtgg

SEQ ID NO: 2422964 - DNA, 25 bp, Homo sapien
ctttatcctctacccgacaggtgta

SEQ ID NO: 2422965 - DNA, 25 bp, Homo sapien
tatcctctacccgacaggtgtagct

SEQ ID NO: 2422966 - DNA, 25 bp, Homo sapien
agatcctttatcctctacccgacag

SEQ ID NO: 2422967 - DNA, 25 bp, Homo sapien
agaaagcacttgtagcagctgcccc

SEQ ID NO: 2422968 - DNA, 25 bp, Homo sapien
tagcagctgccccaagactgggctt

SEQ ID NO: 2422969 - DNA, 25 bp, Homo sapien
aagagaaagcacttgtagcagctgc

SEQ ID NO: 2422970 - DNA, 25 bp, Homo sapien
gcttcctgacggtagaggggaatcc

SEQ ID NO: 2422971 - DNA, 25 bp, Homo sapien
tcttgggggtgagtaatagaatctc

SEQ ID NO: 2422972 - DNA, 25 bp, Homo sapien
tctcatcagaatttggcccatcaca

SEQ ID NO: 2422973 - DNA, 25 bp, Homo sapien
gcccatcacattcatgtaaacaatt

SEQ ID NO: 2422974 - DNA, 25 bp, Homo sapien
ttaagaggggccaggatttcttcag

SEQ ID NO: 2422975 - DNA, 25 bp, Homo sapien
tgcatgttcagcttcacgatatcct

SEQ ID NO: 2422976 - DNA, 25 bp, Homo sapien
gcccttggtatttcatgttttgtgt

SEQ ID NO: 2422977 - DNA, 25 bp, Homo sapien
caattgcttcagttgtccattccaa

SEQ ID NO: 2422978 - DNA, 25 bp, Homo sapien
gatatcctcccatagtctggaaagc

SEQ ID NO: 2422979 - DNA, 25 bp, Homo sapien
cctgttgtgtcttaattgagctcac

SEQ ID NO: 2422980 - DNA, 25 bp, Homo sapien
tgttcctgttgtgtcttaattgagc

SEQ ID NO: 2422981 - DNA, 25 bp, Homo sapien
ttcctgttgtgtcttaattgagctc

SEQ ID NO: 2422982 - DNA, 25 bp, Homo sapien
ttgttcctgttgtgtcttaattgag

SEQ ID NO: 2422983 - DNA, 25 bp, Homo sapien
tccagccaccagcactctctctttg

SEQ ID NO: 2422984 - DNA, 25 bp, Homo sapien
tctttgggctgtgactggtcgacag

SEQ ID NO: 2422985 - DNA, 25 bp, Homo sapien
tgcacagtttattgttccagccacc

SEQ ID NO: 2422986 - DNA, 25 bp, Homo sapien
tgtgactggtcgacagcgacgtgac

SEQ ID NO: 2422987 - DNA, 25 bp, Homo sapien
gatgccacgggagcacacaggaggg

SEQ ID NO: 2422988 - DNA, 25 bp, Homo sapien
tcatcatcattcatcaacgtgtcag

SEQ ID NO: 2422989 - DNA, 25 bp, Homo sapien
cagatgccacgggagcacacaggag

SEQ ID NO: 2422990 - DNA, 25 bp, Homo sapien
tcattcatcaacgtgtcagaggtca

SEQ ID NO: 2422991 - DNA, 25 bp, Homo sapien
ctccttttgtaaccgttcatcatca

SEQ ID NO: 2422992 - DNA, 25 bp, Homo sapien
tcacctccttttgtaaccgttcatc

SEQ ID NO: 2422993 - DNA, 25 bp, Homo sapien
tttgtaaccgttcatcatcactctt

SEQ ID NO: 2422994 - DNA, 25 bp, Homo sapien
ccttttgtaaccgttcatcatcact

SEQ ID NO: 2422995 - DNA, 25 bp, Homo sapien
tttctcgggagaaagcgttccaggc

SEQ ID NO: 2422996 - DNA, 25 bp, Homo sapien
ttcggccctcgacgtagcaaaagag

SEQ ID NO: 2422997 - DNA, 25 bp, Homo sapien
gatagcgctcttgtgatacgctggg

SEQ ID NO: 2422998 - DNA, 25 bp, Homo sapien
gagcaatatttagcggactgtcctg

SEQ ID NO: 2422999 - DNA, 25 bp, Homo sapien
ggagcaggtggagcgagagagcgag

SEQ ID NO: 2423000 - DNA, 25 bp, Homo sapien
agcgcgccagacccagggcgagact

SEQ ID NO: 2423001 - DNA, 25 bp, Homo sapien
gcgagactgcagtgacgcggcccgg

SEQ ID NO: 2423002 - DNA, 25 bp, Homo sapien
agactgcagtgacgcggcccgggag

SEQ ID NO: 2423003 - DNA, 25 bp, Homo sapien
gacggtggaccattataagactgag

SEQ ID NO: 2423004 - DNA, 25 bp, Homo sapien
ctatggccgcagaagaggtattgca

SEQ ID NO: 2423005 - DNA, 25 bp, Homo sapien
gagtacgacagcctcaaacaggagc

SEQ ID NO: 2423006 - DNA, 25 bp, Homo sapien
taagactgagatagagaggctaacc

SEQ ID NO: 2423007 - DNA, 25 bp, Homo sapien
tcttcatgttggtgaggttggtctt

SEQ ID NO: 2423008 - DNA, 25 bp, Homo sapien
tgattcttctgcttcagcctcccga

SEQ ID NO: 2423009 - DNA, 25 bp, Homo sapien
gctcaccgcaaattctgcctcttgg

SEQ ID NO: 2423010 - DNA, 25 bp, Homo sapien
tcaagtgattcttctgcttcagcct

SEQ ID NO: 2423011 - DNA, 25 bp, Homo sapien
gaatgcacgtaaagtcaagtggcag

SEQ ID NO: 2423012 - DNA, 25 bp, Homo sapien
cgatgaaacttggaagaagcccact

SEQ ID NO: 2423013 - DNA, 25 bp, Homo sapien
gacttaggtacaaggctccatttag

SEQ ID NO: 2423014 - DNA, 25 bp, Homo sapien
cacgtctaagagctatttgggaggt

SEQ ID NO: 2423015 - DNA, 25 bp, Homo sapien
caccagttagtttgattgctttcta

SEQ ID NO: 2423016 - DNA, 25 bp, Homo sapien
gctaaggacagtccgcctgttttgg

SEQ ID NO: 2423017 - DNA, 25 bp, Homo sapien
gaagcctaatttctagaatatggga

SEQ ID NO: 2423018 - DNA, 25 bp, Homo sapien
ggattacaggctaactttcaattta

SEQ ID NO: 2423019 - DNA, 25 bp, Homo sapien
caggtatttacgagacaaagctgca

SEQ ID NO: 2423020 - DNA, 25 bp, Homo sapien
gaaaacccgagaagctcagagtttg

SEQ ID NO: 2423021 - DNA, 25 bp, Homo sapien
gctgctgatggagatacgtgtatca

SEQ ID NO: 2423022 - DNA, 25 bp, Homo sapien
tttggatgcccaatagcagacccag

SEQ ID NO: 2423023 - DNA, 25 bp, Homo sapien
cataatgcgagctatccagtagacc

SEQ ID NO: 2423024 - DNA, 25 bp, Homo sapien
tattctccataatgcgagctatcca

SEQ ID NO: 2423025 - DNA, 25 bp, Homo sapien
tctccataatgcgagctatccagta

SEQ ID NO: 2423026 - DNA, 25 bp, Homo sapien
tgtcctttattctccataatgcgag

SEQ ID NO: 2423027 - DNA, 25 bp, Homo sapien
ctaaccctttagtgcctctggctgc

SEQ ID NO: 2423028 - DNA, 25 bp, Homo sapien
aatactggtaacagaaaacttgttg

SEQ ID NO: 2423029 - DNA, 25 bp, Homo sapien
gggttcgagcgattcctcgtgcctt

SEQ ID NO: 2423030 - DNA, 25 bp, Homo sapien
gcgtgtttcagttttcagagtcttc

SEQ ID NO: 2423031 - DNA, 25 bp, Homo sapien
ggttcgagcgattcctcgtgcctta

SEQ ID NO: 2423032 - DNA, 25 bp, Homo sapien
tgtaattaagtcagccggcaggagt

SEQ ID NO: 2423033 - DNA, 25 bp, Homo sapien
cgaggacggatctcagcagctctct

SEQ ID NO: 2423034 - DNA, 25 bp, Homo sapien
gaagcagcagaaccatctgtccgtg

SEQ ID NO: 2423035 - DNA, 25 bp, Homo sapien
catctgtccgtgtaccgaggacgga

SEQ ID NO: 2423036 - DNA, 25 bp, Homo sapien
tggagaagtaccactgcctttgtgt

SEQ ID NO: 2423037 - DNA, 25 bp, Homo sapien
ctggagaagtaccactgcctttgtg

SEQ ID NO: 2423038 - DNA, 25 bp, Homo sapien
agaagtaccactgcctttgtgttac

SEQ ID NO: 2423039 - DNA, 25 bp, Homo sapien
ggagaagtaccactgcctttgtgtt

SEQ ID NO: 2423040 - DNA, 25 bp, Homo sapien
tttttcctgcatgggtcttggttta

SEQ ID NO: 2423041 - DNA, 25 bp, Homo sapien
gtcttggtttaacagcaggatcctc

SEQ ID NO: 2423042 - DNA, 25 bp, Homo sapien
cctgcatgggtcttggtttaacagc

SEQ ID NO: 2423043 - DNA, 25 bp, Homo sapien
catgggtcttggtttaacagcagga

SEQ ID NO: 2423044 - DNA, 25 bp, Homo sapien
cttgttatctagtttatagcttatt

SEQ ID NO: 2423045 - DNA, 25 bp, Homo sapien
gccttgttatctagtttatagctta

SEQ ID NO: 2423046 - DNA, 25 bp, Homo sapien
ggccttgttatctagtttatagctt

SEQ ID NO: 2423047 - DNA, 25 bp, Homo sapien
ccttgttatctagtttatagcttat

SEQ ID NO: 2423048 - DNA, 25 bp, Homo sapien
gaaatctgatttagaggcccttcct

SEQ ID NO: 2423049 - DNA, 25 bp, Homo sapien
cctggacacccattttgaatagcac

SEQ ID NO: 2423050 - DNA, 25 bp, Homo sapien
tattcgccgttcgttgtaagcttct

SEQ ID NO: 2423051 - DNA, 25 bp, Homo sapien
cagattcccgaagccagtggttttc

SEQ ID NO: 2423052 - DNA, 25 bp, Homo sapien
caggcatatttagcagccagcctta

SEQ ID NO: 2423053 - DNA, 25 bp, Homo sapien
aggcatatttagcagccagccttac

SEQ ID NO: 2423054 - DNA, 25 bp, Homo sapien
tcaggcatatttagcagccagcctt

SEQ ID NO: 2423055 - DNA, 25 bp, Homo sapien
ttacatgttagccaatagtgcctca

SEQ ID NO: 2423056 - DNA, 25 bp, Homo sapien
tctcttgcacactgttaacaattac

SEQ ID NO: 2423057 - DNA, 25 bp, Homo sapien
aatagtgcctcacattcactgtggc

SEQ ID NO: 2423058 - DNA, 25 bp, Homo sapien
taacaattactgtcacatggtcact

SEQ ID NO: 2423059 - DNA, 25 bp, Homo sapien
aagagcgtcctcgagcctgaatgag

SEQ ID NO: 2423060 - DNA, 25 bp, Homo sapien
gtttaattcacatgcaagagcgtcc

SEQ ID NO: 2423061 - DNA, 25 bp, Homo sapien
tctctgacctctcggcagttataca

SEQ ID NO: 2423062 - DNA, 25 bp, Homo sapien
gctctattctggttttgtgcatcag

SEQ ID NO: 2423063 - DNA, 25 bp, Homo sapien
tctccttatctgtcacattcgtact

SEQ ID NO: 2423064 - DNA, 25 bp, Homo sapien
acttggtgtgagtcctgaattctga

SEQ ID NO: 2423065 - DNA, 25 bp, Homo sapien
ttacttggtgtgagtcctgaattct

SEQ ID NO: 2423066 - DNA, 25 bp, Homo sapien
ccttatctgtcacattcgtactcat

SEQ ID NO: 2423067 - DNA, 25 bp, Homo sapien
ttctccacttatcttgccataccct

SEQ ID NO: 2423068 - DNA, 25 bp, Homo sapien
tctccacttatcttgccataccctt

SEQ ID NO: 2423069 - DNA, 25 bp, Homo sapien
ctccacttatcttgccatacccttc

SEQ ID NO: 2423070 - DNA, 25 bp, Homo sapien
aataggttaactctgtggctctctg

SEQ ID NO: 2423071 - DNA, 25 bp, Homo sapien
gagtagtaatctctccaggctgaaa

SEQ ID NO: 2423072 - DNA, 25 bp, Homo sapien
catcttgaaatacagtggtgcccct

SEQ ID NO: 2423073 - DNA, 25 bp, Homo sapien
gcctataacttcttcagatccggaa

SEQ ID NO: 2423074 - DNA, 25 bp, Homo sapien
agcaggcttgatggcagcaacagcc

SEQ ID NO: 2423075 - DNA, 25 bp, Homo sapien
ggtagcaccatcacagagaagggaa

SEQ ID NO: 2423076 - DNA, 25 bp, Homo sapien
taagggaatggacactgcaacttct

SEQ ID NO: 2423077 - DNA, 25 bp, Homo sapien
gaagtgccttcgtgagcaggcttga

SEQ ID NO: 2423078 - DNA, 25 bp, Homo sapien
cagacacagccttcagggcgttctt

SEQ ID NO: 2423079 - DNA, 25 bp, Homo sapien
gacacagccttcagggcgttcttct

SEQ ID NO: 2423080 - DNA, 25 bp, Homo sapien
acacagccttcagggcgttcttctt

SEQ ID NO: 2423081 - DNA, 25 bp, Homo sapien
agacacagccttcagggcgttcttc

SEQ ID NO: 2423082 - DNA, 25 bp, Homo sapien
tccaattgacgtcaatcagttctcc

SEQ ID NO: 2423083 - DNA, 25 bp, Homo sapien
tcagttctccacttgattgacctgg

SEQ ID NO: 2423084 - DNA, 25 bp, Homo sapien
ttttgcagctgaacaggctcggccc

SEQ ID NO: 2423085 - DNA, 25 bp, Homo sapien
cttcatttacataggctcggtgcct

SEQ ID NO: 2423086 - DNA, 25 bp, Homo sapien
caaaacctgatctagaagtccctgt

SEQ ID NO: 2423087 - DNA, 25 bp, Homo sapien
aagtccctgtgcagcagattgcagg

SEQ ID NO: 2423088 - DNA, 25 bp, Homo sapien
cagtcagctgatttgtctgggccat

SEQ ID NO: 2423089 - DNA, 25 bp, Homo sapien
gcagtcagctgatttgtctgggcca

SEQ ID NO: 2423090 - DNA, 25 bp, Homo sapien
taaaatggtcctccactcttatgac

SEQ ID NO: 2423091 - DNA, 25 bp, Homo sapien
tggctgtttgtacacaagaactgtc

SEQ ID NO: 2423092 - DNA, 25 bp, Homo sapien
tccttcttgccagctcactatcagt

SEQ ID NO: 2423093 - DNA, 25 bp, Homo sapien
caagggtgttgctaaacctatcatc

SEQ ID NO: 2423094 - DNA, 25 bp, Homo sapien
ctttaaagaggcgtcatggcagtgc

SEQ ID NO: 2423095 - DNA, 25 bp, Homo sapien
tctatatgaggttcccaccgaacgc

SEQ ID NO: 2423096 - DNA, 25 bp, Homo sapien
ggccaggttctaggtcactccctca

SEQ ID NO: 2423097 - DNA, 25 bp, Homo sapien
gaggatagggtaccatgtcaggcca

SEQ ID NO: 2423098 - DNA, 25 bp, Homo sapien
tcttggagatgcagaacgagctgaa

SEQ ID NO: 2423099 - DNA, 25 bp, Homo sapien
tccatccaccggaaggttgctgaag

SEQ ID NO: 2423100 - DNA, 25 bp, Homo sapien
caggagtcagcatcgaaggaggctt

SEQ ID NO: 2423101 - DNA, 25 bp, Homo sapien
gagactcgggaggaaacgcttctgc

SEQ ID NO: 2423102 - DNA, 25 bp, Homo sapien
tatgtaagagtacccgtagcctcca

SEQ ID NO: 2423103 - DNA, 25 bp, Homo sapien
aagagtacccgtagcctccattggg

SEQ ID NO: 2423104 - DNA, 25 bp, Homo sapien
ctctgttgggtatgtaagagtaccc

SEQ ID NO: 2423105 - DNA, 25 bp, Homo sapien
tgggtatgtaagagtacccgtagcc

SEQ ID NO: 2423106 - DNA, 25 bp, Homo sapien
gtaagttccacatggacgtaggaca

SEQ ID NO: 2423107 - DNA, 25 bp, Homo sapien
attgcctgaccccaggaggcggacg

SEQ ID NO: 2423108 - DNA, 25 bp, Homo sapien
actaaaatacaaaacaaattagctg

SEQ ID NO: 2423109 - DNA, 25 bp, Homo sapien
ggtcaacattgtgaaaccagtctct

SEQ ID NO: 2423110 - DNA, 25 bp, Homo sapien
ctggtcaacattgtgaaaccagtct

SEQ ID NO: 2423111 - DNA, 25 bp, Homo sapien
gaatatctggcagtttccccgctga

SEQ ID NO: 2423112 - DNA, 25 bp, Homo sapien
actgattcggagaatctcagtttcc

SEQ ID NO: 2423113 - DNA, 25 bp, Homo sapien
aaatagccttgtaggcgaatatgcc

SEQ ID NO: 2423114 - DNA, 25 bp, Homo sapien
ttaaactgcttgaatatctggcagt

SEQ ID NO: 2423115 - DNA, 25 bp, Homo sapien
ctctcactggtgttcgtatgcatat

SEQ ID NO: 2423116 - DNA, 25 bp, Homo sapien
tcagttggatgtgcccttctgctca

SEQ ID NO: 2423117 - DNA, 25 bp, Homo sapien
tatgcatatagaatggatgtctgca

SEQ ID NO: 2423118 - DNA, 25 bp, Homo sapien
tcaattgccctagggctgttccggc

SEQ ID NO: 2423119 - DNA, 25 bp, Homo sapien
acaataagtgaaagtctgccgccca

SEQ ID NO: 2423120 - DNA, 25 bp, Homo sapien
tcacattgtagggacagtgtatggg

SEQ ID NO: 2423121 - DNA, 25 bp, Homo sapien
aagacaataagtgaaagtctgccgc

SEQ ID NO: 2423122 - DNA, 25 bp, Homo sapien
tgaagacaataagtgaaagtctgcc

SEQ ID NO: 2423123 - DNA, 25 bp, Homo sapien
gaattgcattttgaggaccagtgcc

SEQ ID NO: 2423124 - DNA, 25 bp, Homo sapien
gcagcattgctataaactccagtgg

SEQ ID NO: 2423125 - DNA, 25 bp, Homo sapien
gcaggtgtacccagcaaaatcaggt

SEQ ID NO: 2423126 - DNA, 25 bp, Homo sapien
gccattttgatgctggaggattcca

SEQ ID NO: 2423127 - DNA, 25 bp, Homo sapien
gcagcagagacccaaaagtggattt

SEQ ID NO: 2423128 - DNA, 25 bp, Homo sapien
gagacagtagtgaggcccccttgtg

SEQ ID NO: 2423129 - DNA, 25 bp, Homo sapien
cccccttgtgccagttagggggcag

SEQ ID NO: 2423130 - DNA, 25 bp, Homo sapien
ggcagcagagacccaaaagtggatt

SEQ ID NO: 2423131 - DNA, 25 bp, Homo sapien
agaggaaggaaatggcgaatgcctt

SEQ ID NO: 2423132 - DNA, 25 bp, Homo sapien
aatggcgaatgccttgacaggccat

SEQ ID NO: 2423133 - DNA, 25 bp, Homo sapien
gaaggaaatggcgaatgccttgaca

SEQ ID NO: 2423134 - DNA, 25 bp, Homo sapien
gaaatggcgaatgccttgacaggcc

SEQ ID NO: 2423135 - DNA, 25 bp, Homo sapien
ctttcctttcggatgatgctcatct

SEQ ID NO: 2423136 - DNA, 25 bp, Homo sapien
cctttcggatgatgctcatctagca

SEQ ID NO: 2423137 - DNA, 25 bp, Homo sapien
ttcctttcggatgatgctcatctag

SEQ ID NO: 2423138 - DNA, 25 bp, Homo sapien
cctttctcatccctatatattttca

SEQ ID NO: 2423139 - DNA, 25 bp, Homo sapien
tgcgttcacgcatgtcaacacctgt

SEQ ID NO: 2423140 - DNA, 25 bp, Homo sapien
tgaatatctggcagccctaggtctg

SEQ ID NO: 2423141 - DNA, 25 bp, Homo sapien
taaggaatccctgcatgtgagtata

SEQ ID NO: 2423142 - DNA, 25 bp, Homo sapien
tacttgttctatgaagaggcctaac

SEQ ID NO: 2423143 - DNA, 25 bp, Homo sapien
tattccaccaaccagcaatcactag

SEQ ID NO: 2423144 - DNA, 25 bp, Homo sapien
ttctttggtatcctttgtgccaggg

SEQ ID NO: 2423145 - DNA, 25 bp, Homo sapien
ggagttgggtgctgaacaatctacc

SEQ ID NO: 2423146 - DNA, 25 bp, Homo sapien
tcaagacagagaatagcccgtattc

SEQ ID NO: 2423147 - DNA, 25 bp, Homo sapien
ctttgggaggccgaggcaggtggat

SEQ ID NO: 2423148 - DNA, 25 bp, Homo sapien
aagttatttttggccaggtgtggtg

SEQ ID NO: 2423149 - DNA, 25 bp, Homo sapien
gcttatgtctgtaatcccagcactt

SEQ ID NO: 2423150 - DNA, 25 bp, Homo sapien
cacgaggtcaggagttcaagaccag

SEQ ID NO: 2423151 - DNA, 25 bp, Homo sapien
agatgggctttcactcacatggtgc

SEQ ID NO: 2423152 - DNA, 25 bp, Homo sapien
ggctttcactcacatggtgctcacc

SEQ ID NO: 2423153 - DNA, 25 bp, Homo sapien
atcgtggctgggtttggtctccaca

SEQ ID NO: 2423154 - DNA, 25 bp, Homo sapien
tgggctttcactcacatggtgctca

SEQ ID NO: 2423155 - DNA, 25 bp, Homo sapien
gaagtgttccttgtctcctacatga

SEQ ID NO: 2423156 - DNA, 25 bp, Homo sapien
gttccttgtctcctacatgagctgt

SEQ ID NO: 2423157 - DNA, 25 bp, Homo sapien
cttgtctcctacatgagctgttcct

SEQ ID NO: 2423158 - DNA, 25 bp, Homo sapien
aaacatagaagtgttccttgtctcc

SEQ ID NO: 2423159 - DNA, 25 bp, Homo sapien
gtgatggcaaattctgtgtttgttt

SEQ ID NO: 2423160 - DNA, 25 bp, Homo sapien
tgtgatggcaaattctgtgtttgtt

SEQ ID NO: 2423161 - DNA, 25 bp, Homo sapien
ctccgtaccgccacagtgctcacaa

SEQ ID NO: 2423162 - DNA, 25 bp, Homo sapien
ctgctgcctccgtaccgccacagtg

SEQ ID NO: 2423163 - DNA, 25 bp, Homo sapien
tcagcagcctgctgcctccgtaccg

SEQ ID NO: 2423164 - DNA, 25 bp, Homo sapien
gtcagcagcctgctgcctccgtacc

SEQ ID NO: 2423165 - DNA, 25 bp, Homo sapien
tcagtagtccggttgtggttttcat

SEQ ID NO: 2423166 - DNA, 25 bp, Homo sapien
ctcagtagtccggttgtggttttca

SEQ ID NO: 2423167 - DNA, 25 bp, Homo sapien
gtgccagacctcagtagtccggttg

SEQ ID NO: 2423168 - DNA, 25 bp, Homo sapien
cagacctcagtagtccggttgtggt

SEQ ID NO: 2423169 - DNA, 25 bp, Homo sapien
tctcagaggcggttgtgcagccagc

SEQ ID NO: 2423170 - DNA, 25 bp, Homo sapien
agtagcaagctacatgtggtcaggg

SEQ ID NO: 2423171 - DNA, 25 bp, Homo sapien
cattgagttagcacagaaaggtaca

SEQ ID NO: 2423172 - DNA, 25 bp, Homo sapien
tgcagccagctgtatcagtggaaca

SEQ ID NO: 2423173 - DNA, 25 bp, Homo sapien
gccaggtataatggcacatggctgt

SEQ ID NO: 2423174 - DNA, 25 bp, Homo sapien
tagccaggtataatggcacatggct

SEQ ID NO: 2423175 - DNA, 25 bp, Homo sapien
agactgcagcaagctgtgattgcat

SEQ ID NO: 2423176 - DNA, 25 bp, Homo sapien
attagccaggtataatggcacatgg

SEQ ID NO: 2423177 - DNA, 25 bp, Homo sapien
gagaagaacacgaagcacagaccct

SEQ ID NO: 2423178 - DNA, 25 bp, Homo sapien
ttaatgtccatcgttttggaagacg

SEQ ID NO: 2423179 - DNA, 25 bp, Homo sapien
gatccagcgggtgttttcttctcgg

SEQ ID NO: 2423180 - DNA, 25 bp, Homo sapien
tagatgtacaattggattaatgtcc

SEQ ID NO: 2423181 - DNA, 25 bp, Homo sapien
tgtgtgataacgttaaagaaggctc

SEQ ID NO: 2423182 - DNA, 25 bp, Homo sapien
taatttacccagagagtgttcaaag

SEQ ID NO: 2423183 - DNA, 25 bp, Homo sapien
gctacgctggtattgtttaggcact

SEQ ID NO: 2423184 - DNA, 25 bp, Homo sapien
tacttctcccaaaatcagggtccta

SEQ ID NO: 2423185 - DNA, 25 bp, Homo sapien
ccctcggatgagttgtgtctaaaat

SEQ ID NO: 2423186 - DNA, 25 bp, Homo sapien
tatgcgaacttaactgccatagtcc

SEQ ID NO: 2423187 - DNA, 25 bp, Homo sapien
ttgtctgtaataatgccctcggatg

SEQ ID NO: 2423188 - DNA, 25 bp, Homo sapien
caagatcaatctagctcccgagtga

SEQ ID NO: 2423189 - DNA, 25 bp, Homo sapien
aaggctagttattgaaagcagtggg

SEQ ID NO: 2423190 - DNA, 25 bp, Homo sapien
taaggctagttattgaaagcagtgg

SEQ ID NO: 2423191 - DNA, 25 bp, Homo sapien
cctcgtcttcattgggggtcccatc

SEQ ID NO: 2423192 - DNA, 25 bp, Homo sapien
gtcttcattgggggtcccatctgcc

SEQ ID NO: 2423193 - DNA, 25 bp, Homo sapien
cttcattgggggtcccatctgccct

SEQ ID NO: 2423194 - DNA, 25 bp, Homo sapien
tctcctcgtcttcattgggggtccc

SEQ ID NO: 2423195 - DNA, 25 bp, Homo sapien
attggtaattttcatcctagaaagg

SEQ ID NO: 2423196 - DNA, 25 bp, Homo sapien
taataccactgttgtgtctaagaga

SEQ ID NO: 2423197 - DNA, 25 bp, Homo sapien
cagtatgttagcagtattggtaatt

SEQ ID NO: 2423198 - DNA, 25 bp, Homo sapien
ctaagagaagcgttcagaggaaggc

SEQ ID NO: 2423199 - DNA, 25 bp, Homo sapien
gccttgagcagttgaaattaggaga

SEQ ID NO: 2423200 - DNA, 25 bp, Homo sapien
ttaactcctaagacatcagctgaag

SEQ ID NO: 2423201 - DNA, 25 bp, Homo sapien
catagagcggacttgggataacagt

SEQ ID NO: 2423202 - DNA, 25 bp, Homo sapien
tgacaaaggtaaaaatatctgccgt

SEQ ID NO: 2423203 - DNA, 25 bp, Homo sapien
gatgcagataactctgacatactga

SEQ ID NO: 2423204 - DNA, 25 bp, Homo sapien
cattttttgatcgagctaattaaca

SEQ ID NO: 2423205 - DNA, 25 bp, Homo sapien
tacagattccacatatagttgagat

SEQ ID NO: 2423206 - DNA, 25 bp, Homo sapien
ctatgccacattttctattcagctg

SEQ ID NO: 2423207 - DNA, 25 bp, Homo sapien
catggcacgataccattaccaacca

SEQ ID NO: 2423208 - DNA, 25 bp, Homo sapien
tcacaattatgatccgtggcatatg

SEQ ID NO: 2423209 - DNA, 25 bp, Homo sapien
tggatattctccatcccagtgtcaa

SEQ ID NO: 2423210 - DNA, 25 bp, Homo sapien
gaatctgcatgaagaatccttccag

SEQ ID NO: 2423211 - DNA, 25 bp, Homo sapien
gtctttctgattgtgctgtgctgct

SEQ ID NO: 2423212 - DNA, 25 bp, Homo sapien
ggtttttaggccagacagttgtgag

SEQ ID NO: 2423213 - DNA, 25 bp, Homo sapien
ggttgcaaggaaagccttggctcat

SEQ ID NO: 2423214 - DNA, 25 bp, Homo sapien
tctgtgagtctaactgggtctgcca

SEQ ID NO: 2423215 - DNA, 25 bp, Homo sapien
tggttcttgagggtaacccttcaca

SEQ ID NO: 2423216 - DNA, 25 bp, Homo sapien
caagtgtaagcgtgttgcattgacc

SEQ ID NO: 2423217 - DNA, 25 bp, Homo sapien
cacagaaataggtgaagagtgggca

SEQ ID NO: 2423218 - DNA, 25 bp, Homo sapien
caagaaacttagtggttcttgaggg

SEQ ID NO: 2423219 - DNA, 25 bp, Homo sapien
cctggtgagatgtccacttccatgc

SEQ ID NO: 2423220 - DNA, 25 bp, Homo sapien
aggagtgcatggtcataagactgtc

SEQ ID NO: 2423221 - DNA, 25 bp, Homo sapien
gagatgtccacttccatgcacaaca

SEQ ID NO: 2423222 - DNA, 25 bp, Homo sapien
ggacaggagtgcatggtcataagac

SEQ ID NO: 2423223 - DNA, 25 bp, Homo sapien
aaaagctatagctcaaagctggttt

SEQ ID NO: 2423224 - DNA, 25 bp, Homo sapien
tgtgccaattgatttgagtatcggc

SEQ ID NO: 2423225 - DNA, 25 bp, Homo sapien
ccaattgatttgagtatcggcagct

SEQ ID NO: 2423226 - DNA, 25 bp, Homo sapien
gctatagctcaaagctggtttcatt

SEQ ID NO: 2423227 - DNA, 25 bp, Homo sapien
gaaattatatagaagtcatcagagt

SEQ ID NO: 2423228 - DNA, 25 bp, Homo sapien
cttttatgaaagaggtgtgaaatta

SEQ ID NO: 2423229 - DNA, 25 bp, Homo sapien
ggtgtgaaattatatagaagtcatc

SEQ ID NO: 2423230 - DNA, 25 bp, Homo sapien
tttatgaaagaggtgtgaaattata

SEQ ID NO: 2423231 - DNA, 25 bp, Homo sapien
cagccagtaaatccaatagcttgcc

SEQ ID NO: 2423232 - DNA, 25 bp, Homo sapien
gccaagcccctatcaggttttgtca

SEQ ID NO: 2423233 - DNA, 25 bp, Homo sapien
aaattgtcagggtagtggtttcatc

SEQ ID NO: 2423234 - DNA, 25 bp, Homo sapien
ccagtaaatccaatagcttgcctgc

SEQ ID NO: 2423235 - DNA, 25 bp, Homo sapien
actccaataaggagaattccacagc

SEQ ID NO: 2423236 - DNA, 25 bp, Homo sapien
cactccaataaggagaattccacag

SEQ ID NO: 2423237 - DNA, 25 bp, Homo sapien
ggccccactccaataaggagaattc

SEQ ID NO: 2423238 - DNA, 25 bp, Homo sapien
cccactccaataaggagaattccac

SEQ ID NO: 2423239 - DNA, 25 bp, Homo sapien
ttgctgctgttaccccagcaagctg

SEQ ID NO: 2423240 - DNA, 25 bp, Homo sapien
gaagatcctcgttatatttagggta

SEQ ID NO: 2423241 - DNA, 25 bp, Homo sapien
gagtggatgatttgcaaaagacagg

SEQ ID NO: 2423242 - DNA, 25 bp, Homo sapien
gcctttaagaatattcgggccaaca

SEQ ID NO: 2423243 - DNA, 25 bp, Homo sapien
gaggagccttttctggaagctgcat

SEQ ID NO: 2423244 - DNA, 25 bp, Homo sapien
tggcaggggcagaactaacgtttta

SEQ ID NO: 2423245 - DNA, 25 bp, Homo sapien
tcttgaagtctcagaggagcctttt

SEQ ID NO: 2423246 - DNA, 25 bp, Homo sapien
ctggcaggggcagaactaacgtttt

SEQ ID NO: 2423247 - DNA, 25 bp, Homo sapien
tccgttcccaggttctagtagctgc

SEQ ID NO: 2423248 - DNA, 25 bp, Homo sapien
ggagggttaagcagcccagtccatg

SEQ ID NO: 2423249 - DNA, 25 bp, Homo sapien
taaactacaacttagaaccggcagc

SEQ ID NO: 2423250 - DNA, 25 bp, Homo sapien
gaattcttttgcaggcgttccacca

SEQ ID NO: 2423251 - DNA, 25 bp, Homo sapien
tagcagcatacagataagatatatt

SEQ ID NO: 2423252 - DNA, 25 bp, Homo sapien
gctattcttaattcttatagaccag

SEQ ID NO: 2423253 - DNA, 25 bp, Homo sapien
gcagcatacagataagatatattaa

SEQ ID NO: 2423254 - DNA, 25 bp, Homo sapien
tagaccagttagtactttagcagca

SEQ ID NO: 2423255 - DNA, 25 bp, Homo sapien
tgttgcagtggtaagttcagtctct

SEQ ID NO: 2423256 - DNA, 25 bp, Homo sapien
tgcaagagtcatcatggagtgtacc

SEQ ID NO: 2423257 - DNA, 25 bp, Homo sapien
agagcacactggccagctccaatgc

SEQ ID NO: 2423258 - DNA, 25 bp, Homo sapien
cagcatgccaaggtacagcagagca

SEQ ID NO: 2423259 - DNA, 25 bp, Homo sapien
tgtagcagctgcgttctgccctttc

SEQ ID NO: 2423260 - DNA, 25 bp, Homo sapien
ctacattgtagcagctgcgttctgc

SEQ ID NO: 2423261 - DNA, 25 bp, Homo sapien
tacattgtagcagctgcgttctgcc

SEQ ID NO: 2423262 - DNA, 25 bp, Homo sapien
cagctgcgttctgccctttctgtgg

SEQ ID NO: 2423263 - DNA, 25 bp, Homo sapien
cagtacctgtccaaagatcgcttta

SEQ ID NO: 2423264 - DNA, 25 bp, Homo sapien
tagttccaccttgctccacaagcag

SEQ ID NO: 2423265 - DNA, 25 bp, Homo sapien
caaagatcgctttagttccaccttg

SEQ ID NO: 2423266 - DNA, 25 bp, Homo sapien
agcagtacctgtccaaagatcgctt

SEQ ID NO: 2423267 - DNA, 25 bp, Homo sapien
tctctatatggatcttttcatgttg

SEQ ID NO: 2423268 - DNA, 25 bp, Homo sapien
tttctctatatggatcttttcatgt

SEQ ID NO: 2423269 - DNA, 25 bp, Homo sapien
atttctctatatggatcttttcatg

SEQ ID NO: 2423270 - DNA, 25 bp, Homo sapien
ctctatatggatcttttcatgttgc

SEQ ID NO: 2423271 - DNA, 25 bp, Homo sapien
gaagtgtcgatttgggcagtcctct

SEQ ID NO: 2423272 - DNA, 25 bp, Homo sapien
catggagaatctaggacggactgag

SEQ ID NO: 2423273 - DNA, 25 bp, Homo sapien
cagcacggaggtagcttgcaggctt

SEQ ID NO: 2423274 - DNA, 25 bp, Homo sapien
gaagtcctccaggtgcaagacttgg

SEQ ID NO: 2423275 - DNA, 25 bp, Homo sapien
ttcaatgcactgacacgaaggaggc

SEQ ID NO: 2423276 - DNA, 25 bp, Homo sapien
tgctgagctagggaaaagagcccca

SEQ ID NO: 2423277 - DNA, 25 bp, Homo sapien
tggtgccaattacgtgcagaggact

SEQ ID NO: 2423278 - DNA, 25 bp, Homo sapien
gagccccaagatggatccgagataa

SEQ ID NO: 2423279 - DNA, 25 bp, Homo sapien
caccgggagttatatgatggtcaac

SEQ ID NO: 2423280 - DNA, 25 bp, Homo sapien
tctcttcattagcaaaacagtcatg

SEQ ID NO: 2423281 - DNA, 25 bp, Homo sapien
gggaccattataagagaatcacatt

SEQ ID NO: 2423282 - DNA, 25 bp, Homo sapien
tagcacatggcttctacaagatagt

SEQ ID NO: 2423283 - DNA, 25 bp, Homo sapien
atggtcccgtcagtatctcaccaga

SEQ ID NO: 2423284 - DNA, 25 bp, Homo sapien
tcctgcacctgctaacaaagtatgt

SEQ ID NO: 2423285 - DNA, 25 bp, Homo sapien
ttctgaaccatctggccaattccac

SEQ ID NO: 2423286 - DNA, 25 bp, Homo sapien
tcagtatctcaccagattcaatttc

SEQ ID NO: 2423287 - DNA, 25 bp, Homo sapien
tgatttgaaggtgcagataccggca

SEQ ID NO: 2423288 - DNA, 25 bp, Homo sapien
cgctatgatttgaaggtgcagatac

SEQ ID NO: 2423289 - DNA, 25 bp, Homo sapien
tatgatttgaaggtgcagataccgg

SEQ ID NO: 2423290 - DNA, 25 bp, Homo sapien
gatttgaaggtgcagataccggcat

SEQ ID NO: 2423291 - DNA, 25 bp, Homo sapien
gcattttacaacgttggccagactg

SEQ ID NO: 2423292 - DNA, 25 bp, Homo sapien
cagcattttacaacgttggccagac

SEQ ID NO: 2423293 - DNA, 25 bp, Homo sapien
agcattttacaacgttggccagact

SEQ ID NO: 2423294 - DNA, 25 bp, Homo sapien
ctgaacagtcaattgagataactac

SEQ ID NO: 2423295 - DNA, 25 bp, Homo sapien
gtgcagtagtaaggcgggaaagagt

SEQ ID NO: 2423296 - DNA, 25 bp, Homo sapien
gtcaagtgcagtagtaaggcgggaa

SEQ ID NO: 2423297 - DNA, 25 bp, Homo sapien
gaacagtcaattgagataactacct

SEQ ID NO: 2423298 - DNA, 25 bp, Homo sapien
aagcagctagctctataataatgag

SEQ ID NO: 2423299 - DNA, 25 bp, Homo sapien
caccttgaaagtgtgtgtaaattac

SEQ ID NO: 2423300 - DNA, 25 bp, Homo sapien
ggctctacaggtaaccaacaggaaa

SEQ ID NO: 2423301 - DNA, 25 bp, Homo sapien
gagagctctttaaaggaacagcaag

SEQ ID NO: 2423302 - DNA, 25 bp, Homo sapien
caagtgggccctagcctagtactaa

SEQ ID NO: 2423303 - DNA, 25 bp, Homo sapien
tgccttgcctgaatcctgctgtctt

SEQ ID NO: 2423304 - DNA, 25 bp, Homo sapien
gacactaggtactatcactgccttg

SEQ ID NO: 2423305 - DNA, 25 bp, Homo sapien
tgtactctaactcaggaagcattgt

SEQ ID NO: 2423306 - DNA, 25 bp, Homo sapien
cttgtaagaactaaaattgtatttg

SEQ ID NO: 2423307 - DNA, 25 bp, Homo sapien
taatccattaacaatctaatacagt

SEQ ID NO: 2423308 - DNA, 25 bp, Homo sapien
gtggtcatactggaagttcttaaat

SEQ ID NO: 2423309 - DNA, 25 bp, Homo sapien
aacaatctaatacagttattgggtg

SEQ ID NO: 2423310 - DNA, 25 bp, Homo sapien
ggtcatactggaagttcttaaattc

SEQ ID NO: 2423311 - DNA, 25 bp, Homo sapien
gcgaatgaacatgtgtgacagaatt

SEQ ID NO: 2423312 - DNA, 25 bp, Homo sapien
cataaggcagtaagtaagaattgtg

SEQ ID NO: 2423313 - DNA, 25 bp, Homo sapien
aacataaggcagtaagtaagaattg

SEQ ID NO: 2423314 - DNA, 25 bp, Homo sapien
tgtagcagcgaatgaacatgtgtga

SEQ ID NO: 2423315 - DNA, 25 bp, Homo sapien
tcaaggccacatatatcctgcttca

SEQ ID NO: 2423316 - DNA, 25 bp, Homo sapien
aggccacatatatcctgcttcactg

SEQ ID NO: 2423317 - DNA, 25 bp, Homo sapien
tatcctcaaggccacatatatcctg

SEQ ID NO: 2423318 - DNA, 25 bp, Homo sapien
gcaggttatcctcaaggccacatat

SEQ ID NO: 2423319 - DNA, 25 bp, Homo sapien
tctgctgggttttgatccttcttcg

SEQ ID NO: 2423320 - DNA, 25 bp, Homo sapien
tgggttttgatccttcttcgggtca

SEQ ID NO: 2423321 - DNA, 25 bp, Homo sapien
gttttgatccttcttcgggtcatag

SEQ ID NO: 2423322 - DNA, 25 bp, Homo sapien
tgctgggttttgatccttcttcggg

SEQ ID NO: 2423323 - DNA, 25 bp, Homo sapien
cttcttcatcatactcatcatcatc

SEQ ID NO: 2423324 - DNA, 25 bp, Homo sapien
actcatcatcatcatcttcagtagc

SEQ ID NO: 2423325 - DNA, 25 bp, Homo sapien
tcatcatcatcatcttcagtagctt

SEQ ID NO: 2423326 - DNA, 25 bp, Homo sapien
atactcatcatcatcatcttcagta

SEQ ID NO: 2423327 - DNA, 25 bp, Homo sapien
agtgaccaattttgaagtctgcagc

SEQ ID NO: 2423328 - DNA, 25 bp, Homo sapien
actgatcttgggattgtatgctcac

SEQ ID NO: 2423329 - DNA, 25 bp, Homo sapien
ccagtaaactataacactgatcttg

SEQ ID NO: 2423330 - DNA, 25 bp, Homo sapien
tatgctcacgtaaaaagtgaccaat

SEQ ID NO: 2423331 - DNA, 25 bp, Homo sapien
tcacaatacgaattgtcccatgtcc

SEQ ID NO: 2423332 - DNA, 25 bp, Homo sapien
agtcacaatacgaattgtcccatgt

SEQ ID NO: 2423333 - DNA, 25 bp, Homo sapien
ttagtcacaatacgaattgtcccat

SEQ ID NO: 2423334 - DNA, 25 bp, Homo sapien
tagtcacaatacgaattgtcccatg

SEQ ID NO: 2423335 - DNA, 25 bp, Homo sapien
ctgctgcttaatggttttcaaaatg

SEQ ID NO: 2423336 - DNA, 25 bp, Homo sapien
tttcttgtccatcaaaggaaaagtg

SEQ ID NO: 2423337 - DNA, 25 bp, Homo sapien
ttgtccatcaaaggaaaagtgatca

SEQ ID NO: 2423338 - DNA, 25 bp, Homo sapien
cccctgtacaacccataatttcttg

SEQ ID NO: 2423339 - DNA, 25 bp, Homo sapien
tttggtatctttcacatgcttcaga

SEQ ID NO: 2423340 - DNA, 25 bp, Homo sapien
ctttggtatctttcacatgcttcag

SEQ ID NO: 2423341 - DNA, 25 bp, Homo sapien
tttctcatcttcagtcttggccttt

SEQ ID NO: 2423342 - DNA, 25 bp, Homo sapien
cgtttttctcatcttcagtcttggc

SEQ ID NO: 2423343 - DNA, 25 bp, Homo sapien
atcgtttttctcatcttcagtcttg

SEQ ID NO: 2423344 - DNA, 25 bp, Homo sapien
tcatcgtttttctcatcttcagtct

SEQ ID NO: 2423345 - DNA, 25 bp, Homo sapien
tcctctgaaatctcatcttcttcat

SEQ ID NO: 2423346 - DNA, 25 bp, Homo sapien
tcttcttcatctggtttccattcac

SEQ ID NO: 2423347 - DNA, 25 bp, Homo sapien
cctctgaaatctcatcttcttcatc

SEQ ID NO: 2423348 - DNA, 25 bp, Homo sapien
atctggtttccattcacattcttcc

SEQ ID NO: 2423349 - DNA, 25 bp, Homo sapien
cataaattgtattagtaatctcaga

SEQ ID NO: 2423350 - DNA, 25 bp, Homo sapien
aattgtattagtaatctcagattgc

SEQ ID NO: 2423351 - DNA, 25 bp, Homo sapien
tattagtaatctcagattgcttatc

SEQ ID NO: 2423352 - DNA, 25 bp, Homo sapien
aggttcataaattgtattagtaatc

SEQ ID NO: 2423353 - DNA, 25 bp, Homo sapien
ttcaagatcgtgaacttcctcatag

SEQ ID NO: 2423354 - DNA, 25 bp, Homo sapien
tttcaagatcgtgaacttcctcata

SEQ ID NO: 2423355 - DNA, 25 bp, Homo sapien
ctaggcaggttgtcaatgtctgcca

SEQ ID NO: 2423356 - DNA, 25 bp, Homo sapien
gtctgccatgttgtaagaactccaa

SEQ ID NO: 2423357 - DNA, 25 bp, Homo sapien
caggttgtcaatgtctgccatgttg

SEQ ID NO: 2423358 - DNA, 25 bp, Homo sapien
gttgtaagaactccaaatatcagtg

SEQ ID NO: 2423359 - DNA, 25 bp, Homo sapien
cactcttaatttcaccaacctgaga

SEQ ID NO: 2423360 - DNA, 25 bp, Homo sapien
tcttaatttcaccaacctgagataa

SEQ ID NO: 2423361 - DNA, 25 bp, Homo sapien
ctcttaatttcaccaacctgagata

SEQ ID NO: 2423362 - DNA, 25 bp, Homo sapien
ttaatttcaccaacctgagataatt

SEQ ID NO: 2423363 - DNA, 25 bp, Homo sapien
tcatttctcaaatcatgtaacaaat

SEQ ID NO: 2423364 - DNA, 25 bp, Homo sapien
atcatgtaacaaataactttctgtc

SEQ ID NO: 2423365 - DNA, 25 bp, Homo sapien
catgtaacaaataactttctgtctc

SEQ ID NO: 2423366 - DNA, 25 bp, Homo sapien
ctatcttggaatcatttctcaaatc

SEQ ID NO: 2423367 - DNA, 25 bp, Homo sapien
caggaagttgcagggtgatgtacag

SEQ ID NO: 2423368 - DNA, 25 bp, Homo sapien
ttgcagggtgatgtacagggaggtc

SEQ ID NO: 2423369 - DNA, 25 bp, Homo sapien
gaagttgcagggtgatgtacaggga

SEQ ID NO: 2423370 - DNA, 25 bp, Homo sapien
gcagggtgatgtacagggaggtccc

SEQ ID NO: 2423371 - DNA, 25 bp, Homo sapien
caggaagggtgtctaggaacaagac

SEQ ID NO: 2423372 - DNA, 25 bp, Homo sapien
gcattttaggcttggcaacagcaaa

SEQ ID NO: 2423373 - DNA, 25 bp, Homo sapien
tatgagtcaactccgtaaagagagt

SEQ ID NO: 2423374 - DNA, 25 bp, Homo sapien
tgtgtccacctaatcaagcgtttca

SEQ ID NO: 2423375 - DNA, 25 bp, Homo sapien
ctctattgcccaaactggagtgtag

SEQ ID NO: 2423376 - DNA, 25 bp, Homo sapien
tctattgcccaaactggagtgtagt

SEQ ID NO: 2423377 - DNA, 25 bp, Homo sapien
ttacaggcgcgcactactatgcccg

SEQ ID NO: 2423378 - DNA, 25 bp, Homo sapien
ccgaccttgtgatccgcctgcctcg

SEQ ID NO: 2423379 - DNA, 25 bp, Homo sapien
gcaatgccagaaaccatatacttca

SEQ ID NO: 2423380 - DNA, 25 bp, Homo sapien
caatgccagaaaccatatacttcat

SEQ ID NO: 2423381 - DNA, 25 bp, Homo sapien
gataagtgctgttctgatacctgag

SEQ ID NO: 2423382 - DNA, 25 bp, Homo sapien
tttctttagcaaggatagccctcag

SEQ ID NO: 2423383 - DNA, 25 bp, Homo sapien
catccttggaatgtaagtgctgctg

SEQ ID NO: 2423384 - DNA, 25 bp, Homo sapien
gaatttagcccagaatcattggacc

SEQ ID NO: 2423385 - DNA, 25 bp, Homo sapien
ggctgatggcaaggtctgttctgat

SEQ ID NO: 2423386 - DNA, 25 bp, Homo sapien
tatggcatgagtcccaacagtgaga

SEQ ID NO: 2423387 - DNA, 25 bp, Homo sapien
gaattaccttcagctgtatcacgag

SEQ ID NO: 2423388 - DNA, 25 bp, Homo sapien
tgcacatagctgaaatgactcaaga

SEQ ID NO: 2423389 - DNA, 25 bp, Homo sapien
tcatgacgtcacactgaatgtgctc

SEQ ID NO: 2423390 - DNA, 25 bp, Homo sapien
tattcagactcatcgctatttcaag

SEQ ID NO: 2423391 - DNA, 25 bp, Homo sapien
tgtcttatcttctctcagcccactg

SEQ ID NO: 2423392 - DNA, 25 bp, Homo sapien
tatgcttccagttagtttgcacttg

SEQ ID NO: 2423393 - DNA, 25 bp, Homo sapien
cagtgactgtcagcctaagaatagc

SEQ ID NO: 2423394 - DNA, 25 bp, Homo sapien
tgttgtttgtcacattccgcatttg

SEQ ID NO: 2423395 - DNA, 25 bp, Homo sapien
gagttcttacttataccttatggca

SEQ ID NO: 2423396 - DNA, 25 bp, Homo sapien
gcaaatccttaagagtacagaggtt

SEQ ID NO: 2423397 - DNA, 25 bp, Homo sapien
aaaactatctgctcgggaacagcga

SEQ ID NO: 2423398 - DNA, 25 bp, Homo sapien
tgaacctgctagatgtggtaagcca

SEQ ID NO: 2423399 - DNA, 25 bp, Homo sapien
caaaaaggtcatgccgtgaacctgc

SEQ ID NO: 2423400 - DNA, 25 bp, Homo sapien
tagccagttcctgttgcacgaaaac

SEQ ID NO: 2423401 - DNA, 25 bp, Homo sapien
cctctgcagaaggtgtttttgagat

SEQ ID NO: 2423402 - DNA, 25 bp, Homo sapien
ctctgcagaaggtgtttttgagatg

SEQ ID NO: 2423403 - DNA, 25 bp, Homo sapien
taatactagattatgtagatatact

SEQ ID NO: 2423404 - DNA, 25 bp, Homo sapien
tactagattatgtagatatactgtg

SEQ ID NO: 2423405 - DNA, 25 bp, Homo sapien
aagcatatccgtgtcattaagtgac

SEQ ID NO: 2423406 - DNA, 25 bp, Homo sapien
ttctcaaagcatatccgtgtcatta

SEQ ID NO: 2423407 - DNA, 25 bp, Homo sapien
caaatacagtagtaattaaggtaca

SEQ ID NO: 2423408 - DNA, 25 bp, Homo sapien
taattaaggtacatctctaaagtgg

SEQ ID NO: 2423409 - DNA, 25 bp, Homo sapien
agacttggtaatgatggtcagttcc

SEQ ID NO: 2423410 - DNA, 25 bp, Homo sapien
aatcaaatgatgacctaaatttccc

SEQ ID NO: 2423411 - DNA, 25 bp, Homo sapien
tacacatactccttcagacttacag

SEQ ID NO: 2423412 - DNA, 25 bp, Homo sapien
tacagacctaagctgcatttatggg

SEQ ID NO: 2423413 - DNA, 25 bp, Homo sapien
ccagatgattcttggtatgaacgac

SEQ ID NO: 2423414 - DNA, 25 bp, Homo sapien
gaaatccttaagacatctagccccg

SEQ ID NO: 2423415 - DNA, 25 bp, Homo sapien
tgttggcccttaaactgagtcaaga

SEQ ID NO: 2423416 - DNA, 25 bp, Homo sapien
cagaggcaagaaacaacggaaagag

SEQ ID NO: 2423417 - DNA, 25 bp, Homo sapien
catcttgacagaggatacatgctcc

SEQ ID NO: 2423418 - DNA, 25 bp, Homo sapien
caatttactaaggaacaacaggctc

SEQ ID NO: 2423419 - DNA, 25 bp, Homo sapien
gttacaggtgcctgcaaccacatct

SEQ ID NO: 2423420 - DNA, 25 bp, Homo sapien
tggcctcaagcgatttgcccacctt

SEQ ID NO: 2423421 - DNA, 25 bp, Homo sapien
gagtagctggggttacaggtgcctg

SEQ ID NO: 2423422 - DNA, 25 bp, Homo sapien
agtgattctcgcagctcagcctctt

SEQ ID NO: 2423423 - DNA, 25 bp, Homo sapien
tcacaattccttacactacctcttt

SEQ ID NO: 2423424 - DNA, 25 bp, Homo sapien
tgcccagcctcacaattccttacac

SEQ ID NO: 2423425 - DNA, 25 bp, Homo sapien
gcctcacaattccttacactacctc

SEQ ID NO: 2423426 - DNA, 25 bp, Homo sapien
cagcctcacaattccttacactacc

SEQ ID NO: 2423427 - DNA, 25 bp, Homo sapien
aaagagattaaccctgaaaatcatg

SEQ ID NO: 2423428 - DNA, 25 bp, Homo sapien
aatcatggttttctatggtaatcaa

SEQ ID NO: 2423429 - DNA, 25 bp, Homo sapien
gagattaaccctgaaaatcatggtt

SEQ ID NO: 2423430 - DNA, 25 bp, Homo sapien
catggttttctatggtaatcaagct

SEQ ID NO: 2423431 - DNA, 25 bp, Homo sapien
gcccataaaaataatgaagttactc

SEQ ID NO: 2423432 - DNA, 25 bp, Homo sapien
ccataaaaataatgaagttactcac

SEQ ID NO: 2423433 - DNA, 25 bp, Homo sapien
cccataaaaataatgaagttactca

SEQ ID NO: 2423434 - DNA, 25 bp, Homo sapien
tttggacaaccagaaggacttttca

SEQ ID NO: 2423435 - DNA, 25 bp, Homo sapien
gcataagcaaaggtctaagttctgg

SEQ ID NO: 2423436 - DNA, 25 bp, Homo sapien
ttctgatttgcataagcaaaggtct

SEQ ID NO: 2423437 - DNA, 25 bp, Homo sapien
tgagtcctagtccattctgtttttc

SEQ ID NO: 2423438 - DNA, 25 bp, Homo sapien
agtaaggaaagtccattcttgagaa

SEQ ID NO: 2423439 - DNA, 25 bp, Homo sapien
tatgttgtccaacaattaaaacact

SEQ ID NO: 2423440 - DNA, 25 bp, Homo sapien
tcttgagaatatgttgtccaacaat

SEQ ID NO: 2423441 - DNA, 25 bp, Homo sapien
gtccattcttgagaatatgttgtcc

SEQ ID NO: 2423442 - DNA, 25 bp, Homo sapien
aaactgtgaccatatccctaagccg

SEQ ID NO: 2423443 - DNA, 25 bp, Homo sapien
gatgccactaaagcactatcaggaa

SEQ ID NO: 2423444 - DNA, 25 bp, Homo sapien
ccctaagccgtacactgatgccagt

SEQ ID NO: 2423445 - DNA, 25 bp, Homo sapien
aacaataagtactctcaggctatac

SEQ ID NO: 2423446 - DNA, 25 bp, Homo sapien
aatggtgaattaactgtaaatctaa

SEQ ID NO: 2423447 - DNA, 25 bp, Homo sapien
cagacatgacctccagtgcatctat

SEQ ID NO: 2423448 - DNA, 25 bp, Homo sapien
gctttgcggcaagtatctaggacac

SEQ ID NO: 2423449 - DNA, 25 bp, Homo sapien
gggaccatctggaatggcatttgct

SEQ ID NO: 2423450 - DNA, 25 bp, Homo sapien
ggacacttgttccaggatcgagaaa

SEQ ID NO: 2423451 - DNA, 25 bp, Homo sapien
caatccttctcgtccatgaacaagc

SEQ ID NO: 2423452 - DNA, 25 bp, Homo sapien
ctttgacatgcagctgcatgatatg

SEQ ID NO: 2423453 - DNA, 25 bp, Homo sapien
catgatatgatcaatctctggaagg

SEQ ID NO: 2423454 - DNA, 25 bp, Homo sapien
cgtttctgaggaccccgcctttctg

SEQ ID NO: 2423455 - DNA, 25 bp, Homo sapien
tgtttagccaaacagcgttgccagc

SEQ ID NO: 2423456 - DNA, 25 bp, Homo sapien
gaatcgtccggttgcctgacaaaga

SEQ ID NO: 2423457 - DNA, 25 bp, Homo sapien
caattcaaatggagatgtcttatct

SEQ ID NO: 2423458 - DNA, 25 bp, Homo sapien
gaggaacggtgattccaaatacatc

SEQ ID NO: 2423459 - DNA, 25 bp, Homo sapien
ggtaaaagaactcggccaagctcat

SEQ ID NO: 2423460 - DNA, 25 bp, Homo sapien
agttgatcagatccgcccagctgga

SEQ ID NO: 2423461 - DNA, 25 bp, Homo sapien
tggtaccaggccgagttgtccagca

SEQ ID NO: 2423462 - DNA, 25 bp, Homo sapien
ggaccctgcatccataacgctggaa

SEQ ID NO: 2423463 - DNA, 25 bp, Homo sapien
tctccagcgcctcgcgttccttggt

SEQ ID NO: 2423464 - DNA, 25 bp, Homo sapien
gcgttggctcgcacgcgctctgtct

SEQ ID NO: 2423465 - DNA, 25 bp, Homo sapien
gcagagctcgcgcgttggctcgcac

SEQ ID NO: 2423466 - DNA, 25 bp, Homo sapien
tgtctccagcgcctcgcgttccttg

SEQ ID NO: 2423467 - DNA, 25 bp, Homo sapien
gagagatttagggtaccagaccacc

SEQ ID NO: 2423468 - DNA, 25 bp, Homo sapien
gaagtccttgaacagacctcgagcc

SEQ ID NO: 2423469 - DNA, 25 bp, Homo sapien
tgacccacatgaagcgagtctgccg

SEQ ID NO: 2423470 - DNA, 25 bp, Homo sapien
tggcccgctcgctgcaaatgaaaca

SEQ ID NO: 2423471 - DNA, 25 bp, Homo sapien
gtagcggcacgaagggaatgctggg

SEQ ID NO: 2423472 - DNA, 25 bp, Homo sapien
ttggtagcggcacgaagggaatgct

SEQ ID NO: 2423473 - DNA, 25 bp, Homo sapien
tggtagcggcacgaagggaatgctg

SEQ ID NO: 2423474 - DNA, 25 bp, Homo sapien
cttggtagcggcacgaagggaatgc

SEQ ID NO: 2423475 - DNA, 25 bp, Homo sapien
tctgattgggctccttttccacgcc

SEQ ID NO: 2423476 - DNA, 25 bp, Homo sapien
ctctttctgattgggctccttttcc

SEQ ID NO: 2423477 - DNA, 25 bp, Homo sapien
ttgaagaacatgcagattaggaggg

SEQ ID NO: 2423478 - DNA, 25 bp, Homo sapien
gagagagagtgactcctaggtagct

SEQ ID NO: 2423479 - DNA, 25 bp, Homo sapien
catgttgtcgggactgtaattcagc

SEQ ID NO: 2423480 - DNA, 25 bp, Homo sapien
caggccatgttgtcgggactgtaat

SEQ ID NO: 2423481 - DNA, 25 bp, Homo sapien
gttgtcgggactgtaattcagccat

SEQ ID NO: 2423482 - DNA, 25 bp, Homo sapien
tcccaggccatgttgtcgggactgt

SEQ ID NO: 2423483 - DNA, 25 bp, Homo sapien
tcttgcatctagtgtccagcttcat

SEQ ID NO: 2423484 - DNA, 25 bp, Homo sapien
gatccccttgcaggtagggttctaa

SEQ ID NO: 2423485 - DNA, 25 bp, Homo sapien
tgaggcggaggtcatccttctgaca

SEQ ID NO: 2423486 - DNA, 25 bp, Homo sapien
tctcctgggaagcaagtcgtgggaa

SEQ ID NO: 2423487 - DNA, 25 bp, Homo sapien
gatacagaagaaattcctgcaagaa

SEQ ID NO: 2423488 - DNA, 25 bp, Homo sapien
tgatacagaagaaattcctgcaaga

SEQ ID NO: 2423489 - DNA, 25 bp, Homo sapien
cctgatacagaagaaattcctgcaa

SEQ ID NO: 2423490 - DNA, 25 bp, Homo sapien
ttcctgatacagaagaaattcctgc

SEQ ID NO: 2423491 - DNA, 25 bp, Homo sapien
tcagctttccgtaataagttccagt

SEQ ID NO: 2423492 - DNA, 25 bp, Homo sapien
ctgggttagcgagaccacattgtct

SEQ ID NO: 2423493 - DNA, 25 bp, Homo sapien
aagagaagtgattgaaacctggagc

SEQ ID NO: 2423494 - DNA, 25 bp, Homo sapien
tttgctttctgctcgaagatgatcc

SEQ ID NO: 2423495 - DNA, 25 bp, Homo sapien
gagattctgcaggtacatttccccc

SEQ ID NO: 2423496 - DNA, 25 bp, Homo sapien
aggaactgtgcggttgtgaataaca

SEQ ID NO: 2423497 - DNA, 25 bp, Homo sapien
ttctgaagaacggacattcagagtc

SEQ ID NO: 2423498 - DNA, 25 bp, Homo sapien
tctgaagaacggacattcagagtca

SEQ ID NO: 2423499 - DNA, 25 bp, Homo sapien
tttctgaagaacggacattcagagt

SEQ ID NO: 2423500 - DNA, 25 bp, Homo sapien
tcattttgaactaggttagcaacct

SEQ ID NO: 2423501 - DNA, 25 bp, Homo sapien
atcatcagaactctggaaaaagaca

SEQ ID NO: 2423502 - DNA, 25 bp, Homo sapien
tattatcgaaggctttattaatgcc

SEQ ID NO: 2423503 - DNA, 25 bp, Homo sapien
gcactccaaatgcttatcatcagaa

SEQ ID NO: 2423504 - DNA, 25 bp, Homo sapien
tgagccgtattttcagtgccccagg

SEQ ID NO: 2423505 - DNA, 25 bp, Homo sapien
tatttcttaaatggtgggcaaggct

SEQ ID NO: 2423506 - DNA, 25 bp, Homo sapien
tcatttcgctggatgatgtcaacca

SEQ ID NO: 2423507 - DNA, 25 bp, Homo sapien
ccattctttcactagtccagggcag

SEQ ID NO: 2423508 - DNA, 25 bp, Homo sapien
agacttctttaatttgctatgatca

SEQ ID NO: 2423509 - DNA, 25 bp, Homo sapien
ggataactgcagatatttcttgtca

SEQ ID NO: 2423510 - DNA, 25 bp, Homo sapien
tctgtttcaacactgcagaacaata

SEQ ID NO: 2423511 - DNA, 25 bp, Homo sapien
caatacactggaggcccaatggcga

SEQ ID NO: 2423512 - DNA, 25 bp, Homo sapien
gcccaatggcgaagcaatgtgcaca

SEQ ID NO: 2423513 - DNA, 25 bp, Homo sapien
cactatttgtcgagcctgtggccgg

SEQ ID NO: 2423514 - DNA, 25 bp, Homo sapien
tatttattggattaatgtcccttcc

SEQ ID NO: 2423515 - DNA, 25 bp, Homo sapien
ggaccacggaaatagagaaggatag

SEQ ID NO: 2423516 - DNA, 25 bp, Homo sapien
gggatttttgcagccgagaatactt

SEQ ID NO: 2423517 - DNA, 25 bp, Homo sapien
gcagtccggctgttgacaaaatctg

SEQ ID NO: 2423518 - DNA, 25 bp, Homo sapien
cagtctttaagggagtggtaggctt

SEQ ID NO: 2423519 - DNA, 25 bp, Homo sapien
taggctttggcagtccggctgttga

SEQ ID NO: 2423520 - DNA, 25 bp, Homo sapien
ttggcagtccggctgttgacaaaat

SEQ ID NO: 2423521 - DNA, 25 bp, Homo sapien
agcagctttacttgctttgttggag

SEQ ID NO: 2423522 - DNA, 25 bp, Homo sapien
cagctttacttgctttgttggaggc

SEQ ID NO: 2423523 - DNA, 25 bp, Homo sapien
gctttacttgctttgttggaggcat

SEQ ID NO: 2423524 - DNA, 25 bp, Homo sapien
gaagcagctttacttgctttgttgg

SEQ ID NO: 2423525 - DNA, 25 bp, Homo sapien
gtgtcaggaatgatggaaaccaaat

SEQ ID NO: 2423526 - DNA, 25 bp, Homo sapien
cccggtgtttagaaggtcgcgtgca

SEQ ID NO: 2423527 - DNA, 25 bp, Homo sapien
tggaaaccaaatcagggagagtttc

SEQ ID NO: 2423528 - DNA, 25 bp, Homo sapien
tgtttagaaggtcgcgtgcattctg

SEQ ID NO: 2423529 - DNA, 25 bp, Homo sapien
tgtgtttacagcgttgatcattatt

SEQ ID NO: 2423530 - DNA, 25 bp, Homo sapien
atttctgtgtttacagcgttgatca

SEQ ID NO: 2423531 - DNA, 25 bp, Homo sapien
tctgtgtttacagcgttgatcatta

SEQ ID NO: 2423532 - DNA, 25 bp, Homo sapien
gtgtttacagcgttgatcattattc

SEQ ID NO: 2423533 - DNA, 25 bp, Homo sapien
tctgagagtgcctatggcgaggtct

SEQ ID NO: 2423534 - DNA, 25 bp, Homo sapien
gaagttcagcacaaaagaccatggg

SEQ ID NO: 2423535 - DNA, 25 bp, Homo sapien
taaaacctcctgtcaaatgtgctgc

SEQ ID NO: 2423536 - DNA, 25 bp, Homo sapien
cagattcactgagaatgttccaggc

SEQ ID NO: 2423537 - DNA, 25 bp, Homo sapien
tcaccaacatgcagcatctttcggg

SEQ ID NO: 2423538 - DNA, 25 bp, Homo sapien
gtcaccaacatgcagcatctttcgg

SEQ ID NO: 2423539 - DNA, 25 bp, Homo sapien
caacatgcagcatctttcgggtgtg

SEQ ID NO: 2423540 - DNA, 25 bp, Homo sapien
accaacatgcagcatctttcgggtg

SEQ ID NO: 2423541 - DNA, 25 bp, Homo sapien
gcccagactctctagagtaggcaag

SEQ ID NO: 2423542 - DNA, 25 bp, Homo sapien
tcaggaggaacagaattagggaccc

SEQ ID NO: 2423543 - DNA, 25 bp, Homo sapien
gctggcccaaatgctcgtttcagag

SEQ ID NO: 2423544 - DNA, 25 bp, Homo sapien
ccagggtgggtactgacctgctgct

SEQ ID NO: 2423545 - DNA, 25 bp, Homo sapien
gcaaaatttcactaattccgatttg

SEQ ID NO: 2423546 - DNA, 25 bp, Homo sapien
ctagatgaggtctgattccttaaat

SEQ ID NO: 2423547 - DNA, 25 bp, Homo sapien
tgtcttaacatgtcttttgatagca

SEQ ID NO: 2423548 - DNA, 25 bp, Homo sapien
tctggatacccacgtttgttactta

SEQ ID NO: 2423549 - DNA, 25 bp, Homo sapien
tatgtattgttacctcaactcttct

SEQ ID NO: 2423550 - DNA, 25 bp, Homo sapien
tctactgggctgtccatgtcttgtt

SEQ ID NO: 2423551 - DNA, 25 bp, Homo sapien
tctttgccacgtaaggtacacggtc

SEQ ID NO: 2423552 - DNA, 25 bp, Homo sapien
catccttttgctactagagtgacca

SEQ ID NO: 2423553 - DNA, 25 bp, Homo sapien
aagccagagatctttatcacagcat

SEQ ID NO: 2423554 - DNA, 25 bp, Homo sapien
tcagttacgatcacatggccaatgg

SEQ ID NO: 2423555 - DNA, 25 bp, Homo sapien
gagtgagattccgcctcaaaataaa

SEQ ID NO: 2423556 - DNA, 25 bp, Homo sapien
gattccgcctcaaaataaatacaat

SEQ ID NO: 2423557 - DNA, 25 bp, Homo sapien
gtgagattccgcctcaaaataaata

SEQ ID NO: 2423558 - DNA, 25 bp, Homo sapien
gagattccgcctcaaaataaataca

SEQ ID NO: 2423559 - DNA, 25 bp, Homo sapien
tttctcttataaatctccaatcaag

SEQ ID NO: 2423560 - DNA, 25 bp, Homo sapien
tgattttctcttataaatctccaat

SEQ ID NO: 2423561 - DNA, 25 bp, Homo sapien
atttgtcccatgctgctaatgattt

SEQ ID NO: 2423562 - DNA, 25 bp, Homo sapien
tttgtcccatgctgctaatgatttt

SEQ ID NO: 2423563 - DNA, 25 bp, Homo sapien
gctgctataaagtaagtgcatctgg

SEQ ID NO: 2423564 - DNA, 25 bp, Homo sapien
ctagacagacaatgagctatttggg

SEQ ID NO: 2423565 - DNA, 25 bp, Homo sapien
cagagataattggagactagacaga

SEQ ID NO: 2423566 - DNA, 25 bp, Homo sapien
taatcgtttcatgaccaaggcaaag

SEQ ID NO: 2423567 - DNA, 25 bp, Homo sapien
gagagcctttgagaacaaacccagc

SEQ ID NO: 2423568 - DNA, 25 bp, Homo sapien
gctgagaccgaagccctctgtaatt

SEQ ID NO: 2423569 - DNA, 25 bp, Homo sapien
tccagtcacgacagaaagaaggccc

SEQ ID NO: 2423570 - DNA, 25 bp, Homo sapien
tctttgttaccctatggagagagcc

SEQ ID NO: 2423571 - DNA, 25 bp, Homo sapien
gcggacacttttggcgatcaaggac

SEQ ID NO: 2423572 - DNA, 25 bp, Homo sapien
tgcttcttgtgtgtagttgcggaca

SEQ ID NO: 2423573 - DNA, 25 bp, Homo sapien
tacatccttataacaatggaatgcc

SEQ ID NO: 2423574 - DNA, 25 bp, Homo sapien
caaggacagatacatccttataaca

SEQ ID NO: 2423575 - DNA, 25 bp, Homo sapien
aaaggctcataatttgcataagaag

SEQ ID NO: 2423576 - DNA, 25 bp, Homo sapien
gcataagaagcccttgaaatagaaa

SEQ ID NO: 2423577 - DNA, 25 bp, Homo sapien
atcacttaacttttagcccataatg

SEQ ID NO: 2423578 - DNA, 25 bp, Homo sapien
gaattaatgcatgtcaggtgatggc

SEQ ID NO: 2423579 - DNA, 25 bp, Homo sapien
ttactttcctgcttcgactgccaaa

SEQ ID NO: 2423580 - DNA, 25 bp, Homo sapien
gttgtcagtctggatattccggttt

SEQ ID NO: 2423581 - DNA, 25 bp, Homo sapien
cagtctggatattccggttttgaat

SEQ ID NO: 2423582 - DNA, 25 bp, Homo sapien
ctgccaaaacatccaatacttttgt

SEQ ID NO: 2423583 - DNA, 25 bp, Homo sapien
gaatgcacacacaattctccgtggc

SEQ ID NO: 2423584 - DNA, 25 bp, Homo sapien
gtaggagaggttatgaagaatgcac

SEQ ID NO: 2423585 - DNA, 25 bp, Homo sapien
aggagaggttatgaagaatgcacac

SEQ ID NO: 2423586 - DNA, 25 bp, Homo sapien
ctggtaggagaggttatgaagaatg

SEQ ID NO: 2423587 - DNA, 25 bp, Homo sapien
cgcttttctcccatcagcgccagca

SEQ ID NO: 2423588 - DNA, 25 bp, Homo sapien
tctggctggtaatctgcaatggttc

SEQ ID NO: 2423589 - DNA, 25 bp, Homo sapien
tgagtcaatgagtccgtcacatctt

SEQ ID NO: 2423590 - DNA, 25 bp, Homo sapien
tctgcaatggttcctctgacataat

SEQ ID NO: 2423591 - DNA, 25 bp, Homo sapien
ggcagacttgcccagtcaacaaatc

SEQ ID NO: 2423592 - DNA, 25 bp, Homo sapien
tttccaaacaacacgtaattgtgtc

SEQ ID NO: 2423593 - DNA, 25 bp, Homo sapien
agttttacttgatgcttcttccagg

SEQ ID NO: 2423594 - DNA, 25 bp, Homo sapien
aaagtaagtctaggctgtgtatcca

SEQ ID NO: 2423595 - DNA, 25 bp, Homo sapien
ggctagatcaaataagtcatgagta

SEQ ID NO: 2423596 - DNA, 25 bp, Homo sapien
caaaggtaactagaatgaaaatgca

SEQ ID NO: 2423597 - DNA, 25 bp, Homo sapien
ttcagaataagatatggatgagcaa

SEQ ID NO: 2423598 - DNA, 25 bp, Homo sapien
tatgaaaaccagctgggcgaggtgc

SEQ ID NO: 2423599 - DNA, 25 bp, Homo sapien
cagaagatggattcgaggaaggcca

SEQ ID NO: 2423600 - DNA, 25 bp, Homo sapien
gagcgatggatcaaagtgcactaga

SEQ ID NO: 2423601 - DNA, 25 bp, Homo sapien
tatctgctcagtagagaaggcttct

SEQ ID NO: 2423602 - DNA, 25 bp, Homo sapien
tcagtgagtttaagttcggttccca

SEQ ID NO: 2423603 - DNA, 25 bp, Homo sapien
ccagtgacgttgtagaatatgtcaa

SEQ ID NO: 2423604 - DNA, 25 bp, Homo sapien
gatattctccgtcagcgtaagcaat

SEQ ID NO: 2423605 - DNA, 25 bp, Homo sapien
cttaggcatccagtgacgttgtaga

SEQ ID NO: 2423606 - DNA, 25 bp, Homo sapien
gggatgatgatattctccgtcagcg

SEQ ID NO: 2423607 - DNA, 25 bp, Homo sapien
ccggccagccattcctacttcttaa

SEQ ID NO: 2423608 - DNA, 25 bp, Homo sapien
cgcccggccagccattcctacttct

SEQ ID NO: 2423609 - DNA, 25 bp, Homo sapien
gcccggccagccattcctacttctt

SEQ ID NO: 2423610 - DNA, 25 bp, Homo sapien
cccggccagccattcctacttctta

SEQ ID NO: 2423611 - DNA, 25 bp, Homo sapien
gaagcttgaggatgccacgaagctg

SEQ ID NO: 2423612 - DNA, 25 bp, Homo sapien
gcttgaggatgccacgaagctggtt

SEQ ID NO: 2423613 - DNA, 25 bp, Homo sapien
cttgaggatgccacgaagctggtta

SEQ ID NO: 2423614 - DNA, 25 bp, Homo sapien
tgaggatgccacgaagctggttaac

SEQ ID NO: 2423615 - DNA, 25 bp, Homo sapien
tcatgaacgggcatgaacttgcctt

SEQ ID NO: 2423616 - DNA, 25 bp, Homo sapien
gaaacttttaagttgccaagagctg

SEQ ID NO: 2423617 - DNA, 25 bp, Homo sapien
ccaagagctgttggtaaagatctca

SEQ ID NO: 2423618 - DNA, 25 bp, Homo sapien
ttatgctcagcggagagctgcacgc

SEQ ID NO: 2423619 - DNA, 25 bp, Homo sapien
cctgtcacctttatcaccttggctt

SEQ ID NO: 2423620 - DNA, 25 bp, Homo sapien
tgtcacctttatcaccttggctttc

SEQ ID NO: 2423621 - DNA, 25 bp, Homo sapien
ttatcaccttggctttcagcacttg

SEQ ID NO: 2423622 - DNA, 25 bp, Homo sapien
atcaccttggctttcagcacttgct

SEQ ID NO: 2423623 - DNA, 25 bp, Homo sapien
ctcctccctcacaaatgtatcactt

SEQ ID NO: 2423624 - DNA, 25 bp, Homo sapien
cctcctccctcacaaatgtatcact

SEQ ID NO: 2423625 - DNA, 25 bp, Homo sapien
tcctccctcacaaatgtatcacttt

SEQ ID NO: 2423626 - DNA, 25 bp, Homo sapien
tgaaccaccacgcacggtcccaatt

SEQ ID NO: 2423627 - DNA, 25 bp, Homo sapien
tggcagcatgtggtctgcctcgagc

SEQ ID NO: 2423628 - DNA, 25 bp, Homo sapien
gatggcagcatgtggtctgcctcga

SEQ ID NO: 2423629 - DNA, 25 bp, Homo sapien
ggcagcatgtggtctgcctcgagca

SEQ ID NO: 2423630 - DNA, 25 bp, Homo sapien
atggcagcatgtggtctgcctcgag

SEQ ID NO: 2423631 - DNA, 25 bp, Homo sapien
gctgctatctggggcacctaagcta

SEQ ID NO: 2423632 - DNA, 25 bp, Homo sapien
tgctatctggggcacctaagctaga

SEQ ID NO: 2423633 - DNA, 25 bp, Homo sapien
gccatgctggtactgtctgtggtat

SEQ ID NO: 2423634 - DNA, 25 bp, Homo sapien
cagcttccctcagcgtgcgggtgct

SEQ ID NO: 2423635 - DNA, 25 bp, Homo sapien
ggccgcctggccgacagtcaagtgc

SEQ ID NO: 2423636 - DNA, 25 bp, Homo sapien
tggtatgtgtcaaagtggcgctgcc

SEQ ID NO: 2423637 - DNA, 25 bp, Homo sapien
aggagaaatctccagtctcctcaga

SEQ ID NO: 2423638 - DNA, 25 bp, Homo sapien
gacttctgggagctgtactgtgctg

SEQ ID NO: 2423639 - DNA, 25 bp, Homo sapien
taatcgctgtgcgtgtagtgagccc

SEQ ID NO: 2423640 - DNA, 25 bp, Homo sapien
ccagcgaccttcataagtggcagtt

SEQ ID NO: 2423641 - DNA, 25 bp, Homo sapien
acactgctggttcggtgaagatttc

SEQ ID NO: 2423642 - DNA, 25 bp, Homo sapien
tttcaaccaagtgtaggttgtagac

SEQ ID NO: 2423643 - DNA, 25 bp, Homo sapien
aggaacactgctggttcggtgaaga

SEQ ID NO: 2423644 - DNA, 25 bp, Homo sapien
gttgtagacatactcaggaacactg

SEQ ID NO: 2423645 - DNA, 25 bp, Homo sapien
aaatccgtaggcttcatctggaacc

SEQ ID NO: 2423646 - DNA, 25 bp, Homo sapien
tagatgcctgtttcccgtaattcca

SEQ ID NO: 2423647 - DNA, 25 bp, Homo sapien
ctggaacccctattctaccgctttg

SEQ ID NO: 2423648 - DNA, 25 bp, Homo sapien
tcgaaaaagaagtaggcatcttccc

SEQ ID NO: 2423649 - DNA, 25 bp, Homo sapien
tctgtgttggcataaaacatacgat

SEQ ID NO: 2423650 - DNA, 25 bp, Homo sapien
cttactttccaagaagaacaaccag

SEQ ID NO: 2423651 - DNA, 25 bp, Homo sapien
tgcttaggctggaaaataagtagaa

SEQ ID NO: 2423652 - DNA, 25 bp, Homo sapien
tacgattcatttccttggacttaca

SEQ ID NO: 2423653 - DNA, 25 bp, Homo sapien
ttcaattctctctccagaattcact

SEQ ID NO: 2423654 - DNA, 25 bp, Homo sapien
ccatcgcccaggctggaggcagtgg

SEQ ID NO: 2423655 - DNA, 25 bp, Homo sapien
tctctctccagaattcacttttttt

SEQ ID NO: 2423656 - DNA, 25 bp, Homo sapien
tttttttttgagatggagtctcact

SEQ ID NO: 2423657 - DNA, 25 bp, Homo sapien
cacacaggtgatgcattactttgta

SEQ ID NO: 2423658 - DNA, 25 bp, Homo sapien
gaatatctaatatgcctcctgtgtc

SEQ ID NO: 2423659 - DNA, 25 bp, Homo sapien
tctcttcctagctggccattctcag

SEQ ID NO: 2423660 - DNA, 25 bp, Homo sapien
gcccggcatgaagaacatactcatt

SEQ ID NO: 2423661 - DNA, 25 bp, Homo sapien
gctcttgactgtctggccgccgcgg

SEQ ID NO: 2423662 - DNA, 25 bp, Homo sapien
caggctcttgactgtctggccgccg

SEQ ID NO: 2423663 - DNA, 25 bp, Homo sapien
agctgcggcccttccgggcgagggt

SEQ ID NO: 2423664 - DNA, 25 bp, Homo sapien
ccttccgggcgagggtctgctgcac

SEQ ID NO: 2423665 - DNA, 25 bp, Homo sapien
cggtgggggcgaccgagctgctcgc

SEQ ID NO: 2423666 - DNA, 25 bp, Homo sapien
gggccggtgggggcgaccgagctgc

SEQ ID NO: 2423667 - DNA, 25 bp, Homo sapien
gggcgaccgagctgctcgcctgcct

SEQ ID NO: 2423668 - DNA, 25 bp, Homo sapien
gtgggggcgaccgagctgctcgcct

SEQ ID NO: 2423669 - DNA, 25 bp, Homo sapien
ttgtcggagtcccagcggataccgc

SEQ ID NO: 2423670 - DNA, 25 bp, Homo sapien
gatccccgagcgagtagtatgtctg

SEQ ID NO: 2423671 - DNA, 25 bp, Homo sapien
gatggatttccgctcgatgcaggga

SEQ ID NO: 2423672 - DNA, 25 bp, Homo sapien
tctggttagtcaggctttgtcgcac

SEQ ID NO: 2423673 - DNA, 25 bp, Homo sapien
ggggctgagctacagcagtgacacc

SEQ ID NO: 2423674 - DNA, 25 bp, Homo sapien
aatatataacattattccccttgtt

SEQ ID NO: 2423675 - DNA, 25 bp, Homo sapien
gactgatttaggagggcaccggctt

SEQ ID NO: 2423676 - DNA, 25 bp, Homo sapien
cagcagtgacaccaagtggtggttt

SEQ ID NO: 2423677 - DNA, 25 bp, Homo sapien
gatcccacacatgggtactgaaaca

SEQ ID NO: 2423678 - DNA, 25 bp, Homo sapien
tgaaacattgttcttatgttttgcc

SEQ ID NO: 2423679 - DNA, 25 bp, Homo sapien
cacatgggtactgaaacattgttct

SEQ ID NO: 2423680 - DNA, 25 bp, Homo sapien
tccctgatcccacacatgggtactg

SEQ ID NO: 2423681 - DNA, 25 bp, Homo sapien
gaagtaaagtttatatggacactgg

SEQ ID NO: 2423682 - DNA, 25 bp, Homo sapien
cacacagggttagacaatcgaagaa

SEQ ID NO: 2423683 - DNA, 25 bp, Homo sapien
gacactggtatgacaggatattgaa

SEQ ID NO: 2423684 - DNA, 25 bp, Homo sapien
ggatattgaagtaaccacacagggt

SEQ ID NO: 2423685 - DNA, 25 bp, Homo sapien
tctccagttctccttaacttaatct

SEQ ID NO: 2423686 - DNA, 25 bp, Homo sapien
cttaacttaatcttaactctccagt

SEQ ID NO: 2423687 - DNA, 25 bp, Homo sapien
tctccttaacttaatcttaactctc

SEQ ID NO: 2423688 - DNA, 25 bp, Homo sapien
tccagttctccttaacttaatctta

SEQ ID NO: 2423689 - DNA, 25 bp, Homo sapien
attgtggccttcttattcaacattg

SEQ ID NO: 2423690 - DNA, 25 bp, Homo sapien
tattgtggccttcttattcaacatt

SEQ ID NO: 2423691 - DNA, 25 bp, Homo sapien
gacagtttataatcgtctctccatg

SEQ ID NO: 2423692 - DNA, 25 bp, Homo sapien
ggagatgttagaggacaaaatacca

SEQ ID NO: 2423693 - DNA, 25 bp, Homo sapien
gacaaaataccaatataagggtctc

SEQ ID NO: 2423694 - DNA, 25 bp, Homo sapien
taatgtgaccttgggactgctgatt

SEQ ID NO: 2423695 - DNA, 25 bp, Homo sapien
ttcccagagaagtctgtgccttgtt

SEQ ID NO: 2423696 - DNA, 25 bp, Homo sapien
gttgcttcatggctgttggcggttc

SEQ ID NO: 2423697 - DNA, 25 bp, Homo sapien
cccagagaagtctgtgccttgttgc

SEQ ID NO: 2423698 - DNA, 25 bp, Homo sapien
gttctgtgtgaattgctctatgctc

SEQ ID NO: 2423699 - DNA, 25 bp, Homo sapien
tatgctgataacaattctatagctt

SEQ ID NO: 2423700 - DNA, 25 bp, Homo sapien
ctgtggcagatacggatttgttgtg

SEQ ID NO: 2423701 - DNA, 25 bp, Homo sapien
gtagctgtggcagatacggatttgt

SEQ ID NO: 2423702 - DNA, 25 bp, Homo sapien
tttatgctgataacaattctatagc

SEQ ID NO: 2423703 - DNA, 25 bp, Homo sapien
tgttttcatcatataaattagaccc

SEQ ID NO: 2423704 - DNA, 25 bp, Homo sapien
tcatataaattagaccctccaaacc

SEQ ID NO: 2423705 - DNA, 25 bp, Homo sapien
cacttgttttcatcatataaattag

SEQ ID NO: 2423706 - DNA, 25 bp, Homo sapien
ttcatcatataaattagaccctcca

SEQ ID NO: 2423707 - DNA, 25 bp, Homo sapien
ccattgatatctttcctctcatggg

SEQ ID NO: 2423708 - DNA, 25 bp, Homo sapien
tcctgtccattgatatctttcctct

SEQ ID NO: 2423709 - DNA, 25 bp, Homo sapien
gtccattgatatctttcctctcatg

SEQ ID NO: 2423710 - DNA, 25 bp, Homo sapien
attgatatctttcctctcatgggcc

SEQ ID NO: 2423711 - DNA, 25 bp, Homo sapien
tgattggtagagcccagtggtctgt

SEQ ID NO: 2423712 - DNA, 25 bp, Homo sapien
atcctgctgattggtagagcccagt

SEQ ID NO: 2423713 - DNA, 25 bp, Homo sapien
gctgattggtagagcccagtggtct

SEQ ID NO: 2423714 - DNA, 25 bp, Homo sapien
ctgctgattggtagagcccagtggt

SEQ ID NO: 2423715 - DNA, 25 bp, Homo sapien
tggagcacccgccaggatcaaagcc

SEQ ID NO: 2423716 - DNA, 25 bp, Homo sapien
agccaccctccagcgacactttgca

SEQ ID NO: 2423717 - DNA, 25 bp, Homo sapien
tgtctcagaaggagcggcccttggc

SEQ ID NO: 2423718 - DNA, 25 bp, Homo sapien
ctccagcgacactttgcaactcctg

SEQ ID NO: 2423719 - DNA, 25 bp, Homo sapien
aatctgtgccaactgtcctagaggc

SEQ ID NO: 2423720 - DNA, 25 bp, Homo sapien
gcatcccttgcgtctatctgtctga

SEQ ID NO: 2423721 - DNA, 25 bp, Homo sapien
ccttcaggaatctggttctttccat

SEQ ID NO: 2423722 - DNA, 25 bp, Homo sapien
ttagtgtcactctcaagggcctgag

SEQ ID NO: 2423723 - DNA, 25 bp, Homo sapien
aggcagcagggttacatctgaggaa

SEQ ID NO: 2423724 - DNA, 25 bp, Homo sapien
aaacttttgtttgccttgcagattc

SEQ ID NO: 2423725 - DNA, 25 bp, Homo sapien
tggcctcaggtgcatcactgatgaa

SEQ ID NO: 2423726 - DNA, 25 bp, Homo sapien
gcagggttacatctgaggaaataaa

SEQ ID NO: 2423727 - DNA, 25 bp, Homo sapien
tgattgccaattactaggtcctgtg

SEQ ID NO: 2423728 - DNA, 25 bp, Homo sapien
gattgccaattactaggtcctgtgc

SEQ ID NO: 2423729 - DNA, 25 bp, Homo sapien
gagaggcaaggacatgccgtgcccc

SEQ ID NO: 2423730 - DNA, 25 bp, Homo sapien
agaggcaaggacatgccgtgcccca

SEQ ID NO: 2423731 - DNA, 25 bp, Homo sapien
gaggcaaggacatgccgtgccccat

SEQ ID NO: 2423732 - DNA, 25 bp, Homo sapien
ggagaggcaaggacatgccgtgccc

SEQ ID NO: 2423733 - DNA, 25 bp, Homo sapien
gcttctctgagaggagcaactggca

SEQ ID NO: 2423734 - DNA, 25 bp, Homo sapien
aagtgacatctgcggtcagatgaag

SEQ ID NO: 2423735 - DNA, 25 bp, Homo sapien
aggagagcagatccattaaaacaga

SEQ ID NO: 2423736 - DNA, 25 bp, Homo sapien
ggcaagttgtacaacatatagtgta

SEQ ID NO: 2423737 - DNA, 25 bp, Homo sapien
caagaggagaggcagtatgttccca

SEQ ID NO: 2423738 - DNA, 25 bp, Homo sapien
ccaagaggagaggcagtatgttccc

SEQ ID NO: 2423739 - DNA, 25 bp, Homo sapien
tggaggagcgtgtggttggcaagcc

SEQ ID NO: 2423740 - DNA, 25 bp, Homo sapien
gagcgtgtggttggcaagcctttcc

SEQ ID NO: 2423741 - DNA, 25 bp, Homo sapien
tgtggaggagcgtgtggttggcaag

SEQ ID NO: 2423742 - DNA, 25 bp, Homo sapien
gaggagcgtgtggttggcaagcctt

SEQ ID NO: 2423743 - DNA, 25 bp, Homo sapien
tagttttctaaagtattcgatgtac

SEQ ID NO: 2423744 - DNA, 25 bp, Homo sapien
ttctggtcttgtttcaaggatgcta

SEQ ID NO: 2423745 - DNA, 25 bp, Homo sapien
caaggatgctattaagtttgccaaa

SEQ ID NO: 2423746 - DNA, 25 bp, Homo sapien
aaatagttttctaaagtattcgatg

SEQ ID NO: 2423747 - DNA, 25 bp, Homo sapien
tgtgtctgaatcacttggtatgttt

SEQ ID NO: 2423748 - DNA, 25 bp, Homo sapien
gtgtctgaatcacttggtatgtttt

SEQ ID NO: 2423749 - DNA, 25 bp, Homo sapien
cttccctgtgtctgaatcacttggt

SEQ ID NO: 2423750 - DNA, 25 bp, Homo sapien
tccctgtgtctgaatcacttggtat

SEQ ID NO: 2423751 - DNA, 25 bp, Homo sapien
gtgtttgtctctcatcattgtgctg

SEQ ID NO: 2423752 - DNA, 25 bp, Homo sapien
atcattgtgctgatccagcacaact

SEQ ID NO: 2423753 - DNA, 25 bp, Homo sapien
tgtgtttgtctctcatcattgtgct

SEQ ID NO: 2423754 - DNA, 25 bp, Homo sapien
tcatcattgtgctgatccagcacaa

SEQ ID NO: 2423755 - DNA, 25 bp, Homo sapien
taccctcatcagtcctaggtatcat

SEQ ID NO: 2423756 - DNA, 25 bp, Homo sapien
tttaccctcatcagtcctaggtatc

SEQ ID NO: 2423757 - DNA, 25 bp, Homo sapien
taatttaccctcatcagtcctaggt

SEQ ID NO: 2423758 - DNA, 25 bp, Homo sapien
ttttaatttaccctcatcagtccta

SEQ ID NO: 2423759 - DNA, 25 bp, Homo sapien
gaaaatggagtagatccagttccca

SEQ ID NO: 2423760 - DNA, 25 bp, Homo sapien
tccacgagagaatagaaggtcaggt

SEQ ID NO: 2423761 - DNA, 25 bp, Homo sapien
ttatccacacacaatgagtcagcag

SEQ ID NO: 2423762 - DNA, 25 bp, Homo sapien
gatgtagcattcttttgtccacgag

SEQ ID NO: 2423763 - DNA, 25 bp, Homo sapien
ctgaggctttattctctgaagcgtt

SEQ ID NO: 2423764 - DNA, 25 bp, Homo sapien
tgaggctttattctctgaagcgttg

SEQ ID NO: 2423765 - DNA, 25 bp, Homo sapien
tagcaaaggatgcatgttgctgtct

SEQ ID NO: 2423766 - DNA, 25 bp, Homo sapien
tgcatagcaaaggatgcatgttgct

SEQ ID NO: 2423767 - DNA, 25 bp, Homo sapien
cattgcatagcaaaggatgcatgtt

SEQ ID NO: 2423768 - DNA, 25 bp, Homo sapien
catgttgctgtctggagtacttcca

SEQ ID NO: 2423769 - DNA, 25 bp, Homo sapien
tgcattaggctttgtgtcatttcca

SEQ ID NO: 2423770 - DNA, 25 bp, Homo sapien
ccatcattggtgattagaggtggct

SEQ ID NO: 2423771 - DNA, 25 bp, Homo sapien
ggtaaagatgtcacaacactggtgc

SEQ ID NO: 2423772 - DNA, 25 bp, Homo sapien
gaagggtccacaagttccttcaggc

SEQ ID NO: 2423773 - DNA, 25 bp, Homo sapien
tctaaattgagaaacttgagagcga

SEQ ID NO: 2423774 - DNA, 25 bp, Homo sapien
tttctcatctaaattgagaaacttg

SEQ ID NO: 2423775 - DNA, 25 bp, Homo sapien
gctggtggatctgtcaaacataatt

SEQ ID NO: 2423776 - DNA, 25 bp, Homo sapien
ggtggatctgtcaaacataatttct

SEQ ID NO: 2423777 - DNA, 25 bp, Homo sapien
caaatcttagaggactccattggtg

SEQ ID NO: 2423778 - DNA, 25 bp, Homo sapien
gacaccaatgtattgtttactggct

SEQ ID NO: 2423779 - DNA, 25 bp, Homo sapien
tttttccaaatcttagaggactcca

SEQ ID NO: 2423780 - DNA, 25 bp, Homo sapien
ctctgaggacaccaatgtattgttt

SEQ ID NO: 2423781 - DNA, 25 bp, Homo sapien
ctcctcactctgtgcgtgcatcttt

SEQ ID NO: 2423782 - DNA, 25 bp, Homo sapien
gctcctcactctgtgcgtgcatctt

SEQ ID NO: 2423783 - DNA, 25 bp, Homo sapien
gcgtgcatctttttattccactcat

SEQ ID NO: 2423784 - DNA, 25 bp, Homo sapien
tgcgtgcatctttttattccactca

SEQ ID NO: 2423785 - DNA, 25 bp, Homo sapien
acaatgtgaggcagttcttttcgac

SEQ ID NO: 2423786 - DNA, 25 bp, Homo sapien
caattgtatgctgtcaagtttcaca

SEQ ID NO: 2423787 - DNA, 25 bp, Homo sapien
ccacttgggctggactttttgtcta

SEQ ID NO: 2423788 - DNA, 25 bp, Homo sapien
gaatccaatcacttctttccgttgg

SEQ ID NO: 2423789 - DNA, 25 bp, Homo sapien
tggagattactatgttctttaagtg

SEQ ID NO: 2423790 - DNA, 25 bp, Homo sapien
actggagattactatgttctttaag

SEQ ID NO: 2423791 - DNA, 25 bp, Homo sapien
acactggagattactatgttcttta

SEQ ID NO: 2423792 - DNA, 25 bp, Homo sapien
gagattactatgttctttaagtgga

SEQ ID NO: 2423793 - DNA, 25 bp, Homo sapien
tgttgtgccaccgaatcataccctg

SEQ ID NO: 2423794 - DNA, 25 bp, Homo sapien
ggcataactttgctctttggagagg

SEQ ID NO: 2423795 - DNA, 25 bp, Homo sapien
taactgaaatccaccacactgtgca

SEQ ID NO: 2423796 - DNA, 25 bp, Homo sapien
tactttgatgagaagacacttgaac

SEQ ID NO: 2423797 - DNA, 25 bp, Homo sapien
taaaagggtgtcactgaataatgta

SEQ ID NO: 2423798 - DNA, 25 bp, Homo sapien
ctctgtcataggttttttgggaaca

SEQ ID NO: 2423799 - DNA, 25 bp, Homo sapien
cgaaataatgggtctttacagcagg

SEQ ID NO: 2423800 - DNA, 25 bp, Homo sapien
ccatgtcactgagttaacgattaaa

SEQ ID NO: 2423801 - DNA, 25 bp, Homo sapien
atgtgatgtcccacacaaataaggg

SEQ ID NO: 2423802 - DNA, 25 bp, Homo sapien
tgagttgtggtgaatttcctctcgc

SEQ ID NO: 2423803 - DNA, 25 bp, Homo sapien
aatctgagcataaacctacctcctg

SEQ ID NO: 2423804 - DNA, 25 bp, Homo sapien
tcttcaattacaagcagaaagatgg

SEQ ID NO: 2423805 - DNA, 25 bp, Homo sapien
aatctgaggcagaactgtgtttgcc

SEQ ID NO: 2423806 - DNA, 25 bp, Homo sapien
taatgccatcactataagagatgtc

SEQ ID NO: 2423807 - DNA, 25 bp, Homo sapien
taggctcgacaaggtagccaaatgt

SEQ ID NO: 2423808 - DNA, 25 bp, Homo sapien
tgttagctaggagtacctgttttcc

SEQ ID NO: 2423809 - DNA, 25 bp, Homo sapien
taaggttggggtaattcagtataga

SEQ ID NO: 2423810 - DNA, 25 bp, Homo sapien
gggtaattcagtatagataccttcc

SEQ ID NO: 2423811 - DNA, 25 bp, Homo sapien
taattcagtatagataccttccaac

SEQ ID NO: 2423812 - DNA, 25 bp, Homo sapien
cagtatagataccttccaacagggc

SEQ ID NO: 2423813 - DNA, 25 bp, Homo sapien
gctaacaggcatttgatacgaagga

SEQ ID NO: 2423814 - DNA, 25 bp, Homo sapien
gacaagttttgagtttagcagagcc

SEQ ID NO: 2423815 - DNA, 25 bp, Homo sapien
gattcaatgagcacgtgatcctaga

SEQ ID NO: 2423816 - DNA, 25 bp, Homo sapien
ggcctgaaccttgatccttatgaag

SEQ ID NO: 2423817 - DNA, 25 bp, Homo sapien
ctatcaaaactggtcgcccggccag

SEQ ID NO: 2423818 - DNA, 25 bp, Homo sapien
tcaaaactggtcgcccggccaggta

SEQ ID NO: 2423819 - DNA, 25 bp, Homo sapien
tatcaaaactggtcgcccggccagg

SEQ ID NO: 2423820 - DNA, 25 bp, Homo sapien
gactatcaaaactggtcgcccggcc

SEQ ID NO: 2423821 - DNA, 25 bp, Homo sapien
aagacaaaaatttcataatgtatga

SEQ ID NO: 2423822 - DNA, 25 bp, Homo sapien
gaaagacaaaaatttcataatgtat

SEQ ID NO: 2423823 - DNA, 25 bp, Homo sapien
ctgaaagacaaaaatttcataatgt

SEQ ID NO: 2423824 - DNA, 25 bp, Homo sapien
agacaaaaatttcataatgtatgat

SEQ ID NO: 2423825 - DNA, 25 bp, Homo sapien
ttttcgatgataggccagcatttca

SEQ ID NO: 2423826 - DNA, 25 bp, Homo sapien
ctccagcaatgggtgccagtgcgtt

SEQ ID NO: 2423827 - DNA, 25 bp, Homo sapien
tttcattccagtggtctcgcccaag

SEQ ID NO: 2423828 - DNA, 25 bp, Homo sapien
ccagtgcgttattggttttcgatga

SEQ ID NO: 2423829 - DNA, 25 bp, Homo sapien
catgaccgcaatggagaggctgacc

SEQ ID NO: 2423830 - DNA, 25 bp, Homo sapien
attgtacacagggtttagagtgttt

SEQ ID NO: 2423831 - DNA, 25 bp, Homo sapien
taatcttcgaccttcacacatcagg

SEQ ID NO: 2423832 - DNA, 25 bp, Homo sapien
ggctgacctggtccacgttctctgg

SEQ ID NO: 2423833 - DNA, 25 bp, Homo sapien
gccagtaatatccatcgccttcaga

SEQ ID NO: 2423834 - DNA, 25 bp, Homo sapien
aatatccatcgccttcagatttctg

SEQ ID NO: 2423835 - DNA, 25 bp, Homo sapien
atgagccagtaatatccatcgcctt

SEQ ID NO: 2423836 - DNA, 25 bp, Homo sapien
tctgcacttaatgactgtcaatgtc

SEQ ID NO: 2423837 - DNA, 25 bp, Homo sapien
taacaaagggaaaacatgatttcac

SEQ ID NO: 2423838 - DNA, 25 bp, Homo sapien
ggaaaacatgatttcacccaggtct

SEQ ID NO: 2423839 - DNA, 25 bp, Homo sapien
gtaacaaagggaaaacatgatttca

SEQ ID NO: 2423840 - DNA, 25 bp, Homo sapien
aacatgatttcacccaggtctatac

SEQ ID NO: 2423841 - DNA, 25 bp, Homo sapien
ctaggagatatacagcatcttcagc

SEQ ID NO: 2423842 - DNA, 25 bp, Homo sapien
tcactggaagcacatatcgtactgt

SEQ ID NO: 2423843 - DNA, 25 bp, Homo sapien
catatcgtactgtgcttacccagca

SEQ ID NO: 2423844 - DNA, 25 bp, Homo sapien
gtactgtgcttacccagcaactcta

SEQ ID NO: 2423845 - DNA, 25 bp, Homo sapien
ccttccaatgagtctatcactggaa

SEQ ID NO: 2423846 - DNA, 25 bp, Homo sapien
tgaaagtaaaagtagtcaaaacaca

SEQ ID NO: 2423847 - DNA, 25 bp, Homo sapien
accttgttctctaaatgtgcataga

SEQ ID NO: 2423848 - DNA, 25 bp, Homo sapien
ctacaatctttcccatgaaagtaaa

SEQ ID NO: 2423849 - DNA, 25 bp, Homo sapien
cacactgatcagacaacaaaacctt

SEQ ID NO: 2423850 - DNA, 25 bp, Homo sapien
ttccctggagagatcagagacttca

SEQ ID NO: 2423851 - DNA, 25 bp, Homo sapien
cagtgaatatctttccatactgtgg

SEQ ID NO: 2423852 - DNA, 25 bp, Homo sapien
gtggtagcacagtgaatatctttcc

SEQ ID NO: 2423853 - DNA, 25 bp, Homo sapien
gcacagtgaatatctttccatactg

SEQ ID NO: 2423854 - DNA, 25 bp, Homo sapien
taaaacaggttctgtgcccatgcta

SEQ ID NO: 2423855 - DNA, 25 bp, Homo sapien
cctcggcaggtgtcttcggaaggaa

SEQ ID NO: 2423856 - DNA, 25 bp, Homo sapien
gacatcttcgttttggttgccctca

SEQ ID NO: 2423857 - DNA, 25 bp, Homo sapien
taaagtctttctgtgcacgcgggtc

SEQ ID NO: 2423858 - DNA, 25 bp, Homo sapien
tgccgagataacacaagtgagccac

SEQ ID NO: 2423859 - DNA, 25 bp, Homo sapien
gatggctggtttcttttcacctgga

SEQ ID NO: 2423860 - DNA, 25 bp, Homo sapien
aaagaatatatagttgtggcagcca

SEQ ID NO: 2423861 - DNA, 25 bp, Homo sapien
cacaacacgtggctggccaatgtta

SEQ ID NO: 2423862 - DNA, 25 bp, Homo sapien
gaagtctttgctcacgtgttttcat

SEQ ID NO: 2423863 - DNA, 25 bp, Homo sapien
taagtggtctctatactcaacaggt

SEQ ID NO: 2423864 - DNA, 25 bp, Homo sapien
gctaagctaatatacattcacagtg

SEQ ID NO: 2423865 - DNA, 25 bp, Homo sapien
ggtgccttggcatagtgacaaaatt

SEQ ID NO: 2423866 - DNA, 25 bp, Homo sapien
taggctcagtaatttgtctttgcac

SEQ ID NO: 2423867 - DNA, 25 bp, Homo sapien
tattgcaggctcaatagcttttacg

SEQ ID NO: 2423868 - DNA, 25 bp, Homo sapien
tcagtctcaaaaacttcagtaggag

SEQ ID NO: 2423869 - DNA, 25 bp, Homo sapien
cgggttgatgacgtaggctcagtaa

SEQ ID NO: 2423870 - DNA, 25 bp, Homo sapien
aaaagctgacaacgacagctaacag

SEQ ID NO: 2423871 - DNA, 25 bp, Homo sapien
caacaaggccagtccacaaaagctg

SEQ ID NO: 2423872 - DNA, 25 bp, Homo sapien
gctgacaacgacagctaacaggctg

SEQ ID NO: 2423873 - DNA, 25 bp, Homo sapien
gaagtcacaggtttgcttttccagc

SEQ ID NO: 2423874 - DNA, 25 bp, Homo sapien
aataaagtgatactagtctgcctgg

SEQ ID NO: 2423875 - DNA, 25 bp, Homo sapien
ggaaaacattagatgcctggtcaga

SEQ ID NO: 2423876 - DNA, 25 bp, Homo sapien
gaatgtgatagacctcaaaggagag

SEQ ID NO: 2423877 - DNA, 25 bp, Homo sapien
tattgggcagataaaatgatgcatc

SEQ ID NO: 2423878 - DNA, 25 bp, Homo sapien
tcagaaacttttagcatagcagaac

SEQ ID NO: 2423879 - DNA, 25 bp, Homo sapien
caacgggcaaacttgatgactaggc

SEQ ID NO: 2423880 - DNA, 25 bp, Homo sapien
gaacttctaaaatgcgaattcgtca

SEQ ID NO: 2423881 - DNA, 25 bp, Homo sapien
tattctgccactgtctatatgtctg

SEQ ID NO: 2423882 - DNA, 25 bp, Homo sapien
taggtgtcgcctcacaaatgggatc

SEQ ID NO: 2423883 - DNA, 25 bp, Homo sapien
caaacagtggcttggattcgatcct

SEQ ID NO: 2423884 - DNA, 25 bp, Homo sapien
gacggtcgatatcctcctgcatcca

SEQ ID NO: 2423885 - DNA, 25 bp, Homo sapien
gccttgaggaaaatccacttgagac

SEQ ID NO: 2423886 - DNA, 25 bp, Homo sapien
gagccttctggcacagactgttcac

SEQ ID NO: 2423887 - DNA, 25 bp, Homo sapien
tcggtgacgatgtgcagagccttct

SEQ ID NO: 2423888 - DNA, 25 bp, Homo sapien
tgttcactccgtcctccttgtggaa

SEQ ID NO: 2423889 - DNA, 25 bp, Homo sapien
cctgtcccgagggaagatgcccgag

SEQ ID NO: 2423890 - DNA, 25 bp, Homo sapien
attgcgccgctgagagccggcaact

SEQ ID NO: 2423891 - DNA, 25 bp, Homo sapien
cccgcggtgactttggctggagatt

SEQ ID NO: 2423892 - DNA, 25 bp, Homo sapien
tctggcgccctaagccatagtccgc

SEQ ID NO: 2423893 - DNA, 25 bp, Homo sapien
agattgcgccgctgagagccggcaa

SEQ ID NO: 2423894 - DNA, 25 bp, Homo sapien
tgcggctgccgcgaggtttgcgcca

SEQ ID NO: 2423895 - DNA, 25 bp, Homo sapien
ggctgccgcgaggtttgcgccaact

SEQ ID NO: 2423896 - DNA, 25 bp, Homo sapien
ttaggagccccacgttggccccatg

SEQ ID NO: 2423897 - DNA, 25 bp, Homo sapien
cgttggccccatggcgggagcggag

SEQ ID NO: 2423898 - DNA, 25 bp, Homo sapien
ccgaggcgcgctggaactagagacc

SEQ ID NO: 2423899 - DNA, 25 bp, Homo sapien
tggaactagagacccggcatggagt

SEQ ID NO: 2423900 - DNA, 25 bp, Homo sapien
gcgagcgagccgaggcgcgctggaa

SEQ ID NO: 2423901 - DNA, 25 bp, Homo sapien
gcgcgctggaactagagacccggca

SEQ ID NO: 2423902 - DNA, 25 bp, Homo sapien
tgaagaactttatccattgtcaaat

SEQ ID NO: 2423903 - DNA, 25 bp, Homo sapien
aaagtaatctagttgacaggtgggc

SEQ ID NO: 2423904 - DNA, 25 bp, Homo sapien
tcatgtatgcaggatcaaagtaatc

SEQ ID NO: 2423905 - DNA, 25 bp, Homo sapien
tacagctgcctcagtatgaagaact

SEQ ID NO: 2423906 - DNA, 25 bp, Homo sapien
caagcaagattccaactttctcgga

SEQ ID NO: 2423907 - DNA, 25 bp, Homo sapien
catgtttcctataggatttcctgca

SEQ ID NO: 2423908 - DNA, 25 bp, Homo sapien
ctttctcggacaaatatgggctcat

SEQ ID NO: 2423909 - DNA, 25 bp, Homo sapien
tagaatatccattggcccacacctg

SEQ ID NO: 2423910 - DNA, 25 bp, Homo sapien
atccccaggacggtgtttgtacttg

SEQ ID NO: 2423911 - DNA, 25 bp, Homo sapien
gtagcagcaagccactgagtgctgg

SEQ ID NO: 2423912 - DNA, 25 bp, Homo sapien
caattcagggctttcttgccgaatc

SEQ ID NO: 2423913 - DNA, 25 bp, Homo sapien
gagcagccttagtagcagcaagcca

SEQ ID NO: 2423914 - DNA, 25 bp, Homo sapien
agttgctgctgggttgtctcattcc

SEQ ID NO: 2423915 - DNA, 25 bp, Homo sapien
ttgctgctgggttgtctcattccca

SEQ ID NO: 2423916 - DNA, 25 bp, Homo sapien
tgtaagttgctgctgggttgtctca

SEQ ID NO: 2423917 - DNA, 25 bp, Homo sapien
tgtgtaagttgctgctgggttgtct

SEQ ID NO: 2423918 - DNA, 25 bp, Homo sapien
ttaatctagttcctttattactcat

SEQ ID NO: 2423919 - DNA, 25 bp, Homo sapien
tttaatctagttcctttattactca

SEQ ID NO: 2423920 - DNA, 25 bp, Homo sapien
tctgttcttgtgtaacgtaacataa

SEQ ID NO: 2423921 - DNA, 25 bp, Homo sapien
tactatcatacaaggttgtgtaatc

SEQ ID NO: 2423922 - DNA, 25 bp, Homo sapien
ggtacagcacagtatcctctgaaga

SEQ ID NO: 2423923 - DNA, 25 bp, Homo sapien
tactcatactatagattccataatc

SEQ ID NO: 2423924 - DNA, 25 bp, Homo sapien
actgcaaagtcactgtaggcgttgg

SEQ ID NO: 2423925 - DNA, 25 bp, Homo sapien
cattgggatgagaggtcacatagtc

SEQ ID NO: 2423926 - DNA, 25 bp, Homo sapien
tatggttgtcactattgatgtagtc

SEQ ID NO: 2423927 - DNA, 25 bp, Homo sapien
gggttgttgagttctgcatgttgtc

SEQ ID NO: 2423928 - DNA, 25 bp, Homo sapien
aaggcctccaagtggactctttctg

SEQ ID NO: 2423929 - DNA, 25 bp, Homo sapien
taaggcctccaagtggactctttct

SEQ ID NO: 2423930 - DNA, 25 bp, Homo sapien
ttctggtttctgtcaaacaccctgt

SEQ ID NO: 2423931 - DNA, 25 bp, Homo sapien
caaacaccctgtttgacctgttgga

SEQ ID NO: 2423932 - DNA, 25 bp, Homo sapien
gaagctagctgccatcttgtgtgct

SEQ ID NO: 2423933 - DNA, 25 bp, Homo sapien
ttggcgtgcagatccagccctcttg

SEQ ID NO: 2423934 - DNA, 25 bp, Homo sapien
caagaagggttggtgcctcctgaag

SEQ ID NO: 2423935 - DNA, 25 bp, Homo sapien
gtagatgtacgctcttgctctgtca

SEQ ID NO: 2423936 - DNA, 25 bp, Homo sapien
ttcaccaagtctgtgtcgtccatat

SEQ ID NO: 2423937 - DNA, 25 bp, Homo sapien
accaagtctgtgtcgtccatatctc

SEQ ID NO: 2423938 - DNA, 25 bp, Homo sapien
aagtctgtgtcgtccatatctctca

SEQ ID NO: 2423939 - DNA, 25 bp, Homo sapien
caagtctgtgtcgtccatatctctc

SEQ ID NO: 2423940 - DNA, 25 bp, Homo sapien
catcattattatccacaccatcacc

SEQ ID NO: 2423941 - DNA, 25 bp, Homo sapien
cccaaatgacattgttgtcgtcatc

SEQ ID NO: 2423942 - DNA, 25 bp, Homo sapien
caaatgacattgttgtcgtcatcat

SEQ ID NO: 2423943 - DNA, 25 bp, Homo sapien
tcttcccaaatgacattgttgtcgt

SEQ ID NO: 2423944 - DNA, 25 bp, Homo sapien
acatctgccagttcaactggattac

SEQ ID NO: 2423945 - DNA, 25 bp, Homo sapien
tcacatctgccagttcaactggatt

SEQ ID NO: 2423946 - DNA, 25 bp, Homo sapien
cacatctgccagttcaactggatta

SEQ ID NO: 2423947 - DNA, 25 bp, Homo sapien
tcactgtgccagtggtgacaattcc

SEQ ID NO: 2423948 - DNA, 25 bp, Homo sapien
cagtggtgacaattcccgcaggaaa

SEQ ID NO: 2423949 - DNA, 25 bp, Homo sapien
gagtcatggcagtaaccttggtatt

SEQ ID NO: 2423950 - DNA, 25 bp, Homo sapien
gaaaaatcctactccgagagtcatg

SEQ ID NO: 2423951 - DNA, 25 bp, Homo sapien
cagtaaattccacgtggataagaac

SEQ ID NO: 2423952 - DNA, 25 bp, Homo sapien
tccacgtggataagaacttttctgt

SEQ ID NO: 2423953 - DNA, 25 bp, Homo sapien
attccacgtggataagaacttttct

SEQ ID NO: 2423954 - DNA, 25 bp, Homo sapien
aacagtaaattccacgtggataaga

SEQ ID NO: 2423955 - DNA, 25 bp, Homo sapien
ggctactataaacgcattcatccac

SEQ ID NO: 2423956 - DNA, 25 bp, Homo sapien
tacaaaacctggttacattcctgga

SEQ ID NO: 2423957 - DNA, 25 bp, Homo sapien
tacaactcccctagattaaaccaga

SEQ ID NO: 2423958 - DNA, 25 bp, Homo sapien
tgggaaagattacaaccgatatcac

SEQ ID NO: 2423959 - DNA, 25 bp, Homo sapien
gcaaaatcggcatgcaagggacatt

SEQ ID NO: 2423960 - DNA, 25 bp, Homo sapien
aaccctcagcaaaatcggcatgcaa

SEQ ID NO: 2423961 - DNA, 25 bp, Homo sapien
ctgaaccggaaaaagttgaaagcat

SEQ ID NO: 2423962 - DNA, 25 bp, Homo sapien
caatattgtactgaaccggaaaaag

SEQ ID NO: 2423963 - DNA, 25 bp, Homo sapien
taggagagttgccacaacctgtgcc

SEQ ID NO: 2423964 - DNA, 25 bp, Homo sapien
tctctggtgaatgattcagaaggtc

SEQ ID NO: 2423965 - DNA, 25 bp, Homo sapien
tcaaacagggatctctggtgaatga

SEQ ID NO: 2423966 - DNA, 25 bp, Homo sapien
tagttaacatgagtgctgaatctgg

SEQ ID NO: 2423967 - DNA, 25 bp, Homo sapien
ggtggcactgagggatctagatggt

SEQ ID NO: 2423968 - DNA, 25 bp, Homo sapien
ggcactgagggatctagatggtgca

SEQ ID NO: 2423969 - DNA, 25 bp, Homo sapien
gcactgagggatctagatggtgcat

SEQ ID NO: 2423970 - DNA, 25 bp, Homo sapien
tggcactgagggatctagatggtgc

SEQ ID NO: 2423971 - DNA, 25 bp, Homo sapien
gggccaggctgtcacatttttggct

SEQ ID NO: 2423972 - DNA, 25 bp, Homo sapien
gcaatgccttcatgcacagggccag

SEQ ID NO: 2423973 - DNA, 25 bp, Homo sapien
ctgcacacagcaatgccttcatgca

SEQ ID NO: 2423974 - DNA, 25 bp, Homo sapien
ccaggctgtcacatttttggctgct

SEQ ID NO: 2423975 - DNA, 25 bp, Homo sapien
tgtgcagaggtcatgctcttcttct

SEQ ID NO: 2423976 - DNA, 25 bp, Homo sapien
tccttgtgcagaggtcatgctcttc

SEQ ID NO: 2423977 - DNA, 25 bp, Homo sapien
atttcacagatttgtgtgacatcct

SEQ ID NO: 2423978 - DNA, 25 bp, Homo sapien
taaaagtatggaacatttcacagat

SEQ ID NO: 2423979 - DNA, 25 bp, Homo sapien
acatgcatgataacaagcttcctta

SEQ ID NO: 2423980 - DNA, 25 bp, Homo sapien
tctgtggatcaggatttgccgtaga

SEQ ID NO: 2423981 - DNA, 25 bp, Homo sapien
tttctcttgcctcgctattctgtgg

SEQ ID NO: 2423982 - DNA, 25 bp, Homo sapien
gcttccttataactggtaaatctat

SEQ ID NO: 2423983 - DNA, 25 bp, Homo sapien
ctgctgcatggaatatgagaaaggt

SEQ ID NO: 2423984 - DNA, 25 bp, Homo sapien
tatgagaaaggtcatagttttctct

SEQ ID NO: 2423985 - DNA, 25 bp, Homo sapien
gaatatgagaaaggtcatagttttc

SEQ ID NO: 2423986 - DNA, 25 bp, Homo sapien
tgttcctctgctgcatggaatatga

SEQ ID NO: 2423987 - DNA, 25 bp, Homo sapien
ataagccaacttcttagcctggaac

SEQ ID NO: 2423988 - DNA, 25 bp, Homo sapien
tccgataagccaacttcttagcctg

SEQ ID NO: 2423989 - DNA, 25 bp, Homo sapien
aagccaacttcttagcctggaacat

SEQ ID NO: 2423990 - DNA, 25 bp, Homo sapien
cttccgataagccaacttcttagcc

SEQ ID NO: 2423991 - DNA, 25 bp, Homo sapien
gtaactggtagttatcaattagttc

SEQ ID NO: 2423992 - DNA, 25 bp, Homo sapien
taactggtagttatcaattagttct

SEQ ID NO: 2423993 - DNA, 25 bp, Homo sapien
ctggtagttatcaattagttctaaa

SEQ ID NO: 2423994 - DNA, 25 bp, Homo sapien
taaacaccactgcattcagacgatc

SEQ ID NO: 2423995 - DNA, 25 bp, Homo sapien
gaggaggaacatcgtctatatgttc

SEQ ID NO: 2423996 - DNA, 25 bp, Homo sapien
gaacatcgtctatatgttcattggc

SEQ ID NO: 2423997 - DNA, 25 bp, Homo sapien
tgctgaggaggaacatcgtctatat

SEQ ID NO: 2423998 - DNA, 25 bp, Homo sapien
tcgtctatatgttcattggcaatga

SEQ ID NO: 2423999 - DNA, 25 bp, Homo sapien
gagagggtaatcatccggtccgtta

SEQ ID NO: 2424000 - DNA, 25 bp, Homo sapien
catcctttgccttccggtatgtggc

SEQ ID NO: 2424001 - DNA, 25 bp, Homo sapien
ttttgacactttgtgcgccccgggc

SEQ ID NO: 2424002 - DNA, 25 bp, Homo sapien
aaacagcgacccgatctttccggat

SEQ ID NO: 2424003 - DNA, 25 bp, Homo sapien
caggagtaggttcttgggcagtggc

SEQ ID NO: 2424004 - DNA, 25 bp, Homo sapien
ggctcagaattttccaggagtaggt

SEQ ID NO: 2424005 - DNA, 25 bp, Homo sapien
ccaagtttccagctcgggtttccag

SEQ ID NO: 2424006 - DNA, 25 bp, Homo sapien
tttccagctcgggtttccaggctca

SEQ ID NO: 2424007 - DNA, 25 bp, Homo sapien
tggaaggttactatttctcggccgc

SEQ ID NO: 2424008 - DNA, 25 bp, Homo sapien
ttctcggccgccttgagctgtacct

SEQ ID NO: 2424009 - DNA, 25 bp, Homo sapien
cagccgggcgttgcgagagccctac

SEQ ID NO: 2424010 - DNA, 25 bp, Homo sapien
tgtacctttttagtatcctgcctcc

SEQ ID NO: 2424011 - DNA, 25 bp, Homo sapien
atggacgagatcttccacctgcctc

SEQ ID NO: 2424012 - DNA, 25 bp, Homo sapien
tggacgagatcttccacctgcctca

SEQ ID NO: 2424013 - DNA, 25 bp, Homo sapien
tcttccacctgcctcaggcgcagcg

SEQ ID NO: 2424014 - DNA, 25 bp, Homo sapien
tccacctgcctcaggcgcagcgcta

SEQ ID NO: 2424015 - DNA, 25 bp, Homo sapien
ctctggtgacacaatatagggtact

SEQ ID NO: 2424016 - DNA, 25 bp, Homo sapien
taggattaaaggcattcgggtgctc

SEQ ID NO: 2424017 - DNA, 25 bp, Homo sapien
tcaattggagtgatcaaacctgcca

SEQ ID NO: 2424018 - DNA, 25 bp, Homo sapien
tgaaccatcactaagctggtccggg

SEQ ID NO: 2424019 - DNA, 25 bp, Homo sapien
agatggtaccagagctgagtcttga

SEQ ID NO: 2424020 - DNA, 25 bp, Homo sapien
acagagaagatggtaccagagctga

SEQ ID NO: 2424021 - DNA, 25 bp, Homo sapien
agctgagtcttgatgaacggatagg

SEQ ID NO: 2424022 - DNA, 25 bp, Homo sapien
cttgatgaacggatagggctgtgta

SEQ ID NO: 2424023 - DNA, 25 bp, Homo sapien
tcattgcacaaaagttaacggaggc

SEQ ID NO: 2424024 - DNA, 25 bp, Homo sapien
tcggcaaacaaatatcatctgggct

SEQ ID NO: 2424025 - DNA, 25 bp, Homo sapien
taaaggaccatttgcagaattcaga

SEQ ID NO: 2424026 - DNA, 25 bp, Homo sapien
gacagacttccacctattaaaggac

SEQ ID NO: 2424027 - DNA, 25 bp, Homo sapien
tgagtccctgctgttttaagagatg

SEQ ID NO: 2424028 - DNA, 25 bp, Homo sapien
ataaaatacatatagtacttgggat

SEQ ID NO: 2424029 - DNA, 25 bp, Homo sapien
gagtccctgctgttttaagagatgt

SEQ ID NO: 2424030 - DNA, 25 bp, Homo sapien
gtccctgctgttttaagagatgttt

SEQ ID NO: 2424031 - DNA, 25 bp, Homo sapien
tcctgttgtaagtgatgcagaagcc

SEQ ID NO: 2424032 - DNA, 25 bp, Homo sapien
tgaggagtttcggagacctccctaa

SEQ ID NO: 2424033 - DNA, 25 bp, Homo sapien
cctgtagatcctgttgtaagtgatg

SEQ ID NO: 2424034 - DNA, 25 bp, Homo sapien
ccatcggaaacatgaggagtttcgg

SEQ ID NO: 2424035 - DNA, 25 bp, Homo sapien
tatacaagtttcttgttccgaaagc

SEQ ID NO: 2424036 - DNA, 25 bp, Homo sapien
caaattgaattgtggagcaacagga

SEQ ID NO: 2424037 - DNA, 25 bp, Homo sapien
ccgaaagcccttgttatctgtgaag

SEQ ID NO: 2424038 - DNA, 25 bp, Homo sapien
aaagaggctgtgcaggttaacgact

SEQ ID NO: 2424039 - DNA, 25 bp, Homo sapien
cagcatagtagtactcatgttggaa

SEQ ID NO: 2424040 - DNA, 25 bp, Homo sapien
tcagttttacaatggctatattatt

SEQ ID NO: 2424041 - DNA, 25 bp, Homo sapien
cagttttacaatggctatattatta

SEQ ID NO: 2424042 - DNA, 25 bp, Homo sapien
aaacagcatagtagtactcatgttg

SEQ ID NO: 2424043 - DNA, 25 bp, Homo sapien
tacacctccaatgtcttcaattaat

SEQ ID NO: 2424044 - DNA, 25 bp, Homo sapien
gctgaattgcaaaggcctccaacgt

SEQ ID NO: 2424045 - DNA, 25 bp, Homo sapien
tgtgctcaagaccatagggttggtt

SEQ ID NO: 2424046 - DNA, 25 bp, Homo sapien
ctacatggaaggcagcaagtactga

SEQ ID NO: 2424047 - DNA, 25 bp, Homo sapien
gctgacatgggcctgttaattagag

SEQ ID NO: 2424048 - DNA, 25 bp, Homo sapien
ggcaggtgtgccaacaagacatcag

SEQ ID NO: 2424049 - DNA, 25 bp, Homo sapien
tatccttaagagtttcaggtcgtgc

SEQ ID NO: 2424050 - DNA, 25 bp, Homo sapien
taattagagtggtaacaaggcaggt

SEQ ID NO: 2424051 - DNA, 25 bp, Homo sapien
actggccattgacggccccaaagaa

SEQ ID NO: 2424052 - DNA, 25 bp, Homo sapien
cagagaatgggctggtcatggcagc

SEQ ID NO: 2424053 - DNA, 25 bp, Homo sapien
agcactggccattgacggccccaaa

SEQ ID NO: 2424054 - DNA, 25 bp, Homo sapien
aagcactggccattgacggccccaa

SEQ ID NO: 2424055 - DNA, 25 bp, Homo sapien
catgttgccgggtatgtgcttgaaa

SEQ ID NO: 2424056 - DNA, 25 bp, Homo sapien
ccggctccgccgtttggggtgacat

SEQ ID NO: 2424057 - DNA, 25 bp, Homo sapien
ctgagactcgagtccgaagccggct

SEQ ID NO: 2424058 - DNA, 25 bp, Homo sapien
agggccagggaacaaagcgttctgg

SEQ ID NO: 2424059 - DNA, 25 bp, Homo sapien
cggccccatggcctgcgacagccgc

SEQ ID NO: 2424060 - DNA, 25 bp, Homo sapien
cgccggaccctgtcctccagcgtgg

SEQ ID NO: 2424061 - DNA, 25 bp, Homo sapien
cgctccccaacgcggggaaagagct

SEQ ID NO: 2424062 - DNA, 25 bp, Homo sapien
ggagcctggctacgcgtgtgcacct

SEQ ID NO: 2424063 - DNA, 25 bp, Homo sapien
cctggcttgggacccagaggaggag

SEQ ID NO: 2424064 - DNA, 25 bp, Homo sapien
ccccacgcctggcttgggacccaga

SEQ ID NO: 2424065 - DNA, 25 bp, Homo sapien
ctgcgacccccacgcctggcttggg

SEQ ID NO: 2424066 - DNA, 25 bp, Homo sapien
ggcttgggacccagaggaggagggc

SEQ ID NO: 2424067 - DNA, 25 bp, Homo sapien
aagccgtgacctggcgaggctgcca

SEQ ID NO: 2424068 - DNA, 25 bp, Homo sapien
gcctcggctcttgcgtgtgcgctgt

SEQ ID NO: 2424069 - DNA, 25 bp, Homo sapien
gatccgaaccgctcagacctggcgg

SEQ ID NO: 2424070 - DNA, 25 bp, Homo sapien
cccactgcgcgggtttccgtagagc

SEQ ID NO: 2424071 - DNA, 25 bp, Homo sapien
aacatgtttatgacttgagtttttc

SEQ ID NO: 2424072 - DNA, 25 bp, Homo sapien
catgtttatgacttgagtttttctg

SEQ ID NO: 2424073 - DNA, 25 bp, Homo sapien
caagaaaaaacatgtttatgacttg

SEQ ID NO: 2424074 - DNA, 25 bp, Homo sapien
aaaacatgtttatgacttgagtttt

SEQ ID NO: 2424075 - DNA, 25 bp, Homo sapien
caggacaactatgcacatctggcag

SEQ ID NO: 2424076 - DNA, 25 bp, Homo sapien
aggacaactatgcacatctggcagc

SEQ ID NO: 2424077 - DNA, 25 bp, Homo sapien
gcaggacaactatgcacatctggca

SEQ ID NO: 2424078 - DNA, 25 bp, Homo sapien
ggacaactatgcacatctggcagca

SEQ ID NO: 2424079 - DNA, 25 bp, Homo sapien
tccgacacaaggtcgttcacattgc

SEQ ID NO: 2424080 - DNA, 25 bp, Homo sapien
acaaggtcgttcacattgctctcgg

SEQ ID NO: 2424081 - DNA, 25 bp, Homo sapien
gatattccgacacaaggtcgttcac

SEQ ID NO: 2424082 - DNA, 25 bp, Homo sapien
ctcctcaaacttctcgttagctgtg

SEQ ID NO: 2424083 - DNA, 25 bp, Homo sapien
tgagacacgcttaaagggttcttgg

SEQ ID NO: 2424084 - DNA, 25 bp, Homo sapien
taaagggttcttggatggctgtgtt

SEQ ID NO: 2424085 - DNA, 25 bp, Homo sapien
gcttaaagggttcttggatggctgt

SEQ ID NO: 2424086 - DNA, 25 bp, Homo sapien
cacgcttaaagggttcttggatggc

SEQ ID NO: 2424087 - DNA, 25 bp, Homo sapien
tgctgccattaggtaatggccatgg

SEQ ID NO: 2424088 - DNA, 25 bp, Homo sapien
tggctgctgccattaggtaatggcc

SEQ ID NO: 2424089 - DNA, 25 bp, Homo sapien
cctccctcatggagatgtgacccct

SEQ ID NO: 2424090 - DNA, 25 bp, Homo sapien
cacctccctcatggagatgtgaccc

SEQ ID NO: 2424091 - DNA, 25 bp, Homo sapien
ctgctgggtaaggtaagctcagcca

SEQ ID NO: 2424092 - DNA, 25 bp, Homo sapien
tgctgggtaaggtaagctcagccac

SEQ ID NO: 2424093 - DNA, 25 bp, Homo sapien
ggtagtggaacatatgttgtataga

SEQ ID NO: 2424094 - DNA, 25 bp, Homo sapien
tagtggaacatatgttgtatagagc

SEQ ID NO: 2424095 - DNA, 25 bp, Homo sapien
ttagggtagtggaacatatgttgta

SEQ ID NO: 2424096 - DNA, 25 bp, Homo sapien
gctggggaaatgggaccaagttcac

SEQ ID NO: 2424097 - DNA, 25 bp, Homo sapien
ttgggcaagggtaggacgctgaatt

SEQ ID NO: 2424098 - DNA, 25 bp, Homo sapien
caagggtaggacgctgaatttgttt

SEQ ID NO: 2424099 - DNA, 25 bp, Homo sapien
ggcaagggtaggacgctgaatttgt

SEQ ID NO: 2424100 - DNA, 25 bp, Homo sapien
tgggcaagggtaggacgctgaattt

SEQ ID NO: 2424101 - DNA, 25 bp, Homo sapien
gtgccccctagcccagttgtttctg

SEQ ID NO: 2424102 - DNA, 25 bp, Homo sapien
gccccctagcccagttgtttctggc

SEQ ID NO: 2424103 - DNA, 25 bp, Homo sapien
tgccccctagcccagttgtttctgg

SEQ ID NO: 2424104 - DNA, 25 bp, Homo sapien
ggctaaggagctgcaccccagtcct

SEQ ID NO: 2424105 - DNA, 25 bp, Homo sapien
ctggctaaggagctgcaccccagtc

SEQ ID NO: 2424106 - DNA, 25 bp, Homo sapien
cctggctaaggagctgcaccccagt

SEQ ID NO: 2424107 - DNA, 25 bp, Homo sapien
taaggagctgcaccccagtcctcac

SEQ ID NO: 2424108 - DNA, 25 bp, Homo sapien
catgaacacagtgcggggcacgtac

SEQ ID NO: 2424109 - DNA, 25 bp, Homo sapien
gctccagatccatgaacacagtgcg

SEQ ID NO: 2424110 - DNA, 25 bp, Homo sapien
catagtgcctggctccagatccatg

SEQ ID NO: 2424111 - DNA, 25 bp, Homo sapien
gatccatgaacacagtgcggggcac

SEQ ID NO: 2424112 - DNA, 25 bp, Homo sapien
gtcactgatcccgtggtaggtgcct

SEQ ID NO: 2424113 - DNA, 25 bp, Homo sapien
caggtcactgatcccgtggtaggtg

SEQ ID NO: 2424114 - DNA, 25 bp, Homo sapien
cactgatcccgtggtaggtgcctgc

SEQ ID NO: 2424115 - DNA, 25 bp, Homo sapien
gctgcaggtcactgatcccgtggta

SEQ ID NO: 2424116 - DNA, 25 bp, Homo sapien
gcaaacgcaggggcgccacccctgc

SEQ ID NO: 2424117 - DNA, 25 bp, Homo sapien
gccgcaaacgcaggggcgccacccc

SEQ ID NO: 2424118 - DNA, 25 bp, Homo sapien
ccgcaaacgcaggggcgccacccct

SEQ ID NO: 2424119 - DNA, 25 bp, Homo sapien
cgcaaacgcaggggcgccacccctg

SEQ ID NO: 2424120 - DNA, 25 bp, Homo sapien
cactgcccagtctgcgtgaacgcta

SEQ ID NO: 2424121 - DNA, 25 bp, Homo sapien
tgcccagtctgcgtgaacgctatct

SEQ ID NO: 2424122 - DNA, 25 bp, Homo sapien
cagtctgcgtgaacgctatctccct

SEQ ID NO: 2424123 - DNA, 25 bp, Homo sapien
agtctgcgtgaacgctatctccctc

SEQ ID NO: 2424124 - DNA, 25 bp, Homo sapien
caggccctgctgatcatcaattggc

SEQ ID NO: 2424125 - DNA, 25 bp, Homo sapien
agcacagactataaagggtctttga

SEQ ID NO: 2424126 - DNA, 25 bp, Homo sapien
gacgtttcgttcagggatgttgaag

SEQ ID NO: 2424127 - DNA, 25 bp, Homo sapien
gggttttggcattttcaggccctgc

SEQ ID NO: 2424128 - DNA, 25 bp, Homo sapien
tcatgtccagtgtaaattgcttaat

SEQ ID NO: 2424129 - DNA, 25 bp, Homo sapien
taaagtcatgtccagtgtaaattgc

SEQ ID NO: 2424130 - DNA, 25 bp, Homo sapien
acaatttaaagtcatgtccagtgta

SEQ ID NO: 2424131 - DNA, 25 bp, Homo sapien
attaacttcagaggccagtcgcagt

SEQ ID NO: 2424132 - DNA, 25 bp, Homo sapien
aaacagtgctgaatcactggtgcca

SEQ ID NO: 2424133 - DNA, 25 bp, Homo sapien
aaaaaacagtgctgaatcactggtg

SEQ ID NO: 2424134 - DNA, 25 bp, Homo sapien
gaaaaaaacagtgctgaatcactgg

SEQ ID NO: 2424135 - DNA, 25 bp, Homo sapien
gagaaaaaaacagtgctgaatcact

SEQ ID NO: 2424136 - DNA, 25 bp, Homo sapien
aatgccagccaaaacctctgctcca

SEQ ID NO: 2424137 - DNA, 25 bp, Homo sapien
ttcaagcccaggacaagtggcggcc

SEQ ID NO: 2424138 - DNA, 25 bp, Homo sapien
atccggcgccacacaacagttcaag

SEQ ID NO: 2424139 - DNA, 25 bp, Homo sapien
ctctgctccaggacctatgggcttc

SEQ ID NO: 2424140 - DNA, 25 bp, Homo sapien
aaaggcccgcaggcgtaggccggct

SEQ ID NO: 2424141 - DNA, 25 bp, Homo sapien
cttgtcgggacaagctaccctttag

SEQ ID NO: 2424142 - DNA, 25 bp, Homo sapien
gacaagctaccctttagggacattg

SEQ ID NO: 2424143 - DNA, 25 bp, Homo sapien
cccgcaggcgtaggccggctgttcc

SEQ ID NO: 2424144 - DNA, 25 bp, Homo sapien
aggctcttggaggccggaaagcgca

SEQ ID NO: 2424145 - DNA, 25 bp, Homo sapien
gtgctgcggcgatccagtgcacgcc

SEQ ID NO: 2424146 - DNA, 25 bp, Homo sapien
cttggaggccggaaagcgcagcgca

SEQ ID NO: 2424147 - DNA, 25 bp, Homo sapien
gtgcacgcccttgccgccggcgatg

SEQ ID NO: 2424148 - DNA, 25 bp, Homo sapien
ccactctagccagagcagggcgggc

SEQ ID NO: 2424149 - DNA, 25 bp, Homo sapien
actctagccagagcagggcgggcca

SEQ ID NO: 2424150 - DNA, 25 bp, Homo sapien
ctctagccagagcagggcgggccag

SEQ ID NO: 2424151 - DNA, 25 bp, Homo sapien
cactctagccagagcagggcgggcc

SEQ ID NO: 2424152 - DNA, 25 bp, Homo sapien
ctaccgtgcatcatggcctgacaat

SEQ ID NO: 2424153 - DNA, 25 bp, Homo sapien
accgtgcatcatggcctgacaatgg

SEQ ID NO: 2424154 - DNA, 25 bp, Homo sapien
tcatggcctgacaatggattctttc

SEQ ID NO: 2424155 - DNA, 25 bp, Homo sapien
gcatcatggcctgacaatggattct

SEQ ID NO: 2424156 - DNA, 25 bp, Homo sapien
aaccccgggtcataaatgcctccag

SEQ ID NO: 2424157 - DNA, 25 bp, Homo sapien
accccgggtcataaatgcctccagc

SEQ ID NO: 2424158 - DNA, 25 bp, Homo sapien
ccccgggtcataaatgcctccagca

SEQ ID NO: 2424159 - DNA, 25 bp, Homo sapien
ttctccataaaaagtggctccagcg

SEQ ID NO: 2424160 - DNA, 25 bp, Homo sapien
ggtcgacagaagctcatctaacagg

SEQ ID NO: 2424161 - DNA, 25 bp, Homo sapien
gcagcggctccgtttctagcaaagg

SEQ ID NO: 2424162 - DNA, 25 bp, Homo sapien
catctgcttctgtgacgcggaggct

SEQ ID NO: 2424163 - DNA, 25 bp, Homo sapien
cagggcagcgtaggcaaaatcccag

SEQ ID NO: 2424164 - DNA, 25 bp, Homo sapien
tgagcaggtttaagctgtcccactg

SEQ ID NO: 2424165 - DNA, 25 bp, Homo sapien
cgccgcttctggatgagccagggca

SEQ ID NO: 2424166 - DNA, 25 bp, Homo sapien
gccgccgttctgtgggtcctggtcc

SEQ ID NO: 2424167 - DNA, 25 bp, Homo sapien
ggggagccccaggagcccaggacat

SEQ ID NO: 2424168 - DNA, 25 bp, Homo sapien
tgggggagccccaggagcccaggac

SEQ ID NO: 2424169 - DNA, 25 bp, Homo sapien
gtgggggagccccaggagcccagga

SEQ ID NO: 2424170 - DNA, 25 bp, Homo sapien
ctgtgggggagccccaggagcccag

SEQ ID NO: 2424171 - DNA, 25 bp, Homo sapien
cccttcatgaatgcgagtgagctcc

SEQ ID NO: 2424172 - DNA, 25 bp, Homo sapien
ccttcatgaatgcgagtgagctcca

SEQ ID NO: 2424173 - DNA, 25 bp, Homo sapien
cttcatgaatgcgagtgagctccag

SEQ ID NO: 2424174 - DNA, 25 bp, Homo sapien
ccccttcatgaatgcgagtgagctc

SEQ ID NO: 2424175 - DNA, 25 bp, Homo sapien
tctgggcttgcatgtgtcttcaggg

SEQ ID NO: 2424176 - DNA, 25 bp, Homo sapien
gggcttgcatgtgtcttcagggaga

SEQ ID NO: 2424177 - DNA, 25 bp, Homo sapien
gcttgcatgtgtcttcagggagaaa

SEQ ID NO: 2424178 - DNA, 25 bp, Homo sapien
atgtgtcttcagggagaaacatccc

SEQ ID NO: 2424179 - DNA, 25 bp, Homo sapien
tgacggccccacgaaggattcctgt

SEQ ID NO: 2424180 - DNA, 25 bp, Homo sapien
gggtgtcgccgttgctgtgataccc

SEQ ID NO: 2424181 - DNA, 25 bp, Homo sapien
gaaaagaaacgtccccagcatgacg

SEQ ID NO: 2424182 - DNA, 25 bp, Homo sapien
tgtgataccctcacagatgcaggta

SEQ ID NO: 2424183 - DNA, 25 bp, Homo sapien
gggaggaagccagcgactccacgac

SEQ ID NO: 2424184 - DNA, 25 bp, Homo sapien
cactgtcgtctgtgggaggactccg

SEQ ID NO: 2424185 - DNA, 25 bp, Homo sapien
ttgggcccggcggagatgctgccgg

SEQ ID NO: 2424186 - DNA, 25 bp, Homo sapien
ggccacgtttttccccgagatctca

SEQ ID NO: 2424187 - DNA, 25 bp, Homo sapien
ttccaaacatgaggtgactctcggt

SEQ ID NO: 2424188 - DNA, 25 bp, Homo sapien
gagggagccatcgatcctcagtgag

SEQ ID NO: 2424189 - DNA, 25 bp, Homo sapien
taaaaccaatgacggtggcctggcg

SEQ ID NO: 2424190 - DNA, 25 bp, Homo sapien
ccaccatgcagaccaaatcagaagg

SEQ ID NO: 2424191 - DNA, 25 bp, Homo sapien
tgtgtccgtacttttatgagcccgg

SEQ ID NO: 2424192 - DNA, 25 bp, Homo sapien
caaatgtgtccgtacttttatgagc

SEQ ID NO: 2424193 - DNA, 25 bp, Homo sapien
tttttccagccctcgactgtccaca

SEQ ID NO: 2424194 - DNA, 25 bp, Homo sapien
tcatcgtatgttctttggtctgcca

SEQ ID NO: 2424195 - DNA, 25 bp, Homo sapien
acatttggtggacccggcgctcgcg

SEQ ID NO: 2424196 - DNA, 25 bp, Homo sapien
gcgctcgccgccgacatttggtgga

SEQ ID NO: 2424197 - DNA, 25 bp, Homo sapien
cggcgctcgcggacggaagcgatca

SEQ ID NO: 2424198 - DNA, 25 bp, Homo sapien
cgccgccgacatttggtggacccgg

SEQ ID NO: 2424199 - DNA, 25 bp, Homo sapien
ccgccgttccgccaccgtcggctgg

SEQ ID NO: 2424200 - DNA, 25 bp, Homo sapien
cccgccgttccgccaccgtcggctg

SEQ ID NO: 2424201 - DNA, 25 bp, Homo sapien
cgccgttccgccaccgtcggctggt

SEQ ID NO: 2424202 - DNA, 25 bp, Homo sapien
caggcccgataaatccgatcccagc

SEQ ID NO: 2424203 - DNA, 25 bp, Homo sapien
aggcccgataaatccgatcccagcc

SEQ ID NO: 2424204 - DNA, 25 bp, Homo sapien
ggcccgataaatccgatcccagccc

SEQ ID NO: 2424205 - DNA, 25 bp, Homo sapien
ggaacgacgagcatgggcgacaccc

SEQ ID NO: 2424206 - DNA, 25 bp, Homo sapien
aggaaggaggcggaattggagaggg

SEQ ID NO: 2424207 - DNA, 25 bp, Homo sapien
aaggaggtcaaagcggggtgcagga

SEQ ID NO: 2424208 - DNA, 25 bp, Homo sapien
tgggcgacacccctacctcggcaaa

SEQ ID NO: 2424209 - DNA, 25 bp, Homo sapien
tccggtgggcatgagcgggcgagga

SEQ ID NO: 2424210 - DNA, 25 bp, Homo sapien
caccagtggtctctcgggagggaca

SEQ ID NO: 2424211 - DNA, 25 bp, Homo sapien
tcccgaagacacagcgggcaccagt

SEQ ID NO: 2424212 - DNA, 25 bp, Homo sapien
ctctcgggagggacacctgctgcgt

SEQ ID NO: 2424213 - DNA, 25 bp, Homo sapien
caggagaaaggaaggaaggtagacg

SEQ ID NO: 2424214 - DNA, 25 bp, Homo sapien
gagaaaggaaggaaggtagacgtca

SEQ ID NO: 2424215 - DNA, 25 bp, Homo sapien
aggatgtctacaaatagtttagcat

SEQ ID NO: 2424216 - DNA, 25 bp, Homo sapien
gacccagaagcaggatgtctacaaa

SEQ ID NO: 2424217 - DNA, 25 bp, Homo sapien
gatgtctacaaatagtttagcatcc

SEQ ID NO: 2424218 - DNA, 25 bp, Homo sapien
tgtctacaaatagtttagcatccgg

SEQ ID NO: 2424219 - DNA, 25 bp, Homo sapien
accggatcctggttcccggcgcatg

SEQ ID NO: 2424220 - DNA, 25 bp, Homo sapien
gacggcagaggaccgcctatccaag

SEQ ID NO: 2424221 - DNA, 25 bp, Homo sapien
gggacatgcccctcctgaggcagag

SEQ ID NO: 2424222 - DNA, 25 bp, Homo sapien
cagcagcccatttcctacgatgagg

SEQ ID NO: 2424223 - DNA, 25 bp, Homo sapien
ctgcggttcctctcgtactgagcag

SEQ ID NO: 2424224 - DNA, 25 bp, Homo sapien
tgcggttcctctcgtactgagcagg

SEQ ID NO: 2424225 - DNA, 25 bp, Homo sapien
ttcctctcgtactgagcaggattac

SEQ ID NO: 2424226 - DNA, 25 bp, Homo sapien
ctctcgtactgagcaggattaccat

SEQ ID NO: 2424227 - DNA, 25 bp, Homo sapien
gcaacaacacaaggggaacgcaaac

SEQ ID NO: 2424228 - DNA, 25 bp, Homo sapien
aacaacacaaggggaacgcaaacag

SEQ ID NO: 2424229 - DNA, 25 bp, Homo sapien
gggcaacaacacaaggggaacgcaa

SEQ ID NO: 2424230 - DNA, 25 bp, Homo sapien
caacacaaggggaacgcaaacagta

SEQ ID NO: 2424231 - DNA, 25 bp, Homo sapien
gggctcctaatgcaggcagataata

SEQ ID NO: 2424232 - DNA, 25 bp, Homo sapien
gaagcacggaggtatcagaagcatc

SEQ ID NO: 2424233 - DNA, 25 bp, Homo sapien
tgtgctgttaggctggaagactccc

SEQ ID NO: 2424234 - DNA, 25 bp, Homo sapien
gcatccaaagagatcacaccaagta

SEQ ID NO: 2424235 - DNA, 25 bp, Homo sapien
atatcaggactggaatacatgaatg

SEQ ID NO: 2424236 - DNA, 25 bp, Homo sapien
tagacaaagaacctgcatcaatatc

SEQ ID NO: 2424237 - DNA, 25 bp, Homo sapien
gaacctgcatcaatatcaggactgg

SEQ ID NO: 2424238 - DNA, 25 bp, Homo sapien
cctgcatcaatatcaggactggaat

SEQ ID NO: 2424239 - DNA, 25 bp, Homo sapien
ataaatgtatgcaaaggcccggcac

SEQ ID NO: 2424240 - DNA, 25 bp, Homo sapien
acagctgctgattactcatcctcct

SEQ ID NO: 2424241 - DNA, 25 bp, Homo sapien
aaatgtatgcaaaggcccggcacag

SEQ ID NO: 2424242 - DNA, 25 bp, Homo sapien
ccggcacagctgctgattactcatc

SEQ ID NO: 2424243 - DNA, 25 bp, Homo sapien
cccaacccagagtgacgcaggtcgt

SEQ ID NO: 2424244 - DNA, 25 bp, Homo sapien
gccccaacgcggtgggcctccgcca

SEQ ID NO: 2424245 - DNA, 25 bp, Homo sapien
cagagtgacgcaggtcgtttgcttc

SEQ ID NO: 2424246 - DNA, 25 bp, Homo sapien
gagagggatccggaagaggccccaa

SEQ ID NO: 2424247 - DNA, 25 bp, Homo sapien
cctggagacagtacttgctagcttc

SEQ ID NO: 2424248 - DNA, 25 bp, Homo sapien
taaatgactcgtgactgagccctgt

SEQ ID NO: 2424249 - DNA, 25 bp, Homo sapien
tcttctgaagaacgcaagggactct

SEQ ID NO: 2424250 - DNA, 25 bp, Homo sapien
tgtaactccccgtgtcctaaatgac

SEQ ID NO: 2424251 - DNA, 25 bp, Homo sapien
tcccctgctgatttgggcggcacca

SEQ ID NO: 2424252 - DNA, 25 bp, Homo sapien
ggagcgaactcaagaccccagtttc

SEQ ID NO: 2424253 - DNA, 25 bp, Homo sapien
tgctctgccgcactgggttgttcct

SEQ ID NO: 2424254 - DNA, 25 bp, Homo sapien
agctccaggagcgtgaaaccaggac

SEQ ID NO: 2424255 - DNA, 25 bp, Homo sapien
ggggccgagccgctctgggggcacg

SEQ ID NO: 2424256 - DNA, 25 bp, Homo sapien
ggccgagccgctctgggggcacgaa

SEQ ID NO: 2424257 - DNA, 25 bp, Homo sapien
ccgagccgctctgggggcacgaacc

SEQ ID NO: 2424258 - DNA, 25 bp, Homo sapien
gcggggccgagccgctctgggggca

SEQ ID NO: 2424259 - DNA, 25 bp, Homo sapien
tttaggcggcaccttgcggggtcca

SEQ ID NO: 2424260 - DNA, 25 bp, Homo sapien
gaaaccacgcatatgcggcagggag

SEQ ID NO: 2424261 - DNA, 25 bp, Homo sapien
tccccaggaaaccacgcatatgcgg

SEQ ID NO: 2424262 - DNA, 25 bp, Homo sapien
tccctgcctctttaggcggcacctt

SEQ ID NO: 2424263 - DNA, 25 bp, Homo sapien
tgctgcagagaccaaccactccagg

SEQ ID NO: 2424264 - DNA, 25 bp, Homo sapien
gcagacccggaatcccgcgcatggg

SEQ ID NO: 2424265 - DNA, 25 bp, Homo sapien
ttcttttcgcggctccccgcaatgt

SEQ ID NO: 2424266 - DNA, 25 bp, Homo sapien
ctccaggggtgcagacccggaatcc

SEQ ID NO: 2424267 - DNA, 25 bp, Homo sapien
ggggcgcgaacccagcacccaagag

SEQ ID NO: 2424268 - DNA, 25 bp, Homo sapien
ggcgcgaacccagcacccaagagtc

SEQ ID NO: 2424269 - DNA, 25 bp, Homo sapien
cgggggcgcgaacccagcacccaag

SEQ ID NO: 2424270 - DNA, 25 bp, Homo sapien
gggcgcgaacccagcacccaagagt

SEQ ID NO: 2424271 - DNA, 25 bp, Homo sapien
aggacccagtgcatgcgcagcaggt

SEQ ID NO: 2424272 - DNA, 25 bp, Homo sapien
cagtgtttcggcctccccgttcaag

SEQ ID NO: 2424273 - DNA, 25 bp, Homo sapien
cgggggccaagagccccactttgcg

SEQ ID NO: 2424274 - DNA, 25 bp, Homo sapien
cgttcaagcctccctgcggctgtgg

SEQ ID NO: 2424275 - DNA, 25 bp, Homo sapien
ggtccagcccctccgggatcgtgaa

SEQ ID NO: 2424276 - DNA, 25 bp, Homo sapien
ctgggacccgcgcatgtgcggcagg

SEQ ID NO: 2424277 - DNA, 25 bp, Homo sapien
agggtccagcccctccgggatcgtg

SEQ ID NO: 2424278 - DNA, 25 bp, Homo sapien
cagcccctccgggatcgtgaacccg

SEQ ID NO: 2424279 - DNA, 25 bp, Homo sapien
aggtgccttgacctccactttcacg

SEQ ID NO: 2424280 - DNA, 25 bp, Homo sapien
ggtgccttgacctccactttcacga

SEQ ID NO: 2424281 - DNA, 25 bp, Homo sapien
tgctgctttggacggaactccgcgg

SEQ ID NO: 2424282 - DNA, 25 bp, Homo sapien
tttggacggaactccgcggagcaca

SEQ ID NO: 2424283 - DNA, 25 bp, Homo sapien
cactctgtgcggcatcccgcagtgc

SEQ ID NO: 2424284 - DNA, 25 bp, Homo sapien
tggtgccacgacctccagtttcaag

SEQ ID NO: 2424285 - DNA, 25 bp, Homo sapien
cggtgcctcgaaatcccatttcaat

SEQ ID NO: 2424286 - DNA, 25 bp, Homo sapien
gctctactgtggcggttttttctcc

SEQ ID NO: 2424287 - DNA, 25 bp, Homo sapien
ttcccaggactggacgcatgcacgg

SEQ ID NO: 2424288 - DNA, 25 bp, Homo sapien
tgtagagttggccacgggcaagacc

SEQ ID NO: 2424289 - DNA, 25 bp, Homo sapien
agggtgggtgtagagttggccacgg

SEQ ID NO: 2424290 - DNA, 25 bp, Homo sapien
gttggccacgggcaagaccccagct

SEQ ID NO: 2424291 - DNA, 25 bp, Homo sapien
gggccccatgcatgcgcggtggaga

SEQ ID NO: 2424292 - DNA, 25 bp, Homo sapien
tgggcccgaggctcgccctgggtgt

SEQ ID NO: 2424293 - DNA, 25 bp, Homo sapien
atgcgcggtggagaggcacttccgc

SEQ ID NO: 2424294 - DNA, 25 bp, Homo sapien
tgccctcctggcgacttggtctgga

SEQ ID NO: 2424295 - DNA, 25 bp, Homo sapien
tcgccgtttgtgttttcctcccaca

SEQ ID NO: 2424296 - DNA, 25 bp, Homo sapien
ctgtgtggggggacttctgcctcgc

SEQ ID NO: 2424297 - DNA, 25 bp, Homo sapien
ggacttctgcctcgccgtttgtgtt

SEQ ID NO: 2424298 - DNA, 25 bp, Homo sapien
tgtggggggacttctgcctcgccgt

SEQ ID NO: 2424299 - DNA, 25 bp, Homo sapien
ggcttgtggcgctctgcaggcatga

SEQ ID NO: 2424300 - DNA, 25 bp, Homo sapien
gcttgtggcgctctgcaggcatgaa

SEQ ID NO: 2424301 - DNA, 25 bp, Homo sapien
tgggcttgtggcgctctgcaggcat

SEQ ID NO: 2424302 - DNA, 25 bp, Homo sapien
ttgtggcgctctgcaggcatgaacc

SEQ ID NO: 2424303 - DNA, 25 bp, Homo sapien
tgggtggggaccacttcctcggcat

SEQ ID NO: 2424304 - DNA, 25 bp, Homo sapien
ctgggtggggaccacttcctcggca

SEQ ID NO: 2424305 - DNA, 25 bp, Homo sapien
acagggtaccctgagcactgcgcat

SEQ ID NO: 2424306 - DNA, 25 bp, Homo sapien
tttcaagcattcctaccgtcttggg

SEQ ID NO: 2424307 - DNA, 25 bp, Homo sapien
gcattcctaccgtcttgggctggct

SEQ ID NO: 2424308 - DNA, 25 bp, Homo sapien
gcatgaaccacggatgacagggtac

SEQ ID NO: 2424309 - DNA, 25 bp, Homo sapien
agtttacctctgtgaagtgaatgca

SEQ ID NO: 2424310 - DNA, 25 bp, Homo sapien
caaagggaagtttacctctgtgaag

SEQ ID NO: 2424311 - DNA, 25 bp, Homo sapien
tgtgaagtgaatgcatacttcccaa

SEQ ID NO: 2424312 - DNA, 25 bp, Homo sapien
aaacagtgcttccagactgctgaac

SEQ ID NO: 2424313 - DNA, 25 bp, Homo sapien
aaaaacattgtacttggtgagttgc

SEQ ID NO: 2424314 - DNA, 25 bp, Homo sapien
aaaacattgtacttggtgagttgct

SEQ ID NO: 2424315 - DNA, 25 bp, Homo sapien
ttgcttttgatcaaagaaagggtca

SEQ ID NO: 2424316 - DNA, 25 bp, Homo sapien
tgagttgcttttgatcaaagaaagg

SEQ ID NO: 2424317 - DNA, 25 bp, Homo sapien
tacatactattgtcctcttccctgc

SEQ ID NO: 2424318 - DNA, 25 bp, Homo sapien
acatactattgtcctcttccctgct

SEQ ID NO: 2424319 - DNA, 25 bp, Homo sapien
ataaatttcgattatatccaccatc

SEQ ID NO: 2424320 - DNA, 25 bp, Homo sapien
ctgtaggatgagaaacaggcagctg

SEQ ID NO: 2424321 - DNA, 25 bp, Homo sapien
aggatgagaaacaggcagctgtgtc

SEQ ID NO: 2424322 - DNA, 25 bp, Homo sapien
acaggcagctgtgtctggattttac

SEQ ID NO: 2424323 - DNA, 25 bp, Homo sapien
aaacaggcagctgtgtctggatttt

SEQ ID NO: 2424324 - DNA, 25 bp, Homo sapien
agactttattcccatccccaggaga

SEQ ID NO: 2424325 - DNA, 25 bp, Homo sapien
gagcccacctcacagtcttcaaact

SEQ ID NO: 2424326 - DNA, 25 bp, Homo sapien
aggagacccaattcatgcacgcagc

SEQ ID NO: 2424327 - DNA, 25 bp, Homo sapien
ccccaggagacccaattcatgcacg

SEQ ID NO: 2424328 - DNA, 25 bp, Homo sapien
tgggaccctaccacgaagatggctc

SEQ ID NO: 2424329 - DNA, 25 bp, Homo sapien
tgtgggaccctaccacgaagatggc

SEQ ID NO: 2424330 - DNA, 25 bp, Homo sapien
ggaccctaccacgaagatggctcat

SEQ ID NO: 2424331 - DNA, 25 bp, Homo sapien
ctgtgggaccctaccacgaagatgg

SEQ ID NO: 2424332 - DNA, 25 bp, Homo sapien
cgtagcagtactgtccacaggccac

SEQ ID NO: 2424333 - DNA, 25 bp, Homo sapien
tcacgttatgaagggagcactcctc

SEQ ID NO: 2424334 - DNA, 25 bp, Homo sapien
tgtcagggcctcattgtcctgtggc

SEQ ID NO: 2424335 - DNA, 25 bp, Homo sapien
cccagggcgggaccgtagcagtact

SEQ ID NO: 2424336 - DNA, 25 bp, Homo sapien
cccaaggacaaaagccccatgggag

SEQ ID NO: 2424337 - DNA, 25 bp, Homo sapien
aaggacaaaagccccatgggagctc

SEQ ID NO: 2424338 - DNA, 25 bp, Homo sapien
caaggacaaaagccccatgggagct

SEQ ID NO: 2424339 - DNA, 25 bp, Homo sapien
ccaaggacaaaagccccatgggagc

SEQ ID NO: 2424340 - DNA, 25 bp, Homo sapien
aaatgaagccacaccacgatacagt

SEQ ID NO: 2424341 - DNA, 25 bp, Homo sapien
tctgagaaatgaagccacaccacga

SEQ ID NO: 2424342 - DNA, 25 bp, Homo sapien
gagaaatgaagccacaccacgatac

SEQ ID NO: 2424343 - DNA, 25 bp, Homo sapien
gaaatgaagccacaccacgatacag

SEQ ID NO: 2424344 - DNA, 25 bp, Homo sapien
cactttttcccggattcccgtgatg

SEQ ID NO: 2424345 - DNA, 25 bp, Homo sapien
ttcccggattcccgtgatggtggca

SEQ ID NO: 2424346 - DNA, 25 bp, Homo sapien
tcccggattcccgtgatggtggcat

SEQ ID NO: 2424347 - DNA, 25 bp, Homo sapien
tttcccggattcccgtgatggtggc

SEQ ID NO: 2424348 - DNA, 25 bp, Homo sapien
ccagtccccgcagccgccgatccgc

SEQ ID NO: 2424349 - DNA, 25 bp, Homo sapien
gtccccgcagccgccgatccgccat

SEQ ID NO: 2424350 - DNA, 25 bp, Homo sapien
agccactgccccagtccccgcagcc

SEQ ID NO: 2424351 - DNA, 25 bp, Homo sapien
cagccactgccccagtccccgcagc

SEQ ID NO: 2424352 - DNA, 25 bp, Homo sapien
tagaagaacagcttccttaacccat

SEQ ID NO: 2424353 - DNA, 25 bp, Homo sapien
tccttaacccatcaggcgccaatgg

SEQ ID NO: 2424354 - DNA, 25 bp, Homo sapien
tactgctagacgttgaggagttgcc

SEQ ID NO: 2424355 - DNA, 25 bp, Homo sapien
ttgggtaactggcaagctcctctcc

SEQ ID NO: 2424356 - DNA, 25 bp, Homo sapien
cataggactcacattagagacggta

SEQ ID NO: 2424357 - DNA, 25 bp, Homo sapien
ataggactcacattagagacggtaa

SEQ ID NO: 2424358 - DNA, 25 bp, Homo sapien
agcagacatgtctgcttaccttttt

SEQ ID NO: 2424359 - DNA, 25 bp, Homo sapien
gggcagcagacatgtctgcttacct

SEQ ID NO: 2424360 - DNA, 25 bp, Homo sapien
gcagcagacatgtctgcttaccttt

SEQ ID NO: 2424361 - DNA, 25 bp, Homo sapien
tgggcagcagacatgtctgcttacc

SEQ ID NO: 2424362 - DNA, 25 bp, Homo sapien
ttagccaggtggcagaatctttcgc

SEQ ID NO: 2424363 - DNA, 25 bp, Homo sapien
gctggccccgaacggaactagagaa

SEQ ID NO: 2424364 - DNA, 25 bp, Homo sapien
gagtccgtagtaacttggccaggct

SEQ ID NO: 2424365 - DNA, 25 bp, Homo sapien
tcgctgtgcgcaattagctgctgcc

SEQ ID NO: 2424366 - DNA, 25 bp, Homo sapien
gccctggatggtttcaagggacgta

SEQ ID NO: 2424367 - DNA, 25 bp, Homo sapien
aagagccctggatggtttcaaggga

SEQ ID NO: 2424368 - DNA, 25 bp, Homo sapien
ggaaagagccctggatggtttcaag

SEQ ID NO: 2424369 - DNA, 25 bp, Homo sapien
agggaaagagccctggatggtttca

SEQ ID NO: 2424370 - DNA, 25 bp, Homo sapien
ggaaggcactgctgtttagaaccca

SEQ ID NO: 2424371 - DNA, 25 bp, Homo sapien
gatagctgatgacttggctgacact

SEQ ID NO: 2424372 - DNA, 25 bp, Homo sapien
tgatagctgatgacttggctgacac

SEQ ID NO: 2424373 - DNA, 25 bp, Homo sapien
tgttctgatagctgatgacttggct

SEQ ID NO: 2424374 - DNA, 25 bp, Homo sapien
tctgatagctgatgacttggctgac

SEQ ID NO: 2424375 - DNA, 25 bp, Homo sapien
ccttagcccggtgcctggaccactt

SEQ ID NO: 2424376 - DNA, 25 bp, Homo sapien
tattaaaacagtacaccagccaggc

SEQ ID NO: 2424377 - DNA, 25 bp, Homo sapien
tcaggcttgtttagaacttgtgacc

SEQ ID NO: 2424378 - DNA, 25 bp, Homo sapien
tctgtatcctggtgcatctggtccc

SEQ ID NO: 2424379 - DNA, 25 bp, Homo sapien
gacctcagtgcttggccttattatg

SEQ ID NO: 2424380 - DNA, 25 bp, Homo sapien
gaaggttaagcgctgtgtgttgaat

SEQ ID NO: 2424381 - DNA, 25 bp, Homo sapien
aaaggaaggttaagcgctgtgtgtt

SEQ ID NO: 2424382 - DNA, 25 bp, Homo sapien
ggttaagcgctgtgtgttgaatgca

SEQ ID NO: 2424383 - DNA, 25 bp, Homo sapien
taagcgctgtgtgttgaatgcacac

SEQ ID NO: 2424384 - DNA, 25 bp, Homo sapien
aggaagtttctgagaatgcttccgt

SEQ ID NO: 2424385 - DNA, 25 bp, Homo sapien
gtttctgagaatgcttccgtctagt

SEQ ID NO: 2424386 - DNA, 25 bp, Homo sapien
agtttctgagaatgcttccgtctag

SEQ ID NO: 2424387 - DNA, 25 bp, Homo sapien
gaagtttctgagaatgcttccgtct

SEQ ID NO: 2424388 - DNA, 25 bp, Homo sapien
gtgcattcatctcacagatttgaac

SEQ ID NO: 2424389 - DNA, 25 bp, Homo sapien
tatcttcacttaaaaactagacaga

SEQ ID NO: 2424390 - DNA, 25 bp, Homo sapien
tgatgtgtgcattcatctcacagat

SEQ ID NO: 2424391 - DNA, 25 bp, Homo sapien
tgtgtgcattcatctcacagatttg

SEQ ID NO: 2424392 - DNA, 25 bp, Homo sapien
gtaaaatctgcaaatggatatttgg

SEQ ID NO: 2424393 - DNA, 25 bp, Homo sapien
tctgcaaatggatatttggagtgct

SEQ ID NO: 2424394 - DNA, 25 bp, Homo sapien
gcaaatggatatttggagtgctttg

SEQ ID NO: 2424395 - DNA, 25 bp, Homo sapien
tgctttgaggcctatggtgagaaag

SEQ ID NO: 2424396 - DNA, 25 bp, Homo sapien
tctttgtgatgagtgcattcatctc

SEQ ID NO: 2424397 - DNA, 25 bp, Homo sapien
gagaaacttctttgtgatgagtgca

SEQ ID NO: 2424398 - DNA, 25 bp, Homo sapien
aacttctttgtgatgagtgcattca

SEQ ID NO: 2424399 - DNA, 25 bp, Homo sapien
cttctttgtgatgagtgcattcatc

SEQ ID NO: 2424400 - DNA, 25 bp, Homo sapien
ttaattaagcagtttggaaacagtc

SEQ ID NO: 2424401 - DNA, 25 bp, Homo sapien
aattaagcagtttggaaacagtctt

SEQ ID NO: 2424402 - DNA, 25 bp, Homo sapien
taattaagcagtttggaaacagtct

SEQ ID NO: 2424403 - DNA, 25 bp, Homo sapien
tgggagcccattgatgcctatgagg

SEQ ID NO: 2424404 - DNA, 25 bp, Homo sapien
tttgggagccctttgaggactatag

SEQ ID NO: 2424405 - DNA, 25 bp, Homo sapien
ctttttggaggatcttcgaagtgac

SEQ ID NO: 2424406 - DNA, 25 bp, Homo sapien
cctgatgggaactagaaagaagctt

SEQ ID NO: 2424407 - DNA, 25 bp, Homo sapien
tagaaaccataaagggacattggga

SEQ ID NO: 2424408 - DNA, 25 bp, Homo sapien
accataaagggacattgggagccca

SEQ ID NO: 2424409 - DNA, 25 bp, Homo sapien
gaaaccataaagggacattgggagc

SEQ ID NO: 2424410 - DNA, 25 bp, Homo sapien
ttgtagaaaccataaagggacattg

SEQ ID NO: 2424411 - DNA, 25 bp, Homo sapien
gggctacgtgcaaaaactgaatatt

SEQ ID NO: 2424412 - DNA, 25 bp, Homo sapien
agaaagtagctatgggtgaaactgc

SEQ ID NO: 2424413 - DNA, 25 bp, Homo sapien
catttgggggcccattgagggctac

SEQ ID NO: 2424414 - DNA, 25 bp, Homo sapien
aaaactagaaagtagctatgggtga

SEQ ID NO: 2424415 - DNA, 25 bp, Homo sapien
tcacagacgtaatcttttcttttga

SEQ ID NO: 2424416 - DNA, 25 bp, Homo sapien
cagctcacagacgtaatcttttctt

SEQ ID NO: 2424417 - DNA, 25 bp, Homo sapien
gattcagctcacagacgtaatcttt

SEQ ID NO: 2424418 - DNA, 25 bp, Homo sapien
gtggattcagctcacagacgtaatc

SEQ ID NO: 2424419 - DNA, 25 bp, Homo sapien
ccacggtggggttgatgcaatccag

SEQ ID NO: 2424420 - DNA, 25 bp, Homo sapien
gggcatccgagcaagggatggggtt

SEQ ID NO: 2424421 - DNA, 25 bp, Homo sapien
gttgatgcaatccagggtagaggga

SEQ ID NO: 2424422 - DNA, 25 bp, Homo sapien
ccaaggcctatgtcccacggtgggg

SEQ ID NO: 2424423 - DNA, 25 bp, Homo sapien
ggaggaggatcttcctgacatgggc

SEQ ID NO: 2424424 - DNA, 25 bp, Homo sapien
gggcaggttgccaggcgctggaacc

SEQ ID NO: 2424425 - DNA, 25 bp, Homo sapien
tggcccaccataatcatttgttgca

SEQ ID NO: 2424426 - DNA, 25 bp, Homo sapien
gctggaaccgtggtgggtctgtcat

SEQ ID NO: 2424427 - DNA, 25 bp, Homo sapien
aattatatgaaaccagcgtttaggg

SEQ ID NO: 2424428 - DNA, 25 bp, Homo sapien
tttattgctgggcaactgatgcgcg

SEQ ID NO: 2424429 - DNA, 25 bp, Homo sapien
tcaagtctttcatacaatacattgg

SEQ ID NO: 2424430 - DNA, 25 bp, Homo sapien
tagggaagaagtcacaaccgtggta

SEQ ID NO: 2424431 - DNA, 25 bp, Homo sapien
tccgtttggacgcttctgatacctc

SEQ ID NO: 2424432 - DNA, 25 bp, Homo sapien
attacttgatgggatccgtttggac

SEQ ID NO: 2424433 - DNA, 25 bp, Homo sapien
gacaggatggcaggaacttccaata

SEQ ID NO: 2424434 - DNA, 25 bp, Homo sapien
cagacaggatggcaggaacttccaa

SEQ ID NO: 2424435 - DNA, 25 bp, Homo sapien
cttcatcctgggaaacgcgctgctg

SEQ ID NO: 2424436 - DNA, 25 bp, Homo sapien
cttttgttggcctcggataggcgat

SEQ ID NO: 2424437 - DNA, 25 bp, Homo sapien
ggataggcgatcctcgccgtgcgcc

SEQ ID NO: 2424438 - DNA, 25 bp, Homo sapien
aaccggggtctggtgcagacagccc

SEQ ID NO: 2424439 - DNA, 25 bp, Homo sapien
tcgtagttccacctctccgattcca

SEQ ID NO: 2424440 - DNA, 25 bp, Homo sapien
ctgctcgtagttccacctctccgat

SEQ ID NO: 2424441 - DNA, 25 bp, Homo sapien
gctcgtagttccacctctccgattc

SEQ ID NO: 2424442 - DNA, 25 bp, Homo sapien
cgtagttccacctctccgattccac

SEQ ID NO: 2424443 - DNA, 25 bp, Homo sapien
ctggagtgtaattgttcccagacca

SEQ ID NO: 2424444 - DNA, 25 bp, Homo sapien
aattgttcccagaccaaactgaggg

SEQ ID NO: 2424445 - DNA, 25 bp, Homo sapien
cttatataccctctaagctatctgc

SEQ ID NO: 2424446 - DNA, 25 bp, Homo sapien
ttgtgtcctgacaacaagatgcaga

SEQ ID NO: 2424447 - DNA, 25 bp, Homo sapien
tcctgaggcttgacctgagacgcag

SEQ ID NO: 2424448 - DNA, 25 bp, Homo sapien
tccaagttcctgtgcagagtcagag

SEQ ID NO: 2424449 - DNA, 25 bp, Homo sapien
gaatagcattccacaactcctgagg

SEQ ID NO: 2424450 - DNA, 25 bp, Homo sapien
gagtctctttccgtgcttccgtgca

SEQ ID NO: 2424451 - DNA, 25 bp, Homo sapien
tgacacctggccaggctttggtccc

SEQ ID NO: 2424452 - DNA, 25 bp, Homo sapien
gacacctggccaggctttggtccct

SEQ ID NO: 2424453 - DNA, 25 bp, Homo sapien
acctggccaggctttggtccctcat

SEQ ID NO: 2424454 - DNA, 25 bp, Homo sapien
acagcaggcacctttgctctggctt

SEQ ID NO: 2424455 - DNA, 25 bp, Homo sapien
acacagcaggcacctttgctctggc

SEQ ID NO: 2424456 - DNA, 25 bp, Homo sapien
cacagcaggcacctttgctctggct

SEQ ID NO: 2424457 - DNA, 25 bp, Homo sapien
cgcctttggggtctggtcctggcct

SEQ ID NO: 2424458 - DNA, 25 bp, Homo sapien
gaacctgtgcctgcgcctttggggt

SEQ ID NO: 2424459 - DNA, 25 bp, Homo sapien
ccctgcctagagttggggacctggt

SEQ ID NO: 2424460 - DNA, 25 bp, Homo sapien
gtgctgcagcggtggacccccacga

SEQ ID NO: 2424461 - DNA, 25 bp, Homo sapien
ccagaagaaattaggcatcttcagg

SEQ ID NO: 2424462 - DNA, 25 bp, Homo sapien
accagaagaaattaggcatcttcag

SEQ ID NO: 2424463 - DNA, 25 bp, Homo sapien
gggcaccttagggaacatgtaccgc

SEQ ID NO: 2424464 - DNA, 25 bp, Homo sapien
ggaaagcagctcataggtcctggag

SEQ ID NO: 2424465 - DNA, 25 bp, Homo sapien
gatttcctcgtgactggtgacggca

SEQ ID NO: 2424466 - DNA, 25 bp, Homo sapien
aaattgaattgcctgggcgtcccgg

SEQ ID NO: 2424467 - DNA, 25 bp, Homo sapien
gtgctgcagcggtggactcccacga

SEQ ID NO: 2424468 - DNA, 25 bp, Homo sapien
aagatgtgggatcctgttgcctggt

SEQ ID NO: 2424469 - DNA, 25 bp, Homo sapien
tgcagcaaggcggaagatgtgggat

SEQ ID NO: 2424470 - DNA, 25 bp, Homo sapien
tggactcccacgaggaggtcccagg

SEQ ID NO: 2424471 - DNA, 25 bp, Homo sapien
tgagatcgggcagggtgatatggct

SEQ ID NO: 2424472 - DNA, 25 bp, Homo sapien
atgagatcgggcagggtgatatggc

SEQ ID NO: 2424473 - DNA, 25 bp, Homo sapien
agcacccagcattcccaggcggcct

SEQ ID NO: 2424474 - DNA, 25 bp, Homo sapien
gctgcggggcttggatccgggatcc

SEQ ID NO: 2424475 - DNA, 25 bp, Homo sapien
tccctctattcccccgagcactgct

SEQ ID NO: 2424476 - DNA, 25 bp, Homo sapien
cagagcctccctccgtcgccggctg

SEQ ID NO: 2424477 - DNA, 25 bp, Homo sapien
tccgtcgccggctgccgggccacgc

SEQ ID NO: 2424478 - DNA, 25 bp, Homo sapien
gactgagtctgggatgggtaccctt

SEQ ID NO: 2424479 - DNA, 25 bp, Homo sapien
cactccctgggtgcggggactgagt

SEQ ID NO: 2424480 - DNA, 25 bp, Homo sapien
agctgacccactccctgggtgcggg

SEQ ID NO: 2424481 - DNA, 25 bp, Homo sapien
actgagtctgggatgggtacccttc

SEQ ID NO: 2424482 - DNA, 25 bp, Homo sapien
gggaggagtatccagacaggatcat

SEQ ID NO: 2424483 - DNA, 25 bp, Homo sapien
ccgggaggagtatccagacaggatc

SEQ ID NO: 2424484 - DNA, 25 bp, Homo sapien
tcattagtaagatccgggaggagta

SEQ ID NO: 2424485 - DNA, 25 bp, Homo sapien
attagtaagatccgggaggagtatc

SEQ ID NO: 2424486 - DNA, 25 bp, Homo sapien
tcagacactgttgtggaaccctgca

SEQ ID NO: 2424487 - DNA, 25 bp, Homo sapien
cagacactgttgtggaaccctgcaa

SEQ ID NO: 2424488 - DNA, 25 bp, Homo sapien
actgttgtggaaccctgcaatgcca

SEQ ID NO: 2424489 - DNA, 25 bp, Homo sapien
gacactgttgtggaaccctgcaatg

SEQ ID NO: 2424490 - DNA, 25 bp, Homo sapien
ataaagtattctcatagcatctggt

SEQ ID NO: 2424491 - DNA, 25 bp, Homo sapien
tctttctatagtccctctggctact

SEQ ID NO: 2424492 - DNA, 25 bp, Homo sapien
tgctgccagatgcacatagttgtcc

SEQ ID NO: 2424493 - DNA, 25 bp, Homo sapien
tagcatctggtttaacctccaactt

SEQ ID NO: 2424494 - DNA, 25 bp, Homo sapien
gggcaggaatcgagcccagtgtata

SEQ ID NO: 2424495 - DNA, 25 bp, Homo sapien
tgggcaggaatcgagcccagtgtat

SEQ ID NO: 2424496 - DNA, 25 bp, Homo sapien
gtgggcaggaatcgagcccagtgta

SEQ ID NO: 2424497 - DNA, 25 bp, Homo sapien
tcacatgcactgaaccctatgtaga

SEQ ID NO: 2424498 - DNA, 25 bp, Homo sapien
cacatgcactgaaccctatgtagaa

SEQ ID NO: 2424499 - DNA, 25 bp, Homo sapien
gcactgaaccctatgtagaagggga

SEQ ID NO: 2424500 - DNA, 25 bp, Homo sapien
atgcactgaaccctatgtagaaggg

SEQ ID NO: 2424501 - DNA, 25 bp, Homo sapien
gcagttgctgggctggtgtgctcgg

SEQ ID NO: 2424502 - DNA, 25 bp, Homo sapien
cagttgctgggctggtgtgctcggg

SEQ ID NO: 2424503 - DNA, 25 bp, Homo sapien
ccatagatggcagttgctgggctgg

SEQ ID NO: 2424504 - DNA, 25 bp, Homo sapien
gatggcagttgctgggctggtgtgc

SEQ ID NO: 2424505 - DNA, 25 bp, Homo sapien
tcacaagtgctgcttcccccagttg

SEQ ID NO: 2424506 - DNA, 25 bp, Homo sapien
gagacatgcaggtgctcacaagtgc

SEQ ID NO: 2424507 - DNA, 25 bp, Homo sapien
ccccagttggcaaccagtgagaaaa

SEQ ID NO: 2424508 - DNA, 25 bp, Homo sapien
cagtgagaaaaacgcccgagtggag

SEQ ID NO: 2424509 - DNA, 25 bp, Homo sapien
gctctctagaaaggtggctaatgca

SEQ ID NO: 2424510 - DNA, 25 bp, Homo sapien
ctggatgaaactggtgagggtggca

SEQ ID NO: 2424511 - DNA, 25 bp, Homo sapien
cactccagaatttcagggcaaaaat

SEQ ID NO: 2424512 - DNA, 25 bp, Homo sapien
aaggtggctaatgcacagtgtctgc

SEQ ID NO: 2424513 - DNA, 25 bp, Homo sapien
gggtcaggcttggtgcccatgtatt

SEQ ID NO: 2424514 - DNA, 25 bp, Homo sapien
tcctgccagacaagcacggcatgtt

SEQ ID NO: 2424515 - DNA, 25 bp, Homo sapien
tgccagacaagcacggcatgttgtg

SEQ ID NO: 2424516 - DNA, 25 bp, Homo sapien
gccagacaagcacggcatgttgtgg

SEQ ID NO: 2424517 - DNA, 25 bp, Homo sapien
cttcctgccagacaagcacggcatg

SEQ ID NO: 2424518 - DNA, 25 bp, Homo sapien
tgaacagatataacataactggttc

SEQ ID NO: 2424519 - DNA, 25 bp, Homo sapien
gaacagatataacataactggttca

SEQ ID NO: 2424520 - DNA, 25 bp, Homo sapien
ttcccatggttacacagtattaagg

SEQ ID NO: 2424521 - DNA, 25 bp, Homo sapien
tttcccatggttacacagtattaag

SEQ ID NO: 2424522 - DNA, 25 bp, Homo sapien
ggcacactcccccaagggcacaaag

SEQ ID NO: 2424523 - DNA, 25 bp, Homo sapien
aggcacactcccccaagggcacaaa

SEQ ID NO: 2424524 - DNA, 25 bp, Homo sapien
tctgctggaggcacactcccccaag

SEQ ID NO: 2424525 - DNA, 25 bp, Homo sapien
gaggcacactcccccaagggcacaa

SEQ ID NO: 2424526 - DNA, 25 bp, Homo sapien
ccattcctgtagagagtctgtgtca

SEQ ID NO: 2424527 - DNA, 25 bp, Homo sapien
gtgtcagacaaatctatgcatcctc

SEQ ID NO: 2424528 - DNA, 25 bp, Homo sapien
caaatctatgcatcctcctccacgc

SEQ ID NO: 2424529 - DNA, 25 bp, Homo sapien
gttgatccattcctgtagagagtct

SEQ ID NO: 2424530 - DNA, 25 bp, Homo sapien
tgttcctctgctgcatggaatataa

SEQ ID NO: 2424531 - DNA, 25 bp, Homo sapien
gctgcatggaatataagaaaggtca

SEQ ID NO: 2424532 - DNA, 25 bp, Homo sapien
taagaaaggtcatagttttctcttc

SEQ ID NO: 2424533 - DNA, 25 bp, Homo sapien
ctctgctgcatggaatataagaaag

SEQ ID NO: 2424534 - DNA, 25 bp, Homo sapien
tcttgtgttggtgtacaccaagcaa

SEQ ID NO: 2424535 - DNA, 25 bp, Homo sapien
tatctgtgtgatgctgattagtcat

SEQ ID NO: 2424536 - DNA, 25 bp, Homo sapien
caaacaatatctgtgtgatgctgat

SEQ ID NO: 2424537 - DNA, 25 bp, Homo sapien
tcactggttacaactcttgtgttgg

SEQ ID NO: 2424538 - DNA, 25 bp, Homo sapien
attaattctaaacaccactgcatgc

SEQ ID NO: 2424539 - DNA, 25 bp, Homo sapien
tagtcaagtaaagcactggaggtgg

SEQ ID NO: 2424540 - DNA, 25 bp, Homo sapien
aaatctgtaactggtagttttcaat

SEQ ID NO: 2424541 - DNA, 25 bp, Homo sapien
taaacaccactgcatgcaggcaatc

SEQ ID NO: 2424542 - DNA, 25 bp, Homo sapien
ctttttagtgtcctgcctcctcttc

SEQ ID NO: 2424543 - DNA, 25 bp, Homo sapien
cctcttctccgccttcagccgggcg

SEQ ID NO: 2424544 - DNA, 25 bp, Homo sapien
ctcctcttctccgccttcagccggg

SEQ ID NO: 2424545 - DNA, 25 bp, Homo sapien
gcctcctcttctccgccttcagccg

SEQ ID NO: 2424546 - DNA, 25 bp, Homo sapien
atggacgagatcttccacctgcctc

SEQ ID NO: 2424547 - DNA, 25 bp, Homo sapien
tggacgagatcttccacctgcctca

SEQ ID NO: 2424548 - DNA, 25 bp, Homo sapien
tcttccacctgcctcaggcgcagcg

SEQ ID NO: 2424549 - DNA, 25 bp, Homo sapien
tccacctgcctcaggcgcagcgcta

SEQ ID NO: 2424550 - DNA, 25 bp, Homo sapien
tttgtaagaattgagacagggtgtc

SEQ ID NO: 2424551 - DNA, 25 bp, Homo sapien
caaatttgtatatatgtaatgtatg

SEQ ID NO: 2424552 - DNA, 25 bp, Homo sapien
ggtctcaaaacacctgcctcaagtg

SEQ ID NO: 2424553 - DNA, 25 bp, Homo sapien
gtgtcactatgttgtgtgggctggt

SEQ ID NO: 2424554 - DNA, 25 bp, Homo sapien
gactctattacaccctgttttagaa

SEQ ID NO: 2424555 - DNA, 25 bp, Homo sapien
aattaattgctaagtcatggtcaag

SEQ ID NO: 2424556 - DNA, 25 bp, Homo sapien
caagagttagatagcaagtagttca

SEQ ID NO: 2424557 - DNA, 25 bp, Homo sapien
ctgatgacttacatgctgtctttgg

SEQ ID NO: 2424558 - DNA, 25 bp, Homo sapien
tttctttacttgacattcataggct

SEQ ID NO: 2424559 - DNA, 25 bp, Homo sapien
taagggctgacttggtaccacagca

SEQ ID NO: 2424560 - DNA, 25 bp, Homo sapien
tcataggctccacacttactaaggg

SEQ ID NO: 2424561 - DNA, 25 bp, Homo sapien
taaaagcattgcacagttagagtga

SEQ ID NO: 2424562 - DNA, 25 bp, Homo sapien
tcagttttacaatggctatattatt

SEQ ID NO: 2424563 - DNA, 25 bp, Homo sapien
cagttttacaatggctatattatta

SEQ ID NO: 2424564 - DNA, 25 bp, Homo sapien
gaattgcaaccagactagagatgtc

SEQ ID NO: 2424565 - DNA, 25 bp, Homo sapien
tcatgttggaattgcaaccagacta

SEQ ID NO: 2424566 - DNA, 25 bp, Homo sapien
tgttggaattgcaaccagactagag

SEQ ID NO: 2424567 - DNA, 25 bp, Homo sapien
tagagatgtcatcattttgtctgag

SEQ ID NO: 2424568 - DNA, 25 bp, Homo sapien
ggaccagctggcaatttccagtcat

SEQ ID NO: 2424569 - DNA, 25 bp, Homo sapien
gcaggaccagctggcaatttccagt

SEQ ID NO: 2424570 - DNA, 25 bp, Homo sapien
aggaccagctggcaatttccagtca

SEQ ID NO: 2424571 - DNA, 25 bp, Homo sapien
caggaccagctggcaatttccagtc

SEQ ID NO: 2424572 - DNA, 25 bp, Homo sapien
caccaagcaatcctctgattataat

SEQ ID NO: 2424573 - DNA, 25 bp, Homo sapien
gcaatcaaagttccagcaacctctg

SEQ ID NO: 2424574 - DNA, 25 bp, Homo sapien
ggatcaccaagcaatcctctgatta

SEQ ID NO: 2424575 - DNA, 25 bp, Homo sapien
aaaacaagaggccattaagccctgc

SEQ ID NO: 2424576 - DNA, 25 bp, Homo sapien
ctgctttacgaaacatggctaattc

SEQ ID NO: 2424577 - DNA, 25 bp, Homo sapien
ggctaattcagtactccaagcttct

SEQ ID NO: 2424578 - DNA, 25 bp, Homo sapien
taattcagtactccaagcttctgtc

SEQ ID NO: 2424579 - DNA, 25 bp, Homo sapien
gctttacgaaacatggctaattcag

SEQ ID NO: 2424580 - DNA, 25 bp, Homo sapien
ttacgttgtagtcttgcaggaaggg

SEQ ID NO: 2424581 - DNA, 25 bp, Homo sapien
taaaataattgttgtgtatcccact

SEQ ID NO: 2424582 - DNA, 25 bp, Homo sapien
caggaagggaataatggctacaagt

SEQ ID NO: 2424583 - DNA, 25 bp, Homo sapien
aatggctacaagtaattccaagatc

SEQ ID NO: 2424584 - DNA, 25 bp, Homo sapien
gatacagtgtacaatgcttgagtga

SEQ ID NO: 2424585 - DNA, 25 bp, Homo sapien
gtgtacaatgcttgagtgatgggta

SEQ ID NO: 2424586 - DNA, 25 bp, Homo sapien
tggatacagtgtacaatgcttgagt

SEQ ID NO: 2424587 - DNA, 25 bp, Homo sapien
atacagtgtacaatgcttgagtgat

SEQ ID NO: 2424588 - DNA, 25 bp, Homo sapien
cataggactgtgagtataaagcata

SEQ ID NO: 2424589 - DNA, 25 bp, Homo sapien
taaagctgtgtatagctcccagatg

SEQ ID NO: 2424590 - DNA, 25 bp, Homo sapien
taaataacatggatctgaaacccgg

SEQ ID NO: 2424591 - DNA, 25 bp, Homo sapien
cttccaatgcaatatagatcttgtg

SEQ ID NO: 2424592 - DNA, 25 bp, Homo sapien
ttagattaatgcttgcccaccataa

SEQ ID NO: 2424593 - DNA, 25 bp, Homo sapien
tagattaatgcttgcccaccataac

SEQ ID NO: 2424594 - DNA, 25 bp, Homo sapien
gaagatggatactagaacccaggag

SEQ ID NO: 2424595 - DNA, 25 bp, Homo sapien
aacaagagttgatgatatcagccag

SEQ ID NO: 2424596 - DNA, 25 bp, Homo sapien
actgaatgtagatcacctgaagaag

SEQ ID NO: 2424597 - DNA, 25 bp, Homo sapien
gagttgatgatatcagccagcacaa

SEQ ID NO: 2424598 - DNA, 25 bp, Homo sapien
gaaagcacacactagatttgatctg

SEQ ID NO: 2424599 - DNA, 25 bp, Homo sapien
cagagtattcccatgcaaggtataa

SEQ ID NO: 2424600 - DNA, 25 bp, Homo sapien
taggagggaggtctgctaatagatc

SEQ ID NO: 2424601 - DNA, 25 bp, Homo sapien
tatagtccggagaagttgcctagga

SEQ ID NO: 2424602 - DNA, 25 bp, Homo sapien
taacaccaatttaatcttgtggctc

SEQ ID NO: 2424603 - DNA, 25 bp, Homo sapien
tcccgtctgagtaaaaagataggag

SEQ ID NO: 2424604 - DNA, 25 bp, Homo sapien
tcattgtgagctgcataaccccacc

SEQ ID NO: 2424605 - DNA, 25 bp, Homo sapien
tccaaaaatacaggtgagatcccaa

SEQ ID NO: 2424606 - DNA, 25 bp, Homo sapien
tagcctgacaagatgttacagagga

SEQ ID NO: 2424607 - DNA, 25 bp, Homo sapien
ttcccatccaaagactagcctgaca

SEQ ID NO: 2424608 - DNA, 25 bp, Homo sapien
tataaagttgaataaactggtataa

SEQ ID NO: 2424609 - DNA, 25 bp, Homo sapien
tgtgccaatactcctgctgcttgac

SEQ ID NO: 2424610 - DNA, 25 bp, Homo sapien
caaatgtttgttaatcatggtttcg

SEQ ID NO: 2424611 - DNA, 25 bp, Homo sapien
gtttcccactctcatctggctgcag

SEQ ID NO: 2424612 - DNA, 25 bp, Homo sapien
tttcgatcgaaagggaagagcttcc

SEQ ID NO: 2424613 - DNA, 25 bp, Homo sapien
tatttcttgcaagctaacgtttccc

SEQ ID NO: 2424614 - DNA, 25 bp, Homo sapien
taccagagtcttagggaattgcact

SEQ ID NO: 2424615 - DNA, 25 bp, Homo sapien
ctttgtgatggatggttccctgggc

SEQ ID NO: 2424616 - DNA, 25 bp, Homo sapien
ttcagtcatgggtgttaccagagtc

SEQ ID NO: 2424617 - DNA, 25 bp, Homo sapien
cctgggctctttcgactgtgctttc

SEQ ID NO: 2424618 - DNA, 25 bp, Homo sapien
aattgagagcagagacaaaagcact

SEQ ID NO: 2424619 - DNA, 25 bp, Homo sapien
attgagagcagagacaaaagcactt

SEQ ID NO: 2424620 - DNA, 25 bp, Homo sapien
aaaatggtcatctatcacaaaatgt

SEQ ID NO: 2424621 - DNA, 25 bp, Homo sapien
tggtcatctatcacaaaatgtatct

SEQ ID NO: 2424622 - DNA, 25 bp, Homo sapien
acatgtgtgcttgatatgacttgat

SEQ ID NO: 2424623 - DNA, 25 bp, Homo sapien
tgtgcttgatatgacttgataattt

SEQ ID NO: 2424624 - DNA, 25 bp, Homo sapien
cctgaacaactcttgctacatttct

SEQ ID NO: 2424625 - DNA, 25 bp, Homo sapien
tgaacaactcttgctacatttctca

SEQ ID NO: 2424626 - DNA, 25 bp, Homo sapien
ctgaacaactcttgctacatttctc

SEQ ID NO: 2424627 - DNA, 25 bp, Homo sapien
tattcttgaactttcatattttttc

SEQ ID NO: 2424628 - DNA, 25 bp, Homo sapien
attcttgaactttcatattttttca

SEQ ID NO: 2424629 - DNA, 25 bp, Homo sapien
caagtggcaggtgggaaaaatcttc

SEQ ID NO: 2424630 - DNA, 25 bp, Homo sapien
tccacttttgatctgagaattgaga

SEQ ID NO: 2424631 - DNA, 25 bp, Homo sapien
tctttacaagtggcaggtgggaaaa

SEQ ID NO: 2424632 - DNA, 25 bp, Homo sapien
tctgagaattgagatcataataatc

SEQ ID NO: 2424633 - DNA, 25 bp, Homo sapien
ttttgatctagatgtttcaagctcc

SEQ ID NO: 2424634 - DNA, 25 bp, Homo sapien
gtttttgatctagatgtttcaagct

SEQ ID NO: 2424635 - DNA, 25 bp, Homo sapien
ctctatagtttttgatctagatgtt

SEQ ID NO: 2424636 - DNA, 25 bp, Homo sapien
tatagtttttgatctagatgtttca

SEQ ID NO: 2424637 - DNA, 25 bp, Homo sapien
cagaaatgaagaagtcgaagtggct

SEQ ID NO: 2424638 - DNA, 25 bp, Homo sapien
agaaatgaagaagtcgaagtggctc

SEQ ID NO: 2424639 - DNA, 25 bp, Homo sapien
gaaatgaagaagtcgaagtggctca

SEQ ID NO: 2424640 - DNA, 25 bp, Homo sapien
tcagaaatgaagaagtcgaagtggc

SEQ ID NO: 2424641 - DNA, 25 bp, Homo sapien
ttgctattaccaccttgctgtacca

SEQ ID NO: 2424642 - DNA, 25 bp, Homo sapien
agtcttgctccccttgctattacca

SEQ ID NO: 2424643 - DNA, 25 bp, Homo sapien
cccttgctattaccaccttgctgta

SEQ ID NO: 2424644 - DNA, 25 bp, Homo sapien
tgctattaccaccttgctgtaccat

SEQ ID NO: 2424645 - DNA, 25 bp, Homo sapien
tgccaggtagtatagaaaaggtcct

SEQ ID NO: 2424646 - DNA, 25 bp, Homo sapien
tatagaaaaggtcctgttgaaccac

SEQ ID NO: 2424647 - DNA, 25 bp, Homo sapien
ggtcctgttgaaccacaatctattg

SEQ ID NO: 2424648 - DNA, 25 bp, Homo sapien
ccacaatctattgcagctgccagag

SEQ ID NO: 2424649 - DNA, 25 bp, Homo sapien
caatgtgagcttcgtgcattttgga

SEQ ID NO: 2424650 - DNA, 25 bp, Homo sapien
gacacaatgtgagcttcgtgcattt

SEQ ID NO: 2424651 - DNA, 25 bp, Homo sapien
tgtgagcttcgtgcattttggaaaa

SEQ ID NO: 2424652 - DNA, 25 bp, Homo sapien
tctgacacaatgtgagcttcgtgca

SEQ ID NO: 2424653 - DNA, 25 bp, Homo sapien
cttggagtctctgttactgtagatt

SEQ ID NO: 2424654 - DNA, 25 bp, Homo sapien
aaatgagcatgaggctattttcttc

SEQ ID NO: 2424655 - DNA, 25 bp, Homo sapien
tattttcttcgtccacctcataggg

SEQ ID NO: 2424656 - DNA, 25 bp, Homo sapien
tgaattcaccccttaacgtcttgga

SEQ ID NO: 2424657 - DNA, 25 bp, Homo sapien
tttgagatggagtctcactctgtcg

SEQ ID NO: 2424658 - DNA, 25 bp, Homo sapien
gtcgcccaggctggaatacagtggt

SEQ ID NO: 2424659 - DNA, 25 bp, Homo sapien
ctgtagtttctttctttctgtcttt

SEQ ID NO: 2424660 - DNA, 25 bp, Homo sapien
tgtagtttctttctttctgtctttc

SEQ ID NO: 2424661 - DNA, 25 bp, Homo sapien
aaatgtgagtaattggaagtacaga

SEQ ID NO: 2424662 - DNA, 25 bp, Homo sapien
aaaatgtgagtaattggaagtacag

SEQ ID NO: 2424663 - DNA, 25 bp, Homo sapien
tttatttgcatcaaaatgtgagtaa

SEQ ID NO: 2424664 - DNA, 25 bp, Homo sapien
tgactggcctactggatttctgcat

SEQ ID NO: 2424665 - DNA, 25 bp, Homo sapien
tactggtatagtcatctctagccca

SEQ ID NO: 2424666 - DNA, 25 bp, Homo sapien
taacctcttttgacagtgtaggtgg

SEQ ID NO: 2424667 - DNA, 25 bp, Homo sapien
tgtaggtggctaacggtagcaccaa

SEQ ID NO: 2424668 - DNA, 25 bp, Homo sapien
tcaacgcgtcttgttacgaatgcag

SEQ ID NO: 2424669 - DNA, 25 bp, Homo sapien
tgcttgttagcattaccatttcttc

SEQ ID NO: 2424670 - DNA, 25 bp, Homo sapien
tctgtgcaggtcatcagtacttcct

SEQ ID NO: 2424671 - DNA, 25 bp, Homo sapien
ttacgaatgcagttggaaagttcta

SEQ ID NO: 2424672 - DNA, 25 bp, Homo sapien
atatttaagatcagtaaaggaaatc

SEQ ID NO: 2424673 - DNA, 25 bp, Homo sapien
tctgtaggtaatacactgtagtggc

SEQ ID NO: 2424674 - DNA, 25 bp, Homo sapien
ggaaatcatcaaactattgtcattc

SEQ ID NO: 2424675 - DNA, 25 bp, Homo sapien
tacatgaaacgtacaaagcaaatag

SEQ ID NO: 2424676 - DNA, 25 bp, Homo sapien
tatacacatagcagtcgaagacaat

SEQ ID NO: 2424677 - DNA, 25 bp, Homo sapien
gaaattccgatcaagagagccagta

SEQ ID NO: 2424678 - DNA, 25 bp, Homo sapien
tggttcattacagagcaccaggcac

SEQ ID NO: 2424679 - DNA, 25 bp, Homo sapien
caattattcgtggacaggcaggtca

SEQ ID NO: 2424680 - DNA, 25 bp, Homo sapien
gattcctcgggctctcatataggag

SEQ ID NO: 2424681 - DNA, 25 bp, Homo sapien
ggcgcaggtgatggcttgattcctc

SEQ ID NO: 2424682 - DNA, 25 bp, Homo sapien
tcagggatctcagctaggacatctt

SEQ ID NO: 2424683 - DNA, 25 bp, Homo sapien
tttagccaatctagccatgctcagt

SEQ ID NO: 2424684 - DNA, 25 bp, Homo sapien
gaggagactcttacatcatctccat

SEQ ID NO: 2424685 - DNA, 25 bp, Homo sapien
tttcctctagaggagactcttacat

SEQ ID NO: 2424686 - DNA, 25 bp, Homo sapien
catcatctccatccaattcgaccat

SEQ ID NO: 2424687 - DNA, 25 bp, Homo sapien
tctagaggagactcttacatcatct

SEQ ID NO: 2424688 - DNA, 25 bp, Homo sapien
tcagtacattttagccaaatactaa

SEQ ID NO: 2424689 - DNA, 25 bp, Homo sapien
gcatgttgatcccttcatgtcttca

SEQ ID NO: 2424690 - DNA, 25 bp, Homo sapien
aagacagaaagcatgttgatccctt

SEQ ID NO: 2424691 - DNA, 25 bp, Homo sapien
gaaagcatgttgatcccttcatgtc

SEQ ID NO: 2424692 - DNA, 25 bp, Homo sapien
taggagaaataactgagcttgaatc

SEQ ID NO: 2424693 - DNA, 25 bp, Homo sapien
ctttctgcatggaaagaggaatagg

SEQ ID NO: 2424694 - DNA, 25 bp, Homo sapien
ggaataggattactaagattaggag

SEQ ID NO: 2424695 - DNA, 25 bp, Homo sapien
cactctcatttggagcagcactatc

SEQ ID NO: 2424696 - DNA, 25 bp, Homo sapien
gcttaataggcaaaactccgcctct

SEQ ID NO: 2424697 - DNA, 25 bp, Homo sapien
gataagtataatttctctcggtggc

SEQ ID NO: 2424698 - DNA, 25 bp, Homo sapien
tctctcggtggcatgcttaataggc

SEQ ID NO: 2424699 - DNA, 25 bp, Homo sapien
aactccgcctctataaggagaagtc

SEQ ID NO: 2424700 - DNA, 25 bp, Homo sapien
tctgctggtccaacacctactataa

SEQ ID NO: 2424701 - DNA, 25 bp, Homo sapien
gctggtccaacacctactataatta

SEQ ID NO: 2424702 - DNA, 25 bp, Homo sapien
ggtccaacacctactataattattg

SEQ ID NO: 2424703 - DNA, 25 bp, Homo sapien
aaattctgctggtccaacacctact

SEQ ID NO: 2424704 - DNA, 25 bp, Homo sapien
tagtctgggccatatctgagataac

SEQ ID NO: 2424705 - DNA, 25 bp, Homo sapien
gactccttagtctgggccatatctg

SEQ ID NO: 2424706 - DNA, 25 bp, Homo sapien
tgggccatatctgagataacaccat

SEQ ID NO: 2424707 - DNA, 25 bp, Homo sapien
attaactatggactccttagtctgg

SEQ ID NO: 2424708 - DNA, 25 bp, Homo sapien
gttctgtccaatccattttagtctt

SEQ ID NO: 2424709 - DNA, 25 bp, Homo sapien
gtctttatcaccttcggcaccacaa

SEQ ID NO: 2424710 - DNA, 25 bp, Homo sapien
ttttagtctttatcaccttcggcac

SEQ ID NO: 2424711 - DNA, 25 bp, Homo sapien
accttcggcaccacaaattaatctt

SEQ ID NO: 2424712 - DNA, 25 bp, Homo sapien
tttcagactcctgtaataagcctcc

SEQ ID NO: 2424713 - DNA, 25 bp, Homo sapien
agttggtgggcccatatagttgtac

SEQ ID NO: 2424714 - DNA, 25 bp, Homo sapien
ccatatagttgtacagatttcagac

SEQ ID NO: 2424715 - DNA, 25 bp, Homo sapien
catgattaattacaggagcaaagtt

SEQ ID NO: 2424716 - DNA, 25 bp, Homo sapien
tcacagtaggggttttgaggattcc

SEQ ID NO: 2424717 - DNA, 25 bp, Homo sapien
gaccccctcaatgccatcacagtag

SEQ ID NO: 2424718 - DNA, 25 bp, Homo sapien
aatgccatcacagtaggggttttga

SEQ ID NO: 2424719 - DNA, 25 bp, Homo sapien
cagtaggggttttgaggattcccat

SEQ ID NO: 2424720 - DNA, 25 bp, Homo sapien
ctgtagaaatttataggcaaaacaa

SEQ ID NO: 2424721 - DNA, 25 bp, Homo sapien
tgtagaaatttataggcaaaacaaa

SEQ ID NO: 2424722 - DNA, 25 bp, Homo sapien
caacagtaaaaaagtaaatctccat

SEQ ID NO: 2424723 - DNA, 25 bp, Homo sapien
tgatgttaatctgagccgacctatt

SEQ ID NO: 2424724 - DNA, 25 bp, Homo sapien
aaactggttgcatgacttggctgaa

SEQ ID NO: 2424725 - DNA, 25 bp, Homo sapien
cattcgtgacagagggatttatatc

SEQ ID NO: 2424726 - DNA, 25 bp, Homo sapien
tacaaactagggtagtcctgagcta

SEQ ID NO: 2424727 - DNA, 25 bp, Homo sapien
gattaataatctcaccactcagact

SEQ ID NO: 2424728 - DNA, 25 bp, Homo sapien
aagtccagttgtggttctgacacaa

SEQ ID NO: 2424729 - DNA, 25 bp, Homo sapien
gaggagtgcccagctcttacccatt

SEQ ID NO: 2424730 - DNA, 25 bp, Homo sapien
gattcatctccatgcaagaagtctg

SEQ ID NO: 2424731 - DNA, 25 bp, Homo sapien
tcaaaacatcaaatccttttgacaa

SEQ ID NO: 2424732 - DNA, 25 bp, Homo sapien
gtgagatatccttccatctggaggc

SEQ ID NO: 2424733 - DNA, 25 bp, Homo sapien
cactgtcataatcttgaacaatttc

SEQ ID NO: 2424734 - DNA, 25 bp, Homo sapien
taggcattcagttggtaaggattca

SEQ ID NO: 2424735 - DNA, 25 bp, Homo sapien
tagtgccataccataggcattcagt

SEQ ID NO: 2424736 - DNA, 25 bp, Homo sapien
gtagtggagggaagtgggctgagca

SEQ ID NO: 2424737 - DNA, 25 bp, Homo sapien
agggaagtgggctgagcagggttgc

SEQ ID NO: 2424738 - DNA, 25 bp, Homo sapien
tggagggaagtgggctgagcagggt

SEQ ID NO: 2424739 - DNA, 25 bp, Homo sapien
tagtggagggaagtgggctgagcag

SEQ ID NO: 2424740 - DNA, 25 bp, Homo sapien
tgtcaaggacagcacactgataact

SEQ ID NO: 2424741 - DNA, 25 bp, Homo sapien
acctaattcactggtgctagtcacc

SEQ ID NO: 2424742 - DNA, 25 bp, Homo sapien
gatttccataaagaagttgctctct

SEQ ID NO: 2424743 - DNA, 25 bp, Homo sapien
tatgtgccccgatccttatgtcaag

SEQ ID NO: 2424744 - DNA, 25 bp, Homo sapien
cattctgtggccgaaccacggtcta

SEQ ID NO: 2424745 - DNA, 25 bp, Homo sapien
gatcttctatcctgcaaacttgctg

SEQ ID NO: 2424746 - DNA, 25 bp, Homo sapien
tgcctaatggtcttggctacaacct

SEQ ID NO: 2424747 - DNA, 25 bp, Homo sapien
tctgcgagtgcaggtaaatctgtat

SEQ ID NO: 2424748 - DNA, 25 bp, Homo sapien
caacatgaaagtgcaccggactttg

SEQ ID NO: 2424749 - DNA, 25 bp, Homo sapien
gttttcaacatgaaagtgcaccgga

SEQ ID NO: 2424750 - DNA, 25 bp, Homo sapien
ttcaacatgaaagtgcaccggactt

SEQ ID NO: 2424751 - DNA, 25 bp, Homo sapien
tttcaacatgaaagtgcaccggact

SEQ ID NO: 2424752 - DNA, 25 bp, Homo sapien
tgtaaaatcaatagccactgtgaaa

SEQ ID NO: 2424753 - DNA, 25 bp, Homo sapien
caatagccactgtgaaattgatttg

SEQ ID NO: 2424754 - DNA, 25 bp, Homo sapien
aaatcaatagccactgtgaaattga

SEQ ID NO: 2424755 - DNA, 25 bp, Homo sapien
agccactgtgaaattgatttgcgtc

SEQ ID NO: 2424756 - DNA, 25 bp, Homo sapien
ctaaccagcatgaacctaagtgagt

SEQ ID NO: 2424757 - DNA, 25 bp, Homo sapien
caacccagttggtgaccttagccaa

SEQ ID NO: 2424758 - DNA, 25 bp, Homo sapien
cattgcttcgtcatgctgtggtagg

SEQ ID NO: 2424759 - DNA, 25 bp, Homo sapien
cagcatagggtctcttgtagtcctc

SEQ ID NO: 2424760 - DNA, 25 bp, Homo sapien
catggcttgtaccagttaaccacaa

SEQ ID NO: 2424761 - DNA, 25 bp, Homo sapien
ctttctggctataataggcacacaa

SEQ ID NO: 2424762 - DNA, 25 bp, Homo sapien
aacaaacccaaatttgatctgaata

SEQ ID NO: 2424763 - DNA, 25 bp, Homo sapien
gagaagatactatcatcctcttttt

SEQ ID NO: 2424764 - DNA, 25 bp, Homo sapien
aaacaggttatgctagcaagaggca

SEQ ID NO: 2424765 - DNA, 25 bp, Homo sapien
tctggactgaaagaagtatcctggg

SEQ ID NO: 2424766 - DNA, 25 bp, Homo sapien
gatgacaacaatacgatgagcttag

SEQ ID NO: 2424767 - DNA, 25 bp, Homo sapien
gatgcgggcacattatattgtccag

SEQ ID NO: 2424768 - DNA, 25 bp, Homo sapien
tctagtgccttagcagggactcggt

SEQ ID NO: 2424769 - DNA, 25 bp, Homo sapien
tagaaaatcgtgctccaaatggccg

SEQ ID NO: 2424770 - DNA, 25 bp, Homo sapien
cagctgagacaaattcggtagaggc

SEQ ID NO: 2424771 - DNA, 25 bp, Homo sapien
tataagctcacctggactcgctgga

SEQ ID NO: 2424772 - DNA, 25 bp, Homo sapien
gtgggagctctgccttttccgagtt

SEQ ID NO: 2424773 - DNA, 25 bp, Homo sapien
gacagccttacgctgccatcacgct

SEQ ID NO: 2424774 - DNA, 25 bp, Homo sapien
ctttatcaactattgatggcagcag

SEQ ID NO: 2424775 - DNA, 25 bp, Homo sapien
ctgctgttggcttccgctctaatct

SEQ ID NO: 2424776 - DNA, 25 bp, Homo sapien
tagctctaggtatgtacgttttttc

SEQ ID NO: 2424777 - DNA, 25 bp, Homo sapien
aatgactacaccatccatttctgca

SEQ ID NO: 2424778 - DNA, 25 bp, Homo sapien
gctgtgggaccaactaaatgactac

SEQ ID NO: 2424779 - DNA, 25 bp, Homo sapien
tttgccccaaaagtaatagctctag

SEQ ID NO: 2424780 - DNA, 25 bp, Homo sapien
cccttaatgtagtcaaggaatgaaa

SEQ ID NO: 2424781 - DNA, 25 bp, Homo sapien
ctcccttaatgtagtcaaggaatga

SEQ ID NO: 2424782 - DNA, 25 bp, Homo sapien
cctcccttaatgtagtcaaggaatg

SEQ ID NO: 2424783 - DNA, 25 bp, Homo sapien
cttaatgtagtcaaggaatgaaact

SEQ ID NO: 2424784 - DNA, 25 bp, Homo sapien
ctgtttctaccaagaaagagagtaa

SEQ ID NO: 2424785 - DNA, 25 bp, Homo sapien
tctaccaagaaagagagtaaagtta

SEQ ID NO: 2424786 - DNA, 25 bp, Homo sapien
tgtttctaccaagaaagagagtaaa

SEQ ID NO: 2424787 - DNA, 25 bp, Homo sapien
tgttccagaattagtatattttttc

SEQ ID NO: 2424788 - DNA, 25 bp, Homo sapien
cccttaactatggtcacgttcttga

SEQ ID NO: 2424789 - DNA, 25 bp, Homo sapien
tctaatgtcctaactaatgattgct

SEQ ID NO: 2424790 - DNA, 25 bp, Homo sapien
aaaatgtgaagtttaacctgctgcc

SEQ ID NO: 2424791 - DNA, 25 bp, Homo sapien
cactaacatagcaaatcatccaatg

SEQ ID NO: 2424792 - DNA, 25 bp, Homo sapien
gcaagatcacaaatttttcagatgg

SEQ ID NO: 2424793 - DNA, 25 bp, Homo sapien
agtaaggatgttgggcgtcactggc

SEQ ID NO: 2424794 - DNA, 25 bp, Homo sapien
tcagaaagccctaattgaacaaatt

SEQ ID NO: 2424795 - DNA, 25 bp, Homo sapien
tgttgggcgtcactggcaagatcac

SEQ ID NO: 2424796 - DNA, 25 bp, Homo sapien
taaatatggagcaggttgtttggag

SEQ ID NO: 2424797 - DNA, 25 bp, Homo sapien
ccagataatttgaggaacaagcact

SEQ ID NO: 2424798 - DNA, 25 bp, Homo sapien
taatgtttgatcttgagatttgaag

SEQ ID NO: 2424799 - DNA, 25 bp, Homo sapien
gaattccgcaattcttccagataat

SEQ ID NO: 2424800 - DNA, 25 bp, Homo sapien
tgccctctagaaagttccctatagc

SEQ ID NO: 2424801 - DNA, 25 bp, Homo sapien
ctcatatacgttgaattgtgactgc

SEQ ID NO: 2424802 - DNA, 25 bp, Homo sapien
cgttgaattgtgactgccctctaga

SEQ ID NO: 2424803 - DNA, 25 bp, Homo sapien
actgccctctagaaagttccctata

SEQ ID NO: 2424804 - DNA, 25 bp, Homo sapien
cataattgttctagctccctcgcca

SEQ ID NO: 2424805 - DNA, 25 bp, Homo sapien
tcccatagttgtgccagagttgcca

SEQ ID NO: 2424806 - DNA, 25 bp, Homo sapien
ggagccggctaccagtttccatgct

SEQ ID NO: 2424807 - DNA, 25 bp, Homo sapien
tcgccattcttgcttgtggagccgg

SEQ ID NO: 2424808 - DNA, 25 bp, Homo sapien
gcatagcatacacaatagtaattaa

SEQ ID NO: 2424809 - DNA, 25 bp, Homo sapien
cgtttatgaccttatttattagtca

SEQ ID NO: 2424810 - DNA, 25 bp, Homo sapien
ttctaaaaccctccatagcatagca

SEQ ID NO: 2424811 - DNA, 25 bp, Homo sapien
aataattctaaaaccctccatagca

SEQ ID NO: 2424812 - DNA, 25 bp, Homo sapien
cataagttatgcatgcctatcagga

SEQ ID NO: 2424813 - DNA, 25 bp, Homo sapien
aatctgaaggctccacattctgaag

SEQ ID NO: 2424814 - DNA, 25 bp, Homo sapien
tgtcatctaggcaaacttcggcaag

SEQ ID NO: 2424815 - DNA, 25 bp, Homo sapien
gggattctcctcatcaaaactaaag

SEQ ID NO: 2424816 - DNA, 25 bp, Homo sapien
tctccctgcacaagttacctctttg

SEQ ID NO: 2424817 - DNA, 25 bp, Homo sapien
gtctccctgcacaagttacctcttt

SEQ ID NO: 2424818 - DNA, 25 bp, Homo sapien
caccaaaagcctgatagcgatatgg

SEQ ID NO: 2424819 - DNA, 25 bp, Homo sapien
ccaggctgaggatgacgtacttgtt

SEQ ID NO: 2424820 - DNA, 25 bp, Homo sapien
tgatttagggtatctaggagaggaa

SEQ ID NO: 2424821 - DNA, 25 bp, Homo sapien
aggatgacgtacttgttgggaactg

SEQ ID NO: 2424822 - DNA, 25 bp, Homo sapien
gctgctgtaacttcaaatgtaggta

SEQ ID NO: 2424823 - DNA, 25 bp, Homo sapien
ggctgccactttaatatttgactga

SEQ ID NO: 2424824 - DNA, 25 bp, Homo sapien
taccaaccaatatggcagcccctag

SEQ ID NO: 2424825 - DNA, 25 bp, Homo sapien
tctagattgaaagagcacattgcct

SEQ ID NO: 2424826 - DNA, 25 bp, Homo sapien
cagtcatacacctctactttgattg

SEQ ID NO: 2424827 - DNA, 25 bp, Homo sapien
ccagtcatacacctctactttgatt

SEQ ID NO: 2424828 - DNA, 25 bp, Homo sapien
gtcatacacctctactttgattgtt

SEQ ID NO: 2424829 - DNA, 25 bp, Homo sapien
agtcatacacctctactttgattgt

SEQ ID NO: 2424830 - DNA, 25 bp, Homo sapien
cattacataatgctctgactgagat

SEQ ID NO: 2424831 - DNA, 25 bp, Homo sapien
tagagtgtttttgacaacttctgtc

SEQ ID NO: 2424832 - DNA, 25 bp, Homo sapien
gcttgccatactggatttagagtgt

SEQ ID NO: 2424833 - DNA, 25 bp, Homo sapien
tgactgagatcttgaatgcttgcca

SEQ ID NO: 2424834 - DNA, 25 bp, Homo sapien
ttgttcgcacaaaattgcatcaaaa

SEQ ID NO: 2424835 - DNA, 25 bp, Homo sapien
agtccttcttgtccaatttgttcgc

SEQ ID NO: 2424836 - DNA, 25 bp, Homo sapien
tgtccaatttgttcgcacaaaattg

SEQ ID NO: 2424837 - DNA, 25 bp, Homo sapien
tgccatcttcattacttcgataaaa

SEQ ID NO: 2424838 - DNA, 25 bp, Homo sapien
gtatgattgtaccacatttcttccc

SEQ ID NO: 2424839 - DNA, 25 bp, Homo sapien
tcctctgctgtaagtatgattgtac

SEQ ID NO: 2424840 - DNA, 25 bp, Homo sapien
tgtaagtatgattgtaccacatttc

SEQ ID NO: 2424841 - DNA, 25 bp, Homo sapien
tctgctgtaagtatgattgtaccac

SEQ ID NO: 2424842 - DNA, 25 bp, Homo sapien
aagacacatgtcacaccaagtcaga

SEQ ID NO: 2424843 - DNA, 25 bp, Homo sapien
tgagctcactcacattcgaaaatga

SEQ ID NO: 2424844 - DNA, 25 bp, Homo sapien
gcacacaagtctcataggaacaaga

SEQ ID NO: 2424845 - DNA, 25 bp, Homo sapien
tagagtaagcaatttacctccctgg

SEQ ID NO: 2424846 - DNA, 25 bp, Homo sapien
tcttaaaccggtgctgattcttgca

SEQ ID NO: 2424847 - DNA, 25 bp, Homo sapien
ggctttgccgaatccatcactgaga

SEQ ID NO: 2424848 - DNA, 25 bp, Homo sapien
aatctttcttaaaccggtgctgatt

SEQ ID NO: 2424849 - DNA, 25 bp, Homo sapien
catttcggaaggctttgccgaatcc

SEQ ID NO: 2424850 - DNA, 25 bp, Homo sapien
ccactgaaatatctcagatcttccc

SEQ ID NO: 2424851 - DNA, 25 bp, Homo sapien
tctccaatatcttccctggtttcat

SEQ ID NO: 2424852 - DNA, 25 bp, Homo sapien
ctgaaatatctcagatcttcccatg

SEQ ID NO: 2424853 - DNA, 25 bp, Homo sapien
atctccaatatcttccctggtttca

SEQ ID NO: 2424854 - DNA, 25 bp, Homo sapien
gacttccctgtgaaccaacgatctc

SEQ ID NO: 2424855 - DNA, 25 bp, Homo sapien
gtttttccaggcgacttccctgtga

SEQ ID NO: 2424856 - DNA, 25 bp, Homo sapien
gatctctcccaatgtacaaaacact

SEQ ID NO: 2424857 - DNA, 25 bp, Homo sapien
tgtgaaccaacgatctctcccaatg

SEQ ID NO: 2424858 - DNA, 25 bp, Homo sapien
tgtttggataagttggggctctttg

SEQ ID NO: 2424859 - DNA, 25 bp, Homo sapien
ggggctctttgaatcaacatcatac

SEQ ID NO: 2424860 - DNA, 25 bp, Homo sapien
gataagttggggctctttgaatcaa

SEQ ID NO: 2424861 - DNA, 25 bp, Homo sapien
gttggggctctttgaatcaacatca

SEQ ID NO: 2424862 - DNA, 25 bp, Homo sapien
gatcctggtaacaggttgtccttag

SEQ ID NO: 2424863 - DNA, 25 bp, Homo sapien
tagagaggacactgatagtcaaaat

SEQ ID NO: 2424864 - DNA, 25 bp, Homo sapien
gctattgttaaattggctgcagtaa

SEQ ID NO: 2424865 - DNA, 25 bp, Homo sapien
gagtctgcaatacgatcattcatta

SEQ ID NO: 2424866 - DNA, 25 bp, Homo sapien
gtcaaaacgaagattctctctttct

SEQ ID NO: 2424867 - DNA, 25 bp, Homo sapien
aagtcaaaacgaagattctctcttt

SEQ ID NO: 2424868 - DNA, 25 bp, Homo sapien
aaaatcaggatttaaagtattatca

SEQ ID NO: 2424869 - DNA, 25 bp, Homo sapien
gatttaaagtattatcaattacttc

SEQ ID NO: 2424870 - DNA, 25 bp, Homo sapien
atttccaactccttgtacatataag

SEQ ID NO: 2424871 - DNA, 25 bp, Homo sapien
tttccaactccttgtacatataaga

SEQ ID NO: 2424872 - DNA, 25 bp, Homo sapien
ccaactccttgtacatataagacac

SEQ ID NO: 2424873 - DNA, 25 bp, Homo sapien
actccttgtacatataagacacaaa

SEQ ID NO: 2424874 - DNA, 25 bp, Homo sapien
gatcagatttagaaaatgtgtctct

SEQ ID NO: 2424875 - DNA, 25 bp, Homo sapien
atcagatttagaaaatgtgtctctg

SEQ ID NO: 2424876 - DNA, 25 bp, Homo sapien
gaaattccaaactccgtaacactgc

SEQ ID NO: 2424877 - DNA, 25 bp, Homo sapien
aactccgtaacactgcactgagcac

SEQ ID NO: 2424878 - DNA, 25 bp, Homo sapien
caaactccgtaacactgcactgagc

SEQ ID NO: 2424879 - DNA, 25 bp, Homo sapien
ttccaaactccgtaacactgcactg

SEQ ID NO: 2424880 - DNA, 25 bp, Homo sapien
aaagtcgtgacttcccagatcttag

SEQ ID NO: 2424881 - DNA, 25 bp, Homo sapien
cgtctgcaaggagggccgaaatctc

SEQ ID NO: 2424882 - DNA, 25 bp, Homo sapien
catagattcgtctgcaaggagggcc

SEQ ID NO: 2424883 - DNA, 25 bp, Homo sapien
tcttaggtaaggcatagattcgtct

SEQ ID NO: 2424884 - DNA, 25 bp, Homo sapien
ggatggcagcgctcagctggttcaa

SEQ ID NO: 2424885 - DNA, 25 bp, Homo sapien
acctccacccgcgtggccgggatgg

SEQ ID NO: 2424886 - DNA, 25 bp, Homo sapien
gcgtggccgggatggcagcgctcag

SEQ ID NO: 2424887 - DNA, 25 bp, Homo sapien
ggcagcgctcagctggttcaagtcc

SEQ ID NO: 2424888 - DNA, 25 bp, Homo sapien
gcgcagagccacgagggaaccgcta

SEQ ID NO: 2424889 - DNA, 25 bp, Homo sapien
gaaccgctagccagtcctgggtgaa

SEQ ID NO: 2424890 - DNA, 25 bp, Homo sapien
acaaccacagctcgggcggactgag

SEQ ID NO: 2424891 - DNA, 25 bp, Homo sapien
actgagggctagctcccgtcaggcg

SEQ ID NO: 2424892 - DNA, 25 bp, Homo sapien
ggaccgcaagccctcgccggctctg

SEQ ID NO: 2424893 - DNA, 25 bp, Homo sapien
gccggctctgcgtgcttttaggttt

SEQ ID NO: 2424894 - DNA, 25 bp, Homo sapien
cctcgccggctctgcgtgcttttag

SEQ ID NO: 2424895 - DNA, 25 bp, Homo sapien
acccacactcgcctcctgggccgcg

SEQ ID NO: 2424896 - DNA, 25 bp, Homo sapien
acggtggggcattgtgacgctctcc

SEQ ID NO: 2424897 - DNA, 25 bp, Homo sapien
actgcccactgtcggccacttgaga

SEQ ID NO: 2424898 - DNA, 25 bp, Homo sapien
gggcagatgagtctggtcccagctt

SEQ ID NO: 2424899 - DNA, 25 bp, Homo sapien
tcctactgtgccctcgggcagatga

SEQ ID NO: 2424900 - DNA, 25 bp, Homo sapien
ggcatgaaagttctgacctgaaaat

SEQ ID NO: 2424901 - DNA, 25 bp, Homo sapien
aaccatataacgcagctccttcagc

SEQ ID NO: 2424902 - DNA, 25 bp, Homo sapien
gggagggtgatgtcacaaccatata

SEQ ID NO: 2424903 - DNA, 25 bp, Homo sapien
gactcccacccgcaagaactgagac

SEQ ID NO: 2424904 - DNA, 25 bp, Homo sapien
tcgccaccaggcggcgacggagaac

SEQ ID NO: 2424905 - DNA, 25 bp, Homo sapien
gggagctcgccaccaggcggcgacg

SEQ ID NO: 2424906 - DNA, 25 bp, Homo sapien
aggcggcgacggagaacaggatgcg

SEQ ID NO: 2424907 - DNA, 25 bp, Homo sapien
cgacggagaacaggatgcggcgcag

SEQ ID NO: 2424908 - DNA, 25 bp, Homo sapien
tccacttcagtgaggtataacatat

SEQ ID NO: 2424909 - DNA, 25 bp, Homo sapien
taaatgttgactcatgtatctccct

SEQ ID NO: 2424910 - DNA, 25 bp, Homo sapien
gcacttaaagtgcatccatcattcg

SEQ ID NO: 2424911 - DNA, 25 bp, Homo sapien
tttccacttcagtgaggtataacat

SEQ ID NO: 2424912 - DNA, 25 bp, Homo sapien
gagcagcatgcacgtattatgaggg

SEQ ID NO: 2424913 - DNA, 25 bp, Homo sapien
cagcatgcacgtattatgagggaag

SEQ ID NO: 2424914 - DNA, 25 bp, Homo sapien
catgcacgtattatgagggaaggaa

SEQ ID NO: 2424915 - DNA, 25 bp, Homo sapien
ggtagagcagcatgcacgtattatg

SEQ ID NO: 2424916 - DNA, 25 bp, Homo sapien
gcaaaatgttgttcgtgggagagtt

SEQ ID NO: 2424917 - DNA, 25 bp, Homo sapien
tcccgcaaaattatgtgcaaaatgt

SEQ ID NO: 2424918 - DNA, 25 bp, Homo sapien
catgaatcccgcaaaattatgtgca

SEQ ID NO: 2424919 - DNA, 25 bp, Homo sapien
tcaaaggtcccatgaatcccgcaaa

SEQ ID NO: 2424920 - DNA, 25 bp, Homo sapien
tattgtacttggaaaattgactccc

SEQ ID NO: 2424921 - DNA, 25 bp, Homo sapien
ttgttgctattaccagagaaactac

SEQ ID NO: 2424922 - DNA, 25 bp, Homo sapien
cagagaaactactcaatactgaccc

SEQ ID NO: 2424923 - DNA, 25 bp, Homo sapien
aatactgaccctagaacacttccat

SEQ ID NO: 2424924 - DNA, 25 bp, Homo sapien
tttgctacgcgttgtcatcattttc

SEQ ID NO: 2424925 - DNA, 25 bp, Homo sapien
ttttgctacgcgttgtcatcatttt

SEQ ID NO: 2424926 - DNA, 25 bp, Homo sapien
ccactgcctacaccaattacatcac

SEQ ID NO: 2424927 - DNA, 25 bp, Homo sapien
cactgcctacaccaattacatcact

SEQ ID NO: 2424928 - DNA, 25 bp, Homo sapien
accactgcctacaccaattacatca

SEQ ID NO: 2424929 - DNA, 25 bp, Homo sapien
caagcataatgctacactcctgcta

SEQ ID NO: 2424930 - DNA, 25 bp, Homo sapien
ctttagtttgttggaatcagtgaac

SEQ ID NO: 2424931 - DNA, 25 bp, Homo sapien
tgcaagacgaagtaaaggaatcccc

SEQ ID NO: 2424932 - DNA, 25 bp, Homo sapien
gataagcctcttaagtctcttgtat

SEQ ID NO: 2424933 - DNA, 25 bp, Homo sapien
ctataaaaagagcaagtttacgcac

SEQ ID NO: 2424934 - DNA, 25 bp, Homo sapien
tagatgtctcgtcttcccgctttcc

SEQ ID NO: 2424935 - DNA, 25 bp, Homo sapien
gtagatgtctcgtcttcccgctttc

SEQ ID NO: 2424936 - DNA, 25 bp, Homo sapien
tgtagatgtctcgtcttcccgcttt

SEQ ID NO: 2424937 - DNA, 25 bp, Homo sapien
atgtagatgtctcgtcttcccgctt

SEQ ID NO: 2424938 - DNA, 25 bp, Homo sapien
gagcaattctgaggccaaaaggatt

SEQ ID NO: 2424939 - DNA, 25 bp, Homo sapien
cttcctgtttgtctagagcaattct

SEQ ID NO: 2424940 - DNA, 25 bp, Homo sapien
gaaaatggagccagatgcttcttcc

SEQ ID NO: 2424941 - DNA, 25 bp, Homo sapien
tctgaggccaaaaggattcagacag

SEQ ID NO: 2424942 - DNA, 25 bp, Homo sapien
accccctccttggacactctgcaaa

SEQ ID NO: 2424943 - DNA, 25 bp, Homo sapien
tccttggacactctgcaaataggag

SEQ ID NO: 2424944 - DNA, 25 bp, Homo sapien
cccctccttggacactctgcaaata

SEQ ID NO: 2424945 - DNA, 25 bp, Homo sapien
cctccttggacactctgcaaatagg

SEQ ID NO: 2424946 - DNA, 25 bp, Homo sapien
ctgactggaaactgtttaggtagaa

SEQ ID NO: 2424947 - DNA, 25 bp, Homo sapien
actccctgtgaagtctccagacagg

SEQ ID NO: 2424948 - DNA, 25 bp, Homo sapien
gatgtgcctattacctgagcgttgt

SEQ ID NO: 2424949 - DNA, 25 bp, Homo sapien
gagcgttgttgttctgactggaaac

SEQ ID NO: 2424950 - DNA, 25 bp, Homo sapien
tgtataattaattacagttttactc

SEQ ID NO: 2424951 - DNA, 25 bp, Homo sapien
tataattaattacagttttactcaa

SEQ ID NO: 2424952 - DNA, 25 bp, Homo sapien
gtataattaattacagttttactca

SEQ ID NO: 2424953 - DNA, 25 bp, Homo sapien
tattttaaattgactgtcacttgcc

SEQ ID NO: 2424954 - DNA, 25 bp, Homo sapien
tccaatgcaggcaaagttcataagt

SEQ ID NO: 2424955 - DNA, 25 bp, Homo sapien
caatggccttattgtttctggaaaa

SEQ ID NO: 2424956 - DNA, 25 bp, Homo sapien
gatagaaggccccaaattgcatcca

SEQ ID NO: 2424957 - DNA, 25 bp, Homo sapien
caaagagattacattctagcattcc

SEQ ID NO: 2424958 - DNA, 25 bp, Homo sapien
ctagcattccaatgattgacaaatg

SEQ ID NO: 2424959 - DNA, 25 bp, Homo sapien
gacaaatgcatgtctctccaacatg

SEQ ID NO: 2424960 - DNA, 25 bp, Homo sapien
tccaacatgagaagtcatcacccag

SEQ ID NO: 2424961 - DNA, 25 bp, Homo sapien
ttatctactgttggcagaacctgga

SEQ ID NO: 2424962 - DNA, 25 bp, Homo sapien
tctactgttggcagaacctggaact

SEQ ID NO: 2424963 - DNA, 25 bp, Homo sapien
atctactgttggcagaacctggaac

SEQ ID NO: 2424964 - DNA, 25 bp, Homo sapien
tactgttggcagaacctggaacttt

SEQ ID NO: 2424965 - DNA, 25 bp, Homo sapien
tcagcagactaatttatctccaggt

SEQ ID NO: 2424966 - DNA, 25 bp, Homo sapien
aggaggagatagagatttggtgctc

SEQ ID NO: 2424967 - DNA, 25 bp, Homo sapien
tattagctttaaggcattaggagga

SEQ ID NO: 2424968 - DNA, 25 bp, Homo sapien
aggggcttgcatatgaaggccacga

SEQ ID NO: 2424969 - DNA, 25 bp, Homo sapien
ttatgtgagggggtacaagacaaag

SEQ ID NO: 2424970 - DNA, 25 bp, Homo sapien
gcctgtcccaaaattggctggttca

SEQ ID NO: 2424971 - DNA, 25 bp, Homo sapien
caaaattggctggttcattcatatc

SEQ ID NO: 2424972 - DNA, 25 bp, Homo sapien
cacatcttgggtattggcctgtccc

SEQ ID NO: 2424973 - DNA, 25 bp, Homo sapien
cagtgtatttaccaggtacataggg

SEQ ID NO: 2424974 - DNA, 25 bp, Homo sapien
tcttaaattccttgtacatctggat

SEQ ID NO: 2424975 - DNA, 25 bp, Homo sapien
cctatcataatcaaggatgttctta

SEQ ID NO: 2424976 - DNA, 25 bp, Homo sapien
catctggatccaccaatctactgtt

SEQ ID NO: 2424977 - DNA, 25 bp, Homo sapien
ttggtgtagtctgaaaacactgatc

SEQ ID NO: 2424978 - DNA, 25 bp, Homo sapien
cttgctaatagctggcgtgactcca

SEQ ID NO: 2424979 - DNA, 25 bp, Homo sapien
ccatcagagttattgaccgaaattc

SEQ ID NO: 2424980 - DNA, 25 bp, Homo sapien
gctggcgtgactccatcagagttat

SEQ ID NO: 2424981 - DNA, 25 bp, Homo sapien
gactccatcagagttattgaccgaa

SEQ ID NO: 2424982 - DNA, 25 bp, Homo sapien
ttgtgtttgttgcttctttgagata

SEQ ID NO: 2424983 - DNA, 25 bp, Homo sapien
ttttgtgtttgttgcttctttgaga

SEQ ID NO: 2424984 - DNA, 25 bp, Homo sapien
ggttttgtgtttgttgcttctttga

SEQ ID NO: 2424985 - DNA, 25 bp, Homo sapien
gtgtttgttgcttctttgagataaa

SEQ ID NO: 2424986 - DNA, 25 bp, Homo sapien
ggcagaccatcaaatttgtcctcat

SEQ ID NO: 2424987 - DNA, 25 bp, Homo sapien
catcatatatgaagtccatctgacg

SEQ ID NO: 2424988 - DNA, 25 bp, Homo sapien
tcagttccttaatgtactcaggcag

SEQ ID NO: 2424989 - DNA, 25 bp, Homo sapien
gttccatgcagtcgatatcacaata

SEQ ID NO: 2424990 - DNA, 25 bp, Homo sapien
tcaaacaggagtaatggatctccat

SEQ ID NO: 2424991 - DNA, 25 bp, Homo sapien
tctgagaggtgaaagttgtctggga

SEQ ID NO: 2424992 - DNA, 25 bp, Homo sapien
caaacaggagtaatggatctccatt

SEQ ID NO: 2424993 - DNA, 25 bp, Homo sapien
gtgaaagttgtctgggattgctgcc

SEQ ID NO: 2424994 - DNA, 25 bp, Homo sapien
taataggcacttcagagtaaatccc

SEQ ID NO: 2424995 - DNA, 25 bp, Homo sapien
gaggcaaaattctctcaccaggaag

SEQ ID NO: 2424996 - DNA, 25 bp, Homo sapien
ccaggaagcttcacttgtttatcta

SEQ ID NO: 2424997 - DNA, 25 bp, Homo sapien
tgtctcaaatagtccatgaaacttg

SEQ ID NO: 2424998 - DNA, 25 bp, Homo sapien
tcaaaagctggtctctgagtcaaag

SEQ ID NO: 2424999 - DNA, 25 bp, Homo sapien
gcagtgctggctcccgagaatgtga

SEQ ID NO: 2425000 - DNA, 25 bp, Homo sapien
tggaatccctactggccttagacac

SEQ ID NO: 2425001 - DNA, 25 bp, Homo sapien
tagcattcgggcaacaaagcaccaa

SEQ ID NO: 2425002 - DNA, 25 bp, Homo sapien
tattcccctgcagtagatgtcagca

SEQ ID NO: 2425003 - DNA, 25 bp, Homo sapien
caggaaggattgacccagaaagcaa

SEQ ID NO: 2425004 - DNA, 25 bp, Homo sapien
aagattcaggaggacggcggtcact

SEQ ID NO: 2425005 - DNA, 25 bp, Homo sapien
aatcaaacaagcctgtcctaggcag

SEQ ID NO: 2425006 - DNA, 25 bp, Homo sapien
gaggtgagacaatacacccattata

SEQ ID NO: 2425007 - DNA, 25 bp, Homo sapien
tgagacaatacacccattatagaac

SEQ ID NO: 2425008 - DNA, 25 bp, Homo sapien
tggggaggtgagacaatacacccat

SEQ ID NO: 2425009 - DNA, 25 bp, Homo sapien
agacaatacacccattatagaaccc

SEQ ID NO: 2425010 - DNA, 25 bp, Homo sapien
tattgctggacattttcaggagtgg

SEQ ID NO: 2425011 - DNA, 25 bp, Homo sapien
caatagtccggaatgttaaagaagg

SEQ ID NO: 2425012 - DNA, 25 bp, Homo sapien
tactgtactcatctctgtgtattgc

SEQ ID NO: 2425013 - DNA, 25 bp, Homo sapien
tgaagtcaagaattcctccaatagt

SEQ ID NO: 2425014 - DNA, 25 bp, Homo sapien
cattctctatgcaattatataaagg

SEQ ID NO: 2425015 - DNA, 25 bp, Homo sapien
tataaaggatgaactccatagagat

SEQ ID NO: 2425016 - DNA, 25 bp, Homo sapien
taaaatcattctctatgcaattata

SEQ ID NO: 2425017 - DNA, 25 bp, Homo sapien
gcaattatataaaggatgaactcca

SEQ ID NO: 2425018 - DNA, 25 bp, Homo sapien
tctagtattaacaatctatactcac

SEQ ID NO: 2425019 - DNA, 25 bp, Homo sapien
ttctagtattaacaatctatactca

SEQ ID NO: 2425020 - DNA, 25 bp, Homo sapien
atattaccgttggtgagtgagctct

SEQ ID NO: 2425021 - DNA, 25 bp, Homo sapien
tccacagattggagtggatgggacc

SEQ ID NO: 2425022 - DNA, 25 bp, Homo sapien
ggatgggaccgcagttgtcatttgt

SEQ ID NO: 2425023 - DNA, 25 bp, Homo sapien
aattcatgtcatgcttaaaggatag

SEQ ID NO: 2425024 - DNA, 25 bp, Homo sapien
gcattggccctgtgctagaatgaga

SEQ ID NO: 2425025 - DNA, 25 bp, Homo sapien
cctgaagcaggaacctgaatgcccc

SEQ ID NO: 2425026 - DNA, 25 bp, Homo sapien
tcagaatccatatgggctacagcct

SEQ ID NO: 2425027 - DNA, 25 bp, Homo sapien
tattggccctttgctggaattcggg

SEQ ID NO: 2425028 - DNA, 25 bp, Homo sapien
cttttcaggttgatcatttatggtg

SEQ ID NO: 2425029 - DNA, 25 bp, Homo sapien
aaaccaccaaggaatgtcggtagtg

SEQ ID NO: 2425030 - DNA, 25 bp, Homo sapien
ggtgtagccatatgaaccatctgct

SEQ ID NO: 2425031 - DNA, 25 bp, Homo sapien
acactggaagcagcctctagcttca

SEQ ID NO: 2425032 - DNA, 25 bp, Homo sapien
gtcagcaacacaccagtgacatcca

SEQ ID NO: 2425033 - DNA, 25 bp, Homo sapien
ttctattttctaaaccagtgtcatc

SEQ ID NO: 2425034 - DNA, 25 bp, Homo sapien
tcttcctgtatatcccttggagtac

SEQ ID NO: 2425035 - DNA, 25 bp, Homo sapien
cttggagtacagaggaaagttttct

SEQ ID NO: 2425036 - DNA, 25 bp, Homo sapien
tcatgtagtctacttaactcagcca

SEQ ID NO: 2425037 - DNA, 25 bp, Homo sapien
cggaaaacttgaggtccaagatcaa

SEQ ID NO: 2425038 - DNA, 25 bp, Homo sapien
tatttatcacaattcggaaaacttg

SEQ ID NO: 2425039 - DNA, 25 bp, Homo sapien
tgtgtattagtcaggtccagctatc

SEQ ID NO: 2425040 - DNA, 25 bp, Homo sapien
agtcaggtccagctatcacaacaag

SEQ ID NO: 2425041 - DNA, 25 bp, Homo sapien
tatctaatgaggtaccaaatccact

SEQ ID NO: 2425042 - DNA, 25 bp, Homo sapien
tgcatcctgcacaccactgacagat

SEQ ID NO: 2425043 - DNA, 25 bp, Homo sapien
ggactatgctagtaggctcctaagc

SEQ ID NO: 2425044 - DNA, 25 bp, Homo sapien
gagaatgcaattaaccaagccagaa

SEQ ID NO: 2425045 - DNA, 25 bp, Homo sapien
cattagtccttgcattattggccca

SEQ ID NO: 2425046 - DNA, 25 bp, Homo sapien
tgtctctctaccaagtcccattagt

SEQ ID NO: 2425047 - DNA, 25 bp, Homo sapien
gcattattggcccatcctgtatgaa

SEQ ID NO: 2425048 - DNA, 25 bp, Homo sapien
gtattggatgccgttgtctctctac

SEQ ID NO: 2425049 - DNA, 25 bp, Homo sapien
gaattcacagaacttttgaaggagg

SEQ ID NO: 2425050 - DNA, 25 bp, Homo sapien
agctgggagacttgtggtctggggc

SEQ ID NO: 2425051 - DNA, 25 bp, Homo sapien
aattcacagaacttttgaaggaggt

SEQ ID NO: 2425052 - DNA, 25 bp, Homo sapien
ttcacagaacttttgaaggaggtgg

SEQ ID NO: 2425053 - DNA, 25 bp, Homo sapien
agcatactagtgagcatttttctaa

SEQ ID NO: 2425054 - DNA, 25 bp, Homo sapien
tacatatgtctattaagatatagca

SEQ ID NO: 2425055 - DNA, 25 bp, Homo sapien
ttttgtctagacatctcttcttaga

SEQ ID NO: 2425056 - DNA, 25 bp, Homo sapien
catacatatataagtaggtatatct

SEQ ID NO: 2425057 - DNA, 25 bp, Homo sapien
cattcttgattttccgatatgtatt

SEQ ID NO: 2425058 - DNA, 25 bp, Homo sapien
ggaaagcgtagcatgatttccagca

SEQ ID NO: 2425059 - DNA, 25 bp, Homo sapien
tagcatgatttccagcattcttgat

SEQ ID NO: 2425060 - DNA, 25 bp, Homo sapien
cttgattttccgatatgtatttgaa

SEQ ID NO: 2425061 - DNA, 25 bp, Homo sapien
cacatttgcgtatttcagtgttacc

SEQ ID NO: 2425062 - DNA, 25 bp, Homo sapien
tgtcctggaataagatgtgctcagc

SEQ ID NO: 2425063 - DNA, 25 bp, Homo sapien
tttcagtgttaccagacattcccca

SEQ ID NO: 2425064 - DNA, 25 bp, Homo sapien
cagctcttccaacatttgtcctgga

SEQ ID NO: 2425065 - DNA, 25 bp, Homo sapien
ctttgcccattagaactcaaatcaa

SEQ ID NO: 2425066 - DNA, 25 bp, Homo sapien
ttgcccattagaactcaaatcaatc

SEQ ID NO: 2425067 - DNA, 25 bp, Homo sapien
tctttgcccattagaactcaaatca

SEQ ID NO: 2425068 - DNA, 25 bp, Homo sapien
attctttgcccattagaactcaaat

SEQ ID NO: 2425069 - DNA, 25 bp, Homo sapien
caattcccgatcataaagcaaaagg

SEQ ID NO: 2425070 - DNA, 25 bp, Homo sapien
ggccagctacctcctgttcaataag

SEQ ID NO: 2425071 - DNA, 25 bp, Homo sapien
tggaaatgaaagctacacagatctt

SEQ ID NO: 2425072 - DNA, 25 bp, Homo sapien
ttacccaaagccttaatcagcagag

SEQ ID NO: 2425073 - DNA, 25 bp, Homo sapien
gtattgccgttagcttcttcatgaa

SEQ ID NO: 2425074 - DNA, 25 bp, Homo sapien
ccagtagagtattgccgttagcttc

SEQ ID NO: 2425075 - DNA, 25 bp, Homo sapien
gttgttcatccagtagagtattgcc

SEQ ID NO: 2425076 - DNA, 25 bp, Homo sapien
catccagtagagtattgccgttagc

SEQ ID NO: 2425077 - DNA, 25 bp, Homo sapien
caaaagcagacgtcttggtaattca

SEQ ID NO: 2425078 - DNA, 25 bp, Homo sapien
tctcatcatagctaccaaggttcgc

SEQ ID NO: 2425079 - DNA, 25 bp, Homo sapien
tttgggaatccactacagactgata

SEQ ID NO: 2425080 - DNA, 25 bp, Homo sapien
tacgttttgcctagtaagtacagga

SEQ ID NO: 2425081 - DNA, 25 bp, Homo sapien
tgaccatcttgcaaattgcgagcct

SEQ ID NO: 2425082 - DNA, 25 bp, Homo sapien
tcctgtgtcagagatctgaccatct

SEQ ID NO: 2425083 - DNA, 25 bp, Homo sapien
aattactggcaatatcttcccccag

SEQ ID NO: 2425084 - DNA, 25 bp, Homo sapien
tgcgagccttccaaattctcacagt

SEQ ID NO: 2425085 - DNA, 25 bp, Homo sapien
cacatatggcattgataggactatc

SEQ ID NO: 2425086 - DNA, 25 bp, Homo sapien
ggcataaaagtatccatgttccaga

SEQ ID NO: 2425087 - DNA, 25 bp, Homo sapien
taggactatcatgacccttcatctc

SEQ ID NO: 2425088 - DNA, 25 bp, Homo sapien
actgagcaaaactgggtggtctggc

SEQ ID NO: 2425089 - DNA, 25 bp, Homo sapien
ggttagtgcttctatgccatcataa

SEQ ID NO: 2425090 - DNA, 25 bp, Homo sapien
gttcaaaattgtgggtgggactcac

SEQ ID NO: 2425091 - DNA, 25 bp, Homo sapien
ggttatccccttgaatggttagtgc

SEQ ID NO: 2425092 - DNA, 25 bp, Homo sapien
tctagacccactaaataggttatcc

SEQ ID NO: 2425093 - DNA, 25 bp, Homo sapien
cttggagccagtgatgattagatct

SEQ ID NO: 2425094 - DNA, 25 bp, Homo sapien
acagtaaggcacataacagggccta

SEQ ID NO: 2425095 - DNA, 25 bp, Homo sapien
taaggcacataacagggcctaggtg

SEQ ID NO: 2425096 - DNA, 25 bp, Homo sapien
gattagatcttgtccactggaaatc

SEQ ID NO: 2425097 - DNA, 25 bp, Homo sapien
cacatcctgacagcatttccagaag

SEQ ID NO: 2425098 - DNA, 25 bp, Homo sapien
gctactgttcgactggtacttgcag

SEQ ID NO: 2425099 - DNA, 25 bp, Homo sapien
tctccagaaggaatagctactgttc

SEQ ID NO: 2425100 - DNA, 25 bp, Homo sapien
gcagaacaagcatctccaagagtaa

SEQ ID NO: 2425101 - DNA, 25 bp, Homo sapien
tagtgttcgaatgcactttgctgaa

SEQ ID NO: 2425102 - DNA, 25 bp, Homo sapien
tgcccagtcaccagattccatactt

SEQ ID NO: 2425103 - DNA, 25 bp, Homo sapien
gacacgacattgttgggatgacccc

SEQ ID NO: 2425104 - DNA, 25 bp, Homo sapien
taagatgttgatacagtgaagacca

SEQ ID NO: 2425105 - DNA, 25 bp, Homo sapien
tgtgaatacactgaagtggaaaagc

SEQ ID NO: 2425106 - DNA, 25 bp, Homo sapien
tacactgaagtggaaaagctctgat

SEQ ID NO: 2425107 - DNA, 25 bp, Homo sapien
tccagtgaagaggagatcatcagta

SEQ ID NO: 2425108 - DNA, 25 bp, Homo sapien
gatcatcagtagaatccacacagag

SEQ ID NO: 2425109 - DNA, 25 bp, Homo sapien
ggcactgggctatgtactatggaaa

SEQ ID NO: 2425110 - DNA, 25 bp, Homo sapien
caaggtttaacgaagccacaatggg

SEQ ID NO: 2425111 - DNA, 25 bp, Homo sapien
tatatcaactaatcaggcatctgct

SEQ ID NO: 2425112 - DNA, 25 bp, Homo sapien
tctatgtcaaactggtgtgtaaagg

SEQ ID NO: 2425113 - DNA, 25 bp, Homo sapien
taccggagagaggatacaacagcat

SEQ ID NO: 2425114 - DNA, 25 bp, Homo sapien
aatgaggtgtagttttagatgtccc

SEQ ID NO: 2425115 - DNA, 25 bp, Homo sapien
gaaagacagcgatagacttactgca

SEQ ID NO: 2425116 - DNA, 25 bp, Homo sapien
gctgatgaagactaacgaatggaaa

SEQ ID NO: 2425117 - DNA, 25 bp, Homo sapien
tgtgtacctccgagagagaggagtc

SEQ ID NO: 2425118 - DNA, 25 bp, Homo sapien
ctgtgtacctccgagagagaggagt

SEQ ID NO: 2425119 - DNA, 25 bp, Homo sapien
gtgtacctccgagagagaggagtca

SEQ ID NO: 2425120 - DNA, 25 bp, Homo sapien
gagagaggagtcactttcatcagac

SEQ ID NO: 2425121 - DNA, 25 bp, Homo sapien
cctgagaaacagtaagacgattaaa

SEQ ID NO: 2425122 - DNA, 25 bp, Homo sapien
cattcagttcattacggggccggct

SEQ ID NO: 2425123 - DNA, 25 bp, Homo sapien
tgaactgatgtgtttccctgagaaa

SEQ ID NO: 2425124 - DNA, 25 bp, Homo sapien
tgaaagactagcctctgaagttcca

SEQ ID NO: 2425125 - DNA, 25 bp, Homo sapien
tttctgctttctcatatgcctttct

SEQ ID NO: 2425126 - DNA, 25 bp, Homo sapien
tgcctttctccttgttacaggagaa

SEQ ID NO: 2425127 - DNA, 25 bp, Homo sapien
tctgctttctcatatgcctttctcc

SEQ ID NO: 2425128 - DNA, 25 bp, Homo sapien
tttctccttgttacaggagaaggct

SEQ ID NO: 2425129 - DNA, 25 bp, Homo sapien
cctcaagcacatgcaagaaagttct

SEQ ID NO: 2425130 - DNA, 25 bp, Homo sapien
caacagttaattacataggccacct

SEQ ID NO: 2425131 - DNA, 25 bp, Homo sapien
tcttgaagttccaaaagtctcactc

SEQ ID NO: 2425132 - DNA, 25 bp, Homo sapien
tcatctgacagactaaatacctaac

SEQ ID NO: 2425133 - DNA, 25 bp, Homo sapien
ggagacaagacaaagcaattcaaca

SEQ ID NO: 2425134 - DNA, 25 bp, Homo sapien
agaagttagtgtagctgggccaaac

SEQ ID NO: 2425135 - DNA, 25 bp, Homo sapien
caaattatttcgaaaaccagagatc

SEQ ID NO: 2425136 - DNA, 25 bp, Homo sapien
gaatgatcctaaaacttggagacaa

SEQ ID NO: 2425137 - DNA, 25 bp, Homo sapien
gctgcctatcttagaaggtaagcca

SEQ ID NO: 2425138 - DNA, 25 bp, Homo sapien
tagttcactgctatctgcatacagc

SEQ ID NO: 2425139 - DNA, 25 bp, Homo sapien
agcaattccatctgagtggtggttc

SEQ ID NO: 2425140 - DNA, 25 bp, Homo sapien
gaggcatctcctgtactagtgtctg

SEQ ID NO: 2425141 - DNA, 25 bp, Homo sapien
ccaggtggttctttcaggagatgac

SEQ ID NO: 2425142 - DNA, 25 bp, Homo sapien
aaaggatctggtagccttaggccca

SEQ ID NO: 2425143 - DNA, 25 bp, Homo sapien
tcttgggaattcttaagccaggtgg

SEQ ID NO: 2425144 - DNA, 25 bp, Homo sapien
cacatgttgcgaagccaatagctca

SEQ ID NO: 2425145 - DNA, 25 bp, Homo sapien
aagcttcatgagatctgaagacagc

SEQ ID NO: 2425146 - DNA, 25 bp, Homo sapien
tttcacttcaccacaaagcttcatg

SEQ ID NO: 2425147 - DNA, 25 bp, Homo sapien
cttgttcttaggtttcacttcacca

SEQ ID NO: 2425148 - DNA, 25 bp, Homo sapien
acaaagcttcatgagatctgaagac

SEQ ID NO: 2425149 - DNA, 25 bp, Homo sapien
tctgatcctgggctgtttaaaggag

SEQ ID NO: 2425150 - DNA, 25 bp, Homo sapien
tcctgggctgtttaaaggagcatcc

SEQ ID NO: 2425151 - DNA, 25 bp, Homo sapien
tgagcatctactggactttcctgga

SEQ ID NO: 2425152 - DNA, 25 bp, Homo sapien
tgagaacacaactctagcccaaggt

SEQ ID NO: 2425153 - DNA, 25 bp, Homo sapien
ggctcacggtgcactagaaacttcg

SEQ ID NO: 2425154 - DNA, 25 bp, Homo sapien
gaagcattatggttacctgggcagc

SEQ ID NO: 2425155 - DNA, 25 bp, Homo sapien
tgcaaaaaccacttgaccgccaata

SEQ ID NO: 2425156 - DNA, 25 bp, Homo sapien
aagacttagtgtgtttgtgggcatg

SEQ ID NO: 2425157 - DNA, 25 bp, Homo sapien
taccacaattagtgtacatgaacaa

SEQ ID NO: 2425158 - DNA, 25 bp, Homo sapien
caattagtaattcatgcagctgtag

SEQ ID NO: 2425159 - DNA, 25 bp, Homo sapien
tctgtttgtttgagtcgaccttcca

SEQ ID NO: 2425160 - DNA, 25 bp, Homo sapien
catatggaataagagctggttttgg

SEQ ID NO: 2425161 - DNA, 25 bp, Homo sapien
ctggttttgggtagcactggttatt

SEQ ID NO: 2425162 - DNA, 25 bp, Homo sapien
catggcctagtaaagcatctagctc

SEQ ID NO: 2425163 - DNA, 25 bp, Homo sapien
gcttctgtaagggtgcaggcattaa

SEQ ID NO: 2425164 - DNA, 25 bp, Homo sapien
gactgcagtaacatccaatgtctca

SEQ ID NO: 2425165 - DNA, 25 bp, Homo sapien
gcccattgacaggaagtgatctagc

SEQ ID NO: 2425166 - DNA, 25 bp, Homo sapien
tctagcaggtatcgggcttctgtaa

SEQ ID NO: 2425167 - DNA, 25 bp, Homo sapien
tgtaatcgatattagcagtcagtga

SEQ ID NO: 2425168 - DNA, 25 bp, Homo sapien
catctgcattatgttggcctgacaa

SEQ ID NO: 2425169 - DNA, 25 bp, Homo sapien
ctctcgtctttttgtgagttcctcc

SEQ ID NO: 2425170 - DNA, 25 bp, Homo sapien
gaaatactgtcattgatgtaatcga

SEQ ID NO: 2425171 - DNA, 25 bp, Homo sapien
tctgcctccatgttggaaatggtca

SEQ ID NO: 2425172 - DNA, 25 bp, Homo sapien
tgtgaccctgcgctcaaggagctgc

SEQ ID NO: 2425173 - DNA, 25 bp, Homo sapien
gccacttcatgcgagctgtcttgga

SEQ ID NO: 2425174 - DNA, 25 bp, Homo sapien
ctgtcttggaaataaacactcggcc

SEQ ID NO: 2425175 - DNA, 25 bp, Homo sapien
gatgcatctgtttcgacagcagctg

SEQ ID NO: 2425176 - DNA, 25 bp, Homo sapien
gcactggaacctgtgtcctgagcag

SEQ ID NO: 2425177 - DNA, 25 bp, Homo sapien
gatgaactcagcttccgagtaactt

SEQ ID NO: 2425178 - DNA, 25 bp, Homo sapien
gacatgggtcttacttgccgacgaa

SEQ ID NO: 2425179 - DNA, 25 bp, Homo sapien
attgcagcaaaggttgactcattct

SEQ ID NO: 2425180 - DNA, 25 bp, Homo sapien
gaaattgcagcaaaggttgactcat

SEQ ID NO: 2425181 - DNA, 25 bp, Homo sapien
gcaaaggttgactcattctcttagt

SEQ ID NO: 2425182 - DNA, 25 bp, Homo sapien
ctgaaattgcagcaaaggttgactc

SEQ ID NO: 2425183 - DNA, 25 bp, Homo sapien
cagttttgcgacgtagaaccacttc

SEQ ID NO: 2425184 - DNA, 25 bp, Homo sapien
cttcagttttgcgacgtagaaccac

SEQ ID NO: 2425185 - DNA, 25 bp, Homo sapien
ctcttcagttttgcgacgtagaacc

SEQ ID NO: 2425186 - DNA, 25 bp, Homo sapien
ttgcgacgtagaaccacttcttggt

SEQ ID NO: 2425187 - DNA, 25 bp, Homo sapien
ctctctgtttcttctagactcagtc

SEQ ID NO: 2425188 - DNA, 25 bp, Homo sapien
atattcagacctaactttttttgct

SEQ ID NO: 2425189 - DNA, 25 bp, Homo sapien
aagcaaccttgcatgttctttttga

SEQ ID NO: 2425190 - DNA, 25 bp, Homo sapien
gttcatggcttggagtttcttttca

SEQ ID NO: 2425191 - DNA, 25 bp, Homo sapien
tcttctgagtaagattctaccgagc

SEQ ID NO: 2425192 - DNA, 25 bp, Homo sapien
tggtctctttcaagctgagtatccc

SEQ ID NO: 2425193 - DNA, 25 bp, Homo sapien
atcaatcagcttttgcttaattgca

SEQ ID NO: 2425194 - DNA, 25 bp, Homo sapien
gttttctagttcatcaatcagcttt

SEQ ID NO: 2425195 - DNA, 25 bp, Homo sapien
gtatcccgaattttatgttgcagca

SEQ ID NO: 2425196 - DNA, 25 bp, Homo sapien
tgatcactcacttcttgactttctt

SEQ ID NO: 2425197 - DNA, 25 bp, Homo sapien
cacccccatcaatgtcatcttcctc

SEQ ID NO: 2425198 - DNA, 25 bp, Homo sapien
tcatcagaactttcacccccatcaa

SEQ ID NO: 2425199 - DNA, 25 bp, Homo sapien
catgatcactcacttcttgactttc

SEQ ID NO: 2425200 - DNA, 25 bp, Homo sapien
tcattgttttctctttccgaaacac

SEQ ID NO: 2425201 - DNA, 25 bp, Homo sapien
taattcattgttttctctttccgaa

SEQ ID NO: 2425202 - DNA, 25 bp, Homo sapien
cacttctaattcattgttttctctt

SEQ ID NO: 2425203 - DNA, 25 bp, Homo sapien
tctaattcattgttttctctttccg

SEQ ID NO: 2425204 - DNA, 25 bp, Homo sapien
ctgtattatcctctttaccagccac

SEQ ID NO: 2425205 - DNA, 25 bp, Homo sapien
tgtattatcctctttaccagccaca

SEQ ID NO: 2425206 - DNA, 25 bp, Homo sapien
tttcttctcgattgctttcctcaag

SEQ ID NO: 2425207 - DNA, 25 bp, Homo sapien
tctttcttctcgattgctttcctca

SEQ ID NO: 2425208 - DNA, 25 bp, Homo sapien
cttctttcttctcgattgctttcct

SEQ ID NO: 2425209 - DNA, 25 bp, Homo sapien
ctttcttctcgattgctttcctcaa

SEQ ID NO: 2425210 - DNA, 25 bp, Homo sapien
tgtcagaggccctatagccactcca

SEQ ID NO: 2425211 - DNA, 25 bp, Homo sapien
agaggccctatagccactccaacca

SEQ ID NO: 2425212 - DNA, 25 bp, Homo sapien
tcagaggccctatagccactccaac

SEQ ID NO: 2425213 - DNA, 25 bp, Homo sapien
ttgtcagaggccctatagccactcc

SEQ ID NO: 2425214 - DNA, 25 bp, Homo sapien
tttggctaaatgagggcttacctac

SEQ ID NO: 2425215 - DNA, 25 bp, Homo sapien
ggtagacccacattttgcaatgccc

SEQ ID NO: 2425216 - DNA, 25 bp, Homo sapien
ccaaggagctcctgtggaaaactga

SEQ ID NO: 2425217 - DNA, 25 bp, Homo sapien
tatgtgtaaggttgaggtagaccca

SEQ ID NO: 2425218 - DNA, 25 bp, Homo sapien
gaaaaagcagtatcagttgtgacct

SEQ ID NO: 2425219 - DNA, 25 bp, Homo sapien
caggtgattaaggaaatatctctaa

SEQ ID NO: 2425220 - DNA, 25 bp, Homo sapien
tttcattagtcatattcaacaggtg

SEQ ID NO: 2425221 - DNA, 25 bp, Homo sapien
cactgaattagtcacaaccgctatt

SEQ ID NO: 2425222 - DNA, 25 bp, Homo sapien
ttttttgctaggtctataatttcaa

SEQ ID NO: 2425223 - DNA, 25 bp, Homo sapien
gctaggtctataatttcaatggttt

SEQ ID NO: 2425224 - DNA, 25 bp, Homo sapien
ttgctaggtctataatttcaatggt

SEQ ID NO: 2425225 - DNA, 25 bp, Homo sapien
taggtctataatttcaatggtttct

SEQ ID NO: 2425226 - DNA, 25 bp, Homo sapien
tatggcgctcttgctgtggctcttg

SEQ ID NO: 2425227 - DNA, 25 bp, Homo sapien
gatgatccgctgaaatatggcgctc

SEQ ID NO: 2425228 - DNA, 25 bp, Homo sapien
gatagtatggtaggagaaaaagttg

SEQ ID NO: 2425229 - DNA, 25 bp, Homo sapien
tgtcaagttttttcgaaggttctca

SEQ ID NO: 2425230 - DNA, 25 bp, Homo sapien
ttcatgccccaaaaaacacaaggat

SEQ ID NO: 2425231 - DNA, 25 bp, Homo sapien
taacatcagttcttagaataatggg

SEQ ID NO: 2425232 - DNA, 25 bp, Homo sapien
caacaggacagtactatatgaagcc

SEQ ID NO: 2425233 - DNA, 25 bp, Homo sapien
tgttctgcaaaatttttcatgcccc

SEQ ID NO: 2425234 - DNA, 25 bp, Homo sapien
gcattatatgttacagaacatgaac

SEQ ID NO: 2425235 - DNA, 25 bp, Homo sapien
tgaaatatcaccatggacaactgtt

SEQ ID NO: 2425236 - DNA, 25 bp, Homo sapien
gacaactgttgaacactaagcccaa

SEQ ID NO: 2425237 - DNA, 25 bp, Homo sapien
catgtgcattatatgttacagaaca

SEQ ID NO: 2425238 - DNA, 25 bp, Homo sapien
tatgaatcatattactaatctcctc

SEQ ID NO: 2425239 - DNA, 25 bp, Homo sapien
taactatgaatcatattactaatct

SEQ ID NO: 2425240 - DNA, 25 bp, Homo sapien
catattactaatctcctcatttcct

SEQ ID NO: 2425241 - DNA, 25 bp, Homo sapien
gaatcatattactaatctcctcatt

SEQ ID NO: 2425242 - DNA, 25 bp, Homo sapien
tttcagtctgtagcatagcattctc

SEQ ID NO: 2425243 - DNA, 25 bp, Homo sapien
caaccgtctcttgcatggctttaat

SEQ ID NO: 2425244 - DNA, 25 bp, Homo sapien
caagctgtgtaattctggacctcaa

SEQ ID NO: 2425245 - DNA, 25 bp, Homo sapien
ggctttaattcttacacgcaggtta

SEQ ID NO: 2425246 - DNA, 25 bp, Homo sapien
tttgtactccatgagctccatctga

SEQ ID NO: 2425247 - DNA, 25 bp, Homo sapien
tctagctcgattggcgtatttcagg

SEQ ID NO: 2425248 - DNA, 25 bp, Homo sapien
tctgaagtcgtgtgatttcactacg

SEQ ID NO: 2425249 - DNA, 25 bp, Homo sapien
tgactagctctgtcctgattgacca

SEQ ID NO: 2425250 - DNA, 25 bp, Homo sapien
tgaggcacacgaagaaaggaattag

SEQ ID NO: 2425251 - DNA, 25 bp, Homo sapien
catgagactatttagctgtagccta

SEQ ID NO: 2425252 - DNA, 25 bp, Homo sapien
taagacccctcttgatactgaagat

SEQ ID NO: 2425253 - DNA, 25 bp, Homo sapien
tatatgatagtggaaggaaaactgc

SEQ ID NO: 2425254 - DNA, 25 bp, Homo sapien
cacttattacattgccaagtgccaa

SEQ ID NO: 2425255 - DNA, 25 bp, Homo sapien
ccccgagggaatcctgtagtagtct

SEQ ID NO: 2425256 - DNA, 25 bp, Homo sapien
gggacatgtgtggccctcttgctct

SEQ ID NO: 2425257 - DNA, 25 bp, Homo sapien
tagtcttgttagcttggaatctcta

SEQ ID NO: 2425258 - DNA, 25 bp, Homo sapien
gcctgtagctccagtacgcttcagt

SEQ ID NO: 2425259 - DNA, 25 bp, Homo sapien
cagtctttcagatcctgcgagatca

SEQ ID NO: 2425260 - DNA, 25 bp, Homo sapien
ttcttttgccctctcgcctgtagct

SEQ ID NO: 2425261 - DNA, 25 bp, Homo sapien
gcagtcagggtttcaaattcattca

SEQ ID NO: 2425262 - DNA, 25 bp, Homo sapien
tctatttggggacacactctggttt

SEQ ID NO: 2425263 - DNA, 25 bp, Homo sapien
catctatttggggacacactctggt

SEQ ID NO: 2425264 - DNA, 25 bp, Homo sapien
agcatctatttggggacacactctg

SEQ ID NO: 2425265 - DNA, 25 bp, Homo sapien
atctatttggggacacactctggtt

SEQ ID NO: 2425266 - DNA, 25 bp, Homo sapien
taaagcacccaacttcaaacactgc

SEQ ID NO: 2425267 - DNA, 25 bp, Homo sapien
aaatggcatgtgaacgagagctctg

SEQ ID NO: 2425268 - DNA, 25 bp, Homo sapien
catgtgaacgagagctctgaacatt

SEQ ID NO: 2425269 - DNA, 25 bp, Homo sapien
tggtaaaaatggcatgtgaacgaga

SEQ ID NO: 2425270 - DNA, 25 bp, Homo sapien
tctgattctgtattcacagtacgtg

SEQ ID NO: 2425271 - DNA, 25 bp, Homo sapien
gtaacgcccacagtataaattcctc

SEQ ID NO: 2425272 - DNA, 25 bp, Homo sapien
ttttgcatcaatatcacgagtggta

SEQ ID NO: 2425273 - DNA, 25 bp, Homo sapien
aattcctccagttgaatcttcatga

SEQ ID NO: 2425274 - DNA, 25 bp, Homo sapien
agaaataatacccagttcttcctca

SEQ ID NO: 2425275 - DNA, 25 bp, Homo sapien
tcccattgtgtatgttttaccagct

SEQ ID NO: 2425276 - DNA, 25 bp, Homo sapien
taaaaaggtgtttaacagctcgaga

SEQ ID NO: 2425277 - DNA, 25 bp, Homo sapien
cattgtgtatgttttaccagctcca

SEQ ID NO: 2425278 - DNA, 25 bp, Homo sapien
tgctcttgctgggagtcaatgtcaa

SEQ ID NO: 2425279 - DNA, 25 bp, Homo sapien
gctctcctggtgtgacagatgtaca

SEQ ID NO: 2425280 - DNA, 25 bp, Homo sapien
aactgtagcattgtatccttcaaag

SEQ ID NO: 2425281 - DNA, 25 bp, Homo sapien
acattgaatgtagatctgctcttgc

SEQ ID NO: 2425282 - DNA, 25 bp, Homo sapien
tgattcccgctttgtgtagttcttt

SEQ ID NO: 2425283 - DNA, 25 bp, Homo sapien
ctgattcccgctttgtgtagttctt

SEQ ID NO: 2425284 - DNA, 25 bp, Homo sapien
gattcatcgttgtatctcttctccc

SEQ ID NO: 2425285 - DNA, 25 bp, Homo sapien
ctatatatagcactatgcttcccat

SEQ ID NO: 2425286 - DNA, 25 bp, Homo sapien
tcaaccaaattgtgttttagggaca

SEQ ID NO: 2425287 - DNA, 25 bp, Homo sapien
gcaatgtgggatgtgagatgttcac

SEQ ID NO: 2425288 - DNA, 25 bp, Homo sapien
ctaatatatagttacagctctgaaa

SEQ ID NO: 2425289 - DNA, 25 bp, Homo sapien
tagttacagctctgaaatcttcatc

SEQ ID NO: 2425290 - DNA, 25 bp, Homo sapien
tacagctctgaaatcttcatctcca

SEQ ID NO: 2425291 - DNA, 25 bp, Homo sapien
tatatagttacagctctgaaatctt

SEQ ID NO: 2425292 - DNA, 25 bp, Homo sapien
ccaatcctcatctcctaaggttaaa

SEQ ID NO: 2425293 - DNA, 25 bp, Homo sapien
tcttcaccgcattacttccgttagg

SEQ ID NO: 2425294 - DNA, 25 bp, Homo sapien
caccgcattacttccgttaggccaa

SEQ ID NO: 2425295 - DNA, 25 bp, Homo sapien
gcttcttcaccgcattacttccgtt

SEQ ID NO: 2425296 - DNA, 25 bp, Homo sapien
tttccataccgccatatttccatag

SEQ ID NO: 2425297 - DNA, 25 bp, Homo sapien
tccataccgccatatttccatagca

SEQ ID NO: 2425298 - DNA, 25 bp, Homo sapien
ccataccgccatatttccatagcat

SEQ ID NO: 2425299 - DNA, 25 bp, Homo sapien
gtttccataccgccatatttccata

SEQ ID NO: 2425300 - DNA, 25 bp, Homo sapien
gccatccatgtcacccaaaatgttc

SEQ ID NO: 2425301 - DNA, 25 bp, Homo sapien
cccactaaagccatccatgtcaccc

SEQ ID NO: 2425302 - DNA, 25 bp, Homo sapien
tccatgtcacccaaaatgttcactc

SEQ ID NO: 2425303 - DNA, 25 bp, Homo sapien
tcccactaaagccatccatgtcacc

SEQ ID NO: 2425304 - DNA, 25 bp, Homo sapien
tctgcaggagatatttcaagcttca

SEQ ID NO: 2425305 - DNA, 25 bp, Homo sapien
ggaatttcccactccagggctattg

SEQ ID NO: 2425306 - DNA, 25 bp, Homo sapien
tattagtgtccctctcaatctgcag

SEQ ID NO: 2425307 - DNA, 25 bp, Homo sapien
cggccgagaatgcttctttaaaaca

SEQ ID NO: 2425308 - DNA, 25 bp, Homo sapien
tcagctactcatggcgctaaggcag

SEQ ID NO: 2425309 - DNA, 25 bp, Homo sapien
tcccttgagcctaacaggagaggag

SEQ ID NO: 2425310 - DNA, 25 bp, Homo sapien
tccaatttggtccaacttctgggca

SEQ ID NO: 2425311 - DNA, 25 bp, Homo sapien
tgacagtatgacaagaagctctacc

SEQ ID NO: 2425312 - DNA, 25 bp, Homo sapien
tgcacagacatcagaacccgagtgg

SEQ ID NO: 2425313 - DNA, 25 bp, Homo sapien
tagatccccgtgatgctgaaaaaga

SEQ ID NO: 2425314 - DNA, 25 bp, Homo sapien
tcgccggcgctgatagtcagatgct

SEQ ID NO: 2425315 - DNA, 25 bp, Homo sapien
cacccaagaggctagatctgtctcc

SEQ ID NO: 2425316 - DNA, 25 bp, Homo sapien
cccaaggcggccagacctgaggtga

SEQ ID NO: 2425317 - DNA, 25 bp, Homo sapien
aggcagctcctcccggacaggcgat

SEQ ID NO: 2425318 - DNA, 25 bp, Homo sapien
agtgacgagggcttttcccccagag

SEQ ID NO: 2425319 - DNA, 25 bp, Homo sapien
acctgaggtgactgatcccgcgagg

SEQ ID NO: 2425320 - DNA, 25 bp, Homo sapien
acagccacccgcacggagctctcgt

SEQ ID NO: 2425321 - DNA, 25 bp, Homo sapien
acggagctctcgtccggggcgccca

SEQ ID NO: 2425322 - DNA, 25 bp, Homo sapien
ctgacagccacccgcacggagctct

SEQ ID NO: 2425323 - DNA, 25 bp, Homo sapien
cacccgcacggagctctcgtccggg

SEQ ID NO: 2425324 - DNA, 25 bp, Homo sapien
cgatcgagccgttgggcctcggcac

SEQ ID NO: 2425325 - DNA, 25 bp, Homo sapien
gcgctccagccatgttgggcgactg

SEQ ID NO: 2425326 - DNA, 25 bp, Homo sapien
actgaatggaaaggtggcggcggcg

SEQ ID NO: 2425327 - DNA, 25 bp, Homo sapien
tggcggcgggcagcgatcgagccgt

SEQ ID NO: 2425328 - DNA, 25 bp, Homo sapien
cagtgatacagcagtgtggctcaga

SEQ ID NO: 2425329 - DNA, 25 bp, Homo sapien
gcagtgatacagcagtgtggctcag

SEQ ID NO: 2425330 - DNA, 25 bp, Homo sapien
agcagtgatacagcagtgtggctca

SEQ ID NO: 2425331 - DNA, 25 bp, Homo sapien
cccacttggatcactttcataattc

SEQ ID NO: 2425332 - DNA, 25 bp, Homo sapien
ttggatcactttcataattcttgtt

SEQ ID NO: 2425333 - DNA, 25 bp, Homo sapien
ccccacttggatcactttcataatt

SEQ ID NO: 2425334 - DNA, 25 bp, Homo sapien
acttggatcactttcataattcttg

SEQ ID NO: 2425335 - DNA, 25 bp, Homo sapien
tgtaattggtcctgatagcttccac

SEQ ID NO: 2425336 - DNA, 25 bp, Homo sapien
tcattgactttcatcatatttgtca

SEQ ID NO: 2425337 - DNA, 25 bp, Homo sapien
cattgtaattggtcctgatagcttc

SEQ ID NO: 2425338 - DNA, 25 bp, Homo sapien
atatttgtcattgtaattggtcctg

SEQ ID NO: 2425339 - DNA, 25 bp, Homo sapien
gatgggatccaagtcgtttgcagtc

SEQ ID NO: 2425340 - DNA, 25 bp, Homo sapien
ttagcctgggccaacagcccctgtt

SEQ ID NO: 2425341 - DNA, 25 bp, Homo sapien
cctgggccaacagcccctgtttctt

SEQ ID NO: 2425342 - DNA, 25 bp, Homo sapien
tcttcttagcctgggccaacagccc

SEQ ID NO: 2425343 - DNA, 25 bp, Homo sapien
tgggccaacagcccctgtttcttct

SEQ ID NO: 2425344 - DNA, 25 bp, Homo sapien
aggaggcacttttagcgggttatag

SEQ ID NO: 2425345 - DNA, 25 bp, Homo sapien
tttgccactgcaaactgatacagcc

SEQ ID NO: 2425346 - DNA, 25 bp, Homo sapien
cttttagcgggttatagaggatagc

SEQ ID NO: 2425347 - DNA, 25 bp, Homo sapien
tacagccgggccatttgataaaggg

SEQ ID NO: 2425348 - DNA, 25 bp, Homo sapien
tgtcccatgcctttgaggctggatg

SEQ ID NO: 2425349 - DNA, 25 bp, Homo sapien
ctgtcccatgcctttgaggctggat

SEQ ID NO: 2425350 - DNA, 25 bp, Homo sapien
ccatgcctttgaggctggatgtcct

SEQ ID NO: 2425351 - DNA, 25 bp, Homo sapien
tcccatgcctttgaggctggatgtc

SEQ ID NO: 2425352 - DNA, 25 bp, Homo sapien
gcttcttcccaacagcagggtctgg

SEQ ID NO: 2425353 - DNA, 25 bp, Homo sapien
cctgcttcttcccaacagcagggtc

SEQ ID NO: 2425354 - DNA, 25 bp, Homo sapien
gtctggagccaccttcctccccttg

SEQ ID NO: 2425355 - DNA, 25 bp, Homo sapien
ttcttcccaacagcagggtctggag

SEQ ID NO: 2425356 - DNA, 25 bp, Homo sapien
tagaggcttaacaatccgatacttg

SEQ ID NO: 2425357 - DNA, 25 bp, Homo sapien
ttaacaatccgatacttgtacagca

SEQ ID NO: 2425358 - DNA, 25 bp, Homo sapien
gttttagaggcttaacaatccgata

SEQ ID NO: 2425359 - DNA, 25 bp, Homo sapien
gaggcttaacaatccgatacttgta

SEQ ID NO: 2425360 - DNA, 25 bp, Homo sapien
tcaagttgagaaagggccagcttgt

SEQ ID NO: 2425361 - DNA, 25 bp, Homo sapien
gttcaagttgagaaagggccagctt

SEQ ID NO: 2425362 - DNA, 25 bp, Homo sapien
caagttgagaaagggccagcttgtg

SEQ ID NO: 2425363 - DNA, 25 bp, Homo sapien
aagttcaagttgagaaagggccagc

SEQ ID NO: 2425364 - DNA, 25 bp, Homo sapien
gaacccattgttcttaatagagcat

SEQ ID NO: 2425365 - DNA, 25 bp, Homo sapien
gggattcataaccaatactgcctga

SEQ ID NO: 2425366 - DNA, 25 bp, Homo sapien
gaacagagccagttgacccatactt

SEQ ID NO: 2425367 - DNA, 25 bp, Homo sapien
gagccagcattagtcaggaaaccat

SEQ ID NO: 2425368 - DNA, 25 bp, Homo sapien
gtggtggccctgtcacatccatcat

SEQ ID NO: 2425369 - DNA, 25 bp, Homo sapien
tccagtttcacaagaaccataagta

SEQ ID NO: 2425370 - DNA, 25 bp, Homo sapien
ccataagtaggtggataggtgtgca

SEQ ID NO: 2425371 - DNA, 25 bp, Homo sapien
taggtgtgcagtagggtggtggccc

SEQ ID NO: 2425372 - DNA, 25 bp, Homo sapien
tattgtctatagttctacacacggt

SEQ ID NO: 2425373 - DNA, 25 bp, Homo sapien
catttgcagtatagaaacagggtat

SEQ ID NO: 2425374 - DNA, 25 bp, Homo sapien
caatgtctaagtaaggcgtatatag

SEQ ID NO: 2425375 - DNA, 25 bp, Homo sapien
tatatagacatatacccaacatggc

SEQ ID NO: 2425376 - DNA, 25 bp, Homo sapien
caaaaatggctagtttctcagtctt

SEQ ID NO: 2425377 - DNA, 25 bp, Homo sapien
ggtatacccattggaccatttggaa

SEQ ID NO: 2425378 - DNA, 25 bp, Homo sapien
caaataggcacaaaaagctcatgga

SEQ ID NO: 2425379 - DNA, 25 bp, Homo sapien
aatcagagatgttttcccttccaag

SEQ ID NO: 2425380 - DNA, 25 bp, Homo sapien
tattatggctgtgtctcaacaggca

SEQ ID NO: 2425381 - DNA, 25 bp, Homo sapien
ggcagcaagagataaagtttcagtc

SEQ ID NO: 2425382 - DNA, 25 bp, Homo sapien
cctaggccactaacaactgatcatt

SEQ ID NO: 2425383 - DNA, 25 bp, Homo sapien
aaaatacactagctatcatggcaga

SEQ ID NO: 2425384 - DNA, 25 bp, Homo sapien
aaatgtagactcatccttgggcaaa

SEQ ID NO: 2425385 - DNA, 25 bp, Homo sapien
catgattagggcaagtctgagtgtc

SEQ ID NO: 2425386 - DNA, 25 bp, Homo sapien
gagcactaaaccagagagtcaggag

SEQ ID NO: 2425387 - DNA, 25 bp, Homo sapien
tgtacaggtttagttggccactagc

SEQ ID NO: 2425388 - DNA, 25 bp, Homo sapien
caatgtcaaacggatagcagtatcc

SEQ ID NO: 2425389 - DNA, 25 bp, Homo sapien
cagtatccaattgttcaaagcgcca

SEQ ID NO: 2425390 - DNA, 25 bp, Homo sapien
gaattccagctagctgagattctag

SEQ ID NO: 2425391 - DNA, 25 bp, Homo sapien
ttttcttcactcaatgtcaaacgga

SEQ ID NO: 2425392 - DNA, 25 bp, Homo sapien
aggtctgtgtgttatagacagtaag

SEQ ID NO: 2425393 - DNA, 25 bp, Homo sapien
gaaatatctttccttcgacatcaat

SEQ ID NO: 2425394 - DNA, 25 bp, Homo sapien
tagacagtaaggaaattccagcccc

SEQ ID NO: 2425395 - DNA, 25 bp, Homo sapien
agacagtaaggaaattccagcccct

SEQ ID NO: 2425396 - DNA, 25 bp, Homo sapien
tggtacattcatccagcaaggcata

SEQ ID NO: 2425397 - DNA, 25 bp, Homo sapien
ggtacattcatccagcaaggcatat

SEQ ID NO: 2425398 - DNA, 25 bp, Homo sapien
gtacattcatccagcaaggcatatt

SEQ ID NO: 2425399 - DNA, 25 bp, Homo sapien
cctctggactgttggtacttagcat

SEQ ID NO: 2425400 - DNA, 25 bp, Homo sapien
gaataggcaacattctacgggacaa

SEQ ID NO: 2425401 - DNA, 25 bp, Homo sapien
gaggtaaatctagaataggcaacat

SEQ ID NO: 2425402 - DNA, 25 bp, Homo sapien
tcagcaagtcaaaggtataaaaggt

SEQ ID NO: 2425403 - DNA, 25 bp, Homo sapien
cctgataaggtagcaatgaggtaaa

SEQ ID NO: 2425404 - DNA, 25 bp, Homo sapien
tgcttttcccctcctgacaggacat

SEQ ID NO: 2425405 - DNA, 25 bp, Homo sapien
cttttcccctcctgacaggacatct

SEQ ID NO: 2425406 - DNA, 25 bp, Homo sapien
ttttcccctcctgacaggacatctt

SEQ ID NO: 2425407 - DNA, 25 bp, Homo sapien
gcttttcccctcctgacaggacatc

SEQ ID NO: 2425408 - DNA, 25 bp, Homo sapien
ctctgagtcataatgttgcctctga

SEQ ID NO: 2425409 - DNA, 25 bp, Homo sapien
ctcttctttagttcgtgtccatttg

SEQ ID NO: 2425410 - DNA, 25 bp, Homo sapien
cctgcttcctagagatgtatactct

SEQ ID NO: 2425411 - DNA, 25 bp, Homo sapien
cctctgaccctgatttagtgagaca

SEQ ID NO: 2425412 - DNA, 25 bp, Homo sapien
tagagatggacattgtgtaggatac

SEQ ID NO: 2425413 - DNA, 25 bp, Homo sapien
aagacttccaagagacatatatggc

SEQ ID NO: 2425414 - DNA, 25 bp, Homo sapien
ggtaaatgacttgatcccgaagact

SEQ ID NO: 2425415 - DNA, 25 bp, Homo sapien
tgtaggatacgttccagatcttggt

SEQ ID NO: 2425416 - DNA, 25 bp, Homo sapien
ggccagagcccacttagaattctga

SEQ ID NO: 2425417 - DNA, 25 bp, Homo sapien
aggactccttcatacacaggccaga

SEQ ID NO: 2425418 - DNA, 25 bp, Homo sapien
tcaaaagatgcattccttcttctac

SEQ ID NO: 2425419 - DNA, 25 bp, Homo sapien
ccattgggaccagttatcaaaagat

SEQ ID NO: 2425420 - DNA, 25 bp, Homo sapien
gtaattatgggaacattttcacaaa

SEQ ID NO: 2425421 - DNA, 25 bp, Homo sapien
aagtttagcctggaagccaccactt

SEQ ID NO: 2425422 - DNA, 25 bp, Homo sapien
ctgctggtgtaattatgggaacatt

SEQ ID NO: 2425423 - DNA, 25 bp, Homo sapien
tcacaaataattccgtgatccacat

SEQ ID NO: 2425424 - DNA, 25 bp, Homo sapien
ctttaattgccaatgtgtcactgag

SEQ ID NO: 2425425 - DNA, 25 bp, Homo sapien
taattgccaatgtgtcactgagagg

SEQ ID NO: 2425426 - DNA, 25 bp, Homo sapien
tgccaatgtgtcactgagaggtaat

SEQ ID NO: 2425427 - DNA, 25 bp, Homo sapien
atgtgtcactgagaggtaattctac

SEQ ID NO: 2425428 - DNA, 25 bp, Homo sapien
tgacagcagttctcttataaatgcc

SEQ ID NO: 2425429 - DNA, 25 bp, Homo sapien
catcaaagacccaaaacatattgta

SEQ ID NO: 2425430 - DNA, 25 bp, Homo sapien
cagtgtagcctgctaattcagtgac

SEQ ID NO: 2425431 - DNA, 25 bp, Homo sapien
aaaacatattgtacactcgagcagt

SEQ ID NO: 2425432 - DNA, 25 bp, Homo sapien
gacataatcctttcaatagcatcag

SEQ ID NO: 2425433 - DNA, 25 bp, Homo sapien
taaaggcttctgtccgttcactaac

SEQ ID NO: 2425434 - DNA, 25 bp, Homo sapien
agctccagaggccagtaaatttcga

SEQ ID NO: 2425435 - DNA, 25 bp, Homo sapien
taaatttcgagcagtggtaaaggct

SEQ ID NO: 2425436 - DNA, 25 bp, Homo sapien
taggtatagccaccataattagtcc

SEQ ID NO: 2425437 - DNA, 25 bp, Homo sapien
cagttgcagtgataataggtatagc

SEQ ID NO: 2425438 - DNA, 25 bp, Homo sapien
aaatgaggttcatctgatctgctaa

SEQ ID NO: 2425439 - DNA, 25 bp, Homo sapien
tcatgatgtaccacaaacgtttgga

SEQ ID NO: 2425440 - DNA, 25 bp, Homo sapien
caaatggtctcggtgcaatgcagta

SEQ ID NO: 2425441 - DNA, 25 bp, Homo sapien
tataattctcgagtgcacataccgc

SEQ ID NO: 2425442 - DNA, 25 bp, Homo sapien
caagtcctgctagtagggtgggccc

SEQ ID NO: 2425443 - DNA, 25 bp, Homo sapien
gagggttttcagagcatatgccgca

SEQ ID NO: 2425444 - DNA, 25 bp, Homo sapien
atttttggagaggtcgaatcaggcc

SEQ ID NO: 2425445 - DNA, 25 bp, Homo sapien
cagtagataccgcaaacagaagagc

SEQ ID NO: 2425446 - DNA, 25 bp, Homo sapien
tagaaagtcctacagcgtcccatag

SEQ ID NO: 2425447 - DNA, 25 bp, Homo sapien
atctgctggcgaacaaaaccggctc

SEQ ID NO: 2425448 - DNA, 25 bp, Homo sapien
tgccttgcctcagcgattaaaacga

SEQ ID NO: 2425449 - DNA, 25 bp, Homo sapien
ccttgcctcagcgattaaaacgatg

SEQ ID NO: 2425450 - DNA, 25 bp, Homo sapien
gccttgcctcagcgattaaaacgat

SEQ ID NO: 2425451 - DNA, 25 bp, Homo sapien
ggtcggctgctttgccgcagcgtcc

SEQ ID NO: 2425452 - DNA, 25 bp, Homo sapien
tgctttgccgcagcgtccccttgcg

SEQ ID NO: 2425453 - DNA, 25 bp, Homo sapien
ccaggtcggctgctttgccgcagcg

SEQ ID NO: 2425454 - DNA, 25 bp, Homo sapien
tttgccgcagcgtccccttgcggcc

SEQ ID NO: 2425455 - DNA, 25 bp, Homo sapien
ctatcaggaccggaaggaacacgca

SEQ ID NO: 2425456 - DNA, 25 bp, Homo sapien
tatcaggaccggaaggaacacgcag

SEQ ID NO: 2425457 - DNA, 25 bp, Homo sapien
atcaggaccggaaggaacacgcaga

SEQ ID NO: 2425458 - DNA, 25 bp, Homo sapien
caggaccggaaggaacacgcagaag

SEQ ID NO: 2425459 - DNA, 25 bp, Homo sapien
agctctagacacagggacctcagtg

SEQ ID NO: 2425460 - DNA, 25 bp, Homo sapien
tttctagttcctggcggagaggtca

SEQ ID NO: 2425461 - DNA, 25 bp, Homo sapien
tgaagctgcgatttggcgcagagct

SEQ ID NO: 2425462 - DNA, 25 bp, Homo sapien
tgggacattcattcctacgactcct

SEQ ID NO: 2425463 - DNA, 25 bp, Homo sapien
aggcttcaacaggatttagttgata

SEQ ID NO: 2425464 - DNA, 25 bp, Homo sapien
ggcttcaacaggatttagttgatac

SEQ ID NO: 2425465 - DNA, 25 bp, Homo sapien
gcttcaacaggatttagttgataca

SEQ ID NO: 2425466 - DNA, 25 bp, Homo sapien
gccagtgattagaaataagcttccc

SEQ ID NO: 2425467 - DNA, 25 bp, Homo sapien
gctcttcaatttagggactttacca

SEQ ID NO: 2425468 - DNA, 25 bp, Homo sapien
cagtgcatttcaaaccagggtctca

SEQ ID NO: 2425469 - DNA, 25 bp, Homo sapien
aactgggcatttgaccctttgctgc

SEQ ID NO: 2425470 - DNA, 25 bp, Homo sapien
actgtatactaatattaactcaagg

SEQ ID NO: 2425471 - DNA, 25 bp, Homo sapien
ctatctacccgtcagacaaagggct

SEQ ID NO: 2425472 - DNA, 25 bp, Homo sapien
aactgtcagcagtgtaaaacaggca

SEQ ID NO: 2425473 - DNA, 25 bp, Homo sapien
aaaatttttgctatctacccgtcag

SEQ ID NO: 2425474 - DNA, 25 bp, Homo sapien
cacctgctaactgaggagccctggg

SEQ ID NO: 2425475 - DNA, 25 bp, Homo sapien
tgaagagtgactcgcagcctaggca

SEQ ID NO: 2425476 - DNA, 25 bp, Homo sapien
caggtgggcctgagtacatttccag

SEQ ID NO: 2425477 - DNA, 25 bp, Homo sapien
cagattagccacagtaagatagggc

SEQ ID NO: 2425478 - DNA, 25 bp, Homo sapien
tcagctcaaatcattctggtcagct

SEQ ID NO: 2425479 - DNA, 25 bp, Homo sapien
ggacatcaggctagtcagccagatc

SEQ ID NO: 2425480 - DNA, 25 bp, Homo sapien
tgggaaggttgttcttttcatcaac

SEQ ID NO: 2425481 - DNA, 25 bp, Homo sapien
gaagaaggacatcaggctagtcagc

SEQ ID NO: 2425482 - DNA, 25 bp, Homo sapien
tattggcagcagctacatatgagct

SEQ ID NO: 2425483 - DNA, 25 bp, Homo sapien
gatatatagtccaaaagctgctagg

SEQ ID NO: 2425484 - DNA, 25 bp, Homo sapien
cacctctttgatgattactggcaca

SEQ ID NO: 2425485 - DNA, 25 bp, Homo sapien
tacattattgtacatgaggccaaga

SEQ ID NO: 2425486 - DNA, 25 bp, Homo sapien
tattttgaatatggagatagccacc

SEQ ID NO: 2425487 - DNA, 25 bp, Homo sapien
tatgctgggaacttaaaaggtgcct

SEQ ID NO: 2425488 - DNA, 25 bp, Homo sapien
gataactgtgataggaacaagccag

SEQ ID NO: 2425489 - DNA, 25 bp, Homo sapien
tctagtgcagatcagacatccagcc

SEQ ID NO: 2425490 - DNA, 25 bp, Homo sapien
tcaaaactaggctgtggaaagaacc

SEQ ID NO: 2425491 - DNA, 25 bp, Homo sapien
tgaaggcacgaaatagtaggactcc

SEQ ID NO: 2425492 - DNA, 25 bp, Homo sapien
aaaggagatacggacagctgtgccc

SEQ ID NO: 2425493 - DNA, 25 bp, Homo sapien
ttttgacacagaacacccttggacc

SEQ ID NO: 2425494 - DNA, 25 bp, Homo sapien
aatccagcatagaggaagaaagctc

SEQ ID NO: 2425495 - DNA, 25 bp, Homo sapien
tgtacatagcctgttgtcaaagagt

SEQ ID NO: 2425496 - DNA, 25 bp, Homo sapien
aggagtcccacagcagcaaatccag

SEQ ID NO: 2425497 - DNA, 25 bp, Homo sapien
cagccatagatgaaaaggagtccca

SEQ ID NO: 2425498 - DNA, 25 bp, Homo sapien
ttagtgaaaccaggacattgaaaat

SEQ ID NO: 2425499 - DNA, 25 bp, Homo sapien
tatggagtagggcagaaattgtaag

SEQ ID NO: 2425500 - DNA, 25 bp, Homo sapien
ggcagaaattgtaagcccaaaatat

SEQ ID NO: 2425501 - DNA, 25 bp, Homo sapien
aattgtaagcccaaaatatatcttc

SEQ ID NO: 2425502 - DNA, 25 bp, Homo sapien
agtgcagtccaggagtatggagtag

SEQ ID NO: 2425503 - DNA, 25 bp, Homo sapien
gcagtcataatagccagaggacttt

SEQ ID NO: 2425504 - DNA, 25 bp, Homo sapien
ctttgttcttggcatagcagtcata

SEQ ID NO: 2425505 - DNA, 25 bp, Homo sapien
tcttggcatagcagtcataatagcc

SEQ ID NO: 2425506 - DNA, 25 bp, Homo sapien
tagcagtcataatagccagaggact

SEQ ID NO: 2425507 - DNA, 25 bp, Homo sapien
cctgtgtttggcctcgtggcagggc

SEQ ID NO: 2425508 - DNA, 25 bp, Homo sapien
ttacgcataagagcgcttcaactgt

SEQ ID NO: 2425509 - DNA, 25 bp, Homo sapien
ttggcctcgtggcagggcaagcaca

SEQ ID NO: 2425510 - DNA, 25 bp, Homo sapien
tctaactgtaaagcaagtgcttctg

SEQ ID NO: 2425511 - DNA, 25 bp, Homo sapien
aaatatagatggagaattatatacc

SEQ ID NO: 2425512 - DNA, 25 bp, Homo sapien
gttaaatatagatggagaattatat

SEQ ID NO: 2425513 - DNA, 25 bp, Homo sapien
taaatatagatggagaattatatac

SEQ ID NO: 2425514 - DNA, 25 bp, Homo sapien
atgttaaatatagatggagaattat

SEQ ID NO: 2425515 - DNA, 25 bp, Homo sapien
tgtcttgatgaattggccactttat

SEQ ID NO: 2425516 - DNA, 25 bp, Homo sapien
gccactttattataagccatccttc

SEQ ID NO: 2425517 - DNA, 25 bp, Homo sapien
ccttaatctggagtctttgtcaaat

SEQ ID NO: 2425518 - DNA, 25 bp, Homo sapien
tagctgtcccctgacgttcttgata

SEQ ID NO: 2425519 - DNA, 25 bp, Homo sapien
ttgcacctggcggtttctaatttca

SEQ ID NO: 2425520 - DNA, 25 bp, Homo sapien
acctggcggtttctaatttcaacat

SEQ ID NO: 2425521 - DNA, 25 bp, Homo sapien
gcacctggcggtttctaatttcaac

SEQ ID NO: 2425522 - DNA, 25 bp, Homo sapien
gtcattgcacctggcggtttctaat

SEQ ID NO: 2425523 - DNA, 25 bp, Homo sapien
ggtcagttactgagtccagacacaa

SEQ ID NO: 2425524 - DNA, 25 bp, Homo sapien
taaatgacccaaggccatcttctgg

SEQ ID NO: 2425525 - DNA, 25 bp, Homo sapien
aatcaaagtcgttggattccagcaa

SEQ ID NO: 2425526 - DNA, 25 bp, Homo sapien
tacattataccagagctaagcttcc

SEQ ID NO: 2425527 - DNA, 25 bp, Homo sapien
tacagtgtccaccaaatcctaacgg

SEQ ID NO: 2425528 - DNA, 25 bp, Homo sapien
tgtttctgggttggatctacgctag

SEQ ID NO: 2425529 - DNA, 25 bp, Homo sapien
gaaagcagttctactaaagggcatg

SEQ ID NO: 2425530 - DNA, 25 bp, Homo sapien
tatgtgtccaggcataacgtctggc

SEQ ID NO: 2425531 - DNA, 25 bp, Homo sapien
tgttatcccattgtgggttgggtca

SEQ ID NO: 2425532 - DNA, 25 bp, Homo sapien
tatcttgggcaaatgtgttatccca

SEQ ID NO: 2425533 - DNA, 25 bp, Homo sapien
tcaggataccaagaaccacaaatgc

SEQ ID NO: 2425534 - DNA, 25 bp, Homo sapien
cctatacactgggtatgctttatca

SEQ ID NO: 2425535 - DNA, 25 bp, Homo sapien
gcattcttacactgccagagagccc

SEQ ID NO: 2425536 - DNA, 25 bp, Homo sapien
caaagtcaaagccaaaggaactata

SEQ ID NO: 2425537 - DNA, 25 bp, Homo sapien
agacattgctctagcacaaagtcaa

SEQ ID NO: 2425538 - DNA, 25 bp, Homo sapien
caacataaatagtatccgagtctgc

SEQ ID NO: 2425539 - DNA, 25 bp, Homo sapien
tcttttgatttgtagactttgcaac

SEQ ID NO: 2425540 - DNA, 25 bp, Homo sapien
tatagtcactaaatccaagggagtc

SEQ ID NO: 2425541 - DNA, 25 bp, Homo sapien
tatggacgagggagataaattactc

SEQ ID NO: 2425542 - DNA, 25 bp, Homo sapien
tttctccctctaacagttcatattt

SEQ ID NO: 2425543 - DNA, 25 bp, Homo sapien
tactcttatacttgtaacatctata

SEQ ID NO: 2425544 - DNA, 25 bp, Homo sapien
tgtaacatctatatttaacaaattg

SEQ ID NO: 2425545 - DNA, 25 bp, Homo sapien
tgaaaaactaattgtaatctcaatt

SEQ ID NO: 2425546 - DNA, 25 bp, Homo sapien
tcttgtccctatttcagaacctgga

SEQ ID NO: 2425547 - DNA, 25 bp, Homo sapien
gctttgtaactacagaggcaaggcc

SEQ ID NO: 2425548 - DNA, 25 bp, Homo sapien
caaggcctggagcttatctcactca

SEQ ID NO: 2425549 - DNA, 25 bp, Homo sapien
tccaagcccagtctagccagatttt

SEQ ID NO: 2425550 - DNA, 25 bp, Homo sapien
ctagccaagactaaggaggtaacca

SEQ ID NO: 2425551 - DNA, 25 bp, Homo sapien
tagccaagactaaggaggtaaccaa

SEQ ID NO: 2425552 - DNA, 25 bp, Homo sapien
agccaagactaaggaggtaaccaat

SEQ ID NO: 2425553 - DNA, 25 bp, Homo sapien
aatgctttgcatccactatcaccag

SEQ ID NO: 2425554 - DNA, 25 bp, Homo sapien
caaagtaatgtagttatgaaggcca

SEQ ID NO: 2425555 - DNA, 25 bp, Homo sapien
tgtgcccaacctaacgtgatagtaa

SEQ ID NO: 2425556 - DNA, 25 bp, Homo sapien
caattaaacaatatgcagtgggaga

SEQ ID NO: 2425557 - DNA, 25 bp, Homo sapien
gtagatgctttattaactggaacac

SEQ ID NO: 2425558 - DNA, 25 bp, Homo sapien
ttgtagcagaaaccgcagtctggat

SEQ ID NO: 2425559 - DNA, 25 bp, Homo sapien
caggaggagtcaatgacagttgatt

SEQ ID NO: 2425560 - DNA, 25 bp, Homo sapien
cagttgatttgttcatcttgtagca

SEQ ID NO: 2425561 - DNA, 25 bp, Homo sapien
aatgaaaagagttaccgtcatgttg

SEQ ID NO: 2425562 - DNA, 25 bp, Homo sapien
aaagagttaccgtcatgttggcaga

SEQ ID NO: 2425563 - DNA, 25 bp, Homo sapien
agttaccgtcatgttggcagagaca

SEQ ID NO: 2425564 - DNA, 25 bp, Homo sapien
tgaaaagagttaccgtcatgttggc

SEQ ID NO: 2425565 - DNA, 25 bp, Homo sapien
agctggctggtctcttcgatttctc

SEQ ID NO: 2425566 - DNA, 25 bp, Homo sapien
cctcttttggccacagcaactttgg

SEQ ID NO: 2425567 - DNA, 25 bp, Homo sapien
aggaaagtgacatgcgctgagccag

SEQ ID NO: 2425568 - DNA, 25 bp, Homo sapien
tctcttgtgcagtaagcttggggcc

SEQ ID NO: 2425569 - DNA, 25 bp, Homo sapien
ctgaaggaggcttggatctgagaga

SEQ ID NO: 2425570 - DNA, 25 bp, Homo sapien
ttctctattaaagccaccctgcaga

SEQ ID NO: 2425571 - DNA, 25 bp, Homo sapien
aggtttctctattaaagccaccctg

SEQ ID NO: 2425572 - DNA, 25 bp, Homo sapien
tctattaaagccaccctgcagaact

SEQ ID NO: 2425573 - DNA, 25 bp, Homo sapien
attaaagccaccctgcagaacttca

SEQ ID NO: 2425574 - DNA, 25 bp, Homo sapien
tctgtatctgtagaacagcatgcag

SEQ ID NO: 2425575 - DNA, 25 bp, Homo sapien
tatctgtagaacagcatgcagcccc

SEQ ID NO: 2425576 - DNA, 25 bp, Homo sapien
tgtatctgtagaacagcatgcagcc

SEQ ID NO: 2425577 - DNA, 25 bp, Homo sapien
caactctgtatctgtagaacagcat

SEQ ID NO: 2425578 - DNA, 25 bp, Homo sapien
gcagggtggatcaccaatatatatt

SEQ ID NO: 2425579 - DNA, 25 bp, Homo sapien
tgcagggtggatcaccaatatatat

SEQ ID NO: 2425580 - DNA, 25 bp, Homo sapien
ctgcagggtggatcaccaatatata

SEQ ID NO: 2425581 - DNA, 25 bp, Homo sapien
aggtgacttggaatctggtttacca

SEQ ID NO: 2425582 - DNA, 25 bp, Homo sapien
gagaacaccgccactaccagtcggg

SEQ ID NO: 2425583 - DNA, 25 bp, Homo sapien
ctggtttaccagagaacaccgccac

SEQ ID NO: 2425584 - DNA, 25 bp, Homo sapien
tgacttggaatctggtttaccagag

SEQ ID NO: 2425585 - DNA, 25 bp, Homo sapien
cttgcttggagcctcgtgaaggaca

SEQ ID NO: 2425586 - DNA, 25 bp, Homo sapien
gaaggacagattcctatatcagtac

SEQ ID NO: 2425587 - DNA, 25 bp, Homo sapien
tgaaaacaactctggaacacctgcc

SEQ ID NO: 2425588 - DNA, 25 bp, Homo sapien
tccctgccagagcatagatgtcggt

SEQ ID NO: 2425589 - DNA, 25 bp, Homo sapien
agtgctttccttctcagttcttgca

SEQ ID NO: 2425590 - DNA, 25 bp, Homo sapien
gtgctttccttctcagttcttgcat

SEQ ID NO: 2425591 - DNA, 25 bp, Homo sapien
tattaatctataagcaagatggccc

SEQ ID NO: 2425592 - DNA, 25 bp, Homo sapien
tactgaaggagcaacattatcatcc

SEQ ID NO: 2425593 - DNA, 25 bp, Homo sapien
taaatgccaaggagtaataggtttc

SEQ ID NO: 2425594 - DNA, 25 bp, Homo sapien
tggaatatttaagacatgctgagct

SEQ ID NO: 2425595 - DNA, 25 bp, Homo sapien
gccttccgagacgaattagactggt

SEQ ID NO: 2425596 - DNA, 25 bp, Homo sapien
cttgagtctgctcccattctgtgga

SEQ ID NO: 2425597 - DNA, 25 bp, Homo sapien
cagcctctgattggtagccttccga

SEQ ID NO: 2425598 - DNA, 25 bp, Homo sapien
caatcagattggttgtgacctcgtc

SEQ ID NO: 2425599 - DNA, 25 bp, Homo sapien
tattggaaatgaactttgaagggac

SEQ ID NO: 2425600 - DNA, 25 bp, Homo sapien
catctacagatgaagccacagtttg

SEQ ID NO: 2425601 - DNA, 25 bp, Homo sapien
gaatctgacagtcttacagtgctca

SEQ ID NO: 2425602 - DNA, 25 bp, Homo sapien
aaaccagtgtcaccaccatctacag

SEQ ID NO: 2425603 - DNA, 25 bp, Homo sapien
ggcacatagatcacaatttggaacc

SEQ ID NO: 2425604 - DNA, 25 bp, Homo sapien
cataaattcacgctcaactggatgc

SEQ ID NO: 2425605 - DNA, 25 bp, Homo sapien
tggaaccaatatatcttcctcactg

SEQ ID NO: 2425606 - DNA, 25 bp, Homo sapien
tcctcactgttgtaatgaacagcca

SEQ ID NO: 2425607 - DNA, 25 bp, Homo sapien
gacctgacggagctattggcttaaa

SEQ ID NO: 2425608 - DNA, 25 bp, Homo sapien
gggaaacttgggctgatagcacaaa

SEQ ID NO: 2425609 - DNA, 25 bp, Homo sapien
tgtgcaagtggcgttctgacctgac

SEQ ID NO: 2425610 - DNA, 25 bp, Homo sapien
tattggcttaaaagtgatgcgtggg

SEQ ID NO: 2425611 - DNA, 25 bp, Homo sapien
acttccccttaacagtcagggatgg

SEQ ID NO: 2425612 - DNA, 25 bp, Homo sapien
ccccttaacagtcagggatggctct

SEQ ID NO: 2425613 - DNA, 25 bp, Homo sapien
atacttccccttaacagtcagggat

SEQ ID NO: 2425614 - DNA, 25 bp, Homo sapien
ttccccttaacagtcagggatggct

SEQ ID NO: 2425615 - DNA, 25 bp, Homo sapien
ggaatttaggcctgtttcaaacaca

SEQ ID NO: 2425616 - DNA, 25 bp, Homo sapien
gaatttagttaatgctgccctggaa

SEQ ID NO: 2425617 - DNA, 25 bp, Homo sapien
aaacagtccttgtgtacagtgaaat

SEQ ID NO: 2425618 - DNA, 25 bp, Homo sapien
ggttctaatattccactgctgaaag

SEQ ID NO: 2425619 - DNA, 25 bp, Homo sapien
caaaggtaagctttctgcggcccac

SEQ ID NO: 2425620 - DNA, 25 bp, Homo sapien
aactaccaaaggtaagctttctgcg

SEQ ID NO: 2425621 - DNA, 25 bp, Homo sapien
taccaaaggtaagctttctgcggcc

SEQ ID NO: 2425622 - DNA, 25 bp, Homo sapien
ctgctaaactaccaaaggtaagctt

SEQ ID NO: 2425623 - DNA, 25 bp, Homo sapien
gccagactcccacaagtgtgaaaat

SEQ ID NO: 2425624 - DNA, 25 bp, Homo sapien
aaaatgaaatttgtgaaggctgtaa

SEQ ID NO: 2425625 - DNA, 25 bp, Homo sapien
tgaaatttgtgaaggctgtaactga

SEQ ID NO: 2425626 - DNA, 25 bp, Homo sapien
gactcccacaagtgtgaaaatgaaa

SEQ ID NO: 2425627 - DNA, 25 bp, Homo sapien
ggtgaccgccatacatataacaagg

SEQ ID NO: 2425628 - DNA, 25 bp, Homo sapien
tgggagcccataacactgagggtga

SEQ ID NO: 2425629 - DNA, 25 bp, Homo sapien
cagaagatacaaaggcaatatctgg

SEQ ID NO: 2425630 - DNA, 25 bp, Homo sapien
tataacaaggacacactggtgggct

SEQ ID NO: 2425631 - DNA, 25 bp, Homo sapien
catctgtgcttaagaagcatcatgg

SEQ ID NO: 2425632 - DNA, 25 bp, Homo sapien
ctgtgcttaagaagcatcatggacc

SEQ ID NO: 2425633 - DNA, 25 bp, Homo sapien
tctgtgcttaagaagcatcatggac

SEQ ID NO: 2425634 - DNA, 25 bp, Homo sapien
tcatctgtgcttaagaagcatcatg

SEQ ID NO: 2425635 - DNA, 25 bp, Homo sapien
aagctgcacagtgcgctgtgggcct

SEQ ID NO: 2425636 - DNA, 25 bp, Homo sapien
cacagatcccagatgtaatctgctc

SEQ ID NO: 2425637 - DNA, 25 bp, Homo sapien
cagcctgtaatactgctcatccaag

SEQ ID NO: 2425638 - DNA, 25 bp, Homo sapien
taatctgctcataaacagcctgtaa

SEQ ID NO: 2425639 - DNA, 25 bp, Homo sapien
aatgagccaaagacggtgggggtat

SEQ ID NO: 2425640 - DNA, 25 bp, Homo sapien
caatgagccaaagacggtgggggta

SEQ ID NO: 2425641 - DNA, 25 bp, Homo sapien
tgagccaaagacggtgggggtatgt

SEQ ID NO: 2425642 - DNA, 25 bp, Homo sapien
tcaatgagccaaagacggtgggggt

SEQ ID NO: 2425643 - DNA, 25 bp, Homo sapien
gaaccagatttggaaccaggtagaa

SEQ ID NO: 2425644 - DNA, 25 bp, Homo sapien
taggtgctgaaccagatttggaacc

SEQ ID NO: 2425645 - DNA, 25 bp, Homo sapien
gatttggaaccaggtagaaatggcc

SEQ ID NO: 2425646 - DNA, 25 bp, Homo sapien
gaaccaggtagaaatggcccaggac

SEQ ID NO: 2425647 - DNA, 25 bp, Homo sapien
taggatggtgagtgcacatgtattc

SEQ ID NO: 2425648 - DNA, 25 bp, Homo sapien
gggtaaataatctgacctcccagag

SEQ ID NO: 2425649 - DNA, 25 bp, Homo sapien
gaaaagatctgcttgataggttgag

SEQ ID NO: 2425650 - DNA, 25 bp, Homo sapien
cagagagctgctcaacatacagcaa

SEQ ID NO: 2425651 - DNA, 25 bp, Homo sapien
tgtgctcggccgattataaatattg

SEQ ID NO: 2425652 - DNA, 25 bp, Homo sapien
tcttcttggccaatgcttaagtaaa

SEQ ID NO: 2425653 - DNA, 25 bp, Homo sapien
tttttcagaaaaggttactcataca

SEQ ID NO: 2425654 - DNA, 25 bp, Homo sapien
tcaagataagtggatacttttacca

SEQ ID NO: 2425655 - DNA, 25 bp, Homo sapien
gtgtgtttaagaggatagcagggtg

SEQ ID NO: 2425656 - DNA, 25 bp, Homo sapien
agtgtgtttaagaggatagcagggt

SEQ ID NO: 2425657 - DNA, 25 bp, Homo sapien
gaggatagcagggtggcccggccat

SEQ ID NO: 2425658 - DNA, 25 bp, Homo sapien
cttcagtgtgtttaagaggatagca

SEQ ID NO: 2425659 - DNA, 25 bp, Homo sapien
ggcatgcccagagtcccatggtgga

SEQ ID NO: 2425660 - DNA, 25 bp, Homo sapien
tggtggagacagaccttgaatctaa

SEQ ID NO: 2425661 - DNA, 25 bp, Homo sapien
taattcactaacttccagccaatga

SEQ ID NO: 2425662 - DNA, 25 bp, Homo sapien
cctgattcctgggttaatattcttc

SEQ ID NO: 2425663 - DNA, 25 bp, Homo sapien
caaagaacttagctaggtaccagaa

SEQ ID NO: 2425664 - DNA, 25 bp, Homo sapien
gctatgtttcctgattgcgtggtaa

SEQ ID NO: 2425665 - DNA, 25 bp, Homo sapien
gactcattcaaccatcagcctagct

SEQ ID NO: 2425666 - DNA, 25 bp, Homo sapien
ccaggaactctagatcaggatataa

SEQ ID NO: 2425667 - DNA, 25 bp, Homo sapien
taaagtcagtatctcccaaaaggag

SEQ ID NO: 2425668 - DNA, 25 bp, Homo sapien
taatctaacaatatgtgccctggga

SEQ ID NO: 2425669 - DNA, 25 bp, Homo sapien
tgtaggtctagtgcaacagaggccc

SEQ ID NO: 2425670 - DNA, 25 bp, Homo sapien
tgcctggcactagaccaacagatgg

SEQ ID NO: 2425671 - DNA, 25 bp, Homo sapien
tcacaatcttttcagtaaaaagcca

SEQ ID NO: 2425672 - DNA, 25 bp, Homo sapien
gtaaaaagccagaaagaaatacata

SEQ ID NO: 2425673 - DNA, 25 bp, Homo sapien
taaaaagccagaaagaaatacatac

SEQ ID NO: 2425674 - DNA, 25 bp, Homo sapien
caatcttttcagtaaaaagccagaa

SEQ ID NO: 2425675 - DNA, 25 bp, Homo sapien
gatggtgttaatgcctgagagctgc

SEQ ID NO: 2425676 - DNA, 25 bp, Homo sapien
gcgagttgggggataactcagcatt

SEQ ID NO: 2425677 - DNA, 25 bp, Homo sapien
aacccacaattaaagctcggcgagt

SEQ ID NO: 2425678 - DNA, 25 bp, Homo sapien
ccacaattaaagctcggcgagttgg

SEQ ID NO: 2425679 - DNA, 25 bp, Homo sapien
gataagtgccataagggttgacttc

SEQ ID NO: 2425680 - DNA, 25 bp, Homo sapien
aatgataagtgccataagggttgac

SEQ ID NO: 2425681 - DNA, 25 bp, Homo sapien
gacaatgataagtgccataagggtt

SEQ ID NO: 2425682 - DNA, 25 bp, Homo sapien
taagtgccataagggttgacttcat

SEQ ID NO: 2425683 - DNA, 25 bp, Homo sapien
cagcactgctgacaaagacacattt

SEQ ID NO: 2425684 - DNA, 25 bp, Homo sapien
gcactgctgacaaagacacattttt

SEQ ID NO: 2425685 - DNA, 25 bp, Homo sapien
agcactgctgacaaagacacatttt

SEQ ID NO: 2425686 - DNA, 25 bp, Homo sapien
cactgctgacaaagacacatttttg

SEQ ID NO: 2425687 - DNA, 25 bp, Homo sapien
atcactgagctgagagttgtttgga

SEQ ID NO: 2425688 - DNA, 25 bp, Homo sapien
ttattcagagacatcactgagctga

SEQ ID NO: 2425689 - DNA, 25 bp, Homo sapien
acatcactgagctgagagttgtttg

SEQ ID NO: 2425690 - DNA, 25 bp, Homo sapien
ttcagagacatcactgagctgagag

SEQ ID NO: 2425691 - DNA, 25 bp, Homo sapien
acttggtaaacagcccaacagaccg

SEQ ID NO: 2425692 - DNA, 25 bp, Homo sapien
aacagaccgcatcacaagtgccagg

SEQ ID NO: 2425693 - DNA, 25 bp, Homo sapien
taagtgtgagatgtagaggccctaa

SEQ ID NO: 2425694 - DNA, 25 bp, Homo sapien
gggcgtcctggaaagtcatctgcca

SEQ ID NO: 2425695 - DNA, 25 bp, Homo sapien
aaatacaacaacctacgatccaggc

SEQ ID NO: 2425696 - DNA, 25 bp, Homo sapien
taagttacacttcctactcaccagc

SEQ ID NO: 2425697 - DNA, 25 bp, Homo sapien
caccagcttcgttcttcagtcttca

SEQ ID NO: 2425698 - DNA, 25 bp, Homo sapien
tagtgtatctcgtgcaaatgttaag

SEQ ID NO: 2425699 - DNA, 25 bp, Homo sapien
cttgcttgctctcttggtatgatga

SEQ ID NO: 2425700 - DNA, 25 bp, Homo sapien
gctctcttggtatgatgatggagtc

SEQ ID NO: 2425701 - DNA, 25 bp, Homo sapien
tgcttgctctcttggtatgatgatg

SEQ ID NO: 2425702 - DNA, 25 bp, Homo sapien
gcttgctctcttggtatgatgatgg

SEQ ID NO: 2425703 - DNA, 25 bp, Homo sapien
gtattttcacactagttgcccctcc

SEQ ID NO: 2425704 - DNA, 25 bp, Homo sapien
ttaggaaagaacagttactgggctc

SEQ ID NO: 2425705 - DNA, 25 bp, Homo sapien
tttattctaagagatgtgcagtggg

SEQ ID NO: 2425706 - DNA, 25 bp, Homo sapien
cattttcccagtacaacgtggatta

SEQ ID NO: 2425707 - DNA, 25 bp, Homo sapien
tttcttcagatagtatatgacatgg

SEQ ID NO: 2425708 - DNA, 25 bp, Homo sapien
gttgagttgtaaaccccaggtgtca

SEQ ID NO: 2425709 - DNA, 25 bp, Homo sapien
ggcaggtttcttcagatagtatatg

SEQ ID NO: 2425710 - DNA, 25 bp, Homo sapien
ctctgacggtttaaaactgtgtgac

SEQ ID NO: 2425711 - DNA, 25 bp, Homo sapien
taagacttcatgaccaaattgcaaa

SEQ ID NO: 2425712 - DNA, 25 bp, Homo sapien
gaaggtaggtaagacttcatgacca

SEQ ID NO: 2425713 - DNA, 25 bp, Homo sapien
acttcatgaccaaattgcaaaatta

SEQ ID NO: 2425714 - DNA, 25 bp, Homo sapien
aagacttcatgaccaaattgcaaaa

SEQ ID NO: 2425715 - DNA, 25 bp, Homo sapien
catctcctctcagggtacacttgtt

SEQ ID NO: 2425716 - DNA, 25 bp, Homo sapien
tctcctctcagggtacacttgttcg

SEQ ID NO: 2425717 - DNA, 25 bp, Homo sapien
atctcctctcagggtacacttgttc

SEQ ID NO: 2425718 - DNA, 25 bp, Homo sapien
catctgagataaaattctacgggcc

SEQ ID NO: 2425719 - DNA, 25 bp, Homo sapien
gccatcgagggctttcaggcaaaaa

SEQ ID NO: 2425720 - DNA, 25 bp, Homo sapien
ggtctggttaccacgcatctgagat

SEQ ID NO: 2425721 - DNA, 25 bp, Homo sapien
gtataaccgccggaactgctgcaag

SEQ ID NO: 2425722 - DNA, 25 bp, Homo sapien
ggcacgcgccactgctttcggccaa

SEQ ID NO: 2425723 - DNA, 25 bp, Homo sapien
cgcgccactgctttcggccaagtta

SEQ ID NO: 2425724 - DNA, 25 bp, Homo sapien
cacgcgccactgctttcggccaagt

SEQ ID NO: 2425725 - DNA, 25 bp, Homo sapien
cgccactgctttcggccaagttact

SEQ ID NO: 2425726 - DNA, 25 bp, Homo sapien
tgggtggtgagacctccgcaatgta

SEQ ID NO: 2425727 - DNA, 25 bp, Homo sapien
aatcggcctcttaaattgggtggtg

SEQ ID NO: 2425728 - DNA, 25 bp, Homo sapien
tgaaggctccatcaacaacacttgc

SEQ ID NO: 2425729 - DNA, 25 bp, Homo sapien
gtattaatggtgactaatcggcctc

SEQ ID NO: 2425730 - DNA, 25 bp, Homo sapien
acactgcagtgcgaccggattcaca

SEQ ID NO: 2425731 - DNA, 25 bp, Homo sapien
gcagtgcgaccggattcacacacta

SEQ ID NO: 2425732 - DNA, 25 bp, Homo sapien
tcagacactgcagtgcgaccggatt

SEQ ID NO: 2425733 - DNA, 25 bp, Homo sapien
gtgcgaccggattcacacactacca

SEQ ID NO: 2425734 - DNA, 25 bp, Homo sapien
gatttaaggtacactgaagcatagg

SEQ ID NO: 2425735 - DNA, 25 bp, Homo sapien
tacattctattaggcacggcaagta

SEQ ID NO: 2425736 - DNA, 25 bp, Homo sapien
tatactttagtcttgtgcaggaaac

SEQ ID NO: 2425737 - DNA, 25 bp, Homo sapien
tatacaagggaattgaacgtccaca

SEQ ID NO: 2425738 - DNA, 25 bp, Homo sapien
ggatcaatgatagccagtgtgcaca

SEQ ID NO: 2425739 - DNA, 25 bp, Homo sapien
tggatcaatgatagccagtgtgcac

SEQ ID NO: 2425740 - DNA, 25 bp, Homo sapien
aagttggagcctagcgttgatcaac

SEQ ID NO: 2425741 - DNA, 25 bp, Homo sapien
acaagttggagcctagcgttgatca

SEQ ID NO: 2425742 - DNA, 25 bp, Homo sapien
caagttggagcctagcgttgatcaa

SEQ ID NO: 2425743 - DNA, 25 bp, Homo sapien
ttcctctaatctcaggccgtttgct

SEQ ID NO: 2425744 - DNA, 25 bp, Homo sapien
aattgcttggtagctctgacagtga

SEQ ID NO: 2425745 - DNA, 25 bp, Homo sapien
gatttcctctaatctcaggccgttt

SEQ ID NO: 2425746 - DNA, 25 bp, Homo sapien
acccagtcctcagattgatttcctc

SEQ ID NO: 2425747 - DNA, 25 bp, Homo sapien
gccacagcgacacattctcaggaat

SEQ ID NO: 2425748 - DNA, 25 bp, Homo sapien
tgaagaagtaaaaaactcactgcct

SEQ ID NO: 2425749 - DNA, 25 bp, Homo sapien
cactgcctcagaatctttagtaaga

SEQ ID NO: 2425750 - DNA, 25 bp, Homo sapien
cagactctaatgatctcttgcacag

SEQ ID NO: 2425751 - DNA, 25 bp, Homo sapien
tcaagcctctttacagtctgggtga

SEQ ID NO: 2425752 - DNA, 25 bp, Homo sapien
gggtgaactacgactccaatgcctt

SEQ ID NO: 2425753 - DNA, 25 bp, Homo sapien
caagtctgtgaatcagtaatccctc

SEQ ID NO: 2425754 - DNA, 25 bp, Homo sapien
ccaggttcaaacacgaagatgcaag

SEQ ID NO: 2425755 - DNA, 25 bp, Homo sapien
tgtagaactttcctcaatcctgtgt

SEQ ID NO: 2425756 - DNA, 25 bp, Homo sapien
caccaggtctcgaacatactaaagc

SEQ ID NO: 2425757 - DNA, 25 bp, Homo sapien
taaaatgaacacctccagggtggga

SEQ ID NO: 2425758 - DNA, 25 bp, Homo sapien
tactgcctgccccatatctgacagg

SEQ ID NO: 2425759 - DNA, 25 bp, Homo sapien
cttccctctgttggagataactgta

SEQ ID NO: 2425760 - DNA, 25 bp, Homo sapien
ggagataactgtaccccctctgaat

SEQ ID NO: 2425761 - DNA, 25 bp, Homo sapien
gagataactgtaccccctctgaatt

SEQ ID NO: 2425762 - DNA, 25 bp, Homo sapien
tggcttccctctgttggagataact

SEQ ID NO: 2425763 - DNA, 25 bp, Homo sapien
ttgttggccgcagccagcaccgcgg

SEQ ID NO: 2425764 - DNA, 25 bp, Homo sapien
gtctccttgttgttggccgcagcca

SEQ ID NO: 2425765 - DNA, 25 bp, Homo sapien
cggccggcgagcagtgtctccttgt

SEQ ID NO: 2425766 - DNA, 25 bp, Homo sapien
ggcgagcagtgtctccttgttgttg

SEQ ID NO: 2425767 - DNA, 25 bp, Homo sapien
cgaagacgccgttgagggcgcctcc

SEQ ID NO: 2425768 - DNA, 25 bp, Homo sapien
agctcctgccacagcgcgtccagac

SEQ ID NO: 2425769 - DNA, 25 bp, Homo sapien
cgcggcggccgaagacgccgttgag

SEQ ID NO: 2425770 - DNA, 25 bp, Homo sapien
cgtccagactgagctgccgcttgag

SEQ ID NO: 2425771 - DNA, 25 bp, Homo sapien
cccggtgtcatagccaaacaggaag

SEQ ID NO: 2425772 - DNA, 25 bp, Homo sapien
cacgtacacgaaggcgggggtctcg

SEQ ID NO: 2425773 - DNA, 25 bp, Homo sapien
accaccccggtgtcatagccaaaca

SEQ ID NO: 2425774 - DNA, 25 bp, Homo sapien
caccccggtgtcatagccaaacagg

SEQ ID NO: 2425775 - DNA, 25 bp, Homo sapien
ctggtgctcgattcggcggcagcca

SEQ ID NO: 2425776 - DNA, 25 bp, Homo sapien
caggctggtgctcgattcggcggca

SEQ ID NO: 2425777 - DNA, 25 bp, Homo sapien
ccggctgcttcctgcgccgctcgcc

SEQ ID NO: 2425778 - DNA, 25 bp, Homo sapien
ctgcaggctggtgctcgattcggcg

SEQ ID NO: 2425779 - DNA, 25 bp, Homo sapien
acattctcgcttgccttgcgggaca

SEQ ID NO: 2425780 - DNA, 25 bp, Homo sapien
gctcaggctccgcagcgtgtactcc

SEQ ID NO: 2425781 - DNA, 25 bp, Homo sapien
ggctccgcagcgtgtactccacatt

SEQ ID NO: 2425782 - DNA, 25 bp, Homo sapien
gtactccacattctcgcttgccttg

SEQ ID NO: 2425783 - DNA, 25 bp, Homo sapien
gccgcgctccgacgctgcggagttg

SEQ ID NO: 2425784 - DNA, 25 bp, Homo sapien
tctcggcgagctagacagcccgagc

SEQ ID NO: 2425785 - DNA, 25 bp, Homo sapien
ggagaaagttgctgcccgccgcgct

SEQ ID NO: 2425786 - DNA, 25 bp, Homo sapien
gagccggcgggagcaaccgccgctg

SEQ ID NO: 2425787 - DNA, 25 bp, Homo sapien
agaacctttctttgacttgctgtaa

SEQ ID NO: 2425788 - DNA, 25 bp, Homo sapien
acaagaacctttctttgacttgctg

SEQ ID NO: 2425789 - DNA, 25 bp, Homo sapien
aagaacctttctttgacttgctgta

SEQ ID NO: 2425790 - DNA, 25 bp, Homo sapien
cccacaagaacctttctttgacttg

SEQ ID NO: 2425791 - DNA, 25 bp, Homo sapien
ttggatttctgctttggtactccct

SEQ ID NO: 2425792 - DNA, 25 bp, Homo sapien
gatttctgctttggtactccctgat

SEQ ID NO: 2425793 - DNA, 25 bp, Homo sapien
ggatttctgctttggtactccctga

SEQ ID NO: 2425794 - DNA, 25 bp, Homo sapien
ttctgctttggtactccctgatctt

SEQ ID NO: 2425795 - DNA, 25 bp, Homo sapien
gcagtctgacaagattccctaggaa

SEQ ID NO: 2425796 - DNA, 25 bp, Homo sapien
gaacatcggaaatagtgcctgcact

SEQ ID NO: 2425797 - DNA, 25 bp, Homo sapien
gagagcccttcctattcacaactga

SEQ ID NO: 2425798 - DNA, 25 bp, Homo sapien
tgaaattttgcttatccaccggaga

SEQ ID NO: 2425799 - DNA, 25 bp, Homo sapien
tatgagaatatcataccacagcaca

SEQ ID NO: 2425800 - DNA, 25 bp, Homo sapien
gataaaggataagtgcagtttcagc

SEQ ID NO: 2425801 - DNA, 25 bp, Homo sapien
agaatatcataccacagcacagttg

SEQ ID NO: 2425802 - DNA, 25 bp, Homo sapien
taaaggataagtgcagtttcagcga

SEQ ID NO: 2425803 - DNA, 25 bp, Homo sapien
tattcctctaatggctcctgtgtgc

SEQ ID NO: 2425804 - DNA, 25 bp, Homo sapien
tgacccttgaacgatacgagattga

SEQ ID NO: 2425805 - DNA, 25 bp, Homo sapien
tctgcctcttagtgatgcctttggg

SEQ ID NO: 2425806 - DNA, 25 bp, Homo sapien
ggactgggaacctggcatcacacag

SEQ ID NO: 2425807 - DNA, 25 bp, Homo sapien
cccaatatccaggttgagtaggagt

SEQ ID NO: 2425808 - DNA, 25 bp, Homo sapien
tgtaattcagtagaacaggaaggga

SEQ ID NO: 2425809 - DNA, 25 bp, Homo sapien
taaagtggtagagcatgaagaacct

SEQ ID NO: 2425810 - DNA, 25 bp, Homo sapien
tgaagaaccttctacctggagttag

SEQ ID NO: 2425811 - DNA, 25 bp, Homo sapien
aggatccccggctggcgggtcgcgg

SEQ ID NO: 2425812 - DNA, 25 bp, Homo sapien
gcctgtggactcagcggagtccgct

SEQ ID NO: 2425813 - DNA, 25 bp, Homo sapien
cagaccttccgtggggccgcaggat

SEQ ID NO: 2425814 - DNA, 25 bp, Homo sapien
tgagtcagtttcttcccgcgcgact

SEQ ID NO: 2425815 - DNA, 25 bp, Homo sapien
tagtcaggctgaacaatgtccagga

SEQ ID NO: 2425816 - DNA, 25 bp, Homo sapien
gatagaaacgctggtccaaatcctg

SEQ ID NO: 2425817 - DNA, 25 bp, Homo sapien
cctatatgagagtcgcgagtgtgca

SEQ ID NO: 2425818 - DNA, 25 bp, Homo sapien
tccgagcgcggtaatcacttgaaaa

SEQ ID NO: 2425819 - DNA, 25 bp, Homo sapien
ataaccatgatttcactggcagctg

SEQ ID NO: 2425820 - DNA, 25 bp, Homo sapien
tgtgagctcatcctaccgggcttcg

SEQ ID NO: 2425821 - DNA, 25 bp, Homo sapien
tagtgtaagccatagtatcagttgc

SEQ ID NO: 2425822 - DNA, 25 bp, Homo sapien
gcagctggtctgagtaaagaacact

SEQ ID NO: 2425823 - DNA, 25 bp, Homo sapien
gagctcatgctattggagaaatggt

SEQ ID NO: 2425824 - DNA, 25 bp, Homo sapien
tagagttggtagtcacagggttgcc

SEQ ID NO: 2425825 - DNA, 25 bp, Homo sapien
tacaaagacctgaagtgagctcatg

SEQ ID NO: 2425826 - DNA, 25 bp, Homo sapien
tggtttcaatagagttggtagtcac

SEQ ID NO: 2425827 - DNA, 25 bp, Homo sapien
accatcgatccaagctcattagcct

SEQ ID NO: 2425828 - DNA, 25 bp, Homo sapien
cttgtactgtggtaaggatgtgcac

SEQ ID NO: 2425829 - DNA, 25 bp, Homo sapien
tgcactctgagtgaggtctcaagag

SEQ ID NO: 2425830 - DNA, 25 bp, Homo sapien
ccatcgatccaagctcattagcctt

SEQ ID NO: 2425831 - DNA, 25 bp, Homo sapien
taaatctttcaacggccgcatcttt

SEQ ID NO: 2425832 - DNA, 25 bp, Homo sapien
tctttcaacggccgcatctttttct

SEQ ID NO: 2425833 - DNA, 25 bp, Homo sapien
tataaatctttcaacggccgcatct

SEQ ID NO: 2425834 - DNA, 25 bp, Homo sapien
ttcaacggccgcatctttttctttg

SEQ ID NO: 2425835 - DNA, 25 bp, Homo sapien
gacaagtggacaatcggttacagga

SEQ ID NO: 2425836 - DNA, 25 bp, Homo sapien
cagttgcagtgacaaggacttctga

SEQ ID NO: 2425837 - DNA, 25 bp, Homo sapien
tgaacaatcgtcaggagtcacggtg

SEQ ID NO: 2425838 - DNA, 25 bp, Homo sapien
ggacaatcaggccaaggatcaggga

SEQ ID NO: 2425839 - DNA, 25 bp, Homo sapien
acaggactgttggttgaaggatcag

SEQ ID NO: 2425840 - DNA, 25 bp, Homo sapien
caacaggactgttggttgaaggatc

SEQ ID NO: 2425841 - DNA, 25 bp, Homo sapien
aatgacaacaggactgttggttgaa

SEQ ID NO: 2425842 - DNA, 25 bp, Homo sapien
gacaacaggactgttggttgaagga

SEQ ID NO: 2425843 - DNA, 25 bp, Homo sapien
catcaggtggagaaacagagacaac

SEQ ID NO: 2425844 - DNA, 25 bp, Homo sapien
tactggattgacagggacatctgca

SEQ ID NO: 2425845 - DNA, 25 bp, Homo sapien
gaaacagttggagcatcagctggag

SEQ ID NO: 2425846 - DNA, 25 bp, Homo sapien
ggatcagggacaactggaccaccta

SEQ ID NO: 2425847 - DNA, 25 bp, Homo sapien
gctgcagtatcagggacaactgtac

SEQ ID NO: 2425848 - DNA, 25 bp, Homo sapien
tcagacaactggatcatcagctgca

SEQ ID NO: 2425849 - DNA, 25 bp, Homo sapien
tcagctgcagtatcagggacaactg

SEQ ID NO: 2425850 - DNA, 25 bp, Homo sapien
catcagctgcagtatcagggacaac

SEQ ID NO: 2425851 - DNA, 25 bp, Homo sapien
atctcttacagtatcagggaccact

SEQ ID NO: 2425852 - DNA, 25 bp, Homo sapien
tctcttacagtatcagggaccacta

SEQ ID NO: 2425853 - DNA, 25 bp, Homo sapien
cttacagtatcagggaccactagac

SEQ ID NO: 2425854 - DNA, 25 bp, Homo sapien
tcttacagtatcagggaccactaga

SEQ ID NO: 2425855 - DNA, 25 bp, Homo sapien
gtcagggactactggaccaacagct

SEQ ID NO: 2425856 - DNA, 25 bp, Homo sapien
aggacaacaagatcatcagctgggc

SEQ ID NO: 2425857 - DNA, 25 bp, Homo sapien
ctggagtaacaggtacaactggaac

SEQ ID NO: 2425858 - DNA, 25 bp, Homo sapien
gaaaactggatcatcagcaagagtg

SEQ ID NO: 2425859 - DNA, 25 bp, Homo sapien
cagagacaactggacagtcagctaa

SEQ ID NO: 2425860 - DNA, 25 bp, Homo sapien
tatcagctgtgacaggaatgactgg

SEQ ID NO: 2425861 - DNA, 25 bp, Homo sapien
gactatcagctgtgacaggaatgac

SEQ ID NO: 2425862 - DNA, 25 bp, Homo sapien
atggactatcagctgtgacaggaat

SEQ ID NO: 2425863 - DNA, 25 bp, Homo sapien
tcagctgtgacaggaatgactggac

SEQ ID NO: 2425864 - DNA, 25 bp, Homo sapien
tgactgggataactgggctatcagc

SEQ ID NO: 2425865 - DNA, 25 bp, Homo sapien
gggacaagtggactatcagctgaag

SEQ ID NO: 2425866 - DNA, 25 bp, Homo sapien
aactggactatctgctggagtgaca

SEQ ID NO: 2425867 - DNA, 25 bp, Homo sapien
tatcagctatagtgacagagacaac

SEQ ID NO: 2425868 - DNA, 25 bp, Homo sapien
tggaataacgggtacaaatggacta

SEQ ID NO: 2425869 - DNA, 25 bp, Homo sapien
ctggaataacgggtacaaatggact

SEQ ID NO: 2425870 - DNA, 25 bp, Homo sapien
gaataacgggtacaaatggactatc

SEQ ID NO: 2425871 - DNA, 25 bp, Homo sapien
ataacgggtacaaatggactatcag

SEQ ID NO: 2425872 - DNA, 25 bp, Homo sapien
aacagttggatcatcagctgtggta

SEQ ID NO: 2425873 - DNA, 25 bp, Homo sapien
gaggtgacagggacaattggatcac

SEQ ID NO: 2425874 - DNA, 25 bp, Homo sapien
ctgaggtgacagggacaattggatc

SEQ ID NO: 2425875 - DNA, 25 bp, Homo sapien
gtgacagggacaattggatcaccag

SEQ ID NO: 2425876 - DNA, 25 bp, Homo sapien
ggtgacagggacaattggatcacca

SEQ ID NO: 2425877 - DNA, 25 bp, Homo sapien
ggacaactggactatcagctggggt

SEQ ID NO: 2425878 - DNA, 25 bp, Homo sapien
agggacaattggactatcagctggg

SEQ ID NO: 2425879 - DNA, 25 bp, Homo sapien
gacaactggactatcagctggggtg

SEQ ID NO: 2425880 - DNA, 25 bp, Homo sapien
aactggactatcagctggggtgaca

SEQ ID NO: 2425881 - DNA, 25 bp, Homo sapien
ggttgaagaatcaagggcaaccaga

SEQ ID NO: 2425882 - DNA, 25 bp, Homo sapien
catcagctgaagtcacagggacaac

SEQ ID NO: 2425883 - DNA, 25 bp, Homo sapien
gagtgacagggacaaatggactatc

SEQ ID NO: 2425884 - DNA, 25 bp, Homo sapien
caactggaccatcaggtggagtgac

SEQ ID NO: 2425885 - DNA, 25 bp, Homo sapien
gtgacaggaacaactggcccatcag

SEQ ID NO: 2425886 - DNA, 25 bp, Homo sapien
gctgcagtgacagggacaattcggc

SEQ ID NO: 2425887 - DNA, 25 bp, Homo sapien
tgcagtgacagggacaattcggcca

SEQ ID NO: 2425888 - DNA, 25 bp, Homo sapien
ctggggtgacaggtacaaatgcact

SEQ ID NO: 2425889 - DNA, 25 bp, Homo sapien
gggtgacaggtacaaatgcactatc

SEQ ID NO: 2425890 - DNA, 25 bp, Homo sapien
gggaaaactgaactatcagcagaag

SEQ ID NO: 2425891 - DNA, 25 bp, Homo sapien
cagggataagtggactatcagctga

SEQ ID NO: 2425892 - DNA, 25 bp, Homo sapien
atcagctgtggtgacagggataagt

SEQ ID NO: 2425893 - DNA, 25 bp, Homo sapien
tggtgacagggataagtggactatc

SEQ ID NO: 2425894 - DNA, 25 bp, Homo sapien
ataagtggactatcagctgaggtga

SEQ ID NO: 2425895 - DNA, 25 bp, Homo sapien
ggaatagctgcactatcagctggag

SEQ ID NO: 2425896 - DNA, 25 bp, Homo sapien
cagggaagactagatcatcagctgg

SEQ ID NO: 2425897 - DNA, 25 bp, Homo sapien
aatctgggacaagtataccatcagc

SEQ ID NO: 2425898 - DNA, 25 bp, Homo sapien
taacatggacacctggaccatctgc

SEQ ID NO: 2425899 - DNA, 25 bp, Homo sapien
tgtggtgtggtccaacataagcgtg

SEQ ID NO: 2425900 - DNA, 25 bp, Homo sapien
tactgtggtgtggtccaacataagc

SEQ ID NO: 2425901 - DNA, 25 bp, Homo sapien
ctgggtactgtggtgtggtccaaca

SEQ ID NO: 2425902 - DNA, 25 bp, Homo sapien
ggtactgtggtgtggtccaacataa

SEQ ID NO: 2425903 - DNA, 25 bp, Homo sapien
cgtaatgagtatattgtaaataagg

SEQ ID NO: 2425904 - DNA, 25 bp, Homo sapien
aatcagaaagtcagatccaaatcat

SEQ ID NO: 2425905 - DNA, 25 bp, Homo sapien
ggttttctgatcaatgtaattatcg

SEQ ID NO: 2425906 - DNA, 25 bp, Homo sapien
ccaaatcatctattaggttcgtgca

SEQ ID NO: 2425907 - DNA, 25 bp, Homo sapien
ataagaacactgctcctgactttac

SEQ ID NO: 2425908 - DNA, 25 bp, Homo sapien
caaagtagttatgttgataaatatc

SEQ ID NO: 2425909 - DNA, 25 bp, Homo sapien
tatctggatagtgctccaataaaat

SEQ ID NO: 2425910 - DNA, 25 bp, Homo sapien
caataaaataagaacactgctcctg

SEQ ID NO: 2425911 - DNA, 25 bp, Homo sapien
ctttttaatctcagttgccacggga

SEQ ID NO: 2425912 - DNA, 25 bp, Homo sapien
ttttaatctcagttgccacgggagc

SEQ ID NO: 2425913 - DNA, 25 bp, Homo sapien
actttttaatctcagttgccacggg

SEQ ID NO: 2425914 - DNA, 25 bp, Homo sapien
ttaatctcagttgccacgggagcca

SEQ ID NO: 2425915 - DNA, 25 bp, Homo sapien
tttcttgtgaagatttatgccgcat

SEQ ID NO: 2425916 - DNA, 25 bp, Homo sapien
ttttttttcttgtgaagatttatgc

SEQ ID NO: 2425917 - DNA, 25 bp, Homo sapien
ttttttcttgtgaagatttatgccg

SEQ ID NO: 2425918 - DNA, 25 bp, Homo sapien
ttttcttgtgaagatttatgccgca

SEQ ID NO: 2425919 - DNA, 25 bp, Homo sapien
aacaaacactcaatacagctgaaat

SEQ ID NO: 2425920 - DNA, 25 bp, Homo sapien
ctcaatacagctgaaatatgtttag

SEQ ID NO: 2425921 - DNA, 25 bp, Homo sapien
gggagctttgtgtataacaaacact

SEQ ID NO: 2425922 - DNA, 25 bp, Homo sapien
tgtgtataacaaacactcaatacag

SEQ ID NO: 2425923 - DNA, 25 bp, Homo sapien
tccttatactagggccatgctaata

SEQ ID NO: 2425924 - DNA, 25 bp, Homo sapien
ttgtgtcatccttatactagggcca

SEQ ID NO: 2425925 - DNA, 25 bp, Homo sapien
tttgtgtcatccttatactagggcc

SEQ ID NO: 2425926 - DNA, 25 bp, Homo sapien
ttttgtgtcatccttatactagggc

SEQ ID NO: 2425927 - DNA, 25 bp, Homo sapien
tagaaccattggatcaacacagatt

SEQ ID NO: 2425928 - DNA, 25 bp, Homo sapien
ttaccgaaaacttgataatctgaac

SEQ ID NO: 2425929 - DNA, 25 bp, Homo sapien
cacagattatgagttgaacattgag

SEQ ID NO: 2425930 - DNA, 25 bp, Homo sapien
tctagagttatcaggtcttaggtca

SEQ ID NO: 2425931 - DNA, 25 bp, Homo sapien
cagagaccctggctggttctccgac

SEQ ID NO: 2425932 - DNA, 25 bp, Homo sapien
agttacttgatgctgacctccagct

SEQ ID NO: 2425933 - DNA, 25 bp, Homo sapien
ggctggttctccgactctctcttac

SEQ ID NO: 2425934 - DNA, 25 bp, Homo sapien
gatgctgacctccagctacagtcct

SEQ ID NO: 2425935 - DNA, 25 bp, Homo sapien
tagtcagtgttgtgattatttacac

SEQ ID NO: 2425936 - DNA, 25 bp, Homo sapien
catagtcagtgttgtgattatttac

SEQ ID NO: 2425937 - DNA, 25 bp, Homo sapien
accatagtcagtgttgtgattattt

SEQ ID NO: 2425938 - DNA, 25 bp, Homo sapien
tcagtgttgtgattatttacacatg

SEQ ID NO: 2425939 - DNA, 25 bp, Homo sapien
ggtaatgctatttcagattggtcac

SEQ ID NO: 2425940 - DNA, 25 bp, Homo sapien
tgctatttcagattggtcacgttgt

SEQ ID NO: 2425941 - DNA, 25 bp, Homo sapien
taatgctatttcagattggtcacgt

SEQ ID NO: 2425942 - DNA, 25 bp, Homo sapien
tttcagattggtcacgttgttgttc

SEQ ID NO: 2425943 - DNA, 25 bp, Homo sapien
ctccactggagacctttttggaaga

SEQ ID NO: 2425944 - DNA, 25 bp, Homo sapien
tgtccccttgctctggacagcttta

SEQ ID NO: 2425945 - DNA, 25 bp, Homo sapien
tccactggagacctttttggaagag

SEQ ID NO: 2425946 - DNA, 25 bp, Homo sapien
tctggacagctttatctgcttgctt

SEQ ID NO: 2425947 - DNA, 25 bp, Homo sapien
tcctggtgaggagcaatatgacggc

SEQ ID NO: 2425948 - DNA, 25 bp, Homo sapien
atatgacggccagaagagagagcac

SEQ ID NO: 2425949 - DNA, 25 bp, Homo sapien
caaggctatgtaatggactcccaaa

SEQ ID NO: 2425950 - DNA, 25 bp, Homo sapien
caaatctgtgggtactgcaatggct

SEQ ID NO: 2425951 - DNA, 25 bp, Homo sapien
gactgggtttagcatgactctcttt

SEQ ID NO: 2425952 - DNA, 25 bp, Homo sapien
ctgcagactgggtttagcatgactc

SEQ ID NO: 2425953 - DNA, 25 bp, Homo sapien
gctgacgtgatctctgagatgctgc

SEQ ID NO: 2425954 - DNA, 25 bp, Homo sapien
tcagtgagctgacgtgatctctgag

SEQ ID NO: 2425955 - DNA, 25 bp, Homo sapien
ttctgctgtggtaattgcagcttaa

SEQ ID NO: 2425956 - DNA, 25 bp, Homo sapien
tatgttagaaattgttctgggaagc

SEQ ID NO: 2425957 - DNA, 25 bp, Homo sapien
gcttttttgccatatcgagtatgtt

SEQ ID NO: 2425958 - DNA, 25 bp, Homo sapien
ctttctgctgtggtaattgcagctt

SEQ ID NO: 2425959 - DNA, 25 bp, Homo sapien
gtaaccactaagtagagtctatatt

SEQ ID NO: 2425960 - DNA, 25 bp, Homo sapien
tgatagtaataacaaccgtaaccac

SEQ ID NO: 2425961 - DNA, 25 bp, Homo sapien
cccaagcctgtcataagctctttga

SEQ ID NO: 2425962 - DNA, 25 bp, Homo sapien
taacagttgtccagtgtcccaagcc

SEQ ID NO: 2425963 - DNA, 25 bp, Homo sapien
agcagctacccaagtctgcagcctg

SEQ ID NO: 2425964 - DNA, 25 bp, Homo sapien
tctccagcaagggtccttgatccgg

SEQ ID NO: 2425965 - DNA, 25 bp, Homo sapien
gtttagcagctacccaagtctgcag

SEQ ID NO: 2425966 - DNA, 25 bp, Homo sapien
tccggtagcagcaggtttgggtttc

SEQ ID NO: 2425967 - DNA, 25 bp, Homo sapien
tttgcagcggaagtgggaaacctgt

SEQ ID NO: 2425968 - DNA, 25 bp, Homo sapien
tctgctgtcaagtagccagggtggg

SEQ ID NO: 2425969 - DNA, 25 bp, Homo sapien
tagggtatggtccagctgtgccgca

SEQ ID NO: 2425970 - DNA, 25 bp, Homo sapien
tgctgccccaataaccgccctaaaa

SEQ ID NO: 2425971 - DNA, 25 bp, Homo sapien
gaacaggtaggaagctggacttttc

SEQ ID NO: 2425972 - DNA, 25 bp, Homo sapien
caggtaggaagctggacttttcctt

SEQ ID NO: 2425973 - DNA, 25 bp, Homo sapien
acaggtaggaagctggacttttcct

SEQ ID NO: 2425974 - DNA, 25 bp, Homo sapien
taaaataaagaatgcgcatttccat

SEQ ID NO: 2425975 - DNA, 25 bp, Homo sapien
agggatgccatatcgcctcggcagg

SEQ ID NO: 2425976 - DNA, 25 bp, Homo sapien
tgccctagaagagggctccgagctc

SEQ ID NO: 2425977 - DNA, 25 bp, Homo sapien
tcaactttcctttcggaggctgccg

SEQ ID NO: 2425978 - DNA, 25 bp, Homo sapien
aaggcaggacggcagtgccctagaa

SEQ ID NO: 2425979 - DNA, 25 bp, Homo sapien
taggtgttggcccagtgccggttcc

SEQ ID NO: 2425980 - DNA, 25 bp, Homo sapien
gaaactctcctgtccaccatttgtt

SEQ ID NO: 2425981 - DNA, 25 bp, Homo sapien
tgtagaaactctcctgtccaccatt

SEQ ID NO: 2425982 - DNA, 25 bp, Homo sapien
tcctgtccaccatttgttactaaag

SEQ ID NO: 2425983 - DNA, 25 bp, Homo sapien
ggaaatcacattgcttgccatcttt

SEQ ID NO: 2425984 - DNA, 25 bp, Homo sapien
tgcggcgagcaggacaaattattct

SEQ ID NO: 2425985 - DNA, 25 bp, Homo sapien
taaccagttgaggtattcacaagca

SEQ ID NO: 2425986 - DNA, 25 bp, Homo sapien
actgtattatgggaatgcggcgagc

SEQ ID NO: 2425987 - DNA, 25 bp, Homo sapien
caggcactgagtgaagcattagcat

SEQ ID NO: 2425988 - DNA, 25 bp, Homo sapien
ttttgctgatcttcccacatgtgtg

SEQ ID NO: 2425989 - DNA, 25 bp, Homo sapien
cagggctagtgttaatagcatgcac

SEQ ID NO: 2425990 - DNA, 25 bp, Homo sapien
tatattaaggaagtctagcagctgc

SEQ ID NO: 2425991 - DNA, 25 bp, Homo sapien
cacatgtgtgctgcccagggctagt

SEQ ID NO: 2425992 - DNA, 25 bp, Homo sapien
aacatgggtacaagtggagtggtca

SEQ ID NO: 2425993 - DNA, 25 bp, Homo sapien
ccagtgtcccttgcagagaagattc

SEQ ID NO: 2425994 - DNA, 25 bp, Homo sapien
cctctccaggttgttcacagtggca

SEQ ID NO: 2425995 - DNA, 25 bp, Homo sapien
tggaatcatagagccagtggtctgg

SEQ ID NO: 2425996 - DNA, 25 bp, Homo sapien
gacagggtttgtgaagtcgcctcag

SEQ ID NO: 2425997 - DNA, 25 bp, Homo sapien
gaggtgatcaatagcccattactgg

SEQ ID NO: 2425998 - DNA, 25 bp, Homo sapien
cattactggatagaacagcgactac

SEQ ID NO: 2425999 - DNA, 25 bp, Homo sapien
tagtctccgaacagaatgacagggt

SEQ ID NO: 2426000 - DNA, 25 bp, Homo sapien
tagctcagttgaaccattccacagt

SEQ ID NO: 2426001 - DNA, 25 bp, Homo sapien
aaaatggaaggctggatgacacaca

SEQ ID NO: 2426002 - DNA, 25 bp, Homo sapien
ggtcaaaggacacaacatgtcagct

SEQ ID NO: 2426003 - DNA, 25 bp, Homo sapien
gtcagctaagtaagaggaataattt

SEQ ID NO: 2426004 - DNA, 25 bp, Homo sapien
ccagtgggcgttcaggcctgtgcca

SEQ ID NO: 2426005 - DNA, 25 bp, Homo sapien
tcactccacagcgtcttgccagtgg

SEQ ID NO: 2426006 - DNA, 25 bp, Homo sapien
tccacagcgtcttgccagtgggcgt

SEQ ID NO: 2426007 - DNA, 25 bp, Homo sapien
cgtcttgccagtgggcgttcaggcc

SEQ ID NO: 2426008 - DNA, 25 bp, Homo sapien
agccccgtaatttccccagtatctg

SEQ ID NO: 2426009 - DNA, 25 bp, Homo sapien
cacagagctgcatgaggttgtgaga

SEQ ID NO: 2426010 - DNA, 25 bp, Homo sapien
acagagctgcatgaggttgtgagat

SEQ ID NO: 2426011 - DNA, 25 bp, Homo sapien
ctgcatgaggttgtgagatgcagca

SEQ ID NO: 2426012 - DNA, 25 bp, Homo sapien
gagctgcatgaggttgtgagatgca

SEQ ID NO: 2426013 - DNA, 25 bp, Homo sapien
cctggctgggtgtacaagaggtcac

SEQ ID NO: 2426014 - DNA, 25 bp, Homo sapien
tgtacaagaggtcacagggctctga

SEQ ID NO: 2426015 - DNA, 25 bp, Homo sapien
tgaaggctgacacgttcagggagct

SEQ ID NO: 2426016 - DNA, 25 bp, Homo sapien
tcagttgttgagaagaaacaagtct

SEQ ID NO: 2426017 - DNA, 25 bp, Homo sapien
taggacctgtaacataagactgagt

SEQ ID NO: 2426018 - DNA, 25 bp, Homo sapien
gatccatgggttgggtctaggacct

SEQ ID NO: 2426019 - DNA, 25 bp, Homo sapien
tgcgttagaaccagtgagaagcctt

SEQ ID NO: 2426020 - DNA, 25 bp, Homo sapien
taaagaaataccaggactcactcag

SEQ ID NO: 2426021 - DNA, 25 bp, Homo sapien
tatgaagacatttagggctcacaat

SEQ ID NO: 2426022 - DNA, 25 bp, Homo sapien
gaagattgcattaggtacaagtcca

SEQ ID NO: 2426023 - DNA, 25 bp, Homo sapien
caaacaggttgcaaggaacttggct

SEQ ID NO: 2426024 - DNA, 25 bp, Homo sapien
ggatccaatagttcctaccagggct

SEQ ID NO: 2426025 - DNA, 25 bp, Homo sapien
gcatcactctccatatagcgggaat

SEQ ID NO: 2426026 - DNA, 25 bp, Homo sapien
tcactctccatatagcgggaattct

SEQ ID NO: 2426027 - DNA, 25 bp, Homo sapien
actctccatatagcgggaattctcc

SEQ ID NO: 2426028 - DNA, 25 bp, Homo sapien
catcactctccatatagcgggaatt

SEQ ID NO: 2426029 - DNA, 25 bp, Homo sapien
tttggcatccttgtctacttggaat

SEQ ID NO: 2426030 - DNA, 25 bp, Homo sapien
cctttggcatccttgtctacttgga

SEQ ID NO: 2426031 - DNA, 25 bp, Homo sapien
tggcatccttgtctacttggaattc

SEQ ID NO: 2426032 - DNA, 25 bp, Homo sapien
ggcatccttgtctacttggaattct

SEQ ID NO: 2426033 - DNA, 25 bp, Homo sapien
ataaccacaggaagccctttgacct

SEQ ID NO: 2426034 - DNA, 25 bp, Homo sapien
ccctttgacctccaggttgtcccat

SEQ ID NO: 2426035 - DNA, 25 bp, Homo sapien
gagctgcctcagacagatgtctgtc

SEQ ID NO: 2426036 - DNA, 25 bp, Homo sapien
agctgcctcagacagatgtctgtcc

SEQ ID NO: 2426037 - DNA, 25 bp, Homo sapien
gtctccattgagatgaataactcac

SEQ ID NO: 2426038 - DNA, 25 bp, Homo sapien
cctagactcgtagtagaaatgtctc

SEQ ID NO: 2426039 - DNA, 25 bp, Homo sapien
tactacatgagctgattttaagccc

SEQ ID NO: 2426040 - DNA, 25 bp, Homo sapien
catgcacaatttctcgggagcttgc

SEQ ID NO: 2426041 - DNA, 25 bp, Homo sapien
tccaggaacgatactcacaggtatg

SEQ ID NO: 2426042 - DNA, 25 bp, Homo sapien
caggaacgatactcacaggtatgca

SEQ ID NO: 2426043 - DNA, 25 bp, Homo sapien
aacgatactcacaggtatgcagtct

SEQ ID NO: 2426044 - DNA, 25 bp, Homo sapien
tttccaggaacgatactcacaggta

SEQ ID NO: 2426045 - DNA, 25 bp, Homo sapien
agttttgccaatattcatgtatgag

SEQ ID NO: 2426046 - DNA, 25 bp, Homo sapien
aaaaggtttgtatcaatgttactgc

SEQ ID NO: 2426047 - DNA, 25 bp, Homo sapien
aaatgtggcattgactcagtagagg

SEQ ID NO: 2426048 - DNA, 25 bp, Homo sapien
gaagcctggtgacttttgttaagaa

SEQ ID NO: 2426049 - DNA, 25 bp, Homo sapien
tctcgtctgtttcatcctccgtggc

SEQ ID NO: 2426050 - DNA, 25 bp, Homo sapien
ggtctcgtctgtttcatcctccgtg

SEQ ID NO: 2426051 - DNA, 25 bp, Homo sapien
tcgtctgtttcatcctccgtggcca

SEQ ID NO: 2426052 - DNA, 25 bp, Homo sapien
cgtctgtttcatcctccgtggccat

SEQ ID NO: 2426053 - DNA, 25 bp, Homo sapien
cactcccgactagactgcagatgct

SEQ ID NO: 2426054 - DNA, 25 bp, Homo sapien
ctctccactcccgactagactgcag

SEQ ID NO: 2426055 - DNA, 25 bp, Homo sapien
gactgcagatgctcaggacctccat

SEQ ID NO: 2426056 - DNA, 25 bp, Homo sapien
tccactcccgactagactgcagatg

SEQ ID NO: 2426057 - DNA, 25 bp, Homo sapien
ggacagccaaaaacttaatcaaatc

SEQ ID NO: 2426058 - DNA, 25 bp, Homo sapien
gactggattagagttcctccaatta

SEQ ID NO: 2426059 - DNA, 25 bp, Homo sapien
ctggcaaggacgtccaccgggacag

SEQ ID NO: 2426060 - DNA, 25 bp, Homo sapien
gtggtctcctgtagcaccccgttct

SEQ ID NO: 2426061 - DNA, 25 bp, Homo sapien
tgacatcttcaagaaagtgccgttt

SEQ ID NO: 2426062 - DNA, 25 bp, Homo sapien
cttcagggtgatttgggacaggcca

SEQ ID NO: 2426063 - DNA, 25 bp, Homo sapien
tagtaaggtgataggaaccctcttc

SEQ ID NO: 2426064 - DNA, 25 bp, Homo sapien
gccagcttgcttgtcctgtagtgaa

SEQ ID NO: 2426065 - DNA, 25 bp, Homo sapien
tcatgttctataactgacttcttcc

SEQ ID NO: 2426066 - DNA, 25 bp, Homo sapien
catgttctataactgacttcttcct

SEQ ID NO: 2426067 - DNA, 25 bp, Homo sapien
gctcctgagccccacttgcatagtg

SEQ ID NO: 2426068 - DNA, 25 bp, Homo sapien
ttcctgctcctgagccccacttgca

SEQ ID NO: 2426069 - DNA, 25 bp, Homo sapien
tccctggtgccaagacaaagctgca

SEQ ID NO: 2426070 - DNA, 25 bp, Homo sapien
gtagatcattgctcttgaccactgc

SEQ ID NO: 2426071 - DNA, 25 bp, Homo sapien
tcaacattgtggctatagactcagc

SEQ ID NO: 2426072 - DNA, 25 bp, Homo sapien
tctactggagacgaacacctaggtt

SEQ ID NO: 2426073 - DNA, 25 bp, Homo sapien
gagagcttttaaacgatggaatcaa

SEQ ID NO: 2426074 - DNA, 25 bp, Homo sapien
tggtattgcatagaacagttaaacg

SEQ ID NO: 2426075 - DNA, 25 bp, Homo sapien
caaatgaatgcaattacagagtcca

SEQ ID NO: 2426076 - DNA, 25 bp, Homo sapien
cttggaacttccctcatcagaggaa

SEQ ID NO: 2426077 - DNA, 25 bp, Homo sapien
tgggaacaataaaagtacccactca

SEQ ID NO: 2426078 - DNA, 25 bp, Homo sapien
gactatgacccacaagatataacac

SEQ ID NO: 2426079 - DNA, 25 bp, Homo sapien
cccactcaaaatcgtcattggaaga

SEQ ID NO: 2426080 - DNA, 25 bp, Homo sapien
taatagtacccttcctaatgtctgg

SEQ ID NO: 2426081 - DNA, 25 bp, Homo sapien
ctggccggggcgggggcgcgcgcgg

SEQ ID NO: 2426082 - DNA, 25 bp, Homo sapien
gccgccgggcggccgctggggccgc

SEQ ID NO: 2426083 - DNA, 25 bp, Homo sapien
gctggccggggcgggggcgcgcgcg

SEQ ID NO: 2426084 - DNA, 25 bp, Homo sapien
ggctggccggggcgggggcgcgcgc

SEQ ID NO: 2426085 - DNA, 25 bp, Homo sapien
ctggtaaagctgccagaatttacat

SEQ ID NO: 2426086 - DNA, 25 bp, Homo sapien
gaaggttagttattgaacttgaaca

SEQ ID NO: 2426087 - DNA, 25 bp, Homo sapien
acttgaacaaccctggtaaagctgc

SEQ ID NO: 2426088 - DNA, 25 bp, Homo sapien
tattgaacttgaacaaccctggtaa

SEQ ID NO: 2426089 - DNA, 25 bp, Homo sapien
tctctcggagaaagagaagtaattc

SEQ ID NO: 2426090 - DNA, 25 bp, Homo sapien
ggttgactacacatctgggttgccc

SEQ ID NO: 2426091 - DNA, 25 bp, Homo sapien
cagatgagtatgtgcggaagctctg

SEQ ID NO: 2426092 - DNA, 25 bp, Homo sapien
gactaagtgttagctaggcaaggat

SEQ ID NO: 2426093 - DNA, 25 bp, Homo sapien
atggaagaacggctctcagcaagga

SEQ ID NO: 2426094 - DNA, 25 bp, Homo sapien
tcacggggagggtaaatccatggga

SEQ ID NO: 2426095 - DNA, 25 bp, Homo sapien
gagggtaaatccatgggagtgcttt

SEQ ID NO: 2426096 - DNA, 25 bp, Homo sapien
cacggggagggtaaatccatgggag

SEQ ID NO: 2426097 - DNA, 25 bp, Homo sapien
ggggagggtaaatccatgggagtgc

SEQ ID NO: 2426098 - DNA, 25 bp, Homo sapien
gcattctttccggtcaacaatttac

SEQ ID NO: 2426099 - DNA, 25 bp, Homo sapien
ccaggcattctttccggtcaacaat

SEQ ID NO: 2426100 - DNA, 25 bp, Homo sapien
ctctccaggcattctttccggtcaa

SEQ ID NO: 2426101 - DNA, 25 bp, Homo sapien
caggcattctttccggtcaacaatt

SEQ ID NO: 2426102 - DNA, 25 bp, Homo sapien
ttatggttccatgaaagcaggctga

SEQ ID NO: 2426103 - DNA, 25 bp, Homo sapien
tccatgaaagcaggctgataattct

SEQ ID NO: 2426104 - DNA, 25 bp, Homo sapien
catgaaagcaggctgataattctta

SEQ ID NO: 2426105 - DNA, 25 bp, Homo sapien
ggttccatgaaagcaggctgataat

SEQ ID NO: 2426106 - DNA, 25 bp, Homo sapien
taagcgggtgttcatcggctgcatc

SEQ ID NO: 2426107 - DNA, 25 bp, Homo sapien
tcctcaaggcctagaatttggcagc

SEQ ID NO: 2426108 - DNA, 25 bp, Homo sapien
cagttcctggatctgtaagcgggtg

SEQ ID NO: 2426109 - DNA, 25 bp, Homo sapien
gcccttcagcagaggatggtaaata

SEQ ID NO: 2426110 - DNA, 25 bp, Homo sapien
catttggttctgtttaagaagcttc

SEQ ID NO: 2426111 - DNA, 25 bp, Homo sapien
taagaagcttctgttgagtgtcttc

SEQ ID NO: 2426112 - DNA, 25 bp, Homo sapien
cacaacgttcacttgctggcccttg

SEQ ID NO: 2426113 - DNA, 25 bp, Homo sapien
gtctgatgtgttatcatacatttgg

SEQ ID NO: 2426114 - DNA, 25 bp, Homo sapien
atgcagttccccagacgcttaaaga

SEQ ID NO: 2426115 - DNA, 25 bp, Homo sapien
ctgaaaatgcagttccccagacgct

SEQ ID NO: 2426116 - DNA, 25 bp, Homo sapien
gagtgtcatgaaagtcattataacc

SEQ ID NO: 2426117 - DNA, 25 bp, Homo sapien
tgtggagagtgtcatgaaagtcatt

SEQ ID NO: 2426118 - DNA, 25 bp, Homo sapien
cctggtatgttgtactccaagtaga

SEQ ID NO: 2426119 - DNA, 25 bp, Homo sapien
tatccctggtatgttgtactccaag

SEQ ID NO: 2426120 - DNA, 25 bp, Homo sapien
aatgcatatccctggtatgttgtac

SEQ ID NO: 2426121 - DNA, 25 bp, Homo sapien
cattaatgcatatccctggtatgtt

SEQ ID NO: 2426122 - DNA, 25 bp, Homo sapien
ttctagattggttaaatttgtcagc

SEQ ID NO: 2426123 - DNA, 25 bp, Homo sapien
tgttctagattggttaaatttgtca

SEQ ID NO: 2426124 - DNA, 25 bp, Homo sapien
acttgtcactgaaactgtaaccttg

SEQ ID NO: 2426125 - DNA, 25 bp, Homo sapien
tttccctttaattcacttgtcactg

SEQ ID NO: 2426126 - DNA, 25 bp, Homo sapien
catcaacctgtattgtatgttgttg

SEQ ID NO: 2426127 - DNA, 25 bp, Homo sapien
tatgttgttgaatttcaaccaccaa

SEQ ID NO: 2426128 - DNA, 25 bp, Homo sapien
tcccaaccatcaacctgtattgtat

SEQ ID NO: 2426129 - DNA, 25 bp, Homo sapien
tattgactaagaacctaatgatgtc

SEQ ID NO: 2426130 - DNA, 25 bp, Homo sapien
cattggctgatattgttactctgcc

SEQ ID NO: 2426131 - DNA, 25 bp, Homo sapien
caggccatatgcaacccaagaggaa

SEQ ID NO: 2426132 - DNA, 25 bp, Homo sapien
ctgataagtgagaaacaggccatat

SEQ ID NO: 2426133 - DNA, 25 bp, Homo sapien
tctttcacttcagccaagacattgg

SEQ ID NO: 2426134 - DNA, 25 bp, Homo sapien
ctggcctttacatttctcgttcaga

SEQ ID NO: 2426135 - DNA, 25 bp, Homo sapien
ctctggcctttacatttctcgttca

SEQ ID NO: 2426136 - DNA, 25 bp, Homo sapien
tctggcctttacatttctcgttcag

SEQ ID NO: 2426137 - DNA, 25 bp, Homo sapien
ttaatgtgcacaggaagggatctgc

SEQ ID NO: 2426138 - DNA, 25 bp, Homo sapien
gaggatgaatctggcacagctctga

SEQ ID NO: 2426139 - DNA, 25 bp, Homo sapien
tcacctttctcacagatgatgtaga

SEQ ID NO: 2426140 - DNA, 25 bp, Homo sapien
gatctgcacagcacatcattagtgt

SEQ ID NO: 2426141 - DNA, 25 bp, Homo sapien
agctgtgtgcttggctgcagctaca

SEQ ID NO: 2426142 - DNA, 25 bp, Homo sapien
gcttggctgcagctacagtaggcat

SEQ ID NO: 2426143 - DNA, 25 bp, Homo sapien
tggatgaagccatttgttggcatta

SEQ ID NO: 2426144 - DNA, 25 bp, Homo sapien
tgaagccatttgttggcattatcag

SEQ ID NO: 2426145 - DNA, 25 bp, Homo sapien
cattgagaaagtggttaaacgtgta

SEQ ID NO: 2426146 - DNA, 25 bp, Homo sapien
gtggttaaacgtgtataattcctca

SEQ ID NO: 2426147 - DNA, 25 bp, Homo sapien
tccacattgagaaagtggttaaacg

SEQ ID NO: 2426148 - DNA, 25 bp, Homo sapien
agacacaggctttccacattgagaa

SEQ ID NO: 2426149 - DNA, 25 bp, Homo sapien
cagcttgctagaccctgacagactg

SEQ ID NO: 2426150 - DNA, 25 bp, Homo sapien
tattgaaagtaataggccaatgagc

SEQ ID NO: 2426151 - DNA, 25 bp, Homo sapien
tgagcaaattgctactgtgggacat

SEQ ID NO: 2426152 - DNA, 25 bp, Homo sapien
tctgccagttcaagccttacaagtg

SEQ ID NO: 2426153 - DNA, 25 bp, Homo sapien
tgtccactggctgaccaaggtaact

SEQ ID NO: 2426154 - DNA, 25 bp, Homo sapien
tgtgcatgtccactggctgaccaag

SEQ ID NO: 2426155 - DNA, 25 bp, Homo sapien
ggtaactgattgcaaacttaggaaa

SEQ ID NO: 2426156 - DNA, 25 bp, Homo sapien
cccctcattggttgatttatcaatc

SEQ ID NO: 2426157 - DNA, 25 bp, Homo sapien
ggaagagtgatcagacatttccact

SEQ ID NO: 2426158 - DNA, 25 bp, Homo sapien
gacatttccacttgtgggttctgct

SEQ ID NO: 2426159 - DNA, 25 bp, Homo sapien
caactagaataatggtatctcccca

SEQ ID NO: 2426160 - DNA, 25 bp, Homo sapien
caaatgttcccggagtattacaact

SEQ ID NO: 2426161 - DNA, 25 bp, Homo sapien
tgctaagcgttaagtcctagatgta

SEQ ID NO: 2426162 - DNA, 25 bp, Homo sapien
gcctatggctggacatgcaatttca

SEQ ID NO: 2426163 - DNA, 25 bp, Homo sapien
ggcctgataaaggaggctccacaca

SEQ ID NO: 2426164 - DNA, 25 bp, Homo sapien
cctgataaaggaggctccacacatt

SEQ ID NO: 2426165 - DNA, 25 bp, Homo sapien
gcctgataaaggaggctccacacat

SEQ ID NO: 2426166 - DNA, 25 bp, Homo sapien
gcttggagcagcatgactacagatt

SEQ ID NO: 2426167 - DNA, 25 bp, Homo sapien
tcatcgctttgaaggtcagccaact

SEQ ID NO: 2426168 - DNA, 25 bp, Homo sapien
cccaggtattccttagcttggagca

SEQ ID NO: 2426169 - DNA, 25 bp, Homo sapien
cacagggctatcttcttatatggac

SEQ ID NO: 2426170 - DNA, 25 bp, Homo sapien
caaggccctgtagtaaacaaaatag

SEQ ID NO: 2426171 - DNA, 25 bp, Homo sapien
tctggcttatttgatcctaccgtgt

SEQ ID NO: 2426172 - DNA, 25 bp, Homo sapien
gggcactcatcaacaaaagcacaga

SEQ ID NO: 2426173 - DNA, 25 bp, Homo sapien
ttttagcacgccagagaacttggag

SEQ ID NO: 2426174 - DNA, 25 bp, Homo sapien
actgtttcacatccagtcgtgtctg

SEQ ID NO: 2426175 - DNA, 25 bp, Homo sapien
tcacatccagtcgtgtctgttttat

SEQ ID NO: 2426176 - DNA, 25 bp, Homo sapien
cacttcatggtccaaatgactgttt

SEQ ID NO: 2426177 - DNA, 25 bp, Homo sapien
ttcatggtccaaatgactgtttcac

SEQ ID NO: 2426178 - DNA, 25 bp, Homo sapien
catgtgccaggttaaaagttgggag

SEQ ID NO: 2426179 - DNA, 25 bp, Homo sapien
ccatggctgatatatggagtcttca

SEQ ID NO: 2426180 - DNA, 25 bp, Homo sapien
cttcattttgggtaatcatgtgcca

SEQ ID NO: 2426181 - DNA, 25 bp, Homo sapien
taatcatgtgccaggttaaaagttg

SEQ ID NO: 2426182 - DNA, 25 bp, Homo sapien
gaccagacatatccaagacagatcc

SEQ ID NO: 2426183 - DNA, 25 bp, Homo sapien
tgtcccaccagtagataggttcggt

SEQ ID NO: 2426184 - DNA, 25 bp, Homo sapien
tctaataactaaatccactgggaaa

SEQ ID NO: 2426185 - DNA, 25 bp, Homo sapien
gaggtggaccctgaaatctaataac

SEQ ID NO: 2426186 - DNA, 25 bp, Homo sapien
ctcctgtaaccatatggctgttttc

SEQ ID NO: 2426187 - DNA, 25 bp, Homo sapien
tgccagtcactatgacaccaaccat

SEQ ID NO: 2426188 - DNA, 25 bp, Homo sapien
ctgtaaccatatggctgttttctgc

SEQ ID NO: 2426189 - DNA, 25 bp, Homo sapien
ggctgccagtcactatgacaccaac

SEQ ID NO: 2426190 - DNA, 25 bp, Homo sapien
aaataaagacatgttcgtgtagctc

SEQ ID NO: 2426191 - DNA, 25 bp, Homo sapien
gacatgttcgtgtagctctagcttc

SEQ ID NO: 2426192 - DNA, 25 bp, Homo sapien
taaagacatgttcgtgtagctctag

SEQ ID NO: 2426193 - DNA, 25 bp, Homo sapien
aagacatgttcgtgtagctctagct

SEQ ID NO: 2426194 - DNA, 25 bp, Homo sapien
tcactcttcagttctataggatgag

SEQ ID NO: 2426195 - DNA, 25 bp, Homo sapien
agaagcagaaggtagaatctctcca

SEQ ID NO: 2426196 - DNA, 25 bp, Homo sapien
ctataggatgagtccattagaagca

SEQ ID NO: 2426197 - DNA, 25 bp, Homo sapien
gaatctctccagggtaaatgggcca

SEQ ID NO: 2426198 - DNA, 25 bp, Homo sapien
cagcctctgtggaatacaccttgta

SEQ ID NO: 2426199 - DNA, 25 bp, Homo sapien
gcctctgtggaatacaccttgtaat

SEQ ID NO: 2426200 - DNA, 25 bp, Homo sapien
tcttcagcctctgtggaatacacct

SEQ ID NO: 2426201 - DNA, 25 bp, Homo sapien
tctgtggaatacaccttgtaatcat

SEQ ID NO: 2426202 - DNA, 25 bp, Homo sapien
tgaaggggcttagtgccgtcatccc

SEQ ID NO: 2426203 - DNA, 25 bp, Homo sapien
ggacgactatagttattgaggatct

SEQ ID NO: 2426204 - DNA, 25 bp, Homo sapien
ttgaggatcttgatctccacacaaa

SEQ ID NO: 2426205 - DNA, 25 bp, Homo sapien
ctaaagcaggatatgggacgactat

SEQ ID NO: 2426206 - DNA, 25 bp, Homo sapien
aatggacaccttatctgtgctgatg

SEQ ID NO: 2426207 - DNA, 25 bp, Homo sapien
tgatcttctctgatggactgccgtt

SEQ ID NO: 2426208 - DNA, 25 bp, Homo sapien
ttctggctgagtaatggacacctta

SEQ ID NO: 2426209 - DNA, 25 bp, Homo sapien
gatggactgccgttttctggctgag

SEQ ID NO: 2426210 - DNA, 25 bp, Homo sapien
gaaatccagtgacctaaataaggca

SEQ ID NO: 2426211 - DNA, 25 bp, Homo sapien
cacataatgaatggtcactggatca

SEQ ID NO: 2426212 - DNA, 25 bp, Homo sapien
ccagtgcctggaatagtggttggcc

SEQ ID NO: 2426213 - DNA, 25 bp, Homo sapien
tatcataactggtgtttgaactggc

SEQ ID NO: 2426214 - DNA, 25 bp, Homo sapien
atggtgtggtcacacgcaggtgcag

SEQ ID NO: 2426215 - DNA, 25 bp, Homo sapien
tggtgtggtcacacgcaggtgcaga

SEQ ID NO: 2426216 - DNA, 25 bp, Homo sapien
agattctgcaattgagtatgacaat

SEQ ID NO: 2426217 - DNA, 25 bp, Homo sapien
gagattctgcaattgagtatgacaa

SEQ ID NO: 2426218 - DNA, 25 bp, Homo sapien
ggagattctgcaattgagtatgaca

SEQ ID NO: 2426219 - DNA, 25 bp, Homo sapien
cctgtgtaaaaagtgcagcagtttc

SEQ ID NO: 2426220 - DNA, 25 bp, Homo sapien
tctgcactgagtgatgttccctaga

SEQ ID NO: 2426221 - DNA, 25 bp, Homo sapien
gtgatgttccctagagtttccctgt

SEQ ID NO: 2426222 - DNA, 25 bp, Homo sapien
tttagagagacttgagtcatttgac

SEQ ID NO: 2426223 - DNA, 25 bp, Homo sapien
tagaatactatagggtgatcaccac

SEQ ID NO: 2426224 - DNA, 25 bp, Homo sapien
tatatttagcatgtaactcttgctg

SEQ ID NO: 2426225 - DNA, 25 bp, Homo sapien
gatgtaaagcaccataaaatagaat

SEQ ID NO: 2426226 - DNA, 25 bp, Homo sapien
ttgctgattcacatagaaaggtgcc

SEQ ID NO: 2426227 - DNA, 25 bp, Homo sapien
aggaggtacaacagctctggggcac

SEQ ID NO: 2426228 - DNA, 25 bp, Homo sapien
aggtacaacagctctggggcacaca

SEQ ID NO: 2426229 - DNA, 25 bp, Homo sapien
ggaggtacaacagctctggggcaca

SEQ ID NO: 2426230 - DNA, 25 bp, Homo sapien
gaggtacaacagctctggggcacac

SEQ ID NO: 2426231 - DNA, 25 bp, Homo sapien
tacacctaggttaggcattaatacc

SEQ ID NO: 2426232 - DNA, 25 bp, Homo sapien
aaggcaatttctacacctaggttag

SEQ ID NO: 2426233 - DNA, 25 bp, Homo sapien
ggttaggcattaataccgccattat

SEQ ID NO: 2426234 - DNA, 25 bp, Homo sapien
taccgccattatctccaacacaaat

SEQ ID NO: 2426235 - DNA, 25 bp, Homo sapien
taaatttaaatgataccactcagga

SEQ ID NO: 2426236 - DNA, 25 bp, Homo sapien
gttcaagggcaggaataagctctca

SEQ ID NO: 2426237 - DNA, 25 bp, Homo sapien
tccaagagcctttcctataaaacca

SEQ ID NO: 2426238 - DNA, 25 bp, Homo sapien
cactcaggaaatcttagaatgggat

SEQ ID NO: 2426239 - DNA, 25 bp, Homo sapien
cagacaaaagcatcctacatcaggc

SEQ ID NO: 2426240 - DNA, 25 bp, Homo sapien
tatattgtctaggacacatgcaggg

SEQ ID NO: 2426241 - DNA, 25 bp, Homo sapien
ctacacctcccattaagatatattg

SEQ ID NO: 2426242 - DNA, 25 bp, Homo sapien
gcagctatcttttacataggactga

SEQ ID NO: 2426243 - DNA, 25 bp, Homo sapien
gggaatgaaaataaatgaacaggct

SEQ ID NO: 2426244 - DNA, 25 bp, Homo sapien
ggaatgaaaataaatgaacaggctc

SEQ ID NO: 2426245 - DNA, 25 bp, Homo sapien
aaagcatgtttcattatggtcatta

SEQ ID NO: 2426246 - DNA, 25 bp, Homo sapien
tatggtcattagtgggcagattctc

SEQ ID NO: 2426247 - DNA, 25 bp, Homo sapien
tgggcagattctcagcagtattgaa

SEQ ID NO: 2426248 - DNA, 25 bp, Homo sapien
ggcagattctcagcagtattgaagg

SEQ ID NO: 2426249 - DNA, 25 bp, Homo sapien
aaatttgttgtgctcatcttttacc

SEQ ID NO: 2426250 - DNA, 25 bp, Homo sapien
ttaatctaaatttgttgtgctcatc

SEQ ID NO: 2426251 - DNA, 25 bp, Homo sapien
aatctaaatttgttgtgctcatctt

SEQ ID NO: 2426252 - DNA, 25 bp, Homo sapien
tctaaatttgttgtgctcatctttt

SEQ ID NO: 2426253 - DNA, 25 bp, Homo sapien
cctggcgtgtagtcactgatagaca

SEQ ID NO: 2426254 - DNA, 25 bp, Homo sapien
tggcagctcaagaaacctggcgtgt

SEQ ID NO: 2426255 - DNA, 25 bp, Homo sapien
ccatagtggaagaacgacaacatca

SEQ ID NO: 2426256 - DNA, 25 bp, Homo sapien
cagcttctgaggctgtacaccagga

SEQ ID NO: 2426257 - DNA, 25 bp, Homo sapien
gggctctggtttctattaatactca

SEQ ID NO: 2426258 - DNA, 25 bp, Homo sapien
caaatcaaatatagtcattagagct

SEQ ID NO: 2426259 - DNA, 25 bp, Homo sapien
aagttcagccaatagttctgggctc

SEQ ID NO: 2426260 - DNA, 25 bp, Homo sapien
gagcttgagaatcaataatagattc

SEQ ID NO: 2426261 - DNA, 25 bp, Homo sapien
cgaaaaggatttagaactgagactc

SEQ ID NO: 2426262 - DNA, 25 bp, Homo sapien
cttgcaggctagcaaagctaaagca

SEQ ID NO: 2426263 - DNA, 25 bp, Homo sapien
caagtactctgcacatggtagaatg

SEQ ID NO: 2426264 - DNA, 25 bp, Homo sapien
taaatcttaaagacacttgcaggct

SEQ ID NO: 2426265 - DNA, 25 bp, Homo sapien
tgtggacaatttgagacatgggaac

SEQ ID NO: 2426266 - DNA, 25 bp, Homo sapien
aattagctgaaaggtccctctcatg

SEQ ID NO: 2426267 - DNA, 25 bp, Homo sapien
catttcgtggccctgagagaaaaat

SEQ ID NO: 2426268 - DNA, 25 bp, Homo sapien
catgggaacattcacgtggaagcgt

SEQ ID NO: 2426269 - DNA, 25 bp, Homo sapien
tcaacaacacctggtgtacttggcc

SEQ ID NO: 2426270 - DNA, 25 bp, Homo sapien
aacaacacctggtgtacttggccat

SEQ ID NO: 2426271 - DNA, 25 bp, Homo sapien
caacaacacctggtgtacttggcca

SEQ ID NO: 2426272 - DNA, 25 bp, Homo sapien
tctaaggagccaagacagtcacctg

SEQ ID NO: 2426273 - DNA, 25 bp, Homo sapien
cagattagcattccagatagaccca

SEQ ID NO: 2426274 - DNA, 25 bp, Homo sapien
tacgctacaggtaatgggacagcaa

SEQ ID NO: 2426275 - DNA, 25 bp, Homo sapien
tatttgtaacggcacagctgccagc

SEQ ID NO: 2426276 - DNA, 25 bp, Homo sapien
tagttctgaacaatagagtggctgg

SEQ ID NO: 2426277 - DNA, 25 bp, Homo sapien
tgtctgaggaataaggagccgtttt

SEQ ID NO: 2426278 - DNA, 25 bp, Homo sapien
tctgtagccatttagcaaaaagggt

SEQ ID NO: 2426279 - DNA, 25 bp, Homo sapien
taaaagagacggcatgaacttcatc

SEQ ID NO: 2426280 - DNA, 25 bp, Homo sapien
taatagagcaacagcaggacttagg

SEQ ID NO: 2426281 - DNA, 25 bp, Homo sapien
tttccggcacacagcagtaaattgt

SEQ ID NO: 2426282 - DNA, 25 bp, Homo sapien
aggacttaggtctgcccactgtgtg

SEQ ID NO: 2426283 - DNA, 25 bp, Homo sapien
gacaaactctaattacggcagactc

SEQ ID NO: 2426284 - DNA, 25 bp, Homo sapien
cctcttctggacctaatgttctgat

SEQ ID NO: 2426285 - DNA, 25 bp, Homo sapien
tctctccacttctgactggttcaga

SEQ ID NO: 2426286 - DNA, 25 bp, Homo sapien
cacttctgactggttcagacaggtt

SEQ ID NO: 2426287 - DNA, 25 bp, Homo sapien
ctctggcttcaactgtgctgatcat

SEQ ID NO: 2426288 - DNA, 25 bp, Homo sapien
tcaagatgtgacagaaattggtgtt

SEQ ID NO: 2426289 - DNA, 25 bp, Homo sapien
aagatgtgacagaaattggtgttag

SEQ ID NO: 2426290 - DNA, 25 bp, Homo sapien
gatgtgacagaaattggtgttagga

SEQ ID NO: 2426291 - DNA, 25 bp, Homo sapien
atgtgacagaaattggtgttaggat

SEQ ID NO: 2426292 - DNA, 25 bp, Homo sapien
ttagctggtcagttataatgaaaag

SEQ ID NO: 2426293 - DNA, 25 bp, Homo sapien
atttagctggtcagttataatgaaa

SEQ ID NO: 2426294 - DNA, 25 bp, Homo sapien
catttagctggtcagttataatgaa

SEQ ID NO: 2426295 - DNA, 25 bp, Homo sapien
tttagctggtcagttataatgaaaa

SEQ ID NO: 2426296 - DNA, 25 bp, Homo sapien
taaaacaaatcagtcattcctgtta

SEQ ID NO: 2426297 - DNA, 25 bp, Homo sapien
caaattatttccctcttatctgaag

SEQ ID NO: 2426298 - DNA, 25 bp, Homo sapien
gttgaacactgcaacaggctcatca

SEQ ID NO: 2426299 - DNA, 25 bp, Homo sapien
tttggaagtagtccaaagtctttga

SEQ ID NO: 2426300 - DNA, 25 bp, Homo sapien
cgaagtctactcaaatgtgtcaaaa

SEQ ID NO: 2426301 - DNA, 25 bp, Homo sapien
aggtgctctgggaagcgaagtctac

SEQ ID NO: 2426302 - DNA, 25 bp, Homo sapien
tgtgacattgtaaagaacctctggg

SEQ ID NO: 2426303 - DNA, 25 bp, Homo sapien
tcaggactctctaggatcctcaaag

SEQ ID NO: 2426304 - DNA, 25 bp, Homo sapien
tattttacccaagtagtcaatcagg

SEQ ID NO: 2426305 - DNA, 25 bp, Homo sapien
cagaggtgtcactggatttacaggc

SEQ ID NO: 2426306 - DNA, 25 bp, Homo sapien
cagaagcccccttgggctgttattt

SEQ ID NO: 2426307 - DNA, 25 bp, Homo sapien
taatgttctgttccagaggtgtcac

SEQ ID NO: 2426308 - DNA, 25 bp, Homo sapien
ttccagataacttccagctgacctc

SEQ ID NO: 2426309 - DNA, 25 bp, Homo sapien
aacttccagctgacctcttcccaca

SEQ ID NO: 2426310 - DNA, 25 bp, Homo sapien
tccagataacttccagctgacctct

SEQ ID NO: 2426311 - DNA, 25 bp, Homo sapien
agataacttccagctgacctcttcc

SEQ ID NO: 2426312 - DNA, 25 bp, Homo sapien
tcacagttaacaacctctgtagcat

SEQ ID NO: 2426313 - DNA, 25 bp, Homo sapien
ggatgaaggagaaaggactgtgcct

SEQ ID NO: 2426314 - DNA, 25 bp, Homo sapien
cacagttaacaacctctgtagcatt

SEQ ID NO: 2426315 - DNA, 25 bp, Homo sapien
cagctgggcgatctcatcttcacaa

SEQ ID NO: 2426316 - DNA, 25 bp, Homo sapien
ttcgctggctgataaccacagggtc

SEQ ID NO: 2426317 - DNA, 25 bp, Homo sapien
gcttcgctggctgataaccacaggg

SEQ ID NO: 2426318 - DNA, 25 bp, Homo sapien
cttcgctggctgataaccacagggt

SEQ ID NO: 2426319 - DNA, 25 bp, Homo sapien
gaatgagctattcttcatgttcttg

SEQ ID NO: 2426320 - DNA, 25 bp, Homo sapien
ttgtaactgggtatgaatgagctat

SEQ ID NO: 2426321 - DNA, 25 bp, Homo sapien
ttttgtaactgggtatgaatgagct

SEQ ID NO: 2426322 - DNA, 25 bp, Homo sapien
gtaactgggtatgaatgagctattc

SEQ ID NO: 2426323 - DNA, 25 bp, Homo sapien
catagtgctttttcattagctttac

SEQ ID NO: 2426324 - DNA, 25 bp, Homo sapien
cttttacacattgcatagtgctttt

SEQ ID NO: 2426325 - DNA, 25 bp, Homo sapien
tacacattgcatagtgctttttcat

SEQ ID NO: 2426326 - DNA, 25 bp, Homo sapien
cacattgcatagtgctttttcatta

SEQ ID NO: 2426327 - DNA, 25 bp, Homo sapien
tcattagttcacacttggaacactt

SEQ ID NO: 2426328 - DNA, 25 bp, Homo sapien
tgtacttcattagttcacacttgga

SEQ ID NO: 2426329 - DNA, 25 bp, Homo sapien
tacttcattagttcacacttggaac

SEQ ID NO: 2426330 - DNA, 25 bp, Homo sapien
cttgtacttcattagttcacacttg

SEQ ID NO: 2426331 - DNA, 25 bp, Homo sapien
gatttttgggatatggaccctatag

SEQ ID NO: 2426332 - DNA, 25 bp, Homo sapien
tagtgtgagaaagtgtataaaccaa

SEQ ID NO: 2426333 - DNA, 25 bp, Homo sapien
ttagtgtgagaaagtgtataaacca

SEQ ID NO: 2426334 - DNA, 25 bp, Homo sapien
tgtataaaccaagatttttgggata

SEQ ID NO: 2426335 - DNA, 25 bp, Homo sapien
tactctatcagagtaactcttttat

SEQ ID NO: 2426336 - DNA, 25 bp, Homo sapien
ctatcagagtaactcttttatcaga

SEQ ID NO: 2426337 - DNA, 25 bp, Homo sapien
ctctatcagagtaactcttttatca

SEQ ID NO: 2426338 - DNA, 25 bp, Homo sapien
ttactctatcagagtaactctttta

SEQ ID NO: 2426339 - DNA, 25 bp, Homo sapien
tgctgtttgataaagaacctgaaga

SEQ ID NO: 2426340 - DNA, 25 bp, Homo sapien
actgcactgtcattgtatcctttgc

SEQ ID NO: 2426341 - DNA, 25 bp, Homo sapien
cagccatgaagccaagctccagaag

SEQ ID NO: 2426342 - DNA, 25 bp, Homo sapien
catccaatccaagatctaactggtt

SEQ ID NO: 2426343 - DNA, 25 bp, Homo sapien
gaaaggttggttgtcgtaacagcac

SEQ ID NO: 2426344 - DNA, 25 bp, Homo sapien
tgctccaactgcagattatgctgct

SEQ ID NO: 2426345 - DNA, 25 bp, Homo sapien
tctttaacaaccagcaagatggccg

SEQ ID NO: 2426346 - DNA, 25 bp, Homo sapien
tgcagccctcgggagtcaatttaat

SEQ ID NO: 2426347 - DNA, 25 bp, Homo sapien
tctttggcacatatcagcaaatgat

SEQ ID NO: 2426348 - DNA, 25 bp, Homo sapien
tgtattccagtttgggttcccctca

SEQ ID NO: 2426349 - DNA, 25 bp, Homo sapien
cacccctgtagagaaccagtctttt

SEQ ID NO: 2426350 - DNA, 25 bp, Homo sapien
gacaaaatcaaagctcctcatggag

SEQ ID NO: 2426351 - DNA, 25 bp, Homo sapien
gagggtaacactcagcacaacaaga

SEQ ID NO: 2426352 - DNA, 25 bp, Homo sapien
cagtgactgggtgtacacaaacagc

SEQ ID NO: 2426353 - DNA, 25 bp, Homo sapien
gaagtgctggaaaaactcgattctg

SEQ ID NO: 2426354 - DNA, 25 bp, Homo sapien
cagctaggtcaatctgagggtaaca

SEQ ID NO: 2426355 - DNA, 25 bp, Homo sapien
gcctggaattcagagtcctaatacg

SEQ ID NO: 2426356 - DNA, 25 bp, Homo sapien
cctttgacagacaatatagcctgga

SEQ ID NO: 2426357 - DNA, 25 bp, Homo sapien
gctgtgggagctaaaacttaattgg

SEQ ID NO: 2426358 - DNA, 25 bp, Homo sapien
catttcaaaggccatataagatcct

SEQ ID NO: 2426359 - DNA, 25 bp, Homo sapien
tgtcatgtgatgtgagtagccccgg

SEQ ID NO: 2426360 - DNA, 25 bp, Homo sapien
tctcaccctgtataaatgccaaagc

SEQ ID NO: 2426361 - DNA, 25 bp, Homo sapien
ctaggctttcccctatgtcatgtga

SEQ ID NO: 2426362 - DNA, 25 bp, Homo sapien
gaataagaacgggatatacctctct

SEQ ID NO: 2426363 - DNA, 25 bp, Homo sapien
catgtcctcttgtatctgctctgcc

SEQ ID NO: 2426364 - DNA, 25 bp, Homo sapien
agtgagtgccaatggcttgtccctg

SEQ ID NO: 2426365 - DNA, 25 bp, Homo sapien
ctgataattcagcatgttaaaggga

SEQ ID NO: 2426366 - DNA, 25 bp, Homo sapien
gaggaaataagtgagtgccaatggc

SEQ ID NO: 2426367 - DNA, 25 bp, Homo sapien
tgacctcactcgagggctgacatgg

SEQ ID NO: 2426368 - DNA, 25 bp, Homo sapien
gctgacatgggaaagctcgtccttt

SEQ ID NO: 2426369 - DNA, 25 bp, Homo sapien
gcataacaagttttaggtactgaga

SEQ ID NO: 2426370 - DNA, 25 bp, Homo sapien
ctttgatagtgctgacctcactcga

SEQ ID NO: 2426371 - DNA, 25 bp, Homo sapien
gaagatatgcgggatttgctgccat

SEQ ID NO: 2426372 - DNA, 25 bp, Homo sapien
tcccagctatttcctgtagttccca

SEQ ID NO: 2426373 - DNA, 25 bp, Homo sapien
gacctccaacgctcctcaaggtctt

SEQ ID NO: 2426374 - DNA, 25 bp, Homo sapien
ttcccagaagatatgcgggatttgc

SEQ ID NO: 2426375 - DNA, 25 bp, Homo sapien
ctcatgaacgggctttagtgtaaaa

SEQ ID NO: 2426376 - DNA, 25 bp, Homo sapien
catgaacgggctttagtgtaaaact

SEQ ID NO: 2426377 - DNA, 25 bp, Homo sapien
tcatgcaagctcatgaacgggcttt

SEQ ID NO: 2426378 - DNA, 25 bp, Homo sapien
caagctcatgaacgggctttagtgt

SEQ ID NO: 2426379 - DNA, 25 bp, Homo sapien
caggaagccgtgattgccagcaaac

SEQ ID NO: 2426380 - DNA, 25 bp, Homo sapien
gaacagattgcgaagcctgctttgg

SEQ ID NO: 2426381 - DNA, 25 bp, Homo sapien
gcttaagcagggattcaggcactcc

SEQ ID NO: 2426382 - DNA, 25 bp, Homo sapien
agtcccagccttgtggcttaagcag

SEQ ID NO: 2426383 - DNA, 25 bp, Homo sapien
ctgcgacagaagcgacacagcacac

SEQ ID NO: 2426384 - DNA, 25 bp, Homo sapien
gtccaacacgtggcattccctcagg

SEQ ID NO: 2426385 - DNA, 25 bp, Homo sapien
acttcatgctcaatgtcttgggcct

SEQ ID NO: 2426386 - DNA, 25 bp, Homo sapien
ctccagcgtccaacacgtggcattc

SEQ ID NO: 2426387 - DNA, 25 bp, Homo sapien
tcatgctcaatgtcttgggccttcc

SEQ ID NO: 2426388 - DNA, 25 bp, Homo sapien
gaacatttttatcatgtcacggaca

SEQ ID NO: 2426389 - DNA, 25 bp, Homo sapien
cacggacagtgaccaataggctaaa

SEQ ID NO: 2426390 - DNA, 25 bp, Homo sapien
gagaaccctaagatcttccagcaag

SEQ ID NO: 2426391 - DNA, 25 bp, Homo sapien
gaagatgaacttgcaccatggccgc

SEQ ID NO: 2426392 - DNA, 25 bp, Homo sapien
ctagctcttgtttgcattgctgtat

SEQ ID NO: 2426393 - DNA, 25 bp, Homo sapien
cagtgtgtgcttctcataactagcc

SEQ ID NO: 2426394 - DNA, 25 bp, Homo sapien
ctatagccttctttgtccgtgggcc

SEQ ID NO: 2426395 - DNA, 25 bp, Homo sapien
ttaacgatggtctagtcggtccctg

SEQ ID NO: 2426396 - DNA, 25 bp, Homo sapien
tttgtccgtgggccactgacagcca

SEQ ID NO: 2426397 - DNA, 25 bp, Homo sapien
gattccatgaacgttggggacctca

SEQ ID NO: 2426398 - DNA, 25 bp, Homo sapien
cattcggtatgtgactgattccatg

SEQ ID NO: 2426399 - DNA, 25 bp, Homo sapien
caggcagtgtcatgaagtacattcg

SEQ ID NO: 2426400 - DNA, 25 bp, Homo sapien
catgaagtacattcggtatgtgact

SEQ ID NO: 2426401 - DNA, 25 bp, Homo sapien
gctgattatataactgtactttttc

SEQ ID NO: 2426402 - DNA, 25 bp, Homo sapien
ccagataaatacagtgtgcatcacc

SEQ ID NO: 2426403 - DNA, 25 bp, Homo sapien
gaagccttacattcagccctattta

SEQ ID NO: 2426404 - DNA, 25 bp, Homo sapien
cagtgtgcatcaccagaagccttac

SEQ ID NO: 2426405 - DNA, 25 bp, Homo sapien
tctgggaacctggaactactgtccc

SEQ ID NO: 2426406 - DNA, 25 bp, Homo sapien
tcactctgggaacctggaactactg

SEQ ID NO: 2426407 - DNA, 25 bp, Homo sapien
tggaactactgtccccatttgccaa

SEQ ID NO: 2426408 - DNA, 25 bp, Homo sapien
aactactgtccccatttgccaaatt

SEQ ID NO: 2426409 - DNA, 25 bp, Homo sapien
gccttcctcctctcaccttcctgct

SEQ ID NO: 2426410 - DNA, 25 bp, Homo sapien
ttcctcctctcaccttcctgctcac

SEQ ID NO: 2426411 - DNA, 25 bp, Homo sapien
ctgccttcctcctctcaccttcctg

SEQ ID NO: 2426412 - DNA, 25 bp, Homo sapien
cttcctcctctcaccttcctgctca

SEQ ID NO: 2426413 - DNA, 25 bp, Homo sapien
cttcttccattgctggtagtgacat

SEQ ID NO: 2426414 - DNA, 25 bp, Homo sapien
gctggtagtgacatcacctccacca

SEQ ID NO: 2426415 - DNA, 25 bp, Homo sapien
tccattgctggtagtgacatcacct

SEQ ID NO: 2426416 - DNA, 25 bp, Homo sapien
tgctggtagtgacatcacctccacc

SEQ ID NO: 2426417 - DNA, 25 bp, Homo sapien
cttctgagcatgaaaggggacacca

SEQ ID NO: 2426418 - DNA, 25 bp, Homo sapien
ggacttgctccctcattatacgtgc

SEQ ID NO: 2426419 - DNA, 25 bp, Homo sapien
ggctcacttccttcggccttcaaat

SEQ ID NO: 2426420 - DNA, 25 bp, Homo sapien
ggaaccatgagatttgtcaacacca

SEQ ID NO: 2426421 - DNA, 25 bp, Homo sapien
gaaactaagaccagagagaattacc

SEQ ID NO: 2426422 - DNA, 25 bp, Homo sapien
tcatggcctcacgttagatgcacat

SEQ ID NO: 2426423 - DNA, 25 bp, Homo sapien
acaattcacagtaaccttaggtcgt

SEQ ID NO: 2426424 - DNA, 25 bp, Homo sapien
gcctaactggtagggtgaccaactg

SEQ ID NO: 2426425 - DNA, 25 bp, Homo sapien
gaatcagtctaggtacacagatttc

SEQ ID NO: 2426426 - DNA, 25 bp, Homo sapien
caggggacaataggaatcagtctag

SEQ ID NO: 2426427 - DNA, 25 bp, Homo sapien
actccaacatcaaatcagtagaaag

SEQ ID NO: 2426428 - DNA, 25 bp, Homo sapien
taggtacacagatttctgctgctct

SEQ ID NO: 2426429 - DNA, 25 bp, Homo sapien
tccagccaaaaggggagaagaaagc

SEQ ID NO: 2426430 - DNA, 25 bp, Homo sapien
gcctccagccaaaaggggagaagaa

SEQ ID NO: 2426431 - DNA, 25 bp, Homo sapien
ctgcctccagccaaaaggggagaag

SEQ ID NO: 2426432 - DNA, 25 bp, Homo sapien
ctccagccaaaaggggagaagaaag

SEQ ID NO: 2426433 - DNA, 25 bp, Homo sapien
ggtcaatcttggcaaggaagtggtt

SEQ ID NO: 2426434 - DNA, 25 bp, Homo sapien
tgtttgctttcacaaggcagactga

SEQ ID NO: 2426435 - DNA, 25 bp, Homo sapien
caaggaagtggttgtcaaggatttt

SEQ ID NO: 2426436 - DNA, 25 bp, Homo sapien
tgtggacataggcaaattctgtatg

SEQ ID NO: 2426437 - DNA, 25 bp, Homo sapien
taccaatgtctaccagggatcctcc

SEQ ID NO: 2426438 - DNA, 25 bp, Homo sapien
cagacttttgagaggattggtgcta

SEQ ID NO: 2426439 - DNA, 25 bp, Homo sapien
caaccgtgatacttggaataccaaa

SEQ ID NO: 2426440 - DNA, 25 bp, Homo sapien
tagccacggatttaattcacaacca

SEQ ID NO: 2426441 - DNA, 25 bp, Homo sapien
caaaattatagaggttgcagccgtt

SEQ ID NO: 2426442 - DNA, 25 bp, Homo sapien
agctaaggtgttctgcccacttcgg

SEQ ID NO: 2426443 - DNA, 25 bp, Homo sapien
gtagatgagtagactggaatcccca

SEQ ID NO: 2426444 - DNA, 25 bp, Homo sapien
gatcagagagtgagatgtacaaggc

SEQ ID NO: 2426445 - DNA, 25 bp, Homo sapien
aaactgttcgactgtaacatttcag

SEQ ID NO: 2426446 - DNA, 25 bp, Homo sapien
ttttctttagtacacgattctcatc

SEQ ID NO: 2426447 - DNA, 25 bp, Homo sapien
taaaaacacgacaaagattgccaat

SEQ ID NO: 2426448 - DNA, 25 bp, Homo sapien
acatttcagagacttatttattaaa

SEQ ID NO: 2426449 - DNA, 25 bp, Homo sapien
ctatgagatgaagccgaaggactgc

SEQ ID NO: 2426450 - DNA, 25 bp, Homo sapien
caagaatcttacatagtcaggcagg

SEQ ID NO: 2426451 - DNA, 25 bp, Homo sapien
taatttgccatccaaggcagggcag

SEQ ID NO: 2426452 - DNA, 25 bp, Homo sapien
tctgccaaggaactacaactcgtgt

SEQ ID NO: 2426453 - DNA, 25 bp, Homo sapien
aacagaagtctgcaggttaaaccca

SEQ ID NO: 2426454 - DNA, 25 bp, Homo sapien
catccatttgattaagcagtcacca

SEQ ID NO: 2426455 - DNA, 25 bp, Homo sapien
tacttcatccaagacgattccttca

SEQ ID NO: 2426456 - DNA, 25 bp, Homo sapien
aatgttcaatgttgaggcccaagat

SEQ ID NO: 2426457 - DNA, 25 bp, Homo sapien
tgatctggcataacgatctcttaca

SEQ ID NO: 2426458 - DNA, 25 bp, Homo sapien
ttttcctttggtgatctggcataac

SEQ ID NO: 2426459 - DNA, 25 bp, Homo sapien
cctttggtgatctggcataacgatc

SEQ ID NO: 2426460 - DNA, 25 bp, Homo sapien
aataaggaacggatgttgtcatctt

SEQ ID NO: 2426461 - DNA, 25 bp, Homo sapien
agaagacaaccaaaagccctacgag

SEQ ID NO: 2426462 - DNA, 25 bp, Homo sapien
tgaaactaataaaaggtggactggc

SEQ ID NO: 2426463 - DNA, 25 bp, Homo sapien
aatcctggagaacatgcgcaagggc

SEQ ID NO: 2426464 - DNA, 25 bp, Homo sapien
taaagaaagacagccatggtaaatc

SEQ ID NO: 2426465 - DNA, 25 bp, Homo sapien
tatatacaatgatctggtcgataat

SEQ ID NO: 2426466 - DNA, 25 bp, Homo sapien
catatatacaatgatctggtcgata

SEQ ID NO: 2426467 - DNA, 25 bp, Homo sapien
ccatatatacaatgatctggtcgat

SEQ ID NO: 2426468 - DNA, 25 bp, Homo sapien
atatacaatgatctggtcgataatt

SEQ ID NO: 2426469 - DNA, 25 bp, Homo sapien
ctccccattgtagtcgtacagttgt

SEQ ID NO: 2426470 - DNA, 25 bp, Homo sapien
caccccatgtgatgtttagtttgta

SEQ ID NO: 2426471 - DNA, 25 bp, Homo sapien
tattcaatagatcttgatcacccca

SEQ ID NO: 2426472 - DNA, 25 bp, Homo sapien
gaaaaaacacgatattcaatagatc

SEQ ID NO: 2426473 - DNA, 25 bp, Homo sapien
agcgattataccatcctattcgagg

SEQ ID NO: 2426474 - DNA, 25 bp, Homo sapien
tctggtgccattgcagcaatttgtg

SEQ ID NO: 2426475 - DNA, 25 bp, Homo sapien
cagtgtcgacatacaatagtgagtc

SEQ ID NO: 2426476 - DNA, 25 bp, Homo sapien
cgaggttcctcatgttctggtgcca

SEQ ID NO: 2426477 - DNA, 25 bp, Homo sapien
tataacgtataattaaatgtttgta

SEQ ID NO: 2426478 - DNA, 25 bp, Homo sapien
ctctgcgaagcacatggtttaaaga

SEQ ID NO: 2426479 - DNA, 25 bp, Homo sapien
atctctgcgaagcacatggtttaaa

SEQ ID NO: 2426480 - DNA, 25 bp, Homo sapien
acaatctctgcgaagcacatggttt

SEQ ID NO: 2426481 - DNA, 25 bp, Homo sapien
cacaggcaactacagctagatgcat

SEQ ID NO: 2426482 - DNA, 25 bp, Homo sapien
ttctcaacaggctgtattttcagac

SEQ ID NO: 2426483 - DNA, 25 bp, Homo sapien
tttctcaacaggctgtattttcaga

SEQ ID NO: 2426484 - DNA, 25 bp, Homo sapien
caatagggattccagtaacacagag

SEQ ID NO: 2426485 - DNA, 25 bp, Homo sapien
aatagggattccagtaacacagaga

SEQ ID NO: 2426486 - DNA, 25 bp, Homo sapien
gcatccaatagggattccagtaaca

SEQ ID NO: 2426487 - DNA, 25 bp, Homo sapien
tccaatagggattccagtaacacag

SEQ ID NO: 2426488 - DNA, 25 bp, Homo sapien
cctgaggtcttagtaatttgcgtga

SEQ ID NO: 2426489 - DNA, 25 bp, Homo sapien
gagctaccgagcgttgccaaaagtt

SEQ ID NO: 2426490 - DNA, 25 bp, Homo sapien
tgcgcgcaaatgtggtgacatgctg

SEQ ID NO: 2426491 - DNA, 25 bp, Homo sapien
ccaaatggtttcttatgcgcgcaaa

SEQ ID NO: 2426492 - DNA, 25 bp, Homo sapien
cgcgacgccggcgcctctcacggcg

SEQ ID NO: 2426493 - DNA, 25 bp, Homo sapien
gacgccggcgcctctcacggcgccg

SEQ ID NO: 2426494 - DNA, 25 bp, Homo sapien
ctgtccgacacgccgggatgcgctg

SEQ ID NO: 2426495 - DNA, 25 bp, Homo sapien
cggcgcctctcacggcgccgcgtcc

SEQ ID NO: 2426496 - DNA, 25 bp, Homo sapien
caccgccgcccgttccttcttccag

SEQ ID NO: 2426497 - DNA, 25 bp, Homo sapien
ttcttccagggacacggcgagctgg

SEQ ID NO: 2426498 - DNA, 25 bp, Homo sapien
acacagcaccacgacgcgcaggtag

SEQ ID NO: 2426499 - DNA, 25 bp, Homo sapien
cttccagggacacggcgagctggct

SEQ ID NO: 2426500 - DNA, 25 bp, Homo sapien
accacctaggcgagcgcagtcgcgg

SEQ ID NO: 2426501 - DNA, 25 bp, Homo sapien
ccgacgaactggagcggagggaggg

SEQ ID NO: 2426502 - DNA, 25 bp, Homo sapien
gctccggagccgaaggactacccgc

SEQ ID NO: 2426503 - DNA, 25 bp, Homo sapien
agccgcgggcgcaacaagttcctca

SEQ ID NO: 2426504 - DNA, 25 bp, Homo sapien
gaataactccttgacccacagatgg

SEQ ID NO: 2426505 - DNA, 25 bp, Homo sapien
aaggagtgtactgctctcaaaggga

SEQ ID NO: 2426506 - DNA, 25 bp, Homo sapien
ttattgacgtcagggtactggacca

SEQ ID NO: 2426507 - DNA, 25 bp, Homo sapien
gcatgctggcatcccctctaattat

SEQ ID NO: 2426508 - DNA, 25 bp, Homo sapien
ctttgttccagacaactgaaggtgc

SEQ ID NO: 2426509 - DNA, 25 bp, Homo sapien
ctacattctttgttccagacaactg

SEQ ID NO: 2426510 - DNA, 25 bp, Homo sapien
tttcctacattctttgttccagaca

SEQ ID NO: 2426511 - DNA, 25 bp, Homo sapien
tcattggtaactgttctgaatttct

SEQ ID NO: 2426512 - DNA, 25 bp, Homo sapien
tgcaagagcgaatccattccagaac

SEQ ID NO: 2426513 - DNA, 25 bp, Homo sapien
ttactttaggtcatccaagagggca

SEQ ID NO: 2426514 - DNA, 25 bp, Homo sapien
taaaaaagcgagtggcggaagcctc

SEQ ID NO: 2426515 - DNA, 25 bp, Homo sapien
tctcatagtgcacacccaccaggtt

SEQ ID NO: 2426516 - DNA, 25 bp, Homo sapien
gatgagtatcttcccacctatgtag

SEQ ID NO: 2426517 - DNA, 25 bp, Homo sapien
caccgtgttcccgtctatgtagaaa

SEQ ID NO: 2426518 - DNA, 25 bp, Homo sapien
catgaggtgtcagttagcacgctta

SEQ ID NO: 2426519 - DNA, 25 bp, Homo sapien
gaaatatgagtatgctccattcagg

SEQ ID NO: 2426520 - DNA, 25 bp, Homo sapien
catgaaaccaccaaatatcacaact

SEQ ID NO: 2426521 - DNA, 25 bp, Homo sapien
taatcacagacttttactgtatgca

SEQ ID NO: 2426522 - DNA, 25 bp, Homo sapien
atgaaaccaccaaatatcacaactg

SEQ ID NO: 2426523 - DNA, 25 bp, Homo sapien
cacagacttttactgtatgcaatta

SEQ ID NO: 2426524 - DNA, 25 bp, Homo sapien
ggccctggataagtttgggacaaga

SEQ ID NO: 2426525 - DNA, 25 bp, Homo sapien
cagctgtgtctgaaaatagggtact

SEQ ID NO: 2426526 - DNA, 25 bp, Homo sapien
gagaaatgtgtaaactggcagctgt

SEQ ID NO: 2426527 - DNA, 25 bp, Homo sapien
taccagtgttcaatgacaatagcac

SEQ ID NO: 2426528 - DNA, 25 bp, Homo sapien
tcatggcacttaactgcagagacca

SEQ ID NO: 2426529 - DNA, 25 bp, Homo sapien
ccagcaggtgtatttaagaggataa

SEQ ID NO: 2426530 - DNA, 25 bp, Homo sapien
gaaaatgtggtacctcttggcataa

SEQ ID NO: 2426531 - DNA, 25 bp, Homo sapien
atttgcatggtaggacagaagtgac

SEQ ID NO: 2426532 - DNA, 25 bp, Homo sapien
ttaatgagattctccattcaatgat

SEQ ID NO: 2426533 - DNA, 25 bp, Homo sapien
attcaatgatgaggcttctcctctg

SEQ ID NO: 2426534 - DNA, 25 bp, Homo sapien
taatgagattctccattcaatgatg

SEQ ID NO: 2426535 - DNA, 25 bp, Homo sapien
tccattcaatgatgaggcttctcct

SEQ ID NO: 2426536 - DNA, 25 bp, Homo sapien
gcagcactagatgcaggcggtgact

SEQ ID NO: 2426537 - DNA, 25 bp, Homo sapien
tgttatcagagctagagccgctttg

SEQ ID NO: 2426538 - DNA, 25 bp, Homo sapien
gccgctttgactgtgttgatctgca

SEQ ID NO: 2426539 - DNA, 25 bp, Homo sapien
aaatgctgagcactactccgatcca

SEQ ID NO: 2426540 - DNA, 25 bp, Homo sapien
ctaaggttgagctatatgcaaggaa

SEQ ID NO: 2426541 - DNA, 25 bp, Homo sapien
gattgttatgactgaacgcatgacc

SEQ ID NO: 2426542 - DNA, 25 bp, Homo sapien
tgtgacagcctagaagtagaacttg

SEQ ID NO: 2426543 - DNA, 25 bp, Homo sapien
tgttcggtatgttgaaaaccactcc

SEQ ID NO: 2426544 - DNA, 25 bp, Homo sapien
ctggttttcttatggctattctttt

SEQ ID NO: 2426545 - DNA, 25 bp, Homo sapien
taggaggcacaaactgctgagtaac

SEQ ID NO: 2426546 - DNA, 25 bp, Homo sapien
tgtgtaggaggcacaaactgctgag

SEQ ID NO: 2426547 - DNA, 25 bp, Homo sapien
ctgtgtaggaggcacaaactgctga

SEQ ID NO: 2426548 - DNA, 25 bp, Homo sapien
tgtaggaggcacaaactgctgagta

SEQ ID NO: 2426549 - DNA, 25 bp, Homo sapien
gaattttgctcagggcctagacagt

SEQ ID NO: 2426550 - DNA, 25 bp, Homo sapien
gaagggatcccatgattaaaagcta

SEQ ID NO: 2426551 - DNA, 25 bp, Homo sapien
taggccttgaagtagagcccaagaa

SEQ ID NO: 2426552 - DNA, 25 bp, Homo sapien
gaactactgaaaggatatccaggac

SEQ ID NO: 2426553 - DNA, 25 bp, Homo sapien
caggaggtcaatacatgttggcttc

SEQ ID NO: 2426554 - DNA, 25 bp, Homo sapien
tcatagatagcccaaatagaaggta

SEQ ID NO: 2426555 - DNA, 25 bp, Homo sapien
taaatgactactgtctagccactgg

SEQ ID NO: 2426556 - DNA, 25 bp, Homo sapien
ggaacattttattacgcattaggac

SEQ ID NO: 2426557 - DNA, 25 bp, Homo sapien
gagatatatagtagaagagtttcct

SEQ ID NO: 2426558 - DNA, 25 bp, Homo sapien
taggaagtagcagggttagagatat

SEQ ID NO: 2426559 - DNA, 25 bp, Homo sapien
cactattggagtggtggagctacaa

SEQ ID NO: 2426560 - DNA, 25 bp, Homo sapien
tcagtcatcttatatctaaactggc

SEQ ID NO: 2426561 - DNA, 25 bp, Homo sapien
tttaaattcaccttgaatcttggga

SEQ ID NO: 2426562 - DNA, 25 bp, Homo sapien
ctttaaattcaccttgaatcttggg

SEQ ID NO: 2426563 - DNA, 25 bp, Homo sapien
ttaaattcaccttgaatcttgggaa

SEQ ID NO: 2426564 - DNA, 25 bp, Homo sapien
gaccttagttcttatctcacagaga

SEQ ID NO: 2426565 - DNA, 25 bp, Homo sapien
gggttattcctgtcagcatacaaaa

SEQ ID NO: 2426566 - DNA, 25 bp, Homo sapien
cagccttccatctgtaccgacatag

SEQ ID NO: 2426567 - DNA, 25 bp, Homo sapien
agctattcgattagaatgtccacag

SEQ ID NO: 2426568 - DNA, 25 bp, Homo sapien
ccgagtgaaagagattggaccaaaa

SEQ ID NO: 2426569 - DNA, 25 bp, Homo sapien
tgcctagcaaccagagatgggatgg

SEQ ID NO: 2426570 - DNA, 25 bp, Homo sapien
gttgcctagcaaccagagatgggat

SEQ ID NO: 2426571 - DNA, 25 bp, Homo sapien
actgacactcaagaggagttatgcc

SEQ ID NO: 2426572 - DNA, 25 bp, Homo sapien
gaatagaatataggctccctaccac

SEQ ID NO: 2426573 - DNA, 25 bp, Homo sapien
caaaacagcattctactctccaact

SEQ ID NO: 2426574 - DNA, 25 bp, Homo sapien
tactctatcctccttactatgcttt

SEQ ID NO: 2426575 - DNA, 25 bp, Homo sapien
tgaatgaacgttaaaccatcctaca

SEQ ID NO: 2426576 - DNA, 25 bp, Homo sapien
tgtgtagatacaaagttatagaaga

SEQ ID NO: 2426577 - DNA, 25 bp, Homo sapien
ctgtgtagatacaaagttatagaag

SEQ ID NO: 2426578 - DNA, 25 bp, Homo sapien
gaggctcacatctcttgcattcatg

SEQ ID NO: 2426579 - DNA, 25 bp, Homo sapien
gacttgtataaccaggacactgcag

SEQ ID NO: 2426580 - DNA, 25 bp, Homo sapien
gcataacgtttaagagcttggctct

SEQ ID NO: 2426581 - DNA, 25 bp, Homo sapien
cccacactgaatatggctgacttgt

SEQ ID NO: 2426582 - DNA, 25 bp, Homo sapien
ctcaaactcctggccacatgtagat

SEQ ID NO: 2426583 - DNA, 25 bp, Homo sapien
agtctcaaactcctggccacatgta

SEQ ID NO: 2426584 - DNA, 25 bp, Homo sapien
ggcatgcactaccatgcccactaat

SEQ ID NO: 2426585 - DNA, 25 bp, Homo sapien
tcaaactcctggccacatgtagatc

SEQ ID NO: 2426586 - DNA, 25 bp, Homo sapien
gcaacagagtgagtgcaaccgtctc

SEQ ID NO: 2426587 - DNA, 25 bp, Homo sapien
tatcagacaggcaaattatatgact

SEQ ID NO: 2426588 - DNA, 25 bp, Homo sapien
tacatcagccttatatatcagacag

SEQ ID NO: 2426589 - DNA, 25 bp, Homo sapien
ttctactacagttgccagtctgcag

SEQ ID NO: 2426590 - DNA, 25 bp, Homo sapien
taaagtctgagaggatttgaaataa

SEQ ID NO: 2426591 - DNA, 25 bp, Homo sapien
cttacaagagtaaagtctgagagga

SEQ ID NO: 2426592 - DNA, 25 bp, Homo sapien
tacaagagtaaagtctgagaggatt

SEQ ID NO: 2426593 - DNA, 25 bp, Homo sapien
gagtaaagtctgagaggatttgaaa

SEQ ID NO: 2426594 - DNA, 25 bp, Homo sapien
gagaatgacccaaatttctaggcag

SEQ ID NO: 2426595 - DNA, 25 bp, Homo sapien
caaatggtaaccaggctctcttcct

SEQ ID NO: 2426596 - DNA, 25 bp, Homo sapien
gactgtccaaaaaagagaatgaccc

SEQ ID NO: 2426597 - DNA, 25 bp, Homo sapien
cttgagccagcaggattgttccacc

SEQ ID NO: 2426598 - DNA, 25 bp, Homo sapien
tcaggatttactcaattacaagtgt

SEQ ID NO: 2426599 - DNA, 25 bp, Homo sapien
ctggcaaaagggttacagagtaaga

SEQ ID NO: 2426600 - DNA, 25 bp, Homo sapien
gaccaatagtttaaatccatcaaac

SEQ ID NO: 2426601 - DNA, 25 bp, Homo sapien
gatcacacatacatgggactccaat

SEQ ID NO: 2426602 - DNA, 25 bp, Homo sapien
aaaaagctcatttctgttcatagtg

SEQ ID NO: 2426603 - DNA, 25 bp, Homo sapien
gcatgatgctttctatttgaaaggt

SEQ ID NO: 2426604 - DNA, 25 bp, Homo sapien
aagctcatttctgttcatagtgtaa

SEQ ID NO: 2426605 - DNA, 25 bp, Homo sapien
tgaaaggtagcctttactgtaagaa

SEQ ID NO: 2426606 - DNA, 25 bp, Homo sapien
aagaatgaagtgtactgacatatgc

SEQ ID NO: 2426607 - DNA, 25 bp, Homo sapien
aaagaatgaagtgtactgacatatg

SEQ ID NO: 2426608 - DNA, 25 bp, Homo sapien
cattttaaccaggtaaataatatgg

SEQ ID NO: 2426609 - DNA, 25 bp, Homo sapien
agtgaaagaaatcaatccctcccaa

SEQ ID NO: 2426610 - DNA, 25 bp, Homo sapien
tagtagatgcctaaggatagagggt

SEQ ID NO: 2426611 - DNA, 25 bp, Homo sapien
aaatgactatagtaattcttggcaa

SEQ ID NO: 2426612 - DNA, 25 bp, Homo sapien
ttcactataccagcttttaaaggga

SEQ ID NO: 2426613 - DNA, 25 bp, Homo sapien
tctaatgattggacaaactgctttc

SEQ ID NO: 2426614 - DNA, 25 bp, Homo sapien
taagtgaagctactctatactctca

SEQ ID NO: 2426615 - DNA, 25 bp, Homo sapien
gaagagacaatctgtcaaagagcat

SEQ ID NO: 2426616 - DNA, 25 bp, Homo sapien
tgagttatcctattgggtcttttcc

SEQ ID NO: 2426617 - DNA, 25 bp, Homo sapien
gtaacttgagttatcctattgggtc

SEQ ID NO: 2426618 - DNA, 25 bp, Homo sapien
tattgggtcttttccctcacagatc

SEQ ID NO: 2426619 - DNA, 25 bp, Homo sapien
cctcacagatccacctctcttgccc

SEQ ID NO: 2426620 - DNA, 25 bp, Homo sapien
tccttggtcctcgaggcactcacaa

SEQ ID NO: 2426621 - DNA, 25 bp, Homo sapien
ctcgaggcactcacaataacttcaa

SEQ ID NO: 2426622 - DNA, 25 bp, Homo sapien
tcaacggttccttggtcctcgaggc

SEQ ID NO: 2426623 - DNA, 25 bp, Homo sapien
ggtcctcgaggcactcacaataact

SEQ ID NO: 2426624 - DNA, 25 bp, Homo sapien
gaactccagttactggtaagtgatc

SEQ ID NO: 2426625 - DNA, 25 bp, Homo sapien
gattacccaataggagaactccagt

SEQ ID NO: 2426626 - DNA, 25 bp, Homo sapien
tactggtaagtgatccagctttttc

SEQ ID NO: 2426627 - DNA, 25 bp, Homo sapien
ctgtggagattacccaataggagaa

SEQ ID NO: 2426628 - DNA, 25 bp, Homo sapien
gtaaatatggaaacaatttgctaaa

SEQ ID NO: 2426629 - DNA, 25 bp, Homo sapien
tatacacgtatcaaagtaaatatgg

SEQ ID NO: 2426630 - DNA, 25 bp, Homo sapien
cagaagaaagcataaattcactaga

SEQ ID NO: 2426631 - DNA, 25 bp, Homo sapien
tgagattattatcacacgtagaact

SEQ ID NO: 2426632 - DNA, 25 bp, Homo sapien
tccttccttcaagaaacttatgatt

SEQ ID NO: 2426633 - DNA, 25 bp, Homo sapien
ctccttccttcaagaaacttatgat

SEQ ID NO: 2426634 - DNA, 25 bp, Homo sapien
cttccttcaagaaacttatgatttc

SEQ ID NO: 2426635 - DNA, 25 bp, Homo sapien
ccttcaagaaacttatgatttcatg

SEQ ID NO: 2426636 - DNA, 25 bp, Homo sapien
tcttcctatttgctatctcagtgag

SEQ ID NO: 2426637 - DNA, 25 bp, Homo sapien
cactcactcaactgcttaagccaga

SEQ ID NO: 2426638 - DNA, 25 bp, Homo sapien
ggtaggcaatctattccctccctga

SEQ ID NO: 2426639 - DNA, 25 bp, Homo sapien
gcttcaactcaaatcatgtgtacaa

SEQ ID NO: 2426640 - DNA, 25 bp, Homo sapien
taccttagtgtctatgcttgcaaaa

SEQ ID NO: 2426641 - DNA, 25 bp, Homo sapien
cagtcgattatgtagctctgagcct

SEQ ID NO: 2426642 - DNA, 25 bp, Homo sapien
tcatggtatttcagattactgcagt

SEQ ID NO: 2426643 - DNA, 25 bp, Homo sapien
gcattcgggaacctatcttttggga

SEQ ID NO: 2426644 - DNA, 25 bp, Homo sapien
caaccctatgagactggtgaagaag

SEQ ID NO: 2426645 - DNA, 25 bp, Homo sapien
tcaaagttacatatagcgccagcat

SEQ ID NO: 2426646 - DNA, 25 bp, Homo sapien
agcccacattgacacccgagttgtt

SEQ ID NO: 2426647 - DNA, 25 bp, Homo sapien
taagtgctctgtaagtagtggccat

SEQ ID NO: 2426648 - DNA, 25 bp, Homo sapien
cgggcagcggagctgtctcagtctt

SEQ ID NO: 2426649 - DNA, 25 bp, Homo sapien
cgcccgaccgccgggaggatggagt

SEQ ID NO: 2426650 - DNA, 25 bp, Homo sapien
gccccagctgcagatatgaagcgga

SEQ ID NO: 2426651 - DNA, 25 bp, Homo sapien
aggatggagttcagcgggcagcgga

SEQ ID NO: 2426652 - DNA, 25 bp, Homo sapien
gcttgcaagacaaactacacatgtg

SEQ ID NO: 2426653 - DNA, 25 bp, Homo sapien
tcatacatcggtaactaggaaccat

SEQ ID NO: 2426654 - DNA, 25 bp, Homo sapien
gagtcctcctcaagtaatgtttcca

SEQ ID NO: 2426655 - DNA, 25 bp, Homo sapien
tctggttagtagaagacacctggat

SEQ ID NO: 2426656 - DNA, 25 bp, Homo sapien
gggccaactcccctgtgtactatat

SEQ ID NO: 2426657 - DNA, 25 bp, Homo sapien
ttaaactaggcccacttctctgtcc

SEQ ID NO: 2426658 - DNA, 25 bp, Homo sapien
caagactggctgtggagtaggacac

SEQ ID NO: 2426659 - DNA, 25 bp, Homo sapien
ccttcttcttccaggtgccaggtat

SEQ ID NO: 2426660 - DNA, 25 bp, Homo sapien
catcgcacatcatgcacttgaaggc

SEQ ID NO: 2426661 - DNA, 25 bp, Homo sapien
cgctgttccggaaggtgcagacgct

SEQ ID NO: 2426662 - DNA, 25 bp, Homo sapien
cagtaaccctcatccgaggacggct

SEQ ID NO: 2426663 - DNA, 25 bp, Homo sapien
ggtgcagacgctacagtcccagtaa

SEQ ID NO: 2426664 - DNA, 25 bp, Homo sapien
acaacccggacacgacgcggcgcgg

SEQ ID NO: 2426665 - DNA, 25 bp, Homo sapien
aggacacaacccggacacgacgcgg

SEQ ID NO: 2426666 - DNA, 25 bp, Homo sapien
gacacaacccggacacgacgcggcg

SEQ ID NO: 2426667 - DNA, 25 bp, Homo sapien
ctgcaggacacaacccggacacgac

SEQ ID NO: 2426668 - DNA, 25 bp, Homo sapien
ctggtggggctcttcttgtctccca

SEQ ID NO: 2426669 - DNA, 25 bp, Homo sapien
tggtggggctcttcttgtctcccat

SEQ ID NO: 2426670 - DNA, 25 bp, Homo sapien
gctctgtttgtcaataaggaggata

SEQ ID NO: 2426671 - DNA, 25 bp, Homo sapien
ggcttggctatcaccgcacgccgag

SEQ ID NO: 2426672 - DNA, 25 bp, Homo sapien
agtcgccgccgcgaccgctctgttt

SEQ ID NO: 2426673 - DNA, 25 bp, Homo sapien
ggctatcaccgcacgccgagagtcg

SEQ ID NO: 2426674 - DNA, 25 bp, Homo sapien
cccgggatctccaggtagaacgact

SEQ ID NO: 2426675 - DNA, 25 bp, Homo sapien
cctctgaggaggaaaacgtctgtcc

SEQ ID NO: 2426676 - DNA, 25 bp, Homo sapien
caggtctggacagaagtgccagccc

SEQ ID NO: 2426677 - DNA, 25 bp, Homo sapien
ccgtgcgaagcctggtccaaggtag

SEQ ID NO: 2426678 - DNA, 25 bp, Homo sapien
tttcctaaagtgtttactagctgta

SEQ ID NO: 2426679 - DNA, 25 bp, Homo sapien
ttcctaaagtgtttactagctgtaa

SEQ ID NO: 2426680 - DNA, 25 bp, Homo sapien
tcctaaagtgtttactagctgtaag

SEQ ID NO: 2426681 - DNA, 25 bp, Homo sapien
ctgagtgccactggggcttgaaaag

SEQ ID NO: 2426682 - DNA, 25 bp, Homo sapien
ccaaacagcttagtggaattgtcag

SEQ ID NO: 2426683 - DNA, 25 bp, Homo sapien
ttagtggaattgtcaggtagcccat

SEQ ID NO: 2426684 - DNA, 25 bp, Homo sapien
tcctctgactcatggaagcccaaac

SEQ ID NO: 2426685 - DNA, 25 bp, Homo sapien
tctgactcatggaagcccaaacagc

SEQ ID NO: 2426686 - DNA, 25 bp, Homo sapien
cactttgtctacaacccattgagaa

SEQ ID NO: 2426687 - DNA, 25 bp, Homo sapien
aacccattgagaagacgttgttcat

SEQ ID NO: 2426688 - DNA, 25 bp, Homo sapien
gaagacgttgttcatcctctcacac

SEQ ID NO: 2426689 - DNA, 25 bp, Homo sapien
cattgagaagacgttgttcatcctc

SEQ ID NO: 2426690 - DNA, 25 bp, Homo sapien
tccagattgggataaagctacaaga

SEQ ID NO: 2426691 - DNA, 25 bp, Homo sapien
tacagccacattgggaatattgagg

SEQ ID NO: 2426692 - DNA, 25 bp, Homo sapien
tcttctagggaatggaatttggtgc

SEQ ID NO: 2426693 - DNA, 25 bp, Homo sapien
tatgggtagggcagacaaataacac

SEQ ID NO: 2426694 - DNA, 25 bp, Homo sapien
aataaatcattcaacttttcggtct

SEQ ID NO: 2426695 - DNA, 25 bp, Homo sapien
aattagctcttcaagattgttacta

SEQ ID NO: 2426696 - DNA, 25 bp, Homo sapien
cattcaacttttcggtcttcaggaa

SEQ ID NO: 2426697 - DNA, 25 bp, Homo sapien
tcagaagtcctcatgtaaacaaatc

SEQ ID NO: 2426698 - DNA, 25 bp, Homo sapien
tttatccttgggcgtcttgaatcat

SEQ ID NO: 2426699 - DNA, 25 bp, Homo sapien
ttatccttgggcgtcttgaatcatc

SEQ ID NO: 2426700 - DNA, 25 bp, Homo sapien
tatccttgggcgtcttgaatcatct

SEQ ID NO: 2426701 - DNA, 25 bp, Homo sapien
tccttgggcgtcttgaatcatctga

SEQ ID NO: 2426702 - DNA, 25 bp, Homo sapien
tgagcaaatagttctgctcatttct

SEQ ID NO: 2426703 - DNA, 25 bp, Homo sapien
tcccagtccatgcagacaataagat

SEQ ID NO: 2426704 - DNA, 25 bp, Homo sapien
cctgagttctgtctcatctcaaaat

SEQ ID NO: 2426705 - DNA, 25 bp, Homo sapien
caaaatcttacacaaaattatccta

SEQ ID NO: 2426706 - DNA, 25 bp, Homo sapien
gcctgactgaggctgtcaagagcag

SEQ ID NO: 2426707 - DNA, 25 bp, Homo sapien
ttcttcttctggttcaggagctttc

SEQ ID NO: 2426708 - DNA, 25 bp, Homo sapien
tcttctggttcaggagctttctttt

SEQ ID NO: 2426709 - DNA, 25 bp, Homo sapien
atttcttcttctggttcaggagctt

SEQ ID NO: 2426710 - DNA, 25 bp, Homo sapien
cttcttctggttcaggagctttctt

SEQ ID NO: 2426711 - DNA, 25 bp, Homo sapien
aggcataacttaagtgtccactttc

SEQ ID NO: 2426712 - DNA, 25 bp, Homo sapien
ttttcggacaggcataacttaagtg

SEQ ID NO: 2426713 - DNA, 25 bp, Homo sapien
acgttctccgagcatatttttcgga

SEQ ID NO: 2426714 - DNA, 25 bp, Homo sapien
ctcacgttctccgagcatatttttc

SEQ ID NO: 2426715 - DNA, 25 bp, Homo sapien
agctgctcttccattgtcaatagca

SEQ ID NO: 2426716 - DNA, 25 bp, Homo sapien
gctcttccattgtcaatagcaatgc

SEQ ID NO: 2426717 - DNA, 25 bp, Homo sapien
tgctcttccattgtcaatagcaatg

SEQ ID NO: 2426718 - DNA, 25 bp, Homo sapien
gatttatcaaagtagtttcgccttc

SEQ ID NO: 2426719 - DNA, 25 bp, Homo sapien
tacagttttgtgcagagtctttatc

SEQ ID NO: 2426720 - DNA, 25 bp, Homo sapien
gttttgtgcagagtctttatccaaa

SEQ ID NO: 2426721 - DNA, 25 bp, Homo sapien
acagttttgtgcagagtctttatcc

SEQ ID NO: 2426722 - DNA, 25 bp, Homo sapien
tacaactttgccatacttggaaaat

SEQ ID NO: 2426723 - DNA, 25 bp, Homo sapien
tttacaactttgccatacttggaaa

SEQ ID NO: 2426724 - DNA, 25 bp, Homo sapien
caactttgccatacttggaaaatat

SEQ ID NO: 2426725 - DNA, 25 bp, Homo sapien
ttacaactttgccatacttggaaaa

SEQ ID NO: 2426726 - DNA, 25 bp, Homo sapien
ttcagtctataagacaggccctagg

SEQ ID NO: 2426727 - DNA, 25 bp, Homo sapien
ttaggttgcagacattgaccaaatt

SEQ ID NO: 2426728 - DNA, 25 bp, Homo sapien
gcagacattgaccaaattctttgtt

SEQ ID NO: 2426729 - DNA, 25 bp, Homo sapien
cagccttcagtctataagacaggcc

SEQ ID NO: 2426730 - DNA, 25 bp, Homo sapien
tcctgaggtatacccatggcaacta

SEQ ID NO: 2426731 - DNA, 25 bp, Homo sapien
tatacccatggcaactatcaactcc

SEQ ID NO: 2426732 - DNA, 25 bp, Homo sapien
ccatggcaactatcaactccatcat

SEQ ID NO: 2426733 - DNA, 25 bp, Homo sapien
tgctgtgttcctgaggtatacccat

SEQ ID NO: 2426734 - DNA, 25 bp, Homo sapien
taatggcatttctgaccgccctatg

SEQ ID NO: 2426735 - DNA, 25 bp, Homo sapien
ggcacctcgagtgggcttacctaag

SEQ ID NO: 2426736 - DNA, 25 bp, Homo sapien
taaataggtcgtataaggcacctcg

SEQ ID NO: 2426737 - DNA, 25 bp, Homo sapien
tcctctagaatttgcacaggtgcct

SEQ ID NO: 2426738 - DNA, 25 bp, Homo sapien
ccggtacaagtcattgtttgtcagg

SEQ ID NO: 2426739 - DNA, 25 bp, Homo sapien
tacaagtcattgtttgtcagggaaa

SEQ ID NO: 2426740 - DNA, 25 bp, Homo sapien
aagtcattgtttgtcagggaaaaag

SEQ ID NO: 2426741 - DNA, 25 bp, Homo sapien
tcattgtttgtcagggaaaaaggca

SEQ ID NO: 2426742 - DNA, 25 bp, Homo sapien
gctcttacttggagccaatccacca

SEQ ID NO: 2426743 - DNA, 25 bp, Homo sapien
ctgtgctcttacttggagccaatcc

SEQ ID NO: 2426744 - DNA, 25 bp, Homo sapien
ttacttggagccaatccaccactca

SEQ ID NO: 2426745 - DNA, 25 bp, Homo sapien
tacttggagccaatccaccactcat

SEQ ID NO: 2426746 - DNA, 25 bp, Homo sapien
acacctggcctaaaccaagtattat

SEQ ID NO: 2426747 - DNA, 25 bp, Homo sapien
cacctggcctaaaccaagtattatt

SEQ ID NO: 2426748 - DNA, 25 bp, Homo sapien
ctggcctaaaccaagtattattaat

SEQ ID NO: 2426749 - DNA, 25 bp, Homo sapien
cacacctggcctaaaccaagtatta

SEQ ID NO: 2426750 - DNA, 25 bp, Homo sapien
tggtgcctcgaagagacagacctgt

SEQ ID NO: 2426751 - DNA, 25 bp, Homo sapien
gcgttacacgttctgctgagagccg

SEQ ID NO: 2426752 - DNA, 25 bp, Homo sapien
tcaggaactcaacatagatacgtcg

SEQ ID NO: 2426753 - DNA, 25 bp, Homo sapien
tatggcatgccaattcgtgaaggaa

SEQ ID NO: 2426754 - DNA, 25 bp, Homo sapien
ggccttggcatcacgagtcctggga

SEQ ID NO: 2426755 - DNA, 25 bp, Homo sapien
agcggccttggcatcacgagtcctg

SEQ ID NO: 2426756 - DNA, 25 bp, Homo sapien
gtagccgctcgcagcggccttggca

SEQ ID NO: 2426757 - DNA, 25 bp, Homo sapien
ttcgtagccgctcgcagcggccttg

SEQ ID NO: 2426758 - DNA, 25 bp, Homo sapien
caggcgcggagagcagataatagca

SEQ ID NO: 2426759 - DNA, 25 bp, Homo sapien
tcaggcgcggagagcagataatagc

SEQ ID NO: 2426760 - DNA, 25 bp, Homo sapien
ggcgcggagagcagataatagcagc

SEQ ID NO: 2426761 - DNA, 25 bp, Homo sapien
gcgcggagagcagataatagcagcc

SEQ ID NO: 2426762 - DNA, 25 bp, Homo sapien
ggcccagaggcgagcgcttcgctaa

SEQ ID NO: 2426763 - DNA, 25 bp, Homo sapien
ttcttcccgactgtttgagatccgg

SEQ ID NO: 2426764 - DNA, 25 bp, Homo sapien
ccgactgtttgagatccgggccccg

SEQ ID NO: 2426765 - DNA, 25 bp, Homo sapien
gctaacgtcattgcgcgcgccggaa

SEQ ID NO: 2426766 - DNA, 25 bp, Homo sapien
gacggctgcatttacggggtctccc

SEQ ID NO: 2426767 - DNA, 25 bp, Homo sapien
ctgggataacggcggcgagcggacg

SEQ ID NO: 2426768 - DNA, 25 bp, Homo sapien
tcccggagggccagagtcggtgagc

SEQ ID NO: 2426769 - DNA, 25 bp, Homo sapien
gccagagtcggtgagcgctttttac

SEQ ID NO: 2426770 - DNA, 25 bp, Homo sapien
tctgtgtcgggtcctggattctcct

SEQ ID NO: 2426771 - DNA, 25 bp, Homo sapien
cgggagttttctgtgtcgggtcctg

SEQ ID NO: 2426772 - DNA, 25 bp, Homo sapien
gagcgtgtgcgggctgctaaacggg

SEQ ID NO: 2426773 - DNA, 25 bp, Homo sapien
tcctgcctttgaattgtgtgacaat

SEQ ID NO: 2426774 - DNA, 25 bp, Homo sapien
caatccagagtgaagccgatgtctt

SEQ ID NO: 2426775 - DNA, 25 bp, Homo sapien
cagcacatacagaccaggcctctaa

SEQ ID NO: 2426776 - DNA, 25 bp, Homo sapien
aggcctctaaccactccctgggagc

SEQ ID NO: 2426777 - DNA, 25 bp, Homo sapien
tcctggagcctgcacaatcaatcca

SEQ ID NO: 2426778 - DNA, 25 bp, Homo sapien
gatacaccaaagctaggcctattaa

SEQ ID NO: 2426779 - DNA, 25 bp, Homo sapien
tcctcgaagtcatcccagtgtaagt

SEQ ID NO: 2426780 - DNA, 25 bp, Homo sapien
aaagaattccgagagaacgagcacc

SEQ ID NO: 2426781 - DNA, 25 bp, Homo sapien
cttacagaagagacgaaatgtggtc

SEQ ID NO: 2426782 - DNA, 25 bp, Homo sapien
agaccatggcaagcgggagagggag

SEQ ID NO: 2426783 - DNA, 25 bp, Homo sapien
ggagaccatggcaagcgggagaggg

SEQ ID NO: 2426784 - DNA, 25 bp, Homo sapien
gagaccatggcaagcgggagaggga

SEQ ID NO: 2426785 - DNA, 25 bp, Homo sapien
ggggagaccatggcaagcgggagag

SEQ ID NO: 2426786 - DNA, 25 bp, Homo sapien
ccactgctagacagacctggtgaag

SEQ ID NO: 2426787 - DNA, 25 bp, Homo sapien
tcattcgattaagggtaagaactcc

SEQ ID NO: 2426788 - DNA, 25 bp, Homo sapien
ttacagtcatgttgattaccgagac

SEQ ID NO: 2426789 - DNA, 25 bp, Homo sapien
gaacacctggctttcttcgttgaac

SEQ ID NO: 2426790 - DNA, 25 bp, Homo sapien
tcaacgcaggaaatggggaacgtat

SEQ ID NO: 2426791 - DNA, 25 bp, Homo sapien
ttttaatcaacgcaggaaatgggga

SEQ ID NO: 2426792 - DNA, 25 bp, Homo sapien
tcctgacgtgtaaacgtgttaaatg

SEQ ID NO: 2426793 - DNA, 25 bp, Homo sapien
ccgtaaccaaatggagtattgcaat

SEQ ID NO: 2426794 - DNA, 25 bp, Homo sapien
ccaaacttagggcttcatgaccata

SEQ ID NO: 2426795 - DNA, 25 bp, Homo sapien
cacttgtactgagccttcacttagt

SEQ ID NO: 2426796 - DNA, 25 bp, Homo sapien
tgagtagggttacctagcaccccaa

SEQ ID NO: 2426797 - DNA, 25 bp, Homo sapien
tttcctgaggataggcactacatgt

SEQ ID NO: 2426798 - DNA, 25 bp, Homo sapien
ccagaagcactagtcgggctattta

SEQ ID NO: 2426799 - DNA, 25 bp, Homo sapien
aggaacatctgatgatttataaccc

SEQ ID NO: 2426800 - DNA, 25 bp, Homo sapien
tagtcgggctatttattgccttttc

SEQ ID NO: 2426801 - DNA, 25 bp, Homo sapien
attgccagaagcactagtcgggcta

SEQ ID NO: 2426802 - DNA, 25 bp, Homo sapien
tgaagctgtatcagattcagtcatt

SEQ ID NO: 2426803 - DNA, 25 bp, Homo sapien
tgtatcagattcagtcattccatcc

SEQ ID NO: 2426804 - DNA, 25 bp, Homo sapien
gtatcagattcagtcattccatcca

SEQ ID NO: 2426805 - DNA, 25 bp, Homo sapien
agctgtatcagattcagtcattcca

SEQ ID NO: 2426806 - DNA, 25 bp, Homo sapien
acgagacctcgtatgacgattagta

SEQ ID NO: 2426807 - DNA, 25 bp, Homo sapien
tctacgagacctcgtatgacgatta

SEQ ID NO: 2426808 - DNA, 25 bp, Homo sapien
cgtctacgagacctcgtatgacgat

SEQ ID NO: 2426809 - DNA, 25 bp, Homo sapien
ttcgtctacgagacctcgtatgacg

SEQ ID NO: 2426810 - DNA, 25 bp, Homo sapien
ttgctggcatcagtgtctgcagtct

SEQ ID NO: 2426811 - DNA, 25 bp, Homo sapien
gatttgctggcatcagtgtctgcag

SEQ ID NO: 2426812 - DNA, 25 bp, Homo sapien
agatttgctggcatcagtgtctgca

SEQ ID NO: 2426813 - DNA, 25 bp, Homo sapien
gatgagatttgctggcatcagtgtc

SEQ ID NO: 2426814 - DNA, 25 bp, Homo sapien
ctgtctggatctttgggcacagaac

SEQ ID NO: 2426815 - DNA, 25 bp, Homo sapien
gtctggatctttgggcacagaactg

SEQ ID NO: 2426816 - DNA, 25 bp, Homo sapien
tgtctggatctttgggcacagaact

SEQ ID NO: 2426817 - DNA, 25 bp, Homo sapien
ctgctgtcacgctgatgtcggctgt

SEQ ID NO: 2426818 - DNA, 25 bp, Homo sapien
tgtcacgctgatgtcggctgtctcg

SEQ ID NO: 2426819 - DNA, 25 bp, Homo sapien
acctcgaccccctgaaacacttctg

SEQ ID NO: 2426820 - DNA, 25 bp, Homo sapien
cgctgatgtcggctgtctcgatcat

SEQ ID NO: 2426821 - DNA, 25 bp, Homo sapien
gcttgtctttaccctcagattctat

SEQ ID NO: 2426822 - DNA, 25 bp, Homo sapien
cagcttgtctttaccctcagattct

SEQ ID NO: 2426823 - DNA, 25 bp, Homo sapien
agcttgtctttaccctcagattcta

SEQ ID NO: 2426824 - DNA, 25 bp, Homo sapien
gaaccaatctgttatggctgctcat

SEQ ID NO: 2426825 - DNA, 25 bp, Homo sapien
aactggaggtgtaattagggccctg

SEQ ID NO: 2426826 - DNA, 25 bp, Homo sapien
gttatggctgctcattaatctgtag

SEQ ID NO: 2426827 - DNA, 25 bp, Homo sapien
gctcattaatctgtaggcattccat

SEQ ID NO: 2426828 - DNA, 25 bp, Homo sapien
ttcctttagataagcaatatggtac

SEQ ID NO: 2426829 - DNA, 25 bp, Homo sapien
cttctctgggtagtttattttcact

SEQ ID NO: 2426830 - DNA, 25 bp, Homo sapien
tgtcttctctgggtagtttattttc

SEQ ID NO: 2426831 - DNA, 25 bp, Homo sapien
tctctgggtagtttattttcactgt

SEQ ID NO: 2426832 - DNA, 25 bp, Homo sapien
tttcactgtccccttcaattctcac

SEQ ID NO: 2426833 - DNA, 25 bp, Homo sapien
cggaaccatatcagatttgtccact

SEQ ID NO: 2426834 - DNA, 25 bp, Homo sapien
tacagcaccagcactctctatagat

SEQ ID NO: 2426835 - DNA, 25 bp, Homo sapien
cagcactctctatagattctaaatg

SEQ ID NO: 2426836 - DNA, 25 bp, Homo sapien
ggaaccatatcagatttgtccacta

SEQ ID NO: 2426837 - DNA, 25 bp, Homo sapien
ctagctcaatgcggtaactccagga

SEQ ID NO: 2426838 - DNA, 25 bp, Homo sapien
tagctcaatgcggtaactccaggaa

SEQ ID NO: 2426839 - DNA, 25 bp, Homo sapien
agctcaatgcggtaactccaggaac

SEQ ID NO: 2426840 - DNA, 25 bp, Homo sapien
gcatcagcttcatacaaatacttca

SEQ ID NO: 2426841 - DNA, 25 bp, Homo sapien
gatggtggaggtaatctaacctcat

SEQ ID NO: 2426842 - DNA, 25 bp, Homo sapien
ttcacaaacgcatgtcactcaagat

SEQ ID NO: 2426843 - DNA, 25 bp, Homo sapien
tattgacaggccaaagttgttcaaa

SEQ ID NO: 2426844 - DNA, 25 bp, Homo sapien
taacttgtaatatgttaaagtgtac

SEQ ID NO: 2426845 - DNA, 25 bp, Homo sapien
acatataccatctgaaaatgttaga

SEQ ID NO: 2426846 - DNA, 25 bp, Homo sapien
ccaccgctccctgcccaacacatat

SEQ ID NO: 2426847 - DNA, 25 bp, Homo sapien
agaattctgagttgtgattttattg

SEQ ID NO: 2426848 - DNA, 25 bp, Homo sapien
tacatatgtcctccagaaaccaacc

SEQ ID NO: 2426849 - DNA, 25 bp, Homo sapien
aaaccaacccttgatcagtgcaaga

SEQ ID NO: 2426850 - DNA, 25 bp, Homo sapien
cctttggcgttctgtctgtaccgaa

SEQ ID NO: 2426851 - DNA, 25 bp, Homo sapien
ccttgatcagtgcaagactgctccc

SEQ ID NO: 2426852 - DNA, 25 bp, Homo sapien
tggagcgtccaacattccacaggca

SEQ ID NO: 2426853 - DNA, 25 bp, Homo sapien
caaggacaggccgtagtagaacgtg

SEQ ID NO: 2426854 - DNA, 25 bp, Homo sapien
taatggtccggcttatgccagctca

SEQ ID NO: 2426855 - DNA, 25 bp, Homo sapien
tttggattccagcacgacgcatcaa

SEQ ID NO: 2426856 - DNA, 25 bp, Homo sapien
tatgccctccggaaatcatgcaaga

SEQ ID NO: 2426857 - DNA, 25 bp, Homo sapien
aatggttccagcctatcaggactgc

SEQ ID NO: 2426858 - DNA, 25 bp, Homo sapien
cagactccgcatgggacttgtccaa

SEQ ID NO: 2426859 - DNA, 25 bp, Homo sapien
caaaatacctgtgtcagaatactcc

SEQ ID NO: 2426860 - DNA, 25 bp, Homo sapien
gcgaataggcagttagcacagcaca

SEQ ID NO: 2426861 - DNA, 25 bp, Homo sapien
cttgaaagaaacaaagcgaataggc

SEQ ID NO: 2426862 - DNA, 25 bp, Homo sapien
gcccagcggcattgagccaaaatat

SEQ ID NO: 2426863 - DNA, 25 bp, Homo sapien
caagcagtctatggaaacaacccct

SEQ ID NO: 2426864 - DNA, 25 bp, Homo sapien
gctcaggagttgtccactttgttga

SEQ ID NO: 2426865 - DNA, 25 bp, Homo sapien
tagagaagtctcactaacagatgta

SEQ ID NO: 2426866 - DNA, 25 bp, Homo sapien
gaattcagatgtttaccagagtgtg

SEQ ID NO: 2426867 - DNA, 25 bp, Homo sapien
catcagcattattctggtaggcttg

SEQ ID NO: 2426868 - DNA, 25 bp, Homo sapien
gcccacttgtggcagcacaggttct

SEQ ID NO: 2426869 - DNA, 25 bp, Homo sapien
gcctttggcaggctatgttacccct

SEQ ID NO: 2426870 - DNA, 25 bp, Homo sapien
cttctgttattgctacaaactggga

SEQ ID NO: 2426871 - DNA, 25 bp, Homo sapien
gaaaagtgagggcagtaccttcacc

SEQ ID NO: 2426872 - DNA, 25 bp, Homo sapien
caaacccttgtgtgggacggctgtc

SEQ ID NO: 2426873 - DNA, 25 bp, Homo sapien
tgtgtagcccagatacaaacccttg

SEQ ID NO: 2426874 - DNA, 25 bp, Homo sapien
tgtggacacacgagacaaatggagg

SEQ ID NO: 2426875 - DNA, 25 bp, Homo sapien
tttaaaggcaccagaccagggaatg

SEQ ID NO: 2426876 - DNA, 25 bp, Homo sapien
taaagagtacttacatagccccacc

SEQ ID NO: 2426877 - DNA, 25 bp, Homo sapien
gcctccctaaaggtcctggatgcca

SEQ ID NO: 2426878 - DNA, 25 bp, Homo sapien
cacttgtaagattaatagggccata

SEQ ID NO: 2426879 - DNA, 25 bp, Homo sapien
gaaaaaacccactcgctgaaacagc

SEQ ID NO: 2426880 - DNA, 25 bp, Homo sapien
tctagcactgcagcgtaacaaacgg

SEQ ID NO: 2426881 - DNA, 25 bp, Homo sapien
tagctggcgctgatacaatacaatg

SEQ ID NO: 2426882 - DNA, 25 bp, Homo sapien
caatgtttacctggccaaagagggt

SEQ ID NO: 2426883 - DNA, 25 bp, Homo sapien
tggttccctggcaaatctagcactg

SEQ ID NO: 2426884 - DNA, 25 bp, Homo sapien
tagtaggcaaatctctgtggccggg

SEQ ID NO: 2426885 - DNA, 25 bp, Homo sapien
gccgtagagtcccagaaaccgattc

SEQ ID NO: 2426886 - DNA, 25 bp, Homo sapien
gatgtatgcttggatctcccgggca

SEQ ID NO: 2426887 - DNA, 25 bp, Homo sapien
cggaggctgccggatttcaatgtca

SEQ ID NO: 2426888 - DNA, 25 bp, Homo sapien
tctacactgatctgctgaccggctg

SEQ ID NO: 2426889 - DNA, 25 bp, Homo sapien
tgattataccctgaagccccatggt

SEQ ID NO: 2426890 - DNA, 25 bp, Homo sapien
gaaacttgtagttcagagcaggcga

SEQ ID NO: 2426891 - DNA, 25 bp, Homo sapien
tgccaaagaatccatcgaatcccga

SEQ ID NO: 2426892 - DNA, 25 bp, Homo sapien
tcgggagtctcttgatcgagctgac

SEQ ID NO: 2426893 - DNA, 25 bp, Homo sapien
cttcgggagtctcttgatcgagctg

SEQ ID NO: 2426894 - DNA, 25 bp, Homo sapien
ttcgggagtctcttgatcgagctga

SEQ ID NO: 2426895 - DNA, 25 bp, Homo sapien
caaagaggctttacactgggcacaa

SEQ ID NO: 2426896 - DNA, 25 bp, Homo sapien
tcggaagaatcagaggcatggacgt

SEQ ID NO: 2426897 - DNA, 25 bp, Homo sapien
taaatctgaccctgtttgggaagga

SEQ ID NO: 2426898 - DNA, 25 bp, Homo sapien
cagtgctgcccgtcataggtcatct

SEQ ID NO: 2426899 - DNA, 25 bp, Homo sapien
aggtttcacagtactccgcatagag

SEQ ID NO: 2426900 - DNA, 25 bp, Homo sapien
gggcggccgtccttcatgatatacc

SEQ ID NO: 2426901 - DNA, 25 bp, Homo sapien
tagagagactcaaaacagccacagc

SEQ ID NO: 2426902 - DNA, 25 bp, Homo sapien
ggaccgtttcacactcaaggcagca

SEQ ID NO: 2426903 - DNA, 25 bp, Homo sapien
gaaatgtgaaaccagagaatgaaag

SEQ ID NO: 2426904 - DNA, 25 bp, Homo sapien
atgtgaaaccagagaatgaaagaaa

SEQ ID NO: 2426905 - DNA, 25 bp, Homo sapien
cttcaaaaagaaatgtgaaaccaga

SEQ ID NO: 2426906 - DNA, 25 bp, Homo sapien
aaagaaatgtgaaaccagagaatga

SEQ ID NO: 2426907 - DNA, 25 bp, Homo sapien
taaacagtggaatattggcttaatc

SEQ ID NO: 2426908 - DNA, 25 bp, Homo sapien
cattgtatgaatgtacaggattatg

SEQ ID NO: 2426909 - DNA, 25 bp, Homo sapien
ttagtattttgcttgatgtaaacag

SEQ ID NO: 2426910 - DNA, 25 bp, Homo sapien
ggaatattggcttaatctaagctta

SEQ ID NO: 2426911 - DNA, 25 bp, Homo sapien
tgctgagcaccgtggtttgagcagt

SEQ ID NO: 2426912 - DNA, 25 bp, Homo sapien
tcacatgctgagcaccgtggtttga

SEQ ID NO: 2426913 - DNA, 25 bp, Homo sapien
acatgctgagcaccgtggtttgagc

SEQ ID NO: 2426914 - DNA, 25 bp, Homo sapien
ctgagcaccgtggtttgagcagttc

SEQ ID NO: 2426915 - DNA, 25 bp, Homo sapien
gcccgcacgggaggcgaacactgca

SEQ ID NO: 2426916 - DNA, 25 bp, Homo sapien
ggaggcgaacactgcaacttcacct

SEQ ID NO: 2426917 - DNA, 25 bp, Homo sapien
accagcagctcattacacgtgaaac

SEQ ID NO: 2426918 - DNA, 25 bp, Homo sapien
tcattacacgtgaaacagacaaaac

SEQ ID NO: 2426919 - DNA, 25 bp, Homo sapien
tcacacacagcatgcatgactgctc

SEQ ID NO: 2426920 - DNA, 25 bp, Homo sapien
ccagtgcttctttcttccgctgagc

SEQ ID NO: 2426921 - DNA, 25 bp, Homo sapien
gctctggacagaagcttaattgttc

SEQ ID NO: 2426922 - DNA, 25 bp, Homo sapien
ttccgctgagcactgaacacctgca

SEQ ID NO: 2426923 - DNA, 25 bp, Homo sapien
gtgcacagtctttctcaccagttct

SEQ ID NO: 2426924 - DNA, 25 bp, Homo sapien
gcacagtctttctcaccagttctct

SEQ ID NO: 2426925 - DNA, 25 bp, Homo sapien
tgcacagtctttctcaccagttctc

SEQ ID NO: 2426926 - DNA, 25 bp, Homo sapien
tctacttccagagttagggtttcag

SEQ ID NO: 2426927 - DNA, 25 bp, Homo sapien
tggtggtaactggtacaaaagctgt

SEQ ID NO: 2426928 - DNA, 25 bp, Homo sapien
ttcctctggtaagcaagcaaaatag

SEQ ID NO: 2426929 - DNA, 25 bp, Homo sapien
tacaaaagctgtttaatccgatgct

SEQ ID NO: 2426930 - DNA, 25 bp, Homo sapien
gtttaatccgatgcttctctccggg

SEQ ID NO: 2426931 - DNA, 25 bp, Homo sapien
tctgacagccaaaggccagtttgct

SEQ ID NO: 2426932 - DNA, 25 bp, Homo sapien
ttctcagtcacaggacatcaaacaa

SEQ ID NO: 2426933 - DNA, 25 bp, Homo sapien
gtttctcagtcacaggacatcaaac

SEQ ID NO: 2426934 - DNA, 25 bp, Homo sapien
tcagtcacaggacatcaaacaatgg

SEQ ID NO: 2426935 - DNA, 25 bp, Homo sapien
agtttaaagcctggtttctcagtca

SEQ ID NO: 2426936 - DNA, 25 bp, Homo sapien
taaccaatcctgtgctaagtttgga

SEQ ID NO: 2426937 - DNA, 25 bp, Homo sapien
gaactctgatgcatcccttacccag

SEQ ID NO: 2426938 - DNA, 25 bp, Homo sapien
caaatagtctgaccattaaggaggt

SEQ ID NO: 2426939 - DNA, 25 bp, Homo sapien
acacttctgtgggatccatttgaga

SEQ ID NO: 2426940 - DNA, 25 bp, Homo sapien
agaacagtcgccttcgaattccccg

SEQ ID NO: 2426941 - DNA, 25 bp, Homo sapien
gccccgagagaacagtgccccttgt

SEQ ID NO: 2426942 - DNA, 25 bp, Homo sapien
gacgcagaggcagcgagcgaacccc

SEQ ID NO: 2426943 - DNA, 25 bp, Homo sapien
agcactcgccctgcggctggacggt

SEQ ID NO: 2426944 - DNA, 25 bp, Homo sapien
gtccctgccggcgtgacggactctg

SEQ ID NO: 2426945 - DNA, 25 bp, Homo sapien
aggcatcccacaaaaggtcctccag

SEQ ID NO: 2426946 - DNA, 25 bp, Homo sapien
tgctcccccgggttggagtcacctc

SEQ ID NO: 2426947 - DNA, 25 bp, Homo sapien
agtcacctcgtccaggccactgcat

SEQ ID NO: 2426948 - DNA, 25 bp, Homo sapien
gaagacgattcccaaaacgttctga

SEQ ID NO: 2426949 - DNA, 25 bp, Homo sapien
tgtgggaagacttcaaaggttacca

SEQ ID NO: 2426950 - DNA, 25 bp, Homo sapien
tagaactcttctggccttaggccta

SEQ ID NO: 2426951 - DNA, 25 bp, Homo sapien
tggccaaatggattccggttttgaa

SEQ ID NO: 2426952 - DNA, 25 bp, Homo sapien
caatgcgagcatattccagaacagc

SEQ ID NO: 2426953 - DNA, 25 bp, Homo sapien
tccagaacagcagtttggttgttct

SEQ ID NO: 2426954 - DNA, 25 bp, Homo sapien
aacagcagtttggttgttctgacta

SEQ ID NO: 2426955 - DNA, 25 bp, Homo sapien
ctagttttcaatgcgagcatattcc

SEQ ID NO: 2426956 - DNA, 25 bp, Homo sapien
tcctcccagtcacaagcttcaagag

SEQ ID NO: 2426957 - DNA, 25 bp, Homo sapien
gcttcaagagtggactctctgctgc

SEQ ID NO: 2426958 - DNA, 25 bp, Homo sapien
aagcttcaagagtggactctctgct

SEQ ID NO: 2426959 - DNA, 25 bp, Homo sapien
cctcccagtcacaagcttcaagagt

SEQ ID NO: 2426960 - DNA, 25 bp, Homo sapien
ataatactgtgagaaggagggtgtc

SEQ ID NO: 2426961 - DNA, 25 bp, Homo sapien
ttataatactgtgagaaggagggtg

SEQ ID NO: 2426962 - DNA, 25 bp, Homo sapien
taatactgtgagaaggagggtgtca

SEQ ID NO: 2426963 - DNA, 25 bp, Homo sapien
aatactgtgagaaggagggtgtcac

SEQ ID NO: 2426964 - DNA, 25 bp, Homo sapien
gctgtctgatccctcatgcatccat

SEQ ID NO: 2426965 - DNA, 25 bp, Homo sapien
tattacttgttgaagggcaccactg

SEQ ID NO: 2426966 - DNA, 25 bp, Homo sapien
tgttcgacctagacctttcccttga

SEQ ID NO: 2426967 - DNA, 25 bp, Homo sapien
tggattcactgatagattctttggc

SEQ ID NO: 2426968 - DNA, 25 bp, Homo sapien
aattctcctacctcagcctcctgag

SEQ ID NO: 2426969 - DNA, 25 bp, Homo sapien
tagctgggactataagcacatgcca

SEQ ID NO: 2426970 - DNA, 25 bp, Homo sapien
ggtacgatctcagctgactgtagcc

SEQ ID NO: 2426971 - DNA, 25 bp, Homo sapien
ccacctcccaggttcaagcaattct

SEQ ID NO: 2426972 - DNA, 25 bp, Homo sapien
aagattccagcaatctctgaaatgc

SEQ ID NO: 2426973 - DNA, 25 bp, Homo sapien
ccatttctgaacttatcagcttttc

SEQ ID NO: 2426974 - DNA, 25 bp, Homo sapien
ttctttcaagaaattctaacaagat

SEQ ID NO: 2426975 - DNA, 25 bp, Homo sapien
tcaaccatttctgaacttatcagct

SEQ ID NO: 2426976 - DNA, 25 bp, Homo sapien
tgctaggagcaattcgaagaaggtg

SEQ ID NO: 2426977 - DNA, 25 bp, Homo sapien
gccatcaacactgctaggagcaatt

SEQ ID NO: 2426978 - DNA, 25 bp, Homo sapien
tcaacactgctaggagcaattcgaa

SEQ ID NO: 2426979 - DNA, 25 bp, Homo sapien
cactgctaggagcaattcgaagaag

SEQ ID NO: 2426980 - DNA, 25 bp, Homo sapien
cttcaaggttgcgtatcaagcaccc

SEQ ID NO: 2426981 - DNA, 25 bp, Homo sapien
taaggcgaaattctacccggacatc

SEQ ID NO: 2426982 - DNA, 25 bp, Homo sapien
cattcattagttggttaaggcgaaa

SEQ ID NO: 2426983 - DNA, 25 bp, Homo sapien
cccggacatcgcaaagtcttcaagg

SEQ ID NO: 2426984 - DNA, 25 bp, Homo sapien
cgttctgagtgttcattagtgttcc

SEQ ID NO: 2426985 - DNA, 25 bp, Homo sapien
gagtgttcattagtgttccggcaca

SEQ ID NO: 2426986 - DNA, 25 bp, Homo sapien
ccctgcgttctgagtgttcattagt

SEQ ID NO: 2426987 - DNA, 25 bp, Homo sapien
gttcattagtgttccggcacacgga

SEQ ID NO: 2426988 - DNA, 25 bp, Homo sapien
gatgtttacacacaggttccaacag

SEQ ID NO: 2426989 - DNA, 25 bp, Homo sapien
cagccagaagagtcaagggcactgt

SEQ ID NO: 2426990 - DNA, 25 bp, Homo sapien
caatggtacaatcaccagacacttc

SEQ ID NO: 2426991 - DNA, 25 bp, Homo sapien
ggttccaacagctctcccacaataa

SEQ ID NO: 2426992 - DNA, 25 bp, Homo sapien
cagggcagtcaaggattctgtcttt

SEQ ID NO: 2426993 - DNA, 25 bp, Homo sapien
cagttctcccagcattaagaatgtc

SEQ ID NO: 2426994 - DNA, 25 bp, Homo sapien
taaagcaatagtgaagagtgaaacc

SEQ ID NO: 2426995 - DNA, 25 bp, Homo sapien
taagaatgtctcatgtgaagaacat

SEQ ID NO: 2426996 - DNA, 25 bp, Homo sapien
agtgaaaccactcctcttagaacga

SEQ ID NO: 2426997 - DNA, 25 bp, Homo sapien
tcagatggcttaacagatgcacagt

SEQ ID NO: 2426998 - DNA, 25 bp, Homo sapien
tttactgagctaataaggcacttcc

SEQ ID NO: 2426999 - DNA, 25 bp, Homo sapien
gcaagcacatgtacaagccagcagc

SEQ ID NO: 2427000 - DNA, 25 bp, Homo sapien
ttacaaataagagccatatgggtgc

SEQ ID NO: 2427001 - DNA, 25 bp, Homo sapien
caaggcaggatcagagagttagaac

SEQ ID NO: 2427002 - DNA, 25 bp, Homo sapien
gttagaactttgagccacactcccc

SEQ ID NO: 2427003 - DNA, 25 bp, Homo sapien
taaggacacgaattctggagtcatc

SEQ ID NO: 2427004 - DNA, 25 bp, Homo sapien
gatgactgctagctggcagccgctg

SEQ ID NO: 2427005 - DNA, 25 bp, Homo sapien
gttgttgatgtaggcagtaaaagtg

SEQ ID NO: 2427006 - DNA, 25 bp, Homo sapien
tgttgaaatagatgtcatatgtcat

SEQ ID NO: 2427007 - DNA, 25 bp, Homo sapien
catgtttgccacatactaagtgttg

SEQ ID NO: 2427008 - DNA, 25 bp, Homo sapien
gaaccacctacatcataatgttgtt

SEQ ID NO: 2427009 - DNA, 25 bp, Homo sapien
agagggccttgcatgtgaacactga

SEQ ID NO: 2427010 - DNA, 25 bp, Homo sapien
gagccgactgggaccagtttgcaga

SEQ ID NO: 2427011 - DNA, 25 bp, Homo sapien
ttctgtgtggctgagagtgcacatg

SEQ ID NO: 2427012 - DNA, 25 bp, Homo sapien
gtggtacacattttagcacagtcag

SEQ ID NO: 2427013 - DNA, 25 bp, Homo sapien
tctgcgtttcataccagtgagtact

SEQ ID NO: 2427014 - DNA, 25 bp, Homo sapien
gacttaaacattcaactccaagaac

SEQ ID NO: 2427015 - DNA, 25 bp, Homo sapien
attgtccatagagaataattcactg

SEQ ID NO: 2427016 - DNA, 25 bp, Homo sapien
caatcagcactgattagatttatga

SEQ ID NO: 2427017 - DNA, 25 bp, Homo sapien
gatttctccttccaaccaattcctg

SEQ ID NO: 2427018 - DNA, 25 bp, Homo sapien
tttcctcagatcaattctccatcca

SEQ ID NO: 2427019 - DNA, 25 bp, Homo sapien
ccctcttcagcggagttggacatta

SEQ ID NO: 2427020 - DNA, 25 bp, Homo sapien
tggttttcaccacccctagatcctc

SEQ ID NO: 2427021 - DNA, 25 bp, Homo sapien
ctgatgcctgaatagcccctgagcc

SEQ ID NO: 2427022 - DNA, 25 bp, Homo sapien
gatgcctgaatagcccctgagccca

SEQ ID NO: 2427023 - DNA, 25 bp, Homo sapien
atctgatgcctgaatagcccctgag

SEQ ID NO: 2427024 - DNA, 25 bp, Homo sapien
gctgccactttctttgggtcatctg

SEQ ID NO: 2427025 - DNA, 25 bp, Homo sapien
tcatcaaagtcaagagacagcagtc

SEQ ID NO: 2427026 - DNA, 25 bp, Homo sapien
gaagtcatactagaactcactccga

SEQ ID NO: 2427027 - DNA, 25 bp, Homo sapien
gaaaggatcagaagtgcttgttccc

SEQ ID NO: 2427028 - DNA, 25 bp, Homo sapien
gagaaacgggcttgcaacatctcat

SEQ ID NO: 2427029 - DNA, 25 bp, Homo sapien
gctttgggtgggtagctatcaaaat

SEQ ID NO: 2427030 - DNA, 25 bp, Homo sapien
tgttgctttgggtgggtagctatca

SEQ ID NO: 2427031 - DNA, 25 bp, Homo sapien
ggacacttagatgggatggttcatt

SEQ ID NO: 2427032 - DNA, 25 bp, Homo sapien
tggttcatttaagtgttgctttggg

SEQ ID NO: 2427033 - DNA, 25 bp, Homo sapien
tttcttataagggaacacaaagatc

SEQ ID NO: 2427034 - DNA, 25 bp, Homo sapien
cttataagggaacacaaagatcatt

SEQ ID NO: 2427035 - DNA, 25 bp, Homo sapien
tcttataagggaacacaaagatcat

SEQ ID NO: 2427036 - DNA, 25 bp, Homo sapien
ttataagggaacacaaagatcatta

SEQ ID NO: 2427037 - DNA, 25 bp, Homo sapien
tccagtttggtcaatgggcacgcac

SEQ ID NO: 2427038 - DNA, 25 bp, Homo sapien
ttgaattttaactggccacactgaa

SEQ ID NO: 2427039 - DNA, 25 bp, Homo sapien
tgtatattctgttaggccctcaggc

SEQ ID NO: 2427040 - DNA, 25 bp, Homo sapien
taaggctataagttgcacctggctc

SEQ ID NO: 2427041 - DNA, 25 bp, Homo sapien
ggcgtgcacaaccacgccaggctaa

SEQ ID NO: 2427042 - DNA, 25 bp, Homo sapien
aggcgtgcacaaccacgccaggcta

SEQ ID NO: 2427043 - DNA, 25 bp, Homo sapien
caggcgtgcacaaccacgccaggct

SEQ ID NO: 2427044 - DNA, 25 bp, Homo sapien
gaccataattgcaagcccagggatc

SEQ ID NO: 2427045 - DNA, 25 bp, Homo sapien
gaggagtctacttacgggtctgcat

SEQ ID NO: 2427046 - DNA, 25 bp, Homo sapien
gctacatgccgccaatattgtgtgt

SEQ ID NO: 2427047 - DNA, 25 bp, Homo sapien
ccagggatctctgcctcagataaaa

SEQ ID NO: 2427048 - DNA, 25 bp, Homo sapien
gaaatagtcaatgccagtggaccag

SEQ ID NO: 2427049 - DNA, 25 bp, Homo sapien
agtgtcatgacatcagcgtgctcca

SEQ ID NO: 2427050 - DNA, 25 bp, Homo sapien
aaggtctaatcggttcaggctgggc

SEQ ID NO: 2427051 - DNA, 25 bp, Homo sapien
tacattctgagaggtttgatcaccc

SEQ ID NO: 2427052 - DNA, 25 bp, Homo sapien
gagcccaaaatataggtataggcca

SEQ ID NO: 2427053 - DNA, 25 bp, Homo sapien
gcaccactacatgtagctttcctgt

SEQ ID NO: 2427054 - DNA, 25 bp, Homo sapien
ggaaattaactgcagtaagtagaat

SEQ ID NO: 2427055 - DNA, 25 bp, Homo sapien
tcccatgatattagagagcccaaaa

SEQ ID NO: 2427056 - DNA, 25 bp, Homo sapien
tcatcagcaagtgtgcaaaccctta

SEQ ID NO: 2427057 - DNA, 25 bp, Homo sapien
ccttaactgtgggtaacatccattt

SEQ ID NO: 2427058 - DNA, 25 bp, Homo sapien
cactcggtgataactcgccaattag

SEQ ID NO: 2427059 - DNA, 25 bp, Homo sapien
gagcacatgcattgttaacctctaa

SEQ ID NO: 2427060 - DNA, 25 bp, Homo sapien
cagaaagtctccgtgccgaccgcgg

SEQ ID NO: 2427061 - DNA, 25 bp, Homo sapien
cgagggtgagcagcgcacgaaccat

SEQ ID NO: 2427062 - DNA, 25 bp, Homo sapien
ggagacgcaactcggctgcactgtc

SEQ ID NO: 2427063 - DNA, 25 bp, Homo sapien
caggctgcgcgaggctggcatgttc

SEQ ID NO: 2427064 - DNA, 25 bp, Homo sapien
tatgcgcagggagaaaaaagttcac

SEQ ID NO: 2427065 - DNA, 25 bp, Homo sapien
tccagagtcgcaagtgcggctcgct

SEQ ID NO: 2427066 - DNA, 25 bp, Homo sapien
ggacccgtttggactcgatcctgtc

SEQ ID NO: 2427067 - DNA, 25 bp, Homo sapien
tttaaccaacaatcccgatggactg

SEQ ID NO: 2427068 - DNA, 25 bp, Homo sapien
agaaagcgaatcctgtgctggctct

SEQ ID NO: 2427069 - DNA, 25 bp, Homo sapien
caatgatgttactgttggtcagaaa

SEQ ID NO: 2427070 - DNA, 25 bp, Homo sapien
tactgttggtcagaaagcgaatcct

SEQ ID NO: 2427071 - DNA, 25 bp, Homo sapien
tacgtggcactaccaatgatgttac

SEQ ID NO: 2427072 - DNA, 25 bp, Homo sapien
ttggatcaatgcacatcgcatgatg

SEQ ID NO: 2427073 - DNA, 25 bp, Homo sapien
tggatcaatgcacatcgcatgatgt

SEQ ID NO: 2427074 - DNA, 25 bp, Homo sapien
cttggatcaatgcacatcgcatgat

SEQ ID NO: 2427075 - DNA, 25 bp, Homo sapien
ggatcaatgcacatcgcatgatgta

SEQ ID NO: 2427076 - DNA, 25 bp, Homo sapien
tactttcttgctaatctgcctgtct

SEQ ID NO: 2427077 - DNA, 25 bp, Homo sapien
ctagcagttccttcccagacatagg

SEQ ID NO: 2427078 - DNA, 25 bp, Homo sapien
tttcttgtctccctagcagttcctt

SEQ ID NO: 2427079 - DNA, 25 bp, Homo sapien
ttactttcttgctaatctgcctgtc

SEQ ID NO: 2427080 - DNA, 25 bp, Homo sapien
gatctgtaattcatagtggccccag

SEQ ID NO: 2427081 - DNA, 25 bp, Homo sapien
cccgaggtgaatcttttgtaaggca

SEQ ID NO: 2427082 - DNA, 25 bp, Homo sapien
catatagtcaaaagaccccgaggtg

SEQ ID NO: 2427083 - DNA, 25 bp, Homo sapien
tataggttagtgcactccagggctc

SEQ ID NO: 2427084 - DNA, 25 bp, Homo sapien
gcaagaagtccggtaagtccgtgaa

SEQ ID NO: 2427085 - DNA, 25 bp, Homo sapien
agtccggtaagtccgtgaagttcat

SEQ ID NO: 2427086 - DNA, 25 bp, Homo sapien
tggcaagaagtccggtaagtccgtg

SEQ ID NO: 2427087 - DNA, 25 bp, Homo sapien
caagaagtccggtaagtccgtgaag

SEQ ID NO: 2427088 - DNA, 25 bp, Homo sapien
gcctcaaggctagaagccatgccaa

SEQ ID NO: 2427089 - DNA, 25 bp, Homo sapien
cattccttagttaccaaaggtcagg

SEQ ID NO: 2427090 - DNA, 25 bp, Homo sapien
caaataatttgaggttcctgggact

SEQ ID NO: 2427091 - DNA, 25 bp, Homo sapien
ttgcagacaacataccagaccagcc

SEQ ID NO: 2427092 - DNA, 25 bp, Homo sapien
tgtgaaggagccttaggaggataga

SEQ ID NO: 2427093 - DNA, 25 bp, Homo sapien
ggctgattgttgattccctttattt

SEQ ID NO: 2427094 - DNA, 25 bp, Homo sapien
gatagaggctacgtaaatagtggtg

SEQ ID NO: 2427095 - DNA, 25 bp, Homo sapien
ctggtagccacagcgagcaggttgc

SEQ ID NO: 2427096 - DNA, 25 bp, Homo sapien
gagtttcccaactcccgttcaatga

SEQ ID NO: 2427097 - DNA, 25 bp, Homo sapien
tctctttggtaagtggagtttccca

SEQ ID NO: 2427098 - DNA, 25 bp, Homo sapien
caacggtacttgtctgagagggaaa

SEQ ID NO: 2427099 - DNA, 25 bp, Homo sapien
tgatctgtcaaagttagaatgcaca

SEQ ID NO: 2427100 - DNA, 25 bp, Homo sapien
caggagggccatttcggtcatttgg

SEQ ID NO: 2427101 - DNA, 25 bp, Homo sapien
gctttttactttgtcactatgctgg

SEQ ID NO: 2427102 - DNA, 25 bp, Homo sapien
taaaatgtagtcctggagtagcagg

SEQ ID NO: 2427103 - DNA, 25 bp, Homo sapien
tcacatcactggcttgaactaatca

SEQ ID NO: 2427104 - DNA, 25 bp, Homo sapien
tcaggtaatttcacgacaagtatca

SEQ ID NO: 2427105 - DNA, 25 bp, Homo sapien
caatcaggtaatttcacgacaagta

SEQ ID NO: 2427106 - DNA, 25 bp, Homo sapien
ttcacgacaagtatcaaaactgtcc

SEQ ID NO: 2427107 - DNA, 25 bp, Homo sapien
ggtaatttcacgacaagtatcaaaa

SEQ ID NO: 2427108 - DNA, 25 bp, Homo sapien
gaatgggaatttttggacctccaga

SEQ ID NO: 2427109 - DNA, 25 bp, Homo sapien
catccattcaactcgtccgctggaa

SEQ ID NO: 2427110 - DNA, 25 bp, Homo sapien
tccagaaacggcagtacacagcatt

SEQ ID NO: 2427111 - DNA, 25 bp, Homo sapien
actcatggcgccgtcgcttgcaagg

SEQ ID NO: 2427112 - DNA, 25 bp, Homo sapien
tcagaaatctcaacaggatgcctct

SEQ ID NO: 2427113 - DNA, 25 bp, Homo sapien
tagagctggaggctatctatagacc

SEQ ID NO: 2427114 - DNA, 25 bp, Homo sapien
tacaaatagggcagtgatagttcac

SEQ ID NO: 2427115 - DNA, 25 bp, Homo sapien
aggcaagcagcgacctaggactcag

SEQ ID NO: 2427116 - DNA, 25 bp, Homo sapien
gcctactgaacatgatgatgcattc

SEQ ID NO: 2427117 - DNA, 25 bp, Homo sapien
tctggtgaactaaggaagacttctt

SEQ ID NO: 2427118 - DNA, 25 bp, Homo sapien
gaactaaggaagacttcttgctgta

SEQ ID NO: 2427119 - DNA, 25 bp, Homo sapien
tcttgctgtatgattagcctactga

SEQ ID NO: 2427120 - DNA, 25 bp, Homo sapien
tcttgcccacacttatcctttagat

SEQ ID NO: 2427121 - DNA, 25 bp, Homo sapien
ttgttgcctctgtttaactgtttga

SEQ ID NO: 2427122 - DNA, 25 bp, Homo sapien
gagcaatagcgaagtctttctttaa

SEQ ID NO: 2427123 - DNA, 25 bp, Homo sapien
tatcctttagatcttttccctctga

SEQ ID NO: 2427124 - DNA, 25 bp, Homo sapien
ccccttacagtcagcaaattgtatt

SEQ ID NO: 2427125 - DNA, 25 bp, Homo sapien
ctcactgttaacactggaactggtg

SEQ ID NO: 2427126 - DNA, 25 bp, Homo sapien
ctgttaacactggaactggtgagag

SEQ ID NO: 2427127 - DNA, 25 bp, Homo sapien
ctggtgagaggaaactttcaccttt

SEQ ID NO: 2427128 - DNA, 25 bp, Homo sapien
ttctttatttggcaccttgcttctc

SEQ ID NO: 2427129 - DNA, 25 bp, Homo sapien
atgtcctcctcgcttggacacatca

SEQ ID NO: 2427130 - DNA, 25 bp, Homo sapien
acatttgacctctcattctttattt

SEQ ID NO: 2427131 - DNA, 25 bp, Homo sapien
tgcttctcttatgtcctcctcgctt

SEQ ID NO: 2427132 - DNA, 25 bp, Homo sapien
ctttctgaattctaggtgaattgcc

SEQ ID NO: 2427133 - DNA, 25 bp, Homo sapien
tatttgttgctttctgaattctagg

SEQ ID NO: 2427134 - DNA, 25 bp, Homo sapien
gatcctctagcaggatacctctttg

SEQ ID NO: 2427135 - DNA, 25 bp, Homo sapien
ttccctaatccatcgttagcctggg

SEQ ID NO: 2427136 - DNA, 25 bp, Homo sapien
tggagaaggcttttcaaggacaagc

SEQ ID NO: 2427137 - DNA, 25 bp, Homo sapien
ctgtagttagttgaggaagtgtctg

SEQ ID NO: 2427138 - DNA, 25 bp, Homo sapien
agtgttccaaagatggcgagtgtat

SEQ ID NO: 2427139 - DNA, 25 bp, Homo sapien
tttctcatgttctgagctagctctg

SEQ ID NO: 2427140 - DNA, 25 bp, Homo sapien
aacagtgggtattggtgaacagcaa

SEQ ID NO: 2427141 - DNA, 25 bp, Homo sapien
ctactgtcttccaagctgtcagaca

SEQ ID NO: 2427142 - DNA, 25 bp, Homo sapien
tgggtattggtgaacagcaaatgtt

SEQ ID NO: 2427143 - DNA, 25 bp, Homo sapien
gggagaaccactactgtcttccaag

SEQ ID NO: 2427144 - DNA, 25 bp, Homo sapien
tcactcttgtaatggccttgtgtgt

SEQ ID NO: 2427145 - DNA, 25 bp, Homo sapien
ggtcttgccatgctcttactgctga

SEQ ID NO: 2427146 - DNA, 25 bp, Homo sapien
cagtgttaaacagtagagctgtgtc

SEQ ID NO: 2427147 - DNA, 25 bp, Homo sapien
tatgccagaaggctggacctccttc

SEQ ID NO: 2427148 - DNA, 25 bp, Homo sapien
aggttttgttctctccctgggccat

SEQ ID NO: 2427149 - DNA, 25 bp, Homo sapien
caggttttgttctctccctgggcca

SEQ ID NO: 2427150 - DNA, 25 bp, Homo sapien
tgcaggttttgttctctccctgggc

SEQ ID NO: 2427151 - DNA, 25 bp, Homo sapien
ttctgcaggttttgttctctccctg

SEQ ID NO: 2427152 - DNA, 25 bp, Homo sapien
aatgtgtttattgagtttcccactc

SEQ ID NO: 2427153 - DNA, 25 bp, Homo sapien
tttaatccaaaatgtgtttattgag

SEQ ID NO: 2427154 - DNA, 25 bp, Homo sapien
aatccaaaatgtgtttattgagttt

SEQ ID NO: 2427155 - DNA, 25 bp, Homo sapien
caaaatgtgtttattgagtttccca

SEQ ID NO: 2427156 - DNA, 25 bp, Homo sapien
cttctcctcttctggggagggatga

SEQ ID NO: 2427157 - DNA, 25 bp, Homo sapien
gatgaaggagatcctttgcgagagg

SEQ ID NO: 2427158 - DNA, 25 bp, Homo sapien
aaggagatcctttgcgagaggcatg

SEQ ID NO: 2427159 - DNA, 25 bp, Homo sapien
ggagggatgaaggagatcctttgcg

SEQ ID NO: 2427160 - DNA, 25 bp, Homo sapien
tttgtgctggcatttgacgaggtct

SEQ ID NO: 2427161 - DNA, 25 bp, Homo sapien
ggaaagtggaactctgcttttgtgc

SEQ ID NO: 2427162 - DNA, 25 bp, Homo sapien
catttgacgaggtctgatttcccca

SEQ ID NO: 2427163 - DNA, 25 bp, Homo sapien
aggtcgtcaccgctggaaagtggaa

SEQ ID NO: 2427164 - DNA, 25 bp, Homo sapien
ttcttaacgccgccaatgcctgttt

SEQ ID NO: 2427165 - DNA, 25 bp, Homo sapien
ccctgatgagatcgcgatgccattc

SEQ ID NO: 2427166 - DNA, 25 bp, Homo sapien
ttccctgatgagatcgcgatgccat

SEQ ID NO: 2427167 - DNA, 25 bp, Homo sapien
tttagaattcttaacgccgccaatg

SEQ ID NO: 2427168 - DNA, 25 bp, Homo sapien
agagccagctggactgagagtgaag

SEQ ID NO: 2427169 - DNA, 25 bp, Homo sapien
accatgttgtgtcaaagcccaggcc

SEQ ID NO: 2427170 - DNA, 25 bp, Homo sapien
ctgtgaagtccactcctgttcctcc

SEQ ID NO: 2427171 - DNA, 25 bp, Homo sapien
tcctgtgaagtccactcctgttcct

SEQ ID NO: 2427172 - DNA, 25 bp, Homo sapien
aagcactccttagatccagtatcta

SEQ ID NO: 2427173 - DNA, 25 bp, Homo sapien
agcactccttagatccagtatctag

SEQ ID NO: 2427174 - DNA, 25 bp, Homo sapien
gcactccttagatccagtatctagc

SEQ ID NO: 2427175 - DNA, 25 bp, Homo sapien
actccttagatccagtatctagcat

SEQ ID NO: 2427176 - DNA, 25 bp, Homo sapien
tctgcttgggctagtcggcttggat

SEQ ID NO: 2427177 - DNA, 25 bp, Homo sapien
cttttggaatgtttgacccgttctg

SEQ ID NO: 2427178 - DNA, 25 bp, Homo sapien
aatgtttgacccgttctgcttgggc

SEQ ID NO: 2427179 - DNA, 25 bp, Homo sapien
cggcttggattggatgatatgtcag

SEQ ID NO: 2427180 - DNA, 25 bp, Homo sapien
cattcctctttgagatacgagcaga

SEQ ID NO: 2427181 - DNA, 25 bp, Homo sapien
cacgatgccgtagccttggtttgta

SEQ ID NO: 2427182 - DNA, 25 bp, Homo sapien
agaacactcacacccttcaagattg

SEQ ID NO: 2427183 - DNA, 25 bp, Homo sapien
agatgcttccaacaactgtctacag

SEQ ID NO: 2427184 - DNA, 25 bp, Homo sapien
gccatatcatattctatatagcatg

SEQ ID NO: 2427185 - DNA, 25 bp, Homo sapien
ggcgttgctgtttagccatatcata

SEQ ID NO: 2427186 - DNA, 25 bp, Homo sapien
tgtgaacaccacaagaagcctcctg

SEQ ID NO: 2427187 - DNA, 25 bp, Homo sapien
cctgactgtagcagccaaaaggcgt

SEQ ID NO: 2427188 - DNA, 25 bp, Homo sapien
cagtccctgtatttgtgttccatct

SEQ ID NO: 2427189 - DNA, 25 bp, Homo sapien
atcttgttcccatgtgcctgactcc

SEQ ID NO: 2427190 - DNA, 25 bp, Homo sapien
tcttgttcccatgtgcctgactcct

SEQ ID NO: 2427191 - DNA, 25 bp, Homo sapien
ccctgtatttgtgttccatcttgtt

SEQ ID NO: 2427192 - DNA, 25 bp, Homo sapien
tgggtgaccacaaccatgaacgagg

SEQ ID NO: 2427193 - DNA, 25 bp, Homo sapien
caacggtacctgagtaagagcctca

SEQ ID NO: 2427194 - DNA, 25 bp, Homo sapien
ggttttctacccttgattgcaggga

SEQ ID NO: 2427195 - DNA, 25 bp, Homo sapien
gacactggacgtcagttttggagag

SEQ ID NO: 2427196 - DNA, 25 bp, Homo sapien
tgtcctgtgaacgtccgggactcaa

SEQ ID NO: 2427197 - DNA, 25 bp, Homo sapien
tatccctgataaacgggtcacagcc

SEQ ID NO: 2427198 - DNA, 25 bp, Homo sapien
ccatgatgaagcaggcggaggaacc

SEQ ID NO: 2427199 - DNA, 25 bp, Homo sapien
gaagaatccagttttgtcgctgcac

SEQ ID NO: 2427200 - DNA, 25 bp, Homo sapien
tggtgataatgccaacttctgctcc

SEQ ID NO: 2427201 - DNA, 25 bp, Homo sapien
atctcagaaattttggcttggtgat

SEQ ID NO: 2427202 - DNA, 25 bp, Homo sapien
tatttgcttaagaatctcctgttgc

SEQ ID NO: 2427203 - DNA, 25 bp, Homo sapien
gccaacttctgctcctatttgctta

SEQ ID NO: 2427204 - DNA, 25 bp, Homo sapien
tattgcatataaggagttgaagaca

SEQ ID NO: 2427205 - DNA, 25 bp, Homo sapien
caccctgtcatgatagtggttgcac

SEQ ID NO: 2427206 - DNA, 25 bp, Homo sapien
ccactgaagtagttgacggtctctt

SEQ ID NO: 2427207 - DNA, 25 bp, Homo sapien
ttttgttcaatcgacagcagagtgc

SEQ ID NO: 2427208 - DNA, 25 bp, Homo sapien
agcagcaggccaaatagccaaattt

SEQ ID NO: 2427209 - DNA, 25 bp, Homo sapien
cagcaggccaaatagccaaatttgg

SEQ ID NO: 2427210 - DNA, 25 bp, Homo sapien
gagacatcagtccatttatctcctc

SEQ ID NO: 2427211 - DNA, 25 bp, Homo sapien
ttggatccagagacatcagtccatt

SEQ ID NO: 2427212 - DNA, 25 bp, Homo sapien
aaagcttcgtatgaaactgtctgcc

SEQ ID NO: 2427213 - DNA, 25 bp, Homo sapien
tttaaagcttcgtatgaaactgtct

SEQ ID NO: 2427214 - DNA, 25 bp, Homo sapien
taaagcttcgtatgaaactgtctgc

SEQ ID NO: 2427215 - DNA, 25 bp, Homo sapien
aagcttcgtatgaaactgtctgcca

SEQ ID NO: 2427216 - DNA, 25 bp, Homo sapien
acttctttttcgctagtgcctagag

SEQ ID NO: 2427217 - DNA, 25 bp, Homo sapien
ttctttttcgctagtgcctagagca

SEQ ID NO: 2427218 - DNA, 25 bp, Homo sapien
agagaacttctttttcgctagtgcc

SEQ ID NO: 2427219 - DNA, 25 bp, Homo sapien
gaacttctttttcgctagtgcctag

SEQ ID NO: 2427220 - DNA, 25 bp, Homo sapien
tactgcgttaggctactgtgtgtca

SEQ ID NO: 2427221 - DNA, 25 bp, Homo sapien
ggttgtgtggttgacaggtccacca

SEQ ID NO: 2427222 - DNA, 25 bp, Homo sapien
ggtccaccagatgggagtagcacca

SEQ ID NO: 2427223 - DNA, 25 bp, Homo sapien
tgcaactttgtggtaggatactggg

SEQ ID NO: 2427224 - DNA, 25 bp, Homo sapien
tacctgacggtattagaggcccaac

SEQ ID NO: 2427225 - DNA, 25 bp, Homo sapien
tattagaggcccaactagaggccct

SEQ ID NO: 2427226 - DNA, 25 bp, Homo sapien
gacggtattagaggcccaactagag

SEQ ID NO: 2427227 - DNA, 25 bp, Homo sapien
agagtgactacctgacggtattaga

SEQ ID NO: 2427228 - DNA, 25 bp, Homo sapien
tagcggagatctttgacaggaggca

SEQ ID NO: 2427229 - DNA, 25 bp, Homo sapien
acaaagcccgccttgttccaaaatg

SEQ ID NO: 2427230 - DNA, 25 bp, Homo sapien
caagaggcgataatgtaggaggcac

SEQ ID NO: 2427231 - DNA, 25 bp, Homo sapien
ccttgcgatggagcggctgtctagt

SEQ ID NO: 2427232 - DNA, 25 bp, Homo sapien
ggccaaggacctgcatggcatgcat

SEQ ID NO: 2427233 - DNA, 25 bp, Homo sapien
aacagctcactcgacatccctttcc

SEQ ID NO: 2427234 - DNA, 25 bp, Homo sapien
ttcgattcggctggcaacagctcac

SEQ ID NO: 2427235 - DNA, 25 bp, Homo sapien
tctctctgctcttcgattcggctgg

SEQ ID NO: 2427236 - DNA, 25 bp, Homo sapien
tacttttattagtatgtcagtggat

SEQ ID NO: 2427237 - DNA, 25 bp, Homo sapien
tttattagtatgtcagtggatatag

SEQ ID NO: 2427238 - DNA, 25 bp, Homo sapien
cttttattagtatgtcagtggatat

SEQ ID NO: 2427239 - DNA, 25 bp, Homo sapien
tattagtatgtcagtggatatagta

SEQ ID NO: 2427240 - DNA, 25 bp, Homo sapien
tctttgacatagctttcctgagttg

SEQ ID NO: 2427241 - DNA, 25 bp, Homo sapien
ctctttgacatagctttcctgagtt

SEQ ID NO: 2427242 - DNA, 25 bp, Homo sapien
tttgacatagctttcctgagttgag

SEQ ID NO: 2427243 - DNA, 25 bp, Homo sapien
ctttgacatagctttcctgagttga

SEQ ID NO: 2427244 - DNA, 25 bp, Homo sapien
ttagctgttagctgtttcttcctca

SEQ ID NO: 2427245 - DNA, 25 bp, Homo sapien
gttagctgttagctgtttcttcctc

SEQ ID NO: 2427246 - DNA, 25 bp, Homo sapien
tagctgttagctgtttcttcctcat

SEQ ID NO: 2427247 - DNA, 25 bp, Homo sapien
cagtgtcactttggtggccctttgg

SEQ ID NO: 2427248 - DNA, 25 bp, Homo sapien
caaatctgccactctgtgaaaagac

SEQ ID NO: 2427249 - DNA, 25 bp, Homo sapien
tcaaggcagggactgaagacttcca

SEQ ID NO: 2427250 - DNA, 25 bp, Homo sapien
ctcattaagggtattgtgcatggaa

SEQ ID NO: 2427251 - DNA, 25 bp, Homo sapien
gagctgtggcctttaatagatgtgg

SEQ ID NO: 2427252 - DNA, 25 bp, Homo sapien
gaatgtagctgctgataaaccaagg

SEQ ID NO: 2427253 - DNA, 25 bp, Homo sapien
actgggagccaatgagagctgtggc

SEQ ID NO: 2427254 - DNA, 25 bp, Homo sapien
taatagatgtggcaggacagcagca

SEQ ID NO: 2427255 - DNA, 25 bp, Homo sapien
tcaatgacgatggtaactaagttcc

SEQ ID NO: 2427256 - DNA, 25 bp, Homo sapien
cggcatctgcaaccccaaagaagat

SEQ ID NO: 2427257 - DNA, 25 bp, Homo sapien
agaagatatcgtttcctggttggcc

SEQ ID NO: 2427258 - DNA, 25 bp, Homo sapien
tcagcatctgcaacgtgaactcagt

SEQ ID NO: 2427259 - DNA, 25 bp, Homo sapien
ggtttgtgccatatggggcagaaaa

SEQ ID NO: 2427260 - DNA, 25 bp, Homo sapien
taaacaactctctgcacgagcgatg

SEQ ID NO: 2427261 - DNA, 25 bp, Homo sapien
gctaaataaacaactctctgcacga

SEQ ID NO: 2427262 - DNA, 25 bp, Homo sapien
ctctctgcacgagcgatggctgaag

SEQ ID NO: 2427263 - DNA, 25 bp, Homo sapien
tcctcattgtcacaagggaatcccg

SEQ ID NO: 2427264 - DNA, 25 bp, Homo sapien
cagtatgtgttagtgaagacagagc

SEQ ID NO: 2427265 - DNA, 25 bp, Homo sapien
gggaatcccgttcaattgaattctg

SEQ ID NO: 2427266 - DNA, 25 bp, Homo sapien
ttttccgtggacagagaacttctca

SEQ ID NO: 2427267 - DNA, 25 bp, Homo sapien
tcatcctttagaataggggaagaag

SEQ ID NO: 2427268 - DNA, 25 bp, Homo sapien
catcctttagaataggggaagaagg

SEQ ID NO: 2427269 - DNA, 25 bp, Homo sapien
gaatctgctgagaagaagacgataa

SEQ ID NO: 2427270 - DNA, 25 bp, Homo sapien
ttaagaatctgctgagaagaagacg

SEQ ID NO: 2427271 - DNA, 25 bp, Homo sapien
atctgctgagaagaagacgataaac

SEQ ID NO: 2427272 - DNA, 25 bp, Homo sapien
taagaatctgctgagaagaagacga

SEQ ID NO: 2427273 - DNA, 25 bp, Homo sapien
gggatactctgagcccattttgtca

SEQ ID NO: 2427274 - DNA, 25 bp, Homo sapien
tactctgagcccattttgtcacagg

SEQ ID NO: 2427275 - DNA, 25 bp, Homo sapien
tttccattctgggatactctgagcc

SEQ ID NO: 2427276 - DNA, 25 bp, Homo sapien
cattctgggatactctgagcccatt

SEQ ID NO: 2427277 - DNA, 25 bp, Homo sapien
tgtgaacacaaagtaccttggcctg

SEQ ID NO: 2427278 - DNA, 25 bp, Homo sapien
caggagagtatcctacattgtgcca

SEQ ID NO: 2427279 - DNA, 25 bp, Homo sapien
cattgtgccattagaactgagaagg

SEQ ID NO: 2427280 - DNA, 25 bp, Homo sapien
tgagaagcactaccatgtgatcttg

SEQ ID NO: 2427281 - DNA, 25 bp, Homo sapien
tatggccttaaaataacgtatgttc

SEQ ID NO: 2427282 - DNA, 25 bp, Homo sapien
tatgttcttagatttccccttgtat

SEQ ID NO: 2427283 - DNA, 25 bp, Homo sapien
caacttaatattagctgtttcagaa

SEQ ID NO: 2427284 - DNA, 25 bp, Homo sapien
cattcctacccctctttatggcctt

SEQ ID NO: 2427285 - DNA, 25 bp, Homo sapien
tctctgaaatgttgactaacctagg

SEQ ID NO: 2427286 - DNA, 25 bp, Homo sapien
gaagggagccagttatacaaatcta

SEQ ID NO: 2427287 - DNA, 25 bp, Homo sapien
aacctaggtttagaggcagctacgc

SEQ ID NO: 2427288 - DNA, 25 bp, Homo sapien
gaactgtaagactctatggccggga

SEQ ID NO: 2427289 - DNA, 25 bp, Homo sapien
tgtcgcttaagtcaatacgggtgtc

SEQ ID NO: 2427290 - DNA, 25 bp, Homo sapien
gcagctggattttcaacggttgtca

SEQ ID NO: 2427291 - DNA, 25 bp, Homo sapien
catatagctttggtggactcggatc

SEQ ID NO: 2427292 - DNA, 25 bp, Homo sapien
gagacgtggtttccttggctcctaa

SEQ ID NO: 2427293 - DNA, 25 bp, Homo sapien
tccgccagtcgccatcatccaatgg

SEQ ID NO: 2427294 - DNA, 25 bp, Homo sapien
aggtggtacgcaccccattcccagt

SEQ ID NO: 2427295 - DNA, 25 bp, Homo sapien
ggctgcttccctttggctagttggt

SEQ ID NO: 2427296 - DNA, 25 bp, Homo sapien
tgatgtgagacttggtgatgattcc

SEQ ID NO: 2427297 - DNA, 25 bp, Homo sapien
acaaaaattcccagagacaaggcca

SEQ ID NO: 2427298 - DNA, 25 bp, Homo sapien
cactagcacagttgtgaaagggcca

SEQ ID NO: 2427299 - DNA, 25 bp, Homo sapien
ggactgggccagagtaagaagcaca

SEQ ID NO: 2427300 - DNA, 25 bp, Homo sapien
gaaacagctaagtagagagccagtg

SEQ ID NO: 2427301 - DNA, 25 bp, Homo sapien
ggttctgtccgaggatgccatccag

SEQ ID NO: 2427302 - DNA, 25 bp, Homo sapien
tccgaggatgccatccagttctgcc

SEQ ID NO: 2427303 - DNA, 25 bp, Homo sapien
tatacggttctgtccgaggatgcca

SEQ ID NO: 2427304 - DNA, 25 bp, Homo sapien
gaagtgaagatatacggttctgtcc

SEQ ID NO: 2427305 - DNA, 25 bp, Homo sapien
accacccatcactgtaaggtagtag

SEQ ID NO: 2427306 - DNA, 25 bp, Homo sapien
ggtgggcttcgaataggaaatgtgc

SEQ ID NO: 2427307 - DNA, 25 bp, Homo sapien
tgcagagcttccagcggtgggcttc

SEQ ID NO: 2427308 - DNA, 25 bp, Homo sapien
taggaaatgtgctggtgcacccagc

SEQ ID NO: 2427309 - DNA, 25 bp, Homo sapien
ctgagctgcctttgaagaggaatgc

SEQ ID NO: 2427310 - DNA, 25 bp, Homo sapien
tgagctgcctttgaagaggaatgca

SEQ ID NO: 2427311 - DNA, 25 bp, Homo sapien
gagctgcctttgaagaggaatgcat

SEQ ID NO: 2427312 - DNA, 25 bp, Homo sapien
tctgagctgcctttgaagaggaatg

SEQ ID NO: 2427313 - DNA, 25 bp, Homo sapien
gctgtcaatttcctatctgtgggct

SEQ ID NO: 2427314 - DNA, 25 bp, Homo sapien
tgggcttggttgctatctcacaggt

SEQ ID NO: 2427315 - DNA, 25 bp, Homo sapien
tcacaggttgactccaggtcaaatg

SEQ ID NO: 2427316 - DNA, 25 bp, Homo sapien
taaaagggagcatatgtacactctg

SEQ ID NO: 2427317 - DNA, 25 bp, Homo sapien
ctttagcaggtcagtttttcctgtg

SEQ ID NO: 2427318 - DNA, 25 bp, Homo sapien
tctttagcaggtcagtttttcctgt

SEQ ID NO: 2427319 - DNA, 25 bp, Homo sapien
gtatgtaatttaagtacctgaacca

SEQ ID NO: 2427320 - DNA, 25 bp, Homo sapien
caaagcttctgatgtattgggctta

SEQ ID NO: 2427321 - DNA, 25 bp, Homo sapien
ggcttagaatggtctctctgtcagg

SEQ ID NO: 2427322 - DNA, 25 bp, Homo sapien
tgaaccatcctgctggcagttgcca

SEQ ID NO: 2427323 - DNA, 25 bp, Homo sapien
tgactgctcgtggtgtattgatgag

SEQ ID NO: 2427324 - DNA, 25 bp, Homo sapien
caagagtatcaacatctattgcaat

SEQ ID NO: 2427325 - DNA, 25 bp, Homo sapien
aagagtatcaacatctattgcaatg

SEQ ID NO: 2427326 - DNA, 25 bp, Homo sapien
ttgcaatgactgctcgtggtgtatt

SEQ ID NO: 2427327 - DNA, 25 bp, Homo sapien
tagccagtctgaacaaagaattcct

SEQ ID NO: 2427328 - DNA, 25 bp, Homo sapien
tgcatttgcatcaaacacgttgtgt

SEQ ID NO: 2427329 - DNA, 25 bp, Homo sapien
cagccaggcgagaccttacagtaat

SEQ ID NO: 2427330 - DNA, 25 bp, Homo sapien
gatgtaatacaagaccagccaggcg

SEQ ID NO: 2427331 - DNA, 25 bp, Homo sapien
tctagacagtgtggttgctctctgg

SEQ ID NO: 2427332 - DNA, 25 bp, Homo sapien
gatcatggaggaagtctcagcagac

SEQ ID NO: 2427333 - DNA, 25 bp, Homo sapien
tttctgggaactgatttcttttgga

SEQ ID NO: 2427334 - DNA, 25 bp, Homo sapien
tttcccataccaccaacttaggcag

SEQ ID NO: 2427335 - DNA, 25 bp, Homo sapien
ctacagttagctacgattgtgctgc

SEQ ID NO: 2427336 - DNA, 25 bp, Homo sapien
aatcagatctgtgttaaaattgtgg

SEQ ID NO: 2427337 - DNA, 25 bp, Homo sapien
tatcaatcagatctgtgttaaaatt

SEQ ID NO: 2427338 - DNA, 25 bp, Homo sapien
gagacagtgtctaagtattttgata

SEQ ID NO: 2427339 - DNA, 25 bp, Homo sapien
tttttctggacctcaagtatagagg

SEQ ID NO: 2427340 - DNA, 25 bp, Homo sapien
tctggacctcaagtatagagggttt

SEQ ID NO: 2427341 - DNA, 25 bp, Homo sapien
caagtatagagggtttatgactttc

SEQ ID NO: 2427342 - DNA, 25 bp, Homo sapien
gacctcaagtatagagggtttatga

SEQ ID NO: 2427343 - DNA, 25 bp, Homo sapien
tttaatttctatcatggctagttgt

SEQ ID NO: 2427344 - DNA, 25 bp, Homo sapien
atttttaatttctatcatggctagt

SEQ ID NO: 2427345 - DNA, 25 bp, Homo sapien
ttttaatttctatcatggctagttg

SEQ ID NO: 2427346 - DNA, 25 bp, Homo sapien
tttttaatttctatcatggctagtt

SEQ ID NO: 2427347 - DNA, 25 bp, Homo sapien
gatctctcaggagtgcaaaaggcca

SEQ ID NO: 2427348 - DNA, 25 bp, Homo sapien
ggccttcaccagatggaacacagca

SEQ ID NO: 2427349 - DNA, 25 bp, Homo sapien
tcatgcccaaagtgcaccaggcctt

SEQ ID NO: 2427350 - DNA, 25 bp, Homo sapien
ggtagtggcccaatgaagacaaggt

SEQ ID NO: 2427351 - DNA, 25 bp, Homo sapien
ctctaggccctaatattttggtgga

SEQ ID NO: 2427352 - DNA, 25 bp, Homo sapien
tataccgtgtagttccagcattcgc

SEQ ID NO: 2427353 - DNA, 25 bp, Homo sapien
aagaatagaggcgttctctaggccc

SEQ ID NO: 2427354 - DNA, 25 bp, Homo sapien
cgcttcctctccgaatgctgtatga

SEQ ID NO: 2427355 - DNA, 25 bp, Homo sapien
gagagcgtgtgctgggatactccca

SEQ ID NO: 2427356 - DNA, 25 bp, Homo sapien
gaataaattccacaccaactctagg

SEQ ID NO: 2427357 - DNA, 25 bp, Homo sapien
tctcccattggaaatacttgatcct

SEQ ID NO: 2427358 - DNA, 25 bp, Homo sapien
caaacagaattaggtttgagctccc

SEQ ID NO: 2427359 - DNA, 25 bp, Homo sapien
cctgaagaaagtcaagagacgccac

SEQ ID NO: 2427360 - DNA, 25 bp, Homo sapien
ggcatgtcttactccagtcccacgt

SEQ ID NO: 2427361 - DNA, 25 bp, Homo sapien
gagaaaatgctgctgcggcatgtct

SEQ ID NO: 2427362 - DNA, 25 bp, Homo sapien
gagagagctgcgtgtcctttatcca

SEQ ID NO: 2427363 - DNA, 25 bp, Homo sapien
gacttggctgacattacttccttcc

SEQ ID NO: 2427364 - DNA, 25 bp, Homo sapien
cacaactggaacaggccacagcttg

SEQ ID NO: 2427365 - DNA, 25 bp, Homo sapien
gcttgcgaaagagcccatgagtcaa

SEQ ID NO: 2427366 - DNA, 25 bp, Homo sapien
agtcagacttggctccacaactgga

SEQ ID NO: 2427367 - DNA, 25 bp, Homo sapien
tgtttaaaagaatccacgacatgga

SEQ ID NO: 2427368 - DNA, 25 bp, Homo sapien
taggagatactcttgttttgatgaa

SEQ ID NO: 2427369 - DNA, 25 bp, Homo sapien
cagggtaactgtacactttgtttag

SEQ ID NO: 2427370 - DNA, 25 bp, Homo sapien
tggagatatccataagactgaaatg

SEQ ID NO: 2427371 - DNA, 25 bp, Homo sapien
gggatgacaggaccatatcttcagt

SEQ ID NO: 2427372 - DNA, 25 bp, Homo sapien
ggataacacctacgacataacagga

SEQ ID NO: 2427373 - DNA, 25 bp, Homo sapien
tatcttcagtcactcttgtatggcc

SEQ ID NO: 2427374 - DNA, 25 bp, Homo sapien
tgcttagtgccatgcctactaggat

SEQ ID NO: 2427375 - DNA, 25 bp, Homo sapien
caaagggtgctctagtcggaccagc

SEQ ID NO: 2427376 - DNA, 25 bp, Homo sapien
tagaactaacatctcctatgggagc

SEQ ID NO: 2427377 - DNA, 25 bp, Homo sapien
gaccagcttcatctgatgggcagaa

SEQ ID NO: 2427378 - DNA, 25 bp, Homo sapien
tgttgaaccaaccatgtaccccagg

SEQ ID NO: 2427379 - DNA, 25 bp, Homo sapien
agatatattgttatcaggcaggcat

SEQ ID NO: 2427380 - DNA, 25 bp, Homo sapien
cagtgctcacagacttaggtgcttt

SEQ ID NO: 2427381 - DNA, 25 bp, Homo sapien
gcttttccactagaagatatattgt

SEQ ID NO: 2427382 - DNA, 25 bp, Homo sapien
ggagtcaaagacttttgctcacttg

SEQ ID NO: 2427383 - DNA, 25 bp, Homo sapien
cagatacctcatactgagatcatct

SEQ ID NO: 2427384 - DNA, 25 bp, Homo sapien
tatgataggtcatgccaaggcattc

SEQ ID NO: 2427385 - DNA, 25 bp, Homo sapien
gcttagaaagcactcgacgttacct

SEQ ID NO: 2427386 - DNA, 25 bp, Homo sapien
caaccatctgggttacacatttgat

SEQ ID NO: 2427387 - DNA, 25 bp, Homo sapien
tggaaatctcgggaagggagatata

SEQ ID NO: 2427388 - DNA, 25 bp, Homo sapien
gaatattccagagaatatcccctct

SEQ ID NO: 2427389 - DNA, 25 bp, Homo sapien
aaaaaaggcagagacatattggaca

SEQ ID NO: 2427390 - DNA, 25 bp, Homo sapien
taaagaaatgagcaccagttatttg

SEQ ID NO: 2427391 - DNA, 25 bp, Homo sapien
agaccagtagtcatgtgaggaagac

SEQ ID NO: 2427392 - DNA, 25 bp, Homo sapien
tatgacttgaattgggagaccagta

SEQ ID NO: 2427393 - DNA, 25 bp, Homo sapien
cacatttgccgaaaaatctagttcc

SEQ ID NO: 2427394 - DNA, 25 bp, Homo sapien
cacagtaccctccacatttgccgaa

SEQ ID NO: 2427395 - DNA, 25 bp, Homo sapien
tcataaaacattagagtataccggg

SEQ ID NO: 2427396 - DNA, 25 bp, Homo sapien
agatccagatttactatgagcaggg

SEQ ID NO: 2427397 - DNA, 25 bp, Homo sapien
tgttagaacaccatacctgcagaaa

SEQ ID NO: 2427398 - DNA, 25 bp, Homo sapien
tgagcagggctatgttatctaagac

SEQ ID NO: 2427399 - DNA, 25 bp, Homo sapien
cactttgctgtgctggatatcttca

SEQ ID NO: 2427400 - DNA, 25 bp, Homo sapien
ggtataactcccctgagtgagccac

SEQ ID NO: 2427401 - DNA, 25 bp, Homo sapien
acagaggtataactcccctgagtga

SEQ ID NO: 2427402 - DNA, 25 bp, Homo sapien
tgatcttcgtatgctgacagaggta

SEQ ID NO: 2427403 - DNA, 25 bp, Homo sapien
ttcctgacaaattaatgctaaactg

SEQ ID NO: 2427404 - DNA, 25 bp, Homo sapien
ccagttcctgacaaattaatgctaa

SEQ ID NO: 2427405 - DNA, 25 bp, Homo sapien
cccagttcctgacaaattaatgcta

SEQ ID NO: 2427406 - DNA, 25 bp, Homo sapien
ctgacaaattaatgctaaactgtcc

SEQ ID NO: 2427407 - DNA, 25 bp, Homo sapien
ctgtagcaatctccagctgtggcaa

SEQ ID NO: 2427408 - DNA, 25 bp, Homo sapien
caatctccagctgtggcaaatggaa

SEQ ID NO: 2427409 - DNA, 25 bp, Homo sapien
atctgaaagcactgtagcaatctcc

SEQ ID NO: 2427410 - DNA, 25 bp, Homo sapien
gtgggcatctgaaagcactgtagca

SEQ ID NO: 2427411 - DNA, 25 bp, Homo sapien
cccattaaaaggacattgatatgga

SEQ ID NO: 2427412 - DNA, 25 bp, Homo sapien
tttgcatggaagtgagatcaattct

SEQ ID NO: 2427413 - DNA, 25 bp, Homo sapien
aacagtgtatccagcagctaagtgt

SEQ ID NO: 2427414 - DNA, 25 bp, Homo sapien
gcagctaagtgtccattgtcacatt

SEQ ID NO: 2427415 - DNA, 25 bp, Homo sapien
caacattgggatattttagtattag

SEQ ID NO: 2427416 - DNA, 25 bp, Homo sapien
ctgtaacaacattgggatattttag

SEQ ID NO: 2427417 - DNA, 25 bp, Homo sapien
ttagtattagatgcagttacgaggc

SEQ ID NO: 2427418 - DNA, 25 bp, Homo sapien
gttacgaggccataatgtagacaaa

SEQ ID NO: 2427419 - DNA, 25 bp, Homo sapien
tcttggaggaccatgaaaatgctca

SEQ ID NO: 2427420 - DNA, 25 bp, Homo sapien
tattcaagtatcactctgagggcta

SEQ ID NO: 2427421 - DNA, 25 bp, Homo sapien
tcagatagaccaaaacacatctcgt

SEQ ID NO: 2427422 - DNA, 25 bp, Homo sapien
tgagggctagaagttccaattctct

SEQ ID NO: 2427423 - DNA, 25 bp, Homo sapien
ttggaccagtgttaaatattcctta

SEQ ID NO: 2427424 - DNA, 25 bp, Homo sapien
tggaccagtgttaaatattccttag

SEQ ID NO: 2427425 - DNA, 25 bp, Homo sapien
cttggaccagtgttaaatattcctt

SEQ ID NO: 2427426 - DNA, 25 bp, Homo sapien
ccttggaccagtgttaaatattcct

SEQ ID NO: 2427427 - DNA, 25 bp, Homo sapien
tcccttaatgttaaggtaatagtca

SEQ ID NO: 2427428 - DNA, 25 bp, Homo sapien
ctaatgtggtttttcacttgaattt

SEQ ID NO: 2427429 - DNA, 25 bp, Homo sapien
taatgtggtttttcacttgaatttc

SEQ ID NO: 2427430 - DNA, 25 bp, Homo sapien
tctaatgtggtttttcacttgaatt

SEQ ID NO: 2427431 - DNA, 25 bp, Homo sapien
tcttcattatcccaattccacaagt

SEQ ID NO: 2427432 - DNA, 25 bp, Homo sapien
ttatcccaattccacaagtcactga

SEQ ID NO: 2427433 - DNA, 25 bp, Homo sapien
tcattatcccaattccacaagtcac

SEQ ID NO: 2427434 - DNA, 25 bp, Homo sapien
tcccaattccacaagtcactgagca

SEQ ID NO: 2427435 - DNA, 25 bp, Homo sapien
ggcaccacagggcattcttgataaa

SEQ ID NO: 2427436 - DNA, 25 bp, Homo sapien
gcaaacagctgttaatgcattggta

SEQ ID NO: 2427437 - DNA, 25 bp, Homo sapien
cattggtaaacctgagaggaaggca

SEQ ID NO: 2427438 - DNA, 25 bp, Homo sapien
tccaagtggccaaatgcaaacagct

SEQ ID NO: 2427439 - DNA, 25 bp, Homo sapien
aatatgtaatcctttgtctgtaact

SEQ ID NO: 2427440 - DNA, 25 bp, Homo sapien
atcctttgtctgtaactaaatccac

SEQ ID NO: 2427441 - DNA, 25 bp, Homo sapien
gatctcggtgcaatatgtaatcctt

SEQ ID NO: 2427442 - DNA, 25 bp, Homo sapien
gggatctcggtgcaatatgtaatcc

SEQ ID NO: 2427443 - DNA, 25 bp, Homo sapien
gttaccacaatgtaattgcaaggag

SEQ ID NO: 2427444 - DNA, 25 bp, Homo sapien
taccacaatgtaattgcaaggaggg

SEQ ID NO: 2427445 - DNA, 25 bp, Homo sapien
ctgtgatgagtctgctgttaccaca

SEQ ID NO: 2427446 - DNA, 25 bp, Homo sapien
cacaatgtaattgcaaggagggttc

SEQ ID NO: 2427447 - DNA, 25 bp, Homo sapien
tgcactccattcgttgatgtgaatc

SEQ ID NO: 2427448 - DNA, 25 bp, Homo sapien
tgatgtgaatcttttctctcacatg

SEQ ID NO: 2427449 - DNA, 25 bp, Homo sapien
ttcttggatgtaagagatatggttg

SEQ ID NO: 2427450 - DNA, 25 bp, Homo sapien
ttgtctgatttggttatctgtgcac

SEQ ID NO: 2427451 - DNA, 25 bp, Homo sapien
ctccctctttccatccccttgtgct

SEQ ID NO: 2427452 - DNA, 25 bp, Homo sapien
tttccatccccttgtgctgcacaca

SEQ ID NO: 2427453 - DNA, 25 bp, Homo sapien
tccctctttccatccccttgtgctg

SEQ ID NO: 2427454 - DNA, 25 bp, Homo sapien
ctctttccatccccttgtgctgcac

SEQ ID NO: 2427455 - DNA, 25 bp, Homo sapien
ggtcgggtggactgatcacacattt

SEQ ID NO: 2427456 - DNA, 25 bp, Homo sapien
ttcagtctgcagtatacatccctct

SEQ ID NO: 2427457 - DNA, 25 bp, Homo sapien
gaacaaggtcgggtggactgatcac

SEQ ID NO: 2427458 - DNA, 25 bp, Homo sapien
tatacatccctctgctgaactccag

SEQ ID NO: 2427459 - DNA, 25 bp, Homo sapien
gctgcaccgcagcaaaagaatcttt

SEQ ID NO: 2427460 - DNA, 25 bp, Homo sapien
caaaagaatctttgggaccaacagg

SEQ ID NO: 2427461 - DNA, 25 bp, Homo sapien
tggtggccaagacacaaaaagtctc

SEQ ID NO: 2427462 - DNA, 25 bp, Homo sapien
ggtggccaagacacaaaaagtctct

SEQ ID NO: 2427463 - DNA, 25 bp, Homo sapien
tctgacagatctacaggctttgtga

SEQ ID NO: 2427464 - DNA, 25 bp, Homo sapien
tgagttggaggtttctgtacttgac

SEQ ID NO: 2427465 - DNA, 25 bp, Homo sapien
acttgactgcaatttgtgtcttcta

SEQ ID NO: 2427466 - DNA, 25 bp, Homo sapien
taatttcctttggaattggtcaatg

SEQ ID NO: 2427467 - DNA, 25 bp, Homo sapien
ttgagccactatccgtgagccagct

SEQ ID NO: 2427468 - DNA, 25 bp, Homo sapien
gacaccttgccaattttagacgaga

SEQ ID NO: 2427469 - DNA, 25 bp, Homo sapien
tgttctgactctaacgggtatcctg

SEQ ID NO: 2427470 - DNA, 25 bp, Homo sapien
gagacaggatcccatttgagccact

SEQ ID NO: 2427471 - DNA, 25 bp, Homo sapien
gaactaggcttgcaaactaaaacca

SEQ ID NO: 2427472 - DNA, 25 bp, Homo sapien
tagtgcaaaaccagccatagataac

SEQ ID NO: 2427473 - DNA, 25 bp, Homo sapien
tacagaggactttaatgagcattca

SEQ ID NO: 2427474 - DNA, 25 bp, Homo sapien
caggccagatttggtacctggacca

SEQ ID NO: 2427475 - DNA, 25 bp, Homo sapien
ggtcctttgaggcagcaatttcact

SEQ ID NO: 2427476 - DNA, 25 bp, Homo sapien
tcaattgtctctggatcacagtgcc

SEQ ID NO: 2427477 - DNA, 25 bp, Homo sapien
tacatatgtgagtgctttccatggc

SEQ ID NO: 2427478 - DNA, 25 bp, Homo sapien
gtttttcattagttcccacaagatg

SEQ ID NO: 2427479 - DNA, 25 bp, Homo sapien
aaacacaaaccaagagggccaatga

SEQ ID NO: 2427480 - DNA, 25 bp, Homo sapien
ttgaaattaaatagattcctcttcc

SEQ ID NO: 2427481 - DNA, 25 bp, Homo sapien
gaagacaaagtgtatgcatcccaca

SEQ ID NO: 2427482 - DNA, 25 bp, Homo sapien
ccaaactatcaaatttcaaaacaca

SEQ ID NO: 2427483 - DNA, 25 bp, Homo sapien
catcagcagggcaagcatgcatatg

SEQ ID NO: 2427484 - DNA, 25 bp, Homo sapien
tcctgatgccatgacacatcagcag

SEQ ID NO: 2427485 - DNA, 25 bp, Homo sapien
ccatggttcctgatgccatgacaca

SEQ ID NO: 2427486 - DNA, 25 bp, Homo sapien
gggcaagcatgcatatgacactgta

SEQ ID NO: 2427487 - DNA, 25 bp, Homo sapien
gctaggtggcttgtttacaatttca

SEQ ID NO: 2427488 - DNA, 25 bp, Homo sapien
ttcacagttgtgatcttctaatatt

SEQ ID NO: 2427489 - DNA, 25 bp, Homo sapien
tgggaaattgacatattacaagtct

SEQ ID NO: 2427490 - DNA, 25 bp, Homo sapien
cttctaatatttggccattgggaaa

SEQ ID NO: 2427491 - DNA, 25 bp, Homo sapien
gctgaagacctccagaacaactgct

SEQ ID NO: 2427492 - DNA, 25 bp, Homo sapien
caatttccgtagttccactgtggac

SEQ ID NO: 2427493 - DNA, 25 bp, Homo sapien
gaggctgcatcgcagtaactagcac

SEQ ID NO: 2427494 - DNA, 25 bp, Homo sapien
caaggccctggaccacattgctgta

SEQ ID NO: 2427495 - DNA, 25 bp, Homo sapien
caagaataaaacacaaaatatgcac

SEQ ID NO: 2427496 - DNA, 25 bp, Homo sapien
aagaataaaacacaaaatatgcaca

SEQ ID NO: 2427497 - DNA, 25 bp, Homo sapien
acaagaataaaacacaaaatatgca

SEQ ID NO: 2427498 - DNA, 25 bp, Homo sapien
gaataaaacacaaaatatgcacaaa

SEQ ID NO: 2427499 - DNA, 25 bp, Homo sapien
tggtttcctctgactgatggatgga

SEQ ID NO: 2427500 - DNA, 25 bp, Homo sapien
catcaaagggcgaacttcaggatca

SEQ ID NO: 2427501 - DNA, 25 bp, Homo sapien
tcatcaattggctgatggtagttca

SEQ ID NO: 2427502 - DNA, 25 bp, Homo sapien
tagataatagcttggctgcacaggg

SEQ ID NO: 2427503 - DNA, 25 bp, Homo sapien
tgcttgccactctccacaaggggta

SEQ ID NO: 2427504 - DNA, 25 bp, Homo sapien
ggcacaatatgattcatctgctatt

SEQ ID NO: 2427505 - DNA, 25 bp, Homo sapien
atatttcagcaggtcggggtaagtg

SEQ ID NO: 2427506 - DNA, 25 bp, Homo sapien
gattcatctgctattctatcaagag

SEQ ID NO: 2427507 - DNA, 25 bp, Homo sapien
ttgagtacctcttccacaagatacg

SEQ ID NO: 2427508 - DNA, 25 bp, Homo sapien
gggcttgagtacctcttccacaaga

SEQ ID NO: 2427509 - DNA, 25 bp, Homo sapien
ttacatagcgggcttgagtacctct

SEQ ID NO: 2427510 - DNA, 25 bp, Homo sapien
tagcgggcttgagtacctcttccac

SEQ ID NO: 2427511 - DNA, 25 bp, Homo sapien
taataaagcggtctcaagtttagaa

SEQ ID NO: 2427512 - DNA, 25 bp, Homo sapien
aatgagcaaggtgtaagtacacagc

SEQ ID NO: 2427513 - DNA, 25 bp, Homo sapien
gaaccatgtcgccattgtgccatct

SEQ ID NO: 2427514 - DNA, 25 bp, Homo sapien
tatgagaacagttggtaataaagcg

SEQ ID NO: 2427515 - DNA, 25 bp, Homo sapien
tgtcctctaacactgcactagctag

SEQ ID NO: 2427516 - DNA, 25 bp, Homo sapien
gacacatttaacatctcgcatctga

SEQ ID NO: 2427517 - DNA, 25 bp, Homo sapien
tacccatgtccacatgtggttgtgc

SEQ ID NO: 2427518 - DNA, 25 bp, Homo sapien
tggggcgactagcttcatggcattc

SEQ ID NO: 2427519 - DNA, 25 bp, Homo sapien
tatgaagttcacatggactcagaga

SEQ ID NO: 2427520 - DNA, 25 bp, Homo sapien
ggtacttgaattacagaagccatca

SEQ ID NO: 2427521 - DNA, 25 bp, Homo sapien
tcaagtgatctacattcagctgaca

SEQ ID NO: 2427522 - DNA, 25 bp, Homo sapien
catggtcctacttgccaggaagcac

SEQ ID NO: 2427523 - DNA, 25 bp, Homo sapien
tcactcgggacagttcttggcattc

SEQ ID NO: 2427524 - DNA, 25 bp, Homo sapien
tgcaattctctctcgtcactcggga

SEQ ID NO: 2427525 - DNA, 25 bp, Homo sapien
tcattgtcagcaagacgatggccaa

SEQ ID NO: 2427526 - DNA, 25 bp, Homo sapien
cattcactagcagcccaactgggac

SEQ ID NO: 2427527 - DNA, 25 bp, Homo sapien
taggaggtttaagctggtcaccaca

SEQ ID NO: 2427528 - DNA, 25 bp, Homo sapien
tacttcatgcaatggatgtccaagg

SEQ ID NO: 2427529 - DNA, 25 bp, Homo sapien
gccatcttgtgaagacacagttacc

SEQ ID NO: 2427530 - DNA, 25 bp, Homo sapien
gttctatatccttgaccacattggg

SEQ ID NO: 2427531 - DNA, 25 bp, Homo sapien
tatcagacacaacactatgatcact

SEQ ID NO: 2427532 - DNA, 25 bp, Homo sapien
caagttatgtttcttcgctgaagac

SEQ ID NO: 2427533 - DNA, 25 bp, Homo sapien
tgatggaagtggcaagtggtcacat

SEQ ID NO: 2427534 - DNA, 25 bp, Homo sapien
cactcttatgtatgcaagttatgtt

SEQ ID NO: 2427535 - DNA, 25 bp, Homo sapien
ttcacagttagatgttccataatta

SEQ ID NO: 2427536 - DNA, 25 bp, Homo sapien
gaaaaattcacagttagatgttcca

SEQ ID NO: 2427537 - DNA, 25 bp, Homo sapien
aaattcacagttagatgttccataa

SEQ ID NO: 2427538 - DNA, 25 bp, Homo sapien
cacagttagatgttccataattatg

SEQ ID NO: 2427539 - DNA, 25 bp, Homo sapien
tccaaagggatattgaaggaataat

SEQ ID NO: 2427540 - DNA, 25 bp, Homo sapien
cataggggtcccatgtgaacatgtc

SEQ ID NO: 2427541 - DNA, 25 bp, Homo sapien
ttgtataaattacccacacacaaca

SEQ ID NO: 2427542 - DNA, 25 bp, Homo sapien
gaaggaataatgtacatcagggttg

SEQ ID NO: 2427543 - DNA, 25 bp, Homo sapien
ttctcttgtcgattagtactattaa

SEQ ID NO: 2427544 - DNA, 25 bp, Homo sapien
agaaaattcccttcagcgtcagata

SEQ ID NO: 2427545 - DNA, 25 bp, Homo sapien
ttctttctcttgtcgattagtacta

SEQ ID NO: 2427546 - DNA, 25 bp, Homo sapien
ttcaataacagttcttgttccttgc

SEQ ID NO: 2427547 - DNA, 25 bp, Homo sapien
tcctgcgggaatctttacaacaaca

SEQ ID NO: 2427548 - DNA, 25 bp, Homo sapien
ctgtcatctggttgtccagaatagc

SEQ ID NO: 2427549 - DNA, 25 bp, Homo sapien
ccagaatagctgtactgacgaatgt

SEQ ID NO: 2427550 - DNA, 25 bp, Homo sapien
caacgtttgttgctcctgcgggaat

SEQ ID NO: 2427551 - DNA, 25 bp, Homo sapien
tgagaactgttgaagacacctgtta

SEQ ID NO: 2427552 - DNA, 25 bp, Homo sapien
tcttggcactggagtttaacacgtg

SEQ ID NO: 2427553 - DNA, 25 bp, Homo sapien
ttaacacgtgatcacaaccagctgc

SEQ ID NO: 2427554 - DNA, 25 bp, Homo sapien
cacactccacatttgtctatcttgg

SEQ ID NO: 2427555 - DNA, 25 bp, Homo sapien
caagacacaattacaatcaatatta

SEQ ID NO: 2427556 - DNA, 25 bp, Homo sapien
cttcaagacacaattacaatcaata

SEQ ID NO: 2427557 - DNA, 25 bp, Homo sapien
acacaattacaatcaatattataag

SEQ ID NO: 2427558 - DNA, 25 bp, Homo sapien
cacaattacaatcaatattataaga

SEQ ID NO: 2427559 - DNA, 25 bp, Homo sapien
tggccttgaacacagatgtcatgag

SEQ ID NO: 2427560 - DNA, 25 bp, Homo sapien
ggccttgaacacagatgtcatgagt

SEQ ID NO: 2427561 - DNA, 25 bp, Homo sapien
gtagaaataattggttccagcaacc

SEQ ID NO: 2427562 - DNA, 25 bp, Homo sapien
gttccagcaacctgacaatagagtt

SEQ ID NO: 2427563 - DNA, 25 bp, Homo sapien
gagtttacaacgatcctttgtgcca

SEQ ID NO: 2427564 - DNA, 25 bp, Homo sapien
ttcagttccacaaggagtaccatct

SEQ ID NO: 2427565 - DNA, 25 bp, Homo sapien
gacatgaatcagtattacatgatcg

SEQ ID NO: 2427566 - DNA, 25 bp, Homo sapien
cctcacattagagggaatgccactg

SEQ ID NO: 2427567 - DNA, 25 bp, Homo sapien
tggaagccacctcacattagaggga

SEQ ID NO: 2427568 - DNA, 25 bp, Homo sapien
cttctctcgaaagtcttgtgtgcct

SEQ ID NO: 2427569 - DNA, 25 bp, Homo sapien
gcggcccacacagtaatttcctccg

SEQ ID NO: 2427570 - DNA, 25 bp, Homo sapien
cctgcggcccacacagtaatttcct

SEQ ID NO: 2427571 - DNA, 25 bp, Homo sapien
tgcggcccacacagtaatttcctcc

SEQ ID NO: 2427572 - DNA, 25 bp, Homo sapien
cggcccacacagtaatttcctccgt

SEQ ID NO: 2427573 - DNA, 25 bp, Homo sapien
cagcgcctggttgcactttcgattc

SEQ ID NO: 2427574 - DNA, 25 bp, Homo sapien
ttacacatagcccatgacggcaatg

SEQ ID NO: 2427575 - DNA, 25 bp, Homo sapien
caagaactgtaaggttcccatggtc

SEQ ID NO: 2427576 - DNA, 25 bp, Homo sapien
tcaccatttacaggacgtgtttccg

SEQ ID NO: 2427577 - DNA, 25 bp, Homo sapien
tgtgcttgtgcaccacagatgcatg

SEQ ID NO: 2427578 - DNA, 25 bp, Homo sapien
ctggtggcacgtgttgagtgaaaca

SEQ ID NO: 2427579 - DNA, 25 bp, Homo sapien
attccaggaccgcagtctgttccat

SEQ ID NO: 2427580 - DNA, 25 bp, Homo sapien
aggaccgcagtctgttccatctgct

SEQ ID NO: 2427581 - DNA, 25 bp, Homo sapien
tctacattccggaattggtccaatg

SEQ ID NO: 2427582 - DNA, 25 bp, Homo sapien
aataagtctacattccggaattggt

SEQ ID NO: 2427583 - DNA, 25 bp, Homo sapien
cattccggaattggtccaatgatcc

SEQ ID NO: 2427584 - DNA, 25 bp, Homo sapien
cggaattggtccaatgatcctcaca

SEQ ID NO: 2427585 - DNA, 25 bp, Homo sapien
atggcagttttcgaacaaaataaag

SEQ ID NO: 2427586 - DNA, 25 bp, Homo sapien
cacataataagtagtcaataagttt

SEQ ID NO: 2427587 - DNA, 25 bp, Homo sapien
tattctaagataactttatggcagt

SEQ ID NO: 2427588 - DNA, 25 bp, Homo sapien
cagacttaaaagctatatttagttc

SEQ ID NO: 2427589 - DNA, 25 bp, Homo sapien
gacacatttgtgacccaggaccaaa

SEQ ID NO: 2427590 - DNA, 25 bp, Homo sapien
catttgtgacccaggaccaaacgca

SEQ ID NO: 2427591 - DNA, 25 bp, Homo sapien
gacccaggaccaaacgcaagctcac

SEQ ID NO: 2427592 - DNA, 25 bp, Homo sapien
tgtgacccaggaccaaacgcaagct

SEQ ID NO: 2427593 - DNA, 25 bp, Homo sapien
tcaagaagacattccccgtaaccag

SEQ ID NO: 2427594 - DNA, 25 bp, Homo sapien
tatcgtgatccaggaagttctgaag

SEQ ID NO: 2427595 - DNA, 25 bp, Homo sapien
actgcttgtttccatcatatcgtga

SEQ ID NO: 2427596 - DNA, 25 bp, Homo sapien
ttctgaaggcagattatatatttct

SEQ ID NO: 2427597 - DNA, 25 bp, Homo sapien
taacatatttccgactacagtttga

SEQ ID NO: 2427598 - DNA, 25 bp, Homo sapien
tacagtttgaccagctccaaggact

SEQ ID NO: 2427599 - DNA, 25 bp, Homo sapien
tccgactacagtttgaccagctcca

SEQ ID NO: 2427600 - DNA, 25 bp, Homo sapien
gtttgaccagctccaaggactcatg

SEQ ID NO: 2427601 - DNA, 25 bp, Homo sapien
tcatttctttacatctaggattatc

SEQ ID NO: 2427602 - DNA, 25 bp, Homo sapien
catttctttacatctaggattatca

SEQ ID NO: 2427603 - DNA, 25 bp, Homo sapien
tttctttacatctaggattatcatc

SEQ ID NO: 2427604 - DNA, 25 bp, Homo sapien
ttcatttctttacatctaggattat

SEQ ID NO: 2427605 - DNA, 25 bp, Homo sapien
cattaataaagcagctttgtaaagg

SEQ ID NO: 2427606 - DNA, 25 bp, Homo sapien
gtgtgcccaagctcatgggctatag

SEQ ID NO: 2427607 - DNA, 25 bp, Homo sapien
gctcatgggctatagtaaaagcaga

SEQ ID NO: 2427608 - DNA, 25 bp, Homo sapien
taaagcagctttgtaaaggatcaca

SEQ ID NO: 2427609 - DNA, 25 bp, Homo sapien
ctaacatgttacatttctctttaga

SEQ ID NO: 2427610 - DNA, 25 bp, Homo sapien
gttacatttctctttagatgaacaa

SEQ ID NO: 2427611 - DNA, 25 bp, Homo sapien
catgttacatttctctttagatgaa

SEQ ID NO: 2427612 - DNA, 25 bp, Homo sapien
tacatttctctttagatgaacaaat

SEQ ID NO: 2427613 - DNA, 25 bp, Homo sapien
taatgtggtagcaccatcaaaatta

SEQ ID NO: 2427614 - DNA, 25 bp, Homo sapien
caaggtcattctgagtttgttgcca

SEQ ID NO: 2427615 - DNA, 25 bp, Homo sapien
catcaaaattaatgactggtccttc

SEQ ID NO: 2427616 - DNA, 25 bp, Homo sapien
gggaagggtgaacatcatcaaggtc

SEQ ID NO: 2427617 - DNA, 25 bp, Homo sapien
ggtgaatcataactaattttaccac

SEQ ID NO: 2427618 - DNA, 25 bp, Homo sapien
taactaattttaccactactatgtg

SEQ ID NO: 2427619 - DNA, 25 bp, Homo sapien
accactactatgtgtatcaaatttc

SEQ ID NO: 2427620 - DNA, 25 bp, Homo sapien
ctcctcacggtgaatcataactaat

SEQ ID NO: 2427621 - DNA, 25 bp, Homo sapien
aagtttagcatcaccagaatccata

SEQ ID NO: 2427622 - DNA, 25 bp, Homo sapien
tttccaactccaaatatggttatta

SEQ ID NO: 2427623 - DNA, 25 bp, Homo sapien
accagaatccatagaggcagatcca

SEQ ID NO: 2427624 - DNA, 25 bp, Homo sapien
taatctttcggccacagttgcatat

SEQ ID NO: 2427625 - DNA, 25 bp, Homo sapien
ggaatgcacaccttttcctcaactt

SEQ ID NO: 2427626 - DNA, 25 bp, Homo sapien
atttggaatgcacaccttttcctca

SEQ ID NO: 2427627 - DNA, 25 bp, Homo sapien
tggaatgcacaccttttcctcaact

SEQ ID NO: 2427628 - DNA, 25 bp, Homo sapien
tttggaatgcacaccttttcctcaa

SEQ ID NO: 2427629 - DNA, 25 bp, Homo sapien
cattagagtcagtatatagttttgc

SEQ ID NO: 2427630 - DNA, 25 bp, Homo sapien
tggatatgatataagacgttttttc

SEQ ID NO: 2427631 - DNA, 25 bp, Homo sapien
gcatcagctgtaaccataatttcaa

SEQ ID NO: 2427632 - DNA, 25 bp, Homo sapien
ttgcaaattcgatccatgagcagaa

SEQ ID NO: 2427633 - DNA, 25 bp, Homo sapien
tgatgtgtgtcctaaaactctttct

SEQ ID NO: 2427634 - DNA, 25 bp, Homo sapien
tcattacattaagatcttcattcat

SEQ ID NO: 2427635 - DNA, 25 bp, Homo sapien
gatgtgtgtcctaaaactctttctt

SEQ ID NO: 2427636 - DNA, 25 bp, Homo sapien
gctgtaggtatgaaagggtaaactg

SEQ ID NO: 2427637 - DNA, 25 bp, Homo sapien
ctgtaggtatgaaagggtaaactgg

SEQ ID NO: 2427638 - DNA, 25 bp, Homo sapien
tctggtaaatgcctgatccctttag

SEQ ID NO: 2427639 - DNA, 25 bp, Homo sapien
tttctggtaaatgcctgatcccttt

SEQ ID NO: 2427640 - DNA, 25 bp, Homo sapien
tcctttctggtaaatgcctgatccc

SEQ ID NO: 2427641 - DNA, 25 bp, Homo sapien
cttactcctttctggtaaatgcctg

SEQ ID NO: 2427642 - DNA, 25 bp, Homo sapien
tctgcagaaaagagttatttaagtc

SEQ ID NO: 2427643 - DNA, 25 bp, Homo sapien
taagtcttgtctgtatataagatgt

SEQ ID NO: 2427644 - DNA, 25 bp, Homo sapien
tataggttctaagaaatattcaccg

SEQ ID NO: 2427645 - DNA, 25 bp, Homo sapien
taagatgtggcttgttgtgaccatc

SEQ ID NO: 2427646 - DNA, 25 bp, Homo sapien
tctcactaccaaatctaccctgttt

SEQ ID NO: 2427647 - DNA, 25 bp, Homo sapien
gctgcacagtccacgagaagtcctt

SEQ ID NO: 2427648 - DNA, 25 bp, Homo sapien
ccttggtcttaaactctcactacca

SEQ ID NO: 2427649 - DNA, 25 bp, Homo sapien
tcagctgcacagtccacgagaagtc

SEQ ID NO: 2427650 - DNA, 25 bp, Homo sapien
tgtagcccaacctgaactccagggt

SEQ ID NO: 2427651 - DNA, 25 bp, Homo sapien
gcctctggcttggtgttaatccttc

SEQ ID NO: 2427652 - DNA, 25 bp, Homo sapien
cttgtagcccaacctgaactccagg

SEQ ID NO: 2427653 - DNA, 25 bp, Homo sapien
cagagccttccgaaggagttgcctc

SEQ ID NO: 2427654 - DNA, 25 bp, Homo sapien
tcagccaccaactcgaaaacccaag

SEQ ID NO: 2427655 - DNA, 25 bp, Homo sapien
aacccaaggccccgttcgctgaatg

SEQ ID NO: 2427656 - DNA, 25 bp, Homo sapien
cccaaggccccgttcgctgaatgta

SEQ ID NO: 2427657 - DNA, 25 bp, Homo sapien
caaggccccgttcgctgaatgtagc

SEQ ID NO: 2427658 - DNA, 25 bp, Homo sapien
gcctggatcccaagaaaatgccaag

SEQ ID NO: 2427659 - DNA, 25 bp, Homo sapien
cctggatcccaagaaaatgccaagg

SEQ ID NO: 2427660 - DNA, 25 bp, Homo sapien
ttgcctggatcccaagaaaatgcca

SEQ ID NO: 2427661 - DNA, 25 bp, Homo sapien
cttgcctggatcccaagaaaatgcc

SEQ ID NO: 2427662 - DNA, 25 bp, Homo sapien
tacttcgtaggaggtcagtgtcctc

SEQ ID NO: 2427663 - DNA, 25 bp, Homo sapien
catcggcggtcaggttcagctggaa

SEQ ID NO: 2427664 - DNA, 25 bp, Homo sapien
cgcataagctgacgacggccttgta

SEQ ID NO: 2427665 - DNA, 25 bp, Homo sapien
tgcccgtaggcagtgaagcgatagt

SEQ ID NO: 2427666 - DNA, 25 bp, Homo sapien
tgcaacaacagcgacaggaccagtg

SEQ ID NO: 2427667 - DNA, 25 bp, Homo sapien
acaacagcgacaggaccagtgagct

SEQ ID NO: 2427668 - DNA, 25 bp, Homo sapien
caacaacagcgacaggaccagtgag

SEQ ID NO: 2427669 - DNA, 25 bp, Homo sapien
ctgcaacaacagcgacaggaccagt

SEQ ID NO: 2427670 - DNA, 25 bp, Homo sapien
ggccagcgttccccaacgggctgag

SEQ ID NO: 2427671 - DNA, 25 bp, Homo sapien
gctcgtccccgcgacctgcatgtcc

SEQ ID NO: 2427672 - DNA, 25 bp, Homo sapien
tccggctgactggtccgggagtccc

SEQ ID NO: 2427673 - DNA, 25 bp, Homo sapien
acttagccgctgaaggcgtctcgcg

SEQ ID NO: 2427674 - DNA, 25 bp, Homo sapien
tggggtggaagtcaacttcccaaga

SEQ ID NO: 2427675 - DNA, 25 bp, Homo sapien
ctggggtggaagtcaacttcccaag

SEQ ID NO: 2427676 - DNA, 25 bp, Homo sapien
gcctggggtggaagtcaacttccca

SEQ ID NO: 2427677 - DNA, 25 bp, Homo sapien
tgcctggggtggaagtcaacttccc

SEQ ID NO: 2427678 - DNA, 25 bp, Homo sapien
tgatgaagagcgagagatggtagag

SEQ ID NO: 2427679 - DNA, 25 bp, Homo sapien
gatgaagagcgagagatggtagagc

SEQ ID NO: 2427680 - DNA, 25 bp, Homo sapien
gcttccctcgcgctccgatccctct

SEQ ID NO: 2427681 - DNA, 25 bp, Homo sapien
ccccgatcggggaggcccaccagag

SEQ ID NO: 2427682 - DNA, 25 bp, Homo sapien
tcgcgctccgatccctctcctccct

SEQ ID NO: 2427683 - DNA, 25 bp, Homo sapien
gccgccggcagccaagccggcttcc

SEQ ID NO: 2427684 - DNA, 25 bp, Homo sapien
acaccgcctgtctccgctcgctgag

SEQ ID NO: 2427685 - DNA, 25 bp, Homo sapien
gagccgctgcttcatcgcactgcag

SEQ ID NO: 2427686 - DNA, 25 bp, Homo sapien
tgtctccgctcgctgagccgctgct

SEQ ID NO: 2427687 - DNA, 25 bp, Homo sapien
tccgctcgctgagccgctgcttcat

SEQ ID NO: 2427688 - DNA, 25 bp, Homo sapien
ggtcccaacagctcaggttcctttc

SEQ ID NO: 2427689 - DNA, 25 bp, Homo sapien
ataggtcccaacagctcaggttcct

SEQ ID NO: 2427690 - DNA, 25 bp, Homo sapien
gaaccattaatcaagggaataggtc

SEQ ID NO: 2427691 - DNA, 25 bp, Homo sapien
aatatgaataattcgtaaggaacca

SEQ ID NO: 2427692 - DNA, 25 bp, Homo sapien
tcagttgaacccaggtacctttctc

SEQ ID NO: 2427693 - DNA, 25 bp, Homo sapien
ctgaatggagcaggctggcacttca

SEQ ID NO: 2427694 - DNA, 25 bp, Homo sapien
atcattttccttcacgcatttcggg

SEQ ID NO: 2427695 - DNA, 25 bp, Homo sapien
cttggcttccttctttttctgatca

SEQ ID NO: 2427696 - DNA, 25 bp, Homo sapien
gggcactcttttttgaacagtatct

SEQ ID NO: 2427697 - DNA, 25 bp, Homo sapien
gtatctattcccttgatgtcgacaa

SEQ ID NO: 2427698 - DNA, 25 bp, Homo sapien
ccagtttgccatggtaacccttgtg

SEQ ID NO: 2427699 - DNA, 25 bp, Homo sapien
cagtttgccatggtaacccttgtgg

SEQ ID NO: 2427700 - DNA, 25 bp, Homo sapien
accattttgcatattaaggtctata

SEQ ID NO: 2427701 - DNA, 25 bp, Homo sapien
agtttaacgtatgtgtccaccatta

SEQ ID NO: 2427702 - DNA, 25 bp, Homo sapien
tccaccattaaatccaggtcatttt

SEQ ID NO: 2427703 - DNA, 25 bp, Homo sapien
gtatagagtttaacgtatgtgtcca

SEQ ID NO: 2427704 - DNA, 25 bp, Homo sapien
gtgtccaccattaaatccaggtcat

SEQ ID NO: 2427705 - DNA, 25 bp, Homo sapien
aaaaaatgtcaggcatgtggagggc

SEQ ID NO: 2427706 - DNA, 25 bp, Homo sapien
aaaaatgtcaggcatgtggagggct

SEQ ID NO: 2427707 - DNA, 25 bp, Homo sapien
gaaaaaaatgtcaggcatgtggagg

SEQ ID NO: 2427708 - DNA, 25 bp, Homo sapien
aaaatgtcaggcatgtggagggctt

SEQ ID NO: 2427709 - DNA, 25 bp, Homo sapien
tccaacaatgaagctcggctgagac

SEQ ID NO: 2427710 - DNA, 25 bp, Homo sapien
tttgattctccaacaatgaagctcg

SEQ ID NO: 2427711 - DNA, 25 bp, Homo sapien
gattctccaacaatgaagctcggct

SEQ ID NO: 2427712 - DNA, 25 bp, Homo sapien
tctccaacaatgaagctcggctgag

SEQ ID NO: 2427713 - DNA, 25 bp, Homo sapien
tactatacaggtcagcatggtgttc

SEQ ID NO: 2427714 - DNA, 25 bp, Homo sapien
cctccaacgtattgactttgagttg

SEQ ID NO: 2427715 - DNA, 25 bp, Homo sapien
caacgtattgactttgagttgtccc

SEQ ID NO: 2427716 - DNA, 25 bp, Homo sapien
tggtgttcctccaacgtattgactt

SEQ ID NO: 2427717 - DNA, 25 bp, Homo sapien
tttaagttcctgaataatgtgctcc

SEQ ID NO: 2427718 - DNA, 25 bp, Homo sapien
tctttaagttcctgaataatgtgct

SEQ ID NO: 2427719 - DNA, 25 bp, Homo sapien
ctttaagttcctgaataatgtgctc

SEQ ID NO: 2427720 - DNA, 25 bp, Homo sapien
cacttttaagaacaacaatagcaac

SEQ ID NO: 2427721 - DNA, 25 bp, Homo sapien
cagaggtttgcgcctggaggttttt

SEQ ID NO: 2427722 - DNA, 25 bp, Homo sapien
ggctcttgtaaaagataggacactt

SEQ ID NO: 2427723 - DNA, 25 bp, Homo sapien
acatcagaggtttgcgcctggaggt

SEQ ID NO: 2427724 - DNA, 25 bp, Homo sapien
aagtgcttgcaggagttccactaaa

SEQ ID NO: 2427725 - DNA, 25 bp, Homo sapien
tttcaaaagcattaggcctgcctgt

SEQ ID NO: 2427726 - DNA, 25 bp, Homo sapien
gcaggagttccactaaaatttcaaa

SEQ ID NO: 2427727 - DNA, 25 bp, Homo sapien
aaatttcaaaagcattaggcctgcc

SEQ ID NO: 2427728 - DNA, 25 bp, Homo sapien
tggcagatttccttcagttctttac

SEQ ID NO: 2427729 - DNA, 25 bp, Homo sapien
ggcagatttccttcagttctttacc

SEQ ID NO: 2427730 - DNA, 25 bp, Homo sapien
aatggcagatttccttcagttcttt

SEQ ID NO: 2427731 - DNA, 25 bp, Homo sapien
atggcagatttccttcagttcttta

SEQ ID NO: 2427732 - DNA, 25 bp, Homo sapien
ggaagagtagattgtgtggatagct

SEQ ID NO: 2427733 - DNA, 25 bp, Homo sapien
aggaagagtagattgtgtggatagc

SEQ ID NO: 2427734 - DNA, 25 bp, Homo sapien
caggaagagtagattgtgtggatag

SEQ ID NO: 2427735 - DNA, 25 bp, Homo sapien
aatccccacttctcagttatcatag

SEQ ID NO: 2427736 - DNA, 25 bp, Homo sapien
ctggtcacgacaatactccatattt

SEQ ID NO: 2427737 - DNA, 25 bp, Homo sapien
aaatttcacagccataatttctgct

SEQ ID NO: 2427738 - DNA, 25 bp, Homo sapien
cagttatcatagtgtgaaatttcac

SEQ ID NO: 2427739 - DNA, 25 bp, Homo sapien
cttcataaggcaggaagcctacaaa

SEQ ID NO: 2427740 - DNA, 25 bp, Homo sapien
tcataaggcaggaagcctacaaatt

SEQ ID NO: 2427741 - DNA, 25 bp, Homo sapien
cataaggcaggaagcctacaaattc

SEQ ID NO: 2427742 - DNA, 25 bp, Homo sapien
ttcataaggcaggaagcctacaaat

SEQ ID NO: 2427743 - DNA, 25 bp, Homo sapien
tatgtcgtcaatgacaatggaaaag

SEQ ID NO: 2427744 - DNA, 25 bp, Homo sapien
tgatgtccactatgtcgtcaatgac

SEQ ID NO: 2427745 - DNA, 25 bp, Homo sapien
tccactatgtcgtcaatgacaatgg

SEQ ID NO: 2427746 - DNA, 25 bp, Homo sapien
ttcctctgatgtccactatgtcgtc

SEQ ID NO: 2427747 - DNA, 25 bp, Homo sapien
cagaacctcttcaccagaatttatt

SEQ ID NO: 2427748 - DNA, 25 bp, Homo sapien
aatttattccgcactccagcagtgc

SEQ ID NO: 2427749 - DNA, 25 bp, Homo sapien
gtctcaaaccgctttctcagaacct

SEQ ID NO: 2427750 - DNA, 25 bp, Homo sapien
tgtctcaaaccgctttctcagaacc

SEQ ID NO: 2427751 - DNA, 25 bp, Homo sapien
gccttcccatcagaatcaagatttc

SEQ ID NO: 2427752 - DNA, 25 bp, Homo sapien
tcaaatagagattttaggtattcct

SEQ ID NO: 2427753 - DNA, 25 bp, Homo sapien
agaggtatgttttgccttcccatca

SEQ ID NO: 2427754 - DNA, 25 bp, Homo sapien
cactgggattctgagcattgctatt

SEQ ID NO: 2427755 - DNA, 25 bp, Homo sapien
tgctcagaagtttcatcaatttttt

SEQ ID NO: 2427756 - DNA, 25 bp, Homo sapien
gctcagaagtttcatcaattttttt

SEQ ID NO: 2427757 - DNA, 25 bp, Homo sapien
ctcagaagtttcatcaatttttttt

SEQ ID NO: 2427758 - DNA, 25 bp, Homo sapien
ctgctcagaagtttcatcaattttt

SEQ ID NO: 2427759 - DNA, 25 bp, Homo sapien
tgtgttttaccttctaaatctgctc

SEQ ID NO: 2427760 - DNA, 25 bp, Homo sapien
gatattgcattatctcgaagaactg

SEQ ID NO: 2427761 - DNA, 25 bp, Homo sapien
tgtttggcacataatcgataacgtt

SEQ ID NO: 2427762 - DNA, 25 bp, Homo sapien
tgtcctataaggactagttctacaa

SEQ ID NO: 2427763 - DNA, 25 bp, Homo sapien
cggactgtgtgctcttccgcatgcg

SEQ ID NO: 2427764 - DNA, 25 bp, Homo sapien
gctcttccgcatgcggttgagggca

SEQ ID NO: 2427765 - DNA, 25 bp, Homo sapien
agcgcagaagttgggcaccgtagcc

SEQ ID NO: 2427766 - DNA, 25 bp, Homo sapien
tcctcaggggagtacgcccgcgcat

SEQ ID NO: 2427767 - DNA, 25 bp, Homo sapien
tagaactggctaagtccaatggacc

SEQ ID NO: 2427768 - DNA, 25 bp, Homo sapien
ccagaaggaaactctagacatcagt

SEQ ID NO: 2427769 - DNA, 25 bp, Homo sapien
tagcctggagtaatggtagtatgcc

SEQ ID NO: 2427770 - DNA, 25 bp, Homo sapien
tagtatgccatagctctagaactgg

SEQ ID NO: 2427771 - DNA, 25 bp, Homo sapien
cctatcaagtgtggtttggcccgca

SEQ ID NO: 2427772 - DNA, 25 bp, Homo sapien
tgctctcctgcacctatcaagtgtg

SEQ ID NO: 2427773 - DNA, 25 bp, Homo sapien
ggcatgacaacttaaagaacgtact

SEQ ID NO: 2427774 - DNA, 25 bp, Homo sapien
tccatggggcatgacaacttaaaga

SEQ ID NO: 2427775 - DNA, 25 bp, Homo sapien
ccagcccaatgtaatggagcttgtt

SEQ ID NO: 2427776 - DNA, 25 bp, Homo sapien
tcaggcacaggctgcaaaaatagga

SEQ ID NO: 2427777 - DNA, 25 bp, Homo sapien
taggaaatgacaggatggtctctct

SEQ ID NO: 2427778 - DNA, 25 bp, Homo sapien
tgagaactctggaatggttaataaa

SEQ ID NO: 2427779 - DNA, 25 bp, Homo sapien
tcttcataaatcatttccaggggcc

SEQ ID NO: 2427780 - DNA, 25 bp, Homo sapien
cctgccactccaccggtacttgagg

SEQ ID NO: 2427781 - DNA, 25 bp, Homo sapien
acactctcctagtttaatatttgaa

SEQ ID NO: 2427782 - DNA, 25 bp, Homo sapien
ccactccaccggtacttgaggttct

SEQ ID NO: 2427783 - DNA, 25 bp, Homo sapien
cttaggtatcagcaacacaggccaa

SEQ ID NO: 2427784 - DNA, 25 bp, Homo sapien
tccagcttaggtatcagcaacacag

SEQ ID NO: 2427785 - DNA, 25 bp, Homo sapien
gaggttcttcatccagcttaggtat

SEQ ID NO: 2427786 - DNA, 25 bp, Homo sapien
tcatccagcttaggtatcagcaaca

SEQ ID NO: 2427787 - DNA, 25 bp, Homo sapien
gacctggaatgtgtctggcctgata

SEQ ID NO: 2427788 - DNA, 25 bp, Homo sapien
tggaatgtgtctggcctgatagcct

SEQ ID NO: 2427789 - DNA, 25 bp, Homo sapien
caggacctggaatgtgtctggcctg

SEQ ID NO: 2427790 - DNA, 25 bp, Homo sapien
cctggaatgtgtctggcctgatagc

SEQ ID NO: 2427791 - DNA, 25 bp, Homo sapien
tgatctgggcatagatgacttggaa

SEQ ID NO: 2427792 - DNA, 25 bp, Homo sapien
gccacagggaattttatactctgga

SEQ ID NO: 2427793 - DNA, 25 bp, Homo sapien
gggcctgttgccagagccagacact

SEQ ID NO: 2427794 - DNA, 25 bp, Homo sapien
gaagtagcctaactggttgggcctg

SEQ ID NO: 2427795 - DNA, 25 bp, Homo sapien
gcattctaaaaaatttgatacataa

SEQ ID NO: 2427796 - DNA, 25 bp, Homo sapien
cttgcattctaaaaaatttgataca

SEQ ID NO: 2427797 - DNA, 25 bp, Homo sapien
tcttgcattctaaaaaatttgatac

SEQ ID NO: 2427798 - DNA, 25 bp, Homo sapien
tataatatttattcttgcattctaa

SEQ ID NO: 2427799 - DNA, 25 bp, Homo sapien
tatgtcaggcactgataggtgccag

SEQ ID NO: 2427800 - DNA, 25 bp, Homo sapien
gggccaggttagactctctttacaa

SEQ ID NO: 2427801 - DNA, 25 bp, Homo sapien
gaaggatttcttggttgcaaagcag

SEQ ID NO: 2427802 - DNA, 25 bp, Homo sapien
tgtctagtagaaccaaccattgaac

SEQ ID NO: 2427803 - DNA, 25 bp, Homo sapien
caaataagtacaatacaatgtgagc

SEQ ID NO: 2427804 - DNA, 25 bp, Homo sapien
caatacaatgtgagccatgagatgg

SEQ ID NO: 2427805 - DNA, 25 bp, Homo sapien
tggtagagaactatacaaaaggcta

SEQ ID NO: 2427806 - DNA, 25 bp, Homo sapien
cagtagatgatccagatatttaatc

SEQ ID NO: 2427807 - DNA, 25 bp, Homo sapien
taaggaacattgacctagacagctc

SEQ ID NO: 2427808 - DNA, 25 bp, Homo sapien
tttgaatgaactactgaatccccag

SEQ ID NO: 2427809 - DNA, 25 bp, Homo sapien
tattaaagcagtggtagagcccatc

SEQ ID NO: 2427810 - DNA, 25 bp, Homo sapien
taatataagcagagatgttccagcc

SEQ ID NO: 2427811 - DNA, 25 bp, Homo sapien
cacctaggctgggcaatctcggctc

SEQ ID NO: 2427812 - DNA, 25 bp, Homo sapien
ggcactactgctagctcagcgtcaa

SEQ ID NO: 2427813 - DNA, 25 bp, Homo sapien
tgagggaggcatcacacaacctgac

SEQ ID NO: 2427814 - DNA, 25 bp, Homo sapien
gataactggttagccacatcctgag

SEQ ID NO: 2427815 - DNA, 25 bp, Homo sapien
tcagcgtcaaacaaccttggcaatt

SEQ ID NO: 2427816 - DNA, 25 bp, Homo sapien
gtattgagaattatttattgccaaa

SEQ ID NO: 2427817 - DNA, 25 bp, Homo sapien
ttgtgtattgagaattatttattgc

SEQ ID NO: 2427818 - DNA, 25 bp, Homo sapien
tatttattgccaaaacatataacaa

SEQ ID NO: 2427819 - DNA, 25 bp, Homo sapien
tgagaattatttattgccaaaacat

SEQ ID NO: 2427820 - DNA, 25 bp, Homo sapien
tgaatctgtctgactctaacacctg

SEQ ID NO: 2427821 - DNA, 25 bp, Homo sapien
cacaaacagaggtatggcatttccc

SEQ ID NO: 2427822 - DNA, 25 bp, Homo sapien
tgcagtgctatacgtggcagtgcca

SEQ ID NO: 2427823 - DNA, 25 bp, Homo sapien
tcaagagggtcagcgtatgccaaga

SEQ ID NO: 2427824 - DNA, 25 bp, Homo sapien
gaaggtgcttaagacattttagccc

SEQ ID NO: 2427825 - DNA, 25 bp, Homo sapien
tactagtgttctaagcaaggagctg

SEQ ID NO: 2427826 - DNA, 25 bp, Homo sapien
catggaccttaaatttggaccctga

SEQ ID NO: 2427827 - DNA, 25 bp, Homo sapien
gaagttcctaacacatggaaggtgc

SEQ ID NO: 2427828 - DNA, 25 bp, Homo sapien
tgacatatatatggttataccaagg

SEQ ID NO: 2427829 - DNA, 25 bp, Homo sapien
tatatggttataccaagggtatcag

SEQ ID NO: 2427830 - DNA, 25 bp, Homo sapien
tatggttataccaagggtatcagtt

SEQ ID NO: 2427831 - DNA, 25 bp, Homo sapien
catatatatggttataccaagggta

SEQ ID NO: 2427832 - DNA, 25 bp, Homo sapien
gcatagcatgaagcatcaagatcaa

SEQ ID NO: 2427833 - DNA, 25 bp, Homo sapien
taaacgtcatgcttcattatttcct

SEQ ID NO: 2427834 - DNA, 25 bp, Homo sapien
atttccttcagacaaacggtagcat

SEQ ID NO: 2427835 - DNA, 25 bp, Homo sapien
gacaaacggtagcatagcatgaagc

SEQ ID NO: 2427836 - DNA, 25 bp, Homo sapien
agattacagggatgtttcaaaatct

SEQ ID NO: 2427837 - DNA, 25 bp, Homo sapien
ttccattagttggtatgagagatta

SEQ ID NO: 2427838 - DNA, 25 bp, Homo sapien
tcgttttgacatcaatgtcatgatc

SEQ ID NO: 2427839 - DNA, 25 bp, Homo sapien
caaaatctgtctatagcaacctggt

SEQ ID NO: 2427840 - DNA, 25 bp, Homo sapien
tcttcgggtactgaatattgtatcc

SEQ ID NO: 2427841 - DNA, 25 bp, Homo sapien
taagtatgtcatggtaccactgccc

SEQ ID NO: 2427842 - DNA, 25 bp, Homo sapien
catgtctgtagtccatctctgctaa

SEQ ID NO: 2427843 - DNA, 25 bp, Homo sapien
ttgtatccaagtactggaagaacca

SEQ ID NO: 2427844 - DNA, 25 bp, Homo sapien
cacattaccggtattttggtggaca

SEQ ID NO: 2427845 - DNA, 25 bp, Homo sapien
caaagagtaacctctactgctcagt

SEQ ID NO: 2427846 - DNA, 25 bp, Homo sapien
tacttttatgactgcgacctggatt

SEQ ID NO: 2427847 - DNA, 25 bp, Homo sapien
ggactcacaataactaaggtaacca

SEQ ID NO: 2427848 - DNA, 25 bp, Homo sapien
tgatatttgtggtggccacacagtc

SEQ ID NO: 2427849 - DNA, 25 bp, Homo sapien
gaatctgaaattcactatgctaagt

SEQ ID NO: 2427850 - DNA, 25 bp, Homo sapien
cttgaacagcaccaaaaggtagtca

SEQ ID NO: 2427851 - DNA, 25 bp, Homo sapien
gggacaatgtctacacttagatcta

SEQ ID NO: 2427852 - DNA, 25 bp, Homo sapien
catattagctgatccctcctcttca

SEQ ID NO: 2427853 - DNA, 25 bp, Homo sapien
tattgcatacatattagctgatccc

SEQ ID NO: 2427854 - DNA, 25 bp, Homo sapien
cctcctcttcagttaccaggtgaat

SEQ ID NO: 2427855 - DNA, 25 bp, Homo sapien
gatgtattgcatacatattagctga

SEQ ID NO: 2427856 - DNA, 25 bp, Homo sapien
gctccataggtttcaagtctgtaag

SEQ ID NO: 2427857 - DNA, 25 bp, Homo sapien
tggatacaaccttcctcggtcatgc

SEQ ID NO: 2427858 - DNA, 25 bp, Homo sapien
tcggtcatgccaaagcggtgcaatg

SEQ ID NO: 2427859 - DNA, 25 bp, Homo sapien
ggtaaagagaaccatgcctggatac

SEQ ID NO: 2427860 - DNA, 25 bp, Homo sapien
agggtaaatcaggtatagttagcca

SEQ ID NO: 2427861 - DNA, 25 bp, Homo sapien
tgaaacaaagggtaaatcaggtata

SEQ ID NO: 2427862 - DNA, 25 bp, Homo sapien
caaagggtaaatcaggtatagttag

SEQ ID NO: 2427863 - DNA, 25 bp, Homo sapien
ctgaaacaaagggtaaatcaggtat

SEQ ID NO: 2427864 - DNA, 25 bp, Homo sapien
ctttgctctatttacaggatcatcc

SEQ ID NO: 2427865 - DNA, 25 bp, Homo sapien
tttgctctatttacaggatcatcca

SEQ ID NO: 2427866 - DNA, 25 bp, Homo sapien
cattgagtaaaagagtcatggtctc

SEQ ID NO: 2427867 - DNA, 25 bp, Homo sapien
tattaggtatctgccacatgctagg

SEQ ID NO: 2427868 - DNA, 25 bp, Homo sapien
catagggtattagggacagagcatt

SEQ ID NO: 2427869 - DNA, 25 bp, Homo sapien
ggcaagcccttaatttcatttgtgc

SEQ ID NO: 2427870 - DNA, 25 bp, Homo sapien
ctgtggtccatagtaattcacaaag

SEQ ID NO: 2427871 - DNA, 25 bp, Homo sapien
gtggtccatagtaattcacaaagcc

SEQ ID NO: 2427872 - DNA, 25 bp, Homo sapien
tgtggtccatagtaattcacaaagc

SEQ ID NO: 2427873 - DNA, 25 bp, Homo sapien
tctgtggtccatagtaattcacaaa

SEQ ID NO: 2427874 - DNA, 25 bp, Homo sapien
ccaagtctcagggaatcatctacag

SEQ ID NO: 2427875 - DNA, 25 bp, Homo sapien
ttcctttgagctgaccaagtctcag

SEQ ID NO: 2427876 - DNA, 25 bp, Homo sapien
tctacagaccgaatattaaagacat

SEQ ID NO: 2427877 - DNA, 25 bp, Homo sapien
taatgacaatatcaaagtgatttcc

SEQ ID NO: 2427878 - DNA, 25 bp, Homo sapien
ttttctaacaaccattgcttgatag

SEQ ID NO: 2427879 - DNA, 25 bp, Homo sapien
caatcgcttcaaacatttccaggtt

SEQ ID NO: 2427880 - DNA, 25 bp, Homo sapien
ctgcataactaaaatccgaaggaat

SEQ ID NO: 2427881 - DNA, 25 bp, Homo sapien
ttgcttgataggtgatggctttctt

SEQ ID NO: 2427882 - DNA, 25 bp, Homo sapien
tactgttaccaccacattcggatta

SEQ ID NO: 2427883 - DNA, 25 bp, Homo sapien
cctcttcagataccaaatgacaaag

SEQ ID NO: 2427884 - DNA, 25 bp, Homo sapien
ccagcactgcaattcattttagaaa

SEQ ID NO: 2427885 - DNA, 25 bp, Homo sapien
ggcactgtgtaaactagccctctgg

SEQ ID NO: 2427886 - DNA, 25 bp, Homo sapien
gaaaataggctcatcgatggtctta

SEQ ID NO: 2427887 - DNA, 25 bp, Homo sapien
cagactgatgattttggtcaccatc

SEQ ID NO: 2427888 - DNA, 25 bp, Homo sapien
tggaagttccatcaacgatagtatc

SEQ ID NO: 2427889 - DNA, 25 bp, Homo sapien
tattgagaattcaggaggtagtcca

SEQ ID NO: 2427890 - DNA, 25 bp, Homo sapien
aagtcacttggtgagctttttatag

SEQ ID NO: 2427891 - DNA, 25 bp, Homo sapien
tgaaatccaacgtgatcattaaaga

SEQ ID NO: 2427892 - DNA, 25 bp, Homo sapien
tatagtgccatgaaatccaacgtga

SEQ ID NO: 2427893 - DNA, 25 bp, Homo sapien
acttggtgagctttttatagtgcca

SEQ ID NO: 2427894 - DNA, 25 bp, Homo sapien
attctataatctgtatcttcttcca

SEQ ID NO: 2427895 - DNA, 25 bp, Homo sapien
gattctataatctgtatcttcttcc

SEQ ID NO: 2427896 - DNA, 25 bp, Homo sapien
ctgattctataatctgtatcttctt

SEQ ID NO: 2427897 - DNA, 25 bp, Homo sapien
ttctataatctgtatcttcttccat

SEQ ID NO: 2427898 - DNA, 25 bp, Homo sapien
taagcctgaaggtgcagtattccca

SEQ ID NO: 2427899 - DNA, 25 bp, Homo sapien
caaagggtatggatcctcaatgcca

SEQ ID NO: 2427900 - DNA, 25 bp, Homo sapien
cacagaaaactagggcgtcgttgcc

SEQ ID NO: 2427901 - DNA, 25 bp, Homo sapien
caaaggagcccacgtggcgttaagc

SEQ ID NO: 2427902 - DNA, 25 bp, Homo sapien
catcgcgcaagaaactcgaccccgt

SEQ ID NO: 2427903 - DNA, 25 bp, Homo sapien
atcgcgcaagaaactcgaccccgtc

SEQ ID NO: 2427904 - DNA, 25 bp, Homo sapien
gcgcaagaaactcgaccccgtctac

SEQ ID NO: 2427905 - DNA, 25 bp, Homo sapien
tcgcgcaagaaactcgaccccgtct

SEQ ID NO: 2427906 - DNA, 25 bp, Homo sapien
gcacaacgctgtgcgcatgcccgga

SEQ ID NO: 2427907 - DNA, 25 bp, Homo sapien
attcatttgcacaacgctgtgcgca

SEQ ID NO: 2427908 - DNA, 25 bp, Homo sapien
ttgcacaacgctgtgcgcatgcccg

SEQ ID NO: 2427909 - DNA, 25 bp, Homo sapien
tcatttgcacaacgctgtgcgcatg

SEQ ID NO: 2427910 - DNA, 25 bp, Homo sapien
gagccgcctggaggcgccaagatga

SEQ ID NO: 2427911 - DNA, 25 bp, Homo sapien
tgtggagccgcctggaggcgccaag

SEQ ID NO: 2427912 - DNA, 25 bp, Homo sapien
gcctggaggcgccaagatgaagccc

SEQ ID NO: 2427913 - DNA, 25 bp, Homo sapien
ccgcctggaggcgccaagatgaagc

SEQ ID NO: 2427914 - DNA, 25 bp, Homo sapien
cgtgaacccgactgcgaaatgaagt

SEQ ID NO: 2427915 - DNA, 25 bp, Homo sapien
ggaagtcaggccagcacctgacaga

SEQ ID NO: 2427916 - DNA, 25 bp, Homo sapien
agcctccacacgattgtaattcgct

SEQ ID NO: 2427917 - DNA, 25 bp, Homo sapien
aattcgcttgtttctccggcctcca

SEQ ID NO: 2427918 - DNA, 25 bp, Homo sapien
tcagaggctcataggcggcaggaac

SEQ ID NO: 2427919 - DNA, 25 bp, Homo sapien
gacttaggacttttgagtgatgcta

SEQ ID NO: 2427920 - DNA, 25 bp, Homo sapien
tcagacttgccaggatcctgttgcc

SEQ ID NO: 2427921 - DNA, 25 bp, Homo sapien
ttacttattgcctgtaccaccaact

SEQ ID NO: 2427922 - DNA, 25 bp, Homo sapien
gaatgggattcctaacctaacacca

SEQ ID NO: 2427923 - DNA, 25 bp, Homo sapien
cctaacaccaggtactgaattatga

SEQ ID NO: 2427924 - DNA, 25 bp, Homo sapien
aatcctttttggacttaggcagact

SEQ ID NO: 2427925 - DNA, 25 bp, Homo sapien
taatctaagcactctatagtcacaa

SEQ ID NO: 2427926 - DNA, 25 bp, Homo sapien
tgtcatcagaaatcctgcagtatag

SEQ ID NO: 2427927 - DNA, 25 bp, Homo sapien
cagagtgagctgatctgcaatttta

SEQ ID NO: 2427928 - DNA, 25 bp, Homo sapien
acataaatgtttggcctcacagagc

SEQ ID NO: 2427929 - DNA, 25 bp, Homo sapien
tatctggtacccttaaagtttcaga

SEQ ID NO: 2427930 - DNA, 25 bp, Homo sapien
taatcagtagtagcttcagtttccg

SEQ ID NO: 2427931 - DNA, 25 bp, Homo sapien
tcagtttccgctgggcccctaatta

SEQ ID NO: 2427932 - DNA, 25 bp, Homo sapien
tacttcttcataaaggaagtctgca

SEQ ID NO: 2427933 - DNA, 25 bp, Homo sapien
ccctaattagtcttcgaattcctct

SEQ ID NO: 2427934 - DNA, 25 bp, Homo sapien
cagagattatatgtggcttggcaaa

SEQ ID NO: 2427935 - DNA, 25 bp, Homo sapien
gaaggtgctacccatgataaagtga

SEQ ID NO: 2427936 - DNA, 25 bp, Homo sapien
tgtagaaagtcagctgatccctgct

SEQ ID NO: 2427937 - DNA, 25 bp, Homo sapien
caagagaggtaaacaaaccatggcc

SEQ ID NO: 2427938 - DNA, 25 bp, Homo sapien
gcatgtgtatccaggcattgaataa

SEQ ID NO: 2427939 - DNA, 25 bp, Homo sapien
catgtgtatccaggcattgaataaa

SEQ ID NO: 2427940 - DNA, 25 bp, Homo sapien
actctaaatagtctccttcatggga

SEQ ID NO: 2427941 - DNA, 25 bp, Homo sapien
aatggtaacgagctgaatccttggg

SEQ ID NO: 2427942 - DNA, 25 bp, Homo sapien
ccttgggaatcctctttggcaaatc

SEQ ID NO: 2427943 - DNA, 25 bp, Homo sapien
ctatggactctaaatagtctccttc

SEQ ID NO: 2427944 - DNA, 25 bp, Homo sapien
tgtttgatgcttagtgtccacaccc

SEQ ID NO: 2427945 - DNA, 25 bp, Homo sapien
gcctgaaaggcttctcgagaaatgg

SEQ ID NO: 2427946 - DNA, 25 bp, Homo sapien
tcgagaaatgggaaatgctactcct

SEQ ID NO: 2427947 - DNA, 25 bp, Homo sapien
ctgcacatagttgagctgtctatta

SEQ ID NO: 2427948 - DNA, 25 bp, Homo sapien
ggggcaggggaagattgtgacagca

SEQ ID NO: 2427949 - DNA, 25 bp, Homo sapien
gggaagattgtgacagcaagtattt

SEQ ID NO: 2427950 - DNA, 25 bp, Homo sapien
tatatccatgtaatgatacatcttc

SEQ ID NO: 2427951 - DNA, 25 bp, Homo sapien
ttatatccatgtaatgatacatctt

SEQ ID NO: 2427952 - DNA, 25 bp, Homo sapien
atacttcatctttaatgtggccacc

SEQ ID NO: 2427953 - DNA, 25 bp, Homo sapien
gttgctcttgttgctgcatacaaca

SEQ ID NO: 2427954 - DNA, 25 bp, Homo sapien
cttcatctttaatgtggccacctcc

SEQ ID NO: 2427955 - DNA, 25 bp, Homo sapien
aatgtggccacctccaaattccttc

SEQ ID NO: 2427956 - DNA, 25 bp, Homo sapien
tcaaaaacatttttctagcatttaa

SEQ ID NO: 2427957 - DNA, 25 bp, Homo sapien
tttttctagcatttaatgttaaaca

SEQ ID NO: 2427958 - DNA, 25 bp, Homo sapien
caaaaacatttttctagcatttaat

SEQ ID NO: 2427959 - DNA, 25 bp, Homo sapien
aacatttttctagcatttaatgtta

SEQ ID NO: 2427960 - DNA, 25 bp, Homo sapien
tgactatatgatccaatcacaagtt

SEQ ID NO: 2427961 - DNA, 25 bp, Homo sapien
aatctgaaggctgactatatgatcc

SEQ ID NO: 2427962 - DNA, 25 bp, Homo sapien
gaatctgaaggctgactatatgatc

SEQ ID NO: 2427963 - DNA, 25 bp, Homo sapien
actatatgatccaatcacaagttgc

SEQ ID NO: 2427964 - DNA, 25 bp, Homo sapien
tatttggccataatgctacagattt

SEQ ID NO: 2427965 - DNA, 25 bp, Homo sapien
aacatttgcctagatgtatacactg

SEQ ID NO: 2427966 - DNA, 25 bp, Homo sapien
ccactttgaaatggtattcagcaga

SEQ ID NO: 2427967 - DNA, 25 bp, Homo sapien
tatcaagtggtagtgtgatgaagac

SEQ ID NO: 2427968 - DNA, 25 bp, Homo sapien
tccttccgtagagatgctagttaga

SEQ ID NO: 2427969 - DNA, 25 bp, Homo sapien
gaagtagtgccattttccttccgta

SEQ ID NO: 2427970 - DNA, 25 bp, Homo sapien
gggatgctcttataccagaaaaaca

SEQ ID NO: 2427971 - DNA, 25 bp, Homo sapien
cacttaggaagtgatggcattaaaa

SEQ ID NO: 2427972 - DNA, 25 bp, Homo sapien
cagagatggaagcactgacattaga

SEQ ID NO: 2427973 - DNA, 25 bp, Homo sapien
agagatggaagcactgacattagaa

SEQ ID NO: 2427974 - DNA, 25 bp, Homo sapien
ccagagatggaagcactgacattag

SEQ ID NO: 2427975 - DNA, 25 bp, Homo sapien
gagatggaagcactgacattagaaa

SEQ ID NO: 2427976 - DNA, 25 bp, Homo sapien
tcagaatgaaattaggggcccatag

SEQ ID NO: 2427977 - DNA, 25 bp, Homo sapien
gggcccatagggacctgcacaaaat

SEQ ID NO: 2427978 - DNA, 25 bp, Homo sapien
aaaaatacaacagccactaatccag

SEQ ID NO: 2427979 - DNA, 25 bp, Homo sapien
taccgtaagatttgaacttgcttca

SEQ ID NO: 2427980 - DNA, 25 bp, Homo sapien
tttccatttctggctctggcaaaga

SEQ ID NO: 2427981 - DNA, 25 bp, Homo sapien
atttctggctctggcaaagatctct

SEQ ID NO: 2427982 - DNA, 25 bp, Homo sapien
tccatttctggctctggcaaagatc

SEQ ID NO: 2427983 - DNA, 25 bp, Homo sapien
catttctggctctggcaaagatctc

SEQ ID NO: 2427984 - DNA, 25 bp, Homo sapien
cattacatgcaaccatacagatcag

SEQ ID NO: 2427985 - DNA, 25 bp, Homo sapien
gcaggctgcccaatttcaaaccagg

SEQ ID NO: 2427986 - DNA, 25 bp, Homo sapien
ggaaataatggaggtcagatataac

SEQ ID NO: 2427987 - DNA, 25 bp, Homo sapien
tataactgcatattgaactgtctgc

SEQ ID NO: 2427988 - DNA, 25 bp, Homo sapien
aaagtcctgtaatattctcctttgg

SEQ ID NO: 2427989 - DNA, 25 bp, Homo sapien
agtcctgtaatattctcctttggac

SEQ ID NO: 2427990 - DNA, 25 bp, Homo sapien
tcaaagtcctgtaatattctccttt

SEQ ID NO: 2427991 - DNA, 25 bp, Homo sapien
aagtcctgtaatattctcctttgga

SEQ ID NO: 2427992 - DNA, 25 bp, Homo sapien
agcgtactgaagccccagtcgcctc

SEQ ID NO: 2427993 - DNA, 25 bp, Homo sapien
cgtactgaagccccagtcgcctcca

SEQ ID NO: 2427994 - DNA, 25 bp, Homo sapien
actgaagccccagtcgcctccactg

SEQ ID NO: 2427995 - DNA, 25 bp, Homo sapien
tgaagccccagtcgcctccactgtc

SEQ ID NO: 2427996 - DNA, 25 bp, Homo sapien
cccgaatttcggatcaatctgcaac

SEQ ID NO: 2427997 - DNA, 25 bp, Homo sapien
gcctcgaaagccaatttccttcgct

SEQ ID NO: 2427998 - DNA, 25 bp, Homo sapien
aaccaggccgcctcgaaagccaatt

SEQ ID NO: 2427999 - DNA, 25 bp, Homo sapien
ctgtcggggacggtggaaggcacgc

SEQ ID NO: 2428000 - DNA, 25 bp, Homo sapien
ttccctgcgagtcgcgccgggcgct

SEQ ID NO: 2428001 - DNA, 25 bp, Homo sapien
cgagaccgacttccggagctcccgg

SEQ ID NO: 2428002 - DNA, 25 bp, Homo sapien
caggagcgcggagaggcgccgaggc

SEQ ID NO: 2428003 - DNA, 25 bp, Homo sapien
gaggaggacgcaggccggcagcgcc

SEQ ID NO: 2428004 - DNA, 25 bp, Homo sapien
cttggatgccggtctggtgggacat

SEQ ID NO: 2428005 - DNA, 25 bp, Homo sapien
ctccggcgctgagtgcagccagcgg

SEQ ID NO: 2428006 - DNA, 25 bp, Homo sapien
tccggcgctgagtgcagccagcggc

SEQ ID NO: 2428007 - DNA, 25 bp, Homo sapien
gccaaggtggctggtttacccaata

SEQ ID NO: 2428008 - DNA, 25 bp, Homo sapien
tgtcaaatcattcttggccaaggtg

SEQ ID NO: 2428009 - DNA, 25 bp, Homo sapien
aaatggctgaatatggctaccctac

SEQ ID NO: 2428010 - DNA, 25 bp, Homo sapien
tgacagggttgtagctgcatgcaga

SEQ ID NO: 2428011 - DNA, 25 bp, Homo sapien
tatattcagtggctagctcctagtc

SEQ ID NO: 2428012 - DNA, 25 bp, Homo sapien
tacaaattgtcagtgccttaacagt

SEQ ID NO: 2428013 - DNA, 25 bp, Homo sapien
taatctttccagacgtctcactttc

SEQ ID NO: 2428014 - DNA, 25 bp, Homo sapien
cttgccagatgtgtcgtctaggaaa

SEQ ID NO: 2428015 - DNA, 25 bp, Homo sapien
tggcaactatggctccaggaaatgg

SEQ ID NO: 2428016 - DNA, 25 bp, Homo sapien
ttggcctgaggtgagtgccgcttcc

SEQ ID NO: 2428017 - DNA, 25 bp, Homo sapien
tggtgtcagacttcacttggcctga

SEQ ID NO: 2428018 - DNA, 25 bp, Homo sapien
gggtagcagctctagttctctcaag

SEQ ID NO: 2428019 - DNA, 25 bp, Homo sapien
cagtgtgcccactgaggctttgcca

SEQ ID NO: 2428020 - DNA, 25 bp, Homo sapien
ctttggtgggtggatgccagcaatc

SEQ ID NO: 2428021 - DNA, 25 bp, Homo sapien
accagtgtgcccactgaggctttgc

SEQ ID NO: 2428022 - DNA, 25 bp, Homo sapien
ccagtgtgcccactgaggctttgcc

SEQ ID NO: 2428023 - DNA, 25 bp, Homo sapien
tcgaccgcgaatcccgtgtgcagtc

SEQ ID NO: 2428024 - DNA, 25 bp, Homo sapien
ggtatttatagctccgtgacagcag

SEQ ID NO: 2428025 - DNA, 25 bp, Homo sapien
cgcgcgacccttcgggtgagtacgt

SEQ ID NO: 2428026 - DNA, 25 bp, Homo sapien
gtcactgcccgcgagtgcggaagca

SEQ ID NO: 2428027 - DNA, 25 bp, Homo sapien
ttttccaacatgtgcagagatcctc

SEQ ID NO: 2428028 - DNA, 25 bp, Homo sapien
ggtggagtgcagaggatactctaac

SEQ ID NO: 2428029 - DNA, 25 bp, Homo sapien
taacgtcctgaatgcctgactggga

SEQ ID NO: 2428030 - DNA, 25 bp, Homo sapien
tggcataactccaagcatggcataa

SEQ ID NO: 2428031 - DNA, 25 bp, Homo sapien
tggttaggttagctccctcagagga

SEQ ID NO: 2428032 - DNA, 25 bp, Homo sapien
gattcctaatgatttccccagaggt

SEQ ID NO: 2428033 - DNA, 25 bp, Homo sapien
tgttgagtgcataccatgtgttagg

SEQ ID NO: 2428034 - DNA, 25 bp, Homo sapien
tcttcaaggtgcatggaatatgcca

SEQ ID NO: 2428035 - DNA, 25 bp, Homo sapien
acagaagtacctgtcctcattgagc

SEQ ID NO: 2428036 - DNA, 25 bp, Homo sapien
tgttggtccaaagcctgagataaga

SEQ ID NO: 2428037 - DNA, 25 bp, Homo sapien
taaagttcccttctcgtgaggatgc

SEQ ID NO: 2428038 - DNA, 25 bp, Homo sapien
tgctctacattgagctaaagttccc

SEQ ID NO: 2428039 - DNA, 25 bp, Homo sapien
caaggttgacttgatatctagtgct

SEQ ID NO: 2428040 - DNA, 25 bp, Homo sapien
gtctatgggtccttggactccaggt

SEQ ID NO: 2428041 - DNA, 25 bp, Homo sapien
tgtctatgggtccttggactccagg

SEQ ID NO: 2428042 - DNA, 25 bp, Homo sapien
tatttaagggatttgtaggcttctg

SEQ ID NO: 2428043 - DNA, 25 bp, Homo sapien
actgtctatgggtccttggactcca

SEQ ID NO: 2428044 - DNA, 25 bp, Homo sapien
gctctaaatccttgaatatagctgc

SEQ ID NO: 2428045 - DNA, 25 bp, Homo sapien
tgcttcattcttcaccacaggaaag

SEQ ID NO: 2428046 - DNA, 25 bp, Homo sapien
ccttgaatatagctgctgcatctgc

SEQ ID NO: 2428047 - DNA, 25 bp, Homo sapien
tcttcaccacaggaaagtgcctcat

SEQ ID NO: 2428048 - DNA, 25 bp, Homo sapien
taataaacattgcttgaaacaatgt

SEQ ID NO: 2428049 - DNA, 25 bp, Homo sapien
tttaataaacattgcttgaaacaat

SEQ ID NO: 2428050 - DNA, 25 bp, Homo sapien
ttaataaacattgcttgaaacaatg

SEQ ID NO: 2428051 - DNA, 25 bp, Homo sapien
atttaataaacattgcttgaaacaa

SEQ ID NO: 2428052 - DNA, 25 bp, Homo sapien
gaaacagaggggcagaccgaagtta

SEQ ID NO: 2428053 - DNA, 25 bp, Homo sapien
ctcttaggatccaagcattgtgcca

SEQ ID NO: 2428054 - DNA, 25 bp, Homo sapien
cagaccgaagttaaccctcctctgt

SEQ ID NO: 2428055 - DNA, 25 bp, Homo sapien
ggcttcctgtcttgagtctggttca

SEQ ID NO: 2428056 - DNA, 25 bp, Homo sapien
tgaaatcagtagaagcaccagggtg

SEQ ID NO: 2428057 - DNA, 25 bp, Homo sapien
atcgtcatcaaactaatctaatctc

SEQ ID NO: 2428058 - DNA, 25 bp, Homo sapien
gagattagattagtttgatgacgat

SEQ ID NO: 2428059 - DNA, 25 bp, Homo sapien
tgtcattttgtatgtctgtgtagac

SEQ ID NO: 2428060 - DNA, 25 bp, Homo sapien
gcttgcaaggtacctagatctgtcc

SEQ ID NO: 2428061 - DNA, 25 bp, Homo sapien
ataccggggtgaggaccaagactgc

SEQ ID NO: 2428062 - DNA, 25 bp, Homo sapien
tctgtgtagacagagtcggcaagaa

SEQ ID NO: 2428063 - DNA, 25 bp, Homo sapien
tctaagacggttcaaccacctacta

SEQ ID NO: 2428064 - DNA, 25 bp, Homo sapien
tcagtttagcgacattaaacatgcc

SEQ ID NO: 2428065 - DNA, 25 bp, Homo sapien
atgatacaagtataaggcagttcac

SEQ ID NO: 2428066 - DNA, 25 bp, Homo sapien
ttctggtgtctaagacggttcaacc

SEQ ID NO: 2428067 - DNA, 25 bp, Homo sapien
catctaaaccttgtgtcacattggt

SEQ ID NO: 2428068 - DNA, 25 bp, Homo sapien
tgtgtcatgactaaagcatttcccg

SEQ ID NO: 2428069 - DNA, 25 bp, Homo sapien
gacgcttataggtcttctgtttagt

SEQ ID NO: 2428070 - DNA, 25 bp, Homo sapien
gtgtcatgtagtgcgtattaagatc

SEQ ID NO: 2428071 - DNA, 25 bp, Homo sapien
cacacatttccgtaacactacaaaa

SEQ ID NO: 2428072 - DNA, 25 bp, Homo sapien
gcttcatggtacgtgacacctcctg

SEQ ID NO: 2428073 - DNA, 25 bp, Homo sapien
ctatgcttcatggtacgtgacacct

SEQ ID NO: 2428074 - DNA, 25 bp, Homo sapien
ctgttatccccacacatttccgtaa

SEQ ID NO: 2428075 - DNA, 25 bp, Homo sapien
gctgcctctgcacttgtgttcctga

SEQ ID NO: 2428076 - DNA, 25 bp, Homo sapien
tctctgtctagcaatatctaaggtg

SEQ ID NO: 2428077 - DNA, 25 bp, Homo sapien
tgagaaaattcttgcatggcatgca

SEQ ID NO: 2428078 - DNA, 25 bp, Homo sapien
cattgcgcaatggatcaaatgagaa

SEQ ID NO: 2428079 - DNA, 25 bp, Homo sapien
tctttttgatacagcaagggtaact

SEQ ID NO: 2428080 - DNA, 25 bp, Homo sapien
gatacagcaagggtaactgtaatgt

SEQ ID NO: 2428081 - DNA, 25 bp, Homo sapien
ttttgatacagcaagggtaactgta

SEQ ID NO: 2428082 - DNA, 25 bp, Homo sapien
ttctttttgatacagcaagggtaac

SEQ ID NO: 2428083 - DNA, 25 bp, Homo sapien
cactatttgcaggatgtgttgatcg

SEQ ID NO: 2428084 - DNA, 25 bp, Homo sapien
ctctgcttgggtttgtcactgcatt

SEQ ID NO: 2428085 - DNA, 25 bp, Homo sapien
tgcatcatgattggtcttgtcccca

SEQ ID NO: 2428086 - DNA, 25 bp, Homo sapien
tagctattgcaatgcctttcactat

SEQ ID NO: 2428087 - DNA, 25 bp, Homo sapien
ctgtgtttttgtctttgtggtcagc

SEQ ID NO: 2428088 - DNA, 25 bp, Homo sapien
ctggaaaccatctgtgtttttgtct

SEQ ID NO: 2428089 - DNA, 25 bp, Homo sapien
tgtttttgtctttgtggtcagccat

SEQ ID NO: 2428090 - DNA, 25 bp, Homo sapien
tggaaaccatctgtgtttttgtctt

SEQ ID NO: 2428091 - DNA, 25 bp, Homo sapien
gagcatttgatgaacatttcgtaca

SEQ ID NO: 2428092 - DNA, 25 bp, Homo sapien
cctctcgaaaaaagtggtgatgcct

SEQ ID NO: 2428093 - DNA, 25 bp, Homo sapien
tcttaggccagaactttgagtacct

SEQ ID NO: 2428094 - DNA, 25 bp, Homo sapien
caacgggcacggagtctcctggaga

SEQ ID NO: 2428095 - DNA, 25 bp, Homo sapien
cagagagggcagcatacatgtgtga

SEQ ID NO: 2428096 - DNA, 25 bp, Homo sapien
tctctgagctgttaaatgcacatgg

SEQ ID NO: 2428097 - DNA, 25 bp, Homo sapien
gttgtgtcacacgtaaccagttttc

SEQ ID NO: 2428098 - DNA, 25 bp, Homo sapien
gaattactgccaaacatctccatat

SEQ ID NO: 2428099 - DNA, 25 bp, Homo sapien
tagcactcttcactttataatgatc

SEQ ID NO: 2428100 - DNA, 25 bp, Homo sapien
cttagcactcttcactttataatga

SEQ ID NO: 2428101 - DNA, 25 bp, Homo sapien
ttagcactcttcactttataatgat

SEQ ID NO: 2428102 - DNA, 25 bp, Homo sapien
tggggttctcttttaggcctgcaaa

SEQ ID NO: 2428103 - DNA, 25 bp, Homo sapien
ggttctcttttaggcctgcaaatct

SEQ ID NO: 2428104 - DNA, 25 bp, Homo sapien
tctcttttaggcctgcaaatctgtt

SEQ ID NO: 2428105 - DNA, 25 bp, Homo sapien
tttaggcctgcaaatctgttttctc

SEQ ID NO: 2428106 - DNA, 25 bp, Homo sapien
acgtaggtgccagactctaaaagcc

SEQ ID NO: 2428107 - DNA, 25 bp, Homo sapien
ttactgatcaaaggcaaagttggta

SEQ ID NO: 2428108 - DNA, 25 bp, Homo sapien
aggacagttcttcaacgtaggtgcc

SEQ ID NO: 2428109 - DNA, 25 bp, Homo sapien
tcttcaacgtaggtgccagactcta

SEQ ID NO: 2428110 - DNA, 25 bp, Homo sapien
aaaatccctttgacattcttagaag

SEQ ID NO: 2428111 - DNA, 25 bp, Homo sapien
aagaggtagaaagatcttcactggc

SEQ ID NO: 2428112 - DNA, 25 bp, Homo sapien
aggtagaaagatcttcactggcaag

SEQ ID NO: 2428113 - DNA, 25 bp, Homo sapien
cctttgacattcttagaagaggtag

SEQ ID NO: 2428114 - DNA, 25 bp, Homo sapien
ttttctgacaaactagaggtagaat

SEQ ID NO: 2428115 - DNA, 25 bp, Homo sapien
agttttctgacaaactagaggtaga

SEQ ID NO: 2428116 - DNA, 25 bp, Homo sapien
gcattaaatatattgacggttgaaa

SEQ ID NO: 2428117 - DNA, 25 bp, Homo sapien
gacggttgaaatgctttgatgtttg

SEQ ID NO: 2428118 - DNA, 25 bp, Homo sapien
ccaggcctttgcagtcttctcatca

SEQ ID NO: 2428119 - DNA, 25 bp, Homo sapien
tcttggactgctgggacctaaaggg

SEQ ID NO: 2428120 - DNA, 25 bp, Homo sapien
agtccagggacttagtcttggactg

SEQ ID NO: 2428121 - DNA, 25 bp, Homo sapien
cctcttagtgaatgcaggaacttct

SEQ ID NO: 2428122 - DNA, 25 bp, Homo sapien
tggcattggcagagagaaaaggagg

SEQ ID NO: 2428123 - DNA, 25 bp, Homo sapien
gcattggcagagagaaaaggagggc

SEQ ID NO: 2428124 - DNA, 25 bp, Homo sapien
attggcagagagaaaaggagggcat

SEQ ID NO: 2428125 - DNA, 25 bp, Homo sapien
ctttgtggcattggcagagagaaaa

SEQ ID NO: 2428126 - DNA, 25 bp, Homo sapien
ctcatggggtccaggtaaatgtacc

SEQ ID NO: 2428127 - DNA, 25 bp, Homo sapien
catggggtccaggtaaatgtaccat

SEQ ID NO: 2428128 - DNA, 25 bp, Homo sapien
tcatggggtccaggtaaatgtacca

SEQ ID NO: 2428129 - DNA, 25 bp, Homo sapien
atggggtccaggtaaatgtaccatg

SEQ ID NO: 2428130 - DNA, 25 bp, Homo sapien
tgaagaacatcaacagccaacttac

SEQ ID NO: 2428131 - DNA, 25 bp, Homo sapien
tctcctgaagaacatcaacagccaa

SEQ ID NO: 2428132 - DNA, 25 bp, Homo sapien
tcctgaagaacatcaacagccaact

SEQ ID NO: 2428133 - DNA, 25 bp, Homo sapien
tttctcctgaagaacatcaacagcc

SEQ ID NO: 2428134 - DNA, 25 bp, Homo sapien
aaatcagagttagcaggtcccttcc

SEQ ID NO: 2428135 - DNA, 25 bp, Homo sapien
ggaattatcagagcccctacccttg

SEQ ID NO: 2428136 - DNA, 25 bp, Homo sapien
gggagttcacgcaagggccacttta

SEQ ID NO: 2428137 - DNA, 25 bp, Homo sapien
gcttgaggcatcatgaacaacccag

SEQ ID NO: 2428138 - DNA, 25 bp, Homo sapien
attttctccacccataatccaataa

SEQ ID NO: 2428139 - DNA, 25 bp, Homo sapien
tttctccacccataatccaataatt

SEQ ID NO: 2428140 - DNA, 25 bp, Homo sapien
gtattttctccacccataatccaat

SEQ ID NO: 2428141 - DNA, 25 bp, Homo sapien
atgtattttctccacccataatcca

SEQ ID NO: 2428142 - DNA, 25 bp, Homo sapien
tctcattggcattagccactgtttg

SEQ ID NO: 2428143 - DNA, 25 bp, Homo sapien
tgtgtcttaaccagagccagagttt

SEQ ID NO: 2428144 - DNA, 25 bp, Homo sapien
ttgatgactgccatatctttgtcag

SEQ ID NO: 2428145 - DNA, 25 bp, Homo sapien
tcaactttgaggttaatggtcccga

SEQ ID NO: 2428146 - DNA, 25 bp, Homo sapien
tctgctcaggctcatcttttgtgtg

SEQ ID NO: 2428147 - DNA, 25 bp, Homo sapien
tccttctgctcaggctcatcttttg

SEQ ID NO: 2428148 - DNA, 25 bp, Homo sapien
gtccttctgctcaggctcatctttt

SEQ ID NO: 2428149 - DNA, 25 bp, Homo sapien
cttctgctcaggctcatcttttgtg

SEQ ID NO: 2428150 - DNA, 25 bp, Homo sapien
gattgggtccattaactcagcaggt

SEQ ID NO: 2428151 - DNA, 25 bp, Homo sapien
agaaaagacccgatatgagcctccc

SEQ ID NO: 2428152 - DNA, 25 bp, Homo sapien
gcaaagttcagtctatcctaaggga

SEQ ID NO: 2428153 - DNA, 25 bp, Homo sapien
tcctaaagctgaggtcgacagaggg

SEQ ID NO: 2428154 - DNA, 25 bp, Homo sapien
ggaccgatggtacaagaagcgtctt

SEQ ID NO: 2428155 - DNA, 25 bp, Homo sapien
tagctcttctgtccagaagacctgc

SEQ ID NO: 2428156 - DNA, 25 bp, Homo sapien
gaagcgtctttccatgacacttagc

SEQ ID NO: 2428157 - DNA, 25 bp, Homo sapien
ctactgctcccaggccaacgtaggg

SEQ ID NO: 2428158 - DNA, 25 bp, Homo sapien
aacctttcctcatatgctgcctcgg

SEQ ID NO: 2428159 - DNA, 25 bp, Homo sapien
gcctcggccatcaggtgcacaagta

SEQ ID NO: 2428160 - DNA, 25 bp, Homo sapien
gccctctggctaagtggagtctaaa

SEQ ID NO: 2428161 - DNA, 25 bp, Homo sapien
tgcacaagtacaaagactcctttca

SEQ ID NO: 2428162 - DNA, 25 bp, Homo sapien
taatggaagaacagaccactgtgca

SEQ ID NO: 2428163 - DNA, 25 bp, Homo sapien
tatttgtcattatgcctctcataag

SEQ ID NO: 2428164 - DNA, 25 bp, Homo sapien
cagtgaaggtgcatttgtatcctgg

SEQ ID NO: 2428165 - DNA, 25 bp, Homo sapien
ccatttgattgatctgccataataa

SEQ ID NO: 2428166 - DNA, 25 bp, Homo sapien
tgttctttaatgagtgtcttgttcc

SEQ ID NO: 2428167 - DNA, 25 bp, Homo sapien
ctttaatgagtgtcttgttccttac

SEQ ID NO: 2428168 - DNA, 25 bp, Homo sapien
gccttatgttctttaatgagtgtct

SEQ ID NO: 2428169 - DNA, 25 bp, Homo sapien
tatgccttatgttctttaatgagtg

SEQ ID NO: 2428170 - DNA, 25 bp, Homo sapien
taacaaacaggatatggcaacaggc

SEQ ID NO: 2428171 - DNA, 25 bp, Homo sapien
tgcaggtaagtgtatttccctcccc

SEQ ID NO: 2428172 - DNA, 25 bp, Homo sapien
caacggactggatcagctgggacaa

SEQ ID NO: 2428173 - DNA, 25 bp, Homo sapien
gatgaagtttccagagcattccttg

SEQ ID NO: 2428174 - DNA, 25 bp, Homo sapien
agcataaattctttgattgtccatt

SEQ ID NO: 2428175 - DNA, 25 bp, Homo sapien
aattctttgattgtccattaccatc

SEQ ID NO: 2428176 - DNA, 25 bp, Homo sapien
catatatttgagagcataaattctt

SEQ ID NO: 2428177 - DNA, 25 bp, Homo sapien
tttgattgtccattaccatcctcat

SEQ ID NO: 2428178 - DNA, 25 bp, Homo sapien
acttctcagccctagatattgtcca

SEQ ID NO: 2428179 - DNA, 25 bp, Homo sapien
cctagatattgtccatgactcctca

SEQ ID NO: 2428180 - DNA, 25 bp, Homo sapien
taaccttccagttggaaatgtcatg

SEQ ID NO: 2428181 - DNA, 25 bp, Homo sapien
ccttccagttggaaatgtcatgttt

SEQ ID NO: 2428182 - DNA, 25 bp, Homo sapien
agagtagattgtttgtgctgactcc

SEQ ID NO: 2428183 - DNA, 25 bp, Homo sapien
ggtatcctctatgcgtgccattggc

SEQ ID NO: 2428184 - DNA, 25 bp, Homo sapien
gttgaaatgggtatcctctatgcgt

SEQ ID NO: 2428185 - DNA, 25 bp, Homo sapien
tcatagacccagagtagattgtttg

SEQ ID NO: 2428186 - DNA, 25 bp, Homo sapien
agtacatgattgtcgttgaggctct

SEQ ID NO: 2428187 - DNA, 25 bp, Homo sapien
atttaggagtacatgattgtcgttg

SEQ ID NO: 2428188 - DNA, 25 bp, Homo sapien
aggagtacatgattgtcgttgaggc

SEQ ID NO: 2428189 - DNA, 25 bp, Homo sapien
tacatgattgtcgttgaggctcttg

SEQ ID NO: 2428190 - DNA, 25 bp, Homo sapien
accatgatgttgagtttatggtctt

SEQ ID NO: 2428191 - DNA, 25 bp, Homo sapien
gaagtggaccatgatgttgagttta

SEQ ID NO: 2428192 - DNA, 25 bp, Homo sapien
tggctggcactgaagtggaccatga

SEQ ID NO: 2428193 - DNA, 25 bp, Homo sapien
cactgaagtggaccatgatgttgag

SEQ ID NO: 2428194 - DNA, 25 bp, Homo sapien
cagtcatcaagaatcacaacaggga

SEQ ID NO: 2428195 - DNA, 25 bp, Homo sapien
taaaccagtcatcaagaatcacaac

SEQ ID NO: 2428196 - DNA, 25 bp, Homo sapien
caagaatcacaacagggatttcaac

SEQ ID NO: 2428197 - DNA, 25 bp, Homo sapien
acaacagggatttcaactatctggg

SEQ ID NO: 2428198 - DNA, 25 bp, Homo sapien
agcccatttgcatgacggactgaag

SEQ ID NO: 2428199 - DNA, 25 bp, Homo sapien
atcaggtatgattagatacatctgg

SEQ ID NO: 2428200 - DNA, 25 bp, Homo sapien
tgcatgacggactgaagagtctttt

SEQ ID NO: 2428201 - DNA, 25 bp, Homo sapien
agagtcttagaggatgggcctgcca

SEQ ID NO: 2428202 - DNA, 25 bp, Homo sapien
tcactcccaccagacctgatggtaa

SEQ ID NO: 2428203 - DNA, 25 bp, Homo sapien
tcccaccagacctgatggtaaacct

SEQ ID NO: 2428204 - DNA, 25 bp, Homo sapien
caccagacctgatggtaaacctctg

SEQ ID NO: 2428205 - DNA, 25 bp, Homo sapien
agacctgatggtaaacctctgtcca

SEQ ID NO: 2428206 - DNA, 25 bp, Homo sapien
tgcagcatgctaccctcttggactt

SEQ ID NO: 2428207 - DNA, 25 bp, Homo sapien
taaaacagctatcacacacatggca

SEQ ID NO: 2428208 - DNA, 25 bp, Homo sapien
ctttatgacaagaagcagacagctg

SEQ ID NO: 2428209 - DNA, 25 bp, Homo sapien
tgctttaagcatgaggcgaccttcc

SEQ ID NO: 2428210 - DNA, 25 bp, Homo sapien
ttattggcatttacacaaagtccca

SEQ ID NO: 2428211 - DNA, 25 bp, Homo sapien
ttaagagacacagttgggcgaactc

SEQ ID NO: 2428212 - DNA, 25 bp, Homo sapien
tcatcatatgagagcagcacatccc

SEQ ID NO: 2428213 - DNA, 25 bp, Homo sapien
tcccagacaaccaaggaactgaagt

SEQ ID NO: 2428214 - DNA, 25 bp, Homo sapien
tgtcttcagcatttaaagaaagctg

SEQ ID NO: 2428215 - DNA, 25 bp, Homo sapien
gaaagctgacacatgcacctgagcc

SEQ ID NO: 2428216 - DNA, 25 bp, Homo sapien
tgccagtaatccaccacctttcata

SEQ ID NO: 2428217 - DNA, 25 bp, Homo sapien
tgaagttgaggtagccacttctgaa

SEQ ID NO: 2428218 - DNA, 25 bp, Homo sapien
gggcccaattccactgcaggttcct

SEQ ID NO: 2428219 - DNA, 25 bp, Homo sapien
catgatgcaagggatccaatatgga

SEQ ID NO: 2428220 - DNA, 25 bp, Homo sapien
gaaatctgtccagtttgaagcagga

SEQ ID NO: 2428221 - DNA, 25 bp, Homo sapien
caatatggagggaagtgtagcagca

SEQ ID NO: 2428222 - DNA, 25 bp, Homo sapien
acctgcttgtgggaggatggcacac

SEQ ID NO: 2428223 - DNA, 25 bp, Homo sapien
cacctgcttgtgggaggatggcaca

SEQ ID NO: 2428224 - DNA, 25 bp, Homo sapien
ttttccatgtactcactctaggcag

SEQ ID NO: 2428225 - DNA, 25 bp, Homo sapien
ttcatctattctcgactcataaggg

SEQ ID NO: 2428226 - DNA, 25 bp, Homo sapien
gataatctgtgacagatgggaattc

SEQ ID NO: 2428227 - DNA, 25 bp, Homo sapien
gaattcatctattctcgactcataa

SEQ ID NO: 2428228 - DNA, 25 bp, Homo sapien
tctattctcgactcataagggctga

SEQ ID NO: 2428229 - DNA, 25 bp, Homo sapien
tcctgcagttggaattcaaggactg

SEQ ID NO: 2428230 - DNA, 25 bp, Homo sapien
gctgacgtaatatttctcaagggta

SEQ ID NO: 2428231 - DNA, 25 bp, Homo sapien
tcaagggtaaccatgtcatccactg

SEQ ID NO: 2428232 - DNA, 25 bp, Homo sapien
tcaaggactgtcatagccgcagttt

SEQ ID NO: 2428233 - DNA, 25 bp, Homo sapien
catcaacagccagagggttgctcaa

SEQ ID NO: 2428234 - DNA, 25 bp, Homo sapien
ctgaatctagaaacaacttaccggg

SEQ ID NO: 2428235 - DNA, 25 bp, Homo sapien
ctgctctccttaagcaattcaggag

SEQ ID NO: 2428236 - DNA, 25 bp, Homo sapien
tcttgggtaactgataacactgaat

SEQ ID NO: 2428237 - DNA, 25 bp, Homo sapien
gaaaggcagagagttaacctgctct

SEQ ID NO: 2428238 - DNA, 25 bp, Homo sapien
agcacattcagtaagactttaagga

SEQ ID NO: 2428239 - DNA, 25 bp, Homo sapien
aggaagttctgccaaactgtcagtt

SEQ ID NO: 2428240 - DNA, 25 bp, Homo sapien
ctttaaggagccaccgtgacagatc

SEQ ID NO: 2428241 - DNA, 25 bp, Homo sapien
tgccaaactgtcagttgctgcttgt

SEQ ID NO: 2428242 - DNA, 25 bp, Homo sapien
actgaaactcttctgggcttatcca

SEQ ID NO: 2428243 - DNA, 25 bp, Homo sapien
ttgtcaggaggatgcaaaacttgac

SEQ ID NO: 2428244 - DNA, 25 bp, Homo sapien
ggaggatgcaaaacttgactgaaac

SEQ ID NO: 2428245 - DNA, 25 bp, Homo sapien
aacttgactgaaactcttctgggct

SEQ ID NO: 2428246 - DNA, 25 bp, Homo sapien
gacagttgctgattcatctgagcag

SEQ ID NO: 2428247 - DNA, 25 bp, Homo sapien
tctagaaaattggtgagagcagtgc

SEQ ID NO: 2428248 - DNA, 25 bp, Homo sapien
tagaaaatgtgcttggcctagtagt

SEQ ID NO: 2428249 - DNA, 25 bp, Homo sapien
tttggccccattacagacagttgct

SEQ ID NO: 2428250 - DNA, 25 bp, Homo sapien
tgaaggcagttcttccttggtgacc

SEQ ID NO: 2428251 - DNA, 25 bp, Homo sapien
aaggcagttcttccttggtgaccat

SEQ ID NO: 2428252 - DNA, 25 bp, Homo sapien
gaaggcagttcttccttggtgacca

SEQ ID NO: 2428253 - DNA, 25 bp, Homo sapien
cctgaaggcagttcttccttggtga

SEQ ID NO: 2428254 - DNA, 25 bp, Homo sapien
gcttgcttggccgaggagtctgatt

SEQ ID NO: 2428255 - DNA, 25 bp, Homo sapien
gccgaggagtctgatttctacattc

SEQ ID NO: 2428256 - DNA, 25 bp, Homo sapien
cttggccgaggagtctgatttctac

SEQ ID NO: 2428257 - DNA, 25 bp, Homo sapien
aggagtctgatttctacattctctg

SEQ ID NO: 2428258 - DNA, 25 bp, Homo sapien
ttgctgtccaagcatcaatcaagga

SEQ ID NO: 2428259 - DNA, 25 bp, Homo sapien
agcatcaatcaaggaaattccaggg

SEQ ID NO: 2428260 - DNA, 25 bp, Homo sapien
tacagttactgactttttctcacaa

SEQ ID NO: 2428261 - DNA, 25 bp, Homo sapien
ggaaattccagggtatcttgataca

SEQ ID NO: 2428262 - DNA, 25 bp, Homo sapien
gtcatagacgtttccaacctgttca

SEQ ID NO: 2428263 - DNA, 25 bp, Homo sapien
tcatagacgtttccaacctgttcat

SEQ ID NO: 2428264 - DNA, 25 bp, Homo sapien
tagtcatagacgtttccaacctgtt

SEQ ID NO: 2428265 - DNA, 25 bp, Homo sapien
gtagtcatagacgtttccaacctgt

SEQ ID NO: 2428266 - DNA, 25 bp, Homo sapien
taatattcaatggtggcaaaagggt

SEQ ID NO: 2428267 - DNA, 25 bp, Homo sapien
tctggaatgtccataagcagctatt

SEQ ID NO: 2428268 - DNA, 25 bp, Homo sapien
cattggtatagcctttgcacaagca

SEQ ID NO: 2428269 - DNA, 25 bp, Homo sapien
tataagggatatctaattctcacgt

SEQ ID NO: 2428270 - DNA, 25 bp, Homo sapien
aatatgatacatatcggcaacacag

SEQ ID NO: 2428271 - DNA, 25 bp, Homo sapien
agttatgcatccgtgtacctggcac

SEQ ID NO: 2428272 - DNA, 25 bp, Homo sapien
gatgtctgttattcccacacaattt

SEQ ID NO: 2428273 - DNA, 25 bp, Homo sapien
cctcgtccacttcttaggataacta

SEQ ID NO: 2428274 - DNA, 25 bp, Homo sapien
cattgtgctgcccaatagagtagtc

SEQ ID NO: 2428275 - DNA, 25 bp, Homo sapien
gagtagtcactagtcacagagtagc

SEQ ID NO: 2428276 - DNA, 25 bp, Homo sapien
ccacaaatggccagtggctactgca

SEQ ID NO: 2428277 - DNA, 25 bp, Homo sapien
tgtggctcatgcaaatggagaactg

SEQ ID NO: 2428278 - DNA, 25 bp, Homo sapien
gaggctttcacagatccaatgggct

SEQ ID NO: 2428279 - DNA, 25 bp, Homo sapien
gatgtcacggtatatactgtacgcc

SEQ ID NO: 2428280 - DNA, 25 bp, Homo sapien
tctgcaccagtgaagctagaggctt

SEQ ID NO: 2428281 - DNA, 25 bp, Homo sapien
tctatccagggttcaggatgtcacg

SEQ ID NO: 2428282 - DNA, 25 bp, Homo sapien
acagttcctgaaggcactgtggatc

SEQ ID NO: 2428283 - DNA, 25 bp, Homo sapien
cacagttcctgaaggcactgtggat

SEQ ID NO: 2428284 - DNA, 25 bp, Homo sapien
cagttcctgaaggcactgtggatcc

SEQ ID NO: 2428285 - DNA, 25 bp, Homo sapien
tctactctggtaagaatttgtagta

SEQ ID NO: 2428286 - DNA, 25 bp, Homo sapien
ggtaagaatttgtagtaagtgaatc

SEQ ID NO: 2428287 - DNA, 25 bp, Homo sapien
tcaatctactctggtaagaatttgt

SEQ ID NO: 2428288 - DNA, 25 bp, Homo sapien
gaatttgtagtaagtgaatctgaat

SEQ ID NO: 2428289 - DNA, 25 bp, Homo sapien
ttgcactggcagagagtacactcag

SEQ ID NO: 2428290 - DNA, 25 bp, Homo sapien
cacattcatttcgtccaggcaagtc

SEQ ID NO: 2428291 - DNA, 25 bp, Homo sapien
aggacccggtgaagcgaaccacatt

SEQ ID NO: 2428292 - DNA, 25 bp, Homo sapien
ccatgtttgatccaagaggacccgg

SEQ ID NO: 2428293 - DNA, 25 bp, Homo sapien
cacaaaagccctatcagaatgatga

SEQ ID NO: 2428294 - DNA, 25 bp, Homo sapien
tgaaagcagccttcgggcacagaaa

SEQ ID NO: 2428295 - DNA, 25 bp, Homo sapien
tacaaagcccatgaatctttcaggg

SEQ ID NO: 2428296 - DNA, 25 bp, Homo sapien
caatttaacgtttttgcccatgtga

SEQ ID NO: 2428297 - DNA, 25 bp, Homo sapien
tgatggaggcactgactactaagcc

SEQ ID NO: 2428298 - DNA, 25 bp, Homo sapien
ggtgtcaccactgttatacaaagtt

SEQ ID NO: 2428299 - DNA, 25 bp, Homo sapien
cactgttgacaattctggacccagg

SEQ ID NO: 2428300 - DNA, 25 bp, Homo sapien
tctggacccaggtgtcaccactgtt

SEQ ID NO: 2428301 - DNA, 25 bp, Homo sapien
gtcacagaccatccgtcgacacata

SEQ ID NO: 2428302 - DNA, 25 bp, Homo sapien
tccgtcgacacataacgaatccatt

SEQ ID NO: 2428303 - DNA, 25 bp, Homo sapien
aaaagatcaactgtgggattctcac

SEQ ID NO: 2428304 - DNA, 25 bp, Homo sapien
tgtgggattctcacagtcacagacc

SEQ ID NO: 2428305 - DNA, 25 bp, Homo sapien
cctggatctaaggttgtgggactaa

SEQ ID NO: 2428306 - DNA, 25 bp, Homo sapien
aatttaatcaatagggactggatgc

SEQ ID NO: 2428307 - DNA, 25 bp, Homo sapien
gactaactaggaaagaacataggca

SEQ ID NO: 2428308 - DNA, 25 bp, Homo sapien
caaacatgatactgtgactaggaaa

SEQ ID NO: 2428309 - DNA, 25 bp, Homo sapien
gaccattgtgcttaacttttccatc

SEQ ID NO: 2428310 - DNA, 25 bp, Homo sapien
ctgaccattgtgcttaacttttcca

SEQ ID NO: 2428311 - DNA, 25 bp, Homo sapien
tgaccattgtgcttaacttttccat

SEQ ID NO: 2428312 - DNA, 25 bp, Homo sapien
atatccgccatccaaattgaagcaa

SEQ ID NO: 2428313 - DNA, 25 bp, Homo sapien
agtcccctgtgcaattctttccatg

SEQ ID NO: 2428314 - DNA, 25 bp, Homo sapien
aatggtatcattggcacagctgtgc

SEQ ID NO: 2428315 - DNA, 25 bp, Homo sapien
ctttccatgaggacatcgacaatca

SEQ ID NO: 2428316 - DNA, 25 bp, Homo sapien
ggccatcacagcctaaagcgttttc

SEQ ID NO: 2428317 - DNA, 25 bp, Homo sapien
cagcctaaagcgttttcatacagat

SEQ ID NO: 2428318 - DNA, 25 bp, Homo sapien
tcacagcctaaagcgttttcataca

SEQ ID NO: 2428319 - DNA, 25 bp, Homo sapien
gcctaaagcgttttcatacagatga

SEQ ID NO: 2428320 - DNA, 25 bp, Homo sapien
gcaggttaatgcaattagcacgact

SEQ ID NO: 2428321 - DNA, 25 bp, Homo sapien
cattgtcatggtagccatctctgca

SEQ ID NO: 2428322 - DNA, 25 bp, Homo sapien
caattagcacgactgtcacattgaa

SEQ ID NO: 2428323 - DNA, 25 bp, Homo sapien
tggtgaaaacatcccattgtcatgg

SEQ ID NO: 2428324 - DNA, 25 bp, Homo sapien
gctgccaaaaatatccacatgtctc

SEQ ID NO: 2428325 - DNA, 25 bp, Homo sapien
agctgccaaaaatatccacatgtct

SEQ ID NO: 2428326 - DNA, 25 bp, Homo sapien
gccaaaaatatccacatgtctccca

SEQ ID NO: 2428327 - DNA, 25 bp, Homo sapien
cattgtagctgccaaaaatatccac

SEQ ID NO: 2428328 - DNA, 25 bp, Homo sapien
ccgtatgccatagccgaaggttcca

SEQ ID NO: 2428329 - DNA, 25 bp, Homo sapien
gcaggatggttctttctgatatgcc

SEQ ID NO: 2428330 - DNA, 25 bp, Homo sapien
cccatcttgatagccgtatgccata

SEQ ID NO: 2428331 - DNA, 25 bp, Homo sapien
aaggttccaacctgccaaggcagga

SEQ ID NO: 2428332 - DNA, 25 bp, Homo sapien
gatgaataacatccttgtaacctgt

SEQ ID NO: 2428333 - DNA, 25 bp, Homo sapien
gagtttccattgcagctactaggca

SEQ ID NO: 2428334 - DNA, 25 bp, Homo sapien
taccagctcttaccatgttacatag

SEQ ID NO: 2428335 - DNA, 25 bp, Homo sapien
caattacaggtctcttgcaatgaag

SEQ ID NO: 2428336 - DNA, 25 bp, Homo sapien
tccagctctctttttgaggtcatgc

SEQ ID NO: 2428337 - DNA, 25 bp, Homo sapien
tctccagctctctttttgaggtcat

SEQ ID NO: 2428338 - DNA, 25 bp, Homo sapien
cagctctctttttgaggtcatgctc

SEQ ID NO: 2428339 - DNA, 25 bp, Homo sapien
catctccagctctctttttgaggtc

SEQ ID NO: 2428340 - DNA, 25 bp, Homo sapien
aagtaagctcttgagcttcttttgc

SEQ ID NO: 2428341 - DNA, 25 bp, Homo sapien
aaagtaagctcttgagcttcttttg

SEQ ID NO: 2428342 - DNA, 25 bp, Homo sapien
gagttacagattacttgccaaattc

SEQ ID NO: 2428343 - DNA, 25 bp, Homo sapien
aagggaccactgctcccactatcta

SEQ ID NO: 2428344 - DNA, 25 bp, Homo sapien
ccagccccttttgagttacagatta

SEQ ID NO: 2428345 - DNA, 25 bp, Homo sapien
gctcccactatctatgataacatta

SEQ ID NO: 2428346 - DNA, 25 bp, Homo sapien
gagcctctggcaatagttcagatga

SEQ ID NO: 2428347 - DNA, 25 bp, Homo sapien
tgtagagattacagcagcctttgcc

SEQ ID NO: 2428348 - DNA, 25 bp, Homo sapien
cggaaaacctcagaagtcgccatat

SEQ ID NO: 2428349 - DNA, 25 bp, Homo sapien
caatgaattcgaagtcagggaccat

SEQ ID NO: 2428350 - DNA, 25 bp, Homo sapien
catattccttccctttatagatgag

SEQ ID NO: 2428351 - DNA, 25 bp, Homo sapien
tcccacgaagcaatgtatgaagttc

SEQ ID NO: 2428352 - DNA, 25 bp, Homo sapien
tactggattggttcccacgaagcaa

SEQ ID NO: 2428353 - DNA, 25 bp, Homo sapien
cataaaatactggattggttcccac

SEQ ID NO: 2428354 - DNA, 25 bp, Homo sapien
ccatgagtttaagatagtgttattg

SEQ ID NO: 2428355 - DNA, 25 bp, Homo sapien
tcctactaagatacacatgatgcag

SEQ ID NO: 2428356 - DNA, 25 bp, Homo sapien
gaagttatgctgtacatgcgggtga

SEQ ID NO: 2428357 - DNA, 25 bp, Homo sapien
taaacacctgatggaatcttaggat

SEQ ID NO: 2428358 - DNA, 25 bp, Homo sapien
taaaccttggcacatagcttcagct

SEQ ID NO: 2428359 - DNA, 25 bp, Homo sapien
tggaacaactactaagaggcaggcc

SEQ ID NO: 2428360 - DNA, 25 bp, Homo sapien
tattctgtggatactggactagcca

SEQ ID NO: 2428361 - DNA, 25 bp, Homo sapien
gaattcctgggacgaagcatggcat

SEQ ID NO: 2428362 - DNA, 25 bp, Homo sapien
gctccctgatgactggcttagaaga

SEQ ID NO: 2428363 - DNA, 25 bp, Homo sapien
attccacaccattatcttcacacca

SEQ ID NO: 2428364 - DNA, 25 bp, Homo sapien
tgtcctgaaaaagccagtatttctg

SEQ ID NO: 2428365 - DNA, 25 bp, Homo sapien
aattccacaccattatcttcacacc

SEQ ID NO: 2428366 - DNA, 25 bp, Homo sapien
tcctgaaaaagccagtatttctgta

SEQ ID NO: 2428367 - DNA, 25 bp, Homo sapien
ggtccacagtgcaccttgatgtgta

SEQ ID NO: 2428368 - DNA, 25 bp, Homo sapien
caggaagccttgtgatcagaggtgt

SEQ ID NO: 2428369 - DNA, 25 bp, Homo sapien
tgttgatgtgcaggaggtccacagt

SEQ ID NO: 2428370 - DNA, 25 bp, Homo sapien
ttcaggaagccttgtgatcagaggt

SEQ ID NO: 2428371 - DNA, 25 bp, Homo sapien
taatagctccatgctttgagagccc

SEQ ID NO: 2428372 - DNA, 25 bp, Homo sapien
cactgagttggccataagcttgaaa

SEQ ID NO: 2428373 - DNA, 25 bp, Homo sapien
gcaggtgatagtgtgttctcggcac

SEQ ID NO: 2428374 - DNA, 25 bp, Homo sapien
gacaactgtcaattgccagtggcag

SEQ ID NO: 2428375 - DNA, 25 bp, Homo sapien
ggcacacacattagcggcaatacag

SEQ ID NO: 2428376 - DNA, 25 bp, Homo sapien
gggcaggcacacacattagcggcaa

SEQ ID NO: 2428377 - DNA, 25 bp, Homo sapien
tgggtccagtgaagccttgtgggca

SEQ ID NO: 2428378 - DNA, 25 bp, Homo sapien
tagcggcaatacaggctcctccatt

SEQ ID NO: 2428379 - DNA, 25 bp, Homo sapien
tttgcatgtcgttccattccctgta

SEQ ID NO: 2428380 - DNA, 25 bp, Homo sapien
cacagttgtgctgatttgtgataca

SEQ ID NO: 2428381 - DNA, 25 bp, Homo sapien
tatagcccggcttgcaaacacagtt

SEQ ID NO: 2428382 - DNA, 25 bp, Homo sapien
gctgatttgtgatacactcatcatg

SEQ ID NO: 2428383 - DNA, 25 bp, Homo sapien
gaatgaggtttgcacctgctgccaa

SEQ ID NO: 2428384 - DNA, 25 bp, Homo sapien
ttgggttctgctgcctgaagcaaaa

SEQ ID NO: 2428385 - DNA, 25 bp, Homo sapien
tcatccccagtgcaattcgaagtgc

SEQ ID NO: 2428386 - DNA, 25 bp, Homo sapien
cgaagtgccgcagttaatctataaa

SEQ ID NO: 2428387 - DNA, 25 bp, Homo sapien
atcaaatcactagttcgcctctcca

SEQ ID NO: 2428388 - DNA, 25 bp, Homo sapien
cttccttgaggactccaccatcaaa

SEQ ID NO: 2428389 - DNA, 25 bp, Homo sapien
tcaaatcactagttcgcctctccat

SEQ ID NO: 2428390 - DNA, 25 bp, Homo sapien
ttgaggactccaccatcaaatcact

SEQ ID NO: 2428391 - DNA, 25 bp, Homo sapien
ttctctgtcttctaacttggtctct

SEQ ID NO: 2428392 - DNA, 25 bp, Homo sapien
ctgtcttctaacttggtctctgcat

SEQ ID NO: 2428393 - DNA, 25 bp, Homo sapien
gtcttctaacttggtctctgcattc

SEQ ID NO: 2428394 - DNA, 25 bp, Homo sapien
tctgtcttctaacttggtctctgca

SEQ ID NO: 2428395 - DNA, 25 bp, Homo sapien
ctgcatttcttgtcaatccaaccca

SEQ ID NO: 2428396 - DNA, 25 bp, Homo sapien
aatacagtctccctagtgaatgctt

SEQ ID NO: 2428397 - DNA, 25 bp, Homo sapien
gcatttcttgtcaatccaacccaaa

SEQ ID NO: 2428398 - DNA, 25 bp, Homo sapien
gtctccctagtgaatgctttatgaa

SEQ ID NO: 2428399 - DNA, 25 bp, Homo sapien
tgcctgcagatataacttgttcccc

SEQ ID NO: 2428400 - DNA, 25 bp, Homo sapien
ttgcctgcagatataacttgttccc

SEQ ID NO: 2428401 - DNA, 25 bp, Homo sapien
gcgttatcataacgacgaccatgac

SEQ ID NO: 2428402 - DNA, 25 bp, Homo sapien
taacgacgaccatgacacttcactc

SEQ ID NO: 2428403 - DNA, 25 bp, Homo sapien
tctttccagcgttatcataacgacg

SEQ ID NO: 2428404 - DNA, 25 bp, Homo sapien
cacccgcagcgcactcataaatcat

SEQ ID NO: 2428405 - DNA, 25 bp, Homo sapien
atgctatctccatcaagctaccatt

SEQ ID NO: 2428406 - DNA, 25 bp, Homo sapien
cactgcttaaggaaataagaggaca

SEQ ID NO: 2428407 - DNA, 25 bp, Homo sapien
aaaagagcccacataaccaagacaa

SEQ ID NO: 2428408 - DNA, 25 bp, Homo sapien
caaggaaaactataaaccactgctt

SEQ ID NO: 2428409 - DNA, 25 bp, Homo sapien
ttatttcacaaatagccaccgttta

SEQ ID NO: 2428410 - DNA, 25 bp, Homo sapien
tatttcacaaatagccaccgtttac

SEQ ID NO: 2428411 - DNA, 25 bp, Homo sapien
attttatttcacaaatagccaccgt

SEQ ID NO: 2428412 - DNA, 25 bp, Homo sapien
aatattttatttcacaaatagccac

SEQ ID NO: 2428413 - DNA, 25 bp, Homo sapien
tgtattttcacgacagtaatggcgc

SEQ ID NO: 2428414 - DNA, 25 bp, Homo sapien
gcagatgcacataaaagaacccggg

SEQ ID NO: 2428415 - DNA, 25 bp, Homo sapien
gaacccggggtgttgacacacattg

SEQ ID NO: 2428416 - DNA, 25 bp, Homo sapien
gtaatggcgcccttcagcacactca

SEQ ID NO: 2428417 - DNA, 25 bp, Homo sapien
tcgcagttattgttgttgtccccta

SEQ ID NO: 2428418 - DNA, 25 bp, Homo sapien
caaatcgcagttattgttgttgtcc

SEQ ID NO: 2428419 - DNA, 25 bp, Homo sapien
gcagttattgttgttgtcccctaaa

SEQ ID NO: 2428420 - DNA, 25 bp, Homo sapien
tcccccaaatcgcagttattgttgt

SEQ ID NO: 2428421 - DNA, 25 bp, Homo sapien
ctccagctttattccgttgctgttg

SEQ ID NO: 2428422 - DNA, 25 bp, Homo sapien
ccctccagctttattccgttgctgt

SEQ ID NO: 2428423 - DNA, 25 bp, Homo sapien
tttggtttgaatgtcctcccgtagc

SEQ ID NO: 2428424 - DNA, 25 bp, Homo sapien
tgcctttggtttgaatgtcctcccg

SEQ ID NO: 2428425 - DNA, 25 bp, Homo sapien
tctttggatcacatgttggacctca

SEQ ID NO: 2428426 - DNA, 25 bp, Homo sapien
ttaacaagctcctagatggtggccc

SEQ ID NO: 2428427 - DNA, 25 bp, Homo sapien
gcatttttcataagatcctcaggtg

SEQ ID NO: 2428428 - DNA, 25 bp, Homo sapien
tcctcaggtggttttgatgcagcct

SEQ ID NO: 2428429 - DNA, 25 bp, Homo sapien
caagttagttgtgagatggtaagca

SEQ ID NO: 2428430 - DNA, 25 bp, Homo sapien
ttatgtcaggaattcatcactaaac

SEQ ID NO: 2428431 - DNA, 25 bp, Homo sapien
ctaaacaagttagttgtgagatggt

SEQ ID NO: 2428432 - DNA, 25 bp, Homo sapien
atcactaaacaagttagttgtgaga

SEQ ID NO: 2428433 - DNA, 25 bp, Homo sapien
aatcacagtttggaaatcacaaaaa

SEQ ID NO: 2428434 - DNA, 25 bp, Homo sapien
gctgtcatccccagcaactattatg

SEQ ID NO: 2428435 - DNA, 25 bp, Homo sapien
taatgcgctattggactgacacagc

SEQ ID NO: 2428436 - DNA, 25 bp, Homo sapien
tgtcaaaggcttagataggaaaatc

SEQ ID NO: 2428437 - DNA, 25 bp, Homo sapien
attatcctctcgaagagccctaaaa

SEQ ID NO: 2428438 - DNA, 25 bp, Homo sapien
tcctctcgaagagccctaaaaccat

SEQ ID NO: 2428439 - DNA, 25 bp, Homo sapien
cttcacagtaggcattatcctctcg

SEQ ID NO: 2428440 - DNA, 25 bp, Homo sapien
ttcacagtaggcattatcctctcga

SEQ ID NO: 2428441 - DNA, 25 bp, Homo sapien
agatggaattctccatgcagttatg

SEQ ID NO: 2428442 - DNA, 25 bp, Homo sapien
gacagctacaaacagccctgtcatt

SEQ ID NO: 2428443 - DNA, 25 bp, Homo sapien
tcgacagctacaaacagccctgtca

SEQ ID NO: 2428444 - DNA, 25 bp, Homo sapien
ttctccatgcagttatgcctttcag

SEQ ID NO: 2428445 - DNA, 25 bp, Homo sapien
tacaaactttgcaacagctgtgaga

SEQ ID NO: 2428446 - DNA, 25 bp, Homo sapien
agcctgaactctcaacaagtttcat

SEQ ID NO: 2428447 - DNA, 25 bp, Homo sapien
tgagactctggacaatccaaagctg

SEQ ID NO: 2428448 - DNA, 25 bp, Homo sapien
caaagctggacagcctgaactctca

SEQ ID NO: 2428449 - DNA, 25 bp, Homo sapien
ccagaagaggaatagactgtatttc

SEQ ID NO: 2428450 - DNA, 25 bp, Homo sapien
catagagaacacatactccagaaga

SEQ ID NO: 2428451 - DNA, 25 bp, Homo sapien
agtaggttcgtccttgaaattggca

SEQ ID NO: 2428452 - DNA, 25 bp, Homo sapien
ctccttcaaagtaggttcgtccttg

SEQ ID NO: 2428453 - DNA, 25 bp, Homo sapien
tttcaactcgagcacatttgaaaca

SEQ ID NO: 2428454 - DNA, 25 bp, Homo sapien
ttcaactcgagcacatttgaaacat

SEQ ID NO: 2428455 - DNA, 25 bp, Homo sapien
atctgcaactatctgatcttcaaca

SEQ ID NO: 2428456 - DNA, 25 bp, Homo sapien
aaacaagcaataaggaagactccct

SEQ ID NO: 2428457 - DNA, 25 bp, Homo sapien
ttctggacataggaatgggtgaaga

SEQ ID NO: 2428458 - DNA, 25 bp, Homo sapien
cataggaatgggtgaagatttcatg

SEQ ID NO: 2428459 - DNA, 25 bp, Homo sapien
aatactgtggcagtatttttataat

SEQ ID NO: 2428460 - DNA, 25 bp, Homo sapien
aaatactgtggcagtatttttataa

SEQ ID NO: 2428461 - DNA, 25 bp, Homo sapien
tgagaccgggataaaggatgtggag

SEQ ID NO: 2428462 - DNA, 25 bp, Homo sapien
ttgagagcctgagaccgggataaag

SEQ ID NO: 2428463 - DNA, 25 bp, Homo sapien
ctagttgagagcctgagaccgggat

SEQ ID NO: 2428464 - DNA, 25 bp, Homo sapien
gagaccgggataaaggatgtggagg

SEQ ID NO: 2428465 - DNA, 25 bp, Homo sapien
ctgaaagcattaaaggaagagcacc

SEQ ID NO: 2428466 - DNA, 25 bp, Homo sapien
tgactggccacatgcacgtgtttcg

SEQ ID NO: 2428467 - DNA, 25 bp, Homo sapien
gaagagcaccaaaaagtgactggcc

SEQ ID NO: 2428468 - DNA, 25 bp, Homo sapien
tcttggcagagtcacattcagcagt

SEQ ID NO: 2428469 - DNA, 25 bp, Homo sapien
tttagcttgcccagattaaaccaat

SEQ ID NO: 2428470 - DNA, 25 bp, Homo sapien
tacacatgtttcctactactatcac

SEQ ID NO: 2428471 - DNA, 25 bp, Homo sapien
cactatatggaatagattactccaa

SEQ ID NO: 2428472 - DNA, 25 bp, Homo sapien
agaaaaaattgtcctactggaatag

SEQ ID NO: 2428473 - DNA, 25 bp, Homo sapien
gtattcatcataaaagttatgctca

SEQ ID NO: 2428474 - DNA, 25 bp, Homo sapien
aaagtattcatcataaaagttatgc

SEQ ID NO: 2428475 - DNA, 25 bp, Homo sapien
gaaagtattcatcataaaagttatg

SEQ ID NO: 2428476 - DNA, 25 bp, Homo sapien
agtattcatcataaaagttatgctc

SEQ ID NO: 2428477 - DNA, 25 bp, Homo sapien
gatttgggcagattagagtttcaca

SEQ ID NO: 2428478 - DNA, 25 bp, Homo sapien
acttaagtgggcagtcaggatttgg

SEQ ID NO: 2428479 - DNA, 25 bp, Homo sapien
tagagtttcacactggatggttcca

SEQ ID NO: 2428480 - DNA, 25 bp, Homo sapien
agcatttgccatccacatacgcaag

SEQ ID NO: 2428481 - DNA, 25 bp, Homo sapien
tcccttcatggtgcaagtcctttca

SEQ ID NO: 2428482 - DNA, 25 bp, Homo sapien
tcattcgctgttcagctcgagacag

SEQ ID NO: 2428483 - DNA, 25 bp, Homo sapien
tacagccgtctatccaggactcaaa

SEQ ID NO: 2428484 - DNA, 25 bp, Homo sapien
ggcatgtgcagttcttacagccgtc

SEQ ID NO: 2428485 - DNA, 25 bp, Homo sapien
tagctccatgattttctgcacaagt

SEQ ID NO: 2428486 - DNA, 25 bp, Homo sapien
ctccatgattttctgcacaagtcca

SEQ ID NO: 2428487 - DNA, 25 bp, Homo sapien
tggaagtcattgcaagttggacagg

SEQ ID NO: 2428488 - DNA, 25 bp, Homo sapien
cacaagtccatggaagtcattgcaa

SEQ ID NO: 2428489 - DNA, 25 bp, Homo sapien
gtaattggacatcttgcattatacc

SEQ ID NO: 2428490 - DNA, 25 bp, Homo sapien
tgcgattaagatctgggcactgagc

SEQ ID NO: 2428491 - DNA, 25 bp, Homo sapien
ccctggggcatgacaagtaattgga

SEQ ID NO: 2428492 - DNA, 25 bp, Homo sapien
tgggcactgagcaataaatccctgg

SEQ ID NO: 2428493 - DNA, 25 bp, Homo sapien
tctgtggagggcttttctactaccc

SEQ ID NO: 2428494 - DNA, 25 bp, Homo sapien
tgttgtgcctagaggcaagtctgtg

SEQ ID NO: 2428495 - DNA, 25 bp, Homo sapien
tatccatgcgcattatttctctgtc

SEQ ID NO: 2428496 - DNA, 25 bp, Homo sapien
ttctctgtcctagccaaaatgttgt

SEQ ID NO: 2428497 - DNA, 25 bp, Homo sapien
gtcaatgtgtaaaatcaaatgggaa

SEQ ID NO: 2428498 - DNA, 25 bp, Homo sapien
tgcagtcaatgtgtaaaatcaaatg

SEQ ID NO: 2428499 - DNA, 25 bp, Homo sapien
caatgtgtaaaatcaaatgggaagc

SEQ ID NO: 2428500 - DNA, 25 bp, Homo sapien
cagtcaatgtgtaaaatcaaatggg

SEQ ID NO: 2428501 - DNA, 25 bp, Homo sapien
gatggccactactttccagttccag

SEQ ID NO: 2428502 - DNA, 25 bp, Homo sapien
gagagcttgtgccacttgtcatcag

SEQ ID NO: 2428503 - DNA, 25 bp, Homo sapien
acacttctgtgtgagggcggtgact

SEQ ID NO: 2428504 - DNA, 25 bp, Homo sapien
cagtctgacttcattccgatggcca

SEQ ID NO: 2428505 - DNA, 25 bp, Homo sapien
agcaccccggtcagttatgctaagg

SEQ ID NO: 2428506 - DNA, 25 bp, Homo sapien
cagcaacagcaccccggtcagttat

SEQ ID NO: 2428507 - DNA, 25 bp, Homo sapien
ccccggtcagttatgctaaggtcac

SEQ ID NO: 2428508 - DNA, 25 bp, Homo sapien
cggtcagttatgctaaggtcactgt

SEQ ID NO: 2428509 - DNA, 25 bp, Homo sapien
ctttcgaaacacaatagtcagaaaa

SEQ ID NO: 2428510 - DNA, 25 bp, Homo sapien
tcagaagaagcgtcacaatgccact

SEQ ID NO: 2428511 - DNA, 25 bp, Homo sapien
gagtctaaattcacagagggatagc

SEQ ID NO: 2428512 - DNA, 25 bp, Homo sapien
ggatagctcaagctcttgctcttgc

SEQ ID NO: 2428513 - DNA, 25 bp, Homo sapien
aagaagcgtcacaatgccactgcca

SEQ ID NO: 2428514 - DNA, 25 bp, Homo sapien
aggccttcatatagaaggctccact

SEQ ID NO: 2428515 - DNA, 25 bp, Homo sapien
cttggttgtatatgactgtcttgca

SEQ ID NO: 2428516 - DNA, 25 bp, Homo sapien
cattgagcaggaaaacttggttgta

SEQ ID NO: 2428517 - DNA, 25 bp, Homo sapien
tggcacattgagcaggaaaacttgg

SEQ ID NO: 2428518 - DNA, 25 bp, Homo sapien
atttaaccacatataatgaaaacac

SEQ ID NO: 2428519 - DNA, 25 bp, Homo sapien
catttaaccacatataatgaaaaca

SEQ ID NO: 2428520 - DNA, 25 bp, Homo sapien
attcatttaaccacatataatgaaa

SEQ ID NO: 2428521 - DNA, 25 bp, Homo sapien
acaggaaactccagcaaccacattt

SEQ ID NO: 2428522 - DNA, 25 bp, Homo sapien
tagggtcaccaaaatagtaaattca

SEQ ID NO: 2428523 - DNA, 25 bp, Homo sapien
tgagagaataactcctgaatttaag

SEQ ID NO: 2428524 - DNA, 25 bp, Homo sapien
ctgtgatccaagtggtgaattgaga

SEQ ID NO: 2428525 - DNA, 25 bp, Homo sapien
gaaaaaactgttcagctgtagcagt

SEQ ID NO: 2428526 - DNA, 25 bp, Homo sapien
ccacaggccccaaatctgccatctc

SEQ ID NO: 2428527 - DNA, 25 bp, Homo sapien
cttcatgtcagtccctgtccttgtt

SEQ ID NO: 2428528 - DNA, 25 bp, Homo sapien
tcagacaccagccttcatgtcagtc

SEQ ID NO: 2428529 - DNA, 25 bp, Homo sapien
aatctgccatctcccggtttctgag

SEQ ID NO: 2428530 - DNA, 25 bp, Homo sapien
tagcgctaatttaaccattcccagg

SEQ ID NO: 2428531 - DNA, 25 bp, Homo sapien
ggagctctataatctctagcgctaa

SEQ ID NO: 2428532 - DNA, 25 bp, Homo sapien
tctctagcgctaatttaaccattcc

SEQ ID NO: 2428533 - DNA, 25 bp, Homo sapien
cttactgggagctctataatctcta

SEQ ID NO: 2428534 - DNA, 25 bp, Homo sapien
tagcaataaatactgcgcagggcag

SEQ ID NO: 2428535 - DNA, 25 bp, Homo sapien
agtgtgagcgctcgggcctcacccc

SEQ ID NO: 2428536 - DNA, 25 bp, Homo sapien
caggcagggactgatcaactctgct

SEQ ID NO: 2428537 - DNA, 25 bp, Homo sapien
ccactgccctgcaagaggtcaggcc

SEQ ID NO: 2428538 - DNA, 25 bp, Homo sapien
aggcttcagggactagcagattgag

SEQ ID NO: 2428539 - DNA, 25 bp, Homo sapien
ttggttaaaggcttcagggactagc

SEQ ID NO: 2428540 - DNA, 25 bp, Homo sapien
ttaaaggcttcagggactagcagat

SEQ ID NO: 2428541 - DNA, 25 bp, Homo sapien
ccaggagagcaacagggctggacac

SEQ ID NO: 2428542 - DNA, 25 bp, Homo sapien
tggggtcaccaagaacagggaggtc

SEQ ID NO: 2428543 - DNA, 25 bp, Homo sapien
ctggaggggccaaagcccaattggg

SEQ ID NO: 2428544 - DNA, 25 bp, Homo sapien
ggccaaagcccaattggggtcacca

SEQ ID NO: 2428545 - DNA, 25 bp, Homo sapien
gtcaccaagaacagggaggtctcac

SEQ ID NO: 2428546 - DNA, 25 bp, Homo sapien
agtttatcggggacacactctagct

SEQ ID NO: 2428547 - DNA, 25 bp, Homo sapien
agctcagactcaagggacacccatg

SEQ ID NO: 2428548 - DNA, 25 bp, Homo sapien
acacccatggtatcaaagctgctgc

SEQ ID NO: 2428549 - DNA, 25 bp, Homo sapien
gacacccatggtatcaaagctgctg

SEQ ID NO: 2428550 - DNA, 25 bp, Homo sapien
ttagtgaagtgttcgcttgagggct

SEQ ID NO: 2428551 - DNA, 25 bp, Homo sapien
gtgttcgcttgagggctatcattcc

SEQ ID NO: 2428552 - DNA, 25 bp, Homo sapien
tccttcaagtttgccgtcaaggcga

SEQ ID NO: 2428553 - DNA, 25 bp, Homo sapien
ccgtcaaggcgatgatcataaagtt

SEQ ID NO: 2428554 - DNA, 25 bp, Homo sapien
ccttttgtcaatttcataatccgaa

SEQ ID NO: 2428555 - DNA, 25 bp, Homo sapien
tggccaaagggccaccttttgtcaa

SEQ ID NO: 2428556 - DNA, 25 bp, Homo sapien
caaagaccttgccaaggtaatgcga

SEQ ID NO: 2428557 - DNA, 25 bp, Homo sapien
gcgaaattccatgcatggccaaagg

SEQ ID NO: 2428558 - DNA, 25 bp, Homo sapien
ctgctcagtaattaagggactatcc

SEQ ID NO: 2428559 - DNA, 25 bp, Homo sapien
taaaatcaaccatctgccataggag

SEQ ID NO: 2428560 - DNA, 25 bp, Homo sapien
tcacccaaacgaggcgtttgtgtta

SEQ ID NO: 2428561 - DNA, 25 bp, Homo sapien
gtgttataattcattgttccccaga

SEQ ID NO: 2428562 - DNA, 25 bp, Homo sapien
gctaaagtactgtcatccatgaggc

SEQ ID NO: 2428563 - DNA, 25 bp, Homo sapien
gcccttctacacctcagctaaagta

SEQ ID NO: 2428564 - DNA, 25 bp, Homo sapien
ggacaagcggcaagagcaactcctg

SEQ ID NO: 2428565 - DNA, 25 bp, Homo sapien
ttatcggaactgaaatcacagtggg

SEQ ID NO: 2428566 - DNA, 25 bp, Homo sapien
gaaaggctttcgtcccattatgcag

SEQ ID NO: 2428567 - DNA, 25 bp, Homo sapien
tctgttaagacgtcaatctgtaggg

SEQ ID NO: 2428568 - DNA, 25 bp, Homo sapien
ggacctgacgcactccggtcgtgga

SEQ ID NO: 2428569 - DNA, 25 bp, Homo sapien
tcgtggactccccaagttctaactc

SEQ ID NO: 2428570 - DNA, 25 bp, Homo sapien
cgcgttttcgcgacaatattgggaa

SEQ ID NO: 2428571 - DNA, 25 bp, Homo sapien
tttcgcgacaatattgggaactgaa

SEQ ID NO: 2428572 - DNA, 25 bp, Homo sapien
tgggaactgaagatgagaggcgact

SEQ ID NO: 2428573 - DNA, 25 bp, Homo sapien
gcaaagaaccgcgttttcgcgacaa

SEQ ID NO: 2428574 - DNA, 25 bp, Homo sapien
ctgagatcagcagccaagctttaaa

SEQ ID NO: 2428575 - DNA, 25 bp, Homo sapien
tttaaatagcggagcacccagtccc

SEQ ID NO: 2428576 - DNA, 25 bp, Homo sapien
aatagcggagcacccagtcccgttt

SEQ ID NO: 2428577 - DNA, 25 bp, Homo sapien
agccaagctttaaatagcggagcac

SEQ ID NO: 2428578 - DNA, 25 bp, Homo sapien
agcgaggcttccccagccagcccat

SEQ ID NO: 2428579 - DNA, 25 bp, Homo sapien
aaaagcgaggcttccccagccagcc

SEQ ID NO: 2428580 - DNA, 25 bp, Homo sapien
ggaaaagcgaggcttccccagccag

SEQ ID NO: 2428581 - DNA, 25 bp, Homo sapien
gggaaaagcgaggcttccccagcca

SEQ ID NO: 2428582 - DNA, 25 bp, Homo sapien
cgagaccgaagatcaaacagaatgt

SEQ ID NO: 2428583 - DNA, 25 bp, Homo sapien
ttctcagtaagacccgagactccat

SEQ ID NO: 2428584 - DNA, 25 bp, Homo sapien
aatgttctcagtaagacccgagact

SEQ ID NO: 2428585 - DNA, 25 bp, Homo sapien
tgctccgagaccgaagatcaaacag

SEQ ID NO: 2428586 - DNA, 25 bp, Homo sapien
ggtgcggatcagctcagtccatcgt

SEQ ID NO: 2428587 - DNA, 25 bp, Homo sapien
gatcagctcagtccatcgtctccct

SEQ ID NO: 2428588 - DNA, 25 bp, Homo sapien
gcggatcagctcagtccatcgtctc

SEQ ID NO: 2428589 - DNA, 25 bp, Homo sapien
tgcggatcagctcagtccatcgtct

SEQ ID NO: 2428590 - DNA, 25 bp, Homo sapien
gctgctgcctcggatttactgatca

SEQ ID NO: 2428591 - DNA, 25 bp, Homo sapien
aagactcgcacacccggtagaaggg

SEQ ID NO: 2428592 - DNA, 25 bp, Homo sapien
gctcccgagccgaataaaagcagcc

SEQ ID NO: 2428593 - DNA, 25 bp, Homo sapien
tgaagaacttagaccctccaatgcg

SEQ ID NO: 2428594 - DNA, 25 bp, Homo sapien
gggagacgcgcggagagactgctcc

SEQ ID NO: 2428595 - DNA, 25 bp, Homo sapien
caatggagaaagctccgggagacgc

SEQ ID NO: 2428596 - DNA, 25 bp, Homo sapien
cgggagacgcgcggagagactgctc

SEQ ID NO: 2428597 - DNA, 25 bp, Homo sapien
agacaatggagaaagctccgggaga

SEQ ID NO: 2428598 - DNA, 25 bp, Homo sapien
tcgcctgccctttaagcaaaggagg

SEQ ID NO: 2428599 - DNA, 25 bp, Homo sapien
gagggaagcccatgtgcactcgtgc

SEQ ID NO: 2428600 - DNA, 25 bp, Homo sapien
aatccaaggtgctaagttgatgggc

SEQ ID NO: 2428601 - DNA, 25 bp, Homo sapien
caaataaagcgtggagacccggact

SEQ ID NO: 2428602 - DNA, 25 bp, Homo sapien
actgaagcagtaggagtggaaaatg

SEQ ID NO: 2428603 - DNA, 25 bp, Homo sapien
gtaggagtggaaaatgaacaaataa

SEQ ID NO: 2428604 - DNA, 25 bp, Homo sapien
tggctagtcaactgaagcagtagga

SEQ ID NO: 2428605 - DNA, 25 bp, Homo sapien
cagtaggagtggaaaatgaacaaat

SEQ ID NO: 2428606 - DNA, 25 bp, Homo sapien
tccatcattattaaccacaaatctc

SEQ ID NO: 2428607 - DNA, 25 bp, Homo sapien
gcatccatcattattaaccacaaat

SEQ ID NO: 2428608 - DNA, 25 bp, Homo sapien
ccttgcactcctcattgcatccatc

SEQ ID NO: 2428609 - DNA, 25 bp, Homo sapien
tcattattaaccacaaatctcacct

SEQ ID NO: 2428610 - DNA, 25 bp, Homo sapien
aaagctctcgttttgcagtttttca

SEQ ID NO: 2428611 - DNA, 25 bp, Homo sapien
ttttcagtcctggatctatttttat

SEQ ID NO: 2428612 - DNA, 25 bp, Homo sapien
gcagtttttcagtcctggatctatt

SEQ ID NO: 2428613 - DNA, 25 bp, Homo sapien
tcagtcctggatctatttttataaa

SEQ ID NO: 2428614 - DNA, 25 bp, Homo sapien
cagcattggaacagattcctgtttc

SEQ ID NO: 2428615 - DNA, 25 bp, Homo sapien
tggaaaagtccttcgacaggcactc

SEQ ID NO: 2428616 - DNA, 25 bp, Homo sapien
aggcactcccctggagaccgcaagt

SEQ ID NO: 2428617 - DNA, 25 bp, Homo sapien
cgcaagttggtttggcacagccagt

SEQ ID NO: 2428618 - DNA, 25 bp, Homo sapien
tcgggagcaccgttgcggcaggctg

SEQ ID NO: 2428619 - DNA, 25 bp, Homo sapien
tccgcggggctttgagaatgttcct

SEQ ID NO: 2428620 - DNA, 25 bp, Homo sapien
tgttcctgggaacgttgatctccga

SEQ ID NO: 2428621 - DNA, 25 bp, Homo sapien
tctccgagtgaaggttggagcttcc

SEQ ID NO: 2428622 - DNA, 25 bp, Homo sapien
ctggaggccgtgaaaggaaagggct

SEQ ID NO: 2428623 - DNA, 25 bp, Homo sapien
tttggttcctcaaggtgttgagagc

SEQ ID NO: 2428624 - DNA, 25 bp, Homo sapien
ctttggttcctcaaggtgttgagag

SEQ ID NO: 2428625 - DNA, 25 bp, Homo sapien
gatcatggcaaaagttccagacaca

SEQ ID NO: 2428626 - DNA, 25 bp, Homo sapien
ggtgttctgtaacccagtttcttgc

SEQ ID NO: 2428627 - DNA, 25 bp, Homo sapien
tcttgccaccgtaagttgtgtcgaa

SEQ ID NO: 2428628 - DNA, 25 bp, Homo sapien
ctgagagagactaatgatcatggca

SEQ ID NO: 2428629 - DNA, 25 bp, Homo sapien
gttcaacaatctacatgcttaaagt

SEQ ID NO: 2428630 - DNA, 25 bp, Homo sapien
tttgactagtgggttaggtaggcat

SEQ ID NO: 2428631 - DNA, 25 bp, Homo sapien
gatgtggtctagtcctatttcagaa

SEQ ID NO: 2428632 - DNA, 25 bp, Homo sapien
gagtaactatccaactcttcaagct

SEQ ID NO: 2428633 - DNA, 25 bp, Homo sapien
acataacagttgagtgtttctggtg

SEQ ID NO: 2428634 - DNA, 25 bp, Homo sapien
cataacagttgagtgtttctggtgg

SEQ ID NO: 2428635 - DNA, 25 bp, Homo sapien
ataacagttgagtgtttctggtggg

SEQ ID NO: 2428636 - DNA, 25 bp, Homo sapien
aacagttgagtgtttctggtgggga

SEQ ID NO: 2428637 - DNA, 25 bp, Homo sapien
tgtaaaccttttgtctgagaaatcc

SEQ ID NO: 2428638 - DNA, 25 bp, Homo sapien
tggccccatatacagatcacaggta

SEQ ID NO: 2428639 - DNA, 25 bp, Homo sapien
taccattaacttcaaatcctgggca

SEQ ID NO: 2428640 - DNA, 25 bp, Homo sapien
tttgcttcatacaggtttggcccca

SEQ ID NO: 2428641 - DNA, 25 bp, Homo sapien
catttgtataatagggaaacacctt

SEQ ID NO: 2428642 - DNA, 25 bp, Homo sapien
ggattaaatgatcaacatctggaat

SEQ ID NO: 2428643 - DNA, 25 bp, Homo sapien
tcaacatctggaatccatgtgaggg

SEQ ID NO: 2428644 - DNA, 25 bp, Homo sapien
gaaacaccttcttggattaaatgat

SEQ ID NO: 2428645 - DNA, 25 bp, Homo sapien
cataggtataggctgatctgaggct

SEQ ID NO: 2428646 - DNA, 25 bp, Homo sapien
tctggctacttttgggtccactgtg

SEQ ID NO: 2428647 - DNA, 25 bp, Homo sapien
tagaaatagggtacaccttgaacaa

SEQ ID NO: 2428648 - DNA, 25 bp, Homo sapien
gaacaaagggaagctactgaattct

SEQ ID NO: 2428649 - DNA, 25 bp, Homo sapien
taagtaaaagatcatgtggtaaaga

SEQ ID NO: 2428650 - DNA, 25 bp, Homo sapien
cacaggttgacataccaagtccaat

SEQ ID NO: 2428651 - DNA, 25 bp, Homo sapien
tattcgtacaaaataatttcctgct

SEQ ID NO: 2428652 - DNA, 25 bp, Homo sapien
ccaagtccaattctattcgtacaaa

SEQ ID NO: 2428653 - DNA, 25 bp, Homo sapien
ctgacaggctcttaaaggcatttta

SEQ ID NO: 2428654 - DNA, 25 bp, Homo sapien
ttattttgcaaaccctggtctaggc

SEQ ID NO: 2428655 - DNA, 25 bp, Homo sapien
tttgcaaaccctggtctaggcccat

SEQ ID NO: 2428656 - DNA, 25 bp, Homo sapien
aggcattttattttgcaaaccctgg

SEQ ID NO: 2428657 - DNA, 25 bp, Homo sapien
atatatacacatactcagagcaggg

SEQ ID NO: 2428658 - DNA, 25 bp, Homo sapien
tgagtctagggccaaacaagagaac

SEQ ID NO: 2428659 - DNA, 25 bp, Homo sapien
ctgatgaggtacaagctagctggca

SEQ ID NO: 2428660 - DNA, 25 bp, Homo sapien
cactagagtgggtttcctaaagcat

SEQ ID NO: 2428661 - DNA, 25 bp, Homo sapien
agcttcttcttcagaacataaatat

SEQ ID NO: 2428662 - DNA, 25 bp, Homo sapien
agtaagtacacccttgcttccagct

SEQ ID NO: 2428663 - DNA, 25 bp, Homo sapien
gcttcttcttcagaacataaatata

SEQ ID NO: 2428664 - DNA, 25 bp, Homo sapien
gacagccccagtaagtacacccttg

SEQ ID NO: 2428665 - DNA, 25 bp, Homo sapien
tctcctggattagtctttctgaagg

SEQ ID NO: 2428666 - DNA, 25 bp, Homo sapien
cctgaactctcctggattagtcttt

SEQ ID NO: 2428667 - DNA, 25 bp, Homo sapien
gtgcccctgaactctcctggattag

SEQ ID NO: 2428668 - DNA, 25 bp, Homo sapien
gggtggtgcccctgaactctcctgg

SEQ ID NO: 2428669 - DNA, 25 bp, Homo sapien
ttctttggaattccgccatttcatc

SEQ ID NO: 2428670 - DNA, 25 bp, Homo sapien
catggagaagggaaacccagagcag

SEQ ID NO: 2428671 - DNA, 25 bp, Homo sapien
tcttggatacacctgttggaaagca

SEQ ID NO: 2428672 - DNA, 25 bp, Homo sapien
gacgtcccatattgaaggacatgga

SEQ ID NO: 2428673 - DNA, 25 bp, Homo sapien
agtcccaagttgatggcaagtttct

SEQ ID NO: 2428674 - DNA, 25 bp, Homo sapien
tctttcggtctgttttgctgatata

SEQ ID NO: 2428675 - DNA, 25 bp, Homo sapien
ttaaaatgcccctccgagctttgga

SEQ ID NO: 2428676 - DNA, 25 bp, Homo sapien
ggaattagagtcctgtgtcaggaga

SEQ ID NO: 2428677 - DNA, 25 bp, Homo sapien
cctaggacaatatggtatcctccta

SEQ ID NO: 2428678 - DNA, 25 bp, Homo sapien
ttcctaggacaatatggtatcctcc

SEQ ID NO: 2428679 - DNA, 25 bp, Homo sapien
tctttcctaggacaatatggtatcc

SEQ ID NO: 2428680 - DNA, 25 bp, Homo sapien
agtctttcctaggacaatatggtat

SEQ ID NO: 2428681 - DNA, 25 bp, Homo sapien
tgcttcgagaagctctataaaggct

SEQ ID NO: 2428682 - DNA, 25 bp, Homo sapien
gcttcgagaagctctataaaggctt

SEQ ID NO: 2428683 - DNA, 25 bp, Homo sapien
ttgcttcgagaagctctataaaggc

SEQ ID NO: 2428684 - DNA, 25 bp, Homo sapien
cagagaaagcattgatctcattgat

SEQ ID NO: 2428685 - DNA, 25 bp, Homo sapien
gatgcagggcgccgacaggacccac

SEQ ID NO: 2428686 - DNA, 25 bp, Homo sapien
ccgcagcacgccgagtagaatggcg

SEQ ID NO: 2428687 - DNA, 25 bp, Homo sapien
gcattgatctcattgattagccatt

SEQ ID NO: 2428688 - DNA, 25 bp, Homo sapien
cggctctccctgggcgcagtgcgca

SEQ ID NO: 2428689 - DNA, 25 bp, Homo sapien
ctctccctgggcgcagtgcgcaccg

SEQ ID NO: 2428690 - DNA, 25 bp, Homo sapien
ggctctccctgggcgcagtgcgcac

SEQ ID NO: 2428691 - DNA, 25 bp, Homo sapien
tctccctgggcgcagtgcgcaccgc

SEQ ID NO: 2428692 - DNA, 25 bp, Homo sapien
agcacttgaaaagcccaccgcgttc

SEQ ID NO: 2428693 - DNA, 25 bp, Homo sapien
gcccggcccggcagcctcgcactgt

SEQ ID NO: 2428694 - DNA, 25 bp, Homo sapien
tgagcacttgaaaagcccaccgcgt

SEQ ID NO: 2428695 - DNA, 25 bp, Homo sapien
cagcctcgcactgtccgcagaggga

SEQ ID NO: 2428696 - DNA, 25 bp, Homo sapien
tcccagtacgcaccggcgtgggctg

SEQ ID NO: 2428697 - DNA, 25 bp, Homo sapien
tgcccaggttgccaaagccgggcgc

SEQ ID NO: 2428698 - DNA, 25 bp, Homo sapien
gacccgcagcaaattctcgatcagg

SEQ ID NO: 2428699 - DNA, 25 bp, Homo sapien
gaggaagccacaacgtcccagtacg

SEQ ID NO: 2428700 - DNA, 25 bp, Homo sapien
gcactctcgctagagcccaagcagt

SEQ ID NO: 2428701 - DNA, 25 bp, Homo sapien
cgaaccctggctctccggtgttggt

SEQ ID NO: 2428702 - DNA, 25 bp, Homo sapien
ccggtgttggttgtcacttgagcaa

SEQ ID NO: 2428703 - DNA, 25 bp, Homo sapien
gggtgtctccgcgtactcctgttgg

SEQ ID NO: 2428704 - DNA, 25 bp, Homo sapien
caggggaagtaaacggagtcgctag

SEQ ID NO: 2428705 - DNA, 25 bp, Homo sapien
gatgacagatggttgcgtccaaaac

SEQ ID NO: 2428706 - DNA, 25 bp, Homo sapien
cagatgacagatggttgcgtccaaa

SEQ ID NO: 2428707 - DNA, 25 bp, Homo sapien
tagagaaggagctcatagtcggagt

SEQ ID NO: 2428708 - DNA, 25 bp, Homo sapien
tagtcggagttggttaaatgccaga

SEQ ID NO: 2428709 - DNA, 25 bp, Homo sapien
tcaatcaatgctgggagtaataggt

SEQ ID NO: 2428710 - DNA, 25 bp, Homo sapien
gaaagatcgttcattccatgagcag

SEQ ID NO: 2428711 - DNA, 25 bp, Homo sapien
ggacgacatattgacctttggaagt

SEQ ID NO: 2428712 - DNA, 25 bp, Homo sapien
taacccaaggttcagccaatggcac

SEQ ID NO: 2428713 - DNA, 25 bp, Homo sapien
tgacagggaactagatgaaggagtc

SEQ ID NO: 2428714 - DNA, 25 bp, Homo sapien
ctgtgacagggaactagatgaagga

SEQ ID NO: 2428715 - DNA, 25 bp, Homo sapien
tgtgacagggaactagatgaaggag

SEQ ID NO: 2428716 - DNA, 25 bp, Homo sapien
gtgacagggaactagatgaaggagt

SEQ ID NO: 2428717 - DNA, 25 bp, Homo sapien
tgctccactattgagaactgactcc

SEQ ID NO: 2428718 - DNA, 25 bp, Homo sapien
ccactattgagaactgactccagta

SEQ ID NO: 2428719 - DNA, 25 bp, Homo sapien
ctccagtactccaggggcaaggaag

SEQ ID NO: 2428720 - DNA, 25 bp, Homo sapien
ttctctgctccactattgagaactg

SEQ ID NO: 2428721 - DNA, 25 bp, Homo sapien
tggattgggcacagcatgggccact

SEQ ID NO: 2428722 - DNA, 25 bp, Homo sapien
ccactattgtagagccaaagacttc

SEQ ID NO: 2428723 - DNA, 25 bp, Homo sapien
gagccaaagacttcagccagattgg

SEQ ID NO: 2428724 - DNA, 25 bp, Homo sapien
tgtaacatcgtcactggttctggat

SEQ ID NO: 2428725 - DNA, 25 bp, Homo sapien
gccactctctgcaagtgaatcatga

SEQ ID NO: 2428726 - DNA, 25 bp, Homo sapien
ctctgcaagtgaatcatgaggaaaa

SEQ ID NO: 2428727 - DNA, 25 bp, Homo sapien
gaaaaccaatgtgtccctgttggcc

SEQ ID NO: 2428728 - DNA, 25 bp, Homo sapien
tttagtatatggactctgagccact

SEQ ID NO: 2428729 - DNA, 25 bp, Homo sapien
ttccataaaggctttgtttaggcga

SEQ ID NO: 2428730 - DNA, 25 bp, Homo sapien
acatggcagatatgctgttgtcttc

SEQ ID NO: 2428731 - DNA, 25 bp, Homo sapien
gaaaggtcagaagaggttctttgaa

SEQ ID NO: 2428732 - DNA, 25 bp, Homo sapien
cctggtacatggcagatatgctgtt

SEQ ID NO: 2428733 - DNA, 25 bp, Homo sapien
aaggctacagatagcatggatatca

SEQ ID NO: 2428734 - DNA, 25 bp, Homo sapien
ggctacagatagcatggatatcatc

SEQ ID NO: 2428735 - DNA, 25 bp, Homo sapien
gctacagatagcatggatatcatcc

SEQ ID NO: 2428736 - DNA, 25 bp, Homo sapien
agaaggctacagatagcatggatat

SEQ ID NO: 2428737 - DNA, 25 bp, Homo sapien
gaggggtacagttttcactctgagg

SEQ ID NO: 2428738 - DNA, 25 bp, Homo sapien
acagttttcactctgaggaatttct

SEQ ID NO: 2428739 - DNA, 25 bp, Homo sapien
ggtacagttttcactctgaggaatt

SEQ ID NO: 2428740 - DNA, 25 bp, Homo sapien
gggtacagttttcactctgaggaat

SEQ ID NO: 2428741 - DNA, 25 bp, Homo sapien
tgtgctgtcacagcccaagatccta

SEQ ID NO: 2428742 - DNA, 25 bp, Homo sapien
ttcagcttttactgtgctgtcacag

SEQ ID NO: 2428743 - DNA, 25 bp, Homo sapien
gacctctctgctcaatctcatttac

SEQ ID NO: 2428744 - DNA, 25 bp, Homo sapien
tatacaggcctgtctcagtaagacc

SEQ ID NO: 2428745 - DNA, 25 bp, Homo sapien
gacattctggacgagagatcacaca

SEQ ID NO: 2428746 - DNA, 25 bp, Homo sapien
tagagacaaagtcattcaggcacat

SEQ ID NO: 2428747 - DNA, 25 bp, Homo sapien
gatagtttcccaaattttatctgct

SEQ ID NO: 2428748 - DNA, 25 bp, Homo sapien
tcctgacacttcagagatagtttcc

SEQ ID NO: 2428749 - DNA, 25 bp, Homo sapien
cgtgcccacattgtctcagttcttg

SEQ ID NO: 2428750 - DNA, 25 bp, Homo sapien
ctctgttactctgtggcgtgcccac

SEQ ID NO: 2428751 - DNA, 25 bp, Homo sapien
tggggtcactgttccaaggttgtaa

SEQ ID NO: 2428752 - DNA, 25 bp, Homo sapien
tactctgtggcgtgcccacattgtc

SEQ ID NO: 2428753 - DNA, 25 bp, Homo sapien
tatggcacagtctcaatagtgggca

SEQ ID NO: 2428754 - DNA, 25 bp, Homo sapien
tcctggtccagtatggcacagtctc

SEQ ID NO: 2428755 - DNA, 25 bp, Homo sapien
ctttggctcctggtccagtatggca

SEQ ID NO: 2428756 - DNA, 25 bp, Homo sapien
aatagtgggcacagctttgatgggc

SEQ ID NO: 2428757 - DNA, 25 bp, Homo sapien
ttgggaacagtcactgtagtttttg

SEQ ID NO: 2428758 - DNA, 25 bp, Homo sapien
gggaacagtcactgtagtttttgca

SEQ ID NO: 2428759 - DNA, 25 bp, Homo sapien
ggaacagtcactgtagtttttgcaa

SEQ ID NO: 2428760 - DNA, 25 bp, Homo sapien
ccttgggaacagtcactgtagtttt

SEQ ID NO: 2428761 - DNA, 25 bp, Homo sapien
caccaaagaagagtcgcaatccagt

SEQ ID NO: 2428762 - DNA, 25 bp, Homo sapien
ccaaagaagagtcgcaatccagtga

SEQ ID NO: 2428763 - DNA, 25 bp, Homo sapien
ttctctctgcttccgcttgaaagtc

SEQ ID NO: 2428764 - DNA, 25 bp, Homo sapien
tccccctggtctactgtggagccaa

SEQ ID NO: 2428765 - DNA, 25 bp, Homo sapien
tgctgccagatatgtcacacaggaa

SEQ ID NO: 2428766 - DNA, 25 bp, Homo sapien
ccagattcatcgctaatttaaagtc

SEQ ID NO: 2428767 - DNA, 25 bp, Homo sapien
aatctgttactccagcttttcgcag

SEQ ID NO: 2428768 - DNA, 25 bp, Homo sapien
tcgcagttagcctcagctctccgtt

SEQ ID NO: 2428769 - DNA, 25 bp, Homo sapien
cagattccgcatattcagcatagta

SEQ ID NO: 2428770 - DNA, 25 bp, Homo sapien
ttcgtttccttccttgagaatctcc

SEQ ID NO: 2428771 - DNA, 25 bp, Homo sapien
cgcatattcagcatagtagtatcca

SEQ ID NO: 2428772 - DNA, 25 bp, Homo sapien
gtttccttccttgagaatctccgcc

SEQ ID NO: 2428773 - DNA, 25 bp, Homo sapien
taaacatgcggtcataccgcagtac

SEQ ID NO: 2428774 - DNA, 25 bp, Homo sapien
gttagggactgacttcttacatagg

SEQ ID NO: 2428775 - DNA, 25 bp, Homo sapien
gactgacttcttacatagggtttta

SEQ ID NO: 2428776 - DNA, 25 bp, Homo sapien
ggactcttaaacatgcggtcatacc

SEQ ID NO: 2428777 - DNA, 25 bp, Homo sapien
aatggtggctggtccactgaaagtt

SEQ ID NO: 2428778 - DNA, 25 bp, Homo sapien
atggtggctggtccactgaaagttt

SEQ ID NO: 2428779 - DNA, 25 bp, Homo sapien
taaacgtgtctaatactgcagattt

SEQ ID NO: 2428780 - DNA, 25 bp, Homo sapien
aataaacgtgtctaatactgcagat

SEQ ID NO: 2428781 - DNA, 25 bp, Homo sapien
tcaataaacgtgtctaatactgcag

SEQ ID NO: 2428782 - DNA, 25 bp, Homo sapien
aacgtgtctaatactgcagatttgt

SEQ ID NO: 2428783 - DNA, 25 bp, Homo sapien
tttaggaaacagcttttgtagcgcc

SEQ ID NO: 2428784 - DNA, 25 bp, Homo sapien
ctttaggaaacagcttttgtagcgc

SEQ ID NO: 2428785 - DNA, 25 bp, Homo sapien
ttaggaaacagcttttgtagcgcca

SEQ ID NO: 2428786 - DNA, 25 bp, Homo sapien
taggaaacagcttttgtagcgccat

SEQ ID NO: 2428787 - DNA, 25 bp, Homo sapien
aaacatgcagcagattatggcagac

SEQ ID NO: 2428788 - DNA, 25 bp, Homo sapien
cccttgaggagagttgactgtattc

SEQ ID NO: 2428789 - DNA, 25 bp, Homo sapien
tatggcagactgctagttgaccttc

SEQ ID NO: 2428790 - DNA, 25 bp, Homo sapien
agaaaactaatctacctcccttgag

SEQ ID NO: 2428791 - DNA, 25 bp, Homo sapien
ttccctgaagttaggaggtgctgcc

SEQ ID NO: 2428792 - DNA, 25 bp, Homo sapien
agcagccatcatacaacctcatcag

SEQ ID NO: 2428793 - DNA, 25 bp, Homo sapien
actttagcactttattccctgaagt

SEQ ID NO: 2428794 - DNA, 25 bp, Homo sapien
catcatacaacctcatcagattcca

SEQ ID NO: 2428795 - DNA, 25 bp, Homo sapien
caagtgctcaactccgtttgccttt

SEQ ID NO: 2428796 - DNA, 25 bp, Homo sapien
ttaccatatgcgttattcagggctg

SEQ ID NO: 2428797 - DNA, 25 bp, Homo sapien
ttataaagcgtccagtatggccatc

SEQ ID NO: 2428798 - DNA, 25 bp, Homo sapien
tgttttaccatatgcgttattcagg

SEQ ID NO: 2428799 - DNA, 25 bp, Homo sapien
ggtcctactgtcagtcaggcaagcc

SEQ ID NO: 2428800 - DNA, 25 bp, Homo sapien
ctactgtcagtcaggcaagccttgg

SEQ ID NO: 2428801 - DNA, 25 bp, Homo sapien
ctgggtcctactgtcagtcaggcaa

SEQ ID NO: 2428802 - DNA, 25 bp, Homo sapien
tcctactgtcagtcaggcaagcctt

SEQ ID NO: 2428803 - DNA, 25 bp, Homo sapien
ccaccagccgccgctatctttcagg

SEQ ID NO: 2428804 - DNA, 25 bp, Homo sapien
agccgccgctatctttcaggcacac

SEQ ID NO: 2428805 - DNA, 25 bp, Homo sapien
accagccgccgctatctttcaggca

SEQ ID NO: 2428806 - DNA, 25 bp, Homo sapien
cagccgccgctatctttcaggcaca

SEQ ID NO: 2428807 - DNA, 25 bp, Homo sapien
tctggccttcaggtagaaatactgt

SEQ ID NO: 2428808 - DNA, 25 bp, Homo sapien
tgttccccggggattatcaggtcca

SEQ ID NO: 2428809 - DNA, 25 bp, Homo sapien
cttcaggtagaaatactgttccccg

SEQ ID NO: 2428810 - DNA, 25 bp, Homo sapien
gattatcaggtccatgcatgtatta

SEQ ID NO: 2428811 - DNA, 25 bp, Homo sapien
aatttcacagactgccatttgtatg

SEQ ID NO: 2428812 - DNA, 25 bp, Homo sapien
gagaatcataataggacaatattcc

SEQ ID NO: 2428813 - DNA, 25 bp, Homo sapien
gccatttgtatgctccctttgcaac

SEQ ID NO: 2428814 - DNA, 25 bp, Homo sapien
tgtatgctccctttgcaacctttcc

SEQ ID NO: 2428815 - DNA, 25 bp, Homo sapien
aaagaaccatcaaggctgccaactg

SEQ ID NO: 2428816 - DNA, 25 bp, Homo sapien
ctacagagaaagaaccatcaaggct

SEQ ID NO: 2428817 - DNA, 25 bp, Homo sapien
gctgccaactgctcagatagttggt

SEQ ID NO: 2428818 - DNA, 25 bp, Homo sapien
agttggtccacttgtacagcaccca

SEQ ID NO: 2428819 - DNA, 25 bp, Homo sapien
tcagaatggcctagagttcttaggg

SEQ ID NO: 2428820 - DNA, 25 bp, Homo sapien
tgcgtctccaagcaccacagtttgg

SEQ ID NO: 2428821 - DNA, 25 bp, Homo sapien
cccagaagcactgccaagagtgatt

SEQ ID NO: 2428822 - DNA, 25 bp, Homo sapien
cagcttagcaggtgtagaaactcaa

SEQ ID NO: 2428823 - DNA, 25 bp, Homo sapien
ttgcacataggagctatttaataaa

SEQ ID NO: 2428824 - DNA, 25 bp, Homo sapien
tgcacataggagctatttaataaat

SEQ ID NO: 2428825 - DNA, 25 bp, Homo sapien
tttgcacataggagctatttaataa

SEQ ID NO: 2428826 - DNA, 25 bp, Homo sapien
gcttccagggctcggggccttcaca

SEQ ID NO: 2428827 - DNA, 25 bp, Homo sapien
acaacctggtgttaggtccgatcac

SEQ ID NO: 2428828 - DNA, 25 bp, Homo sapien
tggacttcgttgtccccacaacctg

SEQ ID NO: 2428829 - DNA, 25 bp, Homo sapien
ggtccgatcaccccaacaatagatg

SEQ ID NO: 2428830 - DNA, 25 bp, Homo sapien
ccccttcccataggctgaaacatga

SEQ ID NO: 2428831 - DNA, 25 bp, Homo sapien
gctgcgccaacaacctgaaatgcat

SEQ ID NO: 2428832 - DNA, 25 bp, Homo sapien
tggtgacctagctttggccatgcag

SEQ ID NO: 2428833 - DNA, 25 bp, Homo sapien
tctgggtttcagatcgacatcatgg

SEQ ID NO: 2428834 - DNA, 25 bp, Homo sapien
tgtgaattctgaggtctggactagg

SEQ ID NO: 2428835 - DNA, 25 bp, Homo sapien
cctgtgaattctgaggtctggacta

SEQ ID NO: 2428836 - DNA, 25 bp, Homo sapien
tcctgtgaattctgaggtctggact

SEQ ID NO: 2428837 - DNA, 25 bp, Homo sapien
tgaattctgaggtctggactaggtc

SEQ ID NO: 2428838 - DNA, 25 bp, Homo sapien
gggaaaagctttgacactatgtaaa

SEQ ID NO: 2428839 - DNA, 25 bp, Homo sapien
cagtatgtgatgttactttgtctca

SEQ ID NO: 2428840 - DNA, 25 bp, Homo sapien
tcttctcagtatgacatatgagaca

SEQ ID NO: 2428841 - DNA, 25 bp, Homo sapien
gaagttatgctgtattcttctcagt

SEQ ID NO: 2428842 - DNA, 25 bp, Homo sapien
cttcctcaaccttggaagctggctc

SEQ ID NO: 2428843 - DNA, 25 bp, Homo sapien
ttcctcaaccttggaagctggctcc

SEQ ID NO: 2428844 - DNA, 25 bp, Homo sapien
tcctcaaccttggaagctggctcca

SEQ ID NO: 2428845 - DNA, 25 bp, Homo sapien
gccaacaagggcatcaactttgcca

SEQ ID NO: 2428846 - DNA, 25 bp, Homo sapien
cagctgagtagcaactgcaggccag

SEQ ID NO: 2428847 - DNA, 25 bp, Homo sapien
tacccgcagtctcctgtcttgcaga

SEQ ID NO: 2428848 - DNA, 25 bp, Homo sapien
taggtgctcgcagtctacccgcagt

SEQ ID NO: 2428849 - DNA, 25 bp, Homo sapien
gaagagtttacatctaactctagtg

SEQ ID NO: 2428850 - DNA, 25 bp, Homo sapien
tccctctttgacacagaggactagt

SEQ ID NO: 2428851 - DNA, 25 bp, Homo sapien
aactctagtggtcttcggcttcttc

SEQ ID NO: 2428852 - DNA, 25 bp, Homo sapien
tcaattgtacaaataggctggacgc

SEQ ID NO: 2428853 - DNA, 25 bp, Homo sapien
attcaaacgagttcgccttccaggg

SEQ ID NO: 2428854 - DNA, 25 bp, Homo sapien
tgtgtgtccacagacgaccttggaa

SEQ ID NO: 2428855 - DNA, 25 bp, Homo sapien
gaccttggaacgaaaagctgccctg

SEQ ID NO: 2428856 - DNA, 25 bp, Homo sapien
tgccctgtttgggatcaatgctcag

SEQ ID NO: 2428857 - DNA, 25 bp, Homo sapien
aacttcgcgccaagttcggagccgc

SEQ ID NO: 2428858 - DNA, 25 bp, Homo sapien
aggatcgcactactccctctgcagt

SEQ ID NO: 2428859 - DNA, 25 bp, Homo sapien
cgccttctgagggagacatgaaaaa

SEQ ID NO: 2428860 - DNA, 25 bp, Homo sapien
agttcaatcattccgcagcgagccg

SEQ ID NO: 2428861 - DNA, 25 bp, Homo sapien
tctccgcgggggaggttggccgaga

SEQ ID NO: 2428862 - DNA, 25 bp, Homo sapien
cgcgtggtggccccgaggacaggct

SEQ ID NO: 2428863 - DNA, 25 bp, Homo sapien
agcccgagccgacgcgggaagaagt

SEQ ID NO: 2428864 - DNA, 25 bp, Homo sapien
gacgatggggatatcggtgagcgag

SEQ ID NO: 2428865 - DNA, 25 bp, Homo sapien
acgcctctgcgtgcggaagtctcca

SEQ ID NO: 2428866 - DNA, 25 bp, Homo sapien
agtgctagggttgcccaggagcctc

SEQ ID NO: 2428867 - DNA, 25 bp, Homo sapien
gggtgtgacccatctgaatcctcgt

SEQ ID NO: 2428868 - DNA, 25 bp, Homo sapien
gtctccactcagaagcaactttggg

SEQ ID NO: 2428869 - DNA, 25 bp, Homo sapien
gcggccccgggaagtgatttgtggc

SEQ ID NO: 2428870 - DNA, 25 bp, Homo sapien
taggcgcgcgctggaaaccctttcc

SEQ ID NO: 2428871 - DNA, 25 bp, Homo sapien
gaagtgatttgtggccgctaggcgc

SEQ ID NO: 2428872 - DNA, 25 bp, Homo sapien
gctaggcgcgcgctggaaacccttt

SEQ ID NO: 2428873 - DNA, 25 bp, Homo sapien
cgcagggcctttttcactcgtcctg

SEQ ID NO: 2428874 - DNA, 25 bp, Homo sapien
gaggaccgcagggcctttttcactc

SEQ ID NO: 2428875 - DNA, 25 bp, Homo sapien
gaccgcagggcctttttcactcgtc

SEQ ID NO: 2428876 - DNA, 25 bp, Homo sapien
agggcctttttcactcgtcctgagg

SEQ ID NO: 2428877 - DNA, 25 bp, Homo sapien
gaatgagaggactagagagaaaatc

SEQ ID NO: 2428878 - DNA, 25 bp, Homo sapien
aggaatgagaggactagagagaaaa

SEQ ID NO: 2428879 - DNA, 25 bp, Homo sapien
aaaggaatgagaggactagagagaa

SEQ ID NO: 2428880 - DNA, 25 bp, Homo sapien
gggaaaggaatgagaggactagaga

SEQ ID NO: 2428881 - DNA, 25 bp, Homo sapien
tactgtaatcaagatctgtaccagg

SEQ ID NO: 2428882 - DNA, 25 bp, Homo sapien
agaaagcacgtgaccttgcctaggg

SEQ ID NO: 2428883 - DNA, 25 bp, Homo sapien
aacggataatttcagtaacttgtga

SEQ ID NO: 2428884 - DNA, 25 bp, Homo sapien
tctgtaccaggttcagtggtgatac

SEQ ID NO: 2428885 - DNA, 25 bp, Homo sapien
tgtggtaatctatagccacttgggt

SEQ ID NO: 2428886 - DNA, 25 bp, Homo sapien
cagtctcagaactatggtaatgctg

SEQ ID NO: 2428887 - DNA, 25 bp, Homo sapien
atccaccctcatatccctgcacagt

SEQ ID NO: 2428888 - DNA, 25 bp, Homo sapien
aattggagattatcttgggtctctg

SEQ ID NO: 2428889 - DNA, 25 bp, Homo sapien
cttaatttggccaagggtgtggaca

SEQ ID NO: 2428890 - DNA, 25 bp, Homo sapien
ttaatttggccaagggtgtggacag

SEQ ID NO: 2428891 - DNA, 25 bp, Homo sapien
tgctgtatgtactgtggagagctat

SEQ ID NO: 2428892 - DNA, 25 bp, Homo sapien
tatgtactgtggagagctatgttga

SEQ ID NO: 2428893 - DNA, 25 bp, Homo sapien
gttaatgcaccttgcaaagtggtac

SEQ ID NO: 2428894 - DNA, 25 bp, Homo sapien
tgcaccttgcaaagtggtactattg

SEQ ID NO: 2428895 - DNA, 25 bp, Homo sapien
gatttctacagctgttaatgcacct

SEQ ID NO: 2428896 - DNA, 25 bp, Homo sapien
tctacagctgttaatgcaccttgca

SEQ ID NO: 2428897 - DNA, 25 bp, Homo sapien
gttccagtgcccctttgttccttgc

SEQ ID NO: 2428898 - DNA, 25 bp, Homo sapien
tttgttccttgctgaaataatagcc

SEQ ID NO: 2428899 - DNA, 25 bp, Homo sapien
ctagtggttccagtgcccctttgtt

SEQ ID NO: 2428900 - DNA, 25 bp, Homo sapien
tccagtgcccctttgttccttgctg

SEQ ID NO: 2428901 - DNA, 25 bp, Homo sapien
aaggcaacaaaactcggtcagtcac

SEQ ID NO: 2428902 - DNA, 25 bp, Homo sapien
gaaggcaacaaaactcggtcagtca

SEQ ID NO: 2428903 - DNA, 25 bp, Homo sapien
agcaggtacatctgttccctgcact

SEQ ID NO: 2428904 - DNA, 25 bp, Homo sapien
ttggaccgcagcaattctgtgtagc

SEQ ID NO: 2428905 - DNA, 25 bp, Homo sapien
gagcttggaccgcagcaattctgtg

SEQ ID NO: 2428906 - DNA, 25 bp, Homo sapien
gcaggtacatctgttccctgcactc

SEQ ID NO: 2428907 - DNA, 25 bp, Homo sapien
tcacactgacggcattcctgaacta

SEQ ID NO: 2428908 - DNA, 25 bp, Homo sapien
cactgacggcattcctgaactagca

SEQ ID NO: 2428909 - DNA, 25 bp, Homo sapien
ttccctccctcacactgacggcatt

SEQ ID NO: 2428910 - DNA, 25 bp, Homo sapien
ccctcacactgacggcattcctgaa

SEQ ID NO: 2428911 - DNA, 25 bp, Homo sapien
agcttcgtgctagagggacacctgc

SEQ ID NO: 2428912 - DNA, 25 bp, Homo sapien
gcttcgtgctagagggacacctgcc

SEQ ID NO: 2428913 - DNA, 25 bp, Homo sapien
gcctgtatgaggtttctgtctgccc

SEQ ID NO: 2428914 - DNA, 25 bp, Homo sapien
ctgcctgtatgaggtttctgtctgc

SEQ ID NO: 2428915 - DNA, 25 bp, Homo sapien
accacgcgcggctcattgtttttat

SEQ ID NO: 2428916 - DNA, 25 bp, Homo sapien
ccacgcgcggctcattgtttttatt

SEQ ID NO: 2428917 - DNA, 25 bp, Homo sapien
ctaggagtataggtatatgccacca

SEQ ID NO: 2428918 - DNA, 25 bp, Homo sapien
tggagaagatacagtacagccttta

SEQ ID NO: 2428919 - DNA, 25 bp, Homo sapien
tgttgttgttgaggggtcgtcttgc

SEQ ID NO: 2428920 - DNA, 25 bp, Homo sapien
aaaatggagaagatacagtacagcc

SEQ ID NO: 2428921 - DNA, 25 bp, Homo sapien
cacttgtgtgtctaaaacaaccatc

SEQ ID NO: 2428922 - DNA, 25 bp, Homo sapien
tttcacctctgagaacaactgtgca

SEQ ID NO: 2428923 - DNA, 25 bp, Homo sapien
ctgtgcatttgatccagttggtcac

SEQ ID NO: 2428924 - DNA, 25 bp, Homo sapien
ggtgttgcagactggctcatcacag

SEQ ID NO: 2428925 - DNA, 25 bp, Homo sapien
aagagctacctaagaagaataactg

SEQ ID NO: 2428926 - DNA, 25 bp, Homo sapien
agctacctaagaagaataactgggc

SEQ ID NO: 2428927 - DNA, 25 bp, Homo sapien
tacatacatacttaaccaggatgaa

SEQ ID NO: 2428928 - DNA, 25 bp, Homo sapien
atacatacatacttaaccaggatga

SEQ ID NO: 2428929 - DNA, 25 bp, Homo sapien
ggcccagaggtagcttatgccctta

SEQ ID NO: 2428930 - DNA, 25 bp, Homo sapien
tataagctgtgccatagtgcagatg

SEQ ID NO: 2428931 - DNA, 25 bp, Homo sapien
ttacccagatgtgagaaataacagt

SEQ ID NO: 2428932 - DNA, 25 bp, Homo sapien
cagcggcagccttgagattaagtgc

SEQ ID NO: 2428933 - DNA, 25 bp, Homo sapien
aacttcagaggctcagcagtgcatt

SEQ ID NO: 2428934 - DNA, 25 bp, Homo sapien
cacaaacttcagaggctcagcagtg

SEQ ID NO: 2428935 - DNA, 25 bp, Homo sapien
aaacttcagaggctcagcagtgcat

SEQ ID NO: 2428936 - DNA, 25 bp, Homo sapien
tcacacaaacttcagaggctcagca

SEQ ID NO: 2428937 - DNA, 25 bp, Homo sapien
caattactagcacagaatctccatc

SEQ ID NO: 2428938 - DNA, 25 bp, Homo sapien
gcaaggtgtaggaatcattttgcat

SEQ ID NO: 2428939 - DNA, 25 bp, Homo sapien
catcaggcaaggtgtaggaatcatt

SEQ ID NO: 2428940 - DNA, 25 bp, Homo sapien
gcacagaatctccatcaggcaaggt

SEQ ID NO: 2428941 - DNA, 25 bp, Homo sapien
cctggcacataagcagtgacattga

SEQ ID NO: 2428942 - DNA, 25 bp, Homo sapien
catccaaattagtgctataggagca

SEQ ID NO: 2428943 - DNA, 25 bp, Homo sapien
tgtggcaggttttactagacatcca

SEQ ID NO: 2428944 - DNA, 25 bp, Homo sapien
tgtgcattccaggtaggtagaaaac

SEQ ID NO: 2428945 - DNA, 25 bp, Homo sapien
acaagttcaggactagttatagcca

SEQ ID NO: 2428946 - DNA, 25 bp, Homo sapien
tactgaaaatcctatgagaactcca

SEQ ID NO: 2428947 - DNA, 25 bp, Homo sapien
atccttaccagggtctaaaatgtgg

SEQ ID NO: 2428948 - DNA, 25 bp, Homo sapien
tgcttccttggcatgaactagaggg

SEQ ID NO: 2428949 - DNA, 25 bp, Homo sapien
agattgtgctgggacaccatccact

SEQ ID NO: 2428950 - DNA, 25 bp, Homo sapien
ctgcttgacggtgccctgaaatatt

SEQ ID NO: 2428951 - DNA, 25 bp, Homo sapien
tataatggaaagtcggtcaacaggc

SEQ ID NO: 2428952 - DNA, 25 bp, Homo sapien
catgctcaccttgctaaacccaggg

SEQ ID NO: 2428953 - DNA, 25 bp, Homo sapien
tgtaacgaaacagcattgaaggaaa

SEQ ID NO: 2428954 - DNA, 25 bp, Homo sapien
agacaacaacttctaacaaaaccag

SEQ ID NO: 2428955 - DNA, 25 bp, Homo sapien
tattcaaggacctggagttgcagtt

SEQ ID NO: 2428956 - DNA, 25 bp, Homo sapien
tacatacatgtgtcttacaacatca

SEQ ID NO: 2428957 - DNA, 25 bp, Homo sapien
tgtctattctcaggcgcatgatctc

SEQ ID NO: 2428958 - DNA, 25 bp, Homo sapien
tagctaactagactcaaggattcac

SEQ ID NO: 2428959 - DNA, 25 bp, Homo sapien
taggaggttccgtgcctaatcaatg

SEQ ID NO: 2428960 - DNA, 25 bp, Homo sapien
agtccctcagtgtgcttaaaaacca

SEQ ID NO: 2428961 - DNA, 25 bp, Homo sapien
tctgggcccagtaatttgatgtaac

SEQ ID NO: 2428962 - DNA, 25 bp, Homo sapien
gcatcctccatcctgttactctggg

SEQ ID NO: 2428963 - DNA, 25 bp, Homo sapien
tacaactgtgtgcatgggcagaaac

SEQ ID NO: 2428964 - DNA, 25 bp, Homo sapien
taaagaatgtggcttccttgcatcc

SEQ ID NO: 2428965 - DNA, 25 bp, Homo sapien
taacaggtcattgctgggtgcacaa

SEQ ID NO: 2428966 - DNA, 25 bp, Homo sapien
ggatgctgttaaacaccagaggagc

SEQ ID NO: 2428967 - DNA, 25 bp, Homo sapien
tttgaattgtcccagtggatccggg

SEQ ID NO: 2428968 - DNA, 25 bp, Homo sapien
taaagtagcgtaactctaggtcatg

SEQ ID NO: 2428969 - DNA, 25 bp, Homo sapien
catgatgcttttcacacattgtggc

SEQ ID NO: 2428970 - DNA, 25 bp, Homo sapien
cagaatgtactcttgttgaaacact

SEQ ID NO: 2428971 - DNA, 25 bp, Homo sapien
gaaacacttcttgtaccattttatg

SEQ ID NO: 2428972 - DNA, 25 bp, Homo sapien
tcacaatgggggtcagaatgtactc

SEQ ID NO: 2428973 - DNA, 25 bp, Homo sapien
catcgtttggatatcaggttggaaa

SEQ ID NO: 2428974 - DNA, 25 bp, Homo sapien
cccagagttcagatagaaatgccag

SEQ ID NO: 2428975 - DNA, 25 bp, Homo sapien
tgggctgaccatggaaatgatttct

SEQ ID NO: 2428976 - DNA, 25 bp, Homo sapien
aaacattgatggcagtggtgggtgc

SEQ ID NO: 2428977 - DNA, 25 bp, Homo sapien
ctaaatgatgtagaaatgaaatatg

SEQ ID NO: 2428978 - DNA, 25 bp, Homo sapien
ttagacacacgagtgtttccagaga

SEQ ID NO: 2428979 - DNA, 25 bp, Homo sapien
ggtgtgtacacttggagccatgtcc

SEQ ID NO: 2428980 - DNA, 25 bp, Homo sapien
taagcatttgctacagctggccagc

SEQ ID NO: 2428981 - DNA, 25 bp, Homo sapien
aagtctgagtctataggtgtgtaca

SEQ ID NO: 2428982 - DNA, 25 bp, Homo sapien
ttttctgataagtgtggtatccaca

SEQ ID NO: 2428983 - DNA, 25 bp, Homo sapien
cttgccaaaacttccacctatacca

SEQ ID NO: 2428984 - DNA, 25 bp, Homo sapien
tgctttacccataactttggcagac

SEQ ID NO: 2428985 - DNA, 25 bp, Homo sapien
gccaaaacttccacctataccatta

SEQ ID NO: 2428986 - DNA, 25 bp, Homo sapien
caaaacttccacctataccattatt

SEQ ID NO: 2428987 - DNA, 25 bp, Homo sapien
gaccatgactgtctagctgcaacat

SEQ ID NO: 2428988 - DNA, 25 bp, Homo sapien
aatatatgccatagcgaccatgact

SEQ ID NO: 2428989 - DNA, 25 bp, Homo sapien
caacaactttaagccttttgcaggg

SEQ ID NO: 2428990 - DNA, 25 bp, Homo sapien
tcatctgaccgaatttgtgcattgc

SEQ ID NO: 2428991 - DNA, 25 bp, Homo sapien
ggactagattttgcgcaactgcggc

SEQ ID NO: 2428992 - DNA, 25 bp, Homo sapien
accagacaaatgtgaatgcgattga

SEQ ID NO: 2428993 - DNA, 25 bp, Homo sapien
cgattgatggatgctcccagttgag

SEQ ID NO: 2428994 - DNA, 25 bp, Homo sapien
caactgcggccataaagattgatga

SEQ ID NO: 2428995 - DNA, 25 bp, Homo sapien
ccaacttcagccagcggatagagta

SEQ ID NO: 2428996 - DNA, 25 bp, Homo sapien
taggcctgtcttatggccatggtgg

SEQ ID NO: 2428997 - DNA, 25 bp, Homo sapien
agcaccaacttcagccagcggatag

SEQ ID NO: 2428998 - DNA, 25 bp, Homo sapien
atttccataggcctgtcttatggcc

SEQ ID NO: 2428999 - DNA, 25 bp, Homo sapien
gaattgcttgcctgatgttattgga

SEQ ID NO: 2429000 - DNA, 25 bp, Homo sapien
ctatatgttcccaactatctgtatc

SEQ ID NO: 2429001 - DNA, 25 bp, Homo sapien
tgttattggagtgagcatactggtc

SEQ ID NO: 2429002 - DNA, 25 bp, Homo sapien
gagtgagcatactggtcattcacag

SEQ ID NO: 2429003 - DNA, 25 bp, Homo sapien
agtggggttggcatgtctgctatcc

SEQ ID NO: 2429004 - DNA, 25 bp, Homo sapien
ggatgccttctaaatgtcttattct

SEQ ID NO: 2429005 - DNA, 25 bp, Homo sapien
gtctgctatccttagtttgtcttct

SEQ ID NO: 2429006 - DNA, 25 bp, Homo sapien
tcttcagcttggatgccttctaaat

SEQ ID NO: 2429007 - DNA, 25 bp, Homo sapien
aaattcagcactaacactaagatgg

SEQ ID NO: 2429008 - DNA, 25 bp, Homo sapien
gcactaacactaagatgggtcacta

SEQ ID NO: 2429009 - DNA, 25 bp, Homo sapien
gatgggtcactagcctttgcttatt

SEQ ID NO: 2429010 - DNA, 25 bp, Homo sapien
cactaagatgggtcactagcctttg

SEQ ID NO: 2429011 - DNA, 25 bp, Homo sapien
agtttattatggttaataacatgtg

SEQ ID NO: 2429012 - DNA, 25 bp, Homo sapien
tattatggttaataacatgtgacca

SEQ ID NO: 2429013 - DNA, 25 bp, Homo sapien
tttattatggttaataacatgtgac

SEQ ID NO: 2429014 - DNA, 25 bp, Homo sapien
ttatggttaataacatgtgaccaga

SEQ ID NO: 2429015 - DNA, 25 bp, Homo sapien
tgagcaacacatgtctaagtcccga

SEQ ID NO: 2429016 - DNA, 25 bp, Homo sapien
gatcctcaaatttaccgatcagata

SEQ ID NO: 2429017 - DNA, 25 bp, Homo sapien
cccagaagtaggaaaggacaggctg

SEQ ID NO: 2429018 - DNA, 25 bp, Homo sapien
tctctgcaggtaagtagatcccaga

SEQ ID NO: 2429019 - DNA, 25 bp, Homo sapien
ctgcagcaactttgatcattattcc

SEQ ID NO: 2429020 - DNA, 25 bp, Homo sapien
cagcaactttgatcattattcccac

SEQ ID NO: 2429021 - DNA, 25 bp, Homo sapien
tgcagcaactttgatcattattccc

SEQ ID NO: 2429022 - DNA, 25 bp, Homo sapien
gcagcaactttgatcattattccca

SEQ ID NO: 2429023 - DNA, 25 bp, Homo sapien
cagctctctctgatgccggcattcg

SEQ ID NO: 2429024 - DNA, 25 bp, Homo sapien
ggtgatgactggctcctgttcagct

SEQ ID NO: 2429025 - DNA, 25 bp, Homo sapien
tgtagggaccctatcatgggcattt

SEQ ID NO: 2429026 - DNA, 25 bp, Homo sapien
ccggcattcgagagcatttactgca

SEQ ID NO: 2429027 - DNA, 25 bp, Homo sapien
tccaatgatgtgggggtaacagcca

SEQ ID NO: 2429028 - DNA, 25 bp, Homo sapien
caatgatgtgggggtaacagccagc

SEQ ID NO: 2429029 - DNA, 25 bp, Homo sapien
aatgatgtgggggtaacagccagca

SEQ ID NO: 2429030 - DNA, 25 bp, Homo sapien
atgatgtgggggtaacagccagcat

SEQ ID NO: 2429031 - DNA, 25 bp, Homo sapien
ctaatcttctctgtatcgttccaat

SEQ ID NO: 2429032 - DNA, 25 bp, Homo sapien
gtatatgtgctgccgaagcgagcac

SEQ ID NO: 2429033 - DNA, 25 bp, Homo sapien
tttagtatatgtgctgccgaagcga

SEQ ID NO: 2429034 - DNA, 25 bp, Homo sapien
ctggaaacattgcgcaggggccatg

SEQ ID NO: 2429035 - DNA, 25 bp, Homo sapien
tggggactctcagggcacagtgata

SEQ ID NO: 2429036 - DNA, 25 bp, Homo sapien
accctgcagggtttgtagagtgaaa

SEQ ID NO: 2429037 - DNA, 25 bp, Homo sapien
atctgcattccgcacaccagggagg

SEQ ID NO: 2429038 - DNA, 25 bp, Homo sapien
gcagtgagaggcgttgagccctggg

SEQ ID NO: 2429039 - DNA, 25 bp, Homo sapien
ctttgaaggactaagcgatggcaga

SEQ ID NO: 2429040 - DNA, 25 bp, Homo sapien
agaggagtttgttgtgcaccaaggc

SEQ ID NO: 2429041 - DNA, 25 bp, Homo sapien
gcaatacagtaggtgtgcctgccta

SEQ ID NO: 2429042 - DNA, 25 bp, Homo sapien
caaggtctatacaaccagcagtagg

SEQ ID NO: 2429043 - DNA, 25 bp, Homo sapien
caaattgggacggaaactaagattg

SEQ ID NO: 2429044 - DNA, 25 bp, Homo sapien
ctaagattggaagtgggggagccgt

SEQ ID NO: 2429045 - DNA, 25 bp, Homo sapien
actaagattggaagtgggggagccg

SEQ ID NO: 2429046 - DNA, 25 bp, Homo sapien
ttcaacaactgccatgagcattctg

SEQ ID NO: 2429047 - DNA, 25 bp, Homo sapien
tccgaaccatactgctgtccatatc

SEQ ID NO: 2429048 - DNA, 25 bp, Homo sapien
caactgccatgagcattctgttcat

SEQ ID NO: 2429049 - DNA, 25 bp, Homo sapien
tttggttcttccgaaccatactgct

SEQ ID NO: 2429050 - DNA, 25 bp, Homo sapien
tataactgacttaactcttcggagc

SEQ ID NO: 2429051 - DNA, 25 bp, Homo sapien
caagtattgagaagcctagtgtgac

SEQ ID NO: 2429052 - DNA, 25 bp, Homo sapien
tcttcggagccagccaatcggcaaa

SEQ ID NO: 2429053 - DNA, 25 bp, Homo sapien
tctaagcgacatcatccaatccagc

SEQ ID NO: 2429054 - DNA, 25 bp, Homo sapien
tgtgacgtcatgtgaaggagcccac

SEQ ID NO: 2429055 - DNA, 25 bp, Homo sapien
attattgggacagatgggtggccat

SEQ ID NO: 2429056 - DNA, 25 bp, Homo sapien
catttgctggcttagaatctcacgg

SEQ ID NO: 2429057 - DNA, 25 bp, Homo sapien
ccactgggtccaagaggattcatca

SEQ ID NO: 2429058 - DNA, 25 bp, Homo sapien
tgcagctgttgagactgtgtagagc

SEQ ID NO: 2429059 - DNA, 25 bp, Homo sapien
gcagctgttgagactgtgtagagct

SEQ ID NO: 2429060 - DNA, 25 bp, Homo sapien
taccagttctgtgaaagagggactt

SEQ ID NO: 2429061 - DNA, 25 bp, Homo sapien
tgtactctttattgactcaaacctc

SEQ ID NO: 2429062 - DNA, 25 bp, Homo sapien
gggaaaatcccctctgatcctattg

SEQ ID NO: 2429063 - DNA, 25 bp, Homo sapien
gaaaggagccacaagacacgcttct

SEQ ID NO: 2429064 - DNA, 25 bp, Homo sapien
acatctctcactaatccttcctcca

SEQ ID NO: 2429065 - DNA, 25 bp, Homo sapien
catctctcactaatccttcctccat

SEQ ID NO: 2429066 - DNA, 25 bp, Homo sapien
tgacatctctcactaatccttcctc

SEQ ID NO: 2429067 - DNA, 25 bp, Homo sapien
gacatctctcactaatccttcctcc

SEQ ID NO: 2429068 - DNA, 25 bp, Homo sapien
taggaggctagtccaaaacaatgtc

SEQ ID NO: 2429069 - DNA, 25 bp, Homo sapien
taaaacaagaatgagtgttccgatg

SEQ ID NO: 2429070 - DNA, 25 bp, Homo sapien
ccaggcccgttttgattggttgcta

SEQ ID NO: 2429071 - DNA, 25 bp, Homo sapien
tggcaaatcaagtaaaccaggcccg

SEQ ID NO: 2429072 - DNA, 25 bp, Homo sapien
agtgtgctctttactcccagatggg

SEQ ID NO: 2429073 - DNA, 25 bp, Homo sapien
ttatcactgtgtccttagcctagca

SEQ ID NO: 2429074 - DNA, 25 bp, Homo sapien
agatgggacccatggaaatatatcc

SEQ ID NO: 2429075 - DNA, 25 bp, Homo sapien
gccaagggctagagatgctcagcag

SEQ ID NO: 2429076 - DNA, 25 bp, Homo sapien
tgagtacagacccttgtcctcaagg

SEQ ID NO: 2429077 - DNA, 25 bp, Homo sapien
cataggaggacattaaaggcactga

SEQ ID NO: 2429078 - DNA, 25 bp, Homo sapien
cacactctagtaaaggattgggcac

SEQ ID NO: 2429079 - DNA, 25 bp, Homo sapien
tatacccagaggataacataggagg

SEQ ID NO: 2429080 - DNA, 25 bp, Homo sapien
gactatctagacagcaggtcgacct

SEQ ID NO: 2429081 - DNA, 25 bp, Homo sapien
tcatgagtggaagacagagcctgaa

SEQ ID NO: 2429082 - DNA, 25 bp, Homo sapien
catgcattgaggattggccttggcc

SEQ ID NO: 2429083 - DNA, 25 bp, Homo sapien
tcgcagtgtctagaagaaaggttcc

SEQ ID NO: 2429084 - DNA, 25 bp, Homo sapien
tcctgcttcctatatgatggtcttt

SEQ ID NO: 2429085 - DNA, 25 bp, Homo sapien
ttcagaccacagcactaccctaccc

SEQ ID NO: 2429086 - DNA, 25 bp, Homo sapien
gaggtcctgcttcctatatgatggt

SEQ ID NO: 2429087 - DNA, 25 bp, Homo sapien
ggtactaattcattagggttctgcc

SEQ ID NO: 2429088 - DNA, 25 bp, Homo sapien
catagcttagccagcaaaggaaggg

SEQ ID NO: 2429089 - DNA, 25 bp, Homo sapien
taatttgccaagctacaccagacag

SEQ ID NO: 2429090 - DNA, 25 bp, Homo sapien
ggttattaagtatcgcacactggca

SEQ ID NO: 2429091 - DNA, 25 bp, Homo sapien
tctgcttactactgaaaggatggcc

SEQ ID NO: 2429092 - DNA, 25 bp, Homo sapien
ggctacaccattgcaaacattctga

SEQ ID NO: 2429093 - DNA, 25 bp, Homo sapien
atatgagactctacaccaaaaaggg

SEQ ID NO: 2429094 - DNA, 25 bp, Homo sapien
caatggcttgggcatgcagattgct

SEQ ID NO: 2429095 - DNA, 25 bp, Homo sapien
tacatacactcgctagaaactgcag

SEQ ID NO: 2429096 - DNA, 25 bp, Homo sapien
tagcaaatagcagcgtaaaggatgg

SEQ ID NO: 2429097 - DNA, 25 bp, Homo sapien
tggtggcctcaactttaatggagca

SEQ ID NO: 2429098 - DNA, 25 bp, Homo sapien
taaaggatggattcagctcactggg

SEQ ID NO: 2429099 - DNA, 25 bp, Homo sapien
tatgtgcaatgggtacaaatccacc

SEQ ID NO: 2429100 - DNA, 25 bp, Homo sapien
aactccccgtcaaaagcacatctgg

SEQ ID NO: 2429101 - DNA, 25 bp, Homo sapien
taactctgtggtaaagaccctgctt

SEQ ID NO: 2429102 - DNA, 25 bp, Homo sapien
gaacgcattctcgaagctcgccaag

SEQ ID NO: 2429103 - DNA, 25 bp, Homo sapien
gcagtaggtacaggcaacagaagcc

SEQ ID NO: 2429104 - DNA, 25 bp, Homo sapien
tatgctgcccactataggaaatgca

SEQ ID NO: 2429105 - DNA, 25 bp, Homo sapien
actctgactctacttggatgctaaa

SEQ ID NO: 2429106 - DNA, 25 bp, Homo sapien
gagaatatctattgtaaagctgtca

SEQ ID NO: 2429107 - DNA, 25 bp, Homo sapien
ccattaatgcttgaaaactacgaac

SEQ ID NO: 2429108 - DNA, 25 bp, Homo sapien
cagaaattgtatcttggtgatccac

SEQ ID NO: 2429109 - DNA, 25 bp, Homo sapien
catcaataagaacagacaggaccag

SEQ ID NO: 2429110 - DNA, 25 bp, Homo sapien
cacatgccaggagtagcgcggcaga

SEQ ID NO: 2429111 - DNA, 25 bp, Homo sapien
cttagcgattgaggcgcagcctgca

SEQ ID NO: 2429112 - DNA, 25 bp, Homo sapien
tctcgcctgagacaatattaacctg

SEQ ID NO: 2429113 - DNA, 25 bp, Homo sapien
agacaatagatttgcccactgcaga

SEQ ID NO: 2429114 - DNA, 25 bp, Homo sapien
gaaaagacgttctaagtctcgcctg

SEQ ID NO: 2429115 - DNA, 25 bp, Homo sapien
gtgacttaaaagtggcaaccgcctc

SEQ ID NO: 2429116 - DNA, 25 bp, Homo sapien
caagtgcggcgtttagggaatccgc

SEQ ID NO: 2429117 - DNA, 25 bp, Homo sapien
gatctctcgcctcccacaaaatggg

SEQ ID NO: 2429118 - DNA, 25 bp, Homo sapien
aaagcccacgattcaggcgagcggt

SEQ ID NO: 2429119 - DNA, 25 bp, Homo sapien
tacagaagtctcactgcacgactgg

SEQ ID NO: 2429120 - DNA, 25 bp, Homo sapien
caggatcttcctagccacaacctta

SEQ ID NO: 2429121 - DNA, 25 bp, Homo sapien
tggccctgggttgtcaggatcttcc

SEQ ID NO: 2429122 - DNA, 25 bp, Homo sapien
tcacaggcttccgagacactcactg

SEQ ID NO: 2429123 - DNA, 25 bp, Homo sapien
aagggacagctgaccgggtcttcct

SEQ ID NO: 2429124 - DNA, 25 bp, Homo sapien
ggcacattgcagacgaaccctaagc

SEQ ID NO: 2429125 - DNA, 25 bp, Homo sapien
tccgccggctttgtgtgcgtgtgaa

SEQ ID NO: 2429126 - DNA, 25 bp, Homo sapien
tgcgtgtgaaatgtgcggcacattg

SEQ ID NO: 2429127 - DNA, 25 bp, Homo sapien
taagcccggcgagtcgagtctattg

SEQ ID NO: 2429128 - DNA, 25 bp, Homo sapien
catcggctcgccttgcccgtcgccc

SEQ ID NO: 2429129 - DNA, 25 bp, Homo sapien
gctcgccttgcccgtcgcccgctcg

SEQ ID NO: 2429130 - DNA, 25 bp, Homo sapien
tcggctcgccttgcccgtcgcccgc

SEQ ID NO: 2429131 - DNA, 25 bp, Homo sapien
tcgccttgcccgtcgcccgctcgcg

SEQ ID NO: 2429132 - DNA, 25 bp, Homo sapien
agaaaccaggacctgtctccaaata

SEQ ID NO: 2429133 - DNA, 25 bp, Homo sapien
cgtcgccctcggtttatacagctaa

SEQ ID NO: 2429134 - DNA, 25 bp, Homo sapien
ctgcgaaataatcccggcagccggg

SEQ ID NO: 2429135 - DNA, 25 bp, Homo sapien
taacatcgataatcggctgcgaaat

SEQ ID NO: 2429136 - DNA, 25 bp, Homo sapien
tgcctgtatcaaagtttctcaccta

SEQ ID NO: 2429137 - DNA, 25 bp, Homo sapien
acaaatataagtgcctgcctgtatc

SEQ ID NO: 2429138 - DNA, 25 bp, Homo sapien
tattcagttatagcttgtctacaaa

SEQ ID NO: 2429139 - DNA, 25 bp, Homo sapien
ggtctgccagacattaacttaattt

SEQ ID NO: 2429140 - DNA, 25 bp, Homo sapien
gagaagtaattgtgttatttaatct

SEQ ID NO: 2429141 - DNA, 25 bp, Homo sapien
ttcttcctggggcatatgggctact

SEQ ID NO: 2429142 - DNA, 25 bp, Homo sapien
tgcacccggctggccggagatttta

SEQ ID NO: 2429143 - DNA, 25 bp, Homo sapien
tttcaaatttgagaagtaattgtgt

SEQ ID NO: 2429144 - DNA, 25 bp, Homo sapien
ttaggtagcctcatattgcaatgta

SEQ ID NO: 2429145 - DNA, 25 bp, Homo sapien
acttgtacctcccagtgtgcttgca

SEQ ID NO: 2429146 - DNA, 25 bp, Homo sapien
cacttcctgtagatcaaccaattaa

SEQ ID NO: 2429147 - DNA, 25 bp, Homo sapien
tttgatatagtccagttgagagaga

SEQ ID NO: 2429148 - DNA, 25 bp, Homo sapien
aaaacagtcaatgtaacatatgcta

SEQ ID NO: 2429149 - DNA, 25 bp, Homo sapien
ttcacacctccctatgacatagata

SEQ ID NO: 2429150 - DNA, 25 bp, Homo sapien
tatttaatttgccatgtgccgggca

SEQ ID NO: 2429151 - DNA, 25 bp, Homo sapien
cacagtaagttctggatctagtatt

SEQ ID NO: 2429152 - DNA, 25 bp, Homo sapien
ggtatctttaggcttatcgttgtaa

SEQ ID NO: 2429153 - DNA, 25 bp, Homo sapien
cgttgtaagtatcacttgtcattga

SEQ ID NO: 2429154 - DNA, 25 bp, Homo sapien
taggcttatcgttgtaagtatcact

SEQ ID NO: 2429155 - DNA, 25 bp, Homo sapien
ttcagaatctgtggtatctttaggc

SEQ ID NO: 2429156 - DNA, 25 bp, Homo sapien
gcctagtgggataagtatatctaca

SEQ ID NO: 2429157 - DNA, 25 bp, Homo sapien
tactaggaaattggataaactgttc

SEQ ID NO: 2429158 - DNA, 25 bp, Homo sapien
tgaaccatgtgagatagagcctagt

SEQ ID NO: 2429159 - DNA, 25 bp, Homo sapien
gagtgtaggtccaccattgttcata

SEQ ID NO: 2429160 - DNA, 25 bp, Homo sapien
actgtgatttcctctacgtgggtta

SEQ ID NO: 2429161 - DNA, 25 bp, Homo sapien
tgtcatgcgttcattacaactgagt

SEQ ID NO: 2429162 - DNA, 25 bp, Homo sapien
attaaccattcctactttgccccag

SEQ ID NO: 2429163 - DNA, 25 bp, Homo sapien
tctaccaatttgatatgtcatgcgt

SEQ ID NO: 2429164 - DNA, 25 bp, Homo sapien
caatgtggtattaccttcgtggttt

SEQ ID NO: 2429165 - DNA, 25 bp, Homo sapien
cagtgtcatgtcacaaactctgcat

SEQ ID NO: 2429166 - DNA, 25 bp, Homo sapien
cacataagtaaatccaatgggtaca

SEQ ID NO: 2429167 - DNA, 25 bp, Homo sapien
tttttcacagaacactcctatgcca

SEQ ID NO: 2429168 - DNA, 25 bp, Homo sapien
gagagggcccgtgttttctaattgc

SEQ ID NO: 2429169 - DNA, 25 bp, Homo sapien
tacgggctccagctataagggctga

SEQ ID NO: 2429170 - DNA, 25 bp, Homo sapien
cctttgtaaggtgaagagaacagtc

SEQ ID NO: 2429171 - DNA, 25 bp, Homo sapien
tcctgtaagtcagataaggctctgg

SEQ ID NO: 2429172 - DNA, 25 bp, Homo sapien
gcaggctatttgctgccttcttgct

SEQ ID NO: 2429173 - DNA, 25 bp, Homo sapien
cttgctgagggtcatgttgggcctt

SEQ ID NO: 2429174 - DNA, 25 bp, Homo sapien
ctagttgtagtcctgctgcaggttc

SEQ ID NO: 2429175 - DNA, 25 bp, Homo sapien
tgcaggttctgctgcaggctatttg

SEQ ID NO: 2429176 - DNA, 25 bp, Homo sapien
ctttccttgcagaatcaagggtcct

SEQ ID NO: 2429177 - DNA, 25 bp, Homo sapien
tttccttgcagaatcaagggtcctg

SEQ ID NO: 2429178 - DNA, 25 bp, Homo sapien
ttttcaccccagagccgtggaacat

SEQ ID NO: 2429179 - DNA, 25 bp, Homo sapien
cctttccttgcagaatcaagggtcc

SEQ ID NO: 2429180 - DNA, 25 bp, Homo sapien
tccaagtggcaaagcgcctgcttcc

SEQ ID NO: 2429181 - DNA, 25 bp, Homo sapien
ttcctgctgaggaactccaagtggc

SEQ ID NO: 2429182 - DNA, 25 bp, Homo sapien
cttcttcctgctgaggaactccaag

SEQ ID NO: 2429183 - DNA, 25 bp, Homo sapien
aactccaagtggcaaagcgcctgct

SEQ ID NO: 2429184 - DNA, 25 bp, Homo sapien
tgacttagcctgttggcatcttgca

SEQ ID NO: 2429185 - DNA, 25 bp, Homo sapien
gacttagcctgttggcatcttgcat

SEQ ID NO: 2429186 - DNA, 25 bp, Homo sapien
gagacgtacttttcactttccacca

SEQ ID NO: 2429187 - DNA, 25 bp, Homo sapien
ttgagcctaacagcagatcaacagg

SEQ ID NO: 2429188 - DNA, 25 bp, Homo sapien
tacaaaagtgacacagtatgagaag

SEQ ID NO: 2429189 - DNA, 25 bp, Homo sapien
tacaaaggctaaaaccacgattatg

SEQ ID NO: 2429190 - DNA, 25 bp, Homo sapien
tgagaggaagcttcgtattctgatc

SEQ ID NO: 2429191 - DNA, 25 bp, Homo sapien
gggattgtcaaccagcttatctgca

SEQ ID NO: 2429192 - DNA, 25 bp, Homo sapien
cagaattcagtaccatccacattgg

SEQ ID NO: 2429193 - DNA, 25 bp, Homo sapien
tctgatctctgagtgaatccctttg

SEQ ID NO: 2429194 - DNA, 25 bp, Homo sapien
caccttgtagaactcattttgctgg

SEQ ID NO: 2429195 - DNA, 25 bp, Homo sapien
tgtatccactgtaaacgtttgtcgt

SEQ ID NO: 2429196 - DNA, 25 bp, Homo sapien
tgctggctgaaagagtatggaataa

SEQ ID NO: 2429197 - DNA, 25 bp, Homo sapien
cgtttgtcgtgtacaagctcagagc

SEQ ID NO: 2429198 - DNA, 25 bp, Homo sapien
gaaagttctcagtacgtcaagtgaa

SEQ ID NO: 2429199 - DNA, 25 bp, Homo sapien
gcttggcattagttattacctttgg

SEQ ID NO: 2429200 - DNA, 25 bp, Homo sapien
gcgaatgactggtacaaatccaagt

SEQ ID NO: 2429201 - DNA, 25 bp, Homo sapien
tagagcttgggtattacgtaaccat

SEQ ID NO: 2429202 - DNA, 25 bp, Homo sapien
gtataatttcagtagacagcactcc

SEQ ID NO: 2429203 - DNA, 25 bp, Homo sapien
agtataatttcagtagacagcactc

SEQ ID NO: 2429204 - DNA, 25 bp, Homo sapien
gagtataatttcagtagacagcact

SEQ ID NO: 2429205 - DNA, 25 bp, Homo sapien
ttaatgcagtctaaccagtgcccca

SEQ ID NO: 2429206 - DNA, 25 bp, Homo sapien
tttgcctatcaaagctagcaccagg

SEQ ID NO: 2429207 - DNA, 25 bp, Homo sapien
tctaaaacaactaaggaggtgtgcc

SEQ ID NO: 2429208 - DNA, 25 bp, Homo sapien
cggaaataattcatgggagtgctac

SEQ ID NO: 2429209 - DNA, 25 bp, Homo sapien
agatgccagttaaaataatggcaca

SEQ ID NO: 2429210 - DNA, 25 bp, Homo sapien
gttctttcaagatgccagttaaaat

SEQ ID NO: 2429211 - DNA, 25 bp, Homo sapien
tcaagatgccagttaaaataatggc

SEQ ID NO: 2429212 - DNA, 25 bp, Homo sapien
taatggcacaataaacattttaaac

SEQ ID NO: 2429213 - DNA, 25 bp, Homo sapien
caaataatttatcgtctgcaacggg

SEQ ID NO: 2429214 - DNA, 25 bp, Homo sapien
caactttacgccagtgccatgagtc

SEQ ID NO: 2429215 - DNA, 25 bp, Homo sapien
ccaaggaagggaggataacagccta

SEQ ID NO: 2429216 - DNA, 25 bp, Homo sapien
catgcccggccgaaagtcaacaatt

SEQ ID NO: 2429217 - DNA, 25 bp, Homo sapien
tccagtatccacactataacacagt

SEQ ID NO: 2429218 - DNA, 25 bp, Homo sapien
tcatacaataggtgaagagtgtctc

SEQ ID NO: 2429219 - DNA, 25 bp, Homo sapien
cacattaggaactttgcaactgata

SEQ ID NO: 2429220 - DNA, 25 bp, Homo sapien
taacacagtcctagtaaagatgcac

SEQ ID NO: 2429221 - DNA, 25 bp, Homo sapien
tatcaaaaccaaatttcaatcacag

SEQ ID NO: 2429222 - DNA, 25 bp, Homo sapien
taatggtacatgttgaaattgcact

SEQ ID NO: 2429223 - DNA, 25 bp, Homo sapien
tagaacaaaacatcatatcctatgt

SEQ ID NO: 2429224 - DNA, 25 bp, Homo sapien
cctgataatgtccttgacagcgttc

SEQ ID NO: 2429225 - DNA, 25 bp, Homo sapien
tcagcctatgtttttttcagtagac

SEQ ID NO: 2429226 - DNA, 25 bp, Homo sapien
ccttccgtgaatatttgtatttgtc

SEQ ID NO: 2429227 - DNA, 25 bp, Homo sapien
gtatttgtctacataggctttaacc

SEQ ID NO: 2429228 - DNA, 25 bp, Homo sapien
gatttgccactttagtagaatttac

SEQ ID NO: 2429229 - DNA, 25 bp, Homo sapien
acttctccactcttactatgacaaa

SEQ ID NO: 2429230 - DNA, 25 bp, Homo sapien
acagaggtggttcaaaacaacgtgc

SEQ ID NO: 2429231 - DNA, 25 bp, Homo sapien
gaggtggttcaaaacaacgtgcaca

SEQ ID NO: 2429232 - DNA, 25 bp, Homo sapien
cagaggtggttcaaaacaacgtgca

SEQ ID NO: 2429233 - DNA, 25 bp, Homo sapien
aacagaggtggttcaaaacaacgtg

SEQ ID NO: 2429234 - DNA, 25 bp, Homo sapien
aaatggcttgatggccaattttacc

SEQ ID NO: 2429235 - DNA, 25 bp, Homo sapien
tatctactgctttccgtacaatttc

SEQ ID NO: 2429236 - DNA, 25 bp, Homo sapien
ctgctttccgtacaatttctttata

SEQ ID NO: 2429237 - DNA, 25 bp, Homo sapien
tggtgatatctttattttggtaaaa

SEQ ID NO: 2429238 - DNA, 25 bp, Homo sapien
cagaattatgaaggttgctctcaac

SEQ ID NO: 2429239 - DNA, 25 bp, Homo sapien
tactggacatcaacacatctagaga

SEQ ID NO: 2429240 - DNA, 25 bp, Homo sapien
gagactctccaactattaacgtgac

SEQ ID NO: 2429241 - DNA, 25 bp, Homo sapien
tttagacagccaataagaaattccc

SEQ ID NO: 2429242 - DNA, 25 bp, Homo sapien
cttgtctgtcttcgagctatctgcg

SEQ ID NO: 2429243 - DNA, 25 bp, Homo sapien
tctgtcttcgagctatctgcgctgg

SEQ ID NO: 2429244 - DNA, 25 bp, Homo sapien
tcttcgagctatctgcgctggcttc

SEQ ID NO: 2429245 - DNA, 25 bp, Homo sapien
gagctatctgcgctggcttccactg

SEQ ID NO: 2429246 - DNA, 25 bp, Homo sapien
tgctgtcggagcaggcaaaactggt

SEQ ID NO: 2429247 - DNA, 25 bp, Homo sapien
caggcaaaactggtgtactcatgtt

SEQ ID NO: 2429248 - DNA, 25 bp, Homo sapien
aagtattaccagaacttggtccctg

SEQ ID NO: 2429249 - DNA, 25 bp, Homo sapien
gaggctttgctgtgacttgatgacg

SEQ ID NO: 2429250 - DNA, 25 bp, Homo sapien
cctgcaaggatctttaggaatatta

SEQ ID NO: 2429251 - DNA, 25 bp, Homo sapien
ttaacaaatattaaagtgccctcac

SEQ ID NO: 2429252 - DNA, 25 bp, Homo sapien
cttgtactcgatagaagtcttttag

SEQ ID NO: 2429253 - DNA, 25 bp, Homo sapien
cacaaagcaaaccaaccttagtact

SEQ ID NO: 2429254 - DNA, 25 bp, Homo sapien
gatggtaatggataataaacagctt

SEQ ID NO: 2429255 - DNA, 25 bp, Homo sapien
taagcaacaaattgtttgcaaatta

SEQ ID NO: 2429256 - DNA, 25 bp, Homo sapien
attcaaattttctatgtctcacaga

SEQ ID NO: 2429257 - DNA, 25 bp, Homo sapien
tctttttagcatgataaattcatga

SEQ ID NO: 2429258 - DNA, 25 bp, Homo sapien
tataccccctaaacagtgcaaaaca

SEQ ID NO: 2429259 - DNA, 25 bp, Homo sapien
tcctgttcagatataagtaacagca

SEQ ID NO: 2429260 - DNA, 25 bp, Homo sapien
taatcactagttcccaccgtcccca

SEQ ID NO: 2429261 - DNA, 25 bp, Homo sapien
aaaaatgtaaagcacccaccactcg

SEQ ID NO: 2429262 - DNA, 25 bp, Homo sapien
tttccatctggttgtgaagcaatgt

SEQ ID NO: 2429263 - DNA, 25 bp, Homo sapien
tgaagcaatgtagttgacttgttgg

SEQ ID NO: 2429264 - DNA, 25 bp, Homo sapien
gtccctgagatacactggtaggagt

SEQ ID NO: 2429265 - DNA, 25 bp, Homo sapien
agtccctgagatacactggtaggag

SEQ ID NO: 2429266 - DNA, 25 bp, Homo sapien
cattacattcatttgcggttgcatc

SEQ ID NO: 2429267 - DNA, 25 bp, Homo sapien
catgaacacccactggatatgggaa

SEQ ID NO: 2429268 - DNA, 25 bp, Homo sapien
ttataggtagctgagaaccatcaac

SEQ ID NO: 2429269 - DNA, 25 bp, Homo sapien
aatggattgcgttggatgttcatca

SEQ ID NO: 2429270 - DNA, 25 bp, Homo sapien
caataaaccaacaagaatacattac

SEQ ID NO: 2429271 - DNA, 25 bp, Homo sapien
tagtagttttgtacatctgctggca

SEQ ID NO: 2429272 - DNA, 25 bp, Homo sapien
ggcaaagtctttctcacggcccagc

SEQ ID NO: 2429273 - DNA, 25 bp, Homo sapien
tccatccagactgtggacctgaaga

SEQ ID NO: 2429274 - DNA, 25 bp, Homo sapien
tgaagaatttctgcctcgtcgtgag

SEQ ID NO: 2429275 - DNA, 25 bp, Homo sapien
gaaatctagatcttcgagtacgagg

SEQ ID NO: 2429276 - DNA, 25 bp, Homo sapien
tagatctaggatgttcggtcagcga

SEQ ID NO: 2429277 - DNA, 25 bp, Homo sapien
tttggagaccgagactgagattgcc

SEQ ID NO: 2429278 - DNA, 25 bp, Homo sapien
gatttctggttcttggatcaggccc

SEQ ID NO: 2429279 - DNA, 25 bp, Homo sapien
acttttcaagcaattagcagactgg

SEQ ID NO: 2429280 - DNA, 25 bp, Homo sapien
caactagcacaggaagatcttgagc

SEQ ID NO: 2429281 - DNA, 25 bp, Homo sapien
ggttttctacatgagtctgcacagt

SEQ ID NO: 2429282 - DNA, 25 bp, Homo sapien
catgcccaagcaattgaacctctgg

SEQ ID NO: 2429283 - DNA, 25 bp, Homo sapien
ttttctaacacaggtgatgtgtcag

SEQ ID NO: 2429284 - DNA, 25 bp, Homo sapien
tactgtctacatctggttggtgctc

SEQ ID NO: 2429285 - DNA, 25 bp, Homo sapien
gacttccgttttggagcctgtcttg

SEQ ID NO: 2429286 - DNA, 25 bp, Homo sapien
gcagctacagagctccgaagtttct

SEQ ID NO: 2429287 - DNA, 25 bp, Homo sapien
gagggaacacttaaagatggattac

SEQ ID NO: 2429288 - DNA, 25 bp, Homo sapien
gggaacacttaaagatggattactg

SEQ ID NO: 2429289 - DNA, 25 bp, Homo sapien
acacttaaagatggattactgttac

SEQ ID NO: 2429290 - DNA, 25 bp, Homo sapien
aagagggaacacttaaagatggatt

SEQ ID NO: 2429291 - DNA, 25 bp, Homo sapien
ggcatcacacccagaattgtctgat

SEQ ID NO: 2429292 - DNA, 25 bp, Homo sapien
cacacccagaattgtctgatattgg

SEQ ID NO: 2429293 - DNA, 25 bp, Homo sapien
tagacctccttgtaggagttgtcat

SEQ ID NO: 2429294 - DNA, 25 bp, Homo sapien
gtttcagctcttgtgttacgtgtag

SEQ ID NO: 2429295 - DNA, 25 bp, Homo sapien
tccccttcttgagtatgtgctaatg

SEQ ID NO: 2429296 - DNA, 25 bp, Homo sapien
tgcaggttttcgtcttgatcctctg

SEQ ID NO: 2429297 - DNA, 25 bp, Homo sapien
gatcctctggtatttgatgtaccag

SEQ ID NO: 2429298 - DNA, 25 bp, Homo sapien
atttgatgtaccagaagtttgcttc

SEQ ID NO: 2429299 - DNA, 25 bp, Homo sapien
catgatctgggattatctaagcaaa

SEQ ID NO: 2429300 - DNA, 25 bp, Homo sapien
tggagcaatcatcgcgcacagaagc

SEQ ID NO: 2429301 - DNA, 25 bp, Homo sapien
tagcataaaatagtctgcaacagag

SEQ ID NO: 2429302 - DNA, 25 bp, Homo sapien
taacttttggtcttgtaactgctac

SEQ ID NO: 2429303 - DNA, 25 bp, Homo sapien
ttgtggaatgaccaaatctagctac

SEQ ID NO: 2429304 - DNA, 25 bp, Homo sapien
caatatagtcgaccctttaacaaca

SEQ ID NO: 2429305 - DNA, 25 bp, Homo sapien
gaacactttacgtccactctctagc

SEQ ID NO: 2429306 - DNA, 25 bp, Homo sapien
caacacagggattaggagcaccaac

SEQ ID NO: 2429307 - DNA, 25 bp, Homo sapien
caatctgttcctatcaaggaattaa

SEQ ID NO: 2429308 - DNA, 25 bp, Homo sapien
gaaatggcaggcaactgcagctata

SEQ ID NO: 2429309 - DNA, 25 bp, Homo sapien
taatggcacttatgtgggtcccaaa

SEQ ID NO: 2429310 - DNA, 25 bp, Homo sapien
gcagctatagatctcaatctgttcc

SEQ ID NO: 2429311 - DNA, 25 bp, Homo sapien
aatagcaacaggtggcggccacaaa

SEQ ID NO: 2429312 - DNA, 25 bp, Homo sapien
tcatgtataatgtcgccacccagtt

SEQ ID NO: 2429313 - DNA, 25 bp, Homo sapien
tcttatgactgcaaatggtggaacc

SEQ ID NO: 2429314 - DNA, 25 bp, Homo sapien
caacacttgagtacaccagaatagc

SEQ ID NO: 2429315 - DNA, 25 bp, Homo sapien
caaaatgttcgaaagatatggtact

SEQ ID NO: 2429316 - DNA, 25 bp, Homo sapien
aaatgttcgaaagatatggtacttg

SEQ ID NO: 2429317 - DNA, 25 bp, Homo sapien
tgttcgaaagatatggtacttgttg

SEQ ID NO: 2429318 - DNA, 25 bp, Homo sapien
gttcgaaagatatggtacttgttgg

SEQ ID NO: 2429319 - DNA, 25 bp, Homo sapien
aatacagtgcttaaatgttttttgc

SEQ ID NO: 2429320 - DNA, 25 bp, Homo sapien
ctctaaatcaggttagcaatattaa

SEQ ID NO: 2429321 - DNA, 25 bp, Homo sapien
aatgtaaattcaaggttactccttg

SEQ ID NO: 2429322 - DNA, 25 bp, Homo sapien
tactccttgtctaaagatagctacc

SEQ ID NO: 2429323 - DNA, 25 bp, Homo sapien
catgacaattccagttcatgtctct

SEQ ID NO: 2429324 - DNA, 25 bp, Homo sapien
tcatgtctcttctgcctaatcaatg

SEQ ID NO: 2429325 - DNA, 25 bp, Homo sapien
ccaattccaggtaatgtatcaggaa

SEQ ID NO: 2429326 - DNA, 25 bp, Homo sapien
cttctgcctaatcaatgcactgatt

SEQ ID NO: 2429327 - DNA, 25 bp, Homo sapien
gatttgtactccaatttgatctctg

SEQ ID NO: 2429328 - DNA, 25 bp, Homo sapien
caataagctctataggtaaaggaag

SEQ ID NO: 2429329 - DNA, 25 bp, Homo sapien
ctgaagcactgatttgtactccaat

SEQ ID NO: 2429330 - DNA, 25 bp, Homo sapien
ggaagattctccagagtggctaaca

SEQ ID NO: 2429331 - DNA, 25 bp, Homo sapien
cctgtttcactgtataaagagtttc

SEQ ID NO: 2429332 - DNA, 25 bp, Homo sapien
ctaagatggaaaagtagatgtgctg

SEQ ID NO: 2429333 - DNA, 25 bp, Homo sapien
tactaagatggaaaagtagatgtgc

SEQ ID NO: 2429334 - DNA, 25 bp, Homo sapien
tatactaagatggaaaagtagatgt

SEQ ID NO: 2429335 - DNA, 25 bp, Homo sapien
ttttatactaagatggaaaagtaga

SEQ ID NO: 2429336 - DNA, 25 bp, Homo sapien
tggtgggcagtgatacgccttttca

SEQ ID NO: 2429337 - DNA, 25 bp, Homo sapien
tctaaattgtggtttcctgaagatc

SEQ ID NO: 2429338 - DNA, 25 bp, Homo sapien
caacagcttcaatggcaatctctaa

SEQ ID NO: 2429339 - DNA, 25 bp, Homo sapien
tctcaggtaattactcaacagcttc

SEQ ID NO: 2429340 - DNA, 25 bp, Homo sapien
tttgtcctggtccaatatgaactgg

SEQ ID NO: 2429341 - DNA, 25 bp, Homo sapien
actcatccataaggtttgttcccca

SEQ ID NO: 2429342 - DNA, 25 bp, Homo sapien
cattaatttagctaactacaacaaa

SEQ ID NO: 2429343 - DNA, 25 bp, Homo sapien
tcaatagtcattttgggattgtcct

SEQ ID NO: 2429344 - DNA, 25 bp, Homo sapien
tgtacagagttctgaggactatttt

SEQ ID NO: 2429345 - DNA, 25 bp, Homo sapien
gagaactctgacacaaccattaaat

SEQ ID NO: 2429346 - DNA, 25 bp, Homo sapien
ctgatgagaactctgacacaaccat

SEQ ID NO: 2429347 - DNA, 25 bp, Homo sapien
ttaacacaatgtacagagttctgag

SEQ ID NO: 2429348 - DNA, 25 bp, Homo sapien
tatgtatccacttcaagtcacaaac

SEQ ID NO: 2429349 - DNA, 25 bp, Homo sapien
gtcacaaacttttgcacttaataga

SEQ ID NO: 2429350 - DNA, 25 bp, Homo sapien
gatcttctcttacgatggcttttct

SEQ ID NO: 2429351 - DNA, 25 bp, Homo sapien
acttttgcacttaatagatcttctc

SEQ ID NO: 2429352 - DNA, 25 bp, Homo sapien
tccctttgctcatgaggctgttctt

SEQ ID NO: 2429353 - DNA, 25 bp, Homo sapien
gacaagattttgctgacacccaggc

SEQ ID NO: 2429354 - DNA, 25 bp, Homo sapien
tctactatgtaaatacaaatgcaag

SEQ ID NO: 2429355 - DNA, 25 bp, Homo sapien
ctatgcctgggaaaagtgtactatt

SEQ ID NO: 2429356 - DNA, 25 bp, Homo sapien
attccatgaataccttgaaatcata

SEQ ID NO: 2429357 - DNA, 25 bp, Homo sapien
caaagttttatgtctgtaaacgtgt

SEQ ID NO: 2429358 - DNA, 25 bp, Homo sapien
tctcagatttcagctagtccctcct

SEQ ID NO: 2429359 - DNA, 25 bp, Homo sapien
ttgtactagttaacttctgttccac

SEQ ID NO: 2429360 - DNA, 25 bp, Homo sapien
acagagtagagctcaaatcagattc

SEQ ID NO: 2429361 - DNA, 25 bp, Homo sapien
tccttaaattatcaagtgtgtgctt

SEQ ID NO: 2429362 - DNA, 25 bp, Homo sapien
tagaattttcatgacaggagacctg

SEQ ID NO: 2429363 - DNA, 25 bp, Homo sapien
tttagaattttcatgacaggagacc

SEQ ID NO: 2429364 - DNA, 25 bp, Homo sapien
ttttagaattttcatgacaggagac

SEQ ID NO: 2429365 - DNA, 25 bp, Homo sapien
gaattttcatgacaggagacctgtt

SEQ ID NO: 2429366 - DNA, 25 bp, Homo sapien
taggactcgactgtaaaggttcttg

SEQ ID NO: 2429367 - DNA, 25 bp, Homo sapien
tttaaagcaagtgaatgcgatgatc

SEQ ID NO: 2429368 - DNA, 25 bp, Homo sapien
gacaggtaaaaacagagtagctaga

SEQ ID NO: 2429369 - DNA, 25 bp, Homo sapien
tctacaggcatcagagagtaagcgg

SEQ ID NO: 2429370 - DNA, 25 bp, Homo sapien
ttaacataaccttccaatgcactga

SEQ ID NO: 2429371 - DNA, 25 bp, Homo sapien
cactgcctgaaaaggtttacggtca

SEQ ID NO: 2429372 - DNA, 25 bp, Homo sapien
ggtcaataggacatgaagccagtgt

SEQ ID NO: 2429373 - DNA, 25 bp, Homo sapien
accttccaatgcactgaatttaaac

SEQ ID NO: 2429374 - DNA, 25 bp, Homo sapien
caaatggctccgaaaggttcctcac

SEQ ID NO: 2429375 - DNA, 25 bp, Homo sapien
aatcccattaagatatgctgcccgg

SEQ ID NO: 2429376 - DNA, 25 bp, Homo sapien
gctgcccggttgagaactactagta

SEQ ID NO: 2429377 - DNA, 25 bp, Homo sapien
taaacttgggccactccaaatggct

SEQ ID NO: 2429378 - DNA, 25 bp, Homo sapien
tacatgcatgtatcaccgtgcctag

SEQ ID NO: 2429379 - DNA, 25 bp, Homo sapien
tctttgacacagactcagccatcat

SEQ ID NO: 2429380 - DNA, 25 bp, Homo sapien
gcccagactggcctaattttaagga

SEQ ID NO: 2429381 - DNA, 25 bp, Homo sapien
tatcatgggtcactaaggcctttgc

SEQ ID NO: 2429382 - DNA, 25 bp, Homo sapien
tgtgggaatctcgaacatctatctc

SEQ ID NO: 2429383 - DNA, 25 bp, Homo sapien
tgttcacctgcagtcagcctacatg

SEQ ID NO: 2429384 - DNA, 25 bp, Homo sapien
tggttctaagacacctcacctgtac

SEQ ID NO: 2429385 - DNA, 25 bp, Homo sapien
cattcaggagtgtatccctaaagga

SEQ ID NO: 2429386 - DNA, 25 bp, Homo sapien
catgttctccaagataccagttggg

SEQ ID NO: 2429387 - DNA, 25 bp, Homo sapien
cacatgtgcagtccagatataagtc

SEQ ID NO: 2429388 - DNA, 25 bp, Homo sapien
gagagagccctgatcatctattgca

SEQ ID NO: 2429389 - DNA, 25 bp, Homo sapien
tacattaccgttcacagagagctac

SEQ ID NO: 2429390 - DNA, 25 bp, Homo sapien
gctttagcatactggctctatatac

SEQ ID NO: 2429391 - DNA, 25 bp, Homo sapien
tcctaactgaatagatgataagctt

SEQ ID NO: 2429392 - DNA, 25 bp, Homo sapien
aatgtgtgtcaagacttctctgtcc

SEQ ID NO: 2429393 - DNA, 25 bp, Homo sapien
tgtttttgcccacaatatgggtaaa

SEQ ID NO: 2429394 - DNA, 25 bp, Homo sapien
tatgggccatgaaggctaccacagg

SEQ ID NO: 2429395 - DNA, 25 bp, Homo sapien
caatttgttctagtgtccctaaggg

SEQ ID NO: 2429396 - DNA, 25 bp, Homo sapien
gaggattctgacatacccaaagact

SEQ ID NO: 2429397 - DNA, 25 bp, Homo sapien
gaaactaactttgatctatgtggcc

SEQ ID NO: 2429398 - DNA, 25 bp, Homo sapien
aaaaagaaacatactcctgaatttg

SEQ ID NO: 2429399 - DNA, 25 bp, Homo sapien
ttgtgaaagcacttacatgctttga

SEQ ID NO: 2429400 - DNA, 25 bp, Homo sapien
tttttagccagcattcacttataat

SEQ ID NO: 2429401 - DNA, 25 bp, Homo sapien
ttaatagattgctctcttgttactg

SEQ ID NO: 2429402 - DNA, 25 bp, Homo sapien
taaacagtgatcctacacagagaga

SEQ ID NO: 2429403 - DNA, 25 bp, Homo sapien
gctctggttattccacaaggctgat

SEQ ID NO: 2429404 - DNA, 25 bp, Homo sapien
tcagccagagtcactatacagttac

SEQ ID NO: 2429405 - DNA, 25 bp, Homo sapien
gaaggacactatcgtatctgctctg

SEQ ID NO: 2429406 - DNA, 25 bp, Homo sapien
ataatacaaggaaatttgtccaaag

SEQ ID NO: 2429407 - DNA, 25 bp, Homo sapien
aaggcagtatcaactctttaggtga

SEQ ID NO: 2429408 - DNA, 25 bp, Homo sapien
aaaaagtttgatctgttcttcctat

SEQ ID NO: 2429409 - DNA, 25 bp, Homo sapien
aaaagtttgatctgttcttcctata

SEQ ID NO: 2429410 - DNA, 25 bp, Homo sapien
catacagaagacatgattacagctt

SEQ ID NO: 2429411 - DNA, 25 bp, Homo sapien
atacagaagacatgattacagcttt

SEQ ID NO: 2429412 - DNA, 25 bp, Homo sapien
tagacaattaagacatattgggcat

SEQ ID NO: 2429413 - DNA, 25 bp, Homo sapien
gggcatctgtcagcctcactgtaca

SEQ ID NO: 2429414 - DNA, 25 bp, Homo sapien
gacatattgggcatctgtcagcctc

SEQ ID NO: 2429415 - DNA, 25 bp, Homo sapien
gcctcactgtacaacagaccagtgg

SEQ ID NO: 2429416 - DNA, 25 bp, Homo sapien
cctatacattgagattaggatgatc

SEQ ID NO: 2429417 - DNA, 25 bp, Homo sapien
catcatctaactggtggtgtctgaa

SEQ ID NO: 2429418 - DNA, 25 bp, Homo sapien
gagtttaccaccaatagaccttcac

SEQ ID NO: 2429419 - DNA, 25 bp, Homo sapien
gaagaaatctccagacagcaaggga

SEQ ID NO: 2429420 - DNA, 25 bp, Homo sapien
ctcccatatttagggtacatacagt

SEQ ID NO: 2429421 - DNA, 25 bp, Homo sapien
catacttcttatctcccatatttag

SEQ ID NO: 2429422 - DNA, 25 bp, Homo sapien
atatttagggtacatacagttttct

SEQ ID NO: 2429423 - DNA, 25 bp, Homo sapien
atacttcttatctcccatatttagg

SEQ ID NO: 2429424 - DNA, 25 bp, Homo sapien
ctgattgcttgttagcagttgatca

SEQ ID NO: 2429425 - DNA, 25 bp, Homo sapien
ttgttagcagttgatcaacaaaagc

SEQ ID NO: 2429426 - DNA, 25 bp, Homo sapien
gattgcttgttagcagttgatcaac

SEQ ID NO: 2429427 - DNA, 25 bp, Homo sapien
tgcttgttagcagttgatcaacaaa

SEQ ID NO: 2429428 - DNA, 25 bp, Homo sapien
gaattttcagaacggtcagtgagca

SEQ ID NO: 2429429 - DNA, 25 bp, Homo sapien
tcttggatggctacgtgcactgtca

SEQ ID NO: 2429430 - DNA, 25 bp, Homo sapien
cactggcttgaagagcgttagagac

SEQ ID NO: 2429431 - DNA, 25 bp, Homo sapien
ggtttgaccttctacccagatcagg

SEQ ID NO: 2429432 - DNA, 25 bp, Homo sapien
gacggggacaggcttcgccagctaa

SEQ ID NO: 2429433 - DNA, 25 bp, Homo sapien
gcggttctggcgtggagccccttcc

SEQ ID NO: 2429434 - DNA, 25 bp, Homo sapien
gaaatgggacagagtgcgacagaga

SEQ ID NO: 2429435 - DNA, 25 bp, Homo sapien
ccccacttcgagaggtagctccaac

SEQ ID NO: 2429436 - DNA, 25 bp, Homo sapien
acgtcgcacgggccgcgcgagattc

SEQ ID NO: 2429437 - DNA, 25 bp, Homo sapien
gcacgggccgcgcgagattccgaaa

SEQ ID NO: 2429438 - DNA, 25 bp, Homo sapien
tcctcccagcgcacgacgtcgcacg

SEQ ID NO: 2429439 - DNA, 25 bp, Homo sapien
cagcgcacgacgtcgcacgggccgc

SEQ ID NO: 2429440 - DNA, 25 bp, Homo sapien
tgtggtgttacagggtctctaggac

SEQ ID NO: 2429441 - DNA, 25 bp, Homo sapien
tctctaggacactgactccgctggc

SEQ ID NO: 2429442 - DNA, 25 bp, Homo sapien
ttgcgctgctccgcgcggcttaagc

SEQ ID NO: 2429443 - DNA, 25 bp, Homo sapien
aacatggactccttcgtccgctttg

SEQ ID NO: 2429444 - DNA, 25 bp, Homo sapien
ctgctgtttgagaccgagaagcgtg

SEQ ID NO: 2429445 - DNA, 25 bp, Homo sapien
tggtgggtggagtcacgtcacgcgg

SEQ ID NO: 2429446 - DNA, 25 bp, Homo sapien
gccctgagtgcatgttcgtagtacc

SEQ ID NO: 2429447 - DNA, 25 bp, Homo sapien
tgggaaacgtccttccagcaccgcc

SEQ ID NO: 2429448 - DNA, 25 bp, Homo sapien
gcatgcgcagcgcgtggactttggc

SEQ ID NO: 2429449 - DNA, 25 bp, Homo sapien
cgcatgcgcagcgcgtggactttgg

SEQ ID NO: 2429450 - DNA, 25 bp, Homo sapien
catgcgcagcgcgtggactttggcc

SEQ ID NO: 2429451 - DNA, 25 bp, Homo sapien
tttcagccgcgcgctcacacgtttt

SEQ ID NO: 2429452 - DNA, 25 bp, Homo sapien
tgcattctcgcagactacgttgcgg

SEQ ID NO: 2429453 - DNA, 25 bp, Homo sapien
tgttcgcgcgtgctgcgctctccag

SEQ ID NO: 2429454 - DNA, 25 bp, Homo sapien
acgcctgcccgggatgagtttcctc

SEQ ID NO: 2429455 - DNA, 25 bp, Homo sapien
ttgaagactctagtacactctcagg

SEQ ID NO: 2429456 - DNA, 25 bp, Homo sapien
ttggtcttccatccccgacaccacc

SEQ ID NO: 2429457 - DNA, 25 bp, Homo sapien
cacctcttctacatgtttatcactc

SEQ ID NO: 2429458 - DNA, 25 bp, Homo sapien
accacctcttctacatgtttatcac

SEQ ID NO: 2429459 - DNA, 25 bp, Homo sapien
tctgagagaataaggattctgcata

SEQ ID NO: 2429460 - DNA, 25 bp, Homo sapien
cctgatggttgttgatcaatctgtc

SEQ ID NO: 2429461 - DNA, 25 bp, Homo sapien
gattctgcataaagcctgatggttg

SEQ ID NO: 2429462 - DNA, 25 bp, Homo sapien
caatctgtcttcagtccagccttct

SEQ ID NO: 2429463 - DNA, 25 bp, Homo sapien
agccagaaaccaagaacttcattga

SEQ ID NO: 2429464 - DNA, 25 bp, Homo sapien
gccagaaaccaagaacttcattgac

SEQ ID NO: 2429465 - DNA, 25 bp, Homo sapien
ttaagcaatagccaccaactggagc

SEQ ID NO: 2429466 - DNA, 25 bp, Homo sapien
gagccagaaaccaagaacttcattg

SEQ ID NO: 2429467 - DNA, 25 bp, Homo sapien
aagatcctctgggttacgagtgatg

SEQ ID NO: 2429468 - DNA, 25 bp, Homo sapien
ggttacgagtgatgccagctggcaa

SEQ ID NO: 2429469 - DNA, 25 bp, Homo sapien
gtctcattacccttggaagtgttct

SEQ ID NO: 2429470 - DNA, 25 bp, Homo sapien
tgccagctggcaaagtctcattacc

SEQ ID NO: 2429471 - DNA, 25 bp, Homo sapien
tccctgaacagagttcacccatgtg

SEQ ID NO: 2429472 - DNA, 25 bp, Homo sapien
aatgtgtttgttctggttcaggcca

SEQ ID NO: 2429473 - DNA, 25 bp, Homo sapien
cagggctggaccttcgcatgctgaa

SEQ ID NO: 2429474 - DNA, 25 bp, Homo sapien
agagttcacccatgtggacactggc

SEQ ID NO: 2429475 - DNA, 25 bp, Homo sapien
cttgtatcatgtagttcataagcct

SEQ ID NO: 2429476 - DNA, 25 bp, Homo sapien
gttcataagcctatttatggcactg

SEQ ID NO: 2429477 - DNA, 25 bp, Homo sapien
tgtagttcataagcctatttatggc

SEQ ID NO: 2429478 - DNA, 25 bp, Homo sapien
taagcctatttatggcactgttcaa

SEQ ID NO: 2429479 - DNA, 25 bp, Homo sapien
tgtgtggtggtctgatataaggctt

SEQ ID NO: 2429480 - DNA, 25 bp, Homo sapien
catagaagttggaccctccttacca

SEQ ID NO: 2429481 - DNA, 25 bp, Homo sapien
atagctgaaactgccccatgaggac

SEQ ID NO: 2429482 - DNA, 25 bp, Homo sapien
ggctccttcatcagttaacccactt

SEQ ID NO: 2429483 - DNA, 25 bp, Homo sapien
ttaggatatggattggcgcttctta

SEQ ID NO: 2429484 - DNA, 25 bp, Homo sapien
aggatatggattggcgcttcttatc

SEQ ID NO: 2429485 - DNA, 25 bp, Homo sapien
tggattggcgcttcttatcacccac

SEQ ID NO: 2429486 - DNA, 25 bp, Homo sapien
tatggattggcgcttcttatcaccc

SEQ ID NO: 2429487 - DNA, 25 bp, Homo sapien
taagcaggatacaagcatacttaga

SEQ ID NO: 2429488 - DNA, 25 bp, Homo sapien
ttttgtctgagataagcaggataca

SEQ ID NO: 2429489 - DNA, 25 bp, Homo sapien
ggtccttgatcccattttgtctgag

SEQ ID NO: 2429490 - DNA, 25 bp, Homo sapien
ggatacaagcatacttagattcctc

SEQ ID NO: 2429491 - DNA, 25 bp, Homo sapien
cttcccatctgctctcgctgctgag

SEQ ID NO: 2429492 - DNA, 25 bp, Homo sapien
ttcccatctgctctcgctgctgagg

SEQ ID NO: 2429493 - DNA, 25 bp, Homo sapien
cccatctgctctcgctgctgaggcc

SEQ ID NO: 2429494 - DNA, 25 bp, Homo sapien
catctgctctcgctgctgaggccat

SEQ ID NO: 2429495 - DNA, 25 bp, Homo sapien
aatgaggtccccgatgatgctgatg

SEQ ID NO: 2429496 - DNA, 25 bp, Homo sapien
tccagggtaatagtcttaggtgctc

SEQ ID NO: 2429497 - DNA, 25 bp, Homo sapien
tacagatgggcccagtttcatagcc

SEQ ID NO: 2429498 - DNA, 25 bp, Homo sapien
tatgttgcaccatgagtcctaggaa

SEQ ID NO: 2429499 - DNA, 25 bp, Homo sapien
gcttctttttctcaacagggtctgt

SEQ ID NO: 2429500 - DNA, 25 bp, Homo sapien
ttctttttctcaacagggtctgtaa

SEQ ID NO: 2429501 - DNA, 25 bp, Homo sapien
tgggtgcttctttttctcaacaggg

SEQ ID NO: 2429502 - DNA, 25 bp, Homo sapien
gtgcttctttttctcaacagggtct

SEQ ID NO: 2429503 - DNA, 25 bp, Homo sapien
cttgttttctaacctcccagcttat

SEQ ID NO: 2429504 - DNA, 25 bp, Homo sapien
agtgctgcgcgctggcctcaatgac

SEQ ID NO: 2429505 - DNA, 25 bp, Homo sapien
aacattaaaagtgctgcgcgctggc

SEQ ID NO: 2429506 - DNA, 25 bp, Homo sapien
cctcaatgactggtacattggagaa

SEQ ID NO: 2429507 - DNA, 25 bp, Homo sapien
agatgaaccataggagccaaaagtc

SEQ ID NO: 2429508 - DNA, 25 bp, Homo sapien
atgaaccataggagccaaaagtcag

SEQ ID NO: 2429509 - DNA, 25 bp, Homo sapien
gcaggagatgaaccataggagccaa

SEQ ID NO: 2429510 - DNA, 25 bp, Homo sapien
aggagatgaaccataggagccaaaa

SEQ ID NO: 2429511 - DNA, 25 bp, Homo sapien
gaaccctccggacaacagcagagtt

SEQ ID NO: 2429512 - DNA, 25 bp, Homo sapien
cagcagagttaccagctgagggatg

SEQ ID NO: 2429513 - DNA, 25 bp, Homo sapien
aggtttctgacccatgagaggcccc

SEQ ID NO: 2429514 - DNA, 25 bp, Homo sapien
gatgtccctggaggtttctgaccca

SEQ ID NO: 2429515 - DNA, 25 bp, Homo sapien
tgtattgacacatgaaacccagagg

SEQ ID NO: 2429516 - DNA, 25 bp, Homo sapien
gattctctgtgcaactagctggtgg

SEQ ID NO: 2429517 - DNA, 25 bp, Homo sapien
aattcaatcacatgggatggcccca

SEQ ID NO: 2429518 - DNA, 25 bp, Homo sapien
agttctaagagaccgggaagccaca

SEQ ID NO: 2429519 - DNA, 25 bp, Homo sapien
agtggtgagagattgctgatgtgtg

SEQ ID NO: 2429520 - DNA, 25 bp, Homo sapien
ctgagcagacaacagggatgtttct

SEQ ID NO: 2429521 - DNA, 25 bp, Homo sapien
tcagtggccttcgtcactactcgat

SEQ ID NO: 2429522 - DNA, 25 bp, Homo sapien
atgctgaccaaggagaacaacaccc

SEQ ID NO: 2429523 - DNA, 25 bp, Homo sapien
tcactactcgatgagcaggcccagt

SEQ ID NO: 2429524 - DNA, 25 bp, Homo sapien
tcatagatgaccaagggaatgctga

SEQ ID NO: 2429525 - DNA, 25 bp, Homo sapien
gggtatccttatggcttctctcaaa

SEQ ID NO: 2429526 - DNA, 25 bp, Homo sapien
aactagctaagcagagtagtcctct

SEQ ID NO: 2429527 - DNA, 25 bp, Homo sapien
caacttagcttatcactggcaagca

SEQ ID NO: 2429528 - DNA, 25 bp, Homo sapien
catggtcacctcaagtgtatgtatc

SEQ ID NO: 2429529 - DNA, 25 bp, Homo sapien
ggtgtgtgatattctctgtcctgtg

SEQ ID NO: 2429530 - DNA, 25 bp, Homo sapien
ggacatgaactgatccttcttttat

SEQ ID NO: 2429531 - DNA, 25 bp, Homo sapien
gccctggtgtgtgatattctctgtc

SEQ ID NO: 2429532 - DNA, 25 bp, Homo sapien
tgaactgatccttcttttatggctg

SEQ ID NO: 2429533 - DNA, 25 bp, Homo sapien
atgggatttcactcatgatcggctg

SEQ ID NO: 2429534 - DNA, 25 bp, Homo sapien
gggatttcactcatgatcggctgtt

SEQ ID NO: 2429535 - DNA, 25 bp, Homo sapien
aatgggatttcactcatgatcggct

SEQ ID NO: 2429536 - DNA, 25 bp, Homo sapien
tgggatttcactcatgatcggctgt

SEQ ID NO: 2429537 - DNA, 25 bp, Homo sapien
aactgtttatcaaatttgcctttct

SEQ ID NO: 2429538 - DNA, 25 bp, Homo sapien
tgataacaggatgagctagcctcat

SEQ ID NO: 2429539 - DNA, 25 bp, Homo sapien
tttatcaaatttgcctttctctgtc

SEQ ID NO: 2429540 - DNA, 25 bp, Homo sapien
tatgtagtggccctctttatctctt

SEQ ID NO: 2429541 - DNA, 25 bp, Homo sapien
agaagaggtgcttgttttttggaat

SEQ ID NO: 2429542 - DNA, 25 bp, Homo sapien
ccacagtttttagcctctttgcgat

SEQ ID NO: 2429543 - DNA, 25 bp, Homo sapien
tgaagcttgtgcatgagtctcgaag

SEQ ID NO: 2429544 - DNA, 25 bp, Homo sapien
cttgtgcatgagtctcgaagttctt

SEQ ID NO: 2429545 - DNA, 25 bp, Homo sapien
tgcagcgtcgcaggtcgatcttaga

SEQ ID NO: 2429546 - DNA, 25 bp, Homo sapien
gagtgtaccgtttctccagttacag

SEQ ID NO: 2429547 - DNA, 25 bp, Homo sapien
agcgatgagctctgcccaacttgtg

SEQ ID NO: 2429548 - DNA, 25 bp, Homo sapien
tgtttgaggtatctctcagcccctg

SEQ ID NO: 2429549 - DNA, 25 bp, Homo sapien
tccagaatccagagaacacaagatt

SEQ ID NO: 2429550 - DNA, 25 bp, Homo sapien
cacaagattataagttccttgcgct

SEQ ID NO: 2429551 - DNA, 25 bp, Homo sapien
tgagcatgttcagtgagagcgctgc

SEQ ID NO: 2429552 - DNA, 25 bp, Homo sapien
agccaacagggctggactggaaact

SEQ ID NO: 2429553 - DNA, 25 bp, Homo sapien
agcagccacttcacccctgcttccc

SEQ ID NO: 2429554 - DNA, 25 bp, Homo sapien
tagcagccacttcacccctgcttcc

SEQ ID NO: 2429555 - DNA, 25 bp, Homo sapien
agccacttcacccctgcttccctca

SEQ ID NO: 2429556 - DNA, 25 bp, Homo sapien
gcagccacttcacccctgcttccct

SEQ ID NO: 2429557 - DNA, 25 bp, Homo sapien
gtgcaccacgttcaagatgcccttg

SEQ ID NO: 2429558 - DNA, 25 bp, Homo sapien
tccaagtgcaccacgttcaagatgc

SEQ ID NO: 2429559 - DNA, 25 bp, Homo sapien
caagtgcaccacgttcaagatgccc

SEQ ID NO: 2429560 - DNA, 25 bp, Homo sapien
gcaccacgttcaagatgcccttgaa

SEQ ID NO: 2429561 - DNA, 25 bp, Homo sapien
caagaatcccaatatagaaaggtag

SEQ ID NO: 2429562 - DNA, 25 bp, Homo sapien
aaacaagaatcccaatatagaaagg

SEQ ID NO: 2429563 - DNA, 25 bp, Homo sapien
ctggaaacaagaatcccaatataga

SEQ ID NO: 2429564 - DNA, 25 bp, Homo sapien
caatatagaaaggtagtttttgaat

SEQ ID NO: 2429565 - DNA, 25 bp, Homo sapien
ttatctccatcctggtctgtgattt

SEQ ID NO: 2429566 - DNA, 25 bp, Homo sapien
aattctttgagttcctttatctcca

SEQ ID NO: 2429567 - DNA, 25 bp, Homo sapien
gttcctttatctccatcctggtctg

SEQ ID NO: 2429568 - DNA, 25 bp, Homo sapien
ctttgagttcctttatctccatcct

SEQ ID NO: 2429569 - DNA, 25 bp, Homo sapien
aagttgataacaaccaagagtatgc

SEQ ID NO: 2429570 - DNA, 25 bp, Homo sapien
cacggtatgacgacataaattaaac

SEQ ID NO: 2429571 - DNA, 25 bp, Homo sapien
catggagggtatgaagatcaccaac

SEQ ID NO: 2429572 - DNA, 25 bp, Homo sapien
gagtatgcaggtaaccacggtatga

SEQ ID NO: 2429573 - DNA, 25 bp, Homo sapien
gggcaggctttctctgcaacgggct

SEQ ID NO: 2429574 - DNA, 25 bp, Homo sapien
ctggggcaggctttctctgcaacgg

SEQ ID NO: 2429575 - DNA, 25 bp, Homo sapien
tggggcaggctttctctgcaacggg

SEQ ID NO: 2429576 - DNA, 25 bp, Homo sapien
ggcaggctttctctgcaacgggctc

SEQ ID NO: 2429577 - DNA, 25 bp, Homo sapien
acagccagccgcactgtcaggatga

SEQ ID NO: 2429578 - DNA, 25 bp, Homo sapien
tttgtgaaggaggtcggactgcacg

SEQ ID NO: 2429579 - DNA, 25 bp, Homo sapien
taacaccggcactgtgaggatcaca

SEQ ID NO: 2429580 - DNA, 25 bp, Homo sapien
acagcaacaatgacagccagccgca

SEQ ID NO: 2429581 - DNA, 25 bp, Homo sapien
cagtctcaaggtcctcagcatggaa

SEQ ID NO: 2429582 - DNA, 25 bp, Homo sapien
tacctggccttatgtactactttga

SEQ ID NO: 2429583 - DNA, 25 bp, Homo sapien
caaatgctaatctgtaccatagagc

SEQ ID NO: 2429584 - DNA, 25 bp, Homo sapien
taacaaagctagaatggcagtcaca

SEQ ID NO: 2429585 - DNA, 25 bp, Homo sapien
gccattctctattgctagtgaaaac

SEQ ID NO: 2429586 - DNA, 25 bp, Homo sapien
tttatgaattcattagacaatgcca

SEQ ID NO: 2429587 - DNA, 25 bp, Homo sapien
gcaccttagcaacaccatttttatg

SEQ ID NO: 2429588 - DNA, 25 bp, Homo sapien
tgtacaactctgtatgcaccttagc

SEQ ID NO: 2429589 - DNA, 25 bp, Homo sapien
ggcagtcaagaagtacataacaaac

SEQ ID NO: 2429590 - DNA, 25 bp, Homo sapien
caaacatggcgaaaaaggagatgtt

SEQ ID NO: 2429591 - DNA, 25 bp, Homo sapien
agccaaaaatggcagtcaagaagta

SEQ ID NO: 2429592 - DNA, 25 bp, Homo sapien
tacataacaaacatggcgaaaaagg

SEQ ID NO: 2429593 - DNA, 25 bp, Homo sapien
tacccctggcagttatgccagttga

SEQ ID NO: 2429594 - DNA, 25 bp, Homo sapien
tcaggttagggaagatctgaacagc

SEQ ID NO: 2429595 - DNA, 25 bp, Homo sapien
gagggtgagatctgtggaactacac

SEQ ID NO: 2429596 - DNA, 25 bp, Homo sapien
tctgaacagctgaaattacccctgg

SEQ ID NO: 2429597 - DNA, 25 bp, Homo sapien
atctccacactagctgggcaaagga

SEQ ID NO: 2429598 - DNA, 25 bp, Homo sapien
agaatatcgagttctcatcggaagg

SEQ ID NO: 2429599 - DNA, 25 bp, Homo sapien
acctcaggtgttctgtctctaaagc

SEQ ID NO: 2429600 - DNA, 25 bp, Homo sapien
tcctagctccagagattagtggcag

SEQ ID NO: 2429601 - DNA, 25 bp, Homo sapien
tgtaggtctccagcgcagcaagtgc

SEQ ID NO: 2429602 - DNA, 25 bp, Homo sapien
aggtctccagcgcagcaagtgccca

SEQ ID NO: 2429603 - DNA, 25 bp, Homo sapien
ctccagcgcagcaagtgcccaagag

SEQ ID NO: 2429604 - DNA, 25 bp, Homo sapien
ctgtaggtctccagcgcagcaagtg

SEQ ID NO: 2429605 - DNA, 25 bp, Homo sapien
ggtcaagttcactctggggttggga

SEQ ID NO: 2429606 - DNA, 25 bp, Homo sapien
gtcaagttcactctggggttgggat

SEQ ID NO: 2429607 - DNA, 25 bp, Homo sapien
aggtcaagttcactctggggttggg

SEQ ID NO: 2429608 - DNA, 25 bp, Homo sapien
ctctcaggtcaagttcactctgggg

SEQ ID NO: 2429609 - DNA, 25 bp, Homo sapien
tgacgggtggcaaacaaatgcaaat

SEQ ID NO: 2429610 - DNA, 25 bp, Homo sapien
taagctcactgtaaattggcaggac

SEQ ID NO: 2429611 - DNA, 25 bp, Homo sapien
caatggtgggtaaagcatacacggt

SEQ ID NO: 2429612 - DNA, 25 bp, Homo sapien
caggactgacgggtggcaaacaaat

SEQ ID NO: 2429613 - DNA, 25 bp, Homo sapien
tgttgaattagcacttattgttgaa

SEQ ID NO: 2429614 - DNA, 25 bp, Homo sapien
gaaggtaacatattttggcgtacac

SEQ ID NO: 2429615 - DNA, 25 bp, Homo sapien
gcatttgttgaattagcacttattg

SEQ ID NO: 2429616 - DNA, 25 bp, Homo sapien
ggcgtacacgtgtcagcatttgttg

SEQ ID NO: 2429617 - DNA, 25 bp, Homo sapien
tggaacaatgcagggaatttgaaat

SEQ ID NO: 2429618 - DNA, 25 bp, Homo sapien
aatgcagggaatttgaaatttcttg

SEQ ID NO: 2429619 - DNA, 25 bp, Homo sapien
aacaatgcagggaatttgaaatttc

SEQ ID NO: 2429620 - DNA, 25 bp, Homo sapien
ctggaacaatgcagggaatttgaaa

SEQ ID NO: 2429621 - DNA, 25 bp, Homo sapien
ctcaaggaaaatccactagtatagc

SEQ ID NO: 2429622 - DNA, 25 bp, Homo sapien
cagctcaaggaaaatccactagtat

SEQ ID NO: 2429623 - DNA, 25 bp, Homo sapien
tcaaggaaaatccactagtatagcc

SEQ ID NO: 2429624 - DNA, 25 bp, Homo sapien
gctcaaggaaaatccactagtatag

SEQ ID NO: 2429625 - DNA, 25 bp, Homo sapien
tgttttgattccaactctccctggc

SEQ ID NO: 2429626 - DNA, 25 bp, Homo sapien
gttttgattccaactctccctggca

SEQ ID NO: 2429627 - DNA, 25 bp, Homo sapien
tttgattccaactctccctggcaca

SEQ ID NO: 2429628 - DNA, 25 bp, Homo sapien
gtgttttgattccaactctccctgg

SEQ ID NO: 2429629 - DNA, 25 bp, Homo sapien
aagttcttcaagagacacagaggga

SEQ ID NO: 2429630 - DNA, 25 bp, Homo sapien
actatcaccaccagaacgcggccat

SEQ ID NO: 2429631 - DNA, 25 bp, Homo sapien
gaattatgccaaaggtaactatcac

SEQ ID NO: 2429632 - DNA, 25 bp, Homo sapien
gacacagagggagaattatgccaaa

SEQ ID NO: 2429633 - DNA, 25 bp, Homo sapien
tgaccttgaatcctgagaacactag

SEQ ID NO: 2429634 - DNA, 25 bp, Homo sapien
tgctgggctagtatcagtgagaaac

SEQ ID NO: 2429635 - DNA, 25 bp, Homo sapien
gagaaacaagtcactacaggtagac

SEQ ID NO: 2429636 - DNA, 25 bp, Homo sapien
gactctggcttctacgattctccct

SEQ ID NO: 2429637 - DNA, 25 bp, Homo sapien
tggcagagggtagttcattttttac

SEQ ID NO: 2429638 - DNA, 25 bp, Homo sapien
ttttacgatgaagaggtagctcagc

SEQ ID NO: 2429639 - DNA, 25 bp, Homo sapien
gcagagggtagttcattttttacga

SEQ ID NO: 2429640 - DNA, 25 bp, Homo sapien
tcattttttacgatgaagaggtagc

SEQ ID NO: 2429641 - DNA, 25 bp, Homo sapien
tcaagttatgtaaagaaaagcatgt

SEQ ID NO: 2429642 - DNA, 25 bp, Homo sapien
tttcaagttatgtaaagaaaagcat

SEQ ID NO: 2429643 - DNA, 25 bp, Homo sapien
tgtaaagaaaagcatgttcttttta

SEQ ID NO: 2429644 - DNA, 25 bp, Homo sapien
aagttatgtaaagaaaagcatgttc

SEQ ID NO: 2429645 - DNA, 25 bp, Homo sapien
gaggtggctccaaagattacgaact

SEQ ID NO: 2429646 - DNA, 25 bp, Homo sapien
gattacgaacttccctgtggtgcca

SEQ ID NO: 2429647 - DNA, 25 bp, Homo sapien
tgccaaagacttgttcccccagctt

SEQ ID NO: 2429648 - DNA, 25 bp, Homo sapien
tgttctgtagagaggtggctccaaa

SEQ ID NO: 2429649 - DNA, 25 bp, Homo sapien
actgttccccaagttactatgtgcc

SEQ ID NO: 2429650 - DNA, 25 bp, Homo sapien
tcaagttggctaccagagcattaca

SEQ ID NO: 2429651 - DNA, 25 bp, Homo sapien
ttaaaatgtgagatgcaaccatcat

SEQ ID NO: 2429652 - DNA, 25 bp, Homo sapien
gagaacacaagaaatgacagggttc

SEQ ID NO: 2429653 - DNA, 25 bp, Homo sapien
cagatcaataggaggtttattgaat

SEQ ID NO: 2429654 - DNA, 25 bp, Homo sapien
caataggaggtttattgaatatata

SEQ ID NO: 2429655 - DNA, 25 bp, Homo sapien
gaacagatcaataggaggtttattg

SEQ ID NO: 2429656 - DNA, 25 bp, Homo sapien
taggaggtttattgaatatatagac

SEQ ID NO: 2429657 - DNA, 25 bp, Homo sapien
acttatgttcatctttgaggagaag

SEQ ID NO: 2429658 - DNA, 25 bp, Homo sapien
caattgataatagggctgccaaggt

SEQ ID NO: 2429659 - DNA, 25 bp, Homo sapien
caaggtgttgatatttcagacttat

SEQ ID NO: 2429660 - DNA, 25 bp, Homo sapien
gggactacagatcagcaattgataa

SEQ ID NO: 2429661 - DNA, 25 bp, Homo sapien
tagaaggtttaagtgagggaccaga

SEQ ID NO: 2429662 - DNA, 25 bp, Homo sapien
ttagtgtcgccgtgtctgtgtggtt

SEQ ID NO: 2429663 - DNA, 25 bp, Homo sapien
ggaccagaggctctcagtgaggctc

SEQ ID NO: 2429664 - DNA, 25 bp, Homo sapien
ctcgaggacaggaatagtggtttct

SEQ ID NO: 2429665 - DNA, 25 bp, Homo sapien
tactgtgataactccaacctggcct

SEQ ID NO: 2429666 - DNA, 25 bp, Homo sapien
gagaaggcattctaccaatcatgga

SEQ ID NO: 2429667 - DNA, 25 bp, Homo sapien
tgaggcaactcagcataaataggac

SEQ ID NO: 2429668 - DNA, 25 bp, Homo sapien
tgctgacccctgatatagatgcaga

SEQ ID NO: 2429669 - DNA, 25 bp, Homo sapien
tcctgtgttggccaatgtgagtctg

SEQ ID NO: 2429670 - DNA, 25 bp, Homo sapien
cagcctcagggagacactaaggagc

SEQ ID NO: 2429671 - DNA, 25 bp, Homo sapien
gagacactaaggagccttcccagct

SEQ ID NO: 2429672 - DNA, 25 bp, Homo sapien
gaagcctggacagtcttggactcct

SEQ ID NO: 2429673 - DNA, 25 bp, Homo sapien
ggttttacaagagtcacagagtgaa

SEQ ID NO: 2429674 - DNA, 25 bp, Homo sapien
cagatgaaatatcttgatcctgcca

SEQ ID NO: 2429675 - DNA, 25 bp, Homo sapien
gatcctgccaactgcttcttggctt

SEQ ID NO: 2429676 - DNA, 25 bp, Homo sapien
tgtaggagcagctggttttacaaga

SEQ ID NO: 2429677 - DNA, 25 bp, Homo sapien
aactgcaggatactgggaactaaga

SEQ ID NO: 2429678 - DNA, 25 bp, Homo sapien
gaactaagagatttgacaagtttcc

SEQ ID NO: 2429679 - DNA, 25 bp, Homo sapien
agaaaagattgcacccaatgcctga

SEQ ID NO: 2429680 - DNA, 25 bp, Homo sapien
caaggcacgtcattgtgaaactgca

SEQ ID NO: 2429681 - DNA, 25 bp, Homo sapien
taatgcctaacacagggcagcatgg

SEQ ID NO: 2429682 - DNA, 25 bp, Homo sapien
tcaaaaggacatggcaacaaggact

SEQ ID NO: 2429683 - DNA, 25 bp, Homo sapien
taattgccctttgatgtagtacacg

SEQ ID NO: 2429684 - DNA, 25 bp, Homo sapien
aacaaggactatctagccaggccaa

SEQ ID NO: 2429685 - DNA, 25 bp, Homo sapien
aatcccactgcccataatggcgttg

SEQ ID NO: 2429686 - DNA, 25 bp, Homo sapien
cagggcaaaggcgagtcccaaaatc

SEQ ID NO: 2429687 - DNA, 25 bp, Homo sapien
aaaggcgagtcccaaaatcccactg

SEQ ID NO: 2429688 - DNA, 25 bp, Homo sapien
aagtaggattccagtgtttgccagg

SEQ ID NO: 2429689 - DNA, 25 bp, Homo sapien
agacttcttctactttcacgatcag

SEQ ID NO: 2429690 - DNA, 25 bp, Homo sapien
gctgtttgtgagacttcttctactt

SEQ ID NO: 2429691 - DNA, 25 bp, Homo sapien
tggctgtttgtgagacttcttctac

SEQ ID NO: 2429692 - DNA, 25 bp, Homo sapien
acttcttctactttcacgatcagaa

SEQ ID NO: 2429693 - DNA, 25 bp, Homo sapien
atatgcaagtcactggaacaggcac

SEQ ID NO: 2429694 - DNA, 25 bp, Homo sapien
ggctacaggagttcagactaggaaa

SEQ ID NO: 2429695 - DNA, 25 bp, Homo sapien
cttgagatgggaacaattcagccag

SEQ ID NO: 2429696 - DNA, 25 bp, Homo sapien
gtgatgcaaacaggaggctacagga

SEQ ID NO: 2429697 - DNA, 25 bp, Homo sapien
gacactgcttttggctaggacctgc

SEQ ID NO: 2429698 - DNA, 25 bp, Homo sapien
gtaacaccagtataggaacgtcagg

SEQ ID NO: 2429699 - DNA, 25 bp, Homo sapien
ggatcatcagttggtataagctata

SEQ ID NO: 2429700 - DNA, 25 bp, Homo sapien
cattcggacaaggagagaccatacc

SEQ ID NO: 2429701 - DNA, 25 bp, Homo sapien
gggtcaagcagcgtatcacaagttt

SEQ ID NO: 2429702 - DNA, 25 bp, Homo sapien
taaaagatgcacttgcttgttaaaa

SEQ ID NO: 2429703 - DNA, 25 bp, Homo sapien
gtcaagcagcgtatcacaagtttct

SEQ ID NO: 2429704 - DNA, 25 bp, Homo sapien
caagcagcgtatcacaagtttctgc

SEQ ID NO: 2429705 - DNA, 25 bp, Homo sapien
gggtgaccctgaacagacaaagcct

SEQ ID NO: 2429706 - DNA, 25 bp, Homo sapien
taaccattaggtagccaattgctct

SEQ ID NO: 2429707 - DNA, 25 bp, Homo sapien
caaactccacaatgggtgattgggt

SEQ ID NO: 2429708 - DNA, 25 bp, Homo sapien
actaaggtacattgtgaagagaggc

SEQ ID NO: 2429709 - DNA, 25 bp, Homo sapien
taacacagattcattagcaaatgca

SEQ ID NO: 2429710 - DNA, 25 bp, Homo sapien
tctattatagttcctcacagagtca

SEQ ID NO: 2429711 - DNA, 25 bp, Homo sapien
gactgtagtacacatttggatatgg

SEQ ID NO: 2429712 - DNA, 25 bp, Homo sapien
tgcttataaggatgacacacttgta

SEQ ID NO: 2429713 - DNA, 25 bp, Homo sapien
gaaatcattggagtcattgctaatg

SEQ ID NO: 2429714 - DNA, 25 bp, Homo sapien
gctaatgttatcatcctcgggcact

SEQ ID NO: 2429715 - DNA, 25 bp, Homo sapien
tctacttcggtgaaatcattggagt

SEQ ID NO: 2429716 - DNA, 25 bp, Homo sapien
tgaccattttctacttcggtgaaat

SEQ ID NO: 2429717 - DNA, 25 bp, Homo sapien
gcaactcagttaattcgagtccact

SEQ ID NO: 2429718 - DNA, 25 bp, Homo sapien
gttttgcaactcagttaattcgagt

SEQ ID NO: 2429719 - DNA, 25 bp, Homo sapien
cagttaattcgagtccacttttgaa

SEQ ID NO: 2429720 - DNA, 25 bp, Homo sapien
ctcagttaattcgagtccacttttg

SEQ ID NO: 2429721 - DNA, 25 bp, Homo sapien
gataccaaaatggaagcttgacacc

SEQ ID NO: 2429722 - DNA, 25 bp, Homo sapien
gtagataccaaaatggaagcttgac

SEQ ID NO: 2429723 - DNA, 25 bp, Homo sapien
ataccaaaatggaagcttgacaccc

SEQ ID NO: 2429724 - DNA, 25 bp, Homo sapien
tagataccaaaatggaagcttgaca

SEQ ID NO: 2429725 - DNA, 25 bp, Homo sapien
tttctatgcacatagatatagtgcc

SEQ ID NO: 2429726 - DNA, 25 bp, Homo sapien
ctctatatatattgttgtatggcct

SEQ ID NO: 2429727 - DNA, 25 bp, Homo sapien
gccttccagggtttttctatgcaca

SEQ ID NO: 2429728 - DNA, 25 bp, Homo sapien
tcagcaagcagagacgatcactcta

SEQ ID NO: 2429729 - DNA, 25 bp, Homo sapien
tactgcatggcgttatagatcaaag

SEQ ID NO: 2429730 - DNA, 25 bp, Homo sapien
gagcctatttaaccaagcaagacca

SEQ ID NO: 2429731 - DNA, 25 bp, Homo sapien
ttctgatccttaccacaaccttgtg

SEQ ID NO: 2429732 - DNA, 25 bp, Homo sapien
tgtgaggtacttaaggaaggcatca

SEQ ID NO: 2429733 - DNA, 25 bp, Homo sapien
tctagcatgcacttgagataatggc

SEQ ID NO: 2429734 - DNA, 25 bp, Homo sapien
tgttaattattcctagaggcccagc

SEQ ID NO: 2429735 - DNA, 25 bp, Homo sapien
ggtagccctggagccaacagttgtg

SEQ ID NO: 2429736 - DNA, 25 bp, Homo sapien
gagcaaggcatccactttactggta

SEQ ID NO: 2429737 - DNA, 25 bp, Homo sapien
ctgggaatttccctcgtcaggccaa

SEQ ID NO: 2429738 - DNA, 25 bp, Homo sapien
gaatttccctcgtcaggccaaggga

SEQ ID NO: 2429739 - DNA, 25 bp, Homo sapien
tagcattggtgattttagattgttt

SEQ ID NO: 2429740 - DNA, 25 bp, Homo sapien
tgatctctgtcacggtccgttcaaa

SEQ ID NO: 2429741 - DNA, 25 bp, Homo sapien
tacataattgctacaagctgtaaat

SEQ ID NO: 2429742 - DNA, 25 bp, Homo sapien
ctggctggctgcatcacagccctgg

SEQ ID NO: 2429743 - DNA, 25 bp, Homo sapien
ctccctgagacctggctggctgcat

SEQ ID NO: 2429744 - DNA, 25 bp, Homo sapien
ctgggttccctctccctgagacctg

SEQ ID NO: 2429745 - DNA, 25 bp, Homo sapien
tggctggctgcatcacagccctggg

SEQ ID NO: 2429746 - DNA, 25 bp, Homo sapien
tccttcttcctgttccttccgctgg

SEQ ID NO: 2429747 - DNA, 25 bp, Homo sapien
ttcttcctgttccttccgctggcct

SEQ ID NO: 2429748 - DNA, 25 bp, Homo sapien
cttcctgttccttccgctggccttc

SEQ ID NO: 2429749 - DNA, 25 bp, Homo sapien
ccttcttcctgttccttccgctggc

SEQ ID NO: 2429750 - DNA, 25 bp, Homo sapien
tctagcagaggcgtcttttttcact

SEQ ID NO: 2429751 - DNA, 25 bp, Homo sapien
gagaaagtacgtgatcctggcggca

SEQ ID NO: 2429752 - DNA, 25 bp, Homo sapien
tctaacagagaacgagggtttgtac

SEQ ID NO: 2429753 - DNA, 25 bp, Homo sapien
caccgcggattcgtccgagaaagta

SEQ ID NO: 2429754 - DNA, 25 bp, Homo sapien
aatggaaccagatctggtaccacac

SEQ ID NO: 2429755 - DNA, 25 bp, Homo sapien
tccctccagacgtgcgtggttcctg

SEQ ID NO: 2429756 - DNA, 25 bp, Homo sapien
cagcccacgcaaaggtgaactcggg

SEQ ID NO: 2429757 - DNA, 25 bp, Homo sapien
cctggctctcgtaaaaatggaacca

SEQ ID NO: 2429758 - DNA, 25 bp, Homo sapien
tctgctttcacgcccgcagagatga

SEQ ID NO: 2429759 - DNA, 25 bp, Homo sapien
agcatcgggcacagccgagctctct

SEQ ID NO: 2429760 - DNA, 25 bp, Homo sapien
ttcacgcccgcagagatgatttcta

SEQ ID NO: 2429761 - DNA, 25 bp, Homo sapien
ctaaaagcaacatccgaaagcatcg

SEQ ID NO: 2429762 - DNA, 25 bp, Homo sapien
tccgacatctaaatctccccttgcc

SEQ ID NO: 2429763 - DNA, 25 bp, Homo sapien
tcctccgacatctaaatctcccctt

SEQ ID NO: 2429764 - DNA, 25 bp, Homo sapien
aaatctccccttgccgctcgcccag

SEQ ID NO: 2429765 - DNA, 25 bp, Homo sapien
gacatctaaatctccccttgccgct

SEQ ID NO: 2429766 - DNA, 25 bp, Homo sapien
atgtggaggtgtccgcccttccggg

SEQ ID NO: 2429767 - DNA, 25 bp, Homo sapien
ttgatgtcctttgtgtcaaggtctg

SEQ ID NO: 2429768 - DNA, 25 bp, Homo sapien
ttttaccctcggcagtttgatgtcc

SEQ ID NO: 2429769 - DNA, 25 bp, Homo sapien
gaaaggtggcaaaaggcgatgtgga

SEQ ID NO: 2429770 - DNA, 25 bp, Homo sapien
atgtggcccccgtcagtaagggttg

SEQ ID NO: 2429771 - DNA, 25 bp, Homo sapien
cctggcggatttcggaggaaggtga

SEQ ID NO: 2429772 - DNA, 25 bp, Homo sapien
agggagcttggcgtggcctggcgga

SEQ ID NO: 2429773 - DNA, 25 bp, Homo sapien
cgtggcctggcggatttcggaggaa

SEQ ID NO: 2429774 - DNA, 25 bp, Homo sapien
ccgccccagtccgcgctcgcctggc

SEQ ID NO: 2429775 - DNA, 25 bp, Homo sapien
ctggcggagtggcgtggccgcccca

SEQ ID NO: 2429776 - DNA, 25 bp, Homo sapien
gccccagtccgcgctcgcctggctc

SEQ ID NO: 2429777 - DNA, 25 bp, Homo sapien
tggccgccccagtccgcgctcgcct

SEQ ID NO: 2429778 - DNA, 25 bp, Homo sapien
ccactcacactctgctcgccggcct

SEQ ID NO: 2429779 - DNA, 25 bp, Homo sapien
ccgggccgattgcatcagaatctcc

SEQ ID NO: 2429780 - DNA, 25 bp, Homo sapien
ctttccgggccgattgcatcagaat

SEQ ID NO: 2429781 - DNA, 25 bp, Homo sapien
tccgggccgattgcatcagaatctc

SEQ ID NO: 2429782 - DNA, 25 bp, Homo sapien
tgtgcgcccgctctttaaccaaagc

SEQ ID NO: 2429783 - DNA, 25 bp, Homo sapien
aagctgcgtgtcagtgagccgtgcc

SEQ ID NO: 2429784 - DNA, 25 bp, Homo sapien
cgctgagggtcacgaatcggagtca

SEQ ID NO: 2429785 - DNA, 25 bp, Homo sapien
tggtttaacgcggacaggccattcc

SEQ ID NO: 2429786 - DNA, 25 bp, Homo sapien
cacatggtgtcactgctggcggccg

SEQ ID NO: 2429787 - DNA, 25 bp, Homo sapien
atggtgtcactgctggcggccgcac

SEQ ID NO: 2429788 - DNA, 25 bp, Homo sapien
tcacatggtgtcactgctggcggcc

SEQ ID NO: 2429789 - DNA, 25 bp, Homo sapien
acatggtgtcactgctggcggccgc

SEQ ID NO: 2429790 - DNA, 25 bp, Homo sapien
cgcgtgtgcccggcgcactgaagct

SEQ ID NO: 2429791 - DNA, 25 bp, Homo sapien
agctctctgacgatgcagcgaccgc

SEQ ID NO: 2429792 - DNA, 25 bp, Homo sapien
tctgacgatgcagcgaccgcggctg

SEQ ID NO: 2429793 - DNA, 25 bp, Homo sapien
cactgaagctggcaccgggagcaga

SEQ ID NO: 2429794 - DNA, 25 bp, Homo sapien
tgttcggaacccagctgcggctgca

SEQ ID NO: 2429795 - DNA, 25 bp, Homo sapien
gccgaaggagcgagggagttgcatt

SEQ ID NO: 2429796 - DNA, 25 bp, Homo sapien
tggagaatgagagcccttagggatg

SEQ ID NO: 2429797 - DNA, 25 bp, Homo sapien
tgcattttgggtacgccagagcccc

SEQ ID NO: 2429798 - DNA, 25 bp, Homo sapien
ctggtgcgtccaggttaacggagct

SEQ ID NO: 2429799 - DNA, 25 bp, Homo sapien
aaagcaccggcctaggcgcaaagag

SEQ ID NO: 2429800 - DNA, 25 bp, Homo sapien
cttcctgagatctgccctgtggagc

SEQ ID NO: 2429801 - DNA, 25 bp, Homo sapien
tgtgaggtgaaccagaaggatttgc

SEQ ID NO: 2429802 - DNA, 25 bp, Homo sapien
tcccgcttactctttgtttcagaca

SEQ ID NO: 2429803 - DNA, 25 bp, Homo sapien
ccgcttactctttgtttcagacaca

SEQ ID NO: 2429804 - DNA, 25 bp, Homo sapien
cccgcttactctttgtttcagacac

SEQ ID NO: 2429805 - DNA, 25 bp, Homo sapien
tttcccgcttactctttgtttcaga

SEQ ID NO: 2429806 - DNA, 25 bp, Homo sapien
aatatgtgttttcctgcactggtgt

SEQ ID NO: 2429807 - DNA, 25 bp, Homo sapien
gctgtgcgcttacagagaatatgtg

SEQ ID NO: 2429808 - DNA, 25 bp, Homo sapien
ctgggttgcccagtaggacagctgc

SEQ ID NO: 2429809 - DNA, 25 bp, Homo sapien
gggccactaccagctgtgcgcttac

SEQ ID NO: 2429810 - DNA, 25 bp, Homo sapien
taagaatttttgggtaataagatca

SEQ ID NO: 2429811 - DNA, 25 bp, Homo sapien
tggtttgataccagcagtcttcttg

SEQ ID NO: 2429812 - DNA, 25 bp, Homo sapien
ttttaacgatgatgaaaaagtagga

SEQ ID NO: 2429813 - DNA, 25 bp, Homo sapien
tctgtgaaggactatcagtggaaaa

SEQ ID NO: 2429814 - DNA, 25 bp, Homo sapien
tcatgctgaaacagctgttaagccc

SEQ ID NO: 2429815 - DNA, 25 bp, Homo sapien
tgaaacagctgttaagcccacacct

SEQ ID NO: 2429816 - DNA, 25 bp, Homo sapien
aacagctgttaagcccacacctcca

SEQ ID NO: 2429817 - DNA, 25 bp, Homo sapien
tgctgaaacagctgttaagcccaca

SEQ ID NO: 2429818 - DNA, 25 bp, Homo sapien
tgtggtttttgcttccagaatcgtc

SEQ ID NO: 2429819 - DNA, 25 bp, Homo sapien
gaatcgtctggataagtgtcagcat

SEQ ID NO: 2429820 - DNA, 25 bp, Homo sapien
ttgcttccagaatcgtctggataag

SEQ ID NO: 2429821 - DNA, 25 bp, Homo sapien
tccagaatcgtctggataagtgtca

SEQ ID NO: 2429822 - DNA, 25 bp, Homo sapien
aggagcaatgcttgcttcatggctt

SEQ ID NO: 2429823 - DNA, 25 bp, Homo sapien
gaggaaggagcaatgcttgcttcat

SEQ ID NO: 2429824 - DNA, 25 bp, Homo sapien
gaaggagcaatgcttgcttcatggc

SEQ ID NO: 2429825 - DNA, 25 bp, Homo sapien
ggaaggagcaatgcttgcttcatgg

SEQ ID NO: 2429826 - DNA, 25 bp, Homo sapien
ggtgataaagaggaatcttcaaaag

SEQ ID NO: 2429827 - DNA, 25 bp, Homo sapien
caacagtaagtagaagtgttcttcc

SEQ ID NO: 2429828 - DNA, 25 bp, Homo sapien
tgccgcctctttcaccagctgttag

SEQ ID NO: 2429829 - DNA, 25 bp, Homo sapien
tatgtttgtgagagccttaagtgcg

SEQ ID NO: 2429830 - DNA, 25 bp, Homo sapien
gcttgtcaaggcatattttttccat

SEQ ID NO: 2429831 - DNA, 25 bp, Homo sapien
tcatcaggtctgctcctataccatt

SEQ ID NO: 2429832 - DNA, 25 bp, Homo sapien
acagcctgtgcttctattctcacta

SEQ ID NO: 2429833 - DNA, 25 bp, Homo sapien
catttgtagttcaccagtgatgtac

SEQ ID NO: 2429834 - DNA, 25 bp, Homo sapien
gtttcattgaaacggtgtagcactc

SEQ ID NO: 2429835 - DNA, 25 bp, Homo sapien
tatacacaaagttaatacacccagg

SEQ ID NO: 2429836 - DNA, 25 bp, Homo sapien
ttgccaacaagccatactagaattg

SEQ ID NO: 2429837 - DNA, 25 bp, Homo sapien
tgttggcctctaacagtacagtggg

SEQ ID NO: 2429838 - DNA, 25 bp, Homo sapien
gaaacttacaggaatatatacactt

SEQ ID NO: 2429839 - DNA, 25 bp, Homo sapien
tatatacacttgaacccaagaccca

SEQ ID NO: 2429840 - DNA, 25 bp, Homo sapien
ttcaatattcaattttctgtacagg

SEQ ID NO: 2429841 - DNA, 25 bp, Homo sapien
tgtacaggtacttttgggacaattc

SEQ ID NO: 2429842 - DNA, 25 bp, Homo sapien
cctcaaggtagacaagatagctccc

SEQ ID NO: 2429843 - DNA, 25 bp, Homo sapien
taactgaaacatccacggaagacag

SEQ ID NO: 2429844 - DNA, 25 bp, Homo sapien
tactgaagactgctcattaatggga

SEQ ID NO: 2429845 - DNA, 25 bp, Homo sapien
tagccagaggattggaggagcttcc

SEQ ID NO: 2429846 - DNA, 25 bp, Homo sapien
cctggcaggtcttagatacaaagtc

SEQ ID NO: 2429847 - DNA, 25 bp, Homo sapien
ctggcaggtcttagatacaaagtca

SEQ ID NO: 2429848 - DNA, 25 bp, Homo sapien
ggcaggtcttagatacaaagtcagc

SEQ ID NO: 2429849 - DNA, 25 bp, Homo sapien
tggcaggtcttagatacaaagtcag

SEQ ID NO: 2429850 - DNA, 25 bp, Homo sapien
ggagtgcctaaagcccaattaaatg

SEQ ID NO: 2429851 - DNA, 25 bp, Homo sapien
gaccaacggtttcacccaatgtagc

SEQ ID NO: 2429852 - DNA, 25 bp, Homo sapien
gcagtgccgtagaatctgtcttccc

SEQ ID NO: 2429853 - DNA, 25 bp, Homo sapien
caactagaggtgaggttctgcattc

SEQ ID NO: 2429854 - DNA, 25 bp, Homo sapien
ttactgcatgagaaacccagtggcc

SEQ ID NO: 2429855 - DNA, 25 bp, Homo sapien
cagtggcctacgcaaagagaactta

SEQ ID NO: 2429856 - DNA, 25 bp, Homo sapien
tatgcctgatgagcgaagtaccaca

SEQ ID NO: 2429857 - DNA, 25 bp, Homo sapien
gaagggttgacatgcagttggacca

SEQ ID NO: 2429858 - DNA, 25 bp, Homo sapien
aaagttcacttattctgcactcaga

SEQ ID NO: 2429859 - DNA, 25 bp, Homo sapien
tcagaagaaccagcgaggaatctgc

SEQ ID NO: 2429860 - DNA, 25 bp, Homo sapien
ccgagactcgtggttttgttgttca

SEQ ID NO: 2429861 - DNA, 25 bp, Homo sapien
tgagtttactcaacactggcatcag

SEQ ID NO: 2429862 - DNA, 25 bp, Homo sapien
caccagtacaccacttaacaggaag

SEQ ID NO: 2429863 - DNA, 25 bp, Homo sapien
cacctccaggtgcattgtgtaccca

SEQ ID NO: 2429864 - DNA, 25 bp, Homo sapien
gccatgcttccggtcatcaccagta

SEQ ID NO: 2429865 - DNA, 25 bp, Homo sapien
caatccaaaacaatcaaggccatgc

SEQ ID NO: 2429866 - DNA, 25 bp, Homo sapien
actgcttcatatagaactggactgg

SEQ ID NO: 2429867 - DNA, 25 bp, Homo sapien
gagagcttcgctctgaagatggtca

SEQ ID NO: 2429868 - DNA, 25 bp, Homo sapien
taaacaccatgaagagacggcctcc

SEQ ID NO: 2429869 - DNA, 25 bp, Homo sapien
cacagtaggcagtccagtgaaaact

SEQ ID NO: 2429870 - DNA, 25 bp, Homo sapien
caccaacttgatatagaaggcagaa

SEQ ID NO: 2429871 - DNA, 25 bp, Homo sapien
tcttgaggattcaatgaaccactcg

SEQ ID NO: 2429872 - DNA, 25 bp, Homo sapien
gaggattcaatgaaccactcgtcat

SEQ ID NO: 2429873 - DNA, 25 bp, Homo sapien
gattcaatgaaccactcgtcattca

SEQ ID NO: 2429874 - DNA, 25 bp, Homo sapien
tgtttcttgaggattcaatgaacca

SEQ ID NO: 2429875 - DNA, 25 bp, Homo sapien
cactgtaatgagactatgacgccac

SEQ ID NO: 2429876 - DNA, 25 bp, Homo sapien
tggtaaatgccaagatagacactgt

SEQ ID NO: 2429877 - DNA, 25 bp, Homo sapien
cctaatagttgggacaaagatgaca

SEQ ID NO: 2429878 - DNA, 25 bp, Homo sapien
tgacgccaccaactgaaatcttttg

SEQ ID NO: 2429879 - DNA, 25 bp, Homo sapien
agagtaggtatgaagcaattctgac

SEQ ID NO: 2429880 - DNA, 25 bp, Homo sapien
agccattaacacagccagacggaca

SEQ ID NO: 2429881 - DNA, 25 bp, Homo sapien
tcagttcccaagatagaagagtagg

SEQ ID NO: 2429882 - DNA, 25 bp, Homo sapien
aaaataactactggtactgtcaggg

SEQ ID NO: 2429883 - DNA, 25 bp, Homo sapien
gagttaagcagctaaatctcctggc

SEQ ID NO: 2429884 - DNA, 25 bp, Homo sapien
gaggagacaggcaatatgaactcag

SEQ ID NO: 2429885 - DNA, 25 bp, Homo sapien
ctcagaggctggcatatcatacaaa

SEQ ID NO: 2429886 - DNA, 25 bp, Homo sapien
caaaacgactataaactaagaggct

SEQ ID NO: 2429887 - DNA, 25 bp, Homo sapien
cggcaagcagatacatgagaaacat

SEQ ID NO: 2429888 - DNA, 25 bp, Homo sapien
gcagatacatgagaaacatagcaaa

SEQ ID NO: 2429889 - DNA, 25 bp, Homo sapien
caagcagatacatgagaaacatagc

SEQ ID NO: 2429890 - DNA, 25 bp, Homo sapien
gggcggcaagcagatacatgagaaa

SEQ ID NO: 2429891 - DNA, 25 bp, Homo sapien
cagcagttacagcaattgtctaata

SEQ ID NO: 2429892 - DNA, 25 bp, Homo sapien
ctatgtaattcaagagaaaattcaa

SEQ ID NO: 2429893 - DNA, 25 bp, Homo sapien
gcagttacagcaattgtctaatatt

SEQ ID NO: 2429894 - DNA, 25 bp, Homo sapien
caaatatatatttcagcagcagtta

SEQ ID NO: 2429895 - DNA, 25 bp, Homo sapien
tcagaattggcacagcatagacagt

SEQ ID NO: 2429896 - DNA, 25 bp, Homo sapien
gacaaatgaaaagatcagaattggc

SEQ ID NO: 2429897 - DNA, 25 bp, Homo sapien
aaagatcagaattggcacagcatag

SEQ ID NO: 2429898 - DNA, 25 bp, Homo sapien
tgaaaagatcagaattggcacagca

SEQ ID NO: 2429899 - DNA, 25 bp, Homo sapien
tgtgtcaattattagcaccatatga

SEQ ID NO: 2429900 - DNA, 25 bp, Homo sapien
ttaatctgatgtaacgaactcatgc

SEQ ID NO: 2429901 - DNA, 25 bp, Homo sapien
gaactcatgctgtcacatttccgca

SEQ ID NO: 2429902 - DNA, 25 bp, Homo sapien
catgaagtatgatcaatatcctcac

SEQ ID NO: 2429903 - DNA, 25 bp, Homo sapien
tgagttgaaaataaaatagtgaggt

SEQ ID NO: 2429904 - DNA, 25 bp, Homo sapien
tgtgagttgaaaataaaatagtgag

SEQ ID NO: 2429905 - DNA, 25 bp, Homo sapien
gtgagttgaaaataaaatagtgagg

SEQ ID NO: 2429906 - DNA, 25 bp, Homo sapien
ctgtgagttgaaaataaaatagtga

SEQ ID NO: 2429907 - DNA, 25 bp, Homo sapien
tgtgacaaagcaggtacaagagctg

SEQ ID NO: 2429908 - DNA, 25 bp, Homo sapien
acaagagctgttggctgtgttaagg

SEQ ID NO: 2429909 - DNA, 25 bp, Homo sapien
gcaagagtcattttcagtcacgtta

SEQ ID NO: 2429910 - DNA, 25 bp, Homo sapien
tattgtttcgttaattatcaaagca

SEQ ID NO: 2429911 - DNA, 25 bp, Homo sapien
gttaaactaagtgacatggcagggc

SEQ ID NO: 2429912 - DNA, 25 bp, Homo sapien
tgtgttaaactaagtgacatggcag

SEQ ID NO: 2429913 - DNA, 25 bp, Homo sapien
catgtgttaaactaagtgacatggc

SEQ ID NO: 2429914 - DNA, 25 bp, Homo sapien
tttgcatgtgttaaactaagtgaca

SEQ ID NO: 2429915 - DNA, 25 bp, Homo sapien
aaggccactggtatatcccaaatat

SEQ ID NO: 2429916 - DNA, 25 bp, Homo sapien
tcagaaagaacaccatacacaacaa

SEQ ID NO: 2429917 - DNA, 25 bp, Homo sapien
aggccactggtatatcccaaatatc

SEQ ID NO: 2429918 - DNA, 25 bp, Homo sapien
gaacaccatacacaacaaggaaagg

SEQ ID NO: 2429919 - DNA, 25 bp, Homo sapien
gcactaaagtatgtgtatagcacta

SEQ ID NO: 2429920 - DNA, 25 bp, Homo sapien
tcagagaaagcccaactaactggtg

SEQ ID NO: 2429921 - DNA, 25 bp, Homo sapien
gggtggcaggaatcagtattagttt

SEQ ID NO: 2429922 - DNA, 25 bp, Homo sapien
taaattttgcatgctgtaagtccca

SEQ ID NO: 2429923 - DNA, 25 bp, Homo sapien
taaatttctaaacagcgacaaagga

SEQ ID NO: 2429924 - DNA, 25 bp, Homo sapien
aatagttcccgttcagataccacaa

SEQ ID NO: 2429925 - DNA, 25 bp, Homo sapien
cagaaccaaatagttcccgttcaga

SEQ ID NO: 2429926 - DNA, 25 bp, Homo sapien
caaaggaagaatgaccaccaatgac

SEQ ID NO: 2429927 - DNA, 25 bp, Homo sapien
ccaactttggtacagctttagcatg

SEQ ID NO: 2429928 - DNA, 25 bp, Homo sapien
catttactcaggttagaagtcgggt

SEQ ID NO: 2429929 - DNA, 25 bp, Homo sapien
gaaggctgccagctgattcataaca

SEQ ID NO: 2429930 - DNA, 25 bp, Homo sapien
caaagacttgatactaatgcaggga

SEQ ID NO: 2429931 - DNA, 25 bp, Homo sapien
tctggcacatgttgagtatccctta

SEQ ID NO: 2429932 - DNA, 25 bp, Homo sapien
ggactttggagtacctgcacataca

SEQ ID NO: 2429933 - DNA, 25 bp, Homo sapien
taatgagctgcacatagggtgggaa

SEQ ID NO: 2429934 - DNA, 25 bp, Homo sapien
gaaaatggtttctatagcatgccca

SEQ ID NO: 2429935 - DNA, 25 bp, Homo sapien
tcgttaatgcctggatcaccaaagg

SEQ ID NO: 2429936 - DNA, 25 bp, Homo sapien
tcaccaaaggcaactcatatttcac

SEQ ID NO: 2429937 - DNA, 25 bp, Homo sapien
cctggatcaccaaaggcaactcata

SEQ ID NO: 2429938 - DNA, 25 bp, Homo sapien
tttatcttcaatgttcgttaatgcc

SEQ ID NO: 2429939 - DNA, 25 bp, Homo sapien
cattgtaattgatccagatgctgca

SEQ ID NO: 2429940 - DNA, 25 bp, Homo sapien
aatgccttatatcccaattgttcat

SEQ ID NO: 2429941 - DNA, 25 bp, Homo sapien
cccaattgttcatataataaagacc

SEQ ID NO: 2429942 - DNA, 25 bp, Homo sapien
gcaagctttccaactaatccaaatg

SEQ ID NO: 2429943 - DNA, 25 bp, Homo sapien
gaatacagggaaaatattgacacaa

SEQ ID NO: 2429944 - DNA, 25 bp, Homo sapien
tattgacacaaatgtcaagagaatt

SEQ ID NO: 2429945 - DNA, 25 bp, Homo sapien
caaaaggagatgaacagaatacagg

SEQ ID NO: 2429946 - DNA, 25 bp, Homo sapien
ctccttcattggcagtcttcaaaag

SEQ ID NO: 2429947 - DNA, 25 bp, Homo sapien
aaaggcatagggttataaataagca

SEQ ID NO: 2429948 - DNA, 25 bp, Homo sapien
tgacatactacattgcaccccatgg

SEQ ID NO: 2429949 - DNA, 25 bp, Homo sapien
gaatacaggcccactattgtcacag

SEQ ID NO: 2429950 - DNA, 25 bp, Homo sapien
gctacagggttgctgaagtgcaccg

SEQ ID NO: 2429951 - DNA, 25 bp, Homo sapien
aataatgagctgtatgcttgccacc

SEQ ID NO: 2429952 - DNA, 25 bp, Homo sapien
tgttttaccatagtaactgccctgc

SEQ ID NO: 2429953 - DNA, 25 bp, Homo sapien
taagaactgtgtcgatttaccaaaa

SEQ ID NO: 2429954 - DNA, 25 bp, Homo sapien
catgtggcaatcgaacaggtctgac

SEQ ID NO: 2429955 - DNA, 25 bp, Homo sapien
tggattgcttttcagggtccagaaa

SEQ ID NO: 2429956 - DNA, 25 bp, Homo sapien
taagaaagcccaaggattccactgc

SEQ ID NO: 2429957 - DNA, 25 bp, Homo sapien
cattccaaaggaagtagtacctgga

SEQ ID NO: 2429958 - DNA, 25 bp, Homo sapien
actgcccacaatcgcattgctcaga

SEQ ID NO: 2429959 - DNA, 25 bp, Homo sapien
gagcaattccagtattagccatggc

SEQ ID NO: 2429960 - DNA, 25 bp, Homo sapien
tcttttactccataaagccactgac

SEQ ID NO: 2429961 - DNA, 25 bp, Homo sapien
gaaaacgataaccaaacatataaca

SEQ ID NO: 2429962 - DNA, 25 bp, Homo sapien
ttttactccataaagccactgacag

SEQ ID NO: 2429963 - DNA, 25 bp, Homo sapien
cttttactccataaagccactgaca

SEQ ID NO: 2429964 - DNA, 25 bp, Homo sapien
attcgattcaagtaaaaagttctgg

SEQ ID NO: 2429965 - DNA, 25 bp, Homo sapien
tttcaggatctacatctgcataatg

SEQ ID NO: 2429966 - DNA, 25 bp, Homo sapien
ttcttccccaaattcgattcaagta

SEQ ID NO: 2429967 - DNA, 25 bp, Homo sapien
ttcaggatctacatctgcataatgg

SEQ ID NO: 2429968 - DNA, 25 bp, Homo sapien
gaagcagagtcctaggtaactccct

SEQ ID NO: 2429969 - DNA, 25 bp, Homo sapien
taaaataccctccaacagcatagct

SEQ ID NO: 2429970 - DNA, 25 bp, Homo sapien
taactaggagttgactttcacacca

SEQ ID NO: 2429971 - DNA, 25 bp, Homo sapien
tgaacccaacccatgcaagccgttt

SEQ ID NO: 2429972 - DNA, 25 bp, Homo sapien
ccggggaaatactgaatcgtcccat

SEQ ID NO: 2429973 - DNA, 25 bp, Homo sapien
tgctgtcttcatccggggaaatact

SEQ ID NO: 2429974 - DNA, 25 bp, Homo sapien
gagtagttgaagtcgctgttggaac

SEQ ID NO: 2429975 - DNA, 25 bp, Homo sapien
agttgaagtcgctgttggaactgta

SEQ ID NO: 2429976 - DNA, 25 bp, Homo sapien
gctaagcactgggaggaatcgggtg

SEQ ID NO: 2429977 - DNA, 25 bp, Homo sapien
ccttttgtccttggcggtgggtgca

SEQ ID NO: 2429978 - DNA, 25 bp, Homo sapien
tagcgctgggctccttttgtccttg

SEQ ID NO: 2429979 - DNA, 25 bp, Homo sapien
gaatcgggtgcagctagtagcgctg

SEQ ID NO: 2429980 - DNA, 25 bp, Homo sapien
acgccgcccggaggcgcagcgcggc

SEQ ID NO: 2429981 - DNA, 25 bp, Homo sapien
gcccggaggcgcagcgcggctgatt

SEQ ID NO: 2429982 - DNA, 25 bp, Homo sapien
cgcccggaggcgcagcgcggctgat

SEQ ID NO: 2429983 - DNA, 25 bp, Homo sapien
gtgacgccgcccggaggcgcagcgc

SEQ ID NO: 2429984 - DNA, 25 bp, Homo sapien
cacagacgcccccccgcacgcgtta

SEQ ID NO: 2429985 - DNA, 25 bp, Homo sapien
cccacagacgcccccccgcacgcgt

SEQ ID NO: 2429986 - DNA, 25 bp, Homo sapien
ttcccacagacgcccccccgcacgc

SEQ ID NO: 2429987 - DNA, 25 bp, Homo sapien
cttcccacagacgcccccccgcacg

SEQ ID NO: 2429988 - DNA, 25 bp, Homo sapien
ctcggtggtctctattctcacgcag

SEQ ID NO: 2429989 - DNA, 25 bp, Homo sapien
tattctcacgcagacgtcttcagtg

SEQ ID NO: 2429990 - DNA, 25 bp, Homo sapien
gcagacgtcttcagtgggtttctct

SEQ ID NO: 2429991 - DNA, 25 bp, Homo sapien
gaaaagacaaattgccgccccaatc

SEQ ID NO: 2429992 - DNA, 25 bp, Homo sapien
tactggaaaggcgttctaaggcggc

SEQ ID NO: 2429993 - DNA, 25 bp, Homo sapien
gtgcggtaacgcgtggtcgggctgc

SEQ ID NO: 2429994 - DNA, 25 bp, Homo sapien
tggtcgggctgctgctagcagtact

SEQ ID NO: 2429995 - DNA, 25 bp, Homo sapien
gggaaaggcgcgagcgtgcggtaac

SEQ ID NO: 2429996 - DNA, 25 bp, Homo sapien
cgggatgtgctttttgtacggccat

SEQ ID NO: 2429997 - DNA, 25 bp, Homo sapien
tttcgggatgtgctttttgtacggc

SEQ ID NO: 2429998 - DNA, 25 bp, Homo sapien
gagcagctccttttcgggatgtgct

SEQ ID NO: 2429999 - DNA, 25 bp, Homo sapien
tccttttcgggatgtgctttttgta

SEQ ID NO: 2430000 - DNA, 25 bp, Homo sapien
caagccaggccccttagaaagaggc

SEQ ID NO: 2430001 - DNA, 25 bp, Homo sapien
gaaactggactagcggaaaggctac

SEQ ID NO: 2430002 - DNA, 25 bp, Homo sapien
cactgccttgtctgaatgcgggtct

SEQ ID NO: 2430003 - DNA, 25 bp, Homo sapien
gttttccactcgctgacacgttgct

SEQ ID NO: 2430004 - DNA, 25 bp, Homo sapien
gtttcctggaagctgtcattggttg

SEQ ID NO: 2430005 - DNA, 25 bp, Homo sapien
cattcgcagattagcttctatggct

SEQ ID NO: 2430006 - DNA, 25 bp, Homo sapien
ctagtgatgcacttctatgtggcaa

SEQ ID NO: 2430007 - DNA, 25 bp, Homo sapien
tatgtggcaaaagtgatggcatgtc

SEQ ID NO: 2430008 - DNA, 25 bp, Homo sapien
ggcaagccctgattcaacatagaag

SEQ ID NO: 2430009 - DNA, 25 bp, Homo sapien
agagggctctagtcatctgatggca

SEQ ID NO: 2430010 - DNA, 25 bp, Homo sapien
ttgcagtcagctgtgagagggctct

SEQ ID NO: 2430011 - DNA, 25 bp, Homo sapien
gaaggtgtctgcacaaccctgactg

SEQ ID NO: 2430012 - DNA, 25 bp, Homo sapien
tcactcaatgcggaacggaggtggc

SEQ ID NO: 2430013 - DNA, 25 bp, Homo sapien
agccgcgcgaaggaagcgagggctg

SEQ ID NO: 2430014 - DNA, 25 bp, Homo sapien
cccagaggcgaaggcggaggcgcca

SEQ ID NO: 2430015 - DNA, 25 bp, Homo sapien
cgcgtggcggcttggagccgcgcga

SEQ ID NO: 2430016 - DNA, 25 bp, Homo sapien
ctgggccccgccgcccgggtgtgtg

SEQ ID NO: 2430017 - DNA, 25 bp, Homo sapien
taaagaggctgtgtaaaactcaggg

SEQ ID NO: 2430018 - DNA, 25 bp, Homo sapien
tatagttttgagctgtggaggcaat

SEQ ID NO: 2430019 - DNA, 25 bp, Homo sapien
taagaacagtaccacctggatatcc

SEQ ID NO: 2430020 - DNA, 25 bp, Homo sapien
gagaagcagccataggttaaatata

SEQ ID NO: 2430021 - DNA, 25 bp, Homo sapien
tgtgtacaatgtgcacatggccttt

SEQ ID NO: 2430022 - DNA, 25 bp, Homo sapien
caggtgtgtacaatgtgcacatggc

SEQ ID NO: 2430023 - DNA, 25 bp, Homo sapien
caatgtgcacatggcctttgcccca

SEQ ID NO: 2430024 - DNA, 25 bp, Homo sapien
ggagctccaggtgtgtacaatgtgc

SEQ ID NO: 2430025 - DNA, 25 bp, Homo sapien
gtcagcactccgcttttcccttttg

SEQ ID NO: 2430026 - DNA, 25 bp, Homo sapien
tgcacattcagttgccccaatcaga

SEQ ID NO: 2430027 - DNA, 25 bp, Homo sapien
tccatctttaagtcagcactccgct

SEQ ID NO: 2430028 - DNA, 25 bp, Homo sapien
gagaagcagggtttatgtgcacatt

SEQ ID NO: 2430029 - DNA, 25 bp, Homo sapien
gccaacttcattcttggatggtggg

SEQ ID NO: 2430030 - DNA, 25 bp, Homo sapien
tatacacagtgatggtccactctgg

SEQ ID NO: 2430031 - DNA, 25 bp, Homo sapien
tgaacaacgcggcattccactcctg

SEQ ID NO: 2430032 - DNA, 25 bp, Homo sapien
catttggattgtcttgtatacacag

SEQ ID NO: 2430033 - DNA, 25 bp, Homo sapien
catatgccattgtgcctgtaggtct

SEQ ID NO: 2430034 - DNA, 25 bp, Homo sapien
aatgtgagatttgctctcttaacag

SEQ ID NO: 2430035 - DNA, 25 bp, Homo sapien
caatacaatacaatataggcacagt

SEQ ID NO: 2430036 - DNA, 25 bp, Homo sapien
tattgagtagcacctcacaatttcc

SEQ ID NO: 2430037 - DNA, 25 bp, Homo sapien
gacacttatgaatgggtgcacctat

SEQ ID NO: 2430038 - DNA, 25 bp, Homo sapien
gggcagtaagcagcagacgtaagca

SEQ ID NO: 2430039 - DNA, 25 bp, Homo sapien
tgtaatgggctgttgtgcctcctct

SEQ ID NO: 2430040 - DNA, 25 bp, Homo sapien
cagatatcccttcctattcagtgtg

SEQ ID NO: 2430041 - DNA, 25 bp, Homo sapien
cagctgtagaaatggccactgaatc

SEQ ID NO: 2430042 - DNA, 25 bp, Homo sapien
gacacctagggctgcagtctcatat

SEQ ID NO: 2430043 - DNA, 25 bp, Homo sapien
gcagccttatttcagtacgcttgcg

SEQ ID NO: 2430044 - DNA, 25 bp, Homo sapien
ccgtctgctagatgagcgtgggcaa

SEQ ID NO: 2430045 - DNA, 25 bp, Homo sapien
gacttttgcatcagttgcatgcaac

SEQ ID NO: 2430046 - DNA, 25 bp, Homo sapien
atgacttttgcatcagttgcatgca

SEQ ID NO: 2430047 - DNA, 25 bp, Homo sapien
catgcaactgttgtaaattgtatcc

SEQ ID NO: 2430048 - DNA, 25 bp, Homo sapien
gttgcatgcaactgttgtaaattgt

SEQ ID NO: 2430049 - DNA, 25 bp, Homo sapien
ccaataattcacttctggacctttg

SEQ ID NO: 2430050 - DNA, 25 bp, Homo sapien
cgtgaacagaaagctgactcattac

SEQ ID NO: 2430051 - DNA, 25 bp, Homo sapien
tcagagatctctatggggccaataa

SEQ ID NO: 2430052 - DNA, 25 bp, Homo sapien
ttctcattcccattcgtgataaccg

SEQ ID NO: 2430053 - DNA, 25 bp, Homo sapien
ccttgaagtctttccaaacaggtgc

SEQ ID NO: 2430054 - DNA, 25 bp, Homo sapien
ttgctctctgctcttagagggttac

SEQ ID NO: 2430055 - DNA, 25 bp, Homo sapien
ggttactttccctgttatctcctga

SEQ ID NO: 2430056 - DNA, 25 bp, Homo sapien
tatctcctgacatccctgctttgtt

SEQ ID NO: 2430057 - DNA, 25 bp, Homo sapien
gaggtttgcctgacatcctgaagac

SEQ ID NO: 2430058 - DNA, 25 bp, Homo sapien
tctgacttcggtgagctccaggctc

SEQ ID NO: 2430059 - DNA, 25 bp, Homo sapien
gttagccaggactgaagaaccctca

SEQ ID NO: 2430060 - DNA, 25 bp, Homo sapien
tggagaactatctagcacatgtgac

SEQ ID NO: 2430061 - DNA, 25 bp, Homo sapien
ctttaaaatgggcacaacaattcct

SEQ ID NO: 2430062 - DNA, 25 bp, Homo sapien
tcaacaaacacattggagtctatat

SEQ ID NO: 2430063 - DNA, 25 bp, Homo sapien
agtcacttaacccttatagtcttag

SEQ ID NO: 2430064 - DNA, 25 bp, Homo sapien
catgttttgttatctggacaagtca

SEQ ID NO: 2430065 - DNA, 25 bp, Homo sapien
ttcataagctttgttaattacaaca

SEQ ID NO: 2430066 - DNA, 25 bp, Homo sapien
tacaacattatcatctctgctgtca

SEQ ID NO: 2430067 - DNA, 25 bp, Homo sapien
accgaatgtccttggccaacgaggc

SEQ ID NO: 2430068 - DNA, 25 bp, Homo sapien
ccagggaagaccgaatgtccttggc

SEQ ID NO: 2430069 - DNA, 25 bp, Homo sapien
ttcttcatgaagtgatgattgaccc

SEQ ID NO: 2430070 - DNA, 25 bp, Homo sapien
cttcatgaagtgatgattgacccat

SEQ ID NO: 2430071 - DNA, 25 bp, Homo sapien
tcttcatgaagtgatgattgaccca

SEQ ID NO: 2430072 - DNA, 25 bp, Homo sapien
aattcagggtctgatgagtgccatc

SEQ ID NO: 2430073 - DNA, 25 bp, Homo sapien
caaagcagcgcagtagatttcctat

SEQ ID NO: 2430074 - DNA, 25 bp, Homo sapien
tgaataggtctaagtcagtcacaac

SEQ ID NO: 2430075 - DNA, 25 bp, Homo sapien
tgatgcaggttaccagcccttaggc

SEQ ID NO: 2430076 - DNA, 25 bp, Homo sapien
tcatagggttggatggaataagccc

SEQ ID NO: 2430077 - DNA, 25 bp, Homo sapien
tatggctcataggaccggtgaatca

SEQ ID NO: 2430078 - DNA, 25 bp, Homo sapien
gagtaaggtacactttcagtcagaa

SEQ ID NO: 2430079 - DNA, 25 bp, Homo sapien
tgagttgaacaacaaggcgagtgag

SEQ ID NO: 2430080 - DNA, 25 bp, Homo sapien
tatcactaaagaagccgaacacggt

SEQ ID NO: 2430081 - DNA, 25 bp, Homo sapien
ttcagcagccaaggtgtattgcacc

SEQ ID NO: 2430082 - DNA, 25 bp, Homo sapien
ttcatcacactttacccctaggcgg

SEQ ID NO: 2430083 - DNA, 25 bp, Homo sapien
tagaccttgggagtgtaactttctc

SEQ ID NO: 2430084 - DNA, 25 bp, Homo sapien
tgcagtgtatggagcatatgttaag

SEQ ID NO: 2430085 - DNA, 25 bp, Homo sapien
gcagtgtatggagcatatgttaagt

SEQ ID NO: 2430086 - DNA, 25 bp, Homo sapien
cagtgtatggagcatatgttaagtt

SEQ ID NO: 2430087 - DNA, 25 bp, Homo sapien
gtgtatggagcatatgttaagttca

SEQ ID NO: 2430088 - DNA, 25 bp, Homo sapien
tggaggcaaggataagtgtgcattc

SEQ ID NO: 2430089 - DNA, 25 bp, Homo sapien
gaggcaaggataagtgtgcattctt

SEQ ID NO: 2430090 - DNA, 25 bp, Homo sapien
aggcaaggataagtgtgcattcttc

SEQ ID NO: 2430091 - DNA, 25 bp, Homo sapien
ctactctcggactgaggtggaggca

SEQ ID NO: 2430092 - DNA, 25 bp, Homo sapien
tagttggatgagattgagcagattc

SEQ ID NO: 2430093 - DNA, 25 bp, Homo sapien
ttgttttctcctctagagctgaggg

SEQ ID NO: 2430094 - DNA, 25 bp, Homo sapien
catgatttgatgtcttctgatggga

SEQ ID NO: 2430095 - DNA, 25 bp, Homo sapien
tctgatgggaaggtgaagcattctg

SEQ ID NO: 2430096 - DNA, 25 bp, Homo sapien
cccatcttcacaatgagagggttga

SEQ ID NO: 2430097 - DNA, 25 bp, Homo sapien
ggtctgggtattgggctctgcccat

SEQ ID NO: 2430098 - DNA, 25 bp, Homo sapien
tgtcccatcttcacaatgagagggt

SEQ ID NO: 2430099 - DNA, 25 bp, Homo sapien
catcttcacaatgagagggttgaac

SEQ ID NO: 2430100 - DNA, 25 bp, Homo sapien
cttggcacagctgccttgaggtctg

SEQ ID NO: 2430101 - DNA, 25 bp, Homo sapien
tggcacagctgccttgaggtctgcc

SEQ ID NO: 2430102 - DNA, 25 bp, Homo sapien
gcacagctgccttgaggtctgccat

SEQ ID NO: 2430103 - DNA, 25 bp, Homo sapien
cccttggcacagctgccttgaggtc

SEQ ID NO: 2430104 - DNA, 25 bp, Homo sapien
gatactttaacatccttaacatatt

SEQ ID NO: 2430105 - DNA, 25 bp, Homo sapien
ttaacacatcttcaccaacttccat

SEQ ID NO: 2430106 - DNA, 25 bp, Homo sapien
tttaacacatcttcaccaacttcca

SEQ ID NO: 2430107 - DNA, 25 bp, Homo sapien
ttttgatactttaacatccttaaca

SEQ ID NO: 2430108 - DNA, 25 bp, Homo sapien
gaaatgacagtgtaccagttctgaa

SEQ ID NO: 2430109 - DNA, 25 bp, Homo sapien
aaatctgggctcgacattcttctgc

SEQ ID NO: 2430110 - DNA, 25 bp, Homo sapien
gaggccagcctaggtcaatgaaact

SEQ ID NO: 2430111 - DNA, 25 bp, Homo sapien
agttctgaaactgtgccggcagagc

SEQ ID NO: 2430112 - DNA, 25 bp, Homo sapien
gctgaacctgcaggatgatccatta

SEQ ID NO: 2430113 - DNA, 25 bp, Homo sapien
taataggcatcagacgttccctgtg

SEQ ID NO: 2430114 - DNA, 25 bp, Homo sapien
tccattaacaactggaaaaatagcc

SEQ ID NO: 2430115 - DNA, 25 bp, Homo sapien
gaggatgttacaggaataataggca

SEQ ID NO: 2430116 - DNA, 25 bp, Homo sapien
gatatagtcaaagggctctccactg

SEQ ID NO: 2430117 - DNA, 25 bp, Homo sapien
gtgttgatcacttgaaagagcttga

SEQ ID NO: 2430118 - DNA, 25 bp, Homo sapien
gacattgggatgatttagagccttc

SEQ ID NO: 2430119 - DNA, 25 bp, Homo sapien
atgggccatgttctaggatatagtc

SEQ ID NO: 2430120 - DNA, 25 bp, Homo sapien
tgtgagaatgttccggcccaacttt

SEQ ID NO: 2430121 - DNA, 25 bp, Homo sapien
ccctgtgagaatgttccggcccaac

SEQ ID NO: 2430122 - DNA, 25 bp, Homo sapien
tgagaatgttccggcccaactttac

SEQ ID NO: 2430123 - DNA, 25 bp, Homo sapien
cctgtgagaatgttccggcccaact

SEQ ID NO: 2430124 - DNA, 25 bp, Homo sapien
cagccctatccttgcctttctcagg

SEQ ID NO: 2430125 - DNA, 25 bp, Homo sapien
cttctttgtcagagggtcctgcagc

SEQ ID NO: 2430126 - DNA, 25 bp, Homo sapien
agccctatccttgcctttctcaggc

SEQ ID NO: 2430127 - DNA, 25 bp, Homo sapien
tgcagccctatccttgcctttctca

SEQ ID NO: 2430128 - DNA, 25 bp, Homo sapien
tatccaagggcatcctaacaggagc

SEQ ID NO: 2430129 - DNA, 25 bp, Homo sapien
caggagcaggtatcactgagagtca

SEQ ID NO: 2430130 - DNA, 25 bp, Homo sapien
tagccatagtgacaggtagccacca

SEQ ID NO: 2430131 - DNA, 25 bp, Homo sapien
ttatctggatgtctctggctcaagg

SEQ ID NO: 2430132 - DNA, 25 bp, Homo sapien
aaataaatggtgacctcttgattgg

SEQ ID NO: 2430133 - DNA, 25 bp, Homo sapien
cctcttgattggtggcttctttccc

SEQ ID NO: 2430134 - DNA, 25 bp, Homo sapien
tgccaaataaatggtgacctcttga

SEQ ID NO: 2430135 - DNA, 25 bp, Homo sapien
ctcttgattggtggcttctttccca

SEQ ID NO: 2430136 - DNA, 25 bp, Homo sapien
cagagaacaggcacttgctagtctg

SEQ ID NO: 2430137 - DNA, 25 bp, Homo sapien
caagactggaatgccttgttgattg

SEQ ID NO: 2430138 - DNA, 25 bp, Homo sapien
tctgagacgatatgccagaggcggt

SEQ ID NO: 2430139 - DNA, 25 bp, Homo sapien
cagaggcggtgttcgaggaacattc

SEQ ID NO: 2430140 - DNA, 25 bp, Homo sapien
tgtaaagtaagtcttgcagggatgg

SEQ ID NO: 2430141 - DNA, 25 bp, Homo sapien
ggtgatgaaaacgtacaaatgattt

SEQ ID NO: 2430142 - DNA, 25 bp, Homo sapien
atttgtggctatgcaaggattcagc

SEQ ID NO: 2430143 - DNA, 25 bp, Homo sapien
tatgcaaggattcagctgttttctc

SEQ ID NO: 2430144 - DNA, 25 bp, Homo sapien
ctatctccgagcttcctctgctttg

SEQ ID NO: 2430145 - DNA, 25 bp, Homo sapien
ctgctttgtcttctagatcctgttg

SEQ ID NO: 2430146 - DNA, 25 bp, Homo sapien
ttgtcttctagatcctgttgctgct

SEQ ID NO: 2430147 - DNA, 25 bp, Homo sapien
ttcctctgctttgtcttctagatcc

SEQ ID NO: 2430148 - DNA, 25 bp, Homo sapien
cttacttctctcttcagccccaggg

SEQ ID NO: 2430149 - DNA, 25 bp, Homo sapien
acttctctcttcagccccagggctc

SEQ ID NO: 2430150 - DNA, 25 bp, Homo sapien
ttacttctctcttcagccccagggc

SEQ ID NO: 2430151 - DNA, 25 bp, Homo sapien
ttctctcttcagccccagggctcat

SEQ ID NO: 2430152 - DNA, 25 bp, Homo sapien
aatactaatgccatcttttgatgga

SEQ ID NO: 2430153 - DNA, 25 bp, Homo sapien
gtcttgctgttaagtctcatctcat

SEQ ID NO: 2430154 - DNA, 25 bp, Homo sapien
ggagtcttgctgttaagtctcatct

SEQ ID NO: 2430155 - DNA, 25 bp, Homo sapien
gagtcttgctgttaagtctcatctc

SEQ ID NO: 2430156 - DNA, 25 bp, Homo sapien
ttgctgttaagtctcatctcatcat

SEQ ID NO: 2430157 - DNA, 25 bp, Homo sapien
acctgtgtgagctaaactgaactaa

SEQ ID NO: 2430158 - DNA, 25 bp, Homo sapien
aaagaagcctcccaatacattgagc

SEQ ID NO: 2430159 - DNA, 25 bp, Homo sapien
gggttaaattaatcagcacaagcta

SEQ ID NO: 2430160 - DNA, 25 bp, Homo sapien
gaactccagaagttttaggctgtga

SEQ ID NO: 2430161 - DNA, 25 bp, Homo sapien
caatactgggtagtgtatctccacg

SEQ ID NO: 2430162 - DNA, 25 bp, Homo sapien
tatgaatggattttcgagcccacca

SEQ ID NO: 2430163 - DNA, 25 bp, Homo sapien
ctcaatgtcacaaacagggtgggca

SEQ ID NO: 2430164 - DNA, 25 bp, Homo sapien
tcacactgctctagcaaaacctggg

SEQ ID NO: 2430165 - DNA, 25 bp, Homo sapien
tcttttggagtataacttgtaacca

SEQ ID NO: 2430166 - DNA, 25 bp, Homo sapien
caaatatcttttggagtataacttg

SEQ ID NO: 2430167 - DNA, 25 bp, Homo sapien
tatcttttggagtataacttgtaac

SEQ ID NO: 2430168 - DNA, 25 bp, Homo sapien
aatatcttttggagtataacttgta

SEQ ID NO: 2430169 - DNA, 25 bp, Homo sapien
aatccagtcaattataatgagtgcc

SEQ ID NO: 2430170 - DNA, 25 bp, Homo sapien
caattataatgagtgccatgcttcc

SEQ ID NO: 2430171 - DNA, 25 bp, Homo sapien
aatgagtgccatgcttccaatcatg

SEQ ID NO: 2430172 - DNA, 25 bp, Homo sapien
gaatttggaggatcataaatccagt

SEQ ID NO: 2430173 - DNA, 25 bp, Homo sapien
tatcacatacttaaacctcctaatc

SEQ ID NO: 2430174 - DNA, 25 bp, Homo sapien
aaaccaaaagcttaatagatgttgc

SEQ ID NO: 2430175 - DNA, 25 bp, Homo sapien
cagcattttaacaccagaagaggcc

SEQ ID NO: 2430176 - DNA, 25 bp, Homo sapien
gaagaggccttacattttatcacat

SEQ ID NO: 2430177 - DNA, 25 bp, Homo sapien
tctttcttgacaagtttaagataaa

SEQ ID NO: 2430178 - DNA, 25 bp, Homo sapien
ttaagataaaaaactgctggaagaa

SEQ ID NO: 2430179 - DNA, 25 bp, Homo sapien
aatcagcatagtggcagaagaagcc

SEQ ID NO: 2430180 - DNA, 25 bp, Homo sapien
tgacctaaaagtttctttcttgaca

SEQ ID NO: 2430181 - DNA, 25 bp, Homo sapien
tgtcttacccagcagttcctagcaa

SEQ ID NO: 2430182 - DNA, 25 bp, Homo sapien
caaacacagggcaaggtcaatgtct

SEQ ID NO: 2430183 - DNA, 25 bp, Homo sapien
ggctgaactcatgacacaccctatc

SEQ ID NO: 2430184 - DNA, 25 bp, Homo sapien
tttgcaagtgacctacccatggttc

SEQ ID NO: 2430185 - DNA, 25 bp, Homo sapien
gatgaccagaacattattaagtgca

SEQ ID NO: 2430186 - DNA, 25 bp, Homo sapien
tatagttggcacaaggatgaccaga

SEQ ID NO: 2430187 - DNA, 25 bp, Homo sapien
tgcaatcaggaaatgtcgtatccag

SEQ ID NO: 2430188 - DNA, 25 bp, Homo sapien
ctatgaatccgaagatgtattttat

SEQ ID NO: 2430189 - DNA, 25 bp, Homo sapien
ggaaataacagtgtgatcactgatg

SEQ ID NO: 2430190 - DNA, 25 bp, Homo sapien
aacagtgtgatcactgatgtacgaa

SEQ ID NO: 2430191 - DNA, 25 bp, Homo sapien
aataacagtgtgatcactgatgtac

SEQ ID NO: 2430192 - DNA, 25 bp, Homo sapien
tttgggaaataacagtgtgatcact

SEQ ID NO: 2430193 - DNA, 25 bp, Homo sapien
taagcatagtcatttcggtcaacaa

SEQ ID NO: 2430194 - DNA, 25 bp, Homo sapien
ccttagtgtatagtaggctccacca

SEQ ID NO: 2430195 - DNA, 25 bp, Homo sapien
tataagacagtgataccctaaggtt

SEQ ID NO: 2430196 - DNA, 25 bp, Homo sapien
gcttttctacgtttggagacacaaa

SEQ ID NO: 2430197 - DNA, 25 bp, Homo sapien
aactggtccaattagtaggcttacg

SEQ ID NO: 2430198 - DNA, 25 bp, Homo sapien
ggtgcattcaagtcaataagctgag

SEQ ID NO: 2430199 - DNA, 25 bp, Homo sapien
aattaaggccatctgtttaggctga

SEQ ID NO: 2430200 - DNA, 25 bp, Homo sapien
ggtatatacatagtgccagaggact

SEQ ID NO: 2430201 - DNA, 25 bp, Homo sapien
tgtgcacatcaccaagtcccaggga

SEQ ID NO: 2430202 - DNA, 25 bp, Homo sapien
agtcactgtgcacatcaccaagtcc

SEQ ID NO: 2430203 - DNA, 25 bp, Homo sapien
gtgccagtcactgtgcacatcacca

SEQ ID NO: 2430204 - DNA, 25 bp, Homo sapien
tgcacatcaccaagtcccagggact

SEQ ID NO: 2430205 - DNA, 25 bp, Homo sapien
gaagaggacaatgggcacagttagt

SEQ ID NO: 2430206 - DNA, 25 bp, Homo sapien
tacactttgctgtaggcatgaagta

SEQ ID NO: 2430207 - DNA, 25 bp, Homo sapien
actgccaggcgaaccatgagaaggg

SEQ ID NO: 2430208 - DNA, 25 bp, Homo sapien
cagttagtgttactgccacaaggac

SEQ ID NO: 2430209 - DNA, 25 bp, Homo sapien
caagcatccccgtgatggaaatatt

SEQ ID NO: 2430210 - DNA, 25 bp, Homo sapien
catagaaggttaggtaaccaaagag

SEQ ID NO: 2430211 - DNA, 25 bp, Homo sapien
ggaaatatttgacaccgtttgcatt

SEQ ID NO: 2430212 - DNA, 25 bp, Homo sapien
caagcaggtacatgacaagcatccc

SEQ ID NO: 2430213 - DNA, 25 bp, Homo sapien
ggaaggacctcagggtggcatacaa

SEQ ID NO: 2430214 - DNA, 25 bp, Homo sapien
agggtggcatacaaaagcaaatact

SEQ ID NO: 2430215 - DNA, 25 bp, Homo sapien
tcagggtggcatacaaaagcaaata

SEQ ID NO: 2430216 - DNA, 25 bp, Homo sapien
aaggacctcagggtggcatacaaaa

SEQ ID NO: 2430217 - DNA, 25 bp, Homo sapien
gtactcattagaagcccggaccgct

SEQ ID NO: 2430218 - DNA, 25 bp, Homo sapien
tactcattagaagcccggaccgctc

SEQ ID NO: 2430219 - DNA, 25 bp, Homo sapien
actgtcatgaagagagcccttggcc

SEQ ID NO: 2430220 - DNA, 25 bp, Homo sapien
cactgtcatgaagagagcccttggc

SEQ ID NO: 2430221 - DNA, 25 bp, Homo sapien
gaatacaaagtatttgggttcacac

SEQ ID NO: 2430222 - DNA, 25 bp, Homo sapien
cacacttgtcatcactatgagcttc

SEQ ID NO: 2430223 - DNA, 25 bp, Homo sapien
cgtgttgttgaatgacagatttcca

SEQ ID NO: 2430224 - DNA, 25 bp, Homo sapien
caggattgcggtgggtgtaatccat

SEQ ID NO: 2430225 - DNA, 25 bp, Homo sapien
catgcattggaagcgtgttgttgaa

SEQ ID NO: 2430226 - DNA, 25 bp, Homo sapien
tgttgggtaacattaccacatgcat

SEQ ID NO: 2430227 - DNA, 25 bp, Homo sapien
ctgtgatccaaaacaggtagagggc

SEQ ID NO: 2430228 - DNA, 25 bp, Homo sapien
tgatccaaaacaggtagagggcagg

SEQ ID NO: 2430229 - DNA, 25 bp, Homo sapien
acaggtagagggcagggtatttgga

SEQ ID NO: 2430230 - DNA, 25 bp, Homo sapien
ggtatttggaatttcttgtaaatca

SEQ ID NO: 2430231 - DNA, 25 bp, Homo sapien
gagaaaatccactggtatagccaag

SEQ ID NO: 2430232 - DNA, 25 bp, Homo sapien
aaaaaacaccatgcaggtaagagaa

SEQ ID NO: 2430233 - DNA, 25 bp, Homo sapien
caaaaaacaccatgcaggtaagaga

SEQ ID NO: 2430234 - DNA, 25 bp, Homo sapien
caaatatgatgaggtagttgccatt

SEQ ID NO: 2430235 - DNA, 25 bp, Homo sapien
gtagttgccattgaggtaccattct

SEQ ID NO: 2430236 - DNA, 25 bp, Homo sapien
tatgatgaggtagttgccattgagg

SEQ ID NO: 2430237 - DNA, 25 bp, Homo sapien
tgaggtagttgccattgaggtacca

SEQ ID NO: 2430238 - DNA, 25 bp, Homo sapien
gtcacagagggagcataagacatac

SEQ ID NO: 2430239 - DNA, 25 bp, Homo sapien
tgtcacagagggagcataagacata

SEQ ID NO: 2430240 - DNA, 25 bp, Homo sapien
ctgattacttcaggtagttcatatt

SEQ ID NO: 2430241 - DNA, 25 bp, Homo sapien
tcccatgaatgctctgattacttca

SEQ ID NO: 2430242 - DNA, 25 bp, Homo sapien
cccatgaatgctctgattacttcag

SEQ ID NO: 2430243 - DNA, 25 bp, Homo sapien
ttacttcaggtagttcatatttaat

SEQ ID NO: 2430244 - DNA, 25 bp, Homo sapien
tccgggacctatctgaggagtacac

SEQ ID NO: 2430245 - DNA, 25 bp, Homo sapien
taacttgggcagtagtctggcaaca

SEQ ID NO: 2430246 - DNA, 25 bp, Homo sapien
gatctgcagagtcaatatatcccct

SEQ ID NO: 2430247 - DNA, 25 bp, Homo sapien
atgggcaccaatctagtcctccggg

SEQ ID NO: 2430248 - DNA, 25 bp, Homo sapien
tagtagtggctatgctttgaaccac

SEQ ID NO: 2430249 - DNA, 25 bp, Homo sapien
tgtgaggcttgactgagagaccgct

SEQ ID NO: 2430250 - DNA, 25 bp, Homo sapien
cattgtttagaagcgtagtagtggc

SEQ ID NO: 2430251 - DNA, 25 bp, Homo sapien
tcaacttcttgagtccagggttaat

SEQ ID NO: 2430252 - DNA, 25 bp, Homo sapien
ccaatttttcccggccatccaaatg

SEQ ID NO: 2430253 - DNA, 25 bp, Homo sapien
atttttcccggccatccaaatgcct

SEQ ID NO: 2430254 - DNA, 25 bp, Homo sapien
ttcccggccatccaaatgccttttc

SEQ ID NO: 2430255 - DNA, 25 bp, Homo sapien
agctccaatttttcccggccatcca

SEQ ID NO: 2430256 - DNA, 25 bp, Homo sapien
aataaaaggtgaactgaatacagtg

SEQ ID NO: 2430257 - DNA, 25 bp, Homo sapien
gcattactcaggttaaatgaagaca

SEQ ID NO: 2430258 - DNA, 25 bp, Homo sapien
cccatgatggcattactcaggttaa

SEQ ID NO: 2430259 - DNA, 25 bp, Homo sapien
tggcataggacaagcccaggatccc

SEQ ID NO: 2430260 - DNA, 25 bp, Homo sapien
gccatggcataggacaagcccagga

SEQ ID NO: 2430261 - DNA, 25 bp, Homo sapien
tcatcagcataatctgccagcttct

SEQ ID NO: 2430262 - DNA, 25 bp, Homo sapien
tccccaaaaatccatttgtcaggaa

SEQ ID NO: 2430263 - DNA, 25 bp, Homo sapien
caggaatttctgactttcagtgtct

SEQ ID NO: 2430264 - DNA, 25 bp, Homo sapien
ttcagtgtcttcattagcaaattga

SEQ ID NO: 2430265 - DNA, 25 bp, Homo sapien
taagtcactgtgagtggttcggaac

SEQ ID NO: 2430266 - DNA, 25 bp, Homo sapien
ggttcggaacacattgcatgaagct

SEQ ID NO: 2430267 - DNA, 25 bp, Homo sapien
tctactctggcttttgaggatcaag

SEQ ID NO: 2430268 - DNA, 25 bp, Homo sapien
gaaatgtccccagtatgttaaatgt

SEQ ID NO: 2430269 - DNA, 25 bp, Homo sapien
tccatggaacatagtaatttttaac

SEQ ID NO: 2430270 - DNA, 25 bp, Homo sapien
aagaccctgttttccatgtccacat

SEQ ID NO: 2430271 - DNA, 25 bp, Homo sapien
tgtaataaatccagttcttcccatc

SEQ ID NO: 2430272 - DNA, 25 bp, Homo sapien
tgtccacatcctgtcttatttttcc

SEQ ID NO: 2430273 - DNA, 25 bp, Homo sapien
catctggttcgatgttgacatttct

SEQ ID NO: 2430274 - DNA, 25 bp, Homo sapien
tctcatcatctggttcgatgttgac

SEQ ID NO: 2430275 - DNA, 25 bp, Homo sapien
ttctgaatttcctatcccgatgtag

SEQ ID NO: 2430276 - DNA, 25 bp, Homo sapien
gatgtagctatctggagcactttct

SEQ ID NO: 2430277 - DNA, 25 bp, Homo sapien
cacaagccccttcagtgtaaataat

SEQ ID NO: 2430278 - DNA, 25 bp, Homo sapien
tgtgttgatgttcagaacactctgt

SEQ ID NO: 2430279 - DNA, 25 bp, Homo sapien
ctttgtgttgatgttcagaacactc

SEQ ID NO: 2430280 - DNA, 25 bp, Homo sapien
tttgtgttgatgttcagaacactct

SEQ ID NO: 2430281 - DNA, 25 bp, Homo sapien
ttgtgttgatgttcagaacactctg

SEQ ID NO: 2430282 - DNA, 25 bp, Homo sapien
tatttgtgaatgacagagcgcatcg

SEQ ID NO: 2430283 - DNA, 25 bp, Homo sapien
tagcttggacagctggtactcagag

SEQ ID NO: 2430284 - DNA, 25 bp, Homo sapien
caagtgttcctaggttatctgttca

SEQ ID NO: 2430285 - DNA, 25 bp, Homo sapien
ttctctgaaattgtgtgggcccatt

SEQ ID NO: 2430286 - DNA, 25 bp, Homo sapien
ggttccttggtggatacctgatcac

SEQ ID NO: 2430287 - DNA, 25 bp, Homo sapien
tggtatcccaaacagaccatgatgt

SEQ ID NO: 2430288 - DNA, 25 bp, Homo sapien
ccatgatgtctaaactgaggttcct

SEQ ID NO: 2430289 - DNA, 25 bp, Homo sapien
taacttgaagctactgcagggctcc

SEQ ID NO: 2430290 - DNA, 25 bp, Homo sapien
gagctaatatagccagagcagattt

SEQ ID NO: 2430291 - DNA, 25 bp, Homo sapien
agggagctaatatagccagagcaga

SEQ ID NO: 2430292 - DNA, 25 bp, Homo sapien
ggagctaatatagccagagcagatt

SEQ ID NO: 2430293 - DNA, 25 bp, Homo sapien
gggagctaatatagccagagcagat

SEQ ID NO: 2430294 - DNA, 25 bp, Homo sapien
gctttcctgacttgtttggaatggc

SEQ ID NO: 2430295 - DNA, 25 bp, Homo sapien
aaagaccagtgggagtgaacgagac

SEQ ID NO: 2430296 - DNA, 25 bp, Homo sapien
ggcagacccgtgtaacagctttgat

SEQ ID NO: 2430297 - DNA, 25 bp, Homo sapien
gaaactttagagatctagacattga

SEQ ID NO: 2430298 - DNA, 25 bp, Homo sapien
aagatggagtgtatacatccttttg

SEQ ID NO: 2430299 - DNA, 25 bp, Homo sapien
agatggagtgtatacatccttttgc

SEQ ID NO: 2430300 - DNA, 25 bp, Homo sapien
gatggagtgtatacatccttttgcc

SEQ ID NO: 2430301 - DNA, 25 bp, Homo sapien
ccttccacgttcgtctcacccactc

SEQ ID NO: 2430302 - DNA, 25 bp, Homo sapien
cccttccacgttcgtctcacccact

SEQ ID NO: 2430303 - DNA, 25 bp, Homo sapien
cgtctcacccactctcctggaccct

SEQ ID NO: 2430304 - DNA, 25 bp, Homo sapien
tccccttccacgttcgtctcaccca

SEQ ID NO: 2430305 - DNA, 25 bp, Homo sapien
caagttgccacgcaaaagcagcaag

SEQ ID NO: 2430306 - DNA, 25 bp, Homo sapien
taaccaagttgccacgcaaaagcag

SEQ ID NO: 2430307 - DNA, 25 bp, Homo sapien
tgccacgcaaaagcagcaagcaaac

SEQ ID NO: 2430308 - DNA, 25 bp, Homo sapien
agttgccacgcaaaagcagcaagca

SEQ ID NO: 2430309 - DNA, 25 bp, Homo sapien
ttgcagacagaacagcgacctatcc

SEQ ID NO: 2430310 - DNA, 25 bp, Homo sapien
aagttgcctgttggtaaattgcgtc

SEQ ID NO: 2430311 - DNA, 25 bp, Homo sapien
cctatcccgccgtaagccaaagttg

SEQ ID NO: 2430312 - DNA, 25 bp, Homo sapien
ggcctgcaggagtaccaacattgca

SEQ ID NO: 2430313 - DNA, 25 bp, Homo sapien
aaagtatcagaaagggatggatgga

SEQ ID NO: 2430314 - DNA, 25 bp, Homo sapien
gatggatggagagacccttctttct

SEQ ID NO: 2430315 - DNA, 25 bp, Homo sapien
cctttccagactgggattcagggaa

SEQ ID NO: 2430316 - DNA, 25 bp, Homo sapien
tcttttcgcctttctaaagagtgga

SEQ ID NO: 2430317 - DNA, 25 bp, Homo sapien
tgaaggtgatgagaagaaaaacgga

SEQ ID NO: 2430318 - DNA, 25 bp, Homo sapien
gggagattccgacagaaaccaagca

SEQ ID NO: 2430319 - DNA, 25 bp, Homo sapien
tgaggaacaccatcctgaaatctga

SEQ ID NO: 2430320 - DNA, 25 bp, Homo sapien
agaacaagatgaatgtgggcatagg

SEQ ID NO: 2430321 - DNA, 25 bp, Homo sapien
cactttgtgtaactgccctgccaag

SEQ ID NO: 2430322 - DNA, 25 bp, Homo sapien
ttcaccctcagctgttgcaactctt

SEQ ID NO: 2430323 - DNA, 25 bp, Homo sapien
tgcaactcttttggccactttgtgt

SEQ ID NO: 2430324 - DNA, 25 bp, Homo sapien
cccttaggacctgatgattgattta

SEQ ID NO: 2430325 - DNA, 25 bp, Homo sapien
tgcaggggaagggtagcttctgaag

SEQ ID NO: 2430326 - DNA, 25 bp, Homo sapien
gtgcaggggaagggtagcttctgaa

SEQ ID NO: 2430327 - DNA, 25 bp, Homo sapien
aacaaaaggatgaaatctggggtgc

SEQ ID NO: 2430328 - DNA, 25 bp, Homo sapien
ctacaggagatcacaacaaaaggat

SEQ ID NO: 2430329 - DNA, 25 bp, Homo sapien
ttaaatttaaccaggatcaagttca

SEQ ID NO: 2430330 - DNA, 25 bp, Homo sapien
acctggtgcagtttgatatgttata

SEQ ID NO: 2430331 - DNA, 25 bp, Homo sapien
tgatgtgttgtacatattaggcaaa

SEQ ID NO: 2430332 - DNA, 25 bp, Homo sapien
tgagaagtgagacaaggaaagaact

SEQ ID NO: 2430333 - DNA, 25 bp, Homo sapien
ggatgcactctctggcaacagtgga

SEQ ID NO: 2430334 - DNA, 25 bp, Homo sapien
tagtgggaacgccagtggtgtgagc

SEQ ID NO: 2430335 - DNA, 25 bp, Homo sapien
ggatgcactctctggcagtagtagt

SEQ ID NO: 2430336 - DNA, 25 bp, Homo sapien
gcactctctggcaacagtggaggat

SEQ ID NO: 2430337 - DNA, 25 bp, Homo sapien
tgtgatttcagaacaccataattct

SEQ ID NO: 2430338 - DNA, 25 bp, Homo sapien
gctctgttagaggttttgcctgcag

SEQ ID NO: 2430339 - DNA, 25 bp, Homo sapien
catcttgtatggctctgttagaggt

SEQ ID NO: 2430340 - DNA, 25 bp, Homo sapien
ctgaaccggattcccatcttgtatg

SEQ ID NO: 2430341 - DNA, 25 bp, Homo sapien
gaacataggcaatgcttggtgttcc

SEQ ID NO: 2430342 - DNA, 25 bp, Homo sapien
gtgaacataggcaatgcttggtgtt

SEQ ID NO: 2430343 - DNA, 25 bp, Homo sapien
ctggtgaacataggcaatgcttggt

SEQ ID NO: 2430344 - DNA, 25 bp, Homo sapien
ttctggtgaacataggcaatgcttg

SEQ ID NO: 2430345 - DNA, 25 bp, Homo sapien
taagatggtccccaagatggcagac

SEQ ID NO: 2430346 - DNA, 25 bp, Homo sapien
tacacagatgtaatgaaggtcccta

SEQ ID NO: 2430347 - DNA, 25 bp, Homo sapien
taatgctatgctgtgaaaagggcca

SEQ ID NO: 2430348 - DNA, 25 bp, Homo sapien
cttgataagagggtgctggccttcc

SEQ ID NO: 2430349 - DNA, 25 bp, Homo sapien
tctatgggcttgcagaatctgctgc

SEQ ID NO: 2430350 - DNA, 25 bp, Homo sapien
ttctatgggcttgcagaatctgctg

SEQ ID NO: 2430351 - DNA, 25 bp, Homo sapien
tattgtctcttgttactatgtttct

SEQ ID NO: 2430352 - DNA, 25 bp, Homo sapien
ttattgtctcttgttactatgtttc

SEQ ID NO: 2430353 - DNA, 25 bp, Homo sapien
tctctgaaatcccttggaagccttt

SEQ ID NO: 2430354 - DNA, 25 bp, Homo sapien
aatttcttccacaaggttgcggtga

SEQ ID NO: 2430355 - DNA, 25 bp, Homo sapien
tctgaaatcccttggaagccttttc

SEQ ID NO: 2430356 - DNA, 25 bp, Homo sapien
tgtgcatgcatatgaacatatgctg

SEQ ID NO: 2430357 - DNA, 25 bp, Homo sapien
tacacaggtcgtattctctctgggc

SEQ ID NO: 2430358 - DNA, 25 bp, Homo sapien
ttagccccaggacaatcaatctttg

SEQ ID NO: 2430359 - DNA, 25 bp, Homo sapien
tctggatctggctaaagtgcacaat

SEQ ID NO: 2430360 - DNA, 25 bp, Homo sapien
cagagtaaaacgtcatacggaaggt

SEQ ID NO: 2430361 - DNA, 25 bp, Homo sapien
cagggatttaagaagttactcagac

SEQ ID NO: 2430362 - DNA, 25 bp, Homo sapien
gcacatgaaccaatattagtttgct

SEQ ID NO: 2430363 - DNA, 25 bp, Homo sapien
tctataacaccatataggatgtggc

SEQ ID NO: 2430364 - DNA, 25 bp, Homo sapien
tactcagacattttggtattgacac

SEQ ID NO: 2430365 - DNA, 25 bp, Homo sapien
taaataaagggacaatgggagtcat

SEQ ID NO: 2430366 - DNA, 25 bp, Homo sapien
tgggagtcatatcacctttgggcct

SEQ ID NO: 2430367 - DNA, 25 bp, Homo sapien
tattcattctggtctaaaacggtaa

SEQ ID NO: 2430368 - DNA, 25 bp, Homo sapien
ccatctttctatggcacattgagga

SEQ ID NO: 2430369 - DNA, 25 bp, Homo sapien
acagattaaattatgacatcataca

SEQ ID NO: 2430370 - DNA, 25 bp, Homo sapien
aacagattaaattatgacatcatac

SEQ ID NO: 2430371 - DNA, 25 bp, Homo sapien
cccctcgtggactttaggatgccct

SEQ ID NO: 2430372 - DNA, 25 bp, Homo sapien
ttaggatgccctcagctatcactgc

SEQ ID NO: 2430373 - DNA, 25 bp, Homo sapien
taagtggacgccacaaaaggtgtgt

SEQ ID NO: 2430374 - DNA, 25 bp, Homo sapien
tcactgcctcgctgggaaagagcct

SEQ ID NO: 2430375 - DNA, 25 bp, Homo sapien
taccaaaacgatactggccacgcaa

SEQ ID NO: 2430376 - DNA, 25 bp, Homo sapien
caaaacgagggctttctataaccag

SEQ ID NO: 2430377 - DNA, 25 bp, Homo sapien
ttcatcagcggaggcatcactagcg

SEQ ID NO: 2430378 - DNA, 25 bp, Homo sapien
caggactgagaatcgatgaatgggc

SEQ ID NO: 2430379 - DNA, 25 bp, Homo sapien
cccacccagatgaaatccgtatttg

SEQ ID NO: 2430380 - DNA, 25 bp, Homo sapien
cagatgaaatccgtatttgcattac

SEQ ID NO: 2430381 - DNA, 25 bp, Homo sapien
cacccagatgaaatccgtatttgca

SEQ ID NO: 2430382 - DNA, 25 bp, Homo sapien
gacccacccagatgaaatccgtatt

SEQ ID NO: 2430383 - DNA, 25 bp, Homo sapien
gaaaaactgcccgtggaaatgctgg

SEQ ID NO: 2430384 - DNA, 25 bp, Homo sapien
gcagaagtacctgacgcgagtgcct

SEQ ID NO: 2430385 - DNA, 25 bp, Homo sapien
gagagccctccaaacgctgaaggat

SEQ ID NO: 2430386 - DNA, 25 bp, Homo sapien
ccagcaaggagtacagggaacagtc

SEQ ID NO: 2430387 - DNA, 25 bp, Homo sapien
ctgagtctcttcccggtgtcttttc

SEQ ID NO: 2430388 - DNA, 25 bp, Homo sapien
cggtgtcttttccaccggctcagcc

SEQ ID NO: 2430389 - DNA, 25 bp, Homo sapien
gagtctcttcccggtgtcttttcca

SEQ ID NO: 2430390 - DNA, 25 bp, Homo sapien
tcccggtgtcttttccaccggctca

SEQ ID NO: 2430391 - DNA, 25 bp, Homo sapien
taccactagttaacccataagagcc

SEQ ID NO: 2430392 - DNA, 25 bp, Homo sapien
aactgactaccactagttaacccat

SEQ ID NO: 2430393 - DNA, 25 bp, Homo sapien
taataattcagagggagtaaaaagc

SEQ ID NO: 2430394 - DNA, 25 bp, Homo sapien
gactaccactagttaacccataaga

SEQ ID NO: 2430395 - DNA, 25 bp, Homo sapien
atttcacaatagggagctctgtgtt

SEQ ID NO: 2430396 - DNA, 25 bp, Homo sapien
tttcacaatagggagctctgtgttg

SEQ ID NO: 2430397 - DNA, 25 bp, Homo sapien
tttatttcacaatagggagctctgt

SEQ ID NO: 2430398 - DNA, 25 bp, Homo sapien
ttcacaatagggagctctgtgttgc

SEQ ID NO: 2430399 - DNA, 25 bp, Homo sapien
tttcctaaggtgcatcctgcgttgt

SEQ ID NO: 2430400 - DNA, 25 bp, Homo sapien
caacagacacaactatacgcaaacg

SEQ ID NO: 2430401 - DNA, 25 bp, Homo sapien
aaatgtacagtcacattctctccat

SEQ ID NO: 2430402 - DNA, 25 bp, Homo sapien
tcacccaccatcagaaactcaattt

SEQ ID NO: 2430403 - DNA, 25 bp, Homo sapien
gaaatacttagcaaccacccatcca

SEQ ID NO: 2430404 - DNA, 25 bp, Homo sapien
acggaaatacttagcaaccacccat

SEQ ID NO: 2430405 - DNA, 25 bp, Homo sapien
atacttagcaaccacccatccagga

SEQ ID NO: 2430406 - DNA, 25 bp, Homo sapien
acttagcaaccacccatccaggaaa

SEQ ID NO: 2430407 - DNA, 25 bp, Homo sapien
tgcctacgcagtgccttccgaaggt

SEQ ID NO: 2430408 - DNA, 25 bp, Homo sapien
tttgaggagtttcaagcagccgcgg

SEQ ID NO: 2430409 - DNA, 25 bp, Homo sapien
ccgggttcctctcattgcaggctga

SEQ ID NO: 2430410 - DNA, 25 bp, Homo sapien
tctagccggctctcaactttgagga

SEQ ID NO: 2430411 - DNA, 25 bp, Homo sapien
tggccgccgtgtgcccgcgcgcggg

SEQ ID NO: 2430412 - DNA, 25 bp, Homo sapien
ggcgccggtcccacccctgcgcgtc

SEQ ID NO: 2430413 - DNA, 25 bp, Homo sapien
gcggccccgcctctccgcactcggg

SEQ ID NO: 2430414 - DNA, 25 bp, Homo sapien
ccgcctctccgcactcgggaggctg

SEQ ID NO: 2430415 - DNA, 25 bp, Homo sapien
tccgctcgtttctagggaggaggtc

SEQ ID NO: 2430416 - DNA, 25 bp, Homo sapien
ctctccacagggatatctgctggga

SEQ ID NO: 2430417 - DNA, 25 bp, Homo sapien
ttgcctgcgccaagtgcagttgact

SEQ ID NO: 2430418 - DNA, 25 bp, Homo sapien
tgcagttgactgtctgggtttacaa

SEQ ID NO: 2430419 - DNA, 25 bp, Homo sapien
gaggctcttcatcccttccggagat

SEQ ID NO: 2430420 - DNA, 25 bp, Homo sapien
gaccagcgcgctttggttcagcaag

SEQ ID NO: 2430421 - DNA, 25 bp, Homo sapien
ttttgcaagcgtgctcgtggcgcgt

SEQ ID NO: 2430422 - DNA, 25 bp, Homo sapien
acagaaggtgcaagccgaacaaggc

SEQ ID NO: 2430423 - DNA, 25 bp, Homo sapien
gaaagcggggatcgtctccactgtg

SEQ ID NO: 2430424 - DNA, 25 bp, Homo sapien
tccattgtaaatgccttgaaagcgg

SEQ ID NO: 2430425 - DNA, 25 bp, Homo sapien
tggttttatactcactgctctcaca

SEQ ID NO: 2430426 - DNA, 25 bp, Homo sapien
gcacaccacatactacataagctct

SEQ ID NO: 2430427 - DNA, 25 bp, Homo sapien
gccgtaagacatcaggtaagttaaa

SEQ ID NO: 2430428 - DNA, 25 bp, Homo sapien
catcaggtaagttaaaggagctttg

SEQ ID NO: 2430429 - DNA, 25 bp, Homo sapien
acagaattgactcctgccccatgcc

SEQ ID NO: 2430430 - DNA, 25 bp, Homo sapien
tccacccaagctcaaagccgtaaga

SEQ ID NO: 2430431 - DNA, 25 bp, Homo sapien
taccatctggtatgtgggtttagca

SEQ ID NO: 2430432 - DNA, 25 bp, Homo sapien
aggcagcccacctgactcagagctg

SEQ ID NO: 2430433 - DNA, 25 bp, Homo sapien
gtcgtgtagcccctccataagatgg

SEQ ID NO: 2430434 - DNA, 25 bp, Homo sapien
cccacgcgagctctgtgcttgatta

SEQ ID NO: 2430435 - DNA, 25 bp, Homo sapien
tggatcctctgatgtggcatccctt

SEQ ID NO: 2430436 - DNA, 25 bp, Homo sapien
gaaggatttgatgtgatggatcctc

SEQ ID NO: 2430437 - DNA, 25 bp, Homo sapien
caaggtccatgatttctgtggtagg

SEQ ID NO: 2430438 - DNA, 25 bp, Homo sapien
taattctgtccctatcctagaagga

SEQ ID NO: 2430439 - DNA, 25 bp, Homo sapien
gctcctggcccggatgctgtctcct

SEQ ID NO: 2430440 - DNA, 25 bp, Homo sapien
tttgcaccacgaacacatgcacttt

SEQ ID NO: 2430441 - DNA, 25 bp, Homo sapien
tctcctgttctatcgagagacttgg

SEQ ID NO: 2430442 - DNA, 25 bp, Homo sapien
tggaaggcggagtgcatgggagaca

SEQ ID NO: 2430443 - DNA, 25 bp, Homo sapien
tgtccatagacttcctgtcctagac

SEQ ID NO: 2430444 - DNA, 25 bp, Homo sapien
gcagatgtggatcatggtgaacgct

SEQ ID NO: 2430445 - DNA, 25 bp, Homo sapien
gatgaatgctatgaagtccgggcag

SEQ ID NO: 2430446 - DNA, 25 bp, Homo sapien
tccgggcagcaggaattcttgaaga

SEQ ID NO: 2430447 - DNA, 25 bp, Homo sapien
gggagaaccagctgtggttgggttg

SEQ ID NO: 2430448 - DNA, 25 bp, Homo sapien
agggagaaccagctgtggttgggtt

SEQ ID NO: 2430449 - DNA, 25 bp, Homo sapien
ggtagaacctcaaacatgggaagac

SEQ ID NO: 2430450 - DNA, 25 bp, Homo sapien
ttaggagccattgcttcttggctca

SEQ ID NO: 2430451 - DNA, 25 bp, Homo sapien
ctgagatgctggtaggttattttct

SEQ ID NO: 2430452 - DNA, 25 bp, Homo sapien
gggtagaacctcaaacatgggaaga

SEQ ID NO: 2430453 - DNA, 25 bp, Homo sapien
ctataggtgcacttatgtttcaggg

SEQ ID NO: 2430454 - DNA, 25 bp, Homo sapien
tataggtgcacttatgtttcagggt

SEQ ID NO: 2430455 - DNA, 25 bp, Homo sapien
ggtgcacttatgtttcagggtaact

SEQ ID NO: 2430456 - DNA, 25 bp, Homo sapien
taggtgcacttatgtttcagggtaa

SEQ ID NO: 2430457 - DNA, 25 bp, Homo sapien
caattatgtaggttgtgaggttcaa

SEQ ID NO: 2430458 - DNA, 25 bp, Homo sapien
gaatagaagtagcaaaagtaggcat

SEQ ID NO: 2430459 - DNA, 25 bp, Homo sapien
tgaggttcaacaacatagcacccaa

SEQ ID NO: 2430460 - DNA, 25 bp, Homo sapien
tgttgctataccagaatacctatgg

SEQ ID NO: 2430461 - DNA, 25 bp, Homo sapien
gcaggccaacattgctctcctaagg

SEQ ID NO: 2430462 - DNA, 25 bp, Homo sapien
gagtagcgatgttgaaaccagcaag

SEQ ID NO: 2430463 - DNA, 25 bp, Homo sapien
gcccagcttgaccagctgccagagg

SEQ ID NO: 2430464 - DNA, 25 bp, Homo sapien
tcctaaggcccagcttgaccagctg

SEQ ID NO: 2430465 - DNA, 25 bp, Homo sapien
gatttgtcttaatccttggagttca

SEQ ID NO: 2430466 - DNA, 25 bp, Homo sapien
tttgcctctccttgatctgtgctct

SEQ ID NO: 2430467 - DNA, 25 bp, Homo sapien
cagaatatgtctaagtgtgtggacc

SEQ ID NO: 2430468 - DNA, 25 bp, Homo sapien
gatatttgcatgtaggtctcctgga

SEQ ID NO: 2430469 - DNA, 25 bp, Homo sapien
taaacatggtgggataaaaaagcaa

SEQ ID NO: 2430470 - DNA, 25 bp, Homo sapien
gaaaaatgtaatgcccagataagag

SEQ ID NO: 2430471 - DNA, 25 bp, Homo sapien
ccatcctgccaaagattcgtagtca

SEQ ID NO: 2430472 - DNA, 25 bp, Homo sapien
tataacggaagttgggccatcctgc

SEQ ID NO: 2430473 - DNA, 25 bp, Homo sapien
gctctttaacccaaatttaatctga

SEQ ID NO: 2430474 - DNA, 25 bp, Homo sapien
agctctttaacccaaatttaatctg

SEQ ID NO: 2430475 - DNA, 25 bp, Homo sapien
tcttttggctgtgcattggcatact

SEQ ID NO: 2430476 - DNA, 25 bp, Homo sapien
tggcatactctacccactggtcctg

SEQ ID NO: 2430477 - DNA, 25 bp, Homo sapien
cctggtatgcctcaggtcctcttgc

SEQ ID NO: 2430478 - DNA, 25 bp, Homo sapien
gctcttagcgcctcatctattccag

SEQ ID NO: 2430479 - DNA, 25 bp, Homo sapien
gatgcaaatactcccgccacattgg

SEQ ID NO: 2430480 - DNA, 25 bp, Homo sapien
tgtaccttgcatgcttaccctctgg

SEQ ID NO: 2430481 - DNA, 25 bp, Homo sapien
ctggctacttgcaagaggcaggctg

SEQ ID NO: 2430482 - DNA, 25 bp, Homo sapien
gaagtttacctcaatcccatgtgtg

SEQ ID NO: 2430483 - DNA, 25 bp, Homo sapien
tgagtggttgctggcagtagttcaa

SEQ ID NO: 2430484 - DNA, 25 bp, Homo sapien
tgctggcagtagttcaactgtgtag

SEQ ID NO: 2430485 - DNA, 25 bp, Homo sapien
gtagtaatgctgtcagactccttct

SEQ ID NO: 2430486 - DNA, 25 bp, Homo sapien
tcttacctagcaagaggtctagagg

SEQ ID NO: 2430487 - DNA, 25 bp, Homo sapien
tctccagaagcactcaggagtttag

SEQ ID NO: 2430488 - DNA, 25 bp, Homo sapien
tcatagggagagaccatgggatctt

SEQ ID NO: 2430489 - DNA, 25 bp, Homo sapien
tagaaatgctgacactatgtgagag

SEQ ID NO: 2430490 - DNA, 25 bp, Homo sapien
gatccaggtggatagctccagggta

SEQ ID NO: 2430491 - DNA, 25 bp, Homo sapien
aagaacaggattgtaattggtcacc

SEQ ID NO: 2430492 - DNA, 25 bp, Homo sapien
caggattgtaattggtcacctgatc

SEQ ID NO: 2430493 - DNA, 25 bp, Homo sapien
ccaagaacaggattgtaattggtca

SEQ ID NO: 2430494 - DNA, 25 bp, Homo sapien
gtaattggtcacctgatctacctgc

SEQ ID NO: 2430495 - DNA, 25 bp, Homo sapien
tgttccccagacatacctctgtcat

SEQ ID NO: 2430496 - DNA, 25 bp, Homo sapien
ctgttccccagacatacctctgtca

SEQ ID NO: 2430497 - DNA, 25 bp, Homo sapien
ttagcccagtgtctgaaagtgaccc

SEQ ID NO: 2430498 - DNA, 25 bp, Homo sapien
gcccagtgtctgaaagtgaccctga

SEQ ID NO: 2430499 - DNA, 25 bp, Homo sapien
gtctgaaagtgaccctgagaagttg

SEQ ID NO: 2430500 - DNA, 25 bp, Homo sapien
cagtgtctgaaagtgaccctgagaa

SEQ ID NO: 2430501 - DNA, 25 bp, Homo sapien
cattcactttggtcgcctcttccag

SEQ ID NO: 2430502 - DNA, 25 bp, Homo sapien
catgcattcactttggtcgcctctt

SEQ ID NO: 2430503 - DNA, 25 bp, Homo sapien
cactttggtcgcctcttccaggtct

SEQ ID NO: 2430504 - DNA, 25 bp, Homo sapien
tggcacccatgcattcactttggtc

SEQ ID NO: 2430505 - DNA, 25 bp, Homo sapien
catactgtgttgagacctccttgca

SEQ ID NO: 2430506 - DNA, 25 bp, Homo sapien
gagtggccgcttgccctttgcagcc

SEQ ID NO: 2430507 - DNA, 25 bp, Homo sapien
ttggtcatactgtgttgagacctcc

SEQ ID NO: 2430508 - DNA, 25 bp, Homo sapien
gttgagacctccttgcaggagtggc

SEQ ID NO: 2430509 - DNA, 25 bp, Homo sapien
cccccagcgtttggagagcagagtt

SEQ ID NO: 2430510 - DNA, 25 bp, Homo sapien
tcagtctcccccagcgtttggagag

SEQ ID NO: 2430511 - DNA, 25 bp, Homo sapien
gtctcccccagcgtttggagagcag

SEQ ID NO: 2430512 - DNA, 25 bp, Homo sapien
caaatcagtctcccccagcgtttgg

SEQ ID NO: 2430513 - DNA, 25 bp, Homo sapien
cagtttaccgatctggatggtgtca

SEQ ID NO: 2430514 - DNA, 25 bp, Homo sapien
tgaaccagtttaccgatctggatgg

SEQ ID NO: 2430515 - DNA, 25 bp, Homo sapien
agtttaccgatctggatggtgtcag

SEQ ID NO: 2430516 - DNA, 25 bp, Homo sapien
agatgaaccagtttaccgatctgga

SEQ ID NO: 2430517 - DNA, 25 bp, Homo sapien
gatagctagcgttggttaagttaga

SEQ ID NO: 2430518 - DNA, 25 bp, Homo sapien
gcaagatagctagcgttggttaagt

SEQ ID NO: 2430519 - DNA, 25 bp, Homo sapien
tagaggcaagatagctagcgttggt

SEQ ID NO: 2430520 - DNA, 25 bp, Homo sapien
tagctagcgttggttaagttagatc

SEQ ID NO: 2430521 - DNA, 25 bp, Homo sapien
tcctgcctccttggtaattcctcag

SEQ ID NO: 2430522 - DNA, 25 bp, Homo sapien
tgattggcaccaggcttggtgtgtt

SEQ ID NO: 2430523 - DNA, 25 bp, Homo sapien
gtgtgttttgctccacctcctgcct

SEQ ID NO: 2430524 - DNA, 25 bp, Homo sapien
cataatattgtcaatgattggcacc

SEQ ID NO: 2430525 - DNA, 25 bp, Homo sapien
tattcgaatggccagggactttgac

SEQ ID NO: 2430526 - DNA, 25 bp, Homo sapien
tagatggagccccatggtcaatgca

SEQ ID NO: 2430527 - DNA, 25 bp, Homo sapien
tcagggccttgagggaatatccttt

SEQ ID NO: 2430528 - DNA, 25 bp, Homo sapien
taaaggactttagcctgaaggtgac

SEQ ID NO: 2430529 - DNA, 25 bp, Homo sapien
tttgcttttatggaccaagcgatgg

SEQ ID NO: 2430530 - DNA, 25 bp, Homo sapien
tgtgtatgaccacagacctcccttc

SEQ ID NO: 2430531 - DNA, 25 bp, Homo sapien
aaggatgacccagcagatgggcacg

SEQ ID NO: 2430532 - DNA, 25 bp, Homo sapien
caagcgatggaaggaaatgacaata

SEQ ID NO: 2430533 - DNA, 25 bp, Homo sapien
gacagtaagagctaccctgcagggt

SEQ ID NO: 2430534 - DNA, 25 bp, Homo sapien
agagggacctcagattccggcttca

SEQ ID NO: 2430535 - DNA, 25 bp, Homo sapien
gggaacaaagactgacactggccgg

SEQ ID NO: 2430536 - DNA, 25 bp, Homo sapien
tggcatctatgctgctcaggacaca

SEQ ID NO: 2430537 - DNA, 25 bp, Homo sapien
tgtaatcccaaaggtgggaggatca

SEQ ID NO: 2430538 - DNA, 25 bp, Homo sapien
catgcctgtaatcccggctactcgg

SEQ ID NO: 2430539 - DNA, 25 bp, Homo sapien
cctgaggtaaggtgttcgagaccag

SEQ ID NO: 2430540 - DNA, 25 bp, Homo sapien
cagcctggccaacggggcatggtgg

SEQ ID NO: 2430541 - DNA, 25 bp, Homo sapien
gactgatcagagactagctttggag

SEQ ID NO: 2430542 - DNA, 25 bp, Homo sapien
tcttcaggctttatcccagtaatgc

SEQ ID NO: 2430543 - DNA, 25 bp, Homo sapien
gaatccagatgccttatcaatttgg

SEQ ID NO: 2430544 - DNA, 25 bp, Homo sapien
ccttgcgtggtcagtttattcaacc

SEQ ID NO: 2430545 - DNA, 25 bp, Homo sapien
gtgagccaagatcatgccattgcac

SEQ ID NO: 2430546 - DNA, 25 bp, Homo sapien
tgggagactgaggcacgagaaccgc

SEQ ID NO: 2430547 - DNA, 25 bp, Homo sapien
ccagcctgggtaactgagcaacact

SEQ ID NO: 2430548 - DNA, 25 bp, Homo sapien
ttgaacccaggaggtggaggctgca

SEQ ID NO: 2430549 - DNA, 25 bp, Homo sapien
caaatgcctacacttatctaatcaa

SEQ ID NO: 2430550 - DNA, 25 bp, Homo sapien
aagtgatattcctctccccgaaatc

SEQ ID NO: 2430551 - DNA, 25 bp, Homo sapien
aagaaaacaaatgcctacacttatc

SEQ ID NO: 2430552 - DNA, 25 bp, Homo sapien
taatcaatcagaagaccatctcccc

SEQ ID NO: 2430553 - DNA, 25 bp, Homo sapien
tgtaaactgtaacaccttgcacaga

SEQ ID NO: 2430554 - DNA, 25 bp, Homo sapien
ttgtaaactgtaacaccttgcacag

SEQ ID NO: 2430555 - DNA, 25 bp, Homo sapien
gtaaactgtaacaccttgcacagaa

SEQ ID NO: 2430556 - DNA, 25 bp, Homo sapien
cgtgaacataccacaccagcaagaa

SEQ ID NO: 2430557 - DNA, 25 bp, Homo sapien
ccttctgaccatcttttcagccgtg

SEQ ID NO: 2430558 - DNA, 25 bp, Homo sapien
gaccatcttttcagccgtgaacata

SEQ ID NO: 2430559 - DNA, 25 bp, Homo sapien
ttcagccgtgaacataccacaccag

SEQ ID NO: 2430560 - DNA, 25 bp, Homo sapien
taagctacacccagattactgagaa

SEQ ID NO: 2430561 - DNA, 25 bp, Homo sapien
aaggaagagtcaaaataagctacac

SEQ ID NO: 2430562 - DNA, 25 bp, Homo sapien
gagtcaaaataagctacacccagat

SEQ ID NO: 2430563 - DNA, 25 bp, Homo sapien
cccagattactgagaaaggtgaaat

SEQ ID NO: 2430564 - DNA, 25 bp, Homo sapien
tagtcttccgcttcctaaagcaaga

SEQ ID NO: 2430565 - DNA, 25 bp, Homo sapien
aagcttcggtcattagtcttccgct

SEQ ID NO: 2430566 - DNA, 25 bp, Homo sapien
aagtcttgaagcttcggtcattagt

SEQ ID NO: 2430567 - DNA, 25 bp, Homo sapien
ggtcattagtcttccgcttcctaaa

SEQ ID NO: 2430568 - DNA, 25 bp, Homo sapien
gacagaggtgtagctttattgccca

SEQ ID NO: 2430569 - DNA, 25 bp, Homo sapien
aaaatgttttccatagatcggccgc

SEQ ID NO: 2430570 - DNA, 25 bp, Homo sapien
tagcccatgagacaggggatgtagc

SEQ ID NO: 2430571 - DNA, 25 bp, Homo sapien
ttttccatagatcggccgcctgtgg

SEQ ID NO: 2430572 - DNA, 25 bp, Homo sapien
ccagccagtgcttcaagaaaaatta

SEQ ID NO: 2430573 - DNA, 25 bp, Homo sapien
cacgccccgccaacatgaaaatttt

SEQ ID NO: 2430574 - DNA, 25 bp, Homo sapien
tttagggagactgttcaaaggtcac

SEQ ID NO: 2430575 - DNA, 25 bp, Homo sapien
ggatacagatcaacctaaggatttc

SEQ ID NO: 2430576 - DNA, 25 bp, Homo sapien
gtgtttttatgtctcttgcttgaga

SEQ ID NO: 2430577 - DNA, 25 bp, Homo sapien
tgagattaggatatgggattatact

SEQ ID NO: 2430578 - DNA, 25 bp, Homo sapien
ttaggatatgggattatactcattc

SEQ ID NO: 2430579 - DNA, 25 bp, Homo sapien
tgcttgagattaggatatgggatta

SEQ ID NO: 2430580 - DNA, 25 bp, Homo sapien
tcttgaaatagcgtgatgatggtct

SEQ ID NO: 2430581 - DNA, 25 bp, Homo sapien
gagttcttagatatacagtgctgag

SEQ ID NO: 2430582 - DNA, 25 bp, Homo sapien
agaacctctctggtcgatgtacatg

SEQ ID NO: 2430583 - DNA, 25 bp, Homo sapien
tagggcaccagactatgagatttgg

SEQ ID NO: 2430584 - DNA, 25 bp, Homo sapien
atcttactgacactgaagtacagca

SEQ ID NO: 2430585 - DNA, 25 bp, Homo sapien
gcaacatcatatggtaggattccaa

SEQ ID NO: 2430586 - DNA, 25 bp, Homo sapien
tcataaggaaacaactggaagtcaa

SEQ ID NO: 2430587 - DNA, 25 bp, Homo sapien
agtcaatcttactgacactgaagta

SEQ ID NO: 2430588 - DNA, 25 bp, Homo sapien
attaacatgacccactgaccctctg

SEQ ID NO: 2430589 - DNA, 25 bp, Homo sapien
ttttttggggcatctctggttctct

SEQ ID NO: 2430590 - DNA, 25 bp, Homo sapien
cactgaccctctgcaagtttgtttt

SEQ ID NO: 2430591 - DNA, 25 bp, Homo sapien
gacccactgaccctctgcaagtttg

SEQ ID NO: 2430592 - DNA, 25 bp, Homo sapien
atccatttgcctgaattggaccagt

SEQ ID NO: 2430593 - DNA, 25 bp, Homo sapien
gtagttgtccagttccactgatgaa

SEQ ID NO: 2430594 - DNA, 25 bp, Homo sapien
gaattggaccagtgtagttgtccag

SEQ ID NO: 2430595 - DNA, 25 bp, Homo sapien
catttgcctgaattggaccagtgta

SEQ ID NO: 2430596 - DNA, 25 bp, Homo sapien
caggcacagaacacatcctcctgac

SEQ ID NO: 2430597 - DNA, 25 bp, Homo sapien
tcaggcacagaacacatcctcctga

SEQ ID NO: 2430598 - DNA, 25 bp, Homo sapien
tcagtagtttcaacacataatgtca

SEQ ID NO: 2430599 - DNA, 25 bp, Homo sapien
tggtttggtatgtggcagatgctca

SEQ ID NO: 2430600 - DNA, 25 bp, Homo sapien
tcatggtaacctggtttggtatgtg

SEQ ID NO: 2430601 - DNA, 25 bp, Homo sapien
tatcagtagtttcaacacataatgt

SEQ ID NO: 2430602 - DNA, 25 bp, Homo sapien
gctgtggtatctgacaccgtcattt

SEQ ID NO: 2430603 - DNA, 25 bp, Homo sapien
cagctgctaatcttagatgtggaaa

SEQ ID NO: 2430604 - DNA, 25 bp, Homo sapien
agagtactccgcctctacttctact

SEQ ID NO: 2430605 - DNA, 25 bp, Homo sapien
gcctctacttctactctctgaagtg

SEQ ID NO: 2430606 - DNA, 25 bp, Homo sapien
gagtgtccaggataggtgccgcaaa

SEQ ID NO: 2430607 - DNA, 25 bp, Homo sapien
ttgttggcaacgatggcgggtctct

SEQ ID NO: 2430608 - DNA, 25 bp, Homo sapien
tccttctgggttgccggagtgtcca

SEQ ID NO: 2430609 - DNA, 25 bp, Homo sapien
tccctcttcaccgagttgttggcaa

SEQ ID NO: 2430610 - DNA, 25 bp, Homo sapien
ttcactcctgatgtcagccacgaac

SEQ ID NO: 2430611 - DNA, 25 bp, Homo sapien
cttcactcctgatgtcagccacgaa

SEQ ID NO: 2430612 - DNA, 25 bp, Homo sapien
actcctgatgtcagccacgaaccca

SEQ ID NO: 2430613 - DNA, 25 bp, Homo sapien
ctgatgtcagccacgaacccaccag

SEQ ID NO: 2430614 - DNA, 25 bp, Homo sapien
gaatttcaagggtcaggacctcagc

SEQ ID NO: 2430615 - DNA, 25 bp, Homo sapien
aacagccagtagttgagtgtctctg

SEQ ID NO: 2430616 - DNA, 25 bp, Homo sapien
ctgctttcaagaatttcaagggtca

SEQ ID NO: 2430617 - DNA, 25 bp, Homo sapien
gcatctgacaacagccagtagttga

SEQ ID NO: 2430618 - DNA, 25 bp, Homo sapien
gaatgggaattgacaaagcccaatt

SEQ ID NO: 2430619 - DNA, 25 bp, Homo sapien
gatagtaagcaacaatgggaatggg

SEQ ID NO: 2430620 - DNA, 25 bp, Homo sapien
aactgtactgatgagagcatgtgtc

SEQ ID NO: 2430621 - DNA, 25 bp, Homo sapien
tctcatctgatccttaactgtactg

SEQ ID NO: 2430622 - DNA, 25 bp, Homo sapien
aattggtattatgtgggttgtggca

SEQ ID NO: 2430623 - DNA, 25 bp, Homo sapien
cagaattgcagtgtggatgggccta

SEQ ID NO: 2430624 - DNA, 25 bp, Homo sapien
gatgggcctattgtctggttaccag

SEQ ID NO: 2430625 - DNA, 25 bp, Homo sapien
catctccttctgaccaccaaagagg

SEQ ID NO: 2430626 - DNA, 25 bp, Homo sapien
ctccaagaaggagtaagagagaagt

SEQ ID NO: 2430627 - DNA, 25 bp, Homo sapien
ggagtaagagagaagttgtcaacaa

SEQ ID NO: 2430628 - DNA, 25 bp, Homo sapien
agaaggagtaagagagaagttgtca

SEQ ID NO: 2430629 - DNA, 25 bp, Homo sapien
aaggagtaagagagaagttgtcaac

SEQ ID NO: 2430630 - DNA, 25 bp, Homo sapien
ttttggtctctgtatcagtggtcag

SEQ ID NO: 2430631 - DNA, 25 bp, Homo sapien
gattttggtctctgtatcagtggtc

SEQ ID NO: 2430632 - DNA, 25 bp, Homo sapien
gttgatttgagtgggattttggtct

SEQ ID NO: 2430633 - DNA, 25 bp, Homo sapien
ttggtctctgtatcagtggtcagct

SEQ ID NO: 2430634 - DNA, 25 bp, Homo sapien
ctgtggaaacaaagtcagatctcat

SEQ ID NO: 2430635 - DNA, 25 bp, Homo sapien
tatgttcagggcacactggatgcat

SEQ ID NO: 2430636 - DNA, 25 bp, Homo sapien
cattatgttcagggcacactggatg

SEQ ID NO: 2430637 - DNA, 25 bp, Homo sapien
ttatgttcagggcacactggatgca

SEQ ID NO: 2430638 - DNA, 25 bp, Homo sapien
attatgttcagggcacactggatgc

SEQ ID NO: 2430639 - DNA, 25 bp, Homo sapien
tatcttcccaaagacaacaggcttg

SEQ ID NO: 2430640 - DNA, 25 bp, Homo sapien
gcttgctatgtaaccactcagtctt

SEQ ID NO: 2430641 - DNA, 25 bp, Homo sapien
gacaacaggcttgctatgtaaccac

SEQ ID NO: 2430642 - DNA, 25 bp, Homo sapien
ttatcttcccaaagacaacaggctt

SEQ ID NO: 2430643 - DNA, 25 bp, Homo sapien
gaagtcaccaccctagcacgtaagg

SEQ ID NO: 2430644 - DNA, 25 bp, Homo sapien
gctgagtcctgcatttaccatgaac

SEQ ID NO: 2430645 - DNA, 25 bp, Homo sapien
tctctctgtagataagcttgtcacc

SEQ ID NO: 2430646 - DNA, 25 bp, Homo sapien
gcttgtcaccaacgccataatggca

SEQ ID NO: 2430647 - DNA, 25 bp, Homo sapien
cctctctcgccagctctcaagtaca

SEQ ID NO: 2430648 - DNA, 25 bp, Homo sapien
tcctctctcgccagctctcaagtac

SEQ ID NO: 2430649 - DNA, 25 bp, Homo sapien
aagacacagcccaagttgatgatgg

SEQ ID NO: 2430650 - DNA, 25 bp, Homo sapien
cctgtgtgattaagcggcactgaga

SEQ ID NO: 2430651 - DNA, 25 bp, Homo sapien
tatcatactcctagaaatagagagg

SEQ ID NO: 2430652 - DNA, 25 bp, Homo sapien
ctgggcaggtctgttgtgattagga

SEQ ID NO: 2430653 - DNA, 25 bp, Homo sapien
tctgttgtgattaggagagccttcc

SEQ ID NO: 2430654 - DNA, 25 bp, Homo sapien
caaatccagataaagcaatgggcat

SEQ ID NO: 2430655 - DNA, 25 bp, Homo sapien
cctcaaatccagataaagcaatggg

SEQ ID NO: 2430656 - DNA, 25 bp, Homo sapien
ctcaaatccagataaagcaatgggc

SEQ ID NO: 2430657 - DNA, 25 bp, Homo sapien
tcaaatccagataaagcaatgggca

SEQ ID NO: 2430658 - DNA, 25 bp, Homo sapien
cacaccccaaagtaatgtttagcta

SEQ ID NO: 2430659 - DNA, 25 bp, Homo sapien
tattgaacccatgaattcaaattct

SEQ ID NO: 2430660 - DNA, 25 bp, Homo sapien
tttagctaaatacctggcatccgga

SEQ ID NO: 2430661 - DNA, 25 bp, Homo sapien
ttgaaacatctaacaaccatagagg

SEQ ID NO: 2430662 - DNA, 25 bp, Homo sapien
tgacagaccgctcttagcctgctag

SEQ ID NO: 2430663 - DNA, 25 bp, Homo sapien
gcctgctgacagattgtactgctta

SEQ ID NO: 2430664 - DNA, 25 bp, Homo sapien
gatccagtccagatgctatttgaag

SEQ ID NO: 2430665 - DNA, 25 bp, Homo sapien
tgcttaggttgattgacagttactc

SEQ ID NO: 2430666 - DNA, 25 bp, Homo sapien
gaggcagatatgtttgtccacgagc

SEQ ID NO: 2430667 - DNA, 25 bp, Homo sapien
tcttgtcagcatagaacagtacagc

SEQ ID NO: 2430668 - DNA, 25 bp, Homo sapien
tacccaactagctaccagtctggtg

SEQ ID NO: 2430669 - DNA, 25 bp, Homo sapien
tcttagagtttcatgcaggtgaggc

SEQ ID NO: 2430670 - DNA, 25 bp, Homo sapien
tgttttcctacatatacaaatgtgt

SEQ ID NO: 2430671 - DNA, 25 bp, Homo sapien
gcaacagctgttttcctacatatac

SEQ ID NO: 2430672 - DNA, 25 bp, Homo sapien
caaatgtgtacatgaagagagaagg

SEQ ID NO: 2430673 - DNA, 25 bp, Homo sapien
atacaaatgtgtacatgaagagaga

SEQ ID NO: 2430674 - DNA, 25 bp, Homo sapien
gcaaacgtgataagatccttgaagt

SEQ ID NO: 2430675 - DNA, 25 bp, Homo sapien
tcattccgtgacctcagcgacattg

SEQ ID NO: 2430676 - DNA, 25 bp, Homo sapien
cactgggaatgcaaacgtgataaga

SEQ ID NO: 2430677 - DNA, 25 bp, Homo sapien
gacattgatgttacatctacagtgc

SEQ ID NO: 2430678 - DNA, 25 bp, Homo sapien
gcagaagttgtctagccccagagga

SEQ ID NO: 2430679 - DNA, 25 bp, Homo sapien
ggacccatgagattacatgacatct

SEQ ID NO: 2430680 - DNA, 25 bp, Homo sapien
tatggccagggttacaaaaagcatc

SEQ ID NO: 2430681 - DNA, 25 bp, Homo sapien
cagataatagtgctaaatggttcaa

SEQ ID NO: 2430682 - DNA, 25 bp, Homo sapien
ggttcccagtaatgactgccgtcct

SEQ ID NO: 2430683 - DNA, 25 bp, Homo sapien
caggcgatacctggttctcatccaa

SEQ ID NO: 2430684 - DNA, 25 bp, Homo sapien
tcctctcagccaggcgatacctggt

SEQ ID NO: 2430685 - DNA, 25 bp, Homo sapien
caggcttctgagaaagtcctcggtt

SEQ ID NO: 2430686 - DNA, 25 bp, Homo sapien
tccttgagatccggttctctaataa

SEQ ID NO: 2430687 - DNA, 25 bp, Homo sapien
ctccttgagatccggttctctaata

SEQ ID NO: 2430688 - DNA, 25 bp, Homo sapien
ctttgccacctttttcctttctcag

SEQ ID NO: 2430689 - DNA, 25 bp, Homo sapien
ttgccacctttttcctttctcagga

SEQ ID NO: 2430690 - DNA, 25 bp, Homo sapien
ttcctttctcaggaaaattctctct

SEQ ID NO: 2430691 - DNA, 25 bp, Homo sapien
tttctcaggaaaattctctcttccc

SEQ ID NO: 2430692 - DNA, 25 bp, Homo sapien
tgcccctccatagagttaaaagcca

SEQ ID NO: 2430693 - DNA, 25 bp, Homo sapien
gcccctccatagagttaaaagccaa

SEQ ID NO: 2430694 - DNA, 25 bp, Homo sapien
gtgcccctccatagagttaaaagcc

SEQ ID NO: 2430695 - DNA, 25 bp, Homo sapien
cgtgcccctccatagagttaaaagc

SEQ ID NO: 2430696 - DNA, 25 bp, Homo sapien
tttgctgaaggtgagaatctgcccc

SEQ ID NO: 2430697 - DNA, 25 bp, Homo sapien
tggaacccgagatatctttgtcttt

SEQ ID NO: 2430698 - DNA, 25 bp, Homo sapien
aactgatttgctgaaggtgagaatc

SEQ ID NO: 2430699 - DNA, 25 bp, Homo sapien
gaaaggatggaacccgagatatctt

SEQ ID NO: 2430700 - DNA, 25 bp, Homo sapien
tacaactgcatcttgtaagaaatgt

SEQ ID NO: 2430701 - DNA, 25 bp, Homo sapien
tatcttctgttagtgatggcactgt

SEQ ID NO: 2430702 - DNA, 25 bp, Homo sapien
ttagtgatggcactgtattctttgt

SEQ ID NO: 2430703 - DNA, 25 bp, Homo sapien
tctgttagtgatggcactgtattct

SEQ ID NO: 2430704 - DNA, 25 bp, Homo sapien
gaagtcagtctagacagtctgctgc

SEQ ID NO: 2430705 - DNA, 25 bp, Homo sapien
ttaagatcttatcacagccaagctg

SEQ ID NO: 2430706 - DNA, 25 bp, Homo sapien
ttcatgtccagcaaagaagtcagtc

SEQ ID NO: 2430707 - DNA, 25 bp, Homo sapien
tagactgtggtcaagaaaagaaggc

SEQ ID NO: 2430708 - DNA, 25 bp, Homo sapien
gacctgtccctcagacaagttacaa

SEQ ID NO: 2430709 - DNA, 25 bp, Homo sapien
aggcaccggtgccactagtccctga

SEQ ID NO: 2430710 - DNA, 25 bp, Homo sapien
gggtgagaaggcaccggtgccacta

SEQ ID NO: 2430711 - DNA, 25 bp, Homo sapien
tgacctgtccctcagacaagttaca

SEQ ID NO: 2430712 - DNA, 25 bp, Homo sapien
cagttttctaaatgcagtgccacaa

SEQ ID NO: 2430713 - DNA, 25 bp, Homo sapien
cataaatcagtgctcaacagtggct

SEQ ID NO: 2430714 - DNA, 25 bp, Homo sapien
tatctttccgacagactccaggcag

SEQ ID NO: 2430715 - DNA, 25 bp, Homo sapien
tcatatacaatagtgcccggtacac

SEQ ID NO: 2430716 - DNA, 25 bp, Homo sapien
tgtcatcatgttgtgccattcctcc

SEQ ID NO: 2430717 - DNA, 25 bp, Homo sapien
gctctgtcggagcattctgaacaat

SEQ ID NO: 2430718 - DNA, 25 bp, Homo sapien
gtccagtcttgcagatgctaattaa

SEQ ID NO: 2430719 - DNA, 25 bp, Homo sapien
tcctcctccttggtagctctgtcgg

SEQ ID NO: 2430720 - DNA, 25 bp, Homo sapien
ggctaatgctgtagagaagagagga

SEQ ID NO: 2430721 - DNA, 25 bp, Homo sapien
gaagacagcaccaggaataagtcaa

SEQ ID NO: 2430722 - DNA, 25 bp, Homo sapien
ggaataagtcaagtctcagaatcat

SEQ ID NO: 2430723 - DNA, 25 bp, Homo sapien
aatacccaggaacaaggtggacagg

SEQ ID NO: 2430724 - DNA, 25 bp, Homo sapien
tggagcgggtcttgccagaatgctt

SEQ ID NO: 2430725 - DNA, 25 bp, Homo sapien
cctgtttgttggagcgggtcttgcc

SEQ ID NO: 2430726 - DNA, 25 bp, Homo sapien
tctgccctgtttgttggagcgggtc

SEQ ID NO: 2430727 - DNA, 25 bp, Homo sapien
tgccatattgtctgccctgtttgtt

SEQ ID NO: 2430728 - DNA, 25 bp, Homo sapien
ccactcccctgtcccagtagatttg

SEQ ID NO: 2430729 - DNA, 25 bp, Homo sapien
gtcatgtagcaatcatttccatcca

SEQ ID NO: 2430730 - DNA, 25 bp, Homo sapien
gggaacctctgtgggaccatctctc

SEQ ID NO: 2430731 - DNA, 25 bp, Homo sapien
tggactgtcatgtagcaatcatttc

SEQ ID NO: 2430732 - DNA, 25 bp, Homo sapien
cacgtatgtcgcacacccaggtctt

SEQ ID NO: 2430733 - DNA, 25 bp, Homo sapien
gcacgtatgtcgcacacccaggtct

SEQ ID NO: 2430734 - DNA, 25 bp, Homo sapien
agcacgtatgtcgcacacccaggtc

SEQ ID NO: 2430735 - DNA, 25 bp, Homo sapien
taatcaaagagaggcaccttaggcc

SEQ ID NO: 2430736 - DNA, 25 bp, Homo sapien
caagtttgagttcttacagtgtaca

SEQ ID NO: 2430737 - DNA, 25 bp, Homo sapien
ttccagaaagagcatgcatgcagtt

SEQ ID NO: 2430738 - DNA, 25 bp, Homo sapien
gaatactaacacattgggtctgtcc

SEQ ID NO: 2430739 - DNA, 25 bp, Homo sapien
cttctttgccgaagaatgctcatcc

SEQ ID NO: 2430740 - DNA, 25 bp, Homo sapien
tgccgaagaatgctcatccatccac

SEQ ID NO: 2430741 - DNA, 25 bp, Homo sapien
aatagatcttctttgccgaagaatg

SEQ ID NO: 2430742 - DNA, 25 bp, Homo sapien
tccacccatgtagccacaatcgact

SEQ ID NO: 2430743 - DNA, 25 bp, Homo sapien
gaagaaaggcgaaacattgagatgc

SEQ ID NO: 2430744 - DNA, 25 bp, Homo sapien
atgcagacctgcaggcttgagagaa

SEQ ID NO: 2430745 - DNA, 25 bp, Homo sapien
gcgaaacattgagatgcaacgccta

SEQ ID NO: 2430746 - DNA, 25 bp, Homo sapien
gatgcaacgcctatagcccgtgaca

SEQ ID NO: 2430747 - DNA, 25 bp, Homo sapien
tctgttggacatccaagtggagctg

SEQ ID NO: 2430748 - DNA, 25 bp, Homo sapien
tatgagtctgcagttcaggagagaa

SEQ ID NO: 2430749 - DNA, 25 bp, Homo sapien
tggttctggacacatcaagtttgag

SEQ ID NO: 2430750 - DNA, 25 bp, Homo sapien
tgtgacttagaccagaatgagcgta

SEQ ID NO: 2430751 - DNA, 25 bp, Homo sapien
ttgctgacattccatctcaatttga

SEQ ID NO: 2430752 - DNA, 25 bp, Homo sapien
gcccaagactgacaacatgacacac

SEQ ID NO: 2430753 - DNA, 25 bp, Homo sapien
aggaagctcacgcttggaaacccca

SEQ ID NO: 2430754 - DNA, 25 bp, Homo sapien
ggccaggaagctcacgcttggaaac

SEQ ID NO: 2430755 - DNA, 25 bp, Homo sapien
ttgagccgttgttcttgtgcactgc

SEQ ID NO: 2430756 - DNA, 25 bp, Homo sapien
caaagattcaagacaaggatggcct

SEQ ID NO: 2430757 - DNA, 25 bp, Homo sapien
tggaagatgagcacaccatctgact

SEQ ID NO: 2430758 - DNA, 25 bp, Homo sapien
agaactttgtgaacaccttgacagg

SEQ ID NO: 2430759 - DNA, 25 bp, Homo sapien
aacacaggaggagtaaggagagtat

SEQ ID NO: 2430760 - DNA, 25 bp, Homo sapien
tcagaacacaggaggagtaaggaga

SEQ ID NO: 2430761 - DNA, 25 bp, Homo sapien
gaacacaggaggagtaaggagagta

SEQ ID NO: 2430762 - DNA, 25 bp, Homo sapien
cagaacacaggaggagtaaggagag

SEQ ID NO: 2430763 - DNA, 25 bp, Homo sapien
gtcctacaggtcagcaacgttagat

SEQ ID NO: 2430764 - DNA, 25 bp, Homo sapien
cagcaacgttagatatgcaacagcc

SEQ ID NO: 2430765 - DNA, 25 bp, Homo sapien
gagggctccaacgtggcttcctcct

SEQ ID NO: 2430766 - DNA, 25 bp, Homo sapien
gccaacagagggctccaacgtggct

SEQ ID NO: 2430767 - DNA, 25 bp, Homo sapien
acaccctcgtacaccgccagcacca

SEQ ID NO: 2430768 - DNA, 25 bp, Homo sapien
aggatcaccaacaccctcgtacacc

SEQ ID NO: 2430769 - DNA, 25 bp, Homo sapien
gcacaggatcaccaacaccctcgta

SEQ ID NO: 2430770 - DNA, 25 bp, Homo sapien
ctggcacaggatcaccaacaccctc

SEQ ID NO: 2430771 - DNA, 25 bp, Homo sapien
ggactgcatccatgcctggtgttaa

SEQ ID NO: 2430772 - DNA, 25 bp, Homo sapien
aaagttcatttgtgtcccataaggc

SEQ ID NO: 2430773 - DNA, 25 bp, Homo sapien
gaaggctaacggaagggactgcatc

SEQ ID NO: 2430774 - DNA, 25 bp, Homo sapien
aaactgtgccttctagtatcagctg

SEQ ID NO: 2430775 - DNA, 25 bp, Homo sapien
tcagaatgctttctgccacatgcat

SEQ ID NO: 2430776 - DNA, 25 bp, Homo sapien
agaatgctttctgccacatgcatac

SEQ ID NO: 2430777 - DNA, 25 bp, Homo sapien
cagaatgctttctgccacatgcata

SEQ ID NO: 2430778 - DNA, 25 bp, Homo sapien
cagccgctgtgctcttgtgttatcc

SEQ ID NO: 2430779 - DNA, 25 bp, Homo sapien
tagtaataccgaagaaatgccagct

SEQ ID NO: 2430780 - DNA, 25 bp, Homo sapien
ttatcctgacagtggctcagcaacc

SEQ ID NO: 2430781 - DNA, 25 bp, Homo sapien
tgttattttctgaacatccagtagg

SEQ ID NO: 2430782 - DNA, 25 bp, Homo sapien
ttctttaaacataactctgataaag

SEQ ID NO: 2430783 - DNA, 25 bp, Homo sapien
tttctttaaacataactctgataaa

SEQ ID NO: 2430784 - DNA, 25 bp, Homo sapien
gaaatgcctcctgttaacagagata

SEQ ID NO: 2430785 - DNA, 25 bp, Homo sapien
tcggaggcagccaataaatgacggg

SEQ ID NO: 2430786 - DNA, 25 bp, Homo sapien
aaaaatgactgagcactatgtgaca

SEQ ID NO: 2430787 - DNA, 25 bp, Homo sapien
aatggtgaggacttggatatgcccc

SEQ ID NO: 2430788 - DNA, 25 bp, Homo sapien
gcacgttctgaactgttttggccaa

SEQ ID NO: 2430789 - DNA, 25 bp, Homo sapien
tacattaagagaagacagcacgttc

SEQ ID NO: 2430790 - DNA, 25 bp, Homo sapien
ggatcataccgtagtccattcgggt

SEQ ID NO: 2430791 - DNA, 25 bp, Homo sapien
tccaaggccctaaagccagatggag

SEQ ID NO: 2430792 - DNA, 25 bp, Homo sapien
tgtgcaaacgtctgtgctaggtact

SEQ ID NO: 2430793 - DNA, 25 bp, Homo sapien
aagaccatcgccttcagggttagga

SEQ ID NO: 2430794 - DNA, 25 bp, Homo sapien
ggtgtaattggtgaacaagctctct

SEQ ID NO: 2430795 - DNA, 25 bp, Homo sapien
tacagggatgagcagagttctagcc

SEQ ID NO: 2430796 - DNA, 25 bp, Homo sapien
taacttatgttcaaagatagtcctt

SEQ ID NO: 2430797 - DNA, 25 bp, Homo sapien
aaaaacagagttcacttgaatacaa

SEQ ID NO: 2430798 - DNA, 25 bp, Homo sapien
tacaattctcactagttaaatcaca

SEQ ID NO: 2430799 - DNA, 25 bp, Homo sapien
aaatcacaattcaccttatagttaa

SEQ ID NO: 2430800 - DNA, 25 bp, Homo sapien
tcttgagttcttcgacagaactatc

SEQ ID NO: 2430801 - DNA, 25 bp, Homo sapien
tcaaccaccgtatcttttcttgagt

SEQ ID NO: 2430802 - DNA, 25 bp, Homo sapien
atcttttcttgagttcttcgacaga

SEQ ID NO: 2430803 - DNA, 25 bp, Homo sapien
cttttcttgagttcttcgacagaac

SEQ ID NO: 2430804 - DNA, 25 bp, Homo sapien
cttcaatcctgacttgtctatgtga

SEQ ID NO: 2430805 - DNA, 25 bp, Homo sapien
tatgtgattaaataatgcacgtgca

SEQ ID NO: 2430806 - DNA, 25 bp, Homo sapien
acttgtctatgtgattaaataatgc

SEQ ID NO: 2430807 - DNA, 25 bp, Homo sapien
tcctgacttgtctatgtgattaaat

SEQ ID NO: 2430808 - DNA, 25 bp, Homo sapien
aattatatagcaatccaacaatggt

SEQ ID NO: 2430809 - DNA, 25 bp, Homo sapien
ctgatgaaatcacacttgatgggac

SEQ ID NO: 2430810 - DNA, 25 bp, Homo sapien
tgctttagcagtataaaatttgccc

SEQ ID NO: 2430811 - DNA, 25 bp, Homo sapien
tgtttaccctatctgtgtaacaagt

SEQ ID NO: 2430812 - DNA, 25 bp, Homo sapien
gtggaaaccccatcaagacagtact

SEQ ID NO: 2430813 - DNA, 25 bp, Homo sapien
tattatgcgctagcactgaggccca

SEQ ID NO: 2430814 - DNA, 25 bp, Homo sapien
tattggtcagccagtctgaagagcc

SEQ ID NO: 2430815 - DNA, 25 bp, Homo sapien
cccagtgaacgaggtagacaaagtt

SEQ ID NO: 2430816 - DNA, 25 bp, Homo sapien
gcagagtggttgaaaaaatagtggt

SEQ ID NO: 2430817 - DNA, 25 bp, Homo sapien
tggtaaaagatgaggtcaaaacagt

SEQ ID NO: 2430818 - DNA, 25 bp, Homo sapien
gaacatttctggttaactaaagcta

SEQ ID NO: 2430819 - DNA, 25 bp, Homo sapien
agcctcaaccttccgtgctgaaacg

SEQ ID NO: 2430820 - DNA, 25 bp, Homo sapien
tacctcgcccagttacatggtcctg

SEQ ID NO: 2430821 - DNA, 25 bp, Homo sapien
tctctcagaatggatcagacctttc

SEQ ID NO: 2430822 - DNA, 25 bp, Homo sapien
tacatagtaacagtaggaactccac

SEQ ID NO: 2430823 - DNA, 25 bp, Homo sapien
gcccaaaactctgagcaactgaagt

SEQ ID NO: 2430824 - DNA, 25 bp, Homo sapien
catcactgccatatcaaaccttttt

SEQ ID NO: 2430825 - DNA, 25 bp, Homo sapien
tgccatatcaaacctttttagttca

SEQ ID NO: 2430826 - DNA, 25 bp, Homo sapien
tgtttctgacataaacatcactgcc

SEQ ID NO: 2430827 - DNA, 25 bp, Homo sapien
tcaaagatgagtaatggcttttctt

SEQ ID NO: 2430828 - DNA, 25 bp, Homo sapien
gaattttaacgatctggttgaatac

SEQ ID NO: 2430829 - DNA, 25 bp, Homo sapien
ttaacgatctggttgaatacatctg

SEQ ID NO: 2430830 - DNA, 25 bp, Homo sapien
agtcatgcagaattttaacgatctg

SEQ ID NO: 2430831 - DNA, 25 bp, Homo sapien
gcagaattttaacgatctggttgaa

SEQ ID NO: 2430832 - DNA, 25 bp, Homo sapien
taggatacaaagatggttcaatttg

SEQ ID NO: 2430833 - DNA, 25 bp, Homo sapien
ttaggatacaaagatggttcaattt

SEQ ID NO: 2430834 - DNA, 25 bp, Homo sapien
cttaggatacaaagatggttcaatt

SEQ ID NO: 2430835 - DNA, 25 bp, Homo sapien
cagggtgatgtattctacaataatt

SEQ ID NO: 2430836 - DNA, 25 bp, Homo sapien
atgtattctacaataatttctacaa

SEQ ID NO: 2430837 - DNA, 25 bp, Homo sapien
tgtattctacaataatttctacaat

SEQ ID NO: 2430838 - DNA, 25 bp, Homo sapien
ggtgatgtattctacaataatttct

SEQ ID NO: 2430839 - DNA, 25 bp, Homo sapien
aattggaggaagaacagttgtggca

SEQ ID NO: 2430840 - DNA, 25 bp, Homo sapien
ctggaacgagtttgcaggaattgga

SEQ ID NO: 2430841 - DNA, 25 bp, Homo sapien
aaatactgatacaacatatctggag

SEQ ID NO: 2430842 - DNA, 25 bp, Homo sapien
tctgaaatcagattcgagctggaac

SEQ ID NO: 2430843 - DNA, 25 bp, Homo sapien
catcctgcttcaaactggcttgagg

SEQ ID NO: 2430844 - DNA, 25 bp, Homo sapien
tatgggcattttctcgctgtaagac

SEQ ID NO: 2430845 - DNA, 25 bp, Homo sapien
ctcgctgtaagactgacatacatcc

SEQ ID NO: 2430846 - DNA, 25 bp, Homo sapien
gttctatctctatgggcattttctc

SEQ ID NO: 2430847 - DNA, 25 bp, Homo sapien
tgcagggatgaagtatcactgactt

SEQ ID NO: 2430848 - DNA, 25 bp, Homo sapien
gcagcagcagtagtgctatctggca

SEQ ID NO: 2430849 - DNA, 25 bp, Homo sapien
gaattcttcttacttgtggtgcctg

SEQ ID NO: 2430850 - DNA, 25 bp, Homo sapien
gctcttggagtatcacttgtgggaa

SEQ ID NO: 2430851 - DNA, 25 bp, Homo sapien
agttgatccaggatgcggtggatta

SEQ ID NO: 2430852 - DNA, 25 bp, Homo sapien
caagaaagacatcatcccagtgtcc

SEQ ID NO: 2430853 - DNA, 25 bp, Homo sapien
gaatcaagaaagacatcatcccagt

SEQ ID NO: 2430854 - DNA, 25 bp, Homo sapien
tcaatgggttttaccacattttgtc

SEQ ID NO: 2430855 - DNA, 25 bp, Homo sapien
gttcagttactgcttgcttatttcc

SEQ ID NO: 2430856 - DNA, 25 bp, Homo sapien
agagttcagttactgcttgcttatt

SEQ ID NO: 2430857 - DNA, 25 bp, Homo sapien
tcagttactgcttgcttatttccag

SEQ ID NO: 2430858 - DNA, 25 bp, Homo sapien
ttactgcttgcttatttccaggttc

SEQ ID NO: 2430859 - DNA, 25 bp, Homo sapien
tctggcaaaagctttagaatatgag

SEQ ID NO: 2430860 - DNA, 25 bp, Homo sapien
gcaaaagctttagaatatgagccat

SEQ ID NO: 2430861 - DNA, 25 bp, Homo sapien
tatgagccatctaataaaatggctt

SEQ ID NO: 2430862 - DNA, 25 bp, Homo sapien
gaatatgagccatctaataaaatgg

SEQ ID NO: 2430863 - DNA, 25 bp, Homo sapien
aatggatgtcatcttgccctcaaaa

SEQ ID NO: 2430864 - DNA, 25 bp, Homo sapien
gcattctccccaaggcctaaatgga

SEQ ID NO: 2430865 - DNA, 25 bp, Homo sapien
agtccaattcctttggagcgcaaag

SEQ ID NO: 2430866 - DNA, 25 bp, Homo sapien
tcattcaagatacctgcatggcccc

SEQ ID NO: 2430867 - DNA, 25 bp, Homo sapien
ggccatagctctgttagctggaaga

SEQ ID NO: 2430868 - DNA, 25 bp, Homo sapien
cttcagataggccatagctctgtta

SEQ ID NO: 2430869 - DNA, 25 bp, Homo sapien
tccctcgagtatagcattcaattgc

SEQ ID NO: 2430870 - DNA, 25 bp, Homo sapien
tgctgctatccctcgagtatagcat

SEQ ID NO: 2430871 - DNA, 25 bp, Homo sapien
ctccttctgttgacttaatcactat

SEQ ID NO: 2430872 - DNA, 25 bp, Homo sapien
tccttctgttgacttaatcactatg

SEQ ID NO: 2430873 - DNA, 25 bp, Homo sapien
ttcctgagttcatttgttgcttcaa

SEQ ID NO: 2430874 - DNA, 25 bp, Homo sapien
tcaaagttatttggttctagttcta

SEQ ID NO: 2430875 - DNA, 25 bp, Homo sapien
caaagcaaatcgagcagcacctcgt

SEQ ID NO: 2430876 - DNA, 25 bp, Homo sapien
aagcaaatcgagcagcacctcgtct

SEQ ID NO: 2430877 - DNA, 25 bp, Homo sapien
cagcacctcgtctggaataagcctt

SEQ ID NO: 2430878 - DNA, 25 bp, Homo sapien
aaagcaaatcgagcagcacctcgtc

SEQ ID NO: 2430879 - DNA, 25 bp, Homo sapien
ctattcaaggcaactgctaaattac

SEQ ID NO: 2430880 - DNA, 25 bp, Homo sapien
aactgctaaattacaatcagactca

SEQ ID NO: 2430881 - DNA, 25 bp, Homo sapien
ggcaactgctaaattacaatcagac

SEQ ID NO: 2430882 - DNA, 25 bp, Homo sapien
tcaaggcaactgctaaattacaatc

SEQ ID NO: 2430883 - DNA, 25 bp, Homo sapien
tactaaatctttagaggaatacctc

SEQ ID NO: 2430884 - DNA, 25 bp, Homo sapien
tttagcaccagatgtttaaaatggc

SEQ ID NO: 2430885 - DNA, 25 bp, Homo sapien
cattcacacacgtcacagaaagtcc

SEQ ID NO: 2430886 - DNA, 25 bp, Homo sapien
gctatgggaacaaggttttagcacc

SEQ ID NO: 2430887 - DNA, 25 bp, Homo sapien
tatatggatcggcatccatgccttt

SEQ ID NO: 2430888 - DNA, 25 bp, Homo sapien
tatgctgacgctctgttcgttggca

SEQ ID NO: 2430889 - DNA, 25 bp, Homo sapien
tcgttggcaacacgggattatatgg

SEQ ID NO: 2430890 - DNA, 25 bp, Homo sapien
ttttcagtctaaaatatgctgacgc

SEQ ID NO: 2430891 - DNA, 25 bp, Homo sapien
ccgactctgattcttgagacagaga

SEQ ID NO: 2430892 - DNA, 25 bp, Homo sapien
gaatcccatcttcttccgactctga

SEQ ID NO: 2430893 - DNA, 25 bp, Homo sapien
aacaagagccttttgtgaatctaca

SEQ ID NO: 2430894 - DNA, 25 bp, Homo sapien
agacagagactcatgggtactatcg

SEQ ID NO: 2430895 - DNA, 25 bp, Homo sapien
tggcaaactaaataaaagtcccagc

SEQ ID NO: 2430896 - DNA, 25 bp, Homo sapien
actaaataaaagtcccagcgctctt

SEQ ID NO: 2430897 - DNA, 25 bp, Homo sapien
gggacaatcctgaagcagatggcaa

SEQ ID NO: 2430898 - DNA, 25 bp, Homo sapien
tacctctcttatattgggacaatcc

SEQ ID NO: 2430899 - DNA, 25 bp, Homo sapien
tcccctctagggtgcttatatccac

SEQ ID NO: 2430900 - DNA, 25 bp, Homo sapien
gaactgctgctactcacaatatgga

SEQ ID NO: 2430901 - DNA, 25 bp, Homo sapien
cagtggctacttttcagaggtcatc

SEQ ID NO: 2430902 - DNA, 25 bp, Homo sapien
tctgtatcttgatccaaacagtggt

SEQ ID NO: 2430903 - DNA, 25 bp, Homo sapien
tagatggtaggctcatgtattcatt

SEQ ID NO: 2430904 - DNA, 25 bp, Homo sapien
ggacttgatgcacattatacctcag

SEQ ID NO: 2430905 - DNA, 25 bp, Homo sapien
taccagtagcttcaataatattgga

SEQ ID NO: 2430906 - DNA, 25 bp, Homo sapien
aaagaacatgggattagaaaggagc

SEQ ID NO: 2430907 - DNA, 25 bp, Homo sapien
tatgactataaagggatggcacaaa

SEQ ID NO: 2430908 - DNA, 25 bp, Homo sapien
tactacagctaagaaagatgtaacc

SEQ ID NO: 2430909 - DNA, 25 bp, Homo sapien
ggaatctttgtggtggtgccatata

SEQ ID NO: 2430910 - DNA, 25 bp, Homo sapien
tatctgtatcttaattgcggctggg

SEQ ID NO: 2430911 - DNA, 25 bp, Homo sapien
caccatttgctgaaagaggattgca

SEQ ID NO: 2430912 - DNA, 25 bp, Homo sapien
tttcacttaacccatgattatcagc

SEQ ID NO: 2430913 - DNA, 25 bp, Homo sapien
cacaggccataactctacattattt

SEQ ID NO: 2430914 - DNA, 25 bp, Homo sapien
gctaactcccagaaaattttactca

SEQ ID NO: 2430915 - DNA, 25 bp, Homo sapien
ctaaaattcccatttcgaataggag

SEQ ID NO: 2430916 - DNA, 25 bp, Homo sapien
tttttggaagactctttagctttgc

SEQ ID NO: 2430917 - DNA, 25 bp, Homo sapien
ggaagactctttagctttgcctttc

SEQ ID NO: 2430918 - DNA, 25 bp, Homo sapien
gaagactctttagctttgcctttct

SEQ ID NO: 2430919 - DNA, 25 bp, Homo sapien
cacttgtagttgtaattcgattgct

SEQ ID NO: 2430920 - DNA, 25 bp, Homo sapien
taaatcccgcataaagtcttgtaat

SEQ ID NO: 2430921 - DNA, 25 bp, Homo sapien
tcttcaggaacaccattctgtcttc

SEQ ID NO: 2430922 - DNA, 25 bp, Homo sapien
tcccagttttctaaatcccgcataa

SEQ ID NO: 2430923 - DNA, 25 bp, Homo sapien
gggtatcactttcacacccgctgtc

SEQ ID NO: 2430924 - DNA, 25 bp, Homo sapien
caaggatctcctacgctgctccggg

SEQ ID NO: 2430925 - DNA, 25 bp, Homo sapien
tgccttcccgagcactgcaaaatcg

SEQ ID NO: 2430926 - DNA, 25 bp, Homo sapien
agcaggcccaaaaactctcccaggg

SEQ ID NO: 2430927 - DNA, 25 bp, Homo sapien
agccccgcagcgactcacgccgagc

SEQ ID NO: 2430928 - DNA, 25 bp, Homo sapien
acccgccgcactgccaccccgtcag

SEQ ID NO: 2430929 - DNA, 25 bp, Homo sapien
ctgaccaggccgtaacccgccgcac

SEQ ID NO: 2430930 - DNA, 25 bp, Homo sapien
gactcacgccgagcccggcagtgac

SEQ ID NO: 2430931 - DNA, 25 bp, Homo sapien
tacattaaagggaagcatgaggcct

SEQ ID NO: 2430932 - DNA, 25 bp, Homo sapien
caaaatacaagtctgtggctgcact

SEQ ID NO: 2430933 - DNA, 25 bp, Homo sapien
gctggacacaaaaacactcaggcct

SEQ ID NO: 2430934 - DNA, 25 bp, Homo sapien
gatagcacttcagtctcgcaagagc

SEQ ID NO: 2430935 - DNA, 25 bp, Homo sapien
taggctgtggcgatgtacttcttgc

SEQ ID NO: 2430936 - DNA, 25 bp, Homo sapien
ttgtcccaggtatatgtccggacag

SEQ ID NO: 2430937 - DNA, 25 bp, Homo sapien
gctaagggatatcctcccaggctta

SEQ ID NO: 2430938 - DNA, 25 bp, Homo sapien
gccattcccataggtggacttgtcc

SEQ ID NO: 2430939 - DNA, 25 bp, Homo sapien
gcacagggagtagagtgcaaactca

SEQ ID NO: 2430940 - DNA, 25 bp, Homo sapien
ttgaactgcattgccagcacatcgg

SEQ ID NO: 2430941 - DNA, 25 bp, Homo sapien
tagtagccgtcccagttgaactgca

SEQ ID NO: 2430942 - DNA, 25 bp, Homo sapien
tgctgccgatgaaagcagagcccac

SEQ ID NO: 2430943 - DNA, 25 bp, Homo sapien
ttctcctccaggtagaagcggatcc

SEQ ID NO: 2430944 - DNA, 25 bp, Homo sapien
ggcccatcgtagatgtgactgtaat

SEQ ID NO: 2430945 - DNA, 25 bp, Homo sapien
gcggatccagttatggaagccagta

SEQ ID NO: 2430946 - DNA, 25 bp, Homo sapien
tgtaatagtcaaccagaccctcctt

SEQ ID NO: 2430947 - DNA, 25 bp, Homo sapien
ctgagaagacatgttcaaagccact

SEQ ID NO: 2430948 - DNA, 25 bp, Homo sapien
tcattgcctcttgaatagagcccaa

SEQ ID NO: 2430949 - DNA, 25 bp, Homo sapien
gacatgttcaaagccactcgagtcc

SEQ ID NO: 2430950 - DNA, 25 bp, Homo sapien
gaatagagcccaaaccacatgttct

SEQ ID NO: 2430951 - DNA, 25 bp, Homo sapien
cctgggcactgaagtgctccccatg

SEQ ID NO: 2430952 - DNA, 25 bp, Homo sapien
gtagagctccttcatgactgctgtc

SEQ ID NO: 2430953 - DNA, 25 bp, Homo sapien
cctgttgcccgctggtagttgttga

SEQ ID NO: 2430954 - DNA, 25 bp, Homo sapien
tgaggaggttgatgaaggctgcata

SEQ ID NO: 2430955 - DNA, 25 bp, Homo sapien
ctttgggcagcgatccacttggttt

SEQ ID NO: 2430956 - DNA, 25 bp, Homo sapien
tggctattgagaacgatgtcttcct

SEQ ID NO: 2430957 - DNA, 25 bp, Homo sapien
gtgtctgccctgtagatcttctcag

SEQ ID NO: 2430958 - DNA, 25 bp, Homo sapien
ggagatgcagttttggctattgaga

SEQ ID NO: 2430959 - DNA, 25 bp, Homo sapien
cattgcagtgacattggtggtgctt

SEQ ID NO: 2430960 - DNA, 25 bp, Homo sapien
ttcccaaactcttggcagcgggcat

SEQ ID NO: 2430961 - DNA, 25 bp, Homo sapien
cattggtggtgcttgtcaaaggctt

SEQ ID NO: 2430962 - DNA, 25 bp, Homo sapien
cgtggtcactacacaggctctcaaa

SEQ ID NO: 2430963 - DNA, 25 bp, Homo sapien
acctctagaggtcgctctgaacgcc

SEQ ID NO: 2430964 - DNA, 25 bp, Homo sapien
tctgatgccgaactttactttctgg

SEQ ID NO: 2430965 - DNA, 25 bp, Homo sapien
tctgcccagtaaagatctccaggga

SEQ ID NO: 2430966 - DNA, 25 bp, Homo sapien
ggctgtcgctccctagcctggctgt

SEQ ID NO: 2430967 - DNA, 25 bp, Homo sapien
tccagctgtggcaatggctctgact

SEQ ID NO: 2430968 - DNA, 25 bp, Homo sapien
aatggctctgactctttgtggtcct

SEQ ID NO: 2430969 - DNA, 25 bp, Homo sapien
caatggctctgactctttgtggtcc

SEQ ID NO: 2430970 - DNA, 25 bp, Homo sapien
tggaagatgtttccaatggaagaca

SEQ ID NO: 2430971 - DNA, 25 bp, Homo sapien
gggtccaatggacaggcaccaaata

SEQ ID NO: 2430972 - DNA, 25 bp, Homo sapien
ccccaggtgacacatctggattgaa

SEQ ID NO: 2430973 - DNA, 25 bp, Homo sapien
tgacttcggtgatgaaaactctgat

SEQ ID NO: 2430974 - DNA, 25 bp, Homo sapien
agacaccggcggtcacactggcagg

SEQ ID NO: 2430975 - DNA, 25 bp, Homo sapien
ttcccatgccagagacaccggcggt

SEQ ID NO: 2430976 - DNA, 25 bp, Homo sapien
tacatcgagatgcacaggattctat

SEQ ID NO: 2430977 - DNA, 25 bp, Homo sapien
acagatgttcatagtcttcacagca

SEQ ID NO: 2430978 - DNA, 25 bp, Homo sapien
agcacggccaataccagggagatgc

SEQ ID NO: 2430979 - DNA, 25 bp, Homo sapien
acagcacggccaataccagggagat

SEQ ID NO: 2430980 - DNA, 25 bp, Homo sapien
aggccacacagcacggccaatacca

SEQ ID NO: 2430981 - DNA, 25 bp, Homo sapien
acacagcacggccaataccagggag

SEQ ID NO: 2430982 - DNA, 25 bp, Homo sapien
ggctgttggactttcactagagtca

SEQ ID NO: 2430983 - DNA, 25 bp, Homo sapien
ggtgtctccagatcctttcaggaag

SEQ ID NO: 2430984 - DNA, 25 bp, Homo sapien
tcacagctctcagacgagccttatt

SEQ ID NO: 2430985 - DNA, 25 bp, Homo sapien
tctcagacgagccttattcctcaag

SEQ ID NO: 2430986 - DNA, 25 bp, Homo sapien
caaggccacgtcatttcagcagagg

SEQ ID NO: 2430987 - DNA, 25 bp, Homo sapien
tgagagagactgacccagaggacta

SEQ ID NO: 2430988 - DNA, 25 bp, Homo sapien
gaagccagataagcctcagcattag

SEQ ID NO: 2430989 - DNA, 25 bp, Homo sapien
cacaggatagaagcgcaggatggtc

SEQ ID NO: 2430990 - DNA, 25 bp, Homo sapien
taaagagcgtctacagccagatctg

SEQ ID NO: 2430991 - DNA, 25 bp, Homo sapien
cacagctgggctgttctggcctcaa

SEQ ID NO: 2430992 - DNA, 25 bp, Homo sapien
caggcagacagcgataaggaggttc

SEQ ID NO: 2430993 - DNA, 25 bp, Homo sapien
gagcggttcctgacccatgatttga

SEQ ID NO: 2430994 - DNA, 25 bp, Homo sapien
ccagtgatgagtggagagcatcccc

SEQ ID NO: 2430995 - DNA, 25 bp, Homo sapien
gctatgaacctatgctccaacggga

SEQ ID NO: 2430996 - DNA, 25 bp, Homo sapien
gctgcctagctggatgattgacccc

SEQ ID NO: 2430997 - DNA, 25 bp, Homo sapien
tacttagtatagatccatggcctgg

SEQ ID NO: 2430998 - DNA, 25 bp, Homo sapien
agagcccctacaaggcctatagtaa

SEQ ID NO: 2430999 - DNA, 25 bp, Homo sapien
ccctacaaggcctatagtaagtacg

SEQ ID NO: 2431000 - DNA, 25 bp, Homo sapien
caaggcctatagtaagtacgtgaaa

SEQ ID NO: 2431001 - DNA, 25 bp, Homo sapien
gcctatagtaagtacgtgaaaataa

SEQ ID NO: 2431002 - DNA, 25 bp, Homo sapien
tgtgtgtaacaatgacctccctctg

SEQ ID NO: 2431003 - DNA, 25 bp, Homo sapien
taaaggactgatctagggccacact

SEQ ID NO: 2431004 - DNA, 25 bp, Homo sapien
tggcttttgccgagacaccagcaga

SEQ ID NO: 2431005 - DNA, 25 bp, Homo sapien
tgctagggaacaccagaggatgcct

SEQ ID NO: 2431006 - DNA, 25 bp, Homo sapien
tgttgggcctcaacaagcgacgggc

SEQ ID NO: 2431007 - DNA, 25 bp, Homo sapien
gctctccgcggaagcttcagcattg

SEQ ID NO: 2431008 - DNA, 25 bp, Homo sapien
agagaggacttcgtatgaccagagc

SEQ ID NO: 2431009 - DNA, 25 bp, Homo sapien
gatttcctggaagtctgttgggcct

SEQ ID NO: 2431010 - DNA, 25 bp, Homo sapien
cctgtgagtatcttggcccggcaca

SEQ ID NO: 2431011 - DNA, 25 bp, Homo sapien
cattcgttattcctggctcgggtcc

SEQ ID NO: 2431012 - DNA, 25 bp, Homo sapien
taacaataaagctcctcagggacca

SEQ ID NO: 2431013 - DNA, 25 bp, Homo sapien
tctgggtggcatcaggatcttggac

SEQ ID NO: 2431014 - DNA, 25 bp, Homo sapien
ggagagttcccgctggttgtcaatg

SEQ ID NO: 2431015 - DNA, 25 bp, Homo sapien
tcccgctggttgtcaatgaccttca

SEQ ID NO: 2431016 - DNA, 25 bp, Homo sapien
gctggttgtcaatgaccttcagctg

SEQ ID NO: 2431017 - DNA, 25 bp, Homo sapien
atggctccagctctcgggagaggcg

SEQ ID NO: 2431018 - DNA, 25 bp, Homo sapien
tggactccgggtgctcagggactgc

SEQ ID NO: 2431019 - DNA, 25 bp, Homo sapien
tggctggactccgggtgctcaggga

SEQ ID NO: 2431020 - DNA, 25 bp, Homo sapien
actccgggtgctcagggactgctcc

SEQ ID NO: 2431021 - DNA, 25 bp, Homo sapien
gctggactccgggtgctcagggact

SEQ ID NO: 2431022 - DNA, 25 bp, Homo sapien
ggctgtcctcgtggaggtgggaaac

SEQ ID NO: 2431023 - DNA, 25 bp, Homo sapien
ctggctgtcctcgtggaggtgggaa

SEQ ID NO: 2431024 - DNA, 25 bp, Homo sapien
tggctgtcctcgtggaggtgggaaa

SEQ ID NO: 2431025 - DNA, 25 bp, Homo sapien
cggcagtggtgcagcatccgcgcgg

SEQ ID NO: 2431026 - DNA, 25 bp, Homo sapien
agtggtgcagcatccgcgcggctct

SEQ ID NO: 2431027 - DNA, 25 bp, Homo sapien
cagggttgtggcttcggcagtggtg

SEQ ID NO: 2431028 - DNA, 25 bp, Homo sapien
gggttgtggcttcggcagtggtgca

SEQ ID NO: 2431029 - DNA, 25 bp, Homo sapien
atgagattctccactagtgtgtggt

SEQ ID NO: 2431030 - DNA, 25 bp, Homo sapien
attctccactagtgtgtggtttccc

SEQ ID NO: 2431031 - DNA, 25 bp, Homo sapien
gattctccactagtgtgtggtttcc

SEQ ID NO: 2431032 - DNA, 25 bp, Homo sapien
gagattctccactagtgtgtggttt

SEQ ID NO: 2431033 - DNA, 25 bp, Homo sapien
cgagggccagtcggtatacccggtg

SEQ ID NO: 2431034 - DNA, 25 bp, Homo sapien
tcggtatacccggtggttccatgag

SEQ ID NO: 2431035 - DNA, 25 bp, Homo sapien
tatacccggtggttccatgagggat

SEQ ID NO: 2431036 - DNA, 25 bp, Homo sapien
cagtcggtatacccggtggttccat

SEQ ID NO: 2431037 - DNA, 25 bp, Homo sapien
tttgaatcccttgagccccacgagg

SEQ ID NO: 2431038 - DNA, 25 bp, Homo sapien
ccatgcacacactgagggccaggat

SEQ ID NO: 2431039 - DNA, 25 bp, Homo sapien
caagagctcccaggctatgctgatg

SEQ ID NO: 2431040 - DNA, 25 bp, Homo sapien
gtgcaacccctatcctagtgctgaa

SEQ ID NO: 2431041 - DNA, 25 bp, Homo sapien
ctcgagggcggagtacagcttccgg

SEQ ID NO: 2431042 - DNA, 25 bp, Homo sapien
acagcttccggactttgtgaggcag

SEQ ID NO: 2431043 - DNA, 25 bp, Homo sapien
agggcggagtacagcttccggactt

SEQ ID NO: 2431044 - DNA, 25 bp, Homo sapien
ggagtacagcttccggactttgtga

SEQ ID NO: 2431045 - DNA, 25 bp, Homo sapien
gtgaaaaggaggcagatgagcggct

SEQ ID NO: 2431046 - DNA, 25 bp, Homo sapien
ctgtgaaaaggaggcagatgagcgg

SEQ ID NO: 2431047 - DNA, 25 bp, Homo sapien
aaaaggaggcagatgagcggctgct

SEQ ID NO: 2431048 - DNA, 25 bp, Homo sapien
tgaaaaggaggcagatgagcggctg

SEQ ID NO: 2431049 - DNA, 25 bp, Homo sapien
atggccgagttgctgaggccaaaca

SEQ ID NO: 2431050 - DNA, 25 bp, Homo sapien
ggcaaagaaggaattgagattcttc

SEQ ID NO: 2431051 - DNA, 25 bp, Homo sapien
cggctgatggccgagttgctgaggc

SEQ ID NO: 2431052 - DNA, 25 bp, Homo sapien
cccaggtgtgggctaggcggctgat

SEQ ID NO: 2431053 - DNA, 25 bp, Homo sapien
tgggccgccagcttaatgaacttcc

SEQ ID NO: 2431054 - DNA, 25 bp, Homo sapien
cggtggtgacatcccgcagatgctg

SEQ ID NO: 2431055 - DNA, 25 bp, Homo sapien
ccagcacatagtggatcagctccac

SEQ ID NO: 2431056 - DNA, 25 bp, Homo sapien
agtactgcagctcattgaagcggcg

SEQ ID NO: 2431057 - DNA, 25 bp, Homo sapien
aggtccttggcactcaccaggtcca

SEQ ID NO: 2431058 - DNA, 25 bp, Homo sapien
gtcgtggtccgtcagctggcctgcc

SEQ ID NO: 2431059 - DNA, 25 bp, Homo sapien
aagaggctccagtcgtggtccgtca

SEQ ID NO: 2431060 - DNA, 25 bp, Homo sapien
ggtccttggcactcaccaggtccag

SEQ ID NO: 2431061 - DNA, 25 bp, Homo sapien
tgtgggttgacaacaaagagacgct

SEQ ID NO: 2431062 - DNA, 25 bp, Homo sapien
gagacgctcattgagccccagagat

SEQ ID NO: 2431063 - DNA, 25 bp, Homo sapien
aacaaagagacgctcattgagcccc

SEQ ID NO: 2431064 - DNA, 25 bp, Homo sapien
agctcatgcacttcctgtgggttga

SEQ ID NO: 2431065 - DNA, 25 bp, Homo sapien
cagtggcctccaaagtaaggtacat

SEQ ID NO: 2431066 - DNA, 25 bp, Homo sapien
aaatggagacaataagacttgcccc

SEQ ID NO: 2431067 - DNA, 25 bp, Homo sapien
tcatcagctcctcatggactgggac

SEQ ID NO: 2431068 - DNA, 25 bp, Homo sapien
cagaatacacaggtgcatgtgccca

SEQ ID NO: 2431069 - DNA, 25 bp, Homo sapien
tcaacactgagtggtctggccggca

SEQ ID NO: 2431070 - DNA, 25 bp, Homo sapien
ggccaacgctgccatcacctctctc

SEQ ID NO: 2431071 - DNA, 25 bp, Homo sapien
caggcagctgcagggtcaacactga

SEQ ID NO: 2431072 - DNA, 25 bp, Homo sapien
gctgccatcacctctctcacggagg

SEQ ID NO: 2431073 - DNA, 25 bp, Homo sapien
gttggggagccaaacaggcaagttc

SEQ ID NO: 2431074 - DNA, 25 bp, Homo sapien
ggagccaaacaggcaagttccgggc

SEQ ID NO: 2431075 - DNA, 25 bp, Homo sapien
tggggagccaaacaggcaagttccg

SEQ ID NO: 2431076 - DNA, 25 bp, Homo sapien
ttggggagccaaacaggcaagttcc

SEQ ID NO: 2431077 - DNA, 25 bp, Homo sapien
gagggagggattgtgaggtccctgt

SEQ ID NO: 2431078 - DNA, 25 bp, Homo sapien
gggattgtgaggtccctgtgtcacc

SEQ ID NO: 2431079 - DNA, 25 bp, Homo sapien
gagcacgggcgccacacagcattca

SEQ ID NO: 2431080 - DNA, 25 bp, Homo sapien
aggagcacgggcgccacacagcatt

SEQ ID NO: 2431081 - DNA, 25 bp, Homo sapien
agagggctctgcttgccacattcac

SEQ ID NO: 2431082 - DNA, 25 bp, Homo sapien
tctgcttgccacattcacctgagct

SEQ ID NO: 2431083 - DNA, 25 bp, Homo sapien
ggctctgcttgccacattcacctga

SEQ ID NO: 2431084 - DNA, 25 bp, Homo sapien
gcttgccacattcacctgagctcag

SEQ ID NO: 2431085 - DNA, 25 bp, Homo sapien
tgattcccaaaactaccagcagtgc

SEQ ID NO: 2431086 - DNA, 25 bp, Homo sapien
gctaccatttgctacaagccaggca

SEQ ID NO: 2431087 - DNA, 25 bp, Homo sapien
cacagcagggatgcagttcatggaa

SEQ ID NO: 2431088 - DNA, 25 bp, Homo sapien
tgcgtatagcagatcctccaggttc

SEQ ID NO: 2431089 - DNA, 25 bp, Homo sapien
tcccgttttcaggagcggactacag

SEQ ID NO: 2431090 - DNA, 25 bp, Homo sapien
tgtcactgcacatcacgggttgttg

SEQ ID NO: 2431091 - DNA, 25 bp, Homo sapien
ggattttattcccagtgcagccctc

SEQ ID NO: 2431092 - DNA, 25 bp, Homo sapien
tccagtagtcgcttacacgggacac

SEQ ID NO: 2431093 - DNA, 25 bp, Homo sapien
agcaagggccccgtgaacacctatc

SEQ ID NO: 2431094 - DNA, 25 bp, Homo sapien
tgaacacctatcagagacccaaggg

SEQ ID NO: 2431095 - DNA, 25 bp, Homo sapien
gaggagagcttcccacgcccacaga

SEQ ID NO: 2431096 - DNA, 25 bp, Homo sapien
tcagagacccaagggtgtgtctgtg

SEQ ID NO: 2431097 - DNA, 25 bp, Homo sapien
tctgaggagatgcattcccacagcc

SEQ ID NO: 2431098 - DNA, 25 bp, Homo sapien
tgaggagatgcattcccacagccat

SEQ ID NO: 2431099 - DNA, 25 bp, Homo sapien
cttcatctgaggagatgcattccca

SEQ ID NO: 2431100 - DNA, 25 bp, Homo sapien
catctgaggagatgcattcccacag

SEQ ID NO: 2431101 - DNA, 25 bp, Homo sapien
aggttgctgagtcgggtgtccctgc

SEQ ID NO: 2431102 - DNA, 25 bp, Homo sapien
gcaggttgctgagtcgggtgtccct

SEQ ID NO: 2431103 - DNA, 25 bp, Homo sapien
tcagcaggttgctgagtcgggtgtc

SEQ ID NO: 2431104 - DNA, 25 bp, Homo sapien
agcaggttgctgagtcgggtgtccc

SEQ ID NO: 2431105 - DNA, 25 bp, Homo sapien
tgcctcttgttgcagacgtaggtgc

SEQ ID NO: 2431106 - DNA, 25 bp, Homo sapien
cagggtcagtgtggagcatggagcc

SEQ ID NO: 2431107 - DNA, 25 bp, Homo sapien
gagcatggagccatacagggccacc

SEQ ID NO: 2431108 - DNA, 25 bp, Homo sapien
tgaccagccgcaagatctgctgcct

SEQ ID NO: 2431109 - DNA, 25 bp, Homo sapien
gggaaccacaacatccaagcagggc

SEQ ID NO: 2431110 - DNA, 25 bp, Homo sapien
ggaaccacaacatccaagcagggcc

SEQ ID NO: 2431111 - DNA, 25 bp, Homo sapien
aagggaaccacaacatccaagcagg

SEQ ID NO: 2431112 - DNA, 25 bp, Homo sapien
gtcaagggaaccacaacatccaagc

SEQ ID NO: 2431113 - DNA, 25 bp, Homo sapien
catccccctggagctggaaggatat

SEQ ID NO: 2431114 - DNA, 25 bp, Homo sapien
agagttgggcgctgggcatgaagac

SEQ ID NO: 2431115 - DNA, 25 bp, Homo sapien
tggtgcagaagggcagcgcagagtt

SEQ ID NO: 2431116 - DNA, 25 bp, Homo sapien
gagttgggcgctgggcatgaagacc

SEQ ID NO: 2431117 - DNA, 25 bp, Homo sapien
gtcaggaggaagtcgctgaggaatg

SEQ ID NO: 2431118 - DNA, 25 bp, Homo sapien
ggtcaggaggaagtcgctgaggaat

SEQ ID NO: 2431119 - DNA, 25 bp, Homo sapien
aggaggaagtcgctgaggaatgtct

SEQ ID NO: 2431120 - DNA, 25 bp, Homo sapien
tcaggaggaagtcgctgaggaatgt

SEQ ID NO: 2431121 - DNA, 25 bp, Homo sapien
ctgttgggtcatgagcactggaatc

SEQ ID NO: 2431122 - DNA, 25 bp, Homo sapien
ctggggtgccagacatcactgtata

SEQ ID NO: 2431123 - DNA, 25 bp, Homo sapien
cctccaacagaagctctaggatctt

SEQ ID NO: 2431124 - DNA, 25 bp, Homo sapien
gtcatgagcactggaatctggtccc

SEQ ID NO: 2431125 - DNA, 25 bp, Homo sapien
tgtcccaccttagggcagggaggag

SEQ ID NO: 2431126 - DNA, 25 bp, Homo sapien
ccagagggcagggatatgacacagg

SEQ ID NO: 2431127 - DNA, 25 bp, Homo sapien
aatggccaatctttggcactggtgc

SEQ ID NO: 2431128 - DNA, 25 bp, Homo sapien
cacctgggcagacatcaataatcaa

SEQ ID NO: 2431129 - DNA, 25 bp, Homo sapien
ccggcgccctgagaggctctctcca

SEQ ID NO: 2431130 - DNA, 25 bp, Homo sapien
ggaagggccggcgccctgagaggct

SEQ ID NO: 2431131 - DNA, 25 bp, Homo sapien
agccgcatggtctttgcctccacat

SEQ ID NO: 2431132 - DNA, 25 bp, Homo sapien
cttccagccgcatggtctttgcctc

SEQ ID NO: 2431133 - DNA, 25 bp, Homo sapien
gccttatgggcttcaccttctcaca

SEQ ID NO: 2431134 - DNA, 25 bp, Homo sapien
cactgagcctgaagtcactggtctc

SEQ ID NO: 2431135 - DNA, 25 bp, Homo sapien
catcccatgctcaactcatgatgtt

SEQ ID NO: 2431136 - DNA, 25 bp, Homo sapien
gatgttccagctttagaccctctca

SEQ ID NO: 2431137 - DNA, 25 bp, Homo sapien
cacttctctggacgaatggcccctg

SEQ ID NO: 2431138 - DNA, 25 bp, Homo sapien
cttctctggacgaatggcccctgcc

SEQ ID NO: 2431139 - DNA, 25 bp, Homo sapien
tcacttctctggacgaatggcccct

SEQ ID NO: 2431140 - DNA, 25 bp, Homo sapien
acttctctggacgaatggcccctgc

SEQ ID NO: 2431141 - DNA, 25 bp, Homo sapien
tggctgcccggggtgcatcattcac

SEQ ID NO: 2431142 - DNA, 25 bp, Homo sapien
gggtgcatcattcaccagagccagc

SEQ ID NO: 2431143 - DNA, 25 bp, Homo sapien
agtcctgcttgtccacacgcaggaa

SEQ ID NO: 2431144 - DNA, 25 bp, Homo sapien
cttgatgatacggttgaagtcctgc

SEQ ID NO: 2431145 - DNA, 25 bp, Homo sapien
gatcccttccagataatgtaccacg

SEQ ID NO: 2431146 - DNA, 25 bp, Homo sapien
cttgccatgggtcaccacgttgaca

SEQ ID NO: 2431147 - DNA, 25 bp, Homo sapien
cttccagataatgtaccacgaagtg

SEQ ID NO: 2431148 - DNA, 25 bp, Homo sapien
accacgttgacagatcccttccaga

SEQ ID NO: 2431149 - DNA, 25 bp, Homo sapien
gcagaacagccgctaattctcgctt

SEQ ID NO: 2431150 - DNA, 25 bp, Homo sapien
tcaaagagcagaacagccgctaatt

SEQ ID NO: 2431151 - DNA, 25 bp, Homo sapien
gaacagccgctaattctcgcttcac

SEQ ID NO: 2431152 - DNA, 25 bp, Homo sapien
gtggttcaaagagcagaacagccgc

SEQ ID NO: 2431153 - DNA, 25 bp, Homo sapien
ctcaaagatgaggtccagctcttca

SEQ ID NO: 2431154 - DNA, 25 bp, Homo sapien
agctcttcatccgtgcgctgacctg

SEQ ID NO: 2431155 - DNA, 25 bp, Homo sapien
tccagctcttcatccgtgcgctgac

SEQ ID NO: 2431156 - DNA, 25 bp, Homo sapien
cctcaaagatgaggtccagctcttc

SEQ ID NO: 2431157 - DNA, 25 bp, Homo sapien
accggtagaattgggcatctcggtc

SEQ ID NO: 2431158 - DNA, 25 bp, Homo sapien
agggccacagcttcggccaactcct

SEQ ID NO: 2431159 - DNA, 25 bp, Homo sapien
gggaaccggtagaattgggcatctc

SEQ ID NO: 2431160 - DNA, 25 bp, Homo sapien
gaaccggtagaattgggcatctcgg

SEQ ID NO: 2431161 - DNA, 25 bp, Homo sapien
cacaacttggctccgggaatggacc

SEQ ID NO: 2431162 - DNA, 25 bp, Homo sapien
ctggcagattcccacaacttggctc

SEQ ID NO: 2431163 - DNA, 25 bp, Homo sapien
tggctccgggaatggaccccaagtc

SEQ ID NO: 2431164 - DNA, 25 bp, Homo sapien
cagattcccacaacttggctccggg

SEQ ID NO: 2431165 - DNA, 25 bp, Homo sapien
cgatagagcctaaggtggtacttcc

SEQ ID NO: 2431166 - DNA, 25 bp, Homo sapien
tcggatgaggtttgggcaggtggcc

SEQ ID NO: 2431167 - DNA, 25 bp, Homo sapien
ccagcagatgccgatgcagctgcct

SEQ ID NO: 2431168 - DNA, 25 bp, Homo sapien
aaggtggtacttccggtctcggatg

SEQ ID NO: 2431169 - DNA, 25 bp, Homo sapien
agggactcctcgctgttggtgagtg

SEQ ID NO: 2431170 - DNA, 25 bp, Homo sapien
gactcctcgctgttggtgagtggtg

SEQ ID NO: 2431171 - DNA, 25 bp, Homo sapien
actcctcgctgttggtgagtggtgt

SEQ ID NO: 2431172 - DNA, 25 bp, Homo sapien
ggactcctcgctgttggtgagtggt

SEQ ID NO: 2431173 - DNA, 25 bp, Homo sapien
ctggggagttgcagtacaaccagtc

SEQ ID NO: 2431174 - DNA, 25 bp, Homo sapien
tgcagtacaaccagtcctggtgctg

SEQ ID NO: 2431175 - DNA, 25 bp, Homo sapien
gagttgcagtacaaccagtcctggt

SEQ ID NO: 2431176 - DNA, 25 bp, Homo sapien
gggagttgcagtacaaccagtcctg

SEQ ID NO: 2431177 - DNA, 25 bp, Homo sapien
gggccggtgcatccttctcaacacc

SEQ ID NO: 2431178 - DNA, 25 bp, Homo sapien
gcttcggggccggtgcatccttctc

SEQ ID NO: 2431179 - DNA, 25 bp, Homo sapien
gccggtgcatccttctcaacaccat

SEQ ID NO: 2431180 - DNA, 25 bp, Homo sapien
ttcggggccggtgcatccttctcaa

SEQ ID NO: 2431181 - DNA, 25 bp, Homo sapien
ttgagtagtgtcccctccggcacca

SEQ ID NO: 2431182 - DNA, 25 bp, Homo sapien
gagctgggctatcctccacagccag

SEQ ID NO: 2431183 - DNA, 25 bp, Homo sapien
cagagctgggctatcctccacagcc

SEQ ID NO: 2431184 - DNA, 25 bp, Homo sapien
gttgagtagtgtcccctccggcacc

SEQ ID NO: 2431185 - DNA, 25 bp, Homo sapien
cagccatgggacacgactggggcgg

SEQ ID NO: 2431186 - DNA, 25 bp, Homo sapien
agtggacagccatgggacacgactg

SEQ ID NO: 2431187 - DNA, 25 bp, Homo sapien
aggaaagtggacagccatgggacac

SEQ ID NO: 2431188 - DNA, 25 bp, Homo sapien
acggggaggaaagtggacagccatg

SEQ ID NO: 2431189 - DNA, 25 bp, Homo sapien
tatagattcactaggtctcccagaa

SEQ ID NO: 2431190 - DNA, 25 bp, Homo sapien
ctcccagtatgaagctatagattca

SEQ ID NO: 2431191 - DNA, 25 bp, Homo sapien
tatgaagctatagattcactaggtc

SEQ ID NO: 2431192 - DNA, 25 bp, Homo sapien
gaagctatagattcactaggtctcc

SEQ ID NO: 2431193 - DNA, 25 bp, Homo sapien
ggcgccctgccttacggtagaggaa

SEQ ID NO: 2431194 - DNA, 25 bp, Homo sapien
tcttttcaagctcgcacagccgtgc

SEQ ID NO: 2431195 - DNA, 25 bp, Homo sapien
tcgtctcagacgaaggagccagctg

SEQ ID NO: 2431196 - DNA, 25 bp, Homo sapien
cgtgcaggctctagcaaaaggctgg

SEQ ID NO: 2431197 - DNA, 25 bp, Homo sapien
gggaatcccgctgccttgcctccca

SEQ ID NO: 2431198 - DNA, 25 bp, Homo sapien
ctcctgtttcggttcagggtctcca

SEQ ID NO: 2431199 - DNA, 25 bp, Homo sapien
tgtttcggttcagggtctccagccg

SEQ ID NO: 2431200 - DNA, 25 bp, Homo sapien
gcctcccacagttccgttcccagac

SEQ ID NO: 2431201 - DNA, 25 bp, Homo sapien
ccagtgcccattcagctggactaga

SEQ ID NO: 2431202 - DNA, 25 bp, Homo sapien
agggggacccacgtgcactgatgaa

SEQ ID NO: 2431203 - DNA, 25 bp, Homo sapien
gacccacgtgcactgatgaaggctc

SEQ ID NO: 2431204 - DNA, 25 bp, Homo sapien
agctggactagagggggacccacgt

SEQ ID NO: 2431205 - DNA, 25 bp, Homo sapien
gagctggtctcccatgagtgtgcta

SEQ ID NO: 2431206 - DNA, 25 bp, Homo sapien
tcaagaggtcaaggtgtagggccat

SEQ ID NO: 2431207 - DNA, 25 bp, Homo sapien
tctttgtacttaaggccagggcaac

SEQ ID NO: 2431208 - DNA, 25 bp, Homo sapien
tgctagagccagatagccgtggccc

SEQ ID NO: 2431209 - DNA, 25 bp, Homo sapien
gagaatctgttctcgagagccctgt

SEQ ID NO: 2431210 - DNA, 25 bp, Homo sapien
ggatctctaaagacccaggaatggg

SEQ ID NO: 2431211 - DNA, 25 bp, Homo sapien
gattttctcacgctccctgggataa

SEQ ID NO: 2431212 - DNA, 25 bp, Homo sapien
ggagcttcgtctcagtgcccagtgg

SEQ ID NO: 2431213 - DNA, 25 bp, Homo sapien
ttcctcctccaccagctgctccgag

SEQ ID NO: 2431214 - DNA, 25 bp, Homo sapien
ttagagattcataggttcttcctcc

SEQ ID NO: 2431215 - DNA, 25 bp, Homo sapien
tcttcctcctccaccagctgctccg

SEQ ID NO: 2431216 - DNA, 25 bp, Homo sapien
cctcctccaccagctgctccgaggg

SEQ ID NO: 2431217 - DNA, 25 bp, Homo sapien
cctggcactctaggcacccaggagt

SEQ ID NO: 2431218 - DNA, 25 bp, Homo sapien
ggcactctaggcacccaggagtctg

SEQ ID NO: 2431219 - DNA, 25 bp, Homo sapien
agggacgccagtgcggtcactgcct

SEQ ID NO: 2431220 - DNA, 25 bp, Homo sapien
gatgcccacagagagggacgccagt

SEQ ID NO: 2431221 - DNA, 25 bp, Homo sapien
tgctgtgaggaaccatgtcctggaa

SEQ ID NO: 2431222 - DNA, 25 bp, Homo sapien
atgtaaagacatcacggctccccta

SEQ ID NO: 2431223 - DNA, 25 bp, Homo sapien
caccgtaagaggaatcagccatgtc

SEQ ID NO: 2431224 - DNA, 25 bp, Homo sapien
cgaacacaacatgggagaactgacc

SEQ ID NO: 2431225 - DNA, 25 bp, Homo sapien
aagccctaggatctggccacggtgg

SEQ ID NO: 2431226 - DNA, 25 bp, Homo sapien
acctggctggcaccggaagccctag

SEQ ID NO: 2431227 - DNA, 25 bp, Homo sapien
gcagggtaccaccaagatccttcag

SEQ ID NO: 2431228 - DNA, 25 bp, Homo sapien
cttactccagaccaacagcaggtca

SEQ ID NO: 2431229 - DNA, 25 bp, Homo sapien
tccagagagcggatggcattgaggt

SEQ ID NO: 2431230 - DNA, 25 bp, Homo sapien
ccaggttcatcagttgctgcgtcat

SEQ ID NO: 2431231 - DNA, 25 bp, Homo sapien
tgtgaggtcatggccaccctccaag

SEQ ID NO: 2431232 - DNA, 25 bp, Homo sapien
cctgttacccagaagagcagccaca

SEQ ID NO: 2431233 - DNA, 25 bp, Homo sapien
ctcctgccaggttcatcagttgctg

SEQ ID NO: 2431234 - DNA, 25 bp, Homo sapien
tagtaagtggcagcaaggtaggacc

SEQ ID NO: 2431235 - DNA, 25 bp, Homo sapien
gccaccctctattctgagagtgctg

SEQ ID NO: 2431236 - DNA, 25 bp, Homo sapien
ttgggtcattgactctagcctgtgt

SEQ ID NO: 2431237 - DNA, 25 bp, Homo sapien
ggagtcccacggctgagcttcctgc

SEQ ID NO: 2431238 - DNA, 25 bp, Homo sapien
cagcagacaccaggactaggtctgg

SEQ ID NO: 2431239 - DNA, 25 bp, Homo sapien
tttggcagaaacatggtagccaccc

SEQ ID NO: 2431240 - DNA, 25 bp, Homo sapien
ctaggtctggagagaactctcgggc

SEQ ID NO: 2431241 - DNA, 25 bp, Homo sapien
ggccgggtgaccctcagcagcatca

SEQ ID NO: 2431242 - DNA, 25 bp, Homo sapien
agccaggtactcaggatcccccatg

SEQ ID NO: 2431243 - DNA, 25 bp, Homo sapien
ctgaaagcagccaggtactcaggat

SEQ ID NO: 2431244 - DNA, 25 bp, Homo sapien
ccaggtactcaggatcccccatggg

SEQ ID NO: 2431245 - DNA, 25 bp, Homo sapien
gaaagcagccaggtactcaggatcc

SEQ ID NO: 2431246 - DNA, 25 bp, Homo sapien
aagttgccgtcgtcatggcgatgca

SEQ ID NO: 2431247 - DNA, 25 bp, Homo sapien
atgtagagcacactggggtcttggt

SEQ ID NO: 2431248 - DNA, 25 bp, Homo sapien
gtcaggattaaatccatcatgtgta

SEQ ID NO: 2431249 - DNA, 25 bp, Homo sapien
tccatcatgtgtaaaaccatcagtg

SEQ ID NO: 2431250 - DNA, 25 bp, Homo sapien
tcatgtgtaaaaccatcagtgtctg

SEQ ID NO: 2431251 - DNA, 25 bp, Homo sapien
aaatccatcatgtgtaaaaccatca

SEQ ID NO: 2431252 - DNA, 25 bp, Homo sapien
ttatctgctattattcttatcatca

SEQ ID NO: 2431253 - DNA, 25 bp, Homo sapien
ccagtctacaatgaggatcttgctg

SEQ ID NO: 2431254 - DNA, 25 bp, Homo sapien
gctgttgcagctgccggcaggcgat

SEQ ID NO: 2431255 - DNA, 25 bp, Homo sapien
aggcgatggccactgagttgaagaa

SEQ ID NO: 2431256 - DNA, 25 bp, Homo sapien
gtctacaatgaggatcttgctggcc

SEQ ID NO: 2431257 - DNA, 25 bp, Homo sapien
ttgaatgatctgcatggtgtcctgg

SEQ ID NO: 2431258 - DNA, 25 bp, Homo sapien
ggctgttgaatgatctgcatggtgt

SEQ ID NO: 2431259 - DNA, 25 bp, Homo sapien
ctgttgaatgatctgcatggtgtcc

SEQ ID NO: 2431260 - DNA, 25 bp, Homo sapien
tgaatgatctgcatggtgtcctggg

SEQ ID NO: 2431261 - DNA, 25 bp, Homo sapien
agtgacactgccagcggcccagcgg

SEQ ID NO: 2431262 - DNA, 25 bp, Homo sapien
actttgaaggcgaggtcagtgacac

SEQ ID NO: 2431263 - DNA, 25 bp, Homo sapien
gctgcattggaggaatgaagctcat

SEQ ID NO: 2431264 - DNA, 25 bp, Homo sapien
agctcacgagaagccactttgaagg

SEQ ID NO: 2431265 - DNA, 25 bp, Homo sapien
agtcagggcccgcatcatccaaggc

SEQ ID NO: 2431266 - DNA, 25 bp, Homo sapien
agggcccgcatcatccaaggcttca

SEQ ID NO: 2431267 - DNA, 25 bp, Homo sapien
cattatctggccagcactctgctgg

SEQ ID NO: 2431268 - DNA, 25 bp, Homo sapien
gcagcatcacgcctgcctccccggt

SEQ ID NO: 2431269 - DNA, 25 bp, Homo sapien
gtcttccactcagggcccctagccc

SEQ ID NO: 2431270 - DNA, 25 bp, Homo sapien
aggccctgcgggacggtcggagctg

SEQ ID NO: 2431271 - DNA, 25 bp, Homo sapien
actgtcttccactcagggcccctag

SEQ ID NO: 2431272 - DNA, 25 bp, Homo sapien
caggccctgcgggacggtcggagct

SEQ ID NO: 2431273 - DNA, 25 bp, Homo sapien
gagacacgcctgtccaaaaggagct

SEQ ID NO: 2431274 - DNA, 25 bp, Homo sapien
gggagagatgatcctaagccccagc

SEQ ID NO: 2431275 - DNA, 25 bp, Homo sapien
cacaccttgcttgagaaactactgc

SEQ ID NO: 2431276 - DNA, 25 bp, Homo sapien
ttaggaagcaaagctcgcgagcgga

SEQ ID NO: 2431277 - DNA, 25 bp, Homo sapien
cacaacaagcagaggttctgcaggg

SEQ ID NO: 2431278 - DNA, 25 bp, Homo sapien
cctgtctggcagaaccacaacaagc

SEQ ID NO: 2431279 - DNA, 25 bp, Homo sapien
ctgtctggcagaaccacaacaagca

SEQ ID NO: 2431280 - DNA, 25 bp, Homo sapien
agaaccacaacaagcagaggttctg

SEQ ID NO: 2431281 - DNA, 25 bp, Homo sapien
gagagccctggcaacgcccccctga

SEQ ID NO: 2431282 - DNA, 25 bp, Homo sapien
gccctggcaacgcccccctgagacc

SEQ ID NO: 2431283 - DNA, 25 bp, Homo sapien
gagccctggcaacgcccccctgaga

SEQ ID NO: 2431284 - DNA, 25 bp, Homo sapien
tggcaacgcccccctgagacccctg

SEQ ID NO: 2431285 - DNA, 25 bp, Homo sapien
atcacaaacatccgctgtgccagga

SEQ ID NO: 2431286 - DNA, 25 bp, Homo sapien
tcacaaacatccgctgtgccaggag

SEQ ID NO: 2431287 - DNA, 25 bp, Homo sapien
gcatcacaaacatccgctgtgccag

SEQ ID NO: 2431288 - DNA, 25 bp, Homo sapien
catcacaaacatccgctgtgccagg

SEQ ID NO: 2431289 - DNA, 25 bp, Homo sapien
ctgagcgggttggtgccgtagagga

SEQ ID NO: 2431290 - DNA, 25 bp, Homo sapien
cgctcagagtggaccgactgcagct

SEQ ID NO: 2431291 - DNA, 25 bp, Homo sapien
tgccgtagaggagcacgtgccgctc

SEQ ID NO: 2431292 - DNA, 25 bp, Homo sapien
agtttgaggcggctgagcgggttgg

SEQ ID NO: 2431293 - DNA, 25 bp, Homo sapien
ctggtgcttcagcatgaccgagtca

SEQ ID NO: 2431294 - DNA, 25 bp, Homo sapien
ggtgcttcagcatgaccgagtcata

SEQ ID NO: 2431295 - DNA, 25 bp, Homo sapien
tgcggccggcgtgctccgggtgcct

SEQ ID NO: 2431296 - DNA, 25 bp, Homo sapien
ctgctgttgtcaccgcaggagcact

SEQ ID NO: 2431297 - DNA, 25 bp, Homo sapien
cacatgcggacacgactgctgggtg

SEQ ID NO: 2431298 - DNA, 25 bp, Homo sapien
tcatgaacccagagaggctaccaag

SEQ ID NO: 2431299 - DNA, 25 bp, Homo sapien
gcatgaggcctaacgtacagcatct

SEQ ID NO: 2431300 - DNA, 25 bp, Homo sapien
taagaagcccacgatgacactggac

SEQ ID NO: 2431301 - DNA, 25 bp, Homo sapien
tcagaggagggtcctgctcattgcg

SEQ ID NO: 2431302 - DNA, 25 bp, Homo sapien
taggacaccaacgactctcaaaatg

SEQ ID NO: 2431303 - DNA, 25 bp, Homo sapien
caatttctgtgcgtctaggacacca

SEQ ID NO: 2431304 - DNA, 25 bp, Homo sapien
aaatgctcacaccatgtgacccagg

SEQ ID NO: 2431305 - DNA, 25 bp, Homo sapien
tgtacatatggccagaacaaagcct

SEQ ID NO: 2431306 - DNA, 25 bp, Homo sapien
catgggtactacgtgggcctaacaa

SEQ ID NO: 2431307 - DNA, 25 bp, Homo sapien
tcggccaaatgcaataaccagctgt

SEQ ID NO: 2431308 - DNA, 25 bp, Homo sapien
ccttagatttcgtgagccttggtcc

SEQ ID NO: 2431309 - DNA, 25 bp, Homo sapien
tcctggcaggggtctctgagctgga

SEQ ID NO: 2431310 - DNA, 25 bp, Homo sapien
gtcctggcaggggtctctgagctgg

SEQ ID NO: 2431311 - DNA, 25 bp, Homo sapien
cagggtcctggcaggggtctctgag

SEQ ID NO: 2431312 - DNA, 25 bp, Homo sapien
tggcaggggtctctgagctggagag

SEQ ID NO: 2431313 - DNA, 25 bp, Homo sapien
ctgagcccgggacagaggccggtgc

SEQ ID NO: 2431314 - DNA, 25 bp, Homo sapien
ggcaggtgcggctggggaagactga

SEQ ID NO: 2431315 - DNA, 25 bp, Homo sapien
gggaagactgagcccgggacagagg

SEQ ID NO: 2431316 - DNA, 25 bp, Homo sapien
ctgacagtgaggcaggtgcggctgg

SEQ ID NO: 2431317 - DNA, 25 bp, Homo sapien
ccagaggaagcagcacagtgtcccc

SEQ ID NO: 2431318 - DNA, 25 bp, Homo sapien
agaggaagcagcacagtgtccccgg

SEQ ID NO: 2431319 - DNA, 25 bp, Homo sapien
aggaagcagcacagtgtccccggtg

SEQ ID NO: 2431320 - DNA, 25 bp, Homo sapien
cctgggccagaggaagcagcacagt

SEQ ID NO: 2431321 - DNA, 25 bp, Homo sapien
agccagtcgctgctgttcccagagc

SEQ ID NO: 2431322 - DNA, 25 bp, Homo sapien
cgcccagccagtcgctgctgttccc

SEQ ID NO: 2431323 - DNA, 25 bp, Homo sapien
cagccagtcgctgctgttcccagag

SEQ ID NO: 2431324 - DNA, 25 bp, Homo sapien
gcagccggggcttctcactcggctt

SEQ ID NO: 2431325 - DNA, 25 bp, Homo sapien
ttcagccgagggtatctgccgcagc

SEQ ID NO: 2431326 - DNA, 25 bp, Homo sapien
ccaggtcttcagccgagggtatctg

SEQ ID NO: 2431327 - DNA, 25 bp, Homo sapien
gggcttctcactcggcttggctgac

SEQ ID NO: 2431328 - DNA, 25 bp, Homo sapien
gggctctgagcgagtccggctcagt

SEQ ID NO: 2431329 - DNA, 25 bp, Homo sapien
ctctgagcgagtccggctcagtggc

SEQ ID NO: 2431330 - DNA, 25 bp, Homo sapien
ctgacccagagagccgctcggtggt

SEQ ID NO: 2431331 - DNA, 25 bp, Homo sapien
gcctgacccagagagccgctcggtg

SEQ ID NO: 2431332 - DNA, 25 bp, Homo sapien
tgggcaaagtggaagggcaagggcc

SEQ ID NO: 2431333 - DNA, 25 bp, Homo sapien
taaggactgggcaaagtggaagggc

SEQ ID NO: 2431334 - DNA, 25 bp, Homo sapien
ggcaaagtggaagggcaagggccca

SEQ ID NO: 2431335 - DNA, 25 bp, Homo sapien
gactgggcaaagtggaagggcaagg

SEQ ID NO: 2431336 - DNA, 25 bp, Homo sapien
tcttagcagggtgcagggacccagc

SEQ ID NO: 2431337 - DNA, 25 bp, Homo sapien
tcccaagcttggctcttagcagggt

SEQ ID NO: 2431338 - DNA, 25 bp, Homo sapien
cagcagggcaatgcgcaggacaggg

SEQ ID NO: 2431339 - DNA, 25 bp, Homo sapien
caagcttggctcttagcagggtgca

SEQ ID NO: 2431340 - DNA, 25 bp, Homo sapien
gagagggcaaggtgcccccagcctc

SEQ ID NO: 2431341 - DNA, 25 bp, Homo sapien
cccgagggcccagagtcggatgggt

SEQ ID NO: 2431342 - DNA, 25 bp, Homo sapien
ccagcctcgggctccaagccatggg

SEQ ID NO: 2431343 - DNA, 25 bp, Homo sapien
agaatgggctgcaggcgagagggca

SEQ ID NO: 2431344 - DNA, 25 bp, Homo sapien
caaggacactgtcggcaaggcgaac

SEQ ID NO: 2431345 - DNA, 25 bp, Homo sapien
ccccagagtgattgcgggcagcaag

SEQ ID NO: 2431346 - DNA, 25 bp, Homo sapien
gcagcaaggacactgtcggcaaggc

SEQ ID NO: 2431347 - DNA, 25 bp, Homo sapien
agccccagagtgattgcgggcagca

SEQ ID NO: 2431348 - DNA, 25 bp, Homo sapien
agctgcaccctgatgcgggcgtgct

SEQ ID NO: 2431349 - DNA, 25 bp, Homo sapien
atgcgggcgtgctgctactacttgg

SEQ ID NO: 2431350 - DNA, 25 bp, Homo sapien
gattggggccgtgctcgctgtcatt

SEQ ID NO: 2431351 - DNA, 25 bp, Homo sapien
ctcgctgtcattgggggagctgcac

SEQ ID NO: 2431352 - DNA, 25 bp, Homo sapien
tcctgctttcttcccatcagagcag

SEQ ID NO: 2431353 - DNA, 25 bp, Homo sapien
cgcgcccggcctcctgctttcttcc

SEQ ID NO: 2431354 - DNA, 25 bp, Homo sapien
cgcccggcctcctgctttcttccca

SEQ ID NO: 2431355 - DNA, 25 bp, Homo sapien
cccggcctcctgctttcttcccatc

SEQ ID NO: 2431356 - DNA, 25 bp, Homo sapien
tagcgcagcttcaggttgggctcag

SEQ ID NO: 2431357 - DNA, 25 bp, Homo sapien
gcactctcctttcggagcagtggat

SEQ ID NO: 2431358 - DNA, 25 bp, Homo sapien
agtggattcttcctccgctccaggg

SEQ ID NO: 2431359 - DNA, 25 bp, Homo sapien
cagggacttcttgggcttatagcgc

SEQ ID NO: 2431360 - DNA, 25 bp, Homo sapien
gtcttgcgcagagggaagtgctctg

SEQ ID NO: 2431361 - DNA, 25 bp, Homo sapien
cttgcgcagagggaagtgctctggg

SEQ ID NO: 2431362 - DNA, 25 bp, Homo sapien
ctgtcttgcgcagagggaagtgctc

SEQ ID NO: 2431363 - DNA, 25 bp, Homo sapien
tgtcttgcgcagagggaagtgctct

SEQ ID NO: 2431364 - DNA, 25 bp, Homo sapien
agcatggagcgggtggctccttccg

SEQ ID NO: 2431365 - DNA, 25 bp, Homo sapien
catggagcgggtggctccttccgtc

SEQ ID NO: 2431366 - DNA, 25 bp, Homo sapien
tgctgagcatggagcgggtggctcc

SEQ ID NO: 2431367 - DNA, 25 bp, Homo sapien
gagcgggtggctccttccgtctcca

SEQ ID NO: 2431368 - DNA, 25 bp, Homo sapien
agaacgagtgccaaggctgcttcag

SEQ ID NO: 2431369 - DNA, 25 bp, Homo sapien
gaggtgtggggacactgcacgggca

SEQ ID NO: 2431370 - DNA, 25 bp, Homo sapien
gtgtggggacactgcacgggcactg

SEQ ID NO: 2431371 - DNA, 25 bp, Homo sapien
tacagaacgagtgccaaggctgctt

SEQ ID NO: 2431372 - DNA, 25 bp, Homo sapien
aatcacctccgctagcttctgcttg

SEQ ID NO: 2431373 - DNA, 25 bp, Homo sapien
gatggactgttctttctagggccgc

SEQ ID NO: 2431374 - DNA, 25 bp, Homo sapien
tagggccgcctgctgttttttcaga

SEQ ID NO: 2431375 - DNA, 25 bp, Homo sapien
ttctgcttgaccacgctgctggcta

SEQ ID NO: 2431376 - DNA, 25 bp, Homo sapien
tgggctggggtggccacctccttac

SEQ ID NO: 2431377 - DNA, 25 bp, Homo sapien
aagccacacaggcagccgcaggcac

SEQ ID NO: 2431378 - DNA, 25 bp, Homo sapien
cacaggcagccgcaggcacctggct

SEQ ID NO: 2431379 - DNA, 25 bp, Homo sapien
cagccgcaggcacctggctggtggg

SEQ ID NO: 2431380 - DNA, 25 bp, Homo sapien
tgcaactcgggcatcggcgtgtcca

SEQ ID NO: 2431381 - DNA, 25 bp, Homo sapien
gggtcccacctgcaactcgggcatc

SEQ ID NO: 2431382 - DNA, 25 bp, Homo sapien
acctgcaactcgggcatcggcgtgt

SEQ ID NO: 2431383 - DNA, 25 bp, Homo sapien
caactcgggcatcggcgtgtccatg

SEQ ID NO: 2431384 - DNA, 25 bp, Homo sapien
gactggtgtctagggatgctgaagg

SEQ ID NO: 2431385 - DNA, 25 bp, Homo sapien
gttgaggactgagactggtgtctag

SEQ ID NO: 2431386 - DNA, 25 bp, Homo sapien
gaggactgagactggtgtctaggga

SEQ ID NO: 2431387 - DNA, 25 bp, Homo sapien
actgagactggtgtctagggatgct

SEQ ID NO: 2431388 - DNA, 25 bp, Homo sapien
tgctgcaggcctgctaggaagaggt

SEQ ID NO: 2431389 - DNA, 25 bp, Homo sapien
caggcctgctaggaagaggtggtgg

SEQ ID NO: 2431390 - DNA, 25 bp, Homo sapien
tgggctccaccgagcgctgctgctg

SEQ ID NO: 2431391 - DNA, 25 bp, Homo sapien
ctgcagggccagcaatgtgggctct

SEQ ID NO: 2431392 - DNA, 25 bp, Homo sapien
ctggtgtgtctgcacagggcctggg

SEQ ID NO: 2431393 - DNA, 25 bp, Homo sapien
tgtgtctgcacagggcctggggcag

SEQ ID NO: 2431394 - DNA, 25 bp, Homo sapien
ggtgtgtctgcacagggcctggggc

SEQ ID NO: 2431395 - DNA, 25 bp, Homo sapien
gtgtctgcacagggcctggggcagc

SEQ ID NO: 2431396 - DNA, 25 bp, Homo sapien
aatcctgtcgtggtcctgcaaggta

SEQ ID NO: 2431397 - DNA, 25 bp, Homo sapien
ttgacaatggcaaaacactctcatg

SEQ ID NO: 2431398 - DNA, 25 bp, Homo sapien
tgtcctcgggggcatgatacagcct

SEQ ID NO: 2431399 - DNA, 25 bp, Homo sapien
ccctcaggctcacttgacaatggca

SEQ ID NO: 2431400 - DNA, 25 bp, Homo sapien
ggggctgcagtagtgggcacccggg

SEQ ID NO: 2431401 - DNA, 25 bp, Homo sapien
ggctgcagtagtgggcacccgggct

SEQ ID NO: 2431402 - DNA, 25 bp, Homo sapien
tgcagtagtgggcacccgggctcac

SEQ ID NO: 2431403 - DNA, 25 bp, Homo sapien
ctgcagtagtgggcacccgggctca

SEQ ID NO: 2431404 - DNA, 25 bp, Homo sapien
ggtaaccacagattccggacaccat

SEQ ID NO: 2431405 - DNA, 25 bp, Homo sapien
gtaaccacagattccggacaccatg

SEQ ID NO: 2431406 - DNA, 25 bp, Homo sapien
cacagattccggacaccatgcactc

SEQ ID NO: 2431407 - DNA, 25 bp, Homo sapien
aaccacagattccggacaccatgca

SEQ ID NO: 2431408 - DNA, 25 bp, Homo sapien
ggggctgcttccaatagcaattcct

SEQ ID NO: 2431409 - DNA, 25 bp, Homo sapien
aatccataatataaggtctgtccag

SEQ ID NO: 2431410 - DNA, 25 bp, Homo sapien
tgtgcatgcgtgttggcaacggggc

SEQ ID NO: 2431411 - DNA, 25 bp, Homo sapien
ttttgtggtgataatccataatata

SEQ ID NO: 2431412 - DNA, 25 bp, Homo sapien
ttgattagcggaaaaggaagcagca

SEQ ID NO: 2431413 - DNA, 25 bp, Homo sapien
caggctttagagatcgttcagacca

SEQ ID NO: 2431414 - DNA, 25 bp, Homo sapien
tcacacccgaggttgctgtctctgg

SEQ ID NO: 2431415 - DNA, 25 bp, Homo sapien
gagtttagaatacagcctgcagcct

SEQ ID NO: 2431416 - DNA, 25 bp, Homo sapien
ggatgtccggtttggagtctctttc

SEQ ID NO: 2431417 - DNA, 25 bp, Homo sapien
atgtccggtttggagtctctttctg

SEQ ID NO: 2431418 - DNA, 25 bp, Homo sapien
gcaggatgtccggtttggagtctct

SEQ ID NO: 2431419 - DNA, 25 bp, Homo sapien
agccgcaggatgtccggtttggagt

SEQ ID NO: 2431420 - DNA, 25 bp, Homo sapien
tccaaaaagccctcaaagacataag

SEQ ID NO: 2431421 - DNA, 25 bp, Homo sapien
cagttccaaaaagccctcaaagaca

SEQ ID NO: 2431422 - DNA, 25 bp, Homo sapien
aaagccctcaaagacataagttcca

SEQ ID NO: 2431423 - DNA, 25 bp, Homo sapien
gccctcaaagacataagttccacat

SEQ ID NO: 2431424 - DNA, 25 bp, Homo sapien
tactattgcaagtagtcctcacaac

SEQ ID NO: 2431425 - DNA, 25 bp, Homo sapien
tattgcaagtagtcctcacaactct

SEQ ID NO: 2431426 - DNA, 25 bp, Homo sapien
ttaattgtactattgcaagtagtcc

SEQ ID NO: 2431427 - DNA, 25 bp, Homo sapien
tgtactattgcaagtagtcctcaca

SEQ ID NO: 2431428 - DNA, 25 bp, Homo sapien
caaacgctgcgtgagctctctggaa

SEQ ID NO: 2431429 - DNA, 25 bp, Homo sapien
tgtcaagccctctacaaaatgcggg

SEQ ID NO: 2431430 - DNA, 25 bp, Homo sapien
gctgccacagaggatcaaacgctgc

SEQ ID NO: 2431431 - DNA, 25 bp, Homo sapien
cagagcaagtcaccctcagagtggg

SEQ ID NO: 2431432 - DNA, 25 bp, Homo sapien
caggcaaaccgaactgaggcatctc

SEQ ID NO: 2431433 - DNA, 25 bp, Homo sapien
gacactcacagggatgccacattaa

SEQ ID NO: 2431434 - DNA, 25 bp, Homo sapien
gcatctcggatgtgaatagccacaa

SEQ ID NO: 2431435 - DNA, 25 bp, Homo sapien
tgcactcagtaagaaccaggcaaac

SEQ ID NO: 2431436 - DNA, 25 bp, Homo sapien
cctgatcctagggagccaaaagggt

SEQ ID NO: 2431437 - DNA, 25 bp, Homo sapien
gcgactcaagttgctcagggccctt

SEQ ID NO: 2431438 - DNA, 25 bp, Homo sapien
ggagctatgctctgctgatgaaaac

SEQ ID NO: 2431439 - DNA, 25 bp, Homo sapien
tactcaggcctctaaggaaagggct

SEQ ID NO: 2431440 - DNA, 25 bp, Homo sapien
tggaggcctcagtccgaagtctaac

SEQ ID NO: 2431441 - DNA, 25 bp, Homo sapien
gaccctgggccttgcattagctcac

SEQ ID NO: 2431442 - DNA, 25 bp, Homo sapien
caggcccctgccgacttcaaaatta

SEQ ID NO: 2431443 - DNA, 25 bp, Homo sapien
taccagcccttaatgaaaggccagg

SEQ ID NO: 2431444 - DNA, 25 bp, Homo sapien
ctcctctccatagtcaacctcttct

SEQ ID NO: 2431445 - DNA, 25 bp, Homo sapien
tgctctgagaagtgtgcttggaatt

SEQ ID NO: 2431446 - DNA, 25 bp, Homo sapien
ctctgagaagtgtgcttggaatttt

SEQ ID NO: 2431447 - DNA, 25 bp, Homo sapien
ctctccatagtcaacctcttctgct

SEQ ID NO: 2431448 - DNA, 25 bp, Homo sapien
gctggggcgccggcctcacatcccc

SEQ ID NO: 2431449 - DNA, 25 bp, Homo sapien
tggggcgccggcctcacatcccccc

SEQ ID NO: 2431450 - DNA, 25 bp, Homo sapien
ggccctcagagcggggggctcatgg

SEQ ID NO: 2431451 - DNA, 25 bp, Homo sapien
ggggcgccggcctcacatcccccca

SEQ ID NO: 2431452 - DNA, 25 bp, Homo sapien
cagtgggacacgcgtggtgtcccat

SEQ ID NO: 2431453 - DNA, 25 bp, Homo sapien
cacagtgggacacgcgtggtgtccc

SEQ ID NO: 2431454 - DNA, 25 bp, Homo sapien
acagtgggacacgcgtggtgtccca

SEQ ID NO: 2431455 - DNA, 25 bp, Homo sapien
ggatctgatttgaatcactgcccag

SEQ ID NO: 2431456 - DNA, 25 bp, Homo sapien
tccaggatctgatttgaatcactgc

SEQ ID NO: 2431457 - DNA, 25 bp, Homo sapien
tgatttgaatcactgcccagccctc

SEQ ID NO: 2431458 - DNA, 25 bp, Homo sapien
aagttccaggatctgatttgaatca

SEQ ID NO: 2431459 - DNA, 25 bp, Homo sapien
gggttggcgggctgtggtcggccac

SEQ ID NO: 2431460 - DNA, 25 bp, Homo sapien
tcagcgggtatgagggcctctctgc

SEQ ID NO: 2431461 - DNA, 25 bp, Homo sapien
gtcggccacctgctgtttcacatca

SEQ ID NO: 2431462 - DNA, 25 bp, Homo sapien
cagcgggtatgagggcctctctgct

SEQ ID NO: 2431463 - DNA, 25 bp, Homo sapien
gggagtaagcggagttgttggcacc

SEQ ID NO: 2431464 - DNA, 25 bp, Homo sapien
agtaagcggagttgttggcaccatg

SEQ ID NO: 2431465 - DNA, 25 bp, Homo sapien
gagttgttggcaccatgggccgggc

SEQ ID NO: 2431466 - DNA, 25 bp, Homo sapien
tgttggcaccatgggccgggccagg

SEQ ID NO: 2431467 - DNA, 25 bp, Homo sapien
gaaactctggtttagaggcaagcca

SEQ ID NO: 2431468 - DNA, 25 bp, Homo sapien
agccacagagctgcacgttcagaga

SEQ ID NO: 2431469 - DNA, 25 bp, Homo sapien
gagagtaaaaggatgccaggaccca

SEQ ID NO: 2431470 - DNA, 25 bp, Homo sapien
tacatattgatgaatctaacccaca

SEQ ID NO: 2431471 - DNA, 25 bp, Homo sapien
gagacatgcccatttatgcagctgt

SEQ ID NO: 2431472 - DNA, 25 bp, Homo sapien
gatcctaattatgcaaccttcctgg

SEQ ID NO: 2431473 - DNA, 25 bp, Homo sapien
cagtgtaggcatagaaccaaagctt

SEQ ID NO: 2431474 - DNA, 25 bp, Homo sapien
tggaaaagcgcattataacacagcc

SEQ ID NO: 2431475 - DNA, 25 bp, Homo sapien
ttttcagggaactacggatgcaggt

SEQ ID NO: 2431476 - DNA, 25 bp, Homo sapien
tgcttccagttagccagccagagga

SEQ ID NO: 2431477 - DNA, 25 bp, Homo sapien
caccttggagtaaacggacagacgc

SEQ ID NO: 2431478 - DNA, 25 bp, Homo sapien
tgtgatccacctcgaagaacgcctt

SEQ ID NO: 2431479 - DNA, 25 bp, Homo sapien
ttgccaaacacttcgagcacaaggg

SEQ ID NO: 2431480 - DNA, 25 bp, Homo sapien
tcctcattgaggctgcgcaggtcgg

SEQ ID NO: 2431481 - DNA, 25 bp, Homo sapien
cgcaggtcggctagcttctggatca

SEQ ID NO: 2431482 - DNA, 25 bp, Homo sapien
tacgtctgcagtgtgttggacaggc

SEQ ID NO: 2431483 - DNA, 25 bp, Homo sapien
gggagacgatgcagatggccatgag

SEQ ID NO: 2431484 - DNA, 25 bp, Homo sapien
ccacctggaacttgatgaggggctc

SEQ ID NO: 2431485 - DNA, 25 bp, Homo sapien
catgctcctcctcatgcaagttcag

SEQ ID NO: 2431486 - DNA, 25 bp, Homo sapien
gctcctcctcatgcaagttcagctt

SEQ ID NO: 2431487 - DNA, 25 bp, Homo sapien
caatggcacttgacttcagcagtac

SEQ ID NO: 2431488 - DNA, 25 bp, Homo sapien
cttggttgccacaggtccaggacat

SEQ ID NO: 2431489 - DNA, 25 bp, Homo sapien
tcagcagtacgatctggtcctcaga

SEQ ID NO: 2431490 - DNA, 25 bp, Homo sapien
cattggagcgcaacatgatgacctc

SEQ ID NO: 2431491 - DNA, 25 bp, Homo sapien
tttagccatgagttgcaaggacaga

SEQ ID NO: 2431492 - DNA, 25 bp, Homo sapien
cagattggagaagctggacgagtcc

SEQ ID NO: 2431493 - DNA, 25 bp, Homo sapien
cacagaagggtcatctgaatcttct

SEQ ID NO: 2431494 - DNA, 25 bp, Homo sapien
gaatcctggtatcatcttagcaaag

SEQ ID NO: 2431495 - DNA, 25 bp, Homo sapien
gaccttttggatgctgtaactgacc

SEQ ID NO: 2431496 - DNA, 25 bp, Homo sapien
aggtgatacagtgatctgagcagga

SEQ ID NO: 2431497 - DNA, 25 bp, Homo sapien
caccatcattcacacgaactggagg

SEQ ID NO: 2431498 - DNA, 25 bp, Homo sapien
tccaccatcattcacacgaactgga

SEQ ID NO: 2431499 - DNA, 25 bp, Homo sapien
tgaagaggtgatacagtgatctgag

SEQ ID NO: 2431500 - DNA, 25 bp, Homo sapien
ccctgatctctgataggaatggctt

SEQ ID NO: 2431501 - DNA, 25 bp, Homo sapien
ttggccctgatctctgataggaatg

SEQ ID NO: 2431502 - DNA, 25 bp, Homo sapien
tgatctctgataggaatggctttga

SEQ ID NO: 2431503 - DNA, 25 bp, Homo sapien
tctgataggaatggctttgaggaag

SEQ ID NO: 2431504 - DNA, 25 bp, Homo sapien
cagcttgggccgcagactgtccttc

SEQ ID NO: 2431505 - DNA, 25 bp, Homo sapien
tcgtaggtcttatggtgggcgtcca

SEQ ID NO: 2431506 - DNA, 25 bp, Homo sapien
gtatggcaatgatgcgctgctgctc

SEQ ID NO: 2431507 - DNA, 25 bp, Homo sapien
tgggcgtccagcagtatggcaatga

SEQ ID NO: 2431508 - DNA, 25 bp, Homo sapien
tgtggggtgggaaggggagtcagga

SEQ ID NO: 2431509 - DNA, 25 bp, Homo sapien
gaaggggagtcaggagggctggcca

SEQ ID NO: 2431510 - DNA, 25 bp, Homo sapien
gtgggaaggggagtcaggagggctg

SEQ ID NO: 2431511 - DNA, 25 bp, Homo sapien
ggaaggggagtcaggagggctggcc

SEQ ID NO: 2431512 - DNA, 25 bp, Homo sapien
tgcccaaacagctgccaactctcct

SEQ ID NO: 2431513 - DNA, 25 bp, Homo sapien
tctcctcccacagtgggtgtctgca

SEQ ID NO: 2431514 - DNA, 25 bp, Homo sapien
tcccacagtgggtgtctgcacagac

SEQ ID NO: 2431515 - DNA, 25 bp, Homo sapien
ctgcccaaacagctgccaactctcc

SEQ ID NO: 2431516 - DNA, 25 bp, Homo sapien
cagcatttagacctgggcagtctgg

SEQ ID NO: 2431517 - DNA, 25 bp, Homo sapien
catctggttataagcggactttggc

SEQ ID NO: 2431518 - DNA, 25 bp, Homo sapien
aatattcgtaatgctggatggcaca

SEQ ID NO: 2431519 - DNA, 25 bp, Homo sapien
acacagctaacagtggtgaaaccag

SEQ ID NO: 2431520 - DNA, 25 bp, Homo sapien
cacagcgtttgagccggcaggcctg

SEQ ID NO: 2431521 - DNA, 25 bp, Homo sapien
cctggcagtggcgtcggttgtcctt

SEQ ID NO: 2431522 - DNA, 25 bp, Homo sapien
ttgtccttggtgatgcggcagtccc

SEQ ID NO: 2431523 - DNA, 25 bp, Homo sapien
tcatcatgccgatgtccacacagcg

SEQ ID NO: 2431524 - DNA, 25 bp, Homo sapien
gatgctgcttgtctggttccccgag

SEQ ID NO: 2431525 - DNA, 25 bp, Homo sapien
caaggattggcaaatgcagcaacac

SEQ ID NO: 2431526 - DNA, 25 bp, Homo sapien
ctgcaggatgtgtggacctcaggcc

SEQ ID NO: 2431527 - DNA, 25 bp, Homo sapien
gacttagagccagcgatgctgcttg

SEQ ID NO: 2431528 - DNA, 25 bp, Homo sapien
cacgttccggtcaaagtctccaggg

SEQ ID NO: 2431529 - DNA, 25 bp, Homo sapien
gtcatagcattgaagtgaaagccag

SEQ ID NO: 2431530 - DNA, 25 bp, Homo sapien
gggcacgttccggtcaaagtctcca

SEQ ID NO: 2431531 - DNA, 25 bp, Homo sapien
gcagccttcacaggtcatagcattg

SEQ ID NO: 2431532 - DNA, 25 bp, Homo sapien
aagcaggccacggtcagagccagag

SEQ ID NO: 2431533 - DNA, 25 bp, Homo sapien
caagcaggccacggtcagagccaga

SEQ ID NO: 2431534 - DNA, 25 bp, Homo sapien
agcaggccacggtcagagccagagt

SEQ ID NO: 2431535 - DNA, 25 bp, Homo sapien
gtctcacagacacttcagacccaaa

SEQ ID NO: 2431536 - DNA, 25 bp, Homo sapien
tgtgaggtctcacagacacttcaga

SEQ ID NO: 2431537 - DNA, 25 bp, Homo sapien
ttctgtgaggtctcacagacacttc

SEQ ID NO: 2431538 - DNA, 25 bp, Homo sapien
tgaggtctcacagacacttcagacc

SEQ ID NO: 2431539 - DNA, 25 bp, Homo sapien
aggaaacggttgtcacgtcaccagg

SEQ ID NO: 2431540 - DNA, 25 bp, Homo sapien
gaggaaacggttgtcacgtcaccag

SEQ ID NO: 2431541 - DNA, 25 bp, Homo sapien
ctaggttattagtgagggtggacac

SEQ ID NO: 2431542 - DNA, 25 bp, Homo sapien
cgtctccatcttctaggttattagt

SEQ ID NO: 2431543 - DNA, 25 bp, Homo sapien
caggacctgggccacgtaggaagtt

SEQ ID NO: 2431544 - DNA, 25 bp, Homo sapien
gggtggacacttcccctgtactgtg

SEQ ID NO: 2431545 - DNA, 25 bp, Homo sapien
gggaatggacgatgacagcactgac

SEQ ID NO: 2431546 - DNA, 25 bp, Homo sapien
tcagatctgttctcggggctcggag

SEQ ID NO: 2431547 - DNA, 25 bp, Homo sapien
ggtggagttacgcacagagctctcc

SEQ ID NO: 2431548 - DNA, 25 bp, Homo sapien
gcactgacaggtggagttacgcaca

SEQ ID NO: 2431549 - DNA, 25 bp, Homo sapien
catggcacccaagatatgggtgtgc

SEQ ID NO: 2431550 - DNA, 25 bp, Homo sapien
tatgggtgtgcttgccaaagaggct

SEQ ID NO: 2431551 - DNA, 25 bp, Homo sapien
cacttcttaacatcatggcacccaa

SEQ ID NO: 2431552 - DNA, 25 bp, Homo sapien
ccccacttcttaacatcatggcacc

SEQ ID NO: 2431553 - DNA, 25 bp, Homo sapien
ctccctggccagattggaactgccc

SEQ ID NO: 2431554 - DNA, 25 bp, Homo sapien
tgcccctggcagaagtccggaaatt

SEQ ID NO: 2431555 - DNA, 25 bp, Homo sapien
tcagagccgtttggaacaaagaact

SEQ ID NO: 2431556 - DNA, 25 bp, Homo sapien
acaaagaactctgccccgaaggtgt

SEQ ID NO: 2431557 - DNA, 25 bp, Homo sapien
tcgtaccacctgctgcgttttttcc

SEQ ID NO: 2431558 - DNA, 25 bp, Homo sapien
gtaccacctgctgcgttttttccag

SEQ ID NO: 2431559 - DNA, 25 bp, Homo sapien
cctcgtaccacctgctgcgtttttt

SEQ ID NO: 2431560 - DNA, 25 bp, Homo sapien
ccacctgctgcgttttttccagccc

SEQ ID NO: 2431561 - DNA, 25 bp, Homo sapien
gaggaggctagagtccatttctccg

SEQ ID NO: 2431562 - DNA, 25 bp, Homo sapien
tcagaggaggctagagtccatttct

SEQ ID NO: 2431563 - DNA, 25 bp, Homo sapien
aagagaagctatgaggattgaggga

SEQ ID NO: 2431564 - DNA, 25 bp, Homo sapien
tggcatgaggctatcagaggaggct

SEQ ID NO: 2431565 - DNA, 25 bp, Homo sapien
tgccgagtctgcacagactccgctt

SEQ ID NO: 2431566 - DNA, 25 bp, Homo sapien
cttctcaggaaccaactgccgagtc

SEQ ID NO: 2431567 - DNA, 25 bp, Homo sapien
agactccgctttcccgccggtgcag

SEQ ID NO: 2431568 - DNA, 25 bp, Homo sapien
tccaagctccaggttgtcatcagaa

SEQ ID NO: 2431569 - DNA, 25 bp, Homo sapien
tgggaacaccacttagtctattccc

SEQ ID NO: 2431570 - DNA, 25 bp, Homo sapien
gaggactttgtatggcatctggttc

SEQ ID NO: 2431571 - DNA, 25 bp, Homo sapien
gcagaatgaggactttgtatggcat

SEQ ID NO: 2431572 - DNA, 25 bp, Homo sapien
acaccacttagtctattccctggca

SEQ ID NO: 2431573 - DNA, 25 bp, Homo sapien
ttctgtgggatagtgtggtccccag

SEQ ID NO: 2431574 - DNA, 25 bp, Homo sapien
ttggacacctgctatctgttctggg

SEQ ID NO: 2431575 - DNA, 25 bp, Homo sapien
atgtagcccactcggtcccaggcct

SEQ ID NO: 2431576 - DNA, 25 bp, Homo sapien
gaggtcctctcggagcttcctctgg

SEQ ID NO: 2431577 - DNA, 25 bp, Homo sapien
ggttcaggaggtcctctcggagctt

SEQ ID NO: 2431578 - DNA, 25 bp, Homo sapien
tttgaggtcaaataggggaagaata

SEQ ID NO: 2431579 - DNA, 25 bp, Homo sapien
tcagttttgaggtcaaataggggaa

SEQ ID NO: 2431580 - DNA, 25 bp, Homo sapien
cagttttgaggtcaaataggggaag

SEQ ID NO: 2431581 - DNA, 25 bp, Homo sapien
gcccggacctcagtagccaagttta

SEQ ID NO: 2431582 - DNA, 25 bp, Homo sapien
ggagcatttctcctaagcgccgagg

SEQ ID NO: 2431583 - DNA, 25 bp, Homo sapien
cagcagttctgagcaccatcgacag

SEQ ID NO: 2431584 - DNA, 25 bp, Homo sapien
ttagactctaatgctcgcagccggg

SEQ ID NO: 2431585 - DNA, 25 bp, Homo sapien
tggacaagctgttccgcgctcccgg

SEQ ID NO: 2431586 - DNA, 25 bp, Homo sapien
tccggccggcgggtggacaagctgt

SEQ ID NO: 2431587 - DNA, 25 bp, Homo sapien
cgggtggacaagctgttccgcgctc

SEQ ID NO: 2431588 - DNA, 25 bp, Homo sapien
gccggcgggtggacaagctgttccg

SEQ ID NO: 2431589 - DNA, 25 bp, Homo sapien
ggctccgctcgccaacctgttactg

SEQ ID NO: 2431590 - DNA, 25 bp, Homo sapien
tgccgactggcaccggcggctagct

SEQ ID NO: 2431591 - DNA, 25 bp, Homo sapien
cggctagctccgcacgaatgggaaa

SEQ ID NO: 2431592 - DNA, 25 bp, Homo sapien
ggctgaccaggccaggacttcgtcg

SEQ ID NO: 2431593 - DNA, 25 bp, Homo sapien
gcttgactggcctgacatcttgcaa

SEQ ID NO: 2431594 - DNA, 25 bp, Homo sapien
gatgaagtgcccctttagaggtcct

SEQ ID NO: 2431595 - DNA, 25 bp, Homo sapien
gtaataggaaggatccccttgccca

SEQ ID NO: 2431596 - DNA, 25 bp, Homo sapien
ccaaagcatcgtgggaaagctagcg

SEQ ID NO: 2431597 - DNA, 25 bp, Homo sapien
cttgatgcctcgatgacaagcacca

SEQ ID NO: 2431598 - DNA, 25 bp, Homo sapien
tctcttgatgcctcgatgacaagca

SEQ ID NO: 2431599 - DNA, 25 bp, Homo sapien
tgttctcttgatgcctcgatgacaa

SEQ ID NO: 2431600 - DNA, 25 bp, Homo sapien
cgtgttctcttgatgcctcgatgac

SEQ ID NO: 2431601 - DNA, 25 bp, Homo sapien
gtctgctggcatggtaaagtagagc

SEQ ID NO: 2431602 - DNA, 25 bp, Homo sapien
tgctggcctgcacacagcgtctgct

SEQ ID NO: 2431603 - DNA, 25 bp, Homo sapien
ggcctgcacacagcgtctgctggca

SEQ ID NO: 2431604 - DNA, 25 bp, Homo sapien
cgtctgctggcatggtaaagtagag

SEQ ID NO: 2431605 - DNA, 25 bp, Homo sapien
catgaaaagaatgtacttccctatg

SEQ ID NO: 2431606 - DNA, 25 bp, Homo sapien
aaaagaatgtacttccctatgtagg

SEQ ID NO: 2431607 - DNA, 25 bp, Homo sapien
gagaaacttgggtcaggtgagggat

SEQ ID NO: 2431608 - DNA, 25 bp, Homo sapien
taatgcatgaaaagaatgtacttcc

SEQ ID NO: 2431609 - DNA, 25 bp, Homo sapien
acccatctccattttcgtacctggg

SEQ ID NO: 2431610 - DNA, 25 bp, Homo sapien
cccatctccattttcgtacctgggt

SEQ ID NO: 2431611 - DNA, 25 bp, Homo sapien
tcacccatctccattttcgtacctg

SEQ ID NO: 2431612 - DNA, 25 bp, Homo sapien
cacccatctccattttcgtacctgg

SEQ ID NO: 2431613 - DNA, 25 bp, Homo sapien
tactcctcagttgatggcataaagg

SEQ ID NO: 2431614 - DNA, 25 bp, Homo sapien
cttatctgaaggagtgcgtctagcc

SEQ ID NO: 2431615 - DNA, 25 bp, Homo sapien
cacgggttggtgctacttgccttat

SEQ ID NO: 2431616 - DNA, 25 bp, Homo sapien
aaccagcaagggtcagctcggaact

SEQ ID NO: 2431617 - DNA, 25 bp, Homo sapien
cagaatttgtccttcgtggcctgtc

SEQ ID NO: 2431618 - DNA, 25 bp, Homo sapien
ctccagaatttgtccttcgtggcct

SEQ ID NO: 2431619 - DNA, 25 bp, Homo sapien
gaatttgtccttcgtggcctgtcct

SEQ ID NO: 2431620 - DNA, 25 bp, Homo sapien
aatttgtccttcgtggcctgtccta

SEQ ID NO: 2431621 - DNA, 25 bp, Homo sapien
ccctgcctgccaatgtggcaagaca

SEQ ID NO: 2431622 - DNA, 25 bp, Homo sapien
ccttcactctttgcactgttcccct

SEQ ID NO: 2431623 - DNA, 25 bp, Homo sapien
gagccctgcctgccaatgtggcaag

SEQ ID NO: 2431624 - DNA, 25 bp, Homo sapien
cttcactctttgcactgttcccctt

SEQ ID NO: 2431625 - DNA, 25 bp, Homo sapien
cttctgctcccgacaacttgccttt

SEQ ID NO: 2431626 - DNA, 25 bp, Homo sapien
gcccgaggcaagtcaagggggacag

SEQ ID NO: 2431627 - DNA, 25 bp, Homo sapien
aagggggacagaaagcgcttccaca

SEQ ID NO: 2431628 - DNA, 25 bp, Homo sapien
cccaccagaggagatagggcccgag

SEQ ID NO: 2431629 - DNA, 25 bp, Homo sapien
cacagcgcctgtagaagagagcaca

SEQ ID NO: 2431630 - DNA, 25 bp, Homo sapien
gaattggttcacttaactcccagca

SEQ ID NO: 2431631 - DNA, 25 bp, Homo sapien
gaggaaacacctccctatggtacca

SEQ ID NO: 2431632 - DNA, 25 bp, Homo sapien
gaatcagtgcctagcctgtgcccag

SEQ ID NO: 2431633 - DNA, 25 bp, Homo sapien
cagattgatcgtgtgcacttaacca

SEQ ID NO: 2431634 - DNA, 25 bp, Homo sapien
cacgtctccgatccagcaggatgca

SEQ ID NO: 2431635 - DNA, 25 bp, Homo sapien
cttcttcctttctcgagggagtatc

SEQ ID NO: 2431636 - DNA, 25 bp, Homo sapien
gcccacatgtggtcttacaccgtaa

SEQ ID NO: 2431637 - DNA, 25 bp, Homo sapien
ggcatttgactcacaccagttagtt

SEQ ID NO: 2431638 - DNA, 25 bp, Homo sapien
gaatagcaccattgtgtaggacaca

SEQ ID NO: 2431639 - DNA, 25 bp, Homo sapien
cagaggtgtttgacacagaatagca

SEQ ID NO: 2431640 - DNA, 25 bp, Homo sapien
tgcctctgccttgacccgaaggtct

SEQ ID NO: 2431641 - DNA, 25 bp, Homo sapien
gaacaccgagattttattttgcagt

SEQ ID NO: 2431642 - DNA, 25 bp, Homo sapien
tcctttgggtttgcaacggattgtg

SEQ ID NO: 2431643 - DNA, 25 bp, Homo sapien
agaaaagtccgaactgtgagagggt

SEQ ID NO: 2431644 - DNA, 25 bp, Homo sapien
gaatggacatcaggtcaggtcagcc

SEQ ID NO: 2431645 - DNA, 25 bp, Homo sapien
tatgtccacaccgaattcctgctcg

SEQ ID NO: 2431646 - DNA, 25 bp, Homo sapien
gcgtgaggtcttctgtgaccggtac

SEQ ID NO: 2431647 - DNA, 25 bp, Homo sapien
agtcttgccccacttaccggtatgt

SEQ ID NO: 2431648 - DNA, 25 bp, Homo sapien
tatgtccatgggtgcaatgtcaatg

SEQ ID NO: 2431649 - DNA, 25 bp, Homo sapien
tgttcagtagatgccttgctaccca

SEQ ID NO: 2431650 - DNA, 25 bp, Homo sapien
ttcagtagatgccttgctacccagt

SEQ ID NO: 2431651 - DNA, 25 bp, Homo sapien
tctgttcagtagatgccttgctacc

SEQ ID NO: 2431652 - DNA, 25 bp, Homo sapien
cagtagatgccttgctacccagttc

SEQ ID NO: 2431653 - DNA, 25 bp, Homo sapien
cacgtcattggagccctggatgagc

SEQ ID NO: 2431654 - DNA, 25 bp, Homo sapien
tccttcagggcagtgtacgtgaacc

SEQ ID NO: 2431655 - DNA, 25 bp, Homo sapien
gaggttgccagctgcttcgtccaga

SEQ ID NO: 2431656 - DNA, 25 bp, Homo sapien
tacgtgaacctgctattgccctctg

SEQ ID NO: 2431657 - DNA, 25 bp, Homo sapien
gagctggcattcaatgggaccaggg

SEQ ID NO: 2431658 - DNA, 25 bp, Homo sapien
agctggcattcaatgggaccagggg

SEQ ID NO: 2431659 - DNA, 25 bp, Homo sapien
ggagctggcattcaatgggaccagg

SEQ ID NO: 2431660 - DNA, 25 bp, Homo sapien
tgggagctggcattcaatgggacca

SEQ ID NO: 2431661 - DNA, 25 bp, Homo sapien
gggtagacgcaagtctcgccagtct

SEQ ID NO: 2431662 - DNA, 25 bp, Homo sapien
gaagccaccattgatggtttctcca

SEQ ID NO: 2431663 - DNA, 25 bp, Homo sapien
cagaaaaccttcatggcgtccaagg

SEQ ID NO: 2431664 - DNA, 25 bp, Homo sapien
tcttcttgggaacgtttgctggatt

SEQ ID NO: 2431665 - DNA, 25 bp, Homo sapien
tgagggacttgagtgtggcatccac

SEQ ID NO: 2431666 - DNA, 25 bp, Homo sapien
tctcgggcctaagccagcaaaggcg

SEQ ID NO: 2431667 - DNA, 25 bp, Homo sapien
ctggtcggcccgcatgtactgcagg

SEQ ID NO: 2431668 - DNA, 25 bp, Homo sapien
cacctcggcgtcatgctgtctcagg

SEQ ID NO: 2431669 - DNA, 25 bp, Homo sapien
cctggaggaccagggggtccaggat

SEQ ID NO: 2431670 - DNA, 25 bp, Homo sapien
gccagggccagggggacctggagga

SEQ ID NO: 2431671 - DNA, 25 bp, Homo sapien
gtcgatgccagggccagggggacct

SEQ ID NO: 2431672 - DNA, 25 bp, Homo sapien
ccagggggtccaggatttccaggag

SEQ ID NO: 2431673 - DNA, 25 bp, Homo sapien
ccggtttcgcctgatcgtccacggg

SEQ ID NO: 2431674 - DNA, 25 bp, Homo sapien
catctttgccagagggaccgacggg

SEQ ID NO: 2431675 - DNA, 25 bp, Homo sapien
agcagggccggtttcgcctgatcgt

SEQ ID NO: 2431676 - DNA, 25 bp, Homo sapien
ggccagggattccattagcaccatc

SEQ ID NO: 2431677 - DNA, 25 bp, Homo sapien
gccagaaggaccagcaggaccagaa

SEQ ID NO: 2431678 - DNA, 25 bp, Homo sapien
tctagggccagaaggaccagcagga

SEQ ID NO: 2431679 - DNA, 25 bp, Homo sapien
gaaggaccagcaggaccagaagcac

SEQ ID NO: 2431680 - DNA, 25 bp, Homo sapien
cagaaggaccagcaggaccagaagc

SEQ ID NO: 2431681 - DNA, 25 bp, Homo sapien
gcctcgggaagtcccacgcaggcag

SEQ ID NO: 2431682 - DNA, 25 bp, Homo sapien
tcgggaagtcccacgcaggcagtga

SEQ ID NO: 2431683 - DNA, 25 bp, Homo sapien
gaagtcccacgcaggcagtgacact

SEQ ID NO: 2431684 - DNA, 25 bp, Homo sapien
aggcctcgggaagtcccacgcaggc

SEQ ID NO: 2431685 - DNA, 25 bp, Homo sapien
tgaagccacggtgtcccttcaggcc

SEQ ID NO: 2431686 - DNA, 25 bp, Homo sapien
tgcagaccagtgaagccacggtgtc

SEQ ID NO: 2431687 - DNA, 25 bp, Homo sapien
agggccgggcagaccctgcagacca

SEQ ID NO: 2431688 - DNA, 25 bp, Homo sapien
agaccctgcagaccagtgaagccac

SEQ ID NO: 2431689 - DNA, 25 bp, Homo sapien
gctggtcctgagggtcccatggggc

SEQ ID NO: 2431690 - DNA, 25 bp, Homo sapien
ctggattccccgggctccagctggt

SEQ ID NO: 2431691 - DNA, 25 bp, Homo sapien
tccagctggtcctgagggtcccatg

SEQ ID NO: 2431692 - DNA, 25 bp, Homo sapien
gctccagctggtcctgagggtccca

SEQ ID NO: 2431693 - DNA, 25 bp, Homo sapien
gcgcaggggaaggcggcttttactg

SEQ ID NO: 2431694 - DNA, 25 bp, Homo sapien
cgcgcaggggaaggcggcttttact

SEQ ID NO: 2431695 - DNA, 25 bp, Homo sapien
cgcaggggaaggcggcttttactga

SEQ ID NO: 2431696 - DNA, 25 bp, Homo sapien
gggaaggcggcttttactgaattca

SEQ ID NO: 2431697 - DNA, 25 bp, Homo sapien
gctcccacagcaccagtctcaccac

SEQ ID NO: 2431698 - DNA, 25 bp, Homo sapien
ctcccacagcaccagtctcaccacg

SEQ ID NO: 2431699 - DNA, 25 bp, Homo sapien
ccttgcttgccagttggaccagcgg

SEQ ID NO: 2431700 - DNA, 25 bp, Homo sapien
cttgccagttggaccagcggggcca

SEQ ID NO: 2431701 - DNA, 25 bp, Homo sapien
gccaggggggccatcagcaccgggg

SEQ ID NO: 2431702 - DNA, 25 bp, Homo sapien
caggggggccatcagcaccggggct

SEQ ID NO: 2431703 - DNA, 25 bp, Homo sapien
ggggggccatcagcaccggggcttc

SEQ ID NO: 2431704 - DNA, 25 bp, Homo sapien
ccaggggggccatcagcaccggggc

SEQ ID NO: 2431705 - DNA, 25 bp, Homo sapien
cctgcaggacccgtcaggccaggag

SEQ ID NO: 2431706 - DNA, 25 bp, Homo sapien
acctgcaggacccgtcaggccagga

SEQ ID NO: 2431707 - DNA, 25 bp, Homo sapien
gcccaggcagaccgacgatgcctct

SEQ ID NO: 2431708 - DNA, 25 bp, Homo sapien
aggcagaccgacgatgcctctctga

SEQ ID NO: 2431709 - DNA, 25 bp, Homo sapien
ggcagaccgacgatgcctctctgac

SEQ ID NO: 2431710 - DNA, 25 bp, Homo sapien
ccaggcagaccgacgatgcctctct

SEQ ID NO: 2431711 - DNA, 25 bp, Homo sapien
ctgagagaggagaggcaggagatga

SEQ ID NO: 2431712 - DNA, 25 bp, Homo sapien
tgagagaggagaggcaggagatgag

SEQ ID NO: 2431713 - DNA, 25 bp, Homo sapien
agagaggagaggcaggagatgagaa

SEQ ID NO: 2431714 - DNA, 25 bp, Homo sapien
gagagaggagaggcaggagatgaga

SEQ ID NO: 2431715 - DNA, 25 bp, Homo sapien
ctgtctcctcgagcacctttgggac

SEQ ID NO: 2431716 - DNA, 25 bp, Homo sapien
tgtctcctcgagcacctttgggacc

SEQ ID NO: 2431717 - DNA, 25 bp, Homo sapien
tggaggccgggttcaccagctcggc

SEQ ID NO: 2431718 - DNA, 25 bp, Homo sapien
ggagcctgggggtccaacgcggcca

SEQ ID NO: 2431719 - DNA, 25 bp, Homo sapien
agcctgggggtccaacgcggccagc

SEQ ID NO: 2431720 - DNA, 25 bp, Homo sapien
ctgggggtccaacgcggccagcagc

SEQ ID NO: 2431721 - DNA, 25 bp, Homo sapien
gcctgggggtccaacgcggccagca

SEQ ID NO: 2431722 - DNA, 25 bp, Homo sapien
ggcacctcgggctcctttaggacca

SEQ ID NO: 2431723 - DNA, 25 bp, Homo sapien
cctcgggctcctttaggaccagtca

SEQ ID NO: 2431724 - DNA, 25 bp, Homo sapien
gggctcctttaggaccagtcactcc

SEQ ID NO: 2431725 - DNA, 25 bp, Homo sapien
tcgggctcctttaggaccagtcact

SEQ ID NO: 2431726 - DNA, 25 bp, Homo sapien
agcatcgcctttctggccggcctct

SEQ ID NO: 2431727 - DNA, 25 bp, Homo sapien
cagcatcgcctttctggccggcctc

SEQ ID NO: 2431728 - DNA, 25 bp, Homo sapien
catcgcctttctggccggcctctcc

SEQ ID NO: 2431729 - DNA, 25 bp, Homo sapien
gcatcgcctttctggccggcctctc

SEQ ID NO: 2431730 - DNA, 25 bp, Homo sapien
cagcaaatcccgctggtccgggggg

SEQ ID NO: 2431731 - DNA, 25 bp, Homo sapien
ggcccagcaaatcccgctggtccgg

SEQ ID NO: 2431732 - DNA, 25 bp, Homo sapien
ccagcaaatcccgctggtccggggg

SEQ ID NO: 2431733 - DNA, 25 bp, Homo sapien
gcccagcaaatcccgctggtccggg

SEQ ID NO: 2431734 - DNA, 25 bp, Homo sapien
caggaccaggaggtccaacttctcc

SEQ ID NO: 2431735 - DNA, 25 bp, Homo sapien
cggagcgccacgagcaccagcactt

SEQ ID NO: 2431736 - DNA, 25 bp, Homo sapien
gcgccacgagcaccagcacttcctg

SEQ ID NO: 2431737 - DNA, 25 bp, Homo sapien
cagcacttcctgcaggaccaggagg

SEQ ID NO: 2431738 - DNA, 25 bp, Homo sapien
ttctcgccattagcaccagctgggc

SEQ ID NO: 2431739 - DNA, 25 bp, Homo sapien
cttctcgccattagcaccagctggg

SEQ ID NO: 2431740 - DNA, 25 bp, Homo sapien
gggggccaatgggacctgtcaggcc

SEQ ID NO: 2431741 - DNA, 25 bp, Homo sapien
gccaggggggccaatgggacctgtc

SEQ ID NO: 2431742 - DNA, 25 bp, Homo sapien
agtccagcagcccgcattcacttac

SEQ ID NO: 2431743 - DNA, 25 bp, Homo sapien
gaccccagtggcagactgcccagcc

SEQ ID NO: 2431744 - DNA, 25 bp, Homo sapien
ctgggtgcagggctaggatcctaat

SEQ ID NO: 2431745 - DNA, 25 bp, Homo sapien
ccagccccgacagagacaggaccag

SEQ ID NO: 2431746 - DNA, 25 bp, Homo sapien
tcgtccaccatcctttccaggggct

SEQ ID NO: 2431747 - DNA, 25 bp, Homo sapien
cagggcctttctcaccaacgtcacc

SEQ ID NO: 2431748 - DNA, 25 bp, Homo sapien
cctcagggcctttctcaccaacgtc

SEQ ID NO: 2431749 - DNA, 25 bp, Homo sapien
ctccctcagggcctttctcaccaac

SEQ ID NO: 2431750 - DNA, 25 bp, Homo sapien
ttgggcccagcgataccagctgctc

SEQ ID NO: 2431751 - DNA, 25 bp, Homo sapien
tttgggcccagcgataccagctgct

SEQ ID NO: 2431752 - DNA, 25 bp, Homo sapien
ctttgggcccagcgataccagctgc

SEQ ID NO: 2431753 - DNA, 25 bp, Homo sapien
ccgggagagccacgttcacctggga

SEQ ID NO: 2431754 - DNA, 25 bp, Homo sapien
caccgggagagccacgttcacctgg

SEQ ID NO: 2431755 - DNA, 25 bp, Homo sapien
gggagagccacgttcacctgggaaa

SEQ ID NO: 2431756 - DNA, 25 bp, Homo sapien
ggcaccgggagagccacgttcacct

SEQ ID NO: 2431757 - DNA, 25 bp, Homo sapien
tgggacccacgaggccaggggctcc

SEQ ID NO: 2431758 - DNA, 25 bp, Homo sapien
gggctccagcttcaccgggaacacc

SEQ ID NO: 2431759 - DNA, 25 bp, Homo sapien
cctgggacccacgaggccaggggct

SEQ ID NO: 2431760 - DNA, 25 bp, Homo sapien
caggggctccagcttcaccgggaac

SEQ ID NO: 2431761 - DNA, 25 bp, Homo sapien
ctggtcacctggttttccaccttca

SEQ ID NO: 2431762 - DNA, 25 bp, Homo sapien
tggtcacctggttttccaccttcac

SEQ ID NO: 2431763 - DNA, 25 bp, Homo sapien
ctgggggaccaggagggccaggaag

SEQ ID NO: 2431764 - DNA, 25 bp, Homo sapien
aggagcaccctgctcgcctcgttca

SEQ ID NO: 2431765 - DNA, 25 bp, Homo sapien
ggagcaccctgctcgcctcgttcac

SEQ ID NO: 2431766 - DNA, 25 bp, Homo sapien
agcaccctgctcgcctcgttcacca

SEQ ID NO: 2431767 - DNA, 25 bp, Homo sapien
caggagcaccctgctcgcctcgttc

SEQ ID NO: 2431768 - DNA, 25 bp, Homo sapien
accctgagagccacagctagtaggg

SEQ ID NO: 2431769 - DNA, 25 bp, Homo sapien
agagccacagctagtagggcccagg

SEQ ID NO: 2431770 - DNA, 25 bp, Homo sapien
gtgagctgagccagtgttccagaga

SEQ ID NO: 2431771 - DNA, 25 bp, Homo sapien
aaagaaaaggtgagctgagccagtg

SEQ ID NO: 2431772 - DNA, 25 bp, Homo sapien
gggggtcctgcagcacctgtctcac

SEQ ID NO: 2431773 - DNA, 25 bp, Homo sapien
ccagggggtcctgcagcacctgtct

SEQ ID NO: 2431774 - DNA, 25 bp, Homo sapien
ggccagggggtcctgcagcacctgt

SEQ ID NO: 2431775 - DNA, 25 bp, Homo sapien
agggggtcctgcagcacctgtctca

SEQ ID NO: 2431776 - DNA, 25 bp, Homo sapien
caggcagtcccttctcaccagcttt

SEQ ID NO: 2431777 - DNA, 25 bp, Homo sapien
gcaccaggcagtcccttctcaccag

SEQ ID NO: 2431778 - DNA, 25 bp, Homo sapien
agtcccttctcaccagctttgccag

SEQ ID NO: 2431779 - DNA, 25 bp, Homo sapien
tggaggtccaggacgaccatcttca

SEQ ID NO: 2431780 - DNA, 25 bp, Homo sapien
cctggaggtccaggacgaccatctt

SEQ ID NO: 2431781 - DNA, 25 bp, Homo sapien
gggccagggaaacccatgacaccag

SEQ ID NO: 2431782 - DNA, 25 bp, Homo sapien
catgacaccaggctgcccacgagcc

SEQ ID NO: 2431783 - DNA, 25 bp, Homo sapien
agaagggccaactttgccttgagga

SEQ ID NO: 2431784 - DNA, 25 bp, Homo sapien
gaagggccaactttgccttgaggac

SEQ ID NO: 2431785 - DNA, 25 bp, Homo sapien
ggtctgaagccaagggcaacagcag

SEQ ID NO: 2431786 - DNA, 25 bp, Homo sapien
gccagggtcaccgttggctcccttg

SEQ ID NO: 2431787 - DNA, 25 bp, Homo sapien
gacggccagggtcaccgttggctcc

SEQ ID NO: 2431788 - DNA, 25 bp, Homo sapien
ggacggccagggtcaccgttggctc

SEQ ID NO: 2431789 - DNA, 25 bp, Homo sapien
cggccagggtcaccgttggctccct

SEQ ID NO: 2431790 - DNA, 25 bp, Homo sapien
atcttgacctgggaaaccgcggttg

SEQ ID NO: 2431791 - DNA, 25 bp, Homo sapien
tcttgacctgggaaaccgcggttgc

SEQ ID NO: 2431792 - DNA, 25 bp, Homo sapien
tgggaaaccgcggttgccgggagca

SEQ ID NO: 2431793 - DNA, 25 bp, Homo sapien
tgccttcttcaccagcgggtccagg

SEQ ID NO: 2431794 - DNA, 25 bp, Homo sapien
cttgccttcttcaccagcgggtcca

SEQ ID NO: 2431795 - DNA, 25 bp, Homo sapien
tctcttgccttcttcaccagcgggt

SEQ ID NO: 2431796 - DNA, 25 bp, Homo sapien
ccttcttcaccagcgggtccagggg

SEQ ID NO: 2431797 - DNA, 25 bp, Homo sapien
cttgttcacctttgaagccagcaat

SEQ ID NO: 2431798 - DNA, 25 bp, Homo sapien
cctttgaagccagcaataccaggtt

SEQ ID NO: 2431799 - DNA, 25 bp, Homo sapien
cacctttgaagccagcaataccagg

SEQ ID NO: 2431800 - DNA, 25 bp, Homo sapien
tgaagccagcaataccaggttcacc

SEQ ID NO: 2431801 - DNA, 25 bp, Homo sapien
cccagaggaccagttgcaccttgag

SEQ ID NO: 2431802 - DNA, 25 bp, Homo sapien
ctttcgggcccagaggaccagttgc

SEQ ID NO: 2431803 - DNA, 25 bp, Homo sapien
gaggaccagttgcaccttgagggcc

SEQ ID NO: 2431804 - DNA, 25 bp, Homo sapien
cgggcccagaggaccagttgcacct

SEQ ID NO: 2431805 - DNA, 25 bp, Homo sapien
tccaggaattccatctgttccaggg

SEQ ID NO: 2431806 - DNA, 25 bp, Homo sapien
gaattccatctgttccagggttacc

SEQ ID NO: 2431807 - DNA, 25 bp, Homo sapien
caggaattccatctgttccagggtt

SEQ ID NO: 2431808 - DNA, 25 bp, Homo sapien
agcagatcctttggctccaggaatt

SEQ ID NO: 2431809 - DNA, 25 bp, Homo sapien
gcaccagcaggcccaggggacccag

SEQ ID NO: 2431810 - DNA, 25 bp, Homo sapien
caccagcaggcccaggggacccagg

SEQ ID NO: 2431811 - DNA, 25 bp, Homo sapien
aggcaccagcaggcccaggggaccc

SEQ ID NO: 2431812 - DNA, 25 bp, Homo sapien
ggcaccagcaggcccaggggaccca

SEQ ID NO: 2431813 - DNA, 25 bp, Homo sapien
accttgagcaccttcaggaccacgg

SEQ ID NO: 2431814 - DNA, 25 bp, Homo sapien
acgggcaccagtggggccggcttca

SEQ ID NO: 2431815 - DNA, 25 bp, Homo sapien
cttgagcaccttcaggaccacgggc

SEQ ID NO: 2431816 - DNA, 25 bp, Homo sapien
tgagcaccttcaggaccacgggcac

SEQ ID NO: 2431817 - DNA, 25 bp, Homo sapien
gggcagagcctcctcaggtttcttc

SEQ ID NO: 2431818 - DNA, 25 bp, Homo sapien
agagagggcagagcctcctcaggtt

SEQ ID NO: 2431819 - DNA, 25 bp, Homo sapien
gagggcagagcctcctcaggtttct

SEQ ID NO: 2431820 - DNA, 25 bp, Homo sapien
gcagagcctcctcaggtttcttctc

SEQ ID NO: 2431821 - DNA, 25 bp, Homo sapien
gctccaggagcaccagggaagccag

SEQ ID NO: 2431822 - DNA, 25 bp, Homo sapien
cttggctccaggagcaccagggaag

SEQ ID NO: 2431823 - DNA, 25 bp, Homo sapien
caggaccaccagcaggaccgacagg

SEQ ID NO: 2431824 - DNA, 25 bp, Homo sapien
ggaccaccagcaggaccgacaggac

SEQ ID NO: 2431825 - DNA, 25 bp, Homo sapien
agttctggcctccaaagcgagccac

SEQ ID NO: 2431826 - DNA, 25 bp, Homo sapien
gagagtaggcggatgagaagagagg

SEQ ID NO: 2431827 - DNA, 25 bp, Homo sapien
ctggagagagtaggcggatgagaag

SEQ ID NO: 2431828 - DNA, 25 bp, Homo sapien
tgccagttctggcctccaaagcgag

SEQ ID NO: 2431829 - DNA, 25 bp, Homo sapien
ctggctgaccatcgttgcctcgggc

SEQ ID NO: 2431830 - DNA, 25 bp, Homo sapien
gctgaccatcgttgcctcgggcacc

SEQ ID NO: 2431831 - DNA, 25 bp, Homo sapien
tggctgaccatcgttgcctcgggca

SEQ ID NO: 2431832 - DNA, 25 bp, Homo sapien
ggctgaccatcgttgcctcgggcac

SEQ ID NO: 2431833 - DNA, 25 bp, Homo sapien
gcagggccagtccgtcctctttcac

SEQ ID NO: 2431834 - DNA, 25 bp, Homo sapien
cagggccagtccgtcctctttcacc

SEQ ID NO: 2431835 - DNA, 25 bp, Homo sapien
gggccagtccgtcctctttcaccag

SEQ ID NO: 2431836 - DNA, 25 bp, Homo sapien
agggccagtccgtcctctttcacca

SEQ ID NO: 2431837 - DNA, 25 bp, Homo sapien
cctttgttacaagcacaccttgctc

SEQ ID NO: 2431838 - DNA, 25 bp, Homo sapien
tgggaacctttgttacaagcacacc

SEQ ID NO: 2431839 - DNA, 25 bp, Homo sapien
tgttacaagcacaccttgctccttg

SEQ ID NO: 2431840 - DNA, 25 bp, Homo sapien
tattgggaacctttgttacaagcac

SEQ ID NO: 2431841 - DNA, 25 bp, Homo sapien
ttctcacccggggaaccactctcac

SEQ ID NO: 2431842 - DNA, 25 bp, Homo sapien
cattgggcccggagatccgttctca

SEQ ID NO: 2431843 - DNA, 25 bp, Homo sapien
gttctcacccggggaaccactctca

SEQ ID NO: 2431844 - DNA, 25 bp, Homo sapien
tgggcccggagatccgttctcaccc

SEQ ID NO: 2431845 - DNA, 25 bp, Homo sapien
ctggaaaaatgatgcacaaggtcag

SEQ ID NO: 2431846 - DNA, 25 bp, Homo sapien
agcaaactcctagggaagacgccaa

SEQ ID NO: 2431847 - DNA, 25 bp, Homo sapien
aaaatgatgcacaaggtcagtgtct

SEQ ID NO: 2431848 - DNA, 25 bp, Homo sapien
attcttggccgccagcaaactccta

SEQ ID NO: 2431849 - DNA, 25 bp, Homo sapien
agggacaatgccctgagctctccag

SEQ ID NO: 2431850 - DNA, 25 bp, Homo sapien
ctgctgttggcccatcaggatgtag

SEQ ID NO: 2431851 - DNA, 25 bp, Homo sapien
aggctgttctgaggagctagttcca

SEQ ID NO: 2431852 - DNA, 25 bp, Homo sapien
ttctgaggagctagttccactgagc

SEQ ID NO: 2431853 - DNA, 25 bp, Homo sapien
ctccccatcccattgtactttctgg

SEQ ID NO: 2431854 - DNA, 25 bp, Homo sapien
cctccccatcccattgtactttctg

SEQ ID NO: 2431855 - DNA, 25 bp, Homo sapien
tccccatcccattgtactttctggc

SEQ ID NO: 2431856 - DNA, 25 bp, Homo sapien
cacccgcctctcccttagcaccgtc

SEQ ID NO: 2431857 - DNA, 25 bp, Homo sapien
ctctcccttagcaccgtccaggcct

SEQ ID NO: 2431858 - DNA, 25 bp, Homo sapien
cccgcctctcccttagcaccgtcca

SEQ ID NO: 2431859 - DNA, 25 bp, Homo sapien
gcctctcccttagcaccgtccaggc

SEQ ID NO: 2431860 - DNA, 25 bp, Homo sapien
ctttgacaccaggaaggcctggggt

SEQ ID NO: 2431861 - DNA, 25 bp, Homo sapien
acaccaggaaggcctggggttcctg

SEQ ID NO: 2431862 - DNA, 25 bp, Homo sapien
tctgtgacctttgacaccaggaagg

SEQ ID NO: 2431863 - DNA, 25 bp, Homo sapien
tggggttcctgggaaaccacgagca

SEQ ID NO: 2431864 - DNA, 25 bp, Homo sapien
gaccaggcggacccctttcaccagc

SEQ ID NO: 2431865 - DNA, 25 bp, Homo sapien
ctgaggaccaggcggacccctttca

SEQ ID NO: 2431866 - DNA, 25 bp, Homo sapien
atcatcaccaggctttccaggggga

SEQ ID NO: 2431867 - DNA, 25 bp, Homo sapien
catcaccaggctttccagggggacc

SEQ ID NO: 2431868 - DNA, 25 bp, Homo sapien
caggctttccagggggaccaggagg

SEQ ID NO: 2431869 - DNA, 25 bp, Homo sapien
accaggaggaccacggggacccatg

SEQ ID NO: 2431870 - DNA, 25 bp, Homo sapien
ccaggattgccttgaaatccttgag

SEQ ID NO: 2431871 - DNA, 25 bp, Homo sapien
caggattgccttgaaatccttgagg

SEQ ID NO: 2431872 - DNA, 25 bp, Homo sapien
aggattgccttgaaatccttgaggc

SEQ ID NO: 2431873 - DNA, 25 bp, Homo sapien
cctggaggtcctcgaggtcccatgg

SEQ ID NO: 2431874 - DNA, 25 bp, Homo sapien
gcctggaggtcctcgaggtcccatg

SEQ ID NO: 2431875 - DNA, 25 bp, Homo sapien
gggcctggaggtcctcgaggtccca

SEQ ID NO: 2431876 - DNA, 25 bp, Homo sapien
tggaggtcctcgaggtcccatgggg

SEQ ID NO: 2431877 - DNA, 25 bp, Homo sapien
ttgcattactcccaactgggcgcca

SEQ ID NO: 2431878 - DNA, 25 bp, Homo sapien
tccttgcattactcccaactgggcg

SEQ ID NO: 2431879 - DNA, 25 bp, Homo sapien
ccaactgggcgccaccagccttttc

SEQ ID NO: 2431880 - DNA, 25 bp, Homo sapien
cattggtccttgcattactcccaac

SEQ ID NO: 2431881 - DNA, 25 bp, Homo sapien
tccatctctgccacgaggtccaggg

SEQ ID NO: 2431882 - DNA, 25 bp, Homo sapien
cctctgggtccttgttcccctgcag

SEQ ID NO: 2431883 - DNA, 25 bp, Homo sapien
tgaggcccaggaggtcctttgggtc

SEQ ID NO: 2431884 - DNA, 25 bp, Homo sapien
ctgaggcccaggaggtcctttgggt

SEQ ID NO: 2431885 - DNA, 25 bp, Homo sapien
ttgatgtctccaggttctcctttct

SEQ ID NO: 2431886 - DNA, 25 bp, Homo sapien
atccttgatgtctccaggttctcct

SEQ ID NO: 2431887 - DNA, 25 bp, Homo sapien
gatgtctccaggttctcctttctgt

SEQ ID NO: 2431888 - DNA, 25 bp, Homo sapien
tgtctccaggttctcctttctgtcc

SEQ ID NO: 2431889 - DNA, 25 bp, Homo sapien
gcagagacgaccagcatctatggga

SEQ ID NO: 2431890 - DNA, 25 bp, Homo sapien
gaaggacccctctagtgtctcaggc

SEQ ID NO: 2431891 - DNA, 25 bp, Homo sapien
taccaggtcccatggataactagcc

SEQ ID NO: 2431892 - DNA, 25 bp, Homo sapien
cagtttcaacctgcaagtgagaagt

SEQ ID NO: 2431893 - DNA, 25 bp, Homo sapien
cgtcttcacagattatgtcgtcgca

SEQ ID NO: 2431894 - DNA, 25 bp, Homo sapien
gctgaggcagtctttcacgtcttca

SEQ ID NO: 2431895 - DNA, 25 bp, Homo sapien
gcttccacacatccttatcattata

SEQ ID NO: 2431896 - DNA, 25 bp, Homo sapien
gaggacagtcccagtgtcacagaca

SEQ ID NO: 2431897 - DNA, 25 bp, Homo sapien
gggagaagcagagagccaagggaag

SEQ ID NO: 2431898 - DNA, 25 bp, Homo sapien
gaagcagagagccaagggaaggagg

SEQ ID NO: 2431899 - DNA, 25 bp, Homo sapien
aagcagagagccaagggaaggaggg

SEQ ID NO: 2431900 - DNA, 25 bp, Homo sapien
gagaagcagagagccaagggaagga

SEQ ID NO: 2431901 - DNA, 25 bp, Homo sapien
tctataagcagtgaggctccaaaaa

SEQ ID NO: 2431902 - DNA, 25 bp, Homo sapien
aatcttgacccagcaatgaaggtgg

SEQ ID NO: 2431903 - DNA, 25 bp, Homo sapien
tgacaactaacattcagagggaatg

SEQ ID NO: 2431904 - DNA, 25 bp, Homo sapien
aaggagacagaaaaatggcgagacc

SEQ ID NO: 2431905 - DNA, 25 bp, Homo sapien
cttaggaggccagtggagccaaagc

SEQ ID NO: 2431906 - DNA, 25 bp, Homo sapien
ggctaataaactgcttaggaggcca

SEQ ID NO: 2431907 - DNA, 25 bp, Homo sapien
gggcaggctaataaactgcttagga

SEQ ID NO: 2431908 - DNA, 25 bp, Homo sapien
ctaataaactgcttaggaggccagt

SEQ ID NO: 2431909 - DNA, 25 bp, Homo sapien
caagcgaccctaataccggatggag

SEQ ID NO: 2431910 - DNA, 25 bp, Homo sapien
gatgcggcgatgagagagctctacc

SEQ ID NO: 2431911 - DNA, 25 bp, Homo sapien
tgagtccaggccacgtatagtcacg

SEQ ID NO: 2431912 - DNA, 25 bp, Homo sapien
gaagaaatccgcctagcctttgggc

SEQ ID NO: 2431913 - DNA, 25 bp, Homo sapien
cgtagcaatcgaccagcctgctccc

SEQ ID NO: 2431914 - DNA, 25 bp, Homo sapien
aaccgtagcaatcgaccagcctgct

SEQ ID NO: 2431915 - DNA, 25 bp, Homo sapien
accgtagcaatcgaccagcctgctc

SEQ ID NO: 2431916 - DNA, 25 bp, Homo sapien
tagcaatcgaccagcctgctcccct

SEQ ID NO: 2431917 - DNA, 25 bp, Homo sapien
ggcatttgaaaagcacggtctggtt

SEQ ID NO: 2431918 - DNA, 25 bp, Homo sapien
tctcagagggcctatcggaagccgt

SEQ ID NO: 2431919 - DNA, 25 bp, Homo sapien
gagatgagcgctagggctgcacctt

SEQ ID NO: 2431920 - DNA, 25 bp, Homo sapien
ggctgtgaagtcaaccctttggcgt

SEQ ID NO: 2431921 - DNA, 25 bp, Homo sapien
tcaaagctggtggaaaagagcccat

SEQ ID NO: 2431922 - DNA, 25 bp, Homo sapien
atcaaagctggtggaaaagagccca

SEQ ID NO: 2431923 - DNA, 25 bp, Homo sapien
aagctggtggaaaagagcccattta

SEQ ID NO: 2431924 - DNA, 25 bp, Homo sapien
caaagctggtggaaaagagcccatt

SEQ ID NO: 2431925 - DNA, 25 bp, Homo sapien
gaccctgggacagagtccttgattg

SEQ ID NO: 2431926 - DNA, 25 bp, Homo sapien
gaacttctgcgtgtcctgtgcctaa

SEQ ID NO: 2431927 - DNA, 25 bp, Homo sapien
tattctagcgcaacgtagggacctg

SEQ ID NO: 2431928 - DNA, 25 bp, Homo sapien
aatacttgcaactgcgatgggcacc

SEQ ID NO: 2431929 - DNA, 25 bp, Homo sapien
tctggggagccccgaggcgaatcat

SEQ ID NO: 2431930 - DNA, 25 bp, Homo sapien
caccgaaggacagcggcgacgagca

SEQ ID NO: 2431931 - DNA, 25 bp, Homo sapien
tgacaccgaaggacagcggcgacga

SEQ ID NO: 2431932 - DNA, 25 bp, Homo sapien
ctggccctgacaccgaaggacagcg

SEQ ID NO: 2431933 - DNA, 25 bp, Homo sapien
tctaccgcgccctcatgcaggaggc

SEQ ID NO: 2431934 - DNA, 25 bp, Homo sapien
gtccgggtctctaccgcgccctcat

SEQ ID NO: 2431935 - DNA, 25 bp, Homo sapien
cagcgaaacggcaggagcacggcgc

SEQ ID NO: 2431936 - DNA, 25 bp, Homo sapien
cgggcggagcgcagcgaaacggcag

SEQ ID NO: 2431937 - DNA, 25 bp, Homo sapien
actgggctaccagcgaggtcctcat

SEQ ID NO: 2431938 - DNA, 25 bp, Homo sapien
ctccaatcgtgagtttcgtctggca

SEQ ID NO: 2431939 - DNA, 25 bp, Homo sapien
cgtgagtttcgtctggcagcttaac

SEQ ID NO: 2431940 - DNA, 25 bp, Homo sapien
cgtctggcagcttaactgggctacc

SEQ ID NO: 2431941 - DNA, 25 bp, Homo sapien
taagcagtccccttctgatggacat

SEQ ID NO: 2431942 - DNA, 25 bp, Homo sapien
tagccactccttgtatagtaatcag

SEQ ID NO: 2431943 - DNA, 25 bp, Homo sapien
tggacattcgggttatctctagcct

SEQ ID NO: 2431944 - DNA, 25 bp, Homo sapien
accgtcatggtttgcagaggacaaa

SEQ ID NO: 2431945 - DNA, 25 bp, Homo sapien
agcttaactacaggtccctgggtct

SEQ ID NO: 2431946 - DNA, 25 bp, Homo sapien
tgcagcttaactacaggtccctggg

SEQ ID NO: 2431947 - DNA, 25 bp, Homo sapien
gcagcttaactacaggtccctgggt

SEQ ID NO: 2431948 - DNA, 25 bp, Homo sapien
ccatgcagcttaactacaggtccct

SEQ ID NO: 2431949 - DNA, 25 bp, Homo sapien
tttccgaagggagaggcactagctg

SEQ ID NO: 2431950 - DNA, 25 bp, Homo sapien
catagtcgttgctggttctggcagg

SEQ ID NO: 2431951 - DNA, 25 bp, Homo sapien
gcactagctgaagttggctctgaga

SEQ ID NO: 2431952 - DNA, 25 bp, Homo sapien
gcagacccacgtgctgtactcatag

SEQ ID NO: 2431953 - DNA, 25 bp, Homo sapien
tggaagtcgttctcattaaacagcg

SEQ ID NO: 2431954 - DNA, 25 bp, Homo sapien
cacacagatctgtgcccaaagggct

SEQ ID NO: 2431955 - DNA, 25 bp, Homo sapien
aatgcagtgccggactcagtcaaca

SEQ ID NO: 2431956 - DNA, 25 bp, Homo sapien
tagaggttaccagcgctcagagcat

SEQ ID NO: 2431957 - DNA, 25 bp, Homo sapien
agtggggcagatagtacagcatcat

SEQ ID NO: 2431958 - DNA, 25 bp, Homo sapien
cttattggctggggtgtaggatggt

SEQ ID NO: 2431959 - DNA, 25 bp, Homo sapien
ctggggtgtaggatggtacatggaa

SEQ ID NO: 2431960 - DNA, 25 bp, Homo sapien
tggctggggtgtaggatggtacatg

SEQ ID NO: 2431961 - DNA, 25 bp, Homo sapien
tattggctggggtgtaggatggtac

SEQ ID NO: 2431962 - DNA, 25 bp, Homo sapien
ggaatggctgacgagagataggcat

SEQ ID NO: 2431963 - DNA, 25 bp, Homo sapien
aatgaacagtattcagactcctggg

SEQ ID NO: 2431964 - DNA, 25 bp, Homo sapien
gattggtgtgtttggcctcaggaaa

SEQ ID NO: 2431965 - DNA, 25 bp, Homo sapien
gcagcctccacagacaggtttggtt

SEQ ID NO: 2431966 - DNA, 25 bp, Homo sapien
ggactcagaaatccagaccacaccg

SEQ ID NO: 2431967 - DNA, 25 bp, Homo sapien
ggccagtgcttaaacacgtgcttgt

SEQ ID NO: 2431968 - DNA, 25 bp, Homo sapien
gagtctcagtctatgagggatgcac

SEQ ID NO: 2431969 - DNA, 25 bp, Homo sapien
cttcagggcgactaaggccagtgct

SEQ ID NO: 2431970 - DNA, 25 bp, Homo sapien
cagactctaagatcctgaggacaag

SEQ ID NO: 2431971 - DNA, 25 bp, Homo sapien
gatattaataacatgcctttgggcc

SEQ ID NO: 2431972 - DNA, 25 bp, Homo sapien
aagagaatgtgaaggtccccagcaa

SEQ ID NO: 2431973 - DNA, 25 bp, Homo sapien
tgctcttgttggctagctcaggaaa

SEQ ID NO: 2431974 - DNA, 25 bp, Homo sapien
gaaagtttccagatactactcctgc

SEQ ID NO: 2431975 - DNA, 25 bp, Homo sapien
ttgtgaatgcatctcgccagggcct

SEQ ID NO: 2431976 - DNA, 25 bp, Homo sapien
gctcatgtgctgtgcctccggatag

SEQ ID NO: 2431977 - DNA, 25 bp, Homo sapien
gctttgttgcgccactgaaaccgct

SEQ ID NO: 2431978 - DNA, 25 bp, Homo sapien
tgttggtagcacatgcaaacccctg

SEQ ID NO: 2431979 - DNA, 25 bp, Homo sapien
cagaccatccgcttccggaagtatg

SEQ ID NO: 2431980 - DNA, 25 bp, Homo sapien
ggtggaggatctcccagaccatccg

SEQ ID NO: 2431981 - DNA, 25 bp, Homo sapien
tcacaagagttttcggtggaggatc

SEQ ID NO: 2431982 - DNA, 25 bp, Homo sapien
gcttccggaagtatggcatgtgttg

SEQ ID NO: 2431983 - DNA, 25 bp, Homo sapien
aggcaaacatcccacagtcacttcc

SEQ ID NO: 2431984 - DNA, 25 bp, Homo sapien
gcaggcaaacatcccacagtcactt

SEQ ID NO: 2431985 - DNA, 25 bp, Homo sapien
catatttgcaggcaaacatcccaca

SEQ ID NO: 2431986 - DNA, 25 bp, Homo sapien
aatacagtcagcatatttgcaggca

SEQ ID NO: 2431987 - DNA, 25 bp, Homo sapien
cattggtgtcaaactctttcctttt

SEQ ID NO: 2431988 - DNA, 25 bp, Homo sapien
tgtcaatgctttcttgctttaggta

SEQ ID NO: 2431989 - DNA, 25 bp, Homo sapien
ttgctgaaaagctgccagccattgg

SEQ ID NO: 2431990 - DNA, 25 bp, Homo sapien
aaagctgccagccattggtgtcaaa

SEQ ID NO: 2431991 - DNA, 25 bp, Homo sapien
tgagccactaactaataggacctgg

SEQ ID NO: 2431992 - DNA, 25 bp, Homo sapien
taggacctgggcaaatcaaaggcac

SEQ ID NO: 2431993 - DNA, 25 bp, Homo sapien
gatagtaattgctcccattagggca

SEQ ID NO: 2431994 - DNA, 25 bp, Homo sapien
gatttgcattctggtccacctgagc

SEQ ID NO: 2431995 - DNA, 25 bp, Homo sapien
ggagtcgtaataggtaatattcttc

SEQ ID NO: 2431996 - DNA, 25 bp, Homo sapien
tctgcaggcttcattgtttatccca

SEQ ID NO: 2431997 - DNA, 25 bp, Homo sapien
cattgtttatcccacccatggagtc

SEQ ID NO: 2431998 - DNA, 25 bp, Homo sapien
ccacccatggagtcgtaataggtaa

SEQ ID NO: 2431999 - DNA, 25 bp, Homo sapien
gaaccttttgccagacttcctacaa

SEQ ID NO: 2432000 - DNA, 25 bp, Homo sapien
gatgaagaaaatcggtttatcagtt

SEQ ID NO: 2432001 - DNA, 25 bp, Homo sapien
caagtttgactgatattttgcatta

SEQ ID NO: 2432002 - DNA, 25 bp, Homo sapien
cttcctacaaaatcatgacaagttt

SEQ ID NO: 2432003 - DNA, 25 bp, Homo sapien
agacaccagtgtactcccaggtgaa

SEQ ID NO: 2432004 - DNA, 25 bp, Homo sapien
caggtgaatgggcaccaaaagaatg

SEQ ID NO: 2432005 - DNA, 25 bp, Homo sapien
agctagacaccagtgtactcccagg

SEQ ID NO: 2432006 - DNA, 25 bp, Homo sapien
gtgaatgggcaccaaaagaatgtca

SEQ ID NO: 2432007 - DNA, 25 bp, Homo sapien
tacttcgctccatcagcatattcat

SEQ ID NO: 2432008 - DNA, 25 bp, Homo sapien
gcatgcacacttggcaagcccttct

SEQ ID NO: 2432009 - DNA, 25 bp, Homo sapien
tgcctgataaccagccgtttttaat

SEQ ID NO: 2432010 - DNA, 25 bp, Homo sapien
tgtccaacgtttcactgcctgataa

SEQ ID NO: 2432011 - DNA, 25 bp, Homo sapien
ccagctgaggtcaggccagtgtctg

SEQ ID NO: 2432012 - DNA, 25 bp, Homo sapien
ctgaggtcaggccagtgtctgtcaa

SEQ ID NO: 2432013 - DNA, 25 bp, Homo sapien
tttatgtggccagctgaggtcaggc

SEQ ID NO: 2432014 - DNA, 25 bp, Homo sapien
ttatgtggccagctgaggtcaggcc

SEQ ID NO: 2432015 - DNA, 25 bp, Homo sapien
gatgaactggatgacacaactgctg

SEQ ID NO: 2432016 - DNA, 25 bp, Homo sapien
ttcttttagccgtggcagtccagtt

SEQ ID NO: 2432017 - DNA, 25 bp, Homo sapien
cagtcgccgtggtattttcttttag

SEQ ID NO: 2432018 - DNA, 25 bp, Homo sapien
caatgtttaggtgcttcattcaacc

SEQ ID NO: 2432019 - DNA, 25 bp, Homo sapien
tcatatcacgacactttccaaacgg

SEQ ID NO: 2432020 - DNA, 25 bp, Homo sapien
ggtatgccttagagccacagaggca

SEQ ID NO: 2432021 - DNA, 25 bp, Homo sapien
ggcagcacaacttgtgtatcatatc

SEQ ID NO: 2432022 - DNA, 25 bp, Homo sapien
tttccaaacggcgatgttcccttca

SEQ ID NO: 2432023 - DNA, 25 bp, Homo sapien
gtgcctagccttaaatatgttaaaa

SEQ ID NO: 2432024 - DNA, 25 bp, Homo sapien
tgagataaagtctcgctccattgcc

SEQ ID NO: 2432025 - DNA, 25 bp, Homo sapien
cactgtgcctagccttaaatatgtt

SEQ ID NO: 2432026 - DNA, 25 bp, Homo sapien
ctgtgcctagccttaaatatgttaa

SEQ ID NO: 2432027 - DNA, 25 bp, Homo sapien
cttccgcctgaagaacacgtaatat

SEQ ID NO: 2432028 - DNA, 25 bp, Homo sapien
tctggcctgcatcgtttccgacagt

SEQ ID NO: 2432029 - DNA, 25 bp, Homo sapien
gatgtagctacattgtcttctggcc

SEQ ID NO: 2432030 - DNA, 25 bp, Homo sapien
tgccttagtcacctgtcttctagag

SEQ ID NO: 2432031 - DNA, 25 bp, Homo sapien
tatgctgggccttgttgttgatgga

SEQ ID NO: 2432032 - DNA, 25 bp, Homo sapien
tactttcccgcctcatgtatgtctg

SEQ ID NO: 2432033 - DNA, 25 bp, Homo sapien
gtatgtctggtcatttctagttgga

SEQ ID NO: 2432034 - DNA, 25 bp, Homo sapien
ctagaagttcaaggtcggtcttgtt

SEQ ID NO: 2432035 - DNA, 25 bp, Homo sapien
caacatggtcggctaatacttattt

SEQ ID NO: 2432036 - DNA, 25 bp, Homo sapien
acatggtcggctaatacttatttgt

SEQ ID NO: 2432037 - DNA, 25 bp, Homo sapien
tgctgcaacatggtcggctaatact

SEQ ID NO: 2432038 - DNA, 25 bp, Homo sapien
ctgcaacatggtcggctaatactta

SEQ ID NO: 2432039 - DNA, 25 bp, Homo sapien
aaaggtaaattcagtggttctcaga

SEQ ID NO: 2432040 - DNA, 25 bp, Homo sapien
gaataccaatgagtgaatgtcttct

SEQ ID NO: 2432041 - DNA, 25 bp, Homo sapien
gaaaaggtaaattcagtggttctca

SEQ ID NO: 2432042 - DNA, 25 bp, Homo sapien
caccacactccctcatagttacaag

SEQ ID NO: 2432043 - DNA, 25 bp, Homo sapien
taatttaactgccacttaatgttta

SEQ ID NO: 2432044 - DNA, 25 bp, Homo sapien
ataatgccttaatttaactgccact

SEQ ID NO: 2432045 - DNA, 25 bp, Homo sapien
gagaaaaagtgagataatgccttaa

SEQ ID NO: 2432046 - DNA, 25 bp, Homo sapien
gccttaatttaactgccacttaatg

SEQ ID NO: 2432047 - DNA, 25 bp, Homo sapien
tatgtaaaaatagatgcaacattac

SEQ ID NO: 2432048 - DNA, 25 bp, Homo sapien
tatttgtatgtaaaaatagatgcaa

SEQ ID NO: 2432049 - DNA, 25 bp, Homo sapien
ttgtatgtaaaaatagatgcaacat

SEQ ID NO: 2432050 - DNA, 25 bp, Homo sapien
tttgtatgtaaaaatagatgcaaca

SEQ ID NO: 2432051 - DNA, 25 bp, Homo sapien
gaacttcatcctgattcccattacg

SEQ ID NO: 2432052 - DNA, 25 bp, Homo sapien
gaatatctttgcgtgtaatggtcag

SEQ ID NO: 2432053 - DNA, 25 bp, Homo sapien
gagccaattcagatggtttagagtt

SEQ ID NO: 2432054 - DNA, 25 bp, Homo sapien
tggtcaggcgaaatgcttcactgag

SEQ ID NO: 2432055 - DNA, 25 bp, Homo sapien
atcatgtactgaatgttcccgctcc

SEQ ID NO: 2432056 - DNA, 25 bp, Homo sapien
ggtacacgaagatgtagttctactg

SEQ ID NO: 2432057 - DNA, 25 bp, Homo sapien
tcttggacaacagtaacaggaatct

SEQ ID NO: 2432058 - DNA, 25 bp, Homo sapien
gaatctccttttcaagaggtacacg

SEQ ID NO: 2432059 - DNA, 25 bp, Homo sapien
tgctcgagaatcataaacactagtt

SEQ ID NO: 2432060 - DNA, 25 bp, Homo sapien
ggcgcaatctttctcgtgctcgaga

SEQ ID NO: 2432061 - DNA, 25 bp, Homo sapien
ttttgaagctgtaaggccaatgcct

SEQ ID NO: 2432062 - DNA, 25 bp, Homo sapien
ctgttcttcaatctggcgcaatctt

SEQ ID NO: 2432063 - DNA, 25 bp, Homo sapien
gggagttggagtctgggaatctttc

SEQ ID NO: 2432064 - DNA, 25 bp, Homo sapien
gttggagtctgggaatctttcactt

SEQ ID NO: 2432065 - DNA, 25 bp, Homo sapien
ttggagtctgggaatctttcacttt

SEQ ID NO: 2432066 - DNA, 25 bp, Homo sapien
tgggagttggagtctgggaatcttt

SEQ ID NO: 2432067 - DNA, 25 bp, Homo sapien
tacactgtgggacagctgttcctgg

SEQ ID NO: 2432068 - DNA, 25 bp, Homo sapien
tgatctgagatgcacaagagtttcc

SEQ ID NO: 2432069 - DNA, 25 bp, Homo sapien
cctggttagttaaaatgctggcaga

SEQ ID NO: 2432070 - DNA, 25 bp, Homo sapien
tgaagctgctaagttatctggctga

SEQ ID NO: 2432071 - DNA, 25 bp, Homo sapien
tggtgggtttggctatagtaaactg

SEQ ID NO: 2432072 - DNA, 25 bp, Homo sapien
gtagcagctgtctgtaaatctctct

SEQ ID NO: 2432073 - DNA, 25 bp, Homo sapien
tgtggtgggtttggctatagtaaac

SEQ ID NO: 2432074 - DNA, 25 bp, Homo sapien
catacacatacactgtattcattta

SEQ ID NO: 2432075 - DNA, 25 bp, Homo sapien
ttttggtggagtctgtaggatttta

SEQ ID NO: 2432076 - DNA, 25 bp, Homo sapien
aatactactaatttctgtgtgttga

SEQ ID NO: 2432077 - DNA, 25 bp, Homo sapien
tgaacagttctttggtggagtctgt

SEQ ID NO: 2432078 - DNA, 25 bp, Homo sapien
caataattttctgagtcccaaatgc

SEQ ID NO: 2432079 - DNA, 25 bp, Homo sapien
ccaaatgcttgacttatgacaacac

SEQ ID NO: 2432080 - DNA, 25 bp, Homo sapien
gcaaagaagcgtgtctagaagcaac

SEQ ID NO: 2432081 - DNA, 25 bp, Homo sapien
tcactgtcacctattacaaaagtcc

SEQ ID NO: 2432082 - DNA, 25 bp, Homo sapien
caaacctctgttgtaagactgagca

SEQ ID NO: 2432083 - DNA, 25 bp, Homo sapien
tttaaacagtgcttgtggctagccg

SEQ ID NO: 2432084 - DNA, 25 bp, Homo sapien
gccgttaccctactgaatagcacag

SEQ ID NO: 2432085 - DNA, 25 bp, Homo sapien
gagcatcagccattctgcacagcca

SEQ ID NO: 2432086 - DNA, 25 bp, Homo sapien
ggctcaaaagacttcgacgacatga

SEQ ID NO: 2432087 - DNA, 25 bp, Homo sapien
catatgcagatacatggcagtgatg

SEQ ID NO: 2432088 - DNA, 25 bp, Homo sapien
gctgtactaacatgtcgcctctgag

SEQ ID NO: 2432089 - DNA, 25 bp, Homo sapien
gcagtgatggtttgactttcccgca

SEQ ID NO: 2432090 - DNA, 25 bp, Homo sapien
ggaacatgatcccagggagtattga

SEQ ID NO: 2432091 - DNA, 25 bp, Homo sapien
cagggagtattgacacattcctgga

SEQ ID NO: 2432092 - DNA, 25 bp, Homo sapien
cattcctggagtccatgtgcataaa

SEQ ID NO: 2432093 - DNA, 25 bp, Homo sapien
gatcccagggagtattgacacattc

SEQ ID NO: 2432094 - DNA, 25 bp, Homo sapien
aagctcaaacttgactaaacagtac

SEQ ID NO: 2432095 - DNA, 25 bp, Homo sapien
agctcaaacttgactaaacagtaca

SEQ ID NO: 2432096 - DNA, 25 bp, Homo sapien
atataccagggcagaatttaagtag

SEQ ID NO: 2432097 - DNA, 25 bp, Homo sapien
taccagggcagaatttaagtagtca

SEQ ID NO: 2432098 - DNA, 25 bp, Homo sapien
ataccagggcagaatttaagtagtc

SEQ ID NO: 2432099 - DNA, 25 bp, Homo sapien
tataccagggcagaatttaagtagt

SEQ ID NO: 2432100 - DNA, 25 bp, Homo sapien
taactagcataaagttctctgtgac

SEQ ID NO: 2432101 - DNA, 25 bp, Homo sapien
gcttggtctacttgactaatgccat

SEQ ID NO: 2432102 - DNA, 25 bp, Homo sapien
gctttagtttaagtcaggtctctgc

SEQ ID NO: 2432103 - DNA, 25 bp, Homo sapien
tctgagggaaaagtttctaagccag

SEQ ID NO: 2432104 - DNA, 25 bp, Homo sapien
tctctcttctagtaagatctggcta

SEQ ID NO: 2432105 - DNA, 25 bp, Homo sapien
taccttttagtcactttctcttatg

SEQ ID NO: 2432106 - DNA, 25 bp, Homo sapien
aatcccaatgtaataactatctacc

SEQ ID NO: 2432107 - DNA, 25 bp, Homo sapien
ctagtaagatctggctatcatcaaa

SEQ ID NO: 2432108 - DNA, 25 bp, Homo sapien
gagcttgacgatggggtagaatttc

SEQ ID NO: 2432109 - DNA, 25 bp, Homo sapien
taaagacttcggctgtttcttgatt

SEQ ID NO: 2432110 - DNA, 25 bp, Homo sapien
tgacgatggggtagaatttctccat

SEQ ID NO: 2432111 - DNA, 25 bp, Homo sapien
aggtaaagacttcggctgtttcttg

SEQ ID NO: 2432112 - DNA, 25 bp, Homo sapien
ggccatttgcactctggccaaaggt

SEQ ID NO: 2432113 - DNA, 25 bp, Homo sapien
ccatttgcactctggccaaaggttc

SEQ ID NO: 2432114 - DNA, 25 bp, Homo sapien
gccatttgcactctggccaaaggtt

SEQ ID NO: 2432115 - DNA, 25 bp, Homo sapien
tggccatttgcactctggccaaagg

SEQ ID NO: 2432116 - DNA, 25 bp, Homo sapien
ttaaatcgcctgagccaagaaaact

SEQ ID NO: 2432117 - DNA, 25 bp, Homo sapien
caaactataattgattcagccatac

SEQ ID NO: 2432118 - DNA, 25 bp, Homo sapien
agtaaagtctgcagtaggggaactt

SEQ ID NO: 2432119 - DNA, 25 bp, Homo sapien
tctacaaactataattgattcagcc

SEQ ID NO: 2432120 - DNA, 25 bp, Homo sapien
gcagtaggggaacttctacaaacta

SEQ ID NO: 2432121 - DNA, 25 bp, Homo sapien
ttaccccaactatatcttgcaagca

SEQ ID NO: 2432122 - DNA, 25 bp, Homo sapien
ggagctgaatcctgccacagccatg

SEQ ID NO: 2432123 - DNA, 25 bp, Homo sapien
tatctgcatcaatgtgactccgtgg

SEQ ID NO: 2432124 - DNA, 25 bp, Homo sapien
tggtgtccaccaaaagtcaacattt

SEQ ID NO: 2432125 - DNA, 25 bp, Homo sapien
cagcctcaggtcaggttttgaagcc

SEQ ID NO: 2432126 - DNA, 25 bp, Homo sapien
cctcaggtcaggttttgaagccaaa

SEQ ID NO: 2432127 - DNA, 25 bp, Homo sapien
gcctcaggtcaggttttgaagccaa

SEQ ID NO: 2432128 - DNA, 25 bp, Homo sapien
ctcaggtcaggttttgaagccaaat

SEQ ID NO: 2432129 - DNA, 25 bp, Homo sapien
aagattacatgtgtcaaatcatgca

SEQ ID NO: 2432130 - DNA, 25 bp, Homo sapien
caaatcatgcaatgtgtatgaggta

SEQ ID NO: 2432131 - DNA, 25 bp, Homo sapien
cagataatcggaagagatcacagag

SEQ ID NO: 2432132 - DNA, 25 bp, Homo sapien
gagacttgagttaaataagagttga

SEQ ID NO: 2432133 - DNA, 25 bp, Homo sapien
taaacgatatgctatcaagaaatcc

SEQ ID NO: 2432134 - DNA, 25 bp, Homo sapien
agtatcatagcaaccacatacacag

SEQ ID NO: 2432135 - DNA, 25 bp, Homo sapien
gatgataaacataaacgatatgcta

SEQ ID NO: 2432136 - DNA, 25 bp, Homo sapien
gatgagacaaaatcagtaaagtatc

SEQ ID NO: 2432137 - DNA, 25 bp, Homo sapien
gattataagctgcacttcttgtgga

SEQ ID NO: 2432138 - DNA, 25 bp, Homo sapien
tgtggaacatgtaaaagatcggtcc

SEQ ID NO: 2432139 - DNA, 25 bp, Homo sapien
aaagatcggtccaaatgtccttgcc

SEQ ID NO: 2432140 - DNA, 25 bp, Homo sapien
tccaaatgtccttgcctggaagata

SEQ ID NO: 2432141 - DNA, 25 bp, Homo sapien
attaaacaagactataagccaggtg

SEQ ID NO: 2432142 - DNA, 25 bp, Homo sapien
tataattaaacaagactataagcca

SEQ ID NO: 2432143 - DNA, 25 bp, Homo sapien
taattaaacaagactataagccagg

SEQ ID NO: 2432144 - DNA, 25 bp, Homo sapien
ttaaacaagactataagccaggtgc

SEQ ID NO: 2432145 - DNA, 25 bp, Homo sapien
gttgtggttcactaaagtcacttct

SEQ ID NO: 2432146 - DNA, 25 bp, Homo sapien
cagaaagcgaaagctggtcctctgg

SEQ ID NO: 2432147 - DNA, 25 bp, Homo sapien
ttttgaatacggagttgtggttcac

SEQ ID NO: 2432148 - DNA, 25 bp, Homo sapien
ctgctggtcagaaagcgaaagctgg

SEQ ID NO: 2432149 - DNA, 25 bp, Homo sapien
ttcacatcactgactttagcaaaga

SEQ ID NO: 2432150 - DNA, 25 bp, Homo sapien
tttcacatcactgactttagcaaag

SEQ ID NO: 2432151 - DNA, 25 bp, Homo sapien
tcacatcactgactttagcaaagat

SEQ ID NO: 2432152 - DNA, 25 bp, Homo sapien
ttagtagtggaacacaagataatgg

SEQ ID NO: 2432153 - DNA, 25 bp, Homo sapien
tagtagtggaacacaagataatggg

SEQ ID NO: 2432154 - DNA, 25 bp, Homo sapien
agtggaacacaagataatgggaaac

SEQ ID NO: 2432155 - DNA, 25 bp, Homo sapien
ggcgatgagccaggtaagcaaattg

SEQ ID NO: 2432156 - DNA, 25 bp, Homo sapien
gaggcgatgagccaggtaagcaaat

SEQ ID NO: 2432157 - DNA, 25 bp, Homo sapien
caggaggcgatgagccaggtaagca

SEQ ID NO: 2432158 - DNA, 25 bp, Homo sapien
gcgatgagccaggtaagcaaattgt

SEQ ID NO: 2432159 - DNA, 25 bp, Homo sapien
tatcactcgggtctcaaggaaggcg

SEQ ID NO: 2432160 - DNA, 25 bp, Homo sapien
tagcgatatcacatctcagggagat

SEQ ID NO: 2432161 - DNA, 25 bp, Homo sapien
tgtaacggcagggagacggtctctc

SEQ ID NO: 2432162 - DNA, 25 bp, Homo sapien
gagatgaagccggtaccacagaaag

SEQ ID NO: 2432163 - DNA, 25 bp, Homo sapien
ccggctgaccgggtccgacacagtc

SEQ ID NO: 2432164 - DNA, 25 bp, Homo sapien
ctgaccgggtccgacacagtctcct

SEQ ID NO: 2432165 - DNA, 25 bp, Homo sapien
ggctgaccgggtccgacacagtctc

SEQ ID NO: 2432166 - DNA, 25 bp, Homo sapien
gaccgggtccgacacagtctcctgg

SEQ ID NO: 2432167 - DNA, 25 bp, Homo sapien
accggaaccggctgccatgcgaagg

SEQ ID NO: 2432168 - DNA, 25 bp, Homo sapien
cgaaccggaaccggctgccatgcga

SEQ ID NO: 2432169 - DNA, 25 bp, Homo sapien
ctgccatgcgaaggggtttccggcc

SEQ ID NO: 2432170 - DNA, 25 bp, Homo sapien
accggctgccatgcgaaggggtttc

SEQ ID NO: 2432171 - DNA, 25 bp, Homo sapien
cagcaccggaagagtcgctaggtgg

SEQ ID NO: 2432172 - DNA, 25 bp, Homo sapien
ttcacagcaccggaagagtcgctag

SEQ ID NO: 2432173 - DNA, 25 bp, Homo sapien
cacagcaccggaagagtcgctaggt

SEQ ID NO: 2432174 - DNA, 25 bp, Homo sapien
cttcacagcaccggaagagtcgcta

SEQ ID NO: 2432175 - DNA, 25 bp, Homo sapien
cattgattaacctggaatctgccat

SEQ ID NO: 2432176 - DNA, 25 bp, Homo sapien
gaagcagctgctgttttttccaaca

SEQ ID NO: 2432177 - DNA, 25 bp, Homo sapien
ctggcagggaagcagctgctgtttt

SEQ ID NO: 2432178 - DNA, 25 bp, Homo sapien
gggaagcagctgctgttttttccaa

SEQ ID NO: 2432179 - DNA, 25 bp, Homo sapien
gcagggaagcagctgctgttttttc

SEQ ID NO: 2432180 - DNA, 25 bp, Homo sapien
gaatagctgtaccattccatcagca

SEQ ID NO: 2432181 - DNA, 25 bp, Homo sapien
ctgttttttgcagagcagtactcca

SEQ ID NO: 2432182 - DNA, 25 bp, Homo sapien
taatatgcaaccctttaggattggc

SEQ ID NO: 2432183 - DNA, 25 bp, Homo sapien
ccatggagtggacgtattacagctt

SEQ ID NO: 2432184 - DNA, 25 bp, Homo sapien
acaggaattaggcacagttcaggcc

SEQ ID NO: 2432185 - DNA, 25 bp, Homo sapien
gctttggctcaaacccatagaatgg

SEQ ID NO: 2432186 - DNA, 25 bp, Homo sapien
actgcagctgtctgtagtgctccct

SEQ ID NO: 2432187 - DNA, 25 bp, Homo sapien
tggtgttaaggtacctcatccatgg

SEQ ID NO: 2432188 - DNA, 25 bp, Homo sapien
caaggctgggcacctctagtgctac

SEQ ID NO: 2432189 - DNA, 25 bp, Homo sapien
gaatttaacatgacttctgccccag

SEQ ID NO: 2432190 - DNA, 25 bp, Homo sapien
gccccagctttatctgtcacacaag

SEQ ID NO: 2432191 - DNA, 25 bp, Homo sapien
tgatcatggtcagctcacaccctaa

SEQ ID NO: 2432192 - DNA, 25 bp, Homo sapien
catggcacagtagggatgtcatcca

SEQ ID NO: 2432193 - DNA, 25 bp, Homo sapien
agagctactgtagcccttgggcaca

SEQ ID NO: 2432194 - DNA, 25 bp, Homo sapien
gatggaccatcacaaaaggagctct

SEQ ID NO: 2432195 - DNA, 25 bp, Homo sapien
caccgtaggtgtaggaactgcctgg

SEQ ID NO: 2432196 - DNA, 25 bp, Homo sapien
ggctgttcggttatacccatccagg

SEQ ID NO: 2432197 - DNA, 25 bp, Homo sapien
tttcacatagctgcgggtctctggc

SEQ ID NO: 2432198 - DNA, 25 bp, Homo sapien
tccttcaaagaagctggcagtggaa

SEQ ID NO: 2432199 - DNA, 25 bp, Homo sapien
gggtttgcaccatactccaatagga

SEQ ID NO: 2432200 - DNA, 25 bp, Homo sapien
gcaaagaagcttgcatggttaccca

SEQ ID NO: 2432201 - DNA, 25 bp, Homo sapien
gcagcaaagaagcttgcatggttac

SEQ ID NO: 2432202 - DNA, 25 bp, Homo sapien
gacagactactgagaggaagacagg

SEQ ID NO: 2432203 - DNA, 25 bp, Homo sapien
aagggaggaactattacagtagaca

SEQ ID NO: 2432204 - DNA, 25 bp, Homo sapien
ctgaacaggagggtcagcaagcaac

SEQ ID NO: 2432205 - DNA, 25 bp, Homo sapien
ctttgctatgcagtgctctgaacag

SEQ ID NO: 2432206 - DNA, 25 bp, Homo sapien
ttgctatgcagtgctctgaacagga

SEQ ID NO: 2432207 - DNA, 25 bp, Homo sapien
gtcagcaagcaactcccagggagtc

SEQ ID NO: 2432208 - DNA, 25 bp, Homo sapien
gaaagaaaggcagagtatcagcacc

SEQ ID NO: 2432209 - DNA, 25 bp, Homo sapien
gcaaaaatatgctgtgggttcacaa

SEQ ID NO: 2432210 - DNA, 25 bp, Homo sapien
gagcacaaatctcccagtgctggaa

SEQ ID NO: 2432211 - DNA, 25 bp, Homo sapien
tctgtaccctgtggctaatgtagca

SEQ ID NO: 2432212 - DNA, 25 bp, Homo sapien
taatattggctatgccaacattacc

SEQ ID NO: 2432213 - DNA, 25 bp, Homo sapien
gccaacattaccttgagttagaagt

SEQ ID NO: 2432214 - DNA, 25 bp, Homo sapien
ggctatgccaacattaccttgagtt

SEQ ID NO: 2432215 - DNA, 25 bp, Homo sapien
tttccttaatattggctatgccaac

SEQ ID NO: 2432216 - DNA, 25 bp, Homo sapien
agtgatggggagaaattctaagaaa

SEQ ID NO: 2432217 - DNA, 25 bp, Homo sapien
ttagtgagtcattaatgtgaatgtg

SEQ ID NO: 2432218 - DNA, 25 bp, Homo sapien
ggagtgatggggagaaattctaaga

SEQ ID NO: 2432219 - DNA, 25 bp, Homo sapien
tttagtgagtcattaatgtgaatgt

SEQ ID NO: 2432220 - DNA, 25 bp, Homo sapien
gaagtaactccacacagtcagcatc

SEQ ID NO: 2432221 - DNA, 25 bp, Homo sapien
gtcagcatctgacaccatacaggca

SEQ ID NO: 2432222 - DNA, 25 bp, Homo sapien
gcttcagtgtgccatgagtgcagtt

SEQ ID NO: 2432223 - DNA, 25 bp, Homo sapien
tgtgccatgagtgcagttcacatct

SEQ ID NO: 2432224 - DNA, 25 bp, Homo sapien
ggacatcactgaagacaatcttatg

SEQ ID NO: 2432225 - DNA, 25 bp, Homo sapien
accttatcatcaggcaggaaagctg

SEQ ID NO: 2432226 - DNA, 25 bp, Homo sapien
caatcttatgtatcaaagcactgga

SEQ ID NO: 2432227 - DNA, 25 bp, Homo sapien
aagcactggaaaccttatcatcagg

SEQ ID NO: 2432228 - DNA, 25 bp, Homo sapien
gaaggaacggatggcagcaattgtt

SEQ ID NO: 2432229 - DNA, 25 bp, Homo sapien
cgctcggagagagagtatttgctct

SEQ ID NO: 2432230 - DNA, 25 bp, Homo sapien
ccctctgatgaggtcctctacatta

SEQ ID NO: 2432231 - DNA, 25 bp, Homo sapien
caattgttcggattaagcgctcgga

SEQ ID NO: 2432232 - DNA, 25 bp, Homo sapien
caaggctcaaggtgttcacatgctc

SEQ ID NO: 2432233 - DNA, 25 bp, Homo sapien
aaggctcaaggtgttcacatgctcc

SEQ ID NO: 2432234 - DNA, 25 bp, Homo sapien
gctcaaggtgttcacatgctccaaa

SEQ ID NO: 2432235 - DNA, 25 bp, Homo sapien
ggctcaaggtgttcacatgctccaa

SEQ ID NO: 2432236 - DNA, 25 bp, Homo sapien
caaaagtataactaccctggagtca

SEQ ID NO: 2432237 - DNA, 25 bp, Homo sapien
aactaccctggagtcatttatataa

SEQ ID NO: 2432238 - DNA, 25 bp, Homo sapien
gaaatatttgaggtagtattctaaa

SEQ ID NO: 2432239 - DNA, 25 bp, Homo sapien
aaggaaatatttgaggtagtattct

SEQ ID NO: 2432240 - DNA, 25 bp, Homo sapien
tgcggtgtcactttctgcacgggct

SEQ ID NO: 2432241 - DNA, 25 bp, Homo sapien
gcaagggcacgaaacgcaaggacgt

SEQ ID NO: 2432242 - DNA, 25 bp, Homo sapien
agatcgcagcaatcccggtaggtcc

SEQ ID NO: 2432243 - DNA, 25 bp, Homo sapien
cgcggcagctgtctcgctgaggcta

SEQ ID NO: 2432244 - DNA, 25 bp, Homo sapien
gttgaaagccgctgtcaaggcgtga

SEQ ID NO: 2432245 - DNA, 25 bp, Homo sapien
tctgtttaccggactagaagaccaa

SEQ ID NO: 2432246 - DNA, 25 bp, Homo sapien
gtcaaggcgtgacccggaagcagaa

SEQ ID NO: 2432247 - DNA, 25 bp, Homo sapien
gaagaccaactaagatgggcgcctg

SEQ ID NO: 2432248 - DNA, 25 bp, Homo sapien
agtgcagcgttctcggccacagccg

SEQ ID NO: 2432249 - DNA, 25 bp, Homo sapien
ggctttgcgcgcaggctcagtgcag

SEQ ID NO: 2432250 - DNA, 25 bp, Homo sapien
cagccgcagggttcgggtcttggtc

SEQ ID NO: 2432251 - DNA, 25 bp, Homo sapien
tcagtgcagcgttctcggccacagc

SEQ ID NO: 2432252 - DNA, 25 bp, Homo sapien
ttttttcctgtgtgccctcatgtgt

SEQ ID NO: 2432253 - DNA, 25 bp, Homo sapien
caattgaactggctaacaatttctg

SEQ ID NO: 2432254 - DNA, 25 bp, Homo sapien
ttgaactggctaacaatttctgcat

SEQ ID NO: 2432255 - DNA, 25 bp, Homo sapien
tcctgtgtgccctcatgtgtgcagc

SEQ ID NO: 2432256 - DNA, 25 bp, Homo sapien
tattgtatgattcactaacatggtc

SEQ ID NO: 2432257 - DNA, 25 bp, Homo sapien
caatcaaagacattgttattgtatg

SEQ ID NO: 2432258 - DNA, 25 bp, Homo sapien
ttgtatgattcactaacatggtctt

SEQ ID NO: 2432259 - DNA, 25 bp, Homo sapien
gacattgttattgtatgattcacta

SEQ ID NO: 2432260 - DNA, 25 bp, Homo sapien
tctcttctttcgtgccaatcaggcc

SEQ ID NO: 2432261 - DNA, 25 bp, Homo sapien
gctctggccacgtgattgatctctt

SEQ ID NO: 2432262 - DNA, 25 bp, Homo sapien
ttcgtgccaatcaggccaaccagtt

SEQ ID NO: 2432263 - DNA, 25 bp, Homo sapien
gggctagagctgtaatatactctgt

SEQ ID NO: 2432264 - DNA, 25 bp, Homo sapien
ggcagtaaacctcctcagatagcaa

SEQ ID NO: 2432265 - DNA, 25 bp, Homo sapien
caacagccactgacccaggtagtct

SEQ ID NO: 2432266 - DNA, 25 bp, Homo sapien
ggcagagttggaacactatctcacc

SEQ ID NO: 2432267 - DNA, 25 bp, Homo sapien
ttccaagaaataggcctgggcttca

SEQ ID NO: 2432268 - DNA, 25 bp, Homo sapien
cacaagcaggttcaatagcagttat

SEQ ID NO: 2432269 - DNA, 25 bp, Homo sapien
cacttttacacaagcaggttcaata

SEQ ID NO: 2432270 - DNA, 25 bp, Homo sapien
tacacaagcaggttcaatagcagtt

SEQ ID NO: 2432271 - DNA, 25 bp, Homo sapien
tttacacaagcaggttcaatagcag

SEQ ID NO: 2432272 - DNA, 25 bp, Homo sapien
ggcaactcaggccgtctcctgcagt

SEQ ID NO: 2432273 - DNA, 25 bp, Homo sapien
gcttgggcaactcaggccgtctcct

SEQ ID NO: 2432274 - DNA, 25 bp, Homo sapien
tgggcaactcaggccgtctcctgca

SEQ ID NO: 2432275 - DNA, 25 bp, Homo sapien
ttgggcaactcaggccgtctcctgc

SEQ ID NO: 2432276 - DNA, 25 bp, Homo sapien
ttataacgcttctgtgaattccttc

SEQ ID NO: 2432277 - DNA, 25 bp, Homo sapien
aattccttcccgaaggtcagatgtg

SEQ ID NO: 2432278 - DNA, 25 bp, Homo sapien
cccgaaggtcagatgtgtcaaggac

SEQ ID NO: 2432279 - DNA, 25 bp, Homo sapien
tataacgcttctgtgaattccttcc

SEQ ID NO: 2432280 - DNA, 25 bp, Homo sapien
tagtcgtctccgatgctgaagatgc

SEQ ID NO: 2432281 - DNA, 25 bp, Homo sapien
catagtcgtctccgatgctgaagat

SEQ ID NO: 2432282 - DNA, 25 bp, Homo sapien
cttggtcgtggtggacgtcagcaca

SEQ ID NO: 2432283 - DNA, 25 bp, Homo sapien
ctggctaacgatgggccggaagatg

SEQ ID NO: 2432284 - DNA, 25 bp, Homo sapien
gatgagaaagtgagtcccttccccc

SEQ ID NO: 2432285 - DNA, 25 bp, Homo sapien
ggatgagaaagtgagtcccttcccc

SEQ ID NO: 2432286 - DNA, 25 bp, Homo sapien
tgggatgagaaagtgagtcccttcc

SEQ ID NO: 2432287 - DNA, 25 bp, Homo sapien
ccatgggatgagaaagtgagtccct

SEQ ID NO: 2432288 - DNA, 25 bp, Homo sapien
cacggaatcggtcaaagatgacagc

SEQ ID NO: 2432289 - DNA, 25 bp, Homo sapien
ctgtactccacggaatcggtcaaag

SEQ ID NO: 2432290 - DNA, 25 bp, Homo sapien
tccacggaatcggtcaaagatgaca

SEQ ID NO: 2432291 - DNA, 25 bp, Homo sapien
tactccacggaatcggtcaaagatg

SEQ ID NO: 2432292 - DNA, 25 bp, Homo sapien
acgcctcctgcaacagcaaaggccg

SEQ ID NO: 2432293 - DNA, 25 bp, Homo sapien
tataaggcggagttcaccacgcctc

SEQ ID NO: 2432294 - DNA, 25 bp, Homo sapien
tgcaacagcaaaggccgggccaaac

SEQ ID NO: 2432295 - DNA, 25 bp, Homo sapien
tatataaggcggagttcaccacgcc

SEQ ID NO: 2432296 - DNA, 25 bp, Homo sapien
gccgatggactcaaacactttggct

SEQ ID NO: 2432297 - DNA, 25 bp, Homo sapien
cgatggactcaaacactttggctgc

SEQ ID NO: 2432298 - DNA, 25 bp, Homo sapien
ttgccgatggactcaaacactttgg

SEQ ID NO: 2432299 - DNA, 25 bp, Homo sapien
gatggactcaaacactttggctgcc

SEQ ID NO: 2432300 - DNA, 25 bp, Homo sapien
gttttcttctgctggaccctctcac

SEQ ID NO: 2432301 - DNA, 25 bp, Homo sapien
ctggaccctctcacacctgcttcca

SEQ ID NO: 2432302 - DNA, 25 bp, Homo sapien
tgctggaccctctcacacctgcttc

SEQ ID NO: 2432303 - DNA, 25 bp, Homo sapien
tttcttctgctggaccctctcacac

SEQ ID NO: 2432304 - DNA, 25 bp, Homo sapien
tttgtgcttctccaataatttcccc

SEQ ID NO: 2432305 - DNA, 25 bp, Homo sapien
ctggaacttgactggaccagccaaa

SEQ ID NO: 2432306 - DNA, 25 bp, Homo sapien
gactggaccagccaaactgcttgat

SEQ ID NO: 2432307 - DNA, 25 bp, Homo sapien
tgcttgatctctgcacatgtttccc

SEQ ID NO: 2432308 - DNA, 25 bp, Homo sapien
tgtcacaaaactttccctgggccag

SEQ ID NO: 2432309 - DNA, 25 bp, Homo sapien
ggtcatttaggatagtccccacttg

SEQ ID NO: 2432310 - DNA, 25 bp, Homo sapien
caagcagtcctctagtgtcacaaaa

SEQ ID NO: 2432311 - DNA, 25 bp, Homo sapien
aagattggtataggtcaagcagtcc

SEQ ID NO: 2432312 - DNA, 25 bp, Homo sapien
cttctctatcttgaagtgatatagt

SEQ ID NO: 2432313 - DNA, 25 bp, Homo sapien
tcttgaagtgatatagtttgtttct

SEQ ID NO: 2432314 - DNA, 25 bp, Homo sapien
tttggcttccgatcacttggcttcc

SEQ ID NO: 2432315 - DNA, 25 bp, Homo sapien
ttcatttttggcttccgatcacttg

SEQ ID NO: 2432316 - DNA, 25 bp, Homo sapien
cactcgcgggcgctgcccggtaatg

SEQ ID NO: 2432317 - DNA, 25 bp, Homo sapien
catttacgtgccgtgcgtcgccttg

SEQ ID NO: 2432318 - DNA, 25 bp, Homo sapien
ttggaaacagaggagcatccgcgac

SEQ ID NO: 2432319 - DNA, 25 bp, Homo sapien
tgctgctgccacactcgcgggcgct

SEQ ID NO: 2432320 - DNA, 25 bp, Homo sapien
ggagaacccgtgaattgtgtaaata

SEQ ID NO: 2432321 - DNA, 25 bp, Homo sapien
agaggaagcgcccatctctggactc

SEQ ID NO: 2432322 - DNA, 25 bp, Homo sapien
aaaggacttacctaggaccatggca

SEQ ID NO: 2432323 - DNA, 25 bp, Homo sapien
aataatctctaacaatttacctgga

SEQ ID NO: 2432324 - DNA, 25 bp, Homo sapien
taaccacactgaagcatcgttgccc

SEQ ID NO: 2432325 - DNA, 25 bp, Homo sapien
gaaaactgaccgcaaaatgggctct

SEQ ID NO: 2432326 - DNA, 25 bp, Homo sapien
taagtctgatggtctcggtacatgc

SEQ ID NO: 2432327 - DNA, 25 bp, Homo sapien
tccgtgaaggttcagggctctggac

SEQ ID NO: 2432328 - DNA, 25 bp, Homo sapien
aatagatcgtgttccccagaggttg

SEQ ID NO: 2432329 - DNA, 25 bp, Homo sapien
tcaaggtccgcatctcccgctggag

SEQ ID NO: 2432330 - DNA, 25 bp, Homo sapien
gtcaggttcccgcaattcggcgcgg

SEQ ID NO: 2432331 - DNA, 25 bp, Homo sapien
gcagccgcactggtgtcccagaata

SEQ ID NO: 2432332 - DNA, 25 bp, Homo sapien
acagccccggtccgagaggccgaag

SEQ ID NO: 2432333 - DNA, 25 bp, Homo sapien
cagccccggtccgagaggccgaaga

SEQ ID NO: 2432334 - DNA, 25 bp, Homo sapien
cacagccccggtccgagaggccgaa

SEQ ID NO: 2432335 - DNA, 25 bp, Homo sapien
tggtttctggttaattacattttca

SEQ ID NO: 2432336 - DNA, 25 bp, Homo sapien
gcaatttgtgtcctccagagaccag

SEQ ID NO: 2432337 - DNA, 25 bp, Homo sapien
gggcaatttgtgtcctccagagacc

SEQ ID NO: 2432338 - DNA, 25 bp, Homo sapien
ttcatgggttttcgcagagtctggg

SEQ ID NO: 2432339 - DNA, 25 bp, Homo sapien
tttgccagcattccgggccccagct

SEQ ID NO: 2432340 - DNA, 25 bp, Homo sapien
ttgccagcattccgggccccagctc

SEQ ID NO: 2432341 - DNA, 25 bp, Homo sapien
gccagcattccgggccccagctcac

SEQ ID NO: 2432342 - DNA, 25 bp, Homo sapien
gctttgccagcattccgggccccag

SEQ ID NO: 2432343 - DNA, 25 bp, Homo sapien
gaatttcactcgtccccggtatcga

SEQ ID NO: 2432344 - DNA, 25 bp, Homo sapien
tgttgacaacaccagttctacgacg

SEQ ID NO: 2432345 - DNA, 25 bp, Homo sapien
aagcgggcgattcctcttgcctgga

SEQ ID NO: 2432346 - DNA, 25 bp, Homo sapien
ttgcctggaatttcactcgtccccg

SEQ ID NO: 2432347 - DNA, 25 bp, Homo sapien
ggccagcctggttcttccaagtgcc

SEQ ID NO: 2432348 - DNA, 25 bp, Homo sapien
tgggccagcctggttcttccaagtg

SEQ ID NO: 2432349 - DNA, 25 bp, Homo sapien
ggctgggccagcctggttcttccaa

SEQ ID NO: 2432350 - DNA, 25 bp, Homo sapien
tagacagactgtggctgggccagcc

SEQ ID NO: 2432351 - DNA, 25 bp, Homo sapien
cacatgggggtaatgatggtgtaca

SEQ ID NO: 2432352 - DNA, 25 bp, Homo sapien
gaaaggtttgtctttgtcaggccca

SEQ ID NO: 2432353 - DNA, 25 bp, Homo sapien
taatgatggtgtacaggagggagaa

SEQ ID NO: 2432354 - DNA, 25 bp, Homo sapien
tgttgcggaaactataaatgatggg

SEQ ID NO: 2432355 - DNA, 25 bp, Homo sapien
tgaagtgtagagaaagatgaccaca

SEQ ID NO: 2432356 - DNA, 25 bp, Homo sapien
cacagtcaggtgagaggcacaagta

SEQ ID NO: 2432357 - DNA, 25 bp, Homo sapien
ctgaagtgtagagaaagatgaccac

SEQ ID NO: 2432358 - DNA, 25 bp, Homo sapien
aggcacaagtagagaaagtcttccc

SEQ ID NO: 2432359 - DNA, 25 bp, Homo sapien
agtgacagtgagcaccatggggctg

SEQ ID NO: 2432360 - DNA, 25 bp, Homo sapien
gccaggatgtgcacataggaagtga

SEQ ID NO: 2432361 - DNA, 25 bp, Homo sapien
gataaattccgtcactatgctgcca

SEQ ID NO: 2432362 - DNA, 25 bp, Homo sapien
gaccttctggcttatgatcgggaca

SEQ ID NO: 2432363 - DNA, 25 bp, Homo sapien
tgatcagcccaaagaaccaggcagt

SEQ ID NO: 2432364 - DNA, 25 bp, Homo sapien
catgaaagccaagaggatgcactcg

SEQ ID NO: 2432365 - DNA, 25 bp, Homo sapien
aaagatgatgggaaaagcacaaggg

SEQ ID NO: 2432366 - DNA, 25 bp, Homo sapien
gatgatgggaaaagcacaagggtat

SEQ ID NO: 2432367 - DNA, 25 bp, Homo sapien
tgatgggaaaagcacaagggtatag

SEQ ID NO: 2432368 - DNA, 25 bp, Homo sapien
aagatgatgggaaaagcacaagggt

SEQ ID NO: 2432369 - DNA, 25 bp, Homo sapien
cccagcagttgctgctgctaccgca

SEQ ID NO: 2432370 - DNA, 25 bp, Homo sapien
ttgctgctgctaccgcagccaccca

SEQ ID NO: 2432371 - DNA, 25 bp, Homo sapien
agcagttgctgctgctaccgcagcc

SEQ ID NO: 2432372 - DNA, 25 bp, Homo sapien
tcgcccagcagttgctgctgctacc

SEQ ID NO: 2432373 - DNA, 25 bp, Homo sapien
tgccgtttatcttactctggtcaaa

SEQ ID NO: 2432374 - DNA, 25 bp, Homo sapien
tgtggtgttggttgcctgccgttta

SEQ ID NO: 2432375 - DNA, 25 bp, Homo sapien
gatgataagtatattcctgcttaac

SEQ ID NO: 2432376 - DNA, 25 bp, Homo sapien
cagttctgccaaccatttctcttta

SEQ ID NO: 2432377 - DNA, 25 bp, Homo sapien
cgcacgtggccccaagtatttcaag

SEQ ID NO: 2432378 - DNA, 25 bp, Homo sapien
gggttataggtatataccaccgcac

SEQ ID NO: 2432379 - DNA, 25 bp, Homo sapien
gaacttctctgggttatgcagaatt

SEQ ID NO: 2432380 - DNA, 25 bp, Homo sapien
tagataatttagtactgggccgaac

SEQ ID NO: 2432381 - DNA, 25 bp, Homo sapien
gggctgcaggtacttcagagatcct

SEQ ID NO: 2432382 - DNA, 25 bp, Homo sapien
acttcagagatcctcactttcagag

SEQ ID NO: 2432383 - DNA, 25 bp, Homo sapien
tgcaggtacttcagagatcctcact

SEQ ID NO: 2432384 - DNA, 25 bp, Homo sapien
ctcactttcagagggatatggagaa

SEQ ID NO: 2432385 - DNA, 25 bp, Homo sapien
ttaagaatattctttcatgtttttc

SEQ ID NO: 2432386 - DNA, 25 bp, Homo sapien
taagaatattctttcatgtttttct

SEQ ID NO: 2432387 - DNA, 25 bp, Homo sapien
atattctttcatgtttttcttttca

SEQ ID NO: 2432388 - DNA, 25 bp, Homo sapien
tatttctccatcatttcattgatcc

SEQ ID NO: 2432389 - DNA, 25 bp, Homo sapien
ttaatatttctccatcatttcattg

SEQ ID NO: 2432390 - DNA, 25 bp, Homo sapien
aatatttctccatcatttcattgat

SEQ ID NO: 2432391 - DNA, 25 bp, Homo sapien
atttctccatcatttcattgatcct

SEQ ID NO: 2432392 - DNA, 25 bp, Homo sapien
tcctagaacagtgccctttttacta

SEQ ID NO: 2432393 - DNA, 25 bp, Homo sapien
gctcctagaacagtgccctttttac

SEQ ID NO: 2432394 - DNA, 25 bp, Homo sapien
ctggctcctagaacagtgccctttt

SEQ ID NO: 2432395 - DNA, 25 bp, Homo sapien
ggctcctagaacagtgcccttttta

SEQ ID NO: 2432396 - DNA, 25 bp, Homo sapien
cagagagagttgggacaacagagag

SEQ ID NO: 2432397 - DNA, 25 bp, Homo sapien
gagagttgggacaacagagagggag

SEQ ID NO: 2432398 - DNA, 25 bp, Homo sapien
caacagtgtcaagatctgtgacatc

SEQ ID NO: 2432399 - DNA, 25 bp, Homo sapien
gagagagttgggacaacagagaggg

SEQ ID NO: 2432400 - DNA, 25 bp, Homo sapien
ggaggcacttgggtcccagccaatc

SEQ ID NO: 2432401 - DNA, 25 bp, Homo sapien
taatagtcttgatcacactctaagg

SEQ ID NO: 2432402 - DNA, 25 bp, Homo sapien
cggcacatgccagttaggccaataa

SEQ ID NO: 2432403 - DNA, 25 bp, Homo sapien
tttatagtgcagagcattgcccggc

SEQ ID NO: 2432404 - DNA, 25 bp, Homo sapien
tttctctgtccaggcagctctggga

SEQ ID NO: 2432405 - DNA, 25 bp, Homo sapien
ctttctctgtccaggcagctctggg

SEQ ID NO: 2432406 - DNA, 25 bp, Homo sapien
tgggagagtggaagagtggctcatc

SEQ ID NO: 2432407 - DNA, 25 bp, Homo sapien
gagagtggaagagtggctcatccat

SEQ ID NO: 2432408 - DNA, 25 bp, Homo sapien
acactgatgacattcgaagtgtttc

SEQ ID NO: 2432409 - DNA, 25 bp, Homo sapien
gatgacattcgaagtgtttctcttt

SEQ ID NO: 2432410 - DNA, 25 bp, Homo sapien
acattcgaagtgtttctctttgctg

SEQ ID NO: 2432411 - DNA, 25 bp, Homo sapien
actgatgacattcgaagtgtttctc

SEQ ID NO: 2432412 - DNA, 25 bp, Homo sapien
ttttctaagggatgaagtaatacta

SEQ ID NO: 2432413 - DNA, 25 bp, Homo sapien
taagggatgaagtaatactaaaggc

SEQ ID NO: 2432414 - DNA, 25 bp, Homo sapien
catagggcttttcactagtgtggtt

SEQ ID NO: 2432415 - DNA, 25 bp, Homo sapien
ggatgaagtaatactaaaggctttc

SEQ ID NO: 2432416 - DNA, 25 bp, Homo sapien
ggaaggacaagaggcgaagctccaa

SEQ ID NO: 2432417 - DNA, 25 bp, Homo sapien
acgccgccggctacttcagggtctg

SEQ ID NO: 2432418 - DNA, 25 bp, Homo sapien
tgaaggaagacaccacgccgaggtc

SEQ ID NO: 2432419 - DNA, 25 bp, Homo sapien
cgcgagggcgaaagccaaggccaat

SEQ ID NO: 2432420 - DNA, 25 bp, Homo sapien
tctcatgccataggctgacaggaca

SEQ ID NO: 2432421 - DNA, 25 bp, Homo sapien
gaaggtattagaacctcctgggagc

SEQ ID NO: 2432422 - DNA, 25 bp, Homo sapien
tatctcctacaagcggcaacagggt

SEQ ID NO: 2432423 - DNA, 25 bp, Homo sapien
tgcaaagcctagtaaccgcagaatt

SEQ ID NO: 2432424 - DNA, 25 bp, Homo sapien
taagtttattatgcacgtgaatgcg

SEQ ID NO: 2432425 - DNA, 25 bp, Homo sapien
caagtgccttgatgatagccagatg

SEQ ID NO: 2432426 - DNA, 25 bp, Homo sapien
cgtgaatgcgagtggaagaatgcct

SEQ ID NO: 2432427 - DNA, 25 bp, Homo sapien
taccctccctatggtgtaactagca

SEQ ID NO: 2432428 - DNA, 25 bp, Homo sapien
gatgggaatgatactgggaacaatt

SEQ ID NO: 2432429 - DNA, 25 bp, Homo sapien
gagttaagaaggctgcaatactagg

SEQ ID NO: 2432430 - DNA, 25 bp, Homo sapien
tcagacctcgctaaacaaaggagtt

SEQ ID NO: 2432431 - DNA, 25 bp, Homo sapien
ctaggtggtctagtattagcctttt

SEQ ID NO: 2432432 - DNA, 25 bp, Homo sapien
tctaggccctgtgctgagaatacta

SEQ ID NO: 2432433 - DNA, 25 bp, Homo sapien
taagctttagggtggctgtactccg

SEQ ID NO: 2432434 - DNA, 25 bp, Homo sapien
cagatttctagctagtgggcagtca

SEQ ID NO: 2432435 - DNA, 25 bp, Homo sapien
ggagtttataccatccccgtgcctg

SEQ ID NO: 2432436 - DNA, 25 bp, Homo sapien
gctagaaatctgataggcacggagc

SEQ ID NO: 2432437 - DNA, 25 bp, Homo sapien
tctcccaggcctgaaattgccagtg

SEQ ID NO: 2432438 - DNA, 25 bp, Homo sapien
tattcaactgacagggaccataagt

SEQ ID NO: 2432439 - DNA, 25 bp, Homo sapien
gagcaagggtcacatttgatctccc

SEQ ID NO: 2432440 - DNA, 25 bp, Homo sapien
ggtgaaacatgaacatttgaggctg

SEQ ID NO: 2432441 - DNA, 25 bp, Homo sapien
aacatgaacatttgaggctgattcc

SEQ ID NO: 2432442 - DNA, 25 bp, Homo sapien
gaacatttgaggctgattccctgtg

SEQ ID NO: 2432443 - DNA, 25 bp, Homo sapien
catttgaggctgattccctgtggga

SEQ ID NO: 2432444 - DNA, 25 bp, Homo sapien
tagcaccggctgatagacttgacca

SEQ ID NO: 2432445 - DNA, 25 bp, Homo sapien
tagaaggcccttagactccatgatg

SEQ ID NO: 2432446 - DNA, 25 bp, Homo sapien
tctgagaagctagggcaagacctgc

SEQ ID NO: 2432447 - DNA, 25 bp, Homo sapien
tatcagcccatgtaggatgcattgc

SEQ ID NO: 2432448 - DNA, 25 bp, Homo sapien
tgtccaggtgatgttttcggccaaa

SEQ ID NO: 2432449 - DNA, 25 bp, Homo sapien
caggtgcctgtccaggtgatgtttt

SEQ ID NO: 2432450 - DNA, 25 bp, Homo sapien
tgcctgtccaggtgatgttttcggc

SEQ ID NO: 2432451 - DNA, 25 bp, Homo sapien
caggtgatgttttcggccaaagctc

SEQ ID NO: 2432452 - DNA, 25 bp, Homo sapien
tcacaaggtggtgccttcggccaaa

SEQ ID NO: 2432453 - DNA, 25 bp, Homo sapien
gacacgctggataacattctgggag

SEQ ID NO: 2432454 - DNA, 25 bp, Homo sapien
gaggtgatgtcttcgcccaaaggtc

SEQ ID NO: 2432455 - DNA, 25 bp, Homo sapien
ccagtgtgggtcagccagtgtctca

SEQ ID NO: 2432456 - DNA, 25 bp, Homo sapien
tccttctagttgagaaagcatgtcc

SEQ ID NO: 2432457 - DNA, 25 bp, Homo sapien
cctccttctagttgagaaagcatgt

SEQ ID NO: 2432458 - DNA, 25 bp, Homo sapien
tcctccttctagttgagaaagcatg

SEQ ID NO: 2432459 - DNA, 25 bp, Homo sapien
ccttctagttgagaaagcatgtcca

SEQ ID NO: 2432460 - DNA, 25 bp, Homo sapien
aaaatagagctgtcaattagttcaa

SEQ ID NO: 2432461 - DNA, 25 bp, Homo sapien
aaaggaaaatagagctgtcaattag

SEQ ID NO: 2432462 - DNA, 25 bp, Homo sapien
aaggaaaatagagctgtcaattagt

SEQ ID NO: 2432463 - DNA, 25 bp, Homo sapien
ggaaaatagagctgtcaattagttc

SEQ ID NO: 2432464 - DNA, 25 bp, Homo sapien
gattccctgccacataaagagtcct

SEQ ID NO: 2432465 - DNA, 25 bp, Homo sapien
tctccagcggaagcatagacagatt

SEQ ID NO: 2432466 - DNA, 25 bp, Homo sapien
tatccaatagccctgaagcagatgg

SEQ ID NO: 2432467 - DNA, 25 bp, Homo sapien
tcccagagtccaatcttctagtggc

SEQ ID NO: 2432468 - DNA, 25 bp, Homo sapien
tatcccacagttttcctgcatgaca

SEQ ID NO: 2432469 - DNA, 25 bp, Homo sapien
tcagagagactactatcccacagtt

SEQ ID NO: 2432470 - DNA, 25 bp, Homo sapien
gactactatcccacagttttcctgc

SEQ ID NO: 2432471 - DNA, 25 bp, Homo sapien
tccataaaagtctgtctgagagggg

SEQ ID NO: 2432472 - DNA, 25 bp, Homo sapien
ctgaaacaaaatgtagcatcttctg

SEQ ID NO: 2432473 - DNA, 25 bp, Homo sapien
gctggaggcaccataaactcatcac

SEQ ID NO: 2432474 - DNA, 25 bp, Homo sapien
tagctacaggtgtctactcagtcac

SEQ ID NO: 2432475 - DNA, 25 bp, Homo sapien
gcccagaagtccctgggtagggcac

SEQ ID NO: 2432476 - DNA, 25 bp, Homo sapien
ggcacatagttttggtaacagggaa

SEQ ID NO: 2432477 - DNA, 25 bp, Homo sapien
gatgatcatgtgagccaactcatca

SEQ ID NO: 2432478 - DNA, 25 bp, Homo sapien
tcatgtgagccaactcatcaatggg

SEQ ID NO: 2432479 - DNA, 25 bp, Homo sapien
cattgatgatcatgtgagccaactc

SEQ ID NO: 2432480 - DNA, 25 bp, Homo sapien
gatcatgtgagccaactcatcaatg

SEQ ID NO: 2432481 - DNA, 25 bp, Homo sapien
atgggaccacaggagacgccaaggg

SEQ ID NO: 2432482 - DNA, 25 bp, Homo sapien
atgcgaaagcaatacaaaggcagca

SEQ ID NO: 2432483 - DNA, 25 bp, Homo sapien
tgggaccacaggagacgccaaggga

SEQ ID NO: 2432484 - DNA, 25 bp, Homo sapien
ctgatgcgaaagcaatacaaaggca

SEQ ID NO: 2432485 - DNA, 25 bp, Homo sapien
ccagccgcaagaagtgcagctgcca

SEQ ID NO: 2432486 - DNA, 25 bp, Homo sapien
cagccgcaagaagtgcagctgccat

SEQ ID NO: 2432487 - DNA, 25 bp, Homo sapien
tcccctcctggggaattgcaggaac

SEQ ID NO: 2432488 - DNA, 25 bp, Homo sapien
ggtactgttctccatggccgctctt

SEQ ID NO: 2432489 - DNA, 25 bp, Homo sapien
tccagctgtacattcattgattccc

SEQ ID NO: 2432490 - DNA, 25 bp, Homo sapien
catcctgtccccagcgctgctgtct

SEQ ID NO: 2432491 - DNA, 25 bp, Homo sapien
gaggtcctggtactgttctccatgg

SEQ ID NO: 2432492 - DNA, 25 bp, Homo sapien
ttctgctgcagacccaaattgtgac

SEQ ID NO: 2432493 - DNA, 25 bp, Homo sapien
atcctttcaataacacttgcaagaa

SEQ ID NO: 2432494 - DNA, 25 bp, Homo sapien
tcctttcaataacacttgcaagaac

SEQ ID NO: 2432495 - DNA, 25 bp, Homo sapien
cacacatatgggtagcaagggacct

SEQ ID NO: 2432496 - DNA, 25 bp, Homo sapien
cctaagatattcacgcagagccagc

SEQ ID NO: 2432497 - DNA, 25 bp, Homo sapien
cagagaatccgagcaaggcagaact

SEQ ID NO: 2432498 - DNA, 25 bp, Homo sapien
cgagttggctccgtccatcagagaa

SEQ ID NO: 2432499 - DNA, 25 bp, Homo sapien
tccgcttgcgtctgggagccggcgg

SEQ ID NO: 2432500 - DNA, 25 bp, Homo sapien
cgccctccgcttgcgtctgggagcc

SEQ ID NO: 2432501 - DNA, 25 bp, Homo sapien
gcttggcccgcggcccggtgcctcc

SEQ ID NO: 2432502 - DNA, 25 bp, Homo sapien
ctccgccctccgcttgcgtctggga

SEQ ID NO: 2432503 - DNA, 25 bp, Homo sapien
ggaaatcagaaatcccgctgcccaa

SEQ ID NO: 2432504 - DNA, 25 bp, Homo sapien
ctgaaataaggatgatgtcaggccc

SEQ ID NO: 2432505 - DNA, 25 bp, Homo sapien
catgaccatggtatagaccacaggg

SEQ ID NO: 2432506 - DNA, 25 bp, Homo sapien
taacttgtgggtgaaaagactgtcc

SEQ ID NO: 2432507 - DNA, 25 bp, Homo sapien
tgaaggtgagaatcagccctgatct

SEQ ID NO: 2432508 - DNA, 25 bp, Homo sapien
ggtctttgaaggtgagaatcagccc

SEQ ID NO: 2432509 - DNA, 25 bp, Homo sapien
agtacatgggtctttgaaggtgaga

SEQ ID NO: 2432510 - DNA, 25 bp, Homo sapien
catgggtctttgaaggtgagaatca

SEQ ID NO: 2432511 - DNA, 25 bp, Homo sapien
ggattagcacaaagagcatgatctg

SEQ ID NO: 2432512 - DNA, 25 bp, Homo sapien
tcaccaggattagcacaaagagcat

SEQ ID NO: 2432513 - DNA, 25 bp, Homo sapien
gtcaggagatgaatcaccaggatta

SEQ ID NO: 2432514 - DNA, 25 bp, Homo sapien
cttccccgtcaaagtcaggagatga

SEQ ID NO: 2432515 - DNA, 25 bp, Homo sapien
gctccgggtctgacaggtcttctga

SEQ ID NO: 2432516 - DNA, 25 bp, Homo sapien
ggtgctccgggtctgacaggtcttc

SEQ ID NO: 2432517 - DNA, 25 bp, Homo sapien
ccgggtctgacaggtcttctgactt

SEQ ID NO: 2432518 - DNA, 25 bp, Homo sapien
tactgagcaggggtgctccgggtct

SEQ ID NO: 2432519 - DNA, 25 bp, Homo sapien
cagacagtccccaggaaaagtggac

SEQ ID NO: 2432520 - DNA, 25 bp, Homo sapien
gagttgagaggcctccagacagtcc

SEQ ID NO: 2432521 - DNA, 25 bp, Homo sapien
caggaaaagtggactttgctttcca

SEQ ID NO: 2432522 - DNA, 25 bp, Homo sapien
ttgagaggcctccagacagtcccca

SEQ ID NO: 2432523 - DNA, 25 bp, Homo sapien
ttagcatgggatcagtgcaggacag

SEQ ID NO: 2432524 - DNA, 25 bp, Homo sapien
tgcattgaccgttgcagtgcagaga

SEQ ID NO: 2432525 - DNA, 25 bp, Homo sapien
cagagggaagcgtgaagaccgtttc

SEQ ID NO: 2432526 - DNA, 25 bp, Homo sapien
ttgggaccacagaactgcaagtttg

SEQ ID NO: 2432527 - DNA, 25 bp, Homo sapien
gatggcagcatagcaggcataggtg

SEQ ID NO: 2432528 - DNA, 25 bp, Homo sapien
aagcagccattggtgccccaagaaa

SEQ ID NO: 2432529 - DNA, 25 bp, Homo sapien
agatggcagcatagcaggcataggt

SEQ ID NO: 2432530 - DNA, 25 bp, Homo sapien
agcagccattggtgccccaagaaaa

SEQ ID NO: 2432531 - DNA, 25 bp, Homo sapien
gcagtgactgaggagtaacatatat

SEQ ID NO: 2432532 - DNA, 25 bp, Homo sapien
caacattttacacagagctgtcttc

SEQ ID NO: 2432533 - DNA, 25 bp, Homo sapien
ttactgcttcaacattttacacaga

SEQ ID NO: 2432534 - DNA, 25 bp, Homo sapien
actgcttcaacattttacacagagc

SEQ ID NO: 2432535 - DNA, 25 bp, Homo sapien
acattttacacagagctgtcttcac

SEQ ID NO: 2432536 - DNA, 25 bp, Homo sapien
gcagatgagtggcttcagtgaagat

SEQ ID NO: 2432537 - DNA, 25 bp, Homo sapien
ctgcagatgagtggcttcagtgaag

SEQ ID NO: 2432538 - DNA, 25 bp, Homo sapien
tggttcttgaggctgcagatgagtg

SEQ ID NO: 2432539 - DNA, 25 bp, Homo sapien
tgcagatgagtggcttcagtgaaga

SEQ ID NO: 2432540 - DNA, 25 bp, Homo sapien
ctgaatgcagaccacttgctccaag

SEQ ID NO: 2432541 - DNA, 25 bp, Homo sapien
atagtacaaaagcaccacggtgagg

SEQ ID NO: 2432542 - DNA, 25 bp, Homo sapien
tggagaaggctttgccttgaccctc

SEQ ID NO: 2432543 - DNA, 25 bp, Homo sapien
catagtacaaaagcaccacggtgag

SEQ ID NO: 2432544 - DNA, 25 bp, Homo sapien
tgccttgaccctcagaaaaacaaat

SEQ ID NO: 2432545 - DNA, 25 bp, Homo sapien
caatcaccatcctgacacagacagg

SEQ ID NO: 2432546 - DNA, 25 bp, Homo sapien
gagtttaggaatcccactgcccatg

SEQ ID NO: 2432547 - DNA, 25 bp, Homo sapien
acagacaggctgattcataaccaca

SEQ ID NO: 2432548 - DNA, 25 bp, Homo sapien
cataaccacatcgttgagccgaggg

SEQ ID NO: 2432549 - DNA, 25 bp, Homo sapien
ggcagagatctaacagtgacaggtg

SEQ ID NO: 2432550 - DNA, 25 bp, Homo sapien
cagagatctaacagtgacaggtgac

SEQ ID NO: 2432551 - DNA, 25 bp, Homo sapien
gcagagatctaacagtgacaggtga

SEQ ID NO: 2432552 - DNA, 25 bp, Homo sapien
aggcagagatctaacagtgacaggt

SEQ ID NO: 2432553 - DNA, 25 bp, Homo sapien
tcaccaggatcatcatcaggttctc

SEQ ID NO: 2432554 - DNA, 25 bp, Homo sapien
tgacaacagataaatcaccaggagc

SEQ ID NO: 2432555 - DNA, 25 bp, Homo sapien
taaatcaccaggagcatacaggtca

SEQ ID NO: 2432556 - DNA, 25 bp, Homo sapien
aggatcatcatcaggttctccatca

SEQ ID NO: 2432557 - DNA, 25 bp, Homo sapien
taaggacgaactcagtaatgatgat

SEQ ID NO: 2432558 - DNA, 25 bp, Homo sapien
ttccataaggacgaactcagtaatg

SEQ ID NO: 2432559 - DNA, 25 bp, Homo sapien
tgattccataaggacgaactcagta

SEQ ID NO: 2432560 - DNA, 25 bp, Homo sapien
ccataaggacgaactcagtaatgat

SEQ ID NO: 2432561 - DNA, 25 bp, Homo sapien
agttgacaactgtatggtagtgcat

SEQ ID NO: 2432562 - DNA, 25 bp, Homo sapien
ccagttgacaactgtatggtagtgc

SEQ ID NO: 2432563 - DNA, 25 bp, Homo sapien
cagttgacaactgtatggtagtgca

SEQ ID NO: 2432564 - DNA, 25 bp, Homo sapien
ttcttttccaaccagttgacaactg

SEQ ID NO: 2432565 - DNA, 25 bp, Homo sapien
gcacaaatagcagagcctgaatatg

SEQ ID NO: 2432566 - DNA, 25 bp, Homo sapien
caaattctctatcagggccaggaag

SEQ ID NO: 2432567 - DNA, 25 bp, Homo sapien
ggctgttagtagacaccccaagaag

SEQ ID NO: 2432568 - DNA, 25 bp, Homo sapien
cccaagaaggatgaactcggagata

SEQ ID NO: 2432569 - DNA, 25 bp, Homo sapien
ctagaaatattttctcaatgttctt

SEQ ID NO: 2432570 - DNA, 25 bp, Homo sapien
gaaatattttctcaatgttcttctc

SEQ ID NO: 2432571 - DNA, 25 bp, Homo sapien
aatattttctcaatgttcttctcac

SEQ ID NO: 2432572 - DNA, 25 bp, Homo sapien
tagaaatattttctcaatgttcttc

SEQ ID NO: 2432573 - DNA, 25 bp, Homo sapien
ttggcatgagatagcggagtaatcc

SEQ ID NO: 2432574 - DNA, 25 bp, Homo sapien
ctcttgaatggatcctgaatttggc

SEQ ID NO: 2432575 - DNA, 25 bp, Homo sapien
tgtactgcaaggagaagatcagctc

SEQ ID NO: 2432576 - DNA, 25 bp, Homo sapien
tcagcatgggagtgatcacgctgta

SEQ ID NO: 2432577 - DNA, 25 bp, Homo sapien
tcctcaggatggtggacaaaatgca

SEQ ID NO: 2432578 - DNA, 25 bp, Homo sapien
caagacaaaggatagagagagggca

SEQ ID NO: 2432579 - DNA, 25 bp, Homo sapien
cagggtggtaaaacttgctgacaca

SEQ ID NO: 2432580 - DNA, 25 bp, Homo sapien
tctgcctgtagtggagctgatcctc

SEQ ID NO: 2432581 - DNA, 25 bp, Homo sapien
tgaagtggtggatattttgagcctc

SEQ ID NO: 2432582 - DNA, 25 bp, Homo sapien
caaggatattgatgagggcatccag

SEQ ID NO: 2432583 - DNA, 25 bp, Homo sapien
tgagagctacaaggatattgatgag

SEQ ID NO: 2432584 - DNA, 25 bp, Homo sapien
cacagaagtctaaattgagagctac

SEQ ID NO: 2432585 - DNA, 25 bp, Homo sapien
tggccatagagcaaaggagagctga

SEQ ID NO: 2432586 - DNA, 25 bp, Homo sapien
gccatagagcaaaggagagctgatg

SEQ ID NO: 2432587 - DNA, 25 bp, Homo sapien
catagagcaaaggagagctgatggc

SEQ ID NO: 2432588 - DNA, 25 bp, Homo sapien
acttggccatagagcaaaggagagc

SEQ ID NO: 2432589 - DNA, 25 bp, Homo sapien
agtgacagaggaatggcagagatcc

SEQ ID NO: 2432590 - DNA, 25 bp, Homo sapien
caacagcttaggtgcagtgacagag

SEQ ID NO: 2432591 - DNA, 25 bp, Homo sapien
tccaacagcttaggtgcagtgacag

SEQ ID NO: 2432592 - DNA, 25 bp, Homo sapien
ctccaacagcttaggtgcagtgaca

SEQ ID NO: 2432593 - DNA, 25 bp, Homo sapien
gtcaggaggcaaatcaccacgaaca

SEQ ID NO: 2432594 - DNA, 25 bp, Homo sapien
aggaggcaaatcaccacgaacagca

SEQ ID NO: 2432595 - DNA, 25 bp, Homo sapien
gacaaactcagggacaacactgcgg

SEQ ID NO: 2432596 - DNA, 25 bp, Homo sapien
gctgacagcccgaggaggacaaact

SEQ ID NO: 2432597 - DNA, 25 bp, Homo sapien
aaataaattgagtgaagcctcttct

SEQ ID NO: 2432598 - DNA, 25 bp, Homo sapien
taagataaataaattgagtgaagcc

SEQ ID NO: 2432599 - DNA, 25 bp, Homo sapien
taaataaattgagtgaagcctcttc

SEQ ID NO: 2432600 - DNA, 25 bp, Homo sapien
gataaataaattgagtgaagcctct

SEQ ID NO: 2432601 - DNA, 25 bp, Homo sapien
gtgctgtagtgaaagtgccatcgaa

SEQ ID NO: 2432602 - DNA, 25 bp, Homo sapien
gcattagggaagaggtattccagga

SEQ ID NO: 2432603 - DNA, 25 bp, Homo sapien
caaagtgggacctttattcaagaca

SEQ ID NO: 2432604 - DNA, 25 bp, Homo sapien
tagtcttcaagaattcggtgatgtc

SEQ ID NO: 2432605 - DNA, 25 bp, Homo sapien
aaagccactgttccagcttctcagt

SEQ ID NO: 2432606 - DNA, 25 bp, Homo sapien
actgttccagcttctcagtgcagag

SEQ ID NO: 2432607 - DNA, 25 bp, Homo sapien
cactgttccagcttctcagtgcaga

SEQ ID NO: 2432608 - DNA, 25 bp, Homo sapien
gccactgttccagcttctcagtgca

SEQ ID NO: 2432609 - DNA, 25 bp, Homo sapien
tagtcaattcctttaatatccagga

SEQ ID NO: 2432610 - DNA, 25 bp, Homo sapien
gtcaattcctttaatatccaggatc

SEQ ID NO: 2432611 - DNA, 25 bp, Homo sapien
cagtagtcaattcctttaatatcca

SEQ ID NO: 2432612 - DNA, 25 bp, Homo sapien
gtagtcaattcctttaatatccagg

SEQ ID NO: 2432613 - DNA, 25 bp, Homo sapien
atcagtaatgtcatcatccaggaac

SEQ ID NO: 2432614 - DNA, 25 bp, Homo sapien
catcagtaatgtcatcatccaggaa

SEQ ID NO: 2432615 - DNA, 25 bp, Homo sapien
ggcacacattatgtcatcagtaatg

SEQ ID NO: 2432616 - DNA, 25 bp, Homo sapien
cttggcacacattatgtcatcagta

SEQ ID NO: 2432617 - DNA, 25 bp, Homo sapien
tcattgttttcaactatggcttgtg

SEQ ID NO: 2432618 - DNA, 25 bp, Homo sapien
cacaggagatgtcacagatgttcct

SEQ ID NO: 2432619 - DNA, 25 bp, Homo sapien
agatgttccttgactgagggacctg

SEQ ID NO: 2432620 - DNA, 25 bp, Homo sapien
ctggaagagtccatattccgtgctt

SEQ ID NO: 2432621 - DNA, 25 bp, Homo sapien
ctggtgtgaaacatggtacagatca

SEQ ID NO: 2432622 - DNA, 25 bp, Homo sapien
ggcaaagcgatgcctccataaccat

SEQ ID NO: 2432623 - DNA, 25 bp, Homo sapien
ataaccatctatgtctttcagcagc

SEQ ID NO: 2432624 - DNA, 25 bp, Homo sapien
attcaggcaaagcgatgcctccata

SEQ ID NO: 2432625 - DNA, 25 bp, Homo sapien
gctgggacagctcacattttgtgaa

SEQ ID NO: 2432626 - DNA, 25 bp, Homo sapien
gatttatttacttcttgggatggaa

SEQ ID NO: 2432627 - DNA, 25 bp, Homo sapien
caattcaggtgactgtttgatattt

SEQ ID NO: 2432628 - DNA, 25 bp, Homo sapien
gcattcaattcaggtgactgtttga

SEQ ID NO: 2432629 - DNA, 25 bp, Homo sapien
cctttcccatcagagacaggtcccc

SEQ ID NO: 2432630 - DNA, 25 bp, Homo sapien
gataaccgatattagggccatcagt

SEQ ID NO: 2432631 - DNA, 25 bp, Homo sapien
gataaaaagccagagttcaccaggg

SEQ ID NO: 2432632 - DNA, 25 bp, Homo sapien
gaaaagctaaactgcaggtcttcag

SEQ ID NO: 2432633 - DNA, 25 bp, Homo sapien
gcaagacggataaggaggacccagt

SEQ ID NO: 2432634 - DNA, 25 bp, Homo sapien
tctgagacaatggtgcagaggcttt

SEQ ID NO: 2432635 - DNA, 25 bp, Homo sapien
atgaaatagccattccctactgagg

SEQ ID NO: 2432636 - DNA, 25 bp, Homo sapien
ttccctactgaggtcccagaacagc

SEQ ID NO: 2432637 - DNA, 25 bp, Homo sapien
tagccattccctactgaggtcccag

SEQ ID NO: 2432638 - DNA, 25 bp, Homo sapien
acaggaagacagtcctttaggcctc

SEQ ID NO: 2432639 - DNA, 25 bp, Homo sapien
gtcactacatgagggaaacaggtgg

SEQ ID NO: 2432640 - DNA, 25 bp, Homo sapien
tggccaggtcactacatgagggaaa

SEQ ID NO: 2432641 - DNA, 25 bp, Homo sapien
caggtcactacatgagggaaacagg

SEQ ID NO: 2432642 - DNA, 25 bp, Homo sapien
cctggccaggtcactacatgaggga

SEQ ID NO: 2432643 - DNA, 25 bp, Homo sapien
aaatgatcttcaagggttagtgaag

SEQ ID NO: 2432644 - DNA, 25 bp, Homo sapien
aatgatcttcaagggttagtgaagg

SEQ ID NO: 2432645 - DNA, 25 bp, Homo sapien
gatcttcaagggttagtgaaggatc

SEQ ID NO: 2432646 - DNA, 25 bp, Homo sapien
tgatcttcaagggttagtgaaggat

SEQ ID NO: 2432647 - DNA, 25 bp, Homo sapien
ttttacaagagcgtccaacaaatga

SEQ ID NO: 2432648 - DNA, 25 bp, Homo sapien
caaaagcactgagagcttttgctgc

SEQ ID NO: 2432649 - DNA, 25 bp, Homo sapien
gaaaagcccatcagcaataccaagg

SEQ ID NO: 2432650 - DNA, 25 bp, Homo sapien
tgctgccaagtgtaaaacatagacc

SEQ ID NO: 2432651 - DNA, 25 bp, Homo sapien
cactcttagctcctgtttgaaacca

SEQ ID NO: 2432652 - DNA, 25 bp, Homo sapien
ttcgcactggaatactgaatagcca

SEQ ID NO: 2432653 - DNA, 25 bp, Homo sapien
tccaactgaattggcaattcgcact

SEQ ID NO: 2432654 - DNA, 25 bp, Homo sapien
ctgaatagccaacagaccacaagga

SEQ ID NO: 2432655 - DNA, 25 bp, Homo sapien
gcctgaaccaaagcagagcttctct

SEQ ID NO: 2432656 - DNA, 25 bp, Homo sapien
gacaaaaagtagattcatcgtggcc

SEQ ID NO: 2432657 - DNA, 25 bp, Homo sapien
tgtcgattctcctaaccacaaagac

SEQ ID NO: 2432658 - DNA, 25 bp, Homo sapien
tcttttggagatggtgaaaaccttc

SEQ ID NO: 2432659 - DNA, 25 bp, Homo sapien
cagaggtaaactctcagtgggctga

SEQ ID NO: 2432660 - DNA, 25 bp, Homo sapien
actctcagtgggctgaagctcagca

SEQ ID NO: 2432661 - DNA, 25 bp, Homo sapien
cactgaactccagaggtaaactctc

SEQ ID NO: 2432662 - DNA, 25 bp, Homo sapien
tctcagtgggctgaagctcagcagc

SEQ ID NO: 2432663 - DNA, 25 bp, Homo sapien
cagggatcctcagagaggcttacag

SEQ ID NO: 2432664 - DNA, 25 bp, Homo sapien
tgttgcagggtacctcttcagatcc

SEQ ID NO: 2432665 - DNA, 25 bp, Homo sapien
caggaacaggtttgttgcagggtac

SEQ ID NO: 2432666 - DNA, 25 bp, Homo sapien
gcagcacttgaagagaacctgattc

SEQ ID NO: 2432667 - DNA, 25 bp, Homo sapien
tgtagaaaaatggtcaagggaaata

SEQ ID NO: 2432668 - DNA, 25 bp, Homo sapien
ctgtagaaaaatggtcaagggaaat

SEQ ID NO: 2432669 - DNA, 25 bp, Homo sapien
atggtcaagggaaataaaacacaat

SEQ ID NO: 2432670 - DNA, 25 bp, Homo sapien
ttttttaggggagtgtgctagtaca

SEQ ID NO: 2432671 - DNA, 25 bp, Homo sapien
gggagtgtgctagtacagaggaatc

SEQ ID NO: 2432672 - DNA, 25 bp, Homo sapien
ttttaggggagtgtgctagtacaga

SEQ ID NO: 2432673 - DNA, 25 bp, Homo sapien
agtgtgctagtacagaggaatcctt

SEQ ID NO: 2432674 - DNA, 25 bp, Homo sapien
aaggactttcacaagtctcttatgt

SEQ ID NO: 2432675 - DNA, 25 bp, Homo sapien
taaagagttaacaggtcaccaatgg

SEQ ID NO: 2432676 - DNA, 25 bp, Homo sapien
tgtctccattagaccacagtaaaga

SEQ ID NO: 2432677 - DNA, 25 bp, Homo sapien
tcaccaatggcagtcgcatctttct

SEQ ID NO: 2432678 - DNA, 25 bp, Homo sapien
tccattagaccacagtaaagagtta

SEQ ID NO: 2432679 - DNA, 25 bp, Homo sapien
gggtctacttacacgtgcattttct

SEQ ID NO: 2432680 - DNA, 25 bp, Homo sapien
gaataaggacctctatgataatcca

SEQ ID NO: 2432681 - DNA, 25 bp, Homo sapien
tgacctttaacaacacaagcttgaa

SEQ ID NO: 2432682 - DNA, 25 bp, Homo sapien
cagtaagccataaggctattagcag

SEQ ID NO: 2432683 - DNA, 25 bp, Homo sapien
tctttctaatgaattgaccattaca

SEQ ID NO: 2432684 - DNA, 25 bp, Homo sapien
gattggaacaacgaacatcatccac

SEQ ID NO: 2432685 - DNA, 25 bp, Homo sapien
gactgattggaacaacgaacatcat

SEQ ID NO: 2432686 - DNA, 25 bp, Homo sapien
tggaacaacgaacatcatccacaaa

SEQ ID NO: 2432687 - DNA, 25 bp, Homo sapien
gaagagactgattggaacaacgaac

SEQ ID NO: 2432688 - DNA, 25 bp, Homo sapien
ctctgactggaacgagtggtatggg

SEQ ID NO: 2432689 - DNA, 25 bp, Homo sapien
tctgactggaacgagtggtatgggc

SEQ ID NO: 2432690 - DNA, 25 bp, Homo sapien
tctgtggccagcattctccgttcct

SEQ ID NO: 2432691 - DNA, 25 bp, Homo sapien
agttctctcgttctttggccaaaag

SEQ ID NO: 2432692 - DNA, 25 bp, Homo sapien
ttccactccatagcgctggcggtat

SEQ ID NO: 2432693 - DNA, 25 bp, Homo sapien
tggcggtatcgtcgcagacatttta

SEQ ID NO: 2432694 - DNA, 25 bp, Homo sapien
agtcaagatgttatttgccaagcaa

SEQ ID NO: 2432695 - DNA, 25 bp, Homo sapien
tcaagatgttatttgccaagcaatc

SEQ ID NO: 2432696 - DNA, 25 bp, Homo sapien
aagatgttatttgccaagcaatcca

SEQ ID NO: 2432697 - DNA, 25 bp, Homo sapien
caagatgttatttgccaagcaatcc

SEQ ID NO: 2432698 - DNA, 25 bp, Homo sapien
cagcttgttggaactggcataaaac

SEQ ID NO: 2432699 - DNA, 25 bp, Homo sapien
acagcttgttggaactggcataaaa

SEQ ID NO: 2432700 - DNA, 25 bp, Homo sapien
aacagcttgttggaactggcataaa

SEQ ID NO: 2432701 - DNA, 25 bp, Homo sapien
cagatgctgaagtcgtttaaactga

SEQ ID NO: 2432702 - DNA, 25 bp, Homo sapien
cgattatgtaagtatcggcgcttct

SEQ ID NO: 2432703 - DNA, 25 bp, Homo sapien
gatcaatatacaacgactgcaaacg

SEQ ID NO: 2432704 - DNA, 25 bp, Homo sapien
gcaaacgaattagcttttcacgcat

SEQ ID NO: 2432705 - DNA, 25 bp, Homo sapien
gccacttcttctgctgtgtagacac

SEQ ID NO: 2432706 - DNA, 25 bp, Homo sapien
ttcttctgctgtgtagacaccagca

SEQ ID NO: 2432707 - DNA, 25 bp, Homo sapien
aatcagggccacttcttctgctgtg

SEQ ID NO: 2432708 - DNA, 25 bp, Homo sapien
ttctgctgtgtagacaccagcatgt

SEQ ID NO: 2432709 - DNA, 25 bp, Homo sapien
tttgtttcactcaccgtctgatcat

SEQ ID NO: 2432710 - DNA, 25 bp, Homo sapien
gttctctggctctgatttatgcaat

SEQ ID NO: 2432711 - DNA, 25 bp, Homo sapien
gattaatatatggtagactgttctc

SEQ ID NO: 2432712 - DNA, 25 bp, Homo sapien
cctgggctgtaacatgataaaaccc

SEQ ID NO: 2432713 - DNA, 25 bp, Homo sapien
tcagaaaaatgggttatgcctacat

SEQ ID NO: 2432714 - DNA, 25 bp, Homo sapien
gccagactttcagagccggacatta

SEQ ID NO: 2432715 - DNA, 25 bp, Homo sapien
ttacttaaagatgaatgcgccagac

SEQ ID NO: 2432716 - DNA, 25 bp, Homo sapien
gctggttcatgtaacagatggctca

SEQ ID NO: 2432717 - DNA, 25 bp, Homo sapien
tgtctatgctatcagcttcactgtc

SEQ ID NO: 2432718 - DNA, 25 bp, Homo sapien
cttcttgatcactgtctatgctatc

SEQ ID NO: 2432719 - DNA, 25 bp, Homo sapien
gatcactgtctatgctatcagcttc

SEQ ID NO: 2432720 - DNA, 25 bp, Homo sapien
actgtctatgctatcagcttcactg

SEQ ID NO: 2432721 - DNA, 25 bp, Homo sapien
agctggcacaggagtgtttcaccca

SEQ ID NO: 2432722 - DNA, 25 bp, Homo sapien
gtcttagcatatgagctcagctggc

SEQ ID NO: 2432723 - DNA, 25 bp, Homo sapien
ggcttcactgcgactactttctgga

SEQ ID NO: 2432724 - DNA, 25 bp, Homo sapien
tgcgactactttctggagtctgaga

SEQ ID NO: 2432725 - DNA, 25 bp, Homo sapien
attcctacggacatgttcagcacag

SEQ ID NO: 2432726 - DNA, 25 bp, Homo sapien
cagggcattcctacggacatgttca

SEQ ID NO: 2432727 - DNA, 25 bp, Homo sapien
ggcattcctacggacatgttcagca

SEQ ID NO: 2432728 - DNA, 25 bp, Homo sapien
tgccagggcattcctacggacatgt

SEQ ID NO: 2432729 - DNA, 25 bp, Homo sapien
gaatgcacaagacagaggttcctga

SEQ ID NO: 2432730 - DNA, 25 bp, Homo sapien
tatgcttaatgcaaaactcctgccc

SEQ ID NO: 2432731 - DNA, 25 bp, Homo sapien
gcttgaagggtgcattcttgtcttc

SEQ ID NO: 2432732 - DNA, 25 bp, Homo sapien
tcttcgtcgatatataactacactg

SEQ ID NO: 2432733 - DNA, 25 bp, Homo sapien
tggagtgatcctcccccgattggtt

SEQ ID NO: 2432734 - DNA, 25 bp, Homo sapien
tggttggcaagacgtgaatccgaat

SEQ ID NO: 2432735 - DNA, 25 bp, Homo sapien
gattggttggcaagacgtgaatccg

SEQ ID NO: 2432736 - DNA, 25 bp, Homo sapien
gatcctcccccgattggttggcaag

SEQ ID NO: 2432737 - DNA, 25 bp, Homo sapien
cagatcgcgcggacagtttccaaag

SEQ ID NO: 2432738 - DNA, 25 bp, Homo sapien
ctccctttagcgtgtccctccatgc

SEQ ID NO: 2432739 - DNA, 25 bp, Homo sapien
tgcagaagtcgtccccgtaaggtac

SEQ ID NO: 2432740 - DNA, 25 bp, Homo sapien
caagtctccacaggcatctgtggct

SEQ ID NO: 2432741 - DNA, 25 bp, Homo sapien
aagggaagcgacaacaccagcccca

SEQ ID NO: 2432742 - DNA, 25 bp, Homo sapien
cacgaagggaagcgacaacaccagc

SEQ ID NO: 2432743 - DNA, 25 bp, Homo sapien
cgcacgccgcctttgtcccggcctg

SEQ ID NO: 2432744 - DNA, 25 bp, Homo sapien
cgaagggaagcgacaacaccagccc

SEQ ID NO: 2432745 - DNA, 25 bp, Homo sapien
tacggctccagtcaccggagatcct

SEQ ID NO: 2432746 - DNA, 25 bp, Homo sapien
cattttgtcctacggctccagtcac

SEQ ID NO: 2432747 - DNA, 25 bp, Homo sapien
ctcagagcgcacgactgggcctggc

SEQ ID NO: 2432748 - DNA, 25 bp, Homo sapien
tcggaagcctatgcgagcgccattt

SEQ ID NO: 2432749 - DNA, 25 bp, Homo sapien
ctttgaggcggagtagcagctctga

SEQ ID NO: 2432750 - DNA, 25 bp, Homo sapien
caaaaagagcgaaatagcagcccaa

SEQ ID NO: 2432751 - DNA, 25 bp, Homo sapien
gcagctctgagctgacaaaaagagc

SEQ ID NO: 2432752 - DNA, 25 bp, Homo sapien
agactgactctgacactgctttgag

SEQ ID NO: 2432753 - DNA, 25 bp, Homo sapien
gagctgcgctgcgccgcactctgcc

SEQ ID NO: 2432754 - DNA, 25 bp, Homo sapien
gctgcgctgcgccgcactctgccgc

SEQ ID NO: 2432755 - DNA, 25 bp, Homo sapien
agctgcgctgcgccgcactctgccg

SEQ ID NO: 2432756 - DNA, 25 bp, Homo sapien
ggagctgcgctgcgccgcactctgc

SEQ ID NO: 2432757 - DNA, 25 bp, Homo sapien
caaagagcccttactataatggtca

SEQ ID NO: 2432758 - DNA, 25 bp, Homo sapien
cataacagcagtagatatcccaggg

SEQ ID NO: 2432759 - DNA, 25 bp, Homo sapien
cagattgagaaacatacttgacagc

SEQ ID NO: 2432760 - DNA, 25 bp, Homo sapien
gctgaggtgccccaaggaagacaga

SEQ ID NO: 2432761 - DNA, 25 bp, Homo sapien
ctgatgaaggacatacttgctctgg

SEQ ID NO: 2432762 - DNA, 25 bp, Homo sapien
gatgaaggacatacttgctctggct

SEQ ID NO: 2432763 - DNA, 25 bp, Homo sapien
gaaggacatacttgctctggcttca

SEQ ID NO: 2432764 - DNA, 25 bp, Homo sapien
aggacatacttgctctggcttcaat

SEQ ID NO: 2432765 - DNA, 25 bp, Homo sapien
caaccatactgggatagacagggcc

SEQ ID NO: 2432766 - DNA, 25 bp, Homo sapien
tatcttaagacagtaccaggaggca

SEQ ID NO: 2432767 - DNA, 25 bp, Homo sapien
ggactacacggcacaaagcaactct

SEQ ID NO: 2432768 - DNA, 25 bp, Homo sapien
tgatctactagtgcaaaggccggac

SEQ ID NO: 2432769 - DNA, 25 bp, Homo sapien
caatttattccctagtccaaggatg

SEQ ID NO: 2432770 - DNA, 25 bp, Homo sapien
caccctcctaactatgtctcaatat

SEQ ID NO: 2432771 - DNA, 25 bp, Homo sapien
gaaaatagttaaatgcatgagacag

SEQ ID NO: 2432772 - DNA, 25 bp, Homo sapien
gacagcagatatatagccaaggcct

SEQ ID NO: 2432773 - DNA, 25 bp, Homo sapien
gaggagattccaccagaccgaggat

SEQ ID NO: 2432774 - DNA, 25 bp, Homo sapien
tgagggacacgagttttacagctgg

SEQ ID NO: 2432775 - DNA, 25 bp, Homo sapien
ggctactatgttttggatcaccagg

SEQ ID NO: 2432776 - DNA, 25 bp, Homo sapien
gatcaccaggacgtttgttcccagt

SEQ ID NO: 2432777 - DNA, 25 bp, Homo sapien
caaaactgtgataccggctctaacc

SEQ ID NO: 2432778 - DNA, 25 bp, Homo sapien
tctcaagcctacttctaatctcagg

SEQ ID NO: 2432779 - DNA, 25 bp, Homo sapien
taatctcaggcttctaagaggcaaa

SEQ ID NO: 2432780 - DNA, 25 bp, Homo sapien
tattcctgaataaggctttgacaag

SEQ ID NO: 2432781 - DNA, 25 bp, Homo sapien
tgcgtttgagcctgttgggagtttt

SEQ ID NO: 2432782 - DNA, 25 bp, Homo sapien
aaatgcgtttgagcctgttgggagt

SEQ ID NO: 2432783 - DNA, 25 bp, Homo sapien
aattccaaatgcgtttgagcctgtt

SEQ ID NO: 2432784 - DNA, 25 bp, Homo sapien
attccaaatgcgtttgagcctgttg

SEQ ID NO: 2432785 - DNA, 25 bp, Homo sapien
tacaagtaaaacagaacattcaaga

SEQ ID NO: 2432786 - DNA, 25 bp, Homo sapien
agtaaaacagaacattcaagaaaga

SEQ ID NO: 2432787 - DNA, 25 bp, Homo sapien
caagtaaaacagaacattcaagaaa

SEQ ID NO: 2432788 - DNA, 25 bp, Homo sapien
ctacaagtaaaacagaacattcaag

SEQ ID NO: 2432789 - DNA, 25 bp, Homo sapien
atgaaacaagaataacctgaactac

SEQ ID NO: 2432790 - DNA, 25 bp, Homo sapien
gtcacctttggccagctatgtgaca

SEQ ID NO: 2432791 - DNA, 25 bp, Homo sapien
ataacctgaactactaactaactat

SEQ ID NO: 2432792 - DNA, 25 bp, Homo sapien
cctttggccagctatgtgacagatc

SEQ ID NO: 2432793 - DNA, 25 bp, Homo sapien
tggcgtcaacatactcccaccagtg

SEQ ID NO: 2432794 - DNA, 25 bp, Homo sapien
cgtcagttgagactgggatctccca

SEQ ID NO: 2432795 - DNA, 25 bp, Homo sapien
taaaagttccaaggtcacagtggcg

SEQ ID NO: 2432796 - DNA, 25 bp, Homo sapien
gcaagccaggtgaatgcagacacag

SEQ ID NO: 2432797 - DNA, 25 bp, Homo sapien
tgcaggctaaatgtggtcaaatgca

SEQ ID NO: 2432798 - DNA, 25 bp, Homo sapien
ctgcaggctaaatgtggtcaaatgc

SEQ ID NO: 2432799 - DNA, 25 bp, Homo sapien
caggctaaatgtggtcaaatgcagg

SEQ ID NO: 2432800 - DNA, 25 bp, Homo sapien
ttggttgccatgaagtaagaagtct

SEQ ID NO: 2432801 - DNA, 25 bp, Homo sapien
gttggttgccatgaagtaagaagtc

SEQ ID NO: 2432802 - DNA, 25 bp, Homo sapien
gctgcttccagatctaggtactcaa

SEQ ID NO: 2432803 - DNA, 25 bp, Homo sapien
aaatgcaattcttggacctgctccc

SEQ ID NO: 2432804 - DNA, 25 bp, Homo sapien
tattctgcacaccacatatctgagg

SEQ ID NO: 2432805 - DNA, 25 bp, Homo sapien
taaatgtttggagaagggtgcaagc

SEQ ID NO: 2432806 - DNA, 25 bp, Homo sapien
gggtgatcaattgttagttcaaagc

SEQ ID NO: 2432807 - DNA, 25 bp, Homo sapien
tgagtatgtgggtgatcaattgtta

SEQ ID NO: 2432808 - DNA, 25 bp, Homo sapien
tgtgggtgatcaattgttagttcaa

SEQ ID NO: 2432809 - DNA, 25 bp, Homo sapien
tatgtgggtgatcaattgttagttc

SEQ ID NO: 2432810 - DNA, 25 bp, Homo sapien
ccagatcttgaacttgttgcaaata

SEQ ID NO: 2432811 - DNA, 25 bp, Homo sapien
aatgaccagatcttgaacttgttgc

SEQ ID NO: 2432812 - DNA, 25 bp, Homo sapien
ctaaagtctgcaaaattatgctttc

SEQ ID NO: 2432813 - DNA, 25 bp, Homo sapien
ttatgctttctaaaatgaccagatc

SEQ ID NO: 2432814 - DNA, 25 bp, Homo sapien
gttgccagagcttgtctcgaactgg

SEQ ID NO: 2432815 - DNA, 25 bp, Homo sapien
actttgttgccagagcttgtctcga

SEQ ID NO: 2432816 - DNA, 25 bp, Homo sapien
cactttgttgccagagcttgtctcg

SEQ ID NO: 2432817 - DNA, 25 bp, Homo sapien
gccagagcttgtctcgaactggact

SEQ ID NO: 2432818 - DNA, 25 bp, Homo sapien
aagatccaggcatgcttgggagtag

SEQ ID NO: 2432819 - DNA, 25 bp, Homo sapien
gatccaggcatgcttgggagtaggg

SEQ ID NO: 2432820 - DNA, 25 bp, Homo sapien
ccaggcatgcttgggagtagggaaa

SEQ ID NO: 2432821 - DNA, 25 bp, Homo sapien
tccaggcatgcttgggagtagggaa

SEQ ID NO: 2432822 - DNA, 25 bp, Homo sapien
tgaggatggagacaagtatgtgcta

SEQ ID NO: 2432823 - DNA, 25 bp, Homo sapien
ctcacttctagtatcaggaagggat

SEQ ID NO: 2432824 - DNA, 25 bp, Homo sapien
gattcctgaggatggagacaagtat

SEQ ID NO: 2432825 - DNA, 25 bp, Homo sapien
cctgaggatggagacaagtatgtgc

SEQ ID NO: 2432826 - DNA, 25 bp, Homo sapien
ctccactttagctgctagaaacaag

SEQ ID NO: 2432827 - DNA, 25 bp, Homo sapien
ctgctcctccactttagctgctaga

SEQ ID NO: 2432828 - DNA, 25 bp, Homo sapien
tcctccactttagctgctagaaaca

SEQ ID NO: 2432829 - DNA, 25 bp, Homo sapien
gctcctccactttagctgctagaaa

SEQ ID NO: 2432830 - DNA, 25 bp, Homo sapien
atagtattgatttcagacaagacca

SEQ ID NO: 2432831 - DNA, 25 bp, Homo sapien
accctgatgtcacctatgctatact

SEQ ID NO: 2432832 - DNA, 25 bp, Homo sapien
tagtattgatttcagacaagaccat

SEQ ID NO: 2432833 - DNA, 25 bp, Homo sapien
atgctatacttttctagagtaagtt

SEQ ID NO: 2432834 - DNA, 25 bp, Homo sapien
aaaggaccctcacctacagtgctgg

SEQ ID NO: 2432835 - DNA, 25 bp, Homo sapien
tgacagagtaaaaacctatcttggg

SEQ ID NO: 2432836 - DNA, 25 bp, Homo sapien
taaactaaattatggcaccactgca

SEQ ID NO: 2432837 - DNA, 25 bp, Homo sapien
tagcaagactttataggctgggtgc

SEQ ID NO: 2432838 - DNA, 25 bp, Homo sapien
ccagggaactgtgtgaaggactgaa

SEQ ID NO: 2432839 - DNA, 25 bp, Homo sapien
ttccagggaactgtgtgaaggactg

SEQ ID NO: 2432840 - DNA, 25 bp, Homo sapien
gggaactgtgtgaaggactgaatca

SEQ ID NO: 2432841 - DNA, 25 bp, Homo sapien
atttccagggaactgtgtgaaggac

SEQ ID NO: 2432842 - DNA, 25 bp, Homo sapien
tagcagtgttgatagtcaattgtga

SEQ ID NO: 2432843 - DNA, 25 bp, Homo sapien
atagcagtgttgatagtcaattgtg

SEQ ID NO: 2432844 - DNA, 25 bp, Homo sapien
agcagtgttgatagtcaattgtgag

SEQ ID NO: 2432845 - DNA, 25 bp, Homo sapien
ctgcccgccactacgccggggtaat

SEQ ID NO: 2432846 - DNA, 25 bp, Homo sapien
gctgcccgccactacgccggggtaa

SEQ ID NO: 2432847 - DNA, 25 bp, Homo sapien
attacagctgcccgccactacgccg

SEQ ID NO: 2432848 - DNA, 25 bp, Homo sapien
acagctgcccgccactacgccgggg

SEQ ID NO: 2432849 - DNA, 25 bp, Homo sapien
cattagattcgtgggtatcccctac

SEQ ID NO: 2432850 - DNA, 25 bp, Homo sapien
cacaaagccgggaaggatacgaatt

SEQ ID NO: 2432851 - DNA, 25 bp, Homo sapien
tgagcgagcgggaaatcaactctgc

SEQ ID NO: 2432852 - DNA, 25 bp, Homo sapien
gagaatcttaacgtcaccagagcag

SEQ ID NO: 2432853 - DNA, 25 bp, Homo sapien
actccaaggccgaaggcctaggcca

SEQ ID NO: 2432854 - DNA, 25 bp, Homo sapien
gccgaaggcctaggccacaaggata

SEQ ID NO: 2432855 - DNA, 25 bp, Homo sapien
agagcatggcgggaccaactccaag

SEQ ID NO: 2432856 - DNA, 25 bp, Homo sapien
ctgagacccggacgccagagcatgg

SEQ ID NO: 2432857 - DNA, 25 bp, Homo sapien
gacgggatgggctattttccagctg

SEQ ID NO: 2432858 - DNA, 25 bp, Homo sapien
ctgaagcagattggccgcctgctgg

SEQ ID NO: 2432859 - DNA, 25 bp, Homo sapien
cgcctgctggcgataagaaagttct

SEQ ID NO: 2432860 - DNA, 25 bp, Homo sapien
ttctttatctgggtccacgccaaaa

SEQ ID NO: 2432861 - DNA, 25 bp, Homo sapien
tagccgagttaacagccaatatgcg

SEQ ID NO: 2432862 - DNA, 25 bp, Homo sapien
gggcaactgcgacttgacgaacttc

SEQ ID NO: 2432863 - DNA, 25 bp, Homo sapien
gaaaaaaccttgaggcgaggacgca

SEQ ID NO: 2432864 - DNA, 25 bp, Homo sapien
tcaaaggacctacttccggaatgca

SEQ ID NO: 2432865 - DNA, 25 bp, Homo sapien
ccaggaaaggaatgtctacccagat

SEQ ID NO: 2432866 - DNA, 25 bp, Homo sapien
gagagatccctgctatgcatctggt

SEQ ID NO: 2432867 - DNA, 25 bp, Homo sapien
gttctgcaaatatgccaatcccagg

SEQ ID NO: 2432868 - DNA, 25 bp, Homo sapien
tatgtgtccaatatcctgattccag

SEQ ID NO: 2432869 - DNA, 25 bp, Homo sapien
tcaagaggccttgaagccgggagtt

SEQ ID NO: 2432870 - DNA, 25 bp, Homo sapien
gagttcctaaagaatggctgggatg

SEQ ID NO: 2432871 - DNA, 25 bp, Homo sapien
tatgtctgagttcctaaagaatggc

SEQ ID NO: 2432872 - DNA, 25 bp, Homo sapien
tactcaagaggccttgaagccggga

SEQ ID NO: 2432873 - DNA, 25 bp, Homo sapien
cttggagtgagcaaaggaagccatt

SEQ ID NO: 2432874 - DNA, 25 bp, Homo sapien
tctcttggagatgggcttactagca

SEQ ID NO: 2432875 - DNA, 25 bp, Homo sapien
taatagcatctaaatgtgaggtggt

SEQ ID NO: 2432876 - DNA, 25 bp, Homo sapien
aataatagatcagtggaccccatct

SEQ ID NO: 2432877 - DNA, 25 bp, Homo sapien
ccacagtggttacattataaaacca

SEQ ID NO: 2432878 - DNA, 25 bp, Homo sapien
tatttcactgaaatacatggttcac

SEQ ID NO: 2432879 - DNA, 25 bp, Homo sapien
gaaatacatggttcaccatcctccc

SEQ ID NO: 2432880 - DNA, 25 bp, Homo sapien
tttcactgaaatacatggttcacca

SEQ ID NO: 2432881 - DNA, 25 bp, Homo sapien
gcagagacaagccacccaaggctga

SEQ ID NO: 2432882 - DNA, 25 bp, Homo sapien
tggtacggggatccagggtgtggac

SEQ ID NO: 2432883 - DNA, 25 bp, Homo sapien
gatccagggtgtggacaggccctcc

SEQ ID NO: 2432884 - DNA, 25 bp, Homo sapien
cctcccacctggcaagaagcagaga

SEQ ID NO: 2432885 - DNA, 25 bp, Homo sapien
ctccacagggagctggtgtcagaag

SEQ ID NO: 2432886 - DNA, 25 bp, Homo sapien
gactaatgaagtacctgatggccca

SEQ ID NO: 2432887 - DNA, 25 bp, Homo sapien
tggcttaaataggtacagacagaga

SEQ ID NO: 2432888 - DNA, 25 bp, Homo sapien
catttggttgatgcatgaagatgcc

SEQ ID NO: 2432889 - DNA, 25 bp, Homo sapien
acaaattcaggccagagtcaaggag

SEQ ID NO: 2432890 - DNA, 25 bp, Homo sapien
tttccagcttgagggcagacgagca

SEQ ID NO: 2432891 - DNA, 25 bp, Homo sapien
gaacggcacttagggatttggcaca

SEQ ID NO: 2432892 - DNA, 25 bp, Homo sapien
gaaacatgctagactcaggctgaag

SEQ ID NO: 2432893 - DNA, 25 bp, Homo sapien
tctgctctgtgcataggagggacac

SEQ ID NO: 2432894 - DNA, 25 bp, Homo sapien
gcagctagaacctggtacaggtccg

SEQ ID NO: 2432895 - DNA, 25 bp, Homo sapien
ttgaccacccctcgacactccagct

SEQ ID NO: 2432896 - DNA, 25 bp, Homo sapien
tcgacactccagctggtagcccttg

SEQ ID NO: 2432897 - DNA, 25 bp, Homo sapien
gaagtaggtggtcatctcccccttg

SEQ ID NO: 2432898 - DNA, 25 bp, Homo sapien
gggagcccgcttagcctggaatcct

SEQ ID NO: 2432899 - DNA, 25 bp, Homo sapien
aggggagcccgcttagcctggaatc

SEQ ID NO: 2432900 - DNA, 25 bp, Homo sapien
gagcccgcttagcctggaatccttc

SEQ ID NO: 2432901 - DNA, 25 bp, Homo sapien
gaggggagcccgcttagcctggaat

SEQ ID NO: 2432902 - DNA, 25 bp, Homo sapien
gatgtcatactgtggcttccgagcc

SEQ ID NO: 2432903 - DNA, 25 bp, Homo sapien
tacgactagagacattcactgtgtt

SEQ ID NO: 2432904 - DNA, 25 bp, Homo sapien
cccgtgctgtccatacgactagaga

SEQ ID NO: 2432905 - DNA, 25 bp, Homo sapien
acctgccacgactgggcccatgttc

SEQ ID NO: 2432906 - DNA, 25 bp, Homo sapien
aatagtccatctctagtagccatgc

SEQ ID NO: 2432907 - DNA, 25 bp, Homo sapien
tacctcttattggactggtcacaga

SEQ ID NO: 2432908 - DNA, 25 bp, Homo sapien
taagccagtaaatggagcagccaga

SEQ ID NO: 2432909 - DNA, 25 bp, Homo sapien
tcacagataaggacagaagtattca

SEQ ID NO: 2432910 - DNA, 25 bp, Homo sapien
cagcttcacctggaaaaagtcctgg

SEQ ID NO: 2432911 - DNA, 25 bp, Homo sapien
tcctgggaaaacccgccaagcaaca

SEQ ID NO: 2432912 - DNA, 25 bp, Homo sapien
gatcgtaggtgctggcgttcagccc

SEQ ID NO: 2432913 - DNA, 25 bp, Homo sapien
gagcggcccacctgatcgtaggtgc

SEQ ID NO: 2432914 - DNA, 25 bp, Homo sapien
tctgctccatgagccgcatggcgta

SEQ ID NO: 2432915 - DNA, 25 bp, Homo sapien
taggtgctaccaatcgtcttgatct

SEQ ID NO: 2432916 - DNA, 25 bp, Homo sapien
gacctggctgtcaaggcaaagaccc

SEQ ID NO: 2432917 - DNA, 25 bp, Homo sapien
tccagaacagtgaacagcccattcc

SEQ ID NO: 2432918 - DNA, 25 bp, Homo sapien
tacccttacccctgatgactctggg

SEQ ID NO: 2432919 - DNA, 25 bp, Homo sapien
tgaacaacacaaggagacctggctg

SEQ ID NO: 2432920 - DNA, 25 bp, Homo sapien
caccaccagccaactggaaaagtac

SEQ ID NO: 2432921 - DNA, 25 bp, Homo sapien
tggtctccaagtaccccccactctc

SEQ ID NO: 2432922 - DNA, 25 bp, Homo sapien
cattccaatccctggtctccaagta

SEQ ID NO: 2432923 - DNA, 25 bp, Homo sapien
tctctgccaccaccagccaactgga

SEQ ID NO: 2432924 - DNA, 25 bp, Homo sapien
tggcaatggaggcaaacataacagc

SEQ ID NO: 2432925 - DNA, 25 bp, Homo sapien
agagttcatcattgcggcgctcccg

SEQ ID NO: 2432926 - DNA, 25 bp, Homo sapien
gcctccggttgtatgcctgtagctc

SEQ ID NO: 2432927 - DNA, 25 bp, Homo sapien
ctcagagaagttggcaatggaggca

SEQ ID NO: 2432928 - DNA, 25 bp, Homo sapien
ctaggcgggcagtcgactccacctg

SEQ ID NO: 2432929 - DNA, 25 bp, Homo sapien
gaagtctaggcgggcagtcgactcc

SEQ ID NO: 2432930 - DNA, 25 bp, Homo sapien
agaggaagtctaggcgggcagtcga

SEQ ID NO: 2432931 - DNA, 25 bp, Homo sapien
ccagaggaagtctaggcgggcagtc

SEQ ID NO: 2432932 - DNA, 25 bp, Homo sapien
gcagatacagcgccagcgcaaacac

SEQ ID NO: 2432933 - DNA, 25 bp, Homo sapien
gatacagcgccagcgcaaacaccag

SEQ ID NO: 2432934 - DNA, 25 bp, Homo sapien
caaacaccagcagaatcacaggggt

SEQ ID NO: 2432935 - DNA, 25 bp, Homo sapien
gaatcacaggggtcatatatttgag

SEQ ID NO: 2432936 - DNA, 25 bp, Homo sapien
ccatcaaaggtctcattggaagaag

SEQ ID NO: 2432937 - DNA, 25 bp, Homo sapien
agtccagcccatcaaaggtctcatt

SEQ ID NO: 2432938 - DNA, 25 bp, Homo sapien
agcccatcaaaggtctcattggaag

SEQ ID NO: 2432939 - DNA, 25 bp, Homo sapien
cagtccagcccatcaaaggtctcat

SEQ ID NO: 2432940 - DNA, 25 bp, Homo sapien
cacagtgacctagaaaggtgaggga

SEQ ID NO: 2432941 - DNA, 25 bp, Homo sapien
tcctggggtattaaaggacctgaga

SEQ ID NO: 2432942 - DNA, 25 bp, Homo sapien
gggtaactatttggggtcacatgct

SEQ ID NO: 2432943 - DNA, 25 bp, Homo sapien
tgttgtggcattccaaggcacaagg

SEQ ID NO: 2432944 - DNA, 25 bp, Homo sapien
caacttcccgatgctgctgatgtgc

SEQ ID NO: 2432945 - DNA, 25 bp, Homo sapien
gaagcagcaccaaatagatgagccc

SEQ ID NO: 2432946 - DNA, 25 bp, Homo sapien
catggacgccaagcagtaggtcata

SEQ ID NO: 2432947 - DNA, 25 bp, Homo sapien
tcagcagcatgttcccgatgaagta

SEQ ID NO: 2432948 - DNA, 25 bp, Homo sapien
ggcagaggcagcgttgggtgaaggc

SEQ ID NO: 2432949 - DNA, 25 bp, Homo sapien
gtggcagaggcagcgttgggtgaag

SEQ ID NO: 2432950 - DNA, 25 bp, Homo sapien
cagaggcagcgttgggtgaaggcag

SEQ ID NO: 2432951 - DNA, 25 bp, Homo sapien
gcagaggcagcgttgggtgaaggca

SEQ ID NO: 2432952 - DNA, 25 bp, Homo sapien
tggcacagaagggccaatgtctgtg

SEQ ID NO: 2432953 - DNA, 25 bp, Homo sapien
cccagcccctacaacacaccagggc

SEQ ID NO: 2432954 - DNA, 25 bp, Homo sapien
actctcctgcctgacctaaccttcc

SEQ ID NO: 2432955 - DNA, 25 bp, Homo sapien
acagaagggccaatgtctgtgccag

SEQ ID NO: 2432956 - DNA, 25 bp, Homo sapien
catccaggcccagagagtaattgag

SEQ ID NO: 2432957 - DNA, 25 bp, Homo sapien
tgatgtcagcaggtgttaaattcag

SEQ ID NO: 2432958 - DNA, 25 bp, Homo sapien
caggcccagagagtaattgagctgc

SEQ ID NO: 2432959 - DNA, 25 bp, Homo sapien
aggtgggcatggtgccctcacacag

SEQ ID NO: 2432960 - DNA, 25 bp, Homo sapien
tatatcagggtaaccaaggagggaa

SEQ ID NO: 2432961 - DNA, 25 bp, Homo sapien
catgggccttagtactcactcaggg

SEQ ID NO: 2432962 - DNA, 25 bp, Homo sapien
tgggctatgcccaggtaccttatac

SEQ ID NO: 2432963 - DNA, 25 bp, Homo sapien
tgcaaggtacctggtgaagccatgt

SEQ ID NO: 2432964 - DNA, 25 bp, Homo sapien
acaatgctgcgggacagacgttgca

SEQ ID NO: 2432965 - DNA, 25 bp, Homo sapien
taaacacaagcaggacggaaaagat

SEQ ID NO: 2432966 - DNA, 25 bp, Homo sapien
tatgtgcccgtgagcggacaatgct

SEQ ID NO: 2432967 - DNA, 25 bp, Homo sapien
cggaaaagatgccaactgcggtgct

SEQ ID NO: 2432968 - DNA, 25 bp, Homo sapien
ctagaggcatcaagagaccaagagt

SEQ ID NO: 2432969 - DNA, 25 bp, Homo sapien
tgtatcagccaaggaggaatggcaa

SEQ ID NO: 2432970 - DNA, 25 bp, Homo sapien
ccaagagttgaaggttgtatcagcc

SEQ ID NO: 2432971 - DNA, 25 bp, Homo sapien
gaggcatcaagagaccaagagttga

SEQ ID NO: 2432972 - DNA, 25 bp, Homo sapien
ggcatagatcccaagcatcagggtg

SEQ ID NO: 2432973 - DNA, 25 bp, Homo sapien
cagcacagatcagcacggtgattag

SEQ ID NO: 2432974 - DNA, 25 bp, Homo sapien
tggcatagatcccaagcatcagggt

SEQ ID NO: 2432975 - DNA, 25 bp, Homo sapien
atcagcacggtgattagcagcagca

SEQ ID NO: 2432976 - DNA, 25 bp, Homo sapien
gtaggctccgaagcggggatccacc

SEQ ID NO: 2432977 - DNA, 25 bp, Homo sapien
acaggcaacgtaggctccgaagcgg

SEQ ID NO: 2432978 - DNA, 25 bp, Homo sapien
tgagaagctggatgaagcagatgaa

SEQ ID NO: 2432979 - DNA, 25 bp, Homo sapien
acagggcacaggcaacgtaggctcc

SEQ ID NO: 2432980 - DNA, 25 bp, Homo sapien
gatggcacggctcaggaactcatcc

SEQ ID NO: 2432981 - DNA, 25 bp, Homo sapien
tccgcagctgatcaatgctgcgggc

SEQ ID NO: 2432982 - DNA, 25 bp, Homo sapien
aaggtgagcagaaaccggcgcacat

SEQ ID NO: 2432983 - DNA, 25 bp, Homo sapien
ggcgcacatggtccttccgcagctg

SEQ ID NO: 2432984 - DNA, 25 bp, Homo sapien
ttgtctttgctggaatcatcaatgc

SEQ ID NO: 2432985 - DNA, 25 bp, Homo sapien
tgtctttgctggaatcatcaatgcc

SEQ ID NO: 2432986 - DNA, 25 bp, Homo sapien
tccttggtccgggagaaggcacgat

SEQ ID NO: 2432987 - DNA, 25 bp, Homo sapien
gttggcccgagtccgctgcagcttg

SEQ ID NO: 2432988 - DNA, 25 bp, Homo sapien
gatcaggaacccagcgcggcatcag

SEQ ID NO: 2432989 - DNA, 25 bp, Homo sapien
tcagcccttccatggagttggcccg

SEQ ID NO: 2432990 - DNA, 25 bp, Homo sapien
gtgttgcccgagtgatgtggatgcg

SEQ ID NO: 2432991 - DNA, 25 bp, Homo sapien
tcgtagtccccgttcaggtactgca

SEQ ID NO: 2432992 - DNA, 25 bp, Homo sapien
gtacgcgttgcgctcgccaccacgg

SEQ ID NO: 2432993 - DNA, 25 bp, Homo sapien
gaaagtctcaatgtgctgctccttg

SEQ ID NO: 2432994 - DNA, 25 bp, Homo sapien
gaactgccatttccgcaagccaagg

SEQ ID NO: 2432995 - DNA, 25 bp, Homo sapien
gatgcccacgcgcatgttcacattc

SEQ ID NO: 2432996 - DNA, 25 bp, Homo sapien
agtgcacgcgcccgctgtggatgcc

SEQ ID NO: 2432997 - DNA, 25 bp, Homo sapien
attggaccacacatcgaactgccat

SEQ ID NO: 2432998 - DNA, 25 bp, Homo sapien
tcaatcatgtctacccccatctcca

SEQ ID NO: 2432999 - DNA, 25 bp, Homo sapien
gagatggcctcaatcatgtctaccc

SEQ ID NO: 2433000 - DNA, 25 bp, Homo sapien
agatggcctcaatcatgtctacccc

SEQ ID NO: 2433001 - DNA, 25 bp, Homo sapien
gcctcaatcatgtctacccccatct

SEQ ID NO: 2433002 - DNA, 25 bp, Homo sapien
tgaatgggaaggaattggagggaag

SEQ ID NO: 2433003 - DNA, 25 bp, Homo sapien
ctgaatgggaaggaattggagggaa

SEQ ID NO: 2433004 - DNA, 25 bp, Homo sapien
acctttactctcttgcccacccagc

SEQ ID NO: 2433005 - DNA, 25 bp, Homo sapien
taacctttactctcttgcccaccca

SEQ ID NO: 2433006 - DNA, 25 bp, Homo sapien
tccacgcatactctatctgccctca

SEQ ID NO: 2433007 - DNA, 25 bp, Homo sapien
aaagctatgctctcaccacggtcaa

SEQ ID NO: 2433008 - DNA, 25 bp, Homo sapien
gctgctgccagcaaagctatgctct

SEQ ID NO: 2433009 - DNA, 25 bp, Homo sapien
tatctgccctcaaatccccagctgc

SEQ ID NO: 2433010 - DNA, 25 bp, Homo sapien
ccaggcccaatcccaaggcccagca

SEQ ID NO: 2433011 - DNA, 25 bp, Homo sapien
gcccaatcccaaggcccagcaccct

SEQ ID NO: 2433012 - DNA, 25 bp, Homo sapien
aggcccaatcccaaggcccagcacc

SEQ ID NO: 2433013 - DNA, 25 bp, Homo sapien
caatcccaaggcccagcaccctcac

SEQ ID NO: 2433014 - DNA, 25 bp, Homo sapien
cgcagccagcttgtcaaaccgggca

SEQ ID NO: 2433015 - DNA, 25 bp, Homo sapien
cagggtcatgaccagctcctgcgca

SEQ ID NO: 2433016 - DNA, 25 bp, Homo sapien
tcaaaccgggcaaagagctcattca

SEQ ID NO: 2433017 - DNA, 25 bp, Homo sapien
gtcaaaccgggcaaagagctcattc

SEQ ID NO: 2433018 - DNA, 25 bp, Homo sapien
ttctgtatgtagatcttgtggaaca

SEQ ID NO: 2433019 - DNA, 25 bp, Homo sapien
ctttttttgtgttgatgtcttcttt

SEQ ID NO: 2433020 - DNA, 25 bp, Homo sapien
ggggcaataccgacagcagcagccg

SEQ ID NO: 2433021 - DNA, 25 bp, Homo sapien
gggcaataccgacagcagcagccgc

SEQ ID NO: 2433022 - DNA, 25 bp, Homo sapien
cgggcctggatgtaaccgcgggtct

SEQ ID NO: 2433023 - DNA, 25 bp, Homo sapien
tgtaaccgcgggtctcctgaaaggc

SEQ ID NO: 2433024 - DNA, 25 bp, Homo sapien
gcctggatgtaaccgcgggtctcct

SEQ ID NO: 2433025 - DNA, 25 bp, Homo sapien
ggagccgggcctggatgtaaccgcg

SEQ ID NO: 2433026 - DNA, 25 bp, Homo sapien
atgccaatgacgttggtgcagagga

SEQ ID NO: 2433027 - DNA, 25 bp, Homo sapien
tgtgcagatgccaatgacgttggtg

SEQ ID NO: 2433028 - DNA, 25 bp, Homo sapien
tgctggatagtgtgtgcagatgcca

SEQ ID NO: 2433029 - DNA, 25 bp, Homo sapien
tagtgtgtgcagatgccaatgacgt

SEQ ID NO: 2433030 - DNA, 25 bp, Homo sapien
gaggcagacagtgaccatctcctct

SEQ ID NO: 2433031 - DNA, 25 bp, Homo sapien
aggcagacagtgaccatctcctctg

SEQ ID NO: 2433032 - DNA, 25 bp, Homo sapien
ccctgtctgtccccaagccactgcc

SEQ ID NO: 2433033 - DNA, 25 bp, Homo sapien
cacaacttgctaggttctctgagga

SEQ ID NO: 2433034 - DNA, 25 bp, Homo sapien
aaaaggtacgttctggcattctggc

SEQ ID NO: 2433035 - DNA, 25 bp, Homo sapien
gatgtctgacagtgccctaagggca

SEQ ID NO: 2433036 - DNA, 25 bp, Homo sapien
ccaagaatgtgcctatcgagatcca

SEQ ID NO: 2433037 - DNA, 25 bp, Homo sapien
cagtcgagagcagggaacagatgcc

SEQ ID NO: 2433038 - DNA, 25 bp, Homo sapien
gaacggaactgcttcgactggaaca

SEQ ID NO: 2433039 - DNA, 25 bp, Homo sapien
ccacggttaagttgccaggccaaga

SEQ ID NO: 2433040 - DNA, 25 bp, Homo sapien
gatcaaatgcaaggtggagaggccc

SEQ ID NO: 2433041 - DNA, 25 bp, Homo sapien
catctggaagaagtaccgctggtac

SEQ ID NO: 2433042 - DNA, 25 bp, Homo sapien
ccattgcgttcaccccaggctgttt

SEQ ID NO: 2433043 - DNA, 25 bp, Homo sapien
catcccggaggcagctcatatagcg

SEQ ID NO: 2433044 - DNA, 25 bp, Homo sapien
cgcgaacgcttctgcccattgcgtt

SEQ ID NO: 2433045 - DNA, 25 bp, Homo sapien
tccgttcatccactttagggaccag

SEQ ID NO: 2433046 - DNA, 25 bp, Homo sapien
ggtgagaacccaagacacagtcagg

SEQ ID NO: 2433047 - DNA, 25 bp, Homo sapien
taaggctaggaatgtgagagcaacc

SEQ ID NO: 2433048 - DNA, 25 bp, Homo sapien
tagtattagagaccatccagtagga

SEQ ID NO: 2433049 - DNA, 25 bp, Homo sapien
gaggtaggcaacaagggtatcccca

SEQ ID NO: 2433050 - DNA, 25 bp, Homo sapien
tgcttgggccctggtggtggaggct

SEQ ID NO: 2433051 - DNA, 25 bp, Homo sapien
tagcctgggcaatagccatagcctg

SEQ ID NO: 2433052 - DNA, 25 bp, Homo sapien
gggcaatagccatagcctgaaaaaa

SEQ ID NO: 2433053 - DNA, 25 bp, Homo sapien
gccaggattgtgcaccactgaactc

SEQ ID NO: 2433054 - DNA, 25 bp, Homo sapien
tctatgctcacagagtaccctgagg

SEQ ID NO: 2433055 - DNA, 25 bp, Homo sapien
ggctggcccaagttatagagatcat

SEQ ID NO: 2433056 - DNA, 25 bp, Homo sapien
ccaaatgtccccttatcagtgaggc

SEQ ID NO: 2433057 - DNA, 25 bp, Homo sapien
catggcagttttatatggctggccc

SEQ ID NO: 2433058 - DNA, 25 bp, Homo sapien
cggcccggctccgcgcctgccctgg

SEQ ID NO: 2433059 - DNA, 25 bp, Homo sapien
ctgccggcccggctccgcgcctgcc

SEQ ID NO: 2433060 - DNA, 25 bp, Homo sapien
gcccggctccgcgcctgccctgggc

SEQ ID NO: 2433061 - DNA, 25 bp, Homo sapien
tgccggcccggctccgcgcctgccc

SEQ ID NO: 2433062 - DNA, 25 bp, Homo sapien
tcctccgagcccgcgcgtcctggcc

SEQ ID NO: 2433063 - DNA, 25 bp, Homo sapien
cctccgagcccgcgcgtcctggccg

SEQ ID NO: 2433064 - DNA, 25 bp, Homo sapien
ccccctcccgagctgtccagcgcag

SEQ ID NO: 2433065 - DNA, 25 bp, Homo sapien
tcgccccctcccgagctgtccagcg

SEQ ID NO: 2433066 - DNA, 25 bp, Homo sapien
ccctcccgagctgtccagcgcagcc

SEQ ID NO: 2433067 - DNA, 25 bp, Homo sapien
ctcccgagctgtccagcgcagccgc

SEQ ID NO: 2433068 - DNA, 25 bp, Homo sapien
ctcggggcccagtggagggacccag

SEQ ID NO: 2433069 - DNA, 25 bp, Homo sapien
gcatcttttacccaaagggctgtgc

SEQ ID NO: 2433070 - DNA, 25 bp, Homo sapien
ccaggcatcttttacccaaagggct

SEQ ID NO: 2433071 - DNA, 25 bp, Homo sapien
tgcacgaactgagaaactgggtctt

SEQ ID NO: 2433072 - DNA, 25 bp, Homo sapien
gggtgcattgctaagtgcacgaact

SEQ ID NO: 2433073 - DNA, 25 bp, Homo sapien
ctacccttgagaatgggctcaactc

SEQ ID NO: 2433074 - DNA, 25 bp, Homo sapien
caccactacccttgagaatgggctc

SEQ ID NO: 2433075 - DNA, 25 bp, Homo sapien
gttggaataggctctggccaactcc

SEQ ID NO: 2433076 - DNA, 25 bp, Homo sapien
agggttggaataggctctggccaac

SEQ ID NO: 2433077 - DNA, 25 bp, Homo sapien
ccctgcactctattccaatgccgat

SEQ ID NO: 2433078 - DNA, 25 bp, Homo sapien
cgtgccagtcgctgtgctccgagta

SEQ ID NO: 2433079 - DNA, 25 bp, Homo sapien
cagtcgctgtgctccgagtagtatt

SEQ ID NO: 2433080 - DNA, 25 bp, Homo sapien
cgctgtgctccgagtagtattccag

SEQ ID NO: 2433081 - DNA, 25 bp, Homo sapien
gccagtcgctgtgctccgagtagta

SEQ ID NO: 2433082 - DNA, 25 bp, Homo sapien
atgcatttgacaccgtccagcagca

SEQ ID NO: 2433083 - DNA, 25 bp, Homo sapien
cttggcacccatgcatttgacaccg

SEQ ID NO: 2433084 - DNA, 25 bp, Homo sapien
cacccatgcatttgacaccgtccag

SEQ ID NO: 2433085 - DNA, 25 bp, Homo sapien
ttggcacccatgcatttgacaccgt

SEQ ID NO: 2433086 - DNA, 25 bp, Homo sapien
agtggacgtggctttgggagccctc

SEQ ID NO: 2433087 - DNA, 25 bp, Homo sapien
aagtggacgtggctttgggagccct

SEQ ID NO: 2433088 - DNA, 25 bp, Homo sapien
gcttgctgcctttgttggttgcagc

SEQ ID NO: 2433089 - DNA, 25 bp, Homo sapien
cacaaagtggatactccggaatctg

SEQ ID NO: 2433090 - DNA, 25 bp, Homo sapien
tgaatggtcgaagctgagcaacttg

SEQ ID NO: 2433091 - DNA, 25 bp, Homo sapien
cactagactagactacagagggagt

SEQ ID NO: 2433092 - DNA, 25 bp, Homo sapien
caggttaaatccagcctcgggagga

SEQ ID NO: 2433093 - DNA, 25 bp, Homo sapien
caaataacataacttctttcctctg

SEQ ID NO: 2433094 - DNA, 25 bp, Homo sapien
actttagggaagaagcagagcggca

SEQ ID NO: 2433095 - DNA, 25 bp, Homo sapien
aacagaacgaggaccttagacagga

SEQ ID NO: 2433096 - DNA, 25 bp, Homo sapien
ggaggcacacggaaaaacagaacga

SEQ ID NO: 2433097 - DNA, 25 bp, Homo sapien
gagtccctactctttctcgggagga

SEQ ID NO: 2433098 - DNA, 25 bp, Homo sapien
caggacaagaagtcaccaagttggt

SEQ ID NO: 2433099 - DNA, 25 bp, Homo sapien
tattagaactagagtaggcaggtgt

SEQ ID NO: 2433100 - DNA, 25 bp, Homo sapien
tgaaaggaacattgggtagcaaccc

SEQ ID NO: 2433101 - DNA, 25 bp, Homo sapien
aagaggttagggctacatggacact

SEQ ID NO: 2433102 - DNA, 25 bp, Homo sapien
gacggggataccatgcccccaggga

SEQ ID NO: 2433103 - DNA, 25 bp, Homo sapien
gaagccagtatctcccctggggacg

SEQ ID NO: 2433104 - DNA, 25 bp, Homo sapien
gcaaaagcaggtgagtcaaggaagg

SEQ ID NO: 2433105 - DNA, 25 bp, Homo sapien
tggggacggggataccatgccccca

SEQ ID NO: 2433106 - DNA, 25 bp, Homo sapien
actgtctgtaatcctcatggtgcca

SEQ ID NO: 2433107 - DNA, 25 bp, Homo sapien
gatggacacagccagttcaccgtgt

SEQ ID NO: 2433108 - DNA, 25 bp, Homo sapien
ctagagcatacagcaccccttggtg

SEQ ID NO: 2433109 - DNA, 25 bp, Homo sapien
atagcctggcatgagctgatggccc

SEQ ID NO: 2433110 - DNA, 25 bp, Homo sapien
cctggcttatgctgggcatctgggt

SEQ ID NO: 2433111 - DNA, 25 bp, Homo sapien
tgtagccaccaaaatatccttggcc

SEQ ID NO: 2433112 - DNA, 25 bp, Homo sapien
caccaaaatatccttggccccagcc

SEQ ID NO: 2433113 - DNA, 25 bp, Homo sapien
ctgtagccaccaaaatatccttggc

SEQ ID NO: 2433114 - DNA, 25 bp, Homo sapien
tagccaccaaaatatccttggcccc

SEQ ID NO: 2433115 - DNA, 25 bp, Homo sapien
tccaccgtgcagtgtgcaagcattg

SEQ ID NO: 2433116 - DNA, 25 bp, Homo sapien
tttccaccgtgcagtgtgcaagcat

SEQ ID NO: 2433117 - DNA, 25 bp, Homo sapien
cttttccaccgtgcagtgtgcaagc

SEQ ID NO: 2433118 - DNA, 25 bp, Homo sapien
caccgtgcagtgtgcaagcattgta

SEQ ID NO: 2433119 - DNA, 25 bp, Homo sapien
ttgctggacaggctaaagaaagggt

SEQ ID NO: 2433120 - DNA, 25 bp, Homo sapien
ccaggatgaagacccaaggcagctt

SEQ ID NO: 2433121 - DNA, 25 bp, Homo sapien
ttttctacatcctcagactgccagg

SEQ ID NO: 2433122 - DNA, 25 bp, Homo sapien
caccagtgacaggagtaaaggacac

SEQ ID NO: 2433123 - DNA, 25 bp, Homo sapien
atttggccaacacgtcgcagccctt

SEQ ID NO: 2433124 - DNA, 25 bp, Homo sapien
cagggatttggccaacacgtcgcag

SEQ ID NO: 2433125 - DNA, 25 bp, Homo sapien
gggatttggccaacacgtcgcagcc

SEQ ID NO: 2433126 - DNA, 25 bp, Homo sapien
tccagggatttggccaacacgtcgc

SEQ ID NO: 2433127 - DNA, 25 bp, Homo sapien
ggcttgcctgcggagccaatgtaca

SEQ ID NO: 2433128 - DNA, 25 bp, Homo sapien
cttgcctgcggagccaatgtacacc

SEQ ID NO: 2433129 - DNA, 25 bp, Homo sapien
cctgcggagccaatgtacaccacag

SEQ ID NO: 2433130 - DNA, 25 bp, Homo sapien
tgcctgcggagccaatgtacaccac

SEQ ID NO: 2433131 - DNA, 25 bp, Homo sapien
caatcaaacgcccaggggtagcaat

SEQ ID NO: 2433132 - DNA, 25 bp, Homo sapien
gcggtacttatgttttcccgactca

SEQ ID NO: 2433133 - DNA, 25 bp, Homo sapien
tatgttttcccgactcaaagttggc

SEQ ID NO: 2433134 - DNA, 25 bp, Homo sapien
ggtcctcagcctcatccgtgtctgg

SEQ ID NO: 2433135 - DNA, 25 bp, Homo sapien
cacaggctatggatatgagtctcag

SEQ ID NO: 2433136 - DNA, 25 bp, Homo sapien
tgcccattgccagctgtttgtgact

SEQ ID NO: 2433137 - DNA, 25 bp, Homo sapien
taaaccctggtgcataagttctcaa

SEQ ID NO: 2433138 - DNA, 25 bp, Homo sapien
tcaaagatttggtctggcagagtaa

SEQ ID NO: 2433139 - DNA, 25 bp, Homo sapien
acctagcggtttcccaaacttgatg

SEQ ID NO: 2433140 - DNA, 25 bp, Homo sapien
tgcggatacctagcggtttcccaaa

SEQ ID NO: 2433141 - DNA, 25 bp, Homo sapien
tagcggtttcccaaacttgatggtc

SEQ ID NO: 2433142 - DNA, 25 bp, Homo sapien
agtgcggatacctagcggtttccca

SEQ ID NO: 2433143 - DNA, 25 bp, Homo sapien
ccccacagcttcgtgagctttggtt

SEQ ID NO: 2433144 - DNA, 25 bp, Homo sapien
gacaaagtcactcttacggggagca

SEQ ID NO: 2433145 - DNA, 25 bp, Homo sapien
ttatccaaccacaagccagagcaag

SEQ ID NO: 2433146 - DNA, 25 bp, Homo sapien
cactcttacggggagcaatgggaat

SEQ ID NO: 2433147 - DNA, 25 bp, Homo sapien
caacggttgctgtaagccaagatca

SEQ ID NO: 2433148 - DNA, 25 bp, Homo sapien
ggcaacggttgctgtaagccaagat

SEQ ID NO: 2433149 - DNA, 25 bp, Homo sapien
cctgggaggcaacggttgctgtaag

SEQ ID NO: 2433150 - DNA, 25 bp, Homo sapien
ggaggcaacggttgctgtaagccaa

SEQ ID NO: 2433151 - DNA, 25 bp, Homo sapien
caatgatgtcacgattctgtagccc

SEQ ID NO: 2433152 - DNA, 25 bp, Homo sapien
atgatgtcacgattctgtagcccaa

SEQ ID NO: 2433153 - DNA, 25 bp, Homo sapien
ctgtcaattttgggaagtgtggtga

SEQ ID NO: 2433154 - DNA, 25 bp, Homo sapien
aatgatgtcacgattctgtagccca

SEQ ID NO: 2433155 - DNA, 25 bp, Homo sapien
agtcctcacggaagatccgccagtc

SEQ ID NO: 2433156 - DNA, 25 bp, Homo sapien
ctgtagtcctcacggaagatccgcc

SEQ ID NO: 2433157 - DNA, 25 bp, Homo sapien
gctgtagtcctcacggaagatccgc

SEQ ID NO: 2433158 - DNA, 25 bp, Homo sapien
gtagtcctcacggaagatccgccag

SEQ ID NO: 2433159 - DNA, 25 bp, Homo sapien
caatgcctgcaatgaagcctcgccc

SEQ ID NO: 2433160 - DNA, 25 bp, Homo sapien
aggtcaatgcctgcaatgaagcctc

SEQ ID NO: 2433161 - DNA, 25 bp, Homo sapien
ggtcaatgcctgcaatgaagcctcg

SEQ ID NO: 2433162 - DNA, 25 bp, Homo sapien
tcaatgcctgcaatgaagcctcgcc

SEQ ID NO: 2433163 - DNA, 25 bp, Homo sapien
gtcattgagatgtctcgttcggcgc

SEQ ID NO: 2433164 - DNA, 25 bp, Homo sapien
agatgtctcgttcggcgccgctttt

SEQ ID NO: 2433165 - DNA, 25 bp, Homo sapien
attgagatgtctcgttcggcgccgc

SEQ ID NO: 2433166 - DNA, 25 bp, Homo sapien
tgagatgtctcgttcggcgccgctt

SEQ ID NO: 2433167 - DNA, 25 bp, Homo sapien
gctttgaggcccaattctcacatgc

SEQ ID NO: 2433168 - DNA, 25 bp, Homo sapien
agctttgaggcccaattctcacatg

SEQ ID NO: 2433169 - DNA, 25 bp, Homo sapien
tttgaggcccaattctcacatgcag

SEQ ID NO: 2433170 - DNA, 25 bp, Homo sapien
ttgaggcccaattctcacatgcaga

SEQ ID NO: 2433171 - DNA, 25 bp, Homo sapien
ggtctcccgttccatcctctccctg

SEQ ID NO: 2433172 - DNA, 25 bp, Homo sapien
tttccattggtctcccgttccatcc

SEQ ID NO: 2433173 - DNA, 25 bp, Homo sapien
catcctctccctgcgttcccgacgt

SEQ ID NO: 2433174 - DNA, 25 bp, Homo sapien
cattggtctcccgttccatcctctc

SEQ ID NO: 2433175 - DNA, 25 bp, Homo sapien
tttccaaactccagagtgaacaggt

SEQ ID NO: 2433176 - DNA, 25 bp, Homo sapien
gaacaggtttctatctctcctaaga

SEQ ID NO: 2433177 - DNA, 25 bp, Homo sapien
aatggagggaatccagacgaggaac

SEQ ID NO: 2433178 - DNA, 25 bp, Homo sapien
tgttttctcataaactcccaccatc

SEQ ID NO: 2433179 - DNA, 25 bp, Homo sapien
tcctgcccaagtcttggaactgttt

SEQ ID NO: 2433180 - DNA, 25 bp, Homo sapien
cctgcccaagtcttggaactgtttc

SEQ ID NO: 2433181 - DNA, 25 bp, Homo sapien
gaagctcctccagggataatggctg

SEQ ID NO: 2433182 - DNA, 25 bp, Homo sapien
tctgtccttccgagatttaaagtct

SEQ ID NO: 2433183 - DNA, 25 bp, Homo sapien
gcttcttatcaccatgttcatcctc

SEQ ID NO: 2433184 - DNA, 25 bp, Homo sapien
catccttcttagagtctctgtcctt

SEQ ID NO: 2433185 - DNA, 25 bp, Homo sapien
tcttagagtctctgtccttccgaga

SEQ ID NO: 2433186 - DNA, 25 bp, Homo sapien
tttacggtccttgtcccgtctgtgc

SEQ ID NO: 2433187 - DNA, 25 bp, Homo sapien
ctcgatctcggtccttcttattccg

SEQ ID NO: 2433188 - DNA, 25 bp, Homo sapien
gatcccgctccttatctcgttctcg

SEQ ID NO: 2433189 - DNA, 25 bp, Homo sapien
attccgatcccgctccttatctcgt

SEQ ID NO: 2433190 - DNA, 25 bp, Homo sapien
gatctcggtccttcttattccgatc

SEQ ID NO: 2433191 - DNA, 25 bp, Homo sapien
gtcccggtctctatcccgctctctg

SEQ ID NO: 2433192 - DNA, 25 bp, Homo sapien
acgagagcgagaacggctgcctcct

SEQ ID NO: 2433193 - DNA, 25 bp, Homo sapien
tcctcgacgtctatcccttgaacga

SEQ ID NO: 2433194 - DNA, 25 bp, Homo sapien
gatgccgctttctatctttagatgg

SEQ ID NO: 2433195 - DNA, 25 bp, Homo sapien
ttctgtaagctcgtgggaaccgcct

SEQ ID NO: 2433196 - DNA, 25 bp, Homo sapien
catggactgactgcgagagaaaagc

SEQ ID NO: 2433197 - DNA, 25 bp, Homo sapien
caaaagaaataatacggccggcgca

SEQ ID NO: 2433198 - DNA, 25 bp, Homo sapien
taaggacgcggaaaagaagtcattc

SEQ ID NO: 2433199 - DNA, 25 bp, Homo sapien
cctgagtctgaaccgcccaacgcgg

SEQ ID NO: 2433200 - DNA, 25 bp, Homo sapien
ttcctggtcgcggagatgaacaccc

SEQ ID NO: 2433201 - DNA, 25 bp, Homo sapien
gagccgtcgccatctttcccgtttc

SEQ ID NO: 2433202 - DNA, 25 bp, Homo sapien
cggcctcaacgtcgcggagccgtcg

SEQ ID NO: 2433203 - DNA, 25 bp, Homo sapien
gcctggaaactaccaatcccagaat

SEQ ID NO: 2433204 - DNA, 25 bp, Homo sapien
gcggcacaggccgacactgaggcct

SEQ ID NO: 2433205 - DNA, 25 bp, Homo sapien
ccccggccgcgaggcaagctgggaa

SEQ ID NO: 2433206 - DNA, 25 bp, Homo sapien
ctgggaaggcgagttcctggagctg

SEQ ID NO: 2433207 - DNA, 25 bp, Homo sapien
gggtgctgtcttctagcatccacca

SEQ ID NO: 2433208 - DNA, 25 bp, Homo sapien
tgctctcgggctaaggagcccttcc

SEQ ID NO: 2433209 - DNA, 25 bp, Homo sapien
catcttgggctgcataggacagtcc

SEQ ID NO: 2433210 - DNA, 25 bp, Homo sapien
ccagatcagggacactgctaaacat

SEQ ID NO: 2433211 - DNA, 25 bp, Homo sapien
cagaaagggtcccaggacagctttt

SEQ ID NO: 2433212 - DNA, 25 bp, Homo sapien
tgcaacccacagaaagggtcccagg

SEQ ID NO: 2433213 - DNA, 25 bp, Homo sapien
gcaacccacagaaagggtcccagga

SEQ ID NO: 2433214 - DNA, 25 bp, Homo sapien
cccacagaaagggtcccaggacagc

SEQ ID NO: 2433215 - DNA, 25 bp, Homo sapien
gacctgcatggaaacgctgtgtgga

SEQ ID NO: 2433216 - DNA, 25 bp, Homo sapien
gatggttctctctcagcgtcaggtc

SEQ ID NO: 2433217 - DNA, 25 bp, Homo sapien
gattgcagttacgaagcacctgggc

SEQ ID NO: 2433218 - DNA, 25 bp, Homo sapien
aatgccagctgtactaccctaaggg

SEQ ID NO: 2433219 - DNA, 25 bp, Homo sapien
acccagctgctttgctattgcacaa

SEQ ID NO: 2433220 - DNA, 25 bp, Homo sapien
ggaggtggagcagtcgtttggagag

SEQ ID NO: 2433221 - DNA, 25 bp, Homo sapien
cagacacagcatggatgccgtccga

SEQ ID NO: 2433222 - DNA, 25 bp, Homo sapien
tgccgtccgaaagatgctgtggatg

SEQ ID NO: 2433223 - DNA, 25 bp, Homo sapien
accctctgcagattattcgattatc

SEQ ID NO: 2433224 - DNA, 25 bp, Homo sapien
ccaccctctgcagattattcgatta

SEQ ID NO: 2433225 - DNA, 25 bp, Homo sapien
accaccctctgcagattattcgatt

SEQ ID NO: 2433226 - DNA, 25 bp, Homo sapien
cctctgcagattattcgattatctt

SEQ ID NO: 2433227 - DNA, 25 bp, Homo sapien
cagagtactcaggtctgttcgcagg

SEQ ID NO: 2433228 - DNA, 25 bp, Homo sapien
ggtgggacagctccatcagagtact

SEQ ID NO: 2433229 - DNA, 25 bp, Homo sapien
tgctcataggagatgggcgcctgct

SEQ ID NO: 2433230 - DNA, 25 bp, Homo sapien
cgcgggtgctgggacaataatctag

SEQ ID NO: 2433231 - DNA, 25 bp, Homo sapien
tcttgagtgcgctgtccactgtctc

SEQ ID NO: 2433232 - DNA, 25 bp, Homo sapien
gtagcagagtggacggacattatcg

SEQ ID NO: 2433233 - DNA, 25 bp, Homo sapien
tagtaatactgcatccgagtcgctg

SEQ ID NO: 2433234 - DNA, 25 bp, Homo sapien
cactgtctctggacggctgatgtca

SEQ ID NO: 2433235 - DNA, 25 bp, Homo sapien
ccatggtgttttccttccccaatag

SEQ ID NO: 2433236 - DNA, 25 bp, Homo sapien
gccatggtgttttccttccccaata

SEQ ID NO: 2433237 - DNA, 25 bp, Homo sapien
ggtgagccatggtgttttccttccc

SEQ ID NO: 2433238 - DNA, 25 bp, Homo sapien
ctgatggtgagccatggtgttttcc

SEQ ID NO: 2433239 - DNA, 25 bp, Homo sapien
ctgcagcactgaggagcggaagcac

SEQ ID NO: 2433240 - DNA, 25 bp, Homo sapien
actgaggagcggaagcactgcagca

SEQ ID NO: 2433241 - DNA, 25 bp, Homo sapien
actgcagcactgaggagcggaagca

SEQ ID NO: 2433242 - DNA, 25 bp, Homo sapien
cactgaggagcggaagcactgcagc

SEQ ID NO: 2433243 - DNA, 25 bp, Homo sapien
tatgggaacctaatctgaaagaggg

SEQ ID NO: 2433244 - DNA, 25 bp, Homo sapien
tgacacagggaacagagactacact

SEQ ID NO: 2433245 - DNA, 25 bp, Homo sapien
ggagtttgagaataactgacagcct

SEQ ID NO: 2433246 - DNA, 25 bp, Homo sapien
gactacacttgctgattttccatga

SEQ ID NO: 2433247 - DNA, 25 bp, Homo sapien
ctgtctccaaacaggctgtgtaatt

SEQ ID NO: 2433248 - DNA, 25 bp, Homo sapien
agagactaagctccaccctctgttc

SEQ ID NO: 2433249 - DNA, 25 bp, Homo sapien
gtaattttcgaacacggtgggcaca

SEQ ID NO: 2433250 - DNA, 25 bp, Homo sapien
ctgaggtatcccagagactaagctc

SEQ ID NO: 2433251 - DNA, 25 bp, Homo sapien
cggcagaagtggaacaggtctcagg

SEQ ID NO: 2433252 - DNA, 25 bp, Homo sapien
tggtaaagcctcagaaagcggctga

SEQ ID NO: 2433253 - DNA, 25 bp, Homo sapien
aaagcctcagaaagcggctgaggat

SEQ ID NO: 2433254 - DNA, 25 bp, Homo sapien
gaggatggtaaagcctcagaaagcg

SEQ ID NO: 2433255 - DNA, 25 bp, Homo sapien
cttacatctggccacgactggctgg

SEQ ID NO: 2433256 - DNA, 25 bp, Homo sapien
gtccccgaccagaacgagcttacat

SEQ ID NO: 2433257 - DNA, 25 bp, Homo sapien
taacacttgcaacatcgcggtcttc

SEQ ID NO: 2433258 - DNA, 25 bp, Homo sapien
gatagcaatccttcgctaacacttg

SEQ ID NO: 2433259 - DNA, 25 bp, Homo sapien
tcagcacgccaatcaagccagattc

SEQ ID NO: 2433260 - DNA, 25 bp, Homo sapien
agtgtccgcgggacttgaacttcga

SEQ ID NO: 2433261 - DNA, 25 bp, Homo sapien
ggttgcgccaggtgcgtctcagcac

SEQ ID NO: 2433262 - DNA, 25 bp, Homo sapien
tgaacttcgattcagaagggagggt

SEQ ID NO: 2433263 - DNA, 25 bp, Homo sapien
tctgggccttggtcctgatccccat

SEQ ID NO: 2433264 - DNA, 25 bp, Homo sapien
gctttctgggccttggtcctgatcc

SEQ ID NO: 2433265 - DNA, 25 bp, Homo sapien
tttctgggccttggtcctgatcccc

SEQ ID NO: 2433266 - DNA, 25 bp, Homo sapien
ctggagccccgctttctgggccttg

SEQ ID NO: 2433267 - DNA, 25 bp, Homo sapien
tttagaatatgtgctgcccaagtga

SEQ ID NO: 2433268 - DNA, 25 bp, Homo sapien
attttagaatatgtgctgcccaagt

SEQ ID NO: 2433269 - DNA, 25 bp, Homo sapien
ccaattttagaatatgtgctgccca

SEQ ID NO: 2433270 - DNA, 25 bp, Homo sapien
caattttagaatatgtgctgcccaa

SEQ ID NO: 2433271 - DNA, 25 bp, Homo sapien
ttggggcacatgttgcatatcacat

SEQ ID NO: 2433272 - DNA, 25 bp, Homo sapien
catgttgcatatcacataattcgct

SEQ ID NO: 2433273 - DNA, 25 bp, Homo sapien
gggcacatgttgcatatcacataat

SEQ ID NO: 2433274 - DNA, 25 bp, Homo sapien
gttgcatatcacataattcgctttt

SEQ ID NO: 2433275 - DNA, 25 bp, Homo sapien
gatctcttgggctaaaacgatcctc

SEQ ID NO: 2433276 - DNA, 25 bp, Homo sapien
gcttgactatggcttgacctctggg

SEQ ID NO: 2433277 - DNA, 25 bp, Homo sapien
cattgctcaagctagtctcgatctc

SEQ ID NO: 2433278 - DNA, 25 bp, Homo sapien
gtttcgccacattgctcaagctagt

SEQ ID NO: 2433279 - DNA, 25 bp, Homo sapien
gacgtgtggaccaggaatttccgga

SEQ ID NO: 2433280 - DNA, 25 bp, Homo sapien
ttgacgtgtggaccaggaatttccg

SEQ ID NO: 2433281 - DNA, 25 bp, Homo sapien
gaaaacatacacatgagctgtctac

SEQ ID NO: 2433282 - DNA, 25 bp, Homo sapien
agatctaacccttgaaccttccacg

SEQ ID NO: 2433283 - DNA, 25 bp, Homo sapien
cggtcagactggtgccggataaact

SEQ ID NO: 2433284 - DNA, 25 bp, Homo sapien
cgccggttacgcttaattttgacat

SEQ ID NO: 2433285 - DNA, 25 bp, Homo sapien
catatcggtcagactggtgccggat

SEQ ID NO: 2433286 - DNA, 25 bp, Homo sapien
tatcggtcagactggtgccggataa

SEQ ID NO: 2433287 - DNA, 25 bp, Homo sapien
tataaaagtgcactgaggggaggct

SEQ ID NO: 2433288 - DNA, 25 bp, Homo sapien
gaggacggtttataaaagtgcactg

SEQ ID NO: 2433289 - DNA, 25 bp, Homo sapien
ctgaggacggtttataaaagtgcac

SEQ ID NO: 2433290 - DNA, 25 bp, Homo sapien
ggacggtttataaaagtgcactgag

SEQ ID NO: 2433291 - DNA, 25 bp, Homo sapien
cggggtggctgccgggcggagaggc

SEQ ID NO: 2433292 - DNA, 25 bp, Homo sapien
gcaaagccgccattgtcatcctggc

SEQ ID NO: 2433293 - DNA, 25 bp, Homo sapien
ccgcaaagccgccattgtcatcctg

SEQ ID NO: 2433294 - DNA, 25 bp, Homo sapien
ttccgcaaagccgccattgtcatcc

SEQ ID NO: 2433295 - DNA, 25 bp, Homo sapien
cactttcaactatcaaaatcctacc

SEQ ID NO: 2433296 - DNA, 25 bp, Homo sapien
gtactttttttgtatcacatgaatg

SEQ ID NO: 2433297 - DNA, 25 bp, Homo sapien
tttgtatcacatgaatgtattaccc

SEQ ID NO: 2433298 - DNA, 25 bp, Homo sapien
tcctacccatttggcagggaacagg

SEQ ID NO: 2433299 - DNA, 25 bp, Homo sapien
gatctcaaaaacatggtacggaggg

SEQ ID NO: 2433300 - DNA, 25 bp, Homo sapien
aagatatcttcatggccatggagca

SEQ ID NO: 2433301 - DNA, 25 bp, Homo sapien
gattctgagtatgaaagcaagctgg

SEQ ID NO: 2433302 - DNA, 25 bp, Homo sapien
ccagagcatgtggaatgatctcaaa

SEQ ID NO: 2433303 - DNA, 25 bp, Homo sapien
aatacttggaatagtgtgtgttaca

SEQ ID NO: 2433304 - DNA, 25 bp, Homo sapien
tgttacatggtaacctccatttgct

SEQ ID NO: 2433305 - DNA, 25 bp, Homo sapien
cacttggatgagtagcttccctggg

SEQ ID NO: 2433306 - DNA, 25 bp, Homo sapien
tgtttcccaggctatgaatcaattt

SEQ ID NO: 2433307 - DNA, 25 bp, Homo sapien
tcaaagcaacttactccagcccttg

SEQ ID NO: 2433308 - DNA, 25 bp, Homo sapien
cagtgagtgacgaagtgctgagcca

SEQ ID NO: 2433309 - DNA, 25 bp, Homo sapien
cagatgatcttccacaacctgtgat

SEQ ID NO: 2433310 - DNA, 25 bp, Homo sapien
taaaatataattgaagcagcccaga

SEQ ID NO: 2433311 - DNA, 25 bp, Homo sapien
caactaccaggaggctcactgctca

SEQ ID NO: 2433312 - DNA, 25 bp, Homo sapien
gagagaacagctaggcaactaccag

SEQ ID NO: 2433313 - DNA, 25 bp, Homo sapien
gaacagctaggcaactaccaggagg

SEQ ID NO: 2433314 - DNA, 25 bp, Homo sapien
agagaacagctaggcaactaccagg

SEQ ID NO: 2433315 - DNA, 25 bp, Homo sapien
tctcttccttgagcttctttttgga

SEQ ID NO: 2433316 - DNA, 25 bp, Homo sapien
ttttgctcttgtttcgtttctcttc

SEQ ID NO: 2433317 - DNA, 25 bp, Homo sapien
tctttttgctcttgtttcgtttctc

SEQ ID NO: 2433318 - DNA, 25 bp, Homo sapien
tgtttcgtttctcttccttgagctt

SEQ ID NO: 2433319 - DNA, 25 bp, Homo sapien
ggagggctggcaccatggccatccc

SEQ ID NO: 2433320 - DNA, 25 bp, Homo sapien
gggctggcaccatggccatccctac

SEQ ID NO: 2433321 - DNA, 25 bp, Homo sapien
ccaatgaggcccaggagggctggca

SEQ ID NO: 2433322 - DNA, 25 bp, Homo sapien
cccaggagggctggcaccatggcca

SEQ ID NO: 2433323 - DNA, 25 bp, Homo sapien
caccagctttagccagtagttggct

SEQ ID NO: 2433324 - DNA, 25 bp, Homo sapien
accagctttagccagtagttggctc

SEQ ID NO: 2433325 - DNA, 25 bp, Homo sapien
gctccacgtcatactgcaccactgc

SEQ ID NO: 2433326 - DNA, 25 bp, Homo sapien
tcagctccacgtcatactgcaccac

SEQ ID NO: 2433327 - DNA, 25 bp, Homo sapien
aatcagctccacgtcatactgcacc

SEQ ID NO: 2433328 - DNA, 25 bp, Homo sapien
agctccacgtcatactgcaccactg

SEQ ID NO: 2433329 - DNA, 25 bp, Homo sapien
aatgaaaatagggagcgtaggccac

SEQ ID NO: 2433330 - DNA, 25 bp, Homo sapien
tacgagcagagtccagtgataatca

SEQ ID NO: 2433331 - DNA, 25 bp, Homo sapien
gaggtacaaataagcagcactggga

SEQ ID NO: 2433332 - DNA, 25 bp, Homo sapien
gataagaattaacgagcccagccag

SEQ ID NO: 2433333 - DNA, 25 bp, Homo sapien
taacaagttactggctgctggaggt

SEQ ID NO: 2433334 - DNA, 25 bp, Homo sapien
ccttcaaaaatagacatcggcagtg

SEQ ID NO: 2433335 - DNA, 25 bp, Homo sapien
gaggtcatgccaggtggcctcatca

SEQ ID NO: 2433336 - DNA, 25 bp, Homo sapien
gaattacgagcccaatactctgtgg

SEQ ID NO: 2433337 - DNA, 25 bp, Homo sapien
cctatctgtctaaacaaacttggtc

SEQ ID NO: 2433338 - DNA, 25 bp, Homo sapien
gactgggtattttgatggcctgaga

SEQ ID NO: 2433339 - DNA, 25 bp, Homo sapien
ccttatagctcttagggactgggta

SEQ ID NO: 2433340 - DNA, 25 bp, Homo sapien
cctgagagagagtcctagtcagatt

SEQ ID NO: 2433341 - DNA, 25 bp, Homo sapien
ccaagtgagaaggaatgattgccct

SEQ ID NO: 2433342 - DNA, 25 bp, Homo sapien
gagaaggaatgattgcccttcgctt

SEQ ID NO: 2433343 - DNA, 25 bp, Homo sapien
gagggaaggaatgtcagtcacagcc

SEQ ID NO: 2433344 - DNA, 25 bp, Homo sapien
ccagaggcaggagaggtaggccagc

SEQ ID NO: 2433345 - DNA, 25 bp, Homo sapien
ctgagggaaggaatgtcagtcacag

SEQ ID NO: 2433346 - DNA, 25 bp, Homo sapien
gaggcaggagaggtaggccagcagc

SEQ ID NO: 2433347 - DNA, 25 bp, Homo sapien
tccttcagcaaaaccccctgaatct

SEQ ID NO: 2433348 - DNA, 25 bp, Homo sapien
tgaagctccttcagcaaaaccccct

SEQ ID NO: 2433349 - DNA, 25 bp, Homo sapien
ttcagcaaaaccccctgaatcttca

SEQ ID NO: 2433350 - DNA, 25 bp, Homo sapien
aagctccttcagcaaaaccccctga

SEQ ID NO: 2433351 - DNA, 25 bp, Homo sapien
tggccagcaaaggtgtccatctccc

SEQ ID NO: 2433352 - DNA, 25 bp, Homo sapien
cagaggctttgaatgccctcagagg

SEQ ID NO: 2433353 - DNA, 25 bp, Homo sapien
tgtccagtgggaagcagggtccttt

SEQ ID NO: 2433354 - DNA, 25 bp, Homo sapien
ctgaacaccaaacaggctggccagc

SEQ ID NO: 2433355 - DNA, 25 bp, Homo sapien
cacacatgtcgagaagactctgctc

SEQ ID NO: 2433356 - DNA, 25 bp, Homo sapien
acacacatgtcgagaagactctgct

SEQ ID NO: 2433357 - DNA, 25 bp, Homo sapien
cccacacacatgtcgagaagactct

SEQ ID NO: 2433358 - DNA, 25 bp, Homo sapien
tccagggcagctttggagccgaaga

SEQ ID NO: 2433359 - DNA, 25 bp, Homo sapien
cgtagagccctagggtcttactcat

SEQ ID NO: 2433360 - DNA, 25 bp, Homo sapien
gatatgggacaagtggagtactaga

SEQ ID NO: 2433361 - DNA, 25 bp, Homo sapien
cctcaggaggtaactcgtagagccc

SEQ ID NO: 2433362 - DNA, 25 bp, Homo sapien
tcagggaggtgtcaataatacgtcc

SEQ ID NO: 2433363 - DNA, 25 bp, Homo sapien
tgcttttggccaagttctataacca

SEQ ID NO: 2433364 - DNA, 25 bp, Homo sapien
taatacgtccatctaccaagcttcc

SEQ ID NO: 2433365 - DNA, 25 bp, Homo sapien
tctataaccagagggtctctggtca

SEQ ID NO: 2433366 - DNA, 25 bp, Homo sapien
aacacacacctggaccgctgggcgg

SEQ ID NO: 2433367 - DNA, 25 bp, Homo sapien
gagagagcatcaagagcatacatct

SEQ ID NO: 2433368 - DNA, 25 bp, Homo sapien
cagcaggcgcgcaacacacacctgg

SEQ ID NO: 2433369 - DNA, 25 bp, Homo sapien
tcaagagcatacatctagcaccctc

SEQ ID NO: 2433370 - DNA, 25 bp, Homo sapien
aaaagaggcacggaagagcaacgtc

SEQ ID NO: 2433371 - DNA, 25 bp, Homo sapien
ggctggcgcttctcggagatctctc

SEQ ID NO: 2433372 - DNA, 25 bp, Homo sapien
cacttctccgtgccaggtaggaact

SEQ ID NO: 2433373 - DNA, 25 bp, Homo sapien
ctcgacgaccccagagccccgagtt

SEQ ID NO: 2433374 - DNA, 25 bp, Homo sapien
aagcagcgggctcggcacatggttc

SEQ ID NO: 2433375 - DNA, 25 bp, Homo sapien
tgtctccaaaagcagcgggctcggc

SEQ ID NO: 2433376 - DNA, 25 bp, Homo sapien
tagtgtatgtgaagcgtgtctccaa

SEQ ID NO: 2433377 - DNA, 25 bp, Homo sapien
gtagtgtatgtgaagcgtgtctcca

SEQ ID NO: 2433378 - DNA, 25 bp, Homo sapien
actttcggtttcgagcccagcctca

SEQ ID NO: 2433379 - DNA, 25 bp, Homo sapien
ctttcggtttcgagcccagcctcag

SEQ ID NO: 2433380 - DNA, 25 bp, Homo sapien
tttcggtttcgagcccagcctcagc

SEQ ID NO: 2433381 - DNA, 25 bp, Homo sapien
gactttcggtttcgagcccagcctc

SEQ ID NO: 2433382 - DNA, 25 bp, Homo sapien
ggaggagtgaggggcgcagggtcat

SEQ ID NO: 2433383 - DNA, 25 bp, Homo sapien
gcagcagatggagcgggaggagtga

SEQ ID NO: 2433384 - DNA, 25 bp, Homo sapien
gcagatggagcgggaggagtgaggg

SEQ ID NO: 2433385 - DNA, 25 bp, Homo sapien
agcagcagcagatggagcgggagga

SEQ ID NO: 2433386 - DNA, 25 bp, Homo sapien
catcaggctaggtggtgacagagac

SEQ ID NO: 2433387 - DNA, 25 bp, Homo sapien
tccttgtggctatcctggcagtgtc

SEQ ID NO: 2433388 - DNA, 25 bp, Homo sapien
tctgtcctataacgtgggtcgggcc

SEQ ID NO: 2433389 - DNA, 25 bp, Homo sapien
ggtcgggccaaacaatagcacccat

SEQ ID NO: 2433390 - DNA, 25 bp, Homo sapien
tccttctgtctgctatctggaatgc

SEQ ID NO: 2433391 - DNA, 25 bp, Homo sapien
cacgctaggatggtgaagcaaaaag

SEQ ID NO: 2433392 - DNA, 25 bp, Homo sapien
cataagtccttgttaattgcagagc

SEQ ID NO: 2433393 - DNA, 25 bp, Homo sapien
gccatattagaccatgagatgacca

SEQ ID NO: 2433394 - DNA, 25 bp, Homo sapien
tctgcccactaaaaagcctaccatg

SEQ ID NO: 2433395 - DNA, 25 bp, Homo sapien
tactttggaccactgtgtacactgc

SEQ ID NO: 2433396 - DNA, 25 bp, Homo sapien
aataataagcccctgatccctagcc

SEQ ID NO: 2433397 - DNA, 25 bp, Homo sapien
cattgcccacgtgaataaaattcca

SEQ ID NO: 2433398 - DNA, 25 bp, Homo sapien
ccagctaactgatggcaaggtcaag

SEQ ID NO: 2433399 - DNA, 25 bp, Homo sapien
tcaaggttgcaatcatgtctggagc

SEQ ID NO: 2433400 - DNA, 25 bp, Homo sapien
gctaaagtaagggatttggccagag

SEQ ID NO: 2433401 - DNA, 25 bp, Homo sapien
taagggcaatgtcccacatgttgct

SEQ ID NO: 2433402 - DNA, 25 bp, Homo sapien
ttcagctcagaagccggaagtgctc

SEQ ID NO: 2433403 - DNA, 25 bp, Homo sapien
tcaagccttgatggtgaatggtctc

SEQ ID NO: 2433404 - DNA, 25 bp, Homo sapien
gaagtgctcctcaactagaggccag

SEQ ID NO: 2433405 - DNA, 25 bp, Homo sapien
tgggaggaccctgaacgatatatgg

SEQ ID NO: 2433406 - DNA, 25 bp, Homo sapien
tgctgtaaccaacctaggcgcttga

SEQ ID NO: 2433407 - DNA, 25 bp, Homo sapien
tctacaggctcatttgggaagctcc

SEQ ID NO: 2433408 - DNA, 25 bp, Homo sapien
caacgtggtatactacagatgtccc

SEQ ID NO: 2433409 - DNA, 25 bp, Homo sapien
gaagtggtgtatgcagtgaatcccc

SEQ ID NO: 2433410 - DNA, 25 bp, Homo sapien
aagaccagtctcactaacatggaga

SEQ ID NO: 2433411 - DNA, 25 bp, Homo sapien
caagaccagtctcactaacatggag

SEQ ID NO: 2433412 - DNA, 25 bp, Homo sapien
ttcaagaccagtctcactaacatgg

SEQ ID NO: 2433413 - DNA, 25 bp, Homo sapien
agttcaagaccagtctcactaacat

SEQ ID NO: 2433414 - DNA, 25 bp, Homo sapien
gacatgtctggttggagtagtttga

SEQ ID NO: 2433415 - DNA, 25 bp, Homo sapien
gagagttatatatgggtggaagcac

SEQ ID NO: 2433416 - DNA, 25 bp, Homo sapien
tcattgggattgataagacatgtct

SEQ ID NO: 2433417 - DNA, 25 bp, Homo sapien
gaaggaggaaagtgtcatctgatct

SEQ ID NO: 2433418 - DNA, 25 bp, Homo sapien
tgtttattcactgccaaagtccaga

SEQ ID NO: 2433419 - DNA, 25 bp, Homo sapien
cactatggagagagggaccagaaac

SEQ ID NO: 2433420 - DNA, 25 bp, Homo sapien
gaagtccatacagtctaccaacagg

SEQ ID NO: 2433421 - DNA, 25 bp, Homo sapien
tgttcaaactagaagcacctcatgt

SEQ ID NO: 2433422 - DNA, 25 bp, Homo sapien
cagatggatcaatattagtaacccc

SEQ ID NO: 2433423 - DNA, 25 bp, Homo sapien
gggcacttgttcctgaggtcctcgc

SEQ ID NO: 2433424 - DNA, 25 bp, Homo sapien
taagtgatcttggtagtatccctgg

SEQ ID NO: 2433425 - DNA, 25 bp, Homo sapien
cagttacttagtgatgtgttaccca

SEQ ID NO: 2433426 - DNA, 25 bp, Homo sapien
tatccctggctgctaagcccttggc

SEQ ID NO: 2433427 - DNA, 25 bp, Homo sapien
agtggtcttcaggattctccccgca

SEQ ID NO: 2433428 - DNA, 25 bp, Homo sapien
tctgctatcaacaaaagtggccagg

SEQ ID NO: 2433429 - DNA, 25 bp, Homo sapien
cactaagtaactggcactgagggag

SEQ ID NO: 2433430 - DNA, 25 bp, Homo sapien
ttatgggcagctgtctcggagctca

SEQ ID NO: 2433431 - DNA, 25 bp, Homo sapien
gcgaggacctcaggaacaagtgccc

SEQ ID NO: 2433432 - DNA, 25 bp, Homo sapien
ccagaggaggaactgcagttaccac

SEQ ID NO: 2433433 - DNA, 25 bp, Homo sapien
ggcaaagtcctcatgaaccacaaag

SEQ ID NO: 2433434 - DNA, 25 bp, Homo sapien
ccaggatatgctaaaggacgaagat

SEQ ID NO: 2433435 - DNA, 25 bp, Homo sapien
tggatgggtcatctgtccttggtca

SEQ ID NO: 2433436 - DNA, 25 bp, Homo sapien
gagggcattagtcaagccggactgc

SEQ ID NO: 2433437 - DNA, 25 bp, Homo sapien
gccccttccgtgttggtgagattaa

SEQ ID NO: 2433438 - DNA, 25 bp, Homo sapien
taggacagatgatggattcttcacc

SEQ ID NO: 2433439 - DNA, 25 bp, Homo sapien
tacatggaaattgcacgggcctctc

SEQ ID NO: 2433440 - DNA, 25 bp, Homo sapien
taaggtcagctatgtcaccccactt

SEQ ID NO: 2433441 - DNA, 25 bp, Homo sapien
tgaccaaggacagatgacccatcca

SEQ ID NO: 2433442 - DNA, 25 bp, Homo sapien
ccttaatctcaccaacacggaaggg

SEQ ID NO: 2433443 - DNA, 25 bp, Homo sapien
gactcagatgccaagaggacagcaa

SEQ ID NO: 2433444 - DNA, 25 bp, Homo sapien
gagaggcccgtgcaatttccatgta

SEQ ID NO: 2433445 - DNA, 25 bp, Homo sapien
cattagaatacccagtcagccctgg

SEQ ID NO: 2433446 - DNA, 25 bp, Homo sapien
taatgctatgaacgctgctgagatc

SEQ ID NO: 2433447 - DNA, 25 bp, Homo sapien
gatctgcctaatgctatgaacgctg

SEQ ID NO: 2433448 - DNA, 25 bp, Homo sapien
gacgggctgtacgaaggcctggact

SEQ ID NO: 2433449 - DNA, 25 bp, Homo sapien
gcattcccttcgtcaccgtaactgg

SEQ ID NO: 2433450 - DNA, 25 bp, Homo sapien
tgcctaatgctatgaacgctgctga

SEQ ID NO: 2433451 - DNA, 25 bp, Homo sapien
tcgtcaccgtaactggtacattcag

SEQ ID NO: 2433452 - DNA, 25 bp, Homo sapien
gatctcagcagcgttcatagcatta

SEQ ID NO: 2433453 - DNA, 25 bp, Homo sapien
tcagcagcgttcatagcattaggca

SEQ ID NO: 2433454 - DNA, 25 bp, Homo sapien
ctgaatgtaccagttacggtgacga

SEQ ID NO: 2433455 - DNA, 25 bp, Homo sapien
cagttacggtgacgaagggaatgca

SEQ ID NO: 2433456 - DNA, 25 bp, Homo sapien
cagcgttcatagcattaggcagatc

SEQ ID NO: 2433457 - DNA, 25 bp, Homo sapien
agtccaggccttcgtacagcccgtc

SEQ ID NO: 2433458 - DNA, 25 bp, Homo sapien
tgatgagaatgctggcggaggacga

SEQ ID NO: 2433459 - DNA, 25 bp, Homo sapien
gctccgggatgctgtactccttgtc

SEQ ID NO: 2433460 - DNA, 25 bp, Homo sapien
tcgacagcaatgatcgggagcgagt

SEQ ID NO: 2433461 - DNA, 25 bp, Homo sapien
gatatttgtggtcgacagcaatgat

SEQ ID NO: 2433462 - DNA, 25 bp, Homo sapien
gctgtactccttgtctttgcaaaca

SEQ ID NO: 2433463 - DNA, 25 bp, Homo sapien
caatgatcgggagcgagtaaatgag

SEQ ID NO: 2433464 - DNA, 25 bp, Homo sapien
tcatttactcgctcccgatcattgc

SEQ ID NO: 2433465 - DNA, 25 bp, Homo sapien
gtcctccgccagcattctcatcagc

SEQ ID NO: 2433466 - DNA, 25 bp, Homo sapien
atcattgctgtcgaccacaaatatc

SEQ ID NO: 2433467 - DNA, 25 bp, Homo sapien
aagacaaggagtacagcatcccgga

SEQ ID NO: 2433468 - DNA, 25 bp, Homo sapien
tactcgctcccgatcattgctgtcg

SEQ ID NO: 2433469 - DNA, 25 bp, Homo sapien
tgtttgcaaagacaaggagtacagc

SEQ ID NO: 2433470 - DNA, 25 bp, Homo sapien
tgcagcccatgctctgccttcctag

SEQ ID NO: 2433471 - DNA, 25 bp, Homo sapien
ctaggaaggcagagcatgggctgca

SEQ ID NO: 2433472 - DNA, 25 bp, Homo sapien
aggacaagattcgacccctctggag

SEQ ID NO: 2433473 - DNA, 25 bp, Homo sapien
ggacaagattcgacccctctggaga

SEQ ID NO: 2433474 - DNA, 25 bp, Homo sapien
caggacaagattcgacccctctgga

SEQ ID NO: 2433475 - DNA, 25 bp, Homo sapien
gacaagattcgacccctctggagac

SEQ ID NO: 2433476 - DNA, 25 bp, Homo sapien
ccaggacaagattcgacccctctgg

SEQ ID NO: 2433477 - DNA, 25 bp, Homo sapien
tccagaggggtcgaatcttgtcctg

SEQ ID NO: 2433478 - DNA, 25 bp, Homo sapien
ctccagaggggtcgaatcttgtcct

SEQ ID NO: 2433479 - DNA, 25 bp, Homo sapien
gtctccagaggggtcgaatcttgtc

SEQ ID NO: 2433480 - DNA, 25 bp, Homo sapien
ccagaggggtcgaatcttgtcctgg

SEQ ID NO: 2433481 - DNA, 25 bp, Homo sapien
tctccagaggggtcgaatcttgtcc

SEQ ID NO: 2433482 - DNA, 25 bp, Homo sapien
tatactccactgtctccacattgaa

SEQ ID NO: 2433483 - DNA, 25 bp, Homo sapien
tgtaaagctgatgttcttatactcc

SEQ ID NO: 2433484 - DNA, 25 bp, Homo sapien
gatgttcttatactccactgtctcc

SEQ ID NO: 2433485 - DNA, 25 bp, Homo sapien
ttctggaagtagtgtctccagaggg

SEQ ID NO: 2433486 - DNA, 25 bp, Homo sapien
cacatcccacactgtaaagctgatg

SEQ ID NO: 2433487 - DNA, 25 bp, Homo sapien
tctccagaggggtcgaatcttgtcc

SEQ ID NO: 2433488 - DNA, 25 bp, Homo sapien
cacatcttagctgaggccgactctg

SEQ ID NO: 2433489 - DNA, 25 bp, Homo sapien
ccacatcttagctgaggccgactct

SEQ ID NO: 2433490 - DNA, 25 bp, Homo sapien
agagtcggcctcagctaagatgtgg

SEQ ID NO: 2433491 - DNA, 25 bp, Homo sapien
cagagtcggcctcagctaagatgtg

SEQ ID NO: 2433492 - DNA, 25 bp, Homo sapien
gaccaccatcctatacaagctgaaa

SEQ ID NO: 2433493 - DNA, 25 bp, Homo sapien
tgaaactcggggagatcgtcaccac

SEQ ID NO: 2433494 - DNA, 25 bp, Homo sapien
aagaccaccatcctatacaagctga

SEQ ID NO: 2433495 - DNA, 25 bp, Homo sapien
gaagaaggagatgcgcatcctgatg

SEQ ID NO: 2433496 - DNA, 25 bp, Homo sapien
ggagatgcgcatcctgatggtgggc

SEQ ID NO: 2433497 - DNA, 25 bp, Homo sapien
catcctatacaagctgaaactcggg

SEQ ID NO: 2433498 - DNA, 25 bp, Homo sapien
ggtggtgacgatctccccgagtttc

SEQ ID NO: 2433499 - DNA, 25 bp, Homo sapien
gatctccccgagtttcagcttgtat

SEQ ID NO: 2433500 - DNA, 25 bp, Homo sapien
tggtgacgatctccccgagtttcag

SEQ ID NO: 2433501 - DNA, 25 bp, Homo sapien
ccccgagtttcagcttgtataggat

SEQ ID NO: 2433502 - DNA, 25 bp, Homo sapien
tcagcttgtataggatggtggtctt

SEQ ID NO: 2433503 - DNA, 25 bp, Homo sapien
catcaggatgcgcatctccttcttc

SEQ ID NO: 2433504 - DNA, 25 bp, Homo sapien
tgccactgcccctacttgggcccca

SEQ ID NO: 2433505 - DNA, 25 bp, Homo sapien
aagtcttccataccagggaccaggc

SEQ ID NO: 2433506 - DNA, 25 bp, Homo sapien
actgcccctacttgggccccactgt

SEQ ID NO: 2433507 - DNA, 25 bp, Homo sapien
tcaagtcttccataccagggaccag

SEQ ID NO: 2433508 - DNA, 25 bp, Homo sapien
ccaggccaaaaccagactgccactg

SEQ ID NO: 2433509 - DNA, 25 bp, Homo sapien
caagtcttccataccagggaccagg

SEQ ID NO: 2433510 - DNA, 25 bp, Homo sapien
ctggtccctggtatggaagacttga

SEQ ID NO: 2433511 - DNA, 25 bp, Homo sapien
cagtggcagtctggttttggcctgg

SEQ ID NO: 2433512 - DNA, 25 bp, Homo sapien
cctggtccctggtatggaagacttg

SEQ ID NO: 2433513 - DNA, 25 bp, Homo sapien
gcctggtccctggtatggaagactt

SEQ ID NO: 2433514 - DNA, 25 bp, Homo sapien
gacagtggggcccaagtaggggcag

SEQ ID NO: 2433515 - DNA, 25 bp, Homo sapien
tggtccctggtatggaagacttgat

SEQ ID NO: 2433516 - DNA, 25 bp, Homo sapien
atcggcttcttttaagagtgcggct

SEQ ID NO: 2433517 - DNA, 25 bp, Homo sapien
gatcggcttcttttaagagtgcggc

SEQ ID NO: 2433518 - DNA, 25 bp, Homo sapien
tcggcttcttttaagagtgcggctt

SEQ ID NO: 2433519 - DNA, 25 bp, Homo sapien
aagccgcactcttaaaagaagccga

SEQ ID NO: 2433520 - DNA, 25 bp, Homo sapien
gccgcactcttaaaagaagccgatc

SEQ ID NO: 2433521 - DNA, 25 bp, Homo sapien
agccgcactcttaaaagaagccgat

SEQ ID NO: 2433522 - DNA, 25 bp, Homo sapien
ggaggagtcataacatccattagtt

SEQ ID NO: 2433523 - DNA, 25 bp, Homo sapien
gggagatacatgatagctactggat

SEQ ID NO: 2433524 - DNA, 25 bp, Homo sapien
cataacatccattagtttcaaggtc

SEQ ID NO: 2433525 - DNA, 25 bp, Homo sapien
ggctgtgccagggagatacatgata

SEQ ID NO: 2433526 - DNA, 25 bp, Homo sapien
gatacatgatagctactggatattt

SEQ ID NO: 2433527 - DNA, 25 bp, Homo sapien
tgccagggagatacatgatagctac

SEQ ID NO: 2433528 - DNA, 25 bp, Homo sapien
gtagctatcatgtatctccctggca

SEQ ID NO: 2433529 - DNA, 25 bp, Homo sapien
ggaccttgaaactaatggatgttat

SEQ ID NO: 2433530 - DNA, 25 bp, Homo sapien
tatccagtagctatcatgtatctcc

SEQ ID NO: 2433531 - DNA, 25 bp, Homo sapien
aactaatggatgttatgactcctcc

SEQ ID NO: 2433532 - DNA, 25 bp, Homo sapien
taaatatccagtagctatcatgtat

SEQ ID NO: 2433533 - DNA, 25 bp, Homo sapien
tatcatgtatctccctggcacagcc

SEQ ID NO: 2433534 - DNA, 25 bp, Homo sapien
cagcatcgcagagacagctcctgct

SEQ ID NO: 2433535 - DNA, 25 bp, Homo sapien
atcagcatcgcagagacagctcctg

SEQ ID NO: 2433536 - DNA, 25 bp, Homo sapien
tgagcagcgaaatcttttttcagct

SEQ ID NO: 2433537 - DNA, 25 bp, Homo sapien
cttatgagcagcgaaatcttttttc

SEQ ID NO: 2433538 - DNA, 25 bp, Homo sapien
tatgagcagcgaaatcttttttcag

SEQ ID NO: 2433539 - DNA, 25 bp, Homo sapien
gaaatcttttttcagcttcagcatc

SEQ ID NO: 2433540 - DNA, 25 bp, Homo sapien
aagctgaaaaaagatttcgctgctc

SEQ ID NO: 2433541 - DNA, 25 bp, Homo sapien
agcaggagctgtctctgcgatgctg

SEQ ID NO: 2433542 - DNA, 25 bp, Homo sapien
gaaaaaagatttcgctgctcataag

SEQ ID NO: 2433543 - DNA, 25 bp, Homo sapien
gatgctgaagctgaaaaaagatttc

SEQ ID NO: 2433544 - DNA, 25 bp, Homo sapien
caggagctgtctctgcgatgctgat

SEQ ID NO: 2433545 - DNA, 25 bp, Homo sapien
gctgaaaaaagatttcgctgctcat

SEQ ID NO: 2433546 - DNA, 25 bp, Homo sapien
gaactggatttcgtctcctcttcca

SEQ ID NO: 2433547 - DNA, 25 bp, Homo sapien
agactagacgcttttcgactgcagg

SEQ ID NO: 2433548 - DNA, 25 bp, Homo sapien
ggaactggatttcgtctcctcttcc

SEQ ID NO: 2433549 - DNA, 25 bp, Homo sapien
aactggatttcgtctcctcttccac

SEQ ID NO: 2433550 - DNA, 25 bp, Homo sapien
gtggaagaggagacgaaatccagtt

SEQ ID NO: 2433551 - DNA, 25 bp, Homo sapien
ggaagaggagacgaaatccagttcc

SEQ ID NO: 2433552 - DNA, 25 bp, Homo sapien
tggaagaggagacgaaatccagttc

SEQ ID NO: 2433553 - DNA, 25 bp, Homo sapien
cctgcagtcgaaaagcgtctagtct

SEQ ID NO: 2433554 - DNA, 25 bp, Homo sapien
tgttgttggattgggtcacccctgg

SEQ ID NO: 2433555 - DNA, 25 bp, Homo sapien
attgggtcacccctggtctatggca

SEQ ID NO: 2433556 - DNA, 25 bp, Homo sapien
tgctgttgttggattgggtcacccc

SEQ ID NO: 2433557 - DNA, 25 bp, Homo sapien
tgggtcacccctggtctatggcatg

SEQ ID NO: 2433558 - DNA, 25 bp, Homo sapien
tgttggattgggtcacccctggtct

SEQ ID NO: 2433559 - DNA, 25 bp, Homo sapien
aatgtaacctaaaacctgtctctgc

SEQ ID NO: 2433560 - DNA, 25 bp, Homo sapien
tctatggcatgaaagttttattggg

SEQ ID NO: 2433561 - DNA, 25 bp, Homo sapien
tcagtgcaacaggacagaatctagt

SEQ ID NO: 2433562 - DNA, 25 bp, Homo sapien
gaatctagtcgctgcatacctcctt

SEQ ID NO: 2433563 - DNA, 25 bp, Homo sapien
ttttattgggaggagatctgctgca

SEQ ID NO: 2433564 - DNA, 25 bp, Homo sapien
gtctgattgcttgggtcagtgcaac

SEQ ID NO: 2433565 - DNA, 25 bp, Homo sapien
gatctgctgcaagagtctgattgct

SEQ ID NO: 2433566 - DNA, 25 bp, Homo sapien
tgcagcagatctcctcccaataaaa

SEQ ID NO: 2433567 - DNA, 25 bp, Homo sapien
actagattctgtcctgttgcactga

SEQ ID NO: 2433568 - DNA, 25 bp, Homo sapien
gttgcactgacccaagcaatcagac

SEQ ID NO: 2433569 - DNA, 25 bp, Homo sapien
aaggaggtatgcagcgactagattc

SEQ ID NO: 2433570 - DNA, 25 bp, Homo sapien
gcaatcagactcttgcagcagatct

SEQ ID NO: 2433571 - DNA, 25 bp, Homo sapien
ccaataaaactttcatgccatagac

SEQ ID NO: 2433572 - DNA, 25 bp, Homo sapien
gcagagacaggttttaggttacatt

SEQ ID NO: 2433573 - DNA, 25 bp, Homo sapien
ggggtgacccaatccaacaacagca

SEQ ID NO: 2433574 - DNA, 25 bp, Homo sapien
catgccatagaccaggggtgaccca

SEQ ID NO: 2433575 - DNA, 25 bp, Homo sapien
tgccatagaccaggggtgacccaat

SEQ ID NO: 2433576 - DNA, 25 bp, Homo sapien
gaccaggggtgacccaatccaacaa

SEQ ID NO: 2433577 - DNA, 25 bp, Homo sapien
cagagacaggttttaggttacattt

SEQ ID NO: 2433578 - DNA, 25 bp, Homo sapien
tgagaagaaatagtaaggccgtccc

SEQ ID NO: 2433579 - DNA, 25 bp, Homo sapien
gagtgagaagaaatagtaaggccgt

SEQ ID NO: 2433580 - DNA, 25 bp, Homo sapien
caggagtgagaagaaatagtaaggc

SEQ ID NO: 2433581 - DNA, 25 bp, Homo sapien
tggtcaggagtgagaagaaatagta

SEQ ID NO: 2433582 - DNA, 25 bp, Homo sapien
tatgtggtcaggagtgagaagaaat

SEQ ID NO: 2433583 - DNA, 25 bp, Homo sapien
aggattgtggtatgtggtcaggagt

SEQ ID NO: 2433584 - DNA, 25 bp, Homo sapien
gacggccttactatttcttctcact

SEQ ID NO: 2433585 - DNA, 25 bp, Homo sapien
tcactcctgaccacataccacaatc

SEQ ID NO: 2433586 - DNA, 25 bp, Homo sapien
tatttcttctcactcctgaccacat

SEQ ID NO: 2433587 - DNA, 25 bp, Homo sapien
gggacggccttactatttcttctca

SEQ ID NO: 2433588 - DNA, 25 bp, Homo sapien
gccttactatttcttctcactcctg

SEQ ID NO: 2433589 - DNA, 25 bp, Homo sapien
tactatttcttctcactcctgacca

SEQ ID NO: 2433590 - DNA, 25 bp, Homo sapien
tgattgcattaaggcgggtctccat

SEQ ID NO: 2433591 - DNA, 25 bp, Homo sapien
gaattcccgtcttgattgcattaag

SEQ ID NO: 2433592 - DNA, 25 bp, Homo sapien
cgtcttgattgcattaaggcgggtc

SEQ ID NO: 2433593 - DNA, 25 bp, Homo sapien
tcccgtcttgattgcattaaggcgg

SEQ ID NO: 2433594 - DNA, 25 bp, Homo sapien
gggaattcccgtcttgattgcatta

SEQ ID NO: 2433595 - DNA, 25 bp, Homo sapien
cttgattgcattaaggcgggtctcc

SEQ ID NO: 2433596 - DNA, 25 bp, Homo sapien
ttaatgcaatcaagacgggaattcc

SEQ ID NO: 2433597 - DNA, 25 bp, Homo sapien
atggagacccgccttaatgcaatca

SEQ ID NO: 2433598 - DNA, 25 bp, Homo sapien
gacccgccttaatgcaatcaagacg

SEQ ID NO: 2433599 - DNA, 25 bp, Homo sapien
aatgcaatcaagacgggaattcccc

SEQ ID NO: 2433600 - DNA, 25 bp, Homo sapien
ggagacccgccttaatgcaatcaag

SEQ ID NO: 2433601 - DNA, 25 bp, Homo sapien
gccttaatgcaatcaagacgggaat

SEQ ID NO: 2433602 - DNA, 25 bp, Homo sapien
tgttaaaacgggccacttgattagc

SEQ ID NO: 2433603 - DNA, 25 bp, Homo sapien
ctgttaaaacgggccacttgattag

SEQ ID NO: 2433604 - DNA, 25 bp, Homo sapien
ttaaaacgggccacttgattagcaa

SEQ ID NO: 2433605 - DNA, 25 bp, Homo sapien
gttaaaacgggccacttgattagca

SEQ ID NO: 2433606 - DNA, 25 bp, Homo sapien
ctaatcaagtggcccgttttaacag

SEQ ID NO: 2433607 - DNA, 25 bp, Homo sapien
gctaatcaagtggcccgttttaaca

SEQ ID NO: 2433608 - DNA, 25 bp, Homo sapien
ttgctaatcaagtggcccgttttaa

SEQ ID NO: 2433609 - DNA, 25 bp, Homo sapien
tgctaatcaagtggcccgttttaac

SEQ ID NO: 2433610 - DNA, 25 bp, Homo sapien
aacgggccacttgattagcaaagtg

SEQ ID NO: 2433611 - DNA, 25 bp, Homo sapien
taaaacgggccacttgattagcaaa

SEQ ID NO: 2433612 - DNA, 25 bp, Homo sapien
aaaacgggccacttgattagcaaag

SEQ ID NO: 2433613 - DNA, 25 bp, Homo sapien
aaacgggccacttgattagcaaagt

SEQ ID NO: 2433614 - DNA, 25 bp, Homo sapien
ttaaaacgggccacttgattagcaa

SEQ ID NO: 2433615 - DNA, 25 bp, Homo sapien
gttaaaacgggccacttgattagca

SEQ ID NO: 2433616 - DNA, 25 bp, Homo sapien
cactttgctaatcaagtggcccgtt

SEQ ID NO: 2433617 - DNA, 25 bp, Homo sapien
tttgctaatcaagtggcccgtttta

SEQ ID NO: 2433618 - DNA, 25 bp, Homo sapien
actttgctaatcaagtggcccgttt

SEQ ID NO: 2433619 - DNA, 25 bp, Homo sapien
ctttgctaatcaagtggcccgtttt

SEQ ID NO: 2433620 - DNA, 25 bp, Homo sapien
ttgctaatcaagtggcccgttttaa

SEQ ID NO: 2433621 - DNA, 25 bp, Homo sapien
tgctaatcaagtggcccgttttaac

SEQ ID NO: 2433622 - DNA, 25 bp, Homo sapien
caggattcccggaacagaaaatgga

SEQ ID NO: 2433623 - DNA, 25 bp, Homo sapien
gaagtaccaggattcccggaacaga

SEQ ID NO: 2433624 - DNA, 25 bp, Homo sapien
cttacgcgaatcgtttgagggaagg

SEQ ID NO: 2433625 - DNA, 25 bp, Homo sapien
cattgcttacgcgaatcgtttgagg

SEQ ID NO: 2433626 - DNA, 25 bp, Homo sapien
ggagccattgcttacgcgaatcgtt

SEQ ID NO: 2433627 - DNA, 25 bp, Homo sapien
atggagccattgcttacgcgaatcg

SEQ ID NO: 2433628 - DNA, 25 bp, Homo sapien
caaacgattcgcgtaagcaatggct

SEQ ID NO: 2433629 - DNA, 25 bp, Homo sapien
cgattcgcgtaagcaatggctccat

SEQ ID NO: 2433630 - DNA, 25 bp, Homo sapien
tctgttccgggaatcctggtacttc

SEQ ID NO: 2433631 - DNA, 25 bp, Homo sapien
cctcaaacgattcgcgtaagcaatg

SEQ ID NO: 2433632 - DNA, 25 bp, Homo sapien
ccttccctcaaacgattcgcgtaag

SEQ ID NO: 2433633 - DNA, 25 bp, Homo sapien
tccattttctgttccgggaatcctg

SEQ ID NO: 2433634 - DNA, 25 bp, Homo sapien
aagtcggcttggggagccagaggga

SEQ ID NO: 2433635 - DNA, 25 bp, Homo sapien
gggagcggagcggaacctgcggggc

SEQ ID NO: 2433636 - DNA, 25 bp, Homo sapien
tgaagtcggcttggggagccagagg

SEQ ID NO: 2433637 - DNA, 25 bp, Homo sapien
gaagtcggcttggggagccagaggg

SEQ ID NO: 2433638 - DNA, 25 bp, Homo sapien
gccgcagcggcgcagctgatagcag

SEQ ID NO: 2433639 - DNA, 25 bp, Homo sapien
ccgcagcggcgcagctgatagcagg

SEQ ID NO: 2433640 - DNA, 25 bp, Homo sapien
tccctctggctccccaagccgactt

SEQ ID NO: 2433641 - DNA, 25 bp, Homo sapien
cctgctatcagctgcgccgctgcgg

SEQ ID NO: 2433642 - DNA, 25 bp, Homo sapien
ccctctggctccccaagccgacttc

SEQ ID NO: 2433643 - DNA, 25 bp, Homo sapien
ctgctatcagctgcgccgctgcggc

SEQ ID NO: 2433644 - DNA, 25 bp, Homo sapien
gccccgcaggttccgctccgctccc

SEQ ID NO: 2433645 - DNA, 25 bp, Homo sapien
cctctggctccccaagccgacttca

SEQ ID NO: 2433646 - DNA, 25 bp, Homo sapien
gggagtgggccagggcagcagccgg

SEQ ID NO: 2433647 - DNA, 25 bp, Homo sapien
tgaagtcggcttggggagccagagg

SEQ ID NO: 2433648 - DNA, 25 bp, Homo sapien
agcggcgcagctgatagcaggaaca

SEQ ID NO: 2433649 - DNA, 25 bp, Homo sapien
cagcggcgcagctgatagcaggaac

SEQ ID NO: 2433650 - DNA, 25 bp, Homo sapien
cagcagccgggctgaagtcggcttg

SEQ ID NO: 2433651 - DNA, 25 bp, Homo sapien
cagagggagcggagcggaacctgcg

SEQ ID NO: 2433652 - DNA, 25 bp, Homo sapien
tgttcctgctatcagctgcgccgct

SEQ ID NO: 2433653 - DNA, 25 bp, Homo sapien
gcaggttccgctccgctccctctgg

SEQ ID NO: 2433654 - DNA, 25 bp, Homo sapien
ctgctatcagctgcgccgctgcggc

SEQ ID NO: 2433655 - DNA, 25 bp, Homo sapien
cctctggctccccaagccgacttca

SEQ ID NO: 2433656 - DNA, 25 bp, Homo sapien
gttcctgctatcagctgcgccgctg

SEQ ID NO: 2433657 - DNA, 25 bp, Homo sapien
caagccgacttcagcccggctgctg

SEQ ID NO: 2433658 - DNA, 25 bp, Homo sapien
cacagctccagtcgccgtcgcggct

SEQ ID NO: 2433659 - DNA, 25 bp, Homo sapien
acgccgcacagctccagtcgccgtc

SEQ ID NO: 2433660 - DNA, 25 bp, Homo sapien
tacgccgcacagctccagtcgccgt

SEQ ID NO: 2433661 - DNA, 25 bp, Homo sapien
gtacgccgcacagctccagtcgccg

SEQ ID NO: 2433662 - DNA, 25 bp, Homo sapien
cgcacagctccagtcgccgtcgcgg

SEQ ID NO: 2433663 - DNA, 25 bp, Homo sapien
tcgccgtcgcggcttccggtgctag

SEQ ID NO: 2433664 - DNA, 25 bp, Homo sapien
gacggcgactggagctgtgcggcgt

SEQ ID NO: 2433665 - DNA, 25 bp, Homo sapien
ctagcaccggaagccgcgacggcga

SEQ ID NO: 2433666 - DNA, 25 bp, Homo sapien
cgcgacggcgactggagctgtgcgg

SEQ ID NO: 2433667 - DNA, 25 bp, Homo sapien
cggcgactggagctgtgcggcgtac

SEQ ID NO: 2433668 - DNA, 25 bp, Homo sapien
cggaagccgcgacggcgactggagc

SEQ ID NO: 2433669 - DNA, 25 bp, Homo sapien
agccgcgacggcgactggagctgtg

SEQ ID NO: 2433670 - DNA, 25 bp, Homo sapien
ggtctcgcgagaactgccgctagct

SEQ ID NO: 2433671 - DNA, 25 bp, Homo sapien
gatgggtctcgcgagaactgccgct

SEQ ID NO: 2433672 - DNA, 25 bp, Homo sapien
tagctaccgcgcagctatcgcgcga

SEQ ID NO: 2433673 - DNA, 25 bp, Homo sapien
taccgcgcagctatcgcgcgatcgg

SEQ ID NO: 2433674 - DNA, 25 bp, Homo sapien
agaactgccgctagctaccgcgcag

SEQ ID NO: 2433675 - DNA, 25 bp, Homo sapien
tctcgcgagaactgccgctagctac

SEQ ID NO: 2433676 - DNA, 25 bp, Homo sapien
tagctagcggcagttctcgcgagac

SEQ ID NO: 2433677 - DNA, 25 bp, Homo sapien
cccgatcgcgcgatagctgcgcggt

SEQ ID NO: 2433678 - DNA, 25 bp, Homo sapien
tgcgcggtagctagcggcagttctc

SEQ ID NO: 2433679 - DNA, 25 bp, Homo sapien
tcgcgcgatagctgcgcggtagcta

SEQ ID NO: 2433680 - DNA, 25 bp, Homo sapien
ggatacttcccacctccccgatcgc

SEQ ID NO: 2433681 - DNA, 25 bp, Homo sapien
tagcggcagttctcgcgagacccat

SEQ ID NO: 2433682 - DNA, 25 bp, Homo sapien
caaatggatagtgtgccaatgtaac

SEQ ID NO: 2433683 - DNA, 25 bp, Homo sapien
atgtgtgtaagcacccagtcattat

SEQ ID NO: 2433684 - DNA, 25 bp, Homo sapien
gtcaaatggatagtgtgccaatgta

SEQ ID NO: 2433685 - DNA, 25 bp, Homo sapien
taagcacccagtcattatgcttatg

SEQ ID NO: 2433686 - DNA, 25 bp, Homo sapien
ggagggtccccattaacatctgaat

SEQ ID NO: 2433687 - DNA, 25 bp, Homo sapien
gagacaacttccctaagggcctgga

SEQ ID NO: 2433688 - DNA, 25 bp, Homo sapien
gtggtgaaactatagggactcccca

SEQ ID NO: 2433689 - DNA, 25 bp, Homo sapien
cagagcaaagggctgaaaaggcgcc

SEQ ID NO: 2433690 - DNA, 25 bp, Homo sapien
tgtctgccggagcacgttgtgccca

SEQ ID NO: 2433691 - DNA, 25 bp, Homo sapien
ccagaattgcggttgtgggtatcaa

SEQ ID NO: 2433692 - DNA, 25 bp, Homo sapien
aaagtagaccagctctcctgagagg

SEQ ID NO: 2433693 - DNA, 25 bp, Homo sapien
caatggcagcgctcaactcgtgtct

SEQ ID NO: 2433694 - DNA, 25 bp, Homo sapien
agttgtcctgactcccaatccagtg

SEQ ID NO: 2433695 - DNA, 25 bp, Homo sapien
cacttataaaattgggagtctggcc

SEQ ID NO: 2433696 - DNA, 25 bp, Homo sapien
tggcccacagcatgcctaaattctg

SEQ ID NO: 2433697 - DNA, 25 bp, Homo sapien
tatgcagtcagccaacgatgaggca

SEQ ID NO: 2433698 - DNA, 25 bp, Homo sapien
tgtcccggggagcttccctggaatc

SEQ ID NO: 2433699 - DNA, 25 bp, Homo sapien
cgcattcgtgcctggatgtcccggg

SEQ ID NO: 2433700 - DNA, 25 bp, Homo sapien
tccatgtcatggttacagccacccc

SEQ ID NO: 2433701 - DNA, 25 bp, Homo sapien
ccaccctgttgttgtggattcgcat

SEQ ID NO: 2433702 - DNA, 25 bp, Homo sapien
tgctcaccactgcccttccagccac

SEQ ID NO: 2433703 - DNA, 25 bp, Homo sapien
tgcagcagtttggccctcagccgat

SEQ ID NO: 2433704 - DNA, 25 bp, Homo sapien
agtttggccctcagccgatcctgct

SEQ ID NO: 2433705 - DNA, 25 bp, Homo sapien
agagtgggggaaactcttgcctcgg

SEQ ID NO: 2433706 - DNA, 25 bp, Homo sapien
aggctgcaggccgtggctactgcgt

SEQ ID NO: 2433707 - DNA, 25 bp, Homo sapien
gtggctactgcgtgcatgaccccag

SEQ ID NO: 2433708 - DNA, 25 bp, Homo sapien
aggccgtggctactgcgtgcatgac

SEQ ID NO: 2433709 - DNA, 25 bp, Homo sapien
gctactgcgtgcatgaccccagcag

SEQ ID NO: 2433710 - DNA, 25 bp, Homo sapien
atgagaagggtgtgatggtggaggt

SEQ ID NO: 2433711 - DNA, 25 bp, Homo sapien
gatgagaagggtgtgatggtggagg

SEQ ID NO: 2433712 - DNA, 25 bp, Homo sapien
tgatggtggaggtaaggttgacagg

SEQ ID NO: 2433713 - DNA, 25 bp, Homo sapien
tggtggaggtaaggttgacaggcag

SEQ ID NO: 2433714 - DNA, 25 bp, Homo sapien
tccaagccttcccctacaccaggcc

SEQ ID NO: 2433715 - DNA, 25 bp, Homo sapien
accgcgatgtgcagaccctgaagcg

SEQ ID NO: 2433716 - DNA, 25 bp, Homo sapien
gccaggcaacttcaggcccagaatc

SEQ ID NO: 2433717 - DNA, 25 bp, Homo sapien
tgctgacactcgtggaccgcgatgt

SEQ ID NO: 2433718 - DNA, 25 bp, Homo sapien
cggacagcgtcaagcacacggtgtt

SEQ ID NO: 2433719 - DNA, 25 bp, Homo sapien
cgtctggggtctgcggtccagaccc

SEQ ID NO: 2433720 - DNA, 25 bp, Homo sapien
aggcgtctggggtctgcggtccaga

SEQ ID NO: 2433721 - DNA, 25 bp, Homo sapien
gggtctgcggtccagacccctccaa

SEQ ID NO: 2433722 - DNA, 25 bp, Homo sapien
cccgggtcggtgtttctatggcctg

SEQ ID NO: 2433723 - DNA, 25 bp, Homo sapien
aacgccaggaacaggagacccgcga

SEQ ID NO: 2433724 - DNA, 25 bp, Homo sapien
cgccaggaacaggagacccgcgagg

SEQ ID NO: 2433725 - DNA, 25 bp, Homo sapien
agacccgcgaggcccgagggcggag

SEQ ID NO: 2433726 - DNA, 25 bp, Homo sapien
acgccaggaacaggagacccgcgag

SEQ ID NO: 2433727 - DNA, 25 bp, Homo sapien
agcccggaggctccggtgggcagat

SEQ ID NO: 2433728 - DNA, 25 bp, Homo sapien
gaagcccggaggctccggtgggcag

SEQ ID NO: 2433729 - DNA, 25 bp, Homo sapien
tcgaagcccggaggctccggtgggc

SEQ ID NO: 2433730 - DNA, 25 bp, Homo sapien
aagcccggaggctccggtgggcaga

SEQ ID NO: 2433731 - DNA, 25 bp, Homo sapien
cttgatgcgggttcaggaatagggc

SEQ ID NO: 2433732 - DNA, 25 bp, Homo sapien
gcgggacgggagacttgatgcgggt

SEQ ID NO: 2433733 - DNA, 25 bp, Homo sapien
ggttcaggaatagggcggctcgctt

SEQ ID NO: 2433734 - DNA, 25 bp, Homo sapien
gacgggagacttgatgcgggttcag

SEQ ID NO: 2433735 - DNA, 25 bp, Homo sapien
ggaggtcttaaagaagaagagtcaa

SEQ ID NO: 2433736 - DNA, 25 bp, Homo sapien
aggactcaagcgagcacccctggaa

SEQ ID NO: 2433737 - DNA, 25 bp, Homo sapien
tcaaggcgttgtcccagctcaggac

SEQ ID NO: 2433738 - DNA, 25 bp, Homo sapien
gaaccttgcccaatcagacacaacg

SEQ ID NO: 2433739 - DNA, 25 bp, Homo sapien
tagcaagccggcgagcaaaggactg

SEQ ID NO: 2433740 - DNA, 25 bp, Homo sapien
tccgagacaggcacggttgggttgc

SEQ ID NO: 2433741 - DNA, 25 bp, Homo sapien
gagggagtgatcgagagagctagca

SEQ ID NO: 2433742 - DNA, 25 bp, Homo sapien
tcactagtgctgcttaaaccgtggg

SEQ ID NO: 2433743 - DNA, 25 bp, Homo sapien
tgtccagccatcgggggttcctggg

SEQ ID NO: 2433744 - DNA, 25 bp, Homo sapien
gcagggcgcgcctgtaacagctcgt

SEQ ID NO: 2433745 - DNA, 25 bp, Homo sapien
acgtacagcggacgcctgggcacag

SEQ ID NO: 2433746 - DNA, 25 bp, Homo sapien
cacgacctcgtctacttcgagaaat

SEQ ID NO: 2433747 - DNA, 25 bp, Homo sapien
gcccaacttctgcacgtacagcgga

SEQ ID NO: 2433748 - DNA, 25 bp, Homo sapien
ccataggatggtgtcatcaggactg

SEQ ID NO: 2433749 - DNA, 25 bp, Homo sapien
tcaggactgtgcttgatgcgccacc

SEQ ID NO: 2433750 - DNA, 25 bp, Homo sapien
aagtgagggaaagactagtcctgaa

SEQ ID NO: 2433751 - DNA, 25 bp, Homo sapien
ccagggcgctggatacacgttggcc

SEQ ID NO: 2433752 - DNA, 25 bp, Homo sapien
gggagatgttaagagagacagcagg

SEQ ID NO: 2433753 - DNA, 25 bp, Homo sapien
cagtgctggcagagtggctgtggat

SEQ ID NO: 2433754 - DNA, 25 bp, Homo sapien
tggctgtggatgtgatgggagatgt

SEQ ID NO: 2433755 - DNA, 25 bp, Homo sapien
gatgtgatgggagatgttaagagag

SEQ ID NO: 2433756 - DNA, 25 bp, Homo sapien
cctggccgaactcagagcggtagtg

SEQ ID NO: 2433757 - DNA, 25 bp, Homo sapien
caccttgtggtgactcttgggagag

SEQ ID NO: 2433758 - DNA, 25 bp, Homo sapien
ttgggagagctcctggagagacgct

SEQ ID NO: 2433759 - DNA, 25 bp, Homo sapien
tggagagacgctagccaagaaggca

SEQ ID NO: 2433760 - DNA, 25 bp, Homo sapien
ggcagtgtgcaaggcgctttacata

SEQ ID NO: 2433761 - DNA, 25 bp, Homo sapien
acatacattatcgcattaaatcctc

SEQ ID NO: 2433762 - DNA, 25 bp, Homo sapien
agtgatgtggccaagttcacatggc

SEQ ID NO: 2433763 - DNA, 25 bp, Homo sapien
tgtgcaaggcgctttacatacatta

SEQ ID NO: 2433764 - DNA, 25 bp, Homo sapien
caggattttttcaggtgggcgatac

SEQ ID NO: 2433765 - DNA, 25 bp, Homo sapien
ggcctaaagaggtcccaagctgatt

SEQ ID NO: 2433766 - DNA, 25 bp, Homo sapien
tgcgcgcgccctgtagtggctatag

SEQ ID NO: 2433767 - DNA, 25 bp, Homo sapien
gggtcagtgacagggccgctatctt

SEQ ID NO: 2433768 - DNA, 25 bp, Homo sapien
cctgatcctggttaggcctctctgc

SEQ ID NO: 2433769 - DNA, 25 bp, Homo sapien
ccttgtgccctgaacataacagaca

SEQ ID NO: 2433770 - DNA, 25 bp, Homo sapien
cagtggacccaaggatggatgcgtt

SEQ ID NO: 2433771 - DNA, 25 bp, Homo sapien
tggttgttgctggacctatgcctct

SEQ ID NO: 2433772 - DNA, 25 bp, Homo sapien
gttgggtccctctgatgtccctcac

SEQ ID NO: 2433773 - DNA, 25 bp, Homo sapien
cctgttgggtccctctgatgtccct

SEQ ID NO: 2433774 - DNA, 25 bp, Homo sapien
ccctgttgggtccctctgatgtccc

SEQ ID NO: 2433775 - DNA, 25 bp, Homo sapien
tgttgggtccctctgatgtccctca

SEQ ID NO: 2433776 - DNA, 25 bp, Homo sapien
tggcgaactgtttccaacctcgggc

SEQ ID NO: 2433777 - DNA, 25 bp, Homo sapien
tcagaggagccgctatggacgctga

SEQ ID NO: 2433778 - DNA, 25 bp, Homo sapien
tcagcttcgtccgtgtccgagtcag

SEQ ID NO: 2433779 - DNA, 25 bp, Homo sapien
gacctcctcggtttggcttatgaca

SEQ ID NO: 2433780 - DNA, 25 bp, Homo sapien
ggatacgggacacggcttctcgcag

SEQ ID NO: 2433781 - DNA, 25 bp, Homo sapien
tgtgtggcggcggatacgggacacg

SEQ ID NO: 2433782 - DNA, 25 bp, Homo sapien
acgggacacggcttctcgcagggcc

SEQ ID NO: 2433783 - DNA, 25 bp, Homo sapien
cggcggatacgggacacggcttctc

SEQ ID NO: 2433784 - DNA, 25 bp, Homo sapien
cctaaggcttggtgctctgggctac

SEQ ID NO: 2433785 - DNA, 25 bp, Homo sapien
ggctcccgaagctgctgggcctaag

SEQ ID NO: 2433786 - DNA, 25 bp, Homo sapien
cgccacttccgacccctcggctctg

SEQ ID NO: 2433787 - DNA, 25 bp, Homo sapien
ggcgcgccgctggaccaccgccact

SEQ ID NO: 2433788 - DNA, 25 bp, Homo sapien
gagccccaagatgcggaaagtgcgc

SEQ ID NO: 2433789 - DNA, 25 bp, Homo sapien
tccagtgtggagtcccccggcctcc

SEQ ID NO: 2433790 - DNA, 25 bp, Homo sapien
tgcgtgggggcgtcccgcaggttta

SEQ ID NO: 2433791 - DNA, 25 bp, Homo sapien
gatgcggaaagtgcgctcctccagt

SEQ ID NO: 2433792 - DNA, 25 bp, Homo sapien
tgtaaaaggcgactgctcgacagcc

SEQ ID NO: 2433793 - DNA, 25 bp, Homo sapien
gctcgacagccgcttttgacaaggg

SEQ ID NO: 2433794 - DNA, 25 bp, Homo sapien
gctggtgtaaaaggcgactgctcga

SEQ ID NO: 2433795 - DNA, 25 bp, Homo sapien
ggcgactgctcgacagccgcttttg

SEQ ID NO: 2433796 - DNA, 25 bp, Homo sapien
ggttggaacatattgggatcgtatc

SEQ ID NO: 2433797 - DNA, 25 bp, Homo sapien
tccttgccgggcttcgattggctgg

SEQ ID NO: 2433798 - DNA, 25 bp, Homo sapien
tacgcacgtggcgtcaatgacaaag

SEQ ID NO: 2433799 - DNA, 25 bp, Homo sapien
tgtcaccccagagggcaaaagctgc

SEQ ID NO: 2433800 - DNA, 25 bp, Homo sapien
ttccctcgagcccttgaggtggtgc

SEQ ID NO: 2433801 - DNA, 25 bp, Homo sapien
gaaaccagatctgttctccttcttt

SEQ ID NO: 2433802 - DNA, 25 bp, Homo sapien
cagagattctctccatccggtgcct

SEQ ID NO: 2433803 - DNA, 25 bp, Homo sapien
tgggcacggcgggtcgccttccaac

SEQ ID NO: 2433804 - DNA, 25 bp, Homo sapien
cggggcacagggagccgcagttgca

SEQ ID NO: 2433805 - DNA, 25 bp, Homo sapien
ctgggagcgggatgcggggcacagg

SEQ ID NO: 2433806 - DNA, 25 bp, Homo sapien
gatgcggggcacagggagccgcagt

SEQ ID NO: 2433807 - DNA, 25 bp, Homo sapien
cgggatgcggggcacagggagccgc

SEQ ID NO: 2433808 - DNA, 25 bp, Homo sapien
ccaagagaccttgcccctgtcggag

SEQ ID NO: 2433809 - DNA, 25 bp, Homo sapien
cccgcaggagctatctcggtgcctg

SEQ ID NO: 2433810 - DNA, 25 bp, Homo sapien
ggatggctgtcgctaccactgttca

SEQ ID NO: 2433811 - DNA, 25 bp, Homo sapien
tcgctaccactgttcaggtcagcag

SEQ ID NO: 2433812 - DNA, 25 bp, Homo sapien
gatgaagtgggcacctgagagttcc

SEQ ID NO: 2433813 - DNA, 25 bp, Homo sapien
tctcttagtccccaaggtcctatgg

SEQ ID NO: 2433814 - DNA, 25 bp, Homo sapien
aggacgtcccggtagatccgaggat

SEQ ID NO: 2433815 - DNA, 25 bp, Homo sapien
ccttcgtaagaaggtggagccacgt

SEQ ID NO: 2433816 - DNA, 25 bp, Homo sapien
cagccttgcgcctttttcgctcggt

SEQ ID NO: 2433817 - DNA, 25 bp, Homo sapien
ttttctcttgctcccgagctcggac

SEQ ID NO: 2433818 - DNA, 25 bp, Homo sapien
ccgctcctgcgacgccgctttcctt

SEQ ID NO: 2433819 - DNA, 25 bp, Homo sapien
ccgccagttggtcgcctcctgcagc

SEQ ID NO: 2433820 - DNA, 25 bp, Homo sapien
ggcggcggctgtggggatcccgggc

SEQ ID NO: 2433821 - DNA, 25 bp, Homo sapien
tgtgcacgtgcgtatatgttaggac

SEQ ID NO: 2433822 - DNA, 25 bp, Homo sapien
actgaagtcgaagcgggactcctcg

SEQ ID NO: 2433823 - DNA, 25 bp, Homo sapien
atgcacactttaacagcgtctgccc

SEQ ID NO: 2433824 - DNA, 25 bp, Homo sapien
cactggagaccacttggggcagcca

SEQ ID NO: 2433825 - DNA, 25 bp, Homo sapien
ggcgcggcgactataatgacaggaa

SEQ ID NO: 2433826 - DNA, 25 bp, Homo sapien
gaagtccatgggctgtcgagaaggg

SEQ ID NO: 2433827 - DNA, 25 bp, Homo sapien
aacccgcgagcccagtggctggcct

SEQ ID NO: 2433828 - DNA, 25 bp, Homo sapien
gtgcggttctggaacccgcgagccc

SEQ ID NO: 2433829 - DNA, 25 bp, Homo sapien
ctcggagaacagtgggccatccagc

SEQ ID NO: 2433830 - DNA, 25 bp, Homo sapien
gagaacagtgggccatccagcatcc

SEQ ID NO: 2433831 - DNA, 25 bp, Homo sapien
aacagtgggccatccagcatcctgc

SEQ ID NO: 2433832 - DNA, 25 bp, Homo sapien
cgcccactgcagagccgcgggcccg

SEQ ID NO: 2433833 - DNA, 25 bp, Homo sapien
tcctccatatagcacggaacaggtg

SEQ ID NO: 2433834 - DNA, 25 bp, Homo sapien
caggcagtgagttgggcatatcccc

SEQ ID NO: 2433835 - DNA, 25 bp, Homo sapien
gcacagagcctatagttcacccaga

SEQ ID NO: 2433836 - DNA, 25 bp, Homo sapien
tatcttagggttgaatcagggccaa

SEQ ID NO: 2433837 - DNA, 25 bp, Homo sapien
gatacaattcccttgaccacatcat

SEQ ID NO: 2433838 - DNA, 25 bp, Homo sapien
gtcagacagtgatacaattcccttg

SEQ ID NO: 2433839 - DNA, 25 bp, Homo sapien
catccaccactacaagtcggtgaac

SEQ ID NO: 2433840 - DNA, 25 bp, Homo sapien
tttcatccaccactacaagtcggtg

SEQ ID NO: 2433841 - DNA, 25 bp, Homo sapien
agtaatgtgatcgatgttgcaaggc

SEQ ID NO: 2433842 - DNA, 25 bp, Homo sapien
gcaaggctttagtcacagatacatc

SEQ ID NO: 2433843 - DNA, 25 bp, Homo sapien
tgcaggtagcacttgagaacaccct

SEQ ID NO: 2433844 - DNA, 25 bp, Homo sapien
tctgcttccactagcctgttgatga

SEQ ID NO: 2433845 - DNA, 25 bp, Homo sapien
aagcaagagagccagcctccaaacc

SEQ ID NO: 2433846 - DNA, 25 bp, Homo sapien
aacctcaacagagggattcagggca

SEQ ID NO: 2433847 - DNA, 25 bp, Homo sapien
ccatccaacctcaacagagggattc

SEQ ID NO: 2433848 - DNA, 25 bp, Homo sapien
cagagggattcagggcaattgtcag

SEQ ID NO: 2433849 - DNA, 25 bp, Homo sapien
acttggagtagatgtccaccacacg

SEQ ID NO: 2433850 - DNA, 25 bp, Homo sapien
aacttggagtagatgtccaccacac

SEQ ID NO: 2433851 - DNA, 25 bp, Homo sapien
ttggagtagatgtccaccacacgcc

SEQ ID NO: 2433852 - DNA, 25 bp, Homo sapien
caaacttggagtagatgtccaccac

SEQ ID NO: 2433853 - DNA, 25 bp, Homo sapien
ttctcatccaccactggcagggctg

SEQ ID NO: 2433854 - DNA, 25 bp, Homo sapien
atccaccactggcagggctgagact

SEQ ID NO: 2433855 - DNA, 25 bp, Homo sapien
ggcagggctgagactcgatgctgta

SEQ ID NO: 2433856 - DNA, 25 bp, Homo sapien
gcagggctgagactcgatgctgtac

SEQ ID NO: 2433857 - DNA, 25 bp, Homo sapien
tccccagagccacatagacgggggt

SEQ ID NO: 2433858 - DNA, 25 bp, Homo sapien
gtggtagtgcgaaccatagcaatat

SEQ ID NO: 2433859 - DNA, 25 bp, Homo sapien
gtagctcttccagagacttggacat

SEQ ID NO: 2433860 - DNA, 25 bp, Homo sapien
tagacgggggtggtagtgcgaacca

SEQ ID NO: 2433861 - DNA, 25 bp, Homo sapien
gcctgtggatcttgttccgaattaa

SEQ ID NO: 2433862 - DNA, 25 bp, Homo sapien
gaacttcagaatgcgcttgtgggtg

SEQ ID NO: 2433863 - DNA, 25 bp, Homo sapien
gattctgggtcaataactggcagcc

SEQ ID NO: 2433864 - DNA, 25 bp, Homo sapien
gtacaaagtattgcctgattctggg

SEQ ID NO: 2433865 - DNA, 25 bp, Homo sapien
caagcggtttaaaggagtcctggag

SEQ ID NO: 2433866 - DNA, 25 bp, Homo sapien
tgcagacaagcggtttaaaggagtc

SEQ ID NO: 2433867 - DNA, 25 bp, Homo sapien
ggagaaatgcagacaagcggtttaa

SEQ ID NO: 2433868 - DNA, 25 bp, Homo sapien
ttaaaggagtcctggagatacacct

SEQ ID NO: 2433869 - DNA, 25 bp, Homo sapien
ttctatcttgtgttcttctagctca

SEQ ID NO: 2433870 - DNA, 25 bp, Homo sapien
tatcttgtgttcttctagctcatag

SEQ ID NO: 2433871 - DNA, 25 bp, Homo sapien
agtttctatcttgtgttcttctagc

SEQ ID NO: 2433872 - DNA, 25 bp, Homo sapien
caagtttctatcttgtgttcttcta

SEQ ID NO: 2433873 - DNA, 25 bp, Homo sapien
gctgatttatagtagcggtgcagga

SEQ ID NO: 2433874 - DNA, 25 bp, Homo sapien
caaggctgatttatagtagcggtgc

SEQ ID NO: 2433875 - DNA, 25 bp, Homo sapien
aaggctgatttatagtagcggtgca

SEQ ID NO: 2433876 - DNA, 25 bp, Homo sapien
aggctgatttatagtagcggtgcag

SEQ ID NO: 2433877 - DNA, 25 bp, Homo sapien
tagaggacaagacagagccctcagc

SEQ ID NO: 2433878 - DNA, 25 bp, Homo sapien
ctagaggacaagacagagccctcag

SEQ ID NO: 2433879 - DNA, 25 bp, Homo sapien
agaggacaagacagagccctcagca

SEQ ID NO: 2433880 - DNA, 25 bp, Homo sapien
ccaataatattgtgttccagaaact

SEQ ID NO: 2433881 - DNA, 25 bp, Homo sapien
gtacaccgttagtcaccaaagcaaa

SEQ ID NO: 2433882 - DNA, 25 bp, Homo sapien
cataaaggggcagctcgtacaccgt

SEQ ID NO: 2433883 - DNA, 25 bp, Homo sapien
ttgcttcttactatcccataaaggg

SEQ ID NO: 2433884 - DNA, 25 bp, Homo sapien
gggcagctcgtacaccgttagtcac

SEQ ID NO: 2433885 - DNA, 25 bp, Homo sapien
taataatcataaaggcaaatccaca

SEQ ID NO: 2433886 - DNA, 25 bp, Homo sapien
tgtagccaagacagtaataatcata

SEQ ID NO: 2433887 - DNA, 25 bp, Homo sapien
caagacagtaataatcataaaggca

SEQ ID NO: 2433888 - DNA, 25 bp, Homo sapien
cagtaataatcataaaggcaaatcc

SEQ ID NO: 2433889 - DNA, 25 bp, Homo sapien
ggataaggatattacccttaggatg

SEQ ID NO: 2433890 - DNA, 25 bp, Homo sapien
ggcatgttgggtaaaacatgagact

SEQ ID NO: 2433891 - DNA, 25 bp, Homo sapien
ctaacttcacagaaggataaggata

SEQ ID NO: 2433892 - DNA, 25 bp, Homo sapien
aagaacagtgtttgggcatgttggg

SEQ ID NO: 2433893 - DNA, 25 bp, Homo sapien
gcagcgatgagacttcatgaaggaa

SEQ ID NO: 2433894 - DNA, 25 bp, Homo sapien
gggaatcaggtcatagcagcgatga

SEQ ID NO: 2433895 - DNA, 25 bp, Homo sapien
ccaatttggagcttgtgggaatcag

SEQ ID NO: 2433896 - DNA, 25 bp, Homo sapien
tgcagggacgtatcaaatacaacca

SEQ ID NO: 2433897 - DNA, 25 bp, Homo sapien
ggtgggatagttagtagcttccttc

SEQ ID NO: 2433898 - DNA, 25 bp, Homo sapien
gttagtagcttccttccacataaaa

SEQ ID NO: 2433899 - DNA, 25 bp, Homo sapien
catagggtgggatagttagtagctt

SEQ ID NO: 2433900 - DNA, 25 bp, Homo sapien
gatagttagtagcttccttccacat

SEQ ID NO: 2433901 - DNA, 25 bp, Homo sapien
taaccaaagttatatagacacacag

SEQ ID NO: 2433902 - DNA, 25 bp, Homo sapien
gcaagaaagactcaaacaaacccag

SEQ ID NO: 2433903 - DNA, 25 bp, Homo sapien
gacacacagttaaatcagtccaaca

SEQ ID NO: 2433904 - DNA, 25 bp, Homo sapien
caacaaatgtgtaagtaatgtcctc

SEQ ID NO: 2433905 - DNA, 25 bp, Homo sapien
tgtataattcttataactaatccaa

SEQ ID NO: 2433906 - DNA, 25 bp, Homo sapien
aaaagcattagacagtctatcaaaa

SEQ ID NO: 2433907 - DNA, 25 bp, Homo sapien
tctccttttaagaggttcaaaagca

SEQ ID NO: 2433908 - DNA, 25 bp, Homo sapien
tgcttcaccaactatttaaatctcc

SEQ ID NO: 2433909 - DNA, 25 bp, Homo sapien
ggtgctcctatatcgcgtttttatc

SEQ ID NO: 2433910 - DNA, 25 bp, Homo sapien
cctttcacgtctgtcctctactggt

SEQ ID NO: 2433911 - DNA, 25 bp, Homo sapien
tcatcaccatcctgggtaccccttt

SEQ ID NO: 2433912 - DNA, 25 bp, Homo sapien
tgtcatcctgggatctttcttcatc

SEQ ID NO: 2433913 - DNA, 25 bp, Homo sapien
ttttgagaccttgcagcctgtagat

SEQ ID NO: 2433914 - DNA, 25 bp, Homo sapien
tcctgcagaatgttgaaggcattgc

SEQ ID NO: 2433915 - DNA, 25 bp, Homo sapien
tctgaaatctcaggatgactgtgct

SEQ ID NO: 2433916 - DNA, 25 bp, Homo sapien
ttcggctgaatagagaatctgcagg

SEQ ID NO: 2433917 - DNA, 25 bp, Homo sapien
ctccagctgggtttaaatttttgct

SEQ ID NO: 2433918 - DNA, 25 bp, Homo sapien
tccagctgggtttaaatttttgcta

SEQ ID NO: 2433919 - DNA, 25 bp, Homo sapien
tgtaagtgagccttgctgacagtga

SEQ ID NO: 2433920 - DNA, 25 bp, Homo sapien
cagtgagtcatttggatagggaaca

SEQ ID NO: 2433921 - DNA, 25 bp, Homo sapien
tattttttaccagggagatacagcc

SEQ ID NO: 2433922 - DNA, 25 bp, Homo sapien
tcagtgcagtacttcagccctaagc

SEQ ID NO: 2433923 - DNA, 25 bp, Homo sapien
aggcccataaacatattggatttgg

SEQ ID NO: 2433924 - DNA, 25 bp, Homo sapien
gacttgaagatctggcaaaaatagg

SEQ ID NO: 2433925 - DNA, 25 bp, Homo sapien
gaagatacatacactacattgatag

SEQ ID NO: 2433926 - DNA, 25 bp, Homo sapien
gcccagacttgaagatctggcaaaa

SEQ ID NO: 2433927 - DNA, 25 bp, Homo sapien
cactctgcccaagatttattcctgg

SEQ ID NO: 2433928 - DNA, 25 bp, Homo sapien
gatcttgccaaactactgtcactga

SEQ ID NO: 2433929 - DNA, 25 bp, Homo sapien
taattgaagatattaatcatcccca

SEQ ID NO: 2433930 - DNA, 25 bp, Homo sapien
ttgaagacattgttagggtcaggct

SEQ ID NO: 2433931 - DNA, 25 bp, Homo sapien
cttgaggatgctcattttccacagc

SEQ ID NO: 2433932 - DNA, 25 bp, Homo sapien
tcattttccacagctggggagctat

SEQ ID NO: 2433933 - DNA, 25 bp, Homo sapien
gaggatgctcattttccacagctgg

SEQ ID NO: 2433934 - DNA, 25 bp, Homo sapien
ctcattttccacagctggggagcta

SEQ ID NO: 2433935 - DNA, 25 bp, Homo sapien
catagttgtaggcactagaaccaca

SEQ ID NO: 2433936 - DNA, 25 bp, Homo sapien
tagaaccacagacactggttccacc

SEQ ID NO: 2433937 - DNA, 25 bp, Homo sapien
taggcatagttgtaggcactagaac

SEQ ID NO: 2433938 - DNA, 25 bp, Homo sapien
taggcactagaaccacagacactgg

SEQ ID NO: 2433939 - DNA, 25 bp, Homo sapien
agtttgttcaccaaagcatctcaga

SEQ ID NO: 2433940 - DNA, 25 bp, Homo sapien
ggacattcactgacttgctcataaa

SEQ ID NO: 2433941 - DNA, 25 bp, Homo sapien
tggaagggactttcatccccattaa

SEQ ID NO: 2433942 - DNA, 25 bp, Homo sapien
gaagtagctcagtccatgtacagaa

SEQ ID NO: 2433943 - DNA, 25 bp, Homo sapien
catcactccagttaggctgaacatt

SEQ ID NO: 2433944 - DNA, 25 bp, Homo sapien
cagttaggctgaacattttcaaagc

SEQ ID NO: 2433945 - DNA, 25 bp, Homo sapien
tccagttaggctgaacattttcaaa

SEQ ID NO: 2433946 - DNA, 25 bp, Homo sapien
tcactccagttaggctgaacatttt

SEQ ID NO: 2433947 - DNA, 25 bp, Homo sapien
cggagatccctctggacgccccgtg

SEQ ID NO: 2433948 - DNA, 25 bp, Homo sapien
gcaagcggagatccctctggacgcc

SEQ ID NO: 2433949 - DNA, 25 bp, Homo sapien
agatccctctggacgccccgtgcct

SEQ ID NO: 2433950 - DNA, 25 bp, Homo sapien
ctgcaagcggagatccctctggacg

SEQ ID NO: 2433951 - DNA, 25 bp, Homo sapien
cccaacgaagaagcggaggaacagg

SEQ ID NO: 2433952 - DNA, 25 bp, Homo sapien
agttccaggagatgcgcccaacgaa

SEQ ID NO: 2433953 - DNA, 25 bp, Homo sapien
ggatagggcagacacccggctgctt

SEQ ID NO: 2433954 - DNA, 25 bp, Homo sapien
ttgtttgctagacaccagcgccagc

SEQ ID NO: 2433955 - DNA, 25 bp, Homo sapien
cgctttaggaaactctcttggggca

SEQ ID NO: 2433956 - DNA, 25 bp, Homo sapien
tgcaagaggcgcccggcttggtttc

SEQ ID NO: 2433957 - DNA, 25 bp, Homo sapien
ttcctcgctttaggaaactctcttg

SEQ ID NO: 2433958 - DNA, 25 bp, Homo sapien
aggcgcccggcttggtttcctcgct

SEQ ID NO: 2433959 - DNA, 25 bp, Homo sapien
ccgcccacgtcatggcagtcgccag

SEQ ID NO: 2433960 - DNA, 25 bp, Homo sapien
gcgacgccacttccgcccacgtcat

SEQ ID NO: 2433961 - DNA, 25 bp, Homo sapien
agtcgccagactggggcggaaggca

SEQ ID NO: 2433962 - DNA, 25 bp, Homo sapien
atccggtgcggcgacgccacttccg

SEQ ID NO: 2433963 - DNA, 25 bp, Homo sapien
ggtcctcgcggaccgcacggatccg

SEQ ID NO: 2433964 - DNA, 25 bp, Homo sapien
cgggtcctcgcggaccgcacggatc

SEQ ID NO: 2433965 - DNA, 25 bp, Homo sapien
accgcacggatccggctgacggcga

SEQ ID NO: 2433966 - DNA, 25 bp, Homo sapien
tcgcggaccgcacggatccggctga

SEQ ID NO: 2433967 - DNA, 25 bp, Homo sapien
aatatgtacagttcagaatgatcgc

SEQ ID NO: 2433968 - DNA, 25 bp, Homo sapien
gaaggaccaaccttgctgtacagga

SEQ ID NO: 2433969 - DNA, 25 bp, Homo sapien
gatacaaaacatgccaaggacaggg

SEQ ID NO: 2433970 - DNA, 25 bp, Homo sapien
catttcatccgttgttacgaaggac

SEQ ID NO: 2433971 - DNA, 25 bp, Homo sapien
aaaaggaacatccaagggctgtggc

SEQ ID NO: 2433972 - DNA, 25 bp, Homo sapien
gaagaggattgtccctggtgcccag

SEQ ID NO: 2433973 - DNA, 25 bp, Homo sapien
tagtcaagtctctttgcagccgtga

SEQ ID NO: 2433974 - DNA, 25 bp, Homo sapien
gaagaggttcaactgcagcacaagc

SEQ ID NO: 2433975 - DNA, 25 bp, Homo sapien
gggatcttgtgctgatcgtcctcaa

SEQ ID NO: 2433976 - DNA, 25 bp, Homo sapien
aatcaaactgatagtcataggttag

SEQ ID NO: 2433977 - DNA, 25 bp, Homo sapien
tgctgatcgtcctcaaaatcaaact

SEQ ID NO: 2433978 - DNA, 25 bp, Homo sapien
catccatttccgacaattccaggct

SEQ ID NO: 2433979 - DNA, 25 bp, Homo sapien
cagttaggggcacaggaatggttaa

SEQ ID NO: 2433980 - DNA, 25 bp, Homo sapien
tctcctttggggattcgccggctgg

SEQ ID NO: 2433981 - DNA, 25 bp, Homo sapien
tttgtcaaatgtcacgacttcggcc

SEQ ID NO: 2433982 - DNA, 25 bp, Homo sapien
cacgacttcggccacacagttaggg

SEQ ID NO: 2433983 - DNA, 25 bp, Homo sapien
gcagggccgccggtcaacgtagcat

SEQ ID NO: 2433984 - DNA, 25 bp, Homo sapien
tcattgtttattcggaacatgtaga

SEQ ID NO: 2433985 - DNA, 25 bp, Homo sapien
cgtagcatcaatcacatgttcattg

SEQ ID NO: 2433986 - DNA, 25 bp, Homo sapien
tattcggaacatgtagatgcctcga

SEQ ID NO: 2433987 - DNA, 25 bp, Homo sapien
cctcgttccgaatgatggtgccaat

SEQ ID NO: 2433988 - DNA, 25 bp, Homo sapien
tgatatgccttagacatgctggtgc

SEQ ID NO: 2433989 - DNA, 25 bp, Homo sapien
cagccgccggtactgagatgacttg

SEQ ID NO: 2433990 - DNA, 25 bp, Homo sapien
gagcgagccaggtacacgttgttct

SEQ ID NO: 2433991 - DNA, 25 bp, Homo sapien
aaaaccaccattgcagggcatcaag

SEQ ID NO: 2433992 - DNA, 25 bp, Homo sapien
caaagaccttcgagaaagccctgct

SEQ ID NO: 2433993 - DNA, 25 bp, Homo sapien
cataaactagatgacaatggagctc

SEQ ID NO: 2433994 - DNA, 25 bp, Homo sapien
cattctacaacagcctaggagccac

SEQ ID NO: 2433995 - DNA, 25 bp, Homo sapien
aggatcaaatgagataatggatgtg

SEQ ID NO: 2433996 - DNA, 25 bp, Homo sapien
atcaaatgagataatggatgtgaaa

SEQ ID NO: 2433997 - DNA, 25 bp, Homo sapien
aaatgagataatggatgtgaaaacg

SEQ ID NO: 2433998 - DNA, 25 bp, Homo sapien
ctcataaggttgttgtgaggatcaa

SEQ ID NO: 2433999 - DNA, 25 bp, Homo sapien
ttaggctctgatcgggcacagccag

SEQ ID NO: 2434000 - DNA, 25 bp, Homo sapien
tagtgtgtgaggattttaggctctg

SEQ ID NO: 2434001 - DNA, 25 bp, Homo sapien
gggtggcgcccatagcggaataaat

SEQ ID NO: 2434002 - DNA, 25 bp, Homo sapien
gcgcccatagcggaataaatagttt

SEQ ID NO: 2434003 - DNA, 25 bp, Homo sapien
gcagccacaggctcaatgatgcgat

SEQ ID NO: 2434004 - DNA, 25 bp, Homo sapien
tgattcagctatgcgaagcacggca

SEQ ID NO: 2434005 - DNA, 25 bp, Homo sapien
tactcagggaagagtcgcagcatgt

SEQ ID NO: 2434006 - DNA, 25 bp, Homo sapien
tcctcgcccttcagatactcaggga

SEQ ID NO: 2434007 - DNA, 25 bp, Homo sapien
ctaagaagcagggaagagagcagtc

SEQ ID NO: 2434008 - DNA, 25 bp, Homo sapien
gagcagtcctcagaggcaacttctg

SEQ ID NO: 2434009 - DNA, 25 bp, Homo sapien
agcagggaagagagcagtcctcaga

SEQ ID NO: 2434010 - DNA, 25 bp, Homo sapien
gaagcagggaagagagcagtcctca

SEQ ID NO: 2434011 - DNA, 25 bp, Homo sapien
gaagctacaggtcctcttatagaca

SEQ ID NO: 2434012 - DNA, 25 bp, Homo sapien
tattatccatttcaagggcccactg

SEQ ID NO: 2434013 - DNA, 25 bp, Homo sapien
tttcactgggagttttcaagagacc

SEQ ID NO: 2434014 - DNA, 25 bp, Homo sapien
gaaggaggatcattcacatagaagc

SEQ ID NO: 2434015 - DNA, 25 bp, Homo sapien
gctccaatagatgcgcgtggcctcg

SEQ ID NO: 2434016 - DNA, 25 bp, Homo sapien
caatagaacagcgatagcagcagcg

SEQ ID NO: 2434017 - DNA, 25 bp, Homo sapien
catgcacttggcacggatggcacaa

SEQ ID NO: 2434018 - DNA, 25 bp, Homo sapien
cacagggccccttgatcttatgcat

SEQ ID NO: 2434019 - DNA, 25 bp, Homo sapien
gagagctgtcgcacatccagattgg

SEQ ID NO: 2434020 - DNA, 25 bp, Homo sapien
ggtgggaagttcaaccaagggctca

SEQ ID NO: 2434021 - DNA, 25 bp, Homo sapien
tggctcagccaagggttcggtggga

SEQ ID NO: 2434022 - DNA, 25 bp, Homo sapien
gaggacgggaatcttcaccttcttc

SEQ ID NO: 2434023 - DNA, 25 bp, Homo sapien
gcctaaagtgattcactcgccttgc

SEQ ID NO: 2434024 - DNA, 25 bp, Homo sapien
aaagtgattcactcgccttgcctcc

SEQ ID NO: 2434025 - DNA, 25 bp, Homo sapien
cgcgcctggccggcagccccttttt

SEQ ID NO: 2434026 - DNA, 25 bp, Homo sapien
taaagtgattcactcgccttgcctc

SEQ ID NO: 2434027 - DNA, 25 bp, Homo sapien
gaggctcaagatgtctagttggctc

SEQ ID NO: 2434028 - DNA, 25 bp, Homo sapien
tcaggaggctcaagatgtctagttg

SEQ ID NO: 2434029 - DNA, 25 bp, Homo sapien
caagatgtctagttggctcttcagg

SEQ ID NO: 2434030 - DNA, 25 bp, Homo sapien
cagggtatagccaggcaacactgca

SEQ ID NO: 2434031 - DNA, 25 bp, Homo sapien
tgcagaaaggagtggatcagagcct

SEQ ID NO: 2434032 - DNA, 25 bp, Homo sapien
gtggatcagagcctcccaccagaat

SEQ ID NO: 2434033 - DNA, 25 bp, Homo sapien
agagcctcccaccagaatcactccc

SEQ ID NO: 2434034 - DNA, 25 bp, Homo sapien
ctcccaccagaatcactcccctcaa

SEQ ID NO: 2434035 - DNA, 25 bp, Homo sapien
ctcataggagttggggatcttcatg

SEQ ID NO: 2434036 - DNA, 25 bp, Homo sapien
taggagttggggatcttcatgctca

SEQ ID NO: 2434037 - DNA, 25 bp, Homo sapien
ggctcagtgcctgcccgggcggggc

SEQ ID NO: 2434038 - DNA, 25 bp, Homo sapien
actgccaccatcacgccattcaggt

SEQ ID NO: 2434039 - DNA, 25 bp, Homo sapien
ctgtgagcatgactgacacctcact

SEQ ID NO: 2434040 - DNA, 25 bp, Homo sapien
tgcccttttcccaagttgtgacagg

SEQ ID NO: 2434041 - DNA, 25 bp, Homo sapien
tttgcccttttcccaagttgtgaca

SEQ ID NO: 2434042 - DNA, 25 bp, Homo sapien
gtgagcatgactgacacctcacttc

SEQ ID NO: 2434043 - DNA, 25 bp, Homo sapien
ctcccaccggcctgagcccagatga

SEQ ID NO: 2434044 - DNA, 25 bp, Homo sapien
ggagaatcgctatcctcatcactct

SEQ ID NO: 2434045 - DNA, 25 bp, Homo sapien
agctggcacaatgctgtcaggagaa

SEQ ID NO: 2434046 - DNA, 25 bp, Homo sapien
tgaagctggcacaatgctgtcagga

SEQ ID NO: 2434047 - DNA, 25 bp, Homo sapien
gcagccagcaggtctagactcttca

SEQ ID NO: 2434048 - DNA, 25 bp, Homo sapien
gacatcctcagtctgattgtgaggg

SEQ ID NO: 2434049 - DNA, 25 bp, Homo sapien
gccagcaggtctagactcttcacct

SEQ ID NO: 2434050 - DNA, 25 bp, Homo sapien
tgagggggtgtaggcaaggcagcca

SEQ ID NO: 2434051 - DNA, 25 bp, Homo sapien
taactggtttggactccagctacca

SEQ ID NO: 2434052 - DNA, 25 bp, Homo sapien
aatcagtcctgaaagggcccttcct

SEQ ID NO: 2434053 - DNA, 25 bp, Homo sapien
tcaggtgccctgttatgtaaacaca

SEQ ID NO: 2434054 - DNA, 25 bp, Homo sapien
cactcactaaagctggactgttcct

SEQ ID NO: 2434055 - DNA, 25 bp, Homo sapien
tggtgtcggcgggttactcaggtta

SEQ ID NO: 2434056 - DNA, 25 bp, Homo sapien
gccctttcactatcccgggcagagg

SEQ ID NO: 2434057 - DNA, 25 bp, Homo sapien
catcttctgctgcaccgatgggggt

SEQ ID NO: 2434058 - DNA, 25 bp, Homo sapien
gggtgacgccattcaccatcttctg

SEQ ID NO: 2434059 - DNA, 25 bp, Homo sapien
ttgtgtgcaagatggcatagggaga

SEQ ID NO: 2434060 - DNA, 25 bp, Homo sapien
taatctcctggccccactctacgtc

SEQ ID NO: 2434061 - DNA, 25 bp, Homo sapien
atctcctggccccactctacgtcag

SEQ ID NO: 2434062 - DNA, 25 bp, Homo sapien
ctgatataatctcctggccccactc

SEQ ID NO: 2434063 - DNA, 25 bp, Homo sapien
gatataatctcctggccccactcta

SEQ ID NO: 2434064 - DNA, 25 bp, Homo sapien
tcactattcccaaaaaatattgcca

SEQ ID NO: 2434065 - DNA, 25 bp, Homo sapien
gcaaagaggctaaaattggcggtga

SEQ ID NO: 2434066 - DNA, 25 bp, Homo sapien
cagctgggaatagtagtcagggcca

SEQ ID NO: 2434067 - DNA, 25 bp, Homo sapien
ttggcggtgatagcaggctccgtta

SEQ ID NO: 2434068 - DNA, 25 bp, Homo sapien
gtgggcagcgccccacttccaaagg

SEQ ID NO: 2434069 - DNA, 25 bp, Homo sapien
tccttccgcagcttctttcgggagc

SEQ ID NO: 2434070 - DNA, 25 bp, Homo sapien
cgcttgccttctgtacccgcttggg

SEQ ID NO: 2434071 - DNA, 25 bp, Homo sapien
gcttcggtgtcaaaggcttccttgc

SEQ ID NO: 2434072 - DNA, 25 bp, Homo sapien
ttctttcgggagctcaccaacctgt

SEQ ID NO: 2434073 - DNA, 25 bp, Homo sapien
tcccgaggttcctgcttgatgctga

SEQ ID NO: 2434074 - DNA, 25 bp, Homo sapien
tgtgcccgttgatctcagctcgcag

SEQ ID NO: 2434075 - DNA, 25 bp, Homo sapien
gggtaccctgtagtttctgctccag

SEQ ID NO: 2434076 - DNA, 25 bp, Homo sapien
tgcccggagtagcttctgcaagagc

SEQ ID NO: 2434077 - DNA, 25 bp, Homo sapien
gtccagatgcccaggtaccaggctg

SEQ ID NO: 2434078 - DNA, 25 bp, Homo sapien
tctgggtttctgctaggttgtctgg

SEQ ID NO: 2434079 - DNA, 25 bp, Homo sapien
ggatcccaaggtcccagacccttgc

SEQ ID NO: 2434080 - DNA, 25 bp, Homo sapien
gacccttgctaaacaaggtatctgc

SEQ ID NO: 2434081 - DNA, 25 bp, Homo sapien
cagcaggtgagaccctcccaggagg

SEQ ID NO: 2434082 - DNA, 25 bp, Homo sapien
ggtcctgtagataaggctcctggtg

SEQ ID NO: 2434083 - DNA, 25 bp, Homo sapien
tgaggtcgaggccctgcccctagct

SEQ ID NO: 2434084 - DNA, 25 bp, Homo sapien
ccccaagttgaggttggcagcccag

SEQ ID NO: 2434085 - DNA, 25 bp, Homo sapien
tgacccaccgtaggcatgattccaa

SEQ ID NO: 2434086 - DNA, 25 bp, Homo sapien
tgccgctgcatgaggagtgcctgta

SEQ ID NO: 2434087 - DNA, 25 bp, Homo sapien
tgtattattttgcatgggccgctct

SEQ ID NO: 2434088 - DNA, 25 bp, Homo sapien
gctgctgctgaggacttaagtgccg

SEQ ID NO: 2434089 - DNA, 25 bp, Homo sapien
gaggcctcagaagatgatccactgc

SEQ ID NO: 2434090 - DNA, 25 bp, Homo sapien
agaagatgatccactgcctagctgc

SEQ ID NO: 2434091 - DNA, 25 bp, Homo sapien
ctaaggaaacagagggctgagccag

SEQ ID NO: 2434092 - DNA, 25 bp, Homo sapien
tgatccactgcctagctgcccatgg

SEQ ID NO: 2434093 - DNA, 25 bp, Homo sapien
tgtgtggagcaggctaacttgctgc

SEQ ID NO: 2434094 - DNA, 25 bp, Homo sapien
ctgtgtggagcaggctaacttgctg

SEQ ID NO: 2434095 - DNA, 25 bp, Homo sapien
ggacaagcaggagttgtgagtcccc

SEQ ID NO: 2434096 - DNA, 25 bp, Homo sapien
gacaagcaggagttgtgagtcccca

SEQ ID NO: 2434097 - DNA, 25 bp, Homo sapien
caagcaggagttgtgagtccccaga

SEQ ID NO: 2434098 - DNA, 25 bp, Homo sapien
ttggacaagcaggagttgtgagtcc

SEQ ID NO: 2434099 - DNA, 25 bp, Homo sapien
ctgaagaaacggctgggtctacggt

SEQ ID NO: 2434100 - DNA, 25 bp, Homo sapien
tcctggttcagtggccattgactca

SEQ ID NO: 2434101 - DNA, 25 bp, Homo sapien
gtgttttgttccttgcccgtcagga

SEQ ID NO: 2434102 - DNA, 25 bp, Homo sapien
tccctgatgtgtagagggcccctca

SEQ ID NO: 2434103 - DNA, 25 bp, Homo sapien
tctggtttaaaaggcccatctgctg

SEQ ID NO: 2434104 - DNA, 25 bp, Homo sapien
gacagtaaagttcgactctggttta

SEQ ID NO: 2434105 - DNA, 25 bp, Homo sapien
gccctgccatggacccttgctgttg

SEQ ID NO: 2434106 - DNA, 25 bp, Homo sapien
ctgctgtaaagagcccatgggctga

SEQ ID NO: 2434107 - DNA, 25 bp, Homo sapien
ctgagcacccgggactgggtcataa

SEQ ID NO: 2434108 - DNA, 25 bp, Homo sapien
gcacccgggactgggtcataagcac

SEQ ID NO: 2434109 - DNA, 25 bp, Homo sapien
gaactgagcacccgggactgggtca

SEQ ID NO: 2434110 - DNA, 25 bp, Homo sapien
gctggggggaactgagcacccggga

SEQ ID NO: 2434111 - DNA, 25 bp, Homo sapien
tgggggcccaaagctccagggtgct

SEQ ID NO: 2434112 - DNA, 25 bp, Homo sapien
tgagggccctgggggcccaaagctc

SEQ ID NO: 2434113 - DNA, 25 bp, Homo sapien
ggggcccaaagctccagggtgctgc

SEQ ID NO: 2434114 - DNA, 25 bp, Homo sapien
cctgggggcccaaagctccagggtg

SEQ ID NO: 2434115 - DNA, 25 bp, Homo sapien
acccagagcttggtttgtctgtact

SEQ ID NO: 2434116 - DNA, 25 bp, Homo sapien
ccagagcttggtttgtctgtactcc

SEQ ID NO: 2434117 - DNA, 25 bp, Homo sapien
gagcttggtttgtctgtactccagg

SEQ ID NO: 2434118 - DNA, 25 bp, Homo sapien
cagagcttggtttgtctgtactcca

SEQ ID NO: 2434119 - DNA, 25 bp, Homo sapien
tgcagtttctgggccagctgcatac

SEQ ID NO: 2434120 - DNA, 25 bp, Homo sapien
gctgctgctgcagtttctgggccag

SEQ ID NO: 2434121 - DNA, 25 bp, Homo sapien
gctgcagtttctgggccagctgcat

SEQ ID NO: 2434122 - DNA, 25 bp, Homo sapien
gctgctgcagtttctgggccagctg

SEQ ID NO: 2434123 - DNA, 25 bp, Homo sapien
tccgaggcttcgaagagcaaggttg

SEQ ID NO: 2434124 - DNA, 25 bp, Homo sapien
tgtaaaagccttgaatcaggtccga

SEQ ID NO: 2434125 - DNA, 25 bp, Homo sapien
tcaggtccgaggcttcgaagagcaa

SEQ ID NO: 2434126 - DNA, 25 bp, Homo sapien
ccttgaatcaggtccgaggcttcga

SEQ ID NO: 2434127 - DNA, 25 bp, Homo sapien
agctgtattaaggaaggggccacca

SEQ ID NO: 2434128 - DNA, 25 bp, Homo sapien
gggccagagctgtattaaggaaggg

SEQ ID NO: 2434129 - DNA, 25 bp, Homo sapien
tccaggtagtgccatacccccaggg

SEQ ID NO: 2434130 - DNA, 25 bp, Homo sapien
ggtcaggcgaagacctccggcttgc

SEQ ID NO: 2434131 - DNA, 25 bp, Homo sapien
tctgccatgagattagtgtgctcct

SEQ ID NO: 2434132 - DNA, 25 bp, Homo sapien
cttgttccgatattctgccatgaga

SEQ ID NO: 2434133 - DNA, 25 bp, Homo sapien
tattctgccatgagattagtgtgct

SEQ ID NO: 2434134 - DNA, 25 bp, Homo sapien
ccgatattctgccatgagattagtg

SEQ ID NO: 2434135 - DNA, 25 bp, Homo sapien
gcttctgggaactcacggccagctt

SEQ ID NO: 2434136 - DNA, 25 bp, Homo sapien
tttggcagtgcgctgcttggcacac

SEQ ID NO: 2434137 - DNA, 25 bp, Homo sapien
ggtgtacaccaatctgctcctctag

SEQ ID NO: 2434138 - DNA, 25 bp, Homo sapien
ttggcacacagagccttccgggact

SEQ ID NO: 2434139 - DNA, 25 bp, Homo sapien
gttgggacgaggctgggagggatca

SEQ ID NO: 2434140 - DNA, 25 bp, Homo sapien
ggacgaggctgggagggatcaccag

SEQ ID NO: 2434141 - DNA, 25 bp, Homo sapien
tccctgagcaaaagtgggcgggttg

SEQ ID NO: 2434142 - DNA, 25 bp, Homo sapien
aagtgggcgggttgggacgaggctg

SEQ ID NO: 2434143 - DNA, 25 bp, Homo sapien
actcccagctgccacatggttctgc

SEQ ID NO: 2434144 - DNA, 25 bp, Homo sapien
tctgggctagcagagacacttgctg

SEQ ID NO: 2434145 - DNA, 25 bp, Homo sapien
ccccgagagcctctgggctagcaga

SEQ ID NO: 2434146 - DNA, 25 bp, Homo sapien
agatcactgctaggtccccccgaga

SEQ ID NO: 2434147 - DNA, 25 bp, Homo sapien
caccatcttggcctttgcaatggga

SEQ ID NO: 2434148 - DNA, 25 bp, Homo sapien
ttggcctttgcaatgggatcaatga

SEQ ID NO: 2434149 - DNA, 25 bp, Homo sapien
catcttggcctttgcaatgggatca

SEQ ID NO: 2434150 - DNA, 25 bp, Homo sapien
tcttggcctttgcaatgggatcaat

SEQ ID NO: 2434151 - DNA, 25 bp, Homo sapien
ttaagaggagtaccgaccagacttc

SEQ ID NO: 2434152 - DNA, 25 bp, Homo sapien
ccgaccagacttcagatctagctct

SEQ ID NO: 2434153 - DNA, 25 bp, Homo sapien
tgaggcagtaaacagttaagaggag

SEQ ID NO: 2434154 - DNA, 25 bp, Homo sapien
cagatctagctctgctagctgctgt

SEQ ID NO: 2434155 - DNA, 25 bp, Homo sapien
ggctctgctaattaggcttcattca

SEQ ID NO: 2434156 - DNA, 25 bp, Homo sapien
ttcactacagctacaaaggctctgc

SEQ ID NO: 2434157 - DNA, 25 bp, Homo sapien
tttattcaaacatctgctacatgcc

SEQ ID NO: 2434158 - DNA, 25 bp, Homo sapien
cttctcttcaagtcttaagctttca

SEQ ID NO: 2434159 - DNA, 25 bp, Homo sapien
tgctgctgcattgccaattgctgcg

SEQ ID NO: 2434160 - DNA, 25 bp, Homo sapien
cagctgctgctgcattgccaattgc

SEQ ID NO: 2434161 - DNA, 25 bp, Homo sapien
gggaagaagctgtttgccagctgct

SEQ ID NO: 2434162 - DNA, 25 bp, Homo sapien
tgtatctgggaagaagctgtttgcc

SEQ ID NO: 2434163 - DNA, 25 bp, Homo sapien
tgtgatagcactggctgtgagctct

SEQ ID NO: 2434164 - DNA, 25 bp, Homo sapien
ttctgtgatagcactggctgtgagc

SEQ ID NO: 2434165 - DNA, 25 bp, Homo sapien
gattggacaccatagccatggatgg

SEQ ID NO: 2434166 - DNA, 25 bp, Homo sapien
gtgagctctgctggggtaccaagcc

SEQ ID NO: 2434167 - DNA, 25 bp, Homo sapien
ctggctgtcgggcacctgcaagacc

SEQ ID NO: 2434168 - DNA, 25 bp, Homo sapien
gcatcagtggctggggcaaacctgg

SEQ ID NO: 2434169 - DNA, 25 bp, Homo sapien
caaacctggctgtcgggcacctgca

SEQ ID NO: 2434170 - DNA, 25 bp, Homo sapien
tgtcgggcacctgcaagacccaggg

SEQ ID NO: 2434171 - DNA, 25 bp, Homo sapien
gagccctcatgtggcaaagacatgg

SEQ ID NO: 2434172 - DNA, 25 bp, Homo sapien
agaagagccctcatgtggcaaagac

SEQ ID NO: 2434173 - DNA, 25 bp, Homo sapien
ggcctggtgcagacagtagggaatg

SEQ ID NO: 2434174 - DNA, 25 bp, Homo sapien
cctggtgcagacagtagggaatgct

SEQ ID NO: 2434175 - DNA, 25 bp, Homo sapien
aggtcctcaatgagcaggggtaact

SEQ ID NO: 2434176 - DNA, 25 bp, Homo sapien
gctccaacaggtcctcaatgagcag

SEQ ID NO: 2434177 - DNA, 25 bp, Homo sapien
caggtcctcaatgagcaggggtaac

SEQ ID NO: 2434178 - DNA, 25 bp, Homo sapien
caacaggtcctcaatgagcaggggt

SEQ ID NO: 2434179 - DNA, 25 bp, Homo sapien
tgctagaaaatggccctgtgcccat

SEQ ID NO: 2434180 - DNA, 25 bp, Homo sapien
ccaaaggaggccttctcagctgtgt

SEQ ID NO: 2434181 - DNA, 25 bp, Homo sapien
tcttgtctagctcatccccagatgc

SEQ ID NO: 2434182 - DNA, 25 bp, Homo sapien
acttttccagcagggaggatcctcc

SEQ ID NO: 2434183 - DNA, 25 bp, Homo sapien
tgggggtagcaatggtgaattggca

SEQ ID NO: 2434184 - DNA, 25 bp, Homo sapien
cttgggggtagcaatggtgaattgg

SEQ ID NO: 2434185 - DNA, 25 bp, Homo sapien
ttgggggtagcaatggtgaattggc

SEQ ID NO: 2434186 - DNA, 25 bp, Homo sapien
caggatcagtatatgccagcaggtc

SEQ ID NO: 2434187 - DNA, 25 bp, Homo sapien
caaaatcgtcatccagctcgggatc

SEQ ID NO: 2434188 - DNA, 25 bp, Homo sapien
catcatcctctagggccttgtgggc

SEQ ID NO: 2434189 - DNA, 25 bp, Homo sapien
tagccgattctaccagcctcaggtg

SEQ ID NO: 2434190 - DNA, 25 bp, Homo sapien
ctgttgttcaattcaggggccggtg

SEQ ID NO: 2434191 - DNA, 25 bp, Homo sapien
gggaagacctgataccgccaggccc

SEQ ID NO: 2434192 - DNA, 25 bp, Homo sapien
accagttggcagggtaggacccttg

SEQ ID NO: 2434193 - DNA, 25 bp, Homo sapien
ccaagctcagtgctcgacgggggcc

SEQ ID NO: 2434194 - DNA, 25 bp, Homo sapien
cgcagctcaatgaactgggcaggac

SEQ ID NO: 2434195 - DNA, 25 bp, Homo sapien
tggcagacgggtggaaattcccgcc

SEQ ID NO: 2434196 - DNA, 25 bp, Homo sapien
cctttctgtacattgtgccgcagct

SEQ ID NO: 2434197 - DNA, 25 bp, Homo sapien
gccctgaccaggaaacggagtgccc

SEQ ID NO: 2434198 - DNA, 25 bp, Homo sapien
tgacatggcaaatcgcatggaggtt

SEQ ID NO: 2434199 - DNA, 25 bp, Homo sapien
ctgacatggcaaatcgcatggaggt

SEQ ID NO: 2434200 - DNA, 25 bp, Homo sapien
gacatggcaaatcgcatggaggttg

SEQ ID NO: 2434201 - DNA, 25 bp, Homo sapien
caggatagggtgctcgctgatagaa

SEQ ID NO: 2434202 - DNA, 25 bp, Homo sapien
tagggtgctcgctgatagaaagctt

SEQ ID NO: 2434203 - DNA, 25 bp, Homo sapien
tagaaagcttgggagcctcctacca

SEQ ID NO: 2434204 - DNA, 25 bp, Homo sapien
gaaagcttgggagcctcctaccagt

SEQ ID NO: 2434205 - DNA, 25 bp, Homo sapien
tcatcgctagggaaggaccctggcc

SEQ ID NO: 2434206 - DNA, 25 bp, Homo sapien
gttcacatccatagaggaaggcgtg

SEQ ID NO: 2434207 - DNA, 25 bp, Homo sapien
agtcggtcatcgctagggaaggacc

SEQ ID NO: 2434208 - DNA, 25 bp, Homo sapien
actcagcttgcttgggggcaacccc

SEQ ID NO: 2434209 - DNA, 25 bp, Homo sapien
tgcgctggatctgctgccgaatcag

SEQ ID NO: 2434210 - DNA, 25 bp, Homo sapien
tctggcctcgactcagctgctcaaa

SEQ ID NO: 2434211 - DNA, 25 bp, Homo sapien
tcctgccgcagggtgttgcgctgga

SEQ ID NO: 2434212 - DNA, 25 bp, Homo sapien
tcagcagctctcgtagtcgctggcg

SEQ ID NO: 2434213 - DNA, 25 bp, Homo sapien
gggagttcagctgtcgccaaagagc

SEQ ID NO: 2434214 - DNA, 25 bp, Homo sapien
tctgtttggctaaggccggacatgc

SEQ ID NO: 2434215 - DNA, 25 bp, Homo sapien
gctgcccgatgggtggaagttccct

SEQ ID NO: 2434216 - DNA, 25 bp, Homo sapien
gggtcttctcgcttttcgacaggag

SEQ ID NO: 2434217 - DNA, 25 bp, Homo sapien
agcatatgggtcagtgtaggagcca

SEQ ID NO: 2434218 - DNA, 25 bp, Homo sapien
ggctcccctactgcctgagggaaag

SEQ ID NO: 2434219 - DNA, 25 bp, Homo sapien
cttggcatggagctcacctgctggc

SEQ ID NO: 2434220 - DNA, 25 bp, Homo sapien
ccagcgaagtgtgggctagagaccc

SEQ ID NO: 2434221 - DNA, 25 bp, Homo sapien
tagtgtggaattcccctggctggcc

SEQ ID NO: 2434222 - DNA, 25 bp, Homo sapien
gagggtgagtcaacaaagcccaggt

SEQ ID NO: 2434223 - DNA, 25 bp, Homo sapien
gaacccgtccgcagaggtagacaag

SEQ ID NO: 2434224 - DNA, 25 bp, Homo sapien
acatcaggtgtctttaactccaggc

SEQ ID NO: 2434225 - DNA, 25 bp, Homo sapien
tgcggagatgtagggccggtcggtc

SEQ ID NO: 2434226 - DNA, 25 bp, Homo sapien
ggaatgcggagatgtagggccggtc

SEQ ID NO: 2434227 - DNA, 25 bp, Homo sapien
gatgtagggccggtcggtcagtctt

SEQ ID NO: 2434228 - DNA, 25 bp, Homo sapien
tgtagggccggtcggtcagtcttac

SEQ ID NO: 2434229 - DNA, 25 bp, Homo sapien
cttggtctgcttgttgatctggctc

SEQ ID NO: 2434230 - DNA, 25 bp, Homo sapien
tggtctgcttgttgatctggctctc

SEQ ID NO: 2434231 - DNA, 25 bp, Homo sapien
tctgcttgttgatctggctctcagc

SEQ ID NO: 2434232 - DNA, 25 bp, Homo sapien
ggtctgcttgttgatctggctctca

SEQ ID NO: 2434233 - DNA, 25 bp, Homo sapien
caccttgttgatgcggtgagctgcc

SEQ ID NO: 2434234 - DNA, 25 bp, Homo sapien
tctgcaccttgttgatgcggtgagc

SEQ ID NO: 2434235 - DNA, 25 bp, Homo sapien
gagctgcccggttatctttggcctt

SEQ ID NO: 2434236 - DNA, 25 bp, Homo sapien
gatgcggtgagctgcccggttatct

SEQ ID NO: 2434237 - DNA, 25 bp, Homo sapien
gcttcatgatttgtttgcaacggct

SEQ ID NO: 2434238 - DNA, 25 bp, Homo sapien
gatttgtttgcaacggcttgaccag

SEQ ID NO: 2434239 - DNA, 25 bp, Homo sapien
atgatttgtttgcaacggcttgacc

SEQ ID NO: 2434240 - DNA, 25 bp, Homo sapien
ttcatgatttgtttgcaacggcttg

SEQ ID NO: 2434241 - DNA, 25 bp, Homo sapien
tgttggcatagagcacaggtgagat

SEQ ID NO: 2434242 - DNA, 25 bp, Homo sapien
taggaaaattaatgttggcatagag

SEQ ID NO: 2434243 - DNA, 25 bp, Homo sapien
ggtgagatggtggacagctggccca

SEQ ID NO: 2434244 - DNA, 25 bp, Homo sapien
tcatccttctcccagcgctgaagac

SEQ ID NO: 2434245 - DNA, 25 bp, Homo sapien
gagtccgtcgccctcaccctccgtg

SEQ ID NO: 2434246 - DNA, 25 bp, Homo sapien
ctggttataggagagtccgtcgccc

SEQ ID NO: 2434247 - DNA, 25 bp, Homo sapien
ggagggcgtggtgccacctgagccc

SEQ ID NO: 2434248 - DNA, 25 bp, Homo sapien
acctgagcccgtccaggggctgtcg

SEQ ID NO: 2434249 - DNA, 25 bp, Homo sapien
ctagaatccaggaacggggactggc

SEQ ID NO: 2434250 - DNA, 25 bp, Homo sapien
gctgctggagggcagattgcccaaa

SEQ ID NO: 2434251 - DNA, 25 bp, Homo sapien
aggcctgggtaggagtccattgggc

SEQ ID NO: 2434252 - DNA, 25 bp, Homo sapien
ggcagattgcccaaagggagtccac

SEQ ID NO: 2434253 - DNA, 25 bp, Homo sapien
tcctggaggcaagcttggttatgtc

SEQ ID NO: 2434254 - DNA, 25 bp, Homo sapien
ggcaagcttggttatgtcagtcttc

SEQ ID NO: 2434255 - DNA, 25 bp, Homo sapien
aaaagagcaactggcccatcctgga

SEQ ID NO: 2434256 - DNA, 25 bp, Homo sapien
cagagaaaagagcaactggcccatc

SEQ ID NO: 2434257 - DNA, 25 bp, Homo sapien
ggctgccttctaggccaggggttcc

SEQ ID NO: 2434258 - DNA, 25 bp, Homo sapien
ctctgcagtggcgtacggctgcctt

SEQ ID NO: 2434259 - DNA, 25 bp, Homo sapien
agatgctgttctcgttcagagccca

SEQ ID NO: 2434260 - DNA, 25 bp, Homo sapien
ggggttccacaacccagatgctgtt

SEQ ID NO: 2434261 - DNA, 25 bp, Homo sapien
tcagagctaagcatcccttcacctg

SEQ ID NO: 2434262 - DNA, 25 bp, Homo sapien
ggatgccttcacgcccccatcctca

SEQ ID NO: 2434263 - DNA, 25 bp, Homo sapien
tgtctaagtcagagctaagcatccc

SEQ ID NO: 2434264 - DNA, 25 bp, Homo sapien
tctgtggaaatcctgtctaagtcag

SEQ ID NO: 2434265 - DNA, 25 bp, Homo sapien
tgccctcgaggccacgggattcttc

SEQ ID NO: 2434266 - DNA, 25 bp, Homo sapien
catctgcaatatctggaccatcatc

SEQ ID NO: 2434267 - DNA, 25 bp, Homo sapien
gattcttcatctgcaatatctggac

SEQ ID NO: 2434268 - DNA, 25 bp, Homo sapien
ctggtgtatcggctttgccctcgag

SEQ ID NO: 2434269 - DNA, 25 bp, Homo sapien
tgcgatgtggggagttccttccttt

SEQ ID NO: 2434270 - DNA, 25 bp, Homo sapien
gtccctagtccaaagcttggccggc

SEQ ID NO: 2434271 - DNA, 25 bp, Homo sapien
ctttctgcgatgtggggagttcctt

SEQ ID NO: 2434272 - DNA, 25 bp, Homo sapien
tggggtccctagtccaaagcttggc

SEQ ID NO: 2434273 - DNA, 25 bp, Homo sapien
gtccagcagctccttcccaaagaag

SEQ ID NO: 2434274 - DNA, 25 bp, Homo sapien
gcagctccttcccaaagaaggcttc

SEQ ID NO: 2434275 - DNA, 25 bp, Homo sapien
cagcagctccttcccaaagaaggct

SEQ ID NO: 2434276 - DNA, 25 bp, Homo sapien
tccagcagctccttcccaaagaagg

SEQ ID NO: 2434277 - DNA, 25 bp, Homo sapien
ggaacatgtcctccagtttgctctt

SEQ ID NO: 2434278 - DNA, 25 bp, Homo sapien
aacatgtcctccagtttgctcttct

SEQ ID NO: 2434279 - DNA, 25 bp, Homo sapien
gcgccctcgccgctgttgcttcttc

SEQ ID NO: 2434280 - DNA, 25 bp, Homo sapien
tcagctaagctctgctccacggcgc

SEQ ID NO: 2434281 - DNA, 25 bp, Homo sapien
tgtcgcaccatgaaaccaccaatgc

SEQ ID NO: 2434282 - DNA, 25 bp, Homo sapien
gcctgtgcagcaggcccctttttcg

SEQ ID NO: 2434283 - DNA, 25 bp, Homo sapien
gggatttccgctgtcgcaccatgaa

SEQ ID NO: 2434284 - DNA, 25 bp, Homo sapien
ttttcgtgcgtgtgtgggatttccg

SEQ ID NO: 2434285 - DNA, 25 bp, Homo sapien
acatcagggctgacggggccctcca

SEQ ID NO: 2434286 - DNA, 25 bp, Homo sapien
taatttcgcactccatgtgctccac

SEQ ID NO: 2434287 - DNA, 25 bp, Homo sapien
caggccgatatggtttacgcttgcg

SEQ ID NO: 2434288 - DNA, 25 bp, Homo sapien
tcggtctcctctttgccaggctcca

SEQ ID NO: 2434289 - DNA, 25 bp, Homo sapien
cacaccttcgaagcgaaagtactgg

SEQ ID NO: 2434290 - DNA, 25 bp, Homo sapien
tgacatggtcaggttacgcagcaag

SEQ ID NO: 2434291 - DNA, 25 bp, Homo sapien
gagggctcagaaccctccaatcctg

SEQ ID NO: 2434292 - DNA, 25 bp, Homo sapien
ccgcttgtgcagtggtgacatggtc

SEQ ID NO: 2434293 - DNA, 25 bp, Homo sapien
ggctctttcaccttcatgggcacca

SEQ ID NO: 2434294 - DNA, 25 bp, Homo sapien
ttcatgggcaccagctctggaggtg

SEQ ID NO: 2434295 - DNA, 25 bp, Homo sapien
ccttcatgggcaccagctctggagg

SEQ ID NO: 2434296 - DNA, 25 bp, Homo sapien
ctggctctttcaccttcatgggcac

SEQ ID NO: 2434297 - DNA, 25 bp, Homo sapien
ggctggcaggagacacagtcaaagc

SEQ ID NO: 2434298 - DNA, 25 bp, Homo sapien
cacatcgtcctctgtgaagaggctc

SEQ ID NO: 2434299 - DNA, 25 bp, Homo sapien
ccacaggctttaccacgtagggctg

SEQ ID NO: 2434300 - DNA, 25 bp, Homo sapien
aggctttaccacgtagggctggcag

SEQ ID NO: 2434301 - DNA, 25 bp, Homo sapien
cctcttctacgtaaggagcatgaca

SEQ ID NO: 2434302 - DNA, 25 bp, Homo sapien
ctgccattcacagtggaagccaggg

SEQ ID NO: 2434303 - DNA, 25 bp, Homo sapien
tcacagtggcggcactggattagta

SEQ ID NO: 2434304 - DNA, 25 bp, Homo sapien
gcactggattagtaggtcctcttct

SEQ ID NO: 2434305 - DNA, 25 bp, Homo sapien
acttgcacttccagccgcccttggg

SEQ ID NO: 2434306 - DNA, 25 bp, Homo sapien
tccaggcagtatgtgtggtagctaa

SEQ ID NO: 2434307 - DNA, 25 bp, Homo sapien
acaatacactccacacaacgccagc

SEQ ID NO: 2434308 - DNA, 25 bp, Homo sapien
aatatcacagtcatcacagagcagc

SEQ ID NO: 2434309 - DNA, 25 bp, Homo sapien
tttttgtatttagtagagtcagagt

SEQ ID NO: 2434310 - DNA, 25 bp, Homo sapien
ctcaggtacaagtgattctcttgtc

SEQ ID NO: 2434311 - DNA, 25 bp, Homo sapien
tttgtatttagtagagtcagagttt

SEQ ID NO: 2434312 - DNA, 25 bp, Homo sapien
tgtatttagtagagtcagagtttca

SEQ ID NO: 2434313 - DNA, 25 bp, Homo sapien
ttgctgttgacacagtaagggtgat

SEQ ID NO: 2434314 - DNA, 25 bp, Homo sapien
gacacagtaagggtgatagcactga

SEQ ID NO: 2434315 - DNA, 25 bp, Homo sapien
cagtaagggtgatagcactgagagc

SEQ ID NO: 2434316 - DNA, 25 bp, Homo sapien
ctgttgacacagtaagggtgatagc

SEQ ID NO: 2434317 - DNA, 25 bp, Homo sapien
cgaacaggcaaggaggtggccctct

SEQ ID NO: 2434318 - DNA, 25 bp, Homo sapien
agctgccacataccacacacatgtc

SEQ ID NO: 2434319 - DNA, 25 bp, Homo sapien
ctgcgaacaggcaaggaggtggccc

SEQ ID NO: 2434320 - DNA, 25 bp, Homo sapien
tgccccccggccaaagctgccacat

SEQ ID NO: 2434321 - DNA, 25 bp, Homo sapien
gctgggtatccccaaagtaggtcca

SEQ ID NO: 2434322 - DNA, 25 bp, Homo sapien
gcttagtgccaagctcagaagagat

SEQ ID NO: 2434323 - DNA, 25 bp, Homo sapien
caatgttcagtgtgccaggtctcac

SEQ ID NO: 2434324 - DNA, 25 bp, Homo sapien
gctatttctctagctcctagcttag

SEQ ID NO: 2434325 - DNA, 25 bp, Homo sapien
tgcattaggacaaatttgtctgtgt

SEQ ID NO: 2434326 - DNA, 25 bp, Homo sapien
caaatttgtctgtgttggagaagag

SEQ ID NO: 2434327 - DNA, 25 bp, Homo sapien
aagagaaccacggtattctgcatgg

SEQ ID NO: 2434328 - DNA, 25 bp, Homo sapien
tattctgcatggtgtcatcatcttc

SEQ ID NO: 2434329 - DNA, 25 bp, Homo sapien
caggaattcagacatagccagacag

SEQ ID NO: 2434330 - DNA, 25 bp, Homo sapien
gcatgcaagggactggcaggactca

SEQ ID NO: 2434331 - DNA, 25 bp, Homo sapien
ttcagaaaaacctgcgggccaagtg

SEQ ID NO: 2434332 - DNA, 25 bp, Homo sapien
ccctagacgagcaggcaggtaggca

SEQ ID NO: 2434333 - DNA, 25 bp, Homo sapien
gcagttgactttagccgggcccgtc

SEQ ID NO: 2434334 - DNA, 25 bp, Homo sapien
ggcccgtcctctaccacgtcctcca

SEQ ID NO: 2434335 - DNA, 25 bp, Homo sapien
tcatctcgggctggactaacatccg

SEQ ID NO: 2434336 - DNA, 25 bp, Homo sapien
tctggctgtgaacccggagcatcaa

SEQ ID NO: 2434337 - DNA, 25 bp, Homo sapien
cagtgagtcagtacagagccgtagg

SEQ ID NO: 2434338 - DNA, 25 bp, Homo sapien
gctgtcccagcatcgcacaatagtg

SEQ ID NO: 2434339 - DNA, 25 bp, Homo sapien
ctaccttccctatgggactcaacgg

SEQ ID NO: 2434340 - DNA, 25 bp, Homo sapien
catctcgtgcagctcagcctcatct

SEQ ID NO: 2434341 - DNA, 25 bp, Homo sapien
aacggacagtggtagggcaggagga

SEQ ID NO: 2434342 - DNA, 25 bp, Homo sapien
gaggactggtggcactgggttccaa

SEQ ID NO: 2434343 - DNA, 25 bp, Homo sapien
cagggaatgctgaaggagtggcgaa

SEQ ID NO: 2434344 - DNA, 25 bp, Homo sapien
aaccagggaatgctgaaggagtggc

SEQ ID NO: 2434345 - DNA, 25 bp, Homo sapien
gagtggcgaacactgaggaggaagg

SEQ ID NO: 2434346 - DNA, 25 bp, Homo sapien
atgctgaaggagtggcgaacactga

SEQ ID NO: 2434347 - DNA, 25 bp, Homo sapien
cagccaacggtgactcagggtcact

SEQ ID NO: 2434348 - DNA, 25 bp, Homo sapien
tggtggagggctgatgggtgtctcc

SEQ ID NO: 2434349 - DNA, 25 bp, Homo sapien
tcagggtcagtgcagttagcttctg

SEQ ID NO: 2434350 - DNA, 25 bp, Homo sapien
tggcaccaaaggggtactctaactc

SEQ ID NO: 2434351 - DNA, 25 bp, Homo sapien
ctgtgatgatgggtgagagtggagg

SEQ ID NO: 2434352 - DNA, 25 bp, Homo sapien
tgatgatgggtgagagtggaggagg

SEQ ID NO: 2434353 - DNA, 25 bp, Homo sapien
gatgatgggtgagagtggaggagga

SEQ ID NO: 2434354 - DNA, 25 bp, Homo sapien
ggtgagagtggaggaggaaggggat

SEQ ID NO: 2434355 - DNA, 25 bp, Homo sapien
tcagctgaggcgacaaggatggctc

SEQ ID NO: 2434356 - DNA, 25 bp, Homo sapien
tgcggctcctcaggtagtggcaaca

SEQ ID NO: 2434357 - DNA, 25 bp, Homo sapien
tcaggcacagcgcataggcatggct

SEQ ID NO: 2434358 - DNA, 25 bp, Homo sapien
gacaggtgcaattcctcaggctgag

SEQ ID NO: 2434359 - DNA, 25 bp, Homo sapien
tgggaacagacgagatgcctccggt

SEQ ID NO: 2434360 - DNA, 25 bp, Homo sapien
caagggagattcctcaggcggtgga

SEQ ID NO: 2434361 - DNA, 25 bp, Homo sapien
gacataggtgattcttcaggtggtg

SEQ ID NO: 2434362 - DNA, 25 bp, Homo sapien
agacatgggtgactcttcaggtgga

SEQ ID NO: 2434363 - DNA, 25 bp, Homo sapien
tagaggcgtctcaagtgcaggagat

SEQ ID NO: 2434364 - DNA, 25 bp, Homo sapien
cttccggtggagacaagggcgactc

SEQ ID NO: 2434365 - DNA, 25 bp, Homo sapien
cagcagtggcatctcctcgtttagg

SEQ ID NO: 2434366 - DNA, 25 bp, Homo sapien
gacaggtgcaatgcctcaggaagtg

SEQ ID NO: 2434367 - DNA, 25 bp, Homo sapien
cgtacagagcatcgggctcgtcagt

SEQ ID NO: 2434368 - DNA, 25 bp, Homo sapien
gctgcccttggcatgcaacgtacag

SEQ ID NO: 2434369 - DNA, 25 bp, Homo sapien
gggttgcatagaggtcacgtgccca

SEQ ID NO: 2434370 - DNA, 25 bp, Homo sapien
tggtttggcttcacattgcaggggc

SEQ ID NO: 2434371 - DNA, 25 bp, Homo sapien
ctgcagagggtacaggggagcaggc

SEQ ID NO: 2434372 - DNA, 25 bp, Homo sapien
tgcagagggtacaggggagcaggca

SEQ ID NO: 2434373 - DNA, 25 bp, Homo sapien
ggattcagttctgctgagcccgccc

SEQ ID NO: 2434374 - DNA, 25 bp, Homo sapien
gagcggatagtctgacctccctggg

SEQ ID NO: 2434375 - DNA, 25 bp, Homo sapien
gtagttctcaaaccactccgagttg

SEQ ID NO: 2434376 - DNA, 25 bp, Homo sapien
gctgctcagcaacggagcggatagt

SEQ ID NO: 2434377 - DNA, 25 bp, Homo sapien
catcttagagtcattcccaggtttc

SEQ ID NO: 2434378 - DNA, 25 bp, Homo sapien
tgtcacacgtctcacaaaccaacat

SEQ ID NO: 2434379 - DNA, 25 bp, Homo sapien
caggcagttcctccatgggtggttt

SEQ ID NO: 2434380 - DNA, 25 bp, Homo sapien
gtatggtatcctttgtcacacgtct

SEQ ID NO: 2434381 - DNA, 25 bp, Homo sapien
ttgcgggcagtcagagcagtgtcca

SEQ ID NO: 2434382 - DNA, 25 bp, Homo sapien
ggccccgtgatagtgatgcccacag

SEQ ID NO: 2434383 - DNA, 25 bp, Homo sapien
agccagcacgtttgcgggcagtcag

SEQ ID NO: 2434384 - DNA, 25 bp, Homo sapien
gcttggcacactttgcattcagggc

SEQ ID NO: 2434385 - DNA, 25 bp, Homo sapien
ctcacacactgcacagcgagcctcc

SEQ ID NO: 2434386 - DNA, 25 bp, Homo sapien
tcacacactgcacagcgagcctcct

SEQ ID NO: 2434387 - DNA, 25 bp, Homo sapien
agaagaacaggtcacacaactcccc

SEQ ID NO: 2434388 - DNA, 25 bp, Homo sapien
agaacaggtcacacaactcccctgg

SEQ ID NO: 2434389 - DNA, 25 bp, Homo sapien
ggtaaagccgtggacatccaggtga

SEQ ID NO: 2434390 - DNA, 25 bp, Homo sapien
agggatggaggcaccgagcctggtg

SEQ ID NO: 2434391 - DNA, 25 bp, Homo sapien
ggcagtcgcgcaggggaagtggtaa

SEQ ID NO: 2434392 - DNA, 25 bp, Homo sapien
tttcatggataggaaggaaccgctg

SEQ ID NO: 2434393 - DNA, 25 bp, Homo sapien
tggccttgtccacaccacatagttc

SEQ ID NO: 2434394 - DNA, 25 bp, Homo sapien
agatggccttgtccacaccacatag

SEQ ID NO: 2434395 - DNA, 25 bp, Homo sapien
ggccttgtccacaccacatagttct

SEQ ID NO: 2434396 - DNA, 25 bp, Homo sapien
gatggccttgtccacaccacatagt

SEQ ID NO: 2434397 - DNA, 25 bp, Homo sapien
cagcacaccaatggtgagcccagca

SEQ ID NO: 2434398 - DNA, 25 bp, Homo sapien
tgcagcacaccaatggtgagcccag

SEQ ID NO: 2434399 - DNA, 25 bp, Homo sapien
gccgaccatgcagcacaccaatggt

SEQ ID NO: 2434400 - DNA, 25 bp, Homo sapien
ctgccgaccatgcagcacaccaatg

SEQ ID NO: 2434401 - DNA, 25 bp, Homo sapien
tcccgctgcccgtgtagactgggct

SEQ ID NO: 2434402 - DNA, 25 bp, Homo sapien
aatctgtgataggtcctcactgggc

SEQ ID NO: 2434403 - DNA, 25 bp, Homo sapien
tggcaactcaaagcgccgtagctcc

SEQ ID NO: 2434404 - DNA, 25 bp, Homo sapien
ccgcagttacagagagcacaacgcc

SEQ ID NO: 2434405 - DNA, 25 bp, Homo sapien
tcccacatgtgggttgggcaggtct

SEQ ID NO: 2434406 - DNA, 25 bp, Homo sapien
tcagtggcacttgggtcctcagaag

SEQ ID NO: 2434407 - DNA, 25 bp, Homo sapien
ttgggcaggtctgactcagtggcac

SEQ ID NO: 2434408 - DNA, 25 bp, Homo sapien
tgggactcccagaactaaggacaga

SEQ ID NO: 2434409 - DNA, 25 bp, Homo sapien
acagacaaacagcatgtgtcagcca

SEQ ID NO: 2434410 - DNA, 25 bp, Homo sapien
tgaataaacagacaaacagcatgtg

SEQ ID NO: 2434411 - DNA, 25 bp, Homo sapien
gaataaacagacaaacagcatgtgt

SEQ ID NO: 2434412 - DNA, 25 bp, Homo sapien
taaacagacaaacagcatgtgtcag

SEQ ID NO: 2434413 - DNA, 25 bp, Homo sapien
ctgccggttctgaatctttatcctc

SEQ ID NO: 2434414 - DNA, 25 bp, Homo sapien
actgggcagggccctctcggggaga

SEQ ID NO: 2434415 - DNA, 25 bp, Homo sapien
ccctctctccgactgggcagggccc

SEQ ID NO: 2434416 - DNA, 25 bp, Homo sapien
ccgactgggcagggccctctcgggg

SEQ ID NO: 2434417 - DNA, 25 bp, Homo sapien
ctgggcagggccctctcggggagac

SEQ ID NO: 2434418 - DNA, 25 bp, Homo sapien
gtaggtacagatctagggagtaaaa

SEQ ID NO: 2434419 - DNA, 25 bp, Homo sapien
gggagtaaaactgtgctggcacccc

SEQ ID NO: 2434420 - DNA, 25 bp, Homo sapien
ctagagatcccagacagtaggtaca

SEQ ID NO: 2434421 - DNA, 25 bp, Homo sapien
agaactagagatcccagacagtagg

SEQ ID NO: 2434422 - DNA, 25 bp, Homo sapien
gcagccatttgcaaccggagaggaa

SEQ ID NO: 2434423 - DNA, 25 bp, Homo sapien
tcgtgaagccttcggcgctagatcc

SEQ ID NO: 2434424 - DNA, 25 bp, Homo sapien
tcggccggtagggtggttcctgcga

SEQ ID NO: 2434425 - DNA, 25 bp, Homo sapien
cagcggtcgtgaagattcgtgaagc

SEQ ID NO: 2434426 - DNA, 25 bp, Homo sapien
cagtgtccatgagaggtccttgccc

SEQ ID NO: 2434427 - DNA, 25 bp, Homo sapien
caaccatacccgtgaagtcctgagg

SEQ ID NO: 2434428 - DNA, 25 bp, Homo sapien
gcatatatacattgtcaccccaggg

SEQ ID NO: 2434429 - DNA, 25 bp, Homo sapien
cccactggaacatggcaagtgccgg

SEQ ID NO: 2434430 - DNA, 25 bp, Homo sapien
tgagatggcagcgacgctcttgccc

SEQ ID NO: 2434431 - DNA, 25 bp, Homo sapien
tctccacacgggcaatctcctggat

SEQ ID NO: 2434432 - DNA, 25 bp, Homo sapien
gctcttgcccataggaattctccac

SEQ ID NO: 2434433 - DNA, 25 bp, Homo sapien
cacgggcaatctcctggatgacttt

SEQ ID NO: 2434434 - DNA, 25 bp, Homo sapien
accacccttctagtcttcaggccca

SEQ ID NO: 2434435 - DNA, 25 bp, Homo sapien
catcaccacccttctagtcttcagg

SEQ ID NO: 2434436 - DNA, 25 bp, Homo sapien
tcaccacccttctagtcttcaggcc

SEQ ID NO: 2434437 - DNA, 25 bp, Homo sapien
ccacccttctagtcttcaggcccag

SEQ ID NO: 2434438 - DNA, 25 bp, Homo sapien
ctgattctctcgagcagatgactcc

SEQ ID NO: 2434439 - DNA, 25 bp, Homo sapien
tgattctctcgagcagatgactcca

SEQ ID NO: 2434440 - DNA, 25 bp, Homo sapien
actccataaatgtcgcaccccagga

SEQ ID NO: 2434441 - DNA, 25 bp, Homo sapien
gcagatgactccataaatgtcgcac

SEQ ID NO: 2434442 - DNA, 25 bp, Homo sapien
gttccccactagaaccactggcacc

SEQ ID NO: 2434443 - DNA, 25 bp, Homo sapien
tgttccccactagaaccactggcac

SEQ ID NO: 2434444 - DNA, 25 bp, Homo sapien
ttcatgtagcttttggtacagactc

SEQ ID NO: 2434445 - DNA, 25 bp, Homo sapien
tcatgtagcttttggtacagactct

SEQ ID NO: 2434446 - DNA, 25 bp, Homo sapien
tgtagcttttggtacagactctcaa

SEQ ID NO: 2434447 - DNA, 25 bp, Homo sapien
catgtagcttttggtacagactctc

SEQ ID NO: 2434448 - DNA, 25 bp, Homo sapien
agcacataaccatggaccccaatga

SEQ ID NO: 2434449 - DNA, 25 bp, Homo sapien
acataaccatggaccccaatgatga

SEQ ID NO: 2434450 - DNA, 25 bp, Homo sapien
gcacataaccatggaccccaatgat

SEQ ID NO: 2434451 - DNA, 25 bp, Homo sapien
aagcacataaccatggaccccaatg

SEQ ID NO: 2434452 - DNA, 25 bp, Homo sapien
tggcaagaaatgggaaacatcagta

SEQ ID NO: 2434453 - DNA, 25 bp, Homo sapien
ctggcaagaaatgggaaacatcagt

SEQ ID NO: 2434454 - DNA, 25 bp, Homo sapien
ggcaagaaatgggaaacatcagtac

SEQ ID NO: 2434455 - DNA, 25 bp, Homo sapien
gatgtaggtgaaactcatctttgcc

SEQ ID NO: 2434456 - DNA, 25 bp, Homo sapien
ctttgccaagagtcactatcttgct

SEQ ID NO: 2434457 - DNA, 25 bp, Homo sapien
ccaagagtcactatcttgctgtaag

SEQ ID NO: 2434458 - DNA, 25 bp, Homo sapien
tgtgtccaccagatgtaggtgaaac

SEQ ID NO: 2434459 - DNA, 25 bp, Homo sapien
aattgatgtgccaaagatgtcttcc

SEQ ID NO: 2434460 - DNA, 25 bp, Homo sapien
gaactcgccttccacaaattgatgt

SEQ ID NO: 2434461 - DNA, 25 bp, Homo sapien
gatcgtagccttccgagaactcgcc

SEQ ID NO: 2434462 - DNA, 25 bp, Homo sapien
tattctccactgtaggatcgtagcc

SEQ ID NO: 2434463 - DNA, 25 bp, Homo sapien
ctgtggggagcagtgtgacagttgt

SEQ ID NO: 2434464 - DNA, 25 bp, Homo sapien
acattcacatcctctgtcctttcgg

SEQ ID NO: 2434465 - DNA, 25 bp, Homo sapien
cattcacatcctctgtcctttcgga

SEQ ID NO: 2434466 - DNA, 25 bp, Homo sapien
tcctcgctctacaaccccatcctta

SEQ ID NO: 2434467 - DNA, 25 bp, Homo sapien
atcctcgctctacaaccccatcctt

SEQ ID NO: 2434468 - DNA, 25 bp, Homo sapien
gcagcgcgcctcttctggctacaaa

SEQ ID NO: 2434469 - DNA, 25 bp, Homo sapien
tccgagctctgcagggcggagactc

SEQ ID NO: 2434470 - DNA, 25 bp, Homo sapien
tctggctacaaagctgctgcgcgtc

SEQ ID NO: 2434471 - DNA, 25 bp, Homo sapien
tccctgggtcgcgttcccacggcag

SEQ ID NO: 2434472 - DNA, 25 bp, Homo sapien
ctacacagcggtatccgaggatgac

SEQ ID NO: 2434473 - DNA, 25 bp, Homo sapien
cagcggtatccgaggatgaccacct

SEQ ID NO: 2434474 - DNA, 25 bp, Homo sapien
caccttcctgtagcggactagcggc

SEQ ID NO: 2434475 - DNA, 25 bp, Homo sapien
ggatgaccaccttcctgtagcggac

SEQ ID NO: 2434476 - DNA, 25 bp, Homo sapien
cgaaaacgaggtcagggtgtgagca

SEQ ID NO: 2434477 - DNA, 25 bp, Homo sapien
ctcagagagcccgaaaacgaggtca

SEQ ID NO: 2434478 - DNA, 25 bp, Homo sapien
gtgcaggaaagtcgctcaccccgaa

SEQ ID NO: 2434479 - DNA, 25 bp, Homo sapien
agctggtgcaggaaagtcgctcacc

SEQ ID NO: 2434480 - DNA, 25 bp, Homo sapien
agctgcccacgtgatcacaacacag

SEQ ID NO: 2434481 - DNA, 25 bp, Homo sapien
cacagcacgtctaacgccagggagc

SEQ ID NO: 2434482 - DNA, 25 bp, Homo sapien
cagcacgtctaacgccagggagccg

SEQ ID NO: 2434483 - DNA, 25 bp, Homo sapien
accaaaacaagcgccgcgcccggag

SEQ ID NO: 2434484 - DNA, 25 bp, Homo sapien
gtttccggtcataagattctagccc

SEQ ID NO: 2434485 - DNA, 25 bp, Homo sapien
tccggtcataagattctagccctcc

SEQ ID NO: 2434486 - DNA, 25 bp, Homo sapien
ttgtggtttccggtcataagattct

SEQ ID NO: 2434487 - DNA, 25 bp, Homo sapien
tggtttccggtcataagattctagc

SEQ ID NO: 2434488 - DNA, 25 bp, Homo sapien
ccatctatgacatctgtcatagaaa

SEQ ID NO: 2434489 - DNA, 25 bp, Homo sapien
catctatgacatctgtcatagaaac

SEQ ID NO: 2434490 - DNA, 25 bp, Homo sapien
gccatctatgacatctgtcatagaa

SEQ ID NO: 2434491 - DNA, 25 bp, Homo sapien
cccagaaagtttgcacgactgatgc

SEQ ID NO: 2434492 - DNA, 25 bp, Homo sapien
ggcagcaaagtcagtcagaagtggc

SEQ ID NO: 2434493 - DNA, 25 bp, Homo sapien
caaaggtgagggacatgaagagtca

SEQ ID NO: 2434494 - DNA, 25 bp, Homo sapien
tgctttcacctccttgactactgag

SEQ ID NO: 2434495 - DNA, 25 bp, Homo sapien
gaaccacagagctaaactaggcagg

SEQ ID NO: 2434496 - DNA, 25 bp, Homo sapien
cattacctgattacctgggaagggc

SEQ ID NO: 2434497 - DNA, 25 bp, Homo sapien
ggtatactagtagggcatctgcagc

SEQ ID NO: 2434498 - DNA, 25 bp, Homo sapien
tgtggtgacatgacaggaaggcacc

SEQ ID NO: 2434499 - DNA, 25 bp, Homo sapien
aggccctgccaccaaggtaggatgg

SEQ ID NO: 2434500 - DNA, 25 bp, Homo sapien
tggcccagtggcatatcagaaaaaa

SEQ ID NO: 2434501 - DNA, 25 bp, Homo sapien
gatggggaccaggactactggctaa

SEQ ID NO: 2434502 - DNA, 25 bp, Homo sapien
gatgctttgagtatcagtactcata

SEQ ID NO: 2434503 - DNA, 25 bp, Homo sapien
tgttgcttatgggttgggatgcccc

SEQ ID NO: 2434504 - DNA, 25 bp, Homo sapien
tcctctctggatgggagacggaaac

SEQ ID NO: 2434505 - DNA, 25 bp, Homo sapien
ggtgaatcaccctctgaatggaagt

SEQ ID NO: 2434506 - DNA, 25 bp, Homo sapien
aaagggtacgactcttgtgggctct

SEQ ID NO: 2434507 - DNA, 25 bp, Homo sapien
gaaaacgtcagatgtcagactggct

SEQ ID NO: 2434508 - DNA, 25 bp, Homo sapien
tctttaaggagtgcgcaccatcagc

SEQ ID NO: 2434509 - DNA, 25 bp, Homo sapien
ttcgaggtttctatgcctgggacgc

SEQ ID NO: 2434510 - DNA, 25 bp, Homo sapien
tcagacagtgttaatgccatgcccc

SEQ ID NO: 2434511 - DNA, 25 bp, Homo sapien
ccagtagctcctccgctaagcggta

SEQ ID NO: 2434512 - DNA, 25 bp, Homo sapien
tagaggagccgagagtaccaatgca

SEQ ID NO: 2434513 - DNA, 25 bp, Homo sapien
gagtaccaatgcatgccagtcggct

SEQ ID NO: 2434514 - DNA, 25 bp, Homo sapien
cagcagtctcaagggggcaaaagcg

SEQ ID NO: 2434515 - DNA, 25 bp, Homo sapien
aaaacccagtctccgcggtgcagtt

SEQ ID NO: 2434516 - DNA, 25 bp, Homo sapien
gtgactctccagaaccgcgtagcaa

SEQ ID NO: 2434517 - DNA, 25 bp, Homo sapien
gctccacaggcgcacagttgcattt

SEQ ID NO: 2434518 - DNA, 25 bp, Homo sapien
caacagtttgcgtggaggccactcg

SEQ ID NO: 2434519 - DNA, 25 bp, Homo sapien
ggttgcgggactcgtagtagaccca

SEQ ID NO: 2434520 - DNA, 25 bp, Homo sapien
cagctttgaccgacacgtggacgtg

SEQ ID NO: 2434521 - DNA, 25 bp, Homo sapien
tcatcacggcaatggccaaagcgtt

SEQ ID NO: 2434522 - DNA, 25 bp, Homo sapien
tagtgatgtccaaagcacggccttc

SEQ ID NO: 2434523 - DNA, 25 bp, Homo sapien
ataaaggagtcagtctccccaccac

SEQ ID NO: 2434524 - DNA, 25 bp, Homo sapien
gaataaaggagtcagtctccccacc

SEQ ID NO: 2434525 - DNA, 25 bp, Homo sapien
gggaataaaggagtcagtctcccca

SEQ ID NO: 2434526 - DNA, 25 bp, Homo sapien
gcggggaataaaggagtcagtctcc

SEQ ID NO: 2434527 - DNA, 25 bp, Homo sapien
cagagccaactcaatggaggccttt

SEQ ID NO: 2434528 - DNA, 25 bp, Homo sapien
cagggtgtgggagataagtaagact

SEQ ID NO: 2434529 - DNA, 25 bp, Homo sapien
ccagtgcagagccaactcaatggag

SEQ ID NO: 2434530 - DNA, 25 bp, Homo sapien
tgcagagccaactcaatggaggcct

SEQ ID NO: 2434531 - DNA, 25 bp, Homo sapien
caagggaaatctctaaggctaaact

SEQ ID NO: 2434532 - DNA, 25 bp, Homo sapien
tggtgacaagggaaatctctaaggc

SEQ ID NO: 2434533 - DNA, 25 bp, Homo sapien
aaactctctgtaggtgaagctggac

SEQ ID NO: 2434534 - DNA, 25 bp, Homo sapien
tctctaaggctaaactctctgtagg

SEQ ID NO: 2434535 - DNA, 25 bp, Homo sapien
gtgccccggcgcaggtagggagagg

SEQ ID NO: 2434536 - DNA, 25 bp, Homo sapien
tgggctgccataggaaaacggagga

SEQ ID NO: 2434537 - DNA, 25 bp, Homo sapien
ggagctggcagtgccccggcgcagg

SEQ ID NO: 2434538 - DNA, 25 bp, Homo sapien
ctgccataggaaaacggaggagctg

SEQ ID NO: 2434539 - DNA, 25 bp, Homo sapien
ggtcatcaggcggtcggctccactg

SEQ ID NO: 2434540 - DNA, 25 bp, Homo sapien
ttgtagttgggcacgaggtcccgga

SEQ ID NO: 2434541 - DNA, 25 bp, Homo sapien
aggcggtcggctccactgttctcct

SEQ ID NO: 2434542 - DNA, 25 bp, Homo sapien
ttgggcacgaggtcccggaagcgct

SEQ ID NO: 2434543 - DNA, 25 bp, Homo sapien
gcagtagattggtcaggagagccat

SEQ ID NO: 2434544 - DNA, 25 bp, Homo sapien
ctgcttgcgcgcatagcggcgccgg

SEQ ID NO: 2434545 - DNA, 25 bp, Homo sapien
cagcacaggggcagtagattggtca

SEQ ID NO: 2434546 - DNA, 25 bp, Homo sapien
gctggcagcgccagaagtgccaagc

SEQ ID NO: 2434547 - DNA, 25 bp, Homo sapien
ggatacagcggacctcggccaaaag

SEQ ID NO: 2434548 - DNA, 25 bp, Homo sapien
aaagggagcgttcttgtcctcacta

SEQ ID NO: 2434549 - DNA, 25 bp, Homo sapien
atacagcggacctcggccaaaaggg

SEQ ID NO: 2434550 - DNA, 25 bp, Homo sapien
cctcggccaaaagggagcgttcttg

SEQ ID NO: 2434551 - DNA, 25 bp, Homo sapien
gacctgctactgacaaaccatcata

SEQ ID NO: 2434552 - DNA, 25 bp, Homo sapien
gagctcttgtggctccgtgcacctg

SEQ ID NO: 2434553 - DNA, 25 bp, Homo sapien
tggtgctgccagaacgcccggactc

SEQ ID NO: 2434554 - DNA, 25 bp, Homo sapien
gggtgtctaggacctgctactgaca

SEQ ID NO: 2434555 - DNA, 25 bp, Homo sapien
ggttagcctactcctatgcccatgt

SEQ ID NO: 2434556 - DNA, 25 bp, Homo sapien
tatatccaatagttaagccagggag

SEQ ID NO: 2434557 - DNA, 25 bp, Homo sapien
gcatggcctaacaccagatccaagt

SEQ ID NO: 2434558 - DNA, 25 bp, Homo sapien
ttttcaagaaactgatggcctctag

SEQ ID NO: 2434559 - DNA, 25 bp, Homo sapien
ccctgggatcaactttattgctgat

SEQ ID NO: 2434560 - DNA, 25 bp, Homo sapien
ctccctatccccttggtctttcagg

SEQ ID NO: 2434561 - DNA, 25 bp, Homo sapien
tgggatcaactttattgctgatggc

SEQ ID NO: 2434562 - DNA, 25 bp, Homo sapien
cctccctatccccttggtctttcag

SEQ ID NO: 2434563 - DNA, 25 bp, Homo sapien
cagaacagcagtgaggcagattgat

SEQ ID NO: 2434564 - DNA, 25 bp, Homo sapien
tatgcaatagtgcagatggctctgc

SEQ ID NO: 2434565 - DNA, 25 bp, Homo sapien
gctgaggccacagttaagtatggaa

SEQ ID NO: 2434566 - DNA, 25 bp, Homo sapien
ccagaggcaagggagacaatctatc

SEQ ID NO: 2434567 - DNA, 25 bp, Homo sapien
aggtcctgaggtccaagtagccttg

SEQ ID NO: 2434568 - DNA, 25 bp, Homo sapien
tcctgaggtccaagtagccttgggc

SEQ ID NO: 2434569 - DNA, 25 bp, Homo sapien
ctgaggtccaagtagccttgggctt

SEQ ID NO: 2434570 - DNA, 25 bp, Homo sapien
ggtcctgaggtccaagtagccttgg

SEQ ID NO: 2434571 - DNA, 25 bp, Homo sapien
tcactggtgctgggtcttcctagat

SEQ ID NO: 2434572 - DNA, 25 bp, Homo sapien
cactggtgctgggtcttcctagatg

SEQ ID NO: 2434573 - DNA, 25 bp, Homo sapien
actggtgctgggtcttcctagatgc

SEQ ID NO: 2434574 - DNA, 25 bp, Homo sapien
gtgatccatgttccagagtgtccta

SEQ ID NO: 2434575 - DNA, 25 bp, Homo sapien
tccagtccgttagggaccaggcagc

SEQ ID NO: 2434576 - DNA, 25 bp, Homo sapien
gagtgtcctagatgattaccacccc

SEQ ID NO: 2434577 - DNA, 25 bp, Homo sapien
tgaggtacgttacccacaaagcagg

SEQ ID NO: 2434578 - DNA, 25 bp, Homo sapien
aatgtagaaattgcccagccagttg

SEQ ID NO: 2434579 - DNA, 25 bp, Homo sapien
cagttgaagcgtccaaagtcaccca

SEQ ID NO: 2434580 - DNA, 25 bp, Homo sapien
caaaggctgcgttgtagaggaacac

SEQ ID NO: 2434581 - DNA, 25 bp, Homo sapien
tgcccgcacagctgcagtgaaggtc

SEQ ID NO: 2434582 - DNA, 25 bp, Homo sapien
cagttcgggactgttctaagtgcca

SEQ ID NO: 2434583 - DNA, 25 bp, Homo sapien
tgggcgctcatactcatcaggctgc

SEQ ID NO: 2434584 - DNA, 25 bp, Homo sapien
gcaactgataggttggcctctccca

SEQ ID NO: 2434585 - DNA, 25 bp, Homo sapien
taccacccaagctgtctcaagagca

SEQ ID NO: 2434586 - DNA, 25 bp, Homo sapien
aggcctggctcacagctgatttttt

SEQ ID NO: 2434587 - DNA, 25 bp, Homo sapien
ccaggcctggctcacagctgatttt

SEQ ID NO: 2434588 - DNA, 25 bp, Homo sapien
ctcccaagctcagcaattctcatgc

SEQ ID NO: 2434589 - DNA, 25 bp, Homo sapien
caccaggcctggctcacagctgatt

SEQ ID NO: 2434590 - DNA, 25 bp, Homo sapien
tgctgagcttaggaccaggagacag

SEQ ID NO: 2434591 - DNA, 25 bp, Homo sapien
agcttaggaccaggagacagacaca

SEQ ID NO: 2434592 - DNA, 25 bp, Homo sapien
gctgagcttaggaccaggagacaga

SEQ ID NO: 2434593 - DNA, 25 bp, Homo sapien
tgagcttaggaccaggagacagaca

SEQ ID NO: 2434594 - DNA, 25 bp, Homo sapien
ctgcaggcacctagtgcccatccac

SEQ ID NO: 2434595 - DNA, 25 bp, Homo sapien
aagagctgcaggcacctagtgccca

SEQ ID NO: 2434596 - DNA, 25 bp, Homo sapien
gagctgcaggcacctagtgcccatc

SEQ ID NO: 2434597 - DNA, 25 bp, Homo sapien
gctgcaggcacctagtgcccatcca

SEQ ID NO: 2434598 - DNA, 25 bp, Homo sapien
catggcagtgtcgtgccatctgggc

SEQ ID NO: 2434599 - DNA, 25 bp, Homo sapien
gcagtgtcgtgccatctgggccgca

SEQ ID NO: 2434600 - DNA, 25 bp, Homo sapien
ctgcgtcatggcagtgtcgtgccat

SEQ ID NO: 2434601 - DNA, 25 bp, Homo sapien
tgtcgtgccatctgggccgcaggct

SEQ ID NO: 2434602 - DNA, 25 bp, Homo sapien
gaagcccacaactgaggacaccatt

SEQ ID NO: 2434603 - DNA, 25 bp, Homo sapien
gcccacaactgaggacaccattagg

SEQ ID NO: 2434604 - DNA, 25 bp, Homo sapien
cacaactgaggacaccattaggtaa

SEQ ID NO: 2434605 - DNA, 25 bp, Homo sapien
ccacaactgaggacaccattaggta

SEQ ID NO: 2434606 - DNA, 25 bp, Homo sapien
gaattaataactcatctcaaaggga

SEQ ID NO: 2434607 - DNA, 25 bp, Homo sapien
ccactgcattaaggaagaactggct

SEQ ID NO: 2434608 - DNA, 25 bp, Homo sapien
gaacctgaggttgatgaaaacttgc

SEQ ID NO: 2434609 - DNA, 25 bp, Homo sapien
tctgatcagattctactgaaccacc

SEQ ID NO: 2434610 - DNA, 25 bp, Homo sapien
cacttcccatcagcgttgctcagag

SEQ ID NO: 2434611 - DNA, 25 bp, Homo sapien
gttgctcagagtcccaaaggagaca

SEQ ID NO: 2434612 - DNA, 25 bp, Homo sapien
gctcggtctagagtcccaggagaca

SEQ ID NO: 2434613 - DNA, 25 bp, Homo sapien
tccaagaagtgctcggtctagagtc

SEQ ID NO: 2434614 - DNA, 25 bp, Homo sapien
aacagaggcaatgatgggtttccag

SEQ ID NO: 2434615 - DNA, 25 bp, Homo sapien
ctgaacagaggcaatgatgggtttc

SEQ ID NO: 2434616 - DNA, 25 bp, Homo sapien
aggcaatgatgggtttccagaagga

SEQ ID NO: 2434617 - DNA, 25 bp, Homo sapien
ggcaatgatgggtttccagaaggat

SEQ ID NO: 2434618 - DNA, 25 bp, Homo sapien
ctgaatgacggcaccaaaggagccc

SEQ ID NO: 2434619 - DNA, 25 bp, Homo sapien
cagcttggagaaggagacctggcct

SEQ ID NO: 2434620 - DNA, 25 bp, Homo sapien
agaaggagacctggcctaaggaggt

SEQ ID NO: 2434621 - DNA, 25 bp, Homo sapien
acggcaccaaaggagcccagcttgg

SEQ ID NO: 2434622 - DNA, 25 bp, Homo sapien
gggcatggcagcctcatcgatgagc

SEQ ID NO: 2434623 - DNA, 25 bp, Homo sapien
gcatggcagcctcatcgatgagcag

SEQ ID NO: 2434624 - DNA, 25 bp, Homo sapien
tggatggccacaatgagcacagaca

SEQ ID NO: 2434625 - DNA, 25 bp, Homo sapien
gatggccacaatgagcacagacagg

SEQ ID NO: 2434626 - DNA, 25 bp, Homo sapien
cacagctggacccagagctaaagga

SEQ ID NO: 2434627 - DNA, 25 bp, Homo sapien
tgtgtgaggcaaggtcagactccca

SEQ ID NO: 2434628 - DNA, 25 bp, Homo sapien
attccaccccagaccacagctggac

SEQ ID NO: 2434629 - DNA, 25 bp, Homo sapien
aatgggcagactctggtccaacatt

SEQ ID NO: 2434630 - DNA, 25 bp, Homo sapien
gtaggcactcagtgagaagcaacca

SEQ ID NO: 2434631 - DNA, 25 bp, Homo sapien
gcctcaagtactgagggtccactcc

SEQ ID NO: 2434632 - DNA, 25 bp, Homo sapien
cactattactgatgataaccaggtc

SEQ ID NO: 2434633 - DNA, 25 bp, Homo sapien
ccaggtccctgcattgcctcccctc

SEQ ID NO: 2434634 - DNA, 25 bp, Homo sapien
aggttccgttgccaggctgaagcct

SEQ ID NO: 2434635 - DNA, 25 bp, Homo sapien
gttccgttgccaggctgaagccttc

SEQ ID NO: 2434636 - DNA, 25 bp, Homo sapien
ggttccgttgccaggctgaagcctt

SEQ ID NO: 2434637 - DNA, 25 bp, Homo sapien
ccaggttccgttgccaggctgaagc

SEQ ID NO: 2434638 - DNA, 25 bp, Homo sapien
cccaggtatcccaagccctacgaag

SEQ ID NO: 2434639 - DNA, 25 bp, Homo sapien
atcccaagccctacgaagccacata

SEQ ID NO: 2434640 - DNA, 25 bp, Homo sapien
aggtatcccaagccctacgaagcca

SEQ ID NO: 2434641 - DNA, 25 bp, Homo sapien
gtatcccaagccctacgaagccaca

SEQ ID NO: 2434642 - DNA, 25 bp, Homo sapien
gctccatgtctaaaggcagccagca

SEQ ID NO: 2434643 - DNA, 25 bp, Homo sapien
cagctccatgtctaaaggcagccag

SEQ ID NO: 2434644 - DNA, 25 bp, Homo sapien
gcagctccatgtctaaaggcagcca

SEQ ID NO: 2434645 - DNA, 25 bp, Homo sapien
ctccatgtctaaaggcagccagcag

SEQ ID NO: 2434646 - DNA, 25 bp, Homo sapien
gcagagaagatggtgttgctctcaa

SEQ ID NO: 2434647 - DNA, 25 bp, Homo sapien
aggccaagcctaccaccccagcagg

SEQ ID NO: 2434648 - DNA, 25 bp, Homo sapien
ccagcagggaagaactgcaacttac

SEQ ID NO: 2434649 - DNA, 25 bp, Homo sapien
gatggtgttgctctcaagtcctgca

SEQ ID NO: 2434650 - DNA, 25 bp, Homo sapien
tacagatcctgcgggtcagggctgc

SEQ ID NO: 2434651 - DNA, 25 bp, Homo sapien
tcccagtgacggagaacatgcgggc

SEQ ID NO: 2434652 - DNA, 25 bp, Homo sapien
gaacatgcgggcgagacccagtgga

SEQ ID NO: 2434653 - DNA, 25 bp, Homo sapien
gggcttgactagcagcttcccagtg

SEQ ID NO: 2434654 - DNA, 25 bp, Homo sapien
tagcagcttcccagtgacggagaac

SEQ ID NO: 2434655 - DNA, 25 bp, Homo sapien
aggaaggagatgcatgagtagaggt

SEQ ID NO: 2434656 - DNA, 25 bp, Homo sapien
gaaggagatgcatgagtagaggtag

SEQ ID NO: 2434657 - DNA, 25 bp, Homo sapien
aggagatgcatgagtagaggtaggg

SEQ ID NO: 2434658 - DNA, 25 bp, Homo sapien
agatgcatgagtagaggtaggggag

SEQ ID NO: 2434659 - DNA, 25 bp, Homo sapien
cactgtctcatagacccggcccagg

SEQ ID NO: 2434660 - DNA, 25 bp, Homo sapien
acaccatacctagcaccagcagagt

SEQ ID NO: 2434661 - DNA, 25 bp, Homo sapien
ccatacctagcaccagcagagtgag

SEQ ID NO: 2434662 - DNA, 25 bp, Homo sapien
gagtgaggagcatcaacatcaccac

SEQ ID NO: 2434663 - DNA, 25 bp, Homo sapien
caggcctaagggtggtaatgacttc

SEQ ID NO: 2434664 - DNA, 25 bp, Homo sapien
gaattccgtttcctgcctggataca

SEQ ID NO: 2434665 - DNA, 25 bp, Homo sapien
tctggtttcgcatccaacaggagaa

SEQ ID NO: 2434666 - DNA, 25 bp, Homo sapien
taaggtcaccccacataccaggtgt

SEQ ID NO: 2434667 - DNA, 25 bp, Homo sapien
gccctcagactcagtgaagaaatat

SEQ ID NO: 2434668 - DNA, 25 bp, Homo sapien
gcaaagccctcagactcagtgaaga

SEQ ID NO: 2434669 - DNA, 25 bp, Homo sapien
agactcagtgaagaaatatgcaaag

SEQ ID NO: 2434670 - DNA, 25 bp, Homo sapien
aagaaatatgcaaagggcatgagga

SEQ ID NO: 2434671 - DNA, 25 bp, Homo sapien
catatgactgcttggcgcacggctg

SEQ ID NO: 2434672 - DNA, 25 bp, Homo sapien
ctgcttggcgcacggctgcctgagt

SEQ ID NO: 2434673 - DNA, 25 bp, Homo sapien
cctgagtccacccaactctatctgc

SEQ ID NO: 2434674 - DNA, 25 bp, Homo sapien
agcagagtgggaaggtgcgacatat

SEQ ID NO: 2434675 - DNA, 25 bp, Homo sapien
cacccagggcaattgccagggtaaa

SEQ ID NO: 2434676 - DNA, 25 bp, Homo sapien
cagggtaaaggtgcacagctcgagc

SEQ ID NO: 2434677 - DNA, 25 bp, Homo sapien
tgagccactggatgtagtagttccg

SEQ ID NO: 2434678 - DNA, 25 bp, Homo sapien
cactggatgtagtagttccgaggca

SEQ ID NO: 2434679 - DNA, 25 bp, Homo sapien
gccccagctcatgggatgggcacag

SEQ ID NO: 2434680 - DNA, 25 bp, Homo sapien
ggacagtgtccttgcttagctcagc

SEQ ID NO: 2434681 - DNA, 25 bp, Homo sapien
tccagaaccagctgtagcaatcaca

SEQ ID NO: 2434682 - DNA, 25 bp, Homo sapien
tcgggcattcatgggaacctggtca

SEQ ID NO: 2434683 - DNA, 25 bp, Homo sapien
gctctttggtccatcaagggtggag

SEQ ID NO: 2434684 - DNA, 25 bp, Homo sapien
gagccatttccggtgactcaggccc

SEQ ID NO: 2434685 - DNA, 25 bp, Homo sapien
gagggctgccttctgatctattgac

SEQ ID NO: 2434686 - DNA, 25 bp, Homo sapien
ccagcggacgttcctggccatgagg

SEQ ID NO: 2434687 - DNA, 25 bp, Homo sapien
gcaatcttgttgacggtggcatctt

SEQ ID NO: 2434688 - DNA, 25 bp, Homo sapien
caatcttgttgacggtggcatcttc

SEQ ID NO: 2434689 - DNA, 25 bp, Homo sapien
ggttacatcagtggctgggtccagg

SEQ ID NO: 2434690 - DNA, 25 bp, Homo sapien
ttacacaatgtctagggaaggaaag

SEQ ID NO: 2434691 - DNA, 25 bp, Homo sapien
caactagtctgtgaggttggttaca

SEQ ID NO: 2434692 - DNA, 25 bp, Homo sapien
ggaaggaaagctgcgatctgagcat

SEQ ID NO: 2434693 - DNA, 25 bp, Homo sapien
ggctccccataaagagaaaggccac

SEQ ID NO: 2434694 - DNA, 25 bp, Homo sapien
tccccataaagagaaaggccaccat

SEQ ID NO: 2434695 - DNA, 25 bp, Homo sapien
tcaggctccccataaagagaaaggc

SEQ ID NO: 2434696 - DNA, 25 bp, Homo sapien
caggctccccataaagagaaaggcc

SEQ ID NO: 2434697 - DNA, 25 bp, Homo sapien
tggaagcactaggagaggagatgac

SEQ ID NO: 2434698 - DNA, 25 bp, Homo sapien
tccagcagttgctcacttcaggttc

SEQ ID NO: 2434699 - DNA, 25 bp, Homo sapien
gagcctgtgcccgtaatgacattca

SEQ ID NO: 2434700 - DNA, 25 bp, Homo sapien
taatgacattcatccagcagttgct

SEQ ID NO: 2434701 - DNA, 25 bp, Homo sapien
gtaggtagacattgttacgcccatt

SEQ ID NO: 2434702 - DNA, 25 bp, Homo sapien
ccacacaatggagtaggtagacatt

SEQ ID NO: 2434703 - DNA, 25 bp, Homo sapien
ggtagacattgttacgcccattttg

SEQ ID NO: 2434704 - DNA, 25 bp, Homo sapien
ggagtaggtagacattgttacgccc

SEQ ID NO: 2434705 - DNA, 25 bp, Homo sapien
tctagccgcccttgcccctatcttg

SEQ ID NO: 2434706 - DNA, 25 bp, Homo sapien
cagcagacacatccatctagccgcc

SEQ ID NO: 2434707 - DNA, 25 bp, Homo sapien
ccataggcccattcccctgaggctg

SEQ ID NO: 2434708 - DNA, 25 bp, Homo sapien
cataggcccattcccctgaggctgg

SEQ ID NO: 2434709 - DNA, 25 bp, Homo sapien
ggcagaggatgtacagtgttgcaaa

SEQ ID NO: 2434710 - DNA, 25 bp, Homo sapien
cagcaggcttcttgaagcgggtcag

SEQ ID NO: 2434711 - DNA, 25 bp, Homo sapien
ggatgtacagtgttgcaaacagaag

SEQ ID NO: 2434712 - DNA, 25 bp, Homo sapien
caggcttcttgaagcgggtcaggaa

SEQ ID NO: 2434713 - DNA, 25 bp, Homo sapien
actatctggagatgagggttgccct

SEQ ID NO: 2434714 - DNA, 25 bp, Homo sapien
tccatttactatctggagatgaggg

SEQ ID NO: 2434715 - DNA, 25 bp, Homo sapien
gagatgagggttgccctggtgagct

SEQ ID NO: 2434716 - DNA, 25 bp, Homo sapien
accattccctttccatttactatct

SEQ ID NO: 2434717 - DNA, 25 bp, Homo sapien
aatacactcgcggatcctctcgtgg

SEQ ID NO: 2434718 - DNA, 25 bp, Homo sapien
tcctctcgtggaatagctgttctcg

SEQ ID NO: 2434719 - DNA, 25 bp, Homo sapien
gcacttcgtagtcaggtgcttccat

SEQ ID NO: 2434720 - DNA, 25 bp, Homo sapien
gaatagctgttctcgcacggatagc

SEQ ID NO: 2434721 - DNA, 25 bp, Homo sapien
ccagcctaggggcctttcctcgcag

SEQ ID NO: 2434722 - DNA, 25 bp, Homo sapien
cagcctaggggcctttcctcgcagc

SEQ ID NO: 2434723 - DNA, 25 bp, Homo sapien
gctctgtcctccctttgctccccac

SEQ ID NO: 2434724 - DNA, 25 bp, Homo sapien
actctttaaggtcgggtcgcgctca

SEQ ID NO: 2434725 - DNA, 25 bp, Homo sapien
agtctggggctcagatacagtcgtc

SEQ ID NO: 2434726 - DNA, 25 bp, Homo sapien
ggctcagatacagtcgtccggacgc

SEQ ID NO: 2434727 - DNA, 25 bp, Homo sapien
ctcgctacgaggaagcgccgctgag

SEQ ID NO: 2434728 - DNA, 25 bp, Homo sapien
actaggctcgctacgaggaagcgcc

SEQ ID NO: 2434729 - DNA, 25 bp, Homo sapien
ccgccactaggctcgctacgaggaa

SEQ ID NO: 2434730 - DNA, 25 bp, Homo sapien
aggctcgctacgaggaagcgccgct

SEQ ID NO: 2434731 - DNA, 25 bp, Homo sapien
gagacatgtttgcagtaatgctgct

SEQ ID NO: 2434732 - DNA, 25 bp, Homo sapien
ataggagaaaaaccgccctatggtg

SEQ ID NO: 2434733 - DNA, 25 bp, Homo sapien
tgtttgcagtaatgctgctttgtta

SEQ ID NO: 2434734 - DNA, 25 bp, Homo sapien
tgagataggagaaaaaccgccctat

SEQ ID NO: 2434735 - DNA, 25 bp, Homo sapien
gatgttaatgactttactttgagat

SEQ ID NO: 2434736 - DNA, 25 bp, Homo sapien
tgatgttaatgactttactttgaga

SEQ ID NO: 2434737 - DNA, 25 bp, Homo sapien
ttagtattcctctccttcttcctca

SEQ ID NO: 2434738 - DNA, 25 bp, Homo sapien
tagtattcctctccttcttcctcac

SEQ ID NO: 2434739 - DNA, 25 bp, Homo sapien
cgggcctctgaaaactcgccttcct

SEQ ID NO: 2434740 - DNA, 25 bp, Homo sapien
aggacacaatctggctaataaggcg

SEQ ID NO: 2434741 - DNA, 25 bp, Homo sapien
caatctggctaataaggcggttaag

SEQ ID NO: 2434742 - DNA, 25 bp, Homo sapien
ttgggaaccacgtcaccacggtaca

SEQ ID NO: 2434743 - DNA, 25 bp, Homo sapien
acgtcaccacggtacaacaggcagc

SEQ ID NO: 2434744 - DNA, 25 bp, Homo sapien
tcgaggtttctacgacagatgtcat

SEQ ID NO: 2434745 - DNA, 25 bp, Homo sapien
cgaggtttctacgacagatgtcata

SEQ ID NO: 2434746 - DNA, 25 bp, Homo sapien
tcttgccataatcaactgagagacg

SEQ ID NO: 2434747 - DNA, 25 bp, Homo sapien
ggtgctgggtaaatggagaactcca

SEQ ID NO: 2434748 - DNA, 25 bp, Homo sapien
cctgaagaccggtgcactggtcagc

SEQ ID NO: 2434749 - DNA, 25 bp, Homo sapien
ctgagagacgttccatgagcaggga

SEQ ID NO: 2434750 - DNA, 25 bp, Homo sapien
taaatgcatatttatatgtggtgct

SEQ ID NO: 2434751 - DNA, 25 bp, Homo sapien
aatgcatatttatatgtggtgctta

SEQ ID NO: 2434752 - DNA, 25 bp, Homo sapien
atgcatatttatatgtggtgcttac

SEQ ID NO: 2434753 - DNA, 25 bp, Homo sapien
attaaatgcatatttatatgtggtg

SEQ ID NO: 2434754 - DNA, 25 bp, Homo sapien
cttgcgaattcggtccaacacaagg

SEQ ID NO: 2434755 - DNA, 25 bp, Homo sapien
cgaattcggtccaacacaaggtcaa

SEQ ID NO: 2434756 - DNA, 25 bp, Homo sapien
tgcgaattcggtccaacacaaggtc

SEQ ID NO: 2434757 - DNA, 25 bp, Homo sapien
cagcttgcgaattcggtccaacaca

SEQ ID NO: 2434758 - DNA, 25 bp, Homo sapien
cttgcctgtgatgagctgctcaggg

SEQ ID NO: 2434759 - DNA, 25 bp, Homo sapien
gggtggaagagctggcggtaggtgc

SEQ ID NO: 2434760 - DNA, 25 bp, Homo sapien
tcgggcatagttattggcagcatct

SEQ ID NO: 2434761 - DNA, 25 bp, Homo sapien
catcttccttgcctgtgatgagctg

SEQ ID NO: 2434762 - DNA, 25 bp, Homo sapien
ccagcgcccgtctcactgaagaagg

SEQ ID NO: 2434763 - DNA, 25 bp, Homo sapien
gtgggttccaagtctacaaacacag

SEQ ID NO: 2434764 - DNA, 25 bp, Homo sapien
gccagcgcccgtctcactgaagaag

SEQ ID NO: 2434765 - DNA, 25 bp, Homo sapien
tctacaaacacagcccggggcacgt

SEQ ID NO: 2434766 - DNA, 25 bp, Homo sapien
tggccatcgggctggatgccgtgtt

SEQ ID NO: 2434767 - DNA, 25 bp, Homo sapien
ctggccatcgggctggatgccgtgt

SEQ ID NO: 2434768 - DNA, 25 bp, Homo sapien
gccatcgggctggatgccgtgttcc

SEQ ID NO: 2434769 - DNA, 25 bp, Homo sapien
catcgggctggatgccgtgttccag

SEQ ID NO: 2434770 - DNA, 25 bp, Homo sapien
gccaacgtggatggagatgcactca

SEQ ID NO: 2434771 - DNA, 25 bp, Homo sapien
caacgtggatggagatgcactcacg

SEQ ID NO: 2434772 - DNA, 25 bp, Homo sapien
tggccaacgtggatggagatgcact

SEQ ID NO: 2434773 - DNA, 25 bp, Homo sapien
ctggccaacgtggatggagatgcac

SEQ ID NO: 2434774 - DNA, 25 bp, Homo sapien
caatctattgatgactgtcaagtgg

SEQ ID NO: 2434775 - DNA, 25 bp, Homo sapien
caatttaaaccaatctattgatgac

SEQ ID NO: 2434776 - DNA, 25 bp, Homo sapien
aaagatatcacaatttaaaccaatc

SEQ ID NO: 2434777 - DNA, 25 bp, Homo sapien
taaaccaatctattgatgactgtca

SEQ ID NO: 2434778 - DNA, 25 bp, Homo sapien
tatagtctacgttgcttttaatgaa

SEQ ID NO: 2434779 - DNA, 25 bp, Homo sapien
gagaacagctacactatagtctacg

SEQ ID NO: 2434780 - DNA, 25 bp, Homo sapien
aaagatccttttctaagatgtacta

SEQ ID NO: 2434781 - DNA, 25 bp, Homo sapien
ggctactcacgtaatctgaaaacga

SEQ ID NO: 2434782 - DNA, 25 bp, Homo sapien
gcagtaggagattatcggcggccca

SEQ ID NO: 2434783 - DNA, 25 bp, Homo sapien
gttacgcgacaaaagagagctccgg

SEQ ID NO: 2434784 - DNA, 25 bp, Homo sapien
gatgaatgagcaattccgggcgcgc

SEQ ID NO: 2434785 - DNA, 25 bp, Homo sapien
gagtccgagaagaaatcctggcgcc

SEQ ID NO: 2434786 - DNA, 25 bp, Homo sapien
tcgaggtaagtaacgcactagggcg

SEQ ID NO: 2434787 - DNA, 25 bp, Homo sapien
gggcacaggcggtgccgcggtcgct

SEQ ID NO: 2434788 - DNA, 25 bp, Homo sapien
agctaagagtcgaggtaagtaacgc

SEQ ID NO: 2434789 - DNA, 25 bp, Homo sapien
ggccggcgctggagcctcttaagta

SEQ ID NO: 2434790 - DNA, 25 bp, Homo sapien
tacaatttgaaagacgaagcaccgt

SEQ ID NO: 2434791 - DNA, 25 bp, Homo sapien
cgaggcttgccttaattcggaggaa

SEQ ID NO: 2434792 - DNA, 25 bp, Homo sapien
cagtcattcgaagagtagtgcccaa

SEQ ID NO: 2434793 - DNA, 25 bp, Homo sapien
cctgataatgtgaaaaacgcgagct

SEQ ID NO: 2434794 - DNA, 25 bp, Homo sapien
agaggttcttgtttatttccgatag

SEQ ID NO: 2434795 - DNA, 25 bp, Homo sapien
tgttaaaggcatttgattcaaaatc

SEQ ID NO: 2434796 - DNA, 25 bp, Homo sapien
ttgttaaaggcatttgattcaaaat

SEQ ID NO: 2434797 - DNA, 25 bp, Homo sapien
tccgatagttttggtagtcttgtta

SEQ ID NO: 2434798 - DNA, 25 bp, Homo sapien
tgggggttgcatatcaattttagtg

SEQ ID NO: 2434799 - DNA, 25 bp, Homo sapien
gcctgtcaattttagcagtgggggt

SEQ ID NO: 2434800 - DNA, 25 bp, Homo sapien
tagcagtgggggttgcatatcaatt

SEQ ID NO: 2434801 - DNA, 25 bp, Homo sapien
ggttgcatatcaattttagtgatac

SEQ ID NO: 2434802 - DNA, 25 bp, Homo sapien
cccaagtgagtaactgggaaaacag

SEQ ID NO: 2434803 - DNA, 25 bp, Homo sapien
gaggctgaggttgcgccattgcact

SEQ ID NO: 2434804 - DNA, 25 bp, Homo sapien
ggaggctgaggttgcgccattgcac

SEQ ID NO: 2434805 - DNA, 25 bp, Homo sapien
caggaggctgaggttgcgccattgc

SEQ ID NO: 2434806 - DNA, 25 bp, Homo sapien
ccaggaggctgaggttgcgccattg

SEQ ID NO: 2434807 - DNA, 25 bp, Homo sapien
gtacaatggcgtgatctccagctca

SEQ ID NO: 2434808 - DNA, 25 bp, Homo sapien
tacaggcgcatgccaccacgcctgg

SEQ ID NO: 2434809 - DNA, 25 bp, Homo sapien
gagtacaatggcgtgatctccagct

SEQ ID NO: 2434810 - DNA, 25 bp, Homo sapien
ccagctcactgcaacctctgcctcc

SEQ ID NO: 2434811 - DNA, 25 bp, Homo sapien
tataatttgcaagcctgagaagaga

SEQ ID NO: 2434812 - DNA, 25 bp, Homo sapien
acagaatctatgtaatcatatgtac

SEQ ID NO: 2434813 - DNA, 25 bp, Homo sapien
gaatcttttagaggcacttctttta

SEQ ID NO: 2434814 - DNA, 25 bp, Homo sapien
gaagagaaaactagatccaggatct

SEQ ID NO: 2434815 - DNA, 25 bp, Homo sapien
ctcctgaattcaaggattcttctgc

SEQ ID NO: 2434816 - DNA, 25 bp, Homo sapien
ctcgatcttggttgactgcaacatc

SEQ ID NO: 2434817 - DNA, 25 bp, Homo sapien
agtgtctcgatcttggttgactgca

SEQ ID NO: 2434818 - DNA, 25 bp, Homo sapien
acatccgcctcctgaattcaaggat

SEQ ID NO: 2434819 - DNA, 25 bp, Homo sapien
cattcatgttttagagcataggtca

SEQ ID NO: 2434820 - DNA, 25 bp, Homo sapien
aaatggacagcttgggtctgtaaca

SEQ ID NO: 2434821 - DNA, 25 bp, Homo sapien
tatgagagcatacactgctacatac

SEQ ID NO: 2434822 - DNA, 25 bp, Homo sapien
taggtcagtaattgtatatgagagc

SEQ ID NO: 2434823 - DNA, 25 bp, Homo sapien
taaaacagaataagcttccctgtaa

SEQ ID NO: 2434824 - DNA, 25 bp, Homo sapien
gcagcacctttgtgacgttttaact

SEQ ID NO: 2434825 - DNA, 25 bp, Homo sapien
aagcagcacctttgtgacgttttaa

SEQ ID NO: 2434826 - DNA, 25 bp, Homo sapien
aaaagcagcacctttgtgacgtttt

SEQ ID NO: 2434827 - DNA, 25 bp, Homo sapien
gtcctcacgggcctctgaaaactca

SEQ ID NO: 2434828 - DNA, 25 bp, Homo sapien
ccagtgaacaaaggcacgtttggca

SEQ ID NO: 2434829 - DNA, 25 bp, Homo sapien
gtaccagtgaacaaaggcacgtttg

SEQ ID NO: 2434830 - DNA, 25 bp, Homo sapien
aaaggcacgtttggcatacatcagg

SEQ ID NO: 2434831 - DNA, 25 bp, Homo sapien
ctcagcaatggctgtggtgttgctc

SEQ ID NO: 2434832 - DNA, 25 bp, Homo sapien
agcaatggctgtggtgttgctcagc

SEQ ID NO: 2434833 - DNA, 25 bp, Homo sapien
ctgtggtgttgctcagcatgcacac

SEQ ID NO: 2434834 - DNA, 25 bp, Homo sapien
gctgtggtgttgctcagcatgcaca

SEQ ID NO: 2434835 - DNA, 25 bp, Homo sapien
ataggttggacgctcaatatcgagg

SEQ ID NO: 2434836 - DNA, 25 bp, Homo sapien
attcaggttagtataggttggacgc

SEQ ID NO: 2434837 - DNA, 25 bp, Homo sapien
caggttagtataggttggacgctca

SEQ ID NO: 2434838 - DNA, 25 bp, Homo sapien
tagtataggttggacgctcaatatc

SEQ ID NO: 2434839 - DNA, 25 bp, Homo sapien
gaatgactcattccactctttatta

SEQ ID NO: 2434840 - DNA, 25 bp, Homo sapien
tatttcaaatgtgttctttaggctc

SEQ ID NO: 2434841 - DNA, 25 bp, Homo sapien
gtgttctttaggctcattaatttac

SEQ ID NO: 2434842 - DNA, 25 bp, Homo sapien
ccaggacttagatcttattttgaca

SEQ ID NO: 2434843 - DNA, 25 bp, Homo sapien
cgaattcggtccaacacgaggtcaa

SEQ ID NO: 2434844 - DNA, 25 bp, Homo sapien
cttgcgaattcggtccaacacgagg

SEQ ID NO: 2434845 - DNA, 25 bp, Homo sapien
cagcttgcgaattcggtccaacacg

SEQ ID NO: 2434846 - DNA, 25 bp, Homo sapien
tgcgaattcggtccaacacgaggtc

SEQ ID NO: 2434847 - DNA, 25 bp, Homo sapien
cttgccaatggtgtagtgccctcgg

SEQ ID NO: 2434848 - DNA, 25 bp, Homo sapien
gcggtaggtgccagtgcgaacttca

SEQ ID NO: 2434849 - DNA, 25 bp, Homo sapien
ctggcggtaggtgccagtgcgaact

SEQ ID NO: 2434850 - DNA, 25 bp, Homo sapien
ctgtgataagttgctcagggtggaa

SEQ ID NO: 2434851 - DNA, 25 bp, Homo sapien
gagctggcggtaggtgccagtgcga

SEQ ID NO: 2434852 - DNA, 25 bp, Homo sapien
ggagagtgggtgagtgaccagcgga

SEQ ID NO: 2434853 - DNA, 25 bp, Homo sapien
gggagagtgggtgagtgaccagcgg

SEQ ID NO: 2434854 - DNA, 25 bp, Homo sapien
gatctcacttgggttactgaggtca

SEQ ID NO: 2434855 - DNA, 25 bp, Homo sapien
cacttgggttactgaggtcaactca

SEQ ID NO: 2434856 - DNA, 25 bp, Homo sapien
ccctgggatctcacttgggttactg

SEQ ID NO: 2434857 - DNA, 25 bp, Homo sapien
cagcaccctgggatctcacttgggt

SEQ ID NO: 2434858 - DNA, 25 bp, Homo sapien
gccaacgtggatggagatgcactca

SEQ ID NO: 2434859 - DNA, 25 bp, Homo sapien
agcccccgtctcactgaagaaggtg

SEQ ID NO: 2434860 - DNA, 25 bp, Homo sapien
gtgggttccaagtctacaaacactg

SEQ ID NO: 2434861 - DNA, 25 bp, Homo sapien
gtgttgaaggaatcatctcctcccc

SEQ ID NO: 2434862 - DNA, 25 bp, Homo sapien
gctgcatatgggtgtggtctgaata

SEQ ID NO: 2434863 - DNA, 25 bp, Homo sapien
ctgctacaaatgctgcatatgggtg

SEQ ID NO: 2434864 - DNA, 25 bp, Homo sapien
ggtaccagcccattgtgcctactac

SEQ ID NO: 2434865 - DNA, 25 bp, Homo sapien
ggccctgttcagcacgtggtaccag

SEQ ID NO: 2434866 - DNA, 25 bp, Homo sapien
ctgaataggacttgatattataatc

SEQ ID NO: 2434867 - DNA, 25 bp, Homo sapien
aagatgaaagtttcctctgaatagg

SEQ ID NO: 2434868 - DNA, 25 bp, Homo sapien
aaatgaagtaaatccaattatgact

SEQ ID NO: 2434869 - DNA, 25 bp, Homo sapien
caattatgacttaattgggattaat

SEQ ID NO: 2434870 - DNA, 25 bp, Homo sapien
tgcagctgaggcaagaagccacacc

SEQ ID NO: 2434871 - DNA, 25 bp, Homo sapien
gatgcactggaacaaaagacaacgg

SEQ ID NO: 2434872 - DNA, 25 bp, Homo sapien
cccgggaccatgtgcctgaattgaa

SEQ ID NO: 2434873 - DNA, 25 bp, Homo sapien
caatactaggagtttagacaaggtc

SEQ ID NO: 2434874 - DNA, 25 bp, Homo sapien
cccagaccagacattaaagagcttg

SEQ ID NO: 2434875 - DNA, 25 bp, Homo sapien
cccagtggctccaacgccatagaag

SEQ ID NO: 2434876 - DNA, 25 bp, Homo sapien
cagtgagggcgaaccccgcccagtg

SEQ ID NO: 2434877 - DNA, 25 bp, Homo sapien
tggctccaacgccatagaagccaga

SEQ ID NO: 2434878 - DNA, 25 bp, Homo sapien
gaggttcagtgagggcgaaccccgc

SEQ ID NO: 2434879 - DNA, 25 bp, Homo sapien
taggctgcgctttgttcccgttccc

SEQ ID NO: 2434880 - DNA, 25 bp, Homo sapien
aatgtgtgggtatctttccaaaacg

SEQ ID NO: 2434881 - DNA, 25 bp, Homo sapien
aacaacgcgagacagaaagtggccc

SEQ ID NO: 2434882 - DNA, 25 bp, Homo sapien
atcagcgaaaccgtgcgcacagaca

SEQ ID NO: 2434883 - DNA, 25 bp, Homo sapien
ctctcggataacacaggcgcctagg

SEQ ID NO: 2434884 - DNA, 25 bp, Homo sapien
tgggcgcagtactggcccggttcct

SEQ ID NO: 2434885 - DNA, 25 bp, Homo sapien
ccccgaaagtctctcggataacaca

SEQ ID NO: 2434886 - DNA, 25 bp, Homo sapien
taggcgccgcctttgttcctcccca

SEQ ID NO: 2434887 - DNA, 25 bp, Homo sapien
cacaaagagccgaagccgattctca

SEQ ID NO: 2434888 - DNA, 25 bp, Homo sapien
gggctaagctaaacctcacaaaaca

SEQ ID NO: 2434889 - DNA, 25 bp, Homo sapien
gagcttacgaaagaaaagagcttaa

SEQ ID NO: 2434890 - DNA, 25 bp, Homo sapien
ttttccaagtagagcctgggggcgc

SEQ ID NO: 2434891 - DNA, 25 bp, Homo sapien
gagctgatggcggagacgaagagga

SEQ ID NO: 2434892 - DNA, 25 bp, Homo sapien
ggttgctgcttcgcgactgccgagc

SEQ ID NO: 2434893 - DNA, 25 bp, Homo sapien
gatggcggagacgaagaggagaggt

SEQ ID NO: 2434894 - DNA, 25 bp, Homo sapien
tgcttcgcgactgccgagctgatgg

SEQ ID NO: 2434895 - DNA, 25 bp, Homo sapien
tcttaggcggtcgatgtaagagaac

SEQ ID NO: 2434896 - DNA, 25 bp, Homo sapien
gcgcgactcttaggcggtcgatgta

SEQ ID NO: 2434897 - DNA, 25 bp, Homo sapien
ttacagcgcgactcttaggcggtcg

SEQ ID NO: 2434898 - DNA, 25 bp, Homo sapien
gactcttaggcggtcgatgtaagag

SEQ ID NO: 2434899 - DNA, 25 bp, Homo sapien
tgcggctccctatatacaactcggt

SEQ ID NO: 2434900 - DNA, 25 bp, Homo sapien
ggcggatgcggctccctatatacaa

SEQ ID NO: 2434901 - DNA, 25 bp, Homo sapien
ctatatacaactcggtcaccatggg

SEQ ID NO: 2434902 - DNA, 25 bp, Homo sapien
ctgcggcacataggcggatgcggct

SEQ ID NO: 2434903 - DNA, 25 bp, Homo sapien
gacagccgattttccaagggagaac

SEQ ID NO: 2434904 - DNA, 25 bp, Homo sapien
tttacgagacttgagagacagccga

SEQ ID NO: 2434905 - DNA, 25 bp, Homo sapien
tccagattgtgaagattacagcccc

SEQ ID NO: 2434906 - DNA, 25 bp, Homo sapien
gttattccggaatcactgggcaagg

SEQ ID NO: 2434907 - DNA, 25 bp, Homo sapien
gacctagaaatggcactgcaacgat

SEQ ID NO: 2434908 - DNA, 25 bp, Homo sapien
aggagggacctagaaatggcactgc

SEQ ID NO: 2434909 - DNA, 25 bp, Homo sapien
acctagaaatggcactgcaacgatc

SEQ ID NO: 2434910 - DNA, 25 bp, Homo sapien
gaggaggagggacctagaaatggca

SEQ ID NO: 2434911 - DNA, 25 bp, Homo sapien
tcattttcaaattccacacattgtt

SEQ ID NO: 2434912 - DNA, 25 bp, Homo sapien
tttcaaattccacacattgtttggt

SEQ ID NO: 2434913 - DNA, 25 bp, Homo sapien
ttcattttcaaattccacacattgt

SEQ ID NO: 2434914 - DNA, 25 bp, Homo sapien
caaattccacacattgtttggtcat

SEQ ID NO: 2434915 - DNA, 25 bp, Homo sapien
taatcacactataagccagaattcc

SEQ ID NO: 2434916 - DNA, 25 bp, Homo sapien
gccaaggttactctatttaatcaca

SEQ ID NO: 2434917 - DNA, 25 bp, Homo sapien
gacctcaggctgttttagagcaagt

SEQ ID NO: 2434918 - DNA, 25 bp, Homo sapien
aatacaactacggaccttgccaagg

SEQ ID NO: 2434919 - DNA, 25 bp, Homo sapien
gaagacagtaatttaggccaggagc

SEQ ID NO: 2434920 - DNA, 25 bp, Homo sapien
tatggactagaggatcaaaaacagc

SEQ ID NO: 2434921 - DNA, 25 bp, Homo sapien
tgttgtaaaaacagaggcctgcaag

SEQ ID NO: 2434922 - DNA, 25 bp, Homo sapien
gccttaaagccaacctcctgaggga

SEQ ID NO: 2434923 - DNA, 25 bp, Homo sapien
taacatgttacctagaaagtaatgt

SEQ ID NO: 2434924 - DNA, 25 bp, Homo sapien
tacctagaaagtaatgtcctgctat

SEQ ID NO: 2434925 - DNA, 25 bp, Homo sapien
tagaaagtaatgtcctgctattctg

SEQ ID NO: 2434926 - DNA, 25 bp, Homo sapien
tgttacctagaaagtaatgtcctgc

SEQ ID NO: 2434927 - DNA, 25 bp, Homo sapien
gggacggggcagacgtccggcctgc

SEQ ID NO: 2434928 - DNA, 25 bp, Homo sapien
gttttgcccacctgacgcccccgca

SEQ ID NO: 2434929 - DNA, 25 bp, Homo sapien
acggggcagacgtccggcctgctcc

SEQ ID NO: 2434930 - DNA, 25 bp, Homo sapien
ctggagcttcccctcgctggggttt

SEQ ID NO: 2434931 - DNA, 25 bp, Homo sapien
ttttgaatccgccaatcagcgccgc

SEQ ID NO: 2434932 - DNA, 25 bp, Homo sapien
gccccgggcagtgtttgtagacttg

SEQ ID NO: 2434933 - DNA, 25 bp, Homo sapien
caccttcttcagtgaaacgggtgct

SEQ ID NO: 2434934 - DNA, 25 bp, Homo sapien
tgctggcaagcatgtgccccgggca

SEQ ID NO: 2434935 - DNA, 25 bp, Homo sapien
tggtgtccagattggcaatgcctgc

SEQ ID NO: 2434936 - DNA, 25 bp, Homo sapien
tggcaaggagatcattgacctcgtg

SEQ ID NO: 2434937 - DNA, 25 bp, Homo sapien
agttcgcactggcacttaccgccag

SEQ ID NO: 2434938 - DNA, 25 bp, Homo sapien
atgaagttcgcactggcacttaccg

SEQ ID NO: 2434939 - DNA, 25 bp, Homo sapien
tcgtgttggaccgaattcgcaagct

SEQ ID NO: 2434940 - DNA, 25 bp, Homo sapien
tccacagctgtagttgagccctaca

SEQ ID NO: 2434941 - DNA, 25 bp, Homo sapien
agctgtagttgagccctacaactcc

SEQ ID NO: 2434942 - DNA, 25 bp, Homo sapien
cagctgtagttgagccctacaactc

SEQ ID NO: 2434943 - DNA, 25 bp, Homo sapien
cacagctgtagttgagccctacaac

SEQ ID NO: 2434944 - DNA, 25 bp, Homo sapien
cagatagtgctgacggagaggatga

SEQ ID NO: 2434945 - DNA, 25 bp, Homo sapien
taacctgtgtgctgtacttttacac

SEQ ID NO: 2434946 - DNA, 25 bp, Homo sapien
tgtaaatgtctattgccgtaaattg

SEQ ID NO: 2434947 - DNA, 25 bp, Homo sapien
gagcaataccacagctgttgccgag

SEQ ID NO: 2434948 - DNA, 25 bp, Homo sapien
cagtgcccgtcagctgaggcggcaa

SEQ ID NO: 2434949 - DNA, 25 bp, Homo sapien
gccagagtggtcagtgcccgtcagc

SEQ ID NO: 2434950 - DNA, 25 bp, Homo sapien
agagtggtcagtgcccgtcagctga

SEQ ID NO: 2434951 - DNA, 25 bp, Homo sapien
cagctgaggcggcaaggtgaagctg

SEQ ID NO: 2434952 - DNA, 25 bp, Homo sapien
tagagacagaccacacatgcataat

SEQ ID NO: 2434953 - DNA, 25 bp, Homo sapien
ctgtgctgggtactataggaaatat

SEQ ID NO: 2434954 - DNA, 25 bp, Homo sapien
gcataatcccaattcgaggcagcat

SEQ ID NO: 2434955 - DNA, 25 bp, Homo sapien
caggcagtagccactgttgcatagc

SEQ ID NO: 2434956 - DNA, 25 bp, Homo sapien
cagggtgacgcggatgagacccaga

SEQ ID NO: 2434957 - DNA, 25 bp, Homo sapien
tggttgctccccgtgtggaggctct

SEQ ID NO: 2434958 - DNA, 25 bp, Homo sapien
gacccagaccagactctgagggctc

SEQ ID NO: 2434959 - DNA, 25 bp, Homo sapien
gggttagctgactggttgctccccg

SEQ ID NO: 2434960 - DNA, 25 bp, Homo sapien
ccgttctcaatgagccgctgggcac

SEQ ID NO: 2434961 - DNA, 25 bp, Homo sapien
acctccagcacggtcctgagatgag

SEQ ID NO: 2434962 - DNA, 25 bp, Homo sapien
cggtcctgagatgagttgtccccat

SEQ ID NO: 2434963 - DNA, 25 bp, Homo sapien
gttccacctccagcacggtcctgag

SEQ ID NO: 2434964 - DNA, 25 bp, Homo sapien
agcacggtcctgagatgagttgtcc

SEQ ID NO: 2434965 - DNA, 25 bp, Homo sapien
tctgcccttggagtgtggcttgctg

SEQ ID NO: 2434966 - DNA, 25 bp, Homo sapien
ggatggagacgtgattttacagtga

SEQ ID NO: 2434967 - DNA, 25 bp, Homo sapien
aaagatcaagcaggcggatggagac

SEQ ID NO: 2434968 - DNA, 25 bp, Homo sapien
gcctgccttttcatggcccgggtga

SEQ ID NO: 2434969 - DNA, 25 bp, Homo sapien
acatgaagggacgtagtgacgagcc

SEQ ID NO: 2434970 - DNA, 25 bp, Homo sapien
ggtagaagctacagttagttatctc

SEQ ID NO: 2434971 - DNA, 25 bp, Homo sapien
gcctaaattctacaacagagtggtg

SEQ ID NO: 2434972 - DNA, 25 bp, Homo sapien
aacaacactatgaggtagaagctac

SEQ ID NO: 2434973 - DNA, 25 bp, Homo sapien
ccacccaggcctgatccacagctcc

SEQ ID NO: 2434974 - DNA, 25 bp, Homo sapien
ggagcctcttctgcctggcagttcc

SEQ ID NO: 2434975 - DNA, 25 bp, Homo sapien
ctctgtcccttctcctccgaggcat

SEQ ID NO: 2434976 - DNA, 25 bp, Homo sapien
tttgctccgcctggagttgctggcc

SEQ ID NO: 2434977 - DNA, 25 bp, Homo sapien
ctgtgcagggagagactaatggccc

SEQ ID NO: 2434978 - DNA, 25 bp, Homo sapien
caaaccagacccatcaaggagaagg

SEQ ID NO: 2434979 - DNA, 25 bp, Homo sapien
tgtagacagggcctgagctggtcct

SEQ ID NO: 2434980 - DNA, 25 bp, Homo sapien
ggctgctgccctgcaatactgagga

SEQ ID NO: 2434981 - DNA, 25 bp, Homo sapien
ctttaaggctgaaacatcagcagac

SEQ ID NO: 2434982 - DNA, 25 bp, Homo sapien
taggtctaggtttgggggctgtgtc

SEQ ID NO: 2434983 - DNA, 25 bp, Homo sapien
tggggcttgttgcggggtaggtcta

SEQ ID NO: 2434984 - DNA, 25 bp, Homo sapien
ttaaggctgaaacatcagcagacaa

SEQ ID NO: 2434985 - DNA, 25 bp, Homo sapien
cctggaactagagcgcaagattgag

SEQ ID NO: 2434986 - DNA, 25 bp, Homo sapien
ccgatctcagtatccagaggtggca

SEQ ID NO: 2434987 - DNA, 25 bp, Homo sapien
agaacagcctctaaccggatcctgg

SEQ ID NO: 2434988 - DNA, 25 bp, Homo sapien
tgagttcctcaagaagctgcacgag

SEQ ID NO: 2434989 - DNA, 25 bp, Homo sapien
cctcaacgtcaagatggccctggac

SEQ ID NO: 2434990 - DNA, 25 bp, Homo sapien
gatccagagtctaacgtgcgaggtg

SEQ ID NO: 2434991 - DNA, 25 bp, Homo sapien
tacaagtccaaggtgcaagagccgg

SEQ ID NO: 2434992 - DNA, 25 bp, Homo sapien
acggtgagtacgaagctgcgcgctc

SEQ ID NO: 2434993 - DNA, 25 bp, Homo sapien
tctgcagtttctaggattgattggc

SEQ ID NO: 2434994 - DNA, 25 bp, Homo sapien
gatgatgatgggtattgtcaccgga

SEQ ID NO: 2434995 - DNA, 25 bp, Homo sapien
gaccagcgtttttgcttgaacaacc

SEQ ID NO: 2434996 - DNA, 25 bp, Homo sapien
agtgtgcagaaaaggaatagtaaca

SEQ ID NO: 2434997 - DNA, 25 bp, Homo sapien
tggacgacatcatgagactctagct

SEQ ID NO: 2434998 - DNA, 25 bp, Homo sapien
ctggacgacatcatgagactctagc

SEQ ID NO: 2434999 - DNA, 25 bp, Homo sapien
cctggacgacatcatgagactctag

SEQ ID NO: 2435000 - DNA, 25 bp, Homo sapien
accagcatggacgacatagggcaat

SEQ ID NO: 2435001 - DNA, 25 bp, Homo sapien
ccagcatggacgacatagggcaatc

SEQ ID NO: 2435002 - DNA, 25 bp, Homo sapien
aaatgtcatctcgccaggtgccatg

SEQ ID NO: 2435003 - DNA, 25 bp, Homo sapien
atgtcatctcgccaggtgccatggc

SEQ ID NO: 2435004 - DNA, 25 bp, Homo sapien
aatgtcatctcgccaggtgccatgg

SEQ ID NO: 2435005 - DNA, 25 bp, Homo sapien
cttatgggaccccagtgcttagaat

SEQ ID NO: 2435006 - DNA, 25 bp, Homo sapien
tgatgatagcctcttgaggataggg

SEQ ID NO: 2435007 - DNA, 25 bp, Homo sapien
gggctttgtcttattcttatgggac

SEQ ID NO: 2435008 - DNA, 25 bp, Homo sapien
tagtttgatgatagcctcttgagga

SEQ ID NO: 2435009 - DNA, 25 bp, Homo sapien
tgttatttccctcgcaagctgcggg

SEQ ID NO: 2435010 - DNA, 25 bp, Homo sapien
gagcaccaagagttcgcccatttag

SEQ ID NO: 2435011 - DNA, 25 bp, Homo sapien
tgtgacggagaacctgcactaccct

SEQ ID NO: 2435012 - DNA, 25 bp, Homo sapien
tgtacaaaagagaaagccacgacct

SEQ ID NO: 2435013 - DNA, 25 bp, Homo sapien
ggtgttgccgccgtgcactttcccg

SEQ ID NO: 2435014 - DNA, 25 bp, Homo sapien
ccacgtccaggtgcagaatgacgct

SEQ ID NO: 2435015 - DNA, 25 bp, Homo sapien
gttggtgttgccgccgtgcactttc

SEQ ID NO: 2435016 - DNA, 25 bp, Homo sapien
cccacgtccaggtgcagaatgacgc

SEQ ID NO: 2435017 - DNA, 25 bp, Homo sapien
taagcgaagaagtagacgcctggca

SEQ ID NO: 2435018 - DNA, 25 bp, Homo sapien
tgcctcgtaggcgttgcccacgttg

SEQ ID NO: 2435019 - DNA, 25 bp, Homo sapien
aaagcaatgcgaggcacgtagccgg

SEQ ID NO: 2435020 - DNA, 25 bp, Homo sapien
gttggtcaccacgtcgtcgaagcgc

SEQ ID NO: 2435021 - DNA, 25 bp, Homo sapien
tcagccgcgacgctgccagggccag

SEQ ID NO: 2435022 - DNA, 25 bp, Homo sapien
ttgcggcggctcagccgcgacgctg

SEQ ID NO: 2435023 - DNA, 25 bp, Homo sapien
cccgccaccctcttgcggcggctca

SEQ ID NO: 2435024 - DNA, 25 bp, Homo sapien
ctcttgcggcggctcagccgcgacg

SEQ ID NO: 2435025 - DNA, 25 bp, Homo sapien
tcttggcaagcaccgactcaccttg

SEQ ID NO: 2435026 - DNA, 25 bp, Homo sapien
tctcggacggctggtttcttaggga

SEQ ID NO: 2435027 - DNA, 25 bp, Homo sapien
cgttcagtcctaacgatcctgggca

SEQ ID NO: 2435028 - DNA, 25 bp, Homo sapien
caccgggcgcgatctcctagtaggt

SEQ ID NO: 2435029 - DNA, 25 bp, Homo sapien
agcagagaaggagcgacagaaatca

SEQ ID NO: 2435030 - DNA, 25 bp, Homo sapien
gacagagacaaagcttcgaaaagag

SEQ ID NO: 2435031 - DNA, 25 bp, Homo sapien
ttcgaaaagagacggactgacagcc

SEQ ID NO: 2435032 - DNA, 25 bp, Homo sapien
gaaggaaagctagatagagatgcag

SEQ ID NO: 2435033 - DNA, 25 bp, Homo sapien
gcatgtctaattccggatctgctcc

SEQ ID NO: 2435034 - DNA, 25 bp, Homo sapien
ggtctttgtcgccatttgtcttcct

SEQ ID NO: 2435035 - DNA, 25 bp, Homo sapien
gccgtgtcagccctctgcatgtcta

SEQ ID NO: 2435036 - DNA, 25 bp, Homo sapien
tcagccctctgcatgtctaattccg

SEQ ID NO: 2435037 - DNA, 25 bp, Homo sapien
caggtccttattgcttcccctgcag

SEQ ID NO: 2435038 - DNA, 25 bp, Homo sapien
ggtccttattgcttcccctgcagct

SEQ ID NO: 2435039 - DNA, 25 bp, Homo sapien
ttgcttcccctgcagctgccacatt

SEQ ID NO: 2435040 - DNA, 25 bp, Homo sapien
tattgcttcccctgcagctgccaca

SEQ ID NO: 2435041 - DNA, 25 bp, Homo sapien
cagcttcggatggatgagggtccca

SEQ ID NO: 2435042 - DNA, 25 bp, Homo sapien
cggccagacaaagagcagcttcgga

SEQ ID NO: 2435043 - DNA, 25 bp, Homo sapien
tgtccgccggcaattaggcggccag

SEQ ID NO: 2435044 - DNA, 25 bp, Homo sapien
ggtcccagcggatcggaaatgtgaa

SEQ ID NO: 2435045 - DNA, 25 bp, Homo sapien
agcctaggcgcccaggacagggcga

SEQ ID NO: 2435046 - DNA, 25 bp, Homo sapien
gggtgcggctgcagcctaggcgccc

SEQ ID NO: 2435047 - DNA, 25 bp, Homo sapien
gtcactcagccggccgcccagggag

SEQ ID NO: 2435048 - DNA, 25 bp, Homo sapien
aatcaccggccgcccgtcactcagc

SEQ ID NO: 2435049 - DNA, 25 bp, Homo sapien
tcagtgggcgcgcaacgtatgtttg

SEQ ID NO: 2435050 - DNA, 25 bp, Homo sapien
ctgctgtcacggagccgacaggccg

SEQ ID NO: 2435051 - DNA, 25 bp, Homo sapien
gagatggcccagaccgggtgagggc

SEQ ID NO: 2435052 - DNA, 25 bp, Homo sapien
tttgccgaattgaaaggctgggaca

SEQ ID NO: 2435053 - DNA, 25 bp, Homo sapien
aaggcactcgaggtcgctctgagga

SEQ ID NO: 2435054 - DNA, 25 bp, Homo sapien
actcgaggtcgctctgaggaccgct

SEQ ID NO: 2435055 - DNA, 25 bp, Homo sapien
ggaagaaggcactcgaggtcgctct

SEQ ID NO: 2435056 - DNA, 25 bp, Homo sapien
agaaggcactcgaggtcgctctgag

SEQ ID NO: 2435057 - DNA, 25 bp, Homo sapien
gaatgggacaggcaggacggtttgg

SEQ ID NO: 2435058 - DNA, 25 bp, Homo sapien
tgggacaggcaggacggtttggacc

SEQ ID NO: 2435059 - DNA, 25 bp, Homo sapien
tttggaccccacctacaagcgcctc

SEQ ID NO: 2435060 - DNA, 25 bp, Homo sapien
gacaggcaggacggtttggacccca

SEQ ID NO: 2435061 - DNA, 25 bp, Homo sapien
gagatccacgagattgccagagaag

SEQ ID NO: 2435062 - DNA, 25 bp, Homo sapien
cctaagaggtcatatagagagcagc

SEQ ID NO: 2435063 - DNA, 25 bp, Homo sapien
gtttgcaaagcttagcgcgccgtcg

SEQ ID NO: 2435064 - DNA, 25 bp, Homo sapien
gcagtgcgggcccaattaagtctca

SEQ ID NO: 2435065 - DNA, 25 bp, Homo sapien
cccacccatgatatattgatgtgtg

SEQ ID NO: 2435066 - DNA, 25 bp, Homo sapien
tataaagcactatgttaggagattg

SEQ ID NO: 2435067 - DNA, 25 bp, Homo sapien
agctgtcctgtgataagagagattt

SEQ ID NO: 2435068 - DNA, 25 bp, Homo sapien
aggttctagtattcacaagctgtcc

SEQ ID NO: 2435069 - DNA, 25 bp, Homo sapien
gagctgtaaatagtgtattggcaca

SEQ ID NO: 2435070 - DNA, 25 bp, Homo sapien
gacacaggtacacagatatcaaagc

SEQ ID NO: 2435071 - DNA, 25 bp, Homo sapien
ctagccaggtgtgaaagaaagggcc

SEQ ID NO: 2435072 - DNA, 25 bp, Homo sapien
actttgcagaggaagattggagacc

SEQ ID NO: 2435073 - DNA, 25 bp, Homo sapien
ggtgatctgctggatctccggcagc

SEQ ID NO: 2435074 - DNA, 25 bp, Homo sapien
agcctcgagcttggcgcgccggatt

SEQ ID NO: 2435075 - DNA, 25 bp, Homo sapien
cgagaagagcggtaacccgactggt

SEQ ID NO: 2435076 - DNA, 25 bp, Homo sapien
tacgagctgtgctgcacgcggacgc

SEQ ID NO: 2435077 - DNA, 25 bp, Homo sapien
aagtgctgggatatttattttgagt

SEQ ID NO: 2435078 - DNA, 25 bp, Homo sapien
ccgttttagtcaggatgatctctat

SEQ ID NO: 2435079 - DNA, 25 bp, Homo sapien
caccgttttagtcaggatgatctct

SEQ ID NO: 2435080 - DNA, 25 bp, Homo sapien
acagaatcttgctcttgacacccag

SEQ ID NO: 2435081 - DNA, 25 bp, Homo sapien
tgctataaatgccacaatgagaatt

SEQ ID NO: 2435082 - DNA, 25 bp, Homo sapien
ccaggtttataggtagatatgccgt

SEQ ID NO: 2435083 - DNA, 25 bp, Homo sapien
gaataggtgatccaaagtaatttag

SEQ ID NO: 2435084 - DNA, 25 bp, Homo sapien
cagttgggactgaaccatcttgaac

SEQ ID NO: 2435085 - DNA, 25 bp, Homo sapien
ttccccatggatagcactttctctt

SEQ ID NO: 2435086 - DNA, 25 bp, Homo sapien
aagtctttcgggtggattcaaatgc

SEQ ID NO: 2435087 - DNA, 25 bp, Homo sapien
caaagatattttgtgctgatacaag

SEQ ID NO: 2435088 - DNA, 25 bp, Homo sapien
ggtgactcctcaaacctcactgaag

SEQ ID NO: 2435089 - DNA, 25 bp, Homo sapien
tgtaggagggctaaaaactttcatg

SEQ ID NO: 2435090 - DNA, 25 bp, Homo sapien
aagctgggaaactacatgagaatgg

SEQ ID NO: 2435091 - DNA, 25 bp, Homo sapien
gaaaagagaaataagcccaagatgg

SEQ ID NO: 2435092 - DNA, 25 bp, Homo sapien
aacccaccatacagaaaggcatagc

SEQ ID NO: 2435093 - DNA, 25 bp, Homo sapien
tgagtggttgcaatacagactgtat

SEQ ID NO: 2435094 - DNA, 25 bp, Homo sapien
gtgtggcacctggtttaacccatta

SEQ ID NO: 2435095 - DNA, 25 bp, Homo sapien
cattttctatgtgcagtctaccctg

SEQ ID NO: 2435096 - DNA, 25 bp, Homo sapien
gaggattataattagctaccattca

SEQ ID NO: 2435097 - DNA, 25 bp, Homo sapien
tccacctgacacatactcctgttcc

SEQ ID NO: 2435098 - DNA, 25 bp, Homo sapien
ccacctgacacatactcctgttccc

SEQ ID NO: 2435099 - DNA, 25 bp, Homo sapien
tacatgcacacgccagtgcgcctgg

SEQ ID NO: 2435100 - DNA, 25 bp, Homo sapien
ccgtgcccggctactgaatggtttc

SEQ ID NO: 2435101 - DNA, 25 bp, Homo sapien
ttaaagataaggtctagctttgtcg

SEQ ID NO: 2435102 - DNA, 25 bp, Homo sapien
tttaaagataaggtctagctttgtc

SEQ ID NO: 2435103 - DNA, 25 bp, Homo sapien
cattccggacgccacttaagactaa

SEQ ID NO: 2435104 - DNA, 25 bp, Homo sapien
ggattgagctccctatctaaagatg

SEQ ID NO: 2435105 - DNA, 25 bp, Homo sapien
gaaactaccaagctacaaagaagcc

SEQ ID NO: 2435106 - DNA, 25 bp, Homo sapien
gaagctgccgatagccatacccagc

SEQ ID NO: 2435107 - DNA, 25 bp, Homo sapien
tgaatactagggtactactgtctcc

SEQ ID NO: 2435108 - DNA, 25 bp, Homo sapien
cttatacattgaaggctgtgggctc

SEQ ID NO: 2435109 - DNA, 25 bp, Homo sapien
tcatccagaggttgaatactagggt

SEQ ID NO: 2435110 - DNA, 25 bp, Homo sapien
gaaaagctttatgtgcctataaacc

SEQ ID NO: 2435111 - DNA, 25 bp, Homo sapien
ggccgcgcgccatgctccgggcccc

SEQ ID NO: 2435112 - DNA, 25 bp, Homo sapien
tcgcgcgccagcgtccggcgcgacc

SEQ ID NO: 2435113 - DNA, 25 bp, Homo sapien
ccccggatcccggtctgcgcattgc

SEQ ID NO: 2435114 - DNA, 25 bp, Homo sapien
ggctgcgctagggagcgcggggccc

SEQ ID NO: 2435115 - DNA, 25 bp, Homo sapien
gagtttggtggtgaagaccagcact

SEQ ID NO: 2435116 - DNA, 25 bp, Homo sapien
actaccccttggtgtcgtgcgggca

SEQ ID NO: 2435117 - DNA, 25 bp, Homo sapien
ctttaatttcgacgcagccaggaac

SEQ ID NO: 2435118 - DNA, 25 bp, Homo sapien
tctagcagtgtgaatttggcttctc

SEQ ID NO: 2435119 - DNA, 25 bp, Homo sapien
gctcaaatcaatggcccgcagctga

SEQ ID NO: 2435120 - DNA, 25 bp, Homo sapien
cctgagttcccagctcaagggggct

SEQ ID NO: 2435121 - DNA, 25 bp, Homo sapien
aagagtctgaggctaatcagctgga

SEQ ID NO: 2435122 - DNA, 25 bp, Homo sapien
aacaggccggagagggcccacgagt

SEQ ID NO: 2435123 - DNA, 25 bp, Homo sapien
gtcctggttgataaggaagacgaat

SEQ ID NO: 2435124 - DNA, 25 bp, Homo sapien
taaggaagacgaatcgcaggctggc

SEQ ID NO: 2435125 - DNA, 25 bp, Homo sapien
tgaggtcctggttgataaggaagac

SEQ ID NO: 2435126 - DNA, 25 bp, Homo sapien
aggtcctggttgataaggaagacga

SEQ ID NO: 2435127 - DNA, 25 bp, Homo sapien
caggaccaagttggtgtactggctc

SEQ ID NO: 2435128 - DNA, 25 bp, Homo sapien
ggcaccaggaccaagttggtgtact

SEQ ID NO: 2435129 - DNA, 25 bp, Homo sapien
gtactggctcaccacgcctaggtct

SEQ ID NO: 2435130 - DNA, 25 bp, Homo sapien
aagttggtgtactggctcaccacgc

SEQ ID NO: 2435131 - DNA, 25 bp, Homo sapien
gcaccggccgtccatcgatgtagat

SEQ ID NO: 2435132 - DNA, 25 bp, Homo sapien
tgctgaggcgccatttggagccaca

SEQ ID NO: 2435133 - DNA, 25 bp, Homo sapien
ggcaatgaagaaatcaccgttgttc

SEQ ID NO: 2435134 - DNA, 25 bp, Homo sapien
gatgggccgtcgaccctcattggca

SEQ ID NO: 2435135 - DNA, 25 bp, Homo sapien
tcaggtggtccacgagggtccccat

SEQ ID NO: 2435136 - DNA, 25 bp, Homo sapien
caagcccagggctagaaaggacagc

SEQ ID NO: 2435137 - DNA, 25 bp, Homo sapien
cagagagagccaggagcttccatgg

SEQ ID NO: 2435138 - DNA, 25 bp, Homo sapien
tgggagggacgacctcacactgctt

SEQ ID NO: 2435139 - DNA, 25 bp, Homo sapien
tccagagacaggtccacatcaatct

SEQ ID NO: 2435140 - DNA, 25 bp, Homo sapien
cttgtttccgggatatcttccaggc

SEQ ID NO: 2435141 - DNA, 25 bp, Homo sapien
cacatcaatctggttatccttggtt

SEQ ID NO: 2435142 - DNA, 25 bp, Homo sapien
gggatatcttccaggccggaccctc

SEQ ID NO: 2435143 - DNA, 25 bp, Homo sapien
tgggaaaccaaggactacgcagaga

SEQ ID NO: 2435144 - DNA, 25 bp, Homo sapien
aaaccaaggactacgcagagaaagg

SEQ ID NO: 2435145 - DNA, 25 bp, Homo sapien
gagtaggtctatgcaggccagagaa

SEQ ID NO: 2435146 - DNA, 25 bp, Homo sapien
gtctatgcaggccagagaaagatgg

SEQ ID NO: 2435147 - DNA, 25 bp, Homo sapien
gcgcatcaggtaccgcaccatgcgg

SEQ ID NO: 2435148 - DNA, 25 bp, Homo sapien
tcacgcgagcgcatcaggtaccgca

SEQ ID NO: 2435149 - DNA, 25 bp, Homo sapien
gccagtgtctggttgtcgaagtccg

SEQ ID NO: 2435150 - DNA, 25 bp, Homo sapien
ggttgtcgaagtccggagagctcat

SEQ ID NO: 2435151 - DNA, 25 bp, Homo sapien
tgggaaacgagggtctccccagcca

SEQ ID NO: 2435152 - DNA, 25 bp, Homo sapien
gccagaatgcaaggcagggaaccag

SEQ ID NO: 2435153 - DNA, 25 bp, Homo sapien
ctgagggccagaatgcaaggcaggg

SEQ ID NO: 2435154 - DNA, 25 bp, Homo sapien
gctgaagagtgagccttctggtgcc

SEQ ID NO: 2435155 - DNA, 25 bp, Homo sapien
cctgccacttatgcagttcctgttc

SEQ ID NO: 2435156 - DNA, 25 bp, Homo sapien
cagctgccgaatctctcgcttctgg

SEQ ID NO: 2435157 - DNA, 25 bp, Homo sapien
tgtgatgctgtccactagcacctgc

SEQ ID NO: 2435158 - DNA, 25 bp, Homo sapien
atctctcgcttctggcgccggtcag

SEQ ID NO: 2435159 - DNA, 25 bp, Homo sapien
tgtactggtcctcttgattctggca

SEQ ID NO: 2435160 - DNA, 25 bp, Homo sapien
ttgtactggtcctcttgattctggc

SEQ ID NO: 2435161 - DNA, 25 bp, Homo sapien
ttccaggacctcatctcgcatgtcc

SEQ ID NO: 2435162 - DNA, 25 bp, Homo sapien
tgttccaggacctcatctcgcatgt

SEQ ID NO: 2435163 - DNA, 25 bp, Homo sapien
gttccaggacctcatctcgcatgtc

SEQ ID NO: 2435164 - DNA, 25 bp, Homo sapien
ttgagcttactgtcatcaatcaggt

SEQ ID NO: 2435165 - DNA, 25 bp, Homo sapien
gagaagttcagcacttggtcccctt

SEQ ID NO: 2435166 - DNA, 25 bp, Homo sapien
gagcttactgtcatcaatcaggtcc

SEQ ID NO: 2435167 - DNA, 25 bp, Homo sapien
atcagagaagttcagcacttggtcc

SEQ ID NO: 2435168 - DNA, 25 bp, Homo sapien
tgctgagcggaccactaagccaagt

SEQ ID NO: 2435169 - DNA, 25 bp, Homo sapien
aaagcgtgagcaccaagggtcttgc

SEQ ID NO: 2435170 - DNA, 25 bp, Homo sapien
caagggtgcccataccagattaggc

SEQ ID NO: 2435171 - DNA, 25 bp, Homo sapien
ggtcttgctgaacccgatgctgagc

SEQ ID NO: 2435172 - DNA, 25 bp, Homo sapien
tcctagctctcaacggcaaaggaga

SEQ ID NO: 2435173 - DNA, 25 bp, Homo sapien
tttaggccagccgttcccaagactg

SEQ ID NO: 2435174 - DNA, 25 bp, Homo sapien
cccaagactgtagggtgtgctctat

SEQ ID NO: 2435175 - DNA, 25 bp, Homo sapien
cacaatgtgaaaggaagtcgggaac

SEQ ID NO: 2435176 - DNA, 25 bp, Homo sapien
tccagcaggtaatactgcttcatga

SEQ ID NO: 2435177 - DNA, 25 bp, Homo sapien
gcttcatgagctgccagtgggcctg

SEQ ID NO: 2435178 - DNA, 25 bp, Homo sapien
gcctgcagggccttcgcggtacggg

SEQ ID NO: 2435179 - DNA, 25 bp, Homo sapien
tacgggccaggtagaaggcatcagg

SEQ ID NO: 2435180 - DNA, 25 bp, Homo sapien
tcagccttgctaaacagggccttgc

SEQ ID NO: 2435181 - DNA, 25 bp, Homo sapien
tgctctggatggctgcaatagcctc

SEQ ID NO: 2435182 - DNA, 25 bp, Homo sapien
atggctgcaatagcctctgggtgca

SEQ ID NO: 2435183 - DNA, 25 bp, Homo sapien
cctcagccttgctaaacagggcctt

SEQ ID NO: 2435184 - DNA, 25 bp, Homo sapien
cagctgaatttcacgcccaggtgga

SEQ ID NO: 2435185 - DNA, 25 bp, Homo sapien
agggcgtaccaacgctcctggacct

SEQ ID NO: 2435186 - DNA, 25 bp, Homo sapien
acaggatcgtagagcagggcgtacc

SEQ ID NO: 2435187 - DNA, 25 bp, Homo sapien
cctggacctcccgaagggtgaagcg

SEQ ID NO: 2435188 - DNA, 25 bp, Homo sapien
catttatgagcaggaggtcatctgc

SEQ ID NO: 2435189 - DNA, 25 bp, Homo sapien
tgtttactcttcttcacacgcttgg

SEQ ID NO: 2435190 - DNA, 25 bp, Homo sapien
tcttcacacgcttggtgagtccagg

SEQ ID NO: 2435191 - DNA, 25 bp, Homo sapien
gcggcccagatccttggtcacctga

SEQ ID NO: 2435192 - DNA, 25 bp, Homo sapien
tggtgcagtgtctagggccacagca

SEQ ID NO: 2435193 - DNA, 25 bp, Homo sapien
tatttttacactctgcaatgctggg

SEQ ID NO: 2435194 - DNA, 25 bp, Homo sapien
ggataccgggaaatcactcttgctg

SEQ ID NO: 2435195 - DNA, 25 bp, Homo sapien
gctcccagaatagatgcatgctcca

SEQ ID NO: 2435196 - DNA, 25 bp, Homo sapien
tttgcccgggtagaagattttgcca

SEQ ID NO: 2435197 - DNA, 25 bp, Homo sapien
cgaacagcgccctggttccacccca

SEQ ID NO: 2435198 - DNA, 25 bp, Homo sapien
tggaggagggttcactccccgaaca

SEQ ID NO: 2435199 - DNA, 25 bp, Homo sapien
ccgggtagaagattttgccaggctg

SEQ ID NO: 2435200 - DNA, 25 bp, Homo sapien
gccatcagggatgaatctagcagcc

SEQ ID NO: 2435201 - DNA, 25 bp, Homo sapien
cgtttagggatggtgcccaaggcct

SEQ ID NO: 2435202 - DNA, 25 bp, Homo sapien
ctggaggagcttctccgtttaggga

SEQ ID NO: 2435203 - DNA, 25 bp, Homo sapien
ctcatcctctgagcggctggcagtg

SEQ ID NO: 2435204 - DNA, 25 bp, Homo sapien
agagcctctgcaaatgggacccctc

SEQ ID NO: 2435205 - DNA, 25 bp, Homo sapien
atcctagagcctctgcaaatgggac

SEQ ID NO: 2435206 - DNA, 25 bp, Homo sapien
aaatggtggattcgggcctcctaag

SEQ ID NO: 2435207 - DNA, 25 bp, Homo sapien
agaaatggtggattcgggcctccta

SEQ ID NO: 2435208 - DNA, 25 bp, Homo sapien
tccacgctgggcagttcccccggtg

SEQ ID NO: 2435209 - DNA, 25 bp, Homo sapien
tgggcagttcccccggtgccacgtg

SEQ ID NO: 2435210 - DNA, 25 bp, Homo sapien
agaccttccacgctgggcagttccc

SEQ ID NO: 2435211 - DNA, 25 bp, Homo sapien
cacgctgggcagttcccccggtgcc

SEQ ID NO: 2435212 - DNA, 25 bp, Homo sapien
tgggctctgggcataactgctccct

SEQ ID NO: 2435213 - DNA, 25 bp, Homo sapien
gtcagactggtgatgccgacacgct

SEQ ID NO: 2435214 - DNA, 25 bp, Homo sapien
caaaatgcagccgtgctaaagagca

SEQ ID NO: 2435215 - DNA, 25 bp, Homo sapien
ctctgccgacaggtacatgggtggt

SEQ ID NO: 2435216 - DNA, 25 bp, Homo sapien
cgggctaggaggaacggtcccacag

SEQ ID NO: 2435217 - DNA, 25 bp, Homo sapien
tcccacaggctcatccaaggattct

SEQ ID NO: 2435218 - DNA, 25 bp, Homo sapien
caaggattctgaccaggtgagctta

SEQ ID NO: 2435219 - DNA, 25 bp, Homo sapien
cactggttccaaaccaccgggctag

SEQ ID NO: 2435220 - DNA, 25 bp, Homo sapien
ttccttatactggctcaggtccccc

SEQ ID NO: 2435221 - DNA, 25 bp, Homo sapien
caaactgaggtagggtctgtgcccc

SEQ ID NO: 2435222 - DNA, 25 bp, Homo sapien
tagctcagtgttctagccctgtccc

SEQ ID NO: 2435223 - DNA, 25 bp, Homo sapien
tgattatcaaccacgctgtgcccca

SEQ ID NO: 2435224 - DNA, 25 bp, Homo sapien
ccactgtttgggaactgcgtgatta

SEQ ID NO: 2435225 - DNA, 25 bp, Homo sapien
cctccgcccctcgttctcccaagag

SEQ ID NO: 2435226 - DNA, 25 bp, Homo sapien
ctccgcccctcgttctcccaagagt

SEQ ID NO: 2435227 - DNA, 25 bp, Homo sapien
tccgcccctcgttctcccaagagtg

SEQ ID NO: 2435228 - DNA, 25 bp, Homo sapien
ccgcccctcgttctcccaagagtgc

SEQ ID NO: 2435229 - DNA, 25 bp, Homo sapien
caaggtaggggatcggtccaggtct

SEQ ID NO: 2435230 - DNA, 25 bp, Homo sapien
gtaggggatcggtccaggtctgtct

SEQ ID NO: 2435231 - DNA, 25 bp, Homo sapien
caggtctgtctcaagaactcggggt

SEQ ID NO: 2435232 - DNA, 25 bp, Homo sapien
aactcggggtaggagcattgatgaa

SEQ ID NO: 2435233 - DNA, 25 bp, Homo sapien
ctcaaagcagagcaccaagtagcct

SEQ ID NO: 2435234 - DNA, 25 bp, Homo sapien
aactcaaagcagagcaccaagtagc

SEQ ID NO: 2435235 - DNA, 25 bp, Homo sapien
tcaaagcagagcaccaagtagcctt

SEQ ID NO: 2435236 - DNA, 25 bp, Homo sapien
gcaactcaaagcagagcaccaagta

SEQ ID NO: 2435237 - DNA, 25 bp, Homo sapien
ggcggcactctgcaaaactccattt

SEQ ID NO: 2435238 - DNA, 25 bp, Homo sapien
aactccatttcatccccaactcctc

SEQ ID NO: 2435239 - DNA, 25 bp, Homo sapien
ccggcggcactctgcaaaactccat

SEQ ID NO: 2435240 - DNA, 25 bp, Homo sapien
catttcatccccaactcctctgaga

SEQ ID NO: 2435241 - DNA, 25 bp, Homo sapien
gggctggcaatctcttccggttcgt

SEQ ID NO: 2435242 - DNA, 25 bp, Homo sapien
ctagactgccagatccaacaatttc

SEQ ID NO: 2435243 - DNA, 25 bp, Homo sapien
ttctccgcggcgacggtagcagccg

SEQ ID NO: 2435244 - DNA, 25 bp, Homo sapien
gcttccgtgaggtacgtctacttcc

SEQ ID NO: 2435245 - DNA, 25 bp, Homo sapien
gttcctcctggaactttgctcaggg

SEQ ID NO: 2435246 - DNA, 25 bp, Homo sapien
ctcctggaactttgctcagggcccc

SEQ ID NO: 2435247 - DNA, 25 bp, Homo sapien
tctttcatagtcaggcactctttcc

SEQ ID NO: 2435248 - DNA, 25 bp, Homo sapien
ttcctcctggaactttgctcagggc

SEQ ID NO: 2435249 - DNA, 25 bp, Homo sapien
ccagggagattagttggtggcccaa

SEQ ID NO: 2435250 - DNA, 25 bp, Homo sapien
gaggcaatagggcaatctgaagtca

SEQ ID NO: 2435251 - DNA, 25 bp, Homo sapien
ggctggcagatatgcattgagacca

SEQ ID NO: 2435252 - DNA, 25 bp, Homo sapien
tatgatgcccagttcaggctttggc

SEQ ID NO: 2435253 - DNA, 25 bp, Homo sapien
aatgtgctcgggttttactggtgtc

SEQ ID NO: 2435254 - DNA, 25 bp, Homo sapien
ctcaaggaagaatgtgctcgggttt

SEQ ID NO: 2435255 - DNA, 25 bp, Homo sapien
gaagaatgtgctcgggttttactgg

SEQ ID NO: 2435256 - DNA, 25 bp, Homo sapien
ccttgatttaaaatcctccacataa

SEQ ID NO: 2435257 - DNA, 25 bp, Homo sapien
cggcatgaggttttgtgcataataa

SEQ ID NO: 2435258 - DNA, 25 bp, Homo sapien
caatcggcatgaggttttgtgcata

SEQ ID NO: 2435259 - DNA, 25 bp, Homo sapien
tcggcatgaggttttgtgcataata

SEQ ID NO: 2435260 - DNA, 25 bp, Homo sapien
cttcaatcggcatgaggttttgtgc

SEQ ID NO: 2435261 - DNA, 25 bp, Homo sapien
cagagagctcgctagaggacgtgca

SEQ ID NO: 2435262 - DNA, 25 bp, Homo sapien
tatatttgtcttccaaccctcttgg

SEQ ID NO: 2435263 - DNA, 25 bp, Homo sapien
atcaccagagcaagttcagccacca

SEQ ID NO: 2435264 - DNA, 25 bp, Homo sapien
gaatgtcagacactctgcatgcttg

SEQ ID NO: 2435265 - DNA, 25 bp, Homo sapien
gcagatcactggcatgtcagtgaca

SEQ ID NO: 2435266 - DNA, 25 bp, Homo sapien
cttctgagctttcatgcagatcact

SEQ ID NO: 2435267 - DNA, 25 bp, Homo sapien
tgagctttcatgcagatcactggca

SEQ ID NO: 2435268 - DNA, 25 bp, Homo sapien
gcatgtcagtgacatatctgtccat

SEQ ID NO: 2435269 - DNA, 25 bp, Homo sapien
gcttatttgggttccagggagtgac

SEQ ID NO: 2435270 - DNA, 25 bp, Homo sapien
caagctaagcggattcatttgtagg

SEQ ID NO: 2435271 - DNA, 25 bp, Homo sapien
ctgtgggtttccgtccctcagaagg

SEQ ID NO: 2435272 - DNA, 25 bp, Homo sapien
ctcaaagttctaggagtactcagca

SEQ ID NO: 2435273 - DNA, 25 bp, Homo sapien
aatccacattgaccatcagcctcgc

SEQ ID NO: 2435274 - DNA, 25 bp, Homo sapien
gaatccacattgaccatcagcctcg

SEQ ID NO: 2435275 - DNA, 25 bp, Homo sapien
tccacattgaccatcagcctcgcac

SEQ ID NO: 2435276 - DNA, 25 bp, Homo sapien
gagaatccacattgaccatcagcct

SEQ ID NO: 2435277 - DNA, 25 bp, Homo sapien
ggccttcaggaagttcaggcttttg

SEQ ID NO: 2435278 - DNA, 25 bp, Homo sapien
tcaggaagttcaggcttttgtggca

SEQ ID NO: 2435279 - DNA, 25 bp, Homo sapien
ccttcaggaagttcaggcttttgtg

SEQ ID NO: 2435280 - DNA, 25 bp, Homo sapien
tgggccttcaggaagttcaggcttt

SEQ ID NO: 2435281 - DNA, 25 bp, Homo sapien
ccctcagctggtcccggggaaggct

SEQ ID NO: 2435282 - DNA, 25 bp, Homo sapien
ctacacgtccagtgtcaacagccgg

SEQ ID NO: 2435283 - DNA, 25 bp, Homo sapien
cagccggggaatatctgggtgtccc

SEQ ID NO: 2435284 - DNA, 25 bp, Homo sapien
caacagccggggaatatctgggtgt

SEQ ID NO: 2435285 - DNA, 25 bp, Homo sapien
cctcggtcttccagacagcctccat

SEQ ID NO: 2435286 - DNA, 25 bp, Homo sapien
acctcggtcttccagacagcctcca

SEQ ID NO: 2435287 - DNA, 25 bp, Homo sapien
cacctcggtcttccagacagcctcc

SEQ ID NO: 2435288 - DNA, 25 bp, Homo sapien
ctcggtcttccagacagcctccatc

SEQ ID NO: 2435289 - DNA, 25 bp, Homo sapien
tgtccttcaaggaacaggccctggg

SEQ ID NO: 2435290 - DNA, 25 bp, Homo sapien
gatgccaaatcgatgctcagggtag

SEQ ID NO: 2435291 - DNA, 25 bp, Homo sapien
tataggacagaccaacggcagatgc

SEQ ID NO: 2435292 - DNA, 25 bp, Homo sapien
tttagcgccccagaggttcacagtg

SEQ ID NO: 2435293 - DNA, 25 bp, Homo sapien
ggtgaacgttccactccagctggag

SEQ ID NO: 2435294 - DNA, 25 bp, Homo sapien
gacagaaagggctgcttgtaggtgg

SEQ ID NO: 2435295 - DNA, 25 bp, Homo sapien
catgcccggtgcctagacagaaagg

SEQ ID NO: 2435296 - DNA, 25 bp, Homo sapien
tttggctttggcgaggtgacctcag

SEQ ID NO: 2435297 - DNA, 25 bp, Homo sapien
aatgacacccaggacattcaacccc

SEQ ID NO: 2435298 - DNA, 25 bp, Homo sapien
gcagccaatgatatatatctgtgga

SEQ ID NO: 2435299 - DNA, 25 bp, Homo sapien
gcagcagccaatgatatatatctgt

SEQ ID NO: 2435300 - DNA, 25 bp, Homo sapien
aggcagcagccaatgatatatatct

SEQ ID NO: 2435301 - DNA, 25 bp, Homo sapien
agtgaaggctccactagttcttaaa

SEQ ID NO: 2435302 - DNA, 25 bp, Homo sapien
tgaaggctccactagttcttaaaga

SEQ ID NO: 2435303 - DNA, 25 bp, Homo sapien
caagtgaaggctccactagttctta

SEQ ID NO: 2435304 - DNA, 25 bp, Homo sapien
tcaagtgaaggctccactagttctt

SEQ ID NO: 2435305 - DNA, 25 bp, Homo sapien
ggcactctcggtgcttctcctccag

SEQ ID NO: 2435306 - DNA, 25 bp, Homo sapien
ctgctcaggcactctcggtgcttct

SEQ ID NO: 2435307 - DNA, 25 bp, Homo sapien
actctgcaggcggtcaatgttttcc

SEQ ID NO: 2435308 - DNA, 25 bp, Homo sapien
aggcggtcaatgttttccaggaaga

SEQ ID NO: 2435309 - DNA, 25 bp, Homo sapien
ttgtacatggttgatcgcttcttgc

SEQ ID NO: 2435310 - DNA, 25 bp, Homo sapien
aggtactgcagcctgagcgcgccca

SEQ ID NO: 2435311 - DNA, 25 bp, Homo sapien
ccatgtccatgtggtacaccttctt

SEQ ID NO: 2435312 - DNA, 25 bp, Homo sapien
tctggaggcgtctatagaagatgta

SEQ ID NO: 2435313 - DNA, 25 bp, Homo sapien
ctcaactcagactcctcactcagga

SEQ ID NO: 2435314 - DNA, 25 bp, Homo sapien
caggctgctgggtactaggagacat

SEQ ID NO: 2435315 - DNA, 25 bp, Homo sapien
ggtctgtaggtaaactccactgaac

SEQ ID NO: 2435316 - DNA, 25 bp, Homo sapien
tcagccttcggatggatgtcccagt

SEQ ID NO: 2435317 - DNA, 25 bp, Homo sapien
caagtccctccatcgactggtgggt

SEQ ID NO: 2435318 - DNA, 25 bp, Homo sapien
tgccgcagcttctcctgatgctcct

SEQ ID NO: 2435319 - DNA, 25 bp, Homo sapien
gcctccgcatctcccggccgaattc

SEQ ID NO: 2435320 - DNA, 25 bp, Homo sapien
agcagggcccacttcttctgccgct

SEQ ID NO: 2435321 - DNA, 25 bp, Homo sapien
cactgccgcagcttctcctgatgct

SEQ ID NO: 2435322 - DNA, 25 bp, Homo sapien
taagctttctgccaccggtctttcc

SEQ ID NO: 2435323 - DNA, 25 bp, Homo sapien
catttcttaggaaacctgcgatcta

SEQ ID NO: 2435324 - DNA, 25 bp, Homo sapien
gagacagctgcttgctacagtggaa

SEQ ID NO: 2435325 - DNA, 25 bp, Homo sapien
cctgcgatctactaagggtaaaagc

SEQ ID NO: 2435326 - DNA, 25 bp, Homo sapien
ctgcgaccctcgagcgcacagtcat

SEQ ID NO: 2435327 - DNA, 25 bp, Homo sapien
cactgtcccgtatcatggccatggg

SEQ ID NO: 2435328 - DNA, 25 bp, Homo sapien
tggggagtcaacagaaacctcagcc

SEQ ID NO: 2435329 - DNA, 25 bp, Homo sapien
gaagtggcgagaacaactgctcctc

SEQ ID NO: 2435330 - DNA, 25 bp, Homo sapien
catcggttcctgttggctttcctcc

SEQ ID NO: 2435331 - DNA, 25 bp, Homo sapien
tcatggtaccttccccctaagatct

SEQ ID NO: 2435332 - DNA, 25 bp, Homo sapien
gtcatggtaccttccccctaagatc

SEQ ID NO: 2435333 - DNA, 25 bp, Homo sapien
caggagaaggtcatggtaccttccc

SEQ ID NO: 2435334 - DNA, 25 bp, Homo sapien
catcaggagaaggtcatggtacctt

SEQ ID NO: 2435335 - DNA, 25 bp, Homo sapien
tgctgagctctttggtcgcctgcat

SEQ ID NO: 2435336 - DNA, 25 bp, Homo sapien
tgtgttggaggatcaaggccttgtt

SEQ ID NO: 2435337 - DNA, 25 bp, Homo sapien
ccccttgctgaacatggtagagtcc

SEQ ID NO: 2435338 - DNA, 25 bp, Homo sapien
caaggacctccatgaactgctggaa

SEQ ID NO: 2435339 - DNA, 25 bp, Homo sapien
catggtatgctggtcctggagcatc

SEQ ID NO: 2435340 - DNA, 25 bp, Homo sapien
ctccgaggccttcgtgttcatggta

SEQ ID NO: 2435341 - DNA, 25 bp, Homo sapien
ccctgccagaaggtgcgtttggaca

SEQ ID NO: 2435342 - DNA, 25 bp, Homo sapien
agccctgccagaaggtgcgtttgga

SEQ ID NO: 2435343 - DNA, 25 bp, Homo sapien
cctagtggtccagagtttagattct

SEQ ID NO: 2435344 - DNA, 25 bp, Homo sapien
taagggatactgaagttgggctagc

SEQ ID NO: 2435345 - DNA, 25 bp, Homo sapien
gggatccctttgatactctgaggaa

SEQ ID NO: 2435346 - DNA, 25 bp, Homo sapien
gctagtattgtcagagaggccatgt

SEQ ID NO: 2435347 - DNA, 25 bp, Homo sapien
tggcaatgagggacagcggtaacac

SEQ ID NO: 2435348 - DNA, 25 bp, Homo sapien
gactcgatgcctcttttggtggcaa

SEQ ID NO: 2435349 - DNA, 25 bp, Homo sapien
tcaatccattcgtccagagctgctg

SEQ ID NO: 2435350 - DNA, 25 bp, Homo sapien
tgggcccaatctcataggtcagagt

SEQ ID NO: 2435351 - DNA, 25 bp, Homo sapien
ttccaacactggagcatccagcaca

SEQ ID NO: 2435352 - DNA, 25 bp, Homo sapien
tcttccaacactggagcatccagca

SEQ ID NO: 2435353 - DNA, 25 bp, Homo sapien
atcttcttccaacactggagcatcc

SEQ ID NO: 2435354 - DNA, 25 bp, Homo sapien
cttcttccaacactggagcatccag

SEQ ID NO: 2435355 - DNA, 25 bp, Homo sapien
tcatcatagcatctttggagaagga

SEQ ID NO: 2435356 - DNA, 25 bp, Homo sapien
gcggagaatgtcatacaggtgcttc

SEQ ID NO: 2435357 - DNA, 25 bp, Homo sapien
ggaagcggttgatgacacaattgac

SEQ ID NO: 2435358 - DNA, 25 bp, Homo sapien
gatgacacaattgacattgtccaaa

SEQ ID NO: 2435359 - DNA, 25 bp, Homo sapien
tgggcagcctcaatcctcaggatga

SEQ ID NO: 2435360 - DNA, 25 bp, Homo sapien
ctgatgtgggagtcaccaactgtgg

SEQ ID NO: 2435361 - DNA, 25 bp, Homo sapien
gatggctttcactgatgtgggagtc

SEQ ID NO: 2435362 - DNA, 25 bp, Homo sapien
ctcttgagcccgagttagctgggca

SEQ ID NO: 2435363 - DNA, 25 bp, Homo sapien
gaggttaagggcaccagggtgtctc

SEQ ID NO: 2435364 - DNA, 25 bp, Homo sapien
tctggtaactgccaaacaccaggtt

SEQ ID NO: 2435365 - DNA, 25 bp, Homo sapien
tggacacacaatgttgcctgctttg

SEQ ID NO: 2435366 - DNA, 25 bp, Homo sapien
gcctgctttggaggttaagggcacc

SEQ ID NO: 2435367 - DNA, 25 bp, Homo sapien
gaaagggactgctacagctgtggtt

SEQ ID NO: 2435368 - DNA, 25 bp, Homo sapien
ggtatgctagactgttctcctgaga

SEQ ID NO: 2435369 - DNA, 25 bp, Homo sapien
gctcaacactcagggagatctccag

SEQ ID NO: 2435370 - DNA, 25 bp, Homo sapien
tggtttctcctaggcaacaagatgc

SEQ ID NO: 2435371 - DNA, 25 bp, Homo sapien
ttggtcttttgaactaacctagtca

SEQ ID NO: 2435372 - DNA, 25 bp, Homo sapien
aagaaagaattttggagcttgaagt

SEQ ID NO: 2435373 - DNA, 25 bp, Homo sapien
gcattgtgaatactggccttctttc

SEQ ID NO: 2435374 - DNA, 25 bp, Homo sapien
gttatatgagttctatttgccccag

SEQ ID NO: 2435375 - DNA, 25 bp, Homo sapien
taaactatttgagtgggttcagctg

SEQ ID NO: 2435376 - DNA, 25 bp, Homo sapien
ggttcagctgataacacggcattgt

SEQ ID NO: 2435377 - DNA, 25 bp, Homo sapien
caagagagagcaaacctaccaaggg

SEQ ID NO: 2435378 - DNA, 25 bp, Homo sapien
ttggactgaatctctgtaactggga

SEQ ID NO: 2435379 - DNA, 25 bp, Homo sapien
tctgtgcctgtagtgaagcctcctt

SEQ ID NO: 2435380 - DNA, 25 bp, Homo sapien
taacttatttgagagaggcacagcc

SEQ ID NO: 2435381 - DNA, 25 bp, Homo sapien
gcacatccgagctttggagagggaa

SEQ ID NO: 2435382 - DNA, 25 bp, Homo sapien
tagagagcaccctacaggcatgact

SEQ ID NO: 2435383 - DNA, 25 bp, Homo sapien
gggcacccgacaggcagagtttatt

SEQ ID NO: 2435384 - DNA, 25 bp, Homo sapien
gactagatgtatgcaccacccagaa

SEQ ID NO: 2435385 - DNA, 25 bp, Homo sapien
tatggattatctagcagtactgagc

SEQ ID NO: 2435386 - DNA, 25 bp, Homo sapien
gatactgtcgcaagtgtcagctgcc

SEQ ID NO: 2435387 - DNA, 25 bp, Homo sapien
caggagctcatggtctaataggaag

SEQ ID NO: 2435388 - DNA, 25 bp, Homo sapien
agtactgagctggatttgcaaggca

SEQ ID NO: 2435389 - DNA, 25 bp, Homo sapien
ccttacaaattcacgtaggtgttgc

SEQ ID NO: 2435390 - DNA, 25 bp, Homo sapien
aatacagtacagtggttaggagcgg

SEQ ID NO: 2435391 - DNA, 25 bp, Homo sapien
gagtgatggactaaaccttgtgttc

SEQ ID NO: 2435392 - DNA, 25 bp, Homo sapien
tctaaaaaatggtgagtgttccacc

SEQ ID NO: 2435393 - DNA, 25 bp, Homo sapien
cacaagcaacctttgggagagtaga

SEQ ID NO: 2435394 - DNA, 25 bp, Homo sapien
cccagcttggaagtagagccctgca

SEQ ID NO: 2435395 - DNA, 25 bp, Homo sapien
tcccataggataatgcaaagagccc

SEQ ID NO: 2435396 - DNA, 25 bp, Homo sapien
tctgagacctccgtaagttccgtgt

SEQ ID NO: 2435397 - DNA, 25 bp, Homo sapien
tttgagcagatcaccctggagtcgg

SEQ ID NO: 2435398 - DNA, 25 bp, Homo sapien
gatccctgggataggcagaaggctc

SEQ ID NO: 2435399 - DNA, 25 bp, Homo sapien
taagctttgacaagagggctgccgc

SEQ ID NO: 2435400 - DNA, 25 bp, Homo sapien
tctctagatcatggccttcggaaag

SEQ ID NO: 2435401 - DNA, 25 bp, Homo sapien
tggtggcgaacaaccataggctggc

SEQ ID NO: 2435402 - DNA, 25 bp, Homo sapien
aatggtttttcctagccctgagctg

SEQ ID NO: 2435403 - DNA, 25 bp, Homo sapien
tctagtgggagagatctatgtgccc

SEQ ID NO: 2435404 - DNA, 25 bp, Homo sapien
catagtggcacaagtagaaagatcc

SEQ ID NO: 2435405 - DNA, 25 bp, Homo sapien
aacagtttgactcatcatggtgggc

SEQ ID NO: 2435406 - DNA, 25 bp, Homo sapien
ctaacagtttgactcatcatggtgg

SEQ ID NO: 2435407 - DNA, 25 bp, Homo sapien
taacagtttgactcatcatggtggg

SEQ ID NO: 2435408 - DNA, 25 bp, Homo sapien
agaagaagcgtgagccccgcttggc

SEQ ID NO: 2435409 - DNA, 25 bp, Homo sapien
gccccgcttggcagtacgggccgtg

SEQ ID NO: 2435410 - DNA, 25 bp, Homo sapien
ccgcttggcagtacgggccgtgaaa

SEQ ID NO: 2435411 - DNA, 25 bp, Homo sapien
ttggcagtacgggccgtgaaaggga

SEQ ID NO: 2435412 - DNA, 25 bp, Homo sapien
gatgtcctcgatggtaccatccttc

SEQ ID NO: 2435413 - DNA, 25 bp, Homo sapien
ttggcctggcgccgcctcaactctg

SEQ ID NO: 2435414 - DNA, 25 bp, Homo sapien
cttcccctcataaacaggccggtgt

SEQ ID NO: 2435415 - DNA, 25 bp, Homo sapien
ccctcataaacaggccggtgttcct

SEQ ID NO: 2435416 - DNA, 25 bp, Homo sapien
ctgttgccacttgttccgctgggat

SEQ ID NO: 2435417 - DNA, 25 bp, Homo sapien
tgttgccacttgttccgctgggatg

SEQ ID NO: 2435418 - DNA, 25 bp, Homo sapien
ttgccacttgttccgctgggatggg

SEQ ID NO: 2435419 - DNA, 25 bp, Homo sapien
gccacttgttccgctgggatggggt

SEQ ID NO: 2435420 - DNA, 25 bp, Homo sapien
cagcccccactcttttgccttgtcg

SEQ ID NO: 2435421 - DNA, 25 bp, Homo sapien
actcttttgccttgtcgtcctccag

SEQ ID NO: 2435422 - DNA, 25 bp, Homo sapien
ccactcttttgccttgtcgtcctcc

SEQ ID NO: 2435423 - DNA, 25 bp, Homo sapien
tcttttgccttgtcgtcctccaggc

SEQ ID NO: 2435424 - DNA, 25 bp, Homo sapien
catccagtttcttggcttcctgagc

SEQ ID NO: 2435425 - DNA, 25 bp, Homo sapien
ttcctgagccagctgcttctcccgc

SEQ ID NO: 2435426 - DNA, 25 bp, Homo sapien
cttggcatccagtttcttggcttcc

SEQ ID NO: 2435427 - DNA, 25 bp, Homo sapien
cttcctgagccagctgcttctcccg

SEQ ID NO: 2435428 - DNA, 25 bp, Homo sapien
cttcttgcgggcttcattctcttgt

SEQ ID NO: 2435429 - DNA, 25 bp, Homo sapien
gtaagaacgaatgaatcggacaaat

SEQ ID NO: 2435430 - DNA, 25 bp, Homo sapien
taagaacgaatgaatcggacaaata

SEQ ID NO: 2435431 - DNA, 25 bp, Homo sapien
gtagcgcacaactgcattgtaggcc

SEQ ID NO: 2435432 - DNA, 25 bp, Homo sapien
gccaaagtagcgcacaactgcattg

SEQ ID NO: 2435433 - DNA, 25 bp, Homo sapien
tgtagtcttgggactctcgccaaag

SEQ ID NO: 2435434 - DNA, 25 bp, Homo sapien
gggactctcgccaaagtagcgcaca

SEQ ID NO: 2435435 - DNA, 25 bp, Homo sapien
ctagaggggcctggtgccttggccc

SEQ ID NO: 2435436 - DNA, 25 bp, Homo sapien
ggtgccttggccctggttgctccca

SEQ ID NO: 2435437 - DNA, 25 bp, Homo sapien
agaggggcctggtgccttggccctg

SEQ ID NO: 2435438 - DNA, 25 bp, Homo sapien
gcctggtgccttggccctggttgct

SEQ ID NO: 2435439 - DNA, 25 bp, Homo sapien
agcttgtctagtttgccttcattgg

SEQ ID NO: 2435440 - DNA, 25 bp, Homo sapien
ctggagcttgtctagtttgccttca

SEQ ID NO: 2435441 - DNA, 25 bp, Homo sapien
cttgtctagtttgccttcattggta

SEQ ID NO: 2435442 - DNA, 25 bp, Homo sapien
ctcagccgtcttggcgtcccgctgg

SEQ ID NO: 2435443 - DNA, 25 bp, Homo sapien
tccggaggacgctgttgtcatggat

SEQ ID NO: 2435444 - DNA, 25 bp, Homo sapien
gatgctgcactcacgccgaatcagc

SEQ ID NO: 2435445 - DNA, 25 bp, Homo sapien
atggatgctgcactcacgccgaatc

SEQ ID NO: 2435446 - DNA, 25 bp, Homo sapien
gaggaagttccggaggacgctgttg

SEQ ID NO: 2435447 - DNA, 25 bp, Homo sapien
catcttccggtcagtggacttggta

SEQ ID NO: 2435448 - DNA, 25 bp, Homo sapien
tcttccggtcagtggacttggtatc

SEQ ID NO: 2435449 - DNA, 25 bp, Homo sapien
ctcaacaaagtgcagctcatgccag

SEQ ID NO: 2435450 - DNA, 25 bp, Homo sapien
cggtcagtggacttggtatccagca

SEQ ID NO: 2435451 - DNA, 25 bp, Homo sapien
tgctgctgttcatgtagttccccag

SEQ ID NO: 2435452 - DNA, 25 bp, Homo sapien
tgttcatgtagttccccagtgcaag

SEQ ID NO: 2435453 - DNA, 25 bp, Homo sapien
tgtagttccccagtgcaagtatgat

SEQ ID NO: 2435454 - DNA, 25 bp, Homo sapien
tctggagcttgaagccatacacagc

SEQ ID NO: 2435455 - DNA, 25 bp, Homo sapien
aagacttgacggaagcggacgccgc

SEQ ID NO: 2435456 - DNA, 25 bp, Homo sapien
tgacggaagcggacgccgcaatgat

SEQ ID NO: 2435457 - DNA, 25 bp, Homo sapien
tctgtgaagacttgacggaagcgga

SEQ ID NO: 2435458 - DNA, 25 bp, Homo sapien
gacgccgcaatgatggcattgagtt

SEQ ID NO: 2435459 - DNA, 25 bp, Homo sapien
tatcctggaagttccccaggaaggc

SEQ ID NO: 2435460 - DNA, 25 bp, Homo sapien
gggtcaaccgttccaccttgctgaa

SEQ ID NO: 2435461 - DNA, 25 bp, Homo sapien
gccatgccagccattcgctgggtca

SEQ ID NO: 2435462 - DNA, 25 bp, Homo sapien
tcatattgccgcagcagctttacct

SEQ ID NO: 2435463 - DNA, 25 bp, Homo sapien
gaagtccacaggtagtgtctgcaag

SEQ ID NO: 2435464 - DNA, 25 bp, Homo sapien
cacgaagtccacaggtagtgtctgc

SEQ ID NO: 2435465 - DNA, 25 bp, Homo sapien
caggcactccacgaagtccacaggt

SEQ ID NO: 2435466 - DNA, 25 bp, Homo sapien
gcactccacgaagtccacaggtagt

SEQ ID NO: 2435467 - DNA, 25 bp, Homo sapien
gcttccaacagagtcaccttgctgg

SEQ ID NO: 2435468 - DNA, 25 bp, Homo sapien
gctggcagctttttgcgctgtcttg

SEQ ID NO: 2435469 - DNA, 25 bp, Homo sapien
caggttcttggcacgattggcttcc

SEQ ID NO: 2435470 - DNA, 25 bp, Homo sapien
cttgcgtagggtgatggccaggttc

SEQ ID NO: 2435471 - DNA, 25 bp, Homo sapien
cttcaaacttatcaagatccaggtc

SEQ ID NO: 2435472 - DNA, 25 bp, Homo sapien
gaataattcttcaaacttatcaaga

SEQ ID NO: 2435473 - DNA, 25 bp, Homo sapien
attcttcaaacttatcaagatccag

SEQ ID NO: 2435474 - DNA, 25 bp, Homo sapien
taattcttcaaacttatcaagatcc

SEQ ID NO: 2435475 - DNA, 25 bp, Homo sapien
cagtgccactgatctggttgggttt

SEQ ID NO: 2435476 - DNA, 25 bp, Homo sapien
gacagtgccactgatctggttgggt

SEQ ID NO: 2435477 - DNA, 25 bp, Homo sapien
gacaggcagccggaacttggtcttg

SEQ ID NO: 2435478 - DNA, 25 bp, Homo sapien
gccactgatctggttgggtttcagt

SEQ ID NO: 2435479 - DNA, 25 bp, Homo sapien
accacagagggtgcagcaccaggga

SEQ ID NO: 2435480 - DNA, 25 bp, Homo sapien
ccactgtcaacaccacagagggtgc

SEQ ID NO: 2435481 - DNA, 25 bp, Homo sapien
ctgtcaacaccacagagggtgcagc

SEQ ID NO: 2435482 - DNA, 25 bp, Homo sapien
gcccactgtcaacaccacagagggt

SEQ ID NO: 2435483 - DNA, 25 bp, Homo sapien
gtccaggtcggagggtggcatgccc

SEQ ID NO: 2435484 - DNA, 25 bp, Homo sapien
aggtccaggtcggagggtggcatgc

SEQ ID NO: 2435485 - DNA, 25 bp, Homo sapien
ccaggtcggagggtggcatgccctc

SEQ ID NO: 2435486 - DNA, 25 bp, Homo sapien
aggtcggagggtggcatgccctcac

SEQ ID NO: 2435487 - DNA, 25 bp, Homo sapien
ggtggcttgtgttctcatatgtctc

SEQ ID NO: 2435488 - DNA, 25 bp, Homo sapien
atgacatcgacgctgaaaggcctcc

SEQ ID NO: 2435489 - DNA, 25 bp, Homo sapien
tctttaatgagcctccgcagggtgt

SEQ ID NO: 2435490 - DNA, 25 bp, Homo sapien
caggccccggacatttggctccaaa

SEQ ID NO: 2435491 - DNA, 25 bp, Homo sapien
gttccttctcccgctgtagcagctg

SEQ ID NO: 2435492 - DNA, 25 bp, Homo sapien
ttctctagttctgccacccgcatca

SEQ ID NO: 2435493 - DNA, 25 bp, Homo sapien
ctagttccttctcccgctgtagcag

SEQ ID NO: 2435494 - DNA, 25 bp, Homo sapien
tgcttctctagttctgccacccgca

SEQ ID NO: 2435495 - DNA, 25 bp, Homo sapien
cccgacatcaaacacgttgtccaga

SEQ ID NO: 2435496 - DNA, 25 bp, Homo sapien
accttctccagggctacattcttgg

SEQ ID NO: 2435497 - DNA, 25 bp, Homo sapien
tccagatatgcctgaatctgcacct

SEQ ID NO: 2435498 - DNA, 25 bp, Homo sapien
tgcagcttctcgctctctgtgtgcc

SEQ ID NO: 2435499 - DNA, 25 bp, Homo sapien
ctctagccccagcttggtaaactca

SEQ ID NO: 2435500 - DNA, 25 bp, Homo sapien
ctccaccgagtgcaccacgatgttg

SEQ ID NO: 2435501 - DNA, 25 bp, Homo sapien
tactgcaggtggacccggaagttca

SEQ ID NO: 2435502 - DNA, 25 bp, Homo sapien
gtgcaccacgatgttgatgaactgc

SEQ ID NO: 2435503 - DNA, 25 bp, Homo sapien
caaagcggtgcagctccttgcatac

SEQ ID NO: 2435504 - DNA, 25 bp, Homo sapien
caaggatgatttcgtgacctcctcg

SEQ ID NO: 2435505 - DNA, 25 bp, Homo sapien
gatttcgtgacctcctcgcaccaaa

SEQ ID NO: 2435506 - DNA, 25 bp, Homo sapien
cacagctgccagaagctctaagaca

SEQ ID NO: 2435507 - DNA, 25 bp, Homo sapien
aaacacacagctgccagaagctcta

SEQ ID NO: 2435508 - DNA, 25 bp, Homo sapien
ggccaggcagaacttgtcaggaata

SEQ ID NO: 2435509 - DNA, 25 bp, Homo sapien
cagaacttgtcaggaatacatggag

SEQ ID NO: 2435510 - DNA, 25 bp, Homo sapien
gggccaaaccaaggctcttgacagg

SEQ ID NO: 2435511 - DNA, 25 bp, Homo sapien
tccaaggccaggcagaacttgtcag

SEQ ID NO: 2435512 - DNA, 25 bp, Homo sapien
tgttattgaggctaagtgcaatctc

SEQ ID NO: 2435513 - DNA, 25 bp, Homo sapien
cttggattcttgttattgaggctaa

SEQ ID NO: 2435514 - DNA, 25 bp, Homo sapien
ttcttgttattgaggctaagtgcaa

SEQ ID NO: 2435515 - DNA, 25 bp, Homo sapien
tattgaggctaagtgcaatctcatt

SEQ ID NO: 2435516 - DNA, 25 bp, Homo sapien
tgagacaaaggatacagacgtggac

SEQ ID NO: 2435517 - DNA, 25 bp, Homo sapien
ctaggcgggagttcttcagggccct

SEQ ID NO: 2435518 - DNA, 25 bp, Homo sapien
catccttctggctcactaggcggga

SEQ ID NO: 2435519 - DNA, 25 bp, Homo sapien
cctgcgcccagggagagtgctatac

SEQ ID NO: 2435520 - DNA, 25 bp, Homo sapien
tcaacagtgtccaagggacacaacc

SEQ ID NO: 2435521 - DNA, 25 bp, Homo sapien
atcaacagtgtccaagggacacaac

SEQ ID NO: 2435522 - DNA, 25 bp, Homo sapien
agaccgctgggcagagtcaaggaga

SEQ ID NO: 2435523 - DNA, 25 bp, Homo sapien
aggacagaccgctgggcagagtcaa

SEQ ID NO: 2435524 - DNA, 25 bp, Homo sapien
acagaccgctgggcagagtcaagga

SEQ ID NO: 2435525 - DNA, 25 bp, Homo sapien
ccaggacagaccgctgggcagagtc

SEQ ID NO: 2435526 - DNA, 25 bp, Homo sapien
gtcaaatgcaccatcgtcaccactt

SEQ ID NO: 2435527 - DNA, 25 bp, Homo sapien
agtttgtcaaatgcaccatcgtcac

SEQ ID NO: 2435528 - DNA, 25 bp, Homo sapien
ggtcctcgattgacctgctccagga

SEQ ID NO: 2435529 - DNA, 25 bp, Homo sapien
cagagcgagcgaggctgttggtgaa

SEQ ID NO: 2435530 - DNA, 25 bp, Homo sapien
attcagtgccaaggccccccgtgag

SEQ ID NO: 2435531 - DNA, 25 bp, Homo sapien
tggagcatgaaaggacacacatgcg

SEQ ID NO: 2435532 - DNA, 25 bp, Homo sapien
ctggagcatgaaaggacacacatgc

SEQ ID NO: 2435533 - DNA, 25 bp, Homo sapien
caggcacatacacaggagaaattca

SEQ ID NO: 2435534 - DNA, 25 bp, Homo sapien
agacatctccgggcttgcctgccta

SEQ ID NO: 2435535 - DNA, 25 bp, Homo sapien
cacaccactgcttgggctactcctt

SEQ ID NO: 2435536 - DNA, 25 bp, Homo sapien
tctcacccttccttatcaaagtaga

SEQ ID NO: 2435537 - DNA, 25 bp, Homo sapien
aagtagaatggaactatgtcctccc

SEQ ID NO: 2435538 - DNA, 25 bp, Homo sapien
aaaggacaggtaatccaccagtaca

SEQ ID NO: 2435539 - DNA, 25 bp, Homo sapien
tgggcaaaggacaggtaatccacca

SEQ ID NO: 2435540 - DNA, 25 bp, Homo sapien
ggacaggtaatccaccagtacatcc

SEQ ID NO: 2435541 - DNA, 25 bp, Homo sapien
accagtacatccaggcctttgtttt

SEQ ID NO: 2435542 - DNA, 25 bp, Homo sapien
tggttggtgcgaagagagatctcca

SEQ ID NO: 2435543 - DNA, 25 bp, Homo sapien
ccttagtactttggttgactcctgc

SEQ ID NO: 2435544 - DNA, 25 bp, Homo sapien
tactttggttgactcctgcaccctc

SEQ ID NO: 2435545 - DNA, 25 bp, Homo sapien
gaagagagatctccagctcccttag

SEQ ID NO: 2435546 - DNA, 25 bp, Homo sapien
aagctctggagtttctgaatgtaag

SEQ ID NO: 2435547 - DNA, 25 bp, Homo sapien
gaagctctggagtttctgaatgtaa

SEQ ID NO: 2435548 - DNA, 25 bp, Homo sapien
cttccgagttacactggggtccaag

SEQ ID NO: 2435549 - DNA, 25 bp, Homo sapien
tccgagttacactggggtccaagaa

SEQ ID NO: 2435550 - DNA, 25 bp, Homo sapien
gaatagtctggataacataggaaga

SEQ ID NO: 2435551 - DNA, 25 bp, Homo sapien
aatagtctggataacataggaagac

SEQ ID NO: 2435552 - DNA, 25 bp, Homo sapien
gagaatagtctggataacataggaa

SEQ ID NO: 2435553 - DNA, 25 bp, Homo sapien
tagtctggataacataggaagactc

SEQ ID NO: 2435554 - DNA, 25 bp, Homo sapien
tctcattgtcatactgccgcaggag

SEQ ID NO: 2435555 - DNA, 25 bp, Homo sapien
ctggtcacagatcagatcccatttc

SEQ ID NO: 2435556 - DNA, 25 bp, Homo sapien
gagccgggccttgtctggaggcagg

SEQ ID NO: 2435557 - DNA, 25 bp, Homo sapien
cattgtcatactgccgcaggagccg

SEQ ID NO: 2435558 - DNA, 25 bp, Homo sapien
aactccctggtaacccaagcatgac

SEQ ID NO: 2435559 - DNA, 25 bp, Homo sapien
tctaactccctggtaacccaagcat

SEQ ID NO: 2435560 - DNA, 25 bp, Homo sapien
agctctaactccctggtaacccaag

SEQ ID NO: 2435561 - DNA, 25 bp, Homo sapien
tcagctctaactccctggtaaccca

SEQ ID NO: 2435562 - DNA, 25 bp, Homo sapien
caattcttggcatcctcatccctgg

SEQ ID NO: 2435563 - DNA, 25 bp, Homo sapien
ccctggggacatgaactgtgtgcat

SEQ ID NO: 2435564 - DNA, 25 bp, Homo sapien
catccctggggacatgaactgtgtg

SEQ ID NO: 2435565 - DNA, 25 bp, Homo sapien
ctctgcccaattcttggcatcctca

SEQ ID NO: 2435566 - DNA, 25 bp, Homo sapien
aaggaggtcctctaactttcgatgg

SEQ ID NO: 2435567 - DNA, 25 bp, Homo sapien
tccctgaggagtcacataggccctg

SEQ ID NO: 2435568 - DNA, 25 bp, Homo sapien
taaacttatgtggaagaggtcccag

SEQ ID NO: 2435569 - DNA, 25 bp, Homo sapien
cagctcccaatatgcatctagtggg

SEQ ID NO: 2435570 - DNA, 25 bp, Homo sapien
ctgatgaggaaacacttggtcccct

SEQ ID NO: 2435571 - DNA, 25 bp, Homo sapien
atgaggaaacacttggtcccctcgg

SEQ ID NO: 2435572 - DNA, 25 bp, Homo sapien
gatgaggaaacacttggtcccctcg

SEQ ID NO: 2435573 - DNA, 25 bp, Homo sapien
ccaccaggtgaactgatgaggaaac

SEQ ID NO: 2435574 - DNA, 25 bp, Homo sapien
gactgctgaaggaggagctgtaaca

SEQ ID NO: 2435575 - DNA, 25 bp, Homo sapien
caagtggacacaaaatttgggagtc

SEQ ID NO: 2435576 - DNA, 25 bp, Homo sapien
gatggaaagtggcaagtggacacaa

SEQ ID NO: 2435577 - DNA, 25 bp, Homo sapien
aggtccaagtcctccgtggcatcca

SEQ ID NO: 2435578 - DNA, 25 bp, Homo sapien
gtcactgaggactctgtaaccagaa

SEQ ID NO: 2435579 - DNA, 25 bp, Homo sapien
gcagttacgggccaagtccctgagc

SEQ ID NO: 2435580 - DNA, 25 bp, Homo sapien
tcggaaccatgtctggagaacgtgc

SEQ ID NO: 2435581 - DNA, 25 bp, Homo sapien
gacttgctgagcagttacgggccaa

SEQ ID NO: 2435582 - DNA, 25 bp, Homo sapien
tctactccattgtaccccagagaga

SEQ ID NO: 2435583 - DNA, 25 bp, Homo sapien
taagtgattgatcctgctcctacca

SEQ ID NO: 2435584 - DNA, 25 bp, Homo sapien
tctttgaatcatgtgcaggtgctta

SEQ ID NO: 2435585 - DNA, 25 bp, Homo sapien
ggaatcaccatcagcttgtttagca

SEQ ID NO: 2435586 - DNA, 25 bp, Homo sapien
attcacaacaggtgaaatctaccat

SEQ ID NO: 2435587 - DNA, 25 bp, Homo sapien
tttcgaattgccagccatgctcctc

SEQ ID NO: 2435588 - DNA, 25 bp, Homo sapien
ctcctttcgaattgccagccatgct

SEQ ID NO: 2435589 - DNA, 25 bp, Homo sapien
cctcctccaattcacaacaggtgaa

SEQ ID NO: 2435590 - DNA, 25 bp, Homo sapien
ccacacccagtgacattcatgtctt

SEQ ID NO: 2435591 - DNA, 25 bp, Homo sapien
tatgtaccatgcactgcgccaactg

SEQ ID NO: 2435592 - DNA, 25 bp, Homo sapien
gacctgttttgccttgcgataactc

SEQ ID NO: 2435593 - DNA, 25 bp, Homo sapien
tgaagcttataaacatctactctgg

SEQ ID NO: 2435594 - DNA, 25 bp, Homo sapien
gcttctaagtacatacgcaaaatac

SEQ ID NO: 2435595 - DNA, 25 bp, Homo sapien
aataaaagggattttgcacagtgcc

SEQ ID NO: 2435596 - DNA, 25 bp, Homo sapien
tgcctggcgcaggagaaagaccctg

SEQ ID NO: 2435597 - DNA, 25 bp, Homo sapien
ggtaactggaatgacctactccagg

SEQ ID NO: 2435598 - DNA, 25 bp, Homo sapien
ttgagacagagtacagcagcataac

SEQ ID NO: 2435599 - DNA, 25 bp, Homo sapien
agcagcataaccacaactcactgta

SEQ ID NO: 2435600 - DNA, 25 bp, Homo sapien
acagcagcataaccacaactcactg

SEQ ID NO: 2435601 - DNA, 25 bp, Homo sapien
tgagacagagtacagcagcataacc

SEQ ID NO: 2435602 - DNA, 25 bp, Homo sapien
tctctttgtggacttctagggctat

SEQ ID NO: 2435603 - DNA, 25 bp, Homo sapien
ggctggagatgcagctttcactggc

SEQ ID NO: 2435604 - DNA, 25 bp, Homo sapien
agagctcaggtttattctctttgtg

SEQ ID NO: 2435605 - DNA, 25 bp, Homo sapien
ctagggctatggctgtgccaaggct

SEQ ID NO: 2435606 - DNA, 25 bp, Homo sapien
ctagaataccaaaatccccagatgc

SEQ ID NO: 2435607 - DNA, 25 bp, Homo sapien
cattgctagagaaacaaacgttcca

SEQ ID NO: 2435608 - DNA, 25 bp, Homo sapien
taacctttggccgtcactgcaagag

SEQ ID NO: 2435609 - DNA, 25 bp, Homo sapien
caggtagtacctccaaacacaggat

SEQ ID NO: 2435610 - DNA, 25 bp, Homo sapien
cctgttggtgtgtataagggaccca

SEQ ID NO: 2435611 - DNA, 25 bp, Homo sapien
aactttcttagagaggcaccgtaca

SEQ ID NO: 2435612 - DNA, 25 bp, Homo sapien
gatttgcctaaagtcgtgcagctga

SEQ ID NO: 2435613 - DNA, 25 bp, Homo sapien
gaggatctattgactggctccccag

SEQ ID NO: 2435614 - DNA, 25 bp, Homo sapien
caacaagagtatctccaggacacag

SEQ ID NO: 2435615 - DNA, 25 bp, Homo sapien
tgcaggaattctagctgcccagctc

SEQ ID NO: 2435616 - DNA, 25 bp, Homo sapien
gggagcttgacatttctacaccttt

SEQ ID NO: 2435617 - DNA, 25 bp, Homo sapien
tctcacctgctgctattcagaagta

SEQ ID NO: 2435618 - DNA, 25 bp, Homo sapien
tcctcctaagggatatacagggctt

SEQ ID NO: 2435619 - DNA, 25 bp, Homo sapien
gcctcttagacaactagcacccagg

SEQ ID NO: 2435620 - DNA, 25 bp, Homo sapien
aactgcagcagggatagctcctgtc

SEQ ID NO: 2435621 - DNA, 25 bp, Homo sapien
ttctgtgtcaaaggaggcccctcaa

SEQ ID NO: 2435622 - DNA, 25 bp, Homo sapien
gccctgaattaaggcactgggctgg

SEQ ID NO: 2435623 - DNA, 25 bp, Homo sapien
agtagggaagccctgaattaaggca

SEQ ID NO: 2435624 - DNA, 25 bp, Homo sapien
ttggaatcaatgttctcatcaaatc

SEQ ID NO: 2435625 - DNA, 25 bp, Homo sapien
atagccctcatctcaagctcttcaa

SEQ ID NO: 2435626 - DNA, 25 bp, Homo sapien
tgctaactaaacgaaatggtcaacc

SEQ ID NO: 2435627 - DNA, 25 bp, Homo sapien
taactaggacatcacgtgcattttg

SEQ ID NO: 2435628 - DNA, 25 bp, Homo sapien
caagggccaatgagaacatgatgga

SEQ ID NO: 2435629 - DNA, 25 bp, Homo sapien
catttgacctgggttctcctggtgc

SEQ ID NO: 2435630 - DNA, 25 bp, Homo sapien
agggccacaggatgtatggcccaca

SEQ ID NO: 2435631 - DNA, 25 bp, Homo sapien
tatggcccacatccctttggccctt

SEQ ID NO: 2435632 - DNA, 25 bp, Homo sapien
tgtatggcccacatccctttggccc

SEQ ID NO: 2435633 - DNA, 25 bp, Homo sapien
gggccacaggatgtatggcccacat

SEQ ID NO: 2435634 - DNA, 25 bp, Homo sapien
gacttctcctaagggtccagcggtg

SEQ ID NO: 2435635 - DNA, 25 bp, Homo sapien
acactggaggccgggatccgttcgg

SEQ ID NO: 2435636 - DNA, 25 bp, Homo sapien
tggaggcgtcggtcccgagatcccc

SEQ ID NO: 2435637 - DNA, 25 bp, Homo sapien
gccagcggctgctcagaggttcctg

SEQ ID NO: 2435638 - DNA, 25 bp, Homo sapien
gcacaaagtcccagcccgggcgtcg

SEQ ID NO: 2435639 - DNA, 25 bp, Homo sapien
agcacaaagtcccagcccgggcgtc

SEQ ID NO: 2435640 - DNA, 25 bp, Homo sapien
cacaaagtcccagcccgggcgtcgg

SEQ ID NO: 2435641 - DNA, 25 bp, Homo sapien
cgggggaaggggctgggctcagctc

SEQ ID NO: 2435642 - DNA, 25 bp, Homo sapien
ggaaggggctgggctcagctctcac

SEQ ID NO: 2435643 - DNA, 25 bp, Homo sapien
ggggaaggggctgggctcagctctc

SEQ ID NO: 2435644 - DNA, 25 bp, Homo sapien
tacgcgggggaaggggctgggctca

SEQ ID NO: 2435645 - DNA, 25 bp, Homo sapien
tttcctccagctcacagggctcagg

SEQ ID NO: 2435646 - DNA, 25 bp, Homo sapien
ctttcctccagctcacagggctcag

SEQ ID NO: 2435647 - DNA, 25 bp, Homo sapien
ttcctccagctcacagggctcaggc

SEQ ID NO: 2435648 - DNA, 25 bp, Homo sapien
cctccagctcacagggctcaggcat

SEQ ID NO: 2435649 - DNA, 25 bp, Homo sapien
catcttgccgggcggcagcaacaac

SEQ ID NO: 2435650 - DNA, 25 bp, Homo sapien
ttgccgggcggcagcaacaacggga

SEQ ID NO: 2435651 - DNA, 25 bp, Homo sapien
ccgggcggcagcaacaacgggacag

SEQ ID NO: 2435652 - DNA, 25 bp, Homo sapien
gcggcagcaacaacgggacagaggg

SEQ ID NO: 2435653 - DNA, 25 bp, Homo sapien
tccacgctccggagctttcggctcc

SEQ ID NO: 2435654 - DNA, 25 bp, Homo sapien
gcggaggcagcgtagcggacagccg

SEQ ID NO: 2435655 - DNA, 25 bp, Homo sapien
cggctccccgagtcccgactcctcg

SEQ ID NO: 2435656 - DNA, 25 bp, Homo sapien
ctcctcggccccgtcgagggcgccg

SEQ ID NO: 2435657 - DNA, 25 bp, Homo sapien
ccccttgaggtaggttccactctga

SEQ ID NO: 2435658 - DNA, 25 bp, Homo sapien
gcatgcagcccttcgtagtttttat

SEQ ID NO: 2435659 - DNA, 25 bp, Homo sapien
gagtttctaaccaaactgcatgcag

SEQ ID NO: 2435660 - DNA, 25 bp, Homo sapien
tccaaagatggtgttcgagaccaag

SEQ ID NO: 2435661 - DNA, 25 bp, Homo sapien
aaagtggtcttcaccctaggctgca

SEQ ID NO: 2435662 - DNA, 25 bp, Homo sapien
tgtgcctagggaagtaaagtggtct

SEQ ID NO: 2435663 - DNA, 25 bp, Homo sapien
tactttgggcagtgctctctaagcc

SEQ ID NO: 2435664 - DNA, 25 bp, Homo sapien
tcagacaccatttgtgtaaggccag

SEQ ID NO: 2435665 - DNA, 25 bp, Homo sapien
tcatgactaattagtggtagttaag

SEQ ID NO: 2435666 - DNA, 25 bp, Homo sapien
tgcagagttcagagcgcttgagaca

SEQ ID NO: 2435667 - DNA, 25 bp, Homo sapien
ttcagagcgcttgagacagggcttg

SEQ ID NO: 2435668 - DNA, 25 bp, Homo sapien
tggtagttaagggttcagacttgga

SEQ ID NO: 2435669 - DNA, 25 bp, Homo sapien
caaggtacagcatcgtagggttccc

SEQ ID NO: 2435670 - DNA, 25 bp, Homo sapien
tactgagcggcctctactaggtggc

SEQ ID NO: 2435671 - DNA, 25 bp, Homo sapien
tgaactgtttggtagagccacccgg

SEQ ID NO: 2435672 - DNA, 25 bp, Homo sapien
agtcgacccgccacgatgagaagtg

SEQ ID NO: 2435673 - DNA, 25 bp, Homo sapien
gagtgacatgccaccccgaatggct

SEQ ID NO: 2435674 - DNA, 25 bp, Homo sapien
taggtagtgtcaagccagagattcg

SEQ ID NO: 2435675 - DNA, 25 bp, Homo sapien
ttcagtgtgagaggatcgagccatt

SEQ ID NO: 2435676 - DNA, 25 bp, Homo sapien
gagttaggcgaccaaaccagtgaga

SEQ ID NO: 2435677 - DNA, 25 bp, Homo sapien
tcaaggtgatgtcagtgttggttcc

SEQ ID NO: 2435678 - DNA, 25 bp, Homo sapien
tattcacgtagatacatcctcccca

SEQ ID NO: 2435679 - DNA, 25 bp, Homo sapien
cactgcaccaggtcctaagagattt

SEQ ID NO: 2435680 - DNA, 25 bp, Homo sapien
ggctcatggatgcatcaccctgacc

SEQ ID NO: 2435681 - DNA, 25 bp, Homo sapien
ccaacagtgtgtaagggttctattt

SEQ ID NO: 2435682 - DNA, 25 bp, Homo sapien
tctaactagagtgaggtggtatttc

SEQ ID NO: 2435683 - DNA, 25 bp, Homo sapien
caacagtgtgtaagggttctatttt

SEQ ID NO: 2435684 - DNA, 25 bp, Homo sapien
tttgataagagctattctaactaga

SEQ ID NO: 2435685 - DNA, 25 bp, Homo sapien
tgggccaggcgcttcaatatataaa

SEQ ID NO: 2435686 - DNA, 25 bp, Homo sapien
gcaccacaagatggctcagcctgaa

SEQ ID NO: 2435687 - DNA, 25 bp, Homo sapien
ttattagggatacggcagaagcaga

SEQ ID NO: 2435688 - DNA, 25 bp, Homo sapien
acacataaattaaccgcagtgcggg

SEQ ID NO: 2435689 - DNA, 25 bp, Homo sapien
tctcatccgccgaagcagtgggtgg

SEQ ID NO: 2435690 - DNA, 25 bp, Homo sapien
atctcatccgccgaagcagtgggtg

SEQ ID NO: 2435691 - DNA, 25 bp, Homo sapien
cggtcatctcatccgccgaagcagt

SEQ ID NO: 2435692 - DNA, 25 bp, Homo sapien
tgagcacggtcatctcatccgccga

SEQ ID NO: 2435693 - DNA, 25 bp, Homo sapien
tgggcatgaagagagccggtccagt

SEQ ID NO: 2435694 - DNA, 25 bp, Homo sapien
ggcatgaagagagccggtccagtct

SEQ ID NO: 2435695 - DNA, 25 bp, Homo sapien
agcggggccgtggcgtggcgcagcc

SEQ ID NO: 2435696 - DNA, 25 bp, Homo sapien
gaagagagccggtccagtctgtggt

SEQ ID NO: 2435697 - DNA, 25 bp, Homo sapien
gacagcgagtcgtagagtgagtcac

SEQ ID NO: 2435698 - DNA, 25 bp, Homo sapien
gagagactccgaggtctccagccct

SEQ ID NO: 2435699 - DNA, 25 bp, Homo sapien
tcccacaagaggacagcgagtcgta

SEQ ID NO: 2435700 - DNA, 25 bp, Homo sapien
gagtgagtcactgagagactccgag

SEQ ID NO: 2435701 - DNA, 25 bp, Homo sapien
ggaaacaggctggaggtacaactga

SEQ ID NO: 2435702 - DNA, 25 bp, Homo sapien
gacacacaggccgtaccttactgga

SEQ ID NO: 2435703 - DNA, 25 bp, Homo sapien
gagaacagtcctacaaggttctggg

SEQ ID NO: 2435704 - DNA, 25 bp, Homo sapien
gcactgagactgtgcgacacacagg

SEQ ID NO: 2435705 - DNA, 25 bp, Homo sapien
gagggtccgaggagctgccggctgc

SEQ ID NO: 2435706 - DNA, 25 bp, Homo sapien
ggtgggcacatgagagggtccgagg

SEQ ID NO: 2435707 - DNA, 25 bp, Homo sapien
ccctccagttgtcggggtgggcaca

SEQ ID NO: 2435708 - DNA, 25 bp, Homo sapien
tgccctagtattggggaaggtccag

SEQ ID NO: 2435709 - DNA, 25 bp, Homo sapien
gggtcccactgctaccatggtctgg

SEQ ID NO: 2435710 - DNA, 25 bp, Homo sapien
gccgcggtggcttggtcttaggaag

SEQ ID NO: 2435711 - DNA, 25 bp, Homo sapien
ccggagcagcgggtagcagtgcagg

SEQ ID NO: 2435712 - DNA, 25 bp, Homo sapien
aggtcccaatgccactgtccaaggt

SEQ ID NO: 2435713 - DNA, 25 bp, Homo sapien
ctgtcctccgagggcatctcttccc

SEQ ID NO: 2435714 - DNA, 25 bp, Homo sapien
tcctccgagggcatctcttcccgcc

SEQ ID NO: 2435715 - DNA, 25 bp, Homo sapien
tgtcctccgagggcatctcttcccg

SEQ ID NO: 2435716 - DNA, 25 bp, Homo sapien
gtcctccgagggcatctcttcccgc

SEQ ID NO: 2435717 - DNA, 25 bp, Homo sapien
aatccccgtactcaggcttgggctc

SEQ ID NO: 2435718 - DNA, 25 bp, Homo sapien
agaagacaccggctggaaatccccg

SEQ ID NO: 2435719 - DNA, 25 bp, Homo sapien
gggtcagaagacaccggctggaaat

SEQ ID NO: 2435720 - DNA, 25 bp, Homo sapien
accggctggaaatccccgtactcag

SEQ ID NO: 2435721 - DNA, 25 bp, Homo sapien
tcttaaggccgaaccagctggcgat

SEQ ID NO: 2435722 - DNA, 25 bp, Homo sapien
tcaccttctcctcgatggctgagtg

SEQ ID NO: 2435723 - DNA, 25 bp, Homo sapien
tcagcttggagatgttgaggctctc

SEQ ID NO: 2435724 - DNA, 25 bp, Homo sapien
tggactgggccgtggtactaccaca

SEQ ID NO: 2435725 - DNA, 25 bp, Homo sapien
agggcccctgccagccggctcttgg

SEQ ID NO: 2435726 - DNA, 25 bp, Homo sapien
acagggcccctgccagccggctctt

SEQ ID NO: 2435727 - DNA, 25 bp, Homo sapien
cctgccagccggctcttggccagct

SEQ ID NO: 2435728 - DNA, 25 bp, Homo sapien
gtacctgggggcacagggcccctgc

SEQ ID NO: 2435729 - DNA, 25 bp, Homo sapien
tgcttcaggctgtttgtgcccaagg

SEQ ID NO: 2435730 - DNA, 25 bp, Homo sapien
tggctggcaccccattcttctctga

SEQ ID NO: 2435731 - DNA, 25 bp, Homo sapien
gggagactccgagcctgccttgtcc

SEQ ID NO: 2435732 - DNA, 25 bp, Homo sapien
tctgtcccgcagaggtgtgctgcca

SEQ ID NO: 2435733 - DNA, 25 bp, Homo sapien
ggtgctccgagaaaggtccagaatg

SEQ ID NO: 2435734 - DNA, 25 bp, Homo sapien
gggctcttctccgaggttggaggca

SEQ ID NO: 2435735 - DNA, 25 bp, Homo sapien
ctcatagcagggagacaccactggg

SEQ ID NO: 2435736 - DNA, 25 bp, Homo sapien
ttccgacaggggattcgcgagttcc

SEQ ID NO: 2435737 - DNA, 25 bp, Homo sapien
gaaggggggccaatttggagcttgc

SEQ ID NO: 2435738 - DNA, 25 bp, Homo sapien
ggccaatttggagcttgcttttcac

SEQ ID NO: 2435739 - DNA, 25 bp, Homo sapien
caatttggagcttgcttttcacctg

SEQ ID NO: 2435740 - DNA, 25 bp, Homo sapien
ggtccctgagcttccccaggagaag

SEQ ID NO: 2435741 - DNA, 25 bp, Homo sapien
ctctgaggtagcaccgaagcctggc

SEQ ID NO: 2435742 - DNA, 25 bp, Homo sapien
tggtccccattgagtgggcctgcag

SEQ ID NO: 2435743 - DNA, 25 bp, Homo sapien
ggagctggcccaggttcaactgtct

SEQ ID NO: 2435744 - DNA, 25 bp, Homo sapien
ggccacacagctcgccgttgatggg

SEQ ID NO: 2435745 - DNA, 25 bp, Homo sapien
cggggatagggcatccagcgctggg

SEQ ID NO: 2435746 - DNA, 25 bp, Homo sapien
cgaaggaacggggatagggcatcca

SEQ ID NO: 2435747 - DNA, 25 bp, Homo sapien
agcagagaagcaaggggtcagtctc

SEQ ID NO: 2435748 - DNA, 25 bp, Homo sapien
gcaaggggtcagtctcttccagggc

SEQ ID NO: 2435749 - DNA, 25 bp, Homo sapien
gggcagccggtccctcagtggagct

SEQ ID NO: 2435750 - DNA, 25 bp, Homo sapien
cagccggtccctcagtggagctcag

SEQ ID NO: 2435751 - DNA, 25 bp, Homo sapien
ggggcagccggtccctcagtggagc

SEQ ID NO: 2435752 - DNA, 25 bp, Homo sapien
tgatttaaggacactcgacccctct

SEQ ID NO: 2435753 - DNA, 25 bp, Homo sapien
tctattggcccaaaccccatgaggt

SEQ ID NO: 2435754 - DNA, 25 bp, Homo sapien
acagggacagatctagggcaaggag

SEQ ID NO: 2435755 - DNA, 25 bp, Homo sapien
actcgacccctctgttatcagcagt

SEQ ID NO: 2435756 - DNA, 25 bp, Homo sapien
cgagcctgtcgtgagctggagtttc

SEQ ID NO: 2435757 - DNA, 25 bp, Homo sapien
tgccgttccaggtcaaacactctct

SEQ ID NO: 2435758 - DNA, 25 bp, Homo sapien
gctgaaacagggcactcagcatctg

SEQ ID NO: 2435759 - DNA, 25 bp, Homo sapien
tcagcatctggttctgccgttccag

SEQ ID NO: 2435760 - DNA, 25 bp, Homo sapien
taggctcacaacatcaacactgctt

SEQ ID NO: 2435761 - DNA, 25 bp, Homo sapien
ggaagaagtcatgctcaaatcagtg

SEQ ID NO: 2435762 - DNA, 25 bp, Homo sapien
aagggcctatataagacagagcaag

SEQ ID NO: 2435763 - DNA, 25 bp, Homo sapien
taggtagaacagaatggacccgccc

SEQ ID NO: 2435764 - DNA, 25 bp, Homo sapien
ttctggttcagcaacgcctgtacca

SEQ ID NO: 2435765 - DNA, 25 bp, Homo sapien
tcagcaacgcctgtaccacatggtt

SEQ ID NO: 2435766 - DNA, 25 bp, Homo sapien
acgcctgtaccacatggttggcaac

SEQ ID NO: 2435767 - DNA, 25 bp, Homo sapien
gttcagcaacgcctgtaccacatgg

SEQ ID NO: 2435768 - DNA, 25 bp, Homo sapien
ctcgtccagacagcgctcataagtc

SEQ ID NO: 2435769 - DNA, 25 bp, Homo sapien
ataagtctcccgctggttttcgttg

SEQ ID NO: 2435770 - DNA, 25 bp, Homo sapien
agacagcgctcataagtctcccgct

SEQ ID NO: 2435771 - DNA, 25 bp, Homo sapien
agcgctcataagtctcccgctggtt

SEQ ID NO: 2435772 - DNA, 25 bp, Homo sapien
agctcccgcagtcggtgcagaagct

SEQ ID NO: 2435773 - DNA, 25 bp, Homo sapien
ccagctcccgcagtcggtgcagaag

SEQ ID NO: 2435774 - DNA, 25 bp, Homo sapien
cgcagtcggtgcagaagctcctggc

SEQ ID NO: 2435775 - DNA, 25 bp, Homo sapien
tcccgcagtcggtgcagaagctcct

SEQ ID NO: 2435776 - DNA, 25 bp, Homo sapien
tcctggacaaagtgggaagtgccct

SEQ ID NO: 2435777 - DNA, 25 bp, Homo sapien
tgtgaccacgtagggaagagcaccc

SEQ ID NO: 2435778 - DNA, 25 bp, Homo sapien
tggataaaaccctggctttgcggcc

SEQ ID NO: 2435779 - DNA, 25 bp, Homo sapien
tgggtatctcctggtcacggtcacg

SEQ ID NO: 2435780 - DNA, 25 bp, Homo sapien
cccttacgcaggtgggcacactcac

SEQ ID NO: 2435781 - DNA, 25 bp, Homo sapien
ccccttacgcaggtgggcacactca

SEQ ID NO: 2435782 - DNA, 25 bp, Homo sapien
ctagcatccagaacggtcaccttgc

SEQ ID NO: 2435783 - DNA, 25 bp, Homo sapien
tctagcatccagaacggtcaccttg

SEQ ID NO: 2435784 - DNA, 25 bp, Homo sapien
gatgaatagcacaggcgctttcttc

SEQ ID NO: 2435785 - DNA, 25 bp, Homo sapien
atagcacaggcgctttcttccacac

SEQ ID NO: 2435786 - DNA, 25 bp, Homo sapien
ccagtgtgatgaatagcacaggcgc

SEQ ID NO: 2435787 - DNA, 25 bp, Homo sapien
tgtgatgaatagcacaggcgctttc

SEQ ID NO: 2435788 - DNA, 25 bp, Homo sapien
cctgcagcaacctgcccatcggtcc

SEQ ID NO: 2435789 - DNA, 25 bp, Homo sapien
tcggtccccagcgtgtccctcaatc

SEQ ID NO: 2435790 - DNA, 25 bp, Homo sapien
ccagcgtgtccctcaatcccctcac

SEQ ID NO: 2435791 - DNA, 25 bp, Homo sapien
acctgcccatcggtccccagcgtgt

SEQ ID NO: 2435792 - DNA, 25 bp, Homo sapien
aggggctagggtgtggctgaggtat

SEQ ID NO: 2435793 - DNA, 25 bp, Homo sapien
ttccgtttcacaggcactccaagca

SEQ ID NO: 2435794 - DNA, 25 bp, Homo sapien
ccaacttccgtttcacaggcactcc

SEQ ID NO: 2435795 - DNA, 25 bp, Homo sapien
ccccaacttccgtttcacaggcact

SEQ ID NO: 2435796 - DNA, 25 bp, Homo sapien
aacttccgtttcacaggcactccaa

SEQ ID NO: 2435797 - DNA, 25 bp, Homo sapien
tcctttgtatgggtgaacagtgctc

SEQ ID NO: 2435798 - DNA, 25 bp, Homo sapien
gctatgatcatttatgtagttatcc

SEQ ID NO: 2435799 - DNA, 25 bp, Homo sapien
ttggatctaggtcccttgcaaaaac

SEQ ID NO: 2435800 - DNA, 25 bp, Homo sapien
tccccaggggattggatctaggtcc

SEQ ID NO: 2435801 - DNA, 25 bp, Homo sapien
ccatgctacctatcacaccacatcc

SEQ ID NO: 2435802 - DNA, 25 bp, Homo sapien
tctccatgctacctatcacaccaca

SEQ ID NO: 2435803 - DNA, 25 bp, Homo sapien
ctagaatataggaattgaacctacc

SEQ ID NO: 2435804 - DNA, 25 bp, Homo sapien
ttctccatgctacctatcacaccac

SEQ ID NO: 2435805 - DNA, 25 bp, Homo sapien
tcagaagttggtcaggggcacttcc

SEQ ID NO: 2435806 - DNA, 25 bp, Homo sapien
ggtcaggggcacttccacctgggta

SEQ ID NO: 2435807 - DNA, 25 bp, Homo sapien
tcaggggcacttccacctgggtaaa

SEQ ID NO: 2435808 - DNA, 25 bp, Homo sapien
agaagttggtcaggggcacttccac

SEQ ID NO: 2435809 - DNA, 25 bp, Homo sapien
atgagcaaacccagggcttccttaa

SEQ ID NO: 2435810 - DNA, 25 bp, Homo sapien
tgagcaaacccagggcttccttaac

SEQ ID NO: 2435811 - DNA, 25 bp, Homo sapien
ttaaccaccacctctccttcaacat

SEQ ID NO: 2435812 - DNA, 25 bp, Homo sapien
cagggcttccttaaccaccacctct

SEQ ID NO: 2435813 - DNA, 25 bp, Homo sapien
gagagcccaactcctgagaagtcct

SEQ ID NO: 2435814 - DNA, 25 bp, Homo sapien
gagcccaactcctgagaagtcctac

SEQ ID NO: 2435815 - DNA, 25 bp, Homo sapien
ctggagagcccaactcctgagaagt

SEQ ID NO: 2435816 - DNA, 25 bp, Homo sapien
tggagagcccaactcctgagaagtc

SEQ ID NO: 2435817 - DNA, 25 bp, Homo sapien
agggcaggccggatccgccaggtcc

SEQ ID NO: 2435818 - DNA, 25 bp, Homo sapien
cgaaatcaggtgttgagctgggcca

SEQ ID NO: 2435819 - DNA, 25 bp, Homo sapien
ggcaggccggatccgccaggtccat

SEQ ID NO: 2435820 - DNA, 25 bp, Homo sapien
gccagggcaggccggatccgccagg

SEQ ID NO: 2435821 - DNA, 25 bp, Homo sapien
tagcagccaatccacgttcagcctg

SEQ ID NO: 2435822 - DNA, 25 bp, Homo sapien
tccagatgttcccaggacgcgagct

SEQ ID NO: 2435823 - DNA, 25 bp, Homo sapien
acgcgagctaagtctgcccggccgg

SEQ ID NO: 2435824 - DNA, 25 bp, Homo sapien
gttcagcctggatgcgcgcccctcc

SEQ ID NO: 2435825 - DNA, 25 bp, Homo sapien
caggcaccggacacatgtatggaat

SEQ ID NO: 2435826 - DNA, 25 bp, Homo sapien
tctgcggcatgctcacacagtgtaa

SEQ ID NO: 2435827 - DNA, 25 bp, Homo sapien
taagcctccagtctaacaagtgcag

SEQ ID NO: 2435828 - DNA, 25 bp, Homo sapien
gatcttgtgggtaaactcagctctg

SEQ ID NO: 2435829 - DNA, 25 bp, Homo sapien
tgttaaaaccatagggaagaactca

SEQ ID NO: 2435830 - DNA, 25 bp, Homo sapien
gactgaatggaaccgtaagcactca

SEQ ID NO: 2435831 - DNA, 25 bp, Homo sapien
aaagtatggtctacctctgcttgcc

SEQ ID NO: 2435832 - DNA, 25 bp, Homo sapien
cccggccgcatgtaggtagttgtta

SEQ ID NO: 2435833 - DNA, 25 bp, Homo sapien
cctgccaggttttgcggctgcctga

SEQ ID NO: 2435834 - DNA, 25 bp, Homo sapien
ggttttgcccaaaggcaggcctagc

SEQ ID NO: 2435835 - DNA, 25 bp, Homo sapien
aggtaggattcagagagcccaggaa

SEQ ID NO: 2435836 - DNA, 25 bp, Homo sapien
cattttaccaaaagctcctgccagg

SEQ ID NO: 2435837 - DNA, 25 bp, Homo sapien
tggatgagtctctatggtttgtttt

SEQ ID NO: 2435838 - DNA, 25 bp, Homo sapien
gttttgccctgaagagcagaaggct

SEQ ID NO: 2435839 - DNA, 25 bp, Homo sapien
tgccctgaagagcagaaggcttctg

SEQ ID NO: 2435840 - DNA, 25 bp, Homo sapien
ttctatcagtgattcagggattgga

SEQ ID NO: 2435841 - DNA, 25 bp, Homo sapien
tctatgtcgcagcagaggagacgga

SEQ ID NO: 2435842 - DNA, 25 bp, Homo sapien
ggacattctttttcggctcgcttca

SEQ ID NO: 2435843 - DNA, 25 bp, Homo sapien
tggtcaaaatcatggagtcccagct

SEQ ID NO: 2435844 - DNA, 25 bp, Homo sapien
aatctgattgggcatgtcacctcgg

SEQ ID NO: 2435845 - DNA, 25 bp, Homo sapien
gcataaccagtgtctcttaccagga

SEQ ID NO: 2435846 - DNA, 25 bp, Homo sapien
gaaagttacagccaaatggatgcag

SEQ ID NO: 2435847 - DNA, 25 bp, Homo sapien
tacagcagtatttcccagcttaagt

SEQ ID NO: 2435848 - DNA, 25 bp, Homo sapien
tcctgacactgatgatagattgggt

SEQ ID NO: 2435849 - DNA, 25 bp, Homo sapien
gcgccaggtgccagaactcgcgatt

SEQ ID NO: 2435850 - DNA, 25 bp, Homo sapien
cagaatcggcccgttctcgggactc

SEQ ID NO: 2435851 - DNA, 25 bp, Homo sapien
tccggagggtggaagcgagaataat

SEQ ID NO: 2435852 - DNA, 25 bp, Homo sapien
aaagagctgtcgaagcagctccggg

SEQ ID NO: 2435853 - DNA, 25 bp, Homo sapien
tccgctgcggtctccttaacactcc

SEQ ID NO: 2435854 - DNA, 25 bp, Homo sapien
actccctccatccagttccgtgggc

SEQ ID NO: 2435855 - DNA, 25 bp, Homo sapien
gcggtctccttaacactccctccat

SEQ ID NO: 2435856 - DNA, 25 bp, Homo sapien
catccagttccgtgggcaccgccat

SEQ ID NO: 2435857 - DNA, 25 bp, Homo sapien
acagcctctgggccgtggcggaacc

SEQ ID NO: 2435858 - DNA, 25 bp, Homo sapien
cagcctctgggccgtggcggaaccg

SEQ ID NO: 2435859 - DNA, 25 bp, Homo sapien
ggcggtggcggtgccagcgcgcgtg

SEQ ID NO: 2435860 - DNA, 25 bp, Homo sapien
gtgccagcgcgcgtgcgtcgaacgg

SEQ ID NO: 2435861 - DNA, 25 bp, Homo sapien
gtggcggtgccagcgcgcgtgcgtc

SEQ ID NO: 2435862 - DNA, 25 bp, Homo sapien
gcgtgggcggtggcggtgccagcgc

SEQ ID NO: 2435863 - DNA, 25 bp, Homo sapien
taccgaaggagccataggtgtgccc

SEQ ID NO: 2435864 - DNA, 25 bp, Homo sapien
gatggaacgcatagactttggccct

SEQ ID NO: 2435865 - DNA, 25 bp, Homo sapien
tgggaaggaacagcacacctcgtct

SEQ ID NO: 2435866 - DNA, 25 bp, Homo sapien
agaaatgttctggtgcctctcccgc

SEQ ID NO: 2435867 - DNA, 25 bp, Homo sapien
tcatgacccgggagggccattcaca

SEQ ID NO: 2435868 - DNA, 25 bp, Homo sapien
ctgcctggcgggtggagaagtgagt

SEQ ID NO: 2435869 - DNA, 25 bp, Homo sapien
tggacgcgggtctgggtggattggc

SEQ ID NO: 2435870 - DNA, 25 bp, Homo sapien
ggatgtgggtctcggtcctgcaacc

SEQ ID NO: 2435871 - DNA, 25 bp, Homo sapien
tgcaggacagtgtgccctaaggcca

SEQ ID NO: 2435872 - DNA, 25 bp, Homo sapien
cagggtccccatggcgtatgtacaa

SEQ ID NO: 2435873 - DNA, 25 bp, Homo sapien
cacagggattgacgtggcctcagtt

SEQ ID NO: 2435874 - DNA, 25 bp, Homo sapien
catgattgtgcagccctaggaggaa

SEQ ID NO: 2435875 - DNA, 25 bp, Homo sapien
cattctcggttagtgccaaaaagct

SEQ ID NO: 2435876 - DNA, 25 bp, Homo sapien
tcctcagggctcagcgagtggcgtc

SEQ ID NO: 2435877 - DNA, 25 bp, Homo sapien
agtggcgtcggttacccatcagcaa

SEQ ID NO: 2435878 - DNA, 25 bp, Homo sapien
ccatcagcaactgggtgtcaagtgc

SEQ ID NO: 2435879 - DNA, 25 bp, Homo sapien
accataagcctctgcggcaggtgtc

SEQ ID NO: 2435880 - DNA, 25 bp, Homo sapien
gacagtgtaagtgacttgcccgcat

SEQ ID NO: 2435881 - DNA, 25 bp, Homo sapien
taaaatagcacaaaagaagagttcg

SEQ ID NO: 2435882 - DNA, 25 bp, Homo sapien
gtgtcgcactatcagctccaccatt

SEQ ID NO: 2435883 - DNA, 25 bp, Homo sapien
ccatatgtccaggtgcgccgactgg

SEQ ID NO: 2435884 - DNA, 25 bp, Homo sapien
agccatatgtccaggtgcgccgact

SEQ ID NO: 2435885 - DNA, 25 bp, Homo sapien
cagccatatgtccaggtgcgccgac

SEQ ID NO: 2435886 - DNA, 25 bp, Homo sapien
catatgtccaggtgcgccgactggg

SEQ ID NO: 2435887 - DNA, 25 bp, Homo sapien
taacgcattgcgagaaatgggcctc

SEQ ID NO: 2435888 - DNA, 25 bp, Homo sapien
tgtgagacaggcaggttagccccat

SEQ ID NO: 2435889 - DNA, 25 bp, Homo sapien
cagtcaggtcattttgcacaaggtc

SEQ ID NO: 2435890 - DNA, 25 bp, Homo sapien
taagtctaaaagtcatgcctcagcc

SEQ ID NO: 2435891 - DNA, 25 bp, Homo sapien
tatgtgcccttgtatatatgtgcgc

SEQ ID NO: 2435892 - DNA, 25 bp, Homo sapien
atgtgcccttgtatatatgtgcgct

SEQ ID NO: 2435893 - DNA, 25 bp, Homo sapien
gtgcccttgtatatatgtgcgcttg

SEQ ID NO: 2435894 - DNA, 25 bp, Homo sapien
gtatgtatgtgcccttgtatatatg

SEQ ID NO: 2435895 - DNA, 25 bp, Homo sapien
atatgtgtatgtgggtatgtgtcca

SEQ ID NO: 2435896 - DNA, 25 bp, Homo sapien
ggtatgtgtccatgtgagtgtgcat

SEQ ID NO: 2435897 - DNA, 25 bp, Homo sapien
tatatgtgtatgtgggtatgtgtcc

SEQ ID NO: 2435898 - DNA, 25 bp, Homo sapien
tgtgtatgtgggtatgtgtccatgt

SEQ ID NO: 2435899 - DNA, 25 bp, Homo sapien
tatatatgtgagtgtatgggtgtat

SEQ ID NO: 2435900 - DNA, 25 bp, Homo sapien
tgtgcatacgactgtgtatgtgcat

SEQ ID NO: 2435901 - DNA, 25 bp, Homo sapien
tgtatgtgtgcatacgactgtgtat

SEQ ID NO: 2435902 - DNA, 25 bp, Homo sapien
tgtgcatatctctgcatgtttgtgt

SEQ ID NO: 2435903 - DNA, 25 bp, Homo sapien
ccaaagcccctctcatcaacattcc

SEQ ID NO: 2435904 - DNA, 25 bp, Homo sapien
agcccctctcatcaacattcccctg

SEQ ID NO: 2435905 - DNA, 25 bp, Homo sapien
gaggaggtaagggaatgagtcccaa

SEQ ID NO: 2435906 - DNA, 25 bp, Homo sapien
ctgagaggaggtaagggaatgagtc

SEQ ID NO: 2435907 - DNA, 25 bp, Homo sapien
ggcatctgggcagccgtgctgcaca

SEQ ID NO: 2435908 - DNA, 25 bp, Homo sapien
cgctcccagtgctgcataaactgca

SEQ ID NO: 2435909 - DNA, 25 bp, Homo sapien
aatgtaaatacacccgctcccagtg

SEQ ID NO: 2435910 - DNA, 25 bp, Homo sapien
ctgcataaactgcatggagccaggg

SEQ ID NO: 2435911 - DNA, 25 bp, Homo sapien
caatgtaaatacacccgctcccagt

SEQ ID NO: 2435912 - DNA, 25 bp, Homo sapien
gaaacaaaggcaacccatcaaccag

SEQ ID NO: 2435913 - DNA, 25 bp, Homo sapien
aggaggcaccgcactagggccctcc

SEQ ID NO: 2435914 - DNA, 25 bp, Homo sapien
tcctccagaagactcggaaacaaag

SEQ ID NO: 2435915 - DNA, 25 bp, Homo sapien
cagacctgggtcaataaagggttct

SEQ ID NO: 2435916 - DNA, 25 bp, Homo sapien
gacaagaaaagcctccttgtttgct

SEQ ID NO: 2435917 - DNA, 25 bp, Homo sapien
cgggaaaagtgaagccggatgtggc

SEQ ID NO: 2435918 - DNA, 25 bp, Homo sapien
aggcaggtacccaggcctgacaaga

SEQ ID NO: 2435919 - DNA, 25 bp, Homo sapien
ttgtttgcttacactgccagcacgc

SEQ ID NO: 2435920 - DNA, 25 bp, Homo sapien
tgccaggaggggccgcacaggatgg

SEQ ID NO: 2435921 - DNA, 25 bp, Homo sapien
gccgcacaggatggcaggctgtggg

SEQ ID NO: 2435922 - DNA, 25 bp, Homo sapien
cgcacaggatggcaggctgtggggc

SEQ ID NO: 2435923 - DNA, 25 bp, Homo sapien
ggtgccaggaggggccgcacaggat

SEQ ID NO: 2435924 - DNA, 25 bp, Homo sapien
gagtccgctgaagaaaagagtcatg

SEQ ID NO: 2435925 - DNA, 25 bp, Homo sapien
gagtcatgagaagcacgaagagcac

SEQ ID NO: 2435926 - DNA, 25 bp, Homo sapien
gcacgaagagcacgccctggcagga

SEQ ID NO: 2435927 - DNA, 25 bp, Homo sapien
gatggccaggatgagtccgctgaag

SEQ ID NO: 2435928 - DNA, 25 bp, Homo sapien
agaggcagacaagggccgtgatgcc

SEQ ID NO: 2435929 - DNA, 25 bp, Homo sapien
aggcagacaagggccgtgatgccca

SEQ ID NO: 2435930 - DNA, 25 bp, Homo sapien
gagaggcagacaagggccgtgatgc

SEQ ID NO: 2435931 - DNA, 25 bp, Homo sapien
ggcagacaagggccgtgatgcccag

SEQ ID NO: 2435932 - DNA, 25 bp, Homo sapien
atcccagtgaggtaggccatggaca

SEQ ID NO: 2435933 - DNA, 25 bp, Homo sapien
cagtgaggtaggccatggacagggt

SEQ ID NO: 2435934 - DNA, 25 bp, Homo sapien
cccagtgaggtaggccatggacagg

SEQ ID NO: 2435935 - DNA, 25 bp, Homo sapien
tcccagtgaggtaggccatggacag

SEQ ID NO: 2435936 - DNA, 25 bp, Homo sapien
gacggtcaggagaatcaggttccag

SEQ ID NO: 2435937 - DNA, 25 bp, Homo sapien
caggagaatcaggttccaggggaaa

SEQ ID NO: 2435938 - DNA, 25 bp, Homo sapien
aatcaggttccaggggaaatgcctc

SEQ ID NO: 2435939 - DNA, 25 bp, Homo sapien
aaagacggtcaggagaatcaggttc

SEQ ID NO: 2435940 - DNA, 25 bp, Homo sapien
cagggtcaggtaggttgcaaagaac

SEQ ID NO: 2435941 - DNA, 25 bp, Homo sapien
ccagaacagcaagccagggtcaggt

SEQ ID NO: 2435942 - DNA, 25 bp, Homo sapien
tgggtccagaacagcaagccagggt

SEQ ID NO: 2435943 - DNA, 25 bp, Homo sapien
tcaggtaggttgcaaagaacacagc

SEQ ID NO: 2435944 - DNA, 25 bp, Homo sapien
agcctctggtgggcctctgtgaact

SEQ ID NO: 2435945 - DNA, 25 bp, Homo sapien
atcagcctctggtgggcctctgtga

SEQ ID NO: 2435946 - DNA, 25 bp, Homo sapien
catcagcctctggtgggcctctgtg

SEQ ID NO: 2435947 - DNA, 25 bp, Homo sapien
ctctggtgggcctctgtgaactcta

SEQ ID NO: 2435948 - DNA, 25 bp, Homo sapien
gggttggcctggacatagtccttga

SEQ ID NO: 2435949 - DNA, 25 bp, Homo sapien
gcctgggttggcctggacatagtcc

SEQ ID NO: 2435950 - DNA, 25 bp, Homo sapien
gttggcctggacatagtccttgaca

SEQ ID NO: 2435951 - DNA, 25 bp, Homo sapien
ctgggttggcctggacatagtcctt

SEQ ID NO: 2435952 - DNA, 25 bp, Homo sapien
taaagagagccacgacagccaaggt

SEQ ID NO: 2435953 - DNA, 25 bp, Homo sapien
cagaaagtaaagagagccacgacag

SEQ ID NO: 2435954 - DNA, 25 bp, Homo sapien
aaagtaaagagagccacgacagcca

SEQ ID NO: 2435955 - DNA, 25 bp, Homo sapien
agagccacgacagccaaggtcacca

SEQ ID NO: 2435956 - DNA, 25 bp, Homo sapien
ttctggtcatcccagctgaaagtgg

SEQ ID NO: 2435957 - DNA, 25 bp, Homo sapien
tgaagagctcatggtctccggtggg

SEQ ID NO: 2435958 - DNA, 25 bp, Homo sapien
caaagactcgacgaactttctggtc

SEQ ID NO: 2435959 - DNA, 25 bp, Homo sapien
aaaccgttgtcatagctggagctgc

SEQ ID NO: 2435960 - DNA, 25 bp, Homo sapien
gggtgagtcttcaggggtctgcgcc

SEQ ID NO: 2435961 - DNA, 25 bp, Homo sapien
cttcattgaccctccagtaggtcac

SEQ ID NO: 2435962 - DNA, 25 bp, Homo sapien
tcattgaccctccagtaggtcacgg

SEQ ID NO: 2435963 - DNA, 25 bp, Homo sapien
ttgaccctccagtaggtcacggtgg

SEQ ID NO: 2435964 - DNA, 25 bp, Homo sapien
gctagggtggagaggcaccgctgtg

SEQ ID NO: 2435965 - DNA, 25 bp, Homo sapien
ctccttcttctcgccatgcacctgc

SEQ ID NO: 2435966 - DNA, 25 bp, Homo sapien
acataggcccagctagggtggagag

SEQ ID NO: 2435967 - DNA, 25 bp, Homo sapien
ccaggggccttgttagccacggaga

SEQ ID NO: 2435968 - DNA, 25 bp, Homo sapien
gagagatagtcaccagggaaaggga

SEQ ID NO: 2435969 - DNA, 25 bp, Homo sapien
gagagagatagtcaccagggaaagg

SEQ ID NO: 2435970 - DNA, 25 bp, Homo sapien
atggagtagagtcagagagagagat

SEQ ID NO: 2435971 - DNA, 25 bp, Homo sapien
gagagagagatagtcaccagggaaa

SEQ ID NO: 2435972 - DNA, 25 bp, Homo sapien
actcttcaattcctggaactttcat

SEQ ID NO: 2435973 - DNA, 25 bp, Homo sapien
caactcttcaattcctggaactttc

SEQ ID NO: 2435974 - DNA, 25 bp, Homo sapien
aactcttcaattcctggaactttca

SEQ ID NO: 2435975 - DNA, 25 bp, Homo sapien
catggcaggttggaaatgcgagtcc

SEQ ID NO: 2435976 - DNA, 25 bp, Homo sapien
caaagggaaacgtccccatggcagg

SEQ ID NO: 2435977 - DNA, 25 bp, Homo sapien
ggcagggtctctatggttccagaaa

SEQ ID NO: 2435978 - DNA, 25 bp, Homo sapien
gatcacagaggaagagcgattcatc

SEQ ID NO: 2435979 - DNA, 25 bp, Homo sapien
cactgaactggagcggtcttctcca

SEQ ID NO: 2435980 - DNA, 25 bp, Homo sapien
caggcccaaggaccactgaactgga

SEQ ID NO: 2435981 - DNA, 25 bp, Homo sapien
ggcccaaggaccactgaactggagc

SEQ ID NO: 2435982 - DNA, 25 bp, Homo sapien
actgaactggagcggtcttctccat

SEQ ID NO: 2435983 - DNA, 25 bp, Homo sapien
tacagtcacaccagacgcccgggct

SEQ ID NO: 2435984 - DNA, 25 bp, Homo sapien
acaccagacgcccgggctgactcct

SEQ ID NO: 2435985 - DNA, 25 bp, Homo sapien
accagacgcccgggctgactcctca

SEQ ID NO: 2435986 - DNA, 25 bp, Homo sapien
agtcacaccagacgcccgggctgac

SEQ ID NO: 2435987 - DNA, 25 bp, Homo sapien
gggcctgggtatctgtgaggagcct

SEQ ID NO: 2435988 - DNA, 25 bp, Homo sapien
ggggggcctgggtatctgtgaggag

SEQ ID NO: 2435989 - DNA, 25 bp, Homo sapien
ggtatctgtgaggagccttgtaatg

SEQ ID NO: 2435990 - DNA, 25 bp, Homo sapien
cctgggtatctgtgaggagccttgt

SEQ ID NO: 2435991 - DNA, 25 bp, Homo sapien
agaggcgcgcctgcgggcaggaaga

SEQ ID NO: 2435992 - DNA, 25 bp, Homo sapien
aggagaggcgcgcctgcgggcagga

SEQ ID NO: 2435993 - DNA, 25 bp, Homo sapien
ggaggagaggcgcgcctgcgggcag

SEQ ID NO: 2435994 - DNA, 25 bp, Homo sapien
gagaggcgcgcctgcgggcaggaag

SEQ ID NO: 2435995 - DNA, 25 bp, Homo sapien
cctttcggtcctctgacttcagcaa

SEQ ID NO: 2435996 - DNA, 25 bp, Homo sapien
ctgacttcagcaaggaccacggagg

SEQ ID NO: 2435997 - DNA, 25 bp, Homo sapien
ctttcggtcctctgacttcagcaag

SEQ ID NO: 2435998 - DNA, 25 bp, Homo sapien
gcaaggaccacggaggaccttcaaa

SEQ ID NO: 2435999 - DNA, 25 bp, Homo sapien
tgaggcccgggtggccgcttgggta

SEQ ID NO: 2436000 - DNA, 25 bp, Homo sapien
agccggcgcgtaccatcggcgcggg

SEQ ID NO: 2436001 - DNA, 25 bp, Homo sapien
ttgggtaaccgcagcctgcctgcgt

SEQ ID NO: 2436002 - DNA, 25 bp, Homo sapien
tccgcgtgggttctagcaacatcca

SEQ ID NO: 2436003 - DNA, 25 bp, Homo sapien
aactttagtgatggctcttgtggag

SEQ ID NO: 2436004 - DNA, 25 bp, Homo sapien
tggagggtcagagcccggctctgga

SEQ ID NO: 2436005 - DNA, 25 bp, Homo sapien
aaggtgcagcggtaagtggaacttt

SEQ ID NO: 2436006 - DNA, 25 bp, Homo sapien
ctggccctgcacaagacgcttgact

SEQ ID NO: 2436007 - DNA, 25 bp, Homo sapien
gaagaatgcatttgaccccgcgtag

SEQ ID NO: 2436008 - DNA, 25 bp, Homo sapien
gtagaatcagagctatccaggcgcc

SEQ ID NO: 2436009 - DNA, 25 bp, Homo sapien
gatatggtctccaaaacgcgggaca

SEQ ID NO: 2436010 - DNA, 25 bp, Homo sapien
taggcaccatcagctcaagagggtt

SEQ ID NO: 2436011 - DNA, 25 bp, Homo sapien
agccaggccccaggcttgtcatccc

SEQ ID NO: 2436012 - DNA, 25 bp, Homo sapien
catcagctcactccttggtaggcct

SEQ ID NO: 2436013 - DNA, 25 bp, Homo sapien
gagccaggccccaggcttgtcatcc

SEQ ID NO: 2436014 - DNA, 25 bp, Homo sapien
gccatcgcatgtgccgctatgtgca

SEQ ID NO: 2436015 - DNA, 25 bp, Homo sapien
ttctgttgccatcgcatgtgccgct

SEQ ID NO: 2436016 - DNA, 25 bp, Homo sapien
tgttgccatcgcatgtgccgctatg

SEQ ID NO: 2436017 - DNA, 25 bp, Homo sapien
gggttctgttgccatcgcatgtgcc

SEQ ID NO: 2436018 - DNA, 25 bp, Homo sapien
gatatgggttgtgtatctcaagcct

SEQ ID NO: 2436019 - DNA, 25 bp, Homo sapien
aagtgccttaaagatatgggttgtg

SEQ ID NO: 2436020 - DNA, 25 bp, Homo sapien
tctccaccagatggaaagtgcctta

SEQ ID NO: 2436021 - DNA, 25 bp, Homo sapien
atttccgtttctccaccagatggaa

SEQ ID NO: 2436022 - DNA, 25 bp, Homo sapien
caaatgccaccatcctcatcattgt

SEQ ID NO: 2436023 - DNA, 25 bp, Homo sapien
cgaatgtcaaatgccaccatcctca

SEQ ID NO: 2436024 - DNA, 25 bp, Homo sapien
aatgtcaaatgccaccatcctcatc

SEQ ID NO: 2436025 - DNA, 25 bp, Homo sapien
tgtcaaatgccaccatcctcatcat

SEQ ID NO: 2436026 - DNA, 25 bp, Homo sapien
tctggagcacttgtgacagcgagat

SEQ ID NO: 2436027 - DNA, 25 bp, Homo sapien
tcagcagtgtctgtgtagtcgaggc

SEQ ID NO: 2436028 - DNA, 25 bp, Homo sapien
aaagctgtttcacaagccagcagcc

SEQ ID NO: 2436029 - DNA, 25 bp, Homo sapien
ccagcagcctcgtaaatatttcagc

SEQ ID NO: 2436030 - DNA, 25 bp, Homo sapien
ttcttggtgagttctgtttccattg

SEQ ID NO: 2436031 - DNA, 25 bp, Homo sapien
gtgacccagacccttgcataagaac

SEQ ID NO: 2436032 - DNA, 25 bp, Homo sapien
cataagaacacagctgttcttggtg

SEQ ID NO: 2436033 - DNA, 25 bp, Homo sapien
ccagacccttgcataagaacacagc

SEQ ID NO: 2436034 - DNA, 25 bp, Homo sapien
ccccttctctgcacaagtggccctt

SEQ ID NO: 2436035 - DNA, 25 bp, Homo sapien
acaatctctgtgggcgcccccttct

SEQ ID NO: 2436036 - DNA, 25 bp, Homo sapien
aatctctgtgggcgcccccttctct

SEQ ID NO: 2436037 - DNA, 25 bp, Homo sapien
ctctgcacaagtggcccttcctcat

SEQ ID NO: 2436038 - DNA, 25 bp, Homo sapien
gagcgccgcggagagaacccgggca

SEQ ID NO: 2436039 - DNA, 25 bp, Homo sapien
ttcgcctccaccgatgagcgccgcg

SEQ ID NO: 2436040 - DNA, 25 bp, Homo sapien
gccacctccttggggtaggtcatgg

SEQ ID NO: 2436041 - DNA, 25 bp, Homo sapien
ggtgctctgcatcttcgcctccacc

SEQ ID NO: 2436042 - DNA, 25 bp, Homo sapien
cctggtgggcgccatcctgggctcc

SEQ ID NO: 2436043 - DNA, 25 bp, Homo sapien
tgggcgccatcctgggctccctcct

SEQ ID NO: 2436044 - DNA, 25 bp, Homo sapien
ccctggtgggcgccatcctgggctc

SEQ ID NO: 2436045 - DNA, 25 bp, Homo sapien
tggtgggcgccatcctgggctccct

SEQ ID NO: 2436046 - DNA, 25 bp, Homo sapien
caatagctagtgacagccacttggc

SEQ ID NO: 2436047 - DNA, 25 bp, Homo sapien
taacatgtgggtcataccttgaacc

SEQ ID NO: 2436048 - DNA, 25 bp, Homo sapien
tctttgaggtccaaaaaaggctgcc

SEQ ID NO: 2436049 - DNA, 25 bp, Homo sapien
gaaaccaaagtgacctccagagctg

SEQ ID NO: 2436050 - DNA, 25 bp, Homo sapien
ccccgtgacaaaggtagagcaaata

SEQ ID NO: 2436051 - DNA, 25 bp, Homo sapien
gattcagaaaccaaggctaagggac

SEQ ID NO: 2436052 - DNA, 25 bp, Homo sapien
ctgtgattatctcccaaccccgtga

SEQ ID NO: 2436053 - DNA, 25 bp, Homo sapien
gccttgcatgcacggacttatctga

SEQ ID NO: 2436054 - DNA, 25 bp, Homo sapien
tctatgtggcgacctgtggttccca

SEQ ID NO: 2436055 - DNA, 25 bp, Homo sapien
tggaatcaaatcacacagtggaggc

SEQ ID NO: 2436056 - DNA, 25 bp, Homo sapien
gaagtccccatatcaggagaggagg

SEQ ID NO: 2436057 - DNA, 25 bp, Homo sapien
aaaggtcccgggcattcctctggag

SEQ ID NO: 2436058 - DNA, 25 bp, Homo sapien
ggacaaagcgctgggacccatggaa

SEQ ID NO: 2436059 - DNA, 25 bp, Homo sapien
gaagaaaatcctgcgtacaactggc

SEQ ID NO: 2436060 - DNA, 25 bp, Homo sapien
tacaactggcatgtacagctggcat

SEQ ID NO: 2436061 - DNA, 25 bp, Homo sapien
caagtgaaagggtgcgaactggagg

SEQ ID NO: 2436062 - DNA, 25 bp, Homo sapien
gagcggttgagtagaaccaccagag

SEQ ID NO: 2436063 - DNA, 25 bp, Homo sapien
tgtcatcacggctttgggtgaccct

SEQ ID NO: 2436064 - DNA, 25 bp, Homo sapien
ccaccagagaaaagcgggctgtcat

SEQ ID NO: 2436065 - DNA, 25 bp, Homo sapien
tcccatcacctcagtggagcggttg

SEQ ID NO: 2436066 - DNA, 25 bp, Homo sapien
tctatccgcttatggaagaggctct

SEQ ID NO: 2436067 - DNA, 25 bp, Homo sapien
gctttgtatggcctgaaccgctggg

SEQ ID NO: 2436068 - DNA, 25 bp, Homo sapien
gccctgcggtggtcatgaatcggtt

SEQ ID NO: 2436069 - DNA, 25 bp, Homo sapien
aagaggctctactgaacctggaggt

SEQ ID NO: 2436070 - DNA, 25 bp, Homo sapien
atcactgatactcacgttccacctc

SEQ ID NO: 2436071 - DNA, 25 bp, Homo sapien
tatttatttctggtgaggatgcatg

SEQ ID NO: 2436072 - DNA, 25 bp, Homo sapien
agagtgggggctacccaataaatca

SEQ ID NO: 2436073 - DNA, 25 bp, Homo sapien
tatttctggtgaggatgcatgcgtg

SEQ ID NO: 2436074 - DNA, 25 bp, Homo sapien
ccaccacgatctccacagggtacca

SEQ ID NO: 2436075 - DNA, 25 bp, Homo sapien
gcgtggcgcctcgtcgtccacaagt

SEQ ID NO: 2436076 - DNA, 25 bp, Homo sapien
agcagagggcgacgtcgtccaccga

SEQ ID NO: 2436077 - DNA, 25 bp, Homo sapien
gtcgtccaccgaatccacagcgtgg

SEQ ID NO: 2436078 - DNA, 25 bp, Homo sapien
tcgtccacaagtcctgggtctgggc

SEQ ID NO: 2436079 - DNA, 25 bp, Homo sapien
gggctcacaaagtcccgtgcacacg

SEQ ID NO: 2436080 - DNA, 25 bp, Homo sapien
caggtctgcgggctcacaaagtccc

SEQ ID NO: 2436081 - DNA, 25 bp, Homo sapien
tgtcggatcttgcaggagcggcagg

SEQ ID NO: 2436082 - DNA, 25 bp, Homo sapien
gtcgctgtgtctgcgtgtcggatct

SEQ ID NO: 2436083 - DNA, 25 bp, Homo sapien
gggaggaacagtgcccacgccgccc

SEQ ID NO: 2436084 - DNA, 25 bp, Homo sapien
aatggacacacaatcctcctccagg

SEQ ID NO: 2436085 - DNA, 25 bp, Homo sapien
agctgctgtagatttattctgccca

SEQ ID NO: 2436086 - DNA, 25 bp, Homo sapien
tattctgcccacaacttgggggtcc

SEQ ID NO: 2436087 - DNA, 25 bp, Homo sapien
gggtcctttctggatctcggcttct

SEQ ID NO: 2436088 - DNA, 25 bp, Homo sapien
caattcctgataccgttaaagcaaa

SEQ ID NO: 2436089 - DNA, 25 bp, Homo sapien
tatcttcacagtgcggctgctctgc

SEQ ID NO: 2436090 - DNA, 25 bp, Homo sapien
taatgccggcagctgtatcttcaca

SEQ ID NO: 2436091 - DNA, 25 bp, Homo sapien
taagctgccgactgcaggcaattcc

SEQ ID NO: 2436092 - DNA, 25 bp, Homo sapien
atttaagcatgcaagaactggctgg

SEQ ID NO: 2436093 - DNA, 25 bp, Homo sapien
caccatgaggttagtaatcatcccc

SEQ ID NO: 2436094 - DNA, 25 bp, Homo sapien
gataggtgtgcaggtagaccctacc

SEQ ID NO: 2436095 - DNA, 25 bp, Homo sapien
caaaagcagcaagcctggtatcttt

SEQ ID NO: 2436096 - DNA, 25 bp, Homo sapien
gcagagcagagtacagatgtgtcct

SEQ ID NO: 2436097 - DNA, 25 bp, Homo sapien
tcagtcaatgctgggaagtaacagg

SEQ ID NO: 2436098 - DNA, 25 bp, Homo sapien
cattgtctcacggaaatcagttcta

SEQ ID NO: 2436099 - DNA, 25 bp, Homo sapien
tagatgtggctatgttccatgggaa

SEQ ID NO: 2436100 - DNA, 25 bp, Homo sapien
caaaaaagttgccttgtcgtcctag

SEQ ID NO: 2436101 - DNA, 25 bp, Homo sapien
gcaaaaaagttgccttgtcgtccta

SEQ ID NO: 2436102 - DNA, 25 bp, Homo sapien
aagttgccttgtcgtcctaggttag

SEQ ID NO: 2436103 - DNA, 25 bp, Homo sapien
tgacagggaactagatgaaggagtc

SEQ ID NO: 2436104 - DNA, 25 bp, Homo sapien
ctgtgacagggaactagatgaagga

SEQ ID NO: 2436105 - DNA, 25 bp, Homo sapien
tgtgacagggaactagatgaaggag

SEQ ID NO: 2436106 - DNA, 25 bp, Homo sapien
gtgacagggaactagatgaaggagt

SEQ ID NO: 2436107 - DNA, 25 bp, Homo sapien
tccatatggataaagaaaggagaac

SEQ ID NO: 2436108 - DNA, 25 bp, Homo sapien
aaaacatatatccatatggataaag

SEQ ID NO: 2436109 - DNA, 25 bp, Homo sapien
tatccatatggataaagaaaggaga

SEQ ID NO: 2436110 - DNA, 25 bp, Homo sapien
catatatccatatggataaagaaag

SEQ ID NO: 2436111 - DNA, 25 bp, Homo sapien
ctttaatgttagaattttcaaacag

SEQ ID NO: 2436112 - DNA, 25 bp, Homo sapien
ttaatgttagaattttcaaacagct

SEQ ID NO: 2436113 - DNA, 25 bp, Homo sapien
tttaatgttagaattttcaaacagc

SEQ ID NO: 2436114 - DNA, 25 bp, Homo sapien
cagaggcaaggaaagcaggcgctca

SEQ ID NO: 2436115 - DNA, 25 bp, Homo sapien
gaggcaaggaaagcaggcgctcaac

SEQ ID NO: 2436116 - DNA, 25 bp, Homo sapien
agaggcaaggaaagcaggcgctcaa

SEQ ID NO: 2436117 - DNA, 25 bp, Homo sapien
aggcaaggaaagcaggcgctcaacc

SEQ ID NO: 2436118 - DNA, 25 bp, Homo sapien
gactttagccagattggcaacatcc

SEQ ID NO: 2436119 - DNA, 25 bp, Homo sapien
ttgggcacagcatgggccactattg

SEQ ID NO: 2436120 - DNA, 25 bp, Homo sapien
cattgtcactgggtctggattgggc

SEQ ID NO: 2436121 - DNA, 25 bp, Homo sapien
tattgtagggccaaagactttagcc

SEQ ID NO: 2436122 - DNA, 25 bp, Homo sapien
tttagtatgtggactctgagccact

SEQ ID NO: 2436123 - DNA, 25 bp, Homo sapien
gctaatgtgtccctgttggcctggg

SEQ ID NO: 2436124 - DNA, 25 bp, Homo sapien
cagcttggtacatggcagctatgct

SEQ ID NO: 2436125 - DNA, 25 bp, Homo sapien
ctgcaagtgaatcatgaggaaagct

SEQ ID NO: 2436126 - DNA, 25 bp, Homo sapien
gggcagttcaccaacagcttggtac

SEQ ID NO: 2436127 - DNA, 25 bp, Homo sapien
cagctcttttactgtgcggtcacag

SEQ ID NO: 2436128 - DNA, 25 bp, Homo sapien
ttttactgtgcggtcacagccagag

SEQ ID NO: 2436129 - DNA, 25 bp, Homo sapien
tttactgtgcggtcacagccagaga

SEQ ID NO: 2436130 - DNA, 25 bp, Homo sapien
ttactgtgcggtcacagccagagat

SEQ ID NO: 2436131 - DNA, 25 bp, Homo sapien
tgctcaatctcatttacacaatgca

SEQ ID NO: 2436132 - DNA, 25 bp, Homo sapien
tcaagcaatagtccaacctagcctc

SEQ ID NO: 2436133 - DNA, 25 bp, Homo sapien
ctcaagcaatagtccaacctagcct

SEQ ID NO: 2436134 - DNA, 25 bp, Homo sapien
caagcaatagtccaacctagcctcc

SEQ ID NO: 2436135 - DNA, 25 bp, Homo sapien
cacacgacagtctcgacacttcaga

SEQ ID NO: 2436136 - DNA, 25 bp, Homo sapien
cgacagtctcgacacttcagagata

SEQ ID NO: 2436137 - DNA, 25 bp, Homo sapien
gagagaccacacgacagtctcgaca

SEQ ID NO: 2436138 - DNA, 25 bp, Homo sapien
attctggatgagagaccacacgaca

SEQ ID NO: 2436139 - DNA, 25 bp, Homo sapien
gtcatgcaggcgcatccctccatta

SEQ ID NO: 2436140 - DNA, 25 bp, Homo sapien
gtggcgtgcccacactgtctgtctc

SEQ ID NO: 2436141 - DNA, 25 bp, Homo sapien
aacaaagtcatgcaggcgcatccct

SEQ ID NO: 2436142 - DNA, 25 bp, Homo sapien
tgtggcgtgcccacactgtctgtct

SEQ ID NO: 2436143 - DNA, 25 bp, Homo sapien
tgtagtttttgcaactatggattca

SEQ ID NO: 2436144 - DNA, 25 bp, Homo sapien
tcactgtagtttttgcaactatgga

SEQ ID NO: 2436145 - DNA, 25 bp, Homo sapien
ctgtagtttttgcaactatggattc

SEQ ID NO: 2436146 - DNA, 25 bp, Homo sapien
cactgtagtttttgcaactatggat

SEQ ID NO: 2436147 - DNA, 25 bp, Homo sapien
gggaccatcaacaaactgtcggcta

SEQ ID NO: 2436148 - DNA, 25 bp, Homo sapien
tttctctcttcttcagtttgaaagt

SEQ ID NO: 2436149 - DNA, 25 bp, Homo sapien
ttctctcttcttcagtttgaaagtc

SEQ ID NO: 2436150 - DNA, 25 bp, Homo sapien
tctctcttcttcagtttgaaagtct

SEQ ID NO: 2436151 - DNA, 25 bp, Homo sapien
tgattcatcagtcttgtcaaagctg

SEQ ID NO: 2436152 - DNA, 25 bp, Homo sapien
cagtgattcatcagtcttgtcaaag

SEQ ID NO: 2436153 - DNA, 25 bp, Homo sapien
ttcatcagtcttgtcaaagctgata

SEQ ID NO: 2436154 - DNA, 25 bp, Homo sapien
gattcatcagtcttgtcaaagctga

SEQ ID NO: 2436155 - DNA, 25 bp, Homo sapien
tgtgataggataacaacagatgcag

SEQ ID NO: 2436156 - DNA, 25 bp, Homo sapien
cagataacaagaatatctgacagcc

SEQ ID NO: 2436157 - DNA, 25 bp, Homo sapien
acagcctgtgttgcttgtgatagga

SEQ ID NO: 2436158 - DNA, 25 bp, Homo sapien
gataggataacaacagatgcagttc

SEQ ID NO: 2436159 - DNA, 25 bp, Homo sapien
tgctgccagatgtgtcacacatgag

SEQ ID NO: 2436160 - DNA, 25 bp, Homo sapien
ctgccagatgtgtcacacatgagca

SEQ ID NO: 2436161 - DNA, 25 bp, Homo sapien
catgagcatctctcgaatcagctga

SEQ ID NO: 2436162 - DNA, 25 bp, Homo sapien
gtcacacatgagcatctctcgaatc

SEQ ID NO: 2436163 - DNA, 25 bp, Homo sapien
ctctacatccacctgattacgtgca

SEQ ID NO: 2436164 - DNA, 25 bp, Homo sapien
tctctgtctccgtttgatctctaca

SEQ ID NO: 2436165 - DNA, 25 bp, Homo sapien
tgccactttttacggaaatcctcaa

SEQ ID NO: 2436166 - DNA, 25 bp, Homo sapien
ttgatctctacatccacctgattac

SEQ ID NO: 2436167 - DNA, 25 bp, Homo sapien
gctgtcatgcaccaggacagttaca

SEQ ID NO: 2436168 - DNA, 25 bp, Homo sapien
cagctgtcatgcaccaggacagtta

SEQ ID NO: 2436169 - DNA, 25 bp, Homo sapien
ctgtcatgcaccaggacagttacag

SEQ ID NO: 2436170 - DNA, 25 bp, Homo sapien
gcagctgtcatgcaccaggacagtt

SEQ ID NO: 2436171 - DNA, 25 bp, Homo sapien
ctgagaatctccacccggcgcacaa

SEQ ID NO: 2436172 - DNA, 25 bp, Homo sapien
tccttcactgagaatctccacccgg

SEQ ID NO: 2436173 - DNA, 25 bp, Homo sapien
atttccttcactgagaatctccacc

SEQ ID NO: 2436174 - DNA, 25 bp, Homo sapien
tcactgagaatctccacccggcgca

SEQ ID NO: 2436175 - DNA, 25 bp, Homo sapien
cattgggtagtcaattcaaatgttg

SEQ ID NO: 2436176 - DNA, 25 bp, Homo sapien
ggacattgggtagtcaattcaaatg

SEQ ID NO: 2436177 - DNA, 25 bp, Homo sapien
gggcaggacattgggtagtcaattc

SEQ ID NO: 2436178 - DNA, 25 bp, Homo sapien
gcaggacattgggtagtcaattcaa

SEQ ID NO: 2436179 - DNA, 25 bp, Homo sapien
cccttatcacttgcaggttgtcacc

SEQ ID NO: 2436180 - DNA, 25 bp, Homo sapien
tgtccatcaactacgctactcactg

SEQ ID NO: 2436181 - DNA, 25 bp, Homo sapien
cagcataatcactaaaccttgtgta

SEQ ID NO: 2436182 - DNA, 25 bp, Homo sapien
cattctctcagtcgctcagttccaa

SEQ ID NO: 2436183 - DNA, 25 bp, Homo sapien
tcatcacaagacccccttctcttaa

SEQ ID NO: 2436184 - DNA, 25 bp, Homo sapien
catcacaagacccccttctcttaaa

SEQ ID NO: 2436185 - DNA, 25 bp, Homo sapien
ctatctaccagtagtataatcttca

SEQ ID NO: 2436186 - DNA, 25 bp, Homo sapien
taccagtagtataatcttcagtaaa

SEQ ID NO: 2436187 - DNA, 25 bp, Homo sapien
ccagtagtataatcttcagtaaatc

SEQ ID NO: 2436188 - DNA, 25 bp, Homo sapien
tctaccagtagtataatcttcagta

SEQ ID NO: 2436189 - DNA, 25 bp, Homo sapien
aaggtatcttttagttggtatgaag

SEQ ID NO: 2436190 - DNA, 25 bp, Homo sapien
aacaataacacttgctctatttacc

SEQ ID NO: 2436191 - DNA, 25 bp, Homo sapien
ctatttacctcatagaatattacaa

SEQ ID NO: 2436192 - DNA, 25 bp, Homo sapien
tgtataagtttacaatctcactacc

SEQ ID NO: 2436193 - DNA, 25 bp, Homo sapien
tatttagtccatagctaggagatac

SEQ ID NO: 2436194 - DNA, 25 bp, Homo sapien
tttcaccctcatgaatacttgttta

SEQ ID NO: 2436195 - DNA, 25 bp, Homo sapien
cctattcaacgtcaattgaaaatag

SEQ ID NO: 2436196 - DNA, 25 bp, Homo sapien
ccccatgtattatttagtccatagc

SEQ ID NO: 2436197 - DNA, 25 bp, Homo sapien
gtactttaagatcctttcataggaa

SEQ ID NO: 2436198 - DNA, 25 bp, Homo sapien
ctttaagatcctttcataggaacac

SEQ ID NO: 2436199 - DNA, 25 bp, Homo sapien
cttctgcttcactgtatcgaaagtc

SEQ ID NO: 2436200 - DNA, 25 bp, Homo sapien
cactgtatcgaaagtctctaataca

SEQ ID NO: 2436201 - DNA, 25 bp, Homo sapien
ctatcacaatccagcggcagacgca

SEQ ID NO: 2436202 - DNA, 25 bp, Homo sapien
tatcacaatccagcggcagacgcac

SEQ ID NO: 2436203 - DNA, 25 bp, Homo sapien
ctggtctggcacccccactactcac

SEQ ID NO: 2436204 - DNA, 25 bp, Homo sapien
ctgggccacccttcacttcgctccg

SEQ ID NO: 2436205 - DNA, 25 bp, Homo sapien
ccttcacttcgctccgcgcctcacc

SEQ ID NO: 2436206 - DNA, 25 bp, Homo sapien
cacccttcacttcgctccgcgcctc

SEQ ID NO: 2436207 - DNA, 25 bp, Homo sapien
gggccacccttcacttcgctccgcg

SEQ ID NO: 2436208 - DNA, 25 bp, Homo sapien
ttgactaagggcaagtggtacttcc

SEQ ID NO: 2436209 - DNA, 25 bp, Homo sapien
actgtctgcgggactagggcccttg

SEQ ID NO: 2436210 - DNA, 25 bp, Homo sapien
gcactccactgggaatcggaaaaat

SEQ ID NO: 2436211 - DNA, 25 bp, Homo sapien
gcccttggaaacgattaactgaaca

SEQ ID NO: 2436212 - DNA, 25 bp, Homo sapien
tactggctggagcatacaagaagcg

SEQ ID NO: 2436213 - DNA, 25 bp, Homo sapien
ttgcaaccgggtaatgaaaactctg

SEQ ID NO: 2436214 - DNA, 25 bp, Homo sapien
tagaacttggcattgtgctagcaca

SEQ ID NO: 2436215 - DNA, 25 bp, Homo sapien
aacgcatggctacccgcaatttgga

SEQ ID NO: 2436216 - DNA, 25 bp, Homo sapien
gttgggggttaagtgagtgtgatgc

SEQ ID NO: 2436217 - DNA, 25 bp, Homo sapien
gggttaagtgagtgtgatgcttctt

SEQ ID NO: 2436218 - DNA, 25 bp, Homo sapien
taagtgagtgtgatgcttcttgagt

SEQ ID NO: 2436219 - DNA, 25 bp, Homo sapien
ttaagtgagtgtgatgcttcttgag

SEQ ID NO: 2436220 - DNA, 25 bp, Homo sapien
acagcccgatgcgtgtcttcattct

SEQ ID NO: 2436221 - DNA, 25 bp, Homo sapien
cgtctggccacagcccgatgcgtgt

SEQ ID NO: 2436222 - DNA, 25 bp, Homo sapien
cctgatccgatgtcccgacaggcga

SEQ ID NO: 2436223 - DNA, 25 bp, Homo sapien
gaactgtcatcgacgatccctggac

SEQ ID NO: 2436224 - DNA, 25 bp, Homo sapien
tgggagaaaggactttgggccacca

SEQ ID NO: 2436225 - DNA, 25 bp, Homo sapien
agctgccatcctccgcagccacctg

SEQ ID NO: 2436226 - DNA, 25 bp, Homo sapien
aagctgaggcccatggtgaacaggc

SEQ ID NO: 2436227 - DNA, 25 bp, Homo sapien
ggcgctgcagcccttgtgcaacgtg

SEQ ID NO: 2436228 - DNA, 25 bp, Homo sapien
tcctgtggcagccagtagtcattcc

SEQ ID NO: 2436229 - DNA, 25 bp, Homo sapien
ccttggaggcgtagaaacagagaat

SEQ ID NO: 2436230 - DNA, 25 bp, Homo sapien
tcctgtctggttggaccttggaggc

SEQ ID NO: 2436231 - DNA, 25 bp, Homo sapien
ctgtggcagccagtagtcattcctg

SEQ ID NO: 2436232 - DNA, 25 bp, Homo sapien
cgaagatacactcagacaaagggat

SEQ ID NO: 2436233 - DNA, 25 bp, Homo sapien
gggcccaacccgaagatacactcag

SEQ ID NO: 2436234 - DNA, 25 bp, Homo sapien
aacccgaagatacactcagacaaag

SEQ ID NO: 2436235 - DNA, 25 bp, Homo sapien
ccctctccactcataaaccatcagg

SEQ ID NO: 2436236 - DNA, 25 bp, Homo sapien
aaggtctgggacgtattggatacta

SEQ ID NO: 2436237 - DNA, 25 bp, Homo sapien
ttgcagctactggtgatgattgtgg

SEQ ID NO: 2436238 - DNA, 25 bp, Homo sapien
ttttgcagctactggtgatgattgt

SEQ ID NO: 2436239 - DNA, 25 bp, Homo sapien
ataaggtctgggacgtattggatac

SEQ ID NO: 2436240 - DNA, 25 bp, Homo sapien
gccaagtctccaagaatgacctgta

SEQ ID NO: 2436241 - DNA, 25 bp, Homo sapien
agcggctgtctctgaagcgggcact

SEQ ID NO: 2436242 - DNA, 25 bp, Homo sapien
caagctcgacgaggtggctgcctct

SEQ ID NO: 2436243 - DNA, 25 bp, Homo sapien
gtcacgctgtgcaacctcaacgagt

SEQ ID NO: 2436244 - DNA, 25 bp, Homo sapien
agacacacagatggcagatgaaaag

SEQ ID NO: 2436245 - DNA, 25 bp, Homo sapien
gtatgagataccagacacacagatg

SEQ ID NO: 2436246 - DNA, 25 bp, Homo sapien
acacacagatggcagatgaaaagca

SEQ ID NO: 2436247 - DNA, 25 bp, Homo sapien
acacagatggcagatgaaaagcagc

SEQ ID NO: 2436248 - DNA, 25 bp, Homo sapien
aaaagcagggtgctcacttctgtcc

SEQ ID NO: 2436249 - DNA, 25 bp, Homo sapien
gagaccattgaacagaagaaggcct

SEQ ID NO: 2436250 - DNA, 25 bp, Homo sapien
caaaccctgttgtcttggtaagtgg

SEQ ID NO: 2436251 - DNA, 25 bp, Homo sapien
ggcgtggctccctatcatccaaaag

SEQ ID NO: 2436252 - DNA, 25 bp, Homo sapien
ttatcataaaatctggaagcaggct

SEQ ID NO: 2436253 - DNA, 25 bp, Homo sapien
ggcaacaaagttccaaaacagaatc

SEQ ID NO: 2436254 - DNA, 25 bp, Homo sapien
ctgggatgggacaggctgaccatta

SEQ ID NO: 2436255 - DNA, 25 bp, Homo sapien
ccccaatacaaaggatgctttagag

SEQ ID NO: 2436256 - DNA, 25 bp, Homo sapien
gatgaagctattactccaagcccct

SEQ ID NO: 2436257 - DNA, 25 bp, Homo sapien
ttctttgtgcggctgcatcggcggc

SEQ ID NO: 2436258 - DNA, 25 bp, Homo sapien
tcacgcggcctctctattgcagagc

SEQ ID NO: 2436259 - DNA, 25 bp, Homo sapien
tggccagcacgccttttccgctagt

SEQ ID NO: 2436260 - DNA, 25 bp, Homo sapien
gagttaaatgctcctagccggcaga

SEQ ID NO: 2436261 - DNA, 25 bp, Homo sapien
aagtctgcattgtaggctccgggaa

SEQ ID NO: 2436262 - DNA, 25 bp, Homo sapien
ctgtcagccgatgagcccaggagaa

SEQ ID NO: 2436263 - DNA, 25 bp, Homo sapien
agtcacctgctccttatctgggcta

SEQ ID NO: 2436264 - DNA, 25 bp, Homo sapien
ccaacattgccagcgaggtggctga

SEQ ID NO: 2436265 - DNA, 25 bp, Homo sapien
gagggccccaatgggctgaagctca

SEQ ID NO: 2436266 - DNA, 25 bp, Homo sapien
tgagacaaccattggtgagagcccc

SEQ ID NO: 2436267 - DNA, 25 bp, Homo sapien
tcagggcctgcttagggaaacacag

SEQ ID NO: 2436268 - DNA, 25 bp, Homo sapien
tcctgaactgtcaagccactggcag

SEQ ID NO: 2436269 - DNA, 25 bp, Homo sapien
ccagtaatcctgttaaagggctgaa

SEQ ID NO: 2436270 - DNA, 25 bp, Homo sapien
aagaagtatcttagccacaggagcg

SEQ ID NO: 2436271 - DNA, 25 bp, Homo sapien
tctcatcttttcactggaggacagg

SEQ ID NO: 2436272 - DNA, 25 bp, Homo sapien
tacaggcgcgcactgccatgcccag

SEQ ID NO: 2436273 - DNA, 25 bp, Homo sapien
gcaccaccacgctgggctaattttt

SEQ ID NO: 2436274 - DNA, 25 bp, Homo sapien
ctccgagtagcagggacgcaggcat

SEQ ID NO: 2436275 - DNA, 25 bp, Homo sapien
agcctccgagtagcagggacgcagg

SEQ ID NO: 2436276 - DNA, 25 bp, Homo sapien
tagttacatgggttgcaggtttgac

SEQ ID NO: 2436277 - DNA, 25 bp, Homo sapien
ccagagcaaacctgtggacagtgga

SEQ ID NO: 2436278 - DNA, 25 bp, Homo sapien
cactaaggctgttgctctttcaggg

SEQ ID NO: 2436279 - DNA, 25 bp, Homo sapien
gaccatacaggaagagcactcatta

SEQ ID NO: 2436280 - DNA, 25 bp, Homo sapien
tagctacaccaaccaatccagtttg

SEQ ID NO: 2436281 - DNA, 25 bp, Homo sapien
tactagctgcttgaccttagcaagt

SEQ ID NO: 2436282 - DNA, 25 bp, Homo sapien
catcttttgtcagattagctacacc

SEQ ID NO: 2436283 - DNA, 25 bp, Homo sapien
aagggtttgactccttactagctgc

SEQ ID NO: 2436284 - DNA, 25 bp, Homo sapien
gaaactgcggatagagtcactgaag

SEQ ID NO: 2436285 - DNA, 25 bp, Homo sapien
tctgaatcagacctggaaaagctct

SEQ ID NO: 2436286 - DNA, 25 bp, Homo sapien
gactcttcctaccatgcacagaaag

SEQ ID NO: 2436287 - DNA, 25 bp, Homo sapien
taaaatgtaagcaccctggctgact

SEQ ID NO: 2436288 - DNA, 25 bp, Homo sapien
taattcaagatgcagccaaatgtgg

SEQ ID NO: 2436289 - DNA, 25 bp, Homo sapien
tgcagtctcccaatcacagaagagt

SEQ ID NO: 2436290 - DNA, 25 bp, Homo sapien
taagaccgtgaacagctcacccagt

SEQ ID NO: 2436291 - DNA, 25 bp, Homo sapien
tttagagtgtcaagagccaagggca

SEQ ID NO: 2436292 - DNA, 25 bp, Homo sapien
atgtgaccattcacccgattggcac

SEQ ID NO: 2436293 - DNA, 25 bp, Homo sapien
catgtgaccattcacccgattggca

SEQ ID NO: 2436294 - DNA, 25 bp, Homo sapien
agtagctgcctcccatgtgaccatt

SEQ ID NO: 2436295 - DNA, 25 bp, Homo sapien
gctgctctccacatcactgcgatca

SEQ ID NO: 2436296 - DNA, 25 bp, Homo sapien
agggactttttgtgcaggtggtcac

SEQ ID NO: 2436297 - DNA, 25 bp, Homo sapien
ggactttttgtgcaggtggtcacat

SEQ ID NO: 2436298 - DNA, 25 bp, Homo sapien
tgagctgctctccacatcactgcga

SEQ ID NO: 2436299 - DNA, 25 bp, Homo sapien
gaaagaactgtaagacacctaagct

SEQ ID NO: 2436300 - DNA, 25 bp, Homo sapien
tgggtgggatgagaccaaagacaga

SEQ ID NO: 2436301 - DNA, 25 bp, Homo sapien
aagaactgtaagacacctaagctca

SEQ ID NO: 2436302 - DNA, 25 bp, Homo sapien
ctgggtgggatgagaccaaagacag

SEQ ID NO: 2436303 - DNA, 25 bp, Homo sapien
gcagtcaatgagaaaagaatcccag

SEQ ID NO: 2436304 - DNA, 25 bp, Homo sapien
gaatcccagttctaatcatgctacc

SEQ ID NO: 2436305 - DNA, 25 bp, Homo sapien
gaaacttcagcatccccaagataca

SEQ ID NO: 2436306 - DNA, 25 bp, Homo sapien
tgaagcatttggattacagcagcat

SEQ ID NO: 2436307 - DNA, 25 bp, Homo sapien
aaagagtggagagtacagggtctaa

SEQ ID NO: 2436308 - DNA, 25 bp, Homo sapien
gagtacagggtctaatccttcctgg

SEQ ID NO: 2436309 - DNA, 25 bp, Homo sapien
aagagatgaaactgtccagctcccg

SEQ ID NO: 2436310 - DNA, 25 bp, Homo sapien
tcccgccaggcatagaaaaaaggaa

SEQ ID NO: 2436311 - DNA, 25 bp, Homo sapien
taacaaaagccattcctaagggaca

SEQ ID NO: 2436312 - DNA, 25 bp, Homo sapien
accttgtggtggcttgtgaactacc

SEQ ID NO: 2436313 - DNA, 25 bp, Homo sapien
gagatgtccagtagctacagcaaga

SEQ ID NO: 2436314 - DNA, 25 bp, Homo sapien
tagtatcagtacctgctcaagcaga

SEQ ID NO: 2436315 - DNA, 25 bp, Homo sapien
cgaagaggcgaagactttggagccc

SEQ ID NO: 2436316 - DNA, 25 bp, Homo sapien
gagagaacgtctgttgagtaatccc

SEQ ID NO: 2436317 - DNA, 25 bp, Homo sapien
cctgcttgagtagatggggctcacc

SEQ ID NO: 2436318 - DNA, 25 bp, Homo sapien
tttggagccctaggctttttgcttg

SEQ ID NO: 2436319 - DNA, 25 bp, Homo sapien
cattgaggagccaccatgaagcata

SEQ ID NO: 2436320 - DNA, 25 bp, Homo sapien
gattatctcccaactctcaaagagg

SEQ ID NO: 2436321 - DNA, 25 bp, Homo sapien
ctcaaagagggtcgtgttcagaatc

SEQ ID NO: 2436322 - DNA, 25 bp, Homo sapien
caatccgtgcaattaggtaggacca

SEQ ID NO: 2436323 - DNA, 25 bp, Homo sapien
tctagagtcaaagctcagcagacag

SEQ ID NO: 2436324 - DNA, 25 bp, Homo sapien
ggccaatagtcagattctagagtca

SEQ ID NO: 2436325 - DNA, 25 bp, Homo sapien
gaagagggaggccaatagtcagatt

SEQ ID NO: 2436326 - DNA, 25 bp, Homo sapien
tagtcagattctagagtcaaagctc

SEQ ID NO: 2436327 - DNA, 25 bp, Homo sapien
tcattaggctcatacctaccacaac

SEQ ID NO: 2436328 - DNA, 25 bp, Homo sapien
ttaggctcatacctaccacaactct

SEQ ID NO: 2436329 - DNA, 25 bp, Homo sapien
tacctaccacaactctacagcccta

SEQ ID NO: 2436330 - DNA, 25 bp, Homo sapien
taggctcatacctaccacaactcta

SEQ ID NO: 2436331 - DNA, 25 bp, Homo sapien
cacagagccgctgatacttggcata

SEQ ID NO: 2436332 - DNA, 25 bp, Homo sapien
cttggcataattggccagtttggct

SEQ ID NO: 2436333 - DNA, 25 bp, Homo sapien
aagatcacaaaaagggtgtcacaga

SEQ ID NO: 2436334 - DNA, 25 bp, Homo sapien
ggatagattcctagtcgtgtaacca

SEQ ID NO: 2436335 - DNA, 25 bp, Homo sapien
ctggagaaaggaagaaagaattgag

SEQ ID NO: 2436336 - DNA, 25 bp, Homo sapien
tgtaggagaaggagataagcccaat

SEQ ID NO: 2436337 - DNA, 25 bp, Homo sapien
gagttcccactcgaaccatattgtt

SEQ ID NO: 2436338 - DNA, 25 bp, Homo sapien
tgtagacacatgatcagagttccca

SEQ ID NO: 2436339 - DNA, 25 bp, Homo sapien
taagcccaatggtgaccaagtgatg

SEQ ID NO: 2436340 - DNA, 25 bp, Homo sapien
tgagaaaacataagggaccaataga

SEQ ID NO: 2436341 - DNA, 25 bp, Homo sapien
ggaccaatagaaggccaattccatg

SEQ ID NO: 2436342 - DNA, 25 bp, Homo sapien
ccaattccatgatataatagtgata

SEQ ID NO: 2436343 - DNA, 25 bp, Homo sapien
catgatataatagtgataaagccca

SEQ ID NO: 2436344 - DNA, 25 bp, Homo sapien
gatagttatgccagcactgtcggat

SEQ ID NO: 2436345 - DNA, 25 bp, Homo sapien
ctgaaatggatagttatgccagcac

SEQ ID NO: 2436346 - DNA, 25 bp, Homo sapien
agcactgtcggatgtcccagaacca

SEQ ID NO: 2436347 - DNA, 25 bp, Homo sapien
gtcggatgtcccagaaccaaggtga

SEQ ID NO: 2436348 - DNA, 25 bp, Homo sapien
gagaaatctaattccatagcagaat

SEQ ID NO: 2436349 - DNA, 25 bp, Homo sapien
agaaatctaattccatagcagaata

SEQ ID NO: 2436350 - DNA, 25 bp, Homo sapien
tatagcaagcaagctagtactccct

SEQ ID NO: 2436351 - DNA, 25 bp, Homo sapien
gcctctgaggctacggaagtcaaga

SEQ ID NO: 2436352 - DNA, 25 bp, Homo sapien
cagacaggataatgagaaaaagctc

SEQ ID NO: 2436353 - DNA, 25 bp, Homo sapien
actggtgagaaagaggatcaattcc

SEQ ID NO: 2436354 - DNA, 25 bp, Homo sapien
taagtacagttataaggatttactc

SEQ ID NO: 2436355 - DNA, 25 bp, Homo sapien
acagttataaggatttactcccaat

SEQ ID NO: 2436356 - DNA, 25 bp, Homo sapien
ataagtacagttataaggatttact

SEQ ID NO: 2436357 - DNA, 25 bp, Homo sapien
gtacagttataaggatttactccca

SEQ ID NO: 2436358 - DNA, 25 bp, Homo sapien
cacacctagcttagtggcaacatgc

SEQ ID NO: 2436359 - DNA, 25 bp, Homo sapien
tagcttagtggcaacatgcccaaga

SEQ ID NO: 2436360 - DNA, 25 bp, Homo sapien
gaaccacacctagcttagtggcaac

SEQ ID NO: 2436361 - DNA, 25 bp, Homo sapien
caaaatagaaccacacctagcttag

SEQ ID NO: 2436362 - DNA, 25 bp, Homo sapien
agcattggatttttcggacattcca

SEQ ID NO: 2436363 - DNA, 25 bp, Homo sapien
cggacattccaatccagctgctttg

SEQ ID NO: 2436364 - DNA, 25 bp, Homo sapien
tccgatggcgaaaccagcattggat

SEQ ID NO: 2436365 - DNA, 25 bp, Homo sapien
ttgtcctgattcctccgatggcgaa

SEQ ID NO: 2436366 - DNA, 25 bp, Homo sapien
taaacttgacatacgtagggcccaa

SEQ ID NO: 2436367 - DNA, 25 bp, Homo sapien
gctgctgggcctaaaactcaaacct

SEQ ID NO: 2436368 - DNA, 25 bp, Homo sapien
tataaccagagtcagaacacccgtc

SEQ ID NO: 2436369 - DNA, 25 bp, Homo sapien
caatcccattgactagctgagcgac

SEQ ID NO: 2436370 - DNA, 25 bp, Homo sapien
gatgccaatacagagtgcacagggt

SEQ ID NO: 2436371 - DNA, 25 bp, Homo sapien
tggtaatagatatgaacaccttttc

SEQ ID NO: 2436372 - DNA, 25 bp, Homo sapien
tgaacaccttttcaaggatggcatt

SEQ ID NO: 2436373 - DNA, 25 bp, Homo sapien
ccactgtcctcgatgccaatacaga

SEQ ID NO: 2436374 - DNA, 25 bp, Homo sapien
tgtaatggagaaaacccacgggcca

SEQ ID NO: 2436375 - DNA, 25 bp, Homo sapien
ggcacaaaggaggtgattaataaat

SEQ ID NO: 2436376 - DNA, 25 bp, Homo sapien
tttagagatgcataatcttgagccc

SEQ ID NO: 2436377 - DNA, 25 bp, Homo sapien
ggtgattcacatgtccattaaaatg

SEQ ID NO: 2436378 - DNA, 25 bp, Homo sapien
atgtatatgaaagaccctggcacaa

SEQ ID NO: 2436379 - DNA, 25 bp, Homo sapien
ttcatcatctaaaagaagaggttat

SEQ ID NO: 2436380 - DNA, 25 bp, Homo sapien
aggttatatcaagcagagtcccaag

SEQ ID NO: 2436381 - DNA, 25 bp, Homo sapien
gaagaggttatatcaagcagagtcc

SEQ ID NO: 2436382 - DNA, 25 bp, Homo sapien
taaaagaagaggttatatcaagcag

SEQ ID NO: 2436383 - DNA, 25 bp, Homo sapien
ccctcgttagttcagagttcggtga

SEQ ID NO: 2436384 - DNA, 25 bp, Homo sapien
ggtctatattctgctcacctcggtg

SEQ ID NO: 2436385 - DNA, 25 bp, Homo sapien
gttcggtgaaaagcataaagctact

SEQ ID NO: 2436386 - DNA, 25 bp, Homo sapien
catggagtggacttaacaatctaga

SEQ ID NO: 2436387 - DNA, 25 bp, Homo sapien
agtgagcccgtcatttcaagaaaag

SEQ ID NO: 2436388 - DNA, 25 bp, Homo sapien
taactataataagtgagcccgtcat

SEQ ID NO: 2436389 - DNA, 25 bp, Homo sapien
tgcctttcagcctgacaacttctca

SEQ ID NO: 2436390 - DNA, 25 bp, Homo sapien
caagtgaaacttagaatgtttagaa

SEQ ID NO: 2436391 - DNA, 25 bp, Homo sapien
aaagctcattaatatggcttcagat

SEQ ID NO: 2436392 - DNA, 25 bp, Homo sapien
ttcagattctacctaggaatcaacg

SEQ ID NO: 2436393 - DNA, 25 bp, Homo sapien
aggaatcaacgtttaagaaactgct

SEQ ID NO: 2436394 - DNA, 25 bp, Homo sapien
caacgtttaagaaactgctacttgt

SEQ ID NO: 2436395 - DNA, 25 bp, Homo sapien
gaggccggagttctagcttttagca

SEQ ID NO: 2436396 - DNA, 25 bp, Homo sapien
gtatgttgcaacctctgaaaagctg

SEQ ID NO: 2436397 - DNA, 25 bp, Homo sapien
taggaaaagatgaacggccctatca

SEQ ID NO: 2436398 - DNA, 25 bp, Homo sapien
taactgtctgtaaaaggaggccgga

SEQ ID NO: 2436399 - DNA, 25 bp, Homo sapien
tcctaccaacaaacgtgcatgagtt

SEQ ID NO: 2436400 - DNA, 25 bp, Homo sapien
tcatctgtaggacccttggaggttg

SEQ ID NO: 2436401 - DNA, 25 bp, Homo sapien
caactccggatctaacattgaaggg

SEQ ID NO: 2436402 - DNA, 25 bp, Homo sapien
caattctcggaaactcaagcgtcct

SEQ ID NO: 2436403 - DNA, 25 bp, Homo sapien
tccagatcagcccagctcacgttct

SEQ ID NO: 2436404 - DNA, 25 bp, Homo sapien
tcacgaagaagatgcccgccgccag

SEQ ID NO: 2436405 - DNA, 25 bp, Homo sapien
cgttctcgggtagccagaagcgctc

SEQ ID NO: 2436406 - DNA, 25 bp, Homo sapien
gcgggaacaccgagaggatgtgccg

SEQ ID NO: 2436407 - DNA, 25 bp, Homo sapien
gctgccgccacagccaacggaaccc

SEQ ID NO: 2436408 - DNA, 25 bp, Homo sapien
agccaccgccgccacaagcgtcagc

SEQ ID NO: 2436409 - DNA, 25 bp, Homo sapien
cacagccaacggaacccgcggggag

SEQ ID NO: 2436410 - DNA, 25 bp, Homo sapien
gccacaagcgtcagctgccgccaca

SEQ ID NO: 2436411 - DNA, 25 bp, Homo sapien
tatacctcaggacgtcgagttcagg

SEQ ID NO: 2436412 - DNA, 25 bp, Homo sapien
cattttgacaaagggcagtggctcg

SEQ ID NO: 2436413 - DNA, 25 bp, Homo sapien
gaatttaaggcccagcatcattgca

SEQ ID NO: 2436414 - DNA, 25 bp, Homo sapien
gacagcagatctctctaagcaccga

SEQ ID NO: 2436415 - DNA, 25 bp, Homo sapien
tccacatcctgggatttctgattct

SEQ ID NO: 2436416 - DNA, 25 bp, Homo sapien
acagagagctctttgaccacttctc

SEQ ID NO: 2436417 - DNA, 25 bp, Homo sapien
cctgggatttctgattctgagtagt

SEQ ID NO: 2436418 - DNA, 25 bp, Homo sapien
cataataccgatttctctttatctg

SEQ ID NO: 2436419 - DNA, 25 bp, Homo sapien
ggtgttgtctacaaaactcgaccaa

SEQ ID NO: 2436420 - DNA, 25 bp, Homo sapien
tccaaactatgaccttccttacttc

SEQ ID NO: 2436421 - DNA, 25 bp, Homo sapien
cccattcttcttagaagccttggca

SEQ ID NO: 2436422 - DNA, 25 bp, Homo sapien
caccattttctacaagattctcatt

SEQ ID NO: 2436423 - DNA, 25 bp, Homo sapien
caggacacccaccttagcaataggg

SEQ ID NO: 2436424 - DNA, 25 bp, Homo sapien
tcagatctagatcgacatcctcagg

SEQ ID NO: 2436425 - DNA, 25 bp, Homo sapien
catcctcaggaacttcgggcttgct

SEQ ID NO: 2436426 - DNA, 25 bp, Homo sapien
tgctacagtgaatgggcggcttctt

SEQ ID NO: 2436427 - DNA, 25 bp, Homo sapien
caagagacgctccattggatagact

SEQ ID NO: 2436428 - DNA, 25 bp, Homo sapien
tgcaataggagcaacggaagcagct

SEQ ID NO: 2436429 - DNA, 25 bp, Homo sapien
cggaagcagctgatgtgaaacacct

SEQ ID NO: 2436430 - DNA, 25 bp, Homo sapien
tgaaacacctgctggttggccaaga

SEQ ID NO: 2436431 - DNA, 25 bp, Homo sapien
gcgatgagttagcactgtcttgaga

SEQ ID NO: 2436432 - DNA, 25 bp, Homo sapien
gcatgggcagcgatgagttagcact

SEQ ID NO: 2436433 - DNA, 25 bp, Homo sapien
cactgtcttgagatggaccctagaa

SEQ ID NO: 2436434 - DNA, 25 bp, Homo sapien
gagatggaccctagaatttactttg

SEQ ID NO: 2436435 - DNA, 25 bp, Homo sapien
tatgagcatgagttgggagcagcac

SEQ ID NO: 2436436 - DNA, 25 bp, Homo sapien
taatccaaacgagtgaagtagcccc

SEQ ID NO: 2436437 - DNA, 25 bp, Homo sapien
aaaacccgaggtgtgtgactatgca

SEQ ID NO: 2436438 - DNA, 25 bp, Homo sapien
tctacctgaggctggaacatatccc

SEQ ID NO: 2436439 - DNA, 25 bp, Homo sapien
aacatggcaaaatcacatctcttaa

SEQ ID NO: 2436440 - DNA, 25 bp, Homo sapien
gaaacatggcaaaatcacatctctt

SEQ ID NO: 2436441 - DNA, 25 bp, Homo sapien
ggaaacatggcaaaatcacatctct

SEQ ID NO: 2436442 - DNA, 25 bp, Homo sapien
catggcaaaatcacatctcttaaaa

SEQ ID NO: 2436443 - DNA, 25 bp, Homo sapien
caggctgttgaacctcactcttaac

SEQ ID NO: 2436444 - DNA, 25 bp, Homo sapien
ttagtggcttgggatggacaggctg

SEQ ID NO: 2436445 - DNA, 25 bp, Homo sapien
ggacaggctgttgaacctcactctt

SEQ ID NO: 2436446 - DNA, 25 bp, Homo sapien
tggcttgggatggacaggctgttga

SEQ ID NO: 2436447 - DNA, 25 bp, Homo sapien
tccttaagccatgaagtgtgtaaag

SEQ ID NO: 2436448 - DNA, 25 bp, Homo sapien
taaaggacattcaagcattagccct

SEQ ID NO: 2436449 - DNA, 25 bp, Homo sapien
tgacagtaatgggaacacccctgaa

SEQ ID NO: 2436450 - DNA, 25 bp, Homo sapien
cattagcccttaaattcaagtagag

SEQ ID NO: 2436451 - DNA, 25 bp, Homo sapien
gtggaacggactgccaggctattct

SEQ ID NO: 2436452 - DNA, 25 bp, Homo sapien
tcttcggcaggggtggaacggactg

SEQ ID NO: 2436453 - DNA, 25 bp, Homo sapien
gaacggactgccaggctattctcat

SEQ ID NO: 2436454 - DNA, 25 bp, Homo sapien
gggtggaacggactgccaggctatt

SEQ ID NO: 2436455 - DNA, 25 bp, Homo sapien
actggctgcctaggggaaataacgg

SEQ ID NO: 2436456 - DNA, 25 bp, Homo sapien
ctggctgcctaggggaaataacggg

SEQ ID NO: 2436457 - DNA, 25 bp, Homo sapien
ctgctgactccagtcagtcactggc

SEQ ID NO: 2436458 - DNA, 25 bp, Homo sapien
tggctgcctaggggaaataacgggc

SEQ ID NO: 2436459 - DNA, 25 bp, Homo sapien
gattcacagtcgcactaatgtcctt

SEQ ID NO: 2436460 - DNA, 25 bp, Homo sapien
ggtattggttaacaaaagctaggca

SEQ ID NO: 2436461 - DNA, 25 bp, Homo sapien
gccaaaaggatagctaagggtctga

SEQ ID NO: 2436462 - DNA, 25 bp, Homo sapien
taaggcagctgagggtttgtaaacc

SEQ ID NO: 2436463 - DNA, 25 bp, Homo sapien
gagaacatgataattcccctgacat

SEQ ID NO: 2436464 - DNA, 25 bp, Homo sapien
ggtgtcaataagtgtaacagaagca

SEQ ID NO: 2436465 - DNA, 25 bp, Homo sapien
tccaactaagcttgagaactgttgc

SEQ ID NO: 2436466 - DNA, 25 bp, Homo sapien
gaagaatggcgtcaagggtgtcaat

SEQ ID NO: 2436467 - DNA, 25 bp, Homo sapien
gagatggggtttcaccctgtgggct

SEQ ID NO: 2436468 - DNA, 25 bp, Homo sapien
atggggtttcaccctgtgggctagg

SEQ ID NO: 2436469 - DNA, 25 bp, Homo sapien
gcatgcacccccacacccggctttt

SEQ ID NO: 2436470 - DNA, 25 bp, Homo sapien
ggcatgcacccccacacccggcttt

SEQ ID NO: 2436471 - DNA, 25 bp, Homo sapien
cttcctgatgggtgatgcagacctc

SEQ ID NO: 2436472 - DNA, 25 bp, Homo sapien
gaattttgatttcgccaccactggc

SEQ ID NO: 2436473 - DNA, 25 bp, Homo sapien
tatgaattttgatttcgccaccact

SEQ ID NO: 2436474 - DNA, 25 bp, Homo sapien
tttatgaattttgatttcgccacca

SEQ ID NO: 2436475 - DNA, 25 bp, Homo sapien
ttgatttcgccaccactggctttca

SEQ ID NO: 2436476 - DNA, 25 bp, Homo sapien
tctaagaagcctcgggtcaaatcaa

SEQ ID NO: 2436477 - DNA, 25 bp, Homo sapien
gaggaaacaatttatggccaccagg

SEQ ID NO: 2436478 - DNA, 25 bp, Homo sapien
tacatatataaatgcccggcctgga

SEQ ID NO: 2436479 - DNA, 25 bp, Homo sapien
taaaatcaacatagaacctgggtgc

SEQ ID NO: 2436480 - DNA, 25 bp, Homo sapien
ttcttccctcaacaaccaagataaa

SEQ ID NO: 2436481 - DNA, 25 bp, Homo sapien
gaaactctcaatgatactcactggt

SEQ ID NO: 2436482 - DNA, 25 bp, Homo sapien
gaatatgctaagtatcacaagattg

SEQ ID NO: 2436483 - DNA, 25 bp, Homo sapien
aagttgggagtgactacacaggtat

SEQ ID NO: 2436484 - DNA, 25 bp, Homo sapien
tggtacttggccattcgatccttta

SEQ ID NO: 2436485 - DNA, 25 bp, Homo sapien
ggaagttccagatttcgtctactct

SEQ ID NO: 2436486 - DNA, 25 bp, Homo sapien
tgagaggcgtggaagttccagattt

SEQ ID NO: 2436487 - DNA, 25 bp, Homo sapien
cctttatagaggtttctgagaggcg

SEQ ID NO: 2436488 - DNA, 25 bp, Homo sapien
cactttgggagcacgtcaacttccg

SEQ ID NO: 2436489 - DNA, 25 bp, Homo sapien
caaagtaccctttgcttaccatagg

SEQ ID NO: 2436490 - DNA, 25 bp, Homo sapien
ccataggttaccactaacaagggtg

SEQ ID NO: 2436491 - DNA, 25 bp, Homo sapien
ggaggcaaaactgatcgtagcactt

SEQ ID NO: 2436492 - DNA, 25 bp, Homo sapien
tccttccacttgcacttcggctttg

SEQ ID NO: 2436493 - DNA, 25 bp, Homo sapien
ttccaggtcatctagagaatagctg

SEQ ID NO: 2436494 - DNA, 25 bp, Homo sapien
cacttcggctttgggcccggagaat

SEQ ID NO: 2436495 - DNA, 25 bp, Homo sapien
gagaatagctgttttcagagatctt

SEQ ID NO: 2436496 - DNA, 25 bp, Homo sapien
tgttctagatctggtccctaccgag

SEQ ID NO: 2436497 - DNA, 25 bp, Homo sapien
caaggtacctggtcaaactgttggg

SEQ ID NO: 2436498 - DNA, 25 bp, Homo sapien
gactgtccctctactgcactgtaag

SEQ ID NO: 2436499 - DNA, 25 bp, Homo sapien
tgtaagctcactaagggcagagacc

SEQ ID NO: 2436500 - DNA, 25 bp, Homo sapien
ttatatgggcttcggtggcagtcat

SEQ ID NO: 2436501 - DNA, 25 bp, Homo sapien
tccttatatgggcttcggtggcagt

SEQ ID NO: 2436502 - DNA, 25 bp, Homo sapien
tatgggcttcggtggcagtcatggg

SEQ ID NO: 2436503 - DNA, 25 bp, Homo sapien
cagcaccgcaggtctacagtggggt

SEQ ID NO: 2436504 - DNA, 25 bp, Homo sapien
cggtcgtggggcagcacccgcaggt

SEQ ID NO: 2436505 - DNA, 25 bp, Homo sapien
gatttctggcggtcgtggggcagca

SEQ ID NO: 2436506 - DNA, 25 bp, Homo sapien
gcggtcgtggggcagcacccgcagg

SEQ ID NO: 2436507 - DNA, 25 bp, Homo sapien
cttgatttctggcggtcgtggggca

SEQ ID NO: 2436508 - DNA, 25 bp, Homo sapien
gatccttgtgggcttcatgaccttg

SEQ ID NO: 2436509 - DNA, 25 bp, Homo sapien
ggcttcatgaccttgattcctgact

SEQ ID NO: 2436510 - DNA, 25 bp, Homo sapien
ctacagtggggggaaggtgttcgat

SEQ ID NO: 2436511 - DNA, 25 bp, Homo sapien
gggaaggtgttcgatccttgtgggc

SEQ ID NO: 2436512 - DNA, 25 bp, Homo sapien
cgtgctgtgaatggcacaactcaca

SEQ ID NO: 2436513 - DNA, 25 bp, Homo sapien
cacagtaatgtagcttcacatccag

SEQ ID NO: 2436514 - DNA, 25 bp, Homo sapien
cacacagtaatgtagcttcacatcc

SEQ ID NO: 2436515 - DNA, 25 bp, Homo sapien
caactcacacagtaatgtagcttca

SEQ ID NO: 2436516 - DNA, 25 bp, Homo sapien
tacacaggcatctaggacgctcact

SEQ ID NO: 2436517 - DNA, 25 bp, Homo sapien
tcagaaatatcgctgactgccgcag

SEQ ID NO: 2436518 - DNA, 25 bp, Homo sapien
caggcatctaggacgctcacttcag

SEQ ID NO: 2436519 - DNA, 25 bp, Homo sapien
gggaagtacacaggcatctaggacg

SEQ ID NO: 2436520 - DNA, 25 bp, Homo sapien
aaattggctgcagtgaatagcgtac

SEQ ID NO: 2436521 - DNA, 25 bp, Homo sapien
agcaaattggctgcagtgaatagcg

SEQ ID NO: 2436522 - DNA, 25 bp, Homo sapien
tttatgcagcaaattggctgcagtg

SEQ ID NO: 2436523 - DNA, 25 bp, Homo sapien
gtttatgcagcaaattggctgcagt

SEQ ID NO: 2436524 - DNA, 25 bp, Homo sapien
ccctctttggtgtgaccattgtttc

SEQ ID NO: 2436525 - DNA, 25 bp, Homo sapien
gccctctttggtgtgaccattgttt

SEQ ID NO: 2436526 - DNA, 25 bp, Homo sapien
tctttggtgtgaccattgtttcttc

SEQ ID NO: 2436527 - DNA, 25 bp, Homo sapien
ctttggtgtgaccattgtttcttct

SEQ ID NO: 2436528 - DNA, 25 bp, Homo sapien
tatacaggtaggttgagctcagact

SEQ ID NO: 2436529 - DNA, 25 bp, Homo sapien
gactatagaatacctgacagaactg

SEQ ID NO: 2436530 - DNA, 25 bp, Homo sapien
acaatgatgccaaggtgctctgtca

SEQ ID NO: 2436531 - DNA, 25 bp, Homo sapien
tgtctcccaggttagtcacaatgat

SEQ ID NO: 2436532 - DNA, 25 bp, Homo sapien
tttagcaatcaatctggtggcccag

SEQ ID NO: 2436533 - DNA, 25 bp, Homo sapien
gcatttttgtctgctacagtcccag

SEQ ID NO: 2436534 - DNA, 25 bp, Homo sapien
cacgcccggactagtaagatcttat

SEQ ID NO: 2436535 - DNA, 25 bp, Homo sapien
tgctatcagccatctagtaggatct

SEQ ID NO: 2436536 - DNA, 25 bp, Homo sapien
tacattgtgtgtactggcatgacat

SEQ ID NO: 2436537 - DNA, 25 bp, Homo sapien
tcaacatgcagcagccttttgcact

SEQ ID NO: 2436538 - DNA, 25 bp, Homo sapien
gcactgaatctacattgtgtgtact

SEQ ID NO: 2436539 - DNA, 25 bp, Homo sapien
ctttggccagtttcaacatgcagca

SEQ ID NO: 2436540 - DNA, 25 bp, Homo sapien
cttacaatggtgctttgagtcacaa

SEQ ID NO: 2436541 - DNA, 25 bp, Homo sapien
tgtggttacatctcttgccaactgg

SEQ ID NO: 2436542 - DNA, 25 bp, Homo sapien
cagagaagtgttgtagctttacaca

SEQ ID NO: 2436543 - DNA, 25 bp, Homo sapien
tagagctaaagctcatgcacagaga

SEQ ID NO: 2436544 - DNA, 25 bp, Homo sapien
aacatcatcttaagcctgttcagcg

SEQ ID NO: 2436545 - DNA, 25 bp, Homo sapien
tattttgcccgaagcatctgtgttt

SEQ ID NO: 2436546 - DNA, 25 bp, Homo sapien
gttcagcggaacattatatttctct

SEQ ID NO: 2436547 - DNA, 25 bp, Homo sapien
gcctggattctcctagacaattttc

SEQ ID NO: 2436548 - DNA, 25 bp, Homo sapien
tatcgaccctgaacgagggcttcag

SEQ ID NO: 2436549 - DNA, 25 bp, Homo sapien
cagtgctgctgttccgtagagagtc

SEQ ID NO: 2436550 - DNA, 25 bp, Homo sapien
ttgtcacttcagcaggaggatggtc

SEQ ID NO: 2436551 - DNA, 25 bp, Homo sapien
aagatcctcaccgtccttgatgtgg

SEQ ID NO: 2436552 - DNA, 25 bp, Homo sapien
gctgctcctggtccactgctgtttc

SEQ ID NO: 2436553 - DNA, 25 bp, Homo sapien
tgtttcagacagctgtgaacagtta

SEQ ID NO: 2436554 - DNA, 25 bp, Homo sapien
gacagctgtgaacagttacagcctt

SEQ ID NO: 2436555 - DNA, 25 bp, Homo sapien
cactgctgtttcagacagctgtgaa

SEQ ID NO: 2436556 - DNA, 25 bp, Homo sapien
gaggcatcttaaactccttcttgat

SEQ ID NO: 2436557 - DNA, 25 bp, Homo sapien
tcttgattaaggttgaagtcttcac

SEQ ID NO: 2436558 - DNA, 25 bp, Homo sapien
ccgatttcacccaccatatagatta

SEQ ID NO: 2436559 - DNA, 25 bp, Homo sapien
tacctggaagtgctagaggcatctt

SEQ ID NO: 2436560 - DNA, 25 bp, Homo sapien
tatcttggtgaatgcgacaaccatc

SEQ ID NO: 2436561 - DNA, 25 bp, Homo sapien
cttttcttgaattgtctatcttggt

SEQ ID NO: 2436562 - DNA, 25 bp, Homo sapien
ccatctagaatacaaagattctgcc

SEQ ID NO: 2436563 - DNA, 25 bp, Homo sapien
tcatctgtcaagtaggcctgttctc

SEQ ID NO: 2436564 - DNA, 25 bp, Homo sapien
tgctgggattagagccttctcttca

SEQ ID NO: 2436565 - DNA, 25 bp, Homo sapien
acctcggcctcctgcgatcctcccg

SEQ ID NO: 2436566 - DNA, 25 bp, Homo sapien
gggattagagccttctcttcagcca

SEQ ID NO: 2436567 - DNA, 25 bp, Homo sapien
ttagagccttctcttcagccataaa

SEQ ID NO: 2436568 - DNA, 25 bp, Homo sapien
ctggctgactgcagagtcaagctgg

SEQ ID NO: 2436569 - DNA, 25 bp, Homo sapien
gtttgtttcttcagctgctttctgg

SEQ ID NO: 2436570 - DNA, 25 bp, Homo sapien
ctcccaaagtgagtgcccagctttt

SEQ ID NO: 2436571 - DNA, 25 bp, Homo sapien
tcccaaagtgagtgcccagcttttt

SEQ ID NO: 2436572 - DNA, 25 bp, Homo sapien
cccaaagtgagtgcccagctttttt

SEQ ID NO: 2436573 - DNA, 25 bp, Homo sapien
atccagtggtacaaccatggttcat

SEQ ID NO: 2436574 - DNA, 25 bp, Homo sapien
tctgtcaaaggaatagggcaaatgc

SEQ ID NO: 2436575 - DNA, 25 bp, Homo sapien
gggcaaatgctagccagaccagtgg

SEQ ID NO: 2436576 - DNA, 25 bp, Homo sapien
gaagaggaagttaaccaggctgact

SEQ ID NO: 2436577 - DNA, 25 bp, Homo sapien
ttctagggccagaaaacagagttcc

SEQ ID NO: 2436578 - DNA, 25 bp, Homo sapien
tatttccacaatagccgatgacttg

SEQ ID NO: 2436579 - DNA, 25 bp, Homo sapien
gttctttggctgttaccctcaatga

SEQ ID NO: 2436580 - DNA, 25 bp, Homo sapien
tagccgatgacttgttcttgttgac

SEQ ID NO: 2436581 - DNA, 25 bp, Homo sapien
taccctcaatgatagtgaggtccat

SEQ ID NO: 2436582 - DNA, 25 bp, Homo sapien
ccgtctattaaatggagatgattcc

SEQ ID NO: 2436583 - DNA, 25 bp, Homo sapien
gccgtctattaaatggagatgattc

SEQ ID NO: 2436584 - DNA, 25 bp, Homo sapien
tgccgtctattaaatggagatgatt

SEQ ID NO: 2436585 - DNA, 25 bp, Homo sapien
gtctattaaatggagatgattccat

SEQ ID NO: 2436586 - DNA, 25 bp, Homo sapien
tgcagctcttggcaaccgaagagca

SEQ ID NO: 2436587 - DNA, 25 bp, Homo sapien
aaataaagtactacttgcagctctt

SEQ ID NO: 2436588 - DNA, 25 bp, Homo sapien
gcagctcttggcaaccgaagagcat

SEQ ID NO: 2436589 - DNA, 25 bp, Homo sapien
taaagtactacttgcagctcttggc

SEQ ID NO: 2436590 - DNA, 25 bp, Homo sapien
aactttagtatatgtatgactgaag

SEQ ID NO: 2436591 - DNA, 25 bp, Homo sapien
gatagtttcatatgtccaatatgca

SEQ ID NO: 2436592 - DNA, 25 bp, Homo sapien
gaatttctactccatgctggatagt

SEQ ID NO: 2436593 - DNA, 25 bp, Homo sapien
cacgcccagcccagtcctagaattt

SEQ ID NO: 2436594 - DNA, 25 bp, Homo sapien
gcaacgtaacataacccaaatcata

SEQ ID NO: 2436595 - DNA, 25 bp, Homo sapien
gcaacaagtcatgaggtaggtacca

SEQ ID NO: 2436596 - DNA, 25 bp, Homo sapien
caaagtctggagcataaactttctg

SEQ ID NO: 2436597 - DNA, 25 bp, Homo sapien
tgttatctcagtttacccttgcaac

SEQ ID NO: 2436598 - DNA, 25 bp, Homo sapien
aaaggtaacctctgtcaaagtctgg

SEQ ID NO: 2436599 - DNA, 25 bp, Homo sapien
tgacacatcggctgcaaggactgct

SEQ ID NO: 2436600 - DNA, 25 bp, Homo sapien
gatggttcgttcctagcagctacaa

SEQ ID NO: 2436601 - DNA, 25 bp, Homo sapien
tgccagcgatatatacacgatagcg

SEQ ID NO: 2436602 - DNA, 25 bp, Homo sapien
tcttgcaagcatcagtaaggaggct

SEQ ID NO: 2436603 - DNA, 25 bp, Homo sapien
gcagcaaaggctcagcccgacataa

SEQ ID NO: 2436604 - DNA, 25 bp, Homo sapien
tattacagtatttccctggaaggag

SEQ ID NO: 2436605 - DNA, 25 bp, Homo sapien
gggtatttgcagctcccgcccttgg

SEQ ID NO: 2436606 - DNA, 25 bp, Homo sapien
tcttcccgcactctccggttgtgga

SEQ ID NO: 2436607 - DNA, 25 bp, Homo sapien
aggtcccggcgctctacctagcgca

SEQ ID NO: 2436608 - DNA, 25 bp, Homo sapien
tagcgcacctgtcgcgaccaagctg

SEQ ID NO: 2436609 - DNA, 25 bp, Homo sapien
ctggctaaaagccgcctttcctctg

SEQ ID NO: 2436610 - DNA, 25 bp, Homo sapien
tgcgctgctaccagccctgtcacag

SEQ ID NO: 2436611 - DNA, 25 bp, Homo sapien
tccattcagaataggagctgtgcta

SEQ ID NO: 2436612 - DNA, 25 bp, Homo sapien
tgaaaacggtttgacaagggcagat

SEQ ID NO: 2436613 - DNA, 25 bp, Homo sapien
tcttgtcccagttccgtgccagctg

SEQ ID NO: 2436614 - DNA, 25 bp, Homo sapien
tttggagaccgtcaattggcctagc

SEQ ID NO: 2436615 - DNA, 25 bp, Homo sapien
ggaggccaaggcaggtggatcacct

SEQ ID NO: 2436616 - DNA, 25 bp, Homo sapien
agcagtttaggctgggcgtggaggc

SEQ ID NO: 2436617 - DNA, 25 bp, Homo sapien
gaggtcatgagttccagaccagcct

SEQ ID NO: 2436618 - DNA, 25 bp, Homo sapien
tcacgcctgtaatcccagcactttg

SEQ ID NO: 2436619 - DNA, 25 bp, Homo sapien
tttaggtattatgaaaaaaggctga

SEQ ID NO: 2436620 - DNA, 25 bp, Homo sapien
tttctcctatgttttatagatttag

SEQ ID NO: 2436621 - DNA, 25 bp, Homo sapien
tagctctaacctatagttaagggtc

SEQ ID NO: 2436622 - DNA, 25 bp, Homo sapien
tgtgtgggtccatttttggaaattc

SEQ ID NO: 2436623 - DNA, 25 bp, Homo sapien
tccagtaatgtagagcagaagatac

SEQ ID NO: 2436624 - DNA, 25 bp, Homo sapien
taatgatgtccctttcatgactcag

SEQ ID NO: 2436625 - DNA, 25 bp, Homo sapien
gcatcttcgggtttagactgggaaa

SEQ ID NO: 2436626 - DNA, 25 bp, Homo sapien
cagaagatactctttcttgagtggt

SEQ ID NO: 2436627 - DNA, 25 bp, Homo sapien
tactgaaatgtactttcaacatgct

SEQ ID NO: 2436628 - DNA, 25 bp, Homo sapien
ctgaaatgtactttcaacatgcttg

SEQ ID NO: 2436629 - DNA, 25 bp, Homo sapien
atactgaaatgtactttcaacatgc

SEQ ID NO: 2436630 - DNA, 25 bp, Homo sapien
gaaatgtactttcaacatgcttgta

SEQ ID NO: 2436631 - DNA, 25 bp, Homo sapien
ttacttttggttgatgtacctggtg

SEQ ID NO: 2436632 - DNA, 25 bp, Homo sapien
gatgtcttctctgctattgggtagc

SEQ ID NO: 2436633 - DNA, 25 bp, Homo sapien
agattttcggaaggtagactgcact

SEQ ID NO: 2436634 - DNA, 25 bp, Homo sapien
gatcaacattccagatggcctctgt

SEQ ID NO: 2436635 - DNA, 25 bp, Homo sapien
gcagcctgggaatatctgggtaccc

SEQ ID NO: 2436636 - DNA, 25 bp, Homo sapien
tttaagaatggcttttgaacaaatg

SEQ ID NO: 2436637 - DNA, 25 bp, Homo sapien
cttgcatatgtcagaggttctgtcc

SEQ ID NO: 2436638 - DNA, 25 bp, Homo sapien
gattaaggggataggttgactaaga

SEQ ID NO: 2436639 - DNA, 25 bp, Homo sapien
gactaagattcaattcatgtatctt

SEQ ID NO: 2436640 - DNA, 25 bp, Homo sapien
ctggttgaatacgtgtatcattttc

SEQ ID NO: 2436641 - DNA, 25 bp, Homo sapien
actgattccgtttctgccctagaga

SEQ ID NO: 2436642 - DNA, 25 bp, Homo sapien
agtccagacctgcatcacctttttc

SEQ ID NO: 2436643 - DNA, 25 bp, Homo sapien
ttttcccgtagtcatcaagtctgct

SEQ ID NO: 2436644 - DNA, 25 bp, Homo sapien
gatggcttttagtcgtttcattatg

SEQ ID NO: 2436645 - DNA, 25 bp, Homo sapien
tggcttttagtcgtttcattatgtt

SEQ ID NO: 2436646 - DNA, 25 bp, Homo sapien
tggatggcttttagtcgtttcatta

SEQ ID NO: 2436647 - DNA, 25 bp, Homo sapien
gcttttagtcgtttcattatgttgt

SEQ ID NO: 2436648 - DNA, 25 bp, Homo sapien
aactgtgtccatatgaagtatctca

SEQ ID NO: 2436649 - DNA, 25 bp, Homo sapien
gagagtcctagccattgtgtgtagc

SEQ ID NO: 2436650 - DNA, 25 bp, Homo sapien
tgtacttgcggaataagtatcccaa

SEQ ID NO: 2436651 - DNA, 25 bp, Homo sapien
gcatgctggatcagcctataggcaa

SEQ ID NO: 2436652 - DNA, 25 bp, Homo sapien
gcctgatttaatagtatcaggttct

SEQ ID NO: 2436653 - DNA, 25 bp, Homo sapien
tatagcctgatttaatagtatcagg

SEQ ID NO: 2436654 - DNA, 25 bp, Homo sapien
ttttatagcctgatttaatagtatc

SEQ ID NO: 2436655 - DNA, 25 bp, Homo sapien
gatttaatagtatcaggttcttctt

SEQ ID NO: 2436656 - DNA, 25 bp, Homo sapien
cataatgaagaagctcgcccaggaa

SEQ ID NO: 2436657 - DNA, 25 bp, Homo sapien
gcttcaggaactaagggctgcccag

SEQ ID NO: 2436658 - DNA, 25 bp, Homo sapien
ttatctaaggtgagaggaaccccta

SEQ ID NO: 2436659 - DNA, 25 bp, Homo sapien
tatccagggcttgtctataggaggg

SEQ ID NO: 2436660 - DNA, 25 bp, Homo sapien
tgatctgcctttcgaggtcctctag

SEQ ID NO: 2436661 - DNA, 25 bp, Homo sapien
tccttttccaagagcaacccttgtg

SEQ ID NO: 2436662 - DNA, 25 bp, Homo sapien
tgagactcatgccagacatttgttc

SEQ ID NO: 2436663 - DNA, 25 bp, Homo sapien
gctcagcctgctttggagttgcctg

SEQ ID NO: 2436664 - DNA, 25 bp, Homo sapien
atgcaatcctggcataaatgagact

SEQ ID NO: 2436665 - DNA, 25 bp, Homo sapien
gaaaatgcaatcctggcataaatga

SEQ ID NO: 2436666 - DNA, 25 bp, Homo sapien
gcaatcctggcataaatgagactac

SEQ ID NO: 2436667 - DNA, 25 bp, Homo sapien
ctgaaaatgcaatcctggcataaat

SEQ ID NO: 2436668 - DNA, 25 bp, Homo sapien
gtctctttagccactcttgagagtg

SEQ ID NO: 2436669 - DNA, 25 bp, Homo sapien
cctgaaattcttcgaggttactctg

SEQ ID NO: 2436670 - DNA, 25 bp, Homo sapien
ctcttccttcggaacagtctttttg

SEQ ID NO: 2436671 - DNA, 25 bp, Homo sapien
gtcacagtttcagccactttttgga

SEQ ID NO: 2436672 - DNA, 25 bp, Homo sapien
caaattggatcatactgagtggctc

SEQ ID NO: 2436673 - DNA, 25 bp, Homo sapien
tactgagtggctccactaggcttct

SEQ ID NO: 2436674 - DNA, 25 bp, Homo sapien
tcagcagtatcatcaaattggatca

SEQ ID NO: 2436675 - DNA, 25 bp, Homo sapien
tatcatcaaattggatcatactgag

SEQ ID NO: 2436676 - DNA, 25 bp, Homo sapien
catagtattgactaggtttggcctc

SEQ ID NO: 2436677 - DNA, 25 bp, Homo sapien
ctctgctgcagttggacgtttgtca

SEQ ID NO: 2436678 - DNA, 25 bp, Homo sapien
tctttgtccaatgactcagtggtgg

SEQ ID NO: 2436679 - DNA, 25 bp, Homo sapien
ttatcactcagatttggtccagagg

SEQ ID NO: 2436680 - DNA, 25 bp, Homo sapien
gattatcgccctggatgactgtgga

SEQ ID NO: 2436681 - DNA, 25 bp, Homo sapien
tcgtattatcttcagagagagctcc

SEQ ID NO: 2436682 - DNA, 25 bp, Homo sapien
tatcttcagaagcaacaggttgctg

SEQ ID NO: 2436683 - DNA, 25 bp, Homo sapien
gctgtatatgaaatagtggagtccc

SEQ ID NO: 2436684 - DNA, 25 bp, Homo sapien
cacgggctgttgaaggtcgttttat

SEQ ID NO: 2436685 - DNA, 25 bp, Homo sapien
gatctggtcttaaagcacgggctgt

SEQ ID NO: 2436686 - DNA, 25 bp, Homo sapien
ggtgcctatgagttcctgtagcata

SEQ ID NO: 2436687 - DNA, 25 bp, Homo sapien
caagatttccatagagtacctctag

SEQ ID NO: 2436688 - DNA, 25 bp, Homo sapien
tctcaatagcttttaacgtgtccgg

SEQ ID NO: 2436689 - DNA, 25 bp, Homo sapien
aacatccattagagtcatctcagac

SEQ ID NO: 2436690 - DNA, 25 bp, Homo sapien
tcgtcgaggaaagatgtactaaatc

SEQ ID NO: 2436691 - DNA, 25 bp, Homo sapien
acgtgtccggtaacaactccatttg

SEQ ID NO: 2436692 - DNA, 25 bp, Homo sapien
tagcgagtcattatccgatgcacat

SEQ ID NO: 2436693 - DNA, 25 bp, Homo sapien
tcaatagtcttagcgtaagtagcca

SEQ ID NO: 2436694 - DNA, 25 bp, Homo sapien
tatgttctgtaagggagacattcct

SEQ ID NO: 2436695 - DNA, 25 bp, Homo sapien
cattcctttcagaggacgagttaaa

SEQ ID NO: 2436696 - DNA, 25 bp, Homo sapien
cgccatctccaaagccggagtggcc

SEQ ID NO: 2436697 - DNA, 25 bp, Homo sapien
gtaagataagtgtgtagttctcttc

SEQ ID NO: 2436698 - DNA, 25 bp, Homo sapien
ctacagtccgtataataagagtaag

SEQ ID NO: 2436699 - DNA, 25 bp, Homo sapien
cgtataataagagtaagataagtgt

SEQ ID NO: 2436700 - DNA, 25 bp, Homo sapien
aacatgtgatccgtgcccatctgaa

SEQ ID NO: 2436701 - DNA, 25 bp, Homo sapien
gtgatccgtgcccatctgaaagaat

SEQ ID NO: 2436702 - DNA, 25 bp, Homo sapien
tacaacatgtgatccgtgcccatct

SEQ ID NO: 2436703 - DNA, 25 bp, Homo sapien
catgtgatccgtgcccatctgaaag

SEQ ID NO: 2436704 - DNA, 25 bp, Homo sapien
gatctcaaggttagggagcatcaaa

SEQ ID NO: 2436705 - DNA, 25 bp, Homo sapien
gatgatatcctttactgagaatggg

SEQ ID NO: 2436706 - DNA, 25 bp, Homo sapien
tgtgcgcgctcaatcctagagatga

SEQ ID NO: 2436707 - DNA, 25 bp, Homo sapien
tctctggctcgatggagctgtgcgc

SEQ ID NO: 2436708 - DNA, 25 bp, Homo sapien
taaagatatccagtaggaagctagg

SEQ ID NO: 2436709 - DNA, 25 bp, Homo sapien
ctttcctgatcctagaagttgtggc

SEQ ID NO: 2436710 - DNA, 25 bp, Homo sapien
aatgctaataaagatatccagtagg

SEQ ID NO: 2436711 - DNA, 25 bp, Homo sapien
cctagaagttgtggcatactctgct

SEQ ID NO: 2436712 - DNA, 25 bp, Homo sapien
gcggtgacatgggtaattaattcaa

SEQ ID NO: 2436713 - DNA, 25 bp, Homo sapien
gtttgaattaatgacagaacgtcaa

SEQ ID NO: 2436714 - DNA, 25 bp, Homo sapien
tattactggtatattaagcggtgac

SEQ ID NO: 2436715 - DNA, 25 bp, Homo sapien
aagaagacactgtccagattaagtg

SEQ ID NO: 2436716 - DNA, 25 bp, Homo sapien
cacaacactctaggaagctatggga

SEQ ID NO: 2436717 - DNA, 25 bp, Homo sapien
cggaaccggcagataggctgacaca

SEQ ID NO: 2436718 - DNA, 25 bp, Homo sapien
tagtgcaaaagttgagcgcgccgag

SEQ ID NO: 2436719 - DNA, 25 bp, Homo sapien
tgttcagtacacttcgccaaggtcg

SEQ ID NO: 2436720 - DNA, 25 bp, Homo sapien
gttctgcctcagcctccctagtagc

SEQ ID NO: 2436721 - DNA, 25 bp, Homo sapien
tagtagacacgggtttcacgatgtt

SEQ ID NO: 2436722 - DNA, 25 bp, Homo sapien
accacacctggcgggttcaagcagt

SEQ ID NO: 2436723 - DNA, 25 bp, Homo sapien
gccaccacacctggcgggttcaagc

SEQ ID NO: 2436724 - DNA, 25 bp, Homo sapien
gaaggaagtgaaggttctgtttata

SEQ ID NO: 2436725 - DNA, 25 bp, Homo sapien
tttgccatgtggcccgtggtagtct

SEQ ID NO: 2436726 - DNA, 25 bp, Homo sapien
tctttgaaagtacacaatggaagga

SEQ ID NO: 2436727 - DNA, 25 bp, Homo sapien
catgtggcccgtggtagtcttgaac

SEQ ID NO: 2436728 - DNA, 25 bp, Homo sapien
tgaggcaggctgatagactgaaatc

SEQ ID NO: 2436729 - DNA, 25 bp, Homo sapien
gcgctccatcctaggccgcagagtg

SEQ ID NO: 2436730 - DNA, 25 bp, Homo sapien
gaggcaggctgatagactgaaatca

SEQ ID NO: 2436731 - DNA, 25 bp, Homo sapien
ctgaggcaggctgatagactgaaat

SEQ ID NO: 2436732 - DNA, 25 bp, Homo sapien
ggagacagcaagacttcatcacaaa

SEQ ID NO: 2436733 - DNA, 25 bp, Homo sapien
ctgggagacagcaagacttcatcac

SEQ ID NO: 2436734 - DNA, 25 bp, Homo sapien
tgggagacagcaagacttcatcaca

SEQ ID NO: 2436735 - DNA, 25 bp, Homo sapien
cctgggagacagcaagacttcatca

SEQ ID NO: 2436736 - DNA, 25 bp, Homo sapien
ggtcatgtttccttcccgcctataa

SEQ ID NO: 2436737 - DNA, 25 bp, Homo sapien
ggagaacaccaatctggtctggtta

SEQ ID NO: 2436738 - DNA, 25 bp, Homo sapien
ggtctggttactatagcaggtcatg

SEQ ID NO: 2436739 - DNA, 25 bp, Homo sapien
ccgcctataaccacatgcttaggta

SEQ ID NO: 2436740 - DNA, 25 bp, Homo sapien
tttaatcaaccctgagatgcatatt

SEQ ID NO: 2436741 - DNA, 25 bp, Homo sapien
tattagtatccatctgagttataag

SEQ ID NO: 2436742 - DNA, 25 bp, Homo sapien
ctctattatgtgaaagcattttcca

SEQ ID NO: 2436743 - DNA, 25 bp, Homo sapien
gatgtaggatagctgaataaacagc

SEQ ID NO: 2436744 - DNA, 25 bp, Homo sapien
tcttgagtatgtcaggccaacctgt

SEQ ID NO: 2436745 - DNA, 25 bp, Homo sapien
gaatgctatactccaatcctggtgg

SEQ ID NO: 2436746 - DNA, 25 bp, Homo sapien
caaatgacctaacacctggaaagac

SEQ ID NO: 2436747 - DNA, 25 bp, Homo sapien
tttgttacagtaccaaccagcaacg

SEQ ID NO: 2436748 - DNA, 25 bp, Homo sapien
gaaatcagttggagtgggagctcat

SEQ ID NO: 2436749 - DNA, 25 bp, Homo sapien
cttctaggcaaggataaaagccatc

SEQ ID NO: 2436750 - DNA, 25 bp, Homo sapien
tagtgttgcgaaatgtcagaccaga

SEQ ID NO: 2436751 - DNA, 25 bp, Homo sapien
tctaggctccctttcccaatggtag

SEQ ID NO: 2436752 - DNA, 25 bp, Homo sapien
tgaaacagtaccagcaagtcatgag

SEQ ID NO: 2436753 - DNA, 25 bp, Homo sapien
cctcagtgcataggtcaaatggatt

SEQ ID NO: 2436754 - DNA, 25 bp, Homo sapien
tttagaattttagctcccaagatgg

SEQ ID NO: 2436755 - DNA, 25 bp, Homo sapien
cccaagatggtagggcagactgacc

SEQ ID NO: 2436756 - DNA, 25 bp, Homo sapien
aaaactacctgtgctgaaatttggg

SEQ ID NO: 2436757 - DNA, 25 bp, Homo sapien
cactgcacatatctgtacaagccag

SEQ ID NO: 2436758 - DNA, 25 bp, Homo sapien
tgaacactggaaagcaccattgtga

SEQ ID NO: 2436759 - DNA, 25 bp, Homo sapien
gacttattattagcttggcagttgc

SEQ ID NO: 2436760 - DNA, 25 bp, Homo sapien
ccatttgatggcatgtatagggaag

SEQ ID NO: 2436761 - DNA, 25 bp, Homo sapien
tgatctgttggaggctaaaagtagg

SEQ ID NO: 2436762 - DNA, 25 bp, Homo sapien
tgcctatgagttgtgtgaagctctt

SEQ ID NO: 2436763 - DNA, 25 bp, Homo sapien
tgttgggtatagtgatactctgcca

SEQ ID NO: 2436764 - DNA, 25 bp, Homo sapien
tcgagttgacagttcctaaaagcgt

SEQ ID NO: 2436765 - DNA, 25 bp, Homo sapien
taactttaggcttttgggcatatgc

SEQ ID NO: 2436766 - DNA, 25 bp, Homo sapien
gagaacagtgtattccttctgaggg

SEQ ID NO: 2436767 - DNA, 25 bp, Homo sapien
gaatgttagcatcttcactagggta

SEQ ID NO: 2436768 - DNA, 25 bp, Homo sapien
tcattcaccatcatactctgatata

SEQ ID NO: 2436769 - DNA, 25 bp, Homo sapien
cattcaccatcatactctgatatac

SEQ ID NO: 2436770 - DNA, 25 bp, Homo sapien
ggtctcccacgtactgtagacgaat

SEQ ID NO: 2436771 - DNA, 25 bp, Homo sapien
tactgtagacgaataaaagcattgt

SEQ ID NO: 2436772 - DNA, 25 bp, Homo sapien
cacgtactgtagacgaataaaagca

SEQ ID NO: 2436773 - DNA, 25 bp, Homo sapien
aataaggtctcccacgtactgtaga

SEQ ID NO: 2436774 - DNA, 25 bp, Homo sapien
atttcagtgctccacatgctcagag

SEQ ID NO: 2436775 - DNA, 25 bp, Homo sapien
tttcagtgctccacatgctcagaga

SEQ ID NO: 2436776 - DNA, 25 bp, Homo sapien
aacttctctagtaacaaactatgga

SEQ ID NO: 2436777 - DNA, 25 bp, Homo sapien
tagtaacaaactatggaaatgatcc

SEQ ID NO: 2436778 - DNA, 25 bp, Homo sapien
gcttctcagttgtaactctgcctca

SEQ ID NO: 2436779 - DNA, 25 bp, Homo sapien
ttgcttctcagttgtaactctgcct

SEQ ID NO: 2436780 - DNA, 25 bp, Homo sapien
tcagttgatccctatgtatggttac

SEQ ID NO: 2436781 - DNA, 25 bp, Homo sapien
gttcttggacagtaacaccagtagg

SEQ ID NO: 2436782 - DNA, 25 bp, Homo sapien
tggtcaggtgggtctcgatctcccg

SEQ ID NO: 2436783 - DNA, 25 bp, Homo sapien
tggctaattttgtagtagacacggg

SEQ ID NO: 2436784 - DNA, 25 bp, Homo sapien
tttttgcgatggagtttctcttgtt

SEQ ID NO: 2436785 - DNA, 25 bp, Homo sapien
tttttttgcgatggagtttctcttg

SEQ ID NO: 2436786 - DNA, 25 bp, Homo sapien
gaccagtcttgtcattgaatctcct

SEQ ID NO: 2436787 - DNA, 25 bp, Homo sapien
atgggccagaacttatggcttttaa

SEQ ID NO: 2436788 - DNA, 25 bp, Homo sapien
gaataaattttatagtgctgaccag

SEQ ID NO: 2436789 - DNA, 25 bp, Homo sapien
gccagaacttatggcttttaattca

SEQ ID NO: 2436790 - DNA, 25 bp, Homo sapien
cttaatttgccactgtttgtttcat

SEQ ID NO: 2436791 - DNA, 25 bp, Homo sapien
ttaatttgccactgtttgtttcatt

SEQ ID NO: 2436792 - DNA, 25 bp, Homo sapien
taatttgccactgtttgtttcattt

SEQ ID NO: 2436793 - DNA, 25 bp, Homo sapien
ctgggctcaaggattcacctgcctt

SEQ ID NO: 2436794 - DNA, 25 bp, Homo sapien
tcaggtcctgcttgtatatacatag

SEQ ID NO: 2436795 - DNA, 25 bp, Homo sapien
caaggaatgtgtgatataaatgcta

SEQ ID NO: 2436796 - DNA, 25 bp, Homo sapien
tattgcaagagaaaacctagtcgtc

SEQ ID NO: 2436797 - DNA, 25 bp, Homo sapien
tattgtaagaaagacataagatctg

SEQ ID NO: 2436798 - DNA, 25 bp, Homo sapien
aagtgcttttcattagagatggaaa

SEQ ID NO: 2436799 - DNA, 25 bp, Homo sapien
tttcattagagatggaaattccttc

SEQ ID NO: 2436800 - DNA, 25 bp, Homo sapien
aaaaaagtgcttttcattagagatg

SEQ ID NO: 2436801 - DNA, 25 bp, Homo sapien
cttttcattagagatggaaattcct

SEQ ID NO: 2436802 - DNA, 25 bp, Homo sapien
gttgctgctttcctgtgtgtggtgc

SEQ ID NO: 2436803 - DNA, 25 bp, Homo sapien
ttgctgctttcctgtgtgtggtgca

SEQ ID NO: 2436804 - DNA, 25 bp, Homo sapien
ccttccatagatggtccaggctgtg

SEQ ID NO: 2436805 - DNA, 25 bp, Homo sapien
ggttgctgctttcctgtgtgtggtg

SEQ ID NO: 2436806 - DNA, 25 bp, Homo sapien
tgtgcgagcctgcactgaatcctcg

SEQ ID NO: 2436807 - DNA, 25 bp, Homo sapien
agcctgcactgaatcctcgagttag

SEQ ID NO: 2436808 - DNA, 25 bp, Homo sapien
tgtgagagctgtgcgagcctgcact

SEQ ID NO: 2436809 - DNA, 25 bp, Homo sapien
agttaggcccccttgtctcaggcag

SEQ ID NO: 2436810 - DNA, 25 bp, Homo sapien
gcctctagcctgtcagtaataggtg

SEQ ID NO: 2436811 - DNA, 25 bp, Homo sapien
ctgaaagcctctagcctgtcagtaa

SEQ ID NO: 2436812 - DNA, 25 bp, Homo sapien
tctagcctgtcagtaataggtgctt

SEQ ID NO: 2436813 - DNA, 25 bp, Homo sapien
tgtcagtaataggtgcttctaaatg

SEQ ID NO: 2436814 - DNA, 25 bp, Homo sapien
tgtataagtgccagaccagtctgag

SEQ ID NO: 2436815 - DNA, 25 bp, Homo sapien
gaggcaggtcgttaatatccatagc

SEQ ID NO: 2436816 - DNA, 25 bp, Homo sapien
tatccatagccagtctgggctgtgg

SEQ ID NO: 2436817 - DNA, 25 bp, Homo sapien
gactgggaacctctcagaaggttga

SEQ ID NO: 2436818 - DNA, 25 bp, Homo sapien
cttggcattgaccagagtaccaaat

SEQ ID NO: 2436819 - DNA, 25 bp, Homo sapien
ccagagtaccaaattcctttcttgc

SEQ ID NO: 2436820 - DNA, 25 bp, Homo sapien
gtaccaaattcctttcttgcattgt

SEQ ID NO: 2436821 - DNA, 25 bp, Homo sapien
aattcctttcttgcattgttttgca

SEQ ID NO: 2436822 - DNA, 25 bp, Homo sapien
cttcaaaggaggtggtttttagctg

SEQ ID NO: 2436823 - DNA, 25 bp, Homo sapien
tggtttttagctgatcttcataaaa

SEQ ID NO: 2436824 - DNA, 25 bp, Homo sapien
ggaggtggtttttagctgatcttca

SEQ ID NO: 2436825 - DNA, 25 bp, Homo sapien
caaaggaggtggtttttagctgatc

SEQ ID NO: 2436826 - DNA, 25 bp, Homo sapien
tagactgcctaatatcacatttcca

SEQ ID NO: 2436827 - DNA, 25 bp, Homo sapien
gcagatacagctataacacctaaat

SEQ ID NO: 2436828 - DNA, 25 bp, Homo sapien
ctatcactgtcaccctaaggaatgg

SEQ ID NO: 2436829 - DNA, 25 bp, Homo sapien
catatgttgatagccttggaagtat

SEQ ID NO: 2436830 - DNA, 25 bp, Homo sapien
gtcttgctctgtacatccaggctag

SEQ ID NO: 2436831 - DNA, 25 bp, Homo sapien
tcttgctctgtacatccaggctaga

SEQ ID NO: 2436832 - DNA, 25 bp, Homo sapien
cttgctctgtacatccaggctagag

SEQ ID NO: 2436833 - DNA, 25 bp, Homo sapien
ggtatctctaaagtcctgcagtgct

SEQ ID NO: 2436834 - DNA, 25 bp, Homo sapien
ctctaaagtcctgcagtgctttaaa

SEQ ID NO: 2436835 - DNA, 25 bp, Homo sapien
tttcgtagagaaaaggtatctctaa

SEQ ID NO: 2436836 - DNA, 25 bp, Homo sapien
tagagaaaaggtatctctaaagtcc

SEQ ID NO: 2436837 - DNA, 25 bp, Homo sapien
tgttcttaactgggctactgatgat

SEQ ID NO: 2436838 - DNA, 25 bp, Homo sapien
tctacctgccaaatccagtagttat

SEQ ID NO: 2436839 - DNA, 25 bp, Homo sapien
aactgggctactgatgatctacctg

SEQ ID NO: 2436840 - DNA, 25 bp, Homo sapien
gatgatctacctgccaaatccagta

SEQ ID NO: 2436841 - DNA, 25 bp, Homo sapien
ttaggctgcaggagtagcagcaggg

SEQ ID NO: 2436842 - DNA, 25 bp, Homo sapien
ctcaggttaggctgcaggagtagca

SEQ ID NO: 2436843 - DNA, 25 bp, Homo sapien
gctgcaggagtagcagcagggccat

SEQ ID NO: 2436844 - DNA, 25 bp, Homo sapien
taggctgcaggagtagcagcagggc

SEQ ID NO: 2436845 - DNA, 25 bp, Homo sapien
cacagcgtgtgggtcgcagactcgc

SEQ ID NO: 2436846 - DNA, 25 bp, Homo sapien
gactcgccacgaccattctcttgtt

SEQ ID NO: 2436847 - DNA, 25 bp, Homo sapien
tacaaggctctatgcctgcctccac

SEQ ID NO: 2436848 - DNA, 25 bp, Homo sapien
tctcttgttggtttaggtcagtgtc

SEQ ID NO: 2436849 - DNA, 25 bp, Homo sapien
gatttgctgcttattgtggatctgg

SEQ ID NO: 2436850 - DNA, 25 bp, Homo sapien
gctgcttattgtggatctggcccat

SEQ ID NO: 2436851 - DNA, 25 bp, Homo sapien
cttgatttgctgcttattgtggatc

SEQ ID NO: 2436852 - DNA, 25 bp, Homo sapien
ttgctgcttattgtggatctggccc

SEQ ID NO: 2436853 - DNA, 25 bp, Homo sapien
taaatttatgacttctgcaccctgc

SEQ ID NO: 2436854 - DNA, 25 bp, Homo sapien
cattcataagcccagcaagttacag

SEQ ID NO: 2436855 - DNA, 25 bp, Homo sapien
caagttacaggcttaaaagtcatcc

SEQ ID NO: 2436856 - DNA, 25 bp, Homo sapien
tctcttttgagtgaatacaacccac

SEQ ID NO: 2436857 - DNA, 25 bp, Homo sapien
cctcctatggagttagagaacaacc

SEQ ID NO: 2436858 - DNA, 25 bp, Homo sapien
aaatgcgccaggacgtaacagggcc

SEQ ID NO: 2436859 - DNA, 25 bp, Homo sapien
ggctctccacagtcaaccagtacaa

SEQ ID NO: 2436860 - DNA, 25 bp, Homo sapien
cctattcagtgatggagctctgcac

SEQ ID NO: 2436861 - DNA, 25 bp, Homo sapien
gaagccctagatctggtcccattag

SEQ ID NO: 2436862 - DNA, 25 bp, Homo sapien
tcagtgccgtgttcacatggaccaa

SEQ ID NO: 2436863 - DNA, 25 bp, Homo sapien
cattacctcatcgttggcgtcgtgg

SEQ ID NO: 2436864 - DNA, 25 bp, Homo sapien
gtgtcatcccgatcaactccagagg

SEQ ID NO: 2436865 - DNA, 25 bp, Homo sapien
gaatggttctctttgacccactctg

SEQ ID NO: 2436866 - DNA, 25 bp, Homo sapien
tgcccaggccaagtagaatgagatg

SEQ ID NO: 2436867 - DNA, 25 bp, Homo sapien
agggctgccattacacggtcttgtg

SEQ ID NO: 2436868 - DNA, 25 bp, Homo sapien
accaatctgggttgccaaagcagcc

SEQ ID NO: 2436869 - DNA, 25 bp, Homo sapien
caggacatttgccagttccagatct

SEQ ID NO: 2436870 - DNA, 25 bp, Homo sapien
aggacatttgccagttccagatctc

SEQ ID NO: 2436871 - DNA, 25 bp, Homo sapien
gctcaggacatttgccagttccaga

SEQ ID NO: 2436872 - DNA, 25 bp, Homo sapien
cagttccagatctctttttcagcat

SEQ ID NO: 2436873 - DNA, 25 bp, Homo sapien
gacagtgcagatctatactcattcc

SEQ ID NO: 2436874 - DNA, 25 bp, Homo sapien
tctgttaatctcaaagtgtggccaa

SEQ ID NO: 2436875 - DNA, 25 bp, Homo sapien
gtgtggccaactcccatttacttag

SEQ ID NO: 2436876 - DNA, 25 bp, Homo sapien
gtccttgaggaacttcatcagtaac

SEQ ID NO: 2436877 - DNA, 25 bp, Homo sapien
gcctcaggctgtttagggaccattg

SEQ ID NO: 2436878 - DNA, 25 bp, Homo sapien
ttgttgactcaacaagggcccgagg

SEQ ID NO: 2436879 - DNA, 25 bp, Homo sapien
tcatgaagttgtgttgcctcaggct

SEQ ID NO: 2436880 - DNA, 25 bp, Homo sapien
tagatcctaggaattcagtgagacc

SEQ ID NO: 2436881 - DNA, 25 bp, Homo sapien
aagtgatgcagtcagtagaaaccat

SEQ ID NO: 2436882 - DNA, 25 bp, Homo sapien
ggccatgatgataagtactagtttt

SEQ ID NO: 2436883 - DNA, 25 bp, Homo sapien
ttcactagcaatgaactttccaaaa

SEQ ID NO: 2436884 - DNA, 25 bp, Homo sapien
aaatacagtctgtgacttatgatgg

SEQ ID NO: 2436885 - DNA, 25 bp, Homo sapien
tgtctggcagagtaaatcttcggct

SEQ ID NO: 2436886 - DNA, 25 bp, Homo sapien
gactttgttaatcatcgaaggctgg

SEQ ID NO: 2436887 - DNA, 25 bp, Homo sapien
agttgtcccctggtctagcatttaa

SEQ ID NO: 2436888 - DNA, 25 bp, Homo sapien
tagtgacctcttaagactgtctggc

SEQ ID NO: 2436889 - DNA, 25 bp, Homo sapien
tcaaggtcaattggcaggtgagttg

SEQ ID NO: 2436890 - DNA, 25 bp, Homo sapien
gacagggccggcgtcggtcaaggtc

SEQ ID NO: 2436891 - DNA, 25 bp, Homo sapien
ccggcgtcggtcaaggtcaattggc

SEQ ID NO: 2436892 - DNA, 25 bp, Homo sapien
cgtcggtcaaggtcaattggcaggt

SEQ ID NO: 2436893 - DNA, 25 bp, Homo sapien
taatcgatgaaaacgccccccgcga

SEQ ID NO: 2436894 - DNA, 25 bp, Homo sapien
ctgctcatggcctccggaagcggac

SEQ ID NO: 2436895 - DNA, 25 bp, Homo sapien
aatcgatgaaaacgccccccgcgag

SEQ ID NO: 2436896 - DNA, 25 bp, Homo sapien
tcatggcctccggaagcggacgtag

SEQ ID NO: 2436897 - DNA, 25 bp, Homo sapien
ggcagcgcggtgacgcaggacggcg

SEQ ID NO: 2436898 - DNA, 25 bp, Homo sapien
agcgcggtgacgcaggacggcggcc

SEQ ID NO: 2436899 - DNA, 25 bp, Homo sapien
gtgggcagcgcggtgacgcaggacg

SEQ ID NO: 2436900 - DNA, 25 bp, Homo sapien
cggtgacgcaggacggcggcccgcg

SEQ ID NO: 2436901 - DNA, 25 bp, Homo sapien
atatggcctcggcgcggtgtccgcc

SEQ ID NO: 2436902 - DNA, 25 bp, Homo sapien
gctagctctccgtgggaggtctcga

SEQ ID NO: 2436903 - DNA, 25 bp, Homo sapien
tttgcagtcgcaggcgctagctctc

SEQ ID NO: 2436904 - DNA, 25 bp, Homo sapien
cctgagggaagaggcgcgcccctta

SEQ ID NO: 2436905 - DNA, 25 bp, Homo sapien
ctcctggagcttgcagtctagcggg

SEQ ID NO: 2436906 - DNA, 25 bp, Homo sapien
agcttgcagtctagcgggcaaccga

SEQ ID NO: 2436907 - DNA, 25 bp, Homo sapien
tagcgggcaaccgacgcacgggcat

SEQ ID NO: 2436908 - DNA, 25 bp, Homo sapien
agtctagcgggcaaccgacgcacgg

SEQ ID NO: 2436909 - DNA, 25 bp, Homo sapien
tgcgcacgccccagacagtcctgga

SEQ ID NO: 2436910 - DNA, 25 bp, Homo sapien
cgccccagacagtcctggagagatg

SEQ ID NO: 2436911 - DNA, 25 bp, Homo sapien
cacgccccagacagtcctggagaga

SEQ ID NO: 2436912 - DNA, 25 bp, Homo sapien
ccccagacagtcctggagagatgcg

SEQ ID NO: 2436913 - DNA, 25 bp, Homo sapien
aaaattgactcccaagtgtagtaca

SEQ ID NO: 2436914 - DNA, 25 bp, Homo sapien
gtataaacaattggcctctttgcgg

SEQ ID NO: 2436915 - DNA, 25 bp, Homo sapien
tcaggcatgcgttacagtgctagcg

SEQ ID NO: 2436916 - DNA, 25 bp, Homo sapien
agtgctagcgactgatacgtagttc

SEQ ID NO: 2436917 - DNA, 25 bp, Homo sapien
tcattgacaccagatgggcttgtag

SEQ ID NO: 2436918 - DNA, 25 bp, Homo sapien
gcacagcaccacacagggcgggctt

SEQ ID NO: 2436919 - DNA, 25 bp, Homo sapien
cagcaccacacagggcgggctttgc

SEQ ID NO: 2436920 - DNA, 25 bp, Homo sapien
gccacggcaacgccagatgcagcat

SEQ ID NO: 2436921 - DNA, 25 bp, Homo sapien
gaaaaccgagttgcagtcctggaaa

SEQ ID NO: 2436922 - DNA, 25 bp, Homo sapien
aaaatgacctcaaggaagctacggg

SEQ ID NO: 2436923 - DNA, 25 bp, Homo sapien
tacgcacgatatctagtgacagagg

SEQ ID NO: 2436924 - DNA, 25 bp, Homo sapien
gcaagaaatgaactttcagcagtct

SEQ ID NO: 2436925 - DNA, 25 bp, Homo sapien
gtgctcttacacagtatgcatcata

SEQ ID NO: 2436926 - DNA, 25 bp, Homo sapien
tgtcagtacaccagcgtttaacatc

SEQ ID NO: 2436927 - DNA, 25 bp, Homo sapien
tattatgggacgttttcagattggc

SEQ ID NO: 2436928 - DNA, 25 bp, Homo sapien
gcaaaactattgtgtgctcttacac

SEQ ID NO: 2436929 - DNA, 25 bp, Homo sapien
cttagttgaccagttgacatagcat

SEQ ID NO: 2436930 - DNA, 25 bp, Homo sapien
acttagttgaccagttgacatagca

SEQ ID NO: 2436931 - DNA, 25 bp, Homo sapien
gatctcactaccaatcaacacagga

SEQ ID NO: 2436932 - DNA, 25 bp, Homo sapien
aacttagttgaccagttgacatagc

SEQ ID NO: 2436933 - DNA, 25 bp, Homo sapien
cggcggctagttcccagcaggctga

SEQ ID NO: 2436934 - DNA, 25 bp, Homo sapien
aaggcacaggctcggcccctcgccg

SEQ ID NO: 2436935 - DNA, 25 bp, Homo sapien
tcagaccactactcgccctctggaa

SEQ ID NO: 2436936 - DNA, 25 bp, Homo sapien
aggctgaggccgtccgcaagaggct

SEQ ID NO: 2436937 - DNA, 25 bp, Homo sapien
atccagtatcacgaagcttttcccc

SEQ ID NO: 2436938 - DNA, 25 bp, Homo sapien
ctttccccattagatggtattggca

SEQ ID NO: 2436939 - DNA, 25 bp, Homo sapien
tcaggtaagggtacaatttcattgt

SEQ ID NO: 2436940 - DNA, 25 bp, Homo sapien
gttttacgtgcagctatcaagtttc

SEQ ID NO: 2436941 - DNA, 25 bp, Homo sapien
ttccaaatcctggacggaaacacaa

SEQ ID NO: 2436942 - DNA, 25 bp, Homo sapien
gaggttttcctggtgtctatattgg

SEQ ID NO: 2436943 - DNA, 25 bp, Homo sapien
tttcctggtgtctatattgggccat

SEQ ID NO: 2436944 - DNA, 25 bp, Homo sapien
cagttacggacatggctgtggtcga

SEQ ID NO: 2436945 - DNA, 25 bp, Homo sapien
tggctgtggtcgaagaggttttcct

SEQ ID NO: 2436946 - DNA, 25 bp, Homo sapien
gacccaaagcgggtaagccattgcc

SEQ ID NO: 2436947 - DNA, 25 bp, Homo sapien
caaagcgggtaagccattgccggct

SEQ ID NO: 2436948 - DNA, 25 bp, Homo sapien
gcgggtaagccattgccggctcgaa

SEQ ID NO: 2436949 - DNA, 25 bp, Homo sapien
gggtaagccattgccggctcgaatg

SEQ ID NO: 2436950 - DNA, 25 bp, Homo sapien
atccagctaatcctgtgtctcagat

SEQ ID NO: 2436951 - DNA, 25 bp, Homo sapien
cagctaatcctgtgtctcagatccc

SEQ ID NO: 2436952 - DNA, 25 bp, Homo sapien
tccagctaatcctgtgtctcagatc

SEQ ID NO: 2436953 - DNA, 25 bp, Homo sapien
ctaatcctgtgtctcagatccccct

SEQ ID NO: 2436954 - DNA, 25 bp, Homo sapien
tgctcgaagagcaggcacagatcct

SEQ ID NO: 2436955 - DNA, 25 bp, Homo sapien
atccaggatttggctcgagtgtgag

SEQ ID NO: 2436956 - DNA, 25 bp, Homo sapien
atttggctcgagtgtgaggtatcca

SEQ ID NO: 2436957 - DNA, 25 bp, Homo sapien
gttgttgctcgaagagcaggcacag

SEQ ID NO: 2436958 - DNA, 25 bp, Homo sapien
tggggttttcgcctcacggattcca

SEQ ID NO: 2436959 - DNA, 25 bp, Homo sapien
ttgagccataagaaacacagatcag

SEQ ID NO: 2436960 - DNA, 25 bp, Homo sapien
ttaggatgcacccaggctaaagggc

SEQ ID NO: 2436961 - DNA, 25 bp, Homo sapien
ccgatcggaaatggcaatgggcacc

SEQ ID NO: 2436962 - DNA, 25 bp, Homo sapien
gaagggcagcccacaaactgacttc

SEQ ID NO: 2436963 - DNA, 25 bp, Homo sapien
ggaagtacagcccaaaacagtgatt

SEQ ID NO: 2436964 - DNA, 25 bp, Homo sapien
ttcttgtaaaaagcggatggatgct

SEQ ID NO: 2436965 - DNA, 25 bp, Homo sapien
gctgagtaatcgagtagttaggcac

SEQ ID NO: 2436966 - DNA, 25 bp, Homo sapien
tggcaagcaagaagcgggagctctt

SEQ ID NO: 2436967 - DNA, 25 bp, Homo sapien
cagtaacctgcaggagtttgcgggc

SEQ ID NO: 2436968 - DNA, 25 bp, Homo sapien
ccgacacctgcagtttgagcgcttt

SEQ ID NO: 2436969 - DNA, 25 bp, Homo sapien
gatatacaacgaacagatggcaagc

SEQ ID NO: 2436970 - DNA, 25 bp, Homo sapien
tggcagctgagtgttcgacttggaa

SEQ ID NO: 2436971 - DNA, 25 bp, Homo sapien
cactgtcctgggagttggtgcgccc

SEQ ID NO: 2436972 - DNA, 25 bp, Homo sapien
tgtttgatgggtgcaacctgaccag

SEQ ID NO: 2436973 - DNA, 25 bp, Homo sapien
tgctgtgaaatagtgtgagctggca

SEQ ID NO: 2436974 - DNA, 25 bp, Homo sapien
taggtaaagttgaattccatcctta

SEQ ID NO: 2436975 - DNA, 25 bp, Homo sapien
ctttgagagcttggtaataagaagc

SEQ ID NO: 2436976 - DNA, 25 bp, Homo sapien
gggagcagtgaaaaggtcttaataa

SEQ ID NO: 2436977 - DNA, 25 bp, Homo sapien
taattaagaatctgagtctaaacag

SEQ ID NO: 2436978 - DNA, 25 bp, Homo sapien
ctaggccaaagaaagagaatagctc

SEQ ID NO: 2436979 - DNA, 25 bp, Homo sapien
gggtctcactgtgttgcctaggccg

SEQ ID NO: 2436980 - DNA, 25 bp, Homo sapien
tctcactgtgttgcctaggccggtc

SEQ ID NO: 2436981 - DNA, 25 bp, Homo sapien
aaaaagaagtagagacagggagaca

SEQ ID NO: 2436982 - DNA, 25 bp, Homo sapien
cactgtgttgcctaggccggtcttg

SEQ ID NO: 2436983 - DNA, 25 bp, Homo sapien
taggtatcctaggtaagagccccta

SEQ ID NO: 2436984 - DNA, 25 bp, Homo sapien
cagaattaacatacaaggttgccac

SEQ ID NO: 2436985 - DNA, 25 bp, Homo sapien
catcacaagtgcctctgaaagcgag

SEQ ID NO: 2436986 - DNA, 25 bp, Homo sapien
gtgcacctggccgaaatagctcaag

SEQ ID NO: 2436987 - DNA, 25 bp, Homo sapien
aaggccatgaagtgagtgtccacac

SEQ ID NO: 2436988 - DNA, 25 bp, Homo sapien
agtatcttctttatgcaaggcacta

SEQ ID NO: 2436989 - DNA, 25 bp, Homo sapien
cactacactgtatagcttcccaaga

SEQ ID NO: 2436990 - DNA, 25 bp, Homo sapien
tacttataactctacaagacaggga

SEQ ID NO: 2436991 - DNA, 25 bp, Homo sapien
tggaggaggaacaaaaatctataac

SEQ ID NO: 2436992 - DNA, 25 bp, Homo sapien
caaaaatctataactggctgtgatc

SEQ ID NO: 2436993 - DNA, 25 bp, Homo sapien
gagtggaggaggaacaaaaatctat

SEQ ID NO: 2436994 - DNA, 25 bp, Homo sapien
acaaaaatctataactggctgtgat

SEQ ID NO: 2436995 - DNA, 25 bp, Homo sapien
gtgagaagatcacatggtgcccaga

SEQ ID NO: 2436996 - DNA, 25 bp, Homo sapien
gcaccctcatgagaagcacttgctt

SEQ ID NO: 2436997 - DNA, 25 bp, Homo sapien
ggtgcccagaagattaagacctaac

SEQ ID NO: 2436998 - DNA, 25 bp, Homo sapien
gcctatcaggttatgggaacagatt

SEQ ID NO: 2436999 - DNA, 25 bp, Homo sapien
cattgttaacctgtcagcccacgtt

SEQ ID NO: 2437000 - DNA, 25 bp, Homo sapien
ctgtcagcccacgtttttgccactg

SEQ ID NO: 2437001 - DNA, 25 bp, Homo sapien
taatacattgttaacctgtcagccc

SEQ ID NO: 2437002 - DNA, 25 bp, Homo sapien
gaaagtgaactattaatacattgtt

SEQ ID NO: 2437003 - DNA, 25 bp, Homo sapien
tccatttgacacttctcttgcatct

SEQ ID NO: 2437004 - DNA, 25 bp, Homo sapien
ccatttgacacttctcttgcatctt

SEQ ID NO: 2437005 - DNA, 25 bp, Homo sapien
ttctcttgcatctttctaaggccat

SEQ ID NO: 2437006 - DNA, 25 bp, Homo sapien
tcttgcatctttctaaggccatctg

SEQ ID NO: 2437007 - DNA, 25 bp, Homo sapien
aattgtcccagatttcgctattgga

SEQ ID NO: 2437008 - DNA, 25 bp, Homo sapien
aagctggctcctgttgtctattgac

SEQ ID NO: 2437009 - DNA, 25 bp, Homo sapien
cgctattggaaacccctttaagctg

SEQ ID NO: 2437010 - DNA, 25 bp, Homo sapien
cacccgccgcagtttggtaggcaga

SEQ ID NO: 2437011 - DNA, 25 bp, Homo sapien
acttctaatgtgtattgccagggca

SEQ ID NO: 2437012 - DNA, 25 bp, Homo sapien
catagcctaggtagcagaaccacca

SEQ ID NO: 2437013 - DNA, 25 bp, Homo sapien
catacaccttgtccctttctgagct

SEQ ID NO: 2437014 - DNA, 25 bp, Homo sapien
ggcgtgagcagtgagacaacatagc

SEQ ID NO: 2437015 - DNA, 25 bp, Homo sapien
ggaaaaaccatgaacgctacctgat

SEQ ID NO: 2437016 - DNA, 25 bp, Homo sapien
gaaaaggcataagtctgctactgtc

SEQ ID NO: 2437017 - DNA, 25 bp, Homo sapien
gctactgtcaggtggttcgccaaaa

SEQ ID NO: 2437018 - DNA, 25 bp, Homo sapien
caaggctacaaggtcagaacagaag

SEQ ID NO: 2437019 - DNA, 25 bp, Homo sapien
agcaacgtcacgtctttcccctggg

SEQ ID NO: 2437020 - DNA, 25 bp, Homo sapien
tgcagcaacgtcacgtctttcccct

SEQ ID NO: 2437021 - DNA, 25 bp, Homo sapien
cgcgtgtgcagctcgaggctttgca

SEQ ID NO: 2437022 - DNA, 25 bp, Homo sapien
cgtctttcccctgggcgcgtgtgca

SEQ ID NO: 2437023 - DNA, 25 bp, Homo sapien
ccaggtgagcccggcgggctctcat

SEQ ID NO: 2437024 - DNA, 25 bp, Homo sapien
gccaggtgagcccggcgggctctca

SEQ ID NO: 2437025 - DNA, 25 bp, Homo sapien
cgccaggtgagcccggcgggctctc

SEQ ID NO: 2437026 - DNA, 25 bp, Homo sapien
tcagccggagattccaactgcaggg

SEQ ID NO: 2437027 - DNA, 25 bp, Homo sapien
tgcagggagcgcacctcctctggct

SEQ ID NO: 2437028 - DNA, 25 bp, Homo sapien
gcctcagccggagattccaactgca

SEQ ID NO: 2437029 - DNA, 25 bp, Homo sapien
tagggcgtgtttccgaaggatggca

SEQ ID NO: 2437030 - DNA, 25 bp, Homo sapien
taacacaatgatgccttacccagtg

SEQ ID NO: 2437031 - DNA, 25 bp, Homo sapien
tattagttcctagccagtcaaatgg

SEQ ID NO: 2437032 - DNA, 25 bp, Homo sapien
gtacaagccttgactggatgcagaa

SEQ ID NO: 2437033 - DNA, 25 bp, Homo sapien
tacccagtgcctttgcggattgaaa

SEQ ID NO: 2437034 - DNA, 25 bp, Homo sapien
cagaaatatcccgtgttaatgtctt

SEQ ID NO: 2437035 - DNA, 25 bp, Homo sapien
caaactaatgataatctgccaaacc

SEQ ID NO: 2437036 - DNA, 25 bp, Homo sapien
tgtcacagaatgctcatagcctttg

SEQ ID NO: 2437037 - DNA, 25 bp, Homo sapien
tccagatcaacaatcataaacagtc

SEQ ID NO: 2437038 - DNA, 25 bp, Homo sapien
gtggccttggactccgctctaactg

SEQ ID NO: 2437039 - DNA, 25 bp, Homo sapien
gctaatgctaatgtggtacgacact

SEQ ID NO: 2437040 - DNA, 25 bp, Homo sapien
ggatttagtccagaagtgctaatgc

SEQ ID NO: 2437041 - DNA, 25 bp, Homo sapien
gctctaactgccctcagggtctaaa

SEQ ID NO: 2437042 - DNA, 25 bp, Homo sapien
tgttccattaaggtcaggaaaactg

SEQ ID NO: 2437043 - DNA, 25 bp, Homo sapien
tccccattgggacagacaattattt

SEQ ID NO: 2437044 - DNA, 25 bp, Homo sapien
gatcttctagtgctaccaacaagta

SEQ ID NO: 2437045 - DNA, 25 bp, Homo sapien
ttagagtaaatattccagcagctgg

SEQ ID NO: 2437046 - DNA, 25 bp, Homo sapien
cgtttccccaacactctctggtaat

SEQ ID NO: 2437047 - DNA, 25 bp, Homo sapien
cttcgtttccccaacactctctggt

SEQ ID NO: 2437048 - DNA, 25 bp, Homo sapien
accttcgtttccccaacactctctg

SEQ ID NO: 2437049 - DNA, 25 bp, Homo sapien
ttcgtttccccaacactctctggta

SEQ ID NO: 2437050 - DNA, 25 bp, Homo sapien
aaagcgtaaaactgatgtgaattca

SEQ ID NO: 2437051 - DNA, 25 bp, Homo sapien
aagcgtaaaactgatgtgaattcag

SEQ ID NO: 2437052 - DNA, 25 bp, Homo sapien
agcgtaaaactgatgtgaattcagt

SEQ ID NO: 2437053 - DNA, 25 bp, Homo sapien
aaaagcgtaaaactgatgtgaattc

SEQ ID NO: 2437054 - DNA, 25 bp, Homo sapien
gcctgagttgcagggttggctgctc

SEQ ID NO: 2437055 - DNA, 25 bp, Homo sapien
agaaggactctatagcctgagttgc

SEQ ID NO: 2437056 - DNA, 25 bp, Homo sapien
aggactctatagcctgagttgcagg

SEQ ID NO: 2437057 - DNA, 25 bp, Homo sapien
cctgagttgcagggttggctgctct

SEQ ID NO: 2437058 - DNA, 25 bp, Homo sapien
taagggccgattataaacgaacata

SEQ ID NO: 2437059 - DNA, 25 bp, Homo sapien
gattataaacgaacataggcaatgt

SEQ ID NO: 2437060 - DNA, 25 bp, Homo sapien
cctgcctctttaagggccgattata

SEQ ID NO: 2437061 - DNA, 25 bp, Homo sapien
aatccctgcctctttaagggccgat

SEQ ID NO: 2437062 - DNA, 25 bp, Homo sapien
gggaaagtgatgctcaaagtcacac

SEQ ID NO: 2437063 - DNA, 25 bp, Homo sapien
tattgaaatgtagtaagttctaaaa

SEQ ID NO: 2437064 - DNA, 25 bp, Homo sapien
ggcagagaggtcatatatttaatgc

SEQ ID NO: 2437065 - DNA, 25 bp, Homo sapien
gatttgctgactcaacacctttggg

SEQ ID NO: 2437066 - DNA, 25 bp, Homo sapien
tacaatgcagcacggaaaactgatc

SEQ ID NO: 2437067 - DNA, 25 bp, Homo sapien
tctccactaaaaatgtggtgcctgt

SEQ ID NO: 2437068 - DNA, 25 bp, Homo sapien
aatgcattcccaccttggcgacagg

SEQ ID NO: 2437069 - DNA, 25 bp, Homo sapien
taaaacttgaatgccagaatgagct

SEQ ID NO: 2437070 - DNA, 25 bp, Homo sapien
gaggccaatcgtttaactctgggag

SEQ ID NO: 2437071 - DNA, 25 bp, Homo sapien
taaaactctacccaaactgagatgc

SEQ ID NO: 2437072 - DNA, 25 bp, Homo sapien
tatagctgtcagttttgaacaccct

SEQ ID NO: 2437073 - DNA, 25 bp, Homo sapien
tatcttttaaatcccagagtccaag

SEQ ID NO: 2437074 - DNA, 25 bp, Homo sapien
acatgttcttatagagtctctcagg

SEQ ID NO: 2437075 - DNA, 25 bp, Homo sapien
tctgaactaacagagacgttaacgg

SEQ ID NO: 2437076 - DNA, 25 bp, Homo sapien
cacctggcacaaaaagggcttagaa

SEQ ID NO: 2437077 - DNA, 25 bp, Homo sapien
cagagacgttaacgggacacctggc

SEQ ID NO: 2437078 - DNA, 25 bp, Homo sapien
agcgtccatggtgttcagaagatag

SEQ ID NO: 2437079 - DNA, 25 bp, Homo sapien
ggtgttcagaagatagagttcaggc

SEQ ID NO: 2437080 - DNA, 25 bp, Homo sapien
tcatctagacacaagtgagtcagcg

SEQ ID NO: 2437081 - DNA, 25 bp, Homo sapien
cacaagtgagtcagcgtccatggtg

SEQ ID NO: 2437082 - DNA, 25 bp, Homo sapien
cctaggctggctatgaagttatttc

SEQ ID NO: 2437083 - DNA, 25 bp, Homo sapien
taaagaactgagtctagatggtttg

SEQ ID NO: 2437084 - DNA, 25 bp, Homo sapien
cttctcgaatacaccttgagacaag

SEQ ID NO: 2437085 - DNA, 25 bp, Homo sapien
tccagactccactcctaaagaactg

SEQ ID NO: 2437086 - DNA, 25 bp, Homo sapien
cctaacagtgtggacttagtgtgcc

SEQ ID NO: 2437087 - DNA, 25 bp, Homo sapien
ggaaattaatatcctggtatctgca

SEQ ID NO: 2437088 - DNA, 25 bp, Homo sapien
ggtatctgcaattaatccaagcttt

SEQ ID NO: 2437089 - DNA, 25 bp, Homo sapien
gtaatgatgtgacctttagctatgg

SEQ ID NO: 2437090 - DNA, 25 bp, Homo sapien
tatcaaagttgttgtaaccctatta

SEQ ID NO: 2437091 - DNA, 25 bp, Homo sapien
aacggttaagtccacagctcctgag

SEQ ID NO: 2437092 - DNA, 25 bp, Homo sapien
gagagcttaagatgtcagtccccaa

SEQ ID NO: 2437093 - DNA, 25 bp, Homo sapien
tccgaaggataaactgagctggccc

SEQ ID NO: 2437094 - DNA, 25 bp, Homo sapien
gaaacacactggctctgatggctac

SEQ ID NO: 2437095 - DNA, 25 bp, Homo sapien
ctgcagaagacagactaatccagtg

SEQ ID NO: 2437096 - DNA, 25 bp, Homo sapien
tgtcagcaggcctttagagatgctt

SEQ ID NO: 2437097 - DNA, 25 bp, Homo sapien
cgtagccacgggtggcttcttctgt

SEQ ID NO: 2437098 - DNA, 25 bp, Homo sapien
tcagcaggcctttagagatgcttac

SEQ ID NO: 2437099 - DNA, 25 bp, Homo sapien
taacgtagccacgggtggcttcttc

SEQ ID NO: 2437100 - DNA, 25 bp, Homo sapien
gtatgcccacagtccaggaaggaca

SEQ ID NO: 2437101 - DNA, 25 bp, Homo sapien
aaggacatgcccagtgcaatcaaac

SEQ ID NO: 2437102 - DNA, 25 bp, Homo sapien
cgtatgcccacagtccaggaaggac

SEQ ID NO: 2437103 - DNA, 25 bp, Homo sapien
ccagtgcaatcaaacattgccaacc

SEQ ID NO: 2437104 - DNA, 25 bp, Homo sapien
aaaaaatcagctgccttcctcaaca

SEQ ID NO: 2437105 - DNA, 25 bp, Homo sapien
taccaccaagggttgcacaagtcat

SEQ ID NO: 2437106 - DNA, 25 bp, Homo sapien
tcaccaggctctttgaagagccatg

SEQ ID NO: 2437107 - DNA, 25 bp, Homo sapien
aagacaaaatatggtcatcactcac

SEQ ID NO: 2437108 - DNA, 25 bp, Homo sapien
aggtgtcttgctatatttctcaagc

SEQ ID NO: 2437109 - DNA, 25 bp, Homo sapien
tgagttgccaggattacagacgcac

SEQ ID NO: 2437110 - DNA, 25 bp, Homo sapien
gtgtcttgctatatttctcaagctg

SEQ ID NO: 2437111 - DNA, 25 bp, Homo sapien
acaaggtgtcttgctatatttctca

SEQ ID NO: 2437112 - DNA, 25 bp, Homo sapien
gaattactaagaatggaaactacag

SEQ ID NO: 2437113 - DNA, 25 bp, Homo sapien
tacattgtctcgatcacctggaggt

SEQ ID NO: 2437114 - DNA, 25 bp, Homo sapien
tctaaatcacactgcatgccctatt

SEQ ID NO: 2437115 - DNA, 25 bp, Homo sapien
gacaaatcttagtaaccaaagtgaa

SEQ ID NO: 2437116 - DNA, 25 bp, Homo sapien
gttcatttctgaatgtcagtgaacc

SEQ ID NO: 2437117 - DNA, 25 bp, Homo sapien
cctgatacctatgcccctgctcttc

SEQ ID NO: 2437118 - DNA, 25 bp, Homo sapien
ccacctcaaccatccctgataccta

SEQ ID NO: 2437119 - DNA, 25 bp, Homo sapien
ctgttcatttctgaatgtcagtgaa

SEQ ID NO: 2437120 - DNA, 25 bp, Homo sapien
ataatgccacatgccctaggtcccg

SEQ ID NO: 2437121 - DNA, 25 bp, Homo sapien
taggtcccggacataaaccactaca

SEQ ID NO: 2437122 - DNA, 25 bp, Homo sapien
aacacaaagcccagataagccacgc

SEQ ID NO: 2437123 - DNA, 25 bp, Homo sapien
tgataaggaccaagattcctcctgc

SEQ ID NO: 2437124 - DNA, 25 bp, Homo sapien
tttaagtccctagagatgcaacaag

SEQ ID NO: 2437125 - DNA, 25 bp, Homo sapien
ggcctagaaacgcaatgagccattt

SEQ ID NO: 2437126 - DNA, 25 bp, Homo sapien
taaatcacccaaagttagatactgg

SEQ ID NO: 2437127 - DNA, 25 bp, Homo sapien
aattaaggtgcctcaaacttcagtg

SEQ ID NO: 2437128 - DNA, 25 bp, Homo sapien
tccattggcaaagtcactcattact

SEQ ID NO: 2437129 - DNA, 25 bp, Homo sapien
cattactggccgcaagctcgtaaat

SEQ ID NO: 2437130 - DNA, 25 bp, Homo sapien
ccgcaagctcgtaaatgtgaggatg

SEQ ID NO: 2437131 - DNA, 25 bp, Homo sapien
aaagtcactcattactggccgcaag

SEQ ID NO: 2437132 - DNA, 25 bp, Homo sapien
cgtgaccactttaggttcaggaatc

SEQ ID NO: 2437133 - DNA, 25 bp, Homo sapien
gatgctctacatcttggaagacagc

SEQ ID NO: 2437134 - DNA, 25 bp, Homo sapien
gaaagtcattcatccctgttagatg

SEQ ID NO: 2437135 - DNA, 25 bp, Homo sapien
gagtcagaaccactcgggcaaagcg

SEQ ID NO: 2437136 - DNA, 25 bp, Homo sapien
ctggaagaaaacataggagcagatg

SEQ ID NO: 2437137 - DNA, 25 bp, Homo sapien
gaagaaaacataggagcagatgact

SEQ ID NO: 2437138 - DNA, 25 bp, Homo sapien
agaaaacataggagcagatgactgt

SEQ ID NO: 2437139 - DNA, 25 bp, Homo sapien
ggaagaaaacataggagcagatgac

SEQ ID NO: 2437140 - DNA, 25 bp, Homo sapien
aattagccgagtatggtggccagag

SEQ ID NO: 2437141 - DNA, 25 bp, Homo sapien
ttagccgagtatggtggccagagcc

SEQ ID NO: 2437142 - DNA, 25 bp, Homo sapien
ccgagtatggtggccagagcctgta

SEQ ID NO: 2437143 - DNA, 25 bp, Homo sapien
attacactccaacttgggcgacgag

SEQ ID NO: 2437144 - DNA, 25 bp, Homo sapien
ggcccaaagtaacatcccagcacaa

SEQ ID NO: 2437145 - DNA, 25 bp, Homo sapien
ataggttcctgtcatggtggagctc

SEQ ID NO: 2437146 - DNA, 25 bp, Homo sapien
tccatgacaaactggccagaatagg

SEQ ID NO: 2437147 - DNA, 25 bp, Homo sapien
cagcaggcccaaagtaacatcccag

SEQ ID NO: 2437148 - DNA, 25 bp, Homo sapien
tatgcaccaccaacaccaagtgctg

SEQ ID NO: 2437149 - DNA, 25 bp, Homo sapien
agaagctaggctcaagtctggacct

SEQ ID NO: 2437150 - DNA, 25 bp, Homo sapien
aatctgctcagacaatatccaaaac

SEQ ID NO: 2437151 - DNA, 25 bp, Homo sapien
aagtgctgtgctgcgcactgtgcca

SEQ ID NO: 2437152 - DNA, 25 bp, Homo sapien
gcctgcagtcccattacccaaaaga

SEQ ID NO: 2437153 - DNA, 25 bp, Homo sapien
ttgcctgcagtcccattacccaaaa

SEQ ID NO: 2437154 - DNA, 25 bp, Homo sapien
cccaaaagactgagatgggaaaatc

SEQ ID NO: 2437155 - DNA, 25 bp, Homo sapien
gagagactccagtaaaaacacttta

SEQ ID NO: 2437156 - DNA, 25 bp, Homo sapien
cagccagtgtcgagttatctttagg

SEQ ID NO: 2437157 - DNA, 25 bp, Homo sapien
atgaggactgctggtatttgtacag

SEQ ID NO: 2437158 - DNA, 25 bp, Homo sapien
tccacagccagtgtcgagttatctt

SEQ ID NO: 2437159 - DNA, 25 bp, Homo sapien
tgctggtatttgtacagacttcaac

SEQ ID NO: 2437160 - DNA, 25 bp, Homo sapien
catagacgggaaacaaatggtgatc

SEQ ID NO: 2437161 - DNA, 25 bp, Homo sapien
gaatagaatcctcagtcaaagcaga

SEQ ID NO: 2437162 - DNA, 25 bp, Homo sapien
gatcaaaactacacaggcaggccag

SEQ ID NO: 2437163 - DNA, 25 bp, Homo sapien
caatcatctataagaggtaggctgg

SEQ ID NO: 2437164 - DNA, 25 bp, Homo sapien
ccacccataaccctggcttactcac

SEQ ID NO: 2437165 - DNA, 25 bp, Homo sapien
tcactaccacccataaccctggctt

SEQ ID NO: 2437166 - DNA, 25 bp, Homo sapien
acattcactaccacccataaccctg

SEQ ID NO: 2437167 - DNA, 25 bp, Homo sapien
cctcacattcactaccacccataac

SEQ ID NO: 2437168 - DNA, 25 bp, Homo sapien
aaagtacttattggcttctcgaact

SEQ ID NO: 2437169 - DNA, 25 bp, Homo sapien
gagtgcaatgcaggattcaatgaaa

SEQ ID NO: 2437170 - DNA, 25 bp, Homo sapien
gactgagacaacaaagacattgatg

SEQ ID NO: 2437171 - DNA, 25 bp, Homo sapien
tcgaacttcctgcttattgttccgg

SEQ ID NO: 2437172 - DNA, 25 bp, Homo sapien
gatgcccacagcctgttcaatctgt

SEQ ID NO: 2437173 - DNA, 25 bp, Homo sapien
ggcagaatgcaggtacatgttgtgt

SEQ ID NO: 2437174 - DNA, 25 bp, Homo sapien
gcctgttcaatctgtggagtgcgac

SEQ ID NO: 2437175 - DNA, 25 bp, Homo sapien
cttgactaaggcagaatgcaggtac

SEQ ID NO: 2437176 - DNA, 25 bp, Homo sapien
ggatggtacgaacatgcccttgagt

SEQ ID NO: 2437177 - DNA, 25 bp, Homo sapien
caggatggtacgaacatgcccttga

SEQ ID NO: 2437178 - DNA, 25 bp, Homo sapien
atggtacgaacatgcccttgagtac

SEQ ID NO: 2437179 - DNA, 25 bp, Homo sapien
acaggatggtacgaacatgcccttg

SEQ ID NO: 2437180 - DNA, 25 bp, Homo sapien
ttaagaagctaatgaatatcctgta

SEQ ID NO: 2437181 - DNA, 25 bp, Homo sapien
taagaagctaatgaatatcctgtac

SEQ ID NO: 2437182 - DNA, 25 bp, Homo sapien
tatccaaatgtgagggccataatag

SEQ ID NO: 2437183 - DNA, 25 bp, Homo sapien
ctcatatccaaatgtgagggccata

SEQ ID NO: 2437184 - DNA, 25 bp, Homo sapien
agggccataatagtgatgagaaagc

SEQ ID NO: 2437185 - DNA, 25 bp, Homo sapien
aatgtgagggccataatagtgatga

SEQ ID NO: 2437186 - DNA, 25 bp, Homo sapien
gacagagagcagctcctttgaccct

SEQ ID NO: 2437187 - DNA, 25 bp, Homo sapien
gcagtgagctcagagaaggtagact

SEQ ID NO: 2437188 - DNA, 25 bp, Homo sapien
tgaccctcccattcccgctctcctt

SEQ ID NO: 2437189 - DNA, 25 bp, Homo sapien
agaaggtagacttccccatctgcca

SEQ ID NO: 2437190 - DNA, 25 bp, Homo sapien
gatgagaacgccaccccacagagga

SEQ ID NO: 2437191 - DNA, 25 bp, Homo sapien
tatttgtccaagaagagaaatacaa

SEQ ID NO: 2437192 - DNA, 25 bp, Homo sapien
catatttgtccaagaagagaaatac

SEQ ID NO: 2437193 - DNA, 25 bp, Homo sapien
tctgcaatggtgatgagaacgccac

SEQ ID NO: 2437194 - DNA, 25 bp, Homo sapien
acttggagaagctaggacttgaggg

SEQ ID NO: 2437195 - DNA, 25 bp, Homo sapien
gagaagctaggacttgagggaggag

SEQ ID NO: 2437196 - DNA, 25 bp, Homo sapien
agagatgagatatggaagtcagaga

SEQ ID NO: 2437197 - DNA, 25 bp, Homo sapien
agatatggaagtcagagagacggaa

SEQ ID NO: 2437198 - DNA, 25 bp, Homo sapien
catcagccacaggatgactcgtggg

SEQ ID NO: 2437199 - DNA, 25 bp, Homo sapien
gagccaatgacttcttgcatgtctg

SEQ ID NO: 2437200 - DNA, 25 bp, Homo sapien
gaagattgatagcaatggctgagcc

SEQ ID NO: 2437201 - DNA, 25 bp, Homo sapien
tgagccgatgatagccaactccacc

SEQ ID NO: 2437202 - DNA, 25 bp, Homo sapien
atagaatgaggccagcacataccgc

SEQ ID NO: 2437203 - DNA, 25 bp, Homo sapien
accttctaggaaatgcgagtctcaa

SEQ ID NO: 2437204 - DNA, 25 bp, Homo sapien
gacacacagattcctatggcatggg

SEQ ID NO: 2437205 - DNA, 25 bp, Homo sapien
catgggtgagagacaaacaggacaa

SEQ ID NO: 2437206 - DNA, 25 bp, Homo sapien
agcccagtaaccactcccagtctag

SEQ ID NO: 2437207 - DNA, 25 bp, Homo sapien
ggatactgacggtgacatacttcag

SEQ ID NO: 2437208 - DNA, 25 bp, Homo sapien
gatgcagcccagtaaccactcccag

SEQ ID NO: 2437209 - DNA, 25 bp, Homo sapien
atactgacggtgacatacttcagca

SEQ ID NO: 2437210 - DNA, 25 bp, Homo sapien
ccccacaagggtggccaacagaagg

SEQ ID NO: 2437211 - DNA, 25 bp, Homo sapien
acaagggtggccaacagaaggatcc

SEQ ID NO: 2437212 - DNA, 25 bp, Homo sapien
agccccacaagggtggccaacagaa

SEQ ID NO: 2437213 - DNA, 25 bp, Homo sapien
ccacaagggtggccaacagaaggat

SEQ ID NO: 2437214 - DNA, 25 bp, Homo sapien
gagaaaaggatgtgagagtgtatta

SEQ ID NO: 2437215 - DNA, 25 bp, Homo sapien
gtggagaaaaggatgtgagagtgta

SEQ ID NO: 2437216 - DNA, 25 bp, Homo sapien
gagagtgtattatgtgcttaaaagg

SEQ ID NO: 2437217 - DNA, 25 bp, Homo sapien
agtgtattatgtgcttaaaaggaca

SEQ ID NO: 2437218 - DNA, 25 bp, Homo sapien
taggcaatgctcataagaaaacctg

SEQ ID NO: 2437219 - DNA, 25 bp, Homo sapien
gcaaatcggattcaatatttcctgg

SEQ ID NO: 2437220 - DNA, 25 bp, Homo sapien
aacctggtccggtgaaagcccagag

SEQ ID NO: 2437221 - DNA, 25 bp, Homo sapien
cagagtttacgaaagctaaaacaag

SEQ ID NO: 2437222 - DNA, 25 bp, Homo sapien
agattaaactgaacatcaccattga

SEQ ID NO: 2437223 - DNA, 25 bp, Homo sapien
gattaaactgaacatcaccattgaa

SEQ ID NO: 2437224 - DNA, 25 bp, Homo sapien
cactttttattaagaagctggccac

SEQ ID NO: 2437225 - DNA, 25 bp, Homo sapien
actttttattaagaagctggccact

SEQ ID NO: 2437226 - DNA, 25 bp, Homo sapien
ctttttattaagaagctggccactt

SEQ ID NO: 2437227 - DNA, 25 bp, Homo sapien
ctgcaggttccatcagcctcttatt

SEQ ID NO: 2437228 - DNA, 25 bp, Homo sapien
tatactcccgtccctttggaattca

SEQ ID NO: 2437229 - DNA, 25 bp, Homo sapien
agaataacagtatcagtacctctgt

SEQ ID NO: 2437230 - DNA, 25 bp, Homo sapien
aataacagtatcagtacctctgtgc

SEQ ID NO: 2437231 - DNA, 25 bp, Homo sapien
gggaggggtcagacaaacctcatta

SEQ ID NO: 2437232 - DNA, 25 bp, Homo sapien
atagtcttcagagattgccagccaa

SEQ ID NO: 2437233 - DNA, 25 bp, Homo sapien
acttgagccatccagcagatctttc

SEQ ID NO: 2437234 - DNA, 25 bp, Homo sapien
tcaacaaacaagaggaaggatagct

SEQ ID NO: 2437235 - DNA, 25 bp, Homo sapien
cccagagtggagtaccatagcatga

SEQ ID NO: 2437236 - DNA, 25 bp, Homo sapien
cccagacaatagtgttctcctccaa

SEQ ID NO: 2437237 - DNA, 25 bp, Homo sapien
gacaatagtgttctcctccaaggac

SEQ ID NO: 2437238 - DNA, 25 bp, Homo sapien
cagacaatagtgttctcctccaagg

SEQ ID NO: 2437239 - DNA, 25 bp, Homo sapien
tccccagacaatagtgttctcctcc

SEQ ID NO: 2437240 - DNA, 25 bp, Homo sapien
ggagatcttctcattaaagtaagtg

SEQ ID NO: 2437241 - DNA, 25 bp, Homo sapien
cattaaagtaagtggcgaagtactc

SEQ ID NO: 2437242 - DNA, 25 bp, Homo sapien
atggagatcttctcattaaagtaag

SEQ ID NO: 2437243 - DNA, 25 bp, Homo sapien
aagtaagtggcgaagtactcctctg

SEQ ID NO: 2437244 - DNA, 25 bp, Homo sapien
caagactggcagactccccatgatc

SEQ ID NO: 2437245 - DNA, 25 bp, Homo sapien
accaagactggcagactccccatga

SEQ ID NO: 2437246 - DNA, 25 bp, Homo sapien
ttactataggcagggttgatgttac

SEQ ID NO: 2437247 - DNA, 25 bp, Homo sapien
ctgtgaaagagagggattactatag

SEQ ID NO: 2437248 - DNA, 25 bp, Homo sapien
gacatcttctgttcaggacccagca

SEQ ID NO: 2437249 - DNA, 25 bp, Homo sapien
tgacatcttctgttcaggacccagc

SEQ ID NO: 2437250 - DNA, 25 bp, Homo sapien
catctgacatcttctgttcaggacc

SEQ ID NO: 2437251 - DNA, 25 bp, Homo sapien
tctgacatcttctgttcaggaccca

SEQ ID NO: 2437252 - DNA, 25 bp, Homo sapien
ctgagtggctgagttcttagaatat

SEQ ID NO: 2437253 - DNA, 25 bp, Homo sapien
gtggctgagttcttagaatatgatt

SEQ ID NO: 2437254 - DNA, 25 bp, Homo sapien
gagtggctgagttcttagaatatga

SEQ ID NO: 2437255 - DNA, 25 bp, Homo sapien
tgagtggctgagttcttagaatatg

SEQ ID NO: 2437256 - DNA, 25 bp, Homo sapien
gagccaccacgcccagcctatttta

SEQ ID NO: 2437257 - DNA, 25 bp, Homo sapien
gccaccacgcccagcctattttatg

SEQ ID NO: 2437258 - DNA, 25 bp, Homo sapien
caccacgcccagcctattttatgag

SEQ ID NO: 2437259 - DNA, 25 bp, Homo sapien
catgatccgcccaccccacttccca

SEQ ID NO: 2437260 - DNA, 25 bp, Homo sapien
tactgaagaagtgatgaagcctcgc

SEQ ID NO: 2437261 - DNA, 25 bp, Homo sapien
tcctgtactaagcaacccgcagtgg

SEQ ID NO: 2437262 - DNA, 25 bp, Homo sapien
caagcatactggtagtggaaggcca

SEQ ID NO: 2437263 - DNA, 25 bp, Homo sapien
gcaccagcaggattaagcatagcgt

SEQ ID NO: 2437264 - DNA, 25 bp, Homo sapien
gatgattaatatcattaaggcactg

SEQ ID NO: 2437265 - DNA, 25 bp, Homo sapien
tatcattaaggcactggaaaatcag

SEQ ID NO: 2437266 - DNA, 25 bp, Homo sapien
ggccaggctgtaaatcacttttgta

SEQ ID NO: 2437267 - DNA, 25 bp, Homo sapien
cattaaggcactggaaaatcagctg

SEQ ID NO: 2437268 - DNA, 25 bp, Homo sapien
ttctcttgattgttccaatttagta

SEQ ID NO: 2437269 - DNA, 25 bp, Homo sapien
ctaatcttctcttgattgttccaat

SEQ ID NO: 2437270 - DNA, 25 bp, Homo sapien
gtcatccttgtgcagagaggccatg

SEQ ID NO: 2437271 - DNA, 25 bp, Homo sapien
gtatacgtgctgccgaagcaagcac

SEQ ID NO: 2437272 - DNA, 25 bp, Homo sapien
cactgtcattttcttgaaaattgtc

SEQ ID NO: 2437273 - DNA, 25 bp, Homo sapien
actgtcattttcttgaaaattgtcc

SEQ ID NO: 2437274 - DNA, 25 bp, Homo sapien
tgtcattttcttgaaaattgtccat

SEQ ID NO: 2437275 - DNA, 25 bp, Homo sapien
ctgtcattttcttgaaaattgtcca

SEQ ID NO: 2437276 - DNA, 25 bp, Homo sapien
gaagaacaatttggatagcccaaac

SEQ ID NO: 2437277 - DNA, 25 bp, Homo sapien
gaacaatttggatagcccaaacctg

SEQ ID NO: 2437278 - DNA, 25 bp, Homo sapien
ccccaaaacacatactagctataat

SEQ ID NO: 2437279 - DNA, 25 bp, Homo sapien
actctggaagaacaatttggatagc

SEQ ID NO: 2437280 - DNA, 25 bp, Homo sapien
tcaagcctgtaatcctagcattttg

SEQ ID NO: 2437281 - DNA, 25 bp, Homo sapien
aaagtttgggccgagtgcggtggct

SEQ ID NO: 2437282 - DNA, 25 bp, Homo sapien
aagcctgtaatcctagcattttgga

SEQ ID NO: 2437283 - DNA, 25 bp, Homo sapien
gcctgtaatcctagcattttggaag

SEQ ID NO: 2437284 - DNA, 25 bp, Homo sapien
gagccgtgatcagggcaccccagcc

SEQ ID NO: 2437285 - DNA, 25 bp, Homo sapien
tgagccgtgatcagggcaccccagc

SEQ ID NO: 2437286 - DNA, 25 bp, Homo sapien
tagttctaaaactcaatctgctccc

SEQ ID NO: 2437287 - DNA, 25 bp, Homo sapien
taaaactcaatctgctcccattcga

SEQ ID NO: 2437288 - DNA, 25 bp, Homo sapien
tgcccagcccaattagttctaaaac

SEQ ID NO: 2437289 - DNA, 25 bp, Homo sapien
caatctgctcccattcgaggtgtgg

SEQ ID NO: 2437290 - DNA, 25 bp, Homo sapien
ctctgagcaaagaataagtaataag

SEQ ID NO: 2437291 - DNA, 25 bp, Homo sapien
gagcaaagaataagtaataaggtta

SEQ ID NO: 2437292 - DNA, 25 bp, Homo sapien
ataaggttagaattctttagaagtg

SEQ ID NO: 2437293 - DNA, 25 bp, Homo sapien
gcaaagaataagtaataaggttaga

SEQ ID NO: 2437294 - DNA, 25 bp, Homo sapien
ttactgagccgcgtatgcaggctat

SEQ ID NO: 2437295 - DNA, 25 bp, Homo sapien
gccgcgtatgcaggctattcacaca

SEQ ID NO: 2437296 - DNA, 25 bp, Homo sapien
acacagaaggcgctccctgaagtcg

SEQ ID NO: 2437297 - DNA, 25 bp, Homo sapien
acagaaggcgctccctgaagtcggt

SEQ ID NO: 2437298 - DNA, 25 bp, Homo sapien
ccctgcggcgccgacgaagaggcca

SEQ ID NO: 2437299 - DNA, 25 bp, Homo sapien
tgcggcgccgacgaagaggccacga

SEQ ID NO: 2437300 - DNA, 25 bp, Homo sapien
cggcgccgacgaagaggccacgaaa

SEQ ID NO: 2437301 - DNA, 25 bp, Homo sapien
gcgccgacgaagaggccacgaaaga

SEQ ID NO: 2437302 - DNA, 25 bp, Homo sapien
ctgtgcccgtcggcctctttcgagg

SEQ ID NO: 2437303 - DNA, 25 bp, Homo sapien
tttcgaggcgtcgaagcaggtcagc

SEQ ID NO: 2437304 - DNA, 25 bp, Homo sapien
gtcgaagcaggtcagcgcaccccga

SEQ ID NO: 2437305 - DNA, 25 bp, Homo sapien
cgccatccggtgcagctgggagctg

SEQ ID NO: 2437306 - DNA, 25 bp, Homo sapien
ggtctttctctgaatggcgcgactc

SEQ ID NO: 2437307 - DNA, 25 bp, Homo sapien
tctttctctgaatggcgcgactcca

SEQ ID NO: 2437308 - DNA, 25 bp, Homo sapien
ctttctctgaatggcgcgactccat

SEQ ID NO: 2437309 - DNA, 25 bp, Homo sapien
tgggtctttctctgaatggcgcgac

SEQ ID NO: 2437310 - DNA, 25 bp, Homo sapien
tgcagcggccgggatgcgtggcccg

SEQ ID NO: 2437311 - DNA, 25 bp, Homo sapien
ccctccccgcgattggtcgacagga

SEQ ID NO: 2437312 - DNA, 25 bp, Homo sapien
attggtcgacaggacggcagccgca

SEQ ID NO: 2437313 - DNA, 25 bp, Homo sapien
cacatccctattggctggagtccct

SEQ ID NO: 2437314 - DNA, 25 bp, Homo sapien
aaggtttgatgaagttcctccagat

SEQ ID NO: 2437315 - DNA, 25 bp, Homo sapien
cagatcggaacctttcctttggcaa

SEQ ID NO: 2437316 - DNA, 25 bp, Homo sapien
aaaggtttgatgaagttcctccaga

SEQ ID NO: 2437317 - DNA, 25 bp, Homo sapien
tccagatcggaacctttcctttggc

SEQ ID NO: 2437318 - DNA, 25 bp, Homo sapien
cacagtgtggagctgcctccgtctt

SEQ ID NO: 2437319 - DNA, 25 bp, Homo sapien
gtgtggagctgcctccgtcttcagc

SEQ ID NO: 2437320 - DNA, 25 bp, Homo sapien
gtggagctgcctccgtcttcagctg

SEQ ID NO: 2437321 - DNA, 25 bp, Homo sapien
cagtgtggagctgcctccgtcttca

SEQ ID NO: 2437322 - DNA, 25 bp, Homo sapien
gaactagtttgactttcccaatgcc

SEQ ID NO: 2437323 - DNA, 25 bp, Homo sapien
agaactagtttgactttcccaatgc

SEQ ID NO: 2437324 - DNA, 25 bp, Homo sapien
actagtttgactttcccaatgccag

SEQ ID NO: 2437325 - DNA, 25 bp, Homo sapien
tagtttgactttcccaatgccagct

SEQ ID NO: 2437326 - DNA, 25 bp, Homo sapien
ccttcactggcatgggctaaccact

SEQ ID NO: 2437327 - DNA, 25 bp, Homo sapien
tctgtggatcttcaactctgctgcc

SEQ ID NO: 2437328 - DNA, 25 bp, Homo sapien
ccgtgcatgtacttgggtgtttccc

SEQ ID NO: 2437329 - DNA, 25 bp, Homo sapien
tcagttcatgtcctaggaagtcagc

SEQ ID NO: 2437330 - DNA, 25 bp, Homo sapien
tacttcctagattaagccggagcct

SEQ ID NO: 2437331 - DNA, 25 bp, Homo sapien
gaaggcctttcgcttgacaagacag

SEQ ID NO: 2437332 - DNA, 25 bp, Homo sapien
tctaggcctagactgggactgaagc

SEQ ID NO: 2437333 - DNA, 25 bp, Homo sapien
aatgctgctgcgacatacgtgatgg

SEQ ID NO: 2437334 - DNA, 25 bp, Homo sapien
taagaactctaacccgctatgttga

SEQ ID NO: 2437335 - DNA, 25 bp, Homo sapien
gaacagtataagaactctaacccgc

SEQ ID NO: 2437336 - DNA, 25 bp, Homo sapien
ttgaaaacgaccatgagggtagatc

SEQ ID NO: 2437337 - DNA, 25 bp, Homo sapien
cccgctatgttgaaaacgaccatga

SEQ ID NO: 2437338 - DNA, 25 bp, Homo sapien
gaaggctcaggctcgttataccata

SEQ ID NO: 2437339 - DNA, 25 bp, Homo sapien
aaaatgagcttgtactctgcctggg

SEQ ID NO: 2437340 - DNA, 25 bp, Homo sapien
tctttccagatagcaagcagcctgt

SEQ ID NO: 2437341 - DNA, 25 bp, Homo sapien
gactatccccagatcaaggtagggc

SEQ ID NO: 2437342 - DNA, 25 bp, Homo sapien
gagttctcggtaaaacacaggacag

SEQ ID NO: 2437343 - DNA, 25 bp, Homo sapien
cctcagggttacaatcttcgggcaa

SEQ ID NO: 2437344 - DNA, 25 bp, Homo sapien
tacaagccacgagtgaggtaacagg

SEQ ID NO: 2437345 - DNA, 25 bp, Homo sapien
tgctccacttgataatagaccaggg

SEQ ID NO: 2437346 - DNA, 25 bp, Homo sapien
ggtcacaatacagtcggcagtcaca

SEQ ID NO: 2437347 - DNA, 25 bp, Homo sapien
tgcaggcacacgcttctgggtcaca

SEQ ID NO: 2437348 - DNA, 25 bp, Homo sapien
tcttcagcatcaatacggtggaccc

SEQ ID NO: 2437349 - DNA, 25 bp, Homo sapien
gcggatggctcgaagttcttgcttc

SEQ ID NO: 2437350 - DNA, 25 bp, Homo sapien
tatttccacaaacataccgtctatt

SEQ ID NO: 2437351 - DNA, 25 bp, Homo sapien
acctttctgggtccaagcttctcaa

SEQ ID NO: 2437352 - DNA, 25 bp, Homo sapien
catgtatcccctaatttacactcac

SEQ ID NO: 2437353 - DNA, 25 bp, Homo sapien
tcttccctcctacacgaaaatctat

SEQ ID NO: 2437354 - DNA, 25 bp, Homo sapien
cacactggtaaaaccttggcgccgg

SEQ ID NO: 2437355 - DNA, 25 bp, Homo sapien
tacagtcacctggtcaaagcgtaca

SEQ ID NO: 2437356 - DNA, 25 bp, Homo sapien
gaatctctcgatggttcacctcctg

SEQ ID NO: 2437357 - DNA, 25 bp, Homo sapien
tccgtacagagttatggcgctgggc

SEQ ID NO: 2437358 - DNA, 25 bp, Homo sapien
aggattgaggctgtcgcagctgtca

SEQ ID NO: 2437359 - DNA, 25 bp, Homo sapien
gacccgagcccgtgaatgcatccat

SEQ ID NO: 2437360 - DNA, 25 bp, Homo sapien
atcaaacttcctcttgagacccgag

SEQ ID NO: 2437361 - DNA, 25 bp, Homo sapien
gtcgcagctgtcagcactatcactg

SEQ ID NO: 2437362 - DNA, 25 bp, Homo sapien
ccagctagccaggtacattaggatt

SEQ ID NO: 2437363 - DNA, 25 bp, Homo sapien
tcaccaccagctagccaggtacatt

SEQ ID NO: 2437364 - DNA, 25 bp, Homo sapien
ccaccagctagccaggtacattagg

SEQ ID NO: 2437365 - DNA, 25 bp, Homo sapien
caccagctagccaggtacattagga

SEQ ID NO: 2437366 - DNA, 25 bp, Homo sapien
aagaaagcacctcacctagcactga

SEQ ID NO: 2437367 - DNA, 25 bp, Homo sapien
tacacacagctctctaaagaaagca

SEQ ID NO: 2437368 - DNA, 25 bp, Homo sapien
aaaaaaggaatcagcattcctgtcc

SEQ ID NO: 2437369 - DNA, 25 bp, Homo sapien
tctttctctactagctctggccaac

SEQ ID NO: 2437370 - DNA, 25 bp, Homo sapien
ccagaaggacacgaatctgctcagc

SEQ ID NO: 2437371 - DNA, 25 bp, Homo sapien
tttcatacaaccaaggagtctgaga

SEQ ID NO: 2437372 - DNA, 25 bp, Homo sapien
caaggagtctgagatagtccatttc

SEQ ID NO: 2437373 - DNA, 25 bp, Homo sapien
ttccagaaggacacgaatctgctca

SEQ ID NO: 2437374 - DNA, 25 bp, Homo sapien
ctgtgttcaagagatacacttgtaa

SEQ ID NO: 2437375 - DNA, 25 bp, Homo sapien
gtgttcaagagatacacttgtaagt

SEQ ID NO: 2437376 - DNA, 25 bp, Homo sapien
tgtgttcaagagatacacttgtaag

SEQ ID NO: 2437377 - DNA, 25 bp, Homo sapien
gttcaagagatacacttgtaagttt

SEQ ID NO: 2437378 - DNA, 25 bp, Homo sapien
aaaagggacgggtggcagttggctg

SEQ ID NO: 2437379 - DNA, 25 bp, Homo sapien
atcaagaccacagcactaaaaggga

SEQ ID NO: 2437380 - DNA, 25 bp, Homo sapien
tgtggggataacttctagcatttca

SEQ ID NO: 2437381 - DNA, 25 bp, Homo sapien
cactgccactctcaacccctttaaa

SEQ ID NO: 2437382 - DNA, 25 bp, Homo sapien
gagaaaggacgaggcggcaccctcc

SEQ ID NO: 2437383 - DNA, 25 bp, Homo sapien
agggccgatcccgagaaaggacgag

SEQ ID NO: 2437384 - DNA, 25 bp, Homo sapien
atcccgagaaaggacgaggcggcac

SEQ ID NO: 2437385 - DNA, 25 bp, Homo sapien
cgcccgagggccgatcccgagaaag

SEQ ID NO: 2437386 - DNA, 25 bp, Homo sapien
gcagacgcccagaaccgccccggct

SEQ ID NO: 2437387 - DNA, 25 bp, Homo sapien
tcccgtgatggtctctgccgccccc

SEQ ID NO: 2437388 - DNA, 25 bp, Homo sapien
agggaggagcgagcgagtcccgggc

SEQ ID NO: 2437389 - DNA, 25 bp, Homo sapien
ggcgtctccggcaactcgggcgccc

SEQ ID NO: 2437390 - DNA, 25 bp, Homo sapien
agcgcactggctcttataggcgccg

SEQ ID NO: 2437391 - DNA, 25 bp, Homo sapien
aggcgccggcacgtcctgaccgaga

SEQ ID NO: 2437392 - DNA, 25 bp, Homo sapien
gaaatggagtctacgggccggccca

SEQ ID NO: 2437393 - DNA, 25 bp, Homo sapien
ctggctcttataggcgccggcacgt

SEQ ID NO: 2437394 - DNA, 25 bp, Homo sapien
tgccgggagttgtaggcggtaactg

SEQ ID NO: 2437395 - DNA, 25 bp, Homo sapien
tgtaggcggtaactgctgcaaagcc

SEQ ID NO: 2437396 - DNA, 25 bp, Homo sapien
tgcaaagccgaagccggcgcgcaaa

SEQ ID NO: 2437397 - DNA, 25 bp, Homo sapien
gtaactgctgcaaagccgaagccgg

SEQ ID NO: 2437398 - DNA, 25 bp, Homo sapien
tgaggcttgaaagattactctgtcc

SEQ ID NO: 2437399 - DNA, 25 bp, Homo sapien
aatcatgacccgagcagtgttttct

SEQ ID NO: 2437400 - DNA, 25 bp, Homo sapien
cagtagtatccttagattattgagc

SEQ ID NO: 2437401 - DNA, 25 bp, Homo sapien
tatactttggtcttgcagctatgac

SEQ ID NO: 2437402 - DNA, 25 bp, Homo sapien
gcaagcattctagcagggaaagcct

SEQ ID NO: 2437403 - DNA, 25 bp, Homo sapien
cacaaagggcatctttcccaactca

SEQ ID NO: 2437404 - DNA, 25 bp, Homo sapien
cactccattttgcagtggtaggata

SEQ ID NO: 2437405 - DNA, 25 bp, Homo sapien
ggaaagccttaactcacaactaaga

SEQ ID NO: 2437406 - DNA, 25 bp, Homo sapien
tcaatttgtttcaaaccaagagaaa

SEQ ID NO: 2437407 - DNA, 25 bp, Homo sapien
ttcaatttgtttcaaaccaagagaa

SEQ ID NO: 2437408 - DNA, 25 bp, Homo sapien
tttcaatttgtttcaaaccaagaga

SEQ ID NO: 2437409 - DNA, 25 bp, Homo sapien
tatgttgtagtcaccagaagggcca

SEQ ID NO: 2437410 - DNA, 25 bp, Homo sapien
cacacagtcagacgagtcaggttct

SEQ ID NO: 2437411 - DNA, 25 bp, Homo sapien
gagataccagtacatttgagaccag

SEQ ID NO: 2437412 - DNA, 25 bp, Homo sapien
ctgtgtgtaccacaagagcttgggc

SEQ ID NO: 2437413 - DNA, 25 bp, Homo sapien
ctacttcagtatgatatgatagcta

SEQ ID NO: 2437414 - DNA, 25 bp, Homo sapien
cttcagtatgatatgatagctatca

SEQ ID NO: 2437415 - DNA, 25 bp, Homo sapien
cagtatgatatgatagctatcattg

SEQ ID NO: 2437416 - DNA, 25 bp, Homo sapien
agtatgatatgatagctatcattgg

SEQ ID NO: 2437417 - DNA, 25 bp, Homo sapien
gcttcttcctgaaagttctgtatca

SEQ ID NO: 2437418 - DNA, 25 bp, Homo sapien
tgtccagaataaaacatgcttcttc

SEQ ID NO: 2437419 - DNA, 25 bp, Homo sapien
ttcattgtgtccagaataaaacatg

SEQ ID NO: 2437420 - DNA, 25 bp, Homo sapien
ttgtgtccagaataaaacatgcttc

SEQ ID NO: 2437421 - DNA, 25 bp, Homo sapien
gataaaggcatgagtttcaccctcc

SEQ ID NO: 2437422 - DNA, 25 bp, Homo sapien
tcccaggatcctaataaggtggccc

SEQ ID NO: 2437423 - DNA, 25 bp, Homo sapien
gcaatagacccttttatgagccaca

SEQ ID NO: 2437424 - DNA, 25 bp, Homo sapien
tggcccatgatgtgaaagcttcagg

SEQ ID NO: 2437425 - DNA, 25 bp, Homo sapien
ttgtattaaggttacatgggatgca

SEQ ID NO: 2437426 - DNA, 25 bp, Homo sapien
taatgatgtaaccatttcacttaaa

SEQ ID NO: 2437427 - DNA, 25 bp, Homo sapien
caattagaataatgatgtaaccatt

SEQ ID NO: 2437428 - DNA, 25 bp, Homo sapien
ttaaggttacatgggatgcaattag

SEQ ID NO: 2437429 - DNA, 25 bp, Homo sapien
tgtcaattcaacagctgttagttct

SEQ ID NO: 2437430 - DNA, 25 bp, Homo sapien
tgcttgtaaatctggctgatctggc

SEQ ID NO: 2437431 - DNA, 25 bp, Homo sapien
cagctgttagttcttctagatagat

SEQ ID NO: 2437432 - DNA, 25 bp, Homo sapien
tgatgagcacatgaattcctgttgg

SEQ ID NO: 2437433 - DNA, 25 bp, Homo sapien
gctgctccctcaactgcagtgattc

SEQ ID NO: 2437434 - DNA, 25 bp, Homo sapien
tccctcaactgcagtgattcctgac

SEQ ID NO: 2437435 - DNA, 25 bp, Homo sapien
tgctccctcaactgcagtgattcct

SEQ ID NO: 2437436 - DNA, 25 bp, Homo sapien
gctccctcaactgcagtgattcctg

SEQ ID NO: 2437437 - DNA, 25 bp, Homo sapien
acataaatggttaaccttggacgca

SEQ ID NO: 2437438 - DNA, 25 bp, Homo sapien
cataaatggttaaccttggacgcac

SEQ ID NO: 2437439 - DNA, 25 bp, Homo sapien
catcatctctagttaatttcaataa

SEQ ID NO: 2437440 - DNA, 25 bp, Homo sapien
ccacagatttggatcacatcatctc

SEQ ID NO: 2437441 - DNA, 25 bp, Homo sapien
tcacatcatctctagttaatttcaa

SEQ ID NO: 2437442 - DNA, 25 bp, Homo sapien
cacatcatctctagttaatttcaat

SEQ ID NO: 2437443 - DNA, 25 bp, Homo sapien
aaagccttgtgaatgtagaaaaacg

SEQ ID NO: 2437444 - DNA, 25 bp, Homo sapien
tcgatgcaaccactgctgagcttcc

SEQ ID NO: 2437445 - DNA, 25 bp, Homo sapien
tttgtgaaaagccttgtgaatgtag

SEQ ID NO: 2437446 - DNA, 25 bp, Homo sapien
tagaaaaacgatttcgatgcaacca

SEQ ID NO: 2437447 - DNA, 25 bp, Homo sapien
tggctggtggtttggtgaaccattt

SEQ ID NO: 2437448 - DNA, 25 bp, Homo sapien
tctggctggtggtttggtgaaccat

SEQ ID NO: 2437449 - DNA, 25 bp, Homo sapien
atctgtgactggagggggtggctct

SEQ ID NO: 2437450 - DNA, 25 bp, Homo sapien
gctctggctggtggtttggtgaacc

SEQ ID NO: 2437451 - DNA, 25 bp, Homo sapien
tctttatacgttctttgtctatgaa

SEQ ID NO: 2437452 - DNA, 25 bp, Homo sapien
ttctttatacgttctttgtctatga

SEQ ID NO: 2437453 - DNA, 25 bp, Homo sapien
tttctttatacgttctttgtctatg

SEQ ID NO: 2437454 - DNA, 25 bp, Homo sapien
gttattgacatacgtgatctcgggc

SEQ ID NO: 2437455 - DNA, 25 bp, Homo sapien
catacgtgatctcgggccatggaga

SEQ ID NO: 2437456 - DNA, 25 bp, Homo sapien
ccaggtgatggggagttattgacat

SEQ ID NO: 2437457 - DNA, 25 bp, Homo sapien
gggagttattgacatacgtgatctc

SEQ ID NO: 2437458 - DNA, 25 bp, Homo sapien
gtgagtatggttgtctcataggaag

SEQ ID NO: 2437459 - DNA, 25 bp, Homo sapien
tttcatgaggtgttcgtttctccat

SEQ ID NO: 2437460 - DNA, 25 bp, Homo sapien
ctctgtgagtatggttgtctcatag

SEQ ID NO: 2437461 - DNA, 25 bp, Homo sapien
ctcataggaaggctgatatttctcc

SEQ ID NO: 2437462 - DNA, 25 bp, Homo sapien
tctatttgtactcggaatggcaccc

SEQ ID NO: 2437463 - DNA, 25 bp, Homo sapien
gcagctggccgagtgtaagtgctca

SEQ ID NO: 2437464 - DNA, 25 bp, Homo sapien
gctcagtatattccccgttttcatt

SEQ ID NO: 2437465 - DNA, 25 bp, Homo sapien
tctccttgaaggtatctatttgtac

SEQ ID NO: 2437466 - DNA, 25 bp, Homo sapien
gtatttagttgagttggattagccc

SEQ ID NO: 2437467 - DNA, 25 bp, Homo sapien
gccctaggatcgattatacccacag

SEQ ID NO: 2437468 - DNA, 25 bp, Homo sapien
gattatacccacagacatcgggata

SEQ ID NO: 2437469 - DNA, 25 bp, Homo sapien
tttgcagggtcccacaggaactcca

SEQ ID NO: 2437470 - DNA, 25 bp, Homo sapien
tcatggaacaccacacggaatatac

SEQ ID NO: 2437471 - DNA, 25 bp, Homo sapien
catggaacaccacacggaatatact

SEQ ID NO: 2437472 - DNA, 25 bp, Homo sapien
tggaagttctccaagtttcctattg

SEQ ID NO: 2437473 - DNA, 25 bp, Homo sapien
caagtttcctattgtctagcattcg

SEQ ID NO: 2437474 - DNA, 25 bp, Homo sapien
cctattgtctagcattcgaatttca

SEQ ID NO: 2437475 - DNA, 25 bp, Homo sapien
agcattcgaatttcataagactgtc

SEQ ID NO: 2437476 - DNA, 25 bp, Homo sapien
gattgagatacgttagggtttcatc

SEQ ID NO: 2437477 - DNA, 25 bp, Homo sapien
attatcaggaggcaaactcgactct

SEQ ID NO: 2437478 - DNA, 25 bp, Homo sapien
ggcaaactcgactcttcttgcttaa

SEQ ID NO: 2437479 - DNA, 25 bp, Homo sapien
gattttattctcattatcaggaggc

SEQ ID NO: 2437480 - DNA, 25 bp, Homo sapien
taaaacaaatgactcacattaatac

SEQ ID NO: 2437481 - DNA, 25 bp, Homo sapien
caaacgcaggtttattgctgaatga

SEQ ID NO: 2437482 - DNA, 25 bp, Homo sapien
ttgctgaatgatttaactgcaatgc

SEQ ID NO: 2437483 - DNA, 25 bp, Homo sapien
ctggcaatggtgcaaacgcaggttt

SEQ ID NO: 2437484 - DNA, 25 bp, Homo sapien
tgatttaactgcaatgctttggaaa

SEQ ID NO: 2437485 - DNA, 25 bp, Homo sapien
ttaaccatgcatctattgacccagc

SEQ ID NO: 2437486 - DNA, 25 bp, Homo sapien
attaaccatgcatctattgacccag

SEQ ID NO: 2437487 - DNA, 25 bp, Homo sapien
gaaacatattattgttcccttcaga

SEQ ID NO: 2437488 - DNA, 25 bp, Homo sapien
tgcttaggctttgctcatatgagtt

SEQ ID NO: 2437489 - DNA, 25 bp, Homo sapien
gctctcctaacaaaaagtatagaaa

SEQ ID NO: 2437490 - DNA, 25 bp, Homo sapien
tatgagttaagagtggagaatgttg

SEQ ID NO: 2437491 - DNA, 25 bp, Homo sapien
gaggccactaaactcctatactagg

SEQ ID NO: 2437492 - DNA, 25 bp, Homo sapien
cactgtgcctagattaattcattcc

SEQ ID NO: 2437493 - DNA, 25 bp, Homo sapien
aaatggagtcattcaccttaaggtc

SEQ ID NO: 2437494 - DNA, 25 bp, Homo sapien
tctacatcgctaaacctaaactaag

SEQ ID NO: 2437495 - DNA, 25 bp, Homo sapien
ccacctggcccaactaattggttat

SEQ ID NO: 2437496 - DNA, 25 bp, Homo sapien
gccacctggcccaactaattggtta

SEQ ID NO: 2437497 - DNA, 25 bp, Homo sapien
cacctggcccaactaattggttatt

SEQ ID NO: 2437498 - DNA, 25 bp, Homo sapien
ggagcggactgccccgccggcaggt

SEQ ID NO: 2437499 - DNA, 25 bp, Homo sapien
tgttccgagagcctccgcggcttcc

SEQ ID NO: 2437500 - DNA, 25 bp, Homo sapien
tcatgttccgagagcctccgcggct

SEQ ID NO: 2437501 - DNA, 25 bp, Homo sapien
catgttccgagagcctccgcggctt

SEQ ID NO: 2437502 - DNA, 25 bp, Homo sapien
ttccgagagcctccgcggcttccaa

SEQ ID NO: 2437503 - DNA, 25 bp, Homo sapien
acagctccatcaggccgtcccccgc

SEQ ID NO: 2437504 - DNA, 25 bp, Homo sapien
tcagcagagatcacggctgcctttt

SEQ ID NO: 2437505 - DNA, 25 bp, Homo sapien
agagatcacggctgcctttttctgc

SEQ ID NO: 2437506 - DNA, 25 bp, Homo sapien
tctgctgctcaacctttttctgctg

SEQ ID NO: 2437507 - DNA, 25 bp, Homo sapien
ttgaggatctcggtcgtgatgtacg

SEQ ID NO: 2437508 - DNA, 25 bp, Homo sapien
ggatctcggtcgtgatgtacgtcag

SEQ ID NO: 2437509 - DNA, 25 bp, Homo sapien
cgtgatgtacgtcagcacaggctca

SEQ ID NO: 2437510 - DNA, 25 bp, Homo sapien
tcggtcgtgatgtacgtcagcacag

SEQ ID NO: 2437511 - DNA, 25 bp, Homo sapien
tgtgatattgacattctgtaaatct

SEQ ID NO: 2437512 - DNA, 25 bp, Homo sapien
cagtgtgatattgacattctgtaaa

SEQ ID NO: 2437513 - DNA, 25 bp, Homo sapien
ctggaagatgatgcgcagtgtgata

SEQ ID NO: 2437514 - DNA, 25 bp, Homo sapien
gatattgacattctgtaaatctttg

SEQ ID NO: 2437515 - DNA, 25 bp, Homo sapien
acattacgtggtggagaaaggcaaa

SEQ ID NO: 2437516 - DNA, 25 bp, Homo sapien
gtgatgattggtacattacgtggtg

SEQ ID NO: 2437517 - DNA, 25 bp, Homo sapien
gattggtacattacgtggtggagaa

SEQ ID NO: 2437518 - DNA, 25 bp, Homo sapien
gtacattacgtggtggagaaaggca

SEQ ID NO: 2437519 - DNA, 25 bp, Homo sapien
ggatgagaaagtgagtcccctacca

SEQ ID NO: 2437520 - DNA, 25 bp, Homo sapien
gagaaagtgagtcccctaccacaat

SEQ ID NO: 2437521 - DNA, 25 bp, Homo sapien
aaagtgagtcccctaccacaatgtc

SEQ ID NO: 2437522 - DNA, 25 bp, Homo sapien
gggatgagaaagtgagtcccctacc

SEQ ID NO: 2437523 - DNA, 25 bp, Homo sapien
gttcacaggtctcctgcaacagcta

SEQ ID NO: 2437524 - DNA, 25 bp, Homo sapien
tcatttttgtcctggaatcagtcaa

SEQ ID NO: 2437525 - DNA, 25 bp, Homo sapien
gtcctggaatcagtcaaagatgaca

SEQ ID NO: 2437526 - DNA, 25 bp, Homo sapien
taaggcagagttcacaggtctcctg

SEQ ID NO: 2437527 - DNA, 25 bp, Homo sapien
tggactcaaacactttggctgccat

SEQ ID NO: 2437528 - DNA, 25 bp, Homo sapien
cgtggactcaaacactttggctgcc

SEQ ID NO: 2437529 - DNA, 25 bp, Homo sapien
gtggactcaaacactttggctgcca

SEQ ID NO: 2437530 - DNA, 25 bp, Homo sapien
tgggaccctctcacacctgcttcca

SEQ ID NO: 2437531 - DNA, 25 bp, Homo sapien
gttttcttctgtgggaccctctcac

SEQ ID NO: 2437532 - DNA, 25 bp, Homo sapien
accctctcacacctgcttccactct

SEQ ID NO: 2437533 - DNA, 25 bp, Homo sapien
ggaccctctcacacctgcttccact

SEQ ID NO: 2437534 - DNA, 25 bp, Homo sapien
catgcccagcctgcagaaacaattt

SEQ ID NO: 2437535 - DNA, 25 bp, Homo sapien
ttcaaaaagaagggagaatatattc

SEQ ID NO: 2437536 - DNA, 25 bp, Homo sapien
tcaaaaagaagggagaatatattcc

SEQ ID NO: 2437537 - DNA, 25 bp, Homo sapien
gcccagcctgcagaaacaattttca

SEQ ID NO: 2437538 - DNA, 25 bp, Homo sapien
tatcgctagcttttacctttgcact

SEQ ID NO: 2437539 - DNA, 25 bp, Homo sapien
gaagtctggctactctgttgaagca

SEQ ID NO: 2437540 - DNA, 25 bp, Homo sapien
gcacttttgggaaccctgaactgct

SEQ ID NO: 2437541 - DNA, 25 bp, Homo sapien
tgttgaagcaaccacatggagtggc

SEQ ID NO: 2437542 - DNA, 25 bp, Homo sapien
aattgccgatgactttcaggaaaat

SEQ ID NO: 2437543 - DNA, 25 bp, Homo sapien
taattgccgatgactttcaggaaaa

SEQ ID NO: 2437544 - DNA, 25 bp, Homo sapien
ttaattgccgatgactttcaggaaa

SEQ ID NO: 2437545 - DNA, 25 bp, Homo sapien
attgccgatgactttcaggaaaatc

SEQ ID NO: 2437546 - DNA, 25 bp, Homo sapien
ttcatacaataatgctgtgaggtag

SEQ ID NO: 2437547 - DNA, 25 bp, Homo sapien
ctggaactatttcaggcagtaggga

SEQ ID NO: 2437548 - DNA, 25 bp, Homo sapien
tgaacactgatatgcctggaactat

SEQ ID NO: 2437549 - DNA, 25 bp, Homo sapien
tacctcaactcaattgctatgattc

SEQ ID NO: 2437550 - DNA, 25 bp, Homo sapien
agacacactactgcaaccatctaat

SEQ ID NO: 2437551 - DNA, 25 bp, Homo sapien
gagacacactactgcaaccatctaa

SEQ ID NO: 2437552 - DNA, 25 bp, Homo sapien
gaatattcttctttacgggtctgca

SEQ ID NO: 2437553 - DNA, 25 bp, Homo sapien
ctggctgtctatgatccctgtgaag

SEQ ID NO: 2437554 - DNA, 25 bp, Homo sapien
ctgtgaagatctcctgaatattctt

SEQ ID NO: 2437555 - DNA, 25 bp, Homo sapien
gtctatgatccctgtgaagatctcc

SEQ ID NO: 2437556 - DNA, 25 bp, Homo sapien
aacatcagtggcccacaaacatatg

SEQ ID NO: 2437557 - DNA, 25 bp, Homo sapien
catcagtggcccacaaacatatgaa

SEQ ID NO: 2437558 - DNA, 25 bp, Homo sapien
acatcagtggcccacaaacatatga

SEQ ID NO: 2437559 - DNA, 25 bp, Homo sapien
atcagtggcccacaaacatatgaaa

SEQ ID NO: 2437560 - DNA, 25 bp, Homo sapien
gcagctagctgagggatcaggactt

SEQ ID NO: 2437561 - DNA, 25 bp, Homo sapien
tgaacagtaactagcccctggcaac

SEQ ID NO: 2437562 - DNA, 25 bp, Homo sapien
tcattggtggtgatactttcgcagc

SEQ ID NO: 2437563 - DNA, 25 bp, Homo sapien
tgaaactcttatagccactgaacag

SEQ ID NO: 2437564 - DNA, 25 bp, Homo sapien
aagtcgctgctgtcaattgtcttga

SEQ ID NO: 2437565 - DNA, 25 bp, Homo sapien
gaaacagttgtatcataattctaca

SEQ ID NO: 2437566 - DNA, 25 bp, Homo sapien
gtgtacaaatagctgctcaagtcgc

SEQ ID NO: 2437567 - DNA, 25 bp, Homo sapien
tatacactcagaagtgaaacagttg

SEQ ID NO: 2437568 - DNA, 25 bp, Homo sapien
gggaggctttggcacgagattcatt

SEQ ID NO: 2437569 - DNA, 25 bp, Homo sapien
gaaatgttagtctataggccaggcg

SEQ ID NO: 2437570 - DNA, 25 bp, Homo sapien
ctttgtagggctttggcatcaagac

SEQ ID NO: 2437571 - DNA, 25 bp, Homo sapien
tgaggtagcatcttggagttttgac

SEQ ID NO: 2437572 - DNA, 25 bp, Homo sapien
actgtcaacaatcaattaagacaat

SEQ ID NO: 2437573 - DNA, 25 bp, Homo sapien
gggatcataggcgtgtactaatttt

SEQ ID NO: 2437574 - DNA, 25 bp, Homo sapien
ggatcataggcgtgtactaattttt

SEQ ID NO: 2437575 - DNA, 25 bp, Homo sapien
gatcataggcgtgtactaatttttg

SEQ ID NO: 2437576 - DNA, 25 bp, Homo sapien
atcataggcgtgtactaatttttgt

SEQ ID NO: 2437577 - DNA, 25 bp, Homo sapien
cacttgcagtgtccagaagagtgct

SEQ ID NO: 2437578 - DNA, 25 bp, Homo sapien
ggttggatcaactaaatcggtgctg

SEQ ID NO: 2437579 - DNA, 25 bp, Homo sapien
tcagtgaccgcatgcaaccagatat

SEQ ID NO: 2437580 - DNA, 25 bp, Homo sapien
taacaacagtaatccctagggaggc

SEQ ID NO: 2437581 - DNA, 25 bp, Homo sapien
atttccatacaggattcttacacat

SEQ ID NO: 2437582 - DNA, 25 bp, Homo sapien
ataggcaccagcacccagttcctgg

SEQ ID NO: 2437583 - DNA, 25 bp, Homo sapien
tcccggacaggctagcatcaaagtc

SEQ ID NO: 2437584 - DNA, 25 bp, Homo sapien
atcaaagtcctgcaccaacccggat

SEQ ID NO: 2437585 - DNA, 25 bp, Homo sapien
ttcaatcacttcgtcggccagaggc

SEQ ID NO: 2437586 - DNA, 25 bp, Homo sapien
tacccaacaggagtaacgcaaacca

SEQ ID NO: 2437587 - DNA, 25 bp, Homo sapien
aactaatctcccgtacccttggctg

SEQ ID NO: 2437588 - DNA, 25 bp, Homo sapien
tacaaaggcgcggagggtaattcta

SEQ ID NO: 2437589 - DNA, 25 bp, Homo sapien
cctcttgagagttcgtagtggtggc

SEQ ID NO: 2437590 - DNA, 25 bp, Homo sapien
cccacggcttagaaccaaatccagg

SEQ ID NO: 2437591 - DNA, 25 bp, Homo sapien
aacatgacgtcacgctgtcgttcgc

SEQ ID NO: 2437592 - DNA, 25 bp, Homo sapien
caaatccaggtttccgctgagccga

SEQ ID NO: 2437593 - DNA, 25 bp, Homo sapien
gcgtaaaacctagactcgccaggcc

SEQ ID NO: 2437594 - DNA, 25 bp, Homo sapien
cctagtgtggcttctctgaaggacc

SEQ ID NO: 2437595 - DNA, 25 bp, Homo sapien
ctgtgagacctagtgtggcttctct

SEQ ID NO: 2437596 - DNA, 25 bp, Homo sapien
agacctagtgtggcttctctgaagg

SEQ ID NO: 2437597 - DNA, 25 bp, Homo sapien
tgtgagacctagtgtggcttctctg

SEQ ID NO: 2437598 - DNA, 25 bp, Homo sapien
cagcgagctgtgctttgggtaaacc

SEQ ID NO: 2437599 - DNA, 25 bp, Homo sapien
tagtaaagacgacactaagctctgg

SEQ ID NO: 2437600 - DNA, 25 bp, Homo sapien
taaaatgccgtggtaatgcagggtc

SEQ ID NO: 2437601 - DNA, 25 bp, Homo sapien
attatgtgctattcccagggtgcca

SEQ ID NO: 2437602 - DNA, 25 bp, Homo sapien
aagcgtctgagcatgaaaacctgca

SEQ ID NO: 2437603 - DNA, 25 bp, Homo sapien
catgaaaacctgcatcgccataagt

SEQ ID NO: 2437604 - DNA, 25 bp, Homo sapien
tctgagcatgaaaacctgcatcgcc

SEQ ID NO: 2437605 - DNA, 25 bp, Homo sapien
aacctgcatcgccataagtttttgt

SEQ ID NO: 2437606 - DNA, 25 bp, Homo sapien
ggagactctctgttggagacacgct

SEQ ID NO: 2437607 - DNA, 25 bp, Homo sapien
tcgataaccctgaactagagtgtgg

SEQ ID NO: 2437608 - DNA, 25 bp, Homo sapien
gagacacgctctcctgaaaagctgg

SEQ ID NO: 2437609 - DNA, 25 bp, Homo sapien
tctcattgaggcaggtcgataaccc

SEQ ID NO: 2437610 - DNA, 25 bp, Homo sapien
tactggccaggctaccaagagggtg

SEQ ID NO: 2437611 - DNA, 25 bp, Homo sapien
gacaccagaggaagctaggctagga

SEQ ID NO: 2437612 - DNA, 25 bp, Homo sapien
ggccaggctaccaagagggtggcca

SEQ ID NO: 2437613 - DNA, 25 bp, Homo sapien
gcctgggaggcaccaacagtaagtg

SEQ ID NO: 2437614 - DNA, 25 bp, Homo sapien
ggaggcagctgttagagaccagcct

SEQ ID NO: 2437615 - DNA, 25 bp, Homo sapien
agctgacggtccttccctcagggtg

SEQ ID NO: 2437616 - DNA, 25 bp, Homo sapien
ccttccctcagggtggatcatggga

SEQ ID NO: 2437617 - DNA, 25 bp, Homo sapien
gaccagcctctgtaaggataagagt

SEQ ID NO: 2437618 - DNA, 25 bp, Homo sapien
ggataatctacaccgcaagcctgtg

SEQ ID NO: 2437619 - DNA, 25 bp, Homo sapien
catagctaccccgtctagaagcaaa

SEQ ID NO: 2437620 - DNA, 25 bp, Homo sapien
tgtggtcatctaggcaaatctcagt

SEQ ID NO: 2437621 - DNA, 25 bp, Homo sapien
taacagcttggatgagagctaaccc

SEQ ID NO: 2437622 - DNA, 25 bp, Homo sapien
tgcacacggtggagtctgatgacct

SEQ ID NO: 2437623 - DNA, 25 bp, Homo sapien
ttcagaaaccatgctagcaaggtgc

SEQ ID NO: 2437624 - DNA, 25 bp, Homo sapien
caaggtgcttctctaagtgacgtca

SEQ ID NO: 2437625 - DNA, 25 bp, Homo sapien
cacagctgcacgtggcaaaatgaca

SEQ ID NO: 2437626 - DNA, 25 bp, Homo sapien
cagcaccggctttagcttctgggca

SEQ ID NO: 2437627 - DNA, 25 bp, Homo sapien
tcttgagcgtctggcgccgattgca

SEQ ID NO: 2437628 - DNA, 25 bp, Homo sapien
cacggtcgtagttgagctccttagc

SEQ ID NO: 2437629 - DNA, 25 bp, Homo sapien
tggccttcctggttccgcagttcag

SEQ ID NO: 2437630 - DNA, 25 bp, Homo sapien
gaccttccgttgcagtcagagcctg

SEQ ID NO: 2437631 - DNA, 25 bp, Homo sapien
tcatccagacttggagtatgtggct

SEQ ID NO: 2437632 - DNA, 25 bp, Homo sapien
gagagccgccggatcttaaagttct

SEQ ID NO: 2437633 - DNA, 25 bp, Homo sapien
ggcaaactcccggatctcttctaag

SEQ ID NO: 2437634 - DNA, 25 bp, Homo sapien
cagggatgagtgtgtaacatgggaa

SEQ ID NO: 2437635 - DNA, 25 bp, Homo sapien
gcagggatgagtgtgtaacatggga

SEQ ID NO: 2437636 - DNA, 25 bp, Homo sapien
cgcagtagtgagaggtgaggacacc

SEQ ID NO: 2437637 - DNA, 25 bp, Homo sapien
gaactgacgcagtagtgagaggtga

SEQ ID NO: 2437638 - DNA, 25 bp, Homo sapien
cctgggaaaaggctcacgcaccttc

SEQ ID NO: 2437639 - DNA, 25 bp, Homo sapien
ccttcaagactcttatcacctttgt

SEQ ID NO: 2437640 - DNA, 25 bp, Homo sapien
ggcagatggcttggcggctggagct

SEQ ID NO: 2437641 - DNA, 25 bp, Homo sapien
aggtaattgggataggagcagaggc

SEQ ID NO: 2437642 - DNA, 25 bp, Homo sapien
ggcacggttggtgtgggctggatgg

SEQ ID NO: 2437643 - DNA, 25 bp, Homo sapien
ggtctctgagcaggtaattgggata

SEQ ID NO: 2437644 - DNA, 25 bp, Homo sapien
tcactacccatggaagggttccaat

SEQ ID NO: 2437645 - DNA, 25 bp, Homo sapien
tgctggggccgccacactagctgag

SEQ ID NO: 2437646 - DNA, 25 bp, Homo sapien
gctagccagggtcgcaatcacctgg

SEQ ID NO: 2437647 - DNA, 25 bp, Homo sapien
gggctgctagccagggtcgcaatca

SEQ ID NO: 2437648 - DNA, 25 bp, Homo sapien
atggcgctggtaatgactggagctg

SEQ ID NO: 2437649 - DNA, 25 bp, Homo sapien
ccctggcatgctgggaatggcgctg

SEQ ID NO: 2437650 - DNA, 25 bp, Homo sapien
actggagctgtagtgagggacccca

SEQ ID NO: 2437651 - DNA, 25 bp, Homo sapien
gcatgctgggaatggcgctggtaat

SEQ ID NO: 2437652 - DNA, 25 bp, Homo sapien
tgagaagaaccccgggcagagggaa

SEQ ID NO: 2437653 - DNA, 25 bp, Homo sapien
gtgagaagaaccccgggcagaggga

SEQ ID NO: 2437654 - DNA, 25 bp, Homo sapien
ctgactgcaccgtagggacagctca

SEQ ID NO: 2437655 - DNA, 25 bp, Homo sapien
tagggacagctcacaagttttcaac

SEQ ID NO: 2437656 - DNA, 25 bp, Homo sapien
ggacagctcacaagttttcaacccc

SEQ ID NO: 2437657 - DNA, 25 bp, Homo sapien
gcaccgtagggacagctcacaagtt

SEQ ID NO: 2437658 - DNA, 25 bp, Homo sapien
cctccaagcctggtccagtggttca

SEQ ID NO: 2437659 - DNA, 25 bp, Homo sapien
tccaagcctggtccagtggttcagg

SEQ ID NO: 2437660 - DNA, 25 bp, Homo sapien
aagcctggtccagtggttcaggttc

SEQ ID NO: 2437661 - DNA, 25 bp, Homo sapien
ccaagcctggtccagtggttcaggt

SEQ ID NO: 2437662 - DNA, 25 bp, Homo sapien
cttggcccatgattccgtccatccc

SEQ ID NO: 2437663 - DNA, 25 bp, Homo sapien
catgattccgtccatccctggtcag

SEQ ID NO: 2437664 - DNA, 25 bp, Homo sapien
gcccatgattccgtccatccctggt

SEQ ID NO: 2437665 - DNA, 25 bp, Homo sapien
gagaaggcctcagagggagcccatc

SEQ ID NO: 2437666 - DNA, 25 bp, Homo sapien
acggtgatctgtgggggggtgtcca

SEQ ID NO: 2437667 - DNA, 25 bp, Homo sapien
gacggtgatctgtgggggggtgtcc

SEQ ID NO: 2437668 - DNA, 25 bp, Homo sapien
ctgggtctggaacagcgtctggggc

SEQ ID NO: 2437669 - DNA, 25 bp, Homo sapien
ggttgggccgtcgaggaggcctgta

SEQ ID NO: 2437670 - DNA, 25 bp, Homo sapien
aggaggcctgtactggtgcggcagc

SEQ ID NO: 2437671 - DNA, 25 bp, Homo sapien
tgggtctggaacagcgtctggggct

SEQ ID NO: 2437672 - DNA, 25 bp, Homo sapien
cggtgccggaagagcggtgttcagc

SEQ ID NO: 2437673 - DNA, 25 bp, Homo sapien
ggtgccggaagagcggtgttcagca

SEQ ID NO: 2437674 - DNA, 25 bp, Homo sapien
agggctggcgcacgccagcatctct

SEQ ID NO: 2437675 - DNA, 25 bp, Homo sapien
ggcaggcagccacgattcccttgat

SEQ ID NO: 2437676 - DNA, 25 bp, Homo sapien
cgattcccttgatccttgaagggct

SEQ ID NO: 2437677 - DNA, 25 bp, Homo sapien
ggctccaatcccaagggatctggca

SEQ ID NO: 2437678 - DNA, 25 bp, Homo sapien
tctcagacagctggccgaagtacgg

SEQ ID NO: 2437679 - DNA, 25 bp, Homo sapien
gggcagtctcagacagctggccgaa

SEQ ID NO: 2437680 - DNA, 25 bp, Homo sapien
ccaggaggccggtcatggggtgagt

SEQ ID NO: 2437681 - DNA, 25 bp, Homo sapien
cagtctcagacagctggccgaagta

SEQ ID NO: 2437682 - DNA, 25 bp, Homo sapien
tgggttctgagtccgacatggcaag

SEQ ID NO: 2437683 - DNA, 25 bp, Homo sapien
ccgtgggttctgagtccgacatggc

SEQ ID NO: 2437684 - DNA, 25 bp, Homo sapien
ggttctgagtccgacatggcaagca

SEQ ID NO: 2437685 - DNA, 25 bp, Homo sapien
tctgagtccgacatggcaagcacac

SEQ ID NO: 2437686 - DNA, 25 bp, Homo sapien
gggcctggtgcagtcctgggaagag

SEQ ID NO: 2437687 - DNA, 25 bp, Homo sapien
cagtcctgggaagagttgccgttac

SEQ ID NO: 2437688 - DNA, 25 bp, Homo sapien
tgcagtcctgggaagagttgccgtt

SEQ ID NO: 2437689 - DNA, 25 bp, Homo sapien
ggtgcagtcctgggaagagttgccg

SEQ ID NO: 2437690 - DNA, 25 bp, Homo sapien
cagccacagttgctgtaggaattgt

SEQ ID NO: 2437691 - DNA, 25 bp, Homo sapien
ctccccccgtaggagaagcagcggt

SEQ ID NO: 2437692 - DNA, 25 bp, Homo sapien
gctaaaggtggcttgaacactcccc

SEQ ID NO: 2437693 - DNA, 25 bp, Homo sapien
tgtaggaattgtccacacggccagc

SEQ ID NO: 2437694 - DNA, 25 bp, Homo sapien
ggaaccataactcctgtcagaactg

SEQ ID NO: 2437695 - DNA, 25 bp, Homo sapien
gagtaactgcccctgctggaaccat

SEQ ID NO: 2437696 - DNA, 25 bp, Homo sapien
tgtcagaactgtggctaagttttcc

SEQ ID NO: 2437697 - DNA, 25 bp, Homo sapien
aactgtggctaagttttcctgagtc

SEQ ID NO: 2437698 - DNA, 25 bp, Homo sapien
gtcagggtctgcgatgcctgaggct

SEQ ID NO: 2437699 - DNA, 25 bp, Homo sapien
agcttgtacagccagtggcgtcagg

SEQ ID NO: 2437700 - DNA, 25 bp, Homo sapien
ggcagcttgtacagccagtggcgtc

SEQ ID NO: 2437701 - DNA, 25 bp, Homo sapien
tgtacagccagtggcgtcagggtct

SEQ ID NO: 2437702 - DNA, 25 bp, Homo sapien
cttcacaaggcattgagagaaagaa

SEQ ID NO: 2437703 - DNA, 25 bp, Homo sapien
tcacaaggcattgagagaaagaagg

SEQ ID NO: 2437704 - DNA, 25 bp, Homo sapien
agagaaagaaggacaaggagtgagc

SEQ ID NO: 2437705 - DNA, 25 bp, Homo sapien
acaaggcattgagagaaagaaggac

SEQ ID NO: 2437706 - DNA, 25 bp, Homo sapien
aatcagaatgtccagtagtggaggc

SEQ ID NO: 2437707 - DNA, 25 bp, Homo sapien
ggcttcttaaaactgctgggcatat

SEQ ID NO: 2437708 - DNA, 25 bp, Homo sapien
cgcctggccagatcaatggcttctt

SEQ ID NO: 2437709 - DNA, 25 bp, Homo sapien
tagtggaggctagttacctcacctc

SEQ ID NO: 2437710 - DNA, 25 bp, Homo sapien
ttttctggcttaacaggcaactcat

SEQ ID NO: 2437711 - DNA, 25 bp, Homo sapien
ttattagggcatatttagtaggacc

SEQ ID NO: 2437712 - DNA, 25 bp, Homo sapien
tattgcttcctgcaagactgtacag

SEQ ID NO: 2437713 - DNA, 25 bp, Homo sapien
ggttttacatacattagggctgcta

SEQ ID NO: 2437714 - DNA, 25 bp, Homo sapien
taggtggtgccatcaaaatacctcc

SEQ ID NO: 2437715 - DNA, 25 bp, Homo sapien
taggaagtttccaccgctctaagct

SEQ ID NO: 2437716 - DNA, 25 bp, Homo sapien
gaagcaggtgcgtgactctatgtca

SEQ ID NO: 2437717 - DNA, 25 bp, Homo sapien
tactacttagtctaccctcagcggc

SEQ ID NO: 2437718 - DNA, 25 bp, Homo sapien
taaggagcagaattaaggcaccaga

SEQ ID NO: 2437719 - DNA, 25 bp, Homo sapien
tgaaaggcttagacacacaaacccc

SEQ ID NO: 2437720 - DNA, 25 bp, Homo sapien
ccctggaagaagatgcacactacac

SEQ ID NO: 2437721 - DNA, 25 bp, Homo sapien
tgccccttgggaacaggtgatgacc

SEQ ID NO: 2437722 - DNA, 25 bp, Homo sapien
gagcccaggttgtctggcccagctt

SEQ ID NO: 2437723 - DNA, 25 bp, Homo sapien
gcccaggttgtctggcccagcttca

SEQ ID NO: 2437724 - DNA, 25 bp, Homo sapien
gaggagcccaggttgtctggcccag

SEQ ID NO: 2437725 - DNA, 25 bp, Homo sapien
ggagcccaggttgtctggcccagct

SEQ ID NO: 2437726 - DNA, 25 bp, Homo sapien
gcttcagcagggtctccgctctggg

SEQ ID NO: 2437727 - DNA, 25 bp, Homo sapien
ggtctcatgacctgacatcacgatg

SEQ ID NO: 2437728 - DNA, 25 bp, Homo sapien
actcggatggtctcatgacctgaca

SEQ ID NO: 2437729 - DNA, 25 bp, Homo sapien
agttgggcatccactccgacttcca

SEQ ID NO: 2437730 - DNA, 25 bp, Homo sapien
cactgttgggataggggccagtata

SEQ ID NO: 2437731 - DNA, 25 bp, Homo sapien
cagtatagccgcagggtccaaagct

SEQ ID NO: 2437732 - DNA, 25 bp, Homo sapien
aggacaggggcactgttgggatagg

SEQ ID NO: 2437733 - DNA, 25 bp, Homo sapien
gggccagtatagccgcagggtccaa

SEQ ID NO: 2437734 - DNA, 25 bp, Homo sapien
ggaaaaagtgacgatgtgacccatc

SEQ ID NO: 2437735 - DNA, 25 bp, Homo sapien
cacggaaaccctgccaattgggcca

SEQ ID NO: 2437736 - DNA, 25 bp, Homo sapien
gagcctgaaagtggatccagtcgga

SEQ ID NO: 2437737 - DNA, 25 bp, Homo sapien
caagggcaatctccatgcatgagcg

SEQ ID NO: 2437738 - DNA, 25 bp, Homo sapien
gtcagagatgtctctgacccggctc

SEQ ID NO: 2437739 - DNA, 25 bp, Homo sapien
tcagagatgtctctgacccggctcc

SEQ ID NO: 2437740 - DNA, 25 bp, Homo sapien
agagatgtctctgacccggctccag

SEQ ID NO: 2437741 - DNA, 25 bp, Homo sapien
cagtcagagatgtctctgacccggc

SEQ ID NO: 2437742 - DNA, 25 bp, Homo sapien
gggggccggcccacacctagcacat

SEQ ID NO: 2437743 - DNA, 25 bp, Homo sapien
ggggccggcccacacctagcacatc

SEQ ID NO: 2437744 - DNA, 25 bp, Homo sapien
ttcctacagcatcctaggagaatct

SEQ ID NO: 2437745 - DNA, 25 bp, Homo sapien
tgcatttcctacagcatcctaggag

SEQ ID NO: 2437746 - DNA, 25 bp, Homo sapien
aaaagattatgttgcatttcctaca

SEQ ID NO: 2437747 - DNA, 25 bp, Homo sapien
tacagcatcctaggagaatctacac

SEQ ID NO: 2437748 - DNA, 25 bp, Homo sapien
tttgtaggacaacaaggcatctgct

SEQ ID NO: 2437749 - DNA, 25 bp, Homo sapien
gaaagtcgttacacatagaagccat

SEQ ID NO: 2437750 - DNA, 25 bp, Homo sapien
tgaaagctgcacaaggtgaatctgg

SEQ ID NO: 2437751 - DNA, 25 bp, Homo sapien
cagcagtagccaatctttgtaggac

SEQ ID NO: 2437752 - DNA, 25 bp, Homo sapien
gaaatgcttagcatgactcttacca

SEQ ID NO: 2437753 - DNA, 25 bp, Homo sapien
ggtgattaaataggcaagccctatg

SEQ ID NO: 2437754 - DNA, 25 bp, Homo sapien
gagtcagtggcagattcaaacttca

SEQ ID NO: 2437755 - DNA, 25 bp, Homo sapien
tatgatggtgatatgagatcatgta

SEQ ID NO: 2437756 - DNA, 25 bp, Homo sapien
ccgagccgccttcgccgcgggtgtc

SEQ ID NO: 2437757 - DNA, 25 bp, Homo sapien
gcggccaccgattagagattcatct

SEQ ID NO: 2437758 - DNA, 25 bp, Homo sapien
gtgtctggcggccaccgattagaga

SEQ ID NO: 2437759 - DNA, 25 bp, Homo sapien
ccgattagagattcatctcacagcc

SEQ ID NO: 2437760 - DNA, 25 bp, Homo sapien
ggctccgcaggctaagccgggcgga

SEQ ID NO: 2437761 - DNA, 25 bp, Homo sapien
tccgcaggctaagccgggcggagag

SEQ ID NO: 2437762 - DNA, 25 bp, Homo sapien
gggggctccgcaggctaagccgggc

SEQ ID NO: 2437763 - DNA, 25 bp, Homo sapien
gggcagagccgaagggggctccgca

SEQ ID NO: 2437764 - DNA, 25 bp, Homo sapien
gctgatgtcaaacttctgacatcag

SEQ ID NO: 2437765 - DNA, 25 bp, Homo sapien
gatgtcaaacttctgacatcaggtg

SEQ ID NO: 2437766 - DNA, 25 bp, Homo sapien
caggctgatgtcaaacttctgacat

SEQ ID NO: 2437767 - DNA, 25 bp, Homo sapien
aggctgatgtcaaacttctgacatc

SEQ ID NO: 2437768 - DNA, 25 bp, Homo sapien
tatggactgccgtgactgccaatgt

SEQ ID NO: 2437769 - DNA, 25 bp, Homo sapien
gagatgtgatcaggtcagacccaca

SEQ ID NO: 2437770 - DNA, 25 bp, Homo sapien
agatctcggcatggtcacttactgg

SEQ ID NO: 2437771 - DNA, 25 bp, Homo sapien
aaacgtcccagctatcgacaggcag

SEQ ID NO: 2437772 - DNA, 25 bp, Homo sapien
tattcagtctagattctggatttaa

SEQ ID NO: 2437773 - DNA, 25 bp, Homo sapien
attcagtctagattctggatttaag

SEQ ID NO: 2437774 - DNA, 25 bp, Homo sapien
ttcagtctagattctggatttaagg

SEQ ID NO: 2437775 - DNA, 25 bp, Homo sapien
gctgctgtaattttccttttagcat

SEQ ID NO: 2437776 - DNA, 25 bp, Homo sapien
gtgctgctgtaattttccttttagc

SEQ ID NO: 2437777 - DNA, 25 bp, Homo sapien
caagtgctgctgtaattttcctttt

SEQ ID NO: 2437778 - DNA, 25 bp, Homo sapien
agtgctgctgtaattttccttttag

SEQ ID NO: 2437779 - DNA, 25 bp, Homo sapien
tcatgtgggatcttacatgggctct

SEQ ID NO: 2437780 - DNA, 25 bp, Homo sapien
gctctaaggcgtccctgcaaggtct

SEQ ID NO: 2437781 - DNA, 25 bp, Homo sapien
taacatagaatccagtatcttcatg

SEQ ID NO: 2437782 - DNA, 25 bp, Homo sapien
attcttcagtggctaactagtgccc

SEQ ID NO: 2437783 - DNA, 25 bp, Homo sapien
cccttaccagtatgctctggctaca

SEQ ID NO: 2437784 - DNA, 25 bp, Homo sapien
tatcagtccccttaccagtatgctc

SEQ ID NO: 2437785 - DNA, 25 bp, Homo sapien
agtccccttaccagtatgctctggc

SEQ ID NO: 2437786 - DNA, 25 bp, Homo sapien
tttatcagtccccttaccagtatgc

SEQ ID NO: 2437787 - DNA, 25 bp, Homo sapien
tattatttccctagtgcctgtcaca

SEQ ID NO: 2437788 - DNA, 25 bp, Homo sapien
cagacatcacttgcatcaggaaacc

SEQ ID NO: 2437789 - DNA, 25 bp, Homo sapien
tcagaatagagtaggtgcctcacct

SEQ ID NO: 2437790 - DNA, 25 bp, Homo sapien
gaaccctcttcacttgcttaacctg

SEQ ID NO: 2437791 - DNA, 25 bp, Homo sapien
agtttgatcctgttcaagaaagtag

SEQ ID NO: 2437792 - DNA, 25 bp, Homo sapien
aagtttgatcctgttcaagaaagta

SEQ ID NO: 2437793 - DNA, 25 bp, Homo sapien
aaagtttgatcctgttcaagaaagt

SEQ ID NO: 2437794 - DNA, 25 bp, Homo sapien
gtttgatcctgttcaagaaagtagc

SEQ ID NO: 2437795 - DNA, 25 bp, Homo sapien
attccacctgccagagaaagcactg

SEQ ID NO: 2437796 - DNA, 25 bp, Homo sapien
acctgccagagaaagcactggcctg

SEQ ID NO: 2437797 - DNA, 25 bp, Homo sapien
ctgccagagaaagcactggcctgca

SEQ ID NO: 2437798 - DNA, 25 bp, Homo sapien
taattccacctgccagagaaagcac

SEQ ID NO: 2437799 - DNA, 25 bp, Homo sapien
tgacgctaggcggacggaccatcat

SEQ ID NO: 2437800 - DNA, 25 bp, Homo sapien
catcatgtgacacggaagtagctcc

SEQ ID NO: 2437801 - DNA, 25 bp, Homo sapien
aagtagctccgaacaggaagaggac

SEQ ID NO: 2437802 - DNA, 25 bp, Homo sapien
ataaccgtccgcgacgccgagacaa

SEQ ID NO: 2437803 - DNA, 25 bp, Homo sapien
ttcctccgtaaactctgtggcgcag

SEQ ID NO: 2437804 - DNA, 25 bp, Homo sapien
tagcgcaggcattcgcgtaggccaa

SEQ ID NO: 2437805 - DNA, 25 bp, Homo sapien
catccgcaggagcaaatagagcgct

SEQ ID NO: 2437806 - DNA, 25 bp, Homo sapien
gaacatgattcccataacgcaggaa

SEQ ID NO: 2437807 - DNA, 25 bp, Homo sapien
tgggaatccagtataccctcagacc

SEQ ID NO: 2437808 - DNA, 25 bp, Homo sapien
gaatccagtataccctcagaccttg

SEQ ID NO: 2437809 - DNA, 25 bp, Homo sapien
tcaggctccaccctataccgatgct

SEQ ID NO: 2437810 - DNA, 25 bp, Homo sapien
tcctgggaatccagtataccctcag

SEQ ID NO: 2437811 - DNA, 25 bp, Homo sapien
ggtagcagtacctccctaaagcatt

SEQ ID NO: 2437812 - DNA, 25 bp, Homo sapien
tacaccatctggtgaggaaccaagg

SEQ ID NO: 2437813 - DNA, 25 bp, Homo sapien
aacgtcctcgtaactcagcggaagg

SEQ ID NO: 2437814 - DNA, 25 bp, Homo sapien
cctctgtgccgggaaagacatcaca

SEQ ID NO: 2437815 - DNA, 25 bp, Homo sapien
cattgactgttatggaagttcagcg

SEQ ID NO: 2437816 - DNA, 25 bp, Homo sapien
cactgtggtgcacttaacttgtgga

SEQ ID NO: 2437817 - DNA, 25 bp, Homo sapien
tgtcagagtgtctgatgcggccact

SEQ ID NO: 2437818 - DNA, 25 bp, Homo sapien
gatgtcgtgcaaactgtactgtgaa

SEQ ID NO: 2437819 - DNA, 25 bp, Homo sapien
gcttgattctgaggatacactggga

SEQ ID NO: 2437820 - DNA, 25 bp, Homo sapien
tctggcccttgccaggatggaggct

SEQ ID NO: 2437821 - DNA, 25 bp, Homo sapien
gatggaggcttgaaccaactcatct

SEQ ID NO: 2437822 - DNA, 25 bp, Homo sapien
tatgtttctaatgatgttcccctgg

SEQ ID NO: 2437823 - DNA, 25 bp, Homo sapien
gtagcaatgaaaatttttaatttga

SEQ ID NO: 2437824 - DNA, 25 bp, Homo sapien
aatttgaataaaaatcacgtaagca

SEQ ID NO: 2437825 - DNA, 25 bp, Homo sapien
taatttgaataaaaatcacgtaagc

SEQ ID NO: 2437826 - DNA, 25 bp, Homo sapien
gacagagtagagcagccaatgacct

SEQ ID NO: 2437827 - DNA, 25 bp, Homo sapien
tttactgtggtatccagcctctggg

SEQ ID NO: 2437828 - DNA, 25 bp, Homo sapien
ccctggagtcagtgatgtcggcatt

SEQ ID NO: 2437829 - DNA, 25 bp, Homo sapien
tcggcatttgggactgcgacctggc

SEQ ID NO: 2437830 - DNA, 25 bp, Homo sapien
agccaggaataagctccttggggcc

SEQ ID NO: 2437831 - DNA, 25 bp, Homo sapien
tcaacgtgttagcgatggagccagg

SEQ ID NO: 2437832 - DNA, 25 bp, Homo sapien
caacgtgttagcgatggagccagga

SEQ ID NO: 2437833 - DNA, 25 bp, Homo sapien
gccaggaataagctccttggggcct

SEQ ID NO: 2437834 - DNA, 25 bp, Homo sapien
tattcctctttctcgctgcccttgg

SEQ ID NO: 2437835 - DNA, 25 bp, Homo sapien
actgggctcaccttctgtaggttca

SEQ ID NO: 2437836 - DNA, 25 bp, Homo sapien
cactctccatctggacgatggcact

SEQ ID NO: 2437837 - DNA, 25 bp, Homo sapien
catctggacgatggcactgggctca

SEQ ID NO: 2437838 - DNA, 25 bp, Homo sapien
gtgaggaagacaacggtgataacaa

SEQ ID NO: 2437839 - DNA, 25 bp, Homo sapien
tcaagatcacgaccgagagcagggt

SEQ ID NO: 2437840 - DNA, 25 bp, Homo sapien
gtagctgcctttgttcttgtacagg

SEQ ID NO: 2437841 - DNA, 25 bp, Homo sapien
tgtacaggtaaaagaagatcaagat

SEQ ID NO: 2437842 - DNA, 25 bp, Homo sapien
gatccagaaggtcccttggagttgg

SEQ ID NO: 2437843 - DNA, 25 bp, Homo sapien
gagcccattaatggatttggtcagg

SEQ ID NO: 2437844 - DNA, 25 bp, Homo sapien
aatataacttacaagccagagtgag

SEQ ID NO: 2437845 - DNA, 25 bp, Homo sapien
cttacaagccagagtgagcccatta

SEQ ID NO: 2437846 - DNA, 25 bp, Homo sapien
tgagtgctgtgctggctccatcttc

SEQ ID NO: 2437847 - DNA, 25 bp, Homo sapien
gacagggcctcagtgggctgtaaaa

SEQ ID NO: 2437848 - DNA, 25 bp, Homo sapien
ctgcaatgagtgctgtgctggctcc

SEQ ID NO: 2437849 - DNA, 25 bp, Homo sapien
cctcagtgggctgtaaaattggggt

SEQ ID NO: 2437850 - DNA, 25 bp, Homo sapien
gcctctcctctggtatatgggttga

SEQ ID NO: 2437851 - DNA, 25 bp, Homo sapien
ggtattgacatctttgagcatgcct

SEQ ID NO: 2437852 - DNA, 25 bp, Homo sapien
aaatgggagtgtggtgtacagcttc

SEQ ID NO: 2437853 - DNA, 25 bp, Homo sapien
taggttatacaacactgtgactccc

SEQ ID NO: 2437854 - DNA, 25 bp, Homo sapien
cagctactcggtaaacttgaggtga

SEQ ID NO: 2437855 - DNA, 25 bp, Homo sapien
gctactcggtaaacttgaggtgaga

SEQ ID NO: 2437856 - DNA, 25 bp, Homo sapien
ctcggtaaacttgaggtgagaggat

SEQ ID NO: 2437857 - DNA, 25 bp, Homo sapien
tactcggtaaacttgaggtgagagg

SEQ ID NO: 2437858 - DNA, 25 bp, Homo sapien
cttctcaccagacaactaaaagtct

SEQ ID NO: 2437859 - DNA, 25 bp, Homo sapien
caccagacaactaaaagtctgaatt

SEQ ID NO: 2437860 - DNA, 25 bp, Homo sapien
aattgtgtgcattaccagtcacaga

SEQ ID NO: 2437861 - DNA, 25 bp, Homo sapien
tgtgcattaccagtcacagaggaca

SEQ ID NO: 2437862 - DNA, 25 bp, Homo sapien
ggagaaggagtagtcaggaggctgg

SEQ ID NO: 2437863 - DNA, 25 bp, Homo sapien
cttggagaaggagtagtcaggaggc

SEQ ID NO: 2437864 - DNA, 25 bp, Homo sapien
ctcttggagaaggagtagtcaggag

SEQ ID NO: 2437865 - DNA, 25 bp, Homo sapien
gaaggagtagtcaggaggctggtca

SEQ ID NO: 2437866 - DNA, 25 bp, Homo sapien
ttgagtttcttggagaagaggcaga

SEQ ID NO: 2437867 - DNA, 25 bp, Homo sapien
gtggttgagtttcttggagaagagg

SEQ ID NO: 2437868 - DNA, 25 bp, Homo sapien
ctagtggttgagtttcttggagaag

SEQ ID NO: 2437869 - DNA, 25 bp, Homo sapien
tgagtttcttggagaagaggcagat

SEQ ID NO: 2437870 - DNA, 25 bp, Homo sapien
caaagacaggaatgtagcgggtggg

SEQ ID NO: 2437871 - DNA, 25 bp, Homo sapien
tgggcccctatggctttgagtcctg

SEQ ID NO: 2437872 - DNA, 25 bp, Homo sapien
cgcatgcagtttgacggggtgttac

SEQ ID NO: 2437873 - DNA, 25 bp, Homo sapien
tcaggctccaggtaccaacagctct

SEQ ID NO: 2437874 - DNA, 25 bp, Homo sapien
caggtcctttcaatgggccaccaaa

SEQ ID NO: 2437875 - DNA, 25 bp, Homo sapien
acagctaggagttctggtgacgcca

SEQ ID NO: 2437876 - DNA, 25 bp, Homo sapien
caaagcgcggtaacaggtaccctag

SEQ ID NO: 2437877 - DNA, 25 bp, Homo sapien
ggcaaaggttcgcaaatcagcagcg

SEQ ID NO: 2437878 - DNA, 25 bp, Homo sapien
gcggccggtgcgtcggggagcggcg

SEQ ID NO: 2437879 - DNA, 25 bp, Homo sapien
cggccggtgcgtcggggagcggcgt

SEQ ID NO: 2437880 - DNA, 25 bp, Homo sapien
cagccgccgcgaccctctgccccag

SEQ ID NO: 2437881 - DNA, 25 bp, Homo sapien
cgaccctctgccccagcggagcgct

SEQ ID NO: 2437882 - DNA, 25 bp, Homo sapien
agccgcgggctaactgggatccgtc

SEQ ID NO: 2437883 - DNA, 25 bp, Homo sapien
ccgggtcttgccagctggacgttct

SEQ ID NO: 2437884 - DNA, 25 bp, Homo sapien
cagatgagcgaacttagccagcaca

SEQ ID NO: 2437885 - DNA, 25 bp, Homo sapien
gctccgcgcgtccttttgaactcaa

SEQ ID NO: 2437886 - DNA, 25 bp, Homo sapien
caggatggcagtctttcccctggac

SEQ ID NO: 2437887 - DNA, 25 bp, Homo sapien
tggcagtctttcccctggacattac

SEQ ID NO: 2437888 - DNA, 25 bp, Homo sapien
ccaggatggcagtctttcccctgga

SEQ ID NO: 2437889 - DNA, 25 bp, Homo sapien
atggcagtctttcccctggacatta

SEQ ID NO: 2437890 - DNA, 25 bp, Homo sapien
gatgctggctcttatatccctctga

SEQ ID NO: 2437891 - DNA, 25 bp, Homo sapien
gccaggtctttagacagcaccagca

SEQ ID NO: 2437892 - DNA, 25 bp, Homo sapien
cagcattcctactgagaacccaggg

SEQ ID NO: 2437893 - DNA, 25 bp, Homo sapien
gcaggaggagtcttggtagtttctc

SEQ ID NO: 2437894 - DNA, 25 bp, Homo sapien
gttgtggattttcacttgtggatac

SEQ ID NO: 2437895 - DNA, 25 bp, Homo sapien
cagagttgtggattttcacttgtgg

SEQ ID NO: 2437896 - DNA, 25 bp, Homo sapien
gagttgtggattttcacttgtggat

SEQ ID NO: 2437897 - DNA, 25 bp, Homo sapien
tcagagttgtggattttcacttgtg

SEQ ID NO: 2437898 - DNA, 25 bp, Homo sapien
gtaccatggagacttgaagctggtc

SEQ ID NO: 2437899 - DNA, 25 bp, Homo sapien
ggtaccatggagacttgaagctggt

SEQ ID NO: 2437900 - DNA, 25 bp, Homo sapien
taccatggagacttgaagctggtct

SEQ ID NO: 2437901 - DNA, 25 bp, Homo sapien
tggtaccatggagacttgaagctgg

SEQ ID NO: 2437902 - DNA, 25 bp, Homo sapien
gatcaaacaccatgtaatctgtgtg

SEQ ID NO: 2437903 - DNA, 25 bp, Homo sapien
gaaggcatcgggaaaggctttcatc

SEQ ID NO: 2437904 - DNA, 25 bp, Homo sapien
gatgtgtatctataagggagtgcga

SEQ ID NO: 2437905 - DNA, 25 bp, Homo sapien
tgaattcctgagttgtttccatgat

SEQ ID NO: 2437906 - DNA, 25 bp, Homo sapien
tacaggcttgcatcagtgagcctga

SEQ ID NO: 2437907 - DNA, 25 bp, Homo sapien
ggtgtgatcgtagcatactacagtg

SEQ ID NO: 2437908 - DNA, 25 bp, Homo sapien
catcagtgagcctgacttaaggaaa

SEQ ID NO: 2437909 - DNA, 25 bp, Homo sapien
tactacagtgtcgaacacctgggct

SEQ ID NO: 2437910 - DNA, 25 bp, Homo sapien
tagctgagataagcttattatcctt

SEQ ID NO: 2437911 - DNA, 25 bp, Homo sapien
ggagttagctgagataagcttatta

SEQ ID NO: 2437912 - DNA, 25 bp, Homo sapien
cgaggagttagctgagataagctta

SEQ ID NO: 2437913 - DNA, 25 bp, Homo sapien
gttagctgagataagcttattatcc

SEQ ID NO: 2437914 - DNA, 25 bp, Homo sapien
gttcttactggcttctctggtggtt

SEQ ID NO: 2437915 - DNA, 25 bp, Homo sapien
cagggttctgattgtggatgttttc

SEQ ID NO: 2437916 - DNA, 25 bp, Homo sapien
ttggcctcaggagttcttactggct

SEQ ID NO: 2437917 - DNA, 25 bp, Homo sapien
tgtcattaaggtgggggaagtacaa

SEQ ID NO: 2437918 - DNA, 25 bp, Homo sapien
ccagaggctgtagggctggaaggta

SEQ ID NO: 2437919 - DNA, 25 bp, Homo sapien
agtccccaaggaggccctagggctg

SEQ ID NO: 2437920 - DNA, 25 bp, Homo sapien
ggaggtcctaggacttgcagtccca

SEQ ID NO: 2437921 - DNA, 25 bp, Homo sapien
ttaggagagacctctagggaggtcc

SEQ ID NO: 2437922 - DNA, 25 bp, Homo sapien
aggtcctctggatagaggctctctt

SEQ ID NO: 2437923 - DNA, 25 bp, Homo sapien
ggtcctctggatagaggctctcttc

SEQ ID NO: 2437924 - DNA, 25 bp, Homo sapien
gaggtcctctggatagaggctctct

SEQ ID NO: 2437925 - DNA, 25 bp, Homo sapien
acttggccctttcagtggtaggaga

SEQ ID NO: 2437926 - DNA, 25 bp, Homo sapien
tgggacttggccctttcagtggtag

SEQ ID NO: 2437927 - DNA, 25 bp, Homo sapien
cctggtgatggagttgtggagctgg

SEQ ID NO: 2437928 - DNA, 25 bp, Homo sapien
tcagggctccgcctggtgatggagt

SEQ ID NO: 2437929 - DNA, 25 bp, Homo sapien
taagaggactggagactgtagctgt

SEQ ID NO: 2437930 - DNA, 25 bp, Homo sapien
agaggactggagactgtagctgttc

SEQ ID NO: 2437931 - DNA, 25 bp, Homo sapien
taggtgaggtaagaggactggagac

SEQ ID NO: 2437932 - DNA, 25 bp, Homo sapien
ggactggagactgtagctgttcgaa

SEQ ID NO: 2437933 - DNA, 25 bp, Homo sapien
agaaatgactaaagagcgcctgctg

SEQ ID NO: 2437934 - DNA, 25 bp, Homo sapien
ggggagaaatgactaaagagcgcct

SEQ ID NO: 2437935 - DNA, 25 bp, Homo sapien
ggagaaatgactaaagagcgcctgc

SEQ ID NO: 2437936 - DNA, 25 bp, Homo sapien
tgggggagaaatgactaaagagcgc

SEQ ID NO: 2437937 - DNA, 25 bp, Homo sapien
gactttattggaatgttgcttctcc

SEQ ID NO: 2437938 - DNA, 25 bp, Homo sapien
tcacctcgtagagattgtggttcag

SEQ ID NO: 2437939 - DNA, 25 bp, Homo sapien
ttgctcatcacctcgtagagattgt

SEQ ID NO: 2437940 - DNA, 25 bp, Homo sapien
tccagtttgctcatcacctcgtaga

SEQ ID NO: 2437941 - DNA, 25 bp, Homo sapien
ggaagatggtcacatagcagccaat

SEQ ID NO: 2437942 - DNA, 25 bp, Homo sapien
gatggtcacatagcagccaatacga

SEQ ID NO: 2437943 - DNA, 25 bp, Homo sapien
gaagacatccctcaagttggaaatg

SEQ ID NO: 2437944 - DNA, 25 bp, Homo sapien
tccctgtagaagacatccctcaagt

SEQ ID NO: 2437945 - DNA, 25 bp, Homo sapien
accaaggctcctaaatgaaagccat

SEQ ID NO: 2437946 - DNA, 25 bp, Homo sapien
aaaccagccaccaaggctcctaaat

SEQ ID NO: 2437947 - DNA, 25 bp, Homo sapien
accacaaacacatacgagtaaggca

SEQ ID NO: 2437948 - DNA, 25 bp, Homo sapien
cacatacgagtaaggcatgggaaag

SEQ ID NO: 2437949 - DNA, 25 bp, Homo sapien
ctagtagttcttggttcagatcttc

SEQ ID NO: 2437950 - DNA, 25 bp, Homo sapien
ctattataaagaataggcagctcct

SEQ ID NO: 2437951 - DNA, 25 bp, Homo sapien
cagtctgggctttgttgaactcttc

SEQ ID NO: 2437952 - DNA, 25 bp, Homo sapien
aataggcagctcctctagtagttct

SEQ ID NO: 2437953 - DNA, 25 bp, Homo sapien
tgtcatagtccacgagtttccgacc

SEQ ID NO: 2437954 - DNA, 25 bp, Homo sapien
gtcatagtccacgagtttccgaccc

SEQ ID NO: 2437955 - DNA, 25 bp, Homo sapien
catagtccacgagtttccgaccccg

SEQ ID NO: 2437956 - DNA, 25 bp, Homo sapien
actgtcatagtccacgagtttccga

SEQ ID NO: 2437957 - DNA, 25 bp, Homo sapien
ttaatttcactgaactgggcaacat

SEQ ID NO: 2437958 - DNA, 25 bp, Homo sapien
cttaatttcactgaactgggcaaca

SEQ ID NO: 2437959 - DNA, 25 bp, Homo sapien
taatttcactgaactgggcaacata

SEQ ID NO: 2437960 - DNA, 25 bp, Homo sapien
gagattaagaacagggcacaaggtc

SEQ ID NO: 2437961 - DNA, 25 bp, Homo sapien
gagggtcaaaattagagggatccac

SEQ ID NO: 2437962 - DNA, 25 bp, Homo sapien
tcagaggctggtgaaggctccactt

SEQ ID NO: 2437963 - DNA, 25 bp, Homo sapien
tgaggctacacaaatgcacagtgtg

SEQ ID NO: 2437964 - DNA, 25 bp, Homo sapien
gacactctttttgaactttcatgca

SEQ ID NO: 2437965 - DNA, 25 bp, Homo sapien
gaccgtcccactcgctgctgtagat

SEQ ID NO: 2437966 - DNA, 25 bp, Homo sapien
ctcctcatgaccgtcccactcgctg

SEQ ID NO: 2437967 - DNA, 25 bp, Homo sapien
tcatgaccgtcccactcgctgctgt

SEQ ID NO: 2437968 - DNA, 25 bp, Homo sapien
ctttgactgcactaaggaagttctt

SEQ ID NO: 2437969 - DNA, 25 bp, Homo sapien
cttcaggtccttgtacagcttgtgg

SEQ ID NO: 2437970 - DNA, 25 bp, Homo sapien
ggtccttgtacagcttgtggccttc

SEQ ID NO: 2437971 - DNA, 25 bp, Homo sapien
ttgactgcactaaggaagttcttca

SEQ ID NO: 2437972 - DNA, 25 bp, Homo sapien
tgagatcggatcacgccactgtact

SEQ ID NO: 2437973 - DNA, 25 bp, Homo sapien
cagcctcggtgacagagcaagactc

SEQ ID NO: 2437974 - DNA, 25 bp, Homo sapien
ctccatctcaaaacaaacaaacaaa

SEQ ID NO: 2437975 - DNA, 25 bp, Homo sapien
gactccatctcaaaacaaacaaaca

SEQ ID NO: 2437976 - DNA, 25 bp, Homo sapien
caaactcctagtcttagcaaccctc

SEQ ID NO: 2437977 - DNA, 25 bp, Homo sapien
tgtacccaaccatgtactttctgat

SEQ ID NO: 2437978 - DNA, 25 bp, Homo sapien
ctgtgttgccgggtttgtctcaaac

SEQ ID NO: 2437979 - DNA, 25 bp, Homo sapien
cctggccaagtaaatgttgtataga

SEQ ID NO: 2437980 - DNA, 25 bp, Homo sapien
tgcacccggcctgataatgaaattt

SEQ ID NO: 2437981 - DNA, 25 bp, Homo sapien
tctttttctcttagacagcctccct

SEQ ID NO: 2437982 - DNA, 25 bp, Homo sapien
cgttacttaggttgccgaatgaaat

SEQ ID NO: 2437983 - DNA, 25 bp, Homo sapien
tgcaaggacttctgcccagcaactg

SEQ ID NO: 2437984 - DNA, 25 bp, Homo sapien
tgctagcgctttgttcaaatcgttc

SEQ ID NO: 2437985 - DNA, 25 bp, Homo sapien
gttgctagcgctttgttcaaatcgt

SEQ ID NO: 2437986 - DNA, 25 bp, Homo sapien
gctagcgctttgttcaaatcgttca

SEQ ID NO: 2437987 - DNA, 25 bp, Homo sapien
aagttgctagcgctttgttcaaatc

SEQ ID NO: 2437988 - DNA, 25 bp, Homo sapien
tccagcccagtaccctgaacaaagg

SEQ ID NO: 2437989 - DNA, 25 bp, Homo sapien
tatcaggaacgttgtaaagcagcag

SEQ ID NO: 2437990 - DNA, 25 bp, Homo sapien
tattgtgtttaatggtcaccagacc

SEQ ID NO: 2437991 - DNA, 25 bp, Homo sapien
gagtggtaaacaacgccccttctca

SEQ ID NO: 2437992 - DNA, 25 bp, Homo sapien
cttcccagggctcaaagcagtgctc

SEQ ID NO: 2437993 - DNA, 25 bp, Homo sapien
tgaagtaacgaagtctggctacacg

SEQ ID NO: 2437994 - DNA, 25 bp, Homo sapien
gtttcgagctagaccttcccatagg

SEQ ID NO: 2437995 - DNA, 25 bp, Homo sapien
tgataaatcaactcgggagagctgg

SEQ ID NO: 2437996 - DNA, 25 bp, Homo sapien
cttggcgaagaggccggccgcgccg

SEQ ID NO: 2437997 - DNA, 25 bp, Homo sapien
gggccctgctaaacttcttctgcac

SEQ ID NO: 2437998 - DNA, 25 bp, Homo sapien
tgggccctgctaaacttcttctgca

SEQ ID NO: 2437999 - DNA, 25 bp, Homo sapien
tcctgggccctgctaaacttcttct

SEQ ID NO: 2438000 - DNA, 25 bp, Homo sapien
cccgaggaggaagtgcgggctcccg

SEQ ID NO: 2438001 - DNA, 25 bp, Homo sapien
ggccccgcgccctgtggttttctga

SEQ ID NO: 2438002 - DNA, 25 bp, Homo sapien
cgaggaggaagtgcgggctcccggc

SEQ ID NO: 2438003 - DNA, 25 bp, Homo sapien
ctggccccgcgccctgtggttttct

SEQ ID NO: 2438004 - DNA, 25 bp, Homo sapien
cgaaaacacgtttaggttctctgag

SEQ ID NO: 2438005 - DNA, 25 bp, Homo sapien
tcttgctccaggtaggctctaagcc

SEQ ID NO: 2438006 - DNA, 25 bp, Homo sapien
gctctaagcctggaactggtaggga

SEQ ID NO: 2438007 - DNA, 25 bp, Homo sapien
tgcgaagccgccatgtacactgcgt

SEQ ID NO: 2438008 - DNA, 25 bp, Homo sapien
ttggagtgggcgttcgttttaggca

SEQ ID NO: 2438009 - DNA, 25 bp, Homo sapien
cagaaacttggagtgggcgttcgtt

SEQ ID NO: 2438010 - DNA, 25 bp, Homo sapien
ctagtagttgccatcacccagaaac

SEQ ID NO: 2438011 - DNA, 25 bp, Homo sapien
tcacccagaaacttggagtgggcgt

SEQ ID NO: 2438012 - DNA, 25 bp, Homo sapien
actttttgatcgcaagtcctactgc

SEQ ID NO: 2438013 - DNA, 25 bp, Homo sapien
ggctcaatagtctttcagaatgtgt

SEQ ID NO: 2438014 - DNA, 25 bp, Homo sapien
tgcttttctatcaatggctcaatag

SEQ ID NO: 2438015 - DNA, 25 bp, Homo sapien
gcagatctaagaaccattttgggaa

SEQ ID NO: 2438016 - DNA, 25 bp, Homo sapien
tatccaggagatgtaagcagagacc

SEQ ID NO: 2438017 - DNA, 25 bp, Homo sapien
ggacagaatacttgccattcaccaa

SEQ ID NO: 2438018 - DNA, 25 bp, Homo sapien
ccggctggacacaaagctggtcact

SEQ ID NO: 2438019 - DNA, 25 bp, Homo sapien
actccatggacagaatacttgccat

SEQ ID NO: 2438020 - DNA, 25 bp, Homo sapien
tcactggggtaaagggatggtggta

SEQ ID NO: 2438021 - DNA, 25 bp, Homo sapien
cactggggtaaagggatggtggtag

SEQ ID NO: 2438022 - DNA, 25 bp, Homo sapien
ctggggtaaagggatggtggtagag

SEQ ID NO: 2438023 - DNA, 25 bp, Homo sapien
tatcactggggtaaagggatggtgg

SEQ ID NO: 2438024 - DNA, 25 bp, Homo sapien
gagcgaactccatctccaccagcac

SEQ ID NO: 2438025 - DNA, 25 bp, Homo sapien
gcgaactccatctccaccagcacac

SEQ ID NO: 2438026 - DNA, 25 bp, Homo sapien
gaactccatctccaccagcacacac

SEQ ID NO: 2438027 - DNA, 25 bp, Homo sapien
ctggcatccagagcgaactccatct

SEQ ID NO: 2438028 - DNA, 25 bp, Homo sapien
tgttcttcacagtggagccccagta

SEQ ID NO: 2438029 - DNA, 25 bp, Homo sapien
ggtgttcttcacagtggagccccag

SEQ ID NO: 2438030 - DNA, 25 bp, Homo sapien
gtgttcttcacagtggagccccagt

SEQ ID NO: 2438031 - DNA, 25 bp, Homo sapien
tgtagcagggactgttgttagccag

SEQ ID NO: 2438032 - DNA, 25 bp, Homo sapien
cctgtgatgtagcagggactgttgt

SEQ ID NO: 2438033 - DNA, 25 bp, Homo sapien
gggcagaacacccagctggacatag

SEQ ID NO: 2438034 - DNA, 25 bp, Homo sapien
tattgagggtaacgctctgggccag

SEQ ID NO: 2438035 - DNA, 25 bp, Homo sapien
tggatgcaccacgatcttctgcaca

SEQ ID NO: 2438036 - DNA, 25 bp, Homo sapien
cacgttatcgctgttccagtatgga

SEQ ID NO: 2438037 - DNA, 25 bp, Homo sapien
tcagtgccatcattctggctcaggt

SEQ ID NO: 2438038 - DNA, 25 bp, Homo sapien
cggcagccacgttatcgctgttcca

SEQ ID NO: 2438039 - DNA, 25 bp, Homo sapien
gtccctccacaggtgtgataccggg

SEQ ID NO: 2438040 - DNA, 25 bp, Homo sapien
gttctgtctgataagggtccctcca

SEQ ID NO: 2438041 - DNA, 25 bp, Homo sapien
ctccagaccggtactggagggaaat

SEQ ID NO: 2438042 - DNA, 25 bp, Homo sapien
gtgtgataccgggaacctccagacc

SEQ ID NO: 2438043 - DNA, 25 bp, Homo sapien
ctagcacctcatgttatgtaatagc

SEQ ID NO: 2438044 - DNA, 25 bp, Homo sapien
tagatcacttaaatcagggcccagc

SEQ ID NO: 2438045 - DNA, 25 bp, Homo sapien
gcagtgatatcttctcaaagtgtgg

SEQ ID NO: 2438046 - DNA, 25 bp, Homo sapien
aatagctctactcctgaaaactggg

SEQ ID NO: 2438047 - DNA, 25 bp, Homo sapien
agtccctccgactacgcgggcattg

SEQ ID NO: 2438048 - DNA, 25 bp, Homo sapien
cgactacgcgggcattggtttccgg

SEQ ID NO: 2438049 - DNA, 25 bp, Homo sapien
ctacgcgggcattggtttccggaag

SEQ ID NO: 2438050 - DNA, 25 bp, Homo sapien
tccggaaggtcctgggtgctgtgtc

SEQ ID NO: 2438051 - DNA, 25 bp, Homo sapien
taaaggaccagggttgcgactggac

SEQ ID NO: 2438052 - DNA, 25 bp, Homo sapien
cagggttgcgactggaccatatcca

SEQ ID NO: 2438053 - DNA, 25 bp, Homo sapien
gaccagggttgcgactggaccatat

SEQ ID NO: 2438054 - DNA, 25 bp, Homo sapien
gttgcgactggaccatatccactta

SEQ ID NO: 2438055 - DNA, 25 bp, Homo sapien
ctgccttcttgcttggaccaagccc

SEQ ID NO: 2438056 - DNA, 25 bp, Homo sapien
tcctcttagcagcaaagctgactgt

SEQ ID NO: 2438057 - DNA, 25 bp, Homo sapien
aaagctgactgtcttcttgccaact

SEQ ID NO: 2438058 - DNA, 25 bp, Homo sapien
cctctttatactcctcttagcagca

SEQ ID NO: 2438059 - DNA, 25 bp, Homo sapien
ctttgtgaggccttatctgattccc

SEQ ID NO: 2438060 - DNA, 25 bp, Homo sapien
caagagctccgtgaaggctaaagtg

SEQ ID NO: 2438061 - DNA, 25 bp, Homo sapien
ctagggcccctgaaattcatgatgt

SEQ ID NO: 2438062 - DNA, 25 bp, Homo sapien
ccaggcttgctatgatttgcttaca

SEQ ID NO: 2438063 - DNA, 25 bp, Homo sapien
actgagacctctcatccaattctct

SEQ ID NO: 2438064 - DNA, 25 bp, Homo sapien
tgagacctctcatccaattctcttc

SEQ ID NO: 2438065 - DNA, 25 bp, Homo sapien
ctgagacctctcatccaattctctt

SEQ ID NO: 2438066 - DNA, 25 bp, Homo sapien
gagacctctcatccaattctcttct

SEQ ID NO: 2438067 - DNA, 25 bp, Homo sapien
gctctcagggatgtaggcggcctcc

SEQ ID NO: 2438068 - DNA, 25 bp, Homo sapien
aaggctctcagggatgtaggcggcc

SEQ ID NO: 2438069 - DNA, 25 bp, Homo sapien
ctcagggatgtaggcggcctcccgc

SEQ ID NO: 2438070 - DNA, 25 bp, Homo sapien
gacagctgtggtcccatagcaccct

SEQ ID NO: 2438071 - DNA, 25 bp, Homo sapien
gaaatccatctttacggcctccaga

SEQ ID NO: 2438072 - DNA, 25 bp, Homo sapien
caaaagagccatgtgcagtcgggtc

SEQ ID NO: 2438073 - DNA, 25 bp, Homo sapien
tcagcattgaagaacgagcctcagt

SEQ ID NO: 2438074 - DNA, 25 bp, Homo sapien
gaaattttagtcctctgcgcagcca

SEQ ID NO: 2438075 - DNA, 25 bp, Homo sapien
agccacaactgatgggggtcactgg

SEQ ID NO: 2438076 - DNA, 25 bp, Homo sapien
acaaagagccacaactgatgggggt

SEQ ID NO: 2438077 - DNA, 25 bp, Homo sapien
ccacaactgatgggggtcactggga

SEQ ID NO: 2438078 - DNA, 25 bp, Homo sapien
ctagacaaagagccacaactgatgg

SEQ ID NO: 2438079 - DNA, 25 bp, Homo sapien
agatcctgagttcctgatgagctga

SEQ ID NO: 2438080 - DNA, 25 bp, Homo sapien
cagatcctgagttcctgatgagctg

SEQ ID NO: 2438081 - DNA, 25 bp, Homo sapien
gatcctgagttcctgatgagctgat

SEQ ID NO: 2438082 - DNA, 25 bp, Homo sapien
atcctgagttcctgatgagctgatc

SEQ ID NO: 2438083 - DNA, 25 bp, Homo sapien
gccagtgaagtgacagctcccaagg

SEQ ID NO: 2438084 - DNA, 25 bp, Homo sapien
gcacccttgctgacatgtagacaca

SEQ ID NO: 2438085 - DNA, 25 bp, Homo sapien
tgtagacacagctgctttgcgatgt

SEQ ID NO: 2438086 - DNA, 25 bp, Homo sapien
cgatgttgtggcgaaggtccctctg

SEQ ID NO: 2438087 - DNA, 25 bp, Homo sapien
tcacttactagtgctgggcacctag

SEQ ID NO: 2438088 - DNA, 25 bp, Homo sapien
gtcttcacctacatatgccagcggg

SEQ ID NO: 2438089 - DNA, 25 bp, Homo sapien
tgtgggctaccgtgcctaatcatat

SEQ ID NO: 2438090 - DNA, 25 bp, Homo sapien
accactggaaatcatcttgcaggcc

SEQ ID NO: 2438091 - DNA, 25 bp, Homo sapien
ctggttgccgccaaggccgtggcag

SEQ ID NO: 2438092 - DNA, 25 bp, Homo sapien
aggagtacatgatgaggggcttccc

SEQ ID NO: 2438093 - DNA, 25 bp, Homo sapien
cacatccaggcattggttggtgccg

SEQ ID NO: 2438094 - DNA, 25 bp, Homo sapien
cattggttggtgccgaggttcttga

SEQ ID NO: 2438095 - DNA, 25 bp, Homo sapien
tccctcagctgcagtcgttccgaaa

SEQ ID NO: 2438096 - DNA, 25 bp, Homo sapien
cgttccgaaatgtcaccgaaggatt

SEQ ID NO: 2438097 - DNA, 25 bp, Homo sapien
ggcgtcaggtcaggaacaaacatct

SEQ ID NO: 2438098 - DNA, 25 bp, Homo sapien
tagacattgtgcaggtaccaggaaa

SEQ ID NO: 2438099 - DNA, 25 bp, Homo sapien
ctgtctgggctgaagtagtgcagat

SEQ ID NO: 2438100 - DNA, 25 bp, Homo sapien
gcgcctggggctactgtctctcatg

SEQ ID NO: 2438101 - DNA, 25 bp, Homo sapien
gctgaagtagtgcagatagcatgga

SEQ ID NO: 2438102 - DNA, 25 bp, Homo sapien
tagtgcagatagcatggagcgcctg

SEQ ID NO: 2438103 - DNA, 25 bp, Homo sapien
aacacatggcctacgacagagcagg

SEQ ID NO: 2438104 - DNA, 25 bp, Homo sapien
agacctctgccaggcgcacttgatt

SEQ ID NO: 2438105 - DNA, 25 bp, Homo sapien
ctcttggtccggaacacatggccta

SEQ ID NO: 2438106 - DNA, 25 bp, Homo sapien
cgagcaatgacactagtgcccttgg

SEQ ID NO: 2438107 - DNA, 25 bp, Homo sapien
ctgatgtaagaggagacaggatgag

SEQ ID NO: 2438108 - DNA, 25 bp, Homo sapien
tgatgtaagaggagacaggatgagg

SEQ ID NO: 2438109 - DNA, 25 bp, Homo sapien
gatgtaagaggagacaggatgaggc

SEQ ID NO: 2438110 - DNA, 25 bp, Homo sapien
gcttaatatgcatcaggcaccgtga

SEQ ID NO: 2438111 - DNA, 25 bp, Homo sapien
catgactacacgatcccaggctttc

SEQ ID NO: 2438112 - DNA, 25 bp, Homo sapien
gatcacttggctttttgacctggaa

SEQ ID NO: 2438113 - DNA, 25 bp, Homo sapien
cagtgggctaggtgagacagtctcc

SEQ ID NO: 2438114 - DNA, 25 bp, Homo sapien
cagatctccatctgattatcatagg

SEQ ID NO: 2438115 - DNA, 25 bp, Homo sapien
gattatcataggtaccgatgtgctc

SEQ ID NO: 2438116 - DNA, 25 bp, Homo sapien
gtaccgatgtgctcaaagtaggact

SEQ ID NO: 2438117 - DNA, 25 bp, Homo sapien
gaggccaccagcaaacgtcggggat

SEQ ID NO: 2438118 - DNA, 25 bp, Homo sapien
tcaaagttgcctcggctatggactc

SEQ ID NO: 2438119 - DNA, 25 bp, Homo sapien
gaagtgtttcccagccgaaggtcag

SEQ ID NO: 2438120 - DNA, 25 bp, Homo sapien
cgggcttggcgaactcaaaagtatt

SEQ ID NO: 2438121 - DNA, 25 bp, Homo sapien
gaaggtcaggctccagtcaaagttg

SEQ ID NO: 2438122 - DNA, 25 bp, Homo sapien
gaggcagcagtcagggccctgccca

SEQ ID NO: 2438123 - DNA, 25 bp, Homo sapien
tgcaggccccaaccaggaggcagca

SEQ ID NO: 2438124 - DNA, 25 bp, Homo sapien
ggaggcagcagtcagggccctgccc

SEQ ID NO: 2438125 - DNA, 25 bp, Homo sapien
tgcccacagcagagcccaagctgca

SEQ ID NO: 2438126 - DNA, 25 bp, Homo sapien
agcagccgggcggtgatcagcccct

SEQ ID NO: 2438127 - DNA, 25 bp, Homo sapien
atccaggaacgtgagcacctccgcc

SEQ ID NO: 2438128 - DNA, 25 bp, Homo sapien
ggaacgtgagcacctccgcctgtgc

SEQ ID NO: 2438129 - DNA, 25 bp, Homo sapien
tgcagctgcttcacgtactgctcca

SEQ ID NO: 2438130 - DNA, 25 bp, Homo sapien
tccaccactttgctgtatacccaat

SEQ ID NO: 2438131 - DNA, 25 bp, Homo sapien
tgtggccagtccaccactttgctgt

SEQ ID NO: 2438132 - DNA, 25 bp, Homo sapien
gccagtccaccactttgctgtatac

SEQ ID NO: 2438133 - DNA, 25 bp, Homo sapien
agtccaccactttgctgtataccca

SEQ ID NO: 2438134 - DNA, 25 bp, Homo sapien
taatgcacccgagtttcaaggtggt

SEQ ID NO: 2438135 - DNA, 25 bp, Homo sapien
atttccctgtgtgtgagatcccggg

SEQ ID NO: 2438136 - DNA, 25 bp, Homo sapien
gagaaggccaaggacttaatgcacc

SEQ ID NO: 2438137 - DNA, 25 bp, Homo sapien
tcttacttaactccaggaatgaggc

SEQ ID NO: 2438138 - DNA, 25 bp, Homo sapien
ttgtatttcggcagagacacagtcc

SEQ ID NO: 2438139 - DNA, 25 bp, Homo sapien
tctcatagggctactactgggtgcc

SEQ ID NO: 2438140 - DNA, 25 bp, Homo sapien
tgatcaaacagtcaaacgtgtggga

SEQ ID NO: 2438141 - DNA, 25 bp, Homo sapien
ccccatggtatcaaatgcccttaga

SEQ ID NO: 2438142 - DNA, 25 bp, Homo sapien
tcctgctcctggcctttaagatgag

SEQ ID NO: 2438143 - DNA, 25 bp, Homo sapien
tgacttcttcctgctcctggccttt

SEQ ID NO: 2438144 - DNA, 25 bp, Homo sapien
ttcttcctgctcctggcctttaaga

SEQ ID NO: 2438145 - DNA, 25 bp, Homo sapien
cttcctgctcctggcctttaagatg

SEQ ID NO: 2438146 - DNA, 25 bp, Homo sapien
tgatctccttgagcaagatggcagg

SEQ ID NO: 2438147 - DNA, 25 bp, Homo sapien
ggcatcatccaccagtatgatctcc

SEQ ID NO: 2438148 - DNA, 25 bp, Homo sapien
tgtaggacgctgtacactgttcgca

SEQ ID NO: 2438149 - DNA, 25 bp, Homo sapien
tgttcgcagcagtgtggaccaggct

SEQ ID NO: 2438150 - DNA, 25 bp, Homo sapien
gatccggtcgctggcaaaggcattg

SEQ ID NO: 2438151 - DNA, 25 bp, Homo sapien
taaggttgttcatggcctccagcat

SEQ ID NO: 2438152 - DNA, 25 bp, Homo sapien
ggtggccgttcccagaagggcttca

SEQ ID NO: 2438153 - DNA, 25 bp, Homo sapien
tgaggtccaggacgtgatccttccg

SEQ ID NO: 2438154 - DNA, 25 bp, Homo sapien
ggcaccccagctgcgtcagctctga

SEQ ID NO: 2438155 - DNA, 25 bp, Homo sapien
ccctggagatagcttgatacgttgt

SEQ ID NO: 2438156 - DNA, 25 bp, Homo sapien
gatacgttgtggtggccacaagctg

SEQ ID NO: 2438157 - DNA, 25 bp, Homo sapien
tgagcccaaccctggagatagcttg

SEQ ID NO: 2438158 - DNA, 25 bp, Homo sapien
tacccttgagtgctgaaggagccgg

SEQ ID NO: 2438159 - DNA, 25 bp, Homo sapien
gaaatgggccgaacactaactggcg

SEQ ID NO: 2438160 - DNA, 25 bp, Homo sapien
ctaactggcgagtaggagtcagcga

SEQ ID NO: 2438161 - DNA, 25 bp, Homo sapien
tcagcgaggcgaggtgagcacattt

SEQ ID NO: 2438162 - DNA, 25 bp, Homo sapien
caggaaggcctcctgactgattcac

SEQ ID NO: 2438163 - DNA, 25 bp, Homo sapien
aaggcctcctgactgattcactcag

SEQ ID NO: 2438164 - DNA, 25 bp, Homo sapien
ggaaggcctcctgactgattcactc

SEQ ID NO: 2438165 - DNA, 25 bp, Homo sapien
gaaggcctcctgactgattcactca

SEQ ID NO: 2438166 - DNA, 25 bp, Homo sapien
tcctggcactgcctcgtggtccctc

SEQ ID NO: 2438167 - DNA, 25 bp, Homo sapien
tggcactgcctcgtggtccctcaca

SEQ ID NO: 2438168 - DNA, 25 bp, Homo sapien
ctggcactgcctcgtggtccctcac

SEQ ID NO: 2438169 - DNA, 25 bp, Homo sapien
gcactgcctcgtggtccctcacagc

SEQ ID NO: 2438170 - DNA, 25 bp, Homo sapien
tgagctcttcctaggcatctaatct

SEQ ID NO: 2438171 - DNA, 25 bp, Homo sapien
taatctctcaatcccatctggctgc

SEQ ID NO: 2438172 - DNA, 25 bp, Homo sapien
tacagttcctcaaggtactaaccac

SEQ ID NO: 2438173 - DNA, 25 bp, Homo sapien
tctggctgcctgaagctttctctct

SEQ ID NO: 2438174 - DNA, 25 bp, Homo sapien
ccagaagtatggttagcaaggtcgt

SEQ ID NO: 2438175 - DNA, 25 bp, Homo sapien
cagaagtatggttagcaaggtcgtg

SEQ ID NO: 2438176 - DNA, 25 bp, Homo sapien
caaggtcgtggaggtcgcccctcca

SEQ ID NO: 2438177 - DNA, 25 bp, Homo sapien
ttagcaaggtcgtggaggtcgcccc

SEQ ID NO: 2438178 - DNA, 25 bp, Homo sapien
taaatgtggagcactggcttcacta

SEQ ID NO: 2438179 - DNA, 25 bp, Homo sapien
ttctctagcaacacacagctagtgg

SEQ ID NO: 2438180 - DNA, 25 bp, Homo sapien
tcattttatcaacggcgaggccaga

SEQ ID NO: 2438181 - DNA, 25 bp, Homo sapien
atacagaggtgcgtgccatcaggcc

SEQ ID NO: 2438182 - DNA, 25 bp, Homo sapien
tatacctagagcagcgcttggcatg

SEQ ID NO: 2438183 - DNA, 25 bp, Homo sapien
tgaaaaactcaacccaactttgctc

SEQ ID NO: 2438184 - DNA, 25 bp, Homo sapien
tcaccactgtatacctagagcagcg

SEQ ID NO: 2438185 - DNA, 25 bp, Homo sapien
ctagagcagcgcttggcatgtggta

SEQ ID NO: 2438186 - DNA, 25 bp, Homo sapien
ctctctttcacaatcaggacagccg

SEQ ID NO: 2438187 - DNA, 25 bp, Homo sapien
tctttcacaatcaggacagccgtat

SEQ ID NO: 2438188 - DNA, 25 bp, Homo sapien
cacaatcaggacagccgtattcata

SEQ ID NO: 2438189 - DNA, 25 bp, Homo sapien
ggacagccgtattcatattccttga

SEQ ID NO: 2438190 - DNA, 25 bp, Homo sapien
ggagtcagctgttccacccactgta

SEQ ID NO: 2438191 - DNA, 25 bp, Homo sapien
tccatgctgctacaggtaggagtca

SEQ ID NO: 2438192 - DNA, 25 bp, Homo sapien
tctgggttcctaaagtgcatggcac

SEQ ID NO: 2438193 - DNA, 25 bp, Homo sapien
caatgctactggctcctgctaggca

SEQ ID NO: 2438194 - DNA, 25 bp, Homo sapien
ttccctgtctcatccttcttaacct

SEQ ID NO: 2438195 - DNA, 25 bp, Homo sapien
cctgtctcatccttcttaacctttc

SEQ ID NO: 2438196 - DNA, 25 bp, Homo sapien
tttccctgtctcatccttcttaacc

SEQ ID NO: 2438197 - DNA, 25 bp, Homo sapien
tccctgtctcatccttcttaacctt

SEQ ID NO: 2438198 - DNA, 25 bp, Homo sapien
ctttgatgggaagggagacagctca

SEQ ID NO: 2438199 - DNA, 25 bp, Homo sapien
tgatgggaagggagacagctcatct

SEQ ID NO: 2438200 - DNA, 25 bp, Homo sapien
ttgatgggaagggagacagctcatc

SEQ ID NO: 2438201 - DNA, 25 bp, Homo sapien
atgggaagggagacagctcatctgt

SEQ ID NO: 2438202 - DNA, 25 bp, Homo sapien
ggatgcaagtaaaagctgtttctcc

SEQ ID NO: 2438203 - DNA, 25 bp, Homo sapien
tctgcgatgattggccctggatgca

SEQ ID NO: 2438204 - DNA, 25 bp, Homo sapien
cctctgcagacgtctgggtctgcga

SEQ ID NO: 2438205 - DNA, 25 bp, Homo sapien
tctgggtctgcgatgattggccctg

SEQ ID NO: 2438206 - DNA, 25 bp, Homo sapien
tctgctcaggcgcaacgtggcaggg

SEQ ID NO: 2438207 - DNA, 25 bp, Homo sapien
agagttgccgtaccagagcacatgg

SEQ ID NO: 2438208 - DNA, 25 bp, Homo sapien
tctctgcaagagttgccgtaccaga

SEQ ID NO: 2438209 - DNA, 25 bp, Homo sapien
ggaaacctctctgcaagagttgccg

SEQ ID NO: 2438210 - DNA, 25 bp, Homo sapien
gggcacagaaggaatgcagggcatg

SEQ ID NO: 2438211 - DNA, 25 bp, Homo sapien
ggcacagaaggaatgcagggcatgg

SEQ ID NO: 2438212 - DNA, 25 bp, Homo sapien
gcacagaaggaatgcagggcatggg

SEQ ID NO: 2438213 - DNA, 25 bp, Homo sapien
cattcatctcgtaagcgccaaggtg

SEQ ID NO: 2438214 - DNA, 25 bp, Homo sapien
ttcatctcgtaagcgccaaggtgga

SEQ ID NO: 2438215 - DNA, 25 bp, Homo sapien
tcattcatctcgtaagcgccaaggt

SEQ ID NO: 2438216 - DNA, 25 bp, Homo sapien
cctcattcatctcgtaagcgccaag

SEQ ID NO: 2438217 - DNA, 25 bp, Homo sapien
cgagggaggagctacaggccaccgc

SEQ ID NO: 2438218 - DNA, 25 bp, Homo sapien
ggaggagctacaggccaccgcgacc

SEQ ID NO: 2438219 - DNA, 25 bp, Homo sapien
cagagagcgaaggcaggagggacca

SEQ ID NO: 2438220 - DNA, 25 bp, Homo sapien
ccgcgaccagcagagagcgaaggca

SEQ ID NO: 2438221 - DNA, 25 bp, Homo sapien
ctgtcgcgccgaggcaaagccgcag

SEQ ID NO: 2438222 - DNA, 25 bp, Homo sapien
tgtcgcgccgaggcaaagccgcagc

SEQ ID NO: 2438223 - DNA, 25 bp, Homo sapien
agcaatatcaggtctgtggccctct

SEQ ID NO: 2438224 - DNA, 25 bp, Homo sapien
tcataatttagtgctccaggcccca

SEQ ID NO: 2438225 - DNA, 25 bp, Homo sapien
cccccagatccttgaggttactagt

SEQ ID NO: 2438226 - DNA, 25 bp, Homo sapien
aggccccacgtgcagcaatatcagg

SEQ ID NO: 2438227 - DNA, 25 bp, Homo sapien
gacagcgcaggagcatggtgttcac

SEQ ID NO: 2438228 - DNA, 25 bp, Homo sapien
cgacagcgcaggagcatggtgttca

SEQ ID NO: 2438229 - DNA, 25 bp, Homo sapien
gcgacagcgcaggagcatggtgttc

SEQ ID NO: 2438230 - DNA, 25 bp, Homo sapien
ggagccacacagagtgatgttgcat

SEQ ID NO: 2438231 - DNA, 25 bp, Homo sapien
tctttctgcttggtgacccgaggct

SEQ ID NO: 2438232 - DNA, 25 bp, Homo sapien
ctctgctggagccacacagagtgat

SEQ ID NO: 2438233 - DNA, 25 bp, Homo sapien
ccaggagtatggctgaggggaactg

SEQ ID NO: 2438234 - DNA, 25 bp, Homo sapien
gcattcagttgtgtgtaaatacatt

SEQ ID NO: 2438235 - DNA, 25 bp, Homo sapien
gataaatacccagtgatcagattgc

SEQ ID NO: 2438236 - DNA, 25 bp, Homo sapien
ctcaccaacattcgtgtttttttgt

SEQ ID NO: 2438237 - DNA, 25 bp, Homo sapien
agtgcatggagatgcaagtatccct

SEQ ID NO: 2438238 - DNA, 25 bp, Homo sapien
tcatgactgcctgaccttgagtaag

SEQ ID NO: 2438239 - DNA, 25 bp, Homo sapien
ggcacgatacataggttctcagcaa

SEQ ID NO: 2438240 - DNA, 25 bp, Homo sapien
caacacctaacatagggcacgatac

SEQ ID NO: 2438241 - DNA, 25 bp, Homo sapien
taatagatgaatgatggaatcccag

SEQ ID NO: 2438242 - DNA, 25 bp, Homo sapien
tttgcccggaatttaaacatcatct

SEQ ID NO: 2438243 - DNA, 25 bp, Homo sapien
gcgaaggatgtttgcccggaattta

SEQ ID NO: 2438244 - DNA, 25 bp, Homo sapien
atcgcgaaggatgtttgcccggaat

SEQ ID NO: 2438245 - DNA, 25 bp, Homo sapien
tgtttgcccggaatttaaacatcat

SEQ ID NO: 2438246 - DNA, 25 bp, Homo sapien
ctgagctggctagatgatctcatgc

SEQ ID NO: 2438247 - DNA, 25 bp, Homo sapien
tctctgtttctctaagcgagagctg

SEQ ID NO: 2438248 - DNA, 25 bp, Homo sapien
caggaaagtcatggatctctgtttc

SEQ ID NO: 2438249 - DNA, 25 bp, Homo sapien
tttgtcaggaaagtcatggatctct

SEQ ID NO: 2438250 - DNA, 25 bp, Homo sapien
acccagccagcctgacgtctttcag

SEQ ID NO: 2438251 - DNA, 25 bp, Homo sapien
cccagccagcctgacgtctttcagc

SEQ ID NO: 2438252 - DNA, 25 bp, Homo sapien
tgaatgtggaagcagaagaccacct

SEQ ID NO: 2438253 - DNA, 25 bp, Homo sapien
ttagaacggccaccattgaagacct

SEQ ID NO: 2438254 - DNA, 25 bp, Homo sapien
gattcattctgccactgaggagtcc

SEQ ID NO: 2438255 - DNA, 25 bp, Homo sapien
tgaggagtccttcagtgaggtccct

SEQ ID NO: 2438256 - DNA, 25 bp, Homo sapien
ctttgtgcatggtgattaccagtca

SEQ ID NO: 2438257 - DNA, 25 bp, Homo sapien
gtgcatggtgattaccagtcactct

SEQ ID NO: 2438258 - DNA, 25 bp, Homo sapien
tgcacagctggtacgaggacagctg

SEQ ID NO: 2438259 - DNA, 25 bp, Homo sapien
tgtgcatggtgattaccagtcactc

SEQ ID NO: 2438260 - DNA, 25 bp, Homo sapien
cacatgattgcaggatttcccattg

SEQ ID NO: 2438261 - DNA, 25 bp, Homo sapien
tccacatgattgcaggatttcccat

SEQ ID NO: 2438262 - DNA, 25 bp, Homo sapien
tgattgcaggatttcccattgttca

SEQ ID NO: 2438263 - DNA, 25 bp, Homo sapien
tcagtccacatgattgcaggatttc

SEQ ID NO: 2438264 - DNA, 25 bp, Homo sapien
ggtggtaatttctcatggtggagct

SEQ ID NO: 2438265 - DNA, 25 bp, Homo sapien
aatttctcatggtggagcttgtttc

SEQ ID NO: 2438266 - DNA, 25 bp, Homo sapien
tgcatccttgagcttactttcagga

SEQ ID NO: 2438267 - DNA, 25 bp, Homo sapien
ccttggtggtaatttctcatggtgg

SEQ ID NO: 2438268 - DNA, 25 bp, Homo sapien
tgcataggtgttatctctcaaatct

SEQ ID NO: 2438269 - DNA, 25 bp, Homo sapien
cagcccttgcataggtgttatctct

SEQ ID NO: 2438270 - DNA, 25 bp, Homo sapien
ccttgcataggtgttatctctcaaa

SEQ ID NO: 2438271 - DNA, 25 bp, Homo sapien
tttcaacagcccttgcataggtgtt

SEQ ID NO: 2438272 - DNA, 25 bp, Homo sapien
tatcccgctggtaaccagcttacag

SEQ ID NO: 2438273 - DNA, 25 bp, Homo sapien
ctaagagtatgtagtgttgcatgat

SEQ ID NO: 2438274 - DNA, 25 bp, Homo sapien
catccgggattgttggaattttgca

SEQ ID NO: 2438275 - DNA, 25 bp, Homo sapien
catgtgtctgttccatatcccgctg

SEQ ID NO: 2438276 - DNA, 25 bp, Homo sapien
tatcatcaacaggttgccgtagtga

SEQ ID NO: 2438277 - DNA, 25 bp, Homo sapien
ttgccgtagtgatgatatgatgctg

SEQ ID NO: 2438278 - DNA, 25 bp, Homo sapien
cttctgtcaggttggcttacattat

SEQ ID NO: 2438279 - DNA, 25 bp, Homo sapien
ggcttacattatcatcaacaggttg

SEQ ID NO: 2438280 - DNA, 25 bp, Homo sapien
ttctgagcccagcagaaatcagcgg

SEQ ID NO: 2438281 - DNA, 25 bp, Homo sapien
gcttagcaggtttgcaattgacttc

SEQ ID NO: 2438282 - DNA, 25 bp, Homo sapien
cttcgcttagcaggtttgcaattga

SEQ ID NO: 2438283 - DNA, 25 bp, Homo sapien
tcagcggagcttgggcttcgcttag

SEQ ID NO: 2438284 - DNA, 25 bp, Homo sapien
agaacagagcaaccttccctcggaa

SEQ ID NO: 2438285 - DNA, 25 bp, Homo sapien
ggctgcccttccaagctaatggtgt

SEQ ID NO: 2438286 - DNA, 25 bp, Homo sapien
tcggaaggagacaattcgaggtgct

SEQ ID NO: 2438287 - DNA, 25 bp, Homo sapien
tctgattggttagatttggctgccc

SEQ ID NO: 2438288 - DNA, 25 bp, Homo sapien
tttcagtgggcccaagatcctgtaa

SEQ ID NO: 2438289 - DNA, 25 bp, Homo sapien
gatcctgtaaattgagttccctgcg

SEQ ID NO: 2438290 - DNA, 25 bp, Homo sapien
ctgccgctgattgacttctcgtttt

SEQ ID NO: 2438291 - DNA, 25 bp, Homo sapien
tgcgcttttggatgtcagaaacttc

SEQ ID NO: 2438292 - DNA, 25 bp, Homo sapien
cctgaaagaggatttggttgctggt

SEQ ID NO: 2438293 - DNA, 25 bp, Homo sapien
tttggagctcatgacccataaggcc

SEQ ID NO: 2438294 - DNA, 25 bp, Homo sapien
ttatagcacattacatgtaacctgg

SEQ ID NO: 2438295 - DNA, 25 bp, Homo sapien
agtgatcctttggtgttcagcacgc

SEQ ID NO: 2438296 - DNA, 25 bp, Homo sapien
tttgctgagcataatactttggaga

SEQ ID NO: 2438297 - DNA, 25 bp, Homo sapien
tcatgtaaccgtgccacaatcagga

SEQ ID NO: 2438298 - DNA, 25 bp, Homo sapien
caaatcttggtgtacagctctgaat

SEQ ID NO: 2438299 - DNA, 25 bp, Homo sapien
cactatataaccctttgagactgac

SEQ ID NO: 2438300 - DNA, 25 bp, Homo sapien
cttattctgtagggattcgcacaat

SEQ ID NO: 2438301 - DNA, 25 bp, Homo sapien
ttcttattctgtagggattcgcaca

SEQ ID NO: 2438302 - DNA, 25 bp, Homo sapien
caaagtttgggttactctccttctg

SEQ ID NO: 2438303 - DNA, 25 bp, Homo sapien
tcttattctgtagggattcgcacaa

SEQ ID NO: 2438304 - DNA, 25 bp, Homo sapien
gtgtgtctgttctctatagacgtcc

SEQ ID NO: 2438305 - DNA, 25 bp, Homo sapien
gtctgttctctatagacgtcctggt

SEQ ID NO: 2438306 - DNA, 25 bp, Homo sapien
ttctgtaccactgtgtgtctgttct

SEQ ID NO: 2438307 - DNA, 25 bp, Homo sapien
tttctgtaccactgtgtgtctgttc

SEQ ID NO: 2438308 - DNA, 25 bp, Homo sapien
gataggtggtgttcctctcctgagc

SEQ ID NO: 2438309 - DNA, 25 bp, Homo sapien
catagagggagttgctgtagaaaca

SEQ ID NO: 2438310 - DNA, 25 bp, Homo sapien
cccaatctggcacagtggaagctgt

SEQ ID NO: 2438311 - DNA, 25 bp, Homo sapien
ctgttgagaggctcgaagctcggca

SEQ ID NO: 2438312 - DNA, 25 bp, Homo sapien
ctctccacgtcagtacccattcata

SEQ ID NO: 2438313 - DNA, 25 bp, Homo sapien
atctattctctccacgtcagtaccc

SEQ ID NO: 2438314 - DNA, 25 bp, Homo sapien
tattctctccacgtcagtacccatt

SEQ ID NO: 2438315 - DNA, 25 bp, Homo sapien
tctccacgtcagtacccattcatat

SEQ ID NO: 2438316 - DNA, 25 bp, Homo sapien
tctttacttgttaactcacaaggaa

SEQ ID NO: 2438317 - DNA, 25 bp, Homo sapien
cacttcctgcaaactgtggctatgg

SEQ ID NO: 2438318 - DNA, 25 bp, Homo sapien
gacgactgtctcaaagtaacctgca

SEQ ID NO: 2438319 - DNA, 25 bp, Homo sapien
ggctatggtagtcctgaacaagaag

SEQ ID NO: 2438320 - DNA, 25 bp, Homo sapien
tcgcgctctctcctgctgagaactg

SEQ ID NO: 2438321 - DNA, 25 bp, Homo sapien
accagcatagttgccaccgtcactt

SEQ ID NO: 2438322 - DNA, 25 bp, Homo sapien
gcttcctccgcaacccataaaattg

SEQ ID NO: 2438323 - DNA, 25 bp, Homo sapien
ccaccagcatagttgccaccgtcac

SEQ ID NO: 2438324 - DNA, 25 bp, Homo sapien
gcatagttgccaccgtcacttccaa

SEQ ID NO: 2438325 - DNA, 25 bp, Homo sapien
gacctgtccgtgatccagcggactg

SEQ ID NO: 2438326 - DNA, 25 bp, Homo sapien
tatattcctttgtatcttctgtaat

SEQ ID NO: 2438327 - DNA, 25 bp, Homo sapien
tccacgacctgtccgtgatccagcg

SEQ ID NO: 2438328 - DNA, 25 bp, Homo sapien
gtccgtgatccagcggactgcatct

SEQ ID NO: 2438329 - DNA, 25 bp, Homo sapien
ctcttcctgccggtggcaatgtcga

SEQ ID NO: 2438330 - DNA, 25 bp, Homo sapien
cctttgggtcatggccctcttcctg

SEQ ID NO: 2438331 - DNA, 25 bp, Homo sapien
tggcaatgtcgacggctggagtcgg

SEQ ID NO: 2438332 - DNA, 25 bp, Homo sapien
cctgccggtggcaatgtcgacggct

SEQ ID NO: 2438333 - DNA, 25 bp, Homo sapien
ccagcttgggtgtgagggccatcat

SEQ ID NO: 2438334 - DNA, 25 bp, Homo sapien
tagcattacttctatagatattgaa

SEQ ID NO: 2438335 - DNA, 25 bp, Homo sapien
ttgctcccaacgtgtctcccttctt

SEQ ID NO: 2438336 - DNA, 25 bp, Homo sapien
gggcggctttgtcacagtgagctac

SEQ ID NO: 2438337 - DNA, 25 bp, Homo sapien
aaatgtattagagttttgtagaggg

SEQ ID NO: 2438338 - DNA, 25 bp, Homo sapien
aagtaagaaatgtattagagttttg

SEQ ID NO: 2438339 - DNA, 25 bp, Homo sapien
aagtatagaaatcatctttttaaag

SEQ ID NO: 2438340 - DNA, 25 bp, Homo sapien
ctgcaagctgaagggagccagtagt

SEQ ID NO: 2438341 - DNA, 25 bp, Homo sapien
gaggacttgctcaggccgattccaa

SEQ ID NO: 2438342 - DNA, 25 bp, Homo sapien
cacatgggcttcacgtggtttggag

SEQ ID NO: 2438343 - DNA, 25 bp, Homo sapien
tgatggcatgccgtgatcagaagtc

SEQ ID NO: 2438344 - DNA, 25 bp, Homo sapien
tactaatctagtcccttgcactggg

SEQ ID NO: 2438345 - DNA, 25 bp, Homo sapien
ttggagaaaatggtaagagttccat

SEQ ID NO: 2438346 - DNA, 25 bp, Homo sapien
ggagactttgatcccaaatggcttg

SEQ ID NO: 2438347 - DNA, 25 bp, Homo sapien
tgtcactgtaaaaccaaatcctagg

SEQ ID NO: 2438348 - DNA, 25 bp, Homo sapien
taacagacatctctaacatacagcc

SEQ ID NO: 2438349 - DNA, 25 bp, Homo sapien
tccaacaagcagatggatccgttgc

SEQ ID NO: 2438350 - DNA, 25 bp, Homo sapien
gggtcatcgcatactcacacactgc

SEQ ID NO: 2438351 - DNA, 25 bp, Homo sapien
ttctccaggcatgggtcgataccgc

SEQ ID NO: 2438352 - DNA, 25 bp, Homo sapien
cagggcttcccttgcccacagaggt

SEQ ID NO: 2438353 - DNA, 25 bp, Homo sapien
ttagaataatagtcactggtgagac

SEQ ID NO: 2438354 - DNA, 25 bp, Homo sapien
aagccaatcaaagagcagcgcagcc

SEQ ID NO: 2438355 - DNA, 25 bp, Homo sapien
aagatcccgccaagtacaccatgtg

SEQ ID NO: 2438356 - DNA, 25 bp, Homo sapien
tcagccagcctcataggaaagaagc

SEQ ID NO: 2438357 - DNA, 25 bp, Homo sapien
ttacacccgcagttaacaggcatcg

SEQ ID NO: 2438358 - DNA, 25 bp, Homo sapien
agccctcagagatgacgtcagccaa

SEQ ID NO: 2438359 - DNA, 25 bp, Homo sapien
gggctctcgcaaagttctggctaag

SEQ ID NO: 2438360 - DNA, 25 bp, Homo sapien
gaattgggaccttagcacatttggg

SEQ ID NO: 2438361 - DNA, 25 bp, Homo sapien
ccaatgctgccctaatgagacgtga

SEQ ID NO: 2438362 - DNA, 25 bp, Homo sapien
ttttctcagatgttgcccacagttt

SEQ ID NO: 2438363 - DNA, 25 bp, Homo sapien
gcaaaaagcttcgttcattttcagg

SEQ ID NO: 2438364 - DNA, 25 bp, Homo sapien
aggtgagatcgccatgggtcatgac

SEQ ID NO: 2438365 - DNA, 25 bp, Homo sapien
gatgttgcccacagtttagcaaaaa

SEQ ID NO: 2438366 - DNA, 25 bp, Homo sapien
gaatttgcaataaagggttacgtca

SEQ ID NO: 2438367 - DNA, 25 bp, Homo sapien
cctcttggactggcctgtcattctg

SEQ ID NO: 2438368 - DNA, 25 bp, Homo sapien
caataaagggttacgtcaatcttgt

SEQ ID NO: 2438369 - DNA, 25 bp, Homo sapien
ttgcaataaagggttacgtcaatct

SEQ ID NO: 2438370 - DNA, 25 bp, Homo sapien
aaccgtccaaagcaccactgcccca

SEQ ID NO: 2438371 - DNA, 25 bp, Homo sapien
tataaaccgtccaaagcaccactgc

SEQ ID NO: 2438372 - DNA, 25 bp, Homo sapien
taaaccgtccaaagcaccactgccc

SEQ ID NO: 2438373 - DNA, 25 bp, Homo sapien
ttataaaccgtccaaagcaccactg

SEQ ID NO: 2438374 - DNA, 25 bp, Homo sapien
tggcgagcgggccggggctgccggg

SEQ ID NO: 2438375 - DNA, 25 bp, Homo sapien
gcgagcgggccggggctgccgggcg

SEQ ID NO: 2438376 - DNA, 25 bp, Homo sapien
gagcgggccggggctgccgggcgac

SEQ ID NO: 2438377 - DNA, 25 bp, Homo sapien
tgtggcgagcgggccggggctgccg

SEQ ID NO: 2438378 - DNA, 25 bp, Homo sapien
atagcgtgagcaggacgaccagcgc

SEQ ID NO: 2438379 - DNA, 25 bp, Homo sapien
agcgcccccacgaagccggtgagga

SEQ ID NO: 2438380 - DNA, 25 bp, Homo sapien
acccatggggctccgctcgtacagg

SEQ ID NO: 2438381 - DNA, 25 bp, Homo sapien
cgtcgccgccagtgatccatagcgt

SEQ ID NO: 2438382 - DNA, 25 bp, Homo sapien
cagcgcctcccggcagccgtcggac

SEQ ID NO: 2438383 - DNA, 25 bp, Homo sapien
ggccgctgcgccgcagggcccgagc

SEQ ID NO: 2438384 - DNA, 25 bp, Homo sapien
tcccaggacagggacgcggcctggg

SEQ ID NO: 2438385 - DNA, 25 bp, Homo sapien
gcgcctcccggcagccgtcggacac

SEQ ID NO: 2438386 - DNA, 25 bp, Homo sapien
tccaggcccggctaccctgcccgcc

SEQ ID NO: 2438387 - DNA, 25 bp, Homo sapien
ctccaggcccggctaccctgcccgc

SEQ ID NO: 2438388 - DNA, 25 bp, Homo sapien
ctctccaggcccggctaccctgccc

SEQ ID NO: 2438389 - DNA, 25 bp, Homo sapien
caggcccggctaccctgcccgccgg

SEQ ID NO: 2438390 - DNA, 25 bp, Homo sapien
tgcgtgagggcccatagcgtccacg

SEQ ID NO: 2438391 - DNA, 25 bp, Homo sapien
aggagcgaccggaaatggccgcact

SEQ ID NO: 2438392 - DNA, 25 bp, Homo sapien
caaacccagagcgtgaggaccaagg

SEQ ID NO: 2438393 - DNA, 25 bp, Homo sapien
cagaaagccgggacaactcggcctc

SEQ ID NO: 2438394 - DNA, 25 bp, Homo sapien
tgcagagcatcgtcagacaggagat

SEQ ID NO: 2438395 - DNA, 25 bp, Homo sapien
ggtagacagaccacaactgcagagc

SEQ ID NO: 2438396 - DNA, 25 bp, Homo sapien
ggccagactgtctacccagatggaa

SEQ ID NO: 2438397 - DNA, 25 bp, Homo sapien
tgggcaagggcatcctaactctgga

SEQ ID NO: 2438398 - DNA, 25 bp, Homo sapien
acaaaagcgttgtggcaagagagca

SEQ ID NO: 2438399 - DNA, 25 bp, Homo sapien
gggtgtcagcgacaaagcaaaaggg

SEQ ID NO: 2438400 - DNA, 25 bp, Homo sapien
ggagggtgccattcagatagcgagg

SEQ ID NO: 2438401 - DNA, 25 bp, Homo sapien
tcagatagcgaggagacaaaagcgt

SEQ ID NO: 2438402 - DNA, 25 bp, Homo sapien
tttgtcccactccacgaacgagtcc

SEQ ID NO: 2438403 - DNA, 25 bp, Homo sapien
tcagtgtccggagccgtacattttg

SEQ ID NO: 2438404 - DNA, 25 bp, Homo sapien
tccggagccgtacattttgtcccac

SEQ ID NO: 2438405 - DNA, 25 bp, Homo sapien
acgagtccagttccttggcagaggc

SEQ ID NO: 2438406 - DNA, 25 bp, Homo sapien
ccagctcgcccccagagaagccctg

SEQ ID NO: 2438407 - DNA, 25 bp, Homo sapien
gcagcgccacgtagaagcggagaga

SEQ ID NO: 2438408 - DNA, 25 bp, Homo sapien
gcagcgcctctagctcgctgatgag

SEQ ID NO: 2438409 - DNA, 25 bp, Homo sapien
cagttcccgctcactgagcgcgcag

SEQ ID NO: 2438410 - DNA, 25 bp, Homo sapien
tgaggagtacggagggtgggcggca

SEQ ID NO: 2438411 - DNA, 25 bp, Homo sapien
gccgcgcaggcgcaacagcgtggcg

SEQ ID NO: 2438412 - DNA, 25 bp, Homo sapien
cccgcggcccaaagagcaggacggt

SEQ ID NO: 2438413 - DNA, 25 bp, Homo sapien
gcccagctgcgtggcgaggcagcgg

SEQ ID NO: 2438414 - DNA, 25 bp, Homo sapien
agcgtggcgcccagctgcgtggcga

SEQ ID NO: 2438415 - DNA, 25 bp, Homo sapien
caaagggctccagttgcgggccgta

SEQ ID NO: 2438416 - DNA, 25 bp, Homo sapien
agtccaccatcttgctcgtcaccag

SEQ ID NO: 2438417 - DNA, 25 bp, Homo sapien
gtacgcgtacttgcggtagcggccc

SEQ ID NO: 2438418 - DNA, 25 bp, Homo sapien
cgacattcgccgttgtccgcggcgg

SEQ ID NO: 2438419 - DNA, 25 bp, Homo sapien
gctgagatgtcgtcgtgtgcccaag

SEQ ID NO: 2438420 - DNA, 25 bp, Homo sapien
gccggacgctcgtagggagaatcca

SEQ ID NO: 2438421 - DNA, 25 bp, Homo sapien
ggtgtccagtgcatcttcaacagag

SEQ ID NO: 2438422 - DNA, 25 bp, Homo sapien
gagtacttctctgcatagcgcttta

SEQ ID NO: 2438423 - DNA, 25 bp, Homo sapien
tttacctttatctacatctgtatcc

SEQ ID NO: 2438424 - DNA, 25 bp, Homo sapien
ttttacctttatctacatctgtatc

SEQ ID NO: 2438425 - DNA, 25 bp, Homo sapien
tttttacctttatctacatctgtat

SEQ ID NO: 2438426 - DNA, 25 bp, Homo sapien
atccgccccagttctcggccccatc

SEQ ID NO: 2438427 - DNA, 25 bp, Homo sapien
ttctcggccccatcaattatccctc

SEQ ID NO: 2438428 - DNA, 25 bp, Homo sapien
tctcggccccatcaattatccctcc

SEQ ID NO: 2438429 - DNA, 25 bp, Homo sapien
agggtccatccgccccagttctcgg

SEQ ID NO: 2438430 - DNA, 25 bp, Homo sapien
aaagaactcagctgccaaaggacca

SEQ ID NO: 2438431 - DNA, 25 bp, Homo sapien
agttccatagcgctacattttcctt

SEQ ID NO: 2438432 - DNA, 25 bp, Homo sapien
aagcagggcaccaggtcagcaactt

SEQ ID NO: 2438433 - DNA, 25 bp, Homo sapien
ggtcagcaacttctgctaaacttag

SEQ ID NO: 2438434 - DNA, 25 bp, Homo sapien
atgtgtacagatgtgcgcagctgca

SEQ ID NO: 2438435 - DNA, 25 bp, Homo sapien
tcacgtgagtctgaatacacaccaa

SEQ ID NO: 2438436 - DNA, 25 bp, Homo sapien
catgtatgtgcacaccaccagggat

SEQ ID NO: 2438437 - DNA, 25 bp, Homo sapien
tgcacacaggcccagaacgatgtct

SEQ ID NO: 2438438 - DNA, 25 bp, Homo sapien
cttgactctacccacaggacgaagt

SEQ ID NO: 2438439 - DNA, 25 bp, Homo sapien
caaggtattgttcctgcggcagctc

SEQ ID NO: 2438440 - DNA, 25 bp, Homo sapien
tgtgcacataggaagctggaacccc

SEQ ID NO: 2438441 - DNA, 25 bp, Homo sapien
tgtgaagggccatcagataaccaga

SEQ ID NO: 2438442 - DNA, 25 bp, Homo sapien
gcaaatatgctgttgtagttcccgt

SEQ ID NO: 2438443 - DNA, 25 bp, Homo sapien
tgctgttgtagttcccgttttagga

SEQ ID NO: 2438444 - DNA, 25 bp, Homo sapien
tgggtcactctcatcagctcgcaaa

SEQ ID NO: 2438445 - DNA, 25 bp, Homo sapien
tcatcagctcgcaaatatgctgttg

SEQ ID NO: 2438446 - DNA, 25 bp, Homo sapien
ctgtgcactcagtgatgggcactgc

SEQ ID NO: 2438447 - DNA, 25 bp, Homo sapien
atgggcactgcggggagggcgcagg

SEQ ID NO: 2438448 - DNA, 25 bp, Homo sapien
tgtgcactcagtgatgggcactgcg

SEQ ID NO: 2438449 - DNA, 25 bp, Homo sapien
ggcactgcggggagggcgcaggtgc

SEQ ID NO: 2438450 - DNA, 25 bp, Homo sapien
ggccgccatggactgtcctctgtcc

SEQ ID NO: 2438451 - DNA, 25 bp, Homo sapien
aggccgccatggactgtcctctgtc

SEQ ID NO: 2438452 - DNA, 25 bp, Homo sapien
gaggccgccatggactgtcctctgt

SEQ ID NO: 2438453 - DNA, 25 bp, Homo sapien
cacaaagcttggtctctagggtagg

SEQ ID NO: 2438454 - DNA, 25 bp, Homo sapien
gaaggtcgttctctggagtccctgg

SEQ ID NO: 2438455 - DNA, 25 bp, Homo sapien
agcgggtccccaaggtaggcttcag

SEQ ID NO: 2438456 - DNA, 25 bp, Homo sapien
tcctcactcctatgctagaaggtcg

SEQ ID NO: 2438457 - DNA, 25 bp, Homo sapien
taaccgccaagtccaggagaggcaa

SEQ ID NO: 2438458 - DNA, 25 bp, Homo sapien
tcattaaatcgggtaaaggagtcga

SEQ ID NO: 2438459 - DNA, 25 bp, Homo sapien
taaaggagtcgataaccgccaagtc

SEQ ID NO: 2438460 - DNA, 25 bp, Homo sapien
gtcgataaccgccaagtccaggaga

SEQ ID NO: 2438461 - DNA, 25 bp, Homo sapien
agcccactccagagactgggcggct

SEQ ID NO: 2438462 - DNA, 25 bp, Homo sapien
actccagagactgggcggctccaca

SEQ ID NO: 2438463 - DNA, 25 bp, Homo sapien
gcccactccagagactgggcggctc

SEQ ID NO: 2438464 - DNA, 25 bp, Homo sapien
ccactccagagactgggcggctcca

SEQ ID NO: 2438465 - DNA, 25 bp, Homo sapien
ccgtaagcccagagttgggctggaa

SEQ ID NO: 2438466 - DNA, 25 bp, Homo sapien
cgccgtaagcccagagttgggctgg

SEQ ID NO: 2438467 - DNA, 25 bp, Homo sapien
cgtaagcccagagttgggctggaac

SEQ ID NO: 2438468 - DNA, 25 bp, Homo sapien
ctgcgccgtaagcccagagttgggc

SEQ ID NO: 2438469 - DNA, 25 bp, Homo sapien
cgccgccacagcccgtgcggacaac

SEQ ID NO: 2438470 - DNA, 25 bp, Homo sapien
gccacagcccgtgcggacaacacaa

SEQ ID NO: 2438471 - DNA, 25 bp, Homo sapien
acagcccgtgcggacaacacaaaca

SEQ ID NO: 2438472 - DNA, 25 bp, Homo sapien
cagcccgtgcggacaacacaaacat

SEQ ID NO: 2438473 - DNA, 25 bp, Homo sapien
ctgcgaaggaccctctgcagcggcg

SEQ ID NO: 2438474 - DNA, 25 bp, Homo sapien
aatctgcgaaggaccctctgcagcg

SEQ ID NO: 2438475 - DNA, 25 bp, Homo sapien
tcagcaatctgcgaaggaccctctg

SEQ ID NO: 2438476 - DNA, 25 bp, Homo sapien
agggtgctcagcaatctgcgaagga

SEQ ID NO: 2438477 - DNA, 25 bp, Homo sapien
ctgtgtagaacaggagagggctctt

SEQ ID NO: 2438478 - DNA, 25 bp, Homo sapien
ggaagtttgaggggccctctctgga

SEQ ID NO: 2438479 - DNA, 25 bp, Homo sapien
ggctcttgcggtggggaagtttgag

SEQ ID NO: 2438480 - DNA, 25 bp, Homo sapien
gagagctgggcgctccgggggtccc

SEQ ID NO: 2438481 - DNA, 25 bp, Homo sapien
catcctggagccgctgctgctgcgg

SEQ ID NO: 2438482 - DNA, 25 bp, Homo sapien
cctggagccgctgctgctgcggctg

SEQ ID NO: 2438483 - DNA, 25 bp, Homo sapien
atcctggagccgctgctgctgcggc

SEQ ID NO: 2438484 - DNA, 25 bp, Homo sapien
tcctggagccgctgctgctgcggct

SEQ ID NO: 2438485 - DNA, 25 bp, Homo sapien
caaggccgcggctctgcgctgatgc

SEQ ID NO: 2438486 - DNA, 25 bp, Homo sapien
ctgcgctgatgccactccgggagcg

SEQ ID NO: 2438487 - DNA, 25 bp, Homo sapien
aggccgcggctctgcgctgatgcca

SEQ ID NO: 2438488 - DNA, 25 bp, Homo sapien
ggctctgcgctgatgccactccggg

SEQ ID NO: 2438489 - DNA, 25 bp, Homo sapien
actggacgggggcagcggagtgtag

SEQ ID NO: 2438490 - DNA, 25 bp, Homo sapien
gtgtgagatctaaacagagggctcc

SEQ ID NO: 2438491 - DNA, 25 bp, Homo sapien
ggagggcgagcactggacgggggca

SEQ ID NO: 2438492 - DNA, 25 bp, Homo sapien
ggtgtgagatctaaacagagggctc

SEQ ID NO: 2438493 - DNA, 25 bp, Homo sapien
ttcatcagggataaaggccaggaac

SEQ ID NO: 2438494 - DNA, 25 bp, Homo sapien
gataaaggccaggaaccggctttgc

SEQ ID NO: 2438495 - DNA, 25 bp, Homo sapien
actcaaggcttcatcagggataaag

SEQ ID NO: 2438496 - DNA, 25 bp, Homo sapien
ccaggaaccggctttgccccaggag

SEQ ID NO: 2438497 - DNA, 25 bp, Homo sapien
gattttggcccctggacatttgccc

SEQ ID NO: 2438498 - DNA, 25 bp, Homo sapien
agctgcgacgggcacctgatatccc

SEQ ID NO: 2438499 - DNA, 25 bp, Homo sapien
ctgatatccctgacgaagcatcctt

SEQ ID NO: 2438500 - DNA, 25 bp, Homo sapien
ccaacaactggccacacttctggga

SEQ ID NO: 2438501 - DNA, 25 bp, Homo sapien
ttccatcttcccttgcatcagtcat

SEQ ID NO: 2438502 - DNA, 25 bp, Homo sapien
tttccatcttcccttgcatcagtca

SEQ ID NO: 2438503 - DNA, 25 bp, Homo sapien
gtttccatcttcccttgcatcagtc

SEQ ID NO: 2438504 - DNA, 25 bp, Homo sapien
gctggtgggtgctctcggttcaccc

SEQ ID NO: 2438505 - DNA, 25 bp, Homo sapien
ggctcgcgggccacctggagctccc

SEQ ID NO: 2438506 - DNA, 25 bp, Homo sapien
ctggtgggtgctctcggttcacccc

SEQ ID NO: 2438507 - DNA, 25 bp, Homo sapien
cccaggggggctcgcgggccacctg

SEQ ID NO: 2438508 - DNA, 25 bp, Homo sapien
ctgcgcgtgaaagggggacgttcgg

SEQ ID NO: 2438509 - DNA, 25 bp, Homo sapien
tgcgcgtgaaagggggacgttcgga

SEQ ID NO: 2438510 - DNA, 25 bp, Homo sapien
cgaagattttcaggtcgagccagtg

SEQ ID NO: 2438511 - DNA, 25 bp, Homo sapien
gtcctcaaagttccgaagattttca

SEQ ID NO: 2438512 - DNA, 25 bp, Homo sapien
gcaaccagctccgggcctttaggtc

SEQ ID NO: 2438513 - DNA, 25 bp, Homo sapien
ttttcaggtcgagccagtggcccag

SEQ ID NO: 2438514 - DNA, 25 bp, Homo sapien
tacccacctagatgctttgcacaca

SEQ ID NO: 2438515 - DNA, 25 bp, Homo sapien
ggtacccacctagatgctttgcaca

SEQ ID NO: 2438516 - DNA, 25 bp, Homo sapien
ctggtacccacctagatgctttgca

SEQ ID NO: 2438517 - DNA, 25 bp, Homo sapien
cccacctagatgctttgcacacatg

SEQ ID NO: 2438518 - DNA, 25 bp, Homo sapien
cacagctctggatcctcagcaagat

SEQ ID NO: 2438519 - DNA, 25 bp, Homo sapien
cagctctggatcctcagcaagatgg

SEQ ID NO: 2438520 - DNA, 25 bp, Homo sapien
tggggggtggagctgcggggggcat

SEQ ID NO: 2438521 - DNA, 25 bp, Homo sapien
ctcacagctctggatcctcagcaag

SEQ ID NO: 2438522 - DNA, 25 bp, Homo sapien
aatggacgagactggactggaaatc

SEQ ID NO: 2438523 - DNA, 25 bp, Homo sapien
tactcacatagaagggatcacacgt

SEQ ID NO: 2438524 - DNA, 25 bp, Homo sapien
gaatgcctacttccacagctgttga

SEQ ID NO: 2438525 - DNA, 25 bp, Homo sapien
cagtgctgtgaaacccatggctggg

SEQ ID NO: 2438526 - DNA, 25 bp, Homo sapien
gatggcaaagtcctcacgcctagaa

SEQ ID NO: 2438527 - DNA, 25 bp, Homo sapien
ctgccttgcaccagcctccaaggaa

SEQ ID NO: 2438528 - DNA, 25 bp, Homo sapien
agatcaacagcccaagagatggcaa

SEQ ID NO: 2438529 - DNA, 25 bp, Homo sapien
acattaagatcaacagcccaagaga

SEQ ID NO: 2438530 - DNA, 25 bp, Homo sapien
acagaatctggttgctcagggtcaa

SEQ ID NO: 2438531 - DNA, 25 bp, Homo sapien
agaaacagaatctggttgctcaggg

SEQ ID NO: 2438532 - DNA, 25 bp, Homo sapien
tcaccagaaacagaatctggttgct

SEQ ID NO: 2438533 - DNA, 25 bp, Homo sapien
aaacagaatctggttgctcagggtc

SEQ ID NO: 2438534 - DNA, 25 bp, Homo sapien
ctctgagggctcagatgcagaaaca

SEQ ID NO: 2438535 - DNA, 25 bp, Homo sapien
tctgagggctcagatgcagaaacag

SEQ ID NO: 2438536 - DNA, 25 bp, Homo sapien
gcctctgagggctcagatgcagaaa

SEQ ID NO: 2438537 - DNA, 25 bp, Homo sapien
cctctgagggctcagatgcagaaac

SEQ ID NO: 2438538 - DNA, 25 bp, Homo sapien
gaggtgactgtcactaagttatctg

SEQ ID NO: 2438539 - DNA, 25 bp, Homo sapien
gttatctgggaccttggccagttgc

SEQ ID NO: 2438540 - DNA, 25 bp, Homo sapien
gactgtcactaagttatctgggacc

SEQ ID NO: 2438541 - DNA, 25 bp, Homo sapien
actaagttatctgggaccttggcca

SEQ ID NO: 2438542 - DNA, 25 bp, Homo sapien
ggatgataacatgttaccccgtgat

SEQ ID NO: 2438543 - DNA, 25 bp, Homo sapien
tgataacatgttaccccgtgattaa

SEQ ID NO: 2438544 - DNA, 25 bp, Homo sapien
gatgataacatgttaccccgtgatt

SEQ ID NO: 2438545 - DNA, 25 bp, Homo sapien
gataacatgttaccccgtgattaac

SEQ ID NO: 2438546 - DNA, 25 bp, Homo sapien
cttagagtagagtagggaaagttct

SEQ ID NO: 2438547 - DNA, 25 bp, Homo sapien
ctaaacttcagagccgggagcctag

SEQ ID NO: 2438548 - DNA, 25 bp, Homo sapien
aggactcttcctattgttgttccag

SEQ ID NO: 2438549 - DNA, 25 bp, Homo sapien
tttctgagagaatcccgctctgtca

SEQ ID NO: 2438550 - DNA, 25 bp, Homo sapien
ggagaactagcaggaagcatccttg

SEQ ID NO: 2438551 - DNA, 25 bp, Homo sapien
tatggcggagtcggccggagcctcc

SEQ ID NO: 2438552 - DNA, 25 bp, Homo sapien
ttcccccttgttgtcctcctgctcg

SEQ ID NO: 2438553 - DNA, 25 bp, Homo sapien
cccccttgttgtcctcctgctcgcc

SEQ ID NO: 2438554 - DNA, 25 bp, Homo sapien
atggcggagtcggccggagcctcct

SEQ ID NO: 2438555 - DNA, 25 bp, Homo sapien
tggaggtccgtggtttctgcccttc

SEQ ID NO: 2438556 - DNA, 25 bp, Homo sapien
tccccacgagcacaatatggccggg

SEQ ID NO: 2438557 - DNA, 25 bp, Homo sapien
cctctccgagggaacctgatgttga

SEQ ID NO: 2438558 - DNA, 25 bp, Homo sapien
ccagcgccctcgtgttccagagagg

SEQ ID NO: 2438559 - DNA, 25 bp, Homo sapien
gagttgaattgggttgcagtctgtt

SEQ ID NO: 2438560 - DNA, 25 bp, Homo sapien
agttgaattgggttgcagtctgttc

SEQ ID NO: 2438561 - DNA, 25 bp, Homo sapien
gtaaacgatgagacgtgctgcttct

SEQ ID NO: 2438562 - DNA, 25 bp, Homo sapien
tcagtaaacgatgagacgtgctgct

SEQ ID NO: 2438563 - DNA, 25 bp, Homo sapien
caggcactgcctcatggccaggttc

SEQ ID NO: 2438564 - DNA, 25 bp, Homo sapien
aggcactgcctcatggccaggttca

SEQ ID NO: 2438565 - DNA, 25 bp, Homo sapien
ggcactgcctcatggccaggttcag

SEQ ID NO: 2438566 - DNA, 25 bp, Homo sapien
catgcaggtttaacttgagctttgg

SEQ ID NO: 2438567 - DNA, 25 bp, Homo sapien
ttcactctcatgcaggtttaacttg

SEQ ID NO: 2438568 - DNA, 25 bp, Homo sapien
cagtttttcactctcatgcaggttt

SEQ ID NO: 2438569 - DNA, 25 bp, Homo sapien
gttctcagtttttcactctcatgca

SEQ ID NO: 2438570 - DNA, 25 bp, Homo sapien
gccacggtgacacctacctgtaatc

SEQ ID NO: 2438571 - DNA, 25 bp, Homo sapien
tgaaaatcactaggatgggctgggc

SEQ ID NO: 2438572 - DNA, 25 bp, Homo sapien
caaaaatgagctggccacggtgaca

SEQ ID NO: 2438573 - DNA, 25 bp, Homo sapien
ccattgtagttcctgcagggggtcc

SEQ ID NO: 2438574 - DNA, 25 bp, Homo sapien
taaccctgatccatagtgctacctg

SEQ ID NO: 2438575 - DNA, 25 bp, Homo sapien
tcctggagcactgtaaaaagagctg

SEQ ID NO: 2438576 - DNA, 25 bp, Homo sapien
taagtagatgcctgttttgagacca

SEQ ID NO: 2438577 - DNA, 25 bp, Homo sapien
gaacgcacatagctcaatcacactg

SEQ ID NO: 2438578 - DNA, 25 bp, Homo sapien
gatgttctaaggtcagggtctcgtg

SEQ ID NO: 2438579 - DNA, 25 bp, Homo sapien
ctttgtgttcctagagggcgggtct

SEQ ID NO: 2438580 - DNA, 25 bp, Homo sapien
tggcatgcaagggacagaagacaca

SEQ ID NO: 2438581 - DNA, 25 bp, Homo sapien
ggtctcgtgctcacaccagctgtag

SEQ ID NO: 2438582 - DNA, 25 bp, Homo sapien
tagcatatgacgaaacaactggaca

SEQ ID NO: 2438583 - DNA, 25 bp, Homo sapien
ccaggaacggtgttactagtcaggg

SEQ ID NO: 2438584 - DNA, 25 bp, Homo sapien
caactggacaactatggcctgaaag

SEQ ID NO: 2438585 - DNA, 25 bp, Homo sapien
gaagaattgatgtcgcagtcctggg

SEQ ID NO: 2438586 - DNA, 25 bp, Homo sapien
tcagtactcccatagggatagaata

SEQ ID NO: 2438587 - DNA, 25 bp, Homo sapien
catttttctcaacagcgtgcttact

SEQ ID NO: 2438588 - DNA, 25 bp, Homo sapien
cctgtgacagctacctcagactgta

SEQ ID NO: 2438589 - DNA, 25 bp, Homo sapien
cctcttgagttggtctccacatttt

SEQ ID NO: 2438590 - DNA, 25 bp, Homo sapien
actaatctatcagtaatttgtcctc

SEQ ID NO: 2438591 - DNA, 25 bp, Homo sapien
gactgtgccagatcaaccatactgc

SEQ ID NO: 2438592 - DNA, 25 bp, Homo sapien
ccatggaaatggtcgcgcagtagga

SEQ ID NO: 2438593 - DNA, 25 bp, Homo sapien
gtccaccgcccacaagaggtgatgt

SEQ ID NO: 2438594 - DNA, 25 bp, Homo sapien
gattctctctctaggtccccgaaca

SEQ ID NO: 2438595 - DNA, 25 bp, Homo sapien
actcccagtaaactattcatctctg

SEQ ID NO: 2438596 - DNA, 25 bp, Homo sapien
tattcatctctgccagttccgggcc

SEQ ID NO: 2438597 - DNA, 25 bp, Homo sapien
tccgggccccactgatggacaaggc

SEQ ID NO: 2438598 - DNA, 25 bp, Homo sapien
agttccgggccccactgatggacaa

SEQ ID NO: 2438599 - DNA, 25 bp, Homo sapien
cttcatcatggtaccctagagctta

SEQ ID NO: 2438600 - DNA, 25 bp, Homo sapien
gaggggccagcactagcccctagtg

SEQ ID NO: 2438601 - DNA, 25 bp, Homo sapien
cccctagtgctctgacttcatcatg

SEQ ID NO: 2438602 - DNA, 25 bp, Homo sapien
ccctagagcttaagctgctcagtgg

SEQ ID NO: 2438603 - DNA, 25 bp, Homo sapien
cctgagagctcattctgagagaggc

SEQ ID NO: 2438604 - DNA, 25 bp, Homo sapien
ggccagccacgagtgtcaggagcca

SEQ ID NO: 2438605 - DNA, 25 bp, Homo sapien
tgactgttacatagccaggcgaggg

SEQ ID NO: 2438606 - DNA, 25 bp, Homo sapien
ggacgtatcctggtatgaagctgca

SEQ ID NO: 2438607 - DNA, 25 bp, Homo sapien
gaacagatgctagccaagagactca

SEQ ID NO: 2438608 - DNA, 25 bp, Homo sapien
aggttagtgcaccaacaaagcccgc

SEQ ID NO: 2438609 - DNA, 25 bp, Homo sapien
ggcaaagctttagaggcctcatata

SEQ ID NO: 2438610 - DNA, 25 bp, Homo sapien
catatatactgcctggcatgcgaag

SEQ ID NO: 2438611 - DNA, 25 bp, Homo sapien
taaacagtctctggagtcaagagac

SEQ ID NO: 2438612 - DNA, 25 bp, Homo sapien
gagggcataaccactccacagtatg

SEQ ID NO: 2438613 - DNA, 25 bp, Homo sapien
cttctgttaaatgagggcttggacc

SEQ ID NO: 2438614 - DNA, 25 bp, Homo sapien
ggttctagtccctgttatgattctg

SEQ ID NO: 2438615 - DNA, 25 bp, Homo sapien
tctggggttctctagggctttctgc

SEQ ID NO: 2438616 - DNA, 25 bp, Homo sapien
ctgcctccacgtcagctgaaggatg

SEQ ID NO: 2438617 - DNA, 25 bp, Homo sapien
ggaggtggactgccctacataaact

SEQ ID NO: 2438618 - DNA, 25 bp, Homo sapien
cacgtcagctgaaggatgactggct

SEQ ID NO: 2438619 - DNA, 25 bp, Homo sapien
ggtggactgccctacataaactggg

SEQ ID NO: 2438620 - DNA, 25 bp, Homo sapien
acttctccaggtttcaggcaaggag

SEQ ID NO: 2438621 - DNA, 25 bp, Homo sapien
ggttgtgcaagatgcccttttgctg

SEQ ID NO: 2438622 - DNA, 25 bp, Homo sapien
tacatcattgcctctccgctttgcg

SEQ ID NO: 2438623 - DNA, 25 bp, Homo sapien
taggtaaccctctgtgatagctggg

SEQ ID NO: 2438624 - DNA, 25 bp, Homo sapien
ctaatgcttcacaatagagtcccat

SEQ ID NO: 2438625 - DNA, 25 bp, Homo sapien
gctaatgcttcacaatagagtccca

SEQ ID NO: 2438626 - DNA, 25 bp, Homo sapien
ctgtgctaatgcttcacaatagagt

SEQ ID NO: 2438627 - DNA, 25 bp, Homo sapien
gtgctaatgcttcacaatagagtcc

SEQ ID NO: 2438628 - DNA, 25 bp, Homo sapien
agccccaggcaagttgaaggtccga

SEQ ID NO: 2438629 - DNA, 25 bp, Homo sapien
gggcagctgcgtcaagggaaaatcc

SEQ ID NO: 2438630 - DNA, 25 bp, Homo sapien
tgagtcaagtccacagtaagcgtct

SEQ ID NO: 2438631 - DNA, 25 bp, Homo sapien
gaatcgccagagctattcgtcccta

SEQ ID NO: 2438632 - DNA, 25 bp, Homo sapien
cagaactggaggctcgtctgcagta

SEQ ID NO: 2438633 - DNA, 25 bp, Homo sapien
gctcgtctgcagtacctgaaggtag

SEQ ID NO: 2438634 - DNA, 25 bp, Homo sapien
gggaacctagataacgtccagcctc

SEQ ID NO: 2438635 - DNA, 25 bp, Homo sapien
tatatgggacatcaattcggaaggc

SEQ ID NO: 2438636 - DNA, 25 bp, Homo sapien
acacacagttccatgacccagcggg

SEQ ID NO: 2438637 - DNA, 25 bp, Homo sapien
ggtgctcgcctacagtctgcatctg

SEQ ID NO: 2438638 - DNA, 25 bp, Homo sapien
gaaatggcccgtggtgggctgaccc

SEQ ID NO: 2438639 - DNA, 25 bp, Homo sapien
ggagagggtccttcctagcctcggc

SEQ ID NO: 2438640 - DNA, 25 bp, Homo sapien
tcttgcaccttcagacgcggactgg

SEQ ID NO: 2438641 - DNA, 25 bp, Homo sapien
gaactactccagcttgcggagggca

SEQ ID NO: 2438642 - DNA, 25 bp, Homo sapien
tctggagaacgctggctaacaccat

SEQ ID NO: 2438643 - DNA, 25 bp, Homo sapien
gccctcaccgctatgggcaggcata

SEQ ID NO: 2438644 - DNA, 25 bp, Homo sapien
taagtcacacagtggtatgggagca

SEQ ID NO: 2438645 - DNA, 25 bp, Homo sapien
gaagtgccctcttcaggagaaagtc

SEQ ID NO: 2438646 - DNA, 25 bp, Homo sapien
aatccatcacctgggctttgccggg

SEQ ID NO: 2438647 - DNA, 25 bp, Homo sapien
ctgtaagctgccttctcgtgtggaa

SEQ ID NO: 2438648 - DNA, 25 bp, Homo sapien
aggcatgggcgcccctgcggtgcag

SEQ ID NO: 2438649 - DNA, 25 bp, Homo sapien
atgggcgcccctgcggtgcagagca

SEQ ID NO: 2438650 - DNA, 25 bp, Homo sapien
gcatgggcgcccctgcggtgcagag

SEQ ID NO: 2438651 - DNA, 25 bp, Homo sapien
ggcgcccctgcggtgcagagcagct

SEQ ID NO: 2438652 - DNA, 25 bp, Homo sapien
ggtgcgtagtcgagaggagagagca

SEQ ID NO: 2438653 - DNA, 25 bp, Homo sapien
tcactctggtgcgtagtcgagagga

SEQ ID NO: 2438654 - DNA, 25 bp, Homo sapien
ctctggtgcgtagtcgagaggagag

SEQ ID NO: 2438655 - DNA, 25 bp, Homo sapien
tctggtgcgtagtcgagaggagaga

SEQ ID NO: 2438656 - DNA, 25 bp, Homo sapien
gtggaggacgggaatgggattttca

SEQ ID NO: 2438657 - DNA, 25 bp, Homo sapien
tgactgagggtgcttccggagaagg

SEQ ID NO: 2438658 - DNA, 25 bp, Homo sapien
agaggtggaggacgggaatgggatt

SEQ ID NO: 2438659 - DNA, 25 bp, Homo sapien
ccttgactgagggtgcttccggaga

SEQ ID NO: 2438660 - DNA, 25 bp, Homo sapien
tcccatgccagatatactgccaagg

SEQ ID NO: 2438661 - DNA, 25 bp, Homo sapien
gaactcccatgccagatatactgcc

SEQ ID NO: 2438662 - DNA, 25 bp, Homo sapien
gggtggaactcccatgccagatata

SEQ ID NO: 2438663 - DNA, 25 bp, Homo sapien
tgccagatatactgccaaggccacc

SEQ ID NO: 2438664 - DNA, 25 bp, Homo sapien
gccggcatgcaagagggtaggtgta

SEQ ID NO: 2438665 - DNA, 25 bp, Homo sapien
tctgtttttaggagcggtgcatgaa

SEQ ID NO: 2438666 - DNA, 25 bp, Homo sapien
cccagtggcggaggctacgaaactt

SEQ ID NO: 2438667 - DNA, 25 bp, Homo sapien
ccgtgcgtcacggagcgcttaagag

SEQ ID NO: 2438668 - DNA, 25 bp, Homo sapien
gaaggctaggaccagagaggacttc

SEQ ID NO: 2438669 - DNA, 25 bp, Homo sapien
ctgttgtcttggttgtcaggctagg

SEQ ID NO: 2438670 - DNA, 25 bp, Homo sapien
tgcatgcctgtggactggtgccact

SEQ ID NO: 2438671 - DNA, 25 bp, Homo sapien
cctgagctacaagggtctctgttgt

SEQ ID NO: 2438672 - DNA, 25 bp, Homo sapien
cagcctacacctgcctggattgtga

SEQ ID NO: 2438673 - DNA, 25 bp, Homo sapien
ttgtccgaacagacagcctgaaggg

SEQ ID NO: 2438674 - DNA, 25 bp, Homo sapien
tcctatagggtaccttggatctcag

SEQ ID NO: 2438675 - DNA, 25 bp, Homo sapien
tctcagcagtggtgtgcacggcttg

SEQ ID NO: 2438676 - DNA, 25 bp, Homo sapien
cgcttttgtgaagtgccagcagagc

SEQ ID NO: 2438677 - DNA, 25 bp, Homo sapien
cacttggagtatgaggataatgagg

SEQ ID NO: 2438678 - DNA, 25 bp, Homo sapien
tactaatggccaacatgtgaatgcg

SEQ ID NO: 2438679 - DNA, 25 bp, Homo sapien
acttgtgacgatgcttactaatggc

SEQ ID NO: 2438680 - DNA, 25 bp, Homo sapien
cgtttttaacacatagcgccgtgct

SEQ ID NO: 2438681 - DNA, 25 bp, Homo sapien
cataaactgtcactctaggaagaag

SEQ ID NO: 2438682 - DNA, 25 bp, Homo sapien
gggtgaccccacgatttgtcttatc

SEQ ID NO: 2438683 - DNA, 25 bp, Homo sapien
gcgccgtgctgtaaataagcccagt

SEQ ID NO: 2438684 - DNA, 25 bp, Homo sapien
cccagatcagagagcaacgcatgac

SEQ ID NO: 2438685 - DNA, 25 bp, Homo sapien
gacataaccacgaaaggagcagccc

SEQ ID NO: 2438686 - DNA, 25 bp, Homo sapien
gaagtgagttgtacgggccgaaaca

SEQ ID NO: 2438687 - DNA, 25 bp, Homo sapien
gactatctgcgtgtgcttctgtgac

SEQ ID NO: 2438688 - DNA, 25 bp, Homo sapien
ggccgtgggatctggtgagcttccc

SEQ ID NO: 2438689 - DNA, 25 bp, Homo sapien
ccctccggggccgtgggatctggtg

SEQ ID NO: 2438690 - DNA, 25 bp, Homo sapien
cctccggggccgtgggatctggtga

SEQ ID NO: 2438691 - DNA, 25 bp, Homo sapien
ccggggccgtgggatctggtgagct

SEQ ID NO: 2438692 - DNA, 25 bp, Homo sapien
tggcatctgagaggctggtcgtgga

SEQ ID NO: 2438693 - DNA, 25 bp, Homo sapien
ctggagcctgccgggagagtggtgg

SEQ ID NO: 2438694 - DNA, 25 bp, Homo sapien
ccgggagagtggtggcatctgagag

SEQ ID NO: 2438695 - DNA, 25 bp, Homo sapien
agtggtggcatctgagaggctggtc

SEQ ID NO: 2438696 - DNA, 25 bp, Homo sapien
gcggaggtcgcaccagggcgtgagg

SEQ ID NO: 2438697 - DNA, 25 bp, Homo sapien
ctgcggaggtcgcaccagggcgtga

SEQ ID NO: 2438698 - DNA, 25 bp, Homo sapien
tgcggaggtcgcaccagggcgtgag

SEQ ID NO: 2438699 - DNA, 25 bp, Homo sapien
cgtgtttgacacaggcttgcgggac

SEQ ID NO: 2438700 - DNA, 25 bp, Homo sapien
tcccatgggaagtgtggacggtcaa

SEQ ID NO: 2438701 - DNA, 25 bp, Homo sapien
ttctcagacgagtgcatcccatggg

SEQ ID NO: 2438702 - DNA, 25 bp, Homo sapien
caagatgcccacacagtcggaggtg

SEQ ID NO: 2438703 - DNA, 25 bp, Homo sapien
tggccattcagggagctgtcctcag

SEQ ID NO: 2438704 - DNA, 25 bp, Homo sapien
caccatatagagttccctggcgttt

SEQ ID NO: 2438705 - DNA, 25 bp, Homo sapien
tcacccctatgagagctactttttg

SEQ ID NO: 2438706 - DNA, 25 bp, Homo sapien
tctggctcaaggtggatgtgtctgc

SEQ ID NO: 2438707 - DNA, 25 bp, Homo sapien
aaataccaccttcatggatttgcgt

SEQ ID NO: 2438708 - DNA, 25 bp, Homo sapien
gatttgcgttttctcccagcgtgca

SEQ ID NO: 2438709 - DNA, 25 bp, Homo sapien
gacacggccacgtaattggttgaaa

SEQ ID NO: 2438710 - DNA, 25 bp, Homo sapien
ggttgaaaatttgaacggcatgctc

SEQ ID NO: 2438711 - DNA, 25 bp, Homo sapien
tgggaccaccattccaacattcatg

SEQ ID NO: 2438712 - DNA, 25 bp, Homo sapien
gaggcattcctatgccaatattagg

SEQ ID NO: 2438713 - DNA, 25 bp, Homo sapien
tcccaaggattgtaatgccatgtta

SEQ ID NO: 2438714 - DNA, 25 bp, Homo sapien
tagaggagcatctcatgggaccacc

SEQ ID NO: 2438715 - DNA, 25 bp, Homo sapien
cagagagtgttgaccaaggatgttc

SEQ ID NO: 2438716 - DNA, 25 bp, Homo sapien
tcatacaggatggaaatgtagcccc

SEQ ID NO: 2438717 - DNA, 25 bp, Homo sapien
ggatggaaatgtagccccagaattt

SEQ ID NO: 2438718 - DNA, 25 bp, Homo sapien
taaaacaaatctctacagagagtgt

SEQ ID NO: 2438719 - DNA, 25 bp, Homo sapien
gaagactgtcaggtcggctctattg

SEQ ID NO: 2438720 - DNA, 25 bp, Homo sapien
gagcctaaaggcctgacttgctgtc

SEQ ID NO: 2438721 - DNA, 25 bp, Homo sapien
ggccgagagactggtaatgttttac

SEQ ID NO: 2438722 - DNA, 25 bp, Homo sapien
gtctctgctgggaagttggctgtat

SEQ ID NO: 2438723 - DNA, 25 bp, Homo sapien
cctaaagtttcgcattctgagacat

SEQ ID NO: 2438724 - DNA, 25 bp, Homo sapien
tgtcctcacttatacgtaggaacaa

SEQ ID NO: 2438725 - DNA, 25 bp, Homo sapien
cagtatccctaaagtttcgcattct

SEQ ID NO: 2438726 - DNA, 25 bp, Homo sapien
gaaactatggtatacacacataatg

SEQ ID NO: 2438727 - DNA, 25 bp, Homo sapien
gaaaagaaagaagtgaataatacac

SEQ ID NO: 2438728 - DNA, 25 bp, Homo sapien
aagtgaataatacacaccagctttc

SEQ ID NO: 2438729 - DNA, 25 bp, Homo sapien
gaaagaagtgaataatacacaccag

SEQ ID NO: 2438730 - DNA, 25 bp, Homo sapien
agattaaaattaaagcagttggatc

SEQ ID NO: 2438731 - DNA, 25 bp, Homo sapien
taggacctaactcgcatgtggaact

SEQ ID NO: 2438732 - DNA, 25 bp, Homo sapien
caagacccaccgatttgagtaagca

SEQ ID NO: 2438733 - DNA, 25 bp, Homo sapien
ggcatggtctcagctgttatacagt

SEQ ID NO: 2438734 - DNA, 25 bp, Homo sapien
ggacaggagttatagcttacatgaa

SEQ ID NO: 2438735 - DNA, 25 bp, Homo sapien
tgatgaaagcattataagacaattc

SEQ ID NO: 2438736 - DNA, 25 bp, Homo sapien
cctgagtgtggattgctctggaatc

SEQ ID NO: 2438737 - DNA, 25 bp, Homo sapien
gatctggttcttggaacattcttga

SEQ ID NO: 2438738 - DNA, 25 bp, Homo sapien
cattcttgaatctagtgtctctaag

SEQ ID NO: 2438739 - DNA, 25 bp, Homo sapien
tgccgttgtgacaccttcatcaata

SEQ ID NO: 2438740 - DNA, 25 bp, Homo sapien
atcttgccgttgtgacaccttcatc

SEQ ID NO: 2438741 - DNA, 25 bp, Homo sapien
tcttgccgttgtgacaccttcatca

SEQ ID NO: 2438742 - DNA, 25 bp, Homo sapien
cttgccgttgtgacaccttcatcaa

SEQ ID NO: 2438743 - DNA, 25 bp, Homo sapien
tatttaccctggatattacgactaa

SEQ ID NO: 2438744 - DNA, 25 bp, Homo sapien
aatatcaaagggtgtacacccctgt

SEQ ID NO: 2438745 - DNA, 25 bp, Homo sapien
tacacacatgcggtacacccactgt

SEQ ID NO: 2438746 - DNA, 25 bp, Homo sapien
gataccaggagttgtatctccctag

SEQ ID NO: 2438747 - DNA, 25 bp, Homo sapien
caaacactctgaaagggtgaccagg

SEQ ID NO: 2438748 - DNA, 25 bp, Homo sapien
gggagatgctctgatgtccgccgca

SEQ ID NO: 2438749 - DNA, 25 bp, Homo sapien
cagagcccgctaggttcttcacagg

SEQ ID NO: 2438750 - DNA, 25 bp, Homo sapien
gagcccttctcgcattctggttcca

SEQ ID NO: 2438751 - DNA, 25 bp, Homo sapien
tggatggataaaacaggatgttgaa

SEQ ID NO: 2438752 - DNA, 25 bp, Homo sapien
ccacagtggactggcggtaggaagt

SEQ ID NO: 2438753 - DNA, 25 bp, Homo sapien
gctgaggcagtaggtacacagcaaa

SEQ ID NO: 2438754 - DNA, 25 bp, Homo sapien
tgtttctgcactgctgaggcagtag

SEQ ID NO: 2438755 - DNA, 25 bp, Homo sapien
gtgtccgaggatctgctcgttctgc

SEQ ID NO: 2438756 - DNA, 25 bp, Homo sapien
cctgctgagagtgtccgaggatctg

SEQ ID NO: 2438757 - DNA, 25 bp, Homo sapien
gcagggttgctctcagctatggcct

SEQ ID NO: 2438758 - DNA, 25 bp, Homo sapien
agctatggccttggttggagaccca

SEQ ID NO: 2438759 - DNA, 25 bp, Homo sapien
ccacatgtaaacttagactatcttt

SEQ ID NO: 2438760 - DNA, 25 bp, Homo sapien
caccacatgtaaacttagactatct

SEQ ID NO: 2438761 - DNA, 25 bp, Homo sapien
gaacaccacatgtaaacttagacta

SEQ ID NO: 2438762 - DNA, 25 bp, Homo sapien
tctgaacaccacatgtaaacttaga

SEQ ID NO: 2438763 - DNA, 25 bp, Homo sapien
cttgacagagggcatcagctgtttc

SEQ ID NO: 2438764 - DNA, 25 bp, Homo sapien
ttgacagagggcatcagctgtttcc

SEQ ID NO: 2438765 - DNA, 25 bp, Homo sapien
gctgtttccactggtatatcccctc

SEQ ID NO: 2438766 - DNA, 25 bp, Homo sapien
gagccggagggaggtgagagtgacc

SEQ ID NO: 2438767 - DNA, 25 bp, Homo sapien
cattccgggcccaatgagccggagg

SEQ ID NO: 2438768 - DNA, 25 bp, Homo sapien
cctctgagaacattccgggcccaat

SEQ ID NO: 2438769 - DNA, 25 bp, Homo sapien
tctgagaacattccgggcccaatga

SEQ ID NO: 2438770 - DNA, 25 bp, Homo sapien
tctcatgatccaaatacttcccacc

SEQ ID NO: 2438771 - DNA, 25 bp, Homo sapien
tcttttaaacaaccatatctatgtg

SEQ ID NO: 2438772 - DNA, 25 bp, Homo sapien
tatcacatggcgagaaagaggggag

SEQ ID NO: 2438773 - DNA, 25 bp, Homo sapien
aaacaaccatatctatgtgaattga

SEQ ID NO: 2438774 - DNA, 25 bp, Homo sapien
gaattcctaatgttccatgatcagc

SEQ ID NO: 2438775 - DNA, 25 bp, Homo sapien
tgaagatataactaagtccctggac

SEQ ID NO: 2438776 - DNA, 25 bp, Homo sapien
agcctgattgaccagtggctgactg

SEQ ID NO: 2438777 - DNA, 25 bp, Homo sapien
tctcccttaattggagaattcctaa

SEQ ID NO: 2438778 - DNA, 25 bp, Homo sapien
ctgagaggggagataaaaacagaca

SEQ ID NO: 2438779 - DNA, 25 bp, Homo sapien
gaggggagataaaaacagacacaca

SEQ ID NO: 2438780 - DNA, 25 bp, Homo sapien
ggggagataaaaacagacacacagc

SEQ ID NO: 2438781 - DNA, 25 bp, Homo sapien
tgagaggggagataaaaacagacac

SEQ ID NO: 2438782 - DNA, 25 bp, Homo sapien
ccttggaaaccaatgaagagcctga

SEQ ID NO: 2438783 - DNA, 25 bp, Homo sapien
tgactactgcctactgggagggacc

SEQ ID NO: 2438784 - DNA, 25 bp, Homo sapien
cacgggaaagccaagagggtcttca

SEQ ID NO: 2438785 - DNA, 25 bp, Homo sapien
tatatgtcttgtatccccactgagg

SEQ ID NO: 2438786 - DNA, 25 bp, Homo sapien
ctcctgcgagaagtacttctctgac

SEQ ID NO: 2438787 - DNA, 25 bp, Homo sapien
tcctgcgagaagtacttctctgaca

SEQ ID NO: 2438788 - DNA, 25 bp, Homo sapien
cttctctgacatttcggtgattttg

SEQ ID NO: 2438789 - DNA, 25 bp, Homo sapien
acatttcggtgattttgatcacggg

SEQ ID NO: 2438790 - DNA, 25 bp, Homo sapien
tgcacctggactgcacagcgctgac

SEQ ID NO: 2438791 - DNA, 25 bp, Homo sapien
gcacctggactgcacagcgctgacc

SEQ ID NO: 2438792 - DNA, 25 bp, Homo sapien
tcaccctgctcctcagctgtcttga

SEQ ID NO: 2438793 - DNA, 25 bp, Homo sapien
tcctggaaggccagctcaccctgct

SEQ ID NO: 2438794 - DNA, 25 bp, Homo sapien
ttgatgttctcctccagtttcaggc

SEQ ID NO: 2438795 - DNA, 25 bp, Homo sapien
ctgggccagcttggtcttggcatcc

SEQ ID NO: 2438796 - DNA, 25 bp, Homo sapien
tcttgacagagaggatctgggaccg

SEQ ID NO: 2438797 - DNA, 25 bp, Homo sapien
ggaggctgctcccatactcggccga

SEQ ID NO: 2438798 - DNA, 25 bp, Homo sapien
gagatccgcgatctcgctgcggctg

SEQ ID NO: 2438799 - DNA, 25 bp, Homo sapien
cttctggatgcgcacattgagatcc

SEQ ID NO: 2438800 - DNA, 25 bp, Homo sapien
tggctccgagagtatgcctcggcct

SEQ ID NO: 2438801 - DNA, 25 bp, Homo sapien
gacggcgtcatactgggccttcacc

SEQ ID NO: 2438802 - DNA, 25 bp, Homo sapien
gcagcggctgtccatgccgacggtc

SEQ ID NO: 2438803 - DNA, 25 bp, Homo sapien
tccacgatgccgctcaggtcgatgt

SEQ ID NO: 2438804 - DNA, 25 bp, Homo sapien
gatctctagaggttgcaaagggccc

SEQ ID NO: 2438805 - DNA, 25 bp, Homo sapien
tgggctgcttatcctggagatgctg

SEQ ID NO: 2438806 - DNA, 25 bp, Homo sapien
gaggcaggtgggaccagggatctct

SEQ ID NO: 2438807 - DNA, 25 bp, Homo sapien
aagggccctgggctgcttatcctgg

SEQ ID NO: 2438808 - DNA, 25 bp, Homo sapien
gatgaagacactctgcatccaggtc

SEQ ID NO: 2438809 - DNA, 25 bp, Homo sapien
tcagtccgatgaagacactctgcat

SEQ ID NO: 2438810 - DNA, 25 bp, Homo sapien
ttttcatcaactccacgaagctctc

SEQ ID NO: 2438811 - DNA, 25 bp, Homo sapien
tggtttccagttcagtccgatgaag

SEQ ID NO: 2438812 - DNA, 25 bp, Homo sapien
cagagcctcgaaaaaggagctggat

SEQ ID NO: 2438813 - DNA, 25 bp, Homo sapien
cctctgagggctttgattgggcata

SEQ ID NO: 2438814 - DNA, 25 bp, Homo sapien
tttgattgggcataaaggagagtag

SEQ ID NO: 2438815 - DNA, 25 bp, Homo sapien
tggtcctgggacttaagcctctgag

SEQ ID NO: 2438816 - DNA, 25 bp, Homo sapien
ctgtgcgcttggagatctcatcctc

SEQ ID NO: 2438817 - DNA, 25 bp, Homo sapien
tctgtgcgcttggagatctcatcct

SEQ ID NO: 2438818 - DNA, 25 bp, Homo sapien
tgtctgtgcgcttggagatctcatc

SEQ ID NO: 2438819 - DNA, 25 bp, Homo sapien
gtctgtgcgcttggagatctcatcc

SEQ ID NO: 2438820 - DNA, 25 bp, Homo sapien
gtctgttaggggctttgatggtaca

SEQ ID NO: 2438821 - DNA, 25 bp, Homo sapien
tgttaggggctttgatggtacaggt

SEQ ID NO: 2438822 - DNA, 25 bp, Homo sapien
gttaggggctttgatggtacaggtc

SEQ ID NO: 2438823 - DNA, 25 bp, Homo sapien
tctgttaggggctttgatggtacag

SEQ ID NO: 2438824 - DNA, 25 bp, Homo sapien
ctgatattcctcatagagatgcccg

SEQ ID NO: 2438825 - DNA, 25 bp, Homo sapien
atagagatgcccgaggtcgaagatg

SEQ ID NO: 2438826 - DNA, 25 bp, Homo sapien
tcactttgcgcagttcctcctgcag

SEQ ID NO: 2438827 - DNA, 25 bp, Homo sapien
cagcagctggttgcgctgttccagg

SEQ ID NO: 2438828 - DNA, 25 bp, Homo sapien
tgggtcaggtgtggaccagtcgggg

SEQ ID NO: 2438829 - DNA, 25 bp, Homo sapien
aggtgtggaccagtcgggggctgag

SEQ ID NO: 2438830 - DNA, 25 bp, Homo sapien
tcaggtgtggaccagtcgggggctg

SEQ ID NO: 2438831 - DNA, 25 bp, Homo sapien
ggtcaggtgtggaccagtcgggggc

SEQ ID NO: 2438832 - DNA, 25 bp, Homo sapien
ccagggcgctcactcagcagaaagc

SEQ ID NO: 2438833 - DNA, 25 bp, Homo sapien
ttatgcacaccacccagggcgctca

SEQ ID NO: 2438834 - DNA, 25 bp, Homo sapien
atgcacaccacccagggcgctcact

SEQ ID NO: 2438835 - DNA, 25 bp, Homo sapien
ggcgctcactcagcagaaagcacct

SEQ ID NO: 2438836 - DNA, 25 bp, Homo sapien
gacgacccttcgacattcacagcag

SEQ ID NO: 2438837 - DNA, 25 bp, Homo sapien
agcagacaacgccagcaggaatact

SEQ ID NO: 2438838 - DNA, 25 bp, Homo sapien
tcgtaggctcccgaacggtcaggtg

SEQ ID NO: 2438839 - DNA, 25 bp, Homo sapien
atactggatgatggcgtttgacggt

SEQ ID NO: 2438840 - DNA, 25 bp, Homo sapien
caccttggagatagtgccagccgac

SEQ ID NO: 2438841 - DNA, 25 bp, Homo sapien
aacagcggggtccaacttgacatcc

SEQ ID NO: 2438842 - DNA, 25 bp, Homo sapien
ttagggaggcaaatttatcattgag

SEQ ID NO: 2438843 - DNA, 25 bp, Homo sapien
gaggctgctgaagccaaccacgcag

SEQ ID NO: 2438844 - DNA, 25 bp, Homo sapien
cctggggttgcgtcgggtggcaggc

SEQ ID NO: 2438845 - DNA, 25 bp, Homo sapien
ccaggggggtgagcgagtgagcctg

SEQ ID NO: 2438846 - DNA, 25 bp, Homo sapien
ggttgcgtcgggtggcaggctctgg

SEQ ID NO: 2438847 - DNA, 25 bp, Homo sapien
agtgagcctggggttgcgtcgggtg

SEQ ID NO: 2438848 - DNA, 25 bp, Homo sapien
ccagcgtctggtcatggccaaatgc

SEQ ID NO: 2438849 - DNA, 25 bp, Homo sapien
tcaggcagaccaccgccatttgact

SEQ ID NO: 2438850 - DNA, 25 bp, Homo sapien
ctggcccagcgtctggtcatggcca

SEQ ID NO: 2438851 - DNA, 25 bp, Homo sapien
cacaggttgatactgggtcctctgc

SEQ ID NO: 2438852 - DNA, 25 bp, Homo sapien
cagggtaatagcaggctggtctggg

SEQ ID NO: 2438853 - DNA, 25 bp, Homo sapien
agggtaatagcaggctggtctgggg

SEQ ID NO: 2438854 - DNA, 25 bp, Homo sapien
ctctgcctgcccattggccttgggg

SEQ ID NO: 2438855 - DNA, 25 bp, Homo sapien
ccaggaagctctgatctgcagctga

SEQ ID NO: 2438856 - DNA, 25 bp, Homo sapien
cccaggaagctctgatctgcagctg

SEQ ID NO: 2438857 - DNA, 25 bp, Homo sapien
gcccaggaagctctgatctgcagct

SEQ ID NO: 2438858 - DNA, 25 bp, Homo sapien
tctggagcagccagggaaccacagg

SEQ ID NO: 2438859 - DNA, 25 bp, Homo sapien
agcagccagggaaccacagggtcca

SEQ ID NO: 2438860 - DNA, 25 bp, Homo sapien
ggtctggagcagccagggaaccaca

SEQ ID NO: 2438861 - DNA, 25 bp, Homo sapien
ggagcagccagggaaccacagggtc

SEQ ID NO: 2438862 - DNA, 25 bp, Homo sapien
tgattcagccacaccgtcaatattt

SEQ ID NO: 2438863 - DNA, 25 bp, Homo sapien
tcagccacaccgtcaatatttcttt

SEQ ID NO: 2438864 - DNA, 25 bp, Homo sapien
gcctgattcagccacaccgtcaata

SEQ ID NO: 2438865 - DNA, 25 bp, Homo sapien
agcctgattcagccacaccgtcaat

SEQ ID NO: 2438866 - DNA, 25 bp, Homo sapien
taatgaacactggagactctcgcaa

SEQ ID NO: 2438867 - DNA, 25 bp, Homo sapien
ggctttgcagtacaccagctggaga

SEQ ID NO: 2438868 - DNA, 25 bp, Homo sapien
gaggtccagagcagttatgtccaca

SEQ ID NO: 2438869 - DNA, 25 bp, Homo sapien
taagggcagggactaatcctccagg

SEQ ID NO: 2438870 - DNA, 25 bp, Homo sapien
ttttggcccagttttggcctgtggc

SEQ ID NO: 2438871 - DNA, 25 bp, Homo sapien
tgtccagctcagttggtgccactgg

SEQ ID NO: 2438872 - DNA, 25 bp, Homo sapien
gcctgtggcccatccaagtatcttc

SEQ ID NO: 2438873 - DNA, 25 bp, Homo sapien
tgtggcccatccaagtatcttctct

SEQ ID NO: 2438874 - DNA, 25 bp, Homo sapien
aggcctgcccatgctgtgttccaga

SEQ ID NO: 2438875 - DNA, 25 bp, Homo sapien
gagggtctttggatccccaatggtg

SEQ ID NO: 2438876 - DNA, 25 bp, Homo sapien
atttggggagagacatatccaggaa

SEQ ID NO: 2438877 - DNA, 25 bp, Homo sapien
ggggagagacatatccaggaattag

SEQ ID NO: 2438878 - DNA, 25 bp, Homo sapien
cagcacggggaggctactggggagc

SEQ ID NO: 2438879 - DNA, 25 bp, Homo sapien
ggcagcacggggaggctactgggga

SEQ ID NO: 2438880 - DNA, 25 bp, Homo sapien
gcagcacggggaggctactggggag

SEQ ID NO: 2438881 - DNA, 25 bp, Homo sapien
gggcttggcgcctccgtaatctccc

SEQ ID NO: 2438882 - DNA, 25 bp, Homo sapien
ggcccaatccatggcatgaattctt

SEQ ID NO: 2438883 - DNA, 25 bp, Homo sapien
tgtggcaggtgcatgttggagctct

SEQ ID NO: 2438884 - DNA, 25 bp, Homo sapien
taaaggtggaacattggcccaatcc

SEQ ID NO: 2438885 - DNA, 25 bp, Homo sapien
tatgactcgttcgtccctgctgcgt

SEQ ID NO: 2438886 - DNA, 25 bp, Homo sapien
catgcttagtagcacggatgcaggg

SEQ ID NO: 2438887 - DNA, 25 bp, Homo sapien
tgtagcgagtccacacatgcttagt

SEQ ID NO: 2438888 - DNA, 25 bp, Homo sapien
caggattggatccactgtagcgagt

SEQ ID NO: 2438889 - DNA, 25 bp, Homo sapien
taattgcttagcttggagtcttgca

SEQ ID NO: 2438890 - DNA, 25 bp, Homo sapien
gtcgtcattacccagcagcgcgtgt

SEQ ID NO: 2438891 - DNA, 25 bp, Homo sapien
tacttaacaaggagtagccgtgatt

SEQ ID NO: 2438892 - DNA, 25 bp, Homo sapien
gccgtgattactggtgctgtcgtca

SEQ ID NO: 2438893 - DNA, 25 bp, Homo sapien
gacatggggtgctctctcagaccct

SEQ ID NO: 2438894 - DNA, 25 bp, Homo sapien
gctcattgggcttttgagccacccc

SEQ ID NO: 2438895 - DNA, 25 bp, Homo sapien
cacccctgcgtagtgggaccagggc

SEQ ID NO: 2438896 - DNA, 25 bp, Homo sapien
agacccttccagctcattgggcttt

SEQ ID NO: 2438897 - DNA, 25 bp, Homo sapien
atccagggatgccgacatcctgggt

SEQ ID NO: 2438898 - DNA, 25 bp, Homo sapien
aatccagggatgccgacatcctggg

SEQ ID NO: 2438899 - DNA, 25 bp, Homo sapien
aaatccagggatgccgacatcctgg

SEQ ID NO: 2438900 - DNA, 25 bp, Homo sapien
aaaatccagggatgccgacatcctg

SEQ ID NO: 2438901 - DNA, 25 bp, Homo sapien
taaagggtacctgctatataccagg

SEQ ID NO: 2438902 - DNA, 25 bp, Homo sapien
tatacgactcactcagaaagccaaa

SEQ ID NO: 2438903 - DNA, 25 bp, Homo sapien
taaccacgcctctgttgtagaacac

SEQ ID NO: 2438904 - DNA, 25 bp, Homo sapien
gaatgccagacttaaaccgtaatag

SEQ ID NO: 2438905 - DNA, 25 bp, Homo sapien
agccctggccataaaatctgctgac

SEQ ID NO: 2438906 - DNA, 25 bp, Homo sapien
cagccctggccataaaatctgctga

SEQ ID NO: 2438907 - DNA, 25 bp, Homo sapien
gtgcagaccagcatgtccacagagc

SEQ ID NO: 2438908 - DNA, 25 bp, Homo sapien
accaaggtgcagaccagcatgtcca

SEQ ID NO: 2438909 - DNA, 25 bp, Homo sapien
aggtgcagaccagcatgtccacaga

SEQ ID NO: 2438910 - DNA, 25 bp, Homo sapien
accagcatgtccacagagccatcgg

SEQ ID NO: 2438911 - DNA, 25 bp, Homo sapien
ttggggttggggtcaatacaggtca

SEQ ID NO: 2438912 - DNA, 25 bp, Homo sapien
tggggttggggtcaatacaggtcac

SEQ ID NO: 2438913 - DNA, 25 bp, Homo sapien
gagcttcttggaggggcccacaaac

SEQ ID NO: 2438914 - DNA, 25 bp, Homo sapien
aggttgccaaagagctcctgcttct

SEQ ID NO: 2438915 - DNA, 25 bp, Homo sapien
agagcttcttggaggggcccacaaa

SEQ ID NO: 2438916 - DNA, 25 bp, Homo sapien
aactcctgcaggttgccaaagagct

SEQ ID NO: 2438917 - DNA, 25 bp, Homo sapien
gaaccatttttgcacatccagttct

SEQ ID NO: 2438918 - DNA, 25 bp, Homo sapien
aggggaaccatttttgcacatccag

SEQ ID NO: 2438919 - DNA, 25 bp, Homo sapien
gggaaccatttttgcacatccagtt

SEQ ID NO: 2438920 - DNA, 25 bp, Homo sapien
accatttttgcacatccagttctac

SEQ ID NO: 2438921 - DNA, 25 bp, Homo sapien
gctaagggcagacggaagccaggcc

SEQ ID NO: 2438922 - DNA, 25 bp, Homo sapien
ccaggcctgagaacagggtgtggca

SEQ ID NO: 2438923 - DNA, 25 bp, Homo sapien
gaggtgggctaagggcagacggaag

SEQ ID NO: 2438924 - DNA, 25 bp, Homo sapien
ctggccagcttattgggaggggcta

SEQ ID NO: 2438925 - DNA, 25 bp, Homo sapien
cgggtgcgccaggaggagagcgagc

SEQ ID NO: 2438926 - DNA, 25 bp, Homo sapien
gccggcatccgcgaggtcaccatta

SEQ ID NO: 2438927 - DNA, 25 bp, Homo sapien
gaggtcaccattaaccagagcctgc

SEQ ID NO: 2438928 - DNA, 25 bp, Homo sapien
caggaggagagcgagcagatcaaga

SEQ ID NO: 2438929 - DNA, 25 bp, Homo sapien
gagaccaagtggacgctgctgcagg

SEQ ID NO: 2438930 - DNA, 25 bp, Homo sapien
tgcaggagcagaagtcggccaagag

SEQ ID NO: 2438931 - DNA, 25 bp, Homo sapien
tggagaccaagtggacgctgctgca

SEQ ID NO: 2438932 - DNA, 25 bp, Homo sapien
caggagcagaagtcggccaagagca

SEQ ID NO: 2438933 - DNA, 25 bp, Homo sapien
catggcaacagagaatacgtaggac

SEQ ID NO: 2438934 - DNA, 25 bp, Homo sapien
cacattcaggtagtcaggtcagaga

SEQ ID NO: 2438935 - DNA, 25 bp, Homo sapien
taacagtccctttgtgtgtgcggct

SEQ ID NO: 2438936 - DNA, 25 bp, Homo sapien
aactcatgagcgtgaagctggccct

SEQ ID NO: 2438937 - DNA, 25 bp, Homo sapien
cagatcactagagccttggacattc

SEQ ID NO: 2438938 - DNA, 25 bp, Homo sapien
ttccgtctgagttccttaggcatcg

SEQ ID NO: 2438939 - DNA, 25 bp, Homo sapien
ggccatttaagcaagccccctggaa

SEQ ID NO: 2438940 - DNA, 25 bp, Homo sapien
ttcttcgagttgctgcctgactgca

SEQ ID NO: 2438941 - DNA, 25 bp, Homo sapien
accgcatccgccagtcgcaggagtg

SEQ ID NO: 2438942 - DNA, 25 bp, Homo sapien
gaaagtgatgtcagaatagcttcca

SEQ ID NO: 2438943 - DNA, 25 bp, Homo sapien
aggagtgcccgcgactgagccgcct

SEQ ID NO: 2438944 - DNA, 25 bp, Homo sapien
gaaggcttattccatccggaccgca

SEQ ID NO: 2438945 - DNA, 25 bp, Homo sapien
gcataagaccccgccgcgagagctg

SEQ ID NO: 2438946 - DNA, 25 bp, Homo sapien
gacacgcacaggtccccgcataaga

SEQ ID NO: 2438947 - DNA, 25 bp, Homo sapien
ggtgctcaccgccacgttcccgctg

SEQ ID NO: 2438948 - DNA, 25 bp, Homo sapien
gcgaagcgcacggagcggccgctgc

SEQ ID NO: 2438949 - DNA, 25 bp, Homo sapien
tttacagcaccaacgccctcacaca

SEQ ID NO: 2438950 - DNA, 25 bp, Homo sapien
acatttacagcaccaacgccctcac

SEQ ID NO: 2438951 - DNA, 25 bp, Homo sapien
agacatttacagcaccaacgccctc

SEQ ID NO: 2438952 - DNA, 25 bp, Homo sapien
atttacagcaccaacgccctcacac

SEQ ID NO: 2438953 - DNA, 25 bp, Homo sapien
ctctgctcctcgccctccagcaggc

SEQ ID NO: 2438954 - DNA, 25 bp, Homo sapien
ctgctcctcgccctccagcaggcgc

SEQ ID NO: 2438955 - DNA, 25 bp, Homo sapien
tctgctcctcgccctccagcaggcg

SEQ ID NO: 2438956 - DNA, 25 bp, Homo sapien
gcgatctcaaagtccaggccagctt

SEQ ID NO: 2438957 - DNA, 25 bp, Homo sapien
cgatctcaaagtccaggccagcttg

SEQ ID NO: 2438958 - DNA, 25 bp, Homo sapien
tggcgatctcaaagtccaggccagc

SEQ ID NO: 2438959 - DNA, 25 bp, Homo sapien
ggtggcgatctcaaagtccaggcca

SEQ ID NO: 2438960 - DNA, 25 bp, Homo sapien
ctggtactccctgatcaggcaggcc

SEQ ID NO: 2438961 - DNA, 25 bp, Homo sapien
tcctggtactccctgatcaggcagg

SEQ ID NO: 2438962 - DNA, 25 bp, Homo sapien
ggtactccctgatcaggcaggccat

SEQ ID NO: 2438963 - DNA, 25 bp, Homo sapien
tactccctgatcaggcaggccatgt

SEQ ID NO: 2438964 - DNA, 25 bp, Homo sapien
tccttggtgcggcgcagggtctccc

SEQ ID NO: 2438965 - DNA, 25 bp, Homo sapien
catgcggttcagctcgttgatctcc

SEQ ID NO: 2438966 - DNA, 25 bp, Homo sapien
cgtgcctgatcaccgtggccttcat

SEQ ID NO: 2438967 - DNA, 25 bp, Homo sapien
agggtctccccgtgcctgatcaccg

SEQ ID NO: 2438968 - DNA, 25 bp, Homo sapien
cacagtgcatgttcaggtcccgact

SEQ ID NO: 2438969 - DNA, 25 bp, Homo sapien
cagtgatgacacagtgcatgttcag

SEQ ID NO: 2438970 - DNA, 25 bp, Homo sapien
tcccgactgttgtccatcttgacga

SEQ ID NO: 2438971 - DNA, 25 bp, Homo sapien
ttgtccatcttgacgaccactgagg

SEQ ID NO: 2438972 - DNA, 25 bp, Homo sapien
agccgcctcaggaagtcgatctcct

SEQ ID NO: 2438973 - DNA, 25 bp, Homo sapien
cagcagtggcccttagtgccacctc

SEQ ID NO: 2438974 - DNA, 25 bp, Homo sapien
gcagtggcccttagtgccacctctt

SEQ ID NO: 2438975 - DNA, 25 bp, Homo sapien
agcagtggcccttagtgccacctct

SEQ ID NO: 2438976 - DNA, 25 bp, Homo sapien
ggggacaaaacacacaaggctcaga

SEQ ID NO: 2438977 - DNA, 25 bp, Homo sapien
gggacaaaacacacaaggctcagat

SEQ ID NO: 2438978 - DNA, 25 bp, Homo sapien
tggggacaaaacacacaaggctcag

SEQ ID NO: 2438979 - DNA, 25 bp, Homo sapien
ctggggacaaaacacacaaggctca

SEQ ID NO: 2438980 - DNA, 25 bp, Homo sapien
ctcctgcacgtggttgagctctgag

SEQ ID NO: 2438981 - DNA, 25 bp, Homo sapien
cctgcacgtggttgagctctgaggc

SEQ ID NO: 2438982 - DNA, 25 bp, Homo sapien
tgcacgtggttgagctctgaggcca

SEQ ID NO: 2438983 - DNA, 25 bp, Homo sapien
cacgtggttgagctctgaggccagc

SEQ ID NO: 2438984 - DNA, 25 bp, Homo sapien
ctcccgtcgcagagttgtagccctc

SEQ ID NO: 2438985 - DNA, 25 bp, Homo sapien
tcccgtcgcagagttgtagccctca

SEQ ID NO: 2438986 - DNA, 25 bp, Homo sapien
aggctccaggttgctcttgcagcac

SEQ ID NO: 2438987 - DNA, 25 bp, Homo sapien
agaggctccaggttgctcttgcagc

SEQ ID NO: 2438988 - DNA, 25 bp, Homo sapien
gctccaggttgctcttgcagcactc

SEQ ID NO: 2438989 - DNA, 25 bp, Homo sapien
tccaggttgctcttgcagcactcac

SEQ ID NO: 2438990 - DNA, 25 bp, Homo sapien
gaagaactgcagctttgtctccagc

SEQ ID NO: 2438991 - DNA, 25 bp, Homo sapien
aagaactgcagctttgtctccagca

SEQ ID NO: 2438992 - DNA, 25 bp, Homo sapien
gttctggaagaactgcagctttgtc

SEQ ID NO: 2438993 - DNA, 25 bp, Homo sapien
ctggaagaactgcagctttgtctcc

SEQ ID NO: 2438994 - DNA, 25 bp, Homo sapien
ggttggaggagccaatatccccagc

SEQ ID NO: 2438995 - DNA, 25 bp, Homo sapien
gttggaggagccaatatccccagcc

SEQ ID NO: 2438996 - DNA, 25 bp, Homo sapien
gcccgcaggccgagatgcagctgaa

SEQ ID NO: 2438997 - DNA, 25 bp, Homo sapien
tgaaggccgcgaacctgctgttgag

SEQ ID NO: 2438998 - DNA, 25 bp, Homo sapien
agcggtagccgaagctgcgtccgca

SEQ ID NO: 2438999 - DNA, 25 bp, Homo sapien
aggctctcgttgaccgacacggtgg

SEQ ID NO: 2439000 - DNA, 25 bp, Homo sapien
gagctcgcggccaaggcgtttacga

SEQ ID NO: 2439001 - DNA, 25 bp, Homo sapien
gcctgcataaaacggcgttcgcctc

SEQ ID NO: 2439002 - DNA, 25 bp, Homo sapien
tgcggtcagtgcgagtggaacccct

SEQ ID NO: 2439003 - DNA, 25 bp, Homo sapien
tgcgccttatatgacggcccgcggg

SEQ ID NO: 2439004 - DNA, 25 bp, Homo sapien
tcaggcatatcccccgagtctgctt

SEQ ID NO: 2439005 - DNA, 25 bp, Homo sapien
aacctaagaggggtgtctggccgag

SEQ ID NO: 2439006 - DNA, 25 bp, Homo sapien
caaacctaagaggggtgtctggccg

SEQ ID NO: 2439007 - DNA, 25 bp, Homo sapien
taagaggggtgtctggccgagttag

SEQ ID NO: 2439008 - DNA, 25 bp, Homo sapien
caagagaggcttggaggagaccaca

SEQ ID NO: 2439009 - DNA, 25 bp, Homo sapien
taaccttggtggagagcaaagagca

SEQ ID NO: 2439010 - DNA, 25 bp, Homo sapien
cacgtggtggatggaatgagcccca

SEQ ID NO: 2439011 - DNA, 25 bp, Homo sapien
tctggctcaactgtcggctggcagg

SEQ ID NO: 2439012 - DNA, 25 bp, Homo sapien
gacagtcgtcctccgttcagccggg

SEQ ID NO: 2439013 - DNA, 25 bp, Homo sapien
gaggagggtctgtgtatctggagga

SEQ ID NO: 2439014 - DNA, 25 bp, Homo sapien
ttcagccgggctccgcctgcctgct

SEQ ID NO: 2439015 - DNA, 25 bp, Homo sapien
ggctttcctccctcggacagtcgtc

SEQ ID NO: 2439016 - DNA, 25 bp, Homo sapien
cctggacttgcctgatgtcaatcca

SEQ ID NO: 2439017 - DNA, 25 bp, Homo sapien
tttcaaataccgaacctggacttgc

SEQ ID NO: 2439018 - DNA, 25 bp, Homo sapien
tgcctgatgtcaatccagaagatcc

SEQ ID NO: 2439019 - DNA, 25 bp, Homo sapien
tcaggactgttgctcacattttccc

SEQ ID NO: 2439020 - DNA, 25 bp, Homo sapien
ttattgaaacacagatcaagagcag

SEQ ID NO: 2439021 - DNA, 25 bp, Homo sapien
gcacttgctccaggcgcctggactg

SEQ ID NO: 2439022 - DNA, 25 bp, Homo sapien
ttcaaagtgcaggagaagtagctga

SEQ ID NO: 2439023 - DNA, 25 bp, Homo sapien
tgccagcggacttctttctagggtg

SEQ ID NO: 2439024 - DNA, 25 bp, Homo sapien
ccggcagctgctgccgcaagacccc

SEQ ID NO: 2439025 - DNA, 25 bp, Homo sapien
cagctgctgccgcaagaccccacac

SEQ ID NO: 2439026 - DNA, 25 bp, Homo sapien
ctaacatttccggcagctgctgccg

SEQ ID NO: 2439027 - DNA, 25 bp, Homo sapien
ggcagctgctgccgcaagaccccac

SEQ ID NO: 2439028 - DNA, 25 bp, Homo sapien
tccgcaggtggtgttcaattggccg

SEQ ID NO: 2439029 - DNA, 25 bp, Homo sapien
cccctccgcaggtggtgttcaattg

SEQ ID NO: 2439030 - DNA, 25 bp, Homo sapien
cgcaggtggtgttcaattggccgca

SEQ ID NO: 2439031 - DNA, 25 bp, Homo sapien
gataccacaggagcccacgccgcag

SEQ ID NO: 2439032 - DNA, 25 bp, Homo sapien
ccgttgcacggagcgctgcagacac

SEQ ID NO: 2439033 - DNA, 25 bp, Homo sapien
tgacacgcagaggtccccgcacacg

SEQ ID NO: 2439034 - DNA, 25 bp, Homo sapien
tcccgttgcacggagcgctgcagac

SEQ ID NO: 2439035 - DNA, 25 bp, Homo sapien
ttgcacggagcgctgcagacactgc

SEQ ID NO: 2439036 - DNA, 25 bp, Homo sapien
tgtccacactggaccccaaatactc

SEQ ID NO: 2439037 - DNA, 25 bp, Homo sapien
gtccacactggaccccaaatactca

SEQ ID NO: 2439038 - DNA, 25 bp, Homo sapien
tccacactggaccccaaatactcac

SEQ ID NO: 2439039 - DNA, 25 bp, Homo sapien
tctgtccacactggaccccaaatac

SEQ ID NO: 2439040 - DNA, 25 bp, Homo sapien
ttcacagccccaatgccttcacata

SEQ ID NO: 2439041 - DNA, 25 bp, Homo sapien
agacattcacagccccaatgccttc

SEQ ID NO: 2439042 - DNA, 25 bp, Homo sapien
cattcacagccccaatgccttcaca

SEQ ID NO: 2439043 - DNA, 25 bp, Homo sapien
cacagccccaatgccttcacatagc

SEQ ID NO: 2439044 - DNA, 25 bp, Homo sapien
tcagccaaggccaagggtaggcttg

SEQ ID NO: 2439045 - DNA, 25 bp, Homo sapien
cagccaaggccaagggtaggcttgt

SEQ ID NO: 2439046 - DNA, 25 bp, Homo sapien
ccaaggccaagggtaggcttgtgcc

SEQ ID NO: 2439047 - DNA, 25 bp, Homo sapien
agccaaggccaagggtaggcttgtg

SEQ ID NO: 2439048 - DNA, 25 bp, Homo sapien
ctggtactccctgatcaggcaggcc

SEQ ID NO: 2439049 - DNA, 25 bp, Homo sapien
tcctggtactccctgatcaggcagg

SEQ ID NO: 2439050 - DNA, 25 bp, Homo sapien
ggtactccctgatcaggcaggccat

SEQ ID NO: 2439051 - DNA, 25 bp, Homo sapien
tactccctgatcaggcaggccatgt

SEQ ID NO: 2439052 - DNA, 25 bp, Homo sapien
cacgaccagggactctacatggaca

SEQ ID NO: 2439053 - DNA, 25 bp, Homo sapien
gactcattgagagaccacgaccagg

SEQ ID NO: 2439054 - DNA, 25 bp, Homo sapien
tgacaatggttaggccctcggtctc

SEQ ID NO: 2439055 - DNA, 25 bp, Homo sapien
gcctttatcacctgggactcattga

SEQ ID NO: 2439056 - DNA, 25 bp, Homo sapien
tctccccgtgcctgatcaccgtggc

SEQ ID NO: 2439057 - DNA, 25 bp, Homo sapien
gggtctccccgtgcctgatcaccgt

SEQ ID NO: 2439058 - DNA, 25 bp, Homo sapien
tccttggtgcggcgcagggtctccc

SEQ ID NO: 2439059 - DNA, 25 bp, Homo sapien
cagggtctccccgtgcctgatcacc

SEQ ID NO: 2439060 - DNA, 25 bp, Homo sapien
ttaatagatatctcacatccctccc

SEQ ID NO: 2439061 - DNA, 25 bp, Homo sapien
tcttctcatccctagggaccagcat

SEQ ID NO: 2439062 - DNA, 25 bp, Homo sapien
gttgtacagtgctcagcctgtgcag

SEQ ID NO: 2439063 - DNA, 25 bp, Homo sapien
ggtgggacctcccatccattcagga

SEQ ID NO: 2439064 - DNA, 25 bp, Homo sapien
ggtcccggctgttgtccagcttgac

SEQ ID NO: 2439065 - DNA, 25 bp, Homo sapien
ccatgttcaggtcccggctgttgtc

SEQ ID NO: 2439066 - DNA, 25 bp, Homo sapien
ttgctgcggtaccaggactcggcct

SEQ ID NO: 2439067 - DNA, 25 bp, Homo sapien
cagcttgacaaccacggaggtgtct

SEQ ID NO: 2439068 - DNA, 25 bp, Homo sapien
tgcggaggtaggcgcagtccacatc

SEQ ID NO: 2439069 - DNA, 25 bp, Homo sapien
agccgcctcaggaagtcgatctcct

SEQ ID NO: 2439070 - DNA, 25 bp, Homo sapien
tggggagtgttggagctcaaggacc

SEQ ID NO: 2439071 - DNA, 25 bp, Homo sapien
ggaaaggtggggagtgttggagctc

SEQ ID NO: 2439072 - DNA, 25 bp, Homo sapien
ctggaaaggtggggagtgttggagc

SEQ ID NO: 2439073 - DNA, 25 bp, Homo sapien
aaggtggggagtgttggagctcaag

SEQ ID NO: 2439074 - DNA, 25 bp, Homo sapien
agatctgtgcttctcaatcctgtgt

SEQ ID NO: 2439075 - DNA, 25 bp, Homo sapien
tctgtgcttctcaatcctgtgtcac

SEQ ID NO: 2439076 - DNA, 25 bp, Homo sapien
caggaagaatctgtcattctgagat

SEQ ID NO: 2439077 - DNA, 25 bp, Homo sapien
tgtcattctgagatcccacagatct

SEQ ID NO: 2439078 - DNA, 25 bp, Homo sapien
tctcagctgttgctctcagagaaac

SEQ ID NO: 2439079 - DNA, 25 bp, Homo sapien
tcgttctcagctgttgctctcagag

SEQ ID NO: 2439080 - DNA, 25 bp, Homo sapien
ctgttgctctcagagaaacctcctc

SEQ ID NO: 2439081 - DNA, 25 bp, Homo sapien
gttctcagctgttgctctcagagaa

SEQ ID NO: 2439082 - DNA, 25 bp, Homo sapien
acaggtgctacaagtataggggctg

SEQ ID NO: 2439083 - DNA, 25 bp, Homo sapien
gacaggtgctacaagtataggggct

SEQ ID NO: 2439084 - DNA, 25 bp, Homo sapien
tgacaggtgctacaagtataggggc

SEQ ID NO: 2439085 - DNA, 25 bp, Homo sapien
caggtgctacaagtataggggctga

SEQ ID NO: 2439086 - DNA, 25 bp, Homo sapien
gctctggcaacactcgcggttctgg

SEQ ID NO: 2439087 - DNA, 25 bp, Homo sapien
cagcacctcctgcacgtggttaagc

SEQ ID NO: 2439088 - DNA, 25 bp, Homo sapien
gcagctttgtctccagcagtttgtt

SEQ ID NO: 2439089 - DNA, 25 bp, Homo sapien
cagagtctcgatgtagccctcaaac

SEQ ID NO: 2439090 - DNA, 25 bp, Homo sapien
gatggtgtctggtgccccaaagcca

SEQ ID NO: 2439091 - DNA, 25 bp, Homo sapien
ctgccattcggtgtgggaaggtggg

SEQ ID NO: 2439092 - DNA, 25 bp, Homo sapien
gcccgcaggccgagatgcagctgaa

SEQ ID NO: 2439093 - DNA, 25 bp, Homo sapien
tctcgttgaccgacacggtggtgat

SEQ ID NO: 2439094 - DNA, 25 bp, Homo sapien
tgaaggccgcgaacctgctgttgag

SEQ ID NO: 2439095 - DNA, 25 bp, Homo sapien
agcggtagccgaagctgcgtccgca

SEQ ID NO: 2439096 - DNA, 25 bp, Homo sapien
cctcctggacgtttgggttgcagag

SEQ ID NO: 2439097 - DNA, 25 bp, Homo sapien
gacgtttgggttgcagaggacagga

SEQ ID NO: 2439098 - DNA, 25 bp, Homo sapien
tcctcctggacgtttgggttgcaga

SEQ ID NO: 2439099 - DNA, 25 bp, Homo sapien
ctggacgtttgggttgcagaggaca

SEQ ID NO: 2439100 - DNA, 25 bp, Homo sapien
tgtgttgggatcattccaagcctac

SEQ ID NO: 2439101 - DNA, 25 bp, Homo sapien
tgttgggatcattccaagcctactc

SEQ ID NO: 2439102 - DNA, 25 bp, Homo sapien
acatgtttatgggctacataagata

SEQ ID NO: 2439103 - DNA, 25 bp, Homo sapien
atacatgtttatgggctacataaga

SEQ ID NO: 2439104 - DNA, 25 bp, Homo sapien
ttgtggtctattgctgaggcccctg

SEQ ID NO: 2439105 - DNA, 25 bp, Homo sapien
gacttgggaatatctaccagcacct

SEQ ID NO: 2439106 - DNA, 25 bp, Homo sapien
tgacctttccacagcaggctaggac

SEQ ID NO: 2439107 - DNA, 25 bp, Homo sapien
ctttgtattgagcatccagggcctt

SEQ ID NO: 2439108 - DNA, 25 bp, Homo sapien
tatagtgccaatgagcatcccaaag

SEQ ID NO: 2439109 - DNA, 25 bp, Homo sapien
tcccctagttggtcagttggtctca

SEQ ID NO: 2439110 - DNA, 25 bp, Homo sapien
tgtatcccataaggacagcttcaga

SEQ ID NO: 2439111 - DNA, 25 bp, Homo sapien
gctggagggcagctatacagctcct

SEQ ID NO: 2439112 - DNA, 25 bp, Homo sapien
gcctctgggcaaagggcgcgtgggc

SEQ ID NO: 2439113 - DNA, 25 bp, Homo sapien
tgcaggctgtgcgagggcgtcggct

SEQ ID NO: 2439114 - DNA, 25 bp, Homo sapien
tgtctgtaagtagtggggtccgtcc

SEQ ID NO: 2439115 - DNA, 25 bp, Homo sapien
gcgtcggctcggtgaatgtctgtaa

SEQ ID NO: 2439116 - DNA, 25 bp, Homo sapien
ggtgccaaggctctcatctttccct

SEQ ID NO: 2439117 - DNA, 25 bp, Homo sapien
gcaggtgccaaggctctcatctttc

SEQ ID NO: 2439118 - DNA, 25 bp, Homo sapien
gtgccaaggctctcatctttccctg

SEQ ID NO: 2439119 - DNA, 25 bp, Homo sapien
aggtgccaaggctctcatctttccc

SEQ ID NO: 2439120 - DNA, 25 bp, Homo sapien
gaaggaatgggtctattccccagcc

SEQ ID NO: 2439121 - DNA, 25 bp, Homo sapien
ggaatgagccgatggtgtattctca

SEQ ID NO: 2439122 - DNA, 25 bp, Homo sapien
gaaaagccagcgatgtgctgctgtt

SEQ ID NO: 2439123 - DNA, 25 bp, Homo sapien
ttccagggaagcaaggcccttctcc

SEQ ID NO: 2439124 - DNA, 25 bp, Homo sapien
acaggtggtgttcagctggccacag

SEQ ID NO: 2439125 - DNA, 25 bp, Homo sapien
ttaatgcctcccctggccgcaggag

SEQ ID NO: 2439126 - DNA, 25 bp, Homo sapien
gccacagggcttgcacaaaccagtg

SEQ ID NO: 2439127 - DNA, 25 bp, Homo sapien
agggcttgcacaaaccagtgctcac

SEQ ID NO: 2439128 - DNA, 25 bp, Homo sapien
cgacacgcagagatccccgcacaca

SEQ ID NO: 2439129 - DNA, 25 bp, Homo sapien
agagatccccgcacacaaccccacc

SEQ ID NO: 2439130 - DNA, 25 bp, Homo sapien
caccaggttcccgttgcagggggca

SEQ ID NO: 2439131 - DNA, 25 bp, Homo sapien
gcagagatccccgcacacaacccca

SEQ ID NO: 2439132 - DNA, 25 bp, Homo sapien
ttcacagcttcaacaccttcacaca

SEQ ID NO: 2439133 - DNA, 25 bp, Homo sapien
cattcacagcttcaacaccttcaca

SEQ ID NO: 2439134 - DNA, 25 bp, Homo sapien
gacattcacagcttcaacaccttca

SEQ ID NO: 2439135 - DNA, 25 bp, Homo sapien
cacagcttcaacaccttcacacagc

SEQ ID NO: 2439136 - DNA, 25 bp, Homo sapien
tgggcaggtctatgcaagtggagtg

SEQ ID NO: 2439137 - DNA, 25 bp, Homo sapien
gcaggtctatgcaagtggagtgctt

SEQ ID NO: 2439138 - DNA, 25 bp, Homo sapien
ctatgcaagtggagtgcttagggct

SEQ ID NO: 2439139 - DNA, 25 bp, Homo sapien
aggtctatgcaagtggagtgcttag

SEQ ID NO: 2439140 - DNA, 25 bp, Homo sapien
ctggtactccctgatcaggcaggcc

SEQ ID NO: 2439141 - DNA, 25 bp, Homo sapien
tcctggtactccctgatcaggcagg

SEQ ID NO: 2439142 - DNA, 25 bp, Homo sapien
ggtactccctgatcaggcaggccat

SEQ ID NO: 2439143 - DNA, 25 bp, Homo sapien
tactccctgatcaggcaggccatgt

SEQ ID NO: 2439144 - DNA, 25 bp, Homo sapien
ctgaggggtgggccgggctctggta

SEQ ID NO: 2439145 - DNA, 25 bp, Homo sapien
tgaggggtgggccgggctctggtac

SEQ ID NO: 2439146 - DNA, 25 bp, Homo sapien
actgaggggtgggccgggctctggt

SEQ ID NO: 2439147 - DNA, 25 bp, Homo sapien
ggttcagctcgttgatctcctcctt

SEQ ID NO: 2439148 - DNA, 25 bp, Homo sapien
gcagggtctccccgtgcctgatcac

SEQ ID NO: 2439149 - DNA, 25 bp, Homo sapien
tccttggtgcggcgcagggtctccc

SEQ ID NO: 2439150 - DNA, 25 bp, Homo sapien
catgcggttcagctcgttgatctcc

SEQ ID NO: 2439151 - DNA, 25 bp, Homo sapien
gcaggaagcagagatgttcatgagg

SEQ ID NO: 2439152 - DNA, 25 bp, Homo sapien
tgcaggaagcagagatgttcatgag

SEQ ID NO: 2439153 - DNA, 25 bp, Homo sapien
ctgcaggaagcagagatgttcatga

SEQ ID NO: 2439154 - DNA, 25 bp, Homo sapien
actgccatgtctagcaggcaggtgt

SEQ ID NO: 2439155 - DNA, 25 bp, Homo sapien
tcccactgccatgtctagcaggcag

SEQ ID NO: 2439156 - DNA, 25 bp, Homo sapien
gccatgtctagcaggcaggtgtcct

SEQ ID NO: 2439157 - DNA, 25 bp, Homo sapien
caggcaggtgtcctgtgccgctcac

SEQ ID NO: 2439158 - DNA, 25 bp, Homo sapien
ggtcccggctgttgtccagcttgac

SEQ ID NO: 2439159 - DNA, 25 bp, Homo sapien
cagcttgacaaccacggaggtgtct

SEQ ID NO: 2439160 - DNA, 25 bp, Homo sapien
ccatgttcaggtcccggctgttgtc

SEQ ID NO: 2439161 - DNA, 25 bp, Homo sapien
ttcaggtcccggctgttgtccagct

SEQ ID NO: 2439162 - DNA, 25 bp, Homo sapien
tgcggaggtaggcgcagtccacatc

SEQ ID NO: 2439163 - DNA, 25 bp, Homo sapien
aaactcgttctctgctgtggctcga

SEQ ID NO: 2439164 - DNA, 25 bp, Homo sapien
ctctgctgtggctcgaagtgctact

SEQ ID NO: 2439165 - DNA, 25 bp, Homo sapien
aactcgttctctgctgtggctcgaa

SEQ ID NO: 2439166 - DNA, 25 bp, Homo sapien
cgttctctgctgtggctcgaagtgc

SEQ ID NO: 2439167 - DNA, 25 bp, Homo sapien
gttactctggcagcactcgcggttt

SEQ ID NO: 2439168 - DNA, 25 bp, Homo sapien
actctggcagcactcgcggttttgg

SEQ ID NO: 2439169 - DNA, 25 bp, Homo sapien
gccgcagagtctcgatgtagccagc

SEQ ID NO: 2439170 - DNA, 25 bp, Homo sapien
cagagtctcgatgtagccagcaaac

SEQ ID NO: 2439171 - DNA, 25 bp, Homo sapien
tctcgttgaccgacacggtggtgat

SEQ ID NO: 2439172 - DNA, 25 bp, Homo sapien
cccggagcggtagccgaagctgcgt

SEQ ID NO: 2439173 - DNA, 25 bp, Homo sapien
ggaggctctcgttgaccgacacggt

SEQ ID NO: 2439174 - DNA, 25 bp, Homo sapien
agcggtagccgaagctgcgtccgca

SEQ ID NO: 2439175 - DNA, 25 bp, Homo sapien
ctatggagttgaagccacaggtcat

SEQ ID NO: 2439176 - DNA, 25 bp, Homo sapien
gaggtgtctgaacagtggagtagat

SEQ ID NO: 2439177 - DNA, 25 bp, Homo sapien
taggaggtgtctgaacagtggagta

SEQ ID NO: 2439178 - DNA, 25 bp, Homo sapien
ggaggttaggaggtgtctgaacagt

SEQ ID NO: 2439179 - DNA, 25 bp, Homo sapien
tgtctgaacagtggagtagatggca

SEQ ID NO: 2439180 - DNA, 25 bp, Homo sapien
tagacacatgacctccttgggatgg

SEQ ID NO: 2439181 - DNA, 25 bp, Homo sapien
caccgaggggctctgtgtagacaca

SEQ ID NO: 2439182 - DNA, 25 bp, Homo sapien
ttggatcatgttggacccctccacc

SEQ ID NO: 2439183 - DNA, 25 bp, Homo sapien
ctcaatccagcaggcttggatcatg

SEQ ID NO: 2439184 - DNA, 25 bp, Homo sapien
tgattatgacgttttgcatctggcc

SEQ ID NO: 2439185 - DNA, 25 bp, Homo sapien
taggatagcgactgtggtacagcgc

SEQ ID NO: 2439186 - DNA, 25 bp, Homo sapien
ggtacagcgcttcactgattatgac

SEQ ID NO: 2439187 - DNA, 25 bp, Homo sapien
tggcctgcacaatgaccctgagttt

SEQ ID NO: 2439188 - DNA, 25 bp, Homo sapien
cctgcatgctcaagcagtaccagga

SEQ ID NO: 2439189 - DNA, 25 bp, Homo sapien
gcatgctcaagcagtaccaggaggt

SEQ ID NO: 2439190 - DNA, 25 bp, Homo sapien
atgctcaagcagtaccaggaggtga

SEQ ID NO: 2439191 - DNA, 25 bp, Homo sapien
ggcctgcatgctcaagcagtaccag

SEQ ID NO: 2439192 - DNA, 25 bp, Homo sapien
tctcccggaccaaagggtcttgcag

SEQ ID NO: 2439193 - DNA, 25 bp, Homo sapien
agccaggttaaaagggtcaccagag

SEQ ID NO: 2439194 - DNA, 25 bp, Homo sapien
ccggatcccaccaagtttgagcagc

SEQ ID NO: 2439195 - DNA, 25 bp, Homo sapien
tagggtggtgcttcccttgtctctg

SEQ ID NO: 2439196 - DNA, 25 bp, Homo sapien
tagacagtcacaagaaggagaccca

SEQ ID NO: 2439197 - DNA, 25 bp, Homo sapien
ttgcagcggcatttattgaaacaca

SEQ ID NO: 2439198 - DNA, 25 bp, Homo sapien
tcgagacaacccagaaggcaatgca

SEQ ID NO: 2439199 - DNA, 25 bp, Homo sapien
caggaagtggcttaactctctgtcc

SEQ ID NO: 2439200 - DNA, 25 bp, Homo sapien
gacctgtccaaagtgccctaaccag

SEQ ID NO: 2439201 - DNA, 25 bp, Homo sapien
ttcactgaatagcaagacctgtcca

SEQ ID NO: 2439202 - DNA, 25 bp, Homo sapien
taatgggcttctcaactgcgaggtc

SEQ ID NO: 2439203 - DNA, 25 bp, Homo sapien
aaaggatgccccacgataatgggct

SEQ ID NO: 2439204 - DNA, 25 bp, Homo sapien
tggaacaggttagcccagaagcagg

SEQ ID NO: 2439205 - DNA, 25 bp, Homo sapien
acaggttagcccagaagcaggaagg

SEQ ID NO: 2439206 - DNA, 25 bp, Homo sapien
ctggaacaggttagcccagaagcag

SEQ ID NO: 2439207 - DNA, 25 bp, Homo sapien
gaacaggttagcccagaagcaggaa

SEQ ID NO: 2439208 - DNA, 25 bp, Homo sapien
tctccctagcatgaaaaggcgcagg

SEQ ID NO: 2439209 - DNA, 25 bp, Homo sapien
ttccctctgtaggaacatccagaag

SEQ ID NO: 2439210 - DNA, 25 bp, Homo sapien
gggactggtcttgtccctgagagct

SEQ ID NO: 2439211 - DNA, 25 bp, Homo sapien
ctggatggttaggatggcgcctcca

SEQ ID NO: 2439212 - DNA, 25 bp, Homo sapien
tgatgctgccgcctatggctgaggg

SEQ ID NO: 2439213 - DNA, 25 bp, Homo sapien
ggctgaggggccagaagtgatctgg

SEQ ID NO: 2439214 - DNA, 25 bp, Homo sapien
aggagactccaccacgggagctgct

SEQ ID NO: 2439215 - DNA, 25 bp, Homo sapien
ccaccaccgtgatgctgccgcctat

SEQ ID NO: 2439216 - DNA, 25 bp, Homo sapien
ttcacagagcccacaccttcacaca

SEQ ID NO: 2439217 - DNA, 25 bp, Homo sapien
agacattcacagagcccacaccttc

SEQ ID NO: 2439218 - DNA, 25 bp, Homo sapien
acattcacagagcccacaccttcac

SEQ ID NO: 2439219 - DNA, 25 bp, Homo sapien
attcacagagcccacaccttcacac

SEQ ID NO: 2439220 - DNA, 25 bp, Homo sapien
ctcagccagcttgcagcgggcatcg

SEQ ID NO: 2439221 - DNA, 25 bp, Homo sapien
aggcccagcttggagttcatcacct

SEQ ID NO: 2439222 - DNA, 25 bp, Homo sapien
gcgggcatcgctgagggccgcctca

SEQ ID NO: 2439223 - DNA, 25 bp, Homo sapien
ccagcttgcagcgggcatcgctgag

SEQ ID NO: 2439224 - DNA, 25 bp, Homo sapien
ggttcagctcgttgatctcctcctt

SEQ ID NO: 2439225 - DNA, 25 bp, Homo sapien
tgcctgatcaccgtggccttcatct

SEQ ID NO: 2439226 - DNA, 25 bp, Homo sapien
tccttggtgcggcgcagggtctccc

SEQ ID NO: 2439227 - DNA, 25 bp, Homo sapien
catgcggttcagctcgttgatctcc

SEQ ID NO: 2439228 - DNA, 25 bp, Homo sapien
ccggctgcggctggcaacatcgtca

SEQ ID NO: 2439229 - DNA, 25 bp, Homo sapien
catcgtcatactgagccttgatctc

SEQ ID NO: 2439230 - DNA, 25 bp, Homo sapien
gactatgaccgaggtgtctgagatg

SEQ ID NO: 2439231 - DNA, 25 bp, Homo sapien
tcggctgttgtccatcttgactatg

SEQ ID NO: 2439232 - DNA, 25 bp, Homo sapien
tcatagaggcgcctcaggaagctag

SEQ ID NO: 2439233 - DNA, 25 bp, Homo sapien
ggcgcctcaggaagctagactcctc

SEQ ID NO: 2439234 - DNA, 25 bp, Homo sapien
tagaggcgcctcaggaagctagact

SEQ ID NO: 2439235 - DNA, 25 bp, Homo sapien
ctcttcatagaggcgcctcaggaag

SEQ ID NO: 2439236 - DNA, 25 bp, Homo sapien
cttctttagaacgacaaactcattc

SEQ ID NO: 2439237 - DNA, 25 bp, Homo sapien
tctttagaacgacaaactcattctc

SEQ ID NO: 2439238 - DNA, 25 bp, Homo sapien
ttctttagaacgacaaactcattct

SEQ ID NO: 2439239 - DNA, 25 bp, Homo sapien
ctttagaacgacaaactcattctct

SEQ ID NO: 2439240 - DNA, 25 bp, Homo sapien
tctcgatgtagccactgaacagtgg

SEQ ID NO: 2439241 - DNA, 25 bp, Homo sapien
gatgtagccactgaacagtggctcc

SEQ ID NO: 2439242 - DNA, 25 bp, Homo sapien
tagccactgaacagtggctccaggt

SEQ ID NO: 2439243 - DNA, 25 bp, Homo sapien
agtctcgatgtagccactgaacagt

SEQ ID NO: 2439244 - DNA, 25 bp, Homo sapien
gccattcaggtggaaagaagaagtc

SEQ ID NO: 2439245 - DNA, 25 bp, Homo sapien
cattcaggtggaaagaagaagtcag

SEQ ID NO: 2439246 - DNA, 25 bp, Homo sapien
ccattcaggtggaaagaagaagtca

SEQ ID NO: 2439247 - DNA, 25 bp, Homo sapien
gatgaaggccgcgaacctgctgttg

SEQ ID NO: 2439248 - DNA, 25 bp, Homo sapien
ggaggctctcgttgaccgacacggt

SEQ ID NO: 2439249 - DNA, 25 bp, Homo sapien
gccgcgaacctgctgttgagggact

SEQ ID NO: 2439250 - DNA, 25 bp, Homo sapien
acctgctgttgagggacttgatctg

SEQ ID NO: 2439251 - DNA, 25 bp, Homo sapien
tgaagttcctggtgaccccgcatcc

SEQ ID NO: 2439252 - DNA, 25 bp, Homo sapien
cggctcggaagccacctacagctat

SEQ ID NO: 2439253 - DNA, 25 bp, Homo sapien
ggcgctgatgcagcagcggttgcca

SEQ ID NO: 2439254 - DNA, 25 bp, Homo sapien
tcggtagcaggacacccctcggtag

SEQ ID NO: 2439255 - DNA, 25 bp, Homo sapien
agtgcgaggctcaggatccttctgc

SEQ ID NO: 2439256 - DNA, 25 bp, Homo sapien
gcggcagagtgcgaggctcaggatc

SEQ ID NO: 2439257 - DNA, 25 bp, Homo sapien
tgcgggcggcagagtgcgaggctca

SEQ ID NO: 2439258 - DNA, 25 bp, Homo sapien
cagagtgcgaggctcaggatccttc

SEQ ID NO: 2439259 - DNA, 25 bp, Homo sapien
gggcagggtagagagaccttggcag

SEQ ID NO: 2439260 - DNA, 25 bp, Homo sapien
cagggcagggtagagagaccttggc

SEQ ID NO: 2439261 - DNA, 25 bp, Homo sapien
ttcagggcagggtagagagaccttg

SEQ ID NO: 2439262 - DNA, 25 bp, Homo sapien
cttcagggcagggtagagagacctt

SEQ ID NO: 2439263 - DNA, 25 bp, Homo sapien
tggcctgctccacggcaactccaag

SEQ ID NO: 2439264 - DNA, 25 bp, Homo sapien
cctggcctgctccacggcaactcca

SEQ ID NO: 2439265 - DNA, 25 bp, Homo sapien
ctccagtgtgtcatggcggggttcc

SEQ ID NO: 2439266 - DNA, 25 bp, Homo sapien
ttctccagtgtgtcatggcggggtt

SEQ ID NO: 2439267 - DNA, 25 bp, Homo sapien
cacaaagagtagtgcacacaggcag

SEQ ID NO: 2439268 - DNA, 25 bp, Homo sapien
gcctccttggagcttgcagacacaa

SEQ ID NO: 2439269 - DNA, 25 bp, Homo sapien
gggatcattgcaaagcccgcctgtc

SEQ ID NO: 2439270 - DNA, 25 bp, Homo sapien
cacctcgtggacttgcatgctggag

SEQ ID NO: 2439271 - DNA, 25 bp, Homo sapien
gagaggagtgatccaaaggacagaa

SEQ ID NO: 2439272 - DNA, 25 bp, Homo sapien
tggcagaaaaatcctccaagaggac

SEQ ID NO: 2439273 - DNA, 25 bp, Homo sapien
gccagcttagctggaactgctaatg

SEQ ID NO: 2439274 - DNA, 25 bp, Homo sapien
gctaatggagcatctacatggcaga

SEQ ID NO: 2439275 - DNA, 25 bp, Homo sapien
gatgagcatggagccactccttgtg

SEQ ID NO: 2439276 - DNA, 25 bp, Homo sapien
tggagccggcaaccaaaggctcagg

SEQ ID NO: 2439277 - DNA, 25 bp, Homo sapien
agccactccttgtgccagtgctcag

SEQ ID NO: 2439278 - DNA, 25 bp, Homo sapien
actggtggcacagacgctgctgcta

SEQ ID NO: 2439279 - DNA, 25 bp, Homo sapien
tgtttactggtccaacaccttcaca

SEQ ID NO: 2439280 - DNA, 25 bp, Homo sapien
tttactggtccaacaccttcacaga

SEQ ID NO: 2439281 - DNA, 25 bp, Homo sapien
atatgtttactggtccaacaccttc

SEQ ID NO: 2439282 - DNA, 25 bp, Homo sapien
tactggtccaacaccttcacagagc

SEQ ID NO: 2439283 - DNA, 25 bp, Homo sapien
agggcacactccagatctgccagct

SEQ ID NO: 2439284 - DNA, 25 bp, Homo sapien
tctgccagcttgcatttggcatcac

SEQ ID NO: 2439285 - DNA, 25 bp, Homo sapien
tttggcatcactgagggtcgcctcg

SEQ ID NO: 2439286 - DNA, 25 bp, Homo sapien
ctgctgcagggcacactccagatct

SEQ ID NO: 2439287 - DNA, 25 bp, Homo sapien
ttgcaggtaggcttcggcagtgcca

SEQ ID NO: 2439288 - DNA, 25 bp, Homo sapien
acacggcccctcttagtgggaacat

SEQ ID NO: 2439289 - DNA, 25 bp, Homo sapien
ggaaggcagtttgcaggtaggcttc

SEQ ID NO: 2439290 - DNA, 25 bp, Homo sapien
gcatccccaggttgggttagaaaca

SEQ ID NO: 2439291 - DNA, 25 bp, Homo sapien
gcgcaggttgtcacagtgttggcca

SEQ ID NO: 2439292 - DNA, 25 bp, Homo sapien
tcaggcgggtcagttcgttgatctc

SEQ ID NO: 2439293 - DNA, 25 bp, Homo sapien
cgttgatctcgttccgtatgttgcg

SEQ ID NO: 2439294 - DNA, 25 bp, Homo sapien
tcaatctctgccttaagcctctgga

SEQ ID NO: 2439295 - DNA, 25 bp, Homo sapien
tcccttccccagcctccactgccca

SEQ ID NO: 2439296 - DNA, 25 bp, Homo sapien
atcccttccccagcctccactgccc

SEQ ID NO: 2439297 - DNA, 25 bp, Homo sapien
cccttccccagcctccactgcccac

SEQ ID NO: 2439298 - DNA, 25 bp, Homo sapien
gacgtctctgagatgtgcgactgca

SEQ ID NO: 2439299 - DNA, 25 bp, Homo sapien
cccatcaaggttcaggtcacggctg

SEQ ID NO: 2439300 - DNA, 25 bp, Homo sapien
ttgtccatcttcacaatgaccgacg

SEQ ID NO: 2439301 - DNA, 25 bp, Homo sapien
tgtgcgactgcagcaactggatttc

SEQ ID NO: 2439302 - DNA, 25 bp, Homo sapien
cgttggcctcgagatcagacttgtt

SEQ ID NO: 2439303 - DNA, 25 bp, Homo sapien
ggtatccacgttggcctcgagatca

SEQ ID NO: 2439304 - DNA, 25 bp, Homo sapien
catgtaaagcgtttttagaaagtca

SEQ ID NO: 2439305 - DNA, 25 bp, Homo sapien
aatttcctgagttagggtatccacg

SEQ ID NO: 2439306 - DNA, 25 bp, Homo sapien
ctcagcattggcccgacataccact

SEQ ID NO: 2439307 - DNA, 25 bp, Homo sapien
tcattctcagcattggcccgacata

SEQ ID NO: 2439308 - DNA, 25 bp, Homo sapien
cagcattggcccgacataccacttc

SEQ ID NO: 2439309 - DNA, 25 bp, Homo sapien
attctcagcattggcccgacatacc

SEQ ID NO: 2439310 - DNA, 25 bp, Homo sapien
ggtctctaggagcttattctgctgc

SEQ ID NO: 2439311 - DNA, 25 bp, Homo sapien
gagtggctccagattgctcctgata

SEQ ID NO: 2439312 - DNA, 25 bp, Homo sapien
tcttgaagccctctaggacatcctg

SEQ ID NO: 2439313 - DNA, 25 bp, Homo sapien
gatgtagctctcgaagagtggctcc

SEQ ID NO: 2439314 - DNA, 25 bp, Homo sapien
ttttggctgtaatattcctagaccc

SEQ ID NO: 2439315 - DNA, 25 bp, Homo sapien
gtaatattcctagacccagagattc

SEQ ID NO: 2439316 - DNA, 25 bp, Homo sapien
acccagagattcagctatcataggt

SEQ ID NO: 2439317 - DNA, 25 bp, Homo sapien
ccagagattcagctatcataggtac

SEQ ID NO: 2439318 - DNA, 25 bp, Homo sapien
tccttcttcaccctctgggcattgg

SEQ ID NO: 2439319 - DNA, 25 bp, Homo sapien
cttcttcaccctctgggcattgggg

SEQ ID NO: 2439320 - DNA, 25 bp, Homo sapien
ccttcttcaccctctgggcattggg

SEQ ID NO: 2439321 - DNA, 25 bp, Homo sapien
agctccaaagcccagaccaacacag

SEQ ID NO: 2439322 - DNA, 25 bp, Homo sapien
agccctaggccccagaccaacacct

SEQ ID NO: 2439323 - DNA, 25 bp, Homo sapien
ctccaaagcccagaccaacacagct

SEQ ID NO: 2439324 - DNA, 25 bp, Homo sapien
acacagctgtcagccctaggcccca

SEQ ID NO: 2439325 - DNA, 25 bp, Homo sapien
tgaccagagctgactcggtaggagc

SEQ ID NO: 2439326 - DNA, 25 bp, Homo sapien
tgatgacactccgactaccaaagct

SEQ ID NO: 2439327 - DNA, 25 bp, Homo sapien
gttggcccggaagcgattcaggttc

SEQ ID NO: 2439328 - DNA, 25 bp, Homo sapien
tgggccgagagcctacagctgctat

SEQ ID NO: 2439329 - DNA, 25 bp, Homo sapien
caaaagagcaagtgtagaatgggtg

SEQ ID NO: 2439330 - DNA, 25 bp, Homo sapien
ggttgggagcaaaagagcaagtgta

SEQ ID NO: 2439331 - DNA, 25 bp, Homo sapien
aaagagcaagtgtagaatgggtgag

SEQ ID NO: 2439332 - DNA, 25 bp, Homo sapien
ctggttgggagcaaaagagcaagtg

SEQ ID NO: 2439333 - DNA, 25 bp, Homo sapien
tccagctcatttgtgcggtattttc

SEQ ID NO: 2439334 - DNA, 25 bp, Homo sapien
ccagctcatttgtgcggtattttct

SEQ ID NO: 2439335 - DNA, 25 bp, Homo sapien
taactccagagacttgcgggctgag

SEQ ID NO: 2439336 - DNA, 25 bp, Homo sapien
gagtgtaactccagagacttgcggg

SEQ ID NO: 2439337 - DNA, 25 bp, Homo sapien
tgtaactccagagacttgcgggctg

SEQ ID NO: 2439338 - DNA, 25 bp, Homo sapien
actccagagacttgcgggctgagcc

SEQ ID NO: 2439339 - DNA, 25 bp, Homo sapien
gcctggctgctgggtcatcaggatc

SEQ ID NO: 2439340 - DNA, 25 bp, Homo sapien
catgcctggctgctgggtcatcagg

SEQ ID NO: 2439341 - DNA, 25 bp, Homo sapien
ctggctgctgggtcatcaggatcct

SEQ ID NO: 2439342 - DNA, 25 bp, Homo sapien
ggctgctgggtcatcaggatcctat

SEQ ID NO: 2439343 - DNA, 25 bp, Homo sapien
gccatgtgctgcgtgcccagctggc

SEQ ID NO: 2439344 - DNA, 25 bp, Homo sapien
ccatgtgctgcgtgcccagctggca

SEQ ID NO: 2439345 - DNA, 25 bp, Homo sapien
gagctgactttgtgaggaaacttcc

SEQ ID NO: 2439346 - DNA, 25 bp, Homo sapien
caccatctgggcctagctgagggtc

SEQ ID NO: 2439347 - DNA, 25 bp, Homo sapien
tattgccattctgcggttaagagca

SEQ ID NO: 2439348 - DNA, 25 bp, Homo sapien
ggaaacttccatgggatgatccaca

SEQ ID NO: 2439349 - DNA, 25 bp, Homo sapien
gctcctagcgtcatgctggatttcc

SEQ ID NO: 2439350 - DNA, 25 bp, Homo sapien
cctagcgtcatgctggatttccgcc

SEQ ID NO: 2439351 - DNA, 25 bp, Homo sapien
ccagctcctagcgtcatgctggatt

SEQ ID NO: 2439352 - DNA, 25 bp, Homo sapien
gcgtcatgctggatttccgcccgct

SEQ ID NO: 2439353 - DNA, 25 bp, Homo sapien
tggggctcgcaggggacatagagtt

SEQ ID NO: 2439354 - DNA, 25 bp, Homo sapien
gggctcgcaggggacatagagttca

SEQ ID NO: 2439355 - DNA, 25 bp, Homo sapien
ggctcgcaggggacatagagttcac

SEQ ID NO: 2439356 - DNA, 25 bp, Homo sapien
ctggggctcgcaggggacatagagt

SEQ ID NO: 2439357 - DNA, 25 bp, Homo sapien
gtgctgaccccacatggctcgtaca

SEQ ID NO: 2439358 - DNA, 25 bp, Homo sapien
aggaaggcgcctttggagctgctca

SEQ ID NO: 2439359 - DNA, 25 bp, Homo sapien
cattgctcctgaggacgccagtgct

SEQ ID NO: 2439360 - DNA, 25 bp, Homo sapien
ttgctcctgaggacgccagtgctga

SEQ ID NO: 2439361 - DNA, 25 bp, Homo sapien
tcacgggcccgatgccttcgcacag

SEQ ID NO: 2439362 - DNA, 25 bp, Homo sapien
attcacgggcccgatgccttcgcac

SEQ ID NO: 2439363 - DNA, 25 bp, Homo sapien
agatattcacgggcccgatgccttc

SEQ ID NO: 2439364 - DNA, 25 bp, Homo sapien
atattcacgggcccgatgccttcgc

SEQ ID NO: 2439365 - DNA, 25 bp, Homo sapien
tcagctatggcaccctcaagtttgc

SEQ ID NO: 2439366 - DNA, 25 bp, Homo sapien
ttggcatcattgagagccgcctcgc

SEQ ID NO: 2439367 - DNA, 25 bp, Homo sapien
ctatggcaccctcaagtttgcagcg

SEQ ID NO: 2439368 - DNA, 25 bp, Homo sapien
acttggcatcattgagagccgcctc

SEQ ID NO: 2439369 - DNA, 25 bp, Homo sapien
tgcggaggttgtcacagtggttccc

SEQ ID NO: 2439370 - DNA, 25 bp, Homo sapien
gcagccgctggatcagtttattcat

SEQ ID NO: 2439371 - DNA, 25 bp, Homo sapien
catttccaggatctcgttcttacgg

SEQ ID NO: 2439372 - DNA, 25 bp, Homo sapien
gctgcagccgctggatcagtttatt

SEQ ID NO: 2439373 - DNA, 25 bp, Homo sapien
ctgcggctggcgatgtcgtcatact

SEQ ID NO: 2439374 - DNA, 25 bp, Homo sapien
tccatcttcacaatgaccgaggtct

SEQ ID NO: 2439375 - DNA, 25 bp, Homo sapien
gcactggtaccaggcctctgcttcg

SEQ ID NO: 2439376 - DNA, 25 bp, Homo sapien
cctctgcttcggctttgctgcggct

SEQ ID NO: 2439377 - DNA, 25 bp, Homo sapien
gcagggcccatgtgagaaggagtga

SEQ ID NO: 2439378 - DNA, 25 bp, Homo sapien
ggggcagggcccatgtgagaaggag

SEQ ID NO: 2439379 - DNA, 25 bp, Homo sapien
gggcccatgtgagaaggagtgagct

SEQ ID NO: 2439380 - DNA, 25 bp, Homo sapien
gcccatgtgagaaggagtgagctct

SEQ ID NO: 2439381 - DNA, 25 bp, Homo sapien
gaagtcgatctcctgcacgagtgcc

SEQ ID NO: 2439382 - DNA, 25 bp, Homo sapien
cctgcacgagtgcctctgcgttggt

SEQ ID NO: 2439383 - DNA, 25 bp, Homo sapien
ctgcacgagtgcctctgcgttggtc

SEQ ID NO: 2439384 - DNA, 25 bp, Homo sapien
gcaacaaactcattctcaacacagg

SEQ ID NO: 2439385 - DNA, 25 bp, Homo sapien
aaaaaatgctttagtcgggcttgtg

SEQ ID NO: 2439386 - DNA, 25 bp, Homo sapien
aatgctttagtcgggcttgtggatt

SEQ ID NO: 2439387 - DNA, 25 bp, Homo sapien
aaaatgctttagtcgggcttgtgga

SEQ ID NO: 2439388 - DNA, 25 bp, Homo sapien
aaaaatgctttagtcgggcttgtgg

SEQ ID NO: 2439389 - DNA, 25 bp, Homo sapien
agagacagccaggctatttcctcag

SEQ ID NO: 2439390 - DNA, 25 bp, Homo sapien
gagacagccaggctatttcctcagg

SEQ ID NO: 2439391 - DNA, 25 bp, Homo sapien
acactggattcccatggggcactca

SEQ ID NO: 2439392 - DNA, 25 bp, Homo sapien
gacactggactgtcacaaggcactg

SEQ ID NO: 2439393 - DNA, 25 bp, Homo sapien
tgcctctaacatgcactcccatagg

SEQ ID NO: 2439394 - DNA, 25 bp, Homo sapien
tgtcacaaggcactggattcccatg

SEQ ID NO: 2439395 - DNA, 25 bp, Homo sapien
agctctgactctagcctcacgcggt

SEQ ID NO: 2439396 - DNA, 25 bp, Homo sapien
ctcgaagatgggctcgatgttggtc

SEQ ID NO: 2439397 - DNA, 25 bp, Homo sapien
ggtccccggacacacagtccagctg

SEQ ID NO: 2439398 - DNA, 25 bp, Homo sapien
ggcgctgatatagccctcgaagatg

SEQ ID NO: 2439399 - DNA, 25 bp, Homo sapien
agaatggaatatcaccaggcagcag

SEQ ID NO: 2439400 - DNA, 25 bp, Homo sapien
gccaagaatggaatatcaccaggca

SEQ ID NO: 2439401 - DNA, 25 bp, Homo sapien
caagaatggaatatcaccaggcagc

SEQ ID NO: 2439402 - DNA, 25 bp, Homo sapien
cagccaagaatggaatatcaccagg

SEQ ID NO: 2439403 - DNA, 25 bp, Homo sapien
cttgttgatgaaagatgcgaaacgg

SEQ ID NO: 2439404 - DNA, 25 bp, Homo sapien
gtgggaccagcaggctctcattgat

SEQ ID NO: 2439405 - DNA, 25 bp, Homo sapien
gcgaaacggttgttgaggcacttga

SEQ ID NO: 2439406 - DNA, 25 bp, Homo sapien
acagtcgggtctatctccagtgcca

SEQ ID NO: 2439407 - DNA, 25 bp, Homo sapien
agccgagtatgagctgaaactctga

SEQ ID NO: 2439408 - DNA, 25 bp, Homo sapien
cagccgagtatgagctgaaactctg

SEQ ID NO: 2439409 - DNA, 25 bp, Homo sapien
gacagccgagtatgagctgaaactc

SEQ ID NO: 2439410 - DNA, 25 bp, Homo sapien
gccgagtatgagctgaaactctgac

SEQ ID NO: 2439411 - DNA, 25 bp, Homo sapien
ggcaggagagagaggcagagaaatg

SEQ ID NO: 2439412 - DNA, 25 bp, Homo sapien
aggagagagaggcagagaaatgcgg

SEQ ID NO: 2439413 - DNA, 25 bp, Homo sapien
gcaggagagagaggcagagaaatgc

SEQ ID NO: 2439414 - DNA, 25 bp, Homo sapien
gagagagaggcagagaaatgcggcc

SEQ ID NO: 2439415 - DNA, 25 bp, Homo sapien
ggatgatcaagtcaggctcagcttc

SEQ ID NO: 2439416 - DNA, 25 bp, Homo sapien
cagcttccccccttttatctggtag

SEQ ID NO: 2439417 - DNA, 25 bp, Homo sapien
gaaccggggcaggatgatcaagtca

SEQ ID NO: 2439418 - DNA, 25 bp, Homo sapien
gggcaggatgatcaagtcaggctca

SEQ ID NO: 2439419 - DNA, 25 bp, Homo sapien
atggtgtgaatgttgatggagacac

SEQ ID NO: 2439420 - DNA, 25 bp, Homo sapien
tgtgaatgttgatggagacactcag

SEQ ID NO: 2439421 - DNA, 25 bp, Homo sapien
gaatgttgatggagacactcagagg

SEQ ID NO: 2439422 - DNA, 25 bp, Homo sapien
atgttgatggagacactcagaggcc

SEQ ID NO: 2439423 - DNA, 25 bp, Homo sapien
ggtgtcctggcttaaggagcttcag

SEQ ID NO: 2439424 - DNA, 25 bp, Homo sapien
gcaatgtgtcccctcagagcgagga

SEQ ID NO: 2439425 - DNA, 25 bp, Homo sapien
tcctctgagtgcactatcctgggcc

SEQ ID NO: 2439426 - DNA, 25 bp, Homo sapien
aagaaagagccacctctcctctgag

SEQ ID NO: 2439427 - DNA, 25 bp, Homo sapien
tcaaatatcctgctggtgggagttg

SEQ ID NO: 2439428 - DNA, 25 bp, Homo sapien
gtgggagttgtcaggggacttggct

SEQ ID NO: 2439429 - DNA, 25 bp, Homo sapien
tgggagttgtcaggggacttggctg

SEQ ID NO: 2439430 - DNA, 25 bp, Homo sapien
gagttgtcaggggacttggctgggg

SEQ ID NO: 2439431 - DNA, 25 bp, Homo sapien
ctgctcctgttgttgtggcagaggc

SEQ ID NO: 2439432 - DNA, 25 bp, Homo sapien
tgctcctgttgttgtggcagaggcc

SEQ ID NO: 2439433 - DNA, 25 bp, Homo sapien
tgttgttgtggcagaggccactgct

SEQ ID NO: 2439434 - DNA, 25 bp, Homo sapien
tcctgttgttgtggcagaggccact

SEQ ID NO: 2439435 - DNA, 25 bp, Homo sapien
gggcatcgccatactcaaggcacat

SEQ ID NO: 2439436 - DNA, 25 bp, Homo sapien
tctgcacagggcatcgccatactca

SEQ ID NO: 2439437 - DNA, 25 bp, Homo sapien
cgccatactcaaggcacattcacag

SEQ ID NO: 2439438 - DNA, 25 bp, Homo sapien
ccgtcacacgctaccttctcatgaa

SEQ ID NO: 2439439 - DNA, 25 bp, Homo sapien
cttttctaccattccaagacattga

SEQ ID NO: 2439440 - DNA, 25 bp, Homo sapien
tctaccattccaagacattgactca

SEQ ID NO: 2439441 - DNA, 25 bp, Homo sapien
cagaccctcaagagtgatgctccca

SEQ ID NO: 2439442 - DNA, 25 bp, Homo sapien
cctcaagagtgatgctcccagcttc

SEQ ID NO: 2439443 - DNA, 25 bp, Homo sapien
ggtactgacggctctgacaccttca

SEQ ID NO: 2439444 - DNA, 25 bp, Homo sapien
ctctgacaccttcagtgagtctgtg

SEQ ID NO: 2439445 - DNA, 25 bp, Homo sapien
aggtactgacggctctgacaccttc

SEQ ID NO: 2439446 - DNA, 25 bp, Homo sapien
gacaccttcagtgagtctgtgaccg

SEQ ID NO: 2439447 - DNA, 25 bp, Homo sapien
gcattgctgtcgtggtctggtgcat

SEQ ID NO: 2439448 - DNA, 25 bp, Homo sapien
gcctctgtggcattgctgtcgtggt

SEQ ID NO: 2439449 - DNA, 25 bp, Homo sapien
tcatctggagggctgacactgtggc

SEQ ID NO: 2439450 - DNA, 25 bp, Homo sapien
gggctgacactgtggcgctcatggg

SEQ ID NO: 2439451 - DNA, 25 bp, Homo sapien
gacatacattggctcctggtacctg

SEQ ID NO: 2439452 - DNA, 25 bp, Homo sapien
caatgtccggggctagcttgacata

SEQ ID NO: 2439453 - DNA, 25 bp, Homo sapien
tagcttgacatacattggctcctgg

SEQ ID NO: 2439454 - DNA, 25 bp, Homo sapien
gcttgacatacattggctcctggta

SEQ ID NO: 2439455 - DNA, 25 bp, Homo sapien
ttctgcagggctatctccagctcca

SEQ ID NO: 2439456 - DNA, 25 bp, Homo sapien
tgcagggctatctccagctccacca

SEQ ID NO: 2439457 - DNA, 25 bp, Homo sapien
ggccttctgcagggctatctccagc

SEQ ID NO: 2439458 - DNA, 25 bp, Homo sapien
gcttggccttctgcagggctatctc

SEQ ID NO: 2439459 - DNA, 25 bp, Homo sapien
ttgttcttagtgccagcttcccatg

SEQ ID NO: 2439460 - DNA, 25 bp, Homo sapien
cttgttcttagtgccagcttcccat

SEQ ID NO: 2439461 - DNA, 25 bp, Homo sapien
tttcatgtgcgtctgagagcctccc

SEQ ID NO: 2439462 - DNA, 25 bp, Homo sapien
aattatcatcccaacgactcccagg

SEQ ID NO: 2439463 - DNA, 25 bp, Homo sapien
cagcatcaggtaggtgccaatcact

SEQ ID NO: 2439464 - DNA, 25 bp, Homo sapien
actggcttcaccctacagctggaca

SEQ ID NO: 2439465 - DNA, 25 bp, Homo sapien
tgatggctggaactgtccagctgtc

SEQ ID NO: 2439466 - DNA, 25 bp, Homo sapien
ctgggccccagccagttccgccttt

SEQ ID NO: 2439467 - DNA, 25 bp, Homo sapien
ccccagccagttccgcctttcttct

SEQ ID NO: 2439468 - DNA, 25 bp, Homo sapien
ggcactgatggctggaactgtccag

SEQ ID NO: 2439469 - DNA, 25 bp, Homo sapien
ctcctgcctttatctggctgttccc

SEQ ID NO: 2439470 - DNA, 25 bp, Homo sapien
tcctgcctttatctggctgttcccc

SEQ ID NO: 2439471 - DNA, 25 bp, Homo sapien
cctgcctttatctggctgttcccca

SEQ ID NO: 2439472 - DNA, 25 bp, Homo sapien
gggcattggaggtgtgtccatcttc

SEQ ID NO: 2439473 - DNA, 25 bp, Homo sapien
cctgctgttgttggcgatgtcttca

SEQ ID NO: 2439474 - DNA, 25 bp, Homo sapien
ggccttgacttcaatgatgatgcta

SEQ ID NO: 2439475 - DNA, 25 bp, Homo sapien
catgctgggccttgacttcaatgat

SEQ ID NO: 2439476 - DNA, 25 bp, Homo sapien
tcttcatgctgggccttgacttcaa

SEQ ID NO: 2439477 - DNA, 25 bp, Homo sapien
tttgtggttgggtccaaatgagaga

SEQ ID NO: 2439478 - DNA, 25 bp, Homo sapien
cttttgtggttgggtccaaatgaga

SEQ ID NO: 2439479 - DNA, 25 bp, Homo sapien
ttgtggttgggtccaaatgagagag

SEQ ID NO: 2439480 - DNA, 25 bp, Homo sapien
ttttgtggttgggtccaaatgagag

SEQ ID NO: 2439481 - DNA, 25 bp, Homo sapien
cagcaggtaaattttggcagggcag

SEQ ID NO: 2439482 - DNA, 25 bp, Homo sapien
gaaagttctatggaaatccatattt

SEQ ID NO: 2439483 - DNA, 25 bp, Homo sapien
taatgacaggtggtccatttttctg

SEQ ID NO: 2439484 - DNA, 25 bp, Homo sapien
gaagagcagcaggtaaattttggca

SEQ ID NO: 2439485 - DNA, 25 bp, Homo sapien
agtgctcaggaagttggtctcctcc

SEQ ID NO: 2439486 - DNA, 25 bp, Homo sapien
cgctggtagtgaggtcagagcagta

SEQ ID NO: 2439487 - DNA, 25 bp, Homo sapien
tctgggaaggatcaagaagtggttt

SEQ ID NO: 2439488 - DNA, 25 bp, Homo sapien
tggattgggcgctggtagtgaggtc

SEQ ID NO: 2439489 - DNA, 25 bp, Homo sapien
tcttcatacctctgggaaggatcaa

SEQ ID NO: 2439490 - DNA, 25 bp, Homo sapien
gaagtcccctaccatgtcctggatg

SEQ ID NO: 2439491 - DNA, 25 bp, Homo sapien
tcaaacatgggctcaaaattggccc

SEQ ID NO: 2439492 - DNA, 25 bp, Homo sapien
ttttttggccttgcaggaagctcca

SEQ ID NO: 2439493 - DNA, 25 bp, Homo sapien
ggaagctccatttagtctccaggac

SEQ ID NO: 2439494 - DNA, 25 bp, Homo sapien
atccttgtttgacaaaggaggccga

SEQ ID NO: 2439495 - DNA, 25 bp, Homo sapien
tgaaatagcactacaggggttgccg

SEQ ID NO: 2439496 - DNA, 25 bp, Homo sapien
tttgacaaaggaggccgattgagac

SEQ ID NO: 2439497 - DNA, 25 bp, Homo sapien
ggttgccgttaagatccttgtttga

SEQ ID NO: 2439498 - DNA, 25 bp, Homo sapien
actggggccattgtcagaacccgga

SEQ ID NO: 2439499 - DNA, 25 bp, Homo sapien
acatagctagtgagcactggggcca

SEQ ID NO: 2439500 - DNA, 25 bp, Homo sapien
cctgaatcattgcaccccacacagt

SEQ ID NO: 2439501 - DNA, 25 bp, Homo sapien
gccattgtcagaacccggactcctg

SEQ ID NO: 2439502 - DNA, 25 bp, Homo sapien
ctgaggatgtcactgcaaattcctg

SEQ ID NO: 2439503 - DNA, 25 bp, Homo sapien
tcctctcttggtctgaactcgccct

SEQ ID NO: 2439504 - DNA, 25 bp, Homo sapien
tctcttggtctgaactcgccctcac

SEQ ID NO: 2439505 - DNA, 25 bp, Homo sapien
gatgtcactgcaaattcctgtccct

SEQ ID NO: 2439506 - DNA, 25 bp, Homo sapien
tctcccgtccactccaaattttagc

SEQ ID NO: 2439507 - DNA, 25 bp, Homo sapien
cacccggcgtcagtattctggaaca

SEQ ID NO: 2439508 - DNA, 25 bp, Homo sapien
ggagaattgctttgggtcagtcacc

SEQ ID NO: 2439509 - DNA, 25 bp, Homo sapien
gcaattatgggctaaatggctcctc

SEQ ID NO: 2439510 - DNA, 25 bp, Homo sapien
tggtgaaagcgttgctcccagggct

SEQ ID NO: 2439511 - DNA, 25 bp, Homo sapien
ttaatagacacattccagggaggga

SEQ ID NO: 2439512 - DNA, 25 bp, Homo sapien
tagacacattccagggagggaacag

SEQ ID NO: 2439513 - DNA, 25 bp, Homo sapien
catgcatttaatagacacattccag

SEQ ID NO: 2439514 - DNA, 25 bp, Homo sapien
ggtgacacatgcatttaatagacac

SEQ ID NO: 2439515 - DNA, 25 bp, Homo sapien
taaacactatgagacaggtgggtga

SEQ ID NO: 2439516 - DNA, 25 bp, Homo sapien
acaggtgggtgacaacctggcattg

SEQ ID NO: 2439517 - DNA, 25 bp, Homo sapien
tgggtgacaacctggcattgagaga

SEQ ID NO: 2439518 - DNA, 25 bp, Homo sapien
ataaacactatgagacaggtgggtg

SEQ ID NO: 2439519 - DNA, 25 bp, Homo sapien
cacatgtgtaacagacgggtgctgc

SEQ ID NO: 2439520 - DNA, 25 bp, Homo sapien
tccaggtgtgactgcaaacaggcct

SEQ ID NO: 2439521 - DNA, 25 bp, Homo sapien
cccgggcctcgcaagataggctgaa

SEQ ID NO: 2439522 - DNA, 25 bp, Homo sapien
ctgaatgagagccttaggagagagc

SEQ ID NO: 2439523 - DNA, 25 bp, Homo sapien
ccggttgctggtggcactgaatcca

SEQ ID NO: 2439524 - DNA, 25 bp, Homo sapien
agacaaacttgacgctagaaccact

SEQ ID NO: 2439525 - DNA, 25 bp, Homo sapien
tgtggtggagacaaacttgacgcta

SEQ ID NO: 2439526 - DNA, 25 bp, Homo sapien
tggagacaaacttgacgctagaacc

SEQ ID NO: 2439527 - DNA, 25 bp, Homo sapien
tggtggtgaaggagtagccgctgcc

SEQ ID NO: 2439528 - DNA, 25 bp, Homo sapien
cactggtggtgaaggagtagccgct

SEQ ID NO: 2439529 - DNA, 25 bp, Homo sapien
ctggtggtgaaggagtagccgctgc

SEQ ID NO: 2439530 - DNA, 25 bp, Homo sapien
gtggtgaaggagtagccgctgcccc

SEQ ID NO: 2439531 - DNA, 25 bp, Homo sapien
ctggaaagagtagaggtgaccacag

SEQ ID NO: 2439532 - DNA, 25 bp, Homo sapien
tagagggtgagttgtaagagtcatt

SEQ ID NO: 2439533 - DNA, 25 bp, Homo sapien
gccatgccagcttgttaatacctct

SEQ ID NO: 2439534 - DNA, 25 bp, Homo sapien
tgagctctgcgaatgaccacttctt

SEQ ID NO: 2439535 - DNA, 25 bp, Homo sapien
tgttaatacctctcctgttttagag

SEQ ID NO: 2439536 - DNA, 25 bp, Homo sapien
acacactccaaatggcccaagaagt

SEQ ID NO: 2439537 - DNA, 25 bp, Homo sapien
tggcccaagaagtatgtcatactca

SEQ ID NO: 2439538 - DNA, 25 bp, Homo sapien
cacacactccaaatggcccaagaag

SEQ ID NO: 2439539 - DNA, 25 bp, Homo sapien
ggcccaagaagtatgtcatactcac

SEQ ID NO: 2439540 - DNA, 25 bp, Homo sapien
aatgttaactggagaaactccctct

SEQ ID NO: 2439541 - DNA, 25 bp, Homo sapien
atgttaactggagaaactccctctc

SEQ ID NO: 2439542 - DNA, 25 bp, Homo sapien
tcagcaatggccgtttgcaagctgg

SEQ ID NO: 2439543 - DNA, 25 bp, Homo sapien
ttggcccgtgcatccttgagagcca

SEQ ID NO: 2439544 - DNA, 25 bp, Homo sapien
caatggccgtttgcaagctggaaca

SEQ ID NO: 2439545 - DNA, 25 bp, Homo sapien
tcaaggtccaccagcttggcccgtg

SEQ ID NO: 2439546 - DNA, 25 bp, Homo sapien
catttgaggagctcttggccctgcc

SEQ ID NO: 2439547 - DNA, 25 bp, Homo sapien
gaaatgagcatttgaggagctcttg

SEQ ID NO: 2439548 - DNA, 25 bp, Homo sapien
cagcccatggaggtgtggtgcttct

SEQ ID NO: 2439549 - DNA, 25 bp, Homo sapien
gaggaagccatgagtcctgctgaca

SEQ ID NO: 2439550 - DNA, 25 bp, Homo sapien
tcagagatctcttgtttggtgtttc

SEQ ID NO: 2439551 - DNA, 25 bp, Homo sapien
catgcggttcatttcagagatctct

SEQ ID NO: 2439552 - DNA, 25 bp, Homo sapien
tgtttggtgtttcgaaggtcatccc

SEQ ID NO: 2439553 - DNA, 25 bp, Homo sapien
tgcggttcatttcagagatctcttg

SEQ ID NO: 2439554 - DNA, 25 bp, Homo sapien
ggaacctctcatggaggtgtccatg

SEQ ID NO: 2439555 - DNA, 25 bp, Homo sapien
cctggaacctctcatggaggtgtcc

SEQ ID NO: 2439556 - DNA, 25 bp, Homo sapien
gaacctctcatggaggtgtccatgc

SEQ ID NO: 2439557 - DNA, 25 bp, Homo sapien
tggaacctctcatggaggtgtccat

SEQ ID NO: 2439558 - DNA, 25 bp, Homo sapien
gcaatgtcctcgtattgtgctttga

SEQ ID NO: 2439559 - DNA, 25 bp, Homo sapien
caatgtcctcgtattgtgctttgac

SEQ ID NO: 2439560 - DNA, 25 bp, Homo sapien
tatccaggtccaggttgcggttgtt

SEQ ID NO: 2439561 - DNA, 25 bp, Homo sapien
caggtccaggttgcggttgttgtcc

SEQ ID NO: 2439562 - DNA, 25 bp, Homo sapien
tccaggtccaggttgcggttgttgt

SEQ ID NO: 2439563 - DNA, 25 bp, Homo sapien
ccaggtccaggttgcggttgttgtc

SEQ ID NO: 2439564 - DNA, 25 bp, Homo sapien
ggatgtgtcaccgacctgggtctgc

SEQ ID NO: 2439565 - DNA, 25 bp, Homo sapien
atgtgtcaccgacctgggtctgcaa

SEQ ID NO: 2439566 - DNA, 25 bp, Homo sapien
acggatgtgtcaccgacctgggtct

SEQ ID NO: 2439567 - DNA, 25 bp, Homo sapien
cacggatgtgtcaccgacctgggtc

SEQ ID NO: 2439568 - DNA, 25 bp, Homo sapien
cctcgggcagagatttgaccttggc

SEQ ID NO: 2439569 - DNA, 25 bp, Homo sapien
tcgggcagagatttgaccttggctt

SEQ ID NO: 2439570 - DNA, 25 bp, Homo sapien
ggcagagatttgaccttggcttcca

SEQ ID NO: 2439571 - DNA, 25 bp, Homo sapien
tctcctcgggcagagatttgacctt

SEQ ID NO: 2439572 - DNA, 25 bp, Homo sapien
gcaggatgctcctttgagtctgcag

SEQ ID NO: 2439573 - DNA, 25 bp, Homo sapien
cgcaggatgctcctttgagtctgca

SEQ ID NO: 2439574 - DNA, 25 bp, Homo sapien
caggatgctcctttgagtctgcagc

SEQ ID NO: 2439575 - DNA, 25 bp, Homo sapien
ttctcctttgagagaaacatcccca

SEQ ID NO: 2439576 - DNA, 25 bp, Homo sapien
cactccagattccattttaaacctt

SEQ ID NO: 2439577 - DNA, 25 bp, Homo sapien
cccacactccagattccattttaaa

SEQ ID NO: 2439578 - DNA, 25 bp, Homo sapien
cacactccagattccattttaaacc

SEQ ID NO: 2439579 - DNA, 25 bp, Homo sapien
ttttcagggctacaaattcattctc

SEQ ID NO: 2439580 - DNA, 25 bp, Homo sapien
tttttcagggctacaaattcattct

SEQ ID NO: 2439581 - DNA, 25 bp, Homo sapien
tttcagggctacaaattcattctca

SEQ ID NO: 2439582 - DNA, 25 bp, Homo sapien
cgtcggagctcactggtataggaat

SEQ ID NO: 2439583 - DNA, 25 bp, Homo sapien
aaatcttccacaacatcctgcatgt

SEQ ID NO: 2439584 - DNA, 25 bp, Homo sapien
cccctctcggtggtgatgctttcca

SEQ ID NO: 2439585 - DNA, 25 bp, Homo sapien
agttcagcttcaagcctgcccctct

SEQ ID NO: 2439586 - DNA, 25 bp, Homo sapien
gagttagacactcctattaataagg

SEQ ID NO: 2439587 - DNA, 25 bp, Homo sapien
cactcctattaataagggagagaag

SEQ ID NO: 2439588 - DNA, 25 bp, Homo sapien
ggcagagttagacactcctattaat

SEQ ID NO: 2439589 - DNA, 25 bp, Homo sapien
gttagacactcctattaataaggga

SEQ ID NO: 2439590 - DNA, 25 bp, Homo sapien
accaaagccacttcggcagctgctg

SEQ ID NO: 2439591 - DNA, 25 bp, Homo sapien
attgatggagacccgcttggcaccc

SEQ ID NO: 2439592 - DNA, 25 bp, Homo sapien
tccctgctgcagagcgggccacaga

SEQ ID NO: 2439593 - DNA, 25 bp, Homo sapien
tgactccaaacctgttgctggccct

SEQ ID NO: 2439594 - DNA, 25 bp, Homo sapien
aggaaggccggcgagaaggcacctg

SEQ ID NO: 2439595 - DNA, 25 bp, Homo sapien
ggtgaggaaggccggcgagaaggca

SEQ ID NO: 2439596 - DNA, 25 bp, Homo sapien
gaaggccggcgagaaggcacctgag

SEQ ID NO: 2439597 - DNA, 25 bp, Homo sapien
aggccggcgagaaggcacctgaggt

SEQ ID NO: 2439598 - DNA, 25 bp, Homo sapien
cgtccttcgcaggtggtggatccca

SEQ ID NO: 2439599 - DNA, 25 bp, Homo sapien
tggggaatgccccagggagctttgg

SEQ ID NO: 2439600 - DNA, 25 bp, Homo sapien
taacgtccttcgcaggtggtggatc

SEQ ID NO: 2439601 - DNA, 25 bp, Homo sapien
gtccttcgcaggtggtggatcccag

SEQ ID NO: 2439602 - DNA, 25 bp, Homo sapien
tagtttaggcgaggagccagctctg

SEQ ID NO: 2439603 - DNA, 25 bp, Homo sapien
gatgcctagtttaggcgaggagcca

SEQ ID NO: 2439604 - DNA, 25 bp, Homo sapien
ctaaagggcgagcattgcactggct

SEQ ID NO: 2439605 - DNA, 25 bp, Homo sapien
tgatgtcaccgtccagtagatgcct

SEQ ID NO: 2439606 - DNA, 25 bp, Homo sapien
aaagcaaggaaagactggagtggtg

SEQ ID NO: 2439607 - DNA, 25 bp, Homo sapien
gtggggaatgcggtcagtctcatct

SEQ ID NO: 2439608 - DNA, 25 bp, Homo sapien
aatgcggtcagtctcatcttgttca

SEQ ID NO: 2439609 - DNA, 25 bp, Homo sapien
gggaatgcggtcagtctcatcttgt

SEQ ID NO: 2439610 - DNA, 25 bp, Homo sapien
cttttgggacttgaacaacgtggca

SEQ ID NO: 2439611 - DNA, 25 bp, Homo sapien
cttccaccatgcctttgacttcaaa

SEQ ID NO: 2439612 - DNA, 25 bp, Homo sapien
tggcagttcctacgctctgcttcca

SEQ ID NO: 2439613 - DNA, 25 bp, Homo sapien
gaagttgtcctaacagcttttggga

SEQ ID NO: 2439614 - DNA, 25 bp, Homo sapien
gaattatggcagactcagatacctg

SEQ ID NO: 2439615 - DNA, 25 bp, Homo sapien
gcagctggacctagactgagtttca

SEQ ID NO: 2439616 - DNA, 25 bp, Homo sapien
ctcctgagtgtagctataatgggca

SEQ ID NO: 2439617 - DNA, 25 bp, Homo sapien
cgggaactaaaaaggacattcgcat

SEQ ID NO: 2439618 - DNA, 25 bp, Homo sapien
gccaggggaggacaagcaacctgag

SEQ ID NO: 2439619 - DNA, 25 bp, Homo sapien
agggcatcccagctctacccgggag

SEQ ID NO: 2439620 - DNA, 25 bp, Homo sapien
caagcaacctgaggagagggctctg

SEQ ID NO: 2439621 - DNA, 25 bp, Homo sapien
atgagaagaaaagtgagggcatccc

SEQ ID NO: 2439622 - DNA, 25 bp, Homo sapien
tcagtgcttgtagctcttcctgctg

SEQ ID NO: 2439623 - DNA, 25 bp, Homo sapien
ctgctggaggaggaggtggtggtgt

SEQ ID NO: 2439624 - DNA, 25 bp, Homo sapien
gctggaggaggaggtggtggtgtac

SEQ ID NO: 2439625 - DNA, 25 bp, Homo sapien
tcctgctggaggaggaggtggtggt

SEQ ID NO: 2439626 - DNA, 25 bp, Homo sapien
ccgctgctggaactaaagccgcctc

SEQ ID NO: 2439627 - DNA, 25 bp, Homo sapien
tgccgctgctggaactaaagccgcc

SEQ ID NO: 2439628 - DNA, 25 bp, Homo sapien
gctgctggaactaaagccgcctcca

SEQ ID NO: 2439629 - DNA, 25 bp, Homo sapien
gccgctgctggaactaaagccgcct

SEQ ID NO: 2439630 - DNA, 25 bp, Homo sapien
tgacttgtccaacgccttcgccatt

SEQ ID NO: 2439631 - DNA, 25 bp, Homo sapien
agatgttgacttgtccaacgccttc

SEQ ID NO: 2439632 - DNA, 25 bp, Homo sapien
gatgttgacttgtccaacgccttcg

SEQ ID NO: 2439633 - DNA, 25 bp, Homo sapien
tgttgacttgtccaacgccttcgcc

SEQ ID NO: 2439634 - DNA, 25 bp, Homo sapien
gttggaggaagtcgcgtcagttacc

SEQ ID NO: 2439635 - DNA, 25 bp, Homo sapien
tcagctgttggaggaagtcgcgtca

SEQ ID NO: 2439636 - DNA, 25 bp, Homo sapien
ggaggaagtcgcgtcagttacccac

SEQ ID NO: 2439637 - DNA, 25 bp, Homo sapien
ctgttggaggaagtcgcgtcagtta

SEQ ID NO: 2439638 - DNA, 25 bp, Homo sapien
taggtggcgatctccacatccaggg

SEQ ID NO: 2439639 - DNA, 25 bp, Homo sapien
acatccagggccagcttgacgttca

SEQ ID NO: 2439640 - DNA, 25 bp, Homo sapien
gtaggtggcgatctccacatccagg

SEQ ID NO: 2439641 - DNA, 25 bp, Homo sapien
gggccagcttgacgttcatcagctc

SEQ ID NO: 2439642 - DNA, 25 bp, Homo sapien
catcagcaatggcggcctgtaggtt

SEQ ID NO: 2439643 - DNA, 25 bp, Homo sapien
gcatcagcaatggcggcctgtaggt

SEQ ID NO: 2439644 - DNA, 25 bp, Homo sapien
tcagcaatggcggcctgtaggttgg

SEQ ID NO: 2439645 - DNA, 25 bp, Homo sapien
atcagcaatggcggcctgtaggttg

SEQ ID NO: 2439646 - DNA, 25 bp, Homo sapien
ctaaatgatgggtgactactgcctc

SEQ ID NO: 2439647 - DNA, 25 bp, Homo sapien
ggtgtgatccatgtctctgagccag

SEQ ID NO: 2439648 - DNA, 25 bp, Homo sapien
tcactgagcctaggaactgcatgtc

SEQ ID NO: 2439649 - DNA, 25 bp, Homo sapien
tgagccagagtgttctcactgagcc

SEQ ID NO: 2439650 - DNA, 25 bp, Homo sapien
ggatcatgcggttgatctcagcaat

SEQ ID NO: 2439651 - DNA, 25 bp, Homo sapien
ttgacgtggtcgatctcagatctca

SEQ ID NO: 2439652 - DNA, 25 bp, Homo sapien
ttggtgttgcgcaggtcgtccccat

SEQ ID NO: 2439653 - DNA, 25 bp, Homo sapien
cctgcttggtgttgcgcaggtcgtc

SEQ ID NO: 2439654 - DNA, 25 bp, Homo sapien
cagcccagaggtggagagagagaca

SEQ ID NO: 2439655 - DNA, 25 bp, Homo sapien
cagaggtggagagagagacagtgtc

SEQ ID NO: 2439656 - DNA, 25 bp, Homo sapien
ccagaggtggagagagagacagtgt

SEQ ID NO: 2439657 - DNA, 25 bp, Homo sapien
ctgcagcccagaggtggagagagag

SEQ ID NO: 2439658 - DNA, 25 bp, Homo sapien
ctctgagcaatctcctcatattggg

SEQ ID NO: 2439659 - DNA, 25 bp, Homo sapien
ctgtccaggtccaggttgcggttgt

SEQ ID NO: 2439660 - DNA, 25 bp, Homo sapien
caggtccaggttgcggttgttgtcc

SEQ ID NO: 2439661 - DNA, 25 bp, Homo sapien
agcaatctcctcatattgggccttg

SEQ ID NO: 2439662 - DNA, 25 bp, Homo sapien
tgcagaacagaaggtcataagatca

SEQ ID NO: 2439663 - DNA, 25 bp, Homo sapien
gcagaacagaaggtcataagatcaa

SEQ ID NO: 2439664 - DNA, 25 bp, Homo sapien
ctgcagaacagaaggtcataagatc

SEQ ID NO: 2439665 - DNA, 25 bp, Homo sapien
ttcaaccttgttcatgtaggcagca

SEQ ID NO: 2439666 - DNA, 25 bp, Homo sapien
tgcatcatacaaggctctcaggaag

SEQ ID NO: 2439667 - DNA, 25 bp, Homo sapien
cttgcagttcaaccttgttcatgta

SEQ ID NO: 2439668 - DNA, 25 bp, Homo sapien
catcatacaaggctctcaggaagtt

SEQ ID NO: 2439669 - DNA, 25 bp, Homo sapien
gctgctgtgcgcttgttgatttcat

SEQ ID NO: 2439670 - DNA, 25 bp, Homo sapien
tctgctgctgtgcgcttgttgattt

SEQ ID NO: 2439671 - DNA, 25 bp, Homo sapien
tgctgctgtgcgcttgttgatttca

SEQ ID NO: 2439672 - DNA, 25 bp, Homo sapien
ctgctgtgcgcttgttgatttcatc

SEQ ID NO: 2439673 - DNA, 25 bp, Homo sapien
ggtcctgcatgtttctcagctccga

SEQ ID NO: 2439674 - DNA, 25 bp, Homo sapien
cctgcatgtttctcagctccgagtc

SEQ ID NO: 2439675 - DNA, 25 bp, Homo sapien
actgctcgaacaacggctccaggtt

SEQ ID NO: 2439676 - DNA, 25 bp, Homo sapien
tgttgatgtactgctcgaacaacgg

SEQ ID NO: 2439677 - DNA, 25 bp, Homo sapien
tgttctgctgctctaggaaccgcac

SEQ ID NO: 2439678 - DNA, 25 bp, Homo sapien
ccttgttctgctgctctaggaaccg

SEQ ID NO: 2439679 - DNA, 25 bp, Homo sapien
ttggtgtccagaaccttgttctgct

SEQ ID NO: 2439680 - DNA, 25 bp, Homo sapien
tggtgtccagaaccttgttctgctg

SEQ ID NO: 2439681 - DNA, 25 bp, Homo sapien
acggaccactgaggtgttctcgcac

SEQ ID NO: 2439682 - DNA, 25 bp, Homo sapien
tagagaaattgtcccacggaccact

SEQ ID NO: 2439683 - DNA, 25 bp, Homo sapien
cccacggaccactgaggtgttctcg

SEQ ID NO: 2439684 - DNA, 25 bp, Homo sapien
agagaaattgtcccacggaccactg

SEQ ID NO: 2439685 - DNA, 25 bp, Homo sapien
cctcctagggtctctccggcaggaa

SEQ ID NO: 2439686 - DNA, 25 bp, Homo sapien
cctagggtctctccggcaggaaggt

SEQ ID NO: 2439687 - DNA, 25 bp, Homo sapien
tccctcctagggtctctccggcagg

SEQ ID NO: 2439688 - DNA, 25 bp, Homo sapien
tcctagggtctctccggcaggaagg

SEQ ID NO: 2439689 - DNA, 25 bp, Homo sapien
ggtcttgatctgctcacgctcctcg

SEQ ID NO: 2439690 - DNA, 25 bp, Homo sapien
gtcttgatctgctcacgctcctcgg

SEQ ID NO: 2439691 - DNA, 25 bp, Homo sapien
gcggggtcaatttgcaggttgaggg

SEQ ID NO: 2439692 - DNA, 25 bp, Homo sapien
ctggttgacagtgacctcttggatg

SEQ ID NO: 2439693 - DNA, 25 bp, Homo sapien
cgctggatggcggggtcaatttgca

SEQ ID NO: 2439694 - DNA, 25 bp, Homo sapien
tggttgacagtgacctcttggatgc

SEQ ID NO: 2439695 - DNA, 25 bp, Homo sapien
gcccccaaagccaccagcaaggccg

SEQ ID NO: 2439696 - DNA, 25 bp, Homo sapien
agccagggcccccaaagccaccagc

SEQ ID NO: 2439697 - DNA, 25 bp, Homo sapien
cagggcccccaaagccaccagcaag

SEQ ID NO: 2439698 - DNA, 25 bp, Homo sapien
cccccaaagccaccagcaaggccgg

SEQ ID NO: 2439699 - DNA, 25 bp, Homo sapien
tctgctgccatagccgccactgatg

SEQ ID NO: 2439700 - DNA, 25 bp, Homo sapien
tccaccaccgaaaccaaatccactc

SEQ ID NO: 2439701 - DNA, 25 bp, Homo sapien
caggccatacagactgcggctgcca

SEQ ID NO: 2439702 - DNA, 25 bp, Homo sapien
accactgcccctggagcgggacacg

SEQ ID NO: 2439703 - DNA, 25 bp, Homo sapien
ggagaagcaggacgaggaatcggac

SEQ ID NO: 2439704 - DNA, 25 bp, Homo sapien
tgagaggctggaggcgagagggagg

SEQ ID NO: 2439705 - DNA, 25 bp, Homo sapien
gagtgtgagaggctggaggcgagag

SEQ ID NO: 2439706 - DNA, 25 bp, Homo sapien
ggaggagaagcaggacgaggaatcg

SEQ ID NO: 2439707 - DNA, 25 bp, Homo sapien
caaagtgaagctccattggtgaata

SEQ ID NO: 2439708 - DNA, 25 bp, Homo sapien
ggagaaagactgtgtacatcatacg

SEQ ID NO: 2439709 - DNA, 25 bp, Homo sapien
tcttataatgctcagcctcagagag

SEQ ID NO: 2439710 - DNA, 25 bp, Homo sapien
gccccaggcgattttcagtaatgaa

SEQ ID NO: 2439711 - DNA, 25 bp, Homo sapien
tggaactgccgcctccaacagagct

SEQ ID NO: 2439712 - DNA, 25 bp, Homo sapien
ggaactgccgcctccaacagagctg

SEQ ID NO: 2439713 - DNA, 25 bp, Homo sapien
ttgatggtggaactgccgcctccaa

SEQ ID NO: 2439714 - DNA, 25 bp, Homo sapien
gtacttgatggtggaactgccgcct

SEQ ID NO: 2439715 - DNA, 25 bp, Homo sapien
aagaccactgccataggagtagctg

SEQ ID NO: 2439716 - DNA, 25 bp, Homo sapien
taagccactgccgacaccgctggca

SEQ ID NO: 2439717 - DNA, 25 bp, Homo sapien
gccataggagtagctgcttcctcca

SEQ ID NO: 2439718 - DNA, 25 bp, Homo sapien
cactgccataggagtagctgcttcc

SEQ ID NO: 2439719 - DNA, 25 bp, Homo sapien
ttgtccaacgccttcgccattcagc

SEQ ID NO: 2439720 - DNA, 25 bp, Homo sapien
tgacttgtccaacgccttcgccatt

SEQ ID NO: 2439721 - DNA, 25 bp, Homo sapien
cttgtccaacgccttcgccattcag

SEQ ID NO: 2439722 - DNA, 25 bp, Homo sapien
gttgacttgtccaacgccttcgcca

SEQ ID NO: 2439723 - DNA, 25 bp, Homo sapien
ttgagtgccatctccccacgctgct

SEQ ID NO: 2439724 - DNA, 25 bp, Homo sapien
gctcagcatcagcaatggcagcctg

SEQ ID NO: 2439725 - DNA, 25 bp, Homo sapien
acgctgctcagcatcagcaatggca

SEQ ID NO: 2439726 - DNA, 25 bp, Homo sapien
ttcttagcatccttgagtgccatct

SEQ ID NO: 2439727 - DNA, 25 bp, Homo sapien
caatatttgtctagtctgggagtca

SEQ ID NO: 2439728 - DNA, 25 bp, Homo sapien
gcctgatgggtctagcaaaaaatga

SEQ ID NO: 2439729 - DNA, 25 bp, Homo sapien
cttatgggagacactacaatggacc

SEQ ID NO: 2439730 - DNA, 25 bp, Homo sapien
ccttgtattaagcacccgcatgaga

SEQ ID NO: 2439731 - DNA, 25 bp, Homo sapien
ggatcatgcggttgatctcagcaat

SEQ ID NO: 2439732 - DNA, 25 bp, Homo sapien
ctggatcatgcggttgatctcagca

SEQ ID NO: 2439733 - DNA, 25 bp, Homo sapien
cctgcttggtgttgcgcaggtcgtc

SEQ ID NO: 2439734 - DNA, 25 bp, Homo sapien
ttggtgttgcgcaggtcgtccccat

SEQ ID NO: 2439735 - DNA, 25 bp, Homo sapien
ctgtccaggtccaggttgcggttgt

SEQ ID NO: 2439736 - DNA, 25 bp, Homo sapien
tgtccaggtccaggttgcggttgtt

SEQ ID NO: 2439737 - DNA, 25 bp, Homo sapien
caggtccaggttgcggttgttgtcc

SEQ ID NO: 2439738 - DNA, 25 bp, Homo sapien
tccaggtccaggttgcggttgttgt

SEQ ID NO: 2439739 - DNA, 25 bp, Homo sapien
ttacagagatacccaaccctataca

SEQ ID NO: 2439740 - DNA, 25 bp, Homo sapien
tttacagagatacccaaccctatac

SEQ ID NO: 2439741 - DNA, 25 bp, Homo sapien
atttacagagatacccaaccctata

SEQ ID NO: 2439742 - DNA, 25 bp, Homo sapien
tacagagatacccaaccctatacat

SEQ ID NO: 2439743 - DNA, 25 bp, Homo sapien
ttcaaccttgttcatgtaggcagca

SEQ ID NO: 2439744 - DNA, 25 bp, Homo sapien
cttgcagttcaaccttgttcatgta

SEQ ID NO: 2439745 - DNA, 25 bp, Homo sapien
tgcatcatacaaggctctcaggaag

SEQ ID NO: 2439746 - DNA, 25 bp, Homo sapien
catcatacaaggctctcaggaagtt

SEQ ID NO: 2439747 - DNA, 25 bp, Homo sapien
tctgctgctgtgcgcttgttgattt

SEQ ID NO: 2439748 - DNA, 25 bp, Homo sapien
gctgctgtgcgcttgttgatttcat

SEQ ID NO: 2439749 - DNA, 25 bp, Homo sapien
tgctgctgtgcgcttgttgatttca

SEQ ID NO: 2439750 - DNA, 25 bp, Homo sapien
ctgctgtgcgcttgttgatttcatc

SEQ ID NO: 2439751 - DNA, 25 bp, Homo sapien
ggtcctgcatgtttctcagctccga

SEQ ID NO: 2439752 - DNA, 25 bp, Homo sapien
tcctgcatgtttctcagctccgagt

SEQ ID NO: 2439753 - DNA, 25 bp, Homo sapien
cctgcatgtttctcagctccgagtc

SEQ ID NO: 2439754 - DNA, 25 bp, Homo sapien
gtcctgcatgtttctcagctccgag

SEQ ID NO: 2439755 - DNA, 25 bp, Homo sapien
acggctccaggttctgcctcacagt

SEQ ID NO: 2439756 - DNA, 25 bp, Homo sapien
aacggctccaggttctgcctcacag

SEQ ID NO: 2439757 - DNA, 25 bp, Homo sapien
agggtccacttggtgtccagaacct

SEQ ID NO: 2439758 - DNA, 25 bp, Homo sapien
gtccacttggtgtccagaaccttgt

SEQ ID NO: 2439759 - DNA, 25 bp, Homo sapien
cctgcagcagggtccacttggtgtc

SEQ ID NO: 2439760 - DNA, 25 bp, Homo sapien
cagcagggtccacttggtgtccaga

SEQ ID NO: 2439761 - DNA, 25 bp, Homo sapien
ctcaaatattctgatgttatggtca

SEQ ID NO: 2439762 - DNA, 25 bp, Homo sapien
ttcccatttagtgtctcctctcaaa

SEQ ID NO: 2439763 - DNA, 25 bp, Homo sapien
tactgataggatcttagttaggaga

SEQ ID NO: 2439764 - DNA, 25 bp, Homo sapien
gattacatttcagtctactttccca

SEQ ID NO: 2439765 - DNA, 25 bp, Homo sapien
gggaccctgaagtgcccgatggagg

SEQ ID NO: 2439766 - DNA, 25 bp, Homo sapien
cctgaagtgcccgatggagggcatg

SEQ ID NO: 2439767 - DNA, 25 bp, Homo sapien
gtgcccgatggagggcatggcactg

SEQ ID NO: 2439768 - DNA, 25 bp, Homo sapien
aagtgcccgatggagggcatggcac

SEQ ID NO: 2439769 - DNA, 25 bp, Homo sapien
gtcttgatctgctcacgctcctcgg

SEQ ID NO: 2439770 - DNA, 25 bp, Homo sapien
ggtcttgatctgctcacgctcctcg

SEQ ID NO: 2439771 - DNA, 25 bp, Homo sapien
ttggatgcctccaggggggcacaca

SEQ ID NO: 2439772 - DNA, 25 bp, Homo sapien
gatggcggggtcaatttgcaggttg

SEQ ID NO: 2439773 - DNA, 25 bp, Homo sapien
cccaaagccaccagcaaggccggct

SEQ ID NO: 2439774 - DNA, 25 bp, Homo sapien
gttgacggtgacctcttggatgcct

SEQ ID NO: 2439775 - DNA, 25 bp, Homo sapien
tccaccaccgaaaccaaatccactc

SEQ ID NO: 2439776 - DNA, 25 bp, Homo sapien
tctgctgccatagccgccactgatg

SEQ ID NO: 2439777 - DNA, 25 bp, Homo sapien
caggccatacagactgcggctgcca

SEQ ID NO: 2439778 - DNA, 25 bp, Homo sapien
accactgcccctggagcgggacacg

SEQ ID NO: 2439779 - DNA, 25 bp, Homo sapien
gttggcactgaaaccccggcggctg

SEQ ID NO: 2439780 - DNA, 25 bp, Homo sapien
gcctggctgagttggcactgaaacc

SEQ ID NO: 2439781 - DNA, 25 bp, Homo sapien
cctgatggtggtggatgtgctggcc

SEQ ID NO: 2439782 - DNA, 25 bp, Homo sapien
ctgaagccagagcggctgaccccag

SEQ ID NO: 2439783 - DNA, 25 bp, Homo sapien
ttggagatgaacacagttggatgcc

SEQ ID NO: 2439784 - DNA, 25 bp, Homo sapien
gtgccaatgtgagaaacttcccata

SEQ ID NO: 2439785 - DNA, 25 bp, Homo sapien
tttctgctgtcaggaaagttctggg

SEQ ID NO: 2439786 - DNA, 25 bp, Homo sapien
gttggatgccaatacagcaggatcc

SEQ ID NO: 2439787 - DNA, 25 bp, Homo sapien
actgtgggaccgagagctagcagac

SEQ ID NO: 2439788 - DNA, 25 bp, Homo sapien
taatttagtaacagtgaagctccag

SEQ ID NO: 2439789 - DNA, 25 bp, Homo sapien
ttagcaattgcaaacagcgaagagc

SEQ ID NO: 2439790 - DNA, 25 bp, Homo sapien
tgtgctttcatggatactgcctggg

SEQ ID NO: 2439791 - DNA, 25 bp, Homo sapien
ttagtgcttatagctcttcctgctg

SEQ ID NO: 2439792 - DNA, 25 bp, Homo sapien
gtgtacttgatggtggaactgccgc

SEQ ID NO: 2439793 - DNA, 25 bp, Homo sapien
gtggtggtgtacttgatggtggaac

SEQ ID NO: 2439794 - DNA, 25 bp, Homo sapien
aggaggtggtggtgtacttgatggt

SEQ ID NO: 2439795 - DNA, 25 bp, Homo sapien
gaggccacccccaatggctctgcca

SEQ ID NO: 2439796 - DNA, 25 bp, Homo sapien
tgaggccacccccaatggctctgcc

SEQ ID NO: 2439797 - DNA, 25 bp, Homo sapien
aagaccactgccataggagtagctg

SEQ ID NO: 2439798 - DNA, 25 bp, Homo sapien
gccataggagtagctgcttcctcca

SEQ ID NO: 2439799 - DNA, 25 bp, Homo sapien
ccatagccactggagacggtggact

SEQ ID NO: 2439800 - DNA, 25 bp, Homo sapien
cactgccataggagtagctgcttcc

SEQ ID NO: 2439801 - DNA, 25 bp, Homo sapien
caagaagccatggtgagctcatcct

SEQ ID NO: 2439802 - DNA, 25 bp, Homo sapien
cacaagaagccatggtgagctcatc

SEQ ID NO: 2439803 - DNA, 25 bp, Homo sapien
gaagccatggtgagctcatcctgtc

SEQ ID NO: 2439804 - DNA, 25 bp, Homo sapien
aagaagccatggtgagctcatcctg

SEQ ID NO: 2439805 - DNA, 25 bp, Homo sapien
tgacttgtccaacgccttcgccatt

SEQ ID NO: 2439806 - DNA, 25 bp, Homo sapien
agatgttgacttgtccaacgccttc

SEQ ID NO: 2439807 - DNA, 25 bp, Homo sapien
tgttgacttgtccaacgccttcgcc

SEQ ID NO: 2439808 - DNA, 25 bp, Homo sapien
gatgttgacttgtccaacgccttcg

SEQ ID NO: 2439809 - DNA, 25 bp, Homo sapien
tgtggagaggaacacagggagggtg

SEQ ID NO: 2439810 - DNA, 25 bp, Homo sapien
ctgtggagaggaacacagggagggt

SEQ ID NO: 2439811 - DNA, 25 bp, Homo sapien
gaggaacacagggagggtgagacct

SEQ ID NO: 2439812 - DNA, 25 bp, Homo sapien
ggagaggaacacagggagggtgaga

SEQ ID NO: 2439813 - DNA, 25 bp, Homo sapien
gttgaaggagttcgtgtcagttacc

SEQ ID NO: 2439814 - DNA, 25 bp, Homo sapien
agctgttgaaggagttcgtgtcagt

SEQ ID NO: 2439815 - DNA, 25 bp, Homo sapien
gaaggagttcgtgtcagttacccac

SEQ ID NO: 2439816 - DNA, 25 bp, Homo sapien
ctgttgaaggagttcgtgtcagtta

SEQ ID NO: 2439817 - DNA, 25 bp, Homo sapien
agcatcagcaatggcggcctgcagg

SEQ ID NO: 2439818 - DNA, 25 bp, Homo sapien
ttgagggccatctccccacgctgct

SEQ ID NO: 2439819 - DNA, 25 bp, Homo sapien
gctcagcatcagcaatggcggcctg

SEQ ID NO: 2439820 - DNA, 25 bp, Homo sapien
ttcttggcatccttgagggccatct

SEQ ID NO: 2439821 - DNA, 25 bp, Homo sapien
ggctgcctgacgacctgacaaggaa

SEQ ID NO: 2439822 - DNA, 25 bp, Homo sapien
ggatctatgtctcctaagcagcagg

SEQ ID NO: 2439823 - DNA, 25 bp, Homo sapien
cctaatataatggttgatggctgcc

SEQ ID NO: 2439824 - DNA, 25 bp, Homo sapien
gcagctctgagcatcgtgactggtt

SEQ ID NO: 2439825 - DNA, 25 bp, Homo sapien
ggatcatgcggttgatctcagcaat

SEQ ID NO: 2439826 - DNA, 25 bp, Homo sapien
cctgcttggtgttgcgcaggtcgtc

SEQ ID NO: 2439827 - DNA, 25 bp, Homo sapien
ttgacgtggtcgatctcagatctca

SEQ ID NO: 2439828 - DNA, 25 bp, Homo sapien
ttggtgttgcgcaggtcgtccccat

SEQ ID NO: 2439829 - DNA, 25 bp, Homo sapien
catgtcatgaagtggacctaaaggc

SEQ ID NO: 2439830 - DNA, 25 bp, Homo sapien
taaaggcttctcctcaagaaacttg

SEQ ID NO: 2439831 - DNA, 25 bp, Homo sapien
tcttacctgggagcgatgactttca

SEQ ID NO: 2439832 - DNA, 25 bp, Homo sapien
tggttggtggatactaaacactgga

SEQ ID NO: 2439833 - DNA, 25 bp, Homo sapien
cctctggtattcagggatggcacag

SEQ ID NO: 2439834 - DNA, 25 bp, Homo sapien
gggcataagttctgcaaatgtctac

SEQ ID NO: 2439835 - DNA, 25 bp, Homo sapien
gctaaatgcagagatgactatgtcc

SEQ ID NO: 2439836 - DNA, 25 bp, Homo sapien
ctctaatagtgcagagtgcatgtcc

SEQ ID NO: 2439837 - DNA, 25 bp, Homo sapien
ctctgagcaatctcctcatattggg

SEQ ID NO: 2439838 - DNA, 25 bp, Homo sapien
ctgtccaggtccaggttgcggttgt

SEQ ID NO: 2439839 - DNA, 25 bp, Homo sapien
agcaatctcctcatattgggccttg

SEQ ID NO: 2439840 - DNA, 25 bp, Homo sapien
caggtccaggttgcggttgttgtcc

SEQ ID NO: 2439841 - DNA, 25 bp, Homo sapien
taagatcaacttcacttccgatatt

SEQ ID NO: 2439842 - DNA, 25 bp, Homo sapien
ataagatcaacttcacttccgatat

SEQ ID NO: 2439843 - DNA, 25 bp, Homo sapien
caacttcacttccgatatttacaga

SEQ ID NO: 2439844 - DNA, 25 bp, Homo sapien
cacttccgatatttacagagatacc

SEQ ID NO: 2439845 - DNA, 25 bp, Homo sapien
tgcatcatacaaggctctcaggaag

SEQ ID NO: 2439846 - DNA, 25 bp, Homo sapien
ttcaaccttgttcatgtaggcagca

SEQ ID NO: 2439847 - DNA, 25 bp, Homo sapien
cttgcagttcaaccttgttcatgta

SEQ ID NO: 2439848 - DNA, 25 bp, Homo sapien
catcatacaaggctctcaggaagtt

SEQ ID NO: 2439849 - DNA, 25 bp, Homo sapien
aatgaatttgaacccccggcttcat

SEQ ID NO: 2439850 - DNA, 25 bp, Homo sapien
caacctggagttacctgagctcacc

SEQ ID NO: 2439851 - DNA, 25 bp, Homo sapien
tcacctttccaatctacccatcttc

SEQ ID NO: 2439852 - DNA, 25 bp, Homo sapien
tagtctccatgccaattctcctctc

SEQ ID NO: 2439853 - DNA, 25 bp, Homo sapien
gctgctgtgcgcttgttgatttcat

SEQ ID NO: 2439854 - DNA, 25 bp, Homo sapien
tctgctgctgtgcgcttgttgattt

SEQ ID NO: 2439855 - DNA, 25 bp, Homo sapien
tgctgctgtgcgcttgttgatttca

SEQ ID NO: 2439856 - DNA, 25 bp, Homo sapien
ctgctgtgcgcttgttgatttcatc

SEQ ID NO: 2439857 - DNA, 25 bp, Homo sapien
tgtgtgctgcaggaaactgagtcca

SEQ ID NO: 2439858 - DNA, 25 bp, Homo sapien
tcttcatttccacggacatgggttg

SEQ ID NO: 2439859 - DNA, 25 bp, Homo sapien
tatattctaattgggctttcctgcc

SEQ ID NO: 2439860 - DNA, 25 bp, Homo sapien
tgcaggtttgctcctagggactaat

SEQ ID NO: 2439861 - DNA, 25 bp, Homo sapien
cctcctgaggttgttgatgtactgc

SEQ ID NO: 2439862 - DNA, 25 bp, Homo sapien
gttccccgacaatgctgtccagctg

SEQ ID NO: 2439863 - DNA, 25 bp, Homo sapien
accaggtcctgcatgcctctgagct

SEQ ID NO: 2439864 - DNA, 25 bp, Homo sapien
caggcggccccgttccccgacaatg

SEQ ID NO: 2439865 - DNA, 25 bp, Homo sapien
caggttctgcctcacagtcttggtg

SEQ ID NO: 2439866 - DNA, 25 bp, Homo sapien
cctgcagcagggtccactttgtttc

SEQ ID NO: 2439867 - DNA, 25 bp, Homo sapien
tgcctcacagtcttggtgccctgct

SEQ ID NO: 2439868 - DNA, 25 bp, Homo sapien
agcagggtccactttgtttccagaa

SEQ ID NO: 2439869 - DNA, 25 bp, Homo sapien
aagttatggttctccctaggcagga

SEQ ID NO: 2439870 - DNA, 25 bp, Homo sapien
tatgaaaagttatggttctccctag

SEQ ID NO: 2439871 - DNA, 25 bp, Homo sapien
aggagtgagggccactccagagatc

SEQ ID NO: 2439872 - DNA, 25 bp, Homo sapien
tatggttctccctaggcaggagtga

SEQ ID NO: 2439873 - DNA, 25 bp, Homo sapien
tcttgatctgttcacgctcctcagc

SEQ ID NO: 2439874 - DNA, 25 bp, Homo sapien
ggtcttgatctgttcacgctcctca

SEQ ID NO: 2439875 - DNA, 25 bp, Homo sapien
gggtcttgatctgttcacgctcctc

SEQ ID NO: 2439876 - DNA, 25 bp, Homo sapien
gagggtcttgatctgttcacgctcc

SEQ ID NO: 2439877 - DNA, 25 bp, Homo sapien
ggagactctggttgacggtgacctc

SEQ ID NO: 2439878 - DNA, 25 bp, Homo sapien
gtgggatcgatttgcaggttgaggg

SEQ ID NO: 2439879 - DNA, 25 bp, Homo sapien
tggttgacggtgacctcttggatgc

SEQ ID NO: 2439880 - DNA, 25 bp, Homo sapien
ccgctggatggtgggatcgatttgc

SEQ ID NO: 2439881 - DNA, 25 bp, Homo sapien
tctgctgccatagccgccactgatg

SEQ ID NO: 2439882 - DNA, 25 bp, Homo sapien
aaagccaccagcaaggccggctcca

SEQ ID NO: 2439883 - DNA, 25 bp, Homo sapien
caggccatacagactgcggctgcca

SEQ ID NO: 2439884 - DNA, 25 bp, Homo sapien
accactgcccctggagcgggacacg

SEQ ID NO: 2439885 - DNA, 25 bp, Homo sapien
gttggcactgaaaccccggcggctg

SEQ ID NO: 2439886 - DNA, 25 bp, Homo sapien
gcctggctgagttggcactgaaacc

SEQ ID NO: 2439887 - DNA, 25 bp, Homo sapien
cctgatggtggtggatgtgctggcc

SEQ ID NO: 2439888 - DNA, 25 bp, Homo sapien
ctgaagccagagcggctgaccccag

SEQ ID NO: 2439889 - DNA, 25 bp, Homo sapien
cgtatgggcatttgcccgatggcct

SEQ ID NO: 2439890 - DNA, 25 bp, Homo sapien
caagaagtagcctgttgtgtttttt

SEQ ID NO: 2439891 - DNA, 25 bp, Homo sapien
ctggctgtcctcccttgtgtcctgg

SEQ ID NO: 2439892 - DNA, 25 bp, Homo sapien
ggcctgagcaagaagtagcctgttg

SEQ ID NO: 2439893 - DNA, 25 bp, Homo sapien
aagtaggtgcacttggatgtttaca

SEQ ID NO: 2439894 - DNA, 25 bp, Homo sapien
gtaggtgcacttggatgtttacatc

SEQ ID NO: 2439895 - DNA, 25 bp, Homo sapien
agtaggtgcacttggatgtttacat

SEQ ID NO: 2439896 - DNA, 25 bp, Homo sapien
catcactggaaagcgcacaactggg

SEQ ID NO: 2439897 - DNA, 25 bp, Homo sapien
gggacaacctttggctttcctgatc

SEQ ID NO: 2439898 - DNA, 25 bp, Homo sapien
tggctttcctgatccgtgtggggac

SEQ ID NO: 2439899 - DNA, 25 bp, Homo sapien
ggctttcctgatccgtgtggggaca

SEQ ID NO: 2439900 - DNA, 25 bp, Homo sapien
gatgcagtctgcatttctgcactgc

SEQ ID NO: 2439901 - DNA, 25 bp, Homo sapien
ttctgcactgcttttctttgctctc

SEQ ID NO: 2439902 - DNA, 25 bp, Homo sapien
cttctgatgcagtctgcatttctgc

SEQ ID NO: 2439903 - DNA, 25 bp, Homo sapien
cagtctgcatttctgcactgctttt

SEQ ID NO: 2439904 - DNA, 25 bp, Homo sapien
aggacactctgggtggacgatcacc

SEQ ID NO: 2439905 - DNA, 25 bp, Homo sapien
ggtggacgatcaccaatgttgtata

SEQ ID NO: 2439906 - DNA, 25 bp, Homo sapien
cacaccctactctgtcagtcagtga

SEQ ID NO: 2439907 - DNA, 25 bp, Homo sapien
caccctactctgtcagtcagtgatt

SEQ ID NO: 2439908 - DNA, 25 bp, Homo sapien
gatacctcgccagcctcgagtaaag

SEQ ID NO: 2439909 - DNA, 25 bp, Homo sapien
ggacagcaggctactggcaggatac

SEQ ID NO: 2439910 - DNA, 25 bp, Homo sapien
gcctcgagtaaaggccagaccctta

SEQ ID NO: 2439911 - DNA, 25 bp, Homo sapien
tgttaggacaagttcccggtgtgcc

SEQ ID NO: 2439912 - DNA, 25 bp, Homo sapien
cagaatatagaactgcggcacggga

SEQ ID NO: 2439913 - DNA, 25 bp, Homo sapien
aactttgggttctcgtgtcagcagg

SEQ ID NO: 2439914 - DNA, 25 bp, Homo sapien
tctcctgggaaccaaagaatgtggt

SEQ ID NO: 2439915 - DNA, 25 bp, Homo sapien
ggtctagactactctccagaaaagg

SEQ ID NO: 2439916 - DNA, 25 bp, Homo sapien
gcttccactgctacctccggcaaga

SEQ ID NO: 2439917 - DNA, 25 bp, Homo sapien
acactgagcccaccacctaggccga

SEQ ID NO: 2439918 - DNA, 25 bp, Homo sapien
cactgctgctggagtagtagcttcc

SEQ ID NO: 2439919 - DNA, 25 bp, Homo sapien
gtggagacaaatttgacgctggagc

SEQ ID NO: 2439920 - DNA, 25 bp, Homo sapien
tccaccgaggccgccgccaagacct

SEQ ID NO: 2439921 - DNA, 25 bp, Homo sapien
gaggaaacactgcttgtgacaacag

SEQ ID NO: 2439922 - DNA, 25 bp, Homo sapien
gacctccaccgaggccaccgccata

SEQ ID NO: 2439923 - DNA, 25 bp, Homo sapien
actgccactgccatatccagaggaa

SEQ ID NO: 2439924 - DNA, 25 bp, Homo sapien
gtgttggagcactctactggacccc

SEQ ID NO: 2439925 - DNA, 25 bp, Homo sapien
ttacagagtagcaaacaaggcccgg

SEQ ID NO: 2439926 - DNA, 25 bp, Homo sapien
tctgagttggcactaaatatatccc

SEQ ID NO: 2439927 - DNA, 25 bp, Homo sapien
ggatgcatggcttaccctttaagag

SEQ ID NO: 2439928 - DNA, 25 bp, Homo sapien
tgactggtccaactccttctccact

SEQ ID NO: 2439929 - DNA, 25 bp, Homo sapien
tggtccaactccttctccactgagt

SEQ ID NO: 2439930 - DNA, 25 bp, Homo sapien
agatgttgactggtccaactccttc

SEQ ID NO: 2439931 - DNA, 25 bp, Homo sapien
gactggtccaactccttctccactg

SEQ ID NO: 2439932 - DNA, 25 bp, Homo sapien
tagtctatgtggctaactcccatcc

SEQ ID NO: 2439933 - DNA, 25 bp, Homo sapien
tgaattaagggttaacagctcccaa

SEQ ID NO: 2439934 - DNA, 25 bp, Homo sapien
ttttccaatgaagagggattgacct

SEQ ID NO: 2439935 - DNA, 25 bp, Homo sapien
taagccaggagtctgtacacccaaa

SEQ ID NO: 2439936 - DNA, 25 bp, Homo sapien
gattatgtcgaaagcagtttttgcc

SEQ ID NO: 2439937 - DNA, 25 bp, Homo sapien
gctggagtaaacatgaaagccttcc

SEQ ID NO: 2439938 - DNA, 25 bp, Homo sapien
tcctccaacagaaagtaggcaatgg

SEQ ID NO: 2439939 - DNA, 25 bp, Homo sapien
gaacttggcacggacagaaattcct

SEQ ID NO: 2439940 - DNA, 25 bp, Homo sapien
tgagcaaaggacgtgagcaaaagca

SEQ ID NO: 2439941 - DNA, 25 bp, Homo sapien
gctttatcagctgaaggccatcttg

SEQ ID NO: 2439942 - DNA, 25 bp, Homo sapien
gagttgaggtcagctatatggccat

SEQ ID NO: 2439943 - DNA, 25 bp, Homo sapien
catgacatggatattgaggttgagc

SEQ ID NO: 2439944 - DNA, 25 bp, Homo sapien
tccgcaatggcgttctgcagattgg

SEQ ID NO: 2439945 - DNA, 25 bp, Homo sapien
ggcatccgcaatggcgttctgcaga

SEQ ID NO: 2439946 - DNA, 25 bp, Homo sapien
caatggcgttctgcagattggcgca

SEQ ID NO: 2439947 - DNA, 25 bp, Homo sapien
gctcggcatccgcaatggcgttctg

SEQ ID NO: 2439948 - DNA, 25 bp, Homo sapien
tctagctgcgtgtgtttagcaaaag

SEQ ID NO: 2439949 - DNA, 25 bp, Homo sapien
ctgagtttctgggtcagacaaacca

SEQ ID NO: 2439950 - DNA, 25 bp, Homo sapien
ccagtacatcgtgggtggcaggaca

SEQ ID NO: 2439951 - DNA, 25 bp, Homo sapien
aacactggtactggatctagctgcg

SEQ ID NO: 2439952 - DNA, 25 bp, Homo sapien
tcttgacattgtcaatctcggctct

SEQ ID NO: 2439953 - DNA, 25 bp, Homo sapien
agagatctcatgcttggtgttgcgg

SEQ ID NO: 2439954 - DNA, 25 bp, Homo sapien
gaggtcatcgccatgccggccagct

SEQ ID NO: 2439955 - DNA, 25 bp, Homo sapien
cattgtcaatctcggctctcagcct

SEQ ID NO: 2439956 - DNA, 25 bp, Homo sapien
tccaaggctgagctagtctagtgcc

SEQ ID NO: 2439957 - DNA, 25 bp, Homo sapien
cctagaatcctagacatgggtgtgt

SEQ ID NO: 2439958 - DNA, 25 bp, Homo sapien
tccaggagccccattcttagtgtcg

SEQ ID NO: 2439959 - DNA, 25 bp, Homo sapien
ttagtgtcgtcatggcctagaatcc

SEQ ID NO: 2439960 - DNA, 25 bp, Homo sapien
tgtcagagacatgcgtctgcatctg

SEQ ID NO: 2439961 - DNA, 25 bp, Homo sapien
tgataccaggactcggcttctgtcc

SEQ ID NO: 2439962 - DNA, 25 bp, Homo sapien
cttggtctgataccaggactcggct

SEQ ID NO: 2439963 - DNA, 25 bp, Homo sapien
cactgaggtgtcagagacatgcgtc

SEQ ID NO: 2439964 - DNA, 25 bp, Homo sapien
gatttggagtcggtcatctggttct

SEQ ID NO: 2439965 - DNA, 25 bp, Homo sapien
ggagatttggagtcggtcatctggt

SEQ ID NO: 2439966 - DNA, 25 bp, Homo sapien
cagggagatttggagtcggtcatct

SEQ ID NO: 2439967 - DNA, 25 bp, Homo sapien
atttggagtcggtcatctggttctg

SEQ ID NO: 2439968 - DNA, 25 bp, Homo sapien
ccatgtgaaaaatttagataagttt

SEQ ID NO: 2439969 - DNA, 25 bp, Homo sapien
catgtgaaaaatttagataagtttc

SEQ ID NO: 2439970 - DNA, 25 bp, Homo sapien
taatctcatccatcagtgcatcaac

SEQ ID NO: 2439971 - DNA, 25 bp, Homo sapien
atccatcagtgcatcaaccttggcc

SEQ ID NO: 2439972 - DNA, 25 bp, Homo sapien
agttaatctcatccatcagtgcatc

SEQ ID NO: 2439973 - DNA, 25 bp, Homo sapien
tctcatccatcagtgcatcaacctt

SEQ ID NO: 2439974 - DNA, 25 bp, Homo sapien
cttagagagcatagctgcaggctgc

SEQ ID NO: 2439975 - DNA, 25 bp, Homo sapien
cctactcaagtgagctccacgctta

SEQ ID NO: 2439976 - DNA, 25 bp, Homo sapien
cacaccgtcaccctactcaagtgag

SEQ ID NO: 2439977 - DNA, 25 bp, Homo sapien
tgagctccacgcttagagagcatag

SEQ ID NO: 2439978 - DNA, 25 bp, Homo sapien
ctcattctcagcagtggtacgcttg

SEQ ID NO: 2439979 - DNA, 25 bp, Homo sapien
attctcagcagtggtacgcttgttg

SEQ ID NO: 2439980 - DNA, 25 bp, Homo sapien
agcagtggtacgcttgttgatttca

SEQ ID NO: 2439981 - DNA, 25 bp, Homo sapien
ctcagcagtggtacgcttgttgatt

SEQ ID NO: 2439982 - DNA, 25 bp, Homo sapien
tagtcaatttctctagtgttctttt

SEQ ID NO: 2439983 - DNA, 25 bp, Homo sapien
ctagtcaatttctctagtgttcttt

SEQ ID NO: 2439984 - DNA, 25 bp, Homo sapien
tgttgatgtactgctcgaacaacgg

SEQ ID NO: 2439985 - DNA, 25 bp, Homo sapien
actgctcgaacaacggctccaggtt

SEQ ID NO: 2439986 - DNA, 25 bp, Homo sapien
tgtactgctcgaacaacggctccag

SEQ ID NO: 2439987 - DNA, 25 bp, Homo sapien
gatgtactgctcgaacaacggctcc

SEQ ID NO: 2439988 - DNA, 25 bp, Homo sapien
cacctctttccgtccctctaaagct

SEQ ID NO: 2439989 - DNA, 25 bp, Homo sapien
tttcatgttctatgatcaactcact

SEQ ID NO: 2439990 - DNA, 25 bp, Homo sapien
gatcaactcactaaggtgcctccca

SEQ ID NO: 2439991 - DNA, 25 bp, Homo sapien
tgttctatgatcaactcactaaggt

SEQ ID NO: 2439992 - DNA, 25 bp, Homo sapien
cttcccagctgccagtctaattcag

SEQ ID NO: 2439993 - DNA, 25 bp, Homo sapien
gctgccagtctaattcagaacgtgt

SEQ ID NO: 2439994 - DNA, 25 bp, Homo sapien
cagctgccagtctaattcagaacgt

SEQ ID NO: 2439995 - DNA, 25 bp, Homo sapien
ccagtctaattcagaacgtgtccac

SEQ ID NO: 2439996 - DNA, 25 bp, Homo sapien
tcgcgctcctcggtcctcaccctct

SEQ ID NO: 2439997 - DNA, 25 bp, Homo sapien
cggtcctcaccctctggatgctggg

SEQ ID NO: 2439998 - DNA, 25 bp, Homo sapien
tcttgatctgctcgcgctcctcggt

SEQ ID NO: 2439999 - DNA, 25 bp, Homo sapien
gatgctggggtcgatttgcaggttg

SEQ ID NO: 2440000 - DNA, 25 bp, Homo sapien
accaccagctccaccgccgaaacca

SEQ ID NO: 2440001 - DNA, 25 bp, Homo sapien
ccaaatccactaccggcaccacctc

SEQ ID NO: 2440002 - DNA, 25 bp, Homo sapien
caccagctccaccgccgaaaccaaa

SEQ ID NO: 2440003 - DNA, 25 bp, Homo sapien
gccgaaaccaaatccactaccggca

SEQ ID NO: 2440004 - DNA, 25 bp, Homo sapien
accagcaccaaaccggttcctgaag

SEQ ID NO: 2440005 - DNA, 25 bp, Homo sapien
gcaccagcaccaaaccggttcctga

SEQ ID NO: 2440006 - DNA, 25 bp, Homo sapien
agcaccaaaccggttcctgaagctg

SEQ ID NO: 2440007 - DNA, 25 bp, Homo sapien
caccaaaccggttcctgaagctgcc

SEQ ID NO: 2440008 - DNA, 25 bp, Homo sapien
gctgatggatatcctcttggagccc

SEQ ID NO: 2440009 - DNA, 25 bp, Homo sapien
gtgctgatggatatcctcttggagc

SEQ ID NO: 2440010 - DNA, 25 bp, Homo sapien
cactagtgctgatggatatcctctt

SEQ ID NO: 2440011 - DNA, 25 bp, Homo sapien
tagtgctgatggatatcctcttgga

SEQ ID NO: 2440012 - DNA, 25 bp, Homo sapien
cccaggttgtagaggctccggctgc

SEQ ID NO: 2440013 - DNA, 25 bp, Homo sapien
ggctccggctgccatagccacccac

SEQ ID NO: 2440014 - DNA, 25 bp, Homo sapien
ggctgccatagccacccactccaca

SEQ ID NO: 2440015 - DNA, 25 bp, Homo sapien
tccggctgccatagccacccactcc

SEQ ID NO: 2440016 - DNA, 25 bp, Homo sapien
ccgcaaggctgaccctgccgaagcc

SEQ ID NO: 2440017 - DNA, 25 bp, Homo sapien
aaggctgaccctgccgaagccacca

SEQ ID NO: 2440018 - DNA, 25 bp, Homo sapien
cgcaaggctgaccctgccgaagcca

SEQ ID NO: 2440019 - DNA, 25 bp, Homo sapien
gcaaggctgaccctgccgaagccac

SEQ ID NO: 2440020 - DNA, 25 bp, Homo sapien
gcggtgctgaagctacgactgcccc

SEQ ID NO: 2440021 - DNA, 25 bp, Homo sapien
ctggtgcgggagacagacggggtga

SEQ ID NO: 2440022 - DNA, 25 bp, Homo sapien
aggcggtgctgaagctacgactgcc

SEQ ID NO: 2440023 - DNA, 25 bp, Homo sapien
ccccgctccggaaggacacacttga

SEQ ID NO: 2440024 - DNA, 25 bp, Homo sapien
tgttacccaggaacggtgatgcccc

SEQ ID NO: 2440025 - DNA, 25 bp, Homo sapien
aggcactagtgggttgggaggtgct

SEQ ID NO: 2440026 - DNA, 25 bp, Homo sapien
ctgggcgagagagctgtcgagctgt

SEQ ID NO: 2440027 - DNA, 25 bp, Homo sapien
tgggctgggcgagagagctgtcgag

SEQ ID NO: 2440028 - DNA, 25 bp, Homo sapien
caggctctgctcagttagaaataac

SEQ ID NO: 2440029 - DNA, 25 bp, Homo sapien
gccttgcagcactgatctcttggca

SEQ ID NO: 2440030 - DNA, 25 bp, Homo sapien
cagcaagttggtgacgctgctagca

SEQ ID NO: 2440031 - DNA, 25 bp, Homo sapien
gtatgtcttcaccatagaggctggg

SEQ ID NO: 2440032 - DNA, 25 bp, Homo sapien
ctgtgagcagcccaaaaaggatgcc

SEQ ID NO: 2440033 - DNA, 25 bp, Homo sapien
catcccagtacggtacatgctgagc

SEQ ID NO: 2440034 - DNA, 25 bp, Homo sapien
gggcaaacgattccccagtgatctg

SEQ ID NO: 2440035 - DNA, 25 bp, Homo sapien
agtattgacaaccatcccagtacgg

SEQ ID NO: 2440036 - DNA, 25 bp, Homo sapien
tgatctgctcttacacttttccagg

SEQ ID NO: 2440037 - DNA, 25 bp, Homo sapien
gagcttctaatctcatcaggaacat

SEQ ID NO: 2440038 - DNA, 25 bp, Homo sapien
tccaagcagcgggacttgctctgct

SEQ ID NO: 2440039 - DNA, 25 bp, Homo sapien
tgttgagagtctgacggcctgttat

SEQ ID NO: 2440040 - DNA, 25 bp, Homo sapien
tataacggcgaaccaccctgttcca

SEQ ID NO: 2440041 - DNA, 25 bp, Homo sapien
caaggcaatggaaaacgggattcta

SEQ ID NO: 2440042 - DNA, 25 bp, Homo sapien
cgggattctaagtctatggattgtc

SEQ ID NO: 2440043 - DNA, 25 bp, Homo sapien
tggaaaacgggattctaagtctatg

SEQ ID NO: 2440044 - DNA, 25 bp, Homo sapien
ccaaggcaatggaaaacgggattct

SEQ ID NO: 2440045 - DNA, 25 bp, Homo sapien
tgccagaaaggctagccagagcagg

SEQ ID NO: 2440046 - DNA, 25 bp, Homo sapien
gccagaaaggctagccagagcaggc

SEQ ID NO: 2440047 - DNA, 25 bp, Homo sapien
ctgccagaaaggctagccagagcag

SEQ ID NO: 2440048 - DNA, 25 bp, Homo sapien
tgaaacagtgacttctcaccagagg

SEQ ID NO: 2440049 - DNA, 25 bp, Homo sapien
ctgaaacagtgacttctcaccagag

SEQ ID NO: 2440050 - DNA, 25 bp, Homo sapien
gaaacagtgacttctcaccagaggg

SEQ ID NO: 2440051 - DNA, 25 bp, Homo sapien
agggagctttcctgctgggcacccc

SEQ ID NO: 2440052 - DNA, 25 bp, Homo sapien
cagggagctttcctgctgggcaccc

SEQ ID NO: 2440053 - DNA, 25 bp, Homo sapien
gcagttcccaggcttggtgggacat

SEQ ID NO: 2440054 - DNA, 25 bp, Homo sapien
gggcaccccacagaggcagttccca

SEQ ID NO: 2440055 - DNA, 25 bp, Homo sapien
gctcagcttctcctctgggtgctgc

SEQ ID NO: 2440056 - DNA, 25 bp, Homo sapien
gttgctcagcttctcctctgggtgc

SEQ ID NO: 2440057 - DNA, 25 bp, Homo sapien
agcttctcctctgggtgctgctttc

SEQ ID NO: 2440058 - DNA, 25 bp, Homo sapien
cagcttctcctctgggtgctgcttt

SEQ ID NO: 2440059 - DNA, 25 bp, Homo sapien
tctgctctaggccatgaggtcccac

SEQ ID NO: 2440060 - DNA, 25 bp, Homo sapien
tctgcagacgctgatcgcctctact

SEQ ID NO: 2440061 - DNA, 25 bp, Homo sapien
accagtctgcagacgctgatcgcct

SEQ ID NO: 2440062 - DNA, 25 bp, Homo sapien
taggccatgaggtcccaccagtctg

SEQ ID NO: 2440063 - DNA, 25 bp, Homo sapien
tgacccagccatcagcctcctcatc

SEQ ID NO: 2440064 - DNA, 25 bp, Homo sapien
gacccagccatcagcctcctcatcc

SEQ ID NO: 2440065 - DNA, 25 bp, Homo sapien
aatgcacagtagcttcttattggcc

SEQ ID NO: 2440066 - DNA, 25 bp, Homo sapien
cttcttattggccttatgctcaaca

SEQ ID NO: 2440067 - DNA, 25 bp, Homo sapien
tcaacaattcgttcttctgggtccc

SEQ ID NO: 2440068 - DNA, 25 bp, Homo sapien
caaggttagccccagtccttcggtg

SEQ ID NO: 2440069 - DNA, 25 bp, Homo sapien
gcatcatcagtggatttctctaccg

SEQ ID NO: 2440070 - DNA, 25 bp, Homo sapien
ttatggtgtagccttcatttctgca

SEQ ID NO: 2440071 - DNA, 25 bp, Homo sapien
ctttcactagcaccagctgtggact

SEQ ID NO: 2440072 - DNA, 25 bp, Homo sapien
tggatttctctaccgctttcactag

SEQ ID NO: 2440073 - DNA, 25 bp, Homo sapien
gcctggaagtgacaacaggccacag

SEQ ID NO: 2440074 - DNA, 25 bp, Homo sapien
cacggcctggaagtgacaacaggcc

SEQ ID NO: 2440075 - DNA, 25 bp, Homo sapien
cggcctggaagtgacaacaggccac

SEQ ID NO: 2440076 - DNA, 25 bp, Homo sapien
ctccacggcctggaagtgacaacag

SEQ ID NO: 2440077 - DNA, 25 bp, Homo sapien
acatcagcttccgtttcccctgccc

SEQ ID NO: 2440078 - DNA, 25 bp, Homo sapien
cagtactctgggtttgaagtgcagg

SEQ ID NO: 2440079 - DNA, 25 bp, Homo sapien
ccctgcccagtactctgggtttgaa

SEQ ID NO: 2440080 - DNA, 25 bp, Homo sapien
tgcccagtactctgggtttgaagtg

SEQ ID NO: 2440081 - DNA, 25 bp, Homo sapien
taggcaagacgcccaggtgccatgg

SEQ ID NO: 2440082 - DNA, 25 bp, Homo sapien
ctaggcaagacgcccaggtgccatg

SEQ ID NO: 2440083 - DNA, 25 bp, Homo sapien
ctcagccccagaggtgtcctgaggg

SEQ ID NO: 2440084 - DNA, 25 bp, Homo sapien
tcctcagccccagaggtgtcctgag

SEQ ID NO: 2440085 - DNA, 25 bp, Homo sapien
tcagccccagaggtgtcctgagggt

SEQ ID NO: 2440086 - DNA, 25 bp, Homo sapien
tctcctcagccccagaggtgtcctg

SEQ ID NO: 2440087 - DNA, 25 bp, Homo sapien
tacagccggcttgacccccagcagc

SEQ ID NO: 2440088 - DNA, 25 bp, Homo sapien
tctctgggctgctgtatctggcttg

SEQ ID NO: 2440089 - DNA, 25 bp, Homo sapien
tctgggctgctgtatctggcttgga

SEQ ID NO: 2440090 - DNA, 25 bp, Homo sapien
tgggctgctgtatctggcttggact

SEQ ID NO: 2440091 - DNA, 25 bp, Homo sapien
tccagacttgcgagccggaggcctg

SEQ ID NO: 2440092 - DNA, 25 bp, Homo sapien
ctgtccagacttgcgagccggaggc

SEQ ID NO: 2440093 - DNA, 25 bp, Homo sapien
tcctgtccagacttgcgagccggag

SEQ ID NO: 2440094 - DNA, 25 bp, Homo sapien
aactcctgtccagacttgcgagccg

SEQ ID NO: 2440095 - DNA, 25 bp, Homo sapien
aggcaggactggccatcaccatagt

SEQ ID NO: 2440096 - DNA, 25 bp, Homo sapien
aggactggccatcaccatagtggtt

SEQ ID NO: 2440097 - DNA, 25 bp, Homo sapien
gcaggactggccatcaccatagtgg

SEQ ID NO: 2440098 - DNA, 25 bp, Homo sapien
caaggcaggactggccatcaccata

SEQ ID NO: 2440099 - DNA, 25 bp, Homo sapien
aaaggccctgaattgcacttggtcc

SEQ ID NO: 2440100 - DNA, 25 bp, Homo sapien
tagttagcgactgcgctagaggccg

SEQ ID NO: 2440101 - DNA, 25 bp, Homo sapien
taggcaggaactatgctaggtccca

SEQ ID NO: 2440102 - DNA, 25 bp, Homo sapien
cagggagcccagcagagtagttagc

SEQ ID NO: 2440103 - DNA, 25 bp, Homo sapien
gtgtgggatccagagccgggtcatg

SEQ ID NO: 2440104 - DNA, 25 bp, Homo sapien
gtgggaagtacagtgtgggatccag

SEQ ID NO: 2440105 - DNA, 25 bp, Homo sapien
gagccgggtcatggaatgaggcggg

SEQ ID NO: 2440106 - DNA, 25 bp, Homo sapien
ggtcatggaatgaggcggggcccgg

SEQ ID NO: 2440107 - DNA, 25 bp, Homo sapien
actcaggctggaacccttccctagg

SEQ ID NO: 2440108 - DNA, 25 bp, Homo sapien
gtaatcgttggcactgccccggctc

SEQ ID NO: 2440109 - DNA, 25 bp, Homo sapien
gcactcaggctggaacccttcccta

SEQ ID NO: 2440110 - DNA, 25 bp, Homo sapien
ctttgtaatcgttggcactgccccg

SEQ ID NO: 2440111 - DNA, 25 bp, Homo sapien
atgctgggccggaagccatagacac

SEQ ID NO: 2440112 - DNA, 25 bp, Homo sapien
atagccaccgctgaccatgctgggc

SEQ ID NO: 2440113 - DNA, 25 bp, Homo sapien
tgggccggaagccatagacactgcc

SEQ ID NO: 2440114 - DNA, 25 bp, Homo sapien
tgctgttggccacatagccaccgct

SEQ ID NO: 2440115 - DNA, 25 bp, Homo sapien
aggggagggaaattctcctgacatc

SEQ ID NO: 2440116 - DNA, 25 bp, Homo sapien
gctgacaggggagggaaattctcct

SEQ ID NO: 2440117 - DNA, 25 bp, Homo sapien
atgctgacaggggagggaaattctc

SEQ ID NO: 2440118 - DNA, 25 bp, Homo sapien
gacaggggagggaaattctcctgac

SEQ ID NO: 2440119 - DNA, 25 bp, Homo sapien
tcatctcttctggattgagatgtgt

SEQ ID NO: 2440120 - DNA, 25 bp, Homo sapien
ttgagatgtgttaggctttctcctt

SEQ ID NO: 2440121 - DNA, 25 bp, Homo sapien
ctggattgagatgtgttaggctttc

SEQ ID NO: 2440122 - DNA, 25 bp, Homo sapien
cttctggattgagatgtgttaggct

SEQ ID NO: 2440123 - DNA, 25 bp, Homo sapien
cagcatcagcgatggctgtctccag

SEQ ID NO: 2440124 - DNA, 25 bp, Homo sapien
cttggcccgggcatccttcagggcg

SEQ ID NO: 2440125 - DNA, 25 bp, Homo sapien
ttcagggcgttgtctccccgctgct

SEQ ID NO: 2440126 - DNA, 25 bp, Homo sapien
cgctctccagtagcttgcgataggt

SEQ ID NO: 2440127 - DNA, 25 bp, Homo sapien
tctcgatctctgagcggattctctg

SEQ ID NO: 2440128 - DNA, 25 bp, Homo sapien
gcttcttcacgttctcgatctctga

SEQ ID NO: 2440129 - DNA, 25 bp, Homo sapien
gattctctggatgagccgagtgagc

SEQ ID NO: 2440130 - DNA, 25 bp, Homo sapien
gccgagtgagctccgagatttcatt

SEQ ID NO: 2440131 - DNA, 25 bp, Homo sapien
tggtgtttttgaggtcgtccccatg

SEQ ID NO: 2440132 - DNA, 25 bp, Homo sapien
ctggccccacctcagcccagctcac

SEQ ID NO: 2440133 - DNA, 25 bp, Homo sapien
tccctggccccacctcagcccagct

SEQ ID NO: 2440134 - DNA, 25 bp, Homo sapien
cctggccccacctcagcccagctca

SEQ ID NO: 2440135 - DNA, 25 bp, Homo sapien
cctccctggccccacctcagcccag

SEQ ID NO: 2440136 - DNA, 25 bp, Homo sapien
ctcagcctcggccttactcttcaag

SEQ ID NO: 2440137 - DNA, 25 bp, Homo sapien
cagacatgtcactgatgtgggactg

SEQ ID NO: 2440138 - DNA, 25 bp, Homo sapien
tgcggacttcgtcaatgatgctgtc

SEQ ID NO: 2440139 - DNA, 25 bp, Homo sapien
tcctcatactgggtgcggacttcgt

SEQ ID NO: 2440140 - DNA, 25 bp, Homo sapien
gagacacctgaagaacttgatctcc

SEQ ID NO: 2440141 - DNA, 25 bp, Homo sapien
tcaaagagacacctgaagaacttga

SEQ ID NO: 2440142 - DNA, 25 bp, Homo sapien
cagttccaccttattggcgtaagca

SEQ ID NO: 2440143 - DNA, 25 bp, Homo sapien
gcctgcagttccaccttattggcgt

SEQ ID NO: 2440144 - DNA, 25 bp, Homo sapien
cccaccatcccctgtcactgctggt

SEQ ID NO: 2440145 - DNA, 25 bp, Homo sapien
cactgctggtacagccaaaaaggca

SEQ ID NO: 2440146 - DNA, 25 bp, Homo sapien
tggtacagccaaaaaggcagcagcc

SEQ ID NO: 2440147 - DNA, 25 bp, Homo sapien
ggcagcagccatccctgcctgggtt

SEQ ID NO: 2440148 - DNA, 25 bp, Homo sapien
ctcgttctctgctgctgtccgcttg

SEQ ID NO: 2440149 - DNA, 25 bp, Homo sapien
aaactcgttctctgctgctgtccgc

SEQ ID NO: 2440150 - DNA, 25 bp, Homo sapien
caaactcgttctctgctgctgtccg

SEQ ID NO: 2440151 - DNA, 25 bp, Homo sapien
aactcgttctctgctgctgtccgct

SEQ ID NO: 2440152 - DNA, 25 bp, Homo sapien
tcttgcagttgttcaggtccagctg

SEQ ID NO: 2440153 - DNA, 25 bp, Homo sapien
tgtccccagacagcgtctccagctg

SEQ ID NO: 2440154 - DNA, 25 bp, Homo sapien
tccgcaggttgctgatgtagccctc

SEQ ID NO: 2440155 - DNA, 25 bp, Homo sapien
cagctgcttccgcaggttgctgatg

SEQ ID NO: 2440156 - DNA, 25 bp, Homo sapien
ttgacggtaacctggtggatgcctc

SEQ ID NO: 2440157 - DNA, 25 bp, Homo sapien
tggccacattgaggctccggacacc

SEQ ID NO: 2440158 - DNA, 25 bp, Homo sapien
gccaggaggctctcattgacggtaa

SEQ ID NO: 2440159 - DNA, 25 bp, Homo sapien
tgggcatacagttgggcacacaggc

SEQ ID NO: 2440160 - DNA, 25 bp, Homo sapien
tccctgcccggaaggaggatgagct

SEQ ID NO: 2440161 - DNA, 25 bp, Homo sapien
ttgctccctgcccggaaggaggatg

SEQ ID NO: 2440162 - DNA, 25 bp, Homo sapien
gctccctgcccggaaggaggatgag

SEQ ID NO: 2440163 - DNA, 25 bp, Homo sapien
ctttgctccctgcccggaaggagga

SEQ ID NO: 2440164 - DNA, 25 bp, Homo sapien
acttgcaggtgaattggcggctcat

SEQ ID NO: 2440165 - DNA, 25 bp, Homo sapien
ctgaagccccccttggcggcagctc

SEQ ID NO: 2440166 - DNA, 25 bp, Homo sapien
gctcccgacttgcaggtgaattggc

SEQ ID NO: 2440167 - DNA, 25 bp, Homo sapien
cttggcggcagctcccgacttgcag

SEQ ID NO: 2440168 - DNA, 25 bp, Homo sapien
caagagcttaattcgtgggtttggc

SEQ ID NO: 2440169 - DNA, 25 bp, Homo sapien
aaatcccaaaaggttctgctggttg

SEQ ID NO: 2440170 - DNA, 25 bp, Homo sapien
caggtgcctttatatgtgcttggca

SEQ ID NO: 2440171 - DNA, 25 bp, Homo sapien
tctgctggttgtagtgaggactggc

SEQ ID NO: 2440172 - DNA, 25 bp, Homo sapien
gctgacagacatgttccaaggcata

SEQ ID NO: 2440173 - DNA, 25 bp, Homo sapien
ccatagacatcagctttgtgagcct

SEQ ID NO: 2440174 - DNA, 25 bp, Homo sapien
aacaggtgtccagccattatgaaca

SEQ ID NO: 2440175 - DNA, 25 bp, Homo sapien
ggttagtgcctgcttgtaccagctg

SEQ ID NO: 2440176 - DNA, 25 bp, Homo sapien
aaagcatagatccttgtgtcggcca

SEQ ID NO: 2440177 - DNA, 25 bp, Homo sapien
tgagaagtcgttagtccacatggga

SEQ ID NO: 2440178 - DNA, 25 bp, Homo sapien
tacacgtggtgtcctaaatattggc

SEQ ID NO: 2440179 - DNA, 25 bp, Homo sapien
taggcagtagcactcagcgacagaa

SEQ ID NO: 2440180 - DNA, 25 bp, Homo sapien
tggtcttggtctgcccgctctgggt

SEQ ID NO: 2440181 - DNA, 25 bp, Homo sapien
ccaaggtcaacacccgcagagctgg

SEQ ID NO: 2440182 - DNA, 25 bp, Homo sapien
tagcgggtggctttccttgctggga

SEQ ID NO: 2440183 - DNA, 25 bp, Homo sapien
gctgtagctgctactgctgatgaca

SEQ ID NO: 2440184 - DNA, 25 bp, Homo sapien
agatgctcacagaggatggattctc

SEQ ID NO: 2440185 - DNA, 25 bp, Homo sapien
gatgctcacagaggatggattctca

SEQ ID NO: 2440186 - DNA, 25 bp, Homo sapien
atgctcacagaggatggattctcac

SEQ ID NO: 2440187 - DNA, 25 bp, Homo sapien
cagcttggcctgggcatccttcagg

SEQ ID NO: 2440188 - DNA, 25 bp, Homo sapien
ttcagggcattgtctccccgctgct

SEQ ID NO: 2440189 - DNA, 25 bp, Homo sapien
catgtccagggccagtttcaggctc

SEQ ID NO: 2440190 - DNA, 25 bp, Homo sapien
gctgctcagcgtcagcgatggccgt

SEQ ID NO: 2440191 - DNA, 25 bp, Homo sapien
gaagggcaaagaacagagagaccat

SEQ ID NO: 2440192 - DNA, 25 bp, Homo sapien
tgaagggcaaagaacagagagacca

SEQ ID NO: 2440193 - DNA, 25 bp, Homo sapien
ctgaagggcaaagaacagagagacc

SEQ ID NO: 2440194 - DNA, 25 bp, Homo sapien
gggagttctttgtggggctgctgcc

SEQ ID NO: 2440195 - DNA, 25 bp, Homo sapien
gagcctgctgtggagaccgggagtt

SEQ ID NO: 2440196 - DNA, 25 bp, Homo sapien
ctgctgtggagaccgggagttcttt

SEQ ID NO: 2440197 - DNA, 25 bp, Homo sapien
cccagagcctgctgtggagaccggg

SEQ ID NO: 2440198 - DNA, 25 bp, Homo sapien
ggtcgtcaccatgccgactggctgc

SEQ ID NO: 2440199 - DNA, 25 bp, Homo sapien
tccaccatctcgctcctggtgtgtt

SEQ ID NO: 2440200 - DNA, 25 bp, Homo sapien
cacaccggatcctctggatgagccg

SEQ ID NO: 2440201 - DNA, 25 bp, Homo sapien
ctggtgtgtttcaggtcgtcaccat

SEQ ID NO: 2440202 - DNA, 25 bp, Homo sapien
cccagagataggaagttggtgatga

SEQ ID NO: 2440203 - DNA, 25 bp, Homo sapien
tggctgtcggtgggatttaacggaa

SEQ ID NO: 2440204 - DNA, 25 bp, Homo sapien
cctggctgtcggtgggatttaacgg

SEQ ID NO: 2440205 - DNA, 25 bp, Homo sapien
cctgtaaataagccacccctgccac

SEQ ID NO: 2440206 - DNA, 25 bp, Homo sapien
ctgtcggtgggatttaacggaactg

SEQ ID NO: 2440207 - DNA, 25 bp, Homo sapien
acccctcccaggaagcgaagggctg

SEQ ID NO: 2440208 - DNA, 25 bp, Homo sapien
ccctcccaggaagcgaagggctgct

SEQ ID NO: 2440209 - DNA, 25 bp, Homo sapien
cccaggaagcgaagggctgctgtgg

SEQ ID NO: 2440210 - DNA, 25 bp, Homo sapien
ctcccaggaagcgaagggctgctgt

SEQ ID NO: 2440211 - DNA, 25 bp, Homo sapien
cagaggtctcactggcgtgagtctg

SEQ ID NO: 2440212 - DNA, 25 bp, Homo sapien
ttcagggcgatctcctcataatgca

SEQ ID NO: 2440213 - DNA, 25 bp, Homo sapien
cgtgagtctggatctgagcgatctc

SEQ ID NO: 2440214 - DNA, 25 bp, Homo sapien
taatgcatgcggacctcagcgatga

SEQ ID NO: 2440215 - DNA, 25 bp, Homo sapien
tgcatcatacagacacttgaggaac

SEQ ID NO: 2440216 - DNA, 25 bp, Homo sapien
gcatcatacagacacttgaggaact

SEQ ID NO: 2440217 - DNA, 25 bp, Homo sapien
cttgaggaacttgatttctttgtcc

SEQ ID NO: 2440218 - DNA, 25 bp, Homo sapien
gtcgtgcgccggttaatctccactt

SEQ ID NO: 2440219 - DNA, 25 bp, Homo sapien
tgtcgtgcgccggttaatctccact

SEQ ID NO: 2440220 - DNA, 25 bp, Homo sapien
ctctgctgtcgtgcgccggttaatc

SEQ ID NO: 2440221 - DNA, 25 bp, Homo sapien
ctcattctctgctgtcgtgcgccgg

SEQ ID NO: 2440222 - DNA, 25 bp, Homo sapien
tccctcatgcttctcagctccgagt

SEQ ID NO: 2440223 - DNA, 25 bp, Homo sapien
ccagatccctcatgcttctcagctc

SEQ ID NO: 2440224 - DNA, 25 bp, Homo sapien
tccaccagatccctcatgcttctca

SEQ ID NO: 2440225 - DNA, 25 bp, Homo sapien
atccctcatgcttctcagctccgag

SEQ ID NO: 2440226 - DNA, 25 bp, Homo sapien
cagctgcttccgcaggttgctgatg

SEQ ID NO: 2440227 - DNA, 25 bp, Homo sapien
gtagccctcaaggatgggctccagg

SEQ ID NO: 2440228 - DNA, 25 bp, Homo sapien
tcttgcagttgttcaggtccagctg

SEQ ID NO: 2440229 - DNA, 25 bp, Homo sapien
ttccgcaggttgctgatgtagccct

SEQ ID NO: 2440230 - DNA, 25 bp, Homo sapien
aggaggcgaacttgtcgttcagcac

SEQ ID NO: 2440231 - DNA, 25 bp, Homo sapien
aatgaaggaggcgaacttgtcgttc

SEQ ID NO: 2440232 - DNA, 25 bp, Homo sapien
aaggaggcgaacttgtcgttcagca

SEQ ID NO: 2440233 - DNA, 25 bp, Homo sapien
tgaaggaggcgaacttgtcgttcag

SEQ ID NO: 2440234 - DNA, 25 bp, Homo sapien
tccaaggctatagaggctccgactg

SEQ ID NO: 2440235 - DNA, 25 bp, Homo sapien
gaagttgcccttgtcaccactggac

SEQ ID NO: 2440236 - DNA, 25 bp, Homo sapien
tgccagctgcacagtaagaagccag

SEQ ID NO: 2440237 - DNA, 25 bp, Homo sapien
cattgaaagaaatacgccgattccc

SEQ ID NO: 2440238 - DNA, 25 bp, Homo sapien
aaaggttgagttgacagagctggag

SEQ ID NO: 2440239 - DNA, 25 bp, Homo sapien
gagttgacagagctggagaaaagca

SEQ ID NO: 2440240 - DNA, 25 bp, Homo sapien
aggttgagttgacagagctggagaa

SEQ ID NO: 2440241 - DNA, 25 bp, Homo sapien
gttgagttgacagagctggagaaaa

SEQ ID NO: 2440242 - DNA, 25 bp, Homo sapien
taatctagaacttgagctgcatctg

SEQ ID NO: 2440243 - DNA, 25 bp, Homo sapien
tgcaggagaggagggaccctcaaca

SEQ ID NO: 2440244 - DNA, 25 bp, Homo sapien
gcaggagaggagggaccctcaacat

SEQ ID NO: 2440245 - DNA, 25 bp, Homo sapien
gagtcccttggtagtgaaggcccaa

SEQ ID NO: 2440246 - DNA, 25 bp, Homo sapien
actgagagagctcctgactggactc

SEQ ID NO: 2440247 - DNA, 25 bp, Homo sapien
gcaatgacccaacgaaacgggacca

SEQ ID NO: 2440248 - DNA, 25 bp, Homo sapien
tggactccttgcatcgaagcatcac

SEQ ID NO: 2440249 - DNA, 25 bp, Homo sapien
ggactgtagtgacagacaaagcatt

SEQ ID NO: 2440250 - DNA, 25 bp, Homo sapien
tgacagacaaagcatttcttgactt

SEQ ID NO: 2440251 - DNA, 25 bp, Homo sapien
aaatggggttgggactgtagtgaca

SEQ ID NO: 2440252 - DNA, 25 bp, Homo sapien
gagggaggagacgggtgagttggga

SEQ ID NO: 2440253 - DNA, 25 bp, Homo sapien
gctgctccccgaggttttggcaagg

SEQ ID NO: 2440254 - DNA, 25 bp, Homo sapien
tgtagctataactgcttgaggcgcc

SEQ ID NO: 2440255 - DNA, 25 bp, Homo sapien
tgcctttggtcttgacgtctgcagc

SEQ ID NO: 2440256 - DNA, 25 bp, Homo sapien
catctggaggcctttttggtggcac

SEQ ID NO: 2440257 - DNA, 25 bp, Homo sapien
tttgtgtcatgaattaaagggactc

SEQ ID NO: 2440258 - DNA, 25 bp, Homo sapien
ttctggtaaggtgaccaagggcaga

SEQ ID NO: 2440259 - DNA, 25 bp, Homo sapien
tgaattaaagggactcggacttctg

SEQ ID NO: 2440260 - DNA, 25 bp, Homo sapien
gactcggacttctggtaaggtgacc

SEQ ID NO: 2440261 - DNA, 25 bp, Homo sapien
agaatttggatattcgccagacatc

SEQ ID NO: 2440262 - DNA, 25 bp, Homo sapien
cagaatttggatattcgccagacat

SEQ ID NO: 2440263 - DNA, 25 bp, Homo sapien
cacagaatttggatattcgccagac

SEQ ID NO: 2440264 - DNA, 25 bp, Homo sapien
acagaatttggatattcgccagaca

SEQ ID NO: 2440265 - DNA, 25 bp, Homo sapien
tggcccgggcatctttcagggcgca

SEQ ID NO: 2440266 - DNA, 25 bp, Homo sapien
gcttcaggctcacgagctcctggta

SEQ ID NO: 2440267 - DNA, 25 bp, Homo sapien
ccgctgttcagcgtcggcgatggcc

SEQ ID NO: 2440268 - DNA, 25 bp, Homo sapien
ggcgatggccgtctccagatcggca

SEQ ID NO: 2440269 - DNA, 25 bp, Homo sapien
atatgttccctcagctaaggttttg

SEQ ID NO: 2440270 - DNA, 25 bp, Homo sapien
ctggggtatgcccatctgtggagcc

SEQ ID NO: 2440271 - DNA, 25 bp, Homo sapien
gtgcttgcacttatgtgaaagcccc

SEQ ID NO: 2440272 - DNA, 25 bp, Homo sapien
tcctgagcccttcagtctggtatat

SEQ ID NO: 2440273 - DNA, 25 bp, Homo sapien
ttagtggattaatttcatagaaccc

SEQ ID NO: 2440274 - DNA, 25 bp, Homo sapien
agtggattaatttcatagaacccac

SEQ ID NO: 2440275 - DNA, 25 bp, Homo sapien
tagtggattaatttcatagaaccca

SEQ ID NO: 2440276 - DNA, 25 bp, Homo sapien
cattccctatctctgagcggatcct

SEQ ID NO: 2440277 - DNA, 25 bp, Homo sapien
caggcggttgagctcagagatttca

SEQ ID NO: 2440278 - DNA, 25 bp, Homo sapien
tctggatcaggcggttgagctcaga

SEQ ID NO: 2440279 - DNA, 25 bp, Homo sapien
cggttgagctcagagatttcagcct

SEQ ID NO: 2440280 - DNA, 25 bp, Homo sapien
agcctcggccttgctctttagggca

SEQ ID NO: 2440281 - DNA, 25 bp, Homo sapien
ccattgacaggacgatggacgtgtc

SEQ ID NO: 2440282 - DNA, 25 bp, Homo sapien
tgtccaggtccagatcccggttgtt

SEQ ID NO: 2440283 - DNA, 25 bp, Homo sapien
cacggacctcggcaatgatgctgtc

SEQ ID NO: 2440284 - DNA, 25 bp, Homo sapien
ggcctggagctcaaccttattcatg

SEQ ID NO: 2440285 - DNA, 25 bp, Homo sapien
cataaaggcacttgaagaatttaat

SEQ ID NO: 2440286 - DNA, 25 bp, Homo sapien
ccttcataaaggcacttgaagaatt

SEQ ID NO: 2440287 - DNA, 25 bp, Homo sapien
tattcatgtaagcagcatccacgtc

SEQ ID NO: 2440288 - DNA, 25 bp, Homo sapien
gggagcacatgatagtcaagccgcc

SEQ ID NO: 2440289 - DNA, 25 bp, Homo sapien
tgggagcacatgatagtcaagccgc

SEQ ID NO: 2440290 - DNA, 25 bp, Homo sapien
ctgggagcacatgatagtcaagccg

SEQ ID NO: 2440291 - DNA, 25 bp, Homo sapien
gctgtgcgtctgttaatctccacct

SEQ ID NO: 2440292 - DNA, 25 bp, Homo sapien
cagctgtgcgtctgttaatctccac

SEQ ID NO: 2440293 - DNA, 25 bp, Homo sapien
gcagctgtgcgtctgttaatctcca

SEQ ID NO: 2440294 - DNA, 25 bp, Homo sapien
cagcagctgtgcgtctgttaatctc

SEQ ID NO: 2440295 - DNA, 25 bp, Homo sapien
cttcttgttggtggctatctgaaac

SEQ ID NO: 2440296 - DNA, 25 bp, Homo sapien
ggttgctgatgtagccctcataaat

SEQ ID NO: 2440297 - DNA, 25 bp, Homo sapien
catgttcctcagctccgaatccagc

SEQ ID NO: 2440298 - DNA, 25 bp, Homo sapien
caggttgctgatgtagccctcataa

SEQ ID NO: 2440299 - DNA, 25 bp, Homo sapien
atgttcctcagctccgaatccagcc

SEQ ID NO: 2440300 - DNA, 25 bp, Homo sapien
gggacaggccaatgcccgaggactc

SEQ ID NO: 2440301 - DNA, 25 bp, Homo sapien
gtgcacatgcgcccaacgcagggac

SEQ ID NO: 2440302 - DNA, 25 bp, Homo sapien
ggacaggccaatgcccgaggactca

SEQ ID NO: 2440303 - DNA, 25 bp, Homo sapien
cactgtgcacatgcgcccaacgcag

SEQ ID NO: 2440304 - DNA, 25 bp, Homo sapien
cacacggagggacacttgggcccca

SEQ ID NO: 2440305 - DNA, 25 bp, Homo sapien
cacggagggacacttgggccccagc

SEQ ID NO: 2440306 - DNA, 25 bp, Homo sapien
acacggagggacacttgggccccag

SEQ ID NO: 2440307 - DNA, 25 bp, Homo sapien
atgcccccgggtgggcacacggagg

SEQ ID NO: 2440308 - DNA, 25 bp, Homo sapien
cgtgcagcagcgctgagcgccaggc

SEQ ID NO: 2440309 - DNA, 25 bp, Homo sapien
cgccgtgcagcagcgctgagcgcca

SEQ ID NO: 2440310 - DNA, 25 bp, Homo sapien
ccgccgtgcagcagcgctgagcgcc

SEQ ID NO: 2440311 - DNA, 25 bp, Homo sapien
ccgccagagaggaccgcggagcaac

SEQ ID NO: 2440312 - DNA, 25 bp, Homo sapien
ctgctgccgatcccgccagagagga

SEQ ID NO: 2440313 - DNA, 25 bp, Homo sapien
aggaccgcggagcaaccgctgaagc

SEQ ID NO: 2440314 - DNA, 25 bp, Homo sapien
gggaaatgggtcagttggcggctca

SEQ ID NO: 2440315 - DNA, 25 bp, Homo sapien
cgggaggcagaaggggcgcaaacag

SEQ ID NO: 2440316 - DNA, 25 bp, Homo sapien
ctggccgcgcgggaggcagaagggg

SEQ ID NO: 2440317 - DNA, 25 bp, Homo sapien
aggcagaaggggcgcaaacagccgc

SEQ ID NO: 2440318 - DNA, 25 bp, Homo sapien
ggaggcagaaggggcgcaaacagcc

SEQ ID NO: 2440319 - DNA, 25 bp, Homo sapien
tccaccgtgaactccccatgaatcc

SEQ ID NO: 2440320 - DNA, 25 bp, Homo sapien
agatttttgtctgttccaccgtgaa

SEQ ID NO: 2440321 - DNA, 25 bp, Homo sapien
tttgtctgttccaccgtgaactccc

SEQ ID NO: 2440322 - DNA, 25 bp, Homo sapien
tgttccaccgtgaactccccatgaa

SEQ ID NO: 2440323 - DNA, 25 bp, Homo sapien
tgtaaagtgacccagaacccagcat

SEQ ID NO: 2440324 - DNA, 25 bp, Homo sapien
cagaacccagcatttacttggctca

SEQ ID NO: 2440325 - DNA, 25 bp, Homo sapien
ctgtaaagtgacccagaacccagca

SEQ ID NO: 2440326 - DNA, 25 bp, Homo sapien
acccagaacccagcatttacttggc

SEQ ID NO: 2440327 - DNA, 25 bp, Homo sapien
cacctgctggcctccaattactggg

SEQ ID NO: 2440328 - DNA, 25 bp, Homo sapien
tggaaacttccagtggggctgaccc

SEQ ID NO: 2440329 - DNA, 25 bp, Homo sapien
gttatcactcccaagatcacccctg

SEQ ID NO: 2440330 - DNA, 25 bp, Homo sapien
tagcgaccttatctccacctgctgg

SEQ ID NO: 2440331 - DNA, 25 bp, Homo sapien
ggcaccgatcacagatgaacagata

SEQ ID NO: 2440332 - DNA, 25 bp, Homo sapien
ggagatggcaccgatcacagatgaa

SEQ ID NO: 2440333 - DNA, 25 bp, Homo sapien
gatgaacagataacggcatctgggt

SEQ ID NO: 2440334 - DNA, 25 bp, Homo sapien
ttaagcgctggagatggcaccgatc

SEQ ID NO: 2440335 - DNA, 25 bp, Homo sapien
tgaaaacttgtgtacccagggagca

SEQ ID NO: 2440336 - DNA, 25 bp, Homo sapien
tcctagaagagtccggagcagtctg

SEQ ID NO: 2440337 - DNA, 25 bp, Homo sapien
caaggcagactactgggaaatgggc

SEQ ID NO: 2440338 - DNA, 25 bp, Homo sapien
cagggagcacatggccaaatagtta

SEQ ID NO: 2440339 - DNA, 25 bp, Homo sapien
gagctaaggtctttccctgggagtc

SEQ ID NO: 2440340 - DNA, 25 bp, Homo sapien
tagagctaaggtctttccctgggag

SEQ ID NO: 2440341 - DNA, 25 bp, Homo sapien
gcttagagctaaggtctttccctgg

SEQ ID NO: 2440342 - DNA, 25 bp, Homo sapien
tttttggtgggtgagcttagagcta

SEQ ID NO: 2440343 - DNA, 25 bp, Homo sapien
ctgtgcctgccatcccggccatgga

SEQ ID NO: 2440344 - DNA, 25 bp, Homo sapien
ctgtagcccccgctgacagagctgg

SEQ ID NO: 2440345 - DNA, 25 bp, Homo sapien
gccagtagccgtaggtgccagcatt

SEQ ID NO: 2440346 - DNA, 25 bp, Homo sapien
ggggctacagttcccactgccagtg

SEQ ID NO: 2440347 - DNA, 25 bp, Homo sapien
tgggcactagctccacctggaagaa

SEQ ID NO: 2440348 - DNA, 25 bp, Homo sapien
tttccttcatgcaggagagccggtg

SEQ ID NO: 2440349 - DNA, 25 bp, Homo sapien
gctagtgtgcagtatcagaatgtcc

SEQ ID NO: 2440350 - DNA, 25 bp, Homo sapien
tggtcaacaggcagagccaagctct

SEQ ID NO: 2440351 - DNA, 25 bp, Homo sapien
aaatgctcacggagttggtatattc

SEQ ID NO: 2440352 - DNA, 25 bp, Homo sapien
cactctgggaaactttaaggtggag

SEQ ID NO: 2440353 - DNA, 25 bp, Homo sapien
ggaaactttaaggtggagacttgca

SEQ ID NO: 2440354 - DNA, 25 bp, Homo sapien
cacactctgggaaactttaaggtgg

SEQ ID NO: 2440355 - DNA, 25 bp, Homo sapien
tttaaggtggagacttgcagtttct

SEQ ID NO: 2440356 - DNA, 25 bp, Homo sapien
cagggacagcttcacgctcaaaagc

SEQ ID NO: 2440357 - DNA, 25 bp, Homo sapien
gcttcacgctcaaaagctcttggta

SEQ ID NO: 2440358 - DNA, 25 bp, Homo sapien
atccagggacagcttcacgctcaaa

SEQ ID NO: 2440359 - DNA, 25 bp, Homo sapien
caaaagctcttggtactcgcgcagc

SEQ ID NO: 2440360 - DNA, 25 bp, Homo sapien
tctccgagcgcagtctttggatgag

SEQ ID NO: 2440361 - DNA, 25 bp, Homo sapien
ttggtgtgtttcaggtcatccccat

SEQ ID NO: 2440362 - DNA, 25 bp, Homo sapien
gatgagacgggtcagctctgagatc

SEQ ID NO: 2440363 - DNA, 25 bp, Homo sapien
tcacactctcaatctccgagcgcag

SEQ ID NO: 2440364 - DNA, 25 bp, Homo sapien
atggacgtgtcgctgatgtgggact

SEQ ID NO: 2440365 - DNA, 25 bp, Homo sapien
acgtgtcgctgatgtgggactggat

SEQ ID NO: 2440366 - DNA, 25 bp, Homo sapien
aggttccggttgttgtccatggaca

SEQ ID NO: 2440367 - DNA, 25 bp, Homo sapien
gacgtgtcgctgatgtgggactgga

SEQ ID NO: 2440368 - DNA, 25 bp, Homo sapien
gaccagagaaaggtcccaaggtgat

SEQ ID NO: 2440369 - DNA, 25 bp, Homo sapien
cttctgtgaccagagaaaggtccca

SEQ ID NO: 2440370 - DNA, 25 bp, Homo sapien
agagaaaggtcccaaggtgatggcc

SEQ ID NO: 2440371 - DNA, 25 bp, Homo sapien
tgtgaccagagaaaggtcccaaggt

SEQ ID NO: 2440372 - DNA, 25 bp, Homo sapien
tgctcgtgtaagctgcgtccacgtc

SEQ ID NO: 2440373 - DNA, 25 bp, Homo sapien
gcctgcagctccactttgctcgtgt

SEQ ID NO: 2440374 - DNA, 25 bp, Homo sapien
gctccactttgctcgtgtaagctgc

SEQ ID NO: 2440375 - DNA, 25 bp, Homo sapien
actttgctcgtgtaagctgcgtcca

SEQ ID NO: 2440376 - DNA, 25 bp, Homo sapien
agcagttgtgcgcttgtttatttct

SEQ ID NO: 2440377 - DNA, 25 bp, Homo sapien
gcagttgtgcgcttgtttatttctt

SEQ ID NO: 2440378 - DNA, 25 bp, Homo sapien
cagttgtgcgcttgtttatttcttc

SEQ ID NO: 2440379 - DNA, 25 bp, Homo sapien
gtagccctcaaggatgggctccagg

SEQ ID NO: 2440380 - DNA, 25 bp, Homo sapien
tcttgcagttgttcaggtccagctg

SEQ ID NO: 2440381 - DNA, 25 bp, Homo sapien
tgtccccagacagcgtctccagctg

SEQ ID NO: 2440382 - DNA, 25 bp, Homo sapien
cagctgcttccgcaggttgctgatg

SEQ ID NO: 2440383 - DNA, 25 bp, Homo sapien
caggaggctcttgttgatggtgacc

SEQ ID NO: 2440384 - DNA, 25 bp, Homo sapien
ccgggcgggcacaacgacggacaca

SEQ ID NO: 2440385 - DNA, 25 bp, Homo sapien
attgaaagagatgctccgggcaccc

SEQ ID NO: 2440386 - DNA, 25 bp, Homo sapien
ccaggctgtaaaggctccgactgct

SEQ ID NO: 2440387 - DNA, 25 bp, Homo sapien
ccagaaagtggggataagatgctga

SEQ ID NO: 2440388 - DNA, 25 bp, Homo sapien
ggccagaaagtggggataagatgct

SEQ ID NO: 2440389 - DNA, 25 bp, Homo sapien
gggaggccagaaagtggggataaga

SEQ ID NO: 2440390 - DNA, 25 bp, Homo sapien
gaggccagaaagtggggataagatg

SEQ ID NO: 2440391 - DNA, 25 bp, Homo sapien
ggagaagagctcttgcttctgcatc

SEQ ID NO: 2440392 - DNA, 25 bp, Homo sapien
agacagtgtgggctaagagcactac

SEQ ID NO: 2440393 - DNA, 25 bp, Homo sapien
ttacttcagtaccagagataggaga

SEQ ID NO: 2440394 - DNA, 25 bp, Homo sapien
cagtgtgggctaagagcactacgag

SEQ ID NO: 2440395 - DNA, 25 bp, Homo sapien
tggcagccctggacacgaacctgga

SEQ ID NO: 2440396 - DNA, 25 bp, Homo sapien
tggacacgaacctggatgctgcacc

SEQ ID NO: 2440397 - DNA, 25 bp, Homo sapien
accagatcctcaggggatggtgccc

SEQ ID NO: 2440398 - DNA, 25 bp, Homo sapien
ggaccagcatgtgcaggattcctag

SEQ ID NO: 2440399 - DNA, 25 bp, Homo sapien
tcctgggcatctccgatggctacct

SEQ ID NO: 2440400 - DNA, 25 bp, Homo sapien
ctgggcatctccgatggctaccttg

SEQ ID NO: 2440401 - DNA, 25 bp, Homo sapien
tgggcatctccgatggctaccttgc

SEQ ID NO: 2440402 - DNA, 25 bp, Homo sapien
gggcatctccgatggctaccttgcc

SEQ ID NO: 2440403 - DNA, 25 bp, Homo sapien
tgaggttgctgatgtagccctcgaa

SEQ ID NO: 2440404 - DNA, 25 bp, Homo sapien
ggttctgctgctccaggaactgtac

SEQ ID NO: 2440405 - DNA, 25 bp, Homo sapien
tggttctgctgctccaggaactgta

SEQ ID NO: 2440406 - DNA, 25 bp, Homo sapien
ctggttctgctgctccaggaactgt

SEQ ID NO: 2440407 - DNA, 25 bp, Homo sapien
atgaagaaggaaaacttgttgagtt

SEQ ID NO: 2440408 - DNA, 25 bp, Homo sapien
gagactccagctgctataaccgcct

SEQ ID NO: 2440409 - DNA, 25 bp, Homo sapien
taaccgcctggctcagcatagcctt

SEQ ID NO: 2440410 - DNA, 25 bp, Homo sapien
tctgtgctgttccacaagagtggca

SEQ ID NO: 2440411 - DNA, 25 bp, Homo sapien
tttctccccgcagggctaacgagac

SEQ ID NO: 2440412 - DNA, 25 bp, Homo sapien
gatggcaacatccatgcgacaggcc

SEQ ID NO: 2440413 - DNA, 25 bp, Homo sapien
caacctgatggcaacatccatgcga

SEQ ID NO: 2440414 - DNA, 25 bp, Homo sapien
acaggagaaggccaacctgatggca

SEQ ID NO: 2440415 - DNA, 25 bp, Homo sapien
ggagaaggccaacctgatggcaaca

SEQ ID NO: 2440416 - DNA, 25 bp, Homo sapien
tgctgccagttagaggtacagagac

SEQ ID NO: 2440417 - DNA, 25 bp, Homo sapien
ggcgtcactggctctaactaactgg

SEQ ID NO: 2440418 - DNA, 25 bp, Homo sapien
gggcctgggtcctcaacagaataca

SEQ ID NO: 2440419 - DNA, 25 bp, Homo sapien
cactgccaggcttagagatgaaatc

SEQ ID NO: 2440420 - DNA, 25 bp, Homo sapien
cctgagctaccctttacagagctag

SEQ ID NO: 2440421 - DNA, 25 bp, Homo sapien
tcacctgagctaccctttacagagc

SEQ ID NO: 2440422 - DNA, 25 bp, Homo sapien
ttatctaaaagagaaggtcacgctg

SEQ ID NO: 2440423 - DNA, 25 bp, Homo sapien
ctggaaccaaaagcttcacctgagc

SEQ ID NO: 2440424 - DNA, 25 bp, Homo sapien
ggagccagactgtcggcctccagag

SEQ ID NO: 2440425 - DNA, 25 bp, Homo sapien
gaccctcccttagagccaccaccag

SEQ ID NO: 2440426 - DNA, 25 bp, Homo sapien
gagccaccaccagatccgtatcttc

SEQ ID NO: 2440427 - DNA, 25 bp, Homo sapien
accagatccgtatcttcctccagaa

SEQ ID NO: 2440428 - DNA, 25 bp, Homo sapien
tggatgccacatttgatgaaatggt

SEQ ID NO: 2440429 - DNA, 25 bp, Homo sapien
cttggatgccacatttgatgaaatg

SEQ ID NO: 2440430 - DNA, 25 bp, Homo sapien
ttggatgccacatttgatgaaatgg

SEQ ID NO: 2440431 - DNA, 25 bp, Homo sapien
ggatgccacatttgatgaaatggtg

SEQ ID NO: 2440432 - DNA, 25 bp, Homo sapien
cattgctgctgaggtctccagacat

SEQ ID NO: 2440433 - DNA, 25 bp, Homo sapien
acagtcacattgctgctgaggtctc

SEQ ID NO: 2440434 - DNA, 25 bp, Homo sapien
gtcacattgctgctgaggtctccag

SEQ ID NO: 2440435 - DNA, 25 bp, Homo sapien
cacattgctgctgaggtctccagac

SEQ ID NO: 2440436 - DNA, 25 bp, Homo sapien
acacttaggttctgtatgcatgttg

SEQ ID NO: 2440437 - DNA, 25 bp, Homo sapien
cacttaggttctgtatgcatgttgt

SEQ ID NO: 2440438 - DNA, 25 bp, Homo sapien
aaacaagttgtggtggaacacttag

SEQ ID NO: 2440439 - DNA, 25 bp, Homo sapien
gttgtggtggaacacttaggttctg

SEQ ID NO: 2440440 - DNA, 25 bp, Homo sapien
gggcataggaggcattgcctctaga

SEQ ID NO: 2440441 - DNA, 25 bp, Homo sapien
ttccccttccaattgcttcagccag

SEQ ID NO: 2440442 - DNA, 25 bp, Homo sapien
gcataggaggcattgcctctagaca

SEQ ID NO: 2440443 - DNA, 25 bp, Homo sapien
cactccctgtttgtcatgctggctt

SEQ ID NO: 2440444 - DNA, 25 bp, Homo sapien
cgatggcatcttgcacattcttaca

SEQ ID NO: 2440445 - DNA, 25 bp, Homo sapien
tgcgatggcatcttgcacattctta

SEQ ID NO: 2440446 - DNA, 25 bp, Homo sapien
catctgcgatggcatcttgcacatt

SEQ ID NO: 2440447 - DNA, 25 bp, Homo sapien
gtcacgcagcagccgcgccaagtcc

SEQ ID NO: 2440448 - DNA, 25 bp, Homo sapien
cacccagagacaacctcccgcccct

SEQ ID NO: 2440449 - DNA, 25 bp, Homo sapien
cggttcagctcgctgatctctatct

SEQ ID NO: 2440450 - DNA, 25 bp, Homo sapien
tcagctcgctgatctctatcttgat

SEQ ID NO: 2440451 - DNA, 25 bp, Homo sapien
ctgcagcctctggatcacgcggttc

SEQ ID NO: 2440452 - DNA, 25 bp, Homo sapien
ttcttcacatgtgcgatctccccct

SEQ ID NO: 2440453 - DNA, 25 bp, Homo sapien
gaggacagtttgcaaggaagttcca

SEQ ID NO: 2440454 - DNA, 25 bp, Homo sapien
cagcctggctcacattccagactga

SEQ ID NO: 2440455 - DNA, 25 bp, Homo sapien
aggacagtttgcaaggaagttccag

SEQ ID NO: 2440456 - DNA, 25 bp, Homo sapien
ggacagtttgcaaggaagttccagc

SEQ ID NO: 2440457 - DNA, 25 bp, Homo sapien
gtgcaacccagctcatggcagggag

SEQ ID NO: 2440458 - DNA, 25 bp, Homo sapien
ctgggggtgcaacccagctcatggc

SEQ ID NO: 2440459 - DNA, 25 bp, Homo sapien
ggtgcaacccagctcatggcaggga

SEQ ID NO: 2440460 - DNA, 25 bp, Homo sapien
ggcgatgatgctatccaagtccagg

SEQ ID NO: 2440461 - DNA, 25 bp, Homo sapien
tggtacagggcctccgcttcttcct

SEQ ID NO: 2440462 - DNA, 25 bp, Homo sapien
cactctgatgtatctgggatatctc

SEQ ID NO: 2440463 - DNA, 25 bp, Homo sapien
atggagaggatgacgttggtgtcag

SEQ ID NO: 2440464 - DNA, 25 bp, Homo sapien
ttatcatgtaggcattgtccacgtc

SEQ ID NO: 2440465 - DNA, 25 bp, Homo sapien
tggactgcaactccacctttatcat

SEQ ID NO: 2440466 - DNA, 25 bp, Homo sapien
cacctttatcatgtaggcattgtcc

SEQ ID NO: 2440467 - DNA, 25 bp, Homo sapien
aggtccaccttggactgcaactcca

SEQ ID NO: 2440468 - DNA, 25 bp, Homo sapien
tttaagcgtcacaaaatcattctca

SEQ ID NO: 2440469 - DNA, 25 bp, Homo sapien
ttaagcgtcacaaaatcattctcag

SEQ ID NO: 2440470 - DNA, 25 bp, Homo sapien
taagcgtcacaaaatcattctcagc

SEQ ID NO: 2440471 - DNA, 25 bp, Homo sapien
tttttaagcgtcacaaaatcattct

SEQ ID NO: 2440472 - DNA, 25 bp, Homo sapien
ttgaggctgtcgatatacccctgga

SEQ ID NO: 2440473 - DNA, 25 bp, Homo sapien
tgcagtgagcccatccagatatctc

SEQ ID NO: 2440474 - DNA, 25 bp, Homo sapien
taatcctccacaagatcctgcatgt

SEQ ID NO: 2440475 - DNA, 25 bp, Homo sapien
gttgtagcagctcccatttggtctg

SEQ ID NO: 2440476 - DNA, 25 bp, Homo sapien
ttggctctggaagtgaagtggcctg

SEQ ID NO: 2440477 - DNA, 25 bp, Homo sapien
ggttggctctggaagtgaagtggcc

SEQ ID NO: 2440478 - DNA, 25 bp, Homo sapien
tggctctggaagtgaagtggcctga

SEQ ID NO: 2440479 - DNA, 25 bp, Homo sapien
ttttggttggctctggaagtgaagt

SEQ ID NO: 2440480 - DNA, 25 bp, Homo sapien
gttttgatctgctcacgctcttggg

SEQ ID NO: 2440481 - DNA, 25 bp, Homo sapien
atctgctcacgctcttgggccttca

SEQ ID NO: 2440482 - DNA, 25 bp, Homo sapien
gggtcaactttcacgttgagaggct

SEQ ID NO: 2440483 - DNA, 25 bp, Homo sapien
ctgggtcaactttcacgttgagagg

SEQ ID NO: 2440484 - DNA, 25 bp, Homo sapien
gacttcgtggatgccaccagggtat

SEQ ID NO: 2440485 - DNA, 25 bp, Homo sapien
ttcgtggatgccaccagggtatcct

SEQ ID NO: 2440486 - DNA, 25 bp, Homo sapien
tgacagagacttcgtggatgccacc

SEQ ID NO: 2440487 - DNA, 25 bp, Homo sapien
tggttgacagagacttcgtggatgc

SEQ ID NO: 2440488 - DNA, 25 bp, Homo sapien
acctccaaagcggcctccaccaaag

SEQ ID NO: 2440489 - DNA, 25 bp, Homo sapien
ccaccaccactgaagccgctgccac

SEQ ID NO: 2440490 - DNA, 25 bp, Homo sapien
gcggcctccaccaaagccgcctcca

SEQ ID NO: 2440491 - DNA, 25 bp, Homo sapien
gccgcctccaccgaaaccaccacca

SEQ ID NO: 2440492 - DNA, 25 bp, Homo sapien
ccaaatccaccagcggcgccaaagc

SEQ ID NO: 2440493 - DNA, 25 bp, Homo sapien
tctgccaccaaatccaccagcggcg

SEQ ID NO: 2440494 - DNA, 25 bp, Homo sapien
tcctctgccaccaaatccaccagcg

SEQ ID NO: 2440495 - DNA, 25 bp, Homo sapien
tgccgcctccaaaaccacctcctct

SEQ ID NO: 2440496 - DNA, 25 bp, Homo sapien
gacaccacagctgagccgctgctga

SEQ ID NO: 2440497 - DNA, 25 bp, Homo sapien
ctcctcttcctcgagatttgcaaga

SEQ ID NO: 2440498 - DNA, 25 bp, Homo sapien
aacaagactccgactgccaaagccg

SEQ ID NO: 2440499 - DNA, 25 bp, Homo sapien
taatggagatgctcttggtccctcc

SEQ ID NO: 2440500 - DNA, 25 bp, Homo sapien
aggaaagtcacaggctcttgagaag

SEQ ID NO: 2440501 - DNA, 25 bp, Homo sapien
gggaggaaagtcacaggctcttgag

SEQ ID NO: 2440502 - DNA, 25 bp, Homo sapien
gatgcctttgtccagggaggaaagt

SEQ ID NO: 2440503 - DNA, 25 bp, Homo sapien
tgcctttgtccagggaggaaagtca

SEQ ID NO: 2440504 - DNA, 25 bp, Homo sapien
actggtgtttcagcagcagcgcatg

SEQ ID NO: 2440505 - DNA, 25 bp, Homo sapien
tggtgtttcagcagcagcgcatggc

SEQ ID NO: 2440506 - DNA, 25 bp, Homo sapien
ggcactcagctctttgcctggcatt

SEQ ID NO: 2440507 - DNA, 25 bp, Homo sapien
gtgtttcagcagcagcgcatggcac

SEQ ID NO: 2440508 - DNA, 25 bp, Homo sapien
cattcatctttacgtaggaagaggg

SEQ ID NO: 2440509 - DNA, 25 bp, Homo sapien
attcatctttacgtaggaagagggt

SEQ ID NO: 2440510 - DNA, 25 bp, Homo sapien
tcattcatctttacgtaggaagagg

SEQ ID NO: 2440511 - DNA, 25 bp, Homo sapien
attcattcatctttacgtaggaaga

SEQ ID NO: 2440512 - DNA, 25 bp, Homo sapien
tgtggtgaccatcacaggtaccatc

SEQ ID NO: 2440513 - DNA, 25 bp, Homo sapien
gagccgctgcgttgtggtgaccatc

SEQ ID NO: 2440514 - DNA, 25 bp, Homo sapien
catcattgcatgtagagaagccttt

SEQ ID NO: 2440515 - DNA, 25 bp, Homo sapien
taccagcagaggacactccatactg

SEQ ID NO: 2440516 - DNA, 25 bp, Homo sapien
ccatccaggttagacagtgccgtaa

SEQ ID NO: 2440517 - DNA, 25 bp, Homo sapien
ttagacagtgccgtaaacaagggcg

SEQ ID NO: 2440518 - DNA, 25 bp, Homo sapien
taaacaagggcgatcgagacatgga

SEQ ID NO: 2440519 - DNA, 25 bp, Homo sapien
tgccgtaaacaagggcgatcgagac

SEQ ID NO: 2440520 - DNA, 25 bp, Homo sapien
cacaccctgggtctaactggtccta

SEQ ID NO: 2440521 - DNA, 25 bp, Homo sapien
gaactagagctaatgaaacagaggg

SEQ ID NO: 2440522 - DNA, 25 bp, Homo sapien
cctactctggctggcttaaggaggt

SEQ ID NO: 2440523 - DNA, 25 bp, Homo sapien
taaggctgggacaaatcgacctcgg

SEQ ID NO: 2440524 - DNA, 25 bp, Homo sapien
tgctgcttccggagccgtagctgcc

SEQ ID NO: 2440525 - DNA, 25 bp, Homo sapien
cttccggagccgtagctgccatggc

SEQ ID NO: 2440526 - DNA, 25 bp, Homo sapien
cttcacgctggaactgccaccagag

SEQ ID NO: 2440527 - DNA, 25 bp, Homo sapien
gtggtagaaacaaacttcacgctgg

SEQ ID NO: 2440528 - DNA, 25 bp, Homo sapien
ctacctccagagccgtagccaccgc

SEQ ID NO: 2440529 - DNA, 25 bp, Homo sapien
tgctacctccagagccgtagccacc

SEQ ID NO: 2440530 - DNA, 25 bp, Homo sapien
gctgctacctccagagccgtagcca

SEQ ID NO: 2440531 - DNA, 25 bp, Homo sapien
agctgctacctccagagccgtagcc

SEQ ID NO: 2440532 - DNA, 25 bp, Homo sapien
gttcggggcacattctccagacatc

SEQ ID NO: 2440533 - DNA, 25 bp, Homo sapien
tgatggactgctgcaagttggagat

SEQ ID NO: 2440534 - DNA, 25 bp, Homo sapien
ttctcgccacgctgctctgcatcac

SEQ ID NO: 2440535 - DNA, 25 bp, Homo sapien
atcactgatggactgctgcaagttg

SEQ ID NO: 2440536 - DNA, 25 bp, Homo sapien
ttggcatccttgagggcattctcgc

SEQ ID NO: 2440537 - DNA, 25 bp, Homo sapien
ctgaaaaagaatatgacaccctctc

SEQ ID NO: 2440538 - DNA, 25 bp, Homo sapien
gaatatgacaccctctcataatatg

SEQ ID NO: 2440539 - DNA, 25 bp, Homo sapien
gaaaaagaatatgacaccctctcat

SEQ ID NO: 2440540 - DNA, 25 bp, Homo sapien
tatgacaccctctcataatatgcat

SEQ ID NO: 2440541 - DNA, 25 bp, Homo sapien
tccatacagctgagtggtagaagga

SEQ ID NO: 2440542 - DNA, 25 bp, Homo sapien
cattccatacagctgagtggtagaa

SEQ ID NO: 2440543 - DNA, 25 bp, Homo sapien
ttccatacagctgagtggtagaagg

SEQ ID NO: 2440544 - DNA, 25 bp, Homo sapien
gagggttacccccattccatacagc

SEQ ID NO: 2440545 - DNA, 25 bp, Homo sapien
tctctggatcacacgattcagctca

SEQ ID NO: 2440546 - DNA, 25 bp, Homo sapien
gtcgatttcagatctaagtctctgg

SEQ ID NO: 2440547 - DNA, 25 bp, Homo sapien
tcacacgattcagctcagaaatttc

SEQ ID NO: 2440548 - DNA, 25 bp, Homo sapien
ctaagtctctggatcacacgattca

SEQ ID NO: 2440549 - DNA, 25 bp, Homo sapien
gaggatgacattagtttcactgatt

SEQ ID NO: 2440550 - DNA, 25 bp, Homo sapien
tgatgctgtccaggtcgagactgcg

SEQ ID NO: 2440551 - DNA, 25 bp, Homo sapien
tgggctatatcctcgtactgggcct

SEQ ID NO: 2440552 - DNA, 25 bp, Homo sapien
ctctggtacaaggactcggcctcag

SEQ ID NO: 2440553 - DNA, 25 bp, Homo sapien
tgcaagacataataggttagtgact

SEQ ID NO: 2440554 - DNA, 25 bp, Homo sapien
ctgcaagacataataggttagtgac

SEQ ID NO: 2440555 - DNA, 25 bp, Homo sapien
caagttgtcaagtttggcctgaagg

SEQ ID NO: 2440556 - DNA, 25 bp, Homo sapien
agtttggcctgaaggtccaccttgg

SEQ ID NO: 2440557 - DNA, 25 bp, Homo sapien
tcaagtttggcctgaaggtccacct

SEQ ID NO: 2440558 - DNA, 25 bp, Homo sapien
tcctgctgcaagttgtcaagtttgg

SEQ ID NO: 2440559 - DNA, 25 bp, Homo sapien
tgcatttgtccgcttgttgatttca

SEQ ID NO: 2440560 - DNA, 25 bp, Homo sapien
tctctgcatttgtccgcttgttgat

SEQ ID NO: 2440561 - DNA, 25 bp, Homo sapien
tagtggaggtatctacctgctgcag

SEQ ID NO: 2440562 - DNA, 25 bp, Homo sapien
gcatgttcttcagttccgaatccaa

SEQ ID NO: 2440563 - DNA, 25 bp, Homo sapien
tgttccggtaatcctccaccatgtc

SEQ ID NO: 2440564 - DNA, 25 bp, Homo sapien
ccttcggagattgttgatgaatgac

SEQ ID NO: 2440565 - DNA, 25 bp, Homo sapien
tgttgagtgacttgatttgctccct

SEQ ID NO: 2440566 - DNA, 25 bp, Homo sapien
aatctccacattgaggggctgaaga

SEQ ID NO: 2440567 - DNA, 25 bp, Homo sapien
tgatttgctccctttctcgagactt

SEQ ID NO: 2440568 - DNA, 25 bp, Homo sapien
tggttgttgagtgacttgatttgct

SEQ ID NO: 2440569 - DNA, 25 bp, Homo sapien
aggagggcagacaggaccataacca

SEQ ID NO: 2440570 - DNA, 25 bp, Homo sapien
gcagacaggaccataaccaccccca

SEQ ID NO: 2440571 - DNA, 25 bp, Homo sapien
ggagggcagacaggaccataaccac

SEQ ID NO: 2440572 - DNA, 25 bp, Homo sapien
agggcagacaggaccataaccaccc

SEQ ID NO: 2440573 - DNA, 25 bp, Homo sapien
ccaccactgccaaaaccaccaaagc

SEQ ID NO: 2440574 - DNA, 25 bp, Homo sapien
ccaccaccactgccaaaaccaccaa

SEQ ID NO: 2440575 - DNA, 25 bp, Homo sapien
ccactgccaaaaccaccaaagccac

SEQ ID NO: 2440576 - DNA, 25 bp, Homo sapien
accaaagccaccacccccaatgcca

SEQ ID NO: 2440577 - DNA, 25 bp, Homo sapien
gccacacttatggagatgcttttac

SEQ ID NO: 2440578 - DNA, 25 bp, Homo sapien
caccaaggttaacaagactccgact

SEQ ID NO: 2440579 - DNA, 25 bp, Homo sapien
acacttatggagatgcttttactgc

SEQ ID NO: 2440580 - DNA, 25 bp, Homo sapien
tactgccaccaaggttaacaagact

SEQ ID NO: 2440581 - DNA, 25 bp, Homo sapien
tggtcctgcgctggtagttgatgat

SEQ ID NO: 2440582 - DNA, 25 bp, Homo sapien
tgctggtggtcctgcgctggtagtt

SEQ ID NO: 2440583 - DNA, 25 bp, Homo sapien
tcctgcgctggtagttgatgatccc

SEQ ID NO: 2440584 - DNA, 25 bp, Homo sapien
ctccactgcggcgtgtggagctgct

SEQ ID NO: 2440585 - DNA, 25 bp, Homo sapien
taggagcaaggtagagtaagggaag

SEQ ID NO: 2440586 - DNA, 25 bp, Homo sapien
agtaggagcaaggtagagtaaggga

SEQ ID NO: 2440587 - DNA, 25 bp, Homo sapien
ggagcaaggtagagtaagggaagga

SEQ ID NO: 2440588 - DNA, 25 bp, Homo sapien
gcaaggtagagtaagggaaggagct

SEQ ID NO: 2440589 - DNA, 25 bp, Homo sapien
cagcaggtgcaattccccgtgcttg

SEQ ID NO: 2440590 - DNA, 25 bp, Homo sapien
aattccccgtgcttggatctcagaa

SEQ ID NO: 2440591 - DNA, 25 bp, Homo sapien
gcaggtgcaattccccgtgcttgga

SEQ ID NO: 2440592 - DNA, 25 bp, Homo sapien
gtgcaattccccgtgcttggatctc

SEQ ID NO: 2440593 - DNA, 25 bp, Homo sapien
ctgccagctggacactcaaagtcat

SEQ ID NO: 2440594 - DNA, 25 bp, Homo sapien
tgtgggcagcaaatctatactatcc

SEQ ID NO: 2440595 - DNA, 25 bp, Homo sapien
tatggaccaagaggcaggaataggc

SEQ ID NO: 2440596 - DNA, 25 bp, Homo sapien
tatagaaataccagaaatgctgccc

SEQ ID NO: 2440597 - DNA, 25 bp, Homo sapien
tgtgcctagctgtgaatctgactgc

SEQ ID NO: 2440598 - DNA, 25 bp, Homo sapien
tggatgatctgcacgcgcgaggatc

SEQ ID NO: 2440599 - DNA, 25 bp, Homo sapien
atctgcacgcgcgaggatccgcggc

SEQ ID NO: 2440600 - DNA, 25 bp, Homo sapien
ccaagatccgcctgtgggaggtgtt

SEQ ID NO: 2440601 - DNA, 25 bp, Homo sapien
ctactccaagatccgcctgtgggag

SEQ ID NO: 2440602 - DNA, 25 bp, Homo sapien
gcggtagcttcttccgccgccatag

SEQ ID NO: 2440603 - DNA, 25 bp, Homo sapien
gtagcctcctgagccgtagctgccg

SEQ ID NO: 2440604 - DNA, 25 bp, Homo sapien
tccactcctgcctcgtgccccgcct

SEQ ID NO: 2440605 - DNA, 25 bp, Homo sapien
ccgtagcctcctgagccgtagctgc

SEQ ID NO: 2440606 - DNA, 25 bp, Homo sapien
atggctctgcagctctcctgacatc

SEQ ID NO: 2440607 - DNA, 25 bp, Homo sapien
gccccagaaacacagctgccagacc

SEQ ID NO: 2440608 - DNA, 25 bp, Homo sapien
ttagccccagaaacacagctgccag

SEQ ID NO: 2440609 - DNA, 25 bp, Homo sapien
ccagaaacacagctgccagacccac

SEQ ID NO: 2440610 - DNA, 25 bp, Homo sapien
agccccagaaacacagctgccagac

SEQ ID NO: 2440611 - DNA, 25 bp, Homo sapien
tctgccacgcatcctggagggcctg

SEQ ID NO: 2440612 - DNA, 25 bp, Homo sapien
gcttctgccacgcatcctggagggc

SEQ ID NO: 2440613 - DNA, 25 bp, Homo sapien
tgcagcttctgccacgcatcctgga

SEQ ID NO: 2440614 - DNA, 25 bp, Homo sapien
cccagcatggcctggtagtcacgca

SEQ ID NO: 2440615 - DNA, 25 bp, Homo sapien
ggacggtgcggttgagctctgcaat

SEQ ID NO: 2440616 - DNA, 25 bp, Homo sapien
ctgcttcttcacgttgctgatctct

SEQ ID NO: 2440617 - DNA, 25 bp, Homo sapien
agcctctggacggtgcggttgagct

SEQ ID NO: 2440618 - DNA, 25 bp, Homo sapien
gcttcttcacgttgctgatctctgc

SEQ ID NO: 2440619 - DNA, 25 bp, Homo sapien
gttcttcaggtcgtctccatgtctc

SEQ ID NO: 2440620 - DNA, 25 bp, Homo sapien
gtctccctgccgtgatctggagctc

SEQ ID NO: 2440621 - DNA, 25 bp, Homo sapien
ttcttcaggtcgtctccatgtctcc

SEQ ID NO: 2440622 - DNA, 25 bp, Homo sapien
tccatgtctccctgccgtgatctgg

SEQ ID NO: 2440623 - DNA, 25 bp, Homo sapien
tgctcctctgtgcaatcagttcata

SEQ ID NO: 2440624 - DNA, 25 bp, Homo sapien
tgggtccgcactgcatcgatgatgc

SEQ ID NO: 2440625 - DNA, 25 bp, Homo sapien
ggaacggttattgtccatggacagg

SEQ ID NO: 2440626 - DNA, 25 bp, Homo sapien
tgtgagtctgcacctgagacagctc

SEQ ID NO: 2440627 - DNA, 25 bp, Homo sapien
aagaaattgacctccccagtcagag

SEQ ID NO: 2440628 - DNA, 25 bp, Homo sapien
ttgacctccccagtcagagtgtcca

SEQ ID NO: 2440629 - DNA, 25 bp, Homo sapien
atttcaagaaattgacctccccagt

SEQ ID NO: 2440630 - DNA, 25 bp, Homo sapien
aattgacctccccagtcagagtgtc

SEQ ID NO: 2440631 - DNA, 25 bp, Homo sapien
gacgacaaagtcattctcgctgcca

SEQ ID NO: 2440632 - DNA, 25 bp, Homo sapien
ggacgacaaagtcattctcgctgcc

SEQ ID NO: 2440633 - DNA, 25 bp, Homo sapien
aggacgacaaagtcattctcgctgc

SEQ ID NO: 2440634 - DNA, 25 bp, Homo sapien
gctcttgtagtcctccacgacatcc

SEQ ID NO: 2440635 - DNA, 25 bp, Homo sapien
gctccgcactgagcaaatccacctg

SEQ ID NO: 2440636 - DNA, 25 bp, Homo sapien
gttctggcgcatctgctccgcactg

SEQ ID NO: 2440637 - DNA, 25 bp, Homo sapien
tcaccgatgtagttctccaagaggg

SEQ ID NO: 2440638 - DNA, 25 bp, Homo sapien
cctcatagtcatcataggccatgcc

SEQ ID NO: 2440639 - DNA, 25 bp, Homo sapien
gctgagaagcctctcctcatagtca

SEQ ID NO: 2440640 - DNA, 25 bp, Homo sapien
gagaagcctctcctcatagtcatca

SEQ ID NO: 2440641 - DNA, 25 bp, Homo sapien
tggctgagaagcctctcctcatagt

SEQ ID NO: 2440642 - DNA, 25 bp, Homo sapien
tcagtgaccaatgaccctccctgcc

SEQ ID NO: 2440643 - DNA, 25 bp, Homo sapien
ttgttgttgagaaccataatctgct

SEQ ID NO: 2440644 - DNA, 25 bp, Homo sapien
gttgagaaccataatctgctcccgc

SEQ ID NO: 2440645 - DNA, 25 bp, Homo sapien
tgatcctctgaatttcagggtccac

SEQ ID NO: 2440646 - DNA, 25 bp, Homo sapien
ctgaatttcagggtccacctccagg

SEQ ID NO: 2440647 - DNA, 25 bp, Homo sapien
cttggatgcccccaggaggacaata

SEQ ID NO: 2440648 - DNA, 25 bp, Homo sapien
caggaggacaataaggaccaaagcc

SEQ ID NO: 2440649 - DNA, 25 bp, Homo sapien
gcccccaggaggacaataaggacca

SEQ ID NO: 2440650 - DNA, 25 bp, Homo sapien
ggttaatggtcacctcttggatgcc

SEQ ID NO: 2440651 - DNA, 25 bp, Homo sapien
tagtcccaaatccagcacccccaaa

SEQ ID NO: 2440652 - DNA, 25 bp, Homo sapien
tccaaagccaccagccccggtgctg

SEQ ID NO: 2440653 - DNA, 25 bp, Homo sapien
ctagtcccaaatccagcacccccaa

SEQ ID NO: 2440654 - DNA, 25 bp, Homo sapien
gccccggtgctgccaaccccaaagc

SEQ ID NO: 2440655 - DNA, 25 bp, Homo sapien
gcagaaaccactggtgctcctcccc

SEQ ID NO: 2440656 - DNA, 25 bp, Homo sapien
tggcagaaaccactggtgctcctcc

SEQ ID NO: 2440657 - DNA, 25 bp, Homo sapien
ctggcagaaaccactggtgctcctc

SEQ ID NO: 2440658 - DNA, 25 bp, Homo sapien
agaaaccactggtgctcctccccat

SEQ ID NO: 2440659 - DNA, 25 bp, Homo sapien
aatggagatgcttctactgccaccc

SEQ ID NO: 2440660 - DNA, 25 bp, Homo sapien
gagatgcttctactgccacccagat

SEQ ID NO: 2440661 - DNA, 25 bp, Homo sapien
agattaatggagatgcttctactgc

SEQ ID NO: 2440662 - DNA, 25 bp, Homo sapien
tactgccacccagattgtagaggct

SEQ ID NO: 2440663 - DNA, 25 bp, Homo sapien
aagagctggtactataaacccgcct

SEQ ID NO: 2440664 - DNA, 25 bp, Homo sapien
gaactaaacgcggactgagaactaa

SEQ ID NO: 2440665 - DNA, 25 bp, Homo sapien
tccctcgagcataacacacagaacc

SEQ ID NO: 2440666 - DNA, 25 bp, Homo sapien
taaacccgcctgctcattgaactaa

SEQ ID NO: 2440667 - DNA, 25 bp, Homo sapien
gtttgctggagcatccagagaagca

SEQ ID NO: 2440668 - DNA, 25 bp, Homo sapien
cagagaagcaggcaagagaaagagc

SEQ ID NO: 2440669 - DNA, 25 bp, Homo sapien
atccagagaagcaggcaagagaaag

SEQ ID NO: 2440670 - DNA, 25 bp, Homo sapien
tttgctggagcatccagagaagcag

SEQ ID NO: 2440671 - DNA, 25 bp, Homo sapien
cattccgtacatggtatctgttcag

SEQ ID NO: 2440672 - DNA, 25 bp, Homo sapien
tgttcagtgggtcatccaggagaca

SEQ ID NO: 2440673 - DNA, 25 bp, Homo sapien
ggtatctgttcagtgggtcatccag

SEQ ID NO: 2440674 - DNA, 25 bp, Homo sapien
tctcatgaacctctgcattccgtac

SEQ ID NO: 2440675 - DNA, 25 bp, Homo sapien
ctcgaaggatgtactgtaggccagt

SEQ ID NO: 2440676 - DNA, 25 bp, Homo sapien
ccagtgagagggtgctctgttgtag

SEQ ID NO: 2440677 - DNA, 25 bp, Homo sapien
ccagagaaactgctcgtgccaaggc

SEQ ID NO: 2440678 - DNA, 25 bp, Homo sapien
aaggatgtactgtaggccagtgaga

SEQ ID NO: 2440679 - DNA, 25 bp, Homo sapien
ggcctttaacctccttgaaatgaga

SEQ ID NO: 2440680 - DNA, 25 bp, Homo sapien
gcctttaacctccttgaaatgagag

SEQ ID NO: 2440681 - DNA, 25 bp, Homo sapien
ggaccgccagctctaggaggagctt

SEQ ID NO: 2440682 - DNA, 25 bp, Homo sapien
tcgggctgctgcgatgccagcagtc

SEQ ID NO: 2440683 - DNA, 25 bp, Homo sapien
gttcagaatttgtggcgggaccgcc

SEQ ID NO: 2440684 - DNA, 25 bp, Homo sapien
catccttcgcggcaactttcgggct

SEQ ID NO: 2440685 - DNA, 25 bp, Homo sapien
aggatcacggaactctggcacctcc

SEQ ID NO: 2440686 - DNA, 25 bp, Homo sapien
acggaactctggcacctcccagaca

SEQ ID NO: 2440687 - DNA, 25 bp, Homo sapien
ctaggatcacggaactctggcacct

SEQ ID NO: 2440688 - DNA, 25 bp, Homo sapien
ggaactctggcacctcccagacacc

SEQ ID NO: 2440689 - DNA, 25 bp, Homo sapien
gggccagcttggcattcatcagcgc

SEQ ID NO: 2440690 - DNA, 25 bp, Homo sapien
caggagggtccggtaggtggcgatc

SEQ ID NO: 2440691 - DNA, 25 bp, Homo sapien
ctgcattcctcgccctccaggaggg

SEQ ID NO: 2440692 - DNA, 25 bp, Homo sapien
gcattcctcgccctccaggagggtc

SEQ ID NO: 2440693 - DNA, 25 bp, Homo sapien
ctggtacgcacaaagcagcagggcc

SEQ ID NO: 2440694 - DNA, 25 bp, Homo sapien
caaagcagcagggccaggtcctctt

SEQ ID NO: 2440695 - DNA, 25 bp, Homo sapien
gcagcagggccaggtcctctttggc

SEQ ID NO: 2440696 - DNA, 25 bp, Homo sapien
aagcagcagggccaggtcctctttg

SEQ ID NO: 2440697 - DNA, 25 bp, Homo sapien
atgttcttttcctcctcatccccac

SEQ ID NO: 2440698 - DNA, 25 bp, Homo sapien
catgttcttttcctcctcatcccca

SEQ ID NO: 2440699 - DNA, 25 bp, Homo sapien
tcatgttcttttcctcctcatcccc

SEQ ID NO: 2440700 - DNA, 25 bp, Homo sapien
catcctgttgagctccatgatctca

SEQ ID NO: 2440701 - DNA, 25 bp, Homo sapien
tcatcctgttgagctccatgatctc

SEQ ID NO: 2440702 - DNA, 25 bp, Homo sapien
caggtccaggcagcggtttttgtcc

SEQ ID NO: 2440703 - DNA, 25 bp, Homo sapien
agacgtgtcgctggtgtctgactgc

SEQ ID NO: 2440704 - DNA, 25 bp, Homo sapien
ggcaacgatactgtccaggtccagg

SEQ ID NO: 2440705 - DNA, 25 bp, Homo sapien
aaagaaccacagacgtgtcgctggt

SEQ ID NO: 2440706 - DNA, 25 bp, Homo sapien
ctcccacagggccaagcaaacatgc

SEQ ID NO: 2440707 - DNA, 25 bp, Homo sapien
gacagctcccacagggccaagcaaa

SEQ ID NO: 2440708 - DNA, 25 bp, Homo sapien
agctcccacagggccaagcaaacat

SEQ ID NO: 2440709 - DNA, 25 bp, Homo sapien
acagctcccacagggccaagcaaac

SEQ ID NO: 2440710 - DNA, 25 bp, Homo sapien
acccacactaggcttcccaacagag

SEQ ID NO: 2440711 - DNA, 25 bp, Homo sapien
ctgagcagacccacactaggcttcc

SEQ ID NO: 2440712 - DNA, 25 bp, Homo sapien
agacccacactaggcttcccaacag

SEQ ID NO: 2440713 - DNA, 25 bp, Homo sapien
gcagacccacactaggcttcccaac

SEQ ID NO: 2440714 - DNA, 25 bp, Homo sapien
caggtgagtcccgaggaatggcaat

SEQ ID NO: 2440715 - DNA, 25 bp, Homo sapien
gtcctgctggacttctaaatgccct

SEQ ID NO: 2440716 - DNA, 25 bp, Homo sapien
ttccagcatcgtagagggctttcag

SEQ ID NO: 2440717 - DNA, 25 bp, Homo sapien
tcaggaagttcatctcgcctatcat

SEQ ID NO: 2440718 - DNA, 25 bp, Homo sapien
tgcagctgtgcacttgctgacctca

SEQ ID NO: 2440719 - DNA, 25 bp, Homo sapien
tcaggaccacaaagtcattctctgc

SEQ ID NO: 2440720 - DNA, 25 bp, Homo sapien
ttctctgcagctgtgcacttgctga

SEQ ID NO: 2440721 - DNA, 25 bp, Homo sapien
tctgcagctgtgcacttgctgacct

SEQ ID NO: 2440722 - DNA, 25 bp, Homo sapien
ccacagagggcttgacatattgggt

SEQ ID NO: 2440723 - DNA, 25 bp, Homo sapien
catattgggtgaacccacaactcct

SEQ ID NO: 2440724 - DNA, 25 bp, Homo sapien
actgctgagataccacagagggctt

SEQ ID NO: 2440725 - DNA, 25 bp, Homo sapien
gctgctgtaagcaggcccactactg

SEQ ID NO: 2440726 - DNA, 25 bp, Homo sapien
ttaaggtcagtctcctggaggggct

SEQ ID NO: 2440727 - DNA, 25 bp, Homo sapien
tctggttgacagtcacttcctggat

SEQ ID NO: 2440728 - DNA, 25 bp, Homo sapien
gctctggttgacagtcacttcctgg

SEQ ID NO: 2440729 - DNA, 25 bp, Homo sapien
gcttctgggcctttacttgcccaaa

SEQ ID NO: 2440730 - DNA, 25 bp, Homo sapien
ctgaggtcacggaggccaccaaagc

SEQ ID NO: 2440731 - DNA, 25 bp, Homo sapien
agcctccaattcctccgccaaagcc

SEQ ID NO: 2440732 - DNA, 25 bp, Homo sapien
aaagcttccagaaccaccaaagcca

SEQ ID NO: 2440733 - DNA, 25 bp, Homo sapien
accaggaccaccaaagcttccagaa

SEQ ID NO: 2440734 - DNA, 25 bp, Homo sapien
actgatagggatcgtcttcttcccc

SEQ ID NO: 2440735 - DNA, 25 bp, Homo sapien
tccagccacactgatagggatcgtc

SEQ ID NO: 2440736 - DNA, 25 bp, Homo sapien
cacactgatagggatcgtcttcttc

SEQ ID NO: 2440737 - DNA, 25 bp, Homo sapien
caccagccccgctgaacccactagc

SEQ ID NO: 2440738 - DNA, 25 bp, Homo sapien
ctgctgaaggtctggcagtaggccc

SEQ ID NO: 2440739 - DNA, 25 bp, Homo sapien
ggcagtaggccccaccagaagacct

SEQ ID NO: 2440740 - DNA, 25 bp, Homo sapien
tgtagcttatctggcgactcatggc

SEQ ID NO: 2440741 - DNA, 25 bp, Homo sapien
gaggcaaaggaggacatgatggagc

SEQ ID NO: 2440742 - DNA, 25 bp, Homo sapien
tgggcgtggacctcagcaatgatac

SEQ ID NO: 2440743 - DNA, 25 bp, Homo sapien
tgattccgacagtagttggttatac

SEQ ID NO: 2440744 - DNA, 25 bp, Homo sapien
caggtgccaattgttgtccagggag

SEQ ID NO: 2440745 - DNA, 25 bp, Homo sapien
gagaggatgacggacatgtcatttg

SEQ ID NO: 2440746 - DNA, 25 bp, Homo sapien
actttcacctccaggtccactttgg

SEQ ID NO: 2440747 - DNA, 25 bp, Homo sapien
ccactttcacctccaggtccacttt

SEQ ID NO: 2440748 - DNA, 25 bp, Homo sapien
gaagttgatctcatccatcaggctc

SEQ ID NO: 2440749 - DNA, 25 bp, Homo sapien
ttgatctcatccatcaggctctcca

SEQ ID NO: 2440750 - DNA, 25 bp, Homo sapien
tccaaggaggaaaggaagcgatcat

SEQ ID NO: 2440751 - DNA, 25 bp, Homo sapien
cttccaaggaggaaaggaagcgatc

SEQ ID NO: 2440752 - DNA, 25 bp, Homo sapien
ttccaaggaggaaaggaagcgatca

SEQ ID NO: 2440753 - DNA, 25 bp, Homo sapien
tcagctgctgcacgcttgctccgct

SEQ ID NO: 2440754 - DNA, 25 bp, Homo sapien
agctgctgcacgcttgctccgctct

SEQ ID NO: 2440755 - DNA, 25 bp, Homo sapien
ctgctgcacgcttgctccgctcttc

SEQ ID NO: 2440756 - DNA, 25 bp, Homo sapien
tctcagctgctgcacgcttgctccg

SEQ ID NO: 2440757 - DNA, 25 bp, Homo sapien
ctcctcttgtatgcctccccgagcg

SEQ ID NO: 2440758 - DNA, 25 bp, Homo sapien
ccatcagtagcttgtcaaggtgagc

SEQ ID NO: 2440759 - DNA, 25 bp, Homo sapien
atgcctccccgagcgcctgcatggt

SEQ ID NO: 2440760 - DNA, 25 bp, Homo sapien
gccgaccccgctccatcagtagctt

SEQ ID NO: 2440761 - DNA, 25 bp, Homo sapien
aatgtaggattcaaagaagggctgc

SEQ ID NO: 2440762 - DNA, 25 bp, Homo sapien
gcagccaatgtaggattcaaagaag

SEQ ID NO: 2440763 - DNA, 25 bp, Homo sapien
tcaaagaagggctgcaggtcattgg

SEQ ID NO: 2440764 - DNA, 25 bp, Homo sapien
ctggaggcagccaatgtaggattca

SEQ ID NO: 2440765 - DNA, 25 bp, Homo sapien
ccttgttctgctgctccagcaaccg

SEQ ID NO: 2440766 - DNA, 25 bp, Homo sapien
tcacttggtctccagcaccttgttc

SEQ ID NO: 2440767 - DNA, 25 bp, Homo sapien
caccttgttctgctgctccagcaac

SEQ ID NO: 2440768 - DNA, 25 bp, Homo sapien
tgttctgctgctccagcaaccgtac

SEQ ID NO: 2440769 - DNA, 25 bp, Homo sapien
gttccttctcttgggtcttcacctc

SEQ ID NO: 2440770 - DNA, 25 bp, Homo sapien
gatctgttccttctcttgggtcttc

SEQ ID NO: 2440771 - DNA, 25 bp, Homo sapien
ccttctcttgggtcttcacctcaat

SEQ ID NO: 2440772 - DNA, 25 bp, Homo sapien
ctgttccttctcttgggtcttcacc

SEQ ID NO: 2440773 - DNA, 25 bp, Homo sapien
tcagtatgtggtgcaggagcactgg

SEQ ID NO: 2440774 - DNA, 25 bp, Homo sapien
ccactgctggtggtggtctgcacaa

SEQ ID NO: 2440775 - DNA, 25 bp, Homo sapien
cactggccactgctggtggtggtct

SEQ ID NO: 2440776 - DNA, 25 bp, Homo sapien
gctggtggtggtctgcacaatcctg

SEQ ID NO: 2440777 - DNA, 25 bp, Homo sapien
ccaatagccatggagttaatacccc

SEQ ID NO: 2440778 - DNA, 25 bp, Homo sapien
catggagttaatacccccttggaga

SEQ ID NO: 2440779 - DNA, 25 bp, Homo sapien
atccttcccaatagccatggagtta

SEQ ID NO: 2440780 - DNA, 25 bp, Homo sapien
tcccaatagccatggagttaatacc

SEQ ID NO: 2440781 - DNA, 25 bp, Homo sapien
ctaatgtttttgctgctagaagtgt

SEQ ID NO: 2440782 - DNA, 25 bp, Homo sapien
actatcccccatactaatgtttttg

SEQ ID NO: 2440783 - DNA, 25 bp, Homo sapien
gagctgctactatcccccatactaa

SEQ ID NO: 2440784 - DNA, 25 bp, Homo sapien
gctggagctgctactatcccccata

SEQ ID NO: 2440785 - DNA, 25 bp, Homo sapien
aatgcccattgcatgccaatccctg

SEQ ID NO: 2440786 - DNA, 25 bp, Homo sapien
acagtctgtcttcctaaatgcccat

SEQ ID NO: 2440787 - DNA, 25 bp, Homo sapien
tgtcttcctaaatgcccattgcatg

SEQ ID NO: 2440788 - DNA, 25 bp, Homo sapien
aatgagaatggactgctcagtcaca

SEQ ID NO: 2440789 - DNA, 25 bp, Homo sapien
tcttggtagtcacacggaagatgag

SEQ ID NO: 2440790 - DNA, 25 bp, Homo sapien
catcttctggtaggtggcggtctcc

SEQ ID NO: 2440791 - DNA, 25 bp, Homo sapien
ttgagggtcagcatcgccccctgct

SEQ ID NO: 2440792 - DNA, 25 bp, Homo sapien
tcagcagctcttggtagtcacacgg

SEQ ID NO: 2440793 - DNA, 25 bp, Homo sapien
ttagcattccgaagcaggaggagga

SEQ ID NO: 2440794 - DNA, 25 bp, Homo sapien
ggttagcattccgaagcaggaggag

SEQ ID NO: 2440795 - DNA, 25 bp, Homo sapien
tccaggttagcattccgaagcagga

SEQ ID NO: 2440796 - DNA, 25 bp, Homo sapien
caggttagcattccgaagcaggagg

SEQ ID NO: 2440797 - DNA, 25 bp, Homo sapien
tatgtagcaggtgaacacaggtctc

SEQ ID NO: 2440798 - DNA, 25 bp, Homo sapien
atatgtagcaggtgaacacaggtct

SEQ ID NO: 2440799 - DNA, 25 bp, Homo sapien
atgtagcaggtgaacacaggtctcc

SEQ ID NO: 2440800 - DNA, 25 bp, Homo sapien
gctgagctccgcaatctcatttttg

SEQ ID NO: 2440801 - DNA, 25 bp, Homo sapien
tccgcaatctcatttttggtgctcc

SEQ ID NO: 2440802 - DNA, 25 bp, Homo sapien
atcctgctgagctccgcaatctcat

SEQ ID NO: 2440803 - DNA, 25 bp, Homo sapien
caatctcatttttggtgctcctcaa

SEQ ID NO: 2440804 - DNA, 25 bp, Homo sapien
tgctttccctgagtagtccctgcgg

SEQ ID NO: 2440805 - DNA, 25 bp, Homo sapien
ctgtgactgaaacgctgtctgcttt

SEQ ID NO: 2440806 - DNA, 25 bp, Homo sapien
tgactgaaacgctgtctgcttttct

SEQ ID NO: 2440807 - DNA, 25 bp, Homo sapien
ttccctgagtagtccctgcggtatt

SEQ ID NO: 2440808 - DNA, 25 bp, Homo sapien
tagtcatgcacccaactccacaagt

SEQ ID NO: 2440809 - DNA, 25 bp, Homo sapien
ccacaagtggatgagctggatattc

SEQ ID NO: 2440810 - DNA, 25 bp, Homo sapien
gctggatattctccctatccatctg

SEQ ID NO: 2440811 - DNA, 25 bp, Homo sapien
catctgccttctggcaacggtggcc

SEQ ID NO: 2440812 - DNA, 25 bp, Homo sapien
tttaatgtttctgaccaaatttaca

SEQ ID NO: 2440813 - DNA, 25 bp, Homo sapien
gattataaacttcaatttttcgtca

SEQ ID NO: 2440814 - DNA, 25 bp, Homo sapien
attgttttaatgtttctgaccaaat

SEQ ID NO: 2440815 - DNA, 25 bp, Homo sapien
tgtttctgaccaaatttacaaccac

SEQ ID NO: 2440816 - DNA, 25 bp, Homo sapien
tcagaaccatgaagtcattatcagc

SEQ ID NO: 2440817 - DNA, 25 bp, Homo sapien
tcttcagaaccatgaagtcattatc

SEQ ID NO: 2440818 - DNA, 25 bp, Homo sapien
gaaccatgaagtcattatcagcctc

SEQ ID NO: 2440819 - DNA, 25 bp, Homo sapien
catgaagtcattatcagcctctgag

SEQ ID NO: 2440820 - DNA, 25 bp, Homo sapien
ttggaggcagccaatgtaggactcc

SEQ ID NO: 2440821 - DNA, 25 bp, Homo sapien
caggtcattggcactagccttggcc

SEQ ID NO: 2440822 - DNA, 25 bp, Homo sapien
ttccatcagtagcttgtccaggtag

SEQ ID NO: 2440823 - DNA, 25 bp, Homo sapien
tcctccacgagtgcctgcatggtgc

SEQ ID NO: 2440824 - DNA, 25 bp, Homo sapien
tgttctgctgctccaggaaccgcac

SEQ ID NO: 2440825 - DNA, 25 bp, Homo sapien
ccttgttctgctgctccaggaaccg

SEQ ID NO: 2440826 - DNA, 25 bp, Homo sapien
ccacttggtctccagaaccttgttc

SEQ ID NO: 2440827 - DNA, 25 bp, Homo sapien
aaccttgttctgctgctccaggaac

SEQ ID NO: 2440828 - DNA, 25 bp, Homo sapien
gggagctctggttgatggtcacctc

SEQ ID NO: 2440829 - DNA, 25 bp, Homo sapien
cagggagctctggttgatggtcacc

SEQ ID NO: 2440830 - DNA, 25 bp, Homo sapien
gcagggagctctggttgatggtcac

SEQ ID NO: 2440831 - DNA, 25 bp, Homo sapien
ctgcagggagctctggttgatggtc

SEQ ID NO: 2440832 - DNA, 25 bp, Homo sapien
ccccaaggctgtacagactactgct

SEQ ID NO: 2440833 - DNA, 25 bp, Homo sapien
actgctcttcccagagtatgaggcc

SEQ ID NO: 2440834 - DNA, 25 bp, Homo sapien
ggtgtcccctaacatgacactggcc

SEQ ID NO: 2440835 - DNA, 25 bp, Homo sapien
tgtacagactactgctgccaaaggt

SEQ ID NO: 2440836 - DNA, 25 bp, Homo sapien
tgtctctgattagctcctaaaccca

SEQ ID NO: 2440837 - DNA, 25 bp, Homo sapien
tgaaatctagctctgtacacaaccc

SEQ ID NO: 2440838 - DNA, 25 bp, Homo sapien
tggataccacattcctaagaatgcc

SEQ ID NO: 2440839 - DNA, 25 bp, Homo sapien
tgtacacaaccctgacatcatggat

SEQ ID NO: 2440840 - DNA, 25 bp, Homo sapien
tgttctccaaagtttgcatgtgggt

SEQ ID NO: 2440841 - DNA, 25 bp, Homo sapien
catcagcggggtctttgttctccaa

SEQ ID NO: 2440842 - DNA, 25 bp, Homo sapien
gttgccacatttgttcagtgctttc

SEQ ID NO: 2440843 - DNA, 25 bp, Homo sapien
tttgcatgtgggtgctgttgccaca

SEQ ID NO: 2440844 - DNA, 25 bp, Homo sapien
tccagggtcttcaaggatcccaggg

SEQ ID NO: 2440845 - DNA, 25 bp, Homo sapien
ctccagggtcttcaaggatcccagg

SEQ ID NO: 2440846 - DNA, 25 bp, Homo sapien
ggtcttcaaggatcccagggtcttc

SEQ ID NO: 2440847 - DNA, 25 bp, Homo sapien
cagggtcttcaaggatcccagggtc

SEQ ID NO: 2440848 - DNA, 25 bp, Homo sapien
agaaggtggactagacaacaccagg

SEQ ID NO: 2440849 - DNA, 25 bp, Homo sapien
ttgccaggagctatggtggtacaag

SEQ ID NO: 2440850 - DNA, 25 bp, Homo sapien
ggtggactagacaacaccagggccc

SEQ ID NO: 2440851 - DNA, 25 bp, Homo sapien
ctgaagaaggtggactagacaacac

SEQ ID NO: 2440852 - DNA, 25 bp, Homo sapien
ttcacagcaacattaaagcaccata

SEQ ID NO: 2440853 - DNA, 25 bp, Homo sapien
attcaacatggcgaccttcacagca

SEQ ID NO: 2440854 - DNA, 25 bp, Homo sapien
gacatattcaacatgctagtcacat

SEQ ID NO: 2440855 - DNA, 25 bp, Homo sapien
gctgctggagcggattccagaattc

SEQ ID NO: 2440856 - DNA, 25 bp, Homo sapien
gaagcaccttcttgtattcagtaac

SEQ ID NO: 2440857 - DNA, 25 bp, Homo sapien
gcttttcctgaagcaccttcttgta

SEQ ID NO: 2440858 - DNA, 25 bp, Homo sapien
cctgaagcaccttcttgtattcagt

SEQ ID NO: 2440859 - DNA, 25 bp, Homo sapien
ttcttgtattcagtaacactactgc

SEQ ID NO: 2440860 - DNA, 25 bp, Homo sapien
gatgggcgatggattgagggattct

SEQ ID NO: 2440861 - DNA, 25 bp, Homo sapien
cttcagatgggcgatggattgaggg

SEQ ID NO: 2440862 - DNA, 25 bp, Homo sapien
gctgagacagcccaagattgccagt

SEQ ID NO: 2440863 - DNA, 25 bp, Homo sapien
tgctccactggcacatgatttagtg

SEQ ID NO: 2440864 - DNA, 25 bp, Homo sapien
tgtgaaggccaaaactggcttgggc

SEQ ID NO: 2440865 - DNA, 25 bp, Homo sapien
tgggaaacactattgcaggctgagt

SEQ ID NO: 2440866 - DNA, 25 bp, Homo sapien
tcaccagaggatctacagctcaggg

SEQ ID NO: 2440867 - DNA, 25 bp, Homo sapien
agtgcaacatactcatcaccagagg

SEQ ID NO: 2440868 - DNA, 25 bp, Homo sapien
tatgctggcttgagctcgtggtctg

SEQ ID NO: 2440869 - DNA, 25 bp, Homo sapien
tccaccaccagacttgtagccactt

SEQ ID NO: 2440870 - DNA, 25 bp, Homo sapien
gaagcggatactggtgctgcctcca

SEQ ID NO: 2440871 - DNA, 25 bp, Homo sapien
gagctggagcccattccactgtggc

SEQ ID NO: 2440872 - DNA, 25 bp, Homo sapien
tactgctgctctggtagctcccgct

SEQ ID NO: 2440873 - DNA, 25 bp, Homo sapien
ctgctgccgcctttgtagccaccac

SEQ ID NO: 2440874 - DNA, 25 bp, Homo sapien
aaaactccacggctactgccagagc

SEQ ID NO: 2440875 - DNA, 25 bp, Homo sapien
cacttgtgctggtgacattgctgac

SEQ ID NO: 2440876 - DNA, 25 bp, Homo sapien
aatgcacacggcactctgacattct

SEQ ID NO: 2440877 - DNA, 25 bp, Homo sapien
aaatgcacacggcactctgacattc

SEQ ID NO: 2440878 - DNA, 25 bp, Homo sapien
agcctctgcaattgccgtctgcagg

SEQ ID NO: 2440879 - DNA, 25 bp, Homo sapien
agtcttggagcttggcattggcgtc

SEQ ID NO: 2440880 - DNA, 25 bp, Homo sapien
ccttctgtagggcagtctgcaagtc

SEQ ID NO: 2440881 - DNA, 25 bp, Homo sapien
gctcagcctctgcaattgccgtctg

SEQ ID NO: 2440882 - DNA, 25 bp, Homo sapien
agacctctgggatctctccgttaaa

SEQ ID NO: 2440883 - DNA, 25 bp, Homo sapien
ctctgggatctctccgttaaaccca

SEQ ID NO: 2440884 - DNA, 25 bp, Homo sapien
ctctccggggcccagaagacctctg

SEQ ID NO: 2440885 - DNA, 25 bp, Homo sapien
tgggatctctccgttaaacccagcc

SEQ ID NO: 2440886 - DNA, 25 bp, Homo sapien
atcctgttgagctccatgatctcac

SEQ ID NO: 2440887 - DNA, 25 bp, Homo sapien
tcctgttgagctccatgatctcact

SEQ ID NO: 2440888 - DNA, 25 bp, Homo sapien
cagaaccacagacgtgtcactggca

SEQ ID NO: 2440889 - DNA, 25 bp, Homo sapien
agaaccacagacgtgtcactggcat

SEQ ID NO: 2440890 - DNA, 25 bp, Homo sapien
gaaccacagacgtgtcactggcatg

SEQ ID NO: 2440891 - DNA, 25 bp, Homo sapien
tactcttaccatcgcctggaccagg

SEQ ID NO: 2440892 - DNA, 25 bp, Homo sapien
gggatgctgggaatcctctactagc

SEQ ID NO: 2440893 - DNA, 25 bp, Homo sapien
tactagcggagatatcccaaggatg

SEQ ID NO: 2440894 - DNA, 25 bp, Homo sapien
acatggatagttactcttaccatcg

SEQ ID NO: 2440895 - DNA, 25 bp, Homo sapien
ctgacttcatctgtcaggctgtcca

SEQ ID NO: 2440896 - DNA, 25 bp, Homo sapien
gctgacttcatctgtcaggctgtcc

SEQ ID NO: 2440897 - DNA, 25 bp, Homo sapien
catctcatagagggtcctcaggaag

SEQ ID NO: 2440898 - DNA, 25 bp, Homo sapien
ctgcggcagtgcgtttgttgatttc

SEQ ID NO: 2440899 - DNA, 25 bp, Homo sapien
tctctgcggcagtgcgtttgttgat

SEQ ID NO: 2440900 - DNA, 25 bp, Homo sapien
cggcagtgcgtttgttgatttcatc

SEQ ID NO: 2440901 - DNA, 25 bp, Homo sapien
ttctctgcggcagtgcgtttgttga

SEQ ID NO: 2440902 - DNA, 25 bp, Homo sapien
gatgtaggattcaaaacaaggctcc

SEQ ID NO: 2440903 - DNA, 25 bp, Homo sapien
gaagctgatgtaggattcaaaacaa

SEQ ID NO: 2440904 - DNA, 25 bp, Homo sapien
gctgatgtaggattcaaaacaaggc

SEQ ID NO: 2440905 - DNA, 25 bp, Homo sapien
taggattcaaaacaaggctccaggc

SEQ ID NO: 2440906 - DNA, 25 bp, Homo sapien
gaaagaggggagaaaaggagtcagc

SEQ ID NO: 2440907 - DNA, 25 bp, Homo sapien
catgaaagaggggagaaaaggagtc

SEQ ID NO: 2440908 - DNA, 25 bp, Homo sapien
tgaaagaggggagaaaaggagtcag

SEQ ID NO: 2440909 - DNA, 25 bp, Homo sapien
ctgcatgaaagaggggagaaaagga

SEQ ID NO: 2440910 - DNA, 25 bp, Homo sapien
cttgcccaatctgggggtcgatctc

SEQ ID NO: 2440911 - DNA, 25 bp, Homo sapien
cgctcctgggcctttacttgcccaa

SEQ ID NO: 2440912 - DNA, 25 bp, Homo sapien
tacttgcccaatctgggggtcgatc

SEQ ID NO: 2440913 - DNA, 25 bp, Homo sapien
tcctgggcctttacttgcccaatct

SEQ ID NO: 2440914 - DNA, 25 bp, Homo sapien
aggcccaccaaatacaccaggacca

SEQ ID NO: 2440915 - DNA, 25 bp, Homo sapien
aggaccaccaaagctgccaggccca

SEQ ID NO: 2440916 - DNA, 25 bp, Homo sapien
tccaaaaccactacctactcctctg

SEQ ID NO: 2440917 - DNA, 25 bp, Homo sapien
aaaaccactacctactcctctgcca

SEQ ID NO: 2440918 - DNA, 25 bp, Homo sapien
gttgtagaggctgcgactgccaaag

SEQ ID NO: 2440919 - DNA, 25 bp, Homo sapien
ccaggttgtagaggctgcgactgcc

SEQ ID NO: 2440920 - DNA, 25 bp, Homo sapien
gcccaggttgtagaggctgcgactg

SEQ ID NO: 2440921 - DNA, 25 bp, Homo sapien
aggttgtagaggctgcgactgccaa

SEQ ID NO: 2440922 - DNA, 25 bp, Homo sapien
agtgagagagcttggaggcaagcta

SEQ ID NO: 2440923 - DNA, 25 bp, Homo sapien
gagagagcttggaggcaagctagtg

SEQ ID NO: 2440924 - DNA, 25 bp, Homo sapien
gagagcttggaggcaagctagtgat

SEQ ID NO: 2440925 - DNA, 25 bp, Homo sapien
tgagagagcttggaggcaagctagt

SEQ ID NO: 2440926 - DNA, 25 bp, Homo sapien
ttccaaaaaccgtggatatttcatg

SEQ ID NO: 2440927 - DNA, 25 bp, Homo sapien
tccaaaaaccgtggatatttcatgg

SEQ ID NO: 2440928 - DNA, 25 bp, Homo sapien
aaaaaccgtggatatttcatgggca

SEQ ID NO: 2440929 - DNA, 25 bp, Homo sapien
gatttggctgaatatttccaaaaac

SEQ ID NO: 2440930 - DNA, 25 bp, Homo sapien
tggattttctggaactcaaataact

SEQ ID NO: 2440931 - DNA, 25 bp, Homo sapien
gattttctggaactcaaataacttc

SEQ ID NO: 2440932 - DNA, 25 bp, Homo sapien
ttttctggaactcaaataacttcat

SEQ ID NO: 2440933 - DNA, 25 bp, Homo sapien
attttctggaactcaaataacttca

SEQ ID NO: 2440934 - DNA, 25 bp, Homo sapien
agactttgacataggctgctctggg

SEQ ID NO: 2440935 - DNA, 25 bp, Homo sapien
gggcttccagcagcccgcactttcc

SEQ ID NO: 2440936 - DNA, 25 bp, Homo sapien
tcagactttgacataggctgctctg

SEQ ID NO: 2440937 - DNA, 25 bp, Homo sapien
gactttgacataggctgctctgggg

SEQ ID NO: 2440938 - DNA, 25 bp, Homo sapien
ctgtgtgctatatacatcagagctg

SEQ ID NO: 2440939 - DNA, 25 bp, Homo sapien
tcagagctgtagtgagcatcccacc

SEQ ID NO: 2440940 - DNA, 25 bp, Homo sapien
ctgtagtgagcatcccacccaggga

SEQ ID NO: 2440941 - DNA, 25 bp, Homo sapien
tgtgctatatacatcagagctgtag

SEQ ID NO: 2440942 - DNA, 25 bp, Homo sapien
cctgaaattctcgtgactgggcttg

SEQ ID NO: 2440943 - DNA, 25 bp, Homo sapien
aattctcgtgactgggcttggccgg

SEQ ID NO: 2440944 - DNA, 25 bp, Homo sapien
gaagagcctgaaattctcgtgactg

SEQ ID NO: 2440945 - DNA, 25 bp, Homo sapien
gagagaagagcctgaaattctcgtg

SEQ ID NO: 2440946 - DNA, 25 bp, Homo sapien
gcgctggagtggctgcgatgctgat

SEQ ID NO: 2440947 - DNA, 25 bp, Homo sapien
tggagtggctgcgatgctgatgcgt

SEQ ID NO: 2440948 - DNA, 25 bp, Homo sapien
ttccagcgcagagccgcgttcttgg

SEQ ID NO: 2440949 - DNA, 25 bp, Homo sapien
tggctgcgatgctgatgcgtgctct

SEQ ID NO: 2440950 - DNA, 25 bp, Homo sapien
agagatggagccaaagccgctgcca

SEQ ID NO: 2440951 - DNA, 25 bp, Homo sapien
agaacttgatgctgccgccccggtt

SEQ ID NO: 2440952 - DNA, 25 bp, Homo sapien
actgactccatagcgggcgccagag

SEQ ID NO: 2440953 - DNA, 25 bp, Homo sapien
ttatctggagtagcgctgggaggac

SEQ ID NO: 2440954 - DNA, 25 bp, Homo sapien
tgacagcactcggacactctccaga

SEQ ID NO: 2440955 - DNA, 25 bp, Homo sapien
atgctgacagcactcggacactctc

SEQ ID NO: 2440956 - DNA, 25 bp, Homo sapien
cagcactcggacactctccagacat

SEQ ID NO: 2440957 - DNA, 25 bp, Homo sapien
agatgctgacagcactcggacactc

SEQ ID NO: 2440958 - DNA, 25 bp, Homo sapien
aagcaagagaaagtgggccccgtca

SEQ ID NO: 2440959 - DNA, 25 bp, Homo sapien
gggcatgaatagcaaccagagctga

SEQ ID NO: 2440960 - DNA, 25 bp, Homo sapien
aagcacatcaccaacaagtccacgg

SEQ ID NO: 2440961 - DNA, 25 bp, Homo sapien
gtgggccccgtcacaaagcacatca

SEQ ID NO: 2440962 - DNA, 25 bp, Homo sapien
gctcggcctcggcaatggccgtctg

SEQ ID NO: 2440963 - DNA, 25 bp, Homo sapien
gccgcgccaggtcatccttcgcctg

SEQ ID NO: 2440964 - DNA, 25 bp, Homo sapien
catccttcgcctgctgtagagcagc

SEQ ID NO: 2440965 - DNA, 25 bp, Homo sapien
gctgctcggcctcggcaatggccgt

SEQ ID NO: 2440966 - DNA, 25 bp, Homo sapien
tcatcccaggtgccagcatccatga

SEQ ID NO: 2440967 - DNA, 25 bp, Homo sapien
catcccaggtgccagcatccatgac

SEQ ID NO: 2440968 - DNA, 25 bp, Homo sapien
agtcctgagatcctagcccctgccc

SEQ ID NO: 2440969 - DNA, 25 bp, Homo sapien
ggtatttcttaggtcatccccatgc

SEQ ID NO: 2440970 - DNA, 25 bp, Homo sapien
attctgttgagctctatgatctcgc

SEQ ID NO: 2440971 - DNA, 25 bp, Homo sapien
ctgcttcttgacaccctcgatctct

SEQ ID NO: 2440972 - DNA, 25 bp, Homo sapien
tgatctcgctcttggtatttcttag

SEQ ID NO: 2440973 - DNA, 25 bp, Homo sapien
tcctgcagctttgcttgacttgttt

SEQ ID NO: 2440974 - DNA, 25 bp, Homo sapien
attcctgcagctttgcttgacttgt

SEQ ID NO: 2440975 - DNA, 25 bp, Homo sapien
cagctttgcttgacttgtttctaca

SEQ ID NO: 2440976 - DNA, 25 bp, Homo sapien
ctgcagaacagaagggaagatgggg

SEQ ID NO: 2440977 - DNA, 25 bp, Homo sapien
ccagtggatcccgtaagaggtgact

SEQ ID NO: 2440978 - DNA, 25 bp, Homo sapien
tcccgtaagaggtgactagcaccca

SEQ ID NO: 2440979 - DNA, 25 bp, Homo sapien
gatcccgtaagaggtgactagcacc

SEQ ID NO: 2440980 - DNA, 25 bp, Homo sapien
tggatcccgtaagaggtgactagca

SEQ ID NO: 2440981 - DNA, 25 bp, Homo sapien
tctgagcgatatcctcatactgtgc

SEQ ID NO: 2440982 - DNA, 25 bp, Homo sapien
ctcatactgtgcacgaacttcagca

SEQ ID NO: 2440983 - DNA, 25 bp, Homo sapien
gcgatatcctcatactgtgcacgaa

SEQ ID NO: 2440984 - DNA, 25 bp, Homo sapien
cttgcttctctgagcgatatcctca

SEQ ID NO: 2440985 - DNA, 25 bp, Homo sapien
caccttgttcatataggcactgtcc

SEQ ID NO: 2440986 - DNA, 25 bp, Homo sapien
gaagtcgatctcatctatcaaggca

SEQ ID NO: 2440987 - DNA, 25 bp, Homo sapien
tcgtagagggtccttaagaagtcga

SEQ ID NO: 2440988 - DNA, 25 bp, Homo sapien
catctatcaaggcatccactttggc

SEQ ID NO: 2440989 - DNA, 25 bp, Homo sapien
attctcagcagctgtacgtttattg

SEQ ID NO: 2440990 - DNA, 25 bp, Homo sapien
tcagcagctgtacgtttattgattt

SEQ ID NO: 2440991 - DNA, 25 bp, Homo sapien
tcagagtcacaaattcattctcagc

SEQ ID NO: 2440992 - DNA, 25 bp, Homo sapien
cttcagagtcacaaattcattctca

SEQ ID NO: 2440993 - DNA, 25 bp, Homo sapien
tgtccaggtagctccgcaggtagtt

SEQ ID NO: 2440994 - DNA, 25 bp, Homo sapien
tctctccccgaggatgttgtccagg

SEQ ID NO: 2440995 - DNA, 25 bp, Homo sapien
aaagaggctcaaggttgtttgtgcc

SEQ ID NO: 2440996 - DNA, 25 bp, Homo sapien
agatggaacttgtgccctgctgctg

SEQ ID NO: 2440997 - DNA, 25 bp, Homo sapien
cttgcccaatctgggggtcgatctc

SEQ ID NO: 2440998 - DNA, 25 bp, Homo sapien
cgctcctgggcctttacttgcccaa

SEQ ID NO: 2440999 - DNA, 25 bp, Homo sapien
tacttgcccaatctgggggtcgatc

SEQ ID NO: 2441000 - DNA, 25 bp, Homo sapien
tcctgggcctttacttgcccaatct

SEQ ID NO: 2441001 - DNA, 25 bp, Homo sapien
ggagactctggttgatagtcacttc

SEQ ID NO: 2441002 - DNA, 25 bp, Homo sapien
aggagactctggttgatagtcactt

SEQ ID NO: 2441003 - DNA, 25 bp, Homo sapien
gcccccagggccaaagccaccagga

SEQ ID NO: 2441004 - DNA, 25 bp, Homo sapien
aagcccccagggccaaagccaccag

SEQ ID NO: 2441005 - DNA, 25 bp, Homo sapien
agggccaaagccaccaggactgccc

SEQ ID NO: 2441006 - DNA, 25 bp, Homo sapien
cccagggccaaagccaccaggactg

SEQ ID NO: 2441007 - DNA, 25 bp, Homo sapien
ctccatagccgctcccaaagccacc

SEQ ID NO: 2441008 - DNA, 25 bp, Homo sapien
aaagccacctcccattcctctgcca

SEQ ID NO: 2441009 - DNA, 25 bp, Homo sapien
aagccacctccatagccgctcccaa

SEQ ID NO: 2441010 - DNA, 25 bp, Homo sapien
ccaaagccacctcccattcctctgc

SEQ ID NO: 2441011 - DNA, 25 bp, Homo sapien
gttgtagaggctgcgactgccaaag

SEQ ID NO: 2441012 - DNA, 25 bp, Homo sapien
gcccaggttgtagaggctgcgactg

SEQ ID NO: 2441013 - DNA, 25 bp, Homo sapien
ccaggttgtagaggctgcgactgcc

SEQ ID NO: 2441014 - DNA, 25 bp, Homo sapien
aggttgtagaggctgcgactgccaa

SEQ ID NO: 2441015 - DNA, 25 bp, Homo sapien
gaaaccctggctcccgccaccagat

SEQ ID NO: 2441016 - DNA, 25 bp, Homo sapien
gctccggaagccataggcccctccg

SEQ ID NO: 2441017 - DNA, 25 bp, Homo sapien
aaaccctggctcccgccaccagatg

SEQ ID NO: 2441018 - DNA, 25 bp, Homo sapien
gagaaaccctggctcccgccaccag

SEQ ID NO: 2441019 - DNA, 25 bp, Homo sapien
cttggcgaagagaagagtgtaagtt

SEQ ID NO: 2441020 - DNA, 25 bp, Homo sapien
gcgaagagaagagtgtaagttaagc

SEQ ID NO: 2441021 - DNA, 25 bp, Homo sapien
tggcgaagagaagagtgtaagttaa

SEQ ID NO: 2441022 - DNA, 25 bp, Homo sapien
gaagagtgtaagttaagcagggaca

SEQ ID NO: 2441023 - DNA, 25 bp, Homo sapien
gtggtgcctggtgttgccccatgtt

SEQ ID NO: 2441024 - DNA, 25 bp, Homo sapien
gctctgtctgacaggacccaggagg

SEQ ID NO: 2441025 - DNA, 25 bp, Homo sapien
tgttgccccatgtttgggcatggcc

SEQ ID NO: 2441026 - DNA, 25 bp, Homo sapien
tcctagctctgtctgacaggaccca

SEQ ID NO: 2441027 - DNA, 25 bp, Homo sapien
gaagtagctaccaaactccaagagg

SEQ ID NO: 2441028 - DNA, 25 bp, Homo sapien
gatactagtaagatgagccccagag

SEQ ID NO: 2441029 - DNA, 25 bp, Homo sapien
tcaccaggcccaaatcaagaagtag

SEQ ID NO: 2441030 - DNA, 25 bp, Homo sapien
tcatcctaagcttgcagggccaagt

SEQ ID NO: 2441031 - DNA, 25 bp, Homo sapien
ctggaactgccagagacactgccac

SEQ ID NO: 2441032 - DNA, 25 bp, Homo sapien
tgctggaactgccagagacactgcc

SEQ ID NO: 2441033 - DNA, 25 bp, Homo sapien
gctggaactgccagagacactgcca

SEQ ID NO: 2441034 - DNA, 25 bp, Homo sapien
acttccagagccggagccaaagcca

SEQ ID NO: 2441035 - DNA, 25 bp, Homo sapien
caaagccacttccagagccggagcc

SEQ ID NO: 2441036 - DNA, 25 bp, Homo sapien
gccacttccagagccggagccaaag

SEQ ID NO: 2441037 - DNA, 25 bp, Homo sapien
aagccacttccagagccggagccaa

SEQ ID NO: 2441038 - DNA, 25 bp, Homo sapien
cacttcctaatcctccgctgatgcc

SEQ ID NO: 2441039 - DNA, 25 bp, Homo sapien
ctactcaggccaaacccggagccac

SEQ ID NO: 2441040 - DNA, 25 bp, Homo sapien
caggccaaacccggagccacttcct

SEQ ID NO: 2441041 - DNA, 25 bp, Homo sapien
actcaggccaaacccggagccactt

SEQ ID NO: 2441042 - DNA, 25 bp, Homo sapien
agatgctcacggcactctggcattc

SEQ ID NO: 2441043 - DNA, 25 bp, Homo sapien
cacggcactctggcattctccagac

SEQ ID NO: 2441044 - DNA, 25 bp, Homo sapien
ggcactctggcattctccagacatt

SEQ ID NO: 2441045 - DNA, 25 bp, Homo sapien
gatgctcacggcactctggcattct

SEQ ID NO: 2441046 - DNA, 25 bp, Homo sapien
cagctctacgcgcttgctgtgggca

SEQ ID NO: 2441047 - DNA, 25 bp, Homo sapien
cgctgctctgcatcagccacggata

SEQ ID NO: 2441048 - DNA, 25 bp, Homo sapien
gctgtgggcatctttaagggcattc

SEQ ID NO: 2441049 - DNA, 25 bp, Homo sapien
ttaagggcattctcacctcgctgct

SEQ ID NO: 2441050 - DNA, 25 bp, Homo sapien
caccatgttggtcaaccgagatctg

SEQ ID NO: 2441051 - DNA, 25 bp, Homo sapien
ggtgttcttcaggttgtcaccatgt

SEQ ID NO: 2441052 - DNA, 25 bp, Homo sapien
tggtcaaccgagatctggagctgct

SEQ ID NO: 2441053 - DNA, 25 bp, Homo sapien
gctctgcaatttcactcttggtgtt

SEQ ID NO: 2441054 - DNA, 25 bp, Homo sapien
ccacggacgtgtcgctgacatgggt

SEQ ID NO: 2441055 - DNA, 25 bp, Homo sapien
gttgtccatggaaaggaccacggac

SEQ ID NO: 2441056 - DNA, 25 bp, Homo sapien
gaaaggaccacggacgtgtcgctga

SEQ ID NO: 2441057 - DNA, 25 bp, Homo sapien
tgtcgctgacatgggtctgcatctg

SEQ ID NO: 2441058 - DNA, 25 bp, Homo sapien
tgtgaatcccaaccagcagcgtcac

SEQ ID NO: 2441059 - DNA, 25 bp, Homo sapien
atgaccttgatgagaacccactgcc

SEQ ID NO: 2441060 - DNA, 25 bp, Homo sapien
taagggagctggagtcctttcaaaa

SEQ ID NO: 2441061 - DNA, 25 bp, Homo sapien
acttcaaacctttctatgcatgacc

SEQ ID NO: 2441062 - DNA, 25 bp, Homo sapien
aagttgatctcgtcattaagactgt

SEQ ID NO: 2441063 - DNA, 25 bp, Homo sapien
cgtcattaagactgtccaccttggc

SEQ ID NO: 2441064 - DNA, 25 bp, Homo sapien
gatctcgtcattaagactgtccacc

SEQ ID NO: 2441065 - DNA, 25 bp, Homo sapien
tcgtcattaagactgtccaccttgg

SEQ ID NO: 2441066 - DNA, 25 bp, Homo sapien
gtaaggaggataagagatgaggagc

SEQ ID NO: 2441067 - DNA, 25 bp, Homo sapien
ggttactaagtgacaccgacaggtg

SEQ ID NO: 2441068 - DNA, 25 bp, Homo sapien
ccgacaggtgttctcagcagcattt

SEQ ID NO: 2441069 - DNA, 25 bp, Homo sapien
aatgccagtaggaggacgggttact

SEQ ID NO: 2441070 - DNA, 25 bp, Homo sapien
ctcggctgctgtgcgtttgttgatc

SEQ ID NO: 2441071 - DNA, 25 bp, Homo sapien
gtcattctcggctgctgtgcgtttg

SEQ ID NO: 2441072 - DNA, 25 bp, Homo sapien
agtcattctcggctgctgtgcgttt

SEQ ID NO: 2441073 - DNA, 25 bp, Homo sapien
cggctgctgtgcgtttgttgatctc

SEQ ID NO: 2441074 - DNA, 25 bp, Homo sapien
gatagaaaacccagcaatgatgtag

SEQ ID NO: 2441075 - DNA, 25 bp, Homo sapien
gagaggttcagctatttacccaagg

SEQ ID NO: 2441076 - DNA, 25 bp, Homo sapien
tcttgttcgtatatggcagacccaa

SEQ ID NO: 2441077 - DNA, 25 bp, Homo sapien
tcattgaatataggaagtacccgtt

SEQ ID NO: 2441078 - DNA, 25 bp, Homo sapien
tccacgctgtcctgcatggtcttca

SEQ ID NO: 2441079 - DNA, 25 bp, Homo sapien
ccaggaccttattctgttgctctaa

SEQ ID NO: 2441080 - DNA, 25 bp, Homo sapien
tcattgcccaaggtatctagctgct

SEQ ID NO: 2441081 - DNA, 25 bp, Homo sapien
gacactgaggtaggtctcaaagagg

SEQ ID NO: 2441082 - DNA, 25 bp, Homo sapien
aaggcaccagccaagtgatgagggc

SEQ ID NO: 2441083 - DNA, 25 bp, Homo sapien
ataaaggcaccagccaagtgatgag

SEQ ID NO: 2441084 - DNA, 25 bp, Homo sapien
tgataaaggcaccagccaagtgatg

SEQ ID NO: 2441085 - DNA, 25 bp, Homo sapien
ctgtgttgataaaggcaccagccaa

SEQ ID NO: 2441086 - DNA, 25 bp, Homo sapien
tcttccgtccggactttctggatct

SEQ ID NO: 2441087 - DNA, 25 bp, Homo sapien
gttgaggagcttgatctgttcgcgc

SEQ ID NO: 2441088 - DNA, 25 bp, Homo sapien
atctgttcgcgctcttccgtccgga

SEQ ID NO: 2441089 - DNA, 25 bp, Homo sapien
gcttgatctgttcgcgctcttccgt

SEQ ID NO: 2441090 - DNA, 25 bp, Homo sapien
gatgcttttgttccccctgaggttg

SEQ ID NO: 2441091 - DNA, 25 bp, Homo sapien
tcttgccaccgcctacaatggccga

SEQ ID NO: 2441092 - DNA, 25 bp, Homo sapien
cagggccacccttaccactgaagga

SEQ ID NO: 2441093 - DNA, 25 bp, Homo sapien
aagcaggcaccttgtcgtgacccag

SEQ ID NO: 2441094 - DNA, 25 bp, Homo sapien
cctcagccttcgtctcttatatgtc

SEQ ID NO: 2441095 - DNA, 25 bp, Homo sapien
gagccctcagccttcgtctcttata

SEQ ID NO: 2441096 - DNA, 25 bp, Homo sapien
gccctcagccttcgtctcttatatg

SEQ ID NO: 2441097 - DNA, 25 bp, Homo sapien
agccctcagccttcgtctcttatat

SEQ ID NO: 2441098 - DNA, 25 bp, Homo sapien
ggcttggcccttggcacaagcccat

SEQ ID NO: 2441099 - DNA, 25 bp, Homo sapien
catccttcccgcacccgttgagcat

SEQ ID NO: 2441100 - DNA, 25 bp, Homo sapien
ggcttggttgcaggggcataaaggg

SEQ ID NO: 2441101 - DNA, 25 bp, Homo sapien
tgggcttggcccttggcacaagccc

SEQ ID NO: 2441102 - DNA, 25 bp, Homo sapien
cactaaacacacctacagaagtcat

SEQ ID NO: 2441103 - DNA, 25 bp, Homo sapien
tcactaaacacacctacagaagtca

SEQ ID NO: 2441104 - DNA, 25 bp, Homo sapien
gtcactaaacacacctacagaagtc

SEQ ID NO: 2441105 - DNA, 25 bp, Homo sapien
tcctagctctgcaaaccggagcaag

SEQ ID NO: 2441106 - DNA, 25 bp, Homo sapien
tggagggcacaggttactggatccc

SEQ ID NO: 2441107 - DNA, 25 bp, Homo sapien
cagcctgagtttgagcgcacagcct

SEQ ID NO: 2441108 - DNA, 25 bp, Homo sapien
tctgggagaacctgaactggtgccc

SEQ ID NO: 2441109 - DNA, 25 bp, Homo sapien
gacttgaggtgtgccatcgctgata

SEQ ID NO: 2441110 - DNA, 25 bp, Homo sapien
aatggcatgggttcactgcccctag

SEQ ID NO: 2441111 - DNA, 25 bp, Homo sapien
tgagcacaagtgaatccctgagatg

SEQ ID NO: 2441112 - DNA, 25 bp, Homo sapien
tggctgtaacactccaacactagga

SEQ ID NO: 2441113 - DNA, 25 bp, Homo sapien
tttggctgaaaatccctctgctggc

SEQ ID NO: 2441114 - DNA, 25 bp, Homo sapien
tagggtttggctgaaaatccctctg

SEQ ID NO: 2441115 - DNA, 25 bp, Homo sapien
ggcctttgtgttcctaagctggagg

SEQ ID NO: 2441116 - DNA, 25 bp, Homo sapien
gccctggaggaagctttctcagggc

SEQ ID NO: 2441117 - DNA, 25 bp, Homo sapien
acagactgcagccacagacagctag

SEQ ID NO: 2441118 - DNA, 25 bp, Homo sapien
gacagactgcagccacagacagcta

SEQ ID NO: 2441119 - DNA, 25 bp, Homo sapien
cagactgcagccacagacagctagc

SEQ ID NO: 2441120 - DNA, 25 bp, Homo sapien
gcagttgcaccatttattgagacac

SEQ ID NO: 2441121 - DNA, 25 bp, Homo sapien
cctcctctcggtggtcaaaaggtca

SEQ ID NO: 2441122 - DNA, 25 bp, Homo sapien
gagtagatttgagcgcttcccaaga

SEQ ID NO: 2441123 - DNA, 25 bp, Homo sapien
tgaaaataccctgggtctgaggtcc

SEQ ID NO: 2441124 - DNA, 25 bp, Homo sapien
cacacagtggtggagttgccagtca

SEQ ID NO: 2441125 - DNA, 25 bp, Homo sapien
tctggctggacgtcttgaccgtagt

SEQ ID NO: 2441126 - DNA, 25 bp, Homo sapien
tggccctcccttgacggtgctatag

SEQ ID NO: 2441127 - DNA, 25 bp, Homo sapien
accgtagtggtcttccgcaggatgg

SEQ ID NO: 2441128 - DNA, 25 bp, Homo sapien
gcatgctttaggacaggtacaggtt

SEQ ID NO: 2441129 - DNA, 25 bp, Homo sapien
aagcccagaactaggaccctctgaa

SEQ ID NO: 2441130 - DNA, 25 bp, Homo sapien
tctggattagtcagggcggccatgc

SEQ ID NO: 2441131 - DNA, 25 bp, Homo sapien
cagcagagctatgggaaatggatag

SEQ ID NO: 2441132 - DNA, 25 bp, Homo sapien
tgactgcactgggacattctccaga

SEQ ID NO: 2441133 - DNA, 25 bp, Homo sapien
atgctgactgcactgggacattctc

SEQ ID NO: 2441134 - DNA, 25 bp, Homo sapien
actgcactgggacattctccagaca

SEQ ID NO: 2441135 - DNA, 25 bp, Homo sapien
aaatgctgactgcactgggacattc

SEQ ID NO: 2441136 - DNA, 25 bp, Homo sapien
agcagtcagttatccctggtgccca

SEQ ID NO: 2441137 - DNA, 25 bp, Homo sapien
tgatgacaagaccaggaaacatgag

SEQ ID NO: 2441138 - DNA, 25 bp, Homo sapien
aagtatgtgtatagggctgtgccca

SEQ ID NO: 2441139 - DNA, 25 bp, Homo sapien
tgcccatgtgggctacggacagcat

SEQ ID NO: 2441140 - DNA, 25 bp, Homo sapien
ttccaaagcttccactgctggtgaa

SEQ ID NO: 2441141 - DNA, 25 bp, Homo sapien
ccagctttctgggtcgggcaggagg

SEQ ID NO: 2441142 - DNA, 25 bp, Homo sapien
gctttctgggtcgggcaggaggggc

SEQ ID NO: 2441143 - DNA, 25 bp, Homo sapien
tttctgggtcgggcaggaggggcca

SEQ ID NO: 2441144 - DNA, 25 bp, Homo sapien
cagctttctgggtcgggcaggaggg

SEQ ID NO: 2441145 - DNA, 25 bp, Homo sapien
tccgcaatggccgtctgcagctgct

SEQ ID NO: 2441146 - DNA, 25 bp, Homo sapien
cttctgagcatccttgagtgccagc

SEQ ID NO: 2441147 - DNA, 25 bp, Homo sapien
ctggtagtcacgcagcagccgtgtc

SEQ ID NO: 2441148 - DNA, 25 bp, Homo sapien
ctggtgcagggccacatccagatcc

SEQ ID NO: 2441149 - DNA, 25 bp, Homo sapien
ttggtgtcccgcaggttgtccccat

SEQ ID NO: 2441150 - DNA, 25 bp, Homo sapien
cctctggatagtgcgggtgagctca

SEQ ID NO: 2441151 - DNA, 25 bp, Homo sapien
caatctcgttcttggtgtcccgcag

SEQ ID NO: 2441152 - DNA, 25 bp, Homo sapien
gagctcagcaatctcgttcttggtg

SEQ ID NO: 2441153 - DNA, 25 bp, Homo sapien
acacgtgggtctgcacttggctcag

SEQ ID NO: 2441154 - DNA, 25 bp, Homo sapien
tagacacgtgggtctgcacttggct

SEQ ID NO: 2441155 - DNA, 25 bp, Homo sapien
gcaccacattggtgttagacacgtg

SEQ ID NO: 2441156 - DNA, 25 bp, Homo sapien
tggtgttagacacgtgggtctgcac

SEQ ID NO: 2441157 - DNA, 25 bp, Homo sapien
tcagagacagctgccaccagcaccc

SEQ ID NO: 2441158 - DNA, 25 bp, Homo sapien
aatcagagacagctgccaccagcac

SEQ ID NO: 2441159 - DNA, 25 bp, Homo sapien
ctgaagaatcagagacagctgccac

SEQ ID NO: 2441160 - DNA, 25 bp, Homo sapien
agaatcagagacagctgccaccagc

SEQ ID NO: 2441161 - DNA, 25 bp, Homo sapien
catcagaagctgagaggacgtagac

SEQ ID NO: 2441162 - DNA, 25 bp, Homo sapien
taggcatgtggcaggtactaactca

SEQ ID NO: 2441163 - DNA, 25 bp, Homo sapien
taataataacaaccctcgcatgctg

SEQ ID NO: 2441164 - DNA, 25 bp, Homo sapien
tcacaagccagtaagtgaggagctc

SEQ ID NO: 2441165 - DNA, 25 bp, Homo sapien
gtcaaggtgcccactttgccatgca

SEQ ID NO: 2441166 - DNA, 25 bp, Homo sapien
agatccatccggcccatgtatgctg

SEQ ID NO: 2441167 - DNA, 25 bp, Homo sapien
cactttgccatgcagatccatccgg

SEQ ID NO: 2441168 - DNA, 25 bp, Homo sapien
ggaagtcaatctcctgggtcaaggt

SEQ ID NO: 2441169 - DNA, 25 bp, Homo sapien
ctctgcagcagtgtgcttgttgatt

SEQ ID NO: 2441170 - DNA, 25 bp, Homo sapien
gccctgatgggtccctcactgatca

SEQ ID NO: 2441171 - DNA, 25 bp, Homo sapien
tttaatgtagccaaccagtgaagaa

SEQ ID NO: 2441172 - DNA, 25 bp, Homo sapien
tgggacccactcagccttacagaag

SEQ ID NO: 2441173 - DNA, 25 bp, Homo sapien
tggctctgcctttcaggcatgggac

SEQ ID NO: 2441174 - DNA, 25 bp, Homo sapien
gctacccaggtaggcctcaaagagg

SEQ ID NO: 2441175 - DNA, 25 bp, Homo sapien
agcgtgctccgcatgctacccaggt

SEQ ID NO: 2441176 - DNA, 25 bp, Homo sapien
gttgttcctggtgacacccaagttc

SEQ ID NO: 2441177 - DNA, 25 bp, Homo sapien
tggtgacacccaagttctggccctg

SEQ ID NO: 2441178 - DNA, 25 bp, Homo sapien
cctctattagaggtcccgcttcttc

SEQ ID NO: 2441179 - DNA, 25 bp, Homo sapien
tgcgcactcgctggatctcggggtc

SEQ ID NO: 2441180 - DNA, 25 bp, Homo sapien
ggccacactgacagagatactcttg

SEQ ID NO: 2441181 - DNA, 25 bp, Homo sapien
tccgagacaccgtcactgagctgaa

SEQ ID NO: 2441182 - DNA, 25 bp, Homo sapien
ccaagttatagaggcttcggctgcc

SEQ ID NO: 2441183 - DNA, 25 bp, Homo sapien
tgtttgccgagagacggaggacctc

SEQ ID NO: 2441184 - DNA, 25 bp, Homo sapien
agaggggccggagggcaggatgaga

SEQ ID NO: 2441185 - DNA, 25 bp, Homo sapien
cagaggggccggagggcaggatgag

SEQ ID NO: 2441186 - DNA, 25 bp, Homo sapien
tgcagaggggccggagggcaggatg

SEQ ID NO: 2441187 - DNA, 25 bp, Homo sapien
aggggccggagggcaggatgagagg

SEQ ID NO: 2441188 - DNA, 25 bp, Homo sapien
attgaactaccttggatgaatttag

SEQ ID NO: 2441189 - DNA, 25 bp, Homo sapien
taattgaactaccttggatgaattt

SEQ ID NO: 2441190 - DNA, 25 bp, Homo sapien
ttaattgaactaccttggatgaatt

SEQ ID NO: 2441191 - DNA, 25 bp, Homo sapien
aattgaactaccttggatgaattta

SEQ ID NO: 2441192 - DNA, 25 bp, Homo sapien
gaatctgaggaaaggtctgccctcc

SEQ ID NO: 2441193 - DNA, 25 bp, Homo sapien
tagaaaaggtgatccttccagcccc

SEQ ID NO: 2441194 - DNA, 25 bp, Homo sapien
cttctgggatcctagtggcactgtc

SEQ ID NO: 2441195 - DNA, 25 bp, Homo sapien
caaggtcacaccactaggaaacagc

SEQ ID NO: 2441196 - DNA, 25 bp, Homo sapien
cccacactcctggcttcctgcagag

SEQ ID NO: 2441197 - DNA, 25 bp, Homo sapien
acactcctggcttcctgcagagctt

SEQ ID NO: 2441198 - DNA, 25 bp, Homo sapien
ctgattcccacactcctggcttcct

SEQ ID NO: 2441199 - DNA, 25 bp, Homo sapien
tgattcccacactcctggcttcctg

SEQ ID NO: 2441200 - DNA, 25 bp, Homo sapien
tgaggaagtgagctacaagcacagc

SEQ ID NO: 2441201 - DNA, 25 bp, Homo sapien
cccaaggataagatgagagccaaca

SEQ ID NO: 2441202 - DNA, 25 bp, Homo sapien
ggaagggcccagtagtttagacatg

SEQ ID NO: 2441203 - DNA, 25 bp, Homo sapien
gaagctgagtcccttaccagagcca

SEQ ID NO: 2441204 - DNA, 25 bp, Homo sapien
gaacacgtctggacacagatatgcc

SEQ ID NO: 2441205 - DNA, 25 bp, Homo sapien
ggtgtgcaagcacttagagcattca

SEQ ID NO: 2441206 - DNA, 25 bp, Homo sapien
ccacaattgccttccgaggagagga

SEQ ID NO: 2441207 - DNA, 25 bp, Homo sapien
tgagataccaatagaacacgtctgg

SEQ ID NO: 2441208 - DNA, 25 bp, Homo sapien
tgatttttgcagcatccgctgtggg

SEQ ID NO: 2441209 - DNA, 25 bp, Homo sapien
ttattgatttttgcagcatccgctg

SEQ ID NO: 2441210 - DNA, 25 bp, Homo sapien
tttttgcagcatccgctgtgggctg

SEQ ID NO: 2441211 - DNA, 25 bp, Homo sapien
gggcagcggacacggagttggcctt

SEQ ID NO: 2441212 - DNA, 25 bp, Homo sapien
agccagcgctggagccagacacaga

SEQ ID NO: 2441213 - DNA, 25 bp, Homo sapien
ccagaatgatgttggagcctccagt

SEQ ID NO: 2441214 - DNA, 25 bp, Homo sapien
cagtaggtgatggatgtcttcagac

SEQ ID NO: 2441215 - DNA, 25 bp, Homo sapien
cagagcaggaatccaaaacagggtc

SEQ ID NO: 2441216 - DNA, 25 bp, Homo sapien
ctaccgagtccacaagtgctcccca

SEQ ID NO: 2441217 - DNA, 25 bp, Homo sapien
cctttcccactaccgagtccacaag

SEQ ID NO: 2441218 - DNA, 25 bp, Homo sapien
tccagacatgacagcgctgcctccc

SEQ ID NO: 2441219 - DNA, 25 bp, Homo sapien
catgacagcgctgcctcccaccgag

SEQ ID NO: 2441220 - DNA, 25 bp, Homo sapien
ctggctggtgcactccccagacatc

SEQ ID NO: 2441221 - DNA, 25 bp, Homo sapien
accttggcctgagcgtccttgaggg

SEQ ID NO: 2441222 - DNA, 25 bp, Homo sapien
acatccagggaaagcttcgtgctcg

SEQ ID NO: 2441223 - DNA, 25 bp, Homo sapien
tccaccttggcctgagcgtccttga

SEQ ID NO: 2441224 - DNA, 25 bp, Homo sapien
gcttcgtgctcgtcagctcctggta

SEQ ID NO: 2441225 - DNA, 25 bp, Homo sapien
gcctctgaatctcttggtgtagctg

SEQ ID NO: 2441226 - DNA, 25 bp, Homo sapien
tgcagcctctgaatctcttggtgta

SEQ ID NO: 2441227 - DNA, 25 bp, Homo sapien
catcctgtccccatgaagctgggca

SEQ ID NO: 2441228 - DNA, 25 bp, Homo sapien
gagatctggactttcgtttcctgca

SEQ ID NO: 2441229 - DNA, 25 bp, Homo sapien
gcgatctcctcgtaccgggcgcgga

SEQ ID NO: 2441230 - DNA, 25 bp, Homo sapien
ttgctgctccgggcgatctcctcgt

SEQ ID NO: 2441231 - DNA, 25 bp, Homo sapien
tcgtaccgggcgcggacctcagtga

SEQ ID NO: 2441232 - DNA, 25 bp, Homo sapien
accgggcgcggacctcagtgatgat

SEQ ID NO: 2441233 - DNA, 25 bp, Homo sapien
agcctgccctttggttgagcctcac

SEQ ID NO: 2441234 - DNA, 25 bp, Homo sapien
cagaatctaagccaccctaacagac

SEQ ID NO: 2441235 - DNA, 25 bp, Homo sapien
tgtcaagtgactgaatgacccagaa

SEQ ID NO: 2441236 - DNA, 25 bp, Homo sapien
ccaggacctagcaattcacatagta

SEQ ID NO: 2441237 - DNA, 25 bp, Homo sapien
gaagtagaggtactctctcagagcc

SEQ ID NO: 2441238 - DNA, 25 bp, Homo sapien
atcttgctcaggaaaaccccatcca

SEQ ID NO: 2441239 - DNA, 25 bp, Homo sapien
gatgcttcaagaagtagaggtactc

SEQ ID NO: 2441240 - DNA, 25 bp, Homo sapien
ttgctcaggaaaaccccatccacat

SEQ ID NO: 2441241 - DNA, 25 bp, Homo sapien
cgttctcaagtgtggcacgcctgtg

SEQ ID NO: 2441242 - DNA, 25 bp, Homo sapien
acaaagtcgttctcaagtgtggcac

SEQ ID NO: 2441243 - DNA, 25 bp, Homo sapien
agtgtggcacgcctgtgggcctcct

SEQ ID NO: 2441244 - DNA, 25 bp, Homo sapien
ttgaggaccacaaagtcgttctcaa

SEQ ID NO: 2441245 - DNA, 25 bp, Homo sapien
tcctgagctgatccaggcaggcctc

SEQ ID NO: 2441246 - DNA, 25 bp, Homo sapien
tggtcccggcaggccttcaactcag

SEQ ID NO: 2441247 - DNA, 25 bp, Homo sapien
gatgccacttcgtctccaggacctt

SEQ ID NO: 2441248 - DNA, 25 bp, Homo sapien
tgcagcagatgccacttcgtctcca

SEQ ID NO: 2441249 - DNA, 25 bp, Homo sapien
tcctgtgggactccctgtgcacagc

SEQ ID NO: 2441250 - DNA, 25 bp, Homo sapien
ctgcagcaaaagcagaggatccctg

SEQ ID NO: 2441251 - DNA, 25 bp, Homo sapien
caaaagcagaggatccctgaggctc

SEQ ID NO: 2441252 - DNA, 25 bp, Homo sapien
gctcctgtgggactccctgtgcaca

SEQ ID NO: 2441253 - DNA, 25 bp, Homo sapien
caggggaagcctcatgaccttccat

SEQ ID NO: 2441254 - DNA, 25 bp, Homo sapien
ggggaagcctcatgaccttccatga

SEQ ID NO: 2441255 - DNA, 25 bp, Homo sapien
aggggaagcctcatgaccttccatg

SEQ ID NO: 2441256 - DNA, 25 bp, Homo sapien
actggttgttgagggttctgatctc

SEQ ID NO: 2441257 - DNA, 25 bp, Homo sapien
ctggggatcgatctcaatcttcagt

SEQ ID NO: 2441258 - DNA, 25 bp, Homo sapien
aagcaaactggttgttgagggttct

SEQ ID NO: 2441259 - DNA, 25 bp, Homo sapien
tgcgtccgcaccacctggaactggg

SEQ ID NO: 2441260 - DNA, 25 bp, Homo sapien
tgccccccggagggcacagggagag

SEQ ID NO: 2441261 - DNA, 25 bp, Homo sapien
atgccccccggagggcacagggaga

SEQ ID NO: 2441262 - DNA, 25 bp, Homo sapien
gatgccccccggagggcacagggag

SEQ ID NO: 2441263 - DNA, 25 bp, Homo sapien
caggtactcccacgagagccttcca

SEQ ID NO: 2441264 - DNA, 25 bp, Homo sapien
ccccaggtactcccacgagagcctt

SEQ ID NO: 2441265 - DNA, 25 bp, Homo sapien
cccaggtactcccacgagagccttc

SEQ ID NO: 2441266 - DNA, 25 bp, Homo sapien
ggtactcccacgagagccttccagg

SEQ ID NO: 2441267 - DNA, 25 bp, Homo sapien
tgagcgagcagaacaggctgagcga

SEQ ID NO: 2441268 - DNA, 25 bp, Homo sapien
cttgagcgagcagaacaggctgagc

SEQ ID NO: 2441269 - DNA, 25 bp, Homo sapien
gctgagcgagcgctgaagcccctct

SEQ ID NO: 2441270 - DNA, 25 bp, Homo sapien
ctgagcgagcgctgaagcccctctg

SEQ ID NO: 2441271 - DNA, 25 bp, Homo sapien
cagattgtcaaggtgtgtgagtttc

SEQ ID NO: 2441272 - DNA, 25 bp, Homo sapien
acagattgtcaaggtgtgtgagttt

SEQ ID NO: 2441273 - DNA, 25 bp, Homo sapien
agattgtcaaggtgtgtgagtttct

SEQ ID NO: 2441274 - DNA, 25 bp, Homo sapien
gacagattgtcaaggtgtgtgagtt

SEQ ID NO: 2441275 - DNA, 25 bp, Homo sapien
ggcagcccagtttaatccagtcctg

SEQ ID NO: 2441276 - DNA, 25 bp, Homo sapien
caggattcttgcaacccagatgcct

SEQ ID NO: 2441277 - DNA, 25 bp, Homo sapien
gcaggtggccaggattcttgcaacc

SEQ ID NO: 2441278 - DNA, 25 bp, Homo sapien
ggtatttccttgcaagcaggagcag

SEQ ID NO: 2441279 - DNA, 25 bp, Homo sapien
tttcccataccaagagaggatcccc

SEQ ID NO: 2441280 - DNA, 25 bp, Homo sapien
ctgagcgccttagccaggagtggcc

SEQ ID NO: 2441281 - DNA, 25 bp, Homo sapien
ccctgagcgccttagccaggagtgg

SEQ ID NO: 2441282 - DNA, 25 bp, Homo sapien
aggctttcccataccaagagaggat

SEQ ID NO: 2441283 - DNA, 25 bp, Homo sapien
gactctcacacaagcacatccagtg

SEQ ID NO: 2441284 - DNA, 25 bp, Homo sapien
catatatccatgcaagactctcaca

SEQ ID NO: 2441285 - DNA, 25 bp, Homo sapien
catggatccatgtacacaacgtagg

SEQ ID NO: 2441286 - DNA, 25 bp, Homo sapien
gaccatgagcatgacacaccttcct

SEQ ID NO: 2441287 - DNA, 25 bp, Homo sapien
ctgaaagataaatgggagggatggt

SEQ ID NO: 2441288 - DNA, 25 bp, Homo sapien
tgaaagataaatgggagggatggtg

SEQ ID NO: 2441289 - DNA, 25 bp, Homo sapien
gaaagataaatgggagggatggtgt

SEQ ID NO: 2441290 - DNA, 25 bp, Homo sapien
ccttgatcccatggtagatgcacca

SEQ ID NO: 2441291 - DNA, 25 bp, Homo sapien
ttgatcccatggtagatgcaccaga

SEQ ID NO: 2441292 - DNA, 25 bp, Homo sapien
gatcccatggtagatgcaccagaac

SEQ ID NO: 2441293 - DNA, 25 bp, Homo sapien
tgaccttgatcccatggtagatgca

SEQ ID NO: 2441294 - DNA, 25 bp, Homo sapien
aaaagcaattgaattgttttgtagc

SEQ ID NO: 2441295 - DNA, 25 bp, Homo sapien
caattgaattgttttgtagctggag

SEQ ID NO: 2441296 - DNA, 25 bp, Homo sapien
attgaattgttttgtagctggaggc

SEQ ID NO: 2441297 - DNA, 25 bp, Homo sapien
aagcaattgaattgttttgtagctg

SEQ ID NO: 2441298 - DNA, 25 bp, Homo sapien
gtagtaaactccccaggtgggctga

SEQ ID NO: 2441299 - DNA, 25 bp, Homo sapien
caggtgggctgagggctagggctga

SEQ ID NO: 2441300 - DNA, 25 bp, Homo sapien
tagtaaactccccaggtgggctgag

SEQ ID NO: 2441301 - DNA, 25 bp, Homo sapien
gtgggctgagggctagggctgagcc

SEQ ID NO: 2441302 - DNA, 25 bp, Homo sapien
ctgttcccagtgctaccctgcatag

SEQ ID NO: 2441303 - DNA, 25 bp, Homo sapien
ttcccagtgctaccctgcatagcgg

SEQ ID NO: 2441304 - DNA, 25 bp, Homo sapien
tcctgttcccagtgctaccctgcat

SEQ ID NO: 2441305 - DNA, 25 bp, Homo sapien
tgttcccagtgctaccctgcatagc

SEQ ID NO: 2441306 - DNA, 25 bp, Homo sapien
tggggcagcgcaggaggggtaggct

SEQ ID NO: 2441307 - DNA, 25 bp, Homo sapien
agcgcaggaggggtaggctgggagg

SEQ ID NO: 2441308 - DNA, 25 bp, Homo sapien
ctggggcagcgcaggaggggtaggc

SEQ ID NO: 2441309 - DNA, 25 bp, Homo sapien
ggcagcgcaggaggggtaggctggg

SEQ ID NO: 2441310 - DNA, 25 bp, Homo sapien
tgggcaggacgtcagaggactcaga

SEQ ID NO: 2441311 - DNA, 25 bp, Homo sapien
caccagcttcccatcacgtgtctcg

SEQ ID NO: 2441312 - DNA, 25 bp, Homo sapien
cagcttcccatcacgtgtctcgatc

SEQ ID NO: 2441313 - DNA, 25 bp, Homo sapien
cgtcagaggactcagacaccagctt

SEQ ID NO: 2441314 - DNA, 25 bp, Homo sapien
cttcacaaccacggccctggaggag

SEQ ID NO: 2441315 - DNA, 25 bp, Homo sapien
cctggaggagctggtgcggctgaag

SEQ ID NO: 2441316 - DNA, 25 bp, Homo sapien
tggaggagctggtgcggctgaagga

SEQ ID NO: 2441317 - DNA, 25 bp, Homo sapien
tcacaaccacggccctggaggagct

SEQ ID NO: 2441318 - DNA, 25 bp, Homo sapien
ggagcccaggctgtagctgaggccg

SEQ ID NO: 2441319 - DNA, 25 bp, Homo sapien
agctggagcccaggctgtagctgag

SEQ ID NO: 2441320 - DNA, 25 bp, Homo sapien
aggccggggcttgtgaggcccccat

SEQ ID NO: 2441321 - DNA, 25 bp, Homo sapien
cccccataggccgagctcagaccac

SEQ ID NO: 2441322 - DNA, 25 bp, Homo sapien
tgattgcatggttcactactccaga

SEQ ID NO: 2441323 - DNA, 25 bp, Homo sapien
tagccacatgagtacagaagcccac

SEQ ID NO: 2441324 - DNA, 25 bp, Homo sapien
ggaggttaacccagctctgcctgat

SEQ ID NO: 2441325 - DNA, 25 bp, Homo sapien
agaactgtcagggaaaaccaggagc

SEQ ID NO: 2441326 - DNA, 25 bp, Homo sapien
gtcctgaatatgtgcctccccaccc

SEQ ID NO: 2441327 - DNA, 25 bp, Homo sapien
tatttgggtgctttctaatagtaaa

SEQ ID NO: 2441328 - DNA, 25 bp, Homo sapien
tcccaagaacatgagtgctcaggct

SEQ ID NO: 2441329 - DNA, 25 bp, Homo sapien
acctgtaggatacttagcacagtgc

SEQ ID NO: 2441330 - DNA, 25 bp, Homo sapien
ctgcatagccgctggtggtcttcgt

SEQ ID NO: 2441331 - DNA, 25 bp, Homo sapien
ccgctggtggtcttcgtatgaatac

SEQ ID NO: 2441332 - DNA, 25 bp, Homo sapien
tagccgctggtggtcttcgtatgaa

SEQ ID NO: 2441333 - DNA, 25 bp, Homo sapien
gtatgaatactcatgttctgcatcc

SEQ ID NO: 2441334 - DNA, 25 bp, Homo sapien
aggaccaactcctagcccttcttgg

SEQ ID NO: 2441335 - DNA, 25 bp, Homo sapien
gtgtcaggaccaactcctagccctt

SEQ ID NO: 2441336 - DNA, 25 bp, Homo sapien
cagaacaacaggaccccaagtccca

SEQ ID NO: 2441337 - DNA, 25 bp, Homo sapien
tggggtgtcaggaccaactcctagc

SEQ ID NO: 2441338 - DNA, 25 bp, Homo sapien
agcaggtccggtcagaggtacccac

SEQ ID NO: 2441339 - DNA, 25 bp, Homo sapien
agggatagggaagcaggtccggtca

SEQ ID NO: 2441340 - DNA, 25 bp, Homo sapien
gaagcaggtccggtcagaggtaccc

SEQ ID NO: 2441341 - DNA, 25 bp, Homo sapien
tagggaagcaggtccggtcagaggt

SEQ ID NO: 2441342 - DNA, 25 bp, Homo sapien
acgctgctcggcatctgcaatggcg

SEQ ID NO: 2441343 - DNA, 25 bp, Homo sapien
tccacgctgctcggcatctgcaatg

SEQ ID NO: 2441344 - DNA, 25 bp, Homo sapien
ctctccacgctgctcggcatctgca

SEQ ID NO: 2441345 - DNA, 25 bp, Homo sapien
tggccagctctccacgctgctcggc

SEQ ID NO: 2441346 - DNA, 25 bp, Homo sapien
aaccttaccctgatgcatatgactg

SEQ ID NO: 2441347 - DNA, 25 bp, Homo sapien
taaacgagactaaggaagcagatca

SEQ ID NO: 2441348 - DNA, 25 bp, Homo sapien
gcttgggagcatgtatcacgagccc

SEQ ID NO: 2441349 - DNA, 25 bp, Homo sapien
taccctaactggactagatccctgg

SEQ ID NO: 2441350 - DNA, 25 bp, Homo sapien
cagagatctcagtctttgtgcgccg

SEQ ID NO: 2441351 - DNA, 25 bp, Homo sapien
gatctcagtctttgtgcgccgcagg

SEQ ID NO: 2441352 - DNA, 25 bp, Homo sapien
tcagtctttgtgcgccgcaggtcat

SEQ ID NO: 2441353 - DNA, 25 bp, Homo sapien
ctttgtgcgccgcaggtcatccccg

SEQ ID NO: 2441354 - DNA, 25 bp, Homo sapien
ctgcagctcctcatacttgatctgg

SEQ ID NO: 2441355 - DNA, 25 bp, Homo sapien
tgcagctcctcatacttgatctggt

SEQ ID NO: 2441356 - DNA, 25 bp, Homo sapien
gcagctcctcatacttgatctggta

SEQ ID NO: 2441357 - DNA, 25 bp, Homo sapien
cagctcctcatacttgatctggtac

SEQ ID NO: 2441358 - DNA, 25 bp, Homo sapien
gttggcaatatcctcgtactgtgcc

SEQ ID NO: 2441359 - DNA, 25 bp, Homo sapien
gcggttggcaatatcctcgtactgt

SEQ ID NO: 2441360 - DNA, 25 bp, Homo sapien
cccggctgcggttggcaatatcctc

SEQ ID NO: 2441361 - DNA, 25 bp, Homo sapien
ccggctgcggttggcaatatcctcg

SEQ ID NO: 2441362 - DNA, 25 bp, Homo sapien
agagggcaagtggtgaggccctgtc

SEQ ID NO: 2441363 - DNA, 25 bp, Homo sapien
aagagggcaagtggtgaggccctgt

SEQ ID NO: 2441364 - DNA, 25 bp, Homo sapien
cgtcggtcagcccttccaggcgaga

SEQ ID NO: 2441365 - DNA, 25 bp, Homo sapien
aggaagttgatctcgtcggtcagcc

SEQ ID NO: 2441366 - DNA, 25 bp, Homo sapien
tcgtcggtcagcccttccaggcgag

SEQ ID NO: 2441367 - DNA, 25 bp, Homo sapien
atctcgtcggtcagcccttccaggc

SEQ ID NO: 2441368 - DNA, 25 bp, Homo sapien
caccgatgtcaagagttctgtccaa

SEQ ID NO: 2441369 - DNA, 25 bp, Homo sapien
gccttctagagccagatctccagtt

SEQ ID NO: 2441370 - DNA, 25 bp, Homo sapien
ggtcacaggactttctagttgccca

SEQ ID NO: 2441371 - DNA, 25 bp, Homo sapien
tgaaccatgtcccaacaccgatgtc

SEQ ID NO: 2441372 - DNA, 25 bp, Homo sapien
atgaggacaaattcgttctccatct

SEQ ID NO: 2441373 - DNA, 25 bp, Homo sapien
caaattcgttctccatctctgtacg

SEQ ID NO: 2441374 - DNA, 25 bp, Homo sapien
tcgttctccatctctgtacgcttat

SEQ ID NO: 2441375 - DNA, 25 bp, Homo sapien
ggacaaattcgttctccatctctgt

SEQ ID NO: 2441376 - DNA, 25 bp, Homo sapien
aacacagactgttccgagcaaacct

SEQ ID NO: 2441377 - DNA, 25 bp, Homo sapien
gagcaaacctcatcaggtggtcacc

SEQ ID NO: 2441378 - DNA, 25 bp, Homo sapien
gggtgggtactatcaacaattgtgc

SEQ ID NO: 2441379 - DNA, 25 bp, Homo sapien
gctagaggtcaagggtcaagactaa

SEQ ID NO: 2441380 - DNA, 25 bp, Homo sapien
ccagcccctgcatgttgccaagctc

SEQ ID NO: 2441381 - DNA, 25 bp, Homo sapien
ccaccagcccctgcatgttgccaag

SEQ ID NO: 2441382 - DNA, 25 bp, Homo sapien
gcccctgcatgttgccaagctccgc

SEQ ID NO: 2441383 - DNA, 25 bp, Homo sapien
ttgttcttgaagtcctccaccagcc

SEQ ID NO: 2441384 - DNA, 25 bp, Homo sapien
caggaggctccacttggtctccagc

SEQ ID NO: 2441385 - DNA, 25 bp, Homo sapien
ccatgttgcttcgagccgtcttctg

SEQ ID NO: 2441386 - DNA, 25 bp, Homo sapien
gttgtccatgttgcttcgagccgtc

SEQ ID NO: 2441387 - DNA, 25 bp, Homo sapien
ctgctgcaggaggctccacttggtc

SEQ ID NO: 2441388 - DNA, 25 bp, Homo sapien
cactcctcaagcagtaaggtctcca

SEQ ID NO: 2441389 - DNA, 25 bp, Homo sapien
actcctcaagcagtaaggtctccag

SEQ ID NO: 2441390 - DNA, 25 bp, Homo sapien
ttcactcctcaagcagtaaggtctc

SEQ ID NO: 2441391 - DNA, 25 bp, Homo sapien
gcaaaaaggtctacatcaggccagg

SEQ ID NO: 2441392 - DNA, 25 bp, Homo sapien
gtcagcgtgaagggcccaatcctcg

SEQ ID NO: 2441393 - DNA, 25 bp, Homo sapien
tgaagggcccaatcctcggggccgc

SEQ ID NO: 2441394 - DNA, 25 bp, Homo sapien
cagtcagcgtgaagggcccaatcct

SEQ ID NO: 2441395 - DNA, 25 bp, Homo sapien
cagcgtgaagggcccaatcctcggg

SEQ ID NO: 2441396 - DNA, 25 bp, Homo sapien
gctggagatgtgcatagggaccggg

SEQ ID NO: 2441397 - DNA, 25 bp, Homo sapien
catagggaccgggactaccaggaga

SEQ ID NO: 2441398 - DNA, 25 bp, Homo sapien
gagagtgtcgccagggcgggtgagg

SEQ ID NO: 2441399 - DNA, 25 bp, Homo sapien
gaggatggaagggagagtgtcgcca

SEQ ID NO: 2441400 - DNA, 25 bp, Homo sapien
gccgcccaggccaccgcgaaagttg

SEQ ID NO: 2441401 - DNA, 25 bp, Homo sapien
ccgcccaggccaccgcgaaagttgc

SEQ ID NO: 2441402 - DNA, 25 bp, Homo sapien
cgcccaggccaccgcgaaagttgct

SEQ ID NO: 2441403 - DNA, 25 bp, Homo sapien
ggcaggcgggccgaaccaggcggag

SEQ ID NO: 2441404 - DNA, 25 bp, Homo sapien
ggaggcaggcgggccgaaccaggcg

SEQ ID NO: 2441405 - DNA, 25 bp, Homo sapien
aggcgggccgaaccaggcggagatc

SEQ ID NO: 2441406 - DNA, 25 bp, Homo sapien
caggcgggccgaaccaggcggagat

SEQ ID NO: 2441407 - DNA, 25 bp, Homo sapien
ggaaaggcctcgtacctgagtggct

SEQ ID NO: 2441408 - DNA, 25 bp, Homo sapien
ctgcttcttggtgaggagagctctc

SEQ ID NO: 2441409 - DNA, 25 bp, Homo sapien
gcctcgtacctgagtggctaggccc

SEQ ID NO: 2441410 - DNA, 25 bp, Homo sapien
aaagagatcccagccccgggggatg

SEQ ID NO: 2441411 - DNA, 25 bp, Homo sapien
actgaactcagaggaccaacagatg

SEQ ID NO: 2441412 - DNA, 25 bp, Homo sapien
tctctggaagatactgcagggtgtg

SEQ ID NO: 2441413 - DNA, 25 bp, Homo sapien
ggaccaacagatgacagccagatcc

SEQ ID NO: 2441414 - DNA, 25 bp, Homo sapien
tgtgatgtggggactggatgaaact

SEQ ID NO: 2441415 - DNA, 25 bp, Homo sapien
gaaagacaggcacataggaccccta

SEQ ID NO: 2441416 - DNA, 25 bp, Homo sapien
cctccttggaggacagacaaactta

SEQ ID NO: 2441417 - DNA, 25 bp, Homo sapien
gacaggtgacatagccctgacccag

SEQ ID NO: 2441418 - DNA, 25 bp, Homo sapien
ggacagatgtacagtttcttcccca

SEQ ID NO: 2441419 - DNA, 25 bp, Homo sapien
gcagccacagtttaggctattccca

SEQ ID NO: 2441420 - DNA, 25 bp, Homo sapien
aggcagccacagtttaggctattcc

SEQ ID NO: 2441421 - DNA, 25 bp, Homo sapien
ggcagccacagtttaggctattccc

SEQ ID NO: 2441422 - DNA, 25 bp, Homo sapien
gaggcagccacagtttaggctattc

SEQ ID NO: 2441423 - DNA, 25 bp, Homo sapien
ggcagggctcctcaaaagtgagccg

SEQ ID NO: 2441424 - DNA, 25 bp, Homo sapien
tcctcaaaagtgagccgccccaagg

SEQ ID NO: 2441425 - DNA, 25 bp, Homo sapien
gtgagccgccccaaggccagccctg

SEQ ID NO: 2441426 - DNA, 25 bp, Homo sapien
agggctcctcaaaagtgagccgccc

SEQ ID NO: 2441427 - DNA, 25 bp, Homo sapien
caggcactccaccagtatatgatga

SEQ ID NO: 2441428 - DNA, 25 bp, Homo sapien
cctggacaaccagcgacatagcaag

SEQ ID NO: 2441429 - DNA, 25 bp, Homo sapien
gagaccttgactatgttgttgaccg

SEQ ID NO: 2441430 - DNA, 25 bp, Homo sapien
gagagactctagagagcacgcagct

SEQ ID NO: 2441431 - DNA, 25 bp, Homo sapien
gacatgttcccaatcatagctggta

SEQ ID NO: 2441432 - DNA, 25 bp, Homo sapien
tcttcaaggtctaacaaggctcttc

SEQ ID NO: 2441433 - DNA, 25 bp, Homo sapien
caggtctgggatgatattgggcacc

SEQ ID NO: 2441434 - DNA, 25 bp, Homo sapien
tgttgtagagatccagccccaatcc

SEQ ID NO: 2441435 - DNA, 25 bp, Homo sapien
cccagccatgggcagtatgcacacc

SEQ ID NO: 2441436 - DNA, 25 bp, Homo sapien
catgggcagtatgcacacctgtact

SEQ ID NO: 2441437 - DNA, 25 bp, Homo sapien
atttagaaaatcccagccatgggca

SEQ ID NO: 2441438 - DNA, 25 bp, Homo sapien
aaatcccagccatgggcagtatgca

SEQ ID NO: 2441439 - DNA, 25 bp, Homo sapien
ccagcctgggagatagaggaagatt

SEQ ID NO: 2441440 - DNA, 25 bp, Homo sapien
cctgggagatagaggaagattccat

SEQ ID NO: 2441441 - DNA, 25 bp, Homo sapien
cagcctgggagatagaggaagattc

SEQ ID NO: 2441442 - DNA, 25 bp, Homo sapien
gcctgggagatagaggaagattcca

SEQ ID NO: 2441443 - DNA, 25 bp, Homo sapien
atgaccccagtccttcagcacgtag

SEQ ID NO: 2441444 - DNA, 25 bp, Homo sapien
tactcactttttgaagccctgtctg

SEQ ID NO: 2441445 - DNA, 25 bp, Homo sapien
cagtccttcagcacgtagaacgcaa

SEQ ID NO: 2441446 - DNA, 25 bp, Homo sapien
catttgacctccgtgaagttctcca

SEQ ID NO: 2441447 - DNA, 25 bp, Homo sapien
gaatcaataggtccactccagagca

SEQ ID NO: 2441448 - DNA, 25 bp, Homo sapien
gaagccttgtatgcaaaaccagtgg

SEQ ID NO: 2441449 - DNA, 25 bp, Homo sapien
cagctggtagctcgataagaatcaa

SEQ ID NO: 2441450 - DNA, 25 bp, Homo sapien
tctcaggccccatgcgatgtaggac

SEQ ID NO: 2441451 - DNA, 25 bp, Homo sapien
tgcccggcgatgtgggacacattat

SEQ ID NO: 2441452 - DNA, 25 bp, Homo sapien
ggtgatataccggtgtgcagaagtc

SEQ ID NO: 2441453 - DNA, 25 bp, Homo sapien
agagcacacctctgtatgattcggg

SEQ ID NO: 2441454 - DNA, 25 bp, Homo sapien
tccacaagtggataatttgggctgc

SEQ ID NO: 2441455 - DNA, 25 bp, Homo sapien
aaatttcaaactcgccagcacctcc

SEQ ID NO: 2441456 - DNA, 25 bp, Homo sapien
caaatttcaaactcgccagcacctc

SEQ ID NO: 2441457 - DNA, 25 bp, Homo sapien
ccaaatttcaaactcgccagcacct

SEQ ID NO: 2441458 - DNA, 25 bp, Homo sapien
aatttcaaactcgccagcacctcct

SEQ ID NO: 2441459 - DNA, 25 bp, Homo sapien
cccggccggtcagcagcgcggccag

SEQ ID NO: 2441460 - DNA, 25 bp, Homo sapien
tacggcgcccggccggtcagcagcg

SEQ ID NO: 2441461 - DNA, 25 bp, Homo sapien
cgcggccagcgtctatgcaggcgct

SEQ ID NO: 2441462 - DNA, 25 bp, Homo sapien
agcgcggccagcgtctatgcaggcg

SEQ ID NO: 2441463 - DNA, 25 bp, Homo sapien
gaccgagaaccggaggctggagagc

SEQ ID NO: 2441464 - DNA, 25 bp, Homo sapien
gtgaggagcctggagaccgagaacc

SEQ ID NO: 2441465 - DNA, 25 bp, Homo sapien
gcacttggagaagaagggaccccag

SEQ ID NO: 2441466 - DNA, 25 bp, Homo sapien
gcctggagaccgagaaccggaggct

SEQ ID NO: 2441467 - DNA, 25 bp, Homo sapien
ctttgcctctttccgtcattccata

SEQ ID NO: 2441468 - DNA, 25 bp, Homo sapien
tccaattatacactcctttgcctct

SEQ ID NO: 2441469 - DNA, 25 bp, Homo sapien
tcccagccttgtctgaccctccaat

SEQ ID NO: 2441470 - DNA, 25 bp, Homo sapien
tcattccataaccacccaaccccta

SEQ ID NO: 2441471 - DNA, 25 bp, Homo sapien
gcacctagccacagggtccctaaga

SEQ ID NO: 2441472 - DNA, 25 bp, Homo sapien
ctaagagcagcagctaggcatggga

SEQ ID NO: 2441473 - DNA, 25 bp, Homo sapien
ctggatttccatccgcgcacctagc

SEQ ID NO: 2441474 - DNA, 25 bp, Homo sapien
gacagggttgagagctttacagagg

SEQ ID NO: 2441475 - DNA, 25 bp, Homo sapien
ccttctactccacggggctgtttat

SEQ ID NO: 2441476 - DNA, 25 bp, Homo sapien
atttggagataaaggtagaggtcag

SEQ ID NO: 2441477 - DNA, 25 bp, Homo sapien
cttggtcttctgttacagtcttggt

SEQ ID NO: 2441478 - DNA, 25 bp, Homo sapien
ggctgtttataacttgggcttggtc

SEQ ID NO: 2441479 - DNA, 25 bp, Homo sapien
tgttgtacccgcaagtgtctgtgcc

SEQ ID NO: 2441480 - DNA, 25 bp, Homo sapien
gcatgaatagccctagtctcagaaa

SEQ ID NO: 2441481 - DNA, 25 bp, Homo sapien
tataacctcttttgggacagttcta

SEQ ID NO: 2441482 - DNA, 25 bp, Homo sapien
cactagaatataacctcttttggga

SEQ ID NO: 2441483 - DNA, 25 bp, Homo sapien
atgcgtgcgctagaacccagatggg

SEQ ID NO: 2441484 - DNA, 25 bp, Homo sapien
cagatgggaagctttttaacgcgcc

SEQ ID NO: 2441485 - DNA, 25 bp, Homo sapien
agacgggcgcgccttcaatgcgtgc

SEQ ID NO: 2441486 - DNA, 25 bp, Homo sapien
ttaacgcgcctgtgttgcgcactta

SEQ ID NO: 2441487 - DNA, 25 bp, Homo sapien
gcagtgatgacccaacatcttgtag

SEQ ID NO: 2441488 - DNA, 25 bp, Homo sapien
ccttccatcctgaggtactgcagag

SEQ ID NO: 2441489 - DNA, 25 bp, Homo sapien
taactgtgcaactaccagcaggtac

SEQ ID NO: 2441490 - DNA, 25 bp, Homo sapien
ggtgtaacgcttgacagttgaccaa

SEQ ID NO: 2441491 - DNA, 25 bp, Homo sapien
tggctgctatcaggccagttctgga

SEQ ID NO: 2441492 - DNA, 25 bp, Homo sapien
tttgaaagaaagggataccaagtga

SEQ ID NO: 2441493 - DNA, 25 bp, Homo sapien
ggtacatcaagtttgatattcttgg

SEQ ID NO: 2441494 - DNA, 25 bp, Homo sapien
ttttcttaatcatgtagtggctgct

SEQ ID NO: 2441495 - DNA, 25 bp, Homo sapien
taaagtgatgtttcaggctgctcgc

SEQ ID NO: 2441496 - DNA, 25 bp, Homo sapien
aaagtaagaactagatcatctttta

SEQ ID NO: 2441497 - DNA, 25 bp, Homo sapien
tctatggggtcctcataaagtgatg

SEQ ID NO: 2441498 - DNA, 25 bp, Homo sapien
cagacttcttaagttactattcttt

SEQ ID NO: 2441499 - DNA, 25 bp, Homo sapien
tcctagtttcgaccacttggcacag

SEQ ID NO: 2441500 - DNA, 25 bp, Homo sapien
gggattccaagggccagccactgtg

SEQ ID NO: 2441501 - DNA, 25 bp, Homo sapien
gatggcatatccctacatggaactt

SEQ ID NO: 2441502 - DNA, 25 bp, Homo sapien
ggaaatcttaggagagggacattga

SEQ ID NO: 2441503 - DNA, 25 bp, Homo sapien
catggaactttttagtggattttgt

SEQ ID NO: 2441504 - DNA, 25 bp, Homo sapien
tgaggttagtttccctcagtacatg

SEQ ID NO: 2441505 - DNA, 25 bp, Homo sapien
cacatgtttgtattaggcgagtcct

SEQ ID NO: 2441506 - DNA, 25 bp, Homo sapien
tccgtaagtgttgaaggctgctccc

SEQ ID NO: 2441507 - DNA, 25 bp, Homo sapien
actatagtaagatcgcatgtgcctc

SEQ ID NO: 2441508 - DNA, 25 bp, Homo sapien
acaaggactgttgactagaggtgcc

SEQ ID NO: 2441509 - DNA, 25 bp, Homo sapien
cgttatgtcaccatgcagttgccag

SEQ ID NO: 2441510 - DNA, 25 bp, Homo sapien
caagttgttctagtctccaggaggc

SEQ ID NO: 2441511 - DNA, 25 bp, Homo sapien
cagttgccagtgtgattagtgccta

SEQ ID NO: 2441512 - DNA, 25 bp, Homo sapien
gagaattgccaatacagccagagag

SEQ ID NO: 2441513 - DNA, 25 bp, Homo sapien
gccataaagaatgggactgcattgg

SEQ ID NO: 2441514 - DNA, 25 bp, Homo sapien
ggccataaagaatgggactgcattg

SEQ ID NO: 2441515 - DNA, 25 bp, Homo sapien
ggagtgagactataggccataaaga

SEQ ID NO: 2441516 - DNA, 25 bp, Homo sapien
agtgagactataggccataaagaat

SEQ ID NO: 2441517 - DNA, 25 bp, Homo sapien
ggaccccttttattgatcagagtgc

SEQ ID NO: 2441518 - DNA, 25 bp, Homo sapien
gggagcctttcttacaaccttgatg

SEQ ID NO: 2441519 - DNA, 25 bp, Homo sapien
cagggacagttaaattgggagcctt

SEQ ID NO: 2441520 - DNA, 25 bp, Homo sapien
cccaaaaagcagtatctaagtcaca

SEQ ID NO: 2441521 - DNA, 25 bp, Homo sapien
taggtgcccctattgtccaggctgc

SEQ ID NO: 2441522 - DNA, 25 bp, Homo sapien
ccttgagttacaccgcactggtgga

SEQ ID NO: 2441523 - DNA, 25 bp, Homo sapien
tccaaacagctagggacagactggt

SEQ ID NO: 2441524 - DNA, 25 bp, Homo sapien
taatcacctggatgtgcctgcagtc

SEQ ID NO: 2441525 - DNA, 25 bp, Homo sapien
gctaagcgagctcacagcatctggt

SEQ ID NO: 2441526 - DNA, 25 bp, Homo sapien
ggagtttggccacccatcttgtgac

SEQ ID NO: 2441527 - DNA, 25 bp, Homo sapien
cactagggtcccagttcgtgctgag

SEQ ID NO: 2441528 - DNA, 25 bp, Homo sapien
tgattaggtcccgtgtgtctcccag

SEQ ID NO: 2441529 - DNA, 25 bp, Homo sapien
tacatgggacaaccttcagccttgc

SEQ ID NO: 2441530 - DNA, 25 bp, Homo sapien
tctaacctctgaaactgtctattgg

SEQ ID NO: 2441531 - DNA, 25 bp, Homo sapien
gcagtaagatcaaggctccccagtc

SEQ ID NO: 2441532 - DNA, 25 bp, Homo sapien
ccctaaggaatgctgggaagagcaa

SEQ ID NO: 2441533 - DNA, 25 bp, Homo sapien
aagattggaatcaggtgctccaccc

SEQ ID NO: 2441534 - DNA, 25 bp, Homo sapien
tgaagttcctatccagtaccaggca

SEQ ID NO: 2441535 - DNA, 25 bp, Homo sapien
aaacctgccctacggcccattagct

SEQ ID NO: 2441536 - DNA, 25 bp, Homo sapien
tccagggtggcacgactcaaacctg

SEQ ID NO: 2441537 - DNA, 25 bp, Homo sapien
tccattccatgaagttcctatccag

SEQ ID NO: 2441538 - DNA, 25 bp, Homo sapien
acgggtggtcctctcaggtcaggcc

SEQ ID NO: 2441539 - DNA, 25 bp, Homo sapien
aagaggctgacgctgcgcggcagtt

SEQ ID NO: 2441540 - DNA, 25 bp, Homo sapien
tgggccaaaagtaacaccaggtgtc

SEQ ID NO: 2441541 - DNA, 25 bp, Homo sapien
tgtcttcacctgattcaggcgcccg

SEQ ID NO: 2441542 - DNA, 25 bp, Homo sapien
tgtctccagtatgtccctggcgcgg

SEQ ID NO: 2441543 - DNA, 25 bp, Homo sapien
tttctgcctgtgtcccgccgggtca

SEQ ID NO: 2441544 - DNA, 25 bp, Homo sapien
tctccccgtctctcagactttcccg

SEQ ID NO: 2441545 - DNA, 25 bp, Homo sapien
cgtctgtctggctcgcgtgtttctt

SEQ ID NO: 2441546 - DNA, 25 bp, Homo sapien
gcacagatgaggctgattcgactcg

SEQ ID NO: 2441547 - DNA, 25 bp, Homo sapien
acagaggccgtaagcgggcacagat

SEQ ID NO: 2441548 - DNA, 25 bp, Homo sapien
gatgaggctgattcgactcgccagc

SEQ ID NO: 2441549 - DNA, 25 bp, Homo sapien
acagctatttccagaaaggggggtg

SEQ ID NO: 2441550 - DNA, 25 bp, Homo sapien
tcacaccagccagacagcctaccct

SEQ ID NO: 2441551 - DNA, 25 bp, Homo sapien
cctcacaccagccagacagcctacc

SEQ ID NO: 2441552 - DNA, 25 bp, Homo sapien
agacagcctaccctccgcccagggg

SEQ ID NO: 2441553 - DNA, 25 bp, Homo sapien
ctcacaccagccagacagcctaccc

SEQ ID NO: 2441554 - DNA, 25 bp, Homo sapien
gagatgaccttgaacggagtgctgt

SEQ ID NO: 2441555 - DNA, 25 bp, Homo sapien
tgacttcagcctgtcaggccttgcc

SEQ ID NO: 2441556 - DNA, 25 bp, Homo sapien
tgtccagaggtctggtggctccaga

SEQ ID NO: 2441557 - DNA, 25 bp, Homo sapien
tcccgtggagttggtgagtgcgctc

SEQ ID NO: 2441558 - DNA, 25 bp, Homo sapien
cggcccgatgaacagcggcaccggg

SEQ ID NO: 2441559 - DNA, 25 bp, Homo sapien
tgacggagcgcatcttggccgccgc

SEQ ID NO: 2441560 - DNA, 25 bp, Homo sapien
cccgcgcggcccgatgaacagcggc

SEQ ID NO: 2441561 - DNA, 25 bp, Homo sapien
ctacgtgacggagcgcatcttggcc

SEQ ID NO: 2441562 - DNA, 25 bp, Homo sapien
gagcctcctacacaagagagccaaa

SEQ ID NO: 2441563 - DNA, 25 bp, Homo sapien
caatgtcaagtttgtccaggataca

SEQ ID NO: 2441564 - DNA, 25 bp, Homo sapien
tatgacaccaatggccttagccagc

SEQ ID NO: 2441565 - DNA, 25 bp, Homo sapien
gttggtgccaccttgagagaaccct

SEQ ID NO: 2441566 - DNA, 25 bp, Homo sapien
ctgagcttccctgtcggttctcatt

SEQ ID NO: 2441567 - DNA, 25 bp, Homo sapien
gctgcctgcgcattcccagcaaagg

SEQ ID NO: 2441568 - DNA, 25 bp, Homo sapien
tcggttctcattgccctcagatcct

SEQ ID NO: 2441569 - DNA, 25 bp, Homo sapien
gcaaaggtgagtgtctggtcatctg

SEQ ID NO: 2441570 - DNA, 25 bp, Homo sapien
tctgcctcgcttctgactgtagatc

SEQ ID NO: 2441571 - DNA, 25 bp, Homo sapien
gcctgcagcgtgctctacttgacct

SEQ ID NO: 2441572 - DNA, 25 bp, Homo sapien
gatccagtagagtcatggaatctgc

SEQ ID NO: 2441573 - DNA, 25 bp, Homo sapien
gtctcatgaacaagacgatcatggg

SEQ ID NO: 2441574 - DNA, 25 bp, Homo sapien
ctgcaggagaacgtcagccctccag

SEQ ID NO: 2441575 - DNA, 25 bp, Homo sapien
tcagagtaggatcacatgaataggg

SEQ ID NO: 2441576 - DNA, 25 bp, Homo sapien
atcagcagttgagccccgaaggaga

SEQ ID NO: 2441577 - DNA, 25 bp, Homo sapien
tcctctgagcagagattcagagtag

SEQ ID NO: 2441578 - DNA, 25 bp, Homo sapien
gcagtcctgttcctagcccagtgga

SEQ ID NO: 2441579 - DNA, 25 bp, Homo sapien
tagaaaggctcctggttccggccat

SEQ ID NO: 2441580 - DNA, 25 bp, Homo sapien
gcctgctgggtaaacgaagcctctg

SEQ ID NO: 2441581 - DNA, 25 bp, Homo sapien
cactgaagcgaaacaggcaactggc

SEQ ID NO: 2441582 - DNA, 25 bp, Homo sapien
ctagccactcaaggggtgcagatct

SEQ ID NO: 2441583 - DNA, 25 bp, Homo sapien
ccgcagctcagcattccaatggtgg

SEQ ID NO: 2441584 - DNA, 25 bp, Homo sapien
ccttcttcccaatgatcttgccatt

SEQ ID NO: 2441585 - DNA, 25 bp, Homo sapien
tcttgccattccgagtgaagaaaac

SEQ ID NO: 2441586 - DNA, 25 bp, Homo sapien
tcccaagaccgtctcccgatctcag

SEQ ID NO: 2441587 - DNA, 25 bp, Homo sapien
gggagaagaatggagcaagcaggct

SEQ ID NO: 2441588 - DNA, 25 bp, Homo sapien
gtgttatgggaagtgaccaccagag

SEQ ID NO: 2441589 - DNA, 25 bp, Homo sapien
agctccacaggcctgaaccccaatc

SEQ ID NO: 2441590 - DNA, 25 bp, Homo sapien
tgctccggctctatctcttccccat

SEQ ID NO: 2441591 - DNA, 25 bp, Homo sapien
tgccctcatgctccggctctatctc

SEQ ID NO: 2441592 - DNA, 25 bp, Homo sapien
accttcctgccctcatgctccggct

SEQ ID NO: 2441593 - DNA, 25 bp, Homo sapien
tcatgctccggctctatctcttccc

SEQ ID NO: 2441594 - DNA, 25 bp, Homo sapien
tccggacggcccgggcagtcggaga

SEQ ID NO: 2441595 - DNA, 25 bp, Homo sapien
ggacggcccgggcagtcggagacag

SEQ ID NO: 2441596 - DNA, 25 bp, Homo sapien
cccgggcagtcggagacaggatcac

SEQ ID NO: 2441597 - DNA, 25 bp, Homo sapien
gcccgggcagtcggagacaggatca

SEQ ID NO: 2441598 - DNA, 25 bp, Homo sapien
gatgtcccctttgtaacagcgtggc

SEQ ID NO: 2441599 - DNA, 25 bp, Homo sapien
gtcccctttgtaacagcgtggccca

SEQ ID NO: 2441600 - DNA, 25 bp, Homo sapien
ctttgtaacagcgtggcccaaaggg

SEQ ID NO: 2441601 - DNA, 25 bp, Homo sapien
attccacagcccatgatgtcccctt

SEQ ID NO: 2441602 - DNA, 25 bp, Homo sapien
tccagccagggtgcctgttcttggg

SEQ ID NO: 2441603 - DNA, 25 bp, Homo sapien
ctgctccagccagggtgcctgttct

SEQ ID NO: 2441604 - DNA, 25 bp, Homo sapien
tgcatgataagccacagaccctctg

SEQ ID NO: 2441605 - DNA, 25 bp, Homo sapien
ctgcatgataagccacagaccctct

SEQ ID NO: 2441606 - DNA, 25 bp, Homo sapien
cgtgccagccccagggcgatgtagc

SEQ ID NO: 2441607 - DNA, 25 bp, Homo sapien
tttgcccttccctaagtactccagc

SEQ ID NO: 2441608 - DNA, 25 bp, Homo sapien
tctccacctcgaagtagtggctgcg

SEQ ID NO: 2441609 - DNA, 25 bp, Homo sapien
cagccccacatccacgatgcttttg

SEQ ID NO: 2441610 - DNA, 25 bp, Homo sapien
tagatgcatcctcgcccgctgaaaa

SEQ ID NO: 2441611 - DNA, 25 bp, Homo sapien
aaagggaaagaatcctagagataca

SEQ ID NO: 2441612 - DNA, 25 bp, Homo sapien
ttgctgaatgcccacgctgtcttcc

SEQ ID NO: 2441613 - DNA, 25 bp, Homo sapien
agttctaggccagcatggaagagca

SEQ ID NO: 2441614 - DNA, 25 bp, Homo sapien
ggtacttgtacagtgtataggtgag

SEQ ID NO: 2441615 - DNA, 25 bp, Homo sapien
tataggtgaggcttgtacagcgtgc

SEQ ID NO: 2441616 - DNA, 25 bp, Homo sapien
accacagagcacttcggacagaatg

SEQ ID NO: 2441617 - DNA, 25 bp, Homo sapien
tgctgatgtcctggacgactaggta

SEQ ID NO: 2441618 - DNA, 25 bp, Homo sapien
ttcccagagaactcagaggggtgga

SEQ ID NO: 2441619 - DNA, 25 bp, Homo sapien
gcctccctgacagattctttcttga

SEQ ID NO: 2441620 - DNA, 25 bp, Homo sapien
tccttggtctatagctgttaggaac

SEQ ID NO: 2441621 - DNA, 25 bp, Homo sapien
agtgaaagccatcataaacctcctg

SEQ ID NO: 2441622 - DNA, 25 bp, Homo sapien
tgacatcatgtagccggccccattc

SEQ ID NO: 2441623 - DNA, 25 bp, Homo sapien
catcatgacgctgtcgtcctcacgg

SEQ ID NO: 2441624 - DNA, 25 bp, Homo sapien
agtcccacagactctgacatcatgt

SEQ ID NO: 2441625 - DNA, 25 bp, Homo sapien
tcacggcccagctcagcgttgaggt

SEQ ID NO: 2441626 - DNA, 25 bp, Homo sapien
cggcccttggctcggccattgtaca

SEQ ID NO: 2441627 - DNA, 25 bp, Homo sapien
ggagttgcactttgacccaaactgg

SEQ ID NO: 2441628 - DNA, 25 bp, Homo sapien
tctgggcggtctgcacatcaaagga

SEQ ID NO: 2441629 - DNA, 25 bp, Homo sapien
acagccaatccggtccccggagttg

SEQ ID NO: 2441630 - DNA, 25 bp, Homo sapien
tctagtctgtaagccttcaagggtg

SEQ ID NO: 2441631 - DNA, 25 bp, Homo sapien
agagtagtacagacacaggacccga

SEQ ID NO: 2441632 - DNA, 25 bp, Homo sapien
gaaaagtctatgaaacacccaatgg

SEQ ID NO: 2441633 - DNA, 25 bp, Homo sapien
gatggtacccacttacgtcctggcg

SEQ ID NO: 2441634 - DNA, 25 bp, Homo sapien
cggactccactgtccacaatagaca

SEQ ID NO: 2441635 - DNA, 25 bp, Homo sapien
agccaggctggtgatccaagctgta

SEQ ID NO: 2441636 - DNA, 25 bp, Homo sapien
tcatcagcatggtaggctacagagt

SEQ ID NO: 2441637 - DNA, 25 bp, Homo sapien
gctgtagtactgagggaccagcccc

SEQ ID NO: 2441638 - DNA, 25 bp, Homo sapien
gagaagccacgtagcagccaacttc

SEQ ID NO: 2441639 - DNA, 25 bp, Homo sapien
caacttcaccagagtttccatgata

SEQ ID NO: 2441640 - DNA, 25 bp, Homo sapien
ccttggtcaggggtcgagaagccac

SEQ ID NO: 2441641 - DNA, 25 bp, Homo sapien
tcaaaataattgctgtccttggtca

SEQ ID NO: 2441642 - DNA, 25 bp, Homo sapien
ggcgccaattcagaaaccggtagtg

SEQ ID NO: 2441643 - DNA, 25 bp, Homo sapien
gatatcggaaagctcggacctctcg

SEQ ID NO: 2441644 - DNA, 25 bp, Homo sapien
tacaaggatatgtttgaacctctcc

SEQ ID NO: 2441645 - DNA, 25 bp, Homo sapien
cggtagtgcaggttgaggtcatcca

SEQ ID NO: 2441646 - DNA, 25 bp, Homo sapien
cttcactcctagaggcccgccccgt

SEQ ID NO: 2441647 - DNA, 25 bp, Homo sapien
agcaacggcctctgacgacgggcac

SEQ ID NO: 2441648 - DNA, 25 bp, Homo sapien
ccccatctaagccaatcagcaacgg

SEQ ID NO: 2441649 - DNA, 25 bp, Homo sapien
tccgcacacaagctcttcggccgcc

SEQ ID NO: 2441650 - DNA, 25 bp, Homo sapien
ccttccaactcatctccacctcctt

SEQ ID NO: 2441651 - DNA, 25 bp, Homo sapien
cttccaactcatctccacctccttt

SEQ ID NO: 2441652 - DNA, 25 bp, Homo sapien
ctccacctccttttgattccctcat

SEQ ID NO: 2441653 - DNA, 25 bp, Homo sapien
catctccacctccttttgattccct

SEQ ID NO: 2441654 - DNA, 25 bp, Homo sapien
agtgagacctgcttgtcacagtccc

SEQ ID NO: 2441655 - DNA, 25 bp, Homo sapien
tagcactctctgtttcggggccttg

SEQ ID NO: 2441656 - DNA, 25 bp, Homo sapien
cactctctgtttcggggccttggag

SEQ ID NO: 2441657 - DNA, 25 bp, Homo sapien
gaggttgatttgttcgcagtagcac

SEQ ID NO: 2441658 - DNA, 25 bp, Homo sapien
ttgatttgttcgcagtagcactctc

SEQ ID NO: 2441659 - DNA, 25 bp, Homo sapien
cacgtgttactgtgttcggctcatt

SEQ ID NO: 2441660 - DNA, 25 bp, Homo sapien
ggcacgtgttactgtgttcggctca

SEQ ID NO: 2441661 - DNA, 25 bp, Homo sapien
cgtgttactgtgttcggctcatttt

SEQ ID NO: 2441662 - DNA, 25 bp, Homo sapien
acaggcacgtgttactgtgttcggc

SEQ ID NO: 2441663 - DNA, 25 bp, Homo sapien
caatctccttttagttcagtacatg

SEQ ID NO: 2441664 - DNA, 25 bp, Homo sapien
tgaaaaagatcacttcaatctcctt

SEQ ID NO: 2441665 - DNA, 25 bp, Homo sapien
taactcttcaagagccctaaatgtt

SEQ ID NO: 2441666 - DNA, 25 bp, Homo sapien
tgtttttcctccattgtgatgtcac

SEQ ID NO: 2441667 - DNA, 25 bp, Homo sapien
gcttgccacgttttgttcccaggtc

SEQ ID NO: 2441668 - DNA, 25 bp, Homo sapien
tgtctcatcgcaagccactggtggc

SEQ ID NO: 2441669 - DNA, 25 bp, Homo sapien
tcttgaggcccagtaacgagatgca

SEQ ID NO: 2441670 - DNA, 25 bp, Homo sapien
ggaaaaatctcacgggcagctgctt

SEQ ID NO: 2441671 - DNA, 25 bp, Homo sapien
gctgatactcttccttgtcattgga

SEQ ID NO: 2441672 - DNA, 25 bp, Homo sapien
gggttcttctatcccgtcatgctga

SEQ ID NO: 2441673 - DNA, 25 bp, Homo sapien
ctccgcagtggcccatgagtatatc

SEQ ID NO: 2441674 - DNA, 25 bp, Homo sapien
cttctgcttcgtcctggggttcttc

SEQ ID NO: 2441675 - DNA, 25 bp, Homo sapien
caggggccatgctaatcttctctgt

SEQ ID NO: 2441676 - DNA, 25 bp, Homo sapien
acacttcaaaaatttgcacatcatc

SEQ ID NO: 2441677 - DNA, 25 bp, Homo sapien
ggaacacttcaaaaatttgcacatc

SEQ ID NO: 2441678 - DNA, 25 bp, Homo sapien
caaaaatttgcacatcatccttgtg

SEQ ID NO: 2441679 - DNA, 25 bp, Homo sapien
ttggaacagagtctcgtactgttgc

SEQ ID NO: 2441680 - DNA, 25 bp, Homo sapien
taggagaaagttagtaggtcaaagc

SEQ ID NO: 2441681 - DNA, 25 bp, Homo sapien
ctctatataaagacttgtattcagc

SEQ ID NO: 2441682 - DNA, 25 bp, Homo sapien
aattgcctattatcctattccaggg

SEQ ID NO: 2441683 - DNA, 25 bp, Homo sapien
ggaatgcagtgactctgcgggtgag

SEQ ID NO: 2441684 - DNA, 25 bp, Homo sapien
agggaatgcagtgactctgcgggtg

SEQ ID NO: 2441685 - DNA, 25 bp, Homo sapien
cacccggcctcaaaggctgggaggg

SEQ ID NO: 2441686 - DNA, 25 bp, Homo sapien
tcaaaggctgggagggaatgcagtg

SEQ ID NO: 2441687 - DNA, 25 bp, Homo sapien
gtggtatcaaggccggcagcaagac

SEQ ID NO: 2441688 - DNA, 25 bp, Homo sapien
tggtatcaaggccggcagcaagaca

SEQ ID NO: 2441689 - DNA, 25 bp, Homo sapien
gtatcaaggccggcagcaagacaga

SEQ ID NO: 2441690 - DNA, 25 bp, Homo sapien
gggtggtatcaaggccggcagcaag

SEQ ID NO: 2441691 - DNA, 25 bp, Homo sapien
ggaagtccatatcagcacaggtcag

SEQ ID NO: 2441692 - DNA, 25 bp, Homo sapien
tccagctcgttgaggaggaagtcca

SEQ ID NO: 2441693 - DNA, 25 bp, Homo sapien
gggctggtagccaatcatcatggag

SEQ ID NO: 2441694 - DNA, 25 bp, Homo sapien
cacaggtcagtgcagagttggccac

SEQ ID NO: 2441695 - DNA, 25 bp, Homo sapien
gtggaagggtggagagagattccag

SEQ ID NO: 2441696 - DNA, 25 bp, Homo sapien
tgtggaagggtggagagagattcca

SEQ ID NO: 2441697 - DNA, 25 bp, Homo sapien
ctgtggaagggtggagagagattcc

SEQ ID NO: 2441698 - DNA, 25 bp, Homo sapien
cagcctttcgtggtaatctggactc

SEQ ID NO: 2441699 - DNA, 25 bp, Homo sapien
cctttcgtggtaatctggactctcc

SEQ ID NO: 2441700 - DNA, 25 bp, Homo sapien
gacagcctttcgtggtaatctggac

SEQ ID NO: 2441701 - DNA, 25 bp, Homo sapien
ctttgacagcctttcgtggtaatct

SEQ ID NO: 2441702 - DNA, 25 bp, Homo sapien
ccagaaacacacattgacaaactca

SEQ ID NO: 2441703 - DNA, 25 bp, Homo sapien
gggtacgaaccagaaacacacattg

SEQ ID NO: 2441704 - DNA, 25 bp, Homo sapien
accagaaacacacattgacaaactc

SEQ ID NO: 2441705 - DNA, 25 bp, Homo sapien
tacgaaccagaaacacacattgaca

SEQ ID NO: 2441706 - DNA, 25 bp, Homo sapien
ctccatgactagctcaaacccttcc

SEQ ID NO: 2441707 - DNA, 25 bp, Homo sapien
ctcaaacccttcccgcttcttcatt

SEQ ID NO: 2441708 - DNA, 25 bp, Homo sapien
tagctcaaacccttcccgcttcttc

SEQ ID NO: 2441709 - DNA, 25 bp, Homo sapien
gctcaaacccttcccgcttcttcat

SEQ ID NO: 2441710 - DNA, 25 bp, Homo sapien
cctgctggaaaaggtagctggcctg

SEQ ID NO: 2441711 - DNA, 25 bp, Homo sapien
cccgtgtccagagccacatcgtaga

SEQ ID NO: 2441712 - DNA, 25 bp, Homo sapien
tgggacccatggcagcgcttgagca

SEQ ID NO: 2441713 - DNA, 25 bp, Homo sapien
acaaaggcctggtcgatgcgccgct

SEQ ID NO: 2441714 - DNA, 25 bp, Homo sapien
gcgaggagcttgtggggattccagg

SEQ ID NO: 2441715 - DNA, 25 bp, Homo sapien
gctgcgaggagcttgtggggattcc

SEQ ID NO: 2441716 - DNA, 25 bp, Homo sapien
cgaggtatcctggagaagaagtgca

SEQ ID NO: 2441717 - DNA, 25 bp, Homo sapien
aggtatcctggagaagaagtgcaga

SEQ ID NO: 2441718 - DNA, 25 bp, Homo sapien
atcccatccaggagatgcctgtgtg

SEQ ID NO: 2441719 - DNA, 25 bp, Homo sapien
gtgtgtctgtgacagcaggacgctc

SEQ ID NO: 2441720 - DNA, 25 bp, Homo sapien
cagcaggacgctcccaccccaggca

SEQ ID NO: 2441721 - DNA, 25 bp, Homo sapien
tggatcccatccaggagatgcctgt

SEQ ID NO: 2441722 - DNA, 25 bp, Homo sapien
agccatagcccatgacgctggcaca

SEQ ID NO: 2441723 - DNA, 25 bp, Homo sapien
acatcagcaattgcctccagggggt

SEQ ID NO: 2441724 - DNA, 25 bp, Homo sapien
agcccatgacgctggcacacatcag

SEQ ID NO: 2441725 - DNA, 25 bp, Homo sapien
ggcacacatcagcaattgcctccag

SEQ ID NO: 2441726 - DNA, 25 bp, Homo sapien
gtggcactgaccaggaacggcacag

SEQ ID NO: 2441727 - DNA, 25 bp, Homo sapien
gcactgaccaggaacggcacagcac

SEQ ID NO: 2441728 - DNA, 25 bp, Homo sapien
ccagaggtggcactgaccaggaacg

SEQ ID NO: 2441729 - DNA, 25 bp, Homo sapien
aggtggcactgaccaggaacggcac

SEQ ID NO: 2441730 - DNA, 25 bp, Homo sapien
tgatgggttcaatcgtgccccaaac

SEQ ID NO: 2441731 - DNA, 25 bp, Homo sapien
gggttcaatcgtgccccaaacctca

SEQ ID NO: 2441732 - DNA, 25 bp, Homo sapien
aacaaaagacagtggggactataag

SEQ ID NO: 2441733 - DNA, 25 bp, Homo sapien
ggtgatgggttcaatcgtgccccaa

SEQ ID NO: 2441734 - DNA, 25 bp, Homo sapien
aattgctgcccttactgctactcag

SEQ ID NO: 2441735 - DNA, 25 bp, Homo sapien
tgctactcagaggtaacatccatat

SEQ ID NO: 2441736 - DNA, 25 bp, Homo sapien
tacacgctacaggttggatgaacct

SEQ ID NO: 2441737 - DNA, 25 bp, Homo sapien
gaagtgaagggttgatacacgctac

SEQ ID NO: 2441738 - DNA, 25 bp, Homo sapien
tcggccataccaatctgcctctcca

SEQ ID NO: 2441739 - DNA, 25 bp, Homo sapien
cggccataccaatctgcctctccag

SEQ ID NO: 2441740 - DNA, 25 bp, Homo sapien
ctcggccataccaatctgcctctcc

SEQ ID NO: 2441741 - DNA, 25 bp, Homo sapien
cctcggccataccaatctgcctctc

SEQ ID NO: 2441742 - DNA, 25 bp, Homo sapien
cggacactgtcggtgccaagtccca

SEQ ID NO: 2441743 - DNA, 25 bp, Homo sapien
cagaaacgcagctcccttctggatg

SEQ ID NO: 2441744 - DNA, 25 bp, Homo sapien
cttgaccactcggacactgtcggtg

SEQ ID NO: 2441745 - DNA, 25 bp, Homo sapien
atcagccttgaccactcggacactg

SEQ ID NO: 2441746 - DNA, 25 bp, Homo sapien
tgtgaacaggagcagttacttgacc

SEQ ID NO: 2441747 - DNA, 25 bp, Homo sapien
tcagcgtgcatacgaatcgcctggg

SEQ ID NO: 2441748 - DNA, 25 bp, Homo sapien
caaatgggatcctgtagaccagggc

SEQ ID NO: 2441749 - DNA, 25 bp, Homo sapien
agggcttctcaaatgtcagcgtgca

SEQ ID NO: 2441750 - DNA, 25 bp, Homo sapien
tggagattagaatcaggagcccagg

SEQ ID NO: 2441751 - DNA, 25 bp, Homo sapien
tggctggagattagaatcaggagcc

SEQ ID NO: 2441752 - DNA, 25 bp, Homo sapien
ccagggttgggcctgtgcctcttcc

SEQ ID NO: 2441753 - DNA, 25 bp, Homo sapien
attagaatcaggagcccagggttgg

SEQ ID NO: 2441754 - DNA, 25 bp, Homo sapien
gatagcgggccagatttacagcata

SEQ ID NO: 2441755 - DNA, 25 bp, Homo sapien
tccttcgatgtgaatagggccaggg

SEQ ID NO: 2441756 - DNA, 25 bp, Homo sapien
tgcaatccgggtagcgctgatagcg

SEQ ID NO: 2441757 - DNA, 25 bp, Homo sapien
ggaggcccctctgcttgcaatccgg

SEQ ID NO: 2441758 - DNA, 25 bp, Homo sapien
accagggcccgcagtttcctcagca

SEQ ID NO: 2441759 - DNA, 25 bp, Homo sapien
gggcagaagattccgtccccagagc

SEQ ID NO: 2441760 - DNA, 25 bp, Homo sapien
catgagcacaaacacgggggcgatt

SEQ ID NO: 2441761 - DNA, 25 bp, Homo sapien
cacgggggcgatttcatatgtgtac

SEQ ID NO: 2441762 - DNA, 25 bp, Homo sapien
ctctcagtgataatgcgcccggcca

SEQ ID NO: 2441763 - DNA, 25 bp, Homo sapien
gaggctctcagtgataatgcgcccg

SEQ ID NO: 2441764 - DNA, 25 bp, Homo sapien
ctcagtgataatgcgcccggccaga

SEQ ID NO: 2441765 - DNA, 25 bp, Homo sapien
ggctctcagtgataatgcgcccggc

SEQ ID NO: 2441766 - DNA, 25 bp, Homo sapien
cactgtagcgaatcacagcccgaca

SEQ ID NO: 2441767 - DNA, 25 bp, Homo sapien
tgacactgtagcgaatcacagcccg

SEQ ID NO: 2441768 - DNA, 25 bp, Homo sapien
tgtagcgaatcacagcccgacaccg

SEQ ID NO: 2441769 - DNA, 25 bp, Homo sapien
gcttctgtgactcgccctggctccg

SEQ ID NO: 2441770 - DNA, 25 bp, Homo sapien
aaagaaagaaagcttgatgggaagg

SEQ ID NO: 2441771 - DNA, 25 bp, Homo sapien
caaacacggcccggagcaaggcttc

SEQ ID NO: 2441772 - DNA, 25 bp, Homo sapien
ctgtggcagagcagagtcattccct

SEQ ID NO: 2441773 - DNA, 25 bp, Homo sapien
gctcaggagagccggaggcagggtg

SEQ ID NO: 2441774 - DNA, 25 bp, Homo sapien
tgctcaggagagccggaggcagggt

SEQ ID NO: 2441775 - DNA, 25 bp, Homo sapien
atgtaaaacgggtcatacaggccag

SEQ ID NO: 2441776 - DNA, 25 bp, Homo sapien
tttcatgtaaaacgggtcatacagg

SEQ ID NO: 2441777 - DNA, 25 bp, Homo sapien
tcatgtaaaacgggtcatacaggcc

SEQ ID NO: 2441778 - DNA, 25 bp, Homo sapien
catttcatgtaaaacgggtcataca

SEQ ID NO: 2441779 - DNA, 25 bp, Homo sapien
caaagggatctaggcaattgtctcc

SEQ ID NO: 2441780 - DNA, 25 bp, Homo sapien
ggaatgtcccttgcacatcatgtgg

SEQ ID NO: 2441781 - DNA, 25 bp, Homo sapien
gaagcgctctcagccaggtttatgg

SEQ ID NO: 2441782 - DNA, 25 bp, Homo sapien
tgttgtctacttctgagcgcctggc

SEQ ID NO: 2441783 - DNA, 25 bp, Homo sapien
cagaggcattacataaacatttgtt

SEQ ID NO: 2441784 - DNA, 25 bp, Homo sapien
tctgcttctagactgtactctcctg

SEQ ID NO: 2441785 - DNA, 25 bp, Homo sapien
tgggtggagagaactaagtcttttc

SEQ ID NO: 2441786 - DNA, 25 bp, Homo sapien
tagtttccatcttcttgattgtcct

SEQ ID NO: 2441787 - DNA, 25 bp, Homo sapien
gaaagaaggtgaactaattgtccaa

SEQ ID NO: 2441788 - DNA, 25 bp, Homo sapien
ctaattgtccaaaattacaaaggtg

SEQ ID NO: 2441789 - DNA, 25 bp, Homo sapien
gattcttagctgaaagaaggtgaac

SEQ ID NO: 2441790 - DNA, 25 bp, Homo sapien
tgttttcaagatgaggattcttagc

SEQ ID NO: 2441791 - DNA, 25 bp, Homo sapien
tacaaccataagaatacaagaaggg

SEQ ID NO: 2441792 - DNA, 25 bp, Homo sapien
aattaactgcagctaagataaagac

SEQ ID NO: 2441793 - DNA, 25 bp, Homo sapien
tccactgcatcacaggtccgtgtgg

SEQ ID NO: 2441794 - DNA, 25 bp, Homo sapien
ggtccgtgtggcatttctcactatt

SEQ ID NO: 2441795 - DNA, 25 bp, Homo sapien
agagaataagttttgctgtatcacc

SEQ ID NO: 2441796 - DNA, 25 bp, Homo sapien
ttagagaataagttttgctgtatca

SEQ ID NO: 2441797 - DNA, 25 bp, Homo sapien
tagagaataagttttgctgtatcac

SEQ ID NO: 2441798 - DNA, 25 bp, Homo sapien
caataaaatagtcccacctatttgg

SEQ ID NO: 2441799 - DNA, 25 bp, Homo sapien
attaaaatggtcaaagagcaataaa

SEQ ID NO: 2441800 - DNA, 25 bp, Homo sapien
caaagcgtggagacccatctattta

SEQ ID NO: 2441801 - DNA, 25 bp, Homo sapien
ggcaataagagaatattaacttcac

SEQ ID NO: 2441802 - DNA, 25 bp, Homo sapien
ttaaaatttacatatccggccaggc

SEQ ID NO: 2441803 - DNA, 25 bp, Homo sapien
cgaggccaatggatagcttgagcct

SEQ ID NO: 2441804 - DNA, 25 bp, Homo sapien
taggaatagggaacattcacacatg

SEQ ID NO: 2441805 - DNA, 25 bp, Homo sapien
aattatccaggcacagttgcccaca

SEQ ID NO: 2441806 - DNA, 25 bp, Homo sapien
cttttggtatcaccattacttctcc

SEQ ID NO: 2441807 - DNA, 25 bp, Homo sapien
aaagtcacgacataatatcacctac

SEQ ID NO: 2441808 - DNA, 25 bp, Homo sapien
ggtatcaccattacttctcctaaag

SEQ ID NO: 2441809 - DNA, 25 bp, Homo sapien
tctcctaaagtcacgacataatatc

SEQ ID NO: 2441810 - DNA, 25 bp, Homo sapien
agagccaggactcccataagactag

SEQ ID NO: 2441811 - DNA, 25 bp, Homo sapien
catcaagcgcatttgcagtccatct

SEQ ID NO: 2441812 - DNA, 25 bp, Homo sapien
tctaatggctaaggctaggcagaag

SEQ ID NO: 2441813 - DNA, 25 bp, Homo sapien
gagtcagggtcttttccacgtgtgg

SEQ ID NO: 2441814 - DNA, 25 bp, Homo sapien
aaatctgctaatctgggcctgacgg

SEQ ID NO: 2441815 - DNA, 25 bp, Homo sapien
cacctcggccgagttacgtgaaaag

SEQ ID NO: 2441816 - DNA, 25 bp, Homo sapien
tacaatcatcgaagggccgagggtc

SEQ ID NO: 2441817 - DNA, 25 bp, Homo sapien
tgaaaaggctgggtacgaactactc

SEQ ID NO: 2441818 - DNA, 25 bp, Homo sapien
agctgcacctctccgtgcgtcccca

SEQ ID NO: 2441819 - DNA, 25 bp, Homo sapien
gctgcccccgctagtctagctgccg

SEQ ID NO: 2441820 - DNA, 25 bp, Homo sapien
acctctccgtgcgtccccaagctca

SEQ ID NO: 2441821 - DNA, 25 bp, Homo sapien
ccgctctgaggctgcccccgctagt

SEQ ID NO: 2441822 - DNA, 25 bp, Homo sapien
aaagaccgcagcgtcgtccgtacag

SEQ ID NO: 2441823 - DNA, 25 bp, Homo sapien
cagacggcagcgcttcagtagctcg

SEQ ID NO: 2441824 - DNA, 25 bp, Homo sapien
cgcctggcaggtaggagcaagcccc

SEQ ID NO: 2441825 - DNA, 25 bp, Homo sapien
ggcaggtaggagcaagccccaaaga

SEQ ID NO: 2441826 - DNA, 25 bp, Homo sapien
cctgggaaagagtagtgccagttcc

SEQ ID NO: 2441827 - DNA, 25 bp, Homo sapien
tgccagttccgggtaggctgctgca

SEQ ID NO: 2441828 - DNA, 25 bp, Homo sapien
agtagggcacgctctcagagaccag

SEQ ID NO: 2441829 - DNA, 25 bp, Homo sapien
cagtgaaaggagtgatttggcatcc

SEQ ID NO: 2441830 - DNA, 25 bp, Homo sapien
gccctcttgggtgtcactctgaaaa

SEQ ID NO: 2441831 - DNA, 25 bp, Homo sapien
cagatggatgcaaggttgcaggcat

SEQ ID NO: 2441832 - DNA, 25 bp, Homo sapien
cagtgaattagtcccctaccaaggt

SEQ ID NO: 2441833 - DNA, 25 bp, Homo sapien
gtggccgcacctcgccagtgaatta

SEQ ID NO: 2441834 - DNA, 25 bp, Homo sapien
tgtctgcctcttgaaagcgaggatt

SEQ ID NO: 2441835 - DNA, 25 bp, Homo sapien
ctcttgaaagcgaggattgatggtg

SEQ ID NO: 2441836 - DNA, 25 bp, Homo sapien
tggtggtcgtgatggcacttttgta

SEQ ID NO: 2441837 - DNA, 25 bp, Homo sapien
gggactgtctgcctcttgaaagcga

SEQ ID NO: 2441838 - DNA, 25 bp, Homo sapien
gaaagatgttgcagattataagcaa

SEQ ID NO: 2441839 - DNA, 25 bp, Homo sapien
tctagacctaagaggccagccttga

SEQ ID NO: 2441840 - DNA, 25 bp, Homo sapien
ggccagccttgagccgaatcctagg

SEQ ID NO: 2441841 - DNA, 25 bp, Homo sapien
cccctttctagacctaagaggccag

SEQ ID NO: 2441842 - DNA, 25 bp, Homo sapien
ccagttgagttgttgctgctccttc

SEQ ID NO: 2441843 - DNA, 25 bp, Homo sapien
aaagcgactgtattcccggcggtca

SEQ ID NO: 2441844 - DNA, 25 bp, Homo sapien
tcatagatttccaccgagagccggt

SEQ ID NO: 2441845 - DNA, 25 bp, Homo sapien
gagagccggtaagccaggaccagcc

SEQ ID NO: 2441846 - DNA, 25 bp, Homo sapien
ctggcgtcatcctccaccaagaaga

SEQ ID NO: 2441847 - DNA, 25 bp, Homo sapien
ggttgtccagggtccgctctttgca

SEQ ID NO: 2441848 - DNA, 25 bp, Homo sapien
tgcaccagccatcatccaagatagg

SEQ ID NO: 2441849 - DNA, 25 bp, Homo sapien
cattggtatgggcacaagctgtact

SEQ ID NO: 2441850 - DNA, 25 bp, Homo sapien
gccaataggttaccagctgggcagt

SEQ ID NO: 2441851 - DNA, 25 bp, Homo sapien
ctgtgtagtagatgccaataggtta

SEQ ID NO: 2441852 - DNA, 25 bp, Homo sapien
tagatgccaataggttaccagctgg

SEQ ID NO: 2441853 - DNA, 25 bp, Homo sapien
agctgggcagttgtcacccaatgcc

SEQ ID NO: 2441854 - DNA, 25 bp, Homo sapien
ctacaagcaggacggagagtaggca

SEQ ID NO: 2441855 - DNA, 25 bp, Homo sapien
cctgctcccaagatgcaagacctga

SEQ ID NO: 2441856 - DNA, 25 bp, Homo sapien
caagatgcaagacctgaggcctcac

SEQ ID NO: 2441857 - DNA, 25 bp, Homo sapien
gcagatgggagtagctcaacaagcc

SEQ ID NO: 2441858 - DNA, 25 bp, Homo sapien
tagagcaccatagtagccgtccaag

SEQ ID NO: 2441859 - DNA, 25 bp, Homo sapien
gcagcctgggcattggtcgcataga

SEQ ID NO: 2441860 - DNA, 25 bp, Homo sapien
gtgacatactccacattggcagcga

SEQ ID NO: 2441861 - DNA, 25 bp, Homo sapien
cactggcagcggttgcatttgcagc

SEQ ID NO: 2441862 - DNA, 25 bp, Homo sapien
catacaccggaatcttttgatattt

SEQ ID NO: 2441863 - DNA, 25 bp, Homo sapien
acccatacaccggaatcttttgata

SEQ ID NO: 2441864 - DNA, 25 bp, Homo sapien
caccctctaacccatacaccggaat

SEQ ID NO: 2441865 - DNA, 25 bp, Homo sapien
ctctaacccatacaccggaatcttt

SEQ ID NO: 2441866 - DNA, 25 bp, Homo sapien
ctcatgtcgctcacagctggcatcg

SEQ ID NO: 2441867 - DNA, 25 bp, Homo sapien
tcatgtcgctcacagctggcatcgt

SEQ ID NO: 2441868 - DNA, 25 bp, Homo sapien
agaggatgccctcatgtcgctcaca

SEQ ID NO: 2441869 - DNA, 25 bp, Homo sapien
gccctcatgtcgctcacagctggca

SEQ ID NO: 2441870 - DNA, 25 bp, Homo sapien
ctgtgccattgggagcccggcaccc

SEQ ID NO: 2441871 - DNA, 25 bp, Homo sapien
ctcacagagccgacctaggcggcca

SEQ ID NO: 2441872 - DNA, 25 bp, Homo sapien
acagtgaccctttccactgcacagg

SEQ ID NO: 2441873 - DNA, 25 bp, Homo sapien
cacagagccgacctaggcggccagg

SEQ ID NO: 2441874 - DNA, 25 bp, Homo sapien
gcgtgtgcaactccacaatcagctc

SEQ ID NO: 2441875 - DNA, 25 bp, Homo sapien
ccacattgtaggtgtccctggccat

SEQ ID NO: 2441876 - DNA, 25 bp, Homo sapien
ggggctgggtgtcactgcaattaca

SEQ ID NO: 2441877 - DNA, 25 bp, Homo sapien
gtaggtgtccctggccatcactgca

SEQ ID NO: 2441878 - DNA, 25 bp, Homo sapien
ttctgcctgtgcttgctggctctca

SEQ ID NO: 2441879 - DNA, 25 bp, Homo sapien
ccccctgcccgccttctgcctgtgc

SEQ ID NO: 2441880 - DNA, 25 bp, Homo sapien
tctgcctgtgcttgctggctctcac

SEQ ID NO: 2441881 - DNA, 25 bp, Homo sapien
tgcccgccttctgcctgtgcttgct

SEQ ID NO: 2441882 - DNA, 25 bp, Homo sapien
gattcgtaagaaatgtggaccccag

SEQ ID NO: 2441883 - DNA, 25 bp, Homo sapien
tggttgcactgtcctcgatcctcag

SEQ ID NO: 2441884 - DNA, 25 bp, Homo sapien
ctggttgattcggacgtggttgcac

SEQ ID NO: 2441885 - DNA, 25 bp, Homo sapien
tctcaggaccctcacactgggattc

SEQ ID NO: 2441886 - DNA, 25 bp, Homo sapien
aaccccaccttatgtcctctccagg

SEQ ID NO: 2441887 - DNA, 25 bp, Homo sapien
gcgagtggataaccacgtgaaggca

SEQ ID NO: 2441888 - DNA, 25 bp, Homo sapien
gaagagagcgagtggataaccacgt

SEQ ID NO: 2441889 - DNA, 25 bp, Homo sapien
gataaccacgtgaaggcagaaaagg

SEQ ID NO: 2441890 - DNA, 25 bp, Homo sapien
catctccccttcccctggcccctca

SEQ ID NO: 2441891 - DNA, 25 bp, Homo sapien
gctccccaactgcagacttaggaat

SEQ ID NO: 2441892 - DNA, 25 bp, Homo sapien
gctgtaccacgttgctggagtcctc

SEQ ID NO: 2441893 - DNA, 25 bp, Homo sapien
cagacttaggaatcagtttactcag

SEQ ID NO: 2441894 - DNA, 25 bp, Homo sapien
tataagcatccatgatgagctgtac

SEQ ID NO: 2441895 - DNA, 25 bp, Homo sapien
cagtgcggcactggtgacagcaaag

SEQ ID NO: 2441896 - DNA, 25 bp, Homo sapien
ctggtagacaggcagtgcggcactg

SEQ ID NO: 2441897 - DNA, 25 bp, Homo sapien
caggcagtgcggcactggtgacagc

SEQ ID NO: 2441898 - DNA, 25 bp, Homo sapien
tagacaggcagtgcggcactggtga

SEQ ID NO: 2441899 - DNA, 25 bp, Homo sapien
cccagctgtatggaatgtgtcgtct

SEQ ID NO: 2441900 - DNA, 25 bp, Homo sapien
ctgcgactgtagaggccattgctgt

SEQ ID NO: 2441901 - DNA, 25 bp, Homo sapien
tgtcgtctgaagtgaacaccagcag

SEQ ID NO: 2441902 - DNA, 25 bp, Homo sapien
catcactgggcatgaaaatgccgcc

SEQ ID NO: 2441903 - DNA, 25 bp, Homo sapien
tgcagaatggcatcgaagccacctt

SEQ ID NO: 2441904 - DNA, 25 bp, Homo sapien
ccaccttcaggcgagtccagattgc

SEQ ID NO: 2441905 - DNA, 25 bp, Homo sapien
gctcacaaagggcagcaccgttttg

SEQ ID NO: 2441906 - DNA, 25 bp, Homo sapien
cacatggtgaaagctgaatggtgac

SEQ ID NO: 2441907 - DNA, 25 bp, Homo sapien
ctaggcctgtcaacaactgggaggg

SEQ ID NO: 2441908 - DNA, 25 bp, Homo sapien
gctagggcagtggttgaataggcaa

SEQ ID NO: 2441909 - DNA, 25 bp, Homo sapien
cctgtcaacaactgggagggcaagt

SEQ ID NO: 2441910 - DNA, 25 bp, Homo sapien
aggatgttggcagaggctagggcag

SEQ ID NO: 2441911 - DNA, 25 bp, Homo sapien
agggcgggaggcagcgctcggctca

SEQ ID NO: 2441912 - DNA, 25 bp, Homo sapien
gggcgggaggcagcgctcggctcac

SEQ ID NO: 2441913 - DNA, 25 bp, Homo sapien
acagaatgggtgacttcctgcagcc

SEQ ID NO: 2441914 - DNA, 25 bp, Homo sapien
accagcagagcgtgcccgagctggc

SEQ ID NO: 2441915 - DNA, 25 bp, Homo sapien
cgagctggcgcacgcgttccaggtc

SEQ ID NO: 2441916 - DNA, 25 bp, Homo sapien
ccgggtatccctcagcacgaaggaa

SEQ ID NO: 2441917 - DNA, 25 bp, Homo sapien
agctgggtggcaccctctccgcggg

SEQ ID NO: 2441918 - DNA, 25 bp, Homo sapien
agcagctcctctcgtcgggcgcagc

SEQ ID NO: 2441919 - DNA, 25 bp, Homo sapien
gccgcagcgtgacccggacccgctg

SEQ ID NO: 2441920 - DNA, 25 bp, Homo sapien
ccgcctctcccgacgcggtgaagtt

SEQ ID NO: 2441921 - DNA, 25 bp, Homo sapien
cagcagcaaaacaaggaccattggc

SEQ ID NO: 2441922 - DNA, 25 bp, Homo sapien
ccccagcatggacaggtgaggattc

SEQ ID NO: 2441923 - DNA, 25 bp, Homo sapien
tcccctgtggatgggatcttggcgt

SEQ ID NO: 2441924 - DNA, 25 bp, Homo sapien
gaggattccgccattctgtggcatc

SEQ ID NO: 2441925 - DNA, 25 bp, Homo sapien
ccgtagtggtagaagagccaaacag

SEQ ID NO: 2441926 - DNA, 25 bp, Homo sapien
agccgtagtggtagaagagccaaac

SEQ ID NO: 2441927 - DNA, 25 bp, Homo sapien
gccgtagtggtagaagagccaaaca

SEQ ID NO: 2441928 - DNA, 25 bp, Homo sapien
ggtgctgctgcagtcactcactggc

SEQ ID NO: 2441929 - DNA, 25 bp, Homo sapien
cactcactggctgtggggcaagtca

SEQ ID NO: 2441930 - DNA, 25 bp, Homo sapien
ctggctgtggggcaagtcagacttt

SEQ ID NO: 2441931 - DNA, 25 bp, Homo sapien
tgtggggcaagtcagactttctctc

SEQ ID NO: 2441932 - DNA, 25 bp, Homo sapien
caagtgagtcgtgtgcctcatcctc

SEQ ID NO: 2441933 - DNA, 25 bp, Homo sapien
gttcaagtgagtcgtgtgcctcatc

SEQ ID NO: 2441934 - DNA, 25 bp, Homo sapien
gtgagtcgtgtgcctcatcctcctg

SEQ ID NO: 2441935 - DNA, 25 bp, Homo sapien
agtggcgtgatgtacaacctctgcc

SEQ ID NO: 2441936 - DNA, 25 bp, Homo sapien
cagcagcagcctttgtgtactgatc

SEQ ID NO: 2441937 - DNA, 25 bp, Homo sapien
agcagcctttgtgtactgatctggg

SEQ ID NO: 2441938 - DNA, 25 bp, Homo sapien
agagcagtccttcctctggcggcag

SEQ ID NO: 2441939 - DNA, 25 bp, Homo sapien
ggcagcagcagcctttgtgtactga

SEQ ID NO: 2441940 - DNA, 25 bp, Homo sapien
gaaattcaaggtccacacaactgga

SEQ ID NO: 2441941 - DNA, 25 bp, Homo sapien
gggatttgctcctggcccatacaga

SEQ ID NO: 2441942 - DNA, 25 bp, Homo sapien
tgcaggaacaacagctgaagccaag

SEQ ID NO: 2441943 - DNA, 25 bp, Homo sapien
ccaacacagtagtggatcctgggaa

SEQ ID NO: 2441944 - DNA, 25 bp, Homo sapien
gaggcacccctagaaactttggcaa

SEQ ID NO: 2441945 - DNA, 25 bp, Homo sapien
cattaggcaccaagggtaggagcaa

SEQ ID NO: 2441946 - DNA, 25 bp, Homo sapien
tgccctgggaagtctaggacccatg

SEQ ID NO: 2441947 - DNA, 25 bp, Homo sapien
actcagcaatatgcgatacagcggg

SEQ ID NO: 2441948 - DNA, 25 bp, Homo sapien
gacttcaggccccctttgccctggc

SEQ ID NO: 2441949 - DNA, 25 bp, Homo sapien
tcatcctcgctagaggcattggggt

SEQ ID NO: 2441950 - DNA, 25 bp, Homo sapien
catcctcgctagaggcattggggtg

SEQ ID NO: 2441951 - DNA, 25 bp, Homo sapien
tccagcatctctcggattaagggag

SEQ ID NO: 2441952 - DNA, 25 bp, Homo sapien
ggaggcatcgggcctggaatctcca

SEQ ID NO: 2441953 - DNA, 25 bp, Homo sapien
ccatcttcagagtaatggccctttc

SEQ ID NO: 2441954 - DNA, 25 bp, Homo sapien
tcttcagagtaatggccctttcagc

SEQ ID NO: 2441955 - DNA, 25 bp, Homo sapien
aggaatacagtagtcattggccaca

SEQ ID NO: 2441956 - DNA, 25 bp, Homo sapien
cagagcttgtcacttgttcctagtc

SEQ ID NO: 2441957 - DNA, 25 bp, Homo sapien
caatctgaaatgtgactactgcaac

SEQ ID NO: 2441958 - DNA, 25 bp, Homo sapien
tcagcgagcgcaatgcacacaactt

SEQ ID NO: 2441959 - DNA, 25 bp, Homo sapien
tgtccactttttcgggctcctccag

SEQ ID NO: 2441960 - DNA, 25 bp, Homo sapien
cgccgggcgtacagcctcagggctt

SEQ ID NO: 2441961 - DNA, 25 bp, Homo sapien
tccttgggaacatgtagggctggct

SEQ ID NO: 2441962 - DNA, 25 bp, Homo sapien
ccggaggtcggtgattttcattagc

SEQ ID NO: 2441963 - DNA, 25 bp, Homo sapien
gcccgaagccggcattgtgcatctg

SEQ ID NO: 2441964 - DNA, 25 bp, Homo sapien
tgctctggggtgtaccttgtgcaga

SEQ ID NO: 2441965 - DNA, 25 bp, Homo sapien
gtgtaccttgtgcagatacgcagca

SEQ ID NO: 2441966 - DNA, 25 bp, Homo sapien
gtgtcctgctctggggtgtaccttg

SEQ ID NO: 2441967 - DNA, 25 bp, Homo sapien
taaagccaggcaaccgcttggcaaa

SEQ ID NO: 2441968 - DNA, 25 bp, Homo sapien
caatgctgagccctgtaaagccagg

SEQ ID NO: 2441969 - DNA, 25 bp, Homo sapien
tcttgatgatgcacttggtagccag

SEQ ID NO: 2441970 - DNA, 25 bp, Homo sapien
tggtcagcaatgctgagccctgtaa

SEQ ID NO: 2441971 - DNA, 25 bp, Homo sapien
cgtggtatacttgcccagctggcag

SEQ ID NO: 2441972 - DNA, 25 bp, Homo sapien
gagctcttctaactgagggctcagc

SEQ ID NO: 2441973 - DNA, 25 bp, Homo sapien
catagctgtcaggtgacccttcttc

SEQ ID NO: 2441974 - DNA, 25 bp, Homo sapien
ttcttgttccggtcatttcgcacag

SEQ ID NO: 2441975 - DNA, 25 bp, Homo sapien
gaagcacttctgtagccggcagtac

SEQ ID NO: 2441976 - DNA, 25 bp, Homo sapien
tgatgatacagtttttgtcgcggtg

SEQ ID NO: 2441977 - DNA, 25 bp, Homo sapien
ttcgaagcacttctgtagccggcag

SEQ ID NO: 2441978 - DNA, 25 bp, Homo sapien
tacagtttttgtcgcggtgacacgt

SEQ ID NO: 2441979 - DNA, 25 bp, Homo sapien
gggaaagagagagggcctctgaagc

SEQ ID NO: 2441980 - DNA, 25 bp, Homo sapien
aagagagagggcctctgaagcacaa

SEQ ID NO: 2441981 - DNA, 25 bp, Homo sapien
gaaagagagagggcctctgaagcac

SEQ ID NO: 2441982 - DNA, 25 bp, Homo sapien
gagagagggcctctgaagcacaatg

SEQ ID NO: 2441983 - DNA, 25 bp, Homo sapien
taactggatcccccgtctgcccact

SEQ ID NO: 2441984 - DNA, 25 bp, Homo sapien
tagggtaactggatcccccgtctgc

SEQ ID NO: 2441985 - DNA, 25 bp, Homo sapien
tggatcccccgtctgcccactccca

SEQ ID NO: 2441986 - DNA, 25 bp, Homo sapien
actggatcccccgtctgcccactcc

SEQ ID NO: 2441987 - DNA, 25 bp, Homo sapien
gacttgtcattgcacacgaagcatg

SEQ ID NO: 2441988 - DNA, 25 bp, Homo sapien
cacacgaagcatggcttgtagaccc

SEQ ID NO: 2441989 - DNA, 25 bp, Homo sapien
tcattgcacacgaagcatggcttgt

SEQ ID NO: 2441990 - DNA, 25 bp, Homo sapien
cttgtcattgcacacgaagcatggc

SEQ ID NO: 2441991 - DNA, 25 bp, Homo sapien
gtgcatttgttccttggcccactgg

SEQ ID NO: 2441992 - DNA, 25 bp, Homo sapien
atgtgcatttgttccttggcccact

SEQ ID NO: 2441993 - DNA, 25 bp, Homo sapien
tgtgcatttgttccttggcccactg

SEQ ID NO: 2441994 - DNA, 25 bp, Homo sapien
cgggttgcggccaggcaaaagattc

SEQ ID NO: 2441995 - DNA, 25 bp, Homo sapien
caggcaaaagattcaagtccggcga

SEQ ID NO: 2441996 - DNA, 25 bp, Homo sapien
ttcaagtccggcgaaacaggagccg

SEQ ID NO: 2441997 - DNA, 25 bp, Homo sapien
agccgccggtggctctgcgcagcaa

SEQ ID NO: 2441998 - DNA, 25 bp, Homo sapien
tgcatgcgggtaaggggtgggcggg

SEQ ID NO: 2441999 - DNA, 25 bp, Homo sapien
gagggctagcatagggcgctgggct

SEQ ID NO: 2442000 - DNA, 25 bp, Homo sapien
gcgccccgctccagcagggggggag

SEQ ID NO: 2442001 - DNA, 25 bp, Homo sapien
aaacaccaaggacccgcagccgatt

SEQ ID NO: 2442002 - DNA, 25 bp, Homo sapien
cagctcataggctttgcatgcattt

SEQ ID NO: 2442003 - DNA, 25 bp, Homo sapien
cttgctcgggagaatgcttgcaggc

SEQ ID NO: 2442004 - DNA, 25 bp, Homo sapien
ggcatactctccacagctcataggc

SEQ ID NO: 2442005 - DNA, 25 bp, Homo sapien
aatgcttgcaggcatactctccaca

SEQ ID NO: 2442006 - DNA, 25 bp, Homo sapien
gtcaatacaggggtgttaaggatga

SEQ ID NO: 2442007 - DNA, 25 bp, Homo sapien
ttttcacactagtcaatacaggggt

SEQ ID NO: 2442008 - DNA, 25 bp, Homo sapien
gaaggagaggaggaaccaagcataa

SEQ ID NO: 2442009 - DNA, 25 bp, Homo sapien
cactagtcaatacaggggtgttaag

SEQ ID NO: 2442010 - DNA, 25 bp, Homo sapien
atttcacctcttgatcacagagcca

SEQ ID NO: 2442011 - DNA, 25 bp, Homo sapien
tttcacctcttgatcacagagccag

SEQ ID NO: 2442012 - DNA, 25 bp, Homo sapien
aatttcacctcttgatcacagagcc

SEQ ID NO: 2442013 - DNA, 25 bp, Homo sapien
ttcacctcttgatcacagagccagg

SEQ ID NO: 2442014 - DNA, 25 bp, Homo sapien
ccaggccccggaagctagggctcag

SEQ ID NO: 2442015 - DNA, 25 bp, Homo sapien
tcgaaaggcggagaccccctgagtg

SEQ ID NO: 2442016 - DNA, 25 bp, Homo sapien
cctgggtagccagatccaggcccca

SEQ ID NO: 2442017 - DNA, 25 bp, Homo sapien
accagccgcaaagagtcgctcctta

SEQ ID NO: 2442018 - DNA, 25 bp, Homo sapien
cagctgcggtgtgagagtcccctgg

SEQ ID NO: 2442019 - DNA, 25 bp, Homo sapien
gcagctgcggtgtgagagtcccctg

SEQ ID NO: 2442020 - DNA, 25 bp, Homo sapien
gctgcggtgtgagagtcccctgggg

SEQ ID NO: 2442021 - DNA, 25 bp, Homo sapien
ggcagctgcggtgtgagagtcccct

SEQ ID NO: 2442022 - DNA, 25 bp, Homo sapien
gcgggcgaggtcttcagccacagcc

SEQ ID NO: 2442023 - DNA, 25 bp, Homo sapien
tatccctgggctccctgtttctagg

SEQ ID NO: 2442024 - DNA, 25 bp, Homo sapien
tttgttgagacagctaatgtttata

SEQ ID NO: 2442025 - DNA, 25 bp, Homo sapien
aatcctagtgctaagtaggtggttc

SEQ ID NO: 2442026 - DNA, 25 bp, Homo sapien
ggtggttcctatcttcatcccctga

SEQ ID NO: 2442027 - DNA, 25 bp, Homo sapien
tctacatactgggtcaggttgaggg

SEQ ID NO: 2442028 - DNA, 25 bp, Homo sapien
catactgggtcaggttgagggaact

SEQ ID NO: 2442029 - DNA, 25 bp, Homo sapien
tggcttctacatactgggtcaggtt

SEQ ID NO: 2442030 - DNA, 25 bp, Homo sapien
gactggcttctacatactgggtcag

SEQ ID NO: 2442031 - DNA, 25 bp, Homo sapien
ctgatgtccaagctgtcccattcca

SEQ ID NO: 2442032 - DNA, 25 bp, Homo sapien
gcctctggacgttttccttgccttc

SEQ ID NO: 2442033 - DNA, 25 bp, Homo sapien
tgcctctggacgttttccttgcctt

SEQ ID NO: 2442034 - DNA, 25 bp, Homo sapien
tttccttgccttctgatgtccaagc

SEQ ID NO: 2442035 - DNA, 25 bp, Homo sapien
agcgtcgcaatgtccggggctcgcc

SEQ ID NO: 2442036 - DNA, 25 bp, Homo sapien
cccggcgtcgggcagtctcttggat

SEQ ID NO: 2442037 - DNA, 25 bp, Homo sapien
cttggatggagcgtcgcaatgtccg

SEQ ID NO: 2442038 - DNA, 25 bp, Homo sapien
tcgggcagtctcttggatggagcgt

SEQ ID NO: 2442039 - DNA, 25 bp, Homo sapien
attttctcccaaaccgcacactgac

SEQ ID NO: 2442040 - DNA, 25 bp, Homo sapien
cgccccaaaatatccgacacatttt

SEQ ID NO: 2442041 - DNA, 25 bp, Homo sapien
aaatatccgacacattttctcccaa

SEQ ID NO: 2442042 - DNA, 25 bp, Homo sapien
cgtgaccgccccaaaatatccgaca

SEQ ID NO: 2442043 - DNA, 25 bp, Homo sapien
ctgcaggcggggacacggaaaatat

SEQ ID NO: 2442044 - DNA, 25 bp, Homo sapien
tgcaggcggggacacggaaaatatt

SEQ ID NO: 2442045 - DNA, 25 bp, Homo sapien
cacttttctcctttctgccttttgg

SEQ ID NO: 2442046 - DNA, 25 bp, Homo sapien
cttttctctctggcacttttctcct

SEQ ID NO: 2442047 - DNA, 25 bp, Homo sapien
ttctctctggcacttttctcctttc

SEQ ID NO: 2442048 - DNA, 25 bp, Homo sapien
gcacttttctcctttctgccttttg

SEQ ID NO: 2442049 - DNA, 25 bp, Homo sapien
cagacagaaggccttctcctctgag

SEQ ID NO: 2442050 - DNA, 25 bp, Homo sapien
cttctcctctgagcctgctctacca

SEQ ID NO: 2442051 - DNA, 25 bp, Homo sapien
gccttctcctctgagcctgctctac

SEQ ID NO: 2442052 - DNA, 25 bp, Homo sapien
gacagaaggccttctcctctgagcc

SEQ ID NO: 2442053 - DNA, 25 bp, Homo sapien
gagctagcacgtctgcctccacagt

SEQ ID NO: 2442054 - DNA, 25 bp, Homo sapien
ggagtgtgtgtgaggcgagtgctac

SEQ ID NO: 2442055 - DNA, 25 bp, Homo sapien
tggatgtagctgtctgttttgcaca

SEQ ID NO: 2442056 - DNA, 25 bp, Homo sapien
tgaggcgagtgctacaggtgtctgc

SEQ ID NO: 2442057 - DNA, 25 bp, Homo sapien
ttggctcttccctgtaccgtatcgc

SEQ ID NO: 2442058 - DNA, 25 bp, Homo sapien
ggagaactatgaccggcagcgtgcc

SEQ ID NO: 2442059 - DNA, 25 bp, Homo sapien
cagcgtgccttctcaaggacctgtg

SEQ ID NO: 2442060 - DNA, 25 bp, Homo sapien
tgggcaccatacaagctctatttga

SEQ ID NO: 2442061 - DNA, 25 bp, Homo sapien
gcgggtaccttcacctactgaggag

SEQ ID NO: 2442062 - DNA, 25 bp, Homo sapien
ccatgacagtgatcgaaaaacaggc

SEQ ID NO: 2442063 - DNA, 25 bp, Homo sapien
acaggcactcggaatatgttcagca

SEQ ID NO: 2442064 - DNA, 25 bp, Homo sapien
tcttcaccgtggtaaggcatgatgc

SEQ ID NO: 2442065 - DNA, 25 bp, Homo sapien
gaaaatcctcacgtaagttcacctg

SEQ ID NO: 2442066 - DNA, 25 bp, Homo sapien
agttcacctgtgcagttcaagccca

SEQ ID NO: 2442067 - DNA, 25 bp, Homo sapien
taaaaaatgacaggctcccttaatc

SEQ ID NO: 2442068 - DNA, 25 bp, Homo sapien
gttttgggtctagaccagcagcaga

SEQ ID NO: 2442069 - DNA, 25 bp, Homo sapien
aattataaccccgactgcacatgag

SEQ ID NO: 2442070 - DNA, 25 bp, Homo sapien
aagcttgggcccattccagattgac

SEQ ID NO: 2442071 - DNA, 25 bp, Homo sapien
taaatttgtgttagtgaccccacag

SEQ ID NO: 2442072 - DNA, 25 bp, Homo sapien
tgaccgatgcattgtagaccctaaa

SEQ ID NO: 2442073 - DNA, 25 bp, Homo sapien
aaatacaaagttagcccgggcatgg

SEQ ID NO: 2442074 - DNA, 25 bp, Homo sapien
tctctactaaaaatacaaagttagc

SEQ ID NO: 2442075 - DNA, 25 bp, Homo sapien
aaaatacaaagttagcccgggcatg

SEQ ID NO: 2442076 - DNA, 25 bp, Homo sapien
ccatctctactaaaaatacaaagtt

SEQ ID NO: 2442077 - DNA, 25 bp, Homo sapien
cagcctcggtgacaagagcaggatt

SEQ ID NO: 2442078 - DNA, 25 bp, Homo sapien
ccagcctcggtgacaagagcaggat

SEQ ID NO: 2442079 - DNA, 25 bp, Homo sapien
gtcggtcgcctgtccttaaacttgc

SEQ ID NO: 2442080 - DNA, 25 bp, Homo sapien
taacaaactgtagttagtcggtcgc

SEQ ID NO: 2442081 - DNA, 25 bp, Homo sapien
tgcctgtcacttctccttaactcta

SEQ ID NO: 2442082 - DNA, 25 bp, Homo sapien
taaacttgcctgtcacttctcctta

SEQ ID NO: 2442083 - DNA, 25 bp, Homo sapien
gatgcgatgcgcctcttggaggctc

SEQ ID NO: 2442084 - DNA, 25 bp, Homo sapien
gcagctcaggctactgctaaggcct

SEQ ID NO: 2442085 - DNA, 25 bp, Homo sapien
cacagccgtcatggaaatgatgagt

SEQ ID NO: 2442086 - DNA, 25 bp, Homo sapien
atcgcagggccctttgaccagctgg

SEQ ID NO: 2442087 - DNA, 25 bp, Homo sapien
gatcccgaaaaactcgcttcctgtg

SEQ ID NO: 2442088 - DNA, 25 bp, Homo sapien
gacaccgatatgaccatcaccagag

SEQ ID NO: 2442089 - DNA, 25 bp, Homo sapien
ttcctgtgacatcgtggtggacgtg

SEQ ID NO: 2442090 - DNA, 25 bp, Homo sapien
gggcgagtacgaccctcggagacac

SEQ ID NO: 2442091 - DNA, 25 bp, Homo sapien
gaaccattgcaggtaatctccttgc

SEQ ID NO: 2442092 - DNA, 25 bp, Homo sapien
gataaagtccgatggtctggccctg

SEQ ID NO: 2442093 - DNA, 25 bp, Homo sapien
acaaatggagctccctaggtaattc

SEQ ID NO: 2442094 - DNA, 25 bp, Homo sapien
ccatgctggctggtgcaatgctgta

SEQ ID NO: 2442095 - DNA, 25 bp, Homo sapien
aagtacagcgggatgtgggcaattc

SEQ ID NO: 2442096 - DNA, 25 bp, Homo sapien
aactgggcattgacaaagtacagcg

SEQ ID NO: 2442097 - DNA, 25 bp, Homo sapien
tgggctaaaacgtggaaactgggca

SEQ ID NO: 2442098 - DNA, 25 bp, Homo sapien
gcaggtcatgaatagagcctccacc

SEQ ID NO: 2442099 - DNA, 25 bp, Homo sapien
acctggcagagccatacagcagcca

SEQ ID NO: 2442100 - DNA, 25 bp, Homo sapien
agagtctgggcccaaagaagggcca

SEQ ID NO: 2442101 - DNA, 25 bp, Homo sapien
gcagagccatacagcagccaaggcc

SEQ ID NO: 2442102 - DNA, 25 bp, Homo sapien
gagtctgggcccaaagaagggccac

SEQ ID NO: 2442103 - DNA, 25 bp, Homo sapien
actgagcagggcccctttgttgaag

SEQ ID NO: 2442104 - DNA, 25 bp, Homo sapien
acactgagcagggcccctttgttga

SEQ ID NO: 2442105 - DNA, 25 bp, Homo sapien
tgagcagggcccctttgttgaagga

SEQ ID NO: 2442106 - DNA, 25 bp, Homo sapien
cactgagcagggcccctttgttgaa

SEQ ID NO: 2442107 - DNA, 25 bp, Homo sapien
gagaagtccagacctaagggcccac

SEQ ID NO: 2442108 - DNA, 25 bp, Homo sapien
agcaggcaaccggaggcaagaaggg

SEQ ID NO: 2442109 - DNA, 25 bp, Homo sapien
gaagggagctgaatgtagtgggatg

SEQ ID NO: 2442110 - DNA, 25 bp, Homo sapien
agaaaaggtgagcaggcaaccggag

SEQ ID NO: 2442111 - DNA, 25 bp, Homo sapien
tgcgaaaaaggaggatgactggttt

SEQ ID NO: 2442112 - DNA, 25 bp, Homo sapien
aaaggaggatgactggtttaccatc

SEQ ID NO: 2442113 - DNA, 25 bp, Homo sapien
tgtttcgagtgcgaaaaaggaggat

SEQ ID NO: 2442114 - DNA, 25 bp, Homo sapien
tcgagtgcgaaaaaggaggatgact

SEQ ID NO: 2442115 - DNA, 25 bp, Homo sapien
ctttcataagcacagccagacgttc

SEQ ID NO: 2442116 - DNA, 25 bp, Homo sapien
tcccagaccatggagtgagcctctc

SEQ ID NO: 2442117 - DNA, 25 bp, Homo sapien
cactggggtcccagaccatggagtg

SEQ ID NO: 2442118 - DNA, 25 bp, Homo sapien
ttcataagcacagccagacgttccc

SEQ ID NO: 2442119 - DNA, 25 bp, Homo sapien
tcaccaccagggtcctgttggcaaa

SEQ ID NO: 2442120 - DNA, 25 bp, Homo sapien
accaccagggtcctgttggcaaaca

SEQ ID NO: 2442121 - DNA, 25 bp, Homo sapien
cctgttggcaaacaccttgattcta

SEQ ID NO: 2442122 - DNA, 25 bp, Homo sapien
atttcaccaccagggtcctgttggc

SEQ ID NO: 2442123 - DNA, 25 bp, Homo sapien
aatctccggcgtctttgtctgtcat

SEQ ID NO: 2442124 - DNA, 25 bp, Homo sapien
acttgtagaagccagcgtctctccg

SEQ ID NO: 2442125 - DNA, 25 bp, Homo sapien
ttgtagaagccagcgtctctccgtc

SEQ ID NO: 2442126 - DNA, 25 bp, Homo sapien
tagaagccagcgtctctccgtctgg

SEQ ID NO: 2442127 - DNA, 25 bp, Homo sapien
tacctctgtgagtctttgttgtgaa

SEQ ID NO: 2442128 - DNA, 25 bp, Homo sapien
tccatacctctgtgagtctttgttg

SEQ ID NO: 2442129 - DNA, 25 bp, Homo sapien
ctcttgcaaagcaaacgcgattttt

SEQ ID NO: 2442130 - DNA, 25 bp, Homo sapien
tcttgcaaagcaaacgcgatttttt

SEQ ID NO: 2442131 - DNA, 25 bp, Homo sapien
tggttccaccaacattcctacaggt

SEQ ID NO: 2442132 - DNA, 25 bp, Homo sapien
caccctggatggttccaccaacatt

SEQ ID NO: 2442133 - DNA, 25 bp, Homo sapien
ggtttcttgggagcccttccactca

SEQ ID NO: 2442134 - DNA, 25 bp, Homo sapien
acattcctacaggtttcttgggagc

SEQ ID NO: 2442135 - DNA, 25 bp, Homo sapien
tcccccaactcagtaatgttgaggg

SEQ ID NO: 2442136 - DNA, 25 bp, Homo sapien
tctcccccaactcagtaatgttgag

SEQ ID NO: 2442137 - DNA, 25 bp, Homo sapien
ccaactcagtaatgttgagggtcaa

SEQ ID NO: 2442138 - DNA, 25 bp, Homo sapien
ccccaactcagtaatgttgagggtc

SEQ ID NO: 2442139 - DNA, 25 bp, Homo sapien
tgtatctttgtctgctgtagcttca

SEQ ID NO: 2442140 - DNA, 25 bp, Homo sapien
gtatctttgtctgctgtagcttcat

SEQ ID NO: 2442141 - DNA, 25 bp, Homo sapien
gtgtatctttgtctgctgtagcttc

SEQ ID NO: 2442142 - DNA, 25 bp, Homo sapien
ctgtgtatctttgtctgctgtagct

SEQ ID NO: 2442143 - DNA, 25 bp, Homo sapien
ctttggaatttgatcactttgctca

SEQ ID NO: 2442144 - DNA, 25 bp, Homo sapien
gctttggaatttgatcactttgctc

SEQ ID NO: 2442145 - DNA, 25 bp, Homo sapien
gatcactttgctcaggacatctgag

SEQ ID NO: 2442146 - DNA, 25 bp, Homo sapien
tgagcagtttcccactaccaagaat

SEQ ID NO: 2442147 - DNA, 25 bp, Homo sapien
gggatcgctgccagcacaatgtgga

SEQ ID NO: 2442148 - DNA, 25 bp, Homo sapien
ggtttagctaactgcagcatactca

SEQ ID NO: 2442149 - DNA, 25 bp, Homo sapien
tcttgggccccacagtcgtctgtgg

SEQ ID NO: 2442150 - DNA, 25 bp, Homo sapien
cttggtttagctaactgcagcatac

SEQ ID NO: 2442151 - DNA, 25 bp, Homo sapien
ctgatgcctgtatcaggccctggtt

SEQ ID NO: 2442152 - DNA, 25 bp, Homo sapien
tgatgcctgtatcaggccctggttc

SEQ ID NO: 2442153 - DNA, 25 bp, Homo sapien
agctgatgcctgtatcaggccctgg

SEQ ID NO: 2442154 - DNA, 25 bp, Homo sapien
gctgatgcctgtatcaggccctggt

SEQ ID NO: 2442155 - DNA, 25 bp, Homo sapien
gcatggtgggtcaaacctatatccc

SEQ ID NO: 2442156 - DNA, 25 bp, Homo sapien
tcaataagaaggatgggttaggcat

SEQ ID NO: 2442157 - DNA, 25 bp, Homo sapien
ggttaggcatggtgggtcaaaccta

SEQ ID NO: 2442158 - DNA, 25 bp, Homo sapien
gtgggtcaaacctatatccccagca

SEQ ID NO: 2442159 - DNA, 25 bp, Homo sapien
gctggaagcattggcagactaatgt

SEQ ID NO: 2442160 - DNA, 25 bp, Homo sapien
caggcctggttttcgttctgcttcc

SEQ ID NO: 2442161 - DNA, 25 bp, Homo sapien
tggaagcatcgacagactaacatct

SEQ ID NO: 2442162 - DNA, 25 bp, Homo sapien
taaaatccgagcttgtcaggtgccc

SEQ ID NO: 2442163 - DNA, 25 bp, Homo sapien
tcaacatggtgcaccatagcccaga

SEQ ID NO: 2442164 - DNA, 25 bp, Homo sapien
tcctgggagtcgctgaacttagtgc

SEQ ID NO: 2442165 - DNA, 25 bp, Homo sapien
tgcagacatccgatcaacatggtgc

SEQ ID NO: 2442166 - DNA, 25 bp, Homo sapien
catccgatcaacatggtgcaccata

SEQ ID NO: 2442167 - DNA, 25 bp, Homo sapien
cagagagctggcaatgcgttgatgg

SEQ ID NO: 2442168 - DNA, 25 bp, Homo sapien
tgcgttgatgggggcaaacacttcc

SEQ ID NO: 2442169 - DNA, 25 bp, Homo sapien
attaaccttaaagacgtgagttctg

SEQ ID NO: 2442170 - DNA, 25 bp, Homo sapien
aatgcgttgatgggggcaaacactt

SEQ ID NO: 2442171 - DNA, 25 bp, Homo sapien
cagcagaactccgacagccagtcat

SEQ ID NO: 2442172 - DNA, 25 bp, Homo sapien
gcagcagaactccgacagccagtca

SEQ ID NO: 2442173 - DNA, 25 bp, Homo sapien
tgcagcagaactccgacagccagtc

SEQ ID NO: 2442174 - DNA, 25 bp, Homo sapien
cagtagactggaagtagaagggttt

SEQ ID NO: 2442175 - DNA, 25 bp, Homo sapien
aggtcaggcccggtacagtagactg

SEQ ID NO: 2442176 - DNA, 25 bp, Homo sapien
catgtgcagggatggtggcactgcc

SEQ ID NO: 2442177 - DNA, 25 bp, Homo sapien
gtagaagggtttataatagcccatg

SEQ ID NO: 2442178 - DNA, 25 bp, Homo sapien
ttatataatgcatagcaaacttaga

SEQ ID NO: 2442179 - DNA, 25 bp, Homo sapien
attatataatgcatagcaaacttag

SEQ ID NO: 2442180 - DNA, 25 bp, Homo sapien
taaaacattgacagaaaagatgcag

SEQ ID NO: 2442181 - DNA, 25 bp, Homo sapien
gaaaagacgcagtttggcgcaaacg

SEQ ID NO: 2442182 - DNA, 25 bp, Homo sapien
taagccgtggagcatctctgcagga

SEQ ID NO: 2442183 - DNA, 25 bp, Homo sapien
gcgcaaacgagtgttctgttgagaa

SEQ ID NO: 2442184 - DNA, 25 bp, Homo sapien
gaccacggtggggaacacgtccatc

SEQ ID NO: 2442185 - DNA, 25 bp, Homo sapien
agactcgtgggctcgccaatcactc

SEQ ID NO: 2442186 - DNA, 25 bp, Homo sapien
acgtccatcagactcgtgggctcgc

SEQ ID NO: 2442187 - DNA, 25 bp, Homo sapien
gggaacacgtccatcagactcgtgg

SEQ ID NO: 2442188 - DNA, 25 bp, Homo sapien
agagcagtattgaggacacacaggc

SEQ ID NO: 2442189 - DNA, 25 bp, Homo sapien
gagcagtattgaggacacacaggca

SEQ ID NO: 2442190 - DNA, 25 bp, Homo sapien
ggctggaacacaggcgtcacaaagt

SEQ ID NO: 2442191 - DNA, 25 bp, Homo sapien
tggaacacaggcgtcacaaagtgga

SEQ ID NO: 2442192 - DNA, 25 bp, Homo sapien
tgtgggtctcagaagggtctcttga

SEQ ID NO: 2442193 - DNA, 25 bp, Homo sapien
ctggctggaacacaggcgtcacaaa

SEQ ID NO: 2442194 - DNA, 25 bp, Homo sapien
tggactcgttccatcacctgataga

SEQ ID NO: 2442195 - DNA, 25 bp, Homo sapien
gttccatcacctgatagaacacggg

SEQ ID NO: 2442196 - DNA, 25 bp, Homo sapien
tgggctgagtgtccgctggtgttcc

SEQ ID NO: 2442197 - DNA, 25 bp, Homo sapien
cacctgatagaacacgggctctgag

SEQ ID NO: 2442198 - DNA, 25 bp, Homo sapien
gggtgcgtccactcaagctggctga

SEQ ID NO: 2442199 - DNA, 25 bp, Homo sapien
caagctggctgatcgcatggcccat

SEQ ID NO: 2442200 - DNA, 25 bp, Homo sapien
cggcgggcgggtgcgtccactcaag

SEQ ID NO: 2442201 - DNA, 25 bp, Homo sapien
ctcaagctggctgatcgcatggccc

SEQ ID NO: 2442202 - DNA, 25 bp, Homo sapien
catgatcagtaggatatttggttta

SEQ ID NO: 2442203 - DNA, 25 bp, Homo sapien
taggttcacacgtcttcagaagcaa

SEQ ID NO: 2442204 - DNA, 25 bp, Homo sapien
atccgccatgatcagtaggatattt

SEQ ID NO: 2442205 - DNA, 25 bp, Homo sapien
gttttaggttcacacgtcttcagaa

SEQ ID NO: 2442206 - DNA, 25 bp, Homo sapien
ctgagtgagcctcacaccttcctct

SEQ ID NO: 2442207 - DNA, 25 bp, Homo sapien
gctgagtgagcctcacaccttcctc

SEQ ID NO: 2442208 - DNA, 25 bp, Homo sapien
tgagtgagcctcacaccttcctctg

SEQ ID NO: 2442209 - DNA, 25 bp, Homo sapien
tgctgagtgagcctcacaccttcct

SEQ ID NO: 2442210 - DNA, 25 bp, Homo sapien
aggccagttgcatagtcgcggtgct

SEQ ID NO: 2442211 - DNA, 25 bp, Homo sapien
ccagttgcatagtcgcggtgctgca

SEQ ID NO: 2442212 - DNA, 25 bp, Homo sapien
catagtcgcggtgctgcaagattct

SEQ ID NO: 2442213 - DNA, 25 bp, Homo sapien
ttatgaggccagttgcatagtcgcg

SEQ ID NO: 2442214 - DNA, 25 bp, Homo sapien
gcaccttgccgcctgccagctggac

SEQ ID NO: 2442215 - DNA, 25 bp, Homo sapien
tggggcaccttgccgcctgccagct

SEQ ID NO: 2442216 - DNA, 25 bp, Homo sapien
accttgccgcctgccagctggacca

SEQ ID NO: 2442217 - DNA, 25 bp, Homo sapien
gggcaccttgccgcctgccagctgg

SEQ ID NO: 2442218 - DNA, 25 bp, Homo sapien
tgtgaacacaggatgcagatgtcag

SEQ ID NO: 2442219 - DNA, 25 bp, Homo sapien
gatgtcagcactgtgaaatcagcat

SEQ ID NO: 2442220 - DNA, 25 bp, Homo sapien
gtggcagaaatccatgcaggtgtga

SEQ ID NO: 2442221 - DNA, 25 bp, Homo sapien
cacctggctgcagacaagaagggag

SEQ ID NO: 2442222 - DNA, 25 bp, Homo sapien
tgccatccccatccttgggcatgag

SEQ ID NO: 2442223 - DNA, 25 bp, Homo sapien
gtctgccaatgcttcgacactgcgg

SEQ ID NO: 2442224 - DNA, 25 bp, Homo sapien
cacagcttccacaagatgttgcttg

SEQ ID NO: 2442225 - DNA, 25 bp, Homo sapien
cagtcttggcattcggggtgccatc

SEQ ID NO: 2442226 - DNA, 25 bp, Homo sapien
gggcctcaaaccagacattgaggag

SEQ ID NO: 2442227 - DNA, 25 bp, Homo sapien
cactccggtcattcagtgcatccag

SEQ ID NO: 2442228 - DNA, 25 bp, Homo sapien
actggttaggccacttgcaaatgtg

SEQ ID NO: 2442229 - DNA, 25 bp, Homo sapien
ggaggcggttgccactccggtcatt

SEQ ID NO: 2442230 - DNA, 25 bp, Homo sapien
agtgaagggtcaaaggccatccaga

SEQ ID NO: 2442231 - DNA, 25 bp, Homo sapien
catgtgacttggtgacttggcctct

SEQ ID NO: 2442232 - DNA, 25 bp, Homo sapien
cagagagcctggaaagcgggaatct

SEQ ID NO: 2442233 - DNA, 25 bp, Homo sapien
cataggatagagtcggcagagagcc

SEQ ID NO: 2442234 - DNA, 25 bp, Homo sapien
ctttgggctttgcggatgccagtcc

SEQ ID NO: 2442235 - DNA, 25 bp, Homo sapien
ccagctttgggctttgcggatgcca

SEQ ID NO: 2442236 - DNA, 25 bp, Homo sapien
gggctttgcggatgccagtcctgaa

SEQ ID NO: 2442237 - DNA, 25 bp, Homo sapien
ggctttgcggatgccagtcctgaat

SEQ ID NO: 2442238 - DNA, 25 bp, Homo sapien
agacgaggcttctagggctctcagg

SEQ ID NO: 2442239 - DNA, 25 bp, Homo sapien
tctgcacagacgaggcttctagggc

SEQ ID NO: 2442240 - DNA, 25 bp, Homo sapien
aaatgctctgcacagacgaggcttc

SEQ ID NO: 2442241 - DNA, 25 bp, Homo sapien
gcacagacgaggcttctagggctct

SEQ ID NO: 2442242 - DNA, 25 bp, Homo sapien
gagagctcttgtgccaactggtgtt

SEQ ID NO: 2442243 - DNA, 25 bp, Homo sapien
agagctcttgtgccaactggtgttg

SEQ ID NO: 2442244 - DNA, 25 bp, Homo sapien
ggagagctcttgtgccaactggtgt

SEQ ID NO: 2442245 - DNA, 25 bp, Homo sapien
aaagcagaagtctgagtctcggata

SEQ ID NO: 2442246 - DNA, 25 bp, Homo sapien
caaagcagaagtctgagtctcggat

SEQ ID NO: 2442247 - DNA, 25 bp, Homo sapien
aagcagaagtctgagtctcggatac

SEQ ID NO: 2442248 - DNA, 25 bp, Homo sapien
tagtcctgaaactcaatgggcttgt

SEQ ID NO: 2442249 - DNA, 25 bp, Homo sapien
tatagtcctgaaactcaatgggctt

SEQ ID NO: 2442250 - DNA, 25 bp, Homo sapien
tgtttcttcggaatagcattggcta

SEQ ID NO: 2442251 - DNA, 25 bp, Homo sapien
tggctattcccaatagcagtgtctg

SEQ ID NO: 2442252 - DNA, 25 bp, Homo sapien
gcccactgcgtgcggcgccacggac

SEQ ID NO: 2442253 - DNA, 25 bp, Homo sapien
ccactgcgtgcggcgccacggacca

SEQ ID NO: 2442254 - DNA, 25 bp, Homo sapien
gcgcccactgcgtgcggcgccacgg

SEQ ID NO: 2442255 - DNA, 25 bp, Homo sapien
cactgcgtgcggcgccacggaccat

SEQ ID NO: 2442256 - DNA, 25 bp, Homo sapien
tactccaagcaagtgcgctgggcga

SEQ ID NO: 2442257 - DNA, 25 bp, Homo sapien
tccgcgtgcggtgtcgttgctgggc

SEQ ID NO: 2442258 - DNA, 25 bp, Homo sapien
gaggtcgggcggtgttccgcgtgcg

SEQ ID NO: 2442259 - DNA, 25 bp, Homo sapien
ctgggcgcatgggtattaagaatca

SEQ ID NO: 2442260 - DNA, 25 bp, Homo sapien
tccgggagcgcaggggtgggccagg

SEQ ID NO: 2442261 - DNA, 25 bp, Homo sapien
ggtccgggagcgcaggggtgggcca

SEQ ID NO: 2442262 - DNA, 25 bp, Homo sapien
gccagggagtggagaggggtgaccg

SEQ ID NO: 2442263 - DNA, 25 bp, Homo sapien
gggccagggagtggagaggggtgac

SEQ ID NO: 2442264 - DNA, 25 bp, Homo sapien
gcagctcaagctcggaggaggtgca

SEQ ID NO: 2442265 - DNA, 25 bp, Homo sapien
tcaagctcggaggaggtgcagatac

SEQ ID NO: 2442266 - DNA, 25 bp, Homo sapien
ggcagaggcagctcaagctcggagg

SEQ ID NO: 2442267 - DNA, 25 bp, Homo sapien
agaggcagctcaagctcggaggagg

SEQ ID NO: 2442268 - DNA, 25 bp, Homo sapien
gagggggcgcctggcctggggacac

SEQ ID NO: 2442269 - DNA, 25 bp, Homo sapien
ggagggggcgcctggcctggggaca

SEQ ID NO: 2442270 - DNA, 25 bp, Homo sapien
ggtgcaggggatcgtatgcagtgga

SEQ ID NO: 2442271 - DNA, 25 bp, Homo sapien
tgcaggggatcgtatgcagtggagg

SEQ ID NO: 2442272 - DNA, 25 bp, Homo sapien
cggggtgcaggggatcgtatgcagt

SEQ ID NO: 2442273 - DNA, 25 bp, Homo sapien
caggggatcgtatgcagtggaggag

SEQ ID NO: 2442274 - DNA, 25 bp, Homo sapien
ggctgaggagctgacccgcgcctac

SEQ ID NO: 2442275 - DNA, 25 bp, Homo sapien
gccgggcttcaggacagaggccaat

SEQ ID NO: 2442276 - DNA, 25 bp, Homo sapien
tggagcgcagccactggcggttcct

SEQ ID NO: 2442277 - DNA, 25 bp, Homo sapien
cagcgccggctttgggcagaggcag

SEQ ID NO: 2442278 - DNA, 25 bp, Homo sapien
ctgctgtcaagctctccatggcttc

SEQ ID NO: 2442279 - DNA, 25 bp, Homo sapien
tttctccattgtacttcgatgatac

SEQ ID NO: 2442280 - DNA, 25 bp, Homo sapien
gataccctcaccaggtattcccaag

SEQ ID NO: 2442281 - DNA, 25 bp, Homo sapien
tacttcgatgataccctcaccaggt

SEQ ID NO: 2442282 - DNA, 25 bp, Homo sapien
tcatgccttttggctgcctggtaag

SEQ ID NO: 2442283 - DNA, 25 bp, Homo sapien
tgagtcagcgctcagattagcatca

SEQ ID NO: 2442284 - DNA, 25 bp, Homo sapien
agttttgggagcatgacgcttgttt

SEQ ID NO: 2442285 - DNA, 25 bp, Homo sapien
tgtttttgaggatgcctgtgctccc

SEQ ID NO: 2442286 - DNA, 25 bp, Homo sapien
ggaatatagcagatagccctgtggt

SEQ ID NO: 2442287 - DNA, 25 bp, Homo sapien
tctccaattcggtgatgtgtcattc

SEQ ID NO: 2442288 - DNA, 25 bp, Homo sapien
tgtgctctccaattcggtgatgtgt

SEQ ID NO: 2442289 - DNA, 25 bp, Homo sapien
tgctctccaattcggtgatgtgtca

SEQ ID NO: 2442290 - DNA, 25 bp, Homo sapien
caattcggtgatgtgtcattcactc

SEQ ID NO: 2442291 - DNA, 25 bp, Homo sapien
tggatctcacaatccccttggctgg

SEQ ID NO: 2442292 - DNA, 25 bp, Homo sapien
gaggctggatctcacaatccccttg

SEQ ID NO: 2442293 - DNA, 25 bp, Homo sapien
ggctggatctcacaatccccttggc

SEQ ID NO: 2442294 - DNA, 25 bp, Homo sapien
gctggatctcacaatccccttggct

SEQ ID NO: 2442295 - DNA, 25 bp, Homo sapien
aaactcccatgaggcaggacctaaa

SEQ ID NO: 2442296 - DNA, 25 bp, Homo sapien
ccatgaggcaggacctaaaggaatg

SEQ ID NO: 2442297 - DNA, 25 bp, Homo sapien
ctcccatgaggcaggacctaaagga

SEQ ID NO: 2442298 - DNA, 25 bp, Homo sapien
tgaggcaggacctaaaggaatgatc

SEQ ID NO: 2442299 - DNA, 25 bp, Homo sapien
ttcctctctgagtccacactggtga

SEQ ID NO: 2442300 - DNA, 25 bp, Homo sapien
tgagtccacactggtgagagctctt

SEQ ID NO: 2442301 - DNA, 25 bp, Homo sapien
gtccacactggtgagagctcttcag

SEQ ID NO: 2442302 - DNA, 25 bp, Homo sapien
tctctgagtccacactggtgagagc

SEQ ID NO: 2442303 - DNA, 25 bp, Homo sapien
gtcagacacaggagggaaagaagtc

SEQ ID NO: 2442304 - DNA, 25 bp, Homo sapien
gaaagaagtcatttgcatatttggc

SEQ ID NO: 2442305 - DNA, 25 bp, Homo sapien
gcgtcagacacaggagggaaagaag

SEQ ID NO: 2442306 - DNA, 25 bp, Homo sapien
aagaagtcatttgcatatttggcac

SEQ ID NO: 2442307 - DNA, 25 bp, Homo sapien
tgtgccaaacagtgatcggtggttc

SEQ ID NO: 2442308 - DNA, 25 bp, Homo sapien
gcttgtgccaaacagtgatcggtgg

SEQ ID NO: 2442309 - DNA, 25 bp, Homo sapien
ccaaacagtgatcggtggttctgga

SEQ ID NO: 2442310 - DNA, 25 bp, Homo sapien
tgccaaacagtgatcggtggttctg

SEQ ID NO: 2442311 - DNA, 25 bp, Homo sapien
acaagaacaagaagaagtacaaggc

SEQ ID NO: 2442312 - DNA, 25 bp, Homo sapien
aagaacaagaagaagtacaaggcat

SEQ ID NO: 2442313 - DNA, 25 bp, Homo sapien
ctacaagaacaagaagaagtacaag

SEQ ID NO: 2442314 - DNA, 25 bp, Homo sapien
caagaacaagaagaagtacaaggca

SEQ ID NO: 2442315 - DNA, 25 bp, Homo sapien
gggtccaggctgtcgagactcccca

SEQ ID NO: 2442316 - DNA, 25 bp, Homo sapien
tgaagtgatccaaggtacactgtag

SEQ ID NO: 2442317 - DNA, 25 bp, Homo sapien
tagatttgtatgctcccaggaactg

SEQ ID NO: 2442318 - DNA, 25 bp, Homo sapien
ccaggctgtcgagactccccaggga

SEQ ID NO: 2442319 - DNA, 25 bp, Homo sapien
agaggaggcttcggccttggacaag

SEQ ID NO: 2442320 - DNA, 25 bp, Homo sapien
gccataggcagagtcacacttgctg

SEQ ID NO: 2442321 - DNA, 25 bp, Homo sapien
ccataggcagagtcacacttgctgt

SEQ ID NO: 2442322 - DNA, 25 bp, Homo sapien
gaggcttcggccttggacaaggtgt

SEQ ID NO: 2442323 - DNA, 25 bp, Homo sapien
cctgtggcctgtgcctgctggctgc

SEQ ID NO: 2442324 - DNA, 25 bp, Homo sapien
gcaggaaacacccaggcctctcctc

SEQ ID NO: 2442325 - DNA, 25 bp, Homo sapien
caagaaccacaggcaggaaacaccc

SEQ ID NO: 2442326 - DNA, 25 bp, Homo sapien
cctggggggcccctgtggcctgtgc

SEQ ID NO: 2442327 - DNA, 25 bp, Homo sapien
attggcccaaaattgaacatcccag

SEQ ID NO: 2442328 - DNA, 25 bp, Homo sapien
gcccaaaattgaacatcccagggac

SEQ ID NO: 2442329 - DNA, 25 bp, Homo sapien
ttggcccaaaattgaacatcccagg

SEQ ID NO: 2442330 - DNA, 25 bp, Homo sapien
caaaattgaacatcccagggacagc

SEQ ID NO: 2442331 - DNA, 25 bp, Homo sapien
ccctgggccttctcaaggctcttgg

SEQ ID NO: 2442332 - DNA, 25 bp, Homo sapien
tctacaagcacagggccctgggcct

SEQ ID NO: 2442333 - DNA, 25 bp, Homo sapien
agggccctgggccttctcaaggctc

SEQ ID NO: 2442334 - DNA, 25 bp, Homo sapien
gctcttggtggcagcaaagctgtca

SEQ ID NO: 2442335 - DNA, 25 bp, Homo sapien
cagagaacccttgggctgaggtagg

SEQ ID NO: 2442336 - DNA, 25 bp, Homo sapien
agagctgttgtcctgggagccaacg

SEQ ID NO: 2442337 - DNA, 25 bp, Homo sapien
aggcatccagagaacccttgggctg

SEQ ID NO: 2442338 - DNA, 25 bp, Homo sapien
ggcatccagagaacccttgggctga

SEQ ID NO: 2442339 - DNA, 25 bp, Homo sapien
ggctttttcggcatggctagccctg

SEQ ID NO: 2442340 - DNA, 25 bp, Homo sapien
tctgcccatgtgaagccggctgctg

SEQ ID NO: 2442341 - DNA, 25 bp, Homo sapien
ttggctggctttttcggcatggcta

SEQ ID NO: 2442342 - DNA, 25 bp, Homo sapien
ggcatcaaatggtggtggcctcttg

SEQ ID NO: 2442343 - DNA, 25 bp, Homo sapien
cttggctctatgcatctggatctca

SEQ ID NO: 2442344 - DNA, 25 bp, Homo sapien
gcttggctctatgcatctggatctc

SEQ ID NO: 2442345 - DNA, 25 bp, Homo sapien
ttggctctatgcatctggatctcat

SEQ ID NO: 2442346 - DNA, 25 bp, Homo sapien
ggctctatgcatctggatctcattc

SEQ ID NO: 2442347 - DNA, 25 bp, Homo sapien
ctctgtgtcacctactgtagtcaga

SEQ ID NO: 2442348 - DNA, 25 bp, Homo sapien
ctgccctccagcgatcagtggcatc

SEQ ID NO: 2442349 - DNA, 25 bp, Homo sapien
gccctccagcgatcagtggcatcct

SEQ ID NO: 2442350 - DNA, 25 bp, Homo sapien
atcctctgtgtcacctactgtagtc

SEQ ID NO: 2442351 - DNA, 25 bp, Homo sapien
tgtgcggtccactgtccgtgacctc

SEQ ID NO: 2442352 - DNA, 25 bp, Homo sapien
aatgagtttgcccacttcctcaaaa

SEQ ID NO: 2442353 - DNA, 25 bp, Homo sapien
gggaatgagtttgcccacttcctca

SEQ ID NO: 2442354 - DNA, 25 bp, Homo sapien
gacctctccggcttgtctctgagga

SEQ ID NO: 2442355 - DNA, 25 bp, Homo sapien
aaaggtgccaagacgtccaacatcc

SEQ ID NO: 2442356 - DNA, 25 bp, Homo sapien
tgctgtgctgtgactgttgaggctt

SEQ ID NO: 2442357 - DNA, 25 bp, Homo sapien
ctgcaaaggtgccaagacgtccaac

SEQ ID NO: 2442358 - DNA, 25 bp, Homo sapien
ccacaagggaggtagtgtgcgacca

SEQ ID NO: 2442359 - DNA, 25 bp, Homo sapien
ggatctcatctgcctagtggcagcg

SEQ ID NO: 2442360 - DNA, 25 bp, Homo sapien
tcatctgcctagtggcagcgcccag

SEQ ID NO: 2442361 - DNA, 25 bp, Homo sapien
gatctcatctgcctagtggcagcgc

SEQ ID NO: 2442362 - DNA, 25 bp, Homo sapien
tctcatctgcctagtggcagcgccc

SEQ ID NO: 2442363 - DNA, 25 bp, Homo sapien
gattttgtccccaagtaactctgac

SEQ ID NO: 2442364 - DNA, 25 bp, Homo sapien
tgattttgtccccaagtaactctga

SEQ ID NO: 2442365 - DNA, 25 bp, Homo sapien
ttgattttgtccccaagtaactctg

SEQ ID NO: 2442366 - DNA, 25 bp, Homo sapien
tcattttcgacagtttctctccaag

SEQ ID NO: 2442367 - DNA, 25 bp, Homo sapien
tttctctccaagttctttgctgagt

SEQ ID NO: 2442368 - DNA, 25 bp, Homo sapien
cagtttctctccaagttctttgctg

SEQ ID NO: 2442369 - DNA, 25 bp, Homo sapien
cattttcgacagtttctctccaagt

SEQ ID NO: 2442370 - DNA, 25 bp, Homo sapien
tcttctatgtgcttgccggggtcct

SEQ ID NO: 2442371 - DNA, 25 bp, Homo sapien
ccaaatttcatccacgtcggcatgg

SEQ ID NO: 2442372 - DNA, 25 bp, Homo sapien
atggactattcctctttggcccaga

SEQ ID NO: 2442373 - DNA, 25 bp, Homo sapien
gccttcgcagtttgacggaagcatc

SEQ ID NO: 2442374 - DNA, 25 bp, Homo sapien
tgtctagaactgatatgtctgagtt

SEQ ID NO: 2442375 - DNA, 25 bp, Homo sapien
tgatatgtctgagttaaatcttcct

SEQ ID NO: 2442376 - DNA, 25 bp, Homo sapien
tcagggcattggtctcttccaccat

SEQ ID NO: 2442377 - DNA, 25 bp, Homo sapien
atctcagggcattggtctcttccac

SEQ ID NO: 2442378 - DNA, 25 bp, Homo sapien
tctcttcctgtgctctaaggagcta

SEQ ID NO: 2442379 - DNA, 25 bp, Homo sapien
ttcctgtgctctaaggagctaccca

SEQ ID NO: 2442380 - DNA, 25 bp, Homo sapien
tcctgtgctctaaggagctacccat

SEQ ID NO: 2442381 - DNA, 25 bp, Homo sapien
tcttcctgtgctctaaggagctacc

SEQ ID NO: 2442382 - DNA, 25 bp, Homo sapien
ggttcagttaaattgtgtctccagc

SEQ ID NO: 2442383 - DNA, 25 bp, Homo sapien
tgtctccagcgatctattagacccg

SEQ ID NO: 2442384 - DNA, 25 bp, Homo sapien
tcaatatggcgcattgaacccggct

SEQ ID NO: 2442385 - DNA, 25 bp, Homo sapien
atcaaagtcagtccacaacgggcgg

SEQ ID NO: 2442386 - DNA, 25 bp, Homo sapien
gcgctcaggtaaacgtcccaagtaa

SEQ ID NO: 2442387 - DNA, 25 bp, Homo sapien
ttctcgcggttttcggccaggtctc

SEQ ID NO: 2442388 - DNA, 25 bp, Homo sapien
gagcttacacggactccaggtgatg

SEQ ID NO: 2442389 - DNA, 25 bp, Homo sapien
tgctagggctgtcgccgagcttaca

SEQ ID NO: 2442390 - DNA, 25 bp, Homo sapien
catactgcgtcttggcgtttagcaa

SEQ ID NO: 2442391 - DNA, 25 bp, Homo sapien
tgcgtcttggcgtttagcaaagtag

SEQ ID NO: 2442392 - DNA, 25 bp, Homo sapien
ttggcgtttagcaaagtagcggaga

SEQ ID NO: 2442393 - DNA, 25 bp, Homo sapien
gtcatactgcgtcttggcgtttagc

SEQ ID NO: 2442394 - DNA, 25 bp, Homo sapien
atcaccaacggcaaatactttaggt

SEQ ID NO: 2442395 - DNA, 25 bp, Homo sapien
ccttgaatcaccaacggcaaatact

SEQ ID NO: 2442396 - DNA, 25 bp, Homo sapien
gaatcaccaacggcaaatactttag

SEQ ID NO: 2442397 - DNA, 25 bp, Homo sapien
ttgaatcaccaacggcaaatacttt

SEQ ID NO: 2442398 - DNA, 25 bp, Homo sapien
aaagccctgcattaacctgtaccca

SEQ ID NO: 2442399 - DNA, 25 bp, Homo sapien
cacagtacttaagagaaccaaagag

SEQ ID NO: 2442400 - DNA, 25 bp, Homo sapien
caaatgactctattgtgtagctggg

SEQ ID NO: 2442401 - DNA, 25 bp, Homo sapien
tactaaatgcttacccagtactagc

SEQ ID NO: 2442402 - DNA, 25 bp, Homo sapien
tcgcaggactttaggaaagcgcagc

SEQ ID NO: 2442403 - DNA, 25 bp, Homo sapien
ggaaaatcgatacaggccacattac

SEQ ID NO: 2442404 - DNA, 25 bp, Homo sapien
gaatactcctggaaaatcgatacag

SEQ ID NO: 2442405 - DNA, 25 bp, Homo sapien
gactttaggaaagcgcagcttagtt

SEQ ID NO: 2442406 - DNA, 25 bp, Homo sapien
taccactacttcttgggagactgag

SEQ ID NO: 2442407 - DNA, 25 bp, Homo sapien
tagaatgcaaggtaagttggccctg

SEQ ID NO: 2442408 - DNA, 25 bp, Homo sapien
catgtctgttgtccaagcacccagg

SEQ ID NO: 2442409 - DNA, 25 bp, Homo sapien
aactagccaggtaaggtgtcatgtc

SEQ ID NO: 2442410 - DNA, 25 bp, Homo sapien
gaagtctactcagatgactggttgg

SEQ ID NO: 2442411 - DNA, 25 bp, Homo sapien
gaaaatggactctgtaccaacttca

SEQ ID NO: 2442412 - DNA, 25 bp, Homo sapien
tgtcaccagactaaagtgtagtggc

SEQ ID NO: 2442413 - DNA, 25 bp, Homo sapien
cattatagcatggtatcatgggagg

SEQ ID NO: 2442414 - DNA, 25 bp, Homo sapien
aatacaaggaaatctctcgtcagct

SEQ ID NO: 2442415 - DNA, 25 bp, Homo sapien
gaaatctctcgtcagcttctgtaaa

SEQ ID NO: 2442416 - DNA, 25 bp, Homo sapien
cagagatctcaaaactgaagtgctc

SEQ ID NO: 2442417 - DNA, 25 bp, Homo sapien
agcagagatctcaaaactgaagtgc

SEQ ID NO: 2442418 - DNA, 25 bp, Homo sapien
ttccagaagccaagcggattccaga

SEQ ID NO: 2442419 - DNA, 25 bp, Homo sapien
gagatactgaaccaaaggacacagc

SEQ ID NO: 2442420 - DNA, 25 bp, Homo sapien
caatattagatggaggtggacctgg

SEQ ID NO: 2442421 - DNA, 25 bp, Homo sapien
taagattaagaactcacggattccc

SEQ ID NO: 2442422 - DNA, 25 bp, Homo sapien
aagatgtcccccgatattgccgaat

SEQ ID NO: 2442423 - DNA, 25 bp, Homo sapien
cccgatattgccgaatgccctatga

SEQ ID NO: 2442424 - DNA, 25 bp, Homo sapien
tcagccccagtcaagaagcactgct

SEQ ID NO: 2442425 - DNA, 25 bp, Homo sapien
aatgccctatgagaaggcaaaatca

SEQ ID NO: 2442426 - DNA, 25 bp, Homo sapien
taagtacctatttagccactagaac

SEQ ID NO: 2442427 - DNA, 25 bp, Homo sapien
gaactagagccttaaaagtggagac

SEQ ID NO: 2442428 - DNA, 25 bp, Homo sapien
tgcccagtaatgactaagtccacgt

SEQ ID NO: 2442429 - DNA, 25 bp, Homo sapien
cctccagtggaagtatctgacctaa

SEQ ID NO: 2442430 - DNA, 25 bp, Homo sapien
cacacagccaccagaattatctcca

SEQ ID NO: 2442431 - DNA, 25 bp, Homo sapien
acagccaccagaattatctccaagc

SEQ ID NO: 2442432 - DNA, 25 bp, Homo sapien
ctccaacacatactccacacagcca

SEQ ID NO: 2442433 - DNA, 25 bp, Homo sapien
tccacacagccaccagaattatctc

SEQ ID NO: 2442434 - DNA, 25 bp, Homo sapien
agaagaatctgtgaaaggcctatca

SEQ ID NO: 2442435 - DNA, 25 bp, Homo sapien
tctgtgaaaggcctatcaattgctg

SEQ ID NO: 2442436 - DNA, 25 bp, Homo sapien
ggcctatcaattgctgccttatata

SEQ ID NO: 2442437 - DNA, 25 bp, Homo sapien
gaaaggcctatcaattgctgcctta

SEQ ID NO: 2442438 - DNA, 25 bp, Homo sapien
ttttttgtctctttatgtagttatc

SEQ ID NO: 2442439 - DNA, 25 bp, Homo sapien
ctggctgtcgttccctcctactgga

SEQ ID NO: 2442440 - DNA, 25 bp, Homo sapien
cgttccctcctactggagagccatg

SEQ ID NO: 2442441 - DNA, 25 bp, Homo sapien
gactggccatcaagaacctggccct

SEQ ID NO: 2442442 - DNA, 25 bp, Homo sapien
ctcctactggagagccatgagtgat

SEQ ID NO: 2442443 - DNA, 25 bp, Homo sapien
tgggaggcgattgcaggtgggtagc

SEQ ID NO: 2442444 - DNA, 25 bp, Homo sapien
tttaacagatggaggccggacgcag

SEQ ID NO: 2442445 - DNA, 25 bp, Homo sapien
cagagcaagcatcaaattcatactc

SEQ ID NO: 2442446 - DNA, 25 bp, Homo sapien
atgtaacaggaatgttagatttaac

SEQ ID NO: 2442447 - DNA, 25 bp, Homo sapien
tggggcatcaccttgcccttgttcc

SEQ ID NO: 2442448 - DNA, 25 bp, Homo sapien
ggagttgctacggaattctcattgg

SEQ ID NO: 2442449 - DNA, 25 bp, Homo sapien
gagttgctacggaattctcattgga

SEQ ID NO: 2442450 - DNA, 25 bp, Homo sapien
gggcatcaccttgcccttgttcctc

SEQ ID NO: 2442451 - DNA, 25 bp, Homo sapien
gaaatgcctgcattaagtacaatga

SEQ ID NO: 2442452 - DNA, 25 bp, Homo sapien
gacttgagacactacaatctactct

SEQ ID NO: 2442453 - DNA, 25 bp, Homo sapien
tgagaaaagttctccagaactctgg

SEQ ID NO: 2442454 - DNA, 25 bp, Homo sapien
tgcaaagtgttcagctaggactaaa

SEQ ID NO: 2442455 - DNA, 25 bp, Homo sapien
tacactaagatcaatagcagcttct

SEQ ID NO: 2442456 - DNA, 25 bp, Homo sapien
gcacttctaattccccttttggcaa

SEQ ID NO: 2442457 - DNA, 25 bp, Homo sapien
tttggcaaaacaggaaccacccatc

SEQ ID NO: 2442458 - DNA, 25 bp, Homo sapien
gcttctaaaagcacttctaattccc

SEQ ID NO: 2442459 - DNA, 25 bp, Homo sapien
agtgaaagatattgttagtccatct

SEQ ID NO: 2442460 - DNA, 25 bp, Homo sapien
agatattgttagtccatctcgaaaa

SEQ ID NO: 2442461 - DNA, 25 bp, Homo sapien
ctcacagcctcatccataagaattt

SEQ ID NO: 2442462 - DNA, 25 bp, Homo sapien
cactcacagcctcatccataagaat

SEQ ID NO: 2442463 - DNA, 25 bp, Homo sapien
ggaaattaattcacacggacgtgta

SEQ ID NO: 2442464 - DNA, 25 bp, Homo sapien
ccattgtagatatgaaacttgcagt

SEQ ID NO: 2442465 - DNA, 25 bp, Homo sapien
aaacttgcagtgaggatttaaggcc

SEQ ID NO: 2442466 - DNA, 25 bp, Homo sapien
ggatctgaagaacgagcaaataatt

SEQ ID NO: 2442467 - DNA, 25 bp, Homo sapien
ttctaaatttgtctgcaggctgcct

SEQ ID NO: 2442468 - DNA, 25 bp, Homo sapien
aagagggctagatttacaacattct

SEQ ID NO: 2442469 - DNA, 25 bp, Homo sapien
gatctggtcaccagttctgtatgaa

SEQ ID NO: 2442470 - DNA, 25 bp, Homo sapien
gctgcctgtgggattagtctctgca

SEQ ID NO: 2442471 - DNA, 25 bp, Homo sapien
aaaatcagtcaaaagtatacagcta

SEQ ID NO: 2442472 - DNA, 25 bp, Homo sapien
agaaaatgcccagttcaagaaaaag

SEQ ID NO: 2442473 - DNA, 25 bp, Homo sapien
tcaaaagtatacagctatcaagaaa

SEQ ID NO: 2442474 - DNA, 25 bp, Homo sapien
cagtcaaaagtatacagctatcaag

SEQ ID NO: 2442475 - DNA, 25 bp, Homo sapien
tgtctgaccatactaccaatcttga

SEQ ID NO: 2442476 - DNA, 25 bp, Homo sapien
gtctgaccatactaccaatcttgag

SEQ ID NO: 2442477 - DNA, 25 bp, Homo sapien
atgtctgaccatactaccaatcttg

SEQ ID NO: 2442478 - DNA, 25 bp, Homo sapien
ctgaccatactaccaatcttgagag

SEQ ID NO: 2442479 - DNA, 25 bp, Homo sapien
tttattgatgagatccactagccaa

SEQ ID NO: 2442480 - DNA, 25 bp, Homo sapien
taatgtgccaaatttattgatgaga

SEQ ID NO: 2442481 - DNA, 25 bp, Homo sapien
aaaaaaacgatcatgcaaaatctgg

SEQ ID NO: 2442482 - DNA, 25 bp, Homo sapien
aaatctggaacccatttaatgtgcc

SEQ ID NO: 2442483 - DNA, 25 bp, Homo sapien
caataaatgtggaactatttctata

SEQ ID NO: 2442484 - DNA, 25 bp, Homo sapien
ccaataaatgtggaactatttctat

SEQ ID NO: 2442485 - DNA, 25 bp, Homo sapien
ttcttgaagctaagttcttcaaaga

SEQ ID NO: 2442486 - DNA, 25 bp, Homo sapien
aattcttgaagctaagttcttcaaa

SEQ ID NO: 2442487 - DNA, 25 bp, Homo sapien
ttcattcagtgcattcatctttcca

SEQ ID NO: 2442488 - DNA, 25 bp, Homo sapien
ctatgagaaaaatttggagtaaatg

SEQ ID NO: 2442489 - DNA, 25 bp, Homo sapien
tgttataaccttatttatttcattc

SEQ ID NO: 2442490 - DNA, 25 bp, Homo sapien
ttataaccttatttatttcattcag

SEQ ID NO: 2442491 - DNA, 25 bp, Homo sapien
gattactatgccgatgagtataata

SEQ ID NO: 2442492 - DNA, 25 bp, Homo sapien
ggattactatgccgatgagtataat

SEQ ID NO: 2442493 - DNA, 25 bp, Homo sapien
aggattactatgccgatgagtataa

SEQ ID NO: 2442494 - DNA, 25 bp, Homo sapien
atgaagactgtcttgcaagactatg

SEQ ID NO: 2442495 - DNA, 25 bp, Homo sapien
gtcctgtaatgtaagagccttttct

SEQ ID NO: 2442496 - DNA, 25 bp, Homo sapien
gcttttctacatattgtggttgatg

SEQ ID NO: 2442497 - DNA, 25 bp, Homo sapien
ctttgctagcagatcatgtacattc

SEQ ID NO: 2442498 - DNA, 25 bp, Homo sapien
aaaatcccaagccaactttgctagc

SEQ ID NO: 2442499 - DNA, 25 bp, Homo sapien
atcccaagccaactttgctagcaga

SEQ ID NO: 2442500 - DNA, 25 bp, Homo sapien
actttgctagcagatcatgtacatt

SEQ ID NO: 2442501 - DNA, 25 bp, Homo sapien
aagagcaaggtccatgatgtctaca

SEQ ID NO: 2442502 - DNA, 25 bp, Homo sapien
cggcgtatcaactcaaggagctttt

SEQ ID NO: 2442503 - DNA, 25 bp, Homo sapien
tgcaagacggcgtatcaactcaagg

SEQ ID NO: 2442504 - DNA, 25 bp, Homo sapien
aagacggcgtatcaactcaaggagc

SEQ ID NO: 2442505 - DNA, 25 bp, Homo sapien
gtgatctatccactggatcttctgt

SEQ ID NO: 2442506 - DNA, 25 bp, Homo sapien
aaagtgatctatccactggatcttc

SEQ ID NO: 2442507 - DNA, 25 bp, Homo sapien
aagtgatctatccactggatcttct

SEQ ID NO: 2442508 - DNA, 25 bp, Homo sapien
gagtttacagaagctaaattctagc

SEQ ID NO: 2442509 - DNA, 25 bp, Homo sapien
taataaggcacatgaaaattgctat

SEQ ID NO: 2442510 - DNA, 25 bp, Homo sapien
acaaaatgtggtcaatatcctcccc

SEQ ID NO: 2442511 - DNA, 25 bp, Homo sapien
aatataatccatgcctccaaccaaa

SEQ ID NO: 2442512 - DNA, 25 bp, Homo sapien
aaatcatggcgataaaatatgtggg

SEQ ID NO: 2442513 - DNA, 25 bp, Homo sapien
gattttgttgaagctggttgattaa

SEQ ID NO: 2442514 - DNA, 25 bp, Homo sapien
gcatacaatctgatgctattcatgt

SEQ ID NO: 2442515 - DNA, 25 bp, Homo sapien
gctattcatgtaggttgcaaggttt

SEQ ID NO: 2442516 - DNA, 25 bp, Homo sapien
gaaggatgagtaagtagacatgcat

SEQ ID NO: 2442517 - DNA, 25 bp, Homo sapien
gaatgcaatatgaagtataaatcca

SEQ ID NO: 2442518 - DNA, 25 bp, Homo sapien
gggataccaagtagatcatattcct

SEQ ID NO: 2442519 - DNA, 25 bp, Homo sapien
ggcctagagtttaggttgcctaaga

SEQ ID NO: 2442520 - DNA, 25 bp, Homo sapien
actttgcaagtcactcagttggagg

SEQ ID NO: 2442521 - DNA, 25 bp, Homo sapien
caagcaaggcttgaggtgatacaga

SEQ ID NO: 2442522 - DNA, 25 bp, Homo sapien
tagtgaggctggaatgcacctatgc

SEQ ID NO: 2442523 - DNA, 25 bp, Homo sapien
aataaacagagcaccctagtgaggc

SEQ ID NO: 2442524 - DNA, 25 bp, Homo sapien
cctggctaaattcaagtagtgagac

SEQ ID NO: 2442525 - DNA, 25 bp, Homo sapien
tgaaattagctgaccatgccactgg

SEQ ID NO: 2442526 - DNA, 25 bp, Homo sapien
gttttagtgagagaaattgtgtccc

SEQ ID NO: 2442527 - DNA, 25 bp, Homo sapien
gagacaagggtactcatttttgcca

SEQ ID NO: 2442528 - DNA, 25 bp, Homo sapien
ccaagcctcactgtttgtggatcat

SEQ ID NO: 2442529 - DNA, 25 bp, Homo sapien
ctgtatcgacttccaagcctcactg

SEQ ID NO: 2442530 - DNA, 25 bp, Homo sapien
tgtttgtggatcatagtcttcatga

SEQ ID NO: 2442531 - DNA, 25 bp, Homo sapien
ttgaacatgactgtatcgacttcca

SEQ ID NO: 2442532 - DNA, 25 bp, Homo sapien
tgagcaacaagagatccagcaagat

SEQ ID NO: 2442533 - DNA, 25 bp, Homo sapien
aaaatattcacaagccactcaggag

SEQ ID NO: 2442534 - DNA, 25 bp, Homo sapien
gatgagatctatctggcagaccgta

SEQ ID NO: 2442535 - DNA, 25 bp, Homo sapien
tgctgagcatgaagggaccacctag

SEQ ID NO: 2442536 - DNA, 25 bp, Homo sapien
ttttgctattagtttcctttctcga

SEQ ID NO: 2442537 - DNA, 25 bp, Homo sapien
aaagataaactgcattttctgctaa

SEQ ID NO: 2442538 - DNA, 25 bp, Homo sapien
tagtttcctttctcgacaattgaca

SEQ ID NO: 2442539 - DNA, 25 bp, Homo sapien
tgctattagtttcctttctcgacaa

SEQ ID NO: 2442540 - DNA, 25 bp, Homo sapien
gctctgttagcaatctcgtcactac

SEQ ID NO: 2442541 - DNA, 25 bp, Homo sapien
ctgattggcttttaatcttgggcca

SEQ ID NO: 2442542 - DNA, 25 bp, Homo sapien
aatcttgggccaaggtttgtgtata

SEQ ID NO: 2442543 - DNA, 25 bp, Homo sapien
tgtgtatatctctttaagaagatct

SEQ ID NO: 2442544 - DNA, 25 bp, Homo sapien
tgatgcttttaaacgatcaaagcaa

SEQ ID NO: 2442545 - DNA, 25 bp, Homo sapien
cacagtgtatcatatgatgctttta

SEQ ID NO: 2442546 - DNA, 25 bp, Homo sapien
aaacacacagtgtatcatatgatgc

SEQ ID NO: 2442547 - DNA, 25 bp, Homo sapien
tatgatgcttttaaacgatcaaagc

SEQ ID NO: 2442548 - DNA, 25 bp, Homo sapien
tcattaatgtactcttttataacag

SEQ ID NO: 2442549 - DNA, 25 bp, Homo sapien
tgtactcttttataacagttaatac

SEQ ID NO: 2442550 - DNA, 25 bp, Homo sapien
ctcttttataacagttaatactcta

SEQ ID NO: 2442551 - DNA, 25 bp, Homo sapien
aatgtactcttttataacagttaat

SEQ ID NO: 2442552 - DNA, 25 bp, Homo sapien
ctcgacataggtagaatcattcttt

SEQ ID NO: 2442553 - DNA, 25 bp, Homo sapien
tcgacataggtagaatcattctttc

SEQ ID NO: 2442554 - DNA, 25 bp, Homo sapien
ctttccttgtgataatcactgtcac

SEQ ID NO: 2442555 - DNA, 25 bp, Homo sapien
attctttccttgtgataatcactgt

SEQ ID NO: 2442556 - DNA, 25 bp, Homo sapien
ctataagagagaggtgtttgccacg

SEQ ID NO: 2442557 - DNA, 25 bp, Homo sapien
agagaggtgtttgccacgaaatgct

SEQ ID NO: 2442558 - DNA, 25 bp, Homo sapien
gagagaggtgtttgccacgaaatgc

SEQ ID NO: 2442559 - DNA, 25 bp, Homo sapien
taagagagaggtgtttgccacgaaa

SEQ ID NO: 2442560 - DNA, 25 bp, Homo sapien
gattaacaatacatcgccgtactga

SEQ ID NO: 2442561 - DNA, 25 bp, Homo sapien
tcttcagaatctatcagctcaccac

SEQ ID NO: 2442562 - DNA, 25 bp, Homo sapien
tgtgtcattcgtatgagaccatata

SEQ ID NO: 2442563 - DNA, 25 bp, Homo sapien
tttttgtgggctacattggctttaa

SEQ ID NO: 2442564 - DNA, 25 bp, Homo sapien
tccacctctagattgggaccatcat

SEQ ID NO: 2442565 - DNA, 25 bp, Homo sapien
tcaggacttgatggcatattgaaat

SEQ ID NO: 2442566 - DNA, 25 bp, Homo sapien
tgcagttgaggaatcggaagagcta

SEQ ID NO: 2442567 - DNA, 25 bp, Homo sapien
catcattgtaatgattacggtggtt

SEQ ID NO: 2442568 - DNA, 25 bp, Homo sapien
tctctaagaggtggcatattcaggt

SEQ ID NO: 2442569 - DNA, 25 bp, Homo sapien
caaacagctcgtaatttttctacag

SEQ ID NO: 2442570 - DNA, 25 bp, Homo sapien
taagtttgccttctccaagttttgc

SEQ ID NO: 2442571 - DNA, 25 bp, Homo sapien
ctgttaggtatagaacttgggaggc

SEQ ID NO: 2442572 - DNA, 25 bp, Homo sapien
gttttgcatggtccaaacaaacagc

SEQ ID NO: 2442573 - DNA, 25 bp, Homo sapien
attagaactatgtacaacgcacagt

SEQ ID NO: 2442574 - DNA, 25 bp, Homo sapien
gtgtttttcagagggaggtctctgc

SEQ ID NO: 2442575 - DNA, 25 bp, Homo sapien
ttaggaacgtcaatggacagtccat

SEQ ID NO: 2442576 - DNA, 25 bp, Homo sapien
tcagggacatccaactaagacatgg

SEQ ID NO: 2442577 - DNA, 25 bp, Homo sapien
tctgctaccacattaggaacgtcaa

SEQ ID NO: 2442578 - DNA, 25 bp, Homo sapien
ctggcacaatgcacagcctgtgtcc

SEQ ID NO: 2442579 - DNA, 25 bp, Homo sapien
cattatagaagtactggtggtcaat

SEQ ID NO: 2442580 - DNA, 25 bp, Homo sapien
cactaagcacttaagacaccatttt

SEQ ID NO: 2442581 - DNA, 25 bp, Homo sapien
cactgtacatcagcagtccacagac

SEQ ID NO: 2442582 - DNA, 25 bp, Homo sapien
aaagaaagcaagtcctcatcccagg

SEQ ID NO: 2442583 - DNA, 25 bp, Homo sapien
ggtggtcaatacaatgcattagaac

SEQ ID NO: 2442584 - DNA, 25 bp, Homo sapien
caagaagtgaacttgaaagtcagag

SEQ ID NO: 2442585 - DNA, 25 bp, Homo sapien
ccatcagttagaggcacaccagcag

SEQ ID NO: 2442586 - DNA, 25 bp, Homo sapien
taccatctacaactggctgacaagc

SEQ ID NO: 2442587 - DNA, 25 bp, Homo sapien
caatcgcagttaacaacagtttggc

SEQ ID NO: 2442588 - DNA, 25 bp, Homo sapien
gtatggactcatttctaagtacgca

SEQ ID NO: 2442589 - DNA, 25 bp, Homo sapien
tttcctgagcaagaagtatggactc

SEQ ID NO: 2442590 - DNA, 25 bp, Homo sapien
cattagatatttcctgagcaagaag

SEQ ID NO: 2442591 - DNA, 25 bp, Homo sapien
agtacgcactcggatgagggattag

SEQ ID NO: 2442592 - DNA, 25 bp, Homo sapien
agtcctaatgccccacatgctgatg

SEQ ID NO: 2442593 - DNA, 25 bp, Homo sapien
gtcctaatgccccacatgctgatgc

SEQ ID NO: 2442594 - DNA, 25 bp, Homo sapien
tcctaatgccccacatgctgatgcc

SEQ ID NO: 2442595 - DNA, 25 bp, Homo sapien
tagtcctaatgccccacatgctgat

SEQ ID NO: 2442596 - DNA, 25 bp, Homo sapien
ttccacctccagcttattgcttcca

SEQ ID NO: 2442597 - DNA, 25 bp, Homo sapien
tccagcttattgcttccattggtgg

SEQ ID NO: 2442598 - DNA, 25 bp, Homo sapien
ccacctccagcttattgcttccatt

SEQ ID NO: 2442599 - DNA, 25 bp, Homo sapien
acctccagcttattgcttccattgg

SEQ ID NO: 2442600 - DNA, 25 bp, Homo sapien
ttgcttggacagtgcaataataagt

SEQ ID NO: 2442601 - DNA, 25 bp, Homo sapien
atgaaggtctgccaggctttttctt

SEQ ID NO: 2442602 - DNA, 25 bp, Homo sapien
gcttggacagtgcaataataagtca

SEQ ID NO: 2442603 - DNA, 25 bp, Homo sapien
tgaaggtctgccaggctttttcttt

SEQ ID NO: 2442604 - DNA, 25 bp, Homo sapien
tcatttctgcttggaacggtaaggt

SEQ ID NO: 2442605 - DNA, 25 bp, Homo sapien
ctgcttggaacggtaaggtaagcct

SEQ ID NO: 2442606 - DNA, 25 bp, Homo sapien
ttctgcttggaacggtaaggtaagc

SEQ ID NO: 2442607 - DNA, 25 bp, Homo sapien
catttctgcttggaacggtaaggta

SEQ ID NO: 2442608 - DNA, 25 bp, Homo sapien
gaacaggccaatgagagtgtgaaca

SEQ ID NO: 2442609 - DNA, 25 bp, Homo sapien
tttggaggcgtgtaccaaatgcctg

SEQ ID NO: 2442610 - DNA, 25 bp, Homo sapien
gcccttgtgcactgtaatgtgaaga

SEQ ID NO: 2442611 - DNA, 25 bp, Homo sapien
tctctcaggcgttttggacgacacc

SEQ ID NO: 2442612 - DNA, 25 bp, Homo sapien
tcccatgcaacatctggtgcacatt

SEQ ID NO: 2442613 - DNA, 25 bp, Homo sapien
tgtcccatgcaacatctggtgcaca

SEQ ID NO: 2442614 - DNA, 25 bp, Homo sapien
catgcaacatctggtgcacattaaa

SEQ ID NO: 2442615 - DNA, 25 bp, Homo sapien
caacatctggtgcacattaaaaaga

SEQ ID NO: 2442616 - DNA, 25 bp, Homo sapien
aaaacaacatgaattcacaagtcta

SEQ ID NO: 2442617 - DNA, 25 bp, Homo sapien
attcacaagtctacactcagagtcc

SEQ ID NO: 2442618 - DNA, 25 bp, Homo sapien
catgaattcacaagtctacactcag

SEQ ID NO: 2442619 - DNA, 25 bp, Homo sapien
caacatgaattcacaagtctacact

SEQ ID NO: 2442620 - DNA, 25 bp, Homo sapien
gagccaatcaatttcactgacaaga

SEQ ID NO: 2442621 - DNA, 25 bp, Homo sapien
agcattgggtatgttaatattgcca

SEQ ID NO: 2442622 - DNA, 25 bp, Homo sapien
gagaaggtgccgtaaaagtgtgaaa

SEQ ID NO: 2442623 - DNA, 25 bp, Homo sapien
tattgccattgtaagcataattgag

SEQ ID NO: 2442624 - DNA, 25 bp, Homo sapien
agtattggctcttcgacacctgttt

SEQ ID NO: 2442625 - DNA, 25 bp, Homo sapien
tattggctcttcgacacctgtttca

SEQ ID NO: 2442626 - DNA, 25 bp, Homo sapien
tggctcttcgacacctgtttcacct

SEQ ID NO: 2442627 - DNA, 25 bp, Homo sapien
ttccagtattggctcttcgacacct

SEQ ID NO: 2442628 - DNA, 25 bp, Homo sapien
tcaaaaccggcattgatggtaacgg

SEQ ID NO: 2442629 - DNA, 25 bp, Homo sapien
taacgggtgaactacagactggaat

SEQ ID NO: 2442630 - DNA, 25 bp, Homo sapien
gactggaatagcctgctcagctggt

SEQ ID NO: 2442631 - DNA, 25 bp, Homo sapien
tactgcaggtaaactttggatgcgg

SEQ ID NO: 2442632 - DNA, 25 bp, Homo sapien
tcaattgcaagaatactgttcctga

SEQ ID NO: 2442633 - DNA, 25 bp, Homo sapien
gttcatgtaacacgtagcaccagca

SEQ ID NO: 2442634 - DNA, 25 bp, Homo sapien
gaaggaatcatgtatagctgctgga

SEQ ID NO: 2442635 - DNA, 25 bp, Homo sapien
tctcatccccgaacatatcatcgtg

SEQ ID NO: 2442636 - DNA, 25 bp, Homo sapien
catcccatgaaagtatagtaatctg

SEQ ID NO: 2442637 - DNA, 25 bp, Homo sapien
tatgccagacatagtatctcagaga

SEQ ID NO: 2442638 - DNA, 25 bp, Homo sapien
tagtgagtactacaagtatgccaga

SEQ ID NO: 2442639 - DNA, 25 bp, Homo sapien
cagcatctgctatcagactcttcaa

SEQ ID NO: 2442640 - DNA, 25 bp, Homo sapien
ctaatattgttaacaggtccgtgaa

SEQ ID NO: 2442641 - DNA, 25 bp, Homo sapien
gaaagagctctaatttgagaaaaat

SEQ ID NO: 2442642 - DNA, 25 bp, Homo sapien
ccgtgaagcattagctgagaaacaa

SEQ ID NO: 2442643 - DNA, 25 bp, Homo sapien
ccatgtcacacaaaatgcgattata

SEQ ID NO: 2442644 - DNA, 25 bp, Homo sapien
cttacttaatgctggcttgtcttca

SEQ ID NO: 2442645 - DNA, 25 bp, Homo sapien
cctctgggtacatagtattgtagtt

SEQ ID NO: 2442646 - DNA, 25 bp, Homo sapien
catcatctcggggatcaacattact

SEQ ID NO: 2442647 - DNA, 25 bp, Homo sapien
acatagtattgtagttgggaagcag

SEQ ID NO: 2442648 - DNA, 25 bp, Homo sapien
gggatactattattggtacaagcca

SEQ ID NO: 2442649 - DNA, 25 bp, Homo sapien
tgtaacacagtatcacaattgggat

SEQ ID NO: 2442650 - DNA, 25 bp, Homo sapien
tacgtttagctgtctatgtctgtgt

SEQ ID NO: 2442651 - DNA, 25 bp, Homo sapien
ttaagatacagaagcttcacagcca

SEQ ID NO: 2442652 - DNA, 25 bp, Homo sapien
gaatctcctgctattaattcctggc

SEQ ID NO: 2442653 - DNA, 25 bp, Homo sapien
gagttttacaaatggcagccagctg

SEQ ID NO: 2442654 - DNA, 25 bp, Homo sapien
gaatactgatgaactggaatgtggc

SEQ ID NO: 2442655 - DNA, 25 bp, Homo sapien
gagaaatctggtaccacatctggag

SEQ ID NO: 2442656 - DNA, 25 bp, Homo sapien
tagtatagccgggtgtcctaaagct

SEQ ID NO: 2442657 - DNA, 25 bp, Homo sapien
tctaaggcatcatgttgttcacgga

SEQ ID NO: 2442658 - DNA, 25 bp, Homo sapien
atgttgttcacggagattaacaggt

SEQ ID NO: 2442659 - DNA, 25 bp, Homo sapien
tcctaggactttacttagtatagcc

SEQ ID NO: 2442660 - DNA, 25 bp, Homo sapien
aaagagtcaagaagattttgatgat

SEQ ID NO: 2442661 - DNA, 25 bp, Homo sapien
cctttgatatactgttccaaagagt

SEQ ID NO: 2442662 - DNA, 25 bp, Homo sapien
gatatgcatttgcaccttccaataa

SEQ ID NO: 2442663 - DNA, 25 bp, Homo sapien
tgatttctaatatccacattcaaag

SEQ ID NO: 2442664 - DNA, 25 bp, Homo sapien
tctctcaatggctggtgacataatg

SEQ ID NO: 2442665 - DNA, 25 bp, Homo sapien
tttgagttggatagcaagaacccga

SEQ ID NO: 2442666 - DNA, 25 bp, Homo sapien
gggtcttgcaatagttagctctgat

SEQ ID NO: 2442667 - DNA, 25 bp, Homo sapien
aattagcaggcgctttactgtgtca

SEQ ID NO: 2442668 - DNA, 25 bp, Homo sapien
ctgtaaggtatcctagaagccaaat

SEQ ID NO: 2442669 - DNA, 25 bp, Homo sapien
gatgccctgtaaggtatcctagaag

SEQ ID NO: 2442670 - DNA, 25 bp, Homo sapien
tgccctgtaaggtatcctagaagcc

SEQ ID NO: 2442671 - DNA, 25 bp, Homo sapien
ccctgtaaggtatcctagaagccaa

SEQ ID NO: 2442672 - DNA, 25 bp, Homo sapien
tggtgtgaaatccagtggtaaagag

SEQ ID NO: 2442673 - DNA, 25 bp, Homo sapien
tgaaatccagtggtaaagaggaatc

SEQ ID NO: 2442674 - DNA, 25 bp, Homo sapien
actggcaggaccacgaactattttc

SEQ ID NO: 2442675 - DNA, 25 bp, Homo sapien
caagctgaatactaatcatagtaat

SEQ ID NO: 2442676 - DNA, 25 bp, Homo sapien
attaggtggatcctaaagtgctagg

SEQ ID NO: 2442677 - DNA, 25 bp, Homo sapien
ctactgaccaagctgaaataaatgt

SEQ ID NO: 2442678 - DNA, 25 bp, Homo sapien
agtcaccacactgaggtaatttaac

SEQ ID NO: 2442679 - DNA, 25 bp, Homo sapien
ccaagtagctggctctacgtgaaca

SEQ ID NO: 2442680 - DNA, 25 bp, Homo sapien
tgaacgtcaaattttagtgatgtgt

SEQ ID NO: 2442681 - DNA, 25 bp, Homo sapien
ctatgaacgtcaaattttagtgatg

SEQ ID NO: 2442682 - DNA, 25 bp, Homo sapien
aacgtcaaattttagtgatgtgttt

SEQ ID NO: 2442683 - DNA, 25 bp, Homo sapien
tatgaacgtcaaattttagtgatgt

SEQ ID NO: 2442684 - DNA, 25 bp, Homo sapien
ctgtgacggagaagaacgcacagtg

SEQ ID NO: 2442685 - DNA, 25 bp, Homo sapien
tgacggagaagaacgcacagtgcat

SEQ ID NO: 2442686 - DNA, 25 bp, Homo sapien
gagaagaacgcacagtgcatcatac

SEQ ID NO: 2442687 - DNA, 25 bp, Homo sapien
cggagaagaacgcacagtgcatcat

SEQ ID NO: 2442688 - DNA, 25 bp, Homo sapien
acttctgcactagggcactccagaa

SEQ ID NO: 2442689 - DNA, 25 bp, Homo sapien
cactagggcactccagaaggtattc

SEQ ID NO: 2442690 - DNA, 25 bp, Homo sapien
tcacttctgcactagggcactccag

SEQ ID NO: 2442691 - DNA, 25 bp, Homo sapien
tctgcactagggcactccagaaggt

SEQ ID NO: 2442692 - DNA, 25 bp, Homo sapien
cctatacggagcaaatctttcagaa

SEQ ID NO: 2442693 - DNA, 25 bp, Homo sapien
ttaaatatagttgctctttgagaga

SEQ ID NO: 2442694 - DNA, 25 bp, Homo sapien
gagaatgaagagctcggctagactt

SEQ ID NO: 2442695 - DNA, 25 bp, Homo sapien
caaaaggttatgttcctatacggag

SEQ ID NO: 2442696 - DNA, 25 bp, Homo sapien
ctcaagagatttagtgtggctctta

SEQ ID NO: 2442697 - DNA, 25 bp, Homo sapien
tttagtgtggctcttagtaagtggt

SEQ ID NO: 2442698 - DNA, 25 bp, Homo sapien
cactcaagctcaagttatcacatgc

SEQ ID NO: 2442699 - DNA, 25 bp, Homo sapien
gtggctcttagtaagtggtcactca

SEQ ID NO: 2442700 - DNA, 25 bp, Homo sapien
gacgtgtggcaaacgcattgtctca

SEQ ID NO: 2442701 - DNA, 25 bp, Homo sapien
tactgggaatctcacacgacgtgtg

SEQ ID NO: 2442702 - DNA, 25 bp, Homo sapien
tgtcaatactaagcctgcatgcacc

SEQ ID NO: 2442703 - DNA, 25 bp, Homo sapien
caatgtgttgtatatgagcagccaa

SEQ ID NO: 2442704 - DNA, 25 bp, Homo sapien
cagctgagacactactgaatataac

SEQ ID NO: 2442705 - DNA, 25 bp, Homo sapien
gactgcattgttgatgacacattgc

SEQ ID NO: 2442706 - DNA, 25 bp, Homo sapien
tgatgacacattgcaacaacgaatc

SEQ ID NO: 2442707 - DNA, 25 bp, Homo sapien
cattgcaacaacgaatcagctgaga

SEQ ID NO: 2442708 - DNA, 25 bp, Homo sapien
caatgaaaaaccaatagaattcctc

SEQ ID NO: 2442709 - DNA, 25 bp, Homo sapien
cacctaaatggtcaggtatatacca

SEQ ID NO: 2442710 - DNA, 25 bp, Homo sapien
gaacataggccttcagactaatttc

SEQ ID NO: 2442711 - DNA, 25 bp, Homo sapien
tttatcaagtgctacataaagctag

SEQ ID NO: 2442712 - DNA, 25 bp, Homo sapien
aaagcgaagtaatttgatggtatcc

SEQ ID NO: 2442713 - DNA, 25 bp, Homo sapien
aatttgatggtatcctctgagttac

SEQ ID NO: 2442714 - DNA, 25 bp, Homo sapien
gattctcccaagagcaaaagcgaag

SEQ ID NO: 2442715 - DNA, 25 bp, Homo sapien
tgataaattaaggtcaccgaaagga

SEQ ID NO: 2442716 - DNA, 25 bp, Homo sapien
tagatctaaatatggccgaagttca

SEQ ID NO: 2442717 - DNA, 25 bp, Homo sapien
ctaaatatggccgaagttcataggt

SEQ ID NO: 2442718 - DNA, 25 bp, Homo sapien
agtagatctaaatatggccgaagtt

SEQ ID NO: 2442719 - DNA, 25 bp, Homo sapien
tggccgaagttcataggtatatgaa

SEQ ID NO: 2442720 - DNA, 25 bp, Homo sapien
cctgaatgaccactgcatagtgaaa

SEQ ID NO: 2442721 - DNA, 25 bp, Homo sapien
aataaatagatcactagcaagacta

SEQ ID NO: 2442722 - DNA, 25 bp, Homo sapien
gaatgaccactgcatagtgaaatga

SEQ ID NO: 2442723 - DNA, 25 bp, Homo sapien
accactgcatagtgaaatgaaggca

SEQ ID NO: 2442724 - DNA, 25 bp, Homo sapien
gcccacggagggtgatccgaagaag

SEQ ID NO: 2442725 - DNA, 25 bp, Homo sapien
cacggagggtgatccgaagaagggc

SEQ ID NO: 2442726 - DNA, 25 bp, Homo sapien
tgatccgaagaagggcagggcgtca

SEQ ID NO: 2442727 - DNA, 25 bp, Homo sapien
gggtgatccgaagaagggcagggcg

SEQ ID NO: 2442728 - DNA, 25 bp, Homo sapien
aacacatacatgacgcataaagcaa

SEQ ID NO: 2442729 - DNA, 25 bp, Homo sapien
taacttgaattctgatactgtgaaa

SEQ ID NO: 2442730 - DNA, 25 bp, Homo sapien
tatggaacaatgatataaattggca

SEQ ID NO: 2442731 - DNA, 25 bp, Homo sapien
accatgtccagttcaccacattact

SEQ ID NO: 2442732 - DNA, 25 bp, Homo sapien
gcactgatatgctcgtttttgatag

SEQ ID NO: 2442733 - DNA, 25 bp, Homo sapien
tattgtatcgaacagcccatctctg

SEQ ID NO: 2442734 - DNA, 25 bp, Homo sapien
ctgtaagatctggtaagcaacagga

SEQ ID NO: 2442735 - DNA, 25 bp, Homo sapien
gtgattcttcgagcgctgtattgta

SEQ ID NO: 2442736 - DNA, 25 bp, Homo sapien
tccttacttgtgacagaggtttcta

SEQ ID NO: 2442737 - DNA, 25 bp, Homo sapien
tttcagtatcagcttaaaatgctaa

SEQ ID NO: 2442738 - DNA, 25 bp, Homo sapien
caaaaatttcacgatcatttcctta

SEQ ID NO: 2442739 - DNA, 25 bp, Homo sapien
tatcagcttaaaatgctaatacaaa

SEQ ID NO: 2442740 - DNA, 25 bp, Homo sapien
caagcttttgcaagtgtcatcctag

SEQ ID NO: 2442741 - DNA, 25 bp, Homo sapien
ctgaggattgccagtatatggtctt

SEQ ID NO: 2442742 - DNA, 25 bp, Homo sapien
agttcacaagcttttgcaagtgtca

SEQ ID NO: 2442743 - DNA, 25 bp, Homo sapien
gtgtcatcctagcactatgtgatct

SEQ ID NO: 2442744 - DNA, 25 bp, Homo sapien
tgctgtccattggtagccttttttt

SEQ ID NO: 2442745 - DNA, 25 bp, Homo sapien
ctgctgtccattggtagcctttttt

SEQ ID NO: 2442746 - DNA, 25 bp, Homo sapien
tcctttgttaacttaagatcaaaca

SEQ ID NO: 2442747 - DNA, 25 bp, Homo sapien
gatcaaacaaatcaagctaaccact

SEQ ID NO: 2442748 - DNA, 25 bp, Homo sapien
tattaataaacatgggcctacacat

SEQ ID NO: 2442749 - DNA, 25 bp, Homo sapien
aggtatgtgatttttagacaatttc

SEQ ID NO: 2442750 - DNA, 25 bp, Homo sapien
ggctcatgctcatctggggcatcct

SEQ ID NO: 2442751 - DNA, 25 bp, Homo sapien
ctgatggagagggctcatgctcatc

SEQ ID NO: 2442752 - DNA, 25 bp, Homo sapien
tgatggagagggctcatgctcatct

SEQ ID NO: 2442753 - DNA, 25 bp, Homo sapien
ccacatttgcggctaatcttcccag

SEQ ID NO: 2442754 - DNA, 25 bp, Homo sapien
agccccacgatagccctgtagagtg

SEQ ID NO: 2442755 - DNA, 25 bp, Homo sapien
aatttctggaccctgcaattgctgt

SEQ ID NO: 2442756 - DNA, 25 bp, Homo sapien
tgatggtgcgttcctatagtccagc

SEQ ID NO: 2442757 - DNA, 25 bp, Homo sapien
catctgaggtgaggatacttcttca

SEQ ID NO: 2442758 - DNA, 25 bp, Homo sapien
tcttgtgttcgttggcctgttttct

SEQ ID NO: 2442759 - DNA, 25 bp, Homo sapien
ttgtgttcgttggcctgttttctga

SEQ ID NO: 2442760 - DNA, 25 bp, Homo sapien
ttcttgtgttcgttggcctgttttc

SEQ ID NO: 2442761 - DNA, 25 bp, Homo sapien
ttttcaatactagccagacacagag

SEQ ID NO: 2442762 - DNA, 25 bp, Homo sapien
cctcttggctacacaaacagtgtga

SEQ ID NO: 2442763 - DNA, 25 bp, Homo sapien
gacatcttggtgcaatggtacttca

SEQ ID NO: 2442764 - DNA, 25 bp, Homo sapien
gatgtacacttcaccgggatcagga

SEQ ID NO: 2442765 - DNA, 25 bp, Homo sapien
tcccaggtgttaggcgcagtgacca

SEQ ID NO: 2442766 - DNA, 25 bp, Homo sapien
cagaggctcgacagacttgacaggg

SEQ ID NO: 2442767 - DNA, 25 bp, Homo sapien
cagtgaccattttacgtgagcgatc

SEQ ID NO: 2442768 - DNA, 25 bp, Homo sapien
gaaagaacaggtccgcagaaggtcc

SEQ ID NO: 2442769 - DNA, 25 bp, Homo sapien
gcgaaaaatcgggtagtccactgta

SEQ ID NO: 2442770 - DNA, 25 bp, Homo sapien
accgaatagcggaactcttacactg

SEQ ID NO: 2442771 - DNA, 25 bp, Homo sapien
ctgaagagaagcgaaaaatcgggta

SEQ ID NO: 2442772 - DNA, 25 bp, Homo sapien
tagtccactgtaggtgtgagaccga

SEQ ID NO: 2442773 - DNA, 25 bp, Homo sapien
tcatttttcaccaccacatgactca

SEQ ID NO: 2442774 - DNA, 25 bp, Homo sapien
gctggtccagttcagggtcattttt

SEQ ID NO: 2442775 - DNA, 25 bp, Homo sapien
tggtccagttcagggtcatttttca

SEQ ID NO: 2442776 - DNA, 25 bp, Homo sapien
ctgctggtccagttcagggtcattt

SEQ ID NO: 2442777 - DNA, 25 bp, Homo sapien
gtctccacgggacaagcaaacacaa

SEQ ID NO: 2442778 - DNA, 25 bp, Homo sapien
aaacgggttcgtggtcgcacatgcg

SEQ ID NO: 2442779 - DNA, 25 bp, Homo sapien
acaaaagccgccattgcgtgaggcc

SEQ ID NO: 2442780 - DNA, 25 bp, Homo sapien
gcgtgaggcccagtactataccaga

SEQ ID NO: 2442781 - DNA, 25 bp, Homo sapien
tccgcttttgcgaaccgcctccctc

SEQ ID NO: 2442782 - DNA, 25 bp, Homo sapien
ccaggtgtctttccgcgggcgtcca

SEQ ID NO: 2442783 - DNA, 25 bp, Homo sapien
cgcgggcgtccaatttccattattt

SEQ ID NO: 2442784 - DNA, 25 bp, Homo sapien
ctttccgcgggcgtccaatttccat

SEQ ID NO: 2442785 - DNA, 25 bp, Homo sapien
tccaggtgtctttccgcgggcgtcc

SEQ ID NO: 2442786 - DNA, 25 bp, Homo sapien
taaaaaccgcacagctctcggctag

SEQ ID NO: 2442787 - DNA, 25 bp, Homo sapien
tgtagcgcaatgctggatctctaac

SEQ ID NO: 2442788 - DNA, 25 bp, Homo sapien
gctaggcggctgtccagtgactgaa

SEQ ID NO: 2442789 - DNA, 25 bp, Homo sapien
tgcatgtatcgcctaaagtaaagat

SEQ ID NO: 2442790 - DNA, 25 bp, Homo sapien
catccaatttagctacagtcatgat

SEQ ID NO: 2442791 - DNA, 25 bp, Homo sapien
caatttctcagtaacttcaacatcc

SEQ ID NO: 2442792 - DNA, 25 bp, Homo sapien
cagtcatgatagtgaaatgttccca

SEQ ID NO: 2442793 - DNA, 25 bp, Homo sapien
cccaatgacagtggttttcttgata

SEQ ID NO: 2442794 - DNA, 25 bp, Homo sapien
tgctcgctgtacttgctcctccact

SEQ ID NO: 2442795 - DNA, 25 bp, Homo sapien
cagagttcaggtccagattagcaag

SEQ ID NO: 2442796 - DNA, 25 bp, Homo sapien
ctcgctgtacttgctcctccactct

SEQ ID NO: 2442797 - DNA, 25 bp, Homo sapien
ttttcagagttcaggtccagattag

SEQ ID NO: 2442798 - DNA, 25 bp, Homo sapien
tagatgcttctctgttccttaagtg

SEQ ID NO: 2442799 - DNA, 25 bp, Homo sapien
tgcttctctgttccttaagtgagga

SEQ ID NO: 2442800 - DNA, 25 bp, Homo sapien
cttaagtgaggaggtatatagcgcc

SEQ ID NO: 2442801 - DNA, 25 bp, Homo sapien
tctgttccttaagtgaggaggtata

SEQ ID NO: 2442802 - DNA, 25 bp, Homo sapien
cagaaagtgctagttcttaaagaca

SEQ ID NO: 2442803 - DNA, 25 bp, Homo sapien
gctgctaaaggttaggtctacaaag

SEQ ID NO: 2442804 - DNA, 25 bp, Homo sapien
catttatagacctcctaaagttact

SEQ ID NO: 2442805 - DNA, 25 bp, Homo sapien
ccctaggctttgattagctgctaaa

SEQ ID NO: 2442806 - DNA, 25 bp, Homo sapien
cttatctttgctgcaactccaacct

SEQ ID NO: 2442807 - DNA, 25 bp, Homo sapien
ccttatctttgctgcaactccaacc

SEQ ID NO: 2442808 - DNA, 25 bp, Homo sapien
tcagaagtacacgatttagcccatg

SEQ ID NO: 2442809 - DNA, 25 bp, Homo sapien
ttagattatcatcgctctagaaacg

SEQ ID NO: 2442810 - DNA, 25 bp, Homo sapien
cacgatttagcccatgttagattat

SEQ ID NO: 2442811 - DNA, 25 bp, Homo sapien
tgaatagcacaagcaatcagaagta

SEQ ID NO: 2442812 - DNA, 25 bp, Homo sapien
tatgtccactccgttcaaatctgcc

SEQ ID NO: 2442813 - DNA, 25 bp, Homo sapien
tctttcacgattgccaataccatca

SEQ ID NO: 2442814 - DNA, 25 bp, Homo sapien
caacgactatgtccactccgttcaa

SEQ ID NO: 2442815 - DNA, 25 bp, Homo sapien
agccaggtctttcacgattgccaat

SEQ ID NO: 2442816 - DNA, 25 bp, Homo sapien
catacatgttatactaagcaataaa

SEQ ID NO: 2442817 - DNA, 25 bp, Homo sapien
acatacatgttatactaagcaataa

SEQ ID NO: 2442818 - DNA, 25 bp, Homo sapien
gcctctactggtatatcatcatatt

SEQ ID NO: 2442819 - DNA, 25 bp, Homo sapien
gccggttgcctctactggtatatca

SEQ ID NO: 2442820 - DNA, 25 bp, Homo sapien
gttactgccggttgcctctactggt

SEQ ID NO: 2442821 - DNA, 25 bp, Homo sapien
atgtggaggacagttactgccggtt

SEQ ID NO: 2442822 - DNA, 25 bp, Homo sapien
cactggagtaggacgagtatagcga

SEQ ID NO: 2442823 - DNA, 25 bp, Homo sapien
taggacgagtatagcgagtaagttc

SEQ ID NO: 2442824 - DNA, 25 bp, Homo sapien
gtttttgcactggagtaggacgagt

SEQ ID NO: 2442825 - DNA, 25 bp, Homo sapien
gcgagtaagttcaatgttccccatg

SEQ ID NO: 2442826 - DNA, 25 bp, Homo sapien
aagtgttctaaatgcccttgaattg

SEQ ID NO: 2442827 - DNA, 25 bp, Homo sapien
atcatttctgaatattaacagatga

SEQ ID NO: 2442828 - DNA, 25 bp, Homo sapien
tatcatttctgaatattaacagatg

SEQ ID NO: 2442829 - DNA, 25 bp, Homo sapien
gaccatctgtatatatctgactcag

SEQ ID NO: 2442830 - DNA, 25 bp, Homo sapien
ctcctggaccatctgtatatatctg

SEQ ID NO: 2442831 - DNA, 25 bp, Homo sapien
ctgtatatatctgactcagtatggg

SEQ ID NO: 2442832 - DNA, 25 bp, Homo sapien
ctgactcagtatgggtaaaagaaat

SEQ ID NO: 2442833 - DNA, 25 bp, Homo sapien
tataatttgcagattacatctacaa

SEQ ID NO: 2442834 - DNA, 25 bp, Homo sapien
tgaaaataaggtgtatctggcatcc

SEQ ID NO: 2442835 - DNA, 25 bp, Homo sapien
tatctggcatccgttagaaaagtca

SEQ ID NO: 2442836 - DNA, 25 bp, Homo sapien
tagaaaagtcaacagggctttgcaa

SEQ ID NO: 2442837 - DNA, 25 bp, Homo sapien
ttgtttgcggcgcccataccttcca

SEQ ID NO: 2442838 - DNA, 25 bp, Homo sapien
tattgtttgcggcgcccataccttc

SEQ ID NO: 2442839 - DNA, 25 bp, Homo sapien
ttgcggcgcccataccttccatttt

SEQ ID NO: 2442840 - DNA, 25 bp, Homo sapien
gtttgcggcgcccataccttccatt

SEQ ID NO: 2442841 - DNA, 25 bp, Homo sapien
gtggcatccacgttctaagtcccga

SEQ ID NO: 2442842 - DNA, 25 bp, Homo sapien
agtggcatccacgttctaagtcccg

SEQ ID NO: 2442843 - DNA, 25 bp, Homo sapien
cgacgtatctgaggttcaaatccca

SEQ ID NO: 2442844 - DNA, 25 bp, Homo sapien
tcttgttcaactatacgacgtatct

SEQ ID NO: 2442845 - DNA, 25 bp, Homo sapien
cactaaacatcatggtgtgacgaac

SEQ ID NO: 2442846 - DNA, 25 bp, Homo sapien
gaacgccctttggtggcatagtatc

SEQ ID NO: 2442847 - DNA, 25 bp, Homo sapien
aatgaccgtttatctaagtcttcca

SEQ ID NO: 2442848 - DNA, 25 bp, Homo sapien
cacctaaaatgtccagtagaaatga

SEQ ID NO: 2442849 - DNA, 25 bp, Homo sapien
ctgttgcacctaaaatgtccagtag

SEQ ID NO: 2442850 - DNA, 25 bp, Homo sapien
tgcacctaaaatgtccagtagaaat

SEQ ID NO: 2442851 - DNA, 25 bp, Homo sapien
tcctgagcgaaactggtgaagggcc

SEQ ID NO: 2442852 - DNA, 25 bp, Homo sapien
tgtgaccggtctccatgaatactag

SEQ ID NO: 2442853 - DNA, 25 bp, Homo sapien
ggtgaagggcctcctctcgatctct

SEQ ID NO: 2442854 - DNA, 25 bp, Homo sapien
tagtacaagcatatccttcatggta

SEQ ID NO: 2442855 - DNA, 25 bp, Homo sapien
cctgtacggccaatacgatgcacat

SEQ ID NO: 2442856 - DNA, 25 bp, Homo sapien
acgtcctgtacggccaatacgatgc

SEQ ID NO: 2442857 - DNA, 25 bp, Homo sapien
tgtacggccaatacgatgcacatat

SEQ ID NO: 2442858 - DNA, 25 bp, Homo sapien
gtcctgtacggccaatacgatgcac

SEQ ID NO: 2442859 - DNA, 25 bp, Homo sapien
acaaatcctttgtaatattcatatt

SEQ ID NO: 2442860 - DNA, 25 bp, Homo sapien
agaagatccaacaaatcctttgtaa

SEQ ID NO: 2442861 - DNA, 25 bp, Homo sapien
ttcattaaagaatgaggtggcaagg

SEQ ID NO: 2442862 - DNA, 25 bp, Homo sapien
ttttcattaaagaatgaggtggcaa

SEQ ID NO: 2442863 - DNA, 25 bp, Homo sapien
aagccatattttccaaccaagaagg

SEQ ID NO: 2442864 - DNA, 25 bp, Homo sapien
tttagatcgtccacgactgccaccc

SEQ ID NO: 2442865 - DNA, 25 bp, Homo sapien
gccatattttccaaccaagaaggca

SEQ ID NO: 2442866 - DNA, 25 bp, Homo sapien
cttttagatcgtccacgactgccac

SEQ ID NO: 2442867 - DNA, 25 bp, Homo sapien
gaaccactactttgtcgatagtctc

SEQ ID NO: 2442868 - DNA, 25 bp, Homo sapien
actgctggaaccactactttgtcga

SEQ ID NO: 2442869 - DNA, 25 bp, Homo sapien
tgctgcttccgcgactagcaccaaa

SEQ ID NO: 2442870 - DNA, 25 bp, Homo sapien
tcctctgctgttgccgtaaccacct

SEQ ID NO: 2442871 - DNA, 25 bp, Homo sapien
actattgtagaagcctccatagcca

SEQ ID NO: 2442872 - DNA, 25 bp, Homo sapien
tcctccatatccatcactattgtag

SEQ ID NO: 2442873 - DNA, 25 bp, Homo sapien
ccctgggagttataatttcctccat

SEQ ID NO: 2442874 - DNA, 25 bp, Homo sapien
atcactattgtagaagcctccatag

SEQ ID NO: 2442875 - DNA, 25 bp, Homo sapien
taatccaaactagagcaattacatc

SEQ ID NO: 2442876 - DNA, 25 bp, Homo sapien
cccttgaattatcaggagaatcaca

SEQ ID NO: 2442877 - DNA, 25 bp, Homo sapien
tttgtaagggtgactttgctgcaaa

SEQ ID NO: 2442878 - DNA, 25 bp, Homo sapien
gtgactttgagctcccttgaattat

SEQ ID NO: 2442879 - DNA, 25 bp, Homo sapien
taaagagtgtaagttcccaagtgcc

SEQ ID NO: 2442880 - DNA, 25 bp, Homo sapien
taaacctttcttgtgatagcatgcc

SEQ ID NO: 2442881 - DNA, 25 bp, Homo sapien
taaacagagcacatgcagtgccagc

SEQ ID NO: 2442882 - DNA, 25 bp, Homo sapien
taagattggaaggtcgaggacaccc

SEQ ID NO: 2442883 - DNA, 25 bp, Homo sapien
tgagaccttagaaagaccaggctgg

SEQ ID NO: 2442884 - DNA, 25 bp, Homo sapien
tggaagaagaccatactccatggca

SEQ ID NO: 2442885 - DNA, 25 bp, Homo sapien
ctaaaccctcaacccatggaagaag

SEQ ID NO: 2442886 - DNA, 25 bp, Homo sapien
cataaacaggcctagggaactcaaa

SEQ ID NO: 2442887 - DNA, 25 bp, Homo sapien
agatatggcatctgcaatacttggc

SEQ ID NO: 2442888 - DNA, 25 bp, Homo sapien
tgctgtcttgtaacaggtctgctta

SEQ ID NO: 2442889 - DNA, 25 bp, Homo sapien
tggctgtgctgtcttgtaacaggtc

SEQ ID NO: 2442890 - DNA, 25 bp, Homo sapien
ccacagatatggcatctgcaatact

SEQ ID NO: 2442891 - DNA, 25 bp, Homo sapien
cgcagtcgcagtaagttcccccaaa

SEQ ID NO: 2442892 - DNA, 25 bp, Homo sapien
cagtcgcagtaagttcccccaaaag

SEQ ID NO: 2442893 - DNA, 25 bp, Homo sapien
ggttaggcacgctgcacacgcagtc

SEQ ID NO: 2442894 - DNA, 25 bp, Homo sapien
ctgcacacgcagtcgcagtaagttc

SEQ ID NO: 2442895 - DNA, 25 bp, Homo sapien
ctatccaaatttgagtctgacattt

SEQ ID NO: 2442896 - DNA, 25 bp, Homo sapien
tgagtctgacattttcagcaacacc

SEQ ID NO: 2442897 - DNA, 25 bp, Homo sapien
tttgagtctgacattttcagcaaca

SEQ ID NO: 2442898 - DNA, 25 bp, Homo sapien
aatttgagtctgacattttcagcaa

SEQ ID NO: 2442899 - DNA, 25 bp, Homo sapien
atggagcctcagactaacttctgtt

SEQ ID NO: 2442900 - DNA, 25 bp, Homo sapien
gtgctctctcggttactgccttgcg

SEQ ID NO: 2442901 - DNA, 25 bp, Homo sapien
tttctgaagccgtgctctctcggtt

SEQ ID NO: 2442902 - DNA, 25 bp, Homo sapien
ttgttgacagcaatcccacaaaggg

SEQ ID NO: 2442903 - DNA, 25 bp, Homo sapien
ggagatcactgacccctgaccttgt

SEQ ID NO: 2442904 - DNA, 25 bp, Homo sapien
tacctggtatgaacatggatccctg

SEQ ID NO: 2442905 - DNA, 25 bp, Homo sapien
ccttgttggaaagtctctcagcacc

SEQ ID NO: 2442906 - DNA, 25 bp, Homo sapien
gaattacagagatacctggtatgaa

SEQ ID NO: 2442907 - DNA, 25 bp, Homo sapien
aaacaagcaataagggaagtatgcc

SEQ ID NO: 2442908 - DNA, 25 bp, Homo sapien
taagggaagtatgccctatttaata

SEQ ID NO: 2442909 - DNA, 25 bp, Homo sapien
atgaatgaaaccgaacagaagcctc

SEQ ID NO: 2442910 - DNA, 25 bp, Homo sapien
tgaatgaaaccgaacagaagcctca

SEQ ID NO: 2442911 - DNA, 25 bp, Homo sapien
atccctgggccccatagctcccgca

SEQ ID NO: 2442912 - DNA, 25 bp, Homo sapien
gaagcactacttcaaacacaatccc

SEQ ID NO: 2442913 - DNA, 25 bp, Homo sapien
gttggtagaagcactacttcaaaca

SEQ ID NO: 2442914 - DNA, 25 bp, Homo sapien
gcactacttcaaacacaatccctgg

SEQ ID NO: 2442915 - DNA, 25 bp, Homo sapien
gtgaaaaaatggtaatgtggcggtc

SEQ ID NO: 2442916 - DNA, 25 bp, Homo sapien
gaaaaaatggtaatgtggcggtcaa

SEQ ID NO: 2442917 - DNA, 25 bp, Homo sapien
tgaaaaaatggtaatgtggcggtca

SEQ ID NO: 2442918 - DNA, 25 bp, Homo sapien
agctactgatgtaaggccaccctgg

SEQ ID NO: 2442919 - DNA, 25 bp, Homo sapien
ctactgatgtaaggccaccctggtt

SEQ ID NO: 2442920 - DNA, 25 bp, Homo sapien
gctactgatgtaaggccaccctggt

SEQ ID NO: 2442921 - DNA, 25 bp, Homo sapien
ctgtgggacaattactacacagtct

SEQ ID NO: 2442922 - DNA, 25 bp, Homo sapien
gacaattactacacagtcttaacct

SEQ ID NO: 2442923 - DNA, 25 bp, Homo sapien
gtgggacaattactacacagtctta

SEQ ID NO: 2442924 - DNA, 25 bp, Homo sapien
gggacaattactacacagtcttaac

SEQ ID NO: 2442925 - DNA, 25 bp, Homo sapien
ggcatcacggatctggtaaactaac

SEQ ID NO: 2442926 - DNA, 25 bp, Homo sapien
taggattttcaactgtcactactcc

SEQ ID NO: 2442927 - DNA, 25 bp, Homo sapien
tgccctctgtacctgggatctgctg

SEQ ID NO: 2442928 - DNA, 25 bp, Homo sapien
aatatcggcaattcttttacacagc

SEQ ID NO: 2442929 - DNA, 25 bp, Homo sapien
tatatagagtcctaaccacttcggt

SEQ ID NO: 2442930 - DNA, 25 bp, Homo sapien
tttatatagagtcctaaccacttcg

SEQ ID NO: 2442931 - DNA, 25 bp, Homo sapien
agagtcctaaccacttcggtggtag

SEQ ID NO: 2442932 - DNA, 25 bp, Homo sapien
tatagagtcctaaccacttcggtgg

SEQ ID NO: 2442933 - DNA, 25 bp, Homo sapien
atctgctgcaactgtcaacccgtca

SEQ ID NO: 2442934 - DNA, 25 bp, Homo sapien
ccgtcaccctggtattaagcctagc

SEQ ID NO: 2442935 - DNA, 25 bp, Homo sapien
tattttatgttagttcttgagtaca

SEQ ID NO: 2442936 - DNA, 25 bp, Homo sapien
tggtgatctgctgcaactgtcaacc

SEQ ID NO: 2442937 - DNA, 25 bp, Homo sapien
gaagtttaagaaatcatggccgaat

SEQ ID NO: 2442938 - DNA, 25 bp, Homo sapien
gctcaatggtcttggcagtctcgtc

SEQ ID NO: 2442939 - DNA, 25 bp, Homo sapien
ttgttcagaagactgacctttctcc

SEQ ID NO: 2442940 - DNA, 25 bp, Homo sapien
ggccgaataccatgtcacagcattt

SEQ ID NO: 2442941 - DNA, 25 bp, Homo sapien
tctgtataaagatagtccttagtgc

SEQ ID NO: 2442942 - DNA, 25 bp, Homo sapien
tgttgataaacatagtatcaagcac

SEQ ID NO: 2442943 - DNA, 25 bp, Homo sapien
gcatggtcagatcacttacggtcag

SEQ ID NO: 2442944 - DNA, 25 bp, Homo sapien
tagtatcaagcacactccttctcac

SEQ ID NO: 2442945 - DNA, 25 bp, Homo sapien
gaatagttgacggaattgagaacaa

SEQ ID NO: 2442946 - DNA, 25 bp, Homo sapien
tcagaaagatttgtagtaatttcca

SEQ ID NO: 2442947 - DNA, 25 bp, Homo sapien
ctttctaatcttttccgttcattca

SEQ ID NO: 2442948 - DNA, 25 bp, Homo sapien
ttgagaacaaaaggattatgcactt

SEQ ID NO: 2442949 - DNA, 25 bp, Homo sapien
gggaatcttccccatcattgactaa

SEQ ID NO: 2442950 - DNA, 25 bp, Homo sapien
gcacactggctctctggcttaattt

SEQ ID NO: 2442951 - DNA, 25 bp, Homo sapien
tagattgttcctatctttcagggaa

SEQ ID NO: 2442952 - DNA, 25 bp, Homo sapien
gccggtgtatctgctcttagcgtca

SEQ ID NO: 2442953 - DNA, 25 bp, Homo sapien
taagaacataaaatgggtgcttccc

SEQ ID NO: 2442954 - DNA, 25 bp, Homo sapien
gctaactgagattccagccattcat

SEQ ID NO: 2442955 - DNA, 25 bp, Homo sapien
tctgtcctggtacatagagtataag

SEQ ID NO: 2442956 - DNA, 25 bp, Homo sapien
tgttacctgttgtactgacagccac

SEQ ID NO: 2442957 - DNA, 25 bp, Homo sapien
ttagtacaagtaaactcaggcagtg

SEQ ID NO: 2442958 - DNA, 25 bp, Homo sapien
caaagttgctgcgattaccccttct

SEQ ID NO: 2442959 - DNA, 25 bp, Homo sapien
tgaagtcctgttttccggatactgc

SEQ ID NO: 2442960 - DNA, 25 bp, Homo sapien
catgctgccattacttgaagtcctg

SEQ ID NO: 2442961 - DNA, 25 bp, Homo sapien
gcccagccagtatttattttggctc

SEQ ID NO: 2442962 - DNA, 25 bp, Homo sapien
agtatttattttggctctgctccat

SEQ ID NO: 2442963 - DNA, 25 bp, Homo sapien
cgcccagccagtatttattttggct

SEQ ID NO: 2442964 - DNA, 25 bp, Homo sapien
gccagtatttattttggctctgctc

SEQ ID NO: 2442965 - DNA, 25 bp, Homo sapien
ggcactcaccaatctgtcgctgtcg

SEQ ID NO: 2442966 - DNA, 25 bp, Homo sapien
ttggctggcgatactctccgggaag

SEQ ID NO: 2442967 - DNA, 25 bp, Homo sapien
tccgggaaggcctggacgcagcttg

SEQ ID NO: 2442968 - DNA, 25 bp, Homo sapien
tgatgacggggtcatcctcagcttg

SEQ ID NO: 2442969 - DNA, 25 bp, Homo sapien
tatcgtcgtgggacttggaaatttg

SEQ ID NO: 2442970 - DNA, 25 bp, Homo sapien
gaaggcgtcttttcaactactcgat

SEQ ID NO: 2442971 - DNA, 25 bp, Homo sapien
tactcgattaaggttgggtatcgtc

SEQ ID NO: 2442972 - DNA, 25 bp, Homo sapien
gaaatcctgcgcagtgtcgctcact

SEQ ID NO: 2442973 - DNA, 25 bp, Homo sapien
gcagttgccacgttgattccctagg

SEQ ID NO: 2442974 - DNA, 25 bp, Homo sapien
caaagaaccagcctatggaggtgac

SEQ ID NO: 2442975 - DNA, 25 bp, Homo sapien
gacagtgggagcctcattacggact

SEQ ID NO: 2442976 - DNA, 25 bp, Homo sapien
tagggcctggcttaccgactgaggt

SEQ ID NO: 2442977 - DNA, 25 bp, Homo sapien
gttccttctgatgtcgctctttcct

SEQ ID NO: 2442978 - DNA, 25 bp, Homo sapien
ttccttctgatgtcgctctttcctt

SEQ ID NO: 2442979 - DNA, 25 bp, Homo sapien
catgggctatgagattcagctgctc

SEQ ID NO: 2442980 - DNA, 25 bp, Homo sapien
tgtcagaaagccagcccgttggaaa

SEQ ID NO: 2442981 - DNA, 25 bp, Homo sapien
ccgttggaaactccatgggctatga

SEQ ID NO: 2442982 - DNA, 25 bp, Homo sapien
aagccagcccgttggaaactccatg

SEQ ID NO: 2442983 - DNA, 25 bp, Homo sapien
aatgaactggttaaggattttactg

SEQ ID NO: 2442984 - DNA, 25 bp, Homo sapien
tggtgtcatacaggcagagtttgtg

SEQ ID NO: 2442985 - DNA, 25 bp, Homo sapien
tttaatttcagggaactaactgtga

SEQ ID NO: 2442986 - DNA, 25 bp, Homo sapien
gacatctgaagcaccaactacttgt

SEQ ID NO: 2442987 - DNA, 25 bp, Homo sapien
gataggtctgtcaaaaccagactca

SEQ ID NO: 2442988 - DNA, 25 bp, Homo sapien
taaaagagtgtccaagagataagct

SEQ ID NO: 2442989 - DNA, 25 bp, Homo sapien
gctttagcatttgccctgtccagtg

SEQ ID NO: 2442990 - DNA, 25 bp, Homo sapien
gataagctagaagtagatctgcaga

SEQ ID NO: 2442991 - DNA, 25 bp, Homo sapien
taaaggactgccctcccatagtccg

SEQ ID NO: 2442992 - DNA, 25 bp, Homo sapien
tggtgctccacagttccataaagga

SEQ ID NO: 2442993 - DNA, 25 bp, Homo sapien
taactaactgttcctggtgcatggt

SEQ ID NO: 2442994 - DNA, 25 bp, Homo sapien
cacatcttagggtcaagggcttcat

SEQ ID NO: 2442995 - DNA, 25 bp, Homo sapien
cttccaaacagaataatctaccagc

SEQ ID NO: 2442996 - DNA, 25 bp, Homo sapien
gaataatctaccagcaacaatggct

SEQ ID NO: 2442997 - DNA, 25 bp, Homo sapien
tctaccagcaacaatggctgccttt

SEQ ID NO: 2442998 - DNA, 25 bp, Homo sapien
tcttgtgcattgcttgacacttgcc

SEQ ID NO: 2442999 - DNA, 25 bp, Homo sapien
cagatggttgcactgtactactgca

SEQ ID NO: 2443000 - DNA, 25 bp, Homo sapien
gtccccactgatattgatagtgacc

SEQ ID NO: 2443001 - DNA, 25 bp, Homo sapien
agacacgtcccagtcagggtcctgc

SEQ ID NO: 2443002 - DNA, 25 bp, Homo sapien
gggtcctgcctagaaaaataccata

SEQ ID NO: 2443003 - DNA, 25 bp, Homo sapien
gggttgaggtagcttgcattcccct

SEQ ID NO: 2443004 - DNA, 25 bp, Homo sapien
ctagtgacaacgtacacttttggcc

SEQ ID NO: 2443005 - DNA, 25 bp, Homo sapien
tactggctatgtaagagggcaaggc

SEQ ID NO: 2443006 - DNA, 25 bp, Homo sapien
gagaagatgtggtctactggctatg

SEQ ID NO: 2443007 - DNA, 25 bp, Homo sapien
tccctaaaggagacggtcgaatgca

SEQ ID NO: 2443008 - DNA, 25 bp, Homo sapien
gattgggcttgacctgccaactggt

SEQ ID NO: 2443009 - DNA, 25 bp, Homo sapien
caccgataggcaggtgggaacaaag

SEQ ID NO: 2443010 - DNA, 25 bp, Homo sapien
ttccactgtgcggagacaccgatag

SEQ ID NO: 2443011 - DNA, 25 bp, Homo sapien
caccgttcccgcagattctgcgatt

SEQ ID NO: 2443012 - DNA, 25 bp, Homo sapien
ctacaccgttcccgcagattctgcg

SEQ ID NO: 2443013 - DNA, 25 bp, Homo sapien
accgttcccgcagattctgcgattc

SEQ ID NO: 2443014 - DNA, 25 bp, Homo sapien
acaccgttcccgcagattctgcgat

SEQ ID NO: 2443015 - DNA, 25 bp, Homo sapien
tgcgtgcaccgaatgtcacctgtct

SEQ ID NO: 2443016 - DNA, 25 bp, Homo sapien
ggcttttcgcccgttcagcctgcag

SEQ ID NO: 2443017 - DNA, 25 bp, Homo sapien
ggtggcttttcgcccgttcagcctg

SEQ ID NO: 2443018 - DNA, 25 bp, Homo sapien
ctgttcgtgcgtgcaccgaatgtca

SEQ ID NO: 2443019 - DNA, 25 bp, Homo sapien
agagtcacagacttccccgtttctt

SEQ ID NO: 2443020 - DNA, 25 bp, Homo sapien
cttccccgtttcttcaattgcttga

SEQ ID NO: 2443021 - DNA, 25 bp, Homo sapien
ttccccgtttcttcaattgcttgac

SEQ ID NO: 2443022 - DNA, 25 bp, Homo sapien
tagagtcacagacttccccgtttct

SEQ ID NO: 2443023 - DNA, 25 bp, Homo sapien
gcgttcaagtggttaaaatcgggca

SEQ ID NO: 2443024 - DNA, 25 bp, Homo sapien
atggagcccaggtcgcaaaagcact

SEQ ID NO: 2443025 - DNA, 25 bp, Homo sapien
tgcaaacaacgcaggcctggtcctg

SEQ ID NO: 2443026 - DNA, 25 bp, Homo sapien
tctagtcttctcacgtaggcggagg

SEQ ID NO: 2443027 - DNA, 25 bp, Homo sapien
cacagaaaaagaggcgacacctttc

SEQ ID NO: 2443028 - DNA, 25 bp, Homo sapien
ctttccacagaaaaagaggcgacac

SEQ ID NO: 2443029 - DNA, 25 bp, Homo sapien
tttccacagaaaaagaggcgacacc

SEQ ID NO: 2443030 - DNA, 25 bp, Homo sapien
tccacagaaaaagaggcgacacctt

SEQ ID NO: 2443031 - DNA, 25 bp, Homo sapien
gaggaagccgtagggagcaatccaa

SEQ ID NO: 2443032 - DNA, 25 bp, Homo sapien
gtcccctgctgtttcgcgctcatga

SEQ ID NO: 2443033 - DNA, 25 bp, Homo sapien
agtgagcgtgagaaacagccacctg

SEQ ID NO: 2443034 - DNA, 25 bp, Homo sapien
acccgcaacctgagaaagcccttct

SEQ ID NO: 2443035 - DNA, 25 bp, Homo sapien
ctttggaagacaatggattcttctc

SEQ ID NO: 2443036 - DNA, 25 bp, Homo sapien
agacaatggattcttctcttgcgtt

SEQ ID NO: 2443037 - DNA, 25 bp, Homo sapien
tttctttggaagacaatggattctt

SEQ ID NO: 2443038 - DNA, 25 bp, Homo sapien
ggaagacaatggattcttctcttgc

SEQ ID NO: 2443039 - DNA, 25 bp, Homo sapien
cgcctgcttgcctctcctgttcgat

SEQ ID NO: 2443040 - DNA, 25 bp, Homo sapien
aagattcgcctgcttgcctctcctg

SEQ ID NO: 2443041 - DNA, 25 bp, Homo sapien
ttaagattcgcctgcttgcctctcc

SEQ ID NO: 2443042 - DNA, 25 bp, Homo sapien
cctgcttgcctctcctgttcgatag

SEQ ID NO: 2443043 - DNA, 25 bp, Homo sapien
gggcacgccactttgcaaacgttta

SEQ ID NO: 2443044 - DNA, 25 bp, Homo sapien
tattctttgcctgtgaggccaaggg

SEQ ID NO: 2443045 - DNA, 25 bp, Homo sapien
ttttagattctgcaggacacttggc

SEQ ID NO: 2443046 - DNA, 25 bp, Homo sapien
tacagtagatattggtggcacatgc

SEQ ID NO: 2443047 - DNA, 25 bp, Homo sapien
aactcatcactatcacaaaagcagc

SEQ ID NO: 2443048 - DNA, 25 bp, Homo sapien
atgatccaatcgccttcctctcttg

SEQ ID NO: 2443049 - DNA, 25 bp, Homo sapien
tacacggggattacaaattgagatg

SEQ ID NO: 2443050 - DNA, 25 bp, Homo sapien
aagcagcatgagagaaaccacccca

SEQ ID NO: 2443051 - DNA, 25 bp, Homo sapien
aagtattttcagagttgtgcctcca

SEQ ID NO: 2443052 - DNA, 25 bp, Homo sapien
tacaatttgaccattcaagtgcaca

SEQ ID NO: 2443053 - DNA, 25 bp, Homo sapien
aaactgacccctttagctttcatct

SEQ ID NO: 2443054 - DNA, 25 bp, Homo sapien
tctgtcctaatttacttgccaagcc

SEQ ID NO: 2443055 - DNA, 25 bp, Homo sapien
tatgtgaaggatgacgtcttcaggg

SEQ ID NO: 2443056 - DNA, 25 bp, Homo sapien
ctgaagtgaatgattagaagttaat

SEQ ID NO: 2443057 - DNA, 25 bp, Homo sapien
acaggctcttacagcagattcagga

SEQ ID NO: 2443058 - DNA, 25 bp, Homo sapien
ttataaacaggctcttacagcagat

SEQ ID NO: 2443059 - DNA, 25 bp, Homo sapien
cagcctgtccctgctcaatattcag

SEQ ID NO: 2443060 - DNA, 25 bp, Homo sapien
catccaaatcccataacttcagcag

SEQ ID NO: 2443061 - DNA, 25 bp, Homo sapien
gcctgtccctgctcaatattcagca

SEQ ID NO: 2443062 - DNA, 25 bp, Homo sapien
tacatccaaatcccataacttcagc

SEQ ID NO: 2443063 - DNA, 25 bp, Homo sapien
agaatcaaagggcaagttggacaag

SEQ ID NO: 2443064 - DNA, 25 bp, Homo sapien
ttcgtcaccgttcttgaaataattc

SEQ ID NO: 2443065 - DNA, 25 bp, Homo sapien
gcatccttctggattcgtcaccgtt

SEQ ID NO: 2443066 - DNA, 25 bp, Homo sapien
gttcctaaacagcacatatgcctag

SEQ ID NO: 2443067 - DNA, 25 bp, Homo sapien
gattggcaagcttaggcacctggag

SEQ ID NO: 2443068 - DNA, 25 bp, Homo sapien
agccgcaacgaccacgccggaaagt

SEQ ID NO: 2443069 - DNA, 25 bp, Homo sapien
ggaaagtttgatacttcaaatccag

SEQ ID NO: 2443070 - DNA, 25 bp, Homo sapien
accatggctgccgatcggatgcgag

SEQ ID NO: 2443071 - DNA, 25 bp, Homo sapien
ctttgcgggagtcgacacccgcctg

SEQ ID NO: 2443072 - DNA, 25 bp, Homo sapien
ccgcctggaatctcgggcactcaat

SEQ ID NO: 2443073 - DNA, 25 bp, Homo sapien
aattcccgggaaacagctacatcca

SEQ ID NO: 2443074 - DNA, 25 bp, Homo sapien
ggactttgcgggagtcgacacccgc

SEQ ID NO: 2443075 - DNA, 25 bp, Homo sapien
cccagaatttccctgaggcgagacg

SEQ ID NO: 2443076 - DNA, 25 bp, Homo sapien
ccctgaggcgagacggtggaaactt

SEQ ID NO: 2443077 - DNA, 25 bp, Homo sapien
tttccctgaggcgagacggtggaaa

SEQ ID NO: 2443078 - DNA, 25 bp, Homo sapien
agaatttccctgaggcgagacggtg

SEQ ID NO: 2443079 - DNA, 25 bp, Homo sapien
ggatgtctgggtaatttcaccacag

SEQ ID NO: 2443080 - DNA, 25 bp, Homo sapien
cctgaagactcaggaggagtgcaga

SEQ ID NO: 2443081 - DNA, 25 bp, Homo sapien
gagcactgggtcttccattccctga

SEQ ID NO: 2443082 - DNA, 25 bp, Homo sapien
atttcaccacagaagtgagcactgg

SEQ ID NO: 2443083 - DNA, 25 bp, Homo sapien
taaacatggcctgaaactgtgcaag

SEQ ID NO: 2443084 - DNA, 25 bp, Homo sapien
ctgaaactgtgcaagagaagatgga

SEQ ID NO: 2443085 - DNA, 25 bp, Homo sapien
ggaggccaggcaatcttctcccatc

SEQ ID NO: 2443086 - DNA, 25 bp, Homo sapien
gatgggctcatttgcaggagttgga

SEQ ID NO: 2443087 - DNA, 25 bp, Homo sapien
gccacaggattgaaggtgtttagca

SEQ ID NO: 2443088 - DNA, 25 bp, Homo sapien
ccacaggattgaaggtgtttagcat

SEQ ID NO: 2443089 - DNA, 25 bp, Homo sapien
gagccacaggattgaaggtgtttag

SEQ ID NO: 2443090 - DNA, 25 bp, Homo sapien
ctgagccacaggattgaaggtgttt

SEQ ID NO: 2443091 - DNA, 25 bp, Homo sapien
ctcttggcttacagttggacacaac

SEQ ID NO: 2443092 - DNA, 25 bp, Homo sapien
ctgcctccagaagccaataagtgag

SEQ ID NO: 2443093 - DNA, 25 bp, Homo sapien
gaagccaataagtgagtaagaaggg

SEQ ID NO: 2443094 - DNA, 25 bp, Homo sapien
aaaaggaggctgttcgtctcttggc

SEQ ID NO: 2443095 - DNA, 25 bp, Homo sapien
cttcttccataacaccagcaacatt

SEQ ID NO: 2443096 - DNA, 25 bp, Homo sapien
ttcttccataacaccagcaacattt

SEQ ID NO: 2443097 - DNA, 25 bp, Homo sapien
ccttcttccataacaccagcaacat

SEQ ID NO: 2443098 - DNA, 25 bp, Homo sapien
agccaaataagaggctctgttctga

SEQ ID NO: 2443099 - DNA, 25 bp, Homo sapien
gccagcatgtctgtagagccaaata

SEQ ID NO: 2443100 - DNA, 25 bp, Homo sapien
tgagtaaattgcatggcatcccaga

SEQ ID NO: 2443101 - DNA, 25 bp, Homo sapien
gcatcccagaaaactctttgaagca

SEQ ID NO: 2443102 - DNA, 25 bp, Homo sapien
gataccgtattattacaactcagag

SEQ ID NO: 2443103 - DNA, 25 bp, Homo sapien
aactcagagaaggtctttgagggcc

SEQ ID NO: 2443104 - DNA, 25 bp, Homo sapien
taaacggtagcattctgactcagat

SEQ ID NO: 2443105 - DNA, 25 bp, Homo sapien
tctttgagggccattcaatccatct

SEQ ID NO: 2443106 - DNA, 25 bp, Homo sapien
tcacttgtgattctggcaccaaagc

SEQ ID NO: 2443107 - DNA, 25 bp, Homo sapien
cttagaacatcacttgtgattctgg

SEQ ID NO: 2443108 - DNA, 25 bp, Homo sapien
acatcacttgtgattctggcaccaa

SEQ ID NO: 2443109 - DNA, 25 bp, Homo sapien
gaacatcacttgtgattctggcacc

SEQ ID NO: 2443110 - DNA, 25 bp, Homo sapien
taaaggtacacgaatgctctaacgg

SEQ ID NO: 2443111 - DNA, 25 bp, Homo sapien
tatcactttatcactagggactagg

SEQ ID NO: 2443112 - DNA, 25 bp, Homo sapien
tgatctcagtggtctgtatcaccca

SEQ ID NO: 2443113 - DNA, 25 bp, Homo sapien
acacaaatgaaagcgctgaacagcc

SEQ ID NO: 2443114 - DNA, 25 bp, Homo sapien
gagaagcagagcgtctaagaccttg

SEQ ID NO: 2443115 - DNA, 25 bp, Homo sapien
gacaaggagcaacgaaggaggattt

SEQ ID NO: 2443116 - DNA, 25 bp, Homo sapien
gaggctctcacagttctccctgcaa

SEQ ID NO: 2443117 - DNA, 25 bp, Homo sapien
gatgaatctctgaatggacagctga

SEQ ID NO: 2443118 - DNA, 25 bp, Homo sapien
cacttttctcacctggaatatagag

SEQ ID NO: 2443119 - DNA, 25 bp, Homo sapien
gatggaacctgtctatggcaaagaa

SEQ ID NO: 2443120 - DNA, 25 bp, Homo sapien
caaaccatttgtcgatcagggagta

SEQ ID NO: 2443121 - DNA, 25 bp, Homo sapien
tcagggagtactccacaaacagctg

SEQ ID NO: 2443122 - DNA, 25 bp, Homo sapien
ttatctaagaaaggcatggaaacca

SEQ ID NO: 2443123 - DNA, 25 bp, Homo sapien
tcctccatggtagtgtgcaaagata

SEQ ID NO: 2443124 - DNA, 25 bp, Homo sapien
gaaaacagcggactctgttgcaggt

SEQ ID NO: 2443125 - DNA, 25 bp, Homo sapien
gcaaagatagtccactcaggtgcat

SEQ ID NO: 2443126 - DNA, 25 bp, Homo sapien
gataatggcttaggtttgttggtgc

SEQ ID NO: 2443127 - DNA, 25 bp, Homo sapien
tggacatcgtctttgggataatggc

SEQ ID NO: 2443128 - DNA, 25 bp, Homo sapien
ataatggcttaggtttgttggtgcc

SEQ ID NO: 2443129 - DNA, 25 bp, Homo sapien
gacttagtttgcatcatatataatg

SEQ ID NO: 2443130 - DNA, 25 bp, Homo sapien
gcttggtaacttggaaatcacaaag

SEQ ID NO: 2443131 - DNA, 25 bp, Homo sapien
tatataatgaaatcaactcagttca

SEQ ID NO: 2443132 - DNA, 25 bp, Homo sapien
tcactggccactgcctcagggctga

SEQ ID NO: 2443133 - DNA, 25 bp, Homo sapien
ggtccacacccattcaaagaacatt

SEQ ID NO: 2443134 - DNA, 25 bp, Homo sapien
tgataggtgggtccacacccattca

SEQ ID NO: 2443135 - DNA, 25 bp, Homo sapien
taggtgggtccacacccattcaaag

SEQ ID NO: 2443136 - DNA, 25 bp, Homo sapien
ggtgggtccacacccattcaaagaa

SEQ ID NO: 2443137 - DNA, 25 bp, Homo sapien
acacagatttctgtggcactgcatg

SEQ ID NO: 2443138 - DNA, 25 bp, Homo sapien
cttccctaggcacacacagatttct

SEQ ID NO: 2443139 - DNA, 25 bp, Homo sapien
ttctgtggcactgcatgtctcttca

SEQ ID NO: 2443140 - DNA, 25 bp, Homo sapien
cacccttccctaggcacacacagat

SEQ ID NO: 2443141 - DNA, 25 bp, Homo sapien
ttcacctcgcaaagccaagcgatgg

SEQ ID NO: 2443142 - DNA, 25 bp, Homo sapien
aatggcaacagggacttcaagtggc

SEQ ID NO: 2443143 - DNA, 25 bp, Homo sapien
tgactgcgcacaggttttcacctcg

SEQ ID NO: 2443144 - DNA, 25 bp, Homo sapien
caagcgatgggttggaatggacata

SEQ ID NO: 2443145 - DNA, 25 bp, Homo sapien
taggcatagcctgcaacagtttcag

SEQ ID NO: 2443146 - DNA, 25 bp, Homo sapien
ttaggcatagcctgcaacagtttca

SEQ ID NO: 2443147 - DNA, 25 bp, Homo sapien
cacactatgagatcactataaagca

SEQ ID NO: 2443148 - DNA, 25 bp, Homo sapien
ctaaggtcattataacatggtttcc

SEQ ID NO: 2443149 - DNA, 25 bp, Homo sapien
cttgaggttaacatggaattcacac

SEQ ID NO: 2443150 - DNA, 25 bp, Homo sapien
ggtaatctctacacagtcatttcat

SEQ ID NO: 2443151 - DNA, 25 bp, Homo sapien
gacggcaattctgtaaattgtaacc

SEQ ID NO: 2443152 - DNA, 25 bp, Homo sapien
ctccagctgtccagacggcaattct

SEQ ID NO: 2443153 - DNA, 25 bp, Homo sapien
tgtccagacggcaattctgtaaatt

SEQ ID NO: 2443154 - DNA, 25 bp, Homo sapien
ttctgtaaattgtaacccttctctg

SEQ ID NO: 2443155 - DNA, 25 bp, Homo sapien
atatggaatttggaggaccacttac

SEQ ID NO: 2443156 - DNA, 25 bp, Homo sapien
aggctcaataggaatatggaatttg

SEQ ID NO: 2443157 - DNA, 25 bp, Homo sapien
tgtctgccaatgagtgacattgtct

SEQ ID NO: 2443158 - DNA, 25 bp, Homo sapien
ccactgtctgccaatgagtgacatt

SEQ ID NO: 2443159 - DNA, 25 bp, Homo sapien
tgggtgggataaaggaataaaggca

SEQ ID NO: 2443160 - DNA, 25 bp, Homo sapien
taattggctttgagtttggctgagg

SEQ ID NO: 2443161 - DNA, 25 bp, Homo sapien
cataaagtttcatttcccttactct

SEQ ID NO: 2443162 - DNA, 25 bp, Homo sapien
taaaattatctaccttctatgtata

SEQ ID NO: 2443163 - DNA, 25 bp, Homo sapien
accaggtgctgaactcaacttgctc

SEQ ID NO: 2443164 - DNA, 25 bp, Homo sapien
ccaggtgctgaactcaacttgctct

SEQ ID NO: 2443165 - DNA, 25 bp, Homo sapien
caccaggtgctgaactcaacttgct

SEQ ID NO: 2443166 - DNA, 25 bp, Homo sapien
acaccaggtgctgaactcaacttgc

SEQ ID NO: 2443167 - DNA, 25 bp, Homo sapien
tcgagttccatgcacattcacagca

SEQ ID NO: 2443168 - DNA, 25 bp, Homo sapien
cgagttccatgcacattcacagcag

SEQ ID NO: 2443169 - DNA, 25 bp, Homo sapien
tgaaggaagagcatatccccggtcc

SEQ ID NO: 2443170 - DNA, 25 bp, Homo sapien
tgaggtgccacgatcaggaaacagg

SEQ ID NO: 2443171 - DNA, 25 bp, Homo sapien
gcaaaaaactgacgggaagtggctc

SEQ ID NO: 2443172 - DNA, 25 bp, Homo sapien
tttagtaggatcactcaggtggctg

SEQ ID NO: 2443173 - DNA, 25 bp, Homo sapien
taagcaaaatactaaggcagggtag

SEQ ID NO: 2443174 - DNA, 25 bp, Homo sapien
aaatactaaggcagggtagacagtc

SEQ ID NO: 2443175 - DNA, 25 bp, Homo sapien
aaaatactaaggcagggtagacagt

SEQ ID NO: 2443176 - DNA, 25 bp, Homo sapien
gattaataagcaaaatactaaggca

SEQ ID NO: 2443177 - DNA, 25 bp, Homo sapien
cagcatgcaaacaggatacactagg

SEQ ID NO: 2443178 - DNA, 25 bp, Homo sapien
catgcaaacaggatacactaggaac

SEQ ID NO: 2443179 - DNA, 25 bp, Homo sapien
gccagcatgcaaacaggatacacta

SEQ ID NO: 2443180 - DNA, 25 bp, Homo sapien
tgcaaacaggatacactaggaacag

SEQ ID NO: 2443181 - DNA, 25 bp, Homo sapien
cacagtaacgcatgtgtggagtaac

SEQ ID NO: 2443182 - DNA, 25 bp, Homo sapien
catgtgtggagtaacatccatgtga

SEQ ID NO: 2443183 - DNA, 25 bp, Homo sapien
taacgcatgtgtggagtaacatcca

SEQ ID NO: 2443184 - DNA, 25 bp, Homo sapien
gttttgctgacacagtaacgcatgt

SEQ ID NO: 2443185 - DNA, 25 bp, Homo sapien
gccaactccctccttatgaacctca

SEQ ID NO: 2443186 - DNA, 25 bp, Homo sapien
tttctgtttgatgccaactccctcc

SEQ ID NO: 2443187 - DNA, 25 bp, Homo sapien
ttgatgccaactccctccttatgaa

SEQ ID NO: 2443188 - DNA, 25 bp, Homo sapien
ccctccttatgaacctcacaattat

SEQ ID NO: 2443189 - DNA, 25 bp, Homo sapien
agccggaggttagctggcactggtg

SEQ ID NO: 2443190 - DNA, 25 bp, Homo sapien
caaaagacattgtagtgatgcacaa

SEQ ID NO: 2443191 - DNA, 25 bp, Homo sapien
cagccggaggttagctggcactggt

SEQ ID NO: 2443192 - DNA, 25 bp, Homo sapien
aagacattgtagtgatgcacaagga

SEQ ID NO: 2443193 - DNA, 25 bp, Homo sapien
ttctttgttggtacaagagacttac

SEQ ID NO: 2443194 - DNA, 25 bp, Homo sapien
cccatccgtagtctttctctgcttc

SEQ ID NO: 2443195 - DNA, 25 bp, Homo sapien
ccatccgtagtctttctctgcttct

SEQ ID NO: 2443196 - DNA, 25 bp, Homo sapien
cttcttctttgttggtacaagagac

SEQ ID NO: 2443197 - DNA, 25 bp, Homo sapien
agagtgttgattggtgcatcacaaa

SEQ ID NO: 2443198 - DNA, 25 bp, Homo sapien
gttgccactgctggttcaagcagcc

SEQ ID NO: 2443199 - DNA, 25 bp, Homo sapien
atacagagtgtcaacacaaaagttc

SEQ ID NO: 2443200 - DNA, 25 bp, Homo sapien
cagagtgtcaacacaaaagttctcc

SEQ ID NO: 2443201 - DNA, 25 bp, Homo sapien
tctctactcattctggcaacagtga

SEQ ID NO: 2443202 - DNA, 25 bp, Homo sapien
tgccaatgactaaaatcctaagagc

SEQ ID NO: 2443203 - DNA, 25 bp, Homo sapien
gactgcaggtctcaatctgtaacta

SEQ ID NO: 2443204 - DNA, 25 bp, Homo sapien
aaaatagcatagttcaggccgggcg

SEQ ID NO: 2443205 - DNA, 25 bp, Homo sapien
ataaatgcacagtgagccaaaggag

SEQ ID NO: 2443206 - DNA, 25 bp, Homo sapien
gcacagtgagccaaaggaggtgaga

SEQ ID NO: 2443207 - DNA, 25 bp, Homo sapien
gtgagccaaaggaggtgagattctg

SEQ ID NO: 2443208 - DNA, 25 bp, Homo sapien
aatgcacagtgagccaaaggaggtg

SEQ ID NO: 2443209 - DNA, 25 bp, Homo sapien
ggatgttacattccaggtagcctgg

SEQ ID NO: 2443210 - DNA, 25 bp, Homo sapien
taatgccaaaacacgcaaacaaaaa

SEQ ID NO: 2443211 - DNA, 25 bp, Homo sapien
ctataatgccaaaacacgcaaacaa

SEQ ID NO: 2443212 - DNA, 25 bp, Homo sapien
gatgttacattccaggtagcctggg

SEQ ID NO: 2443213 - DNA, 25 bp, Homo sapien
cacatgatatcggttgacagtggga

SEQ ID NO: 2443214 - DNA, 25 bp, Homo sapien
tctgatccggttgttctgttgtggg

SEQ ID NO: 2443215 - DNA, 25 bp, Homo sapien
accaccgcacatgatatcggttgac

SEQ ID NO: 2443216 - DNA, 25 bp, Homo sapien
gatccggttgttctgttgtgggcac

SEQ ID NO: 2443217 - DNA, 25 bp, Homo sapien
taactttcgtagagcaagagaaaga

SEQ ID NO: 2443218 - DNA, 25 bp, Homo sapien
agcattatataactttcgtagagca

SEQ ID NO: 2443219 - DNA, 25 bp, Homo sapien
tggagtgacttttggccatattggt

SEQ ID NO: 2443220 - DNA, 25 bp, Homo sapien
gaaaatgacacatgttgaagcatta

SEQ ID NO: 2443221 - DNA, 25 bp, Homo sapien
tgtagaagtccttcaggtgataatg

SEQ ID NO: 2443222 - DNA, 25 bp, Homo sapien
gtagaagtccttcaggtgataatgt

SEQ ID NO: 2443223 - DNA, 25 bp, Homo sapien
atgtagaagtccttcaggtgataat

SEQ ID NO: 2443224 - DNA, 25 bp, Homo sapien
gatgtagaagtccttcaggtgataa

SEQ ID NO: 2443225 - DNA, 25 bp, Homo sapien
tggcaaggtttgcaaagcgctgctg

SEQ ID NO: 2443226 - DNA, 25 bp, Homo sapien
tttggcaaggtttgcaaagcgctgc

SEQ ID NO: 2443227 - DNA, 25 bp, Homo sapien
ggcaaggtttgcaaagcgctgctga

SEQ ID NO: 2443228 - DNA, 25 bp, Homo sapien
cagtttggcaaggtttgcaaagcgc

SEQ ID NO: 2443229 - DNA, 25 bp, Homo sapien
caagtaaagtgactggtggtgttca

SEQ ID NO: 2443230 - DNA, 25 bp, Homo sapien
cttccaagtaaagtgactggtggtg

SEQ ID NO: 2443231 - DNA, 25 bp, Homo sapien
tccaagtaaagtgactggtggtgtt

SEQ ID NO: 2443232 - DNA, 25 bp, Homo sapien
tcttccaagtaaagtgactggtggt

SEQ ID NO: 2443233 - DNA, 25 bp, Homo sapien
gtcacataggagagtccgggcctct

SEQ ID NO: 2443234 - DNA, 25 bp, Homo sapien
cctgcactaaagtcacataggagag

SEQ ID NO: 2443235 - DNA, 25 bp, Homo sapien
ggccgaagttcaacaagcttacaca

SEQ ID NO: 2443236 - DNA, 25 bp, Homo sapien
gtggccgaagttcaacaagcttaca

SEQ ID NO: 2443237 - DNA, 25 bp, Homo sapien
ttaaccacctgtatttgatgacaat

SEQ ID NO: 2443238 - DNA, 25 bp, Homo sapien
gagcacatgttggtttgcaaacatc

SEQ ID NO: 2443239 - DNA, 25 bp, Homo sapien
gcaaacatcattctatggagttcca

SEQ ID NO: 2443240 - DNA, 25 bp, Homo sapien
tacagaattaggcaccaaaactatg

SEQ ID NO: 2443241 - DNA, 25 bp, Homo sapien
gtcatgaccatcctttctgtacctg

SEQ ID NO: 2443242 - DNA, 25 bp, Homo sapien
tgaccatcctttctgtacctgacac

SEQ ID NO: 2443243 - DNA, 25 bp, Homo sapien
taagacagtcatgaccatcctttct

SEQ ID NO: 2443244 - DNA, 25 bp, Homo sapien
gacagtcatgaccatcctttctgta

SEQ ID NO: 2443245 - DNA, 25 bp, Homo sapien
tgttctttcaccacgtttcataaac

SEQ ID NO: 2443246 - DNA, 25 bp, Homo sapien
tcacattggcgtaattcttgctctc

SEQ ID NO: 2443247 - DNA, 25 bp, Homo sapien
tatattctccagtggcgtgtctctt

SEQ ID NO: 2443248 - DNA, 25 bp, Homo sapien
ggcgtgtctcttgttctttcaccac

SEQ ID NO: 2443249 - DNA, 25 bp, Homo sapien
caggggacagcattgcagagccact

SEQ ID NO: 2443250 - DNA, 25 bp, Homo sapien
agcccagtaccaccatggcaggaag

SEQ ID NO: 2443251 - DNA, 25 bp, Homo sapien
agcaaaggcggctccctgctgcagg

SEQ ID NO: 2443252 - DNA, 25 bp, Homo sapien
gggacagcattgcagagccactatc

SEQ ID NO: 2443253 - DNA, 25 bp, Homo sapien
ataggcagctggaatcactaagacg

SEQ ID NO: 2443254 - DNA, 25 bp, Homo sapien
agctggaatcactaagacgccctcc

SEQ ID NO: 2443255 - DNA, 25 bp, Homo sapien
tgccaccttgcggaagagataggca

SEQ ID NO: 2443256 - DNA, 25 bp, Homo sapien
caccttgcggaagagataggcagct

SEQ ID NO: 2443257 - DNA, 25 bp, Homo sapien
cacgcatacggattgtttttgaccc

SEQ ID NO: 2443258 - DNA, 25 bp, Homo sapien
cctgactcctatttctgacatttgc

SEQ ID NO: 2443259 - DNA, 25 bp, Homo sapien
tcattagaccgcaggaaatacggca

SEQ ID NO: 2443260 - DNA, 25 bp, Homo sapien
tcgattccccttgaccatgcagctt

SEQ ID NO: 2443261 - DNA, 25 bp, Homo sapien
tgcttggtataactcaaagcctgtt

SEQ ID NO: 2443262 - DNA, 25 bp, Homo sapien
taggacgctgtaccacagaaacggc

SEQ ID NO: 2443263 - DNA, 25 bp, Homo sapien
tggcctgagcaccatcattttgtgg

SEQ ID NO: 2443264 - DNA, 25 bp, Homo sapien
tggaaataccatataagaatgagca

SEQ ID NO: 2443265 - DNA, 25 bp, Homo sapien
gcttgttccctctgtgtggggtttg

SEQ ID NO: 2443266 - DNA, 25 bp, Homo sapien
ttccctctgtgtggggtttgtctcc

SEQ ID NO: 2443267 - DNA, 25 bp, Homo sapien
ttgttccctctgtgtggggtttgtc

SEQ ID NO: 2443268 - DNA, 25 bp, Homo sapien
ccctctgtgtggggtttgtctccat

SEQ ID NO: 2443269 - DNA, 25 bp, Homo sapien
tggtggataagtttatgaaggtgtc

SEQ ID NO: 2443270 - DNA, 25 bp, Homo sapien
gtggataagtttatgaaggtgtcac

SEQ ID NO: 2443271 - DNA, 25 bp, Homo sapien
ggataagtttatgaaggtgtcactt

SEQ ID NO: 2443272 - DNA, 25 bp, Homo sapien
gatggtggataagtttatgaaggtg

SEQ ID NO: 2443273 - DNA, 25 bp, Homo sapien
cctgggctcatagagtccttttatt

SEQ ID NO: 2443274 - DNA, 25 bp, Homo sapien
cacagtaacgtataacctgggctca

SEQ ID NO: 2443275 - DNA, 25 bp, Homo sapien
agtgccgggcattaatatttcttga

SEQ ID NO: 2443276 - DNA, 25 bp, Homo sapien
tatcaattgacattgcacagtaacg

SEQ ID NO: 2443277 - DNA, 25 bp, Homo sapien
catgcaatgtcctgcctaacatgtt

SEQ ID NO: 2443278 - DNA, 25 bp, Homo sapien
caatgtcctgcctaacatgttgacg

SEQ ID NO: 2443279 - DNA, 25 bp, Homo sapien
catgttgacgtaaataaggtccatg

SEQ ID NO: 2443280 - DNA, 25 bp, Homo sapien
cctgcctaacatgttgacgtaaata

SEQ ID NO: 2443281 - DNA, 25 bp, Homo sapien
ttggtatggtccagtccacgctggc

SEQ ID NO: 2443282 - DNA, 25 bp, Homo sapien
ggtatggtccagtccacgctggctc

SEQ ID NO: 2443283 - DNA, 25 bp, Homo sapien
gagaacttggtatggtccagtccac

SEQ ID NO: 2443284 - DNA, 25 bp, Homo sapien
gaacttggtatggtccagtccacgc

SEQ ID NO: 2443285 - DNA, 25 bp, Homo sapien
tcacaggtgtaggtagtgcgttctt

SEQ ID NO: 2443286 - DNA, 25 bp, Homo sapien
cgcagctcaacgtctcgcaacggtc

SEQ ID NO: 2443287 - DNA, 25 bp, Homo sapien
gcagctcaacgtctcgcaacggtcg

SEQ ID NO: 2443288 - DNA, 25 bp, Homo sapien
ccgcagctcaacgtctcgcaacggt

SEQ ID NO: 2443289 - DNA, 25 bp, Homo sapien
ggtcccgaggctctcggctttggac

SEQ ID NO: 2443290 - DNA, 25 bp, Homo sapien
tcccgaggctctcggctttggactc

SEQ ID NO: 2443291 - DNA, 25 bp, Homo sapien
gaggtcccgaggctctcggctttgg

SEQ ID NO: 2443292 - DNA, 25 bp, Homo sapien
tggccttggccggaggtcccgaggc

SEQ ID NO: 2443293 - DNA, 25 bp, Homo sapien
acagggacgtgtcctcagaagcggt

SEQ ID NO: 2443294 - DNA, 25 bp, Homo sapien
ggaacagggacgtgtcctcagaagc

SEQ ID NO: 2443295 - DNA, 25 bp, Homo sapien
gggacgtgtcctcagaagcggtggg

SEQ ID NO: 2443296 - DNA, 25 bp, Homo sapien
aacagggacgtgtcctcagaagcgg

SEQ ID NO: 2443297 - DNA, 25 bp, Homo sapien
tccgcctcaggtgccgtcacggccg

SEQ ID NO: 2443298 - DNA, 25 bp, Homo sapien
tcctccggcggcagctcgtgctgag

SEQ ID NO: 2443299 - DNA, 25 bp, Homo sapien
gggtcgtgctgggtcccctcgctca

SEQ ID NO: 2443300 - DNA, 25 bp, Homo sapien
catctttgtcgcagcccctttcttc

SEQ ID NO: 2443301 - DNA, 25 bp, Homo sapien
gagataggggagtagatgggcgccc

SEQ ID NO: 2443302 - DNA, 25 bp, Homo sapien
gataggggagtagatgggcgcccct

SEQ ID NO: 2443303 - DNA, 25 bp, Homo sapien
taggggagtagatgggcgcccctta

SEQ ID NO: 2443304 - DNA, 25 bp, Homo sapien
ggagataggggagtagatgggcgcc

SEQ ID NO: 2443305 - DNA, 25 bp, Homo sapien
catcaacatgggaagcaccctgctg

SEQ ID NO: 2443306 - DNA, 25 bp, Homo sapien
tggcagctgggcctaaacttagttg

SEQ ID NO: 2443307 - DNA, 25 bp, Homo sapien
acatgggaagcaccctgctggtgag

SEQ ID NO: 2443308 - DNA, 25 bp, Homo sapien
agctgggcctaaacttagttgctgc

SEQ ID NO: 2443309 - DNA, 25 bp, Homo sapien
ctgacaatagtcttgattaacaatt

SEQ ID NO: 2443310 - DNA, 25 bp, Homo sapien
tgacaatagtcttgattaacaattc

SEQ ID NO: 2443311 - DNA, 25 bp, Homo sapien
tctgtgtgctccacattcaagtcaa

SEQ ID NO: 2443312 - DNA, 25 bp, Homo sapien
taatctttgaccacattctctgtgt

SEQ ID NO: 2443313 - DNA, 25 bp, Homo sapien
ccacattcaagtcaatgcttgagtc

SEQ ID NO: 2443314 - DNA, 25 bp, Homo sapien
ctaatctttgaccacattctctgtg

SEQ ID NO: 2443315 - DNA, 25 bp, Homo sapien
gaaattatgctattacctatgtaaa

SEQ ID NO: 2443316 - DNA, 25 bp, Homo sapien
gtcagaaattatgctattacctatg

SEQ ID NO: 2443317 - DNA, 25 bp, Homo sapien
cagaaattatgctattacctatgta

SEQ ID NO: 2443318 - DNA, 25 bp, Homo sapien
ttgtcagaaattatgctattaccta

SEQ ID NO: 2443319 - DNA, 25 bp, Homo sapien
tcagggaaggcttgataatgcccat

SEQ ID NO: 2443320 - DNA, 25 bp, Homo sapien
tatgtcagggaaggcttgataatgc

SEQ ID NO: 2443321 - DNA, 25 bp, Homo sapien
tgtcagggaaggcttgataatgccc

SEQ ID NO: 2443322 - DNA, 25 bp, Homo sapien
atatatgtcagggaaggcttgataa

SEQ ID NO: 2443323 - DNA, 25 bp, Homo sapien
cagggcggccagttccatcatgctt

SEQ ID NO: 2443324 - DNA, 25 bp, Homo sapien
catcagggcggccagttccatcatg

SEQ ID NO: 2443325 - DNA, 25 bp, Homo sapien
gggcggccagttccatcatgcttcg

SEQ ID NO: 2443326 - DNA, 25 bp, Homo sapien
ggccagttccatcatgcttcgccat

SEQ ID NO: 2443327 - DNA, 25 bp, Homo sapien
ctttatccaccagtttgtcatttcc

SEQ ID NO: 2443328 - DNA, 25 bp, Homo sapien
tttatccaccagtttgtcatttcct

SEQ ID NO: 2443329 - DNA, 25 bp, Homo sapien
tgctttatccaccagtttgtcattt

SEQ ID NO: 2443330 - DNA, 25 bp, Homo sapien
gctttatccaccagtttgtcatttc

SEQ ID NO: 2443331 - DNA, 25 bp, Homo sapien
agagctttggagctttgtgcacatt

SEQ ID NO: 2443332 - DNA, 25 bp, Homo sapien
aagagctttggagctttgtgcacat

SEQ ID NO: 2443333 - DNA, 25 bp, Homo sapien
caagagctttggagctttgtgcaca

SEQ ID NO: 2443334 - DNA, 25 bp, Homo sapien
gattggttttagcaaggcaattctt

SEQ ID NO: 2443335 - DNA, 25 bp, Homo sapien
cttacaagtgcactttcttgaggag

SEQ ID NO: 2443336 - DNA, 25 bp, Homo sapien
aaagcacctgaagacgttcacgctg

SEQ ID NO: 2443337 - DNA, 25 bp, Homo sapien
gctgattggttttagcaaggcaatt

SEQ ID NO: 2443338 - DNA, 25 bp, Homo sapien
cttgtgtaaagattcccgggactgc

SEQ ID NO: 2443339 - DNA, 25 bp, Homo sapien
cgtttcggagagttgttcagaagac

SEQ ID NO: 2443340 - DNA, 25 bp, Homo sapien
tggaccgtgagcagatagcatttcg

SEQ ID NO: 2443341 - DNA, 25 bp, Homo sapien
tcaattggcttggaccgtgagcaga

SEQ ID NO: 2443342 - DNA, 25 bp, Homo sapien
tgggaattatcacactcagaccttt

SEQ ID NO: 2443343 - DNA, 25 bp, Homo sapien
tacatctcttttgcccgtattttct

SEQ ID NO: 2443344 - DNA, 25 bp, Homo sapien
cactcagacctttcaactttctcat

SEQ ID NO: 2443345 - DNA, 25 bp, Homo sapien
tttttatgggaattatcacactcag

SEQ ID NO: 2443346 - DNA, 25 bp, Homo sapien
gcatgtgaacacactacttgtttgc

SEQ ID NO: 2443347 - DNA, 25 bp, Homo sapien
catgcgatgcgaatatccaggaaaa

SEQ ID NO: 2443348 - DNA, 25 bp, Homo sapien
agattagaacgctgtttcctcttgc

SEQ ID NO: 2443349 - DNA, 25 bp, Homo sapien
cttgtttgcaaccacagaatgacgc

SEQ ID NO: 2443350 - DNA, 25 bp, Homo sapien
tgttcagttttggagtaagtgaggt

SEQ ID NO: 2443351 - DNA, 25 bp, Homo sapien
taatttctgatcttttgcatttgtt

SEQ ID NO: 2443352 - DNA, 25 bp, Homo sapien
actatgtgttcagttttggagtaag

SEQ ID NO: 2443353 - DNA, 25 bp, Homo sapien
atgtgttcagttttggagtaagtga

SEQ ID NO: 2443354 - DNA, 25 bp, Homo sapien
tgagcagtgcacaccacttcgtcgc

SEQ ID NO: 2443355 - DNA, 25 bp, Homo sapien
ggggtgtatgtaccttcaaatacca

SEQ ID NO: 2443356 - DNA, 25 bp, Homo sapien
tggtggttcgggtgaaacatgagca

SEQ ID NO: 2443357 - DNA, 25 bp, Homo sapien
acttcgtcgccttccaatccttcac

SEQ ID NO: 2443358 - DNA, 25 bp, Homo sapien
cataaactctgtggggcaactcagg

SEQ ID NO: 2443359 - DNA, 25 bp, Homo sapien
tgagtaagtagatgaagtcctctct

SEQ ID NO: 2443360 - DNA, 25 bp, Homo sapien
gaaagcagaatgtgccatattgtcg

SEQ ID NO: 2443361 - DNA, 25 bp, Homo sapien
tattgtcgactctgagacatcctgt

SEQ ID NO: 2443362 - DNA, 25 bp, Homo sapien
cacagggaggatgcctctgacctag

SEQ ID NO: 2443363 - DNA, 25 bp, Homo sapien
taggtttggcactacttgccattct

SEQ ID NO: 2443364 - DNA, 25 bp, Homo sapien
tccaccattaggtttggcactactt

SEQ ID NO: 2443365 - DNA, 25 bp, Homo sapien
tctgacctagtaggcatccagccac

SEQ ID NO: 2443366 - DNA, 25 bp, Homo sapien
tctgtcctgcttttgtactggtgtc

SEQ ID NO: 2443367 - DNA, 25 bp, Homo sapien
tgtctttatccatttggtgtatcca

SEQ ID NO: 2443368 - DNA, 25 bp, Homo sapien
tttctgtcctgcttttgtactggtg

SEQ ID NO: 2443369 - DNA, 25 bp, Homo sapien
tatccatttggtgtatccactgctg

SEQ ID NO: 2443370 - DNA, 25 bp, Homo sapien
cttctgctgcctcgttgagatgaca

SEQ ID NO: 2443371 - DNA, 25 bp, Homo sapien
tctgctgcctcgttgagatgacagc

SEQ ID NO: 2443372 - DNA, 25 bp, Homo sapien
gacagcaggcaccatgtcgattatt

SEQ ID NO: 2443373 - DNA, 25 bp, Homo sapien
gcaggcaccatgtcgattatttttc

SEQ ID NO: 2443374 - DNA, 25 bp, Homo sapien
cttgcttgtagtcaactactgaggt

SEQ ID NO: 2443375 - DNA, 25 bp, Homo sapien
gcttgtagtcaactactgaggtacc

SEQ ID NO: 2443376 - DNA, 25 bp, Homo sapien
tagtcaactactgaggtacctgtgg

SEQ ID NO: 2443377 - DNA, 25 bp, Homo sapien
tcaactactgaggtacctgtgggct

SEQ ID NO: 2443378 - DNA, 25 bp, Homo sapien
ctctttccaatggcctctctatctc

SEQ ID NO: 2443379 - DNA, 25 bp, Homo sapien
tctttccaatggcctctctatctcc

SEQ ID NO: 2443380 - DNA, 25 bp, Homo sapien
ctttccaatggcctctctatctcct

SEQ ID NO: 2443381 - DNA, 25 bp, Homo sapien
gtcctcattacccagatactcagca

SEQ ID NO: 2443382 - DNA, 25 bp, Homo sapien
ttagtcctcattacccagatactca

SEQ ID NO: 2443383 - DNA, 25 bp, Homo sapien
cctcattacccagatactcagcaac

SEQ ID NO: 2443384 - DNA, 25 bp, Homo sapien
tagtcctcattacccagatactcag

SEQ ID NO: 2443385 - DNA, 25 bp, Homo sapien
catatcacaggtaaggtgagctggc

SEQ ID NO: 2443386 - DNA, 25 bp, Homo sapien
tgagctggcatctgtccttccttaa

SEQ ID NO: 2443387 - DNA, 25 bp, Homo sapien
tagctgtctgtagtaatatctctcc

SEQ ID NO: 2443388 - DNA, 25 bp, Homo sapien
tttgagctccaacatcaactagcag

SEQ ID NO: 2443389 - DNA, 25 bp, Homo sapien
ttcttggacagaactaccagtctcc

SEQ ID NO: 2443390 - DNA, 25 bp, Homo sapien
gcagtgtcaaaattctttcttggac

SEQ ID NO: 2443391 - DNA, 25 bp, Homo sapien
cttggacagaactaccagtctccat

SEQ ID NO: 2443392 - DNA, 25 bp, Homo sapien
ctttcttggacagaactaccagtct

SEQ ID NO: 2443393 - DNA, 25 bp, Homo sapien
agctgcaggtggaattccctgaacg

SEQ ID NO: 2443394 - DNA, 25 bp, Homo sapien
tggtggtccacttgtaacatccttg

SEQ ID NO: 2443395 - DNA, 25 bp, Homo sapien
gtccacttgtaacatccttgaagag

SEQ ID NO: 2443396 - DNA, 25 bp, Homo sapien
cggcaatcagggacgtgaaaagctt

SEQ ID NO: 2443397 - DNA, 25 bp, Homo sapien
cctgtaggaggtctgaaatcactgg

SEQ ID NO: 2443398 - DNA, 25 bp, Homo sapien
tccattgttttgtcagagtgccctg

SEQ ID NO: 2443399 - DNA, 25 bp, Homo sapien
cagatggaatcctgacaggtgcttg

SEQ ID NO: 2443400 - DNA, 25 bp, Homo sapien
tagggtttgcagatggaatcctgac

SEQ ID NO: 2443401 - DNA, 25 bp, Homo sapien
gcagtggatgttaccacatcttccc

SEQ ID NO: 2443402 - DNA, 25 bp, Homo sapien
cccatttacattgcatctttcttga

SEQ ID NO: 2443403 - DNA, 25 bp, Homo sapien
acttccttggagcagtggatgttac

SEQ ID NO: 2443404 - DNA, 25 bp, Homo sapien
cttgagtgttgagattcttgtctta

SEQ ID NO: 2443405 - DNA, 25 bp, Homo sapien
caaacaaacaacctttgtatatttg

SEQ ID NO: 2443406 - DNA, 25 bp, Homo sapien
acaaacaacctttgtatatttgcaa

SEQ ID NO: 2443407 - DNA, 25 bp, Homo sapien
ttgacaaacaaacaacctttgtata

SEQ ID NO: 2443408 - DNA, 25 bp, Homo sapien
aacctttgtatatttgcaaatactc

SEQ ID NO: 2443409 - DNA, 25 bp, Homo sapien
ctgtgttatgtatgtctccagtgcc

SEQ ID NO: 2443410 - DNA, 25 bp, Homo sapien
caccttcccgttgtcattttgaatc

SEQ ID NO: 2443411 - DNA, 25 bp, Homo sapien
ggcacctctctcataattgcactag

SEQ ID NO: 2443412 - DNA, 25 bp, Homo sapien
cataattgcactaggctcctgagtc

SEQ ID NO: 2443413 - DNA, 25 bp, Homo sapien
ctttcagagaatttactctgaggga

SEQ ID NO: 2443414 - DNA, 25 bp, Homo sapien
ttcagagaatttactctgagggaat

SEQ ID NO: 2443415 - DNA, 25 bp, Homo sapien
gaatttactctgagggaatttaaga

SEQ ID NO: 2443416 - DNA, 25 bp, Homo sapien
tcagagaatttactctgagggaatt

SEQ ID NO: 2443417 - DNA, 25 bp, Homo sapien
caaacatgatgtcgtatatgcagac

SEQ ID NO: 2443418 - DNA, 25 bp, Homo sapien
tttaaggtcacagtctccagcagtc

SEQ ID NO: 2443419 - DNA, 25 bp, Homo sapien
ttaagagcagcgaaaattggaatac

SEQ ID NO: 2443420 - DNA, 25 bp, Homo sapien
gtccctatgtctgcgttattgtgag

SEQ ID NO: 2443421 - DNA, 25 bp, Homo sapien
tctgctgtcaatagtgtgtccccgg

SEQ ID NO: 2443422 - DNA, 25 bp, Homo sapien
ttagctgtggaagacctgcatcgcc

SEQ ID NO: 2443423 - DNA, 25 bp, Homo sapien
caagagccaccaacattgccgggtt

SEQ ID NO: 2443424 - DNA, 25 bp, Homo sapien
tctaaggaacctgaaacgcagtatg

SEQ ID NO: 2443425 - DNA, 25 bp, Homo sapien
gcttccgaagaagcaaaaccaccag

SEQ ID NO: 2443426 - DNA, 25 bp, Homo sapien
ccacacacacgggaaaggggtgcat

SEQ ID NO: 2443427 - DNA, 25 bp, Homo sapien
agctctaccccacttttgcggcttg

SEQ ID NO: 2443428 - DNA, 25 bp, Homo sapien
tttgcggcttgcctcaccactccca

SEQ ID NO: 2443429 - DNA, 25 bp, Homo sapien
cgctcctccggaaaagcgggcagtt

SEQ ID NO: 2443430 - DNA, 25 bp, Homo sapien
ggtggcagcggcaaaccgccctgca

SEQ ID NO: 2443431 - DNA, 25 bp, Homo sapien
ttccgctcctccggaaaagcgggca

SEQ ID NO: 2443432 - DNA, 25 bp, Homo sapien
ggtgccgagggtggcagcggcaaac

SEQ ID NO: 2443433 - DNA, 25 bp, Homo sapien
ctccgggcgcctgtcttttcggctt

SEQ ID NO: 2443434 - DNA, 25 bp, Homo sapien
cgggcgcctgtcttttcggcttcca

SEQ ID NO: 2443435 - DNA, 25 bp, Homo sapien
accagggctccgggcgcctgtcttt

SEQ ID NO: 2443436 - DNA, 25 bp, Homo sapien
ggcgcctgtcttttcggcttccaac

SEQ ID NO: 2443437 - DNA, 25 bp, Homo sapien
cttagggactggcagacccgcaggc

SEQ ID NO: 2443438 - DNA, 25 bp, Homo sapien
tggcagacccgcaggcttaacactc

SEQ ID NO: 2443439 - DNA, 25 bp, Homo sapien
accgactagggctccggatcacctg

SEQ ID NO: 2443440 - DNA, 25 bp, Homo sapien
actagggctccggatcacctgatac

SEQ ID NO: 2443441 - DNA, 25 bp, Homo sapien
cgcctccgactgtgctcttggctga

SEQ ID NO: 2443442 - DNA, 25 bp, Homo sapien
tgtgctcttggctgatcttcgcttt

SEQ ID NO: 2443443 - DNA, 25 bp, Homo sapien
cgtctctgccgcctccgactgtgct

SEQ ID NO: 2443444 - DNA, 25 bp, Homo sapien
tccgactgtgctcttggctgatctt

SEQ ID NO: 2443445 - DNA, 25 bp, Homo sapien
ttcaggcgcgggttgggttgcccca

SEQ ID NO: 2443446 - DNA, 25 bp, Homo sapien
ttgggttgccccagccgtggcagtg

SEQ ID NO: 2443447 - DNA, 25 bp, Homo sapien
cgcaggtcaagccaagccgcttcag

SEQ ID NO: 2443448 - DNA, 25 bp, Homo sapien
ctgcttcgtctcacagcccctagct

SEQ ID NO: 2443449 - DNA, 25 bp, Homo sapien
aaaccgcaggcagagagcgccaccg

SEQ ID NO: 2443450 - DNA, 25 bp, Homo sapien
ggcgcaggccggaacctgaacctct

SEQ ID NO: 2443451 - DNA, 25 bp, Homo sapien
gtccctggggtagatcggcctcctg

SEQ ID NO: 2443452 - DNA, 25 bp, Homo sapien
tggaaaaccgcaggcagagagcgcc

SEQ ID NO: 2443453 - DNA, 25 bp, Homo sapien
tccgaggggcgaaagagccaggtca

SEQ ID NO: 2443454 - DNA, 25 bp, Homo sapien
ccgaggggcgaaagagccaggtcag

SEQ ID NO: 2443455 - DNA, 25 bp, Homo sapien
ggttctccgaggggcgaaagagcca

SEQ ID NO: 2443456 - DNA, 25 bp, Homo sapien
tctccgaggggcgaaagagccaggt

SEQ ID NO: 2443457 - DNA, 25 bp, Homo sapien
gcaaagctcgcgactcggctcacta

SEQ ID NO: 2443458 - DNA, 25 bp, Homo sapien
aagctcgcgactcggctcactagac

SEQ ID NO: 2443459 - DNA, 25 bp, Homo sapien
gggcgcaaagctcgcgactcggctc

SEQ ID NO: 2443460 - DNA, 25 bp, Homo sapien
cgggggcgcaaagctcgcgactcgg

SEQ ID NO: 2443461 - DNA, 25 bp, Homo sapien
ctcgttttccgagcgagacatttgt

SEQ ID NO: 2443462 - DNA, 25 bp, Homo sapien
tctggcggcgactaggctccagaac

SEQ ID NO: 2443463 - DNA, 25 bp, Homo sapien
agcgagacatttgttcccagggtgg

SEQ ID NO: 2443464 - DNA, 25 bp, Homo sapien
aactgtacgcctgggcccggatttg

SEQ ID NO: 2443465 - DNA, 25 bp, Homo sapien
tgcgtaggacatcctccgggttcac

SEQ ID NO: 2443466 - DNA, 25 bp, Homo sapien
tgatgcgtaggacatcctccgggtt

SEQ ID NO: 2443467 - DNA, 25 bp, Homo sapien
gggtatgatgcgtaggacatcctcc

SEQ ID NO: 2443468 - DNA, 25 bp, Homo sapien
tatgatgcgtaggacatcctccggg

SEQ ID NO: 2443469 - DNA, 25 bp, Homo sapien
atccccgagatagcagccgcacata

SEQ ID NO: 2443470 - DNA, 25 bp, Homo sapien
cccgagatagcagccgcacatacat

SEQ ID NO: 2443471 - DNA, 25 bp, Homo sapien
ctgcatccccgagatagcagccgca

SEQ ID NO: 2443472 - DNA, 25 bp, Homo sapien
ttcccctgcatccccgagatagcag

SEQ ID NO: 2443473 - DNA, 25 bp, Homo sapien
ggtgaataagtagtgcacattaaat

SEQ ID NO: 2443474 - DNA, 25 bp, Homo sapien
tacaagggtgaataagtagtgcaca

SEQ ID NO: 2443475 - DNA, 25 bp, Homo sapien
aatgcttttccataagtacaagggt

SEQ ID NO: 2443476 - DNA, 25 bp, Homo sapien
tccataagtacaagggtgaataagt

SEQ ID NO: 2443477 - DNA, 25 bp, Homo sapien
tctgtggtttctctacataaaacta

SEQ ID NO: 2443478 - DNA, 25 bp, Homo sapien
gcaaactgcttctctatttagttgt

SEQ ID NO: 2443479 - DNA, 25 bp, Homo sapien
atttgggggctgcaccatctgtggt

SEQ ID NO: 2443480 - DNA, 25 bp, Homo sapien
ctctacataaaactatttttgtgga

SEQ ID NO: 2443481 - DNA, 25 bp, Homo sapien
ggaagcacgcacacgccaggaagca

SEQ ID NO: 2443482 - DNA, 25 bp, Homo sapien
cacacgccaggacgcatgcacacat

SEQ ID NO: 2443483 - DNA, 25 bp, Homo sapien
atgccaggaagcacgcacacgccag

SEQ ID NO: 2443484 - DNA, 25 bp, Homo sapien
caggaagcacgcacacgccaggacg

SEQ ID NO: 2443485 - DNA, 25 bp, Homo sapien
atataaacagcagtaagtctgcgtt

SEQ ID NO: 2443486 - DNA, 25 bp, Homo sapien
taaacagcagtaagtctgcgttgtc

SEQ ID NO: 2443487 - DNA, 25 bp, Homo sapien
tataaacagcagtaagtctgcgttg

SEQ ID NO: 2443488 - DNA, 25 bp, Homo sapien
ctactcaggtatgtgtgtttgatga

SEQ ID NO: 2443489 - DNA, 25 bp, Homo sapien
ctggatatagagaaacaccatatcc

SEQ ID NO: 2443490 - DNA, 25 bp, Homo sapien
caccatatcctccatatctttgaaa

SEQ ID NO: 2443491 - DNA, 25 bp, Homo sapien
catatcctccatatctttgaaataa

SEQ ID NO: 2443492 - DNA, 25 bp, Homo sapien
tagagaaacaccatatcctccatat

SEQ ID NO: 2443493 - DNA, 25 bp, Homo sapien
gaatgtcagattcctagagtctcca

SEQ ID NO: 2443494 - DNA, 25 bp, Homo sapien
ggtgtgtgtgctacctccagatgat

SEQ ID NO: 2443495 - DNA, 25 bp, Homo sapien
gcactgttacacaataacgctggga

SEQ ID NO: 2443496 - DNA, 25 bp, Homo sapien
gaagccttctcaagaatatctagga

SEQ ID NO: 2443497 - DNA, 25 bp, Homo sapien
gaagacctgccctgagcataagtac

SEQ ID NO: 2443498 - DNA, 25 bp, Homo sapien
cagcattctgcttgtggataaggag

SEQ ID NO: 2443499 - DNA, 25 bp, Homo sapien
gaaggatgaaatgccgcctcctcag

SEQ ID NO: 2443500 - DNA, 25 bp, Homo sapien
tggacagagtggtacctgcctgctg

SEQ ID NO: 2443501 - DNA, 25 bp, Homo sapien
aacactgagaatccttggctaactg

SEQ ID NO: 2443502 - DNA, 25 bp, Homo sapien
cactgagaatccttggctaactgcc

SEQ ID NO: 2443503 - DNA, 25 bp, Homo sapien
actgagaatccttggctaactgcca

SEQ ID NO: 2443504 - DNA, 25 bp, Homo sapien
acactgagaatccttggctaactgc

SEQ ID NO: 2443505 - DNA, 25 bp, Homo sapien
agaggcatccgtcacacacactcac

SEQ ID NO: 2443506 - DNA, 25 bp, Homo sapien
cttggaagagagaaagtcttcagca

SEQ ID NO: 2443507 - DNA, 25 bp, Homo sapien
tggaagagagaaagtcttcagcaaa

SEQ ID NO: 2443508 - DNA, 25 bp, Homo sapien
gaagagagaaagtcttcagcaaacc

SEQ ID NO: 2443509 - DNA, 25 bp, Homo sapien
ggaagagagaaagtcttcagcaaac

SEQ ID NO: 2443510 - DNA, 25 bp, Homo sapien
tatgatgagtatctaacggcaaagc

SEQ ID NO: 2443511 - DNA, 25 bp, Homo sapien
agtatctaacggcaaagcccagaga

SEQ ID NO: 2443512 - DNA, 25 bp, Homo sapien
cttacattcattgttagactatgat

SEQ ID NO: 2443513 - DNA, 25 bp, Homo sapien
tcattgttagactatgatgagtatc

SEQ ID NO: 2443514 - DNA, 25 bp, Homo sapien
ggaacatccacattgtcaccattac

SEQ ID NO: 2443515 - DNA, 25 bp, Homo sapien
aggaacatccacattgtcaccatta

SEQ ID NO: 2443516 - DNA, 25 bp, Homo sapien
aacatccacattgtcaccattactt

SEQ ID NO: 2443517 - DNA, 25 bp, Homo sapien
catccacattgtcaccattacttac

SEQ ID NO: 2443518 - DNA, 25 bp, Homo sapien
caatactaccagttgtgtatgatgc

SEQ ID NO: 2443519 - DNA, 25 bp, Homo sapien
gttccatgctttatgctgcagataa

SEQ ID NO: 2443520 - DNA, 25 bp, Homo sapien
tgctgatcatctgtttttggagaga

SEQ ID NO: 2443521 - DNA, 25 bp, Homo sapien
tgcagataatcaatactaccagttg

SEQ ID NO: 2443522 - DNA, 25 bp, Homo sapien
tccaaagccgactgtagaggcagta

SEQ ID NO: 2443523 - DNA, 25 bp, Homo sapien
gaggcagtataggagcccagtggga

SEQ ID NO: 2443524 - DNA, 25 bp, Homo sapien
gacgcctcaggctgttatctccaaa

SEQ ID NO: 2443525 - DNA, 25 bp, Homo sapien
cataacgtaagtgtagcaatcccta

SEQ ID NO: 2443526 - DNA, 25 bp, Homo sapien
agacacactgaaggtctgggcccac

SEQ ID NO: 2443527 - DNA, 25 bp, Homo sapien
ttcccaaaactatgcaagctacaga

SEQ ID NO: 2443528 - DNA, 25 bp, Homo sapien
taactgggcttgaacaacaatcctt

SEQ ID NO: 2443529 - DNA, 25 bp, Homo sapien
gaacaagaagcacttgagacatctg

SEQ ID NO: 2443530 - DNA, 25 bp, Homo sapien
tgagaccatcaccttttttataact

SEQ ID NO: 2443531 - DNA, 25 bp, Homo sapien
ccccaagagaataggtgagaccatc

SEQ ID NO: 2443532 - DNA, 25 bp, Homo sapien
tacttttggagccttccccaagaga

SEQ ID NO: 2443533 - DNA, 25 bp, Homo sapien
ggtaaacttatgtcacaggcattag

SEQ ID NO: 2443534 - DNA, 25 bp, Homo sapien
catccgaagctgtctaagtgaggtg

SEQ ID NO: 2443535 - DNA, 25 bp, Homo sapien
gcgagcctgcagaaagataagtctt

SEQ ID NO: 2443536 - DNA, 25 bp, Homo sapien
tgtctaagtgaggtggctccaagga

SEQ ID NO: 2443537 - DNA, 25 bp, Homo sapien
taagtctttcgaaaactccaatgca

SEQ ID NO: 2443538 - DNA, 25 bp, Homo sapien
tggggattctggtggctgaaaccgc

SEQ ID NO: 2443539 - DNA, 25 bp, Homo sapien
ttatccacagaagaacattggagtt

SEQ ID NO: 2443540 - DNA, 25 bp, Homo sapien
catgacacagacagaggtgaacaac

SEQ ID NO: 2443541 - DNA, 25 bp, Homo sapien
tccacagaagaacattggagtttaa

SEQ ID NO: 2443542 - DNA, 25 bp, Homo sapien
gatcttgaacataggtcatcaaagt

SEQ ID NO: 2443543 - DNA, 25 bp, Homo sapien
tgtttaagtaaaggcagtcttcatt

SEQ ID NO: 2443544 - DNA, 25 bp, Homo sapien
tcattttgatcttgaacataggtca

SEQ ID NO: 2443545 - DNA, 25 bp, Homo sapien
tgaacataggtcatcaaagtatcca

SEQ ID NO: 2443546 - DNA, 25 bp, Homo sapien
tcatgcaagagacattataaaaccc

SEQ ID NO: 2443547 - DNA, 25 bp, Homo sapien
cacactgcacaagaagtattgtttt

SEQ ID NO: 2443548 - DNA, 25 bp, Homo sapien
tggtaaatctctccacacactgcac

SEQ ID NO: 2443549 - DNA, 25 bp, Homo sapien
gagacattataaaaccctcctggta

SEQ ID NO: 2443550 - DNA, 25 bp, Homo sapien
gggactattaggcacagagacagca

SEQ ID NO: 2443551 - DNA, 25 bp, Homo sapien
agacagcacagaacaccccatggaa

SEQ ID NO: 2443552 - DNA, 25 bp, Homo sapien
gaagtacagcatccaaacgtcagtt

SEQ ID NO: 2443553 - DNA, 25 bp, Homo sapien
gaaccctaatagattttgacagctc

SEQ ID NO: 2443554 - DNA, 25 bp, Homo sapien
gcagcaatcggcactctatatctag

SEQ ID NO: 2443555 - DNA, 25 bp, Homo sapien
gaggattgtatgtgcagcaatcggc

SEQ ID NO: 2443556 - DNA, 25 bp, Homo sapien
accaggctgactgggaattggagaa

SEQ ID NO: 2443557 - DNA, 25 bp, Homo sapien
cagggattgtacatgcaccactctg

SEQ ID NO: 2443558 - DNA, 25 bp, Homo sapien
gggtatgactcaaactactggtccg

SEQ ID NO: 2443559 - DNA, 25 bp, Homo sapien
ttgtttccacgttcagcaaagaggg

SEQ ID NO: 2443560 - DNA, 25 bp, Homo sapien
actccagtaacatcctccttcagtg

SEQ ID NO: 2443561 - DNA, 25 bp, Homo sapien
catctgcaagacatcaagtggaact

SEQ ID NO: 2443562 - DNA, 25 bp, Homo sapien
aacatctctgaagggtccccatcga

SEQ ID NO: 2443563 - DNA, 25 bp, Homo sapien
ctgtaggtgccgtgtgtaaaatata

SEQ ID NO: 2443564 - DNA, 25 bp, Homo sapien
aatataggcttggtgagtctgaggc

SEQ ID NO: 2443565 - DNA, 25 bp, Homo sapien
ctttgatgccaacatctctgaaggg

SEQ ID NO: 2443566 - DNA, 25 bp, Homo sapien
cttgggaaagggcatgctccggttg

SEQ ID NO: 2443567 - DNA, 25 bp, Homo sapien
cccagtaggatgtaagactttgtaa

SEQ ID NO: 2443568 - DNA, 25 bp, Homo sapien
tgtgcccagtaggatgtaagacttt

SEQ ID NO: 2443569 - DNA, 25 bp, Homo sapien
ggcatgctccggttgtgcccagtag

SEQ ID NO: 2443570 - DNA, 25 bp, Homo sapien
tcttcttcgcttggcaggtcaagct

SEQ ID NO: 2443571 - DNA, 25 bp, Homo sapien
aaatcttcttcgcttggcaggtcaa

SEQ ID NO: 2443572 - DNA, 25 bp, Homo sapien
tcgcttggcaggtcaagctgatttt

SEQ ID NO: 2443573 - DNA, 25 bp, Homo sapien
tcttcgcttggcaggtcaagctgat

SEQ ID NO: 2443574 - DNA, 25 bp, Homo sapien
tggtttcagccaaggaagatactag

SEQ ID NO: 2443575 - DNA, 25 bp, Homo sapien
ggtttcagccaaggaagatactagt

SEQ ID NO: 2443576 - DNA, 25 bp, Homo sapien
ggttagcaagaactacattaggcag

SEQ ID NO: 2443577 - DNA, 25 bp, Homo sapien
tctcataaagtaaggaacaggttga

SEQ ID NO: 2443578 - DNA, 25 bp, Homo sapien
gaagtagaagtgttgccagtcctat

SEQ ID NO: 2443579 - DNA, 25 bp, Homo sapien
tctgcctaggttttatgtccagcca

SEQ ID NO: 2443580 - DNA, 25 bp, Homo sapien
agcagacatggcaaacaagtatacc

SEQ ID NO: 2443581 - DNA, 25 bp, Homo sapien
aatatcatctttatacttgaggcag

SEQ ID NO: 2443582 - DNA, 25 bp, Homo sapien
ctcatccttctcaatgtcatcaaca

SEQ ID NO: 2443583 - DNA, 25 bp, Homo sapien
gacatggcaaacaagtataccatga

SEQ ID NO: 2443584 - DNA, 25 bp, Homo sapien
gaataggacctagactctgcaaggt

SEQ ID NO: 2443585 - DNA, 25 bp, Homo sapien
ctttgaataggacctagactctgca

SEQ ID NO: 2443586 - DNA, 25 bp, Homo sapien
tgcaaggtagtaccgaagaaaacaa

SEQ ID NO: 2443587 - DNA, 25 bp, Homo sapien
gactctgcaaggtagtaccgaagaa

SEQ ID NO: 2443588 - DNA, 25 bp, Homo sapien
cagcaatgttcccttattcaatggc

SEQ ID NO: 2443589 - DNA, 25 bp, Homo sapien
gaaacacctggtttaataagatgga

SEQ ID NO: 2443590 - DNA, 25 bp, Homo sapien
taacatatcctcaagtcatggccct

SEQ ID NO: 2443591 - DNA, 25 bp, Homo sapien
taatccatgtcactctagttcagca

SEQ ID NO: 2443592 - DNA, 25 bp, Homo sapien
ccaactgatgaagatgcaacatgaa

SEQ ID NO: 2443593 - DNA, 25 bp, Homo sapien
cagtaaagttaacatgcattctgag

SEQ ID NO: 2443594 - DNA, 25 bp, Homo sapien
ctgtgcagtaaagttaacatgcatt

SEQ ID NO: 2443595 - DNA, 25 bp, Homo sapien
gtcttcatcaactggttcaccaact

SEQ ID NO: 2443596 - DNA, 25 bp, Homo sapien
tctataaggtccatatccacaggag

SEQ ID NO: 2443597 - DNA, 25 bp, Homo sapien
caaaacacaacgtatcggccatctc

SEQ ID NO: 2443598 - DNA, 25 bp, Homo sapien
tacaaaacacaacgtatcggccatc

SEQ ID NO: 2443599 - DNA, 25 bp, Homo sapien
aacacaacgtatcggccatctccat

SEQ ID NO: 2443600 - DNA, 25 bp, Homo sapien
tgtacaaaacacaacgtatcggcca

SEQ ID NO: 2443601 - DNA, 25 bp, Homo sapien
attataatagtcacagtcataccag

SEQ ID NO: 2443602 - DNA, 25 bp, Homo sapien
tattataatagtcacagtcatacca

SEQ ID NO: 2443603 - DNA, 25 bp, Homo sapien
ctctattataatagtcacagtcata

SEQ ID NO: 2443604 - DNA, 25 bp, Homo sapien
ctattataatagtcacagtcatacc

SEQ ID NO: 2443605 - DNA, 25 bp, Homo sapien
ttatcttcaccatggtcattactgg

SEQ ID NO: 2443606 - DNA, 25 bp, Homo sapien
gttatatcgtctgcatttctcttta

SEQ ID NO: 2443607 - DNA, 25 bp, Homo sapien
cattactggttatatcgtctgcatt

SEQ ID NO: 2443608 - DNA, 25 bp, Homo sapien
catggtcattactggttatatcgtc

SEQ ID NO: 2443609 - DNA, 25 bp, Homo sapien
ggcttcttactgttctgttcatgaa

SEQ ID NO: 2443610 - DNA, 25 bp, Homo sapien
ttcttactgttctgttcatgaatat

SEQ ID NO: 2443611 - DNA, 25 bp, Homo sapien
aacaggcttcttactgttctgttca

SEQ ID NO: 2443612 - DNA, 25 bp, Homo sapien
caggcttcttactgttctgttcatg

SEQ ID NO: 2443613 - DNA, 25 bp, Homo sapien
aagatcccccatggatatagaccat

SEQ ID NO: 2443614 - DNA, 25 bp, Homo sapien
taagatcccccatggatatagacca

SEQ ID NO: 2443615 - DNA, 25 bp, Homo sapien
gtaagatcccccatggatatagacc

SEQ ID NO: 2443616 - DNA, 25 bp, Homo sapien
gatgacgttcccatagctggccaaa

SEQ ID NO: 2443617 - DNA, 25 bp, Homo sapien
aatggtgataacgatgacgttccca

SEQ ID NO: 2443618 - DNA, 25 bp, Homo sapien
taacgatgacgttcccatagctggc

SEQ ID NO: 2443619 - DNA, 25 bp, Homo sapien
gttcccatagctggccaaaatgctg

SEQ ID NO: 2443620 - DNA, 25 bp, Homo sapien
agcacggggcttatctgtggctttc

SEQ ID NO: 2443621 - DNA, 25 bp, Homo sapien
cacctcgcttcagcacggggcttat

SEQ ID NO: 2443622 - DNA, 25 bp, Homo sapien
acttgtgctattttaccacctcgct

SEQ ID NO: 2443623 - DNA, 25 bp, Homo sapien
ttgtgctattttaccacctcgcttc

SEQ ID NO: 2443624 - DNA, 25 bp, Homo sapien
caaaaatgctacaagtcatatagag

SEQ ID NO: 2443625 - DNA, 25 bp, Homo sapien
ctctttggacaatagcagaaatatc

SEQ ID NO: 2443626 - DNA, 25 bp, Homo sapien
tgttaagcgcatcatctattcccaa

SEQ ID NO: 2443627 - DNA, 25 bp, Homo sapien
ctggcactgcatgagtagggtttta

SEQ ID NO: 2443628 - DNA, 25 bp, Homo sapien
tattaaattagtgaaaggagattta

SEQ ID NO: 2443629 - DNA, 25 bp, Homo sapien
atttattaaattagtgaaaggagat

SEQ ID NO: 2443630 - DNA, 25 bp, Homo sapien
ttttgagctcccacacaaacgtgcc

SEQ ID NO: 2443631 - DNA, 25 bp, Homo sapien
ccacacaaacgtgcctcttgcatac

SEQ ID NO: 2443632 - DNA, 25 bp, Homo sapien
tgagggccagacaggttaaatcaac

SEQ ID NO: 2443633 - DNA, 25 bp, Homo sapien
aataggtggtgtaaattacataatc

SEQ ID NO: 2443634 - DNA, 25 bp, Homo sapien
tgtgtactagcctttctatgtggca

SEQ ID NO: 2443635 - DNA, 25 bp, Homo sapien
actaatcaaagatacacagttcatg

SEQ ID NO: 2443636 - DNA, 25 bp, Homo sapien
gaagtgtgtccaacaatgcaagacc

SEQ ID NO: 2443637 - DNA, 25 bp, Homo sapien
tcccgggaaataacagagcaagaac

SEQ ID NO: 2443638 - DNA, 25 bp, Homo sapien
catcatctggaggactgcatcaagt

SEQ ID NO: 2443639 - DNA, 25 bp, Homo sapien
gggcacacctaaccatgactgaaag

SEQ ID NO: 2443640 - DNA, 25 bp, Homo sapien
cctttcttggcatgcagtgttcaga

SEQ ID NO: 2443641 - DNA, 25 bp, Homo sapien
tccgtgaggatagagggcccctttc

SEQ ID NO: 2443642 - DNA, 25 bp, Homo sapien
catgaagattacatccatcagtgct

SEQ ID NO: 2443643 - DNA, 25 bp, Homo sapien
tatgacagatgagggcctgatattc

SEQ ID NO: 2443644 - DNA, 25 bp, Homo sapien
gtatgctgacttgcaatcccgtggt

SEQ ID NO: 2443645 - DNA, 25 bp, Homo sapien
tgcaggtgcagctgacaacgatgct

SEQ ID NO: 2443646 - DNA, 25 bp, Homo sapien
ttgcaatcccgtggtgcctgcaggt

SEQ ID NO: 2443647 - DNA, 25 bp, Homo sapien
gctgacaacgatgcttgcagtttcc

SEQ ID NO: 2443648 - DNA, 25 bp, Homo sapien
tgagacactgttcttcttaggggat

SEQ ID NO: 2443649 - DNA, 25 bp, Homo sapien
agagacaagtgagaggacagtggag

SEQ ID NO: 2443650 - DNA, 25 bp, Homo sapien
acatagcagaaaccataacagagac

SEQ ID NO: 2443651 - DNA, 25 bp, Homo sapien
caagtgagaggacagtggagaattt

SEQ ID NO: 2443652 - DNA, 25 bp, Homo sapien
ctctaacattttcctaccttgtagg

SEQ ID NO: 2443653 - DNA, 25 bp, Homo sapien
tagcataaatgtgaatcatgaagct

SEQ ID NO: 2443654 - DNA, 25 bp, Homo sapien
gttagcataaatgtgaatcatgaag

SEQ ID NO: 2443655 - DNA, 25 bp, Homo sapien
gcataaatgtgaatcatgaagctca

SEQ ID NO: 2443656 - DNA, 25 bp, Homo sapien
cataaatgtgaatcatgaagctcat

SEQ ID NO: 2443657 - DNA, 25 bp, Homo sapien
gttttgcacaaggtggttctgtctc

SEQ ID NO: 2443658 - DNA, 25 bp, Homo sapien
tgttttgcacaaggtggttctgtct

SEQ ID NO: 2443659 - DNA, 25 bp, Homo sapien
tcaatttccctgtcagccagatcca

SEQ ID NO: 2443660 - DNA, 25 bp, Homo sapien
caatttccctgtcagccagatccat

SEQ ID NO: 2443661 - DNA, 25 bp, Homo sapien
tgctttggaaataatcatctatgcc

SEQ ID NO: 2443662 - DNA, 25 bp, Homo sapien
ttacaggaactgagggtttggcaga

SEQ ID NO: 2443663 - DNA, 25 bp, Homo sapien
aaccccttctaaggacccatagcat

SEQ ID NO: 2443664 - DNA, 25 bp, Homo sapien
ataatcatctatgccccagctcaaa

SEQ ID NO: 2443665 - DNA, 25 bp, Homo sapien
caggataaggatctgggaatattgc

SEQ ID NO: 2443666 - DNA, 25 bp, Homo sapien
cctacacagttgaggactaggtttc

SEQ ID NO: 2443667 - DNA, 25 bp, Homo sapien
tatactgctagaaaatccatcctcc

SEQ ID NO: 2443668 - DNA, 25 bp, Homo sapien
catgtagttgtcctctgcattcagc

SEQ ID NO: 2443669 - DNA, 25 bp, Homo sapien
tagatgagctttccctggaggagct

SEQ ID NO: 2443670 - DNA, 25 bp, Homo sapien
ttagatgagctttccctggaggagc

SEQ ID NO: 2443671 - DNA, 25 bp, Homo sapien
agatgagctttccctggaggagctc

SEQ ID NO: 2443672 - DNA, 25 bp, Homo sapien
gatgagctttccctggaggagctcc

SEQ ID NO: 2443673 - DNA, 25 bp, Homo sapien
ctcatggccacaatgggcttttcct

SEQ ID NO: 2443674 - DNA, 25 bp, Homo sapien
gccaccagtcactcatggccacaat

SEQ ID NO: 2443675 - DNA, 25 bp, Homo sapien
tctagattcaggagtgaagggtacc

SEQ ID NO: 2443676 - DNA, 25 bp, Homo sapien
taacatggcccaagtagtattttct

SEQ ID NO: 2443677 - DNA, 25 bp, Homo sapien
gccacacgtaatggaagtatctgtc

SEQ ID NO: 2443678 - DNA, 25 bp, Homo sapien
agggtaccgccacacgtaatggaag

SEQ ID NO: 2443679 - DNA, 25 bp, Homo sapien
aaatacttagcaggcatttgagatt

SEQ ID NO: 2443680 - DNA, 25 bp, Homo sapien
gataaaatacttagcaggcatttga

SEQ ID NO: 2443681 - DNA, 25 bp, Homo sapien
ttattccatgtgttcatttaacagg

SEQ ID NO: 2443682 - DNA, 25 bp, Homo sapien
ttgagattattccatgtgttcattt

SEQ ID NO: 2443683 - DNA, 25 bp, Homo sapien
actgacaggtcctttaggctccata

SEQ ID NO: 2443684 - DNA, 25 bp, Homo sapien
gacaggtcctttaggctccatactc

SEQ ID NO: 2443685 - DNA, 25 bp, Homo sapien
ctttcactgacaggtcctttaggct

SEQ ID NO: 2443686 - DNA, 25 bp, Homo sapien
ggtcctttaggctccatactctaag

SEQ ID NO: 2443687 - DNA, 25 bp, Homo sapien
gctgcctggtcaccggtacttaaaa

SEQ ID NO: 2443688 - DNA, 25 bp, Homo sapien
gacagggtcaacaggctgacacagg

SEQ ID NO: 2443689 - DNA, 25 bp, Homo sapien
ttttgctgcctggtcaccggtactt

SEQ ID NO: 2443690 - DNA, 25 bp, Homo sapien
gagtagtgggacagggtcaacaggc

SEQ ID NO: 2443691 - DNA, 25 bp, Homo sapien
cggatcacatcaggtcaagaagttt

SEQ ID NO: 2443692 - DNA, 25 bp, Homo sapien
taaatggtccagtcagtgtggtgcc

SEQ ID NO: 2443693 - DNA, 25 bp, Homo sapien
gaatattcatttgtacctggccagg

SEQ ID NO: 2443694 - DNA, 25 bp, Homo sapien
tgagtacttcagatgtaaatggtcc

SEQ ID NO: 2443695 - DNA, 25 bp, Homo sapien
ttgcaaggcagttgccgtctaaaac

SEQ ID NO: 2443696 - DNA, 25 bp, Homo sapien
tcacagattgcaaggcagttgccgt

SEQ ID NO: 2443697 - DNA, 25 bp, Homo sapien
cagattgcaaggcagttgccgtcta

SEQ ID NO: 2443698 - DNA, 25 bp, Homo sapien
gattgcaaggcagttgccgtctaaa

SEQ ID NO: 2443699 - DNA, 25 bp, Homo sapien
tcaggcccacccctagtactatgaa

SEQ ID NO: 2443700 - DNA, 25 bp, Homo sapien
acccctagtactatgaagccacgct

SEQ ID NO: 2443701 - DNA, 25 bp, Homo sapien
gagctgtatccctgtgaggtcctca

SEQ ID NO: 2443702 - DNA, 25 bp, Homo sapien
gcacaggatacaggagttgagctgt

SEQ ID NO: 2443703 - DNA, 25 bp, Homo sapien
tggaataatcaacaatttgggctgt

SEQ ID NO: 2443704 - DNA, 25 bp, Homo sapien
gtccaactgagaaagtgtcattatc

SEQ ID NO: 2443705 - DNA, 25 bp, Homo sapien
tcatggaataatcaacaatttgggc

SEQ ID NO: 2443706 - DNA, 25 bp, Homo sapien
caactgagaaagtgtcattatctct

SEQ ID NO: 2443707 - DNA, 25 bp, Homo sapien
gagatgaatttgccatttcagtacc

SEQ ID NO: 2443708 - DNA, 25 bp, Homo sapien
ttgagatgaatttgccatttcagta

SEQ ID NO: 2443709 - DNA, 25 bp, Homo sapien
tgagatgaatttgccatttcagtac

SEQ ID NO: 2443710 - DNA, 25 bp, Homo sapien
tattgagatgaatttgccatttcag

SEQ ID NO: 2443711 - DNA, 25 bp, Homo sapien
ccttgttgacttctgtctcattgat

SEQ ID NO: 2443712 - DNA, 25 bp, Homo sapien
ctgggtatccttgttgacttctgtc

SEQ ID NO: 2443713 - DNA, 25 bp, Homo sapien
gtatccttgttgacttctgtctcat

SEQ ID NO: 2443714 - DNA, 25 bp, Homo sapien
atccttgttgacttctgtctcattg

SEQ ID NO: 2443715 - DNA, 25 bp, Homo sapien
aactgagaaggtctgcgaaactccc

SEQ ID NO: 2443716 - DNA, 25 bp, Homo sapien
gagaaggtctgcgaaactccctttc

SEQ ID NO: 2443717 - DNA, 25 bp, Homo sapien
aaatcaactgagaaggtctgcgaaa

SEQ ID NO: 2443718 - DNA, 25 bp, Homo sapien
tttaaaattgtggatgagtttcaaa

SEQ ID NO: 2443719 - DNA, 25 bp, Homo sapien
tagccctgcagtccagttacagata

SEQ ID NO: 2443720 - DNA, 25 bp, Homo sapien
tatgtcttatagacttcccatggag

SEQ ID NO: 2443721 - DNA, 25 bp, Homo sapien
catccaagttaacagtgttcacctg

SEQ ID NO: 2443722 - DNA, 25 bp, Homo sapien
caacttacatcactatgtcttatag

SEQ ID NO: 2443723 - DNA, 25 bp, Homo sapien
ctatgataacttctgaatttgtgaa

SEQ ID NO: 2443724 - DNA, 25 bp, Homo sapien
acttctaattcaagtgaaatggtca

SEQ ID NO: 2443725 - DNA, 25 bp, Homo sapien
gatcagggctcttgggtctaccatg

SEQ ID NO: 2443726 - DNA, 25 bp, Homo sapien
ttgggtaggaccctataccaggatc

SEQ ID NO: 2443727 - DNA, 25 bp, Homo sapien
atcagggctcttgggtctaccatgg

SEQ ID NO: 2443728 - DNA, 25 bp, Homo sapien
taggaccctataccaggatcagggc

SEQ ID NO: 2443729 - DNA, 25 bp, Homo sapien
tgagtgatcctcaatctaaacttat

SEQ ID NO: 2443730 - DNA, 25 bp, Homo sapien
tcctcaatctaaacttatacagact

SEQ ID NO: 2443731 - DNA, 25 bp, Homo sapien
cttttctgtagaatgctaaaatcta

SEQ ID NO: 2443732 - DNA, 25 bp, Homo sapien
cagacttttctgtagaatgctaaaa

SEQ ID NO: 2443733 - DNA, 25 bp, Homo sapien
tttcatcctcttgggatattggagt

SEQ ID NO: 2443734 - DNA, 25 bp, Homo sapien
ctcttgggatattggagtagtctcc

SEQ ID NO: 2443735 - DNA, 25 bp, Homo sapien
cagagatacaggactagcctacttc

SEQ ID NO: 2443736 - DNA, 25 bp, Homo sapien
ctgcagagatacaggactagcctac

SEQ ID NO: 2443737 - DNA, 25 bp, Homo sapien
ctatttttgaccagtgggtaccact

SEQ ID NO: 2443738 - DNA, 25 bp, Homo sapien
tcagtgcagctccacactttttttt

SEQ ID NO: 2443739 - DNA, 25 bp, Homo sapien
gtgcagctccacacttttttttccc

SEQ ID NO: 2443740 - DNA, 25 bp, Homo sapien
agtgcagctccacacttttttttcc

SEQ ID NO: 2443741 - DNA, 25 bp, Homo sapien
cagtgcagctccacacttttttttc

SEQ ID NO: 2443742 - DNA, 25 bp, Homo sapien
aaattcactcagtgttgttccaatg

SEQ ID NO: 2443743 - DNA, 25 bp, Homo sapien
actcagtgttgttccaatgcagaga

SEQ ID NO: 2443744 - DNA, 25 bp, Homo sapien
ttgtaaattcactcagtgttgttcc

SEQ ID NO: 2443745 - DNA, 25 bp, Homo sapien
gaagcaagttttgatgccccatagc

SEQ ID NO: 2443746 - DNA, 25 bp, Homo sapien
ctgtgctagttctaccaccatccat

SEQ ID NO: 2443747 - DNA, 25 bp, Homo sapien
ggcaccaacagattccattacattg

SEQ ID NO: 2443748 - DNA, 25 bp, Homo sapien
tcttggaaatcgacatgcatggcac

SEQ ID NO: 2443749 - DNA, 25 bp, Homo sapien
tacattgttgcccatcatccatgat

SEQ ID NO: 2443750 - DNA, 25 bp, Homo sapien
ctaagaattcttgtacatggactaa

SEQ ID NO: 2443751 - DNA, 25 bp, Homo sapien
gggtgcataggatctgagataagaa

SEQ ID NO: 2443752 - DNA, 25 bp, Homo sapien
ggatctgagataagaatctcccact

SEQ ID NO: 2443753 - DNA, 25 bp, Homo sapien
tatctcatccacataatggtcccca

SEQ ID NO: 2443754 - DNA, 25 bp, Homo sapien
gccatttctggggtgcataggatct

SEQ ID NO: 2443755 - DNA, 25 bp, Homo sapien
ggcttttaccacattctccaatttg

SEQ ID NO: 2443756 - DNA, 25 bp, Homo sapien
tactgcctgataaactccctctccc

SEQ ID NO: 2443757 - DNA, 25 bp, Homo sapien
tctcccatttctcatgctggctttt

SEQ ID NO: 2443758 - DNA, 25 bp, Homo sapien
tgtctcaagtcctctgctttacccc

SEQ ID NO: 2443759 - DNA, 25 bp, Homo sapien
cagactgttagcgagcactgctcaa

SEQ ID NO: 2443760 - DNA, 25 bp, Homo sapien
tctgaactgacaactagggtgccat

SEQ ID NO: 2443761 - DNA, 25 bp, Homo sapien
cataatgcctcagagcttgttggcg

SEQ ID NO: 2443762 - DNA, 25 bp, Homo sapien
gagggaaggttctgtcaacacggca

SEQ ID NO: 2443763 - DNA, 25 bp, Homo sapien
ggatgctccacccacattcccttgg

SEQ ID NO: 2443764 - DNA, 25 bp, Homo sapien
gatgctccacccacattcccttggc

SEQ ID NO: 2443765 - DNA, 25 bp, Homo sapien
tgctccacccacattcccttggcca

SEQ ID NO: 2443766 - DNA, 25 bp, Homo sapien
ctggatgctccacccacattccctt

SEQ ID NO: 2443767 - DNA, 25 bp, Homo sapien
gtctgaacggtgctccataagtgcc

SEQ ID NO: 2443768 - DNA, 25 bp, Homo sapien
cagtatgagacatatcaccagcaca

SEQ ID NO: 2443769 - DNA, 25 bp, Homo sapien
gattgagtgctttctcagtatgaga

SEQ ID NO: 2443770 - DNA, 25 bp, Homo sapien
ccagcacagaagacctgatgcctgt

SEQ ID NO: 2443771 - DNA, 25 bp, Homo sapien
tctaaagacaacagagaatagcgat

SEQ ID NO: 2443772 - DNA, 25 bp, Homo sapien
aaaactggattgtgttgataaccac

SEQ ID NO: 2443773 - DNA, 25 bp, Homo sapien
cattgcacaagtatacctatgtacc

SEQ ID NO: 2443774 - DNA, 25 bp, Homo sapien
tgtaaattggcatacagcatcttgc

SEQ ID NO: 2443775 - DNA, 25 bp, Homo sapien
tcagcgctaataacctttgtgccag

SEQ ID NO: 2443776 - DNA, 25 bp, Homo sapien
tcttcctgtacttgatgctcactct

SEQ ID NO: 2443777 - DNA, 25 bp, Homo sapien
gctctaataaccctcatgccactgt

SEQ ID NO: 2443778 - DNA, 25 bp, Homo sapien
ctaataaccctcatgccactgtgat

SEQ ID NO: 2443779 - DNA, 25 bp, Homo sapien
taagactcatgctttcctggttgtg

SEQ ID NO: 2443780 - DNA, 25 bp, Homo sapien
tcctgaacattgaatgtatgagggt

SEQ ID NO: 2443781 - DNA, 25 bp, Homo sapien
cctgaacattgaatgtatgagggtg

SEQ ID NO: 2443782 - DNA, 25 bp, Homo sapien
gataagactcatgctttcctggttg

SEQ ID NO: 2443783 - DNA, 25 bp, Homo sapien
agccaggtgccacaggtgctgactt

SEQ ID NO: 2443784 - DNA, 25 bp, Homo sapien
gccaggtgccacaggtgctgacttc

SEQ ID NO: 2443785 - DNA, 25 bp, Homo sapien
cagccaggtgccacaggtgctgact

SEQ ID NO: 2443786 - DNA, 25 bp, Homo sapien
tcagccaggtgccacaggtgctgac

SEQ ID NO: 2443787 - DNA, 25 bp, Homo sapien
catcagctattcgcacagcagcagc

SEQ ID NO: 2443788 - DNA, 25 bp, Homo sapien
atcagctattcgcacagcagcagct

SEQ ID NO: 2443789 - DNA, 25 bp, Homo sapien
tcagctattcgcacagcagcagctt

SEQ ID NO: 2443790 - DNA, 25 bp, Homo sapien
tgtaatctatatattcttccctgcc

SEQ ID NO: 2443791 - DNA, 25 bp, Homo sapien
cctgtaatctatatattcttccctg

SEQ ID NO: 2443792 - DNA, 25 bp, Homo sapien
ttgttgatattatgctcttcagtcc

SEQ ID NO: 2443793 - DNA, 25 bp, Homo sapien
tcttcagtcctagtatagccatttt

SEQ ID NO: 2443794 - DNA, 25 bp, Homo sapien
cttgtgggagcccgcatggtagcct

SEQ ID NO: 2443795 - DNA, 25 bp, Homo sapien
aggagtttctgttgttgcaactggc

SEQ ID NO: 2443796 - DNA, 25 bp, Homo sapien
tttctgttgttgcaactggctctcc

SEQ ID NO: 2443797 - DNA, 25 bp, Homo sapien
gtgggagcccgcatggtagcctcca

SEQ ID NO: 2443798 - DNA, 25 bp, Homo sapien
gatagcttccagaggacctcagcaa

SEQ ID NO: 2443799 - DNA, 25 bp, Homo sapien
gggcctggccagtgtcaacatcagg

SEQ ID NO: 2443800 - DNA, 25 bp, Homo sapien
gcatgtgcatggaagcaactctggt

SEQ ID NO: 2443801 - DNA, 25 bp, Homo sapien
cctctttgcaggcatgtgcatggaa

SEQ ID NO: 2443802 - DNA, 25 bp, Homo sapien
gcatggaagcaactctggtagttaa

SEQ ID NO: 2443803 - DNA, 25 bp, Homo sapien
ggaagcaactctggtagttaagtga

SEQ ID NO: 2443804 - DNA, 25 bp, Homo sapien
gaaatgacgagatcattgctcctct

SEQ ID NO: 2443805 - DNA, 25 bp, Homo sapien
gaggacatttcttagctaacaggtc

SEQ ID NO: 2443806 - DNA, 25 bp, Homo sapien
ccaacttctgttttcgggtctgaga

SEQ ID NO: 2443807 - DNA, 25 bp, Homo sapien
taacatttgttgcagggaaatgacg

SEQ ID NO: 2443808 - DNA, 25 bp, Homo sapien
tcctcttgcggagacctcttccgag

SEQ ID NO: 2443809 - DNA, 25 bp, Homo sapien
gggcactctcctcttgcggagacct

SEQ ID NO: 2443810 - DNA, 25 bp, Homo sapien
ttgcggagacctcttccgagctcat

SEQ ID NO: 2443811 - DNA, 25 bp, Homo sapien
ctcttgcggagacctcttccgagct

SEQ ID NO: 2443812 - DNA, 25 bp, Homo sapien
ttgctgcttcctaatcctccttgga

SEQ ID NO: 2443813 - DNA, 25 bp, Homo sapien
gttagttgcagagggtactcttttc

SEQ ID NO: 2443814 - DNA, 25 bp, Homo sapien
aaaaattgttctgacgtaggtagca

SEQ ID NO: 2443815 - DNA, 25 bp, Homo sapien
gtagcagtgatgtgcatgttagttg

SEQ ID NO: 2443816 - DNA, 25 bp, Homo sapien
cctcactgtgagctggatttttggc

SEQ ID NO: 2443817 - DNA, 25 bp, Homo sapien
agctggatttttggccttaacactt

SEQ ID NO: 2443818 - DNA, 25 bp, Homo sapien
tcactgtgagctggatttttggcct

SEQ ID NO: 2443819 - DNA, 25 bp, Homo sapien
cttccctcactgtgagctggatttt

SEQ ID NO: 2443820 - DNA, 25 bp, Homo sapien
tacatcaattgcagtagcttggaaa

SEQ ID NO: 2443821 - DNA, 25 bp, Homo sapien
caattgcagtagcttggaaaccttt

SEQ ID NO: 2443822 - DNA, 25 bp, Homo sapien
tatttacatcaattgcagtagcttg

SEQ ID NO: 2443823 - DNA, 25 bp, Homo sapien
tctcccttatttacatcaattgcag

SEQ ID NO: 2443824 - DNA, 25 bp, Homo sapien
acaagtcactgactgataacagagg

SEQ ID NO: 2443825 - DNA, 25 bp, Homo sapien
cctcagaaatggttaacctgaatcc

SEQ ID NO: 2443826 - DNA, 25 bp, Homo sapien
tgtggcccaactgatgtagctttgc

SEQ ID NO: 2443827 - DNA, 25 bp, Homo sapien
gcagcatgtcatgtcatgtgtgctt

SEQ ID NO: 2443828 - DNA, 25 bp, Homo sapien
catgtgcatgggttccactgttcta

SEQ ID NO: 2443829 - DNA, 25 bp, Homo sapien
tcatgagatcgaaggacactcacgg

SEQ ID NO: 2443830 - DNA, 25 bp, Homo sapien
gaacacatgccacaatctctttggt

SEQ ID NO: 2443831 - DNA, 25 bp, Homo sapien
acactcacggcttcggcacacgatg

SEQ ID NO: 2443832 - DNA, 25 bp, Homo sapien
caactgtcggcgggtggtacgtcat

SEQ ID NO: 2443833 - DNA, 25 bp, Homo sapien
tctggatgggtagtctgtggccacc

SEQ ID NO: 2443834 - DNA, 25 bp, Homo sapien
tcatctttgacatggaaggacttct

SEQ ID NO: 2443835 - DNA, 25 bp, Homo sapien
tgtggccaccgcctccgtgagggcg

SEQ ID NO: 2443836 - DNA, 25 bp, Homo sapien
ccagggaattccgtgacgaatgcca

SEQ ID NO: 2443837 - DNA, 25 bp, Homo sapien
ggcccgattccggtgtgaatgagaa

SEQ ID NO: 2443838 - DNA, 25 bp, Homo sapien
caaccttatggctcgcagtgatgcg

SEQ ID NO: 2443839 - DNA, 25 bp, Homo sapien
gctggctgagtagcttggcccgatt

SEQ ID NO: 2443840 - DNA, 25 bp, Homo sapien
tctccgcacactgcgcatgcgtggc

SEQ ID NO: 2443841 - DNA, 25 bp, Homo sapien
agaggttgtggaccctctccgcaca

SEQ ID NO: 2443842 - DNA, 25 bp, Homo sapien
ttggctttgccctgcgacagaggtt

SEQ ID NO: 2443843 - DNA, 25 bp, Homo sapien
tcaacatcctccttgctcaacttgg

SEQ ID NO: 2443844 - DNA, 25 bp, Homo sapien
tgcctgatggaaatcttagcaaaat

SEQ ID NO: 2443845 - DNA, 25 bp, Homo sapien
tgatagatgtcgcaggaaactggag

SEQ ID NO: 2443846 - DNA, 25 bp, Homo sapien
ctgtagagagtttgatgcctgatgg

SEQ ID NO: 2443847 - DNA, 25 bp, Homo sapien
aaaatgatagatgtcgcaggaaact

SEQ ID NO: 2443848 - DNA, 25 bp, Homo sapien
gttgctctttgccataggatcctaa

SEQ ID NO: 2443849 - DNA, 25 bp, Homo sapien
acagttgctctttgccataggatcc

SEQ ID NO: 2443850 - DNA, 25 bp, Homo sapien
cctcacagttgctctttgccatagg

SEQ ID NO: 2443851 - DNA, 25 bp, Homo sapien
ctctttgccataggatcctaatacc

SEQ ID NO: 2443852 - DNA, 25 bp, Homo sapien
caaactgtgtgcattggctggttcg

SEQ ID NO: 2443853 - DNA, 25 bp, Homo sapien
catcatgatcagacatggagggtat

SEQ ID NO: 2443854 - DNA, 25 bp, Homo sapien
cagagattgaggacactagggtgac

SEQ ID NO: 2443855 - DNA, 25 bp, Homo sapien
gacaagaggtcaggataaatcatca

SEQ ID NO: 2443856 - DNA, 25 bp, Homo sapien
tgtggcaaatctttcgctaccttgc

SEQ ID NO: 2443857 - DNA, 25 bp, Homo sapien
tgtccatgtggcaaatctttcgcta

SEQ ID NO: 2443858 - DNA, 25 bp, Homo sapien
tggcaaatctttcgctaccttgcat

SEQ ID NO: 2443859 - DNA, 25 bp, Homo sapien
tccatgtggcaaatctttcgctacc

SEQ ID NO: 2443860 - DNA, 25 bp, Homo sapien
tataatcccttaattttcctttgca

SEQ ID NO: 2443861 - DNA, 25 bp, Homo sapien
cttgacttcccataaagtatttata

SEQ ID NO: 2443862 - DNA, 25 bp, Homo sapien
cataaagtatttataatcccttaat

SEQ ID NO: 2443863 - DNA, 25 bp, Homo sapien
attttcctttgcaattctcccccat

SEQ ID NO: 2443864 - DNA, 25 bp, Homo sapien
ctcacggaaagaacagtaggtggaa

SEQ ID NO: 2443865 - DNA, 25 bp, Homo sapien
cagcttctcacggaaagaacagtag

SEQ ID NO: 2443866 - DNA, 25 bp, Homo sapien
aaggtcgtcaaccatgaccaggatg

SEQ ID NO: 2443867 - DNA, 25 bp, Homo sapien
aatgccaaggtcgtcaaccatgacc

SEQ ID NO: 2443868 - DNA, 25 bp, Homo sapien
tgtttactgaggagctgcctttcca

SEQ ID NO: 2443869 - DNA, 25 bp, Homo sapien
tttactgaggagctgcctttccaac

SEQ ID NO: 2443870 - DNA, 25 bp, Homo sapien
ttatgtgtttactgaggagctgcct

SEQ ID NO: 2443871 - DNA, 25 bp, Homo sapien
tgtgtttactgaggagctgcctttc

SEQ ID NO: 2443872 - DNA, 25 bp, Homo sapien
agggactggaagtaatcacagaagc

SEQ ID NO: 2443873 - DNA, 25 bp, Homo sapien
ttcagggactggaagtaatcacaga

SEQ ID NO: 2443874 - DNA, 25 bp, Homo sapien
atctggtagttcctcatgatgaaga

SEQ ID NO: 2443875 - DNA, 25 bp, Homo sapien
tgcctccaccattagcctctgagtg

SEQ ID NO: 2443876 - DNA, 25 bp, Homo sapien
tactgggtgagaggcctttttgaag

SEQ ID NO: 2443877 - DNA, 25 bp, Homo sapien
catccccacagactccgtgtttact

SEQ ID NO: 2443878 - DNA, 25 bp, Homo sapien
cccacagactccgtgtttacttttg

SEQ ID NO: 2443879 - DNA, 25 bp, Homo sapien
tacttttgccggcaaagtccttgct

SEQ ID NO: 2443880 - DNA, 25 bp, Homo sapien
ttacttttgccggcaaagtccttgc

SEQ ID NO: 2443881 - DNA, 25 bp, Homo sapien
gggaaccaccgccaagtgaggctct

SEQ ID NO: 2443882 - DNA, 25 bp, Homo sapien
gcaacatgacttccttcaaggcaga

SEQ ID NO: 2443883 - DNA, 25 bp, Homo sapien
ggcccaatgccggaaacacagaaga

SEQ ID NO: 2443884 - DNA, 25 bp, Homo sapien
gcagatgcacagacccactggtgac

SEQ ID NO: 2443885 - DNA, 25 bp, Homo sapien
tgtggcccttatatgaccaacacct

SEQ ID NO: 2443886 - DNA, 25 bp, Homo sapien
tgaccaacacctcccgttgagggat

SEQ ID NO: 2443887 - DNA, 25 bp, Homo sapien
acctcccgttgagggatagagacca

SEQ ID NO: 2443888 - DNA, 25 bp, Homo sapien
cagttttcctgtggcccttatatga

SEQ ID NO: 2443889 - DNA, 25 bp, Homo sapien
ctgtgtctcacattcccacagtgtt

SEQ ID NO: 2443890 - DNA, 25 bp, Homo sapien
gccctgttcccttgagaaaatagct

SEQ ID NO: 2443891 - DNA, 25 bp, Homo sapien
gtgtttccatgtgagtattatgtgg

SEQ ID NO: 2443892 - DNA, 25 bp, Homo sapien
tatgtggaacgattatcacaagcac

SEQ ID NO: 2443893 - DNA, 25 bp, Homo sapien
ttgggacttcctctgctggtaaaga

SEQ ID NO: 2443894 - DNA, 25 bp, Homo sapien
gacttcctctgctggtaaagaggag

SEQ ID NO: 2443895 - DNA, 25 bp, Homo sapien
tcctctgctggtaaagaggagctgt

SEQ ID NO: 2443896 - DNA, 25 bp, Homo sapien
tggtaaagaggagctgtgggtgtcg

SEQ ID NO: 2443897 - DNA, 25 bp, Homo sapien
tcttgccagatcccattgaaagata

SEQ ID NO: 2443898 - DNA, 25 bp, Homo sapien
cttgccagatcccattgaaagataa

SEQ ID NO: 2443899 - DNA, 25 bp, Homo sapien
ttgccagatcccattgaaagataat

SEQ ID NO: 2443900 - DNA, 25 bp, Homo sapien
caccttgaatatctataccttcttc

SEQ ID NO: 2443901 - DNA, 25 bp, Homo sapien
tcaccttgaatatctataccttctt

SEQ ID NO: 2443902 - DNA, 25 bp, Homo sapien
accttgaatatctataccttcttca

SEQ ID NO: 2443903 - DNA, 25 bp, Homo sapien
gtcatcttgctcatgggattgaaca

SEQ ID NO: 2443904 - DNA, 25 bp, Homo sapien
gctgatgctggtggtcatcttgctc

SEQ ID NO: 2443905 - DNA, 25 bp, Homo sapien
aggctcctctgaaggctgatgctgg

SEQ ID NO: 2443906 - DNA, 25 bp, Homo sapien
tccacaggctcctctgaaggctgat

SEQ ID NO: 2443907 - DNA, 25 bp, Homo sapien
tctccttccatggactcaacaccag

SEQ ID NO: 2443908 - DNA, 25 bp, Homo sapien
cctttcctctcgaggctcattttct

SEQ ID NO: 2443909 - DNA, 25 bp, Homo sapien
ttcctctcgaggctcattttctctc

SEQ ID NO: 2443910 - DNA, 25 bp, Homo sapien
cctctcgaggctcattttctctcct

SEQ ID NO: 2443911 - DNA, 25 bp, Homo sapien
cctggtagagacaagcccctaaatg

SEQ ID NO: 2443912 - DNA, 25 bp, Homo sapien
tggtagagacaagcccctaaatgga

SEQ ID NO: 2443913 - DNA, 25 bp, Homo sapien
tcctggtagagacaagcccctaaat

SEQ ID NO: 2443914 - DNA, 25 bp, Homo sapien
ctggtagagacaagcccctaaatgg

SEQ ID NO: 2443915 - DNA, 25 bp, Homo sapien
ctgagaatattgctcctggtaaaac

SEQ ID NO: 2443916 - DNA, 25 bp, Homo sapien
tgagaatattgctcctggtaaaacc

SEQ ID NO: 2443917 - DNA, 25 bp, Homo sapien
gctgagaatattgctcctggtaaaa

SEQ ID NO: 2443918 - DNA, 25 bp, Homo sapien
gagctgagaatattgctcctggtaa

SEQ ID NO: 2443919 - DNA, 25 bp, Homo sapien
tgctctcagatcaatacagtctaaa

SEQ ID NO: 2443920 - DNA, 25 bp, Homo sapien
cctctgctctcagatcaatacagtc

SEQ ID NO: 2443921 - DNA, 25 bp, Homo sapien
gctctcagatcaatacagtctaaac

SEQ ID NO: 2443922 - DNA, 25 bp, Homo sapien
tctgctctcagatcaatacagtcta

SEQ ID NO: 2443923 - DNA, 25 bp, Homo sapien
atggcaaaaaggctagagcctacac

SEQ ID NO: 2443924 - DNA, 25 bp, Homo sapien
tctgattctgccgaggtattttgat

SEQ ID NO: 2443925 - DNA, 25 bp, Homo sapien
gctagagcctacactgatgaatacc

SEQ ID NO: 2443926 - DNA, 25 bp, Homo sapien
tctgccgaggtattttgatggcaaa

SEQ ID NO: 2443927 - DNA, 25 bp, Homo sapien
tgtgtgaccactgtagccaaagttg

SEQ ID NO: 2443928 - DNA, 25 bp, Homo sapien
gagacaaccactcactgttgagtac

SEQ ID NO: 2443929 - DNA, 25 bp, Homo sapien
taagggaaactgttgtcattgggtc

SEQ ID NO: 2443930 - DNA, 25 bp, Homo sapien
agcagctcccttttaccctctgtga

SEQ ID NO: 2443931 - DNA, 25 bp, Homo sapien
tcaaactgctaatacagttcttgtt

SEQ ID NO: 2443932 - DNA, 25 bp, Homo sapien
ccaccaacaactgtcaggccaagaa

SEQ ID NO: 2443933 - DNA, 25 bp, Homo sapien
caggtttgtaattggatattggtcg

SEQ ID NO: 2443934 - DNA, 25 bp, Homo sapien
aggtagacttgaagtgctttgcagg

SEQ ID NO: 2443935 - DNA, 25 bp, Homo sapien
ccacaggaattgcatttcctgttga

SEQ ID NO: 2443936 - DNA, 25 bp, Homo sapien
aaaacacagtccatgactgactcaa

SEQ ID NO: 2443937 - DNA, 25 bp, Homo sapien
agggtggatgacagccaaagatgcc

SEQ ID NO: 2443938 - DNA, 25 bp, Homo sapien
tgaaagacatagtcactccaaggaa

SEQ ID NO: 2443939 - DNA, 25 bp, Homo sapien
taacaggatggcatgaagatgcccc

SEQ ID NO: 2443940 - DNA, 25 bp, Homo sapien
cctgctgcccagttgtggggtactc

SEQ ID NO: 2443941 - DNA, 25 bp, Homo sapien
gttgtggggtactcatctctgtgct

SEQ ID NO: 2443942 - DNA, 25 bp, Homo sapien
tctgttgtgggttttcgccacccat

SEQ ID NO: 2443943 - DNA, 25 bp, Homo sapien
gcttgttctgttgtgggttttcgcc

SEQ ID NO: 2443944 - DNA, 25 bp, Homo sapien
tagaccttatcaggaggctctcgat

SEQ ID NO: 2443945 - DNA, 25 bp, Homo sapien
ctcgatataagaccagccacagaac

SEQ ID NO: 2443946 - DNA, 25 bp, Homo sapien
aggaggctctcgatataagaccagc

SEQ ID NO: 2443947 - DNA, 25 bp, Homo sapien
ttagaccttatcaggaggctctcga

SEQ ID NO: 2443948 - DNA, 25 bp, Homo sapien
cacgtaggcacaccatgcagataaa

SEQ ID NO: 2443949 - DNA, 25 bp, Homo sapien
acgtaggcacaccatgcagataaac

SEQ ID NO: 2443950 - DNA, 25 bp, Homo sapien
gatgagatttgctttgtcctactgt

SEQ ID NO: 2443951 - DNA, 25 bp, Homo sapien
tgactttggttgacataaggagatg

SEQ ID NO: 2443952 - DNA, 25 bp, Homo sapien
tgtcagaaaatgagaggccatccac

SEQ ID NO: 2443953 - DNA, 25 bp, Homo sapien
tgtggtttccagttccgatctgtgc

SEQ ID NO: 2443954 - DNA, 25 bp, Homo sapien
gggcagcctccatgatagcaaacct

SEQ ID NO: 2443955 - DNA, 25 bp, Homo sapien
taagggcagcctccatgatagcaaa

SEQ ID NO: 2443956 - DNA, 25 bp, Homo sapien
gcagcctccatgatagcaaacctga

SEQ ID NO: 2443957 - DNA, 25 bp, Homo sapien
atgttaagggcagcctccatgatag

SEQ ID NO: 2443958 - DNA, 25 bp, Homo sapien
taccatgttggtatctgttactaaa

SEQ ID NO: 2443959 - DNA, 25 bp, Homo sapien
ccttgcttttgtaacgtgtccacct

SEQ ID NO: 2443960 - DNA, 25 bp, Homo sapien
tgcttttgtaacgtgtccaccttgg

SEQ ID NO: 2443961 - DNA, 25 bp, Homo sapien
ttgcttttgtaacgtgtccaccttg

SEQ ID NO: 2443962 - DNA, 25 bp, Homo sapien
ttcttccagccttcccacttgtatt

SEQ ID NO: 2443963 - DNA, 25 bp, Homo sapien
cagccttcccacttgtattaaacca

SEQ ID NO: 2443964 - DNA, 25 bp, Homo sapien
ttataagggcatgattttcttccag

SEQ ID NO: 2443965 - DNA, 25 bp, Homo sapien
attataagggcatgattttcttcca

SEQ ID NO: 2443966 - DNA, 25 bp, Homo sapien
gagtcttggtcctctgggtgcgccc

SEQ ID NO: 2443967 - DNA, 25 bp, Homo sapien
agtcttggtcctctgggtgcgccca

SEQ ID NO: 2443968 - DNA, 25 bp, Homo sapien
gtcttggtcctctgggtgcgcccaa

SEQ ID NO: 2443969 - DNA, 25 bp, Homo sapien
tcttggtcctctgggtgcgcccaat

SEQ ID NO: 2443970 - DNA, 25 bp, Homo sapien
gcaggatgtatcagacaaaattgca

SEQ ID NO: 2443971 - DNA, 25 bp, Homo sapien
gaagtctggagtgactgggcaattc

SEQ ID NO: 2443972 - DNA, 25 bp, Homo sapien
ttgtaaaacagtccgcaaattcctg

SEQ ID NO: 2443973 - DNA, 25 bp, Homo sapien
ggcacctaatgttagaagtctggag

SEQ ID NO: 2443974 - DNA, 25 bp, Homo sapien
tgtctcccttgatggtctgctgcat

SEQ ID NO: 2443975 - DNA, 25 bp, Homo sapien
tggatgtctcccttgatggtctgct

SEQ ID NO: 2443976 - DNA, 25 bp, Homo sapien
gctgcatcacttgtgctgcaaacct

SEQ ID NO: 2443977 - DNA, 25 bp, Homo sapien
catcacttgtgctgcaaacctggag

SEQ ID NO: 2443978 - DNA, 25 bp, Homo sapien
aattcagggcagaagacgtactcac

SEQ ID NO: 2443979 - DNA, 25 bp, Homo sapien
aagtggtagcagagtagaattcagg

SEQ ID NO: 2443980 - DNA, 25 bp, Homo sapien
agaattcagggcagaagacgtactc

SEQ ID NO: 2443981 - DNA, 25 bp, Homo sapien
ttaattcacccaagtggtagcagag

SEQ ID NO: 2443982 - DNA, 25 bp, Homo sapien
tcaggatcacatgggagaaggctag

SEQ ID NO: 2443983 - DNA, 25 bp, Homo sapien
agcaggtgaggcatcaggatcacat

SEQ ID NO: 2443984 - DNA, 25 bp, Homo sapien
caggatcacatgggagaaggctagg

SEQ ID NO: 2443985 - DNA, 25 bp, Homo sapien
caggtgaggcatcaggatcacatgg

SEQ ID NO: 2443986 - DNA, 25 bp, Homo sapien
tatggatcaggcaatgggtaacagc

SEQ ID NO: 2443987 - DNA, 25 bp, Homo sapien
caatgggtaacagctttggtgagga

SEQ ID NO: 2443988 - DNA, 25 bp, Homo sapien
tcatctatggatcaggcaatgggta

SEQ ID NO: 2443989 - DNA, 25 bp, Homo sapien
aggatgtcctgcaaaactttgtggt

SEQ ID NO: 2443990 - DNA, 25 bp, Homo sapien
tccaaagcacaatctgatttaaaag

SEQ ID NO: 2443991 - DNA, 25 bp, Homo sapien
catccgtgctccaaagcacaatctg

SEQ ID NO: 2443992 - DNA, 25 bp, Homo sapien
ctttgcatccatccgtgctccaaag

SEQ ID NO: 2443993 - DNA, 25 bp, Homo sapien
ttgcatccatccgtgctccaaagca

SEQ ID NO: 2443994 - DNA, 25 bp, Homo sapien
ttctgtgactatagtcatcaaccat

SEQ ID NO: 2443995 - DNA, 25 bp, Homo sapien
cataggctggtgaagcagtcatcct

SEQ ID NO: 2443996 - DNA, 25 bp, Homo sapien
ggtactgtttttgaccctaatggca

SEQ ID NO: 2443997 - DNA, 25 bp, Homo sapien
taatggcatcagaggagaacagatc

SEQ ID NO: 2443998 - DNA, 25 bp, Homo sapien
aggagccaaggaaatccaccaccag

SEQ ID NO: 2443999 - DNA, 25 bp, Homo sapien
ctggcttcattaatatttccatcat

SEQ ID NO: 2444000 - DNA, 25 bp, Homo sapien
ctttaatttacctggcttcattaat

SEQ ID NO: 2444001 - DNA, 25 bp, Homo sapien
acctggcttcattaatatttccatc

SEQ ID NO: 2444002 - DNA, 25 bp, Homo sapien
ttctttaatttacctggcttcatta

SEQ ID NO: 2444003 - DNA, 25 bp, Homo sapien
gatgtctagcaaaacaataggtgtg

SEQ ID NO: 2444004 - DNA, 25 bp, Homo sapien
catcttcatacaataagctcatgga

SEQ ID NO: 2444005 - DNA, 25 bp, Homo sapien
ggatccatattcacagatgtctagc

SEQ ID NO: 2444006 - DNA, 25 bp, Homo sapien
tgtgcgatggccttgagctttcaag

SEQ ID NO: 2444007 - DNA, 25 bp, Homo sapien
agatgtatgtctaccctcagctgct

SEQ ID NO: 2444008 - DNA, 25 bp, Homo sapien
cagatgtatgtctaccctcagctgc

SEQ ID NO: 2444009 - DNA, 25 bp, Homo sapien
gatcaagctgatggtgaaaaaactc

SEQ ID NO: 2444010 - DNA, 25 bp, Homo sapien
caagctgatggtgaaaaaactcatc

SEQ ID NO: 2444011 - DNA, 25 bp, Homo sapien
tagagatcaagctgatggtgaaaaa

SEQ ID NO: 2444012 - DNA, 25 bp, Homo sapien
gagatcaagctgatggtgaaaaaac

SEQ ID NO: 2444013 - DNA, 25 bp, Homo sapien
gcaatcaaacatgtgtttggttatt

SEQ ID NO: 2444014 - DNA, 25 bp, Homo sapien
ctttcccgtacagcaatcaaacatg

SEQ ID NO: 2444015 - DNA, 25 bp, Homo sapien
gtgtttggttatttcacatagttcc

SEQ ID NO: 2444016 - DNA, 25 bp, Homo sapien
ctctgtcactttcccgtacagcaat

SEQ ID NO: 2444017 - DNA, 25 bp, Homo sapien
agtcgcttaaactctgtggcctttg

SEQ ID NO: 2444018 - DNA, 25 bp, Homo sapien
cttaaactctgtggcctttgaaatc

SEQ ID NO: 2444019 - DNA, 25 bp, Homo sapien
cagtagtcgcttaaactctgtggcc

SEQ ID NO: 2444020 - DNA, 25 bp, Homo sapien
tccagtagtcgcttaaactctgtgg

SEQ ID NO: 2444021 - DNA, 25 bp, Homo sapien
tgtctatgtctatgtttataaccat

SEQ ID NO: 2444022 - DNA, 25 bp, Homo sapien
cattttccatgtcaatgtctatgtc

SEQ ID NO: 2444023 - DNA, 25 bp, Homo sapien
aatgtctatgtctatgtttataacc

SEQ ID NO: 2444024 - DNA, 25 bp, Homo sapien
atcattttccatgtcaatgtctatg

SEQ ID NO: 2444025 - DNA, 25 bp, Homo sapien
ttcacgtggaatctccttgatactc

SEQ ID NO: 2444026 - DNA, 25 bp, Homo sapien
tcaatcaatttcacgtggaatctcc

SEQ ID NO: 2444027 - DNA, 25 bp, Homo sapien
atcaatttcacgtggaatctccttg

SEQ ID NO: 2444028 - DNA, 25 bp, Homo sapien
caatttcacgtggaatctccttgat

SEQ ID NO: 2444029 - DNA, 25 bp, Homo sapien
tgctgggatcatactaatttttcct

SEQ ID NO: 2444030 - DNA, 25 bp, Homo sapien
tctggcatatggcaccaacaatgag

SEQ ID NO: 2444031 - DNA, 25 bp, Homo sapien
caccaacaatgagggatgaaacact

SEQ ID NO: 2444032 - DNA, 25 bp, Homo sapien
gttgtctgtctctggcatatggcac

SEQ ID NO: 2444033 - DNA, 25 bp, Homo sapien
acatgaaagcacacagtactgactg

SEQ ID NO: 2444034 - DNA, 25 bp, Homo sapien
attactcttccttagcttaaattca

SEQ ID NO: 2444035 - DNA, 25 bp, Homo sapien
attttctgtctcatgctcagcaggc

SEQ ID NO: 2444036 - DNA, 25 bp, Homo sapien
tttctgtctcatgctcagcaggctt

SEQ ID NO: 2444037 - DNA, 25 bp, Homo sapien
tactcttccttagcttaaattcaat

SEQ ID NO: 2444038 - DNA, 25 bp, Homo sapien
tcatgcaaacacatcagtgactgag

SEQ ID NO: 2444039 - DNA, 25 bp, Homo sapien
tgcaaacacatcagtgactgagagg

SEQ ID NO: 2444040 - DNA, 25 bp, Homo sapien
agtgactgagaggaaatcagcttct

SEQ ID NO: 2444041 - DNA, 25 bp, Homo sapien
gactgagaggaaatcagcttctaga

SEQ ID NO: 2444042 - DNA, 25 bp, Homo sapien
tctttttctcctccccagtgctgtg

SEQ ID NO: 2444043 - DNA, 25 bp, Homo sapien
ttctcctccccagtgctgtgcaaac

SEQ ID NO: 2444044 - DNA, 25 bp, Homo sapien
ctcctccccagtgctgtgcaaacat

SEQ ID NO: 2444045 - DNA, 25 bp, Homo sapien
ttttctcctccccagtgctgtgcaa

SEQ ID NO: 2444046 - DNA, 25 bp, Homo sapien
caaattcccactcagtcctgttttg

SEQ ID NO: 2444047 - DNA, 25 bp, Homo sapien
attcccactcagtcctgttttgttg

SEQ ID NO: 2444048 - DNA, 25 bp, Homo sapien
aaattcccactcagtcctgttttgt

SEQ ID NO: 2444049 - DNA, 25 bp, Homo sapien
ttcccactcagtcctgttttgttga

SEQ ID NO: 2444050 - DNA, 25 bp, Homo sapien
ttataccactgaagacaatcccccc

SEQ ID NO: 2444051 - DNA, 25 bp, Homo sapien
tccttataccactgaagacaatccc

SEQ ID NO: 2444052 - DNA, 25 bp, Homo sapien
tttgtacataacagtccttatacca

SEQ ID NO: 2444053 - DNA, 25 bp, Homo sapien
agtccttataccactgaagacaatc

SEQ ID NO: 2444054 - DNA, 25 bp, Homo sapien
ttaaatgctatccaaccaagagtca

SEQ ID NO: 2444055 - DNA, 25 bp, Homo sapien
gtgcaccagttttgatgactatcaa

SEQ ID NO: 2444056 - DNA, 25 bp, Homo sapien
tgactatcaaaaccaacatgtcagc

SEQ ID NO: 2444057 - DNA, 25 bp, Homo sapien
tcagagaataaactggtgcatcagg

SEQ ID NO: 2444058 - DNA, 25 bp, Homo sapien
atacacatcaacagacatgggcaaa

SEQ ID NO: 2444059 - DNA, 25 bp, Homo sapien
aaatacacatcaacagacatgggca

SEQ ID NO: 2444060 - DNA, 25 bp, Homo sapien
aatacacatcaacagacatgggcaa

SEQ ID NO: 2444061 - DNA, 25 bp, Homo sapien
catatgcaacctttctctcccccat

SEQ ID NO: 2444062 - DNA, 25 bp, Homo sapien
acagctctcccttcaattcataaag

SEQ ID NO: 2444063 - DNA, 25 bp, Homo sapien
tctcattgtgactctcttgatgctg

SEQ ID NO: 2444064 - DNA, 25 bp, Homo sapien
tttctcattgtgactctcttgatgc

SEQ ID NO: 2444065 - DNA, 25 bp, Homo sapien
aatttctcattgtgactctcttgat

SEQ ID NO: 2444066 - DNA, 25 bp, Homo sapien
cttctagaggagtaaacctgctttg

SEQ ID NO: 2444067 - DNA, 25 bp, Homo sapien
caagcactgctgaattcttgacagg

SEQ ID NO: 2444068 - DNA, 25 bp, Homo sapien
tcttgacaggaaataagtctcctca

SEQ ID NO: 2444069 - DNA, 25 bp, Homo sapien
gggaacttgagaaccacaagagctg

SEQ ID NO: 2444070 - DNA, 25 bp, Homo sapien
gggagctgattctggacacaaggag

SEQ ID NO: 2444071 - DNA, 25 bp, Homo sapien
ttcccacatttgggagctgattctg

SEQ ID NO: 2444072 - DNA, 25 bp, Homo sapien
gtgttcccagagtaactaatctgct

SEQ ID NO: 2444073 - DNA, 25 bp, Homo sapien
ccaaattaactttgtgctgcattcg

SEQ ID NO: 2444074 - DNA, 25 bp, Homo sapien
tttgtctgagccaatatcagtgttc

SEQ ID NO: 2444075 - DNA, 25 bp, Homo sapien
tgctgcattcgtcgacggcactgag

SEQ ID NO: 2444076 - DNA, 25 bp, Homo sapien
ggtaaaggctgagatctttccttga

SEQ ID NO: 2444077 - DNA, 25 bp, Homo sapien
tttccttgatgggacacgttgactg

SEQ ID NO: 2444078 - DNA, 25 bp, Homo sapien
acatcgggcatcaggggtaaaggct

SEQ ID NO: 2444079 - DNA, 25 bp, Homo sapien
ttgggagactggacatcgggcatca

SEQ ID NO: 2444080 - DNA, 25 bp, Homo sapien
tgccaatctggtgatcaagcccagt

SEQ ID NO: 2444081 - DNA, 25 bp, Homo sapien
ctttgccaatctggtgatcaagccc

SEQ ID NO: 2444082 - DNA, 25 bp, Homo sapien
tctggtgatcaagcccagtcttcca

SEQ ID NO: 2444083 - DNA, 25 bp, Homo sapien
ccaatctggtgatcaagcccagtct

SEQ ID NO: 2444084 - DNA, 25 bp, Homo sapien
actcttctcggtgtgttctagttgc

SEQ ID NO: 2444085 - DNA, 25 bp, Homo sapien
gtgtagtcaccaaattgaaaaataa

SEQ ID NO: 2444086 - DNA, 25 bp, Homo sapien
tgtgtagtcaccaaattgaaaaata

SEQ ID NO: 2444087 - DNA, 25 bp, Homo sapien
tgggaaggtttcttttcacaggaga

SEQ ID NO: 2444088 - DNA, 25 bp, Homo sapien
taagatgtggttctataggaatggg

SEQ ID NO: 2444089 - DNA, 25 bp, Homo sapien
gagcttgataccaactgtttctttt

SEQ ID NO: 2444090 - DNA, 25 bp, Homo sapien
ttagaatgctacaccagagcttgat

SEQ ID NO: 2444091 - DNA, 25 bp, Homo sapien
catgcactgtgtagtacaaaccctc

SEQ ID NO: 2444092 - DNA, 25 bp, Homo sapien
aaccctcttgagtttgaaggaatga

SEQ ID NO: 2444093 - DNA, 25 bp, Homo sapien
tttacaccagtgctccacattgcct

SEQ ID NO: 2444094 - DNA, 25 bp, Homo sapien
gcctattgtgtggtgaaccatgcac

SEQ ID NO: 2444095 - DNA, 25 bp, Homo sapien
taatatcttgtctgggtgtaatccc

SEQ ID NO: 2444096 - DNA, 25 bp, Homo sapien
tatggcccaactccctatgatagca

SEQ ID NO: 2444097 - DNA, 25 bp, Homo sapien
tacagtagctgtacacgaccttgtc

SEQ ID NO: 2444098 - DNA, 25 bp, Homo sapien
tctgacagatcgaagaaaaatgccc

SEQ ID NO: 2444099 - DNA, 25 bp, Homo sapien
cactgtcttgtacctggtcagtgat

SEQ ID NO: 2444100 - DNA, 25 bp, Homo sapien
ggaggctgtgactctaaccgcatcc

SEQ ID NO: 2444101 - DNA, 25 bp, Homo sapien
tagccgagtccaattaggaggaaga

SEQ ID NO: 2444102 - DNA, 25 bp, Homo sapien
gaggctgtgactctaaccgcatcca

SEQ ID NO: 2444103 - DNA, 25 bp, Homo sapien
agtccaattaggaggaagaaaccag

SEQ ID NO: 2444104 - DNA, 25 bp, Homo sapien
caagggagactgtgactctaattgg

SEQ ID NO: 2444105 - DNA, 25 bp, Homo sapien
agggagactgtgactctaattgggt

SEQ ID NO: 2444106 - DNA, 25 bp, Homo sapien
ttcaagggagactgtgactctaatt

SEQ ID NO: 2444107 - DNA, 25 bp, Homo sapien
tcaagggagactgtgactctaattg

SEQ ID NO: 2444108 - DNA, 25 bp, Homo sapien
tcacactactcccacgctaaaaatg

SEQ ID NO: 2444109 - DNA, 25 bp, Homo sapien
aagccttctgcctactgctcccatg

SEQ ID NO: 2444110 - DNA, 25 bp, Homo sapien
catgacataattcttcctcgtactt

SEQ ID NO: 2444111 - DNA, 25 bp, Homo sapien
actactcccacgctaaaaatgtcca

SEQ ID NO: 2444112 - DNA, 25 bp, Homo sapien
cacattactacaataagaaggttgc

SEQ ID NO: 2444113 - DNA, 25 bp, Homo sapien
agatcagaggaagcctggttgatgc

SEQ ID NO: 2444114 - DNA, 25 bp, Homo sapien
cctggttgatgctaaaaagagcatc

SEQ ID NO: 2444115 - DNA, 25 bp, Homo sapien
caacattatgtacccggagttgtcc

SEQ ID NO: 2444116 - DNA, 25 bp, Homo sapien
aaaaggagttggagactgtgaattg

SEQ ID NO: 2444117 - DNA, 25 bp, Homo sapien
acaagagaaaaggagttggagactg

SEQ ID NO: 2444118 - DNA, 25 bp, Homo sapien
gttacaagagaaaaggagttggaga

SEQ ID NO: 2444119 - DNA, 25 bp, Homo sapien
aaaggagttggagactgtgaattgc

SEQ ID NO: 2444120 - DNA, 25 bp, Homo sapien
gatgtctgcactattgctatttgct

SEQ ID NO: 2444121 - DNA, 25 bp, Homo sapien
ggatgtctgcactattgctatttgc

SEQ ID NO: 2444122 - DNA, 25 bp, Homo sapien
tgtctgcactattgctatttgctgc

SEQ ID NO: 2444123 - DNA, 25 bp, Homo sapien
tgggatgtctgcactattgctattt

SEQ ID NO: 2444124 - DNA, 25 bp, Homo sapien
tccgcaggtgaactgcaagaactca

SEQ ID NO: 2444125 - DNA, 25 bp, Homo sapien
ttcctacagcaaggttttcgcctcc

SEQ ID NO: 2444126 - DNA, 25 bp, Homo sapien
tatattctgcttggacgtcacctgt

SEQ ID NO: 2444127 - DNA, 25 bp, Homo sapien
cgtcacctgtgaacttctttccgca

SEQ ID NO: 2444128 - DNA, 25 bp, Homo sapien
tccattgtgctctaaccaacttaac

SEQ ID NO: 2444129 - DNA, 25 bp, Homo sapien
tacaaaagagccagtaggaaagtgt

SEQ ID NO: 2444130 - DNA, 25 bp, Homo sapien
tgctctaaccaacttaactggtcac

SEQ ID NO: 2444131 - DNA, 25 bp, Homo sapien
caaaagagccagtaggaaagtgtgg

SEQ ID NO: 2444132 - DNA, 25 bp, Homo sapien
catacatagtgcttttgctaacata

SEQ ID NO: 2444133 - DNA, 25 bp, Homo sapien
gctaacataaggctccacattgcag

SEQ ID NO: 2444134 - DNA, 25 bp, Homo sapien
tagggatctactccttgcaatggaa

SEQ ID NO: 2444135 - DNA, 25 bp, Homo sapien
tggactttgacaatgttgacataca

SEQ ID NO: 2444136 - DNA, 25 bp, Homo sapien
gcaggacacacatatttctatacct

SEQ ID NO: 2444137 - DNA, 25 bp, Homo sapien
tcttctattgttcaggtcatactgc

SEQ ID NO: 2444138 - DNA, 25 bp, Homo sapien
catactgcaggccacgctttctgtt

SEQ ID NO: 2444139 - DNA, 25 bp, Homo sapien
tgtgtggcccctgtgcttgacacat

SEQ ID NO: 2444140 - DNA, 25 bp, Homo sapien
cttctgtgcagcatacacttcctgt

SEQ ID NO: 2444141 - DNA, 25 bp, Homo sapien
tcttctgtgcagcatacacttcctg

SEQ ID NO: 2444142 - DNA, 25 bp, Homo sapien
ttctgtctgcatgatatactttcta

SEQ ID NO: 2444143 - DNA, 25 bp, Homo sapien
ctgtctgcatgatatactttctatt

SEQ ID NO: 2444144 - DNA, 25 bp, Homo sapien
cttctgtctgcatgatatactttct

SEQ ID NO: 2444145 - DNA, 25 bp, Homo sapien
tcttctgtctgcatgatatactttc

SEQ ID NO: 2444146 - DNA, 25 bp, Homo sapien
ctttgtctctcccatgcatagcacc

SEQ ID NO: 2444147 - DNA, 25 bp, Homo sapien
tcccatgcatagcacccatcctgtt

SEQ ID NO: 2444148 - DNA, 25 bp, Homo sapien
atagcacccatcctgtttctctgtg

SEQ ID NO: 2444149 - DNA, 25 bp, Homo sapien
atgcatagcacccatcctgtttctc

SEQ ID NO: 2444150 - DNA, 25 bp, Homo sapien
tgcgtagcaaagactttctgttcct

SEQ ID NO: 2444151 - DNA, 25 bp, Homo sapien
ctgcgtagcaaagactttctgttcc

SEQ ID NO: 2444152 - DNA, 25 bp, Homo sapien
gtctctcctgtgcagcacacttttc

SEQ ID NO: 2444153 - DNA, 25 bp, Homo sapien
tgtgtcgtctttgtgcaggacatac

SEQ ID NO: 2444154 - DNA, 25 bp, Homo sapien
actacctgtttctccaatgtgcaga

SEQ ID NO: 2444155 - DNA, 25 bp, Homo sapien
gtgcatgacacactacctgtttctc

SEQ ID NO: 2444156 - DNA, 25 bp, Homo sapien
tgtgtctccactgtgtagtacacag

SEQ ID NO: 2444157 - DNA, 25 bp, Homo sapien
tgtgtgctagatacacttcctgtgt

SEQ ID NO: 2444158 - DNA, 25 bp, Homo sapien
cactttacaggatacacttccggtg

SEQ ID NO: 2444159 - DNA, 25 bp, Homo sapien
tgagagatatacttcctctttcacc

SEQ ID NO: 2444160 - DNA, 25 bp, Homo sapien
tcataacactctgtttctctcctga

SEQ ID NO: 2444161 - DNA, 25 bp, Homo sapien
ctctgtttctctcctgagcagcaca

SEQ ID NO: 2444162 - DNA, 25 bp, Homo sapien
cataacactctgtttctctcctgag

SEQ ID NO: 2444163 - DNA, 25 bp, Homo sapien
tgtttctctcctgagcagcacacac

SEQ ID NO: 2444164 - DNA, 25 bp, Homo sapien
ctgcatggcgtagggctgaggagct

SEQ ID NO: 2444165 - DNA, 25 bp, Homo sapien
ccaagttgctgcatggcgtagggct

SEQ ID NO: 2444166 - DNA, 25 bp, Homo sapien
accccaagttgctgcatggcgtagg

SEQ ID NO: 2444167 - DNA, 25 bp, Homo sapien
gccaccccaagttgctgcatggcgt

SEQ ID NO: 2444168 - DNA, 25 bp, Homo sapien
acagaggagacacaggaaatatgtc

SEQ ID NO: 2444169 - DNA, 25 bp, Homo sapien
tacagaggagacacaggaaatatgt

SEQ ID NO: 2444170 - DNA, 25 bp, Homo sapien
ttacagaggagacacaggaaatatg

SEQ ID NO: 2444171 - DNA, 25 bp, Homo sapien
atcagaattctgtagttgatttctg

SEQ ID NO: 2444172 - DNA, 25 bp, Homo sapien
caccagttttcagaagtgaagaatc

SEQ ID NO: 2444173 - DNA, 25 bp, Homo sapien
gtagattttgcttcaccagttttca

SEQ ID NO: 2444174 - DNA, 25 bp, Homo sapien
gacatctgaagccaattgtccttct

SEQ ID NO: 2444175 - DNA, 25 bp, Homo sapien
ctatggtgtagacttctcttcctcc

SEQ ID NO: 2444176 - DNA, 25 bp, Homo sapien
gcaggctggcatctttagcaagcag

SEQ ID NO: 2444177 - DNA, 25 bp, Homo sapien
ctgactcacactgtccagcagtggg

SEQ ID NO: 2444178 - DNA, 25 bp, Homo sapien
aggctggcatctttagcaagcagaa

SEQ ID NO: 2444179 - DNA, 25 bp, Homo sapien
agaaatgccatggcatcagtccagg

SEQ ID NO: 2444180 - DNA, 25 bp, Homo sapien
ccttgagttttgccagcccacatac

SEQ ID NO: 2444181 - DNA, 25 bp, Homo sapien
tgagccttgagttttgccagcccac

SEQ ID NO: 2444182 - DNA, 25 bp, Homo sapien
tgagttttgccagcccacataccca

SEQ ID NO: 2444183 - DNA, 25 bp, Homo sapien
gagccttgagttttgccagcccaca

SEQ ID NO: 2444184 - DNA, 25 bp, Homo sapien
catcgtggtggatcatcacatcctc

SEQ ID NO: 2444185 - DNA, 25 bp, Homo sapien
tcttgtacaggagattggtccactt

SEQ ID NO: 2444186 - DNA, 25 bp, Homo sapien
gcctgagttgcgcttctcccactcg

SEQ ID NO: 2444187 - DNA, 25 bp, Homo sapien
tcctgcagcaggcaatcatcgtggt

SEQ ID NO: 2444188 - DNA, 25 bp, Homo sapien
aggtcttggcactgatgcatcttct

SEQ ID NO: 2444189 - DNA, 25 bp, Homo sapien
caggtcttggcactgatgcatcttc

SEQ ID NO: 2444190 - DNA, 25 bp, Homo sapien
gcaggtcttggcactgatgcatctt

SEQ ID NO: 2444191 - DNA, 25 bp, Homo sapien
cagcaggtcttggcactgatgcatc

SEQ ID NO: 2444192 - DNA, 25 bp, Homo sapien
ttgtgggctctgagcattcggtgct

SEQ ID NO: 2444193 - DNA, 25 bp, Homo sapien
gcagcccaacatgggaaaggcccag

SEQ ID NO: 2444194 - DNA, 25 bp, Homo sapien
aagatggcagcccaacatgggaaag

SEQ ID NO: 2444195 - DNA, 25 bp, Homo sapien
cctgcagcaggatacagttcttgtg

SEQ ID NO: 2444196 - DNA, 25 bp, Homo sapien
aggattgagagggtcccctggagcc

SEQ ID NO: 2444197 - DNA, 25 bp, Homo sapien
ttgagagggtcccctggagcctcac

SEQ ID NO: 2444198 - DNA, 25 bp, Homo sapien
tcaaggattgagagggtcccctgga

SEQ ID NO: 2444199 - DNA, 25 bp, Homo sapien
attgagagggtcccctggagcctca

SEQ ID NO: 2444200 - DNA, 25 bp, Homo sapien
tcagcagagaacgactgggtcccct

SEQ ID NO: 2444201 - DNA, 25 bp, Homo sapien
ctgggtccccttcacagggagtgac

SEQ ID NO: 2444202 - DNA, 25 bp, Homo sapien
ttcacagggagtgaccgaggtccgt

SEQ ID NO: 2444203 - DNA, 25 bp, Homo sapien
agcagagaacgactgggtccccttc

SEQ ID NO: 2444204 - DNA, 25 bp, Homo sapien
acaaaggccaccctcttcagtcctg

SEQ ID NO: 2444205 - DNA, 25 bp, Homo sapien
ctaacgtggcctggcaacaaaggcc

SEQ ID NO: 2444206 - DNA, 25 bp, Homo sapien
acgtggcctggcaacaaaggccacc

SEQ ID NO: 2444207 - DNA, 25 bp, Homo sapien
aaaggccaccctcttcagtcctgtg

SEQ ID NO: 2444208 - DNA, 25 bp, Homo sapien
tcttgaggtagaccatatgcctgct

SEQ ID NO: 2444209 - DNA, 25 bp, Homo sapien
aatttttcaatggacacggctccca

SEQ ID NO: 2444210 - DNA, 25 bp, Homo sapien
cacttggtctttggtacacagcagc

SEQ ID NO: 2444211 - DNA, 25 bp, Homo sapien
tgcagctgagggtacctgagaaaca

SEQ ID NO: 2444212 - DNA, 25 bp, Homo sapien
tgcagaaatgatggttgttactttt

SEQ ID NO: 2444213 - DNA, 25 bp, Homo sapien
tgtccatctggagttattgcagaaa

SEQ ID NO: 2444214 - DNA, 25 bp, Homo sapien
tatctgagagtcctcaaacatttct

SEQ ID NO: 2444215 - DNA, 25 bp, Homo sapien
ttttgcgaaacagcctctagaaggc

SEQ ID NO: 2444216 - DNA, 25 bp, Homo sapien
gaagtagttcagttcatattgtgta

SEQ ID NO: 2444217 - DNA, 25 bp, Homo sapien
tattgtgtataactctgaaacttca

SEQ ID NO: 2444218 - DNA, 25 bp, Homo sapien
ccttccaattggagtaacagtcacc

SEQ ID NO: 2444219 - DNA, 25 bp, Homo sapien
tataactctgaaacttcacgtgaag

SEQ ID NO: 2444220 - DNA, 25 bp, Homo sapien
gaaagatctaaccacagccaatgaa

SEQ ID NO: 2444221 - DNA, 25 bp, Homo sapien
gaaactgcttctcgaaagctgggat

SEQ ID NO: 2444222 - DNA, 25 bp, Homo sapien
tgctcttcaatgataatcctagtag

SEQ ID NO: 2444223 - DNA, 25 bp, Homo sapien
taaatctttggaaactgcttctcga

SEQ ID NO: 2444224 - DNA, 25 bp, Homo sapien
tcaatgttttggcaacaacacctcc

SEQ ID NO: 2444225 - DNA, 25 bp, Homo sapien
catgaaatttgtcaatgttttggca

SEQ ID NO: 2444226 - DNA, 25 bp, Homo sapien
tccgtgcatatagcagcagctgttc

SEQ ID NO: 2444227 - DNA, 25 bp, Homo sapien
aatgtccgtgcatatagcagcagct

SEQ ID NO: 2444228 - DNA, 25 bp, Homo sapien
caaaggtgagccaaatgggctgcat

SEQ ID NO: 2444229 - DNA, 25 bp, Homo sapien
tcttccaccagacaatgttttaaga

SEQ ID NO: 2444230 - DNA, 25 bp, Homo sapien
ttccaccagacaatgttttaagagc

SEQ ID NO: 2444231 - DNA, 25 bp, Homo sapien
gagcacaatcaagttcagcaaaggt

SEQ ID NO: 2444232 - DNA, 25 bp, Homo sapien
tccctcctttgctggggcatgctgc

SEQ ID NO: 2444233 - DNA, 25 bp, Homo sapien
ctttgctggggcatgctgctggcct

SEQ ID NO: 2444234 - DNA, 25 bp, Homo sapien
ttttagaagctttgcctgcctgtgc

SEQ ID NO: 2444235 - DNA, 25 bp, Homo sapien
tgctggcctgggcaaaccttgcggc

SEQ ID NO: 2444236 - DNA, 25 bp, Homo sapien
ctgagaagaacacgacatttttacc

SEQ ID NO: 2444237 - DNA, 25 bp, Homo sapien
tgagaagaacacgacatttttacct

SEQ ID NO: 2444238 - DNA, 25 bp, Homo sapien
tgacattgtgtgcttgggtctgctg

SEQ ID NO: 2444239 - DNA, 25 bp, Homo sapien
cagatgacattgtgtgcttgggtct

SEQ ID NO: 2444240 - DNA, 25 bp, Homo sapien
gacattgtgtgcttgggtctgctgg

SEQ ID NO: 2444241 - DNA, 25 bp, Homo sapien
gatgacattgtgtgcttgggtctgc

SEQ ID NO: 2444242 - DNA, 25 bp, Homo sapien
tccatccactggcatacttttaggg

SEQ ID NO: 2444243 - DNA, 25 bp, Homo sapien
cttccatccactggcatacttttag

SEQ ID NO: 2444244 - DNA, 25 bp, Homo sapien
ccttccatccactggcatactttta

SEQ ID NO: 2444245 - DNA, 25 bp, Homo sapien
ccccttccatccactggcatacttt

SEQ ID NO: 2444246 - DNA, 25 bp, Homo sapien
attgcactaatacattggctgtctt

SEQ ID NO: 2444247 - DNA, 25 bp, Homo sapien
gttcattatattgcactaatacatt

SEQ ID NO: 2444248 - DNA, 25 bp, Homo sapien
tgttcattatattgcactaatacat

SEQ ID NO: 2444249 - DNA, 25 bp, Homo sapien
tatattgcactaatacattggctgt

SEQ ID NO: 2444250 - DNA, 25 bp, Homo sapien
tctttaaggatacattgggctgtga

SEQ ID NO: 2444251 - DNA, 25 bp, Homo sapien
gcatttccggtattgcttctgtgaa

SEQ ID NO: 2444252 - DNA, 25 bp, Homo sapien
caggcaacagcatttccggtattgc

SEQ ID NO: 2444253 - DNA, 25 bp, Homo sapien
tgcttctgtgaattatacctgctga

SEQ ID NO: 2444254 - DNA, 25 bp, Homo sapien
cctgctggccgttgtctcatatggc

SEQ ID NO: 2444255 - DNA, 25 bp, Homo sapien
tctcatatggcattcccaatggaga

SEQ ID NO: 2444256 - DNA, 25 bp, Homo sapien
tcaaataaacatcgccacctgctgg

SEQ ID NO: 2444257 - DNA, 25 bp, Homo sapien
tggataattgaccatcttcaggcgt

SEQ ID NO: 2444258 - DNA, 25 bp, Homo sapien
agccgtgcgcccccttctggctgaa

SEQ ID NO: 2444259 - DNA, 25 bp, Homo sapien
caagacccccatggtcaaggtgagg

SEQ ID NO: 2444260 - DNA, 25 bp, Homo sapien
gacccccatggtcaaggtgaggcag

SEQ ID NO: 2444261 - DNA, 25 bp, Homo sapien
gtgaggcagccgtgcgcccccttct

SEQ ID NO: 2444262 - DNA, 25 bp, Homo sapien
tcagaaaaggcggactcatgctccc

SEQ ID NO: 2444263 - DNA, 25 bp, Homo sapien
tgctctggtctgtactgaggagaag

SEQ ID NO: 2444264 - DNA, 25 bp, Homo sapien
gagctgaacccgatggtgctcccag

SEQ ID NO: 2444265 - DNA, 25 bp, Homo sapien
agctgtagccctcgggcaacacgag

SEQ ID NO: 2444266 - DNA, 25 bp, Homo sapien
tagaagcagatttaagaaccaaaac

SEQ ID NO: 2444267 - DNA, 25 bp, Homo sapien
ttttgtagaagcagatttaagaacc

SEQ ID NO: 2444268 - DNA, 25 bp, Homo sapien
tttgtagaagcagatttaagaacca

SEQ ID NO: 2444269 - DNA, 25 bp, Homo sapien
tgtagaagcagatttaagaaccaaa

SEQ ID NO: 2444270 - DNA, 25 bp, Homo sapien
tcttgcataattgtgcacagctaaa

SEQ ID NO: 2444271 - DNA, 25 bp, Homo sapien
gagggctgttcttgcataattgtgc

SEQ ID NO: 2444272 - DNA, 25 bp, Homo sapien
cagctaaagagttgacacgcaggga

SEQ ID NO: 2444273 - DNA, 25 bp, Homo sapien
cagggatagtgagcagtcagtagcc

SEQ ID NO: 2444274 - DNA, 25 bp, Homo sapien
tagagctcgaccatgctggcattct

SEQ ID NO: 2444275 - DNA, 25 bp, Homo sapien
gctcgaccatgctggcattctgatc

SEQ ID NO: 2444276 - DNA, 25 bp, Homo sapien
tctgatcttcaacttctgtcctcca

SEQ ID NO: 2444277 - DNA, 25 bp, Homo sapien
catgctggcattctgatcttcaact

SEQ ID NO: 2444278 - DNA, 25 bp, Homo sapien
cacagggtaaaggtcatactgcttc

SEQ ID NO: 2444279 - DNA, 25 bp, Homo sapien
cgcctggttaatgagagcctgaaat

SEQ ID NO: 2444280 - DNA, 25 bp, Homo sapien
agaggagctcgcctggttaatgaga

SEQ ID NO: 2444281 - DNA, 25 bp, Homo sapien
tgaaataattgaaccgggtcacagg

SEQ ID NO: 2444282 - DNA, 25 bp, Homo sapien
agctgtttggctgccccggtttctg

SEQ ID NO: 2444283 - DNA, 25 bp, Homo sapien
ggccacctggtgtgacattcagttt

SEQ ID NO: 2444284 - DNA, 25 bp, Homo sapien
cttcacagaaatgctggccacctgg

SEQ ID NO: 2444285 - DNA, 25 bp, Homo sapien
tctgccagctgtttggctgccccgg

SEQ ID NO: 2444286 - DNA, 25 bp, Homo sapien
catccaacctgtacaggacaccatg

SEQ ID NO: 2444287 - DNA, 25 bp, Homo sapien
tccaagagcaccacatcagattaac

SEQ ID NO: 2444288 - DNA, 25 bp, Homo sapien
cagctgtaagaaaagggagtctttg

SEQ ID NO: 2444289 - DNA, 25 bp, Homo sapien
gcacctgactcaggcaagcttctcc

SEQ ID NO: 2444290 - DNA, 25 bp, Homo sapien
aggaggcagaacgagtctcagggca

SEQ ID NO: 2444291 - DNA, 25 bp, Homo sapien
aagaggaggcagaacgagtctcagg

SEQ ID NO: 2444292 - DNA, 25 bp, Homo sapien
gaggaggcagaacgagtctcagggc

SEQ ID NO: 2444293 - DNA, 25 bp, Homo sapien
gaggcagaacgagtctcagggcagc

SEQ ID NO: 2444294 - DNA, 25 bp, Homo sapien
cacagctgtgggtagaagctgggag

SEQ ID NO: 2444295 - DNA, 25 bp, Homo sapien
cagctgtgggtagaagctgggagag

SEQ ID NO: 2444296 - DNA, 25 bp, Homo sapien
ctggagcacagctgtgggtagaagc

SEQ ID NO: 2444297 - DNA, 25 bp, Homo sapien
gagcacagctgtgggtagaagctgg

SEQ ID NO: 2444298 - DNA, 25 bp, Homo sapien
ttctgcatgcagaagtctgagtagt

SEQ ID NO: 2444299 - DNA, 25 bp, Homo sapien
tgcagaagtctgagtagttacaccc

SEQ ID NO: 2444300 - DNA, 25 bp, Homo sapien
cctggtgcatccataagtgtttctc

SEQ ID NO: 2444301 - DNA, 25 bp, Homo sapien
tgaagctctagacaagtttgggctt

SEQ ID NO: 2444302 - DNA, 25 bp, Homo sapien
ggggaaggacatcaagtctacaggc

SEQ ID NO: 2444303 - DNA, 25 bp, Homo sapien
ccaagtatctggagacccccttcca

SEQ ID NO: 2444304 - DNA, 25 bp, Homo sapien
ggaaggacatcaagtctacaggcag

SEQ ID NO: 2444305 - DNA, 25 bp, Homo sapien
aaggacatcaagtctacaggcagca

SEQ ID NO: 2444306 - DNA, 25 bp, Homo sapien
gcagccaaatggcaacaggcaagca

SEQ ID NO: 2444307 - DNA, 25 bp, Homo sapien
ggagagtgcctcatcttgaaagaag

SEQ ID NO: 2444308 - DNA, 25 bp, Homo sapien
tgtcagggaaaacaggtgaggcccc

SEQ ID NO: 2444309 - DNA, 25 bp, Homo sapien
tcattgaatgttggcaatggccttt

SEQ ID NO: 2444310 - DNA, 25 bp, Homo sapien
atgctctctggaaaggtggttaata

SEQ ID NO: 2444311 - DNA, 25 bp, Homo sapien
gtcctttagcctggcagagtctcca

SEQ ID NO: 2444312 - DNA, 25 bp, Homo sapien
aaggtggttaatacacactgtctgc

SEQ ID NO: 2444313 - DNA, 25 bp, Homo sapien
ggataggtcctttagcctggcagag

SEQ ID NO: 2444314 - DNA, 25 bp, Homo sapien
tagatgcccttagttgtcctgcaag

SEQ ID NO: 2444315 - DNA, 25 bp, Homo sapien
gtaacaagcattcggctggctccag

SEQ ID NO: 2444316 - DNA, 25 bp, Homo sapien
catgaacgtatggatgccctgggac

SEQ ID NO: 2444317 - DNA, 25 bp, Homo sapien
tgggcagctatgtgatgggaaacct

SEQ ID NO: 2444318 - DNA, 25 bp, Homo sapien
gtggaactctacaatgccaccctgt

SEQ ID NO: 2444319 - DNA, 25 bp, Homo sapien
tggaactctacaatgccaccctgtc

SEQ ID NO: 2444320 - DNA, 25 bp, Homo sapien
ggtggaactctacaatgccaccctg

SEQ ID NO: 2444321 - DNA, 25 bp, Homo sapien
ttccccatctggcaagtacacgctg

SEQ ID NO: 2444322 - DNA, 25 bp, Homo sapien
agccatatgacaagaatggcccaag

SEQ ID NO: 2444323 - DNA, 25 bp, Homo sapien
agcactccactagggaaatctgagc

SEQ ID NO: 2444324 - DNA, 25 bp, Homo sapien
cacgctgtgaacaaagtcttcagag

SEQ ID NO: 2444325 - DNA, 25 bp, Homo sapien
ggtcagacgagactggacagggtga

SEQ ID NO: 2444326 - DNA, 25 bp, Homo sapien
cgaggtcagacgagactggacaggg

SEQ ID NO: 2444327 - DNA, 25 bp, Homo sapien
cagacgagactggacagggtgatat

SEQ ID NO: 2444328 - DNA, 25 bp, Homo sapien
gcacccaacattcctgggcgtcctc

SEQ ID NO: 2444329 - DNA, 25 bp, Homo sapien
ccagagatcaggtgtctcagggcgg

SEQ ID NO: 2444330 - DNA, 25 bp, Homo sapien
atcaggtgtctcagggcggtaaggc

SEQ ID NO: 2444331 - DNA, 25 bp, Homo sapien
gagatcaggtgtctcagggcggtaa

SEQ ID NO: 2444332 - DNA, 25 bp, Homo sapien
ccctgcttagcgtcacaggccagag

SEQ ID NO: 2444333 - DNA, 25 bp, Homo sapien
tactatcgtgttgtgtcggcctcgg

SEQ ID NO: 2444334 - DNA, 25 bp, Homo sapien
cagactgcccgagacaaaatggtgg

SEQ ID NO: 2444335 - DNA, 25 bp, Homo sapien
ggtccctcccactcgataagagatg

SEQ ID NO: 2444336 - DNA, 25 bp, Homo sapien
caccacggtgtttgcaagtgcatcc

SEQ ID NO: 2444337 - DNA, 25 bp, Homo sapien
ttgtcatctaatctgggaaacccca

SEQ ID NO: 2444338 - DNA, 25 bp, Homo sapien
caggctttggaactctggtgagtcc

SEQ ID NO: 2444339 - DNA, 25 bp, Homo sapien
tctggcccaccataaccatgtgttt

SEQ ID NO: 2444340 - DNA, 25 bp, Homo sapien
tccttgatacctgtgcccatttggc

SEQ ID NO: 2444341 - DNA, 25 bp, Homo sapien
aaccaagccagacccctgagacatt

SEQ ID NO: 2444342 - DNA, 25 bp, Homo sapien
gtgggtgtatcttgcacctgttttc

SEQ ID NO: 2444343 - DNA, 25 bp, Homo sapien
caggacataatacagccctgaaggg

SEQ ID NO: 2444344 - DNA, 25 bp, Homo sapien
ccatggaagcagtaaccaagccaga

SEQ ID NO: 2444345 - DNA, 25 bp, Homo sapien
ccatcatcttgtgaaatttaatggt

SEQ ID NO: 2444346 - DNA, 25 bp, Homo sapien
ttggccgatgcttcatccatcatct

SEQ ID NO: 2444347 - DNA, 25 bp, Homo sapien
cttggccgatgcttcatccatcatc

SEQ ID NO: 2444348 - DNA, 25 bp, Homo sapien
tcatcttgtgaaatttaatggtaaa

SEQ ID NO: 2444349 - DNA, 25 bp, Homo sapien
cctgagagaccaggtctgtggcaca

SEQ ID NO: 2444350 - DNA, 25 bp, Homo sapien
tcaagacacctgagagaccaggtct

SEQ ID NO: 2444351 - DNA, 25 bp, Homo sapien
gctttctcccaccaatcaacattac

SEQ ID NO: 2444352 - DNA, 25 bp, Homo sapien
tgtggcacatgcctcccatgctttc

SEQ ID NO: 2444353 - DNA, 25 bp, Homo sapien
gaataaagacgtctcctcaggaccc

SEQ ID NO: 2444354 - DNA, 25 bp, Homo sapien
caggagtggccgttgctacaagaca

SEQ ID NO: 2444355 - DNA, 25 bp, Homo sapien
gggtcgcgtccaccatgaagatgaa

SEQ ID NO: 2444356 - DNA, 25 bp, Homo sapien
tacaagacatctggtgctacgacca

SEQ ID NO: 2444357 - DNA, 25 bp, Homo sapien
tccatggctgcacctgagtcgtggc

SEQ ID NO: 2444358 - DNA, 25 bp, Homo sapien
tacagtaacatgctggaccactcca

SEQ ID NO: 2444359 - DNA, 25 bp, Homo sapien
cctcaagggcgccaggtcaatgaga

SEQ ID NO: 2444360 - DNA, 25 bp, Homo sapien
gcaatttgtgatatcctgggatcca

SEQ ID NO: 2444361 - DNA, 25 bp, Homo sapien
ccacaaaacttcttcttccatctga

SEQ ID NO: 2444362 - DNA, 25 bp, Homo sapien
ctgctgggaagaaggctgggcctca

SEQ ID NO: 2444363 - DNA, 25 bp, Homo sapien
gagtcccacaaaacttcttcttcca

SEQ ID NO: 2444364 - DNA, 25 bp, Homo sapien
gcctcagagtcccacaaaacttctt

SEQ ID NO: 2444365 - DNA, 25 bp, Homo sapien
atgttttttgccagaacaccgtagg

SEQ ID NO: 2444366 - DNA, 25 bp, Homo sapien
tttgccagaacaccgtaggctgtca

SEQ ID NO: 2444367 - DNA, 25 bp, Homo sapien
tcctgaaccagttgcgtctgccctg

SEQ ID NO: 2444368 - DNA, 25 bp, Homo sapien
gccctgcctgtctgttagggctgga

SEQ ID NO: 2444369 - DNA, 25 bp, Homo sapien
ccccagagcgcaagttctcagtgtg

SEQ ID NO: 2444370 - DNA, 25 bp, Homo sapien
gattaagatcattgcacccccagag

SEQ ID NO: 2444371 - DNA, 25 bp, Homo sapien
tctcagtgtggatcggttgctccat

SEQ ID NO: 2444372 - DNA, 25 bp, Homo sapien
gcgcaagttctcagtgtggatcggt

SEQ ID NO: 2444373 - DNA, 25 bp, Homo sapien
agaaggagatcactgccttggcgcc

SEQ ID NO: 2444374 - DNA, 25 bp, Homo sapien
gcagaaggagatcactgccttggcg

SEQ ID NO: 2444375 - DNA, 25 bp, Homo sapien
tgtatccaggcattgctgacaggat

SEQ ID NO: 2444376 - DNA, 25 bp, Homo sapien
catgtatccaggcattgctgacagg

SEQ ID NO: 2444377 - DNA, 25 bp, Homo sapien
taggtctccctggacttcaagcagg

SEQ ID NO: 2444378 - DNA, 25 bp, Homo sapien
tctgacgctgaagtaccccatcaag

SEQ ID NO: 2444379 - DNA, 25 bp, Homo sapien
gcccagcgggaaatcatgcgcgata

SEQ ID NO: 2444380 - DNA, 25 bp, Homo sapien
tagaagaagagatcgctgcgctcgt

SEQ ID NO: 2444381 - DNA, 25 bp, Homo sapien
tctttaatagcattgctgatgacat

SEQ ID NO: 2444382 - DNA, 25 bp, Homo sapien
gcactggcaacgactttgctgccat

SEQ ID NO: 2444383 - DNA, 25 bp, Homo sapien
aatatactggccatccgcactggca

SEQ ID NO: 2444384 - DNA, 25 bp, Homo sapien
tatcagttgtgtaggtgccattcac

SEQ ID NO: 2444385 - DNA, 25 bp, Homo sapien
gacaagaagagtttgaattagcagc

SEQ ID NO: 2444386 - DNA, 25 bp, Homo sapien
ttggatttgatacagaactatactg

SEQ ID NO: 2444387 - DNA, 25 bp, Homo sapien
tacagaactatactggattcactga

SEQ ID NO: 2444388 - DNA, 25 bp, Homo sapien
cattttccatgaatagtgaattata

SEQ ID NO: 2444389 - DNA, 25 bp, Homo sapien
agtaaagctaccgtgaccgcgatgt

SEQ ID NO: 2444390 - DNA, 25 bp, Homo sapien
ccgtgaccgcgatgtttggatgaca

SEQ ID NO: 2444391 - DNA, 25 bp, Homo sapien
aagctaccgtgaccgcgatgtttgg

SEQ ID NO: 2444392 - DNA, 25 bp, Homo sapien
gaccgcgatgtttggatgacataat

SEQ ID NO: 2444393 - DNA, 25 bp, Homo sapien
tatgaaagactgtatggagcaacat

SEQ ID NO: 2444394 - DNA, 25 bp, Homo sapien
ttctgactgatcctgctgccacgct

SEQ ID NO: 2444395 - DNA, 25 bp, Homo sapien
actgtggggcatcatctatggttct

SEQ ID NO: 2444396 - DNA, 25 bp, Homo sapien
gcatctagctggatatatgaaagac

SEQ ID NO: 2444397 - DNA, 25 bp, Homo sapien
caggagccacatatttaagaccatg

SEQ ID NO: 2444398 - DNA, 25 bp, Homo sapien
gctgggaaggcagaatccaaagtgc

SEQ ID NO: 2444399 - DNA, 25 bp, Homo sapien
gttggccaccatgataaaccagttt

SEQ ID NO: 2444400 - DNA, 25 bp, Homo sapien
taagaccatgtctaggagcttctac

SEQ ID NO: 2444401 - DNA, 25 bp, Homo sapien
tgagtcagtaggcgccagcttcctc

SEQ ID NO: 2444402 - DNA, 25 bp, Homo sapien
tcactctcacaatcccaagtaggtt

SEQ ID NO: 2444403 - DNA, 25 bp, Homo sapien
tgaggaacaagcgtgctgaacactc

SEQ ID NO: 2444404 - DNA, 25 bp, Homo sapien
ttcgccgttctgaggcatggacgag

SEQ ID NO: 2444405 - DNA, 25 bp, Homo sapien
tcttgactcaacacgtcagacatga

SEQ ID NO: 2444406 - DNA, 25 bp, Homo sapien
aacacgtcagacatgaggagcaagt

SEQ ID NO: 2444407 - DNA, 25 bp, Homo sapien
caccccgatccttcaacgtttggtg

SEQ ID NO: 2444408 - DNA, 25 bp, Homo sapien
gatccttcaacgtttggtgtagctt

SEQ ID NO: 2444409 - DNA, 25 bp, Homo sapien
caggtcaaattaggacacagaagca

SEQ ID NO: 2444410 - DNA, 25 bp, Homo sapien
aggtcaaattaggacacagaagcat

SEQ ID NO: 2444411 - DNA, 25 bp, Homo sapien
aagtaacaggtcaaattaggacaca

SEQ ID NO: 2444412 - DNA, 25 bp, Homo sapien
taacaggtcaaattaggacacagaa

SEQ ID NO: 2444413 - DNA, 25 bp, Homo sapien
tatatgcttaggataagcatctgcc

SEQ ID NO: 2444414 - DNA, 25 bp, Homo sapien
gttgatcaccaataagctgaaggtt

SEQ ID NO: 2444415 - DNA, 25 bp, Homo sapien
tctgccagttgatcaccaataagct

SEQ ID NO: 2444416 - DNA, 25 bp, Homo sapien
gcttaggataagcatctgccagttg

SEQ ID NO: 2444417 - DNA, 25 bp, Homo sapien
atttgtaaataccacctcttggtgc

SEQ ID NO: 2444418 - DNA, 25 bp, Homo sapien
gggaccttgttccatcaattgtaac

SEQ ID NO: 2444419 - DNA, 25 bp, Homo sapien
tattttcagtcttggccacagtccc

SEQ ID NO: 2444420 - DNA, 25 bp, Homo sapien
ccttgagtcaatccagtaacagctg

SEQ ID NO: 2444421 - DNA, 25 bp, Homo sapien
tcttcatgagataggctgcctttct

SEQ ID NO: 2444422 - DNA, 25 bp, Homo sapien
tgcctttctcaaggacattgaatta

SEQ ID NO: 2444423 - DNA, 25 bp, Homo sapien
tctggaacgccatggagaggtaaac

SEQ ID NO: 2444424 - DNA, 25 bp, Homo sapien
cctcttctggtaatctggaacgcca

SEQ ID NO: 2444425 - DNA, 25 bp, Homo sapien
gctccctcttctggtaatctggaac

SEQ ID NO: 2444426 - DNA, 25 bp, Homo sapien
cgccatggagaggtaaactacattg

SEQ ID NO: 2444427 - DNA, 25 bp, Homo sapien
ctcttcaatcactcgactagttcta

SEQ ID NO: 2444428 - DNA, 25 bp, Homo sapien
tcttgcaagtaaacagcttttcctg

SEQ ID NO: 2444429 - DNA, 25 bp, Homo sapien
ctcttgcaagtaaacagcttttcct

SEQ ID NO: 2444430 - DNA, 25 bp, Homo sapien
cctcttgcaagtaaacagcttttcc

SEQ ID NO: 2444431 - DNA, 25 bp, Homo sapien
aaggcagatggtccccacagtcaaa

SEQ ID NO: 2444432 - DNA, 25 bp, Homo sapien
cagatggtccccacagtcaaagtca

SEQ ID NO: 2444433 - DNA, 25 bp, Homo sapien
tcatgttaacctgaaagcctgtttc

SEQ ID NO: 2444434 - DNA, 25 bp, Homo sapien
ccttttggtgacagactcgagatcc

SEQ ID NO: 2444435 - DNA, 25 bp, Homo sapien
tgctgagaagaacgctgctctcccc

SEQ ID NO: 2444436 - DNA, 25 bp, Homo sapien
gcagctgtcccacagcaaggcgttg

SEQ ID NO: 2444437 - DNA, 25 bp, Homo sapien
tgctctccccctcaagcagcatgcg

SEQ ID NO: 2444438 - DNA, 25 bp, Homo sapien
caaggcgttgttgctctggtctgtg

SEQ ID NO: 2444439 - DNA, 25 bp, Homo sapien
atctgataaatctctgatatgcttc

SEQ ID NO: 2444440 - DNA, 25 bp, Homo sapien
ggaatctgataaatctctgatatgc

SEQ ID NO: 2444441 - DNA, 25 bp, Homo sapien
ctggaatctgataaatctctgatat

SEQ ID NO: 2444442 - DNA, 25 bp, Homo sapien
taaatctctgatatgcttctctgct

SEQ ID NO: 2444443 - DNA, 25 bp, Homo sapien
tgtaaccatggaagtgttaatcgag

SEQ ID NO: 2444444 - DNA, 25 bp, Homo sapien
ctgtaaccatggaagtgttaatcga

SEQ ID NO: 2444445 - DNA, 25 bp, Homo sapien
gtatttagtgaggtattctctgtca

SEQ ID NO: 2444446 - DNA, 25 bp, Homo sapien
ctctgtcaatctagttgatagtaat

SEQ ID NO: 2444447 - DNA, 25 bp, Homo sapien
tctgttaaccttagtgtaaagtaca

SEQ ID NO: 2444448 - DNA, 25 bp, Homo sapien
ctgtatttagtgaggtattctctgt

SEQ ID NO: 2444449 - DNA, 25 bp, Homo sapien
ctattcagggcattctcaatttctt

SEQ ID NO: 2444450 - DNA, 25 bp, Homo sapien
cctattcagggcattctcaatttct

SEQ ID NO: 2444451 - DNA, 25 bp, Homo sapien
acagcaaaggacactgccggctgca

SEQ ID NO: 2444452 - DNA, 25 bp, Homo sapien
aaggagcacaaatttcctgtcatcc

SEQ ID NO: 2444453 - DNA, 25 bp, Homo sapien
ggacactgccggctgcactgagcaa

SEQ ID NO: 2444454 - DNA, 25 bp, Homo sapien
gagcaaggagcacaaatttcctgtc

SEQ ID NO: 2444455 - DNA, 25 bp, Homo sapien
aggcccttggcacatgcatccagtg

SEQ ID NO: 2444456 - DNA, 25 bp, Homo sapien
caaaccacatttcactggctgatgc

SEQ ID NO: 2444457 - DNA, 25 bp, Homo sapien
gggaaatgtaatgatagaacagcca

SEQ ID NO: 2444458 - DNA, 25 bp, Homo sapien
ccagcatcttgggaaatgtaatgat

SEQ ID NO: 2444459 - DNA, 25 bp, Homo sapien
aagttaaactgctctggttccaggg

SEQ ID NO: 2444460 - DNA, 25 bp, Homo sapien
caaaggagaacttaccaatggcagc

SEQ ID NO: 2444461 - DNA, 25 bp, Homo sapien
aatagtggccgtcccaatatgaccg

SEQ ID NO: 2444462 - DNA, 25 bp, Homo sapien
tgccgcatatgagaatacgtgtctg

SEQ ID NO: 2444463 - DNA, 25 bp, Homo sapien
ccagacgtggtgtgtcaggttgcca

SEQ ID NO: 2444464 - DNA, 25 bp, Homo sapien
tgcttctaatcagcaaaggccctga

SEQ ID NO: 2444465 - DNA, 25 bp, Homo sapien
ggtggtccagctgcttttacagaca

SEQ ID NO: 2444466 - DNA, 25 bp, Homo sapien
gaaaggtaattgttggtcagctgct

SEQ ID NO: 2444467 - DNA, 25 bp, Homo sapien
ctgtcttgagaataccaaaatagta

SEQ ID NO: 2444468 - DNA, 25 bp, Homo sapien
ttaaatacatcatcgtgaggatgag

SEQ ID NO: 2444469 - DNA, 25 bp, Homo sapien
catcatcgtgaggatgagccttact

SEQ ID NO: 2444470 - DNA, 25 bp, Homo sapien
tgtttaatgctagtttgtcttcaca

SEQ ID NO: 2444471 - DNA, 25 bp, Homo sapien
aatacatcatcgtgaggatgagcct

SEQ ID NO: 2444472 - DNA, 25 bp, Homo sapien
gatttcagatgtacttagggcctgt

SEQ ID NO: 2444473 - DNA, 25 bp, Homo sapien
gctttaatttttgcaggctcatagg

SEQ ID NO: 2444474 - DNA, 25 bp, Homo sapien
tcatcctggagccttaaatttttag

SEQ ID NO: 2444475 - DNA, 25 bp, Homo sapien
aaatctcagactttggactattgag

SEQ ID NO: 2444476 - DNA, 25 bp, Homo sapien
caagatgtaggtcacccactaccat

SEQ ID NO: 2444477 - DNA, 25 bp, Homo sapien
ggcatttccaagatgtaggtcaccc

SEQ ID NO: 2444478 - DNA, 25 bp, Homo sapien
caatgtataagaagtaagaactgcc

SEQ ID NO: 2444479 - DNA, 25 bp, Homo sapien
atttccaagatgtaggtcacccact

SEQ ID NO: 2444480 - DNA, 25 bp, Homo sapien
ctcttgcttgatcctcaatttcttt

SEQ ID NO: 2444481 - DNA, 25 bp, Homo sapien
tttctcttgcttgatcctcaatttc

SEQ ID NO: 2444482 - DNA, 25 bp, Homo sapien
tgttttccatatgcgctttctcttg

SEQ ID NO: 2444483 - DNA, 25 bp, Homo sapien
gttttccatatgcgctttctcttgc

SEQ ID NO: 2444484 - DNA, 25 bp, Homo sapien
ggaagccgtaactgagccagacctc

SEQ ID NO: 2444485 - DNA, 25 bp, Homo sapien
tgctctctattccacaatgtcctgc

SEQ ID NO: 2444486 - DNA, 25 bp, Homo sapien
tgggtcttgctctctattccacaat

SEQ ID NO: 2444487 - DNA, 25 bp, Homo sapien
tctgataaagccctgatgatcttcc

SEQ ID NO: 2444488 - DNA, 25 bp, Homo sapien
gcccaactttcactcttgcaactaa

SEQ ID NO: 2444489 - DNA, 25 bp, Homo sapien
cattggctgccgattggcccattaa

SEQ ID NO: 2444490 - DNA, 25 bp, Homo sapien
tggtctctgccaccgtcagtaacat

SEQ ID NO: 2444491 - DNA, 25 bp, Homo sapien
ttctgctaggcctatgatgaggtac

SEQ ID NO: 2444492 - DNA, 25 bp, Homo sapien
gcacatctgggtgaatctgtcctct

SEQ ID NO: 2444493 - DNA, 25 bp, Homo sapien
gcaatatctctgtatgtgctggcac

SEQ ID NO: 2444494 - DNA, 25 bp, Homo sapien
ataggcacatctgggtgaatctgtc

SEQ ID NO: 2444495 - DNA, 25 bp, Homo sapien
ttataggcacatctgggtgaatctg

SEQ ID NO: 2444496 - DNA, 25 bp, Homo sapien
cctcaggtgagagtagctaaatcca

SEQ ID NO: 2444497 - DNA, 25 bp, Homo sapien
ctcaggtgagagtagctaaatccac

SEQ ID NO: 2444498 - DNA, 25 bp, Homo sapien
tgggacagcttgggctttgtctcat

SEQ ID NO: 2444499 - DNA, 25 bp, Homo sapien
ctggtgggacagcttgggctttgtc

SEQ ID NO: 2444500 - DNA, 25 bp, Homo sapien
ggtgggacagcttgggctttgtctc

SEQ ID NO: 2444501 - DNA, 25 bp, Homo sapien
gtgggacagcttgggctttgtctca

SEQ ID NO: 2444502 - DNA, 25 bp, Homo sapien
aattgtgcgaaatagcagctatgcc

SEQ ID NO: 2444503 - DNA, 25 bp, Homo sapien
ctggtgtagtgaaaattgtgcgaaa

SEQ ID NO: 2444504 - DNA, 25 bp, Homo sapien
gctatgccatgtgcctgaacctctc

SEQ ID NO: 2444505 - DNA, 25 bp, Homo sapien
agcagctatgccatgtgcctgaacc

SEQ ID NO: 2444506 - DNA, 25 bp, Homo sapien
caccaggttctgtgtatggatgaac

SEQ ID NO: 2444507 - DNA, 25 bp, Homo sapien
tccacatagacacttctttctgcct

SEQ ID NO: 2444508 - DNA, 25 bp, Homo sapien
gaaagacacgggattggaacagttg

SEQ ID NO: 2444509 - DNA, 25 bp, Homo sapien
tgctgtgccacctttgtttcagttg

SEQ ID NO: 2444510 - DNA, 25 bp, Homo sapien
tttccaccgaaccaaatactgtgta

SEQ ID NO: 2444511 - DNA, 25 bp, Homo sapien
atactgtgtattcccatttttatcc

SEQ ID NO: 2444512 - DNA, 25 bp, Homo sapien
tgtcatcctgtttgtcataaccttt

SEQ ID NO: 2444513 - DNA, 25 bp, Homo sapien
atttttatcctgtcttttgtcaaca

SEQ ID NO: 2444514 - DNA, 25 bp, Homo sapien
accctttcgggtagctgaacctgtg

SEQ ID NO: 2444515 - DNA, 25 bp, Homo sapien
gctgatctgctgcaatagggtccag

SEQ ID NO: 2444516 - DNA, 25 bp, Homo sapien
caaaagacacttccagctgcactga

SEQ ID NO: 2444517 - DNA, 25 bp, Homo sapien
tctgcagcagcgctattcagagcat

SEQ ID NO: 2444518 - DNA, 25 bp, Homo sapien
gagggccttacattcttccagtaca

SEQ ID NO: 2444519 - DNA, 25 bp, Homo sapien
gctgtcagctttcgcccagcaatta

SEQ ID NO: 2444520 - DNA, 25 bp, Homo sapien
ggcctgttccaactccaacttaata

SEQ ID NO: 2444521 - DNA, 25 bp, Homo sapien
caacttaatattacagcgaacgagg

SEQ ID NO: 2444522 - DNA, 25 bp, Homo sapien
catggattctatcccttgggctgag

SEQ ID NO: 2444523 - DNA, 25 bp, Homo sapien
tttaacatggattctatcccttggg

SEQ ID NO: 2444524 - DNA, 25 bp, Homo sapien
acatggattctatcccttgggctga

SEQ ID NO: 2444525 - DNA, 25 bp, Homo sapien
taacatggattctatcccttgggct

SEQ ID NO: 2444526 - DNA, 25 bp, Homo sapien
ctcatcaattttattttcaacatac

SEQ ID NO: 2444527 - DNA, 25 bp, Homo sapien
aaactcatcaattttattttcaaca

SEQ ID NO: 2444528 - DNA, 25 bp, Homo sapien
aactcatcaattttattttcaacat

SEQ ID NO: 2444529 - DNA, 25 bp, Homo sapien
taaaactcatcaattttattttcaa

SEQ ID NO: 2444530 - DNA, 25 bp, Homo sapien
gtctcttataattgtgtgtctctga

SEQ ID NO: 2444531 - DNA, 25 bp, Homo sapien
agtttaggagaatgatcgtcagtgg

SEQ ID NO: 2444532 - DNA, 25 bp, Homo sapien
taggagaatgatcgtcagtggattt

SEQ ID NO: 2444533 - DNA, 25 bp, Homo sapien
tttatgctaaaagataagtctctta

SEQ ID NO: 2444534 - DNA, 25 bp, Homo sapien
gactgggctttgtccctgggcccaa

SEQ ID NO: 2444535 - DNA, 25 bp, Homo sapien
tggactgggctttgtccctgggccc

SEQ ID NO: 2444536 - DNA, 25 bp, Homo sapien
cctggactgggctttgtccctgggc

SEQ ID NO: 2444537 - DNA, 25 bp, Homo sapien
tccctggactgggctttgtccctgg

SEQ ID NO: 2444538 - DNA, 25 bp, Homo sapien
gagaaaggcagcctatctcatgaag

SEQ ID NO: 2444539 - DNA, 25 bp, Homo sapien
tctcctgtgtagtgatggtaagcag

SEQ ID NO: 2444540 - DNA, 25 bp, Homo sapien
ctggatctcctgtgtagtgatggta

SEQ ID NO: 2444541 - DNA, 25 bp, Homo sapien
gcctatctcatgaagattccctgga

SEQ ID NO: 2444542 - DNA, 25 bp, Homo sapien
ctggtttatcatggtggccaacaat

SEQ ID NO: 2444543 - DNA, 25 bp, Homo sapien
aattacaaagtagaagctcctagac

SEQ ID NO: 2444544 - DNA, 25 bp, Homo sapien
aaaactggtttatcatggtggccaa

SEQ ID NO: 2444545 - DNA, 25 bp, Homo sapien
caaaaactggtttatcatggtggcc

SEQ ID NO: 2444546 - DNA, 25 bp, Homo sapien
gcataataagtctcatatgtgacat

SEQ ID NO: 2444547 - DNA, 25 bp, Homo sapien
gccatgaagcataataagtctcata

SEQ ID NO: 2444548 - DNA, 25 bp, Homo sapien
atgccatgaagcataataagtctca

SEQ ID NO: 2444549 - DNA, 25 bp, Homo sapien
aagcataataagtctcatatgtgac

SEQ ID NO: 2444550 - DNA, 25 bp, Homo sapien
cacttccaccaattatgcatttgag

SEQ ID NO: 2444551 - DNA, 25 bp, Homo sapien
atctagagtgcaacatatcggcctt

SEQ ID NO: 2444552 - DNA, 25 bp, Homo sapien
ttcacttccaccaattatgcatttg

SEQ ID NO: 2444553 - DNA, 25 bp, Homo sapien
agtgcaacatatcggcctttccctg

SEQ ID NO: 2444554 - DNA, 25 bp, Homo sapien
gcatcgtggtcaactggctccaaat

SEQ ID NO: 2444555 - DNA, 25 bp, Homo sapien
catctaaagcatcgtggtcaactgg

SEQ ID NO: 2444556 - DNA, 25 bp, Homo sapien
tagagcctgttgaatgaggatataa

SEQ ID NO: 2444557 - DNA, 25 bp, Homo sapien
ggtcttatgcccatctaaagcatcg

SEQ ID NO: 2444558 - DNA, 25 bp, Homo sapien
gctgtggagttcaagtaaattctgg

SEQ ID NO: 2444559 - DNA, 25 bp, Homo sapien
tatctgacgttacaaggtgtgacag

SEQ ID NO: 2444560 - DNA, 25 bp, Homo sapien
gaatacaaggtactagagaagcaga

SEQ ID NO: 2444561 - DNA, 25 bp, Homo sapien
tgtgacagcacctagaaagaagtct

SEQ ID NO: 2444562 - DNA, 25 bp, Homo sapien
gattaatagaaagtgtaagctcccc

SEQ ID NO: 2444563 - DNA, 25 bp, Homo sapien
gagataatcaccaacgaatgccata

SEQ ID NO: 2444564 - DNA, 25 bp, Homo sapien
aaagtcgttgccagtgcggatggcc

SEQ ID NO: 2444565 - DNA, 25 bp, Homo sapien
tgcagtgaatggcacctacacaact

SEQ ID NO: 2444566 - DNA, 25 bp, Homo sapien
tgcaaatactgacagaagcggagct

SEQ ID NO: 2444567 - DNA, 25 bp, Homo sapien
ttattgagtcacaacacttcggtaa

SEQ ID NO: 2444568 - DNA, 25 bp, Homo sapien
tgatgaactacacggcaattattga

SEQ ID NO: 2444569 - DNA, 25 bp, Homo sapien
taggattgtatgtcccacctcgtgt

SEQ ID NO: 2444570 - DNA, 25 bp, Homo sapien
tggcttggggagcatcgtcccctgc

SEQ ID NO: 2444571 - DNA, 25 bp, Homo sapien
atggcttggggagcatcgtcccctg

SEQ ID NO: 2444572 - DNA, 25 bp, Homo sapien
ggcttggggagcatcgtcccctgca

SEQ ID NO: 2444573 - DNA, 25 bp, Homo sapien
catcacgccctggtgtccggggaac

SEQ ID NO: 2444574 - DNA, 25 bp, Homo sapien
tcagcgtcagaatgctgcgcttgct

SEQ ID NO: 2444575 - DNA, 25 bp, Homo sapien
cgtcagaatgctgcgcttgctctgg

SEQ ID NO: 2444576 - DNA, 25 bp, Homo sapien
tacttcagcgtcagaatgctgcgct

SEQ ID NO: 2444577 - DNA, 25 bp, Homo sapien
gggtacttcagcgtcagaatgctgc

SEQ ID NO: 2444578 - DNA, 25 bp, Homo sapien
ctactccggggccccatgcagctca

SEQ ID NO: 2444579 - DNA, 25 bp, Homo sapien
tactccggggccccatgcagctcat

SEQ ID NO: 2444580 - DNA, 25 bp, Homo sapien
actccggggccccatgcagctcatt

SEQ ID NO: 2444581 - DNA, 25 bp, Homo sapien
tgggtgaccctgtgtccacagtcca

SEQ ID NO: 2444582 - DNA, 25 bp, Homo sapien
gtgaccctgtgtccacagtccatga

SEQ ID NO: 2444583 - DNA, 25 bp, Homo sapien
gggtgaccctgtgtccacagtccat

SEQ ID NO: 2444584 - DNA, 25 bp, Homo sapien
ggtgaccctgtgtccacagtccatg

SEQ ID NO: 2444585 - DNA, 25 bp, Homo sapien
ggatcttcttgaggtactcagtcaa

SEQ ID NO: 2444586 - DNA, 25 bp, Homo sapien
tttcccgctgggctgtgttggtgaa

SEQ ID NO: 2444587 - DNA, 25 bp, Homo sapien
tcttcttgaggtactcagtcaagtc

SEQ ID NO: 2444588 - DNA, 25 bp, Homo sapien
ttcttgaggtactcagtcaagtccc

SEQ ID NO: 2444589 - DNA, 25 bp, Homo sapien
ccgtattggtgtataggtctttgcg

SEQ ID NO: 2444590 - DNA, 25 bp, Homo sapien
aaccgatccacactgagaacttgcg

SEQ ID NO: 2444591 - DNA, 25 bp, Homo sapien
tgccaccggatagtaccgtattggt

SEQ ID NO: 2444592 - DNA, 25 bp, Homo sapien
gagttcaggatggagcaaccgatcc

SEQ ID NO: 2444593 - DNA, 25 bp, Homo sapien
cctacggtgttctggcaaaaaacat

SEQ ID NO: 2444594 - DNA, 25 bp, Homo sapien
gacagcctacggtgttctggcaaaa

SEQ ID NO: 2444595 - DNA, 25 bp, Homo sapien
ggcaagtgacagcctacggtgttct

SEQ ID NO: 2444596 - DNA, 25 bp, Homo sapien
agtgacagcctacggtgttctggca

SEQ ID NO: 2444597 - DNA, 25 bp, Homo sapien
gggactagggtgaggtgcacatggt

SEQ ID NO: 2444598 - DNA, 25 bp, Homo sapien
ctggttgttaacaggtagttcaggg

SEQ ID NO: 2444599 - DNA, 25 bp, Homo sapien
tctgctcaagcagagttcagaatgc

SEQ ID NO: 2444600 - DNA, 25 bp, Homo sapien
tgctcaagcagagttcagaatgcat

SEQ ID NO: 2444601 - DNA, 25 bp, Homo sapien
cctctgctcaagcagagttcagaat

SEQ ID NO: 2444602 - DNA, 25 bp, Homo sapien
gacctctgctcaagcagagttcaga

SEQ ID NO: 2444603 - DNA, 25 bp, Homo sapien
agagaaatgagtctttaagttcctt

SEQ ID NO: 2444604 - DNA, 25 bp, Homo sapien
tccagagaaatgagtctttaagttc

SEQ ID NO: 2444605 - DNA, 25 bp, Homo sapien
ctccagagaaatgagtctttaagtt

SEQ ID NO: 2444606 - DNA, 25 bp, Homo sapien
ccagagaaatgagtctttaagttcc

SEQ ID NO: 2444607 - DNA, 25 bp, Homo sapien
cagagagtttgtttgcgggctctgc

SEQ ID NO: 2444608 - DNA, 25 bp, Homo sapien
ctatccgaggcactgtgaggacacc

SEQ ID NO: 2444609 - DNA, 25 bp, Homo sapien
gctctgcatgctcagtgcgtaggct

SEQ ID NO: 2444610 - DNA, 25 bp, Homo sapien
tcagtgcgtaggctccgtgcaccct

SEQ ID NO: 2444611 - DNA, 25 bp, Homo sapien
aaggaggcttagtcttcactacgaa

SEQ ID NO: 2444612 - DNA, 25 bp, Homo sapien
gatgaaggaggcttagtcttcacta

SEQ ID NO: 2444613 - DNA, 25 bp, Homo sapien
gcttagtcttcactacgaacgtgcc

SEQ ID NO: 2444614 - DNA, 25 bp, Homo sapien
ggaggcttagtcttcactacgaacg

SEQ ID NO: 2444615 - DNA, 25 bp, Homo sapien
gtgggccaaagctgcggccactctt

SEQ ID NO: 2444616 - DNA, 25 bp, Homo sapien
tcatcttcatggtggacgcgacccc

SEQ ID NO: 2444617 - DNA, 25 bp, Homo sapien
tgggccaaagctgcggccactcttg

SEQ ID NO: 2444618 - DNA, 25 bp, Homo sapien
catcttcatggtggacgcgacccca

SEQ ID NO: 2444619 - DNA, 25 bp, Homo sapien
gcaattccacgaacagccaacagaa

SEQ ID NO: 2444620 - DNA, 25 bp, Homo sapien
tggttacaggcctagccagcaaaga

SEQ ID NO: 2444621 - DNA, 25 bp, Homo sapien
gaaaatgccagtagactcggagaca

SEQ ID NO: 2444622 - DNA, 25 bp, Homo sapien
gggtctggcttggttactgcttcca

SEQ ID NO: 2444623 - DNA, 25 bp, Homo sapien
taatttattgcgtttgttgtagtct

SEQ ID NO: 2444624 - DNA, 25 bp, Homo sapien
gaaggcttcgaaattgaaatctgca

SEQ ID NO: 2444625 - DNA, 25 bp, Homo sapien
gagtgaagaagcacttgtgtgctaa

SEQ ID NO: 2444626 - DNA, 25 bp, Homo sapien
caggccctggttcctaattctggga

SEQ ID NO: 2444627 - DNA, 25 bp, Homo sapien
caagtgtggccaatatgctaaaaat

SEQ ID NO: 2444628 - DNA, 25 bp, Homo sapien
gggttgcagtgtcctacgattgcac

SEQ ID NO: 2444629 - DNA, 25 bp, Homo sapien
ccagccaaagagatagtgtgagatt

SEQ ID NO: 2444630 - DNA, 25 bp, Homo sapien
tctggagcttgagacaagtgtggcc

SEQ ID NO: 2444631 - DNA, 25 bp, Homo sapien
gctgctgctgcaagtagctcaaaac

SEQ ID NO: 2444632 - DNA, 25 bp, Homo sapien
taatgggtgacttacagactagaac

SEQ ID NO: 2444633 - DNA, 25 bp, Homo sapien
gaacagccttctctgttagcagttc

SEQ ID NO: 2444634 - DNA, 25 bp, Homo sapien
gctttgtctacgtaatatgtttcag

SEQ ID NO: 2444635 - DNA, 25 bp, Homo sapien
aattgcagttttgtgtaagatttca

SEQ ID NO: 2444636 - DNA, 25 bp, Homo sapien
tgtaagatttcaacattgctaccca

SEQ ID NO: 2444637 - DNA, 25 bp, Homo sapien
tctgaattgcagttttgtgtaagat

SEQ ID NO: 2444638 - DNA, 25 bp, Homo sapien
gttttgtgtaagatttcaacattgc

SEQ ID NO: 2444639 - DNA, 25 bp, Homo sapien
catctttatcactaactgttttttc

SEQ ID NO: 2444640 - DNA, 25 bp, Homo sapien
tctttatcactaactgttttttcaa

SEQ ID NO: 2444641 - DNA, 25 bp, Homo sapien
atcatctttatcactaactgttttt

SEQ ID NO: 2444642 - DNA, 25 bp, Homo sapien
tcatctttatcactaactgtttttt

SEQ ID NO: 2444643 - DNA, 25 bp, Homo sapien
gagcctgacacgctccttatgtgag

SEQ ID NO: 2444644 - DNA, 25 bp, Homo sapien
cacacggtatgagtagagcctgaca

SEQ ID NO: 2444645 - DNA, 25 bp, Homo sapien
gaggttacaaaaccacacggtatga

SEQ ID NO: 2444646 - DNA, 25 bp, Homo sapien
tgtgagtgtctggatcatcgttcat

SEQ ID NO: 2444647 - DNA, 25 bp, Homo sapien
acagtaccccccaccagcatacacg

SEQ ID NO: 2444648 - DNA, 25 bp, Homo sapien
gaagatgtggagagtagggtagaga

SEQ ID NO: 2444649 - DNA, 25 bp, Homo sapien
ctggcaggtgatgagttccctagac

SEQ ID NO: 2444650 - DNA, 25 bp, Homo sapien
tgagttccctagactttgaccaacc

SEQ ID NO: 2444651 - DNA, 25 bp, Homo sapien
aaccacgtcccatgtctccagcaca

SEQ ID NO: 2444652 - DNA, 25 bp, Homo sapien
acccgtgtggacaagcggacaggca

SEQ ID NO: 2444653 - DNA, 25 bp, Homo sapien
caggcgggaccgactgcagttatga

SEQ ID NO: 2444654 - DNA, 25 bp, Homo sapien
cgggaccgactgcagttatgagttt

SEQ ID NO: 2444655 - DNA, 25 bp, Homo sapien
gccgatgggatagagcttgacccgt

SEQ ID NO: 2444656 - DNA, 25 bp, Homo sapien
tttcttttccgtgccgactgacact

SEQ ID NO: 2444657 - DNA, 25 bp, Homo sapien
ggtgtgcctcttccgcactccatcc

SEQ ID NO: 2444658 - DNA, 25 bp, Homo sapien
ttcgtttcttttccgtgccgactga

SEQ ID NO: 2444659 - DNA, 25 bp, Homo sapien
ctcattattcgtttcttttccgtgc

SEQ ID NO: 2444660 - DNA, 25 bp, Homo sapien
tagtcgtgggaattgcctgggagtt

SEQ ID NO: 2444661 - DNA, 25 bp, Homo sapien
ctagtcgtgggaattgcctgggagt

SEQ ID NO: 2444662 - DNA, 25 bp, Homo sapien
agtcgtgggaattgcctgggagttc

SEQ ID NO: 2444663 - DNA, 25 bp, Homo sapien
tcgtgggaattgcctgggagttctc

SEQ ID NO: 2444664 - DNA, 25 bp, Homo sapien
catgggcagaaacgtaggctgtgtc

SEQ ID NO: 2444665 - DNA, 25 bp, Homo sapien
cctagcctccatccgcacacccgtg

SEQ ID NO: 2444666 - DNA, 25 bp, Homo sapien
agatcccatgggcagaaacgtaggc

SEQ ID NO: 2444667 - DNA, 25 bp, Homo sapien
cagaaacgtaggctgtgtcctctgt

SEQ ID NO: 2444668 - DNA, 25 bp, Homo sapien
tgacaacctgcacctgtcaggaaaa

SEQ ID NO: 2444669 - DNA, 25 bp, Homo sapien
caaagcctgacaacctgcacctgtc

SEQ ID NO: 2444670 - DNA, 25 bp, Homo sapien
gacaacctgcacctgtcaggaaaag

SEQ ID NO: 2444671 - DNA, 25 bp, Homo sapien
agagttccaaagcctgacaacctgc

SEQ ID NO: 2444672 - DNA, 25 bp, Homo sapien
tgaacagcacatgggtcagaactaa

SEQ ID NO: 2444673 - DNA, 25 bp, Homo sapien
tagcctgtatgaagtgcattttccc

SEQ ID NO: 2444674 - DNA, 25 bp, Homo sapien
agttctccaaaaaagtcctcagtgt

SEQ ID NO: 2444675 - DNA, 25 bp, Homo sapien
actatagctacaagaaatcctcgtg

SEQ ID NO: 2444676 - DNA, 25 bp, Homo sapien
gttggaaaaccacacttggcaaaga

SEQ ID NO: 2444677 - DNA, 25 bp, Homo sapien
acttgcatcgatatcaggactgaaa

SEQ ID NO: 2444678 - DNA, 25 bp, Homo sapien
tggcaaagaacttgcatcgatatca

SEQ ID NO: 2444679 - DNA, 25 bp, Homo sapien
ttggaaaaccacacttggcaaagaa

SEQ ID NO: 2444680 - DNA, 25 bp, Homo sapien
agatgtactcaggtggcaaacagtc

SEQ ID NO: 2444681 - DNA, 25 bp, Homo sapien
gagacacaatggtccctcttgggac

SEQ ID NO: 2444682 - DNA, 25 bp, Homo sapien
tctggagacacaatggtccctcttg

SEQ ID NO: 2444683 - DNA, 25 bp, Homo sapien
tcaggtggcaaacagtcaatgaggc

SEQ ID NO: 2444684 - DNA, 25 bp, Homo sapien
tgaggtccccttgcatcttgcagtt

SEQ ID NO: 2444685 - DNA, 25 bp, Homo sapien
atgaggtccccttgcatcttgcagt

SEQ ID NO: 2444686 - DNA, 25 bp, Homo sapien
cagtgatggggcccttcgggtcctt

SEQ ID NO: 2444687 - DNA, 25 bp, Homo sapien
gatgcagtgatggggcccttcgggt

SEQ ID NO: 2444688 - DNA, 25 bp, Homo sapien
tgcagtgatggggcccttcgggtcc

SEQ ID NO: 2444689 - DNA, 25 bp, Homo sapien
agtgatggggcccttcgggtccttg

SEQ ID NO: 2444690 - DNA, 25 bp, Homo sapien
ccagaacaagtgacataccaggagc

SEQ ID NO: 2444691 - DNA, 25 bp, Homo sapien
caagtgacataccaggagcctgtgg

SEQ ID NO: 2444692 - DNA, 25 bp, Homo sapien
cagaacaagtgacataccaggagcc

SEQ ID NO: 2444693 - DNA, 25 bp, Homo sapien
gaacaagtgacataccaggagcctg

SEQ ID NO: 2444694 - DNA, 25 bp, Homo sapien
ttctttcatggcatgacaaagtgtt

SEQ ID NO: 2444695 - DNA, 25 bp, Homo sapien
tctttcatggcatgacaaagtgttt

SEQ ID NO: 2444696 - DNA, 25 bp, Homo sapien
ctttcatggcatgacaaagtgtttt

SEQ ID NO: 2444697 - DNA, 25 bp, Homo sapien
ctgccctgaggtcagatagaagcaa

SEQ ID NO: 2444698 - DNA, 25 bp, Homo sapien
gatagaagcaaatggccaccacttc

SEQ ID NO: 2444699 - DNA, 25 bp, Homo sapien
ggatcttcttgccctgagaagctgc

SEQ ID NO: 2444700 - DNA, 25 bp, Homo sapien
caagaacctggacataggcttcttc

SEQ ID NO: 2444701 - DNA, 25 bp, Homo sapien
ggagagagggagatacagagctgac

SEQ ID NO: 2444702 - DNA, 25 bp, Homo sapien
aggagagagggagatacagagctga

SEQ ID NO: 2444703 - DNA, 25 bp, Homo sapien
tttttccagacggaggagaagtctc

SEQ ID NO: 2444704 - DNA, 25 bp, Homo sapien
ttacctccctatggacagcctcaaa

SEQ ID NO: 2444705 - DNA, 25 bp, Homo sapien
tgttacctccctatggacagcctca

SEQ ID NO: 2444706 - DNA, 25 bp, Homo sapien
cttttgttacctccctatggacagc

SEQ ID NO: 2444707 - DNA, 25 bp, Homo sapien
cactcaggccgttcttgcagagcag

SEQ ID NO: 2444708 - DNA, 25 bp, Homo sapien
gccactcaggccgttcttgcagagc

SEQ ID NO: 2444709 - DNA, 25 bp, Homo sapien
tcagtcactaggggctgtaggcact

SEQ ID NO: 2444710 - DNA, 25 bp, Homo sapien
gcagccactcaggccgttcttgcag

SEQ ID NO: 2444711 - DNA, 25 bp, Homo sapien
gagcttctgcgttggccagtcctca

SEQ ID NO: 2444712 - DNA, 25 bp, Homo sapien
gcagagcttctgcgttggccagtcc

SEQ ID NO: 2444713 - DNA, 25 bp, Homo sapien
agagcttctgcgttggccagtcctc

SEQ ID NO: 2444714 - DNA, 25 bp, Homo sapien
ttcctttgaaacaaggtatctgaac

SEQ ID NO: 2444715 - DNA, 25 bp, Homo sapien
gaaacaaggtatctgaacaggccat

SEQ ID NO: 2444716 - DNA, 25 bp, Homo sapien
cctcaggctcagagggcggcagcct

SEQ ID NO: 2444717 - DNA, 25 bp, Homo sapien
caaggtatctgaacaggccatattc

SEQ ID NO: 2444718 - DNA, 25 bp, Homo sapien
tgccaggacgcttaaaaccactgtc

SEQ ID NO: 2444719 - DNA, 25 bp, Homo sapien
tgtttatccgacttagcctcctcaa

SEQ ID NO: 2444720 - DNA, 25 bp, Homo sapien
ggacgcttaaaaccactgtcacatg

SEQ ID NO: 2444721 - DNA, 25 bp, Homo sapien
aaccactgtcacatgtttatccgac

SEQ ID NO: 2444722 - DNA, 25 bp, Homo sapien
ggatgggatggctttaacggattta

SEQ ID NO: 2444723 - DNA, 25 bp, Homo sapien
ctgctgggcctccagtgtagatgga

SEQ ID NO: 2444724 - DNA, 25 bp, Homo sapien
tctgacccttgggacccctgctggg

SEQ ID NO: 2444725 - DNA, 25 bp, Homo sapien
aacggatttaacctccaaatctctg

SEQ ID NO: 2444726 - DNA, 25 bp, Homo sapien
tacttccttttttctctgctgccat

SEQ ID NO: 2444727 - DNA, 25 bp, Homo sapien
gccatcttacttccttttttctctg

SEQ ID NO: 2444728 - DNA, 25 bp, Homo sapien
cgccatcttacttccttttttctct

SEQ ID NO: 2444729 - DNA, 25 bp, Homo sapien
tcttacttccttttttctctgctgc

SEQ ID NO: 2444730 - DNA, 25 bp, Homo sapien
ccacgtggtctgagtgaacccagaa

SEQ ID NO: 2444731 - DNA, 25 bp, Homo sapien
cacggccatccgttcgtttagtccg

SEQ ID NO: 2444732 - DNA, 25 bp, Homo sapien
actccagtccaatttggctgacgcg

SEQ ID NO: 2444733 - DNA, 25 bp, Homo sapien
ctacacggccatccgttcgtttagt

SEQ ID NO: 2444734 - DNA, 25 bp, Homo sapien
tgacgcgaggtgagtacctctcctt

SEQ ID NO: 2444735 - DNA, 25 bp, Homo sapien
tgaagactccaagatggcgatcgcc

SEQ ID NO: 2444736 - DNA, 25 bp, Homo sapien
cttgggtggactacaaatcacggct

SEQ ID NO: 2444737 - DNA, 25 bp, Homo sapien
gcgatcgccaccttggataccctga

SEQ ID NO: 2444738 - DNA, 25 bp, Homo sapien
caagtcgggtttctgcccttatgac

SEQ ID NO: 2444739 - DNA, 25 bp, Homo sapien
tttcaaatttggtggagatgactca

SEQ ID NO: 2444740 - DNA, 25 bp, Homo sapien
caggaaacaagttgactctgaaaat

SEQ ID NO: 2444741 - DNA, 25 bp, Homo sapien
aggaaacaagttgactctgaaaatg

SEQ ID NO: 2444742 - DNA, 25 bp, Homo sapien
aatgctttctgttggtgcggtcagg

SEQ ID NO: 2444743 - DNA, 25 bp, Homo sapien
gttggtgcggtcagggagaagtgct

SEQ ID NO: 2444744 - DNA, 25 bp, Homo sapien
gctgtccctctaatactagagcagt

SEQ ID NO: 2444745 - DNA, 25 bp, Homo sapien
gggagaagtgctgtccctctaatac

SEQ ID NO: 2444746 - DNA, 25 bp, Homo sapien
tcttccatcccaatatatttccgtc

SEQ ID NO: 2444747 - DNA, 25 bp, Homo sapien
cttccatcccaatatatttccgtca

SEQ ID NO: 2444748 - DNA, 25 bp, Homo sapien
ttccatcccaatatatttccgtcat

SEQ ID NO: 2444749 - DNA, 25 bp, Homo sapien
acaatgggagcctcgcgaatttgga

SEQ ID NO: 2444750 - DNA, 25 bp, Homo sapien
aatttggaggagagtagtgggccct

SEQ ID NO: 2444751 - DNA, 25 bp, Homo sapien
caatgggagcctcgcgaatttggag

SEQ ID NO: 2444752 - DNA, 25 bp, Homo sapien
gacaatgggagcctcgcgaatttgg

SEQ ID NO: 2444753 - DNA, 25 bp, Homo sapien
gatgcatcgcaaagggccctgagaa

SEQ ID NO: 2444754 - DNA, 25 bp, Homo sapien
tgagaaccaggggaatatgcaacac

SEQ ID NO: 2444755 - DNA, 25 bp, Homo sapien
gcagttccaggagagtagaaggtct

SEQ ID NO: 2444756 - DNA, 25 bp, Homo sapien
gtagaaggtctagcaagaatgccca

SEQ ID NO: 2444757 - DNA, 25 bp, Homo sapien
gccaacaaaggttccgtggcgctgc

SEQ ID NO: 2444758 - DNA, 25 bp, Homo sapien
cagtctgccttgtccttcgcaaaga

SEQ ID NO: 2444759 - DNA, 25 bp, Homo sapien
ggcgctgccttatcattcctcatgg

SEQ ID NO: 2444760 - DNA, 25 bp, Homo sapien
tagagtccttcagtcctaatcccgc

SEQ ID NO: 2444761 - DNA, 25 bp, Homo sapien
tctgcaccggatcccggtttccgga

SEQ ID NO: 2444762 - DNA, 25 bp, Homo sapien
cggtttccggagcacggcaggacat

SEQ ID NO: 2444763 - DNA, 25 bp, Homo sapien
ccggtttccggagcacggcaggaca

SEQ ID NO: 2444764 - DNA, 25 bp, Homo sapien
gctgctctgctccatggaaaaccct

SEQ ID NO: 2444765 - DNA, 25 bp, Homo sapien
agagagccttgtgtggaggtctgac

SEQ ID NO: 2444766 - DNA, 25 bp, Homo sapien
gctctgctccatggaaaaccctgac

SEQ ID NO: 2444767 - DNA, 25 bp, Homo sapien
agagccttgtgtggaggtctgactt

SEQ ID NO: 2444768 - DNA, 25 bp, Homo sapien
tcggacaaccactcctgagtcattc

SEQ ID NO: 2444769 - DNA, 25 bp, Homo sapien
ccaggctcggtgaatccaatctcag

SEQ ID NO: 2444770 - DNA, 25 bp, Homo sapien
gactggttcatatcccatcgccgcg

SEQ ID NO: 2444771 - DNA, 25 bp, Homo sapien
gaacactactcggacaggaaccgca

SEQ ID NO: 2444772 - DNA, 25 bp, Homo sapien
caagccggcccacctttgctgccat

SEQ ID NO: 2444773 - DNA, 25 bp, Homo sapien
acctttgctgccatctaactccgcc

SEQ ID NO: 2444774 - DNA, 25 bp, Homo sapien
aagccggcccacctttgctgccatc

SEQ ID NO: 2444775 - DNA, 25 bp, Homo sapien
tttgctgccatctaactccgccgac

SEQ ID NO: 2444776 - DNA, 25 bp, Homo sapien
ctcgcggaaggacccagttggaact

SEQ ID NO: 2444777 - DNA, 25 bp, Homo sapien
cttaacaatcccaagttgacggtca

SEQ ID NO: 2444778 - DNA, 25 bp, Homo sapien
agttgacggtcaagtccagcgctcg

SEQ ID NO: 2444779 - DNA, 25 bp, Homo sapien
caatcccaagttgacggtcaagtcc

SEQ ID NO: 2444780 - DNA, 25 bp, Homo sapien
cccaagttgacggtcaagtccagcg

SEQ ID NO: 2444781 - DNA, 25 bp, Homo sapien
tagtggatgcaggtggtagtgctgc

SEQ ID NO: 2444782 - DNA, 25 bp, Homo sapien
ctagtggatgcaggtggtagtgctg

SEQ ID NO: 2444783 - DNA, 25 bp, Homo sapien
tgctgctgaccagagttacccgttc

SEQ ID NO: 2444784 - DNA, 25 bp, Homo sapien
tgctgaccagagttacccgttctac

SEQ ID NO: 2444785 - DNA, 25 bp, Homo sapien
ccatgccaccgccttggcgacagaa

SEQ ID NO: 2444786 - DNA, 25 bp, Homo sapien
ccgagaccatgccaccgccttggcg

SEQ ID NO: 2444787 - DNA, 25 bp, Homo sapien
gagaccatgccaccgccttggcgac

SEQ ID NO: 2444788 - DNA, 25 bp, Homo sapien
tgccaccgccttggcgacagaagga

SEQ ID NO: 2444789 - DNA, 25 bp, Homo sapien
ccatgaggccagaagctgacatcct

SEQ ID NO: 2444790 - DNA, 25 bp, Homo sapien
tcttacgtgtacagtctcatgatag

SEQ ID NO: 2444791 - DNA, 25 bp, Homo sapien
atttaaacaagccagccaagcgccc

SEQ ID NO: 2444792 - DNA, 25 bp, Homo sapien
gactcttcagtccagagtccatgag

SEQ ID NO: 2444793 - DNA, 25 bp, Homo sapien
atcatttctgtgttttaggtgcatc

SEQ ID NO: 2444794 - DNA, 25 bp, Homo sapien
catttctgtgttttaggtgcatccg

SEQ ID NO: 2444795 - DNA, 25 bp, Homo sapien
agaatcatttctgtgttttaggtgc

SEQ ID NO: 2444796 - DNA, 25 bp, Homo sapien
gaatcatttctgtgttttaggtgca

SEQ ID NO: 2444797 - DNA, 25 bp, Homo sapien
gagttgtggcatgctgttcgaccag

SEQ ID NO: 2444798 - DNA, 25 bp, Homo sapien
tgagtcaaaagacaacccgtggcgc

SEQ ID NO: 2444799 - DNA, 25 bp, Homo sapien
cccgtggcgcatgagagtttgaaga

SEQ ID NO: 2444800 - DNA, 25 bp, Homo sapien
tacgtccttgtggatctcgggccaa

SEQ ID NO: 2444801 - DNA, 25 bp, Homo sapien
tcaaggactccacgacttcccaaat

SEQ ID NO: 2444802 - DNA, 25 bp, Homo sapien
tttcttgacgctttctggtgcccct

SEQ ID NO: 2444803 - DNA, 25 bp, Homo sapien
gggtgtccccatgagcacggcatgc

SEQ ID NO: 2444804 - DNA, 25 bp, Homo sapien
cctattaagattggcgtcctgttcc

SEQ ID NO: 2444805 - DNA, 25 bp, Homo sapien
acctcctcgtacaccgccgggcagc

SEQ ID NO: 2444806 - DNA, 25 bp, Homo sapien
ctcctcgtacaccgccgggcagcag

SEQ ID NO: 2444807 - DNA, 25 bp, Homo sapien
cctcctcgtacaccgccgggcagca

SEQ ID NO: 2444808 - DNA, 25 bp, Homo sapien
tcctcgtacaccgccgggcagcagc

SEQ ID NO: 2444809 - DNA, 25 bp, Homo sapien
gatccaagccgcgtggctttggagt

SEQ ID NO: 2444810 - DNA, 25 bp, Homo sapien
ccgaagtctgtgcagcggatggaca

SEQ ID NO: 2444811 - DNA, 25 bp, Homo sapien
gatggtccagtgcatggccttgtct

SEQ ID NO: 2444812 - DNA, 25 bp, Homo sapien
gagtggcttagagttgtcccgatcc

SEQ ID NO: 2444813 - DNA, 25 bp, Homo sapien
gccatgtccttgtccggacaagcga

SEQ ID NO: 2444814 - DNA, 25 bp, Homo sapien
catgggccatgtccttgtccggaca

SEQ ID NO: 2444815 - DNA, 25 bp, Homo sapien
tggccatgggccatgtccttgtccg

SEQ ID NO: 2444816 - DNA, 25 bp, Homo sapien
tgggccatgtccttgtccggacaag

SEQ ID NO: 2444817 - DNA, 25 bp, Homo sapien
cattgccttcgccagtcacgaggca

SEQ ID NO: 2444818 - DNA, 25 bp, Homo sapien
gcaccgtcttcgtgtcaactccagt

SEQ ID NO: 2444819 - DNA, 25 bp, Homo sapien
gattcccattggcaccgtcttcgtg

SEQ ID NO: 2444820 - DNA, 25 bp, Homo sapien
cttcgccagtcacgaggcaatccgt

SEQ ID NO: 2444821 - DNA, 25 bp, Homo sapien
tggttttaacttcatatcactgaaa

SEQ ID NO: 2444822 - DNA, 25 bp, Homo sapien
ctggttttaacttcatatcactgaa

SEQ ID NO: 2444823 - DNA, 25 bp, Homo sapien
ttcttggctgcaaaggtaacacaag

SEQ ID NO: 2444824 - DNA, 25 bp, Homo sapien
tggtttataaaactactacagcaaa

SEQ ID NO: 2444825 - DNA, 25 bp, Homo sapien
taaacgtacagaaccaggacatctt

SEQ ID NO: 2444826 - DNA, 25 bp, Homo sapien
tagtcactgttatgcacctaagttg

SEQ ID NO: 2444827 - DNA, 25 bp, Homo sapien
gccgggtctgcgtgagcgcaatctc

SEQ ID NO: 2444828 - DNA, 25 bp, Homo sapien
tggccacccagtaggccggagctgg

SEQ ID NO: 2444829 - DNA, 25 bp, Homo sapien
ggccacccagtaggccggagctggg

SEQ ID NO: 2444830 - DNA, 25 bp, Homo sapien
ggagcccaggggctgcaattcaggg

SEQ ID NO: 2444831 - DNA, 25 bp, Homo sapien
tgcgtccccggcagggagcccaggg

SEQ ID NO: 2444832 - DNA, 25 bp, Homo sapien
cccaggggctgcaattcaggggcac

SEQ ID NO: 2444833 - DNA, 25 bp, Homo sapien
gagcccaggggctgcaattcagggg

SEQ ID NO: 2444834 - DNA, 25 bp, Homo sapien
tgccagcggagtcaatgggatgttc

SEQ ID NO: 2444835 - DNA, 25 bp, Homo sapien
ctacagctgcaggttgctctccccg

SEQ ID NO: 2444836 - DNA, 25 bp, Homo sapien
acagctgcaggttgctctccccgtg

SEQ ID NO: 2444837 - DNA, 25 bp, Homo sapien
agcggagtcaatgggatgttcatca

SEQ ID NO: 2444838 - DNA, 25 bp, Homo sapien
ggcctcgttgtagtacacgttgatg

SEQ ID NO: 2444839 - DNA, 25 bp, Homo sapien
cgctggcctcgttgtagtacacgtt

SEQ ID NO: 2444840 - DNA, 25 bp, Homo sapien
gctggcctcgttgtagtacacgttg

SEQ ID NO: 2444841 - DNA, 25 bp, Homo sapien
cctcgttgtagtacacgttgatgcg

SEQ ID NO: 2444842 - DNA, 25 bp, Homo sapien
tgaggttgtcggcctgaagatgagc

SEQ ID NO: 2444843 - DNA, 25 bp, Homo sapien
caaagatgaggttgtcggcctgaag

SEQ ID NO: 2444844 - DNA, 25 bp, Homo sapien
aagatgaggttgtcggcctgaagat

SEQ ID NO: 2444845 - DNA, 25 bp, Homo sapien
gaggttgtcggcctgaagatgagcc

SEQ ID NO: 2444846 - DNA, 25 bp, Homo sapien
tggccttgtttcaagccccacactg

SEQ ID NO: 2444847 - DNA, 25 bp, Homo sapien
ggccttgtttcaagccccacactga

SEQ ID NO: 2444848 - DNA, 25 bp, Homo sapien
ggtacccatcccagatgcagttccc

SEQ ID NO: 2444849 - DNA, 25 bp, Homo sapien
gtacccatcccagatgcagttcccc

SEQ ID NO: 2444850 - DNA, 25 bp, Homo sapien
tgacagggtggcattgtagagttcc

SEQ ID NO: 2444851 - DNA, 25 bp, Homo sapien
gacagggtggcattgtagagttcca

SEQ ID NO: 2444852 - DNA, 25 bp, Homo sapien
acagggtggcattgtagagttccac

SEQ ID NO: 2444853 - DNA, 25 bp, Homo sapien
agcagataacaggtggttcatgtca

SEQ ID NO: 2444854 - DNA, 25 bp, Homo sapien
tagcagataacaggtggttcatgtc

SEQ ID NO: 2444855 - DNA, 25 bp, Homo sapien
ctgggaagcccaggcacatggtgac

SEQ ID NO: 2444856 - DNA, 25 bp, Homo sapien
gggaagcccaggcacatggtgaccc

SEQ ID NO: 2444857 - DNA, 25 bp, Homo sapien
ggaagcccaggcacatggtgacccc

SEQ ID NO: 2444858 - DNA, 25 bp, Homo sapien
aagcccaggcacatggtgaccccac

SEQ ID NO: 2444859 - DNA, 25 bp, Homo sapien
ttcacagacagcttctgtaggtcag

SEQ ID NO: 2444860 - DNA, 25 bp, Homo sapien
catgttcacagacagcttctgtagg

SEQ ID NO: 2444861 - DNA, 25 bp, Homo sapien
tgttcacagacagcttctgtaggtc

SEQ ID NO: 2444862 - DNA, 25 bp, Homo sapien
ttctgtaggtcagcattcagctgac

SEQ ID NO: 2444863 - DNA, 25 bp, Homo sapien
cagccacagtcagggcctggtaatg

SEQ ID NO: 2444864 - DNA, 25 bp, Homo sapien
tcagccacagtcagggcctggtaat

SEQ ID NO: 2444865 - DNA, 25 bp, Homo sapien
acagtcagggcctggtaatgctggc

SEQ ID NO: 2444866 - DNA, 25 bp, Homo sapien
gccacagtcagggcctggtaatgct

SEQ ID NO: 2444867 - DNA, 25 bp, Homo sapien
gcagccatcatattcttagcataaa

SEQ ID NO: 2444868 - DNA, 25 bp, Homo sapien
gggcagccatcatattcttagcata

SEQ ID NO: 2444869 - DNA, 25 bp, Homo sapien
agccatcatattcttagcataaaac

SEQ ID NO: 2444870 - DNA, 25 bp, Homo sapien
aggggcagccatcatattcttagca

SEQ ID NO: 2444871 - DNA, 25 bp, Homo sapien
tggggtgggatgtgacagatggctg

SEQ ID NO: 2444872 - DNA, 25 bp, Homo sapien
gtgggggagccagtcagcaaagtag

SEQ ID NO: 2444873 - DNA, 25 bp, Homo sapien
ctggggtgggatgtgacagatggct

SEQ ID NO: 2444874 - DNA, 25 bp, Homo sapien
cagatggctgtttttacgttgtggg

SEQ ID NO: 2444875 - DNA, 25 bp, Homo sapien
catgaaggtggccaacatttttagc

SEQ ID NO: 2444876 - DNA, 25 bp, Homo sapien
tttcctggataacaatgctgttgcc

SEQ ID NO: 2444877 - DNA, 25 bp, Homo sapien
tgcccatgaaggtggccaacatttt

SEQ ID NO: 2444878 - DNA, 25 bp, Homo sapien
aacaatgctgttgcccatgaaggtg

SEQ ID NO: 2444879 - DNA, 25 bp, Homo sapien
ctcctcctcagccttggcatcctgg

SEQ ID NO: 2444880 - DNA, 25 bp, Homo sapien
acctcctcctcagcacactcctcaa

SEQ ID NO: 2444881 - DNA, 25 bp, Homo sapien
tcctcctcagcacactcctcaaact

SEQ ID NO: 2444882 - DNA, 25 bp, Homo sapien
tcctcagccttggcatcctggtact

SEQ ID NO: 2444883 - DNA, 25 bp, Homo sapien
agggcctttccgcaacttgggccat

SEQ ID NO: 2444884 - DNA, 25 bp, Homo sapien
cagcattcatccaagggcctttccg

SEQ ID NO: 2444885 - DNA, 25 bp, Homo sapien
ccatgcaggggggtactggactgct

SEQ ID NO: 2444886 - DNA, 25 bp, Homo sapien
actgctggggtccaagggtccaggc

SEQ ID NO: 2444887 - DNA, 25 bp, Homo sapien
aaagtgcaaacacagtcattacttc

SEQ ID NO: 2444888 - DNA, 25 bp, Homo sapien
agaatgcaatagatcagccttgccc

SEQ ID NO: 2444889 - DNA, 25 bp, Homo sapien
gcaaacacagtcattacttccacaa

SEQ ID NO: 2444890 - DNA, 25 bp, Homo sapien
catccagaatgcaatagatcagcct

SEQ ID NO: 2444891 - DNA, 25 bp, Homo sapien
ttgtgactgggtagcaaagcagtca

SEQ ID NO: 2444892 - DNA, 25 bp, Homo sapien
ttcaaaatactgtggattctgataa

SEQ ID NO: 2444893 - DNA, 25 bp, Homo sapien
aattgtgactgggtagcaaagcagt

SEQ ID NO: 2444894 - DNA, 25 bp, Homo sapien
tcttggcacactggtaattcaaaat

SEQ ID NO: 2444895 - DNA, 25 bp, Homo sapien
agcaggtagtagggaattttctagc

SEQ ID NO: 2444896 - DNA, 25 bp, Homo sapien
gagcaggtagtagggaattttctag

SEQ ID NO: 2444897 - DNA, 25 bp, Homo sapien
caggtagtagggaattttctagcat

SEQ ID NO: 2444898 - DNA, 25 bp, Homo sapien
gcaggtagtagggaattttctagca

SEQ ID NO: 2444899 - DNA, 25 bp, Homo sapien
acttggttaacagccactattggaa

SEQ ID NO: 2444900 - DNA, 25 bp, Homo sapien
aattggaatgtaagttctggtacca

SEQ ID NO: 2444901 - DNA, 25 bp, Homo sapien
tctggtaccatagtccgtgttaccc

SEQ ID NO: 2444902 - DNA, 25 bp, Homo sapien
gcatcgcagtcagggtagctttact

SEQ ID NO: 2444903 - DNA, 25 bp, Homo sapien
tttgatctacttgtggcactagcta

SEQ ID NO: 2444904 - DNA, 25 bp, Homo sapien
ctggttttgatctacttgtggcact

SEQ ID NO: 2444905 - DNA, 25 bp, Homo sapien
ggttttgatctacttgtggcactag

SEQ ID NO: 2444906 - DNA, 25 bp, Homo sapien
tgatctacttgtggcactagctatg

SEQ ID NO: 2444907 - DNA, 25 bp, Homo sapien
acgtagcaacagaggtcttgtagca

SEQ ID NO: 2444908 - DNA, 25 bp, Homo sapien
ctcaccctggacgtagcaacagagg

SEQ ID NO: 2444909 - DNA, 25 bp, Homo sapien
caccctggacgtagcaacagaggtc

SEQ ID NO: 2444910 - DNA, 25 bp, Homo sapien
cctggacgtagcaacagaggtcttg

SEQ ID NO: 2444911 - DNA, 25 bp, Homo sapien
taaaaggcgaacatgcacgaacatc

SEQ ID NO: 2444912 - DNA, 25 bp, Homo sapien
ttatggtaaaaggcgaacatgcacg

SEQ ID NO: 2444913 - DNA, 25 bp, Homo sapien
ggcgaacatgcacgaacatcaacaa

SEQ ID NO: 2444914 - DNA, 25 bp, Homo sapien
catgcacgaacatcaacaacaatga

SEQ ID NO: 2444915 - DNA, 25 bp, Homo sapien
ttactctttctgttgaatcaactga

SEQ ID NO: 2444916 - DNA, 25 bp, Homo sapien
tattctgttccagctttgcaatgca

SEQ ID NO: 2444917 - DNA, 25 bp, Homo sapien
atcaactgattttctgacttgaaat

SEQ ID NO: 2444918 - DNA, 25 bp, Homo sapien
ctttgcaatgcatgctgctgtgtaa

SEQ ID NO: 2444919 - DNA, 25 bp, Homo sapien
atttataccaggaatcgcagtcatc

SEQ ID NO: 2444920 - DNA, 25 bp, Homo sapien
ttataccaggaatcgcagtcatcat

SEQ ID NO: 2444921 - DNA, 25 bp, Homo sapien
tttataccaggaatcgcagtcatca

SEQ ID NO: 2444922 - DNA, 25 bp, Homo sapien
acacttatctagaccatcacaatgg

SEQ ID NO: 2444923 - DNA, 25 bp, Homo sapien
ttatctactcttccggcctgcatgg

SEQ ID NO: 2444924 - DNA, 25 bp, Homo sapien
tctttatctactcttccggcctgca

SEQ ID NO: 2444925 - DNA, 25 bp, Homo sapien
gcttcagaaggcctaagcatgtaca

SEQ ID NO: 2444926 - DNA, 25 bp, Homo sapien
aaaggttgagctgtcgaacaaaact

SEQ ID NO: 2444927 - DNA, 25 bp, Homo sapien
tggactttctaacaaggatccttgt

SEQ ID NO: 2444928 - DNA, 25 bp, Homo sapien
ggtggctagaaaggcagatctttga

SEQ ID NO: 2444929 - DNA, 25 bp, Homo sapien
tgcttaagacagacgattctttctc

SEQ ID NO: 2444930 - DNA, 25 bp, Homo sapien
caaaagctggtcttactgcatgtat

SEQ ID NO: 2444931 - DNA, 25 bp, Homo sapien
tgttaagccctcaagtgaaaacatg

SEQ ID NO: 2444932 - DNA, 25 bp, Homo sapien
tgaaaaaccactcaagttgttaagc

SEQ ID NO: 2444933 - DNA, 25 bp, Homo sapien
ctaaaaggttaacgctcaagctgaa

SEQ ID NO: 2444934 - DNA, 25 bp, Homo sapien
cactcttactaaaagttggggatag

SEQ ID NO: 2444935 - DNA, 25 bp, Homo sapien
tgaaatcttcgttgaataaagtaga

SEQ ID NO: 2444936 - DNA, 25 bp, Homo sapien
ttttaacaccaattcttctcttcac

SEQ ID NO: 2444937 - DNA, 25 bp, Homo sapien
ggatagccacgcttgaaatttggat

SEQ ID NO: 2444938 - DNA, 25 bp, Homo sapien
cagaggatatcgtgtgggaacagca

SEQ ID NO: 2444939 - DNA, 25 bp, Homo sapien
ggagcctcattgactgataccagag

SEQ ID NO: 2444940 - DNA, 25 bp, Homo sapien
caatgtggccccttgcttgcatgta

SEQ ID NO: 2444941 - DNA, 25 bp, Homo sapien
tcagcgatcgtaggcatttgcaacc

SEQ ID NO: 2444942 - DNA, 25 bp, Homo sapien
aatgtaaatgttagtctctgttgtc

SEQ ID NO: 2444943 - DNA, 25 bp, Homo sapien
tgttagtctctgttgtcattcataa

SEQ ID NO: 2444944 - DNA, 25 bp, Homo sapien
tgtaaatgttagtctctgttgtcat

SEQ ID NO: 2444945 - DNA, 25 bp, Homo sapien
aaatgttagtctctgttgtcattca

SEQ ID NO: 2444946 - DNA, 25 bp, Homo sapien
aagggcatggctgaaagtgatgttc

SEQ ID NO: 2444947 - DNA, 25 bp, Homo sapien
ccttgttaccagatggtaaagggca

SEQ ID NO: 2444948 - DNA, 25 bp, Homo sapien
tccaaatagactgtggtgaaacaca

SEQ ID NO: 2444949 - DNA, 25 bp, Homo sapien
gatgttctccgaatgttgctccaaa

SEQ ID NO: 2444950 - DNA, 25 bp, Homo sapien
tgaatgctgcttccgaaaagttgtg

SEQ ID NO: 2444951 - DNA, 25 bp, Homo sapien
tgctgcttccgaaaagttgtgcagc

SEQ ID NO: 2444952 - DNA, 25 bp, Homo sapien
aatgctgcttccgaaaagttgtgca

SEQ ID NO: 2444953 - DNA, 25 bp, Homo sapien
gtgaatgctgcttccgaaaagttgt

SEQ ID NO: 2444954 - DNA, 25 bp, Homo sapien
tcctgaggaatctggctgtccaaat

SEQ ID NO: 2444955 - DNA, 25 bp, Homo sapien
gaatcttgtcagaccttagcctgtg

SEQ ID NO: 2444956 - DNA, 25 bp, Homo sapien
tacgtatatggttagatggcaccac

SEQ ID NO: 2444957 - DNA, 25 bp, Homo sapien
ggctggagcgcaaaagcaggatctc

SEQ ID NO: 2444958 - DNA, 25 bp, Homo sapien
gcatttatgtgagggagaaagtaca

SEQ ID NO: 2444959 - DNA, 25 bp, Homo sapien
tgactcaagatgaagaacgtccgtg

SEQ ID NO: 2444960 - DNA, 25 bp, Homo sapien
gctttatatatatcacgcacggata

SEQ ID NO: 2444961 - DNA, 25 bp, Homo sapien
gctccatccttcagtcttatgtttg

SEQ ID NO: 2444962 - DNA, 25 bp, Homo sapien
ctgaaactggatatattgtagttcc

SEQ ID NO: 2444963 - DNA, 25 bp, Homo sapien
actgaaactggatatattgtagttc

SEQ ID NO: 2444964 - DNA, 25 bp, Homo sapien
ttactgaaactggatatattgtagt

SEQ ID NO: 2444965 - DNA, 25 bp, Homo sapien
tgaaactggatatattgtagttcct

SEQ ID NO: 2444966 - DNA, 25 bp, Homo sapien
gagctcaagaaaggtggttcaggaa

SEQ ID NO: 2444967 - DNA, 25 bp, Homo sapien
caggaaggctccctatagacatgct

SEQ ID NO: 2444968 - DNA, 25 bp, Homo sapien
tctgccacataatcagagctcaaga

SEQ ID NO: 2444969 - DNA, 25 bp, Homo sapien
aaggctccctatagacatgcttcaa

SEQ ID NO: 2444970 - DNA, 25 bp, Homo sapien
ttaaatgtaagttgcaacataaata

SEQ ID NO: 2444971 - DNA, 25 bp, Homo sapien
gagtaattcgactcatcttttaaat

SEQ ID NO: 2444972 - DNA, 25 bp, Homo sapien
tacctgttttcataagttgaagatc

SEQ ID NO: 2444973 - DNA, 25 bp, Homo sapien
tatgagtaattcgactcatctttta

SEQ ID NO: 2444974 - DNA, 25 bp, Homo sapien
gatgcggacaagctaacttctaagg

SEQ ID NO: 2444975 - DNA, 25 bp, Homo sapien
cacagcataacatagttacagggag

SEQ ID NO: 2444976 - DNA, 25 bp, Homo sapien
cagaaggacttttgccacctgacgc

SEQ ID NO: 2444977 - DNA, 25 bp, Homo sapien
cccagagacagattgaacttcaagg

SEQ ID NO: 2444978 - DNA, 25 bp, Homo sapien
tcaatcagcggctgaagccatcatt

SEQ ID NO: 2444979 - DNA, 25 bp, Homo sapien
gaaaagagtatccttgagagaattc

SEQ ID NO: 2444980 - DNA, 25 bp, Homo sapien
aagtatggaaagaatgtagctgtgt

SEQ ID NO: 2444981 - DNA, 25 bp, Homo sapien
caggtaaacttttgttaagctgctg

SEQ ID NO: 2444982 - DNA, 25 bp, Homo sapien
gctggagagtccttctttacttaaa

SEQ ID NO: 2444983 - DNA, 25 bp, Homo sapien
tctaaaatatgatttcgacatgtgt

SEQ ID NO: 2444984 - DNA, 25 bp, Homo sapien
tatctcagttcagactgaccacctt

SEQ ID NO: 2444985 - DNA, 25 bp, Homo sapien
tcacctttccactgtcaatggatgc

SEQ ID NO: 2444986 - DNA, 25 bp, Homo sapien
taactgggaggtccttcctcgtgtc

SEQ ID NO: 2444987 - DNA, 25 bp, Homo sapien
caaagcatgcaaggattcaaaggcc

SEQ ID NO: 2444988 - DNA, 25 bp, Homo sapien
gcatgccagggctacattggccaaa

SEQ ID NO: 2444989 - DNA, 25 bp, Homo sapien
gctacctgatttaccaagttgtgtg

SEQ ID NO: 2444990 - DNA, 25 bp, Homo sapien
taaataaatatctgtatagatgtgt

SEQ ID NO: 2444991 - DNA, 25 bp, Homo sapien
ctttaatttgacaaggaatacatat

SEQ ID NO: 2444992 - DNA, 25 bp, Homo sapien
aaatatctgtatagatgtgtgtata

SEQ ID NO: 2444993 - DNA, 25 bp, Homo sapien
taatttgacaaggaatacatattac

SEQ ID NO: 2444994 - DNA, 25 bp, Homo sapien
gtcagtcttgttattcagaaccaca

SEQ ID NO: 2444995 - DNA, 25 bp, Homo sapien
caaaagtaagcaggcggcagacaga

SEQ ID NO: 2444996 - DNA, 25 bp, Homo sapien
tcatcgataacaaaagtaagcaggc

SEQ ID NO: 2444997 - DNA, 25 bp, Homo sapien
ctgctgtttgtttatgtcagtcttg

SEQ ID NO: 2444998 - DNA, 25 bp, Homo sapien
catgatctgaacgagttcgtagttc

SEQ ID NO: 2444999 - DNA, 25 bp, Homo sapien
actgtcatctaggacaataatcatg

SEQ ID NO: 2445000 - DNA, 25 bp, Homo sapien
ttaaaccattgtttctcacactgtc

SEQ ID NO: 2445001 - DNA, 25 bp, Homo sapien
gaatgtaatgtcagcattcttcatg

SEQ ID NO: 2445002 - DNA, 25 bp, Homo sapien
ggtcctgaccggctcattatgcagc

SEQ ID NO: 2445003 - DNA, 25 bp, Homo sapien
tcgggagcagctgttttgagtccct

SEQ ID NO: 2445004 - DNA, 25 bp, Homo sapien
tagccgggtaacctgcgaggtcctg

SEQ ID NO: 2445005 - DNA, 25 bp, Homo sapien
tgggacttttcaggccctatgtgag

SEQ ID NO: 2445006 - DNA, 25 bp, Homo sapien
cacgtctgcagggtattgggagaac

SEQ ID NO: 2445007 - DNA, 25 bp, Homo sapien
cattaacggtaaagctgctgagctc

SEQ ID NO: 2445008 - DNA, 25 bp, Homo sapien
tctctgcggcgggactgatacgttg

SEQ ID NO: 2445009 - DNA, 25 bp, Homo sapien
ggcgggcattaacggtaaagctgct

SEQ ID NO: 2445010 - DNA, 25 bp, Homo sapien
gttgctgagcacacgccggaagctc

SEQ ID NO: 2445011 - DNA, 25 bp, Homo sapien
atgtacttggttgctgagcacacgc

SEQ ID NO: 2445012 - DNA, 25 bp, Homo sapien
agacaaggcaaatgtacttggttgc

SEQ ID NO: 2445013 - DNA, 25 bp, Homo sapien
tacttggttgctgagcacacgccgg

SEQ ID NO: 2445014 - DNA, 25 bp, Homo sapien
cattgactgaacacgtcagacagag

SEQ ID NO: 2445015 - DNA, 25 bp, Homo sapien
atgtgtccagtacaccccgactctt

SEQ ID NO: 2445016 - DNA, 25 bp, Homo sapien
ccgactcttcaaggtcttgtgtagc

SEQ ID NO: 2445017 - DNA, 25 bp, Homo sapien
tgtgtagctttttgcgtagctcaca

SEQ ID NO: 2445018 - DNA, 25 bp, Homo sapien
aggtgcctcgtaggaggtagctccc

SEQ ID NO: 2445019 - DNA, 25 bp, Homo sapien
ggtgcctcgtaggaggtagctccct

SEQ ID NO: 2445020 - DNA, 25 bp, Homo sapien
cagccactgaagagttagaggtgcc

SEQ ID NO: 2445021 - DNA, 25 bp, Homo sapien
cactgaagagttagaggtgcctcgt

SEQ ID NO: 2445022 - DNA, 25 bp, Homo sapien
tatcagatcctgaaacctgctgtga

SEQ ID NO: 2445023 - DNA, 25 bp, Homo sapien
atcctgaaacctgctgtgagaaaac

SEQ ID NO: 2445024 - DNA, 25 bp, Homo sapien
agatcctgaaacctgctgtgagaaa

SEQ ID NO: 2445025 - DNA, 25 bp, Homo sapien
ttctttatcagatcctgaaacctgc

SEQ ID NO: 2445026 - DNA, 25 bp, Homo sapien
tctgcctgaacttgctcttttattt

SEQ ID NO: 2445027 - DNA, 25 bp, Homo sapien
cacccttgatatgctgagagtaagc

SEQ ID NO: 2445028 - DNA, 25 bp, Homo sapien
agactcacccttgatatgctgagag

SEQ ID NO: 2445029 - DNA, 25 bp, Homo sapien
acatttctgcctgaacttgctcttt

SEQ ID NO: 2445030 - DNA, 25 bp, Homo sapien
attcctcctggtgtagcagtcactt

SEQ ID NO: 2445031 - DNA, 25 bp, Homo sapien
ttcctcctggtgtagcagtcacttg

SEQ ID NO: 2445032 - DNA, 25 bp, Homo sapien
atcaagtaagttaggctctgcaaag

SEQ ID NO: 2445033 - DNA, 25 bp, Homo sapien
aataggctgccattctcacatcaag

SEQ ID NO: 2445034 - DNA, 25 bp, Homo sapien
gcttcccttcaccatgcaagataag

SEQ ID NO: 2445035 - DNA, 25 bp, Homo sapien
gcaagataagcccagaatctgcagt

SEQ ID NO: 2445036 - DNA, 25 bp, Homo sapien
gataccttgaaaccacctacaggca

SEQ ID NO: 2445037 - DNA, 25 bp, Homo sapien
caatcagcaagcagagggcaaggga

SEQ ID NO: 2445038 - DNA, 25 bp, Homo sapien
cagagggcaagggataccttgaaac

SEQ ID NO: 2445039 - DNA, 25 bp, Homo sapien
aaacccaatcagcaagcagagggca

SEQ ID NO: 2445040 - DNA, 25 bp, Homo sapien
cctcatgctcagctatgatagcatt

SEQ ID NO: 2445041 - DNA, 25 bp, Homo sapien
ctcctcatgctcagctatgatagca

SEQ ID NO: 2445042 - DNA, 25 bp, Homo sapien
tcctcatgctcagctatgatagcat

SEQ ID NO: 2445043 - DNA, 25 bp, Homo sapien
tctatactgccaaatggtctgcaaa

SEQ ID NO: 2445044 - DNA, 25 bp, Homo sapien
tatactgccaaatggtctgcaaaat

SEQ ID NO: 2445045 - DNA, 25 bp, Homo sapien
ttctatactgccaaatggtctgcaa

SEQ ID NO: 2445046 - DNA, 25 bp, Homo sapien
tactgccaaatggtctgcaaaatta

SEQ ID NO: 2445047 - DNA, 25 bp, Homo sapien
tgttgaaaaggtgtaaataagtgct

SEQ ID NO: 2445048 - DNA, 25 bp, Homo sapien
cttttcagtcctcattggaaaacct

SEQ ID NO: 2445049 - DNA, 25 bp, Homo sapien
tcaactataattgctaaactcttgt

SEQ ID NO: 2445050 - DNA, 25 bp, Homo sapien
aaaacaatagcacctgacatgggac

SEQ ID NO: 2445051 - DNA, 25 bp, Homo sapien
ttcgtcggcttttggagggaccaga

SEQ ID NO: 2445052 - DNA, 25 bp, Homo sapien
tcatctttagtcttgtgtggattcg

SEQ ID NO: 2445053 - DNA, 25 bp, Homo sapien
ggctgtgcgtagactagttatcttc

SEQ ID NO: 2445054 - DNA, 25 bp, Homo sapien
gactagttatcttctggagtgtgat

SEQ ID NO: 2445055 - DNA, 25 bp, Homo sapien
cagctgaggtggcaatagcaaaaac

SEQ ID NO: 2445056 - DNA, 25 bp, Homo sapien
tggactctgaatgttattccgagga

SEQ ID NO: 2445057 - DNA, 25 bp, Homo sapien
aacttgagtgattagagtgccctac

SEQ ID NO: 2445058 - DNA, 25 bp, Homo sapien
gcaattgacacctgtttactcagtt

SEQ ID NO: 2445059 - DNA, 25 bp, Homo sapien
aatccttagaagttagcttgtccgc

SEQ ID NO: 2445060 - DNA, 25 bp, Homo sapien
tttaccttgaagttcaatctgtctc

SEQ ID NO: 2445061 - DNA, 25 bp, Homo sapien
gatgagtcgaattactcataatcct

SEQ ID NO: 2445062 - DNA, 25 bp, Homo sapien
gaagttcaatctgtctctgggaaag

SEQ ID NO: 2445063 - DNA, 25 bp, Homo sapien
gtgagacagtctaaggcagggccac

SEQ ID NO: 2445064 - DNA, 25 bp, Homo sapien
gagacagtctaaggcagggccacag

SEQ ID NO: 2445065 - DNA, 25 bp, Homo sapien
aagtgagacagtctaaggcagggcc

SEQ ID NO: 2445066 - DNA, 25 bp, Homo sapien
caaagtgagacagtctaaggcaggg

SEQ ID NO: 2445067 - DNA, 25 bp, Homo sapien
gcatgaggcacaaatggttttccca

SEQ ID NO: 2445068 - DNA, 25 bp, Homo sapien
catgaggcacaaatggttttcccat

SEQ ID NO: 2445069 - DNA, 25 bp, Homo sapien
tgcatgaggcacaaatggttttccc

SEQ ID NO: 2445070 - DNA, 25 bp, Homo sapien
ctgcatgaggcacaaatggttttcc

SEQ ID NO: 2445071 - DNA, 25 bp, Homo sapien
tcaagatgcccgggcacgtttcctg

SEQ ID NO: 2445072 - DNA, 25 bp, Homo sapien
aagatgcccgggcacgtttcctgca

SEQ ID NO: 2445073 - DNA, 25 bp, Homo sapien
agatgcccgggcacgtttcctgcat

SEQ ID NO: 2445074 - DNA, 25 bp, Homo sapien
ttcaagatgcccgggcacgtttcct

SEQ ID NO: 2445075 - DNA, 25 bp, Homo sapien
catgagacatatctccagaagagaa

SEQ ID NO: 2445076 - DNA, 25 bp, Homo sapien
tatgcgtacacatgagacatatctc

SEQ ID NO: 2445077 - DNA, 25 bp, Homo sapien
ctccagatatgcgtacacatgagac

SEQ ID NO: 2445078 - DNA, 25 bp, Homo sapien
tacacatgagacatatctccagaag

SEQ ID NO: 2445079 - DNA, 25 bp, Homo sapien
ggtattgatatgagatgggcacagc

SEQ ID NO: 2445080 - DNA, 25 bp, Homo sapien
gctgcagcagcacccacaagaggca

SEQ ID NO: 2445081 - DNA, 25 bp, Homo sapien
gtattgatatgagatgggcacagca

SEQ ID NO: 2445082 - DNA, 25 bp, Homo sapien
ttgggtattgatatgagatgggcac

SEQ ID NO: 2445083 - DNA, 25 bp, Homo sapien
cctcacatccacagttctgacagtt

SEQ ID NO: 2445084 - DNA, 25 bp, Homo sapien
ctgccctcacatccacagttctgac

SEQ ID NO: 2445085 - DNA, 25 bp, Homo sapien
tcacatccacagttctgacagtttc

SEQ ID NO: 2445086 - DNA, 25 bp, Homo sapien
tgccctcacatccacagttctgaca

SEQ ID NO: 2445087 - DNA, 25 bp, Homo sapien
tcatcatgaccgactccaagtgaca

SEQ ID NO: 2445088 - DNA, 25 bp, Homo sapien
ctttaggatcctgactgagccactg

SEQ ID NO: 2445089 - DNA, 25 bp, Homo sapien
ctcataaaggtgctcaagtctgttc

SEQ ID NO: 2445090 - DNA, 25 bp, Homo sapien
tgagttgtactcatcccagggtgac

SEQ ID NO: 2445091 - DNA, 25 bp, Homo sapien
ctgcttggcttttgtttgacacgtg

SEQ ID NO: 2445092 - DNA, 25 bp, Homo sapien
gcttggcttttgtttgacacgtgac

SEQ ID NO: 2445093 - DNA, 25 bp, Homo sapien
aaaataaagagtagctgcccgtatc

SEQ ID NO: 2445094 - DNA, 25 bp, Homo sapien
agctgcccgtatcagattgttcaaa

SEQ ID NO: 2445095 - DNA, 25 bp, Homo sapien
catcatattgaaattagaagctggg

SEQ ID NO: 2445096 - DNA, 25 bp, Homo sapien
tcatctggttcgtcatgagaaaagc

SEQ ID NO: 2445097 - DNA, 25 bp, Homo sapien
gagcaaacctggttaccaagagtca

SEQ ID NO: 2445098 - DNA, 25 bp, Homo sapien
aaattagaagctggggagcaaacct

SEQ ID NO: 2445099 - DNA, 25 bp, Homo sapien
caagatcaaggcactaataggtcca

SEQ ID NO: 2445100 - DNA, 25 bp, Homo sapien
tatgctgggaaaaacgacgtctcgt

SEQ ID NO: 2445101 - DNA, 25 bp, Homo sapien
gatcaattgtaaaggaggagccctg

SEQ ID NO: 2445102 - DNA, 25 bp, Homo sapien
gtctcgttgtaaagatcacagccca

SEQ ID NO: 2445103 - DNA, 25 bp, Homo sapien
ccagacattaggtgactataggtac

SEQ ID NO: 2445104 - DNA, 25 bp, Homo sapien
tgttagcaatggtaaactccgtgca

SEQ ID NO: 2445105 - DNA, 25 bp, Homo sapien
cctcctactgttaacagacttgaag

SEQ ID NO: 2445106 - DNA, 25 bp, Homo sapien
tatcctcaagagttaaatgtcagct

SEQ ID NO: 2445107 - DNA, 25 bp, Homo sapien
tctggtgaccatctatgaaagagaa

SEQ ID NO: 2445108 - DNA, 25 bp, Homo sapien
cattcatgaaaaacaccgtaagaca

SEQ ID NO: 2445109 - DNA, 25 bp, Homo sapien
tcaacacagttagggaaaacatgtg

SEQ ID NO: 2445110 - DNA, 25 bp, Homo sapien
tgggtcctactgactaactacagaa

SEQ ID NO: 2445111 - DNA, 25 bp, Homo sapien
gacacccttcctaaataattgttga

SEQ ID NO: 2445112 - DNA, 25 bp, Homo sapien
tctagctctcgggagcaaagtgaaa

SEQ ID NO: 2445113 - DNA, 25 bp, Homo sapien
aagccatgcccacagatactaggat

SEQ ID NO: 2445114 - DNA, 25 bp, Homo sapien
gaatacctgccatacacttgggaag

SEQ ID NO: 2445115 - DNA, 25 bp, Homo sapien
tttcttatgtgcacagaagccccag

SEQ ID NO: 2445116 - DNA, 25 bp, Homo sapien
catggcaacttggtcctgtcacagg

SEQ ID NO: 2445117 - DNA, 25 bp, Homo sapien
gaggatccagcgcacagtttctgca

SEQ ID NO: 2445118 - DNA, 25 bp, Homo sapien
caaggttagagtatagggcccatcc

SEQ ID NO: 2445119 - DNA, 25 bp, Homo sapien
ctgttggagacccaaatgaaatttc

SEQ ID NO: 2445120 - DNA, 25 bp, Homo sapien
ggctgggctatggctgtatcttcct

SEQ ID NO: 2445121 - DNA, 25 bp, Homo sapien
gctgttggagacccaaatgaaattt

SEQ ID NO: 2445122 - DNA, 25 bp, Homo sapien
ctgtggtcatctgcactaggcattc

SEQ ID NO: 2445123 - DNA, 25 bp, Homo sapien
tgtggtcatctgcactaggcattcc

SEQ ID NO: 2445124 - DNA, 25 bp, Homo sapien
agtaaccagcgctggcacattccca

SEQ ID NO: 2445125 - DNA, 25 bp, Homo sapien
cagtaaccagcgctggcacattccc

SEQ ID NO: 2445126 - DNA, 25 bp, Homo sapien
ccagtaaccagcgctggcacattcc

SEQ ID NO: 2445127 - DNA, 25 bp, Homo sapien
ctcccaccctcactttggtgactct

SEQ ID NO: 2445128 - DNA, 25 bp, Homo sapien
ttaagagtagccaggtgtccttcag

SEQ ID NO: 2445129 - DNA, 25 bp, Homo sapien
aagagtagccaggtgtccttcagtg

SEQ ID NO: 2445130 - DNA, 25 bp, Homo sapien
ccaccctcactttggtgactctttg

SEQ ID NO: 2445131 - DNA, 25 bp, Homo sapien
tgtacgtaagttagtctcccaaatg

SEQ ID NO: 2445132 - DNA, 25 bp, Homo sapien
tttgccaaagatccttaggttccaa

SEQ ID NO: 2445133 - DNA, 25 bp, Homo sapien
tagaagctggactgcccatcaacac

SEQ ID NO: 2445134 - DNA, 25 bp, Homo sapien
aagatgaggaatgcaagctgggtat

SEQ ID NO: 2445135 - DNA, 25 bp, Homo sapien
taaggtctgacaagattcaccatgc

SEQ ID NO: 2445136 - DNA, 25 bp, Homo sapien
gaaagaactagctgtatccttacca

SEQ ID NO: 2445137 - DNA, 25 bp, Homo sapien
gtagcaggtccttgtctgaaagaac

SEQ ID NO: 2445138 - DNA, 25 bp, Homo sapien
tttggtgtcacaggctaaggtctga

SEQ ID NO: 2445139 - DNA, 25 bp, Homo sapien
tttaccataaatttttgactctgaa

SEQ ID NO: 2445140 - DNA, 25 bp, Homo sapien
cattgttgttgatgttcgtgcatgt

SEQ ID NO: 2445141 - DNA, 25 bp, Homo sapien
gtgcatgttcgccttttaccataaa

SEQ ID NO: 2445142 - DNA, 25 bp, Homo sapien
gatgttcgtgcatgttcgcctttta

SEQ ID NO: 2445143 - DNA, 25 bp, Homo sapien
aatactttccttctcagcaaaatga

SEQ ID NO: 2445144 - DNA, 25 bp, Homo sapien
caatactttccttctcagcaaaatg

SEQ ID NO: 2445145 - DNA, 25 bp, Homo sapien
ctcaatactttccttctcagcaaaa

SEQ ID NO: 2445146 - DNA, 25 bp, Homo sapien
atactttccttctcagcaaaatgac

SEQ ID NO: 2445147 - DNA, 25 bp, Homo sapien
gcagcacttgtgaagggatgtctct

SEQ ID NO: 2445148 - DNA, 25 bp, Homo sapien
catgcttttggcagcacttgtgaag

SEQ ID NO: 2445149 - DNA, 25 bp, Homo sapien
tgtgaagggatgtctctcaaattga

SEQ ID NO: 2445150 - DNA, 25 bp, Homo sapien
taggtaaaatatgtgcatgcttttg

SEQ ID NO: 2445151 - DNA, 25 bp, Homo sapien
gacagcatgtccagtaccttggggg

SEQ ID NO: 2445152 - DNA, 25 bp, Homo sapien
catgtccagtaccttgggggcccct

SEQ ID NO: 2445153 - DNA, 25 bp, Homo sapien
acagcatgtccagtaccttgggggc

SEQ ID NO: 2445154 - DNA, 25 bp, Homo sapien
agcatgtccagtaccttgggggccc

SEQ ID NO: 2445155 - DNA, 25 bp, Homo sapien
gacaaagtattgccaggacatacag

SEQ ID NO: 2445156 - DNA, 25 bp, Homo sapien
gtgatcagacaaagtattgccagga

SEQ ID NO: 2445157 - DNA, 25 bp, Homo sapien
caaagtattgccaggacatacagaa

SEQ ID NO: 2445158 - DNA, 25 bp, Homo sapien
tgatcagacaaagtattgccaggac

SEQ ID NO: 2445159 - DNA, 25 bp, Homo sapien
cagcatgctgagaatggacacagtg

SEQ ID NO: 2445160 - DNA, 25 bp, Homo sapien
gcatgctgagaatggacacagtgtt

SEQ ID NO: 2445161 - DNA, 25 bp, Homo sapien
agaatggacacagtgtttgaagaga

SEQ ID NO: 2445162 - DNA, 25 bp, Homo sapien
catgctgagaatggacacagtgttt

SEQ ID NO: 2445163 - DNA, 25 bp, Homo sapien
agtaaagctaccctgactgcgatgc

SEQ ID NO: 2445164 - DNA, 25 bp, Homo sapien
catattgctgcagatatcttcacct

SEQ ID NO: 2445165 - DNA, 25 bp, Homo sapien
tgctgcagatatcttcaccttgatg

SEQ ID NO: 2445166 - DNA, 25 bp, Homo sapien
ccatattgctgcagatatcttcacc

SEQ ID NO: 2445167 - DNA, 25 bp, Homo sapien
tattgctgcagatatcttcaccttg

SEQ ID NO: 2445168 - DNA, 25 bp, Homo sapien
tttagccttttgattctatactcac

SEQ ID NO: 2445169 - DNA, 25 bp, Homo sapien
gccttttgattctatactcactgat

SEQ ID NO: 2445170 - DNA, 25 bp, Homo sapien
ttctatactcactgatgtctggtcc

SEQ ID NO: 2445171 - DNA, 25 bp, Homo sapien
ttgattctatactcactgatgtctg

SEQ ID NO: 2445172 - DNA, 25 bp, Homo sapien
tactttgagtgtgcccagtacaccc

SEQ ID NO: 2445173 - DNA, 25 bp, Homo sapien
tcatctagctttttgggcagctcat

SEQ ID NO: 2445174 - DNA, 25 bp, Homo sapien
cagtacacccacattcatcaacatt

SEQ ID NO: 2445175 - DNA, 25 bp, Homo sapien
gaacagataaatctaaatccgatac

SEQ ID NO: 2445176 - DNA, 25 bp, Homo sapien
tctctcttatattcatttagctttg

SEQ ID NO: 2445177 - DNA, 25 bp, Homo sapien
ctgccagaagttgcttttctatttc

SEQ ID NO: 2445178 - DNA, 25 bp, Homo sapien
tttctctcttatattcatttagctt

SEQ ID NO: 2445179 - DNA, 25 bp, Homo sapien
cttttgacacatttctgccagaagt

SEQ ID NO: 2445180 - DNA, 25 bp, Homo sapien
agaatctccaattaaataggctgca

SEQ ID NO: 2445181 - DNA, 25 bp, Homo sapien
ttaaataggctgcatttctcaagga

SEQ ID NO: 2445182 - DNA, 25 bp, Homo sapien
tccaattaaataggctgcatttctc

SEQ ID NO: 2445183 - DNA, 25 bp, Homo sapien
tctccaattaaataggctgcatttc

SEQ ID NO: 2445184 - DNA, 25 bp, Homo sapien
ttcccctaggttaccagccacttgc

SEQ ID NO: 2445185 - DNA, 25 bp, Homo sapien
catgcatacaggcaatccaaaatct

SEQ ID NO: 2445186 - DNA, 25 bp, Homo sapien
taatctcatcattctgaatgtctaa

SEQ ID NO: 2445187 - DNA, 25 bp, Homo sapien
aatctcatcattctgaatgtctaaa

SEQ ID NO: 2445188 - DNA, 25 bp, Homo sapien
tgcatacaggcaatccaaaatcttc

SEQ ID NO: 2445189 - DNA, 25 bp, Homo sapien
catcttcagtcgattaattctaatg

SEQ ID NO: 2445190 - DNA, 25 bp, Homo sapien
tttcatcttcagtcgattaattcta

SEQ ID NO: 2445191 - DNA, 25 bp, Homo sapien
cttcagtcgattaattctaatgatg

SEQ ID NO: 2445192 - DNA, 25 bp, Homo sapien
tcatcttcagtcgattaattctaat

SEQ ID NO: 2445193 - DNA, 25 bp, Homo sapien
agctgtggaggtgcacattctgtca

SEQ ID NO: 2445194 - DNA, 25 bp, Homo sapien
aggagctgtggaggtgcacattctg

SEQ ID NO: 2445195 - DNA, 25 bp, Homo sapien
gtggaggtgcacattctgtcacatt

SEQ ID NO: 2445196 - DNA, 25 bp, Homo sapien
ctgtggaggtgcacattctgtcaca

SEQ ID NO: 2445197 - DNA, 25 bp, Homo sapien
gctccctctgtagcaaacctgagaa

SEQ ID NO: 2445198 - DNA, 25 bp, Homo sapien
cctattgatgacataggcaattctt

SEQ ID NO: 2445199 - DNA, 25 bp, Homo sapien
tgatttcacgtatatgaacccaaca

SEQ ID NO: 2445200 - DNA, 25 bp, Homo sapien
tttgtggagtcctcagtgcttccta

SEQ ID NO: 2445201 - DNA, 25 bp, Homo sapien
cactagatgtcagccaagagggcag

SEQ ID NO: 2445202 - DNA, 25 bp, Homo sapien
tatgcaccaaagcactagatgtcag

SEQ ID NO: 2445203 - DNA, 25 bp, Homo sapien
tatctagaatatgcaccaaagcact

SEQ ID NO: 2445204 - DNA, 25 bp, Homo sapien
caaagcactagatgtcagccaagag

SEQ ID NO: 2445205 - DNA, 25 bp, Homo sapien
gatctcagatcagtgtaccatttgc

SEQ ID NO: 2445206 - DNA, 25 bp, Homo sapien
ctggtcctaagcctaaaagtgggct

SEQ ID NO: 2445207 - DNA, 25 bp, Homo sapien
agagtagaattgcattgaccgcgac

SEQ ID NO: 2445208 - DNA, 25 bp, Homo sapien
gatcgaaccgttttgaagctactgt

SEQ ID NO: 2445209 - DNA, 25 bp, Homo sapien
aatctgctggagtttcatgtacaag

SEQ ID NO: 2445210 - DNA, 25 bp, Homo sapien
gaacttcaagtaactcctcccagag

SEQ ID NO: 2445211 - DNA, 25 bp, Homo sapien
ccaaatggcgtctggaagtccaatg

SEQ ID NO: 2445212 - DNA, 25 bp, Homo sapien
gactcaggccaagaaacgtcttcta

SEQ ID NO: 2445213 - DNA, 25 bp, Homo sapien
cattgaacgtactttcacagagctt

SEQ ID NO: 2445214 - DNA, 25 bp, Homo sapien
cacagagcttgtaaggtggtagtga

SEQ ID NO: 2445215 - DNA, 25 bp, Homo sapien
tgctctctagcttcagggcttggat

SEQ ID NO: 2445216 - DNA, 25 bp, Homo sapien
tagtgaggaggaagtatctttttgc

SEQ ID NO: 2445217 - DNA, 25 bp, Homo sapien
gctttaatagcacctgtagctcagg

SEQ ID NO: 2445218 - DNA, 25 bp, Homo sapien
tcttgagtagatagtacaggtgcac

SEQ ID NO: 2445219 - DNA, 25 bp, Homo sapien
ggtgagcagcatcgagactactgca

SEQ ID NO: 2445220 - DNA, 25 bp, Homo sapien
gctgcatgcaatggctgctggctct

SEQ ID NO: 2445221 - DNA, 25 bp, Homo sapien
ttcagcaggcgaatcagaggtagag

SEQ ID NO: 2445222 - DNA, 25 bp, Homo sapien
gagaacctggacctagtgcctctgg

SEQ ID NO: 2445223 - DNA, 25 bp, Homo sapien
gtcaccctggaccacaagtatgcag

SEQ ID NO: 2445224 - DNA, 25 bp, Homo sapien
gtaagagccagtcaccctggaccac

SEQ ID NO: 2445225 - DNA, 25 bp, Homo sapien
ccctttccatcctttagtgatatag

SEQ ID NO: 2445226 - DNA, 25 bp, Homo sapien
cctttccatcctttagtgatatagt

SEQ ID NO: 2445227 - DNA, 25 bp, Homo sapien
ctttccatcctttagtgatatagtg

SEQ ID NO: 2445228 - DNA, 25 bp, Homo sapien
ttcatggacgctgttctgcatttct

SEQ ID NO: 2445229 - DNA, 25 bp, Homo sapien
cgtcttaaattgtgccgtgagaatc

SEQ ID NO: 2445230 - DNA, 25 bp, Homo sapien
gccgtgagaatcttcatggacgctg

SEQ ID NO: 2445231 - DNA, 25 bp, Homo sapien
tcttctgtcgtcttaaattgtgccg

SEQ ID NO: 2445232 - DNA, 25 bp, Homo sapien
gtactagggccacagtgtgaggaat

SEQ ID NO: 2445233 - DNA, 25 bp, Homo sapien
tgagggtctgataggtggcaatgca

SEQ ID NO: 2445234 - DNA, 25 bp, Homo sapien
caaaggtaagatggcgggaaagctt

SEQ ID NO: 2445235 - DNA, 25 bp, Homo sapien
agagcagagattgaacgaggaggtg

SEQ ID NO: 2445236 - DNA, 25 bp, Homo sapien
caccataccacaaggcacttgaggg

SEQ ID NO: 2445237 - DNA, 25 bp, Homo sapien
tggaggtgaaccctcactttcatcc

SEQ ID NO: 2445238 - DNA, 25 bp, Homo sapien
tggccaccataccacaaggcacttg

SEQ ID NO: 2445239 - DNA, 25 bp, Homo sapien
cacgccaggcacaaagaggtgctca

SEQ ID NO: 2445240 - DNA, 25 bp, Homo sapien
tggatgtagcatagtgtgttaccca

SEQ ID NO: 2445241 - DNA, 25 bp, Homo sapien
tctggatgtagcatagtgtgttacc

SEQ ID NO: 2445242 - DNA, 25 bp, Homo sapien
ggatgtagcatagtgtgttacccat

SEQ ID NO: 2445243 - DNA, 25 bp, Homo sapien
ctggatgtagcatagtgtgttaccc

SEQ ID NO: 2445244 - DNA, 25 bp, Homo sapien
gatggtaagagtgtgccactcctgt

SEQ ID NO: 2445245 - DNA, 25 bp, Homo sapien
actgtctgctgttgatggtaagagt

SEQ ID NO: 2445246 - DNA, 25 bp, Homo sapien
gtggagcaaggccaccatggactgt

SEQ ID NO: 2445247 - DNA, 25 bp, Homo sapien
gcaaggccaccatggactgtctgct

SEQ ID NO: 2445248 - DNA, 25 bp, Homo sapien
tttcgctgacgtgtgcgggcagcca

SEQ ID NO: 2445249 - DNA, 25 bp, Homo sapien
tgtgctgaaagcaggcctttcgctg

SEQ ID NO: 2445250 - DNA, 25 bp, Homo sapien
tcatggtggaatactggaggagtaa

SEQ ID NO: 2445251 - DNA, 25 bp, Homo sapien
aagtgttcctacttgttaagcaggt

SEQ ID NO: 2445252 - DNA, 25 bp, Homo sapien
cagggactgttttgggctgtcctga

SEQ ID NO: 2445253 - DNA, 25 bp, Homo sapien
ggagttactactgatgggactgctg

SEQ ID NO: 2445254 - DNA, 25 bp, Homo sapien
gatgcgggggggtggcgtagcagga

SEQ ID NO: 2445255 - DNA, 25 bp, Homo sapien
cttcagggactgttttgggctgtcc

SEQ ID NO: 2445256 - DNA, 25 bp, Homo sapien
gctcttcccaatgggatgcactcca

SEQ ID NO: 2445257 - DNA, 25 bp, Homo sapien
ctgctcttcccaatgggatgcactc

SEQ ID NO: 2445258 - DNA, 25 bp, Homo sapien
gtctgctcttcccaatgggatgcac

SEQ ID NO: 2445259 - DNA, 25 bp, Homo sapien
ctgtctgctcttcccaatgggatgc

SEQ ID NO: 2445260 - DNA, 25 bp, Homo sapien
cagtgtgaaaataaaagtaagccat

SEQ ID NO: 2445261 - DNA, 25 bp, Homo sapien
ctgtgaataaagagttaaaagcaca

SEQ ID NO: 2445262 - DNA, 25 bp, Homo sapien
cacattttcagtgtgaaaataaaag

SEQ ID NO: 2445263 - DNA, 25 bp, Homo sapien
taaaagcacattttcagtgtgaaaa

SEQ ID NO: 2445264 - DNA, 25 bp, Homo sapien
ttgactgctgcggaactcggggggc

SEQ ID NO: 2445265 - DNA, 25 bp, Homo sapien
caggtgttgactgctgcggaactcg

SEQ ID NO: 2445266 - DNA, 25 bp, Homo sapien
tgttgactgctgcggaactcggggg

SEQ ID NO: 2445267 - DNA, 25 bp, Homo sapien
ggtgttgactgctgcggaactcggg

SEQ ID NO: 2445268 - DNA, 25 bp, Homo sapien
ctgggggcttccgggagcgcctggg

SEQ ID NO: 2445269 - DNA, 25 bp, Homo sapien
ccgaggccgctgtgcggggcggacg

SEQ ID NO: 2445270 - DNA, 25 bp, Homo sapien
cttccgggagcgcctgggggttctg

SEQ ID NO: 2445271 - DNA, 25 bp, Homo sapien
gaggccgctgtgcggggcggacggg

SEQ ID NO: 2445272 - DNA, 25 bp, Homo sapien
ggctggcccggggcattcgcgcggc

SEQ ID NO: 2445273 - DNA, 25 bp, Homo sapien
cggggcattcgcgcggccttgcagc

SEQ ID NO: 2445274 - DNA, 25 bp, Homo sapien
ggccttcccagccgacagagctgct

SEQ ID NO: 2445275 - DNA, 25 bp, Homo sapien
cttcccagccgacagagctgctgtg

SEQ ID NO: 2445276 - DNA, 25 bp, Homo sapien
tcttcgaatcccagtaagagacgcc

SEQ ID NO: 2445277 - DNA, 25 bp, Homo sapien
gcaattcggccaggcctcgagcctg

SEQ ID NO: 2445278 - DNA, 25 bp, Homo sapien
aatcccagtaagagacgccgctggc

SEQ ID NO: 2445279 - DNA, 25 bp, Homo sapien
gagccgtccagtcttcgaatcccag

SEQ ID NO: 2445280 - DNA, 25 bp, Homo sapien
agatggaccgagatcttcagttggg

SEQ ID NO: 2445281 - DNA, 25 bp, Homo sapien
agaggccaccctgagatggaccgag

SEQ ID NO: 2445282 - DNA, 25 bp, Homo sapien
ctccggtgagcttgcggccagatgc

SEQ ID NO: 2445283 - DNA, 25 bp, Homo sapien
cctcagtagtcctccgcaacaggtg

SEQ ID NO: 2445284 - DNA, 25 bp, Homo sapien
tgtcacagagactgtcagttccgtc

SEQ ID NO: 2445285 - DNA, 25 bp, Homo sapien
acagagactgtcagttccgtccctc

SEQ ID NO: 2445286 - DNA, 25 bp, Homo sapien
tgtcagttccgtccctccccttcag

SEQ ID NO: 2445287 - DNA, 25 bp, Homo sapien
ctgtcagttccgtccctccccttca

SEQ ID NO: 2445288 - DNA, 25 bp, Homo sapien
gggtcgtgtgctcccttacgcagga

SEQ ID NO: 2445289 - DNA, 25 bp, Homo sapien
ggaccctgcccaatcgtcaatgcga

SEQ ID NO: 2445290 - DNA, 25 bp, Homo sapien
gttgctcgctacttccagggtcgtg

SEQ ID NO: 2445291 - DNA, 25 bp, Homo sapien
ccagcgcttcaataccagatgttca

SEQ ID NO: 2445292 - DNA, 25 bp, Homo sapien
tggagctagcgtctctgcgcgggag

SEQ ID NO: 2445293 - DNA, 25 bp, Homo sapien
gctagcgtctctgcgcgggagaggg

SEQ ID NO: 2445294 - DNA, 25 bp, Homo sapien
ggtggagctagcgtctctgcgcggg

SEQ ID NO: 2445295 - DNA, 25 bp, Homo sapien
gggagaggggttgcgcggccagtgc

SEQ ID NO: 2445296 - DNA, 25 bp, Homo sapien
gagacccagggaatctggagccaac

SEQ ID NO: 2445297 - DNA, 25 bp, Homo sapien
cagtgcgcgagacccagggaatctg

SEQ ID NO: 2445298 - DNA, 25 bp, Homo sapien
ctctcagtgcgcgagacccagggaa

SEQ ID NO: 2445299 - DNA, 25 bp, Homo sapien
aatctggagccaacgctacaacccg

SEQ ID NO: 2445300 - DNA, 25 bp, Homo sapien
tgtggtcggacttttgtatggcaat

SEQ ID NO: 2445301 - DNA, 25 bp, Homo sapien
tgagtcaggattgaggtacagtctt

SEQ ID NO: 2445302 - DNA, 25 bp, Homo sapien
agttcctcgtaggtgtggtcggact

SEQ ID NO: 2445303 - DNA, 25 bp, Homo sapien
gttagcaaagtagttactgctacaa

SEQ ID NO: 2445304 - DNA, 25 bp, Homo sapien
gggatccattgctggctccaatgcc

SEQ ID NO: 2445305 - DNA, 25 bp, Homo sapien
tccagttagttctacttctcagtcc

SEQ ID NO: 2445306 - DNA, 25 bp, Homo sapien
tctcttttctacttgaatggttggg

SEQ ID NO: 2445307 - DNA, 25 bp, Homo sapien
agctctcttttctacttgaatggtt

SEQ ID NO: 2445308 - DNA, 25 bp, Homo sapien
caagatttaggacgtacatccatga

SEQ ID NO: 2445309 - DNA, 25 bp, Homo sapien
agaagcaatcagaatatacatctgt

SEQ ID NO: 2445310 - DNA, 25 bp, Homo sapien
gtgaacagacggtgactttgcatag

SEQ ID NO: 2445311 - DNA, 25 bp, Homo sapien
ggacaacagaagcagggaactggct

SEQ ID NO: 2445312 - DNA, 25 bp, Homo sapien
tctcagttctgaccatataagtctt

SEQ ID NO: 2445313 - DNA, 25 bp, Homo sapien
agttctgaccatataagtcttgggt

SEQ ID NO: 2445314 - DNA, 25 bp, Homo sapien
cagttctgaccatataagtcttggg

SEQ ID NO: 2445315 - DNA, 25 bp, Homo sapien
gttctgaccatataagtcttgggtt

SEQ ID NO: 2445316 - DNA, 25 bp, Homo sapien
tagtgagtgctgcagtttggctctt

SEQ ID NO: 2445317 - DNA, 25 bp, Homo sapien
agtgagtgctgcagtttggctcttg

SEQ ID NO: 2445318 - DNA, 25 bp, Homo sapien
aattcctgttgaactcagatctgcc

SEQ ID NO: 2445319 - DNA, 25 bp, Homo sapien
cagatctgcccatttctaccttttg

SEQ ID NO: 2445320 - DNA, 25 bp, Homo sapien
cctaacattgaaattcctgttgaac

SEQ ID NO: 2445321 - DNA, 25 bp, Homo sapien
tctgcccatttctaccttttgcatc

SEQ ID NO: 2445322 - DNA, 25 bp, Homo sapien
gatgtcagacttggtccttatgtct

SEQ ID NO: 2445323 - DNA, 25 bp, Homo sapien
gtcagacttggtccttatgtctctc

SEQ ID NO: 2445324 - DNA, 25 bp, Homo sapien
tagagatgtcagacttggtccttat

SEQ ID NO: 2445325 - DNA, 25 bp, Homo sapien
agaatagagatgtcagacttggtcc

SEQ ID NO: 2445326 - DNA, 25 bp, Homo sapien
acatcagggttgccattcaagttga

SEQ ID NO: 2445327 - DNA, 25 bp, Homo sapien
gaacatcagggttgccattcaagtt

SEQ ID NO: 2445328 - DNA, 25 bp, Homo sapien
aacatcagggttgccattcaagttg

SEQ ID NO: 2445329 - DNA, 25 bp, Homo sapien
catcagggttgccattcaagttgat

SEQ ID NO: 2445330 - DNA, 25 bp, Homo sapien
ctccagtgcctggatactttctgaa

SEQ ID NO: 2445331 - DNA, 25 bp, Homo sapien
ctgaaaagtattcagaatgtcagtt

SEQ ID NO: 2445332 - DNA, 25 bp, Homo sapien
tgaaaagtattcagaatgtcagttc

SEQ ID NO: 2445333 - DNA, 25 bp, Homo sapien
ttcagagatctgagagtaaacaaac

SEQ ID NO: 2445334 - DNA, 25 bp, Homo sapien
tgcggtccacattcctttcagagat

SEQ ID NO: 2445335 - DNA, 25 bp, Homo sapien
agtaaacaaacaatgatgaggccat

SEQ ID NO: 2445336 - DNA, 25 bp, Homo sapien
gagatctgagagtaaacaaacaatg

SEQ ID NO: 2445337 - DNA, 25 bp, Homo sapien
atatgtagaccacatagttgatgtc

SEQ ID NO: 2445338 - DNA, 25 bp, Homo sapien
ctggaagtggtgatgggatttctat

SEQ ID NO: 2445339 - DNA, 25 bp, Homo sapien
catgggtagaatcataccggaatat

SEQ ID NO: 2445340 - DNA, 25 bp, Homo sapien
tttctattgatgacaggctttcttt

SEQ ID NO: 2445341 - DNA, 25 bp, Homo sapien
gttactgtgaatatgggtccttcca

SEQ ID NO: 2445342 - DNA, 25 bp, Homo sapien
tgtcatggattaccttggccaatgg

SEQ ID NO: 2445343 - DNA, 25 bp, Homo sapien
cagcattggcagtgtctgtagagac

SEQ ID NO: 2445344 - DNA, 25 bp, Homo sapien
ttcagcttagaaatgatcttgccca

SEQ ID NO: 2445345 - DNA, 25 bp, Homo sapien
ctaggaagaaactgcatcaactaat

SEQ ID NO: 2445346 - DNA, 25 bp, Homo sapien
tgcccaaatataaagaccattgaga

SEQ ID NO: 2445347 - DNA, 25 bp, Homo sapien
atcatgcccaaatataaagaccatt

SEQ ID NO: 2445348 - DNA, 25 bp, Homo sapien
catgcccaaatataaagaccattga

SEQ ID NO: 2445349 - DNA, 25 bp, Homo sapien
tgactttggtaaggggaatgtcaag

SEQ ID NO: 2445350 - DNA, 25 bp, Homo sapien
agctgtatctctagtctggtttgac

SEQ ID NO: 2445351 - DNA, 25 bp, Homo sapien
tctgtagctgtatctctagtctggt

SEQ ID NO: 2445352 - DNA, 25 bp, Homo sapien
tgtagctgtatctctagtctggttt

SEQ ID NO: 2445353 - DNA, 25 bp, Homo sapien
tgtagcaatcagtcctagaggtttg

SEQ ID NO: 2445354 - DNA, 25 bp, Homo sapien
tgaagctgacccgtatgggacttgt

SEQ ID NO: 2445355 - DNA, 25 bp, Homo sapien
gggctgataaactgcacagaaatct

SEQ ID NO: 2445356 - DNA, 25 bp, Homo sapien
tcaacgtgtccagggtagatcagct

SEQ ID NO: 2445357 - DNA, 25 bp, Homo sapien
ttggggttaggagaagcaagcggtc

SEQ ID NO: 2445358 - DNA, 25 bp, Homo sapien
gttaggagaagcaagcggtccaagg

SEQ ID NO: 2445359 - DNA, 25 bp, Homo sapien
tggagttttggggttaggagaagca

SEQ ID NO: 2445360 - DNA, 25 bp, Homo sapien
gggttaggagaagcaagcggtccaa

SEQ ID NO: 2445361 - DNA, 25 bp, Homo sapien
taactgctgggtcgcacagcggagc

SEQ ID NO: 2445362 - DNA, 25 bp, Homo sapien
ggcaaaacgagttgacatcatccct

SEQ ID NO: 2445363 - DNA, 25 bp, Homo sapien
tccctcctgccgctaactgctgggt

SEQ ID NO: 2445364 - DNA, 25 bp, Homo sapien
acgacggcgtgctcggctggcaaaa

SEQ ID NO: 2445365 - DNA, 25 bp, Homo sapien
cgcgccgcgggtaggactggacggt

SEQ ID NO: 2445366 - DNA, 25 bp, Homo sapien
tcccgggctcggttggtagaagatc

SEQ ID NO: 2445367 - DNA, 25 bp, Homo sapien
actggacggtcggatttgtaggcaa

SEQ ID NO: 2445368 - DNA, 25 bp, Homo sapien
aattctgacaccgagctcccgggct

SEQ ID NO: 2445369 - DNA, 25 bp, Homo sapien
gacacttccgagagagcgcgaactt

SEQ ID NO: 2445370 - DNA, 25 bp, Homo sapien
acttccgagagagcgcgaacttgcg

SEQ ID NO: 2445371 - DNA, 25 bp, Homo sapien
cggaagctatagacacttccgagag

SEQ ID NO: 2445372 - DNA, 25 bp, Homo sapien
ttcccccttccggaagctatagaca

SEQ ID NO: 2445373 - DNA, 25 bp, Homo sapien
ctggcgatcccgactcgcgactgtt

SEQ ID NO: 2445374 - DNA, 25 bp, Homo sapien
agggtggttggtgtgtgttcgtggt

SEQ ID NO: 2445375 - DNA, 25 bp, Homo sapien
tgcttcaatgatgctgcgctggggt

SEQ ID NO: 2445376 - DNA, 25 bp, Homo sapien
tcgcgactgttctgccagagccctg

SEQ ID NO: 2445377 - DNA, 25 bp, Homo sapien
cggaagctcatggacttaacgcggg

SEQ ID NO: 2445378 - DNA, 25 bp, Homo sapien
cacgtgaccggaggaggttgactcc

SEQ ID NO: 2445379 - DNA, 25 bp, Homo sapien
gcgaccaatcgctgcatgccaagta

SEQ ID NO: 2445380 - DNA, 25 bp, Homo sapien
acgaggtgacttccgcagcaaaacc

SEQ ID NO: 2445381 - DNA, 25 bp, Homo sapien
tgtttggcaccaatcgtcttggcgc

SEQ ID NO: 2445382 - DNA, 25 bp, Homo sapien
tgagttgcgttctgccctgtttggc

SEQ ID NO: 2445383 - DNA, 25 bp, Homo sapien
cccagagctgagttgcgttctgccc

SEQ ID NO: 2445384 - DNA, 25 bp, Homo sapien
tgcgttctgccctgtttggcaccaa

SEQ ID NO: 2445385 - DNA, 25 bp, Homo sapien
ggcgcgccctcagccactcttctct

SEQ ID NO: 2445386 - DNA, 25 bp, Homo sapien
tcttcccgctgagatcagggcgcgc

SEQ ID NO: 2445387 - DNA, 25 bp, Homo sapien
cctcagccactcttctctacccctc

SEQ ID NO: 2445388 - DNA, 25 bp, Homo sapien
gcgccctcggggtcgcactcttccc

SEQ ID NO: 2445389 - DNA, 25 bp, Homo sapien
cggccacttgccatccggtcctgtg

SEQ ID NO: 2445390 - DNA, 25 bp, Homo sapien
cttgccatccggtcctgtgactgag

SEQ ID NO: 2445391 - DNA, 25 bp, Homo sapien
gccacttgccatccggtcctgtgac

SEQ ID NO: 2445392 - DNA, 25 bp, Homo sapien
cacttgccatccggtcctgtgactg

SEQ ID NO: 2445393 - DNA, 25 bp, Homo sapien
taggtagcgtcaagaactgaagccc

SEQ ID NO: 2445394 - DNA, 25 bp, Homo sapien
catgtaggtagcgtcaagaactgaa

SEQ ID NO: 2445395 - DNA, 25 bp, Homo sapien
gagatgtagccatgtaggtagcgtc

SEQ ID NO: 2445396 - DNA, 25 bp, Homo sapien
tagccatgtaggtagcgtcaagaac

SEQ ID NO: 2445397 - DNA, 25 bp, Homo sapien
caaagaatgacagagtcatttttct

SEQ ID NO: 2445398 - DNA, 25 bp, Homo sapien
caataaatgggtggcctaggattca

SEQ ID NO: 2445399 - DNA, 25 bp, Homo sapien
tacaagttaagaggtcaggcccact

SEQ ID NO: 2445400 - DNA, 25 bp, Homo sapien
cactattgcaagactgacaggaaaa

SEQ ID NO: 2445401 - DNA, 25 bp, Homo sapien
catctctggtcaccgataggtgagg

SEQ ID NO: 2445402 - DNA, 25 bp, Homo sapien
aaatgtttattacttgtggcactgc

SEQ ID NO: 2445403 - DNA, 25 bp, Homo sapien
ggcactgcaatttgagtcttgatgt

SEQ ID NO: 2445404 - DNA, 25 bp, Homo sapien
tgctttctctcttaacccacaaagt

SEQ ID NO: 2445405 - DNA, 25 bp, Homo sapien
ctttgttataaagtcacggccttct

SEQ ID NO: 2445406 - DNA, 25 bp, Homo sapien
tgttcctgttgcattgtaaagcttg

SEQ ID NO: 2445407 - DNA, 25 bp, Homo sapien
gacggaggggctacttcttgctcag

SEQ ID NO: 2445408 - DNA, 25 bp, Homo sapien
taaagcttgctgaccagacggaggg

SEQ ID NO: 2445409 - DNA, 25 bp, Homo sapien
ttgtaaagcttgctgaccagacgga

SEQ ID NO: 2445410 - DNA, 25 bp, Homo sapien
cctaattgtcaagctaagagtggaa

SEQ ID NO: 2445411 - DNA, 25 bp, Homo sapien
gatgaaacactgagggcaactatta

SEQ ID NO: 2445412 - DNA, 25 bp, Homo sapien
tatgtgacaacatccaaccacagag

SEQ ID NO: 2445413 - DNA, 25 bp, Homo sapien
cataactggagatgataggtggact

SEQ ID NO: 2445414 - DNA, 25 bp, Homo sapien
aagccaatgccagtacaggtagcca

SEQ ID NO: 2445415 - DNA, 25 bp, Homo sapien
ggagtttaaggctgccatgacccat

SEQ ID NO: 2445416 - DNA, 25 bp, Homo sapien
ttggaaaagccaatgccagtacagg

SEQ ID NO: 2445417 - DNA, 25 bp, Homo sapien
tgctacaggacagtataccaagacc

SEQ ID NO: 2445418 - DNA, 25 bp, Homo sapien
tacagagtactagaggttgagggaa

SEQ ID NO: 2445419 - DNA, 25 bp, Homo sapien
acactgggcagggtatactagctca

SEQ ID NO: 2445420 - DNA, 25 bp, Homo sapien
gaataaggcttcctgctagtgaagg

SEQ ID NO: 2445421 - DNA, 25 bp, Homo sapien
aaatttagcaggtacttcctccagc

SEQ ID NO: 2445422 - DNA, 25 bp, Homo sapien
gcttctcctctggagtcgaaagagt

SEQ ID NO: 2445423 - DNA, 25 bp, Homo sapien
cctctggagtcgaaagagtgtttag

SEQ ID NO: 2445424 - DNA, 25 bp, Homo sapien
tctcctctggagtcgaaagagtgtt

SEQ ID NO: 2445425 - DNA, 25 bp, Homo sapien
agtcgaaagagtgtttagggcttgc

SEQ ID NO: 2445426 - DNA, 25 bp, Homo sapien
tttcataagatgaagtcacacacac

SEQ ID NO: 2445427 - DNA, 25 bp, Homo sapien
tcttatcaagcacacatagatttta

SEQ ID NO: 2445428 - DNA, 25 bp, Homo sapien
atcttatcaagcacacatagatttt

SEQ ID NO: 2445429 - DNA, 25 bp, Homo sapien
ttcataagatgaagtcacacacacc

SEQ ID NO: 2445430 - DNA, 25 bp, Homo sapien
tggaaaaaagaacaatgcttggcat

SEQ ID NO: 2445431 - DNA, 25 bp, Homo sapien
aagatggaaaaaagaacaatgcttg

SEQ ID NO: 2445432 - DNA, 25 bp, Homo sapien
gatggaaaaaagaacaatgcttggc

SEQ ID NO: 2445433 - DNA, 25 bp, Homo sapien
gaaaaaagaacaatgcttggcatac

SEQ ID NO: 2445434 - DNA, 25 bp, Homo sapien
agtagggtttccctgttgagaatgt

SEQ ID NO: 2445435 - DNA, 25 bp, Homo sapien
agtctagtagggtttccctgttgag

SEQ ID NO: 2445436 - DNA, 25 bp, Homo sapien
caaactcttctatagaagaggtgaa

SEQ ID NO: 2445437 - DNA, 25 bp, Homo sapien
ttttgtttcaaatcgtatagttcaa

SEQ ID NO: 2445438 - DNA, 25 bp, Homo sapien
gctgctttaacactatttgaaagtg

SEQ ID NO: 2445439 - DNA, 25 bp, Homo sapien
aactattattgttacagctttattc

SEQ ID NO: 2445440 - DNA, 25 bp, Homo sapien
tgtgcatttacaacatggagttgct

SEQ ID NO: 2445441 - DNA, 25 bp, Homo sapien
caaaaactgtcagtgataattccca

SEQ ID NO: 2445442 - DNA, 25 bp, Homo sapien
caggctgctgctaagtatgtggcac

SEQ ID NO: 2445443 - DNA, 25 bp, Homo sapien
aaatatggaccacatgagagaatag

SEQ ID NO: 2445444 - DNA, 25 bp, Homo sapien
cagctaagtggaggtaaatatggac

SEQ ID NO: 2445445 - DNA, 25 bp, Homo sapien
tgaagatgccagctaagtggaggta

SEQ ID NO: 2445446 - DNA, 25 bp, Homo sapien
catttgcctctgaacattcctgctt

SEQ ID NO: 2445447 - DNA, 25 bp, Homo sapien
agaatcttcatttgcctctgaacat

SEQ ID NO: 2445448 - DNA, 25 bp, Homo sapien
ctttgacaatctgagcttgcttatt

SEQ ID NO: 2445449 - DNA, 25 bp, Homo sapien
tgagcttgcttattctgcagaatct

SEQ ID NO: 2445450 - DNA, 25 bp, Homo sapien
gctgaagttccctgcaaagagattc

SEQ ID NO: 2445451 - DNA, 25 bp, Homo sapien
gattctagcttgcttcttgccaaga

SEQ ID NO: 2445452 - DNA, 25 bp, Homo sapien
ttcttgccaagatggtcttgctgta

SEQ ID NO: 2445453 - DNA, 25 bp, Homo sapien
aagttccctgcaaagagattctagc

SEQ ID NO: 2445454 - DNA, 25 bp, Homo sapien
cttccattattgagacaagctgtca

SEQ ID NO: 2445455 - DNA, 25 bp, Homo sapien
tcttctgttataatcagcctagctg

SEQ ID NO: 2445456 - DNA, 25 bp, Homo sapien
tagcaaccaaatagccaaagatggc

SEQ ID NO: 2445457 - DNA, 25 bp, Homo sapien
caaagatggcagaatgtagtttaac

SEQ ID NO: 2445458 - DNA, 25 bp, Homo sapien
tcactggttaggcagtataccatcc

SEQ ID NO: 2445459 - DNA, 25 bp, Homo sapien
tataccatcctacatcagcctgaag

SEQ ID NO: 2445460 - DNA, 25 bp, Homo sapien
agtcttactaggatacaagtgtcaa

SEQ ID NO: 2445461 - DNA, 25 bp, Homo sapien
gaagatcttacagcctactttctga

SEQ ID NO: 2445462 - DNA, 25 bp, Homo sapien
ctacagataaagctcgcgaaaaaga

SEQ ID NO: 2445463 - DNA, 25 bp, Homo sapien
gataaagctcgcgaaaaagaagcta

SEQ ID NO: 2445464 - DNA, 25 bp, Homo sapien
taaagctcgcgaaaaagaagctact

SEQ ID NO: 2445465 - DNA, 25 bp, Homo sapien
acagataaagctcgcgaaaaagaag

SEQ ID NO: 2445466 - DNA, 25 bp, Homo sapien
caaaataatgtatgttaaaagtaca

SEQ ID NO: 2445467 - DNA, 25 bp, Homo sapien
cttattatccaaaataatgtatgtt

SEQ ID NO: 2445468 - DNA, 25 bp, Homo sapien
tatccaaaataatgtatgttaaaag

SEQ ID NO: 2445469 - DNA, 25 bp, Homo sapien
aataatgtatgttaaaagtacagac

SEQ ID NO: 2445470 - DNA, 25 bp, Homo sapien
catactggtcagtgagcttctttag

SEQ ID NO: 2445471 - DNA, 25 bp, Homo sapien
agtgcatactggtcagtgagcttct

SEQ ID NO: 2445472 - DNA, 25 bp, Homo sapien
tactggtcagtgagcttctttagct

SEQ ID NO: 2445473 - DNA, 25 bp, Homo sapien
tgcatactggtcagtgagcttcttt

SEQ ID NO: 2445474 - DNA, 25 bp, Homo sapien
ttacggtagggtgtagcttttgcta

SEQ ID NO: 2445475 - DNA, 25 bp, Homo sapien
cttttgctactggtgagcagctgtc

SEQ ID NO: 2445476 - DNA, 25 bp, Homo sapien
ggtgtagcttttgctactggtgagc

SEQ ID NO: 2445477 - DNA, 25 bp, Homo sapien
tacggtagggtgtagcttttgctac

SEQ ID NO: 2445478 - DNA, 25 bp, Homo sapien
gagacaagtggtacacatctcctag

SEQ ID NO: 2445479 - DNA, 25 bp, Homo sapien
gggccaagtgatgctccaatttagt

SEQ ID NO: 2445480 - DNA, 25 bp, Homo sapien
taactccaatgactaggttcgacaa

SEQ ID NO: 2445481 - DNA, 25 bp, Homo sapien
ggttcgacaactattgagtcctcca

SEQ ID NO: 2445482 - DNA, 25 bp, Homo sapien
aatagactcattaggaaatccctcc

SEQ ID NO: 2445483 - DNA, 25 bp, Homo sapien
gggctgtccccatcaaaatatctgt

SEQ ID NO: 2445484 - DNA, 25 bp, Homo sapien
taaactgtgtaaggtgcttgatgcc

SEQ ID NO: 2445485 - DNA, 25 bp, Homo sapien
aaatggtctggagcaaatcctagct

SEQ ID NO: 2445486 - DNA, 25 bp, Homo sapien
gtttgttgaagtctggcatctacaa

SEQ ID NO: 2445487 - DNA, 25 bp, Homo sapien
gaagtctggcatctacaagctgttg

SEQ ID NO: 2445488 - DNA, 25 bp, Homo sapien
tgttgtcgtaattccttatgtttga

SEQ ID NO: 2445489 - DNA, 25 bp, Homo sapien
tatgtttgaacgctttattaatttg

SEQ ID NO: 2445490 - DNA, 25 bp, Homo sapien
tattcataacatgctctactcaggg

SEQ ID NO: 2445491 - DNA, 25 bp, Homo sapien
tgtgaaacatctctccaaaccctag

SEQ ID NO: 2445492 - DNA, 25 bp, Homo sapien
gaaagcccctcaactctgtaaaaga

SEQ ID NO: 2445493 - DNA, 25 bp, Homo sapien
catgccctggcactatgttaagtga

SEQ ID NO: 2445494 - DNA, 25 bp, Homo sapien
ttcttcatatttgtgcctcgattct

SEQ ID NO: 2445495 - DNA, 25 bp, Homo sapien
cttcatatttgtgcctcgattctgt

SEQ ID NO: 2445496 - DNA, 25 bp, Homo sapien
tatttgtgcctcgattctgttgctt

SEQ ID NO: 2445497 - DNA, 25 bp, Homo sapien
catatttgtgcctcgattctgttgc

SEQ ID NO: 2445498 - DNA, 25 bp, Homo sapien
ctttcagttgtgcttcttcttgttt

SEQ ID NO: 2445499 - DNA, 25 bp, Homo sapien
ctgctctttcagttgtgcttcttct

SEQ ID NO: 2445500 - DNA, 25 bp, Homo sapien
gctctttcagttgtgcttcttcttg

SEQ ID NO: 2445501 - DNA, 25 bp, Homo sapien
ttcagttgtgcttcttcttgtttca

SEQ ID NO: 2445502 - DNA, 25 bp, Homo sapien
ttcacatcaagtacacaaagtgcag

SEQ ID NO: 2445503 - DNA, 25 bp, Homo sapien
tgcacactgtctatccctatctcta

SEQ ID NO: 2445504 - DNA, 25 bp, Homo sapien
atctatgttttttctgcacaacatt

SEQ ID NO: 2445505 - DNA, 25 bp, Homo sapien
tattgcagtatcctaaatcaggagc

SEQ ID NO: 2445506 - DNA, 25 bp, Homo sapien
ctgaccacaagtagtcacaggttct

SEQ ID NO: 2445507 - DNA, 25 bp, Homo sapien
gtagtcacaggttctgtatatgtcc

SEQ ID NO: 2445508 - DNA, 25 bp, Homo sapien
ccacaagtagtcacaggttctgtat

SEQ ID NO: 2445509 - DNA, 25 bp, Homo sapien
tagtcacaggttctgtatatgtccc

SEQ ID NO: 2445510 - DNA, 25 bp, Homo sapien
ttcctgcttgaaggctgtaaaaagt

SEQ ID NO: 2445511 - DNA, 25 bp, Homo sapien
ttttcccatttggtataccatatta

SEQ ID NO: 2445512 - DNA, 25 bp, Homo sapien
tcccatttggtataccatattacca

SEQ ID NO: 2445513 - DNA, 25 bp, Homo sapien
ccatttggtataccatattaccatt

SEQ ID NO: 2445514 - DNA, 25 bp, Homo sapien
tattttcccatttggtataccatat

SEQ ID NO: 2445515 - DNA, 25 bp, Homo sapien
tatttgaagagccttgtacagcttc

SEQ ID NO: 2445516 - DNA, 25 bp, Homo sapien
tcccagtttctcactgagttcattc

SEQ ID NO: 2445517 - DNA, 25 bp, Homo sapien
cctttctatttgaagagccttgtac

SEQ ID NO: 2445518 - DNA, 25 bp, Homo sapien
ttctcactgagttcattcctttcta

SEQ ID NO: 2445519 - DNA, 25 bp, Homo sapien
atgcgtcacaggcactgctaaatct

SEQ ID NO: 2445520 - DNA, 25 bp, Homo sapien
gcgtcacaggcactgctaaatctac

SEQ ID NO: 2445521 - DNA, 25 bp, Homo sapien
gaatgcgtcacaggcactgctaaat

SEQ ID NO: 2445522 - DNA, 25 bp, Homo sapien
aggaatgcgtcacaggcactgctaa

SEQ ID NO: 2445523 - DNA, 25 bp, Homo sapien
agtgttcagcatattggaagaatcc

SEQ ID NO: 2445524 - DNA, 25 bp, Homo sapien
tcctggggctcttttagaggaagtg

SEQ ID NO: 2445525 - DNA, 25 bp, Homo sapien
agagggcttttgagtagcattttac

SEQ ID NO: 2445526 - DNA, 25 bp, Homo sapien
taatcaatgcctagaggagatcctg

SEQ ID NO: 2445527 - DNA, 25 bp, Homo sapien
tatccatcagtacaatgatcacact

SEQ ID NO: 2445528 - DNA, 25 bp, Homo sapien
atatccatcagtacaatgatcacac

SEQ ID NO: 2445529 - DNA, 25 bp, Homo sapien
tgttgtttccaatgctagccagagc

SEQ ID NO: 2445530 - DNA, 25 bp, Homo sapien
tatggacatgttcaactctgcaggc

SEQ ID NO: 2445531 - DNA, 25 bp, Homo sapien
gccacagggccatttacaagggaat

SEQ ID NO: 2445532 - DNA, 25 bp, Homo sapien
cattgcagatactgggcatgccaca

SEQ ID NO: 2445533 - DNA, 25 bp, Homo sapien
ctcacatgcatagggcacaacaggg

SEQ ID NO: 2445534 - DNA, 25 bp, Homo sapien
caggccatgatcactaccagttggg

SEQ ID NO: 2445535 - DNA, 25 bp, Homo sapien
aaaagctatctaattgtttacataa

SEQ ID NO: 2445536 - DNA, 25 bp, Homo sapien
gagcatgcaagatagatcactcaca

SEQ ID NO: 2445537 - DNA, 25 bp, Homo sapien
atttctcaaggatctagacgcagaa

SEQ ID NO: 2445538 - DNA, 25 bp, Homo sapien
gcaatttctcaaggatctagacgca

SEQ ID NO: 2445539 - DNA, 25 bp, Homo sapien
ttctcaaggatctagacgcagaaat

SEQ ID NO: 2445540 - DNA, 25 bp, Homo sapien
caatttctcaaggatctagacgcag

SEQ ID NO: 2445541 - DNA, 25 bp, Homo sapien
cataagagtgaacaggcaatgtaca

SEQ ID NO: 2445542 - DNA, 25 bp, Homo sapien
gtcaaatggaatctaactgaacaac

SEQ ID NO: 2445543 - DNA, 25 bp, Homo sapien
tgaacaacagatcttcggcacagcg

SEQ ID NO: 2445544 - DNA, 25 bp, Homo sapien
acttttgtaagctacccatttgaca

SEQ ID NO: 2445545 - DNA, 25 bp, Homo sapien
tattgggaatgaactattgagtccg

SEQ ID NO: 2445546 - DNA, 25 bp, Homo sapien
gagtccgatgatgacatagatgtta

SEQ ID NO: 2445547 - DNA, 25 bp, Homo sapien
ctggattgggatattaagacctaga

SEQ ID NO: 2445548 - DNA, 25 bp, Homo sapien
catagatgttaccttgaagctggag

SEQ ID NO: 2445549 - DNA, 25 bp, Homo sapien
ctggtccagtgtacttagatattta

SEQ ID NO: 2445550 - DNA, 25 bp, Homo sapien
agatatttaatacactcctctgggt

SEQ ID NO: 2445551 - DNA, 25 bp, Homo sapien
ggtccagtgtacttagatatttaat

SEQ ID NO: 2445552 - DNA, 25 bp, Homo sapien
tagatatttaatacactcctctggg

SEQ ID NO: 2445553 - DNA, 25 bp, Homo sapien
tactctggaccgtctgctgtttgaa

SEQ ID NO: 2445554 - DNA, 25 bp, Homo sapien
tttgttccataccacagagggtacc

SEQ ID NO: 2445555 - DNA, 25 bp, Homo sapien
gaggagatagaccagtttgcactga

SEQ ID NO: 2445556 - DNA, 25 bp, Homo sapien
aatagaactgtgtgttgggtgactg

SEQ ID NO: 2445557 - DNA, 25 bp, Homo sapien
catttttatcactaacttgtatgac

SEQ ID NO: 2445558 - DNA, 25 bp, Homo sapien
tctcccatttttatcactaacttgt

SEQ ID NO: 2445559 - DNA, 25 bp, Homo sapien
cccatttttatcactaacttgtatg

SEQ ID NO: 2445560 - DNA, 25 bp, Homo sapien
ctcccatttttatcactaacttgta

SEQ ID NO: 2445561 - DNA, 25 bp, Homo sapien
ccagctgtttggtgctgtgttctga

SEQ ID NO: 2445562 - DNA, 25 bp, Homo sapien
aaagtgccatgcaggtgacatgcca

SEQ ID NO: 2445563 - DNA, 25 bp, Homo sapien
ccagtctggagtgaagtcttctgga

SEQ ID NO: 2445564 - DNA, 25 bp, Homo sapien
taagaattccctagctcaggtccac

SEQ ID NO: 2445565 - DNA, 25 bp, Homo sapien
agatataggactctgtctgggatac

SEQ ID NO: 2445566 - DNA, 25 bp, Homo sapien
cagatataggactctgtctgggata

SEQ ID NO: 2445567 - DNA, 25 bp, Homo sapien
tcagatataggactctgtctgggat

SEQ ID NO: 2445568 - DNA, 25 bp, Homo sapien
ggatgcccaccgcaaagtcatatcc

SEQ ID NO: 2445569 - DNA, 25 bp, Homo sapien
tgatgttatcactgggaaaattgag

SEQ ID NO: 2445570 - DNA, 25 bp, Homo sapien
tagcagaacaaagactgtaggagga

SEQ ID NO: 2445571 - DNA, 25 bp, Homo sapien
aacaaagactgtaggaggactctcc

SEQ ID NO: 2445572 - DNA, 25 bp, Homo sapien
ctttatcccacattgatcaacgtat

SEQ ID NO: 2445573 - DNA, 25 bp, Homo sapien
tatgagtgcttaattggtggtctcc

SEQ ID NO: 2445574 - DNA, 25 bp, Homo sapien
ttttctaacgacagctttcctatga

SEQ ID NO: 2445575 - DNA, 25 bp, Homo sapien
cccattttgcacaataggttactaa

SEQ ID NO: 2445576 - DNA, 25 bp, Homo sapien
gataagtaggctatttcaaccggta

SEQ ID NO: 2445577 - DNA, 25 bp, Homo sapien
gactagctaggttgttccttcaccc

SEQ ID NO: 2445578 - DNA, 25 bp, Homo sapien
tgaaggctccaccttgataacctgg

SEQ ID NO: 2445579 - DNA, 25 bp, Homo sapien
caagaggacatacaagaggactagc

SEQ ID NO: 2445580 - DNA, 25 bp, Homo sapien
gagaatggagacagtgtgaccagtc

SEQ ID NO: 2445581 - DNA, 25 bp, Homo sapien
gtccaagggctgctggagaatggag

SEQ ID NO: 2445582 - DNA, 25 bp, Homo sapien
tggagaatggagacagtgtgaccag

SEQ ID NO: 2445583 - DNA, 25 bp, Homo sapien
ccaagggctgctggagaatggagac

SEQ ID NO: 2445584 - DNA, 25 bp, Homo sapien
gaggaggcctcagtctacacttcag

SEQ ID NO: 2445585 - DNA, 25 bp, Homo sapien
gatgtgactgctctgttgcgacagc

SEQ ID NO: 2445586 - DNA, 25 bp, Homo sapien
tccactgtgtatgcgctcacgacgg

SEQ ID NO: 2445587 - DNA, 25 bp, Homo sapien
gcaagaccgtgccagaaaggctctg

SEQ ID NO: 2445588 - DNA, 25 bp, Homo sapien
ggttgtaccagtgtgacacagagct

SEQ ID NO: 2445589 - DNA, 25 bp, Homo sapien
gctgtctgcacaggacctcagagac

SEQ ID NO: 2445590 - DNA, 25 bp, Homo sapien
ggggttgtaccagtgtgacacagag

SEQ ID NO: 2445591 - DNA, 25 bp, Homo sapien
gggctgtctgcacaggacctcagag

SEQ ID NO: 2445592 - DNA, 25 bp, Homo sapien
taaactgaagattcgggctgagtct

SEQ ID NO: 2445593 - DNA, 25 bp, Homo sapien
gctgagtcttttgacacctgggcca

SEQ ID NO: 2445594 - DNA, 25 bp, Homo sapien
tggccgtaaacgcagtgagtgacag

SEQ ID NO: 2445595 - DNA, 25 bp, Homo sapien
tatcggtacaccttggatgagctcc

SEQ ID NO: 2445596 - DNA, 25 bp, Homo sapien
gtgcaagaccacgtgcttcttgtca

SEQ ID NO: 2445597 - DNA, 25 bp, Homo sapien
caagtgctctagtagccgacagtac

SEQ ID NO: 2445598 - DNA, 25 bp, Homo sapien
tggcctgctacgactgcccagatgg

SEQ ID NO: 2445599 - DNA, 25 bp, Homo sapien
gatgaacgccagtgcatcaagtgca

SEQ ID NO: 2445600 - DNA, 25 bp, Homo sapien
ttcacatgaacggatatcgccggcg

SEQ ID NO: 2445601 - DNA, 25 bp, Homo sapien
tcttgtgacaggaacgttctcgagc

SEQ ID NO: 2445602 - DNA, 25 bp, Homo sapien
gaaatccttcgttgatcagcaccac

SEQ ID NO: 2445603 - DNA, 25 bp, Homo sapien
taaatacattgtaccggcatcctgc

SEQ ID NO: 2445604 - DNA, 25 bp, Homo sapien
ccaacctgataagttctgcagaact

SEQ ID NO: 2445605 - DNA, 25 bp, Homo sapien
gagtccaacctgataagttctgcag

SEQ ID NO: 2445606 - DNA, 25 bp, Homo sapien
ctgcaggcttcacagagtccaacct

SEQ ID NO: 2445607 - DNA, 25 bp, Homo sapien
tcacagagtccaacctgataagttc

SEQ ID NO: 2445608 - DNA, 25 bp, Homo sapien
cccactgatgttctctggccaagag

SEQ ID NO: 2445609 - DNA, 25 bp, Homo sapien
cttggcgggacttcccatccagggc

SEQ ID NO: 2445610 - DNA, 25 bp, Homo sapien
gggcctccaatcactcccactgatg

SEQ ID NO: 2445611 - DNA, 25 bp, Homo sapien
cactgatgttctctggccaagagag

SEQ ID NO: 2445612 - DNA, 25 bp, Homo sapien
cttgaatggggcagagttcttagga

SEQ ID NO: 2445613 - DNA, 25 bp, Homo sapien
ctggcaacagtgttgggccaagctt

SEQ ID NO: 2445614 - DNA, 25 bp, Homo sapien
acagtgttgggccaagcttgaatgg

SEQ ID NO: 2445615 - DNA, 25 bp, Homo sapien
ccaagcttgaatggggcagagttct

SEQ ID NO: 2445616 - DNA, 25 bp, Homo sapien
gcatcccttgaacctaaatgtttga

SEQ ID NO: 2445617 - DNA, 25 bp, Homo sapien
cactgctcagcatatactcaaagaa

SEQ ID NO: 2445618 - DNA, 25 bp, Homo sapien
aactgcttacagcatactgtgctca

SEQ ID NO: 2445619 - DNA, 25 bp, Homo sapien
gacacaggatctacttcagggtgga

SEQ ID NO: 2445620 - DNA, 25 bp, Homo sapien
gaaaaacctctatactcaataaata

SEQ ID NO: 2445621 - DNA, 25 bp, Homo sapien
gatgtgatccttgacaaagtcaaca

SEQ ID NO: 2445622 - DNA, 25 bp, Homo sapien
aataatctaaacatatattgaagat

SEQ ID NO: 2445623 - DNA, 25 bp, Homo sapien
gaaccccttgcttttatcatataca

SEQ ID NO: 2445624 - DNA, 25 bp, Homo sapien
atgactcactagcattcttgaaaga

SEQ ID NO: 2445625 - DNA, 25 bp, Homo sapien
caacctgatagagctgaatgacaca

SEQ ID NO: 2445626 - DNA, 25 bp, Homo sapien
taagaggtcaaataccggctttcca

SEQ ID NO: 2445627 - DNA, 25 bp, Homo sapien
aaatatgtgcttatgtaaagagacc

SEQ ID NO: 2445628 - DNA, 25 bp, Homo sapien
tcagaatatgcagtccatcctgctc

SEQ ID NO: 2445629 - DNA, 25 bp, Homo sapien
tagttaaaacctctcaatgtgaccc

SEQ ID NO: 2445630 - DNA, 25 bp, Homo sapien
gaaaaatggtgccatgaccttcacc

SEQ ID NO: 2445631 - DNA, 25 bp, Homo sapien
tccatggacagtgagcagctccaac

SEQ ID NO: 2445632 - DNA, 25 bp, Homo sapien
ttgcagctggaaagatggtctgcat

SEQ ID NO: 2445633 - DNA, 25 bp, Homo sapien
ccagcatgtgctgtagttcactgat

SEQ ID NO: 2445634 - DNA, 25 bp, Homo sapien
gccagcatgtgctgtagttcactga

SEQ ID NO: 2445635 - DNA, 25 bp, Homo sapien
ctttgactggtggtagagaggcaga

SEQ ID NO: 2445636 - DNA, 25 bp, Homo sapien
ttaggtcatcctagcaaagtcggca

SEQ ID NO: 2445637 - DNA, 25 bp, Homo sapien
agtcggcaaaagtcaagccaggtcc

SEQ ID NO: 2445638 - DNA, 25 bp, Homo sapien
tagcaaagtcggcaaaagtcaagcc

SEQ ID NO: 2445639 - DNA, 25 bp, Homo sapien
tatagggtctagagtgcttccaagc

SEQ ID NO: 2445640 - DNA, 25 bp, Homo sapien
agttcttgatcctgcgtactctcaa

SEQ ID NO: 2445641 - DNA, 25 bp, Homo sapien
gatgcacaggagttgtagacgctga

SEQ ID NO: 2445642 - DNA, 25 bp, Homo sapien
ttaagcaccctgtgtagtcccctgg

SEQ ID NO: 2445643 - DNA, 25 bp, Homo sapien
tccggttgcctgtgattccgccctt

SEQ ID NO: 2445644 - DNA, 25 bp, Homo sapien
tgtgtcactcttccggttgcctgtg

SEQ ID NO: 2445645 - DNA, 25 bp, Homo sapien
ttgcctgtgattccgcccttccagt

SEQ ID NO: 2445646 - DNA, 25 bp, Homo sapien
tgcttgtgtcactcttccggttgcc

SEQ ID NO: 2445647 - DNA, 25 bp, Homo sapien
cactgccacgaaggctgagttccca

SEQ ID NO: 2445648 - DNA, 25 bp, Homo sapien
ctccaggtttgcgagcttcccggct

SEQ ID NO: 2445649 - DNA, 25 bp, Homo sapien
ggctgtcgctttgtctgcaccgcat

SEQ ID NO: 2445650 - DNA, 25 bp, Homo sapien
actgagcctagctgtccgatgccac

SEQ ID NO: 2445651 - DNA, 25 bp, Homo sapien
gagcccagattctaagcacggctga

SEQ ID NO: 2445652 - DNA, 25 bp, Homo sapien
atctggagctactttcagacaaacc

SEQ ID NO: 2445653 - DNA, 25 bp, Homo sapien
gaagaaatcacttcaagatctggca

SEQ ID NO: 2445654 - DNA, 25 bp, Homo sapien
atactttctagattctgagcccaga

SEQ ID NO: 2445655 - DNA, 25 bp, Homo sapien
aatgtggcaaattctttaactacta

SEQ ID NO: 2445656 - DNA, 25 bp, Homo sapien
atccattttggagagatatcctgca

SEQ ID NO: 2445657 - DNA, 25 bp, Homo sapien
ctattcgacccttacacagcatttg

SEQ ID NO: 2445658 - DNA, 25 bp, Homo sapien
actactattcgacccttacacagca

SEQ ID NO: 2445659 - DNA, 25 bp, Homo sapien
tgccaaattgtaaaaaccatcaagg

SEQ ID NO: 2445660 - DNA, 25 bp, Homo sapien
caaattgtaaaaaccatcaaggcta

SEQ ID NO: 2445661 - DNA, 25 bp, Homo sapien
aaattgtaaaaaccatcaaggctag

SEQ ID NO: 2445662 - DNA, 25 bp, Homo sapien
ttgtaaaaaccatcaaggctaggaa

SEQ ID NO: 2445663 - DNA, 25 bp, Homo sapien
taccatttggattgtcatgatacat

SEQ ID NO: 2445664 - DNA, 25 bp, Homo sapien
gcactaccatttggattgtcatgat

SEQ ID NO: 2445665 - DNA, 25 bp, Homo sapien
aagcaaaacagcactaccatttgga

SEQ ID NO: 2445666 - DNA, 25 bp, Homo sapien
acagcactaccatttggattgtcat

SEQ ID NO: 2445667 - DNA, 25 bp, Homo sapien
catccccagcccgtactaaatattt

SEQ ID NO: 2445668 - DNA, 25 bp, Homo sapien
agagaaactaatagcagccctcctc

SEQ ID NO: 2445669 - DNA, 25 bp, Homo sapien
acctgaaagaacaactacaggccaa

SEQ ID NO: 2445670 - DNA, 25 bp, Homo sapien
agtgatctactttgcttagcctcca

SEQ ID NO: 2445671 - DNA, 25 bp, Homo sapien
gcttcagccactttcacttcaaggc

SEQ ID NO: 2445672 - DNA, 25 bp, Homo sapien
ctgcagcttcagccactttcacttc

SEQ ID NO: 2445673 - DNA, 25 bp, Homo sapien
agcttcagccactttcacttcaagg

SEQ ID NO: 2445674 - DNA, 25 bp, Homo sapien
gcagcttcagccactttcacttcaa

SEQ ID NO: 2445675 - DNA, 25 bp, Homo sapien
gctgactagggctttactggccacc

SEQ ID NO: 2445676 - DNA, 25 bp, Homo sapien
gaagaggcacaaggcttgctgacta

SEQ ID NO: 2445677 - DNA, 25 bp, Homo sapien
tgagtggtgcccacatcggatggcc

SEQ ID NO: 2445678 - DNA, 25 bp, Homo sapien
gagaccatgattcaggagcccaggg

SEQ ID NO: 2445679 - DNA, 25 bp, Homo sapien
tgggtctgccccatatcagagtgac

SEQ ID NO: 2445680 - DNA, 25 bp, Homo sapien
tctgagggtgccaggttcttgtgcc

SEQ ID NO: 2445681 - DNA, 25 bp, Homo sapien
ggaactgattagacccatttctggt

SEQ ID NO: 2445682 - DNA, 25 bp, Homo sapien
cattgctaagggcaggctgtgtcct

SEQ ID NO: 2445683 - DNA, 25 bp, Homo sapien
caaggtttcaggaattctcagaggt

SEQ ID NO: 2445684 - DNA, 25 bp, Homo sapien
tggttggctgccaaaattccaaggt

SEQ ID NO: 2445685 - DNA, 25 bp, Homo sapien
cactcgctgtaagtagatagctcac

SEQ ID NO: 2445686 - DNA, 25 bp, Homo sapien
cgctgtaagtagatagctcacccat

SEQ ID NO: 2445687 - DNA, 25 bp, Homo sapien
gacacactcgctgtaagtagatagc

SEQ ID NO: 2445688 - DNA, 25 bp, Homo sapien
cacactcgctgtaagtagatagctc

SEQ ID NO: 2445689 - DNA, 25 bp, Homo sapien
gtgggttttggattgatttcagaga

SEQ ID NO: 2445690 - DNA, 25 bp, Homo sapien
tttcagagagcccaagacagttgcc

SEQ ID NO: 2445691 - DNA, 25 bp, Homo sapien
ttgatttcagagagcccaagacagt

SEQ ID NO: 2445692 - DNA, 25 bp, Homo sapien
gagagcccaagacagttgccatgct

SEQ ID NO: 2445693 - DNA, 25 bp, Homo sapien
gactgtgctttaaggaatttttgct

SEQ ID NO: 2445694 - DNA, 25 bp, Homo sapien
aaatgtggttatatttcagctggac

SEQ ID NO: 2445695 - DNA, 25 bp, Homo sapien
gaaatactgcttcgtgactgtgctt

SEQ ID NO: 2445696 - DNA, 25 bp, Homo sapien
gctggacctggaaataaagacgaaa

SEQ ID NO: 2445697 - DNA, 25 bp, Homo sapien
tagatcctgtcaaaacactcacttc

SEQ ID NO: 2445698 - DNA, 25 bp, Homo sapien
tgagctgtcctgatactctttctta

SEQ ID NO: 2445699 - DNA, 25 bp, Homo sapien
tttcttagatcctgtcaaaacactc

SEQ ID NO: 2445700 - DNA, 25 bp, Homo sapien
tgtcctgatactctttcttagatcc

SEQ ID NO: 2445701 - DNA, 25 bp, Homo sapien
tctgtgtgacttgtcggattgaaca

SEQ ID NO: 2445702 - DNA, 25 bp, Homo sapien
ggaggacacaagatgtctcttggaa

SEQ ID NO: 2445703 - DNA, 25 bp, Homo sapien
aaatcatgagaaatctgtgtgactt

SEQ ID NO: 2445704 - DNA, 25 bp, Homo sapien
gaacagagaacagttctttctcagc

SEQ ID NO: 2445705 - DNA, 25 bp, Homo sapien
gggcgcgatctgcccgtctaatttt

SEQ ID NO: 2445706 - DNA, 25 bp, Homo sapien
aaattcctgggattgcagtagtgag

SEQ ID NO: 2445707 - DNA, 25 bp, Homo sapien
aattcctgggattgcagtagtgagc

SEQ ID NO: 2445708 - DNA, 25 bp, Homo sapien
gcaggggcgcgatctgcccgtctaa

SEQ ID NO: 2445709 - DNA, 25 bp, Homo sapien
ctctctaataaactgctgacgcgca

SEQ ID NO: 2445710 - DNA, 25 bp, Homo sapien
ggctacagagctctctaataaactg

SEQ ID NO: 2445711 - DNA, 25 bp, Homo sapien
gagccgactgaactaagatgcagca

SEQ ID NO: 2445712 - DNA, 25 bp, Homo sapien
tcttccgactcctttctggcggtta

SEQ ID NO: 2445713 - DNA, 25 bp, Homo sapien
ctcatttttacccctgcgcctgttt

SEQ ID NO: 2445714 - DNA, 25 bp, Homo sapien
cagattcattctcatttttacccct

SEQ ID NO: 2445715 - DNA, 25 bp, Homo sapien
attctcatttttacccctgcgcctg

SEQ ID NO: 2445716 - DNA, 25 bp, Homo sapien
ttcattctcatttttacccctgcgc

SEQ ID NO: 2445717 - DNA, 25 bp, Homo sapien
gttccctgtagattagacctcctgg

SEQ ID NO: 2445718 - DNA, 25 bp, Homo sapien
gctagctgcattgaagaacttgtgg

SEQ ID NO: 2445719 - DNA, 25 bp, Homo sapien
tgaatacagtggcaccctcacagtt

SEQ ID NO: 2445720 - DNA, 25 bp, Homo sapien
gagacacggttgtaccctgttgccc

SEQ ID NO: 2445721 - DNA, 25 bp, Homo sapien
tagtcacatgcggttagtggttacc

SEQ ID NO: 2445722 - DNA, 25 bp, Homo sapien
tccaggagacggacattgccctgag

SEQ ID NO: 2445723 - DNA, 25 bp, Homo sapien
tacaaaaatccagtgagctcagctt

SEQ ID NO: 2445724 - DNA, 25 bp, Homo sapien
tatgaggttagcactcttcaggaaa

SEQ ID NO: 2445725 - DNA, 25 bp, Homo sapien
agatcttggtccacatttgttaaaa

SEQ ID NO: 2445726 - DNA, 25 bp, Homo sapien
ttaaaatgtaatgactgaaatttag

SEQ ID NO: 2445727 - DNA, 25 bp, Homo sapien
ggttgagatcttggtccacatttgt

SEQ ID NO: 2445728 - DNA, 25 bp, Homo sapien
aaaaaggttgagatcttggtccaca

SEQ ID NO: 2445729 - DNA, 25 bp, Homo sapien
atgcttccaatcgtccatttcccaa

SEQ ID NO: 2445730 - DNA, 25 bp, Homo sapien
aacacaatgcttccaatcgtccatt

SEQ ID NO: 2445731 - DNA, 25 bp, Homo sapien
cacaatgcttccaatcgtccatttc

SEQ ID NO: 2445732 - DNA, 25 bp, Homo sapien
aatgcttccaatcgtccatttccca

SEQ ID NO: 2445733 - DNA, 25 bp, Homo sapien
ttccctctgatatggcataacctct

SEQ ID NO: 2445734 - DNA, 25 bp, Homo sapien
tccctctgatatggcataacctctt

SEQ ID NO: 2445735 - DNA, 25 bp, Homo sapien
tttttagctcatgggaaccttgaac

SEQ ID NO: 2445736 - DNA, 25 bp, Homo sapien
aatacttccacagagctcagccaaa

SEQ ID NO: 2445737 - DNA, 25 bp, Homo sapien
gactggagagcattagcacaatttt

SEQ ID NO: 2445738 - DNA, 25 bp, Homo sapien
caggtgtatgctggctaatacttcc

SEQ ID NO: 2445739 - DNA, 25 bp, Homo sapien
ctgatagtcccgtagaccaaccaat

SEQ ID NO: 2445740 - DNA, 25 bp, Homo sapien
tagtcccgtagaccaaccaatataa

SEQ ID NO: 2445741 - DNA, 25 bp, Homo sapien
accaaccaatataatgtctgatgta

SEQ ID NO: 2445742 - DNA, 25 bp, Homo sapien
ccaaccaatataatgtctgatgtat

SEQ ID NO: 2445743 - DNA, 25 bp, Homo sapien
ccttaagattgaaagtagacctgcc

SEQ ID NO: 2445744 - DNA, 25 bp, Homo sapien
aaatgctttcttgcagtgattgcag

SEQ ID NO: 2445745 - DNA, 25 bp, Homo sapien
taaacagtgattaacagcttaggaa

SEQ ID NO: 2445746 - DNA, 25 bp, Homo sapien
ggcagtatgaaatagaccaacactt

SEQ ID NO: 2445747 - DNA, 25 bp, Homo sapien
gcttctagcttcatctgcattgtac

SEQ ID NO: 2445748 - DNA, 25 bp, Homo sapien
gttctggaagctcgccatatgcctt

SEQ ID NO: 2445749 - DNA, 25 bp, Homo sapien
gaagctcgccatatgccttcaggct

SEQ ID NO: 2445750 - DNA, 25 bp, Homo sapien
tcgccatatgccttcaggcttctag

SEQ ID NO: 2445751 - DNA, 25 bp, Homo sapien
tatcaaataatgaggagataaaatc

SEQ ID NO: 2445752 - DNA, 25 bp, Homo sapien
aaacattaatatcaaataatgagga

SEQ ID NO: 2445753 - DNA, 25 bp, Homo sapien
cattaatatcaaataatgaggagat

SEQ ID NO: 2445754 - DNA, 25 bp, Homo sapien
taatatcaaataatgaggagataaa

SEQ ID NO: 2445755 - DNA, 25 bp, Homo sapien
tagctgccaagtaaaatactcaggc

SEQ ID NO: 2445756 - DNA, 25 bp, Homo sapien
tcttgtcaagctttcggcagtaagt

SEQ ID NO: 2445757 - DNA, 25 bp, Homo sapien
tactttaagtatggtaggcagactg

SEQ ID NO: 2445758 - DNA, 25 bp, Homo sapien
catttccatgtagccttcaaaaagg

SEQ ID NO: 2445759 - DNA, 25 bp, Homo sapien
catctccaatatcgtcaaactggat

SEQ ID NO: 2445760 - DNA, 25 bp, Homo sapien
tctccaatatcgtcaaactggattt

SEQ ID NO: 2445761 - DNA, 25 bp, Homo sapien
tccaatatcgtcaaactggatttca

SEQ ID NO: 2445762 - DNA, 25 bp, Homo sapien
tcatctccaatatcgtcaaactgga

SEQ ID NO: 2445763 - DNA, 25 bp, Homo sapien
tgtggtagtggttacagatcttata

SEQ ID NO: 2445764 - DNA, 25 bp, Homo sapien
tttgaagttttgcatgtccttactt

SEQ ID NO: 2445765 - DNA, 25 bp, Homo sapien
tgcatgtccttacttccttttgtgg

SEQ ID NO: 2445766 - DNA, 25 bp, Homo sapien
cttccttttgtggtagtggttacag

SEQ ID NO: 2445767 - DNA, 25 bp, Homo sapien
aagaacatcagatccatagaaaaat

SEQ ID NO: 2445768 - DNA, 25 bp, Homo sapien
cagtggtaaactgtgaagtaaatcg

SEQ ID NO: 2445769 - DNA, 25 bp, Homo sapien
aaatcgttttgaactgagtattctg

SEQ ID NO: 2445770 - DNA, 25 bp, Homo sapien
aaagactcccagtggtaaactgtga

SEQ ID NO: 2445771 - DNA, 25 bp, Homo sapien
ccttaagttccattacatcaaaaca

SEQ ID NO: 2445772 - DNA, 25 bp, Homo sapien
gatgatggccaaaatcccaactgta

SEQ ID NO: 2445773 - DNA, 25 bp, Homo sapien
aatcagtttgctttcagaaactaca

SEQ ID NO: 2445774 - DNA, 25 bp, Homo sapien
tcagaaactacacactaaatgaatt

SEQ ID NO: 2445775 - DNA, 25 bp, Homo sapien
cttaataaccgaggcacaaaggatg

SEQ ID NO: 2445776 - DNA, 25 bp, Homo sapien
tatcagaaaccttatgagaccatct

SEQ ID NO: 2445777 - DNA, 25 bp, Homo sapien
taattggttgccacttattgttcgg

SEQ ID NO: 2445778 - DNA, 25 bp, Homo sapien
tgtaaacagattaggtggaagtagg

SEQ ID NO: 2445779 - DNA, 25 bp, Homo sapien
gcaaagtcactgtggctgccaccac

SEQ ID NO: 2445780 - DNA, 25 bp, Homo sapien
gagtagggagactgagctcctttgc

SEQ ID NO: 2445781 - DNA, 25 bp, Homo sapien
ccaccactgaaccagggagggagta

SEQ ID NO: 2445782 - DNA, 25 bp, Homo sapien
ctgcattcttccctgaggccactgc

SEQ ID NO: 2445783 - DNA, 25 bp, Homo sapien
aatgatcatccttttaactggcatg

SEQ ID NO: 2445784 - DNA, 25 bp, Homo sapien
taatgatcatccttttaactggcat

SEQ ID NO: 2445785 - DNA, 25 bp, Homo sapien
tataccccctaacaggactgctgag

SEQ ID NO: 2445786 - DNA, 25 bp, Homo sapien
ggtatataccccctaacaggactgc

SEQ ID NO: 2445787 - DNA, 25 bp, Homo sapien
tttctgggcaggaagggctccggga

SEQ ID NO: 2445788 - DNA, 25 bp, Homo sapien
gagcataaacagctggctctcagca

SEQ ID NO: 2445789 - DNA, 25 bp, Homo sapien
gggccgcggcggaagcaacagggac

SEQ ID NO: 2445790 - DNA, 25 bp, Homo sapien
gctccgggaagtggagcataaacag

SEQ ID NO: 2445791 - DNA, 25 bp, Homo sapien
cgtctgcaccacgtcaggagtcacg

SEQ ID NO: 2445792 - DNA, 25 bp, Homo sapien
tgcaccacgtcaggagtcacggcgt

SEQ ID NO: 2445793 - DNA, 25 bp, Homo sapien
ggcatctggtgtcatggttgccacc

SEQ ID NO: 2445794 - DNA, 25 bp, Homo sapien
tcttccccatttactgttgcctctc

SEQ ID NO: 2445795 - DNA, 25 bp, Homo sapien
ggcacaagtgaacacctcagactca

SEQ ID NO: 2445796 - DNA, 25 bp, Homo sapien
ggaatctcaacatacccatctattt

SEQ ID NO: 2445797 - DNA, 25 bp, Homo sapien
tgttgggaggaatctcaacataccc

SEQ ID NO: 2445798 - DNA, 25 bp, Homo sapien
acctcagactcatgggcccaaagga

SEQ ID NO: 2445799 - DNA, 25 bp, Homo sapien
tagagaagtggctcatagagtcacc

SEQ ID NO: 2445800 - DNA, 25 bp, Homo sapien
cagagaaaaggacttgaactatggc

SEQ ID NO: 2445801 - DNA, 25 bp, Homo sapien
aactgccttgtgttactcttcaccc

SEQ ID NO: 2445802 - DNA, 25 bp, Homo sapien
gaactatggcttctgcacaatatga

SEQ ID NO: 2445803 - DNA, 25 bp, Homo sapien
tggatgcctgtttctgtccttgcca

SEQ ID NO: 2445804 - DNA, 25 bp, Homo sapien
ggatgcctgtttctgtccttgccat

SEQ ID NO: 2445805 - DNA, 25 bp, Homo sapien
cgttggatgcctgtttctgtccttg

SEQ ID NO: 2445806 - DNA, 25 bp, Homo sapien
ttggatgcctgtttctgtccttgcc

SEQ ID NO: 2445807 - DNA, 25 bp, Homo sapien
acattgtccgcatgtgctcttctgc

SEQ ID NO: 2445808 - DNA, 25 bp, Homo sapien
aggctctggcgtttggttgaaatgg

SEQ ID NO: 2445809 - DNA, 25 bp, Homo sapien
ctctggcgtttggttgaaatgggat

SEQ ID NO: 2445810 - DNA, 25 bp, Homo sapien
caggtgacattgtccgcatgtgctc

SEQ ID NO: 2445811 - DNA, 25 bp, Homo sapien
ccttctggtatacggtgccttaaca

SEQ ID NO: 2445812 - DNA, 25 bp, Homo sapien
tgccttaacataagctgggtggagg

SEQ ID NO: 2445813 - DNA, 25 bp, Homo sapien
tgtcatggccccttctggtatacgg

SEQ ID NO: 2445814 - DNA, 25 bp, Homo sapien
tgttacttgggatgtcatggcccct

SEQ ID NO: 2445815 - DNA, 25 bp, Homo sapien
tgtccatattcttgcgaaaccatca

SEQ ID NO: 2445816 - DNA, 25 bp, Homo sapien
ctgtccatattcttgcgaaaccatc

SEQ ID NO: 2445817 - DNA, 25 bp, Homo sapien
catgcaggaggggtgcaggacttac

SEQ ID NO: 2445818 - DNA, 25 bp, Homo sapien
ctgacccatgcaggaggggtgcagg

SEQ ID NO: 2445819 - DNA, 25 bp, Homo sapien
tgacccatgcaggaggggtgcagga

SEQ ID NO: 2445820 - DNA, 25 bp, Homo sapien
acccatgcaggaggggtgcaggact

SEQ ID NO: 2445821 - DNA, 25 bp, Homo sapien
cacaccagtactcaaaatataattc

SEQ ID NO: 2445822 - DNA, 25 bp, Homo sapien
tttgtccacaccagtactcaaaata

SEQ ID NO: 2445823 - DNA, 25 bp, Homo sapien
tccacaccagtactcaaaatataat

SEQ ID NO: 2445824 - DNA, 25 bp, Homo sapien
tgtccacaccagtactcaaaatata

SEQ ID NO: 2445825 - DNA, 25 bp, Homo sapien
tgtgagcatcccaaattattgttgt

SEQ ID NO: 2445826 - DNA, 25 bp, Homo sapien
tcctgtgtgagcatcccaaattatt

SEQ ID NO: 2445827 - DNA, 25 bp, Homo sapien
tgtgtgagcatcccaaattattgtt

SEQ ID NO: 2445828 - DNA, 25 bp, Homo sapien
atgaaaaggaaactgctgtttggtt

SEQ ID NO: 2445829 - DNA, 25 bp, Homo sapien
taggaaactggtaaatcagaatctc

SEQ ID NO: 2445830 - DNA, 25 bp, Homo sapien
tctctgcagattctagactccaggt

SEQ ID NO: 2445831 - DNA, 25 bp, Homo sapien
tcagaatctctgcagattctagact

SEQ ID NO: 2445832 - DNA, 25 bp, Homo sapien
gtaggaaactggtaaatcagaatct

SEQ ID NO: 2445833 - DNA, 25 bp, Homo sapien
acatccatatcccacacatcaccag

SEQ ID NO: 2445834 - DNA, 25 bp, Homo sapien
aaatcgaagagcacagcccaaccag

SEQ ID NO: 2445835 - DNA, 25 bp, Homo sapien
cctgaaatcgaagagcacagcccaa

SEQ ID NO: 2445836 - DNA, 25 bp, Homo sapien
tgaaatcgaagagcacagcccaacc

SEQ ID NO: 2445837 - DNA, 25 bp, Homo sapien
tgagaaatcggagttcattggataa

SEQ ID NO: 2445838 - DNA, 25 bp, Homo sapien
ctgagaaatcggagttcattggata

SEQ ID NO: 2445839 - DNA, 25 bp, Homo sapien
agaaatcggagttcattggataaca

SEQ ID NO: 2445840 - DNA, 25 bp, Homo sapien
gagaaatcggagttcattggataac

SEQ ID NO: 2445841 - DNA, 25 bp, Homo sapien
gtgcacacgtaaggctgctggccca

SEQ ID NO: 2445842 - DNA, 25 bp, Homo sapien
gttgtacgcagtggtgagaaagcca

SEQ ID NO: 2445843 - DNA, 25 bp, Homo sapien
gaaggcttggattctcaccgggacc

SEQ ID NO: 2445844 - DNA, 25 bp, Homo sapien
tcctgcacccgggaatgatgtggca

SEQ ID NO: 2445845 - DNA, 25 bp, Homo sapien
ggctgtgagcctaaagatcgtggat

SEQ ID NO: 2445846 - DNA, 25 bp, Homo sapien
caacgtgatgtaggttttggcttgc

SEQ ID NO: 2445847 - DNA, 25 bp, Homo sapien
tttgccaacgtgatgtaggttttgg

SEQ ID NO: 2445848 - DNA, 25 bp, Homo sapien
aaagatcgtggatgcatgcgtcctg

SEQ ID NO: 2445849 - DNA, 25 bp, Homo sapien
tatttgcgtgcataggtgcctgtgc

SEQ ID NO: 2445850 - DNA, 25 bp, Homo sapien
cagacatggagggatgactccagta

SEQ ID NO: 2445851 - DNA, 25 bp, Homo sapien
gcatatgaagctttcagcatatctc

SEQ ID NO: 2445852 - DNA, 25 bp, Homo sapien
gactccagtagcttggaccctggaa

SEQ ID NO: 2445853 - DNA, 25 bp, Homo sapien
gctgtggtcattgttgtgcttcccc

SEQ ID NO: 2445854 - DNA, 25 bp, Homo sapien
ttgtgctgtggtcattgttgtgctt

SEQ ID NO: 2445855 - DNA, 25 bp, Homo sapien
attgttgtgcttccccccagtacca

SEQ ID NO: 2445856 - DNA, 25 bp, Homo sapien
catatcatggcatggggcctgaaca

SEQ ID NO: 2445857 - DNA, 25 bp, Homo sapien
aaaattcctgtccacgtgaggttcg

SEQ ID NO: 2445858 - DNA, 25 bp, Homo sapien
aggcgcttccctcgggaccggactg

SEQ ID NO: 2445859 - DNA, 25 bp, Homo sapien
tttttccatgcaaaatggtaggtaa

SEQ ID NO: 2445860 - DNA, 25 bp, Homo sapien
ctgaacgagtaggtaatttttccat

SEQ ID NO: 2445861 - DNA, 25 bp, Homo sapien
taacagtgctgaatagtgctctctg

SEQ ID NO: 2445862 - DNA, 25 bp, Homo sapien
ccaaaaaagcattcgctcctccaga

SEQ ID NO: 2445863 - DNA, 25 bp, Homo sapien
tcgctcctccagatataacagtgct

SEQ ID NO: 2445864 - DNA, 25 bp, Homo sapien
gtgctctctgactaaaacgggcttt

SEQ ID NO: 2445865 - DNA, 25 bp, Homo sapien
catggcgaaatcccgcgacggaaca

SEQ ID NO: 2445866 - DNA, 25 bp, Homo sapien
cagaacctctccttttacggtgcaa

SEQ ID NO: 2445867 - DNA, 25 bp, Homo sapien
aatcccgcgacggaacagaacctct

SEQ ID NO: 2445868 - DNA, 25 bp, Homo sapien
cgcgacggaacagaacctctccttt

SEQ ID NO: 2445869 - DNA, 25 bp, Homo sapien
gcagcattcccacccgccaagcagc

SEQ ID NO: 2445870 - DNA, 25 bp, Homo sapien
aaagcttgccaagatggaaggccct

SEQ ID NO: 2445871 - DNA, 25 bp, Homo sapien
tccgctctccaaatcgggtttcctg

SEQ ID NO: 2445872 - DNA, 25 bp, Homo sapien
gccaagcagcggtacccgaaaagta

SEQ ID NO: 2445873 - DNA, 25 bp, Homo sapien
caggccgagcacaagggccagcccg

SEQ ID NO: 2445874 - DNA, 25 bp, Homo sapien
gccgagcacaagggccagcccggaa

SEQ ID NO: 2445875 - DNA, 25 bp, Homo sapien
cgcccaggccgagcacaagggccag

SEQ ID NO: 2445876 - DNA, 25 bp, Homo sapien
gcccaggccgagcacaagggccagc

SEQ ID NO: 2445877 - DNA, 25 bp, Homo sapien
taacccgcgtaaaaagccagtgctg

SEQ ID NO: 2445878 - DNA, 25 bp, Homo sapien
gtctgtcaagacagcgtccacagtg

SEQ ID NO: 2445879 - DNA, 25 bp, Homo sapien
tctgagactgcttcaacgtatggat

SEQ ID NO: 2445880 - DNA, 25 bp, Homo sapien
cgtatggatataagctaacccgcgt

SEQ ID NO: 2445881 - DNA, 25 bp, Homo sapien
ataccggatcggaggagaaaggaca

SEQ ID NO: 2445882 - DNA, 25 bp, Homo sapien
taataccggatcggaggagaaagga

SEQ ID NO: 2445883 - DNA, 25 bp, Homo sapien
aatgtctttatcttcagctgtaaca

SEQ ID NO: 2445884 - DNA, 25 bp, Homo sapien
gaaactcgtctcagttaacagtaaa

SEQ ID NO: 2445885 - DNA, 25 bp, Homo sapien
tcagagaaactcgtctcagttaaca

SEQ ID NO: 2445886 - DNA, 25 bp, Homo sapien
ttttcagagaaactcgtctcagtta

SEQ ID NO: 2445887 - DNA, 25 bp, Homo sapien
cagcatccaatgcttcggcgctgca

SEQ ID NO: 2445888 - DNA, 25 bp, Homo sapien
atgcttcggcgctgcaacacgcttc

SEQ ID NO: 2445889 - DNA, 25 bp, Homo sapien
aatacaccagttagtttatccagca

SEQ ID NO: 2445890 - DNA, 25 bp, Homo sapien
caacacgcttcaagtgcttcttggg

SEQ ID NO: 2445891 - DNA, 25 bp, Homo sapien
tgagtagatgacttgccttagttca

SEQ ID NO: 2445892 - DNA, 25 bp, Homo sapien
gatgacttgccttagttcagcatta

SEQ ID NO: 2445893 - DNA, 25 bp, Homo sapien
tagatgacttgccttagttcagcat

SEQ ID NO: 2445894 - DNA, 25 bp, Homo sapien
cttgccttagttcagcattagctga

SEQ ID NO: 2445895 - DNA, 25 bp, Homo sapien
aggggaagacattccctcagcttgt

SEQ ID NO: 2445896 - DNA, 25 bp, Homo sapien
tcaggggaagacattccctcagctt

SEQ ID NO: 2445897 - DNA, 25 bp, Homo sapien
agacattccctcagcttgtgaggac

SEQ ID NO: 2445898 - DNA, 25 bp, Homo sapien
ctatcaggggaagacattccctcag

SEQ ID NO: 2445899 - DNA, 25 bp, Homo sapien
tctttacctcatctccagtcaatgc

SEQ ID NO: 2445900 - DNA, 25 bp, Homo sapien
tccagtcaatgcatacttgagtcta

SEQ ID NO: 2445901 - DNA, 25 bp, Homo sapien
tccagcagggtatgtgatgtccact

SEQ ID NO: 2445902 - DNA, 25 bp, Homo sapien
tttgaggaagtgttgcatacatatc

SEQ ID NO: 2445903 - DNA, 25 bp, Homo sapien
tgtgatacgatgaacagcaaaacag

SEQ ID NO: 2445904 - DNA, 25 bp, Homo sapien
cttggtattatagaccaggcggaaa

SEQ ID NO: 2445905 - DNA, 25 bp, Homo sapien
aaatgctcacctgttttctcaatgc

SEQ ID NO: 2445906 - DNA, 25 bp, Homo sapien
caggcggaaatgctcacctgttttc

SEQ ID NO: 2445907 - DNA, 25 bp, Homo sapien
gtgtgtccctgatacactgaaatcc

SEQ ID NO: 2445908 - DNA, 25 bp, Homo sapien
cctggtggactagtaatctgcataa

SEQ ID NO: 2445909 - DNA, 25 bp, Homo sapien
tctgcataaaaaggctccgtggtgt

SEQ ID NO: 2445910 - DNA, 25 bp, Homo sapien
tccgtggtgtgtccctgatacactg

SEQ ID NO: 2445911 - DNA, 25 bp, Homo sapien
ttcacatacatcctgtgtagtatac

SEQ ID NO: 2445912 - DNA, 25 bp, Homo sapien
tcacatacatcctgtgtagtatact

SEQ ID NO: 2445913 - DNA, 25 bp, Homo sapien
ataaagctggttatcttcccagtcc

SEQ ID NO: 2445914 - DNA, 25 bp, Homo sapien
atttgataaagctggttatcttccc

SEQ ID NO: 2445915 - DNA, 25 bp, Homo sapien
ttgataaagctggttatcttcccag

SEQ ID NO: 2445916 - DNA, 25 bp, Homo sapien
gctggttatcttcccagtccctaaa

SEQ ID NO: 2445917 - DNA, 25 bp, Homo sapien
catgtaccacatcgcaagaaccagg

SEQ ID NO: 2445918 - DNA, 25 bp, Homo sapien
ctccagcaatcaccatacatacatt

SEQ ID NO: 2445919 - DNA, 25 bp, Homo sapien
tccttcacatgtaccacatcgcaag

SEQ ID NO: 2445920 - DNA, 25 bp, Homo sapien
tccagcaatcaccatacatacattg

SEQ ID NO: 2445921 - DNA, 25 bp, Homo sapien
cagcaatagtaagtcggatgccctt

SEQ ID NO: 2445922 - DNA, 25 bp, Homo sapien
ttcagcaatagtaagtcggatgccc

SEQ ID NO: 2445923 - DNA, 25 bp, Homo sapien
ctcttcagcaatagtaagtcggatg

SEQ ID NO: 2445924 - DNA, 25 bp, Homo sapien
gcaatagtaagtcggatgccctttc

SEQ ID NO: 2445925 - DNA, 25 bp, Homo sapien
tggcagttgcaaccgggatcttaaa

SEQ ID NO: 2445926 - DNA, 25 bp, Homo sapien
tttggcagttgcaaccgggatctta

SEQ ID NO: 2445927 - DNA, 25 bp, Homo sapien
ccattttggcagttgcaaccgggat

SEQ ID NO: 2445928 - DNA, 25 bp, Homo sapien
cattttggcagttgcaaccgggatc

SEQ ID NO: 2445929 - DNA, 25 bp, Homo sapien
ttagggcaaatgtgcagacatactt

SEQ ID NO: 2445930 - DNA, 25 bp, Homo sapien
cctgtgtagggcaaagattagggca

SEQ ID NO: 2445931 - DNA, 25 bp, Homo sapien
taaagttcaagataccaaacagagg

SEQ ID NO: 2445932 - DNA, 25 bp, Homo sapien
tattttgtgagagctcagacttgct

SEQ ID NO: 2445933 - DNA, 25 bp, Homo sapien
tcaaagcttgagcacaaaggcctga

SEQ ID NO: 2445934 - DNA, 25 bp, Homo sapien
caaagagctgtccaccatgatcaag

SEQ ID NO: 2445935 - DNA, 25 bp, Homo sapien
catcaaagagctgtccaccatgatc

SEQ ID NO: 2445936 - DNA, 25 bp, Homo sapien
agcaacatcaaagagctgtccacca

SEQ ID NO: 2445937 - DNA, 25 bp, Homo sapien
aacatcaaagagctgtccaccatga

SEQ ID NO: 2445938 - DNA, 25 bp, Homo sapien
ttgacagctgcgagggaattgttcc

SEQ ID NO: 2445939 - DNA, 25 bp, Homo sapien
gagggaattgttccgcaaatgctgc

SEQ ID NO: 2445940 - DNA, 25 bp, Homo sapien
gctgcgagggaattgttccgcaaat

SEQ ID NO: 2445941 - DNA, 25 bp, Homo sapien
cagctgcgagggaattgttccgcaa

SEQ ID NO: 2445942 - DNA, 25 bp, Homo sapien
cagagggaccattcatggtattctg

SEQ ID NO: 2445943 - DNA, 25 bp, Homo sapien
ggactgtggtcatgattttctccat

SEQ ID NO: 2445944 - DNA, 25 bp, Homo sapien
gggtggcagtgatgtaaaggactgt

SEQ ID NO: 2445945 - DNA, 25 bp, Homo sapien
cattcatggtattctgggtggcagt

SEQ ID NO: 2445946 - DNA, 25 bp, Homo sapien
aaaagccccatggtagacactacag

SEQ ID NO: 2445947 - DNA, 25 bp, Homo sapien
aagtttcaaattaagctcaaggatg

SEQ ID NO: 2445948 - DNA, 25 bp, Homo sapien
agaaaagccccatggtagacactac

SEQ ID NO: 2445949 - DNA, 25 bp, Homo sapien
taagctcaaggatgacctttgccac

SEQ ID NO: 2445950 - DNA, 25 bp, Homo sapien
gccatgtcaggccagtaactgatag

SEQ ID NO: 2445951 - DNA, 25 bp, Homo sapien
cttcagtgaagcctaggatgccctt

SEQ ID NO: 2445952 - DNA, 25 bp, Homo sapien
tatctagtgcttgcttcactgtctt

SEQ ID NO: 2445953 - DNA, 25 bp, Homo sapien
gcctaggatgcccttgaaagtttta

SEQ ID NO: 2445954 - DNA, 25 bp, Homo sapien
caagaaagatgaagagtggatgtca

SEQ ID NO: 2445955 - DNA, 25 bp, Homo sapien
agcaagaaagatgaagagtggatgt

SEQ ID NO: 2445956 - DNA, 25 bp, Homo sapien
gcaagaaagatgaagagtggatgtc

SEQ ID NO: 2445957 - DNA, 25 bp, Homo sapien
aagaaagatgaagagtggatgtcac

SEQ ID NO: 2445958 - DNA, 25 bp, Homo sapien
tagtcattaagtaaaatccaagaac

SEQ ID NO: 2445959 - DNA, 25 bp, Homo sapien
cctctgaccaatcacaatgtcttca

SEQ ID NO: 2445960 - DNA, 25 bp, Homo sapien
cccacaatctggttaagccacttgc

SEQ ID NO: 2445961 - DNA, 25 bp, Homo sapien
caacgagctgctgatggaggtttct

SEQ ID NO: 2445962 - DNA, 25 bp, Homo sapien
tctagtaatgcagcacaacgagctg

SEQ ID NO: 2445963 - DNA, 25 bp, Homo sapien
tgggtaaacctggtgcctgccccat

SEQ ID NO: 2445964 - DNA, 25 bp, Homo sapien
gccctgggtaaacctggtgcctgcc

SEQ ID NO: 2445965 - DNA, 25 bp, Homo sapien
actcagccctgggtaaacctggtgc

SEQ ID NO: 2445966 - DNA, 25 bp, Homo sapien
gatagggtcattgtcaggtgccagc

SEQ ID NO: 2445967 - DNA, 25 bp, Homo sapien
tgaaccaggcagtccatgaggggct

SEQ ID NO: 2445968 - DNA, 25 bp, Homo sapien
agagctggaggccagacttgtatgc

SEQ ID NO: 2445969 - DNA, 25 bp, Homo sapien
gctggaggccagacttgtatgccat

SEQ ID NO: 2445970 - DNA, 25 bp, Homo sapien
gaaccaggcagtccatgaggggctc

SEQ ID NO: 2445971 - DNA, 25 bp, Homo sapien
cacagagtttatttcatcaataaag

SEQ ID NO: 2445972 - DNA, 25 bp, Homo sapien
tcatcaataaaggtgcctgtggctg

SEQ ID NO: 2445973 - DNA, 25 bp, Homo sapien
caagaaggttgagtgccaggtgcta

SEQ ID NO: 2445974 - DNA, 25 bp, Homo sapien
aggtgctacatgcagggtgatggcc

SEQ ID NO: 2445975 - DNA, 25 bp, Homo sapien
ctggagtggcaggaagttgggcaac

SEQ ID NO: 2445976 - DNA, 25 bp, Homo sapien
agggtgtgggaccccatcacccaca

SEQ ID NO: 2445977 - DNA, 25 bp, Homo sapien
tcctctggcaagatcccattgggct

SEQ ID NO: 2445978 - DNA, 25 bp, Homo sapien
gctccaaaggatccaggcttgcttg

SEQ ID NO: 2445979 - DNA, 25 bp, Homo sapien
gcttgcttgtaatactccatctcag

SEQ ID NO: 2445980 - DNA, 25 bp, Homo sapien
gacaccatgaacagcttggctccaa

SEQ ID NO: 2445981 - DNA, 25 bp, Homo sapien
tctgaattagtcttgacaggctgta

SEQ ID NO: 2445982 - DNA, 25 bp, Homo sapien
taattactacctcagttacagaacc

SEQ ID NO: 2445983 - DNA, 25 bp, Homo sapien
gtttatttgaatacggtctccacag

SEQ ID NO: 2445984 - DNA, 25 bp, Homo sapien
tgcttcagttctctctaatcctagt

SEQ ID NO: 2445985 - DNA, 25 bp, Homo sapien
aacttccttcatgttaacatcttcg

SEQ ID NO: 2445986 - DNA, 25 bp, Homo sapien
catgttaacatcttcgtttctctta

SEQ ID NO: 2445987 - DNA, 25 bp, Homo sapien
catcttcgtttctcttaaaactgac

SEQ ID NO: 2445988 - DNA, 25 bp, Homo sapien
aacatcttcgtttctcttaaaactg

SEQ ID NO: 2445989 - DNA, 25 bp, Homo sapien
ctaaatgtctaactgaacctctttc

SEQ ID NO: 2445990 - DNA, 25 bp, Homo sapien
atgtctaactgaacctctttctttg

SEQ ID NO: 2445991 - DNA, 25 bp, Homo sapien
aaatgtctaactgaacctctttctt

SEQ ID NO: 2445992 - DNA, 25 bp, Homo sapien
tgtctaactgaacctctttctttgc

SEQ ID NO: 2445993 - DNA, 25 bp, Homo sapien
gaagtatgtttatattgatgggttt

SEQ ID NO: 2445994 - DNA, 25 bp, Homo sapien
aagtatgtttatattgatgggtttc

SEQ ID NO: 2445995 - DNA, 25 bp, Homo sapien
gaaaaagaggcttgaactctcattg

SEQ ID NO: 2445996 - DNA, 25 bp, Homo sapien
gcttgaactctcattgtgctctcca

SEQ ID NO: 2445997 - DNA, 25 bp, Homo sapien
gaactctcattgtgctctccagctc

SEQ ID NO: 2445998 - DNA, 25 bp, Homo sapien
gaggcttgaactctcattgtgctct

SEQ ID NO: 2445999 - DNA, 25 bp, Homo sapien
ctttccattgttgtatgtctgttac

SEQ ID NO: 2446000 - DNA, 25 bp, Homo sapien
ttttctttccattgttgtatgtctg

SEQ ID NO: 2446001 - DNA, 25 bp, Homo sapien
gtttttctttccattgttgtatgtc

SEQ ID NO: 2446002 - DNA, 25 bp, Homo sapien
tctttccattgttgtatgtctgtta

SEQ ID NO: 2446003 - DNA, 25 bp, Homo sapien
tgaagcaaggtttcctacttctggg

SEQ ID NO: 2446004 - DNA, 25 bp, Homo sapien
caatgtcctttctttggacttgaag

SEQ ID NO: 2446005 - DNA, 25 bp, Homo sapien
gcaagataggggtcttgtaaaattc

SEQ ID NO: 2446006 - DNA, 25 bp, Homo sapien
tttggacttgaagcaaggtttccta

SEQ ID NO: 2446007 - DNA, 25 bp, Homo sapien
ccaggtagtcagacacacataaaat

SEQ ID NO: 2446008 - DNA, 25 bp, Homo sapien
ctgccaggtagtcagacacacataa

SEQ ID NO: 2446009 - DNA, 25 bp, Homo sapien
gccaggtagtcagacacacataaaa

SEQ ID NO: 2446010 - DNA, 25 bp, Homo sapien
tgccaggtagtcagacacacataaa

SEQ ID NO: 2446011 - DNA, 25 bp, Homo sapien
ggttggtcatagcttggtgtttttc

SEQ ID NO: 2446012 - DNA, 25 bp, Homo sapien
tcatagcttggtgtttttccaaggc

SEQ ID NO: 2446013 - DNA, 25 bp, Homo sapien
tgtctgggttggtcatagcttggtg

SEQ ID NO: 2446014 - DNA, 25 bp, Homo sapien
tctgggttggtcatagcttggtgtt

SEQ ID NO: 2446015 - DNA, 25 bp, Homo sapien
gagatcatagaactctctccatgct

SEQ ID NO: 2446016 - DNA, 25 bp, Homo sapien
tggagatcatagaactctctccatg

SEQ ID NO: 2446017 - DNA, 25 bp, Homo sapien
ctggagatcatagaactctctccat

SEQ ID NO: 2446018 - DNA, 25 bp, Homo sapien
ggagatcatagaactctctccatgc

SEQ ID NO: 2446019 - DNA, 25 bp, Homo sapien
tctgagcaccagtggcagcaatgac

SEQ ID NO: 2446020 - DNA, 25 bp, Homo sapien
gcaccagtggcagcaatgacagcaa

SEQ ID NO: 2446021 - DNA, 25 bp, Homo sapien
ccttgtctgagcaccagtggcagca

SEQ ID NO: 2446022 - DNA, 25 bp, Homo sapien
cttgtctgagcaccagtggcagcaa

SEQ ID NO: 2446023 - DNA, 25 bp, Homo sapien
ggaggtggtctcaatagacacagct

SEQ ID NO: 2446024 - DNA, 25 bp, Homo sapien
agcaagaacgagtaacataaaggag

SEQ ID NO: 2446025 - DNA, 25 bp, Homo sapien
taaaggaggtggtctcaatagacac

SEQ ID NO: 2446026 - DNA, 25 bp, Homo sapien
tcaaagatgaaagcaagaacgagta

SEQ ID NO: 2446027 - DNA, 25 bp, Homo sapien
tcctacatgatgtccacccactcct

SEQ ID NO: 2446028 - DNA, 25 bp, Homo sapien
tgtccacccactccttcctgtccta

SEQ ID NO: 2446029 - DNA, 25 bp, Homo sapien
cttcctgtcctactacagtagccat

SEQ ID NO: 2446030 - DNA, 25 bp, Homo sapien
caactcctacatgatgtccacccac

SEQ ID NO: 2446031 - DNA, 25 bp, Homo sapien
tgcaccacagcagagcgaaaagcac

SEQ ID NO: 2446032 - DNA, 25 bp, Homo sapien
aatttcactaagaggagatccatcc

SEQ ID NO: 2446033 - DNA, 25 bp, Homo sapien
cagtatgtgcagatctccatagaga

SEQ ID NO: 2446034 - DNA, 25 bp, Homo sapien
aaaagcacctggatagcctgatggg

SEQ ID NO: 2446035 - DNA, 25 bp, Homo sapien
aaatgtataccccaactatgtacct

SEQ ID NO: 2446036 - DNA, 25 bp, Homo sapien
catagtgagtagagggctgtttacc

SEQ ID NO: 2446037 - DNA, 25 bp, Homo sapien
gaataataggaagctgatcaggagg

SEQ ID NO: 2446038 - DNA, 25 bp, Homo sapien
tactctttgatagcacacaaagtga

SEQ ID NO: 2446039 - DNA, 25 bp, Homo sapien
tgcttagaacgggcaattctgggac

SEQ ID NO: 2446040 - DNA, 25 bp, Homo sapien
gtgcttagaacgggcaattctggga

SEQ ID NO: 2446041 - DNA, 25 bp, Homo sapien
catctgtttcacaaacaataacctg

SEQ ID NO: 2446042 - DNA, 25 bp, Homo sapien
ttggagcactttagatctctcagtg

SEQ ID NO: 2446043 - DNA, 25 bp, Homo sapien
tcttggagcactttagatctctcag

SEQ ID NO: 2446044 - DNA, 25 bp, Homo sapien
agtcttggagcactttagatctctc

SEQ ID NO: 2446045 - DNA, 25 bp, Homo sapien
tggagcactttagatctctcagtgc

SEQ ID NO: 2446046 - DNA, 25 bp, Homo sapien
acagcttctgatgcacatagaaggt

SEQ ID NO: 2446047 - DNA, 25 bp, Homo sapien
tctgatgcacatagaaggtatattc

SEQ ID NO: 2446048 - DNA, 25 bp, Homo sapien
gcttctgatgcacatagaaggtata

SEQ ID NO: 2446049 - DNA, 25 bp, Homo sapien
tcccaggagccatacctccttacca

SEQ ID NO: 2446050 - DNA, 25 bp, Homo sapien
aatttctctaaacccattgggcctg

SEQ ID NO: 2446051 - DNA, 25 bp, Homo sapien
tgagctaaatttaggcacactttta

SEQ ID NO: 2446052 - DNA, 25 bp, Homo sapien
tttatgtcaatgatatctttgtgac

SEQ ID NO: 2446053 - DNA, 25 bp, Homo sapien
tgtgaccaatgttgaactccttaaa

SEQ ID NO: 2446054 - DNA, 25 bp, Homo sapien
atctttaggtggtggagcatcatcc

SEQ ID NO: 2446055 - DNA, 25 bp, Homo sapien
taatctttaggtggtggagcatcat

SEQ ID NO: 2446056 - DNA, 25 bp, Homo sapien
tggtatccataatctttaggtggtg

SEQ ID NO: 2446057 - DNA, 25 bp, Homo sapien
cataatctttaggtggtggagcatc

SEQ ID NO: 2446058 - DNA, 25 bp, Homo sapien
gatctctaccacagcccccttggta

SEQ ID NO: 2446059 - DNA, 25 bp, Homo sapien
ctaccacagcccccttggtagccat

SEQ ID NO: 2446060 - DNA, 25 bp, Homo sapien
tctctaccacagcccccttggtagc

SEQ ID NO: 2446061 - DNA, 25 bp, Homo sapien
atgatctctaccacagcccccttgg

SEQ ID NO: 2446062 - DNA, 25 bp, Homo sapien
tcatgtacagttataatcatagtga

SEQ ID NO: 2446063 - DNA, 25 bp, Homo sapien
acttccaccataactcatctgaggc

SEQ ID NO: 2446064 - DNA, 25 bp, Homo sapien
tcatagtgaatacttccaccataac

SEQ ID NO: 2446065 - DNA, 25 bp, Homo sapien
gttataatcatagtgaatacttcca

SEQ ID NO: 2446066 - DNA, 25 bp, Homo sapien
tacctagtagggattattctctgac

SEQ ID NO: 2446067 - DNA, 25 bp, Homo sapien
ttactcctgatctgaaagtctcctc

SEQ ID NO: 2446068 - DNA, 25 bp, Homo sapien
aatcccagactttacaagacagaag

SEQ ID NO: 2446069 - DNA, 25 bp, Homo sapien
tcctggagtgaaagtcccttctacc

SEQ ID NO: 2446070 - DNA, 25 bp, Homo sapien
ttgctactttgcaactcataagtgg

SEQ ID NO: 2446071 - DNA, 25 bp, Homo sapien
acttgctactttgcaactcataagt

SEQ ID NO: 2446072 - DNA, 25 bp, Homo sapien
cctacattctcacttgctactttgc

SEQ ID NO: 2446073 - DNA, 25 bp, Homo sapien
gtgcccctccctacattctcacttg

SEQ ID NO: 2446074 - DNA, 25 bp, Homo sapien
gtccttgggctctgattgttcttgc

SEQ ID NO: 2446075 - DNA, 25 bp, Homo sapien
tccaacgagtctgttactggctggg

SEQ ID NO: 2446076 - DNA, 25 bp, Homo sapien
gggcattcacggagttccaacgagt

SEQ ID NO: 2446077 - DNA, 25 bp, Homo sapien
acctggaccactgccacgatatcgt

SEQ ID NO: 2446078 - DNA, 25 bp, Homo sapien
tgaacggggtacactgtccgctcca

SEQ ID NO: 2446079 - DNA, 25 bp, Homo sapien
tctccctagcgtgtaggcttcaggg

SEQ ID NO: 2446080 - DNA, 25 bp, Homo sapien
gactcttcgcgtctccctagcgtgt

SEQ ID NO: 2446081 - DNA, 25 bp, Homo sapien
taggtagcttgagccagccaccctt

SEQ ID NO: 2446082 - DNA, 25 bp, Homo sapien
catgaggactcttcgcgtctcccta

SEQ ID NO: 2446083 - DNA, 25 bp, Homo sapien
gggcaagacacccactgggtggaga

SEQ ID NO: 2446084 - DNA, 25 bp, Homo sapien
aagacacccactgggtggagagttg

SEQ ID NO: 2446085 - DNA, 25 bp, Homo sapien
tgggtggagagttgggcttatgcat

SEQ ID NO: 2446086 - DNA, 25 bp, Homo sapien
gcaagacacccactgggtggagagt

SEQ ID NO: 2446087 - DNA, 25 bp, Homo sapien
atgccgggggatgttttaagcctgt

SEQ ID NO: 2446088 - DNA, 25 bp, Homo sapien
ccattcccggagaatgccgggggat

SEQ ID NO: 2446089 - DNA, 25 bp, Homo sapien
tccaggtatgttcaggaagcagctc

SEQ ID NO: 2446090 - DNA, 25 bp, Homo sapien
tctgcaatctaggtggaagagctgt

SEQ ID NO: 2446091 - DNA, 25 bp, Homo sapien
tattactaaaagaagcatatgggct

SEQ ID NO: 2446092 - DNA, 25 bp, Homo sapien
gtggagacaggtagatactaacttc

SEQ ID NO: 2446093 - DNA, 25 bp, Homo sapien
ttactaaaagaagcatatgggcttt

SEQ ID NO: 2446094 - DNA, 25 bp, Homo sapien
atattactaaaagaagcatatgggc

SEQ ID NO: 2446095 - DNA, 25 bp, Homo sapien
tgcagggacctctcatggtgcacca

SEQ ID NO: 2446096 - DNA, 25 bp, Homo sapien
taacaatacacgagatacatagggc

SEQ ID NO: 2446097 - DNA, 25 bp, Homo sapien
tttgtggtcatgagcacactggcag

SEQ ID NO: 2446098 - DNA, 25 bp, Homo sapien
gaaagttactcaagaagctgcggtg

SEQ ID NO: 2446099 - DNA, 25 bp, Homo sapien
cactgcggcgcttgcgggaggatct

SEQ ID NO: 2446100 - DNA, 25 bp, Homo sapien
cgggaggatctgtgccagcgaggca

SEQ ID NO: 2446101 - DNA, 25 bp, Homo sapien
gtgcacacgggttatcgcattggca

SEQ ID NO: 2446102 - DNA, 25 bp, Homo sapien
actggcaggcacgacggccactgcg

SEQ ID NO: 2446103 - DNA, 25 bp, Homo sapien
tacactgcccatctcatgtccttgg

SEQ ID NO: 2446104 - DNA, 25 bp, Homo sapien
tccttggcacccctagactctagag

SEQ ID NO: 2446105 - DNA, 25 bp, Homo sapien
ctccttgaggctcccacagactaag

SEQ ID NO: 2446106 - DNA, 25 bp, Homo sapien
tcatcccccactagccactagcatg

SEQ ID NO: 2446107 - DNA, 25 bp, Homo sapien
acgtccagcgagttggttgctggcc

SEQ ID NO: 2446108 - DNA, 25 bp, Homo sapien
gccctgcggcctgggacattcactg

SEQ ID NO: 2446109 - DNA, 25 bp, Homo sapien
tgcctgcgggtcctcctgctgccgc

SEQ ID NO: 2446110 - DNA, 25 bp, Homo sapien
cctgctgccgctccacattggcctc

SEQ ID NO: 2446111 - DNA, 25 bp, Homo sapien
gcagctgcaaggatatggctctgac

SEQ ID NO: 2446112 - DNA, 25 bp, Homo sapien
tcagccatcccgaattggcagctgc

SEQ ID NO: 2446113 - DNA, 25 bp, Homo sapien
attggcagctgcaaggatatggctc

SEQ ID NO: 2446114 - DNA, 25 bp, Homo sapien
tggcagctgcaaggatatggctctg

SEQ ID NO: 2446115 - DNA, 25 bp, Homo sapien
gcagctacttgctcagggttcctga

SEQ ID NO: 2446116 - DNA, 25 bp, Homo sapien
tatttccatggctggcctgggcgcg

SEQ ID NO: 2446117 - DNA, 25 bp, Homo sapien
tcagggtgcccgcaattaagctgcc

SEQ ID NO: 2446118 - DNA, 25 bp, Homo sapien
cgagggaaccgctgtgaatagaagt

SEQ ID NO: 2446119 - DNA, 25 bp, Homo sapien
ccgaggggtgtgttttgacagagca

SEQ ID NO: 2446120 - DNA, 25 bp, Homo sapien
gaggggtgtgttttgacagagcact

SEQ ID NO: 2446121 - DNA, 25 bp, Homo sapien
agggacctgagggggttgccaatgc

SEQ ID NO: 2446122 - DNA, 25 bp, Homo sapien
gagccgaggggtgtgttttgacaga

SEQ ID NO: 2446123 - DNA, 25 bp, Homo sapien
gacctgcaaatctatcatgtagctt

SEQ ID NO: 2446124 - DNA, 25 bp, Homo sapien
caggactgacttcatcatcgtttgt

SEQ ID NO: 2446125 - DNA, 25 bp, Homo sapien
ggactgacttcatcatcgtttgtga

SEQ ID NO: 2446126 - DNA, 25 bp, Homo sapien
ccagacaacggacccctcccgcaga

SEQ ID NO: 2446127 - DNA, 25 bp, Homo sapien
gcaatactcctgaacgataacttca

SEQ ID NO: 2446128 - DNA, 25 bp, Homo sapien
ggcaatactcctgaacgataacttc

SEQ ID NO: 2446129 - DNA, 25 bp, Homo sapien
cgtcctaccgtcggtacctgggatg

SEQ ID NO: 2446130 - DNA, 25 bp, Homo sapien
gtcccactgtggcacccatctcagg

SEQ ID NO: 2446131 - DNA, 25 bp, Homo sapien
ggtagaaagtgtagcgcctgcagct

SEQ ID NO: 2446132 - DNA, 25 bp, Homo sapien
catggtcagccaaccgaccgtagaa

SEQ ID NO: 2446133 - DNA, 25 bp, Homo sapien
gaccgtagaagctcaggtagaaagt

SEQ ID NO: 2446134 - DNA, 25 bp, Homo sapien
gattgagcctggcacacgcggactg

SEQ ID NO: 2446135 - DNA, 25 bp, Homo sapien
gactgtgagccctttggaattgtgg

SEQ ID NO: 2446136 - DNA, 25 bp, Homo sapien
gcaacaccctaactggcatcctgag

SEQ ID NO: 2446137 - DNA, 25 bp, Homo sapien
ggcatggaagagcaacaccctaact

SEQ ID NO: 2446138 - DNA, 25 bp, Homo sapien
taggagtgccacatatcatcgaccc

SEQ ID NO: 2446139 - DNA, 25 bp, Homo sapien
atgttgcgatgaaaggcaaacttca

SEQ ID NO: 2446140 - DNA, 25 bp, Homo sapien
tccaccagtactcaggatggctgag

SEQ ID NO: 2446141 - DNA, 25 bp, Homo sapien
cttccaccagtactcaggatggctg

SEQ ID NO: 2446142 - DNA, 25 bp, Homo sapien
gttgcgatgaaaggcaaacttcatc

SEQ ID NO: 2446143 - DNA, 25 bp, Homo sapien
gggaggcactccttattgagaattc

SEQ ID NO: 2446144 - DNA, 25 bp, Homo sapien
ggaggcactccttattgagaattcc

SEQ ID NO: 2446145 - DNA, 25 bp, Homo sapien
caccaagcaatgaccagcaaggtcc

SEQ ID NO: 2446146 - DNA, 25 bp, Homo sapien
tccgacaccaagcaatgaccagcaa

SEQ ID NO: 2446147 - DNA, 25 bp, Homo sapien
gacaccaagcaatgaccagcaaggt

SEQ ID NO: 2446148 - DNA, 25 bp, Homo sapien
cgacaccaagcaatgaccagcaagg

SEQ ID NO: 2446149 - DNA, 25 bp, Homo sapien
actcccttgggtagtgctgcatgag

SEQ ID NO: 2446150 - DNA, 25 bp, Homo sapien
cccttgggtagtgctgcatgagatt

SEQ ID NO: 2446151 - DNA, 25 bp, Homo sapien
tgagattgagccacgggccctggct

SEQ ID NO: 2446152 - DNA, 25 bp, Homo sapien
gtagtgctgcatgagattgagccac

SEQ ID NO: 2446153 - DNA, 25 bp, Homo sapien
ctatgtgtcctagctccaggaccca

SEQ ID NO: 2446154 - DNA, 25 bp, Homo sapien
tatgtgtcctagctccaggacccac

SEQ ID NO: 2446155 - DNA, 25 bp, Homo sapien
gaagaactggccttgcgggagccat

SEQ ID NO: 2446156 - DNA, 25 bp, Homo sapien
cattagaagaactggccttgcggga

SEQ ID NO: 2446157 - DNA, 25 bp, Homo sapien
agaagaactggccttgcgggagcca

SEQ ID NO: 2446158 - DNA, 25 bp, Homo sapien
gcttcattagaagaactggccttgc

SEQ ID NO: 2446159 - DNA, 25 bp, Homo sapien
ccagtgacggccaaagagggaaaga

SEQ ID NO: 2446160 - DNA, 25 bp, Homo sapien
ggtatcactgaccaggcctacccgt

SEQ ID NO: 2446161 - DNA, 25 bp, Homo sapien
cagggtcataacaggcttctgaggt

SEQ ID NO: 2446162 - DNA, 25 bp, Homo sapien
ggaaagaacaggactatcttgctgt

SEQ ID NO: 2446163 - DNA, 25 bp, Homo sapien
tccaggatcttgctgaatcagtcac

SEQ ID NO: 2446164 - DNA, 25 bp, Homo sapien
cagattgaacttgagactgaccagt

SEQ ID NO: 2446165 - DNA, 25 bp, Homo sapien
gaaggaacttgagatccacctaggc

SEQ ID NO: 2446166 - DNA, 25 bp, Homo sapien
ccaaggtctagctacaatttgtcca

SEQ ID NO: 2446167 - DNA, 25 bp, Homo sapien
cagaatgtgtccagagattcactgc

SEQ ID NO: 2446168 - DNA, 25 bp, Homo sapien
gattggatcagtttccctcaataga

SEQ ID NO: 2446169 - DNA, 25 bp, Homo sapien
gatccattgtgggactgtcttagct

SEQ ID NO: 2446170 - DNA, 25 bp, Homo sapien
taggctctgtcaaaggcaataaggc

SEQ ID NO: 2446171 - DNA, 25 bp, Homo sapien
tataggagagtgtatccatgaattc

SEQ ID NO: 2446172 - DNA, 25 bp, Homo sapien
cacattgtgaccatatcagatatag

SEQ ID NO: 2446173 - DNA, 25 bp, Homo sapien
tgtatccatgaattcatcactagtg

SEQ ID NO: 2446174 - DNA, 25 bp, Homo sapien
tcactagtgattcagcttgggtccc

SEQ ID NO: 2446175 - DNA, 25 bp, Homo sapien
tggtaggaccatatcagctgtgaca

SEQ ID NO: 2446176 - DNA, 25 bp, Homo sapien
tgattgagtccaagatactggtggg

SEQ ID NO: 2446177 - DNA, 25 bp, Homo sapien
caagaatatcgtgctggaggaccat

SEQ ID NO: 2446178 - DNA, 25 bp, Homo sapien
gaattactcctagagtttcagccag

SEQ ID NO: 2446179 - DNA, 25 bp, Homo sapien
tgggtccagtgtctgacagtattgg

SEQ ID NO: 2446180 - DNA, 25 bp, Homo sapien
atgggtccagtgtctgacagtattg

SEQ ID NO: 2446181 - DNA, 25 bp, Homo sapien
gggtccagtgtctgacagtattggt

SEQ ID NO: 2446182 - DNA, 25 bp, Homo sapien
aagcactggcagtggaggtaaaagc

SEQ ID NO: 2446183 - DNA, 25 bp, Homo sapien
aagatgaagtgtggccgaaaagcac

SEQ ID NO: 2446184 - DNA, 25 bp, Homo sapien
aaagatgaagtgtggccgaaaagca

SEQ ID NO: 2446185 - DNA, 25 bp, Homo sapien
ccgaaaagcactggcagtggaggta

SEQ ID NO: 2446186 - DNA, 25 bp, Homo sapien
gcatagcatattgcagagcaatctg

SEQ ID NO: 2446187 - DNA, 25 bp, Homo sapien
cacagcttgccaaggcatagcatat

SEQ ID NO: 2446188 - DNA, 25 bp, Homo sapien
ggctgttgatcacagcttgccaagg

SEQ ID NO: 2446189 - DNA, 25 bp, Homo sapien
tgcagagcaatctgatctgccaaag

SEQ ID NO: 2446190 - DNA, 25 bp, Homo sapien
agtggctaaccacggaaccacagca

SEQ ID NO: 2446191 - DNA, 25 bp, Homo sapien
atccaacagtggctaaccacggaac

SEQ ID NO: 2446192 - DNA, 25 bp, Homo sapien
gctaaccacggaaccacagcagaaa

SEQ ID NO: 2446193 - DNA, 25 bp, Homo sapien
ccacggaaccacagcagaaatcact

SEQ ID NO: 2446194 - DNA, 25 bp, Homo sapien
ggatttctgaggtcgagtctgccgt

SEQ ID NO: 2446195 - DNA, 25 bp, Homo sapien
gttttggcgggatttctgaggtcga

SEQ ID NO: 2446196 - DNA, 25 bp, Homo sapien
ctgcctgggttttggcgggatttct

SEQ ID NO: 2446197 - DNA, 25 bp, Homo sapien
tggcgggatttctgaggtcgagtct

SEQ ID NO: 2446198 - DNA, 25 bp, Homo sapien
cccagatgtcggcatgggtcagaaa

SEQ ID NO: 2446199 - DNA, 25 bp, Homo sapien
tgctgtgctacatgatggtcaggct

SEQ ID NO: 2446200 - DNA, 25 bp, Homo sapien
aatgacgtcctgctgtgctacatga

SEQ ID NO: 2446201 - DNA, 25 bp, Homo sapien
gggtcagaaaccataatgacgtcct

SEQ ID NO: 2446202 - DNA, 25 bp, Homo sapien
gcagggtttcacgaggcttgcccac

SEQ ID NO: 2446203 - DNA, 25 bp, Homo sapien
caaattgcagggtttcacgaggctt

SEQ ID NO: 2446204 - DNA, 25 bp, Homo sapien
aattgcagggtttcacgaggcttgc

SEQ ID NO: 2446205 - DNA, 25 bp, Homo sapien
ttgcagggtttcacgaggcttgccc

SEQ ID NO: 2446206 - DNA, 25 bp, Homo sapien
caaggtgctgaagactcgggttcgc

SEQ ID NO: 2446207 - DNA, 25 bp, Homo sapien
atatgctttcttccgcctgccggcg

SEQ ID NO: 2446208 - DNA, 25 bp, Homo sapien
ctgaagactcgggttcgcggtgcat

SEQ ID NO: 2446209 - DNA, 25 bp, Homo sapien
ctgctgacctccacaaggcaggcac

SEQ ID NO: 2446210 - DNA, 25 bp, Homo sapien
ggcagtcaatggacttgctgcaggt

SEQ ID NO: 2446211 - DNA, 25 bp, Homo sapien
ccgggcagtcaatggacttgctgca

SEQ ID NO: 2446212 - DNA, 25 bp, Homo sapien
gggcagtcaatggacttgctgcagg

SEQ ID NO: 2446213 - DNA, 25 bp, Homo sapien
cgggcagtcaatggacttgctgcag

SEQ ID NO: 2446214 - DNA, 25 bp, Homo sapien
aagacataatggctgaggtggaggt

SEQ ID NO: 2446215 - DNA, 25 bp, Homo sapien
tggtggaagacataatggctgaggt

SEQ ID NO: 2446216 - DNA, 25 bp, Homo sapien
ggagaagaccgacgtggagtggcag

SEQ ID NO: 2446217 - DNA, 25 bp, Homo sapien
gacgtggagtggcagaaggtgaacc

SEQ ID NO: 2446218 - DNA, 25 bp, Homo sapien
tgtgagagcaccagaagggcacaat

SEQ ID NO: 2446219 - DNA, 25 bp, Homo sapien
ctgtgagagcaccagaagggcacaa

SEQ ID NO: 2446220 - DNA, 25 bp, Homo sapien
gtgagagcaccagaagggcacaatg

SEQ ID NO: 2446221 - DNA, 25 bp, Homo sapien
ggacttgagccccacggcgactgct

SEQ ID NO: 2446222 - DNA, 25 bp, Homo sapien
attagctggactccataggcccggg

SEQ ID NO: 2446223 - DNA, 25 bp, Homo sapien
ctgctgcaatctgcgggcccatcgg

SEQ ID NO: 2446224 - DNA, 25 bp, Homo sapien
tactagtaggtgtgggactaggttc

SEQ ID NO: 2446225 - DNA, 25 bp, Homo sapien
cactgccttgcggatccagaggctc

SEQ ID NO: 2446226 - DNA, 25 bp, Homo sapien
tgccttgcggatccagaggctccca

SEQ ID NO: 2446227 - DNA, 25 bp, Homo sapien
tccaggactggccatcgacggcctg

SEQ ID NO: 2446228 - DNA, 25 bp, Homo sapien
cgacggcctgcgtgcatgctgttgt

SEQ ID NO: 2446229 - DNA, 25 bp, Homo sapien
ccaaggagcattccaaagggcctct

SEQ ID NO: 2446230 - DNA, 25 bp, Homo sapien
tccaaggagcattccaaagggcctc

SEQ ID NO: 2446231 - DNA, 25 bp, Homo sapien
tgctggggtgagggcggcggcgggt

SEQ ID NO: 2446232 - DNA, 25 bp, Homo sapien
tctggctgctggggtgagggcggcg

SEQ ID NO: 2446233 - DNA, 25 bp, Homo sapien
ctggggtgagggcggcggcgggtgt

SEQ ID NO: 2446234 - DNA, 25 bp, Homo sapien
tggctgctggggtgagggcggcggc

SEQ ID NO: 2446235 - DNA, 25 bp, Homo sapien
cgacccacgccacaggaaccctgcc

SEQ ID NO: 2446236 - DNA, 25 bp, Homo sapien
cccgacccacgccacaggaaccctg

SEQ ID NO: 2446237 - DNA, 25 bp, Homo sapien
ctgcccgacccacgccacaggaacc

SEQ ID NO: 2446238 - DNA, 25 bp, Homo sapien
gacccacgccacaggaaccctgccg

SEQ ID NO: 2446239 - DNA, 25 bp, Homo sapien
atcctgaagacagtgcccttctccg

SEQ ID NO: 2446240 - DNA, 25 bp, Homo sapien
ggctccggcattaaccggctctagc

SEQ ID NO: 2446241 - DNA, 25 bp, Homo sapien
tggctccggcattaaccggctctag

SEQ ID NO: 2446242 - DNA, 25 bp, Homo sapien
ggatgctctggatgaatgagcctct

SEQ ID NO: 2446243 - DNA, 25 bp, Homo sapien
tggatgaatgagcctctgcggtcca

SEQ ID NO: 2446244 - DNA, 25 bp, Homo sapien
cccctctgctgagaaaaggccttac

SEQ ID NO: 2446245 - DNA, 25 bp, Homo sapien
gatgaatgagcctctgcggtccagg

SEQ ID NO: 2446246 - DNA, 25 bp, Homo sapien
gaaaggcagaagaaacactgaaaag

SEQ ID NO: 2446247 - DNA, 25 bp, Homo sapien
aggcagaagaaacactgaaaaggtt

SEQ ID NO: 2446248 - DNA, 25 bp, Homo sapien
ctagaaaggcagaagaaacactgaa

SEQ ID NO: 2446249 - DNA, 25 bp, Homo sapien
aaggcagaagaaacactgaaaaggt

SEQ ID NO: 2446250 - DNA, 25 bp, Homo sapien
cgtttttccccaaatagtcgcatcg

SEQ ID NO: 2446251 - DNA, 25 bp, Homo sapien
acttgtccatggcaactctccgttt

SEQ ID NO: 2446252 - DNA, 25 bp, Homo sapien
tgtccatggcaactctccgtttttc

SEQ ID NO: 2446253 - DNA, 25 bp, Homo sapien
tcgatgccaagctgcccgtaagtta

SEQ ID NO: 2446254 - DNA, 25 bp, Homo sapien
tgtcttcatcttggtcagagatcag

SEQ ID NO: 2446255 - DNA, 25 bp, Homo sapien
gctgacatctggaggtggtttgcaa

SEQ ID NO: 2446256 - DNA, 25 bp, Homo sapien
ctccaagttgatcatgtagctcagc

SEQ ID NO: 2446257 - DNA, 25 bp, Homo sapien
ttggtcagagatcagggctgacatc

SEQ ID NO: 2446258 - DNA, 25 bp, Homo sapien
ctctagcctcagtcttcccggcatc

SEQ ID NO: 2446259 - DNA, 25 bp, Homo sapien
tcccccgctaaaccctctagcctca

SEQ ID NO: 2446260 - DNA, 25 bp, Homo sapien
ctagcctcagtcttcccggcatcac

SEQ ID NO: 2446261 - DNA, 25 bp, Homo sapien
cccgctaaaccctctagcctcagtc

SEQ ID NO: 2446262 - DNA, 25 bp, Homo sapien
ttgcagagatgaacggaatgcttgg

SEQ ID NO: 2446263 - DNA, 25 bp, Homo sapien
cagagatgaacggaatgcttggctt

SEQ ID NO: 2446264 - DNA, 25 bp, Homo sapien
cttgcagagatgaacggaatgcttg

SEQ ID NO: 2446265 - DNA, 25 bp, Homo sapien
agatgaacggaatgcttggcttctt

SEQ ID NO: 2446266 - DNA, 25 bp, Homo sapien
ttcggataccgctgaattggagtgg

SEQ ID NO: 2446267 - DNA, 25 bp, Homo sapien
cacttcataattcggataccgctga

SEQ ID NO: 2446268 - DNA, 25 bp, Homo sapien
cctgcaaagtcgtggtcagaaaacc

SEQ ID NO: 2446269 - DNA, 25 bp, Homo sapien
tcctattagatcctgcaaagtcgtg

SEQ ID NO: 2446270 - DNA, 25 bp, Homo sapien
agactggtgacccatgcagctggga

SEQ ID NO: 2446271 - DNA, 25 bp, Homo sapien
tggtgacccatgcagctgggaacat

SEQ ID NO: 2446272 - DNA, 25 bp, Homo sapien
gtgacccatgcagctgggaacatac

SEQ ID NO: 2446273 - DNA, 25 bp, Homo sapien
tcagactggtgacccatgcagctgg

SEQ ID NO: 2446274 - DNA, 25 bp, Homo sapien
tgaggtctgtctcggtctacaccct

SEQ ID NO: 2446275 - DNA, 25 bp, Homo sapien
aggtctgtcaagttccgtttcgatg

SEQ ID NO: 2446276 - DNA, 25 bp, Homo sapien
tttcgatgattccaggctctgctga

SEQ ID NO: 2446277 - DNA, 25 bp, Homo sapien
cggtctacaccctcccagaatggct

SEQ ID NO: 2446278 - DNA, 25 bp, Homo sapien
ccctttggacctgtatatgtgattt

SEQ ID NO: 2446279 - DNA, 25 bp, Homo sapien
caccctcttgttcctccactgcttc

SEQ ID NO: 2446280 - DNA, 25 bp, Homo sapien
tcaggtgcccttcatgtgagggaag

SEQ ID NO: 2446281 - DNA, 25 bp, Homo sapien
gggcttctgtttctcgaagaagttg

SEQ ID NO: 2446282 - DNA, 25 bp, Homo sapien
ttctgtttctcgaagaagttggtgg

SEQ ID NO: 2446283 - DNA, 25 bp, Homo sapien
tcatacacgaaataaaatttgagaa

SEQ ID NO: 2446284 - DNA, 25 bp, Homo sapien
taaaatttgagaaatttcgatatcg

SEQ ID NO: 2446285 - DNA, 25 bp, Homo sapien
catacacgaaataaaatttgagaaa

SEQ ID NO: 2446286 - DNA, 25 bp, Homo sapien
aatttgagaaatttcgatatcgtca

SEQ ID NO: 2446287 - DNA, 25 bp, Homo sapien
tgagatcaggagtgtatccaccatc

SEQ ID NO: 2446288 - DNA, 25 bp, Homo sapien
cttgagatcaggagtgtatccacca

SEQ ID NO: 2446289 - DNA, 25 bp, Homo sapien
gagatcaggagtgtatccaccatca

SEQ ID NO: 2446290 - DNA, 25 bp, Homo sapien
agatcaggagtgtatccaccatcat

SEQ ID NO: 2446291 - DNA, 25 bp, Homo sapien
gaatgagtcccctagaataactcat

SEQ ID NO: 2446292 - DNA, 25 bp, Homo sapien
ctggaatgagtcccctagaataact

SEQ ID NO: 2446293 - DNA, 25 bp, Homo sapien
ggaatgagtcccctagaataactca

SEQ ID NO: 2446294 - DNA, 25 bp, Homo sapien
tggaatgagtcccctagaataactc

SEQ ID NO: 2446295 - DNA, 25 bp, Homo sapien
ttggcttcccatccaactattgctt

SEQ ID NO: 2446296 - DNA, 25 bp, Homo sapien
agcagaaggagcagattttttcgga

SEQ ID NO: 2446297 - DNA, 25 bp, Homo sapien
catccaactattgcttcttgccaca

SEQ ID NO: 2446298 - DNA, 25 bp, Homo sapien
tcggaggaggacctccacttcttga

SEQ ID NO: 2446299 - DNA, 25 bp, Homo sapien
tccaggaagatattgtcgctctgcg

SEQ ID NO: 2446300 - DNA, 25 bp, Homo sapien
tcttgttgacatgcgatcatttctc

SEQ ID NO: 2446301 - DNA, 25 bp, Homo sapien
gctctgcgtggaggaactccataat

SEQ ID NO: 2446302 - DNA, 25 bp, Homo sapien
ccatcatgtcttgttgacatgcgat

SEQ ID NO: 2446303 - DNA, 25 bp, Homo sapien
cccgattagaatgaccattatcacg

SEQ ID NO: 2446304 - DNA, 25 bp, Homo sapien
ccgattagaatgaccattatcacgg

SEQ ID NO: 2446305 - DNA, 25 bp, Homo sapien
aatcacggtatgcatggcctctaga

SEQ ID NO: 2446306 - DNA, 25 bp, Homo sapien
gagcataatccctagtttctcggga

SEQ ID NO: 2446307 - DNA, 25 bp, Homo sapien
ggcctctagatggtggagcataatc

SEQ ID NO: 2446308 - DNA, 25 bp, Homo sapien
cataatcacggtatgcatggcctct

SEQ ID NO: 2446309 - DNA, 25 bp, Homo sapien
tcctctagaataactttcatcccga

SEQ ID NO: 2446310 - DNA, 25 bp, Homo sapien
tagaataactttcatcccgacgaga

SEQ ID NO: 2446311 - DNA, 25 bp, Homo sapien
tgtatcctctagaataactttcatc

SEQ ID NO: 2446312 - DNA, 25 bp, Homo sapien
aataactttcatcccgacgagaatg

SEQ ID NO: 2446313 - DNA, 25 bp, Homo sapien
ggtatccatggcctctagatggtgg

SEQ ID NO: 2446314 - DNA, 25 bp, Homo sapien
gatggtggagcatactccctagttt

SEQ ID NO: 2446315 - DNA, 25 bp, Homo sapien
tatccatggcctctagatggtggag

SEQ ID NO: 2446316 - DNA, 25 bp, Homo sapien
ggtggagcatactccctagtttctc

SEQ ID NO: 2446317 - DNA, 25 bp, Homo sapien
actttcatgtcgacgagaatgacca

SEQ ID NO: 2446318 - DNA, 25 bp, Homo sapien
gaataactttcatgtcgacgagaat

SEQ ID NO: 2446319 - DNA, 25 bp, Homo sapien
aataactttcatgtcgacgagaatg

SEQ ID NO: 2446320 - DNA, 25 bp, Homo sapien
taactttcatgtcgacgagaatgac

SEQ ID NO: 2446321 - DNA, 25 bp, Homo sapien
catagtctctatgtggtggagcata

SEQ ID NO: 2446322 - DNA, 25 bp, Homo sapien
tggtttctcgggaacttggatgatt

SEQ ID NO: 2446323 - DNA, 25 bp, Homo sapien
cctggtttctcgggaacttggatga

SEQ ID NO: 2446324 - DNA, 25 bp, Homo sapien
gcataatccctggtttctcgggaac

SEQ ID NO: 2446325 - DNA, 25 bp, Homo sapien
tatatcctctagaggaatgttcatc

SEQ ID NO: 2446326 - DNA, 25 bp, Homo sapien
aatgttcatcccaactagaatgacc

SEQ ID NO: 2446327 - DNA, 25 bp, Homo sapien
aggaatgttcatcccaactagaatg

SEQ ID NO: 2446328 - DNA, 25 bp, Homo sapien
tcatcccaactagaatgaccataat

SEQ ID NO: 2446329 - DNA, 25 bp, Homo sapien
ctaccaagggcctcaccgtagccat

SEQ ID NO: 2446330 - DNA, 25 bp, Homo sapien
gatctctaccaagggcctcaccgta

SEQ ID NO: 2446331 - DNA, 25 bp, Homo sapien
aagggcctcaccgtagccatcatga

SEQ ID NO: 2446332 - DNA, 25 bp, Homo sapien
ggcctcaccgtagccatcatgataa

SEQ ID NO: 2446333 - DNA, 25 bp, Homo sapien
tctcgtgtattactatatgcgtggc

SEQ ID NO: 2446334 - DNA, 25 bp, Homo sapien
gtattactatatgcgtggcaggtgc

SEQ ID NO: 2446335 - DNA, 25 bp, Homo sapien
cgtgtattactatatgcgtggcagg

SEQ ID NO: 2446336 - DNA, 25 bp, Homo sapien
ctatctcgtgtattactatatgcgt

SEQ ID NO: 2446337 - DNA, 25 bp, Homo sapien
ccaccatctactatagatgccacat

SEQ ID NO: 2446338 - DNA, 25 bp, Homo sapien
gatcagggagcaccctacccagaga

SEQ ID NO: 2446339 - DNA, 25 bp, Homo sapien
ttctgcaaacatgctcacgatcaca

SEQ ID NO: 2446340 - DNA, 25 bp, Homo sapien
tatctgctcgagtctcctttttcag

SEQ ID NO: 2446341 - DNA, 25 bp, Homo sapien
ctcaggccgtacgtaaccggcttcg

SEQ ID NO: 2446342 - DNA, 25 bp, Homo sapien
aaagagcctgaggttcgcctggccc

SEQ ID NO: 2446343 - DNA, 25 bp, Homo sapien
gccaactgcgggagggacagctgga

SEQ ID NO: 2446344 - DNA, 25 bp, Homo sapien
gcttcggaacaccacagggccaact

SEQ ID NO: 2446345 - DNA, 25 bp, Homo sapien
ctgatatgggaccatgtttcccaaa

SEQ ID NO: 2446346 - DNA, 25 bp, Homo sapien
cttctgatatgggaccatgtttccc

SEQ ID NO: 2446347 - DNA, 25 bp, Homo sapien
ccaaatactgctttaagcatcttct

SEQ ID NO: 2446348 - DNA, 25 bp, Homo sapien
aagcttgccaggatgatctgcttct

SEQ ID NO: 2446349 - DNA, 25 bp, Homo sapien
tttgctggttcgatcctttatcaaa

SEQ ID NO: 2446350 - DNA, 25 bp, Homo sapien
gatttgctggttcgatcctttatca

SEQ ID NO: 2446351 - DNA, 25 bp, Homo sapien
tgctggttcgatcctttatcaaaag

SEQ ID NO: 2446352 - DNA, 25 bp, Homo sapien
tggatttgctggttcgatcctttat

SEQ ID NO: 2446353 - DNA, 25 bp, Homo sapien
cccacggctgcttccttcccagtgt

SEQ ID NO: 2446354 - DNA, 25 bp, Homo sapien
tttccccagatttgcccacggctgc

SEQ ID NO: 2446355 - DNA, 25 bp, Homo sapien
atattttccccagatttgcccacgg

SEQ ID NO: 2446356 - DNA, 25 bp, Homo sapien
ttctgggctcaaaatattttcccca

SEQ ID NO: 2446357 - DNA, 25 bp, Homo sapien
aggtgcccttcttgtgagggaagcc

SEQ ID NO: 2446358 - DNA, 25 bp, Homo sapien
ccaggtgcccttcttgtgagggaag

SEQ ID NO: 2446359 - DNA, 25 bp, Homo sapien
aagccaccctcttgttcctccacgg

SEQ ID NO: 2446360 - DNA, 25 bp, Homo sapien
ccctcttgttcctccacggcttcct

SEQ ID NO: 2446361 - DNA, 25 bp, Homo sapien
ttaagaaatttcaatatcgtcaaac

SEQ ID NO: 2446362 - DNA, 25 bp, Homo sapien
tttctttcagtcctatggttccatc

SEQ ID NO: 2446363 - DNA, 25 bp, Homo sapien
ctatggttccatctttatattttaa

SEQ ID NO: 2446364 - DNA, 25 bp, Homo sapien
taagaaatttcaatatcgtcaaact

SEQ ID NO: 2446365 - DNA, 25 bp, Homo sapien
tgagatcaggagtgtatccaccatc

SEQ ID NO: 2446366 - DNA, 25 bp, Homo sapien
agatcaggagtgtatccaccatcat

SEQ ID NO: 2446367 - DNA, 25 bp, Homo sapien
cttgagatcaggagtgtatccacca

SEQ ID NO: 2446368 - DNA, 25 bp, Homo sapien
gagatcaggagtgtatccaccatca

SEQ ID NO: 2446369 - DNA, 25 bp, Homo sapien
gaatgagtcccctagaataactcat

SEQ ID NO: 2446370 - DNA, 25 bp, Homo sapien
actggaatgagtcccctagaataac

SEQ ID NO: 2446371 - DNA, 25 bp, Homo sapien
taactggaatgagtcccctagaata

SEQ ID NO: 2446372 - DNA, 25 bp, Homo sapien
ctcttttaactggaatgagtcccct

SEQ ID NO: 2446373 - DNA, 25 bp, Homo sapien
tccaggaagatattgtcgctctgcg

SEQ ID NO: 2446374 - DNA, 25 bp, Homo sapien
tcttgttgacatgcgatcatttctc

SEQ ID NO: 2446375 - DNA, 25 bp, Homo sapien
gctctgcgtggaggaactccataat

SEQ ID NO: 2446376 - DNA, 25 bp, Homo sapien
ccatcatgtcttgttgacatgcgat

SEQ ID NO: 2446377 - DNA, 25 bp, Homo sapien
ccctcgtttcttggcaacttggatg

SEQ ID NO: 2446378 - DNA, 25 bp, Homo sapien
cccgattagaatgaccattatcacg

SEQ ID NO: 2446379 - DNA, 25 bp, Homo sapien
gcataatccctcgtttcttggcaac

SEQ ID NO: 2446380 - DNA, 25 bp, Homo sapien
ccgattagaatgaccattatcacgg

SEQ ID NO: 2446381 - DNA, 25 bp, Homo sapien
aatcacggtatgcatggcctctaga

SEQ ID NO: 2446382 - DNA, 25 bp, Homo sapien
gagcataatccctagtttctcggga

SEQ ID NO: 2446383 - DNA, 25 bp, Homo sapien
ggcctctagatggtggagcataatc

SEQ ID NO: 2446384 - DNA, 25 bp, Homo sapien
cataatcacggtatgcatggcctct

SEQ ID NO: 2446385 - DNA, 25 bp, Homo sapien
tagaataactttcatcccgacgaga

SEQ ID NO: 2446386 - DNA, 25 bp, Homo sapien
tcctctagaataactttcatcccga

SEQ ID NO: 2446387 - DNA, 25 bp, Homo sapien
aataactttcatcccgacgagaatg

SEQ ID NO: 2446388 - DNA, 25 bp, Homo sapien
tgtatcctctagaataactttcatc

SEQ ID NO: 2446389 - DNA, 25 bp, Homo sapien
tatccatggcctctagatggtggag

SEQ ID NO: 2446390 - DNA, 25 bp, Homo sapien
cataatcacggtatccatggcctct

SEQ ID NO: 2446391 - DNA, 25 bp, Homo sapien
ggtggagcatactccctagtttctc

SEQ ID NO: 2446392 - DNA, 25 bp, Homo sapien
cacggtatccatggcctctagatgg

SEQ ID NO: 2446393 - DNA, 25 bp, Homo sapien
gaataactttcatgtcgacgagaat

SEQ ID NO: 2446394 - DNA, 25 bp, Homo sapien
ataactttcatgtcgacgagaatga

SEQ ID NO: 2446395 - DNA, 25 bp, Homo sapien
aataactttcatgtcgacgagaatg

SEQ ID NO: 2446396 - DNA, 25 bp, Homo sapien
taactttcatgtcgacgagaatgac

SEQ ID NO: 2446397 - DNA, 25 bp, Homo sapien
catagtctctatgtggtggagcata

SEQ ID NO: 2446398 - DNA, 25 bp, Homo sapien
tggtttctcgggaacttggatgatt

SEQ ID NO: 2446399 - DNA, 25 bp, Homo sapien
cctggtttctcgggaacttggatga

SEQ ID NO: 2446400 - DNA, 25 bp, Homo sapien
gcataatccctggtttctcgggaac

SEQ ID NO: 2446401 - DNA, 25 bp, Homo sapien
tatatcctctagaggaatgttcatc

SEQ ID NO: 2446402 - DNA, 25 bp, Homo sapien
tcatcccaactagaatgaccataat

SEQ ID NO: 2446403 - DNA, 25 bp, Homo sapien
aggaatgttcatcccaactagaatg

SEQ ID NO: 2446404 - DNA, 25 bp, Homo sapien
aatgttcatcccaactagaatgacc

SEQ ID NO: 2446405 - DNA, 25 bp, Homo sapien
ctaccaagggcctcaccgtagccat

SEQ ID NO: 2446406 - DNA, 25 bp, Homo sapien
gatctctaccaagggcctcaccgta

SEQ ID NO: 2446407 - DNA, 25 bp, Homo sapien
aagggcctcaccgtagccatcatga

SEQ ID NO: 2446408 - DNA, 25 bp, Homo sapien
ggcctcaccgtagccatcatgataa

SEQ ID NO: 2446409 - DNA, 25 bp, Homo sapien
ttctgcaaacatgctcacgatcaca

SEQ ID NO: 2446410 - DNA, 25 bp, Homo sapien
gtattactatatgcgtggcaggtgc

SEQ ID NO: 2446411 - DNA, 25 bp, Homo sapien
aggatcagggagcaccctacccaga

SEQ ID NO: 2446412 - DNA, 25 bp, Homo sapien
tatctgctcgagtctcctttttcag

SEQ ID NO: 2446413 - DNA, 25 bp, Homo sapien
ctcaggccgtacgtaaccggcttcg

SEQ ID NO: 2446414 - DNA, 25 bp, Homo sapien
aaagagcctgaggttcgcctggccc

SEQ ID NO: 2446415 - DNA, 25 bp, Homo sapien
gccaactgcgggagggacagctgga

SEQ ID NO: 2446416 - DNA, 25 bp, Homo sapien
gcttcggaacaccacagggccaact

SEQ ID NO: 2446417 - DNA, 25 bp, Homo sapien
aagcttgccaggatgatctgcttct

SEQ ID NO: 2446418 - DNA, 25 bp, Homo sapien
cttctgatatgggaccatgtttccc

SEQ ID NO: 2446419 - DNA, 25 bp, Homo sapien
ccaaatactgctttaagcatcttct

SEQ ID NO: 2446420 - DNA, 25 bp, Homo sapien
ctgatatgggaccatgtttcccaaa

SEQ ID NO: 2446421 - DNA, 25 bp, Homo sapien
tttgctggttcgatcctttatcaaa

SEQ ID NO: 2446422 - DNA, 25 bp, Homo sapien
tggatttgctggttcgatcctttat

SEQ ID NO: 2446423 - DNA, 25 bp, Homo sapien
gatttgctggttcgatcctttatca

SEQ ID NO: 2446424 - DNA, 25 bp, Homo sapien
tgctggttcgatcctttatcaaaag

SEQ ID NO: 2446425 - DNA, 25 bp, Homo sapien
cccacggctgcttccttcccagtgt

SEQ ID NO: 2446426 - DNA, 25 bp, Homo sapien
tttccccagatttgcccacggctgc

SEQ ID NO: 2446427 - DNA, 25 bp, Homo sapien
ttctgggctcaaaatattttcccca

SEQ ID NO: 2446428 - DNA, 25 bp, Homo sapien
atattttccccagatttgcccacgg

SEQ ID NO: 2446429 - DNA, 25 bp, Homo sapien
ccaggtgcccttcatgtgagggaag

SEQ ID NO: 2446430 - DNA, 25 bp, Homo sapien
ttctgtttctcgaagaagctggtgg

SEQ ID NO: 2446431 - DNA, 25 bp, Homo sapien
ccctcttgttcctccacggcttcct

SEQ ID NO: 2446432 - DNA, 25 bp, Homo sapien
tcatgtgagggaagccaccctcttg

SEQ ID NO: 2446433 - DNA, 25 bp, Homo sapien
ctatggttccatctttatattttaa

SEQ ID NO: 2446434 - DNA, 25 bp, Homo sapien
ttaagaaatttcaatatcgtcaaac

SEQ ID NO: 2446435 - DNA, 25 bp, Homo sapien
tttctttcagtcctatggttccatc

SEQ ID NO: 2446436 - DNA, 25 bp, Homo sapien
taagaaatttcaatatcgtcaaact

SEQ ID NO: 2446437 - DNA, 25 bp, Homo sapien
agatcaggagtgtatccaccatcat

SEQ ID NO: 2446438 - DNA, 25 bp, Homo sapien
tgagatcaggagtgtatccaccatc

SEQ ID NO: 2446439 - DNA, 25 bp, Homo sapien
cttgagatcaggagtgtatccacca

SEQ ID NO: 2446440 - DNA, 25 bp, Homo sapien
gagatcaggagtgtatccaccatca

SEQ ID NO: 2446441 - DNA, 25 bp, Homo sapien
gaatgagtcccctagaataactcat

SEQ ID NO: 2446442 - DNA, 25 bp, Homo sapien
actggaatgagtcccctagaataac

SEQ ID NO: 2446443 - DNA, 25 bp, Homo sapien
ctcttttaactggaatgagtcccct

SEQ ID NO: 2446444 - DNA, 25 bp, Homo sapien
taactggaatgagtcccctagaata

SEQ ID NO: 2446445 - DNA, 25 bp, Homo sapien
tccaggaagatattgtcgctctgcg

SEQ ID NO: 2446446 - DNA, 25 bp, Homo sapien
tcttgttgacatgcgatcatttctc

SEQ ID NO: 2446447 - DNA, 25 bp, Homo sapien
ccatcatgtcttgttgacatgcgat

SEQ ID NO: 2446448 - DNA, 25 bp, Homo sapien
gctctgcgtggaggaactccataat

SEQ ID NO: 2446449 - DNA, 25 bp, Homo sapien
ccctcgtttcttggcaacttggatg

SEQ ID NO: 2446450 - DNA, 25 bp, Homo sapien
cccgattagaatgaccattatcacg

SEQ ID NO: 2446451 - DNA, 25 bp, Homo sapien
gcataatccctcgtttcttggcaac

SEQ ID NO: 2446452 - DNA, 25 bp, Homo sapien
ccgattagaatgaccattatcacgg

SEQ ID NO: 2446453 - DNA, 25 bp, Homo sapien
aatcacggtatgcatggcctctaga

SEQ ID NO: 2446454 - DNA, 25 bp, Homo sapien
gagcataatccctagtttctcggga

SEQ ID NO: 2446455 - DNA, 25 bp, Homo sapien
ggcctctagatggtggagcataatc

SEQ ID NO: 2446456 - DNA, 25 bp, Homo sapien
cataatcacggtatgcatggcctct

SEQ ID NO: 2446457 - DNA, 25 bp, Homo sapien
tagaataactttcatcccgacgaga

SEQ ID NO: 2446458 - DNA, 25 bp, Homo sapien
tgtatcctctagaataactttcatc

SEQ ID NO: 2446459 - DNA, 25 bp, Homo sapien
tcctctagaataactttcatcccga

SEQ ID NO: 2446460 - DNA, 25 bp, Homo sapien
aataactttcatcccgacgagaatg

SEQ ID NO: 2446461 - DNA, 25 bp, Homo sapien
cacggtatccatggcctctagatgg

SEQ ID NO: 2446462 - DNA, 25 bp, Homo sapien
tatccatggcctctagatggtggag

SEQ ID NO: 2446463 - DNA, 25 bp, Homo sapien
cataatcacggtatccatggcctct

SEQ ID NO: 2446464 - DNA, 25 bp, Homo sapien
ggtggagcatactccctagtttctc

SEQ ID NO: 2446465 - DNA, 25 bp, Homo sapien
cacggtatgcatagtctctatgtgg

SEQ ID NO: 2446466 - DNA, 25 bp, Homo sapien
atagtctctatgtggtggagcataa

SEQ ID NO: 2446467 - DNA, 25 bp, Homo sapien
tatgcatagtctctatgtggtggag

SEQ ID NO: 2446468 - DNA, 25 bp, Homo sapien
taatcacggtatgcatagtctctat

SEQ ID NO: 2446469 - DNA, 25 bp, Homo sapien
ctaccaagggcctcaccgtagccat

SEQ ID NO: 2446470 - DNA, 25 bp, Homo sapien
gatctctaccaagggcctcaccgta

SEQ ID NO: 2446471 - DNA, 25 bp, Homo sapien
aagggcctcaccgtagccatcatga

SEQ ID NO: 2446472 - DNA, 25 bp, Homo sapien
ggcctcaccgtagccatcatgataa

SEQ ID NO: 2446473 - DNA, 25 bp, Homo sapien
ttctgcaaacatgctcacgatcaca

SEQ ID NO: 2446474 - DNA, 25 bp, Homo sapien
gtattactatatgcgtggcaggtgc

SEQ ID NO: 2446475 - DNA, 25 bp, Homo sapien
aggatcagggagcaccctacccaga

SEQ ID NO: 2446476 - DNA, 25 bp, Homo sapien
tatctgctcgagtctcctttttcag

SEQ ID NO: 2446477 - DNA, 25 bp, Homo sapien
ttcagtaatatgcaggtaacaatgc

SEQ ID NO: 2446478 - DNA, 25 bp, Homo sapien
gatattacatctaaacacttttcaa

SEQ ID NO: 2446479 - DNA, 25 bp, Homo sapien
ctctctccacaaaaccaacatgttt

SEQ ID NO: 2446480 - DNA, 25 bp, Homo sapien
caaacaaggattggtatgcaataac

SEQ ID NO: 2446481 - DNA, 25 bp, Homo sapien
tggaggcacagcaccagctgaggga

SEQ ID NO: 2446482 - DNA, 25 bp, Homo sapien
gctgagggattcactctgccacagc

SEQ ID NO: 2446483 - DNA, 25 bp, Homo sapien
ctgagggattcactctgccacagct

SEQ ID NO: 2446484 - DNA, 25 bp, Homo sapien
cacagcaccagctgagggattcact

SEQ ID NO: 2446485 - DNA, 25 bp, Homo sapien
ggattcgctattcgggaatccctgt

SEQ ID NO: 2446486 - DNA, 25 bp, Homo sapien
agggctttgggattcgctattcggg

SEQ ID NO: 2446487 - DNA, 25 bp, Homo sapien
ttcgctattcgggaatccctgtgca

SEQ ID NO: 2446488 - DNA, 25 bp, Homo sapien
ctttgggattcgctattcgggaatc

SEQ ID NO: 2446489 - DNA, 25 bp, Homo sapien
ataggagccccatggacccttcact

SEQ ID NO: 2446490 - DNA, 25 bp, Homo sapien
aaacttgaagggcatgtttccatga

SEQ ID NO: 2446491 - DNA, 25 bp, Homo sapien
ttgaagggcatgtttccatgagaaa

SEQ ID NO: 2446492 - DNA, 25 bp, Homo sapien
agcagaaacttgaagggcatgtttc

SEQ ID NO: 2446493 - DNA, 25 bp, Homo sapien
taggagggcagcttgcttgggggtg

SEQ ID NO: 2446494 - DNA, 25 bp, Homo sapien
gataggagggcagcttgcttggggg

SEQ ID NO: 2446495 - DNA, 25 bp, Homo sapien
ctgcagataggagggcagcttgctt

SEQ ID NO: 2446496 - DNA, 25 bp, Homo sapien
ggagggcagcttgcttgggggtgcc

SEQ ID NO: 2446497 - DNA, 25 bp, Homo sapien
caaggggcacacggggacaaccagg

SEQ ID NO: 2446498 - DNA, 25 bp, Homo sapien
ggcacacggggacaaccaggaggca

SEQ ID NO: 2446499 - DNA, 25 bp, Homo sapien
gcccacagctgagatgtaagctttg

SEQ ID NO: 2446500 - DNA, 25 bp, Homo sapien
ccacagctgagatgtaagctttggc

SEQ ID NO: 2446501 - DNA, 25 bp, Homo sapien
tggagatggatgtgcttcaaaacca

SEQ ID NO: 2446502 - DNA, 25 bp, Homo sapien
ttctccgtggtcaggtccccctgga

SEQ ID NO: 2446503 - DNA, 25 bp, Homo sapien
ccagaatcaggtcccgtgaagtttg

SEQ ID NO: 2446504 - DNA, 25 bp, Homo sapien
gatggatgtgcttcaaaaccatgag

SEQ ID NO: 2446505 - DNA, 25 bp, Homo sapien
gatggccgggcccttgatctcactg

SEQ ID NO: 2446506 - DNA, 25 bp, Homo sapien
ccagaggcgggtgtctgtggaagat

SEQ ID NO: 2446507 - DNA, 25 bp, Homo sapien
ggaagatggccgggcccttgatctc

SEQ ID NO: 2446508 - DNA, 25 bp, Homo sapien
agatggccgggcccttgatctcact

SEQ ID NO: 2446509 - DNA, 25 bp, Homo sapien
tgccagcagaacaacaacaaacact

SEQ ID NO: 2446510 - DNA, 25 bp, Homo sapien
agcagaacaacaacaaacacttttc

SEQ ID NO: 2446511 - DNA, 25 bp, Homo sapien
cagaacaacaacaaacacttttcct

SEQ ID NO: 2446512 - DNA, 25 bp, Homo sapien
ccagcagaacaacaacaaacacttt

SEQ ID NO: 2446513 - DNA, 25 bp, Homo sapien
gtgggatacgtgggatattcccata

SEQ ID NO: 2446514 - DNA, 25 bp, Homo sapien
tctgtgggatacgtgggatattccc

SEQ ID NO: 2446515 - DNA, 25 bp, Homo sapien
tgggatacgtgggatattcccataa

SEQ ID NO: 2446516 - DNA, 25 bp, Homo sapien
ctctgtgggatacgtgggatattcc

SEQ ID NO: 2446517 - DNA, 25 bp, Homo sapien
ggtccctgagttcaagacttttagc

SEQ ID NO: 2446518 - DNA, 25 bp, Homo sapien
gacttttagcatcttgcagtgggtt

SEQ ID NO: 2446519 - DNA, 25 bp, Homo sapien
atgccttctctccagtaggacccaa

SEQ ID NO: 2446520 - DNA, 25 bp, Homo sapien
tctccagtaggacccaaccatggag

SEQ ID NO: 2446521 - DNA, 25 bp, Homo sapien
cagtgaagatctgatggcacagagc

SEQ ID NO: 2446522 - DNA, 25 bp, Homo sapien
ctgcaaaaacagtgaagatctgatg

SEQ ID NO: 2446523 - DNA, 25 bp, Homo sapien
aaaaacagtgaagatctgatggcac

SEQ ID NO: 2446524 - DNA, 25 bp, Homo sapien
acagtgaagatctgatggcacagag

SEQ ID NO: 2446525 - DNA, 25 bp, Homo sapien
gttgtgagggtgcactccactatca

SEQ ID NO: 2446526 - DNA, 25 bp, Homo sapien
caggaatttggttcgcagtagagca

SEQ ID NO: 2446527 - DNA, 25 bp, Homo sapien
aggaatttggttcgcagtagagcag

SEQ ID NO: 2446528 - DNA, 25 bp, Homo sapien
tgtgagggtgcactccactatcatc

SEQ ID NO: 2446529 - DNA, 25 bp, Homo sapien
atcaccatgggaccggatttctgca

SEQ ID NO: 2446530 - DNA, 25 bp, Homo sapien
gggaccggatttctgcactctttca

SEQ ID NO: 2446531 - DNA, 25 bp, Homo sapien
catgggaccggatttctgcactctt

SEQ ID NO: 2446532 - DNA, 25 bp, Homo sapien
accggatttctgcactctttcaggg

SEQ ID NO: 2446533 - DNA, 25 bp, Homo sapien
taggagcttcacgtcatcagggggc

SEQ ID NO: 2446534 - DNA, 25 bp, Homo sapien
gagtaggagcttcacgtcatcaggg

SEQ ID NO: 2446535 - DNA, 25 bp, Homo sapien
gtaggagcttcacgtcatcaggggg

SEQ ID NO: 2446536 - DNA, 25 bp, Homo sapien
agtaggagcttcacgtcatcagggg

SEQ ID NO: 2446537 - DNA, 25 bp, Homo sapien
tctcagtgggttttcgcagacagcc

SEQ ID NO: 2446538 - DNA, 25 bp, Homo sapien
gttctgaaagccttgcgcgggagcc

SEQ ID NO: 2446539 - DNA, 25 bp, Homo sapien
tgacctcagagtggcgaaacggctc

SEQ ID NO: 2446540 - DNA, 25 bp, Homo sapien
gaccggaccatggagatgacacgaa

SEQ ID NO: 2446541 - DNA, 25 bp, Homo sapien
ccagatgatcaggtgcttcacatct

SEQ ID NO: 2446542 - DNA, 25 bp, Homo sapien
cagttcccagatgatcaggtgcttc

SEQ ID NO: 2446543 - DNA, 25 bp, Homo sapien
ctcgaattcagttcccagatgatca

SEQ ID NO: 2446544 - DNA, 25 bp, Homo sapien
tgcttcacatcttgagggggcagtc

SEQ ID NO: 2446545 - DNA, 25 bp, Homo sapien
aacaaccggactgtagtggaggtag

SEQ ID NO: 2446546 - DNA, 25 bp, Homo sapien
gtagtggaggtagtcaccctgtatc

SEQ ID NO: 2446547 - DNA, 25 bp, Homo sapien
accctagaacaaccggactgtagtg

SEQ ID NO: 2446548 - DNA, 25 bp, Homo sapien
catgaccctagaacaaccggactgt

SEQ ID NO: 2446549 - DNA, 25 bp, Homo sapien
tataatgatatctaaacacatcatc

SEQ ID NO: 2446550 - DNA, 25 bp, Homo sapien
tctaaacacatcatctcggagatct

SEQ ID NO: 2446551 - DNA, 25 bp, Homo sapien
aattgtcttaggagatcaatattgt

SEQ ID NO: 2446552 - DNA, 25 bp, Homo sapien
gatcaatattgtacgctttcctatc

SEQ ID NO: 2446553 - DNA, 25 bp, Homo sapien
gccagccgagctggctgttccagtc

SEQ ID NO: 2446554 - DNA, 25 bp, Homo sapien
caatatttaagaagtaaacaactgc

SEQ ID NO: 2446555 - DNA, 25 bp, Homo sapien
tgttccagtctgtcgctcaccaaac

SEQ ID NO: 2446556 - DNA, 25 bp, Homo sapien
tctgcttttgagctacttgtagcac

SEQ ID NO: 2446557 - DNA, 25 bp, Homo sapien
tccctggtggaagagcttgggcttg

SEQ ID NO: 2446558 - DNA, 25 bp, Homo sapien
tggaagagcttgggcttggtctcat

SEQ ID NO: 2446559 - DNA, 25 bp, Homo sapien
ggtggaagagcttgggcttggtctc

SEQ ID NO: 2446560 - DNA, 25 bp, Homo sapien
cctggtggaagagcttgggcttggt

SEQ ID NO: 2446561 - DNA, 25 bp, Homo sapien
aagtgtcatcccgtttgtcataacc

SEQ ID NO: 2446562 - DNA, 25 bp, Homo sapien
tgaaccaaatactctgtcttctctt

SEQ ID NO: 2446563 - DNA, 25 bp, Homo sapien
agttcacaatgtgctgctctggttc

SEQ ID NO: 2446564 - DNA, 25 bp, Homo sapien
tccactgaaccaaatactctgtctt

SEQ ID NO: 2446565 - DNA, 25 bp, Homo sapien
ctgcattcagtgtgttttctcctgt

SEQ ID NO: 2446566 - DNA, 25 bp, Homo sapien
attcagtgtgttttctcctgtcaat

SEQ ID NO: 2446567 - DNA, 25 bp, Homo sapien
gcattcagtgtgttttctcctgtca

SEQ ID NO: 2446568 - DNA, 25 bp, Homo sapien
tacttctgcattcagtgtgttttct

SEQ ID NO: 2446569 - DNA, 25 bp, Homo sapien
gctgaacagcacaagtttgctatca

SEQ ID NO: 2446570 - DNA, 25 bp, Homo sapien
tgtgctgaacagcacaagtttgcta

SEQ ID NO: 2446571 - DNA, 25 bp, Homo sapien
tgctgaacagcacaagtttgctatc

SEQ ID NO: 2446572 - DNA, 25 bp, Homo sapien
gaacagcacaagtttgctatcatct

SEQ ID NO: 2446573 - DNA, 25 bp, Homo sapien
tcattagcccaaatcaagtgacaaa

SEQ ID NO: 2446574 - DNA, 25 bp, Homo sapien
tcaagtgacaaagaggcagtatgga

SEQ ID NO: 2446575 - DNA, 25 bp, Homo sapien
ctgtcattagcccaaatcaagtgac

SEQ ID NO: 2446576 - DNA, 25 bp, Homo sapien
tttgaaaccaaagctgtcattagcc

SEQ ID NO: 2446577 - DNA, 25 bp, Homo sapien
caaactccatcttaatattacagct

SEQ ID NO: 2446578 - DNA, 25 bp, Homo sapien
ttaatattacagctagcaagggcct

SEQ ID NO: 2446579 - DNA, 25 bp, Homo sapien
tacagctagcaagggccttacattc

SEQ ID NO: 2446580 - DNA, 25 bp, Homo sapien
catcttaatattacagctagcaagg

SEQ ID NO: 2446581 - DNA, 25 bp, Homo sapien
tggaagaataaggatggcccaagag

SEQ ID NO: 2446582 - DNA, 25 bp, Homo sapien
tctcagtgatcaaggaccagatctg

SEQ ID NO: 2446583 - DNA, 25 bp, Homo sapien
ataaggatggcccaagagtacagaa

SEQ ID NO: 2446584 - DNA, 25 bp, Homo sapien
gtggcagtctcagtgatcaaggacc

SEQ ID NO: 2446585 - DNA, 25 bp, Homo sapien
accgcataggcggatgtccgcgaac

SEQ ID NO: 2446586 - DNA, 25 bp, Homo sapien
cataggcggatgtccgcgaacgaca

SEQ ID NO: 2446587 - DNA, 25 bp, Homo sapien
tgagaccgcataggcggatgtccgc

SEQ ID NO: 2446588 - DNA, 25 bp, Homo sapien
ctgagaccgcataggcggatgtccg

SEQ ID NO: 2446589 - DNA, 25 bp, Homo sapien
aatgtggcttgcacgttggagtact

SEQ ID NO: 2446590 - DNA, 25 bp, Homo sapien
aaatgtggcttgcacgttggagtac

SEQ ID NO: 2446591 - DNA, 25 bp, Homo sapien
tgtggcttgcacgttggagtactcc

SEQ ID NO: 2446592 - DNA, 25 bp, Homo sapien
caaatgtggcttgcacgttggagta

SEQ ID NO: 2446593 - DNA, 25 bp, Homo sapien
gactatcccatggatcccacagata

SEQ ID NO: 2446594 - DNA, 25 bp, Homo sapien
catgggactatcccatggatcccac

SEQ ID NO: 2446595 - DNA, 25 bp, Homo sapien
tgggactatcccatggatcccacag

SEQ ID NO: 2446596 - DNA, 25 bp, Homo sapien
ctatcccatggatcccacagataag

SEQ ID NO: 2446597 - DNA, 25 bp, Homo sapien
ctgaagtctcttttgctctctgaaa

SEQ ID NO: 2446598 - DNA, 25 bp, Homo sapien
aagtctcttttgctctctgaaatct

SEQ ID NO: 2446599 - DNA, 25 bp, Homo sapien
tcttttgctctctgaaatctccagc

SEQ ID NO: 2446600 - DNA, 25 bp, Homo sapien
gtctcttttgctctctgaaatctcc

SEQ ID NO: 2446601 - DNA, 25 bp, Homo sapien
tcttggtcgggtttcactagaggtg

SEQ ID NO: 2446602 - DNA, 25 bp, Homo sapien
gaatcgggtcccataacaattggaa

SEQ ID NO: 2446603 - DNA, 25 bp, Homo sapien
caagccatcttcttggtcgggtttc

SEQ ID NO: 2446604 - DNA, 25 bp, Homo sapien
tggagccaatttgagactgtggcct

SEQ ID NO: 2446605 - DNA, 25 bp, Homo sapien
tcctggggctatgtttgatctttct

SEQ ID NO: 2446606 - DNA, 25 bp, Homo sapien
ttttgcagattattcctggggctat

SEQ ID NO: 2446607 - DNA, 25 bp, Homo sapien
tttgcagattattcctggggctatg

SEQ ID NO: 2446608 - DNA, 25 bp, Homo sapien
tggggctatgtttgatctttcttca

SEQ ID NO: 2446609 - DNA, 25 bp, Homo sapien
ccacagaaactacagccctgcaggt

SEQ ID NO: 2446610 - DNA, 25 bp, Homo sapien
cccacagaaactacagccctgcagg

SEQ ID NO: 2446611 - DNA, 25 bp, Homo sapien
cacagaaactacagccctgcaggtc

SEQ ID NO: 2446612 - DNA, 25 bp, Homo sapien
agtccaaacgttccctgcatggaga

SEQ ID NO: 2446613 - DNA, 25 bp, Homo sapien
aaacgttccctgcatggagaagtac

SEQ ID NO: 2446614 - DNA, 25 bp, Homo sapien
tccaaacgttccctgcatggagaag

SEQ ID NO: 2446615 - DNA, 25 bp, Homo sapien
gcagtccaaacgttccctgcatgga

SEQ ID NO: 2446616 - DNA, 25 bp, Homo sapien
ttcatcatacaggaatcttgcagcc

SEQ ID NO: 2446617 - DNA, 25 bp, Homo sapien
tttcatcatacaggaatcttgcagc

SEQ ID NO: 2446618 - DNA, 25 bp, Homo sapien
tcatcatacaggaatcttgcagccc

SEQ ID NO: 2446619 - DNA, 25 bp, Homo sapien
tacaatgtctaggcaggcctgagga

SEQ ID NO: 2446620 - DNA, 25 bp, Homo sapien
ccctacaatgtctaggcaggcctga

SEQ ID NO: 2446621 - DNA, 25 bp, Homo sapien
ctacaatgtctaggcaggcctgagg

SEQ ID NO: 2446622 - DNA, 25 bp, Homo sapien
cctacaatgtctaggcaggcctgag

SEQ ID NO: 2446623 - DNA, 25 bp, Homo sapien
taatctagactctgtttcactttta

SEQ ID NO: 2446624 - DNA, 25 bp, Homo sapien
ggtaatctagactctgtttcacttt

SEQ ID NO: 2446625 - DNA, 25 bp, Homo sapien
tctcattgttgagtggatctttcat

SEQ ID NO: 2446626 - DNA, 25 bp, Homo sapien
acttttatttgcatggtcttctcat

SEQ ID NO: 2446627 - DNA, 25 bp, Homo sapien
ggatacatggaataatcccatgatc

SEQ ID NO: 2446628 - DNA, 25 bp, Homo sapien
gggatacatggaataatcccatgat

SEQ ID NO: 2446629 - DNA, 25 bp, Homo sapien
ttctctgtgggatacatggaataat

SEQ ID NO: 2446630 - DNA, 25 bp, Homo sapien
tctgtgggatacatggaataatccc

SEQ ID NO: 2446631 - DNA, 25 bp, Homo sapien
tctgcaccaaggagagaccagtctg

SEQ ID NO: 2446632 - DNA, 25 bp, Homo sapien
agtcactgtgtcaacctcatctgca

SEQ ID NO: 2446633 - DNA, 25 bp, Homo sapien
gactttcctctgtgatggttcctga

SEQ ID NO: 2446634 - DNA, 25 bp, Homo sapien
tggtgtgagacaactgcttcacctt

SEQ ID NO: 2446635 - DNA, 25 bp, Homo sapien
cagcaataaggtcagacaggggtga

SEQ ID NO: 2446636 - DNA, 25 bp, Homo sapien
agcagcaataaggtcagacaggggt

SEQ ID NO: 2446637 - DNA, 25 bp, Homo sapien
gtgagcagcaataaggtcagacagg

SEQ ID NO: 2446638 - DNA, 25 bp, Homo sapien
tttgggacatagagtgtgagcagca

SEQ ID NO: 2446639 - DNA, 25 bp, Homo sapien
caagcagtttcttcacatcatgagg

SEQ ID NO: 2446640 - DNA, 25 bp, Homo sapien
attcaggtcccagccaagcagtttc

SEQ ID NO: 2446641 - DNA, 25 bp, Homo sapien
caatactccatcaacttgggttttc

SEQ ID NO: 2446642 - DNA, 25 bp, Homo sapien
gagggggcaatactccatcaacttg

SEQ ID NO: 2446643 - DNA, 25 bp, Homo sapien
gaggtttccctggaggtgtgtcagc

SEQ ID NO: 2446644 - DNA, 25 bp, Homo sapien
agaggtttccctggaggtgtgtcag

SEQ ID NO: 2446645 - DNA, 25 bp, Homo sapien
aggtttccctggaggtgtgtcagca

SEQ ID NO: 2446646 - DNA, 25 bp, Homo sapien
ggtttccctggaggtgtgtcagcag

SEQ ID NO: 2446647 - DNA, 25 bp, Homo sapien
tgcatggctccgtgttatttttctg

SEQ ID NO: 2446648 - DNA, 25 bp, Homo sapien
aaccaggtatctctcagtgtttcca

SEQ ID NO: 2446649 - DNA, 25 bp, Homo sapien
tggaggtgggccaagacccgccagc

SEQ ID NO: 2446650 - DNA, 25 bp, Homo sapien
tcttccagaagagtagcacaccaca

SEQ ID NO: 2446651 - DNA, 25 bp, Homo sapien
ggttcttgattatctgggagagcac

SEQ ID NO: 2446652 - DNA, 25 bp, Homo sapien
cctaagggtagcaatctccacagac

SEQ ID NO: 2446653 - DNA, 25 bp, Homo sapien
tttggttcttgattatctgggagag

SEQ ID NO: 2446654 - DNA, 25 bp, Homo sapien
gggtagcaatctccacagaccgcct

SEQ ID NO: 2446655 - DNA, 25 bp, Homo sapien
tggtgaggatacaacctggtaaggg

SEQ ID NO: 2446656 - DNA, 25 bp, Homo sapien
atacaacctggtaaggggtggattg

SEQ ID NO: 2446657 - DNA, 25 bp, Homo sapien
atagtggtgaggatacaacctggta

SEQ ID NO: 2446658 - DNA, 25 bp, Homo sapien
agtggtgaggatacaacctggtaag

SEQ ID NO: 2446659 - DNA, 25 bp, Homo sapien
agcctgaaggtgctttgagattgag

SEQ ID NO: 2446660 - DNA, 25 bp, Homo sapien
agacagcctgaaggtgctttgagat

SEQ ID NO: 2446661 - DNA, 25 bp, Homo sapien
gaaggtgctttgagattgagactct

SEQ ID NO: 2446662 - DNA, 25 bp, Homo sapien
ctttgagattgagactcttagggtc

SEQ ID NO: 2446663 - DNA, 25 bp, Homo sapien
accacctcagggtctcgaagcacat

SEQ ID NO: 2446664 - DNA, 25 bp, Homo sapien
ccaggaaccacctcagggtctcgaa

SEQ ID NO: 2446665 - DNA, 25 bp, Homo sapien
acctcagggtctcgaagcacatcca

SEQ ID NO: 2446666 - DNA, 25 bp, Homo sapien
ggaaccacctcagggtctcgaagca

SEQ ID NO: 2446667 - DNA, 25 bp, Homo sapien
aaatgggagtgagatgcattgacgc

SEQ ID NO: 2446668 - DNA, 25 bp, Homo sapien
gagatgcattgacgctgggtgggat

SEQ ID NO: 2446669 - DNA, 25 bp, Homo sapien
ccatagccaaatgggagtgagatgc

SEQ ID NO: 2446670 - DNA, 25 bp, Homo sapien
cattcccatagccaaatgggagtga

SEQ ID NO: 2446671 - DNA, 25 bp, Homo sapien
ctgggagtactccaacgtgcaggga

SEQ ID NO: 2446672 - DNA, 25 bp, Homo sapien
caacgtgcagggaacatttggtgtg

SEQ ID NO: 2446673 - DNA, 25 bp, Homo sapien
tccaacgtgcagggaacatttggtg

SEQ ID NO: 2446674 - DNA, 25 bp, Homo sapien
acgtgcagggaacatttggtgtgca

SEQ ID NO: 2446675 - DNA, 25 bp, Homo sapien
caaatgcatctctgcattcccttaa

SEQ ID NO: 2446676 - DNA, 25 bp, Homo sapien
taattgcaccagcagtgtgcaccat

SEQ ID NO: 2446677 - DNA, 25 bp, Homo sapien
gtgtgcaccatgaccctgtgttcac

SEQ ID NO: 2446678 - DNA, 25 bp, Homo sapien
ttcccttaattgcaccagcagtgtg

SEQ ID NO: 2446679 - DNA, 25 bp, Homo sapien
cagactctttcaggagtggagacag

SEQ ID NO: 2446680 - DNA, 25 bp, Homo sapien
agactctattccaatccccgtcgga

SEQ ID NO: 2446681 - DNA, 25 bp, Homo sapien
agacagaagagccatctccagcgac

SEQ ID NO: 2446682 - DNA, 25 bp, Homo sapien
cacagactctttcaggagtggagac

SEQ ID NO: 2446683 - DNA, 25 bp, Homo sapien
tcaaccttgcatttgcctatgtcgt

SEQ ID NO: 2446684 - DNA, 25 bp, Homo sapien
agcagcaataaggtccgataaggaa

SEQ ID NO: 2446685 - DNA, 25 bp, Homo sapien
gcagcaataaggtccgataaggaaa

SEQ ID NO: 2446686 - DNA, 25 bp, Homo sapien
cagcaataaggtccgataaggaaaa

SEQ ID NO: 2446687 - DNA, 25 bp, Homo sapien
gtatatttaaagaatttgtacatgg

SEQ ID NO: 2446688 - DNA, 25 bp, Homo sapien
tttgtatatttaaagaatttgtaca

SEQ ID NO: 2446689 - DNA, 25 bp, Homo sapien
tgtatatttaaagaatttgtacatg

SEQ ID NO: 2446690 - DNA, 25 bp, Homo sapien
ttgtatatttaaagaatttgtacat

SEQ ID NO: 2446691 - DNA, 25 bp, Homo sapien
ccacgtccagataagtatatcctta

SEQ ID NO: 2446692 - DNA, 25 bp, Homo sapien
ccaagagtgccttcgaactctgcgc

SEQ ID NO: 2446693 - DNA, 25 bp, Homo sapien
gaccatgccatgatgttgtccacca

SEQ ID NO: 2446694 - DNA, 25 bp, Homo sapien
actgtccactccacgtccagataag

SEQ ID NO: 2446695 - DNA, 25 bp, Homo sapien
gtagtggttgtggtggtcttgtggg

SEQ ID NO: 2446696 - DNA, 25 bp, Homo sapien
gttgtggtggtcttgtgggagggtg

SEQ ID NO: 2446697 - DNA, 25 bp, Homo sapien
tggtggtcttgtgggagggtggagg

SEQ ID NO: 2446698 - DNA, 25 bp, Homo sapien
ggtagtggttgtggtggtcttgtgg

SEQ ID NO: 2446699 - DNA, 25 bp, Homo sapien
ccgacatgtaggtgtgctgcacaat

SEQ ID NO: 2446700 - DNA, 25 bp, Homo sapien
tgtttggcagggctatcccaaaacc

SEQ ID NO: 2446701 - DNA, 25 bp, Homo sapien
tggtttctgaactctgccgacatgt

SEQ ID NO: 2446702 - DNA, 25 bp, Homo sapien
tccatcctgtagcttacttagcagg

SEQ ID NO: 2446703 - DNA, 25 bp, Homo sapien
gatgtgaacacgatattccttaatg

SEQ ID NO: 2446704 - DNA, 25 bp, Homo sapien
ttaatgatcactttattgtggaaat

SEQ ID NO: 2446705 - DNA, 25 bp, Homo sapien
caaggatgtgaacacgatattcctt

SEQ ID NO: 2446706 - DNA, 25 bp, Homo sapien
tgtgaacacgatattccttaatgat

SEQ ID NO: 2446707 - DNA, 25 bp, Homo sapien
ctgagtggtcacagtcagccaacta

SEQ ID NO: 2446708 - DNA, 25 bp, Homo sapien
tgagtggtcacagtcagccaactag

SEQ ID NO: 2446709 - DNA, 25 bp, Homo sapien
tcatagttcaaagccagttcccaag

SEQ ID NO: 2446710 - DNA, 25 bp, Homo sapien
ctctctgaggacctaatccttaggt

SEQ ID NO: 2446711 - DNA, 25 bp, Homo sapien
tcaggtcatagttcaaagccagttc

SEQ ID NO: 2446712 - DNA, 25 bp, Homo sapien
cctaatccttaggtagtgctgcagg

SEQ ID NO: 2446713 - DNA, 25 bp, Homo sapien
cagggattcccgaatagcgaatccc

SEQ ID NO: 2446714 - DNA, 25 bp, Homo sapien
ttcccgaatagcgaatcccaaagcc

SEQ ID NO: 2446715 - DNA, 25 bp, Homo sapien
cacagggattcccgaatagcgaatc

SEQ ID NO: 2446716 - DNA, 25 bp, Homo sapien
tgcacagggattcccgaatagcgaa

SEQ ID NO: 2446717 - DNA, 25 bp, Homo sapien
ggccctgccggacccacatgctgtc

SEQ ID NO: 2446718 - DNA, 25 bp, Homo sapien
tgccggacccacatgctgtcctctc

SEQ ID NO: 2446719 - DNA, 25 bp, Homo sapien
gactcaggccctgccggacccacat

SEQ ID NO: 2446720 - DNA, 25 bp, Homo sapien
ttagggagaatgccaccctccctgg

SEQ ID NO: 2446721 - DNA, 25 bp, Homo sapien
cttttccagggtattagcattcatg

SEQ ID NO: 2446722 - DNA, 25 bp, Homo sapien
aagagtctcgatgatttgacttttc

SEQ ID NO: 2446723 - DNA, 25 bp, Homo sapien
ttagaagagtctcgatgatttgact

SEQ ID NO: 2446724 - DNA, 25 bp, Homo sapien
acttttccagggtattagcattcat

SEQ ID NO: 2446725 - DNA, 25 bp, Homo sapien
ccgcggcccgccacgtggcacaagc

SEQ ID NO: 2446726 - DNA, 25 bp, Homo sapien
tccaccgcggcccgccacgtggcac

SEQ ID NO: 2446727 - DNA, 25 bp, Homo sapien
tcgcgtgtgccttaatccaccgcgg

SEQ ID NO: 2446728 - DNA, 25 bp, Homo sapien
ccacaattgcaaagggctcacagtt

SEQ ID NO: 2446729 - DNA, 25 bp, Homo sapien
gatgccaaggccctggcttccagag

SEQ ID NO: 2446730 - DNA, 25 bp, Homo sapien
ggatgccaaggccctggcttccaga

SEQ ID NO: 2446731 - DNA, 25 bp, Homo sapien
gcacccgtcaactctgggggcaact

SEQ ID NO: 2446732 - DNA, 25 bp, Homo sapien
ccggcacccgtcaactctgggggca

SEQ ID NO: 2446733 - DNA, 25 bp, Homo sapien
caactctgggggcaactccaggaga

SEQ ID NO: 2446734 - DNA, 25 bp, Homo sapien
tgggggcaactccaggagaggcctg

SEQ ID NO: 2446735 - DNA, 25 bp, Homo sapien
gcctgggacattcacgtagccgagc

SEQ ID NO: 2446736 - DNA, 25 bp, Homo sapien
gacattcacgtagccgagctccaag

SEQ ID NO: 2446737 - DNA, 25 bp, Homo sapien
ggacattcacgtagccgagctccaa

SEQ ID NO: 2446738 - DNA, 25 bp, Homo sapien
tgggacattcacgtagccgagctcc

SEQ ID NO: 2446739 - DNA, 25 bp, Homo sapien
ggggtgcacgtgtccaccccaggca

SEQ ID NO: 2446740 - DNA, 25 bp, Homo sapien
ctgaggggtgcacgtgtccacccca

SEQ ID NO: 2446741 - DNA, 25 bp, Homo sapien
gaggggtgcacgtgtccaccccagg

SEQ ID NO: 2446742 - DNA, 25 bp, Homo sapien
ggtgcacgtgtccaccccaggcaac

SEQ ID NO: 2446743 - DNA, 25 bp, Homo sapien
tgaggcgactacttgctcggcgttt

SEQ ID NO: 2446744 - DNA, 25 bp, Homo sapien
tgtgtgaggcgactacttgctcggc

SEQ ID NO: 2446745 - DNA, 25 bp, Homo sapien
tgacctgttagctggggtgaagcat

SEQ ID NO: 2446746 - DNA, 25 bp, Homo sapien
cgactacttgctcggcgtttctgag

SEQ ID NO: 2446747 - DNA, 25 bp, Homo sapien
tgctgccggtacccggaagagttgc

SEQ ID NO: 2446748 - DNA, 25 bp, Homo sapien
ctgctgccggtacccggaagagttg

SEQ ID NO: 2446749 - DNA, 25 bp, Homo sapien
cctgctgccggtacccggaagagtt

SEQ ID NO: 2446750 - DNA, 25 bp, Homo sapien
ctgccggtacccggaagagttgctt

SEQ ID NO: 2446751 - DNA, 25 bp, Homo sapien
tcaggtaggagctgtacggcctgca

SEQ ID NO: 2446752 - DNA, 25 bp, Homo sapien
gcagtggaatgagacatcccgtatc

SEQ ID NO: 2446753 - DNA, 25 bp, Homo sapien
acaaccactagactgcagtggaatg

SEQ ID NO: 2446754 - DNA, 25 bp, Homo sapien
ccttcatgatcccacaaccactaga

SEQ ID NO: 2446755 - DNA, 25 bp, Homo sapien
cttttccagggtattagcattcatg

SEQ ID NO: 2446756 - DNA, 25 bp, Homo sapien
ttagaagagtctcgatgatttgact

SEQ ID NO: 2446757 - DNA, 25 bp, Homo sapien
aagagtctcgatgatttgacttttc

SEQ ID NO: 2446758 - DNA, 25 bp, Homo sapien
acttttccagggtattagcattcat

SEQ ID NO: 2446759 - DNA, 25 bp, Homo sapien
ttctaggggactcattccagttaaa

SEQ ID NO: 2446760 - DNA, 25 bp, Homo sapien
tctaggggactcattccagttaaaa

SEQ ID NO: 2446761 - DNA, 25 bp, Homo sapien
taggggactcattccagttaaaaga

SEQ ID NO: 2446762 - DNA, 25 bp, Homo sapien
catcttcaagaagtggaggtcctcc

SEQ ID NO: 2446763 - DNA, 25 bp, Homo sapien
ccgcggcccgccacgtggcacaagc

SEQ ID NO: 2446764 - DNA, 25 bp, Homo sapien
tcgcgtgtgccttaatccaccgcgg

SEQ ID NO: 2446765 - DNA, 25 bp, Homo sapien
tccaccgcggcccgccacgtggcac

SEQ ID NO: 2446766 - DNA, 25 bp, Homo sapien
ccacaattgcaaagggctcacagtt

SEQ ID NO: 2446767 - DNA, 25 bp, Homo sapien
gatgccaaggccctggcttccagag

SEQ ID NO: 2446768 - DNA, 25 bp, Homo sapien
ggatgccaaggccctggcttccaga

SEQ ID NO: 2446769 - DNA, 25 bp, Homo sapien
gcctgggacattcacgtagccgagc

SEQ ID NO: 2446770 - DNA, 25 bp, Homo sapien
ggacattcacgtagccgagctccaa

SEQ ID NO: 2446771 - DNA, 25 bp, Homo sapien
cggcacccgtcaactctgggggcaa

SEQ ID NO: 2446772 - DNA, 25 bp, Homo sapien
caactctgggggcaactccaggaga

SEQ ID NO: 2446773 - DNA, 25 bp, Homo sapien
ctgaggggtgcacgtgtccacccca

SEQ ID NO: 2446774 - DNA, 25 bp, Homo sapien
ggggtgcacgtgtccaccccaggca

SEQ ID NO: 2446775 - DNA, 25 bp, Homo sapien
gaggggtgcacgtgtccaccccagg

SEQ ID NO: 2446776 - DNA, 25 bp, Homo sapien
ggtgcacgtgtccaccccaggcaac

SEQ ID NO: 2446777 - DNA, 25 bp, Homo sapien
tgtgtgaggcgactacttgctcggc

SEQ ID NO: 2446778 - DNA, 25 bp, Homo sapien
tgacctgttagctggggtgaagcat

SEQ ID NO: 2446779 - DNA, 25 bp, Homo sapien
tgaggcgactacttgctcggcgttt

SEQ ID NO: 2446780 - DNA, 25 bp, Homo sapien
cgactacttgctcggcgtttctgag

SEQ ID NO: 2446781 - DNA, 25 bp, Homo sapien
tcaggtaggagctgtacggcctgca

SEQ ID NO: 2446782 - DNA, 25 bp, Homo sapien
gcagtggaatgagacatcccgtatc

SEQ ID NO: 2446783 - DNA, 25 bp, Homo sapien
acaaccactagactgcagtggaatg

SEQ ID NO: 2446784 - DNA, 25 bp, Homo sapien
ccttcatgatcccacaaccactaga

SEQ ID NO: 2446785 - DNA, 25 bp, Homo sapien
ggaagcctgggatcattgtaacaaa

SEQ ID NO: 2446786 - DNA, 25 bp, Homo sapien
tgggacagcccatcagggaagacat

SEQ ID NO: 2446787 - DNA, 25 bp, Homo sapien
gattccctgtgtagcggcctctctt

SEQ ID NO: 2446788 - DNA, 25 bp, Homo sapien
aaactgagccccaagtggtagccgg

SEQ ID NO: 2446789 - DNA, 25 bp, Homo sapien
aagagtctcgatgatttgacttttc

SEQ ID NO: 2446790 - DNA, 25 bp, Homo sapien
ttagaagagtctcgatgatttgact

SEQ ID NO: 2446791 - DNA, 25 bp, Homo sapien
acttttccagggtattagcattcat

SEQ ID NO: 2446792 - DNA, 25 bp, Homo sapien
cttttccagggtattagcattcatg

SEQ ID NO: 2446793 - DNA, 25 bp, Homo sapien
gggagagaactccttagtgctctaa

SEQ ID NO: 2446794 - DNA, 25 bp, Homo sapien
ggtctctcggcaagactagaaagca

SEQ ID NO: 2446795 - DNA, 25 bp, Homo sapien
ttttgtctataaaagcgaatgggct

SEQ ID NO: 2446796 - DNA, 25 bp, Homo sapien
cgaatgggctttctatatgtgggct

SEQ ID NO: 2446797 - DNA, 25 bp, Homo sapien
tcaggagacgcctaccgctcttgca

SEQ ID NO: 2446798 - DNA, 25 bp, Homo sapien
tgcaataattggcagatgcccactg

SEQ ID NO: 2446799 - DNA, 25 bp, Homo sapien
atcttctcagaggaggactaccgcg

SEQ ID NO: 2446800 - DNA, 25 bp, Homo sapien
ttggccctgtggtgtcccgaagccg

SEQ ID NO: 2446801 - DNA, 25 bp, Homo sapien
tgcatggttagctgcatacaggagc

SEQ ID NO: 2446802 - DNA, 25 bp, Homo sapien
tccagattccctgcatggttagctg

SEQ ID NO: 2446803 - DNA, 25 bp, Homo sapien
gtcaccatgaggtccagattccctg

SEQ ID NO: 2446804 - DNA, 25 bp, Homo sapien
acagtccgccgcagtcaccatgagg

SEQ ID NO: 2446805 - DNA, 25 bp, Homo sapien
gtcatttaccaggagcacgcctctt

SEQ ID NO: 2446806 - DNA, 25 bp, Homo sapien
cttccacttctgtcgtgatgtcatt

SEQ ID NO: 2446807 - DNA, 25 bp, Homo sapien
cacttctgtcgtgatgtcatttacc

SEQ ID NO: 2446808 - DNA, 25 bp, Homo sapien
tcatttaccaggagcacgcctcttc

SEQ ID NO: 2446809 - DNA, 25 bp, Homo sapien
ggggtggctgagttcctccatctac

SEQ ID NO: 2446810 - DNA, 25 bp, Homo sapien
tggggtggctgagttcctccatcta

SEQ ID NO: 2446811 - DNA, 25 bp, Homo sapien
ctggggtggctgagttcctccatct

SEQ ID NO: 2446812 - DNA, 25 bp, Homo sapien
ttacaaaaggaaaccttcatcctga

SEQ ID NO: 2446813 - DNA, 25 bp, Homo sapien
gaaaccttcatcctgatgccagtac

SEQ ID NO: 2446814 - DNA, 25 bp, Homo sapien
aaaggaaaccttcatcctgatgcca

SEQ ID NO: 2446815 - DNA, 25 bp, Homo sapien
aaggaaaccttcatcctgatgccag

SEQ ID NO: 2446816 - DNA, 25 bp, Homo sapien
taaccgaaaatgatgggcctgggag

SEQ ID NO: 2446817 - DNA, 25 bp, Homo sapien
ggagcctgggttcatcgtaaccgaa

SEQ ID NO: 2446818 - DNA, 25 bp, Homo sapien
cggcagaaaggagaaatcacgtcag

SEQ ID NO: 2446819 - DNA, 25 bp, Homo sapien
ctgagcccaatgtggtcctccagat

SEQ ID NO: 2446820 - DNA, 25 bp, Homo sapien
tgtaacccgagcagacactggatcc

SEQ ID NO: 2446821 - DNA, 25 bp, Homo sapien
tctatctccagtagtcaaaccatgg

SEQ ID NO: 2446822 - DNA, 25 bp, Homo sapien
caaaccatggatcttgcttaaagga

SEQ ID NO: 2446823 - DNA, 25 bp, Homo sapien
gattctggcccaaggttctatctcc

SEQ ID NO: 2446824 - DNA, 25 bp, Homo sapien
cacacaggcagtatctgacacaatt

SEQ ID NO: 2446825 - DNA, 25 bp, Homo sapien
tgacacaattatactgtggctgcat

SEQ ID NO: 2446826 - DNA, 25 bp, Homo sapien
caggcagtatctgacacaattatac

SEQ ID NO: 2446827 - DNA, 25 bp, Homo sapien
tccacacaggcagtatctgacacaa

SEQ ID NO: 2446828 - DNA, 25 bp, Homo sapien
tacacccgttatcacttggaaccag

SEQ ID NO: 2446829 - DNA, 25 bp, Homo sapien
caaaatatacacccgttatcacttg

SEQ ID NO: 2446830 - DNA, 25 bp, Homo sapien
aatatacacccgttatcacttggaa

SEQ ID NO: 2446831 - DNA, 25 bp, Homo sapien
tatacacccgttatcacttggaacc

SEQ ID NO: 2446832 - DNA, 25 bp, Homo sapien
aatcaccagcaatcagtttctggtt

SEQ ID NO: 2446833 - DNA, 25 bp, Homo sapien
ggacacagacaaaatcaccagcaat

SEQ ID NO: 2446834 - DNA, 25 bp, Homo sapien
aaatcaccagcaatcagtttctggt

SEQ ID NO: 2446835 - DNA, 25 bp, Homo sapien
atcaccagcaatcagtttctggttg

SEQ ID NO: 2446836 - DNA, 25 bp, Homo sapien
ctggtatagtcacactgcagtacat

SEQ ID NO: 2446837 - DNA, 25 bp, Homo sapien
gtttgtgtagcagtaaacccatgga

SEQ ID NO: 2446838 - DNA, 25 bp, Homo sapien
ttgtgtagcagtaaacccatggaga

SEQ ID NO: 2446839 - DNA, 25 bp, Homo sapien
tttgtgtagcagtaaacccatggag

SEQ ID NO: 2446840 - DNA, 25 bp, Homo sapien
tgtgtagcagtaaacccatggagac

SEQ ID NO: 2446841 - DNA, 25 bp, Homo sapien
tgaattaaccgcaggatatcgatgg

SEQ ID NO: 2446842 - DNA, 25 bp, Homo sapien
tgtggataggggctgaattaaccgc

SEQ ID NO: 2446843 - DNA, 25 bp, Homo sapien
taggggctgaattaaccgcaggata

SEQ ID NO: 2446844 - DNA, 25 bp, Homo sapien
gggctgaattaaccgcaggatatcg

SEQ ID NO: 2446845 - DNA, 25 bp, Homo sapien
aaccatgagcccaaaatgactcttc

SEQ ID NO: 2446846 - DNA, 25 bp, Homo sapien
accatgagcccaaaatgactcttca

SEQ ID NO: 2446847 - DNA, 25 bp, Homo sapien
tctatatgtgatacggtcacaacac

SEQ ID NO: 2446848 - DNA, 25 bp, Homo sapien
tataatcacattagggacccatgct

SEQ ID NO: 2446849 - DNA, 25 bp, Homo sapien
tgaaacaataacactgtgaacccac

SEQ ID NO: 2446850 - DNA, 25 bp, Homo sapien
gaacccacgttgagtctccagcaat

SEQ ID NO: 2446851 - DNA, 25 bp, Homo sapien
taaatccctgagcaaaaactatagc

SEQ ID NO: 2446852 - DNA, 25 bp, Homo sapien
gagcctatcgctaagacagtcacaa

SEQ ID NO: 2446853 - DNA, 25 bp, Homo sapien
gatcctcgatgaaatgccaccaaca

SEQ ID NO: 2446854 - DNA, 25 bp, Homo sapien
catagatccaggatagaattccaac

SEQ ID NO: 2446855 - DNA, 25 bp, Homo sapien
aatctgcagcagtgaaactctggac

SEQ ID NO: 2446856 - DNA, 25 bp, Homo sapien
aatcatactgtggactattgccaaa

SEQ ID NO: 2446857 - DNA, 25 bp, Homo sapien
aagtcacactttggaaccaagaaga

SEQ ID NO: 2446858 - DNA, 25 bp, Homo sapien
ctgtggactattgccaaatctgcag

SEQ ID NO: 2446859 - DNA, 25 bp, Homo sapien
gtaggcagaggttagaatcaaacaa

SEQ ID NO: 2446860 - DNA, 25 bp, Homo sapien
taggcagaggttagaatcaaacaat

SEQ ID NO: 2446861 - DNA, 25 bp, Homo sapien
aggcagaggttagaatcaaacaatt

SEQ ID NO: 2446862 - DNA, 25 bp, Homo sapien
gttgatgacatccccaacatccaaa

SEQ ID NO: 2446863 - DNA, 25 bp, Homo sapien
tgatgacatccccaacatccaaaat

SEQ ID NO: 2446864 - DNA, 25 bp, Homo sapien
ctgttgatgacatccccaacatcca

SEQ ID NO: 2446865 - DNA, 25 bp, Homo sapien
gatgacatccccaacatccaaaata

SEQ ID NO: 2446866 - DNA, 25 bp, Homo sapien
tctgtcagaacaaggactggggaac

SEQ ID NO: 2446867 - DNA, 25 bp, Homo sapien
gaacccacatgtaatctgtccagac

SEQ ID NO: 2446868 - DNA, 25 bp, Homo sapien
tggggaacccacatgtaatctgtcc

SEQ ID NO: 2446869 - DNA, 25 bp, Homo sapien
gggaacccacatgtaatctgtccag

SEQ ID NO: 2446870 - DNA, 25 bp, Homo sapien
tggtctggagggttggagaggctgt

SEQ ID NO: 2446871 - DNA, 25 bp, Homo sapien
ttttggtctggagggttggagaggc

SEQ ID NO: 2446872 - DNA, 25 bp, Homo sapien
tttggtctggagggttggagaggct

SEQ ID NO: 2446873 - DNA, 25 bp, Homo sapien
ttggtctggagggttggagaggctg

SEQ ID NO: 2446874 - DNA, 25 bp, Homo sapien
tactgccaaatggtctgcaaaatta

SEQ ID NO: 2446875 - DNA, 25 bp, Homo sapien
tctatactgccaaatggtctgcaaa

SEQ ID NO: 2446876 - DNA, 25 bp, Homo sapien
ttctatactgccaaatggtctgcaa

SEQ ID NO: 2446877 - DNA, 25 bp, Homo sapien
tatactgccaaatggtctgcaaaat

SEQ ID NO: 2446878 - DNA, 25 bp, Homo sapien
ctgttcattgacttcaggcccccaa

SEQ ID NO: 2446879 - DNA, 25 bp, Homo sapien
gctgggcttttggttgacatgtgac

SEQ ID NO: 2446880 - DNA, 25 bp, Homo sapien
gccaagatccggagagactctgctg

SEQ ID NO: 2446881 - DNA, 25 bp, Homo sapien
gctgagatgaatacaagtcaccctc

SEQ ID NO: 2446882 - DNA, 25 bp, Homo sapien
ataaagaattgctgcctgtatcaca

SEQ ID NO: 2446883 - DNA, 25 bp, Homo sapien
aaataaagaattgctgcctgtatca

SEQ ID NO: 2446884 - DNA, 25 bp, Homo sapien
aataaagaattgctgcctgtatcac

SEQ ID NO: 2446885 - DNA, 25 bp, Homo sapien
tcttgatccagtttttctagttccc

SEQ ID NO: 2446886 - DNA, 25 bp, Homo sapien
ttgatccagtttttctagttccctc

SEQ ID NO: 2446887 - DNA, 25 bp, Homo sapien
ctttcttgatccagtttttctagtt

SEQ ID NO: 2446888 - DNA, 25 bp, Homo sapien
ttcttgatccagtttttctagttcc

SEQ ID NO: 2446889 - DNA, 25 bp, Homo sapien
tcccttcactcacctcaatgtagtt

SEQ ID NO: 2446890 - DNA, 25 bp, Homo sapien
tggacactaattgactcccttcact

SEQ ID NO: 2446891 - DNA, 25 bp, Homo sapien
gattccttttcgggcacctgccact

SEQ ID NO: 2446892 - DNA, 25 bp, Homo sapien
gcttgtaagacaagaagaggacagg

SEQ ID NO: 2446893 - DNA, 25 bp, Homo sapien
tcaaagcaacattctgaagcaaagc

SEQ ID NO: 2446894 - DNA, 25 bp, Homo sapien
gaagcaaacttggactggcagccat

SEQ ID NO: 2446895 - DNA, 25 bp, Homo sapien
gaagccattaatttccctcaagtgt

SEQ ID NO: 2446896 - DNA, 25 bp, Homo sapien
aagtgtcctgcgctttagatttgaa

SEQ ID NO: 2446897 - DNA, 25 bp, Homo sapien
ttcctgaatcacctttcttgagctc

SEQ ID NO: 2446898 - DNA, 25 bp, Homo sapien
tcctgaatcacctttcttgagctct

SEQ ID NO: 2446899 - DNA, 25 bp, Homo sapien
cctgaatcacctttcttgagctctg

SEQ ID NO: 2446900 - DNA, 25 bp, Homo sapien
tggctgccggtcaaaactccctctt

SEQ ID NO: 2446901 - DNA, 25 bp, Homo sapien
cccaggtctgtgacaaatggctgcc

SEQ ID NO: 2446902 - DNA, 25 bp, Homo sapien
ttcccaggtctgtgacaaatggctg

SEQ ID NO: 2446903 - DNA, 25 bp, Homo sapien
aaatggctgccggtcaaaactccct

SEQ ID NO: 2446904 - DNA, 25 bp, Homo sapien
ctgcttcttgaaaatatacacatac

SEQ ID NO: 2446905 - DNA, 25 bp, Homo sapien
tatttcaacaaattgtctgttccct

SEQ ID NO: 2446906 - DNA, 25 bp, Homo sapien
cagggaaggcccatatttcaacaaa

SEQ ID NO: 2446907 - DNA, 25 bp, Homo sapien
tgtttctatctcttccagggaaggc

SEQ ID NO: 2446908 - DNA, 25 bp, Homo sapien
gctgttggagaccaaactgaaattc

SEQ ID NO: 2446909 - DNA, 25 bp, Homo sapien
ttggagaccaaactgaaattccaac

SEQ ID NO: 2446910 - DNA, 25 bp, Homo sapien
gggtctgactatggctgtagcttcc

SEQ ID NO: 2446911 - DNA, 25 bp, Homo sapien
tctggggtctgactatggctgtagc

SEQ ID NO: 2446912 - DNA, 25 bp, Homo sapien
ctgtggtcatctgcaccaggcattc

SEQ ID NO: 2446913 - DNA, 25 bp, Homo sapien
tgtggtcatctgcaccaggcattcc

SEQ ID NO: 2446914 - DNA, 25 bp, Homo sapien
cagtaactagccctggcacattcac

SEQ ID NO: 2446915 - DNA, 25 bp, Homo sapien
attctgaatccatatcctcagcatg

SEQ ID NO: 2446916 - DNA, 25 bp, Homo sapien
tggctgaacaaatcccttccagacc

SEQ ID NO: 2446917 - DNA, 25 bp, Homo sapien
tgtttcaccacagtccagttggagc

SEQ ID NO: 2446918 - DNA, 25 bp, Homo sapien
aatcccttccagacctaatatttat

SEQ ID NO: 2446919 - DNA, 25 bp, Homo sapien
catggcttttgtcaggatttgatac

SEQ ID NO: 2446920 - DNA, 25 bp, Homo sapien
cagatttcatggcttttgtcaggat

SEQ ID NO: 2446921 - DNA, 25 bp, Homo sapien
ctatacaaagtcagatttcatggct

SEQ ID NO: 2446922 - DNA, 25 bp, Homo sapien
caaagtcagatttcatggcttttgt

SEQ ID NO: 2446923 - DNA, 25 bp, Homo sapien
gatagcactttctgggtaaagccat

SEQ ID NO: 2446924 - DNA, 25 bp, Homo sapien
tctattagccttatggttaaataca

SEQ ID NO: 2446925 - DNA, 25 bp, Homo sapien
tagtgagttgttctctgtcaatctc

SEQ ID NO: 2446926 - DNA, 25 bp, Homo sapien
cctctcatgcttggaacaaatgtat

SEQ ID NO: 2446927 - DNA, 25 bp, Homo sapien
gaaggatgtacctcagagtcccaca

SEQ ID NO: 2446928 - DNA, 25 bp, Homo sapien
gtgtagccatcacacttgcgtcttc

SEQ ID NO: 2446929 - DNA, 25 bp, Homo sapien
tgtagccatcacacttgcgtcttct

SEQ ID NO: 2446930 - DNA, 25 bp, Homo sapien
gagtgtagccatcacacttgcgtct

SEQ ID NO: 2446931 - DNA, 25 bp, Homo sapien
agtgtagccatcacacttgcgtctt

SEQ ID NO: 2446932 - DNA, 25 bp, Homo sapien
caggtgattcacatcttgtggtggg

SEQ ID NO: 2446933 - DNA, 25 bp, Homo sapien
tgtccactgggcactttgaattaac

SEQ ID NO: 2446934 - DNA, 25 bp, Homo sapien
gcatagacactagcagtcctgtcca

SEQ ID NO: 2446935 - DNA, 25 bp, Homo sapien
ccaggcatagacactagcagtcctg

SEQ ID NO: 2446936 - DNA, 25 bp, Homo sapien
gacactagcagtcctgtccactggg

SEQ ID NO: 2446937 - DNA, 25 bp, Homo sapien
ttccaattcttatgggaccagatta

SEQ ID NO: 2446938 - DNA, 25 bp, Homo sapien
tatgggaccagattattgcacacag

SEQ ID NO: 2446939 - DNA, 25 bp, Homo sapien
cttatgggaccagattattgcacac

SEQ ID NO: 2446940 - DNA, 25 bp, Homo sapien
aattcttatgggaccagattattgc

SEQ ID NO: 2446941 - DNA, 25 bp, Homo sapien
aaccctcaacaacacaacagatcat

SEQ ID NO: 2446942 - DNA, 25 bp, Homo sapien
gaaccctcaacaacacaacagatca

SEQ ID NO: 2446943 - DNA, 25 bp, Homo sapien
ctctaaggactcaggtatgattgta

SEQ ID NO: 2446944 - DNA, 25 bp, Homo sapien
tctaaggactcaggtatgattgtat

SEQ ID NO: 2446945 - DNA, 25 bp, Homo sapien
tgcatagtgaaagaccagtctgagg

SEQ ID NO: 2446946 - DNA, 25 bp, Homo sapien
cacaccagaaacagacatcttgcag

SEQ ID NO: 2446947 - DNA, 25 bp, Homo sapien
acagtccgaggtcagtctgaggtaa

SEQ ID NO: 2446948 - DNA, 25 bp, Homo sapien
gagaataaccacaactgcatagtga

SEQ ID NO: 2446949 - DNA, 25 bp, Homo sapien
gagcgtcagctgtgtcttctcgtct

SEQ ID NO: 2446950 - DNA, 25 bp, Homo sapien
cgttgcctagcaagaagtatctgca

SEQ ID NO: 2446951 - DNA, 25 bp, Homo sapien
tagcatcgctataaatgtcaccgtt

SEQ ID NO: 2446952 - DNA, 25 bp, Homo sapien
acctccgtggaggagcgtcagctgt

SEQ ID NO: 2446953 - DNA, 25 bp, Homo sapien
tcgcagtcgcgaaacacctcttcct

SEQ ID NO: 2446954 - DNA, 25 bp, Homo sapien
gtttccagcgaccacatcgcagtcg

SEQ ID NO: 2446955 - DNA, 25 bp, Homo sapien
gcgaccacatcgcagtcgcgaaaca

SEQ ID NO: 2446956 - DNA, 25 bp, Homo sapien
cctctttcgctaatggagttagaag

SEQ ID NO: 2446957 - DNA, 25 bp, Homo sapien
catggcccagtgttctggtgggagt

SEQ ID NO: 2446958 - DNA, 25 bp, Homo sapien
tggcccagtgttctggtgggagtac

SEQ ID NO: 2446959 - DNA, 25 bp, Homo sapien
cagtgttctggtgggagtactttaa

SEQ ID NO: 2446960 - DNA, 25 bp, Homo sapien
cccagtgttctggtgggagtacttt

SEQ ID NO: 2446961 - DNA, 25 bp, Homo sapien
agacaatactccaatcctcatggga

SEQ ID NO: 2446962 - DNA, 25 bp, Homo sapien
cagacaatactccaatcctcatggg

SEQ ID NO: 2446963 - DNA, 25 bp, Homo sapien
gatatgattctatcacccaaaaaat

SEQ ID NO: 2446964 - DNA, 25 bp, Homo sapien
ctttggggtctcagatatgattcta

SEQ ID NO: 2446965 - DNA, 25 bp, Homo sapien
atcacccaaaaaatcctcaacaact

SEQ ID NO: 2446966 - DNA, 25 bp, Homo sapien
gggtctcagatatgattctatcacc

SEQ ID NO: 2446967 - DNA, 25 bp, Homo sapien
tgttctaccacttctatcgggggat

SEQ ID NO: 2446968 - DNA, 25 bp, Homo sapien
taccacttctatcgggggatgcaag

SEQ ID NO: 2446969 - DNA, 25 bp, Homo sapien
ttgttctaccacttctatcggggga

SEQ ID NO: 2446970 - DNA, 25 bp, Homo sapien
tctaccacttctatcgggggatgca

SEQ ID NO: 2446971 - DNA, 25 bp, Homo sapien
aaccaagatttcctgttacagctgc

SEQ ID NO: 2446972 - DNA, 25 bp, Homo sapien
aaaccaagatttcctgttacagctg

SEQ ID NO: 2446973 - DNA, 25 bp, Homo sapien
ccaagatttcctgttacagctgcca

SEQ ID NO: 2446974 - DNA, 25 bp, Homo sapien
taaaaccaagatttcctgttacagc

SEQ ID NO: 2446975 - DNA, 25 bp, Homo sapien
cagtccacgccatggcctgatgttg

SEQ ID NO: 2446976 - DNA, 25 bp, Homo sapien
agcagtccacgccatggcctgatgt

SEQ ID NO: 2446977 - DNA, 25 bp, Homo sapien
agtccacgccatggcctgatgttga

SEQ ID NO: 2446978 - DNA, 25 bp, Homo sapien
ccacgccatggcctgatgttgaggt

SEQ ID NO: 2446979 - DNA, 25 bp, Homo sapien
cttcagtgggtctcagccacagagt

SEQ ID NO: 2446980 - DNA, 25 bp, Homo sapien
tcagtgggtctcagccacagagtca

SEQ ID NO: 2446981 - DNA, 25 bp, Homo sapien
cagtgggtctcagccacagagtcat

SEQ ID NO: 2446982 - DNA, 25 bp, Homo sapien
ttcagtgggtctcagccacagagtc

SEQ ID NO: 2446983 - DNA, 25 bp, Homo sapien
ttttcagtgaccatctcagtttgga

SEQ ID NO: 2446984 - DNA, 25 bp, Homo sapien
gactatattccaatctccgtgggac

SEQ ID NO: 2446985 - DNA, 25 bp, Homo sapien
actatattccaatctccgtgggacc

SEQ ID NO: 2446986 - DNA, 25 bp, Homo sapien
tatattccaatctccgtgggacctg

SEQ ID NO: 2446987 - DNA, 25 bp, Homo sapien
cagactatattccaatctccgtggg

SEQ ID NO: 2446988 - DNA, 25 bp, Homo sapien
tggacacctttgtcagactagcaat

SEQ ID NO: 2446989 - DNA, 25 bp, Homo sapien
tcaacagcattactggacacctttg

SEQ ID NO: 2446990 - DNA, 25 bp, Homo sapien
aacagcattactggacacctttgtc

SEQ ID NO: 2446991 - DNA, 25 bp, Homo sapien
tttgtcagactagcaatttccacag

SEQ ID NO: 2446992 - DNA, 25 bp, Homo sapien
aagcgtaatgggagggcgacggata

SEQ ID NO: 2446993 - DNA, 25 bp, Homo sapien
ctgaagcgtaatgggagggcgacgg

SEQ ID NO: 2446994 - DNA, 25 bp, Homo sapien
gcaaactggggccattctgacaaag

SEQ ID NO: 2446995 - DNA, 25 bp, Homo sapien
ggccattctgacaaagtcctgattt

SEQ ID NO: 2446996 - DNA, 25 bp, Homo sapien
ggaatgttctgatgttgggtgggat

SEQ ID NO: 2446997 - DNA, 25 bp, Homo sapien
tgggatgtggtctccacatttgcct

SEQ ID NO: 2446998 - DNA, 25 bp, Homo sapien
ctacacggagccaaaagggagtgga

SEQ ID NO: 2446999 - DNA, 25 bp, Homo sapien
ggtgggatgtggtctccacatttgc

SEQ ID NO: 2447000 - DNA, 25 bp, Homo sapien
tcattaattgcacaagcaatccaca

SEQ ID NO: 2447001 - DNA, 25 bp, Homo sapien
ttgggagtgccaattgggaccatgc

SEQ ID NO: 2447002 - DNA, 25 bp, Homo sapien
tggcaagctcttgatttgaggcctt

SEQ ID NO: 2447003 - DNA, 25 bp, Homo sapien
tctgcaatgtgcaaggagtattggg

SEQ ID NO: 2447004 - DNA, 25 bp, Homo sapien
ccatctttcattgatagctgcctct

SEQ ID NO: 2447005 - DNA, 25 bp, Homo sapien
gagacagtgaggtcaagaatccggc

SEQ ID NO: 2447006 - DNA, 25 bp, Homo sapien
cggccatctttcattgatagctgcc

SEQ ID NO: 2447007 - DNA, 25 bp, Homo sapien
tgaggtcaagaatccggccatcttt

SEQ ID NO: 2447008 - DNA, 25 bp, Homo sapien
cgctgcaggtttgggtcgttatctc

SEQ ID NO: 2447009 - DNA, 25 bp, Homo sapien
actggacagttttgtcaggcttgcc

SEQ ID NO: 2447010 - DNA, 25 bp, Homo sapien
gaatccatagtttccctcaatagca

SEQ ID NO: 2447011 - DNA, 25 bp, Homo sapien
gagaggccagcccaaagtactgctc

SEQ ID NO: 2447012 - DNA, 25 bp, Homo sapien
cagctgtccacaccatgacctggtt

SEQ ID NO: 2447013 - DNA, 25 bp, Homo sapien
caagtactccaacctaccaggaact

SEQ ID NO: 2447014 - DNA, 25 bp, Homo sapien
ctggtgcaagtactccaacctacca

SEQ ID NO: 2447015 - DNA, 25 bp, Homo sapien
gctgtccacaccatgacctggtttc

SEQ ID NO: 2447016 - DNA, 25 bp, Homo sapien
catgaaggggtccacttccattgtc

SEQ ID NO: 2447017 - DNA, 25 bp, Homo sapien
cttgaattcgatcacgtgcttcatg

SEQ ID NO: 2447018 - DNA, 25 bp, Homo sapien
attcgatcacgtgcttcatgtcatg

SEQ ID NO: 2447019 - DNA, 25 bp, Homo sapien
tcatgtcatgaaggggtccacttcc

SEQ ID NO: 2447020 - DNA, 25 bp, Homo sapien
cttctccgtgggatccatgggctag

SEQ ID NO: 2447021 - DNA, 25 bp, Homo sapien
cgtgggatccatgggctagtcccat

SEQ ID NO: 2447022 - DNA, 25 bp, Homo sapien
tccgtgggatccatgggctagtccc

SEQ ID NO: 2447023 - DNA, 25 bp, Homo sapien
tctccgtgggatccatgggctagtc

SEQ ID NO: 2447024 - DNA, 25 bp, Homo sapien
tgcaatgggttatcacaggcagcct

SEQ ID NO: 2447025 - DNA, 25 bp, Homo sapien
ctgcaatgggttatcacaggcagcc

SEQ ID NO: 2447026 - DNA, 25 bp, Homo sapien
caatgggttatcacaggcagccttt

SEQ ID NO: 2447027 - DNA, 25 bp, Homo sapien
tgggttatcacaggcagcctttttc

SEQ ID NO: 2447028 - DNA, 25 bp, Homo sapien
gcgtataagggccctaaggttgaga

SEQ ID NO: 2447029 - DNA, 25 bp, Homo sapien
acagcgtataagggccctaaggttg

SEQ ID NO: 2447030 - DNA, 25 bp, Homo sapien
cagcgtataagggccctaaggttga

SEQ ID NO: 2447031 - DNA, 25 bp, Homo sapien
tgaccatggagacagcgtataaggg

SEQ ID NO: 2447032 - DNA, 25 bp, Homo sapien
gtcttgaaatggctctgcctccagt

SEQ ID NO: 2447033 - DNA, 25 bp, Homo sapien
agtcttgaaatggctctgcctccag

SEQ ID NO: 2447034 - DNA, 25 bp, Homo sapien
tggttggtgaactctcatctgtctt

SEQ ID NO: 2447035 - DNA, 25 bp, Homo sapien
accatgggacccatttctggcacac

SEQ ID NO: 2447036 - DNA, 25 bp, Homo sapien
tcttttgggaatggattcagaaggt

SEQ ID NO: 2447037 - DNA, 25 bp, Homo sapien
gggaatggattcagaaggtttccag

SEQ ID NO: 2447038 - DNA, 25 bp, Homo sapien
tttgggaatggattcagaaggtttc

SEQ ID NO: 2447039 - DNA, 25 bp, Homo sapien
cacccatgagagaccagatcgaggt

SEQ ID NO: 2447040 - DNA, 25 bp, Homo sapien
tgagagaccagatcgaggtgagaac

SEQ ID NO: 2447041 - DNA, 25 bp, Homo sapien
ctgcacccatgagagaccagatcga

SEQ ID NO: 2447042 - DNA, 25 bp, Homo sapien
agaccagatcgaggtgagaacactg

SEQ ID NO: 2447043 - DNA, 25 bp, Homo sapien
ggatgcaagctcaaggcaagtcatt

SEQ ID NO: 2447044 - DNA, 25 bp, Homo sapien
gaatcattgaacattgcttggatgc

SEQ ID NO: 2447045 - DNA, 25 bp, Homo sapien
tgcactactgttcaccagtttcagg

SEQ ID NO: 2447046 - DNA, 25 bp, Homo sapien
gtttttggatactctgactggaatc

SEQ ID NO: 2447047 - DNA, 25 bp, Homo sapien
atgaaaagggactttgggtaggctg

SEQ ID NO: 2447048 - DNA, 25 bp, Homo sapien
tcacttgcacgctaaaggtttcccc

SEQ ID NO: 2447049 - DNA, 25 bp, Homo sapien
tcctgagtctggcttaatcacttgc

SEQ ID NO: 2447050 - DNA, 25 bp, Homo sapien
gactggaaaggactgatgctgaatg

SEQ ID NO: 2447051 - DNA, 25 bp, Homo sapien
tgttccttgtcagcctatggtttcc

SEQ ID NO: 2447052 - DNA, 25 bp, Homo sapien
tcatgaggaaacactcctccatcat

SEQ ID NO: 2447053 - DNA, 25 bp, Homo sapien
aggtgcttcacgtcatgaggaaaca

SEQ ID NO: 2447054 - DNA, 25 bp, Homo sapien
tgcttcacgtcatgaggaaacactc

SEQ ID NO: 2447055 - DNA, 25 bp, Homo sapien
cacgtcatgaggaaacactcctcca

SEQ ID NO: 2447056 - DNA, 25 bp, Homo sapien
cagaaggtgctttcagcctcatcgc

SEQ ID NO: 2447057 - DNA, 25 bp, Homo sapien
tgttcagttggaagtactccaacgg

SEQ ID NO: 2447058 - DNA, 25 bp, Homo sapien
cctcatcgcgtagtgttcagttgga

SEQ ID NO: 2447059 - DNA, 25 bp, Homo sapien
ccaacgggcagggaacatttgaatt

SEQ ID NO: 2447060 - DNA, 25 bp, Homo sapien
tcagagactgccaaaatggccctat

SEQ ID NO: 2447061 - DNA, 25 bp, Homo sapien
tttcgatctggcagtgggttatcac

SEQ ID NO: 2447062 - DNA, 25 bp, Homo sapien
ggtctagactttttcgatctggcag

SEQ ID NO: 2447063 - DNA, 25 bp, Homo sapien
caaaatggccctatggtctagactt

SEQ ID NO: 2447064 - DNA, 25 bp, Homo sapien
atccccatgggaatggaatcttgca

SEQ ID NO: 2447065 - DNA, 25 bp, Homo sapien
cccatgggaatggaatcttgcacac

SEQ ID NO: 2447066 - DNA, 25 bp, Homo sapien
catgggaatggaatcttgcacacag

SEQ ID NO: 2447067 - DNA, 25 bp, Homo sapien
caatccccatgggaatggaatcttg

SEQ ID NO: 2447068 - DNA, 25 bp, Homo sapien
gtctcagcaatgattccatcaccaa

SEQ ID NO: 2447069 - DNA, 25 bp, Homo sapien
gcaatgattccatcaccaaaggacc

SEQ ID NO: 2447070 - DNA, 25 bp, Homo sapien
catcaccaaaggacccatcaaaaac

SEQ ID NO: 2447071 - DNA, 25 bp, Homo sapien
tcttgggtctcagcaatgattccat

SEQ ID NO: 2447072 - DNA, 25 bp, Homo sapien
gtgggcactccaacatcgccttgag

SEQ ID NO: 2447073 - DNA, 25 bp, Homo sapien
acagctgagcacgtgtttcatgtcg

SEQ ID NO: 2447074 - DNA, 25 bp, Homo sapien
tcatgtcgtgagtgggcactccaac

SEQ ID NO: 2447075 - DNA, 25 bp, Homo sapien
tccaacatcgccttgagatttcatc

SEQ ID NO: 2447076 - DNA, 25 bp, Homo sapien
ggaatccatgacataacccacattc

SEQ ID NO: 2447077 - DNA, 25 bp, Homo sapien
gtggaatccatgacataacccacat

SEQ ID NO: 2447078 - DNA, 25 bp, Homo sapien
tgtggaatccatgacataacccaca

SEQ ID NO: 2447079 - DNA, 25 bp, Homo sapien
tggaatccatgacataacccacatt

SEQ ID NO: 2447080 - DNA, 25 bp, Homo sapien
tccctgctggaacggattcttgcat

SEQ ID NO: 2447081 - DNA, 25 bp, Homo sapien
tatagatctttcttgaatggagtca

SEQ ID NO: 2447082 - DNA, 25 bp, Homo sapien
ctatattccaatccctgctggaacg

SEQ ID NO: 2447083 - DNA, 25 bp, Homo sapien
ggaacggattcttgcatatagatct

SEQ ID NO: 2447084 - DNA, 25 bp, Homo sapien
tgccaacatgtgctggcatccaaat

SEQ ID NO: 2447085 - DNA, 25 bp, Homo sapien
tggactgggaggcatgccaacatgt

SEQ ID NO: 2447086 - DNA, 25 bp, Homo sapien
ggaggcatgccaacatgtgctggca

SEQ ID NO: 2447087 - DNA, 25 bp, Homo sapien
aacatgtgctggcatccaaataaca

SEQ ID NO: 2447088 - DNA, 25 bp, Homo sapien
tgcagtctgcttataacaatgtggc

SEQ ID NO: 2447089 - DNA, 25 bp, Homo sapien
gatagtcccatgatcttaggagagg

SEQ ID NO: 2447090 - DNA, 25 bp, Homo sapien
tccagcctgcctagacattgtaggg

SEQ ID NO: 2447091 - DNA, 25 bp, Homo sapien
gagggcatatgtgagccagcctgaa

SEQ ID NO: 2447092 - DNA, 25 bp, Homo sapien
gacatccgtgttcttcattggatta

SEQ ID NO: 2447093 - DNA, 25 bp, Homo sapien
tcttcctatattgacatccgtgttc

SEQ ID NO: 2447094 - DNA, 25 bp, Homo sapien
tgttcttcattggattagggttttc

SEQ ID NO: 2447095 - DNA, 25 bp, Homo sapien
ctcttcctatattgacatccgtgtt

SEQ ID NO: 2447096 - DNA, 25 bp, Homo sapien
caaagcgacatgaccctgtatcttg

SEQ ID NO: 2447097 - DNA, 25 bp, Homo sapien
cattggctagtctcaaggcaccagt

SEQ ID NO: 2447098 - DNA, 25 bp, Homo sapien
gacctccatggacgtgcatcggtgg

SEQ ID NO: 2447099 - DNA, 25 bp, Homo sapien
tctggctagcttcacaatgaacatc

SEQ ID NO: 2447100 - DNA, 25 bp, Homo sapien
caagcagtccatacaatggcccgat

SEQ ID NO: 2447101 - DNA, 25 bp, Homo sapien
tgggagtactccaacacgccaaaaa

SEQ ID NO: 2447102 - DNA, 25 bp, Homo sapien
attcgcacattcctttaattgcaca

SEQ ID NO: 2447103 - DNA, 25 bp, Homo sapien
ggtgcttccaacaccattcgcacat

SEQ ID NO: 2447104 - DNA, 25 bp, Homo sapien
ctttgcttgggctgcgggacctcat

SEQ ID NO: 2447105 - DNA, 25 bp, Homo sapien
attgggaggcatgccaagacctgcc

SEQ ID NO: 2447106 - DNA, 25 bp, Homo sapien
agacctgccggcatccaaatcaact

SEQ ID NO: 2447107 - DNA, 25 bp, Homo sapien
tgaatccactgtgaattgggaggca

SEQ ID NO: 2447108 - DNA, 25 bp, Homo sapien
tgctgtgacaaataggcacctgagc

SEQ ID NO: 2447109 - DNA, 25 bp, Homo sapien
gcctcctcctccgatgaaaaactga

SEQ ID NO: 2447110 - DNA, 25 bp, Homo sapien
catattttttccgataccaggctgg

SEQ ID NO: 2447111 - DNA, 25 bp, Homo sapien
tcagagaagcagtttgcagcgacta

SEQ ID NO: 2447112 - DNA, 25 bp, Homo sapien
tcatctgcccctgtaagaggccagt

SEQ ID NO: 2447113 - DNA, 25 bp, Homo sapien
tttgcaggaggtttcagggccctct

SEQ ID NO: 2447114 - DNA, 25 bp, Homo sapien
gggttacaatcaccaaagacagcct

SEQ ID NO: 2447115 - DNA, 25 bp, Homo sapien
tggttcccgcttacccgagagagat

SEQ ID NO: 2447116 - DNA, 25 bp, Homo sapien
cagatgacacaaaacgtgcttcaaa

SEQ ID NO: 2447117 - DNA, 25 bp, Homo sapien
gatgacacaaaacgtgcttcaaaca

SEQ ID NO: 2447118 - DNA, 25 bp, Homo sapien
tgacacaaaacgtgcttcaaacagc

SEQ ID NO: 2447119 - DNA, 25 bp, Homo sapien
gacacaaaacgtgcttcaaacagca

SEQ ID NO: 2447120 - DNA, 25 bp, Homo sapien
gtcagatagcgtgaggatacaatct

SEQ ID NO: 2447121 - DNA, 25 bp, Homo sapien
gatgaggggtggatggggtcccaca

SEQ ID NO: 2447122 - DNA, 25 bp, Homo sapien
taaggtcagatagcgtgaggataca

SEQ ID NO: 2447123 - DNA, 25 bp, Homo sapien
cctgggacatacagtgtgagtagca

SEQ ID NO: 2447124 - DNA, 25 bp, Homo sapien
attttggttcatagccgagcagata

SEQ ID NO: 2447125 - DNA, 25 bp, Homo sapien
caattttggttcatagccgagcaga

SEQ ID NO: 2447126 - DNA, 25 bp, Homo sapien
ctcaattttggttcatagccgagca

SEQ ID NO: 2447127 - DNA, 25 bp, Homo sapien
atcaggattcactcctccatcacct

SEQ ID NO: 2447128 - DNA, 25 bp, Homo sapien
tgatttctaggtagatcccactgtg

SEQ ID NO: 2447129 - DNA, 25 bp, Homo sapien
ttctaggtagatcccactgtgtttg

SEQ ID NO: 2447130 - DNA, 25 bp, Homo sapien
ggtagatcccactgtgtttgccggg

SEQ ID NO: 2447131 - DNA, 25 bp, Homo sapien
taggtagatcccactgtgtttgccg

SEQ ID NO: 2447132 - DNA, 25 bp, Homo sapien
gcatgagctagtctccaggcaccag

SEQ ID NO: 2447133 - DNA, 25 bp, Homo sapien
tgtcacccttacacagctacaagtc

SEQ ID NO: 2447134 - DNA, 25 bp, Homo sapien
tgccttgtggtggactcttgcttgt

SEQ ID NO: 2447135 - DNA, 25 bp, Homo sapien
catgccctcaaatgcgcatgagcta

SEQ ID NO: 2447136 - DNA, 25 bp, Homo sapien
gggatacacaggatagtctcatgat

SEQ ID NO: 2447137 - DNA, 25 bp, Homo sapien
cagccaaggaatcttgcctgtcttc

SEQ ID NO: 2447138 - DNA, 25 bp, Homo sapien
gcctgtcttctttgtgggatacaca

SEQ ID NO: 2447139 - DNA, 25 bp, Homo sapien
gtgggatacacaggatagtctcatg

SEQ ID NO: 2447140 - DNA, 25 bp, Homo sapien
ctgagaaggagacctctgtggaggt

SEQ ID NO: 2447141 - DNA, 25 bp, Homo sapien
gcttggctgagaaggagacctctgt

SEQ ID NO: 2447142 - DNA, 25 bp, Homo sapien
catgaatgccacaattccctgaggc

SEQ ID NO: 2447143 - DNA, 25 bp, Homo sapien
gccacaattccctgaggcttggctg

SEQ ID NO: 2447144 - DNA, 25 bp, Homo sapien
agacaacattccagtccccctggga

SEQ ID NO: 2447145 - DNA, 25 bp, Homo sapien
atcacagtctagacatctcctcctc

SEQ ID NO: 2447146 - DNA, 25 bp, Homo sapien
accccatcacagtctagacatctcc

SEQ ID NO: 2447147 - DNA, 25 bp, Homo sapien
gtccccctgggactcaattcttgca

SEQ ID NO: 2447148 - DNA, 25 bp, Homo sapien
gggagtccacttagagctgtgagaa

SEQ ID NO: 2447149 - DNA, 25 bp, Homo sapien
tgtgggagtccacttagagctgtga

SEQ ID NO: 2447150 - DNA, 25 bp, Homo sapien
ctccatttcaccaagagcccctgca

SEQ ID NO: 2447151 - DNA, 25 bp, Homo sapien
ccatttcaccaagagcccctgcaag

SEQ ID NO: 2447152 - DNA, 25 bp, Homo sapien
tgggacagatactttgagcagccat

SEQ ID NO: 2447153 - DNA, 25 bp, Homo sapien
ttttgggacagatactttgagcagc

SEQ ID NO: 2447154 - DNA, 25 bp, Homo sapien
gacagatactttgagcagccataac

SEQ ID NO: 2447155 - DNA, 25 bp, Homo sapien
tttgggacagatactttgagcagcc

SEQ ID NO: 2447156 - DNA, 25 bp, Homo sapien
acttcatattcagttcctagctgag

SEQ ID NO: 2447157 - DNA, 25 bp, Homo sapien
catcccatggagaaacactagcagt

SEQ ID NO: 2447158 - DNA, 25 bp, Homo sapien
ggaccttcacgtcactccttcattg

SEQ ID NO: 2447159 - DNA, 25 bp, Homo sapien
tagctgagcaggaccttcacgtcac

SEQ ID NO: 2447160 - DNA, 25 bp, Homo sapien
gcatcatggtggactgtggtctctt

SEQ ID NO: 2447161 - DNA, 25 bp, Homo sapien
gcatcacaatcaataactctttgcc

SEQ ID NO: 2447162 - DNA, 25 bp, Homo sapien
aggagacctccgtgaagatgcatca

SEQ ID NO: 2447163 - DNA, 25 bp, Homo sapien
ttgcatcacaatcaataactctttg

SEQ ID NO: 2447164 - DNA, 25 bp, Homo sapien
cacagagtacgagcagtaataaggt

SEQ ID NO: 2447165 - DNA, 25 bp, Homo sapien
gtcacataggtttgaagatacagtc

SEQ ID NO: 2447166 - DNA, 25 bp, Homo sapien
gaacacgtgcttttcatcacaatgg

SEQ ID NO: 2447167 - DNA, 25 bp, Homo sapien
ggtggttggagtcatgcatattcgc

SEQ ID NO: 2447168 - DNA, 25 bp, Homo sapien
ccaaatgaaagtggaatcgattgat

SEQ ID NO: 2447169 - DNA, 25 bp, Homo sapien
gcaaggaagattgggagtgcaaatt

SEQ ID NO: 2447170 - DNA, 25 bp, Homo sapien
ttcaagtgggagtcctccaacatgc

SEQ ID NO: 2447171 - DNA, 25 bp, Homo sapien
accaaggcccgctgttcaagtggga

SEQ ID NO: 2447172 - DNA, 25 bp, Homo sapien
taggacatatagtgtgagaatcaat

SEQ ID NO: 2447173 - DNA, 25 bp, Homo sapien
gatttcattgtaggacatatagtgt

SEQ ID NO: 2447174 - DNA, 25 bp, Homo sapien
tatagtgtgagaatcaataaggtca

SEQ ID NO: 2447175 - DNA, 25 bp, Homo sapien
tcattgtaggacatatagtgtgaga

SEQ ID NO: 2447176 - DNA, 25 bp, Homo sapien
tggatattcctctgatcctaggaga

SEQ ID NO: 2447177 - DNA, 25 bp, Homo sapien
tgggggtggactctcccctatcttc

SEQ ID NO: 2447178 - DNA, 25 bp, Homo sapien
tctccgtaggatcccctggatattc

SEQ ID NO: 2447179 - DNA, 25 bp, Homo sapien
ctatcttctccgtaggatcccctgg

SEQ ID NO: 2447180 - DNA, 25 bp, Homo sapien
aaaaccatgaattcctgttacagcc

SEQ ID NO: 2447181 - DNA, 25 bp, Homo sapien
gcttcacatcgttgtggggaactcc

SEQ ID NO: 2447182 - DNA, 25 bp, Homo sapien
tcacatcgttgtggggaactccttc

SEQ ID NO: 2447183 - DNA, 25 bp, Homo sapien
cgttgtggggaactccttcatagtt

SEQ ID NO: 2447184 - DNA, 25 bp, Homo sapien
tgaggaggtgcttcacatcgttgtg

SEQ ID NO: 2447185 - DNA, 25 bp, Homo sapien
gctggcatccaaataaactcccact

SEQ ID NO: 2447186 - DNA, 25 bp, Homo sapien
acaccacaccgaaaaacaggcatct

SEQ ID NO: 2447187 - DNA, 25 bp, Homo sapien
tcatgaatccacagttgggagcttg

SEQ ID NO: 2447188 - DNA, 25 bp, Homo sapien
ggagcacaccacaccgaaaaacagg

SEQ ID NO: 2447189 - DNA, 25 bp, Homo sapien
atctccacctgacccgattcttgca

SEQ ID NO: 2447190 - DNA, 25 bp, Homo sapien
gaaagaaccgtcaacaacacatcag

SEQ ID NO: 2447191 - DNA, 25 bp, Homo sapien
tgacaccagcccatggggcttcagg

SEQ ID NO: 2447192 - DNA, 25 bp, Homo sapien
cacatcagactttattccaatctcc

SEQ ID NO: 2447193 - DNA, 25 bp, Homo sapien
agagcccctcagaggctcaggatga

SEQ ID NO: 2447194 - DNA, 25 bp, Homo sapien
agaggctcaggatgaagggaggcag

SEQ ID NO: 2447195 - DNA, 25 bp, Homo sapien
ggctcaggatgaagggaggcagtga

SEQ ID NO: 2447196 - DNA, 25 bp, Homo sapien
gctcaggatgaagggaggcagtgac

SEQ ID NO: 2447197 - DNA, 25 bp, Homo sapien
ttcacatcatgagagggcagttctc

SEQ ID NO: 2447198 - DNA, 25 bp, Homo sapien
catgagagggcagttctccatcatc

SEQ ID NO: 2447199 - DNA, 25 bp, Homo sapien
gcttcacatcatgagagggcagttc

SEQ ID NO: 2447200 - DNA, 25 bp, Homo sapien
cctctgctgagcacatgcttcacat

SEQ ID NO: 2447201 - DNA, 25 bp, Homo sapien
ttctatcactcaatgaaccctcaac

SEQ ID NO: 2447202 - DNA, 25 bp, Homo sapien
tgaaccctcaacaacacaccagaca

SEQ ID NO: 2447203 - DNA, 25 bp, Homo sapien
accagacaatatcccaaacccatgg

SEQ ID NO: 2447204 - DNA, 25 bp, Homo sapien
ccctttctgaaacggagccagaaga

SEQ ID NO: 2447205 - DNA, 25 bp, Homo sapien
ataggtgattcatgtcttaaaggaa

SEQ ID NO: 2447206 - DNA, 25 bp, Homo sapien
gttcccagctgaataggtgattcat

SEQ ID NO: 2447207 - DNA, 25 bp, Homo sapien
gaaaactcctccagcgtcttgggat

SEQ ID NO: 2447208 - DNA, 25 bp, Homo sapien
tgtcttaaaggaaaactcctccagc

SEQ ID NO: 2447209 - DNA, 25 bp, Homo sapien
gattgccatcgccaagccttttggt

SEQ ID NO: 2447210 - DNA, 25 bp, Homo sapien
cagcagcactactggacatactttt

SEQ ID NO: 2447211 - DNA, 25 bp, Homo sapien
ccatcgccaagccttttggtggtgt

SEQ ID NO: 2447212 - DNA, 25 bp, Homo sapien
tttcaggattgccatcgccaagcct

SEQ ID NO: 2447213 - DNA, 25 bp, Homo sapien
tccagtgttcaagtgtgaattctcc

SEQ ID NO: 2447214 - DNA, 25 bp, Homo sapien
gcacaagcagtgcacaccgaggtcc

SEQ ID NO: 2447215 - DNA, 25 bp, Homo sapien
ccgaggtccagtgttcaagtgtgaa

SEQ ID NO: 2447216 - DNA, 25 bp, Homo sapien
tgaatccccacatccccttaattgc

SEQ ID NO: 2447217 - DNA, 25 bp, Homo sapien
tgtggattgtatcccgcatgttcac

SEQ ID NO: 2447218 - DNA, 25 bp, Homo sapien
gaaaagaggatagaacctggtgagg

SEQ ID NO: 2447219 - DNA, 25 bp, Homo sapien
aggtgtggattgtatcccgcatgtt

SEQ ID NO: 2447220 - DNA, 25 bp, Homo sapien
aaaagaggatagaacctggtgaggt

SEQ ID NO: 2447221 - DNA, 25 bp, Homo sapien
aagagtctcgatgatttgacttttc

SEQ ID NO: 2447222 - DNA, 25 bp, Homo sapien
ttagaagagtctcgatgatttgact

SEQ ID NO: 2447223 - DNA, 25 bp, Homo sapien
cttttccagggtattagcattcatg

SEQ ID NO: 2447224 - DNA, 25 bp, Homo sapien
acttttccagggtattagcattcat

SEQ ID NO: 2447225 - DNA, 25 bp, Homo sapien
tgtgttccctgtgggttagttaatg

SEQ ID NO: 2447226 - DNA, 25 bp, Homo sapien
catcagcctagcctgcctaatgaag

SEQ ID NO: 2447227 - DNA, 25 bp, Homo sapien
gtaccatcagcctagcctgcctaat

SEQ ID NO: 2447228 - DNA, 25 bp, Homo sapien
ccctgtgggttagttaatgtcttgc

SEQ ID NO: 2447229 - DNA, 25 bp, Homo sapien
ggatgccaaggccctggcttccaga

SEQ ID NO: 2447230 - DNA, 25 bp, Homo sapien
gatgccaaggccctggcttccagag

SEQ ID NO: 2447231 - DNA, 25 bp, Homo sapien
gcctgggacattcacgtagccgagc

SEQ ID NO: 2447232 - DNA, 25 bp, Homo sapien
ggacattcacgtagccgagctccaa

SEQ ID NO: 2447233 - DNA, 25 bp, Homo sapien
cggcacccgtcaactctgggggcaa

SEQ ID NO: 2447234 - DNA, 25 bp, Homo sapien
caactctgggggcaactccaggaga

SEQ ID NO: 2447235 - DNA, 25 bp, Homo sapien
ggggtgcacgtgtccaccccaggca

SEQ ID NO: 2447236 - DNA, 25 bp, Homo sapien
ctgaggggtgcacgtgtccacccca

SEQ ID NO: 2447237 - DNA, 25 bp, Homo sapien
gaggggtgcacgtgtccaccccagg

SEQ ID NO: 2447238 - DNA, 25 bp, Homo sapien
ggtgcacgtgtccaccccaggcaac

SEQ ID NO: 2447239 - DNA, 25 bp, Homo sapien
tgaggcgactacttgctcggcgttt

SEQ ID NO: 2447240 - DNA, 25 bp, Homo sapien
tgtgtgaggcgactacttgctcggc

SEQ ID NO: 2447241 - DNA, 25 bp, Homo sapien
ggcgactacttgctcggcgtttctg

SEQ ID NO: 2447242 - DNA, 25 bp, Homo sapien
cgactacttgctcggcgtttctgag

SEQ ID NO: 2447243 - DNA, 25 bp, Homo sapien
tgaggtgacctgttagctggggtga

SEQ ID NO: 2447244 - DNA, 25 bp, Homo sapien
gctggggtgaggtgacctgttagct

SEQ ID NO: 2447245 - DNA, 25 bp, Homo sapien
ctctcattgagacacccccgggtcc

SEQ ID NO: 2447246 - DNA, 25 bp, Homo sapien
tgacctgttagctggggtgaagcat

SEQ ID NO: 2447247 - DNA, 25 bp, Homo sapien
tgctgccggtacccggaagagttgc

SEQ ID NO: 2447248 - DNA, 25 bp, Homo sapien
ctgctgccggtacccggaagagttg

SEQ ID NO: 2447249 - DNA, 25 bp, Homo sapien
cctgctgccggtacccggaagagtt

SEQ ID NO: 2447250 - DNA, 25 bp, Homo sapien
ctgccggtacccggaagagttgctt

SEQ ID NO: 2447251 - DNA, 25 bp, Homo sapien
tcaggtaggagctgtacggcctgca

SEQ ID NO: 2447252 - DNA, 25 bp, Homo sapien
gcagtggaatgagacatcccgtatc

SEQ ID NO: 2447253 - DNA, 25 bp, Homo sapien
acaaccactagactgcagtggaatg

SEQ ID NO: 2447254 - DNA, 25 bp, Homo sapien
ccttcatgatcccacaaccactaga

SEQ ID NO: 2447255 - DNA, 25 bp, Homo sapien
gagcttgggcagaatcccgaagatg

SEQ ID NO: 2447256 - DNA, 25 bp, Homo sapien
cttgggagctaggtagggtatggca

SEQ ID NO: 2447257 - DNA, 25 bp, Homo sapien
tgagcttgggcagaatcccgaagat

SEQ ID NO: 2447258 - DNA, 25 bp, Homo sapien
taggtagggtatggcatggtcagtg

SEQ ID NO: 2447259 - DNA, 25 bp, Homo sapien
aaaggcttgccaggcctatctgctt

SEQ ID NO: 2447260 - DNA, 25 bp, Homo sapien
tgaaaggcttgccaggcctatctgc

SEQ ID NO: 2447261 - DNA, 25 bp, Homo sapien
ggcttgccaggcctatctgcttcta

SEQ ID NO: 2447262 - DNA, 25 bp, Homo sapien
caatgaaaggcttgccaggcctatc

SEQ ID NO: 2447263 - DNA, 25 bp, Homo sapien
gaataactctcgagaagtccaaaaa

SEQ ID NO: 2447264 - DNA, 25 bp, Homo sapien
aagctgtttttggagcatgaattgc

SEQ ID NO: 2447265 - DNA, 25 bp, Homo sapien
tgctatttgtgagatgtacgccggg

SEQ ID NO: 2447266 - DNA, 25 bp, Homo sapien
tggtgatagcataaagagtattggg

SEQ ID NO: 2447267 - DNA, 25 bp, Homo sapien
aaaagctttccaggcccatctgctt

SEQ ID NO: 2447268 - DNA, 25 bp, Homo sapien
tttccaggcccatctgcttccacca

SEQ ID NO: 2447269 - DNA, 25 bp, Homo sapien
gctttccaggcccatctgcttccac

SEQ ID NO: 2447270 - DNA, 25 bp, Homo sapien
caatgaaaagctttccaggcccatc

SEQ ID NO: 2447271 - DNA, 25 bp, Homo sapien
gggatgcaacccttttgttcctcca

SEQ ID NO: 2447272 - DNA, 25 bp, Homo sapien
gactaaaagtattaagtatcctatc

SEQ ID NO: 2447273 - DNA, 25 bp, Homo sapien
caaagaaatttgctcattatcagta

SEQ ID NO: 2447274 - DNA, 25 bp, Homo sapien
atgtccttcatatgagggatgcaac

SEQ ID NO: 2447275 - DNA, 25 bp, Homo sapien
aacagactggctctctgcatagaag

SEQ ID NO: 2447276 - DNA, 25 bp, Homo sapien
cagactggctctctgcatagaagac

SEQ ID NO: 2447277 - DNA, 25 bp, Homo sapien
acagactggctctctgcatagaaga

SEQ ID NO: 2447278 - DNA, 25 bp, Homo sapien
tgggctgtaattctcttcatcttga

SEQ ID NO: 2447279 - DNA, 25 bp, Homo sapien
ccctgggctgtaattctcttcatct

SEQ ID NO: 2447280 - DNA, 25 bp, Homo sapien
tgagtagggattacaaccttggtta

SEQ ID NO: 2447281 - DNA, 25 bp, Homo sapien
tcccctgggctgtaattctcttcat

SEQ ID NO: 2447282 - DNA, 25 bp, Homo sapien
tggctgggtacaaccacaatcaaag

SEQ ID NO: 2447283 - DNA, 25 bp, Homo sapien
gctgtgtagatcagctggcaatgca

SEQ ID NO: 2447284 - DNA, 25 bp, Homo sapien
tcaaagctgctgtgtagatcagctg

SEQ ID NO: 2447285 - DNA, 25 bp, Homo sapien
gaatctggctgggtacaaccacaat

SEQ ID NO: 2447286 - DNA, 25 bp, Homo sapien
cactgatcatttcacagttaccttg

SEQ ID NO: 2447287 - DNA, 25 bp, Homo sapien
caggatgctctccttatgccctgat

SEQ ID NO: 2447288 - DNA, 25 bp, Homo sapien
taaggcaccataggcaaatccagga

SEQ ID NO: 2447289 - DNA, 25 bp, Homo sapien
ccttgtgaaagatcataaggcacca

SEQ ID NO: 2447290 - DNA, 25 bp, Homo sapien
caatgcgttttattttaccgagaag

SEQ ID NO: 2447291 - DNA, 25 bp, Homo sapien
tattcatctggaggtgtttgaggat

SEQ ID NO: 2447292 - DNA, 25 bp, Homo sapien
cagtattccaactgtattcatctgg

SEQ ID NO: 2447293 - DNA, 25 bp, Homo sapien
gaagtgggtagccagtattccaact

SEQ ID NO: 2447294 - DNA, 25 bp, Homo sapien
ggtgggcatgccagagaacaacctg

SEQ ID NO: 2447295 - DNA, 25 bp, Homo sapien
gaaagcctcgccgacaataagctga

SEQ ID NO: 2447296 - DNA, 25 bp, Homo sapien
catgtggcccttgtgcactgggtgc

SEQ ID NO: 2447297 - DNA, 25 bp, Homo sapien
ggtggttctgtctctatctggcatg

SEQ ID NO: 2447298 - DNA, 25 bp, Homo sapien
gcggtaactcttccgagaccacgct

SEQ ID NO: 2447299 - DNA, 25 bp, Homo sapien
tatgtcgcggtaactcttccgagac

SEQ ID NO: 2447300 - DNA, 25 bp, Homo sapien
gctccattatgtcgcggtaactctt

SEQ ID NO: 2447301 - DNA, 25 bp, Homo sapien
cctgcagctccattatgtcgcggta

SEQ ID NO: 2447302 - DNA, 25 bp, Homo sapien
gccaactgcgggagggacagctgga

SEQ ID NO: 2447303 - DNA, 25 bp, Homo sapien
cacagggccaactgcgggagggaca

SEQ ID NO: 2447304 - DNA, 25 bp, Homo sapien
gcttcggaacaccacagggccaact

SEQ ID NO: 2447305 - DNA, 25 bp, Homo sapien
cgtaaccggcttcggaacaccacag

SEQ ID NO: 2447306 - DNA, 25 bp, Homo sapien
aaagagcctgaggttcgcctggccc

SEQ ID NO: 2447307 - DNA, 25 bp, Homo sapien
tcattgttttccctatttaggccac

SEQ ID NO: 2447308 - DNA, 25 bp, Homo sapien
ttttccctatttaggccaccaatga

SEQ ID NO: 2447309 - DNA, 25 bp, Homo sapien
cctatttaggccaccaatgaaatgc

SEQ ID NO: 2447310 - DNA, 25 bp, Homo sapien
ttcattgttttccctatttaggcca

SEQ ID NO: 2447311 - DNA, 25 bp, Homo sapien
tggatttgctggttcgatcctttat

SEQ ID NO: 2447312 - DNA, 25 bp, Homo sapien
gatttgctggttcgatcctttatca

SEQ ID NO: 2447313 - DNA, 25 bp, Homo sapien
tttgctggttcgatcctttatcaaa

SEQ ID NO: 2447314 - DNA, 25 bp, Homo sapien
tgctggttcgatcctttatcaaaag

SEQ ID NO: 2447315 - DNA, 25 bp, Homo sapien
cccacggctgcttccttcccagtgt

SEQ ID NO: 2447316 - DNA, 25 bp, Homo sapien
tttccccagatttgcccacggctgc

SEQ ID NO: 2447317 - DNA, 25 bp, Homo sapien
ttctgggctcaaaatattttcccca

SEQ ID NO: 2447318 - DNA, 25 bp, Homo sapien
atattttccccagatttgcccacgg

SEQ ID NO: 2447319 - DNA, 25 bp, Homo sapien
aagggcttctgcttcttgaggaagc

SEQ ID NO: 2447320 - DNA, 25 bp, Homo sapien
tccttcatgtgagggatgccatcct

SEQ ID NO: 2447321 - DNA, 25 bp, Homo sapien
gcttctgcttcttgaggaagctggt

SEQ ID NO: 2447322 - DNA, 25 bp, Homo sapien
tctgcttcttgaggaagctggtggt

SEQ ID NO: 2447323 - DNA, 25 bp, Homo sapien
tataattgagaaatttcgatatctt

SEQ ID NO: 2447324 - DNA, 25 bp, Homo sapien
tcagtcctatggttccatctttaca

SEQ ID NO: 2447325 - DNA, 25 bp, Homo sapien
taattgagaaatttcgatatcttca

SEQ ID NO: 2447326 - DNA, 25 bp, Homo sapien
aatataattgagaaatttcgatatc

SEQ ID NO: 2447327 - DNA, 25 bp, Homo sapien
gtcaggcatgagttactaaacccag

SEQ ID NO: 2447328 - DNA, 25 bp, Homo sapien
tatggcaggccaatgtacaaactct

SEQ ID NO: 2447329 - DNA, 25 bp, Homo sapien
cctgctccgtactcctgaagtgctg

SEQ ID NO: 2447330 - DNA, 25 bp, Homo sapien
cagacatggtggagtgttgttgaac

SEQ ID NO: 2447331 - DNA, 25 bp, Homo sapien
tcatccaattattgcttcttaccac

SEQ ID NO: 2447332 - DNA, 25 bp, Homo sapien
cataaccatcgtctcttagagacat

SEQ ID NO: 2447333 - DNA, 25 bp, Homo sapien
agagacatgtggtcatttctccagg

SEQ ID NO: 2447334 - DNA, 25 bp, Homo sapien
caggaagagattggccgtctacgtg

SEQ ID NO: 2447335 - DNA, 25 bp, Homo sapien
cgtctacgtgtaggacctccataat

SEQ ID NO: 2447336 - DNA, 25 bp, Homo sapien
atgcatagtctctaggtggtgtcct

SEQ ID NO: 2447337 - DNA, 25 bp, Homo sapien
tagaagaatgttcatcccagctaga

SEQ ID NO: 2447338 - DNA, 25 bp, Homo sapien
catagtctctaggtggtgtcctagt

SEQ ID NO: 2447339 - DNA, 25 bp, Homo sapien
gaagaatgttcatcccagctagaat

SEQ ID NO: 2447340 - DNA, 25 bp, Homo sapien
tatatcctacagaggaatgttcatc

SEQ ID NO: 2447341 - DNA, 25 bp, Homo sapien
ctatatcctacagaggaatgttcat

SEQ ID NO: 2447342 - DNA, 25 bp, Homo sapien
gactagaacgaccataatcacagta

SEQ ID NO: 2447343 - DNA, 25 bp, Homo sapien
cccgactagaacgaccataatcaca

SEQ ID NO: 2447344 - DNA, 25 bp, Homo sapien
ctgccatatctatctagtgtattgt

SEQ ID NO: 2447345 - DNA, 25 bp, Homo sapien
cgtgctcatgaccacaaaaataaaa

SEQ ID NO: 2447346 - DNA, 25 bp, Homo sapien
tattgttataatcagggcggctgct

SEQ ID NO: 2447347 - DNA, 25 bp, Homo sapien
ccgcagcttcttgagtaactctcct

SEQ ID NO: 2447348 - DNA, 25 bp, Homo sapien
cagatctactttcccgaccatctat

SEQ ID NO: 2447349 - DNA, 25 bp, Homo sapien
tactttcccgaccatctattgtaga

SEQ ID NO: 2447350 - DNA, 25 bp, Homo sapien
tcccgaccatctattgtagatgcca

SEQ ID NO: 2447351 - DNA, 25 bp, Homo sapien
tttcagatctactttcccgaccatc

SEQ ID NO: 2447352 - DNA, 25 bp, Homo sapien
aatccacagcaacgtgataggctct

SEQ ID NO: 2447353 - DNA, 25 bp, Homo sapien
ggctcttgcagacggtaccctgagt

SEQ ID NO: 2447354 - DNA, 25 bp, Homo sapien
ggtggagtcagaggtcgtaatccac

SEQ ID NO: 2447355 - DNA, 25 bp, Homo sapien
gataggctcttgcagacggtaccct

SEQ ID NO: 2447356 - DNA, 25 bp, Homo sapien
gaaaaatgattgagattctggggaa

SEQ ID NO: 2447357 - DNA, 25 bp, Homo sapien
gattctggggaaagtgaatagagaa

SEQ ID NO: 2447358 - DNA, 25 bp, Homo sapien
ggaaaaatgattgagattctgggga

SEQ ID NO: 2447359 - DNA, 25 bp, Homo sapien
gggaaagtgaatagagaactctgat

SEQ ID NO: 2447360 - DNA, 25 bp, Homo sapien
cagctgacgcattagagggattccc

SEQ ID NO: 2447361 - DNA, 25 bp, Homo sapien
gtcatgagccattaaagtgttcccc

SEQ ID NO: 2447362 - DNA, 25 bp, Homo sapien
tcccctcagggtgtgttaataacag

SEQ ID NO: 2447363 - DNA, 25 bp, Homo sapien
gattccctctagagtcattggcatt

SEQ ID NO: 2447364 - DNA, 25 bp, Homo sapien
tctcagtagagtctgatgtgttctc

SEQ ID NO: 2447365 - DNA, 25 bp, Homo sapien
ctcttctaagcttagttggacttgg

SEQ ID NO: 2447366 - DNA, 25 bp, Homo sapien
tgtttcgcatgtctgagcattccat

SEQ ID NO: 2447367 - DNA, 25 bp, Homo sapien
ggccaaaggataagttcaattgcca

SEQ ID NO: 2447368 - DNA, 25 bp, Homo sapien
ttcttccctttactatcggacgtgc

SEQ ID NO: 2447369 - DNA, 25 bp, Homo sapien
ctttactatcggacgtgcccgacat

SEQ ID NO: 2447370 - DNA, 25 bp, Homo sapien
tccctttactatcggacgtgcccga

SEQ ID NO: 2447371 - DNA, 25 bp, Homo sapien
tcttccctttactatcggacgtgcc

SEQ ID NO: 2447372 - DNA, 25 bp, Homo sapien
ggcgtcagccagttactgcaaaggc

SEQ ID NO: 2447373 - DNA, 25 bp, Homo sapien
gggcgtcagccagttactgcaaagg

SEQ ID NO: 2447374 - DNA, 25 bp, Homo sapien
gcgtcagccagttactgcaaaggct

SEQ ID NO: 2447375 - DNA, 25 bp, Homo sapien
cgtcagccagttactgcaaaggctg

SEQ ID NO: 2447376 - DNA, 25 bp, Homo sapien
aaagagcctgaggttcgcctggccc

SEQ ID NO: 2447377 - DNA, 25 bp, Homo sapien
gccaactgcgggagggacagctgga

SEQ ID NO: 2447378 - DNA, 25 bp, Homo sapien
gcttcggaacaccacagggccaact

SEQ ID NO: 2447379 - DNA, 25 bp, Homo sapien
cgtaaccggcttcggaacaccacag

SEQ ID NO: 2447380 - DNA, 25 bp, Homo sapien
aagcttgccaggatgatctgcttct

SEQ ID NO: 2447381 - DNA, 25 bp, Homo sapien
cttctgatatgggaccatgtttccc

SEQ ID NO: 2447382 - DNA, 25 bp, Homo sapien
ccaaatactgctttaagcatcttct

SEQ ID NO: 2447383 - DNA, 25 bp, Homo sapien
ctgatatgggaccatgtttcccaaa

SEQ ID NO: 2447384 - DNA, 25 bp, Homo sapien
tttgctggttcgatcctttatcaaa

SEQ ID NO: 2447385 - DNA, 25 bp, Homo sapien
gatttgctggttcgatcctttatca

SEQ ID NO: 2447386 - DNA, 25 bp, Homo sapien
tgctggttcgatcctttatcaaaag

SEQ ID NO: 2447387 - DNA, 25 bp, Homo sapien
tggatttgctggttcgatcctttat

SEQ ID NO: 2447388 - DNA, 25 bp, Homo sapien
cccacggctgcttccttcccagtgt

SEQ ID NO: 2447389 - DNA, 25 bp, Homo sapien
tttccccagatttgcccacggctgc

SEQ ID NO: 2447390 - DNA, 25 bp, Homo sapien
ttctgggctcaaaatattttcccca

SEQ ID NO: 2447391 - DNA, 25 bp, Homo sapien
atattttccccagatttgcccacgg

SEQ ID NO: 2447392 - DNA, 25 bp, Homo sapien
aagccaccctcttgttcctccactg

SEQ ID NO: 2447393 - DNA, 25 bp, Homo sapien
gcccttcatgtgagggaagccaccc

SEQ ID NO: 2447394 - DNA, 25 bp, Homo sapien
ttctgtttctcgaagaagctggtgg

SEQ ID NO: 2447395 - DNA, 25 bp, Homo sapien
ccaggtgcccttcatgtgagggaag

SEQ ID NO: 2447396 - DNA, 25 bp, Homo sapien
cttgagatcaggagtgtatccacca

SEQ ID NO: 2447397 - DNA, 25 bp, Homo sapien
taactggaatgagtcccctagaata

SEQ ID NO: 2447398 - DNA, 25 bp, Homo sapien
agtcccctagaataactcatcttga

SEQ ID NO: 2447399 - DNA, 25 bp, Homo sapien
aatgagtcccctagaataactcatc

SEQ ID NO: 2447400 - DNA, 25 bp, Homo sapien
tccaggaagatattgtcgctctgcg

SEQ ID NO: 2447401 - DNA, 25 bp, Homo sapien
tcttgttgacatgcgatcatttctc

SEQ ID NO: 2447402 - DNA, 25 bp, Homo sapien
gctctgcgtggaggaactccataat

SEQ ID NO: 2447403 - DNA, 25 bp, Homo sapien
ccatcatgtcttgttgacatgcgat

SEQ ID NO: 2447404 - DNA, 25 bp, Homo sapien
cccgattagaatgaccattatcacg

SEQ ID NO: 2447405 - DNA, 25 bp, Homo sapien
ccgattagaatgaccattatcacgg

SEQ ID NO: 2447406 - DNA, 25 bp, Homo sapien
aatcacggtatgcatggcctctaga

SEQ ID NO: 2447407 - DNA, 25 bp, Homo sapien
gagcataatccctagtttctcggga

SEQ ID NO: 2447408 - DNA, 25 bp, Homo sapien
ggcctctagatggtggagcataatc

SEQ ID NO: 2447409 - DNA, 25 bp, Homo sapien
cataatcacggtatgcatggcctct

SEQ ID NO: 2447410 - DNA, 25 bp, Homo sapien
gtatcctctagaataactttcatcc

SEQ ID NO: 2447411 - DNA, 25 bp, Homo sapien
ggtatccatggcctctagatggtgg

SEQ ID NO: 2447412 - DNA, 25 bp, Homo sapien
gatggtggagcatactccctagttt

SEQ ID NO: 2447413 - DNA, 25 bp, Homo sapien
tatccatggcctctagatggtggag

SEQ ID NO: 2447414 - DNA, 25 bp, Homo sapien
ggtggagcatactccctagtttctc

SEQ ID NO: 2447415 - DNA, 25 bp, Homo sapien
atatcctctagaataactttcatgt

SEQ ID NO: 2447416 - DNA, 25 bp, Homo sapien
actttcatgtcgacgagaatgacca

SEQ ID NO: 2447417 - DNA, 25 bp, Homo sapien
taactttcatgtcgacgagaatgac

SEQ ID NO: 2447418 - DNA, 25 bp, Homo sapien
gaataactttcatgtcgacgagaat

SEQ ID NO: 2447419 - DNA, 25 bp, Homo sapien
catagtctctatgtggtggagcata

SEQ ID NO: 2447420 - DNA, 25 bp, Homo sapien
tggtttctcgggaacttggatgatt

SEQ ID NO: 2447421 - DNA, 25 bp, Homo sapien
cctggtttctcgggaacttggatga

SEQ ID NO: 2447422 - DNA, 25 bp, Homo sapien
gcataatccctggtttctcgggaac

SEQ ID NO: 2447423 - DNA, 25 bp, Homo sapien
tcatcccaactagaatgaccataat

SEQ ID NO: 2447424 - DNA, 25 bp, Homo sapien
atcctctagaggaatgttcatccca

SEQ ID NO: 2447425 - DNA, 25 bp, Homo sapien
aggaatgttcatcccaactagaatg

SEQ ID NO: 2447426 - DNA, 25 bp, Homo sapien
aatgttcatcccaactagaatgacc

SEQ ID NO: 2447427 - DNA, 25 bp, Homo sapien
gatctctaccaagggcctcaccgta

SEQ ID NO: 2447428 - DNA, 25 bp, Homo sapien
ctaccaagggcctcaccgtagccat

SEQ ID NO: 2447429 - DNA, 25 bp, Homo sapien
aagggcctcaccgtagccatcatga

SEQ ID NO: 2447430 - DNA, 25 bp, Homo sapien
ggcctcaccgtagccatcatgataa

SEQ ID NO: 2447431 - DNA, 25 bp, Homo sapien
ttctgcaaacatgctcacgatcaca

SEQ ID NO: 2447432 - DNA, 25 bp, Homo sapien
aggatcagggagcaccctacccaga

SEQ ID NO: 2447433 - DNA, 25 bp, Homo sapien
tatctgctcgagtctcctttttcag

SEQ ID NO: 2447434 - DNA, 25 bp, Homo sapien
gtattactatatgcgtggcaggtgc

SEQ ID NO: 2447435 - DNA, 25 bp, Homo sapien
ttcagtaatatgcaggtaacaatgc

SEQ ID NO: 2447436 - DNA, 25 bp, Homo sapien
gatattacatctaaacacttttcaa

SEQ ID NO: 2447437 - DNA, 25 bp, Homo sapien
caaacaaggattggtatgcaataac

SEQ ID NO: 2447438 - DNA, 25 bp, Homo sapien
ctctctccacaaaaccaacatgttt

SEQ ID NO: 2447439 - DNA, 25 bp, Homo sapien
tgctgaattagggtgagaatcaact

SEQ ID NO: 2447440 - DNA, 25 bp, Homo sapien
tcagaggtcacaatccaaagcaagg

SEQ ID NO: 2447441 - DNA, 25 bp, Homo sapien
gaggatgacaccctgattgctgaat

SEQ ID NO: 2447442 - DNA, 25 bp, Homo sapien
gattatacaacccacacgttatggg

SEQ ID NO: 2447443 - DNA, 25 bp, Homo sapien
gtctacagtctcctaggatcagagg

SEQ ID NO: 2447444 - DNA, 25 bp, Homo sapien
tgtctacagtctcctaggatcagag

SEQ ID NO: 2447445 - DNA, 25 bp, Homo sapien
tctacagtctcctaggatcagagga

SEQ ID NO: 2447446 - DNA, 25 bp, Homo sapien
ctacagtctcctaggatcagaggaa

SEQ ID NO: 2447447 - DNA, 25 bp, Homo sapien
agcgtcattccgttgcactcccgtt

SEQ ID NO: 2447448 - DNA, 25 bp, Homo sapien
gcactcccgtttgactctgggtatg

SEQ ID NO: 2447449 - DNA, 25 bp, Homo sapien
ccctagaccgatgagaaaaatggaa

SEQ ID NO: 2447450 - DNA, 25 bp, Homo sapien
cattgagccaaactcaggaaaccct

SEQ ID NO: 2447451 - DNA, 25 bp, Homo sapien
gaggatctttctccgtgaaatggaa

SEQ ID NO: 2447452 - DNA, 25 bp, Homo sapien
cgtgagtttgcttggattgctccaa

SEQ ID NO: 2447453 - DNA, 25 bp, Homo sapien
aaaccctaatccaatgaagaacacg

SEQ ID NO: 2447454 - DNA, 25 bp, Homo sapien
cacggatgtcaatataggaagaggc

SEQ ID NO: 2447455 - DNA, 25 bp, Homo sapien
acatctaggcatgcctgagacatcc

SEQ ID NO: 2447456 - DNA, 25 bp, Homo sapien
gagacatcccgcagatcttttagat

SEQ ID NO: 2447457 - DNA, 25 bp, Homo sapien
agatccttatgaattttgtggttta

SEQ ID NO: 2447458 - DNA, 25 bp, Homo sapien
cgcagatcttttagatccttatgaa

SEQ ID NO: 2447459 - DNA, 25 bp, Homo sapien
aggcaagagtccacagccgacatac

SEQ ID NO: 2447460 - DNA, 25 bp, Homo sapien
atctactctctcgtaggatcatggg

SEQ ID NO: 2447461 - DNA, 25 bp, Homo sapien
actctctcgtaggatcatgggacta

SEQ ID NO: 2447462 - DNA, 25 bp, Homo sapien
tactctctcgtaggatcatgggact

SEQ ID NO: 2447463 - DNA, 25 bp, Homo sapien
taagcagaagtgacttacaggcgca

SEQ ID NO: 2447464 - DNA, 25 bp, Homo sapien
tgctagatccccttttgggagacag

SEQ ID NO: 2447465 - DNA, 25 bp, Homo sapien
tttgcaatttattcctgggcctctg

SEQ ID NO: 2447466 - DNA, 25 bp, Homo sapien
catgcaggctgtaactagaaatcac

SEQ ID NO: 2447467 - DNA, 25 bp, Homo sapien
gacacaggacaatgaaacactggga

SEQ ID NO: 2447468 - DNA, 25 bp, Homo sapien
cctctcaatttgctgcagactcatg

SEQ ID NO: 2447469 - DNA, 25 bp, Homo sapien
caggtgatttggacattggcaggtc

SEQ ID NO: 2447470 - DNA, 25 bp, Homo sapien
tttggacattggcaggtctctgccc

SEQ ID NO: 2447471 - DNA, 25 bp, Homo sapien
cgctcagctgggagccaaattcgat

SEQ ID NO: 2447472 - DNA, 25 bp, Homo sapien
tgaagaaccgctcagctgggagcca

SEQ ID NO: 2447473 - DNA, 25 bp, Homo sapien
gctgggagccaaattcgatgtaaat

SEQ ID NO: 2447474 - DNA, 25 bp, Homo sapien
agccaaattcgatgtaaattcaggg

SEQ ID NO: 2447475 - DNA, 25 bp, Homo sapien
cctcaccagattgtatcctcaccca

SEQ ID NO: 2447476 - DNA, 25 bp, Homo sapien
gatgatatcccaagacaaaggagga

SEQ ID NO: 2447477 - DNA, 25 bp, Homo sapien
aatttctccctgctcatattctatg

SEQ ID NO: 2447478 - DNA, 25 bp, Homo sapien
cccaggatgatatcccaagacaaag

SEQ ID NO: 2447479 - DNA, 25 bp, Homo sapien
ctgacaaagtccgggaggccttagg

SEQ ID NO: 2447480 - DNA, 25 bp, Homo sapien
ccgggaggccttaggcatcctccag

SEQ ID NO: 2447481 - DNA, 25 bp, Homo sapien
caaagtccgggaggccttaggcatc

SEQ ID NO: 2447482 - DNA, 25 bp, Homo sapien
taggagttttgcggcttattcctgg

SEQ ID NO: 2447483 - DNA, 25 bp, Homo sapien
agtgactggagatcatgacgctgca

SEQ ID NO: 2447484 - DNA, 25 bp, Homo sapien
cttgcagtgactggagatcatgacg

SEQ ID NO: 2447485 - DNA, 25 bp, Homo sapien
gactggagatcatgacgctgcactc

SEQ ID NO: 2447486 - DNA, 25 bp, Homo sapien
ccagcccaggcaacggagtgcaact

SEQ ID NO: 2447487 - DNA, 25 bp, Homo sapien
aattgctagtctgacaaaggtgtcc

SEQ ID NO: 2447488 - DNA, 25 bp, Homo sapien
ctgtggaaattgctagtctgacaaa

SEQ ID NO: 2447489 - DNA, 25 bp, Homo sapien
aaggtgtccagtaatgctgttgagg

SEQ ID NO: 2447490 - DNA, 25 bp, Homo sapien
tgacaaaggtgtccagtaatgctgt

SEQ ID NO: 2447491 - DNA, 25 bp, Homo sapien
gaggaattctccttcacgacgtgaa

SEQ ID NO: 2447492 - DNA, 25 bp, Homo sapien
ggctgaaggacgataaaacactggg

SEQ ID NO: 2447493 - DNA, 25 bp, Homo sapien
gaatgaaatctcacgatgatagagg

SEQ ID NO: 2447494 - DNA, 25 bp, Homo sapien
tgaagcagttgcttggctgggaact

SEQ ID NO: 2447495 - DNA, 25 bp, Homo sapien
cattagacacattatttaagcagac

SEQ ID NO: 2447496 - DNA, 25 bp, Homo sapien
gcacaaacaaagcaacagagaggcc

SEQ ID NO: 2447497 - DNA, 25 bp, Homo sapien
aagtgcattagacacattatttaag

SEQ ID NO: 2447498 - DNA, 25 bp, Homo sapien
tgcattagacacattatttaagcag

SEQ ID NO: 2447499 - DNA, 25 bp, Homo sapien
gactgacctcggactgtgcagataa

SEQ ID NO: 2447500 - DNA, 25 bp, Homo sapien
ctcagactgacctcggactgtgcag

SEQ ID NO: 2447501 - DNA, 25 bp, Homo sapien
cagataaggttgagacagtgaaaca

SEQ ID NO: 2447502 - DNA, 25 bp, Homo sapien
cggactgtgcagataaggttgagac

SEQ ID NO: 2447503 - DNA, 25 bp, Homo sapien
ctgagtccttagaggtgggtgtcag

SEQ ID NO: 2447504 - DNA, 25 bp, Homo sapien
cctcctcagaaaacgcaatgccctt

SEQ ID NO: 2447505 - DNA, 25 bp, Homo sapien
cctcagaaaacgcaatgcccttttc

SEQ ID NO: 2447506 - DNA, 25 bp, Homo sapien
caagccctcctcagaaaacgcaatg

SEQ ID NO: 2447507 - DNA, 25 bp, Homo sapien
gaaaacgcaatgcccttttctgcag

SEQ ID NO: 2447508 - DNA, 25 bp, Homo sapien
ccttgagtggtctcttgggattgtt

SEQ ID NO: 2447509 - DNA, 25 bp, Homo sapien
tcttgggattgttgaggcccatttt

SEQ ID NO: 2447510 - DNA, 25 bp, Homo sapien
tgtccttgagtggtctcttgggatt

SEQ ID NO: 2447511 - DNA, 25 bp, Homo sapien
cttgggattgttgaggcccatttta

SEQ ID NO: 2447512 - DNA, 25 bp, Homo sapien
ctggcagtcagtgccattcaaattg

SEQ ID NO: 2447513 - DNA, 25 bp, Homo sapien
gtcagtgccattcaaattgtcttgt

SEQ ID NO: 2447514 - DNA, 25 bp, Homo sapien
aaagtagaaagccaagcccagtggc

SEQ ID NO: 2447515 - DNA, 25 bp, Homo sapien
ccattcaaattgtcttgtctccagg

SEQ ID NO: 2447516 - DNA, 25 bp, Homo sapien
tccccgtagtctcagagaagtataa

SEQ ID NO: 2447517 - DNA, 25 bp, Homo sapien
ctcaagacctctgttcaaggaaagt

SEQ ID NO: 2447518 - DNA, 25 bp, Homo sapien
agaacacatgctccccgtagtctca

SEQ ID NO: 2447519 - DNA, 25 bp, Homo sapien
ctggcctcaagacctctgttcaagg

SEQ ID NO: 2447520 - DNA, 25 bp, Homo sapien
gaacatcgccatgccaaggaagcag

SEQ ID NO: 2447521 - DNA, 25 bp, Homo sapien
agaacatcgccatgccaaggaagca

SEQ ID NO: 2447522 - DNA, 25 bp, Homo sapien
aagaacatcgccatgccaaggaagc

SEQ ID NO: 2447523 - DNA, 25 bp, Homo sapien
ccccccacagtccggaagtgcctgg

SEQ ID NO: 2447524 - DNA, 25 bp, Homo sapien
ccacagtccggaagtgcctggggcc

SEQ ID NO: 2447525 - DNA, 25 bp, Homo sapien
cacagtccggaagtgcctggggcct

SEQ ID NO: 2447526 - DNA, 25 bp, Homo sapien
ccccacagtccggaagtgcctgggg

SEQ ID NO: 2447527 - DNA, 25 bp, Homo sapien
tcagcatggtaaacacggtgaaacc

SEQ ID NO: 2447528 - DNA, 25 bp, Homo sapien
cagcatggtaaacacggtgaaaccc

SEQ ID NO: 2447529 - DNA, 25 bp, Homo sapien
cattgggcatggcagttcaagcttg

SEQ ID NO: 2447530 - DNA, 25 bp, Homo sapien
aatccaggcggtcatctcacgaagt

SEQ ID NO: 2447531 - DNA, 25 bp, Homo sapien
ggtgggttaatccaggcggtcatct

SEQ ID NO: 2447532 - DNA, 25 bp, Homo sapien
tgcaggctcagtgcatcagctccgt

SEQ ID NO: 2447533 - DNA, 25 bp, Homo sapien
tcacgaagtggaagtgagatacagc

SEQ ID NO: 2447534 - DNA, 25 bp, Homo sapien
catgaacgtggccacagatgtcccc

SEQ ID NO: 2447535 - DNA, 25 bp, Homo sapien
tgagaaggaagctctgtccgaggca

SEQ ID NO: 2447536 - DNA, 25 bp, Homo sapien
gaacgtggccacagatgtccccaag

SEQ ID NO: 2447537 - DNA, 25 bp, Homo sapien
cacggcctctctcgagtgtcctgag

SEQ ID NO: 2447538 - DNA, 25 bp, Homo sapien
aggttttatcctcatggtggacccg

SEQ ID NO: 2447539 - DNA, 25 bp, Homo sapien
tttatcctcatggtggacccgaccc

SEQ ID NO: 2447540 - DNA, 25 bp, Homo sapien
ggttttatcctcatggtggacccga

SEQ ID NO: 2447541 - DNA, 25 bp, Homo sapien
cgaccccaggtgtcccaaagccgcg

SEQ ID NO: 2447542 - DNA, 25 bp, Homo sapien
cttttcctcacttggccgccagatg

SEQ ID NO: 2447543 - DNA, 25 bp, Homo sapien
atgtactctcctgggagggtcctga

SEQ ID NO: 2447544 - DNA, 25 bp, Homo sapien
atgccatgtactctcctgggagggt

SEQ ID NO: 2447545 - DNA, 25 bp, Homo sapien
gtcttttcctcacttggccgccaga

SEQ ID NO: 2447546 - DNA, 25 bp, Homo sapien
tcagcccatcgtggttccactcagc

SEQ ID NO: 2447547 - DNA, 25 bp, Homo sapien
cagaaacaagcccagatcatctgca

SEQ ID NO: 2447548 - DNA, 25 bp, Homo sapien
tgcaaaccacactttggtagctgtg

SEQ ID NO: 2447549 - DNA, 25 bp, Homo sapien
gaaaaatgagttattaaagcatgaa

SEQ ID NO: 2447550 - DNA, 25 bp, Homo sapien
taccattaaatttcccaagatgatg

SEQ ID NO: 2447551 - DNA, 25 bp, Homo sapien
caagatgatgggtgaagcataggcc

SEQ ID NO: 2447552 - DNA, 25 bp, Homo sapien
aactgcttctatgacctttggacag

SEQ ID NO: 2447553 - DNA, 25 bp, Homo sapien
tgtgatttggtttaggctaacaaaa

SEQ ID NO: 2447554 - DNA, 25 bp, Homo sapien
tccttctgaacaattgtgcagctgg

SEQ ID NO: 2447555 - DNA, 25 bp, Homo sapien
acatcttttttcctttagattccat

SEQ ID NO: 2447556 - DNA, 25 bp, Homo sapien
cacatcttttttcctttagattcca

SEQ ID NO: 2447557 - DNA, 25 bp, Homo sapien
tcctactgtacttgttcggggtcta

SEQ ID NO: 2447558 - DNA, 25 bp, Homo sapien
tacagatcaacataggaaagtactt

SEQ ID NO: 2447559 - DNA, 25 bp, Homo sapien
acagatcaacataggaaagtacttt

SEQ ID NO: 2447560 - DNA, 25 bp, Homo sapien
tcgttatctcatgggacaggctcat

SEQ ID NO: 2447561 - DNA, 25 bp, Homo sapien
tagaagacagtatcatgagaatgtg

SEQ ID NO: 2447562 - DNA, 25 bp, Homo sapien
aagacagtatcatgagaatgtggat

SEQ ID NO: 2447563 - DNA, 25 bp, Homo sapien
ctgttagaagacagtatcatgagaa

SEQ ID NO: 2447564 - DNA, 25 bp, Homo sapien
tgttagaagacagtatcatgagaat

SEQ ID NO: 2447565 - DNA, 25 bp, Homo sapien
tacgacttgatatcttgcagttcct

SEQ ID NO: 2447566 - DNA, 25 bp, Homo sapien
tccttctttgcttggatatcttcac

SEQ ID NO: 2447567 - DNA, 25 bp, Homo sapien
tcacaagcctgcattgtgttggcat

SEQ ID NO: 2447568 - DNA, 25 bp, Homo sapien
ttgcttggatatcttcacaagcctg

SEQ ID NO: 2447569 - DNA, 25 bp, Homo sapien
tggcatccatgtaagccagttagaa

SEQ ID NO: 2447570 - DNA, 25 bp, Homo sapien
gaagtgagttactccttttagagaa

SEQ ID NO: 2447571 - DNA, 25 bp, Homo sapien
tgtaagaagtgagttactcctttta

SEQ ID NO: 2447572 - DNA, 25 bp, Homo sapien
gcatccatgtaagccagttagaaga

SEQ ID NO: 2447573 - DNA, 25 bp, Homo sapien
gctttgaggaagattgtcatcctca

SEQ ID NO: 2447574 - DNA, 25 bp, Homo sapien
ctttgaggaagattgtcatcctcac

SEQ ID NO: 2447575 - DNA, 25 bp, Homo sapien
gtggccatttgatctggtcatctgg

SEQ ID NO: 2447576 - DNA, 25 bp, Homo sapien
aaatgcactgtgctgccattggatg

SEQ ID NO: 2447577 - DNA, 25 bp, Homo sapien
tttgatctggtcatctgggaagtaa

SEQ ID NO: 2447578 - DNA, 25 bp, Homo sapien
gatggagtcatggaaatgaacaaag

SEQ ID NO: 2447579 - DNA, 25 bp, Homo sapien
catggttctgctgcttgtggtacaa

SEQ ID NO: 2447580 - DNA, 25 bp, Homo sapien
ggtacaagcactgtccaagatataa

SEQ ID NO: 2447581 - DNA, 25 bp, Homo sapien
taaacaaaggtgtgctaagcagagc

SEQ ID NO: 2447582 - DNA, 25 bp, Homo sapien
aattctggttgagcccaaggtttca

SEQ ID NO: 2447583 - DNA, 25 bp, Homo sapien
ggaccaaagtgcgaacatatcctct

SEQ ID NO: 2447584 - DNA, 25 bp, Homo sapien
caggtagtacctgctcgagaatgag

SEQ ID NO: 2447585 - DNA, 25 bp, Homo sapien
cacttgggtccatggccaaactgca

SEQ ID NO: 2447586 - DNA, 25 bp, Homo sapien
tactaagttgattctgggtccagga

SEQ ID NO: 2447587 - DNA, 25 bp, Homo sapien
aataagatgaacttcagactggatc

SEQ ID NO: 2447588 - DNA, 25 bp, Homo sapien
ttaagcaagatccatggtttgacta

SEQ ID NO: 2447589 - DNA, 25 bp, Homo sapien
gatccagtgtctgctcgggttacag

SEQ ID NO: 2447590 - DNA, 25 bp, Homo sapien
cgggttacaggcagtatccaagata

SEQ ID NO: 2447591 - DNA, 25 bp, Homo sapien
ctgaatacctaagaggttgttgttc

SEQ ID NO: 2447592 - DNA, 25 bp, Homo sapien
ttctgaatacctaagaggttgttgt

SEQ ID NO: 2447593 - DNA, 25 bp, Homo sapien
gaatacctaagaggttgttgttcag

SEQ ID NO: 2447594 - DNA, 25 bp, Homo sapien
atacctaagaggttgttgttcaggc

SEQ ID NO: 2447595 - DNA, 25 bp, Homo sapien
ctgggttgaaaatgtagtggttgct

SEQ ID NO: 2447596 - DNA, 25 bp, Homo sapien
gccaacagtcatatagttgtatatt

SEQ ID NO: 2447597 - DNA, 25 bp, Homo sapien
tgctccaggcgtataggaaggaacc

SEQ ID NO: 2447598 - DNA, 25 bp, Homo sapien
gatcaacccaggtcctagaggtccc

SEQ ID NO: 2447599 - DNA, 25 bp, Homo sapien
ccaaaattgggcacaagtgctgact

SEQ ID NO: 2447600 - DNA, 25 bp, Homo sapien
cacccagaaagtgagttcattcagc

SEQ ID NO: 2447601 - DNA, 25 bp, Homo sapien
ggtgccgtttttgcacaattccagg

SEQ ID NO: 2447602 - DNA, 25 bp, Homo sapien
tcattcagcttgagccaaaattggg

SEQ ID NO: 2447603 - DNA, 25 bp, Homo sapien
gactgaatgggacatagaagcagag

SEQ ID NO: 2447604 - DNA, 25 bp, Homo sapien
tagaagcagaggtagtcatgggccc

SEQ ID NO: 2447605 - DNA, 25 bp, Homo sapien
gcttgtaccagggagcatagctaga

SEQ ID NO: 2447606 - DNA, 25 bp, Homo sapien
tcatgggcccttgcttgtaccaggg

SEQ ID NO: 2447607 - DNA, 25 bp, Homo sapien
aagagctgccaactatggaaccact

SEQ ID NO: 2447608 - DNA, 25 bp, Homo sapien
agaatccaagagctgccaactatgg

SEQ ID NO: 2447609 - DNA, 25 bp, Homo sapien
gaatccaagagctgccaactatgga

SEQ ID NO: 2447610 - DNA, 25 bp, Homo sapien
tccaagagctgccaactatggaacc

SEQ ID NO: 2447611 - DNA, 25 bp, Homo sapien
tatgtggcctagagagccagcattc

SEQ ID NO: 2447612 - DNA, 25 bp, Homo sapien
gatagcccaagagtgataagagcca

SEQ ID NO: 2447613 - DNA, 25 bp, Homo sapien
tcgtggaggagtagcaattccagaa

SEQ ID NO: 2447614 - DNA, 25 bp, Homo sapien
ctggtgtaacaatatgtggcctaga

SEQ ID NO: 2447615 - DNA, 25 bp, Homo sapien
ttgtgcctaacatttctggattgtc

SEQ ID NO: 2447616 - DNA, 25 bp, Homo sapien
ggaagctttcatcacttgtgcctaa

SEQ ID NO: 2447617 - DNA, 25 bp, Homo sapien
atttctggattgtcattggtccctc

SEQ ID NO: 2447618 - DNA, 25 bp, Homo sapien
catcacttgtgcctaacatttctgg

SEQ ID NO: 2447619 - DNA, 25 bp, Homo sapien
aacacatggtgctcaagacttgggc

SEQ ID NO: 2447620 - DNA, 25 bp, Homo sapien
gatttgcaggttaggctgctgagcc

SEQ ID NO: 2447621 - DNA, 25 bp, Homo sapien
aatctgtgggagtggtccagtgcct

SEQ ID NO: 2447622 - DNA, 25 bp, Homo sapien
cctgctgagctacatgatggatttg

SEQ ID NO: 2447623 - DNA, 25 bp, Homo sapien
gccagagccatgtcttcgcagctgc

SEQ ID NO: 2447624 - DNA, 25 bp, Homo sapien
ggtgggcgcctaggtcccaggagca

SEQ ID NO: 2447625 - DNA, 25 bp, Homo sapien
agagccatgtcttcgcagctgctaa

SEQ ID NO: 2447626 - DNA, 25 bp, Homo sapien
gggcgcctaggtcccaggagcaggg

SEQ ID NO: 2447627 - DNA, 25 bp, Homo sapien
ggtaggcgtctcctgaggagcccct

SEQ ID NO: 2447628 - DNA, 25 bp, Homo sapien
tgccaattattgcaagagcggtagg

SEQ ID NO: 2447629 - DNA, 25 bp, Homo sapien
tgggcatctgccaattattgcaaga

SEQ ID NO: 2447630 - DNA, 25 bp, Homo sapien
ttgcaagagcggtaggcgtctcctg

SEQ ID NO: 2447631 - DNA, 25 bp, Homo sapien
aagcaccttttcattggcttctcta

SEQ ID NO: 2447632 - DNA, 25 bp, Homo sapien
caaaaggggaccatgttttgcaaat

SEQ ID NO: 2447633 - DNA, 25 bp, Homo sapien
gttttgcaaatacttctttaagcac

SEQ ID NO: 2447634 - DNA, 25 bp, Homo sapien
gaaaagcttgccatgacaatctgct

SEQ ID NO: 2447635 - DNA, 25 bp, Homo sapien
atctctggacttactggttcgacct

SEQ ID NO: 2447636 - DNA, 25 bp, Homo sapien
ccacaaaatctctggacttactggt

SEQ ID NO: 2447637 - DNA, 25 bp, Homo sapien
taatgaccacaaaatctctggactt

SEQ ID NO: 2447638 - DNA, 25 bp, Homo sapien
gacttactggttcgaccttttatca

SEQ ID NO: 2447639 - DNA, 25 bp, Homo sapien
caccacttggaaaagatggtttctt

SEQ ID NO: 2447640 - DNA, 25 bp, Homo sapien
tctttgcttgttctacttttatttc

SEQ ID NO: 2447641 - DNA, 25 bp, Homo sapien
ttggaaaagatggtttctttgcttg

SEQ ID NO: 2447642 - DNA, 25 bp, Homo sapien
ccacttggaaaagatggtttctttg

SEQ ID NO: 2447643 - DNA, 25 bp, Homo sapien
gggcagccacggtcttgttcctcca

SEQ ID NO: 2447644 - DNA, 25 bp, Homo sapien
agggcagccacggtcttgttcctcc

SEQ ID NO: 2447645 - DNA, 25 bp, Homo sapien
tgtgagggcagccacggtcttgttc

SEQ ID NO: 2447646 - DNA, 25 bp, Homo sapien
tgagggcagccacggtcttgttcct

SEQ ID NO: 2447647 - DNA, 25 bp, Homo sapien
ggaaattttgatatcttcaaactta

SEQ ID NO: 2447648 - DNA, 25 bp, Homo sapien
ataaaattgggaaattttgatatct

SEQ ID NO: 2447649 - DNA, 25 bp, Homo sapien
tctttcagtcctatggttccatctt

SEQ ID NO: 2447650 - DNA, 25 bp, Homo sapien
tatggttccatctttatattttaga

SEQ ID NO: 2447651 - DNA, 25 bp, Homo sapien
gtgttgagatcaagagcgtatccac

SEQ ID NO: 2447652 - DNA, 25 bp, Homo sapien
ttggtgacatacggtcatttctcca

SEQ ID NO: 2447653 - DNA, 25 bp, Homo sapien
tggtgacatacggtcatttctccag

SEQ ID NO: 2447654 - DNA, 25 bp, Homo sapien
cttggtgacatacggtcatttctcc

SEQ ID NO: 2447655 - DNA, 25 bp, Homo sapien
ggtgacatacggtcatttctccagg

SEQ ID NO: 2447656 - DNA, 25 bp, Homo sapien
aaatgttcatcccaactagaatgac

SEQ ID NO: 2447657 - DNA, 25 bp, Homo sapien
tcctctagagaaatgttcatcccaa

SEQ ID NO: 2447658 - DNA, 25 bp, Homo sapien
atgcatagtctctagacagtggagc

SEQ ID NO: 2447659 - DNA, 25 bp, Homo sapien
ctatatcctctagagaaatgttcat

SEQ ID NO: 2447660 - DNA, 25 bp, Homo sapien
tgatctctaacatcacctcaccaca

SEQ ID NO: 2447661 - DNA, 25 bp, Homo sapien
atctctaacatcacctcaccacagc

SEQ ID NO: 2447662 - DNA, 25 bp, Homo sapien
gatctctaacatcacctcaccacag

SEQ ID NO: 2447663 - DNA, 25 bp, Homo sapien
tctctaacatcacctcaccacagcc

SEQ ID NO: 2447664 - DNA, 25 bp, Homo sapien
caacagaggcactcctgcagatggt

SEQ ID NO: 2447665 - DNA, 25 bp, Homo sapien
gacaacagaggcactcctgcagatg

SEQ ID NO: 2447666 - DNA, 25 bp, Homo sapien
ccataagacaacagaggcactcctg

SEQ ID NO: 2447667 - DNA, 25 bp, Homo sapien
ttccaccataagacaacagaggcac

SEQ ID NO: 2447668 - DNA, 25 bp, Homo sapien
tgaaaatccaagttggtaacttctc

SEQ ID NO: 2447669 - DNA, 25 bp, Homo sapien
gaaggaaaatttagaagctcagtat

SEQ ID NO: 2447670 - DNA, 25 bp, Homo sapien
caatagttgggtagtttgacttctt

SEQ ID NO: 2447671 - DNA, 25 bp, Homo sapien
cagggcaatagttgggtagtttgac

SEQ ID NO: 2447672 - DNA, 25 bp, Homo sapien
aagtcagggcaatagttgggtagtt

SEQ ID NO: 2447673 - DNA, 25 bp, Homo sapien
agctgagcaattcactctgccacag

SEQ ID NO: 2447674 - DNA, 25 bp, Homo sapien
ctagaaacccagcaccagctgagca

SEQ ID NO: 2447675 - DNA, 25 bp, Homo sapien
aacccagcaccagctgagcaattca

SEQ ID NO: 2447676 - DNA, 25 bp, Homo sapien
gcaccagctgagcaattcactctgc

SEQ ID NO: 2447677 - DNA, 25 bp, Homo sapien
ctttcccagcagcaggataatggga

SEQ ID NO: 2447678 - DNA, 25 bp, Homo sapien
tttcccagcagcaggataatgggaa

SEQ ID NO: 2447679 - DNA, 25 bp, Homo sapien
agcaggataatgggaagggaaagag

SEQ ID NO: 2447680 - DNA, 25 bp, Homo sapien
agcagcaggataatgggaagggaaa

SEQ ID NO: 2447681 - DNA, 25 bp, Homo sapien
acccagtgggtgtcttgccctgatg

SEQ ID NO: 2447682 - DNA, 25 bp, Homo sapien
cttcaggacagggataaaaatgcat

SEQ ID NO: 2447683 - DNA, 25 bp, Homo sapien
tgcagaaccacaggcttaacgactt

SEQ ID NO: 2447684 - DNA, 25 bp, Homo sapien
taagcttatggtcatgagtggtccc

SEQ ID NO: 2447685 - DNA, 25 bp, Homo sapien
tccgctggttggctgaccgtgacca

SEQ ID NO: 2447686 - DNA, 25 bp, Homo sapien
gaagaccccagcttcaggcaggaca

SEQ ID NO: 2447687 - DNA, 25 bp, Homo sapien
tgtttctagagtcatgcagcagaag

SEQ ID NO: 2447688 - DNA, 25 bp, Homo sapien
tctctactgtagtccagtgtttcta

SEQ ID NO: 2447689 - DNA, 25 bp, Homo sapien
ccagaggcagattgtgccgcacacc

SEQ ID NO: 2447690 - DNA, 25 bp, Homo sapien
ggcaggtttcagaaaccatgaggaa

SEQ ID NO: 2447691 - DNA, 25 bp, Homo sapien
tctggaggctccttgaccagaggca

SEQ ID NO: 2447692 - DNA, 25 bp, Homo sapien
gccgcacacccagatgtcggcaggt

SEQ ID NO: 2447693 - DNA, 25 bp, Homo sapien
agtagggcagcttgcttgagggtga

SEQ ID NO: 2447694 - DNA, 25 bp, Homo sapien
gtagggcagcttgcttgagggtgac

SEQ ID NO: 2447695 - DNA, 25 bp, Homo sapien
tgctggtggtggacgacgtcacggc

SEQ ID NO: 2447696 - DNA, 25 bp, Homo sapien
ggctgtaggcaatgggacctccaaa

SEQ ID NO: 2447697 - DNA, 25 bp, Homo sapien
tatccagacgtgaaggtgacagtgc

SEQ ID NO: 2447698 - DNA, 25 bp, Homo sapien
caccctgttgaaattggaggctctg

SEQ ID NO: 2447699 - DNA, 25 bp, Homo sapien
caataatgtgcaccgttatctgaaa

SEQ ID NO: 2447700 - DNA, 25 bp, Homo sapien
tacctgcaataatgtgcaccgttat

SEQ ID NO: 2447701 - DNA, 25 bp, Homo sapien
tgatacctgcaataatgtgcaccgt

SEQ ID NO: 2447702 - DNA, 25 bp, Homo sapien
cctgcaataatgtgcaccgttatct

SEQ ID NO: 2447703 - DNA, 25 bp, Homo sapien
aattatgccgaaacatagtcattcc

SEQ ID NO: 2447704 - DNA, 25 bp, Homo sapien
cagcagtaattatgccgaaacatag

SEQ ID NO: 2447705 - DNA, 25 bp, Homo sapien
atgacagcagtaattatgccgaaac

SEQ ID NO: 2447706 - DNA, 25 bp, Homo sapien
gaaacatagtcattcccgcagtttg

SEQ ID NO: 2447707 - DNA, 25 bp, Homo sapien
ctgctgagaaggaaggcgacacaaa

SEQ ID NO: 2447708 - DNA, 25 bp, Homo sapien
ctctgcagtgtcatcccttgactga

SEQ ID NO: 2447709 - DNA, 25 bp, Homo sapien
gagaaggaaggcgacacaaactggc

SEQ ID NO: 2447710 - DNA, 25 bp, Homo sapien
tctgcagtgtcatcccttgactgag

SEQ ID NO: 2447711 - DNA, 25 bp, Homo sapien
ctgcaggcatggaatcactgtggaa

SEQ ID NO: 2447712 - DNA, 25 bp, Homo sapien
aatggaaacacagagagcatgtcct

SEQ ID NO: 2447713 - DNA, 25 bp, Homo sapien
gcatggaatcactgtggaaacatac

SEQ ID NO: 2447714 - DNA, 25 bp, Homo sapien
ggaaacacagagagcatgtcctgca

SEQ ID NO: 2447715 - DNA, 25 bp, Homo sapien
cactgctgttagaaaagcagtctca

SEQ ID NO: 2447716 - DNA, 25 bp, Homo sapien
agcagtctcatttacattgttgaaa

SEQ ID NO: 2447717 - DNA, 25 bp, Homo sapien
tttgtaaagatttatgaagttcaat

SEQ ID NO: 2447718 - DNA, 25 bp, Homo sapien
agttcaattagagccatcactgctg

SEQ ID NO: 2447719 - DNA, 25 bp, Homo sapien
ttcatgtctgggcatcccattaacc

SEQ ID NO: 2447720 - DNA, 25 bp, Homo sapien
tcatgtctgggcatcccattaaccc

SEQ ID NO: 2447721 - DNA, 25 bp, Homo sapien
agcaagacggtaagttcaattgcca

SEQ ID NO: 2447722 - DNA, 25 bp, Homo sapien
aagcaggaaagcaagacggtaagtt

SEQ ID NO: 2447723 - DNA, 25 bp, Homo sapien
gactcttgcatggatgtttacttca

SEQ ID NO: 2447724 - DNA, 25 bp, Homo sapien
ctagtaggcattgtctttcctggga

SEQ ID NO: 2447725 - DNA, 25 bp, Homo sapien
gatgctatgattatttctagtaggc

SEQ ID NO: 2447726 - DNA, 25 bp, Homo sapien
tgcgttttggatgctagtacacaca

SEQ ID NO: 2447727 - DNA, 25 bp, Homo sapien
tgatttttcttgaggattcttccct

SEQ ID NO: 2447728 - DNA, 25 bp, Homo sapien
tgagaaaaacacaattgagctcctg

SEQ ID NO: 2447729 - DNA, 25 bp, Homo sapien
gagaaaaacacaattgagctcctga

SEQ ID NO: 2447730 - DNA, 25 bp, Homo sapien
actgagaaaaacacaattgagctcc

SEQ ID NO: 2447731 - DNA, 25 bp, Homo sapien
gaaaaacacaattgagctcctgaat

SEQ ID NO: 2447732 - DNA, 25 bp, Homo sapien
cagattcttctcaatgtgcttcaaa

SEQ ID NO: 2447733 - DNA, 25 bp, Homo sapien
cataatgaggaaggatttcagattc

SEQ ID NO: 2447734 - DNA, 25 bp, Homo sapien
ttcttctcaatgtgcttcaaagctc

SEQ ID NO: 2447735 - DNA, 25 bp, Homo sapien
cccataatgaggaaggatttcagat

SEQ ID NO: 2447736 - DNA, 25 bp, Homo sapien
ggttcaccttgactcacattggaaa

SEQ ID NO: 2447737 - DNA, 25 bp, Homo sapien
cccagaatgtccagtgaaaatcttg

SEQ ID NO: 2447738 - DNA, 25 bp, Homo sapien
gttcaccttgactcacattggaaaa

SEQ ID NO: 2447739 - DNA, 25 bp, Homo sapien
ggaactccagggtgcgcactgggta

SEQ ID NO: 2447740 - DNA, 25 bp, Homo sapien
tccagggtgcgcactgggtagtggc

SEQ ID NO: 2447741 - DNA, 25 bp, Homo sapien
aactccagggtgcgcactgggtagt

SEQ ID NO: 2447742 - DNA, 25 bp, Homo sapien
cagggtgcgcactgggtagtggcct

SEQ ID NO: 2447743 - DNA, 25 bp, Homo sapien
gatcccccagccttttgaaccacaa

SEQ ID NO: 2447744 - DNA, 25 bp, Homo sapien
cccccagccttttgaaccacaagct

SEQ ID NO: 2447745 - DNA, 25 bp, Homo sapien
tcccccagccttttgaaccacaagc

SEQ ID NO: 2447746 - DNA, 25 bp, Homo sapien
atcccccagccttttgaaccacaag

SEQ ID NO: 2447747 - DNA, 25 bp, Homo sapien
cctcacccactaggtatttccacaa

SEQ ID NO: 2447748 - DNA, 25 bp, Homo sapien
agcctaggtgctctgtcatgttccc

SEQ ID NO: 2447749 - DNA, 25 bp, Homo sapien
gctctgtcatgttcccggtccttga

SEQ ID NO: 2447750 - DNA, 25 bp, Homo sapien
ccacgtggtaggtcagcctaggtgc

SEQ ID NO: 2447751 - DNA, 25 bp, Homo sapien
ggatgtaaccattactgaaaccaga

SEQ ID NO: 2447752 - DNA, 25 bp, Homo sapien
ccagggccaatggttcctccagagc

SEQ ID NO: 2447753 - DNA, 25 bp, Homo sapien
aatgatgacagaagttgagagctgc

SEQ ID NO: 2447754 - DNA, 25 bp, Homo sapien
ttctggcatcaatcttacatctgac

SEQ ID NO: 2447755 - DNA, 25 bp, Homo sapien
gcttttttgcaccaggattaagtga

SEQ ID NO: 2447756 - DNA, 25 bp, Homo sapien
ttttgcaccaggattaagtgaagat

SEQ ID NO: 2447757 - DNA, 25 bp, Homo sapien
aaagaaagcttttttgcaccaggat

SEQ ID NO: 2447758 - DNA, 25 bp, Homo sapien
gaaagcttttttgcaccaggattaa

SEQ ID NO: 2447759 - DNA, 25 bp, Homo sapien
ttcacagactgcctcacacaatggg

SEQ ID NO: 2447760 - DNA, 25 bp, Homo sapien
tcagggagtctgtcgcattcctcac

SEQ ID NO: 2447761 - DNA, 25 bp, Homo sapien
ctctacagctttcctcatgagggtg

SEQ ID NO: 2447762 - DNA, 25 bp, Homo sapien
tcactgacttcaccacgtgaattct

SEQ ID NO: 2447763 - DNA, 25 bp, Homo sapien
gatattttcaaggagggaacatggg

SEQ ID NO: 2447764 - DNA, 25 bp, Homo sapien
tctaaactaactcatgggttgtttg

SEQ ID NO: 2447765 - DNA, 25 bp, Homo sapien
atgtctcaacctttaaacgttactg

SEQ ID NO: 2447766 - DNA, 25 bp, Homo sapien
tcttactgaccaggagattaacaga

SEQ ID NO: 2447767 - DNA, 25 bp, Homo sapien
tggaatacggtggatcaatgcgatc

SEQ ID NO: 2447768 - DNA, 25 bp, Homo sapien
tgggagtcatttgtcctagtaaccc

SEQ ID NO: 2447769 - DNA, 25 bp, Homo sapien
tctaggaaacatagcctgggagtca

SEQ ID NO: 2447770 - DNA, 25 bp, Homo sapien
gatgatatcggttatgtcgcaactg

SEQ ID NO: 2447771 - DNA, 25 bp, Homo sapien
cctatgcaaactggtgaaaaccctg

SEQ ID NO: 2447772 - DNA, 25 bp, Homo sapien
gacaatggcccctttcactggagac

SEQ ID NO: 2447773 - DNA, 25 bp, Homo sapien
gcctctaaggaataactgactgcca

SEQ ID NO: 2447774 - DNA, 25 bp, Homo sapien
cacactaccataggctgagacaatg

SEQ ID NO: 2447775 - DNA, 25 bp, Homo sapien
tgaatcatgtcactaccttttcttt

SEQ ID NO: 2447776 - DNA, 25 bp, Homo sapien
ttgaatcatgtcactaccttttctt

SEQ ID NO: 2447777 - DNA, 25 bp, Homo sapien
gtgttctcagtcttgaatcatgtca

SEQ ID NO: 2447778 - DNA, 25 bp, Homo sapien
ctgtgttctcagtcttgaatcatgt

SEQ ID NO: 2447779 - DNA, 25 bp, Homo sapien
tacttcaagatatgtcataatgttc

SEQ ID NO: 2447780 - DNA, 25 bp, Homo sapien
taggttttgtactccgtcgtatgtc

SEQ ID NO: 2447781 - DNA, 25 bp, Homo sapien
tgtcacaattcattctgcggtcagg

SEQ ID NO: 2447782 - DNA, 25 bp, Homo sapien
taggagacgagcgtcacacttccag

SEQ ID NO: 2447783 - DNA, 25 bp, Homo sapien
ctgggtccagatttaagagtcgtga

SEQ ID NO: 2447784 - DNA, 25 bp, Homo sapien
tcacctgtaaacagagagcaaggag

SEQ ID NO: 2447785 - DNA, 25 bp, Homo sapien
catcttgcatatgacctgggtccag

SEQ ID NO: 2447786 - DNA, 25 bp, Homo sapien
ggtgatcacccgaggtatatttcca

SEQ ID NO: 2447787 - DNA, 25 bp, Homo sapien
tcagcagggcactaaccgaaaagtc

SEQ ID NO: 2447788 - DNA, 25 bp, Homo sapien
cagaaaactttggtgccagtcccag

SEQ ID NO: 2447789 - DNA, 25 bp, Homo sapien
cagctgggtgtgcatacaatactca

SEQ ID NO: 2447790 - DNA, 25 bp, Homo sapien
tctgaggaccctctacaacaggaga

SEQ ID NO: 2447791 - DNA, 25 bp, Homo sapien
caactggttgtgtaagcgagagtca

SEQ ID NO: 2447792 - DNA, 25 bp, Homo sapien
tgggccctgttatgcaactctctac

SEQ ID NO: 2447793 - DNA, 25 bp, Homo sapien
gatttaacctattgcactaagccta

SEQ ID NO: 2447794 - DNA, 25 bp, Homo sapien
tatgtcatacatgagagccaaagca

SEQ ID NO: 2447795 - DNA, 25 bp, Homo sapien
tgctggagagtgtccacacaggaga

SEQ ID NO: 2447796 - DNA, 25 bp, Homo sapien
taacaatgcctcctattgaaagggc

SEQ ID NO: 2447797 - DNA, 25 bp, Homo sapien
taggcccaggtcgttggcataatgt

SEQ ID NO: 2447798 - DNA, 25 bp, Homo sapien
ccacaaaatttggtcataggcccag

SEQ ID NO: 2447799 - DNA, 25 bp, Homo sapien
catatcacatggtcctgggtcctga

SEQ ID NO: 2447800 - DNA, 25 bp, Homo sapien
acatggtcctgggtcctgagatatt

SEQ ID NO: 2447801 - DNA, 25 bp, Homo sapien
tcacatggtcctgggtcctgagata

SEQ ID NO: 2447802 - DNA, 25 bp, Homo sapien
tatcacatggtcctgggtcctgaga

SEQ ID NO: 2447803 - DNA, 25 bp, Homo sapien
tacgcatgacctaggcagaagagta

SEQ ID NO: 2447804 - DNA, 25 bp, Homo sapien
gtcatatcattacgggactgggcca

SEQ ID NO: 2447805 - DNA, 25 bp, Homo sapien
tctggcacaagcaggagagtcatat

SEQ ID NO: 2447806 - DNA, 25 bp, Homo sapien
gggccaagcaatatgccctaattcc

SEQ ID NO: 2447807 - DNA, 25 bp, Homo sapien
atgctggtccagtgatacaatataa

SEQ ID NO: 2447808 - DNA, 25 bp, Homo sapien
tgggcatagtcagaagtgtcagctt

SEQ ID NO: 2447809 - DNA, 25 bp, Homo sapien
tgggtgttgagccaattatacagtg

SEQ ID NO: 2447810 - DNA, 25 bp, Homo sapien
gttgagccaattatacagtgtagta

SEQ ID NO: 2447811 - DNA, 25 bp, Homo sapien
tctcaggtaaatggaacaatatcac

SEQ ID NO: 2447812 - DNA, 25 bp, Homo sapien
ggtctcaggtaaatggaacaatatc

SEQ ID NO: 2447813 - DNA, 25 bp, Homo sapien
taggctttttatctggtctcaggta

SEQ ID NO: 2447814 - DNA, 25 bp, Homo sapien
ctggtctcaggtaaatggaacaata

SEQ ID NO: 2447815 - DNA, 25 bp, Homo sapien
taatgatcctgtcctgcacgtgtcc

SEQ ID NO: 2447816 - DNA, 25 bp, Homo sapien
gagagtaatgatcctgtcctgcacg

SEQ ID NO: 2447817 - DNA, 25 bp, Homo sapien
cagggatgagagtaatgatcctgtc

SEQ ID NO: 2447818 - DNA, 25 bp, Homo sapien
atcctgtcctgcacgtgtcctggct

SEQ ID NO: 2447819 - DNA, 25 bp, Homo sapien
gaagcaaggtatttctcacattccc

SEQ ID NO: 2447820 - DNA, 25 bp, Homo sapien
catcacttaggttctttgtcaagca

SEQ ID NO: 2447821 - DNA, 25 bp, Homo sapien
cacattcccattttttagcaaccta

SEQ ID NO: 2447822 - DNA, 25 bp, Homo sapien
tgtcaagcaatatgtcatgatgccc

SEQ ID NO: 2447823 - DNA, 25 bp, Homo sapien
cactgagccagtgatacagcataat

SEQ ID NO: 2447824 - DNA, 25 bp, Homo sapien
cacccgggtacagtttcacataata

SEQ ID NO: 2447825 - DNA, 25 bp, Homo sapien
cataatctcatttgtatgctgggcc

SEQ ID NO: 2447826 - DNA, 25 bp, Homo sapien
gctgggcctagtcagaagagtcact

SEQ ID NO: 2447827 - DNA, 25 bp, Homo sapien
gaaggcagagccacgatggatgtta

SEQ ID NO: 2447828 - DNA, 25 bp, Homo sapien
cagagccacgatggatgttatctat

SEQ ID NO: 2447829 - DNA, 25 bp, Homo sapien
gtgatggtcccagtgacatatgtaa

SEQ ID NO: 2447830 - DNA, 25 bp, Homo sapien
gggtgatggtcccagtgacatatgt

SEQ ID NO: 2447831 - DNA, 25 bp, Homo sapien
taaagaggagagttgcattacccag

SEQ ID NO: 2447832 - DNA, 25 bp, Homo sapien
atatgtgataatcccttgttttggc

SEQ ID NO: 2447833 - DNA, 25 bp, Homo sapien
gcagtcagcgttatgtcacaattct

SEQ ID NO: 2447834 - DNA, 25 bp, Homo sapien
gggtgctggactccgcaatatgtga

SEQ ID NO: 2447835 - DNA, 25 bp, Homo sapien
tagtcgcgtcagctgggtgtgaatc

SEQ ID NO: 2447836 - DNA, 25 bp, Homo sapien
tattattgcatggtatctgaagctg

SEQ ID NO: 2447837 - DNA, 25 bp, Homo sapien
tcttgtgagagaatgatagtcgcgt

SEQ ID NO: 2447838 - DNA, 25 bp, Homo sapien
ttttctatgatacgctgggagtgtc

SEQ ID NO: 2447839 - DNA, 25 bp, Homo sapien
aaataaataaaacagtgacatgtcc

SEQ ID NO: 2447840 - DNA, 25 bp, Homo sapien
ataaataaaacagtgacatgtccat

SEQ ID NO: 2447841 - DNA, 25 bp, Homo sapien
aataaataaaacagtgacatgtcca

SEQ ID NO: 2447842 - DNA, 25 bp, Homo sapien
ttaatgaaggtttaggagcaggtga

SEQ ID NO: 2447843 - DNA, 25 bp, Homo sapien
taatgaaggtttaggagcaggtgaa

SEQ ID NO: 2447844 - DNA, 25 bp, Homo sapien
tttaatgaaggtttaggagcaggtg

SEQ ID NO: 2447845 - DNA, 25 bp, Homo sapien
tgagctcaatgtttggccgcatttt

SEQ ID NO: 2447846 - DNA, 25 bp, Homo sapien
gaatgagctcaatgtttggccgcat

SEQ ID NO: 2447847 - DNA, 25 bp, Homo sapien
agaatgagctcaatgtttggccgca

SEQ ID NO: 2447848 - DNA, 25 bp, Homo sapien
aatgagctcaatgtttggccgcatt

SEQ ID NO: 2447849 - DNA, 25 bp, Homo sapien
taacctaaacgctgaggcagaaatg

SEQ ID NO: 2447850 - DNA, 25 bp, Homo sapien
taaacgctgaggcagaaatgttccc

SEQ ID NO: 2447851 - DNA, 25 bp, Homo sapien
cagccacataacctaaacgctgagg

SEQ ID NO: 2447852 - DNA, 25 bp, Homo sapien
gcatgacagccacataacctaaacg

SEQ ID NO: 2447853 - DNA, 25 bp, Homo sapien
tcacacgctcagaaaagtttgcaaa

SEQ ID NO: 2447854 - DNA, 25 bp, Homo sapien
agtttgcaaataagtttcgcattcc

SEQ ID NO: 2447855 - DNA, 25 bp, Homo sapien
gtttcgcattccacataagttctcg

SEQ ID NO: 2447856 - DNA, 25 bp, Homo sapien
taagttctcgtttcctgtatgtaag

SEQ ID NO: 2447857 - DNA, 25 bp, Homo sapien
tgccttatttattaggttgacaggt

SEQ ID NO: 2447858 - DNA, 25 bp, Homo sapien
gttcagtgaagtttgagcacaactc

SEQ ID NO: 2447859 - DNA, 25 bp, Homo sapien
attttcagcacttgtctccaccaaa

SEQ ID NO: 2447860 - DNA, 25 bp, Homo sapien
cattcttcacattttcagcacttgt

SEQ ID NO: 2447861 - DNA, 25 bp, Homo sapien
tatgttcggcaaggtttgagaaata

SEQ ID NO: 2447862 - DNA, 25 bp, Homo sapien
ttaaactcaaatttatgttcggcaa

SEQ ID NO: 2447863 - DNA, 25 bp, Homo sapien
aaactcaaatttatgttcggcaagg

SEQ ID NO: 2447864 - DNA, 25 bp, Homo sapien
caaatttatgttcggcaaggtttga

SEQ ID NO: 2447865 - DNA, 25 bp, Homo sapien
tctcttataattagtaaggtctgag

SEQ ID NO: 2447866 - DNA, 25 bp, Homo sapien
tagggtctgtctccagtataatttc

SEQ ID NO: 2447867 - DNA, 25 bp, Homo sapien
ggtctgagaagcacttaaaggattt

SEQ ID NO: 2447868 - DNA, 25 bp, Homo sapien
aaggtctgagaagcacttaaaggat

SEQ ID NO: 2447869 - DNA, 25 bp, Homo sapien
agttatcttatgtctgatgaggtgt

SEQ ID NO: 2447870 - DNA, 25 bp, Homo sapien
tctctgatgttgaacccaaaatgag

SEQ ID NO: 2447871 - DNA, 25 bp, Homo sapien
ggagcttctctctatatgagttatc

SEQ ID NO: 2447872 - DNA, 25 bp, Homo sapien
cgtattggttcagtataaagtctct

SEQ ID NO: 2447873 - DNA, 25 bp, Homo sapien
tgtgcactacttctctcactaaatg

SEQ ID NO: 2447874 - DNA, 25 bp, Homo sapien
gggtgaatacggttaacatgtgtca

SEQ ID NO: 2447875 - DNA, 25 bp, Homo sapien
cagccatttcaagtttgactggata

SEQ ID NO: 2447876 - DNA, 25 bp, Homo sapien
gactggatagacttgtgcactactt

SEQ ID NO: 2447877 - DNA, 25 bp, Homo sapien
tctctagatgagcatccgtttatct

SEQ ID NO: 2447878 - DNA, 25 bp, Homo sapien
gtctctagatgagcatccgtttatc

SEQ ID NO: 2447879 - DNA, 25 bp, Homo sapien
ctctagatgagcatccgtttatctt

SEQ ID NO: 2447880 - DNA, 25 bp, Homo sapien
gattgtgaccacgatgtttctctta

SEQ ID NO: 2447881 - DNA, 25 bp, Homo sapien
tttgagggcattgaaaaatgctccc

SEQ ID NO: 2447882 - DNA, 25 bp, Homo sapien
tgatttccaagtgttcgctgcttat

SEQ ID NO: 2447883 - DNA, 25 bp, Homo sapien
tcctggtacaccactgattgtgcat

SEQ ID NO: 2447884 - DNA, 25 bp, Homo sapien
tggccagccgtaccctcttcccaaa

SEQ ID NO: 2447885 - DNA, 25 bp, Homo sapien
gccagccgtaccctcttcccaaaga

SEQ ID NO: 2447886 - DNA, 25 bp, Homo sapien
ctgctggtcaaatcatcagcccttt

SEQ ID NO: 2447887 - DNA, 25 bp, Homo sapien
tgaggaatggtagccaggaaactgc

SEQ ID NO: 2447888 - DNA, 25 bp, Homo sapien
tgttgggaagcttggttcctcctgg

SEQ ID NO: 2447889 - DNA, 25 bp, Homo sapien
tcatgttgggaagcttggttcctcc

SEQ ID NO: 2447890 - DNA, 25 bp, Homo sapien
tattcagatgggacgtgcttgggag

SEQ ID NO: 2447891 - DNA, 25 bp, Homo sapien
ctgtttaagatttacacatagtttc

SEQ ID NO: 2447892 - DNA, 25 bp, Homo sapien
tttaagatttacacatagtttccag

SEQ ID NO: 2447893 - DNA, 25 bp, Homo sapien
gtattcagatgggacgtgcttggga

SEQ ID NO: 2447894 - DNA, 25 bp, Homo sapien
actgaaatgcctcgacactacctcg

SEQ ID NO: 2447895 - DNA, 25 bp, Homo sapien
cgactctaatttgaacggattctcc

SEQ ID NO: 2447896 - DNA, 25 bp, Homo sapien
tatgtgtagcactaaccacactgaa

SEQ ID NO: 2447897 - DNA, 25 bp, Homo sapien
cttcaggtgcctgatggttcagatc

SEQ ID NO: 2447898 - DNA, 25 bp, Homo sapien
tgcatttgcattgaatccagaagat

SEQ ID NO: 2447899 - DNA, 25 bp, Homo sapien
gcctgctggcagtatgttttctaac

SEQ ID NO: 2447900 - DNA, 25 bp, Homo sapien
catacaggatgagccttgggcctgc

SEQ ID NO: 2447901 - DNA, 25 bp, Homo sapien
tactcctaatgcaacaggaagttgt

SEQ ID NO: 2447902 - DNA, 25 bp, Homo sapien
tacttcttttgcaaagtgtaggaag

SEQ ID NO: 2447903 - DNA, 25 bp, Homo sapien
tcttttgcaaagtgtaggaaggtgt

SEQ ID NO: 2447904 - DNA, 25 bp, Homo sapien
ccagactgcctgatcagttttgacc

SEQ ID NO: 2447905 - DNA, 25 bp, Homo sapien
tccagactgcctgatcagttttgac

SEQ ID NO: 2447906 - DNA, 25 bp, Homo sapien
cacaagctgaacctggtccccaggg

SEQ ID NO: 2447907 - DNA, 25 bp, Homo sapien
caatgagcagcagagcgccagctga

SEQ ID NO: 2447908 - DNA, 25 bp, Homo sapien
gagcgccagctgagatccacaagct

SEQ ID NO: 2447909 - DNA, 25 bp, Homo sapien
ttgcaagtctatagcaatgagcagc

SEQ ID NO: 2447910 - DNA, 25 bp, Homo sapien
gatgccggttcactaggtcttttcc

SEQ ID NO: 2447911 - DNA, 25 bp, Homo sapien
tgcatgccaggaattccacatgaaa

SEQ ID NO: 2447912 - DNA, 25 bp, Homo sapien
acatgaaacttcaagataccggttc

SEQ ID NO: 2447913 - DNA, 25 bp, Homo sapien
acatgaaacttcaagatgccggttc

SEQ ID NO: 2447914 - DNA, 25 bp, Homo sapien
tgattgggatagtagttaggataac

SEQ ID NO: 2447915 - DNA, 25 bp, Homo sapien
tccttgaaatgctaaacttaatggc

SEQ ID NO: 2447916 - DNA, 25 bp, Homo sapien
ctgggtatataaccttctcaatgag

SEQ ID NO: 2447917 - DNA, 25 bp, Homo sapien
catatgtatgtccaatttgattggg

SEQ ID NO: 2447918 - DNA, 25 bp, Homo sapien
tttggctcctttgaccactcgaagc

SEQ ID NO: 2447919 - DNA, 25 bp, Homo sapien
gtgttccagcggacttcaccagcag

SEQ ID NO: 2447920 - DNA, 25 bp, Homo sapien
aagccccacagcgtgttccagcgga

SEQ ID NO: 2447921 - DNA, 25 bp, Homo sapien
tccttgagcctgtcgggagctgctg

SEQ ID NO: 2447922 - DNA, 25 bp, Homo sapien
taatgtcaccgtttaaaatgtagct

SEQ ID NO: 2447923 - DNA, 25 bp, Homo sapien
caagtgtgcctatacaaacgtagcc

SEQ ID NO: 2447924 - DNA, 25 bp, Homo sapien
aagccgtaggctttaggagcacaga

SEQ ID NO: 2447925 - DNA, 25 bp, Homo sapien
aaataataatagacgctcagggcag

SEQ ID NO: 2447926 - DNA, 25 bp, Homo sapien
gatcagcatgctgtccctgacccat

SEQ ID NO: 2447927 - DNA, 25 bp, Homo sapien
tgacccatgttgcaacggacagtgt

SEQ ID NO: 2447928 - DNA, 25 bp, Homo sapien
caaaataccgctgacataaggcatt

SEQ ID NO: 2447929 - DNA, 25 bp, Homo sapien
tgacactcctcacaaaataccgctg

SEQ ID NO: 2447930 - DNA, 25 bp, Homo sapien
actgaagtggaacttcaaagaggca

SEQ ID NO: 2447931 - DNA, 25 bp, Homo sapien
agaggcaccaataccgctgcacctt

SEQ ID NO: 2447932 - DNA, 25 bp, Homo sapien
tgaagtggaacttcaaagaggcacc

SEQ ID NO: 2447933 - DNA, 25 bp, Homo sapien
aataccgctgcacctttgcctgagg

SEQ ID NO: 2447934 - DNA, 25 bp, Homo sapien
tcccagttgctttgaaactgctttt

SEQ ID NO: 2447935 - DNA, 25 bp, Homo sapien
cgcaggccgactgaggcatggactg

SEQ ID NO: 2447936 - DNA, 25 bp, Homo sapien
gagcgcaggccgactgaggcatgga

SEQ ID NO: 2447937 - DNA, 25 bp, Homo sapien
ctcggaggtagaaccgccaggctga

SEQ ID NO: 2447938 - DNA, 25 bp, Homo sapien
ccctcggaggtagaaccgccaggct

SEQ ID NO: 2447939 - DNA, 25 bp, Homo sapien
tggtgaagtccgctggaacacgctg

SEQ ID NO: 2447940 - DNA, 25 bp, Homo sapien
tgctggtgaagtccgctggaacacg

SEQ ID NO: 2447941 - DNA, 25 bp, Homo sapien
tgaagtccgctggaacacgctgtgg

SEQ ID NO: 2447942 - DNA, 25 bp, Homo sapien
gtctgctggtgaagtccgctggaac

SEQ ID NO: 2447943 - DNA, 25 bp, Homo sapien
ggtggtggcaggcagcagctcccga

SEQ ID NO: 2447944 - DNA, 25 bp, Homo sapien
tggcaggcagcagctcccgacaggc

SEQ ID NO: 2447945 - DNA, 25 bp, Homo sapien
gtggcaggcagcagctcccgacagg

SEQ ID NO: 2447946 - DNA, 25 bp, Homo sapien
tggtggcaggcagcagctcccgaca

SEQ ID NO: 2447947 - DNA, 25 bp, Homo sapien
gggccacggctcctaatgcattcag

SEQ ID NO: 2447948 - DNA, 25 bp, Homo sapien
gagcctggtttcacccaccggtgaa

SEQ ID NO: 2447949 - DNA, 25 bp, Homo sapien
gaggccgtggcccttgtaagtgaac

SEQ ID NO: 2447950 - DNA, 25 bp, Homo sapien
tgcctctctgtataggccgcgctgc

SEQ ID NO: 2447951 - DNA, 25 bp, Homo sapien
cccacccagtagtacaaggaccagg

SEQ ID NO: 2447952 - DNA, 25 bp, Homo sapien
cacttcctgaagaagttccggccct

SEQ ID NO: 2447953 - DNA, 25 bp, Homo sapien
cagtagtacaaggaccaggagggaa

SEQ ID NO: 2447954 - DNA, 25 bp, Homo sapien
tccggccctcccaatccaaggaggc

SEQ ID NO: 2447955 - DNA, 25 bp, Homo sapien
ctcgttttctgcaacgtacttcact

SEQ ID NO: 2447956 - DNA, 25 bp, Homo sapien
tcgttttctgcaacgtacttcactt

SEQ ID NO: 2447957 - DNA, 25 bp, Homo sapien
tctgcaacgtacttcacttttacca

SEQ ID NO: 2447958 - DNA, 25 bp, Homo sapien
ttttctgcaacgtacttcactttta

SEQ ID NO: 2447959 - DNA, 25 bp, Homo sapien
cttctggtaacacccagccttggct

SEQ ID NO: 2447960 - DNA, 25 bp, Homo sapien
ccttctggtaacacccagccttggc

SEQ ID NO: 2447961 - DNA, 25 bp, Homo sapien
ttcactgaaccgtatctaccaaagc

SEQ ID NO: 2447962 - DNA, 25 bp, Homo sapien
cgtatctaccaaagcagcttccaat

SEQ ID NO: 2447963 - DNA, 25 bp, Homo sapien
accgtatctaccaaagcagcttcca

SEQ ID NO: 2447964 - DNA, 25 bp, Homo sapien
tcactgaaccgtatctaccaaagca

SEQ ID NO: 2447965 - DNA, 25 bp, Homo sapien
tcctactatcttctggacatccacg

SEQ ID NO: 2447966 - DNA, 25 bp, Homo sapien
ctactatcttctggacatccacgtc

SEQ ID NO: 2447967 - DNA, 25 bp, Homo sapien
attaacaaacgaaacaaatccatag

SEQ ID NO: 2447968 - DNA, 25 bp, Homo sapien
cacgtcattaacaaacgaaacaaat

SEQ ID NO: 2447969 - DNA, 25 bp, Homo sapien
agctttttaccatggaaatgtatct

SEQ ID NO: 2447970 - DNA, 25 bp, Homo sapien
gattgcagggcccagcttcagcttt

SEQ ID NO: 2447971 - DNA, 25 bp, Homo sapien
gcttcagctttttaccatggaaatg

SEQ ID NO: 2447972 - DNA, 25 bp, Homo sapien
ttttaccatggaaatgtatctgtga

SEQ ID NO: 2447973 - DNA, 25 bp, Homo sapien
ggtggaggaggaggattaactacca

SEQ ID NO: 2447974 - DNA, 25 bp, Homo sapien
gtggaggaggaggattaactaccaa

SEQ ID NO: 2447975 - DNA, 25 bp, Homo sapien
tggaggaggaggattaactaccaaa

SEQ ID NO: 2447976 - DNA, 25 bp, Homo sapien
gttacaggattcggcgtgatttggg

SEQ ID NO: 2447977 - DNA, 25 bp, Homo sapien
ttggattccgccagacgttctgaaa

SEQ ID NO: 2447978 - DNA, 25 bp, Homo sapien
agtgtttggattccgccagacgttc

SEQ ID NO: 2447979 - DNA, 25 bp, Homo sapien
ttcagtgtttggattccgccagacg

SEQ ID NO: 2447980 - DNA, 25 bp, Homo sapien
gacctggtgaatgtggataagcaga

SEQ ID NO: 2447981 - DNA, 25 bp, Homo sapien
ggaggaacaacataactcctttgcg

SEQ ID NO: 2447982 - DNA, 25 bp, Homo sapien
ggaacaacataactcctttgcgccc

SEQ ID NO: 2447983 - DNA, 25 bp, Homo sapien
gaggaacaacataactcctttgcgc

SEQ ID NO: 2447984 - DNA, 25 bp, Homo sapien
aggaacaacataactcctttgcgcc

SEQ ID NO: 2447985 - DNA, 25 bp, Homo sapien
ctgaatcgggataagtaggatattc

SEQ ID NO: 2447986 - DNA, 25 bp, Homo sapien
agtggtgacctgaaatgctgaatcg

SEQ ID NO: 2447987 - DNA, 25 bp, Homo sapien
gaaatgctgaatcgggataagtagg

SEQ ID NO: 2447988 - DNA, 25 bp, Homo sapien
gacctgaaatgctgaatcgggataa

SEQ ID NO: 2447989 - DNA, 25 bp, Homo sapien
gacctgaaatggtgatcttggataa

SEQ ID NO: 2447990 - DNA, 25 bp, Homo sapien
tgacctgaaatggtgatcttggata

SEQ ID NO: 2447991 - DNA, 25 bp, Homo sapien
tatccagtggcgacttgaaatggtg

SEQ ID NO: 2447992 - DNA, 25 bp, Homo sapien
ggaactgatatccagtggcgacttg

SEQ ID NO: 2447993 - DNA, 25 bp, Homo sapien
cttgaaatggtgaatttggataagc

SEQ ID NO: 2447994 - DNA, 25 bp, Homo sapien
actgatatccagtggcgacttgaaa

SEQ ID NO: 2447995 - DNA, 25 bp, Homo sapien
gatatccagcagtgacctgaaatgg

SEQ ID NO: 2447996 - DNA, 25 bp, Homo sapien
tgacctgaaatggtgaacttggata

SEQ ID NO: 2447997 - DNA, 25 bp, Homo sapien
ggtgaacttggataagcaggaaatg

SEQ ID NO: 2447998 - DNA, 25 bp, Homo sapien
attatatacaggcaactgatatcca

SEQ ID NO: 2447999 - DNA, 25 bp, Homo sapien
tatccagtggcgacttgaaatggtg

SEQ ID NO: 2448000 - DNA, 25 bp, Homo sapien
actgatatccagtggcgacttgaaa

SEQ ID NO: 2448001 - DNA, 25 bp, Homo sapien
ggaactgatatccagtggcgacttg

SEQ ID NO: 2448002 - DNA, 25 bp, Homo sapien
cttgaaatggtgaatttggataagc

SEQ ID NO: 2448003 - DNA, 25 bp, Homo sapien
tgatatccagcagtgacctgaaatg

SEQ ID NO: 2448004 - DNA, 25 bp, Homo sapien
tgacctgaaatggtgaacttggata

SEQ ID NO: 2448005 - DNA, 25 bp, Homo sapien
tatacaggcaactgatatccagcag

SEQ ID NO: 2448006 - DNA, 25 bp, Homo sapien
ggtgaacttggataagcaggaaatg

SEQ ID NO: 2448007 - DNA, 25 bp, Homo sapien
cttgaaatggtgaatttggataagc

SEQ ID NO: 2448008 - DNA, 25 bp, Homo sapien
ggaactgatatccagtggcgacttg

SEQ ID NO: 2448009 - DNA, 25 bp, Homo sapien
actgatatccagtggcgacttgaaa

SEQ ID NO: 2448010 - DNA, 25 bp, Homo sapien
tatccagtggcgacttgaaatggtg

SEQ ID NO: 2448011 - DNA, 25 bp, Homo sapien
tatacaggcaactgatatccagtgg

SEQ ID NO: 2448012 - DNA, 25 bp, Homo sapien
ctggtgaatttggataagcaggaaa

SEQ ID NO: 2448013 - DNA, 25 bp, Homo sapien
cagtggtgacctgaactggtgaatt

SEQ ID NO: 2448014 - DNA, 25 bp, Homo sapien
tgataattgtatacaggcaactgat

SEQ ID NO: 2448015 - DNA, 25 bp, Homo sapien
gacctgaaatggtgatcttggataa

SEQ ID NO: 2448016 - DNA, 25 bp, Homo sapien
tgacctgaaatggtgatcttggata

SEQ ID NO: 2448017 - DNA, 25 bp, Homo sapien
tatccagtggcgacttgaaatggtg

SEQ ID NO: 2448018 - DNA, 25 bp, Homo sapien
ggaactgatatccagtggcgacttg

SEQ ID NO: 2448019 - DNA, 25 bp, Homo sapien
actgatatccagtggcgacttgaaa

SEQ ID NO: 2448020 - DNA, 25 bp, Homo sapien
cttgaaatggtgaatttggataagc

SEQ ID NO: 2448021 - DNA, 25 bp, Homo sapien
tatacaggcaactgatatccagtgg

SEQ ID NO: 2448022 - DNA, 25 bp, Homo sapien
cctgaactggtgaatttggataagc

SEQ ID NO: 2448023 - DNA, 25 bp, Homo sapien
ctggtgaatttggataagcaggaaa

SEQ ID NO: 2448024 - DNA, 25 bp, Homo sapien
cagtggtgacctgaactggtgaatt

SEQ ID NO: 2448025 - DNA, 25 bp, Homo sapien
tgacctgaaatggtgaacttggata

SEQ ID NO: 2448026 - DNA, 25 bp, Homo sapien
cagtggtgacctgaaatggtgaact

SEQ ID NO: 2448027 - DNA, 25 bp, Homo sapien
tatacaggcaactgatatccagtgg

SEQ ID NO: 2448028 - DNA, 25 bp, Homo sapien
gtgaacttggataagcaggaaatgc

SEQ ID NO: 2448029 - DNA, 25 bp, Homo sapien
gtgaacttggataagcaggaaatgc

SEQ ID NO: 2448030 - DNA, 25 bp, Homo sapien
cagtggtgacctgaaatggtgaact

SEQ ID NO: 2448031 - DNA, 25 bp, Homo sapien
tgacctgaaatggtgaacttggata

SEQ ID NO: 2448032 - DNA, 25 bp, Homo sapien
tatacaggcaactgatatccagtgg

SEQ ID NO: 2448033 - DNA, 25 bp, Homo sapien
cagtggtgacctgaaatggtgaact

SEQ ID NO: 2448034 - DNA, 25 bp, Homo sapien
tgacctgaaatggtgaacttggata

SEQ ID NO: 2448035 - DNA, 25 bp, Homo sapien
tatacaggcaactgatatccagtgg

SEQ ID NO: 2448036 - DNA, 25 bp, Homo sapien
gtgaacttggataagcaggaaatgc

SEQ ID NO: 2448037 - DNA, 25 bp, Homo sapien
cagtggtgacctgaaatggtgaact

SEQ ID NO: 2448038 - DNA, 25 bp, Homo sapien
tgacctgaaatggtgaacttggata

SEQ ID NO: 2448039 - DNA, 25 bp, Homo sapien
gtgaacttggataagcaggaaatgc

SEQ ID NO: 2448040 - DNA, 25 bp, Homo sapien
tatacaggcaactgatatccagtgg

SEQ ID NO: 2448041 - DNA, 25 bp, Homo sapien
gtgaacttggataagcaggaaatgc

SEQ ID NO: 2448042 - DNA, 25 bp, Homo sapien
cagtggtgacctgaaatggtgaact

SEQ ID NO: 2448043 - DNA, 25 bp, Homo sapien
tgacctgaaatggtgaacttggata

SEQ ID NO: 2448044 - DNA, 25 bp, Homo sapien
tatacaggcaactgatatccagtgg

SEQ ID NO: 2448045 - DNA, 25 bp, Homo sapien
cagtggtgacctgaaatggtgaact

SEQ ID NO: 2448046 - DNA, 25 bp, Homo sapien
tatacaggcaactgatatccagtgg

SEQ ID NO: 2448047 - DNA, 25 bp, Homo sapien
tgacctgaaatggtgaacttggata

SEQ ID NO: 2448048 - DNA, 25 bp, Homo sapien
gtgaacttggataagcaggaaatgc

SEQ ID NO: 2448049 - DNA, 25 bp, Homo sapien
aattagaaagaaatatcattcccaa

SEQ ID NO: 2448050 - DNA, 25 bp, Homo sapien
agaaatatcattcccaatgtaacaa

SEQ ID NO: 2448051 - DNA, 25 bp, Homo sapien
tatcattcccaatgtaacaaaaata

SEQ ID NO: 2448052 - DNA, 25 bp, Homo sapien
gaaagaaatatcattcccaatgtaa

SEQ ID NO: 2448053 - DNA, 25 bp, Homo sapien
aattgtatacatggaactgatatcc

SEQ ID NO: 2448054 - DNA, 25 bp, Homo sapien
tatacatggaactgatatccagtgg

SEQ ID NO: 2448055 - DNA, 25 bp, Homo sapien
ctggtaattgtatacatggaactga

SEQ ID NO: 2448056 - DNA, 25 bp, Homo sapien
tggaactgatatccagtggtgacct

SEQ ID NO: 2448057 - DNA, 25 bp, Homo sapien
ccccaacagggcactgcggtggcat

SEQ ID NO: 2448058 - DNA, 25 bp, Homo sapien
gctccccaacagggcactgcggtgg

SEQ ID NO: 2448059 - DNA, 25 bp, Homo sapien
ctcctttgctccccaacagggcact

SEQ ID NO: 2448060 - DNA, 25 bp, Homo sapien
tcctttgctccccaacagggcactg

SEQ ID NO: 2448061 - DNA, 25 bp, Homo sapien
taattacatacaggcaactgacacc

SEQ ID NO: 2448062 - DNA, 25 bp, Homo sapien
acatacaggcaactgacacccagtg

SEQ ID NO: 2448063 - DNA, 25 bp, Homo sapien
attacatacaggcaactgacaccca

SEQ ID NO: 2448064 - DNA, 25 bp, Homo sapien
catacaggcaactgacacccagtgg

SEQ ID NO: 2448065 - DNA, 25 bp, Homo sapien
tttgtatgcttcggtccacagattt

SEQ ID NO: 2448066 - DNA, 25 bp, Homo sapien
ttctctggattaaacagacaagata

SEQ ID NO: 2448067 - DNA, 25 bp, Homo sapien
tcatcttgagtaacaacggaattta

SEQ ID NO: 2448068 - DNA, 25 bp, Homo sapien
gaagcagtcatcttgagtaacaacg

SEQ ID NO: 2448069 - DNA, 25 bp, Homo sapien
cagtcatcttgagtaacaacggaat

SEQ ID NO: 2448070 - DNA, 25 bp, Homo sapien
agcagtcatcttgagtaacaacgga

SEQ ID NO: 2448071 - DNA, 25 bp, Homo sapien
ccaaacttcttctaaagcgatgcac

SEQ ID NO: 2448072 - DNA, 25 bp, Homo sapien
gatccaacagatttaaatactgcca

SEQ ID NO: 2448073 - DNA, 25 bp, Homo sapien
atagctgagaggatccaacagattt

SEQ ID NO: 2448074 - DNA, 25 bp, Homo sapien
gccaaacttcttctaaagcgatgca

SEQ ID NO: 2448075 - DNA, 25 bp, Homo sapien
caagttatacagaaagtttcagtgt

SEQ ID NO: 2448076 - DNA, 25 bp, Homo sapien
tacaagttatacagaaagtttcagt

SEQ ID NO: 2448077 - DNA, 25 bp, Homo sapien
agttatacagaaagtttcagtgtga

SEQ ID NO: 2448078 - DNA, 25 bp, Homo sapien
taatacaagttatacagaaagtttc

SEQ ID NO: 2448079 - DNA, 25 bp, Homo sapien
cattgctaccattccacggcttggc

SEQ ID NO: 2448080 - DNA, 25 bp, Homo sapien
gcaaacctcctgaaagactagtaaa

SEQ ID NO: 2448081 - DNA, 25 bp, Homo sapien
ttgagaaatcatagaccccagtggg

SEQ ID NO: 2448082 - DNA, 25 bp, Homo sapien
taaagactgtatccttcggattccg

SEQ ID NO: 2448083 - DNA, 25 bp, Homo sapien
agggtaccaggaatttccatccgca

SEQ ID NO: 2448084 - DNA, 25 bp, Homo sapien
aggaatttccatccgcaacccagcc

SEQ ID NO: 2448085 - DNA, 25 bp, Homo sapien
caggagtttgccagaggccaggaga

SEQ ID NO: 2448086 - DNA, 25 bp, Homo sapien
gtaccaggaatttccatccgcaacc

SEQ ID NO: 2448087 - DNA, 25 bp, Homo sapien
caatgctccatgtctgtggggaggt

SEQ ID NO: 2448088 - DNA, 25 bp, Homo sapien
tcaatgctccatgtctgtggggagg

SEQ ID NO: 2448089 - DNA, 25 bp, Homo sapien
ccatgtctgtggggaggttagtggg

SEQ ID NO: 2448090 - DNA, 25 bp, Homo sapien
tgtctgtggggaggttagtgggaat

SEQ ID NO: 2448091 - DNA, 25 bp, Homo sapien
tttctgagaagcattgcagccatcc

SEQ ID NO: 2448092 - DNA, 25 bp, Homo sapien
tctgagaagcattgcagccatccat

SEQ ID NO: 2448093 - DNA, 25 bp, Homo sapien
ttgcagccatccatgaatctgaatg

SEQ ID NO: 2448094 - DNA, 25 bp, Homo sapien
ttctgagaagcattgcagccatcca

SEQ ID NO: 2448095 - DNA, 25 bp, Homo sapien
tagcttgccagctgaacctatgcac

SEQ ID NO: 2448096 - DNA, 25 bp, Homo sapien
ttctaccgtggttccacccctcaga

SEQ ID NO: 2448097 - DNA, 25 bp, Homo sapien
cctgacagccagtttagcagcagcc

SEQ ID NO: 2448098 - DNA, 25 bp, Homo sapien
agcccaacaaccagttctaccgtgg

SEQ ID NO: 2448099 - DNA, 25 bp, Homo sapien
ttcgtgtctgccgagcttgtctgga

SEQ ID NO: 2448100 - DNA, 25 bp, Homo sapien
gaccttcgtgtctgccgagcttgtc

SEQ ID NO: 2448101 - DNA, 25 bp, Homo sapien
cgtgtctgccgagcttgtctggagc

SEQ ID NO: 2448102 - DNA, 25 bp, Homo sapien
tgtctgccgagcttgtctggagcgt

SEQ ID NO: 2448103 - DNA, 25 bp, Homo sapien
ggctgctcctgagcttgcctctctg

SEQ ID NO: 2448104 - DNA, 25 bp, Homo sapien
gctgctcctgagcttgcctctctgc

SEQ ID NO: 2448105 - DNA, 25 bp, Homo sapien
gctcctgagcttgcctctctgccct

SEQ ID NO: 2448106 - DNA, 25 bp, Homo sapien
tgctcctgagcttgcctctctgccc

SEQ ID NO: 2448107 - DNA, 25 bp, Homo sapien
ttaggtctcatgcttctcagggctc

SEQ ID NO: 2448108 - DNA, 25 bp, Homo sapien
ccttcagtgtctgtaggcttctcac

SEQ ID NO: 2448109 - DNA, 25 bp, Homo sapien
cctcaagcccttcagtgtctgtagg

SEQ ID NO: 2448110 - DNA, 25 bp, Homo sapien
aggtctcatgcttctcagggctccc

SEQ ID NO: 2448111 - DNA, 25 bp, Homo sapien
gtgggaactggtgtagagtgagggt

SEQ ID NO: 2448112 - DNA, 25 bp, Homo sapien
gcaggtgggaactggtgtagagtga

SEQ ID NO: 2448113 - DNA, 25 bp, Homo sapien
aggtgggaactggtgtagagtgagg

SEQ ID NO: 2448114 - DNA, 25 bp, Homo sapien
caggtgggaactggtgtagagtgag

SEQ ID NO: 2448115 - DNA, 25 bp, Homo sapien
gaactttaagaatctgcgggatgtg

SEQ ID NO: 2448116 - DNA, 25 bp, Homo sapien
aagaatctgcgggatgtgcactgtg

SEQ ID NO: 2448117 - DNA, 25 bp, Homo sapien
ctttaagaatctgcgggatgtgcac

SEQ ID NO: 2448118 - DNA, 25 bp, Homo sapien
tgtggaggggcctgtgtcttttgaa

SEQ ID NO: 2448119 - DNA, 25 bp, Homo sapien
ttagaggactgctcatccaaatctg

SEQ ID NO: 2448120 - DNA, 25 bp, Homo sapien
agaggactgctcatccaaatctgct

SEQ ID NO: 2448121 - DNA, 25 bp, Homo sapien
cctcttagaggactgctcatccaaa

SEQ ID NO: 2448122 - DNA, 25 bp, Homo sapien
tcttagaggactgctcatccaaatc

SEQ ID NO: 2448123 - DNA, 25 bp, Homo sapien
gtgcctcttcatcgttccttgggcc

SEQ ID NO: 2448124 - DNA, 25 bp, Homo sapien
tcctttgaccagaaattgatgtctg

SEQ ID NO: 2448125 - DNA, 25 bp, Homo sapien
gtctgtgcctcttcatcgttccttg

SEQ ID NO: 2448126 - DNA, 25 bp, Homo sapien
ctgtgcctcttcatcgttccttggg

SEQ ID NO: 2448127 - DNA, 25 bp, Homo sapien
ccatgtttctttgacctcttcagag

SEQ ID NO: 2448128 - DNA, 25 bp, Homo sapien
ttgacctcttcagagccatcagttt

SEQ ID NO: 2448129 - DNA, 25 bp, Homo sapien
tctttgacctcttcagagccatcag

SEQ ID NO: 2448130 - DNA, 25 bp, Homo sapien
catgtttctttgacctcttcagagc

SEQ ID NO: 2448131 - DNA, 25 bp, Homo sapien
ctgcagggaagagttggatgtcagg

SEQ ID NO: 2448132 - DNA, 25 bp, Homo sapien
tgcagggaagagttggatgtcaggc

SEQ ID NO: 2448133 - DNA, 25 bp, Homo sapien
aggagcctcgagtgtcttcagaaaa

SEQ ID NO: 2448134 - DNA, 25 bp, Homo sapien
agaaaaccaccaccaatcttgtctg

SEQ ID NO: 2448135 - DNA, 25 bp, Homo sapien
accagcactaccactattgttatca

SEQ ID NO: 2448136 - DNA, 25 bp, Homo sapien
cccctataacaagtggtagctgctg

SEQ ID NO: 2448137 - DNA, 25 bp, Homo sapien
ctacccctataacaagtggtagctg

SEQ ID NO: 2448138 - DNA, 25 bp, Homo sapien
tataacaagtggtagctgctgctct

SEQ ID NO: 2448139 - DNA, 25 bp, Homo sapien
tcctgtggggaatctattccactta

SEQ ID NO: 2448140 - DNA, 25 bp, Homo sapien
ttgataacagaatccgtatttcctg

SEQ ID NO: 2448141 - DNA, 25 bp, Homo sapien
ggggaatctattccacttagctgac

SEQ ID NO: 2448142 - DNA, 25 bp, Homo sapien
taacagaatccgtatttcctgtggg

SEQ ID NO: 2448143 - DNA, 25 bp, Homo sapien
tcctgtaataagtaccaacctgcac

SEQ ID NO: 2448144 - DNA, 25 bp, Homo sapien
tgtaataagtaccaacctgcactcc

SEQ ID NO: 2448145 - DNA, 25 bp, Homo sapien
taataagtaccaacctgcactcctg

SEQ ID NO: 2448146 - DNA, 25 bp, Homo sapien
cctgtaataagtaccaacctgcact

SEQ ID NO: 2448147 - DNA, 25 bp, Homo sapien
gaatcagactgagcaaagaagaggg

SEQ ID NO: 2448148 - DNA, 25 bp, Homo sapien
gactgagcaaagaagagggtacttt

SEQ ID NO: 2448149 - DNA, 25 bp, Homo sapien
agtgaattctttacttcgggtatat

SEQ ID NO: 2448150 - DNA, 25 bp, Homo sapien
tgaattctttacttcgggtatataa

SEQ ID NO: 2448151 - DNA, 25 bp, Homo sapien
gtgaattctttacttcgggtatata

SEQ ID NO: 2448152 - DNA, 25 bp, Homo sapien
aagatcaccattaattcagatggca

SEQ ID NO: 2448153 - DNA, 25 bp, Homo sapien
gaagatcaccattaattcagatggc

SEQ ID NO: 2448154 - DNA, 25 bp, Homo sapien
gatcaccattaattcagatggcaat

SEQ ID NO: 2448155 - DNA, 25 bp, Homo sapien
atgaagatcaccattaattcagatg

SEQ ID NO: 2448156 - DNA, 25 bp, Homo sapien
tgaagtcttgaatgctacagatgaa

SEQ ID NO: 2448157 - DNA, 25 bp, Homo sapien
cagtgttatactgaatgaaaattac

SEQ ID NO: 2448158 - DNA, 25 bp, Homo sapien
acaaggaactcctcagtgttatact

SEQ ID NO: 2448159 - DNA, 25 bp, Homo sapien
gaccttgttagcattctcagactcc

SEQ ID NO: 2448160 - DNA, 25 bp, Homo sapien
tactgtctccatgaccttgttagca

SEQ ID NO: 2448161 - DNA, 25 bp, Homo sapien
taaggcaagtcccgtattttgcttc

SEQ ID NO: 2448162 - DNA, 25 bp, Homo sapien
tcctctgtgcatgtacttgttactc

SEQ ID NO: 2448163 - DNA, 25 bp, Homo sapien
ggcaagtcccgtattttgcttcctc

SEQ ID NO: 2448164 - DNA, 25 bp, Homo sapien
caagtcccgtattttgcttcctctg

SEQ ID NO: 2448165 - DNA, 25 bp, Homo sapien
ctctgctggtgccaaaatacccttc

SEQ ID NO: 2448166 - DNA, 25 bp, Homo sapien
caaaccccgctaacttctggaactg

SEQ ID NO: 2448167 - DNA, 25 bp, Homo sapien
ttaccattaagtcctccattaagtc

SEQ ID NO: 2448168 - DNA, 25 bp, Homo sapien
ccagtagtcattcggaataataaat

SEQ ID NO: 2448169 - DNA, 25 bp, Homo sapien
taataaatactcgactttcagaaaa

SEQ ID NO: 2448170 - DNA, 25 bp, Homo sapien
ttctttcatgttaacccagtagtca

SEQ ID NO: 2448171 - DNA, 25 bp, Homo sapien
tcatagacctgacacttattgttct

SEQ ID NO: 2448172 - DNA, 25 bp, Homo sapien
gtggtcacagactcacatttaagca

SEQ ID NO: 2448173 - DNA, 25 bp, Homo sapien
caacattgatctcatgaagatgaac

SEQ ID NO: 2448174 - DNA, 25 bp, Homo sapien
acacttattgttctgaatcaacatt

SEQ ID NO: 2448175 - DNA, 25 bp, Homo sapien
tcacgtgttttagatttgtaacctc

SEQ ID NO: 2448176 - DNA, 25 bp, Homo sapien
gttttgaccaatggatgaacattgc

SEQ ID NO: 2448177 - DNA, 25 bp, Homo sapien
caatggatgaacattgctaacattt

SEQ ID NO: 2448178 - DNA, 25 bp, Homo sapien
attgatgaatataagcaagaatcca

SEQ ID NO: 2448179 - DNA, 25 bp, Homo sapien
ctctgtagatcaaccagcgatgcat

SEQ ID NO: 2448180 - DNA, 25 bp, Homo sapien
gaatctggctgggtaaaaccgcatc

SEQ ID NO: 2448181 - DNA, 25 bp, Homo sapien
ctgctctgtagatcaaccagcgatg

SEQ ID NO: 2448182 - DNA, 25 bp, Homo sapien
gtaaaaccgcatcaaagctgctctg

SEQ ID NO: 2448183 - DNA, 25 bp, Homo sapien
ttccaggtgtgggagctttgcctgc

SEQ ID NO: 2448184 - DNA, 25 bp, Homo sapien
tttcttagtttccaggtgtgggagc

SEQ ID NO: 2448185 - DNA, 25 bp, Homo sapien
tcttttgtgcaagtcctttcttagt

SEQ ID NO: 2448186 - DNA, 25 bp, Homo sapien
ccaggtgtgggagctttgcctgcat

SEQ ID NO: 2448187 - DNA, 25 bp, Homo sapien
gggttaatgggatgcccagacatga

SEQ ID NO: 2448188 - DNA, 25 bp, Homo sapien
gttagaagagtggagcaatgcagcc

SEQ ID NO: 2448189 - DNA, 25 bp, Homo sapien
cacctctaaaatcaggagtgatgga

SEQ ID NO: 2448190 - DNA, 25 bp, Homo sapien
atttccatggcagaactgtgtttcc

SEQ ID NO: 2448191 - DNA, 25 bp, Homo sapien
tacactcatcatttcgcagttactt

SEQ ID NO: 2448192 - DNA, 25 bp, Homo sapien
acaggcaaatccagcattctatcct

SEQ ID NO: 2448193 - DNA, 25 bp, Homo sapien
cgcagttactttgtgaaagatcaca

SEQ ID NO: 2448194 - DNA, 25 bp, Homo sapien
cactgtacgtggtataagcaatgga

SEQ ID NO: 2448195 - DNA, 25 bp, Homo sapien
tcttctcagaggaggactaccgcgg

SEQ ID NO: 2448196 - DNA, 25 bp, Homo sapien
gatgcatacgacctgagtgacggga

SEQ ID NO: 2448197 - DNA, 25 bp, Homo sapien
cgaatgggctttctatatgtgggct

SEQ ID NO: 2448198 - DNA, 25 bp, Homo sapien
ggtctctcggcaagactagaaagca

SEQ ID NO: 2448199 - DNA, 25 bp, Homo sapien
tgcatggttagctgcatacaggagc

SEQ ID NO: 2448200 - DNA, 25 bp, Homo sapien
tccagattccctgcatggttagctg

SEQ ID NO: 2448201 - DNA, 25 bp, Homo sapien
gtcaccatgaggtccagattccctg

SEQ ID NO: 2448202 - DNA, 25 bp, Homo sapien
acagtccgccgcagtcaccatgagg

SEQ ID NO: 2448203 - DNA, 25 bp, Homo sapien
cttccacttctgtcgtgatgtcatt

SEQ ID NO: 2448204 - DNA, 25 bp, Homo sapien
cacttctgtcgtgatgtcatttacc

SEQ ID NO: 2448205 - DNA, 25 bp, Homo sapien
gtcatttaccaggagcacgcctctt

SEQ ID NO: 2448206 - DNA, 25 bp, Homo sapien
tcatttaccaggagcacgcctcttc

SEQ ID NO: 2448207 - DNA, 25 bp, Homo sapien
aataggggtagttccatggctggca

SEQ ID NO: 2448208 - DNA, 25 bp, Homo sapien
ggctggcatgggcatagagactccc

SEQ ID NO: 2448209 - DNA, 25 bp, Homo sapien
ggcatgggcatagagactccccttc

SEQ ID NO: 2448210 - DNA, 25 bp, Homo sapien
gcacagggaataggggtagttccat

SEQ ID NO: 2448211 - DNA, 25 bp, Homo sapien
gcactggaccactcccacagattca

SEQ ID NO: 2448212 - DNA, 25 bp, Homo sapien
ctggaccactcccacagattcaggc

SEQ ID NO: 2448213 - DNA, 25 bp, Homo sapien
actggaccactcccacagattcagg

SEQ ID NO: 2448214 - DNA, 25 bp, Homo sapien
tggaccactcccacagattcaggct

SEQ ID NO: 2448215 - DNA, 25 bp, Homo sapien
ggggtggctgagttcctccatctac

SEQ ID NO: 2448216 - DNA, 25 bp, Homo sapien
ctggggtggctgagttcctccatct

SEQ ID NO: 2448217 - DNA, 25 bp, Homo sapien
tggggtggctgagttcctccatcta

SEQ ID NO: 2448218 - DNA, 25 bp, Homo sapien
ttgctgggaggcactccttaccaag

SEQ ID NO: 2448219 - DNA, 25 bp, Homo sapien
tgggaggcactccttaccaaggatg

SEQ ID NO: 2448220 - DNA, 25 bp, Homo sapien
gcactccttaccaaggatgccaacg

SEQ ID NO: 2448221 - DNA, 25 bp, Homo sapien
taccaaggatgccaacgcagtactc

SEQ ID NO: 2448222 - DNA, 25 bp, Homo sapien
ggagcctgggttcatcgtaaccgaa

SEQ ID NO: 2448223 - DNA, 25 bp, Homo sapien
taaccgaaaatgatgggcctgggag

SEQ ID NO: 2448224 - DNA, 25 bp, Homo sapien
cggcagaaaggagaaatcacgtcag

SEQ ID NO: 2448225 - DNA, 25 bp, Homo sapien
ctgagcccaatgtggtcctccagat

SEQ ID NO: 2448226 - DNA, 25 bp, Homo sapien
tgtaacccgagcagacactggatcc

SEQ ID NO: 2448227 - DNA, 25 bp, Homo sapien
tctatctccagtagtcaaaccatgg

SEQ ID NO: 2448228 - DNA, 25 bp, Homo sapien
caaaccatggatcttgcttaaagga

SEQ ID NO: 2448229 - DNA, 25 bp, Homo sapien
gattctggcccaaggttctatctcc

SEQ ID NO: 2448230 - DNA, 25 bp, Homo sapien
tactttccacagtcgtaccttggac

SEQ ID NO: 2448231 - DNA, 25 bp, Homo sapien
atccgttcacagaggctggaacttc

SEQ ID NO: 2448232 - DNA, 25 bp, Homo sapien
ccaacagtaaatccgttcacagagg

SEQ ID NO: 2448233 - DNA, 25 bp, Homo sapien
ggacacagcctatactttccacagt

SEQ ID NO: 2448234 - DNA, 25 bp, Homo sapien
gaacccacgttgagtctccagcaat

SEQ ID NO: 2448235 - DNA, 25 bp, Homo sapien
tctatatgtgatacggtcacaacac

SEQ ID NO: 2448236 - DNA, 25 bp, Homo sapien
tgaaacaataacactgtgaacccac

SEQ ID NO: 2448237 - DNA, 25 bp, Homo sapien
tataatcacattagggacccatgct

SEQ ID NO: 2448238 - DNA, 25 bp, Homo sapien
taaatccctgagcaaaaactatagc

SEQ ID NO: 2448239 - DNA, 25 bp, Homo sapien
gatcctcgatgaaatgccaccaaca

SEQ ID NO: 2448240 - DNA, 25 bp, Homo sapien
gagcctatcgctaagacagtcacaa

SEQ ID NO: 2448241 - DNA, 25 bp, Homo sapien
catagatccaggatagaattccaac

SEQ ID NO: 2448242 - DNA, 25 bp, Homo sapien
aatcatactgtggactattgccaaa

SEQ ID NO: 2448243 - DNA, 25 bp, Homo sapien
aatctgcagcagtgaaactctggac

SEQ ID NO: 2448244 - DNA, 25 bp, Homo sapien
aagtcacactttggaaccaagaaga

SEQ ID NO: 2448245 - DNA, 25 bp, Homo sapien
ctgtggactattgccaaatctgcag

SEQ ID NO: 2448246 - DNA, 25 bp, Homo sapien
ctgttgatgacatccccaacatcca

SEQ ID NO: 2448247 - DNA, 25 bp, Homo sapien
tgatgacatccccaacatccaaaat

SEQ ID NO: 2448248 - DNA, 25 bp, Homo sapien
gttgatgacatccccaacatccaaa

SEQ ID NO: 2448249 - DNA, 25 bp, Homo sapien
gatgacatccccaacatccaaaata

SEQ ID NO: 2448250 - DNA, 25 bp, Homo sapien
tggtctggagggttggagaggctgt

SEQ ID NO: 2448251 - DNA, 25 bp, Homo sapien
ctggggcattctgtcagaacaagga

SEQ ID NO: 2448252 - DNA, 25 bp, Homo sapien
ttttggtctggagggttggagaggc

SEQ ID NO: 2448253 - DNA, 25 bp, Homo sapien
gctggggcattctgtcagaacaagg

SEQ ID NO: 2448254 - DNA, 25 bp, Homo sapien
tctatactgccaaatggtctgcaaa

SEQ ID NO: 2448255 - DNA, 25 bp, Homo sapien
ttctatactgccaaatggtctgcaa

SEQ ID NO: 2448256 - DNA, 25 bp, Homo sapien
tatactgccaaatggtctgcaaaat

SEQ ID NO: 2448257 - DNA, 25 bp, Homo sapien
tactgccaaatggtctgcaaaatta

SEQ ID NO: 2448258 - DNA, 25 bp, Homo sapien
ctgttcattgacttcaggcccccaa

SEQ ID NO: 2448259 - DNA, 25 bp, Homo sapien
gctgggcttttggttgacatgtgac

SEQ ID NO: 2448260 - DNA, 25 bp, Homo sapien
gccaagatccggagagactctgctg

SEQ ID NO: 2448261 - DNA, 25 bp, Homo sapien
gctgagatgaatacaagtcaccctc

SEQ ID NO: 2448262 - DNA, 25 bp, Homo sapien
ataaagaattgctgcctgtatcaca

SEQ ID NO: 2448263 - DNA, 25 bp, Homo sapien
aaataaagaattgctgcctgtatca

SEQ ID NO: 2448264 - DNA, 25 bp, Homo sapien
aataaagaattgctgcctgtatcac

SEQ ID NO: 2448265 - DNA, 25 bp, Homo sapien
tcttgatccagtttttctagttccc

SEQ ID NO: 2448266 - DNA, 25 bp, Homo sapien
ttcttgatccagtttttctagttcc

SEQ ID NO: 2448267 - DNA, 25 bp, Homo sapien
ttgatccagtttttctagttccctc

SEQ ID NO: 2448268 - DNA, 25 bp, Homo sapien
ctttcttgatccagtttttctagtt

SEQ ID NO: 2448269 - DNA, 25 bp, Homo sapien
tggacactaattgactcccttcact

SEQ ID NO: 2448270 - DNA, 25 bp, Homo sapien
tcccttcactcacctcaatgtagtt

SEQ ID NO: 2448271 - DNA, 25 bp, Homo sapien
gattccttttcgggcacctgccact

SEQ ID NO: 2448272 - DNA, 25 bp, Homo sapien
gcttgtaagacaagaagaggacagg

SEQ ID NO: 2448273 - DNA, 25 bp, Homo sapien
tcaaagcaacattctgaagcaaagc

SEQ ID NO: 2448274 - DNA, 25 bp, Homo sapien
gaagccattaatttccctcaagtgt

SEQ ID NO: 2448275 - DNA, 25 bp, Homo sapien
gaagcaaacttggactggcagccat

SEQ ID NO: 2448276 - DNA, 25 bp, Homo sapien
aagtgtcctgcgctttagatttgaa

SEQ ID NO: 2448277 - DNA, 25 bp, Homo sapien
ttcctgaatcacctttcttgagctc

SEQ ID NO: 2448278 - DNA, 25 bp, Homo sapien
tcctgaatcacctttcttgagctct

SEQ ID NO: 2448279 - DNA, 25 bp, Homo sapien
cctgaatcacctttcttgagctctg

SEQ ID NO: 2448280 - DNA, 25 bp, Homo sapien
tggctgccggtcaaaactccctctt

SEQ ID NO: 2448281 - DNA, 25 bp, Homo sapien
cccaggtctgtgacaaatggctgcc

SEQ ID NO: 2448282 - DNA, 25 bp, Homo sapien
aaatggctgccggtcaaaactccct

SEQ ID NO: 2448283 - DNA, 25 bp, Homo sapien
ttcccaggtctgtgacaaatggctg

SEQ ID NO: 2448284 - DNA, 25 bp, Homo sapien
ctgcttcttgaaaatatacacatac

SEQ ID NO: 2448285 - DNA, 25 bp, Homo sapien
tatttcaacaaattgtctgttccct

SEQ ID NO: 2448286 - DNA, 25 bp, Homo sapien
cagggaaggcccatatttcaacaaa

SEQ ID NO: 2448287 - DNA, 25 bp, Homo sapien
tgtttctatctcttccagggaaggc

SEQ ID NO: 2448288 - DNA, 25 bp, Homo sapien
gctgttggagaccaaactgaaattc

SEQ ID NO: 2448289 - DNA, 25 bp, Homo sapien
gggtctgactatggctgtagcttcc

SEQ ID NO: 2448290 - DNA, 25 bp, Homo sapien
tctggggtctgactatggctgtagc

SEQ ID NO: 2448291 - DNA, 25 bp, Homo sapien
ttggagaccaaactgaaattccaac

SEQ ID NO: 2448292 - DNA, 25 bp, Homo sapien
ctgtggtcatctgcaccaggcattc

SEQ ID NO: 2448293 - DNA, 25 bp, Homo sapien
tgtggtcatctgcaccaggcattcc

SEQ ID NO: 2448294 - DNA, 25 bp, Homo sapien
cagtaactagccctggcacattcac

SEQ ID NO: 2448295 - DNA, 25 bp, Homo sapien
tcattctgataaacaaccttcattg

SEQ ID NO: 2448296 - DNA, 25 bp, Homo sapien
gtcacagtgctatagagatattgct

SEQ ID NO: 2448297 - DNA, 25 bp, Homo sapien
ttatttgtggttcaggaataccttc

SEQ ID NO: 2448298 - DNA, 25 bp, Homo sapien
tagttatctgcagtgggaaagtgtc

SEQ ID NO: 2448299 - DNA, 25 bp, Homo sapien
tggctgaacaaatcccttccagacc

SEQ ID NO: 2448300 - DNA, 25 bp, Homo sapien
attctgaatccatatcctcagcatg

SEQ ID NO: 2448301 - DNA, 25 bp, Homo sapien
tgtttcaccacagtccagttggagc

SEQ ID NO: 2448302 - DNA, 25 bp, Homo sapien
aatcccttccagacctaatatttat

SEQ ID NO: 2448303 - DNA, 25 bp, Homo sapien
cagatttcatggcttttgtcaggat

SEQ ID NO: 2448304 - DNA, 25 bp, Homo sapien
catggcttttgtcaggatttgatac

SEQ ID NO: 2448305 - DNA, 25 bp, Homo sapien
ctatacaaagtcagatttcatggct

SEQ ID NO: 2448306 - DNA, 25 bp, Homo sapien
caaagtcagatttcatggcttttgt

SEQ ID NO: 2448307 - DNA, 25 bp, Homo sapien
ggtgagatataagagggagcagata

SEQ ID NO: 2448308 - DNA, 25 bp, Homo sapien
ttgaagtcccacgagattttctggt

SEQ ID NO: 2448309 - DNA, 25 bp, Homo sapien
tggtgggtgagatataagagggagc

SEQ ID NO: 2448310 - DNA, 25 bp, Homo sapien
attttgaagtcccacgagattttct

SEQ ID NO: 2448311 - DNA, 25 bp, Homo sapien
ctggaatgcagaactacaaaaggaa

SEQ ID NO: 2448312 - DNA, 25 bp, Homo sapien
tggaatgcagaactacaaaaggaaa

SEQ ID NO: 2448313 - DNA, 25 bp, Homo sapien
cttgttgcaaagtaagggtagtcac

SEQ ID NO: 2448314 - DNA, 25 bp, Homo sapien
tatccacagtcacaagaattttttg

SEQ ID NO: 2448315 - DNA, 25 bp, Homo sapien
ccatgcctgtgttcatcaagtgatc

SEQ ID NO: 2448316 - DNA, 25 bp, Homo sapien
ttgggcttttggtgaaggttgacca

SEQ ID NO: 2448317 - DNA, 25 bp, Homo sapien
cagtaatgagatcaaatggccacat

SEQ ID NO: 2448318 - DNA, 25 bp, Homo sapien
cttcccaattgctttaccagtaatg

SEQ ID NO: 2448319 - DNA, 25 bp, Homo sapien
aattgctttaccagtaatgagatca

SEQ ID NO: 2448320 - DNA, 25 bp, Homo sapien
aacacaaactccctgtcactcctca

SEQ ID NO: 2448321 - DNA, 25 bp, Homo sapien
cacaaaggatggcagagttcccggg

SEQ ID NO: 2448322 - DNA, 25 bp, Homo sapien
gagagtgacttatgcaggttaccca

SEQ ID NO: 2448323 - DNA, 25 bp, Homo sapien
ttttgatgacagacccaagatctaa

SEQ ID NO: 2448324 - DNA, 25 bp, Homo sapien
taacaggaacacactctcagcagtc

SEQ ID NO: 2448325 - DNA, 25 bp, Homo sapien
agtaaagctaccctgactgcgatgc

SEQ ID NO: 2448326 - DNA, 25 bp, Homo sapien
ttggatctgataccaaattatactg

SEQ ID NO: 2448327 - DNA, 25 bp, Homo sapien
gattttccgtgaatactgaattata

SEQ ID NO: 2448328 - DNA, 25 bp, Homo sapien
tctgataccaaattatactggatgc

SEQ ID NO: 2448329 - DNA, 25 bp, Homo sapien
ctttttagattttccgtgaatactg

SEQ ID NO: 2448330 - DNA, 25 bp, Homo sapien
tgtcatttacaaccactgacgtcat

SEQ ID NO: 2448331 - DNA, 25 bp, Homo sapien
aaccactgacgtcatctgcaccagt

SEQ ID NO: 2448332 - DNA, 25 bp, Homo sapien
catttacaaccactgacgtcatctg

SEQ ID NO: 2448333 - DNA, 25 bp, Homo sapien
ttacaaccactgacgtcatctgcac

SEQ ID NO: 2448334 - DNA, 25 bp, Homo sapien
caatgtttccagaaaccaggcttgt

SEQ ID NO: 2448335 - DNA, 25 bp, Homo sapien
acttcctggctggtcatacatgcat

SEQ ID NO: 2448336 - DNA, 25 bp, Homo sapien
aaagacgttcagtgacccctagcag

SEQ ID NO: 2448337 - DNA, 25 bp, Homo sapien
aaagcagcaccagaggtgatgacac

SEQ ID NO: 2448338 - DNA, 25 bp, Homo sapien
catgaatcccgttttcccatcagga

SEQ ID NO: 2448339 - DNA, 25 bp, Homo sapien
atgaatcccgttttcccatcaggac

SEQ ID NO: 2448340 - DNA, 25 bp, Homo sapien
tcatgaatcccgttttcccatcagg

SEQ ID NO: 2448341 - DNA, 25 bp, Homo sapien
ttcaattaaattctctgactttctc

SEQ ID NO: 2448342 - DNA, 25 bp, Homo sapien
tcttcaattaaattctctgactttc

SEQ ID NO: 2448343 - DNA, 25 bp, Homo sapien
aattaaattctctgactttctcaag

SEQ ID NO: 2448344 - DNA, 25 bp, Homo sapien
caattaaattctctgactttctcaa

SEQ ID NO: 2448345 - DNA, 25 bp, Homo sapien
aagcagcatgcgctgaaaacacctg

SEQ ID NO: 2448346 - DNA, 25 bp, Homo sapien
tcccctgctagcagccggaagaact

SEQ ID NO: 2448347 - DNA, 25 bp, Homo sapien
gaaaaggcagactcttgcgtcccct

SEQ ID NO: 2448348 - DNA, 25 bp, Homo sapien
tgcaggacactcatggtcaaggtga

SEQ ID NO: 2448349 - DNA, 25 bp, Homo sapien
atttctagtggacactggatttctc

SEQ ID NO: 2448350 - DNA, 25 bp, Homo sapien
tggatttctccgtgtcagtcaggct

SEQ ID NO: 2448351 - DNA, 25 bp, Homo sapien
tattcactagtaataaaccctataa

SEQ ID NO: 2448352 - DNA, 25 bp, Homo sapien
ttctattcactagtaataaacccta

SEQ ID NO: 2448353 - DNA, 25 bp, Homo sapien
aaaccaggaggcgagaatgagctga

SEQ ID NO: 2448354 - DNA, 25 bp, Homo sapien
caaattgggagaatcaccctaggtc

SEQ ID NO: 2448355 - DNA, 25 bp, Homo sapien
tgtcacttacgcaatgaaccagaat

SEQ ID NO: 2448356 - DNA, 25 bp, Homo sapien
cagaatgtcctgcatgtaccctgga

SEQ ID NO: 2448357 - DNA, 25 bp, Homo sapien
tctgacaaatctctgatgggcttct

SEQ ID NO: 2448358 - DNA, 25 bp, Homo sapien
actgagcccgtaaccatggaagtga

SEQ ID NO: 2448359 - DNA, 25 bp, Homo sapien
ccgtaaccatggaagtgataattga

SEQ ID NO: 2448360 - DNA, 25 bp, Homo sapien
gaatctgacaaatctctgatgggct

SEQ ID NO: 2448361 - DNA, 25 bp, Homo sapien
gaggaaagctctttaatttggatca

SEQ ID NO: 2448362 - DNA, 25 bp, Homo sapien
gtgtgaaattttcagtccaagacac

SEQ ID NO: 2448363 - DNA, 25 bp, Homo sapien
tttcagtccaagacacataagagac

SEQ ID NO: 2448364 - DNA, 25 bp, Homo sapien
tccaagacacataagagaccaggcc

SEQ ID NO: 2448365 - DNA, 25 bp, Homo sapien
ccttggcccgttccaacatcatttt

SEQ ID NO: 2448366 - DNA, 25 bp, Homo sapien
tctccttggcccgttccaacatcat

SEQ ID NO: 2448367 - DNA, 25 bp, Homo sapien
tggcccgttccaacatcattttaat

SEQ ID NO: 2448368 - DNA, 25 bp, Homo sapien
ttggcccgttccaacatcattttaa

SEQ ID NO: 2448369 - DNA, 25 bp, Homo sapien
ctgtcttgagaataccaaaatagta

SEQ ID NO: 2448370 - DNA, 25 bp, Homo sapien
tgcagactccgactccagtctctgg

SEQ ID NO: 2448371 - DNA, 25 bp, Homo sapien
agcaggagaaagcaacctgcagact

SEQ ID NO: 2448372 - DNA, 25 bp, Homo sapien
ccacaagtggagactgagttggcac

SEQ ID NO: 2448373 - DNA, 25 bp, Homo sapien
gactccagtctctggcgcttgggtt

SEQ ID NO: 2448374 - DNA, 25 bp, Homo sapien
caaggatttcccagacattgagcat

SEQ ID NO: 2448375 - DNA, 25 bp, Homo sapien
aggttccaaggatttcccagacatt

SEQ ID NO: 2448376 - DNA, 25 bp, Homo sapien
agctctacctttcttccaggttcca

SEQ ID NO: 2448377 - DNA, 25 bp, Homo sapien
ctctacctttcttccaggttccaag

SEQ ID NO: 2448378 - DNA, 25 bp, Homo sapien
tcttctcactagtaggctcttcttt

SEQ ID NO: 2448379 - DNA, 25 bp, Homo sapien
tcactagtaggctcttctttcatct

SEQ ID NO: 2448380 - DNA, 25 bp, Homo sapien
tccaacttcttctcactagtaggct

SEQ ID NO: 2448381 - DNA, 25 bp, Homo sapien
ttctcactagtaggctcttctttca

SEQ ID NO: 2448382 - DNA, 25 bp, Homo sapien
caggatgtgaagagcagatcaacag

SEQ ID NO: 2448383 - DNA, 25 bp, Homo sapien
ccaggatgtgaagagcagatcaaca

SEQ ID NO: 2448384 - DNA, 25 bp, Homo sapien
gatgtgaagagcagatcaacagggt

SEQ ID NO: 2448385 - DNA, 25 bp, Homo sapien
aggatgtgaagagcagatcaacagg

SEQ ID NO: 2448386 - DNA, 25 bp, Homo sapien
tatctgaagcttgcactgacccaga

SEQ ID NO: 2448387 - DNA, 25 bp, Homo sapien
aaatctttcttaagtctatctgaag

SEQ ID NO: 2448388 - DNA, 25 bp, Homo sapien
ctgtataagtccctgaaatctttct

SEQ ID NO: 2448389 - DNA, 25 bp, Homo sapien
ctgtgatctgtataagtccctgaaa

SEQ ID NO: 2448390 - DNA, 25 bp, Homo sapien
aaatggaggatcaaatggaaagtta

SEQ ID NO: 2448391 - DNA, 25 bp, Homo sapien
aatggaggatcaaatggaaagttat

SEQ ID NO: 2448392 - DNA, 25 bp, Homo sapien
atggaggatcaaatggaaagttatc

SEQ ID NO: 2448393 - DNA, 25 bp, Homo sapien
gctttaccctgactaaaattgcaag

SEQ ID NO: 2448394 - DNA, 25 bp, Homo sapien
aagctttaccctgactaaaattgca

SEQ ID NO: 2448395 - DNA, 25 bp, Homo sapien
taagctttaccctgactaaaattgc

SEQ ID NO: 2448396 - DNA, 25 bp, Homo sapien
ctttaccctgactaaaattgcaagc

SEQ ID NO: 2448397 - DNA, 25 bp, Homo sapien
caaaatacacagatagcatacctaa

SEQ ID NO: 2448398 - DNA, 25 bp, Homo sapien
taagaccactgattagatctatgtg

SEQ ID NO: 2448399 - DNA, 25 bp, Homo sapien
tttgaaatggcaatcagaacagaat

SEQ ID NO: 2448400 - DNA, 25 bp, Homo sapien
gcatacctaaagtaaaatcaaggga

SEQ ID NO: 2448401 - DNA, 25 bp, Homo sapien
caattttgtgagaggttccatacat

SEQ ID NO: 2448402 - DNA, 25 bp, Homo sapien
ccatacataatgctcctccacccaa

SEQ ID NO: 2448403 - DNA, 25 bp, Homo sapien
ttccatacataatgctcctccaccc

SEQ ID NO: 2448404 - DNA, 25 bp, Homo sapien
taatgctcctccacccaatacatac

SEQ ID NO: 2448405 - DNA, 25 bp, Homo sapien
gctgcagccaatttcccctgttgtg

SEQ ID NO: 2448406 - DNA, 25 bp, Homo sapien
tgcagccaatttcccctgttgtgtg

SEQ ID NO: 2448407 - DNA, 25 bp, Homo sapien
agccaatttcccctgttgtgtgttt

SEQ ID NO: 2448408 - DNA, 25 bp, Homo sapien
ggctgcagccaatttcccctgttgt

SEQ ID NO: 2448409 - DNA, 25 bp, Homo sapien
cctgtggtgactggcaagggcaagg

SEQ ID NO: 2448410 - DNA, 25 bp, Homo sapien
tgtggtgactggcaagggcaaggac

SEQ ID NO: 2448411 - DNA, 25 bp, Homo sapien
gctggtgttggggggcctagtctgg

SEQ ID NO: 2448412 - DNA, 25 bp, Homo sapien
ctgtggtgactggcaagggcaagga

SEQ ID NO: 2448413 - DNA, 25 bp, Homo sapien
catcggcttgatgcccaagttgccg

SEQ ID NO: 2448414 - DNA, 25 bp, Homo sapien
ccaggtcctcggagatgccagtcca

SEQ ID NO: 2448415 - DNA, 25 bp, Homo sapien
cacatcggcttgatgcccaagttgc

SEQ ID NO: 2448416 - DNA, 25 bp, Homo sapien
gggaggtcgagcttggggcagcaag

SEQ ID NO: 2448417 - DNA, 25 bp, Homo sapien
tctggaatgccagggctcttcctct

SEQ ID NO: 2448418 - DNA, 25 bp, Homo sapien
tctttttcctgttagctccttctgg

SEQ ID NO: 2448419 - DNA, 25 bp, Homo sapien
tgtcagggctactgccattgatttt

SEQ ID NO: 2448420 - DNA, 25 bp, Homo sapien
gctgtgtcagggctactgccattga

SEQ ID NO: 2448421 - DNA, 25 bp, Homo sapien
agggccctccctgtagatacctgct

SEQ ID NO: 2448422 - DNA, 25 bp, Homo sapien
gggccctccctgtagatacctgctg

SEQ ID NO: 2448423 - DNA, 25 bp, Homo sapien
tgaattgatgttttcactgagttga
